United States Patent Application Publication US 2005/0244851 A1 - sequence listing, part 50

SEQ ID NO: 1938823 - DNA, 25 bp, Homo sapien
tgcagatagactctggaaccaggca

SEQ ID NO: 1938824 - DNA, 25 bp, Homo sapien
gatacatgagtagatcttaccttag

SEQ ID NO: 1938825 - DNA, 25 bp, Homo sapien
ccttgcaagcttcatgggacctaga

SEQ ID NO: 1938826 - DNA, 25 bp, Homo sapien
gctaggtaactgaatgcaaaagaat

SEQ ID NO: 1938827 - DNA, 25 bp, Homo sapien
atcctagcacttcggcaggtcaagg

SEQ ID NO: 1938828 - DNA, 25 bp, Homo sapien
cctagcacttcggcaggtcaaggtg

SEQ ID NO: 1938829 - DNA, 25 bp, Homo sapien
agaggatgcagggaactgagatcgc

SEQ ID NO: 1938830 - DNA, 25 bp, Homo sapien
tctggaaggcagaggatgcagggaa

SEQ ID NO: 1938831 - DNA, 25 bp, Homo sapien
tactcaaagatcgttgtctgcgagg

SEQ ID NO: 1938832 - DNA, 25 bp, Homo sapien
catttcagaacaacaggctcagctt

SEQ ID NO: 1938833 - DNA, 25 bp, Homo sapien
aaatggcatgcaccaagtgtcctga

SEQ ID NO: 1938834 - DNA, 25 bp, Homo sapien
tgttccagtgcaaacagcctagtat

SEQ ID NO: 1938835 - DNA, 25 bp, Homo sapien
tgtagaacagtcccagcgccaccag

SEQ ID NO: 1938836 - DNA, 25 bp, Homo sapien
tgccaccagcccatatctttggggc

SEQ ID NO: 1938837 - DNA, 25 bp, Homo sapien
acagacaacggggttagtgccatca

SEQ ID NO: 1938838 - DNA, 25 bp, Homo sapien
acagtcctgcattctgccacaacag

SEQ ID NO: 1938839 - DNA, 25 bp, Homo sapien
gtcagtgaatgaatatgcagtaact

SEQ ID NO: 1938840 - DNA, 25 bp, Homo sapien
agagcccatccttgcattcttaagc

SEQ ID NO: 1938841 - DNA, 25 bp, Homo sapien
gtgcccaagaaaaacctgatgagtc

SEQ ID NO: 1938842 - DNA, 25 bp, Homo sapien
taactgaagccttccccgaagaagc

SEQ ID NO: 1938843 - DNA, 25 bp, Homo sapien
agtgatgcacttggccagaacacca

SEQ ID NO: 1938844 - DNA, 25 bp, Homo sapien
caccttgagttcagtcagaaagcac

SEQ ID NO: 1938845 - DNA, 25 bp, Homo sapien
tacattacattcttggccaagagca

SEQ ID NO: 1938846 - DNA, 25 bp, Homo sapien
gggcccactgaaagagtgatgcact

SEQ ID NO: 1938847 - DNA, 25 bp, Homo sapien
gtcccagttgcttcagaggccaaaa

SEQ ID NO: 1938848 - DNA, 25 bp, Homo sapien
cccagttgcttcagaggccaaaaca

SEQ ID NO: 1938849 - DNA, 25 bp, Homo sapien
gagctaagcaggttccactgcattc

SEQ ID NO: 1938850 - DNA, 25 bp, Homo sapien
ctacagtgagctaagcaggttccac

SEQ ID NO: 1938851 - DNA, 25 bp, Homo sapien
cctgatgtactttgagctctgaata

SEQ ID NO: 1938852 - DNA, 25 bp, Homo sapien
caaggtgctccccatgcctcttgaa

SEQ ID NO: 1938853 - DNA, 25 bp, Homo sapien
ggttcttcacctgatgtactttgag

SEQ ID NO: 1938854 - DNA, 25 bp, Homo sapien
ccatgcctcttgaacttgtagattc

SEQ ID NO: 1938855 - DNA, 25 bp, Homo sapien
aattctgctgcgagtggtcctccat

SEQ ID NO: 1938856 - DNA, 25 bp, Homo sapien
gaattctgctgcgagtggtcctcca

SEQ ID NO: 1938857 - DNA, 25 bp, Homo sapien
gcatggcctaagtagttaaccttaa

SEQ ID NO: 1938858 - DNA, 25 bp, Homo sapien
tgcatggcctaagtagttaacctta

SEQ ID NO: 1938859 - DNA, 25 bp, Homo sapien
ctgcatggcctaagtagttaacctt

SEQ ID NO: 1938860 - DNA, 25 bp, Homo sapien
agactgatgctcactgcaggccaac

SEQ ID NO: 1938861 - DNA, 25 bp, Homo sapien
gaaaagcttctgagccgcagtcctg

SEQ ID NO: 1938862 - DNA, 25 bp, Homo sapien
tataataacactcaccttgcaggga

SEQ ID NO: 1938863 - DNA, 25 bp, Homo sapien
gcagctattcacctgtcagagttca

SEQ ID NO: 1938864 - DNA, 25 bp, Homo sapien
gctgggtggaatgtaggcagggagg

SEQ ID NO: 1938865 - DNA, 25 bp, Homo sapien
tgatctctttcttgggtatctctgg

SEQ ID NO: 1938866 - DNA, 25 bp, Homo sapien
tttcttgggtatctctggatccatc

SEQ ID NO: 1938867 - DNA, 25 bp, Homo sapien
ctgtgtcctcactatctttttgatc

SEQ ID NO: 1938868 - DNA, 25 bp, Homo sapien
aagaagtataaccagccactgtgtc

SEQ ID NO: 1938869 - DNA, 25 bp, Homo sapien
ctttttaacaggtaatgctttagca

SEQ ID NO: 1938870 - DNA, 25 bp, Homo sapien
ttttaacaggtaatgctttagcatg

SEQ ID NO: 1938871 - DNA, 25 bp, Homo sapien
tttaacaggtaatgctttagcatgg

SEQ ID NO: 1938872 - DNA, 25 bp, Homo sapien
gctttttaacaggtaatgctttagc

SEQ ID NO: 1938873 - DNA, 25 bp, Homo sapien
gatgagattcctgatggtaagagaa

SEQ ID NO: 1938874 - DNA, 25 bp, Homo sapien
ccacagaaggacgatttcaatgagt

SEQ ID NO: 1938875 - DNA, 25 bp, Homo sapien
ggatgagattcctgatggtaagaga

SEQ ID NO: 1938876 - DNA, 25 bp, Homo sapien
tgatccaaacaatggctcgtgccca

SEQ ID NO: 1938877 - DNA, 25 bp, Homo sapien
gactacttgtgaagcctttgggcgg

SEQ ID NO: 1938878 - DNA, 25 bp, Homo sapien
ccaaaagcgtttccgtgaatagcgt

SEQ ID NO: 1938879 - DNA, 25 bp, Homo sapien
ggtatgcattgtagcgacacggact

SEQ ID NO: 1938880 - DNA, 25 bp, Homo sapien
gttctcccgactctggaccgacgtg

SEQ ID NO: 1938881 - DNA, 25 bp, Homo sapien
tggcacatccgaggcgttctcccga

SEQ ID NO: 1938882 - DNA, 25 bp, Homo sapien
tctggaccgacgtgatgggtatcct

SEQ ID NO: 1938883 - DNA, 25 bp, Homo sapien
cgtgatgggtatcctggtaagttac

SEQ ID NO: 1938884 - DNA, 25 bp, Homo sapien
cttctgtatggagggtgaagtttta

SEQ ID NO: 1938885 - DNA, 25 bp, Homo sapien
cctgctcagggttgaataccttggg

SEQ ID NO: 1938886 - DNA, 25 bp, Homo sapien
ctggatttggcatagtctctgggaa

SEQ ID NO: 1938887 - DNA, 25 bp, Homo sapien
aaatgtccagtgactaaaagcgccc

SEQ ID NO: 1938888 - DNA, 25 bp, Homo sapien
tagatgtcttgcagggagacaccag

SEQ ID NO: 1938889 - DNA, 25 bp, Homo sapien
tgctcctttgtagatgtcttgcagg

SEQ ID NO: 1938890 - DNA, 25 bp, Homo sapien
ttgtagatgtcttgcagggagacac

SEQ ID NO: 1938891 - DNA, 25 bp, Homo sapien
agatgtcttgcagggagacaccagg

SEQ ID NO: 1938892 - DNA, 25 bp, Homo sapien
ttactgaggtcctttgcatgcagct

SEQ ID NO: 1938893 - DNA, 25 bp, Homo sapien
gctcagccatacaacccttccctct

SEQ ID NO: 1938894 - DNA, 25 bp, Homo sapien
tcagccatacaacccttccctctgc

SEQ ID NO: 1938895 - DNA, 25 bp, Homo sapien
gccatacaacccttccctctgccac

SEQ ID NO: 1938896 - DNA, 25 bp, Homo sapien
taagtaggagttcccagagaggtct

SEQ ID NO: 1938897 - DNA, 25 bp, Homo sapien
cagatctcccagatctgggtgctga

SEQ ID NO: 1938898 - DNA, 25 bp, Homo sapien
ttgctggataaggtttgtgggcacc

SEQ ID NO: 1938899 - DNA, 25 bp, Homo sapien
tgtgggcaccggtgaaagaggccat

SEQ ID NO: 1938900 - DNA, 25 bp, Homo sapien
taagcctgtaatgaataaacctgcc

SEQ ID NO: 1938901 - DNA, 25 bp, Homo sapien
cgtgaatatggcagaaaatgggact

SEQ ID NO: 1938902 - DNA, 25 bp, Homo sapien
taagagtcttaggtttccagtcaag

SEQ ID NO: 1938903 - DNA, 25 bp, Homo sapien
taacaatggccccaccagacttatg

SEQ ID NO: 1938904 - DNA, 25 bp, Homo sapien
attgctggctgactttggcttctgc

SEQ ID NO: 1938905 - DNA, 25 bp, Homo sapien
ggcttctgcagattttagacttcca

SEQ ID NO: 1938906 - DNA, 25 bp, Homo sapien
gcagattttagacttccaaactcat

SEQ ID NO: 1938907 - DNA, 25 bp, Homo sapien
taaccataattcaacaattgctggc

SEQ ID NO: 1938908 - DNA, 25 bp, Homo sapien
ccacgacatcgggaaagtcagcctc

SEQ ID NO: 1938909 - DNA, 25 bp, Homo sapien
tcattgtaaccagcttgagacaggc

SEQ ID NO: 1938910 - DNA, 25 bp, Homo sapien
aatagaaaggcctacttccacgaca

SEQ ID NO: 1938911 - DNA, 25 bp, Homo sapien
cagcttgagacaggctccagaacag

SEQ ID NO: 1938912 - DNA, 25 bp, Homo sapien
tagggatatggccagactcttaact

SEQ ID NO: 1938913 - DNA, 25 bp, Homo sapien
aagtcacccctccttagatgcttgg

SEQ ID NO: 1938914 - DNA, 25 bp, Homo sapien
gagaagcacactgatattgtaccag

SEQ ID NO: 1938915 - DNA, 25 bp, Homo sapien
taccagtgccttggttgtgacagat

SEQ ID NO: 1938916 - DNA, 25 bp, Homo sapien
tagcaatcctcagttgagtctgacc

SEQ ID NO: 1938917 - DNA, 25 bp, Homo sapien
gcaatcctcagttgagtctgaccat

SEQ ID NO: 1938918 - DNA, 25 bp, Homo sapien
ttttagcaatcctcagttgagtctg

SEQ ID NO: 1938919 - DNA, 25 bp, Homo sapien
aatcctcagttgagtctgaccatgc

SEQ ID NO: 1938920 - DNA, 25 bp, Homo sapien
caaagaattgtttagccagaggccc

SEQ ID NO: 1938921 - DNA, 25 bp, Homo sapien
tgtttacgtcctcgggctgaaccac

SEQ ID NO: 1938922 - DNA, 25 bp, Homo sapien
gagccaccgcttagcttggttttta

SEQ ID NO: 1938923 - DNA, 25 bp, Homo sapien
aagttttagttgtctgagccaccgc

SEQ ID NO: 1938924 - DNA, 25 bp, Homo sapien
ccagtgccttgtgcttactgtcatt

SEQ ID NO: 1938925 - DNA, 25 bp, Homo sapien
tcattctcttggcgatctccttgaa

SEQ ID NO: 1938926 - DNA, 25 bp, Homo sapien
ttctcttggcgatctccttgaatgt

SEQ ID NO: 1938927 - DNA, 25 bp, Homo sapien
ctcttggcgatctccttgaatgttg

SEQ ID NO: 1938928 - DNA, 25 bp, Homo sapien
agttaattctaatggcctactgaga

SEQ ID NO: 1938929 - DNA, 25 bp, Homo sapien
agttcttggaggacagttaattcta

SEQ ID NO: 1938930 - DNA, 25 bp, Homo sapien
ggcctactgagaatctttgtttcct

SEQ ID NO: 1938931 - DNA, 25 bp, Homo sapien
ggcctgagtttgctcctggaggtca

SEQ ID NO: 1938932 - DNA, 25 bp, Homo sapien
caaccttagctgtataaaagcagag

SEQ ID NO: 1938933 - DNA, 25 bp, Homo sapien
taaaagcagagggttaccagcgtca

SEQ ID NO: 1938934 - DNA, 25 bp, Homo sapien
tggagttttggcaatagcaccaaga

SEQ ID NO: 1938935 - DNA, 25 bp, Homo sapien
gcaccaagaaacagttgcttcaacc

SEQ ID NO: 1938936 - DNA, 25 bp, Homo sapien
ggaaatcagccagagtcaagctcag

SEQ ID NO: 1938937 - DNA, 25 bp, Homo sapien
gctgtgtgaggaaatcagccagagt

SEQ ID NO: 1938938 - DNA, 25 bp, Homo sapien
agctgtgtgaggaaatcagccagag

SEQ ID NO: 1938939 - DNA, 25 bp, Homo sapien
tgaggaaatcagccagagtcaagct

SEQ ID NO: 1938940 - DNA, 25 bp, Homo sapien
agtgagccaagatcatgccgcttta

SEQ ID NO: 1938941 - DNA, 25 bp, Homo sapien
agccaagatcatgccgctttactcc

SEQ ID NO: 1938942 - DNA, 25 bp, Homo sapien
tgagccaagatcatgccgctttact

SEQ ID NO: 1938943 - DNA, 25 bp, Homo sapien
cagtgagccaagatcatgccgcttt

SEQ ID NO: 1938944 - DNA, 25 bp, Homo sapien
cacacttcatgattactatgttttt

SEQ ID NO: 1938945 - DNA, 25 bp, Homo sapien
agcatcctgccattgtttcatcctc

SEQ ID NO: 1938946 - DNA, 25 bp, Homo sapien
gcatcctgccattgtttcatcctca

SEQ ID NO: 1938947 - DNA, 25 bp, Homo sapien
tcccactcacacttcatgattacta

SEQ ID NO: 1938948 - DNA, 25 bp, Homo sapien
tgtacccttgcatagagaacagtgc

SEQ ID NO: 1938949 - DNA, 25 bp, Homo sapien
ataaatatacccacgtcacccgcag

SEQ ID NO: 1938950 - DNA, 25 bp, Homo sapien
gcagcccagcatgatagagaacaca

SEQ ID NO: 1938951 - DNA, 25 bp, Homo sapien
tcctgtcccttctagtgggtcctgc

SEQ ID NO: 1938952 - DNA, 25 bp, Homo sapien
tgcaaacacaaattaaaggaaggaa

SEQ ID NO: 1938953 - DNA, 25 bp, Homo sapien
cctagtgtaactctgcaatccaaaa

SEQ ID NO: 1938954 - DNA, 25 bp, Homo sapien
tgaagaaactgacaggccactactg

SEQ ID NO: 1938955 - DNA, 25 bp, Homo sapien
tgaaaatacacatcccatgcagtaa

SEQ ID NO: 1938956 - DNA, 25 bp, Homo sapien
ttgagacggaggcttgcactgtccc

SEQ ID NO: 1938957 - DNA, 25 bp, Homo sapien
tttgagacggaggcttgcactgtcc

SEQ ID NO: 1938958 - DNA, 25 bp, Homo sapien
gagacggaggcttgcactgtccccc

SEQ ID NO: 1938959 - DNA, 25 bp, Homo sapien
gacggaggcttgcactgtcccccag

SEQ ID NO: 1938960 - DNA, 25 bp, Homo sapien
ggtatgttttatctggcaagctgat

SEQ ID NO: 1938961 - DNA, 25 bp, Homo sapien
caatgcttcgctctcaggtatgttt

SEQ ID NO: 1938962 - DNA, 25 bp, Homo sapien
ccttggacaatgcttcgctctcagg

SEQ ID NO: 1938963 - DNA, 25 bp, Homo sapien
tctggcaagctgattactcttttga

SEQ ID NO: 1938964 - DNA, 25 bp, Homo sapien
caatgggggcgactaggaaacaaca

SEQ ID NO: 1938965 - DNA, 25 bp, Homo sapien
taactgcgtccacacgtgtgtgtgc

SEQ ID NO: 1938966 - DNA, 25 bp, Homo sapien
tagagcctgtgcagtagcaatgcgc

SEQ ID NO: 1938967 - DNA, 25 bp, Homo sapien
gaagcgtgcgtttgtgcaggcataa

SEQ ID NO: 1938968 - DNA, 25 bp, Homo sapien
cgtgtccatgctgcccgttgggaga

SEQ ID NO: 1938969 - DNA, 25 bp, Homo sapien
agattcagggctgccgcgtgtccat

SEQ ID NO: 1938970 - DNA, 25 bp, Homo sapien
tccaggctgcacaacggcctgcgtg

SEQ ID NO: 1938971 - DNA, 25 bp, Homo sapien
ggttgttggtcactgtgctgtggca

SEQ ID NO: 1938972 - DNA, 25 bp, Homo sapien
gacatcatgggaatttgcccgggcg

SEQ ID NO: 1938973 - DNA, 25 bp, Homo sapien
tctgacagcagaggccgaaactttc

SEQ ID NO: 1938974 - DNA, 25 bp, Homo sapien
tctggcagaacttccgaaagaacca

SEQ ID NO: 1938975 - DNA, 25 bp, Homo sapien
tgggaagaatcctatgcggctaatc

SEQ ID NO: 1938976 - DNA, 25 bp, Homo sapien
gacttacggcttctgggatgaacac

SEQ ID NO: 1938977 - DNA, 25 bp, Homo sapien
gatttgctctggataacactacccc

SEQ ID NO: 1938978 - DNA, 25 bp, Homo sapien
ttcatcagctccagaaactagcgcc

SEQ ID NO: 1938979 - DNA, 25 bp, Homo sapien
gtagagctgtagattaccttcccaa

SEQ ID NO: 1938980 - DNA, 25 bp, Homo sapien
tcccacatcggaattcctatatctc

SEQ ID NO: 1938981 - DNA, 25 bp, Homo sapien
tcgcggttgaccttaacattaatca

SEQ ID NO: 1938982 - DNA, 25 bp, Homo sapien
gagatgagtcttcccacatcggaat

SEQ ID NO: 1938983 - DNA, 25 bp, Homo sapien
tctctgtgtttttctcttgcggttg

SEQ ID NO: 1938984 - DNA, 25 bp, Homo sapien
gaaacagtgtggctacggtgcacac

SEQ ID NO: 1938985 - DNA, 25 bp, Homo sapien
aatcttttgaggcagccgtgaccca

SEQ ID NO: 1938986 - DNA, 25 bp, Homo sapien
gagaaggtccccacttacaggcaaa

SEQ ID NO: 1938987 - DNA, 25 bp, Homo sapien
tactttgatggctaaatactactgc

SEQ ID NO: 1938988 - DNA, 25 bp, Homo sapien
cctcccagatcccagttaagcaatt

SEQ ID NO: 1938989 - DNA, 25 bp, Homo sapien
cccagatcccagttaagcaattctc

SEQ ID NO: 1938990 - DNA, 25 bp, Homo sapien
tgcctcccagatcccagttaagcaa

SEQ ID NO: 1938991 - DNA, 25 bp, Homo sapien
ttctgcctcccagatcccagttaag

SEQ ID NO: 1938992 - DNA, 25 bp, Homo sapien
gatgcgccatgcctgccagtgaaaa

SEQ ID NO: 1938993 - DNA, 25 bp, Homo sapien
caggagcacggtgtgaagctgggcc

SEQ ID NO: 1938994 - DNA, 25 bp, Homo sapien
gagaacgccttgctaacggactcca

SEQ ID NO: 1938995 - DNA, 25 bp, Homo sapien
agctgggcccggctttgaccaggaa

SEQ ID NO: 1938996 - DNA, 25 bp, Homo sapien
gcttagctaggccaaagtaacagac

SEQ ID NO: 1938997 - DNA, 25 bp, Homo sapien
tgtcatcttgcaggatgcccgaggg

SEQ ID NO: 1938998 - DNA, 25 bp, Homo sapien
gagttattgtacattactgaccacg

SEQ ID NO: 1938999 - DNA, 25 bp, Homo sapien
gatgccaactggctgcgaatgctct

SEQ ID NO: 1939000 - DNA, 25 bp, Homo sapien
ctgtcctcttttagtctagtgtctg

SEQ ID NO: 1939001 - DNA, 25 bp, Homo sapien
acaagtaaactattatggtttccat

SEQ ID NO: 1939002 - DNA, 25 bp, Homo sapien
tccattgcttacaaaatgattttcc

SEQ ID NO: 1939003 - DNA, 25 bp, Homo sapien
cattcttatcatgaacactatttta

SEQ ID NO: 1939004 - DNA, 25 bp, Homo sapien
gcagttcggctcaggtagctacaca

SEQ ID NO: 1939005 - DNA, 25 bp, Homo sapien
caaaaaaggtcaacttgccaagtca

SEQ ID NO: 1939006 - DNA, 25 bp, Homo sapien
caagtcactgctgccatgtgtgtac

SEQ ID NO: 1939007 - DNA, 25 bp, Homo sapien
taagatattgtttcatggccttgcc

SEQ ID NO: 1939008 - DNA, 25 bp, Homo sapien
tcacatgtgcaggtgctaaatgtat

SEQ ID NO: 1939009 - DNA, 25 bp, Homo sapien
tacttttaatgtcgggtcaccttca

SEQ ID NO: 1939010 - DNA, 25 bp, Homo sapien
tagctcatcaccgaaatccacacgg

SEQ ID NO: 1939011 - DNA, 25 bp, Homo sapien
ggtggttttgtgaacgtgtagctca

SEQ ID NO: 1939012 - DNA, 25 bp, Homo sapien
cgagcgagccgctgctgcagtgcgt

SEQ ID NO: 1939013 - DNA, 25 bp, Homo sapien
ttcggcctccgtcttgccgagcgag

SEQ ID NO: 1939014 - DNA, 25 bp, Homo sapien
agccgctgctgcagtgcgtggccgc

SEQ ID NO: 1939015 - DNA, 25 bp, Homo sapien
caggtttcggcctccgtcttgccga

SEQ ID NO: 1939016 - DNA, 25 bp, Homo sapien
tggaggccgagccagctcgccggga

SEQ ID NO: 1939017 - DNA, 25 bp, Homo sapien
ggccgagccagctcgccgggaggcg

SEQ ID NO: 1939018 - DNA, 25 bp, Homo sapien
ctggaggccgagccagctcgccggg

SEQ ID NO: 1939019 - DNA, 25 bp, Homo sapien
gaggccgagccagctcgccgggagg

SEQ ID NO: 1939020 - DNA, 25 bp, Homo sapien
tgtgtgtgcgcaggcgccctcttgc

SEQ ID NO: 1939021 - DNA, 25 bp, Homo sapien
gatgatgggtgaccgatggaactcc

SEQ ID NO: 1939022 - DNA, 25 bp, Homo sapien
ctggctgctttcatgaccggagctg

SEQ ID NO: 1939023 - DNA, 25 bp, Homo sapien
gcgagacctggagtcctgtaaccaa

SEQ ID NO: 1939024 - DNA, 25 bp, Homo sapien
gtgagggaacaccagccgcattttt

SEQ ID NO: 1939025 - DNA, 25 bp, Homo sapien
gaagccggattaggtcactccaagg

SEQ ID NO: 1939026 - DNA, 25 bp, Homo sapien
tagtgaacgtacacactcctgagag

SEQ ID NO: 1939027 - DNA, 25 bp, Homo sapien
tagcctagcagtataagagcagctg

SEQ ID NO: 1939028 - DNA, 25 bp, Homo sapien
ccttcacaggatgcctgtgcaccga

SEQ ID NO: 1939029 - DNA, 25 bp, Homo sapien
cacaggatgcctgtgcaccgaacac

SEQ ID NO: 1939030 - DNA, 25 bp, Homo sapien
cgaacaccgagatccccactttata

SEQ ID NO: 1939031 - DNA, 25 bp, Homo sapien
tgcctgtgcaccgaacaccgagatc

SEQ ID NO: 1939032 - DNA, 25 bp, Homo sapien
aacccgtgagagatgtataattcga

SEQ ID NO: 1939033 - DNA, 25 bp, Homo sapien
tataattcgagattttttgcacgga

SEQ ID NO: 1939034 - DNA, 25 bp, Homo sapien
cttaattgcgaggtgtgacgaggca

SEQ ID NO: 1939035 - DNA, 25 bp, Homo sapien
tgccctttggcttaacaactactga

SEQ ID NO: 1939036 - DNA, 25 bp, Homo sapien
tctcttcttgacaggtggagggata

SEQ ID NO: 1939037 - DNA, 25 bp, Homo sapien
ctctctctcttcttgacaggtggag

SEQ ID NO: 1939038 - DNA, 25 bp, Homo sapien
tctctcttcttgacaggtggaggga

SEQ ID NO: 1939039 - DNA, 25 bp, Homo sapien
ctcttcttgacaggtggagggatag

SEQ ID NO: 1939040 - DNA, 25 bp, Homo sapien
tggaatagctcttctgagattcatt

SEQ ID NO: 1939041 - DNA, 25 bp, Homo sapien
ctatcccatgtgccaaggtgaaaat

SEQ ID NO: 1939042 - DNA, 25 bp, Homo sapien
ccacttccccattggctaattccag

SEQ ID NO: 1939043 - DNA, 25 bp, Homo sapien
tctggaatagctcttctgagattca

SEQ ID NO: 1939044 - DNA, 25 bp, Homo sapien
ttcctgtccagattcacttgctcat

SEQ ID NO: 1939045 - DNA, 25 bp, Homo sapien
tcctgtccagattcacttgctcata

SEQ ID NO: 1939046 - DNA, 25 bp, Homo sapien
cttcctgtccagattcacttgctca

SEQ ID NO: 1939047 - DNA, 25 bp, Homo sapien
gataaagcttcctgtccagattcac

SEQ ID NO: 1939048 - DNA, 25 bp, Homo sapien
tctggccctggctgtggtacaccat

SEQ ID NO: 1939049 - DNA, 25 bp, Homo sapien
gaatccagggtctattttgtaagta

SEQ ID NO: 1939050 - DNA, 25 bp, Homo sapien
ttgatgggctgcaccataaccttct

SEQ ID NO: 1939051 - DNA, 25 bp, Homo sapien
aagatgaggttgatgggctgcacca

SEQ ID NO: 1939052 - DNA, 25 bp, Homo sapien
tccactggtactccccgaaccaagc

SEQ ID NO: 1939053 - DNA, 25 bp, Homo sapien
cgaaccaagcttcggtggcacccta

SEQ ID NO: 1939054 - DNA, 25 bp, Homo sapien
cggtggcaccctacagttcttagtg

SEQ ID NO: 1939055 - DNA, 25 bp, Homo sapien
ccctacagttcttagtgagttccat

SEQ ID NO: 1939056 - DNA, 25 bp, Homo sapien
ttctgtggaaatgaggcagcgactt

SEQ ID NO: 1939057 - DNA, 25 bp, Homo sapien
tgctgacgcccttcaagtgacacgg

SEQ ID NO: 1939058 - DNA, 25 bp, Homo sapien
ccctccaagcagcaaggagttctgt

SEQ ID NO: 1939059 - DNA, 25 bp, Homo sapien
gcctgtgcggagctatgaagcctga

SEQ ID NO: 1939060 - DNA, 25 bp, Homo sapien
tccgatttgacacagacaattctct

SEQ ID NO: 1939061 - DNA, 25 bp, Homo sapien
tagaaaagcgtcctgagtggtggct

SEQ ID NO: 1939062 - DNA, 25 bp, Homo sapien
catgcatagaaaagcgtcctgagtg

SEQ ID NO: 1939063 - DNA, 25 bp, Homo sapien
tggtggctgccggactccgatttga

SEQ ID NO: 1939064 - DNA, 25 bp, Homo sapien
ccttccatggtgacatgggaagcat

SEQ ID NO: 1939065 - DNA, 25 bp, Homo sapien
ccatggtgacatgggaagcatccat

SEQ ID NO: 1939066 - DNA, 25 bp, Homo sapien
ttccatggtgacatgggaagcatcc

SEQ ID NO: 1939067 - DNA, 25 bp, Homo sapien
tgggaagcatccattgaagaaggtg

SEQ ID NO: 1939068 - DNA, 25 bp, Homo sapien
gacttagagtgagcattttgaatat

SEQ ID NO: 1939069 - DNA, 25 bp, Homo sapien
gtcaagagcgcttagaagcaggaaa

SEQ ID NO: 1939070 - DNA, 25 bp, Homo sapien
ctcagacttagagtgagcattttga

SEQ ID NO: 1939071 - DNA, 25 bp, Homo sapien
tcagtcaagagcgcttagaagcagg

SEQ ID NO: 1939072 - DNA, 25 bp, Homo sapien
cagttgagctagcttcagtgggttt

SEQ ID NO: 1939073 - DNA, 25 bp, Homo sapien
ttagattccaagacgcatctcagtg

SEQ ID NO: 1939074 - DNA, 25 bp, Homo sapien
atctcagtgtcataaatctcctctg

SEQ ID NO: 1939075 - DNA, 25 bp, Homo sapien
tctgcagttgagctagcttcagtgg

SEQ ID NO: 1939076 - DNA, 25 bp, Homo sapien
tgctgagactgagtgagtgaagcct

SEQ ID NO: 1939077 - DNA, 25 bp, Homo sapien
atgccactcggccactgtgggcctg

SEQ ID NO: 1939078 - DNA, 25 bp, Homo sapien
gttggatgccactcggccactgtgg

SEQ ID NO: 1939079 - DNA, 25 bp, Homo sapien
gctgctgagactgagtgagtgaagc

SEQ ID NO: 1939080 - DNA, 25 bp, Homo sapien
cagggcagtcccttcaccctgaaat

SEQ ID NO: 1939081 - DNA, 25 bp, Homo sapien
aatctccttgggatctctgtagaca

SEQ ID NO: 1939082 - DNA, 25 bp, Homo sapien
tagacatagagatcaggcacgacct

SEQ ID NO: 1939083 - DNA, 25 bp, Homo sapien
gtagcagtacactcaggagccaggg

SEQ ID NO: 1939084 - DNA, 25 bp, Homo sapien
ccatgcatatgcagaacttccaggc

SEQ ID NO: 1939085 - DNA, 25 bp, Homo sapien
catgcatatgcagaacttccaggct

SEQ ID NO: 1939086 - DNA, 25 bp, Homo sapien
gcaatgtccacagcgcagacgagaa

SEQ ID NO: 1939087 - DNA, 25 bp, Homo sapien
ttcaagagtgaaacaatgaaacagc

SEQ ID NO: 1939088 - DNA, 25 bp, Homo sapien
tccacagcgcagacgagaatctgtg

SEQ ID NO: 1939089 - DNA, 25 bp, Homo sapien
gggatcagtaattgccaagagccat

SEQ ID NO: 1939090 - DNA, 25 bp, Homo sapien
caacaatggcgccagctgccagaag

SEQ ID NO: 1939091 - DNA, 25 bp, Homo sapien
caatggcgccagctgccagaagaag

SEQ ID NO: 1939092 - DNA, 25 bp, Homo sapien
gcgccagctgccagaagaagcttct

SEQ ID NO: 1939093 - DNA, 25 bp, Homo sapien
aatggcgccagctgccagaagaagc

SEQ ID NO: 1939094 - DNA, 25 bp, Homo sapien
tcagatttaggaagcagatgctttc

SEQ ID NO: 1939095 - DNA, 25 bp, Homo sapien
ctgttcagatttaggaagcagatgc

SEQ ID NO: 1939096 - DNA, 25 bp, Homo sapien
agatttaggaagcagatgctttcac

SEQ ID NO: 1939097 - DNA, 25 bp, Homo sapien
tgttcagatttaggaagcagatgct

SEQ ID NO: 1939098 - DNA, 25 bp, Homo sapien
ttccttttataggtgtactgttcca

SEQ ID NO: 1939099 - DNA, 25 bp, Homo sapien
tccttttataggtgtactgttccat

SEQ ID NO: 1939100 - DNA, 25 bp, Homo sapien
ttgatgccacctaattgggtccctg

SEQ ID NO: 1939101 - DNA, 25 bp, Homo sapien
gttgatgccacctaattgggtccct

SEQ ID NO: 1939102 - DNA, 25 bp, Homo sapien
ggttgatgccacctaattgggtccc

SEQ ID NO: 1939103 - DNA, 25 bp, Homo sapien
caaagccacatgcagattcatcaaa

SEQ ID NO: 1939104 - DNA, 25 bp, Homo sapien
tcatcaaaaagagacaaagcttcat

SEQ ID NO: 1939105 - DNA, 25 bp, Homo sapien
catgcagattcatcaaaaagagaca

SEQ ID NO: 1939106 - DNA, 25 bp, Homo sapien
cagattcatcaaaaagagacaaagc

SEQ ID NO: 1939107 - DNA, 25 bp, Homo sapien
tttccaagggccataggagaggaca

SEQ ID NO: 1939108 - DNA, 25 bp, Homo sapien
gataaaatttgctgggacgatgaac

SEQ ID NO: 1939109 - DNA, 25 bp, Homo sapien
agcattctgaactgtgaagataaaa

SEQ ID NO: 1939110 - DNA, 25 bp, Homo sapien
gaacctctttagtagattccactgc

SEQ ID NO: 1939111 - DNA, 25 bp, Homo sapien
agtggaatccaacaccagggagcag

SEQ ID NO: 1939112 - DNA, 25 bp, Homo sapien
caggctctgaactgagccaaagcag

SEQ ID NO: 1939113 - DNA, 25 bp, Homo sapien
tgaactgagccaaagcagaagtgga

SEQ ID NO: 1939114 - DNA, 25 bp, Homo sapien
gaagggcctctcctgactgaaactc

SEQ ID NO: 1939115 - DNA, 25 bp, Homo sapien
catagaggcttcgtggtcaacggtg

SEQ ID NO: 1939116 - DNA, 25 bp, Homo sapien
cagtacacaagactctacatctggg

SEQ ID NO: 1939117 - DNA, 25 bp, Homo sapien
gcttgataccgccatagaggcttcg

SEQ ID NO: 1939118 - DNA, 25 bp, Homo sapien
agcacagtgttgtgccagtttcaca

SEQ ID NO: 1939119 - DNA, 25 bp, Homo sapien
tgtggtcgtaggcagaggtctgtgc

SEQ ID NO: 1939120 - DNA, 25 bp, Homo sapien
tggtcgtaggcagaggtctgtgcct

SEQ ID NO: 1939121 - DNA, 25 bp, Homo sapien
gctgaagctgtggtcgtaggcagag

SEQ ID NO: 1939122 - DNA, 25 bp, Homo sapien
aagctgtggtcgtaggcagaggtct

SEQ ID NO: 1939123 - DNA, 25 bp, Homo sapien
cagggccagcagagcagtctgctcc

SEQ ID NO: 1939124 - DNA, 25 bp, Homo sapien
gggccagcagagcagtctgctccca

SEQ ID NO: 1939125 - DNA, 25 bp, Homo sapien
cagcagagcagtctgctcccaagga

SEQ ID NO: 1939126 - DNA, 25 bp, Homo sapien
gccagcagagcagtctgctcccaag

SEQ ID NO: 1939127 - DNA, 25 bp, Homo sapien
attagaaggccttgtggcaatggta

SEQ ID NO: 1939128 - DNA, 25 bp, Homo sapien
ttaaaataacatcatttaaaagaga

SEQ ID NO: 1939129 - DNA, 25 bp, Homo sapien
cttaaaataacatcatttaaaagag

SEQ ID NO: 1939130 - DNA, 25 bp, Homo sapien
taaaataacatcatttaaaagagat

SEQ ID NO: 1939131 - DNA, 25 bp, Homo sapien
gtaaacaattctcaccctatgcttt

SEQ ID NO: 1939132 - DNA, 25 bp, Homo sapien
gttattgccgcaagcatcactttgt

SEQ ID NO: 1939133 - DNA, 25 bp, Homo sapien
ctccaggttgtctttcaatggctct

SEQ ID NO: 1939134 - DNA, 25 bp, Homo sapien
gctctggttattgccgcaagcatca

SEQ ID NO: 1939135 - DNA, 25 bp, Homo sapien
tctttcaatggctctggttattgcc

SEQ ID NO: 1939136 - DNA, 25 bp, Homo sapien
tctgcaccccattcgaggcacagct

SEQ ID NO: 1939137 - DNA, 25 bp, Homo sapien
tgcaccccattcgaggcacagctcc

SEQ ID NO: 1939138 - DNA, 25 bp, Homo sapien
ctgcaccccattcgaggcacagctc

SEQ ID NO: 1939139 - DNA, 25 bp, Homo sapien
ctctgcaccccattcgaggcacagc

SEQ ID NO: 1939140 - DNA, 25 bp, Homo sapien
cttgattctggtgtgttaggttcag

SEQ ID NO: 1939141 - DNA, 25 bp, Homo sapien
tgttaggttcagttcacaggagcta

SEQ ID NO: 1939142 - DNA, 25 bp, Homo sapien
tcttggctggaattcggagacccgg

SEQ ID NO: 1939143 - DNA, 25 bp, Homo sapien
tcttgcagatacaatgatgctgcct

SEQ ID NO: 1939144 - DNA, 25 bp, Homo sapien
tattctgtagtaagatgttctagca

SEQ ID NO: 1939145 - DNA, 25 bp, Homo sapien
tgtagtaagatgttctagcatagat

SEQ ID NO: 1939146 - DNA, 25 bp, Homo sapien
tatattctgtagtaagatgttctag

SEQ ID NO: 1939147 - DNA, 25 bp, Homo sapien
tctgtagtaagatgttctagcatag

SEQ ID NO: 1939148 - DNA, 25 bp, Homo sapien
cagggcctgctttgtttgtactccc

SEQ ID NO: 1939149 - DNA, 25 bp, Homo sapien
tttgtttgtactcccagccacacgg

SEQ ID NO: 1939150 - DNA, 25 bp, Homo sapien
tgctttgtttgtactcccagccaca

SEQ ID NO: 1939151 - DNA, 25 bp, Homo sapien
gcagggcctgctttgtttgtactcc

SEQ ID NO: 1939152 - DNA, 25 bp, Homo sapien
tgaaagtcttcacgtagaattttcc

SEQ ID NO: 1939153 - DNA, 25 bp, Homo sapien
ggatctcgcacctttattcgtatca

SEQ ID NO: 1939154 - DNA, 25 bp, Homo sapien
tcgccctttttggatctcgcacctt

SEQ ID NO: 1939155 - DNA, 25 bp, Homo sapien
cagatgaaagtcttcacgtagaatt

SEQ ID NO: 1939156 - DNA, 25 bp, Homo sapien
gaggacaatacaaacacgacttcat

SEQ ID NO: 1939157 - DNA, 25 bp, Homo sapien
ttttcagtgcctgctgggtccaacg

SEQ ID NO: 1939158 - DNA, 25 bp, Homo sapien
aatacaaacacgacttcatcagagc

SEQ ID NO: 1939159 - DNA, 25 bp, Homo sapien
ccaacgtgtgtgattagctgaggac

SEQ ID NO: 1939160 - DNA, 25 bp, Homo sapien
ttcactgtgagatcactttgccctt

SEQ ID NO: 1939161 - DNA, 25 bp, Homo sapien
cctgctggctgcaccctcaagccat

SEQ ID NO: 1939162 - DNA, 25 bp, Homo sapien
tgtccgctcccaatcttcactgtga

SEQ ID NO: 1939163 - DNA, 25 bp, Homo sapien
ctcaagccattgccagggtctccag

SEQ ID NO: 1939164 - DNA, 25 bp, Homo sapien
ggcggcgagtctattaacacaatct

SEQ ID NO: 1939165 - DNA, 25 bp, Homo sapien
tactttccttgcaactttttcatcg

SEQ ID NO: 1939166 - DNA, 25 bp, Homo sapien
tctgaaatagttcatgtcatagctt

SEQ ID NO: 1939167 - DNA, 25 bp, Homo sapien
tgagtttttttaggcggcgagtcta

SEQ ID NO: 1939168 - DNA, 25 bp, Homo sapien
acgctagcgggcgccggacgggcgc

SEQ ID NO: 1939169 - DNA, 25 bp, Homo sapien
cggcgccccgtcacgggcagcgccc

SEQ ID NO: 1939170 - DNA, 25 bp, Homo sapien
ccgtcacgggcagcgccccgaaccg

SEQ ID NO: 1939171 - DNA, 25 bp, Homo sapien
gcggggcgtggggacgctagcgggc

SEQ ID NO: 1939172 - DNA, 25 bp, Homo sapien
agtctcctgagcccggcaacttcgg

SEQ ID NO: 1939173 - DNA, 25 bp, Homo sapien
aagtctcctgagcccggcaacttcg

SEQ ID NO: 1939174 - DNA, 25 bp, Homo sapien
tccccatgtgcagccggccagccgg

SEQ ID NO: 1939175 - DNA, 25 bp, Homo sapien
atgtgcagccggccagccgggctct

SEQ ID NO: 1939176 - DNA, 25 bp, Homo sapien
cttttcctggcacgggcaggctgtg

SEQ ID NO: 1939177 - DNA, 25 bp, Homo sapien
ttttcctggcacgggcaggctgtgg

SEQ ID NO: 1939178 - DNA, 25 bp, Homo sapien
tgcgcttctccctccgggactacgg

SEQ ID NO: 1939179 - DNA, 25 bp, Homo sapien
tcctctatcagctcagcgggggacc

SEQ ID NO: 1939180 - DNA, 25 bp, Homo sapien
gggcagctggaagcgtcgggtgccc

SEQ ID NO: 1939181 - DNA, 25 bp, Homo sapien
agctggaagcgtcgggtgcccctgc

SEQ ID NO: 1939182 - DNA, 25 bp, Homo sapien
catctgcacgatgagagcgagtgcg

SEQ ID NO: 1939183 - DNA, 25 bp, Homo sapien
caagcatccgaagtgataagcctga

SEQ ID NO: 1939184 - DNA, 25 bp, Homo sapien
caaggacgatgctggcactcgcgtt

SEQ ID NO: 1939185 - DNA, 25 bp, Homo sapien
cactcgcgttcgagccaagggagga

SEQ ID NO: 1939186 - DNA, 25 bp, Homo sapien
tctctgacacctgctagtgccacaa

SEQ ID NO: 1939187 - DNA, 25 bp, Homo sapien
gacacctgctagtgccacaaaagtt

SEQ ID NO: 1939188 - DNA, 25 bp, Homo sapien
tgtattgtggagtctcatagcttcc

SEQ ID NO: 1939189 - DNA, 25 bp, Homo sapien
tcttttcataagttctgtattgtgg

SEQ ID NO: 1939190 - DNA, 25 bp, Homo sapien
cgggctggctggaaccctgcttcag

SEQ ID NO: 1939191 - DNA, 25 bp, Homo sapien
aagcacgtgcggccaagttctggga

SEQ ID NO: 1939192 - DNA, 25 bp, Homo sapien
acgtcgatgtgggttgatgggtccc

SEQ ID NO: 1939193 - DNA, 25 bp, Homo sapien
caagttctgggagccacgtcgatgt

SEQ ID NO: 1939194 - DNA, 25 bp, Homo sapien
tcgtgctgcgagataaagagttttc

SEQ ID NO: 1939195 - DNA, 25 bp, Homo sapien
tcatgcatttcccaactcaaaaggc

SEQ ID NO: 1939196 - DNA, 25 bp, Homo sapien
tagttatattcttcattcgtgctgc

SEQ ID NO: 1939197 - DNA, 25 bp, Homo sapien
gtttgcttgtagagcagagatccaa

SEQ ID NO: 1939198 - DNA, 25 bp, Homo sapien
gaagccaccgaacatttttagacca

SEQ ID NO: 1939199 - DNA, 25 bp, Homo sapien
caccgaacatttttagaccacagag

SEQ ID NO: 1939200 - DNA, 25 bp, Homo sapien
gcaatgagaagccaccgaacatttt

SEQ ID NO: 1939201 - DNA, 25 bp, Homo sapien
tgagaagccaccgaacatttttaga

SEQ ID NO: 1939202 - DNA, 25 bp, Homo sapien
ccctctcctgagtggtgggtgttaa

SEQ ID NO: 1939203 - DNA, 25 bp, Homo sapien
ctctcctgagtggtgggtgttaagc

SEQ ID NO: 1939204 - DNA, 25 bp, Homo sapien
cctctcctgagtggtgggtgttaag

SEQ ID NO: 1939205 - DNA, 25 bp, Homo sapien
acctttgttgtcacgtgcacctctt

SEQ ID NO: 1939206 - DNA, 25 bp, Homo sapien
cagagacatgaatggccctgggttg

SEQ ID NO: 1939207 - DNA, 25 bp, Homo sapien
cctgaattcagagacatgaatggcc

SEQ ID NO: 1939208 - DNA, 25 bp, Homo sapien
ggagcctgaattcagagacatgaat

SEQ ID NO: 1939209 - DNA, 25 bp, Homo sapien
aattcagagacatgaatggccctgg

SEQ ID NO: 1939210 - DNA, 25 bp, Homo sapien
ctaaagtcgcataggctgtggctgt

SEQ ID NO: 1939211 - DNA, 25 bp, Homo sapien
tctgagcgtagctttttgtagagct

SEQ ID NO: 1939212 - DNA, 25 bp, Homo sapien
gctgtggctgttgagcttgcattct

SEQ ID NO: 1939213 - DNA, 25 bp, Homo sapien
tgttcagccttccaacgcttgttgg

SEQ ID NO: 1939214 - DNA, 25 bp, Homo sapien
ctgtgtggtcccttggccttgtccc

SEQ ID NO: 1939215 - DNA, 25 bp, Homo sapien
cttgggtctgttgtaggtttgcatc

SEQ ID NO: 1939216 - DNA, 25 bp, Homo sapien
tcctgctgggtgcactcttgggtct

SEQ ID NO: 1939217 - DNA, 25 bp, Homo sapien
tctcaagtggctggtcgtagcagct

SEQ ID NO: 1939218 - DNA, 25 bp, Homo sapien
tacttcttccgttgactcagcactt

SEQ ID NO: 1939219 - DNA, 25 bp, Homo sapien
acatcactgtacttcttccgttgac

SEQ ID NO: 1939220 - DNA, 25 bp, Homo sapien
aacatcactgtacttcttccgttga

SEQ ID NO: 1939221 - DNA, 25 bp, Homo sapien
ctgtacttcttccgttgactcagca

SEQ ID NO: 1939222 - DNA, 25 bp, Homo sapien
cagataaaggaaatctccaactctg

SEQ ID NO: 1939223 - DNA, 25 bp, Homo sapien
gggagaatgtcgtgcattgacaccc

SEQ ID NO: 1939224 - DNA, 25 bp, Homo sapien
gataaaggaaatctccaactctggg

SEQ ID NO: 1939225 - DNA, 25 bp, Homo sapien
tgcattgacacccatgaacttgctg

SEQ ID NO: 1939226 - DNA, 25 bp, Homo sapien
ctgattttgaagtccgtgccctgaa

SEQ ID NO: 1939227 - DNA, 25 bp, Homo sapien
cactgttaaggtgctgtagcggatg

SEQ ID NO: 1939228 - DNA, 25 bp, Homo sapien
tccacgtcccaccttgtgcctggtg

SEQ ID NO: 1939229 - DNA, 25 bp, Homo sapien
gtgccctgaatcacctccacgtccc

SEQ ID NO: 1939230 - DNA, 25 bp, Homo sapien
gtgatgtgccaccgttcagagaggc

SEQ ID NO: 1939231 - DNA, 25 bp, Homo sapien
gatgtgccaccgttcagagaggcac

SEQ ID NO: 1939232 - DNA, 25 bp, Homo sapien
atgtgccaccgttcagagaggcact

SEQ ID NO: 1939233 - DNA, 25 bp, Homo sapien
tgatgtgccaccgttcagagaggca

SEQ ID NO: 1939234 - DNA, 25 bp, Homo sapien
ttaaacactccttttcgtctctgag

SEQ ID NO: 1939235 - DNA, 25 bp, Homo sapien
tgacggctgcgttgtcttttccacg

SEQ ID NO: 1939236 - DNA, 25 bp, Homo sapien
gtccacagcctctttgacggctgcg

SEQ ID NO: 1939237 - DNA, 25 bp, Homo sapien
ttcactggctaagaacacaggtcca

SEQ ID NO: 1939238 - DNA, 25 bp, Homo sapien
tggcatccttttgattggtggtgat

SEQ ID NO: 1939239 - DNA, 25 bp, Homo sapien
ttgctggcatccttttgattggtgg

SEQ ID NO: 1939240 - DNA, 25 bp, Homo sapien
gcatccttttgattggtggtgatgt

SEQ ID NO: 1939241 - DNA, 25 bp, Homo sapien
gctggcatccttttgattggtggtg

SEQ ID NO: 1939242 - DNA, 25 bp, Homo sapien
ggatattctagagacctggttctcc

SEQ ID NO: 1939243 - DNA, 25 bp, Homo sapien
tcctgggatattctagagacctggt

SEQ ID NO: 1939244 - DNA, 25 bp, Homo sapien
ctgggatattctagagacctggttc

SEQ ID NO: 1939245 - DNA, 25 bp, Homo sapien
cattcctgggatattctagagacct

SEQ ID NO: 1939246 - DNA, 25 bp, Homo sapien
aatgacacagtttgcattgatgatg

SEQ ID NO: 1939247 - DNA, 25 bp, Homo sapien
gatggggtaataaggacaggactct

SEQ ID NO: 1939248 - DNA, 25 bp, Homo sapien
tctggttgttcacactaatgacaca

SEQ ID NO: 1939249 - DNA, 25 bp, Homo sapien
tgccatcaccaagttaaatgatggg

SEQ ID NO: 1939250 - DNA, 25 bp, Homo sapien
tccaatagccacatatgataaaatg

SEQ ID NO: 1939251 - DNA, 25 bp, Homo sapien
gaagtctgtctccaatagccacata

SEQ ID NO: 1939252 - DNA, 25 bp, Homo sapien
gctagtctgtcggaagtctgtctcc

SEQ ID NO: 1939253 - DNA, 25 bp, Homo sapien
caccaggagactttgatactttgct

SEQ ID NO: 1939254 - DNA, 25 bp, Homo sapien
gaatggagcacgttcaaaacacaag

SEQ ID NO: 1939255 - DNA, 25 bp, Homo sapien
aacacaagattgaagtgaagtggca

SEQ ID NO: 1939256 - DNA, 25 bp, Homo sapien
aaaacacaagattgaagtgaagtgg

SEQ ID NO: 1939257 - DNA, 25 bp, Homo sapien
atggagcacgttcaaaacacaagat

SEQ ID NO: 1939258 - DNA, 25 bp, Homo sapien
gctcttaaatgacttgggtgtgttt

SEQ ID NO: 1939259 - DNA, 25 bp, Homo sapien
ttgtatttgtgggtaagtgggtata

SEQ ID NO: 1939260 - DNA, 25 bp, Homo sapien
ctggctcttaaatgacttgggtgtg

SEQ ID NO: 1939261 - DNA, 25 bp, Homo sapien
gtgggtaagtgggtatatgtgcaca

SEQ ID NO: 1939262 - DNA, 25 bp, Homo sapien
gtggtcgcacagcttggtgtgtgtc

SEQ ID NO: 1939263 - DNA, 25 bp, Homo sapien
ccactgcgttcactgcgtcttcccc

SEQ ID NO: 1939264 - DNA, 25 bp, Homo sapien
tggtgggtggtggtcgcacagcttg

SEQ ID NO: 1939265 - DNA, 25 bp, Homo sapien
cgttcactgcgtcttccccttcagt

SEQ ID NO: 1939266 - DNA, 25 bp, Homo sapien
tctttgtgcgtgaccatctctgctt

SEQ ID NO: 1939267 - DNA, 25 bp, Homo sapien
tttctttgtgcgtgaccatctctgc

SEQ ID NO: 1939268 - DNA, 25 bp, Homo sapien
catgctgtagcctctggtatttatt

SEQ ID NO: 1939269 - DNA, 25 bp, Homo sapien
aaacttttctttgtgcgtgaccatc

SEQ ID NO: 1939270 - DNA, 25 bp, Homo sapien
cagatggtaagtgagacaggtgccc

SEQ ID NO: 1939271 - DNA, 25 bp, Homo sapien
gtttacaaaccactctgtcgcggtg

SEQ ID NO: 1939272 - DNA, 25 bp, Homo sapien
tattacattagacagcaaaggccac

SEQ ID NO: 1939273 - DNA, 25 bp, Homo sapien
taacaggcctagtctgtggcaatcc

SEQ ID NO: 1939274 - DNA, 25 bp, Homo sapien
tgaagtgtggttgtggtatcactga

SEQ ID NO: 1939275 - DNA, 25 bp, Homo sapien
tgacatatgggattacagaggaacc

SEQ ID NO: 1939276 - DNA, 25 bp, Homo sapien
tatcactgatgtcgtggactctaca

SEQ ID NO: 1939277 - DNA, 25 bp, Homo sapien
tcaatgggcaactggaagtgcagcc

SEQ ID NO: 1939278 - DNA, 25 bp, Homo sapien
tgtcccactcggacgaggccttcaa

SEQ ID NO: 1939279 - DNA, 25 bp, Homo sapien
tatgattcccgttgtcccactcgga

SEQ ID NO: 1939280 - DNA, 25 bp, Homo sapien
cgttgtcccactcggacgaggcctt

SEQ ID NO: 1939281 - DNA, 25 bp, Homo sapien
gattcccgttgtcccactcggacga

SEQ ID NO: 1939282 - DNA, 25 bp, Homo sapien
tactggcaactctcatgggattcct

SEQ ID NO: 1939283 - DNA, 25 bp, Homo sapien
gattttcccgttgtatcatctgtgg

SEQ ID NO: 1939284 - DNA, 25 bp, Homo sapien
gtggtctttctactggcaactctca

SEQ ID NO: 1939285 - DNA, 25 bp, Homo sapien
agggaagattttcccgttgtatcat

SEQ ID NO: 1939286 - DNA, 25 bp, Homo sapien
tctctgtccagaaaaggcgttttta

SEQ ID NO: 1939287 - DNA, 25 bp, Homo sapien
agcaaaagggattaagcaaaccagc

SEQ ID NO: 1939288 - DNA, 25 bp, Homo sapien
ttaattagcagcaaaagggattaag

SEQ ID NO: 1939289 - DNA, 25 bp, Homo sapien
aattagcagcaaaagggattaagca

SEQ ID NO: 1939290 - DNA, 25 bp, Homo sapien
tgtgaatctgtgactgatgccagtg

SEQ ID NO: 1939291 - DNA, 25 bp, Homo sapien
cccatggttgtgaatctgtgactga

SEQ ID NO: 1939292 - DNA, 25 bp, Homo sapien
ctgcacccatggttgtgaatctgtg

SEQ ID NO: 1939293 - DNA, 25 bp, Homo sapien
ctgtgactgatgccagtgttgtcat

SEQ ID NO: 1939294 - DNA, 25 bp, Homo sapien
gaatctatccgaaacatatgttgcg

SEQ ID NO: 1939295 - DNA, 25 bp, Homo sapien
taggagctgcctagtgaactgttca

SEQ ID NO: 1939296 - DNA, 25 bp, Homo sapien
tgttcatgttccattgaggctcctg

SEQ ID NO: 1939297 - DNA, 25 bp, Homo sapien
aacaaacatggacagagcccactga

SEQ ID NO: 1939298 - DNA, 25 bp, Homo sapien
tttaggtttgtaatggctttgcttg

SEQ ID NO: 1939299 - DNA, 25 bp, Homo sapien
ctttttacgacctccacaaggcatt

SEQ ID NO: 1939300 - DNA, 25 bp, Homo sapien
ttaggtttgtaatggctttgcttga

SEQ ID NO: 1939301 - DNA, 25 bp, Homo sapien
atctttttacgacctccacaaggca

SEQ ID NO: 1939302 - DNA, 25 bp, Homo sapien
agagtcttgttcttactgcctgctc

SEQ ID NO: 1939303 - DNA, 25 bp, Homo sapien
agtcttgttcttactgcctgctcta

SEQ ID NO: 1939304 - DNA, 25 bp, Homo sapien
ggcctcgagggcaaccagagtcttg

SEQ ID NO: 1939305 - DNA, 25 bp, Homo sapien
cgagggcaaccagagtcttgttctt

SEQ ID NO: 1939306 - DNA, 25 bp, Homo sapien
ttgaaacatccggtagaatgttcct

SEQ ID NO: 1939307 - DNA, 25 bp, Homo sapien
aacatccggtagaatgttccttctt

SEQ ID NO: 1939308 - DNA, 25 bp, Homo sapien
tttatttgaaacatccggtagaatg

SEQ ID NO: 1939309 - DNA, 25 bp, Homo sapien
tatttgaaacatccggtagaatgtt

SEQ ID NO: 1939310 - DNA, 25 bp, Homo sapien
ttttgaatgagactacctcttctga

SEQ ID NO: 1939311 - DNA, 25 bp, Homo sapien
cttctgattttggtttcaagtcgta

SEQ ID NO: 1939312 - DNA, 25 bp, Homo sapien
gtttcaagtcgtaaacacatcttta

SEQ ID NO: 1939313 - DNA, 25 bp, Homo sapien
tctttgtgaggacttccatttgcct

SEQ ID NO: 1939314 - DNA, 25 bp, Homo sapien
cagcagtcccctgggtatgcagatg

SEQ ID NO: 1939315 - DNA, 25 bp, Homo sapien
gggtatgcagatgccctgcactctt

SEQ ID NO: 1939316 - DNA, 25 bp, Homo sapien
agtcccctgggtatgcagatgccct

SEQ ID NO: 1939317 - DNA, 25 bp, Homo sapien
ccctgggtatgcagatgccctgcac

SEQ ID NO: 1939318 - DNA, 25 bp, Homo sapien
gaagaagacaggaggtggccagagg

SEQ ID NO: 1939319 - DNA, 25 bp, Homo sapien
gctgctgagatgggggcccccatct

SEQ ID NO: 1939320 - DNA, 25 bp, Homo sapien
tcagctagaagaagacaggaggtgg

SEQ ID NO: 1939321 - DNA, 25 bp, Homo sapien
ctagaagaagacaggaggtggccag

SEQ ID NO: 1939322 - DNA, 25 bp, Homo sapien
cctcgatgggcgagggacactctgc

SEQ ID NO: 1939323 - DNA, 25 bp, Homo sapien
gctccttgggttcccaggtgatgag

SEQ ID NO: 1939324 - DNA, 25 bp, Homo sapien
tcttcagcagccctttgtcctcgat

SEQ ID NO: 1939325 - DNA, 25 bp, Homo sapien
cagccctttgtcctcgatgggcgag

SEQ ID NO: 1939326 - DNA, 25 bp, Homo sapien
agtgtcaatcgttgtggcagccaca

SEQ ID NO: 1939327 - DNA, 25 bp, Homo sapien
tgtggcagccacatgacatctaggt

SEQ ID NO: 1939328 - DNA, 25 bp, Homo sapien
taagcacatgatggaaagtgtcaat

SEQ ID NO: 1939329 - DNA, 25 bp, Homo sapien
tacttatcaggggtgcttcgtgcaa

SEQ ID NO: 1939330 - DNA, 25 bp, Homo sapien
tgggcatggcattgggctcctctgt

SEQ ID NO: 1939331 - DNA, 25 bp, Homo sapien
tgtgctgaccacgtttccttatctc

SEQ ID NO: 1939332 - DNA, 25 bp, Homo sapien
gttgttgttctctattggattcacg

SEQ ID NO: 1939333 - DNA, 25 bp, Homo sapien
tcatagtcctttctcttgtcagcaa

SEQ ID NO: 1939334 - DNA, 25 bp, Homo sapien
tatgtattattgtgggggtcgtgta

SEQ ID NO: 1939335 - DNA, 25 bp, Homo sapien
tcgtgtttgagtgcggggagttgtg

SEQ ID NO: 1939336 - DNA, 25 bp, Homo sapien
gcatcatgtatgagtgtgggggtcg

SEQ ID NO: 1939337 - DNA, 25 bp, Homo sapien
ttgtgtataagtgggggcatcatgt

SEQ ID NO: 1939338 - DNA, 25 bp, Homo sapien
ggtcatgtacgagtgcggagattgt

SEQ ID NO: 1939339 - DNA, 25 bp, Homo sapien
tcatgtacgagtgcggagattgtgt

SEQ ID NO: 1939340 - DNA, 25 bp, Homo sapien
cgagtgcggagattgtgtatgagtg

SEQ ID NO: 1939341 - DNA, 25 bp, Homo sapien
gattgtgtacgagtgaggagatcat

SEQ ID NO: 1939342 - DNA, 25 bp, Homo sapien
gtgatccctcatgttacatttacaa

SEQ ID NO: 1939343 - DNA, 25 bp, Homo sapien
catgtgatccctcatgttacattta

SEQ ID NO: 1939344 - DNA, 25 bp, Homo sapien
catgttacatttacaacctccctgg

SEQ ID NO: 1939345 - DNA, 25 bp, Homo sapien
catttacaacctccctgggagggct

SEQ ID NO: 1939346 - DNA, 25 bp, Homo sapien
gaagtgaatcctttactacgctagg

SEQ ID NO: 1939347 - DNA, 25 bp, Homo sapien
aggaaaatcccgctgtcacctgaga

SEQ ID NO: 1939348 - DNA, 25 bp, Homo sapien
gtgtccacaggcatgagagtgctcc

SEQ ID NO: 1939349 - DNA, 25 bp, Homo sapien
aaagcctcgcttagaatgaccgtca

SEQ ID NO: 1939350 - DNA, 25 bp, Homo sapien
tgttgcgctgactgcttcccgcagg

SEQ ID NO: 1939351 - DNA, 25 bp, Homo sapien
cgtgtgttgcgctgactgcttcccg

SEQ ID NO: 1939352 - DNA, 25 bp, Homo sapien
acttcttcttcattgcaggcgtgtg

SEQ ID NO: 1939353 - DNA, 25 bp, Homo sapien
attgcaggcgtgtgttgcgctgact

SEQ ID NO: 1939354 - DNA, 25 bp, Homo sapien
ttttccacagtaatccagggccagg

SEQ ID NO: 1939355 - DNA, 25 bp, Homo sapien
catagttacgcagtaggccgtgcca

SEQ ID NO: 1939356 - DNA, 25 bp, Homo sapien
gaactggcctcccaactggtcatga

SEQ ID NO: 1939357 - DNA, 25 bp, Homo sapien
gacagttccttgcaggtccacacga

SEQ ID NO: 1939358 - DNA, 25 bp, Homo sapien
cttcctttctctgccatgaccccct

SEQ ID NO: 1939359 - DNA, 25 bp, Homo sapien
ttcttcctttctctgccatgacccc

SEQ ID NO: 1939360 - DNA, 25 bp, Homo sapien
tcctttctctgccatgaccccctca

SEQ ID NO: 1939361 - DNA, 25 bp, Homo sapien
cctttctctgccatgaccccctcac

SEQ ID NO: 1939362 - DNA, 25 bp, Homo sapien
atggtggttccggtgccaatagtaa

SEQ ID NO: 1939363 - DNA, 25 bp, Homo sapien
ctggtaagtcctgtcgcatgcaaaa

SEQ ID NO: 1939364 - DNA, 25 bp, Homo sapien
cctgaggagtgggccctccaccagg

SEQ ID NO: 1939365 - DNA, 25 bp, Homo sapien
gcctgaggagtgggccctccaccag

SEQ ID NO: 1939366 - DNA, 25 bp, Homo sapien
atgcaaaaggcggtctccccactgc

SEQ ID NO: 1939367 - DNA, 25 bp, Homo sapien
gggttgttgggagcggcttcccaga

SEQ ID NO: 1939368 - DNA, 25 bp, Homo sapien
gggaggaacgaaatcagcaagagtt

SEQ ID NO: 1939369 - DNA, 25 bp, Homo sapien
cattggctgggatgtgttaaattag

SEQ ID NO: 1939370 - DNA, 25 bp, Homo sapien
aaattagcaatctgaaaattgcggg

SEQ ID NO: 1939371 - DNA, 25 bp, Homo sapien
aaaagcctgagagcaagaggctcac

SEQ ID NO: 1939372 - DNA, 25 bp, Homo sapien
gaaagtgtgtaaaagcctgagagca

SEQ ID NO: 1939373 - DNA, 25 bp, Homo sapien
caagtgaagtgacactttagaaagt

SEQ ID NO: 1939374 - DNA, 25 bp, Homo sapien
ggactgttccaagtgaagtgacact

SEQ ID NO: 1939375 - DNA, 25 bp, Homo sapien
atgcaaggtcccatcaggagcacgc

SEQ ID NO: 1939376 - DNA, 25 bp, Homo sapien
gcaggtttgcctgacctgctgtctc

SEQ ID NO: 1939377 - DNA, 25 bp, Homo sapien
gggaagcaacgctgctctgatggct

SEQ ID NO: 1939378 - DNA, 25 bp, Homo sapien
gaaccgcctatttggcaggagcgga

SEQ ID NO: 1939379 - DNA, 25 bp, Homo sapien
ccatttggaaaaacctgcatttgcc

SEQ ID NO: 1939380 - DNA, 25 bp, Homo sapien
ttcttatcctctgcccatttggaaa

SEQ ID NO: 1939381 - DNA, 25 bp, Homo sapien
gcatttgccttcttccccttagaca

SEQ ID NO: 1939382 - DNA, 25 bp, Homo sapien
tgcccatttggaaaaacctgcattt

SEQ ID NO: 1939383 - DNA, 25 bp, Homo sapien
tataagctgttactatctggctcca

SEQ ID NO: 1939384 - DNA, 25 bp, Homo sapien
tctggtatcaggattccgggagcgt

SEQ ID NO: 1939385 - DNA, 25 bp, Homo sapien
atgtttaataaccacctctggcggg

SEQ ID NO: 1939386 - DNA, 25 bp, Homo sapien
gagcgtggtccatcttgtgcatcat

SEQ ID NO: 1939387 - DNA, 25 bp, Homo sapien
agtctctcttgggtatccgataaga

SEQ ID NO: 1939388 - DNA, 25 bp, Homo sapien
tcttgggtatccgataagagtttgt

SEQ ID NO: 1939389 - DNA, 25 bp, Homo sapien
tatccgataagagtttgtacggtca

SEQ ID NO: 1939390 - DNA, 25 bp, Homo sapien
gagtttgtacggtcagtttcgtaca

SEQ ID NO: 1939391 - DNA, 25 bp, Homo sapien
gaaatcctagctggagagttcctcc

SEQ ID NO: 1939392 - DNA, 25 bp, Homo sapien
tgtcctctaggacaggatgaaatcc

SEQ ID NO: 1939393 - DNA, 25 bp, Homo sapien
tgatgctcaagtgatcaagacaggg

SEQ ID NO: 1939394 - DNA, 25 bp, Homo sapien
catgggtctgcccatatgaccaggg

SEQ ID NO: 1939395 - DNA, 25 bp, Homo sapien
gagccttcgggatcatccctccaga

SEQ ID NO: 1939396 - DNA, 25 bp, Homo sapien
tcttcactgggagccttcgggatca

SEQ ID NO: 1939397 - DNA, 25 bp, Homo sapien
tggccttcttcactgggagccttcg

SEQ ID NO: 1939398 - DNA, 25 bp, Homo sapien
tcactgggagccttcgggatcatcc

SEQ ID NO: 1939399 - DNA, 25 bp, Homo sapien
cacaactgagcagcgaggaaactgt

SEQ ID NO: 1939400 - DNA, 25 bp, Homo sapien
tcatttgcacgaagtggaggagtcc

SEQ ID NO: 1939401 - DNA, 25 bp, Homo sapien
aggaaactgtcgctgtggcccctta

SEQ ID NO: 1939402 - DNA, 25 bp, Homo sapien
tactcaccgagcgtgtctgggacaa

SEQ ID NO: 1939403 - DNA, 25 bp, Homo sapien
caggccttcagtttagtcatggaga

SEQ ID NO: 1939404 - DNA, 25 bp, Homo sapien
tgttggtgacaatctctggtcatgg

SEQ ID NO: 1939405 - DNA, 25 bp, Homo sapien
cacagtgacacagagtgttggtgac

SEQ ID NO: 1939406 - DNA, 25 bp, Homo sapien
gaaatgcgccgctgttcagatgcct

SEQ ID NO: 1939407 - DNA, 25 bp, Homo sapien
tgaccaagccttttgtttatgcggg

SEQ ID NO: 1939408 - DNA, 25 bp, Homo sapien
ggcgtcatctgacggagagccacca

SEQ ID NO: 1939409 - DNA, 25 bp, Homo sapien
tgaggccggccatcttgttcagagc

SEQ ID NO: 1939410 - DNA, 25 bp, Homo sapien
tggcgctggcactccaaatggtgac

SEQ ID NO: 1939411 - DNA, 25 bp, Homo sapien
gcctactgatctgagtggacttgac

SEQ ID NO: 1939412 - DNA, 25 bp, Homo sapien
gaattgcccatctagtgcctactga

SEQ ID NO: 1939413 - DNA, 25 bp, Homo sapien
catgaggactctactggcttcagct

SEQ ID NO: 1939414 - DNA, 25 bp, Homo sapien
cattccctggtgtgatcccttgtga

SEQ ID NO: 1939415 - DNA, 25 bp, Homo sapien
tctgctatggagcatgagaacttac

SEQ ID NO: 1939416 - DNA, 25 bp, Homo sapien
tatgagtgaaaatacacgatctttg

SEQ ID NO: 1939417 - DNA, 25 bp, Homo sapien
tactccctccttgtggtcaacttct

SEQ ID NO: 1939418 - DNA, 25 bp, Homo sapien
ttttccatgcatagaatgtgcaatg

SEQ ID NO: 1939419 - DNA, 25 bp, Homo sapien
tacaggtaatgtgggtcctcgccgg

SEQ ID NO: 1939420 - DNA, 25 bp, Homo sapien
tgtgacggtgaagaagactgtcccc

SEQ ID NO: 1939421 - DNA, 25 bp, Homo sapien
aaatgatggctcatgtgcgaccccg

SEQ ID NO: 1939422 - DNA, 25 bp, Homo sapien
gggatcccttctaagctactgcaaa

SEQ ID NO: 1939423 - DNA, 25 bp, Homo sapien
cctgctgaagcgcaagtttggactt

SEQ ID NO: 1939424 - DNA, 25 bp, Homo sapien
tggaaaccgaggagccaatcgacga

SEQ ID NO: 1939425 - DNA, 25 bp, Homo sapien
tttggacttaagtctcacgtcagca

SEQ ID NO: 1939426 - DNA, 25 bp, Homo sapien
ctacgtcaaagagcagttccacctg

SEQ ID NO: 1939427 - DNA, 25 bp, Homo sapien
cttcagagaccagggtatctcctct

SEQ ID NO: 1939428 - DNA, 25 bp, Homo sapien
cagagaccagggtatctcctctgga

SEQ ID NO: 1939429 - DNA, 25 bp, Homo sapien
ctcaatggtaggagacatccagact

SEQ ID NO: 1939430 - DNA, 25 bp, Homo sapien
atggtaggagacatccagacttgta

SEQ ID NO: 1939431 - DNA, 25 bp, Homo sapien
gatgataagtttacacactgtgcaa

SEQ ID NO: 1939432 - DNA, 25 bp, Homo sapien
tgacggatttacttacagggcctta

SEQ ID NO: 1939433 - DNA, 25 bp, Homo sapien
tgggacaattggtcgttcaaaaaca

SEQ ID NO: 1939434 - DNA, 25 bp, Homo sapien
aaaccagtacaagaactgctgcctg

SEQ ID NO: 1939435 - DNA, 25 bp, Homo sapien
acaatgacccaaccaaatgttagca

SEQ ID NO: 1939436 - DNA, 25 bp, Homo sapien
tcccctaatctctattacaatgacc

SEQ ID NO: 1939437 - DNA, 25 bp, Homo sapien
acttcccctaatctctattacaatg

SEQ ID NO: 1939438 - DNA, 25 bp, Homo sapien
ccctaatctctattacaatgaccca

SEQ ID NO: 1939439 - DNA, 25 bp, Homo sapien
catggataacatcatctcattagtc

SEQ ID NO: 1939440 - DNA, 25 bp, Homo sapien
tgtgatcttaaatccctgtaaagca

SEQ ID NO: 1939441 - DNA, 25 bp, Homo sapien
aagcaatgtcatgcctccctggtac

SEQ ID NO: 1939442 - DNA, 25 bp, Homo sapien
gattaaacagcatggataacatcat

SEQ ID NO: 1939443 - DNA, 25 bp, Homo sapien
gtttggagggtaatcgaggacctga

SEQ ID NO: 1939444 - DNA, 25 bp, Homo sapien
ttggagggtaatcgaggacctgagg

SEQ ID NO: 1939445 - DNA, 25 bp, Homo sapien
tggagggtaatcgaggacctgagga

SEQ ID NO: 1939446 - DNA, 25 bp, Homo sapien
tttggagggtaatcgaggacctgag

SEQ ID NO: 1939447 - DNA, 25 bp, Homo sapien
gttgttgcagtctgttccacagttt

SEQ ID NO: 1939448 - DNA, 25 bp, Homo sapien
ggttgttgcagtctgttccacagtt

SEQ ID NO: 1939449 - DNA, 25 bp, Homo sapien
gcatttgtggatgagcccagttcct

SEQ ID NO: 1939450 - DNA, 25 bp, Homo sapien
tgtggatgagcccagttccttaaat

SEQ ID NO: 1939451 - DNA, 25 bp, Homo sapien
aaattgtatgatttggtctgatatc

SEQ ID NO: 1939452 - DNA, 25 bp, Homo sapien
tggatgagcccagttccttaaatat

SEQ ID NO: 1939453 - DNA, 25 bp, Homo sapien
tagcagatggacagaatgacggatt

SEQ ID NO: 1939454 - DNA, 25 bp, Homo sapien
tccaaggccgccaagtgttacaagc

SEQ ID NO: 1939455 - DNA, 25 bp, Homo sapien
taagatccctcttgggtagcagatg

SEQ ID NO: 1939456 - DNA, 25 bp, Homo sapien
caccagtagtccgaatagcagtcct

SEQ ID NO: 1939457 - DNA, 25 bp, Homo sapien
tgttttcattcctggcccaactgcc

SEQ ID NO: 1939458 - DNA, 25 bp, Homo sapien
cacactaagcacatagcactgtggg

SEQ ID NO: 1939459 - DNA, 25 bp, Homo sapien
tccacaagggacaggcatggtttgc

SEQ ID NO: 1939460 - DNA, 25 bp, Homo sapien
gctctctctgcaagcacgatgtgtt

SEQ ID NO: 1939461 - DNA, 25 bp, Homo sapien
caaactgatccccatcaagtaaaga

SEQ ID NO: 1939462 - DNA, 25 bp, Homo sapien
tgccccaacggcatttgcaaaaggc

SEQ ID NO: 1939463 - DNA, 25 bp, Homo sapien
aacggcatttgcaaaaggcactggg

SEQ ID NO: 1939464 - DNA, 25 bp, Homo sapien
aactgatccccatcaagtaaagatt

SEQ ID NO: 1939465 - DNA, 25 bp, Homo sapien
cactgatccacagaagaggacttcc

SEQ ID NO: 1939466 - DNA, 25 bp, Homo sapien
ggtggtcttcgccatttcccagcaa

SEQ ID NO: 1939467 - DNA, 25 bp, Homo sapien
gcaaatggccacaagatgcccagtt

SEQ ID NO: 1939468 - DNA, 25 bp, Homo sapien
tcctcccaggtagacatcatgcgtg

SEQ ID NO: 1939469 - DNA, 25 bp, Homo sapien
gcggatggcttgtctataccatacc

SEQ ID NO: 1939470 - DNA, 25 bp, Homo sapien
aaataagcggatggcttgtctatac

SEQ ID NO: 1939471 - DNA, 25 bp, Homo sapien
taagcggatggcttgtctataccat

SEQ ID NO: 1939472 - DNA, 25 bp, Homo sapien
aaagggaaataagcggatggcttgt

SEQ ID NO: 1939473 - DNA, 25 bp, Homo sapien
agcacagctcttggtggtgttcaag

SEQ ID NO: 1939474 - DNA, 25 bp, Homo sapien
gctgataagggtcccgctttgctga

SEQ ID NO: 1939475 - DNA, 25 bp, Homo sapien
tggtggtgttcaagccccacccaca

SEQ ID NO: 1939476 - DNA, 25 bp, Homo sapien
ggaagagctgataagggtcccgctt

SEQ ID NO: 1939477 - DNA, 25 bp, Homo sapien
ctgtctgcaagctgacagggagagc

SEQ ID NO: 1939478 - DNA, 25 bp, Homo sapien
ggtaaggaacgccactgtagctctt

SEQ ID NO: 1939479 - DNA, 25 bp, Homo sapien
tcagtgcaggggaactgagaagagg

SEQ ID NO: 1939480 - DNA, 25 bp, Homo sapien
taaggaacgccactgtagctcttac

SEQ ID NO: 1939481 - DNA, 25 bp, Homo sapien
aagaggtaaggaacgccactgtagc

SEQ ID NO: 1939482 - DNA, 25 bp, Homo sapien
agcgtactaccccagacatcagagg

SEQ ID NO: 1939483 - DNA, 25 bp, Homo sapien
atcagcgtactaccccagacatcag

SEQ ID NO: 1939484 - DNA, 25 bp, Homo sapien
actaccccagacatcagaggaggtg

SEQ ID NO: 1939485 - DNA, 25 bp, Homo sapien
tttttcatcagcgtactaccccaga

SEQ ID NO: 1939486 - DNA, 25 bp, Homo sapien
tgtaagattttttaacgatatgcat

SEQ ID NO: 1939487 - DNA, 25 bp, Homo sapien
tgaatatggaataaggaccagcaaa

SEQ ID NO: 1939488 - DNA, 25 bp, Homo sapien
ggaataaggaccagcaaaaatggcc

SEQ ID NO: 1939489 - DNA, 25 bp, Homo sapien
atgaatatggaataaggaccgcttg

SEQ ID NO: 1939490 - DNA, 25 bp, Homo sapien
gcttttgctggcctacacccaagga

SEQ ID NO: 1939491 - DNA, 25 bp, Homo sapien
cctacagtggttatctgagcattta

SEQ ID NO: 1939492 - DNA, 25 bp, Homo sapien
ctgttgcctacagtggttatctgag

SEQ ID NO: 1939493 - DNA, 25 bp, Homo sapien
ctgcttttgctggcctacacccaag

SEQ ID NO: 1939494 - DNA, 25 bp, Homo sapien
tttcattaaatgctagatgtttgac

SEQ ID NO: 1939495 - DNA, 25 bp, Homo sapien
gaaactctcagttctgttggttttg

SEQ ID NO: 1939496 - DNA, 25 bp, Homo sapien
cattaaatgctagatgtttgacttc

SEQ ID NO: 1939497 - DNA, 25 bp, Homo sapien
tgacttctttctggtaacctgaaac

SEQ ID NO: 1939498 - DNA, 25 bp, Homo sapien
ggaaagcgaaacacttccatagctg

SEQ ID NO: 1939499 - DNA, 25 bp, Homo sapien
tccacatccggtcgtcatcaagctt

SEQ ID NO: 1939500 - DNA, 25 bp, Homo sapien
gctgctgaggctgaattacccctat

SEQ ID NO: 1939501 - DNA, 25 bp, Homo sapien
catcaagctttctcgtgcagccggg

SEQ ID NO: 1939502 - DNA, 25 bp, Homo sapien
gactcggtaaagggcccttctgcac

SEQ ID NO: 1939503 - DNA, 25 bp, Homo sapien
ggactcggtaaagggcccttctgca

SEQ ID NO: 1939504 - DNA, 25 bp, Homo sapien
tgtgtgttcggactcggtaaagggc

SEQ ID NO: 1939505 - DNA, 25 bp, Homo sapien
gctttttgtgtgttcggactcggta

SEQ ID NO: 1939506 - DNA, 25 bp, Homo sapien
cacatctgattgtcagtatctaaag

SEQ ID NO: 1939507 - DNA, 25 bp, Homo sapien
catatcccaacaataaccaggctga

SEQ ID NO: 1939508 - DNA, 25 bp, Homo sapien
aggctgatggttgttgctaccagaa

SEQ ID NO: 1939509 - DNA, 25 bp, Homo sapien
ggttgttgctaccagaacttctggg

SEQ ID NO: 1939510 - DNA, 25 bp, Homo sapien
ttaataaccaggagaccagtcagcc

SEQ ID NO: 1939511 - DNA, 25 bp, Homo sapien
tgttggcttccctaggctactgtta

SEQ ID NO: 1939512 - DNA, 25 bp, Homo sapien
gccattaacagcatcaataggaggg

SEQ ID NO: 1939513 - DNA, 25 bp, Homo sapien
tctggcaatgctgcatatgttggct

SEQ ID NO: 1939514 - DNA, 25 bp, Homo sapien
gaatgttgaaggagacatcatggta

SEQ ID NO: 1939515 - DNA, 25 bp, Homo sapien
gactagtcagaagtcttgatgaatg

SEQ ID NO: 1939516 - DNA, 25 bp, Homo sapien
tgtgacaggtcttcaagtaatctca

SEQ ID NO: 1939517 - DNA, 25 bp, Homo sapien
ttttcacagatcaagtagactagtc

SEQ ID NO: 1939518 - DNA, 25 bp, Homo sapien
tcaatgcaacccatcatcaaaggga

SEQ ID NO: 1939519 - DNA, 25 bp, Homo sapien
cagtgtggcatccagtgtggcaaat

SEQ ID NO: 1939520 - DNA, 25 bp, Homo sapien
gaaatgaaattgaaacgtgcacctg

SEQ ID NO: 1939521 - DNA, 25 bp, Homo sapien
tgtcttctggacatcccaaggcgca

SEQ ID NO: 1939522 - DNA, 25 bp, Homo sapien
gtactagtacactgagtgacttctc

SEQ ID NO: 1939523 - DNA, 25 bp, Homo sapien
cctggcttgttgtttgaatctttgc

SEQ ID NO: 1939524 - DNA, 25 bp, Homo sapien
ctggaatgttgaatttaatgaatga

SEQ ID NO: 1939525 - DNA, 25 bp, Homo sapien
cagctgtcctggcttgttgtttgaa

SEQ ID NO: 1939526 - DNA, 25 bp, Homo sapien
ccaatagcattttccgctggaatgt

SEQ ID NO: 1939527 - DNA, 25 bp, Homo sapien
gagaaacctggtagaatttggatga

SEQ ID NO: 1939528 - DNA, 25 bp, Homo sapien
cttggaattatcatgaactaggcta

SEQ ID NO: 1939529 - DNA, 25 bp, Homo sapien
gatgatgacaagaggccatcttcct

SEQ ID NO: 1939530 - DNA, 25 bp, Homo sapien
tatcatgaactaggctaacaggcag

SEQ ID NO: 1939531 - DNA, 25 bp, Homo sapien
attctctcccctatatctgagcaca

SEQ ID NO: 1939532 - DNA, 25 bp, Homo sapien
ggtaatattgctcacggcactttcc

SEQ ID NO: 1939533 - DNA, 25 bp, Homo sapien
taatattgctcacggcactttccac

SEQ ID NO: 1939534 - DNA, 25 bp, Homo sapien
tctctcccctatatctgagcacagg

SEQ ID NO: 1939535 - DNA, 25 bp, Homo sapien
caactttctcccaatgaggtctcct

SEQ ID NO: 1939536 - DNA, 25 bp, Homo sapien
gtcattatctaaggttatggtactc

SEQ ID NO: 1939537 - DNA, 25 bp, Homo sapien
tatctaaggttatggtactcttgat

SEQ ID NO: 1939538 - DNA, 25 bp, Homo sapien
caatgaggtctccttgtgatcccag

SEQ ID NO: 1939539 - DNA, 25 bp, Homo sapien
ttctactgatggtcaccatgggttt

SEQ ID NO: 1939540 - DNA, 25 bp, Homo sapien
gtgatcacatctccatttctactga

SEQ ID NO: 1939541 - DNA, 25 bp, Homo sapien
tccatttctactgatggtcaccatg

SEQ ID NO: 1939542 - DNA, 25 bp, Homo sapien
gatcacatctccatttctactgatg

SEQ ID NO: 1939543 - DNA, 25 bp, Homo sapien
ctttttctgtaattcatgtgtgaat

SEQ ID NO: 1939544 - DNA, 25 bp, Homo sapien
caatcagtttggttccctttttctg

SEQ ID NO: 1939545 - DNA, 25 bp, Homo sapien
gtaccaccacaatcagtttggttcc

SEQ ID NO: 1939546 - DNA, 25 bp, Homo sapien
tttaagtaccaccacaatcagtttg

SEQ ID NO: 1939547 - DNA, 25 bp, Homo sapien
ttttattgccacaagtgtgtttgcg

SEQ ID NO: 1939548 - DNA, 25 bp, Homo sapien
acaagtgtgtttgcgttccccatac

SEQ ID NO: 1939549 - DNA, 25 bp, Homo sapien
tgccacaagtgtgtttgcgttcccc

SEQ ID NO: 1939550 - DNA, 25 bp, Homo sapien
tattgccacaagtgtgtttgcgttc

SEQ ID NO: 1939551 - DNA, 25 bp, Homo sapien
ctttgccgagtgatgactgactcca

SEQ ID NO: 1939552 - DNA, 25 bp, Homo sapien
tttgccgagtgatgactgactccat

SEQ ID NO: 1939553 - DNA, 25 bp, Homo sapien
ggcggcggcaaagggtaagcggaca

SEQ ID NO: 1939554 - DNA, 25 bp, Homo sapien
cggcaaagggtaagcggacagcgct

SEQ ID NO: 1939555 - DNA, 25 bp, Homo sapien
gggtaagcggacagcgctgccgggc

SEQ ID NO: 1939556 - DNA, 25 bp, Homo sapien
ggtggagacggctgccctagtggga

SEQ ID NO: 1939557 - DNA, 25 bp, Homo sapien
tgctgaacaggtgacaggtggatct

SEQ ID NO: 1939558 - DNA, 25 bp, Homo sapien
gggcaagccctactatgaatatgtg

SEQ ID NO: 1939559 - DNA, 25 bp, Homo sapien
caagggtctcttggcggtgctgaac

SEQ ID NO: 1939560 - DNA, 25 bp, Homo sapien
tatgtggccccttaaatttcactgg

SEQ ID NO: 1939561 - DNA, 25 bp, Homo sapien
aagtgaaaacgtcccaccagcatcc

SEQ ID NO: 1939562 - DNA, 25 bp, Homo sapien
ctgaaaagtgaaaacgtcccaccag

SEQ ID NO: 1939563 - DNA, 25 bp, Homo sapien
ttcactgaaaagtgaaaacgtccca

SEQ ID NO: 1939564 - DNA, 25 bp, Homo sapien
gaaaagtgaaaacgtcccaccagca

SEQ ID NO: 1939565 - DNA, 25 bp, Homo sapien
caaggtgtcagtttgagtggcttca

SEQ ID NO: 1939566 - DNA, 25 bp, Homo sapien
ctacaaggtgtcagtttgagtggct

SEQ ID NO: 1939567 - DNA, 25 bp, Homo sapien
tgagtggcttcagaaaggaagtctg

SEQ ID NO: 1939568 - DNA, 25 bp, Homo sapien
ttgagtggcttcagaaaggaagtct

SEQ ID NO: 1939569 - DNA, 25 bp, Homo sapien
ttagcaaaattgagcacatcacaag

SEQ ID NO: 1939570 - DNA, 25 bp, Homo sapien
acatcacaagtttgcttcctgtcag

SEQ ID NO: 1939571 - DNA, 25 bp, Homo sapien
caggccagagatattgcttggctca

SEQ ID NO: 1939572 - DNA, 25 bp, Homo sapien
tcagtttgccagtgaagcaggccag

SEQ ID NO: 1939573 - DNA, 25 bp, Homo sapien
aattttaccgtgttgggagtcaatg

SEQ ID NO: 1939574 - DNA, 25 bp, Homo sapien
tgcccaggctaggaaaatactgctt

SEQ ID NO: 1939575 - DNA, 25 bp, Homo sapien
tttaaaaccagatgagcccaagttc

SEQ ID NO: 1939576 - DNA, 25 bp, Homo sapien
tacaagtgtgcgcaactacatccag

SEQ ID NO: 1939577 - DNA, 25 bp, Homo sapien
tcaatttgaaattagtccacaaatc

SEQ ID NO: 1939578 - DNA, 25 bp, Homo sapien
cattagaaaattggcatggataaga

SEQ ID NO: 1939579 - DNA, 25 bp, Homo sapien
tataatactacaaaacttgtgccac

SEQ ID NO: 1939580 - DNA, 25 bp, Homo sapien
ctgttcctgtgggaaaagctgcatt

SEQ ID NO: 1939581 - DNA, 25 bp, Homo sapien
gaattccttgtcctgcaatgtgcca

SEQ ID NO: 1939582 - DNA, 25 bp, Homo sapien
atctcatggacagtacagcagggtg

SEQ ID NO: 1939583 - DNA, 25 bp, Homo sapien
tgaattatttaaaccgaaagcctgc

SEQ ID NO: 1939584 - DNA, 25 bp, Homo sapien
gaaagcctgctacctagttgttgct

SEQ ID NO: 1939585 - DNA, 25 bp, Homo sapien
ttctgctttcaaggctccagaccca

SEQ ID NO: 1939586 - DNA, 25 bp, Homo sapien
cttctgctttcaaggctccagaccc

SEQ ID NO: 1939587 - DNA, 25 bp, Homo sapien
tccagacccagttcctggacctgcc

SEQ ID NO: 1939588 - DNA, 25 bp, Homo sapien
ccaaccaagaacagctacaatttga

SEQ ID NO: 1939589 - DNA, 25 bp, Homo sapien
gggccaaccaagaacagctacaatt

SEQ ID NO: 1939590 - DNA, 25 bp, Homo sapien
aaaaatggcaatgggccaaccaaga

SEQ ID NO: 1939591 - DNA, 25 bp, Homo sapien
tggcaatgggccaaccaagaacagc

SEQ ID NO: 1939592 - DNA, 25 bp, Homo sapien
taagagtaattcatggcagtgtgat

SEQ ID NO: 1939593 - DNA, 25 bp, Homo sapien
gctattctgactgcattatcaacac

SEQ ID NO: 1939594 - DNA, 25 bp, Homo sapien
ggttgcgcaccggtagtccctgcta

SEQ ID NO: 1939595 - DNA, 25 bp, Homo sapien
caatatagggagagcctaccaaaaa

SEQ ID NO: 1939596 - DNA, 25 bp, Homo sapien
gaccactataccttgaaaccttcat

SEQ ID NO: 1939597 - DNA, 25 bp, Homo sapien
ctcataattatgtaagaacggtgca

SEQ ID NO: 1939598 - DNA, 25 bp, Homo sapien
tagcgtatctcaaggtcttctcaga

SEQ ID NO: 1939599 - DNA, 25 bp, Homo sapien
tcaatggatcctccttctttagcct

SEQ ID NO: 1939600 - DNA, 25 bp, Homo sapien
gggctcatcacagtggattcaaaga

SEQ ID NO: 1939601 - DNA, 25 bp, Homo sapien
gaatcagtgaacatacttgggcttt

SEQ ID NO: 1939602 - DNA, 25 bp, Homo sapien
gtgattttgtttcaggtggtccaca

SEQ ID NO: 1939603 - DNA, 25 bp, Homo sapien
caactagcggtcttgtaggaactgg

SEQ ID NO: 1939604 - DNA, 25 bp, Homo sapien
cagccctgggaaattcttttctgat

SEQ ID NO: 1939605 - DNA, 25 bp, Homo sapien
tatttaatatcctgaacgagctttc

SEQ ID NO: 1939606 - DNA, 25 bp, Homo sapien
gacctcctcttgtttagctatttaa

SEQ ID NO: 1939607 - DNA, 25 bp, Homo sapien
ccattttagaggctagtgtctccct

SEQ ID NO: 1939608 - DNA, 25 bp, Homo sapien
ccattggatagggaagaacttcaga

SEQ ID NO: 1939609 - DNA, 25 bp, Homo sapien
taagccttacctgagaggaacaatg

SEQ ID NO: 1939610 - DNA, 25 bp, Homo sapien
tacaaatgtgcagcgaaatacccca

SEQ ID NO: 1939611 - DNA, 25 bp, Homo sapien
tagtaattaagcacgatcatgtccc

SEQ ID NO: 1939612 - DNA, 25 bp, Homo sapien
taaaacgtaatttggatatcttgag

SEQ ID NO: 1939613 - DNA, 25 bp, Homo sapien
tgtgatttagctgggtaaactatct

SEQ ID NO: 1939614 - DNA, 25 bp, Homo sapien
tggatatcttgagttgatggttttg

SEQ ID NO: 1939615 - DNA, 25 bp, Homo sapien
ctatgtgaagattgataaatcagtt

SEQ ID NO: 1939616 - DNA, 25 bp, Homo sapien
gatccgtgccatcctggtactttgg

SEQ ID NO: 1939617 - DNA, 25 bp, Homo sapien
tgtggtcaccctgtgttaggagcat

SEQ ID NO: 1939618 - DNA, 25 bp, Homo sapien
gaatgttgccgtatgtacaccaaga

SEQ ID NO: 1939619 - DNA, 25 bp, Homo sapien
ggtcgataaagggacaccagcgtca

SEQ ID NO: 1939620 - DNA, 25 bp, Homo sapien
cacgtctttcagatatctccatagc

SEQ ID NO: 1939621 - DNA, 25 bp, Homo sapien
tctccatagcctgatcatggcctaa

SEQ ID NO: 1939622 - DNA, 25 bp, Homo sapien
tgagccccccacgtctttcagatat

SEQ ID NO: 1939623 - DNA, 25 bp, Homo sapien
gatcatggcctaaactgtattctgc

SEQ ID NO: 1939624 - DNA, 25 bp, Homo sapien
taagggcacaggatagcattggctg

SEQ ID NO: 1939625 - DNA, 25 bp, Homo sapien
tagcattggctggatggctattcct

SEQ ID NO: 1939626 - DNA, 25 bp, Homo sapien
gctggatggctattcctaggagtgt

SEQ ID NO: 1939627 - DNA, 25 bp, Homo sapien
aaagggcttcataagggcacaggat

SEQ ID NO: 1939628 - DNA, 25 bp, Homo sapien
gcaagctgtaagagcagccgtgatg

SEQ ID NO: 1939629 - DNA, 25 bp, Homo sapien
gagcaagctgtaagagcagccgtga

SEQ ID NO: 1939630 - DNA, 25 bp, Homo sapien
cagagcaagctgtaagagcagccgt

SEQ ID NO: 1939631 - DNA, 25 bp, Homo sapien
caagctgtaagagcagccgtgatgt

SEQ ID NO: 1939632 - DNA, 25 bp, Homo sapien
ggcattcgtggatttagagaacaca

SEQ ID NO: 1939633 - DNA, 25 bp, Homo sapien
caggtgagagcagaacgaccaggag

SEQ ID NO: 1939634 - DNA, 25 bp, Homo sapien
agcagtgggtacatgggagcagcgc

SEQ ID NO: 1939635 - DNA, 25 bp, Homo sapien
ttgcccgcgactggtgagggtggcc

SEQ ID NO: 1939636 - DNA, 25 bp, Homo sapien
tgtgttcccagggagaggcagccac

SEQ ID NO: 1939637 - DNA, 25 bp, Homo sapien
ctgaggtgtgttcccagggagaggc

SEQ ID NO: 1939638 - DNA, 25 bp, Homo sapien
gaggtgtgttcccagggagaggcag

SEQ ID NO: 1939639 - DNA, 25 bp, Homo sapien
ggtgtgttcccagggagaggcagcc

SEQ ID NO: 1939640 - DNA, 25 bp, Homo sapien
gttttaatggtcttgctggtgaaga

SEQ ID NO: 1939641 - DNA, 25 bp, Homo sapien
agctgctaggcttgtgggaacccca

SEQ ID NO: 1939642 - DNA, 25 bp, Homo sapien
gctgttcactggttactggcctggg

SEQ ID NO: 1939643 - DNA, 25 bp, Homo sapien
ggtcagatttgtcgccaacccaggt

SEQ ID NO: 1939644 - DNA, 25 bp, Homo sapien
tgctggttctgacatgcgtccctgg

SEQ ID NO: 1939645 - DNA, 25 bp, Homo sapien
ttccacgtcgcttatcagttctcca

SEQ ID NO: 1939646 - DNA, 25 bp, Homo sapien
tccttccacgtcgcttatcagttct

SEQ ID NO: 1939647 - DNA, 25 bp, Homo sapien
cgatgaggcgtacctttctccttcc

SEQ ID NO: 1939648 - DNA, 25 bp, Homo sapien
atgcgatgaggcgtacctttctcct

SEQ ID NO: 1939649 - DNA, 25 bp, Homo sapien
ctgattctgaaggtcgtgacgtgac

SEQ ID NO: 1939650 - DNA, 25 bp, Homo sapien
agggagaccatagatgcagcagtga

SEQ ID NO: 1939651 - DNA, 25 bp, Homo sapien
tctgaaggtcgtgacgtgaccagag

SEQ ID NO: 1939652 - DNA, 25 bp, Homo sapien
gggagaccatagatgcagcagtgac

SEQ ID NO: 1939653 - DNA, 25 bp, Homo sapien
tggcttcttgtgatttctattccga

SEQ ID NO: 1939654 - DNA, 25 bp, Homo sapien
ttccgaggctcacagcaagaccatc

SEQ ID NO: 1939655 - DNA, 25 bp, Homo sapien
gatttctattccgaggctcacagca

SEQ ID NO: 1939656 - DNA, 25 bp, Homo sapien
tcttgtgatttctattccgaggctc

SEQ ID NO: 1939657 - DNA, 25 bp, Homo sapien
tcagggcaaacccaagatggcaaca

SEQ ID NO: 1939658 - DNA, 25 bp, Homo sapien
tttgatcagtcgaggagagctctgc

SEQ ID NO: 1939659 - DNA, 25 bp, Homo sapien
tggaacaacacagaactgcggctgc

SEQ ID NO: 1939660 - DNA, 25 bp, Homo sapien
gaaaaggtggatttgagcccctcac

SEQ ID NO: 1939661 - DNA, 25 bp, Homo sapien
tctacatcaggaaatcgaaccaggg

SEQ ID NO: 1939662 - DNA, 25 bp, Homo sapien
cagctatgcaactaggaacatttca

SEQ ID NO: 1939663 - DNA, 25 bp, Homo sapien
cagctctaatagaaagcgtgtcttg

SEQ ID NO: 1939664 - DNA, 25 bp, Homo sapien
cgaaccagggagacaaaaagcagct

SEQ ID NO: 1939665 - DNA, 25 bp, Homo sapien
acaaatgagccatagtctggagggc

SEQ ID NO: 1939666 - DNA, 25 bp, Homo sapien
cccagtgtaactgtgaagtgcggct

SEQ ID NO: 1939667 - DNA, 25 bp, Homo sapien
cagtagctggctagaagaaacggca

SEQ ID NO: 1939668 - DNA, 25 bp, Homo sapien
caccaggaaggtggcaataaactct

SEQ ID NO: 1939669 - DNA, 25 bp, Homo sapien
tgggacaaagcgctcctaccacttg

SEQ ID NO: 1939670 - DNA, 25 bp, Homo sapien
gaggttagttacatggctgccaagg

SEQ ID NO: 1939671 - DNA, 25 bp, Homo sapien
cagtgaggatcaccaagtgccacca

SEQ ID NO: 1939672 - DNA, 25 bp, Homo sapien
tgggccattccctgcaagtgcgtgt

SEQ ID NO: 1939673 - DNA, 25 bp, Homo sapien
gcccccgcgctctggcatctctgta

SEQ ID NO: 1939674 - DNA, 25 bp, Homo sapien
ggcgcccccgcgctctggcatctct

SEQ ID NO: 1939675 - DNA, 25 bp, Homo sapien
cgcccccgcgctctggcatctctgt

SEQ ID NO: 1939676 - DNA, 25 bp, Homo sapien
cccccgcgctctggcatctctgtac

SEQ ID NO: 1939677 - DNA, 25 bp, Homo sapien
gaagacgctgtagagcgcgatgcga

SEQ ID NO: 1939678 - DNA, 25 bp, Homo sapien
gtccacctggtcacgcgggaagacg

SEQ ID NO: 1939679 - DNA, 25 bp, Homo sapien
tcggtcgcgtacactgaaagtcccc

SEQ ID NO: 1939680 - DNA, 25 bp, Homo sapien
gggaacgcggccatcacgcggtcca

SEQ ID NO: 1939681 - DNA, 25 bp, Homo sapien
tagggcggtgttcgccccgcggctg

SEQ ID NO: 1939682 - DNA, 25 bp, Homo sapien
ctagggcggtgttcgccccgcggct

SEQ ID NO: 1939683 - DNA, 25 bp, Homo sapien
aaagcaagtcgccgtgcaggtccct

SEQ ID NO: 1939684 - DNA, 25 bp, Homo sapien
ctgcgcggggaaagcaagtcgccgt

SEQ ID NO: 1939685 - DNA, 25 bp, Homo sapien
ctgcaggccgggcggaggcgggagg

SEQ ID NO: 1939686 - DNA, 25 bp, Homo sapien
tgcaggccgggcggaggcgggaggt

SEQ ID NO: 1939687 - DNA, 25 bp, Homo sapien
ggagaactggctctccgggctaggg

SEQ ID NO: 1939688 - DNA, 25 bp, Homo sapien
ggctctccgggctagggaggctgag

SEQ ID NO: 1939689 - DNA, 25 bp, Homo sapien
tagggaggctgagcgggcctggcac

SEQ ID NO: 1939690 - DNA, 25 bp, Homo sapien
ctagggaggctgagcgggcctggca

SEQ ID NO: 1939691 - DNA, 25 bp, Homo sapien
cgggcccgcccagtcggggcgtgag

SEQ ID NO: 1939692 - DNA, 25 bp, Homo sapien
cagtcggggcgtgaggctgcaggcg

SEQ ID NO: 1939693 - DNA, 25 bp, Homo sapien
gtcggggcgtgaggctgcaggcggg

SEQ ID NO: 1939694 - DNA, 25 bp, Homo sapien
cccagtcggggcgtgaggctgcagg

SEQ ID NO: 1939695 - DNA, 25 bp, Homo sapien
ccgagagaagctccctcgcagggcg

SEQ ID NO: 1939696 - DNA, 25 bp, Homo sapien
ggccccaggtcgtcgctgaaggcca

SEQ ID NO: 1939697 - DNA, 25 bp, Homo sapien
cgcgccggcgggaggctgtgcgcaa

SEQ ID NO: 1939698 - DNA, 25 bp, Homo sapien
gaggctgtgcgcaaatggttcccgg

SEQ ID NO: 1939699 - DNA, 25 bp, Homo sapien
ggcccctgtcttggcgcggagctcg

SEQ ID NO: 1939700 - DNA, 25 bp, Homo sapien
tcttggcgcggagctcgtcggccac

SEQ ID NO: 1939701 - DNA, 25 bp, Homo sapien
ccctgtcttggcgcggagctcgtcg

SEQ ID NO: 1939702 - DNA, 25 bp, Homo sapien
tgtcttggcgcggagctcgtcggcc

SEQ ID NO: 1939703 - DNA, 25 bp, Homo sapien
ttgatgccataggtgcatttcttgc

SEQ ID NO: 1939704 - DNA, 25 bp, Homo sapien
cggcctctccgggtggtagaacttg

SEQ ID NO: 1939705 - DNA, 25 bp, Homo sapien
ccagttgcgcgtggtgcggcctctc

SEQ ID NO: 1939706 - DNA, 25 bp, Homo sapien
ctccgggtggtagaacttgcacttg

SEQ ID NO: 1939707 - DNA, 25 bp, Homo sapien
ccctggaaacgcctcaagatctggg

SEQ ID NO: 1939708 - DNA, 25 bp, Homo sapien
gggcgctgagcacactcatcccagg

SEQ ID NO: 1939709 - DNA, 25 bp, Homo sapien
tatgcagaggagtgtcgttcccagg

SEQ ID NO: 1939710 - DNA, 25 bp, Homo sapien
acactcatcccagggtatgcagagg

SEQ ID NO: 1939711 - DNA, 25 bp, Homo sapien
gaaagttaactctccaggtagcaca

SEQ ID NO: 1939712 - DNA, 25 bp, Homo sapien
gagctggctagaaggctggcatccc

SEQ ID NO: 1939713 - DNA, 25 bp, Homo sapien
taactcttcatggatagcagtgacc

SEQ ID NO: 1939714 - DNA, 25 bp, Homo sapien
caccggccaggatgtcagttctaca

SEQ ID NO: 1939715 - DNA, 25 bp, Homo sapien
agggagggtccatggcggcccaggg

SEQ ID NO: 1939716 - DNA, 25 bp, Homo sapien
ggggcttcggcttcctgctcaggaa

SEQ ID NO: 1939717 - DNA, 25 bp, Homo sapien
acaatgctgccaggatggctctggg

SEQ ID NO: 1939718 - DNA, 25 bp, Homo sapien
caggaagttgctcagggagggtcca

SEQ ID NO: 1939719 - DNA, 25 bp, Homo sapien
gctcgatgaaccacttccactcggg

SEQ ID NO: 1939720 - DNA, 25 bp, Homo sapien
gtcgtcgtagcagaccaggcgcttg

SEQ ID NO: 1939721 - DNA, 25 bp, Homo sapien
gtaggccaccttcacgatgtagcgg

SEQ ID NO: 1939722 - DNA, 25 bp, Homo sapien
tcccggtagttgtcgttggagacga

SEQ ID NO: 1939723 - DNA, 25 bp, Homo sapien
gggcgacggagacgcgggtgagggc

SEQ ID NO: 1939724 - DNA, 25 bp, Homo sapien
ggcggggcgacggagacgcgggtga

SEQ ID NO: 1939725 - DNA, 25 bp, Homo sapien
cgacggagacgcgggtgagggccca

SEQ ID NO: 1939726 - DNA, 25 bp, Homo sapien
cggggcgacggagacgcgggtgagg

SEQ ID NO: 1939727 - DNA, 25 bp, Homo sapien
cagaatatgcgcagaaggctggagt

SEQ ID NO: 1939728 - DNA, 25 bp, Homo sapien
ggtgggagccattgccctgcagtct

SEQ ID NO: 1939729 - DNA, 25 bp, Homo sapien
tgctcccaggagaatggacctccac

SEQ ID NO: 1939730 - DNA, 25 bp, Homo sapien
caaaatcgggatgactaacaggtga

SEQ ID NO: 1939731 - DNA, 25 bp, Homo sapien
tgcaccaaggaaacgtgtctagtac

SEQ ID NO: 1939732 - DNA, 25 bp, Homo sapien
tgactatcgatgttagaagtgcacc

SEQ ID NO: 1939733 - DNA, 25 bp, Homo sapien
gaagtgcaccaaggaaacgtgtcta

SEQ ID NO: 1939734 - DNA, 25 bp, Homo sapien
caactaagtagatatttgactatcg

SEQ ID NO: 1939735 - DNA, 25 bp, Homo sapien
tcttgagcatacatctgctccagca

SEQ ID NO: 1939736 - DNA, 25 bp, Homo sapien
ttgagcatacatctgctccagcata

SEQ ID NO: 1939737 - DNA, 25 bp, Homo sapien
ctcttgagcatacatctgctccagc

SEQ ID NO: 1939738 - DNA, 25 bp, Homo sapien
tgagcatacatctgctccagcatac

SEQ ID NO: 1939739 - DNA, 25 bp, Homo sapien
acagccagcttgattccccggcaag

SEQ ID NO: 1939740 - DNA, 25 bp, Homo sapien
gtcagctcttggtgggtccttcctc

SEQ ID NO: 1939741 - DNA, 25 bp, Homo sapien
aaaaactttgatgtaggtgtgtcct

SEQ ID NO: 1939742 - DNA, 25 bp, Homo sapien
tgtcctctgtccctgaaccagtcaa

SEQ ID NO: 1939743 - DNA, 25 bp, Homo sapien
aatcatagagacacagcaagtgttc

SEQ ID NO: 1939744 - DNA, 25 bp, Homo sapien
aacaaagaaatcatagagacacagc

SEQ ID NO: 1939745 - DNA, 25 bp, Homo sapien
aagaaatcatagagacacagcaagt

SEQ ID NO: 1939746 - DNA, 25 bp, Homo sapien
aaacaaagaaatcatagagacacag

SEQ ID NO: 1939747 - DNA, 25 bp, Homo sapien
tggtgaaacctgaagacgtccctca

SEQ ID NO: 1939748 - DNA, 25 bp, Homo sapien
tgaagacgtccctcagactcagtca

SEQ ID NO: 1939749 - DNA, 25 bp, Homo sapien
aaacgctgctccaagtgactggtga

SEQ ID NO: 1939750 - DNA, 25 bp, Homo sapien
caaacgctgctccaagtgactggtg

SEQ ID NO: 1939751 - DNA, 25 bp, Homo sapien
cggaaggatccaaacacaggcataa

SEQ ID NO: 1939752 - DNA, 25 bp, Homo sapien
ggaaggatccaaacacaggcataac

SEQ ID NO: 1939753 - DNA, 25 bp, Homo sapien
aaggatccaaacacaggcataactg

SEQ ID NO: 1939754 - DNA, 25 bp, Homo sapien
gatccaaacacaggcataactgaca

SEQ ID NO: 1939755 - DNA, 25 bp, Homo sapien
ccatccctcgcatgaccccaggcct

SEQ ID NO: 1939756 - DNA, 25 bp, Homo sapien
gaagtgagtctgaagccacacccca

SEQ ID NO: 1939757 - DNA, 25 bp, Homo sapien
agtgagtctgaagccacaccccatc

SEQ ID NO: 1939758 - DNA, 25 bp, Homo sapien
tggaggaacatgacttggaggagaa

SEQ ID NO: 1939759 - DNA, 25 bp, Homo sapien
cttggagttctcattacgttgaccc

SEQ ID NO: 1939760 - DNA, 25 bp, Homo sapien
cacttggagttctcattacgttgac

SEQ ID NO: 1939761 - DNA, 25 bp, Homo sapien
catcacttggagttctcattacgtt

SEQ ID NO: 1939762 - DNA, 25 bp, Homo sapien
tggagttctcattacgttgacccac

SEQ ID NO: 1939763 - DNA, 25 bp, Homo sapien
agtagtcctgcttaggagagcccat

SEQ ID NO: 1939764 - DNA, 25 bp, Homo sapien
gccaagcacgaccaatggcattggg

SEQ ID NO: 1939765 - DNA, 25 bp, Homo sapien
caggtcttctgggttcagccaagca

SEQ ID NO: 1939766 - DNA, 25 bp, Homo sapien
tcttacaaaatgaggaatgatgcca

SEQ ID NO: 1939767 - DNA, 25 bp, Homo sapien
ggtcctgcaacaccaaatccaaagt

SEQ ID NO: 1939768 - DNA, 25 bp, Homo sapien
gggaaactctcggaggctctgttga

SEQ ID NO: 1939769 - DNA, 25 bp, Homo sapien
ggaccatctgggctgaaccattgca

SEQ ID NO: 1939770 - DNA, 25 bp, Homo sapien
tgacacattcggtgccgcggagaat

SEQ ID NO: 1939771 - DNA, 25 bp, Homo sapien
cccgaggcactagcctgggtgcagc

SEQ ID NO: 1939772 - DNA, 25 bp, Homo sapien
atcgccacgttgctgccatcaatca

SEQ ID NO: 1939773 - DNA, 25 bp, Homo sapien
catcaatcactatgggtcgcagaga

SEQ ID NO: 1939774 - DNA, 25 bp, Homo sapien
ccgtgcggataagctcctgcagcac

SEQ ID NO: 1939775 - DNA, 25 bp, Homo sapien
agcttgcccaacacccggagcacat

SEQ ID NO: 1939776 - DNA, 25 bp, Homo sapien
acccggagcacatcctcccggtcat

SEQ ID NO: 1939777 - DNA, 25 bp, Homo sapien
ccagcttgcccaacacccggagcac

SEQ ID NO: 1939778 - DNA, 25 bp, Homo sapien
ggagcacatcctcccggtcatagcc

SEQ ID NO: 1939779 - DNA, 25 bp, Homo sapien
ctgtgcccagcggccactggcgcag

SEQ ID NO: 1939780 - DNA, 25 bp, Homo sapien
tgtgcccagcggccactggcgcagg

SEQ ID NO: 1939781 - DNA, 25 bp, Homo sapien
tgcatccatcaggtgtttcctgggc

SEQ ID NO: 1939782 - DNA, 25 bp, Homo sapien
atgcatccatcaggtgtttcctggg

SEQ ID NO: 1939783 - DNA, 25 bp, Homo sapien
gcaagggcaaggtgtgcctgcgctg

SEQ ID NO: 1939784 - DNA, 25 bp, Homo sapien
ttgacttcattgtgtcaatcacatc

SEQ ID NO: 1939785 - DNA, 25 bp, Homo sapien
ccactttggcctggcattctctgca

SEQ ID NO: 1939786 - DNA, 25 bp, Homo sapien
acagcaggtctaacaatggcagggt

SEQ ID NO: 1939787 - DNA, 25 bp, Homo sapien
tcttctcctatttgacttcattgtg

SEQ ID NO: 1939788 - DNA, 25 bp, Homo sapien
ccagaacatctgcatcacaggcaaa

SEQ ID NO: 1939789 - DNA, 25 bp, Homo sapien
cagaagccttcccaccccgacagcc

SEQ ID NO: 1939790 - DNA, 25 bp, Homo sapien
ctgcatcacaggcaaaccccacagc

SEQ ID NO: 1939791 - DNA, 25 bp, Homo sapien
accccacagccacacccctcagaag

SEQ ID NO: 1939792 - DNA, 25 bp, Homo sapien
gcccacagcccgttttctgaggaga

SEQ ID NO: 1939793 - DNA, 25 bp, Homo sapien
ggttaccaaggaacggctctgagga

SEQ ID NO: 1939794 - DNA, 25 bp, Homo sapien
gcagcatcttgttagctgggtcagg

SEQ ID NO: 1939795 - DNA, 25 bp, Homo sapien
gtaacttgcgctccatgtgacagaa

SEQ ID NO: 1939796 - DNA, 25 bp, Homo sapien
aactcagccaccatggtgaggagaa

SEQ ID NO: 1939797 - DNA, 25 bp, Homo sapien
actcagccaccatggtgaggagaaa

SEQ ID NO: 1939798 - DNA, 25 bp, Homo sapien
cacagaaatccacgaaattacagcc

SEQ ID NO: 1939799 - DNA, 25 bp, Homo sapien
gaaatccacgaaattacagcctcca

SEQ ID NO: 1939800 - DNA, 25 bp, Homo sapien
tgtaccactgtaactatcttaaggg

SEQ ID NO: 1939801 - DNA, 25 bp, Homo sapien
ggcacccaccattgtacgttctgtc

SEQ ID NO: 1939802 - DNA, 25 bp, Homo sapien
tgtcaccggcttattttgctcagca

SEQ ID NO: 1939803 - DNA, 25 bp, Homo sapien
gtacaggtcagtagcatggagcaca

SEQ ID NO: 1939804 - DNA, 25 bp, Homo sapien
ttcacaatgaatgctggcccagtcg

SEQ ID NO: 1939805 - DNA, 25 bp, Homo sapien
agcagccactaggagccacttcatg

SEQ ID NO: 1939806 - DNA, 25 bp, Homo sapien
acgccaatgttctcccgtcagtgag

SEQ ID NO: 1939807 - DNA, 25 bp, Homo sapien
gggtgtgtccctccggtcttcacaa

SEQ ID NO: 1939808 - DNA, 25 bp, Homo sapien
ggcactagcctgtgtcagagataac

SEQ ID NO: 1939809 - DNA, 25 bp, Homo sapien
cttctgactagggaccaaggcacta

SEQ ID NO: 1939810 - DNA, 25 bp, Homo sapien
gacacaaacatagcttgcaggagga

SEQ ID NO: 1939811 - DNA, 25 bp, Homo sapien
gaattccaaacgagtcacgaagtcc

SEQ ID NO: 1939812 - DNA, 25 bp, Homo sapien
tgagtaagaaatcgtcaatatcttc

SEQ ID NO: 1939813 - DNA, 25 bp, Homo sapien
ttcagctcaagtcctgtagaagatg

SEQ ID NO: 1939814 - DNA, 25 bp, Homo sapien
attgagtaagaaatcgtcaatatct

SEQ ID NO: 1939815 - DNA, 25 bp, Homo sapien
agctcaagtcctgtagaagatgcca

SEQ ID NO: 1939816 - DNA, 25 bp, Homo sapien
cctgttttctcctctcgaattcttg

SEQ ID NO: 1939817 - DNA, 25 bp, Homo sapien
tttgaagaaggtactctatttgtac

SEQ ID NO: 1939818 - DNA, 25 bp, Homo sapien
tttgtagtgcctttgggcttctctc

SEQ ID NO: 1939819 - DNA, 25 bp, Homo sapien
gtttcttagcagcacgtttagcttg

SEQ ID NO: 1939820 - DNA, 25 bp, Homo sapien
gtcaatgctacactgttcttcaagc

SEQ ID NO: 1939821 - DNA, 25 bp, Homo sapien
gctgaggctggtcaaagctacactg

SEQ ID NO: 1939822 - DNA, 25 bp, Homo sapien
ggctgaggctggtcaaagctacact

SEQ ID NO: 1939823 - DNA, 25 bp, Homo sapien
tgaggctggtcaaagctacactgat

SEQ ID NO: 1939824 - DNA, 25 bp, Homo sapien
tagagatgtttcagattatctgggt

SEQ ID NO: 1939825 - DNA, 25 bp, Homo sapien
tgtttcagattatctgggtatcgat

SEQ ID NO: 1939826 - DNA, 25 bp, Homo sapien
gatgtttcagattatctgggtatcg

SEQ ID NO: 1939827 - DNA, 25 bp, Homo sapien
tgaaaatagagatgtttcagattat

SEQ ID NO: 1939828 - DNA, 25 bp, Homo sapien
tgagattccagtgacgtttgggcct

SEQ ID NO: 1939829 - DNA, 25 bp, Homo sapien
tgggccttcttttccttccgtagca

SEQ ID NO: 1939830 - DNA, 25 bp, Homo sapien
attgagattccagtgacgtttgggc

SEQ ID NO: 1939831 - DNA, 25 bp, Homo sapien
gattccagtgacgtttgggccttct

SEQ ID NO: 1939832 - DNA, 25 bp, Homo sapien
tttcttcgaaaagcaaagccttgtc

SEQ ID NO: 1939833 - DNA, 25 bp, Homo sapien
cagttttcttcgaaaagcaaagcct

SEQ ID NO: 1939834 - DNA, 25 bp, Homo sapien
gaaggcttgcgggtggttaggccgc

SEQ ID NO: 1939835 - DNA, 25 bp, Homo sapien
gtggttaggccgccatgtcttctgt

SEQ ID NO: 1939836 - DNA, 25 bp, Homo sapien
tgcgggtggttaggccgccatgtct

SEQ ID NO: 1939837 - DNA, 25 bp, Homo sapien
cccacgaaggcttgcgggtggttag

SEQ ID NO: 1939838 - DNA, 25 bp, Homo sapien
tgcagccaactaactgcgtcatcga

SEQ ID NO: 1939839 - DNA, 25 bp, Homo sapien
gcagccaactaactgcgtcatcgac

SEQ ID NO: 1939840 - DNA, 25 bp, Homo sapien
agccaactaactgcgtcatcgacat

SEQ ID NO: 1939841 - DNA, 25 bp, Homo sapien
cagccaactaactgcgtcatcgaca

SEQ ID NO: 1939842 - DNA, 25 bp, Homo sapien
aaaatttcggaagctagtgctcggc

SEQ ID NO: 1939843 - DNA, 25 bp, Homo sapien
tatgacctaacaactgcactactgg

SEQ ID NO: 1939844 - DNA, 25 bp, Homo sapien
cacctaacaggatatgcagatggca

SEQ ID NO: 1939845 - DNA, 25 bp, Homo sapien
taaaagtgaactattggccaggtac

SEQ ID NO: 1939846 - DNA, 25 bp, Homo sapien
tgacaaaagatttctccccagtagt

SEQ ID NO: 1939847 - DNA, 25 bp, Homo sapien
gattgcatgccaatctacaactgat

SEQ ID NO: 1939848 - DNA, 25 bp, Homo sapien
gaaaagtcacattatatccaaaaga

SEQ ID NO: 1939849 - DNA, 25 bp, Homo sapien
gatagtagactaattcttcaaagta

SEQ ID NO: 1939850 - DNA, 25 bp, Homo sapien
gctagtcacaggcacaatcgcagtg

SEQ ID NO: 1939851 - DNA, 25 bp, Homo sapien
gattttaacacgaaagttgcaagag

SEQ ID NO: 1939852 - DNA, 25 bp, Homo sapien
catcaacagatgtcactagaggaac

SEQ ID NO: 1939853 - DNA, 25 bp, Homo sapien
aaactaagagtttgccatcaacaga

SEQ ID NO: 1939854 - DNA, 25 bp, Homo sapien
taaggacattcatcaacaaagcagg

SEQ ID NO: 1939855 - DNA, 25 bp, Homo sapien
tatgctgtttatgagacacactaaa

SEQ ID NO: 1939856 - DNA, 25 bp, Homo sapien
aaatctagctaaactatgcgcaatg

SEQ ID NO: 1939857 - DNA, 25 bp, Homo sapien
acaaagcaggatagaaaaatctagc

SEQ ID NO: 1939858 - DNA, 25 bp, Homo sapien
tccactctagtcaaaatggagtagc

SEQ ID NO: 1939859 - DNA, 25 bp, Homo sapien
ggaacaggagatacaactgggagct

SEQ ID NO: 1939860 - DNA, 25 bp, Homo sapien
gatgttagacaaaagccagtgcagg

SEQ ID NO: 1939861 - DNA, 25 bp, Homo sapien
taagctgtggcactaaggctaggga

SEQ ID NO: 1939862 - DNA, 25 bp, Homo sapien
tacaatccaatatgggcagggtggg

SEQ ID NO: 1939863 - DNA, 25 bp, Homo sapien
taccttcgtagtgggtcaaattagc

SEQ ID NO: 1939864 - DNA, 25 bp, Homo sapien
tttatgtccccaaacagagttcaag

SEQ ID NO: 1939865 - DNA, 25 bp, Homo sapien
gaatgggcaagcacactgaaagagc

SEQ ID NO: 1939866 - DNA, 25 bp, Homo sapien
aaggtaactcacagtgccaagagag

SEQ ID NO: 1939867 - DNA, 25 bp, Homo sapien
gctttcctggcactcttaagttaga

SEQ ID NO: 1939868 - DNA, 25 bp, Homo sapien
gacaacatctgtatcttaagctggc

SEQ ID NO: 1939869 - DNA, 25 bp, Homo sapien
gccaagagaggtataaactagtaca

SEQ ID NO: 1939870 - DNA, 25 bp, Homo sapien
ctctttcataaagatctgtttggta

SEQ ID NO: 1939871 - DNA, 25 bp, Homo sapien
agatcggctacgacttcggttctga

SEQ ID NO: 1939872 - DNA, 25 bp, Homo sapien
atggccatccctctctcgagatcgg

SEQ ID NO: 1939873 - DNA, 25 bp, Homo sapien
tggacttctgcttcggtctctcttt

SEQ ID NO: 1939874 - DNA, 25 bp, Homo sapien
tatgtatagtcttattcccagctcc

SEQ ID NO: 1939875 - DNA, 25 bp, Homo sapien
gaacatgtctctagagcaatctgca

SEQ ID NO: 1939876 - DNA, 25 bp, Homo sapien
gaaaagtctaccattagaaggctgt

SEQ ID NO: 1939877 - DNA, 25 bp, Homo sapien
ttttggctgaaacgaaggatcagct

SEQ ID NO: 1939878 - DNA, 25 bp, Homo sapien
tatcaccagataccactgtagcaga

SEQ ID NO: 1939879 - DNA, 25 bp, Homo sapien
gatgaatacccatggttaaggactg

SEQ ID NO: 1939880 - DNA, 25 bp, Homo sapien
gatactgtacaccttgagtttgaca

SEQ ID NO: 1939881 - DNA, 25 bp, Homo sapien
taaacactggtagaatcctttgccc

SEQ ID NO: 1939882 - DNA, 25 bp, Homo sapien
ttcagatgagcctcaaagggtaagt

SEQ ID NO: 1939883 - DNA, 25 bp, Homo sapien
taaaatcactcctactcgggagtag

SEQ ID NO: 1939884 - DNA, 25 bp, Homo sapien
gacatttaggagatgtgtcaaacaa

SEQ ID NO: 1939885 - DNA, 25 bp, Homo sapien
tcaaacaagtactcttaaggttaga

SEQ ID NO: 1939886 - DNA, 25 bp, Homo sapien
tgattttgagtcttcggcctgctca

SEQ ID NO: 1939887 - DNA, 25 bp, Homo sapien
gattttgagtcttcggcctgctcat

SEQ ID NO: 1939888 - DNA, 25 bp, Homo sapien
ctgcagtagttagttaaggataaat

SEQ ID NO: 1939889 - DNA, 25 bp, Homo sapien
gttagttaaggataaatgtgataaa

SEQ ID NO: 1939890 - DNA, 25 bp, Homo sapien
tagttagttaaggataaatgtgata

SEQ ID NO: 1939891 - DNA, 25 bp, Homo sapien
cagtagttagttaaggataaatgtg

SEQ ID NO: 1939892 - DNA, 25 bp, Homo sapien
gaaagaatcctaatcctaaacaatc

SEQ ID NO: 1939893 - DNA, 25 bp, Homo sapien
tcataaggctaaaagtaactaaagc

SEQ ID NO: 1939894 - DNA, 25 bp, Homo sapien
aatcaagaggaaattcagcaatgca

SEQ ID NO: 1939895 - DNA, 25 bp, Homo sapien
cagcaatgcatatcgagttatcatg

SEQ ID NO: 1939896 - DNA, 25 bp, Homo sapien
tcatacgaaagaagacagcactccc

SEQ ID NO: 1939897 - DNA, 25 bp, Homo sapien
tcatacgaaagaagacagcactcca

SEQ ID NO: 1939898 - DNA, 25 bp, Homo sapien
tcttaaggcccataaagtagatgcc

SEQ ID NO: 1939899 - DNA, 25 bp, Homo sapien
taagctctatgtgggcaggaactga

SEQ ID NO: 1939900 - DNA, 25 bp, Homo sapien
tttttcatactccttgaaatcactc

SEQ ID NO: 1939901 - DNA, 25 bp, Homo sapien
ctttttcatactccttgaaatcact

SEQ ID NO: 1939902 - DNA, 25 bp, Homo sapien
tctttttcatactccttgaaatcac

SEQ ID NO: 1939903 - DNA, 25 bp, Homo sapien
taaatggcatatatcgagagacaga

SEQ ID NO: 1939904 - DNA, 25 bp, Homo sapien
ttttgctaggtagccacatgctgcc

SEQ ID NO: 1939905 - DNA, 25 bp, Homo sapien
ccattgagcccatgagaacattaag

SEQ ID NO: 1939906 - DNA, 25 bp, Homo sapien
caaatgccgtgttcaagtagagcca

SEQ ID NO: 1939907 - DNA, 25 bp, Homo sapien
ctggctaaaatccacatgtattctt

SEQ ID NO: 1939908 - DNA, 25 bp, Homo sapien
tggctaaaatccacatgtattcttc

SEQ ID NO: 1939909 - DNA, 25 bp, Homo sapien
actggctaaaatccacatgtattct

SEQ ID NO: 1939910 - DNA, 25 bp, Homo sapien
tgaagaatgctttctcacaatcttc

SEQ ID NO: 1939911 - DNA, 25 bp, Homo sapien
gaagaatgctttctcacaatcttct

SEQ ID NO: 1939912 - DNA, 25 bp, Homo sapien
tttgaagaatgctttctcacaatct

SEQ ID NO: 1939913 - DNA, 25 bp, Homo sapien
agaatgctttctcacaatcttcttc

SEQ ID NO: 1939914 - DNA, 25 bp, Homo sapien
actcaagcataaatctttatggaaa

SEQ ID NO: 1939915 - DNA, 25 bp, Homo sapien
tcaagcataaatctttatggaaaag

SEQ ID NO: 1939916 - DNA, 25 bp, Homo sapien
ctcaagcataaatctttatggaaaa

SEQ ID NO: 1939917 - DNA, 25 bp, Homo sapien
taaaagcgtaacagagggactctcc

SEQ ID NO: 1939918 - DNA, 25 bp, Homo sapien
caataaaagcgtaacagagggactc

SEQ ID NO: 1939919 - DNA, 25 bp, Homo sapien
aaattcaataaaagcgtaacagagg

SEQ ID NO: 1939920 - DNA, 25 bp, Homo sapien
aagcgtaacagagggactctcctgt

SEQ ID NO: 1939921 - DNA, 25 bp, Homo sapien
gtacattttctggaggtttaatatc

SEQ ID NO: 1939922 - DNA, 25 bp, Homo sapien
caaacagtacattttctggaggttt

SEQ ID NO: 1939923 - DNA, 25 bp, Homo sapien
tgaggaaagagtagataaacctaaa

SEQ ID NO: 1939924 - DNA, 25 bp, Homo sapien
aaattgaaaaatattctattggccg

SEQ ID NO: 1939925 - DNA, 25 bp, Homo sapien
gaaagagtagataaacctaaattga

SEQ ID NO: 1939926 - DNA, 25 bp, Homo sapien
tgaaaaatattctattggccgggca

SEQ ID NO: 1939927 - DNA, 25 bp, Homo sapien
gtagagccaatttattactatgcca

SEQ ID NO: 1939928 - DNA, 25 bp, Homo sapien
cagtagagccaatttattactatgc

SEQ ID NO: 1939929 - DNA, 25 bp, Homo sapien
atttgaacaaagataattatcttac

SEQ ID NO: 1939930 - DNA, 25 bp, Homo sapien
gccaatttattactatgccatacca

SEQ ID NO: 1939931 - DNA, 25 bp, Homo sapien
cttcatctgctcctattcgaccact

SEQ ID NO: 1939932 - DNA, 25 bp, Homo sapien
tcttcatctgctcctattcgaccac

SEQ ID NO: 1939933 - DNA, 25 bp, Homo sapien
tacttcctcagctgatcttcctttg

SEQ ID NO: 1939934 - DNA, 25 bp, Homo sapien
ttctacttcctcagctgatcttcct

SEQ ID NO: 1939935 - DNA, 25 bp, Homo sapien
agggtcatcaaatggatcatctaaa

SEQ ID NO: 1939936 - DNA, 25 bp, Homo sapien
tcaaatggatcatctaaaatcaccg

SEQ ID NO: 1939937 - DNA, 25 bp, Homo sapien
gggtcatcaaatggatcatctaaaa

SEQ ID NO: 1939938 - DNA, 25 bp, Homo sapien
tggatcatctaaaatcaccgtatga

SEQ ID NO: 1939939 - DNA, 25 bp, Homo sapien
caccgtatggacaccatcaagataa

SEQ ID NO: 1939940 - DNA, 25 bp, Homo sapien
caaacaccgtatggacaccatcaag

SEQ ID NO: 1939941 - DNA, 25 bp, Homo sapien
tcaccaaacaccgtatggacaccat

SEQ ID NO: 1939942 - DNA, 25 bp, Homo sapien
gtcacctcaccaaacaccgtatgga

SEQ ID NO: 1939943 - DNA, 25 bp, Homo sapien
caaaaaagcttgcttgatcaccata

SEQ ID NO: 1939944 - DNA, 25 bp, Homo sapien
tcaaaaaagcttgcttgatcaccat

SEQ ID NO: 1939945 - DNA, 25 bp, Homo sapien
aaaaagcttgcttgatcaccataca

SEQ ID NO: 1939946 - DNA, 25 bp, Homo sapien
ctcaaaaaagcttgcttgatcacca

SEQ ID NO: 1939947 - DNA, 25 bp, Homo sapien
aaagatagactctcctccacggcca

SEQ ID NO: 1939948 - DNA, 25 bp, Homo sapien
caaagatagactctcctccacggcc

SEQ ID NO: 1939949 - DNA, 25 bp, Homo sapien
ccaaagatagactctcctccacggc

SEQ ID NO: 1939950 - DNA, 25 bp, Homo sapien
atcgccagtttgtatgataaaatcc

SEQ ID NO: 1939951 - DNA, 25 bp, Homo sapien
cgccagtttgtatgataaaatccct

SEQ ID NO: 1939952 - DNA, 25 bp, Homo sapien
gtaggatcgccagtttgtatgataa

SEQ ID NO: 1939953 - DNA, 25 bp, Homo sapien
ctgtaggatcgccagtttgtatgat

SEQ ID NO: 1939954 - DNA, 25 bp, Homo sapien
cattgtgaataaggcaataattgta

SEQ ID NO: 1939955 - DNA, 25 bp, Homo sapien
attttgcacagtttcaagaaattca

SEQ ID NO: 1939956 - DNA, 25 bp, Homo sapien
ctgtacattgtgaataaggcaataa

SEQ ID NO: 1939957 - DNA, 25 bp, Homo sapien
ttattttgcacagtttcaagaaatt

SEQ ID NO: 1939958 - DNA, 25 bp, Homo sapien
cagagccaaccagacatcaagtgcc

SEQ ID NO: 1939959 - DNA, 25 bp, Homo sapien
taaactggaacctaatcaaggctct

SEQ ID NO: 1939960 - DNA, 25 bp, Homo sapien
aacaatttataagcgcaacaaggcc

SEQ ID NO: 1939961 - DNA, 25 bp, Homo sapien
taacgcacccagtaaataatcagtc

SEQ ID NO: 1939962 - DNA, 25 bp, Homo sapien
attataaatgaagcaagattggcta

SEQ ID NO: 1939963 - DNA, 25 bp, Homo sapien
taaatgaagcaagattggctatgtg

SEQ ID NO: 1939964 - DNA, 25 bp, Homo sapien
tatgtgttcacagctgttaaacaaa

SEQ ID NO: 1939965 - DNA, 25 bp, Homo sapien
attggctatgtgttcacagctgtta

SEQ ID NO: 1939966 - DNA, 25 bp, Homo sapien
caagcttaccccagtattatgaggc

SEQ ID NO: 1939967 - DNA, 25 bp, Homo sapien
tagtgtgtgccctaaaagtagcaga

SEQ ID NO: 1939968 - DNA, 25 bp, Homo sapien
ttgaaacactcgatccagccactcg

SEQ ID NO: 1939969 - DNA, 25 bp, Homo sapien
tttacattcttgagcgagggcacgc

SEQ ID NO: 1939970 - DNA, 25 bp, Homo sapien
taggcgtatctgaccacactcgagt

SEQ ID NO: 1939971 - DNA, 25 bp, Homo sapien
gactattcacgactgacctaggcgt

SEQ ID NO: 1939972 - DNA, 25 bp, Homo sapien
tctgatcatcagtagggcacacaag

SEQ ID NO: 1939973 - DNA, 25 bp, Homo sapien
tctgcattccatgtgggtaggaccc

SEQ ID NO: 1939974 - DNA, 25 bp, Homo sapien
cgatgacgacgtcgcctaaagtggt

SEQ ID NO: 1939975 - DNA, 25 bp, Homo sapien
cttcggtgtacaagtcgatgacgac

SEQ ID NO: 1939976 - DNA, 25 bp, Homo sapien
cgacgtcgcctaaagtggtctccag

SEQ ID NO: 1939977 - DNA, 25 bp, Homo sapien
cacgcggccgttcttcggtgtacaa

SEQ ID NO: 1939978 - DNA, 25 bp, Homo sapien
cgctcctcctccgctacaaaccccg

SEQ ID NO: 1939979 - DNA, 25 bp, Homo sapien
taaatctgcaaggtggaagaaaagt

SEQ ID NO: 1939980 - DNA, 25 bp, Homo sapien
aaatctgcaaggtggaagaaaagtc

SEQ ID NO: 1939981 - DNA, 25 bp, Homo sapien
aatctgcaaggtggaagaaaagtct

SEQ ID NO: 1939982 - DNA, 25 bp, Homo sapien
ttaaatctgcaaggtggaagaaaag

SEQ ID NO: 1939983 - DNA, 25 bp, Homo sapien
ctttagagttacgatactgaccaaa

SEQ ID NO: 1939984 - DNA, 25 bp, Homo sapien
tcactttagagttacgatactgacc

SEQ ID NO: 1939985 - DNA, 25 bp, Homo sapien
cactttagagttacgatactgacca

SEQ ID NO: 1939986 - DNA, 25 bp, Homo sapien
ttagagttacgatactgaccaaaaa

SEQ ID NO: 1939987 - DNA, 25 bp, Homo sapien
tgtccccgcgccgcctccaggggtc

SEQ ID NO: 1939988 - DNA, 25 bp, Homo sapien
gcgccgcctccaggggtcggcagaa

SEQ ID NO: 1939989 - DNA, 25 bp, Homo sapien
cccgcgccgcctccaggggtcggca

SEQ ID NO: 1939990 - DNA, 25 bp, Homo sapien
gccgcctccaggggtcggcagaatg

SEQ ID NO: 1939991 - DNA, 25 bp, Homo sapien
ttacgactccgactctccgggaggc

SEQ ID NO: 1939992 - DNA, 25 bp, Homo sapien
ctgcgtcgctgtgagtgagcctcga

SEQ ID NO: 1939993 - DNA, 25 bp, Homo sapien
ctctgcccgggttgtccaagatgga

SEQ ID NO: 1939994 - DNA, 25 bp, Homo sapien
tgatcaggccttcgtaatggcgcct

SEQ ID NO: 1939995 - DNA, 25 bp, Homo sapien
tgcgatcgcgagggtccgccgttcc

SEQ ID NO: 1939996 - DNA, 25 bp, Homo sapien
ctgcgatcgcgagggtccgccgttc

SEQ ID NO: 1939997 - DNA, 25 bp, Homo sapien
gcgatcgcgagggtccgccgttccg

SEQ ID NO: 1939998 - DNA, 25 bp, Homo sapien
cgatcgcgagggtccgccgttccga

SEQ ID NO: 1939999 - DNA, 25 bp, Homo sapien
taatgtttttgtcggatgttggagg

SEQ ID NO: 1940000 - DNA, 25 bp, Homo sapien
tggccctcgcgcgacgtaatgtttt

SEQ ID NO: 1940001 - DNA, 25 bp, Homo sapien
cctcgcgcgacgtaatgtttttgtc

SEQ ID NO: 1940002 - DNA, 25 bp, Homo sapien
gagaagttctcacggcggggcgcga

SEQ ID NO: 1940003 - DNA, 25 bp, Homo sapien
taagaaaggaagtgctagtactact

SEQ ID NO: 1940004 - DNA, 25 bp, Homo sapien
tgtctcctctcttatggccatcttt

SEQ ID NO: 1940005 - DNA, 25 bp, Homo sapien
gaattggacgtggaatacagcctgt

SEQ ID NO: 1940006 - DNA, 25 bp, Homo sapien
tgtgctgcaagctgatccatggtag

SEQ ID NO: 1940007 - DNA, 25 bp, Homo sapien
tcaaaacattaaatgcagcaacaac

SEQ ID NO: 1940008 - DNA, 25 bp, Homo sapien
aaacattaaatgcagcaacaacaac

SEQ ID NO: 1940009 - DNA, 25 bp, Homo sapien
cttcaaaacattaaatgcagcaaca

SEQ ID NO: 1940010 - DNA, 25 bp, Homo sapien
caacaacaaatcttctttaattctt

SEQ ID NO: 1940011 - DNA, 25 bp, Homo sapien
ttgttagaaacgagtcactaggctg

SEQ ID NO: 1940012 - DNA, 25 bp, Homo sapien
gaatctgagcttggcttagcagggt

SEQ ID NO: 1940013 - DNA, 25 bp, Homo sapien
tggcaactagcttcatcgagaggac

SEQ ID NO: 1940014 - DNA, 25 bp, Homo sapien
ttgtcacacgaagctccccatagag

SEQ ID NO: 1940015 - DNA, 25 bp, Homo sapien
tattctctaaaagggctggctattc

SEQ ID NO: 1940016 - DNA, 25 bp, Homo sapien
gaaattgctaaactctaagactgcc

SEQ ID NO: 1940017 - DNA, 25 bp, Homo sapien
tcatggactccgaagtagcctgttg

SEQ ID NO: 1940018 - DNA, 25 bp, Homo sapien
gaaaattgacctttacagtgccaag

SEQ ID NO: 1940019 - DNA, 25 bp, Homo sapien
caaattgaatgagtccattgatgtc

SEQ ID NO: 1940020 - DNA, 25 bp, Homo sapien
gcccttggtcttgtggttctagata

SEQ ID NO: 1940021 - DNA, 25 bp, Homo sapien
agatgcaggagtaggtatactttca

SEQ ID NO: 1940022 - DNA, 25 bp, Homo sapien
tcatgaattagactgtgcccttggt

SEQ ID NO: 1940023 - DNA, 25 bp, Homo sapien
ggtaaggttaactggagctagagcc

SEQ ID NO: 1940024 - DNA, 25 bp, Homo sapien
tgccgagtagtcaacaccaacattg

SEQ ID NO: 1940025 - DNA, 25 bp, Homo sapien
aaaagtcccagcatattttgccgag

SEQ ID NO: 1940026 - DNA, 25 bp, Homo sapien
tgtgctgccgccatgtctctagtga

SEQ ID NO: 1940027 - DNA, 25 bp, Homo sapien
caagaccacaggctgccgtggccgc

SEQ ID NO: 1940028 - DNA, 25 bp, Homo sapien
agaccacaggctgccgtggccgcat

SEQ ID NO: 1940029 - DNA, 25 bp, Homo sapien
aagaccacaggctgccgtggccgca

SEQ ID NO: 1940030 - DNA, 25 bp, Homo sapien
ctttattcagaatcataagggtttt

SEQ ID NO: 1940031 - DNA, 25 bp, Homo sapien
tgcctttattcagaatcataagggt

SEQ ID NO: 1940032 - DNA, 25 bp, Homo sapien
tattgcctttattcagaatcataag

SEQ ID NO: 1940033 - DNA, 25 bp, Homo sapien
aatattgcctttattcagaatcata

SEQ ID NO: 1940034 - DNA, 25 bp, Homo sapien
atattcaaacacttaaggcacattt

SEQ ID NO: 1940035 - DNA, 25 bp, Homo sapien
taatattcaaacacttaaggcacat

SEQ ID NO: 1940036 - DNA, 25 bp, Homo sapien
aatattcaaacacttaaggcacatt

SEQ ID NO: 1940037 - DNA, 25 bp, Homo sapien
aaagccatctcgaaatcctccatag

SEQ ID NO: 1940038 - DNA, 25 bp, Homo sapien
ggagtcaaaccttcaatgcgccttc

SEQ ID NO: 1940039 - DNA, 25 bp, Homo sapien
tagttgtaggcatgtgcatttcttc

SEQ ID NO: 1940040 - DNA, 25 bp, Homo sapien
tctcgtatctttcaatgtctgcagc

SEQ ID NO: 1940041 - DNA, 25 bp, Homo sapien
acacacaatgttactttggttaaat

SEQ ID NO: 1940042 - DNA, 25 bp, Homo sapien
cacacacaatgttactttggttaaa

SEQ ID NO: 1940043 - DNA, 25 bp, Homo sapien
acacacacaatgttactttggttaa

SEQ ID NO: 1940044 - DNA, 25 bp, Homo sapien
ttagaaaggaggaaacgagcgcagt

SEQ ID NO: 1940045 - DNA, 25 bp, Homo sapien
gagcgcagtcaagcccctggttaat

SEQ ID NO: 1940046 - DNA, 25 bp, Homo sapien
gacaaaacctacttgaaccagctgg

SEQ ID NO: 1940047 - DNA, 25 bp, Homo sapien
gactgtattctgtgcatatgccaag

SEQ ID NO: 1940048 - DNA, 25 bp, Homo sapien
ctgagcaggtgggaaccaccatgcc

SEQ ID NO: 1940049 - DNA, 25 bp, Homo sapien
cttgcaatgttacccaggccagtca

SEQ ID NO: 1940050 - DNA, 25 bp, Homo sapien
ttttcatggatatgaggtcttgcaa

SEQ ID NO: 1940051 - DNA, 25 bp, Homo sapien
caatgttacccaggccagtcaaact

SEQ ID NO: 1940052 - DNA, 25 bp, Homo sapien
tcatactagaagtttatgcttacaa

SEQ ID NO: 1940053 - DNA, 25 bp, Homo sapien
aacctatgcttccatgataattcat

SEQ ID NO: 1940054 - DNA, 25 bp, Homo sapien
catactagaagtttatgcttacaaa

SEQ ID NO: 1940055 - DNA, 25 bp, Homo sapien
caaaaacctatgcttccatgataat

SEQ ID NO: 1940056 - DNA, 25 bp, Homo sapien
gctatacttgcaaggtcaacatcat

SEQ ID NO: 1940057 - DNA, 25 bp, Homo sapien
taatgtccgcacctgaataaccttc

SEQ ID NO: 1940058 - DNA, 25 bp, Homo sapien
tagacttattcgtaatagctcctcc

SEQ ID NO: 1940059 - DNA, 25 bp, Homo sapien
tcagccaattccaactcacgtagac

SEQ ID NO: 1940060 - DNA, 25 bp, Homo sapien
tagtactgtaaaggaagatactcct

SEQ ID NO: 1940061 - DNA, 25 bp, Homo sapien
gagataattaagtaaagagccattc

SEQ ID NO: 1940062 - DNA, 25 bp, Homo sapien
tgtgagatgttgtcttccagtaaga

SEQ ID NO: 1940063 - DNA, 25 bp, Homo sapien
ggcatatagccaaactagtactgta

SEQ ID NO: 1940064 - DNA, 25 bp, Homo sapien
gcgtcgtcttaaagcctcatctata

SEQ ID NO: 1940065 - DNA, 25 bp, Homo sapien
tatagattcgtttctcaaggcgtcg

SEQ ID NO: 1940066 - DNA, 25 bp, Homo sapien
gtagctgccagaaccataaccattt

SEQ ID NO: 1940067 - DNA, 25 bp, Homo sapien
ctgacggcaaaggaatatagattcg

SEQ ID NO: 1940068 - DNA, 25 bp, Homo sapien
cctattaaaagcttgggttagcact

SEQ ID NO: 1940069 - DNA, 25 bp, Homo sapien
ccgtccctgttcaactcaagctaaa

SEQ ID NO: 1940070 - DNA, 25 bp, Homo sapien
tgagtaaagtttgacccactggaac

SEQ ID NO: 1940071 - DNA, 25 bp, Homo sapien
gtccatctgaagttaagaataccta

SEQ ID NO: 1940072 - DNA, 25 bp, Homo sapien
tcagaagtccctcggcgactacaga

SEQ ID NO: 1940073 - DNA, 25 bp, Homo sapien
gcgactacagatggagtctatctca

SEQ ID NO: 1940074 - DNA, 25 bp, Homo sapien
agctccgctttcacccttctgcttg

SEQ ID NO: 1940075 - DNA, 25 bp, Homo sapien
catcaataaatatggtggctggaga

SEQ ID NO: 1940076 - DNA, 25 bp, Homo sapien
tttcaaacagaagacgaacaagctt

SEQ ID NO: 1940077 - DNA, 25 bp, Homo sapien
gccaggtgggccgaccatcagtact

SEQ ID NO: 1940078 - DNA, 25 bp, Homo sapien
gttgtcttgcattctgtagctactg

SEQ ID NO: 1940079 - DNA, 25 bp, Homo sapien
gctttagcaaggagcgtcttccccg

SEQ ID NO: 1940080 - DNA, 25 bp, Homo sapien
tgttgcgaatataatagcctcagca

SEQ ID NO: 1940081 - DNA, 25 bp, Homo sapien
ctgttgcgaatataatagcctcagc

SEQ ID NO: 1940082 - DNA, 25 bp, Homo sapien
gttgcgaatataatagcctcagcag

SEQ ID NO: 1940083 - DNA, 25 bp, Homo sapien
tattctaggaatcatgcaacagctt

SEQ ID NO: 1940084 - DNA, 25 bp, Homo sapien
gcttctggtctaacaaaattctcag

SEQ ID NO: 1940085 - DNA, 25 bp, Homo sapien
aattctcagtagcacaacatatacc

SEQ ID NO: 1940086 - DNA, 25 bp, Homo sapien
ggctctctgtatcaacatgctgcca

SEQ ID NO: 1940087 - DNA, 25 bp, Homo sapien
catggtctcctaatgcccttaaaga

SEQ ID NO: 1940088 - DNA, 25 bp, Homo sapien
ccttaaagaattcgggcatccacat

SEQ ID NO: 1940089 - DNA, 25 bp, Homo sapien
tagcttctactaaatcagcgatatc

SEQ ID NO: 1940090 - DNA, 25 bp, Homo sapien
cacattggtaacactacggcttcct

SEQ ID NO: 1940091 - DNA, 25 bp, Homo sapien
tcatatccggtactatcaaatttat

SEQ ID NO: 1940092 - DNA, 25 bp, Homo sapien
atcgaacattgggattctgggaaat

SEQ ID NO: 1940093 - DNA, 25 bp, Homo sapien
tctgttactgcagcaggtgatttgt

SEQ ID NO: 1940094 - DNA, 25 bp, Homo sapien
ctaagtctttatcatatccggtact

SEQ ID NO: 1940095 - DNA, 25 bp, Homo sapien
tgctatagggtgactgtaatgacta

SEQ ID NO: 1940096 - DNA, 25 bp, Homo sapien
acctaagttcctatcgacagatgaa

SEQ ID NO: 1940097 - DNA, 25 bp, Homo sapien
tatggtgaaatactacgtaaccaca

SEQ ID NO: 1940098 - DNA, 25 bp, Homo sapien
gatctcatagacgtacagagtacaa

SEQ ID NO: 1940099 - DNA, 25 bp, Homo sapien
ttttcacgacaacgaacagctttcc

SEQ ID NO: 1940100 - DNA, 25 bp, Homo sapien
tctgtcattgtgaacattctgtgca

SEQ ID NO: 1940101 - DNA, 25 bp, Homo sapien
gacagttgtacttggacgattacca

SEQ ID NO: 1940102 - DNA, 25 bp, Homo sapien
tctgtgcagatgaacggtgaactct

SEQ ID NO: 1940103 - DNA, 25 bp, Homo sapien
tgaaaggagtgaagcatttgtgggc

SEQ ID NO: 1940104 - DNA, 25 bp, Homo sapien
aagggaaaggggctacaggatcatc

SEQ ID NO: 1940105 - DNA, 25 bp, Homo sapien
ctgaggtgacaactgagtagagacc

SEQ ID NO: 1940106 - DNA, 25 bp, Homo sapien
gagctgtaagaacttaggttccaga

SEQ ID NO: 1940107 - DNA, 25 bp, Homo sapien
tcgttcaacaggtacaggcatggac

SEQ ID NO: 1940108 - DNA, 25 bp, Homo sapien
aggtcatgctgtgccgctttcaagg

SEQ ID NO: 1940109 - DNA, 25 bp, Homo sapien
gcatggaccagacttctccctcaga

SEQ ID NO: 1940110 - DNA, 25 bp, Homo sapien
tccctcagaagctggaaggtcatgc

SEQ ID NO: 1940111 - DNA, 25 bp, Homo sapien
ctgtgtactgtgctcggtagtcata

SEQ ID NO: 1940112 - DNA, 25 bp, Homo sapien
tcttccgagtacttaagccattaaa

SEQ ID NO: 1940113 - DNA, 25 bp, Homo sapien
gctcggtagtcatacagtcttaaca

SEQ ID NO: 1940114 - DNA, 25 bp, Homo sapien
catacagcattgacatctgatctaa

SEQ ID NO: 1940115 - DNA, 25 bp, Homo sapien
ccagcaatgcatattcacgagccaa

SEQ ID NO: 1940116 - DNA, 25 bp, Homo sapien
ccatttctgctggaggtatgtatct

SEQ ID NO: 1940117 - DNA, 25 bp, Homo sapien
gaactccctgataatagaccatcgc

SEQ ID NO: 1940118 - DNA, 25 bp, Homo sapien
gaccatcgcagagtcatagtttccc

SEQ ID NO: 1940119 - DNA, 25 bp, Homo sapien
ccgcgcctggcctcaaagaaatatt

SEQ ID NO: 1940120 - DNA, 25 bp, Homo sapien
cgcctggcctcaaagaaatatttta

SEQ ID NO: 1940121 - DNA, 25 bp, Homo sapien
gctaaggcaggcagctcacttcagg

SEQ ID NO: 1940122 - DNA, 25 bp, Homo sapien
ctaaggcaggcagctcacttcaggc

SEQ ID NO: 1940123 - DNA, 25 bp, Homo sapien
tcaaaagatgggatcgacaggagcc

SEQ ID NO: 1940124 - DNA, 25 bp, Homo sapien
tggagagaaccagtcgaaaaatcga

SEQ ID NO: 1940125 - DNA, 25 bp, Homo sapien
agaactaaaaactcggctggtgact

SEQ ID NO: 1940126 - DNA, 25 bp, Homo sapien
ggctggtgacttcgctaacgacaca

SEQ ID NO: 1940127 - DNA, 25 bp, Homo sapien
tttgaagacaaacccgccagggtca

SEQ ID NO: 1940128 - DNA, 25 bp, Homo sapien
tggagatcccggcagcgaggaagga

SEQ ID NO: 1940129 - DNA, 25 bp, Homo sapien
gtactgcccagttcaatcgtcaaca

SEQ ID NO: 1940130 - DNA, 25 bp, Homo sapien
ggacgacctcggcgactctggcgca

SEQ ID NO: 1940131 - DNA, 25 bp, Homo sapien
tgcttgctcactttccctcccactt

SEQ ID NO: 1940132 - DNA, 25 bp, Homo sapien
cttgttcaggtgcttgctcactttc

SEQ ID NO: 1940133 - DNA, 25 bp, Homo sapien
aggtgcttgctcactttccctccca

SEQ ID NO: 1940134 - DNA, 25 bp, Homo sapien
tccctcccacttgattttcaccaca

SEQ ID NO: 1940135 - DNA, 25 bp, Homo sapien
agaatacatatttgcgccaggcgcg

SEQ ID NO: 1940136 - DNA, 25 bp, Homo sapien
caagagaggcattcataaggtcacc

SEQ ID NO: 1940137 - DNA, 25 bp, Homo sapien
tgaaccatgaggtgaagactgcgat

SEQ ID NO: 1940138 - DNA, 25 bp, Homo sapien
ccacaaagggatatattaaggcgct

SEQ ID NO: 1940139 - DNA, 25 bp, Homo sapien
cccaaaagacgcacgataacacagt

SEQ ID NO: 1940140 - DNA, 25 bp, Homo sapien
gacgcacgataacacagtagtgggt

SEQ ID NO: 1940141 - DNA, 25 bp, Homo sapien
cacgataacacagtagtgggttttc

SEQ ID NO: 1940142 - DNA, 25 bp, Homo sapien
ataacacagtagtgggttttcaggc

SEQ ID NO: 1940143 - DNA, 25 bp, Homo sapien
gaacactcaccaacacgatggctta

SEQ ID NO: 1940144 - DNA, 25 bp, Homo sapien
tacagattatcattagcctaggaac

SEQ ID NO: 1940145 - DNA, 25 bp, Homo sapien
tatgcagcactgttctgaaagagga

SEQ ID NO: 1940146 - DNA, 25 bp, Homo sapien
tctgcgcttaggtaaaatattgcca

SEQ ID NO: 1940147 - DNA, 25 bp, Homo sapien
ttacaaatcctcattacatttattt

SEQ ID NO: 1940148 - DNA, 25 bp, Homo sapien
tttacaaatcctcattacatttatt

SEQ ID NO: 1940149 - DNA, 25 bp, Homo sapien
cattcttgcctaagcgatcttcggg

SEQ ID NO: 1940150 - DNA, 25 bp, Homo sapien
cttcggataattatatgggtagcca

SEQ ID NO: 1940151 - DNA, 25 bp, Homo sapien
tcttcatccgactgctgctctgagc

SEQ ID NO: 1940152 - DNA, 25 bp, Homo sapien
gaatgcatgttcaggatgctttcca

SEQ ID NO: 1940153 - DNA, 25 bp, Homo sapien
tgaagagatgtttgccagttgataa

SEQ ID NO: 1940154 - DNA, 25 bp, Homo sapien
gaatgtgaagagatgtttgccagtt

SEQ ID NO: 1940155 - DNA, 25 bp, Homo sapien
tgtggtggaatgtgaagagatgttt

SEQ ID NO: 1940156 - DNA, 25 bp, Homo sapien
gtggaatgtgaagagatgtttgcca

SEQ ID NO: 1940157 - DNA, 25 bp, Homo sapien
cccagaattttgtatcaagtgataa

SEQ ID NO: 1940158 - DNA, 25 bp, Homo sapien
agtggtgtcatcttgtctccctaca

SEQ ID NO: 1940159 - DNA, 25 bp, Homo sapien
agtgctgtaagaactaaaacccaga

SEQ ID NO: 1940160 - DNA, 25 bp, Homo sapien
gtggtgtcatcttgtctccctacaa

SEQ ID NO: 1940161 - DNA, 25 bp, Homo sapien
ggtacactcttagctcttactgcag

SEQ ID NO: 1940162 - DNA, 25 bp, Homo sapien
ccacacaccagcatgctaggctaat

SEQ ID NO: 1940163 - DNA, 25 bp, Homo sapien
tgatggttgaaagcaaaattgttac

SEQ ID NO: 1940164 - DNA, 25 bp, Homo sapien
cagcctgtcaccttgagttctttaa

SEQ ID NO: 1940165 - DNA, 25 bp, Homo sapien
gagatgaggttgtaccactacacgc

SEQ ID NO: 1940166 - DNA, 25 bp, Homo sapien
agtgagatgaggttgtaccactaca

SEQ ID NO: 1940167 - DNA, 25 bp, Homo sapien
gatgaggttgtaccactacacgcca

SEQ ID NO: 1940168 - DNA, 25 bp, Homo sapien
atgaggttgtaccactacacgccag

SEQ ID NO: 1940169 - DNA, 25 bp, Homo sapien
catagtggtgtggtcttatgtctgc

SEQ ID NO: 1940170 - DNA, 25 bp, Homo sapien
gactggaggtgagttaaacctacac

SEQ ID NO: 1940171 - DNA, 25 bp, Homo sapien
gatctaagtgtgtatctgtttgcca

SEQ ID NO: 1940172 - DNA, 25 bp, Homo sapien
caggagaagttacagctttactaca

SEQ ID NO: 1940173 - DNA, 25 bp, Homo sapien
tatgatatatgagtatgctgtatga

SEQ ID NO: 1940174 - DNA, 25 bp, Homo sapien
aagacctttttgagaatgatatatg

SEQ ID NO: 1940175 - DNA, 25 bp, Homo sapien
ctggcctaaagacctttttgagaat

SEQ ID NO: 1940176 - DNA, 25 bp, Homo sapien
tgatatatgatatatgagtatgctg

SEQ ID NO: 1940177 - DNA, 25 bp, Homo sapien
taaaatgctctacgtactaataaat

SEQ ID NO: 1940178 - DNA, 25 bp, Homo sapien
gcccaagttcattctttaactccag

SEQ ID NO: 1940179 - DNA, 25 bp, Homo sapien
aataaaagtcaatgatgtagcaact

SEQ ID NO: 1940180 - DNA, 25 bp, Homo sapien
aaagtcaatgatgtagcaactttgt

SEQ ID NO: 1940181 - DNA, 25 bp, Homo sapien
actccaccaatcacacaactgtgtg

SEQ ID NO: 1940182 - DNA, 25 bp, Homo sapien
ggaggttgtcccaccaacatttcaa

SEQ ID NO: 1940183 - DNA, 25 bp, Homo sapien
ttcaaaaagaataacaccaacactc

SEQ ID NO: 1940184 - DNA, 25 bp, Homo sapien
agaaaggaggttgtcccaccaacat

SEQ ID NO: 1940185 - DNA, 25 bp, Homo sapien
tgttcgtagcaacacttcaggtgca

SEQ ID NO: 1940186 - DNA, 25 bp, Homo sapien
tgaaatccatgctatcttgccgtgg

SEQ ID NO: 1940187 - DNA, 25 bp, Homo sapien
tgggagtcccaaccaaagaatgtgc

SEQ ID NO: 1940188 - DNA, 25 bp, Homo sapien
tgtctccacatcgacagcttgaggg

SEQ ID NO: 1940189 - DNA, 25 bp, Homo sapien
tagcaggtacacatgtaagcacatc

SEQ ID NO: 1940190 - DNA, 25 bp, Homo sapien
gggcttatctttgcagacccactgc

SEQ ID NO: 1940191 - DNA, 25 bp, Homo sapien
gcacatctccagtcatatgcttaca

SEQ ID NO: 1940192 - DNA, 25 bp, Homo sapien
taggtaagtctggatatgttgatca

SEQ ID NO: 1940193 - DNA, 25 bp, Homo sapien
tagtgtgtgccctaaaagtagcaga

SEQ ID NO: 1940194 - DNA, 25 bp, Homo sapien
caagcttaccccagtattatgaggc

SEQ ID NO: 1940195 - DNA, 25 bp, Homo sapien
tttacattcttgagcgagggcacgc

SEQ ID NO: 1940196 - DNA, 25 bp, Homo sapien
ttgaaacactcgatccagccactcg

SEQ ID NO: 1940197 - DNA, 25 bp, Homo sapien
tctgatcatcagtagggcacacaag

SEQ ID NO: 1940198 - DNA, 25 bp, Homo sapien
tctgcattccatgtgggtaggaccc

SEQ ID NO: 1940199 - DNA, 25 bp, Homo sapien
taggcgtatctgaccacactcgagt

SEQ ID NO: 1940200 - DNA, 25 bp, Homo sapien
gactattcacgactgacctaggcgt

SEQ ID NO: 1940201 - DNA, 25 bp, Homo sapien
cgacgtcgcctaaagtggtctccag

SEQ ID NO: 1940202 - DNA, 25 bp, Homo sapien
cttcggtgtacaagtcgatgacgac

SEQ ID NO: 1940203 - DNA, 25 bp, Homo sapien
cgatgacgacgtcgcctaaagtggt

SEQ ID NO: 1940204 - DNA, 25 bp, Homo sapien
cacgcggccgttcttcggtgtacaa

SEQ ID NO: 1940205 - DNA, 25 bp, Homo sapien
taaatctgcaaggtggaagaaaagt

SEQ ID NO: 1940206 - DNA, 25 bp, Homo sapien
aaatctgcaaggtggaagaaaagtc

SEQ ID NO: 1940207 - DNA, 25 bp, Homo sapien
aatctgcaaggtggaagaaaagtct

SEQ ID NO: 1940208 - DNA, 25 bp, Homo sapien
ttaaatctgcaaggtggaagaaaag

SEQ ID NO: 1940209 - DNA, 25 bp, Homo sapien
ctttagagttacgatactgaccaaa

SEQ ID NO: 1940210 - DNA, 25 bp, Homo sapien
cactttagagttacgatactgacca

SEQ ID NO: 1940211 - DNA, 25 bp, Homo sapien
ttagagttacgatactgaccaaaaa

SEQ ID NO: 1940212 - DNA, 25 bp, Homo sapien
tcactttagagttacgatactgacc

SEQ ID NO: 1940213 - DNA, 25 bp, Homo sapien
tgtccccgcgccgcctccaggggtc

SEQ ID NO: 1940214 - DNA, 25 bp, Homo sapien
gcgccgcctccaggggtcggcagaa

SEQ ID NO: 1940215 - DNA, 25 bp, Homo sapien
cccgcgccgcctccaggggtcggca

SEQ ID NO: 1940216 - DNA, 25 bp, Homo sapien
gccgcctccaggggtcggcagaatg

SEQ ID NO: 1940217 - DNA, 25 bp, Homo sapien
ttacgactccgactctccgggaggc

SEQ ID NO: 1940218 - DNA, 25 bp, Homo sapien
ctgcgtcgctgtgagtgagcctcga

SEQ ID NO: 1940219 - DNA, 25 bp, Homo sapien
ctctgcccgggttgtccaagatgga

SEQ ID NO: 1940220 - DNA, 25 bp, Homo sapien
tgatcaggccttcgtaatggcgcct

SEQ ID NO: 1940221 - DNA, 25 bp, Homo sapien
ttccaggccacttgtgcctgctcgg

SEQ ID NO: 1940222 - DNA, 25 bp, Homo sapien
tccaggccacttgtgcctgctcggc

SEQ ID NO: 1940223 - DNA, 25 bp, Homo sapien
tgcgatcgcgagggtccgccgttcc

SEQ ID NO: 1940224 - DNA, 25 bp, Homo sapien
gcgatcgcgagggtccgccgttccg

SEQ ID NO: 1940225 - DNA, 25 bp, Homo sapien
ctgcgatcgcgagggtccgccgttc

SEQ ID NO: 1940226 - DNA, 25 bp, Homo sapien
cgatcgcgagggtccgccgttccga

SEQ ID NO: 1940227 - DNA, 25 bp, Homo sapien
cggggctccgccgggctcaggtggg

SEQ ID NO: 1940228 - DNA, 25 bp, Homo sapien
ctgcggggctccgccgggctcaggt

SEQ ID NO: 1940229 - DNA, 25 bp, Homo sapien
gggctccgccgggctcaggtgggca

SEQ ID NO: 1940230 - DNA, 25 bp, Homo sapien
ggctccgccgggctcaggtgggcag

SEQ ID NO: 1940231 - DNA, 25 bp, Homo sapien
taatgtttttgtcggatgttggagg

SEQ ID NO: 1940232 - DNA, 25 bp, Homo sapien
cctcgcgcgacgtaatgtttttgtc

SEQ ID NO: 1940233 - DNA, 25 bp, Homo sapien
tggccctcgcgcgacgtaatgtttt

SEQ ID NO: 1940234 - DNA, 25 bp, Homo sapien
gagaagttctcacggcggggcgcga

SEQ ID NO: 1940235 - DNA, 25 bp, Homo sapien
ttgttagaaacgagtcactaggctg

SEQ ID NO: 1940236 - DNA, 25 bp, Homo sapien
tggcaactagcttcatcgagaggac

SEQ ID NO: 1940237 - DNA, 25 bp, Homo sapien
gaattggacgtggaatacagcctgt

SEQ ID NO: 1940238 - DNA, 25 bp, Homo sapien
tgtgctgcaagctgatccatggtag

SEQ ID NO: 1940239 - DNA, 25 bp, Homo sapien
gacagtggtgcttttcaaagggcat

SEQ ID NO: 1940240 - DNA, 25 bp, Homo sapien
ctgttccacgaaggagacccacggg

SEQ ID NO: 1940241 - DNA, 25 bp, Homo sapien
caaagggcatgaaggattaggcaca

SEQ ID NO: 1940242 - DNA, 25 bp, Homo sapien
gacatgctgacacagcgcctgctgt

SEQ ID NO: 1940243 - DNA, 25 bp, Homo sapien
ccagtgagaggaccgggaacttcac

SEQ ID NO: 1940244 - DNA, 25 bp, Homo sapien
cagaagtgccactaaaggtgtgtga

SEQ ID NO: 1940245 - DNA, 25 bp, Homo sapien
aggaccagtgagaggaccgggaact

SEQ ID NO: 1940246 - DNA, 25 bp, Homo sapien
cttcacagaagtgccactaaaggtg

SEQ ID NO: 1940247 - DNA, 25 bp, Homo sapien
cgtgggattggctgtatcttctggc

SEQ ID NO: 1940248 - DNA, 25 bp, Homo sapien
aaaaactcaatgttcttactgcttg

SEQ ID NO: 1940249 - DNA, 25 bp, Homo sapien
tctggctggctttatagttgtgcca

SEQ ID NO: 1940250 - DNA, 25 bp, Homo sapien
taatgagtcactaatcggggaaagg

SEQ ID NO: 1940251 - DNA, 25 bp, Homo sapien
ggtacactcttagctcttactgcag

SEQ ID NO: 1940252 - DNA, 25 bp, Homo sapien
tgatggttgaaagcaaaattgttac

SEQ ID NO: 1940253 - DNA, 25 bp, Homo sapien
ccacacaccagcatgctaggctaat

SEQ ID NO: 1940254 - DNA, 25 bp, Homo sapien
cagcctgtcaccttgagttctttaa

SEQ ID NO: 1940255 - DNA, 25 bp, Homo sapien
catagtggtgtggtcttatgtctgc

SEQ ID NO: 1940256 - DNA, 25 bp, Homo sapien
gactggaggtgagttaaacctacac

SEQ ID NO: 1940257 - DNA, 25 bp, Homo sapien
gatctaagtgtgtatctgtttgcca

SEQ ID NO: 1940258 - DNA, 25 bp, Homo sapien
caggagaagttacagctttactaca

SEQ ID NO: 1940259 - DNA, 25 bp, Homo sapien
aagacctttttgagaatgatatatg

SEQ ID NO: 1940260 - DNA, 25 bp, Homo sapien
tgatatatgatatatgagtatgctg

SEQ ID NO: 1940261 - DNA, 25 bp, Homo sapien
tatgatatatgagtatgctgtatga

SEQ ID NO: 1940262 - DNA, 25 bp, Homo sapien
ctggcctaaagacctttttgagaat

SEQ ID NO: 1940263 - DNA, 25 bp, Homo sapien
taaaatgctctacgtactaataaat

SEQ ID NO: 1940264 - DNA, 25 bp, Homo sapien
aaagtcaatgatgtagcaactttgt

SEQ ID NO: 1940265 - DNA, 25 bp, Homo sapien
gcccaagttcattctttaactccag

SEQ ID NO: 1940266 - DNA, 25 bp, Homo sapien
aataaaagtcaatgatgtagcaact

SEQ ID NO: 1940267 - DNA, 25 bp, Homo sapien
ttcaaaaagaataacaccaacactc

SEQ ID NO: 1940268 - DNA, 25 bp, Homo sapien
actccaccaatcacacaactgtgtg

SEQ ID NO: 1940269 - DNA, 25 bp, Homo sapien
ggaggttgtcccaccaacatttcaa

SEQ ID NO: 1940270 - DNA, 25 bp, Homo sapien
agaaaggaggttgtcccaccaacat

SEQ ID NO: 1940271 - DNA, 25 bp, Homo sapien
ctaaaggtctactgagaatatatat

SEQ ID NO: 1940272 - DNA, 25 bp, Homo sapien
agaatatatatgaaagaagtgcttt

SEQ ID NO: 1940273 - DNA, 25 bp, Homo sapien
aatatatatgaaagaagtgctttac

SEQ ID NO: 1940274 - DNA, 25 bp, Homo sapien
aaaggtctactgagaatatatatga

SEQ ID NO: 1940275 - DNA, 25 bp, Homo sapien
tgttcgtagcaacacttcaggtgca

SEQ ID NO: 1940276 - DNA, 25 bp, Homo sapien
tgggagtcccaaccaaagaatgtgc

SEQ ID NO: 1940277 - DNA, 25 bp, Homo sapien
tgtctccacatcgacagcttgaggg

SEQ ID NO: 1940278 - DNA, 25 bp, Homo sapien
tgaaatccatgctatcttgccgtgg

SEQ ID NO: 1940279 - DNA, 25 bp, Homo sapien
tagtacttagaatcgtgtgtccatc

SEQ ID NO: 1940280 - DNA, 25 bp, Homo sapien
tcagccttaacatgagcgacttgat

SEQ ID NO: 1940281 - DNA, 25 bp, Homo sapien
tttcaactgcacaggtaagttctgc

SEQ ID NO: 1940282 - DNA, 25 bp, Homo sapien
tgctatgtagaatcgtgccagactt

SEQ ID NO: 1940283 - DNA, 25 bp, Homo sapien
cacctaaactgtataccgcaaatta

SEQ ID NO: 1940284 - DNA, 25 bp, Homo sapien
ttgtatgaagcctagaagacaaccc

SEQ ID NO: 1940285 - DNA, 25 bp, Homo sapien
ttatgtacacctaaactgtataccg

SEQ ID NO: 1940286 - DNA, 25 bp, Homo sapien
aagatattgtatgaagcctagaaga

SEQ ID NO: 1940287 - DNA, 25 bp, Homo sapien
tattcacttttaaattccataactg

SEQ ID NO: 1940288 - DNA, 25 bp, Homo sapien
taaattccataactgataatatatt

SEQ ID NO: 1940289 - DNA, 25 bp, Homo sapien
aaagaaaaatactggacacaatatt

SEQ ID NO: 1940290 - DNA, 25 bp, Homo sapien
gaaagaaaaatactggacacaatat

SEQ ID NO: 1940291 - DNA, 25 bp, Homo sapien
aacaccaagcaaacagatgattaag

SEQ ID NO: 1940292 - DNA, 25 bp, Homo sapien
ttttctacatgttgctccataaaga

SEQ ID NO: 1940293 - DNA, 25 bp, Homo sapien
tgttttttacgatgtagacgctgct

SEQ ID NO: 1940294 - DNA, 25 bp, Homo sapien
gcttgaggagaataactttgaatac

SEQ ID NO: 1940295 - DNA, 25 bp, Homo sapien
tgctgatgagatttgagtacatttt

SEQ ID NO: 1940296 - DNA, 25 bp, Homo sapien
tactgattgactcgtatggaggaac

SEQ ID NO: 1940297 - DNA, 25 bp, Homo sapien
tcaggaaaaggactgggttgaacag

SEQ ID NO: 1940298 - DNA, 25 bp, Homo sapien
tgatcctctttgctaggcttactga

SEQ ID NO: 1940299 - DNA, 25 bp, Homo sapien
gtcacatttgaagcggttccctcag

SEQ ID NO: 1940300 - DNA, 25 bp, Homo sapien
aataggagctggtgtaattgcagtg

SEQ ID NO: 1940301 - DNA, 25 bp, Homo sapien
ttttcacaggctgttgaataggagc

SEQ ID NO: 1940302 - DNA, 25 bp, Homo sapien
tgtaggtgctaaagcagtctgtagc

SEQ ID NO: 1940303 - DNA, 25 bp, Homo sapien
ctctggttttaatacacgcatactt

SEQ ID NO: 1940304 - DNA, 25 bp, Homo sapien
tagggatttcatgcccactgctcgg

SEQ ID NO: 1940305 - DNA, 25 bp, Homo sapien
ccaggtctccctgatggaaagttaa

SEQ ID NO: 1940306 - DNA, 25 bp, Homo sapien
ccaatttgtttgcagtccaggtaca

SEQ ID NO: 1940307 - DNA, 25 bp, Homo sapien
catttgtatatgacgaaggagcagc

SEQ ID NO: 1940308 - DNA, 25 bp, Homo sapien
gactctcagaatgataggccacact

SEQ ID NO: 1940309 - DNA, 25 bp, Homo sapien
aaggtcttcctacatctgtctgtga

SEQ ID NO: 1940310 - DNA, 25 bp, Homo sapien
gcgggccatgcctctgaggaactaa

SEQ ID NO: 1940311 - DNA, 25 bp, Homo sapien
tgatataccagatccagacaaaggt

SEQ ID NO: 1940312 - DNA, 25 bp, Homo sapien
tctcgtcgaggatcttggtaactca

SEQ ID NO: 1940313 - DNA, 25 bp, Homo sapien
tggcattaataggtctggcagctgc

SEQ ID NO: 1940314 - DNA, 25 bp, Homo sapien
ctggtttcatgctggcattaatagg

SEQ ID NO: 1940315 - DNA, 25 bp, Homo sapien
ttttactaatgaattcaattgctgc

SEQ ID NO: 1940316 - DNA, 25 bp, Homo sapien
tcctagaggattcagtatttcaaac

SEQ ID NO: 1940317 - DNA, 25 bp, Homo sapien
tgtcctagaggattcagtatttcaa

SEQ ID NO: 1940318 - DNA, 25 bp, Homo sapien
ctagaggattcagtatttcaaacga

SEQ ID NO: 1940319 - DNA, 25 bp, Homo sapien
ttgtcctagaggattcagtatttca

SEQ ID NO: 1940320 - DNA, 25 bp, Homo sapien
taatgggtgaacaggctactgacag

SEQ ID NO: 1940321 - DNA, 25 bp, Homo sapien
taaatgagaaatggcttagtaagac

SEQ ID NO: 1940322 - DNA, 25 bp, Homo sapien
gaacaggctactgacagatgatcct

SEQ ID NO: 1940323 - DNA, 25 bp, Homo sapien
ggcttagtaagactaatgggtgaac

SEQ ID NO: 1940324 - DNA, 25 bp, Homo sapien
tatatggaaattcggccaccaaaaa

SEQ ID NO: 1940325 - DNA, 25 bp, Homo sapien
gagtagttatctttatacagtgaag

SEQ ID NO: 1940326 - DNA, 25 bp, Homo sapien
taaatacagatatatatggaaattc

SEQ ID NO: 1940327 - DNA, 25 bp, Homo sapien
aaataggtaatatttttgcaatcag

SEQ ID NO: 1940328 - DNA, 25 bp, Homo sapien
cctaaaatattcatgcttacaaggt

SEQ ID NO: 1940329 - DNA, 25 bp, Homo sapien
atttgggcctgagaacacaactgct

SEQ ID NO: 1940330 - DNA, 25 bp, Homo sapien
taaaatgactcctgacacctaaaat

SEQ ID NO: 1940331 - DNA, 25 bp, Homo sapien
taaagacttggcagttagcctgaag

SEQ ID NO: 1940332 - DNA, 25 bp, Homo sapien
gcaaggctttatgatgcgtcccaaa

SEQ ID NO: 1940333 - DNA, 25 bp, Homo sapien
tgcaagtcttgaagcatttgtggat

SEQ ID NO: 1940334 - DNA, 25 bp, Homo sapien
gagagtttcgaatttcctgcaaggc

SEQ ID NO: 1940335 - DNA, 25 bp, Homo sapien
agtactccgagaagaatttgtttca

SEQ ID NO: 1940336 - DNA, 25 bp, Homo sapien
cagcatcagatggtttagataaatt

SEQ ID NO: 1940337 - DNA, 25 bp, Homo sapien
cagtatagttactggcaggaaaggt

SEQ ID NO: 1940338 - DNA, 25 bp, Homo sapien
cttgtaacatttgccggctactgac

SEQ ID NO: 1940339 - DNA, 25 bp, Homo sapien
atgttatgctcagccttagcagcat

SEQ ID NO: 1940340 - DNA, 25 bp, Homo sapien
ttgtctatatccttctggcttttca

SEQ ID NO: 1940341 - DNA, 25 bp, Homo sapien
cttctggcttttcactcctcttcat

SEQ ID NO: 1940342 - DNA, 25 bp, Homo sapien
tgtctatatccttctggcttttcac

SEQ ID NO: 1940343 - DNA, 25 bp, Homo sapien
atccttctggcttttcactcctctt

SEQ ID NO: 1940344 - DNA, 25 bp, Homo sapien
aaaacatctatatatgtagcccaca

SEQ ID NO: 1940345 - DNA, 25 bp, Homo sapien
tatttgatagatccagagctttctt

SEQ ID NO: 1940346 - DNA, 25 bp, Homo sapien
ggacttctttatttgatagatccag

SEQ ID NO: 1940347 - DNA, 25 bp, Homo sapien
tgtagcccacacgaaggacttcttt

SEQ ID NO: 1940348 - DNA, 25 bp, Homo sapien
ggcgtgcgctaccatgcctcgctaa

SEQ ID NO: 1940349 - DNA, 25 bp, Homo sapien
aggcgtgcgctaccatgcctcgcta

SEQ ID NO: 1940350 - DNA, 25 bp, Homo sapien
caggcgtgcgctaccatgcctcgct

SEQ ID NO: 1940351 - DNA, 25 bp, Homo sapien
acagaatctgcctaggagatttcag

SEQ ID NO: 1940352 - DNA, 25 bp, Homo sapien
tgcctaggagatttcagattataga

SEQ ID NO: 1940353 - DNA, 25 bp, Homo sapien
tctgcctaggagatttcagattata

SEQ ID NO: 1940354 - DNA, 25 bp, Homo sapien
gaatctgcctaggagatttcagatt

SEQ ID NO: 1940355 - DNA, 25 bp, Homo sapien
gcagtgtcgtattctggctcactgc

SEQ ID NO: 1940356 - DNA, 25 bp, Homo sapien
tgcgcccggctagatgtactattac

SEQ ID NO: 1940357 - DNA, 25 bp, Homo sapien
ttgctactaaatagatggcttatct

SEQ ID NO: 1940358 - DNA, 25 bp, Homo sapien
taaatccctgactgatggacattta

SEQ ID NO: 1940359 - DNA, 25 bp, Homo sapien
aagtatgatagttcaaccttattcc

SEQ ID NO: 1940360 - DNA, 25 bp, Homo sapien
gcctgagggcggacgctgaggcggc

SEQ ID NO: 1940361 - DNA, 25 bp, Homo sapien
cacgggcctgagggcggacgctgag

SEQ ID NO: 1940362 - DNA, 25 bp, Homo sapien
acgctgaggcggccagagtccgtcc

SEQ ID NO: 1940363 - DNA, 25 bp, Homo sapien
tgaggcggccagagtccgtcccagc

SEQ ID NO: 1940364 - DNA, 25 bp, Homo sapien
cgcggcccgtcccaggggtcgtgag

SEQ ID NO: 1940365 - DNA, 25 bp, Homo sapien
cgggccagcgcggcccgtcccaggg

SEQ ID NO: 1940366 - DNA, 25 bp, Homo sapien
agcgcggcccgtcccaggggtcgtg

SEQ ID NO: 1940367 - DNA, 25 bp, Homo sapien
ccagcgcggcccgtcccaggggtcg

SEQ ID NO: 1940368 - DNA, 25 bp, Homo sapien
gggcttcgttgcgtcgcccgcagct

SEQ ID NO: 1940369 - DNA, 25 bp, Homo sapien
ctctgatcgttcgtgagcgtcgccc

SEQ ID NO: 1940370 - DNA, 25 bp, Homo sapien
catttcccggcgtcgcttgcgcggg

SEQ ID NO: 1940371 - DNA, 25 bp, Homo sapien
caggtttcccggatgtgggcatttc

SEQ ID NO: 1940372 - DNA, 25 bp, Homo sapien
tttttagcaatagatgtagaatccg

SEQ ID NO: 1940373 - DNA, 25 bp, Homo sapien
gaatccgatttcatgcttgtgtgac

SEQ ID NO: 1940374 - DNA, 25 bp, Homo sapien
gcaatagatgtagaatccgatttca

SEQ ID NO: 1940375 - DNA, 25 bp, Homo sapien
tggaaatggggcttgtttttagcaa

SEQ ID NO: 1940376 - DNA, 25 bp, Homo sapien
tacaggattgagtgttttggatccc

SEQ ID NO: 1940377 - DNA, 25 bp, Homo sapien
tcacaggctcacatcatcagtgtgt

SEQ ID NO: 1940378 - DNA, 25 bp, Homo sapien
taacaactggtgattggctcatctc

SEQ ID NO: 1940379 - DNA, 25 bp, Homo sapien
tagtgaaaccctgacattaaagcgt

SEQ ID NO: 1940380 - DNA, 25 bp, Homo sapien
tgtttttaagtataggttggatgat

SEQ ID NO: 1940381 - DNA, 25 bp, Homo sapien
ctggccaccatatgtttttaagtat

SEQ ID NO: 1940382 - DNA, 25 bp, Homo sapien
taccatagaagggatgatgaaattt

SEQ ID NO: 1940383 - DNA, 25 bp, Homo sapien
aatttgttgggaataccatagaagg

SEQ ID NO: 1940384 - DNA, 25 bp, Homo sapien
tgcaacccttgaaagacactctatt

SEQ ID NO: 1940385 - DNA, 25 bp, Homo sapien
ttacggtgttacattacataaagct

SEQ ID NO: 1940386 - DNA, 25 bp, Homo sapien
ggcaaaacttgtcaattggcatgaa

SEQ ID NO: 1940387 - DNA, 25 bp, Homo sapien
caaggtactttctatctctaagatc

SEQ ID NO: 1940388 - DNA, 25 bp, Homo sapien
aatgtccagtttggcaactttcagc

SEQ ID NO: 1940389 - DNA, 25 bp, Homo sapien
tggttggtaacactataggtggcta

SEQ ID NO: 1940390 - DNA, 25 bp, Homo sapien
gatttgtcattaaggtctcaggtca

SEQ ID NO: 1940391 - DNA, 25 bp, Homo sapien
gcaaagttgggtctaacaagctgaa

SEQ ID NO: 1940392 - DNA, 25 bp, Homo sapien
aacacagctacacatctttgtcatt

SEQ ID NO: 1940393 - DNA, 25 bp, Homo sapien
ttgaacacagctacacatctttgtc

SEQ ID NO: 1940394 - DNA, 25 bp, Homo sapien
gaacacagctacacatctttgtcat

SEQ ID NO: 1940395 - DNA, 25 bp, Homo sapien
tgaacacagctacacatctttgtca

SEQ ID NO: 1940396 - DNA, 25 bp, Homo sapien
caactgccactaggaaggtgtatat

SEQ ID NO: 1940397 - DNA, 25 bp, Homo sapien
ggctaacaaaagtcaaaactgggca

SEQ ID NO: 1940398 - DNA, 25 bp, Homo sapien
tagtttactgatgtttcccctgcaa

SEQ ID NO: 1940399 - DNA, 25 bp, Homo sapien
gaaggcaacctattcatcagcacca

SEQ ID NO: 1940400 - DNA, 25 bp, Homo sapien
agtgctgagccaggagctaatgaca

SEQ ID NO: 1940401 - DNA, 25 bp, Homo sapien
tcacagacagagacctactgggaag

SEQ ID NO: 1940402 - DNA, 25 bp, Homo sapien
tcaattcggtcttttgcaggatcag

SEQ ID NO: 1940403 - DNA, 25 bp, Homo sapien
taaattgcttctgcatcggttccac

SEQ ID NO: 1940404 - DNA, 25 bp, Homo sapien
aaaggtagcaaaacggccagcatac

SEQ ID NO: 1940405 - DNA, 25 bp, Homo sapien
taatatggataccaaactcgaagtc

SEQ ID NO: 1940406 - DNA, 25 bp, Homo sapien
tacaagcagattagaacactactag

SEQ ID NO: 1940407 - DNA, 25 bp, Homo sapien
tacatcaccactttggaccaaaggc

SEQ ID NO: 1940408 - DNA, 25 bp, Homo sapien
tgaaccctcagcacttgtatgtacc

SEQ ID NO: 1940409 - DNA, 25 bp, Homo sapien
tgccttgcaatagtagacacagaat

SEQ ID NO: 1940410 - DNA, 25 bp, Homo sapien
tatagaataaagtgaggcagaggca

SEQ ID NO: 1940411 - DNA, 25 bp, Homo sapien
caagttcaagactgtgcggttaggg

SEQ ID NO: 1940412 - DNA, 25 bp, Homo sapien
aaagtccttatcatgggctacaaag

SEQ ID NO: 1940413 - DNA, 25 bp, Homo sapien
ggaatgctttcatgtcacttatgcc

SEQ ID NO: 1940414 - DNA, 25 bp, Homo sapien
tcttcttcatggtaattagcagtgt

SEQ ID NO: 1940415 - DNA, 25 bp, Homo sapien
ctgcctgagctccaaccgtggtgtc

SEQ ID NO: 1940416 - DNA, 25 bp, Homo sapien
cactggtggtagtttcagcctggtt

SEQ ID NO: 1940417 - DNA, 25 bp, Homo sapien
tatactgtaggaggtagaagttggt

SEQ ID NO: 1940418 - DNA, 25 bp, Homo sapien
cagcctggttgagggagcgcctttt

SEQ ID NO: 1940419 - DNA, 25 bp, Homo sapien
tagcaggtattaatggtgggtgact

SEQ ID NO: 1940420 - DNA, 25 bp, Homo sapien
tacatctgtggaagcatcccagtgc

SEQ ID NO: 1940421 - DNA, 25 bp, Homo sapien
caggtaaaaagatgttctgggttgg

SEQ ID NO: 1940422 - DNA, 25 bp, Homo sapien
tggtgaaagagtgacgacttttcag

SEQ ID NO: 1940423 - DNA, 25 bp, Homo sapien
gagtgacgacttttcaggtacatct

SEQ ID NO: 1940424 - DNA, 25 bp, Homo sapien
actttctgtatcttcacaatactta

SEQ ID NO: 1940425 - DNA, 25 bp, Homo sapien
aaactttctgtatcttcacaatact

SEQ ID NO: 1940426 - DNA, 25 bp, Homo sapien
taaactttctgtatcttcacaatac

SEQ ID NO: 1940427 - DNA, 25 bp, Homo sapien
tataaactttctgtatcttcacaat

SEQ ID NO: 1940428 - DNA, 25 bp, Homo sapien
gcagagatacaggcatagtaccttg

SEQ ID NO: 1940429 - DNA, 25 bp, Homo sapien
aacattccatcttggccaccagtag

SEQ ID NO: 1940430 - DNA, 25 bp, Homo sapien
taccttgtctaacatcccaaatact

SEQ ID NO: 1940431 - DNA, 25 bp, Homo sapien
tcaacattccatcttggccaccagt

SEQ ID NO: 1940432 - DNA, 25 bp, Homo sapien
gttgggatgtctatcaacacagtgg

SEQ ID NO: 1940433 - DNA, 25 bp, Homo sapien
ggttgggatgtctatcaacacagtg

SEQ ID NO: 1940434 - DNA, 25 bp, Homo sapien
caacacagtggagtggcactcggtc

SEQ ID NO: 1940435 - DNA, 25 bp, Homo sapien
acagtggagtggcactcggtcacca

SEQ ID NO: 1940436 - DNA, 25 bp, Homo sapien
aaggttacagcatggagtgtactac

SEQ ID NO: 1940437 - DNA, 25 bp, Homo sapien
gaatctcaggagttcgaagaaaggt

SEQ ID NO: 1940438 - DNA, 25 bp, Homo sapien
gaaggctcatttccttgttgtctga

SEQ ID NO: 1940439 - DNA, 25 bp, Homo sapien
aaatcccatattttcaactgtccaa

SEQ ID NO: 1940440 - DNA, 25 bp, Homo sapien
tatggactttagtttgtgccactcc

SEQ ID NO: 1940441 - DNA, 25 bp, Homo sapien
tctacactgccaccaggcaatggtc

SEQ ID NO: 1940442 - DNA, 25 bp, Homo sapien
tagtccctgacctagaacttccatt

SEQ ID NO: 1940443 - DNA, 25 bp, Homo sapien
tattgagccaaactccagtgcttcc

SEQ ID NO: 1940444 - DNA, 25 bp, Homo sapien
cactgctataggaaggactgccagg

SEQ ID NO: 1940445 - DNA, 25 bp, Homo sapien
tcctctccaactgtaacgatttctg

SEQ ID NO: 1940446 - DNA, 25 bp, Homo sapien
tgttgcacacaacacctgtacatgg

SEQ ID NO: 1940447 - DNA, 25 bp, Homo sapien
tccttgtgatcagctctgaagagat

SEQ ID NO: 1940448 - DNA, 25 bp, Homo sapien
cctgttgatgaagcagcgacaattc

SEQ ID NO: 1940449 - DNA, 25 bp, Homo sapien
catcctgttgatgaagcagcgacaa

SEQ ID NO: 1940450 - DNA, 25 bp, Homo sapien
aaaactgttacacatcctgttgatg

SEQ ID NO: 1940451 - DNA, 25 bp, Homo sapien
ggaaaactgttacacatcctgttga

SEQ ID NO: 1940452 - DNA, 25 bp, Homo sapien
aaaccctccatcagagtccaagttt

SEQ ID NO: 1940453 - DNA, 25 bp, Homo sapien
aatctccaatagaccacagtgaaat

SEQ ID NO: 1940454 - DNA, 25 bp, Homo sapien
ccattacatcaccatggtgtctgat

SEQ ID NO: 1940455 - DNA, 25 bp, Homo sapien
caccatggtgtctgatatcacacaa

SEQ ID NO: 1940456 - DNA, 25 bp, Homo sapien
gtctgtaaacttcccggaggcagcg

SEQ ID NO: 1940457 - DNA, 25 bp, Homo sapien
ggtcgccagcgggttttgctgattt

SEQ ID NO: 1940458 - DNA, 25 bp, Homo sapien
tagcgaacgtctccgcggtctgtaa

SEQ ID NO: 1940459 - DNA, 25 bp, Homo sapien
tcattgtcccaagatcctgtagcga

SEQ ID NO: 1940460 - DNA, 25 bp, Homo sapien
tcttcccgcggaaccctgattggat

SEQ ID NO: 1940461 - DNA, 25 bp, Homo sapien
aaaaagcaagcacagtacgcgcctc

SEQ ID NO: 1940462 - DNA, 25 bp, Homo sapien
agtgtgggcacagtcagtacctaga

SEQ ID NO: 1940463 - DNA, 25 bp, Homo sapien
aattctcgtcgatagccagtgtggg

SEQ ID NO: 1940464 - DNA, 25 bp, Homo sapien
tttgagcagtaggacttgctcctaa

SEQ ID NO: 1940465 - DNA, 25 bp, Homo sapien
ggcaagagcgctttggcctttgagc

SEQ ID NO: 1940466 - DNA, 25 bp, Homo sapien
tgagcaaaggcaagagcgctttggc

SEQ ID NO: 1940467 - DNA, 25 bp, Homo sapien
cgctttggcctttgagcagtaggac

SEQ ID NO: 1940468 - DNA, 25 bp, Homo sapien
cctactgaatacaagagatatgact

SEQ ID NO: 1940469 - DNA, 25 bp, Homo sapien
tcctgacgaccccagccaatgttga

SEQ ID NO: 1940470 - DNA, 25 bp, Homo sapien
tattggtagtcctacttcacaggga

SEQ ID NO: 1940471 - DNA, 25 bp, Homo sapien
tcacagggacagtttacggaagcac

SEQ ID NO: 1940472 - DNA, 25 bp, Homo sapien
ttggattggaagcaggccagtgtca

SEQ ID NO: 1940473 - DNA, 25 bp, Homo sapien
tacaaaatcggataagaactagaat

SEQ ID NO: 1940474 - DNA, 25 bp, Homo sapien
tcccagaaaataggtaatgttgatt

SEQ ID NO: 1940475 - DNA, 25 bp, Homo sapien
gaaaattgtgctgatatagtggcac

SEQ ID NO: 1940476 - DNA, 25 bp, Homo sapien
tggacgcgacaagcaatgttctcag

SEQ ID NO: 1940477 - DNA, 25 bp, Homo sapien
gctgagagcaataaagccacggtgg

SEQ ID NO: 1940478 - DNA, 25 bp, Homo sapien
gaaatgcacacttacgtcgggagaa

SEQ ID NO: 1940479 - DNA, 25 bp, Homo sapien
taggagtcagcgatttggacgcgac

SEQ ID NO: 1940480 - DNA, 25 bp, Homo sapien
atattagtcaactgggttgggcgag

SEQ ID NO: 1940481 - DNA, 25 bp, Homo sapien
ggcgaggtaggacggatgaagccca

SEQ ID NO: 1940482 - DNA, 25 bp, Homo sapien
ctccaccgacccaaatattagtcaa

SEQ ID NO: 1940483 - DNA, 25 bp, Homo sapien
ttattgtattattcgggctccaccg

SEQ ID NO: 1940484 - DNA, 25 bp, Homo sapien
gactgcggaaccactagcagcgtct

SEQ ID NO: 1940485 - DNA, 25 bp, Homo sapien
agatccgccgctcgaaacagctgac

SEQ ID NO: 1940486 - DNA, 25 bp, Homo sapien
agctgacccagcgacgactgcggaa

SEQ ID NO: 1940487 - DNA, 25 bp, Homo sapien
caatctggacatctataggagcaga

SEQ ID NO: 1940488 - DNA, 25 bp, Homo sapien
cctcagaaagggacacgcagcagcg

SEQ ID NO: 1940489 - DNA, 25 bp, Homo sapien
cagcagcggaagtggcgctgactca

SEQ ID NO: 1940490 - DNA, 25 bp, Homo sapien
ccctggcagcggtagcagccacagg

SEQ ID NO: 1940491 - DNA, 25 bp, Homo sapien
ctgatcaggctaccgagccgggccg

SEQ ID NO: 1940492 - DNA, 25 bp, Homo sapien
ccgtcgtcgcgctgaaggtggttct

SEQ ID NO: 1940493 - DNA, 25 bp, Homo sapien
gacctgtcactcgtcgacgacgtgg

SEQ ID NO: 1940494 - DNA, 25 bp, Homo sapien
ggtggttctgtacctgctccgagtg

SEQ ID NO: 1940495 - DNA, 25 bp, Homo sapien
tgggaaaactgctgggcaccgtcgt

SEQ ID NO: 1940496 - DNA, 25 bp, Homo sapien
gcaagctttccctcttatgcagcct

SEQ ID NO: 1940497 - DNA, 25 bp, Homo sapien
taatcaacctcgctgcaagctttcc

SEQ ID NO: 1940498 - DNA, 25 bp, Homo sapien
tgcaagctttccctcttatgcagcc

SEQ ID NO: 1940499 - DNA, 25 bp, Homo sapien
ttcctcctccataatcaacctcgct

SEQ ID NO: 1940500 - DNA, 25 bp, Homo sapien
tgtaaacctgtcataataaacctgt

SEQ ID NO: 1940501 - DNA, 25 bp, Homo sapien
tctcagctacatgagctacgtggga

SEQ ID NO: 1940502 - DNA, 25 bp, Homo sapien
tggtccctgacttaacagtggtttg

SEQ ID NO: 1940503 - DNA, 25 bp, Homo sapien
tataagttaaggaaggccgagtgcg

SEQ ID NO: 1940504 - DNA, 25 bp, Homo sapien
tttgcctcttcatatgccttgtgca

SEQ ID NO: 1940505 - DNA, 25 bp, Homo sapien
ttgcctcttcatatgccttgtgcat

SEQ ID NO: 1940506 - DNA, 25 bp, Homo sapien
cagaaaagcctaatggtaattgcac

SEQ ID NO: 1940507 - DNA, 25 bp, Homo sapien
tctttagaccctagggcggcaagca

SEQ ID NO: 1940508 - DNA, 25 bp, Homo sapien
cagatcgggtatgggtggctctcaa

SEQ ID NO: 1940509 - DNA, 25 bp, Homo sapien
ttagcctgtacatgcaaagtaaaac

SEQ ID NO: 1940510 - DNA, 25 bp, Homo sapien
ctatgatatgtatatctatgatata

SEQ ID NO: 1940511 - DNA, 25 bp, Homo sapien
ctatgatatctatgatatgtatatc

SEQ ID NO: 1940512 - DNA, 25 bp, Homo sapien
tctatgatatgtatatctatgatat

SEQ ID NO: 1940513 - DNA, 25 bp, Homo sapien
ctatgatatatatatctatgatatg

SEQ ID NO: 1940514 - DNA, 25 bp, Homo sapien
tgatggcatgctattaataacaatt

SEQ ID NO: 1940515 - DNA, 25 bp, Homo sapien
atgatgggttcagctttttaataaa

SEQ ID NO: 1940516 - DNA, 25 bp, Homo sapien
tatatcatagattaccaatgacaga

SEQ ID NO: 1940517 - DNA, 25 bp, Homo sapien
ttggaaaccacccagtaatgcctaa

SEQ ID NO: 1940518 - DNA, 25 bp, Homo sapien
tgaagtacaatttgtacagaacgtg

SEQ ID NO: 1940519 - DNA, 25 bp, Homo sapien
tacttagcctaccaaacttcatagc

SEQ ID NO: 1940520 - DNA, 25 bp, Homo sapien
gaactctgcaagtacaaatatgaca

SEQ ID NO: 1940521 - DNA, 25 bp, Homo sapien
taacctccatgttgtggagtattgt

SEQ ID NO: 1940522 - DNA, 25 bp, Homo sapien
ttgcatttggtccacagttggtatt

SEQ ID NO: 1940523 - DNA, 25 bp, Homo sapien
tgggtaggggactctctacagtact

SEQ ID NO: 1940524 - DNA, 25 bp, Homo sapien
tatttcaccttatctcatggtgcag

SEQ ID NO: 1940525 - DNA, 25 bp, Homo sapien
cagagcagtatagctggtcaggccc

SEQ ID NO: 1940526 - DNA, 25 bp, Homo sapien
tcaaggagacatcacacacggatgg

SEQ ID NO: 1940527 - DNA, 25 bp, Homo sapien
catatgagggagagaattgtgcagt

SEQ ID NO: 1940528 - DNA, 25 bp, Homo sapien
actgggaaattagcgatatgataac

SEQ ID NO: 1940529 - DNA, 25 bp, Homo sapien
ttaaatagcagaatatgtaaggctg

SEQ ID NO: 1940530 - DNA, 25 bp, Homo sapien
ggaggatagcttggattgcgtgagc

SEQ ID NO: 1940531 - DNA, 25 bp, Homo sapien
gatgaatcacttgcgctcagaagtt

SEQ ID NO: 1940532 - DNA, 25 bp, Homo sapien
aggatagcttggattgcgtgagcct

SEQ ID NO: 1940533 - DNA, 25 bp, Homo sapien
gaggatagcttggattgcgtgagcc

SEQ ID NO: 1940534 - DNA, 25 bp, Homo sapien
tcattctaacactgcagggactcca

SEQ ID NO: 1940535 - DNA, 25 bp, Homo sapien
aagattcaaaacaggcacacaggca

SEQ ID NO: 1940536 - DNA, 25 bp, Homo sapien
tgagcactacagttgtaccaggtac

SEQ ID NO: 1940537 - DNA, 25 bp, Homo sapien
tttggcccgccaagaggatagttct

SEQ ID NO: 1940538 - DNA, 25 bp, Homo sapien
ttttgtgcattggataacaccacca

SEQ ID NO: 1940539 - DNA, 25 bp, Homo sapien
gtaaacactcagctgttcagattgg

SEQ ID NO: 1940540 - DNA, 25 bp, Homo sapien
gttgtagatacaatcagctgctttg

SEQ ID NO: 1940541 - DNA, 25 bp, Homo sapien
taagctgtgtcctagttcttgaaca

SEQ ID NO: 1940542 - DNA, 25 bp, Homo sapien
tacatagatacagaacatcttggat

SEQ ID NO: 1940543 - DNA, 25 bp, Homo sapien
taaaggaatcatgtttacatagata

SEQ ID NO: 1940544 - DNA, 25 bp, Homo sapien
gatacagaacatcttggatatttca

SEQ ID NO: 1940545 - DNA, 25 bp, Homo sapien
ttcatgtataaaagatgtgctgaaa

SEQ ID NO: 1940546 - DNA, 25 bp, Homo sapien
cgtcagagggattaggaaggaccca

SEQ ID NO: 1940547 - DNA, 25 bp, Homo sapien
ttctagaatgtgtataatcccggcg

SEQ ID NO: 1940548 - DNA, 25 bp, Homo sapien
tatcatgtgagtgtagataggcacc

SEQ ID NO: 1940549 - DNA, 25 bp, Homo sapien
ggcagccacctatatgacatgacgt

SEQ ID NO: 1940550 - DNA, 25 bp, Homo sapien
tacatcccatttatgaggtagtccg

SEQ ID NO: 1940551 - DNA, 25 bp, Homo sapien
gaagcagcagagcagtgatagccaa

SEQ ID NO: 1940552 - DNA, 25 bp, Homo sapien
cctcagatgtaatgggacgagcttt

SEQ ID NO: 1940553 - DNA, 25 bp, Homo sapien
tagtcggcatgcaaccatgagaagc

SEQ ID NO: 1940554 - DNA, 25 bp, Homo sapien
gcagattaactaaggtgtaccaagg

SEQ ID NO: 1940555 - DNA, 25 bp, Homo sapien
tctaaatccagggaactgactcagt

SEQ ID NO: 1940556 - DNA, 25 bp, Homo sapien
tatgatacgcgctttgcatgcacta

SEQ ID NO: 1940557 - DNA, 25 bp, Homo sapien
tggcatcaatgggtacacatactac

SEQ ID NO: 1940558 - DNA, 25 bp, Homo sapien
ggtggattctagacaccagagtaga

SEQ ID NO: 1940559 - DNA, 25 bp, Homo sapien
ttttcctgtgaggtggattctagac

SEQ ID NO: 1940560 - DNA, 25 bp, Homo sapien
ccagagtagaagtagcgaggcttgc

SEQ ID NO: 1940561 - DNA, 25 bp, Homo sapien
caaatatgctggtgtgattttggac

SEQ ID NO: 1940562 - DNA, 25 bp, Homo sapien
cagctttatagcttaaatcactgaa

SEQ ID NO: 1940563 - DNA, 25 bp, Homo sapien
tgagggagctaaggcatcaacaatg

SEQ ID NO: 1940564 - DNA, 25 bp, Homo sapien
taaggccaagaataccagctttata

SEQ ID NO: 1940565 - DNA, 25 bp, Homo sapien
caacaatgaagtgagggccaggcac

SEQ ID NO: 1940566 - DNA, 25 bp, Homo sapien
gctgttatgagccatgatcaggcta

SEQ ID NO: 1940567 - DNA, 25 bp, Homo sapien
aaaattattagccagttgtggcatg

SEQ ID NO: 1940568 - DNA, 25 bp, Homo sapien
aggctgttatgagccatgatcaggc

SEQ ID NO: 1940569 - DNA, 25 bp, Homo sapien
gttatgagccatgatcaggctactg

SEQ ID NO: 1940570 - DNA, 25 bp, Homo sapien
ccagagcctgtggttctatccacta

SEQ ID NO: 1940571 - DNA, 25 bp, Homo sapien
cactatggtactctacttctacaaa

SEQ ID NO: 1940572 - DNA, 25 bp, Homo sapien
gtgagctcttaaactgtactccagc

SEQ ID NO: 1940573 - DNA, 25 bp, Homo sapien
gagctagcaaataaccccagacagg

SEQ ID NO: 1940574 - DNA, 25 bp, Homo sapien
gagcatcagcatttaggctaaaggg

SEQ ID NO: 1940575 - DNA, 25 bp, Homo sapien
tcatgaattggaccgcaacacccag

SEQ ID NO: 1940576 - DNA, 25 bp, Homo sapien
tttgctaagtcagatatgaggctgc

SEQ ID NO: 1940577 - DNA, 25 bp, Homo sapien
gggctcaggtttagctatggtaaca

SEQ ID NO: 1940578 - DNA, 25 bp, Homo sapien
gaataggcaacagccaactagagct

SEQ ID NO: 1940579 - DNA, 25 bp, Homo sapien
tgtgggatttaagactaaagcctgc

SEQ ID NO: 1940580 - DNA, 25 bp, Homo sapien
gactctctggatacatatgtgtggg

SEQ ID NO: 1940581 - DNA, 25 bp, Homo sapien
caaatatcttgggacaggctaagtc

SEQ ID NO: 1940582 - DNA, 25 bp, Homo sapien
caaggtcatacagtttagtgggtaa

SEQ ID NO: 1940583 - DNA, 25 bp, Homo sapien
gaattgtggcatctgactctaaagc

SEQ ID NO: 1940584 - DNA, 25 bp, Homo sapien
tccagagagataagatagcctgctc

SEQ ID NO: 1940585 - DNA, 25 bp, Homo sapien
tgttctcccaccatgccacaagtat

SEQ ID NO: 1940586 - DNA, 25 bp, Homo sapien
tcagggaatatcctcagccagaggg

SEQ ID NO: 1940587 - DNA, 25 bp, Homo sapien
gaaggttactatcaggagccccaag

SEQ ID NO: 1940588 - DNA, 25 bp, Homo sapien
gcaatacaagcaacgaggagacagt

SEQ ID NO: 1940589 - DNA, 25 bp, Homo sapien
gactacagtctgcaaagggtttcca

SEQ ID NO: 1940590 - DNA, 25 bp, Homo sapien
actcaaatatataactttcctcttt

SEQ ID NO: 1940591 - DNA, 25 bp, Homo sapien
ctcaaatatataactttcctctttt

SEQ ID NO: 1940592 - DNA, 25 bp, Homo sapien
tgactcaaatatataactttcctct

SEQ ID NO: 1940593 - DNA, 25 bp, Homo sapien
gactcaaatatataactttcctctt

SEQ ID NO: 1940594 - DNA, 25 bp, Homo sapien
ttcggcagtcctgccaaagatgcct

SEQ ID NO: 1940595 - DNA, 25 bp, Homo sapien
cacagtaatgtggtaggaattcatc

SEQ ID NO: 1940596 - DNA, 25 bp, Homo sapien
catcctggcctctgataacacagat

SEQ ID NO: 1940597 - DNA, 25 bp, Homo sapien
ataaactcttcaccccttcggcagt

SEQ ID NO: 1940598 - DNA, 25 bp, Homo sapien
aaaaggcggaatgattcctcttctc

SEQ ID NO: 1940599 - DNA, 25 bp, Homo sapien
gactagctgccgtgtgggttaccat

SEQ ID NO: 1940600 - DNA, 25 bp, Homo sapien
tgtgggttaccatcttgcggtccag

SEQ ID NO: 1940601 - DNA, 25 bp, Homo sapien
tcactcggccctgtggttcttggca

SEQ ID NO: 1940602 - DNA, 25 bp, Homo sapien
ctagcaatgtgacatagccaactca

SEQ ID NO: 1940603 - DNA, 25 bp, Homo sapien
tagcaatgtgacatagccaactcac

SEQ ID NO: 1940604 - DNA, 25 bp, Homo sapien
cgcaggcgagcgtgatgtcaatgca

SEQ ID NO: 1940605 - DNA, 25 bp, Homo sapien
cacagaagaagtggtagcgtgagca

SEQ ID NO: 1940606 - DNA, 25 bp, Homo sapien
aatgcagcagccatcgtcacagaag

SEQ ID NO: 1940607 - DNA, 25 bp, Homo sapien
actgctgcactccatcgcaggcgag

SEQ ID NO: 1940608 - DNA, 25 bp, Homo sapien
tgcaggagggcacctaataccatcc

SEQ ID NO: 1940609 - DNA, 25 bp, Homo sapien
tcttctggctgtcgattgctctgca

SEQ ID NO: 1940610 - DNA, 25 bp, Homo sapien
tcatagaaaccattgttggaacctc

SEQ ID NO: 1940611 - DNA, 25 bp, Homo sapien
gagcctcccgacttaattcttcaga

SEQ ID NO: 1940612 - DNA, 25 bp, Homo sapien
taacatggggtgtatcttataaaat

SEQ ID NO: 1940613 - DNA, 25 bp, Homo sapien
gtgcatactactgtactaacatggg

SEQ ID NO: 1940614 - DNA, 25 bp, Homo sapien
accacatccggctagtccggtttat

SEQ ID NO: 1940615 - DNA, 25 bp, Homo sapien
tataaataatacgtgcatactactg

SEQ ID NO: 1940616 - DNA, 25 bp, Homo sapien
tagacagcagttagtacttcaccaa

SEQ ID NO: 1940617 - DNA, 25 bp, Homo sapien
taaccactaagtgattctagacagc

SEQ ID NO: 1940618 - DNA, 25 bp, Homo sapien
gacctatactcaagcggccactgag

SEQ ID NO: 1940619 - DNA, 25 bp, Homo sapien
ggagaagggccagaaatttacagct

SEQ ID NO: 1940620 - DNA, 25 bp, Homo sapien
gctcatatcagtgcaggcccttcct

SEQ ID NO: 1940621 - DNA, 25 bp, Homo sapien
acaaacaagtggccggtgaggtgct

SEQ ID NO: 1940622 - DNA, 25 bp, Homo sapien
gtatctgtgtctttttcccaagagt

SEQ ID NO: 1940623 - DNA, 25 bp, Homo sapien
tcagctgtacaagagcaatcctttt

SEQ ID NO: 1940624 - DNA, 25 bp, Homo sapien
ggtggccaagggaccaatgatgttt

SEQ ID NO: 1940625 - DNA, 25 bp, Homo sapien
tgtccaggtgagtcccggtacccag

SEQ ID NO: 1940626 - DNA, 25 bp, Homo sapien
catccctgctggagacaatgtcatg

SEQ ID NO: 1940627 - DNA, 25 bp, Homo sapien
caatgttttgagtagctggctggct

SEQ ID NO: 1940628 - DNA, 25 bp, Homo sapien
caaagttgacaagtccttaggatcc

SEQ ID NO: 1940629 - DNA, 25 bp, Homo sapien
tttaccagagtcagggaccaccagt

SEQ ID NO: 1940630 - DNA, 25 bp, Homo sapien
cctgtctgtgaatggttaccctgct

SEQ ID NO: 1940631 - DNA, 25 bp, Homo sapien
tacagtaagcttaacccctggctgg

SEQ ID NO: 1940632 - DNA, 25 bp, Homo sapien
tctcagtgacactttgtaccctttg

SEQ ID NO: 1940633 - DNA, 25 bp, Homo sapien
aagctaactgacatatctatcatct

SEQ ID NO: 1940634 - DNA, 25 bp, Homo sapien
ctcccctacttgtaatctttttgtg

SEQ ID NO: 1940635 - DNA, 25 bp, Homo sapien
tgacaaaagaggagagtatatattt

SEQ ID NO: 1940636 - DNA, 25 bp, Homo sapien
ttggaacagatgcagcaaatggacc

SEQ ID NO: 1940637 - DNA, 25 bp, Homo sapien
taaactccttagcttccctcttgga

SEQ ID NO: 1940638 - DNA, 25 bp, Homo sapien
tggtttcactaaactccttagcttc

SEQ ID NO: 1940639 - DNA, 25 bp, Homo sapien
tccctcttggaacagatgcagcaaa

SEQ ID NO: 1940640 - DNA, 25 bp, Homo sapien
atggagcgcagagccagaggacaaa

SEQ ID NO: 1940641 - DNA, 25 bp, Homo sapien
tcgagtcaagagaagcgggagcatc

SEQ ID NO: 1940642 - DNA, 25 bp, Homo sapien
aacccagtagcatcggctaagccca

SEQ ID NO: 1940643 - DNA, 25 bp, Homo sapien
tctcccagaatagccaagcaattgt

SEQ ID NO: 1940644 - DNA, 25 bp, Homo sapien
tgacacgttgtcagagcttctctgc

SEQ ID NO: 1940645 - DNA, 25 bp, Homo sapien
agtaggctgcgcgaagcactgtcac

SEQ ID NO: 1940646 - DNA, 25 bp, Homo sapien
tgtccgtcacggtcagctggaaggt

SEQ ID NO: 1940647 - DNA, 25 bp, Homo sapien
aggtgtaggttccctcctgtaggtg

SEQ ID NO: 1940648 - DNA, 25 bp, Homo sapien
gttctgatcactccctaacccaggg

SEQ ID NO: 1940649 - DNA, 25 bp, Homo sapien
tcttactgtatctggccatgctggc

SEQ ID NO: 1940650 - DNA, 25 bp, Homo sapien
gcatgctggaacaacagcttctgaa

SEQ ID NO: 1940651 - DNA, 25 bp, Homo sapien
ggattttgggagtcactgctggaca

SEQ ID NO: 1940652 - DNA, 25 bp, Homo sapien
gcaggagcaccgcatgctggcctcc

SEQ ID NO: 1940653 - DNA, 25 bp, Homo sapien
caggagcaccgcatgctggcctccc

SEQ ID NO: 1940654 - DNA, 25 bp, Homo sapien
gggcaggagcaccgcatgctggcct

SEQ ID NO: 1940655 - DNA, 25 bp, Homo sapien
tgcccactcatactggacgatggcg

SEQ ID NO: 1940656 - DNA, 25 bp, Homo sapien
catctgtgctctcgcggccgtctag

SEQ ID NO: 1940657 - DNA, 25 bp, Homo sapien
gacgatggcgtggtcatctgtgctc

SEQ ID NO: 1940658 - DNA, 25 bp, Homo sapien
catactggacgatggcgtggtcatc

SEQ ID NO: 1940659 - DNA, 25 bp, Homo sapien
tcctgcccagccttgctaagtggag

SEQ ID NO: 1940660 - DNA, 25 bp, Homo sapien
acatcctgcccagccttgctaagtg

SEQ ID NO: 1940661 - DNA, 25 bp, Homo sapien
tgcccagccttgctaagtggaggcg

SEQ ID NO: 1940662 - DNA, 25 bp, Homo sapien
cagccttgctaagtggaggcgcatc

SEQ ID NO: 1940663 - DNA, 25 bp, Homo sapien
ctgagaaagaaaataaataattcat

SEQ ID NO: 1940664 - DNA, 25 bp, Homo sapien
tgagaaagaaaataaataattcata

SEQ ID NO: 1940665 - DNA, 25 bp, Homo sapien
gagaaagaaaataaataattcataa

SEQ ID NO: 1940666 - DNA, 25 bp, Homo sapien
agtgctgcaaggcaccgcctctcct

SEQ ID NO: 1940667 - DNA, 25 bp, Homo sapien
ctgcacagtgctgcaaggcaccgcc

SEQ ID NO: 1940668 - DNA, 25 bp, Homo sapien
tgcacagtgctgcaaggcaccgcct

SEQ ID NO: 1940669 - DNA, 25 bp, Homo sapien
cacagtgctgcaaggcaccgcctct

SEQ ID NO: 1940670 - DNA, 25 bp, Homo sapien
aatggtatagctcaggcagagcaac

SEQ ID NO: 1940671 - DNA, 25 bp, Homo sapien
tcacaacacgctactgtgcacagag

SEQ ID NO: 1940672 - DNA, 25 bp, Homo sapien
tcattcacaacacgctactgtgcac

SEQ ID NO: 1940673 - DNA, 25 bp, Homo sapien
gtgtgggaacgaatggtatagctca

SEQ ID NO: 1940674 - DNA, 25 bp, Homo sapien
ggactggactgcctttgcaaaacta

SEQ ID NO: 1940675 - DNA, 25 bp, Homo sapien
tatagaccctgtcctcgatggttgg

SEQ ID NO: 1940676 - DNA, 25 bp, Homo sapien
ccccgttggcagtacctaggttgat

SEQ ID NO: 1940677 - DNA, 25 bp, Homo sapien
gaggaattcaaagctacggtgagcc

SEQ ID NO: 1940678 - DNA, 25 bp, Homo sapien
gcactgcccatgtgataacctaagc

SEQ ID NO: 1940679 - DNA, 25 bp, Homo sapien
taagcttcacaattgccacttgagt

SEQ ID NO: 1940680 - DNA, 25 bp, Homo sapien
ggaatgcagcccagttatttctaac

SEQ ID NO: 1940681 - DNA, 25 bp, Homo sapien
tatacttcgagacaaccctaggtgt

SEQ ID NO: 1940682 - DNA, 25 bp, Homo sapien
cccagaaatgaggaccagcaccgcg

SEQ ID NO: 1940683 - DNA, 25 bp, Homo sapien
gaaatgaggaccagcaccgcgctcg

SEQ ID NO: 1940684 - DNA, 25 bp, Homo sapien
cagaaatgaggaccagcaccgcgct

SEQ ID NO: 1940685 - DNA, 25 bp, Homo sapien
caccgcgctcgcctattttcatccc

SEQ ID NO: 1940686 - DNA, 25 bp, Homo sapien
gcctggcgtctccaagtaatctaaa

SEQ ID NO: 1940687 - DNA, 25 bp, Homo sapien
ttgcctcaaggccaagcagtcgcag

SEQ ID NO: 1940688 - DNA, 25 bp, Homo sapien
cctctgggtttataggaaagctcac

SEQ ID NO: 1940689 - DNA, 25 bp, Homo sapien
cagggtgaccctttgatatctgctc

SEQ ID NO: 1940690 - DNA, 25 bp, Homo sapien
gagaagcccggcatctaattagatt

SEQ ID NO: 1940691 - DNA, 25 bp, Homo sapien
tcaggagagccacgtcaagaaaaag

SEQ ID NO: 1940692 - DNA, 25 bp, Homo sapien
taagacagagaaacccatgccagaa

SEQ ID NO: 1940693 - DNA, 25 bp, Homo sapien
tgatgaaagccaccgcaggcaaagt

SEQ ID NO: 1940694 - DNA, 25 bp, Homo sapien
cgcttccaacttggcgagggcgctg

SEQ ID NO: 1940695 - DNA, 25 bp, Homo sapien
ctgcgggtctcgagcgctctggcca

SEQ ID NO: 1940696 - DNA, 25 bp, Homo sapien
tgtgtttcgcttccaacttggcgag

SEQ ID NO: 1940697 - DNA, 25 bp, Homo sapien
ctaaaataacttggcacgagtgtgt

SEQ ID NO: 1940698 - DNA, 25 bp, Homo sapien
aacttgcagacgttgcggccgcgcg

SEQ ID NO: 1940699 - DNA, 25 bp, Homo sapien
cagttgaagaggtagcagccgagca

SEQ ID NO: 1940700 - DNA, 25 bp, Homo sapien
tagccgctgtgcagcgcgaacttgc

SEQ ID NO: 1940701 - DNA, 25 bp, Homo sapien
ctgaggctgtagctgctgtagccgc

SEQ ID NO: 1940702 - DNA, 25 bp, Homo sapien
acgcattgccgccagccccgcacgg

SEQ ID NO: 1940703 - DNA, 25 bp, Homo sapien
gcagcaggccgccacgcattgccgc

SEQ ID NO: 1940704 - DNA, 25 bp, Homo sapien
acggccacggagcagcgcggctcgg

SEQ ID NO: 1940705 - DNA, 25 bp, Homo sapien
ggccacggagcagcgcggctcggag

SEQ ID NO: 1940706 - DNA, 25 bp, Homo sapien
tcctgctgcagttgccggcggaact

SEQ ID NO: 1940707 - DNA, 25 bp, Homo sapien
aggcagagcagtagcagcccgcgca

SEQ ID NO: 1940708 - DNA, 25 bp, Homo sapien
atgatggcgtcaggcattgcgctgt

SEQ ID NO: 1940709 - DNA, 25 bp, Homo sapien
agctgcgcgtgcagttcggacagcg

SEQ ID NO: 1940710 - DNA, 25 bp, Homo sapien
caccaggtgtgtgcgaacagtggcc

SEQ ID NO: 1940711 - DNA, 25 bp, Homo sapien
agtagcgggagacatagccggccca

SEQ ID NO: 1940712 - DNA, 25 bp, Homo sapien
gacgagtcggcctcggcgttgatca

SEQ ID NO: 1940713 - DNA, 25 bp, Homo sapien
ggcccagcaggctttagcaaccaac

SEQ ID NO: 1940714 - DNA, 25 bp, Homo sapien
actcatgaccttatgatctggctgc

SEQ ID NO: 1940715 - DNA, 25 bp, Homo sapien
tgcctggcctgggatcttttttata

SEQ ID NO: 1940716 - DNA, 25 bp, Homo sapien
tggcctgggatcttttttataagaa

SEQ ID NO: 1940717 - DNA, 25 bp, Homo sapien
gaactcatgaccttatgatctggct

SEQ ID NO: 1940718 - DNA, 25 bp, Homo sapien
gtgctgctgctcactacatgagatc

SEQ ID NO: 1940719 - DNA, 25 bp, Homo sapien
ttaacatgtttctcttacaatcctg

SEQ ID NO: 1940720 - DNA, 25 bp, Homo sapien
gggcgaggactaaaaactgccattg

SEQ ID NO: 1940721 - DNA, 25 bp, Homo sapien
ggactaaaaactgccattgagtact

SEQ ID NO: 1940722 - DNA, 25 bp, Homo sapien
cagcgatcgaggaccacaggtgaac

SEQ ID NO: 1940723 - DNA, 25 bp, Homo sapien
agctgctactcttctaactcccggg

SEQ ID NO: 1940724 - DNA, 25 bp, Homo sapien
cactgcgtagtaatccacaagctgc

SEQ ID NO: 1940725 - DNA, 25 bp, Homo sapien
caaagaattacttgcactgtgctca

SEQ ID NO: 1940726 - DNA, 25 bp, Homo sapien
gcatattcactccctgggttcctgc

SEQ ID NO: 1940727 - DNA, 25 bp, Homo sapien
ctcagcatattcactccctgggttc

SEQ ID NO: 1940728 - DNA, 25 bp, Homo sapien
tcagcatattcactccctgggttcc

SEQ ID NO: 1940729 - DNA, 25 bp, Homo sapien
agcatattcactccctgggttcctg

SEQ ID NO: 1940730 - DNA, 25 bp, Homo sapien
ggcccttatctgactcaagccatat

SEQ ID NO: 1940731 - DNA, 25 bp, Homo sapien
tgtgacaccgatcttggcaaactca

SEQ ID NO: 1940732 - DNA, 25 bp, Homo sapien
ccttctggaccagtggcccttatct

SEQ ID NO: 1940733 - DNA, 25 bp, Homo sapien
tcaagccatatcttgccaagcctgt

SEQ ID NO: 1940734 - DNA, 25 bp, Homo sapien
ttgaccttgcccctcctcgagagga

SEQ ID NO: 1940735 - DNA, 25 bp, Homo sapien
tctcactgcacattgtgctgccagc

SEQ ID NO: 1940736 - DNA, 25 bp, Homo sapien
ggagatgattgcttcatccctcctc

SEQ ID NO: 1940737 - DNA, 25 bp, Homo sapien
ggcaggcgttccagatctttgacct

SEQ ID NO: 1940738 - DNA, 25 bp, Homo sapien
gattcacctctcttgagtccttacc

SEQ ID NO: 1940739 - DNA, 25 bp, Homo sapien
tcacctctcttgagtccttaccaga

SEQ ID NO: 1940740 - DNA, 25 bp, Homo sapien
ccatgattcacctctcttgagtcct

SEQ ID NO: 1940741 - DNA, 25 bp, Homo sapien
catgattcacctctcttgagtcctt

SEQ ID NO: 1940742 - DNA, 25 bp, Homo sapien
gaccagtggatatctgaagcattta

SEQ ID NO: 1940743 - DNA, 25 bp, Homo sapien
ttaaaactaacaggatgaatgcccc

SEQ ID NO: 1940744 - DNA, 25 bp, Homo sapien
caattcccattaaaactaacaggat

SEQ ID NO: 1940745 - DNA, 25 bp, Homo sapien
tccatctatctggtagactagaaga

SEQ ID NO: 1940746 - DNA, 25 bp, Homo sapien
cagtctccctttgagagcttcctga

SEQ ID NO: 1940747 - DNA, 25 bp, Homo sapien
tgtcggttctggcattgcctcccag

SEQ ID NO: 1940748 - DNA, 25 bp, Homo sapien
gtgccctaagaattccctgagccag

SEQ ID NO: 1940749 - DNA, 25 bp, Homo sapien
ctgagccagtgatcgcagtctccct

SEQ ID NO: 1940750 - DNA, 25 bp, Homo sapien
caaaacatctcgacttgcagagtgg

SEQ ID NO: 1940751 - DNA, 25 bp, Homo sapien
cattgcgtcaaagaggagggatttc

SEQ ID NO: 1940752 - DNA, 25 bp, Homo sapien
gcaccgttctgcttcacgttgacaa

SEQ ID NO: 1940753 - DNA, 25 bp, Homo sapien
tctctccattggtggcgaactgcca

SEQ ID NO: 1940754 - DNA, 25 bp, Homo sapien
cccaggaggcccagaggtttgacca

SEQ ID NO: 1940755 - DNA, 25 bp, Homo sapien
tttgggtcaattctccccaagtgct

SEQ ID NO: 1940756 - DNA, 25 bp, Homo sapien
gatgtcacaaaggagcatcctgagg

SEQ ID NO: 1940757 - DNA, 25 bp, Homo sapien
ccacttctcccagcgtttgggtcaa

SEQ ID NO: 1940758 - DNA, 25 bp, Homo sapien
agaagacctgcgcttcacaccaggg

SEQ ID NO: 1940759 - DNA, 25 bp, Homo sapien
tttatagtgaagttgaagcaaagag

SEQ ID NO: 1940760 - DNA, 25 bp, Homo sapien
tattcaagaagacctgcgcttcaca

SEQ ID NO: 1940761 - DNA, 25 bp, Homo sapien
acaatgattttatagtgaagttgaa

SEQ ID NO: 1940762 - DNA, 25 bp, Homo sapien
agccagttcttgtgctcaggacact

SEQ ID NO: 1940763 - DNA, 25 bp, Homo sapien
ccagttcttgtgctcaggacactca

SEQ ID NO: 1940764 - DNA, 25 bp, Homo sapien
cagttcttgtgctcaggacactcac

SEQ ID NO: 1940765 - DNA, 25 bp, Homo sapien
cagccagttcttgtgctcaggacac

SEQ ID NO: 1940766 - DNA, 25 bp, Homo sapien
ggctagaagtcagggatattcttcg

SEQ ID NO: 1940767 - DNA, 25 bp, Homo sapien
cacagggctagaagtcagggatatt

SEQ ID NO: 1940768 - DNA, 25 bp, Homo sapien
aggcgcacagggctagaagtcaggg

SEQ ID NO: 1940769 - DNA, 25 bp, Homo sapien
tagaagtcagggatattcttcgcat

SEQ ID NO: 1940770 - DNA, 25 bp, Homo sapien
ggaagctgggcgtgtacacattcac

SEQ ID NO: 1940771 - DNA, 25 bp, Homo sapien
taccctggaacaactgaggtcaggc

SEQ ID NO: 1940772 - DNA, 25 bp, Homo sapien
caccctcactggtatggtgaagaaa

SEQ ID NO: 1940773 - DNA, 25 bp, Homo sapien
gaaatgttatccaacagcgtgggtg

SEQ ID NO: 1940774 - DNA, 25 bp, Homo sapien
tgtcagcaggtccggtatctggcga

SEQ ID NO: 1940775 - DNA, 25 bp, Homo sapien
ggtatctggcgagggccctctcttc

SEQ ID NO: 1940776 - DNA, 25 bp, Homo sapien
cctcacacagtggagagcagagaca

SEQ ID NO: 1940777 - DNA, 25 bp, Homo sapien
tatcacttcttaatcccacatggct

SEQ ID NO: 1940778 - DNA, 25 bp, Homo sapien
tgagaattaggatttctgcatatga

SEQ ID NO: 1940779 - DNA, 25 bp, Homo sapien
gcaggcaaacatgcggcctgtaaca

SEQ ID NO: 1940780 - DNA, 25 bp, Homo sapien
cttgagaattaggatttctgcatat

SEQ ID NO: 1940781 - DNA, 25 bp, Homo sapien
aaggcaggcaaacatgcggcctgta

SEQ ID NO: 1940782 - DNA, 25 bp, Homo sapien
tgtccttctgccgtctctaggatgg

SEQ ID NO: 1940783 - DNA, 25 bp, Homo sapien
ccttctgccgtctctaggatggaga

SEQ ID NO: 1940784 - DNA, 25 bp, Homo sapien
tgccgtctctaggatggagaggcct

SEQ ID NO: 1940785 - DNA, 25 bp, Homo sapien
gtttgtccttctgccgtctctagga

SEQ ID NO: 1940786 - DNA, 25 bp, Homo sapien
ccctgctcagggcaccggagaagga

SEQ ID NO: 1940787 - DNA, 25 bp, Homo sapien
ctgctcagggcaccggagaaggagc

SEQ ID NO: 1940788 - DNA, 25 bp, Homo sapien
ggaaaatcttggcacaaggagcagc

SEQ ID NO: 1940789 - DNA, 25 bp, Homo sapien
tcagggcaccggagaaggagcctct

SEQ ID NO: 1940790 - DNA, 25 bp, Homo sapien
cccctgacatctggcaaagagttag

SEQ ID NO: 1940791 - DNA, 25 bp, Homo sapien
ctgaatttctctggccattggcaca

SEQ ID NO: 1940792 - DNA, 25 bp, Homo sapien
ggcggctggcccctgacatctggca

SEQ ID NO: 1940793 - DNA, 25 bp, Homo sapien
ggaatgcaggtgtttctggcaaata

SEQ ID NO: 1940794 - DNA, 25 bp, Homo sapien
aagatcacgtaggttctctgtgaga

SEQ ID NO: 1940795 - DNA, 25 bp, Homo sapien
gggaagcaagatcacgtaggttctc

SEQ ID NO: 1940796 - DNA, 25 bp, Homo sapien
tctgtgagagaggccgcatgcccag

SEQ ID NO: 1940797 - DNA, 25 bp, Homo sapien
agagaggccgcatgcccagcaggac

SEQ ID NO: 1940798 - DNA, 25 bp, Homo sapien
gatgccggtgtgaatccctggaacc

SEQ ID NO: 1940799 - DNA, 25 bp, Homo sapien
cacaacctagatcatattaaaacca

SEQ ID NO: 1940800 - DNA, 25 bp, Homo sapien
aaagttattttgttagtcatttcag

SEQ ID NO: 1940801 - DNA, 25 bp, Homo sapien
ccaacttaattttaacaggatgcaa

SEQ ID NO: 1940802 - DNA, 25 bp, Homo sapien
aaagtggtcattgctttaggaggaa

SEQ ID NO: 1940803 - DNA, 25 bp, Homo sapien
caacttcagatctctagaatggtaa

SEQ ID NO: 1940804 - DNA, 25 bp, Homo sapien
agcaatcaaaagctaacactgtctg

SEQ ID NO: 1940805 - DNA, 25 bp, Homo sapien
tgttagcccattgagatccattcca

SEQ ID NO: 1940806 - DNA, 25 bp, Homo sapien
gttgtctggtagatccttggagcag

SEQ ID NO: 1940807 - DNA, 25 bp, Homo sapien
ctgcaagtgcatttcggccccatct

SEQ ID NO: 1940808 - DNA, 25 bp, Homo sapien
tgcatggcttttccccggacataac

SEQ ID NO: 1940809 - DNA, 25 bp, Homo sapien
tgtttcttgatgtggaggccaacac

SEQ ID NO: 1940810 - DNA, 25 bp, Homo sapien
taaatttgaagccaagatccaggaa

SEQ ID NO: 1940811 - DNA, 25 bp, Homo sapien
tgaaaggatgtggaggactgacggc

SEQ ID NO: 1940812 - DNA, 25 bp, Homo sapien
tgtgaaaggatgtggaggactgacg

SEQ ID NO: 1940813 - DNA, 25 bp, Homo sapien
ctgtgaaaggatgtggaggactgac

SEQ ID NO: 1940814 - DNA, 25 bp, Homo sapien
aaaggatgtggaggactgacggcat

SEQ ID NO: 1940815 - DNA, 25 bp, Homo sapien
aaggaggtgaaagcattgataagcc

SEQ ID NO: 1940816 - DNA, 25 bp, Homo sapien
ggcacatgctactacacttggtcaa

SEQ ID NO: 1940817 - DNA, 25 bp, Homo sapien
gaagacctttgtccaattctcccaa

SEQ ID NO: 1940818 - DNA, 25 bp, Homo sapien
taaagtgcccactctgatctggaag

SEQ ID NO: 1940819 - DNA, 25 bp, Homo sapien
cattcgacatgatgtcaacgtctct

SEQ ID NO: 1940820 - DNA, 25 bp, Homo sapien
caaaaatgaactctttatggattcc

SEQ ID NO: 1940821 - DNA, 25 bp, Homo sapien
gaactctttatggattcctcattcg

SEQ ID NO: 1940822 - DNA, 25 bp, Homo sapien
ggattcctcattcgacatgatgtca

SEQ ID NO: 1940823 - DNA, 25 bp, Homo sapien
taaagaattatccttcaggacgcgg

SEQ ID NO: 1940824 - DNA, 25 bp, Homo sapien
gatgttaggaataaccgctggtaaa

SEQ ID NO: 1940825 - DNA, 25 bp, Homo sapien
taaattactgaggaaatatcattaa

SEQ ID NO: 1940826 - DNA, 25 bp, Homo sapien
ctttgtggaaatattagtacagagc

SEQ ID NO: 1940827 - DNA, 25 bp, Homo sapien
gctggtagtgatgggcctgctccct

SEQ ID NO: 1940828 - DNA, 25 bp, Homo sapien
cctctctaccatctgatgagaaggc

SEQ ID NO: 1940829 - DNA, 25 bp, Homo sapien
tggaggggcctgcaagactgaagct

SEQ ID NO: 1940830 - DNA, 25 bp, Homo sapien
tcaaggccctctctaccatctgatg

SEQ ID NO: 1940831 - DNA, 25 bp, Homo sapien
tcaagatatggagacctgtagtggc

SEQ ID NO: 1940832 - DNA, 25 bp, Homo sapien
cgaatacctggctgcgccgttattt

SEQ ID NO: 1940833 - DNA, 25 bp, Homo sapien
tgtagtggctccgaatacctggctg

SEQ ID NO: 1940834 - DNA, 25 bp, Homo sapien
gagacctgtagtggctccgaatacc

SEQ ID NO: 1940835 - DNA, 25 bp, Homo sapien
tgccctttgctccactcccaattct

SEQ ID NO: 1940836 - DNA, 25 bp, Homo sapien
tccactcccaattctgcccccatac

SEQ ID NO: 1940837 - DNA, 25 bp, Homo sapien
ctgccctttgctccactcccaattc

SEQ ID NO: 1940838 - DNA, 25 bp, Homo sapien
tgctccactcccaattctgccccca

SEQ ID NO: 1940839 - DNA, 25 bp, Homo sapien
cactccaaaggactctcctcagcag

SEQ ID NO: 1940840 - DNA, 25 bp, Homo sapien
cctcagcagccaggtaggatgaagc

SEQ ID NO: 1940841 - DNA, 25 bp, Homo sapien
ctcctcagcagccaggtaggatgaa

SEQ ID NO: 1940842 - DNA, 25 bp, Homo sapien
tcagcagccaggtaggatgaagcag

SEQ ID NO: 1940843 - DNA, 25 bp, Homo sapien
ccatggctttgggtcagactgtgcc

SEQ ID NO: 1940844 - DNA, 25 bp, Homo sapien
catatgaggagacacatgatgagga

SEQ ID NO: 1940845 - DNA, 25 bp, Homo sapien
catggctttgggtcagactgtgcct

SEQ ID NO: 1940846 - DNA, 25 bp, Homo sapien
ggagcatatgaggagacacatgatg

SEQ ID NO: 1940847 - DNA, 25 bp, Homo sapien
tggccgtggccctgggttgggctgt

SEQ ID NO: 1940848 - DNA, 25 bp, Homo sapien
ccgtggccctgggttgggctgtgcc

SEQ ID NO: 1940849 - DNA, 25 bp, Homo sapien
gctgtgcctgaggacatggtgggtg

SEQ ID NO: 1940850 - DNA, 25 bp, Homo sapien
tggtggccgtggccctgggttgggc

SEQ ID NO: 1940851 - DNA, 25 bp, Homo sapien
cattggagatccccatttctttttc

SEQ ID NO: 1940852 - DNA, 25 bp, Homo sapien
tcattggagatccccatttcttttt

SEQ ID NO: 1940853 - DNA, 25 bp, Homo sapien
tggctccaggatgaaccgttgtcca

SEQ ID NO: 1940854 - DNA, 25 bp, Homo sapien
gctccaggatgaaccgttgtccaca

SEQ ID NO: 1940855 - DNA, 25 bp, Homo sapien
caggatgaaccgttgtccacattct

SEQ ID NO: 1940856 - DNA, 25 bp, Homo sapien
ccaggatgaaccgttgtccacattc

SEQ ID NO: 1940857 - DNA, 25 bp, Homo sapien
gagctgccaagatccactgccgtgt

SEQ ID NO: 1940858 - DNA, 25 bp, Homo sapien
gtccttcggctttctgctcacaaga

SEQ ID NO: 1940859 - DNA, 25 bp, Homo sapien
atctgtccatcgaaactgagctgcc

SEQ ID NO: 1940860 - DNA, 25 bp, Homo sapien
ggaagatctgtccatcgaaactgag

SEQ ID NO: 1940861 - DNA, 25 bp, Homo sapien
aatttcctggtcttacttgctctgc

SEQ ID NO: 1940862 - DNA, 25 bp, Homo sapien
gccttgcctctagacgtcttgcggg

SEQ ID NO: 1940863 - DNA, 25 bp, Homo sapien
ctggccttgcctctagacgtcttgc

SEQ ID NO: 1940864 - DNA, 25 bp, Homo sapien
gccttgacagatattgagcccccat

SEQ ID NO: 1940865 - DNA, 25 bp, Homo sapien
cacagtcatagtgaagaaaagtctt

SEQ ID NO: 1940866 - DNA, 25 bp, Homo sapien
ctctgtaagtatgtccaccacctct

SEQ ID NO: 1940867 - DNA, 25 bp, Homo sapien
tctgtaagtatgtccaccacctctc

SEQ ID NO: 1940868 - DNA, 25 bp, Homo sapien
caccgtggtccaggtctgaacttag

SEQ ID NO: 1940869 - DNA, 25 bp, Homo sapien
tgatgtcatagcaaagagagtgagg

SEQ ID NO: 1940870 - DNA, 25 bp, Homo sapien
tgacggtgatgtcatagcaaagaga

SEQ ID NO: 1940871 - DNA, 25 bp, Homo sapien
ctgaacttagggatgacggtgatgt

SEQ ID NO: 1940872 - DNA, 25 bp, Homo sapien
tgtccacaagattaaggcgagtgct

SEQ ID NO: 1940873 - DNA, 25 bp, Homo sapien
cacactgtgacaataagaggaagcc

SEQ ID NO: 1940874 - DNA, 25 bp, Homo sapien
cctccacactgtgacaataagagga

SEQ ID NO: 1940875 - DNA, 25 bp, Homo sapien
ccacatcggtcaacacaggaccttg

SEQ ID NO: 1940876 - DNA, 25 bp, Homo sapien
ctagagaggtgccaggagtgctaga

SEQ ID NO: 1940877 - DNA, 25 bp, Homo sapien
gccaggagtgctagaggaggaaggg

SEQ ID NO: 1940878 - DNA, 25 bp, Homo sapien
ccaggagtgctagaggaggaagggc

SEQ ID NO: 1940879 - DNA, 25 bp, Homo sapien
gagaggtgccaggagtgctagagga

SEQ ID NO: 1940880 - DNA, 25 bp, Homo sapien
cctctaggtcattaggaagagaggt

SEQ ID NO: 1940881 - DNA, 25 bp, Homo sapien
ggtcattaggaagagaggtctggca

SEQ ID NO: 1940882 - DNA, 25 bp, Homo sapien
agaggtctggcagtgagaagacaca

SEQ ID NO: 1940883 - DNA, 25 bp, Homo sapien
agagaggtctggcagtgagaagaca

SEQ ID NO: 1940884 - DNA, 25 bp, Homo sapien
tgccgggctgcactagggatccccg

SEQ ID NO: 1940885 - DNA, 25 bp, Homo sapien
cagctcctcccctcggaggataagt

SEQ ID NO: 1940886 - DNA, 25 bp, Homo sapien
ctcctcccctcggaggataagtagc

SEQ ID NO: 1940887 - DNA, 25 bp, Homo sapien
cctcccctcggaggataagtagcct

SEQ ID NO: 1940888 - DNA, 25 bp, Homo sapien
agcagaagcgggaggcgtagaagga

SEQ ID NO: 1940889 - DNA, 25 bp, Homo sapien
gaagcgggaggcgtagaaggaacgc

SEQ ID NO: 1940890 - DNA, 25 bp, Homo sapien
agcgggaggcgtagaaggaacgcgg

SEQ ID NO: 1940891 - DNA, 25 bp, Homo sapien
cggccagcccggtcctgcaccagct

SEQ ID NO: 1940892 - DNA, 25 bp, Homo sapien
ggggacagcagaagcgaagcccagc

SEQ ID NO: 1940893 - DNA, 25 bp, Homo sapien
caggggacagcagaagcgaagccca

SEQ ID NO: 1940894 - DNA, 25 bp, Homo sapien
cgcaggggacagcagaagcgaagcc

SEQ ID NO: 1940895 - DNA, 25 bp, Homo sapien
gggagttggatcgcaggggacagca

SEQ ID NO: 1940896 - DNA, 25 bp, Homo sapien
tagagctcgacaggacctaagcctt

SEQ ID NO: 1940897 - DNA, 25 bp, Homo sapien
cctaagccttgatatggttctgtgt

SEQ ID NO: 1940898 - DNA, 25 bp, Homo sapien
caggaagacccggaaggactcgccg

SEQ ID NO: 1940899 - DNA, 25 bp, Homo sapien
ccagagcctcgggacgaaactgttt

SEQ ID NO: 1940900 - DNA, 25 bp, Homo sapien
gagccccacagattcgagtgggacg

SEQ ID NO: 1940901 - DNA, 25 bp, Homo sapien
gtcggagccccacagattcgagtgg

SEQ ID NO: 1940902 - DNA, 25 bp, Homo sapien
cccacagattcgagtgggacggtga

SEQ ID NO: 1940903 - DNA, 25 bp, Homo sapien
gcgccctcctgtagcggccccaggg

SEQ ID NO: 1940904 - DNA, 25 bp, Homo sapien
tcaacaccgtttggtaaatatctag

SEQ ID NO: 1940905 - DNA, 25 bp, Homo sapien
gtggttgaaatcagcaatcgcctat

SEQ ID NO: 1940906 - DNA, 25 bp, Homo sapien
aatcgcctataacatccccggtgtg

SEQ ID NO: 1940907 - DNA, 25 bp, Homo sapien
tagaaccagtgcctcgtcactgagg

SEQ ID NO: 1940908 - DNA, 25 bp, Homo sapien
aagggctgggtgtcatttattgaca

SEQ ID NO: 1940909 - DNA, 25 bp, Homo sapien
acagcagtttatacacatttgtttc

SEQ ID NO: 1940910 - DNA, 25 bp, Homo sapien
ttttttgagctggaagggctgggtg

SEQ ID NO: 1940911 - DNA, 25 bp, Homo sapien
ttttgagctggaagggctgggtgtc

SEQ ID NO: 1940912 - DNA, 25 bp, Homo sapien
cattatccaagtccatacaagtttt

SEQ ID NO: 1940913 - DNA, 25 bp, Homo sapien
tgccggtcgcacagttcgagagaat

SEQ ID NO: 1940914 - DNA, 25 bp, Homo sapien
agccttatgttaagggacagactgc

SEQ ID NO: 1940915 - DNA, 25 bp, Homo sapien
gtatttgagagggaccacggtgaga

SEQ ID NO: 1940916 - DNA, 25 bp, Homo sapien
cagctgcccacatccatgacacagg

SEQ ID NO: 1940917 - DNA, 25 bp, Homo sapien
tccagctgcccacatccatgacaca

SEQ ID NO: 1940918 - DNA, 25 bp, Homo sapien
agctgcccacatccatgacacagga

SEQ ID NO: 1940919 - DNA, 25 bp, Homo sapien
tctccagctgcccacatccatgaca

SEQ ID NO: 1940920 - DNA, 25 bp, Homo sapien
ctgcttcattctctagaggggcctg

SEQ ID NO: 1940921 - DNA, 25 bp, Homo sapien
ttaggtgatgaagggactctgggcc

SEQ ID NO: 1940922 - DNA, 25 bp, Homo sapien
taggtgatgaagggactctgggcct

SEQ ID NO: 1940923 - DNA, 25 bp, Homo sapien
ggcctgagctgcttcattctctaga

SEQ ID NO: 1940924 - DNA, 25 bp, Homo sapien
cactggaagaataagcgatactgtt

SEQ ID NO: 1940925 - DNA, 25 bp, Homo sapien
gcactggaagaataagcgatactgt

SEQ ID NO: 1940926 - DNA, 25 bp, Homo sapien
ctggaagaataagcgatactgtttg

SEQ ID NO: 1940927 - DNA, 25 bp, Homo sapien
tcatgaatgtaatacttttccgtat

SEQ ID NO: 1940928 - DNA, 25 bp, Homo sapien
tcagatgccagggaggataaagcag

SEQ ID NO: 1940929 - DNA, 25 bp, Homo sapien
ccatggctttgggttgggttgtgcc

SEQ ID NO: 1940930 - DNA, 25 bp, Homo sapien
gaggataaagcagaggatgatgagg

SEQ ID NO: 1940931 - DNA, 25 bp, Homo sapien
ggtgctggccatggctttgggttgg

SEQ ID NO: 1940932 - DNA, 25 bp, Homo sapien
ggccccaaatcttaggggatgcctc

SEQ ID NO: 1940933 - DNA, 25 bp, Homo sapien
aacacaggagtgacaaccctcgtcc

SEQ ID NO: 1940934 - DNA, 25 bp, Homo sapien
gagcttttgtcccacaatgctgtga

SEQ ID NO: 1940935 - DNA, 25 bp, Homo sapien
gaggaagctgctgtgaccgttcctg

SEQ ID NO: 1940936 - DNA, 25 bp, Homo sapien
tgaaatgttatggaagaacacggtc

SEQ ID NO: 1940937 - DNA, 25 bp, Homo sapien
gccatgtcttacaatcccccattga

SEQ ID NO: 1940938 - DNA, 25 bp, Homo sapien
tggaagaacacggtcacctccttgt

SEQ ID NO: 1940939 - DNA, 25 bp, Homo sapien
tgttatggaagaacacggtcacctc

SEQ ID NO: 1940940 - DNA, 25 bp, Homo sapien
tgccctattgcaaagagatcagctc

SEQ ID NO: 1940941 - DNA, 25 bp, Homo sapien
tctgatcttgacaaatcctgagccc

SEQ ID NO: 1940942 - DNA, 25 bp, Homo sapien
tttacaggaaaccaataaatgcctc

SEQ ID NO: 1940943 - DNA, 25 bp, Homo sapien
aatgcctctaagacactactgtgtc

SEQ ID NO: 1940944 - DNA, 25 bp, Homo sapien
tgaacttcacaccatcgtggttcag

SEQ ID NO: 1940945 - DNA, 25 bp, Homo sapien
aacttcacaccatcgtggttcaggt

SEQ ID NO: 1940946 - DNA, 25 bp, Homo sapien
cttgaacttcacaccatcgtggttc

SEQ ID NO: 1940947 - DNA, 25 bp, Homo sapien
gaacttcacaccatcgtggttcagg

SEQ ID NO: 1940948 - DNA, 25 bp, Homo sapien
tcattaggaagataggccccacagt

SEQ ID NO: 1940949 - DNA, 25 bp, Homo sapien
attaggaagataggccccacagtga

SEQ ID NO: 1940950 - DNA, 25 bp, Homo sapien
cattaggaagataggccccacagtg

SEQ ID NO: 1940951 - DNA, 25 bp, Homo sapien
agggaaccaagaagctgcacaggca

SEQ ID NO: 1940952 - DNA, 25 bp, Homo sapien
gagcagggccacagggaaccaagaa

SEQ ID NO: 1940953 - DNA, 25 bp, Homo sapien
agctgcacaggcagttggccccgat

SEQ ID NO: 1940954 - DNA, 25 bp, Homo sapien
ggccacagggaaccaagaagctgca

SEQ ID NO: 1940955 - DNA, 25 bp, Homo sapien
gtggctgtaccgcctcaccctcagc

SEQ ID NO: 1940956 - DNA, 25 bp, Homo sapien
agtttgtgatcgcatccctgtggaa

SEQ ID NO: 1940957 - DNA, 25 bp, Homo sapien
gggagtttgtgatcgcatccctgtg

SEQ ID NO: 1940958 - DNA, 25 bp, Homo sapien
ttgtgatcgcatccctgtggaaccc

SEQ ID NO: 1940959 - DNA, 25 bp, Homo sapien
tgggggagtttgtgatcgcatccct

SEQ ID NO: 1940960 - DNA, 25 bp, Homo sapien
gtggtgccttttccgcgctctttaa

SEQ ID NO: 1940961 - DNA, 25 bp, Homo sapien
tcttcttcccgagggcgagtagggc

SEQ ID NO: 1940962 - DNA, 25 bp, Homo sapien
ctctgaaacacgctgcagtccacag

SEQ ID NO: 1940963 - DNA, 25 bp, Homo sapien
tcgcgccggtccttctagaagcttt

SEQ ID NO: 1940964 - DNA, 25 bp, Homo sapien
agcagtagcagaagcgggaagcaca

SEQ ID NO: 1940965 - DNA, 25 bp, Homo sapien
aagaaacgcggggcaagcggccgct

SEQ ID NO: 1940966 - DNA, 25 bp, Homo sapien
tgacccggaccagccggacagcagt

SEQ ID NO: 1940967 - DNA, 25 bp, Homo sapien
gaagcgggaagcacagaagaaacgc

SEQ ID NO: 1940968 - DNA, 25 bp, Homo sapien
gcggagtccccgaccctctctgtcc

SEQ ID NO: 1940969 - DNA, 25 bp, Homo sapien
tgcgtcgcggagtccccgaccctct

SEQ ID NO: 1940970 - DNA, 25 bp, Homo sapien
ctccgcctgcgtcgcggagtccccg

SEQ ID NO: 1940971 - DNA, 25 bp, Homo sapien
cctccctccgcctgcgtcgcggagt

SEQ ID NO: 1940972 - DNA, 25 bp, Homo sapien
gggacactcgagtgcgtcctcctct

SEQ ID NO: 1940973 - DNA, 25 bp, Homo sapien
tcgagtgcgtcctcctctgagtcac

SEQ ID NO: 1940974 - DNA, 25 bp, Homo sapien
tggatggtccctgtaaccatcctca

SEQ ID NO: 1940975 - DNA, 25 bp, Homo sapien
accatcctcaaaggggacactcgag

SEQ ID NO: 1940976 - DNA, 25 bp, Homo sapien
tgagtcttcatgtggggagaacttc

SEQ ID NO: 1940977 - DNA, 25 bp, Homo sapien
tgaatgagtcttcatgtggggagaa

SEQ ID NO: 1940978 - DNA, 25 bp, Homo sapien
cccggccactcagcccgttctccat

SEQ ID NO: 1940979 - DNA, 25 bp, Homo sapien
ctcagcccgttctccattgaatgag

SEQ ID NO: 1940980 - DNA, 25 bp, Homo sapien
gtgaccagcaatccctagggtcctg

SEQ ID NO: 1940981 - DNA, 25 bp, Homo sapien
tgaccagcaatccctagggtcctga

SEQ ID NO: 1940982 - DNA, 25 bp, Homo sapien
gaggaggaggcctggaccaagccca

SEQ ID NO: 1940983 - DNA, 25 bp, Homo sapien
ggaccaagcccagggcctgtctctg

SEQ ID NO: 1940984 - DNA, 25 bp, Homo sapien
cttcaggacagggtcatgggagggc

SEQ ID NO: 1940985 - DNA, 25 bp, Homo sapien
cccagggcctgtctctgcttcagga

SEQ ID NO: 1940986 - DNA, 25 bp, Homo sapien
atgcactaaagccactgtccaggaa

SEQ ID NO: 1940987 - DNA, 25 bp, Homo sapien
cccaggatgggcatagaagtggccc

SEQ ID NO: 1940988 - DNA, 25 bp, Homo sapien
gggcatagaagtggcccaaaagtga

SEQ ID NO: 1940989 - DNA, 25 bp, Homo sapien
gatgggcatagaagtggcccaaaag

SEQ ID NO: 1940990 - DNA, 25 bp, Homo sapien
ctgctgccggcatttggccaccaca

SEQ ID NO: 1940991 - DNA, 25 bp, Homo sapien
ccaggccgcggcctcttcatggccc

SEQ ID NO: 1940992 - DNA, 25 bp, Homo sapien
agctggagctctgaacccaggccgc

SEQ ID NO: 1940993 - DNA, 25 bp, Homo sapien
gagctggagctctgaacccaggccg

SEQ ID NO: 1940994 - DNA, 25 bp, Homo sapien
tggagctctgaacccaggccgcggc

SEQ ID NO: 1940995 - DNA, 25 bp, Homo sapien
tttcctccgggtgtgtcacgccctg

SEQ ID NO: 1940996 - DNA, 25 bp, Homo sapien
ggtcgggtcggtgagttccaggctg

SEQ ID NO: 1940997 - DNA, 25 bp, Homo sapien
ccctctgtttcctccgggtgtgtca

SEQ ID NO: 1940998 - DNA, 25 bp, Homo sapien
acagagttgggtgtctgcatccagc

SEQ ID NO: 1940999 - DNA, 25 bp, Homo sapien
agctgtaattctcggttattcttag

SEQ ID NO: 1941000 - DNA, 25 bp, Homo sapien
tctcggttattcttagctacacttc

SEQ ID NO: 1941001 - DNA, 25 bp, Homo sapien
gtaattctcggttattcttagctac

SEQ ID NO: 1941002 - DNA, 25 bp, Homo sapien
tttcctagctgtaattctcggttat

SEQ ID NO: 1941003 - DNA, 25 bp, Homo sapien
ctgccccttcaagtttcctgtacct

SEQ ID NO: 1941004 - DNA, 25 bp, Homo sapien
agctgccccttcaagtttcctgtac

SEQ ID NO: 1941005 - DNA, 25 bp, Homo sapien
ggaagctgccccttcaagtttcctg

SEQ ID NO: 1941006 - DNA, 25 bp, Homo sapien
ctgcagtgggtaggatttggaagct

SEQ ID NO: 1941007 - DNA, 25 bp, Homo sapien
gctcccaaaattggctccccatctt

SEQ ID NO: 1941008 - DNA, 25 bp, Homo sapien
catgctcccaaaattggctccccat

SEQ ID NO: 1941009 - DNA, 25 bp, Homo sapien
atgctcccaaaattggctccccatc

SEQ ID NO: 1941010 - DNA, 25 bp, Homo sapien
tgctcccaaaattggctccccatct

SEQ ID NO: 1941011 - DNA, 25 bp, Homo sapien
aggttcttcactgaaacgtgactgc

SEQ ID NO: 1941012 - DNA, 25 bp, Homo sapien
ttcactgaaacgtgactgcattcca

SEQ ID NO: 1941013 - DNA, 25 bp, Homo sapien
tcactgaaacgtgactgcattccac

SEQ ID NO: 1941014 - DNA, 25 bp, Homo sapien
ggtgatgaccaattcctgccaccat

SEQ ID NO: 1941015 - DNA, 25 bp, Homo sapien
ggcttttcagctatattgatttttc

SEQ ID NO: 1941016 - DNA, 25 bp, Homo sapien
cccttggttcccgtgtcagaaggat

SEQ ID NO: 1941017 - DNA, 25 bp, Homo sapien
gatgactcgctggtcgcggcaaggg

SEQ ID NO: 1941018 - DNA, 25 bp, Homo sapien
tgtcagaaggatcaaggaaatgcgg

SEQ ID NO: 1941019 - DNA, 25 bp, Homo sapien
gacctgggatgactcgctggtcgcg

SEQ ID NO: 1941020 - DNA, 25 bp, Homo sapien
ccactcgaatctgtggggctccgac

SEQ ID NO: 1941021 - DNA, 25 bp, Homo sapien
gtggggctccgacagtgtgggcccc

SEQ ID NO: 1941022 - DNA, 25 bp, Homo sapien
cgtcccactcgaatctgtggggctc

SEQ ID NO: 1941023 - DNA, 25 bp, Homo sapien
tgtggggctccgacagtgtgggccc

SEQ ID NO: 1941024 - DNA, 25 bp, Homo sapien
tgttttactgacaatcatgtcagta

SEQ ID NO: 1941025 - DNA, 25 bp, Homo sapien
aataatcactggttaaattgttggc

SEQ ID NO: 1941026 - DNA, 25 bp, Homo sapien
gacaatcatgtcagtaatgaaagaa

SEQ ID NO: 1941027 - DNA, 25 bp, Homo sapien
tactgacaatcatgtcagtaatgaa

SEQ ID NO: 1941028 - DNA, 25 bp, Homo sapien
cagtgaatgagctattgggtccatg

SEQ ID NO: 1941029 - DNA, 25 bp, Homo sapien
tgctcacaggggctttttggtatca

SEQ ID NO: 1941030 - DNA, 25 bp, Homo sapien
ggttgatcaagaccgtgctcacagg

SEQ ID NO: 1941031 - DNA, 25 bp, Homo sapien
ctggccagacagaagggcgaggttg

SEQ ID NO: 1941032 - DNA, 25 bp, Homo sapien
acagaagggcgaggttgatcaagac

SEQ ID NO: 1941033 - DNA, 25 bp, Homo sapien
gcatcacctcacactgggagcagca

SEQ ID NO: 1941034 - DNA, 25 bp, Homo sapien
caaggggtgggacagacttccaaag

SEQ ID NO: 1941035 - DNA, 25 bp, Homo sapien
gagggctctgtattcctgtgccctt

SEQ ID NO: 1941036 - DNA, 25 bp, Homo sapien
gcctttggtgggcctgcaggcaaac

SEQ ID NO: 1941037 - DNA, 25 bp, Homo sapien
tgctccttgctccacttccaattct

SEQ ID NO: 1941038 - DNA, 25 bp, Homo sapien
ctgctccttgctccacttccaattc

SEQ ID NO: 1941039 - DNA, 25 bp, Homo sapien
gctccttgctccacttccaattctg

SEQ ID NO: 1941040 - DNA, 25 bp, Homo sapien
ctccttgctccacttccaattctgc

SEQ ID NO: 1941041 - DNA, 25 bp, Homo sapien
tgtggccctgagttgggttgtgcct

SEQ ID NO: 1941042 - DNA, 25 bp, Homo sapien
ctgtggccctgagttgggttgtgcc

SEQ ID NO: 1941043 - DNA, 25 bp, Homo sapien
aggtctgtccatcgatactgaactg

SEQ ID NO: 1941044 - DNA, 25 bp, Homo sapien
gaaggtctgtccatcgatactgaac

SEQ ID NO: 1941045 - DNA, 25 bp, Homo sapien
gtctgtccatcgatactgaactgcc

SEQ ID NO: 1941046 - DNA, 25 bp, Homo sapien
ggtctgtccatcgatactgaactgc

SEQ ID NO: 1941047 - DNA, 25 bp, Homo sapien
ctctgtaagtatgtccaccacctct

SEQ ID NO: 1941048 - DNA, 25 bp, Homo sapien
tctgtaagtatgtccaccacctctc

SEQ ID NO: 1941049 - DNA, 25 bp, Homo sapien
ggccttgaaccgcacaccaccgtgg

SEQ ID NO: 1941050 - DNA, 25 bp, Homo sapien
gaaccgcacaccaccgtggtccagg

SEQ ID NO: 1941051 - DNA, 25 bp, Homo sapien
cacctggccttgaaccgcacaccac

SEQ ID NO: 1941052 - DNA, 25 bp, Homo sapien
ttgaaccgcacaccaccgtggtcca

SEQ ID NO: 1941053 - DNA, 25 bp, Homo sapien
gggaccagccgaacagcaggaacag

SEQ ID NO: 1941054 - DNA, 25 bp, Homo sapien
aacagaagcgggaggcacagaagca

SEQ ID NO: 1941055 - DNA, 25 bp, Homo sapien
caaagctgggatggcggctgctgcc

SEQ ID NO: 1941056 - DNA, 25 bp, Homo sapien
tagcccgggaccagccgaacagcag

SEQ ID NO: 1941057 - DNA, 25 bp, Homo sapien
ggctggggacaagagatttaatcaa

SEQ ID NO: 1941058 - DNA, 25 bp, Homo sapien
ctggggacaagagatttaatcaagg

SEQ ID NO: 1941059 - DNA, 25 bp, Homo sapien
gctggggacaagagatttaatcaag

SEQ ID NO: 1941060 - DNA, 25 bp, Homo sapien
tggggacaagagatttaatcaaggt

SEQ ID NO: 1941061 - DNA, 25 bp, Homo sapien
tcatggtttcgatcctgatacacgt

SEQ ID NO: 1941062 - DNA, 25 bp, Homo sapien
cggcgacggtcaccagttgagctcg

SEQ ID NO: 1941063 - DNA, 25 bp, Homo sapien
tatatggaggtgaagtagtaaggaa

SEQ ID NO: 1941064 - DNA, 25 bp, Homo sapien
gttgagctcgcctgatctgttgtgg

SEQ ID NO: 1941065 - DNA, 25 bp, Homo sapien
tcaccgtcccgcttggatccgtggg

SEQ ID NO: 1941066 - DNA, 25 bp, Homo sapien
cctgcccagtggagaccgcggagtt

SEQ ID NO: 1941067 - DNA, 25 bp, Homo sapien
gggttcctacttcatcctcgcggaa

SEQ ID NO: 1941068 - DNA, 25 bp, Homo sapien
tggtgccccgcttgcggccgatgct

SEQ ID NO: 1941069 - DNA, 25 bp, Homo sapien
tcttttgtagacatgatcctgccta

SEQ ID NO: 1941070 - DNA, 25 bp, Homo sapien
taagccaaagtgacagcctcttttg

SEQ ID NO: 1941071 - DNA, 25 bp, Homo sapien
tttgtagacatgatcctgcctaaat

SEQ ID NO: 1941072 - DNA, 25 bp, Homo sapien
aaagtgacagcctcttttgtagaca

SEQ ID NO: 1941073 - DNA, 25 bp, Homo sapien
gccctgaacgccctgcttctgcaga

SEQ ID NO: 1941074 - DNA, 25 bp, Homo sapien
gaaatgaagaccttcgtccaatccc

SEQ ID NO: 1941075 - DNA, 25 bp, Homo sapien
gtgtcttaaaccctattgtatggta

SEQ ID NO: 1941076 - DNA, 25 bp, Homo sapien
cacctctcctgactggccaatctta

SEQ ID NO: 1941077 - DNA, 25 bp, Homo sapien
tgtatggtagccactgtgctaggtg

SEQ ID NO: 1941078 - DNA, 25 bp, Homo sapien
agtcgtcaatcaggatgtcactgtg

SEQ ID NO: 1941079 - DNA, 25 bp, Homo sapien
agcagacgagaaacctctcccgtgg

SEQ ID NO: 1941080 - DNA, 25 bp, Homo sapien
agtcctattggtttacgttgcagca

SEQ ID NO: 1941081 - DNA, 25 bp, Homo sapien
gctgcctcctcgctcatgaaggatt

SEQ ID NO: 1941082 - DNA, 25 bp, Homo sapien
actgcgcttctcaagggctctgggc

SEQ ID NO: 1941083 - DNA, 25 bp, Homo sapien
gagactgcgcttctcaagggctctg

SEQ ID NO: 1941084 - DNA, 25 bp, Homo sapien
agactgcgcttctcaagggctctgg

SEQ ID NO: 1941085 - DNA, 25 bp, Homo sapien
gactgcgcttctcaagggctctggg

SEQ ID NO: 1941086 - DNA, 25 bp, Homo sapien
ccgcagcacagcccattgttggtgc

SEQ ID NO: 1941087 - DNA, 25 bp, Homo sapien
atccgcagcacagcccattgttggt

SEQ ID NO: 1941088 - DNA, 25 bp, Homo sapien
gcatccgcagcacagcccattgttg

SEQ ID NO: 1941089 - DNA, 25 bp, Homo sapien
gcagcacagcccattgttggtgctg

SEQ ID NO: 1941090 - DNA, 25 bp, Homo sapien
ggtcaaggcctgtgaacctgaatga

SEQ ID NO: 1941091 - DNA, 25 bp, Homo sapien
cctgcattcaagtgagggtcaaggc

SEQ ID NO: 1941092 - DNA, 25 bp, Homo sapien
tcctgttttaggctgagctgcttca

SEQ ID NO: 1941093 - DNA, 25 bp, Homo sapien
ccagctcctgttttaggctgagctg

SEQ ID NO: 1941094 - DNA, 25 bp, Homo sapien
ggtccacgacctgaaaactagaaca

SEQ ID NO: 1941095 - DNA, 25 bp, Homo sapien
caaattagaacgaaactggctcctc

SEQ ID NO: 1941096 - DNA, 25 bp, Homo sapien
ttaaactagaacaacagcgctcctc

SEQ ID NO: 1941097 - DNA, 25 bp, Homo sapien
tcaaagaagatcaacaccggctcct

SEQ ID NO: 1941098 - DNA, 25 bp, Homo sapien
tggcgcccgtgatccacttggtcct

SEQ ID NO: 1941099 - DNA, 25 bp, Homo sapien
ttcgggctccaacagagcggctccc

SEQ ID NO: 1941100 - DNA, 25 bp, Homo sapien
cgtcgcctgcagtacagggtccctg

SEQ ID NO: 1941101 - DNA, 25 bp, Homo sapien
cctgcttgctttgagggtgctggtg

SEQ ID NO: 1941102 - DNA, 25 bp, Homo sapien
tgttaggttcccctccaatggtgag

SEQ ID NO: 1941103 - DNA, 25 bp, Homo sapien
ctgttaggttcccctccaatggtga

SEQ ID NO: 1941104 - DNA, 25 bp, Homo sapien
gttaggttcccctccaatggtgaga

SEQ ID NO: 1941105 - DNA, 25 bp, Homo sapien
gctgttaggttcccctccaatggtg

SEQ ID NO: 1941106 - DNA, 25 bp, Homo sapien
ctgatgtggacggtggaaaaggagg

SEQ ID NO: 1941107 - DNA, 25 bp, Homo sapien
ggagaaggctgacagcaaggatttc

SEQ ID NO: 1941108 - DNA, 25 bp, Homo sapien
aggaagagctgatgtggacggtgga

SEQ ID NO: 1941109 - DNA, 25 bp, Homo sapien
aagagctgatgtggacggtggaaaa

SEQ ID NO: 1941110 - DNA, 25 bp, Homo sapien
tctgggttagcgttcatagtgcaaa

SEQ ID NO: 1941111 - DNA, 25 bp, Homo sapien
agttctctcgttccactcagttaac

SEQ ID NO: 1941112 - DNA, 25 bp, Homo sapien
ccattttttggagggctctatgtca

SEQ ID NO: 1941113 - DNA, 25 bp, Homo sapien
gactagagtttagtttttgatctgg

SEQ ID NO: 1941114 - DNA, 25 bp, Homo sapien
tagtttccccattctacacgctgtc

SEQ ID NO: 1941115 - DNA, 25 bp, Homo sapien
tgtctagtaatctccagtgcctctg

SEQ ID NO: 1941116 - DNA, 25 bp, Homo sapien
tattacctgcgcaacataggaagac

SEQ ID NO: 1941117 - DNA, 25 bp, Homo sapien
cactcaaacagtaagcatggtaccc

SEQ ID NO: 1941118 - DNA, 25 bp, Homo sapien
tcatgagcgaaggtaatgagtggcc

SEQ ID NO: 1941119 - DNA, 25 bp, Homo sapien
gaccaggctaacagaggcttcttga

SEQ ID NO: 1941120 - DNA, 25 bp, Homo sapien
aaaatggctgctgggatcatgagcg

SEQ ID NO: 1941121 - DNA, 25 bp, Homo sapien
ctgagatgttgagccgacaatgtcc

SEQ ID NO: 1941122 - DNA, 25 bp, Homo sapien
agctgccctagctgagtccactctg

SEQ ID NO: 1941123 - DNA, 25 bp, Homo sapien
ctctagcagcagctcagctgcccta

SEQ ID NO: 1941124 - DNA, 25 bp, Homo sapien
agcagctcagctgccctagctgagt

SEQ ID NO: 1941125 - DNA, 25 bp, Homo sapien
gcagggccatcagctggctcaggat

SEQ ID NO: 1941126 - DNA, 25 bp, Homo sapien
ttgggttgagctaagcctggggcca

SEQ ID NO: 1941127 - DNA, 25 bp, Homo sapien
tggctttgggttgagctaagcctgg

SEQ ID NO: 1941128 - DNA, 25 bp, Homo sapien
ggctttgggttgagctaagcctggg

SEQ ID NO: 1941129 - DNA, 25 bp, Homo sapien
gttgagctaagcctggggccatggt

SEQ ID NO: 1941130 - DNA, 25 bp, Homo sapien
gcagaggatttgtctcccctgctgt

SEQ ID NO: 1941131 - DNA, 25 bp, Homo sapien
aaggcagaggatttgtctcccctgc

SEQ ID NO: 1941132 - DNA, 25 bp, Homo sapien
gaaggcagaggatttgtctcccctg

SEQ ID NO: 1941133 - DNA, 25 bp, Homo sapien
ggcagaggatttgtctcccctgctg

SEQ ID NO: 1941134 - DNA, 25 bp, Homo sapien
cctgtgcatcaggaagtccctaagc

SEQ ID NO: 1941135 - DNA, 25 bp, Homo sapien
cacggatgtatccatcggcttcaca

SEQ ID NO: 1941136 - DNA, 25 bp, Homo sapien
gaagaaggtggtcagtccgctatcc

SEQ ID NO: 1941137 - DNA, 25 bp, Homo sapien
ggaacttccgtccatcgaagctgaa

SEQ ID NO: 1941138 - DNA, 25 bp, Homo sapien
agctgctcttctaggtgacccatag

SEQ ID NO: 1941139 - DNA, 25 bp, Homo sapien
actgggtgtgaaatcctccagctca

SEQ ID NO: 1941140 - DNA, 25 bp, Homo sapien
ccactgttgcccatgtctgggcaaa

SEQ ID NO: 1941141 - DNA, 25 bp, Homo sapien
gaagttataccagagagagtgagcg

SEQ ID NO: 1941142 - DNA, 25 bp, Homo sapien
tctcttcctggacggtggtctctgc

SEQ ID NO: 1941143 - DNA, 25 bp, Homo sapien
tggaggaaccatgggtcgctaacat

SEQ ID NO: 1941144 - DNA, 25 bp, Homo sapien
ttctcttcctggacggtggtctctg

SEQ ID NO: 1941145 - DNA, 25 bp, Homo sapien
cctgtggaggaaccatgggtcgcta

SEQ ID NO: 1941146 - DNA, 25 bp, Homo sapien
tacaggaagaaggacttagatggca

SEQ ID NO: 1941147 - DNA, 25 bp, Homo sapien
aggtggcaggcccactacaggaaga

SEQ ID NO: 1941148 - DNA, 25 bp, Homo sapien
gaaggacttagatggcaggatctgc

SEQ ID NO: 1941149 - DNA, 25 bp, Homo sapien
ggcccactacaggaagaaggactta

SEQ ID NO: 1941150 - DNA, 25 bp, Homo sapien
attaggaagataggccccacagtga

SEQ ID NO: 1941151 - DNA, 25 bp, Homo sapien
cattaggaagataggccccacagtg

SEQ ID NO: 1941152 - DNA, 25 bp, Homo sapien
tcattaggaagataggccccacagt

SEQ ID NO: 1941153 - DNA, 25 bp, Homo sapien
gccttctttgacccccctcctgctc

SEQ ID NO: 1941154 - DNA, 25 bp, Homo sapien
ctgcagctttttggcccctccaccc

SEQ ID NO: 1941155 - DNA, 25 bp, Homo sapien
tcgccttctttgacccccctcctgc

SEQ ID NO: 1941156 - DNA, 25 bp, Homo sapien
cgccttctttgacccccctcctgct

SEQ ID NO: 1941157 - DNA, 25 bp, Homo sapien
ccgtcccggaccagtcgaatagcag

SEQ ID NO: 1941158 - DNA, 25 bp, Homo sapien
ccagtcgaatagcaggtacggaaga

SEQ ID NO: 1941159 - DNA, 25 bp, Homo sapien
tcgcgaggcgcggaaggatcgcggg

SEQ ID NO: 1941160 - DNA, 25 bp, Homo sapien
atagcaggtacggaagaatcgcgag

SEQ ID NO: 1941161 - DNA, 25 bp, Homo sapien
gtagaccaggagcgcccgggacaca

SEQ ID NO: 1941162 - DNA, 25 bp, Homo sapien
gaccaggagcgcccgggacacaagg

SEQ ID NO: 1941163 - DNA, 25 bp, Homo sapien
tagaccaggagcgcccgggacacaa

SEQ ID NO: 1941164 - DNA, 25 bp, Homo sapien
tgtagaccaggagcgcccgggacac

SEQ ID NO: 1941165 - DNA, 25 bp, Homo sapien
ccgagggagggtctacgcatgcgtg

SEQ ID NO: 1941166 - DNA, 25 bp, Homo sapien
gaagccgagggagggtctacgcatg

SEQ ID NO: 1941167 - DNA, 25 bp, Homo sapien
aaatgatcaattgtgtttccatgga

SEQ ID NO: 1941168 - DNA, 25 bp, Homo sapien
gagggagggtctacgcatgcgtggg

SEQ ID NO: 1941169 - DNA, 25 bp, Homo sapien
tcctcaaagcggcaacccgagtgta

SEQ ID NO: 1941170 - DNA, 25 bp, Homo sapien
catctgtggccagctacacgcaaat

SEQ ID NO: 1941171 - DNA, 25 bp, Homo sapien
tgtatcctcgtctcagtcaccatgg

SEQ ID NO: 1941172 - DNA, 25 bp, Homo sapien
caaatccatggctgcacgcgcatct

SEQ ID NO: 1941173 - DNA, 25 bp, Homo sapien
cctgtttctgcttcaggacagagtc

SEQ ID NO: 1941174 - DNA, 25 bp, Homo sapien
ggacacaggagcctagaagattctg

SEQ ID NO: 1941175 - DNA, 25 bp, Homo sapien
cttcaggacagagtcatgggagggc

SEQ ID NO: 1941176 - DNA, 25 bp, Homo sapien
gattctggcctgatgcactagagcc

SEQ ID NO: 1941177 - DNA, 25 bp, Homo sapien
gagagctggatctctgagcccaggc

SEQ ID NO: 1941178 - DNA, 25 bp, Homo sapien
gccatggcctcttcatggccctggg

SEQ ID NO: 1941179 - DNA, 25 bp, Homo sapien
ctgaggagagctggatctctgagcc

SEQ ID NO: 1941180 - DNA, 25 bp, Homo sapien
gaggagagctggatctctgagccca

SEQ ID NO: 1941181 - DNA, 25 bp, Homo sapien
tgctggcgcgaagttgggtgtttgc

SEQ ID NO: 1941182 - DNA, 25 bp, Homo sapien
ggcacaggtgctggcgcgaagttgg

SEQ ID NO: 1941183 - DNA, 25 bp, Homo sapien
aggtgctggcgcgaagttgggtgtt

SEQ ID NO: 1941184 - DNA, 25 bp, Homo sapien
tggcgcgaagttgggtgtttgcctc

SEQ ID NO: 1941185 - DNA, 25 bp, Homo sapien
gccaaaccctgagtcctttctaaga

SEQ ID NO: 1941186 - DNA, 25 bp, Homo sapien
gcgtgcagcctgatttaaagccaaa

SEQ ID NO: 1941187 - DNA, 25 bp, Homo sapien
taatgcgacattgctagctagagcc

SEQ ID NO: 1941188 - DNA, 25 bp, Homo sapien
tggaagttcctgaaggttgccctgg

SEQ ID NO: 1941189 - DNA, 25 bp, Homo sapien
agctgtaattctcggttattcttag

SEQ ID NO: 1941190 - DNA, 25 bp, Homo sapien
tttcctagctgtaattctcggttat

SEQ ID NO: 1941191 - DNA, 25 bp, Homo sapien
tctcggttattcttagctacacttc

SEQ ID NO: 1941192 - DNA, 25 bp, Homo sapien
gtaattctcggttattcttagctac

SEQ ID NO: 1941193 - DNA, 25 bp, Homo sapien
gtgtttctctcgctattgaggtaac

SEQ ID NO: 1941194 - DNA, 25 bp, Homo sapien
tgtcctcctcggttctcttgtcgta

SEQ ID NO: 1941195 - DNA, 25 bp, Homo sapien
gctattgaggtaacttcctctaaac

SEQ ID NO: 1941196 - DNA, 25 bp, Homo sapien
tgtcgtatctcctgtgtttctctcg

SEQ ID NO: 1941197 - DNA, 25 bp, Homo sapien
aaacctgaatatctcccctgctggg

SEQ ID NO: 1941198 - DNA, 25 bp, Homo sapien
ctctggttgtaaaggagtctgggaa

SEQ ID NO: 1941199 - DNA, 25 bp, Homo sapien
tagagtgactgaatctgcaccacat

SEQ ID NO: 1941200 - DNA, 25 bp, Homo sapien
tgcaccacatcctgactctggttgt

SEQ ID NO: 1941201 - DNA, 25 bp, Homo sapien
aactcttgtcgttctaacttatctc

SEQ ID NO: 1941202 - DNA, 25 bp, Homo sapien
aaactcttgtcgttctaacttatct

SEQ ID NO: 1941203 - DNA, 25 bp, Homo sapien
gctaaaatcaagacgtacaccagag

SEQ ID NO: 1941204 - DNA, 25 bp, Homo sapien
aaatcaagacgtacaccagagggcg

SEQ ID NO: 1941205 - DNA, 25 bp, Homo sapien
ggctgctaaaatcaagacgtacacc

SEQ ID NO: 1941206 - DNA, 25 bp, Homo sapien
gccagtgacttcggctgctaaaatc

SEQ ID NO: 1941207 - DNA, 25 bp, Homo sapien
ttcattgcatctggtgaccggaaat

SEQ ID NO: 1941208 - DNA, 25 bp, Homo sapien
tcattgcatctggtgaccggaaatg

SEQ ID NO: 1941209 - DNA, 25 bp, Homo sapien
ccatagcgtggggagcaccagacac

SEQ ID NO: 1941210 - DNA, 25 bp, Homo sapien
ccagggataaaagcgtccacatatg

SEQ ID NO: 1941211 - DNA, 25 bp, Homo sapien
tgagggagattggtgccatagcgtg

SEQ ID NO: 1941212 - DNA, 25 bp, Homo sapien
acaccagggataaaagcgtccacat

SEQ ID NO: 1941213 - DNA, 25 bp, Homo sapien
gatgttcctgtgatcaccctggctg

SEQ ID NO: 1941214 - DNA, 25 bp, Homo sapien
catgtgaagcacagcgctcccttaa

SEQ ID NO: 1941215 - DNA, 25 bp, Homo sapien
gatggcctgagcatgagcactggat

SEQ ID NO: 1941216 - DNA, 25 bp, Homo sapien
agcactggatgctgttcccgggacg

SEQ ID NO: 1941217 - DNA, 25 bp, Homo sapien
cttctgcggttggccagcgtggatc

SEQ ID NO: 1941218 - DNA, 25 bp, Homo sapien
cgggcttctgcggttggccagcgtg

SEQ ID NO: 1941219 - DNA, 25 bp, Homo sapien
cgtggatctccagccctcccgtcat

SEQ ID NO: 1941220 - DNA, 25 bp, Homo sapien
cagcgtggatctccagccctcccgt

SEQ ID NO: 1941221 - DNA, 25 bp, Homo sapien
ccaatgagcagtgatggctttggag

SEQ ID NO: 1941222 - DNA, 25 bp, Homo sapien
ggctttggaggaagcagtcgaatcc

SEQ ID NO: 1941223 - DNA, 25 bp, Homo sapien
cagcccaccactccaatgagcagtg

SEQ ID NO: 1941224 - DNA, 25 bp, Homo sapien
tttggaggaagcagtcgaatcctcc

SEQ ID NO: 1941225 - DNA, 25 bp, Homo sapien
caccgggaacaccaatcttagccat

SEQ ID NO: 1941226 - DNA, 25 bp, Homo sapien
gctgggcaccgggaacaccaatctt

SEQ ID NO: 1941227 - DNA, 25 bp, Homo sapien
ctgggctgggcaccgggaacaccaa

SEQ ID NO: 1941228 - DNA, 25 bp, Homo sapien
gggcaccgggaacaccaatcttagc

SEQ ID NO: 1941229 - DNA, 25 bp, Homo sapien
tctacagaaggatgaacgatggctc

SEQ ID NO: 1941230 - DNA, 25 bp, Homo sapien
ccataagtgcgagggaactgcctgg

SEQ ID NO: 1941231 - DNA, 25 bp, Homo sapien
tgagaaggctatgagtgccagagac

SEQ ID NO: 1941232 - DNA, 25 bp, Homo sapien
tagtatttggaagcagaacggcccc

SEQ ID NO: 1941233 - DNA, 25 bp, Homo sapien
tccaaagtggtgaataaggccgggc

SEQ ID NO: 1941234 - DNA, 25 bp, Homo sapien
gctggaggatccaaagtggtgaata

SEQ ID NO: 1941235 - DNA, 25 bp, Homo sapien
acttttcctttgtagcctccccatg

SEQ ID NO: 1941236 - DNA, 25 bp, Homo sapien
aaataacagatagaggaggctggag

SEQ ID NO: 1941237 - DNA, 25 bp, Homo sapien
caagaatggagtattccagggcaca

SEQ ID NO: 1941238 - DNA, 25 bp, Homo sapien
gaatttttagacatcggcttcagtc

SEQ ID NO: 1941239 - DNA, 25 bp, Homo sapien
ttttggtcagcaagagcgggaatga

SEQ ID NO: 1941240 - DNA, 25 bp, Homo sapien
tgaacactctctgtaggattcccag

SEQ ID NO: 1941241 - DNA, 25 bp, Homo sapien
tgagaccctgcctatccacgtggca

SEQ ID NO: 1941242 - DNA, 25 bp, Homo sapien
acatcttaacagtggctccatgcac

SEQ ID NO: 1941243 - DNA, 25 bp, Homo sapien
catgcacctgtgaaacccagtaggg

SEQ ID NO: 1941244 - DNA, 25 bp, Homo sapien
cgtggcaatcagagggaccgccaca

SEQ ID NO: 1941245 - DNA, 25 bp, Homo sapien
tgtgagttggcggaagtccccttgc

SEQ ID NO: 1941246 - DNA, 25 bp, Homo sapien
tctctaacatgggtgaagcatctcg

SEQ ID NO: 1941247 - DNA, 25 bp, Homo sapien
tcgtatctggttgccatcggctcca

SEQ ID NO: 1941248 - DNA, 25 bp, Homo sapien
tgaggccccttcgactgggatccat

SEQ ID NO: 1941249 - DNA, 25 bp, Homo sapien
gggacttgcacacggtgggcccttc

SEQ ID NO: 1941250 - DNA, 25 bp, Homo sapien
cctgctgagttgtgaagatcggatt

SEQ ID NO: 1941251 - DNA, 25 bp, Homo sapien
ggaggctgtggagggccagaattca

SEQ ID NO: 1941252 - DNA, 25 bp, Homo sapien
gattgggtgagtgagagcctgctga

SEQ ID NO: 1941253 - DNA, 25 bp, Homo sapien
gctgcagaccgcttggctgatcctc

SEQ ID NO: 1941254 - DNA, 25 bp, Homo sapien
ctgcattccagcattggcagctgca

SEQ ID NO: 1941255 - DNA, 25 bp, Homo sapien
ttggctcaggccaggaatcaaccct

SEQ ID NO: 1941256 - DNA, 25 bp, Homo sapien
gagggacacagttcaccccttcaca

SEQ ID NO: 1941257 - DNA, 25 bp, Homo sapien
ccatttcaagtggtgagtgaaatct

SEQ ID NO: 1941258 - DNA, 25 bp, Homo sapien
gcgcagtgatgcaagagtgtgtttc

SEQ ID NO: 1941259 - DNA, 25 bp, Homo sapien
gtgagtgaaatctgcgcagtgatgc

SEQ ID NO: 1941260 - DNA, 25 bp, Homo sapien
ctgcgcagtgatgcaagagtgtgtt

SEQ ID NO: 1941261 - DNA, 25 bp, Homo sapien
cttcctcgtggagatcgcacacaag

SEQ ID NO: 1941262 - DNA, 25 bp, Homo sapien
tgacttcctcgtggagatcgcacac

SEQ ID NO: 1941263 - DNA, 25 bp, Homo sapien
cctcgtggagatcgcacacaagcat

SEQ ID NO: 1941264 - DNA, 25 bp, Homo sapien
gacttcctcgtggagatcgcacaca

SEQ ID NO: 1941265 - DNA, 25 bp, Homo sapien
catttattggggcttgttgatagga

SEQ ID NO: 1941266 - DNA, 25 bp, Homo sapien
gcttgttgataggagcaataatgaa

SEQ ID NO: 1941267 - DNA, 25 bp, Homo sapien
gataggagcaataatgaatttgctg

SEQ ID NO: 1941268 - DNA, 25 bp, Homo sapien
ttattggggcttgttgataggagca

SEQ ID NO: 1941269 - DNA, 25 bp, Homo sapien
aattctatttgccagtcaaggtgac

SEQ ID NO: 1941270 - DNA, 25 bp, Homo sapien
tagaggagatgatatggacttcact

SEQ ID NO: 1941271 - DNA, 25 bp, Homo sapien
tacgtactgggtggagcaaatggat

SEQ ID NO: 1941272 - DNA, 25 bp, Homo sapien
tcaaacctggaatgaagtgtgtgtg

SEQ ID NO: 1941273 - DNA, 25 bp, Homo sapien
tctgtgagtcaagatgcttaaaacc

SEQ ID NO: 1941274 - DNA, 25 bp, Homo sapien
tggaaagagactatttcctggattt

SEQ ID NO: 1941275 - DNA, 25 bp, Homo sapien
gtgagtcaagatgcttaaaacccat

SEQ ID NO: 1941276 - DNA, 25 bp, Homo sapien
gtggaaagagactatttcctggatt

SEQ ID NO: 1941277 - DNA, 25 bp, Homo sapien
ttttaagcataaaggaaaaagcatc

SEQ ID NO: 1941278 - DNA, 25 bp, Homo sapien
tgtgtgttcggggtttacagtgacc

SEQ ID NO: 1941279 - DNA, 25 bp, Homo sapien
tcaaggtaattcatctcccttgtcc

SEQ ID NO: 1941280 - DNA, 25 bp, Homo sapien
tggtgcagagactggtcatcggtct

SEQ ID NO: 1941281 - DNA, 25 bp, Homo sapien
tcatcggtctctaggggcaatcaag

SEQ ID NO: 1941282 - DNA, 25 bp, Homo sapien
tgaggcttgacatgtccctgtgaag

SEQ ID NO: 1941283 - DNA, 25 bp, Homo sapien
cctatttcaatctccgcagatcctt

SEQ ID NO: 1941284 - DNA, 25 bp, Homo sapien
tccttccccttcacattgtgaggct

SEQ ID NO: 1941285 - DNA, 25 bp, Homo sapien
ccttcacattgtgaggcttgacatg

SEQ ID NO: 1941286 - DNA, 25 bp, Homo sapien
tccttccggagtctacacatcggcg

SEQ ID NO: 1941287 - DNA, 25 bp, Homo sapien
cgtttcctgcgctccgggattgcgg

SEQ ID NO: 1941288 - DNA, 25 bp, Homo sapien
tctccgagactagaggccacggaca

SEQ ID NO: 1941289 - DNA, 25 bp, Homo sapien
cgtgtctaggcgcacacatttcccg

SEQ ID NO: 1941290 - DNA, 25 bp, Homo sapien
gcgcagtaattttcccgggctccag

SEQ ID NO: 1941291 - DNA, 25 bp, Homo sapien
agctctacggctgcgaggtacctgg

SEQ ID NO: 1941292 - DNA, 25 bp, Homo sapien
tacgatcgtaaggagcttcggaagc

SEQ ID NO: 1941293 - DNA, 25 bp, Homo sapien
gcggcttctttaaggctgcggtccc

SEQ ID NO: 1941294 - DNA, 25 bp, Homo sapien
cattgacttacttgctccaaacagg

SEQ ID NO: 1941295 - DNA, 25 bp, Homo sapien
catggcgagggcaaaagtcaatctg

SEQ ID NO: 1941296 - DNA, 25 bp, Homo sapien
gaactgaaaggtggtaatggtagcc

SEQ ID NO: 1941297 - DNA, 25 bp, Homo sapien
catttaaaagttcatagcgggacac

SEQ ID NO: 1941298 - DNA, 25 bp, Homo sapien
gaggatggtaccactacccacagga

SEQ ID NO: 1941299 - DNA, 25 bp, Homo sapien
cactttggatagaacacatggcact

SEQ ID NO: 1941300 - DNA, 25 bp, Homo sapien
tggcactttggatagaacacgtaac

SEQ ID NO: 1941301 - DNA, 25 bp, Homo sapien
gacttctccggtatcatcagccatt

SEQ ID NO: 1941302 - DNA, 25 bp, Homo sapien
gctgtatacatgctgctcggagagg

SEQ ID NO: 1941303 - DNA, 25 bp, Homo sapien
gaatgaagtctgagctcactacagc

SEQ ID NO: 1941304 - DNA, 25 bp, Homo sapien
gatctctccctgaatgaagtctgag

SEQ ID NO: 1941305 - DNA, 25 bp, Homo sapien
ttgtaactttccaacttggtcttgc

SEQ ID NO: 1941306 - DNA, 25 bp, Homo sapien
ggagtggcttcaaacaggacaatcc

SEQ ID NO: 1941307 - DNA, 25 bp, Homo sapien
caggtgtctgggtttgcagagggcc

SEQ ID NO: 1941308 - DNA, 25 bp, Homo sapien
agggcagtgtcctgccgtggctgca

SEQ ID NO: 1941309 - DNA, 25 bp, Homo sapien
gtgaggcccaggtaagggcagtgtc

SEQ ID NO: 1941310 - DNA, 25 bp, Homo sapien
tgccttccccataccagaaatccta

SEQ ID NO: 1941311 - DNA, 25 bp, Homo sapien
tgtgtcctaactccacgtcctgttt

SEQ ID NO: 1941312 - DNA, 25 bp, Homo sapien
taactccacgtcctgtttgctgcct

SEQ ID NO: 1941313 - DNA, 25 bp, Homo sapien
tcctaatatccacggctcagcctgg

SEQ ID NO: 1941314 - DNA, 25 bp, Homo sapien
ccggtagggttcaacatacacatat

SEQ ID NO: 1941315 - DNA, 25 bp, Homo sapien
gtctctctctccccggtagggttca

SEQ ID NO: 1941316 - DNA, 25 bp, Homo sapien
cccggtagggttcaacatacacata

SEQ ID NO: 1941317 - DNA, 25 bp, Homo sapien
tctctccccggtagggttcaacata

SEQ ID NO: 1941318 - DNA, 25 bp, Homo sapien
ctgtgggtgcaaatacatgagcagc

SEQ ID NO: 1941319 - DNA, 25 bp, Homo sapien
tgtgggtgcaaatacatgagcagct

SEQ ID NO: 1941320 - DNA, 25 bp, Homo sapien
gggtgcaaatacatgagcagctctg

SEQ ID NO: 1941321 - DNA, 25 bp, Homo sapien
tgggtgcaaatacatgagcagctct

SEQ ID NO: 1941322 - DNA, 25 bp, Homo sapien
agtgactgtcccaacaagaggccgg

SEQ ID NO: 1941323 - DNA, 25 bp, Homo sapien
ggactgcagcagaaccccagtgact

SEQ ID NO: 1941324 - DNA, 25 bp, Homo sapien
tgactgtcccaacaagaggccggga

SEQ ID NO: 1941325 - DNA, 25 bp, Homo sapien
gggccgctttctctgagccagtccg

SEQ ID NO: 1941326 - DNA, 25 bp, Homo sapien
acagtgtttgctagaggccaaggtg

SEQ ID NO: 1941327 - DNA, 25 bp, Homo sapien
tcagagagggagaagccaaccaaca

SEQ ID NO: 1941328 - DNA, 25 bp, Homo sapien
agagggagaagccaaccaacagtgt

SEQ ID NO: 1941329 - DNA, 25 bp, Homo sapien
aaccaacagtgtttgctagaggcca

SEQ ID NO: 1941330 - DNA, 25 bp, Homo sapien
aggcgggggatgacctgaagctggg

SEQ ID NO: 1941331 - DNA, 25 bp, Homo sapien
ccagtaggtggctgactcaaagact

SEQ ID NO: 1941332 - DNA, 25 bp, Homo sapien
gaccagtaggtggctgactcaaaga

SEQ ID NO: 1941333 - DNA, 25 bp, Homo sapien
gcgggggatgacctgaagctgggga

SEQ ID NO: 1941334 - DNA, 25 bp, Homo sapien
tgttgtaattaacctttgttcactc

SEQ ID NO: 1941335 - DNA, 25 bp, Homo sapien
gatgttgtaattaacctttgttcac

SEQ ID NO: 1941336 - DNA, 25 bp, Homo sapien
ttgtaattaacctttgttcactcac

SEQ ID NO: 1941337 - DNA, 25 bp, Homo sapien
ggatgttgtaattaacctttgttca

SEQ ID NO: 1941338 - DNA, 25 bp, Homo sapien
acagcactgagatcaatccgtgagg

SEQ ID NO: 1941339 - DNA, 25 bp, Homo sapien
gatcaatccgtgagggtctgtgtac

SEQ ID NO: 1941340 - DNA, 25 bp, Homo sapien
ggtctgtgtactcccttctcctcga

SEQ ID NO: 1941341 - DNA, 25 bp, Homo sapien
tctcctcgaaagcaccaggtgaagg

SEQ ID NO: 1941342 - DNA, 25 bp, Homo sapien
tttgaagaggaatcggatgtgccca

SEQ ID NO: 1941343 - DNA, 25 bp, Homo sapien
caacttagcacccactgaggtcctg

SEQ ID NO: 1941344 - DNA, 25 bp, Homo sapien
ttcaggcatcaggagtacacgattc

SEQ ID NO: 1941345 - DNA, 25 bp, Homo sapien
tgaggtcctgtcaccatttgttgag

SEQ ID NO: 1941346 - DNA, 25 bp, Homo sapien
tttaggagaaagatgatcactctct

SEQ ID NO: 1941347 - DNA, 25 bp, Homo sapien
taacagtaaatatgatcatggttcc

SEQ ID NO: 1941348 - DNA, 25 bp, Homo sapien
tgtgcccggccataacgcttgtctt

SEQ ID NO: 1941349 - DNA, 25 bp, Homo sapien
gaactctccagtgtgtttgtcaaac

SEQ ID NO: 1941350 - DNA, 25 bp, Homo sapien
caaattccctatgtgagggttgacg

SEQ ID NO: 1941351 - DNA, 25 bp, Homo sapien
tctgaatctgttatgtgtggaaggg

SEQ ID NO: 1941352 - DNA, 25 bp, Homo sapien
gacggtctgactttaggctttctgg

SEQ ID NO: 1941353 - DNA, 25 bp, Homo sapien
gaaggcaggagactttaccatttag

SEQ ID NO: 1941354 - DNA, 25 bp, Homo sapien
aaaagttgtcacgtttagaacaatg

SEQ ID NO: 1941355 - DNA, 25 bp, Homo sapien
gattggtgagttgaaaagacacctt

SEQ ID NO: 1941356 - DNA, 25 bp, Homo sapien
aaaagacggcaatcttgggctggga

SEQ ID NO: 1941357 - DNA, 25 bp, Homo sapien
ctgggatgaggaacagagcttgaat

SEQ ID NO: 1941358 - DNA, 25 bp, Homo sapien
aagtgtcgggtagctgcttcacagg

SEQ ID NO: 1941359 - DNA, 25 bp, Homo sapien
gcttcacaggaaactcaccatggag

SEQ ID NO: 1941360 - DNA, 25 bp, Homo sapien
gcagatggctcctgtgaatgtgcac

SEQ ID NO: 1941361 - DNA, 25 bp, Homo sapien
catctaaactttgggcatctggaaa

SEQ ID NO: 1941362 - DNA, 25 bp, Homo sapien
aaggaagtaactgatcaggggcaca

SEQ ID NO: 1941363 - DNA, 25 bp, Homo sapien
agtaactgatcaggggcacaaagag

SEQ ID NO: 1941364 - DNA, 25 bp, Homo sapien
ggaagtaactgatcaggggcacaaa

SEQ ID NO: 1941365 - DNA, 25 bp, Homo sapien
gaagtaactgatcaggggcacaaag

SEQ ID NO: 1941366 - DNA, 25 bp, Homo sapien
gtggatcccagcctttggaatcctc

SEQ ID NO: 1941367 - DNA, 25 bp, Homo sapien
cccaccctctgcgtagggaatggat

SEQ ID NO: 1941368 - DNA, 25 bp, Homo sapien
caccctctgcgtagggaatggatgg

SEQ ID NO: 1941369 - DNA, 25 bp, Homo sapien
cctctgcgtagggaatggatgggtc

SEQ ID NO: 1941370 - DNA, 25 bp, Homo sapien
cccccaccctctgcgtagggaatgg

SEQ ID NO: 1941371 - DNA, 25 bp, Homo sapien
ggctgtggtgataattacaaaatgt

SEQ ID NO: 1941372 - DNA, 25 bp, Homo sapien
gaaggctaccagatagttggctgtg

SEQ ID NO: 1941373 - DNA, 25 bp, Homo sapien
gctggtactggctagagcaggtggg

SEQ ID NO: 1941374 - DNA, 25 bp, Homo sapien
gactagggaaggctaccagatagtt

SEQ ID NO: 1941375 - DNA, 25 bp, Homo sapien
ttccagtgctcgaaggggcatgtct

SEQ ID NO: 1941376 - DNA, 25 bp, Homo sapien
caagtctggctagcttccagtgctc

SEQ ID NO: 1941377 - DNA, 25 bp, Homo sapien
gcttccagtgctcgaaggggcatgt

SEQ ID NO: 1941378 - DNA, 25 bp, Homo sapien
aagtctggctagcttccagtgctcg

SEQ ID NO: 1941379 - DNA, 25 bp, Homo sapien
gatcccaaaatagtgcccaggactg

SEQ ID NO: 1941380 - DNA, 25 bp, Homo sapien
tcagatcccaaaatagtgcccagga

SEQ ID NO: 1941381 - DNA, 25 bp, Homo sapien
gactgagatgagaggtaggggccca

SEQ ID NO: 1941382 - DNA, 25 bp, Homo sapien
tcccaaaatagtgcccaggactgag

SEQ ID NO: 1941383 - DNA, 25 bp, Homo sapien
ttcacctgcagtgtgacagcggcca

SEQ ID NO: 1941384 - DNA, 25 bp, Homo sapien
ttcattgttttccgtgagagggtaa

SEQ ID NO: 1941385 - DNA, 25 bp, Homo sapien
tttcattgttttccgtgagagggta

SEQ ID NO: 1941386 - DNA, 25 bp, Homo sapien
tcattgttttccgtgagagggtaaa

SEQ ID NO: 1941387 - DNA, 25 bp, Homo sapien
tccttcttgcatcattatacgatcc

SEQ ID NO: 1941388 - DNA, 25 bp, Homo sapien
aatttgtccacctgctgttctgtcc

SEQ ID NO: 1941389 - DNA, 25 bp, Homo sapien
tacgatccatagtcctcaggacaca

SEQ ID NO: 1941390 - DNA, 25 bp, Homo sapien
ccagcctcatcacaagcagtacatg

SEQ ID NO: 1941391 - DNA, 25 bp, Homo sapien
cagaccagtgggagtaaaccgagtg

SEQ ID NO: 1941392 - DNA, 25 bp, Homo sapien
tagcttctgtgcctgggtagtatca

SEQ ID NO: 1941393 - DNA, 25 bp, Homo sapien
tgtgttttcaagaggccactaggca

SEQ ID NO: 1941394 - DNA, 25 bp, Homo sapien
ttaactggaggtcccagcacatgtg

SEQ ID NO: 1941395 - DNA, 25 bp, Homo sapien
gatttctaggcatgtaatcctggcc

SEQ ID NO: 1941396 - DNA, 25 bp, Homo sapien
taggcatgtaatcctggccctctcc

SEQ ID NO: 1941397 - DNA, 25 bp, Homo sapien
tcctcaggcatcttcagatcaggtg

SEQ ID NO: 1941398 - DNA, 25 bp, Homo sapien
gcatcttcagatcaggtggtgaaag

SEQ ID NO: 1941399 - DNA, 25 bp, Homo sapien
tagaatagtctgacgactccacccc

SEQ ID NO: 1941400 - DNA, 25 bp, Homo sapien
cttcagcaagaagtttgggcctctt

SEQ ID NO: 1941401 - DNA, 25 bp, Homo sapien
tgatccccgtgagtgcttcagcaag

SEQ ID NO: 1941402 - DNA, 25 bp, Homo sapien
tgcttgaaacccgaaccctctgcat

SEQ ID NO: 1941403 - DNA, 25 bp, Homo sapien
tcctcgttgttggtaacgtgaagcg

SEQ ID NO: 1941404 - DNA, 25 bp, Homo sapien
gatttcatgcctggaagtggttgtt

SEQ ID NO: 1941405 - DNA, 25 bp, Homo sapien
ggtctctttcaataggacttgaatc

SEQ ID NO: 1941406 - DNA, 25 bp, Homo sapien
caaatgcatagggtcggaagtttcc

SEQ ID NO: 1941407 - DNA, 25 bp, Homo sapien
tctgtgtgaacaggatgccgtatgc

SEQ ID NO: 1941408 - DNA, 25 bp, Homo sapien
gcacaaggtgaagcatgcacaggat

SEQ ID NO: 1941409 - DNA, 25 bp, Homo sapien
ggatgccacacgcacaagatgctgc

SEQ ID NO: 1941410 - DNA, 25 bp, Homo sapien
tgccgtatgcataggatgccacact

SEQ ID NO: 1941411 - DNA, 25 bp, Homo sapien
ctccacactccttcgtccttttagg

SEQ ID NO: 1941412 - DNA, 25 bp, Homo sapien
tcctccacactccttcgtcctttta

SEQ ID NO: 1941413 - DNA, 25 bp, Homo sapien
cctccacactccttcgtccttttag

SEQ ID NO: 1941414 - DNA, 25 bp, Homo sapien
tgtccttgttattgctgacagtcag

SEQ ID NO: 1941415 - DNA, 25 bp, Homo sapien
gtccttgttattgctgacagtcaga

SEQ ID NO: 1941416 - DNA, 25 bp, Homo sapien
ttgtccttgttattgctgacagtca

SEQ ID NO: 1941417 - DNA, 25 bp, Homo sapien
tcagccgcctggggacaaaaagcac

SEQ ID NO: 1941418 - DNA, 25 bp, Homo sapien
cttcagccgcctggggacaaaaagc

SEQ ID NO: 1941419 - DNA, 25 bp, Homo sapien
ttcagccgcctggggacaaaaagca

SEQ ID NO: 1941420 - DNA, 25 bp, Homo sapien
gcatccatcaggctcgtactggttg

SEQ ID NO: 1941421 - DNA, 25 bp, Homo sapien
agagagaagccattgagcagtcgct

SEQ ID NO: 1941422 - DNA, 25 bp, Homo sapien
ccattgagcagtcgctgacgttgca

SEQ ID NO: 1941423 - DNA, 25 bp, Homo sapien
tgacgttgcatccatcaggctcgta

SEQ ID NO: 1941424 - DNA, 25 bp, Homo sapien
tgctcggactggaaaccagcactga

SEQ ID NO: 1941425 - DNA, 25 bp, Homo sapien
catttcaaagccatacctccgaggg

SEQ ID NO: 1941426 - DNA, 25 bp, Homo sapien
tctctagaccatgcaacatcactgt

SEQ ID NO: 1941427 - DNA, 25 bp, Homo sapien
tctctggccctgcggctgttggagc

SEQ ID NO: 1941428 - DNA, 25 bp, Homo sapien
gctcttcgagttctggcaacagcca

SEQ ID NO: 1941429 - DNA, 25 bp, Homo sapien
gattcctttactgcaaagacctgca

SEQ ID NO: 1941430 - DNA, 25 bp, Homo sapien
cctgcatagttggaaggtgccagag

SEQ ID NO: 1941431 - DNA, 25 bp, Homo sapien
gaattatagcaactgaattgagctc

SEQ ID NO: 1941432 - DNA, 25 bp, Homo sapien
tagtctgattccacgcgatttcctc

SEQ ID NO: 1941433 - DNA, 25 bp, Homo sapien
tgattccacgcgatttcctcacgtg

SEQ ID NO: 1941434 - DNA, 25 bp, Homo sapien
tgctatagtctgattccacgcgatt

SEQ ID NO: 1941435 - DNA, 25 bp, Homo sapien
ttccacgcgatttcctcacgtgtgc

SEQ ID NO: 1941436 - DNA, 25 bp, Homo sapien
ccaggtccccagtgtcctctcccat

SEQ ID NO: 1941437 - DNA, 25 bp, Homo sapien
ctgcttccaggtccccagtgtcctc

SEQ ID NO: 1941438 - DNA, 25 bp, Homo sapien
gggctgcttccaggtccccagtgtc

SEQ ID NO: 1941439 - DNA, 25 bp, Homo sapien
ccgggggctgcttccaggtccccag

SEQ ID NO: 1941440 - DNA, 25 bp, Homo sapien
actccaacttggatatagctttgtg

SEQ ID NO: 1941441 - DNA, 25 bp, Homo sapien
ttcaaagtcttggaactggaaagat

SEQ ID NO: 1941442 - DNA, 25 bp, Homo sapien
aatccacaaatgattggtgagtcca

SEQ ID NO: 1941443 - DNA, 25 bp, Homo sapien
tacagacagtgagagttcaaagtct

SEQ ID NO: 1941444 - DNA, 25 bp, Homo sapien
taattttgtctcaggcatttgcaga

SEQ ID NO: 1941445 - DNA, 25 bp, Homo sapien
gagcaggatttccagcattctgggc

SEQ ID NO: 1941446 - DNA, 25 bp, Homo sapien
tgcttatatgtgcaggcacgcgtgc

SEQ ID NO: 1941447 - DNA, 25 bp, Homo sapien
cattctgggccgttcagctgagcga

SEQ ID NO: 1941448 - DNA, 25 bp, Homo sapien
ctgcccagtccataccactgtctat

SEQ ID NO: 1941449 - DNA, 25 bp, Homo sapien
ccctgcccagtccataccactgtct

SEQ ID NO: 1941450 - DNA, 25 bp, Homo sapien
gtgggccctgcccagtccataccac

SEQ ID NO: 1941451 - DNA, 25 bp, Homo sapien
ggccctgcccagtccataccactgt

SEQ ID NO: 1941452 - DNA, 25 bp, Homo sapien
gcatttgctctaccccgttcttctt

SEQ ID NO: 1941453 - DNA, 25 bp, Homo sapien
ccagagagatgcagaacggaggaca

SEQ ID NO: 1941454 - DNA, 25 bp, Homo sapien
gggacgcatttgctctaccccgttc

SEQ ID NO: 1941455 - DNA, 25 bp, Homo sapien
gtgcctggatccttggggacgcatt

SEQ ID NO: 1941456 - DNA, 25 bp, Homo sapien
gctcagcctctagaaaccacaccat

SEQ ID NO: 1941457 - DNA, 25 bp, Homo sapien
tgctcagcctctagaaaccacacca

SEQ ID NO: 1941458 - DNA, 25 bp, Homo sapien
ctgctcagcctctagaaaccacacc

SEQ ID NO: 1941459 - DNA, 25 bp, Homo sapien
ctcagcctctagaaaccacaccatc

SEQ ID NO: 1941460 - DNA, 25 bp, Homo sapien
aagtcagatcagccccgttgtctct

SEQ ID NO: 1941461 - DNA, 25 bp, Homo sapien
ctggagagggttcaggtttcctctt

SEQ ID NO: 1941462 - DNA, 25 bp, Homo sapien
cctggagagggttcaggtttcctct

SEQ ID NO: 1941463 - DNA, 25 bp, Homo sapien
agatcagccccgttgtctctgatgc

SEQ ID NO: 1941464 - DNA, 25 bp, Homo sapien
gcatccagtctgtgccgccgacttg

SEQ ID NO: 1941465 - DNA, 25 bp, Homo sapien
ccctctggaatctgcgttggagaaa

SEQ ID NO: 1941466 - DNA, 25 bp, Homo sapien
ctaatgctggattgcctgaaaagac

SEQ ID NO: 1941467 - DNA, 25 bp, Homo sapien
gacttgagatatggctgggaactga

SEQ ID NO: 1941468 - DNA, 25 bp, Homo sapien
gccaggggctaaaaccagcaaggct

SEQ ID NO: 1941469 - DNA, 25 bp, Homo sapien
taactaagagctgtgcaggaaccct

SEQ ID NO: 1941470 - DNA, 25 bp, Homo sapien
tagcttctcaggttgaaaccaagta

SEQ ID NO: 1941471 - DNA, 25 bp, Homo sapien
aaaccaagtaactaagagctgtgca

SEQ ID NO: 1941472 - DNA, 25 bp, Homo sapien
cagttgggaaacttgatccctagaa

SEQ ID NO: 1941473 - DNA, 25 bp, Homo sapien
ttccgtagactgttgctgcagttgg

SEQ ID NO: 1941474 - DNA, 25 bp, Homo sapien
acctcatgttccgtagactgttgct

SEQ ID NO: 1941475 - DNA, 25 bp, Homo sapien
gctgcagttgggaaacttgatccct

SEQ ID NO: 1941476 - DNA, 25 bp, Homo sapien
gctttgactgttattgtcatccaga

SEQ ID NO: 1941477 - DNA, 25 bp, Homo sapien
gagcaacatctcttcgacagattgg

SEQ ID NO: 1941478 - DNA, 25 bp, Homo sapien
gagaccaccgcctgcaaaagctgat

SEQ ID NO: 1941479 - DNA, 25 bp, Homo sapien
ttcgacagattggttgtgctttgac

SEQ ID NO: 1941480 - DNA, 25 bp, Homo sapien
ctgaaaagtgatttgctgtgctcat

SEQ ID NO: 1941481 - DNA, 25 bp, Homo sapien
ggactgagtttctgggtgtctctct

SEQ ID NO: 1941482 - DNA, 25 bp, Homo sapien
ccaggactgagtttctgggtgtctc

SEQ ID NO: 1941483 - DNA, 25 bp, Homo sapien
caggactgagtttctgggtgtctct

SEQ ID NO: 1941484 - DNA, 25 bp, Homo sapien
aggactgagtttctgggtgtctctc

SEQ ID NO: 1941485 - DNA, 25 bp, Homo sapien
tgaagcccaaataagctcctgaagc

SEQ ID NO: 1941486 - DNA, 25 bp, Homo sapien
tgacacaggccattggaaacacagg

SEQ ID NO: 1941487 - DNA, 25 bp, Homo sapien
acatcatgccctgtgggtggacacc

SEQ ID NO: 1941488 - DNA, 25 bp, Homo sapien
gacaagactgagaggtagaagacac

SEQ ID NO: 1941489 - DNA, 25 bp, Homo sapien
gtatttcaagtcgtcacggctgggt

SEQ ID NO: 1941490 - DNA, 25 bp, Homo sapien
ctgtatttcaagtcgtcacggctgg

SEQ ID NO: 1941491 - DNA, 25 bp, Homo sapien
tgtatttcaagtcgtcacggctggg

SEQ ID NO: 1941492 - DNA, 25 bp, Homo sapien
gactgtatttcaagtcgtcacggct

SEQ ID NO: 1941493 - DNA, 25 bp, Homo sapien
gactgccacgttcatattgttttca

SEQ ID NO: 1941494 - DNA, 25 bp, Homo sapien
tgactgccacgttcatattgttttc

SEQ ID NO: 1941495 - DNA, 25 bp, Homo sapien
tctgactgccacgttcatattgttt

SEQ ID NO: 1941496 - DNA, 25 bp, Homo sapien
cttctgactgccacgttcatattgt

SEQ ID NO: 1941497 - DNA, 25 bp, Homo sapien
ggttaagatgcaagactggctagaa

SEQ ID NO: 1941498 - DNA, 25 bp, Homo sapien
tcttttgccctttggcaggtgctag

SEQ ID NO: 1941499 - DNA, 25 bp, Homo sapien
gaacaacggcacaggagatgtcctt

SEQ ID NO: 1941500 - DNA, 25 bp, Homo sapien
aggataagcagtgggaacaacggca

SEQ ID NO: 1941501 - DNA, 25 bp, Homo sapien
cccaatgctccccagtattactcaa

SEQ ID NO: 1941502 - DNA, 25 bp, Homo sapien
atggtaaccacttgtcactggaaag

SEQ ID NO: 1941503 - DNA, 25 bp, Homo sapien
catggtaaccacttgtcactggaaa

SEQ ID NO: 1941504 - DNA, 25 bp, Homo sapien
ggtcacctgggggatccctaggctc

SEQ ID NO: 1941505 - DNA, 25 bp, Homo sapien
cctgttgttgtttgcatgggaatat

SEQ ID NO: 1941506 - DNA, 25 bp, Homo sapien
tgttgtttgcatgggaatattccct

SEQ ID NO: 1941507 - DNA, 25 bp, Homo sapien
gtttgcatgggaatattccctagaa

SEQ ID NO: 1941508 - DNA, 25 bp, Homo sapien
gttgttgtttgcatgggaatattcc

SEQ ID NO: 1941509 - DNA, 25 bp, Homo sapien
acagaaacagcatccgctgaggcac

SEQ ID NO: 1941510 - DNA, 25 bp, Homo sapien
gacagaaacagcatccgctgaggca

SEQ ID NO: 1941511 - DNA, 25 bp, Homo sapien
gaagacagaaacagcatccgctgag

SEQ ID NO: 1941512 - DNA, 25 bp, Homo sapien
ttaagactgtgagatgaagacagaa

SEQ ID NO: 1941513 - DNA, 25 bp, Homo sapien
tctcttgtgagttctctgctgccaa

SEQ ID NO: 1941514 - DNA, 25 bp, Homo sapien
cttctcttgtgagttctctgctgcc

SEQ ID NO: 1941515 - DNA, 25 bp, Homo sapien
ttgtgagttctctgctgccaacaga

SEQ ID NO: 1941516 - DNA, 25 bp, Homo sapien
tcttgtgagttctctgctgccaaca

SEQ ID NO: 1941517 - DNA, 25 bp, Homo sapien
cattctaggattccttgccccttac

SEQ ID NO: 1941518 - DNA, 25 bp, Homo sapien
ttctttgggccacattctaggattc

SEQ ID NO: 1941519 - DNA, 25 bp, Homo sapien
acattctaggattccttgcccctta

SEQ ID NO: 1941520 - DNA, 25 bp, Homo sapien
cttctttgggccacattctaggatt

SEQ ID NO: 1941521 - DNA, 25 bp, Homo sapien
tccttgtgctgccagaaggtgttgt

SEQ ID NO: 1941522 - DNA, 25 bp, Homo sapien
ttgttgctctaagggcaaaagttgt

SEQ ID NO: 1941523 - DNA, 25 bp, Homo sapien
ccttgtgctgccagaaggtgttgtt

SEQ ID NO: 1941524 - DNA, 25 bp, Homo sapien
gttgttgttgctctaagggcaaaag

SEQ ID NO: 1941525 - DNA, 25 bp, Homo sapien
acatgggctgaaaccgaggcaggcc

SEQ ID NO: 1941526 - DNA, 25 bp, Homo sapien
ggcaccgaggatctttctgattctt

SEQ ID NO: 1941527 - DNA, 25 bp, Homo sapien
gcttttgtagttacaggcaccgagg

SEQ ID NO: 1941528 - DNA, 25 bp, Homo sapien
gattcttcgaaggtaaggagacaca

SEQ ID NO: 1941529 - DNA, 25 bp, Homo sapien
tagctccagtgattgacccttctgt

SEQ ID NO: 1941530 - DNA, 25 bp, Homo sapien
gcccttggtgaagcttttagtgcac

SEQ ID NO: 1941531 - DNA, 25 bp, Homo sapien
ttcagtgtttactccatgggcagcc

SEQ ID NO: 1941532 - DNA, 25 bp, Homo sapien
taacataactgggtgtgcccttggt

SEQ ID NO: 1941533 - DNA, 25 bp, Homo sapien
gccctgggacactggaactgatcaa

SEQ ID NO: 1941534 - DNA, 25 bp, Homo sapien
tgtctaagagttctccaactgggcc

SEQ ID NO: 1941535 - DNA, 25 bp, Homo sapien
gatgcactgcgaagctttgccctgg

SEQ ID NO: 1941536 - DNA, 25 bp, Homo sapien
acatggccgtgcgtattgagtaccc

SEQ ID NO: 1941537 - DNA, 25 bp, Homo sapien
agcatcttttaggaatatcagtaag

SEQ ID NO: 1941538 - DNA, 25 bp, Homo sapien
ttctaaatattggagttcccaaaga

SEQ ID NO: 1941539 - DNA, 25 bp, Homo sapien
tgtaagcatcttttaggaatatcag

SEQ ID NO: 1941540 - DNA, 25 bp, Homo sapien
ccaaagagtattcaaactgatgtga

SEQ ID NO: 1941541 - DNA, 25 bp, Homo sapien
tatacaagtaatgagaggtccagaa

SEQ ID NO: 1941542 - DNA, 25 bp, Homo sapien
ctggacactcaaaaaacgttgcgtt

SEQ ID NO: 1941543 - DNA, 25 bp, Homo sapien
aatggaaacaaaggtaacatcgtgt

SEQ ID NO: 1941544 - DNA, 25 bp, Homo sapien
taggtatcagcagagtgccctctta

SEQ ID NO: 1941545 - DNA, 25 bp, Homo sapien
gtcatctggcaaggactcaattaaa

SEQ ID NO: 1941546 - DNA, 25 bp, Homo sapien
ctagcagtaagagtcaagtgctggc

SEQ ID NO: 1941547 - DNA, 25 bp, Homo sapien
gcttggcatcctgccaagtgtcatc

SEQ ID NO: 1941548 - DNA, 25 bp, Homo sapien
tgccaagtgtcatctggcaaggact

SEQ ID NO: 1941549 - DNA, 25 bp, Homo sapien
gggttaatgtcctgcacctgcagaa

SEQ ID NO: 1941550 - DNA, 25 bp, Homo sapien
accagcttgtgacatggccacccag

SEQ ID NO: 1941551 - DNA, 25 bp, Homo sapien
ggtttgagtgcattggcccagtcat

SEQ ID NO: 1941552 - DNA, 25 bp, Homo sapien
catgacactacaaattggtttctca

SEQ ID NO: 1941553 - DNA, 25 bp, Homo sapien
aattttaatatgacatgtggcattc

SEQ ID NO: 1941554 - DNA, 25 bp, Homo sapien
tgaaaatagcctgagtgtggaaagg

SEQ ID NO: 1941555 - DNA, 25 bp, Homo sapien
taatatgacatgtggcattccagac

SEQ ID NO: 1941556 - DNA, 25 bp, Homo sapien
tgacatgtggcattccagacataga

SEQ ID NO: 1941557 - DNA, 25 bp, Homo sapien
agtgatgggccttgcttagatgtcg

SEQ ID NO: 1941558 - DNA, 25 bp, Homo sapien
acagcaaggccgaggcaaccaaagg

SEQ ID NO: 1941559 - DNA, 25 bp, Homo sapien
gcagggagacgcagcaataagaact

SEQ ID NO: 1941560 - DNA, 25 bp, Homo sapien
ttagatgtcgctcctgtgtaatcag

SEQ ID NO: 1941561 - DNA, 25 bp, Homo sapien
ctcatttttctctgccagatgctgc

SEQ ID NO: 1941562 - DNA, 25 bp, Homo sapien
ttacacaagatctctctgggcaggt

SEQ ID NO: 1941563 - DNA, 25 bp, Homo sapien
tctgggcaggtttctcatttttctc

SEQ ID NO: 1941564 - DNA, 25 bp, Homo sapien
atttttctctgccagatgctgcctt

SEQ ID NO: 1941565 - DNA, 25 bp, Homo sapien
agtgctccagcgtcaagctctgcag

SEQ ID NO: 1941566 - DNA, 25 bp, Homo sapien
gggatgaacacatagccttgttcag

SEQ ID NO: 1941567 - DNA, 25 bp, Homo sapien
taggaagcatgaaagtgctccagcg

SEQ ID NO: 1941568 - DNA, 25 bp, Homo sapien
ttcagggagtgtcacagtgtccaga

SEQ ID NO: 1941569 - DNA, 25 bp, Homo sapien
gacagagcctcacaccggcagccat

SEQ ID NO: 1941570 - DNA, 25 bp, Homo sapien
agggcgggaccggatgtgatgaagg

SEQ ID NO: 1941571 - DNA, 25 bp, Homo sapien
aggtgagggcgggaccggatgtgat

SEQ ID NO: 1941572 - DNA, 25 bp, Homo sapien
gaccggatgtgatgaaggacaaaga

SEQ ID NO: 1941573 - DNA, 25 bp, Homo sapien
tatcagtgacagtggcgcgtgtgca

SEQ ID NO: 1941574 - DNA, 25 bp, Homo sapien
agaaggggtcggcaaacagcttctg

SEQ ID NO: 1941575 - DNA, 25 bp, Homo sapien
acactagcagaaggggtcggcaaac

SEQ ID NO: 1941576 - DNA, 25 bp, Homo sapien
gggcgtctttgaattaccaaggaca

SEQ ID NO: 1941577 - DNA, 25 bp, Homo sapien
aatactgctgacaccgtggaaaggc

SEQ ID NO: 1941578 - DNA, 25 bp, Homo sapien
tgctgacaccgtggaaaggctgctg

SEQ ID NO: 1941579 - DNA, 25 bp, Homo sapien
gagaggaaagtgatgtgaatactgc

SEQ ID NO: 1941580 - DNA, 25 bp, Homo sapien
tgggagggcccctgaatcagcagga

SEQ ID NO: 1941581 - DNA, 25 bp, Homo sapien
cctggcaatgatagacgagtttgca

SEQ ID NO: 1941582 - DNA, 25 bp, Homo sapien
caatgaacaccactggaaatgaacc

SEQ ID NO: 1941583 - DNA, 25 bp, Homo sapien
cttcaatgaacaccactggaaatga

SEQ ID NO: 1941584 - DNA, 25 bp, Homo sapien
ggaaatgaacctggcaatgatagac

SEQ ID NO: 1941585 - DNA, 25 bp, Homo sapien
cagtttctgaaatggttgctcacct

SEQ ID NO: 1941586 - DNA, 25 bp, Homo sapien
tcactgagtcatatccccagggaca

SEQ ID NO: 1941587 - DNA, 25 bp, Homo sapien
gttcaacgtcaggaatttgctccag

SEQ ID NO: 1941588 - DNA, 25 bp, Homo sapien
cccagggacactcttttgttcaacg

SEQ ID NO: 1941589 - DNA, 25 bp, Homo sapien
tgtggacggtctaccactgggatga

SEQ ID NO: 1941590 - DNA, 25 bp, Homo sapien
caggaaactttctcggactctaagg

SEQ ID NO: 1941591 - DNA, 25 bp, Homo sapien
taacattgagaatgcagacactccc

SEQ ID NO: 1941592 - DNA, 25 bp, Homo sapien
ggtagcacacatccctgtggacggt

SEQ ID NO: 1941593 - DNA, 25 bp, Homo sapien
ggccacatgaccactttccagaaag

SEQ ID NO: 1941594 - DNA, 25 bp, Homo sapien
tctgacttgactctacactgctgca

SEQ ID NO: 1941595 - DNA, 25 bp, Homo sapien
tgatgccactatggtcctcccgatc

SEQ ID NO: 1941596 - DNA, 25 bp, Homo sapien
tgctgcatgcatccgctgatgccac

SEQ ID NO: 1941597 - DNA, 25 bp, Homo sapien
aatgtggccagaaaacatcgatgcc

SEQ ID NO: 1941598 - DNA, 25 bp, Homo sapien
catcgatgccgaaacttgttcacac

SEQ ID NO: 1941599 - DNA, 25 bp, Homo sapien
tgtccctatagtcacaatccaagcc

SEQ ID NO: 1941600 - DNA, 25 bp, Homo sapien
ctattaccataaaactaatgtggcc

SEQ ID NO: 1941601 - DNA, 25 bp, Homo sapien
tgtttgatgagggagcaatgccctg

SEQ ID NO: 1941602 - DNA, 25 bp, Homo sapien
ttgatgagggagcaatgccctggct

SEQ ID NO: 1941603 - DNA, 25 bp, Homo sapien
ctgtttgatgagggagcaatgccct

SEQ ID NO: 1941604 - DNA, 25 bp, Homo sapien
tttgatgagggagcaatgccctggc

SEQ ID NO: 1941605 - DNA, 25 bp, Homo sapien
tttagtgattcttgaagcatggagt

SEQ ID NO: 1941606 - DNA, 25 bp, Homo sapien
gcttttagtgattcttgaagcatgg

SEQ ID NO: 1941607 - DNA, 25 bp, Homo sapien
catggagttgggctattttttcttt

SEQ ID NO: 1941608 - DNA, 25 bp, Homo sapien
aagcatggagttgggctattttttc

SEQ ID NO: 1941609 - DNA, 25 bp, Homo sapien
caaagatctagcaccattgtgcaca

SEQ ID NO: 1941610 - DNA, 25 bp, Homo sapien
gatctagcaccattgtgcacatgtc

SEQ ID NO: 1941611 - DNA, 25 bp, Homo sapien
tctgcaaagatctagcaccattgtg

SEQ ID NO: 1941612 - DNA, 25 bp, Homo sapien
tgattctgcaaagatctagcaccat

SEQ ID NO: 1941613 - DNA, 25 bp, Homo sapien
ggcatcctacctataccacaggcag

SEQ ID NO: 1941614 - DNA, 25 bp, Homo sapien
cccatgagaggtatgacacgtttcc

SEQ ID NO: 1941615 - DNA, 25 bp, Homo sapien
gaagggtacaccaccatgatgtaga

SEQ ID NO: 1941616 - DNA, 25 bp, Homo sapien
caggcagaactatcctatgctgtac

SEQ ID NO: 1941617 - DNA, 25 bp, Homo sapien
gcatccattgtttgtcccttggcag

SEQ ID NO: 1941618 - DNA, 25 bp, Homo sapien
acatttgcatccattgtttgtccct

SEQ ID NO: 1941619 - DNA, 25 bp, Homo sapien
gtcccttggcagattgggcacattc

SEQ ID NO: 1941620 - DNA, 25 bp, Homo sapien
attgggcacattcaaaaacagccat

SEQ ID NO: 1941621 - DNA, 25 bp, Homo sapien
ctccaaccgaaggaacgaggacact

SEQ ID NO: 1941622 - DNA, 25 bp, Homo sapien
cacttggaggtgcatatggtttctt

SEQ ID NO: 1941623 - DNA, 25 bp, Homo sapien
tggtttcttgtgtttctagccaaca

SEQ ID NO: 1941624 - DNA, 25 bp, Homo sapien
cattgccccaagaaccctccaaccg

SEQ ID NO: 1941625 - DNA, 25 bp, Homo sapien
tgtgtaacatctcctacggcaaaag

SEQ ID NO: 1941626 - DNA, 25 bp, Homo sapien
taggcaaatttcctcaaagacggca

SEQ ID NO: 1941627 - DNA, 25 bp, Homo sapien
gagccagtgactacttaccagttcg

SEQ ID NO: 1941628 - DNA, 25 bp, Homo sapien
gctagagcccctcttgggaaaggat

SEQ ID NO: 1941629 - DNA, 25 bp, Homo sapien
tcatgctcagttcccttgtgatacc

SEQ ID NO: 1941630 - DNA, 25 bp, Homo sapien
gataccattgcggtggcccatctga

SEQ ID NO: 1941631 - DNA, 25 bp, Homo sapien
ggcaagccagtctgatgttgtttaa

SEQ ID NO: 1941632 - DNA, 25 bp, Homo sapien
tggcttatctttattcatgctcagt

SEQ ID NO: 1941633 - DNA, 25 bp, Homo sapien
cccactctgtggttgggaaagacct

SEQ ID NO: 1941634 - DNA, 25 bp, Homo sapien
ccactctgtggttgggaaagacctg

SEQ ID NO: 1941635 - DNA, 25 bp, Homo sapien
catgagggtgttaggcaagagccca

SEQ ID NO: 1941636 - DNA, 25 bp, Homo sapien
aggggcgcaggtgtttgagacagcg

SEQ ID NO: 1941637 - DNA, 25 bp, Homo sapien
ggggcgcaggtgtttgagacagcga

SEQ ID NO: 1941638 - DNA, 25 bp, Homo sapien
aaggggcgcaggtgtttgagacagc

SEQ ID NO: 1941639 - DNA, 25 bp, Homo sapien
caaggggcgcaggtgtttgagacag

SEQ ID NO: 1941640 - DNA, 25 bp, Homo sapien
gaggacagatttctcctggttcagc

SEQ ID NO: 1941641 - DNA, 25 bp, Homo sapien
gagtcccaggttgaggcactaggaa

SEQ ID NO: 1941642 - DNA, 25 bp, Homo sapien
tagctgcctttgcactatgagtgtg

SEQ ID NO: 1941643 - DNA, 25 bp, Homo sapien
taggatcatgtccaaaggtcccctg

SEQ ID NO: 1941644 - DNA, 25 bp, Homo sapien
agctgcaagttgaactggggcagca

SEQ ID NO: 1941645 - DNA, 25 bp, Homo sapien
tagtcaagccgttccaagacaccac

SEQ ID NO: 1941646 - DNA, 25 bp, Homo sapien
gcaccacggccatcgatgctgtggc

SEQ ID NO: 1941647 - DNA, 25 bp, Homo sapien
gacaccaccgcccatttccaaaaca

SEQ ID NO: 1941648 - DNA, 25 bp, Homo sapien
agctgagagccaacatccaagagga

SEQ ID NO: 1941649 - DNA, 25 bp, Homo sapien
gcacaaatagtttccatttcccagc

SEQ ID NO: 1941650 - DNA, 25 bp, Homo sapien
aagcttccttcatgacagcacaaat

SEQ ID NO: 1941651 - DNA, 25 bp, Homo sapien
caacatccaagaggatcttctgatg

SEQ ID NO: 1941652 - DNA, 25 bp, Homo sapien
ctaggatcatagaggtagtttgggt

SEQ ID NO: 1941653 - DNA, 25 bp, Homo sapien
ggtagtttgggtaggcatcagtaac

SEQ ID NO: 1941654 - DNA, 25 bp, Homo sapien
tttgggtaggcatcagtaactggct

SEQ ID NO: 1941655 - DNA, 25 bp, Homo sapien
ggcatcagtaactggctataacaag

SEQ ID NO: 1941656 - DNA, 25 bp, Homo sapien
cagtgaagtctaaagagtagtacca

SEQ ID NO: 1941657 - DNA, 25 bp, Homo sapien
tctgaggctggtttgagaaggttcc

SEQ ID NO: 1941658 - DNA, 25 bp, Homo sapien
caagaatgaccctgagtcctgcgtc

SEQ ID NO: 1941659 - DNA, 25 bp, Homo sapien
ttgagaaggttccagagcttgggca

SEQ ID NO: 1941660 - DNA, 25 bp, Homo sapien
gggttgaagcagccaattggtacat

SEQ ID NO: 1941661 - DNA, 25 bp, Homo sapien
agatgccaggggttgaagcagccaa

SEQ ID NO: 1941662 - DNA, 25 bp, Homo sapien
tgccaggggttgaagcagccaattg

SEQ ID NO: 1941663 - DNA, 25 bp, Homo sapien
cagcagcacagaaggccctggagat

SEQ ID NO: 1941664 - DNA, 25 bp, Homo sapien
tgtttaacccagataagtgattctg

SEQ ID NO: 1941665 - DNA, 25 bp, Homo sapien
gatttgcctgcctgcacataatcgc

SEQ ID NO: 1941666 - DNA, 25 bp, Homo sapien
tttgttgtttaacccagataagtga

SEQ ID NO: 1941667 - DNA, 25 bp, Homo sapien
ccttttaactctcgcattctctgaa

SEQ ID NO: 1941668 - DNA, 25 bp, Homo sapien
catcagacgtgttgacaggcatggg

SEQ ID NO: 1941669 - DNA, 25 bp, Homo sapien
tatcatcagacgtgttgacaggcat

SEQ ID NO: 1941670 - DNA, 25 bp, Homo sapien
tcattatcatcagacgtgttgacag

SEQ ID NO: 1941671 - DNA, 25 bp, Homo sapien
tgttcattatcatcagacgtgttga

SEQ ID NO: 1941672 - DNA, 25 bp, Homo sapien
gagtgtgcgtgggtatattctgctc

SEQ ID NO: 1941673 - DNA, 25 bp, Homo sapien
cgtgggtatattctgctcggaagtc

SEQ ID NO: 1941674 - DNA, 25 bp, Homo sapien
tattctgctcggaagtcaattcctt

SEQ ID NO: 1941675 - DNA, 25 bp, Homo sapien
aggagagcttgttgattccaaatca

SEQ ID NO: 1941676 - DNA, 25 bp, Homo sapien
aggtccatttcccagcgtcatcagg

SEQ ID NO: 1941677 - DNA, 25 bp, Homo sapien
tcacaagcaggggtcataggtccat

SEQ ID NO: 1941678 - DNA, 25 bp, Homo sapien
agcgtcatcaggaatcactccaggc

SEQ ID NO: 1941679 - DNA, 25 bp, Homo sapien
aggaatcactccaggctgtgcactg

SEQ ID NO: 1941680 - DNA, 25 bp, Homo sapien
tctcagacgaaatcaaaaccttcat

SEQ ID NO: 1941681 - DNA, 25 bp, Homo sapien
caatctcagacgaaatcaaaacctt

SEQ ID NO: 1941682 - DNA, 25 bp, Homo sapien
ggctgggggcaatctcagacgaaat

SEQ ID NO: 1941683 - DNA, 25 bp, Homo sapien
gggcaatctcagacgaaatcaaaac

SEQ ID NO: 1941684 - DNA, 25 bp, Homo sapien
ggacaggtacagtaagagtgcctta

SEQ ID NO: 1941685 - DNA, 25 bp, Homo sapien
gcttactccagagtcgggcttctgt

SEQ ID NO: 1941686 - DNA, 25 bp, Homo sapien
tggacaggtacagtaagagtgcctt

SEQ ID NO: 1941687 - DNA, 25 bp, Homo sapien
gacaggtacagtaagagtgccttac

SEQ ID NO: 1941688 - DNA, 25 bp, Homo sapien
gaagacaacagagggtgctggacat

SEQ ID NO: 1941689 - DNA, 25 bp, Homo sapien
tggccagccaagaagacaacagagg

SEQ ID NO: 1941690 - DNA, 25 bp, Homo sapien
aagaagacaacagagggtgctggac

SEQ ID NO: 1941691 - DNA, 25 bp, Homo sapien
agccaagaagacaacagagggtgct

SEQ ID NO: 1941692 - DNA, 25 bp, Homo sapien
agaacgacaggacccggagaaagtg

SEQ ID NO: 1941693 - DNA, 25 bp, Homo sapien
tttggctggagtacgaggtgcacac

SEQ ID NO: 1941694 - DNA, 25 bp, Homo sapien
gaaagcatgcgaacgttctggaaac

SEQ ID NO: 1941695 - DNA, 25 bp, Homo sapien
ggcgtgaacaagacctgctgcagga

SEQ ID NO: 1941696 - DNA, 25 bp, Homo sapien
ggcagtgcctccaggaacatcatcc

SEQ ID NO: 1941697 - DNA, 25 bp, Homo sapien
tcattctcggagcaccaagaaaggg

SEQ ID NO: 1941698 - DNA, 25 bp, Homo sapien
tgttctggaacgcaccaacagtgga

SEQ ID NO: 1941699 - DNA, 25 bp, Homo sapien
acagtggaactctgtgctgacccca

SEQ ID NO: 1941700 - DNA, 25 bp, Homo sapien
caaggctcaactccagcaccacagc

SEQ ID NO: 1941701 - DNA, 25 bp, Homo sapien
ggctggggtccctcttcacacaagc

SEQ ID NO: 1941702 - DNA, 25 bp, Homo sapien
ccagccacatgaaccgtcttcgcag

SEQ ID NO: 1941703 - DNA, 25 bp, Homo sapien
gcccaaggctcaactccagcaccac

SEQ ID NO: 1941704 - DNA, 25 bp, Homo sapien
ttccgtgtgactgcctaagcaccag

SEQ ID NO: 1941705 - DNA, 25 bp, Homo sapien
tgcctaagcaccagcctgctttctg

SEQ ID NO: 1941706 - DNA, 25 bp, Homo sapien
gtgtgactgcctaagcaccagcctg

SEQ ID NO: 1941707 - DNA, 25 bp, Homo sapien
gctccagttccgtgtgactgcctaa

SEQ ID NO: 1941708 - DNA, 25 bp, Homo sapien
gatcacagtcacaaaattctctctg

SEQ ID NO: 1941709 - DNA, 25 bp, Homo sapien
tttgtgtgctgttagctaggcaaac

SEQ ID NO: 1941710 - DNA, 25 bp, Homo sapien
taggcaaacggtatcccactgagcc

SEQ ID NO: 1941711 - DNA, 25 bp, Homo sapien
ctggatcacagtcacaaaattctct

SEQ ID NO: 1941712 - DNA, 25 bp, Homo sapien
agggttgcgtgggagccccagatcc

SEQ ID NO: 1941713 - DNA, 25 bp, Homo sapien
ggcctgtggttccagtatcctttgg

SEQ ID NO: 1941714 - DNA, 25 bp, Homo sapien
gacggtggcaccattcactggtcct

SEQ ID NO: 1941715 - DNA, 25 bp, Homo sapien
tatcctttggagaaccgtctttgca

SEQ ID NO: 1941716 - DNA, 25 bp, Homo sapien
tattttcgaaatcaccgagtgtggg

SEQ ID NO: 1941717 - DNA, 25 bp, Homo sapien
catctaacagaattccgggcttggg

SEQ ID NO: 1941718 - DNA, 25 bp, Homo sapien
aacggcgctcggctggtcaattcat

SEQ ID NO: 1941719 - DNA, 25 bp, Homo sapien
gaacgctctaactgggagaacggcg

SEQ ID NO: 1941720 - DNA, 25 bp, Homo sapien
catcctttggtaaatattgaattac

SEQ ID NO: 1941721 - DNA, 25 bp, Homo sapien
acatcctttggtaaatattgaatta

SEQ ID NO: 1941722 - DNA, 25 bp, Homo sapien
aaacatcctttggtaaatattgaat

SEQ ID NO: 1941723 - DNA, 25 bp, Homo sapien
ctaaacatcctttggtaaatattga

SEQ ID NO: 1941724 - DNA, 25 bp, Homo sapien
gctggattcgtggatccgcaaatcc

SEQ ID NO: 1941725 - DNA, 25 bp, Homo sapien
tggatccgcaaatccataactctcc

SEQ ID NO: 1941726 - DNA, 25 bp, Homo sapien
tcctgctggattcgtggatccgcaa

SEQ ID NO: 1941727 - DNA, 25 bp, Homo sapien
ggattcgtggatccgcaaatccata

SEQ ID NO: 1941728 - DNA, 25 bp, Homo sapien
tgtttacgtaaaattggcctacaca

SEQ ID NO: 1941729 - DNA, 25 bp, Homo sapien
cacataacttgtgtaggagtgcagt

SEQ ID NO: 1941730 - DNA, 25 bp, Homo sapien
ggtgaaaccttcactttgattgccg

SEQ ID NO: 1941731 - DNA, 25 bp, Homo sapien
cttgcagccggataattccttttgg

SEQ ID NO: 1941732 - DNA, 25 bp, Homo sapien
tttcttgatgaggaatagcgagggt

SEQ ID NO: 1941733 - DNA, 25 bp, Homo sapien
tgtgtgagagtttttagggaatttc

SEQ ID NO: 1941734 - DNA, 25 bp, Homo sapien
gagtttttagggaatttcttgatga

SEQ ID NO: 1941735 - DNA, 25 bp, Homo sapien
ttatgcctttcccaacatgtgtgag

SEQ ID NO: 1941736 - DNA, 25 bp, Homo sapien
ctgttcacggtcgccgtttcccacg

SEQ ID NO: 1941737 - DNA, 25 bp, Homo sapien
cggtcgccgtttcccacgtccagca

SEQ ID NO: 1941738 - DNA, 25 bp, Homo sapien
ggtcgccgtttcccacgtccagcat

SEQ ID NO: 1941739 - DNA, 25 bp, Homo sapien
tcacggtcgccgtttcccacgtcca

SEQ ID NO: 1941740 - DNA, 25 bp, Homo sapien
aagggtaaatctccggcctgctgca

SEQ ID NO: 1941741 - DNA, 25 bp, Homo sapien
tggacgttccattgacgcctcggga

SEQ ID NO: 1941742 - DNA, 25 bp, Homo sapien
cgcctcgggatcaggagtctgtctc

SEQ ID NO: 1941743 - DNA, 25 bp, Homo sapien
gggacaccagaacatgtgctctgtc

SEQ ID NO: 1941744 - DNA, 25 bp, Homo sapien
aactgagggttctagcctggaagac

SEQ ID NO: 1941745 - DNA, 25 bp, Homo sapien
taaagggtaggattcgccagcagca

SEQ ID NO: 1941746 - DNA, 25 bp, Homo sapien
agagaagttcatccacgagcaagtg

SEQ ID NO: 1941747 - DNA, 25 bp, Homo sapien
gagatgactttggtacacacaggtg

SEQ ID NO: 1941748 - DNA, 25 bp, Homo sapien
catctcaaggcttctagatcctcca

SEQ ID NO: 1941749 - DNA, 25 bp, Homo sapien
tatatacagcagctccaatttttca

SEQ ID NO: 1941750 - DNA, 25 bp, Homo sapien
aaatatatacagcagctccaatttt

SEQ ID NO: 1941751 - DNA, 25 bp, Homo sapien
ccccaggtctgcgttttaggcagct

SEQ ID NO: 1941752 - DNA, 25 bp, Homo sapien
tagagcacggttgggttcccaagga

SEQ ID NO: 1941753 - DNA, 25 bp, Homo sapien
tgcttcagagcatccgtagagcacg

SEQ ID NO: 1941754 - DNA, 25 bp, Homo sapien
tgctacagtggattcgggggttccc

SEQ ID NO: 1941755 - DNA, 25 bp, Homo sapien
tccccttgctggcaaccgctcccca

SEQ ID NO: 1941756 - DNA, 25 bp, Homo sapien
agaagaggatgtgggctagtggagg

SEQ ID NO: 1941757 - DNA, 25 bp, Homo sapien
gagaagaggatgtgggctagtggag

SEQ ID NO: 1941758 - DNA, 25 bp, Homo sapien
ggagaagaggatgtgggctagtgga

SEQ ID NO: 1941759 - DNA, 25 bp, Homo sapien
gaagaggatgtgggctagtggaggg

SEQ ID NO: 1941760 - DNA, 25 bp, Homo sapien
aacttcaggactctggttcctacaa

SEQ ID NO: 1941761 - DNA, 25 bp, Homo sapien
ctggttcctacaacaagcacgcggc

SEQ ID NO: 1941762 - DNA, 25 bp, Homo sapien
ctacaacaagcacgcggcatttggc

SEQ ID NO: 1941763 - DNA, 25 bp, Homo sapien
caagcacgcggcatttggcattttc

SEQ ID NO: 1941764 - DNA, 25 bp, Homo sapien
agtcttggtgacaggatactgatag

SEQ ID NO: 1941765 - DNA, 25 bp, Homo sapien
gaccttctgccgtgaaatgatacat

SEQ ID NO: 1941766 - DNA, 25 bp, Homo sapien
aatgatacatgtcactaatcgctgg

SEQ ID NO: 1941767 - DNA, 25 bp, Homo sapien
caaggaatgggtaattgaggagaac

SEQ ID NO: 1941768 - DNA, 25 bp, Homo sapien
agctcagtattgctggcctgtgcat

SEQ ID NO: 1941769 - DNA, 25 bp, Homo sapien
gagacttatccgagtcgcaggtgaa

SEQ ID NO: 1941770 - DNA, 25 bp, Homo sapien
agcaggaccccagtccagggcagca

SEQ ID NO: 1941771 - DNA, 25 bp, Homo sapien
tgtgcatcctgagacttatccgagt

SEQ ID NO: 1941772 - DNA, 25 bp, Homo sapien
ttttcataagttcaattatattagt

SEQ ID NO: 1941773 - DNA, 25 bp, Homo sapien
tcataagttcaattatattagttat

SEQ ID NO: 1941774 - DNA, 25 bp, Homo sapien
cataagttcaattatattagttatt

SEQ ID NO: 1941775 - DNA, 25 bp, Homo sapien
ttcataagttcaattatattagtta

SEQ ID NO: 1941776 - DNA, 25 bp, Homo sapien
gtcttttgagccgttctgacgtgga

SEQ ID NO: 1941777 - DNA, 25 bp, Homo sapien
gagagagaaacagcattgtgtcttt

SEQ ID NO: 1941778 - DNA, 25 bp, Homo sapien
ttctgacgtggatgaactctggttt

SEQ ID NO: 1941779 - DNA, 25 bp, Homo sapien
gagaaacagcattgtgtcttttgag

SEQ ID NO: 1941780 - DNA, 25 bp, Homo sapien
gctctcatgtcgttttttaatgtgt

SEQ ID NO: 1941781 - DNA, 25 bp, Homo sapien
tgtgctctcatgtcgttttttaatg

SEQ ID NO: 1941782 - DNA, 25 bp, Homo sapien
tctcatgtcgttttttaatgtgttt

SEQ ID NO: 1941783 - DNA, 25 bp, Homo sapien
tgctctcatgtcgttttttaatgtg

SEQ ID NO: 1941784 - DNA, 25 bp, Homo sapien
ggcgtcccgccagtaggaccgatca

SEQ ID NO: 1941785 - DNA, 25 bp, Homo sapien
ccaggccggcgtcccgccagtagga

SEQ ID NO: 1941786 - DNA, 25 bp, Homo sapien
ctgctgtctgctaagcacatgccca

SEQ ID NO: 1941787 - DNA, 25 bp, Homo sapien
tgctgtctgctaagcacatgcccag

SEQ ID NO: 1941788 - DNA, 25 bp, Homo sapien
ttttttgccccttgagtatgaaaca

SEQ ID NO: 1941789 - DNA, 25 bp, Homo sapien
catggatagtactgactctatgtga

SEQ ID NO: 1941790 - DNA, 25 bp, Homo sapien
tgaaacatatgttaaaagctgaacg

SEQ ID NO: 1941791 - DNA, 25 bp, Homo sapien
aatatgttccaagcgccccgtggat

SEQ ID NO: 1941792 - DNA, 25 bp, Homo sapien
tggaatcaagtgtaatcgcacatga

SEQ ID NO: 1941793 - DNA, 25 bp, Homo sapien
attaaagaaaatgcgtactgcagat

SEQ ID NO: 1941794 - DNA, 25 bp, Homo sapien
taatcgcacatgacccatttcagag

SEQ ID NO: 1941795 - DNA, 25 bp, Homo sapien
tgcgtactgcagattaacatacata

SEQ ID NO: 1941796 - DNA, 25 bp, Homo sapien
tgtttcaaggctatgtttcagatgc

SEQ ID NO: 1941797 - DNA, 25 bp, Homo sapien
gcataatggttagcaagttattcac

SEQ ID NO: 1941798 - DNA, 25 bp, Homo sapien
aaaaccagatagaatgtcatagccc

SEQ ID NO: 1941799 - DNA, 25 bp, Homo sapien
ctctcattgtattggtagattatca

SEQ ID NO: 1941800 - DNA, 25 bp, Homo sapien
gatcaacttggatagacccaccaga

SEQ ID NO: 1941801 - DNA, 25 bp, Homo sapien
tggatagacccaccagaggcttgct

SEQ ID NO: 1941802 - DNA, 25 bp, Homo sapien
caacttggatagacccaccagaggc

SEQ ID NO: 1941803 - DNA, 25 bp, Homo sapien
agacccaccagaggcttgctcaggg

SEQ ID NO: 1941804 - DNA, 25 bp, Homo sapien
aggctttaggtagtcaaagcctaca

SEQ ID NO: 1941805 - DNA, 25 bp, Homo sapien
gctttaggtagtcaaagcctacatt

SEQ ID NO: 1941806 - DNA, 25 bp, Homo sapien
ttaggctttaggtagtcaaagccta

SEQ ID NO: 1941807 - DNA, 25 bp, Homo sapien
ggctttaggtagtcaaagcctacat

SEQ ID NO: 1941808 - DNA, 25 bp, Homo sapien
gttgactgagctacagccaacctta

SEQ ID NO: 1941809 - DNA, 25 bp, Homo sapien
ttgactgagctacagccaaccttac

SEQ ID NO: 1941810 - DNA, 25 bp, Homo sapien
gactgagctacagccaaccttacct

SEQ ID NO: 1941811 - DNA, 25 bp, Homo sapien
ctcccctccgccttgtctcctttct

SEQ ID NO: 1941812 - DNA, 25 bp, Homo sapien
cagttgcattgtccagggtaggcat

SEQ ID NO: 1941813 - DNA, 25 bp, Homo sapien
ttcagttgcattgtccagggtaggc

SEQ ID NO: 1941814 - DNA, 25 bp, Homo sapien
tcagttgcattgtccagggtaggca

SEQ ID NO: 1941815 - DNA, 25 bp, Homo sapien
tgcataactcatgcaactggcagtt

SEQ ID NO: 1941816 - DNA, 25 bp, Homo sapien
ggagcctgaagcttgcagaaatcta

SEQ ID NO: 1941817 - DNA, 25 bp, Homo sapien
cacccgtgttgggactgggttctct

SEQ ID NO: 1941818 - DNA, 25 bp, Homo sapien
gagatctaaatacccaactgcaacc

SEQ ID NO: 1941819 - DNA, 25 bp, Homo sapien
ccaggtcgctgaatctccttgactg

SEQ ID NO: 1941820 - DNA, 25 bp, Homo sapien
ctggcagttcagctgacaccgccat

SEQ ID NO: 1941821 - DNA, 25 bp, Homo sapien
gggtgtctcgtgttgtgaagggctg

SEQ ID NO: 1941822 - DNA, 25 bp, Homo sapien
tctctggtccaggtcgctgaatctc

SEQ ID NO: 1941823 - DNA, 25 bp, Homo sapien
cgccctgggccaactggggctttgt

SEQ ID NO: 1941824 - DNA, 25 bp, Homo sapien
ctagaatcactcaagcacaagagcc

SEQ ID NO: 1941825 - DNA, 25 bp, Homo sapien
tcaagcacaagagcccgccctgggc

SEQ ID NO: 1941826 - DNA, 25 bp, Homo sapien
agaatcactcaagcacaagagcccg

SEQ ID NO: 1941827 - DNA, 25 bp, Homo sapien
tccattcctttgtctttaggattta

SEQ ID NO: 1941828 - DNA, 25 bp, Homo sapien
agccagatgacaataaggccaataa

SEQ ID NO: 1941829 - DNA, 25 bp, Homo sapien
cagagccagatgacaataaggccaa

SEQ ID NO: 1941830 - DNA, 25 bp, Homo sapien
gagccagatgacaataaggccaata

SEQ ID NO: 1941831 - DNA, 25 bp, Homo sapien
atgctctcgtttagacaacaatttc

SEQ ID NO: 1941832 - DNA, 25 bp, Homo sapien
cctgtaggtggtctgatgtccccct

SEQ ID NO: 1941833 - DNA, 25 bp, Homo sapien
cctcatgtctttccacgttggaaat

SEQ ID NO: 1941834 - DNA, 25 bp, Homo sapien
ggtggtctgatgtccccctcatgtc

SEQ ID NO: 1941835 - DNA, 25 bp, Homo sapien
cattgctaacttgcgtctgtttgcc

SEQ ID NO: 1941836 - DNA, 25 bp, Homo sapien
actccctctgcttcggctgtgttgg

SEQ ID NO: 1941837 - DNA, 25 bp, Homo sapien
tgcttcggctgtgttggtccgttca

SEQ ID NO: 1941838 - DNA, 25 bp, Homo sapien
ttggtccgttcattgctaacttgcg

SEQ ID NO: 1941839 - DNA, 25 bp, Homo sapien
cagcccatcagcaggtattaaaatg

SEQ ID NO: 1941840 - DNA, 25 bp, Homo sapien
gattatcttgtatacaagggcggct

SEQ ID NO: 1941841 - DNA, 25 bp, Homo sapien
aatgttcaaggcctcttgtcttttt

SEQ ID NO: 1941842 - DNA, 25 bp, Homo sapien
cagagcagaaggtttgaagattatc

SEQ ID NO: 1941843 - DNA, 25 bp, Homo sapien
ttcatgtgcccacacatagcctgaa

SEQ ID NO: 1941844 - DNA, 25 bp, Homo sapien
aagattgatgccgaaagtctcattg

SEQ ID NO: 1941845 - DNA, 25 bp, Homo sapien
tctaaactggttgctgttggctgtg

SEQ ID NO: 1941846 - DNA, 25 bp, Homo sapien
gaaagctttctttgaattagtgaag

SEQ ID NO: 1941847 - DNA, 25 bp, Homo sapien
catacatagatagctaaagggtctg

SEQ ID NO: 1941848 - DNA, 25 bp, Homo sapien
taacccagaaggacaacatcgaagc

SEQ ID NO: 1941849 - DNA, 25 bp, Homo sapien
gttgtaccaacatgtcagtcctaga

SEQ ID NO: 1941850 - DNA, 25 bp, Homo sapien
tgttgaccccacatagtccatttgg

SEQ ID NO: 1941851 - DNA, 25 bp, Homo sapien
actaaagctgcttaccaggccacga

SEQ ID NO: 1941852 - DNA, 25 bp, Homo sapien
taaagctgcttaccaggccacgata

SEQ ID NO: 1941853 - DNA, 25 bp, Homo sapien
gcttaccaggccacgataaaggcca

SEQ ID NO: 1941854 - DNA, 25 bp, Homo sapien
agctgcttaccaggccacgataaag

SEQ ID NO: 1941855 - DNA, 25 bp, Homo sapien
tggccacatgagaaaccaatggccc

SEQ ID NO: 1941856 - DNA, 25 bp, Homo sapien
gcaaaagcaaagtgtggcacaaaac

SEQ ID NO: 1941857 - DNA, 25 bp, Homo sapien
atggcccacacccacagtgccgcat

SEQ ID NO: 1941858 - DNA, 25 bp, Homo sapien
caaaacactgtgctgcgagtggcca

SEQ ID NO: 1941859 - DNA, 25 bp, Homo sapien
ctgagcagcccttcacacacgggag

SEQ ID NO: 1941860 - DNA, 25 bp, Homo sapien
caggtgctaccagtgggcagctctg

SEQ ID NO: 1941861 - DNA, 25 bp, Homo sapien
aaagcaggtgctaccagtgggcagc

SEQ ID NO: 1941862 - DNA, 25 bp, Homo sapien
ggagcagaccttgcacctgcaggag

SEQ ID NO: 1941863 - DNA, 25 bp, Homo sapien
taactggcaaactaaggatgacaga

SEQ ID NO: 1941864 - DNA, 25 bp, Homo sapien
gatgacagagtgttcaatgatgctg

SEQ ID NO: 1941865 - DNA, 25 bp, Homo sapien
acagcagtcacggtcatcacttagc

SEQ ID NO: 1941866 - DNA, 25 bp, Homo sapien
tctgcgctagtatccagggcatagg

SEQ ID NO: 1941867 - DNA, 25 bp, Homo sapien
tctgaatttgggcagtttgctgtgc

SEQ ID NO: 1941868 - DNA, 25 bp, Homo sapien
cttctgattggcccatgggggatga

SEQ ID NO: 1941869 - DNA, 25 bp, Homo sapien
tgtgtctccccttggacttctgatt

SEQ ID NO: 1941870 - DNA, 25 bp, Homo sapien
tggttctggccaaccctgtgtctcc

SEQ ID NO: 1941871 - DNA, 25 bp, Homo sapien
tgtggcagcagtaatgatcgaggcc

SEQ ID NO: 1941872 - DNA, 25 bp, Homo sapien
agtaatgatcgaggcctccaagaag

SEQ ID NO: 1941873 - DNA, 25 bp, Homo sapien
cagcagtaatgatcgaggcctccaa

SEQ ID NO: 1941874 - DNA, 25 bp, Homo sapien
tggcagcagtaatgatcgaggcctc

SEQ ID NO: 1941875 - DNA, 25 bp, Homo sapien
cgacgatggacccatgggaggaaca

SEQ ID NO: 1941876 - DNA, 25 bp, Homo sapien
agtgccagctgaggaagcaagtctg

SEQ ID NO: 1941877 - DNA, 25 bp, Homo sapien
gtctgagcatagaagtcatagactc

SEQ ID NO: 1941878 - DNA, 25 bp, Homo sapien
ggagctctttggtcttgccgacgat

SEQ ID NO: 1941879 - DNA, 25 bp, Homo sapien
ttatcggtgctgagtttcggagttg

SEQ ID NO: 1941880 - DNA, 25 bp, Homo sapien
ctgagtttcggagttgaaagtatcc

SEQ ID NO: 1941881 - DNA, 25 bp, Homo sapien
agtttcggagttgaaagtatcctca

SEQ ID NO: 1941882 - DNA, 25 bp, Homo sapien
tcggtgctgagtttcggagttgaaa

SEQ ID NO: 1941883 - DNA, 25 bp, Homo sapien
gggcttcagacataaaccttcctct

SEQ ID NO: 1941884 - DNA, 25 bp, Homo sapien
tcttagttggttctttggagtgagg

SEQ ID NO: 1941885 - DNA, 25 bp, Homo sapien
catgttgagaatgaatcttagttgg

SEQ ID NO: 1941886 - DNA, 25 bp, Homo sapien
tgagggcagggaatagtcagcataa

SEQ ID NO: 1941887 - DNA, 25 bp, Homo sapien
ctctgaactcagagacaaaaggggc

SEQ ID NO: 1941888 - DNA, 25 bp, Homo sapien
tgaacaagccccctctgaactcaga

SEQ ID NO: 1941889 - DNA, 25 bp, Homo sapien
gattcctgcctagttctattcacaa

SEQ ID NO: 1941890 - DNA, 25 bp, Homo sapien
ggagagtctaatccttgaagtctgt

SEQ ID NO: 1941891 - DNA, 25 bp, Homo sapien
gagggaagagcccagcttaggcact

SEQ ID NO: 1941892 - DNA, 25 bp, Homo sapien
ctgttaaagtaatggaaagagctgt

SEQ ID NO: 1941893 - DNA, 25 bp, Homo sapien
tggttgtagcagatcaaacgggagc

SEQ ID NO: 1941894 - DNA, 25 bp, Homo sapien
tgagctggctcttcgttgagcagga

SEQ ID NO: 1941895 - DNA, 25 bp, Homo sapien
cttggctggatcaaggaaaactctc

SEQ ID NO: 1941896 - DNA, 25 bp, Homo sapien
taggtgctaatgtgagtgtccccaa

SEQ ID NO: 1941897 - DNA, 25 bp, Homo sapien
cagctgaaggcagacgatgtgctta

SEQ ID NO: 1941898 - DNA, 25 bp, Homo sapien
cacaagtgtgcagggacggaagctt

SEQ ID NO: 1941899 - DNA, 25 bp, Homo sapien
agaggccgtgcagtcgtgacagcca

SEQ ID NO: 1941900 - DNA, 25 bp, Homo sapien
ccgtgcagtcgtgacagccagtggt

SEQ ID NO: 1941901 - DNA, 25 bp, Homo sapien
gaaactgctattagagggccactgc

SEQ ID NO: 1941902 - DNA, 25 bp, Homo sapien
cattcgtaggatgtagaagaaactg

SEQ ID NO: 1941903 - DNA, 25 bp, Homo sapien
tgaagctgtccacgtgttcttgcct

SEQ ID NO: 1941904 - DNA, 25 bp, Homo sapien
aataagtaggacctgcctcataggg

SEQ ID NO: 1941905 - DNA, 25 bp, Homo sapien
ataaaaagctctgcagccatgcctg

SEQ ID NO: 1941906 - DNA, 25 bp, Homo sapien
tagagtctcgtttgacccaacggcc

SEQ ID NO: 1941907 - DNA, 25 bp, Homo sapien
taggatgctggactaaaagaggcag

SEQ ID NO: 1941908 - DNA, 25 bp, Homo sapien
ttaggatgctggactaaaagaggca

SEQ ID NO: 1941909 - DNA, 25 bp, Homo sapien
ctgcttaggatgctggactaaaaga

SEQ ID NO: 1941910 - DNA, 25 bp, Homo sapien
gcttaggatgctggactaaaagagg

SEQ ID NO: 1941911 - DNA, 25 bp, Homo sapien
ttatcgtaacgggtgaatgagatct

SEQ ID NO: 1941912 - DNA, 25 bp, Homo sapien
cgggtgaatgagatctttcttaaaa

SEQ ID NO: 1941913 - DNA, 25 bp, Homo sapien
gaatgagatctttcttaaaaccatt

SEQ ID NO: 1941914 - DNA, 25 bp, Homo sapien
aacgggtgaatgagatctttcttaa

SEQ ID NO: 1941915 - DNA, 25 bp, Homo sapien
tactctcgtctttcaccacctcaac

SEQ ID NO: 1941916 - DNA, 25 bp, Homo sapien
ttaaccttactctcgtctttcacca

SEQ ID NO: 1941917 - DNA, 25 bp, Homo sapien
tctcgtctttcaccacctcaacaac

SEQ ID NO: 1941918 - DNA, 25 bp, Homo sapien
ctttcaccacctcaacaacagcagc

SEQ ID NO: 1941919 - DNA, 25 bp, Homo sapien
gaaatccgggatatatgtggtccca

SEQ ID NO: 1941920 - DNA, 25 bp, Homo sapien
ttgagtcagtccaaggaaatccggg

SEQ ID NO: 1941921 - DNA, 25 bp, Homo sapien
tgtaggccattcttccccggttgca

SEQ ID NO: 1941922 - DNA, 25 bp, Homo sapien
gactggcttcttgaaacttggagct

SEQ ID NO: 1941923 - DNA, 25 bp, Homo sapien
ctgacgtgtcttcatgtagttggaa

SEQ ID NO: 1941924 - DNA, 25 bp, Homo sapien
caaaactgaaatccttaccgatgag

SEQ ID NO: 1941925 - DNA, 25 bp, Homo sapien
gcaaaactgaaatccttaccgatga

SEQ ID NO: 1941926 - DNA, 25 bp, Homo sapien
aaaactgaaatccttaccgatgagc

SEQ ID NO: 1941927 - DNA, 25 bp, Homo sapien
tcaatacataacttttggttaagat

SEQ ID NO: 1941928 - DNA, 25 bp, Homo sapien
ctcccctgcagatcctcaagcctgt

SEQ ID NO: 1941929 - DNA, 25 bp, Homo sapien
tgctcccctgcagatcctcaagcct

SEQ ID NO: 1941930 - DNA, 25 bp, Homo sapien
gctcccctgcagatcctcaagcctg

SEQ ID NO: 1941931 - DNA, 25 bp, Homo sapien
actttaaggattatagccacattta

SEQ ID NO: 1941932 - DNA, 25 bp, Homo sapien
tacaccagtagtcctctgattataa

SEQ ID NO: 1941933 - DNA, 25 bp, Homo sapien
cagtagtcctctgattataatgaag

SEQ ID NO: 1941934 - DNA, 25 bp, Homo sapien
tcagatgcgtcaagtgttgccaaga

SEQ ID NO: 1941935 - DNA, 25 bp, Homo sapien
gttaacagagttccacacatcacat

SEQ ID NO: 1941936 - DNA, 25 bp, Homo sapien
taccagtaagatcagcctctgtcat

SEQ ID NO: 1941937 - DNA, 25 bp, Homo sapien
cacatcacattaccagtaagatcag

SEQ ID NO: 1941938 - DNA, 25 bp, Homo sapien
ttcttttactcaggcatctcagagc

SEQ ID NO: 1941939 - DNA, 25 bp, Homo sapien
gaaagtacccctctcttggaataca

SEQ ID NO: 1941940 - DNA, 25 bp, Homo sapien
tcatgggattcgtacaacagcaagg

SEQ ID NO: 1941941 - DNA, 25 bp, Homo sapien
aaagggaagtgctgctcagaccgga

SEQ ID NO: 1941942 - DNA, 25 bp, Homo sapien
ctaagggacctgagctcaagtagga

SEQ ID NO: 1941943 - DNA, 25 bp, Homo sapien
tggcttccaaacacaacaccctggg

SEQ ID NO: 1941944 - DNA, 25 bp, Homo sapien
caccctgggttttattggagcaaag

SEQ ID NO: 1941945 - DNA, 25 bp, Homo sapien
ttcatgatggcgctttgagacccac

SEQ ID NO: 1941946 - DNA, 25 bp, Homo sapien
ggaattagcacacgcggagtccggt

SEQ ID NO: 1941947 - DNA, 25 bp, Homo sapien
aagaatagaggttcggcttctttgg

SEQ ID NO: 1941948 - DNA, 25 bp, Homo sapien
taaaaattgattaccaatggaggaa

SEQ ID NO: 1941949 - DNA, 25 bp, Homo sapien
tctgatactcaagtttgaggatcac

SEQ ID NO: 1941950 - DNA, 25 bp, Homo sapien
ttgattaccaatggaggaatggagg

SEQ ID NO: 1941951 - DNA, 25 bp, Homo sapien
ttagttagactcctttgtggagcac

SEQ ID NO: 1941952 - DNA, 25 bp, Homo sapien
gatcaggactatgggaatgagatgc

SEQ ID NO: 1941953 - DNA, 25 bp, Homo sapien
tgtggagcacaaccaaaccagaatc

SEQ ID NO: 1941954 - DNA, 25 bp, Homo sapien
tagctgctgtaatgcattcaacact

SEQ ID NO: 1941955 - DNA, 25 bp, Homo sapien
tactgggcgataagtgtttgccaca

SEQ ID NO: 1941956 - DNA, 25 bp, Homo sapien
tgttcatttgcacgatacccactgt

SEQ ID NO: 1941957 - DNA, 25 bp, Homo sapien
tagttgcctggccaactgcaaagga

SEQ ID NO: 1941958 - DNA, 25 bp, Homo sapien
cacttgccattgtagcgtggtacaa

SEQ ID NO: 1941959 - DNA, 25 bp, Homo sapien
actattgggtgctgtaatgttggcc

SEQ ID NO: 1941960 - DNA, 25 bp, Homo sapien
catggagtgacataagcttcataga

SEQ ID NO: 1941961 - DNA, 25 bp, Homo sapien
tagaacaaaggataccggccgtctc

SEQ ID NO: 1941962 - DNA, 25 bp, Homo sapien
taatgttggcctgtgattcatgtca

SEQ ID NO: 1941963 - DNA, 25 bp, Homo sapien
acatggtaatatgtggattgtacca

SEQ ID NO: 1941964 - DNA, 25 bp, Homo sapien
tccttggagtcgtggtaatatggag

SEQ ID NO: 1941965 - DNA, 25 bp, Homo sapien
ccttggagtcgtggtaatatggaga

SEQ ID NO: 1941966 - DNA, 25 bp, Homo sapien
gatgggccagttactactttcaggc

SEQ ID NO: 1941967 - DNA, 25 bp, Homo sapien
ctacttccaaacatgtcggctggag

SEQ ID NO: 1941968 - DNA, 25 bp, Homo sapien
ttccaaacatgtcggctggagatcc

SEQ ID NO: 1941969 - DNA, 25 bp, Homo sapien
tccctgatgggccagttactacttt

SEQ ID NO: 1941970 - DNA, 25 bp, Homo sapien
aaacggaaggatattctgtggacgc

SEQ ID NO: 1941971 - DNA, 25 bp, Homo sapien
tctgtccgtctgtctaaacggaagg

SEQ ID NO: 1941972 - DNA, 25 bp, Homo sapien
agaaatcgatcctttctctgtccgt

SEQ ID NO: 1941973 - DNA, 25 bp, Homo sapien
ttaggtataaaatctccacggagcc

SEQ ID NO: 1941974 - DNA, 25 bp, Homo sapien
cgttgaggtgtacggttgaaaattg

SEQ ID NO: 1941975 - DNA, 25 bp, Homo sapien
tgcgttgagcatttccacggagacc

SEQ ID NO: 1941976 - DNA, 25 bp, Homo sapien
ctgagcatcttttccaggcttggag

SEQ ID NO: 1941977 - DNA, 25 bp, Homo sapien
ggtgtacggttgaaaattgagaata

SEQ ID NO: 1941978 - DNA, 25 bp, Homo sapien
caaaaccagtctgaagtgggtgtgg

SEQ ID NO: 1941979 - DNA, 25 bp, Homo sapien
tagggcacagctggacaatgctgaa

SEQ ID NO: 1941980 - DNA, 25 bp, Homo sapien
tgtttacaaggtggagtggtgccct

SEQ ID NO: 1941981 - DNA, 25 bp, Homo sapien
ggagatgaggtaaacctcagctgca

SEQ ID NO: 1941982 - DNA, 25 bp, Homo sapien
ttgctttccgatttttctgtgggaa

SEQ ID NO: 1941983 - DNA, 25 bp, Homo sapien
agctgtggggtaagtttcagcctcc

SEQ ID NO: 1941984 - DNA, 25 bp, Homo sapien
ttcttagctgtggggtaagtttcag

SEQ ID NO: 1941985 - DNA, 25 bp, Homo sapien
cttagctgtggggtaagtttcagcc

SEQ ID NO: 1941986 - DNA, 25 bp, Homo sapien
acaggcaggaagcatcaccttcagc

SEQ ID NO: 1941987 - DNA, 25 bp, Homo sapien
aggcctgtgtcccacaaagaacagg

SEQ ID NO: 1941988 - DNA, 25 bp, Homo sapien
gcctgtgtcccacaaagaacaggca

SEQ ID NO: 1941989 - DNA, 25 bp, Homo sapien
aacaggcaggaagcatcaccttcag

SEQ ID NO: 1941990 - DNA, 25 bp, Homo sapien
agatggcatactcacatggctgtgg

SEQ ID NO: 1941991 - DNA, 25 bp, Homo sapien
tcacaaggacgctaccgagggagat

SEQ ID NO: 1941992 - DNA, 25 bp, Homo sapien
ccatcatgagaaactagcccctgtg

SEQ ID NO: 1941993 - DNA, 25 bp, Homo sapien
gaggcctcaccaagcttccaagaat

SEQ ID NO: 1941994 - DNA, 25 bp, Homo sapien
tgtaactaaccagtgaccagctctt

SEQ ID NO: 1941995 - DNA, 25 bp, Homo sapien
ttctgtaagaactccacctttgttc

SEQ ID NO: 1941996 - DNA, 25 bp, Homo sapien
tcagggcctggacaatcttccaaaa

SEQ ID NO: 1941997 - DNA, 25 bp, Homo sapien
acataacctctttgttgcctgtaac

SEQ ID NO: 1941998 - DNA, 25 bp, Homo sapien
ggcagccgagagtgctgtccccttt

SEQ ID NO: 1941999 - DNA, 25 bp, Homo sapien
tagcccagccctatgaaaagggcca

SEQ ID NO: 1942000 - DNA, 25 bp, Homo sapien
gctggcctccatagatctaaggcag

SEQ ID NO: 1942001 - DNA, 25 bp, Homo sapien
tatgtgcatcagtggttgttagccc

SEQ ID NO: 1942002 - DNA, 25 bp, Homo sapien
gtttgaggctgcacaaattcctgca

SEQ ID NO: 1942003 - DNA, 25 bp, Homo sapien
tgcatttcccttgggttgaatggta

SEQ ID NO: 1942004 - DNA, 25 bp, Homo sapien
ctgacttgagcagggctacgactct

SEQ ID NO: 1942005 - DNA, 25 bp, Homo sapien
ttgaatggtagggatgcgggcagtt

SEQ ID NO: 1942006 - DNA, 25 bp, Homo sapien
tttcctttatccatactgaggacca

SEQ ID NO: 1942007 - DNA, 25 bp, Homo sapien
tttatccatactgaggaccaagacc

SEQ ID NO: 1942008 - DNA, 25 bp, Homo sapien
cctttatccatactgaggaccaaga

SEQ ID NO: 1942009 - DNA, 25 bp, Homo sapien
ttatccatactgaggaccaagacct

SEQ ID NO: 1942010 - DNA, 25 bp, Homo sapien
aagtctgtgacaatgggtcacggga

SEQ ID NO: 1942011 - DNA, 25 bp, Homo sapien
tcagtgcgagtaacagtgaagatgt

SEQ ID NO: 1942012 - DNA, 25 bp, Homo sapien
ttttcatgctacatttttgctgtcc

SEQ ID NO: 1942013 - DNA, 25 bp, Homo sapien
ttgctgtccggctccaagtctgtga

SEQ ID NO: 1942014 - DNA, 25 bp, Homo sapien
agagtgctgggttgtagcgaccata

SEQ ID NO: 1942015 - DNA, 25 bp, Homo sapien
tactgttgacgcaacacatcccaac

SEQ ID NO: 1942016 - DNA, 25 bp, Homo sapien
ccacgctggacggaatttttactgc

SEQ ID NO: 1942017 - DNA, 25 bp, Homo sapien
tttttactgcgataattcatattcc

SEQ ID NO: 1942018 - DNA, 25 bp, Homo sapien
agtgcacagggttacaacgattagc

SEQ ID NO: 1942019 - DNA, 25 bp, Homo sapien
acagtgcacagggttacaacgatta

SEQ ID NO: 1942020 - DNA, 25 bp, Homo sapien
cttacagtgcacagggttacaacga

SEQ ID NO: 1942021 - DNA, 25 bp, Homo sapien
tgcacagggttacaacgattagcat

SEQ ID NO: 1942022 - DNA, 25 bp, Homo sapien
aaaatcctacttgattctcagagcc

SEQ ID NO: 1942023 - DNA, 25 bp, Homo sapien
cttggtctctgcctgccatacccaa

SEQ ID NO: 1942024 - DNA, 25 bp, Homo sapien
gaaaaatcctacttgattctcagag

SEQ ID NO: 1942025 - DNA, 25 bp, Homo sapien
tgccatacccaactccacatttctc

SEQ ID NO: 1942026 - DNA, 25 bp, Homo sapien
tggaacctacaccagttgttggtgg

SEQ ID NO: 1942027 - DNA, 25 bp, Homo sapien
aaaacaaaccacgaagacagcctgg

SEQ ID NO: 1942028 - DNA, 25 bp, Homo sapien
tgttccttgcgtgaagccattctct

SEQ ID NO: 1942029 - DNA, 25 bp, Homo sapien
ggtgtgagaactatcctttacatgg

SEQ ID NO: 1942030 - DNA, 25 bp, Homo sapien
aaaatgtatgttgccttacgcccaa

SEQ ID NO: 1942031 - DNA, 25 bp, Homo sapien
ggtggtcgcgcttgtcctacaggaa

SEQ ID NO: 1942032 - DNA, 25 bp, Homo sapien
tgaaatacaccagacacggaaggac

SEQ ID NO: 1942033 - DNA, 25 bp, Homo sapien
gaaggacacctcctatcacacggat

SEQ ID NO: 1942034 - DNA, 25 bp, Homo sapien
gagccggcataccattgctgccgag

SEQ ID NO: 1942035 - DNA, 25 bp, Homo sapien
aacaagtagtaacaagcagctcctg

SEQ ID NO: 1942036 - DNA, 25 bp, Homo sapien
tgcgtgtgcctcgatctgagccggc

SEQ ID NO: 1942037 - DNA, 25 bp, Homo sapien
cacccttgacctgctaaacagtcat

SEQ ID NO: 1942038 - DNA, 25 bp, Homo sapien
ctaggtaaagaccaaagccgttctg

SEQ ID NO: 1942039 - DNA, 25 bp, Homo sapien
tcgcagtgagcgtcagtgcacagtg

SEQ ID NO: 1942040 - DNA, 25 bp, Homo sapien
ttatctggtcttctcagccctcagc

SEQ ID NO: 1942041 - DNA, 25 bp, Homo sapien
aatggccctggatagctgctgcagc

SEQ ID NO: 1942042 - DNA, 25 bp, Homo sapien
cattcatcacccgtgtgggagacag

SEQ ID NO: 1942043 - DNA, 25 bp, Homo sapien
gaacattcatcacccgtgtgggaga

SEQ ID NO: 1942044 - DNA, 25 bp, Homo sapien
ccgtgtgggagacaggatagtaatt

SEQ ID NO: 1942045 - DNA, 25 bp, Homo sapien
catcacccgtgtgggagacaggata

SEQ ID NO: 1942046 - DNA, 25 bp, Homo sapien
taatgtagtcatgcgctccccatga

SEQ ID NO: 1942047 - DNA, 25 bp, Homo sapien
tccgccaggacctccgcagggagca

SEQ ID NO: 1942048 - DNA, 25 bp, Homo sapien
ccatgatgtgagagcgtgcagaacg

SEQ ID NO: 1942049 - DNA, 25 bp, Homo sapien
tgtgagagcgtgcagaacgccactc

SEQ ID NO: 1942050 - DNA, 25 bp, Homo sapien
gactcagttttacaggctatacggg

SEQ ID NO: 1942051 - DNA, 25 bp, Homo sapien
actcagttttacaggctatacggga

SEQ ID NO: 1942052 - DNA, 25 bp, Homo sapien
tcagttttacaggctatacgggaag

SEQ ID NO: 1942053 - DNA, 25 bp, Homo sapien
ctcagttttacaggctatacgggaa

SEQ ID NO: 1942054 - DNA, 25 bp, Homo sapien
cgcacaccttccaaatgctttgtat

SEQ ID NO: 1942055 - DNA, 25 bp, Homo sapien
ttccaaatgctttgtatagattagc

SEQ ID NO: 1942056 - DNA, 25 bp, Homo sapien
tcaccatcacctgttcttagcaaag

SEQ ID NO: 1942057 - DNA, 25 bp, Homo sapien
tgttcttagcaaaggtcgcacacct

SEQ ID NO: 1942058 - DNA, 25 bp, Homo sapien
tatggtttatgggatctttgcgcag

SEQ ID NO: 1942059 - DNA, 25 bp, Homo sapien
gagttctagcgctctgtggctacta

SEQ ID NO: 1942060 - DNA, 25 bp, Homo sapien
tcttttcagtaggtcagtcggcatg

SEQ ID NO: 1942061 - DNA, 25 bp, Homo sapien
cagggataagaggtagagttctagc

SEQ ID NO: 1942062 - DNA, 25 bp, Homo sapien
cagcaggatgtttggataaataagg

SEQ ID NO: 1942063 - DNA, 25 bp, Homo sapien
cattgagacacatcacaagggagtg

SEQ ID NO: 1942064 - DNA, 25 bp, Homo sapien
caggatgtttggataaataaggcat

SEQ ID NO: 1942065 - DNA, 25 bp, Homo sapien
ggccgtgcatgctgagcattgagac

SEQ ID NO: 1942066 - DNA, 25 bp, Homo sapien
gcaccgaggctgacatttgacttcc

SEQ ID NO: 1942067 - DNA, 25 bp, Homo sapien
cctgcaccgaggctgacatttgact

SEQ ID NO: 1942068 - DNA, 25 bp, Homo sapien
tgccctgcaccgaggctgacatttg

SEQ ID NO: 1942069 - DNA, 25 bp, Homo sapien
tgcaccgaggctgacatttgacttc

SEQ ID NO: 1942070 - DNA, 25 bp, Homo sapien
cgtaattcagccgagcctggtgggt

SEQ ID NO: 1942071 - DNA, 25 bp, Homo sapien
attcagccgagcctggtgggtcatg

SEQ ID NO: 1942072 - DNA, 25 bp, Homo sapien
taaaaccgtaattcagccgagcctg

SEQ ID NO: 1942073 - DNA, 25 bp, Homo sapien
aaccgtaattcagccgagcctggtg

SEQ ID NO: 1942074 - DNA, 25 bp, Homo sapien
gaaagggtagcttccaattatctac

SEQ ID NO: 1942075 - DNA, 25 bp, Homo sapien
cctggcctttgtgctgattctatag

SEQ ID NO: 1942076 - DNA, 25 bp, Homo sapien
ggctgttagaaaattgtgttgctca

SEQ ID NO: 1942077 - DNA, 25 bp, Homo sapien
gataatgcattaattccacatagcc

SEQ ID NO: 1942078 - DNA, 25 bp, Homo sapien
tcaagctgcccggagactggcgttt

SEQ ID NO: 1942079 - DNA, 25 bp, Homo sapien
tgtgctgctcagttacgggatggta

SEQ ID NO: 1942080 - DNA, 25 bp, Homo sapien
taagggaaggctctaactcggtgtc

SEQ ID NO: 1942081 - DNA, 25 bp, Homo sapien
cccagagcagtttcgaaagtggaaa

SEQ ID NO: 1942082 - DNA, 25 bp, Homo sapien
catgaaggcaggagagaacattgct

SEQ ID NO: 1942083 - DNA, 25 bp, Homo sapien
cagcaagtccgcagcatgaaggcag

SEQ ID NO: 1942084 - DNA, 25 bp, Homo sapien
cagcatgaaggcaggagagaacatt

SEQ ID NO: 1942085 - DNA, 25 bp, Homo sapien
gcatgaaggcaggagagaacattgc

SEQ ID NO: 1942086 - DNA, 25 bp, Homo sapien
ctgcaccacatgcggtggccgccat

SEQ ID NO: 1942087 - DNA, 25 bp, Homo sapien
catttttctgacactcagcacggtc

SEQ ID NO: 1942088 - DNA, 25 bp, Homo sapien
ttcattggaggactcatcaatatcc

SEQ ID NO: 1942089 - DNA, 25 bp, Homo sapien
aatgacacattcattggaggactca

SEQ ID NO: 1942090 - DNA, 25 bp, Homo sapien
gacacattcattggaggactcatca

SEQ ID NO: 1942091 - DNA, 25 bp, Homo sapien
gcagtactcgtgcacagcctgattt

SEQ ID NO: 1942092 - DNA, 25 bp, Homo sapien
catgggatcccgctttgattccttt

SEQ ID NO: 1942093 - DNA, 25 bp, Homo sapien
tctgtagactagtgccagtttgccc

SEQ ID NO: 1942094 - DNA, 25 bp, Homo sapien
tcttggaagcattgatcatgggatc

SEQ ID NO: 1942095 - DNA, 25 bp, Homo sapien
gcaagatacatcacgtctccaagaa

SEQ ID NO: 1942096 - DNA, 25 bp, Homo sapien
ctcgggtgtttttctgatcatggag

SEQ ID NO: 1942097 - DNA, 25 bp, Homo sapien
cacagttatgcatgccctttggtgc

SEQ ID NO: 1942098 - DNA, 25 bp, Homo sapien
ggcccaagtggaccacacagttatg

SEQ ID NO: 1942099 - DNA, 25 bp, Homo sapien
cacattatgcttgctcaacaggaga

SEQ ID NO: 1942100 - DNA, 25 bp, Homo sapien
aggtcaactcccaacggctgtctgg

SEQ ID NO: 1942101 - DNA, 25 bp, Homo sapien
tagttattttaagcaagaggcctcc

SEQ ID NO: 1942102 - DNA, 25 bp, Homo sapien
tatctgcaggtcagggagtctcgcg

SEQ ID NO: 1942103 - DNA, 25 bp, Homo sapien
tatggtgttcggcaaaaggacctcc

SEQ ID NO: 1942104 - DNA, 25 bp, Homo sapien
gctggagacatggtgaaataggcca

SEQ ID NO: 1942105 - DNA, 25 bp, Homo sapien
ggacctccaccaagactgaaagaaa

SEQ ID NO: 1942106 - DNA, 25 bp, Homo sapien
gactaagggattaggagtgtgaact

SEQ ID NO: 1942107 - DNA, 25 bp, Homo sapien
cagccagcagtctaatcattaagcg

SEQ ID NO: 1942108 - DNA, 25 bp, Homo sapien
ataaagaatcgtttgccagcagcca

SEQ ID NO: 1942109 - DNA, 25 bp, Homo sapien
gcagccagcagtctaatcattaagc

SEQ ID NO: 1942110 - DNA, 25 bp, Homo sapien
gcacataaagaatcgtttgccagca

SEQ ID NO: 1942111 - DNA, 25 bp, Homo sapien
ccgtgggtgccatgattatatagct

SEQ ID NO: 1942112 - DNA, 25 bp, Homo sapien
tgttcaatgctgttctcactgtcaa

SEQ ID NO: 1942113 - DNA, 25 bp, Homo sapien
tgctgaatgcagcaggctgttcaat

SEQ ID NO: 1942114 - DNA, 25 bp, Homo sapien
gctgaaggagcttattttccggaag

SEQ ID NO: 1942115 - DNA, 25 bp, Homo sapien
agtgagcagtgagcatgccattgta

SEQ ID NO: 1942116 - DNA, 25 bp, Homo sapien
aatcacttgagttagggaagttgag

SEQ ID NO: 1942117 - DNA, 25 bp, Homo sapien
tgagcagtgagcatgccattgtact

SEQ ID NO: 1942118 - DNA, 25 bp, Homo sapien
gagaatcacttgagttagggaagtt

SEQ ID NO: 1942119 - DNA, 25 bp, Homo sapien
cattccttccgctgtgaagctttgg

SEQ ID NO: 1942120 - DNA, 25 bp, Homo sapien
tcttctagttagagcagcggtctca

SEQ ID NO: 1942121 - DNA, 25 bp, Homo sapien
ggttatctccctcacgaaagagttg

SEQ ID NO: 1942122 - DNA, 25 bp, Homo sapien
ttctcaggttgagctaatcagctcc

SEQ ID NO: 1942123 - DNA, 25 bp, Homo sapien
caaaccgggatcatagctcttgcac

SEQ ID NO: 1942124 - DNA, 25 bp, Homo sapien
gataattgcagcacacttgtctgtg

SEQ ID NO: 1942125 - DNA, 25 bp, Homo sapien
tagctcttgcactgccatgcgtaga

SEQ ID NO: 1942126 - DNA, 25 bp, Homo sapien
cctgggttcgagcaaaccgggatca

SEQ ID NO: 1942127 - DNA, 25 bp, Homo sapien
gcaatacagctatagaagggcagga

SEQ ID NO: 1942128 - DNA, 25 bp, Homo sapien
caggaatcatcaggttaaaggaaca

SEQ ID NO: 1942129 - DNA, 25 bp, Homo sapien
aaaagacatgctggctggtcacagt

SEQ ID NO: 1942130 - DNA, 25 bp, Homo sapien
gaatcaggttcaaatatcccagaga

SEQ ID NO: 1942131 - DNA, 25 bp, Homo sapien
gatgtagcgggccctgatactgcca

SEQ ID NO: 1942132 - DNA, 25 bp, Homo sapien
aggaggtcaaggatgtagcgggccc

SEQ ID NO: 1942133 - DNA, 25 bp, Homo sapien
aggtcaaggatgtagcgggccctga

SEQ ID NO: 1942134 - DNA, 25 bp, Homo sapien
gtcaaggatgtagcgggccctgata

SEQ ID NO: 1942135 - DNA, 25 bp, Homo sapien
tatttccaggttctgtctaaagcct

SEQ ID NO: 1942136 - DNA, 25 bp, Homo sapien
gactttgctatccaggcccatctag

SEQ ID NO: 1942137 - DNA, 25 bp, Homo sapien
gatagccagcttagtgttacctacc

SEQ ID NO: 1942138 - DNA, 25 bp, Homo sapien
tctacgaataaacatggtcacaccg

SEQ ID NO: 1942139 - DNA, 25 bp, Homo sapien
tgcatttgaagtactcttggatgac

SEQ ID NO: 1942140 - DNA, 25 bp, Homo sapien
ttggcctgagactccttgccatagt

SEQ ID NO: 1942141 - DNA, 25 bp, Homo sapien
atttgaagtactcttggatgacatc

SEQ ID NO: 1942142 - DNA, 25 bp, Homo sapien
gcctgagactccttgccatagtcct

SEQ ID NO: 1942143 - DNA, 25 bp, Homo sapien
ctgcaaccaaccactttacagggtt

SEQ ID NO: 1942144 - DNA, 25 bp, Homo sapien
gtgttcatggcaaagggcctccacg

SEQ ID NO: 1942145 - DNA, 25 bp, Homo sapien
catggcaaagggcctccacgacttg

SEQ ID NO: 1942146 - DNA, 25 bp, Homo sapien
gttcatggcaaagggcctccacgac

SEQ ID NO: 1942147 - DNA, 25 bp, Homo sapien
tggcaaagggcctccacgacttgac

SEQ ID NO: 1942148 - DNA, 25 bp, Homo sapien
cggcagcttcgtgaattccacgtgc

SEQ ID NO: 1942149 - DNA, 25 bp, Homo sapien
cttcggcagcttcgtgaattccacg

SEQ ID NO: 1942150 - DNA, 25 bp, Homo sapien
cagttgggtacaagcacacaaagat

SEQ ID NO: 1942151 - DNA, 25 bp, Homo sapien
gtctaaggcttcggcagcttcgtga

SEQ ID NO: 1942152 - DNA, 25 bp, Homo sapien
gtgaagctgaatcttgaaggcaccc

SEQ ID NO: 1942153 - DNA, 25 bp, Homo sapien
ggcggtggattacgggtgaagctga

SEQ ID NO: 1942154 - DNA, 25 bp, Homo sapien
caagcctccgcctccgcacgactcg

SEQ ID NO: 1942155 - DNA, 25 bp, Homo sapien
gctgaatcttgaaggcacccaagcc

SEQ ID NO: 1942156 - DNA, 25 bp, Homo sapien
atttccacctcaagagtcctctgag

SEQ ID NO: 1942157 - DNA, 25 bp, Homo sapien
taacttaggctgctagaggctccag

SEQ ID NO: 1942158 - DNA, 25 bp, Homo sapien
gggttccaggacacataacttaggc

SEQ ID NO: 1942159 - DNA, 25 bp, Homo sapien
tacgtccagtttatcaagagagtaa

SEQ ID NO: 1942160 - DNA, 25 bp, Homo sapien
gaataattgtgccagtttctccaag

SEQ ID NO: 1942161 - DNA, 25 bp, Homo sapien
tttgagaaaggctgacggcaaagga

SEQ ID NO: 1942162 - DNA, 25 bp, Homo sapien
tgacggcaaaggaacagatctatgc

SEQ ID NO: 1942163 - DNA, 25 bp, Homo sapien
gcaaaggaacagatctatgctgtca

SEQ ID NO: 1942164 - DNA, 25 bp, Homo sapien
gatctatgctgtcatgtgtcggcat

SEQ ID NO: 1942165 - DNA, 25 bp, Homo sapien
cagcatggctgggtgcacctaaaaa

SEQ ID NO: 1942166 - DNA, 25 bp, Homo sapien
tgggttttacctgccacaatgatga

SEQ ID NO: 1942167 - DNA, 25 bp, Homo sapien
tgaattgagccattacaggccctgg

SEQ ID NO: 1942168 - DNA, 25 bp, Homo sapien
tgaaaggatagtcccacctgggcct

SEQ ID NO: 1942169 - DNA, 25 bp, Homo sapien
taataaatatctactaaactatatg

SEQ ID NO: 1942170 - DNA, 25 bp, Homo sapien
cctaaaaatcaacatagggctattc

SEQ ID NO: 1942171 - DNA, 25 bp, Homo sapien
catagggctattcttgtaagattac

SEQ ID NO: 1942172 - DNA, 25 bp, Homo sapien
ctgagactgtaactaaactaaactt

SEQ ID NO: 1942173 - DNA, 25 bp, Homo sapien
accatgttggctgggctgatctcaa

SEQ ID NO: 1942174 - DNA, 25 bp, Homo sapien
tgttggctgggctgatctcaaattc

SEQ ID NO: 1942175 - DNA, 25 bp, Homo sapien
caccatgttggctgggctgatctca

SEQ ID NO: 1942176 - DNA, 25 bp, Homo sapien
catgttggctgggctgatctcaaat

SEQ ID NO: 1942177 - DNA, 25 bp, Homo sapien
ggaaagacagtgttagctctcagtg

SEQ ID NO: 1942178 - DNA, 25 bp, Homo sapien
aagatggcgtaaggaggaaggcact

SEQ ID NO: 1942179 - DNA, 25 bp, Homo sapien
gagcagtcagacttgaagatggcgt

SEQ ID NO: 1942180 - DNA, 25 bp, Homo sapien
ttcaaacttagatatggtgccagca

SEQ ID NO: 1942181 - DNA, 25 bp, Homo sapien
cgatagcagacgtcacctttctcat

SEQ ID NO: 1942182 - DNA, 25 bp, Homo sapien
cactcagaaattccacgatagcaga

SEQ ID NO: 1942183 - DNA, 25 bp, Homo sapien
caacaaaacagcgtgactgagacct

SEQ ID NO: 1942184 - DNA, 25 bp, Homo sapien
gaaggtggtcaacaaaacagcgtga

SEQ ID NO: 1942185 - DNA, 25 bp, Homo sapien
tctgagatgatgttattggtactgc

SEQ ID NO: 1942186 - DNA, 25 bp, Homo sapien
tgactactgttgtattggagatcac

SEQ ID NO: 1942187 - DNA, 25 bp, Homo sapien
ttatcaaagaagaatcatagcatcg

SEQ ID NO: 1942188 - DNA, 25 bp, Homo sapien
catagcatcgtaaatccagttggag

SEQ ID NO: 1942189 - DNA, 25 bp, Homo sapien
cctcaaatccgggagtcattctttt

SEQ ID NO: 1942190 - DNA, 25 bp, Homo sapien
accaaacctcaaatccgggagtcat

SEQ ID NO: 1942191 - DNA, 25 bp, Homo sapien
atttcacatcgacccattctgtcca

SEQ ID NO: 1942192 - DNA, 25 bp, Homo sapien
tctttttccgttggcaagtcccgca

SEQ ID NO: 1942193 - DNA, 25 bp, Homo sapien
cacctccctgtattgcagctgtcag

SEQ ID NO: 1942194 - DNA, 25 bp, Homo sapien
agcagtgtagggttgtataccgact

SEQ ID NO: 1942195 - DNA, 25 bp, Homo sapien
gcagtgtagggttgtataccgactt

SEQ ID NO: 1942196 - DNA, 25 bp, Homo sapien
cagtgtagggttgtataccgacttt

SEQ ID NO: 1942197 - DNA, 25 bp, Homo sapien
acatcattccgttcgggtgatccca

SEQ ID NO: 1942198 - DNA, 25 bp, Homo sapien
ttccgttcgggtgatcccacagatt

SEQ ID NO: 1942199 - DNA, 25 bp, Homo sapien
ttcatggacatcattccgttcgggt

SEQ ID NO: 1942200 - DNA, 25 bp, Homo sapien
ctttctccctcattgcccctaatcc

SEQ ID NO: 1942201 - DNA, 25 bp, Homo sapien
ttaaaccctcccgggactctgcaga

SEQ ID NO: 1942202 - DNA, 25 bp, Homo sapien
ccgggactctgcagaacccgctgac

SEQ ID NO: 1942203 - DNA, 25 bp, Homo sapien
tcccgggactctgcagaacccgctg

SEQ ID NO: 1942204 - DNA, 25 bp, Homo sapien
cctcccgggactctgcagaacccgc

SEQ ID NO: 1942205 - DNA, 25 bp, Homo sapien
taagctgatctcctgtacagtagtg

SEQ ID NO: 1942206 - DNA, 25 bp, Homo sapien
ggaagtttgcgctcccgaagtcctg

SEQ ID NO: 1942207 - DNA, 25 bp, Homo sapien
gggaccatcaccatcacaggtaagg

SEQ ID NO: 1942208 - DNA, 25 bp, Homo sapien
tcagtggcgggaccgttattggcat

SEQ ID NO: 1942209 - DNA, 25 bp, Homo sapien
gctaatacttgtttagtgacccaca

SEQ ID NO: 1942210 - DNA, 25 bp, Homo sapien
gaagatgctaatacttgtttagtga

SEQ ID NO: 1942211 - DNA, 25 bp, Homo sapien
gcaaaagacctctttctcgttgtga

SEQ ID NO: 1942212 - DNA, 25 bp, Homo sapien
cctctttctcgttgtgaagatgcta

SEQ ID NO: 1942213 - DNA, 25 bp, Homo sapien
cccataaggctctgtaagtgatggc

SEQ ID NO: 1942214 - DNA, 25 bp, Homo sapien
aagtggctgtccatttgcgttctca

SEQ ID NO: 1942215 - DNA, 25 bp, Homo sapien
tgatgggaacttgactgatagcctc

SEQ ID NO: 1942216 - DNA, 25 bp, Homo sapien
gcgttctcacagatgactatttttg

SEQ ID NO: 1942217 - DNA, 25 bp, Homo sapien
gagccccttcaagccagttcttgtg

SEQ ID NO: 1942218 - DNA, 25 bp, Homo sapien
gaatgtccccttctttagatttgtg

SEQ ID NO: 1942219 - DNA, 25 bp, Homo sapien
cgtggtgacaatgcacacattgcac

SEQ ID NO: 1942220 - DNA, 25 bp, Homo sapien
tgttgaggtcggacttagttaccac

SEQ ID NO: 1942221 - DNA, 25 bp, Homo sapien
tgcaaatctctgtaagatctcactt

SEQ ID NO: 1942222 - DNA, 25 bp, Homo sapien
gaaagaagtagacattaatctatta

SEQ ID NO: 1942223 - DNA, 25 bp, Homo sapien
gaattgcctcgcattaaagaaagta

SEQ ID NO: 1942224 - DNA, 25 bp, Homo sapien
gacattaatctattaagatttgcaa

SEQ ID NO: 1942225 - DNA, 25 bp, Homo sapien
gatgatggtcatgccttgttagcag

SEQ ID NO: 1942226 - DNA, 25 bp, Homo sapien
gagaagtcactagttgaaccgaaag

SEQ ID NO: 1942227 - DNA, 25 bp, Homo sapien
gaggcttaaccaaagagtccccaga

SEQ ID NO: 1942228 - DNA, 25 bp, Homo sapien
gctgatactgatgcctcaggaggct

SEQ ID NO: 1942229 - DNA, 25 bp, Homo sapien
cagagcctcctagatgtaacattcc

SEQ ID NO: 1942230 - DNA, 25 bp, Homo sapien
aattggtcactttcctattacacgg

SEQ ID NO: 1942231 - DNA, 25 bp, Homo sapien
tggactgcattcacacatggcatga

SEQ ID NO: 1942232 - DNA, 25 bp, Homo sapien
tatataacccacgaaaaacagagcc

SEQ ID NO: 1942233 - DNA, 25 bp, Homo sapien
gattttactcaaacttggtactcca

SEQ ID NO: 1942234 - DNA, 25 bp, Homo sapien
gctgattagctggaaagcctagttt

SEQ ID NO: 1942235 - DNA, 25 bp, Homo sapien
gcctcagcctacattaagggttttg

SEQ ID NO: 1942236 - DNA, 25 bp, Homo sapien
caattgtcacacgaagaatagtgtc

SEQ ID NO: 1942237 - DNA, 25 bp, Homo sapien
cacagttgcgattccatgagtagct

SEQ ID NO: 1942238 - DNA, 25 bp, Homo sapien
gaagaacaccaacagtagcatgaaa

SEQ ID NO: 1942239 - DNA, 25 bp, Homo sapien
caagctctgtatctatgtccgttga

SEQ ID NO: 1942240 - DNA, 25 bp, Homo sapien
cctctctatggcaggaagacattct

SEQ ID NO: 1942241 - DNA, 25 bp, Homo sapien
tggcctaacggaagattaatgaaca

SEQ ID NO: 1942242 - DNA, 25 bp, Homo sapien
ttttactgctttcgggccaatggag

SEQ ID NO: 1942243 - DNA, 25 bp, Homo sapien
cacaaattcccctgtaagatgagta

SEQ ID NO: 1942244 - DNA, 25 bp, Homo sapien
tgttgccagtaaactatcagcattg

SEQ ID NO: 1942245 - DNA, 25 bp, Homo sapien
cattctgaagtaagacacctggagg

SEQ ID NO: 1942246 - DNA, 25 bp, Homo sapien
gccgtatttctaagcagcacgctgt

SEQ ID NO: 1942247 - DNA, 25 bp, Homo sapien
tatcatgccatggagaactacagtt

SEQ ID NO: 1942248 - DNA, 25 bp, Homo sapien
gaaagaaagtcgatacattccaggt

SEQ ID NO: 1942249 - DNA, 25 bp, Homo sapien
tctagggcaaaaacatccgagttct

SEQ ID NO: 1942250 - DNA, 25 bp, Homo sapien
cagagtctgtttgtccaccatggtg

SEQ ID NO: 1942251 - DNA, 25 bp, Homo sapien
aaaggcttcccggtgtgtatgtaca

SEQ ID NO: 1942252 - DNA, 25 bp, Homo sapien
tgatggaagctaacactgggtggtc

SEQ ID NO: 1942253 - DNA, 25 bp, Homo sapien
tgtcacttatcatcccggcttcagg

SEQ ID NO: 1942254 - DNA, 25 bp, Homo sapien
ttcccgaggtcagctgcattgctac

SEQ ID NO: 1942255 - DNA, 25 bp, Homo sapien
agagatgtgctgcagctcactgtca

SEQ ID NO: 1942256 - DNA, 25 bp, Homo sapien
ttccatggcatctttcccgaggtca

SEQ ID NO: 1942257 - DNA, 25 bp, Homo sapien
taagagatagctgaagatgtcgggc

SEQ ID NO: 1942258 - DNA, 25 bp, Homo sapien
taagctgctccggagagtgaagcgc

SEQ ID NO: 1942259 - DNA, 25 bp, Homo sapien
cacacaggtggcaggcatagtactt

SEQ ID NO: 1942260 - DNA, 25 bp, Homo sapien
tatttgtccgattcacctgggccag

SEQ ID NO: 1942261 - DNA, 25 bp, Homo sapien
taatccacagattcttagagcagtt

SEQ ID NO: 1942262 - DNA, 25 bp, Homo sapien
tgccagtctaggtgttaacataaag

SEQ ID NO: 1942263 - DNA, 25 bp, Homo sapien
aatacgtgagtaaatgccagtctag

SEQ ID NO: 1942264 - DNA, 25 bp, Homo sapien
aaataatcaagagacgaagttcacg

SEQ ID NO: 1942265 - DNA, 25 bp, Homo sapien
tgtgtgccttgaagtatacatcgcc

SEQ ID NO: 1942266 - DNA, 25 bp, Homo sapien
ggaaaccaaactctcgctgagcgtt

SEQ ID NO: 1942267 - DNA, 25 bp, Homo sapien
tgcaaccgtgcagtcacacaggaaa

SEQ ID NO: 1942268 - DNA, 25 bp, Homo sapien
tgaagcaagaactgatttgtgtgcc

SEQ ID NO: 1942269 - DNA, 25 bp, Homo sapien
gcagtagaataagtccatggttggc

SEQ ID NO: 1942270 - DNA, 25 bp, Homo sapien
cagtagaataagtccatggttggcc

SEQ ID NO: 1942271 - DNA, 25 bp, Homo sapien
ctgttgcagtagaataagtccatgg

SEQ ID NO: 1942272 - DNA, 25 bp, Homo sapien
ttgcagtagaataagtccatggttg

SEQ ID NO: 1942273 - DNA, 25 bp, Homo sapien
gcacactgacacctccgttgctggg

SEQ ID NO: 1942274 - DNA, 25 bp, Homo sapien
actgacacctccgttgctgggttca

SEQ ID NO: 1942275 - DNA, 25 bp, Homo sapien
acactgacacctccgttgctgggtt

SEQ ID NO: 1942276 - DNA, 25 bp, Homo sapien
tgacacctccgttgctgggttcaag

SEQ ID NO: 1942277 - DNA, 25 bp, Homo sapien
aaggcttcactctcgaggctgggca

SEQ ID NO: 1942278 - DNA, 25 bp, Homo sapien
cactctcgaggctgggcagcttggc

SEQ ID NO: 1942279 - DNA, 25 bp, Homo sapien
ggctgggcagcttggcagcctgaac

SEQ ID NO: 1942280 - DNA, 25 bp, Homo sapien
ctcaaaggcttcactctcgaggctg

SEQ ID NO: 1942281 - DNA, 25 bp, Homo sapien
tcatgtttggagagccaaagagcat

SEQ ID NO: 1942282 - DNA, 25 bp, Homo sapien
catgggcatgctgtgggtacttgaa

SEQ ID NO: 1942283 - DNA, 25 bp, Homo sapien
gaaagcacatccacttactcatggg

SEQ ID NO: 1942284 - DNA, 25 bp, Homo sapien
atcccaggccgatgctacagatgag

SEQ ID NO: 1942285 - DNA, 25 bp, Homo sapien
aacatgattagcgtttattctctgc

SEQ ID NO: 1942286 - DNA, 25 bp, Homo sapien
tctgctgctagtggtagagattgct

SEQ ID NO: 1942287 - DNA, 25 bp, Homo sapien
tgcagattttggaggttactgaaaa

SEQ ID NO: 1942288 - DNA, 25 bp, Homo sapien
gatataaaagcaggtgtcaccgtgg

SEQ ID NO: 1942289 - DNA, 25 bp, Homo sapien
gggcgtagactacactccactgtag

SEQ ID NO: 1942290 - DNA, 25 bp, Homo sapien
tggcaccggcgtatcacttcttgta

SEQ ID NO: 1942291 - DNA, 25 bp, Homo sapien
ggcttcaataactggacaattcttt

SEQ ID NO: 1942292 - DNA, 25 bp, Homo sapien
cactgttgaccatcagtggcaccgg

SEQ ID NO: 1942293 - DNA, 25 bp, Homo sapien
tcagggtactcccacactaaaacgc

SEQ ID NO: 1942294 - DNA, 25 bp, Homo sapien
cagtcccaattctctattaaacgtt

SEQ ID NO: 1942295 - DNA, 25 bp, Homo sapien
cactaaaacgctagtggtgtgtaca

SEQ ID NO: 1942296 - DNA, 25 bp, Homo sapien
tcctggatacacaacaagatcattc

SEQ ID NO: 1942297 - DNA, 25 bp, Homo sapien
tcggccgtgctgtcctccccgccgc

SEQ ID NO: 1942298 - DNA, 25 bp, Homo sapien
gggtgtggaggaggcgcctctgggc

SEQ ID NO: 1942299 - DNA, 25 bp, Homo sapien
tgggcagcctcggccgtgctgtcct

SEQ ID NO: 1942300 - DNA, 25 bp, Homo sapien
aggaggcgcctctgggcagcctcgg

SEQ ID NO: 1942301 - DNA, 25 bp, Homo sapien
tgccgccgcggtcggtgtctccggc

SEQ ID NO: 1942302 - DNA, 25 bp, Homo sapien
gccgccgcggtcggtgtctccggcg

SEQ ID NO: 1942303 - DNA, 25 bp, Homo sapien
ctgccgccgcggtcggtgtctccgg

SEQ ID NO: 1942304 - DNA, 25 bp, Homo sapien
cgtaagatgtttctgttagggttga

SEQ ID NO: 1942305 - DNA, 25 bp, Homo sapien
catggttatttcagcaacgattttc

SEQ ID NO: 1942306 - DNA, 25 bp, Homo sapien
cttgcagatgagttgagcggcgtaa

SEQ ID NO: 1942307 - DNA, 25 bp, Homo sapien
cagcaacgattttcgtttttgaagt

SEQ ID NO: 1942308 - DNA, 25 bp, Homo sapien
gaaacagattttcctagctccggcc

SEQ ID NO: 1942309 - DNA, 25 bp, Homo sapien
tctcagagcttagggagcataggag

SEQ ID NO: 1942310 - DNA, 25 bp, Homo sapien
gaagacctgctttagatagtagaca

SEQ ID NO: 1942311 - DNA, 25 bp, Homo sapien
ctttgtaaaggcatagagcagggtc

SEQ ID NO: 1942312 - DNA, 25 bp, Homo sapien
tgattcgcccaaggttataacagca

SEQ ID NO: 1942313 - DNA, 25 bp, Homo sapien
taagttaaccattctgttccagtgc

SEQ ID NO: 1942314 - DNA, 25 bp, Homo sapien
tagataccactttgaggactttggg

SEQ ID NO: 1942315 - DNA, 25 bp, Homo sapien
ccagattggtcttaatagtgagctc

SEQ ID NO: 1942316 - DNA, 25 bp, Homo sapien
cacctattaaatgatcacccagtag

SEQ ID NO: 1942317 - DNA, 25 bp, Homo sapien
aaaacacctattaaatgatcaccca

SEQ ID NO: 1942318 - DNA, 25 bp, Homo sapien
aacacctattaaatgatcacccagt

SEQ ID NO: 1942319 - DNA, 25 bp, Homo sapien
aaacacctattaaatgatcacccag

SEQ ID NO: 1942320 - DNA, 25 bp, Homo sapien
cttgcagtgacactttggttatcac

SEQ ID NO: 1942321 - DNA, 25 bp, Homo sapien
cctgatctcatctcaagccaccctt

SEQ ID NO: 1942322 - DNA, 25 bp, Homo sapien
tgtagaacttgaatatctcttgcag

SEQ ID NO: 1942323 - DNA, 25 bp, Homo sapien
gccgaacatttaatttttgattgta

SEQ ID NO: 1942324 - DNA, 25 bp, Homo sapien
tcagaaaaatactcgtcccagctca

SEQ ID NO: 1942325 - DNA, 25 bp, Homo sapien
aaaaatactcgtcccagctcaaaca

SEQ ID NO: 1942326 - DNA, 25 bp, Homo sapien
cagaaaaatactcgtcccagctcaa

SEQ ID NO: 1942327 - DNA, 25 bp, Homo sapien
aatactcgtcccagctcaaacatta

SEQ ID NO: 1942328 - DNA, 25 bp, Homo sapien
gacaatcatccactccaagcggagt

SEQ ID NO: 1942329 - DNA, 25 bp, Homo sapien
ctcattcaggtgattccgcattaga

SEQ ID NO: 1942330 - DNA, 25 bp, Homo sapien
ggtgattccgcattagatctgttag

SEQ ID NO: 1942331 - DNA, 25 bp, Homo sapien
atctgttagttccatgcagtgctga

SEQ ID NO: 1942332 - DNA, 25 bp, Homo sapien
cagtctccaaagaggaatcaacatc

SEQ ID NO: 1942333 - DNA, 25 bp, Homo sapien
caaggaatatgggtggcctccagtc

SEQ ID NO: 1942334 - DNA, 25 bp, Homo sapien
gaatgatacaatatgaggattccac

SEQ ID NO: 1942335 - DNA, 25 bp, Homo sapien
ggtgaggaaatggattccactcgca

SEQ ID NO: 1942336 - DNA, 25 bp, Homo sapien
taagctgagaccagcggcatttggc

SEQ ID NO: 1942337 - DNA, 25 bp, Homo sapien
gacagataaaaaatgccacccaggt

SEQ ID NO: 1942338 - DNA, 25 bp, Homo sapien
taaatagagccacccgtgaaggact

SEQ ID NO: 1942339 - DNA, 25 bp, Homo sapien
tcaaggtactcttcactcaggtggg

SEQ ID NO: 1942340 - DNA, 25 bp, Homo sapien
gtgcttttcatgtttgaccagacag

SEQ ID NO: 1942341 - DNA, 25 bp, Homo sapien
cagttggactgtcaaatcggtgtct

SEQ ID NO: 1942342 - DNA, 25 bp, Homo sapien
tgtgtgcacagtcgacaaccaggaa

SEQ ID NO: 1942343 - DNA, 25 bp, Homo sapien
gcaatagctaacacaaccacaggaa

SEQ ID NO: 1942344 - DNA, 25 bp, Homo sapien
aaactgtgttgatggagtccactga

SEQ ID NO: 1942345 - DNA, 25 bp, Homo sapien
gatgatctctactgtcctgtgctgg

SEQ ID NO: 1942346 - DNA, 25 bp, Homo sapien
gattcctaaaccatcactaatcaat

SEQ ID NO: 1942347 - DNA, 25 bp, Homo sapien
gctaaaagcaacatagcttggtttt

SEQ ID NO: 1942348 - DNA, 25 bp, Homo sapien
gacaactgcagatagctttgatgtg

SEQ ID NO: 1942349 - DNA, 25 bp, Homo sapien
tggtgccaagatcagtgacaactgc

SEQ ID NO: 1942350 - DNA, 25 bp, Homo sapien
caataagccatggtaggtttttgaa

SEQ ID NO: 1942351 - DNA, 25 bp, Homo sapien
agtggaacatagcattcaataagcc

SEQ ID NO: 1942352 - DNA, 25 bp, Homo sapien
tactgatggaccattaggcttccaa

SEQ ID NO: 1942353 - DNA, 25 bp, Homo sapien
taaatgcctgcatgacggagctaat

SEQ ID NO: 1942354 - DNA, 25 bp, Homo sapien
tattcaacttataggcgacaacgtg

SEQ ID NO: 1942355 - DNA, 25 bp, Homo sapien
gatcagaagcagtcatgaactcttg

SEQ ID NO: 1942356 - DNA, 25 bp, Homo sapien
taaggaattgacacgttttatcgta

SEQ ID NO: 1942357 - DNA, 25 bp, Homo sapien
cccagtagaaatcaggagtaatcag

SEQ ID NO: 1942358 - DNA, 25 bp, Homo sapien
tcttcggccaatgctaaggaattga

SEQ ID NO: 1942359 - DNA, 25 bp, Homo sapien
gtctgaactcaagtttatacggtgc

SEQ ID NO: 1942360 - DNA, 25 bp, Homo sapien
tttatcttgaattaaaaatcattgt

SEQ ID NO: 1942361 - DNA, 25 bp, Homo sapien
tacatagtgctttatgaaaactttt

SEQ ID NO: 1942362 - DNA, 25 bp, Homo sapien
aatatttacatagtgctttatgaaa

SEQ ID NO: 1942363 - DNA, 25 bp, Homo sapien
tatttacatagtgctttatgaaaac

SEQ ID NO: 1942364 - DNA, 25 bp, Homo sapien
tcttcatgagatagtttcactttct

SEQ ID NO: 1942365 - DNA, 25 bp, Homo sapien
tctgcataacttcttcatgagatag

SEQ ID NO: 1942366 - DNA, 25 bp, Homo sapien
accgattttctgcataacttcttca

SEQ ID NO: 1942367 - DNA, 25 bp, Homo sapien
agagcaaagagttcaccgattttct

SEQ ID NO: 1942368 - DNA, 25 bp, Homo sapien
gaattgactgaatagattcaataaa

SEQ ID NO: 1942369 - DNA, 25 bp, Homo sapien
ctcaggaattgactgaatagattca

SEQ ID NO: 1942370 - DNA, 25 bp, Homo sapien
ctgaatagattcaataaatttatcc

SEQ ID NO: 1942371 - DNA, 25 bp, Homo sapien
caggaattgactgaatagattcaat

SEQ ID NO: 1942372 - DNA, 25 bp, Homo sapien
atcatctaaatccagctctgaattt

SEQ ID NO: 1942373 - DNA, 25 bp, Homo sapien
tgatttcccccctgtgaagttttga

SEQ ID NO: 1942374 - DNA, 25 bp, Homo sapien
gcaaacttctctagaatggcatcat

SEQ ID NO: 1942375 - DNA, 25 bp, Homo sapien
cttctctagaatggcatcatctaaa

SEQ ID NO: 1942376 - DNA, 25 bp, Homo sapien
accagtgcgatttcatagggctgaa

SEQ ID NO: 1942377 - DNA, 25 bp, Homo sapien
ttcatagggctgaatttcatgtttt

SEQ ID NO: 1942378 - DNA, 25 bp, Homo sapien
tgtaccagtgcgatttcatagggct

SEQ ID NO: 1942379 - DNA, 25 bp, Homo sapien
cccagtgtaccagtgcgatttcata

SEQ ID NO: 1942380 - DNA, 25 bp, Homo sapien
gtctttcacattccaaaacacagca

SEQ ID NO: 1942381 - DNA, 25 bp, Homo sapien
tttgtctttcacattccaaaacaca

SEQ ID NO: 1942382 - DNA, 25 bp, Homo sapien
tgtctttcacattccaaaacacagc

SEQ ID NO: 1942383 - DNA, 25 bp, Homo sapien
gttttgtctttcacattccaaaaca

SEQ ID NO: 1942384 - DNA, 25 bp, Homo sapien
tgttccaggatcaccttcttttgca

SEQ ID NO: 1942385 - DNA, 25 bp, Homo sapien
tattgttccaggatcaccttctttt

SEQ ID NO: 1942386 - DNA, 25 bp, Homo sapien
aagaatattgttccaggatcacctt

SEQ ID NO: 1942387 - DNA, 25 bp, Homo sapien
caggatcaccttcttttgcagaatt

SEQ ID NO: 1942388 - DNA, 25 bp, Homo sapien
ttatgatacaatcctttcaaaagaa

SEQ ID NO: 1942389 - DNA, 25 bp, Homo sapien
ttataaagagattcaacatccactt

SEQ ID NO: 1942390 - DNA, 25 bp, Homo sapien
cttaagatagtatcataggaaaatt

SEQ ID NO: 1942391 - DNA, 25 bp, Homo sapien
gattttaatgagttctctgtaaata

SEQ ID NO: 1942392 - DNA, 25 bp, Homo sapien
cagatttcccagatgatactcatct

SEQ ID NO: 1942393 - DNA, 25 bp, Homo sapien
tacttcaacatatccgtgggaggcc

SEQ ID NO: 1942394 - DNA, 25 bp, Homo sapien
tctaggcaagcttgttacttcaaca

SEQ ID NO: 1942395 - DNA, 25 bp, Homo sapien
catctgccgttgcaaatgctgtgca

SEQ ID NO: 1942396 - DNA, 25 bp, Homo sapien
gcataacatgggttaccaagaggct

SEQ ID NO: 1942397 - DNA, 25 bp, Homo sapien
atgagcataacatgggttaccaaga

SEQ ID NO: 1942398 - DNA, 25 bp, Homo sapien
catgggttaccaagaggctgaagca

SEQ ID NO: 1942399 - DNA, 25 bp, Homo sapien
tgctgagcaccctactggactccat

SEQ ID NO: 1942400 - DNA, 25 bp, Homo sapien
tgaaaagaacttgctccctcccgcc

SEQ ID NO: 1942401 - DNA, 25 bp, Homo sapien
cctcccgccaggcaaaaagatggaa

SEQ ID NO: 1942402 - DNA, 25 bp, Homo sapien
ggtgatacaagggatgggatgaaga

SEQ ID NO: 1942403 - DNA, 25 bp, Homo sapien
aagggtgatacaagggatgggatga

SEQ ID NO: 1942404 - DNA, 25 bp, Homo sapien
ttgtaaactggcagctcggagaacc

SEQ ID NO: 1942405 - DNA, 25 bp, Homo sapien
tctgaccgagtggaagatctggcta

SEQ ID NO: 1942406 - DNA, 25 bp, Homo sapien
gtcacaagctagtccactgaaggat

SEQ ID NO: 1942407 - DNA, 25 bp, Homo sapien
tcggagaaccatccaactcaagagt

SEQ ID NO: 1942408 - DNA, 25 bp, Homo sapien
ttttcagaatcaagacttgaagaca

SEQ ID NO: 1942409 - DNA, 25 bp, Homo sapien
ttctgatagattcagaagtcttcat

SEQ ID NO: 1942410 - DNA, 25 bp, Homo sapien
gctcaggggctacttttcagaatca

SEQ ID NO: 1942411 - DNA, 25 bp, Homo sapien
aggctcaggggctacttttcagaat

SEQ ID NO: 1942412 - DNA, 25 bp, Homo sapien
caatgatcactaagcacgagagcca

SEQ ID NO: 1942413 - DNA, 25 bp, Homo sapien
cacactggtttagcatgagcaatga

SEQ ID NO: 1942414 - DNA, 25 bp, Homo sapien
gctagttctcttacgttggcggtaa

SEQ ID NO: 1942415 - DNA, 25 bp, Homo sapien
gaagtctgagtgactgctagttctc

SEQ ID NO: 1942416 - DNA, 25 bp, Homo sapien
tcctggatggctgtctggtcctgga

SEQ ID NO: 1942417 - DNA, 25 bp, Homo sapien
tcacagacagaactggaaggttggt

SEQ ID NO: 1942418 - DNA, 25 bp, Homo sapien
gaaggttggtcctggatggctgtct

SEQ ID NO: 1942419 - DNA, 25 bp, Homo sapien
cctggatgcttttagtggtctcttc

SEQ ID NO: 1942420 - DNA, 25 bp, Homo sapien
tatcaggaaggaacaaatccaagct

SEQ ID NO: 1942421 - DNA, 25 bp, Homo sapien
gagacttattcaaaccactagctgt

SEQ ID NO: 1942422 - DNA, 25 bp, Homo sapien
aatccaagctttgacgtattgtcag

SEQ ID NO: 1942423 - DNA, 25 bp, Homo sapien
tattgtcagtgtgctgcatgttgta

SEQ ID NO: 1942424 - DNA, 25 bp, Homo sapien
ccctaggtagcaggcatatttctgt

SEQ ID NO: 1942425 - DNA, 25 bp, Homo sapien
gtagcaggcatatttctgttagaaa

SEQ ID NO: 1942426 - DNA, 25 bp, Homo sapien
tataatatttccctaggtagcaggc

SEQ ID NO: 1942427 - DNA, 25 bp, Homo sapien
tatttccctaggtagcaggcatatt

SEQ ID NO: 1942428 - DNA, 25 bp, Homo sapien
agtcacacggtcaaatgcatgttca

SEQ ID NO: 1942429 - DNA, 25 bp, Homo sapien
gagtcacacggtcaaatgcatgttc

SEQ ID NO: 1942430 - DNA, 25 bp, Homo sapien
agagtcacacggtcaaatgcatgtt

SEQ ID NO: 1942431 - DNA, 25 bp, Homo sapien
aaaatcccttcaaaagctcgcattc

SEQ ID NO: 1942432 - DNA, 25 bp, Homo sapien
tcccttcaaaagctcgcattctgtg

SEQ ID NO: 1942433 - DNA, 25 bp, Homo sapien
tcaaaagctcgcattctgtgcttca

SEQ ID NO: 1942434 - DNA, 25 bp, Homo sapien
ccttcaaaagctcgcattctgtgct

SEQ ID NO: 1942435 - DNA, 25 bp, Homo sapien
atcacggtaagaggcaaagggtcac

SEQ ID NO: 1942436 - DNA, 25 bp, Homo sapien
ctacgattcgagagctaagtggcgc

SEQ ID NO: 1942437 - DNA, 25 bp, Homo sapien
tcatctttgggagtatgccgttcaa

SEQ ID NO: 1942438 - DNA, 25 bp, Homo sapien
ttaccgcggtgcactggctcaaaaa

SEQ ID NO: 1942439 - DNA, 25 bp, Homo sapien
ctctccgccggaagagaagaaggaa

SEQ ID NO: 1942440 - DNA, 25 bp, Homo sapien
tgcagggaaagagccgcacccccag

SEQ ID NO: 1942441 - DNA, 25 bp, Homo sapien
cgcttcctcggcaggactgcaggga

SEQ ID NO: 1942442 - DNA, 25 bp, Homo sapien
gagaagaaggaagcgccagggacgc

SEQ ID NO: 1942443 - DNA, 25 bp, Homo sapien
actgcgcagccgcactgaactctgg

SEQ ID NO: 1942444 - DNA, 25 bp, Homo sapien
gaactctggtcccacttagcgggag

SEQ ID NO: 1942445 - DNA, 25 bp, Homo sapien
aaactcgggccacgtgactgtctga

SEQ ID NO: 1942446 - DNA, 25 bp, Homo sapien
ttccggctttcgctcgcttccatat

SEQ ID NO: 1942447 - DNA, 25 bp, Homo sapien
gaaataagtgtgatctgtctctctc

SEQ ID NO: 1942448 - DNA, 25 bp, Homo sapien
gaacatctttggtcattgcttagca

SEQ ID NO: 1942449 - DNA, 25 bp, Homo sapien
catcccgctacataatggagttttg

SEQ ID NO: 1942450 - DNA, 25 bp, Homo sapien
tacagatttaatattagccgacttc

SEQ ID NO: 1942451 - DNA, 25 bp, Homo sapien
gatgttaggaaactcaaaattgaac

SEQ ID NO: 1942452 - DNA, 25 bp, Homo sapien
taatgactctttgtaaagagaggca

SEQ ID NO: 1942453 - DNA, 25 bp, Homo sapien
gattgacctgtagaatggatgttag

SEQ ID NO: 1942454 - DNA, 25 bp, Homo sapien
taatagctctaggaaaatgcgcatc

SEQ ID NO: 1942455 - DNA, 25 bp, Homo sapien
aatttcacttaatgcgaagcctttc

SEQ ID NO: 1942456 - DNA, 25 bp, Homo sapien
acttaatgcgaagcctttcttgtcc

SEQ ID NO: 1942457 - DNA, 25 bp, Homo sapien
ttcacttaatgcgaagcctttcttg

SEQ ID NO: 1942458 - DNA, 25 bp, Homo sapien
tcaaatttcacttaatgcgaagcct

SEQ ID NO: 1942459 - DNA, 25 bp, Homo sapien
ctaagggtcaggcggctgagaaata

SEQ ID NO: 1942460 - DNA, 25 bp, Homo sapien
tccctaagggtcaggcggctgagaa

SEQ ID NO: 1942461 - DNA, 25 bp, Homo sapien
taagggtcaggcggctgagaaataa

SEQ ID NO: 1942462 - DNA, 25 bp, Homo sapien
ttccctaagggtcaggcggctgaga

SEQ ID NO: 1942463 - DNA, 25 bp, Homo sapien
atcttggcttgctgaagctccgcca

SEQ ID NO: 1942464 - DNA, 25 bp, Homo sapien
ttggcttgctgaagctccgccaccc

SEQ ID NO: 1942465 - DNA, 25 bp, Homo sapien
tgctatcttggcttgctgaagctcc

SEQ ID NO: 1942466 - DNA, 25 bp, Homo sapien
ggcttgctgaagctccgccaccctg

SEQ ID NO: 1942467 - DNA, 25 bp, Homo sapien
ccgatgatgtagatccattggattt

SEQ ID NO: 1942468 - DNA, 25 bp, Homo sapien
ggactgctttgagcttttcccactt

SEQ ID NO: 1942469 - DNA, 25 bp, Homo sapien
tccaacccaacgagtatagcctttc

SEQ ID NO: 1942470 - DNA, 25 bp, Homo sapien
cacttctgaacgtatacagcaagca

SEQ ID NO: 1942471 - DNA, 25 bp, Homo sapien
tcaggtgcctgctctactggtgata

SEQ ID NO: 1942472 - DNA, 25 bp, Homo sapien
cataaatggtctgcaaggtcagccc

SEQ ID NO: 1942473 - DNA, 25 bp, Homo sapien
gaaaggtgtcttagtctctcagcac

SEQ ID NO: 1942474 - DNA, 25 bp, Homo sapien
tatctgagaatgtctgccatcggcc

SEQ ID NO: 1942475 - DNA, 25 bp, Homo sapien
ccaatgttaacacatgtgctcccga

SEQ ID NO: 1942476 - DNA, 25 bp, Homo sapien
tgtcatcgttttacgagggccgtgc

SEQ ID NO: 1942477 - DNA, 25 bp, Homo sapien
aatttgtatgtcatcgttttacgag

SEQ ID NO: 1942478 - DNA, 25 bp, Homo sapien
caatgttaacacatgtgctcccgaa

SEQ ID NO: 1942479 - DNA, 25 bp, Homo sapien
tagagctcttaacgttaaccagggc

SEQ ID NO: 1942480 - DNA, 25 bp, Homo sapien
tccatcaggaggtcaggcgtaaaga

SEQ ID NO: 1942481 - DNA, 25 bp, Homo sapien
gagggaagccttatctgtagcagag

SEQ ID NO: 1942482 - DNA, 25 bp, Homo sapien
taaagaaacatgtaccgggcagctt

SEQ ID NO: 1942483 - DNA, 25 bp, Homo sapien
caagatcaaagtgtctggtgagcac

SEQ ID NO: 1942484 - DNA, 25 bp, Homo sapien
tcaaagtgtctggtgagcacagcac

SEQ ID NO: 1942485 - DNA, 25 bp, Homo sapien
cagcacagcttcctggttcagagtc

SEQ ID NO: 1942486 - DNA, 25 bp, Homo sapien
gcacagcacagcttcctggttcaga

SEQ ID NO: 1942487 - DNA, 25 bp, Homo sapien
gcaggacaggcagtcttgaatttcc

SEQ ID NO: 1942488 - DNA, 25 bp, Homo sapien
tgtgagtaaacacacctgcgcagcc

SEQ ID NO: 1942489 - DNA, 25 bp, Homo sapien
gctccaaagatgtagtagtgtctgc

SEQ ID NO: 1942490 - DNA, 25 bp, Homo sapien
tggttggatgacagaccacacagag

SEQ ID NO: 1942491 - DNA, 25 bp, Homo sapien
gattgcatttaaggaaaccggaaga

SEQ ID NO: 1942492 - DNA, 25 bp, Homo sapien
ccttctaatgggtccttcagctgcc

SEQ ID NO: 1942493 - DNA, 25 bp, Homo sapien
tcaattttggatgactcacacctcc

SEQ ID NO: 1942494 - DNA, 25 bp, Homo sapien
gattcacccaaggtcattaaactag

SEQ ID NO: 1942495 - DNA, 25 bp, Homo sapien
tgtacctaggcgtctgccactgact

SEQ ID NO: 1942496 - DNA, 25 bp, Homo sapien
acctaggcgtctgccactgactcag

SEQ ID NO: 1942497 - DNA, 25 bp, Homo sapien
gtgggaactgctctgtacctaggcg

SEQ ID NO: 1942498 - DNA, 25 bp, Homo sapien
ctgctctgtacctaggcgtctgcca

SEQ ID NO: 1942499 - DNA, 25 bp, Homo sapien
tgtaaaactcgcttggaaaacacag

SEQ ID NO: 1942500 - DNA, 25 bp, Homo sapien
tatctgatgcttagtctgggtgcca

SEQ ID NO: 1942501 - DNA, 25 bp, Homo sapien
tctatctgatgcttagtctgggtgc

SEQ ID NO: 1942502 - DNA, 25 bp, Homo sapien
ttgtaaaactcgcttggaaaacaca

SEQ ID NO: 1942503 - DNA, 25 bp, Homo sapien
aatgagggaatcatccatgacaccc

SEQ ID NO: 1942504 - DNA, 25 bp, Homo sapien
ttccattcataaagtggtttcccat

SEQ ID NO: 1942505 - DNA, 25 bp, Homo sapien
tggttccattgttcctcctgcaaag

SEQ ID NO: 1942506 - DNA, 25 bp, Homo sapien
ctgagtttctcatagccttttacca

SEQ ID NO: 1942507 - DNA, 25 bp, Homo sapien
gatgcaaatctccagtcctttttag

SEQ ID NO: 1942508 - DNA, 25 bp, Homo sapien
cttagtggcttgaaatgaacacggc

SEQ ID NO: 1942509 - DNA, 25 bp, Homo sapien
ccacttggcaaaggttgattgattt

SEQ ID NO: 1942510 - DNA, 25 bp, Homo sapien
tacgcagcatttgttccctattgtt

SEQ ID NO: 1942511 - DNA, 25 bp, Homo sapien
aaagctgactataggactccagtcc

SEQ ID NO: 1942512 - DNA, 25 bp, Homo sapien
cagtagaccatagaaataacgattg

SEQ ID NO: 1942513 - DNA, 25 bp, Homo sapien
gttgcgctggagtgtgaacaggtgg

SEQ ID NO: 1942514 - DNA, 25 bp, Homo sapien
catagaaataacgattgtttctggg

SEQ ID NO: 1942515 - DNA, 25 bp, Homo sapien
tggctctgtgcagtagaccatagaa

SEQ ID NO: 1942516 - DNA, 25 bp, Homo sapien
tcaggacgattggaccgaggagact

SEQ ID NO: 1942517 - DNA, 25 bp, Homo sapien
gacgattggaccgaggagactctga

SEQ ID NO: 1942518 - DNA, 25 bp, Homo sapien
caggacgattggaccgaggagactc

SEQ ID NO: 1942519 - DNA, 25 bp, Homo sapien
aggacgattggaccgaggagactct

SEQ ID NO: 1942520 - DNA, 25 bp, Homo sapien
ctgatggcaggaggggacggcggtg

SEQ ID NO: 1942521 - DNA, 25 bp, Homo sapien
cgacagttgtagtgattccggaaga

SEQ ID NO: 1942522 - DNA, 25 bp, Homo sapien
ggcagtctccggtggctgcagttta

SEQ ID NO: 1942523 - DNA, 25 bp, Homo sapien
gtgattccggaagacctgctcacca

SEQ ID NO: 1942524 - DNA, 25 bp, Homo sapien
ccggtggctgcagtttaaataaatc

SEQ ID NO: 1942525 - DNA, 25 bp, Homo sapien
ctaagtgcagaatcaccacacaggg

SEQ ID NO: 1942526 - DNA, 25 bp, Homo sapien
agtgcagaatcaccacacagggcgc

SEQ ID NO: 1942527 - DNA, 25 bp, Homo sapien
aatcaccacacagggcgcggagaaa

SEQ ID NO: 1942528 - DNA, 25 bp, Homo sapien
gaatcaccacacagggcgcggagaa

SEQ ID NO: 1942529 - DNA, 25 bp, Homo sapien
agccatattcccaggtagcctgcaa

SEQ ID NO: 1942530 - DNA, 25 bp, Homo sapien
atgtaggtggagtaagccatattcc

SEQ ID NO: 1942531 - DNA, 25 bp, Homo sapien
tcccaggtagcctgcaatcaactgc

SEQ ID NO: 1942532 - DNA, 25 bp, Homo sapien
gtgaactaccaccttggatgtaggt

SEQ ID NO: 1942533 - DNA, 25 bp, Homo sapien
tgtatctggtgatcgagatgtctgg

SEQ ID NO: 1942534 - DNA, 25 bp, Homo sapien
tctggtgatcgagatgtctggaaga

SEQ ID NO: 1942535 - DNA, 25 bp, Homo sapien
ttgtgtatctggtgatcgagatgtc

SEQ ID NO: 1942536 - DNA, 25 bp, Homo sapien
catttgtgtatctggtgatcgagat

SEQ ID NO: 1942537 - DNA, 25 bp, Homo sapien
tgtcctttgcggctcatgacctcag

SEQ ID NO: 1942538 - DNA, 25 bp, Homo sapien
cagtgcaggtttccaaattcatacc

SEQ ID NO: 1942539 - DNA, 25 bp, Homo sapien
tcagagcttgaatgattggtccagt

SEQ ID NO: 1942540 - DNA, 25 bp, Homo sapien
accctgagacatgcccttgtccttt

SEQ ID NO: 1942541 - DNA, 25 bp, Homo sapien
ttatcctagttgctcagaacaatcg

SEQ ID NO: 1942542 - DNA, 25 bp, Homo sapien
actttgctttgaatagggaacagct

SEQ ID NO: 1942543 - DNA, 25 bp, Homo sapien
tcagaacaatcgcttgggctgacgg

SEQ ID NO: 1942544 - DNA, 25 bp, Homo sapien
ttgctttgaatagggaacagctgtg

SEQ ID NO: 1942545 - DNA, 25 bp, Homo sapien
cccagctctgggtagaccatccaca

SEQ ID NO: 1942546 - DNA, 25 bp, Homo sapien
gtgacccagctctgggtagaccatc

SEQ ID NO: 1942547 - DNA, 25 bp, Homo sapien
caaggaagagagtgacccagctctg

SEQ ID NO: 1942548 - DNA, 25 bp, Homo sapien
gagagtgacccagctctgggtagac

SEQ ID NO: 1942549 - DNA, 25 bp, Homo sapien
aatgagtataaagtgttggaagaga

SEQ ID NO: 1942550 - DNA, 25 bp, Homo sapien
taatatattgctgctcatcaaagtg

SEQ ID NO: 1942551 - DNA, 25 bp, Homo sapien
gttttgtgattttgactcagctcca

SEQ ID NO: 1942552 - DNA, 25 bp, Homo sapien
tcctattgcgacattcagccattgc

SEQ ID NO: 1942553 - DNA, 25 bp, Homo sapien
tcagctccaacatgcaggacccatt

SEQ ID NO: 1942554 - DNA, 25 bp, Homo sapien
attgactagtgggcttgaaagtgat

SEQ ID NO: 1942555 - DNA, 25 bp, Homo sapien
gattgactagtgggcttgaaagtga

SEQ ID NO: 1942556 - DNA, 25 bp, Homo sapien
agattgactagtgggcttgaaagtg

SEQ ID NO: 1942557 - DNA, 25 bp, Homo sapien
cttcaatcctactgggtcttgggaa

SEQ ID NO: 1942558 - DNA, 25 bp, Homo sapien
aaagaggatatccttgtctggtgct

SEQ ID NO: 1942559 - DNA, 25 bp, Homo sapien
aagaggatatccttgtctggtgctg

SEQ ID NO: 1942560 - DNA, 25 bp, Homo sapien
ccctcttctctcttatcttagctgt

SEQ ID NO: 1942561 - DNA, 25 bp, Homo sapien
tcttctctcttatcttagctgttct

SEQ ID NO: 1942562 - DNA, 25 bp, Homo sapien
cctcttctctcttatcttagctgtt

SEQ ID NO: 1942563 - DNA, 25 bp, Homo sapien
tctctcttatcttagctgttctttt

SEQ ID NO: 1942564 - DNA, 25 bp, Homo sapien
tggcaagccacttctagttgcaggg

SEQ ID NO: 1942565 - DNA, 25 bp, Homo sapien
tcacctaactgcaactttgtaccag

SEQ ID NO: 1942566 - DNA, 25 bp, Homo sapien
tacgatgcattattgttagccacag

SEQ ID NO: 1942567 - DNA, 25 bp, Homo sapien
gaaaatgaagtctaactgggtgacc

SEQ ID NO: 1942568 - DNA, 25 bp, Homo sapien
tgtattggctcccaaccagtagcaa

SEQ ID NO: 1942569 - DNA, 25 bp, Homo sapien
cagtttgggtgcacagatattgccg

SEQ ID NO: 1942570 - DNA, 25 bp, Homo sapien
gatattgccgtagtgtttctattca

SEQ ID NO: 1942571 - DNA, 25 bp, Homo sapien
aagtttggcttaactttgttgacat

SEQ ID NO: 1942572 - DNA, 25 bp, Homo sapien
cctactgtgttggagagactaagac

SEQ ID NO: 1942573 - DNA, 25 bp, Homo sapien
gaaatgcagacgtccagtcttggaa

SEQ ID NO: 1942574 - DNA, 25 bp, Homo sapien
gattactgacaggacggtgttgcct

SEQ ID NO: 1942575 - DNA, 25 bp, Homo sapien
tatgcatattgagcgattccaaccc

SEQ ID NO: 1942576 - DNA, 25 bp, Homo sapien
tgacagggcgacaggtaagttaggg

SEQ ID NO: 1942577 - DNA, 25 bp, Homo sapien
ccttggacggggagtgatgcctgga

SEQ ID NO: 1942578 - DNA, 25 bp, Homo sapien
ctggaggatgacagggcgacaggta

SEQ ID NO: 1942579 - DNA, 25 bp, Homo sapien
ctgcgccagaggagtgacggaaggc

SEQ ID NO: 1942580 - DNA, 25 bp, Homo sapien
tgttgttacattcatcaagatccaa

SEQ ID NO: 1942581 - DNA, 25 bp, Homo sapien
tgatcactgaagaccgaacgagatc

SEQ ID NO: 1942582 - DNA, 25 bp, Homo sapien
ccattttaagatgtctatcagtcac

SEQ ID NO: 1942583 - DNA, 25 bp, Homo sapien
tatcagtcacaatgatgatcactga

SEQ ID NO: 1942584 - DNA, 25 bp, Homo sapien
tttgtgatttttgaagcacccctct

SEQ ID NO: 1942585 - DNA, 25 bp, Homo sapien
gagaacatgagacaaggaacgaggt

SEQ ID NO: 1942586 - DNA, 25 bp, Homo sapien
cctcttcgcattgcatttgtggtag

SEQ ID NO: 1942587 - DNA, 25 bp, Homo sapien
catttgtggtaggagaacatgagac

SEQ ID NO: 1942588 - DNA, 25 bp, Homo sapien
ctttgtccacggcactggaaatact

SEQ ID NO: 1942589 - DNA, 25 bp, Homo sapien
aaatacggctggaatttcttgtggc

SEQ ID NO: 1942590 - DNA, 25 bp, Homo sapien
ctggaaatactcttcagtctgcttt

SEQ ID NO: 1942591 - DNA, 25 bp, Homo sapien
aatttagtccttcatgagaaatacg

SEQ ID NO: 1942592 - DNA, 25 bp, Homo sapien
cttgggctggatgcaaactgaacct

SEQ ID NO: 1942593 - DNA, 25 bp, Homo sapien
tccgcaaactttgggtgcacagccc

SEQ ID NO: 1942594 - DNA, 25 bp, Homo sapien
gacagcttttcttgcgtgccaccaa

SEQ ID NO: 1942595 - DNA, 25 bp, Homo sapien
caccctctggctggttgtgatgggc

SEQ ID NO: 1942596 - DNA, 25 bp, Homo sapien
gagtatgactttcttacaacccgct

SEQ ID NO: 1942597 - DNA, 25 bp, Homo sapien
tggatgcctcctatggaccctggag

SEQ ID NO: 1942598 - DNA, 25 bp, Homo sapien
tttcaagaaacgtgggcaaataaga

SEQ ID NO: 1942599 - DNA, 25 bp, Homo sapien
tctcagtttgggtaggtggtatttc

SEQ ID NO: 1942600 - DNA, 25 bp, Homo sapien
taaggtccacgctccttggttccag

SEQ ID NO: 1942601 - DNA, 25 bp, Homo sapien
tctcagaagccgtagaactggccgg

SEQ ID NO: 1942602 - DNA, 25 bp, Homo sapien
ttcggtcccgggctcattctgcctg

SEQ ID NO: 1942603 - DNA, 25 bp, Homo sapien
tgcctgttcctaaacggtggcaagt

SEQ ID NO: 1942604 - DNA, 25 bp, Homo sapien
gttttcttggctccttgacttgttg

SEQ ID NO: 1942605 - DNA, 25 bp, Homo sapien
gctccttgacttgttgggcggcttg

SEQ ID NO: 1942606 - DNA, 25 bp, Homo sapien
cttgttgggcggcttgggatttctt

SEQ ID NO: 1942607 - DNA, 25 bp, Homo sapien
tggcactacttcctgggcagttttc

SEQ ID NO: 1942608 - DNA, 25 bp, Homo sapien
ttccctctggttcatcagagagttg

SEQ ID NO: 1942609 - DNA, 25 bp, Homo sapien
ggttctttttccctctggttcatca

SEQ ID NO: 1942610 - DNA, 25 bp, Homo sapien
cctctggttcatcagagagttgcca

SEQ ID NO: 1942611 - DNA, 25 bp, Homo sapien
ctctggttcatcagagagttgccac

SEQ ID NO: 1942612 - DNA, 25 bp, Homo sapien
caattcaggctgttagtggtacaca

SEQ ID NO: 1942613 - DNA, 25 bp, Homo sapien
ggactcaattaaagctctcctcgtg

SEQ ID NO: 1942614 - DNA, 25 bp, Homo sapien
cactccagcttggtatagaagccca

SEQ ID NO: 1942615 - DNA, 25 bp, Homo sapien
aatgcttccccagtccaattttgcg

SEQ ID NO: 1942616 - DNA, 25 bp, Homo sapien
gctctccaatacgtggttgggtttg

SEQ ID NO: 1942617 - DNA, 25 bp, Homo sapien
caagggattcatggttacagcgggc

SEQ ID NO: 1942618 - DNA, 25 bp, Homo sapien
cttgatcgtgactctggtggcttgg

SEQ ID NO: 1942619 - DNA, 25 bp, Homo sapien
cttgggagatggcatgctgcacaag

SEQ ID NO: 1942620 - DNA, 25 bp, Homo sapien
ggcctgggatagatgtttctgaaaa

SEQ ID NO: 1942621 - DNA, 25 bp, Homo sapien
gttgacttcctaggcaccacatggg

SEQ ID NO: 1942622 - DNA, 25 bp, Homo sapien
ccttgtaagcagtaattgaaatcag

SEQ ID NO: 1942623 - DNA, 25 bp, Homo sapien
cagtttggcagcctggtttacagtg

SEQ ID NO: 1942624 - DNA, 25 bp, Homo sapien
accacatgggatccttgttcttcct

SEQ ID NO: 1942625 - DNA, 25 bp, Homo sapien
tactacatgaaggtgttgttgacac

SEQ ID NO: 1942626 - DNA, 25 bp, Homo sapien
tacatgaaggtgttgttgacacagg

SEQ ID NO: 1942627 - DNA, 25 bp, Homo sapien
ggatttaagatgtgatcactgacca

SEQ ID NO: 1942628 - DNA, 25 bp, Homo sapien
tgtgatcactgaccacaacatccag

SEQ ID NO: 1942629 - DNA, 25 bp, Homo sapien
gatgtctgactataaaggatgggac

SEQ ID NO: 1942630 - DNA, 25 bp, Homo sapien
tataaaggatgggacaccttccatc

SEQ ID NO: 1942631 - DNA, 25 bp, Homo sapien
tcaggatgtctgactataaaggatg

SEQ ID NO: 1942632 - DNA, 25 bp, Homo sapien
tctgactataaaggatgggacacct

SEQ ID NO: 1942633 - DNA, 25 bp, Homo sapien
caactgagccatcagagagtggtgc

SEQ ID NO: 1942634 - DNA, 25 bp, Homo sapien
tggaacttggccaactgagccatca

SEQ ID NO: 1942635 - DNA, 25 bp, Homo sapien
gggcagaagcatgacccctggaact

SEQ ID NO: 1942636 - DNA, 25 bp, Homo sapien
gtgtagtgaaccactcagctgtctg

SEQ ID NO: 1942637 - DNA, 25 bp, Homo sapien
tcccttattacagtgtttgtagcag

SEQ ID NO: 1942638 - DNA, 25 bp, Homo sapien
ttgtagcagcatctaactcaatccc

SEQ ID NO: 1942639 - DNA, 25 bp, Homo sapien
ttcacgtgtctcccttattacagtg

SEQ ID NO: 1942640 - DNA, 25 bp, Homo sapien
tagcagcatctaactcaatccctaa

SEQ ID NO: 1942641 - DNA, 25 bp, Homo sapien
aacagctggtgacaatagcctcaag

SEQ ID NO: 1942642 - DNA, 25 bp, Homo sapien
cctttgcaatccatattgttttatg

SEQ ID NO: 1942643 - DNA, 25 bp, Homo sapien
gctggtgacaatagcctcaaggttt

SEQ ID NO: 1942644 - DNA, 25 bp, Homo sapien
tttatggaacaggtgaacagctggt

SEQ ID NO: 1942645 - DNA, 25 bp, Homo sapien
cataacttctgacttctgactttat

SEQ ID NO: 1942646 - DNA, 25 bp, Homo sapien
taacttctgacttctgactttatca

SEQ ID NO: 1942647 - DNA, 25 bp, Homo sapien
aacttctgacttctgactttatcat

SEQ ID NO: 1942648 - DNA, 25 bp, Homo sapien
ataacttctgacttctgactttatc

SEQ ID NO: 1942649 - DNA, 25 bp, Homo sapien
ctacttgccagttacttgatctagg

SEQ ID NO: 1942650 - DNA, 25 bp, Homo sapien
tctgttgctcggataagttagcatg

SEQ ID NO: 1942651 - DNA, 25 bp, Homo sapien
tgtggtaacctgtgattgatttccc

SEQ ID NO: 1942652 - DNA, 25 bp, Homo sapien
catgatttgacatgcagttaaaggt

SEQ ID NO: 1942653 - DNA, 25 bp, Homo sapien
gcctcccaattgttgagagtaagga

SEQ ID NO: 1942654 - DNA, 25 bp, Homo sapien
taatacatccctgaagtttagatca

SEQ ID NO: 1942655 - DNA, 25 bp, Homo sapien
ccagttgcgatcatgtatcatctga

SEQ ID NO: 1942656 - DNA, 25 bp, Homo sapien
aactttggacatatctattggtgac

SEQ ID NO: 1942657 - DNA, 25 bp, Homo sapien
gcagatttctatccagttgactatg

SEQ ID NO: 1942658 - DNA, 25 bp, Homo sapien
gttgactatggattttgcctgttgc

SEQ ID NO: 1942659 - DNA, 25 bp, Homo sapien
ttcaagtccctggtaaggatcaagt

SEQ ID NO: 1942660 - DNA, 25 bp, Homo sapien
ggatcaagtaaactccccaatttgc

SEQ ID NO: 1942661 - DNA, 25 bp, Homo sapien
cgatgagcagaagcttagaagtact

SEQ ID NO: 1942662 - DNA, 25 bp, Homo sapien
cagacttgtctcaatggcatgagga

SEQ ID NO: 1942663 - DNA, 25 bp, Homo sapien
gaaaggacatcgtggtggaaatgac

SEQ ID NO: 1942664 - DNA, 25 bp, Homo sapien
gctaagttgagtgtagttccccaca

SEQ ID NO: 1942665 - DNA, 25 bp, Homo sapien
cgtcaatgtctgagttgctgtcctg

SEQ ID NO: 1942666 - DNA, 25 bp, Homo sapien
tctaagatgtcatggacagaaccca

SEQ ID NO: 1942667 - DNA, 25 bp, Homo sapien
gtggacagtccaacagagttacatc

SEQ ID NO: 1942668 - DNA, 25 bp, Homo sapien
ccttgtaatggttgtatcagcgtca

SEQ ID NO: 1942669 - DNA, 25 bp, Homo sapien
ttcccagttgaagcattgtcatatg

SEQ ID NO: 1942670 - DNA, 25 bp, Homo sapien
attgtcatatgctttgatgctcagc

SEQ ID NO: 1942671 - DNA, 25 bp, Homo sapien
tatatggagccatagggcttttctc

SEQ ID NO: 1942672 - DNA, 25 bp, Homo sapien
ccactccttctgtatatggagccat

SEQ ID NO: 1942673 - DNA, 25 bp, Homo sapien
cattctggacatgctaaacatcttg

SEQ ID NO: 1942674 - DNA, 25 bp, Homo sapien
cagcagcaaacatagtgtggagggc

SEQ ID NO: 1942675 - DNA, 25 bp, Homo sapien
gtttcccaaggcaagtagtcactac

SEQ ID NO: 1942676 - DNA, 25 bp, Homo sapien
tagcgtttgcctgaagaacaccact

SEQ ID NO: 1942677 - DNA, 25 bp, Homo sapien
agtcattttgcttggagatctctgc

SEQ ID NO: 1942678 - DNA, 25 bp, Homo sapien
ttagtcattttgcttggagatctct

SEQ ID NO: 1942679 - DNA, 25 bp, Homo sapien
tcattttgcttggagatctctgcac

SEQ ID NO: 1942680 - DNA, 25 bp, Homo sapien
attttgcttggagatctctgcacac

SEQ ID NO: 1942681 - DNA, 25 bp, Homo sapien
acatcatttctaagagccttgccac

SEQ ID NO: 1942682 - DNA, 25 bp, Homo sapien
gtgtaccaacgcaaattaggcaatt

SEQ ID NO: 1942683 - DNA, 25 bp, Homo sapien
gccacactcagtaaaagagggtgag

SEQ ID NO: 1942684 - DNA, 25 bp, Homo sapien
gaatctctgtgtaccaacgcaaatt

SEQ ID NO: 1942685 - DNA, 25 bp, Homo sapien
ccattgcttctgagagaccctccac

SEQ ID NO: 1942686 - DNA, 25 bp, Homo sapien
ttccattgcttctgagagaccctcc

SEQ ID NO: 1942687 - DNA, 25 bp, Homo sapien
cacattcgaatttctcttccattgc

SEQ ID NO: 1942688 - DNA, 25 bp, Homo sapien
tgaacttcacacattcgaatttctc

SEQ ID NO: 1942689 - DNA, 25 bp, Homo sapien
tacttgtaggcataaaataggtata

SEQ ID NO: 1942690 - DNA, 25 bp, Homo sapien
tcttttacttgtaggcataaaatag

SEQ ID NO: 1942691 - DNA, 25 bp, Homo sapien
gcctgcaggaaatagtattggacaa

SEQ ID NO: 1942692 - DNA, 25 bp, Homo sapien
tgcaggaaatagtattggacaacag

SEQ ID NO: 1942693 - DNA, 25 bp, Homo sapien
ccacaaagagccgaattgtcagtgc

SEQ ID NO: 1942694 - DNA, 25 bp, Homo sapien
actaacgactagcaaaggatacaag

SEQ ID NO: 1942695 - DNA, 25 bp, Homo sapien
tgcagacccacatgaatcatagatc

SEQ ID NO: 1942696 - DNA, 25 bp, Homo sapien
tcatagatcttaacgaggtttttac

SEQ ID NO: 1942697 - DNA, 25 bp, Homo sapien
actgaaatgttttagcgagagtcat

SEQ ID NO: 1942698 - DNA, 25 bp, Homo sapien
ctgaaaatacttgtggagggccctc

SEQ ID NO: 1942699 - DNA, 25 bp, Homo sapien
catcaactaagtcaggaacctgcgt

SEQ ID NO: 1942700 - DNA, 25 bp, Homo sapien
caggaacctgcgtcactttcaagtt

SEQ ID NO: 1942701 - DNA, 25 bp, Homo sapien
ttgctgttaatgaagctcggtgcat

SEQ ID NO: 1942702 - DNA, 25 bp, Homo sapien
tcacgtgaatgatgttgcgctttgc

SEQ ID NO: 1942703 - DNA, 25 bp, Homo sapien
gatgttgcgctttgctgttaatgaa

SEQ ID NO: 1942704 - DNA, 25 bp, Homo sapien
cctctgaaatcacgtgaatgatgtt

SEQ ID NO: 1942705 - DNA, 25 bp, Homo sapien
gattcaagctaaagtccagacacat

SEQ ID NO: 1942706 - DNA, 25 bp, Homo sapien
tcttgtaaagttgaggttcgcctgt

SEQ ID NO: 1942707 - DNA, 25 bp, Homo sapien
tttagaggcaggctcatagtgactc

SEQ ID NO: 1942708 - DNA, 25 bp, Homo sapien
aatggagagggtctgagttcttctg

SEQ ID NO: 1942709 - DNA, 25 bp, Homo sapien
tgctttcttctacctccccctgctt

SEQ ID NO: 1942710 - DNA, 25 bp, Homo sapien
gacacccctcctccttggtgctttc

SEQ ID NO: 1942711 - DNA, 25 bp, Homo sapien
ctctgtatgtcttttgcaggctcat

SEQ ID NO: 1942712 - DNA, 25 bp, Homo sapien
tccccctgcttctctgtatgtcttt

SEQ ID NO: 1942713 - DNA, 25 bp, Homo sapien
tccacagggagtccctggttttcac

SEQ ID NO: 1942714 - DNA, 25 bp, Homo sapien
ttccacagggagtccctggttttca

SEQ ID NO: 1942715 - DNA, 25 bp, Homo sapien
agggcatggtggagatcttcgacat

SEQ ID NO: 1942716 - DNA, 25 bp, Homo sapien
catcatctcggttccgcatgatgaa

SEQ ID NO: 1942717 - DNA, 25 bp, Homo sapien
gatcttcgacatgctgctggctaca

SEQ ID NO: 1942718 - DNA, 25 bp, Homo sapien
tcataggaaccagggaaaatgtgta

SEQ ID NO: 1942719 - DNA, 25 bp, Homo sapien
gacagaggcattcctggttaatcca

SEQ ID NO: 1942720 - DNA, 25 bp, Homo sapien
tcagaacagaagtgatgggcccagg

SEQ ID NO: 1942721 - DNA, 25 bp, Homo sapien
ggaatcatccataggacacacgttg

SEQ ID NO: 1942722 - DNA, 25 bp, Homo sapien
gatgccaacttcaagacattctgag

SEQ ID NO: 1942723 - DNA, 25 bp, Homo sapien
ctctcacaaagtggcgagggctcca

SEQ ID NO: 1942724 - DNA, 25 bp, Homo sapien
tggagctgtcaactgggagacctgt

SEQ ID NO: 1942725 - DNA, 25 bp, Homo sapien
cataggctagcaattgatgttggct

SEQ ID NO: 1942726 - DNA, 25 bp, Homo sapien
gagagttatgggctggaaccacctt

SEQ ID NO: 1942727 - DNA, 25 bp, Homo sapien
tggttgccaaagcacacgaagcatt

SEQ ID NO: 1942728 - DNA, 25 bp, Homo sapien
ttttgctcttgcagtggttgccaaa

SEQ ID NO: 1942729 - DNA, 25 bp, Homo sapien
cagtggttgccaaagcacacgaagc

SEQ ID NO: 1942730 - DNA, 25 bp, Homo sapien
gttgccaaagcacacgaagcattct

SEQ ID NO: 1942731 - DNA, 25 bp, Homo sapien
taaggaggatggaacattggcagcc

SEQ ID NO: 1942732 - DNA, 25 bp, Homo sapien
cacatgtcacctttccaggcaggga

SEQ ID NO: 1942733 - DNA, 25 bp, Homo sapien
cacaccgtgcaaacaataagaagag

SEQ ID NO: 1942734 - DNA, 25 bp, Homo sapien
catgtctttgacctccattggcaag

SEQ ID NO: 1942735 - DNA, 25 bp, Homo sapien
caacagcccacatggaacataagtg

SEQ ID NO: 1942736 - DNA, 25 bp, Homo sapien
cagcccacatggaacataagtgaag

SEQ ID NO: 1942737 - DNA, 25 bp, Homo sapien
aacagcccacatggaacataagtga

SEQ ID NO: 1942738 - DNA, 25 bp, Homo sapien
agcccacatggaacataagtgaagt

SEQ ID NO: 1942739 - DNA, 25 bp, Homo sapien
tgtgatggtctcactttctgtcctg

SEQ ID NO: 1942740 - DNA, 25 bp, Homo sapien
tctgtcctggatctatctgtggggc

SEQ ID NO: 1942741 - DNA, 25 bp, Homo sapien
agaggcaccaggcactgtgatggtc

SEQ ID NO: 1942742 - DNA, 25 bp, Homo sapien
gaaataggctcttattttctggctt

SEQ ID NO: 1942743 - DNA, 25 bp, Homo sapien
caggagtgtacacatttctgtccag

SEQ ID NO: 1942744 - DNA, 25 bp, Homo sapien
tcaggagtgtacacatttctgtcca

SEQ ID NO: 1942745 - DNA, 25 bp, Homo sapien
gagtgtacacatttctgtccagcac

SEQ ID NO: 1942746 - DNA, 25 bp, Homo sapien
ggagtgtacacatttctgtccagca

SEQ ID NO: 1942747 - DNA, 25 bp, Homo sapien
ccgagtcctggacaagatcacagac

SEQ ID NO: 1942748 - DNA, 25 bp, Homo sapien
aaggaccatatccaccgagtcctgg

SEQ ID NO: 1942749 - DNA, 25 bp, Homo sapien
caagatcacagacactttgatccac

SEQ ID NO: 1942750 - DNA, 25 bp, Homo sapien
tcacagacactttgatccacctgat

SEQ ID NO: 1942751 - DNA, 25 bp, Homo sapien
cagctgtgttcctacaattggccca

SEQ ID NO: 1942752 - DNA, 25 bp, Homo sapien
gacagctgtgttcctacaattggcc

SEQ ID NO: 1942753 - DNA, 25 bp, Homo sapien
gtagacagctgtgttcctacaattg

SEQ ID NO: 1942754 - DNA, 25 bp, Homo sapien
gctgtgttcctacaattggcccagc

SEQ ID NO: 1942755 - DNA, 25 bp, Homo sapien
gaccgttgctgtcactactcaggct

SEQ ID NO: 1942756 - DNA, 25 bp, Homo sapien
ggggaccgttgctgtcactactcag

SEQ ID NO: 1942757 - DNA, 25 bp, Homo sapien
gggaccgttgctgtcactactcagg

SEQ ID NO: 1942758 - DNA, 25 bp, Homo sapien
ggaccgttgctgtcactactcaggc

SEQ ID NO: 1942759 - DNA, 25 bp, Homo sapien
aaaccctattgagaggtgatgtctg

SEQ ID NO: 1942760 - DNA, 25 bp, Homo sapien
gtgttagccaatgacccaggtgagc

SEQ ID NO: 1942761 - DNA, 25 bp, Homo sapien
tctgattgtccagttaagtgatcac

SEQ ID NO: 1942762 - DNA, 25 bp, Homo sapien
aggtgagctgctcgggcttctcttg

SEQ ID NO: 1942763 - DNA, 25 bp, Homo sapien
taggactagacgatgtaataccagc

SEQ ID NO: 1942764 - DNA, 25 bp, Homo sapien
gatactactacatttgaagtgggca

SEQ ID NO: 1942765 - DNA, 25 bp, Homo sapien
tcagatgattgaaatgttcgcccag

SEQ ID NO: 1942766 - DNA, 25 bp, Homo sapien
tgaagtgccactaatggacagcaga

SEQ ID NO: 1942767 - DNA, 25 bp, Homo sapien
tctcaactggagcaaatgaactttg

SEQ ID NO: 1942768 - DNA, 25 bp, Homo sapien
atgaactttggtcccaaatatccat

SEQ ID NO: 1942769 - DNA, 25 bp, Homo sapien
ggagcaaatgaactttggtcccaaa

SEQ ID NO: 1942770 - DNA, 25 bp, Homo sapien
caactggagcaaatgaactttggtc

SEQ ID NO: 1942771 - DNA, 25 bp, Homo sapien
gctactgttgctctcaattgggcaa

SEQ ID NO: 1942772 - DNA, 25 bp, Homo sapien
gaaaactgatagcatctaggccagc

SEQ ID NO: 1942773 - DNA, 25 bp, Homo sapien
aatcgtctgcacctgggaatcgcct

SEQ ID NO: 1942774 - DNA, 25 bp, Homo sapien
tgatccccagctaccaatttaattg

SEQ ID NO: 1942775 - DNA, 25 bp, Homo sapien
tacacagcgagaaagaaatgaggct

SEQ ID NO: 1942776 - DNA, 25 bp, Homo sapien
gcttgctatcatggccaactggaga

SEQ ID NO: 1942777 - DNA, 25 bp, Homo sapien
caggtggtagcttggaagcccagcc

SEQ ID NO: 1942778 - DNA, 25 bp, Homo sapien
gaaaccaattgttcggtgaagccaa

SEQ ID NO: 1942779 - DNA, 25 bp, Homo sapien
cacagacggcagtttcaggcaaggt

SEQ ID NO: 1942780 - DNA, 25 bp, Homo sapien
gcccgggacttggaaaatctagcaa

SEQ ID NO: 1942781 - DNA, 25 bp, Homo sapien
gaactaggaggtctgaagcaagccc

SEQ ID NO: 1942782 - DNA, 25 bp, Homo sapien
ggaatatgtgctccggactagggca

SEQ ID NO: 1942783 - DNA, 25 bp, Homo sapien
tcagtgcctgcttaataatgaaact

SEQ ID NO: 1942784 - DNA, 25 bp, Homo sapien
gtgcctgcttaataatgaaacttag

SEQ ID NO: 1942785 - DNA, 25 bp, Homo sapien
gatcagtgcctgcttaataatgaaa

SEQ ID NO: 1942786 - DNA, 25 bp, Homo sapien
tgcctgcttaataatgaaacttaga

SEQ ID NO: 1942787 - DNA, 25 bp, Homo sapien
caccgagggctttcgccaagatcaa

SEQ ID NO: 1942788 - DNA, 25 bp, Homo sapien
caagggcccagaattcatgagtccg

SEQ ID NO: 1942789 - DNA, 25 bp, Homo sapien
ggttaaaacatcatgccccaaagga

SEQ ID NO: 1942790 - DNA, 25 bp, Homo sapien
cacacatgtgatctggaggagggct

SEQ ID NO: 1942791 - DNA, 25 bp, Homo sapien
gcacttctgcagatggcatctgctt

SEQ ID NO: 1942792 - DNA, 25 bp, Homo sapien
ctaccagcacttctgcagatggcat

SEQ ID NO: 1942793 - DNA, 25 bp, Homo sapien
acttctgcagatggcatctgcttag

SEQ ID NO: 1942794 - DNA, 25 bp, Homo sapien
ccagcacttctgcagatggcatctg

SEQ ID NO: 1942795 - DNA, 25 bp, Homo sapien
tcagagtggaggagggccattcgtg

SEQ ID NO: 1942796 - DNA, 25 bp, Homo sapien
cagagtggaggagggccattcgtgt

SEQ ID NO: 1942797 - DNA, 25 bp, Homo sapien
agagtggaggagggccattcgtgta

SEQ ID NO: 1942798 - DNA, 25 bp, Homo sapien
gagtggaggagggccattcgtgtat

SEQ ID NO: 1942799 - DNA, 25 bp, Homo sapien
gagagggcacagctgtagtcttcct

SEQ ID NO: 1942800 - DNA, 25 bp, Homo sapien
tctgaacaggaagccgcggccggac

SEQ ID NO: 1942801 - DNA, 25 bp, Homo sapien
ttggtacaaggcaggcaagcccgat

SEQ ID NO: 1942802 - DNA, 25 bp, Homo sapien
agaaagggaggaatcggagccacct

SEQ ID NO: 1942803 - DNA, 25 bp, Homo sapien
gttgctgtcagaatcataccaagta

SEQ ID NO: 1942804 - DNA, 25 bp, Homo sapien
ttcctggaagctaaagggccatgcc

SEQ ID NO: 1942805 - DNA, 25 bp, Homo sapien
tcagataactccagtgtcggaggga

SEQ ID NO: 1942806 - DNA, 25 bp, Homo sapien
gtcggagggacgctgctttttgcct

SEQ ID NO: 1942807 - DNA, 25 bp, Homo sapien
gaagagagctcccacaattcctagt

SEQ ID NO: 1942808 - DNA, 25 bp, Homo sapien
ttgatagtacaatctgacagagctg

SEQ ID NO: 1942809 - DNA, 25 bp, Homo sapien
tcaacacctgtagctagatgagtta

SEQ ID NO: 1942810 - DNA, 25 bp, Homo sapien
tcttaagaaggataggatagctacc

SEQ ID NO: 1942811 - DNA, 25 bp, Homo sapien
tttaggatattaatgcacccctcat

SEQ ID NO: 1942812 - DNA, 25 bp, Homo sapien
taatgcacccctcatctttgcaaat

SEQ ID NO: 1942813 - DNA, 25 bp, Homo sapien
aaccattgaatcataaatcatgaca

SEQ ID NO: 1942814 - DNA, 25 bp, Homo sapien
aaaccattgaatcataaatcatgac

SEQ ID NO: 1942815 - DNA, 25 bp, Homo sapien
taatgctgaagaacgccaagctagg

SEQ ID NO: 1942816 - DNA, 25 bp, Homo sapien
gaaaatatccgaactatccactggg

SEQ ID NO: 1942817 - DNA, 25 bp, Homo sapien
tatcaagaagctaatggtcccaggg

SEQ ID NO: 1942818 - DNA, 25 bp, Homo sapien
ggcaacttgttgactacccactggt

SEQ ID NO: 1942819 - DNA, 25 bp, Homo sapien
gaatgtcagcagcttatcactatta

SEQ ID NO: 1942820 - DNA, 25 bp, Homo sapien
ccttcagcagagtggtacggttaac

SEQ ID NO: 1942821 - DNA, 25 bp, Homo sapien
tgggaatatagccatgtcatgggat

SEQ ID NO: 1942822 - DNA, 25 bp, Homo sapien
taatgataccaagggtgtgccgact

SEQ ID NO: 1942823 - DNA, 25 bp, Homo sapien
gtaaaggaacaccacgacagcctgg

SEQ ID NO: 1942824 - DNA, 25 bp, Homo sapien
tagtgaggccctagtgtacatgcaa

SEQ ID NO: 1942825 - DNA, 25 bp, Homo sapien
cgacggtaacgaagcccaagaatgt

SEQ ID NO: 1942826 - DNA, 25 bp, Homo sapien
aatttgctacatccggactacagtg

SEQ ID NO: 1942827 - DNA, 25 bp, Homo sapien
tggatgacgtttgccattcaggtga

SEQ ID NO: 1942828 - DNA, 25 bp, Homo sapien
gatgacgtttgccattcaggtgaag

SEQ ID NO: 1942829 - DNA, 25 bp, Homo sapien
tgaaggtgttggatgacgtttgcca

SEQ ID NO: 1942830 - DNA, 25 bp, Homo sapien
ggtgttggatgacgtttgccattca

SEQ ID NO: 1942831 - DNA, 25 bp, Homo sapien
tcgtagtgagaatgtggctgtccca

SEQ ID NO: 1942832 - DNA, 25 bp, Homo sapien
tatgtggctgtctgaaacaatgcgg

SEQ ID NO: 1942833 - DNA, 25 bp, Homo sapien
gctgccctaagaaacgatgccttcg

SEQ ID NO: 1942834 - DNA, 25 bp, Homo sapien
taatgaaccgtgctggacagagcag

SEQ ID NO: 1942835 - DNA, 25 bp, Homo sapien
ggtacatcagcaatttgtggggaaa

SEQ ID NO: 1942836 - DNA, 25 bp, Homo sapien
gagggtccaggctgtgagagactac

SEQ ID NO: 1942837 - DNA, 25 bp, Homo sapien
tgtgagagactacacttgcctcgtg

SEQ ID NO: 1942838 - DNA, 25 bp, Homo sapien
tatgtggactgctgacagagggtcc

SEQ ID NO: 1942839 - DNA, 25 bp, Homo sapien
ctgctatgtggactgctgacagagg

SEQ ID NO: 1942840 - DNA, 25 bp, Homo sapien
ttcagtccaggcaaataaagacaag

SEQ ID NO: 1942841 - DNA, 25 bp, Homo sapien
tgtttgcaatgaacagggggtaaag

SEQ ID NO: 1942842 - DNA, 25 bp, Homo sapien
agaagaatgttcagtccaggcaaat

SEQ ID NO: 1942843 - DNA, 25 bp, Homo sapien
gtaaagaaagaagaatgttcagtcc

SEQ ID NO: 1942844 - DNA, 25 bp, Homo sapien
cttttaagatagtcgtggcagccat

SEQ ID NO: 1942845 - DNA, 25 bp, Homo sapien
tgcataccagccacacgttgagtcc

SEQ ID NO: 1942846 - DNA, 25 bp, Homo sapien
gaaaaccagaatcgctcttttccat

SEQ ID NO: 1942847 - DNA, 25 bp, Homo sapien
tggcttgaagaaaggagccaccaaa

SEQ ID NO: 1942848 - DNA, 25 bp, Homo sapien
tgggccaactgaaaacgaccagtgg

SEQ ID NO: 1942849 - DNA, 25 bp, Homo sapien
cccatgggccaactgaaaacgacca

SEQ ID NO: 1942850 - DNA, 25 bp, Homo sapien
caactgaaaacgaccagtggaaagt

SEQ ID NO: 1942851 - DNA, 25 bp, Homo sapien
actcccatgggccaactgaaaacga

SEQ ID NO: 1942852 - DNA, 25 bp, Homo sapien
gtttggggtgctccttcctgatgtg

SEQ ID NO: 1942853 - DNA, 25 bp, Homo sapien
ttctgtctgtttggggtgctccttc

SEQ ID NO: 1942854 - DNA, 25 bp, Homo sapien
tctgtttggggtgctccttcctgat

SEQ ID NO: 1942855 - DNA, 25 bp, Homo sapien
ttttctgtctgtttggggtgctcct

SEQ ID NO: 1942856 - DNA, 25 bp, Homo sapien
agaccctgaggtgtccagttcatca

SEQ ID NO: 1942857 - DNA, 25 bp, Homo sapien
cagttcatcagcagaagaccaggaa

SEQ ID NO: 1942858 - DNA, 25 bp, Homo sapien
cagcagaagaccaggaagacaaatc

SEQ ID NO: 1942859 - DNA, 25 bp, Homo sapien
accctgaggtgtccagttcatcagc

SEQ ID NO: 1942860 - DNA, 25 bp, Homo sapien
cttttaacaactccatgtcccagac

SEQ ID NO: 1942861 - DNA, 25 bp, Homo sapien
atgtcccagacccatgggggccctc

SEQ ID NO: 1942862 - DNA, 25 bp, Homo sapien
gggccctctgttgcaccacgttatc

SEQ ID NO: 1942863 - DNA, 25 bp, Homo sapien
tgcaccacgttatctcccactccat

SEQ ID NO: 1942864 - DNA, 25 bp, Homo sapien
tgcttctttggtctccagtaagaaa

SEQ ID NO: 1942865 - DNA, 25 bp, Homo sapien
gatgcttctttggtctccagtaaga

SEQ ID NO: 1942866 - DNA, 25 bp, Homo sapien
tgatgcttctttggtctccagtaag

SEQ ID NO: 1942867 - DNA, 25 bp, Homo sapien
tctttggtctccagtaagaaatgct

SEQ ID NO: 1942868 - DNA, 25 bp, Homo sapien
ggctactctgagttgggattccaac

SEQ ID NO: 1942869 - DNA, 25 bp, Homo sapien
caagagaagtttgagccgatttcca

SEQ ID NO: 1942870 - DNA, 25 bp, Homo sapien
tatgacgactgacctccttcaagag

SEQ ID NO: 1942871 - DNA, 25 bp, Homo sapien
tcagcattcaccagtagttggcaag

SEQ ID NO: 1942872 - DNA, 25 bp, Homo sapien
ctctttgaaagactcggctgggtgt

SEQ ID NO: 1942873 - DNA, 25 bp, Homo sapien
agtttgatttgatgcctggtccaca

SEQ ID NO: 1942874 - DNA, 25 bp, Homo sapien
caaaagctccaaaagtgcagaatgc

SEQ ID NO: 1942875 - DNA, 25 bp, Homo sapien
tatacctgagcatcaaacgtggagc

SEQ ID NO: 1942876 - DNA, 25 bp, Homo sapien
caaggttagaatcaatagggacaat

SEQ ID NO: 1942877 - DNA, 25 bp, Homo sapien
gtcaatgttctccagcataagaagc

SEQ ID NO: 1942878 - DNA, 25 bp, Homo sapien
tcctgaagtatctctgcatcaaggt

SEQ ID NO: 1942879 - DNA, 25 bp, Homo sapien
ttctccagcataagaagcaaaccat

SEQ ID NO: 1942880 - DNA, 25 bp, Homo sapien
agcagagagcacactcggtcccagc

SEQ ID NO: 1942881 - DNA, 25 bp, Homo sapien
tctgcgacaagcgatcctgcaggtc

SEQ ID NO: 1942882 - DNA, 25 bp, Homo sapien
tgtcagcctgggtgaactcagggct

SEQ ID NO: 1942883 - DNA, 25 bp, Homo sapien
gctttgcggtggtccacagctttct

SEQ ID NO: 1942884 - DNA, 25 bp, Homo sapien
ctctctgtttgtccgccgtgggaaa

SEQ ID NO: 1942885 - DNA, 25 bp, Homo sapien
tctgtttgtccgccgtgggaaaggc

SEQ ID NO: 1942886 - DNA, 25 bp, Homo sapien
ctgtttgtccgccgtgggaaaggca

SEQ ID NO: 1942887 - DNA, 25 bp, Homo sapien
gccaggcccagatgctgttcaagtc

SEQ ID NO: 1942888 - DNA, 25 bp, Homo sapien
gagttccagacgctggagctgttcc

SEQ ID NO: 1942889 - DNA, 25 bp, Homo sapien
tgagttaaactgctgccacttctgg

SEQ ID NO: 1942890 - DNA, 25 bp, Homo sapien
cagacgctggagctgttccaactcc

SEQ ID NO: 1942891 - DNA, 25 bp, Homo sapien
tggagaagctcccatcggtcaatca

SEQ ID NO: 1942892 - DNA, 25 bp, Homo sapien
agaagctcccatcggtcaatcacac

SEQ ID NO: 1942893 - DNA, 25 bp, Homo sapien
cctcaactccttgctcaatgcctgg

SEQ ID NO: 1942894 - DNA, 25 bp, Homo sapien
cctggagaagctcccatcggtcaat

SEQ ID NO: 1942895 - DNA, 25 bp, Homo sapien
gctccagtctcttcacggagtctat

SEQ ID NO: 1942896 - DNA, 25 bp, Homo sapien
tactatgcaggttaacaaagccagg

SEQ ID NO: 1942897 - DNA, 25 bp, Homo sapien
cctccttcagtttgtgctccagtct

SEQ ID NO: 1942898 - DNA, 25 bp, Homo sapien
gccgtttgggtttcggtactatgca

SEQ ID NO: 1942899 - DNA, 25 bp, Homo sapien
tcggatctgtgactctagggcactg

SEQ ID NO: 1942900 - DNA, 25 bp, Homo sapien
ggctttgcccagttgtcggatctgt

SEQ ID NO: 1942901 - DNA, 25 bp, Homo sapien
gccccgtgggagttttgctgcgaat

SEQ ID NO: 1942902 - DNA, 25 bp, Homo sapien
tgaaaacggctatcatccagggctt

SEQ ID NO: 1942903 - DNA, 25 bp, Homo sapien
aatttagtaccatcgtgccggtggg

SEQ ID NO: 1942904 - DNA, 25 bp, Homo sapien
aaaggtcactcatgcaggctggcgg

SEQ ID NO: 1942905 - DNA, 25 bp, Homo sapien
tgaagcgtaaactagtaactccgtg

SEQ ID NO: 1942906 - DNA, 25 bp, Homo sapien
tagtgtcacggaaggctcaggttgc

SEQ ID NO: 1942907 - DNA, 25 bp, Homo sapien
gagttttacataggcctcagggctt

SEQ ID NO: 1942908 - DNA, 25 bp, Homo sapien
tttacataggcctcagggctttcgg

SEQ ID NO: 1942909 - DNA, 25 bp, Homo sapien
tctgtgagttttacataggcctcag

SEQ ID NO: 1942910 - DNA, 25 bp, Homo sapien
tgtgagttttacataggcctcaggg

SEQ ID NO: 1942911 - DNA, 25 bp, Homo sapien
gcaaaaaaagcacagtctaagttga

SEQ ID NO: 1942912 - DNA, 25 bp, Homo sapien
caaaaaaagcacagtctaagttgac

SEQ ID NO: 1942913 - DNA, 25 bp, Homo sapien
gaaattccccagatgtcctttgaca

SEQ ID NO: 1942914 - DNA, 25 bp, Homo sapien
gatgtgaaccaccagaaccaaacag

SEQ ID NO: 1942915 - DNA, 25 bp, Homo sapien
gagatttcagcccagactccagagc

SEQ ID NO: 1942916 - DNA, 25 bp, Homo sapien
caatttgcacagtcccatctcagag

SEQ ID NO: 1942917 - DNA, 25 bp, Homo sapien
tccttccctcttgtggtcctcaggg

SEQ ID NO: 1942918 - DNA, 25 bp, Homo sapien
ctccttccctcttgtggtcctcagg

SEQ ID NO: 1942919 - DNA, 25 bp, Homo sapien
tggtcctcagggcctaggaccacct

SEQ ID NO: 1942920 - DNA, 25 bp, Homo sapien
gactctctccgctgaatatgccctt

SEQ ID NO: 1942921 - DNA, 25 bp, Homo sapien
cccagttcaatggactgagagttct

SEQ ID NO: 1942922 - DNA, 25 bp, Homo sapien
ctctgtgtgatttctcacatcattc

SEQ ID NO: 1942923 - DNA, 25 bp, Homo sapien
tctgtctgaggttgtaaaaggtttc

SEQ ID NO: 1942924 - DNA, 25 bp, Homo sapien
accttcaggataggagccacagctc

SEQ ID NO: 1942925 - DNA, 25 bp, Homo sapien
ccttcaggataggagccacagctct

SEQ ID NO: 1942926 - DNA, 25 bp, Homo sapien
cattccagacaaactgccaatgatc

SEQ ID NO: 1942927 - DNA, 25 bp, Homo sapien
gtcattccagacaaactgccaatga

SEQ ID NO: 1942928 - DNA, 25 bp, Homo sapien
tcattccagacaaactgccaatgat

SEQ ID NO: 1942929 - DNA, 25 bp, Homo sapien
cttcctctaagcacttccgagccca

SEQ ID NO: 1942930 - DNA, 25 bp, Homo sapien
acacttcatacagtggtttctcact

SEQ ID NO: 1942931 - DNA, 25 bp, Homo sapien
gctttgtcgcccctgcttgtgtgtc

SEQ ID NO: 1942932 - DNA, 25 bp, Homo sapien
ctgagccccaaacacttcatacagt

SEQ ID NO: 1942933 - DNA, 25 bp, Homo sapien
actccggctttgtcgcccctgcttg

SEQ ID NO: 1942934 - DNA, 25 bp, Homo sapien
tcacattcatatctaagtgttcact

SEQ ID NO: 1942935 - DNA, 25 bp, Homo sapien
tgattctggatagctgtcatgtttc

SEQ ID NO: 1942936 - DNA, 25 bp, Homo sapien
ggcaatattaattccctctgacttt

SEQ ID NO: 1942937 - DNA, 25 bp, Homo sapien
aatttccccgcatgaaagaaggaag

SEQ ID NO: 1942938 - DNA, 25 bp, Homo sapien
cagctccctgtctgagaggtcgtgc

SEQ ID NO: 1942939 - DNA, 25 bp, Homo sapien
tcatagtcgtgatcccactccaggg

SEQ ID NO: 1942940 - DNA, 25 bp, Homo sapien
gtgccagtgcaggtccgacagagct

SEQ ID NO: 1942941 - DNA, 25 bp, Homo sapien
tccaggtcccgactgaggtcatagt

SEQ ID NO: 1942942 - DNA, 25 bp, Homo sapien
tggtatctttccacacgcccgaaga

SEQ ID NO: 1942943 - DNA, 25 bp, Homo sapien
gcaggcggatcagtttcttatggta

SEQ ID NO: 1942944 - DNA, 25 bp, Homo sapien
gatgatcgctgcatccaagggctca

SEQ ID NO: 1942945 - DNA, 25 bp, Homo sapien
agacctcctggcagtaccgtcggag

SEQ ID NO: 1942946 - DNA, 25 bp, Homo sapien
tggtaacttgaaaaataatctatta

SEQ ID NO: 1942947 - DNA, 25 bp, Homo sapien
agaccagaatgctgtcccgcgcagt

SEQ ID NO: 1942948 - DNA, 25 bp, Homo sapien
ttttagcttgaacatcacactcaga

SEQ ID NO: 1942949 - DNA, 25 bp, Homo sapien
actcctcacgctggccaataaaatg

SEQ ID NO: 1942950 - DNA, 25 bp, Homo sapien
tattagtgagctgcagatccatctc

SEQ ID NO: 1942951 - DNA, 25 bp, Homo sapien
tgtctcaagactgcattcaaatggc

SEQ ID NO: 1942952 - DNA, 25 bp, Homo sapien
tggcacagcgaattccagtgttctg

SEQ ID NO: 1942953 - DNA, 25 bp, Homo sapien
tctaaacatatggagatggcacagc

SEQ ID NO: 1942954 - DNA, 25 bp, Homo sapien
caatgagaagcctgcaatcctttgc

SEQ ID NO: 1942955 - DNA, 25 bp, Homo sapien
aggcactcgtggacctgtcgctgga

SEQ ID NO: 1942956 - DNA, 25 bp, Homo sapien
agtctgcgcaagatggaggtgacac

SEQ ID NO: 1942957 - DNA, 25 bp, Homo sapien
tgatcagttccagctgcgtcaggca

SEQ ID NO: 1942958 - DNA, 25 bp, Homo sapien
tgaggctacatgctgaatcagtgcg

SEQ ID NO: 1942959 - DNA, 25 bp, Homo sapien
ttctgaagacttcagccaatcttca

SEQ ID NO: 1942960 - DNA, 25 bp, Homo sapien
tccttggcaactgtatagatcaccc

SEQ ID NO: 1942961 - DNA, 25 bp, Homo sapien
caaaacgtgaatagtcatccagaaa

SEQ ID NO: 1942962 - DNA, 25 bp, Homo sapien
aatttctgccacaatcgccacgtct

SEQ ID NO: 1942963 - DNA, 25 bp, Homo sapien
tggacatagcacaaatgtttctcca

SEQ ID NO: 1942964 - DNA, 25 bp, Homo sapien
ttcagcctcctttccatggacatag

SEQ ID NO: 1942965 - DNA, 25 bp, Homo sapien
agcctcctttccatggacatagcac

SEQ ID NO: 1942966 - DNA, 25 bp, Homo sapien
ggacatagcacaaatgtttctccac

SEQ ID NO: 1942967 - DNA, 25 bp, Homo sapien
tcgtagcctgctgtatagagtcaca

SEQ ID NO: 1942968 - DNA, 25 bp, Homo sapien
tcacacaggttgaggacagatgcaa

SEQ ID NO: 1942969 - DNA, 25 bp, Homo sapien
tcgtgcagcaggacttcacacaggt

SEQ ID NO: 1942970 - DNA, 25 bp, Homo sapien
tagagtcacactcggcatcagtggc

SEQ ID NO: 1942971 - DNA, 25 bp, Homo sapien
atggaacctgttggcctcaatcgcc

SEQ ID NO: 1942972 - DNA, 25 bp, Homo sapien
tggccaggaggacagatattccatg

SEQ ID NO: 1942973 - DNA, 25 bp, Homo sapien
tccatggcttattaattccatttcc

SEQ ID NO: 1942974 - DNA, 25 bp, Homo sapien
gcctcaatcgcctgcctaggcaaag

SEQ ID NO: 1942975 - DNA, 25 bp, Homo sapien
aggaatcgtagactattggcttggc

SEQ ID NO: 1942976 - DNA, 25 bp, Homo sapien
tcgatgtgagcgagccaggtcctca

SEQ ID NO: 1942977 - DNA, 25 bp, Homo sapien
gctgcacggctaccagggtctcctt

SEQ ID NO: 1942978 - DNA, 25 bp, Homo sapien
tgttcttatcaagctgctgcacggc

SEQ ID NO: 1942979 - DNA, 25 bp, Homo sapien
acttcagcgagaggcccactcatgt

SEQ ID NO: 1942980 - DNA, 25 bp, Homo sapien
cagagaagggggaatgtcccacttc

SEQ ID NO: 1942981 - DNA, 25 bp, Homo sapien
tctagcgtgcagaggagaacactgg

SEQ ID NO: 1942982 - DNA, 25 bp, Homo sapien
agaacactgggctttaacaatcttt

SEQ ID NO: 1942983 - DNA, 25 bp, Homo sapien
gataatttttgggtgaagcgtcaca

SEQ ID NO: 1942984 - DNA, 25 bp, Homo sapien
cacatgtctgggtaagtttagcagc

SEQ ID NO: 1942985 - DNA, 25 bp, Homo sapien
tatcatcgtgagaagtctgagcaac

SEQ ID NO: 1942986 - DNA, 25 bp, Homo sapien
cattacttttggtaagcatccagga

SEQ ID NO: 1942987 - DNA, 25 bp, Homo sapien
cagtttcatcagaagcccatccttt

SEQ ID NO: 1942988 - DNA, 25 bp, Homo sapien
gaagcccatcctttaaatagcagat

SEQ ID NO: 1942989 - DNA, 25 bp, Homo sapien
atcagaagcccatcctttaaatagc

SEQ ID NO: 1942990 - DNA, 25 bp, Homo sapien
tttaaatagcagatgatggactaac

SEQ ID NO: 1942991 - DNA, 25 bp, Homo sapien
tgagtctttttctggatcgctttcc

SEQ ID NO: 1942992 - DNA, 25 bp, Homo sapien
tgacgcatacggtccagagacaact

SEQ ID NO: 1942993 - DNA, 25 bp, Homo sapien
tctggatcgctttcctgtgtctcag

SEQ ID NO: 1942994 - DNA, 25 bp, Homo sapien
tctagccatactccttgtatgacgc

SEQ ID NO: 1942995 - DNA, 25 bp, Homo sapien
caaaccaacgaataactcttgggag

SEQ ID NO: 1942996 - DNA, 25 bp, Homo sapien
gcgtctatcctacaaaccccacgta

SEQ ID NO: 1942997 - DNA, 25 bp, Homo sapien
gtaacatgaaagctatgtacaatgg

SEQ ID NO: 1942998 - DNA, 25 bp, Homo sapien
acagttctggattaaggcttccagc

SEQ ID NO: 1942999 - DNA, 25 bp, Homo sapien
gcagttacaatctgggagatctgca

SEQ ID NO: 1943000 - DNA, 25 bp, Homo sapien
cgcagttacaatctgggagatctgc

SEQ ID NO: 1943001 - DNA, 25 bp, Homo sapien
aagcttccacttgcaaaagttagac

SEQ ID NO: 1943002 - DNA, 25 bp, Homo sapien
agcttccacttgcaaaagttagact

SEQ ID NO: 1943003 - DNA, 25 bp, Homo sapien
gaagcttccacttgcaaaagttaga

SEQ ID NO: 1943004 - DNA, 25 bp, Homo sapien
cccttgtctgtgtatagaagtatga

SEQ ID NO: 1943005 - DNA, 25 bp, Homo sapien
agtatgaaaatgctcactgtagaca

SEQ ID NO: 1943006 - DNA, 25 bp, Homo sapien
caaaaagctatatcctgcgtgggga

SEQ ID NO: 1943007 - DNA, 25 bp, Homo sapien
acaaatgttggtagtctctgcccga

SEQ ID NO: 1943008 - DNA, 25 bp, Homo sapien
tcctggaatgtaggccacgagtgta

SEQ ID NO: 1943009 - DNA, 25 bp, Homo sapien
tgatctcctggaatgtaggccacga

SEQ ID NO: 1943010 - DNA, 25 bp, Homo sapien
aatgtaggccacgagtgtaagaagg

SEQ ID NO: 1943011 - DNA, 25 bp, Homo sapien
ggcttgatctcctggaatgtaggcc

SEQ ID NO: 1943012 - DNA, 25 bp, Homo sapien
tgacctccaacgtgggtagaacacc

SEQ ID NO: 1943013 - DNA, 25 bp, Homo sapien
taccagccgtgaattccaagaattt

SEQ ID NO: 1943014 - DNA, 25 bp, Homo sapien
cacagcctttgaactccctctggga

SEQ ID NO: 1943015 - DNA, 25 bp, Homo sapien
gagggcagctgctaggaacttcaca

SEQ ID NO: 1943016 - DNA, 25 bp, Homo sapien
catccaatctgtgcactaacgaagc

SEQ ID NO: 1943017 - DNA, 25 bp, Homo sapien
gaaatgtcgaaaggcatacactggg

SEQ ID NO: 1943018 - DNA, 25 bp, Homo sapien
aatgcaatgcagatgtgacagccgg

SEQ ID NO: 1943019 - DNA, 25 bp, Homo sapien
gacagccgggtgtctttcaggagaa

SEQ ID NO: 1943020 - DNA, 25 bp, Homo sapien
agattgtcgagatcaaaaacagaac

SEQ ID NO: 1943021 - DNA, 25 bp, Homo sapien
ttatcttgactctcacagtcactgt

SEQ ID NO: 1943022 - DNA, 25 bp, Homo sapien
actgagaaattagattgtcgagatc

SEQ ID NO: 1943023 - DNA, 25 bp, Homo sapien
aattagattgtcgagatcaaaaaca

SEQ ID NO: 1943024 - DNA, 25 bp, Homo sapien
ggtgagataacccaggaagagagac

SEQ ID NO: 1943025 - DNA, 25 bp, Homo sapien
tttttacaactgagcagagtggcaa

SEQ ID NO: 1943026 - DNA, 25 bp, Homo sapien
ctttaaaatactgcccacacgtgcc

SEQ ID NO: 1943027 - DNA, 25 bp, Homo sapien
cctgataggagtttgaatacccatg

SEQ ID NO: 1943028 - DNA, 25 bp, Homo sapien
tggctggctttagcaagtcgttctc

SEQ ID NO: 1943029 - DNA, 25 bp, Homo sapien
ggagatgctgccaccggtcgttgac

SEQ ID NO: 1943030 - DNA, 25 bp, Homo sapien
ggtcgttgacctttcccagcttgta

SEQ ID NO: 1943031 - DNA, 25 bp, Homo sapien
ccagcttgtattcaatctcagatgc

SEQ ID NO: 1943032 - DNA, 25 bp, Homo sapien
tcttgagcaatagcaatttcctctt

SEQ ID NO: 1943033 - DNA, 25 bp, Homo sapien
tgagcaatagcaatttcctcttgat

SEQ ID NO: 1943034 - DNA, 25 bp, Homo sapien
ttgagcaatagcaatttcctcttga

SEQ ID NO: 1943035 - DNA, 25 bp, Homo sapien
cttgagcaatagcaatttcctcttg

SEQ ID NO: 1943036 - DNA, 25 bp, Homo sapien
ggaaactcttaattcctatctgtgg

SEQ ID NO: 1943037 - DNA, 25 bp, Homo sapien
cctatctgtggtctataaatcatat

SEQ ID NO: 1943038 - DNA, 25 bp, Homo sapien
tcctatctgtggtctataaatcata

SEQ ID NO: 1943039 - DNA, 25 bp, Homo sapien
ttcttcaatgagaatgtctccattc

SEQ ID NO: 1943040 - DNA, 25 bp, Homo sapien
gagcttctctatcatttcttcaatg

SEQ ID NO: 1943041 - DNA, 25 bp, Homo sapien
caatgagaatgtctccattctgaga

SEQ ID NO: 1943042 - DNA, 25 bp, Homo sapien
cttcttgagcttctctatcatttct

SEQ ID NO: 1943043 - DNA, 25 bp, Homo sapien
tttgagtcaaccactcacagagttc

SEQ ID NO: 1943044 - DNA, 25 bp, Homo sapien
gaagactgcccattcattcaatctt

SEQ ID NO: 1943045 - DNA, 25 bp, Homo sapien
ttcactgaagactgcccattcattc

SEQ ID NO: 1943046 - DNA, 25 bp, Homo sapien
attcaatctttcacctatttgctgc

SEQ ID NO: 1943047 - DNA, 25 bp, Homo sapien
tatctaggagtagaatgtcttggtc

SEQ ID NO: 1943048 - DNA, 25 bp, Homo sapien
gagactcttcatgtttcttagccat

SEQ ID NO: 1943049 - DNA, 25 bp, Homo sapien
tatctactcaaatccgttgcctgct

SEQ ID NO: 1943050 - DNA, 25 bp, Homo sapien
ccctaaaggctaacaatactgagac

SEQ ID NO: 1943051 - DNA, 25 bp, Homo sapien
gagccgcgtgcactctgatcttctg

SEQ ID NO: 1943052 - DNA, 25 bp, Homo sapien
tgctgatctctcagattgagaactc

SEQ ID NO: 1943053 - DNA, 25 bp, Homo sapien
ctagctctgagagccgcgtgcactc

SEQ ID NO: 1943054 - DNA, 25 bp, Homo sapien
ctctcagattgagaactctctggtg

SEQ ID NO: 1943055 - DNA, 25 bp, Homo sapien
agccaagaatgaactctaggccttt

SEQ ID NO: 1943056 - DNA, 25 bp, Homo sapien
ccccgaatcttggccataagccaag

SEQ ID NO: 1943057 - DNA, 25 bp, Homo sapien
actgcccccgaatcttggccataag

SEQ ID NO: 1943058 - DNA, 25 bp, Homo sapien
gaactctaggcctttactcaccaat

SEQ ID NO: 1943059 - DNA, 25 bp, Homo sapien
tcccactgcctttgcagaagctcta

SEQ ID NO: 1943060 - DNA, 25 bp, Homo sapien
ggctcaactgggtcaagtcatctgt

SEQ ID NO: 1943061 - DNA, 25 bp, Homo sapien
taagaatggagatatcatcagcact

SEQ ID NO: 1943062 - DNA, 25 bp, Homo sapien
gctctacgcgttcattaagaatgga

SEQ ID NO: 1943063 - DNA, 25 bp, Homo sapien
tctgcagtgcagattaactccagtg

SEQ ID NO: 1943064 - DNA, 25 bp, Homo sapien
cactgtattacgtaggttttggtat

SEQ ID NO: 1943065 - DNA, 25 bp, Homo sapien
ctttatatacctggatacatgagca

SEQ ID NO: 1943066 - DNA, 25 bp, Homo sapien
tacatgagcatacataagtgacaga

SEQ ID NO: 1943067 - DNA, 25 bp, Homo sapien
cttcatggtgatccgggagagactg

SEQ ID NO: 1943068 - DNA, 25 bp, Homo sapien
tttgttctgcatggagctcttcatg

SEQ ID NO: 1943069 - DNA, 25 bp, Homo sapien
tgaaagttcgtagtttctccaggga

SEQ ID NO: 1943070 - DNA, 25 bp, Homo sapien
gcatggagctcttcatggtgatccg

SEQ ID NO: 1943071 - DNA, 25 bp, Homo sapien
gctagttttttcttctgttcttcca

SEQ ID NO: 1943072 - DNA, 25 bp, Homo sapien
ttttcttctgttcttccagccgcat

SEQ ID NO: 1943073 - DNA, 25 bp, Homo sapien
ttttttcttctgttcttccagccgc

SEQ ID NO: 1943074 - DNA, 25 bp, Homo sapien
tagttttttcttctgttcttccagc

SEQ ID NO: 1943075 - DNA, 25 bp, Homo sapien
cactgtccgccgagagaaggagttg

SEQ ID NO: 1943076 - DNA, 25 bp, Homo sapien
tccacagtcaggatgtagctgcctt

SEQ ID NO: 1943077 - DNA, 25 bp, Homo sapien
ccttgttgccgcagaaacacttttt

SEQ ID NO: 1943078 - DNA, 25 bp, Homo sapien
tcttggatttcagcgagttcggcct

SEQ ID NO: 1943079 - DNA, 25 bp, Homo sapien
ggagaaacgaacgaaagaacagtga

SEQ ID NO: 1943080 - DNA, 25 bp, Homo sapien
gctctcagagaaatttggaggagaa

SEQ ID NO: 1943081 - DNA, 25 bp, Homo sapien
catgtctgcgaatgagggctctcag

SEQ ID NO: 1943082 - DNA, 25 bp, Homo sapien
gggcagttgaagtcatgtctgcgaa

SEQ ID NO: 1943083 - DNA, 25 bp, Homo sapien
ggaggtaggacacttcaaccaacca

SEQ ID NO: 1943084 - DNA, 25 bp, Homo sapien
gaacacttccgagaccactcatggg

SEQ ID NO: 1943085 - DNA, 25 bp, Homo sapien
cacttcatcaaagagggtccttgct

SEQ ID NO: 1943086 - DNA, 25 bp, Homo sapien
tatagcgctgccactggcgaatctg

SEQ ID NO: 1943087 - DNA, 25 bp, Homo sapien
aatctgctgacgactgaacatctcg

SEQ ID NO: 1943088 - DNA, 25 bp, Homo sapien
ttgcccatcaataatgattgagtgc

SEQ ID NO: 1943089 - DNA, 25 bp, Homo sapien
gaccttgttctagaagacgttgccc

SEQ ID NO: 1943090 - DNA, 25 bp, Homo sapien
gcaaaatctgctgacgactgaacat

SEQ ID NO: 1943091 - DNA, 25 bp, Homo sapien
catttcgtagcatcttctaagggcc

SEQ ID NO: 1943092 - DNA, 25 bp, Homo sapien
tgatgcatgcatttagacactcgtg

SEQ ID NO: 1943093 - DNA, 25 bp, Homo sapien
tcatggagcagcgaataggactaca

SEQ ID NO: 1943094 - DNA, 25 bp, Homo sapien
aattctcccacacagcatttcgtag

SEQ ID NO: 1943095 - DNA, 25 bp, Homo sapien
tgatgttgtagcaaaaatgactgca

SEQ ID NO: 1943096 - DNA, 25 bp, Homo sapien
ttccaagaaagtctgatgttgtagc

SEQ ID NO: 1943097 - DNA, 25 bp, Homo sapien
tccaaaaggtgctgataatttcctg

SEQ ID NO: 1943098 - DNA, 25 bp, Homo sapien
ttcctgaaatctctactgctaactt

SEQ ID NO: 1943099 - DNA, 25 bp, Homo sapien
aaggaacaatggttatttcactgct

SEQ ID NO: 1943100 - DNA, 25 bp, Homo sapien
caaggaacaatggttatttcactgc

SEQ ID NO: 1943101 - DNA, 25 bp, Homo sapien
gaccaatggcggttcagattctgca

SEQ ID NO: 1943102 - DNA, 25 bp, Homo sapien
gatttccttatcattcaagggtaac

SEQ ID NO: 1943103 - DNA, 25 bp, Homo sapien
gtctaaatctggagccatgctgctg

SEQ ID NO: 1943104 - DNA, 25 bp, Homo sapien
caagggtaacctatatccaagctca

SEQ ID NO: 1943105 - DNA, 25 bp, Homo sapien
catcagctttgagtttcacttaaga

SEQ ID NO: 1943106 - DNA, 25 bp, Homo sapien
aagaaagagtgggtctacatcagct

SEQ ID NO: 1943107 - DNA, 25 bp, Homo sapien
cagagacgagaggttcaaaagttaa

SEQ ID NO: 1943108 - DNA, 25 bp, Homo sapien
cagagagataggagtagattgagct

SEQ ID NO: 1943109 - DNA, 25 bp, Homo sapien
agggtcctgcccttgtagtatttct

SEQ ID NO: 1943110 - DNA, 25 bp, Homo sapien
cgattgaatagctgatgctgcggaa

SEQ ID NO: 1943111 - DNA, 25 bp, Homo sapien
tgctgcggaagcatccacttgttgc

SEQ ID NO: 1943112 - DNA, 25 bp, Homo sapien
agagggaatctttaactgtgcccag

SEQ ID NO: 1943113 - DNA, 25 bp, Homo sapien
taatgaagtctgctgtttgcagaga

SEQ ID NO: 1943114 - DNA, 25 bp, Homo sapien
gctcattggttcgatcctcctgctg

SEQ ID NO: 1943115 - DNA, 25 bp, Homo sapien
gagtagtccttgtatctttgccaaa

SEQ ID NO: 1943116 - DNA, 25 bp, Homo sapien
gaagcacactgtttggagtagtcct

SEQ ID NO: 1943117 - DNA, 25 bp, Homo sapien
ccaaagctgaagtagggccttgctg

SEQ ID NO: 1943118 - DNA, 25 bp, Homo sapien
cacgggtgggtgacactcttttaat

SEQ ID NO: 1943119 - DNA, 25 bp, Homo sapien
ctttcagtgtattggtaagagtttc

SEQ ID NO: 1943120 - DNA, 25 bp, Homo sapien
tattggtaagagtttctgtcacggg

SEQ ID NO: 1943121 - DNA, 25 bp, Homo sapien
ataattggttggtgatagagccaaa

SEQ ID NO: 1943122 - DNA, 25 bp, Homo sapien
gtttttccagatcatcttggagatt

SEQ ID NO: 1943123 - DNA, 25 bp, Homo sapien
ttcctgtttttccagatcatcttgg

SEQ ID NO: 1943124 - DNA, 25 bp, Homo sapien
ctgtttttccagatcatcttggaga

SEQ ID NO: 1943125 - DNA, 25 bp, Homo sapien
tgtaagctcctttcctgtttttcca

SEQ ID NO: 1943126 - DNA, 25 bp, Homo sapien
gaatcgggaaagagagtatctggcc

SEQ ID NO: 1943127 - DNA, 25 bp, Homo sapien
taactgtttatcttgtcaaaggcca

SEQ ID NO: 1943128 - DNA, 25 bp, Homo sapien
ctgaagattgtccacctgaacttgc

SEQ ID NO: 1943129 - DNA, 25 bp, Homo sapien
gccagtcagcagacggaatcgggaa

SEQ ID NO: 1943130 - DNA, 25 bp, Homo sapien
tttcataatatctagaatgatggaa

SEQ ID NO: 1943131 - DNA, 25 bp, Homo sapien
aatatatattcaattgatgggaaaa

SEQ ID NO: 1943132 - DNA, 25 bp, Homo sapien
atttcataatatctagaatgatgga

SEQ ID NO: 1943133 - DNA, 25 bp, Homo sapien
tatattcaattgatgggaaaatatt

SEQ ID NO: 1943134 - DNA, 25 bp, Homo sapien
aatttgcccaggtttggccgagctc

SEQ ID NO: 1943135 - DNA, 25 bp, Homo sapien
gagctctcgcagtgtgctcatgaca

SEQ ID NO: 1943136 - DNA, 25 bp, Homo sapien
gttctgaatcaaagcaagtccattc

SEQ ID NO: 1943137 - DNA, 25 bp, Homo sapien
tgacaatgctagagacgtcttcttt

SEQ ID NO: 1943138 - DNA, 25 bp, Homo sapien
agaagcctgatctccaattcgatgc

SEQ ID NO: 1943139 - DNA, 25 bp, Homo sapien
aagattccaataagccttccaacag

SEQ ID NO: 1943140 - DNA, 25 bp, Homo sapien
aattcgatgctgttgttttagtctc

SEQ ID NO: 1943141 - DNA, 25 bp, Homo sapien
tcatattctgaccaagattccaata

SEQ ID NO: 1943142 - DNA, 25 bp, Homo sapien
tctcagttactagaccttgcagaat

SEQ ID NO: 1943143 - DNA, 25 bp, Homo sapien
gcaaaatcagtcttatcactacgct

SEQ ID NO: 1943144 - DNA, 25 bp, Homo sapien
tagcacggactggttcacaaaatcc

SEQ ID NO: 1943145 - DNA, 25 bp, Homo sapien
aaatccactgtcagctgtttacagt

SEQ ID NO: 1943146 - DNA, 25 bp, Homo sapien
gaaggtattcatgaattgccttgta

SEQ ID NO: 1943147 - DNA, 25 bp, Homo sapien
tccaactcatgacttcagaaatggc

SEQ ID NO: 1943148 - DNA, 25 bp, Homo sapien
tgccttgtaacctatggaattttta

SEQ ID NO: 1943149 - DNA, 25 bp, Homo sapien
tcagaaatggcatggcgggaaggca

SEQ ID NO: 1943150 - DNA, 25 bp, Homo sapien
cccggccagagttcactcttaatat

SEQ ID NO: 1943151 - DNA, 25 bp, Homo sapien
tcactcttaatattaatacaacggg

SEQ ID NO: 1943152 - DNA, 25 bp, Homo sapien
ggccagagttcactcttaatattaa

SEQ ID NO: 1943153 - DNA, 25 bp, Homo sapien
atattaatacaacgggagagagaag

SEQ ID NO: 1943154 - DNA, 25 bp, Homo sapien
atttcagggaagattgggcatccac

SEQ ID NO: 1943155 - DNA, 25 bp, Homo sapien
gatattggttagcaggtcagtccac

SEQ ID NO: 1943156 - DNA, 25 bp, Homo sapien
caccttttttagtcgaaggagctga

SEQ ID NO: 1943157 - DNA, 25 bp, Homo sapien
tatcaatgcgcgacagctcagagcg

SEQ ID NO: 1943158 - DNA, 25 bp, Homo sapien
tgctgagtccaaaattctagccggt

SEQ ID NO: 1943159 - DNA, 25 bp, Homo sapien
gaaagcatttagatgatcacggacc

SEQ ID NO: 1943160 - DNA, 25 bp, Homo sapien
tgtaaccagtgaattagatctgcag

SEQ ID NO: 1943161 - DNA, 25 bp, Homo sapien
tagccggtcttttgcagattgtaac

SEQ ID NO: 1943162 - DNA, 25 bp, Homo sapien
gccagcactctccaagttgatttag

SEQ ID NO: 1943163 - DNA, 25 bp, Homo sapien
cagaagtcgtttcccatcatctaat

SEQ ID NO: 1943164 - DNA, 25 bp, Homo sapien
tattggtgttacttagccagcactc

SEQ ID NO: 1943165 - DNA, 25 bp, Homo sapien
tggctttctagatctgagcagctga

SEQ ID NO: 1943166 - DNA, 25 bp, Homo sapien
cccacgcttgggatgctgctttcca

SEQ ID NO: 1943167 - DNA, 25 bp, Homo sapien
ctggtagagtgttatgcggtcaata

SEQ ID NO: 1943168 - DNA, 25 bp, Homo sapien
accagacccacgcttgggatgctgc

SEQ ID NO: 1943169 - DNA, 25 bp, Homo sapien
tcaataagcctgtcctcgttctcct

SEQ ID NO: 1943170 - DNA, 25 bp, Homo sapien
taccacagtaaggatttaagtcaaa

SEQ ID NO: 1943171 - DNA, 25 bp, Homo sapien
tgagtatgctcacttcactgtgcag

SEQ ID NO: 1943172 - DNA, 25 bp, Homo sapien
cacatctagcccaggtatgtatggt

SEQ ID NO: 1943173 - DNA, 25 bp, Homo sapien
gcctttcatgtaacgagtaaacaaa

SEQ ID NO: 1943174 - DNA, 25 bp, Homo sapien
cccgtttcagtacagcagaagcctg

SEQ ID NO: 1943175 - DNA, 25 bp, Homo sapien
tctagaatgtactccagctccacac

SEQ ID NO: 1943176 - DNA, 25 bp, Homo sapien
caagatcatatgagattccaggccc

SEQ ID NO: 1943177 - DNA, 25 bp, Homo sapien
tcagctctgtatggaactgggtttc

SEQ ID NO: 1943178 - DNA, 25 bp, Homo sapien
cccagggagaaagtctgaagtctac

SEQ ID NO: 1943179 - DNA, 25 bp, Homo sapien
gattacatagtaaacggccttgctg

SEQ ID NO: 1943180 - DNA, 25 bp, Homo sapien
ccaaccctggatctgagtagtcagc

SEQ ID NO: 1943181 - DNA, 25 bp, Homo sapien
caatgatggagtgatttcgggcctc

SEQ ID NO: 1943182 - DNA, 25 bp, Homo sapien
agggccctctcatactgactcttga

SEQ ID NO: 1943183 - DNA, 25 bp, Homo sapien
tcagccagatcttgtagggccctct

SEQ ID NO: 1943184 - DNA, 25 bp, Homo sapien
gacacgatgattttctggtctcctg

SEQ ID NO: 1943185 - DNA, 25 bp, Homo sapien
tccgggagccaatgatcatcatcag

SEQ ID NO: 1943186 - DNA, 25 bp, Homo sapien
gacggctgctcgacctgtagcttgt

SEQ ID NO: 1943187 - DNA, 25 bp, Homo sapien
taattcaatgattcctgcatcaaat

SEQ ID NO: 1943188 - DNA, 25 bp, Homo sapien
tgtagcttgtcaccacgcctcttta

SEQ ID NO: 1943189 - DNA, 25 bp, Homo sapien
agagttcttgcatggacggctgctc

SEQ ID NO: 1943190 - DNA, 25 bp, Homo sapien
ttgtcagccagtgatgtaaacagca

SEQ ID NO: 1943191 - DNA, 25 bp, Homo sapien
aacacatttgccagtttttgcagaa

SEQ ID NO: 1943192 - DNA, 25 bp, Homo sapien
ctctatttgttctgctacgggctgt

SEQ ID NO: 1943193 - DNA, 25 bp, Homo sapien
tctgctacgggctgttcaaacacat

SEQ ID NO: 1943194 - DNA, 25 bp, Homo sapien
acatgcaaacattctgactgtctaa

SEQ ID NO: 1943195 - DNA, 25 bp, Homo sapien
gatcacgcacatcaccaacatgcaa

SEQ ID NO: 1943196 - DNA, 25 bp, Homo sapien
gaaggataatcgtaccaaggaagaa

SEQ ID NO: 1943197 - DNA, 25 bp, Homo sapien
taatgagtggaaggataatcgtacc

SEQ ID NO: 1943198 - DNA, 25 bp, Homo sapien
tctcgattatcaccattctctggaa

SEQ ID NO: 1943199 - DNA, 25 bp, Homo sapien
aagacaacccaaagtatcttcaata

SEQ ID NO: 1943200 - DNA, 25 bp, Homo sapien
cgttgattcactactgagtctagca

SEQ ID NO: 1943201 - DNA, 25 bp, Homo sapien
gcaaggataacctgcccaaaagaca

SEQ ID NO: 1943202 - DNA, 25 bp, Homo sapien
ttctggtaaaagtgctgtggcaaca

SEQ ID NO: 1943203 - DNA, 25 bp, Homo sapien
aaccaagtagaggtggctgagactc

SEQ ID NO: 1943204 - DNA, 25 bp, Homo sapien
cgttcttcaacgtcatccaaccaag

SEQ ID NO: 1943205 - DNA, 25 bp, Homo sapien
tgtggcaacaaataaacgttcttca

SEQ ID NO: 1943206 - DNA, 25 bp, Homo sapien
ggatgaaacctcctcgaaggcttgg

SEQ ID NO: 1943207 - DNA, 25 bp, Homo sapien
cagatttatcttgggttggcacgtc

SEQ ID NO: 1943208 - DNA, 25 bp, Homo sapien
caagagtcgatttggcctgctataa

SEQ ID NO: 1943209 - DNA, 25 bp, Homo sapien
cagtggcacaccagacaagagtcga

SEQ ID NO: 1943210 - DNA, 25 bp, Homo sapien
ttctgcttggtactaaattcttgat

SEQ ID NO: 1943211 - DNA, 25 bp, Homo sapien
ggtcttcagcggatgatttctcccc

SEQ ID NO: 1943212 - DNA, 25 bp, Homo sapien
caactcctgggataacacatcaggt

SEQ ID NO: 1943213 - DNA, 25 bp, Homo sapien
cagaacattctgtagtagtttctgc

SEQ ID NO: 1943214 - DNA, 25 bp, Homo sapien
tgtatttcatttaggtcctttccaa

SEQ ID NO: 1943215 - DNA, 25 bp, Homo sapien
ttgtatttcatttaggtcctttcca

SEQ ID NO: 1943216 - DNA, 25 bp, Homo sapien
taaacacagaggttgcatgaaaact

SEQ ID NO: 1943217 - DNA, 25 bp, Homo sapien
agactgtacgtagtcagcattgacg

SEQ ID NO: 1943218 - DNA, 25 bp, Homo sapien
gatacggttacatcacttttggtta

SEQ ID NO: 1943219 - DNA, 25 bp, Homo sapien
cattgacgtcatatgtcagcactga

SEQ ID NO: 1943220 - DNA, 25 bp, Homo sapien
gactcttctgctcggctaattcctg

SEQ ID NO: 1943221 - DNA, 25 bp, Homo sapien
tactgagcgaaggagactcttctgc

SEQ ID NO: 1943222 - DNA, 25 bp, Homo sapien
tagaatctcctctccacgactggct

SEQ ID NO: 1943223 - DNA, 25 bp, Homo sapien
tgccgccgaatgttgaattagaatc

SEQ ID NO: 1943224 - DNA, 25 bp, Homo sapien
ggacaaacgcaaacacatttgctac

SEQ ID NO: 1943225 - DNA, 25 bp, Homo sapien
ctactttatgattattgcctacaat

SEQ ID NO: 1943226 - DNA, 25 bp, Homo sapien
caaacacatttgctactttatgatt

SEQ ID NO: 1943227 - DNA, 25 bp, Homo sapien
tcaagggaaaggacaaacgcaaaca

SEQ ID NO: 1943228 - DNA, 25 bp, Homo sapien
tttgcatattgcataaagcatgagg

SEQ ID NO: 1943229 - DNA, 25 bp, Homo sapien
tcggtagtgagcttttaagtttgca

SEQ ID NO: 1943230 - DNA, 25 bp, Homo sapien
tgtgtctccaaagtactctgtagtg

SEQ ID NO: 1943231 - DNA, 25 bp, Homo sapien
ctagctataaaattctcagagaact

SEQ ID NO: 1943232 - DNA, 25 bp, Homo sapien
tacactgaaacaccaacatcttgct

SEQ ID NO: 1943233 - DNA, 25 bp, Homo sapien
ccttctgaaatatgcctctcaggtt

SEQ ID NO: 1943234 - DNA, 25 bp, Homo sapien
tcccagtggtcatgagtcaatacac

SEQ ID NO: 1943235 - DNA, 25 bp, Homo sapien
tgggcagatctgcaagctagagaga

SEQ ID NO: 1943236 - DNA, 25 bp, Homo sapien
tccatgtggtgcgagcttgggccag

SEQ ID NO: 1943237 - DNA, 25 bp, Homo sapien
gctgggtccatgtggtgcgagcttg

SEQ ID NO: 1943238 - DNA, 25 bp, Homo sapien
gctgttaggtcaacatcgctctcct

SEQ ID NO: 1943239 - DNA, 25 bp, Homo sapien
ggctctgcgtggctgttaggtcaac

SEQ ID NO: 1943240 - DNA, 25 bp, Homo sapien
tctttatctttgcaaggcggtgtcg

SEQ ID NO: 1943241 - DNA, 25 bp, Homo sapien
ccttcagaatgggtgactagtgaca

SEQ ID NO: 1943242 - DNA, 25 bp, Homo sapien
gatccagccagagattgcagtttag

SEQ ID NO: 1943243 - DNA, 25 bp, Homo sapien
tggatgggcattctcccagaactgg

SEQ ID NO: 1943244 - DNA, 25 bp, Homo sapien
aaactagaagatccagcaatgccac

SEQ ID NO: 1943245 - DNA, 25 bp, Homo sapien
tagtaacagctgcttcttagacagg

SEQ ID NO: 1943246 - DNA, 25 bp, Homo sapien
taaatgattgctatcctacctagga

SEQ ID NO: 1943247 - DNA, 25 bp, Homo sapien
ccaggccacgagaccttggaatttg

SEQ ID NO: 1943248 - DNA, 25 bp, Homo sapien
acacacacaagtacgcgtcaccgcc

SEQ ID NO: 1943249 - DNA, 25 bp, Homo sapien
cagcgtaaagcaggtacacacacaa

SEQ ID NO: 1943250 - DNA, 25 bp, Homo sapien
atgtcagcgtaaagcaggtacacac

SEQ ID NO: 1943251 - DNA, 25 bp, Homo sapien
aagtacgcgtcaccgccaacctgtt

SEQ ID NO: 1943252 - DNA, 25 bp, Homo sapien
cgtgaacagtgtgccaactttcagc

SEQ ID NO: 1943253 - DNA, 25 bp, Homo sapien
gaaggagcacgtgaacagtgtgcca

SEQ ID NO: 1943254 - DNA, 25 bp, Homo sapien
gtgggccagcggctggaaccctcac

SEQ ID NO: 1943255 - DNA, 25 bp, Homo sapien
ggagcacgtgaacagtgtgccaact

SEQ ID NO: 1943256 - DNA, 25 bp, Homo sapien
catgttgagctgcttatcatgcagg

SEQ ID NO: 1943257 - DNA, 25 bp, Homo sapien
cagcaggttctcattgtggactgac

SEQ ID NO: 1943258 - DNA, 25 bp, Homo sapien
tgctcggcctcgtccttggtgtgag

SEQ ID NO: 1943259 - DNA, 25 bp, Homo sapien
ttggtgtgagctttgccctccagca

SEQ ID NO: 1943260 - DNA, 25 bp, Homo sapien
cactgcggcctccatctactgggtt

SEQ ID NO: 1943261 - DNA, 25 bp, Homo sapien
gggttcaagggatccccttgcctga

SEQ ID NO: 1943262 - DNA, 25 bp, Homo sapien
ttttttcaacagaaacaaggtctca

SEQ ID NO: 1943263 - DNA, 25 bp, Homo sapien
ggcctccatctactgggttcaaggg

SEQ ID NO: 1943264 - DNA, 25 bp, Homo sapien
tttaattgtctgttatggtattaga

SEQ ID NO: 1943265 - DNA, 25 bp, Homo sapien
tatggtattagaggggtccataaaa

SEQ ID NO: 1943266 - DNA, 25 bp, Homo sapien
tctgttatggtattagaggggtcca

SEQ ID NO: 1943267 - DNA, 25 bp, Homo sapien
aattgtctgttatggtattagaggg

SEQ ID NO: 1943268 - DNA, 25 bp, Homo sapien
tttcttcttcctagataagacttaa

SEQ ID NO: 1943269 - DNA, 25 bp, Homo sapien
tcttcctagataagacttaaaacaa

SEQ ID NO: 1943270 - DNA, 25 bp, Homo sapien
aatggagactaaattagagaaaaag

SEQ ID NO: 1943271 - DNA, 25 bp, Homo sapien
tcttcttcctagataagacttaaaa

SEQ ID NO: 1943272 - DNA, 25 bp, Homo sapien
gacaagattttagctggcttatatg

SEQ ID NO: 1943273 - DNA, 25 bp, Homo sapien
aacccacggaccatgggccgcatgt

SEQ ID NO: 1943274 - DNA, 25 bp, Homo sapien
catattagattttaactgacaagat

SEQ ID NO: 1943275 - DNA, 25 bp, Homo sapien
gtgtgcaactgaattcatattagat

SEQ ID NO: 1943276 - DNA, 25 bp, Homo sapien
gattgaacacccctgtcttaaagta

SEQ ID NO: 1943277 - DNA, 25 bp, Homo sapien
taattaatctctatcatcatggcaa

SEQ ID NO: 1943278 - DNA, 25 bp, Homo sapien
gcaatgggctaatagatgtttcttc

SEQ ID NO: 1943279 - DNA, 25 bp, Homo sapien
gtttgggtggtaacttcaagtgcca

SEQ ID NO: 1943280 - DNA, 25 bp, Homo sapien
tccttgggtggactcagcgcagtgt

SEQ ID NO: 1943281 - DNA, 25 bp, Homo sapien
cagagtggccttggtactcaagagc

SEQ ID NO: 1943282 - DNA, 25 bp, Homo sapien
agtccataagctgggcctccatgtc

SEQ ID NO: 1943283 - DNA, 25 bp, Homo sapien
tgtccagctcatcggcttcacagcg

SEQ ID NO: 1943284 - DNA, 25 bp, Homo sapien
gacaccggacctctatttctgggaa

SEQ ID NO: 1943285 - DNA, 25 bp, Homo sapien
taacatacctataggaccaggcagt

SEQ ID NO: 1943286 - DNA, 25 bp, Homo sapien
cataaagcggttggtaaatggcagt

SEQ ID NO: 1943287 - DNA, 25 bp, Homo sapien
aacatgcggcctgtctaaaacagca

SEQ ID NO: 1943288 - DNA, 25 bp, Homo sapien
gggtcggcctcacaagactcggata

SEQ ID NO: 1943289 - DNA, 25 bp, Homo sapien
tcggctaagacagtgagcgtggact

SEQ ID NO: 1943290 - DNA, 25 bp, Homo sapien
catcctgatggtggacattcgctcg

SEQ ID NO: 1943291 - DNA, 25 bp, Homo sapien
tttccccgaggctttcatcctgatg

SEQ ID NO: 1943292 - DNA, 25 bp, Homo sapien
tcattatggctcaagctggagactt

SEQ ID NO: 1943293 - DNA, 25 bp, Homo sapien
tcaacttacctagttcacgggtgtc

SEQ ID NO: 1943294 - DNA, 25 bp, Homo sapien
tgttgctccagtccagtctatatga

SEQ ID NO: 1943295 - DNA, 25 bp, Homo sapien
tgagcacttccaaaggtacatccct

SEQ ID NO: 1943296 - DNA, 25 bp, Homo sapien
ccagagcggcaactatgatttcaag

SEQ ID NO: 1943297 - DNA, 25 bp, Homo sapien
ctatatatatccatgctgctgctac

SEQ ID NO: 1943298 - DNA, 25 bp, Homo sapien
gcctcctcagagtgggctctcacaa

SEQ ID NO: 1943299 - DNA, 25 bp, Homo sapien
gaacagattataagcacaccaacta

SEQ ID NO: 1943300 - DNA, 25 bp, Homo sapien
ccctatctggtaggatatatctttc

SEQ ID NO: 1943301 - DNA, 25 bp, Homo sapien
gaattagcttgtcaacctccaccaa

SEQ ID NO: 1943302 - DNA, 25 bp, Homo sapien
tccaccaaaaaacttgctgcaattt

SEQ ID NO: 1943303 - DNA, 25 bp, Homo sapien
ccctgttgctcgtgctggagtcagt

SEQ ID NO: 1943304 - DNA, 25 bp, Homo sapien
gcccagcctcacttaaatcttgtta

SEQ ID NO: 1943305 - DNA, 25 bp, Homo sapien
gcagtcctctccactcatgcttgag

SEQ ID NO: 1943306 - DNA, 25 bp, Homo sapien
cagagagagacagtggttgtacagc

SEQ ID NO: 1943307 - DNA, 25 bp, Homo sapien
ctctgagtataagagctggtggcca

SEQ ID NO: 1943308 - DNA, 25 bp, Homo sapien
caagcaattctgctgtctcagcctc

SEQ ID NO: 1943309 - DNA, 25 bp, Homo sapien
tctgctgtctcagcctcctgagtag

SEQ ID NO: 1943310 - DNA, 25 bp, Homo sapien
cactgtaacctccaccttccaggtt

SEQ ID NO: 1943311 - DNA, 25 bp, Homo sapien
ctgtcacctagctgccatctctgct

SEQ ID NO: 1943312 - DNA, 25 bp, Homo sapien
tacagtacctggtattcctgggcag

SEQ ID NO: 1943313 - DNA, 25 bp, Homo sapien
cctacagtacctggtattcctgggc

SEQ ID NO: 1943314 - DNA, 25 bp, Homo sapien
taagcctacagtacctggtattcct

SEQ ID NO: 1943315 - DNA, 25 bp, Homo sapien
cagtacctggtattcctgggcagtc

SEQ ID NO: 1943316 - DNA, 25 bp, Homo sapien
ccctgaatcagtagtagaaatgacc

SEQ ID NO: 1943317 - DNA, 25 bp, Homo sapien
gaaatgaccaccattaggacccttg

SEQ ID NO: 1943318 - DNA, 25 bp, Homo sapien
gtctcaaacacatgcctgacaggcc

SEQ ID NO: 1943319 - DNA, 25 bp, Homo sapien
taattagattcaaggtctgcatgtc

SEQ ID NO: 1943320 - DNA, 25 bp, Homo sapien
aaactgaagtcatggctatttgtac

SEQ ID NO: 1943321 - DNA, 25 bp, Homo sapien
ttattcaatcaagtaggaaactgaa

SEQ ID NO: 1943322 - DNA, 25 bp, Homo sapien
gaaactgaagtcatggctatttgta

SEQ ID NO: 1943323 - DNA, 25 bp, Homo sapien
ttcaatcaagtaggaaactgaagtc

SEQ ID NO: 1943324 - DNA, 25 bp, Homo sapien
tagagtgtgcgctgcttctcactga

SEQ ID NO: 1943325 - DNA, 25 bp, Homo sapien
ctcactgagtttcagctcaatggcc

SEQ ID NO: 1943326 - DNA, 25 bp, Homo sapien
agggagtcctggtacttctgctggc

SEQ ID NO: 1943327 - DNA, 25 bp, Homo sapien
tctgctggcgttccaaagcttcata

SEQ ID NO: 1943328 - DNA, 25 bp, Homo sapien
gcatctgtctgcaacctctcagcag

SEQ ID NO: 1943329 - DNA, 25 bp, Homo sapien
tttaaggtttcccaagaacgctgca

SEQ ID NO: 1943330 - DNA, 25 bp, Homo sapien
agtagcggatggctccaatcccggt

SEQ ID NO: 1943331 - DNA, 25 bp, Homo sapien
catagaactcctgggatgcggatgt

SEQ ID NO: 1943332 - DNA, 25 bp, Homo sapien
aagtattgaagaaggctccagccgt

SEQ ID NO: 1943333 - DNA, 25 bp, Homo sapien
tgagaatcatgtattggtaaaaagt

SEQ ID NO: 1943334 - DNA, 25 bp, Homo sapien
catgtattggtaaaaagtattgaag

SEQ ID NO: 1943335 - DNA, 25 bp, Homo sapien
ctgagtcttattgagaatcatgtat

SEQ ID NO: 1943336 - DNA, 25 bp, Homo sapien
gatgactgcagagcttgctctcacc

SEQ ID NO: 1943337 - DNA, 25 bp, Homo sapien
cactcactcgccaatattggtgaat

SEQ ID NO: 1943338 - DNA, 25 bp, Homo sapien
ttggactttgatcctgatgactgca

SEQ ID NO: 1943339 - DNA, 25 bp, Homo sapien
gccagacctctagcattcaatagca

SEQ ID NO: 1943340 - DNA, 25 bp, Homo sapien
gaagcatctgtattagccacaggtg

SEQ ID NO: 1943341 - DNA, 25 bp, Homo sapien
ctccccagactcctcagtgaccggt

SEQ ID NO: 1943342 - DNA, 25 bp, Homo sapien
gcatctgtattagccacaggtgaag

SEQ ID NO: 1943343 - DNA, 25 bp, Homo sapien
cccagactcctcagtgaccggtgac

SEQ ID NO: 1943344 - DNA, 25 bp, Homo sapien
caaagtgtgacagcgacctgcagtc

SEQ ID NO: 1943345 - DNA, 25 bp, Homo sapien
gcaaagtgtgacagcgacctgcagt

SEQ ID NO: 1943346 - DNA, 25 bp, Homo sapien
ggtagcccttaattttctgcgccag

SEQ ID NO: 1943347 - DNA, 25 bp, Homo sapien
ggctttcatcgtcagcatcttgcac

SEQ ID NO: 1943348 - DNA, 25 bp, Homo sapien
catggtggcgtgcttggctttcatc

SEQ ID NO: 1943349 - DNA, 25 bp, Homo sapien
aagaagcgatctgctcctggtagcc

SEQ ID NO: 1943350 - DNA, 25 bp, Homo sapien
gggttggttattcaagctgtggtca

SEQ ID NO: 1943351 - DNA, 25 bp, Homo sapien
tagagtggccgctagaagacaagca

SEQ ID NO: 1943352 - DNA, 25 bp, Homo sapien
ccctctgtggccagtctctggtatt

SEQ ID NO: 1943353 - DNA, 25 bp, Homo sapien
atgagcaggctttccgcatcaggcg

SEQ ID NO: 1943354 - DNA, 25 bp, Homo sapien
gcctgcagctcctgtatgttactgg

SEQ ID NO: 1943355 - DNA, 25 bp, Homo sapien
tgttactggtggcaacaggtttatc

SEQ ID NO: 1943356 - DNA, 25 bp, Homo sapien
tgtgagctccttctatcagttgctg

SEQ ID NO: 1943357 - DNA, 25 bp, Homo sapien
aacaggtttatcctcaatctctctg

SEQ ID NO: 1943358 - DNA, 25 bp, Homo sapien
tgttgtagcaaaattattgatggaa

SEQ ID NO: 1943359 - DNA, 25 bp, Homo sapien
gatggaatcaaaatagttaagtggt

SEQ ID NO: 1943360 - DNA, 25 bp, Homo sapien
ctctcttttccctactgatatcgtc

SEQ ID NO: 1943361 - DNA, 25 bp, Homo sapien
tctctctaaaatgttgtagcaaaat

SEQ ID NO: 1943362 - DNA, 25 bp, Homo sapien
catgatgttacactgctggatggcg

SEQ ID NO: 1943363 - DNA, 25 bp, Homo sapien
tgacagagaggtaagctggcaacca

SEQ ID NO: 1943364 - DNA, 25 bp, Homo sapien
ttgcaccttcggcttcagtgactcc

SEQ ID NO: 1943365 - DNA, 25 bp, Homo sapien
ggcagagctgcactgcttgcacctt

SEQ ID NO: 1943366 - DNA, 25 bp, Homo sapien
ccaaggcagcttgtaactttttcaa

SEQ ID NO: 1943367 - DNA, 25 bp, Homo sapien
tgagacgtccaacttctggagaagt

SEQ ID NO: 1943368 - DNA, 25 bp, Homo sapien
ctccttgagactgagacgtccaact

SEQ ID NO: 1943369 - DNA, 25 bp, Homo sapien
caaggcagcttgtaactttttcaac

SEQ ID NO: 1943370 - DNA, 25 bp, Homo sapien
cacgctagtgaggtactgtaatttc

SEQ ID NO: 1943371 - DNA, 25 bp, Homo sapien
tcttggaggttctgcaaacgaattt

SEQ ID NO: 1943372 - DNA, 25 bp, Homo sapien
gatcatctgtcgcaactcctcagtc

SEQ ID NO: 1943373 - DNA, 25 bp, Homo sapien
attttttctgtacagtacacgctag

SEQ ID NO: 1943374 - DNA, 25 bp, Homo sapien
tttctttggattcttctagcagggt

SEQ ID NO: 1943375 - DNA, 25 bp, Homo sapien
cataaaatgccctgtgtaagttctg

SEQ ID NO: 1943376 - DNA, 25 bp, Homo sapien
tattcatgacattgacgggcaggta

SEQ ID NO: 1943377 - DNA, 25 bp, Homo sapien
tacgtgtgggaccatgaagctcctg

SEQ ID NO: 1943378 - DNA, 25 bp, Homo sapien
ggtcacatgtcatactacgtgtggg

SEQ ID NO: 1943379 - DNA, 25 bp, Homo sapien
gatgtggactcatggcttgctctgg

SEQ ID NO: 1943380 - DNA, 25 bp, Homo sapien
aatttcctggatgacgtgactgaca

SEQ ID NO: 1943381 - DNA, 25 bp, Homo sapien
tgcatggcggagcttggttttccca

SEQ ID NO: 1943382 - DNA, 25 bp, Homo sapien
gcacgtggcccagagtagcaacatt

SEQ ID NO: 1943383 - DNA, 25 bp, Homo sapien
tggcttgcagaattccatgcaatag

SEQ ID NO: 1943384 - DNA, 25 bp, Homo sapien
gcaatagttccatgagccaagactt

SEQ ID NO: 1943385 - DNA, 25 bp, Homo sapien
tattgttcccgaagctggcttgcag

SEQ ID NO: 1943386 - DNA, 25 bp, Homo sapien
caagactttagctttttcaatccac

SEQ ID NO: 1943387 - DNA, 25 bp, Homo sapien
gcttgtctaatggtctgctggtgaa

SEQ ID NO: 1943388 - DNA, 25 bp, Homo sapien
tacccagttggccattctgttccaa

SEQ ID NO: 1943389 - DNA, 25 bp, Homo sapien
ttggagagccgattctcagcttgtc

SEQ ID NO: 1943390 - DNA, 25 bp, Homo sapien
ctatcttcttggccagtggcttacc

SEQ ID NO: 1943391 - DNA, 25 bp, Homo sapien
ctttgaattacagccatctaattcc

SEQ ID NO: 1943392 - DNA, 25 bp, Homo sapien
aactttgaattacagccatctaatt

SEQ ID NO: 1943393 - DNA, 25 bp, Homo sapien
tttgaattacagccatctaattcct

SEQ ID NO: 1943394 - DNA, 25 bp, Homo sapien
taactttgaattacagccatctaat

SEQ ID NO: 1943395 - DNA, 25 bp, Homo sapien
tccaggtttcccgagatcagactga

SEQ ID NO: 1943396 - DNA, 25 bp, Homo sapien
caggtttcccgagatcagactgatt

SEQ ID NO: 1943397 - DNA, 25 bp, Homo sapien
tctccaggtttcccgagatcagact

SEQ ID NO: 1943398 - DNA, 25 bp, Homo sapien
ggtttcccgagatcagactgatttt

SEQ ID NO: 1943399 - DNA, 25 bp, Homo sapien
tgtcttcgctttcagcttagttaga

SEQ ID NO: 1943400 - DNA, 25 bp, Homo sapien
aatttgccggctgagttcctggctc

SEQ ID NO: 1943401 - DNA, 25 bp, Homo sapien
ttagcttgaactacattatctgtct

SEQ ID NO: 1943402 - DNA, 25 bp, Homo sapien
gcttagttagaatagttgtgaggtc

SEQ ID NO: 1943403 - DNA, 25 bp, Homo sapien
tcaatgttctgtcggtgatttgtgg

SEQ ID NO: 1943404 - DNA, 25 bp, Homo sapien
tagatctaacgccacttcagccaac

SEQ ID NO: 1943405 - DNA, 25 bp, Homo sapien
tatggtataaagacctaagtacttc

SEQ ID NO: 1943406 - DNA, 25 bp, Homo sapien
gagagttcagaaggtaatatggtat

SEQ ID NO: 1943407 - DNA, 25 bp, Homo sapien
tatttctattgttggattccctaaa

SEQ ID NO: 1943408 - DNA, 25 bp, Homo sapien
tccaccatttctcggtccttcagct

SEQ ID NO: 1943409 - DNA, 25 bp, Homo sapien
cccaacatttcacagaattgatctg

SEQ ID NO: 1943410 - DNA, 25 bp, Homo sapien
gtttcctgaacccaacatttcacag

SEQ ID NO: 1943411 - DNA, 25 bp, Homo sapien
gcatgctcagggtttgctgccgcag

SEQ ID NO: 1943412 - DNA, 25 bp, Homo sapien
ctccagctccagaacgaacgtgtcg

SEQ ID NO: 1943413 - DNA, 25 bp, Homo sapien
ttcaggcaccgatcttgcatggcgg

SEQ ID NO: 1943414 - DNA, 25 bp, Homo sapien
gatttcctgcatgagcggaggctct

SEQ ID NO: 1943415 - DNA, 25 bp, Homo sapien
tggctttgctggcatcatttccggt

SEQ ID NO: 1943416 - DNA, 25 bp, Homo sapien
tggtcattgacctgctcagggtggc

SEQ ID NO: 1943417 - DNA, 25 bp, Homo sapien
ccagcgctgccagacggtggtcatt

SEQ ID NO: 1943418 - DNA, 25 bp, Homo sapien
cttgttgttaaagcccgtccactca

SEQ ID NO: 1943419 - DNA, 25 bp, Homo sapien
tgactagacgaagtcttcaacaaag

SEQ ID NO: 1943420 - DNA, 25 bp, Homo sapien
gtgttctgacaatttttcttccgct

SEQ ID NO: 1943421 - DNA, 25 bp, Homo sapien
tccgcttcatgactagacgaagtct

SEQ ID NO: 1943422 - DNA, 25 bp, Homo sapien
tgtatcattcatcaattcaataacc

SEQ ID NO: 1943423 - DNA, 25 bp, Homo sapien
ggtaatcgtgccattgagctgtgca

SEQ ID NO: 1943424 - DNA, 25 bp, Homo sapien
ctggtaatcgtgccattgagctgtg

SEQ ID NO: 1943425 - DNA, 25 bp, Homo sapien
gtaatcgtgccattgagctgtgcat

SEQ ID NO: 1943426 - DNA, 25 bp, Homo sapien
tggtaatcgtgccattgagctgtgc

SEQ ID NO: 1943427 - DNA, 25 bp, Homo sapien
gctaatgtatatcattcgtgtatta

SEQ ID NO: 1943428 - DNA, 25 bp, Homo sapien
tatcattcgtgtattactactttca

SEQ ID NO: 1943429 - DNA, 25 bp, Homo sapien
tgtatatcattcgtgtattactact

SEQ ID NO: 1943430 - DNA, 25 bp, Homo sapien
cattcgtgtattactactttcagtg

SEQ ID NO: 1943431 - DNA, 25 bp, Homo sapien
ttgggcaccagagtcccggctcatc

SEQ ID NO: 1943432 - DNA, 25 bp, Homo sapien
gaagccactttctgttctaggtctt

SEQ ID NO: 1943433 - DNA, 25 bp, Homo sapien
tctttgccggttggcttgatgagtg

SEQ ID NO: 1943434 - DNA, 25 bp, Homo sapien
acttgggcaccagagtcccggctca

SEQ ID NO: 1943435 - DNA, 25 bp, Homo sapien
tgggcatcctcaagccagtcattgg

SEQ ID NO: 1943436 - DNA, 25 bp, Homo sapien
taggccattgcctgccagctgtaac

SEQ ID NO: 1943437 - DNA, 25 bp, Homo sapien
ggaactgatcctctgtactgaaaaa

SEQ ID NO: 1943438 - DNA, 25 bp, Homo sapien
agattttcctctgcgctctccacgt

SEQ ID NO: 1943439 - DNA, 25 bp, Homo sapien
ggctatatatttcagtcaaggtagc

SEQ ID NO: 1943440 - DNA, 25 bp, Homo sapien
ctttgacactggctatatatttcag

SEQ ID NO: 1943441 - DNA, 25 bp, Homo sapien
ctggctatatatttcagtcaaggta

SEQ ID NO: 1943442 - DNA, 25 bp, Homo sapien
ttgacactggctatatatttcagtc

SEQ ID NO: 1943443 - DNA, 25 bp, Homo sapien
tataaggtgacaaggtgcagcatct

SEQ ID NO: 1943444 - DNA, 25 bp, Homo sapien
tccttcattagttcgcgaccctggg

SEQ ID NO: 1943445 - DNA, 25 bp, Homo sapien
gaggctgtgttctaaatccgcagaa

SEQ ID NO: 1943446 - DNA, 25 bp, Homo sapien
gttgaggtctaggtacaccggccca

SEQ ID NO: 1943447 - DNA, 25 bp, Homo sapien
acagacagatgtgttcacggaacat

SEQ ID NO: 1943448 - DNA, 25 bp, Homo sapien
cattatctttcgctcatgttgctga

SEQ ID NO: 1943449 - DNA, 25 bp, Homo sapien
ctggtaacagacagatgtgttcacg

SEQ ID NO: 1943450 - DNA, 25 bp, Homo sapien
tgttcacggaacattatctttcgct

SEQ ID NO: 1943451 - DNA, 25 bp, Homo sapien
gatgacctgtcgctcattgagacca

SEQ ID NO: 1943452 - DNA, 25 bp, Homo sapien
tgaggtcctcaagctgaaaccaacg

SEQ ID NO: 1943453 - DNA, 25 bp, Homo sapien
taagtcactgagacaattcacgtgg

SEQ ID NO: 1943454 - DNA, 25 bp, Homo sapien
gctttgtgcatcagagagagccttc

SEQ ID NO: 1943455 - DNA, 25 bp, Homo sapien
cacaggttgttagactgacggcaca

SEQ ID NO: 1943456 - DNA, 25 bp, Homo sapien
tcttccctttgcaagcacaggttgt

SEQ ID NO: 1943457 - DNA, 25 bp, Homo sapien
tctattatggtgttcacggatgcct

SEQ ID NO: 1943458 - DNA, 25 bp, Homo sapien
tgacggcacaaatcgagccactgat

SEQ ID NO: 1943459 - DNA, 25 bp, Homo sapien
cctaacaggacatggacttgtgctt

SEQ ID NO: 1943460 - DNA, 25 bp, Homo sapien
tgacagacactcaggcatattgaag

SEQ ID NO: 1943461 - DNA, 25 bp, Homo sapien
cacagagttttctgactaagcagtc

SEQ ID NO: 1943462 - DNA, 25 bp, Homo sapien
tactctgtagactaaatcacacctg

SEQ ID NO: 1943463 - DNA, 25 bp, Homo sapien
ccagccctgagttaagttctgggcc

SEQ ID NO: 1943464 - DNA, 25 bp, Homo sapien
cttaacttgtgaaaccatgttctgt

SEQ ID NO: 1943465 - DNA, 25 bp, Homo sapien
tgttctgtgcaatgttcagctccag

SEQ ID NO: 1943466 - DNA, 25 bp, Homo sapien
tcttcatgttctgcagttgctgatc

SEQ ID NO: 1943467 - DNA, 25 bp, Homo sapien
tgcctgctcttgcaaagctctgaag

SEQ ID NO: 1943468 - DNA, 25 bp, Homo sapien
gagcaaaggagatctaggtaggtcc

SEQ ID NO: 1943469 - DNA, 25 bp, Homo sapien
ttttgctgtggttttcaccgaagca

SEQ ID NO: 1943470 - DNA, 25 bp, Homo sapien
agcatttgacaggtcacacatggag

SEQ ID NO: 1943471 - DNA, 25 bp, Homo sapien
tctgccctactaagaggtggttgag

SEQ ID NO: 1943472 - DNA, 25 bp, Homo sapien
aaatccggctggactgcagaaagcc

SEQ ID NO: 1943473 - DNA, 25 bp, Homo sapien
gaagttcgtgttccaaactctggta

SEQ ID NO: 1943474 - DNA, 25 bp, Homo sapien
tgtcttgtcggctgacgtgcttctg

SEQ ID NO: 1943475 - DNA, 25 bp, Homo sapien
tgttcaaacggtcttcaaaaccagc

SEQ ID NO: 1943476 - DNA, 25 bp, Homo sapien
taagtttcgcttgcaggtggtctgc

SEQ ID NO: 1943477 - DNA, 25 bp, Homo sapien
cctgcagatgagcatgcacgttttg

SEQ ID NO: 1943478 - DNA, 25 bp, Homo sapien
cattggccaatcaaagtatcacctt

SEQ ID NO: 1943479 - DNA, 25 bp, Homo sapien
tgctgggtgattgtctccaggctgc

SEQ ID NO: 1943480 - DNA, 25 bp, Homo sapien
catggtctttgactttcgcctccag

SEQ ID NO: 1943481 - DNA, 25 bp, Homo sapien
gactttcgcctccagactgaagaca

SEQ ID NO: 1943482 - DNA, 25 bp, Homo sapien
cagccacttttcgacctcttggagc

SEQ ID NO: 1943483 - DNA, 25 bp, Homo sapien
gtcctggtaatcactttgaagttga

SEQ ID NO: 1943484 - DNA, 25 bp, Homo sapien
tcctatgctgcacaggtcctggtaa

SEQ ID NO: 1943485 - DNA, 25 bp, Homo sapien
taaagtgacgtcctgcaccagttcc

SEQ ID NO: 1943486 - DNA, 25 bp, Homo sapien
tactgatggttcatgggacagcacc

SEQ ID NO: 1943487 - DNA, 25 bp, Homo sapien
gaattcctttgctaaatgaagacct

SEQ ID NO: 1943488 - DNA, 25 bp, Homo sapien
tgtagaatttcctggtattctgcta

SEQ ID NO: 1943489 - DNA, 25 bp, Homo sapien
tttccagcgtcatgtgttctttccg

SEQ ID NO: 1943490 - DNA, 25 bp, Homo sapien
gggttcttcaggaacatgtagaatt

SEQ ID NO: 1943491 - DNA, 25 bp, Homo sapien
cataaccagatttgacgtgccagga

SEQ ID NO: 1943492 - DNA, 25 bp, Homo sapien
cactgggccattaatttgagagaga

SEQ ID NO: 1943493 - DNA, 25 bp, Homo sapien
agcaatctccttctaaagacctgag

SEQ ID NO: 1943494 - DNA, 25 bp, Homo sapien
aaagctagcttttggccttaaggag

SEQ ID NO: 1943495 - DNA, 25 bp, Homo sapien
tactttgtcaatcttggtagccaca

SEQ ID NO: 1943496 - DNA, 25 bp, Homo sapien
tcttccccatcattactgtatctac

SEQ ID NO: 1943497 - DNA, 25 bp, Homo sapien
tatgagtagagccataccaatcaga

SEQ ID NO: 1943498 - DNA, 25 bp, Homo sapien
gaactgagggatgattctgattcct

SEQ ID NO: 1943499 - DNA, 25 bp, Homo sapien
tatgcagtcacttcttcgtgccact

SEQ ID NO: 1943500 - DNA, 25 bp, Homo sapien
gtggcctggcaacccattctgctgt

SEQ ID NO: 1943501 - DNA, 25 bp, Homo sapien
gtggctctcgtccagtatctcctga

SEQ ID NO: 1943502 - DNA, 25 bp, Homo sapien
cctcaacttcatctctgtatgcagt

SEQ ID NO: 1943503 - DNA, 25 bp, Homo sapien
ttagactgacgtctggtcctgggac

SEQ ID NO: 1943504 - DNA, 25 bp, Homo sapien
gccctgttagactgacgtctggtcc

SEQ ID NO: 1943505 - DNA, 25 bp, Homo sapien
ggttgccctgttagactgacgtctg

SEQ ID NO: 1943506 - DNA, 25 bp, Homo sapien
tgttagactgacgtctggtcctggg

SEQ ID NO: 1943507 - DNA, 25 bp, Homo sapien
tctgcctgtgggatacctgatggga

SEQ ID NO: 1943508 - DNA, 25 bp, Homo sapien
tgagttcgagtctcggacagcctgt

SEQ ID NO: 1943509 - DNA, 25 bp, Homo sapien
ggagagactctaaagcccggtcctc

SEQ ID NO: 1943510 - DNA, 25 bp, Homo sapien
gacagcctgtgctggtaagcctgcc

SEQ ID NO: 1943511 - DNA, 25 bp, Homo sapien
gaagatcacgcaatgttgtctcatg

SEQ ID NO: 1943512 - DNA, 25 bp, Homo sapien
tctgatactcttggtgcaggcggac

SEQ ID NO: 1943513 - DNA, 25 bp, Homo sapien
ttgtctcatgagtgtgggcatcacc

SEQ ID NO: 1943514 - DNA, 25 bp, Homo sapien
tcaagaactgaatactggtcgagct

SEQ ID NO: 1943515 - DNA, 25 bp, Homo sapien
tgtatcgttcctgtagatcctggag

SEQ ID NO: 1943516 - DNA, 25 bp, Homo sapien
gacttcgatggtctccagcaagctg

SEQ ID NO: 1943517 - DNA, 25 bp, Homo sapien
gatcctggagttctagctgggtgac

SEQ ID NO: 1943518 - DNA, 25 bp, Homo sapien
gacatagtgttctgtcatgccagcc

SEQ ID NO: 1943519 - DNA, 25 bp, Homo sapien
tactatccatccaaccggagaactg

SEQ ID NO: 1943520 - DNA, 25 bp, Homo sapien
gagaactgtcgaacgccatcctgat

SEQ ID NO: 1943521 - DNA, 25 bp, Homo sapien
cgagcatcgttgttttatcccgcag

SEQ ID NO: 1943522 - DNA, 25 bp, Homo sapien
taacttgtccacttggagagagctc

SEQ ID NO: 1943523 - DNA, 25 bp, Homo sapien
agtgggaatgccttctggagaagta

SEQ ID NO: 1943524 - DNA, 25 bp, Homo sapien
tctcccctggtcactatcattttca

SEQ ID NO: 1943525 - DNA, 25 bp, Homo sapien
aagggatgcccacatatccttcaca

SEQ ID NO: 1943526 - DNA, 25 bp, Homo sapien
tacaacgaatccctgcagacaaaag

SEQ ID NO: 1943527 - DNA, 25 bp, Homo sapien
gcgttgcactcacaaagcatctgag

SEQ ID NO: 1943528 - DNA, 25 bp, Homo sapien
atgtgcacccaaggcagacagcgtt

SEQ ID NO: 1943529 - DNA, 25 bp, Homo sapien
gggtcagatgattcaggaattctct

SEQ ID NO: 1943530 - DNA, 25 bp, Homo sapien
gagagaatgtgacatcatcacccca

SEQ ID NO: 1943531 - DNA, 25 bp, Homo sapien
tgtcgggtggcagtatgaatccagc

SEQ ID NO: 1943532 - DNA, 25 bp, Homo sapien
gagcttgagcgtcctgctgtccagc

SEQ ID NO: 1943533 - DNA, 25 bp, Homo sapien
cagcacacttttgtcggatgtcggg

SEQ ID NO: 1943534 - DNA, 25 bp, Homo sapien
gaatccagcatgtgaatcgcatccg

SEQ ID NO: 1943535 - DNA, 25 bp, Homo sapien
ggcgggtcaggatgcaatgcacacc

SEQ ID NO: 1943536 - DNA, 25 bp, Homo sapien
tgagtcttccaaatcaaagccctgg

SEQ ID NO: 1943537 - DNA, 25 bp, Homo sapien
catacgctgcacagatacgaggcaa

SEQ ID NO: 1943538 - DNA, 25 bp, Homo sapien
tactcccagacctaagctagtgtga

SEQ ID NO: 1943539 - DNA, 25 bp, Homo sapien
tgagaagacagctgcgacactctgt

SEQ ID NO: 1943540 - DNA, 25 bp, Homo sapien
gacactctgtgcctaaagctcttgc

SEQ ID NO: 1943541 - DNA, 25 bp, Homo sapien
cttagcgctagatactgagaagaca

SEQ ID NO: 1943542 - DNA, 25 bp, Homo sapien
ctgaggctcgtagcagtgtatttcc

SEQ ID NO: 1943543 - DNA, 25 bp, Homo sapien
gaaaaacacactatgtctcacggca

SEQ ID NO: 1943544 - DNA, 25 bp, Homo sapien
acatcgcggacgaagctttggccca

SEQ ID NO: 1943545 - DNA, 25 bp, Homo sapien
gagaacatggaaatcaacactggca

SEQ ID NO: 1943546 - DNA, 25 bp, Homo sapien
tacacaccgtggagcacaaatcatg

SEQ ID NO: 1943547 - DNA, 25 bp, Homo sapien
ctgctttcatggaccatcttctcag

SEQ ID NO: 1943548 - DNA, 25 bp, Homo sapien
tgctggcagatcatagaggcgattg

SEQ ID NO: 1943549 - DNA, 25 bp, Homo sapien
ggctcagcacttacttcaaagtcct

SEQ ID NO: 1943550 - DNA, 25 bp, Homo sapien
ccagtcctggataggctcagcactt

SEQ ID NO: 1943551 - DNA, 25 bp, Homo sapien
agcagggtactcagaagttcccctt

SEQ ID NO: 1943552 - DNA, 25 bp, Homo sapien
ggcctggatccctttcgctttctct

SEQ ID NO: 1943553 - DNA, 25 bp, Homo sapien
tcttttgcagctgtaactttggcct

SEQ ID NO: 1943554 - DNA, 25 bp, Homo sapien
tctagagcagattctttttggtgga

SEQ ID NO: 1943555 - DNA, 25 bp, Homo sapien
gtgcatgctgccacacccagataat

SEQ ID NO: 1943556 - DNA, 25 bp, Homo sapien
caccacacccaccttctattatttc

SEQ ID NO: 1943557 - DNA, 25 bp, Homo sapien
gcctccgtcttctgcgttcaagcaa

SEQ ID NO: 1943558 - DNA, 25 bp, Homo sapien
ggtgcatgctgccacacccagataa

SEQ ID NO: 1943559 - DNA, 25 bp, Homo sapien
tatcaaaacacttggcggtagtgat

SEQ ID NO: 1943560 - DNA, 25 bp, Homo sapien
cagcccttggatgcttgcaaacaaa

SEQ ID NO: 1943561 - DNA, 25 bp, Homo sapien
tttgcattaaccaaccactgctgga

SEQ ID NO: 1943562 - DNA, 25 bp, Homo sapien
tgaaggcctttcgaaatctttgctg

SEQ ID NO: 1943563 - DNA, 25 bp, Homo sapien
ggtctctggaaaatcgacaaagttc

SEQ ID NO: 1943564 - DNA, 25 bp, Homo sapien
gacttgagatcctctgttctaggct

SEQ ID NO: 1943565 - DNA, 25 bp, Homo sapien
tatactctttaatcaagccagaaac

SEQ ID NO: 1943566 - DNA, 25 bp, Homo sapien
tcgacaaagttcattcagctgagac

SEQ ID NO: 1943567 - DNA, 25 bp, Homo sapien
aatagtaatgtaatctaggcacagc

SEQ ID NO: 1943568 - DNA, 25 bp, Homo sapien
gaccctggagtcaaatctggaagca

SEQ ID NO: 1943569 - DNA, 25 bp, Homo sapien
tcactctgtgactggaatagaaaga

SEQ ID NO: 1943570 - DNA, 25 bp, Homo sapien
caatgacaagtcctccctaaaagca

SEQ ID NO: 1943571 - DNA, 25 bp, Homo sapien
cataaagaggtagaaagctttattt

SEQ ID NO: 1943572 - DNA, 25 bp, Homo sapien
gcataaagaggtagaaagctttatt

SEQ ID NO: 1943573 - DNA, 25 bp, Homo sapien
gacatccatgaatcagggcattata

SEQ ID NO: 1943574 - DNA, 25 bp, Homo sapien
tcttactggcaggagctattttgaa

SEQ ID NO: 1943575 - DNA, 25 bp, Homo sapien
tcattcttcggtctcccttgtaggc

SEQ ID NO: 1943576 - DNA, 25 bp, Homo sapien
gaagaagaggttacactcttgctca

SEQ ID NO: 1943577 - DNA, 25 bp, Homo sapien
tacagactcttacaccataggaatg

SEQ ID NO: 1943578 - DNA, 25 bp, Homo sapien
aaccacacagaggagagctaatcgg

SEQ ID NO: 1943579 - DNA, 25 bp, Homo sapien
tgacgtagagttctgttaacaggct

SEQ ID NO: 1943580 - DNA, 25 bp, Homo sapien
gactctctgtctatttatgcccctg

SEQ ID NO: 1943581 - DNA, 25 bp, Homo sapien
tgaccaggttctccaaacagctctg

SEQ ID NO: 1943582 - DNA, 25 bp, Homo sapien
tccaggagggttaactgctgagccc

SEQ ID NO: 1943583 - DNA, 25 bp, Homo sapien
gctctgcgtttggaatacactgtct

SEQ ID NO: 1943584 - DNA, 25 bp, Homo sapien
tcatccgtgttcttgccttccagga

SEQ ID NO: 1943585 - DNA, 25 bp, Homo sapien
gctgagacggcttgcaccaatctct

SEQ ID NO: 1943586 - DNA, 25 bp, Homo sapien
gagacggcttgcaccaatctctctg

SEQ ID NO: 1943587 - DNA, 25 bp, Homo sapien
cactctgctgagacggcttgcacca

SEQ ID NO: 1943588 - DNA, 25 bp, Homo sapien
ctgctgagacggcttgcaccaatct

SEQ ID NO: 1943589 - DNA, 25 bp, Homo sapien
cagacatatctgaccaccggtgaag

SEQ ID NO: 1943590 - DNA, 25 bp, Homo sapien
tcgtggaccgcatctaaatacatta

SEQ ID NO: 1943591 - DNA, 25 bp, Homo sapien
tgaatggagccaatctgtgaactcg

SEQ ID NO: 1943592 - DNA, 25 bp, Homo sapien
tacattagatgatctttcacaatct

SEQ ID NO: 1943593 - DNA, 25 bp, Homo sapien
aagggctctcgtgtgatcttctgcc

SEQ ID NO: 1943594 - DNA, 25 bp, Homo sapien
cgcaattagacggtgaagggctctc

SEQ ID NO: 1943595 - DNA, 25 bp, Homo sapien
ggtggtcaagcaggacgaacttctc

SEQ ID NO: 1943596 - DNA, 25 bp, Homo sapien
gagctccctggacttcgcaattaga

SEQ ID NO: 1943597 - DNA, 25 bp, Homo sapien
gatgtcagcccacacttctttaagg

SEQ ID NO: 1943598 - DNA, 25 bp, Homo sapien
ctttgttgctacttctcaaggcctg

SEQ ID NO: 1943599 - DNA, 25 bp, Homo sapien
tgccaatggccatattcaacttaac

SEQ ID NO: 1943600 - DNA, 25 bp, Homo sapien
tctaactgagtctgaatcaccctct

SEQ ID NO: 1943601 - DNA, 25 bp, Homo sapien
agtctgtcctgaatggccttcaccc

SEQ ID NO: 1943602 - DNA, 25 bp, Homo sapien
cagaaccacatgctttgcagtgctt

SEQ ID NO: 1943603 - DNA, 25 bp, Homo sapien
tggtcattctaagtaggttctggtg

SEQ ID NO: 1943604 - DNA, 25 bp, Homo sapien
ctccggagtttctctttggtcattc

SEQ ID NO: 1943605 - DNA, 25 bp, Homo sapien
accgtggccttcttcactcagaagc

SEQ ID NO: 1943606 - DNA, 25 bp, Homo sapien
caccgtggccttcttcactcagaag

SEQ ID NO: 1943607 - DNA, 25 bp, Homo sapien
ccgtggccttcttcactcagaagct

SEQ ID NO: 1943608 - DNA, 25 bp, Homo sapien
cgtggccttcttcactcagaagctg

SEQ ID NO: 1943609 - DNA, 25 bp, Homo sapien
ctcttcaggcttctccgtagcatct

SEQ ID NO: 1943610 - DNA, 25 bp, Homo sapien
tcttcaggcttctccgtagcatctc

SEQ ID NO: 1943611 - DNA, 25 bp, Homo sapien
tttaattcagaaaatggtcccagct

SEQ ID NO: 1943612 - DNA, 25 bp, Homo sapien
tcagaaaatggtcccagctgcctct

SEQ ID NO: 1943613 - DNA, 25 bp, Homo sapien
aagtgacctgcccaatttcttgaac

SEQ ID NO: 1943614 - DNA, 25 bp, Homo sapien
tcaccagaatactgcactgctgcaa

SEQ ID NO: 1943615 - DNA, 25 bp, Homo sapien
tgcaaagagtgcagcatagtcctct

SEQ ID NO: 1943616 - DNA, 25 bp, Homo sapien
tattccagacattcaaggacagcac

SEQ ID NO: 1943617 - DNA, 25 bp, Homo sapien
tctcaggaatgtgctgtttactctc

SEQ ID NO: 1943618 - DNA, 25 bp, Homo sapien
tcatggatccataagttcagttttc

SEQ ID NO: 1943619 - DNA, 25 bp, Homo sapien
tcttccatttcatggatccataagt

SEQ ID NO: 1943620 - DNA, 25 bp, Homo sapien
tctctcccaagttttccgtattgaa

SEQ ID NO: 1943621 - DNA, 25 bp, Homo sapien
gtttgctctgcccatcactgactga

SEQ ID NO: 1943622 - DNA, 25 bp, Homo sapien
caaatgtgcatacaaagtttgtcct

SEQ ID NO: 1943623 - DNA, 25 bp, Homo sapien
cttgaaactcttcattggcctttgt

SEQ ID NO: 1943624 - DNA, 25 bp, Homo sapien
gaagagcctgcttatctttaaggca

SEQ ID NO: 1943625 - DNA, 25 bp, Homo sapien
aagatcatggagctttgcttctaga

SEQ ID NO: 1943626 - DNA, 25 bp, Homo sapien
caccggtgcgatctgatgattcttt

SEQ ID NO: 1943627 - DNA, 25 bp, Homo sapien
ttctagaactttgctgtcaccggtg

SEQ ID NO: 1943628 - DNA, 25 bp, Homo sapien
ctgaagatcatggagctttgcttct

SEQ ID NO: 1943629 - DNA, 25 bp, Homo sapien
tgtttctttatcagaccagtcattg

SEQ ID NO: 1943630 - DNA, 25 bp, Homo sapien
tgcggcacaagctattgagattttc

SEQ ID NO: 1943631 - DNA, 25 bp, Homo sapien
cagctgagtggtacttgcggcacaa

SEQ ID NO: 1943632 - DNA, 25 bp, Homo sapien
tggagcacaactggctcacggcttc

SEQ ID NO: 1943633 - DNA, 25 bp, Homo sapien
tttttcaatgcttcacaagtctcat

SEQ ID NO: 1943634 - DNA, 25 bp, Homo sapien
tccacttttgtgaaccatgttgtta

SEQ ID NO: 1943635 - DNA, 25 bp, Homo sapien
ccacttgtgtactttgagccgtgaa

SEQ ID NO: 1943636 - DNA, 25 bp, Homo sapien
tgggcacagttcatcaacgattctt

SEQ ID NO: 1943637 - DNA, 25 bp, Homo sapien
cacacaagtctcatcatggaagcca

SEQ ID NO: 1943638 - DNA, 25 bp, Homo sapien
gaaaatcagtggacacagttgccaa

SEQ ID NO: 1943639 - DNA, 25 bp, Homo sapien
gaagctctaactgaggttccaggga

SEQ ID NO: 1943640 - DNA, 25 bp, Homo sapien
gcagcttaattgtcaaagccacaca

SEQ ID NO: 1943641 - DNA, 25 bp, Homo sapien
tctccctggaaatacccattgtctg

SEQ ID NO: 1943642 - DNA, 25 bp, Homo sapien
gaaatacccattgtctgctcagatg

SEQ ID NO: 1943643 - DNA, 25 bp, Homo sapien
ccaaaaatctgctcttgattctccc

SEQ ID NO: 1943644 - DNA, 25 bp, Homo sapien
tctgctcagatgtaacactatctgg

SEQ ID NO: 1943645 - DNA, 25 bp, Homo sapien
actgaagtagcccaggtgttctgac

SEQ ID NO: 1943646 - DNA, 25 bp, Homo sapien
atgctggatgcttccagggcttggg

SEQ ID NO: 1943647 - DNA, 25 bp, Homo sapien
ctggatgcttccagggcttgggcac

SEQ ID NO: 1943648 - DNA, 25 bp, Homo sapien
tgggcactgaagtagcccaggtgtt

SEQ ID NO: 1943649 - DNA, 25 bp, Homo sapien
tcatggttcccgtggatttgtgcca

SEQ ID NO: 1943650 - DNA, 25 bp, Homo sapien
tctaccctggcctgcttcatggttc

SEQ ID NO: 1943651 - DNA, 25 bp, Homo sapien
cagtgctgatctaccctggcctgct

SEQ ID NO: 1943652 - DNA, 25 bp, Homo sapien
ggcctgcttcatggttcccgtggat

SEQ ID NO: 1943653 - DNA, 25 bp, Homo sapien
agttcttccaatctcaatgctttgt

SEQ ID NO: 1943654 - DNA, 25 bp, Homo sapien
gttcttccaatctcaatgctttgtt

SEQ ID NO: 1943655 - DNA, 25 bp, Homo sapien
aggtctggcggtgtttctagatttt

SEQ ID NO: 1943656 - DNA, 25 bp, Homo sapien
ctgaaggtctggcggtgtttctaga

SEQ ID NO: 1943657 - DNA, 25 bp, Homo sapien
gtgagtaactgaacctggtcatatc

SEQ ID NO: 1943658 - DNA, 25 bp, Homo sapien
gctcggaagcatattgaatcattgg

SEQ ID NO: 1943659 - DNA, 25 bp, Homo sapien
atactgcagcgggaatggccctgtg

SEQ ID NO: 1943660 - DNA, 25 bp, Homo sapien
attttattagctagtgtgtcacaca

SEQ ID NO: 1943661 - DNA, 25 bp, Homo sapien
aacgcagttgtttgaccatccctca

SEQ ID NO: 1943662 - DNA, 25 bp, Homo sapien
tgacagtacatcatcccaaatggac

SEQ ID NO: 1943663 - DNA, 25 bp, Homo sapien
caaatggacaggcttactctcagcc

SEQ ID NO: 1943664 - DNA, 25 bp, Homo sapien
tcagctctgaggtggttatccaggt

SEQ ID NO: 1943665 - DNA, 25 bp, Homo sapien
ctccatgtctgttttcaccaagctg

SEQ ID NO: 1943666 - DNA, 25 bp, Homo sapien
tccagccatttgtccacggtgctct

SEQ ID NO: 1943667 - DNA, 25 bp, Homo sapien
ttcaccaagctgaaatcactactgt

SEQ ID NO: 1943668 - DNA, 25 bp, Homo sapien
atccagccatttgtccacggtgctc

SEQ ID NO: 1943669 - DNA, 25 bp, Homo sapien
cctttgctggtaaagttatccaagt

SEQ ID NO: 1943670 - DNA, 25 bp, Homo sapien
tcctttgctggtaaagttatccaag

SEQ ID NO: 1943671 - DNA, 25 bp, Homo sapien
ctttgctggtaaagttatccaagtc

SEQ ID NO: 1943672 - DNA, 25 bp, Homo sapien
aaaaagcccatttaagatcctcctg

SEQ ID NO: 1943673 - DNA, 25 bp, Homo sapien
caggttctgatattctctcattaag

SEQ ID NO: 1943674 - DNA, 25 bp, Homo sapien
taagactttagatacagctgatttc

SEQ ID NO: 1943675 - DNA, 25 bp, Homo sapien
tctcattaagtcaataagtccacag

SEQ ID NO: 1943676 - DNA, 25 bp, Homo sapien
ccaggtgacctctaagcggtttatc

SEQ ID NO: 1943677 - DNA, 25 bp, Homo sapien
ccaacatagttcatgctcgtgagaa

SEQ ID NO: 1943678 - DNA, 25 bp, Homo sapien
caacttcaggtgcaaaagctacatc

SEQ ID NO: 1943679 - DNA, 25 bp, Homo sapien
tcttttggtatcatcccaggtgacc

SEQ ID NO: 1943680 - DNA, 25 bp, Homo sapien
gactgacggcagcagattctaatgc

SEQ ID NO: 1943681 - DNA, 25 bp, Homo sapien
cactgtttgcctcagctggcggaga

SEQ ID NO: 1943682 - DNA, 25 bp, Homo sapien
tgctaagtgaccctgcagactctgc

SEQ ID NO: 1943683 - DNA, 25 bp, Homo sapien
gcccagagaacccaactttgctaag

SEQ ID NO: 1943684 - DNA, 25 bp, Homo sapien
gctcatcaaattgctggtgttcagc

SEQ ID NO: 1943685 - DNA, 25 bp, Homo sapien
tggtccattatgctaatctcagagg

SEQ ID NO: 1943686 - DNA, 25 bp, Homo sapien
tgagaaacagtttaatccagacaga

SEQ ID NO: 1943687 - DNA, 25 bp, Homo sapien
cgagtaagggctacttgatggtcca

SEQ ID NO: 1943688 - DNA, 25 bp, Homo sapien
ccaactgctccaaatgtagtttcat

SEQ ID NO: 1943689 - DNA, 25 bp, Homo sapien
catctctcatccaactgctccaaat

SEQ ID NO: 1943690 - DNA, 25 bp, Homo sapien
atctctcatccaactgctccaaatg

SEQ ID NO: 1943691 - DNA, 25 bp, Homo sapien
ccatctctcatccaactgctccaaa

SEQ ID NO: 1943692 - DNA, 25 bp, Homo sapien
gattccttcaattgcaaaagtttgc

SEQ ID NO: 1943693 - DNA, 25 bp, Homo sapien
aaaagtttgctatagaatgaggcct

SEQ ID NO: 1943694 - DNA, 25 bp, Homo sapien
tgaggcctgggatacaacttcattt

SEQ ID NO: 1943695 - DNA, 25 bp, Homo sapien
aagtttgctatagaatgaggcctgg

SEQ ID NO: 1943696 - DNA, 25 bp, Homo sapien
aatacaagacattacggatctcatc

SEQ ID NO: 1943697 - DNA, 25 bp, Homo sapien
aaaatacaagacattacggatctca

SEQ ID NO: 1943698 - DNA, 25 bp, Homo sapien
ctgaaaaatacaagacattacggat

SEQ ID NO: 1943699 - DNA, 25 bp, Homo sapien
gaaaaatacaagacattacggatct

SEQ ID NO: 1943700 - DNA, 25 bp, Homo sapien
aaaagtaaggaccatgcggcacagg

SEQ ID NO: 1943701 - DNA, 25 bp, Homo sapien
ctgaaaagtaaggaccatgcggcac

SEQ ID NO: 1943702 - DNA, 25 bp, Homo sapien
aagtaaggaccatgcggcacaggcg

SEQ ID NO: 1943703 - DNA, 25 bp, Homo sapien
gaaaagtaaggaccatgcggcacag

SEQ ID NO: 1943704 - DNA, 25 bp, Homo sapien
ttacattacaggattttctaacaca

SEQ ID NO: 1943705 - DNA, 25 bp, Homo sapien
tacattacaggattttctaacacat

SEQ ID NO: 1943706 - DNA, 25 bp, Homo sapien
acattacaggattttctaacacatc

SEQ ID NO: 1943707 - DNA, 25 bp, Homo sapien
taatgtaactgtaacaaaaagcatt

SEQ ID NO: 1943708 - DNA, 25 bp, Homo sapien
aataatgtaactgtaacaaaaagca

SEQ ID NO: 1943709 - DNA, 25 bp, Homo sapien
aatgtaactgtaacaaaaagcattt

SEQ ID NO: 1943710 - DNA, 25 bp, Homo sapien
tattttaaataatgtaactgtaaca

SEQ ID NO: 1943711 - DNA, 25 bp, Homo sapien
accaggtcaaaaaggatgatagttc

SEQ ID NO: 1943712 - DNA, 25 bp, Homo sapien
tggctttagcttcaccccgctctaa

SEQ ID NO: 1943713 - DNA, 25 bp, Homo sapien
ccgctctaaccaggtcaaaaaggat

SEQ ID NO: 1943714 - DNA, 25 bp, Homo sapien
ccatttctggggaactggctttagc

SEQ ID NO: 1943715 - DNA, 25 bp, Homo sapien
tcgccctccttaggatgtcctcgta

SEQ ID NO: 1943716 - DNA, 25 bp, Homo sapien
cagcagattctccagcgccgtctgt

SEQ ID NO: 1943717 - DNA, 25 bp, Homo sapien
gaaggcagtgatcgcgctgctcagt

SEQ ID NO: 1943718 - DNA, 25 bp, Homo sapien
tgtcctcgtattgctgctgtagagc

SEQ ID NO: 1943719 - DNA, 25 bp, Homo sapien
taattggaacagcaagtttatcttc

SEQ ID NO: 1943720 - DNA, 25 bp, Homo sapien
gttcttgaagaactttgtatgtttc

SEQ ID NO: 1943721 - DNA, 25 bp, Homo sapien
tatgttcttgaagaactttgtatgt

SEQ ID NO: 1943722 - DNA, 25 bp, Homo sapien
tttaattggaacagcaagtttatct

SEQ ID NO: 1943723 - DNA, 25 bp, Homo sapien
tctccagtggtaacaaactgagcaa

SEQ ID NO: 1943724 - DNA, 25 bp, Homo sapien
ccccgtatcttcttatttgtgtcaa

SEQ ID NO: 1943725 - DNA, 25 bp, Homo sapien
tcctacaatgctgctgagcttactt

SEQ ID NO: 1943726 - DNA, 25 bp, Homo sapien
tcaacttggctttaattcgagcaga

SEQ ID NO: 1943727 - DNA, 25 bp, Homo sapien
tgggaccgaacagcatttgatgaaa

SEQ ID NO: 1943728 - DNA, 25 bp, Homo sapien
aatgttgcccagtattaatccagac

SEQ ID NO: 1943729 - DNA, 25 bp, Homo sapien
ttgaatgcacaagtcagacaatgtg

SEQ ID NO: 1943730 - DNA, 25 bp, Homo sapien
tgaaagtcttgtcctgggaccgaac

SEQ ID NO: 1943731 - DNA, 25 bp, Homo sapien
ttctcagttatccagacggacagag

SEQ ID NO: 1943732 - DNA, 25 bp, Homo sapien
ctgccaaaatgatcccacttggttt

SEQ ID NO: 1943733 - DNA, 25 bp, Homo sapien
tgtccatggcagatgacgaagtttc

SEQ ID NO: 1943734 - DNA, 25 bp, Homo sapien
gtctcaaaattactgccaaaatgat

SEQ ID NO: 1943735 - DNA, 25 bp, Homo sapien
gataacttgaataccgaggcactgt

SEQ ID NO: 1943736 - DNA, 25 bp, Homo sapien
tacacttaaaggagagacactgcag

SEQ ID NO: 1943737 - DNA, 25 bp, Homo sapien
gaggcactgtaaacaagctccagga

SEQ ID NO: 1943738 - DNA, 25 bp, Homo sapien
caggatatcaataggccaagcagtt

SEQ ID NO: 1943739 - DNA, 25 bp, Homo sapien
actgcaatactttctgtccgtttag

SEQ ID NO: 1943740 - DNA, 25 bp, Homo sapien
tgaagcttcctttacaaggttctca

SEQ ID NO: 1943741 - DNA, 25 bp, Homo sapien
gacttgttctttgattgacttggcc

SEQ ID NO: 1943742 - DNA, 25 bp, Homo sapien
gggcccaagcggtatctctgaagct

SEQ ID NO: 1943743 - DNA, 25 bp, Homo sapien
cttcttgatgtttaatcctacttat

SEQ ID NO: 1943744 - DNA, 25 bp, Homo sapien
tccaatatgttgaaagaatgggtca

SEQ ID NO: 1943745 - DNA, 25 bp, Homo sapien
tgggtcatcaataaatagtaagtat

SEQ ID NO: 1943746 - DNA, 25 bp, Homo sapien
tctgaatattgggtaccaaggagcc

SEQ ID NO: 1943747 - DNA, 25 bp, Homo sapien
aactcaagaagcgttcatgactgga

SEQ ID NO: 1943748 - DNA, 25 bp, Homo sapien
ttctgaagataaactttccaaactg

SEQ ID NO: 1943749 - DNA, 25 bp, Homo sapien
ttgtttgtttcaaatcgctcccatt

SEQ ID NO: 1943750 - DNA, 25 bp, Homo sapien
cgttcatgactggaacctgtttgaa

SEQ ID NO: 1943751 - DNA, 25 bp, Homo sapien
agctcctcgtggcctcggtcaggca

SEQ ID NO: 1943752 - DNA, 25 bp, Homo sapien
gctcctcgtggcctcggtcaggcag

SEQ ID NO: 1943753 - DNA, 25 bp, Homo sapien
ccttctccctgctgcgcctgcgcga

SEQ ID NO: 1943754 - DNA, 25 bp, Homo sapien
cctgctgcgcctgcgcgatctgctg

SEQ ID NO: 1943755 - DNA, 25 bp, Homo sapien
cttgttcctggacttctttagagcc

SEQ ID NO: 1943756 - DNA, 25 bp, Homo sapien
gccagaaattaattcttcgagagaa

SEQ ID NO: 1943757 - DNA, 25 bp, Homo sapien
tcagtatccaagatcttctcagctt

SEQ ID NO: 1943758 - DNA, 25 bp, Homo sapien
gactatttctttgtactggacacag

SEQ ID NO: 1943759 - DNA, 25 bp, Homo sapien
taattttgccagctcatctccctgc

SEQ ID NO: 1943760 - DNA, 25 bp, Homo sapien
tgacagcagcgtcacaagagccttg

SEQ ID NO: 1943761 - DNA, 25 bp, Homo sapien
ccttgaaagagctggataattttgc

SEQ ID NO: 1943762 - DNA, 25 bp, Homo sapien
tcagaagaaacttctgtcaaaactt

SEQ ID NO: 1943763 - DNA, 25 bp, Homo sapien
tattgagcaccactagcatttaagg

SEQ ID NO: 1943764 - DNA, 25 bp, Homo sapien
tatccttccatatgcataccatgat

SEQ ID NO: 1943765 - DNA, 25 bp, Homo sapien
ccagtgatctcttcattctaggatg

SEQ ID NO: 1943766 - DNA, 25 bp, Homo sapien
tgtgcgatgcaagcaaccagtagca

SEQ ID NO: 1943767 - DNA, 25 bp, Homo sapien
ggttggcagtatcgatggcctcacc

SEQ ID NO: 1943768 - DNA, 25 bp, Homo sapien
cgtggttggcagtatcgatggcctc

SEQ ID NO: 1943769 - DNA, 25 bp, Homo sapien
caacggcacgtttaacctctccgtg

SEQ ID NO: 1943770 - DNA, 25 bp, Homo sapien
ctccgtggttggcagtatcgatggc

SEQ ID NO: 1943771 - DNA, 25 bp, Homo sapien
catttgtagatatccaagatgagaa

SEQ ID NO: 1943772 - DNA, 25 bp, Homo sapien
ttgtagatatccaagatgagaactc

SEQ ID NO: 1943773 - DNA, 25 bp, Homo sapien
tgtgtctcatttgtagatatccaag

SEQ ID NO: 1943774 - DNA, 25 bp, Homo sapien
gatatccaagatgagaactcagaga

SEQ ID NO: 1943775 - DNA, 25 bp, Homo sapien
gagtcacgtgacaggttccaggtgt

SEQ ID NO: 1943776 - DNA, 25 bp, Homo sapien
ttccaggtgtgtcccttactgggtc

SEQ ID NO: 1943777 - DNA, 25 bp, Homo sapien
gagtttcacacagagttcctcgatg

SEQ ID NO: 1943778 - DNA, 25 bp, Homo sapien
gagcttcctgtaggtgctgtcaatg

SEQ ID NO: 1943779 - DNA, 25 bp, Homo sapien
ttttataatccctgtgagaagccac

SEQ ID NO: 1943780 - DNA, 25 bp, Homo sapien
ccacattgtggtgtgggagacgtac

SEQ ID NO: 1943781 - DNA, 25 bp, Homo sapien
ggaacaatgtgacttgacacggcta

SEQ ID NO: 1943782 - DNA, 25 bp, Homo sapien
agattcccacgcagactaccaaggt

SEQ ID NO: 1943783 - DNA, 25 bp, Homo sapien
ttggtctctcgatccagctcagttc

SEQ ID NO: 1943784 - DNA, 25 bp, Homo sapien
gaagcaaatgataaggggcttctcc

SEQ ID NO: 1943785 - DNA, 25 bp, Homo sapien
tcttctccacatcaatcttcagatg

SEQ ID NO: 1943786 - DNA, 25 bp, Homo sapien
cttctacagaggctaagaacctatt

SEQ ID NO: 1943787 - DNA, 25 bp, Homo sapien
gaagttcctgattatgtacattccc

SEQ ID NO: 1943788 - DNA, 25 bp, Homo sapien
taacatattccttttagggccagtg

SEQ ID NO: 1943789 - DNA, 25 bp, Homo sapien
ctacattccataggaagattcagaa

SEQ ID NO: 1943790 - DNA, 25 bp, Homo sapien
tgggtcactactttccacacctggt

SEQ ID NO: 1943791 - DNA, 25 bp, Homo sapien
catgtagcgcatgtgaaatatcacc

SEQ ID NO: 1943792 - DNA, 25 bp, Homo sapien
gtcagcctccatgggacagactcag

SEQ ID NO: 1943793 - DNA, 25 bp, Homo sapien
gtagtacacactcacctaaagctag

SEQ ID NO: 1943794 - DNA, 25 bp, Homo sapien
tggagagagtttcagctgccaatct

SEQ ID NO: 1943795 - DNA, 25 bp, Homo sapien
attatcaggttttatttaagtccag

SEQ ID NO: 1943796 - DNA, 25 bp, Homo sapien
ttgagtttttaaatgagcgaaatag

SEQ ID NO: 1943797 - DNA, 25 bp, Homo sapien
catatattatcaggttttatttaag

SEQ ID NO: 1943798 - DNA, 25 bp, Homo sapien
tttgagtttttaaatgagcgaaata

SEQ ID NO: 1943799 - DNA, 25 bp, Homo sapien
tcttacatttggaccttaacacgct

SEQ ID NO: 1943800 - DNA, 25 bp, Homo sapien
tcccttcattgaggatgcacggtgt

SEQ ID NO: 1943801 - DNA, 25 bp, Homo sapien
ggtgtctccgtcctgtcctgactca

SEQ ID NO: 1943802 - DNA, 25 bp, Homo sapien
tggaccttaacacgctcaagcttct

SEQ ID NO: 1943803 - DNA, 25 bp, Homo sapien
gtgagttcatcacaagctttcagga

SEQ ID NO: 1943804 - DNA, 25 bp, Homo sapien
tttgtggagctttcgaacagcttcc

SEQ ID NO: 1943805 - DNA, 25 bp, Homo sapien
tcctgctctggaaggatgtcggtga

SEQ ID NO: 1943806 - DNA, 25 bp, Homo sapien
aagcattgagcaccctctgatccag

SEQ ID NO: 1943807 - DNA, 25 bp, Homo sapien
gtctccgcaggagctcctctggatc

SEQ ID NO: 1943808 - DNA, 25 bp, Homo sapien
tcatcaagcgactgttggtttccac

SEQ ID NO: 1943809 - DNA, 25 bp, Homo sapien
gagcaatccgcagtaccttctccaa

SEQ ID NO: 1943810 - DNA, 25 bp, Homo sapien
aactctgctcgagactcctcaaact

SEQ ID NO: 1943811 - DNA, 25 bp, Homo sapien
ggtcacaaacttttgaacactttga

SEQ ID NO: 1943812 - DNA, 25 bp, Homo sapien
gctttaacacgttgctcaaggtcac

SEQ ID NO: 1943813 - DNA, 25 bp, Homo sapien
gactgcctttctcaataagtgtcaa

SEQ ID NO: 1943814 - DNA, 25 bp, Homo sapien
ttgtagcctcgtctgatcaaaatgc

SEQ ID NO: 1943815 - DNA, 25 bp, Homo sapien
gcagtagacagcatggaaatcattg

SEQ ID NO: 1943816 - DNA, 25 bp, Homo sapien
gcagagggtcattttttggcttgaa

SEQ ID NO: 1943817 - DNA, 25 bp, Homo sapien
gcaattgtgattttggcagtagaca

SEQ ID NO: 1943818 - DNA, 25 bp, Homo sapien
tccacctctgacttgtagcctgcaa

SEQ ID NO: 1943819 - DNA, 25 bp, Homo sapien
gattgtgcctcacgctcaagaactg

SEQ ID NO: 1943820 - DNA, 25 bp, Homo sapien
ctgctgagactcataaaggagtggg

SEQ ID NO: 1943821 - DNA, 25 bp, Homo sapien
gagtcataaaaggacgtcatctgct

SEQ ID NO: 1943822 - DNA, 25 bp, Homo sapien
taattcctccaacggaatcaacagc

SEQ ID NO: 1943823 - DNA, 25 bp, Homo sapien
tttgagctttgacatggtcgcaaac

SEQ ID NO: 1943824 - DNA, 25 bp, Homo sapien
cttgtattgggcatccatcacaggc

SEQ ID NO: 1943825 - DNA, 25 bp, Homo sapien
atcacaggcaccctctgctcaatat

SEQ ID NO: 1943826 - DNA, 25 bp, Homo sapien
ctttggtaatgaggtgtgctgtctt

SEQ ID NO: 1943827 - DNA, 25 bp, Homo sapien
tactttatatgatcaagtcatgtct

SEQ ID NO: 1943828 - DNA, 25 bp, Homo sapien
tctcacaacagagtaggcttttcat

SEQ ID NO: 1943829 - DNA, 25 bp, Homo sapien
gtgcaaattgggacatacagacatg

SEQ ID NO: 1943830 - DNA, 25 bp, Homo sapien
aacttgctgatctttcctctcacaa

SEQ ID NO: 1943831 - DNA, 25 bp, Homo sapien
atagcttgacattcataaaagagac

SEQ ID NO: 1943832 - DNA, 25 bp, Homo sapien
ttatgggcttccgttgcaaaagcag

SEQ ID NO: 1943833 - DNA, 25 bp, Homo sapien
ttcttatgggcttccgttgcaaaag

SEQ ID NO: 1943834 - DNA, 25 bp, Homo sapien
ccaagtcttgaattaatagcttgac

SEQ ID NO: 1943835 - DNA, 25 bp, Homo sapien
tgcttgacttccataaacaactccc

SEQ ID NO: 1943836 - DNA, 25 bp, Homo sapien
tccaccgcccatttagcaacagtaa

SEQ ID NO: 1943837 - DNA, 25 bp, Homo sapien
ccagcatcgttcatggcagtatgct

SEQ ID NO: 1943838 - DNA, 25 bp, Homo sapien
aaaccatctcatcacaggtttcaat

SEQ ID NO: 1943839 - DNA, 25 bp, Homo sapien
cactgagcggtggtttcattcatga

SEQ ID NO: 1943840 - DNA, 25 bp, Homo sapien
tctagccaggcttgcagactagcca

SEQ ID NO: 1943841 - DNA, 25 bp, Homo sapien
tattgccatagcgatcccagttaga

SEQ ID NO: 1943842 - DNA, 25 bp, Homo sapien
tactgagagattcctccactgagcg

SEQ ID NO: 1943843 - DNA, 25 bp, Homo sapien
tcaagatctggtatgtcacctcata

SEQ ID NO: 1943844 - DNA, 25 bp, Homo sapien
ctttgacatacatctcagctgtctg

SEQ ID NO: 1943845 - DNA, 25 bp, Homo sapien
tcacctcatattgttcaaagaactt

SEQ ID NO: 1943846 - DNA, 25 bp, Homo sapien
aaccatctgctttgacatacatctc

SEQ ID NO: 1943847 - DNA, 25 bp, Homo sapien
cgtagttttgtagaagctgctccac

SEQ ID NO: 1943848 - DNA, 25 bp, Homo sapien
gcagtgagagcagacggtactttaa

SEQ ID NO: 1943849 - DNA, 25 bp, Homo sapien
tctcctcccgtacttaatgatccaa

SEQ ID NO: 1943850 - DNA, 25 bp, Homo sapien
ctttgactctgcaagaaccagcagt

SEQ ID NO: 1943851 - DNA, 25 bp, Homo sapien
tgatgtggaggaaacaaaatgaaac

SEQ ID NO: 1943852 - DNA, 25 bp, Homo sapien
ctgatgtggaggaaacaaaatgaaa

SEQ ID NO: 1943853 - DNA, 25 bp, Homo sapien
taatagtaacagaactgatgcttac

SEQ ID NO: 1943854 - DNA, 25 bp, Homo sapien
tagaatgtaactaatagtaacagaa

SEQ ID NO: 1943855 - DNA, 25 bp, Homo sapien
tgtaactaatagtaacagaactgat

SEQ ID NO: 1943856 - DNA, 25 bp, Homo sapien
aaacagggagaatttatagaatgta

SEQ ID NO: 1943857 - DNA, 25 bp, Homo sapien
ggctgatcattttctggaaatccga

SEQ ID NO: 1943858 - DNA, 25 bp, Homo sapien
ctggaaatccgattccttttctagc

SEQ ID NO: 1943859 - DNA, 25 bp, Homo sapien
taaatagaatgcagccacaagctct

SEQ ID NO: 1943860 - DNA, 25 bp, Homo sapien
tgttacatgtcagccttaaatagaa

SEQ ID NO: 1943861 - DNA, 25 bp, Homo sapien
gattgaagtcttcgatttagttctt

SEQ ID NO: 1943862 - DNA, 25 bp, Homo sapien
catgaatgattgaagtcttcgattt

SEQ ID NO: 1943863 - DNA, 25 bp, Homo sapien
atgattgaagtcttcgatttagttc

SEQ ID NO: 1943864 - DNA, 25 bp, Homo sapien
gaatgattgaagtcttcgatttagt

SEQ ID NO: 1943865 - DNA, 25 bp, Homo sapien
gacctggtccggtagatttcatgga

SEQ ID NO: 1943866 - DNA, 25 bp, Homo sapien
catgtcctctaattgatcaggtggc

SEQ ID NO: 1943867 - DNA, 25 bp, Homo sapien
gaatgctcttttgtgggcatccgtg

SEQ ID NO: 1943868 - DNA, 25 bp, Homo sapien
tggaatcccgttaacagacctggtc

SEQ ID NO: 1943869 - DNA, 25 bp, Homo sapien
cctatggtgcccagaggtgcaggaa

SEQ ID NO: 1943870 - DNA, 25 bp, Homo sapien
tcctcgtggacctgttgaacggtta

SEQ ID NO: 1943871 - DNA, 25 bp, Homo sapien
tgcaggaagagatttatcaagctgt

SEQ ID NO: 1943872 - DNA, 25 bp, Homo sapien
tgttgctcaagtttccgttgtatcg

SEQ ID NO: 1943873 - DNA, 25 bp, Homo sapien
tcccacgtgatcagaacaagttcag

SEQ ID NO: 1943874 - DNA, 25 bp, Homo sapien
tcttggtcgtcggaatgagaatccc

SEQ ID NO: 1943875 - DNA, 25 bp, Homo sapien
gaggtgcttaggaactagcctattc

SEQ ID NO: 1943876 - DNA, 25 bp, Homo sapien
tggagtcactagaaaaaatgagact

SEQ ID NO: 1943877 - DNA, 25 bp, Homo sapien
ccgtctctgtgtaatggttgtatta

SEQ ID NO: 1943878 - DNA, 25 bp, Homo sapien
tggaggtcactctatcccaagattg

SEQ ID NO: 1943879 - DNA, 25 bp, Homo sapien
taccaatgcttggtcaagtgacaat

SEQ ID NO: 1943880 - DNA, 25 bp, Homo sapien
ctatcccaagattgttttaccaatg

SEQ ID NO: 1943881 - DNA, 25 bp, Homo sapien
catctgtgctcttgtcaaatctctc

SEQ ID NO: 1943882 - DNA, 25 bp, Homo sapien
ccaccatctgtgctcttgtcaaatc

SEQ ID NO: 1943883 - DNA, 25 bp, Homo sapien
tcctgtaaatttgattccaccatct

SEQ ID NO: 1943884 - DNA, 25 bp, Homo sapien
cctgtaaatttgattccaccatctg

SEQ ID NO: 1943885 - DNA, 25 bp, Homo sapien
aactccagcatctcacttgctgctg

SEQ ID NO: 1943886 - DNA, 25 bp, Homo sapien
atttacaaaatgcaactccagcatc

SEQ ID NO: 1943887 - DNA, 25 bp, Homo sapien
ttacaaaatgcaactccagcatctc

SEQ ID NO: 1943888 - DNA, 25 bp, Homo sapien
aaatgcaactccagcatctcacttg

SEQ ID NO: 1943889 - DNA, 25 bp, Homo sapien
tagcatgtccagtacagaggttgtc

SEQ ID NO: 1943890 - DNA, 25 bp, Homo sapien
aaatccgtatgtctaagttcccagg

SEQ ID NO: 1943891 - DNA, 25 bp, Homo sapien
ctttttcagaactcggctcaggcac

SEQ ID NO: 1943892 - DNA, 25 bp, Homo sapien
ggtgtgttaaatcatcacggaccct

SEQ ID NO: 1943893 - DNA, 25 bp, Homo sapien
cttaaaattttgtacagaatttgca

SEQ ID NO: 1943894 - DNA, 25 bp, Homo sapien
aattttgtacagaatttgcaaaaga

SEQ ID NO: 1943895 - DNA, 25 bp, Homo sapien
caaaagatgggaaacctggaagtat

SEQ ID NO: 1943896 - DNA, 25 bp, Homo sapien
ttgtacagaatttgcaaaagatggg

SEQ ID NO: 1943897 - DNA, 25 bp, Homo sapien
agtgatacttgaagaaagcaaatac

SEQ ID NO: 1943898 - DNA, 25 bp, Homo sapien
cagtgatacttgaagaaagcaaata

SEQ ID NO: 1943899 - DNA, 25 bp, Homo sapien
tcatcctcttgcccatcagtgcttg

SEQ ID NO: 1943900 - DNA, 25 bp, Homo sapien
ctcatctggtttatccacatcaacg

SEQ ID NO: 1943901 - DNA, 25 bp, Homo sapien
gctacataggtcataatagatttct

SEQ ID NO: 1943902 - DNA, 25 bp, Homo sapien
gcttgcattgtggatgtcaggataa

SEQ ID NO: 1943903 - DNA, 25 bp, Homo sapien
taactgaatgaaaggcaaccccgct

SEQ ID NO: 1943904 - DNA, 25 bp, Homo sapien
caaattttctcggttggatctgcct

SEQ ID NO: 1943905 - DNA, 25 bp, Homo sapien
aagtccaccaattccggtcgaatgg

SEQ ID NO: 1943906 - DNA, 25 bp, Homo sapien
tgtttcggcgatagtgaaagcatcc

SEQ ID NO: 1943907 - DNA, 25 bp, Homo sapien
tgatgtcacattctgaatagataca

SEQ ID NO: 1943908 - DNA, 25 bp, Homo sapien
cttttcaccaacgatatgcagagag

SEQ ID NO: 1943909 - DNA, 25 bp, Homo sapien
agtgcttttcaccaacgatatgcag

SEQ ID NO: 1943910 - DNA, 25 bp, Homo sapien
gtcacattctgaatagatacaagca

SEQ ID NO: 1943911 - DNA, 25 bp, Homo sapien
caccttccgtttacttggtgggctg

SEQ ID NO: 1943912 - DNA, 25 bp, Homo sapien
cagagctaactatgctgtccacgga

SEQ ID NO: 1943913 - DNA, 25 bp, Homo sapien
cagctgtgtactgaacccactttaa

SEQ ID NO: 1943914 - DNA, 25 bp, Homo sapien
catttccttggatcttggtggtcac

SEQ ID NO: 1943915 - DNA, 25 bp, Homo sapien
ctatatcggtggagttaatgttgac

SEQ ID NO: 1943916 - DNA, 25 bp, Homo sapien
caagaactattgagggtcggccatc

SEQ ID NO: 1943917 - DNA, 25 bp, Homo sapien
ggtccacatcaatccaagaactatt

SEQ ID NO: 1943918 - DNA, 25 bp, Homo sapien
aaatatagaataatggtccacatca

SEQ ID NO: 1943919 - DNA, 25 bp, Homo sapien
cgtgccaatgttagccacagcatgg

SEQ ID NO: 1943920 - DNA, 25 bp, Homo sapien
gcatggattcgcttcatccggcgtc

SEQ ID NO: 1943921 - DNA, 25 bp, Homo sapien
tcttccttcgaggaacttgagtgcc

SEQ ID NO: 1943922 - DNA, 25 bp, Homo sapien
cacagcatggattcgcttcatccgg

SEQ ID NO: 1943923 - DNA, 25 bp, Homo sapien
gggcaagcagtttaacaccatcttt

SEQ ID NO: 1943924 - DNA, 25 bp, Homo sapien
agggcaagcagtttaacaccatctt

SEQ ID NO: 1943925 - DNA, 25 bp, Homo sapien
tcttcaaaaagatcgtccaccacca

SEQ ID NO: 1943926 - DNA, 25 bp, Homo sapien
gtcttcaaaaagatcgtccaccacc

SEQ ID NO: 1943927 - DNA, 25 bp, Homo sapien
ccacaaggctcctggaattggcctt

SEQ ID NO: 1943928 - DNA, 25 bp, Homo sapien
ggcccctctgcatgggacattgcca

SEQ ID NO: 1943929 - DNA, 25 bp, Homo sapien
aataccattctctccctgatctgtt

SEQ ID NO: 1943930 - DNA, 25 bp, Homo sapien
attggccttccgatcagcagcgaca

SEQ ID NO: 1943931 - DNA, 25 bp, Homo sapien
tctgtgaccagactgcctagttcac

SEQ ID NO: 1943932 - DNA, 25 bp, Homo sapien
tgtgaccagactgcctagttcacag

SEQ ID NO: 1943933 - DNA, 25 bp, Homo sapien
tgaccagactgcctagttcacagcc

SEQ ID NO: 1943934 - DNA, 25 bp, Homo sapien
ccagactgcctagttcacagccctt

SEQ ID NO: 1943935 - DNA, 25 bp, Homo sapien
tgtctcacaccaggaccatctagga

SEQ ID NO: 1943936 - DNA, 25 bp, Homo sapien
ctgtctcacaccaggaccatctagg

SEQ ID NO: 1943937 - DNA, 25 bp, Homo sapien
ccaggaccatctaggacctcatttg

SEQ ID NO: 1943938 - DNA, 25 bp, Homo sapien
ggaccatctaggacctcatttgcca

SEQ ID NO: 1943939 - DNA, 25 bp, Homo sapien
tgtgaaagttcgtttttgtactatc

SEQ ID NO: 1943940 - DNA, 25 bp, Homo sapien
aagttcgtttttgtactatctcttg

SEQ ID NO: 1943941 - DNA, 25 bp, Homo sapien
tgagagttgatccattttgtgaaag

SEQ ID NO: 1943942 - DNA, 25 bp, Homo sapien
cttggccagatgagagttgatccat

SEQ ID NO: 1943943 - DNA, 25 bp, Homo sapien
gcctggacaggaacgtttattataa

SEQ ID NO: 1943944 - DNA, 25 bp, Homo sapien
ggtgacttagccactttatagcttc

SEQ ID NO: 1943945 - DNA, 25 bp, Homo sapien
taggagtgcaacagatccgactcgg

SEQ ID NO: 1943946 - DNA, 25 bp, Homo sapien
tcgggatcccagcatcatcatttac

SEQ ID NO: 1943947 - DNA, 25 bp, Homo sapien
ttgctgtaattgaacaacaaggact

SEQ ID NO: 1943948 - DNA, 25 bp, Homo sapien
tttctgcacctgacagttaattgct

SEQ ID NO: 1943949 - DNA, 25 bp, Homo sapien
gcagtctggtaatcaatccaaatct

SEQ ID NO: 1943950 - DNA, 25 bp, Homo sapien
ggttgattaagcttaagcagtctgg

SEQ ID NO: 1943951 - DNA, 25 bp, Homo sapien
gctttccactatgcatggtgactgg

SEQ ID NO: 1943952 - DNA, 25 bp, Homo sapien
tacagactttcgaacttaccagagc

SEQ ID NO: 1943953 - DNA, 25 bp, Homo sapien
acatgagggcctccatatgtctggg

SEQ ID NO: 1943954 - DNA, 25 bp, Homo sapien
gcccggccaagttatcattatagtt

SEQ ID NO: 1943955 - DNA, 25 bp, Homo sapien
ctaatgttccacatcaataatctga

SEQ ID NO: 1943956 - DNA, 25 bp, Homo sapien
taatgttccacatcaataatctgac

SEQ ID NO: 1943957 - DNA, 25 bp, Homo sapien
agttcacattaatatgtggctgatt

SEQ ID NO: 1943958 - DNA, 25 bp, Homo sapien
gaaatagttatctttatcaaacata

SEQ ID NO: 1943959 - DNA, 25 bp, Homo sapien
aagttcacattaatatgtggctgat

SEQ ID NO: 1943960 - DNA, 25 bp, Homo sapien
attttggataacaggaaatagttat

SEQ ID NO: 1943961 - DNA, 25 bp, Homo sapien
tgtatccctacgtaaaaacctgcac

SEQ ID NO: 1943962 - DNA, 25 bp, Homo sapien
aagatactggctatggcctcaatag

SEQ ID NO: 1943963 - DNA, 25 bp, Homo sapien
taagtgctctaattacaggtaaatg

SEQ ID NO: 1943964 - DNA, 25 bp, Homo sapien
gatgaactaaagtgtgtgcgctctc

SEQ ID NO: 1943965 - DNA, 25 bp, Homo sapien
ccaaaagcaatggcaacaaaagcca

SEQ ID NO: 1943966 - DNA, 25 bp, Homo sapien
gggcaaggacttcatgactaaaaca

SEQ ID NO: 1943967 - DNA, 25 bp, Homo sapien
ccacagaaaccctagaagaaagcct

SEQ ID NO: 1943968 - DNA, 25 bp, Homo sapien
gcaataccattcaggacataggcat

SEQ ID NO: 1943969 - DNA, 25 bp, Homo sapien
gcctccaccctccaatgggccacag

SEQ ID NO: 1943970 - DNA, 25 bp, Homo sapien
tgtcatggaggcttgttgtatggat

SEQ ID NO: 1943971 - DNA, 25 bp, Homo sapien
catggaggcttgttgtatggattat

SEQ ID NO: 1943972 - DNA, 25 bp, Homo sapien
ggaggcttgttgtatggattatttc

SEQ ID NO: 1943973 - DNA, 25 bp, Homo sapien
tcacattggcgatatcccgaggaca

SEQ ID NO: 1943974 - DNA, 25 bp, Homo sapien
tctgcatcacattggcgatatcccg

SEQ ID NO: 1943975 - DNA, 25 bp, Homo sapien
acattggcgatatcccgaggacacc

SEQ ID NO: 1943976 - DNA, 25 bp, Homo sapien
catcacattggcgatatcccgagga

SEQ ID NO: 1943977 - DNA, 25 bp, Homo sapien
taagactgtcctcttacatgaactc

SEQ ID NO: 1943978 - DNA, 25 bp, Homo sapien
gcttggacttttctagatctattct

SEQ ID NO: 1943979 - DNA, 25 bp, Homo sapien
ggcagcacagggctacaccactcta

SEQ ID NO: 1943980 - DNA, 25 bp, Homo sapien
gggctacaccactctagaaaacatg

SEQ ID NO: 1943981 - DNA, 25 bp, Homo sapien
tctctgcgcccaggctcggcgggac

SEQ ID NO: 1943982 - DNA, 25 bp, Homo sapien
ttctctctcggcctcgttcagtttc

SEQ ID NO: 1943983 - DNA, 25 bp, Homo sapien
cagcaaggcgaagcgagcgaacgct

SEQ ID NO: 1943984 - DNA, 25 bp, Homo sapien
ctgtcgccgggatcgggcgcggtct

SEQ ID NO: 1943985 - DNA, 25 bp, Homo sapien
tggtgacagaggacaacaatctcag

SEQ ID NO: 1943986 - DNA, 25 bp, Homo sapien
acaacaatctcagcccgctgcggcc

SEQ ID NO: 1943987 - DNA, 25 bp, Homo sapien
gaggacaacaatctcagcccgctgc

SEQ ID NO: 1943988 - DNA, 25 bp, Homo sapien
aatctcagcccgctgcggccggcgg

SEQ ID NO: 1943989 - DNA, 25 bp, Homo sapien
tcagcgagcctttataccgggacca

SEQ ID NO: 1943990 - DNA, 25 bp, Homo sapien
ttaatttgagggagactggtcaggc

SEQ ID NO: 1943991 - DNA, 25 bp, Homo sapien
gcccgggtgacctttctgagcggaa

SEQ ID NO: 1943992 - DNA, 25 bp, Homo sapien
tgtatgcaccctgtacattgcggag

SEQ ID NO: 1943993 - DNA, 25 bp, Homo sapien
ggcatttaaccatctggcagaattg

SEQ ID NO: 1943994 - DNA, 25 bp, Homo sapien
tgttgctgcacccttatcccagtta

SEQ ID NO: 1943995 - DNA, 25 bp, Homo sapien
gaatattaacttggtatcagggcta

SEQ ID NO: 1943996 - DNA, 25 bp, Homo sapien
tagcagccaagtaaggtttcaaggg

SEQ ID NO: 1943997 - DNA, 25 bp, Homo sapien
aagcctacatatttaaaccttgtga

SEQ ID NO: 1943998 - DNA, 25 bp, Homo sapien
tctgctgagcagctacaccacaggt

SEQ ID NO: 1943999 - DNA, 25 bp, Homo sapien
tgctttatccagttggtgtgctgaa

SEQ ID NO: 1944000 - DNA, 25 bp, Homo sapien
caggtgctcaacagaccaaaagggt

SEQ ID NO: 1944001 - DNA, 25 bp, Homo sapien
tattgtcgtttttatcttccagtga

SEQ ID NO: 1944002 - DNA, 25 bp, Homo sapien
atattgtcgtttttatcttccagtg

SEQ ID NO: 1944003 - DNA, 25 bp, Homo sapien
attgtcgtttttatcttccagtgaa

SEQ ID NO: 1944004 - DNA, 25 bp, Homo sapien
tgtcgtttttatcttccagtgaatt

SEQ ID NO: 1944005 - DNA, 25 bp, Homo sapien
ttagctcttgttgagcagctgctta

SEQ ID NO: 1944006 - DNA, 25 bp, Homo sapien
tgttgagcagctgcttataggagag

SEQ ID NO: 1944007 - DNA, 25 bp, Homo sapien
cttgttgagcagctgcttataggag

SEQ ID NO: 1944008 - DNA, 25 bp, Homo sapien
agctgcttataggagagcctgggct

SEQ ID NO: 1944009 - DNA, 25 bp, Homo sapien
gtgagttccactgggtgtcccacag

SEQ ID NO: 1944010 - DNA, 25 bp, Homo sapien
gacgtcattgaaaccagctggtggt

SEQ ID NO: 1944011 - DNA, 25 bp, Homo sapien
tacccatggggacgtcattgaaacc

SEQ ID NO: 1944012 - DNA, 25 bp, Homo sapien
ggaaatcacccacaggagatgctgg

SEQ ID NO: 1944013 - DNA, 25 bp, Homo sapien
tgaatactcaggatggataaatgcg

SEQ ID NO: 1944014 - DNA, 25 bp, Homo sapien
cagggagtcatcaactgatacctca

SEQ ID NO: 1944015 - DNA, 25 bp, Homo sapien
catatactctaaaaatcagggagtc

SEQ ID NO: 1944016 - DNA, 25 bp, Homo sapien
gataaatgcgagaaaatagtgccta

SEQ ID NO: 1944017 - DNA, 25 bp, Homo sapien
gaaaggaagatacaagtagcgagtc

SEQ ID NO: 1944018 - DNA, 25 bp, Homo sapien
aattattccatatcttcttacttca

SEQ ID NO: 1944019 - DNA, 25 bp, Homo sapien
aagtgcctcaggttaagtgtaagaa

SEQ ID NO: 1944020 - DNA, 25 bp, Homo sapien
tacaagtagcgagtctcataatcaa

SEQ ID NO: 1944021 - DNA, 25 bp, Homo sapien
tggcaaaatttctgtgaatagtcat

SEQ ID NO: 1944022 - DNA, 25 bp, Homo sapien
cagggggcaataacaattctggctc

SEQ ID NO: 1944023 - DNA, 25 bp, Homo sapien
taaacttctagtgagcagcttcttt

SEQ ID NO: 1944024 - DNA, 25 bp, Homo sapien
tgtacatcctgcttgattcacaggg

SEQ ID NO: 1944025 - DNA, 25 bp, Homo sapien
ttgactgtgtacatcctgcttgatt

SEQ ID NO: 1944026 - DNA, 25 bp, Homo sapien
tgaaggaatacttagtaaaatcaca

SEQ ID NO: 1944027 - DNA, 25 bp, Homo sapien
cttagtaaaatcacatcagaggaga

SEQ ID NO: 1944028 - DNA, 25 bp, Homo sapien
tatttctttgagtaattcagctctt

SEQ ID NO: 1944029 - DNA, 25 bp, Homo sapien
tctaaactgaagagtgaaggaatac

SEQ ID NO: 1944030 - DNA, 25 bp, Homo sapien
gaaataatccatacaccaaacttct

SEQ ID NO: 1944031 - DNA, 25 bp, Homo sapien
aaataatccatacaccaaacttctg

SEQ ID NO: 1944032 - DNA, 25 bp, Homo sapien
caatctaagctccatcacgttcaag

SEQ ID NO: 1944033 - DNA, 25 bp, Homo sapien
cttgagtatcccaaaacaccgttgc

SEQ ID NO: 1944034 - DNA, 25 bp, Homo sapien
gaatattccgaagcaaaatgccttg

SEQ ID NO: 1944035 - DNA, 25 bp, Homo sapien
taacatcgaaactctcaaacttgcc

SEQ ID NO: 1944036 - DNA, 25 bp, Homo sapien
gggagaacaccaagatattagcaga

SEQ ID NO: 1944037 - DNA, 25 bp, Homo sapien
catatatgagttaaggagcctggca

SEQ ID NO: 1944038 - DNA, 25 bp, Homo sapien
gtatctcaaactatatcctgttcag

SEQ ID NO: 1944039 - DNA, 25 bp, Homo sapien
cagatatgatagaagggcattgaac

SEQ ID NO: 1944040 - DNA, 25 bp, Homo sapien
atgacacaattgtgtgttgagttgt

SEQ ID NO: 1944041 - DNA, 25 bp, Homo sapien
tgatgacacaattgtgtgttgagtt

SEQ ID NO: 1944042 - DNA, 25 bp, Homo sapien
gttcagtgtgcccttacgcaaggtg

SEQ ID NO: 1944043 - DNA, 25 bp, Homo sapien
ggtggagccctaaaacatcaccttc

SEQ ID NO: 1944044 - DNA, 25 bp, Homo sapien
ccttacgcaaggtgtcagacatggg

SEQ ID NO: 1944045 - DNA, 25 bp, Homo sapien
gtggagccctaaaacatcaccttct

SEQ ID NO: 1944046 - DNA, 25 bp, Homo sapien
tcgtggtttgcatggcgattctgct

SEQ ID NO: 1944047 - DNA, 25 bp, Homo sapien
gacttaataatagccatacggattg

SEQ ID NO: 1944048 - DNA, 25 bp, Homo sapien
ttaacattcctctgggtgcataccc

SEQ ID NO: 1944049 - DNA, 25 bp, Homo sapien
tctctgcaatatcactggcatctgt

SEQ ID NO: 1944050 - DNA, 25 bp, Homo sapien
gactcaattctaacagcatttaaga

SEQ ID NO: 1944051 - DNA, 25 bp, Homo sapien
tgtactcagtaatgtgattactggg

SEQ ID NO: 1944052 - DNA, 25 bp, Homo sapien
tctaattaaaccaacgactcaattc

SEQ ID NO: 1944053 - DNA, 25 bp, Homo sapien
taagatctcatgttagtcacattag

SEQ ID NO: 1944054 - DNA, 25 bp, Homo sapien
ctttgacgggcttccacctccatgg

SEQ ID NO: 1944055 - DNA, 25 bp, Homo sapien
tgccggaggagttttctaggcttct

SEQ ID NO: 1944056 - DNA, 25 bp, Homo sapien
gctttgacgggcttccacctccatg

SEQ ID NO: 1944057 - DNA, 25 bp, Homo sapien
gatctgccggaggagttttctaggc

SEQ ID NO: 1944058 - DNA, 25 bp, Homo sapien
cagtgcctcagacgctgcttgcggt

SEQ ID NO: 1944059 - DNA, 25 bp, Homo sapien
ggcacgtgcactggatgcctgcttc

SEQ ID NO: 1944060 - DNA, 25 bp, Homo sapien
tcacagcttcgaccacccagtgcct

SEQ ID NO: 1944061 - DNA, 25 bp, Homo sapien
tgatctatcacagcttcgaccaccc

SEQ ID NO: 1944062 - DNA, 25 bp, Homo sapien
ctcggttcggcgccagttgattttt

SEQ ID NO: 1944063 - DNA, 25 bp, Homo sapien
ttcagctcggttcggcgccagttga

SEQ ID NO: 1944064 - DNA, 25 bp, Homo sapien
cagctcggttcggcgccagttgatt

SEQ ID NO: 1944065 - DNA, 25 bp, Homo sapien
cttcagctcggttcggcgccagttg

SEQ ID NO: 1944066 - DNA, 25 bp, Homo sapien
cgacgccaatatgcggtccgtactt

SEQ ID NO: 1944067 - DNA, 25 bp, Homo sapien
tatgcggtccgtacttccgcctggg

SEQ ID NO: 1944068 - DNA, 25 bp, Homo sapien
ctcggcgacgccaatatgcggtccg

SEQ ID NO: 1944069 - DNA, 25 bp, Homo sapien
cgccaatatgcggtccgtacttccg

SEQ ID NO: 1944070 - DNA, 25 bp, Homo sapien
gaaatgctaacagatggaaaaccag

SEQ ID NO: 1944071 - DNA, 25 bp, Homo sapien
aaaaacctcaggatactacaccgat

SEQ ID NO: 1944072 - DNA, 25 bp, Homo sapien
tttaagactgtctaggtaaaattgc

SEQ ID NO: 1944073 - DNA, 25 bp, Homo sapien
gctttagaaaggtgacaacacattt

SEQ ID NO: 1944074 - DNA, 25 bp, Homo sapien
caatcttcgtaaattctttttgctt

SEQ ID NO: 1944075 - DNA, 25 bp, Homo sapien
cacaatcttcgtaaattctttttgc

SEQ ID NO: 1944076 - DNA, 25 bp, Homo sapien
acaatcttcgtaaattctttttgct

SEQ ID NO: 1944077 - DNA, 25 bp, Homo sapien
tcacaatcttcgtaaattctttttg

SEQ ID NO: 1944078 - DNA, 25 bp, Homo sapien
tacaactggctttgaggagcttgcc

SEQ ID NO: 1944079 - DNA, 25 bp, Homo sapien
ctcgtttgcaggttgcccgttgtaa

SEQ ID NO: 1944080 - DNA, 25 bp, Homo sapien
gataattacagagacacttcgtaca

SEQ ID NO: 1944081 - DNA, 25 bp, Homo sapien
caggtgaattacagcgaatacaggc

SEQ ID NO: 1944082 - DNA, 25 bp, Homo sapien
gagaattcattgtgtcgactataag

SEQ ID NO: 1944083 - DNA, 25 bp, Homo sapien
taacttggtttgagcatcttttttg

SEQ ID NO: 1944084 - DNA, 25 bp, Homo sapien
tctgatcaccttgattggataactt

SEQ ID NO: 1944085 - DNA, 25 bp, Homo sapien
gtgtcgactataagtagaacctttc

SEQ ID NO: 1944086 - DNA, 25 bp, Homo sapien
ggttgaagcatgaggtgaaaattta

SEQ ID NO: 1944087 - DNA, 25 bp, Homo sapien
attctctggttgaagcatgaggtga

SEQ ID NO: 1944088 - DNA, 25 bp, Homo sapien
ctggttgaagcatgaggtgaaaatt

SEQ ID NO: 1944089 - DNA, 25 bp, Homo sapien
tctctggttgaagcatgaggtgaaa

SEQ ID NO: 1944090 - DNA, 25 bp, Homo sapien
gcctaacttatagacagaaactgtg

SEQ ID NO: 1944091 - DNA, 25 bp, Homo sapien
cacacaactggcaactaagattgac

SEQ ID NO: 1944092 - DNA, 25 bp, Homo sapien
ggtaagagacttatccctacatgca

SEQ ID NO: 1944093 - DNA, 25 bp, Homo sapien
gactaaatggtcgactctatctgag

SEQ ID NO: 1944094 - DNA, 25 bp, Homo sapien
gtattgctttactgtacaactggaa

SEQ ID NO: 1944095 - DNA, 25 bp, Homo sapien
aactctttgtattgctttactgtac

SEQ ID NO: 1944096 - DNA, 25 bp, Homo sapien
ccaagttgtgctcactttagacaca

SEQ ID NO: 1944097 - DNA, 25 bp, Homo sapien
aggatcttcttccaagttgtgctca

SEQ ID NO: 1944098 - DNA, 25 bp, Homo sapien
gaccacattacaattgcctggcggt

SEQ ID NO: 1944099 - DNA, 25 bp, Homo sapien
ctcaagaagctgtttaggctcatgc

SEQ ID NO: 1944100 - DNA, 25 bp, Homo sapien
ggtactgatttgactgtccctcaag

SEQ ID NO: 1944101 - DNA, 25 bp, Homo sapien
gatatcgagataccctcctggccaa

SEQ ID NO: 1944102 - DNA, 25 bp, Homo sapien
cagcatctcccgatctactttagga

SEQ ID NO: 1944103 - DNA, 25 bp, Homo sapien
gcaggcaggattgtagactgtcacc

SEQ ID NO: 1944104 - DNA, 25 bp, Homo sapien
cataaagtctactggtctctagtgc

SEQ ID NO: 1944105 - DNA, 25 bp, Homo sapien
tctgagtccccttcgaaagagttcg

SEQ ID NO: 1944106 - DNA, 25 bp, Homo sapien
taccagtttaagtccggaatgaaca

SEQ ID NO: 1944107 - DNA, 25 bp, Homo sapien
gcaagcgcttgctttcagtttcaag

SEQ ID NO: 1944108 - DNA, 25 bp, Homo sapien
caatcctagggctcacaatcggtga

SEQ ID NO: 1944109 - DNA, 25 bp, Homo sapien
tcggtgacccaatacatgacagcct

SEQ ID NO: 1944110 - DNA, 25 bp, Homo sapien
tgacagaaagggtagaactttcttc

SEQ ID NO: 1944111 - DNA, 25 bp, Homo sapien
tcaaagcgtttgtctaccttactgg

SEQ ID NO: 1944112 - DNA, 25 bp, Homo sapien
gatagtaaactcgagtaccgggaca

SEQ ID NO: 1944113 - DNA, 25 bp, Homo sapien
ttctaatatattcaaagcgtttgtc

SEQ ID NO: 1944114 - DNA, 25 bp, Homo sapien
taccttactggatagtaaactcgag

SEQ ID NO: 1944115 - DNA, 25 bp, Homo sapien
ggctgtcactgcgctggggctggcg

SEQ ID NO: 1944116 - DNA, 25 bp, Homo sapien
cggctgtcactgcgctggggctggc

SEQ ID NO: 1944117 - DNA, 25 bp, Homo sapien
gcagcggggtggccgtagggcgcag

SEQ ID NO: 1944118 - DNA, 25 bp, Homo sapien
ggagcagcggggtggccgtagggcg

SEQ ID NO: 1944119 - DNA, 25 bp, Homo sapien
agctgagcaacctgcctgcttcaca

SEQ ID NO: 1944120 - DNA, 25 bp, Homo sapien
cctcaggtggaggaaccgctccggg

SEQ ID NO: 1944121 - DNA, 25 bp, Homo sapien
tatctcttaaaaggcgccagctggt

SEQ ID NO: 1944122 - DNA, 25 bp, Homo sapien
gcctgcttcacagacctgtatctct

SEQ ID NO: 1944123 - DNA, 25 bp, Homo sapien
ggacctccgagcacggggaggccgc

SEQ ID NO: 1944124 - DNA, 25 bp, Homo sapien
tccccacgtccggaaagatgctacg

SEQ ID NO: 1944125 - DNA, 25 bp, Homo sapien
ggctccccacgtccggaaagatgct

SEQ ID NO: 1944126 - DNA, 25 bp, Homo sapien
cacgtccggaaagatgctacggccg

SEQ ID NO: 1944127 - DNA, 25 bp, Homo sapien
tgtggagggtctatcacgcatgcgt

SEQ ID NO: 1944128 - DNA, 25 bp, Homo sapien
ctctctaggatttacgcgcgcgctc

SEQ ID NO: 1944129 - DNA, 25 bp, Homo sapien
gaatccagactttccggaagacgga

SEQ ID NO: 1944130 - DNA, 25 bp, Homo sapien
tcagcgctggcttccatctggagat

SEQ ID NO: 1944131 - DNA, 25 bp, Homo sapien
gctggatacagatcatggatgtatt

SEQ ID NO: 1944132 - DNA, 25 bp, Homo sapien
gggtggtgtataaagtgagctaata

SEQ ID NO: 1944133 - DNA, 25 bp, Homo sapien
aaatgatgctggatacagatcatgg

SEQ ID NO: 1944134 - DNA, 25 bp, Homo sapien
gtgagctaatacaaaatgatgctgg

SEQ ID NO: 1944135 - DNA, 25 bp, Homo sapien
tacctttggactggaccttgcacca

SEQ ID NO: 1944136 - DNA, 25 bp, Homo sapien
cacaggtgcctagctactgggtcat

SEQ ID NO: 1944137 - DNA, 25 bp, Homo sapien
tacagaaggcaagctagcaggatgc

SEQ ID NO: 1944138 - DNA, 25 bp, Homo sapien
catggcctagtgatctcttaaagac

SEQ ID NO: 1944139 - DNA, 25 bp, Homo sapien
tagcgtccaagatttaccaccacat

SEQ ID NO: 1944140 - DNA, 25 bp, Homo sapien
gaatcatacctctttcacaccatgg

SEQ ID NO: 1944141 - DNA, 25 bp, Homo sapien
caatcactgagtaggctgtagccac

SEQ ID NO: 1944142 - DNA, 25 bp, Homo sapien
ttgcttgtaagacctgatccaccag

SEQ ID NO: 1944143 - DNA, 25 bp, Homo sapien
tgctaatgcattgagagagatctgt

SEQ ID NO: 1944144 - DNA, 25 bp, Homo sapien
caccctatgtggatgtactgtagaa

SEQ ID NO: 1944145 - DNA, 25 bp, Homo sapien
tatgcatattacctccaactgtgtt

SEQ ID NO: 1944146 - DNA, 25 bp, Homo sapien
caatgtaaatcgaggaccatctgta

SEQ ID NO: 1944147 - DNA, 25 bp, Homo sapien
gatcatgcagcgtcttgtttattct

SEQ ID NO: 1944148 - DNA, 25 bp, Homo sapien
ttcaagatcatgcagcgtcttgttt

SEQ ID NO: 1944149 - DNA, 25 bp, Homo sapien
gcagcgtcttgtttattctgtgatc

SEQ ID NO: 1944150 - DNA, 25 bp, Homo sapien
catgcagcgtcttgtttattctgtg

SEQ ID NO: 1944151 - DNA, 25 bp, Homo sapien
tacagttttgcacgtaactttgtca

SEQ ID NO: 1944152 - DNA, 25 bp, Homo sapien
gttttgcacgtaactttgtcatagc

SEQ ID NO: 1944153 - DNA, 25 bp, Homo sapien
gctgtacagttttgcacgtaacttt

SEQ ID NO: 1944154 - DNA, 25 bp, Homo sapien
gcatgctgtacagttttgcacgtaa

SEQ ID NO: 1944155 - DNA, 25 bp, Homo sapien
aatcttctttacttattatcaagga

SEQ ID NO: 1944156 - DNA, 25 bp, Homo sapien
atcttctttacttattatcaaggaa

SEQ ID NO: 1944157 - DNA, 25 bp, Homo sapien
tcttctttacttattatcaaggaat

SEQ ID NO: 1944158 - DNA, 25 bp, Homo sapien
tgaggggaaaaaacagaggactcta

SEQ ID NO: 1944159 - DNA, 25 bp, Homo sapien
atgaggggaaaaaacagaggactct

SEQ ID NO: 1944160 - DNA, 25 bp, Homo sapien
tatgaggggaaaaaacagaggactc

SEQ ID NO: 1944161 - DNA, 25 bp, Homo sapien
aagatgaactatccggacagcactg

SEQ ID NO: 1944162 - DNA, 25 bp, Homo sapien
cactgtccgtggtatttacatgctg

SEQ ID NO: 1944163 - DNA, 25 bp, Homo sapien
ccactggctcgcttagtgtcaattc

SEQ ID NO: 1944164 - DNA, 25 bp, Homo sapien
caaatctttcggattaatcaccaga

SEQ ID NO: 1944165 - DNA, 25 bp, Homo sapien
gctggggtaatattgctacagtcat

SEQ ID NO: 1944166 - DNA, 25 bp, Homo sapien
cagtaggctggggtaatattgctac

SEQ ID NO: 1944167 - DNA, 25 bp, Homo sapien
ccccaatgctggcagatgcatgtct

SEQ ID NO: 1944168 - DNA, 25 bp, Homo sapien
ctggcagatgcatgtctaaggccac

SEQ ID NO: 1944169 - DNA, 25 bp, Homo sapien
tttataaataattgaccatcacatc

SEQ ID NO: 1944170 - DNA, 25 bp, Homo sapien
attgaccatcacatctactatcttg

SEQ ID NO: 1944171 - DNA, 25 bp, Homo sapien
taaagtcataaaaggagatgaacat

SEQ ID NO: 1944172 - DNA, 25 bp, Homo sapien
catcacatctactatcttgaggtat

SEQ ID NO: 1944173 - DNA, 25 bp, Homo sapien
tattccagggtttcaaaatgccatc

SEQ ID NO: 1944174 - DNA, 25 bp, Homo sapien
aaatgcagcatattgctgatacata

SEQ ID NO: 1944175 - DNA, 25 bp, Homo sapien
gatgtaaacaacattgcctcctgac

SEQ ID NO: 1944176 - DNA, 25 bp, Homo sapien
ttgctgatacatatcaaatatctct

SEQ ID NO: 1944177 - DNA, 25 bp, Homo sapien
ccaggatcaaatcattttcatctgt

SEQ ID NO: 1944178 - DNA, 25 bp, Homo sapien
ggatcaaatcattttcatctgtttc

SEQ ID NO: 1944179 - DNA, 25 bp, Homo sapien
ttccaggatcaaatcattttcatct

SEQ ID NO: 1944180 - DNA, 25 bp, Homo sapien
atcaaatcattttcatctgtttctt

SEQ ID NO: 1944181 - DNA, 25 bp, Homo sapien
ctgagggaaccaaaagtaagataat

SEQ ID NO: 1944182 - DNA, 25 bp, Homo sapien
taaacagtaacaagctagtcacttg

SEQ ID NO: 1944183 - DNA, 25 bp, Homo sapien
aaccagtttattgatagtcataatc

SEQ ID NO: 1944184 - DNA, 25 bp, Homo sapien
tgcaattttgggggtcaatttatac

SEQ ID NO: 1944185 - DNA, 25 bp, Homo sapien
attctaaacagtaacaagctagtca

SEQ ID NO: 1944186 - DNA, 25 bp, Homo sapien
gacacaaagtgatttcattctctgc

SEQ ID NO: 1944187 - DNA, 25 bp, Homo sapien
acaaagtgatttcattctctgcaag

SEQ ID NO: 1944188 - DNA, 25 bp, Homo sapien
tttgacacaaagtgatttcattctc

SEQ ID NO: 1944189 - DNA, 25 bp, Homo sapien
tctgcaagtttccttaaatcttcat

SEQ ID NO: 1944190 - DNA, 25 bp, Homo sapien
tctaccctatagatgatatgcagca

SEQ ID NO: 1944191 - DNA, 25 bp, Homo sapien
taagacctgccctcaagagagcatt

SEQ ID NO: 1944192 - DNA, 25 bp, Homo sapien
gaagggatacagaaggttacaccag

SEQ ID NO: 1944193 - DNA, 25 bp, Homo sapien
gcttttagacttccaacttagactg

SEQ ID NO: 1944194 - DNA, 25 bp, Homo sapien
ggccaaggatctcttacttcttgaa

SEQ ID NO: 1944195 - DNA, 25 bp, Homo sapien
ggcattcaatgcaaaactcatcttt

SEQ ID NO: 1944196 - DNA, 25 bp, Homo sapien
gaaattttctattggcttctacagc

SEQ ID NO: 1944197 - DNA, 25 bp, Homo sapien
cacgtactgtatatctcgagagctc

SEQ ID NO: 1944198 - DNA, 25 bp, Homo sapien
cctttacccacgtataggtctgaga

SEQ ID NO: 1944199 - DNA, 25 bp, Homo sapien
gatactactgcaaatgggtctccac

SEQ ID NO: 1944200 - DNA, 25 bp, Homo sapien
taagcatgtaaaaggcggcagagcg

SEQ ID NO: 1944201 - DNA, 25 bp, Homo sapien
ctttgagaaacaccgctgtggagcc

SEQ ID NO: 1944202 - DNA, 25 bp, Homo sapien
cgttcagcagtttgatcaccgccag

SEQ ID NO: 1944203 - DNA, 25 bp, Homo sapien
gcagtttgatcaccgccagcaactc

SEQ ID NO: 1944204 - DNA, 25 bp, Homo sapien
cctggcgctcgaggaaggtccgcaa

SEQ ID NO: 1944205 - DNA, 25 bp, Homo sapien
ttcagaccccgcctggcgctcgagg

SEQ ID NO: 1944206 - DNA, 25 bp, Homo sapien
ccagcggcgggctaccggagctcag

SEQ ID NO: 1944207 - DNA, 25 bp, Homo sapien
cagcggcgggctaccggagctcagg

SEQ ID NO: 1944208 - DNA, 25 bp, Homo sapien
agcggcgggctaccggagctcaggg

SEQ ID NO: 1944209 - DNA, 25 bp, Homo sapien
ctccagcggcgggctaccggagctc

SEQ ID NO: 1944210 - DNA, 25 bp, Homo sapien
agagccaccgggcagcgccccacag

SEQ ID NO: 1944211 - DNA, 25 bp, Homo sapien
cgggcagcgccccacagaacccggg

SEQ ID NO: 1944212 - DNA, 25 bp, Homo sapien
cagcgccccacagaacccgggaccg

SEQ ID NO: 1944213 - DNA, 25 bp, Homo sapien
cgccccacagaacccgggaccgcat

SEQ ID NO: 1944214 - DNA, 25 bp, Homo sapien
ttagtccgagatcgcggaccctgac

SEQ ID NO: 1944215 - DNA, 25 bp, Homo sapien
cttagtccgagatcgcggaccctga

SEQ ID NO: 1944216 - DNA, 25 bp, Homo sapien
ccttagtccgagatcgcggaccctg

SEQ ID NO: 1944217 - DNA, 25 bp, Homo sapien
gcaagtcgtcagtctccggtgcagg

SEQ ID NO: 1944218 - DNA, 25 bp, Homo sapien
tgagaacgctgcgaacttcccggag

SEQ ID NO: 1944219 - DNA, 25 bp, Homo sapien
gataagggtgagagcgcaccaagcc

SEQ ID NO: 1944220 - DNA, 25 bp, Homo sapien
cgggaacttcctgccaagcgtgaga

SEQ ID NO: 1944221 - DNA, 25 bp, Homo sapien
tatgtttctcttgtccacggtgggt

SEQ ID NO: 1944222 - DNA, 25 bp, Homo sapien
acaggcgtgtgtttattcctcctcc

SEQ ID NO: 1944223 - DNA, 25 bp, Homo sapien
ttcaagagcgagttttattatggac

SEQ ID NO: 1944224 - DNA, 25 bp, Homo sapien
ctcttgtccacggtgggtgaggttc

SEQ ID NO: 1944225 - DNA, 25 bp, Homo sapien
tgataagtgtattatgagataacca

SEQ ID NO: 1944226 - DNA, 25 bp, Homo sapien
ttgataagtgtattatgagataacc

SEQ ID NO: 1944227 - DNA, 25 bp, Homo sapien
cttgataagtgtattatgagataac

SEQ ID NO: 1944228 - DNA, 25 bp, Homo sapien
cccaccgttattctggcattgcaaa

SEQ ID NO: 1944229 - DNA, 25 bp, Homo sapien
caaacctatagttcgagacttctga

SEQ ID NO: 1944230 - DNA, 25 bp, Homo sapien
gtgcctcttaagttgcattcatgca

SEQ ID NO: 1944231 - DNA, 25 bp, Homo sapien
tctggattatctattcaatttgtga

SEQ ID NO: 1944232 - DNA, 25 bp, Homo sapien
acttcactgtattttctttatagca

SEQ ID NO: 1944233 - DNA, 25 bp, Homo sapien
tccacttcactgtattttctttata

SEQ ID NO: 1944234 - DNA, 25 bp, Homo sapien
tctttatagcatttattagtaatca

SEQ ID NO: 1944235 - DNA, 25 bp, Homo sapien
ctttatagcatttattagtaatcac

SEQ ID NO: 1944236 - DNA, 25 bp, Homo sapien
tgtcacagctaagacgagtcccggt

SEQ ID NO: 1944237 - DNA, 25 bp, Homo sapien
gagtcccggtgatggcatatacctt

SEQ ID NO: 1944238 - DNA, 25 bp, Homo sapien
caaaaacctgtgtctagtcacgaga

SEQ ID NO: 1944239 - DNA, 25 bp, Homo sapien
tgatgagcatggcactttaccgttg

SEQ ID NO: 1944240 - DNA, 25 bp, Homo sapien
gaatgctaaactgtagttctccagg

SEQ ID NO: 1944241 - DNA, 25 bp, Homo sapien
ctctggagatacacgaggagactgt

SEQ ID NO: 1944242 - DNA, 25 bp, Homo sapien
tggagacaaagaccataacggttgt

SEQ ID NO: 1944243 - DNA, 25 bp, Homo sapien
gcttttagcatagtaaactctcctg

SEQ ID NO: 1944244 - DNA, 25 bp, Homo sapien
gattcagaagaagagccagcagtac

SEQ ID NO: 1944245 - DNA, 25 bp, Homo sapien
taagattcagaagaagagccagcag

SEQ ID NO: 1944246 - DNA, 25 bp, Homo sapien
aagattcagaagaagagccagcagt

SEQ ID NO: 1944247 - DNA, 25 bp, Homo sapien
ttaagattcagaagaagagccagca

SEQ ID NO: 1944248 - DNA, 25 bp, Homo sapien
taaagtatatatctgaagttgggca

SEQ ID NO: 1944249 - DNA, 25 bp, Homo sapien
gaagttgggcatcttcatacatgtg

SEQ ID NO: 1944250 - DNA, 25 bp, Homo sapien
tcatacatgtgaggattgggatcca

SEQ ID NO: 1944251 - DNA, 25 bp, Homo sapien
tccaacagatttctattgatcacct

SEQ ID NO: 1944252 - DNA, 25 bp, Homo sapien
caaataataaggataaaccccatgg

SEQ ID NO: 1944253 - DNA, 25 bp, Homo sapien
cagtcaaaagaagtgtagcgaggtc

SEQ ID NO: 1944254 - DNA, 25 bp, Homo sapien
gaaaaggctgtcgatcagtcaaaag

SEQ ID NO: 1944255 - DNA, 25 bp, Homo sapien
tacaaggtattggtggtggatccca

SEQ ID NO: 1944256 - DNA, 25 bp, Homo sapien
tgggctccattgcatgagggactga

SEQ ID NO: 1944257 - DNA, 25 bp, Homo sapien
tcaggtgtgtctggatggcttctaa

SEQ ID NO: 1944258 - DNA, 25 bp, Homo sapien
caggtgtgtctggatggcttctaaa

SEQ ID NO: 1944259 - DNA, 25 bp, Homo sapien
atcttatctgggctccattgcatga

SEQ ID NO: 1944260 - DNA, 25 bp, Homo sapien
ttccccagagcttgaacatcacaga

SEQ ID NO: 1944261 - DNA, 25 bp, Homo sapien
tcacagatatcacgggtttttgggc

SEQ ID NO: 1944262 - DNA, 25 bp, Homo sapien
ccttcattcataacactaggacgtg

SEQ ID NO: 1944263 - DNA, 25 bp, Homo sapien
gaggttccagcgcactaaagcgagc

SEQ ID NO: 1944264 - DNA, 25 bp, Homo sapien
taacgacaacgccatcactaggcag

SEQ ID NO: 1944265 - DNA, 25 bp, Homo sapien
tggtaacgacaacgccatcactagg

SEQ ID NO: 1944266 - DNA, 25 bp, Homo sapien
gacaacgccatcactaggcagattt

SEQ ID NO: 1944267 - DNA, 25 bp, Homo sapien
ctggtaacgacaacgccatcactag

SEQ ID NO: 1944268 - DNA, 25 bp, Homo sapien
gtaatttttagcacattgacttcaa

SEQ ID NO: 1944269 - DNA, 25 bp, Homo sapien
accgcgcccggtgatatctcttatt

SEQ ID NO: 1944270 - DNA, 25 bp, Homo sapien
ttttataacacaatgctcaaattat

SEQ ID NO: 1944271 - DNA, 25 bp, Homo sapien
taacacaatgctcaaattattacaa

SEQ ID NO: 1944272 - DNA, 25 bp, Homo sapien
tattgtaactctaaacatgcctcaa

SEQ ID NO: 1944273 - DNA, 25 bp, Homo sapien
acagtaattagcccggcgtgttggc

SEQ ID NO: 1944274 - DNA, 25 bp, Homo sapien
ttaagtattctacaaagctccatca

SEQ ID NO: 1944275 - DNA, 25 bp, Homo sapien
gctccatcaatcagtgacatcagaa

SEQ ID NO: 1944276 - DNA, 25 bp, Homo sapien
ttcatcatcttgtcaaaattttgag

SEQ ID NO: 1944277 - DNA, 25 bp, Homo sapien
atcatcttgtcaaaattttgagacc

SEQ ID NO: 1944278 - DNA, 25 bp, Homo sapien
tcatcatcttgtcaaaattttgaga

SEQ ID NO: 1944279 - DNA, 25 bp, Homo sapien
catcatcttgtcaaaattttgagac

SEQ ID NO: 1944280 - DNA, 25 bp, Homo sapien
caattttccagccataagatacagt

SEQ ID NO: 1944281 - DNA, 25 bp, Homo sapien
caggactacgtcagttatttcaggg

SEQ ID NO: 1944282 - DNA, 25 bp, Homo sapien
taagagacatgtagggagacaagca

SEQ ID NO: 1944283 - DNA, 25 bp, Homo sapien
tgcagtcatcgtacattcctaatga

SEQ ID NO: 1944284 - DNA, 25 bp, Homo sapien
ttcctctaggacctggatactctcc

SEQ ID NO: 1944285 - DNA, 25 bp, Homo sapien
tcctctaggacctggatactctcca

SEQ ID NO: 1944286 - DNA, 25 bp, Homo sapien
cctctaggacctggatactctccat

SEQ ID NO: 1944287 - DNA, 25 bp, Homo sapien
cattcctctaggacctggatactct

SEQ ID NO: 1944288 - DNA, 25 bp, Homo sapien
tgtgtgggtcttcccgcattttccc

SEQ ID NO: 1944289 - DNA, 25 bp, Homo sapien
ttttgtagtgtgtgtgggtcttccc

SEQ ID NO: 1944290 - DNA, 25 bp, Homo sapien
tagtgtgtgtgggtcttcccgcatt

SEQ ID NO: 1944291 - DNA, 25 bp, Homo sapien
ttgtagtgtgtgtgggtcttcccgc

SEQ ID NO: 1944292 - DNA, 25 bp, Homo sapien
tttttagcccatatctctccaagaa

SEQ ID NO: 1944293 - DNA, 25 bp, Homo sapien
ttttagcccatatctctccaagaag

SEQ ID NO: 1944294 - DNA, 25 bp, Homo sapien
cactgtgagggtcttgatcaaacct

SEQ ID NO: 1944295 - DNA, 25 bp, Homo sapien
tgtcatcatggatatgcgcagggtc

SEQ ID NO: 1944296 - DNA, 25 bp, Homo sapien
ccatggtaactctgggatagaggct

SEQ ID NO: 1944297 - DNA, 25 bp, Homo sapien
gataaaacttaccagtagccatggt

SEQ ID NO: 1944298 - DNA, 25 bp, Homo sapien
ggtttcttagacacccttgatggta

SEQ ID NO: 1944299 - DNA, 25 bp, Homo sapien
cattccctggttggacataaaaggt

SEQ ID NO: 1944300 - DNA, 25 bp, Homo sapien
gcattgtgataagaactcggacaga

SEQ ID NO: 1944301 - DNA, 25 bp, Homo sapien
gaggagctcagacgggtaaataaac

SEQ ID NO: 1944302 - DNA, 25 bp, Homo sapien
tgggcagttgtttgccagatggaga

SEQ ID NO: 1944303 - DNA, 25 bp, Homo sapien
gattaaattgggttgaaaatgggca

SEQ ID NO: 1944304 - DNA, 25 bp, Homo sapien
tgtgcttttgcataagagaattgag

SEQ ID NO: 1944305 - DNA, 25 bp, Homo sapien
gaaaggcttcacagaagacgtaaag

SEQ ID NO: 1944306 - DNA, 25 bp, Homo sapien
taacattgtcattatcgtttccgat

SEQ ID NO: 1944307 - DNA, 25 bp, Homo sapien
gtttccgataagaagtcgttttgca

SEQ ID NO: 1944308 - DNA, 25 bp, Homo sapien
taagaagtcgttttgcattccaccg

SEQ ID NO: 1944309 - DNA, 25 bp, Homo sapien
tcattatcgtttccgataagaagtc

SEQ ID NO: 1944310 - DNA, 25 bp, Homo sapien
gaagcgcgaagtgatacagactgaa

SEQ ID NO: 1944311 - DNA, 25 bp, Homo sapien
tgcaaacagaaccttgccaagcctg

SEQ ID NO: 1944312 - DNA, 25 bp, Homo sapien
gcctgagacttgtaaagggacagaa

SEQ ID NO: 1944313 - DNA, 25 bp, Homo sapien
gccaagcctgcaatagccagatcct

SEQ ID NO: 1944314 - DNA, 25 bp, Homo sapien
agccatggccatgggtatgaacagc

SEQ ID NO: 1944315 - DNA, 25 bp, Homo sapien
ggtcatccccaaagctccggtacat

SEQ ID NO: 1944316 - DNA, 25 bp, Homo sapien
ggccatgggtatgaacagcaccagt

SEQ ID NO: 1944317 - DNA, 25 bp, Homo sapien
aggtcatccccaaagctccggtaca

SEQ ID NO: 1944318 - DNA, 25 bp, Homo sapien
ctcgatccctaatgggtctactgac

SEQ ID NO: 1944319 - DNA, 25 bp, Homo sapien
cattcagaggcttgcatctcagttc

SEQ ID NO: 1944320 - DNA, 25 bp, Homo sapien
tccctaatgggtctactgacatcag

SEQ ID NO: 1944321 - DNA, 25 bp, Homo sapien
atctcagttccacctcgatccctaa

SEQ ID NO: 1944322 - DNA, 25 bp, Homo sapien
tatgtgtatttaaggatgttaatgg

SEQ ID NO: 1944323 - DNA, 25 bp, Homo sapien
tgttaatggttctaaaccacatcct

SEQ ID NO: 1944324 - DNA, 25 bp, Homo sapien
tggttctaaaccacatcctcctgtt

SEQ ID NO: 1944325 - DNA, 25 bp, Homo sapien
taaggatgttaatggttctaaacca

SEQ ID NO: 1944326 - DNA, 25 bp, Homo sapien
tgcctgtaacattggagaatattgc

SEQ ID NO: 1944327 - DNA, 25 bp, Homo sapien
tgtggcatcctacaggtaacatgac

SEQ ID NO: 1944328 - DNA, 25 bp, Homo sapien
aagacatgttgagcagtttctacag

SEQ ID NO: 1944329 - DNA, 25 bp, Homo sapien
tgagatttggcatgcatgttcacac

SEQ ID NO: 1944330 - DNA, 25 bp, Homo sapien
agcaacaggtgttgttgggcctctg

SEQ ID NO: 1944331 - DNA, 25 bp, Homo sapien
caggagcttgagacacggcaggtgt

SEQ ID NO: 1944332 - DNA, 25 bp, Homo sapien
aacaaaagcaacaggtgttgttggg

SEQ ID NO: 1944333 - DNA, 25 bp, Homo sapien
ttgagacacggcaggtgttccttca

SEQ ID NO: 1944334 - DNA, 25 bp, Homo sapien
tttgggactgctgcctttttcgcat

SEQ ID NO: 1944335 - DNA, 25 bp, Homo sapien
ttcagctacttcaggacccagttgg

SEQ ID NO: 1944336 - DNA, 25 bp, Homo sapien
ggtccttactctgggtggtcacagt

SEQ ID NO: 1944337 - DNA, 25 bp, Homo sapien
cgacagagctgtttgacagaggcac

SEQ ID NO: 1944338 - DNA, 25 bp, Homo sapien
tgaatcagattagcaccagctgcct

SEQ ID NO: 1944339 - DNA, 25 bp, Homo sapien
taaaatagttgctccggtgctttcc

SEQ ID NO: 1944340 - DNA, 25 bp, Homo sapien
gtatgttgctaagtgtaatatccag

SEQ ID NO: 1944341 - DNA, 25 bp, Homo sapien
atgttgctaagtgtaatatccagac

SEQ ID NO: 1944342 - DNA, 25 bp, Homo sapien
tatgttgctaagtgtaatatccaga

SEQ ID NO: 1944343 - DNA, 25 bp, Homo sapien
tgtatgttgctaagtgtaatatcca

SEQ ID NO: 1944344 - DNA, 25 bp, Homo sapien
ccagcgaatggtgtctttgaccaga

SEQ ID NO: 1944345 - DNA, 25 bp, Homo sapien
gaccagagtggccaaaagtatacac

SEQ ID NO: 1944346 - DNA, 25 bp, Homo sapien
gacgttttgtaagcactgtccagcg

SEQ ID NO: 1944347 - DNA, 25 bp, Homo sapien
gaggtggacagacagctttagctag

SEQ ID NO: 1944348 - DNA, 25 bp, Homo sapien
gattccttatttgcccaagtgcaga

SEQ ID NO: 1944349 - DNA, 25 bp, Homo sapien
cttatttgcccaagtgcagatgctt

SEQ ID NO: 1944350 - DNA, 25 bp, Homo sapien
ggtggtcttccttgtactcttcctg

SEQ ID NO: 1944351 - DNA, 25 bp, Homo sapien
atctctttcatggtactggtggtct

SEQ ID NO: 1944352 - DNA, 25 bp, Homo sapien
ggcatactggaagtaactgtgcagg

SEQ ID NO: 1944353 - DNA, 25 bp, Homo sapien
tgtggcatactggaagtaactgtgc

SEQ ID NO: 1944354 - DNA, 25 bp, Homo sapien
gagtgtggcatactggaagtaactg

SEQ ID NO: 1944355 - DNA, 25 bp, Homo sapien
tgcagagtgtggcatactggaagta

SEQ ID NO: 1944356 - DNA, 25 bp, Homo sapien
gcatagaaccgttcactttgggtac

SEQ ID NO: 1944357 - DNA, 25 bp, Homo sapien
catagaaccgttcactttgggtact

SEQ ID NO: 1944358 - DNA, 25 bp, Homo sapien
ggcatagaaccgttcactttgggta

SEQ ID NO: 1944359 - DNA, 25 bp, Homo sapien
tgccgcagcctcccacaatagtgat

SEQ ID NO: 1944360 - DNA, 25 bp, Homo sapien
gccgcagcctcccacaatagtgatt

SEQ ID NO: 1944361 - DNA, 25 bp, Homo sapien
aatactagagcagcagatttttggg

SEQ ID NO: 1944362 - DNA, 25 bp, Homo sapien
cacctggtgcattgatggagtaaaa

SEQ ID NO: 1944363 - DNA, 25 bp, Homo sapien
taaaagtgccatctactcactctgc

SEQ ID NO: 1944364 - DNA, 25 bp, Homo sapien
gacttagtggagaatatttgggcta

SEQ ID NO: 1944365 - DNA, 25 bp, Homo sapien
aaggtatcaaatccattgtttggca

SEQ ID NO: 1944366 - DNA, 25 bp, Homo sapien
cattgtttggcatttctgccatcaa

SEQ ID NO: 1944367 - DNA, 25 bp, Homo sapien
caacgatctgcctttgtacttgaag

SEQ ID NO: 1944368 - DNA, 25 bp, Homo sapien
tttctgccatcaatgcaacgatctg

SEQ ID NO: 1944369 - DNA, 25 bp, Homo sapien
tgaggttgccaggatattcgtctat

SEQ ID NO: 1944370 - DNA, 25 bp, Homo sapien
cccttttctcctagcaaccatatta

SEQ ID NO: 1944371 - DNA, 25 bp, Homo sapien
tctcctagcaaccatattatgttaa

SEQ ID NO: 1944372 - DNA, 25 bp, Homo sapien
ccaggatattcgtctattcttgtcc

SEQ ID NO: 1944373 - DNA, 25 bp, Homo sapien
tgggtacctgctacgtcttctccac

SEQ ID NO: 1944374 - DNA, 25 bp, Homo sapien
ctgaaatcgttgcaagtgttggttg

SEQ ID NO: 1944375 - DNA, 25 bp, Homo sapien
ggtacctgctacgtcttctccacat

SEQ ID NO: 1944376 - DNA, 25 bp, Homo sapien
caagtgttggttgggtacctgctac

SEQ ID NO: 1944377 - DNA, 25 bp, Homo sapien
tttaaagaatggcattatgttggca

SEQ ID NO: 1944378 - DNA, 25 bp, Homo sapien
gaatggcattatgttggcaagaact

SEQ ID NO: 1944379 - DNA, 25 bp, Homo sapien
ttatgttggcaagaactagctgttc

SEQ ID NO: 1944380 - DNA, 25 bp, Homo sapien
gaactagctgttctaagcatcgtgc

SEQ ID NO: 1944381 - DNA, 25 bp, Homo sapien
ccaggaaagcccatgtattttagca

SEQ ID NO: 1944382 - DNA, 25 bp, Homo sapien
aacggacttctgacacaaaggccat

SEQ ID NO: 1944383 - DNA, 25 bp, Homo sapien
tgtattttagcaaacggacttctga

SEQ ID NO: 1944384 - DNA, 25 bp, Homo sapien
tagcaaacggacttctgacacaaag

SEQ ID NO: 1944385 - DNA, 25 bp, Homo sapien
cagggcgggtcccgtacgcagggcg

SEQ ID NO: 1944386 - DNA, 25 bp, Homo sapien
gggcgcagggcgggtcccgtacgca

SEQ ID NO: 1944387 - DNA, 25 bp, Homo sapien
cagggcgcagggcgggtcccgtacg

SEQ ID NO: 1944388 - DNA, 25 bp, Homo sapien
cgcagggcgggtcccgtacgcaggg

SEQ ID NO: 1944389 - DNA, 25 bp, Homo sapien
caccatcacctacagcaaaggaggc

SEQ ID NO: 1944390 - DNA, 25 bp, Homo sapien
acggaaagaccaccatcacctacag

SEQ ID NO: 1944391 - DNA, 25 bp, Homo sapien
agcaaaggaggctccgatgcgccca

SEQ ID NO: 1944392 - DNA, 25 bp, Homo sapien
tgattccatcgatcacggaaagacc

SEQ ID NO: 1944393 - DNA, 25 bp, Homo sapien
ccgggcagcgactcgcggttggtgg

SEQ ID NO: 1944394 - DNA, 25 bp, Homo sapien
cgccgcacacgccaggactcccttt

SEQ ID NO: 1944395 - DNA, 25 bp, Homo sapien
cacgccaggactccctttcctttga

SEQ ID NO: 1944396 - DNA, 25 bp, Homo sapien
ctcgcggttggtgggcgttcctcgt

SEQ ID NO: 1944397 - DNA, 25 bp, Homo sapien
ggagagcggcgaggatgcagaggag

SEQ ID NO: 1944398 - DNA, 25 bp, Homo sapien
tgggcggctcggtcctctagcggag

SEQ ID NO: 1944399 - DNA, 25 bp, Homo sapien
agcggagccggtttgctgccatccg

SEQ ID NO: 1944400 - DNA, 25 bp, Homo sapien
tcctctagcggagccggtttgctgc

SEQ ID NO: 1944401 - DNA, 25 bp, Homo sapien
cgcgctcgcctgggcgcggcgccca

SEQ ID NO: 1944402 - DNA, 25 bp, Homo sapien
gcgctcgcctgggcgcggcgcccac

SEQ ID NO: 1944403 - DNA, 25 bp, Homo sapien
cgacctcgcgcgctcgcctgggcgc

SEQ ID NO: 1944404 - DNA, 25 bp, Homo sapien
cccgcccgacctcgcgcgctcgcct

SEQ ID NO: 1944405 - DNA, 25 bp, Homo sapien
gagtcccgagagcttccctgggtga

SEQ ID NO: 1944406 - DNA, 25 bp, Homo sapien
ctgtcctgggctgcgcgggagcctt

SEQ ID NO: 1944407 - DNA, 25 bp, Homo sapien
tcggtgacgcccgtccggagcttcg

SEQ ID NO: 1944408 - DNA, 25 bp, Homo sapien
ctcggccgggactctcggcttcggt

SEQ ID NO: 1944409 - DNA, 25 bp, Homo sapien
ttcccgaaggactttatgaagcgtc

SEQ ID NO: 1944410 - DNA, 25 bp, Homo sapien
taagcaagttttgcttcccgaagga

SEQ ID NO: 1944411 - DNA, 25 bp, Homo sapien
caaggaagtgtgaagttaagcaagt

SEQ ID NO: 1944412 - DNA, 25 bp, Homo sapien
tttactttattgacttcctcgccca

SEQ ID NO: 1944413 - DNA, 25 bp, Homo sapien
ttccataattatctggtcactttcc

SEQ ID NO: 1944414 - DNA, 25 bp, Homo sapien
gatatcttgggcagattccataatt

SEQ ID NO: 1944415 - DNA, 25 bp, Homo sapien
gcagtcttggttgggtcgaatatga

SEQ ID NO: 1944416 - DNA, 25 bp, Homo sapien
tcgaatatgaagttgacagtcttct

SEQ ID NO: 1944417 - DNA, 25 bp, Homo sapien
catcttagcattggccgcttggctc

SEQ ID NO: 1944418 - DNA, 25 bp, Homo sapien
gacttggcaatctgctggtccctga

SEQ ID NO: 1944419 - DNA, 25 bp, Homo sapien
tattaatggctataaaggctggtca

SEQ ID NO: 1944420 - DNA, 25 bp, Homo sapien
tgaatctgcgtaagttttcaggcag

SEQ ID NO: 1944421 - DNA, 25 bp, Homo sapien
gctgtctttcacttcatgctctctc

SEQ ID NO: 1944422 - DNA, 25 bp, Homo sapien
ttagctgtctttcacttcatgctct

SEQ ID NO: 1944423 - DNA, 25 bp, Homo sapien
tgtctttcacttcatgctctctcac

SEQ ID NO: 1944424 - DNA, 25 bp, Homo sapien
tagctgtctttcacttcatgctctc

SEQ ID NO: 1944425 - DNA, 25 bp, Homo sapien
tgctgtagctgcttcgtccccaaga

SEQ ID NO: 1944426 - DNA, 25 bp, Homo sapien
cacaactgttgatcgtgcatgtcct

SEQ ID NO: 1944427 - DNA, 25 bp, Homo sapien
gatcgtgcatgtcctgctgctgtag

SEQ ID NO: 1944428 - DNA, 25 bp, Homo sapien
tagctgcttcgtccccaagatgtac

SEQ ID NO: 1944429 - DNA, 25 bp, Homo sapien
tgccttggtcatatatggagttttt

SEQ ID NO: 1944430 - DNA, 25 bp, Homo sapien
aagttgtctccgttgatgtatttgt

SEQ ID NO: 1944431 - DNA, 25 bp, Homo sapien
ccaaagttgtctccgttgatgtatt

SEQ ID NO: 1944432 - DNA, 25 bp, Homo sapien
ttccaaagttgtctccgttgatgta

SEQ ID NO: 1944433 - DNA, 25 bp, Homo sapien
ccaagatcacatgagttcaggtgcg

SEQ ID NO: 1944434 - DNA, 25 bp, Homo sapien
tcacatgagttcaggtgcgttcagg

SEQ ID NO: 1944435 - DNA, 25 bp, Homo sapien
tagcttccaagatcacatgagttca

SEQ ID NO: 1944436 - DNA, 25 bp, Homo sapien
tgcgttcagggtgctatggcaatag

SEQ ID NO: 1944437 - DNA, 25 bp, Homo sapien
ccatggagcatgtgtgggttctttc

SEQ ID NO: 1944438 - DNA, 25 bp, Homo sapien
tagtggtgatgacgatgccatcctc

SEQ ID NO: 1944439 - DNA, 25 bp, Homo sapien
ccaaatgccgccatcttccatggag

SEQ ID NO: 1944440 - DNA, 25 bp, Homo sapien
cctttcgtatgttgagaacttggag

SEQ ID NO: 1944441 - DNA, 25 bp, Homo sapien
ccctgataatctgtgagactggtct

SEQ ID NO: 1944442 - DNA, 25 bp, Homo sapien
tattttcagagatccccaaggtagg

SEQ ID NO: 1944443 - DNA, 25 bp, Homo sapien
caggctccagagatgttgtcttaag

SEQ ID NO: 1944444 - DNA, 25 bp, Homo sapien
aattcaaagattcagcgggtatgtc

SEQ ID NO: 1944445 - DNA, 25 bp, Homo sapien
agagcctctcctgcgcagctgctcc

SEQ ID NO: 1944446 - DNA, 25 bp, Homo sapien
gcttgccctacataggactgcttgt

SEQ ID NO: 1944447 - DNA, 25 bp, Homo sapien
tgcttgccctacataggactgcttg

SEQ ID NO: 1944448 - DNA, 25 bp, Homo sapien
gagagcctctcctgcgcagctgctc

SEQ ID NO: 1944449 - DNA, 25 bp, Homo sapien
attttccacaaggtcttcgggtgct

SEQ ID NO: 1944450 - DNA, 25 bp, Homo sapien
tctttggccagacagcatctatatc

SEQ ID NO: 1944451 - DNA, 25 bp, Homo sapien
tcctggtatgaagggttcacttggc

SEQ ID NO: 1944452 - DNA, 25 bp, Homo sapien
tcgggtgcttctagcacaattgtgc

SEQ ID NO: 1944453 - DNA, 25 bp, Homo sapien
ttaagttgacagtcagaggcaaggc

SEQ ID NO: 1944454 - DNA, 25 bp, Homo sapien
ggcccaacacccgaggaagtgatca

SEQ ID NO: 1944455 - DNA, 25 bp, Homo sapien
aggatgtgcctgcaatgaggttttc

SEQ ID NO: 1944456 - DNA, 25 bp, Homo sapien
ggcactgccctcacgaagaggatgt

SEQ ID NO: 1944457 - DNA, 25 bp, Homo sapien
tattctgttcttgcttgcttttcac

SEQ ID NO: 1944458 - DNA, 25 bp, Homo sapien
tgtttattctgttcttgcttgcttt

SEQ ID NO: 1944459 - DNA, 25 bp, Homo sapien
agaagagtgggaggaagtctgttta

SEQ ID NO: 1944460 - DNA, 25 bp, Homo sapien
ttagtgggcctgcagcagagaagag

SEQ ID NO: 1944461 - DNA, 25 bp, Homo sapien
tccttggttaccaaatccagggcat

SEQ ID NO: 1944462 - DNA, 25 bp, Homo sapien
gcatccaagttgaactctcccaaga

SEQ ID NO: 1944463 - DNA, 25 bp, Homo sapien
tcccaagaactcttttaccagttga

SEQ ID NO: 1944464 - DNA, 25 bp, Homo sapien
actttcccatcatttcgatgcttcc

SEQ ID NO: 1944465 - DNA, 25 bp, Homo sapien
cttctgctgatatgggctggacagg

SEQ ID NO: 1944466 - DNA, 25 bp, Homo sapien
ttctttcttctagacatacctcagt

SEQ ID NO: 1944467 - DNA, 25 bp, Homo sapien
ttctagacatacctcagtcttctgc

SEQ ID NO: 1944468 - DNA, 25 bp, Homo sapien
cctcagtcttctgctgatatgggct

SEQ ID NO: 1944469 - DNA, 25 bp, Homo sapien
tcgttctacgcacaacgcgtgttct

SEQ ID NO: 1944470 - DNA, 25 bp, Homo sapien
ggtgatgttcacacttcgttctacg

SEQ ID NO: 1944471 - DNA, 25 bp, Homo sapien
gcctgcctgccagtcgaggtgatgt

SEQ ID NO: 1944472 - DNA, 25 bp, Homo sapien
cagacggcgctaaaacactgcagtt

SEQ ID NO: 1944473 - DNA, 25 bp, Homo sapien
ttgcttgtagaagtatctggaagac

SEQ ID NO: 1944474 - DNA, 25 bp, Homo sapien
gttgcttgtagaagtatctggaaga

SEQ ID NO: 1944475 - DNA, 25 bp, Homo sapien
ctgcaccagcaaagctcaaggccat

SEQ ID NO: 1944476 - DNA, 25 bp, Homo sapien
ttctggtgtatagatcagtcacact

SEQ ID NO: 1944477 - DNA, 25 bp, Homo sapien
attctggtgtatagatcagtcacac

SEQ ID NO: 1944478 - DNA, 25 bp, Homo sapien
tagttagcatttaatgaaactccct

SEQ ID NO: 1944479 - DNA, 25 bp, Homo sapien
gcatttaatgaaactccctccatgc

SEQ ID NO: 1944480 - DNA, 25 bp, Homo sapien
gtagttagcatttaatgaaactccc

SEQ ID NO: 1944481 - DNA, 25 bp, Homo sapien
tttaatgaaactccctccatgcggc

SEQ ID NO: 1944482 - DNA, 25 bp, Homo sapien
tggcctgcacggtgacagcctgctt

SEQ ID NO: 1944483 - DNA, 25 bp, Homo sapien
agaatttggcctgcacggtgacagc

SEQ ID NO: 1944484 - DNA, 25 bp, Homo sapien
atttggcctgcacggtgacagcctg

SEQ ID NO: 1944485 - DNA, 25 bp, Homo sapien
gcctgcacggtgacagcctgcttgg

SEQ ID NO: 1944486 - DNA, 25 bp, Homo sapien
tgtagtagccagatcgcaccacatc

SEQ ID NO: 1944487 - DNA, 25 bp, Homo sapien
tagcagcattcacccgtgtctgttc

SEQ ID NO: 1944488 - DNA, 25 bp, Homo sapien
agccagatcgcaccacatcaatgat

SEQ ID NO: 1944489 - DNA, 25 bp, Homo sapien
aactttgtagtagccagatcgcacc

SEQ ID NO: 1944490 - DNA, 25 bp, Homo sapien
aagtccacaatttgtcaaggttgac

SEQ ID NO: 1944491 - DNA, 25 bp, Homo sapien
caatttgtcaaggttgacagttggg

SEQ ID NO: 1944492 - DNA, 25 bp, Homo sapien
atttgtcaaggttgacagttgggca

SEQ ID NO: 1944493 - DNA, 25 bp, Homo sapien
ccacaatttgtcaaggttgacagtt

SEQ ID NO: 1944494 - DNA, 25 bp, Homo sapien
cggccgccggggtgcttccggtgct

SEQ ID NO: 1944495 - DNA, 25 bp, Homo sapien
tggctcacgtggcccctaagtttcc

SEQ ID NO: 1944496 - DNA, 25 bp, Homo sapien
ccaccagcattaccgcggccgccgg

SEQ ID NO: 1944497 - DNA, 25 bp, Homo sapien
gttgatccggtggtgatgcagacca

SEQ ID NO: 1944498 - DNA, 25 bp, Homo sapien
aaaggttagcctatcccaatgagca

SEQ ID NO: 1944499 - DNA, 25 bp, Homo sapien
gcaaataggcatgtactatgtcaag

SEQ ID NO: 1944500 - DNA, 25 bp, Homo sapien
gagcatattcttcttacattgaaca

SEQ ID NO: 1944501 - DNA, 25 bp, Homo sapien
ggtgccgcacattgcttgaaaaggt

SEQ ID NO: 1944502 - DNA, 25 bp, Homo sapien
ctaacacacttctcagcggtgtgac

SEQ ID NO: 1944503 - DNA, 25 bp, Homo sapien
tgtgaccttgagtacgttgttttac

SEQ ID NO: 1944504 - DNA, 25 bp, Homo sapien
gtgtgaccttgagtacgttgtttta

SEQ ID NO: 1944505 - DNA, 25 bp, Homo sapien
acacacttctcagcggtgtgacctt

SEQ ID NO: 1944506 - DNA, 25 bp, Homo sapien
ggcgcgagaatgtcctctatttcat

SEQ ID NO: 1944507 - DNA, 25 bp, Homo sapien
cctggatgtgctgcataggcgtaga

SEQ ID NO: 1944508 - DNA, 25 bp, Homo sapien
taggcgtagattacatgcacattct

SEQ ID NO: 1944509 - DNA, 25 bp, Homo sapien
catgatgaagcgagttgaagctggc

SEQ ID NO: 1944510 - DNA, 25 bp, Homo sapien
gagtcatcagtatcctgtggaatct

SEQ ID NO: 1944511 - DNA, 25 bp, Homo sapien
tgtggaatctgtcctctgatgtaag

SEQ ID NO: 1944512 - DNA, 25 bp, Homo sapien
tctgtcctctgatgtaaggaactca

SEQ ID NO: 1944513 - DNA, 25 bp, Homo sapien
gggatatgagagtcatcagtatcct

SEQ ID NO: 1944514 - DNA, 25 bp, Homo sapien
ccgctatccgtgtaagacgtgactt

SEQ ID NO: 1944515 - DNA, 25 bp, Homo sapien
tcttcagtcttgctataccctgcaa

SEQ ID NO: 1944516 - DNA, 25 bp, Homo sapien
tttctcttcagtcttgctataccct

SEQ ID NO: 1944517 - DNA, 25 bp, Homo sapien
ttttttgcctgccgctatccgtgta

SEQ ID NO: 1944518 - DNA, 25 bp, Homo sapien
tgacacttgtctgccacacactcag

SEQ ID NO: 1944519 - DNA, 25 bp, Homo sapien
aaactcttggtacccacgttcatat

SEQ ID NO: 1944520 - DNA, 25 bp, Homo sapien
tacccacgttcatatgctccaggat

SEQ ID NO: 1944521 - DNA, 25 bp, Homo sapien
tcttggtacccacgttcatatgctc

SEQ ID NO: 1944522 - DNA, 25 bp, Homo sapien
taggcatgactactgtctagtggcc

SEQ ID NO: 1944523 - DNA, 25 bp, Homo sapien
taatcccttgcacagaaagtgcagg

SEQ ID NO: 1944524 - DNA, 25 bp, Homo sapien
gacgattggacctccatcgattgga

SEQ ID NO: 1944525 - DNA, 25 bp, Homo sapien
tacaaatgatggtcttaaaacctcc

SEQ ID NO: 1944526 - DNA, 25 bp, Homo sapien
tctttaagacgaatttggagctact

SEQ ID NO: 1944527 - DNA, 25 bp, Homo sapien
tagtcacaatgatacaaagacacac

SEQ ID NO: 1944528 - DNA, 25 bp, Homo sapien
gattctatagtcatacaaccgtgct

SEQ ID NO: 1944529 - DNA, 25 bp, Homo sapien
tcttccttcccagatagtatatggt

SEQ ID NO: 1944530 - DNA, 25 bp, Homo sapien
tccacagcaattgattggccaaagc

SEQ ID NO: 1944531 - DNA, 25 bp, Homo sapien
tagctgttgattggaggagctgcaa

SEQ ID NO: 1944532 - DNA, 25 bp, Homo sapien
tatgaaggcgaggttatcctgaaac

SEQ ID NO: 1944533 - DNA, 25 bp, Homo sapien
ggagagtgaaagtgcccaagtcctt

SEQ ID NO: 1944534 - DNA, 25 bp, Homo sapien
tggttgcaccattctacattttcat

SEQ ID NO: 1944535 - DNA, 25 bp, Homo sapien
agtggttgcaccattctacattttc

SEQ ID NO: 1944536 - DNA, 25 bp, Homo sapien
gtggttgcaccattctacattttca

SEQ ID NO: 1944537 - DNA, 25 bp, Homo sapien
tttattctactaggaagacaatcgt

SEQ ID NO: 1944538 - DNA, 25 bp, Homo sapien
agtatgaattttcccgctgtgccct

SEQ ID NO: 1944539 - DNA, 25 bp, Homo sapien
ggtaatgtccaatatagcatctatg

SEQ ID NO: 1944540 - DNA, 25 bp, Homo sapien
aaagaattcattggtggtaatgtcc

SEQ ID NO: 1944541 - DNA, 25 bp, Homo sapien
tcatgaaagaaagggttagagttag

SEQ ID NO: 1944542 - DNA, 25 bp, Homo sapien
agggttagagttagggccaactctg

SEQ ID NO: 1944543 - DNA, 25 bp, Homo sapien
agagttagggccaactctgaggaag

SEQ ID NO: 1944544 - DNA, 25 bp, Homo sapien
ttagagttagggccaactctgagga

SEQ ID NO: 1944545 - DNA, 25 bp, Homo sapien
cagaattgggaaggtcatgggcact

SEQ ID NO: 1944546 - DNA, 25 bp, Homo sapien
actgaagataagggtcaagatggca

SEQ ID NO: 1944547 - DNA, 25 bp, Homo sapien
ggtgaaggtgcagaattgggaaggt

SEQ ID NO: 1944548 - DNA, 25 bp, Homo sapien
taagggtcaagatggcagggtgaag

SEQ ID NO: 1944549 - DNA, 25 bp, Homo sapien
gagacttgtggccaagcctgtacag

SEQ ID NO: 1944550 - DNA, 25 bp, Homo sapien
ttgtggccaagcctgtacagaggca

SEQ ID NO: 1944551 - DNA, 25 bp, Homo sapien
ctcttagggcatcctcaatttgatg

SEQ ID NO: 1944552 - DNA, 25 bp, Homo sapien
tcttagggcatcctcaatttgatgc

SEQ ID NO: 1944553 - DNA, 25 bp, Homo sapien
ttctggggtagcccttgtgcagctg

SEQ ID NO: 1944554 - DNA, 25 bp, Homo sapien
gatggcagccaaatggaggctggtg

SEQ ID NO: 1944555 - DNA, 25 bp, Homo sapien
tggcagccaaatggaggctggtgca

SEQ ID NO: 1944556 - DNA, 25 bp, Homo sapien
cactgtgtagtcagagtcaacttct

SEQ ID NO: 1944557 - DNA, 25 bp, Homo sapien
tgcactgtgtagtcagagtcaactt

SEQ ID NO: 1944558 - DNA, 25 bp, Homo sapien
gttccttcctgtttgccagcaaata

SEQ ID NO: 1944559 - DNA, 25 bp, Homo sapien
ttgggaatctgacaagttccttcct

SEQ ID NO: 1944560 - DNA, 25 bp, Homo sapien
ttaaaattgggaatctgacaagttc

SEQ ID NO: 1944561 - DNA, 25 bp, Homo sapien
aattgggaatctgacaagttccttc

SEQ ID NO: 1944562 - DNA, 25 bp, Homo sapien
gagtggtatatttgcacaaaaagta

SEQ ID NO: 1944563 - DNA, 25 bp, Homo sapien
tgagtggtatatttgcacaaaaagt

SEQ ID NO: 1944564 - DNA, 25 bp, Homo sapien
ctgagtggtatatttgcacaaaaag

SEQ ID NO: 1944565 - DNA, 25 bp, Homo sapien
agtggtatatttgcacaaaaagtaa

SEQ ID NO: 1944566 - DNA, 25 bp, Homo sapien
tactccagcgttttgtgggctcaaa

SEQ ID NO: 1944567 - DNA, 25 bp, Homo sapien
ttctttctcatgatttactccagcg

SEQ ID NO: 1944568 - DNA, 25 bp, Homo sapien
tagggagtgataacgtctttacctg

SEQ ID NO: 1944569 - DNA, 25 bp, Homo sapien
gaacaagtgactgtaaatagggagt

SEQ ID NO: 1944570 - DNA, 25 bp, Homo sapien
tcgaagcacatagttcagatcagtc

SEQ ID NO: 1944571 - DNA, 25 bp, Homo sapien
cagatcagtcaatgtgataatcttt

SEQ ID NO: 1944572 - DNA, 25 bp, Homo sapien
gagatcgatgtctcgaagcacatag

SEQ ID NO: 1944573 - DNA, 25 bp, Homo sapien
tttctccctggagatcgatgtctcg

SEQ ID NO: 1944574 - DNA, 25 bp, Homo sapien
tgttcaaagtcatgctggacaagaa

SEQ ID NO: 1944575 - DNA, 25 bp, Homo sapien
ttcaaagtcatgctggacaagaaag

SEQ ID NO: 1944576 - DNA, 25 bp, Homo sapien
caaagtcatgctggacaagaaagat

SEQ ID NO: 1944577 - DNA, 25 bp, Homo sapien
agtcatgctggacaagaaagatgtt

SEQ ID NO: 1944578 - DNA, 25 bp, Homo sapien
cctcaatcttaaggcccgatgattc

SEQ ID NO: 1944579 - DNA, 25 bp, Homo sapien
gacgtactggaaagttgtggaaatg

SEQ ID NO: 1944580 - DNA, 25 bp, Homo sapien
ttttcctcaatcttaaggcccgatg

SEQ ID NO: 1944581 - DNA, 25 bp, Homo sapien
ctgacgtactggaaagttgtggaaa

SEQ ID NO: 1944582 - DNA, 25 bp, Homo sapien
cactgtgaaagacaataccagccat

SEQ ID NO: 1944583 - DNA, 25 bp, Homo sapien
tcactgtgaaagacaataccagcca

SEQ ID NO: 1944584 - DNA, 25 bp, Homo sapien
cttcactgtgaaagacaataccagc

SEQ ID NO: 1944585 - DNA, 25 bp, Homo sapien
ttcactgtgaaagacaataccagcc

SEQ ID NO: 1944586 - DNA, 25 bp, Homo sapien
atctcataacttctatgactttttc

SEQ ID NO: 1944587 - DNA, 25 bp, Homo sapien
ctcataacttctatgactttttcca

SEQ ID NO: 1944588 - DNA, 25 bp, Homo sapien
caatctcataacttctatgactttt

SEQ ID NO: 1944589 - DNA, 25 bp, Homo sapien
agccaatctcataacttctatgact

SEQ ID NO: 1944590 - DNA, 25 bp, Homo sapien
ttcattaaaccaacagcactagctg

SEQ ID NO: 1944591 - DNA, 25 bp, Homo sapien
gccgtccacctactaatgcacttaa

SEQ ID NO: 1944592 - DNA, 25 bp, Homo sapien
gaggagctactctggtattatcaac

SEQ ID NO: 1944593 - DNA, 25 bp, Homo sapien
gattaacggccaacattacagccgt

SEQ ID NO: 1944594 - DNA, 25 bp, Homo sapien
catggagacgggttgcagtagtgaa

SEQ ID NO: 1944595 - DNA, 25 bp, Homo sapien
cgggttgcagtagtgaagctgttta

SEQ ID NO: 1944596 - DNA, 25 bp, Homo sapien
gttcttatcaggaattggcagaatg

SEQ ID NO: 1944597 - DNA, 25 bp, Homo sapien
cggaggtatgaggatgtgaggttct

SEQ ID NO: 1944598 - DNA, 25 bp, Homo sapien
ttacatattcacctggagatgtttt

SEQ ID NO: 1944599 - DNA, 25 bp, Homo sapien
tcttagttataatagcttcatttac

SEQ ID NO: 1944600 - DNA, 25 bp, Homo sapien
ttttcctcttagttataatagcttc

SEQ ID NO: 1944601 - DNA, 25 bp, Homo sapien
tcctcttagttataatagcttcatt

SEQ ID NO: 1944602 - DNA, 25 bp, Homo sapien
taagcacagctttattatctagggt

SEQ ID NO: 1944603 - DNA, 25 bp, Homo sapien
gagaacactttagctggcacactac

SEQ ID NO: 1944604 - DNA, 25 bp, Homo sapien
tctggcttgtctgtgatgaacgtcc

SEQ ID NO: 1944605 - DNA, 25 bp, Homo sapien
gcattccaatagtctatcctgccca

SEQ ID NO: 1944606 - DNA, 25 bp, Homo sapien
gatgggttaccctgatcattcaaag

SEQ ID NO: 1944607 - DNA, 25 bp, Homo sapien
catttggactagcagaagtgtcacc

SEQ ID NO: 1944608 - DNA, 25 bp, Homo sapien
tattcaggtaaagaactcccttaga

SEQ ID NO: 1944609 - DNA, 25 bp, Homo sapien
cccatattgttcctgccatttggac

SEQ ID NO: 1944610 - DNA, 25 bp, Homo sapien
tagtccagtggcataccttgtctgg

SEQ ID NO: 1944611 - DNA, 25 bp, Homo sapien
caggcggagtgctcagttcaatttc

SEQ ID NO: 1944612 - DNA, 25 bp, Homo sapien
catctggcaaatctcatacatggtg

SEQ ID NO: 1944613 - DNA, 25 bp, Homo sapien
gtaagatcctctcaaaaaatgcaaa

SEQ ID NO: 1944614 - DNA, 25 bp, Homo sapien
aattcatgggtctggaatctgaact

SEQ ID NO: 1944615 - DNA, 25 bp, Homo sapien
cagcacagaggttgtgactgagctt

SEQ ID NO: 1944616 - DNA, 25 bp, Homo sapien
gcacagaggttgtgactgagcttcc

SEQ ID NO: 1944617 - DNA, 25 bp, Homo sapien
cctgttctggaattcatgggtctgg

SEQ ID NO: 1944618 - DNA, 25 bp, Homo sapien
agagagccaatcacgagtcaactcc

SEQ ID NO: 1944619 - DNA, 25 bp, Homo sapien
caatcacgagtcaactccctctgca

SEQ ID NO: 1944620 - DNA, 25 bp, Homo sapien
ggaagagagccaatcacgagtcaac

SEQ ID NO: 1944621 - DNA, 25 bp, Homo sapien
gccaatcacgagtcaactccctctg

SEQ ID NO: 1944622 - DNA, 25 bp, Homo sapien
gacaaggaggatcagggtcaaagaa

SEQ ID NO: 1944623 - DNA, 25 bp, Homo sapien
tgacaaggaggatcagggtcaaaga

SEQ ID NO: 1944624 - DNA, 25 bp, Homo sapien
atgacaaggaggatcagggtcaaag

SEQ ID NO: 1944625 - DNA, 25 bp, Homo sapien
aatgacaaggaggatcagggtcaaa

SEQ ID NO: 1944626 - DNA, 25 bp, Homo sapien
tcaaaaataaaaacagatggcgtac

SEQ ID NO: 1944627 - DNA, 25 bp, Homo sapien
tattcaaaaataaaaacagatggcg

SEQ ID NO: 1944628 - DNA, 25 bp, Homo sapien
ttattcaaaaataaaaacagatggc

SEQ ID NO: 1944629 - DNA, 25 bp, Homo sapien
ttcaaaaataaaaacagatggcgta

SEQ ID NO: 1944630 - DNA, 25 bp, Homo sapien
gtcgattgcataaaagttgtttgca

SEQ ID NO: 1944631 - DNA, 25 bp, Homo sapien
ttgcataaaagttgtttgcaagcac

SEQ ID NO: 1944632 - DNA, 25 bp, Homo sapien
tctgcttcaggctctacgagcagtt

SEQ ID NO: 1944633 - DNA, 25 bp, Homo sapien
tacgagcagttctttgtcgattgca

SEQ ID NO: 1944634 - DNA, 25 bp, Homo sapien
acttaaagaatgaagcggcagaccc

SEQ ID NO: 1944635 - DNA, 25 bp, Homo sapien
ttaaagaatgaagcggcagaccctc

SEQ ID NO: 1944636 - DNA, 25 bp, Homo sapien
aaagaatgaagcggcagaccctcgc

SEQ ID NO: 1944637 - DNA, 25 bp, Homo sapien
agttcttaaagatggcgtttctgga

SEQ ID NO: 1944638 - DNA, 25 bp, Homo sapien
aaccaaagcaaaggtcaatctcacc

SEQ ID NO: 1944639 - DNA, 25 bp, Homo sapien
aaaccaaagcaaaggtcaatctcac

SEQ ID NO: 1944640 - DNA, 25 bp, Homo sapien
tgacggtgttcccaaaaccaaagca

SEQ ID NO: 1944641 - DNA, 25 bp, Homo sapien
caaagcaaaggtcaatctcacccat

SEQ ID NO: 1944642 - DNA, 25 bp, Homo sapien
cagtggtaaactgcacgaccatctg

SEQ ID NO: 1944643 - DNA, 25 bp, Homo sapien
ctttgtgaatattgcacttcttgtt

SEQ ID NO: 1944644 - DNA, 25 bp, Homo sapien
gtaaactgcacgaccatctgacctc

SEQ ID NO: 1944645 - DNA, 25 bp, Homo sapien
tgtgaatattgcacttcttgtttac

SEQ ID NO: 1944646 - DNA, 25 bp, Homo sapien
ctcttccgtcttcttccgggcaact

SEQ ID NO: 1944647 - DNA, 25 bp, Homo sapien
aacttatagtcagcagcattcttct

SEQ ID NO: 1944648 - DNA, 25 bp, Homo sapien
tgaaacttatagtcagcagcattct

SEQ ID NO: 1944649 - DNA, 25 bp, Homo sapien
ggccatcttagggatgtaaggctgc

SEQ ID NO: 1944650 - DNA, 25 bp, Homo sapien
cttcagcttggccatcttagggatg

SEQ ID NO: 1944651 - DNA, 25 bp, Homo sapien
agaatgcagtcgatggccttttggg

SEQ ID NO: 1944652 - DNA, 25 bp, Homo sapien
gaagaatgcagtcgatggccttttg

SEQ ID NO: 1944653 - DNA, 25 bp, Homo sapien
gaatgcagtcgatggccttttgggg

SEQ ID NO: 1944654 - DNA, 25 bp, Homo sapien
ggaagaatgcagtcgatggcctttt

SEQ ID NO: 1944655 - DNA, 25 bp, Homo sapien
agacatgttgccctttttgctcggg

SEQ ID NO: 1944656 - DNA, 25 bp, Homo sapien
tttgctcggggttatcgttagccat

SEQ ID NO: 1944657 - DNA, 25 bp, Homo sapien
ttttgctcggggttatcgttagcca

SEQ ID NO: 1944658 - DNA, 25 bp, Homo sapien
agcagacatgttgccctttttgctc

SEQ ID NO: 1944659 - DNA, 25 bp, Homo sapien
tctcctgtcatatccatttgtgctt

SEQ ID NO: 1944660 - DNA, 25 bp, Homo sapien
gtctcctgtcatatccatttgtgct

SEQ ID NO: 1944661 - DNA, 25 bp, Homo sapien
gatgtctcctgtcatatccatttgt

SEQ ID NO: 1944662 - DNA, 25 bp, Homo sapien
atgtctcctgtcatatccatttgtg

SEQ ID NO: 1944663 - DNA, 25 bp, Homo sapien
caatgtaggacaaaggctgtataac

SEQ ID NO: 1944664 - DNA, 25 bp, Homo sapien
gaagttttaatagagtagatgagaa

SEQ ID NO: 1944665 - DNA, 25 bp, Homo sapien
tgctgatcatcagcggtgaggctgt

SEQ ID NO: 1944666 - DNA, 25 bp, Homo sapien
cagaaacgcgggtgtagtgggagac

SEQ ID NO: 1944667 - DNA, 25 bp, Homo sapien
gttctatcactagactgtctccatt

SEQ ID NO: 1944668 - DNA, 25 bp, Homo sapien
ccaggggttctatcactagactgtc

SEQ ID NO: 1944669 - DNA, 25 bp, Homo sapien
caggggttctatcactagactgtct

SEQ ID NO: 1944670 - DNA, 25 bp, Homo sapien
gggttctatcactagactgtctcca

SEQ ID NO: 1944671 - DNA, 25 bp, Homo sapien
caaacacccacctgtggcaggctgg

SEQ ID NO: 1944672 - DNA, 25 bp, Homo sapien
atcgcagggttaggtaaccctcttg

SEQ ID NO: 1944673 - DNA, 25 bp, Homo sapien
tattctcggtactgaaagttcttac

SEQ ID NO: 1944674 - DNA, 25 bp, Homo sapien
tgcagtactatttgaaaggtcatcc

SEQ ID NO: 1944675 - DNA, 25 bp, Homo sapien
aaaccatcgtgtcaaggacatgatg

SEQ ID NO: 1944676 - DNA, 25 bp, Homo sapien
tccaaaaccatcgtgtcaaggacat

SEQ ID NO: 1944677 - DNA, 25 bp, Homo sapien
cattccaaaaccatcgtgtcaagga

SEQ ID NO: 1944678 - DNA, 25 bp, Homo sapien
tccttctacatgcactgggtcattc

SEQ ID NO: 1944679 - DNA, 25 bp, Homo sapien
cgaaagtcgatctctgcaaaaaaca

SEQ ID NO: 1944680 - DNA, 25 bp, Homo sapien
gcctgggcaacctgacgaaagtcga

SEQ ID NO: 1944681 - DNA, 25 bp, Homo sapien
gtttcacgtgaataggaacttttca

SEQ ID NO: 1944682 - DNA, 25 bp, Homo sapien
gaaatcaagaatccaaagccacaat

SEQ ID NO: 1944683 - DNA, 25 bp, Homo sapien
gtgacaccgaaacaaccaagcctag

SEQ ID NO: 1944684 - DNA, 25 bp, Homo sapien
tttggcttccatggttgttcactgc

SEQ ID NO: 1944685 - DNA, 25 bp, Homo sapien
ttccctggttccctcaggagctggg

SEQ ID NO: 1944686 - DNA, 25 bp, Homo sapien
catctgcagggtagatttggcttcc

SEQ ID NO: 1944687 - DNA, 25 bp, Homo sapien
ccaccagagggcactgtaaccttgt

SEQ ID NO: 1944688 - DNA, 25 bp, Homo sapien
aaaaacaagtctagaagcgattttg

SEQ ID NO: 1944689 - DNA, 25 bp, Homo sapien
gttgtagacgatcaaaacgcagcca

SEQ ID NO: 1944690 - DNA, 25 bp, Homo sapien
tctagaagcgattttgatgactgcc

SEQ ID NO: 1944691 - DNA, 25 bp, Homo sapien
cacttccagccacatgtttatttct

SEQ ID NO: 1944692 - DNA, 25 bp, Homo sapien
ttccagccacatgtttatttctttg

SEQ ID NO: 1944693 - DNA, 25 bp, Homo sapien
aaacacttccagccacatgtttatt

SEQ ID NO: 1944694 - DNA, 25 bp, Homo sapien
ttaaacacttccagccacatgttta

SEQ ID NO: 1944695 - DNA, 25 bp, Homo sapien
tatgtattacaaaaccctgggcagg

SEQ ID NO: 1944696 - DNA, 25 bp, Homo sapien
caaaatactgtctttcggccaggtg

SEQ ID NO: 1944697 - DNA, 25 bp, Homo sapien
taagtgtcacggaaagtgtcaccca

SEQ ID NO: 1944698 - DNA, 25 bp, Homo sapien
cctaaaccagggcatcagggtgcaa

SEQ ID NO: 1944699 - DNA, 25 bp, Homo sapien
cgttacgactgaaatgaggagccct

SEQ ID NO: 1944700 - DNA, 25 bp, Homo sapien
caatctcaatggatgcgttacgact

SEQ ID NO: 1944701 - DNA, 25 bp, Homo sapien
gagtggaatatggaacacgcctcct

SEQ ID NO: 1944702 - DNA, 25 bp, Homo sapien
tcaaacagtgatttgggccacacag

SEQ ID NO: 1944703 - DNA, 25 bp, Homo sapien
cctggatcagcagggtgttcatgac

SEQ ID NO: 1944704 - DNA, 25 bp, Homo sapien
gctgctgctgatagatgtcctggat

SEQ ID NO: 1944705 - DNA, 25 bp, Homo sapien
aggcgaagcccgctgctgctgatag

SEQ ID NO: 1944706 - DNA, 25 bp, Homo sapien
tcatcaggggcaggcgaagcccgct

SEQ ID NO: 1944707 - DNA, 25 bp, Homo sapien
cctggctgtcagcttcgggtcatcc

SEQ ID NO: 1944708 - DNA, 25 bp, Homo sapien
tgtcagcttcgggtcatccagcaac

SEQ ID NO: 1944709 - DNA, 25 bp, Homo sapien
ggctgtcagcttcgggtcatccagc

SEQ ID NO: 1944710 - DNA, 25 bp, Homo sapien
ggtcatccagcaactggttaatcat

SEQ ID NO: 1944711 - DNA, 25 bp, Homo sapien
gaataggttgatgcactttgctttt

SEQ ID NO: 1944712 - DNA, 25 bp, Homo sapien
ccacatcagcatgtcctcctacctc

SEQ ID NO: 1944713 - DNA, 25 bp, Homo sapien
ttgaataggttgatgcactttgctt

SEQ ID NO: 1944714 - DNA, 25 bp, Homo sapien
tccacatcagcatgtcctcctacct

SEQ ID NO: 1944715 - DNA, 25 bp, Homo sapien
tactgtgtgaatgtcctagtgcttt

SEQ ID NO: 1944716 - DNA, 25 bp, Homo sapien
ctgccttgggcgctactgtgtgaat

SEQ ID NO: 1944717 - DNA, 25 bp, Homo sapien
caagatcatcttgccctataaaggt

SEQ ID NO: 1944718 - DNA, 25 bp, Homo sapien
tgctttaagaacgtcaagatcatct

SEQ ID NO: 1944719 - DNA, 25 bp, Homo sapien
tctctgcagaaccagccgttccttg

SEQ ID NO: 1944720 - DNA, 25 bp, Homo sapien
ttgccccacatccatagagttcatc

SEQ ID NO: 1944721 - DNA, 25 bp, Homo sapien
caaacatgctgtgattagcaagaat

SEQ ID NO: 1944722 - DNA, 25 bp, Homo sapien
cccttccctgcaaccacacaaacat

SEQ ID NO: 1944723 - DNA, 25 bp, Homo sapien
caatgttcggattttgtggagtttc

SEQ ID NO: 1944724 - DNA, 25 bp, Homo sapien
gtccccaagaggagatagactagct

SEQ ID NO: 1944725 - DNA, 25 bp, Homo sapien
gtggagtttctcgtttatagatgga

SEQ ID NO: 1944726 - DNA, 25 bp, Homo sapien
gatggatttttacaccgcttaacaa

SEQ ID NO: 1944727 - DNA, 25 bp, Homo sapien
tgtacctcaaattctgtctccacag

SEQ ID NO: 1944728 - DNA, 25 bp, Homo sapien
tgaggttcccaggttttgtacctca

SEQ ID NO: 1944729 - DNA, 25 bp, Homo sapien
ttgtacctcaaattctgtctccaca

SEQ ID NO: 1944730 - DNA, 25 bp, Homo sapien
agagcagaaaattgataagccagcc

SEQ ID NO: 1944731 - DNA, 25 bp, Homo sapien
tgagagcagaaaattgataagccag

SEQ ID NO: 1944732 - DNA, 25 bp, Homo sapien
ctgagagcagaaaattgataagcca

SEQ ID NO: 1944733 - DNA, 25 bp, Homo sapien
gagagcagaaaattgataagccagc

SEQ ID NO: 1944734 - DNA, 25 bp, Homo sapien
tcatgccaatgggtcctgccaagga

SEQ ID NO: 1944735 - DNA, 25 bp, Homo sapien
gagatttctgatcctgctacatggc

SEQ ID NO: 1944736 - DNA, 25 bp, Homo sapien
tgtaaagtactaccagggccagcct

SEQ ID NO: 1944737 - DNA, 25 bp, Homo sapien
tagacatggagcttaatgactgcct

SEQ ID NO: 1944738 - DNA, 25 bp, Homo sapien
gaacaaggactgttgcatcttccca

SEQ ID NO: 1944739 - DNA, 25 bp, Homo sapien
tacagcacatgcaatcctggaatgg

SEQ ID NO: 1944740 - DNA, 25 bp, Homo sapien
caacctccagggttatctcttggga

SEQ ID NO: 1944741 - DNA, 25 bp, Homo sapien
ctggaatggcatttagccaggaaca

SEQ ID NO: 1944742 - DNA, 25 bp, Homo sapien
gggcatagccccacttgactaatta

SEQ ID NO: 1944743 - DNA, 25 bp, Homo sapien
gcaagtaattagtggcctagtagct

SEQ ID NO: 1944744 - DNA, 25 bp, Homo sapien
tctacaaagcaacctctgggcatag

SEQ ID NO: 1944745 - DNA, 25 bp, Homo sapien
caaatattcactctctaacgaagaa

SEQ ID NO: 1944746 - DNA, 25 bp, Homo sapien
gggccttgtggatgcctgcctctga

SEQ ID NO: 1944747 - DNA, 25 bp, Homo sapien
gcctctgagggtacaggtgaatgaa

SEQ ID NO: 1944748 - DNA, 25 bp, Homo sapien
caaacgttattggttgtccctcatc

SEQ ID NO: 1944749 - DNA, 25 bp, Homo sapien
cttatctgggacagtaagatggtca

SEQ ID NO: 1944750 - DNA, 25 bp, Homo sapien
agaatacgacgttccactcaggctg

SEQ ID NO: 1944751 - DNA, 25 bp, Homo sapien
tacgacgttccactcaggctgggtg

SEQ ID NO: 1944752 - DNA, 25 bp, Homo sapien
gaaagaatacgacgttccactcagg

SEQ ID NO: 1944753 - DNA, 25 bp, Homo sapien
aagagaaagaatacgacgttccact

SEQ ID NO: 1944754 - DNA, 25 bp, Homo sapien
gatctcagctctcagtcggacgtgt

SEQ ID NO: 1944755 - DNA, 25 bp, Homo sapien
ttgcagtaccacacaccaaggagac

SEQ ID NO: 1944756 - DNA, 25 bp, Homo sapien
caagggccacagtttgcaggattta

SEQ ID NO: 1944757 - DNA, 25 bp, Homo sapien
taaagtccttaactggcccatatgc

SEQ ID NO: 1944758 - DNA, 25 bp, Homo sapien
ttggagccttttcagtaagcctgtt

SEQ ID NO: 1944759 - DNA, 25 bp, Homo sapien
tttcagtaagcctgttaaaagctgc

SEQ ID NO: 1944760 - DNA, 25 bp, Homo sapien
ggagccttttcagtaagcctgttaa

SEQ ID NO: 1944761 - DNA, 25 bp, Homo sapien
gtaagcctgttaaaagctgcccact

SEQ ID NO: 1944762 - DNA, 25 bp, Homo sapien
ctgaagaaggaggaacataacataa

SEQ ID NO: 1944763 - DNA, 25 bp, Homo sapien
tgaagaaggaggaacataacataaa

SEQ ID NO: 1944764 - DNA, 25 bp, Homo sapien
gaagaaggaggaacataacataaaa

SEQ ID NO: 1944765 - DNA, 25 bp, Homo sapien
atgacatccacatgtctgatcgatg

SEQ ID NO: 1944766 - DNA, 25 bp, Homo sapien
gacatccacatgtctgatcgatgac

SEQ ID NO: 1944767 - DNA, 25 bp, Homo sapien
tgacatccacatgtctgatcgatga

SEQ ID NO: 1944768 - DNA, 25 bp, Homo sapien
aatgacatccacatgtctgatcgat

SEQ ID NO: 1944769 - DNA, 25 bp, Homo sapien
acagactacttatgtcggtacatac

SEQ ID NO: 1944770 - DNA, 25 bp, Homo sapien
aacagactacttatgtcggtacata

SEQ ID NO: 1944771 - DNA, 25 bp, Homo sapien
caacagactacttatgtcggtacat

SEQ ID NO: 1944772 - DNA, 25 bp, Homo sapien
ggtggtgtctccgcagctatttctg

SEQ ID NO: 1944773 - DNA, 25 bp, Homo sapien
tggtgtctccgcagctatttctgga

SEQ ID NO: 1944774 - DNA, 25 bp, Homo sapien
ggtgtctccgcagctatttctggat

SEQ ID NO: 1944775 - DNA, 25 bp, Homo sapien
ggggtggtgtctccgcagctatttc

SEQ ID NO: 1944776 - DNA, 25 bp, Homo sapien
tggagacccctacaagatatggcag

SEQ ID NO: 1944777 - DNA, 25 bp, Homo sapien
gaaactggcaggatcactaaactat

SEQ ID NO: 1944778 - DNA, 25 bp, Homo sapien
taaactatcagtggtgcacaacttg

SEQ ID NO: 1944779 - DNA, 25 bp, Homo sapien
gctgggccaagtatgtggagacccc

SEQ ID NO: 1944780 - DNA, 25 bp, Homo sapien
gattcctgatggattacagccgatc

SEQ ID NO: 1944781 - DNA, 25 bp, Homo sapien
tcctgatggattacagccgatccaa

SEQ ID NO: 1944782 - DNA, 25 bp, Homo sapien
tgatggattacagccgatccaagtt

SEQ ID NO: 1944783 - DNA, 25 bp, Homo sapien
gattacagccgatccaagtttattt

SEQ ID NO: 1944784 - DNA, 25 bp, Homo sapien
attcaaatagaaagcaaatgttgac

SEQ ID NO: 1944785 - DNA, 25 bp, Homo sapien
aatagaaagcaaatgttgaccaaag

SEQ ID NO: 1944786 - DNA, 25 bp, Homo sapien
tagaaagcaaatgttgaccaaagag

SEQ ID NO: 1944787 - DNA, 25 bp, Homo sapien
caaatagaaagcaaatgttgaccaa

SEQ ID NO: 1944788 - DNA, 25 bp, Homo sapien
aaaaggtcttgatctgtggatggct

SEQ ID NO: 1944789 - DNA, 25 bp, Homo sapien
tttcttgcattcagatgctctttcc

SEQ ID NO: 1944790 - DNA, 25 bp, Homo sapien
gctttttcttgcattcagatgctct

SEQ ID NO: 1944791 - DNA, 25 bp, Homo sapien
tatataccacaaataggaatgaatg

SEQ ID NO: 1944792 - DNA, 25 bp, Homo sapien
cccaagaggaatggatgcaaatgcc

SEQ ID NO: 1944793 - DNA, 25 bp, Homo sapien
aatgagagtgacgtgtattcccgag

SEQ ID NO: 1944794 - DNA, 25 bp, Homo sapien
gacgcttgctgaaacatggatgaac

SEQ ID NO: 1944795 - DNA, 25 bp, Homo sapien
tgaaaaggagcaaaccagtgacgct

SEQ ID NO: 1944796 - DNA, 25 bp, Homo sapien
ccaatgactatctgaatcagccgaa

SEQ ID NO: 1944797 - DNA, 25 bp, Homo sapien
aatcagccgaaactgcaaaagtctc

SEQ ID NO: 1944798 - DNA, 25 bp, Homo sapien
ctatctgaatcagccgaaactgcaa

SEQ ID NO: 1944799 - DNA, 25 bp, Homo sapien
tgaatcagccgaaactgcaaaagtc

SEQ ID NO: 1944800 - DNA, 25 bp, Homo sapien
tagagaacagagatgcgaaggagac

SEQ ID NO: 1944801 - DNA, 25 bp, Homo sapien
cactggaaacagatgaggtctaaac

SEQ ID NO: 1944802 - DNA, 25 bp, Homo sapien
gggatctgtcctaactataccttgg

SEQ ID NO: 1944803 - DNA, 25 bp, Homo sapien
tctcatgccgccttagaacagttgt

SEQ ID NO: 1944804 - DNA, 25 bp, Homo sapien
tattacttcccacagacatgccaag

SEQ ID NO: 1944805 - DNA, 25 bp, Homo sapien
gattcccggagaagatgaacatcct

SEQ ID NO: 1944806 - DNA, 25 bp, Homo sapien
gaaatgccctgaccactattaaaag

SEQ ID NO: 1944807 - DNA, 25 bp, Homo sapien
aaaggtaaatcagtaggttctctca

SEQ ID NO: 1944808 - DNA, 25 bp, Homo sapien
aagatgtagaggactatcgcttgcc

SEQ ID NO: 1944809 - DNA, 25 bp, Homo sapien
aaaagatgtagaggactatcgcttg

SEQ ID NO: 1944810 - DNA, 25 bp, Homo sapien
tgtagaggactatcgcttgccacaa

SEQ ID NO: 1944811 - DNA, 25 bp, Homo sapien
gatgtagaggactatcgcttgccac

SEQ ID NO: 1944812 - DNA, 25 bp, Homo sapien
tgattgctataccagtacagtgacg

SEQ ID NO: 1944813 - DNA, 25 bp, Homo sapien
tatacagccacccttggcagtcagc

SEQ ID NO: 1944814 - DNA, 25 bp, Homo sapien
catttgttgcttaggaaacttccct

SEQ ID NO: 1944815 - DNA, 25 bp, Homo sapien
gatctttacacgatatcctcctccg

SEQ ID NO: 1944816 - DNA, 25 bp, Homo sapien
cctcctgggcttctgacgcaaggga

SEQ ID NO: 1944817 - DNA, 25 bp, Homo sapien
tcctgggcttctgacgcaagggaac

SEQ ID NO: 1944818 - DNA, 25 bp, Homo sapien
ttcctcctgggcttctgacgcaagg

SEQ ID NO: 1944819 - DNA, 25 bp, Homo sapien
cttgagttttcctcctgggcttctg

SEQ ID NO: 1944820 - DNA, 25 bp, Homo sapien
agaaaagaggaaatttctgattgtg

SEQ ID NO: 1944821 - DNA, 25 bp, Homo sapien
gaaaagaggaaatttctgattgtgt

SEQ ID NO: 1944822 - DNA, 25 bp, Homo sapien
gtaacatttgtaaagagagaaggag

SEQ ID NO: 1944823 - DNA, 25 bp, Homo sapien
ttctgattgtgttgtaacatttgta

SEQ ID NO: 1944824 - DNA, 25 bp, Homo sapien
ggaaccaattcctggctattataat

SEQ ID NO: 1944825 - DNA, 25 bp, Homo sapien
taattagtagctgtggtgcccaaga

SEQ ID NO: 1944826 - DNA, 25 bp, Homo sapien
gatatgacatagtgaaaagaggaga

SEQ ID NO: 1944827 - DNA, 25 bp, Homo sapien
tccaaaatttggtatgtaatcttag

SEQ ID NO: 1944828 - DNA, 25 bp, Homo sapien
tgagtggcgaatgcagagctgtctt

SEQ ID NO: 1944829 - DNA, 25 bp, Homo sapien
ctgcagttcacacgacgagcacgga

SEQ ID NO: 1944830 - DNA, 25 bp, Homo sapien
tgtctgggctgttgactacacatag

SEQ ID NO: 1944831 - DNA, 25 bp, Homo sapien
tgcaggcagaaatcgtgtctgggct

SEQ ID NO: 1944832 - DNA, 25 bp, Homo sapien
ttcagcaagacattatcacagcagc

SEQ ID NO: 1944833 - DNA, 25 bp, Homo sapien
caagcactgtttataagcgagcatg

SEQ ID NO: 1944834 - DNA, 25 bp, Homo sapien
cacactctactggagacaagcactg

SEQ ID NO: 1944835 - DNA, 25 bp, Homo sapien
aaaatgcttgttatcctcgtggcag

SEQ ID NO: 1944836 - DNA, 25 bp, Homo sapien
actgctgtgctacaaagagctgagc

SEQ ID NO: 1944837 - DNA, 25 bp, Homo sapien
gaggaacatgtgctctagcagaagc

SEQ ID NO: 1944838 - DNA, 25 bp, Homo sapien
ctgctgtgctacaaagagctgagcc

SEQ ID NO: 1944839 - DNA, 25 bp, Homo sapien
acactgctgtgctacaaagagctga

SEQ ID NO: 1944840 - DNA, 25 bp, Homo sapien
tgaattttcttggtccagttctgtt

SEQ ID NO: 1944841 - DNA, 25 bp, Homo sapien
tgtgatgttcccaaacggtcatgag

SEQ ID NO: 1944842 - DNA, 25 bp, Homo sapien
tcttgggcacaagggttgaggctat

SEQ ID NO: 1944843 - DNA, 25 bp, Homo sapien
aggctatctgatccaggcaccccat

SEQ ID NO: 1944844 - DNA, 25 bp, Homo sapien
taggatctagaggtttgtgatgttc

SEQ ID NO: 1944845 - DNA, 25 bp, Homo sapien
gtggttctcatgagcccagttgatg

SEQ ID NO: 1944846 - DNA, 25 bp, Homo sapien
atgagcccagttgatgactctgaaa

SEQ ID NO: 1944847 - DNA, 25 bp, Homo sapien
tcccagtgccttcgtaggtttcttg

SEQ ID NO: 1944848 - DNA, 25 bp, Homo sapien
ctgtcccagtgccttcgtaggtttc

SEQ ID NO: 1944849 - DNA, 25 bp, Homo sapien
gatatgtaaaagtacaagccacatg

SEQ ID NO: 1944850 - DNA, 25 bp, Homo sapien
tactactgataatttacccaagagc

SEQ ID NO: 1944851 - DNA, 25 bp, Homo sapien
catgtatccacgcaaagatttgtct

SEQ ID NO: 1944852 - DNA, 25 bp, Homo sapien
ggcaagactaacctttggagaaaga

SEQ ID NO: 1944853 - DNA, 25 bp, Homo sapien
cagtctcatggcaagaagaaagtga

SEQ ID NO: 1944854 - DNA, 25 bp, Homo sapien
ctctcagtctcatggcaagaagaaa

SEQ ID NO: 1944855 - DNA, 25 bp, Homo sapien
tccgtcccaaggagcactctctcag

SEQ ID NO: 1944856 - DNA, 25 bp, Homo sapien
gcactctctcagtctcatggcaaga

SEQ ID NO: 1944857 - DNA, 25 bp, Homo sapien
gggattccagcattttatacaggtt

SEQ ID NO: 1944858 - DNA, 25 bp, Homo sapien
gatcaccaggtagaatgtcagcaca

SEQ ID NO: 1944859 - DNA, 25 bp, Homo sapien
tcctatgctaattaagagtgctctc

SEQ ID NO: 1944860 - DNA, 25 bp, Homo sapien
tgtacccggcccatgttgataactt

SEQ ID NO: 1944861 - DNA, 25 bp, Homo sapien
gattttccagtgaaccttccaagga

SEQ ID NO: 1944862 - DNA, 25 bp, Homo sapien
ttgccaggatgggacatgagcttct

SEQ ID NO: 1944863 - DNA, 25 bp, Homo sapien
tacaacctgttgaaggtcgagcacg

SEQ ID NO: 1944864 - DNA, 25 bp, Homo sapien
gataatcactttccttgtgtacacg

SEQ ID NO: 1944865 - DNA, 25 bp, Homo sapien
gaatgagtcttatattcaatagcag

SEQ ID NO: 1944866 - DNA, 25 bp, Homo sapien
aagaatgagtcttatattcaatagc

SEQ ID NO: 1944867 - DNA, 25 bp, Homo sapien
gaaagaatgagtcttatattcaata

SEQ ID NO: 1944868 - DNA, 25 bp, Homo sapien
aatgagtcttatattcaatagcaga

SEQ ID NO: 1944869 - DNA, 25 bp, Homo sapien
cagtctaagctttgtggtgtatgca

SEQ ID NO: 1944870 - DNA, 25 bp, Homo sapien
cacctaagggcaaatgtatgaactc

SEQ ID NO: 1944871 - DNA, 25 bp, Homo sapien
aaaagaggcacagcaacgaggaaag

SEQ ID NO: 1944872 - DNA, 25 bp, Homo sapien
cccaggaagactcgagtagaggact

SEQ ID NO: 1944873 - DNA, 25 bp, Homo sapien
gactctactgtttgaggcccaatgc

SEQ ID NO: 1944874 - DNA, 25 bp, Homo sapien
aatgagtcacgtccaatttggcccc

SEQ ID NO: 1944875 - DNA, 25 bp, Homo sapien
ggcccctagaagtgcttgccagcaa

SEQ ID NO: 1944876 - DNA, 25 bp, Homo sapien
cccaaatagacgctgatgttccata

SEQ ID NO: 1944877 - DNA, 25 bp, Homo sapien
tgtcaatccctgtgtcagtctggga

SEQ ID NO: 1944878 - DNA, 25 bp, Homo sapien
tgcctttttgtctgccgactatctc

SEQ ID NO: 1944879 - DNA, 25 bp, Homo sapien
tctgggagacctgtctttgctcaca

SEQ ID NO: 1944880 - DNA, 25 bp, Homo sapien
tttcagctgcttctatgtcaatccc

SEQ ID NO: 1944881 - DNA, 25 bp, Homo sapien
tacaaagagagtaaatccaagagca

SEQ ID NO: 1944882 - DNA, 25 bp, Homo sapien
catagtactctgaggccaagcttga

SEQ ID NO: 1944883 - DNA, 25 bp, Homo sapien
ctggattcagaagcctcatagtact

SEQ ID NO: 1944884 - DNA, 25 bp, Homo sapien
gagcagtcttattcctggattcaga

SEQ ID NO: 1944885 - DNA, 25 bp, Homo sapien
aggagttcaagccaagaatgggcaa

SEQ ID NO: 1944886 - DNA, 25 bp, Homo sapien
taaagtatgctggactctgatggca

SEQ ID NO: 1944887 - DNA, 25 bp, Homo sapien
aatttcggttccttggttgcaccag

SEQ ID NO: 1944888 - DNA, 25 bp, Homo sapien
caagaagatactgtaagtggcagag

SEQ ID NO: 1944889 - DNA, 25 bp, Homo sapien
agcgtgcacattgacagggcctaag

SEQ ID NO: 1944890 - DNA, 25 bp, Homo sapien
gggaaccatcaagtgagcgtgcaca

SEQ ID NO: 1944891 - DNA, 25 bp, Homo sapien
acatgtagtgcggttctgctaagca

SEQ ID NO: 1944892 - DNA, 25 bp, Homo sapien
tgtagactggcactcccagggaacc

SEQ ID NO: 1944893 - DNA, 25 bp, Homo sapien
aaacctggcgtagattcaaataatt

SEQ ID NO: 1944894 - DNA, 25 bp, Homo sapien
ttaaacctggcgtagattcaaataa

SEQ ID NO: 1944895 - DNA, 25 bp, Homo sapien
gattcaaataattggtagtgggtac

SEQ ID NO: 1944896 - DNA, 25 bp, Homo sapien
agattcaaataattggtagtgggta

SEQ ID NO: 1944897 - DNA, 25 bp, Homo sapien
ctgaaattctgccttggcaaactga

SEQ ID NO: 1944898 - DNA, 25 bp, Homo sapien
tgaaattctgccttggcaaactgag

SEQ ID NO: 1944899 - DNA, 25 bp, Homo sapien
tgccttggcaaactgagaatgtttt

SEQ ID NO: 1944900 - DNA, 25 bp, Homo sapien
ttctgccttggcaaactgagaatgt

SEQ ID NO: 1944901 - DNA, 25 bp, Homo sapien
ctcttctgacccagtagcagtttct

SEQ ID NO: 1944902 - DNA, 25 bp, Homo sapien
gctcttctgacccagtagcagtttc

SEQ ID NO: 1944903 - DNA, 25 bp, Homo sapien
ggctcttctgacccagtagcagttt

SEQ ID NO: 1944904 - DNA, 25 bp, Homo sapien
tggatctacccgcaaagccttagtc

SEQ ID NO: 1944905 - DNA, 25 bp, Homo sapien
tggtccttggttacctggatctacc

SEQ ID NO: 1944906 - DNA, 25 bp, Homo sapien
ttcagctgaccacctattgcttggc

SEQ ID NO: 1944907 - DNA, 25 bp, Homo sapien
tggcagcggcagttgaaagtctgac

SEQ ID NO: 1944908 - DNA, 25 bp, Homo sapien
aacatctctccccgtcgaatttctt

SEQ ID NO: 1944909 - DNA, 25 bp, Homo sapien
catctctccccgtcgaatttcttat

SEQ ID NO: 1944910 - DNA, 25 bp, Homo sapien
taaacatctctccccgtcgaatttc

SEQ ID NO: 1944911 - DNA, 25 bp, Homo sapien
tctctccccgtcgaatttcttatct

SEQ ID NO: 1944912 - DNA, 25 bp, Homo sapien
tgcactgtgagtctgctgaggcttc

SEQ ID NO: 1944913 - DNA, 25 bp, Homo sapien
tttctccgaatccaatcagcatgca

SEQ ID NO: 1944914 - DNA, 25 bp, Homo sapien
tagttctaagttttctccgaatcca

SEQ ID NO: 1944915 - DNA, 25 bp, Homo sapien
tgtctgttcagagaatagttctaag

SEQ ID NO: 1944916 - DNA, 25 bp, Homo sapien
tatactctcgcaatgtgtcaactag

SEQ ID NO: 1944917 - DNA, 25 bp, Homo sapien
catttctccgccgatggacgcttag

SEQ ID NO: 1944918 - DNA, 25 bp, Homo sapien
tgaataatgcggcaatgaacctgca

SEQ ID NO: 1944919 - DNA, 25 bp, Homo sapien
gctgttcaagatgccagagcccatg

SEQ ID NO: 1944920 - DNA, 25 bp, Homo sapien
gactataccttacagctttccagag

SEQ ID NO: 1944921 - DNA, 25 bp, Homo sapien
tgtgcctgaccaactcacctaggct

SEQ ID NO: 1944922 - DNA, 25 bp, Homo sapien
taacacattgtgaaagtatagggac

SEQ ID NO: 1944923 - DNA, 25 bp, Homo sapien
gattagagttggttatccccttgac

SEQ ID NO: 1944924 - DNA, 25 bp, Homo sapien
cggcctgacgcctctttctttagtg

SEQ ID NO: 1944925 - DNA, 25 bp, Homo sapien
ggcctgacgcctctttctttagtgt

SEQ ID NO: 1944926 - DNA, 25 bp, Homo sapien
ccggcctgacgcctctttctttagt

SEQ ID NO: 1944927 - DNA, 25 bp, Homo sapien
gcccggcctgacgcctctttcttta

SEQ ID NO: 1944928 - DNA, 25 bp, Homo sapien
taatgcctgggtcaccttgaagtcc

SEQ ID NO: 1944929 - DNA, 25 bp, Homo sapien
tcctggcaagcttaggacgcgtgct

SEQ ID NO: 1944930 - DNA, 25 bp, Homo sapien
tggagacaccataaccacgctggag

SEQ ID NO: 1944931 - DNA, 25 bp, Homo sapien
tattgtcacttctaggccaggttgg

SEQ ID NO: 1944932 - DNA, 25 bp, Homo sapien
tggtcatcaactaggtgcacagtcc

SEQ ID NO: 1944933 - DNA, 25 bp, Homo sapien
gaaacaacattcaggatgacggcat

SEQ ID NO: 1944934 - DNA, 25 bp, Homo sapien
ccagtccagtggtgcggatcaataa

SEQ ID NO: 1944935 - DNA, 25 bp, Homo sapien
cgcaggcgcagaacaggattgaatt

SEQ ID NO: 1944936 - DNA, 25 bp, Homo sapien
gatccaacttcaaaagctgagcccc

SEQ ID NO: 1944937 - DNA, 25 bp, Homo sapien
acagatcccataagtggcaaagtga

SEQ ID NO: 1944938 - DNA, 25 bp, Homo sapien
tcatagataactgaggagtggagag

SEQ ID NO: 1944939 - DNA, 25 bp, Homo sapien
agtcacctgcttcaagtcacagatc

SEQ ID NO: 1944940 - DNA, 25 bp, Homo sapien
ttacttactcgagctctttggcgga

SEQ ID NO: 1944941 - DNA, 25 bp, Homo sapien
gaaaacaagtcaggcctacttctcc

SEQ ID NO: 1944942 - DNA, 25 bp, Homo sapien
caaggaagtagcttgcagtagtctc

SEQ ID NO: 1944943 - DNA, 25 bp, Homo sapien
cctatggtggcaaaaggcagcatga

SEQ ID NO: 1944944 - DNA, 25 bp, Homo sapien
gaaaatcatactgctgacatcgacc

SEQ ID NO: 1944945 - DNA, 25 bp, Homo sapien
gcagcaggtctgaattggtaactac

SEQ ID NO: 1944946 - DNA, 25 bp, Homo sapien
ggatgactagcacataacctgggta

SEQ ID NO: 1944947 - DNA, 25 bp, Homo sapien
tcatatgcaaaacgggactaacagc

SEQ ID NO: 1944948 - DNA, 25 bp, Homo sapien
gaggagccaggaacttctctcgcgg

SEQ ID NO: 1944949 - DNA, 25 bp, Homo sapien
tccagtggaactacagctcttagag

SEQ ID NO: 1944950 - DNA, 25 bp, Homo sapien
gccagctaaggcctccagagtgatt

SEQ ID NO: 1944951 - DNA, 25 bp, Homo sapien
tgggactccagggaacaaaggctga

SEQ ID NO: 1944952 - DNA, 25 bp, Homo sapien
taaatgatactttggctgtcagcga

SEQ ID NO: 1944953 - DNA, 25 bp, Homo sapien
tgaccataacgtctctggccaggac

SEQ ID NO: 1944954 - DNA, 25 bp, Homo sapien
gaggctgtccactgtaaaagcaagg

SEQ ID NO: 1944955 - DNA, 25 bp, Homo sapien
tactgaggctgaaacgagaagaggc

SEQ ID NO: 1944956 - DNA, 25 bp, Homo sapien
aacagtttgaggcgcgtaaaccagc

SEQ ID NO: 1944957 - DNA, 25 bp, Homo sapien
cagtttgaggcgcgtaaaccagctg

SEQ ID NO: 1944958 - DNA, 25 bp, Homo sapien
tcaacagtttgaggcgcgtaaacca

SEQ ID NO: 1944959 - DNA, 25 bp, Homo sapien
gtttgaggcgcgtaaaccagctgac

SEQ ID NO: 1944960 - DNA, 25 bp, Homo sapien
ctgaaataccggcaaagggcatcct

SEQ ID NO: 1944961 - DNA, 25 bp, Homo sapien
agaggagctctcttcaatgatcgga

SEQ ID NO: 1944962 - DNA, 25 bp, Homo sapien
cgaggacttcgtagctgaggagcca

SEQ ID NO: 1944963 - DNA, 25 bp, Homo sapien
cctggaatggaatcgtggcgctgct

SEQ ID NO: 1944964 - DNA, 25 bp, Homo sapien
ctttcctgccatgacctcgaggtct

SEQ ID NO: 1944965 - DNA, 25 bp, Homo sapien
ccatgacctcgaggtctggcaaaag

SEQ ID NO: 1944966 - DNA, 25 bp, Homo sapien
cccatcagcaggcatggacaaaggc

SEQ ID NO: 1944967 - DNA, 25 bp, Homo sapien
caggcatggacaaaggccgtggctt

SEQ ID NO: 1944968 - DNA, 25 bp, Homo sapien
tctccggctttcctggtccaagaag

SEQ ID NO: 1944969 - DNA, 25 bp, Homo sapien
cgagtacccaggcaactgatccgag

SEQ ID NO: 1944970 - DNA, 25 bp, Homo sapien
tgtttgcacttactggaccctccat

SEQ ID NO: 1944971 - DNA, 25 bp, Homo sapien
gactctgaacccttaggaccaggca

SEQ ID NO: 1944972 - DNA, 25 bp, Homo sapien
tggtatgatcatggtgtattgtact

SEQ ID NO: 1944973 - DNA, 25 bp, Homo sapien
atcatggtgtattgtactgcagcct

SEQ ID NO: 1944974 - DNA, 25 bp, Homo sapien
tatgatcatggtgtattgtactgca

SEQ ID NO: 1944975 - DNA, 25 bp, Homo sapien
tgatcatggtgtattgtactgcagc

SEQ ID NO: 1944976 - DNA, 25 bp, Homo sapien
actgggttgtcgcgggtggaggtga

SEQ ID NO: 1944977 - DNA, 25 bp, Homo sapien
ttcttcagtgaggtatccatagtgc

SEQ ID NO: 1944978 - DNA, 25 bp, Homo sapien
tccatagtgctttcaggggactggg

SEQ ID NO: 1944979 - DNA, 25 bp, Homo sapien
aatataaagatccaggatggctgac

SEQ ID NO: 1944980 - DNA, 25 bp, Homo sapien
atactgataatatctcttgcataga

SEQ ID NO: 1944981 - DNA, 25 bp, Homo sapien
tactgataatatctcttgcatagag

SEQ ID NO: 1944982 - DNA, 25 bp, Homo sapien
tcttctgtaaaggagtgatactgat

SEQ ID NO: 1944983 - DNA, 25 bp, Homo sapien
tctgtaaaggagtgatactgataat

SEQ ID NO: 1944984 - DNA, 25 bp, Homo sapien
cacagtaagatgacagctggcacct

SEQ ID NO: 1944985 - DNA, 25 bp, Homo sapien
gcagccagccccgaatagacatttc

SEQ ID NO: 1944986 - DNA, 25 bp, Homo sapien
tgtagaaatcctagcacacggctgg

SEQ ID NO: 1944987 - DNA, 25 bp, Homo sapien
tcactactggatacacgtttaaagg

SEQ ID NO: 1944988 - DNA, 25 bp, Homo sapien
caacattgttggatggaggtttaca

SEQ ID NO: 1944989 - DNA, 25 bp, Homo sapien
taatgagatactcaacattgttgga

SEQ ID NO: 1944990 - DNA, 25 bp, Homo sapien
ggatggaggtttacagttaatccca

SEQ ID NO: 1944991 - DNA, 25 bp, Homo sapien
ttttgtttggagactaatgagatac

SEQ ID NO: 1944992 - DNA, 25 bp, Homo sapien
ctccggtgggattctctctcaattt

SEQ ID NO: 1944993 - DNA, 25 bp, Homo sapien
cagtaacacaactccggtgggattc

SEQ ID NO: 1944994 - DNA, 25 bp, Homo sapien
gggcgcttcttaagcagtaacacaa

SEQ ID NO: 1944995 - DNA, 25 bp, Homo sapien
gagcaggagtaaagttgaaagaccc

SEQ ID NO: 1944996 - DNA, 25 bp, Homo sapien
gtttgctgattaacttgaatgactt

SEQ ID NO: 1944997 - DNA, 25 bp, Homo sapien
cttgaatgacttcgtcaccagcatg

SEQ ID NO: 1944998 - DNA, 25 bp, Homo sapien
taacttgaatgacttcgtcaccagc

SEQ ID NO: 1944999 - DNA, 25 bp, Homo sapien
gctgattaacttgaatgacttcgtc

SEQ ID NO: 1945000 - DNA, 25 bp, Homo sapien
cagaaacaaaataacctgccttaat

SEQ ID NO: 1945001 - DNA, 25 bp, Homo sapien
ctgtacagaaacaaaataacctgcc

SEQ ID NO: 1945002 - DNA, 25 bp, Homo sapien
tacagaaacaaaataacctgcctta

SEQ ID NO: 1945003 - DNA, 25 bp, Homo sapien
accttctatttctttctgcttttat

SEQ ID NO: 1945004 - DNA, 25 bp, Homo sapien
ctgttagaacagccaggttcagcta

SEQ ID NO: 1945005 - DNA, 25 bp, Homo sapien
ggaccttaacacatgaatcctgtgt

SEQ ID NO: 1945006 - DNA, 25 bp, Homo sapien
actgataatttgtctgttagaacag

SEQ ID NO: 1945007 - DNA, 25 bp, Homo sapien
tttattcccctgagactacacagtc

SEQ ID NO: 1945008 - DNA, 25 bp, Homo sapien
tgaccaactgttcaacgtggaaaat

SEQ ID NO: 1945009 - DNA, 25 bp, Homo sapien
taaaagctattggttcatctaaaaa

SEQ ID NO: 1945010 - DNA, 25 bp, Homo sapien
ctgataaaagctattggttcatcta

SEQ ID NO: 1945011 - DNA, 25 bp, Homo sapien
aaattcttacacatatccttatcaa

SEQ ID NO: 1945012 - DNA, 25 bp, Homo sapien
tgtggttccagtaatcacgtgtaac

SEQ ID NO: 1945013 - DNA, 25 bp, Homo sapien
ttccagtaatcacgtgtaacccatc

SEQ ID NO: 1945014 - DNA, 25 bp, Homo sapien
ccatcataggttgatttgatgtaca

SEQ ID NO: 1945015 - DNA, 25 bp, Homo sapien
tcacgtgtaacccatcataggttga

SEQ ID NO: 1945016 - DNA, 25 bp, Homo sapien
ggtagatcggattgttttgtcacag

SEQ ID NO: 1945017 - DNA, 25 bp, Homo sapien
cacaggatctgtggtagatcggatt

SEQ ID NO: 1945018 - DNA, 25 bp, Homo sapien
tggctcatcacaggatctgtggtag

SEQ ID NO: 1945019 - DNA, 25 bp, Homo sapien
tcggattgttttgtcacagatgcca

SEQ ID NO: 1945020 - DNA, 25 bp, Homo sapien
ccagagagtagtaagtcagaagtcc

SEQ ID NO: 1945021 - DNA, 25 bp, Homo sapien
ctctgggcctgcctataagaatagc

SEQ ID NO: 1945022 - DNA, 25 bp, Homo sapien
caaataagggcttgagtaaactcag

SEQ ID NO: 1945023 - DNA, 25 bp, Homo sapien
caagtcaagaaacctgacgacggct

SEQ ID NO: 1945024 - DNA, 25 bp, Homo sapien
cagagcccaagaacaaggtagactt

SEQ ID NO: 1945025 - DNA, 25 bp, Homo sapien
gactgcaaggttcctacaacttgat

SEQ ID NO: 1945026 - DNA, 25 bp, Homo sapien
gagaccaactctcaatacaccagag

SEQ ID NO: 1945027 - DNA, 25 bp, Homo sapien
gattccttgagggatccaagaggcc

SEQ ID NO: 1945028 - DNA, 25 bp, Homo sapien
tgtgatggcacgcgtcaagcgtgga

SEQ ID NO: 1945029 - DNA, 25 bp, Homo sapien
ggcacgcgtcaagcgtggatgcaca

SEQ ID NO: 1945030 - DNA, 25 bp, Homo sapien
atggcacgcgtcaagcgtggatgca

SEQ ID NO: 1945031 - DNA, 25 bp, Homo sapien
tgatggcacgcgtcaagcgtggatg

SEQ ID NO: 1945032 - DNA, 25 bp, Homo sapien
caagcgtggatgcacaatggcatgt

SEQ ID NO: 1945033 - DNA, 25 bp, Homo sapien
gcacaatggcatgtgtcaagcgtgg

SEQ ID NO: 1945034 - DNA, 25 bp, Homo sapien
acgcgtcaagcgtggatgcacaatg

SEQ ID NO: 1945035 - DNA, 25 bp, Homo sapien
cgtggatgcacaatggcatgtgtca

SEQ ID NO: 1945036 - DNA, 25 bp, Homo sapien
gcatgtgtcaagtgtggatagacac

SEQ ID NO: 1945037 - DNA, 25 bp, Homo sapien
tgatggcatgtgtcaagtgtggata

SEQ ID NO: 1945038 - DNA, 25 bp, Homo sapien
tgtgatggcatgtgtcaagtgtgga

SEQ ID NO: 1945039 - DNA, 25 bp, Homo sapien
tggcatgtgtcaagtgtggatagac

SEQ ID NO: 1945040 - DNA, 25 bp, Homo sapien
gcttgctttcttctcgtgtatgtga

SEQ ID NO: 1945041 - DNA, 25 bp, Homo sapien
ctttcttctcgtgtatgtgacacag

SEQ ID NO: 1945042 - DNA, 25 bp, Homo sapien
tgctttcttctcgtgtatgtgacac

SEQ ID NO: 1945043 - DNA, 25 bp, Homo sapien
cttgctttcttctcgtgtatgtgac

SEQ ID NO: 1945044 - DNA, 25 bp, Homo sapien
aagtcccctggcacgttcaatctca

SEQ ID NO: 1945045 - DNA, 25 bp, Homo sapien
gctgcaagagaatgtgaagtcccct

SEQ ID NO: 1945046 - DNA, 25 bp, Homo sapien
ttgctaccatcacaacgcacatggg

SEQ ID NO: 1945047 - DNA, 25 bp, Homo sapien
cctcaacactgaacgggaagatcta

SEQ ID NO: 1945048 - DNA, 25 bp, Homo sapien
caagcaaagctggataattttgttc

SEQ ID NO: 1945049 - DNA, 25 bp, Homo sapien
tcgtgactgagaaatcagtgatccc

SEQ ID NO: 1945050 - DNA, 25 bp, Homo sapien
ttctggactgtagtggtcaggtcca

SEQ ID NO: 1945051 - DNA, 25 bp, Homo sapien
taattttgttcttcgtgactgagaa

SEQ ID NO: 1945052 - DNA, 25 bp, Homo sapien
cttcatgttatcagtttcgaggcca

SEQ ID NO: 1945053 - DNA, 25 bp, Homo sapien
gaagatgctctcagtttcagaacca

SEQ ID NO: 1945054 - DNA, 25 bp, Homo sapien
ccttgcgggaggtgttgccatcgta

SEQ ID NO: 1945055 - DNA, 25 bp, Homo sapien
catcgtaagcgggacttttccgtcg

SEQ ID NO: 1945056 - DNA, 25 bp, Homo sapien
ctttcctgatctggctagagaaacc

SEQ ID NO: 1945057 - DNA, 25 bp, Homo sapien
cgggatcctttcctgatctggctag

SEQ ID NO: 1945058 - DNA, 25 bp, Homo sapien
catccgggatcctttcctgatctgg

SEQ ID NO: 1945059 - DNA, 25 bp, Homo sapien
cctgatctggctagagaaaccatac

SEQ ID NO: 1945060 - DNA, 25 bp, Homo sapien
acttcttctctaccatcttctccat

SEQ ID NO: 1945061 - DNA, 25 bp, Homo sapien
cttacacaacttcttctctaccatc

SEQ ID NO: 1945062 - DNA, 25 bp, Homo sapien
acaacttcttctctaccatcttctc

SEQ ID NO: 1945063 - DNA, 25 bp, Homo sapien
ttacacaacttcttctctaccatct

SEQ ID NO: 1945064 - DNA, 25 bp, Homo sapien
cacagtcatacttatccttattggt

SEQ ID NO: 1945065 - DNA, 25 bp, Homo sapien
cagtcatacttatccttattggtta

SEQ ID NO: 1945066 - DNA, 25 bp, Homo sapien
tattcttactggttattctcaatca

SEQ ID NO: 1945067 - DNA, 25 bp, Homo sapien
caccctctcgaccagtactggccaa

SEQ ID NO: 1945068 - DNA, 25 bp, Homo sapien
gctatcctactgaaaagagcagctc

SEQ ID NO: 1945069 - DNA, 25 bp, Homo sapien
ggtacagattctaattcaatctggg

SEQ ID NO: 1945070 - DNA, 25 bp, Homo sapien
ttagacagtcacattgggtaacagc

SEQ ID NO: 1945071 - DNA, 25 bp, Homo sapien
agagcagctctataatcggtctcag

SEQ ID NO: 1945072 - DNA, 25 bp, Homo sapien
gatagtgggccagatttaactcgca

SEQ ID NO: 1945073 - DNA, 25 bp, Homo sapien
cttcctatagtatcttcagctcatg

SEQ ID NO: 1945074 - DNA, 25 bp, Homo sapien
tgccaacctttaatgtagaaaataa

SEQ ID NO: 1945075 - DNA, 25 bp, Homo sapien
cacaaacaatgacggcttaagagag

SEQ ID NO: 1945076 - DNA, 25 bp, Homo sapien
taaagaacgtcatcacggtacagac

SEQ ID NO: 1945077 - DNA, 25 bp, Homo sapien
ctaaagaacgtcatcacggtacaga

SEQ ID NO: 1945078 - DNA, 25 bp, Homo sapien
tgtggacatattgttgcaggcagtc

SEQ ID NO: 1945079 - DNA, 25 bp, Homo sapien
acaagctcctggtgtccaatccgtg

SEQ ID NO: 1945080 - DNA, 25 bp, Homo sapien
gctgctcgccgttgatcttctctcg

SEQ ID NO: 1945081 - DNA, 25 bp, Homo sapien
gtgcacagagaaggtccacagcctc

SEQ ID NO: 1945082 - DNA, 25 bp, Homo sapien
caaacaggcagtcattcaaccacac

SEQ ID NO: 1945083 - DNA, 25 bp, Homo sapien
tacaacttttgagccactttattat

SEQ ID NO: 1945084 - DNA, 25 bp, Homo sapien
caccaatttccagggtacaactcag

SEQ ID NO: 1945085 - DNA, 25 bp, Homo sapien
tgtcagttctcttgaggcataattt

SEQ ID NO: 1945086 - DNA, 25 bp, Homo sapien
gagtaccactccaaggaagagagct

SEQ ID NO: 1945087 - DNA, 25 bp, Homo sapien
agcagattagatggccactgtttcc

SEQ ID NO: 1945088 - DNA, 25 bp, Homo sapien
cacagccattcccaagagcagtctt

SEQ ID NO: 1945089 - DNA, 25 bp, Homo sapien
ccaccgggagtagagatactttaat

SEQ ID NO: 1945090 - DNA, 25 bp, Homo sapien
caactagatgctactactatgtaac

SEQ ID NO: 1945091 - DNA, 25 bp, Homo sapien
aaaagctttctgcttgggcgtccta

SEQ ID NO: 1945092 - DNA, 25 bp, Homo sapien
tttagccaggacatacatcaactag

SEQ ID NO: 1945093 - DNA, 25 bp, Homo sapien
taacactccctcatggagggcttac

SEQ ID NO: 1945094 - DNA, 25 bp, Homo sapien
tcaacaggtggtcctgaagagcacc

SEQ ID NO: 1945095 - DNA, 25 bp, Homo sapien
gcttacgatcgccacagctgtttag

SEQ ID NO: 1945096 - DNA, 25 bp, Homo sapien
gagcaccaacaactggagatgccat

SEQ ID NO: 1945097 - DNA, 25 bp, Homo sapien
gagatgccatcttctgcttacgatc

SEQ ID NO: 1945098 - DNA, 25 bp, Homo sapien
aaaaagtccacctttgtatcacagt

SEQ ID NO: 1945099 - DNA, 25 bp, Homo sapien
taaaaaagtccacctttgtatcaca

SEQ ID NO: 1945100 - DNA, 25 bp, Homo sapien
cacctttgtatcacagtcacttcta

SEQ ID NO: 1945101 - DNA, 25 bp, Homo sapien
aagtccacctttgtatcacagtcac

SEQ ID NO: 1945102 - DNA, 25 bp, Homo sapien
ccaaagaaccctccgtgatcaccat

SEQ ID NO: 1945103 - DNA, 25 bp, Homo sapien
cccaaagaaccctccgtgatcacca

SEQ ID NO: 1945104 - DNA, 25 bp, Homo sapien
tcagtccccaaagaaccctccgtga

SEQ ID NO: 1945105 - DNA, 25 bp, Homo sapien
gtccccaaagaaccctccgtgatca

SEQ ID NO: 1945106 - DNA, 25 bp, Homo sapien
cataggactaaagcattgactcgca

SEQ ID NO: 1945107 - DNA, 25 bp, Homo sapien
tgttcatcatacaagctccaggagg

SEQ ID NO: 1945108 - DNA, 25 bp, Homo sapien
ggaaagtggttgaaatctgaagccc

SEQ ID NO: 1945109 - DNA, 25 bp, Homo sapien
aatgaggacgttgtacagtgagcgc

SEQ ID NO: 1945110 - DNA, 25 bp, Homo sapien
ccaatcaatgtgcatggaggctctc

SEQ ID NO: 1945111 - DNA, 25 bp, Homo sapien
ttgggcccacccaaggtagcctgaa

SEQ ID NO: 1945112 - DNA, 25 bp, Homo sapien
ggtaattaactaggccagcaaagct

SEQ ID NO: 1945113 - DNA, 25 bp, Homo sapien
tccttatgacggaagagaggcagcg

SEQ ID NO: 1945114 - DNA, 25 bp, Homo sapien
ccaggttctggtcatcttcagagca

SEQ ID NO: 1945115 - DNA, 25 bp, Homo sapien
tgaccaggttctggtcatcttcaga

SEQ ID NO: 1945116 - DNA, 25 bp, Homo sapien
gttctttttaaaggagacctgatga

SEQ ID NO: 1945117 - DNA, 25 bp, Homo sapien
ttaaaggagacctgatgaccaggtt

SEQ ID NO: 1945118 - DNA, 25 bp, Homo sapien
gaggatgcatttctgcctgccacgt

SEQ ID NO: 1945119 - DNA, 25 bp, Homo sapien
tgccacgttagaagcagctgtttcc

SEQ ID NO: 1945120 - DNA, 25 bp, Homo sapien
tattttgccaggtgcaagccagcct

SEQ ID NO: 1945121 - DNA, 25 bp, Homo sapien
gaccgatttgctccatgaggatgca

SEQ ID NO: 1945122 - DNA, 25 bp, Homo sapien
agcagatcacaggtgataacacaga

SEQ ID NO: 1945123 - DNA, 25 bp, Homo sapien
caaacttccgccgtctgggctcctc

SEQ ID NO: 1945124 - DNA, 25 bp, Homo sapien
cctccaaacttccgccgtctgggct

SEQ ID NO: 1945125 - DNA, 25 bp, Homo sapien
ctcccctccaaacttccgccgtctg

SEQ ID NO: 1945126 - DNA, 25 bp, Homo sapien
aacttccgccgtctgggctcctccg

SEQ ID NO: 1945127 - DNA, 25 bp, Homo sapien
cctacagtagggtgactgggccact

SEQ ID NO: 1945128 - DNA, 25 bp, Homo sapien
taaaacccagttagtgctacatccc

SEQ ID NO: 1945129 - DNA, 25 bp, Homo sapien
cagtgcctgcctgatagaattctga

SEQ ID NO: 1945130 - DNA, 25 bp, Homo sapien
catcggcttctttcagtggctgaca

SEQ ID NO: 1945131 - DNA, 25 bp, Homo sapien
caaggaaacagaacacggagaaagg

SEQ ID NO: 1945132 - DNA, 25 bp, Homo sapien
ttcagcaccaaaccttgaagagccc

SEQ ID NO: 1945133 - DNA, 25 bp, Homo sapien
tgatgaataagaaaacaggccaccc

SEQ ID NO: 1945134 - DNA, 25 bp, Homo sapien
tctaagggcttattgggccaatgat

SEQ ID NO: 1945135 - DNA, 25 bp, Homo sapien
ttttctgtcacccaaactgtaatgc

SEQ ID NO: 1945136 - DNA, 25 bp, Homo sapien
cacccaaactgtaatgcagtggtgt

SEQ ID NO: 1945137 - DNA, 25 bp, Homo sapien
gagatagcttttgggcttttctgtc

SEQ ID NO: 1945138 - DNA, 25 bp, Homo sapien
agagatagcttttgggcttttctgt

SEQ ID NO: 1945139 - DNA, 25 bp, Homo sapien
tacctggccacctgttagacatgcg

SEQ ID NO: 1945140 - DNA, 25 bp, Homo sapien
cctctatagataaccaatgtgggca

SEQ ID NO: 1945141 - DNA, 25 bp, Homo sapien
gacatgcggccgtcactatacatga

SEQ ID NO: 1945142 - DNA, 25 bp, Homo sapien
gatatggccacactaagtcactgag

SEQ ID NO: 1945143 - DNA, 25 bp, Homo sapien
cgatgcagagcaccttgaagatgga

SEQ ID NO: 1945144 - DNA, 25 bp, Homo sapien
tctggattaagaactgaagctggtg

SEQ ID NO: 1945145 - DNA, 25 bp, Homo sapien
gtttgcttcatttcccgatgcagag

SEQ ID NO: 1945146 - DNA, 25 bp, Homo sapien
tcaaccaagagaagccgaattcctg

SEQ ID NO: 1945147 - DNA, 25 bp, Homo sapien
atcctcaggaaagcatgattcagat

SEQ ID NO: 1945148 - DNA, 25 bp, Homo sapien
gttacatgaagtctgatccacccta

SEQ ID NO: 1945149 - DNA, 25 bp, Homo sapien
cataatcgccgccttttctgataga

SEQ ID NO: 1945150 - DNA, 25 bp, Homo sapien
tcccaatcccaaagcactgaatttc

SEQ ID NO: 1945151 - DNA, 25 bp, Homo sapien
tctttgacactgacaggtgcccctg

SEQ ID NO: 1945152 - DNA, 25 bp, Homo sapien
ggtgcccctggatgataagaataca

SEQ ID NO: 1945153 - DNA, 25 bp, Homo sapien
gctggtaaacggcagagaaatctct

SEQ ID NO: 1945154 - DNA, 25 bp, Homo sapien
ctaatcaagaaccttcctgatcagc

SEQ ID NO: 1945155 - DNA, 25 bp, Homo sapien
ccacgtcttcctcgtcgaaggcact

SEQ ID NO: 1945156 - DNA, 25 bp, Homo sapien
tgctgggacaaccagtcccacgtct

SEQ ID NO: 1945157 - DNA, 25 bp, Homo sapien
caaggctaggacagttctgctggga

SEQ ID NO: 1945158 - DNA, 25 bp, Homo sapien
tcgaggctgatcaacagccaaggct

SEQ ID NO: 1945159 - DNA, 25 bp, Homo sapien
agaaaaacgacttgtggtagctgca

SEQ ID NO: 1945160 - DNA, 25 bp, Homo sapien
gaaaaggacctcatataagttcaga

SEQ ID NO: 1945161 - DNA, 25 bp, Homo sapien
taaagcagaaaaacgacttgtggta

SEQ ID NO: 1945162 - DNA, 25 bp, Homo sapien
tttaaatcaagcttagagaaaagga

SEQ ID NO: 1945163 - DNA, 25 bp, Homo sapien
tgcggacggctctgggcaggcggca

SEQ ID NO: 1945164 - DNA, 25 bp, Homo sapien
taaagatagggctcccctcggcttg

SEQ ID NO: 1945165 - DNA, 25 bp, Homo sapien
cgagtgccgagtcccgagatcggca

SEQ ID NO: 1945166 - DNA, 25 bp, Homo sapien
catggacgaggtcccgcgggagtca

SEQ ID NO: 1945167 - DNA, 25 bp, Homo sapien
tctagtccagtccaccacttgtttg

SEQ ID NO: 1945168 - DNA, 25 bp, Homo sapien
ctctagtccagtccaccacttgttt

SEQ ID NO: 1945169 - DNA, 25 bp, Homo sapien
ggtaaaccgcttcgcctctcgctgg

SEQ ID NO: 1945170 - DNA, 25 bp, Homo sapien
gtaaaccgcttcgcctctcgctggg

SEQ ID NO: 1945171 - DNA, 25 bp, Homo sapien
tgcatggccgcggtcagccagtcgt

SEQ ID NO: 1945172 - DNA, 25 bp, Homo sapien
gagcgactccgtcaagactgcatgg

SEQ ID NO: 1945173 - DNA, 25 bp, Homo sapien
cggatctctcgaggcgcgatcggct

SEQ ID NO: 1945174 - DNA, 25 bp, Homo sapien
tggagagtcgcagataaagtgctgc

SEQ ID NO: 1945175 - DNA, 25 bp, Homo sapien
tcccattcaactcccctagaggact

SEQ ID NO: 1945176 - DNA, 25 bp, Homo sapien
tgacaaaattcctgatatagtagtt

SEQ ID NO: 1945177 - DNA, 25 bp, Homo sapien
caaaattcctgatatagtagttgtc

SEQ ID NO: 1945178 - DNA, 25 bp, Homo sapien
ttcatctagcgaaagtgactggcag

SEQ ID NO: 1945179 - DNA, 25 bp, Homo sapien
ccagctcacaaatgatagcgacagt

SEQ ID NO: 1945180 - DNA, 25 bp, Homo sapien
tgttgaaatccacaaccagctcaca

SEQ ID NO: 1945181 - DNA, 25 bp, Homo sapien
agcaaagtgattgttgaaatccaca

SEQ ID NO: 1945182 - DNA, 25 bp, Homo sapien
gctcacaaatgatagcgacagtcat

SEQ ID NO: 1945183 - DNA, 25 bp, Homo sapien
cagcccaacacttcgaatgtctgca

SEQ ID NO: 1945184 - DNA, 25 bp, Homo sapien
gcccaacacttcgaatgtctgcaac

SEQ ID NO: 1945185 - DNA, 25 bp, Homo sapien
acagcccaacacttcgaatgtctgc

SEQ ID NO: 1945186 - DNA, 25 bp, Homo sapien
ccaacacttcgaatgtctgcaacca

SEQ ID NO: 1945187 - DNA, 25 bp, Homo sapien
gaccagagcacagtgtaagggctcc

SEQ ID NO: 1945188 - DNA, 25 bp, Homo sapien
gggaccagagcacagtgtaagggct

SEQ ID NO: 1945189 - DNA, 25 bp, Homo sapien
ccagagcacagtgtaagggctccgg

SEQ ID NO: 1945190 - DNA, 25 bp, Homo sapien
accagagcacagtgtaagggctccg

SEQ ID NO: 1945191 - DNA, 25 bp, Homo sapien
gctctgatgaacctcgacacaggct

SEQ ID NO: 1945192 - DNA, 25 bp, Homo sapien
tgatgaacctcgacacaggctgcag

SEQ ID NO: 1945193 - DNA, 25 bp, Homo sapien
ccagaaggagctctgatgaacctcg

SEQ ID NO: 1945194 - DNA, 25 bp, Homo sapien
gaaggagctctgatgaacctcgaca

SEQ ID NO: 1945195 - DNA, 25 bp, Homo sapien
taaaagcacagtatttcaatggtgc

SEQ ID NO: 1945196 - DNA, 25 bp, Homo sapien
taaatcctagttgaggcctagtgcc

SEQ ID NO: 1945197 - DNA, 25 bp, Homo sapien
taattacgtcatccaaaaatcatgg

SEQ ID NO: 1945198 - DNA, 25 bp, Homo sapien
tagttgtgcaaaggaaactacctag

SEQ ID NO: 1945199 - DNA, 25 bp, Homo sapien
gacaagcctggatattggaagaaac

SEQ ID NO: 1945200 - DNA, 25 bp, Homo sapien
cagtagtgcggtcttttcaggatga

SEQ ID NO: 1945201 - DNA, 25 bp, Homo sapien
tgcattctgcaaaggtgaattcagg

SEQ ID NO: 1945202 - DNA, 25 bp, Homo sapien
tagcaaagactatcaagacctggaa

SEQ ID NO: 1945203 - DNA, 25 bp, Homo sapien
caattaagagaacaaagttgctgta

SEQ ID NO: 1945204 - DNA, 25 bp, Homo sapien
gaacaaagttgctgtaaagtaatta

SEQ ID NO: 1945205 - DNA, 25 bp, Homo sapien
tcagcacaattaagagaacaaagtt

SEQ ID NO: 1945206 - DNA, 25 bp, Homo sapien
cctcagatgcctcagcacaattaag

SEQ ID NO: 1945207 - DNA, 25 bp, Homo sapien
gaaacacatagaggtgtggtccatg

SEQ ID NO: 1945208 - DNA, 25 bp, Homo sapien
tgtccagaggttccaaagaatgtgt

SEQ ID NO: 1945209 - DNA, 25 bp, Homo sapien
tggtccatgtgaacatgtgtccaga

SEQ ID NO: 1945210 - DNA, 25 bp, Homo sapien
tcacggtgacagccacggccgtatc

SEQ ID NO: 1945211 - DNA, 25 bp, Homo sapien
ggtgaaccaacactgcatgcactga

SEQ ID NO: 1945212 - DNA, 25 bp, Homo sapien
gagaaagctggtggagaaaagccag

SEQ ID NO: 1945213 - DNA, 25 bp, Homo sapien
cttttccctactggtgagtgttgcc

SEQ ID NO: 1945214 - DNA, 25 bp, Homo sapien
gttgcccctgaggacagtaactccc

SEQ ID NO: 1945215 - DNA, 25 bp, Homo sapien
gggggtggctcagggcaccgtaaca

SEQ ID NO: 1945216 - DNA, 25 bp, Homo sapien
gagagggggtggctcagggcaccgt

SEQ ID NO: 1945217 - DNA, 25 bp, Homo sapien
ggctgagagggggtggctcagggca

SEQ ID NO: 1945218 - DNA, 25 bp, Homo sapien
ctgaagcagaggcgggctgagaggg

SEQ ID NO: 1945219 - DNA, 25 bp, Homo sapien
tttccttgcctaacgcagccatggc

SEQ ID NO: 1945220 - DNA, 25 bp, Homo sapien
gagagtctctccccatcatcatttt

SEQ ID NO: 1945221 - DNA, 25 bp, Homo sapien
cagaagacagaggtcctctttcctt

SEQ ID NO: 1945222 - DNA, 25 bp, Homo sapien
tgtttgctcctcatccattcactgg

SEQ ID NO: 1945223 - DNA, 25 bp, Homo sapien
gcattgacaagagagaatttccgtc

SEQ ID NO: 1945224 - DNA, 25 bp, Homo sapien
attgacaagagagaatttccgtctg

SEQ ID NO: 1945225 - DNA, 25 bp, Homo sapien
tgtcatcagcattgacaagagagaa

SEQ ID NO: 1945226 - DNA, 25 bp, Homo sapien
gatgtcatcagcattgacaagagag

SEQ ID NO: 1945227 - DNA, 25 bp, Homo sapien
tcaactgagagaagcaccctggatc

SEQ ID NO: 1945228 - DNA, 25 bp, Homo sapien
gacgtagtttatgttaaagatgcca

SEQ ID NO: 1945229 - DNA, 25 bp, Homo sapien
aaggacaggatatccgcctcaccat

SEQ ID NO: 1945230 - DNA, 25 bp, Homo sapien
ggtgtgatcatcaactgagagaagc

SEQ ID NO: 1945231 - DNA, 25 bp, Homo sapien
ctggcggccaaaccaagcagtgggt

SEQ ID NO: 1945232 - DNA, 25 bp, Homo sapien
gagacaaagactggcggccaaacca

SEQ ID NO: 1945233 - DNA, 25 bp, Homo sapien
accaagcagtgggtgaagtggtccc

SEQ ID NO: 1945234 - DNA, 25 bp, Homo sapien
gccaaaccaagcagtgggtgaagtg

SEQ ID NO: 1945235 - DNA, 25 bp, Homo sapien
tgggcaattgcaccagagtatctgg

SEQ ID NO: 1945236 - DNA, 25 bp, Homo sapien
tatctggcggctccatagaggaggt

SEQ ID NO: 1945237 - DNA, 25 bp, Homo sapien
ccatagaggaggtacagttgcaagc

SEQ ID NO: 1945238 - DNA, 25 bp, Homo sapien
tacagttgcaagcaggcctgcgtag

SEQ ID NO: 1945239 - DNA, 25 bp, Homo sapien
cttagtatgaatgtgtgtaatggga

SEQ ID NO: 1945240 - DNA, 25 bp, Homo sapien
ttctggccctctttgagtgccccaa

SEQ ID NO: 1945241 - DNA, 25 bp, Homo sapien
cctttggcccggaaagctttgctga

SEQ ID NO: 1945242 - DNA, 25 bp, Homo sapien
atttctgaaccacacatggcatggg

SEQ ID NO: 1945243 - DNA, 25 bp, Homo sapien
tggaaagggggcgtagaggcaggga

SEQ ID NO: 1945244 - DNA, 25 bp, Homo sapien
agctggcaatggaaagggggcgtag

SEQ ID NO: 1945245 - DNA, 25 bp, Homo sapien
caatggaaagggggcgtagaggcag

SEQ ID NO: 1945246 - DNA, 25 bp, Homo sapien
tggcaatggaaagggggcgtagagg

SEQ ID NO: 1945247 - DNA, 25 bp, Homo sapien
tgtttatatgtttttctctcgagtc

SEQ ID NO: 1945248 - DNA, 25 bp, Homo sapien
gtaaagccaagtgccaaccggcact

SEQ ID NO: 1945249 - DNA, 25 bp, Homo sapien
gagtctaaaccatgcttttcatccc

SEQ ID NO: 1945250 - DNA, 25 bp, Homo sapien
gtgccaaccggcactcaacactgag

SEQ ID NO: 1945251 - DNA, 25 bp, Homo sapien
tagccaccgtcaattccaacacaac

SEQ ID NO: 1945252 - DNA, 25 bp, Homo sapien
cacaggaaagagtggagccttactg

SEQ ID NO: 1945253 - DNA, 25 bp, Homo sapien
gaaagagtggagccttactgggtac

SEQ ID NO: 1945254 - DNA, 25 bp, Homo sapien
caacacaactccatctccataatcc

SEQ ID NO: 1945255 - DNA, 25 bp, Homo sapien
ttcttgaagaatgcaagcaaaggat

SEQ ID NO: 1945256 - DNA, 25 bp, Homo sapien
tgcaagcaaaggataggcatgtagt

SEQ ID NO: 1945257 - DNA, 25 bp, Homo sapien
tttcttgaagaatgcaagcaaagga

SEQ ID NO: 1945258 - DNA, 25 bp, Homo sapien
caaaggataggcatgtagtttaatc

SEQ ID NO: 1945259 - DNA, 25 bp, Homo sapien
caagactcgctgcaaacagcattaa

SEQ ID NO: 1945260 - DNA, 25 bp, Homo sapien
gaatcagccctaaaggctcagatcc

SEQ ID NO: 1945261 - DNA, 25 bp, Homo sapien
gcattaacaaatgcaaacgaatcag

SEQ ID NO: 1945262 - DNA, 25 bp, Homo sapien
gcagagccaagactcgctgcaaaca

SEQ ID NO: 1945263 - DNA, 25 bp, Homo sapien
ctttgatggctatcagaatcaaagc

SEQ ID NO: 1945264 - DNA, 25 bp, Homo sapien
tatacttgtctttgatggctatcag

SEQ ID NO: 1945265 - DNA, 25 bp, Homo sapien
caaagcttggtgacatcagggactg

SEQ ID NO: 1945266 - DNA, 25 bp, Homo sapien
gattcctgcttccacttgcttggcc

SEQ ID NO: 1945267 - DNA, 25 bp, Homo sapien
gtacgttcacactgtcatgcaaccg

SEQ ID NO: 1945268 - DNA, 25 bp, Homo sapien
catacagtacttgttcttttgtaac

SEQ ID NO: 1945269 - DNA, 25 bp, Homo sapien
tattctaggtagcttatataagcgg

SEQ ID NO: 1945270 - DNA, 25 bp, Homo sapien
tatattcctagtcctattctaacca

SEQ ID NO: 1945271 - DNA, 25 bp, Homo sapien
gaatattccattgtaccacattttg

SEQ ID NO: 1945272 - DNA, 25 bp, Homo sapien
cgtgctgggccttgaatttccttca

SEQ ID NO: 1945273 - DNA, 25 bp, Homo sapien
ccaccgtgctgggccttgaatttcc

SEQ ID NO: 1945274 - DNA, 25 bp, Homo sapien
accgtgctgggccttgaatttcctt

SEQ ID NO: 1945275 - DNA, 25 bp, Homo sapien
gctagtgctactgaattgggccgca

SEQ ID NO: 1945276 - DNA, 25 bp, Homo sapien
tatctaagaagtgccctgtccatgg

SEQ ID NO: 1945277 - DNA, 25 bp, Homo sapien
gatggtcacctaatccaagctgggt

SEQ ID NO: 1945278 - DNA, 25 bp, Homo sapien
ttgggccgcacagattcagaacatt

SEQ ID NO: 1945279 - DNA, 25 bp, Homo sapien
gccatattggatgccgcagccgctg

SEQ ID NO: 1945280 - DNA, 25 bp, Homo sapien
tcctcctctgtcttcgccgagcggg

SEQ ID NO: 1945281 - DNA, 25 bp, Homo sapien
cagcgcgctcgatggtttccgcgcg

SEQ ID NO: 1945282 - DNA, 25 bp, Homo sapien
gcggcccgactcgagtccgccatat

SEQ ID NO: 1945283 - DNA, 25 bp, Homo sapien
ccagtgcagtggccgccgcctcttc

SEQ ID NO: 1945284 - DNA, 25 bp, Homo sapien
tcgtgagacagtggcagtgcatgac

SEQ ID NO: 1945285 - DNA, 25 bp, Homo sapien
gctagagtgcaaggacaggatcata

SEQ ID NO: 1945286 - DNA, 25 bp, Homo sapien
ttcttcctagtgaaaagggtcgcag

SEQ ID NO: 1945287 - DNA, 25 bp, Homo sapien
ctgctctaagatggtggcgcttgta

SEQ ID NO: 1945288 - DNA, 25 bp, Homo sapien
gccattctgaaagcaaaaacagttg

SEQ ID NO: 1945289 - DNA, 25 bp, Homo sapien
taataattgacagtggacctcacag

SEQ ID NO: 1945290 - DNA, 25 bp, Homo sapien
tatccttccttaggccttgtaggct

SEQ ID NO: 1945291 - DNA, 25 bp, Homo sapien
tgagtgcctaggtagtgagaagaac

SEQ ID NO: 1945292 - DNA, 25 bp, Homo sapien
caaagctgtgcactatatattccca

SEQ ID NO: 1945293 - DNA, 25 bp, Homo sapien
catataaagatgctgtgaaacggga

SEQ ID NO: 1945294 - DNA, 25 bp, Homo sapien
gaaacgggaagatttactgtatgca

SEQ ID NO: 1945295 - DNA, 25 bp, Homo sapien
ttgccttcagctgtacaggttcctg

SEQ ID NO: 1945296 - DNA, 25 bp, Homo sapien
tgggtagctggagagcccaagcctt

SEQ ID NO: 1945297 - DNA, 25 bp, Homo sapien
aagccttcgcagcatgtagccatgg

SEQ ID NO: 1945298 - DNA, 25 bp, Homo sapien
gatggaacaaactaactgggatcag

SEQ ID NO: 1945299 - DNA, 25 bp, Homo sapien
agtagactgataagatggaaacctg

SEQ ID NO: 1945300 - DNA, 25 bp, Homo sapien
tagttccatgccgtttaatcacata

SEQ ID NO: 1945301 - DNA, 25 bp, Homo sapien
ccttcaccactaggatgccttgtgt

SEQ ID NO: 1945302 - DNA, 25 bp, Homo sapien
cccctgtggtaacgttctgtagaat

SEQ ID NO: 1945303 - DNA, 25 bp, Homo sapien
gatacagtcacctgttgacacacta

SEQ ID NO: 1945304 - DNA, 25 bp, Homo sapien
tgtgtcctcagtttaagtacttaca

SEQ ID NO: 1945305 - DNA, 25 bp, Homo sapien
tctagatgatagtgttttatgaggt

SEQ ID NO: 1945306 - DNA, 25 bp, Homo sapien
ttgcactaagttatggaagagatca

SEQ ID NO: 1945307 - DNA, 25 bp, Homo sapien
tcagactcatagaaatacctcattt

SEQ ID NO: 1945308 - DNA, 25 bp, Homo sapien
tctgtgcagtacaacctgagtgctt

SEQ ID NO: 1945309 - DNA, 25 bp, Homo sapien
tgagatcaatttagaaatggttacc

SEQ ID NO: 1945310 - DNA, 25 bp, Homo sapien
tggaaggtttgggtgaacttaatca

SEQ ID NO: 1945311 - DNA, 25 bp, Homo sapien
tctgtattctgtgcagtacaacctg

SEQ ID NO: 1945312 - DNA, 25 bp, Homo sapien
gcagtaaatacgtgtgctgtttaca

SEQ ID NO: 1945313 - DNA, 25 bp, Homo sapien
gtgctgtttacatagtttttaactg

SEQ ID NO: 1945314 - DNA, 25 bp, Homo sapien
taaatacgtgtgctgtttacatagt

SEQ ID NO: 1945315 - DNA, 25 bp, Homo sapien
gccgcagtaaatacgtgtgctgttt

SEQ ID NO: 1945316 - DNA, 25 bp, Homo sapien
ctatgttgagtacctctcttggcac

SEQ ID NO: 1945317 - DNA, 25 bp, Homo sapien
tccaatagcaggtgcctactttgtc

SEQ ID NO: 1945318 - DNA, 25 bp, Homo sapien
caaagttgcagtagctccaaggtat

SEQ ID NO: 1945319 - DNA, 25 bp, Homo sapien
cttatgtgccttaaccttactgtga

SEQ ID NO: 1945320 - DNA, 25 bp, Homo sapien
ttgcacaagagccaggctaatctct

SEQ ID NO: 1945321 - DNA, 25 bp, Homo sapien
gcacaagagccaggctaatctctgt

SEQ ID NO: 1945322 - DNA, 25 bp, Homo sapien
tccttgcacaagagccaggctaatc

SEQ ID NO: 1945323 - DNA, 25 bp, Homo sapien
ccttgcacaagagccaggctaatct

SEQ ID NO: 1945324 - DNA, 25 bp, Homo sapien
tccaaagaccaaatgtatcaagtaa

SEQ ID NO: 1945325 - DNA, 25 bp, Homo sapien
caaagaccaaatgtatcaagtaatt

SEQ ID NO: 1945326 - DNA, 25 bp, Homo sapien
ccaaagaccaaatgtatcaagtaat

SEQ ID NO: 1945327 - DNA, 25 bp, Homo sapien
caagattccctttaatacagcctgg

SEQ ID NO: 1945328 - DNA, 25 bp, Homo sapien
gaaaccagggaaagcattagtagac

SEQ ID NO: 1945329 - DNA, 25 bp, Homo sapien
tcctggaagacaaagcgtagacaat

SEQ ID NO: 1945330 - DNA, 25 bp, Homo sapien
tgggcggcctatagatccaagagaa

SEQ ID NO: 1945331 - DNA, 25 bp, Homo sapien
ggcatagaggagattttgatgagag

SEQ ID NO: 1945332 - DNA, 25 bp, Homo sapien
catcgggttctaccggtctatggtg

SEQ ID NO: 1945333 - DNA, 25 bp, Homo sapien
gatgagagagagcatcgggttctac

SEQ ID NO: 1945334 - DNA, 25 bp, Homo sapien
gagagcatcgggttctaccggtcta

SEQ ID NO: 1945335 - DNA, 25 bp, Homo sapien
ccgaggatttggacaagaagttcac

SEQ ID NO: 1945336 - DNA, 25 bp, Homo sapien
ttgatgaccgcagaagaccctggga

SEQ ID NO: 1945337 - DNA, 25 bp, Homo sapien
aaatgaatggaaatcgtcttggacg

SEQ ID NO: 1945338 - DNA, 25 bp, Homo sapien
tctcaacgaaaaggtgataatgtgc

SEQ ID NO: 1945339 - DNA, 25 bp, Homo sapien
tatccatatctttaggctgctgcag

SEQ ID NO: 1945340 - DNA, 25 bp, Homo sapien
tgtaaaatctacactacggtctctg

SEQ ID NO: 1945341 - DNA, 25 bp, Homo sapien
tagcaagtggtggtatatcttatcc

SEQ ID NO: 1945342 - DNA, 25 bp, Homo sapien
cagcttgtcagagacttcctatgga

SEQ ID NO: 1945343 - DNA, 25 bp, Homo sapien
ctaggcacactgaacaagagcatct

SEQ ID NO: 1945344 - DNA, 25 bp, Homo sapien
cactgaacaagagcatctattccag

SEQ ID NO: 1945345 - DNA, 25 bp, Homo sapien
cacactgaacaagagcatctattcc

SEQ ID NO: 1945346 - DNA, 25 bp, Homo sapien
ggcacactgaacaagagcatctatt

SEQ ID NO: 1945347 - DNA, 25 bp, Homo sapien
gaggatcatctccatgtagccgagg

SEQ ID NO: 1945348 - DNA, 25 bp, Homo sapien
gagaatttccatctaaacctcgagt

SEQ ID NO: 1945349 - DNA, 25 bp, Homo sapien
tagccgagggagctcacatacaaat

SEQ ID NO: 1945350 - DNA, 25 bp, Homo sapien
gacagtggctagcacatcttgggtg

SEQ ID NO: 1945351 - DNA, 25 bp, Homo sapien
ttgagtgaacatgacaacttgaacc

SEQ ID NO: 1945352 - DNA, 25 bp, Homo sapien
gttcttgagtgaacatgacaacttg

SEQ ID NO: 1945353 - DNA, 25 bp, Homo sapien
gtgaacatgacaacttgaacctctt

SEQ ID NO: 1945354 - DNA, 25 bp, Homo sapien
caagtgttcttgagtgaacatgaca

SEQ ID NO: 1945355 - DNA, 25 bp, Homo sapien
ttttgtggcattttccggatcaaga

SEQ ID NO: 1945356 - DNA, 25 bp, Homo sapien
cattttccggatcaagagactatca

SEQ ID NO: 1945357 - DNA, 25 bp, Homo sapien
tggcattttccggatcaagagacta

SEQ ID NO: 1945358 - DNA, 25 bp, Homo sapien
tttccggatcaagagactatcaaac

SEQ ID NO: 1945359 - DNA, 25 bp, Homo sapien
gtccatcagtattggaacttaacct

SEQ ID NO: 1945360 - DNA, 25 bp, Homo sapien
agaggacagactcacatactttccc

SEQ ID NO: 1945361 - DNA, 25 bp, Homo sapien
ttaagaatctttcaagccccagagg

SEQ ID NO: 1945362 - DNA, 25 bp, Homo sapien
tcccacaagttgaacgatagaaaaa

SEQ ID NO: 1945363 - DNA, 25 bp, Homo sapien
cacattttcacgagagcgaagtcta

SEQ ID NO: 1945364 - DNA, 25 bp, Homo sapien
gcacattttcacgagagcgaagtct

SEQ ID NO: 1945365 - DNA, 25 bp, Homo sapien
acgcacattttcacgagagcgaagt

SEQ ID NO: 1945366 - DNA, 25 bp, Homo sapien
acattttcacgagagcgaagtctac

SEQ ID NO: 1945367 - DNA, 25 bp, Homo sapien
gctgaatggtcaggaactccaagtc

SEQ ID NO: 1945368 - DNA, 25 bp, Homo sapien
gaattcttgctcttcggtcccagac

SEQ ID NO: 1945369 - DNA, 25 bp, Homo sapien
aatgaatgactgctgaatggtcagg

SEQ ID NO: 1945370 - DNA, 25 bp, Homo sapien
tctgtgtcccccttaggcaggtgag

SEQ ID NO: 1945371 - DNA, 25 bp, Homo sapien
caggtactctggacgctgaggcaag

SEQ ID NO: 1945372 - DNA, 25 bp, Homo sapien
ggtgggtagattgcctgagctctgg

SEQ ID NO: 1945373 - DNA, 25 bp, Homo sapien
gaggtgggtagattgcctgagctct

SEQ ID NO: 1945374 - DNA, 25 bp, Homo sapien
agtttgaaaccagcctgaccaacac

SEQ ID NO: 1945375 - DNA, 25 bp, Homo sapien
aatgcatccatgaaccgtggaaagg

SEQ ID NO: 1945376 - DNA, 25 bp, Homo sapien
tgctggaagtgaagtgcatttgcag

SEQ ID NO: 1945377 - DNA, 25 bp, Homo sapien
gacagagtgattggcgccatggcag

SEQ ID NO: 1945378 - DNA, 25 bp, Homo sapien
gaaattggcacttgacgggcgtcct

SEQ ID NO: 1945379 - DNA, 25 bp, Homo sapien
tccaagctctgtggaaccttcacat

SEQ ID NO: 1945380 - DNA, 25 bp, Homo sapien
cagccgtggatacccctgagtgtga

SEQ ID NO: 1945381 - DNA, 25 bp, Homo sapien
caacatggttgtagtgagaggctcc

SEQ ID NO: 1945382 - DNA, 25 bp, Homo sapien
gcatgatgctgaatgcagccgtgga

SEQ ID NO: 1945383 - DNA, 25 bp, Homo sapien
tctgtgtcctgcaaggctttgtctt

SEQ ID NO: 1945384 - DNA, 25 bp, Homo sapien
tcttggaccaagttcaaagctcctg

SEQ ID NO: 1945385 - DNA, 25 bp, Homo sapien
tatgagccattctgtactccctgca

SEQ ID NO: 1945386 - DNA, 25 bp, Homo sapien
gttgccaatccacaagctggcccag

SEQ ID NO: 1945387 - DNA, 25 bp, Homo sapien
acagttgttgccaatccacaagctg

SEQ ID NO: 1945388 - DNA, 25 bp, Homo sapien
actgtgctgcccgaggacgtaggga

SEQ ID NO: 1945389 - DNA, 25 bp, Homo sapien
aggacccagtggggtgaggactgac

SEQ ID NO: 1945390 - DNA, 25 bp, Homo sapien
cctcaggggaaggtgaggacccagt

SEQ ID NO: 1945391 - DNA, 25 bp, Homo sapien
ctcaggggaaggtgaggacccagtg

SEQ ID NO: 1945392 - DNA, 25 bp, Homo sapien
gtgaggacccagtggggtgaggact

SEQ ID NO: 1945393 - DNA, 25 bp, Homo sapien
ttatgggtttgttcaatgttggtgg

SEQ ID NO: 1945394 - DNA, 25 bp, Homo sapien
gttggtggcaatattacctttataa

SEQ ID NO: 1945395 - DNA, 25 bp, Homo sapien
ttcaatgttggtggcaatattacct

SEQ ID NO: 1945396 - DNA, 25 bp, Homo sapien
tgggtttgttcaatgttggtggcaa

SEQ ID NO: 1945397 - DNA, 25 bp, Homo sapien
tagatcagcatgtaagaaagatact

SEQ ID NO: 1945398 - DNA, 25 bp, Homo sapien
gtaagaaagatacttcacttcccat

SEQ ID NO: 1945399 - DNA, 25 bp, Homo sapien
ctagatcagcatgtaagaaagatac

SEQ ID NO: 1945400 - DNA, 25 bp, Homo sapien
catgtaagaaagatacttcacttcc

SEQ ID NO: 1945401 - DNA, 25 bp, Homo sapien
ttgccaagataatgcccactttgtg

SEQ ID NO: 1945402 - DNA, 25 bp, Homo sapien
gttttcttgccaagataatgcccac

SEQ ID NO: 1945403 - DNA, 25 bp, Homo sapien
tcttgccaagataatgcccactttg

SEQ ID NO: 1945404 - DNA, 25 bp, Homo sapien
tttcttgccaagataatgcccactt

SEQ ID NO: 1945405 - DNA, 25 bp, Homo sapien
ttgcaagcatgccttcctgtattac

SEQ ID NO: 1945406 - DNA, 25 bp, Homo sapien
ttgaatccagaggttgcaagcatgc

SEQ ID NO: 1945407 - DNA, 25 bp, Homo sapien
ggctctgtactctcaggcattgttt

SEQ ID NO: 1945408 - DNA, 25 bp, Homo sapien
ctctgtactctcaggcattgtttct

SEQ ID NO: 1945409 - DNA, 25 bp, Homo sapien
tcagaatggcctccacaaaggaatt

SEQ ID NO: 1945410 - DNA, 25 bp, Homo sapien
gaacattccagactatggcggtggc

SEQ ID NO: 1945411 - DNA, 25 bp, Homo sapien
cgtagatgattacttttatccggag

SEQ ID NO: 1945412 - DNA, 25 bp, Homo sapien
taaggaagtcgtgaagtttgatgct

SEQ ID NO: 1945413 - DNA, 25 bp, Homo sapien
ttttaaatgaactgacataaatgct

SEQ ID NO: 1945414 - DNA, 25 bp, Homo sapien
tattttctagcatagttggggcttg

SEQ ID NO: 1945415 - DNA, 25 bp, Homo sapien
tccgggtctgggttaatgcccatgg

SEQ ID NO: 1945416 - DNA, 25 bp, Homo sapien
gaactgacataaatgctctactgga

SEQ ID NO: 1945417 - DNA, 25 bp, Homo sapien
tcctgcggtccatctatggccactg

SEQ ID NO: 1945418 - DNA, 25 bp, Homo sapien
cctgcggtccatctatggccactgg

SEQ ID NO: 1945419 - DNA, 25 bp, Homo sapien
ctgcggtccatctatggccactgga

SEQ ID NO: 1945420 - DNA, 25 bp, Homo sapien
ctcctgcggtccatctatggccact

SEQ ID NO: 1945421 - DNA, 25 bp, Homo sapien
agggcaaaagatgggtttgatcttt

SEQ ID NO: 1945422 - DNA, 25 bp, Homo sapien
gggcaaaagatgggtttgatctttg

SEQ ID NO: 1945423 - DNA, 25 bp, Homo sapien
aagggcaaaagatgggtttgatctt

SEQ ID NO: 1945424 - DNA, 25 bp, Homo sapien
tgatctttgtgttccgcgcggtgct

SEQ ID NO: 1945425 - DNA, 25 bp, Homo sapien
tttcttgccgtttctgcagcgggct

SEQ ID NO: 1945426 - DNA, 25 bp, Homo sapien
gaactaatgctcattttagacccag

SEQ ID NO: 1945427 - DNA, 25 bp, Homo sapien
gttaccaggacggtgacaagtcttg

SEQ ID NO: 1945428 - DNA, 25 bp, Homo sapien
catgtttgcaccaagcatggagcaa

SEQ ID NO: 1945429 - DNA, 25 bp, Homo sapien
gggaagatggtgcagttaccacgtc

SEQ ID NO: 1945430 - DNA, 25 bp, Homo sapien
agatggtgcagttaccacgtcagac

SEQ ID NO: 1945431 - DNA, 25 bp, Homo sapien
tcgagaatccacatgcttgtgtggg

SEQ ID NO: 1945432 - DNA, 25 bp, Homo sapien
atttccaccatctttcgagaatcca

SEQ ID NO: 1945433 - DNA, 25 bp, Homo sapien
cacaaaaacggaatggaagttcttg

SEQ ID NO: 1945434 - DNA, 25 bp, Homo sapien
gccagatgattggtctctgaaacaa

SEQ ID NO: 1945435 - DNA, 25 bp, Homo sapien
ccctggttcagggtgctggccgatc

SEQ ID NO: 1945436 - DNA, 25 bp, Homo sapien
taaaaatgcaaatggccttgactca

SEQ ID NO: 1945437 - DNA, 25 bp, Homo sapien
ttcctcttctgagacgccaggtatc

SEQ ID NO: 1945438 - DNA, 25 bp, Homo sapien
cttctgagacgccaggtatctgggc

SEQ ID NO: 1945439 - DNA, 25 bp, Homo sapien
tcttctgagacgccaggtatctggg

SEQ ID NO: 1945440 - DNA, 25 bp, Homo sapien
cctcttctgagacgccaggtatctg

SEQ ID NO: 1945441 - DNA, 25 bp, Homo sapien
gaagtctctgtaggatgtctgatct

SEQ ID NO: 1945442 - DNA, 25 bp, Homo sapien
gaccagaagtctctgtaggatgtct

SEQ ID NO: 1945443 - DNA, 25 bp, Homo sapien
gaccagaccagaagtctctgtagga

SEQ ID NO: 1945444 - DNA, 25 bp, Homo sapien
tctctgtaggatgtctgatctcctc

SEQ ID NO: 1945445 - DNA, 25 bp, Homo sapien
tttaaagccggctgagccactctca

SEQ ID NO: 1945446 - DNA, 25 bp, Homo sapien
catctggtactctctggaagcttct

SEQ ID NO: 1945447 - DNA, 25 bp, Homo sapien
cacatgggacaacatctggtactct

SEQ ID NO: 1945448 - DNA, 25 bp, Homo sapien
gaagcttctacatgtcccccaagca

SEQ ID NO: 1945449 - DNA, 25 bp, Homo sapien
caagccgtagagttgtttagttctc

SEQ ID NO: 1945450 - DNA, 25 bp, Homo sapien
tcaagagggcgctccttgcaagccg

SEQ ID NO: 1945451 - DNA, 25 bp, Homo sapien
gttgtttagttctctccgggcctga

SEQ ID NO: 1945452 - DNA, 25 bp, Homo sapien
ttctctccgggcctgacacttgatt

SEQ ID NO: 1945453 - DNA, 25 bp, Homo sapien
gatgtggaacgagccctgctttcta

SEQ ID NO: 1945454 - DNA, 25 bp, Homo sapien
gactgaactgcagagcctgcgagca

SEQ ID NO: 1945455 - DNA, 25 bp, Homo sapien
aaagatggagttagtgtaagaagga

SEQ ID NO: 1945456 - DNA, 25 bp, Homo sapien
tgctttctagaaccagtcctgtcat

SEQ ID NO: 1945457 - DNA, 25 bp, Homo sapien
tcatccgcctctcccggtgaatatt

SEQ ID NO: 1945458 - DNA, 25 bp, Homo sapien
gatgtggccatagcagtgacaagca

SEQ ID NO: 1945459 - DNA, 25 bp, Homo sapien
gcagtgacaagcatctgtatccatg

SEQ ID NO: 1945460 - DNA, 25 bp, Homo sapien
aagcatctgtatccatgctcatccg

SEQ ID NO: 1945461 - DNA, 25 bp, Homo sapien
tacctggggtttatcttgactactc

SEQ ID NO: 1945462 - DNA, 25 bp, Homo sapien
ctgcctcgccgtttggtagaattta

SEQ ID NO: 1945463 - DNA, 25 bp, Homo sapien
gactcaggtattctgcagtgaatgg

SEQ ID NO: 1945464 - DNA, 25 bp, Homo sapien
tattctgcagtgaatggcactgctg

SEQ ID NO: 1945465 - DNA, 25 bp, Homo sapien
tgacttggaagataacggagcttcg

SEQ ID NO: 1945466 - DNA, 25 bp, Homo sapien
gagcttcgaagcttctagcagaata

SEQ ID NO: 1945467 - DNA, 25 bp, Homo sapien
ttaagcaggttagtggtgaattcca

SEQ ID NO: 1945468 - DNA, 25 bp, Homo sapien
gaagtctttcgtcttcagctacctg

SEQ ID NO: 1945469 - DNA, 25 bp, Homo sapien
ttaaagccgaggttttctcagatgt

SEQ ID NO: 1945470 - DNA, 25 bp, Homo sapien
agaagtgagatgcttggtgtggtga

SEQ ID NO: 1945471 - DNA, 25 bp, Homo sapien
taaagccgaggttttctcagatgtg

SEQ ID NO: 1945472 - DNA, 25 bp, Homo sapien
atgtgagaagtgagatgcttggtgt

SEQ ID NO: 1945473 - DNA, 25 bp, Homo sapien
tccttctcggcattgcccctgcaga

SEQ ID NO: 1945474 - DNA, 25 bp, Homo sapien
cttctcggcattgcccctgcagaga

SEQ ID NO: 1945475 - DNA, 25 bp, Homo sapien
ccttctcggcattgcccctgcagag

SEQ ID NO: 1945476 - DNA, 25 bp, Homo sapien
ctccttctcggcattgcccctgcag

SEQ ID NO: 1945477 - DNA, 25 bp, Homo sapien
tctaggctcgtaggccatttgaagg

SEQ ID NO: 1945478 - DNA, 25 bp, Homo sapien
ttccaaagctctggcgatagaatag

SEQ ID NO: 1945479 - DNA, 25 bp, Homo sapien
tctacagtatccatgccacgtgaag

SEQ ID NO: 1945480 - DNA, 25 bp, Homo sapien
gatagcagtaggagaagattcctcc

SEQ ID NO: 1945481 - DNA, 25 bp, Homo sapien
gctgccatgtccctttgaggtggcc

SEQ ID NO: 1945482 - DNA, 25 bp, Homo sapien
tgctgccatgtccctttgaggtggc

SEQ ID NO: 1945483 - DNA, 25 bp, Homo sapien
ctgccatgtccctttgaggtggcct

SEQ ID NO: 1945484 - DNA, 25 bp, Homo sapien
cccatgagcagcatgagtgccaaga

SEQ ID NO: 1945485 - DNA, 25 bp, Homo sapien
gctcataaggcagccagcgtgtttc

SEQ ID NO: 1945486 - DNA, 25 bp, Homo sapien
cattcacatgtgtgccatgtggacc

SEQ ID NO: 1945487 - DNA, 25 bp, Homo sapien
tgggcttctttcacgtgctcataag

SEQ ID NO: 1945488 - DNA, 25 bp, Homo sapien
actgcttcctgtagcttccaaacag

SEQ ID NO: 1945489 - DNA, 25 bp, Homo sapien
caaacagcctcctcagaagtgtcac

SEQ ID NO: 1945490 - DNA, 25 bp, Homo sapien
ccaaacagcctcctcagaagtgtca

SEQ ID NO: 1945491 - DNA, 25 bp, Homo sapien
tgtagcttccaaacagcctcctcag

SEQ ID NO: 1945492 - DNA, 25 bp, Homo sapien
ccaaacggcctcctcagaagtgtca

SEQ ID NO: 1945493 - DNA, 25 bp, Homo sapien
aacggcctcctcagaagtgtcacct

SEQ ID NO: 1945494 - DNA, 25 bp, Homo sapien
tgtagcttccaaacggcctcctcag

SEQ ID NO: 1945495 - DNA, 25 bp, Homo sapien
gtagcttccaaacggcctcctcaga

SEQ ID NO: 1945496 - DNA, 25 bp, Homo sapien
tcactcatgccatctaatcgcttca

SEQ ID NO: 1945497 - DNA, 25 bp, Homo sapien
ccctcttggtggttgtgtttggaca

SEQ ID NO: 1945498 - DNA, 25 bp, Homo sapien
gcaccatcatcagagcggcctgagc

SEQ ID NO: 1945499 - DNA, 25 bp, Homo sapien
gcttcactggattccgatctccaag

SEQ ID NO: 1945500 - DNA, 25 bp, Homo sapien
tccatgttgtggagccagtgtgact

SEQ ID NO: 1945501 - DNA, 25 bp, Homo sapien
gctcttgagtgggacagagatttga

SEQ ID NO: 1945502 - DNA, 25 bp, Homo sapien
cagagatttgatcctacgtttttcc

SEQ ID NO: 1945503 - DNA, 25 bp, Homo sapien
tgcaatgctgccttgtcgctgttcc

SEQ ID NO: 1945504 - DNA, 25 bp, Homo sapien
agaaccattgagtaatttgagcatg

SEQ ID NO: 1945505 - DNA, 25 bp, Homo sapien
gtgtaaagaaccattgagtaatttg

SEQ ID NO: 1945506 - DNA, 25 bp, Homo sapien
ccattgagtaatttgagcatgacaa

SEQ ID NO: 1945507 - DNA, 25 bp, Homo sapien
aaccattgagtaatttgagcatgac

SEQ ID NO: 1945508 - DNA, 25 bp, Homo sapien
ctattaaactctggcttggaaccta

SEQ ID NO: 1945509 - DNA, 25 bp, Homo sapien
tattaaactctggcttggaacctac

SEQ ID NO: 1945510 - DNA, 25 bp, Homo sapien
taatacaggaagtgttaggaggcgt

SEQ ID NO: 1945511 - DNA, 25 bp, Homo sapien
tgtccgcagtgtgctgacttgcctc

SEQ ID NO: 1945512 - DNA, 25 bp, Homo sapien
ggattcatgtgaccttgtccgcagt

SEQ ID NO: 1945513 - DNA, 25 bp, Homo sapien
tccccaagtttcgatatgcacaggt

SEQ ID NO: 1945514 - DNA, 25 bp, Homo sapien
gagcgccagctgagaggctcatttg

SEQ ID NO: 1945515 - DNA, 25 bp, Homo sapien
tcaactacagaagtagcctgaccca

SEQ ID NO: 1945516 - DNA, 25 bp, Homo sapien
gcctgacccattggcagaactgtct

SEQ ID NO: 1945517 - DNA, 25 bp, Homo sapien
gaagtgaatcaagcgggctcctgag

SEQ ID NO: 1945518 - DNA, 25 bp, Homo sapien
gagaggcagactgtgtagtagcctg

SEQ ID NO: 1945519 - DNA, 25 bp, Homo sapien
agacggctggacttgagcctgtgca

SEQ ID NO: 1945520 - DNA, 25 bp, Homo sapien
cccttggctagatcttgaggcgtgg

SEQ ID NO: 1945521 - DNA, 25 bp, Homo sapien
tgtgcaatcttcaccccttggctag

SEQ ID NO: 1945522 - DNA, 25 bp, Homo sapien
ggtctccttagctccctcgcccttc

SEQ ID NO: 1945523 - DNA, 25 bp, Homo sapien
tcattcctgggtctccttagctccc

SEQ ID NO: 1945524 - DNA, 25 bp, Homo sapien
tgggtctccttagctccctcgccct

SEQ ID NO: 1945525 - DNA, 25 bp, Homo sapien
tcctgggtctccttagctccctcgc

SEQ ID NO: 1945526 - DNA, 25 bp, Homo sapien
tcttggagtgccgactcgattgcca

SEQ ID NO: 1945527 - DNA, 25 bp, Homo sapien
ctctgcggccgctgacctcagtttt

SEQ ID NO: 1945528 - DNA, 25 bp, Homo sapien
tcgattgccatctccgctgcgaagc

SEQ ID NO: 1945529 - DNA, 25 bp, Homo sapien
ctggaaagtcccaattcgactgggt

SEQ ID NO: 1945530 - DNA, 25 bp, Homo sapien
gttgttccaaagaaagcgcgaggga

SEQ ID NO: 1945531 - DNA, 25 bp, Homo sapien
aaagaaagcgcgagggacatggtcc

SEQ ID NO: 1945532 - DNA, 25 bp, Homo sapien
cgcatccccggtagcgggcagagcc

SEQ ID NO: 1945533 - DNA, 25 bp, Homo sapien
agctcacagtgagcgcgtgctcgat

SEQ ID NO: 1945534 - DNA, 25 bp, Homo sapien
aggcagaaggcagtcatggagtaac

SEQ ID NO: 1945535 - DNA, 25 bp, Homo sapien
gaaggcagtcatggagtaacccatg

SEQ ID NO: 1945536 - DNA, 25 bp, Homo sapien
agaggcagaaggcagtcatggagta

SEQ ID NO: 1945537 - DNA, 25 bp, Homo sapien
cagaaggcagtcatggagtaaccca

SEQ ID NO: 1945538 - DNA, 25 bp, Homo sapien
caggttgcccaaggcaaggctctct

SEQ ID NO: 1945539 - DNA, 25 bp, Homo sapien
tggaggtcaggttgcccaaggcaag

SEQ ID NO: 1945540 - DNA, 25 bp, Homo sapien
aggctctctccaattagcctggcag

SEQ ID NO: 1945541 - DNA, 25 bp, Homo sapien
ggcaaggctctctccaattagcctg

SEQ ID NO: 1945542 - DNA, 25 bp, Homo sapien
gcagggaggctcccacgtgtagccc

SEQ ID NO: 1945543 - DNA, 25 bp, Homo sapien
agccactgactgactagttcttgga

SEQ ID NO: 1945544 - DNA, 25 bp, Homo sapien
tgcctctgggtcctcgagcctcgag

SEQ ID NO: 1945545 - DNA, 25 bp, Homo sapien
agttcttggatcgagccgcctgcct

SEQ ID NO: 1945546 - DNA, 25 bp, Homo sapien
gccatagacgatccagaaagcaggt

SEQ ID NO: 1945547 - DNA, 25 bp, Homo sapien
tctcttttgctttggagaactcgaa

SEQ ID NO: 1945548 - DNA, 25 bp, Homo sapien
ctctgtattccgagtttgatgtgga

SEQ ID NO: 1945549 - DNA, 25 bp, Homo sapien
aactcgaaatttgggagacggcttg

SEQ ID NO: 1945550 - DNA, 25 bp, Homo sapien
ggtttatcatcatgtttcgaagggc

SEQ ID NO: 1945551 - DNA, 25 bp, Homo sapien
gtccttgagggactgactcatccat

SEQ ID NO: 1945552 - DNA, 25 bp, Homo sapien
gaagggcatggacaactacagaaca

SEQ ID NO: 1945553 - DNA, 25 bp, Homo sapien
aggtagatgcatcccagtggggact

SEQ ID NO: 1945554 - DNA, 25 bp, Homo sapien
ggagactgggctactgctggtttta

SEQ ID NO: 1945555 - DNA, 25 bp, Homo sapien
cttttggcttttgtatgtagttacg

SEQ ID NO: 1945556 - DNA, 25 bp, Homo sapien
atgtagttacgggagactgggctac

SEQ ID NO: 1945557 - DNA, 25 bp, Homo sapien
actgggctactgctggttttacaca

SEQ ID NO: 1945558 - DNA, 25 bp, Homo sapien
aagcctcctggtattgttcacccca

SEQ ID NO: 1945559 - DNA, 25 bp, Homo sapien
tgttcaccccactgctcaaggggtg

SEQ ID NO: 1945560 - DNA, 25 bp, Homo sapien
tgtggggaatgcttgccaatccatg

SEQ ID NO: 1945561 - DNA, 25 bp, Homo sapien
gtccaaaccgcaagcctcctggtat

SEQ ID NO: 1945562 - DNA, 25 bp, Homo sapien
gatagcaatctatgtcatgcgtggc

SEQ ID NO: 1945563 - DNA, 25 bp, Homo sapien
tgtggttcatggaacgcaacgctcg

SEQ ID NO: 1945564 - DNA, 25 bp, Homo sapien
catgcgtggcattaatcactaaatc

SEQ ID NO: 1945565 - DNA, 25 bp, Homo sapien
tcggtggacctacatttggagcatg

SEQ ID NO: 1945566 - DNA, 25 bp, Homo sapien
ttagcagtaatcaagcccactccac

SEQ ID NO: 1945567 - DNA, 25 bp, Homo sapien
tctttgtctgcactgaaatttccca

SEQ ID NO: 1945568 - DNA, 25 bp, Homo sapien
gtcttgtctggaagacaaaatgctg

SEQ ID NO: 1945569 - DNA, 25 bp, Homo sapien
gagatcttgcatgggtcttgtctgg

SEQ ID NO: 1945570 - DNA, 25 bp, Homo sapien
taatggagctgttaggggagccatt

SEQ ID NO: 1945571 - DNA, 25 bp, Homo sapien
ttatcattgaaagcaccacttagtg

SEQ ID NO: 1945572 - DNA, 25 bp, Homo sapien
agcaccacttagtgaccagatggcc

SEQ ID NO: 1945573 - DNA, 25 bp, Homo sapien
tgttaggggagccattatcattgaa

SEQ ID NO: 1945574 - DNA, 25 bp, Homo sapien
cattctttgtcataagagaatttat

SEQ ID NO: 1945575 - DNA, 25 bp, Homo sapien
ttattataatgagggagctgggtac

SEQ ID NO: 1945576 - DNA, 25 bp, Homo sapien
tcattctttgtcataagagaattta

SEQ ID NO: 1945577 - DNA, 25 bp, Homo sapien
agaatttattataatgagggagctg

SEQ ID NO: 1945578 - DNA, 25 bp, Homo sapien
caggggctcttggatatgcttgcca

SEQ ID NO: 1945579 - DNA, 25 bp, Homo sapien
ctgcccattgttctaagtgccaggg

SEQ ID NO: 1945580 - DNA, 25 bp, Homo sapien
ttggatatgcttgccaaactcattg

SEQ ID NO: 1945581 - DNA, 25 bp, Homo sapien
cactgcccattgttctaagtgccag

SEQ ID NO: 1945582 - DNA, 25 bp, Homo sapien
tggaaaagcccattgatgtcttgaa

SEQ ID NO: 1945583 - DNA, 25 bp, Homo sapien
ggaaaagcccattgatgtcttgaaa

SEQ ID NO: 1945584 - DNA, 25 bp, Homo sapien
gaaaagcccattgatgtcttgaaac

SEQ ID NO: 1945585 - DNA, 25 bp, Homo sapien
ttggaaaagcccattgatgtcttga

SEQ ID NO: 1945586 - DNA, 25 bp, Homo sapien
tggtcagccgcattggccagagatc

SEQ ID NO: 1945587 - DNA, 25 bp, Homo sapien
cagagatcctcaaacactgttccac

SEQ ID NO: 1945588 - DNA, 25 bp, Homo sapien
tgcagtgacctaagaagcttcgtgg

SEQ ID NO: 1945589 - DNA, 25 bp, Homo sapien
taagaagcttcgtggtcagccgcat

SEQ ID NO: 1945590 - DNA, 25 bp, Homo sapien
gatctcctttagcacttgttacctg

SEQ ID NO: 1945591 - DNA, 25 bp, Homo sapien
tcctttagcacttgttacctgtggt

SEQ ID NO: 1945592 - DNA, 25 bp, Homo sapien
actatggaaagttgatctcctttag

SEQ ID NO: 1945593 - DNA, 25 bp, Homo sapien
ctagcagttaccactatggaaagtt

SEQ ID NO: 1945594 - DNA, 25 bp, Homo sapien
gatggcgtccaatgaagcctctttg

SEQ ID NO: 1945595 - DNA, 25 bp, Homo sapien
gtccaatgaagcctctttgatgaaa

SEQ ID NO: 1945596 - DNA, 25 bp, Homo sapien
cagtaggatgatggcgtccaatgaa

SEQ ID NO: 1945597 - DNA, 25 bp, Homo sapien
taggatgatggcgtccaatgaagcc

SEQ ID NO: 1945598 - DNA, 25 bp, Homo sapien
gctgatccagtattagtatttggag

SEQ ID NO: 1945599 - DNA, 25 bp, Homo sapien
tggaggtataaaggtatttgatgca

SEQ ID NO: 1945600 - DNA, 25 bp, Homo sapien
actcccaagttgtatgctgatccag

SEQ ID NO: 1945601 - DNA, 25 bp, Homo sapien
tgatttctgttagtaactcccaagt

SEQ ID NO: 1945602 - DNA, 25 bp, Homo sapien
tgcttttgtttgttagaatgagtag

SEQ ID NO: 1945603 - DNA, 25 bp, Homo sapien
gccagctaaattggtcctgggcctt

SEQ ID NO: 1945604 - DNA, 25 bp, Homo sapien
tgtttctccgccagctaaattggtc

SEQ ID NO: 1945605 - DNA, 25 bp, Homo sapien
ttctccactgagacggccgctcttg

SEQ ID NO: 1945606 - DNA, 25 bp, Homo sapien
ttgatgggttcctgtctttccagag

SEQ ID NO: 1945607 - DNA, 25 bp, Homo sapien
tgtgcatgatgagggaaaggagaag

SEQ ID NO: 1945608 - DNA, 25 bp, Homo sapien
agaagcaagcctagggtaattgatg

SEQ ID NO: 1945609 - DNA, 25 bp, Homo sapien
ctgccagaggatttgatggccattt

SEQ ID NO: 1945610 - DNA, 25 bp, Homo sapien
tctggtaggtgggtaagtgggtctg

SEQ ID NO: 1945611 - DNA, 25 bp, Homo sapien
tagagtcttggttgtcgtcaatgat

SEQ ID NO: 1945612 - DNA, 25 bp, Homo sapien
ttgtcgtcaatgatagtgaaagccg

SEQ ID NO: 1945613 - DNA, 25 bp, Homo sapien
caatgatagtgaaagccgtgaagtc

SEQ ID NO: 1945614 - DNA, 25 bp, Homo sapien
gtcacgcatgggaccatcagacttg

SEQ ID NO: 1945615 - DNA, 25 bp, Homo sapien
cacgcatgggaccatcagacttggt

SEQ ID NO: 1945616 - DNA, 25 bp, Homo sapien
catgggaccatcagacttggtgctt

SEQ ID NO: 1945617 - DNA, 25 bp, Homo sapien
cgcatgggaccatcagacttggtgc

SEQ ID NO: 1945618 - DNA, 25 bp, Homo sapien
gctttccagctctgccctgacatca

SEQ ID NO: 1945619 - DNA, 25 bp, Homo sapien
caggccagccagcaaggctttccag

SEQ ID NO: 1945620 - DNA, 25 bp, Homo sapien
gtccaactcggacacattcttcaag

SEQ ID NO: 1945621 - DNA, 25 bp, Homo sapien
tccaactcggacacattcttcaagg

SEQ ID NO: 1945622 - DNA, 25 bp, Homo sapien
tgaatcacaacccaaagtagccttc

SEQ ID NO: 1945623 - DNA, 25 bp, Homo sapien
caggtatcacaagggccttctcggt

SEQ ID NO: 1945624 - DNA, 25 bp, Homo sapien
ttctcccttgccagagaggcacgtt

SEQ ID NO: 1945625 - DNA, 25 bp, Homo sapien
gaggcacgttatccgccccgtggct

SEQ ID NO: 1945626 - DNA, 25 bp, Homo sapien
ctggttgtcagtgggaggaaatgaa

SEQ ID NO: 1945627 - DNA, 25 bp, Homo sapien
gttgtcagtgggaggaaatgaaaac

SEQ ID NO: 1945628 - DNA, 25 bp, Homo sapien
ttgtcagtgggaggaaatgaaaaca

SEQ ID NO: 1945629 - DNA, 25 bp, Homo sapien
ggttgtcagtgggaggaaatgaaaa

SEQ ID NO: 1945630 - DNA, 25 bp, Homo sapien
cccagtcttgggatgaacctgtgag

SEQ ID NO: 1945631 - DNA, 25 bp, Homo sapien
aagtagatcttgaaatgaaccttgc

SEQ ID NO: 1945632 - DNA, 25 bp, Homo sapien
gcagcgtgacagttgaagtagatct

SEQ ID NO: 1945633 - DNA, 25 bp, Homo sapien
tgagctcgattcttctctggagagg

SEQ ID NO: 1945634 - DNA, 25 bp, Homo sapien
tctttgtttagtgaatcgttagctt

SEQ ID NO: 1945635 - DNA, 25 bp, Homo sapien
gtttagtgaatcgttagcttttgct

SEQ ID NO: 1945636 - DNA, 25 bp, Homo sapien
tgagggggccagtcaggaaatattt

SEQ ID NO: 1945637 - DNA, 25 bp, Homo sapien
gagggggccagtcaggaaatatttc

SEQ ID NO: 1945638 - DNA, 25 bp, Homo sapien
tttgaagggcacagggtaagtagta

SEQ ID NO: 1945639 - DNA, 25 bp, Homo sapien
tgtgctgcgtactgtgggcttgcac

SEQ ID NO: 1945640 - DNA, 25 bp, Homo sapien
caccttttctcattgacctgcattg

SEQ ID NO: 1945641 - DNA, 25 bp, Homo sapien
gtagaggtgggaggcatgtttgaag

SEQ ID NO: 1945642 - DNA, 25 bp, Homo sapien
gtagcaggtgctggcgcttctccca

SEQ ID NO: 1945643 - DNA, 25 bp, Homo sapien
gcacggcggcactgcagtgttgcct

SEQ ID NO: 1945644 - DNA, 25 bp, Homo sapien
ccttgttgaagatgccggcttggaa

SEQ ID NO: 1945645 - DNA, 25 bp, Homo sapien
tcccacagtgtggagcatagagcag

SEQ ID NO: 1945646 - DNA, 25 bp, Homo sapien
gaatggtgggggatctttaagcaga

SEQ ID NO: 1945647 - DNA, 25 bp, Homo sapien
tggtgggggatctttaagcagaaac

SEQ ID NO: 1945648 - DNA, 25 bp, Homo sapien
gagaatggtgggggatctttaagca

SEQ ID NO: 1945649 - DNA, 25 bp, Homo sapien
atggtgggggatctttaagcagaaa

SEQ ID NO: 1945650 - DNA, 25 bp, Homo sapien
cagatgttctgtcagaagcattctg

SEQ ID NO: 1945651 - DNA, 25 bp, Homo sapien
tcagatgttctgtcagaagcattct

SEQ ID NO: 1945652 - DNA, 25 bp, Homo sapien
agatgttctgtcagaagcattctgt

SEQ ID NO: 1945653 - DNA, 25 bp, Homo sapien
gtcagatgttctgtcagaagcattc

SEQ ID NO: 1945654 - DNA, 25 bp, Homo sapien
aacgtctggtgtgtgctcatcagca

SEQ ID NO: 1945655 - DNA, 25 bp, Homo sapien
gcacaagtactgctgaacgtctggt

SEQ ID NO: 1945656 - DNA, 25 bp, Homo sapien
tagaggctgctcattcattagggta

SEQ ID NO: 1945657 - DNA, 25 bp, Homo sapien
tgtggccttttgtcacacttaggga

SEQ ID NO: 1945658 - DNA, 25 bp, Homo sapien
catctccatcggtgtattgggcatc

SEQ ID NO: 1945659 - DNA, 25 bp, Homo sapien
ctccatcggtgtattgggcatcccc

SEQ ID NO: 1945660 - DNA, 25 bp, Homo sapien
gtgggttcgttttcagctgtgctgg

SEQ ID NO: 1945661 - DNA, 25 bp, Homo sapien
ctgtcatctccatcggtgtattggg

SEQ ID NO: 1945662 - DNA, 25 bp, Homo sapien
taactatacacattcttggtgccac

SEQ ID NO: 1945663 - DNA, 25 bp, Homo sapien
gggcctcgccacacgttattatact

SEQ ID NO: 1945664 - DNA, 25 bp, Homo sapien
ggtgccacattattccagagtgact

SEQ ID NO: 1945665 - DNA, 25 bp, Homo sapien
ttaaattacgtctctaccagccctg

SEQ ID NO: 1945666 - DNA, 25 bp, Homo sapien
ctcaggcagatatcacttaagggct

SEQ ID NO: 1945667 - DNA, 25 bp, Homo sapien
ttgtccagagccaaattgtcgcagg

SEQ ID NO: 1945668 - DNA, 25 bp, Homo sapien
tgatgggcctgagttgtcactgagc

SEQ ID NO: 1945669 - DNA, 25 bp, Homo sapien
tgtaaaacacttcaagatccatgga

SEQ ID NO: 1945670 - DNA, 25 bp, Homo sapien
ataaatgttatcaagcacacatttc

SEQ ID NO: 1945671 - DNA, 25 bp, Homo sapien
tataaatgttatcaagcacacattt

SEQ ID NO: 1945672 - DNA, 25 bp, Homo sapien
tcatgcagttcactggggacttcct

SEQ ID NO: 1945673 - DNA, 25 bp, Homo sapien
tataggtatatgagggacgtacatg

SEQ ID NO: 1945674 - DNA, 25 bp, Homo sapien
caacaagggtaattctgctttccat

SEQ ID NO: 1945675 - DNA, 25 bp, Homo sapien
gagggacgtacatgtttttcaaggc

SEQ ID NO: 1945676 - DNA, 25 bp, Homo sapien
gaggcttcactgacacgggtgcagc

SEQ ID NO: 1945677 - DNA, 25 bp, Homo sapien
aagccaagaccagcgcttggtaggg

SEQ ID NO: 1945678 - DNA, 25 bp, Homo sapien
agcccgtttccactggccccagtgc

SEQ ID NO: 1945679 - DNA, 25 bp, Homo sapien
catagcaagaacgtccagtgtcaac

SEQ ID NO: 1945680 - DNA, 25 bp, Homo sapien
gagatgcagagtcccgtgaagttga

SEQ ID NO: 1945681 - DNA, 25 bp, Homo sapien
agatgcagagtcccgtgaagttgaa

SEQ ID NO: 1945682 - DNA, 25 bp, Homo sapien
tacttgagttctgtcagcctgttag

SEQ ID NO: 1945683 - DNA, 25 bp, Homo sapien
tggtttatagtttaactgctgcatc

SEQ ID NO: 1945684 - DNA, 25 bp, Homo sapien
gcaaatgcgcagtttcttgagatca

SEQ ID NO: 1945685 - DNA, 25 bp, Homo sapien
gcagctctggctgtaaacctcttgc

SEQ ID NO: 1945686 - DNA, 25 bp, Homo sapien
tctgggtcaggcaaatgtgcacaga

SEQ ID NO: 1945687 - DNA, 25 bp, Homo sapien
agttaaatgagcgtttgttcggtgc

SEQ ID NO: 1945688 - DNA, 25 bp, Homo sapien
aaatgagcgtttgttcggtgcatac

SEQ ID NO: 1945689 - DNA, 25 bp, Homo sapien
tgttcggtgcatactctgggtcagg

SEQ ID NO: 1945690 - DNA, 25 bp, Homo sapien
ccttctcgactgtcatgaagggttt

SEQ ID NO: 1945691 - DNA, 25 bp, Homo sapien
gcgctgtccttgatcgcccttttgc

SEQ ID NO: 1945692 - DNA, 25 bp, Homo sapien
gggtcgcttcctccaaggcgctgtc

SEQ ID NO: 1945693 - DNA, 25 bp, Homo sapien
tctcgactgtcatgaagggtttagg

SEQ ID NO: 1945694 - DNA, 25 bp, Homo sapien
cttcagcttgttgccatcggcactt

SEQ ID NO: 1945695 - DNA, 25 bp, Homo sapien
tgtggggcttgacccaacaactgac

SEQ ID NO: 1945696 - DNA, 25 bp, Homo sapien
acaactgacacctagaggccaggtc

SEQ ID NO: 1945697 - DNA, 25 bp, Homo sapien
gcttgttgccatcggcacttgtggg

SEQ ID NO: 1945698 - DNA, 25 bp, Homo sapien
tatgggtacatctaaacgctctttt

SEQ ID NO: 1945699 - DNA, 25 bp, Homo sapien
ctttctttgggttaagcacgctgcc

SEQ ID NO: 1945700 - DNA, 25 bp, Homo sapien
cctggcgaaggaagatatgggtaca

SEQ ID NO: 1945701 - DNA, 25 bp, Homo sapien
gaagatctctctcgtcattgactgt

SEQ ID NO: 1945702 - DNA, 25 bp, Homo sapien
ggtgggtgtccagggactacaaaga

SEQ ID NO: 1945703 - DNA, 25 bp, Homo sapien
aaagaactttcttgcctagtctctt

SEQ ID NO: 1945704 - DNA, 25 bp, Homo sapien
cttgcctagtctcttgctgcctggt

SEQ ID NO: 1945705 - DNA, 25 bp, Homo sapien
ctcttgctgcctggttgagtaggga

SEQ ID NO: 1945706 - DNA, 25 bp, Homo sapien
gctgcagggactctgtatgcacaga

SEQ ID NO: 1945707 - DNA, 25 bp, Homo sapien
tgttggcacattgctggtggctgca

SEQ ID NO: 1945708 - DNA, 25 bp, Homo sapien
gattctcctgtgctccgtcatgtcc

SEQ ID NO: 1945709 - DNA, 25 bp, Homo sapien
gacactgtccagctcggattctcct

SEQ ID NO: 1945710 - DNA, 25 bp, Homo sapien
gtccatcgaggacactcttccatct

SEQ ID NO: 1945711 - DNA, 25 bp, Homo sapien
actctgtgcagccacactcggcaag

SEQ ID NO: 1945712 - DNA, 25 bp, Homo sapien
ggcaagttccctgatggtgcccggc

SEQ ID NO: 1945713 - DNA, 25 bp, Homo sapien
tccatccgtccatcgaggacactct

SEQ ID NO: 1945714 - DNA, 25 bp, Homo sapien
ctggatgagattagggtgtcggaag

SEQ ID NO: 1945715 - DNA, 25 bp, Homo sapien
gatcattatatgttttccggaggcc

SEQ ID NO: 1945716 - DNA, 25 bp, Homo sapien
tccggaggccttcccctatcttaga

SEQ ID NO: 1945717 - DNA, 25 bp, Homo sapien
tgtcggaagaggtaatggaagaaaa

SEQ ID NO: 1945718 - DNA, 25 bp, Homo sapien
tgtgtagtggttggtaatatcagca

SEQ ID NO: 1945719 - DNA, 25 bp, Homo sapien
ctgtgtagtggttggtaatatcagc

SEQ ID NO: 1945720 - DNA, 25 bp, Homo sapien
gtgtagtggttggtaatatcagcat

SEQ ID NO: 1945721 - DNA, 25 bp, Homo sapien
ctaatcggaaccatttgctctagcc

SEQ ID NO: 1945722 - DNA, 25 bp, Homo sapien
tggtatgccatcaaagagcagtgca

SEQ ID NO: 1945723 - DNA, 25 bp, Homo sapien
tgttcatatattgtgctggctttgc

SEQ ID NO: 1945724 - DNA, 25 bp, Homo sapien
ctttgcttagcaattttgacaagga

SEQ ID NO: 1945725 - DNA, 25 bp, Homo sapien
ctctgaggctcaggagacgtggccc

SEQ ID NO: 1945726 - DNA, 25 bp, Homo sapien
caggctcccggcatgggtggaaaca

SEQ ID NO: 1945727 - DNA, 25 bp, Homo sapien
tggtaacccggtgcctttctagagc

SEQ ID NO: 1945728 - DNA, 25 bp, Homo sapien
tctgtggtcccattgtctccacgtc

SEQ ID NO: 1945729 - DNA, 25 bp, Homo sapien
ggaagagcttggtggcgctaggacg

SEQ ID NO: 1945730 - DNA, 25 bp, Homo sapien
gaagagcttggtggcgctaggacgt

SEQ ID NO: 1945731 - DNA, 25 bp, Homo sapien
agcttggtggcgctaggacgtcctt

SEQ ID NO: 1945732 - DNA, 25 bp, Homo sapien
agagcttggtggcgctaggacgtcc

SEQ ID NO: 1945733 - DNA, 25 bp, Homo sapien
ttctcccgaaccgtcccatgagatg

SEQ ID NO: 1945734 - DNA, 25 bp, Homo sapien
cagctgcccacctatattctcgaag

SEQ ID NO: 1945735 - DNA, 25 bp, Homo sapien
gttagtgtcagtggtcaacttctcc

SEQ ID NO: 1945736 - DNA, 25 bp, Homo sapien
cccgaaccgtcccatgagatgaaaa

SEQ ID NO: 1945737 - DNA, 25 bp, Homo sapien
aattgggtcctctttgttgtctgca

SEQ ID NO: 1945738 - DNA, 25 bp, Homo sapien
cgaaagctgtaagaattgggtcctc

SEQ ID NO: 1945739 - DNA, 25 bp, Homo sapien
agaaaccgaaagctgtaagaattgg

SEQ ID NO: 1945740 - DNA, 25 bp, Homo sapien
ctagaaaccgaaagctgtaagaatt

SEQ ID NO: 1945741 - DNA, 25 bp, Homo sapien
caagcaagtggctgcctggaaggcc

SEQ ID NO: 1945742 - DNA, 25 bp, Homo sapien
tattgagaatccaaaagacagcgtt

SEQ ID NO: 1945743 - DNA, 25 bp, Homo sapien
aacaacagagcgtggcaggaaggca

SEQ ID NO: 1945744 - DNA, 25 bp, Homo sapien
tttggcaatggagagcttgtcctgt

SEQ ID NO: 1945745 - DNA, 25 bp, Homo sapien
gacgctatccgtctcctagctcccc

SEQ ID NO: 1945746 - DNA, 25 bp, Homo sapien
tatttctcctgacgctatccgtctc

SEQ ID NO: 1945747 - DNA, 25 bp, Homo sapien
tcagcttccacttacgagacatgtg

SEQ ID NO: 1945748 - DNA, 25 bp, Homo sapien
ttcagcttccacttacgagacatgt

SEQ ID NO: 1945749 - DNA, 25 bp, Homo sapien
tcttttccagacttttctctttcat

SEQ ID NO: 1945750 - DNA, 25 bp, Homo sapien
ctgccttcctctgtccctgctttct

SEQ ID NO: 1945751 - DNA, 25 bp, Homo sapien
tgctttcttcttttccagacttttc

SEQ ID NO: 1945752 - DNA, 25 bp, Homo sapien
cctgctttcttcttttccagacttt

SEQ ID NO: 1945753 - DNA, 25 bp, Homo sapien
acacaagttattattcagagtcatc

SEQ ID NO: 1945754 - DNA, 25 bp, Homo sapien
aaaacacaagttattattcagagtc

SEQ ID NO: 1945755 - DNA, 25 bp, Homo sapien
cacaagttattattcagagtcatct

SEQ ID NO: 1945756 - DNA, 25 bp, Homo sapien
cagagtcatcttcagaatcacaaaa

SEQ ID NO: 1945757 - DNA, 25 bp, Homo sapien
attagagatggagctatggagacct

SEQ ID NO: 1945758 - DNA, 25 bp, Homo sapien
gagatggagctatggagaccttgat

SEQ ID NO: 1945759 - DNA, 25 bp, Homo sapien
tggagctatggagaccttgatataa

SEQ ID NO: 1945760 - DNA, 25 bp, Homo sapien
tagagatggagctatggagaccttg

SEQ ID NO: 1945761 - DNA, 25 bp, Homo sapien
ataaagttccggctccacagtggtg

SEQ ID NO: 1945762 - DNA, 25 bp, Homo sapien
cttgtgataaagttccggctccaca

SEQ ID NO: 1945763 - DNA, 25 bp, Homo sapien
aaagttccggctccacagtggtggc

SEQ ID NO: 1945764 - DNA, 25 bp, Homo sapien
cttttgcaaaagtaagttgtgagaa

SEQ ID NO: 1945765 - DNA, 25 bp, Homo sapien
cagcagatgttggtctctggcatca

SEQ ID NO: 1945766 - DNA, 25 bp, Homo sapien
cattctgcccaggaaatagaacctt

SEQ ID NO: 1945767 - DNA, 25 bp, Homo sapien
ccttaccagtaaatcacgtccttct

SEQ ID NO: 1945768 - DNA, 25 bp, Homo sapien
tgttctcattctgcccaggaaatag

SEQ ID NO: 1945769 - DNA, 25 bp, Homo sapien
taaagattccaaaacgcacaggaaa

SEQ ID NO: 1945770 - DNA, 25 bp, Homo sapien
ttccaaaacgcacaggaaagttgaa

SEQ ID NO: 1945771 - DNA, 25 bp, Homo sapien
tagtttaaagattccaaaacgcaca

SEQ ID NO: 1945772 - DNA, 25 bp, Homo sapien
gattccaaaacgcacaggaaagttg

SEQ ID NO: 1945773 - DNA, 25 bp, Homo sapien
tctgtatttaacaagtagagagtaa

SEQ ID NO: 1945774 - DNA, 25 bp, Homo sapien
gtagctgggaacaagtatgcctaag

SEQ ID NO: 1945775 - DNA, 25 bp, Homo sapien
gagtagaaagaaatgcatgctatgg

SEQ ID NO: 1945776 - DNA, 25 bp, Homo sapien
ccaaaccctagatgggagtagaaag

SEQ ID NO: 1945777 - DNA, 25 bp, Homo sapien
tattgacagtcagtgcagtacagtg

SEQ ID NO: 1945778 - DNA, 25 bp, Homo sapien
gagctgtggctctaggtatgcgaaa

SEQ ID NO: 1945779 - DNA, 25 bp, Homo sapien
cagagagggtcctactgccatgcct

SEQ ID NO: 1945780 - DNA, 25 bp, Homo sapien
tagctgcattccaagcaactgggca

SEQ ID NO: 1945781 - DNA, 25 bp, Homo sapien
aggagctggtgtccctgacggacca

SEQ ID NO: 1945782 - DNA, 25 bp, Homo sapien
ggagcactaccacctgacgggtgag

SEQ ID NO: 1945783 - DNA, 25 bp, Homo sapien
tcatcaagccggttcagagagtgct

SEQ ID NO: 1945784 - DNA, 25 bp, Homo sapien
tcaagtacccgctgctgctcaagga

SEQ ID NO: 1945785 - DNA, 25 bp, Homo sapien
aatacttgggtagaaatgatctcat

SEQ ID NO: 1945786 - DNA, 25 bp, Homo sapien
tgaaactagctaggcgtctgggcac

SEQ ID NO: 1945787 - DNA, 25 bp, Homo sapien
tctgggcactcctttagagcttaca

SEQ ID NO: 1945788 - DNA, 25 bp, Homo sapien
tggttaatcttaggtttcacgtgaa

SEQ ID NO: 1945789 - DNA, 25 bp, Homo sapien
cagaggtgatggatgtactagatcc

SEQ ID NO: 1945790 - DNA, 25 bp, Homo sapien
caaatattggtggttacctgcttac

SEQ ID NO: 1945791 - DNA, 25 bp, Homo sapien
tatcagcagcccgaatggagctcag

SEQ ID NO: 1945792 - DNA, 25 bp, Homo sapien
tctcaagccagcatgcaggaagtag

SEQ ID NO: 1945793 - DNA, 25 bp, Homo sapien
cgttcagctctagtttaaccttgga

SEQ ID NO: 1945794 - DNA, 25 bp, Homo sapien
gactcatacgtttggagagtgttac

SEQ ID NO: 1945795 - DNA, 25 bp, Homo sapien
caaatatgagcgaaagggaagtacc

SEQ ID NO: 1945796 - DNA, 25 bp, Homo sapien
tcactgagatgaacacagtgtcctc

SEQ ID NO: 1945797 - DNA, 25 bp, Homo sapien
gagaaactaaatgctggtggatagc

SEQ ID NO: 1945798 - DNA, 25 bp, Homo sapien
tccagagtaaccttgttttggtgac

SEQ ID NO: 1945799 - DNA, 25 bp, Homo sapien
cagcaggctgagtcatgcagtgacc

SEQ ID NO: 1945800 - DNA, 25 bp, Homo sapien
ccttagcagacttctgggagaaact

SEQ ID NO: 1945801 - DNA, 25 bp, Homo sapien
tagaaggacggccagaaaccatctt

SEQ ID NO: 1945802 - DNA, 25 bp, Homo sapien
cagttgtgttgcaggtatgactgac

SEQ ID NO: 1945803 - DNA, 25 bp, Homo sapien
gatgatatcagggtcatactcccca

SEQ ID NO: 1945804 - DNA, 25 bp, Homo sapien
tatgggaactgatccatacgaagtc

SEQ ID NO: 1945805 - DNA, 25 bp, Homo sapien
taatcgatagggcaccaagtaagca

SEQ ID NO: 1945806 - DNA, 25 bp, Homo sapien
taagccgcagtggttagtaggtaca

SEQ ID NO: 1945807 - DNA, 25 bp, Homo sapien
ggatcgcctggtacctcttaagaac

SEQ ID NO: 1945808 - DNA, 25 bp, Homo sapien
tctgagggagaacttcaggcgtcac

SEQ ID NO: 1945809 - DNA, 25 bp, Homo sapien
gagaagatgcataggaatatggtgt

SEQ ID NO: 1945810 - DNA, 25 bp, Homo sapien
atatggtgtgatcttcatgatcaaa

SEQ ID NO: 1945811 - DNA, 25 bp, Homo sapien
gatgcataggaatatggtgtgatct

SEQ ID NO: 1945812 - DNA, 25 bp, Homo sapien
gaagatgcataggaatatggtgtga

SEQ ID NO: 1945813 - DNA, 25 bp, Homo sapien
gaactttgctcaaggcgcagatccg

SEQ ID NO: 1945814 - DNA, 25 bp, Homo sapien
gggcagccctactaaagacatcgaa

SEQ ID NO: 1945815 - DNA, 25 bp, Homo sapien
caaagagagtgacatcctgagcgat

SEQ ID NO: 1945816 - DNA, 25 bp, Homo sapien
tgaggatttccgaggacccagacgt

SEQ ID NO: 1945817 - DNA, 25 bp, Homo sapien
tatccactttgagcaggtatcaaat

SEQ ID NO: 1945818 - DNA, 25 bp, Homo sapien
gatgaaactggtcagaatctgtaaa

SEQ ID NO: 1945819 - DNA, 25 bp, Homo sapien
gggcaaaatgtgcagatacttcatt

SEQ ID NO: 1945820 - DNA, 25 bp, Homo sapien
ttattgtggatcagaaacctagatg

SEQ ID NO: 1945821 - DNA, 25 bp, Homo sapien
caaaagagtacctatataagaagct

SEQ ID NO: 1945822 - DNA, 25 bp, Homo sapien
ggtcattggcatttgtatcgtcatt

SEQ ID NO: 1945823 - DNA, 25 bp, Homo sapien
tttgtatcgtcattctgtaaagaca

SEQ ID NO: 1945824 - DNA, 25 bp, Homo sapien
gtagtgcaaatcgacatctggtagg

SEQ ID NO: 1945825 - DNA, 25 bp, Homo sapien
gtctgtaattctctgcgtcatcctc

SEQ ID NO: 1945826 - DNA, 25 bp, Homo sapien
gctttttcttcgcttgagttcttct

SEQ ID NO: 1945827 - DNA, 25 bp, Homo sapien
ttttgctttttcttcgcttgagttc

SEQ ID NO: 1945828 - DNA, 25 bp, Homo sapien
agagtctgtaattctctgcgtcatc

SEQ ID NO: 1945829 - DNA, 25 bp, Homo sapien
gggtctatgtctgccaactctaaca

SEQ ID NO: 1945830 - DNA, 25 bp, Homo sapien
cgtgctttccaagcgctgcgcttca

SEQ ID NO: 1945831 - DNA, 25 bp, Homo sapien
tgtatacatcacagaggctcttaaa

SEQ ID NO: 1945832 - DNA, 25 bp, Homo sapien
aattatatgcaaagagttgtgggtc

SEQ ID NO: 1945833 - DNA, 25 bp, Homo sapien
agacagacagacagaaaaataagaa

SEQ ID NO: 1945834 - DNA, 25 bp, Homo sapien
cagacagacagaaaaataagaattt

SEQ ID NO: 1945835 - DNA, 25 bp, Homo sapien
ctgaggggaagacagacagacagaa

SEQ ID NO: 1945836 - DNA, 25 bp, Homo sapien
gacagacagaaaaataagaatttta

SEQ ID NO: 1945837 - DNA, 25 bp, Homo sapien
gaatcagggctatcaggtacagctg

SEQ ID NO: 1945838 - DNA, 25 bp, Homo sapien
cagaactgcttgaaatgctgcggag

SEQ ID NO: 1945839 - DNA, 25 bp, Homo sapien
taggctcagaccaattccaggattt

SEQ ID NO: 1945840 - DNA, 25 bp, Homo sapien
ccttggaaacgctagtgccagctct

SEQ ID NO: 1945841 - DNA, 25 bp, Homo sapien
tttttccaccagcttgaatggctgc

SEQ ID NO: 1945842 - DNA, 25 bp, Homo sapien
ttccttcggaactgaaatacattct

SEQ ID NO: 1945843 - DNA, 25 bp, Homo sapien
gccctcgatggcagtatttccttcg

SEQ ID NO: 1945844 - DNA, 25 bp, Homo sapien
tttccaccagcttgaatggctgctc

SEQ ID NO: 1945845 - DNA, 25 bp, Homo sapien
tgtatcaagggagtgaagtgcacca

SEQ ID NO: 1945846 - DNA, 25 bp, Homo sapien
ctgtatcaagggagtgaagtgcacc

SEQ ID NO: 1945847 - DNA, 25 bp, Homo sapien
ttcgttgtaagcaaacatattatca

SEQ ID NO: 1945848 - DNA, 25 bp, Homo sapien
cgttgtaagcaaacatattatcatt

SEQ ID NO: 1945849 - DNA, 25 bp, Homo sapien
cttcgttgtaagcaaacatattatc

SEQ ID NO: 1945850 - DNA, 25 bp, Homo sapien
tcgttgtaagcaaacatattatcat

SEQ ID NO: 1945851 - DNA, 25 bp, Homo sapien
caatcaactcatccttgtaaaacag

SEQ ID NO: 1945852 - DNA, 25 bp, Homo sapien
catgatatgtggcatagtgtgatca

SEQ ID NO: 1945853 - DNA, 25 bp, Homo sapien
gaggatgggctgtcaacagcctgtt

SEQ ID NO: 1945854 - DNA, 25 bp, Homo sapien
caggaggatgggctgtcaacagcct

SEQ ID NO: 1945855 - DNA, 25 bp, Homo sapien
tttccacgtacttcggtttcatctc

SEQ ID NO: 1945856 - DNA, 25 bp, Homo sapien
ctttccacgtacttcggtttcatct

SEQ ID NO: 1945857 - DNA, 25 bp, Homo sapien
gtttcatctctaggcatggaagatg

SEQ ID NO: 1945858 - DNA, 25 bp, Homo sapien
cggtttcatctctaggcatggaaga

SEQ ID NO: 1945859 - DNA, 25 bp, Homo sapien
taaatgccccgaaaggcataggcag

SEQ ID NO: 1945860 - DNA, 25 bp, Homo sapien
acatggagaaatcagccggctgcac

SEQ ID NO: 1945861 - DNA, 25 bp, Homo sapien
taaacttcccagatagagacaccac

SEQ ID NO: 1945862 - DNA, 25 bp, Homo sapien
gtcagtcagcagataatagatggca

SEQ ID NO: 1945863 - DNA, 25 bp, Homo sapien
tcagccttcttgtgaagtccagcag

SEQ ID NO: 1945864 - DNA, 25 bp, Homo sapien
cagctacagctgctcctactggatg

SEQ ID NO: 1945865 - DNA, 25 bp, Homo sapien
ccgaaggtttcaggtcagctacagc

SEQ ID NO: 1945866 - DNA, 25 bp, Homo sapien
tgctgagaatgtgccaagcggcctt

SEQ ID NO: 1945867 - DNA, 25 bp, Homo sapien
tgtggtcatcagggaaagagggact

SEQ ID NO: 1945868 - DNA, 25 bp, Homo sapien
acaaggggctgtggagtggatgcag

SEQ ID NO: 1945869 - DNA, 25 bp, Homo sapien
ctgtggagtggatgcagggtgtagg

SEQ ID NO: 1945870 - DNA, 25 bp, Homo sapien
gagggactgaagaagacaaggggct

SEQ ID NO: 1945871 - DNA, 25 bp, Homo sapien
caagacacactccactgacttcaga

SEQ ID NO: 1945872 - DNA, 25 bp, Homo sapien
gaagtggtcccaactgtcaggcatg

SEQ ID NO: 1945873 - DNA, 25 bp, Homo sapien
gtgtctggccactctctacacctcg

SEQ ID NO: 1945874 - DNA, 25 bp, Homo sapien
agaagacctgatctatgaatggcag

SEQ ID NO: 1945875 - DNA, 25 bp, Homo sapien
cacccttgtccctgcctcccgttct

SEQ ID NO: 1945876 - DNA, 25 bp, Homo sapien
cttgtccctgcctcccgttctccag

SEQ ID NO: 1945877 - DNA, 25 bp, Homo sapien
gcacccttgtccctgcctcccgttc

SEQ ID NO: 1945878 - DNA, 25 bp, Homo sapien
ccttgtccctgcctcccgttctcca

SEQ ID NO: 1945879 - DNA, 25 bp, Homo sapien
gagataaaatctaatccctgcctag

SEQ ID NO: 1945880 - DNA, 25 bp, Homo sapien
ccagtgacaaagagccaattctatc

SEQ ID NO: 1945881 - DNA, 25 bp, Homo sapien
tagatgcactctcttccagtacaga

SEQ ID NO: 1945882 - DNA, 25 bp, Homo sapien
tatcaattcttactagcagcctgct

SEQ ID NO: 1945883 - DNA, 25 bp, Homo sapien
catcacgggcctcgaggttacaact

SEQ ID NO: 1945884 - DNA, 25 bp, Homo sapien
ccaggtaaggagaatcccaggtaga

SEQ ID NO: 1945885 - DNA, 25 bp, Homo sapien
cagtccactttaggacatcacgggc

SEQ ID NO: 1945886 - DNA, 25 bp, Homo sapien
caggtagaggcagcaagtcactgat

SEQ ID NO: 1945887 - DNA, 25 bp, Homo sapien
tccatgtccaaaagccaatttaagg

SEQ ID NO: 1945888 - DNA, 25 bp, Homo sapien
tatgatagcaggtgaatcctaggca

SEQ ID NO: 1945889 - DNA, 25 bp, Homo sapien
tcctaggcacactgatgtctacaga

SEQ ID NO: 1945890 - DNA, 25 bp, Homo sapien
tgtggcctattaacatcctctacag

SEQ ID NO: 1945891 - DNA, 25 bp, Homo sapien
ccttgccgagtcatctgaagctgag

SEQ ID NO: 1945892 - DNA, 25 bp, Homo sapien
ttgctgatacacctttcaaactgga

SEQ ID NO: 1945893 - DNA, 25 bp, Homo sapien
gtacattaggaatacaagagctgcc

SEQ ID NO: 1945894 - DNA, 25 bp, Homo sapien
tatccactttgctatctggttggca

SEQ ID NO: 1945895 - DNA, 25 bp, Homo sapien
gagctgcctactccattcagatgct

SEQ ID NO: 1945896 - DNA, 25 bp, Homo sapien
taatgtcagaagctggttaacgact

SEQ ID NO: 1945897 - DNA, 25 bp, Homo sapien
taacgactgactagttctgagggtc

SEQ ID NO: 1945898 - DNA, 25 bp, Homo sapien
cagaagttcagttttggatgtggac

SEQ ID NO: 1945899 - DNA, 25 bp, Homo sapien
gcaggcccactagggtagttagaca

SEQ ID NO: 1945900 - DNA, 25 bp, Homo sapien
gagagaaagtccctgaaagcacaaa

SEQ ID NO: 1945901 - DNA, 25 bp, Homo sapien
tctaggagaagtcattcgcaatgtc

SEQ ID NO: 1945902 - DNA, 25 bp, Homo sapien
gtggcaccgatagcaagctccctga

SEQ ID NO: 1945903 - DNA, 25 bp, Homo sapien
gctccctgagctcgatttagaaaaa

SEQ ID NO: 1945904 - DNA, 25 bp, Homo sapien
cataataaggtctcccaaaaaagtg

SEQ ID NO: 1945905 - DNA, 25 bp, Homo sapien
gatgatgaatgatactgccaccagg

SEQ ID NO: 1945906 - DNA, 25 bp, Homo sapien
ctcaaatattgggtgaccgtgtaac

SEQ ID NO: 1945907 - DNA, 25 bp, Homo sapien
gccaccaggataacatgcatgaacc

SEQ ID NO: 1945908 - DNA, 25 bp, Homo sapien
tgtggttcttattcagaagtaaagt

SEQ ID NO: 1945909 - DNA, 25 bp, Homo sapien
cataaacaaaggttagatcctagag

SEQ ID NO: 1945910 - DNA, 25 bp, Homo sapien
aagtaaagtacagtgtcagtttgca

SEQ ID NO: 1945911 - DNA, 25 bp, Homo sapien
taagaactagctattcatattacga

SEQ ID NO: 1945912 - DNA, 25 bp, Homo sapien
ttccgatatactacaacaaataagc

SEQ ID NO: 1945913 - DNA, 25 bp, Homo sapien
ctaattccgatatactacaacaaat

SEQ ID NO: 1945914 - DNA, 25 bp, Homo sapien
attccgatatactacaacaaataag

SEQ ID NO: 1945915 - DNA, 25 bp, Homo sapien
taattccgatatactacaacaaata

SEQ ID NO: 1945916 - DNA, 25 bp, Homo sapien
taaagatgtgtcgaacattgcagag

SEQ ID NO: 1945917 - DNA, 25 bp, Homo sapien
cattgcagaggtactgagccataac

SEQ ID NO: 1945918 - DNA, 25 bp, Homo sapien
ccataacagagaggcgactacgctg

SEQ ID NO: 1945919 - DNA, 25 bp, Homo sapien
gcttgtcctggaatcgtaaagatgt

SEQ ID NO: 1945920 - DNA, 25 bp, Homo sapien
tccagtggcatcgatggctgttgca

SEQ ID NO: 1945921 - DNA, 25 bp, Homo sapien
taaggtatcacgtgccaatcctggg

SEQ ID NO: 1945922 - DNA, 25 bp, Homo sapien
tgttgcatccctgtgtttaccacac

SEQ ID NO: 1945923 - DNA, 25 bp, Homo sapien
caatcctgggtatggccaacagggc

SEQ ID NO: 1945924 - DNA, 25 bp, Homo sapien
ccacagcagttacatctgtcatcat

SEQ ID NO: 1945925 - DNA, 25 bp, Homo sapien
agttttaacttttggctgagctgct

SEQ ID NO: 1945926 - DNA, 25 bp, Homo sapien
tgctgctgggttcttgtgtgtgtaa

SEQ ID NO: 1945927 - DNA, 25 bp, Homo sapien
catcaaagttttaacttttggctga

SEQ ID NO: 1945928 - DNA, 25 bp, Homo sapien
aaaacacagactgtggtaaaaatgc

SEQ ID NO: 1945929 - DNA, 25 bp, Homo sapien
gaaaacacagactgtggtaaaaatg

SEQ ID NO: 1945930 - DNA, 25 bp, Homo sapien
aaacacagactgtggtaaaaatgca

SEQ ID NO: 1945931 - DNA, 25 bp, Homo sapien
ccacttgataatcagtggagttgaa

SEQ ID NO: 1945932 - DNA, 25 bp, Homo sapien
aacaaaaggtccatctctacaggaa

SEQ ID NO: 1945933 - DNA, 25 bp, Homo sapien
ttttcaagccacttgataatcagtg

SEQ ID NO: 1945934 - DNA, 25 bp, Homo sapien
cataaacaaaaggtccatctctaca

SEQ ID NO: 1945935 - DNA, 25 bp, Homo sapien
ctaaaaggcagatttccaataatat

SEQ ID NO: 1945936 - DNA, 25 bp, Homo sapien
aaaaggcagatttccaataatatgt

SEQ ID NO: 1945937 - DNA, 25 bp, Homo sapien
ggcagatttccaataatatgtacat

SEQ ID NO: 1945938 - DNA, 25 bp, Homo sapien
cagatttccaataatatgtacattt

SEQ ID NO: 1945939 - DNA, 25 bp, Homo sapien
gcaagtgcggcccaactgaaggagt

SEQ ID NO: 1945940 - DNA, 25 bp, Homo sapien
tgaatgtctgcaatacgtaggtggt

SEQ ID NO: 1945941 - DNA, 25 bp, Homo sapien
gaaacctgaagactgcatgctaaga

SEQ ID NO: 1945942 - DNA, 25 bp, Homo sapien
gagcaagagaaatcctccggaagac

SEQ ID NO: 1945943 - DNA, 25 bp, Homo sapien
ccatgaacaattctcagtttcccag

SEQ ID NO: 1945944 - DNA, 25 bp, Homo sapien
tctccatgaacaattctcagtttcc

SEQ ID NO: 1945945 - DNA, 25 bp, Homo sapien
tccatgaacaattctcagtttccca

SEQ ID NO: 1945946 - DNA, 25 bp, Homo sapien
catctccatgaacaattctcagttt

SEQ ID NO: 1945947 - DNA, 25 bp, Homo sapien
gcaggagtgaatgtatcaacgagaa

SEQ ID NO: 1945948 - DNA, 25 bp, Homo sapien
ggagtgaatgtatcaacgagaagaa

SEQ ID NO: 1945949 - DNA, 25 bp, Homo sapien
agtgaatgtatcaacgagaagaaac

SEQ ID NO: 1945950 - DNA, 25 bp, Homo sapien
caggagtgaatgtatcaacgagaag

SEQ ID NO: 1945951 - DNA, 25 bp, Homo sapien
tacagttgtcagtgggcctgcttct

SEQ ID NO: 1945952 - DNA, 25 bp, Homo sapien
ggtatgccaacgacacaaccttctt

SEQ ID NO: 1945953 - DNA, 25 bp, Homo sapien
ccttaggccaatgtatagggatgct

SEQ ID NO: 1945954 - DNA, 25 bp, Homo sapien
taatggcctcaatagttacgaaggt

SEQ ID NO: 1945955 - DNA, 25 bp, Homo sapien
tatttttgaaggaatgggccacgac

SEQ ID NO: 1945956 - DNA, 25 bp, Homo sapien
gaccctctgagagtgcttgttaaaa

SEQ ID NO: 1945957 - DNA, 25 bp, Homo sapien
ttcaaggtgtagtcaatagaccctc

SEQ ID NO: 1945958 - DNA, 25 bp, Homo sapien
gggccacgacatgcatagctattag

SEQ ID NO: 1945959 - DNA, 25 bp, Homo sapien
cagcgacgtcggcattaagaataga

SEQ ID NO: 1945960 - DNA, 25 bp, Homo sapien
ttcaaccaccagaagttcagcgacg

SEQ ID NO: 1945961 - DNA, 25 bp, Homo sapien
taaatcgagtgtccttttcaaccac

SEQ ID NO: 1945962 - DNA, 25 bp, Homo sapien
cagggcccacttcgtaaacataagc

SEQ ID NO: 1945963 - DNA, 25 bp, Homo sapien
ccccgaggcttagactgaacaggta

SEQ ID NO: 1945964 - DNA, 25 bp, Homo sapien
tcccctagggagcttggcatttatg

SEQ ID NO: 1945965 - DNA, 25 bp, Homo sapien
cgaacgcggagttttgtgagcaatc

SEQ ID NO: 1945966 - DNA, 25 bp, Homo sapien
ggcatttatgcagcctgccggcagg

SEQ ID NO: 1945967 - DNA, 25 bp, Homo sapien
aggacctgaccaaaagcccgtcgca

SEQ ID NO: 1945968 - DNA, 25 bp, Homo sapien
cggtgggaccggagttctgatacaa

SEQ ID NO: 1945969 - DNA, 25 bp, Homo sapien
ccgtcgcacgccagtgcctggacac

SEQ ID NO: 1945970 - DNA, 25 bp, Homo sapien
tacaaagaggtcgaaggacctgacc

SEQ ID NO: 1945971 - DNA, 25 bp, Homo sapien
ggagacatccggggagcactgctaa

SEQ ID NO: 1945972 - DNA, 25 bp, Homo sapien
gagacatccggggagcactgctaag

SEQ ID NO: 1945973 - DNA, 25 bp, Homo sapien
tttctcgaatcgtgggcaacggagg

SEQ ID NO: 1945974 - DNA, 25 bp, Homo sapien
aattctgtgatagctgcttcgctgc

SEQ ID NO: 1945975 - DNA, 25 bp, Homo sapien
aggaaattctgtgatagctgcttcg

SEQ ID NO: 1945976 - DNA, 25 bp, Homo sapien
gcagtcttaacaacttaatgatttc

SEQ ID NO: 1945977 - DNA, 25 bp, Homo sapien
gaccttcaccgccgctccgaaagaa

SEQ ID NO: 1945978 - DNA, 25 bp, Homo sapien
ccaggaccttcaccgccgctccgaa

SEQ ID NO: 1945979 - DNA, 25 bp, Homo sapien
ggaccttcaccgccgctccgaaaga

SEQ ID NO: 1945980 - DNA, 25 bp, Homo sapien
aggaccttcaccgccgctccgaaag

SEQ ID NO: 1945981 - DNA, 25 bp, Homo sapien
agaaggaaaaacgtgataactctga

SEQ ID NO: 1945982 - DNA, 25 bp, Homo sapien
aaggaaaaacgtgataactctgagc

SEQ ID NO: 1945983 - DNA, 25 bp, Homo sapien
tgagcagacggaccaaatgcttatt

SEQ ID NO: 1945984 - DNA, 25 bp, Homo sapien
gataactctgagcagacggaccaaa

SEQ ID NO: 1945985 - DNA, 25 bp, Homo sapien
caggttcaggttcagagtacagaac

SEQ ID NO: 1945986 - DNA, 25 bp, Homo sapien
tcttggtagaacaggttcaggttca

SEQ ID NO: 1945987 - DNA, 25 bp, Homo sapien
caaaggttccatcttggtagaacag

SEQ ID NO: 1945988 - DNA, 25 bp, Homo sapien
caggttcagagtacagaactgctcc

SEQ ID NO: 1945989 - DNA, 25 bp, Homo sapien
gaatcttgggatgattgttcctggg

SEQ ID NO: 1945990 - DNA, 25 bp, Homo sapien
cttgagaatcttgggatgattgttc

SEQ ID NO: 1945991 - DNA, 25 bp, Homo sapien
gagaatcttgggatgattgttcctg

SEQ ID NO: 1945992 - DNA, 25 bp, Homo sapien
aatcttgggatgattgttcctgggg

SEQ ID NO: 1945993 - DNA, 25 bp, Homo sapien
tgcccctgcattgggttgagggcca

SEQ ID NO: 1945994 - DNA, 25 bp, Homo sapien
gcccctgcattgggttgagggccat

SEQ ID NO: 1945995 - DNA, 25 bp, Homo sapien
gagccgagcattgggaggaatgcag

SEQ ID NO: 1945996 - DNA, 25 bp, Homo sapien
cagaggataaaggttctctgatcat

SEQ ID NO: 1945997 - DNA, 25 bp, Homo sapien
aagagccgagcattgggaggaatgc

SEQ ID NO: 1945998 - DNA, 25 bp, Homo sapien
aggaatgcagaggataaaggttctc

SEQ ID NO: 1945999 - DNA, 25 bp, Homo sapien
tactgaattggtctttcactacctc

SEQ ID NO: 1946000 - DNA, 25 bp, Homo sapien
ggttccatacctgctaattatatca

SEQ ID NO: 1946001 - DNA, 25 bp, Homo sapien
tttgttgccaagtgttcccatatgg

SEQ ID NO: 1946002 - DNA, 25 bp, Homo sapien
tatggccatttggtctggtaagtct

SEQ ID NO: 1946003 - DNA, 25 bp, Homo sapien
tggaaagcatggcttaggaggggca

SEQ ID NO: 1946004 - DNA, 25 bp, Homo sapien
agttttattacagtgctggaaagca

SEQ ID NO: 1946005 - DNA, 25 bp, Homo sapien
gggacagagtgtgccattgagcttt

SEQ ID NO: 1946006 - DNA, 25 bp, Homo sapien
tggagaatacaccagagcttgagtc

SEQ ID NO: 1946007 - DNA, 25 bp, Homo sapien
ccattgagctttggcatgtggagaa

SEQ ID NO: 1946008 - DNA, 25 bp, Homo sapien
acaggcaatgccataggctcccgct

SEQ ID NO: 1946009 - DNA, 25 bp, Homo sapien
ccctgttgtttcttcgcgtgagaga

SEQ ID NO: 1946010 - DNA, 25 bp, Homo sapien
gagatgtgttcctgagtggagccca

SEQ ID NO: 1946011 - DNA, 25 bp, Homo sapien
cgtgagagaatgaagcccgggctct

SEQ ID NO: 1946012 - DNA, 25 bp, Homo sapien
cagcttgctcgtcaatatcttagga

SEQ ID NO: 1946013 - DNA, 25 bp, Homo sapien
ccttcatggtaacgtcagcaggcat

SEQ ID NO: 1946014 - DNA, 25 bp, Homo sapien
atggtaacgtcagcaggcatcagca

SEQ ID NO: 1946015 - DNA, 25 bp, Homo sapien
agccttcatggtaacgtcagcaggc

SEQ ID NO: 1946016 - DNA, 25 bp, Homo sapien
ttcatggtaacgtcagcaggcatca

SEQ ID NO: 1946017 - DNA, 25 bp, Homo sapien
tactctgtattttggtcacccgtta

SEQ ID NO: 1946018 - DNA, 25 bp, Homo sapien
gctgactgagcaaacccatgaagat

SEQ ID NO: 1946019 - DNA, 25 bp, Homo sapien
tttctgctaaagaagctgactgagc

SEQ ID NO: 1946020 - DNA, 25 bp, Homo sapien
tcctttgatggagcataatgctttc

SEQ ID NO: 1946021 - DNA, 25 bp, Homo sapien
gctaaggaagtatggtatagtgtac

SEQ ID NO: 1946022 - DNA, 25 bp, Homo sapien
gggagctcatatcaacaggccgtca

SEQ ID NO: 1946023 - DNA, 25 bp, Homo sapien
tattattcaccagttcccaactggg

SEQ ID NO: 1946024 - DNA, 25 bp, Homo sapien
caggccgtcacaggaattcctggtg

SEQ ID NO: 1946025 - DNA, 25 bp, Homo sapien
aatgcctggacttgacctccaaagt

SEQ ID NO: 1946026 - DNA, 25 bp, Homo sapien
tgtaatagaaatgaacacctctggg

SEQ ID NO: 1946027 - DNA, 25 bp, Homo sapien
tgaagtgtcctcgagagagctttag

SEQ ID NO: 1946028 - DNA, 25 bp, Homo sapien
tagaagctctccttgttgtaataga

SEQ ID NO: 1946029 - DNA, 25 bp, Homo sapien
gggtcagctgatgaatacaagtggc

SEQ ID NO: 1946030 - DNA, 25 bp, Homo sapien
actccagcagcccttgcatttctcc

SEQ ID NO: 1946031 - DNA, 25 bp, Homo sapien
tccagcagcccttgcatttctccag

SEQ ID NO: 1946032 - DNA, 25 bp, Homo sapien
cagcagcccttgcatttctccagag

SEQ ID NO: 1946033 - DNA, 25 bp, Homo sapien
gcagcccttgcatttctccagagaa

SEQ ID NO: 1946034 - DNA, 25 bp, Homo sapien
gattgtaggcaatctgcttgaactc

SEQ ID NO: 1946035 - DNA, 25 bp, Homo sapien
tccagttgggcctcccatagaaggt

SEQ ID NO: 1946036 - DNA, 25 bp, Homo sapien
tgggcctcccatagaaggtcttctg

SEQ ID NO: 1946037 - DNA, 25 bp, Homo sapien
taatcacgtcagtattttcgtccca

SEQ ID NO: 1946038 - DNA, 25 bp, Homo sapien
gcagagggtgttaagtgacacgcca

SEQ ID NO: 1946039 - DNA, 25 bp, Homo sapien
aaagccatggacgtgtgactgtgca

SEQ ID NO: 1946040 - DNA, 25 bp, Homo sapien
taggactccgagcaaaaagaaggtg

SEQ ID NO: 1946041 - DNA, 25 bp, Homo sapien
ggtgaacacgcatcctttggtggct

SEQ ID NO: 1946042 - DNA, 25 bp, Homo sapien
ttccatctgtcccttctgttcttgt

SEQ ID NO: 1946043 - DNA, 25 bp, Homo sapien
ccttcacaatacctcttccatctgt

SEQ ID NO: 1946044 - DNA, 25 bp, Homo sapien
catctgtcccttctgttcttgtcat

SEQ ID NO: 1946045 - DNA, 25 bp, Homo sapien
cttcacaatacctcttccatctgtc

SEQ ID NO: 1946046 - DNA, 25 bp, Homo sapien
tcccggcaaatccagtagaaataca

SEQ ID NO: 1946047 - DNA, 25 bp, Homo sapien
tcaaaagctcttgcatcccggcaaa

SEQ ID NO: 1946048 - DNA, 25 bp, Homo sapien
ctgctcactcatccgtgtttccagg

SEQ ID NO: 1946049 - DNA, 25 bp, Homo sapien
tttccagggagagtaagagatcagc

SEQ ID NO: 1946050 - DNA, 25 bp, Homo sapien
actttttgcttcctcgtaatggctt

SEQ ID NO: 1946051 - DNA, 25 bp, Homo sapien
ttctcgtggcctagctgcatgtcag

SEQ ID NO: 1946052 - DNA, 25 bp, Homo sapien
tgcatgtcagcgtccttagggtttg

SEQ ID NO: 1946053 - DNA, 25 bp, Homo sapien
tccctccgtaattgacttgtaagtg

SEQ ID NO: 1946054 - DNA, 25 bp, Homo sapien
caggctcggtgtgtgctaaactcac

SEQ ID NO: 1946055 - DNA, 25 bp, Homo sapien
tagtgcctgctgctggtcctaagag

SEQ ID NO: 1946056 - DNA, 25 bp, Homo sapien
ctaaagagactaaggagaggttgcc

SEQ ID NO: 1946057 - DNA, 25 bp, Homo sapien
ttaatattgcgaactgccacccagt

SEQ ID NO: 1946058 - DNA, 25 bp, Homo sapien
tccacgagaggaggacatcgaattg

SEQ ID NO: 1946059 - DNA, 25 bp, Homo sapien
atggcaatgaagcaataaaatttat

SEQ ID NO: 1946060 - DNA, 25 bp, Homo sapien
taatggcaatgaagcaataaaattt

SEQ ID NO: 1946061 - DNA, 25 bp, Homo sapien
ctgtaatggcaatgaagcaataaaa

SEQ ID NO: 1946062 - DNA, 25 bp, Homo sapien
tgtaatggcaatgaagcaataaaat

SEQ ID NO: 1946063 - DNA, 25 bp, Homo sapien
cttgctcagcttcagtggggtctgt

SEQ ID NO: 1946064 - DNA, 25 bp, Homo sapien
agcttcagtggggtctgtgcctcac

SEQ ID NO: 1946065 - DNA, 25 bp, Homo sapien
ctcagcttcagtggggtctgtgcct

SEQ ID NO: 1946066 - DNA, 25 bp, Homo sapien
tgctcagcttcagtggggtctgtgc

SEQ ID NO: 1946067 - DNA, 25 bp, Homo sapien
cagcgaagggagtgactccgatccc

SEQ ID NO: 1946068 - DNA, 25 bp, Homo sapien
tagatttcagaagagcagcgaaggg

SEQ ID NO: 1946069 - DNA, 25 bp, Homo sapien
gaaatacatctgtcagggcagttcc

SEQ ID NO: 1946070 - DNA, 25 bp, Homo sapien
cacacactgggtagtgaaatacatc

SEQ ID NO: 1946071 - DNA, 25 bp, Homo sapien
tactgcaatttatacatgagagaaa

SEQ ID NO: 1946072 - DNA, 25 bp, Homo sapien
tataatactgcaatttatacatgag

SEQ ID NO: 1946073 - DNA, 25 bp, Homo sapien
tgcaatttatacatgagagaaatgg

SEQ ID NO: 1946074 - DNA, 25 bp, Homo sapien
atttatacatgagagaaatgggcac

SEQ ID NO: 1946075 - DNA, 25 bp, Homo sapien
cccggatgtgcacgctgaaaaagtc

SEQ ID NO: 1946076 - DNA, 25 bp, Homo sapien
aaggcctccagtagcgctgctgtcc

SEQ ID NO: 1946077 - DNA, 25 bp, Homo sapien
gcccggatgtgcacgctgaaaaagt

SEQ ID NO: 1946078 - DNA, 25 bp, Homo sapien
cagtagcgctgctgtccagtctcct

SEQ ID NO: 1946079 - DNA, 25 bp, Homo sapien
tgccctggcgccattttaaagccac

SEQ ID NO: 1946080 - DNA, 25 bp, Homo sapien
cagcgaagatatggctgggcactgc

SEQ ID NO: 1946081 - DNA, 25 bp, Homo sapien
tcatgtgaagttccaggactccaga

SEQ ID NO: 1946082 - DNA, 25 bp, Homo sapien
tgcaccaagatgtactgccctggcg

SEQ ID NO: 1946083 - DNA, 25 bp, Homo sapien
gacaacttcttgttgaaatcgccag

SEQ ID NO: 1946084 - DNA, 25 bp, Homo sapien
tattctttcacatgcatacaagacc

SEQ ID NO: 1946085 - DNA, 25 bp, Homo sapien
gccagaacctaattattctttcaca

SEQ ID NO: 1946086 - DNA, 25 bp, Homo sapien
tacaagaccacagggcctaaaatcc

SEQ ID NO: 1946087 - DNA, 25 bp, Homo sapien
tggtccctcttctcacctacatcaa

SEQ ID NO: 1946088 - DNA, 25 bp, Homo sapien
ggtctcttcgcatggtccctcttct

SEQ ID NO: 1946089 - DNA, 25 bp, Homo sapien
gatttctgggtctcttcgcatggtc

SEQ ID NO: 1946090 - DNA, 25 bp, Homo sapien
ctttctcgttttgtctattgctttt

SEQ ID NO: 1946091 - DNA, 25 bp, Homo sapien
gcctggagcccctggaagtcagggc

SEQ ID NO: 1946092 - DNA, 25 bp, Homo sapien
tgtgcctggagcccctggaagtcag

SEQ ID NO: 1946093 - DNA, 25 bp, Homo sapien
ttgtgcctggagcccctggaagtca

SEQ ID NO: 1946094 - DNA, 25 bp, Homo sapien
ctgtgttgtgcctggagcccctgga

SEQ ID NO: 1946095 - DNA, 25 bp, Homo sapien
gggcaggtcccacgtgtctgaatcc

SEQ ID NO: 1946096 - DNA, 25 bp, Homo sapien
tttctagacaatcagatctcctggg

SEQ ID NO: 1946097 - DNA, 25 bp, Homo sapien
tgaagttcgctgaattgactctacc

SEQ ID NO: 1946098 - DNA, 25 bp, Homo sapien
aatgcacttaggcactcggtgaagt

SEQ ID NO: 1946099 - DNA, 25 bp, Homo sapien
cacggggcattgggccactgtctgc

SEQ ID NO: 1946100 - DNA, 25 bp, Homo sapien
ggcacggggcattgggccactgtct

SEQ ID NO: 1946101 - DNA, 25 bp, Homo sapien
ccttgccagaaaattgaggcacggg

SEQ ID NO: 1946102 - DNA, 25 bp, Homo sapien
cgagggttccttgccagaaaattga

SEQ ID NO: 1946103 - DNA, 25 bp, Homo sapien
gagagagactgtcttgggtttggcc

SEQ ID NO: 1946104 - DNA, 25 bp, Homo sapien
agagagactgtcttgggtttggcct

SEQ ID NO: 1946105 - DNA, 25 bp, Homo sapien
gctcctagggttccttcttggtgca

SEQ ID NO: 1946106 - DNA, 25 bp, Homo sapien
gctttggtacaagctcctagggttc

SEQ ID NO: 1946107 - DNA, 25 bp, Homo sapien
ctagggttccttcttggtgcacaga

SEQ ID NO: 1946108 - DNA, 25 bp, Homo sapien
ctttgacaagtagctttggtacaag

SEQ ID NO: 1946109 - DNA, 25 bp, Homo sapien
cagaggcacaggcagtcttttaggg

SEQ ID NO: 1946110 - DNA, 25 bp, Homo sapien
caggcagtcttttagggtaaaatgc

SEQ ID NO: 1946111 - DNA, 25 bp, Homo sapien
cacaggcagtcttttagggtaaaat

SEQ ID NO: 1946112 - DNA, 25 bp, Homo sapien
ggcagtcttttagggtaaaatgcac

SEQ ID NO: 1946113 - DNA, 25 bp, Homo sapien
cagtggcagcggcagaactgccacc

SEQ ID NO: 1946114 - DNA, 25 bp, Homo sapien
acgggagaagtcttaggcacaggca

SEQ ID NO: 1946115 - DNA, 25 bp, Homo sapien
caccagctgagggaccacgggagaa

SEQ ID NO: 1946116 - DNA, 25 bp, Homo sapien
ggcacttcttccgtggagaatgtgt

SEQ ID NO: 1946117 - DNA, 25 bp, Homo sapien
tggaagggcaaatcccaaagcgttg

SEQ ID NO: 1946118 - DNA, 25 bp, Homo sapien
ggcaaatcccaaagcgttgtctgtg

SEQ ID NO: 1946119 - DNA, 25 bp, Homo sapien
gagattggaggcgttgttgacttgt

SEQ ID NO: 1946120 - DNA, 25 bp, Homo sapien
ttgtggaagggcaaatcccaaagcg

SEQ ID NO: 1946121 - DNA, 25 bp, Homo sapien
gcagctatgcgcttgctcttccagg

SEQ ID NO: 1946122 - DNA, 25 bp, Homo sapien
agagtcggaggccacctccgggaca

SEQ ID NO: 1946123 - DNA, 25 bp, Homo sapien
ttgctgctggcaagccaaaaagggc

SEQ ID NO: 1946124 - DNA, 25 bp, Homo sapien
gcaggtgtgacttcctaggccatgc

SEQ ID NO: 1946125 - DNA, 25 bp, Homo sapien
gaccggtgacgcctgctattgtcct

SEQ ID NO: 1946126 - DNA, 25 bp, Homo sapien
gaggcctgtctgatgaactcagttg

SEQ ID NO: 1946127 - DNA, 25 bp, Homo sapien
cgaggtcatgatcaagactaaagcc

SEQ ID NO: 1946128 - DNA, 25 bp, Homo sapien
tgtaccagaacaactcataggaggc

SEQ ID NO: 1946129 - DNA, 25 bp, Homo sapien
tatagcgttcctgattagaggactg

SEQ ID NO: 1946130 - DNA, 25 bp, Homo sapien
attagaggactggaaaaggacggat

SEQ ID NO: 1946131 - DNA, 25 bp, Homo sapien
taaaagcttttcaatatagcgttcc

SEQ ID NO: 1946132 - DNA, 25 bp, Homo sapien
acggatttttcaggggagaagcttg

SEQ ID NO: 1946133 - DNA, 25 bp, Homo sapien
ggctccagtggtagcgttccaggtt

SEQ ID NO: 1946134 - DNA, 25 bp, Homo sapien
tagctctcgttaggggtgttgccca

SEQ ID NO: 1946135 - DNA, 25 bp, Homo sapien
ttggaaagtgcggccagaagtccct

SEQ ID NO: 1946136 - DNA, 25 bp, Homo sapien
ggttgaagaaatgcgccacgatgtg

SEQ ID NO: 1946137 - DNA, 25 bp, Homo sapien
caaggaaaagtgatgtatttacaca

SEQ ID NO: 1946138 - DNA, 25 bp, Homo sapien
acagtgtctctgtgctcaagtttct

SEQ ID NO: 1946139 - DNA, 25 bp, Homo sapien
ggcttgctttctccctagttactaa

SEQ ID NO: 1946140 - DNA, 25 bp, Homo sapien
aaatacagtgtctctgtgctcaagt

SEQ ID NO: 1946141 - DNA, 25 bp, Homo sapien
actcccgctgggtggccagttgata

SEQ ID NO: 1946142 - DNA, 25 bp, Homo sapien
caaatgaaactcccgctgggtggcc

SEQ ID NO: 1946143 - DNA, 25 bp, Homo sapien
gcaaatgaaactcccgctgggtggc

SEQ ID NO: 1946144 - DNA, 25 bp, Homo sapien
aaactcccgctgggtggccagttga

SEQ ID NO: 1946145 - DNA, 25 bp, Homo sapien
ctcttgcctgctggctctcactcat

SEQ ID NO: 1946146 - DNA, 25 bp, Homo sapien
ttcccagtgattccttcaacctctc

SEQ ID NO: 1946147 - DNA, 25 bp, Homo sapien
tctcttgcctgctggctctcactca

SEQ ID NO: 1946148 - DNA, 25 bp, Homo sapien
ctctcttgcctgctggctctcactc

SEQ ID NO: 1946149 - DNA, 25 bp, Homo sapien
ccataggcgaccagtttgtgaaatc

SEQ ID NO: 1946150 - DNA, 25 bp, Homo sapien
tgtgaaatctgaggtttttgtctaa

SEQ ID NO: 1946151 - DNA, 25 bp, Homo sapien
gtctaattgcctcctccacggtcct

SEQ ID NO: 1946152 - DNA, 25 bp, Homo sapien
agctatcccataggcgaccagtttg

SEQ ID NO: 1946153 - DNA, 25 bp, Homo sapien
taaaattcaggcacagtgcggatgc

SEQ ID NO: 1946154 - DNA, 25 bp, Homo sapien
gacaggtattagaattagcatgcag

SEQ ID NO: 1946155 - DNA, 25 bp, Homo sapien
gaaataaggtttcgactgacaggta

SEQ ID NO: 1946156 - DNA, 25 bp, Homo sapien
aatacttgttcctcttatgaatgaa

SEQ ID NO: 1946157 - DNA, 25 bp, Homo sapien
aataactcgtgtgtaatggaaagac

SEQ ID NO: 1946158 - DNA, 25 bp, Homo sapien
tagaacgtgtcaataaacagataaa

SEQ ID NO: 1946159 - DNA, 25 bp, Homo sapien
tcctcctcttcataccagtagaacg

SEQ ID NO: 1946160 - DNA, 25 bp, Homo sapien
acccaaaataactcgtgtgtaatgg

SEQ ID NO: 1946161 - DNA, 25 bp, Homo sapien
gagaccctcattcaaaatccagcac

SEQ ID NO: 1946162 - DNA, 25 bp, Homo sapien
tactaatatggtggagagaccctca

SEQ ID NO: 1946163 - DNA, 25 bp, Homo sapien
cattcaaaatccagcaccccatcat

SEQ ID NO: 1946164 - DNA, 25 bp, Homo sapien
actaatatggtggagagaccctcat

SEQ ID NO: 1946165 - DNA, 25 bp, Homo sapien
gctcttcggctgtcaggaaatttct

SEQ ID NO: 1946166 - DNA, 25 bp, Homo sapien
tctggatgttgggtcgttagtaagg

SEQ ID NO: 1946167 - DNA, 25 bp, Homo sapien
tggatgttgggtcgttagtaagggc

SEQ ID NO: 1946168 - DNA, 25 bp, Homo sapien
tgctcttcggctgtcaggaaatttc

SEQ ID NO: 1946169 - DNA, 25 bp, Homo sapien
gaggtaaggccactggacccaatag

SEQ ID NO: 1946170 - DNA, 25 bp, Homo sapien
ccactggacccaataggtgaggcat

SEQ ID NO: 1946171 - DNA, 25 bp, Homo sapien
tctttgaggaggtaaggccactgga

SEQ ID NO: 1946172 - DNA, 25 bp, Homo sapien
taaggccactggacccaataggtga

SEQ ID NO: 1946173 - DNA, 25 bp, Homo sapien
taatattgttacagtctggtggggg

SEQ ID NO: 1946174 - DNA, 25 bp, Homo sapien
gtcatgcttctcagtcaaaagcagg

SEQ ID NO: 1946175 - DNA, 25 bp, Homo sapien
ggtcatgacgttaaatttggagaca

SEQ ID NO: 1946176 - DNA, 25 bp, Homo sapien
tgtttactatctacatgaatgtcat

SEQ ID NO: 1946177 - DNA, 25 bp, Homo sapien
ctgagaaaaggtcatgacgttaaat

SEQ ID NO: 1946178 - DNA, 25 bp, Homo sapien
aaaagggttgcatcactgcaggtgg

SEQ ID NO: 1946179 - DNA, 25 bp, Homo sapien
ggttagctttgccaaagtcagagga

SEQ ID NO: 1946180 - DNA, 25 bp, Homo sapien
caaagtcagaggatttgtgaagaga

SEQ ID NO: 1946181 - DNA, 25 bp, Homo sapien
gcaggtgggcacaatggttagcttt

SEQ ID NO: 1946182 - DNA, 25 bp, Homo sapien
caattcgcctgagctgttttgcggc

SEQ ID NO: 1946183 - DNA, 25 bp, Homo sapien
ggcttatgccagacgtcttgagtca

SEQ ID NO: 1946184 - DNA, 25 bp, Homo sapien
tgcaaattcaattcgcctgagctgt

SEQ ID NO: 1946185 - DNA, 25 bp, Homo sapien
tgttttgcggcttatgccagacgtc

SEQ ID NO: 1946186 - DNA, 25 bp, Homo sapien
tctgtgaaataaccaggttgaaatt

SEQ ID NO: 1946187 - DNA, 25 bp, Homo sapien
tgttattatttggctagactgactc

SEQ ID NO: 1946188 - DNA, 25 bp, Homo sapien
gtctgtgaaataaccaggttgaaat

SEQ ID NO: 1946189 - DNA, 25 bp, Homo sapien
gaggccggagcttatattttcatga

SEQ ID NO: 1946190 - DNA, 25 bp, Homo sapien
gctgctgtatgagattgaagtgaaa

SEQ ID NO: 1946191 - DNA, 25 bp, Homo sapien
aatgccctcatccagagttctgtga

SEQ ID NO: 1946192 - DNA, 25 bp, Homo sapien
catgatcacctttggctctgtttgt

SEQ ID NO: 1946193 - DNA, 25 bp, Homo sapien
catctctaattctcccctattctca

SEQ ID NO: 1946194 - DNA, 25 bp, Homo sapien
cccatataatgcttgtattcttgtc

SEQ ID NO: 1946195 - DNA, 25 bp, Homo sapien
gctaaattgtcccatataatgcttg

SEQ ID NO: 1946196 - DNA, 25 bp, Homo sapien
tcactggctaaattgtcccatataa

SEQ ID NO: 1946197 - DNA, 25 bp, Homo sapien
cagtgccctgatattagctccttcc

SEQ ID NO: 1946198 - DNA, 25 bp, Homo sapien
actaccagtgccctgatattagctc

SEQ ID NO: 1946199 - DNA, 25 bp, Homo sapien
tttggctctgaactaccagtgccct

SEQ ID NO: 1946200 - DNA, 25 bp, Homo sapien
catttggctctgaactaccagtgcc

SEQ ID NO: 1946201 - DNA, 25 bp, Homo sapien
tgtacggccctctaggacaagaact

SEQ ID NO: 1946202 - DNA, 25 bp, Homo sapien
tcattaaatgagttgtacggccctc

SEQ ID NO: 1946203 - DNA, 25 bp, Homo sapien
cttattaattgatttgtcttctgga

SEQ ID NO: 1946204 - DNA, 25 bp, Homo sapien
actctgcctttggtaccatagtgct

SEQ ID NO: 1946205 - DNA, 25 bp, Homo sapien
gaaacagacagctgaactcgaactg

SEQ ID NO: 1946206 - DNA, 25 bp, Homo sapien
tactggcctgggtgtaatgaaacag

SEQ ID NO: 1946207 - DNA, 25 bp, Homo sapien
aaatccccaaagtgttactggcctg

SEQ ID NO: 1946208 - DNA, 25 bp, Homo sapien
cctttggtgacctgcattgtgggct

SEQ ID NO: 1946209 - DNA, 25 bp, Homo sapien
tcagtgaaccagcgttggcagttcc

SEQ ID NO: 1946210 - DNA, 25 bp, Homo sapien
cagtgaaccagcgttggcagttcca

SEQ ID NO: 1946211 - DNA, 25 bp, Homo sapien
agtgaaccagcgttggcagttccag

SEQ ID NO: 1946212 - DNA, 25 bp, Homo sapien
ttgtctttcgtaaatgttgccacct

SEQ ID NO: 1946213 - DNA, 25 bp, Homo sapien
tttccaacttggatgatattgttct

SEQ ID NO: 1946214 - DNA, 25 bp, Homo sapien
aattgtctttcgtaaatgttgccac

SEQ ID NO: 1946215 - DNA, 25 bp, Homo sapien
aaattgtctttcgtaaatgttgcca

SEQ ID NO: 1946216 - DNA, 25 bp, Homo sapien
ttttcgttgccgataaagacaccat

SEQ ID NO: 1946217 - DNA, 25 bp, Homo sapien
gacatgttttcgttgccgataaaga

SEQ ID NO: 1946218 - DNA, 25 bp, Homo sapien
catgttttcgttgccgataaagaca

SEQ ID NO: 1946219 - DNA, 25 bp, Homo sapien
tttctgacatgttttcgttgccgat

SEQ ID NO: 1946220 - DNA, 25 bp, Homo sapien
cctagattctgaaggtggaatggcc

SEQ ID NO: 1946221 - DNA, 25 bp, Homo sapien
ccagtgagacatacttggaggattg

SEQ ID NO: 1946222 - DNA, 25 bp, Homo sapien
tgagctgggtgatcagcgctaccac

SEQ ID NO: 1946223 - DNA, 25 bp, Homo sapien
gaaagaggtcccaattatacagccc

SEQ ID NO: 1946224 - DNA, 25 bp, Homo sapien
tcatcagtttttcatgcttccgcat

SEQ ID NO: 1946225 - DNA, 25 bp, Homo sapien
agctcatcagtttttcatgcttccg

SEQ ID NO: 1946226 - DNA, 25 bp, Homo sapien
catgcaaaagaggacaatctgaaag

SEQ ID NO: 1946227 - DNA, 25 bp, Homo sapien
aatgagaacttctgatatgatttgc

SEQ ID NO: 1946228 - DNA, 25 bp, Homo sapien
tccagagttaagacaggctctagaa

SEQ ID NO: 1946229 - DNA, 25 bp, Homo sapien
ccagagttaagacaggctctagaat

SEQ ID NO: 1946230 - DNA, 25 bp, Homo sapien
atgaagttccttgacccttgcttta

SEQ ID NO: 1946231 - DNA, 25 bp, Homo sapien
agagttaagacaggctctagaatct

SEQ ID NO: 1946232 - DNA, 25 bp, Homo sapien
tttttcatacagctctaatgagccc

SEQ ID NO: 1946233 - DNA, 25 bp, Homo sapien
taaacatatagattagaattagacc

SEQ ID NO: 1946234 - DNA, 25 bp, Homo sapien
gtgcaagccaacatttttcatacag

SEQ ID NO: 1946235 - DNA, 25 bp, Homo sapien
gacctgagtgaagattcttgtgcaa

SEQ ID NO: 1946236 - DNA, 25 bp, Homo sapien
aagctctcgagtttgccctggtgct

SEQ ID NO: 1946237 - DNA, 25 bp, Homo sapien
gctctcgagtttgccctggtgctct

SEQ ID NO: 1946238 - DNA, 25 bp, Homo sapien
ggcaagccttgacctctaaagctct

SEQ ID NO: 1946239 - DNA, 25 bp, Homo sapien
gccttgacctctaaagctctcgagt

SEQ ID NO: 1946240 - DNA, 25 bp, Homo sapien
tcctgcatggccattggatgccatg

SEQ ID NO: 1946241 - DNA, 25 bp, Homo sapien
ctatggctcagtcctgtcctgcatg

SEQ ID NO: 1946242 - DNA, 25 bp, Homo sapien
catgcaccctagcagggagggaaga

SEQ ID NO: 1946243 - DNA, 25 bp, Homo sapien
cagcagacacggtcatgcaccctag

SEQ ID NO: 1946244 - DNA, 25 bp, Homo sapien
aaactgactctataataataactct

SEQ ID NO: 1946245 - DNA, 25 bp, Homo sapien
taataactctttctagcctaggcaa

SEQ ID NO: 1946246 - DNA, 25 bp, Homo sapien
tgtatttccgtctagtcaggaggct

SEQ ID NO: 1946247 - DNA, 25 bp, Homo sapien
ggcatgttcctgtatttccgtctag

SEQ ID NO: 1946248 - DNA, 25 bp, Homo sapien
cacaattggcaaacttaaacattcc

SEQ ID NO: 1946249 - DNA, 25 bp, Homo sapien
tgtaaaggtcttgcacatctttggt

SEQ ID NO: 1946250 - DNA, 25 bp, Homo sapien
tatgtctattgatctcacaattggc

SEQ ID NO: 1946251 - DNA, 25 bp, Homo sapien
tattatgtaggctatgctgggacgt

SEQ ID NO: 1946252 - DNA, 25 bp, Homo sapien
tcctggtgcctgttgtatctctgag

SEQ ID NO: 1946253 - DNA, 25 bp, Homo sapien
tgctatctgtgactgtgttcctggt

SEQ ID NO: 1946254 - DNA, 25 bp, Homo sapien
aagactttgagggatgaacatcccc

SEQ ID NO: 1946255 - DNA, 25 bp, Homo sapien
tcaaaatgactctatctgttcgttt

SEQ ID NO: 1946256 - DNA, 25 bp, Homo sapien
tatgtctaatgtgttcttctatgtt

SEQ ID NO: 1946257 - DNA, 25 bp, Homo sapien
ttcagcgagcattccaaacagtatt

SEQ ID NO: 1946258 - DNA, 25 bp, Homo sapien
aacaccccattcttcagcgagcatt

SEQ ID NO: 1946259 - DNA, 25 bp, Homo sapien
ctactctctttcaaacactaggtct

SEQ ID NO: 1946260 - DNA, 25 bp, Homo sapien
taatacagttccttagaatgcggcc

SEQ ID NO: 1946261 - DNA, 25 bp, Homo sapien
gcggccctgtgacccatctggtgat

SEQ ID NO: 1946262 - DNA, 25 bp, Homo sapien
cctcagcacgggaagattagtaatc

SEQ ID NO: 1946263 - DNA, 25 bp, Homo sapien
tctgtatcactctgctcagcaagcc

SEQ ID NO: 1946264 - DNA, 25 bp, Homo sapien
tgagtcatccatccagtaaataacc

SEQ ID NO: 1946265 - DNA, 25 bp, Homo sapien
tctgtgagtcatccatccagtaaat

SEQ ID NO: 1946266 - DNA, 25 bp, Homo sapien
tccatccagtaaataacccatacaa

SEQ ID NO: 1946267 - DNA, 25 bp, Homo sapien
gtcatccatccagtaaataacccat

SEQ ID NO: 1946268 - DNA, 25 bp, Homo sapien
tattcttggtctagaaacgtcaatg

SEQ ID NO: 1946269 - DNA, 25 bp, Homo sapien
tagaaacgtcaatgttcagacttgc

SEQ ID NO: 1946270 - DNA, 25 bp, Homo sapien
caatgttcagacttgccttagattt

SEQ ID NO: 1946271 - DNA, 25 bp, Homo sapien
tggtctagaaacgtcaatgttcaga

SEQ ID NO: 1946272 - DNA, 25 bp, Homo sapien
cactctcagaattgttcgatgaatg

SEQ ID NO: 1946273 - DNA, 25 bp, Homo sapien
ctctcagaattgttcgatgaatgaa

SEQ ID NO: 1946274 - DNA, 25 bp, Homo sapien
actctcagaattgttcgatgaatga

SEQ ID NO: 1946275 - DNA, 25 bp, Homo sapien
tagttggatgatctgcgatgtgtct

SEQ ID NO: 1946276 - DNA, 25 bp, Homo sapien
ttctcaggcatgctctcccctcttg

SEQ ID NO: 1946277 - DNA, 25 bp, Homo sapien
aggcaagtatgtagttggatgatct

SEQ ID NO: 1946278 - DNA, 25 bp, Homo sapien
gatctgcgatgtgtcttctcaggca

SEQ ID NO: 1946279 - DNA, 25 bp, Homo sapien
ctgttcttgtggagcttattaaagc

SEQ ID NO: 1946280 - DNA, 25 bp, Homo sapien
gtggtgatttgtaaagaattaccaa

SEQ ID NO: 1946281 - DNA, 25 bp, Homo sapien
tgtaaagaattaccaattccttatg

SEQ ID NO: 1946282 - DNA, 25 bp, Homo sapien
gtgatttgtaaagaattaccaattc

SEQ ID NO: 1946283 - DNA, 25 bp, Homo sapien
tgatttgtaaagaattaccaattcc

SEQ ID NO: 1946284 - DNA, 25 bp, Homo sapien
tggtcttcatctgctggctgcagtg

SEQ ID NO: 1946285 - DNA, 25 bp, Homo sapien
tgctggtcttcatctgctggctgca

SEQ ID NO: 1946286 - DNA, 25 bp, Homo sapien
ctgctggtcttcatctgctggctgc

SEQ ID NO: 1946287 - DNA, 25 bp, Homo sapien
tcttcatctgctggctgcagtgaaa

SEQ ID NO: 1946288 - DNA, 25 bp, Homo sapien
cttcctactgacttgtattgtacgc

SEQ ID NO: 1946289 - DNA, 25 bp, Homo sapien
acttgtattgtacgctgaaaccaac

SEQ ID NO: 1946290 - DNA, 25 bp, Homo sapien
cctactgacttgtattgtacgctga

SEQ ID NO: 1946291 - DNA, 25 bp, Homo sapien
ctgacttgtattgtacgctgaaacc

SEQ ID NO: 1946292 - DNA, 25 bp, Homo sapien
gttccttcactgatgtgtcgtgcat

SEQ ID NO: 1946293 - DNA, 25 bp, Homo sapien
tcgtttttctaatattgagtcttgg

SEQ ID NO: 1946294 - DNA, 25 bp, Homo sapien
tttctaatattgagtcttggcattg

SEQ ID NO: 1946295 - DNA, 25 bp, Homo sapien
gtttttctaatattgagtcttggca

SEQ ID NO: 1946296 - DNA, 25 bp, Homo sapien
taatattgagtcttggcattgattc

SEQ ID NO: 1946297 - DNA, 25 bp, Homo sapien
gatatgcacgcatgggcgcaagcaa

SEQ ID NO: 1946298 - DNA, 25 bp, Homo sapien
tcaggaaatcagcaccaagtctttg

SEQ ID NO: 1946299 - DNA, 25 bp, Homo sapien
attctagaataactcagggaccagg

SEQ ID NO: 1946300 - DNA, 25 bp, Homo sapien
tgtgtgaatttgcagcccagtgtta

SEQ ID NO: 1946301 - DNA, 25 bp, Homo sapien
tgaacctctagccatccagaccact

SEQ ID NO: 1946302 - DNA, 25 bp, Homo sapien
tggctgaacctctagccatccagac

SEQ ID NO: 1946303 - DNA, 25 bp, Homo sapien
acctctagccatccagaccactgca

SEQ ID NO: 1946304 - DNA, 25 bp, Homo sapien
ctggctgaacctctagccatccaga

SEQ ID NO: 1946305 - DNA, 25 bp, Homo sapien
cctcagcatccgtctgcctaaagtg

SEQ ID NO: 1946306 - DNA, 25 bp, Homo sapien
aaacatccaatgagctttccttttg

SEQ ID NO: 1946307 - DNA, 25 bp, Homo sapien
tttaccaagtgccagacctttgccc

SEQ ID NO: 1946308 - DNA, 25 bp, Homo sapien
taaagtgatattgggatttgttaca

SEQ ID NO: 1946309 - DNA, 25 bp, Homo sapien
agaaagatttcatgattgcagctgc

SEQ ID NO: 1946310 - DNA, 25 bp, Homo sapien
aagtggtgaaatggcgccctgagac

SEQ ID NO: 1946311 - DNA, 25 bp, Homo sapien
cagtagcatgtagtgtgatttgaga

SEQ ID NO: 1946312 - DNA, 25 bp, Homo sapien
tgaacagccttgagtttccctagtc

SEQ ID NO: 1946313 - DNA, 25 bp, Homo sapien
tcctggtctatggacttactttgcc

SEQ ID NO: 1946314 - DNA, 25 bp, Homo sapien
cttcctggtctatggacttactttg

SEQ ID NO: 1946315 - DNA, 25 bp, Homo sapien
tggtctatggacttactttgccttt

SEQ ID NO: 1946316 - DNA, 25 bp, Homo sapien
agcttcctggtctatggacttactt

SEQ ID NO: 1946317 - DNA, 25 bp, Homo sapien
attccaaattgctctcaaggttcct

SEQ ID NO: 1946318 - DNA, 25 bp, Homo sapien
caaggttcctgtgaccgctggcaaa

SEQ ID NO: 1946319 - DNA, 25 bp, Homo sapien
gaggtggaagaataggcttcatgtc

SEQ ID NO: 1946320 - DNA, 25 bp, Homo sapien
aaaaggcttggtccatcacaatgcc

SEQ ID NO: 1946321 - DNA, 25 bp, Homo sapien
aatctctttaggcagaatacattgc

SEQ ID NO: 1946322 - DNA, 25 bp, Homo sapien
ggcagaatacattgctctctgatct

SEQ ID NO: 1946323 - DNA, 25 bp, Homo sapien
tctctttaggcagaatacattgctc

SEQ ID NO: 1946324 - DNA, 25 bp, Homo sapien
tttaggcagaatacattgctctctg

SEQ ID NO: 1946325 - DNA, 25 bp, Homo sapien
tagttctgggccactgaagatggag

SEQ ID NO: 1946326 - DNA, 25 bp, Homo sapien
ttctgggccactgaagatggagacc

SEQ ID NO: 1946327 - DNA, 25 bp, Homo sapien
tctgggccactgaagatggagacca

SEQ ID NO: 1946328 - DNA, 25 bp, Homo sapien
ctggtagttctgggccactgaagat

SEQ ID NO: 1946329 - DNA, 25 bp, Homo sapien
agtgctgacagacaagatgggcatc

SEQ ID NO: 1946330 - DNA, 25 bp, Homo sapien
tcgtcaatcaattttacgtattcgg

SEQ ID NO: 1946331 - DNA, 25 bp, Homo sapien
tacgtattcggtttggatcactttc

SEQ ID NO: 1946332 - DNA, 25 bp, Homo sapien
tcactggaaagtcgtcttcgtcaat

SEQ ID NO: 1946333 - DNA, 25 bp, Homo sapien
tgacaggcgtgctgcaccacgcttg

SEQ ID NO: 1946334 - DNA, 25 bp, Homo sapien
gcttcattagttggctagtgtcaag

SEQ ID NO: 1946335 - DNA, 25 bp, Homo sapien
tcaatcagcttcattagttggctag

SEQ ID NO: 1946336 - DNA, 25 bp, Homo sapien
cattagttggctagtgtcaagggcc

SEQ ID NO: 1946337 - DNA, 25 bp, Homo sapien
tcagcttcattagttggctagtgtc

SEQ ID NO: 1946338 - DNA, 25 bp, Homo sapien
ctgggttatggatgataagacacat

SEQ ID NO: 1946339 - DNA, 25 bp, Homo sapien
cttctgggttatggatgataagaca

SEQ ID NO: 1946340 - DNA, 25 bp, Homo sapien
tctgggttatggatgataagacaca

SEQ ID NO: 1946341 - DNA, 25 bp, Homo sapien
ttctgggttatggatgataagacac

SEQ ID NO: 1946342 - DNA, 25 bp, Homo sapien
ccacagtcaccaagcaaccgggaag

SEQ ID NO: 1946343 - DNA, 25 bp, Homo sapien
cacagtcaccaagcaaccgggaagc

SEQ ID NO: 1946344 - DNA, 25 bp, Homo sapien
tcatctggagggctatgggaaatac

SEQ ID NO: 1946345 - DNA, 25 bp, Homo sapien
aatctggcgtcttcatctggagggc

SEQ ID NO: 1946346 - DNA, 25 bp, Homo sapien
tctggagggctatgggaaatacacc

SEQ ID NO: 1946347 - DNA, 25 bp, Homo sapien
agtaaatctggcgtcttcatctgga

SEQ ID NO: 1946348 - DNA, 25 bp, Homo sapien
tacgtggcctgaaatcatgagttcc

SEQ ID NO: 1946349 - DNA, 25 bp, Homo sapien
gatggcatgggtaacaaatactgga

SEQ ID NO: 1946350 - DNA, 25 bp, Homo sapien
tatacaagttgtggctacgtggcct

SEQ ID NO: 1946351 - DNA, 25 bp, Homo sapien
ggaaattgtactgagctctttcttt

SEQ ID NO: 1946352 - DNA, 25 bp, Homo sapien
caccagcagccaccccctgcagcat

SEQ ID NO: 1946353 - DNA, 25 bp, Homo sapien
agcactgcccacgccgcaccagcag

SEQ ID NO: 1946354 - DNA, 25 bp, Homo sapien
ccgcaccagcagccaccccctgcag

SEQ ID NO: 1946355 - DNA, 25 bp, Homo sapien
cagcactgcccacgccgcaccagca

SEQ ID NO: 1946356 - DNA, 25 bp, Homo sapien
tactcacgattcctgacactaggga

SEQ ID NO: 1946357 - DNA, 25 bp, Homo sapien
cagttctagtaataagagtatcccc

SEQ ID NO: 1946358 - DNA, 25 bp, Homo sapien
cccggtggcatctgaacagtgttct

SEQ ID NO: 1946359 - DNA, 25 bp, Homo sapien
agattttaagctccctacgggcagg

SEQ ID NO: 1946360 - DNA, 25 bp, Homo sapien
tattacgacctttgtcatgcttggg

SEQ ID NO: 1946361 - DNA, 25 bp, Homo sapien
taagggttgtgacattacacgctga

SEQ ID NO: 1946362 - DNA, 25 bp, Homo sapien
agactccttagttccatagctgacg

SEQ ID NO: 1946363 - DNA, 25 bp, Homo sapien
gaattactaaaatcacgcagcgcaa

SEQ ID NO: 1946364 - DNA, 25 bp, Homo sapien
tgtatgctgactacatgcagaagca

SEQ ID NO: 1946365 - DNA, 25 bp, Homo sapien
gaagcagtccttcttacctagggag

SEQ ID NO: 1946366 - DNA, 25 bp, Homo sapien
caatctctcgcattcacataaagct

SEQ ID NO: 1946367 - DNA, 25 bp, Homo sapien
tgtgagacaatgactaaattccttt

SEQ ID NO: 1946368 - DNA, 25 bp, Homo sapien
cctgcatctcttttacgatcagctg

SEQ ID NO: 1946369 - DNA, 25 bp, Homo sapien
tgctcatgtgccttcgacccatgaa

SEQ ID NO: 1946370 - DNA, 25 bp, Homo sapien
ctcatgtgccttcgacccatgaatg

SEQ ID NO: 1946371 - DNA, 25 bp, Homo sapien
ttttacgatcagctgaatccatggc

SEQ ID NO: 1946372 - DNA, 25 bp, Homo sapien
tggcagaggcataaaaaagtgagct

SEQ ID NO: 1946373 - DNA, 25 bp, Homo sapien
ttgcacgaattaccctaaagggaga

SEQ ID NO: 1946374 - DNA, 25 bp, Homo sapien
aatgcctcaaatgacccgtgaagag

SEQ ID NO: 1946375 - DNA, 25 bp, Homo sapien
tcagctgaaccacctactatagaaa

SEQ ID NO: 1946376 - DNA, 25 bp, Homo sapien
tgtccgactgaagcaatcagttctt

SEQ ID NO: 1946377 - DNA, 25 bp, Homo sapien
gatttatctgtctgtccgactgaag

SEQ ID NO: 1946378 - DNA, 25 bp, Homo sapien
tgtctactcaagcatttatgaaagt

SEQ ID NO: 1946379 - DNA, 25 bp, Homo sapien
cataaatggatctttcaatgataca

SEQ ID NO: 1946380 - DNA, 25 bp, Homo sapien
tgcggcggctgcactatcaaagctc

SEQ ID NO: 1946381 - DNA, 25 bp, Homo sapien
aactggctttgatggtatgaccgac

SEQ ID NO: 1946382 - DNA, 25 bp, Homo sapien
tggcagaaggaaggtagtccccgcc

SEQ ID NO: 1946383 - DNA, 25 bp, Homo sapien
taccccaaggctgttatgctccaaa

SEQ ID NO: 1946384 - DNA, 25 bp, Homo sapien
acaaccttccccaagaattcagcaa

SEQ ID NO: 1946385 - DNA, 25 bp, Homo sapien
gccctctacgaagggcagatgcaca

SEQ ID NO: 1946386 - DNA, 25 bp, Homo sapien
agcggtgtcttgctgggccctctac

SEQ ID NO: 1946387 - DNA, 25 bp, Homo sapien
tcaatgcagagtagtgagcggtgtc

SEQ ID NO: 1946388 - DNA, 25 bp, Homo sapien
tacccggaatgcttgctgacataag

SEQ ID NO: 1946389 - DNA, 25 bp, Homo sapien
caagctgctaaaaaatacccggaat

SEQ ID NO: 1946390 - DNA, 25 bp, Homo sapien
gttagcccaggagaacaatgcatcc

SEQ ID NO: 1946391 - DNA, 25 bp, Homo sapien
tactgtatgggctggcatttcaaac

SEQ ID NO: 1946392 - DNA, 25 bp, Homo sapien
cctcttgtaagatccgatcacacga

SEQ ID NO: 1946393 - DNA, 25 bp, Homo sapien
taagatccgatcacacgattcattt

SEQ ID NO: 1946394 - DNA, 25 bp, Homo sapien
cttgtaagatccgatcacacgattc

SEQ ID NO: 1946395 - DNA, 25 bp, Homo sapien
tgtaagatccgatcacacgattcat

SEQ ID NO: 1946396 - DNA, 25 bp, Homo sapien
ttctgctcctttctccacacccctc

SEQ ID NO: 1946397 - DNA, 25 bp, Homo sapien
ctgctcctttctccacacccctcat

SEQ ID NO: 1946398 - DNA, 25 bp, Homo sapien
tctgctcctttctccacacccctca

SEQ ID NO: 1946399 - DNA, 25 bp, Homo sapien
cacgagaaagcagtggagcgttgtc

SEQ ID NO: 1946400 - DNA, 25 bp, Homo sapien
ataaggttttgaagggcgaggcatc

SEQ ID NO: 1946401 - DNA, 25 bp, Homo sapien
gcactgtcacaacgaaccacttgag

SEQ ID NO: 1946402 - DNA, 25 bp, Homo sapien
gagcgttgtcacacagaggacgttg

SEQ ID NO: 1946403 - DNA, 25 bp, Homo sapien
cagccactggtggctgttagtcctg

SEQ ID NO: 1946404 - DNA, 25 bp, Homo sapien
gcagccactggtggctgttagtcct

SEQ ID NO: 1946405 - DNA, 25 bp, Homo sapien
agcagccactggtggctgttagtcc

SEQ ID NO: 1946406 - DNA, 25 bp, Homo sapien
gcctctttggcagtgttcatgctga

SEQ ID NO: 1946407 - DNA, 25 bp, Homo sapien
tatggcaaattaacccttgatattc

SEQ ID NO: 1946408 - DNA, 25 bp, Homo sapien
tccaggagagctcagtacagctgca

SEQ ID NO: 1946409 - DNA, 25 bp, Homo sapien
ttaacccttgatattcaactccagg

SEQ ID NO: 1946410 - DNA, 25 bp, Homo sapien
ttctccagcaatggcctccccacca

SEQ ID NO: 1946411 - DNA, 25 bp, Homo sapien
agctcttctccagcaatggcctccc

SEQ ID NO: 1946412 - DNA, 25 bp, Homo sapien
cacaagctcttctccagcaatggcc

SEQ ID NO: 1946413 - DNA, 25 bp, Homo sapien
cttctccagcaatggcctccccacc

SEQ ID NO: 1946414 - DNA, 25 bp, Homo sapien
catacccggccctaggcaggagttt

SEQ ID NO: 1946415 - DNA, 25 bp, Homo sapien
gaggtctttttggaacactgtgcag

SEQ ID NO: 1946416 - DNA, 25 bp, Homo sapien
gggtctaaactcaggcggcaaacaa

SEQ ID NO: 1946417 - DNA, 25 bp, Homo sapien
gagcatacttcagacactgccggct

SEQ ID NO: 1946418 - DNA, 25 bp, Homo sapien
cataggtacctagatatccagtagc

SEQ ID NO: 1946419 - DNA, 25 bp, Homo sapien
gaaatacctgcattacccagtccca

SEQ ID NO: 1946420 - DNA, 25 bp, Homo sapien
aaatttatgcacagcgcaatgccca

SEQ ID NO: 1946421 - DNA, 25 bp, Homo sapien
gtttcaataggtcataagctccagg

SEQ ID NO: 1946422 - DNA, 25 bp, Homo sapien
catgcagtgctatggagaggtttga

SEQ ID NO: 1946423 - DNA, 25 bp, Homo sapien
aaagtccagctgctcaatttccctg

SEQ ID NO: 1946424 - DNA, 25 bp, Homo sapien
gggtacatctattcagccctggagt

SEQ ID NO: 1946425 - DNA, 25 bp, Homo sapien
tcaagtttccctaattttcacagaa

SEQ ID NO: 1946426 - DNA, 25 bp, Homo sapien
atctgcctcccaacttaactctagt

SEQ ID NO: 1946427 - DNA, 25 bp, Homo sapien
gacgcagaacaatcaggcagtttcc

SEQ ID NO: 1946428 - DNA, 25 bp, Homo sapien
tcctgccttctcaggggcaaaggaa

SEQ ID NO: 1946429 - DNA, 25 bp, Homo sapien
ctctagtcctatcttcctatatgga

SEQ ID NO: 1946430 - DNA, 25 bp, Homo sapien
gatgcatttggagctaggccctgag

SEQ ID NO: 1946431 - DNA, 25 bp, Homo sapien
tgcacagagtgatggtttttcggga

SEQ ID NO: 1946432 - DNA, 25 bp, Homo sapien
tgcctttggcatatttagctgaaca

SEQ ID NO: 1946433 - DNA, 25 bp, Homo sapien
ttgctcctatgtgaagcagaagatg

SEQ ID NO: 1946434 - DNA, 25 bp, Homo sapien
gtgactggcaaacaccgtctttcca

SEQ ID NO: 1946435 - DNA, 25 bp, Homo sapien
tcagcattttgtgcccctgagcaaa

SEQ ID NO: 1946436 - DNA, 25 bp, Homo sapien
gacacaccgaattggcgtttggctt

SEQ ID NO: 1946437 - DNA, 25 bp, Homo sapien
tggctttcgtgtctcgtgaagggca

SEQ ID NO: 1946438 - DNA, 25 bp, Homo sapien
gaaaaatgttttacgtgaactctga

SEQ ID NO: 1946439 - DNA, 25 bp, Homo sapien
aagtcttgagttttgattccatcag

SEQ ID NO: 1946440 - DNA, 25 bp, Homo sapien
tctttgtgagtcaatggtgaaaaat

SEQ ID NO: 1946441 - DNA, 25 bp, Homo sapien
ttctatggccaaagtcttgagtttt

SEQ ID NO: 1946442 - DNA, 25 bp, Homo sapien
tgtatactttaactaacatctctct

SEQ ID NO: 1946443 - DNA, 25 bp, Homo sapien
tacacactttggaacaattaccaca

SEQ ID NO: 1946444 - DNA, 25 bp, Homo sapien
tagttaccacttttttgtgtgatga

SEQ ID NO: 1946445 - DNA, 25 bp, Homo sapien
gtcaccatgctgtactctaaatccc

SEQ ID NO: 1946446 - DNA, 25 bp, Homo sapien
ccatagacaatggatagcttttcat

SEQ ID NO: 1946447 - DNA, 25 bp, Homo sapien
cataatgtagtttgaaaccaggaaa

SEQ ID NO: 1946448 - DNA, 25 bp, Homo sapien
tatgttctactggtctttgtgcctg

SEQ ID NO: 1946449 - DNA, 25 bp, Homo sapien
atctgtatatgtgggtagtataggc

SEQ ID NO: 1946450 - DNA, 25 bp, Homo sapien
ggtgctctagcatatctctatgaag

SEQ ID NO: 1946451 - DNA, 25 bp, Homo sapien
tccatatgatgatgggactgggcat

SEQ ID NO: 1946452 - DNA, 25 bp, Homo sapien
gccatcattcaaaataaggtgctct

SEQ ID NO: 1946453 - DNA, 25 bp, Homo sapien
tgtagattatggcacaggacccatg

SEQ ID NO: 1946454 - DNA, 25 bp, Homo sapien
caccagtagccaaatccaaagagca

SEQ ID NO: 1946455 - DNA, 25 bp, Homo sapien
atccactcagtctgcttggcatgca

SEQ ID NO: 1946456 - DNA, 25 bp, Homo sapien
cccacagtcccctgatccactcagt

SEQ ID NO: 1946457 - DNA, 25 bp, Homo sapien
tagccaaatccaaagagcacccttc

SEQ ID NO: 1946458 - DNA, 25 bp, Homo sapien
cacagcctgctgctaaacctgtagg

SEQ ID NO: 1946459 - DNA, 25 bp, Homo sapien
tcacagcctgctgctaaacctgtag

SEQ ID NO: 1946460 - DNA, 25 bp, Homo sapien
tctggaagcatgttacaagatggga

SEQ ID NO: 1946461 - DNA, 25 bp, Homo sapien
tacaagatgggactttcctggcttc

SEQ ID NO: 1946462 - DNA, 25 bp, Homo sapien
agcatgttacaagatgggactttcc

SEQ ID NO: 1946463 - DNA, 25 bp, Homo sapien
cccctctggaagcatgttacaagat

SEQ ID NO: 1946464 - DNA, 25 bp, Homo sapien
tactaactatgatactatgacatac

SEQ ID NO: 1946465 - DNA, 25 bp, Homo sapien
ggctattatgaaatactatctctgt

SEQ ID NO: 1946466 - DNA, 25 bp, Homo sapien
cacaggacctctcagaaaggaccat

SEQ ID NO: 1946467 - DNA, 25 bp, Homo sapien
acttgtggggcttcacaggacctct

SEQ ID NO: 1946468 - DNA, 25 bp, Homo sapien
tggggcttcacaggacctctcagaa

SEQ ID NO: 1946469 - DNA, 25 bp, Homo sapien
gcttcacaggacctctcagaaagga

SEQ ID NO: 1946470 - DNA, 25 bp, Homo sapien
tggtactttaccagccaatggctaa

SEQ ID NO: 1946471 - DNA, 25 bp, Homo sapien
ttataggtgcaaaaatggaggctca

SEQ ID NO: 1946472 - DNA, 25 bp, Homo sapien
gagactgaagcatcctttatgagaa

SEQ ID NO: 1946473 - DNA, 25 bp, Homo sapien
ctcagaggtgccaagtaatttgtcc

SEQ ID NO: 1946474 - DNA, 25 bp, Homo sapien
gaattgacatatgtaagcctgccat

SEQ ID NO: 1946475 - DNA, 25 bp, Homo sapien
tgctttcaaatttagatccctctgt

SEQ ID NO: 1946476 - DNA, 25 bp, Homo sapien
gactgtaacctgtatactagaaaag

SEQ ID NO: 1946477 - DNA, 25 bp, Homo sapien
ctctgggctcgactgtaacctgtat

SEQ ID NO: 1946478 - DNA, 25 bp, Homo sapien
agcttgtacacccatgggaaacttt

SEQ ID NO: 1946479 - DNA, 25 bp, Homo sapien
gaaagcttgtacacccatgggaaac

SEQ ID NO: 1946480 - DNA, 25 bp, Homo sapien
aaagcttgtacacccatgggaaact

SEQ ID NO: 1946481 - DNA, 25 bp, Homo sapien
gcttgtacacccatgggaaactttc

SEQ ID NO: 1946482 - DNA, 25 bp, Homo sapien
tgatatgcccttttgtgctttttct

SEQ ID NO: 1946483 - DNA, 25 bp, Homo sapien
aatgtctcatcatatgtgttcagaa

SEQ ID NO: 1946484 - DNA, 25 bp, Homo sapien
tcttcttaggatccattgaccttcc

SEQ ID NO: 1946485 - DNA, 25 bp, Homo sapien
aaatttattatgatatgcccttttg

SEQ ID NO: 1946486 - DNA, 25 bp, Homo sapien
tgttgcactatgtaaattttgtcca

SEQ ID NO: 1946487 - DNA, 25 bp, Homo sapien
ttcctttgctgccacccgtgaagta

SEQ ID NO: 1946488 - DNA, 25 bp, Homo sapien
ctgccacccgtgaagtagcaaaggc

SEQ ID NO: 1946489 - DNA, 25 bp, Homo sapien
gcactatgtaaattttgtccaattc

SEQ ID NO: 1946490 - DNA, 25 bp, Homo sapien
agtctctccagctcagtgtatacca

SEQ ID NO: 1946491 - DNA, 25 bp, Homo sapien
cacagacttaggatctgcatggcca

SEQ ID NO: 1946492 - DNA, 25 bp, Homo sapien
tctggtgctcaagtcattcagttgc

SEQ ID NO: 1946493 - DNA, 25 bp, Homo sapien
taaaggcatggatgagcagtctctc

SEQ ID NO: 1946494 - DNA, 25 bp, Homo sapien
ttgacacatggggaactttgatggg

SEQ ID NO: 1946495 - DNA, 25 bp, Homo sapien
ctgaatgtggtatattctcagtgtg

SEQ ID NO: 1946496 - DNA, 25 bp, Homo sapien
agactgtgagaatgttgtgtcctca

SEQ ID NO: 1946497 - DNA, 25 bp, Homo sapien
cagactgtgagaatgttgtgtcctc

SEQ ID NO: 1946498 - DNA, 25 bp, Homo sapien
gactgtgagaatgttgtgtcctcac

SEQ ID NO: 1946499 - DNA, 25 bp, Homo sapien
ggtgaacctcactgccggaagatgc

SEQ ID NO: 1946500 - DNA, 25 bp, Homo sapien
cacttgggctgcaaactgaagaccc

SEQ ID NO: 1946501 - DNA, 25 bp, Homo sapien
catgaaggtgattcagaggagagcc

SEQ ID NO: 1946502 - DNA, 25 bp, Homo sapien
ctggtatgaagctacaaatgggcac

SEQ ID NO: 1946503 - DNA, 25 bp, Homo sapien
ggccctactctgtggcaaggccaga

SEQ ID NO: 1946504 - DNA, 25 bp, Homo sapien
gggccctactctgtggcaaggccag

SEQ ID NO: 1946505 - DNA, 25 bp, Homo sapien
gccctactctgtggcaaggccagag

SEQ ID NO: 1946506 - DNA, 25 bp, Homo sapien
aaagtgcacacgcaaaagtttgctc

SEQ ID NO: 1946507 - DNA, 25 bp, Homo sapien
atttctgaatatttactgctgggct

SEQ ID NO: 1946508 - DNA, 25 bp, Homo sapien
caggcttctgttgctctgagaggaa

SEQ ID NO: 1946509 - DNA, 25 bp, Homo sapien
tactccgggttcagtgcacgctttg

SEQ ID NO: 1946510 - DNA, 25 bp, Homo sapien
aaaacaacttctgccaggcctattg

SEQ ID NO: 1946511 - DNA, 25 bp, Homo sapien
ttaaaacaacttctgccaggcctat

SEQ ID NO: 1946512 - DNA, 25 bp, Homo sapien
caacttctgccaggcctattgtgac

SEQ ID NO: 1946513 - DNA, 25 bp, Homo sapien
aacaacttctgccaggcctattgtg

SEQ ID NO: 1946514 - DNA, 25 bp, Homo sapien
gcatgctgacaggaacaacttgagt

SEQ ID NO: 1946515 - DNA, 25 bp, Homo sapien
cagagattgcgcttgaccatgaaag

SEQ ID NO: 1946516 - DNA, 25 bp, Homo sapien
tgagttacgcccacaaaggagtcga

SEQ ID NO: 1946517 - DNA, 25 bp, Homo sapien
gcattctatggtacttaacgcagga

SEQ ID NO: 1946518 - DNA, 25 bp, Homo sapien
gaatccgaggtctgggtgtcttcac

SEQ ID NO: 1946519 - DNA, 25 bp, Homo sapien
gaaaagaggtttatgtagcccactg

SEQ ID NO: 1946520 - DNA, 25 bp, Homo sapien
aaagaccagcgcgaatcaatgacca

SEQ ID NO: 1946521 - DNA, 25 bp, Homo sapien
caaaaggtcaaagcaccctggtcca

SEQ ID NO: 1946522 - DNA, 25 bp, Homo sapien
ccagatacttgaagggctgaggtgg

SEQ ID NO: 1946523 - DNA, 25 bp, Homo sapien
gatacttgaagggctgaggtggaag

SEQ ID NO: 1946524 - DNA, 25 bp, Homo sapien
tagctagacatggtggcaggtgtct

SEQ ID NO: 1946525 - DNA, 25 bp, Homo sapien
agtcccagatacttgaagggctgag

SEQ ID NO: 1946526 - DNA, 25 bp, Homo sapien
cgtagataagtctcaaagataggag

SEQ ID NO: 1946527 - DNA, 25 bp, Homo sapien
agttggcagcatttctcatacgcat

SEQ ID NO: 1946528 - DNA, 25 bp, Homo sapien
catttggtcacagaattatgttctc

SEQ ID NO: 1946529 - DNA, 25 bp, Homo sapien
tctctgggcatcttgaggaagtagt

SEQ ID NO: 1946530 - DNA, 25 bp, Homo sapien
taccatctttctcgcatatgacagt

SEQ ID NO: 1946531 - DNA, 25 bp, Homo sapien
cgcatatgacagtttctgaagtgct

SEQ ID NO: 1946532 - DNA, 25 bp, Homo sapien
tgagataccatctttctcgcatatg

SEQ ID NO: 1946533 - DNA, 25 bp, Homo sapien
tctttctcgcatatgacagtttctg

SEQ ID NO: 1946534 - DNA, 25 bp, Homo sapien
tctccagattattccaattgagcct

SEQ ID NO: 1946535 - DNA, 25 bp, Homo sapien
aaagaatattgatacctggtcctct

SEQ ID NO: 1946536 - DNA, 25 bp, Homo sapien
gtcctcttcaggtttaaggtacaga

SEQ ID NO: 1946537 - DNA, 25 bp, Homo sapien
tgggccctggagtgtagacattgta

SEQ ID NO: 1946538 - DNA, 25 bp, Homo sapien
ttcactcccgattcaggaggggaca

SEQ ID NO: 1946539 - DNA, 25 bp, Homo sapien
ttttcactcccgattcaggagggga

SEQ ID NO: 1946540 - DNA, 25 bp, Homo sapien
ggtcttttcactcccgattcaggag

SEQ ID NO: 1946541 - DNA, 25 bp, Homo sapien
tgggtcttttcactcccgattcagg

SEQ ID NO: 1946542 - DNA, 25 bp, Homo sapien
tgctgaatgccgcagaggtgatggg

SEQ ID NO: 1946543 - DNA, 25 bp, Homo sapien
tgaaacccagagcccgacagtcgct

SEQ ID NO: 1946544 - DNA, 25 bp, Homo sapien
tgggcaatcgacactgcttcctgct

SEQ ID NO: 1946545 - DNA, 25 bp, Homo sapien
agtcgctgctcctgggcaatcgaca

SEQ ID NO: 1946546 - DNA, 25 bp, Homo sapien
aatgtgtcctttggatcgtttcttt

SEQ ID NO: 1946547 - DNA, 25 bp, Homo sapien
cctttggatcgtttctttgatacag

SEQ ID NO: 1946548 - DNA, 25 bp, Homo sapien
ttctttgatacagcgctgctttcac

SEQ ID NO: 1946549 - DNA, 25 bp, Homo sapien
gatacagcgctgctttcacgcacac

SEQ ID NO: 1946550 - DNA, 25 bp, Homo sapien
gtgctccgaactccaagagacgtgg

SEQ ID NO: 1946551 - DNA, 25 bp, Homo sapien
ttccaccagcagtcatgtttacaga

SEQ ID NO: 1946552 - DNA, 25 bp, Homo sapien
tccctacttgttcctgtgaagctcc

SEQ ID NO: 1946553 - DNA, 25 bp, Homo sapien
gagacgtggcaagctccctacttgt

SEQ ID NO: 1946554 - DNA, 25 bp, Homo sapien
gggaagaggacacatgtccccatct

SEQ ID NO: 1946555 - DNA, 25 bp, Homo sapien
tctttagagtcaataaacaatccaa

SEQ ID NO: 1946556 - DNA, 25 bp, Homo sapien
atctctcttgttgttggtgctccat

SEQ ID NO: 1946557 - DNA, 25 bp, Homo sapien
catctttagagtcaataaacaatcc

SEQ ID NO: 1946558 - DNA, 25 bp, Homo sapien
aaacaatccaaatctctcttgttgt

SEQ ID NO: 1946559 - DNA, 25 bp, Homo sapien
ctgtgtgacatatcttttttgttgt

SEQ ID NO: 1946560 - DNA, 25 bp, Homo sapien
aatttgaccccatcattgccttggg

SEQ ID NO: 1946561 - DNA, 25 bp, Homo sapien
gcatcagattcgttaaattcactaa

SEQ ID NO: 1946562 - DNA, 25 bp, Homo sapien
ttcactaacaaaatttgaccccatc

SEQ ID NO: 1946563 - DNA, 25 bp, Homo sapien
gactaatgtcaatatgacccacata

SEQ ID NO: 1946564 - DNA, 25 bp, Homo sapien
cttccataggtgaaccatacccatg

SEQ ID NO: 1946565 - DNA, 25 bp, Homo sapien
gaatgactaatgtcaatatgaccca

SEQ ID NO: 1946566 - DNA, 25 bp, Homo sapien
ccagcttccaatacaaaaccatgag

SEQ ID NO: 1946567 - DNA, 25 bp, Homo sapien
tagacgtaggtaacagctcaagatg

SEQ ID NO: 1946568 - DNA, 25 bp, Homo sapien
tcaagatgtgaggatgaactcgagc

SEQ ID NO: 1946569 - DNA, 25 bp, Homo sapien
cactgccgatgctaacttgtaatag

SEQ ID NO: 1946570 - DNA, 25 bp, Homo sapien
catgatgggcatactggcattttag

SEQ ID NO: 1946571 - DNA, 25 bp, Homo sapien
gccataaggtcactctctggtcctg

SEQ ID NO: 1946572 - DNA, 25 bp, Homo sapien
tgctgcagtctgctgcttagtgcta

SEQ ID NO: 1946573 - DNA, 25 bp, Homo sapien
cttagtgctatagggccaggcacca

SEQ ID NO: 1946574 - DNA, 25 bp, Homo sapien
ctgcgacctcacagatagttctttt

SEQ ID NO: 1946575 - DNA, 25 bp, Homo sapien
catgtttagatgtcatttcccacag

SEQ ID NO: 1946576 - DNA, 25 bp, Homo sapien
tatgtggcttgtctctcaaggagca

SEQ ID NO: 1946577 - DNA, 25 bp, Homo sapien
gacttccagactggtaggccgaccc

SEQ ID NO: 1946578 - DNA, 25 bp, Homo sapien
ggcatgcactaccaagctcggctac

SEQ ID NO: 1946579 - DNA, 25 bp, Homo sapien
cagagaccgggtctagaacattgtc

SEQ ID NO: 1946580 - DNA, 25 bp, Homo sapien
gatagcgttcagtgacagagaccgg

SEQ ID NO: 1946581 - DNA, 25 bp, Homo sapien
acattgtctagagtagctttaccac

SEQ ID NO: 1946582 - DNA, 25 bp, Homo sapien
gactgactgttctcacataagagga

SEQ ID NO: 1946583 - DNA, 25 bp, Homo sapien
tagggaccgggcatctggtatacct

SEQ ID NO: 1946584 - DNA, 25 bp, Homo sapien
tttacacgtagactcactattccag

SEQ ID NO: 1946585 - DNA, 25 bp, Homo sapien
tacattgcatattggtagggaccgg

SEQ ID NO: 1946586 - DNA, 25 bp, Homo sapien
caaactagatagtgtaactcctccg

SEQ ID NO: 1946587 - DNA, 25 bp, Homo sapien
cttctgcctgacttgtgcctttagc

SEQ ID NO: 1946588 - DNA, 25 bp, Homo sapien
gtgcctttagctctggaggaatatg

SEQ ID NO: 1946589 - DNA, 25 bp, Homo sapien
tagctctggaggaatatggagagct

SEQ ID NO: 1946590 - DNA, 25 bp, Homo sapien
tctgcctgacttgtgcctttagctc

SEQ ID NO: 1946591 - DNA, 25 bp, Homo sapien
ccaggacaccagaacagttgatctt

SEQ ID NO: 1946592 - DNA, 25 bp, Homo sapien
gaacagttgatcttaacacctttga

SEQ ID NO: 1946593 - DNA, 25 bp, Homo sapien
ccagaacagttgatcttaacacctt

SEQ ID NO: 1946594 - DNA, 25 bp, Homo sapien
ggacaccagaacagttgatcttaac

SEQ ID NO: 1946595 - DNA, 25 bp, Homo sapien
gctaaccttggcccagaaaggacat

SEQ ID NO: 1946596 - DNA, 25 bp, Homo sapien
tcagaagccaatgtacctttaattt

SEQ ID NO: 1946597 - DNA, 25 bp, Homo sapien
cttcagaagccaatgtacctttaat

SEQ ID NO: 1946598 - DNA, 25 bp, Homo sapien
cataatgtgtaagggggaactgtca

SEQ ID NO: 1946599 - DNA, 25 bp, Homo sapien
catctgagattttggcaggcaaggg

SEQ ID NO: 1946600 - DNA, 25 bp, Homo sapien
agagtagcgggtttggccatcctcg

SEQ ID NO: 1946601 - DNA, 25 bp, Homo sapien
gaggaaggtcttccatgagtcctaa

SEQ ID NO: 1946602 - DNA, 25 bp, Homo sapien
ccctggaaagggtcacactcgcata

SEQ ID NO: 1946603 - DNA, 25 bp, Homo sapien
agtaaagcaagccggtaagaggatc

SEQ ID NO: 1946604 - DNA, 25 bp, Homo sapien
tgtgagtaaagcaagccggtaagag

SEQ ID NO: 1946605 - DNA, 25 bp, Homo sapien
ctgtgagtaaagcaagccggtaaga

SEQ ID NO: 1946606 - DNA, 25 bp, Homo sapien
tgagtaaagcaagccggtaagagga

SEQ ID NO: 1946607 - DNA, 25 bp, Homo sapien
gagtttttacacagctgccactcct

SEQ ID NO: 1946608 - DNA, 25 bp, Homo sapien
gattttttcacataggctgagagtg

SEQ ID NO: 1946609 - DNA, 25 bp, Homo sapien
ccactcctcaaaggctaggatttcc

SEQ ID NO: 1946610 - DNA, 25 bp, Homo sapien
ggagagaacacagtttgtccttcct

SEQ ID NO: 1946611 - DNA, 25 bp, Homo sapien
gtgtcagaaaagcactgagtctctc

SEQ ID NO: 1946612 - DNA, 25 bp, Homo sapien
tctcataaggccagacagcaaacac

SEQ ID NO: 1946613 - DNA, 25 bp, Homo sapien
ggacacagagttatccatccaccat

SEQ ID NO: 1946614 - DNA, 25 bp, Homo sapien
cctgaaaagtgcctagtcgacaaga

SEQ ID NO: 1946615 - DNA, 25 bp, Homo sapien
gcgttacaagttcattgagcctcag

SEQ ID NO: 1946616 - DNA, 25 bp, Homo sapien
agcgttacaagttcattgagcctca

SEQ ID NO: 1946617 - DNA, 25 bp, Homo sapien
attggatattcagcccctctcagat

SEQ ID NO: 1946618 - DNA, 25 bp, Homo sapien
tttgttgtctatgcttttgcgatca

SEQ ID NO: 1946619 - DNA, 25 bp, Homo sapien
tgtgtatagtgtaagattggattct

SEQ ID NO: 1946620 - DNA, 25 bp, Homo sapien
ttttggtatgattcaatcccatttg

SEQ ID NO: 1946621 - DNA, 25 bp, Homo sapien
tgtatttacgtagacaatatattcg

SEQ ID NO: 1946622 - DNA, 25 bp, Homo sapien
atctccatccccattgggaacctga

SEQ ID NO: 1946623 - DNA, 25 bp, Homo sapien
tatattcgtccatgtattgcccatg

SEQ ID NO: 1946624 - DNA, 25 bp, Homo sapien
tacgtagacaatatattcgtccatg

SEQ ID NO: 1946625 - DNA, 25 bp, Homo sapien
gacagctgcatggtgtcacactggg

SEQ ID NO: 1946626 - DNA, 25 bp, Homo sapien
tctttatgcaaaaactagtgtggga

SEQ ID NO: 1946627 - DNA, 25 bp, Homo sapien
tcctccttcatgtttgacagctgca

SEQ ID NO: 1946628 - DNA, 25 bp, Homo sapien
gtgctgtcatctacccctgcaagaa

SEQ ID NO: 1946629 - DNA, 25 bp, Homo sapien
caccgtgcctagcagatatggcatt

SEQ ID NO: 1946630 - DNA, 25 bp, Homo sapien
cgtgcctagcagatatggcattttt

SEQ ID NO: 1946631 - DNA, 25 bp, Homo sapien
accgtgcctagcagatatggcattt

SEQ ID NO: 1946632 - DNA, 25 bp, Homo sapien
ccgtgcctagcagatatggcatttt

SEQ ID NO: 1946633 - DNA, 25 bp, Homo sapien
ttatatagctccttctagggcacac

SEQ ID NO: 1946634 - DNA, 25 bp, Homo sapien
gctcttcacttggtatcgttgtgga

SEQ ID NO: 1946635 - DNA, 25 bp, Homo sapien
cttcacttggtatcgttgtggaata

SEQ ID NO: 1946636 - DNA, 25 bp, Homo sapien
cagagctcttcacttggtatcgttg

SEQ ID NO: 1946637 - DNA, 25 bp, Homo sapien
cttggtatcgttgtggaataagcca

SEQ ID NO: 1946638 - DNA, 25 bp, Homo sapien
tggaatcaagccataacttctgaaa

SEQ ID NO: 1946639 - DNA, 25 bp, Homo sapien
gctcaggaatcagggccaacttggg

SEQ ID NO: 1946640 - DNA, 25 bp, Homo sapien
gctgcatggaccctacactagcctt

SEQ ID NO: 1946641 - DNA, 25 bp, Homo sapien
tgtcccaaggtttatcatctaagtt

SEQ ID NO: 1946642 - DNA, 25 bp, Homo sapien
tgttgctgatgctcacttctaatca

SEQ ID NO: 1946643 - DNA, 25 bp, Homo sapien
cagtagtcaacccaatttggagaga

SEQ ID NO: 1946644 - DNA, 25 bp, Homo sapien
gagaaagtgatcagatacaaggaat

SEQ ID NO: 1946645 - DNA, 25 bp, Homo sapien
tttggagagagaaagtgatcagata

SEQ ID NO: 1946646 - DNA, 25 bp, Homo sapien
tgcaatagagaattttactcttctc

SEQ ID NO: 1946647 - DNA, 25 bp, Homo sapien
cattctgctattgttagctactcta

SEQ ID NO: 1946648 - DNA, 25 bp, Homo sapien
tccattctgctattgttagctactc

SEQ ID NO: 1946649 - DNA, 25 bp, Homo sapien
tctgctattgttagctactctatca

SEQ ID NO: 1946650 - DNA, 25 bp, Homo sapien
tcttgcttgcctgaaagctctcggt

SEQ ID NO: 1946651 - DNA, 25 bp, Homo sapien
gcctgaaagctctcggtcagaaatt

SEQ ID NO: 1946652 - DNA, 25 bp, Homo sapien
gaaagctctcggtcagaaatttggt

SEQ ID NO: 1946653 - DNA, 25 bp, Homo sapien
gcttgcctgaaagctctcggtcaga

SEQ ID NO: 1946654 - DNA, 25 bp, Homo sapien
gagctaatcttggattctctcaaaa

SEQ ID NO: 1946655 - DNA, 25 bp, Homo sapien
agacaccgcaaactctgtgagctaa

SEQ ID NO: 1946656 - DNA, 25 bp, Homo sapien
tgagctaatcttggattctctcaaa

SEQ ID NO: 1946657 - DNA, 25 bp, Homo sapien
cttctaacagacaccgcaaactctg

SEQ ID NO: 1946658 - DNA, 25 bp, Homo sapien
aagtctgcggatccctatgtgattc

SEQ ID NO: 1946659 - DNA, 25 bp, Homo sapien
tgcggatccctatgtgattccattc

SEQ ID NO: 1946660 - DNA, 25 bp, Homo sapien
gtctgcggatccctatgtgattcca

SEQ ID NO: 1946661 - DNA, 25 bp, Homo sapien
cttaagtctgcggatccctatgtga

SEQ ID NO: 1946662 - DNA, 25 bp, Homo sapien
gcacagatgttgtggtgtcattcca

SEQ ID NO: 1946663 - DNA, 25 bp, Homo sapien
tgccatgccgcagcagagtgccctt

SEQ ID NO: 1946664 - DNA, 25 bp, Homo sapien
ccgcagcagagtgcccttctcaatg

SEQ ID NO: 1946665 - DNA, 25 bp, Homo sapien
aatgcacagatgttgtggtgtcatt

SEQ ID NO: 1946666 - DNA, 25 bp, Homo sapien
gcgggtcttagcgatattctgttgg

SEQ ID NO: 1946667 - DNA, 25 bp, Homo sapien
tgttggtatcactatggtgtgccgg

SEQ ID NO: 1946668 - DNA, 25 bp, Homo sapien
gccgggcttttgtttgaatggtcca

SEQ ID NO: 1946669 - DNA, 25 bp, Homo sapien
ccgactgcgggtcttagcgatattc

SEQ ID NO: 1946670 - DNA, 25 bp, Homo sapien
tgcattgtctgcttcaaaagtcagg

SEQ ID NO: 1946671 - DNA, 25 bp, Homo sapien
aagtcaggttcaccagagagagtaa

SEQ ID NO: 1946672 - DNA, 25 bp, Homo sapien
tcattttatgagcagacctaatcgc

SEQ ID NO: 1946673 - DNA, 25 bp, Homo sapien
tcgctctgccggtgtctgcattgtc

SEQ ID NO: 1946674 - DNA, 25 bp, Homo sapien
catggagggacatcatggtccaaca

SEQ ID NO: 1946675 - DNA, 25 bp, Homo sapien
tcttgagtttaggtccatggaggga

SEQ ID NO: 1946676 - DNA, 25 bp, Homo sapien
cctcaacaggaaaatagtgtgtgcc

SEQ ID NO: 1946677 - DNA, 25 bp, Homo sapien
caaaaagatgcttggatcctgggtc

SEQ ID NO: 1946678 - DNA, 25 bp, Homo sapien
caaatatccttcgagccttgggcat

SEQ ID NO: 1946679 - DNA, 25 bp, Homo sapien
acaaatatccttcgagccttgggca

SEQ ID NO: 1946680 - DNA, 25 bp, Homo sapien
tccacaaatatccttcgagccttgg

SEQ ID NO: 1946681 - DNA, 25 bp, Homo sapien
cacaaatatccttcgagccttgggc

SEQ ID NO: 1946682 - DNA, 25 bp, Homo sapien
cagtccagtggtttctacttgtggc

SEQ ID NO: 1946683 - DNA, 25 bp, Homo sapien
tgaggtgcagtccagtggtttctac

SEQ ID NO: 1946684 - DNA, 25 bp, Homo sapien
agtggtttctacttgtggctgggca

SEQ ID NO: 1946685 - DNA, 25 bp, Homo sapien
cttgtatgaggtgcagtccagtggt

SEQ ID NO: 1946686 - DNA, 25 bp, Homo sapien
gcagatttcagctgctcaacacaat

SEQ ID NO: 1946687 - DNA, 25 bp, Homo sapien
ttggttatctgcttgtgaagcagat

SEQ ID NO: 1946688 - DNA, 25 bp, Homo sapien
tggttatctgcttgtgaagcagatt

SEQ ID NO: 1946689 - DNA, 25 bp, Homo sapien
gaagcagatttcagctgctcaacac

SEQ ID NO: 1946690 - DNA, 25 bp, Homo sapien
tgtgctgctgccgacaaatgcggtt

SEQ ID NO: 1946691 - DNA, 25 bp, Homo sapien
aatgcggttctcttaggactactgg

SEQ ID NO: 1946692 - DNA, 25 bp, Homo sapien
gactactgggtgatagtgacagtga

SEQ ID NO: 1946693 - DNA, 25 bp, Homo sapien
tcagccagcaataggctttgtgctg

SEQ ID NO: 1946694 - DNA, 25 bp, Homo sapien
tttcctgttctgcatttgtgacctg

SEQ ID NO: 1946695 - DNA, 25 bp, Homo sapien
tctgaaagtagtaccatctgttttc

SEQ ID NO: 1946696 - DNA, 25 bp, Homo sapien
gcatttgtgacctgaactgccttcc

SEQ ID NO: 1946697 - DNA, 25 bp, Homo sapien
ctgaaagtagtaccatctgttttcc

SEQ ID NO: 1946698 - DNA, 25 bp, Homo sapien
gggatgacgctgcacacttgacaac

SEQ ID NO: 1946699 - DNA, 25 bp, Homo sapien
gggaccacacaatcatcggctgaga

SEQ ID NO: 1946700 - DNA, 25 bp, Homo sapien
gctgagagatcgtaatagagaaaca

SEQ ID NO: 1946701 - DNA, 25 bp, Homo sapien
cgggtcctcgggatgacgctgcaca

SEQ ID NO: 1946702 - DNA, 25 bp, Homo sapien
attatgtaattgtcacagaaggctc

SEQ ID NO: 1946703 - DNA, 25 bp, Homo sapien
tttggaatcaccacatatggactct

SEQ ID NO: 1946704 - DNA, 25 bp, Homo sapien
tatgtaattgtcacagaaggctctg

SEQ ID NO: 1946705 - DNA, 25 bp, Homo sapien
aatatgctttggaatcaccacatat

SEQ ID NO: 1946706 - DNA, 25 bp, Homo sapien
aacagcttcagttgcccagagcctg

SEQ ID NO: 1946707 - DNA, 25 bp, Homo sapien
cagtcccccagaggtatctcagagg

SEQ ID NO: 1946708 - DNA, 25 bp, Homo sapien
gatgcctgcacccttgtgagcagac

SEQ ID NO: 1946709 - DNA, 25 bp, Homo sapien
gaaacgggaagcctgttcctagatg

SEQ ID NO: 1946710 - DNA, 25 bp, Homo sapien
tcgcctccctagcaaaagatgaggt

SEQ ID NO: 1946711 - DNA, 25 bp, Homo sapien
tatctttgcaccttcctacataggc

SEQ ID NO: 1946712 - DNA, 25 bp, Homo sapien
ctacataggcctgctcagagacggg

SEQ ID NO: 1946713 - DNA, 25 bp, Homo sapien
cacgagctgagtggaaacgagagat

SEQ ID NO: 1946714 - DNA, 25 bp, Homo sapien
ccaaacagcattccaggagtcagca

SEQ ID NO: 1946715 - DNA, 25 bp, Homo sapien
tgatgaagaatcactctctccgtag

SEQ ID NO: 1946716 - DNA, 25 bp, Homo sapien
tctctccgtagtcttttccaaacag

SEQ ID NO: 1946717 - DNA, 25 bp, Homo sapien
gaaaagatgcttaatcactgatgaa

SEQ ID NO: 1946718 - DNA, 25 bp, Homo sapien
gggatatatcggatgtcaataagcg

SEQ ID NO: 1946719 - DNA, 25 bp, Homo sapien
tatagaagtagtaaggattaagtgg

SEQ ID NO: 1946720 - DNA, 25 bp, Homo sapien
aaaacttccactactgcactgggta

SEQ ID NO: 1946721 - DNA, 25 bp, Homo sapien
tcaataagcggagcaaggtaagaaa

SEQ ID NO: 1946722 - DNA, 25 bp, Homo sapien
ctttaagaggtaaagcctggtggct

SEQ ID NO: 1946723 - DNA, 25 bp, Homo sapien
tacgagtcaccatctccttggagag

SEQ ID NO: 1946724 - DNA, 25 bp, Homo sapien
gctttggtacgagtcaccatctcct

SEQ ID NO: 1946725 - DNA, 25 bp, Homo sapien
aagcctggtggctttggtacgagtc

SEQ ID NO: 1946726 - DNA, 25 bp, Homo sapien
gagaagcagcatagaaccagattgg

SEQ ID NO: 1946727 - DNA, 25 bp, Homo sapien
agaccaagaagagcacaatgcaggg

SEQ ID NO: 1946728 - DNA, 25 bp, Homo sapien
gccagataggaagtctagccttgtt

SEQ ID NO: 1946729 - DNA, 25 bp, Homo sapien
ttgtttcagtgaagcacacgaaggc

SEQ ID NO: 1946730 - DNA, 25 bp, Homo sapien
ctgctgaataagggacagcggtgag

SEQ ID NO: 1946731 - DNA, 25 bp, Homo sapien
taagggacagcggtgaggggagaga

SEQ ID NO: 1946732 - DNA, 25 bp, Homo sapien
gctgaataagggacagcggtgaggg

SEQ ID NO: 1946733 - DNA, 25 bp, Homo sapien
gaataagggacagcggtgaggggag

SEQ ID NO: 1946734 - DNA, 25 bp, Homo sapien
tgccactcactgtaggagtccactt

SEQ ID NO: 1946735 - DNA, 25 bp, Homo sapien
gagtccacttcccattcagacacca

SEQ ID NO: 1946736 - DNA, 25 bp, Homo sapien
aggtgcactggaagatcaggagcct

SEQ ID NO: 1946737 - DNA, 25 bp, Homo sapien
gcactggaagatcaggagcctgtcc

SEQ ID NO: 1946738 - DNA, 25 bp, Homo sapien
catcttggctcctcctcccgacaac

SEQ ID NO: 1946739 - DNA, 25 bp, Homo sapien
atcttggctcctcctcccgacaact

SEQ ID NO: 1946740 - DNA, 25 bp, Homo sapien
ttggctcctcctcccgacaacttat

SEQ ID NO: 1946741 - DNA, 25 bp, Homo sapien
cttggctcctcctcccgacaactta

SEQ ID NO: 1946742 - DNA, 25 bp, Homo sapien
gttgggcatcccaacaagtatctgc

SEQ ID NO: 1946743 - DNA, 25 bp, Homo sapien
gatgacaaccaagttgggcatccca

SEQ ID NO: 1946744 - DNA, 25 bp, Homo sapien
tgccccttgtatcctaacacagagt

SEQ ID NO: 1946745 - DNA, 25 bp, Homo sapien
gcatcctcatcggtctgccccttgt

SEQ ID NO: 1946746 - DNA, 25 bp, Homo sapien
actcattttctcaagcccagggacc

SEQ ID NO: 1946747 - DNA, 25 bp, Homo sapien
tctgcccccataagacatgtttgac

SEQ ID NO: 1946748 - DNA, 25 bp, Homo sapien
taggggaccctttaagcatggatgg

SEQ ID NO: 1946749 - DNA, 25 bp, Homo sapien
tgtttgacagccataggggaccctt

SEQ ID NO: 1946750 - DNA, 25 bp, Homo sapien
ctttagtgaacattagtttgacatg

SEQ ID NO: 1946751 - DNA, 25 bp, Homo sapien
tctttagtgaacattagtttgacat

SEQ ID NO: 1946752 - DNA, 25 bp, Homo sapien
tgtgacaaggatcaccctggacttt

SEQ ID NO: 1946753 - DNA, 25 bp, Homo sapien
catttgggtacctggatgtttctgg

SEQ ID NO: 1946754 - DNA, 25 bp, Homo sapien
agttgtgacaaggatcaccctggac

SEQ ID NO: 1946755 - DNA, 25 bp, Homo sapien
ttcatttgggtacctggatgtttct

SEQ ID NO: 1946756 - DNA, 25 bp, Homo sapien
acagggctattatctggcacaaagt

SEQ ID NO: 1946757 - DNA, 25 bp, Homo sapien
cttaaacagggctattatctggcac

SEQ ID NO: 1946758 - DNA, 25 bp, Homo sapien
gcacaaagttggagtgattgcttct

SEQ ID NO: 1946759 - DNA, 25 bp, Homo sapien
gctattatctggcacaaagttggag

SEQ ID NO: 1946760 - DNA, 25 bp, Homo sapien
ggcatcacagggttgctgcttgaga

SEQ ID NO: 1946761 - DNA, 25 bp, Homo sapien
cactcaccacgtgcatgagtgtgca

SEQ ID NO: 1946762 - DNA, 25 bp, Homo sapien
tttgcttgcggaagtgggcatcaca

SEQ ID NO: 1946763 - DNA, 25 bp, Homo sapien
gaaaggttacttgcataggagggaa

SEQ ID NO: 1946764 - DNA, 25 bp, Homo sapien
tactcggcaaccaacgctagagttt

SEQ ID NO: 1946765 - DNA, 25 bp, Homo sapien
tgtcttaaatgttgccgttctcggt

SEQ ID NO: 1946766 - DNA, 25 bp, Homo sapien
tgcagtaaaaagtcaagtctcaccg

SEQ ID NO: 1946767 - DNA, 25 bp, Homo sapien
tgaaacctgagctaacatactcggc

SEQ ID NO: 1946768 - DNA, 25 bp, Homo sapien
cagatcgtggtaaccttttatagca

SEQ ID NO: 1946769 - DNA, 25 bp, Homo sapien
tgagataatacgtgttcagatcgtg

SEQ ID NO: 1946770 - DNA, 25 bp, Homo sapien
tctactttgagataatacgtgttca

SEQ ID NO: 1946771 - DNA, 25 bp, Homo sapien
aatacgtgttcagatcgtggtaacc

SEQ ID NO: 1946772 - DNA, 25 bp, Homo sapien
tgtctcttgtggtacaggcatgagg

SEQ ID NO: 1946773 - DNA, 25 bp, Homo sapien
ttgttgtctcttgtggtacaggcat

SEQ ID NO: 1946774 - DNA, 25 bp, Homo sapien
tggtacaggcatgaggtggaacgtg

SEQ ID NO: 1946775 - DNA, 25 bp, Homo sapien
tctcttgtggtacaggcatgaggtg

SEQ ID NO: 1946776 - DNA, 25 bp, Homo sapien
tctctgatagacctgtgctgtgact

SEQ ID NO: 1946777 - DNA, 25 bp, Homo sapien
gagatgttggtctgaccctttgaat

SEQ ID NO: 1946778 - DNA, 25 bp, Homo sapien
tgcatttgctagagaaaacctggct

SEQ ID NO: 1946779 - DNA, 25 bp, Homo sapien
ctgtgactcctctagagatgttggt

SEQ ID NO: 1946780 - DNA, 25 bp, Homo sapien
tacacagcttcctttggtctggcca

SEQ ID NO: 1946781 - DNA, 25 bp, Homo sapien
gaccaggtcagtcaagccaacagaa

SEQ ID NO: 1946782 - DNA, 25 bp, Homo sapien
gtgaaccaaggccatcactaataaa

SEQ ID NO: 1946783 - DNA, 25 bp, Homo sapien
aataaaactgtaacctcgctggtgg

SEQ ID NO: 1946784 - DNA, 25 bp, Homo sapien
gggcatcagcataaagatgttcaat

SEQ ID NO: 1946785 - DNA, 25 bp, Homo sapien
agaggaccatccttctcaagaatca

SEQ ID NO: 1946786 - DNA, 25 bp, Homo sapien
cttgggcatcagcataaagatgttc

SEQ ID NO: 1946787 - DNA, 25 bp, Homo sapien
tctttggttaagaggaccatccttc

SEQ ID NO: 1946788 - DNA, 25 bp, Homo sapien
tcaaaataaatctcggcagatttca

SEQ ID NO: 1946789 - DNA, 25 bp, Homo sapien
tcatcaaaataaatctcggcagatt

SEQ ID NO: 1946790 - DNA, 25 bp, Homo sapien
cttcatcaaaataaatctcggcaga

SEQ ID NO: 1946791 - DNA, 25 bp, Homo sapien
ataaatctcggcagatttcaacacc

SEQ ID NO: 1946792 - DNA, 25 bp, Homo sapien
tccatacttcgaattggttcttgat

SEQ ID NO: 1946793 - DNA, 25 bp, Homo sapien
aatccatacttcgaattggttcttg

SEQ ID NO: 1946794 - DNA, 25 bp, Homo sapien
ccatacttcgaattggttcttgatc

SEQ ID NO: 1946795 - DNA, 25 bp, Homo sapien
gaaaatccatacttcgaattggttc

SEQ ID NO: 1946796 - DNA, 25 bp, Homo sapien
agtgaagaagacatcttggacattc

SEQ ID NO: 1946797 - DNA, 25 bp, Homo sapien
tgagtgaagaagacatcttggacat

SEQ ID NO: 1946798 - DNA, 25 bp, Homo sapien
aagaagacatcttggacattccagc

SEQ ID NO: 1946799 - DNA, 25 bp, Homo sapien
tgaagaagacatcttggacattcca

SEQ ID NO: 1946800 - DNA, 25 bp, Homo sapien
gaacaagttagtccaactaactcca

SEQ ID NO: 1946801 - DNA, 25 bp, Homo sapien
aaaagaacttaatgccatagaacaa

SEQ ID NO: 1946802 - DNA, 25 bp, Homo sapien
cactcccgtcgctaagccttgctct

SEQ ID NO: 1946803 - DNA, 25 bp, Homo sapien
actccaatcactcccgtcgctaagc

SEQ ID NO: 1946804 - DNA, 25 bp, Homo sapien
ccactgaggactaatgttgagatcc

SEQ ID NO: 1946805 - DNA, 25 bp, Homo sapien
tgaggactaatgttgagatccccaa

SEQ ID NO: 1946806 - DNA, 25 bp, Homo sapien
gccaccactgaggactaatgttgag

SEQ ID NO: 1946807 - DNA, 25 bp, Homo sapien
cagccaccactgaggactaatgttg

SEQ ID NO: 1946808 - DNA, 25 bp, Homo sapien
ctgaaccttgtttgaacctggattc

SEQ ID NO: 1946809 - DNA, 25 bp, Homo sapien
ctccacttattagcgactgcagaaa

SEQ ID NO: 1946810 - DNA, 25 bp, Homo sapien
caggaagtcagacactgaaccttgt

SEQ ID NO: 1946811 - DNA, 25 bp, Homo sapien
ctggactccacttattagcgactgc

SEQ ID NO: 1946812 - DNA, 25 bp, Homo sapien
tctgcaaagcatactccagttctga

SEQ ID NO: 1946813 - DNA, 25 bp, Homo sapien
gattgtcagggctaaagaaagtcat

SEQ ID NO: 1946814 - DNA, 25 bp, Homo sapien
taatctccagctgattgtcagggct

SEQ ID NO: 1946815 - DNA, 25 bp, Homo sapien
cagctctgcaaagcatactccagtt

SEQ ID NO: 1946816 - DNA, 25 bp, Homo sapien
acagcctgcgaaagtggcccacagc

SEQ ID NO: 1946817 - DNA, 25 bp, Homo sapien
aaagggatcttgatgaaatgagggc

SEQ ID NO: 1946818 - DNA, 25 bp, Homo sapien
cctggggtagagacagcctgcgaaa

SEQ ID NO: 1946819 - DNA, 25 bp, Homo sapien
gtagagacagcctgcgaaagtggcc

SEQ ID NO: 1946820 - DNA, 25 bp, Homo sapien
aaccatcgccttttgtcctgtatca

SEQ ID NO: 1946821 - DNA, 25 bp, Homo sapien
gcttcagagctacctttagggtgac

SEQ ID NO: 1946822 - DNA, 25 bp, Homo sapien
gctacctttagggtgacagacctca

SEQ ID NO: 1946823 - DNA, 25 bp, Homo sapien
gtatcaagaaaacatccggcttcag

SEQ ID NO: 1946824 - DNA, 25 bp, Homo sapien
tcttgctcgactcacataattctta

SEQ ID NO: 1946825 - DNA, 25 bp, Homo sapien
gcacaatgcattgcagtaaaaacct

SEQ ID NO: 1946826 - DNA, 25 bp, Homo sapien
gaattgtttcgtgttttcagcatct

SEQ ID NO: 1946827 - DNA, 25 bp, Homo sapien
actaggatccttgatttgtcttttc

SEQ ID NO: 1946828 - DNA, 25 bp, Homo sapien
aggtctgtcgatattccttatttgg

SEQ ID NO: 1946829 - DNA, 25 bp, Homo sapien
cttatttggtgtcctccaaagtggg

SEQ ID NO: 1946830 - DNA, 25 bp, Homo sapien
tcttcaaccgttggtaggtctgtcg

SEQ ID NO: 1946831 - DNA, 25 bp, Homo sapien
tagcagcagtccacgcttttccaga

SEQ ID NO: 1946832 - DNA, 25 bp, Homo sapien
ctacaaagtgagtacccacaaactg

SEQ ID NO: 1946833 - DNA, 25 bp, Homo sapien
caaagtgagtacccacaaactgaga

SEQ ID NO: 1946834 - DNA, 25 bp, Homo sapien
tacaaagtgagtacccacaaactga

SEQ ID NO: 1946835 - DNA, 25 bp, Homo sapien
acaaagtgagtacccacaaactgag

SEQ ID NO: 1946836 - DNA, 25 bp, Homo sapien
tcctgtcttaaaccttagggctgaa

SEQ ID NO: 1946837 - DNA, 25 bp, Homo sapien
gatagaagtgacataagagacacac

SEQ ID NO: 1946838 - DNA, 25 bp, Homo sapien
agcctaagatagaagtgacataaga

SEQ ID NO: 1946839 - DNA, 25 bp, Homo sapien
caaagggttgtactctcagtaaagg

SEQ ID NO: 1946840 - DNA, 25 bp, Homo sapien
agttgaactgtgagtagcctggcca

SEQ ID NO: 1946841 - DNA, 25 bp, Homo sapien
tcagactgtatctcagactgcccgt

SEQ ID NO: 1946842 - DNA, 25 bp, Homo sapien
cctatgaagccccttggattgtaac

SEQ ID NO: 1946843 - DNA, 25 bp, Homo sapien
ccagggcctggaacaacagatattt

SEQ ID NO: 1946844 - DNA, 25 bp, Homo sapien
tttaacatcaagagagtgggtgcag

SEQ ID NO: 1946845 - DNA, 25 bp, Homo sapien
ctttaacatcaagagagtgggtgca

SEQ ID NO: 1946846 - DNA, 25 bp, Homo sapien
gacacaaaagattatctgaacctcg

SEQ ID NO: 1946847 - DNA, 25 bp, Homo sapien
tctgcattcggcagttcagagttga

SEQ ID NO: 1946848 - DNA, 25 bp, Homo sapien
tgcaccggacaaaaatgggacacaa

SEQ ID NO: 1946849 - DNA, 25 bp, Homo sapien
gaaccgctgctgagtgcttatctgc

SEQ ID NO: 1946850 - DNA, 25 bp, Homo sapien
tcaggatgcttatcacctgcagcaa

SEQ ID NO: 1946851 - DNA, 25 bp, Homo sapien
tactgcaatcagtgttgtcctcctg

SEQ ID NO: 1946852 - DNA, 25 bp, Homo sapien
cagttgatgagctctataatccggc

SEQ ID NO: 1946853 - DNA, 25 bp, Homo sapien
gtgaagctcagttccatcaggatgc

SEQ ID NO: 1946854 - DNA, 25 bp, Homo sapien
aatgcctgatacatgcagagtgccc

SEQ ID NO: 1946855 - DNA, 25 bp, Homo sapien
tctagccaagcaatagggcccaagg

SEQ ID NO: 1946856 - DNA, 25 bp, Homo sapien
tgggtattcttgatcactctgagcc

SEQ ID NO: 1946857 - DNA, 25 bp, Homo sapien
tctggaaaatgacggtggtaatacc

SEQ ID NO: 1946858 - DNA, 25 bp, Homo sapien
tatatggcctcacatggaaaaagcc

SEQ ID NO: 1946859 - DNA, 25 bp, Homo sapien
tctctttcctccttcatagcaaaaa

SEQ ID NO: 1946860 - DNA, 25 bp, Homo sapien
tgtagaagttcaagatttcacagcc

SEQ ID NO: 1946861 - DNA, 25 bp, Homo sapien
cattggtggatcactattggattct

SEQ ID NO: 1946862 - DNA, 25 bp, Homo sapien
cataacactcttggagaagcgctga

SEQ ID NO: 1946863 - DNA, 25 bp, Homo sapien
gaagcgctgatttatgagctagaga

SEQ ID NO: 1946864 - DNA, 25 bp, Homo sapien
gagggtgcagggttcataacactct

SEQ ID NO: 1946865 - DNA, 25 bp, Homo sapien
aaatcagcactgacaaggagggtgc

SEQ ID NO: 1946866 - DNA, 25 bp, Homo sapien
ccttgtgggtggagtgtttggaata

SEQ ID NO: 1946867 - DNA, 25 bp, Homo sapien
gagtgtttggaataagttggattac

SEQ ID NO: 1946868 - DNA, 25 bp, Homo sapien
ctcacttgctgccttgtgggtggag

SEQ ID NO: 1946869 - DNA, 25 bp, Homo sapien
ataagttggattactgggaaattag

SEQ ID NO: 1946870 - DNA, 25 bp, Homo sapien
ctctggacaacacatccatagttgt

SEQ ID NO: 1946871 - DNA, 25 bp, Homo sapien
tttcctctggacaacacatccatag

SEQ ID NO: 1946872 - DNA, 25 bp, Homo sapien
tcctctggacaacacatccatagtt

SEQ ID NO: 1946873 - DNA, 25 bp, Homo sapien
aggtttcctctggacaacacatcca

SEQ ID NO: 1946874 - DNA, 25 bp, Homo sapien
tgtaaattttacgcaattgccgggc

SEQ ID NO: 1946875 - DNA, 25 bp, Homo sapien
ttggtcatagaaacccctccaagtg

SEQ ID NO: 1946876 - DNA, 25 bp, Homo sapien
accgataagctttggagtgcctctg

SEQ ID NO: 1946877 - DNA, 25 bp, Homo sapien
ggaccccagcgatgacagtctcggt

SEQ ID NO: 1946878 - DNA, 25 bp, Homo sapien
tctgtacagagctggccagaaccca

SEQ ID NO: 1946879 - DNA, 25 bp, Homo sapien
cctgaggtcaatgatggaacgacgc

SEQ ID NO: 1946880 - DNA, 25 bp, Homo sapien
aatgatggaacgacgcccaaacggg

SEQ ID NO: 1946881 - DNA, 25 bp, Homo sapien
ggtcaatgatggaacgacgcccaaa

SEQ ID NO: 1946882 - DNA, 25 bp, Homo sapien
gaaagaacctcctcagagttgacag

SEQ ID NO: 1946883 - DNA, 25 bp, Homo sapien
tctccctcaagcctattttaatcat

SEQ ID NO: 1946884 - DNA, 25 bp, Homo sapien
tccagtcagtcttgtgtatctcaga

SEQ ID NO: 1946885 - DNA, 25 bp, Homo sapien
cacatcttctggtcaagttacaaag

SEQ ID NO: 1946886 - DNA, 25 bp, Homo sapien
tatctcagatctggctaagtggagg

SEQ ID NO: 1946887 - DNA, 25 bp, Homo sapien
cattttagaagcaccgaggacagtg

SEQ ID NO: 1946888 - DNA, 25 bp, Homo sapien
caggacggagaagcacaaggctgtc

SEQ ID NO: 1946889 - DNA, 25 bp, Homo sapien
tgggctcggagcatgaaaccaagtc

SEQ ID NO: 1946890 - DNA, 25 bp, Homo sapien
cacacagggccaagagtccaaagat

SEQ ID NO: 1946891 - DNA, 25 bp, Homo sapien
ccaggtttaagtgctgactcgggat

SEQ ID NO: 1946892 - DNA, 25 bp, Homo sapien
caggcaagccattctataatgtgta

SEQ ID NO: 1946893 - DNA, 25 bp, Homo sapien
gccctgaagcctaggagcactggga

SEQ ID NO: 1946894 - DNA, 25 bp, Homo sapien
tgctggaacatgcaccaggcaagcc

SEQ ID NO: 1946895 - DNA, 25 bp, Homo sapien
tggagtgtgggttaaagaaaatctg

SEQ ID NO: 1946896 - DNA, 25 bp, Homo sapien
ggagtgtgggttaaagaaaatctgc

SEQ ID NO: 1946897 - DNA, 25 bp, Homo sapien
ttaaagaaaatctgctgattctgct

SEQ ID NO: 1946898 - DNA, 25 bp, Homo sapien
aagaaaatctgctgattctgctgac

SEQ ID NO: 1946899 - DNA, 25 bp, Homo sapien
ggtctcgtgcgggtccctaagagct

SEQ ID NO: 1946900 - DNA, 25 bp, Homo sapien
tctcgtgcgggtccctaagagctgg

SEQ ID NO: 1946901 - DNA, 25 bp, Homo sapien
catttgggtctcgtgcgggtcccta

SEQ ID NO: 1946902 - DNA, 25 bp, Homo sapien
gtcactgcatttgggtctcgtgcgg

SEQ ID NO: 1946903 - DNA, 25 bp, Homo sapien
gtcccgcgggtctctgtactctgaa

SEQ ID NO: 1946904 - DNA, 25 bp, Homo sapien
ttataatgcgtgttgcaaaaatgcc

SEQ ID NO: 1946905 - DNA, 25 bp, Homo sapien
aaaatgcctgcctgttcttgctgat

SEQ ID NO: 1946906 - DNA, 25 bp, Homo sapien
caggtcttgtctgcaacctcattgc

SEQ ID NO: 1946907 - DNA, 25 bp, Homo sapien
agcaatagtgacaccacccaggagg

SEQ ID NO: 1946908 - DNA, 25 bp, Homo sapien
ggctcctggatgtcatcacctctgc

SEQ ID NO: 1946909 - DNA, 25 bp, Homo sapien
gagcagaactctctgggagaactcg

SEQ ID NO: 1946910 - DNA, 25 bp, Homo sapien
ccctgttccaaagcaatagtgacac

SEQ ID NO: 1946911 - DNA, 25 bp, Homo sapien
gctcgaactggcagaagaccatgga

SEQ ID NO: 1946912 - DNA, 25 bp, Homo sapien
ctcagctcgaactggcagaagacca

SEQ ID NO: 1946913 - DNA, 25 bp, Homo sapien
cagaagaccatggatgagtgtttgg

SEQ ID NO: 1946914 - DNA, 25 bp, Homo sapien
gaactggcagaagaccatggatgag

SEQ ID NO: 1946915 - DNA, 25 bp, Homo sapien
gagcagacagaagctgggaggaagt

SEQ ID NO: 1946916 - DNA, 25 bp, Homo sapien
atgcagggctgctacgttttggaaa

SEQ ID NO: 1946917 - DNA, 25 bp, Homo sapien
cagggctgctacgttttggaaaatc

SEQ ID NO: 1946918 - DNA, 25 bp, Homo sapien
tgaacagtgaacaacagcctgagca

SEQ ID NO: 1946919 - DNA, 25 bp, Homo sapien
cgtatctcctgaaagtcggccgtga

SEQ ID NO: 1946920 - DNA, 25 bp, Homo sapien
cctgacaaaggtcccagttacatca

SEQ ID NO: 1946921 - DNA, 25 bp, Homo sapien
tagatttgagtcattagaaagcctc

SEQ ID NO: 1946922 - DNA, 25 bp, Homo sapien
ttacatcactaatggttaactgacg

SEQ ID NO: 1946923 - DNA, 25 bp, Homo sapien
gttccttcttgcagaacagccgcgg

SEQ ID NO: 1946924 - DNA, 25 bp, Homo sapien
tactgatggtgcagaccactgacca

SEQ ID NO: 1946925 - DNA, 25 bp, Homo sapien
ccttcagcagggactaccacagttc

SEQ ID NO: 1946926 - DNA, 25 bp, Homo sapien
agcctgaagtactgatggtgcagac

SEQ ID NO: 1946927 - DNA, 25 bp, Homo sapien
agcacggagaggcatttctaacaat

SEQ ID NO: 1946928 - DNA, 25 bp, Homo sapien
cagctgttgctgtttgagcacggag

SEQ ID NO: 1946929 - DNA, 25 bp, Homo sapien
gctgttgctgtttgagcacggagag

SEQ ID NO: 1946930 - DNA, 25 bp, Homo sapien
tgttgctgtttgagcacggagaggc

SEQ ID NO: 1946931 - DNA, 25 bp, Homo sapien
tcagtgactccttcaaacagacact

SEQ ID NO: 1946932 - DNA, 25 bp, Homo sapien
actcagtgactccttcaaacagaca

SEQ ID NO: 1946933 - DNA, 25 bp, Homo sapien
gtgactccttcaaacagacactgac

SEQ ID NO: 1946934 - DNA, 25 bp, Homo sapien
cactcagtgactccttcaaacagac

SEQ ID NO: 1946935 - DNA, 25 bp, Homo sapien
ggcggatgtgggggcagctcgaagc

SEQ ID NO: 1946936 - DNA, 25 bp, Homo sapien
cggatgtgggggcagctcgaagcat

SEQ ID NO: 1946937 - DNA, 25 bp, Homo sapien
gcggatgtgggggcagctcgaagca

SEQ ID NO: 1946938 - DNA, 25 bp, Homo sapien
aggcggatgtgggggcagctcgaag

SEQ ID NO: 1946939 - DNA, 25 bp, Homo sapien
atgtaaagcgcccaggaagccactg

SEQ ID NO: 1946940 - DNA, 25 bp, Homo sapien
ggcactccgggaaatcagacgtcat

SEQ ID NO: 1946941 - DNA, 25 bp, Homo sapien
cagacgtcatctgaagtccaggaat

SEQ ID NO: 1946942 - DNA, 25 bp, Homo sapien
ggtgaaggaacctcatcgtcccagg

SEQ ID NO: 1946943 - DNA, 25 bp, Homo sapien
tttcctgggctttcaggatttctct

SEQ ID NO: 1946944 - DNA, 25 bp, Homo sapien
caggttcctgcctaggtgtgagcag

SEQ ID NO: 1946945 - DNA, 25 bp, Homo sapien
tacaggcagtcatttatcgctcttc

SEQ ID NO: 1946946 - DNA, 25 bp, Homo sapien
taggtgtgagcagcataaggaactg

SEQ ID NO: 1946947 - DNA, 25 bp, Homo sapien
agctgcgcctgactgaagttgacag

SEQ ID NO: 1946948 - DNA, 25 bp, Homo sapien
gagctgcgcctgactgaagttgaca

SEQ ID NO: 1946949 - DNA, 25 bp, Homo sapien
agagctgcgcctgactgaagttgac

SEQ ID NO: 1946950 - DNA, 25 bp, Homo sapien
tcagagctgcgcctgactgaagttg

SEQ ID NO: 1946951 - DNA, 25 bp, Homo sapien
caaagatttttacccagacaccaag

SEQ ID NO: 1946952 - DNA, 25 bp, Homo sapien
tgtcttctttcaaagtgatgacaaa

SEQ ID NO: 1946953 - DNA, 25 bp, Homo sapien
tatcttgggtcagtcctataagacc

SEQ ID NO: 1946954 - DNA, 25 bp, Homo sapien
ccagacatatcttgggtcagtccta

SEQ ID NO: 1946955 - DNA, 25 bp, Homo sapien
cagctctggcgactgggaaacgtag

SEQ ID NO: 1946956 - DNA, 25 bp, Homo sapien
cggtaaagatcatcagaaaggaggg

SEQ ID NO: 1946957 - DNA, 25 bp, Homo sapien
atggccacgcggtctcagcagctct

SEQ ID NO: 1946958 - DNA, 25 bp, Homo sapien
ggttacagggcggtaaagatcatca

SEQ ID NO: 1946959 - DNA, 25 bp, Homo sapien
tttgtttacacaccacacgccctgg

SEQ ID NO: 1946960 - DNA, 25 bp, Homo sapien
accagtgccggcgttccagacgctt

SEQ ID NO: 1946961 - DNA, 25 bp, Homo sapien
cgcgacctgattgacaacaattttg

SEQ ID NO: 1946962 - DNA, 25 bp, Homo sapien
ggctccctcggagccttcaaagacg

SEQ ID NO: 1946963 - DNA, 25 bp, Homo sapien
gaggcgccgacccagcgaaactggt

SEQ ID NO: 1946964 - DNA, 25 bp, Homo sapien
cgccgacccagcgaaactggtgcat

SEQ ID NO: 1946965 - DNA, 25 bp, Homo sapien
ggcgccgacccagcgaaactggtgc

SEQ ID NO: 1946966 - DNA, 25 bp, Homo sapien
gggaggcgccgacccagcgaaactg

SEQ ID NO: 1946967 - DNA, 25 bp, Homo sapien
aggaacaatgcggagaccctgggat

SEQ ID NO: 1946968 - DNA, 25 bp, Homo sapien
ccccaggaacaatgcggagaccctg

SEQ ID NO: 1946969 - DNA, 25 bp, Homo sapien
gaacaatgcggagaccctgggattt

SEQ ID NO: 1946970 - DNA, 25 bp, Homo sapien
tgtctccccaggaacaatgcggaga

SEQ ID NO: 1946971 - DNA, 25 bp, Homo sapien
gattcacatttactttgttggaaat

SEQ ID NO: 1946972 - DNA, 25 bp, Homo sapien
gataaatacaggtatgtctgcaaat

SEQ ID NO: 1946973 - DNA, 25 bp, Homo sapien
taaatacaggtatgtctgcaaatga

SEQ ID NO: 1946974 - DNA, 25 bp, Homo sapien
aatacaggtatgtctgcaaatgaag

SEQ ID NO: 1946975 - DNA, 25 bp, Homo sapien
ttctgggaaccacaatatatgcgct

SEQ ID NO: 1946976 - DNA, 25 bp, Homo sapien
ctagagtaggaatattatcagtccc

SEQ ID NO: 1946977 - DNA, 25 bp, Homo sapien
tcccccgtggcattcctggtggaga

SEQ ID NO: 1946978 - DNA, 25 bp, Homo sapien
tatttggtttcaatgtctctcagtc

SEQ ID NO: 1946979 - DNA, 25 bp, Homo sapien
tgtagtttcttaagaaatgaggcac

SEQ ID NO: 1946980 - DNA, 25 bp, Homo sapien
tagtttcttaagaaatgaggcactt

SEQ ID NO: 1946981 - DNA, 25 bp, Homo sapien
gtttcttaagaaatgaggcacttac

SEQ ID NO: 1946982 - DNA, 25 bp, Homo sapien
agtttcttaagaaatgaggcactta

SEQ ID NO: 1946983 - DNA, 25 bp, Homo sapien
atatcccaagggcttaaacggagat

SEQ ID NO: 1946984 - DNA, 25 bp, Homo sapien
taaacggagatttctgctgcagcgg

SEQ ID NO: 1946985 - DNA, 25 bp, Homo sapien
ccaagggcttaaacggagatttctg

SEQ ID NO: 1946986 - DNA, 25 bp, Homo sapien
gctgcagcgggtaaagtagggagtt

SEQ ID NO: 1946987 - DNA, 25 bp, Homo sapien
tggcagggatactgggtgtggtaaa

SEQ ID NO: 1946988 - DNA, 25 bp, Homo sapien
ttcatggtccctttggcacacgctc

SEQ ID NO: 1946989 - DNA, 25 bp, Homo sapien
aggaaaacattctgcgacacggctc

SEQ ID NO: 1946990 - DNA, 25 bp, Homo sapien
ccagggccatgtgaccgggcttcat

SEQ ID NO: 1946991 - DNA, 25 bp, Homo sapien
ggacatttgggggaatgacacgaac

SEQ ID NO: 1946992 - DNA, 25 bp, Homo sapien
ctagtagtgagcctgacttgggagc

SEQ ID NO: 1946993 - DNA, 25 bp, Homo sapien
tagtagtgagcctgacttgggagca

SEQ ID NO: 1946994 - DNA, 25 bp, Homo sapien
cttgggagcagtggctggacatttg

SEQ ID NO: 1946995 - DNA, 25 bp, Homo sapien
gccgtcctgaggggcaccatggtgg

SEQ ID NO: 1946996 - DNA, 25 bp, Homo sapien
ggcaccatggtggactggagggcca

SEQ ID NO: 1946997 - DNA, 25 bp, Homo sapien
tgtgcaggaaatagactttgtcccc

SEQ ID NO: 1946998 - DNA, 25 bp, Homo sapien
tattgtgcaggaaatagactttgtc

SEQ ID NO: 1946999 - DNA, 25 bp, Homo sapien
gggatattgtgcaggaaatagactt

SEQ ID NO: 1947000 - DNA, 25 bp, Homo sapien
tgcaggaaatagactttgtccccac

SEQ ID NO: 1947001 - DNA, 25 bp, Homo sapien
acagatccaaaatatgttcataaga

SEQ ID NO: 1947002 - DNA, 25 bp, Homo sapien
atctcctctccttcatcaaagcagg

SEQ ID NO: 1947003 - DNA, 25 bp, Homo sapien
tgtattttgacaaggctcaaagcct

SEQ ID NO: 1947004 - DNA, 25 bp, Homo sapien
gaaggtgtaaataactgatacaagt

SEQ ID NO: 1947005 - DNA, 25 bp, Homo sapien
ggcctcttaatcatctttgtttttc

SEQ ID NO: 1947006 - DNA, 25 bp, Homo sapien
ctgaactccccagagtctgtgtgtg

SEQ ID NO: 1947007 - DNA, 25 bp, Homo sapien
ttgtaagtcatctttaaaaggcctc

SEQ ID NO: 1947008 - DNA, 25 bp, Homo sapien
tgtgtgtcatcctcataatgatttg

SEQ ID NO: 1947009 - DNA, 25 bp, Homo sapien
ctgagaaagggttggttgtaactca

SEQ ID NO: 1947010 - DNA, 25 bp, Homo sapien
catgccagtcacattggacaagaca

SEQ ID NO: 1947011 - DNA, 25 bp, Homo sapien
tatcagtgacaacaagcaagacgcc

SEQ ID NO: 1947012 - DNA, 25 bp, Homo sapien
ggacaagacatcctctgtatcagtg

SEQ ID NO: 1947013 - DNA, 25 bp, Homo sapien
gaagtccagactccacagtggtggg

SEQ ID NO: 1947014 - DNA, 25 bp, Homo sapien
ttagggtcagctgcccgctaatggc

SEQ ID NO: 1947015 - DNA, 25 bp, Homo sapien
agtcattcaaaagcggacagtccag

SEQ ID NO: 1947016 - DNA, 25 bp, Homo sapien
gcaagcctccgctgcaggaaatgct

SEQ ID NO: 1947017 - DNA, 25 bp, Homo sapien
gggctacgatgaggcaaaaagaaca

SEQ ID NO: 1947018 - DNA, 25 bp, Homo sapien
gcaaacagagtatgatgggctacga

SEQ ID NO: 1947019 - DNA, 25 bp, Homo sapien
gaagagccttttattcagtgcccta

SEQ ID NO: 1947020 - DNA, 25 bp, Homo sapien
gaatcgtgatagtttcagtcatcga

SEQ ID NO: 1947021 - DNA, 25 bp, Homo sapien
taagccctggatgtttaaatgaaac

SEQ ID NO: 1947022 - DNA, 25 bp, Homo sapien
aagtcctgccggctttgtgttgtgc

SEQ ID NO: 1947023 - DNA, 25 bp, Homo sapien
gcattctccgtggtttaaaagacaa

SEQ ID NO: 1947024 - DNA, 25 bp, Homo sapien
gagtgcacttcttatcttcagcaaa

SEQ ID NO: 1947025 - DNA, 25 bp, Homo sapien
tagctgtcgctgttctggcaccaag

SEQ ID NO: 1947026 - DNA, 25 bp, Homo sapien
tatcgagagggttaactgtgcacac

SEQ ID NO: 1947027 - DNA, 25 bp, Homo sapien
tacataactcctgggagagaccgtg

SEQ ID NO: 1947028 - DNA, 25 bp, Homo sapien
tgaaaacaaacatgcgaacgcccgg

SEQ ID NO: 1947029 - DNA, 25 bp, Homo sapien
catgctgggcccgataggctcagct

SEQ ID NO: 1947030 - DNA, 25 bp, Homo sapien
gctcagctagtcgtgtatttaccca

SEQ ID NO: 1947031 - DNA, 25 bp, Homo sapien
gacgagtccagtccgcgttttgcga

SEQ ID NO: 1947032 - DNA, 25 bp, Homo sapien
cccatatccgggctagagaggaaaa

SEQ ID NO: 1947033 - DNA, 25 bp, Homo sapien
gattcgttccttagaatagccaggg

SEQ ID NO: 1947034 - DNA, 25 bp, Homo sapien
tccattattgggcttacgggctgct

SEQ ID NO: 1947035 - DNA, 25 bp, Homo sapien
tacagcgctgttaggaagtgtcctg

SEQ ID NO: 1947036 - DNA, 25 bp, Homo sapien
aaatttacaacgacatggaggtgca

SEQ ID NO: 1947037 - DNA, 25 bp, Homo sapien
ctcaccattgggcatttagcactgc

SEQ ID NO: 1947038 - DNA, 25 bp, Homo sapien
gacatctaatctgccatctgattgg

SEQ ID NO: 1947039 - DNA, 25 bp, Homo sapien
ctgctgatgtaaatagaagtgctga

SEQ ID NO: 1947040 - DNA, 25 bp, Homo sapien
ttgaattgtggaggtaaactggctg

SEQ ID NO: 1947041 - DNA, 25 bp, Homo sapien
catctgggatgaaattatgcatggc

SEQ ID NO: 1947042 - DNA, 25 bp, Homo sapien
tagtaactgtggctaatggaaaggg

SEQ ID NO: 1947043 - DNA, 25 bp, Homo sapien
tatgcatggcttaaaatcgttttca

SEQ ID NO: 1947044 - DNA, 25 bp, Homo sapien
ccaaagtatggatggctgtgtatag

SEQ ID NO: 1947045 - DNA, 25 bp, Homo sapien
ctaccaatcagttactggctttgtg

SEQ ID NO: 1947046 - DNA, 25 bp, Homo sapien
tactggctttgtgccagagcgaaat

SEQ ID NO: 1947047 - DNA, 25 bp, Homo sapien
tgtgccagagcgaaatatagattca

SEQ ID NO: 1947048 - DNA, 25 bp, Homo sapien
gaaatatagattcactaccgagaat

SEQ ID NO: 1947049 - DNA, 25 bp, Homo sapien
agggttgttgaaaaccttcactgag

SEQ ID NO: 1947050 - DNA, 25 bp, Homo sapien
tgaggtcatggatgtctatctgtgg

SEQ ID NO: 1947051 - DNA, 25 bp, Homo sapien
actgaggtcatggatgtctatctgt

SEQ ID NO: 1947052 - DNA, 25 bp, Homo sapien
gttgttgaaaaccttcactgaggtc

SEQ ID NO: 1947053 - DNA, 25 bp, Homo sapien
acccagagagccagaaagggcgatg

SEQ ID NO: 1947054 - DNA, 25 bp, Homo sapien
catgcacaactgaggtgagcactga

SEQ ID NO: 1947055 - DNA, 25 bp, Homo sapien
gcactgaggaatgcccagtaagcct

SEQ ID NO: 1947056 - DNA, 25 bp, Homo sapien
gaaaagctgaggagagttccacagg

SEQ ID NO: 1947057 - DNA, 25 bp, Homo sapien
tctctttggtaaactggattgtcac

SEQ ID NO: 1947058 - DNA, 25 bp, Homo sapien
atctctttggtaaactggattgtca

SEQ ID NO: 1947059 - DNA, 25 bp, Homo sapien
gatctctttggtaaactggattgtc

SEQ ID NO: 1947060 - DNA, 25 bp, Homo sapien
atgtagtgagtcagctggcttggtg

SEQ ID NO: 1947061 - DNA, 25 bp, Homo sapien
cttgatgtagtgagtcagctggctt

SEQ ID NO: 1947062 - DNA, 25 bp, Homo sapien
ttgatgtagtgagtcagctggcttg

SEQ ID NO: 1947063 - DNA, 25 bp, Homo sapien
tagtgagtcagctggcttggtggag

SEQ ID NO: 1947064 - DNA, 25 bp, Homo sapien
cctttctcttcaagtgaatgcttta

SEQ ID NO: 1947065 - DNA, 25 bp, Homo sapien
ccctcctttctcttcaagtgaatgc

SEQ ID NO: 1947066 - DNA, 25 bp, Homo sapien
ctttgccttcgttttgcatttatga

SEQ ID NO: 1947067 - DNA, 25 bp, Homo sapien
tctcttcaagtgaatgctttatttt

SEQ ID NO: 1947068 - DNA, 25 bp, Homo sapien
gagaggttctcagttgtctaagcag

SEQ ID NO: 1947069 - DNA, 25 bp, Homo sapien
gatttgcccggaaggatcaggatag

SEQ ID NO: 1947070 - DNA, 25 bp, Homo sapien
gattcaaacgctggcaaaaacgtgt

SEQ ID NO: 1947071 - DNA, 25 bp, Homo sapien
gaaagttccttggatcacaccacag

SEQ ID NO: 1947072 - DNA, 25 bp, Homo sapien
gcagtccgtacccaggaggttccta

SEQ ID NO: 1947073 - DNA, 25 bp, Homo sapien
gaatgcagtaccctcagcagcaggt

SEQ ID NO: 1947074 - DNA, 25 bp, Homo sapien
gaagagacctcagttgtatggcatg

SEQ ID NO: 1947075 - DNA, 25 bp, Homo sapien
tatccaattggcatccagggtcgga

SEQ ID NO: 1947076 - DNA, 25 bp, Homo sapien
agtggacagaatacctgtttggtag

SEQ ID NO: 1947077 - DNA, 25 bp, Homo sapien
taaagagaattagggggcattgcac

SEQ ID NO: 1947078 - DNA, 25 bp, Homo sapien
gtggacagaatacctgtttggtaga

SEQ ID NO: 1947079 - DNA, 25 bp, Homo sapien
ttagggggcattgcacggattttct

SEQ ID NO: 1947080 - DNA, 25 bp, Homo sapien
tgagtggtaagttgtctttggctca

SEQ ID NO: 1947081 - DNA, 25 bp, Homo sapien
gctgagtggtaagttgtctttggct

SEQ ID NO: 1947082 - DNA, 25 bp, Homo sapien
ctgagtggtaagttgtctttggctc

SEQ ID NO: 1947083 - DNA, 25 bp, Homo sapien
ccccagtaactaactcatcgttgac

SEQ ID NO: 1947084 - DNA, 25 bp, Homo sapien
actgagtccccgttttccatggact

SEQ ID NO: 1947085 - DNA, 25 bp, Homo sapien
cgttgactctcagaggagaagtcag

SEQ ID NO: 1947086 - DNA, 25 bp, Homo sapien
tttccatggactcgcctgctgtggc

SEQ ID NO: 1947087 - DNA, 25 bp, Homo sapien
gtctgcaggtaaacatgatttttct

SEQ ID NO: 1947088 - DNA, 25 bp, Homo sapien
caggtaaacatgatttttctggtta

SEQ ID NO: 1947089 - DNA, 25 bp, Homo sapien
tgcaggtaaacatgatttttctggt

SEQ ID NO: 1947090 - DNA, 25 bp, Homo sapien
gtaaacatgatttttctggttatcc

SEQ ID NO: 1947091 - DNA, 25 bp, Homo sapien
taaaaatacccggtgtgtggtctgc

SEQ ID NO: 1947092 - DNA, 25 bp, Homo sapien
gcctgatcctcaggcccctttaagt

SEQ ID NO: 1947093 - DNA, 25 bp, Homo sapien
caggctttttatagccttgtctggc

SEQ ID NO: 1947094 - DNA, 25 bp, Homo sapien
ggatttggcctgatcctcaggcccc

SEQ ID NO: 1947095 - DNA, 25 bp, Homo sapien
actaaggaacgaacggaattgccag

SEQ ID NO: 1947096 - DNA, 25 bp, Homo sapien
ggcactaaggaacgaacggaattgc

SEQ ID NO: 1947097 - DNA, 25 bp, Homo sapien
ctgtttttctggcagggggcactaa

SEQ ID NO: 1947098 - DNA, 25 bp, Homo sapien
gcactaaggaacgaacggaattgcc

SEQ ID NO: 1947099 - DNA, 25 bp, Homo sapien
cctgctgctgtaaaccgtcgcggtg

SEQ ID NO: 1947100 - DNA, 25 bp, Homo sapien
gctgtaaaccgtcgcggtgtgcccc

SEQ ID NO: 1947101 - DNA, 25 bp, Homo sapien
agcctgctgctgtaaaccgtcgcgg

SEQ ID NO: 1947102 - DNA, 25 bp, Homo sapien
tgctgctgtaaaccgtcgcggtgtg

SEQ ID NO: 1947103 - DNA, 25 bp, Homo sapien
ggtcatccttccacataggttgttt

SEQ ID NO: 1947104 - DNA, 25 bp, Homo sapien
gaggctactccgtgtgctgaagacc

SEQ ID NO: 1947105 - DNA, 25 bp, Homo sapien
aactgtcggacagcgaggcagtgac

SEQ ID NO: 1947106 - DNA, 25 bp, Homo sapien
ccgtattttatgctggacactcccc

SEQ ID NO: 1947107 - DNA, 25 bp, Homo sapien
gtctgctcctggcaccttgcatgat

SEQ ID NO: 1947108 - DNA, 25 bp, Homo sapien
ctgctcctggcaccttgcatgatgc

SEQ ID NO: 1947109 - DNA, 25 bp, Homo sapien
tctgctcctggcaccttgcatgatg

SEQ ID NO: 1947110 - DNA, 25 bp, Homo sapien
agatacccacggcctcctcagaaac

SEQ ID NO: 1947111 - DNA, 25 bp, Homo sapien
tcttctcttaatggaaccatagtat

SEQ ID NO: 1947112 - DNA, 25 bp, Homo sapien
cttctcttaatggaaccatagtatc

SEQ ID NO: 1947113 - DNA, 25 bp, Homo sapien
gaacctgtgctttggcgttggcctg

SEQ ID NO: 1947114 - DNA, 25 bp, Homo sapien
tacaatcacttttgtggctgtgccc

SEQ ID NO: 1947115 - DNA, 25 bp, Homo sapien
tacactctggcaaatgagagtatcg

SEQ ID NO: 1947116 - DNA, 25 bp, Homo sapien
tagaccagtggaatttacaatcact

SEQ ID NO: 1947117 - DNA, 25 bp, Homo sapien
aaatgtctgcacaaatggcatattg

SEQ ID NO: 1947118 - DNA, 25 bp, Homo sapien
ttgtcttcggttttgcatcattcct

SEQ ID NO: 1947119 - DNA, 25 bp, Homo sapien
gcctgaggactgcacgggttcccat

SEQ ID NO: 1947120 - DNA, 25 bp, Homo sapien
ctgaggactgcacgggttcccatac

SEQ ID NO: 1947121 - DNA, 25 bp, Homo sapien
ctcaatactgggctactttcaacac

SEQ ID NO: 1947122 - DNA, 25 bp, Homo sapien
tacatactggtggatctccagtgtt

SEQ ID NO: 1947123 - DNA, 25 bp, Homo sapien
ctgtggttggaattttagtctttag

SEQ ID NO: 1947124 - DNA, 25 bp, Homo sapien
ttagtgatacatactggtggatctc

SEQ ID NO: 1947125 - DNA, 25 bp, Homo sapien
tggaattttagtctttagtgataca

SEQ ID NO: 1947126 - DNA, 25 bp, Homo sapien
aatagattgccttgtcttcgtgaca

SEQ ID NO: 1947127 - DNA, 25 bp, Homo sapien
ggtcctccactctggacaaatagat

SEQ ID NO: 1947128 - DNA, 25 bp, Homo sapien
ggacaaatagattgccttgtcttcg

SEQ ID NO: 1947129 - DNA, 25 bp, Homo sapien
tgtcttcgtgacaatttacttttct

SEQ ID NO: 1947130 - DNA, 25 bp, Homo sapien
tcatagcccttcctctccttgcttt

SEQ ID NO: 1947131 - DNA, 25 bp, Homo sapien
agcccttcctctccttgcttttctt

SEQ ID NO: 1947132 - DNA, 25 bp, Homo sapien
catagcccttcctctccttgctttt

SEQ ID NO: 1947133 - DNA, 25 bp, Homo sapien
tagcccttcctctccttgcttttct

SEQ ID NO: 1947134 - DNA, 25 bp, Homo sapien
cttctcctctggacgtgctgcctct

SEQ ID NO: 1947135 - DNA, 25 bp, Homo sapien
gcctctgaacgccatgtcttccatg

SEQ ID NO: 1947136 - DNA, 25 bp, Homo sapien
tgcctctgaacgccatgtcttccat

SEQ ID NO: 1947137 - DNA, 25 bp, Homo sapien
cctctgaacgccatgtcttccatgc

SEQ ID NO: 1947138 - DNA, 25 bp, Homo sapien
tcttctgagagttgccggctcctct

SEQ ID NO: 1947139 - DNA, 25 bp, Homo sapien
gctttgactcttgacttcttctgag

SEQ ID NO: 1947140 - DNA, 25 bp, Homo sapien
gacttcttctgagagttgccggctc

SEQ ID NO: 1947141 - DNA, 25 bp, Homo sapien
ttgctttgactcttgacttcttctg

SEQ ID NO: 1947142 - DNA, 25 bp, Homo sapien
tgtgcaggtgtttcctgttaacctg

SEQ ID NO: 1947143 - DNA, 25 bp, Homo sapien
cctcctgtgcaggtgtttcctgtta

SEQ ID NO: 1947144 - DNA, 25 bp, Homo sapien
ctactcagaccagcagtaagttctc

SEQ ID NO: 1947145 - DNA, 25 bp, Homo sapien
actcagaccagcagtaagttctctt

SEQ ID NO: 1947146 - DNA, 25 bp, Homo sapien
ggagccagaatcgcgggaccctcat

SEQ ID NO: 1947147 - DNA, 25 bp, Homo sapien
aggagccagaatcgcgggaccctca

SEQ ID NO: 1947148 - DNA, 25 bp, Homo sapien
atttcaggagccagaatcgcgggac

SEQ ID NO: 1947149 - DNA, 25 bp, Homo sapien
taacttctagcaggatcttgaggac

SEQ ID NO: 1947150 - DNA, 25 bp, Homo sapien
catccacttggactggctgaaaggc

SEQ ID NO: 1947151 - DNA, 25 bp, Homo sapien
cagcagcattgaccgcagtgcaggt

SEQ ID NO: 1947152 - DNA, 25 bp, Homo sapien
caggtgtctgccatcggatcaggag

SEQ ID NO: 1947153 - DNA, 25 bp, Homo sapien
gctggcatctagaggcctcctcact

SEQ ID NO: 1947154 - DNA, 25 bp, Homo sapien
ttttgctggcatctagaggcctcct

SEQ ID NO: 1947155 - DNA, 25 bp, Homo sapien
ggattttgctggcatctagaggcct

SEQ ID NO: 1947156 - DNA, 25 bp, Homo sapien
ctgacgctctttgttggattttgct

SEQ ID NO: 1947157 - DNA, 25 bp, Homo sapien
ccatttgtttgtcaaggaccaaggt

SEQ ID NO: 1947158 - DNA, 25 bp, Homo sapien
gccatttgtttgtcaaggaccaagg

SEQ ID NO: 1947159 - DNA, 25 bp, Homo sapien
ctcttactaggtgccattgccattt

SEQ ID NO: 1947160 - DNA, 25 bp, Homo sapien
tgccatttgtttgtcaaggaccaag

SEQ ID NO: 1947161 - DNA, 25 bp, Homo sapien
tcagctaactctacagtgttattag

SEQ ID NO: 1947162 - DNA, 25 bp, Homo sapien
gattggatggttgacattcagctaa

SEQ ID NO: 1947163 - DNA, 25 bp, Homo sapien
tagggatggcatgaagtattgtagt

SEQ ID NO: 1947164 - DNA, 25 bp, Homo sapien
tagtgcgtgccttttgccatggatc

SEQ ID NO: 1947165 - DNA, 25 bp, Homo sapien
gtttggcagtcatactctaagagcg

SEQ ID NO: 1947166 - DNA, 25 bp, Homo sapien
tctaaagaggttggcatgaaaacgg

SEQ ID NO: 1947167 - DNA, 25 bp, Homo sapien
tattggctgttctagaaggctcatc

SEQ ID NO: 1947168 - DNA, 25 bp, Homo sapien
tctaagagcgtttgaaaatggactg

SEQ ID NO: 1947169 - DNA, 25 bp, Homo sapien
caacccattttataggagtgtcaat

SEQ ID NO: 1947170 - DNA, 25 bp, Homo sapien
aacccattttataggagtgtcaatt

SEQ ID NO: 1947171 - DNA, 25 bp, Homo sapien
ttcaacccattttataggagtgtca

SEQ ID NO: 1947172 - DNA, 25 bp, Homo sapien
tcatatagtattctgaagatttcca

SEQ ID NO: 1947173 - DNA, 25 bp, Homo sapien
cctagcctgcacttctggttttggc

SEQ ID NO: 1947174 - DNA, 25 bp, Homo sapien
cttctggttttggcatggcagtgcc

SEQ ID NO: 1947175 - DNA, 25 bp, Homo sapien
gttttggcatggcagtgcctgccat

SEQ ID NO: 1947176 - DNA, 25 bp, Homo sapien
tggttttggcatggcagtgcctgcc

SEQ ID NO: 1947177 - DNA, 25 bp, Homo sapien
tatgatcagtttgggagccgtgatg

SEQ ID NO: 1947178 - DNA, 25 bp, Homo sapien
ccgtgatgtcgttgcatatagggaa

SEQ ID NO: 1947179 - DNA, 25 bp, Homo sapien
tttgggagccgtgatgtcgttgcat

SEQ ID NO: 1947180 - DNA, 25 bp, Homo sapien
tcctctcctgtatgatcagtttggg

SEQ ID NO: 1947181 - DNA, 25 bp, Homo sapien
tagaatttcctgacttgcgtaggta

SEQ ID NO: 1947182 - DNA, 25 bp, Homo sapien
tagggatctccctgagtctttcttt

SEQ ID NO: 1947183 - DNA, 25 bp, Homo sapien
tgacttgcgtaggtagggatctccc

SEQ ID NO: 1947184 - DNA, 25 bp, Homo sapien
gatctccctgagtctttcttttccc

SEQ ID NO: 1947185 - DNA, 25 bp, Homo sapien
aactgctagtaaaagaagaataatg

SEQ ID NO: 1947186 - DNA, 25 bp, Homo sapien
ctagtaaaagaagaataatgggcca

SEQ ID NO: 1947187 - DNA, 25 bp, Homo sapien
cactagaaactgctagtaaaagaag

SEQ ID NO: 1947188 - DNA, 25 bp, Homo sapien
ctgctagtaaaagaagaataatggg

SEQ ID NO: 1947189 - DNA, 25 bp, Homo sapien
cgatggtgcagggaaccttgcttta

SEQ ID NO: 1947190 - DNA, 25 bp, Homo sapien
tctaactgtaactgggactagggca

SEQ ID NO: 1947191 - DNA, 25 bp, Homo sapien
tgtagttcagttgggactcaggcta

SEQ ID NO: 1947192 - DNA, 25 bp, Homo sapien
gaaatgggttaccacgttgagcacc

SEQ ID NO: 1947193 - DNA, 25 bp, Homo sapien
ctatagttgcagaattcatactttc

SEQ ID NO: 1947194 - DNA, 25 bp, Homo sapien
catactttcagcacatataatttca

SEQ ID NO: 1947195 - DNA, 25 bp, Homo sapien
gcagaattcatactttcagcacata

SEQ ID NO: 1947196 - DNA, 25 bp, Homo sapien
tactttcagcacatataatttcaca

SEQ ID NO: 1947197 - DNA, 25 bp, Homo sapien
tgacaccagcccttgttggactcca

SEQ ID NO: 1947198 - DNA, 25 bp, Homo sapien
catggttggtcgtgggaagaaggtc

SEQ ID NO: 1947199 - DNA, 25 bp, Homo sapien
tgcactttggttgctgagagtggtt

SEQ ID NO: 1947200 - DNA, 25 bp, Homo sapien
gggacactgaggctggcttgatttc

SEQ ID NO: 1947201 - DNA, 25 bp, Homo sapien
ttgaagtcaggcatactgttagcgt

SEQ ID NO: 1947202 - DNA, 25 bp, Homo sapien
tgaagtcaggcatactgttagcgtt

SEQ ID NO: 1947203 - DNA, 25 bp, Homo sapien
gaagtcaggcatactgttagcgttg

SEQ ID NO: 1947204 - DNA, 25 bp, Homo sapien
cgcagacaggagattggtatttagc

SEQ ID NO: 1947205 - DNA, 25 bp, Homo sapien
tgggtaatggcctccgcagacagga

SEQ ID NO: 1947206 - DNA, 25 bp, Homo sapien
gagattggtatttagcgtttaaaca

SEQ ID NO: 1947207 - DNA, 25 bp, Homo sapien
tggtgacagggtgggtaatggcctc

SEQ ID NO: 1947208 - DNA, 25 bp, Homo sapien
tgtatcggaggcgtcagggtctgca

SEQ ID NO: 1947209 - DNA, 25 bp, Homo sapien
cactcttgccactgtgatgggagct

SEQ ID NO: 1947210 - DNA, 25 bp, Homo sapien
tgttggaccgtcacgctgccgtgta

SEQ ID NO: 1947211 - DNA, 25 bp, Homo sapien
tggcccgctttgtgttggaccgtca

SEQ ID NO: 1947212 - DNA, 25 bp, Homo sapien
aggtaggagaacctatgcccatctc

SEQ ID NO: 1947213 - DNA, 25 bp, Homo sapien
gccacctgagtgatacgcctcagct

SEQ ID NO: 1947214 - DNA, 25 bp, Homo sapien
tgagtgatacgcctcagctccttcc

SEQ ID NO: 1947215 - DNA, 25 bp, Homo sapien
cttgccacctgagtgatacgcctca

SEQ ID NO: 1947216 - DNA, 25 bp, Homo sapien
ctgccaagtgccctgtgctttgctt

SEQ ID NO: 1947217 - DNA, 25 bp, Homo sapien
ttgacagccgtccaggactgctggg

SEQ ID NO: 1947218 - DNA, 25 bp, Homo sapien
gcttgacagccgtccaggactgctg

SEQ ID NO: 1947219 - DNA, 25 bp, Homo sapien
actgcttgacagccgtccaggactg

SEQ ID NO: 1947220 - DNA, 25 bp, Homo sapien
tgacagccgtccaggactgctgggt

SEQ ID NO: 1947221 - DNA, 25 bp, Homo sapien
gacataaggtcagataaaactggcc

SEQ ID NO: 1947222 - DNA, 25 bp, Homo sapien
tggggaagacatgcaccagtggcct

SEQ ID NO: 1947223 - DNA, 25 bp, Homo sapien
ggtcagataaaactggcctagtctt

SEQ ID NO: 1947224 - DNA, 25 bp, Homo sapien
ctggacataaggtcagataaaactg

SEQ ID NO: 1947225 - DNA, 25 bp, Homo sapien
ggcaataagttttatagactggaaa

SEQ ID NO: 1947226 - DNA, 25 bp, Homo sapien
gtcagtccatagaccctctgctggg

SEQ ID NO: 1947227 - DNA, 25 bp, Homo sapien
gataggaaatagtcctctggaggtg

SEQ ID NO: 1947228 - DNA, 25 bp, Homo sapien
aaattgcttcagaccagtgctggta

SEQ ID NO: 1947229 - DNA, 25 bp, Homo sapien
agcagagtagcaggccaagttccag

SEQ ID NO: 1947230 - DNA, 25 bp, Homo sapien
ggaggatggcacagactcaaggtca

SEQ ID NO: 1947231 - DNA, 25 bp, Homo sapien
agaagcagagtagcaggccaagttc

SEQ ID NO: 1947232 - DNA, 25 bp, Homo sapien
agggtcagcttcaggtaggaggatg

SEQ ID NO: 1947233 - DNA, 25 bp, Homo sapien
ccaggaccaccgtgcaggcttaaga

SEQ ID NO: 1947234 - DNA, 25 bp, Homo sapien
gccaggaccaccgtgcaggcttaag

SEQ ID NO: 1947235 - DNA, 25 bp, Homo sapien
ggaccaccgtgcaggcttaagaagc

SEQ ID NO: 1947236 - DNA, 25 bp, Homo sapien
accaccgtgcaggcttaagaagctg

SEQ ID NO: 1947237 - DNA, 25 bp, Homo sapien
ttaaggctggtatcctcatttgctg

SEQ ID NO: 1947238 - DNA, 25 bp, Homo sapien
caggatacccatgtgttgagtccat

SEQ ID NO: 1947239 - DNA, 25 bp, Homo sapien
accaggatacccatgtgttgagtcc

SEQ ID NO: 1947240 - DNA, 25 bp, Homo sapien
aaggctggtatcctcatttgctgga

SEQ ID NO: 1947241 - DNA, 25 bp, Homo sapien
agcctggtggtccttagcagtactg

SEQ ID NO: 1947242 - DNA, 25 bp, Homo sapien
agcagtactgggagtatttgaagac

SEQ ID NO: 1947243 - DNA, 25 bp, Homo sapien
ctggtggtccttagcagtactggga

SEQ ID NO: 1947244 - DNA, 25 bp, Homo sapien
gaagcctggtggtccttagcagtac

SEQ ID NO: 1947245 - DNA, 25 bp, Homo sapien
ggaataacataattctgcagtgctt

SEQ ID NO: 1947246 - DNA, 25 bp, Homo sapien
taacataattctgcagtgctttccc

SEQ ID NO: 1947247 - DNA, 25 bp, Homo sapien
ttcaaaggaataacataattctgca

SEQ ID NO: 1947248 - DNA, 25 bp, Homo sapien
aagcttcaaaggaataacataattc

SEQ ID NO: 1947249 - DNA, 25 bp, Homo sapien
gatgtgcccgttgttctgaagcagc

SEQ ID NO: 1947250 - DNA, 25 bp, Homo sapien
ttgttgatgcctatctggaatgtgg

SEQ ID NO: 1947251 - DNA, 25 bp, Homo sapien
gggttttccacccttcatgaaggca

SEQ ID NO: 1947252 - DNA, 25 bp, Homo sapien
gcctatctggaatgtggttgcacag

SEQ ID NO: 1947253 - DNA, 25 bp, Homo sapien
aagtaaatccccattgagcattatg

SEQ ID NO: 1947254 - DNA, 25 bp, Homo sapien
atcatcattctcatcgtctttttca

SEQ ID NO: 1947255 - DNA, 25 bp, Homo sapien
tcatcgtctttttcatgctctctgg

SEQ ID NO: 1947256 - DNA, 25 bp, Homo sapien
tattcattaccccttagcaagaaag

SEQ ID NO: 1947257 - DNA, 25 bp, Homo sapien
tgctctgcactcactgctgggctgg

SEQ ID NO: 1947258 - DNA, 25 bp, Homo sapien
ttttgccctctgaatgacagcagct

SEQ ID NO: 1947259 - DNA, 25 bp, Homo sapien
tggagcaggtgactgccttttgccc

SEQ ID NO: 1947260 - DNA, 25 bp, Homo sapien
cagctgatgtttgtggttggagagg

SEQ ID NO: 1947261 - DNA, 25 bp, Homo sapien
gagccctgatgctagtcacccaaag

SEQ ID NO: 1947262 - DNA, 25 bp, Homo sapien
aaatgacaggtttactgctgtgtcc

SEQ ID NO: 1947263 - DNA, 25 bp, Homo sapien
tgatgctagtcacccaaagaaatga

SEQ ID NO: 1947264 - DNA, 25 bp, Homo sapien
ctgcagccggtggagccctgatgct

SEQ ID NO: 1947265 - DNA, 25 bp, Homo sapien
agttcagattgcctacagttcagga

SEQ ID NO: 1947266 - DNA, 25 bp, Homo sapien
taactcagtgagaagcatcacatgg

SEQ ID NO: 1947267 - DNA, 25 bp, Homo sapien
taatgtacctgaaaagccaattgtg

SEQ ID NO: 1947268 - DNA, 25 bp, Homo sapien
caaaaccacgtgagtaccagaatca

SEQ ID NO: 1947269 - DNA, 25 bp, Homo sapien
tattgttcttgatgtaatgtgtttt

SEQ ID NO: 1947270 - DNA, 25 bp, Homo sapien
gtgcatgtcacgagcgtccatgtga

SEQ ID NO: 1947271 - DNA, 25 bp, Homo sapien
cacagtggtgcatgtcacgagcgtc

SEQ ID NO: 1947272 - DNA, 25 bp, Homo sapien
accaggcaagctttacgtgaacagt

SEQ ID NO: 1947273 - DNA, 25 bp, Homo sapien
cacagcagggaaaatcctggaattc

SEQ ID NO: 1947274 - DNA, 25 bp, Homo sapien
ggcatcatggaccataaggaagcaa

SEQ ID NO: 1947275 - DNA, 25 bp, Homo sapien
catcctgccagtttggtttcattgc

SEQ ID NO: 1947276 - DNA, 25 bp, Homo sapien
taaggaagcaagatgaaaacacaca

SEQ ID NO: 1947277 - DNA, 25 bp, Homo sapien
ctcttcctctaagattgctccaggt

SEQ ID NO: 1947278 - DNA, 25 bp, Homo sapien
tagtctcttcctctaagattgctcc

SEQ ID NO: 1947279 - DNA, 25 bp, Homo sapien
tctcttcctctaagattgctccagg

SEQ ID NO: 1947280 - DNA, 25 bp, Homo sapien
gtctcttcctctaagattgctccag

SEQ ID NO: 1947281 - DNA, 25 bp, Homo sapien
taataatcattggaactaattctct

SEQ ID NO: 1947282 - DNA, 25 bp, Homo sapien
ccatggcaggggcattagtttaata

SEQ ID NO: 1947283 - DNA, 25 bp, Homo sapien
tctgccccacagtgctctttgccat

SEQ ID NO: 1947284 - DNA, 25 bp, Homo sapien
atgctcccacagcagtccggtgcag

SEQ ID NO: 1947285 - DNA, 25 bp, Homo sapien
gactcttaaggtcagctacattttt

SEQ ID NO: 1947286 - DNA, 25 bp, Homo sapien
agaaagcttccatatactctagacc

SEQ ID NO: 1947287 - DNA, 25 bp, Homo sapien
tatactctagaccattttgagattc

SEQ ID NO: 1947288 - DNA, 25 bp, Homo sapien
tcaggctgtgactcttaaggtcagc

SEQ ID NO: 1947289 - DNA, 25 bp, Homo sapien
ccttcacttgttaagtagataacac

SEQ ID NO: 1947290 - DNA, 25 bp, Homo sapien
tcagccccttcacttgttaagtaga

SEQ ID NO: 1947291 - DNA, 25 bp, Homo sapien
gccccttcacttgttaagtagataa

SEQ ID NO: 1947292 - DNA, 25 bp, Homo sapien
agccccttcacttgttaagtagata

SEQ ID NO: 1947293 - DNA, 25 bp, Homo sapien
tgcatgtgcaagcttaggaacttgc

SEQ ID NO: 1947294 - DNA, 25 bp, Homo sapien
gtgcaagcttaggaacttgcccact

SEQ ID NO: 1947295 - DNA, 25 bp, Homo sapien
tgtgcaagcttaggaacttgcccac

SEQ ID NO: 1947296 - DNA, 25 bp, Homo sapien
catgtgcaagcttaggaacttgccc

SEQ ID NO: 1947297 - DNA, 25 bp, Homo sapien
catatgtgcgttcttacaatcagag

SEQ ID NO: 1947298 - DNA, 25 bp, Homo sapien
ctgtaacctggattagggaatggca

SEQ ID NO: 1947299 - DNA, 25 bp, Homo sapien
tgctcctgtagcttggacccatggc

SEQ ID NO: 1947300 - DNA, 25 bp, Homo sapien
tattcatgacagttgcatatgtgcg

SEQ ID NO: 1947301 - DNA, 25 bp, Homo sapien
cagcctcttgagtaggtagggctgc

SEQ ID NO: 1947302 - DNA, 25 bp, Homo sapien
cctcttgagtaggtagggctgcagg

SEQ ID NO: 1947303 - DNA, 25 bp, Homo sapien
gagtaggtagggctgcaggcacaca

SEQ ID NO: 1947304 - DNA, 25 bp, Homo sapien
agcctcttgagtaggtagggctgca

SEQ ID NO: 1947305 - DNA, 25 bp, Homo sapien
ggattgtctatgttattgtaccaaa

SEQ ID NO: 1947306 - DNA, 25 bp, Homo sapien
gcacatttctgtattaagctaggat

SEQ ID NO: 1947307 - DNA, 25 bp, Homo sapien
ggaaaagttcatacttatatctttc

SEQ ID NO: 1947308 - DNA, 25 bp, Homo sapien
cttcttgaacttcagtaaattaaag

SEQ ID NO: 1947309 - DNA, 25 bp, Homo sapien
catgaactcttgttatgtctaagta

SEQ ID NO: 1947310 - DNA, 25 bp, Homo sapien
tacaaagatctcttgtcatgaactc

SEQ ID NO: 1947311 - DNA, 25 bp, Homo sapien
ctaagtaaccttagacataggcatt

SEQ ID NO: 1947312 - DNA, 25 bp, Homo sapien
gagagtgtgtaatgtgtatgctatg

SEQ ID NO: 1947313 - DNA, 25 bp, Homo sapien
ctatggagcggtcccagtgggttgc

SEQ ID NO: 1947314 - DNA, 25 bp, Homo sapien
tttctgcgcagaggtcactgggcct

SEQ ID NO: 1947315 - DNA, 25 bp, Homo sapien
gataaaacttgcagtggctgtctgg

SEQ ID NO: 1947316 - DNA, 25 bp, Homo sapien
tcagaacggcctcccatctgtgggg

SEQ ID NO: 1947317 - DNA, 25 bp, Homo sapien
catgacggttgggttattcttactg

SEQ ID NO: 1947318 - DNA, 25 bp, Homo sapien
ctgccagaacatgacggttgggtta

SEQ ID NO: 1947319 - DNA, 25 bp, Homo sapien
gaacatgacggttgggttattctta

SEQ ID NO: 1947320 - DNA, 25 bp, Homo sapien
ctcccagccatgcaccagtgcctgc

SEQ ID NO: 1947321 - DNA, 25 bp, Homo sapien
ccctactggtaccagaggaagtggg

SEQ ID NO: 1947322 - DNA, 25 bp, Homo sapien
gtgccctcttctcccgggcttagga

SEQ ID NO: 1947323 - DNA, 25 bp, Homo sapien
tcttctcccgggcttaggactccag

SEQ ID NO: 1947324 - DNA, 25 bp, Homo sapien
gtctctgaagagggccctactggta

SEQ ID NO: 1947325 - DNA, 25 bp, Homo sapien
tttctccagctcagttgttgagcgg

SEQ ID NO: 1947326 - DNA, 25 bp, Homo sapien
tcctgtgtactatgaaccaaaaaca

SEQ ID NO: 1947327 - DNA, 25 bp, Homo sapien
tatttacttggtatttagcatgcta

SEQ ID NO: 1947328 - DNA, 25 bp, Homo sapien
gtgagtgattcctccaataattatg

SEQ ID NO: 1947329 - DNA, 25 bp, Homo sapien
tagcatgctatatggatgtggaaca

SEQ ID NO: 1947330 - DNA, 25 bp, Homo sapien
accagctgcagatgacgtgaggttc

SEQ ID NO: 1947331 - DNA, 25 bp, Homo sapien
ctttcatctgaaccgtcctctgacc

SEQ ID NO: 1947332 - DNA, 25 bp, Homo sapien
gctttcatctgaaccgtcctctgac

SEQ ID NO: 1947333 - DNA, 25 bp, Homo sapien
tgaccagctgcagatgacgtgaggt

SEQ ID NO: 1947334 - DNA, 25 bp, Homo sapien
tccgacgtctcctttctaggggaga

SEQ ID NO: 1947335 - DNA, 25 bp, Homo sapien
ccgacgtctcctttctaggggagag

SEQ ID NO: 1947336 - DNA, 25 bp, Homo sapien
agttattgaaggtcccaaaagaatg

SEQ ID NO: 1947337 - DNA, 25 bp, Homo sapien
ttgaaggtcccaaaagaatgcagca

SEQ ID NO: 1947338 - DNA, 25 bp, Homo sapien
aatgcagcagacatttgttattgag

SEQ ID NO: 1947339 - DNA, 25 bp, Homo sapien
tattgaaggtcccaaaagaatgcag

SEQ ID NO: 1947340 - DNA, 25 bp, Homo sapien
tcgtactgtacatcccggacagcct

SEQ ID NO: 1947341 - DNA, 25 bp, Homo sapien
cgtactgtacatcccggacagcctt

SEQ ID NO: 1947342 - DNA, 25 bp, Homo sapien
ctgtacatcccggacagccttacat

SEQ ID NO: 1947343 - DNA, 25 bp, Homo sapien
tacatcccggacagccttacatggg

SEQ ID NO: 1947344 - DNA, 25 bp, Homo sapien
cccattgagagatccaggcaagata

SEQ ID NO: 1947345 - DNA, 25 bp, Homo sapien
tcctttgcccttggtattccgtgga

SEQ ID NO: 1947346 - DNA, 25 bp, Homo sapien
ggaagttcagtgctatctgatctca

SEQ ID NO: 1947347 - DNA, 25 bp, Homo sapien
aagatagactcctttgcccttggta

SEQ ID NO: 1947348 - DNA, 25 bp, Homo sapien
tacccatctctctgtagaagagacc

SEQ ID NO: 1947349 - DNA, 25 bp, Homo sapien
gacagcatgggtccttcactggtca

SEQ ID NO: 1947350 - DNA, 25 bp, Homo sapien
ttagcagtattgatacccatctctc

SEQ ID NO: 1947351 - DNA, 25 bp, Homo sapien
gaagagacctctgggtacgggatcg

SEQ ID NO: 1947352 - DNA, 25 bp, Homo sapien
attacaggcaagcactgccacaccc

SEQ ID NO: 1947353 - DNA, 25 bp, Homo sapien
acaggcaagcactgccacacccagc

SEQ ID NO: 1947354 - DNA, 25 bp, Homo sapien
gtttggttttgagatggagactagc

SEQ ID NO: 1947355 - DNA, 25 bp, Homo sapien
atggagactagctctgttgccaggc

SEQ ID NO: 1947356 - DNA, 25 bp, Homo sapien
gcatttcgtgccttcaaagctcagt

SEQ ID NO: 1947357 - DNA, 25 bp, Homo sapien
cgccctgccggcatgaagttttgaa

SEQ ID NO: 1947358 - DNA, 25 bp, Homo sapien
tgcatgacatttagatccagggctc

SEQ ID NO: 1947359 - DNA, 25 bp, Homo sapien
cattttgccgctctagtgctgccta

SEQ ID NO: 1947360 - DNA, 25 bp, Homo sapien
tgactaatgactaaggcttggccag

SEQ ID NO: 1947361 - DNA, 25 bp, Homo sapien
ggtatggaacttaaaacgcagcatg

SEQ ID NO: 1947362 - DNA, 25 bp, Homo sapien
tctagcaatattgtcagcatcgtgt

SEQ ID NO: 1947363 - DNA, 25 bp, Homo sapien
tactgaatccaaagatcgtagatgc

SEQ ID NO: 1947364 - DNA, 25 bp, Homo sapien
gctttttaaccttgtagataacatc

SEQ ID NO: 1947365 - DNA, 25 bp, Homo sapien
tgtttgaatgctttagccactaggc

SEQ ID NO: 1947366 - DNA, 25 bp, Homo sapien
catgggcagatctttttattgcgat

SEQ ID NO: 1947367 - DNA, 25 bp, Homo sapien
gttgagcactctgtaagggatgtaa

SEQ ID NO: 1947368 - DNA, 25 bp, Homo sapien
agccacattcctttccgggcaagcg

SEQ ID NO: 1947369 - DNA, 25 bp, Homo sapien
tgtgggaccccgcggaaggaggcgc

SEQ ID NO: 1947370 - DNA, 25 bp, Homo sapien
ctgcaggcaccgtccgccccgcgcg

SEQ ID NO: 1947371 - DNA, 25 bp, Homo sapien
tgaacaggctcggactcctccgacg

SEQ ID NO: 1947372 - DNA, 25 bp, Homo sapien
cgcgcccagcgcttaaggttttatt

SEQ ID NO: 1947373 - DNA, 25 bp, Homo sapien
gactcacgcaggcaccgagtgtttc

SEQ ID NO: 1947374 - DNA, 25 bp, Homo sapien
taattaaaacgagtggctgacggtg

SEQ ID NO: 1947375 - DNA, 25 bp, Homo sapien
gaaaagccaggaactacagacgaag

SEQ ID NO: 1947376 - DNA, 25 bp, Homo sapien
agaggacggccgctgtactcagcag

SEQ ID NO: 1947377 - DNA, 25 bp, Homo sapien
tctttccactgctggctaacggtgc

SEQ ID NO: 1947378 - DNA, 25 bp, Homo sapien
taacggtgcactgagcgatttcagc

SEQ ID NO: 1947379 - DNA, 25 bp, Homo sapien
ggctaccgtgcgtgttctttccact

SEQ ID NO: 1947380 - DNA, 25 bp, Homo sapien
ttgataggagctcccgccgtcttat

SEQ ID NO: 1947381 - DNA, 25 bp, Homo sapien
ccacatgatggcagatggattcatt

SEQ ID NO: 1947382 - DNA, 25 bp, Homo sapien
ttcaaccactacgtccacatgatgg

SEQ ID NO: 1947383 - DNA, 25 bp, Homo sapien
gattgtttttgaggaacttcaacca

SEQ ID NO: 1947384 - DNA, 25 bp, Homo sapien
tcatgaccagctgacagatctaagc

SEQ ID NO: 1947385 - DNA, 25 bp, Homo sapien
gctccttcccgtgaggacctcatga

SEQ ID NO: 1947386 - DNA, 25 bp, Homo sapien
tacaaccggattgaaaacccagctc

SEQ ID NO: 1947387 - DNA, 25 bp, Homo sapien
ccgtgaggacctcatgaccagctga

SEQ ID NO: 1947388 - DNA, 25 bp, Homo sapien
tcagactcgtcttcctcttcacaga

SEQ ID NO: 1947389 - DNA, 25 bp, Homo sapien
caggcagtaatgtgttcgattctcc

SEQ ID NO: 1947390 - DNA, 25 bp, Homo sapien
cataagccgctaataccccacgtta

SEQ ID NO: 1947391 - DNA, 25 bp, Homo sapien
tacaggtctggcctcgatttctcag

SEQ ID NO: 1947392 - DNA, 25 bp, Homo sapien
aatgaatgaatatgcataaagccat

SEQ ID NO: 1947393 - DNA, 25 bp, Homo sapien
gccgaatgaatgaatatgcataaag

SEQ ID NO: 1947394 - DNA, 25 bp, Homo sapien
ctgccgaatgaatgaatatgcataa

SEQ ID NO: 1947395 - DNA, 25 bp, Homo sapien
cgaatgaatgaatatgcataaagcc

SEQ ID NO: 1947396 - DNA, 25 bp, Homo sapien
ctctctcttctatgatttgtctcgg

SEQ ID NO: 1947397 - DNA, 25 bp, Homo sapien
tctcttctatgatttgtctcggcat

SEQ ID NO: 1947398 - DNA, 25 bp, Homo sapien
ctctcttctatgatttgtctcggca

SEQ ID NO: 1947399 - DNA, 25 bp, Homo sapien
tctctcttctatgatttgtctcggc

SEQ ID NO: 1947400 - DNA, 25 bp, Homo sapien
gctttgttgtcatagtcgcctgatc

SEQ ID NO: 1947401 - DNA, 25 bp, Homo sapien
tacgatggaatcactaagcagagag

SEQ ID NO: 1947402 - DNA, 25 bp, Homo sapien
tattcgtttgtgcatagccacagca

SEQ ID NO: 1947403 - DNA, 25 bp, Homo sapien
tgcttccctgaattcggctggtgtc

SEQ ID NO: 1947404 - DNA, 25 bp, Homo sapien
aatagtatgtgcaaacatcgcaggc

SEQ ID NO: 1947405 - DNA, 25 bp, Homo sapien
tcatgtagacacttagagggcttca

SEQ ID NO: 1947406 - DNA, 25 bp, Homo sapien
taccttcatatgagccctgtaatag

SEQ ID NO: 1947407 - DNA, 25 bp, Homo sapien
cctgatcaacagtggaaaggtttat

SEQ ID NO: 1947408 - DNA, 25 bp, Homo sapien
cagcagatagaaatgagcacaacga

SEQ ID NO: 1947409 - DNA, 25 bp, Homo sapien
gaatgctagacttcttgtgcctgtg

SEQ ID NO: 1947410 - DNA, 25 bp, Homo sapien
tcttgagtaacaggatctgaggcag

SEQ ID NO: 1947411 - DNA, 25 bp, Homo sapien
gcagttggtacagtcctcgtgcacc

SEQ ID NO: 1947412 - DNA, 25 bp, Homo sapien
tccattcagtttagaactggagtaa

SEQ ID NO: 1947413 - DNA, 25 bp, Homo sapien
catccccagtggtgggtctcttttc

SEQ ID NO: 1947414 - DNA, 25 bp, Homo sapien
tctcttttcacatggatacatcacc

SEQ ID NO: 1947415 - DNA, 25 bp, Homo sapien
tagaactggagtaacttgtagcata

SEQ ID NO: 1947416 - DNA, 25 bp, Homo sapien
gaagccagcagatacctcaggtgga

SEQ ID NO: 1947417 - DNA, 25 bp, Homo sapien
ctttccttctacttcaagccagatc

SEQ ID NO: 1947418 - DNA, 25 bp, Homo sapien
gataaggggaccatttgcattggtt

SEQ ID NO: 1947419 - DNA, 25 bp, Homo sapien
tacctcaggtggagcttagtgcctg

SEQ ID NO: 1947420 - DNA, 25 bp, Homo sapien
tgaggacactagcggtggcagacgt

SEQ ID NO: 1947421 - DNA, 25 bp, Homo sapien
acactagcggtggcagacgtggttc

SEQ ID NO: 1947422 - DNA, 25 bp, Homo sapien
aggacactagcggtggcagacgtgg

SEQ ID NO: 1947423 - DNA, 25 bp, Homo sapien
gacactagcggtggcagacgtggtt

SEQ ID NO: 1947424 - DNA, 25 bp, Homo sapien
aacctgctgtggcacctctggatgg

SEQ ID NO: 1947425 - DNA, 25 bp, Homo sapien
gccccatctgtggttagttaactca

SEQ ID NO: 1947426 - DNA, 25 bp, Homo sapien
ttgtctcatcacattcaagagcccg

SEQ ID NO: 1947427 - DNA, 25 bp, Homo sapien
agcccgaccatgctgtcttggcaca

SEQ ID NO: 1947428 - DNA, 25 bp, Homo sapien
gaaagtattataatatgcactcgtt

SEQ ID NO: 1947429 - DNA, 25 bp, Homo sapien
tctccataggtggagttaattccac

SEQ ID NO: 1947430 - DNA, 25 bp, Homo sapien
gttctgcgtactgtgcagtgcctgt

SEQ ID NO: 1947431 - DNA, 25 bp, Homo sapien
cagagtgtacatggtcagcttctcc

SEQ ID NO: 1947432 - DNA, 25 bp, Homo sapien
tgctgttggcattgacccgctgcct

SEQ ID NO: 1947433 - DNA, 25 bp, Homo sapien
tcttgagctgagtaggctgtccctg

SEQ ID NO: 1947434 - DNA, 25 bp, Homo sapien
gctgagtgtcactgcgtctggattc

SEQ ID NO: 1947435 - DNA, 25 bp, Homo sapien
tctgaacctctgctcagctgagtgt

SEQ ID NO: 1947436 - DNA, 25 bp, Homo sapien
ttctcttccataacagggtgatatg

SEQ ID NO: 1947437 - DNA, 25 bp, Homo sapien
taatcagtttcatcacttattctca

SEQ ID NO: 1947438 - DNA, 25 bp, Homo sapien
acagggtgatatgggttgtcattga

SEQ ID NO: 1947439 - DNA, 25 bp, Homo sapien
tattctcaattcacacacttgcatc

SEQ ID NO: 1947440 - DNA, 25 bp, Homo sapien
tgaagaacagaattggtttcggcat

SEQ ID NO: 1947441 - DNA, 25 bp, Homo sapien
gacaaacggaatgccttcactaatc

SEQ ID NO: 1947442 - DNA, 25 bp, Homo sapien
aatctttcataatccacatctgcat

SEQ ID NO: 1947443 - DNA, 25 bp, Homo sapien
tataactaggaattgttaatgttga

SEQ ID NO: 1947444 - DNA, 25 bp, Homo sapien
cacaagtgtgcttgccgaatattta

SEQ ID NO: 1947445 - DNA, 25 bp, Homo sapien
ggtcgtgctcgagaaccttcctctc

SEQ ID NO: 1947446 - DNA, 25 bp, Homo sapien
gccgaatatttagtccaatctgaaa

SEQ ID NO: 1947447 - DNA, 25 bp, Homo sapien
ctgaaagaagtaatggagagtactt

SEQ ID NO: 1947448 - DNA, 25 bp, Homo sapien
gaattgtatgcctgagctttaaagc

SEQ ID NO: 1947449 - DNA, 25 bp, Homo sapien
caaatgtggagaatagacctttccc

SEQ ID NO: 1947450 - DNA, 25 bp, Homo sapien
tgatgagaatgccagattttcagca

SEQ ID NO: 1947451 - DNA, 25 bp, Homo sapien
tcacgtggcccagtagaccttggaa

SEQ ID NO: 1947452 - DNA, 25 bp, Homo sapien
tatgaggacataattcacatagacc

SEQ ID NO: 1947453 - DNA, 25 bp, Homo sapien
cataattcacatagaccacatcata

SEQ ID NO: 1947454 - DNA, 25 bp, Homo sapien
tcacatagaccacatcatactcact

SEQ ID NO: 1947455 - DNA, 25 bp, Homo sapien
gaccacatcatactcacttctgttt

SEQ ID NO: 1947456 - DNA, 25 bp, Homo sapien
ttaatccggcaggtttttgacagtg

SEQ ID NO: 1947457 - DNA, 25 bp, Homo sapien
taatctatcttcaagcctaggagtg

SEQ ID NO: 1947458 - DNA, 25 bp, Homo sapien
cactcagaccacagtagggaggaga

SEQ ID NO: 1947459 - DNA, 25 bp, Homo sapien
tcaagttcgggaattggaagtatcc

SEQ ID NO: 1947460 - DNA, 25 bp, Homo sapien
tcctccagaagatcggtaaagtcag

SEQ ID NO: 1947461 - DNA, 25 bp, Homo sapien
tggtggcaggtgagacccgtattct

SEQ ID NO: 1947462 - DNA, 25 bp, Homo sapien
gaaagagagccgatttccatgaggc

SEQ ID NO: 1947463 - DNA, 25 bp, Homo sapien
tgtactagaataaagcaacccagtg

SEQ ID NO: 1947464 - DNA, 25 bp, Homo sapien
agtgccttcataaagtgggttggtt

SEQ ID NO: 1947465 - DNA, 25 bp, Homo sapien
tgtgcccagcagtatgcgctttaaa

SEQ ID NO: 1947466 - DNA, 25 bp, Homo sapien
gcccagcagtatgcgctttaaaaat

SEQ ID NO: 1947467 - DNA, 25 bp, Homo sapien
cagcagtatgcgctttaaaaattat

SEQ ID NO: 1947468 - DNA, 25 bp, Homo sapien
ccaacacatgtcatataaaaatctg

SEQ ID NO: 1947469 - DNA, 25 bp, Homo sapien
tgaattcggttggttcggagggctc

SEQ ID NO: 1947470 - DNA, 25 bp, Homo sapien
ccaaggacacaaatgagtcttctgt

SEQ ID NO: 1947471 - DNA, 25 bp, Homo sapien
tttcttctttacatgggccaaggac

SEQ ID NO: 1947472 - DNA, 25 bp, Homo sapien
aatgtggctgtgtcttggttttgca

SEQ ID NO: 1947473 - DNA, 25 bp, Homo sapien
taaatgtggctgtgtcttggttttg

SEQ ID NO: 1947474 - DNA, 25 bp, Homo sapien
aattaaatgtggctgtgtcttggtt

SEQ ID NO: 1947475 - DNA, 25 bp, Homo sapien
aaaaattaaatgtggctgtgtcttg

SEQ ID NO: 1947476 - DNA, 25 bp, Homo sapien
agtcaccgtgctgcccctatgggcc

SEQ ID NO: 1947477 - DNA, 25 bp, Homo sapien
tcagtgtttgttgggtgaacaaatg

SEQ ID NO: 1947478 - DNA, 25 bp, Homo sapien
gaaggaagcataaccagtcaccgtg

SEQ ID NO: 1947479 - DNA, 25 bp, Homo sapien
gattcttaaggtcctcagcctggct

SEQ ID NO: 1947480 - DNA, 25 bp, Homo sapien
gcagccgatcgggaccctccctggc

SEQ ID NO: 1947481 - DNA, 25 bp, Homo sapien
tgtggttagcggcagccgatcggga

SEQ ID NO: 1947482 - DNA, 25 bp, Homo sapien
ggtccctccacctgtggttagcggc

SEQ ID NO: 1947483 - DNA, 25 bp, Homo sapien
gtccctccacctgtggttagcggca

SEQ ID NO: 1947484 - DNA, 25 bp, Homo sapien
ctctggagtgtgcttctgatggtta

SEQ ID NO: 1947485 - DNA, 25 bp, Homo sapien
ttcttaccatagagacttgactgtt

SEQ ID NO: 1947486 - DNA, 25 bp, Homo sapien
tctgatggttagacgcattcggttc

SEQ ID NO: 1947487 - DNA, 25 bp, Homo sapien
tagacgcattcggttcttaccatag

SEQ ID NO: 1947488 - DNA, 25 bp, Homo sapien
cgttagccctggtccgggatccgct

SEQ ID NO: 1947489 - DNA, 25 bp, Homo sapien
gggatccgcttctgccccgggagag

SEQ ID NO: 1947490 - DNA, 25 bp, Homo sapien
gcctctgacgttagccctggtccgg

SEQ ID NO: 1947491 - DNA, 25 bp, Homo sapien
gggtccgcctctgacgttagccctg

SEQ ID NO: 1947492 - DNA, 25 bp, Homo sapien
cacgtgactgcgcacatagctgcat

SEQ ID NO: 1947493 - DNA, 25 bp, Homo sapien
ggcaggtacgctgtgtgtctacccg

SEQ ID NO: 1947494 - DNA, 25 bp, Homo sapien
acaaagcaggtacgccacccaggag

SEQ ID NO: 1947495 - DNA, 25 bp, Homo sapien
aaccgtaaggcacaggaggcagccg

SEQ ID NO: 1947496 - DNA, 25 bp, Homo sapien
atcgtgccgtctggccgcgaaagga

SEQ ID NO: 1947497 - DNA, 25 bp, Homo sapien
ccagtacgggtaggtagcaacacac

SEQ ID NO: 1947498 - DNA, 25 bp, Homo sapien
gttcggtggaaacccgcatgcgtcc

SEQ ID NO: 1947499 - DNA, 25 bp, Homo sapien
tctgaaactgttaacgatcgtgccg

SEQ ID NO: 1947500 - DNA, 25 bp, Homo sapien
catctgcagctaatccataggatct

SEQ ID NO: 1947501 - DNA, 25 bp, Homo sapien
gctagtttgactgtgccttgccaaa

SEQ ID NO: 1947502 - DNA, 25 bp, Homo sapien
gagtcagtaggaagataacagtcgg

SEQ ID NO: 1947503 - DNA, 25 bp, Homo sapien
taacagtcggaggaagcaagcattc

SEQ ID NO: 1947504 - DNA, 25 bp, Homo sapien
tgaatcttcttgttcacgtactaga

SEQ ID NO: 1947505 - DNA, 25 bp, Homo sapien
cattttgatcatcagaggatttaca

SEQ ID NO: 1947506 - DNA, 25 bp, Homo sapien
tacaatagaatctggtgaatcttct

SEQ ID NO: 1947507 - DNA, 25 bp, Homo sapien
tcttcttgttcacgtactagattca

SEQ ID NO: 1947508 - DNA, 25 bp, Homo sapien
ggaccggagaccatgaggtgcccca

SEQ ID NO: 1947509 - DNA, 25 bp, Homo sapien
cagagattttcgacagccgctgtac

SEQ ID NO: 1947510 - DNA, 25 bp, Homo sapien
atgaggtgccccaagccactcgtga

SEQ ID NO: 1947511 - DNA, 25 bp, Homo sapien
ccactcgtgagcgtcacccagagat

SEQ ID NO: 1947512 - DNA, 25 bp, Homo sapien
agatggctcaccgtgactcgcgcac

SEQ ID NO: 1947513 - DNA, 25 bp, Homo sapien
gtgactcgcgcaccactgtctatgc

SEQ ID NO: 1947514 - DNA, 25 bp, Homo sapien
tgtctatgccacctgtcttcacttc

SEQ ID NO: 1947515 - DNA, 25 bp, Homo sapien
tgtgctcactcggagatggctcacc

SEQ ID NO: 1947516 - DNA, 25 bp, Homo sapien
tttctacagccatggactcggcatc

SEQ ID NO: 1947517 - DNA, 25 bp, Homo sapien
agtcaggacagctgtcctttgtaac

SEQ ID NO: 1947518 - DNA, 25 bp, Homo sapien
ttgtaacagacatgaagcccgcagg

SEQ ID NO: 1947519 - DNA, 25 bp, Homo sapien
gtcatttctacagccatggactcgg

SEQ ID NO: 1947520 - DNA, 25 bp, Homo sapien
aggtgtccagggagctgttgtattc

SEQ ID NO: 1947521 - DNA, 25 bp, Homo sapien
ctggaggcccagtaggcctgcagca

SEQ ID NO: 1947522 - DNA, 25 bp, Homo sapien
ctgccctggaggcccagtaggcctg

SEQ ID NO: 1947523 - DNA, 25 bp, Homo sapien
gtgtccagggagctgttgtattcat

SEQ ID NO: 1947524 - DNA, 25 bp, Homo sapien
cctctatacaaagcatgcgagtgtg

SEQ ID NO: 1947525 - DNA, 25 bp, Homo sapien
gactgaatgataagtttggcccctg

SEQ ID NO: 1947526 - DNA, 25 bp, Homo sapien
gcgagtgtgttaactgggtccaaac

SEQ ID NO: 1947527 - DNA, 25 bp, Homo sapien
tttatatgggaactaatagcagcca

SEQ ID NO: 1947528 - DNA, 25 bp, Homo sapien
tcacatgcagctctaggataaccag

SEQ ID NO: 1947529 - DNA, 25 bp, Homo sapien
tatagcagacagtgcgcttctagga

SEQ ID NO: 1947530 - DNA, 25 bp, Homo sapien
gaatctggcaatctagtcaaaaccc

SEQ ID NO: 1947531 - DNA, 25 bp, Homo sapien
ctacgtttcgattttgcagcacccg

SEQ ID NO: 1947532 - DNA, 25 bp, Homo sapien
tatctgcaaaagacggctttcttcc

SEQ ID NO: 1947533 - DNA, 25 bp, Homo sapien
aaccatgtctgcaggattattaccc

SEQ ID NO: 1947534 - DNA, 25 bp, Homo sapien
ggtctttctgaaatcaagccttgca

SEQ ID NO: 1947535 - DNA, 25 bp, Homo sapien
gcctgcctgaatttcgaaagcaagt

SEQ ID NO: 1947536 - DNA, 25 bp, Homo sapien
ggataaatcatgagagccagtggcc

SEQ ID NO: 1947537 - DNA, 25 bp, Homo sapien
gcacagacgatatgatggtacccga

SEQ ID NO: 1947538 - DNA, 25 bp, Homo sapien
acggaatcccgcctcagatgatggg

SEQ ID NO: 1947539 - DNA, 25 bp, Homo sapien
tcagcagaatatgtgggcagcacgc

SEQ ID NO: 1947540 - DNA, 25 bp, Homo sapien
cacgttggccaacatttccgggcag

SEQ ID NO: 1947541 - DNA, 25 bp, Homo sapien
cagtctgtcgagaaatgtccatggc

SEQ ID NO: 1947542 - DNA, 25 bp, Homo sapien
gctagacttgtctgcttacacggaa

SEQ ID NO: 1947543 - DNA, 25 bp, Homo sapien
gacttgtgctggagaccctctgtaa

SEQ ID NO: 1947544 - DNA, 25 bp, Homo sapien
gaatacatacctgacaacgatccgg

SEQ ID NO: 1947545 - DNA, 25 bp, Homo sapien
ggcgtttgaccttccacgtgacagt

SEQ ID NO: 1947546 - DNA, 25 bp, Homo sapien
tgcgaaaatttcaccacactgagtc

SEQ ID NO: 1947547 - DNA, 25 bp, Homo sapien
gctcaaggaggtatgtcggtcagta

SEQ ID NO: 1947548 - DNA, 25 bp, Homo sapien
tcatgtcatcctctaaagtgccaaa

SEQ ID NO: 1947549 - DNA, 25 bp, Homo sapien
gccaaagtcaaattgctgagttaat

SEQ ID NO: 1947550 - DNA, 25 bp, Homo sapien
tgtcaggtgcatccacgtgcatctc

SEQ ID NO: 1947551 - DNA, 25 bp, Homo sapien
ggcactgtgctagcgcttctaccct

SEQ ID NO: 1947552 - DNA, 25 bp, Homo sapien
catagaggtggggagtgcggggtga

SEQ ID NO: 1947553 - DNA, 25 bp, Homo sapien
tggggagtgcggggtgagtggagac

SEQ ID NO: 1947554 - DNA, 25 bp, Homo sapien
cagggagcccatgttggcaccaaga

SEQ ID NO: 1947555 - DNA, 25 bp, Homo sapien
gcagattgccagcaagagcgtggaa

SEQ ID NO: 1947556 - DNA, 25 bp, Homo sapien
tgggagctcatggaccatgcagatg

SEQ ID NO: 1947557 - DNA, 25 bp, Homo sapien
agggttccctcgattctgcaatggg

SEQ ID NO: 1947558 - DNA, 25 bp, Homo sapien
atacagcaattttaacagggtaaca

SEQ ID NO: 1947559 - DNA, 25 bp, Homo sapien
tccagatgctgattacacctgtttc

SEQ ID NO: 1947560 - DNA, 25 bp, Homo sapien
catggtctagagaaaagtattacat

SEQ ID NO: 1947561 - DNA, 25 bp, Homo sapien
cacctgtttcattaacaatacagca

SEQ ID NO: 1947562 - DNA, 25 bp, Homo sapien
tattgggactccgtactcaggtgac

SEQ ID NO: 1947563 - DNA, 25 bp, Homo sapien
tattgaagacggatgacaactgggc

SEQ ID NO: 1947564 - DNA, 25 bp, Homo sapien
cagaccacatttaggacccgagagc

SEQ ID NO: 1947565 - DNA, 25 bp, Homo sapien
gggtgatcacaactcattactggct

SEQ ID NO: 1947566 - DNA, 25 bp, Homo sapien
cagtactattgctattagggggtct

SEQ ID NO: 1947567 - DNA, 25 bp, Homo sapien
cctttaattagacacattgcagtac

SEQ ID NO: 1947568 - DNA, 25 bp, Homo sapien
tgcagtactattgctattagggggt

SEQ ID NO: 1947569 - DNA, 25 bp, Homo sapien
ttaattagacacattgcagtactat

SEQ ID NO: 1947570 - DNA, 25 bp, Homo sapien
ggagaaatcagtcccagtccttttg

SEQ ID NO: 1947571 - DNA, 25 bp, Homo sapien
ttaaatagtcttcttaactgtggga

SEQ ID NO: 1947572 - DNA, 25 bp, Homo sapien
tgaggctgaatgctatccagtgcac

SEQ ID NO: 1947573 - DNA, 25 bp, Homo sapien
tggttcagtcagcaatctgcccatg

SEQ ID NO: 1947574 - DNA, 25 bp, Homo sapien
tattgattgcattttacttcgaaag

SEQ ID NO: 1947575 - DNA, 25 bp, Homo sapien
ccgattcggagttcttgggaattgt

SEQ ID NO: 1947576 - DNA, 25 bp, Homo sapien
ctcaacagccgattcggagttcttg

SEQ ID NO: 1947577 - DNA, 25 bp, Homo sapien
gcattttacttcgaaagtcgttcat

SEQ ID NO: 1947578 - DNA, 25 bp, Homo sapien
ctctggccagggttggcaatgtgct

SEQ ID NO: 1947579 - DNA, 25 bp, Homo sapien
tgtcactggaagatacgtaaggtct

SEQ ID NO: 1947580 - DNA, 25 bp, Homo sapien
ttgtccaaaacattaatatcacccc

SEQ ID NO: 1947581 - DNA, 25 bp, Homo sapien
tccttccatattacatattgtctgt

SEQ ID NO: 1947582 - DNA, 25 bp, Homo sapien
agacaactttaaagcttcagttcct

SEQ ID NO: 1947583 - DNA, 25 bp, Homo sapien
tttgatatataaccctatatctatg

SEQ ID NO: 1947584 - DNA, 25 bp, Homo sapien
ttagacaactttaaagcttcagttc

SEQ ID NO: 1947585 - DNA, 25 bp, Homo sapien
cattgtagaggaagttaccactttt

SEQ ID NO: 1947586 - DNA, 25 bp, Homo sapien
cacagagacccctaatgatggtgga

SEQ ID NO: 1947587 - DNA, 25 bp, Homo sapien
tattccacagagacccctaatgatg

SEQ ID NO: 1947588 - DNA, 25 bp, Homo sapien
atctattccacagagacccctaatg

SEQ ID NO: 1947589 - DNA, 25 bp, Homo sapien
acccctaatgatggtggaaactgga

SEQ ID NO: 1947590 - DNA, 25 bp, Homo sapien
gctcaacaagctcactcttcacggg

SEQ ID NO: 1947591 - DNA, 25 bp, Homo sapien
ccgtggcagttttcagagtggatac

SEQ ID NO: 1947592 - DNA, 25 bp, Homo sapien
agagccaggcgcccttgagcggcat

SEQ ID NO: 1947593 - DNA, 25 bp, Homo sapien
tctcctaggatccatccgtggcagt

SEQ ID NO: 1947594 - DNA, 25 bp, Homo sapien
acaggaaattcgctcctgccgagct

SEQ ID NO: 1947595 - DNA, 25 bp, Homo sapien
ggacaggaaattcgctcctgccgag

SEQ ID NO: 1947596 - DNA, 25 bp, Homo sapien
acacagggacaggaaattcgctcct

SEQ ID NO: 1947597 - DNA, 25 bp, Homo sapien
ctgccgagctcactctccggctggc

SEQ ID NO: 1947598 - DNA, 25 bp, Homo sapien
gcacaacagacacagtccaactcat

SEQ ID NO: 1947599 - DNA, 25 bp, Homo sapien
tgcacaacagacacagtccaactca

SEQ ID NO: 1947600 - DNA, 25 bp, Homo sapien
ctgcacaacagacacagtccaactc

SEQ ID NO: 1947601 - DNA, 25 bp, Homo sapien
caggacgtcgcaacgccaagagagc

SEQ ID NO: 1947602 - DNA, 25 bp, Homo sapien
gcaccttcagccctctgtggcgagt

SEQ ID NO: 1947603 - DNA, 25 bp, Homo sapien
aaaactgctgaccaggacgtcgcaa

SEQ ID NO: 1947604 - DNA, 25 bp, Homo sapien
gagagccattagcagcaccttcagc

SEQ ID NO: 1947605 - DNA, 25 bp, Homo sapien
tctgtccactacgatgttaaaccta

SEQ ID NO: 1947606 - DNA, 25 bp, Homo sapien
gtgcctctgtccactacgatgttaa

SEQ ID NO: 1947607 - DNA, 25 bp, Homo sapien
cactacgatgttaaacctattagag

SEQ ID NO: 1947608 - DNA, 25 bp, Homo sapien
tgtccactacgatgttaaacctatt

SEQ ID NO: 1947609 - DNA, 25 bp, Homo sapien
ctcatcatagtgtcccagtgtgcac

SEQ ID NO: 1947610 - DNA, 25 bp, Homo sapien
tcatcatagtgtcccagtgtgcgct

SEQ ID NO: 1947611 - DNA, 25 bp, Homo sapien
tcatagtgccccagtgtgcactcac

SEQ ID NO: 1947612 - DNA, 25 bp, Homo sapien
tcatcatagtgtcccagtgtgcact

SEQ ID NO: 1947613 - DNA, 25 bp, Homo sapien
tcatcatagtgtcccagtgtgcgct

SEQ ID NO: 1947614 - DNA, 25 bp, Homo sapien
ctcatcatagtgtcccagtgtgcgc

SEQ ID NO: 1947615 - DNA, 25 bp, Homo sapien
cccagtgtacactcatctagcctta

SEQ ID NO: 1947616 - DNA, 25 bp, Homo sapien
tcatctagccttatcatagtttccc

SEQ ID NO: 1947617 - DNA, 25 bp, Homo sapien
tctagccttatcatagtttcccagt

SEQ ID NO: 1947618 - DNA, 25 bp, Homo sapien
gtacactcatctagccttatcatag

SEQ ID NO: 1947619 - DNA, 25 bp, Homo sapien
ctcatcatagtgtcccagtgtgcgc

SEQ ID NO: 1947620 - DNA, 25 bp, Homo sapien
tcatcatagtgtcccagtgtgcgct

SEQ ID NO: 1947621 - DNA, 25 bp, Homo sapien
ctcatcatagtgtcccagtgtgcgc

SEQ ID NO: 1947622 - DNA, 25 bp, Homo sapien
ctcatcatagtgtcccagtgtgcac

SEQ ID NO: 1947623 - DNA, 25 bp, Homo sapien
tcatcatagtgtcccagtgtgcgct

SEQ ID NO: 1947624 - DNA, 25 bp, Homo sapien
tcatcatagtgtcccagtgtgcact

SEQ ID NO: 1947625 - DNA, 25 bp, Homo sapien
ctcatcatagtgtcccagtgtgcac

SEQ ID NO: 1947626 - DNA, 25 bp, Homo sapien
tcatcatagtgtcccagtgtgcact

SEQ ID NO: 1947627 - DNA, 25 bp, Homo sapien
ctcatcatagtgtcccagtgtgcgc

SEQ ID NO: 1947628 - DNA, 25 bp, Homo sapien
tcatcatagtgtcccagtgtgcgct

SEQ ID NO: 1947629 - DNA, 25 bp, Homo sapien
atcatagtgtcgcagagtgtgctca

SEQ ID NO: 1947630 - DNA, 25 bp, Homo sapien
ataatgccccagtgtgaactcaact

SEQ ID NO: 1947631 - DNA, 25 bp, Homo sapien
atgccccagtgtgaactcaactagc

SEQ ID NO: 1947632 - DNA, 25 bp, Homo sapien
tcatagtgtcgcagagtgtgctcac

SEQ ID NO: 1947633 - DNA, 25 bp, Homo sapien
ctcatcatagtgtcccagtgtgcgc

SEQ ID NO: 1947634 - DNA, 25 bp, Homo sapien
tcatcatagtgtcccagtgtgcgct

SEQ ID NO: 1947635 - DNA, 25 bp, Homo sapien
gtgccccagtgtgcgctcacctggc

SEQ ID NO: 1947636 - DNA, 25 bp, Homo sapien
atcatagtgccccagtgtgcgctca

SEQ ID NO: 1947637 - DNA, 25 bp, Homo sapien
agtgtcccagtgtgcgctcacctgg

SEQ ID NO: 1947638 - DNA, 25 bp, Homo sapien
gctcacctggcctcatcatagtgcc

SEQ ID NO: 1947639 - DNA, 25 bp, Homo sapien
catcatagtgcctcagtgtacgctc

SEQ ID NO: 1947640 - DNA, 25 bp, Homo sapien
tcatagtgcctcagtgtacgctcac

SEQ ID NO: 1947641 - DNA, 25 bp, Homo sapien
tcatcatagtgcctcagtgtacgct

SEQ ID NO: 1947642 - DNA, 25 bp, Homo sapien
ctcatcatagtgcctcagtgtacgc

SEQ ID NO: 1947643 - DNA, 25 bp, Homo sapien
atcatagtgccccagtgtgcactca

SEQ ID NO: 1947644 - DNA, 25 bp, Homo sapien
tcatagtgccccagtgtgcactcac

SEQ ID NO: 1947645 - DNA, 25 bp, Homo sapien
agtgtgcagtcatctggcgtcatca

SEQ ID NO: 1947646 - DNA, 25 bp, Homo sapien
gtgtgcagtcatctggcgtcatcat

SEQ ID NO: 1947647 - DNA, 25 bp, Homo sapien
cagtgtgcagtcatctggcgtcatc

SEQ ID NO: 1947648 - DNA, 25 bp, Homo sapien
ctcatcatagtgtcccagtgtgcgc

SEQ ID NO: 1947649 - DNA, 25 bp, Homo sapien
tcatcatagtgtcccagtgtgcgct

SEQ ID NO: 1947650 - DNA, 25 bp, Homo sapien
tagcctcatagtgtctcagtgtgca

SEQ ID NO: 1947651 - DNA, 25 bp, Homo sapien
cctagcctcatagtgtctcagtgtg

SEQ ID NO: 1947652 - DNA, 25 bp, Homo sapien
ctagcctcatagtgtctcagtgtgc

SEQ ID NO: 1947653 - DNA, 25 bp, Homo sapien
cacctagcctcatagtgtctcagtg

SEQ ID NO: 1947654 - DNA, 25 bp, Homo sapien
ctcatcatagtgtcccagtgtgcgc

SEQ ID NO: 1947655 - DNA, 25 bp, Homo sapien
tcatcatagtgtcccagtgtgcgct

SEQ ID NO: 1947656 - DNA, 25 bp, Homo sapien
tggcctcatcatagtgtcccagtgt

SEQ ID NO: 1947657 - DNA, 25 bp, Homo sapien
ggcctcatcatagtgtcccagtgtg

SEQ ID NO: 1947658 - DNA, 25 bp, Homo sapien
ctggcctcatcatagtgtcccagtg

SEQ ID NO: 1947659 - DNA, 25 bp, Homo sapien
tatatatgtcaaacagcaatagaaa

SEQ ID NO: 1947660 - DNA, 25 bp, Homo sapien
tatatatatgtcaaacagcaataga

SEQ ID NO: 1947661 - DNA, 25 bp, Homo sapien
atatatatgtcaaacagcaatagaa

SEQ ID NO: 1947662 - DNA, 25 bp, Homo sapien
tgcactcgccctaatgtcaatttat

SEQ ID NO: 1947663 - DNA, 25 bp, Homo sapien
gaatttagtcacgtactctgtcatc

SEQ ID NO: 1947664 - DNA, 25 bp, Homo sapien
tcatcatctccctagacagtgacca

SEQ ID NO: 1947665 - DNA, 25 bp, Homo sapien
gctgaagcgcaatgatcttggcaca

SEQ ID NO: 1947666 - DNA, 25 bp, Homo sapien
aaacatgtagataccagggacaaga

SEQ ID NO: 1947667 - DNA, 25 bp, Homo sapien
taaacatgtagataccagggacaag

SEQ ID NO: 1947668 - DNA, 25 bp, Homo sapien
agcagaataaacatgtagataccag

SEQ ID NO: 1947669 - DNA, 25 bp, Homo sapien
aacatgtagataccagggacaagac

SEQ ID NO: 1947670 - DNA, 25 bp, Homo sapien
tgaactcctaaagctttccagactg

SEQ ID NO: 1947671 - DNA, 25 bp, Homo sapien
ctcctaaagctttccagactgcgaa

SEQ ID NO: 1947672 - DNA, 25 bp, Homo sapien
actgtgaactcctaaagctttccag

SEQ ID NO: 1947673 - DNA, 25 bp, Homo sapien
aactcctaaagctttccagactgcg

SEQ ID NO: 1947674 - DNA, 25 bp, Homo sapien
gaagacccgctttccggtaatgcag

SEQ ID NO: 1947675 - DNA, 25 bp, Homo sapien
gcccagagctcgcaaggcaagggaa

SEQ ID NO: 1947676 - DNA, 25 bp, Homo sapien
ggaagacccgctttccggtaatgca

SEQ ID NO: 1947677 - DNA, 25 bp, Homo sapien
tataggaaaaaagtggctagttcag

SEQ ID NO: 1947678 - DNA, 25 bp, Homo sapien
ctataggaaaaaagtggctagttca

SEQ ID NO: 1947679 - DNA, 25 bp, Homo sapien
agcattcccgctgcagcaacggtac

SEQ ID NO: 1947680 - DNA, 25 bp, Homo sapien
cattcccgctgcagcaacggtacca

SEQ ID NO: 1947681 - DNA, 25 bp, Homo sapien
attcccgctgcagcaacggtaccaa

SEQ ID NO: 1947682 - DNA, 25 bp, Homo sapien
gccggtcattcgtggaccccggagc

SEQ ID NO: 1947683 - DNA, 25 bp, Homo sapien
aaccaggaaaagccggtcattcgtg

SEQ ID NO: 1947684 - DNA, 25 bp, Homo sapien
ctccagcccagaggccggctgccca

SEQ ID NO: 1947685 - DNA, 25 bp, Homo sapien
tgcccagttgcagcgcccgctgtct

SEQ ID NO: 1947686 - DNA, 25 bp, Homo sapien
tgggcccgggtggaagcgagaacca

SEQ ID NO: 1947687 - DNA, 25 bp, Homo sapien
aagcgagaaccaggcggaggagaaa

SEQ ID NO: 1947688 - DNA, 25 bp, Homo sapien
taggtcgcctctagtgcgtccgtcc

SEQ ID NO: 1947689 - DNA, 25 bp, Homo sapien
gtttaggtcgcctctagtgcgtccg

SEQ ID NO: 1947690 - DNA, 25 bp, Homo sapien
tgtttgaaagaacgctcagccccga

SEQ ID NO: 1947691 - DNA, 25 bp, Homo sapien
tccaaggccgtctcttagggaggat

SEQ ID NO: 1947692 - DNA, 25 bp, Homo sapien
gatgaccgaatgaaagtaccacccc

SEQ ID NO: 1947693 - DNA, 25 bp, Homo sapien
cctccgtcgggaagtggaacactca

SEQ ID NO: 1947694 - DNA, 25 bp, Homo sapien
gcgagttgaaccagagtcaccacca

SEQ ID NO: 1947695 - DNA, 25 bp, Homo sapien
aagcgagttgaaccagagtcaccac

SEQ ID NO: 1947696 - DNA, 25 bp, Homo sapien
caaagcgagttgaaccagagtcacc

SEQ ID NO: 1947697 - DNA, 25 bp, Homo sapien
cgagttgaaccagagtcaccaccag

SEQ ID NO: 1947698 - DNA, 25 bp, Homo sapien
tgcgtgtgggctggcatcatcagtg

SEQ ID NO: 1947699 - DNA, 25 bp, Homo sapien
tcagtgtggtcatagagcctcagtg

SEQ ID NO: 1947700 - DNA, 25 bp, Homo sapien
catcagtgtggtcatagagcctcag

SEQ ID NO: 1947701 - DNA, 25 bp, Homo sapien
gtgtgggaagtgacactgcgtgtgg

SEQ ID NO: 1947702 - DNA, 25 bp, Homo sapien
gtttggtggtcttgcatggggttca

SEQ ID NO: 1947703 - DNA, 25 bp, Homo sapien
agtttggtggtcttgcatggggttc

SEQ ID NO: 1947704 - DNA, 25 bp, Homo sapien
tttggtggtcttgcatggggttcat

SEQ ID NO: 1947705 - DNA, 25 bp, Homo sapien
cagtttggtggtcttgcatggggtt

SEQ ID NO: 1947706 - DNA, 25 bp, Homo sapien
gtatctgtcttagactccgccttca

SEQ ID NO: 1947707 - DNA, 25 bp, Homo sapien
gcgtatctgtcttagactccgcctt

SEQ ID NO: 1947708 - DNA, 25 bp, Homo sapien
tatctgtcttagactccgccttcac

SEQ ID NO: 1947709 - DNA, 25 bp, Homo sapien
ctgtcttagactccgccttcaccat

SEQ ID NO: 1947710 - DNA, 25 bp, Homo sapien
caagcccataagagcatagatcagg

SEQ ID NO: 1947711 - DNA, 25 bp, Homo sapien
caggattgagattatcaagcccata

SEQ ID NO: 1947712 - DNA, 25 bp, Homo sapien
ttttcaaatagcgatcccgtgtaga

SEQ ID NO: 1947713 - DNA, 25 bp, Homo sapien
cccgtgtagacttttcatagccatg

SEQ ID NO: 1947714 - DNA, 25 bp, Homo sapien
caaaatgtccccgaagagggcttat

SEQ ID NO: 1947715 - DNA, 25 bp, Homo sapien
tcaaaatgtccccgaagagggctta

SEQ ID NO: 1947716 - DNA, 25 bp, Homo sapien
tcactaagacgccgatttcaagacc

SEQ ID NO: 1947717 - DNA, 25 bp, Homo sapien
tgggatactcatatgacattcccac

SEQ ID NO: 1947718 - DNA, 25 bp, Homo sapien
tttgggatactcatatgacattccc

SEQ ID NO: 1947719 - DNA, 25 bp, Homo sapien
gttcactaagacgccgatttcaaga

SEQ ID NO: 1947720 - DNA, 25 bp, Homo sapien
cattccccaagccctgggcggacct

SEQ ID NO: 1947721 - DNA, 25 bp, Homo sapien
ccaagccctgggcggacctccgact

SEQ ID NO: 1947722 - DNA, 25 bp, Homo sapien
tccgactcgttccccactccccaga

SEQ ID NO: 1947723 - DNA, 25 bp, Homo sapien
agccctgggcggacctccgactcgt

SEQ ID NO: 1947724 - DNA, 25 bp, Homo sapien
gcagatgcgcagagctaggtaggcc

SEQ ID NO: 1947725 - DNA, 25 bp, Homo sapien
agatgcgcagagctaggtaggccac

SEQ ID NO: 1947726 - DNA, 25 bp, Homo sapien
aagagcgagtagcagatgcgcagag

SEQ ID NO: 1947727 - DNA, 25 bp, Homo sapien
gtaggccacggtgcctgcagtgcct

SEQ ID NO: 1947728 - DNA, 25 bp, Homo sapien
caattaatcaacaaaattgttttgg

SEQ ID NO: 1947729 - DNA, 25 bp, Homo sapien
tgctgggcctgatcttaggatagta

SEQ ID NO: 1947730 - DNA, 25 bp, Homo sapien
tgtttctcattgctcaaggaagctt

SEQ ID NO: 1947731 - DNA, 25 bp, Homo sapien
ggaagcttctcgttttaccatcata

SEQ ID NO: 1947732 - DNA, 25 bp, Homo sapien
agtgctgtcatcattgagtgaggag

SEQ ID NO: 1947733 - DNA, 25 bp, Homo sapien
gcacactctctagacttcagcagca

SEQ ID NO: 1947734 - DNA, 25 bp, Homo sapien
tgctgtcatcattgagtgaggagct

SEQ ID NO: 1947735 - DNA, 25 bp, Homo sapien
ttggcctgggctggcggcacactct

SEQ ID NO: 1947736 - DNA, 25 bp, Homo sapien
cagccccaaggtagtgtcttggcct

SEQ ID NO: 1947737 - DNA, 25 bp, Homo sapien
tgcagccccaaggtagtgtcttggc

SEQ ID NO: 1947738 - DNA, 25 bp, Homo sapien
cagtgcagccccaaggtagtgtctt

SEQ ID NO: 1947739 - DNA, 25 bp, Homo sapien
agtgcagccccaaggtagtgtcttg

SEQ ID NO: 1947740 - DNA, 25 bp, Homo sapien
ggtttacgccctctcctgaatttga

SEQ ID NO: 1947741 - DNA, 25 bp, Homo sapien
tattaacattgattacccgagggaa

SEQ ID NO: 1947742 - DNA, 25 bp, Homo sapien
taaaggacgccactcttccaaaatg

SEQ ID NO: 1947743 - DNA, 25 bp, Homo sapien
taggactgtcccatgtgaaaggaga

SEQ ID NO: 1947744 - DNA, 25 bp, Homo sapien
tctcctaggactgtgacactttgac

SEQ ID NO: 1947745 - DNA, 25 bp, Homo sapien
gacatcccttctggcgatttcggag

SEQ ID NO: 1947746 - DNA, 25 bp, Homo sapien
tatgtaccttgaccacgtgaacagc

SEQ ID NO: 1947747 - DNA, 25 bp, Homo sapien
tatttcaacacaagatgttcccagc

SEQ ID NO: 1947748 - DNA, 25 bp, Homo sapien
cagggagggccagctcgttgctgta

SEQ ID NO: 1947749 - DNA, 25 bp, Homo sapien
cagctcgttgctgtaattgctgatg

SEQ ID NO: 1947750 - DNA, 25 bp, Homo sapien
gccagctcgttgctgtaattgctga

SEQ ID NO: 1947751 - DNA, 25 bp, Homo sapien
agggccagctcgttgctgtaattgc

SEQ ID NO: 1947752 - DNA, 25 bp, Homo sapien
taaggccccgagtcgtgcttctcct

SEQ ID NO: 1947753 - DNA, 25 bp, Homo sapien
ctctcctgcccttgtcgcgggggat

SEQ ID NO: 1947754 - DNA, 25 bp, Homo sapien
tagtttctaaggccccgagtcgtgc

SEQ ID NO: 1947755 - DNA, 25 bp, Homo sapien
tcctgcccttgtcgcgggggatgca

SEQ ID NO: 1947756 - DNA, 25 bp, Homo sapien
tgggagggcgcgagcgagcagaagc

SEQ ID NO: 1947757 - DNA, 25 bp, Homo sapien
ccaggctccggccgtcccagggccg

SEQ ID NO: 1947758 - DNA, 25 bp, Homo sapien
gggcgcgagcgagcagaagccccag

SEQ ID NO: 1947759 - DNA, 25 bp, Homo sapien
tcggacccgcggcaacgcctgggag

SEQ ID NO: 1947760 - DNA, 25 bp, Homo sapien
agcgagcagctgtaaacgtccgtgg

SEQ ID NO: 1947761 - DNA, 25 bp, Homo sapien
gaaataaagcgagcagctgtaaacg

SEQ ID NO: 1947762 - DNA, 25 bp, Homo sapien
ggagaggagaagcacgcgacccctc

SEQ ID NO: 1947763 - DNA, 25 bp, Homo sapien
aatggagggagaaataaagcgagca

SEQ ID NO: 1947764 - DNA, 25 bp, Homo sapien
tcccgaagtcaggccggcctagggc

SEQ ID NO: 1947765 - DNA, 25 bp, Homo sapien
cgggccccgagaccctcgcccgcag

SEQ ID NO: 1947766 - DNA, 25 bp, Homo sapien
ccgggcgacgcgaccacgcgcccag

SEQ ID NO: 1947767 - DNA, 25 bp, Homo sapien
atttctcgggcatcaccagagtccc

SEQ ID NO: 1947768 - DNA, 25 bp, Homo sapien
ccatttctcgggcatcaccagagtc

SEQ ID NO: 1947769 - DNA, 25 bp, Homo sapien
ccagcccatttctcgggcatcacca

SEQ ID NO: 1947770 - DNA, 25 bp, Homo sapien
gaagaagggaggcgcaggccgggga

SEQ ID NO: 1947771 - DNA, 25 bp, Homo sapien
aggaagaagggaggcgcaggccggg

SEQ ID NO: 1947772 - DNA, 25 bp, Homo sapien
ggaggaagaagggaggcgcaggccg

SEQ ID NO: 1947773 - DNA, 25 bp, Homo sapien
agaagggaggcgcaggccggggagg

SEQ ID NO: 1947774 - DNA, 25 bp, Homo sapien
agtggcttgccggtggccgtgggaa

SEQ ID NO: 1947775 - DNA, 25 bp, Homo sapien
gggaatgagcgtgtcccgaggcggc

SEQ ID NO: 1947776 - DNA, 25 bp, Homo sapien
gataaacccggaagaagccgcgaga

SEQ ID NO: 1947777 - DNA, 25 bp, Homo sapien
ccgcgagacggactgaagtcggcca

SEQ ID NO: 1947778 - DNA, 25 bp, Homo sapien
gccgggctgagccttgcaaacaagt

SEQ ID NO: 1947779 - DNA, 25 bp, Homo sapien
ctgtaacgggaggatcatgatggcc

SEQ ID NO: 1947780 - DNA, 25 bp, Homo sapien
cctacttgggcgatgccacagggag

SEQ ID NO: 1947781 - DNA, 25 bp, Homo sapien
gcgggcccatgaaagactgcgagta

SEQ ID NO: 1947782 - DNA, 25 bp, Homo sapien
ttctcacacacaactcctcttcccc

SEQ ID NO: 1947783 - DNA, 25 bp, Homo sapien
tcccccttgatgtttaggttctgtg

SEQ ID NO: 1947784 - DNA, 25 bp, Homo sapien
ttccccatttccgatggtatgtgca

SEQ ID NO: 1947785 - DNA, 25 bp, Homo sapien
tgacactagtaggtagagtcagtgg

SEQ ID NO: 1947786 - DNA, 25 bp, Homo sapien
tcatcactataagtccattgaaggg

SEQ ID NO: 1947787 - DNA, 25 bp, Homo sapien
ccacagacaagtttggaggtgttcc

SEQ ID NO: 1947788 - DNA, 25 bp, Homo sapien
actgggtctccgcattctacactgc

SEQ ID NO: 1947789 - DNA, 25 bp, Homo sapien
tcagcagcatcatatgaggtgagga

SEQ ID NO: 1947790 - DNA, 25 bp, Homo sapien
gcaaataaagcactctgggatatat

SEQ ID NO: 1947791 - DNA, 25 bp, Homo sapien
ttaagcaaataaagcactctgggat

SEQ ID NO: 1947792 - DNA, 25 bp, Homo sapien
tatttgaatgttacctaacaaccac

SEQ ID NO: 1947793 - DNA, 25 bp, Homo sapien
tacctaacaaccactggcacctaga

SEQ ID NO: 1947794 - DNA, 25 bp, Homo sapien
gaatccatgtaattctgcagatggc

SEQ ID NO: 1947795 - DNA, 25 bp, Homo sapien
tccctgaggtcgtcacagtctgagc

SEQ ID NO: 1947796 - DNA, 25 bp, Homo sapien
gagtctattcggtcctctctcttgg

SEQ ID NO: 1947797 - DNA, 25 bp, Homo sapien
tcatagcatagtacttaaagcagtc

SEQ ID NO: 1947798 - DNA, 25 bp, Homo sapien
aggctgtacgcctcctttccttcct

SEQ ID NO: 1947799 - DNA, 25 bp, Homo sapien
gccatcaggctgtacgcctcctttc

SEQ ID NO: 1947800 - DNA, 25 bp, Homo sapien
cgccatcaggctgtacgcctccttt

SEQ ID NO: 1947801 - DNA, 25 bp, Homo sapien
catcaggctgtacgcctcctttcct

SEQ ID NO: 1947802 - DNA, 25 bp, Homo sapien
ttcccaccactggagcggcttccct

SEQ ID NO: 1947803 - DNA, 25 bp, Homo sapien
ctctcccaggcgcacattcctttgc

SEQ ID NO: 1947804 - DNA, 25 bp, Homo sapien
cccaggcgcacattcctttgcacat

SEQ ID NO: 1947805 - DNA, 25 bp, Homo sapien
gttgaccccggcaagggctctccca

SEQ ID NO: 1947806 - DNA, 25 bp, Homo sapien
gagatgcgctcctgctgaggtctca

SEQ ID NO: 1947807 - DNA, 25 bp, Homo sapien
tgaggtcaccctgcagtagtgagat

SEQ ID NO: 1947808 - DNA, 25 bp, Homo sapien
tagtgagatgcgctcctgctgaggt

SEQ ID NO: 1947809 - DNA, 25 bp, Homo sapien
tcagctgcagtagtgagatgcgctc

SEQ ID NO: 1947810 - DNA, 25 bp, Homo sapien
tgcagtagtgagatgcacacctgct

SEQ ID NO: 1947811 - DNA, 25 bp, Homo sapien
gcagtagtgagatgcacacctgctg

SEQ ID NO: 1947812 - DNA, 25 bp, Homo sapien
cacacctgctgattgctagtctggg

SEQ ID NO: 1947813 - DNA, 25 bp, Homo sapien
gcacacctgctgattgctagtctgg

SEQ ID NO: 1947814 - DNA, 25 bp, Homo sapien
tgcacacctgctgattgctagtctg

SEQ ID NO: 1947815 - DNA, 25 bp, Homo sapien
atgcacacctgctgattgctagtct

SEQ ID NO: 1947816 - DNA, 25 bp, Homo sapien
caggtcttctggttggatcctgctt

SEQ ID NO: 1947817 - DNA, 25 bp, Homo sapien
tcaggtcttctggttggatcctgct

SEQ ID NO: 1947818 - DNA, 25 bp, Homo sapien
aggtcttctggttggatcctgcttt

SEQ ID NO: 1947819 - DNA, 25 bp, Homo sapien
gccagagactttcatccaggccaag

SEQ ID NO: 1947820 - DNA, 25 bp, Homo sapien
gagactttcatccaggccaagagac

SEQ ID NO: 1947821 - DNA, 25 bp, Homo sapien
cagagactttcatccaggccaagag

SEQ ID NO: 1947822 - DNA, 25 bp, Homo sapien
ctgccagagactttcatccaggcca

SEQ ID NO: 1947823 - DNA, 25 bp, Homo sapien
tgttctgtctgaaaaatgtgttgaa

SEQ ID NO: 1947824 - DNA, 25 bp, Homo sapien
tttgttctgtctgaaaaatgtgttg

SEQ ID NO: 1947825 - DNA, 25 bp, Homo sapien
tgtctgaaaaatgtgttgaaaagaa

SEQ ID NO: 1947826 - DNA, 25 bp, Homo sapien
tctgtctgaaaaatgtgttgaaaag

SEQ ID NO: 1947827 - DNA, 25 bp, Homo sapien
taaggactcgacttggatgattgga

SEQ ID NO: 1947828 - DNA, 25 bp, Homo sapien
aggactcgacttggatgattggatg

SEQ ID NO: 1947829 - DNA, 25 bp, Homo sapien
ctaaggactcgacttggatgattgg

SEQ ID NO: 1947830 - DNA, 25 bp, Homo sapien
aaggactcgacttggatgattggat

SEQ ID NO: 1947831 - DNA, 25 bp, Homo sapien
agagggtagcctggtgcttgacact

SEQ ID NO: 1947832 - DNA, 25 bp, Homo sapien
agaagagagggtagcctggtgcttg

SEQ ID NO: 1947833 - DNA, 25 bp, Homo sapien
agagagggtagcctggtgcttgaca

SEQ ID NO: 1947834 - DNA, 25 bp, Homo sapien
gaagagagggtagcctggtgcttga

SEQ ID NO: 1947835 - DNA, 25 bp, Homo sapien
ggaccaggaagtgggcgcatccatt

SEQ ID NO: 1947836 - DNA, 25 bp, Homo sapien
gcgcatccattgcagacggcctttc

SEQ ID NO: 1947837 - DNA, 25 bp, Homo sapien
tccataagagcgttttccgtggaaa

SEQ ID NO: 1947838 - DNA, 25 bp, Homo sapien
gaaacggagacttcattgtagtggg

SEQ ID NO: 1947839 - DNA, 25 bp, Homo sapien
ctggaggggcatcgggcctgggagc

SEQ ID NO: 1947840 - DNA, 25 bp, Homo sapien
gaggggcatcgggcctgggagcaca

SEQ ID NO: 1947841 - DNA, 25 bp, Homo sapien
gggcatcgggcctgggagcacagga

SEQ ID NO: 1947842 - DNA, 25 bp, Homo sapien
gcagctgtgggagggctcgcctcat

SEQ ID NO: 1947843 - DNA, 25 bp, Homo sapien
ctcgctcctccggcaggaaccgggc

SEQ ID NO: 1947844 - DNA, 25 bp, Homo sapien
ccctcgctcctccggcaggaaccgg

SEQ ID NO: 1947845 - DNA, 25 bp, Homo sapien
tcgctcctccggcaggaaccgggcc

SEQ ID NO: 1947846 - DNA, 25 bp, Homo sapien
gctcctccggcaggaaccgggccat

SEQ ID NO: 1947847 - DNA, 25 bp, Homo sapien
tcttaattttgtggttctgactcac

SEQ ID NO: 1947848 - DNA, 25 bp, Homo sapien
agtacatttaggtgcctactctgaa

SEQ ID NO: 1947849 - DNA, 25 bp, Homo sapien
ccctactgagtgtggtaaaaatgcc

SEQ ID NO: 1947850 - DNA, 25 bp, Homo sapien
tgcccaagcccattaaaacaatggc

SEQ ID NO: 1947851 - DNA, 25 bp, Homo sapien
cagctcggtgcgtgctgtacagggc

SEQ ID NO: 1947852 - DNA, 25 bp, Homo sapien
aggacagctcggtgcgtgctgtaca

SEQ ID NO: 1947853 - DNA, 25 bp, Homo sapien
cagcaaggacagctcggtgcgtgct

SEQ ID NO: 1947854 - DNA, 25 bp, Homo sapien
caaggacagctcggtgcgtgctgta

SEQ ID NO: 1947855 - DNA, 25 bp, Homo sapien
cagtgcttctgactgcgtcagacag

SEQ ID NO: 1947856 - DNA, 25 bp, Homo sapien
tgactgcgtcagacagtacccttct

SEQ ID NO: 1947857 - DNA, 25 bp, Homo sapien
gtcgcatttagggtatgcggccgcc

SEQ ID NO: 1947858 - DNA, 25 bp, Homo sapien
tggcatgggcaaggtgccgtttccc

SEQ ID NO: 1947859 - DNA, 25 bp, Homo sapien
ttcctgggaagtgcccgcttcgtgt

SEQ ID NO: 1947860 - DNA, 25 bp, Homo sapien
tgcgcacccaggtccgccgtcctgt

SEQ ID NO: 1947861 - DNA, 25 bp, Homo sapien
cttttcctgggaagtgcccgcttcg

SEQ ID NO: 1947862 - DNA, 25 bp, Homo sapien
aagtgcccgcttcgtgtctgcgcac

SEQ ID NO: 1947863 - DNA, 25 bp, Homo sapien
tctccgactcggcttctaagtccgg

SEQ ID NO: 1947864 - DNA, 25 bp, Homo sapien
tagtaggcatcttctccgactcggc

SEQ ID NO: 1947865 - DNA, 25 bp, Homo sapien
tcatggaaagcaactgtctccaact

SEQ ID NO: 1947866 - DNA, 25 bp, Homo sapien
tcttcctcttccttagtaggcatct

SEQ ID NO: 1947867 - DNA, 25 bp, Homo sapien
ggggcaaagaggatggagttgctta

SEQ ID NO: 1947868 - DNA, 25 bp, Homo sapien
ctgccgtgggggcaaagaggatgga

SEQ ID NO: 1947869 - DNA, 25 bp, Homo sapien
ccgtgggggcaaagaggatggagtt

SEQ ID NO: 1947870 - DNA, 25 bp, Homo sapien
gggcaaagaggatggagttgcttac

SEQ ID NO: 1947871 - DNA, 25 bp, Homo sapien
cgggctgcttattgcgaaggtgaga

SEQ ID NO: 1947872 - DNA, 25 bp, Homo sapien
cctcttggctggcgggctgcttatt

SEQ ID NO: 1947873 - DNA, 25 bp, Homo sapien
tggctggcgggctgcttattgcgaa

SEQ ID NO: 1947874 - DNA, 25 bp, Homo sapien
tgcttattgcgaaggtgagacagaa

SEQ ID NO: 1947875 - DNA, 25 bp, Homo sapien
tcgaaatgcgaagtaatgaactgga

SEQ ID NO: 1947876 - DNA, 25 bp, Homo sapien
ctggagcatgaacaacatgctcgaa

SEQ ID NO: 1947877 - DNA, 25 bp, Homo sapien
cttgatttcttagaactggagcatg

SEQ ID NO: 1947878 - DNA, 25 bp, Homo sapien
tggtcttgatttcttagaactggag

SEQ ID NO: 1947879 - DNA, 25 bp, Homo sapien
cattcccgtgaacaggttgcgggtc

SEQ ID NO: 1947880 - DNA, 25 bp, Homo sapien
cttattgtcattcccgtgaacaggt

SEQ ID NO: 1947881 - DNA, 25 bp, Homo sapien
tgtcattcccgtgaacaggttgcgg

SEQ ID NO: 1947882 - DNA, 25 bp, Homo sapien
attgtcattcccgtgaacaggttgc

SEQ ID NO: 1947883 - DNA, 25 bp, Homo sapien
gcttgagatcctctcttcgtgtggg

SEQ ID NO: 1947884 - DNA, 25 bp, Homo sapien
gactggctttgatggttatttctcc

SEQ ID NO: 1947885 - DNA, 25 bp, Homo sapien
atacggcggccagccaagaaaaggg

SEQ ID NO: 1947886 - DNA, 25 bp, Homo sapien
caaacgctacaagccatacggcggc

SEQ ID NO: 1947887 - DNA, 25 bp, Homo sapien
ctttttgtgtatcctcttgagggtt

SEQ ID NO: 1947888 - DNA, 25 bp, Homo sapien
tttttgtgtatcctcttgagggttc

SEQ ID NO: 1947889 - DNA, 25 bp, Homo sapien
agttcatcgccatcaccagtatatt

SEQ ID NO: 1947890 - DNA, 25 bp, Homo sapien
ttctttagggctccagttattctga

SEQ ID NO: 1947891 - DNA, 25 bp, Homo sapien
ctgttctcagaacttgacagttctt

SEQ ID NO: 1947892 - DNA, 25 bp, Homo sapien
gcagccatgtaacggtctctcagga

SEQ ID NO: 1947893 - DNA, 25 bp, Homo sapien
gaatgttgaagccaactggacaatg

SEQ ID NO: 1947894 - DNA, 25 bp, Homo sapien
ggctgcctgttactttgaaaaccat

SEQ ID NO: 1947895 - DNA, 25 bp, Homo sapien
ctggctgcctgttactttgaaaacc

SEQ ID NO: 1947896 - DNA, 25 bp, Homo sapien
tgcctgttactttgaaaaccatgtg

SEQ ID NO: 1947897 - DNA, 25 bp, Homo sapien
cctgttactttgaaaaccatgtgta

SEQ ID NO: 1947898 - DNA, 25 bp, Homo sapien
ttactgcatcttcgtaacgccgaag

SEQ ID NO: 1947899 - DNA, 25 bp, Homo sapien
cacggtactcgtagacttgttctcc

SEQ ID NO: 1947900 - DNA, 25 bp, Homo sapien
tttccgtagcggtaacatctggact

SEQ ID NO: 1947901 - DNA, 25 bp, Homo sapien
cccaaaggccttgagttactgcatc

SEQ ID NO: 1947902 - DNA, 25 bp, Homo sapien
tgagcaattgaagccctagtgtggg

SEQ ID NO: 1947903 - DNA, 25 bp, Homo sapien
tgggtgagcaattgaagccctagtg

SEQ ID NO: 1947904 - DNA, 25 bp, Homo sapien
ggtgagcaattgaagccctagtgtg

SEQ ID NO: 1947905 - DNA, 25 bp, Homo sapien
ctgggtgagcaattgaagccctagt

SEQ ID NO: 1947906 - DNA, 25 bp, Homo sapien
ctacttaaagcgacaaggacttcct

SEQ ID NO: 1947907 - DNA, 25 bp, Homo sapien
cttaaagcgacaaggacttcctatt

SEQ ID NO: 1947908 - DNA, 25 bp, Homo sapien
taaagcgacaaggacttcctattac

SEQ ID NO: 1947909 - DNA, 25 bp, Homo sapien
tacttaaagcgacaaggacttccta

SEQ ID NO: 1947910 - DNA, 25 bp, Homo sapien
tcatcagagaagtcactagacctgc

SEQ ID NO: 1947911 - DNA, 25 bp, Homo sapien
catcagagaagtcactagacctgcc

SEQ ID NO: 1947912 - DNA, 25 bp, Homo sapien
tggttcacgttgtccagctgtgccc

SEQ ID NO: 1947913 - DNA, 25 bp, Homo sapien
gctgtgccctcgctgaaactggctt

SEQ ID NO: 1947914 - DNA, 25 bp, Homo sapien
gtctgtctggttcacgttgtccagc

SEQ ID NO: 1947915 - DNA, 25 bp, Homo sapien
tggctttgctgtgccaacatcatct

SEQ ID NO: 1947916 - DNA, 25 bp, Homo sapien
tccggtctgtccaacctgtcggcag

SEQ ID NO: 1947917 - DNA, 25 bp, Homo sapien
ctccggtctgtccaacctgtcggca

SEQ ID NO: 1947918 - DNA, 25 bp, Homo sapien
tctccggtctgtccaacctgtcggc

SEQ ID NO: 1947919 - DNA, 25 bp, Homo sapien
ctctccggtctgtccaacctgtcgg

SEQ ID NO: 1947920 - DNA, 25 bp, Homo sapien
cctgcagtcgctggcatcctgttct

SEQ ID NO: 1947921 - DNA, 25 bp, Homo sapien
agccacgcctgatgaagccgccgat

SEQ ID NO: 1947922 - DNA, 25 bp, Homo sapien
cagcttcagcgaccccggagtcctc

SEQ ID NO: 1947923 - DNA, 25 bp, Homo sapien
ggcggtgaaaatcacccctgccatc

SEQ ID NO: 1947924 - DNA, 25 bp, Homo sapien
ctggaaaggcaaataggtaacactg

SEQ ID NO: 1947925 - DNA, 25 bp, Homo sapien
taacactgaaagtctgcccatggcc

SEQ ID NO: 1947926 - DNA, 25 bp, Homo sapien
aggtaacactgaaagtctgcccatg

SEQ ID NO: 1947927 - DNA, 25 bp, Homo sapien
ggcaaataggtaacactgaaagtct

SEQ ID NO: 1947928 - DNA, 25 bp, Homo sapien
gtggggacggcaggccgagggctgt

SEQ ID NO: 1947929 - DNA, 25 bp, Homo sapien
ggacggcaggccgagggctgtgcag

SEQ ID NO: 1947930 - DNA, 25 bp, Homo sapien
cagtggggacggcaggccgagggct

SEQ ID NO: 1947931 - DNA, 25 bp, Homo sapien
gggacggcaggccgagggctgtgca

SEQ ID NO: 1947932 - DNA, 25 bp, Homo sapien
tgaaatgaaatattcctcgtgcttt

SEQ ID NO: 1947933 - DNA, 25 bp, Homo sapien
ccatgaaatgaaatattcctcgtgc

SEQ ID NO: 1947934 - DNA, 25 bp, Homo sapien
aaatgaaatattcctcgtgctttta

SEQ ID NO: 1947935 - DNA, 25 bp, Homo sapien
ctgtgaccatgaaatgaaatattcc

SEQ ID NO: 1947936 - DNA, 25 bp, Homo sapien
gttgttgatgaagcgtctctccccg

SEQ ID NO: 1947937 - DNA, 25 bp, Homo sapien
catgtgtctgtgtgatgggtctgct

SEQ ID NO: 1947938 - DNA, 25 bp, Homo sapien
tctctccccgtgtaggatgtggccg

SEQ ID NO: 1947939 - DNA, 25 bp, Homo sapien
gccctgatgaacaggccagacagtg

SEQ ID NO: 1947940 - DNA, 25 bp, Homo sapien
tacagcctcgagcttcgaaacagaa

SEQ ID NO: 1947941 - DNA, 25 bp, Homo sapien
ggccggcgggcttggttctcaaatc

SEQ ID NO: 1947942 - DNA, 25 bp, Homo sapien
ggcctttttctagtgggacgctcac

SEQ ID NO: 1947943 - DNA, 25 bp, Homo sapien
agaaagccgagcctagtatgccgcg

SEQ ID NO: 1947944 - DNA, 25 bp, Homo sapien
ctggaagagacaaaggcttctaaaa

SEQ ID NO: 1947945 - DNA, 25 bp, Homo sapien
agtgccagaaccatctagagtgcat

SEQ ID NO: 1947946 - DNA, 25 bp, Homo sapien
ggcttctaaaaaggtacatcctaga

SEQ ID NO: 1947947 - DNA, 25 bp, Homo sapien
gggaagtgccagaaccatctagagt

SEQ ID NO: 1947948 - DNA, 25 bp, Homo sapien
tgtaactggcgtatttgggaggata

SEQ ID NO: 1947949 - DNA, 25 bp, Homo sapien
gcgtatttgggaggataaagcaaga

SEQ ID NO: 1947950 - DNA, 25 bp, Homo sapien
agtagtgtaactggcgtatttggga

SEQ ID NO: 1947951 - DNA, 25 bp, Homo sapien
tactatcattagtagtgtaactggc

SEQ ID NO: 1947952 - DNA, 25 bp, Homo sapien
ccacaatttggagcgtccacttttt

SEQ ID NO: 1947953 - DNA, 25 bp, Homo sapien
gatggaaactcgaagtctaagtgtc

SEQ ID NO: 1947954 - DNA, 25 bp, Homo sapien
ctttaaggatggaaactcgaagtct

SEQ ID NO: 1947955 - DNA, 25 bp, Homo sapien
caccacaatttggagcgtccacttt

SEQ ID NO: 1947956 - DNA, 25 bp, Homo sapien
tcaaccacaccaggaacctgagcag

SEQ ID NO: 1947957 - DNA, 25 bp, Homo sapien
tcatgtcaaccacaccaggaacctg

SEQ ID NO: 1947958 - DNA, 25 bp, Homo sapien
tgtcaaccacaccaggaacctgagc

SEQ ID NO: 1947959 - DNA, 25 bp, Homo sapien
atgtcaaccacaccaggaacctgag

SEQ ID NO: 1947960 - DNA, 25 bp, Homo sapien
caccctgaagaagcgctggacaaaa

SEQ ID NO: 1947961 - DNA, 25 bp, Homo sapien
taggtccgaatgacactctggcggg

SEQ ID NO: 1947962 - DNA, 25 bp, Homo sapien
caaaatctccagacggccacttctg

SEQ ID NO: 1947963 - DNA, 25 bp, Homo sapien
tgctctttcagggtaggtccgaatg

SEQ ID NO: 1947964 - DNA, 25 bp, Homo sapien
attctgggcatgatgggttaatcct

SEQ ID NO: 1947965 - DNA, 25 bp, Homo sapien
cattctgggcatgatgggttaatcc

SEQ ID NO: 1947966 - DNA, 25 bp, Homo sapien
gcattctgggcatgatgggttaatc

SEQ ID NO: 1947967 - DNA, 25 bp, Homo sapien
atgcagagagatgcttcatcttcat

SEQ ID NO: 1947968 - DNA, 25 bp, Homo sapien
gccagctttcaaggcgaatgcttct

SEQ ID NO: 1947969 - DNA, 25 bp, Homo sapien
cctccctggtttagctgtatgccta

SEQ ID NO: 1947970 - DNA, 25 bp, Homo sapien
actgcatgcgagatgggtcccttga

SEQ ID NO: 1947971 - DNA, 25 bp, Homo sapien
taagagtacgtgctatgtggcaatc

SEQ ID NO: 1947972 - DNA, 25 bp, Homo sapien
gataaaaggtatatgtgatcatgat

SEQ ID NO: 1947973 - DNA, 25 bp, Homo sapien
tattagtatatcaataggtcaaaag

SEQ ID NO: 1947974 - DNA, 25 bp, Homo sapien
gataaaatgcgacatttgttttgta

SEQ ID NO: 1947975 - DNA, 25 bp, Homo sapien
tagataataaaaagggatttgataa

SEQ ID NO: 1947976 - DNA, 25 bp, Homo sapien
ctctgcggattaggcaaggctcggc

SEQ ID NO: 1947977 - DNA, 25 bp, Homo sapien
tctggcatccgagtataaagtgagc

SEQ ID NO: 1947978 - DNA, 25 bp, Homo sapien
gatgatgccgtattacaagcaccct

SEQ ID NO: 1947979 - DNA, 25 bp, Homo sapien
tctgtggcccttaacaagcagcatt

SEQ ID NO: 1947980 - DNA, 25 bp, Homo sapien
gccgtcatgctgtatgtgctcaggg

SEQ ID NO: 1947981 - DNA, 25 bp, Homo sapien
catgctgacacttcgctggaggaca

SEQ ID NO: 1947982 - DNA, 25 bp, Homo sapien
tgtgcgtgcatggatttgccgtcat

SEQ ID NO: 1947983 - DNA, 25 bp, Homo sapien
gaagtcacgctgtgcgtgcatggat

SEQ ID NO: 1947984 - DNA, 25 bp, Homo sapien
ttggtccagaagttgatctgtggca

SEQ ID NO: 1947985 - DNA, 25 bp, Homo sapien
ttcttggtccagaagttgatctgtg

SEQ ID NO: 1947986 - DNA, 25 bp, Homo sapien
gaaacagtgggatcagctccaaaga

SEQ ID NO: 1947987 - DNA, 25 bp, Homo sapien
atgaggacctcgaaacagtgggatc

SEQ ID NO: 1947988 - DNA, 25 bp, Homo sapien
agctgctttgtgtagggtgatggcc

SEQ ID NO: 1947989 - DNA, 25 bp, Homo sapien
ctgcaggaccaacgttgtcacaggg

SEQ ID NO: 1947990 - DNA, 25 bp, Homo sapien
acagatgactgcaggaccaacgttg

SEQ ID NO: 1947991 - DNA, 25 bp, Homo sapien
tgtccgagctctcatcctgaatgca

SEQ ID NO: 1947992 - DNA, 25 bp, Homo sapien
gatgactgcaggaccaacgttgtca

SEQ ID NO: 1947993 - DNA, 25 bp, Homo sapien
caggaagatgtgacagcggctcctg

SEQ ID NO: 1947994 - DNA, 25 bp, Homo sapien
gtccaggaagatgtgacagcggctc

SEQ ID NO: 1947995 - DNA, 25 bp, Homo sapien
cagcggctcctgcaagaggggacaa

SEQ ID NO: 1947996 - DNA, 25 bp, Homo sapien
tccaggaagatgtgacagcggctcc

SEQ ID NO: 1947997 - DNA, 25 bp, Homo sapien
gagaattaaggagaactaggcatcg

SEQ ID NO: 1947998 - DNA, 25 bp, Homo sapien
gatggcactattgatttcaagaccc

SEQ ID NO: 1947999 - DNA, 25 bp, Homo sapien
tcagccattccgagctaagatggca

SEQ ID NO: 1948000 - DNA, 25 bp, Homo sapien
tcaagacccgtaatttctagagagt

SEQ ID NO: 1948001 - DNA, 25 bp, Homo sapien
tgagggtggatatctccacacatgg

SEQ ID NO: 1948002 - DNA, 25 bp, Homo sapien
ggatgaggccaccttgacttgattg

SEQ ID NO: 1948003 - DNA, 25 bp, Homo sapien
tccacacatgggcaggttcttttct

SEQ ID NO: 1948004 - DNA, 25 bp, Homo sapien
tcttttcttgtgctgcagagtccca

SEQ ID NO: 1948005 - DNA, 25 bp, Homo sapien
aataacacaaggaactctttgaagc

SEQ ID NO: 1948006 - DNA, 25 bp, Homo sapien
caaataacacaaggaactctttgaa

SEQ ID NO: 1948007 - DNA, 25 bp, Homo sapien
aacacaaggaactctttgaagccat

SEQ ID NO: 1948008 - DNA, 25 bp, Homo sapien
taacacaaggaactctttgaagcca

SEQ ID NO: 1948009 - DNA, 25 bp, Homo sapien
ctgacagtctgcagaaccaggaaca

SEQ ID NO: 1948010 - DNA, 25 bp, Homo sapien
tttgagagcacacgtctgcacgctg

SEQ ID NO: 1948011 - DNA, 25 bp, Homo sapien
ccaggtgtggccagagggatttcaa

SEQ ID NO: 1948012 - DNA, 25 bp, Homo sapien
ctgctgttaggaagcaagcgtggca

SEQ ID NO: 1948013 - DNA, 25 bp, Homo sapien
ccctggcctgtagtgaggattgact

SEQ ID NO: 1948014 - DNA, 25 bp, Homo sapien
gaaagttatactgaggttcacctcc

SEQ ID NO: 1948015 - DNA, 25 bp, Homo sapien
ttggaaaagcataagccaggacccc

SEQ ID NO: 1948016 - DNA, 25 bp, Homo sapien
ttatgacctaataaactggaggagc

SEQ ID NO: 1948017 - DNA, 25 bp, Homo sapien
ccctggatgtaaaactaggagctag

SEQ ID NO: 1948018 - DNA, 25 bp, Homo sapien
gagggaaggagttctctttgatgta

SEQ ID NO: 1948019 - DNA, 25 bp, Homo sapien
gggctcgcacacaggaggctcataa

SEQ ID NO: 1948020 - DNA, 25 bp, Homo sapien
tctctttgatgtagtgacatgtcat

SEQ ID NO: 1948021 - DNA, 25 bp, Homo sapien
ggaaacacccatagctagacttaga

SEQ ID NO: 1948022 - DNA, 25 bp, Homo sapien
gctgtgaactacacgcaggacttag

SEQ ID NO: 1948023 - DNA, 25 bp, Homo sapien
gataagtcagggttccaaagagtca

SEQ ID NO: 1948024 - DNA, 25 bp, Homo sapien
tacaaaagcagtccctctatcaggg

SEQ ID NO: 1948025 - DNA, 25 bp, Homo sapien
aaaaaccgaccaggtgtggatctgc

SEQ ID NO: 1948026 - DNA, 25 bp, Homo sapien
atgtccctagcgaggaatggtcccc

SEQ ID NO: 1948027 - DNA, 25 bp, Homo sapien
acctccgtgtgtgatgaaacttccc

SEQ ID NO: 1948028 - DNA, 25 bp, Homo sapien
gaaacttcccgtggacagccaataa

SEQ ID NO: 1948029 - DNA, 25 bp, Homo sapien
ggcccagcagttgcgttatgcccaa

SEQ ID NO: 1948030 - DNA, 25 bp, Homo sapien
tccgttctgcagaaattggcccagc

SEQ ID NO: 1948031 - DNA, 25 bp, Homo sapien
tgaactgagcgtgagtgccctggtc

SEQ ID NO: 1948032 - DNA, 25 bp, Homo sapien
caggaaggcggcacaaagcctgcat

SEQ ID NO: 1948033 - DNA, 25 bp, Homo sapien
gaacaactctcttacttgccctcga

SEQ ID NO: 1948034 - DNA, 25 bp, Homo sapien
tcaagatgcctggtgaaaccgagag

SEQ ID NO: 1948035 - DNA, 25 bp, Homo sapien
ttgaaaagcagacaagcatcttgtg

SEQ ID NO: 1948036 - DNA, 25 bp, Homo sapien
tccaaggagacatgctttctgggtt

SEQ ID NO: 1948037 - DNA, 25 bp, Homo sapien
cagtcagcccgtcggcgagtgctgg

SEQ ID NO: 1948038 - DNA, 25 bp, Homo sapien
gaaacgcaggatttacactgatgac

SEQ ID NO: 1948039 - DNA, 25 bp, Homo sapien
ggatttacactgatgacgtacacag

SEQ ID NO: 1948040 - DNA, 25 bp, Homo sapien
cactgatgacgtacacagtgtgtgc

SEQ ID NO: 1948041 - DNA, 25 bp, Homo sapien
gtttgctgttcttgtccggccagcc

SEQ ID NO: 1948042 - DNA, 25 bp, Homo sapien
cctgccgccattcagaagctgtgtt

SEQ ID NO: 1948043 - DNA, 25 bp, Homo sapien
cttgtccggccagccttggctccaa

SEQ ID NO: 1948044 - DNA, 25 bp, Homo sapien
caactgctccctgccgccattcaga

SEQ ID NO: 1948045 - DNA, 25 bp, Homo sapien
gcatagcctggccaaggactggcat

SEQ ID NO: 1948046 - DNA, 25 bp, Homo sapien
ccttgcagaactgttgctgccatct

SEQ ID NO: 1948047 - DNA, 25 bp, Homo sapien
gaggctgcgtggaccctgcatagcc

SEQ ID NO: 1948048 - DNA, 25 bp, Homo sapien
tccttgcagaactgttgctgccatc

SEQ ID NO: 1948049 - DNA, 25 bp, Homo sapien
tttgatatatgtcctctagtagagg

SEQ ID NO: 1948050 - DNA, 25 bp, Homo sapien
ggatgtattgatataggagctaaaa

SEQ ID NO: 1948051 - DNA, 25 bp, Homo sapien
ggaggtactgcaacatacgtcaatg

SEQ ID NO: 1948052 - DNA, 25 bp, Homo sapien
tgtgaagtagactcagcacgctcct

SEQ ID NO: 1948053 - DNA, 25 bp, Homo sapien
gggctttcagtatgctcattaccca

SEQ ID NO: 1948054 - DNA, 25 bp, Homo sapien
gaacccaagaggtgatccctcaccc

SEQ ID NO: 1948055 - DNA, 25 bp, Homo sapien
gcacagtggtgaaatcggggctttc

SEQ ID NO: 1948056 - DNA, 25 bp, Homo sapien
cctctgtatgtctgggggtacctac

SEQ ID NO: 1948057 - DNA, 25 bp, Homo sapien
ttaggaaccacaggtgcagcggttc

SEQ ID NO: 1948058 - DNA, 25 bp, Homo sapien
ctgatggtcttttgggccgatggca

SEQ ID NO: 1948059 - DNA, 25 bp, Homo sapien
tcttttgggccgatggcatttctcc

SEQ ID NO: 1948060 - DNA, 25 bp, Homo sapien
gattcttcagagtagttaatggatt

SEQ ID NO: 1948061 - DNA, 25 bp, Homo sapien
tctgcccaatggagtactctgtttt

SEQ ID NO: 1948062 - DNA, 25 bp, Homo sapien
aacattaagtatcaaggggccgtat

SEQ ID NO: 1948063 - DNA, 25 bp, Homo sapien
ccaaatggagagcaaccagacaccc

SEQ ID NO: 1948064 - DNA, 25 bp, Homo sapien
aatggagagcaaccagacaccctcc

SEQ ID NO: 1948065 - DNA, 25 bp, Homo sapien
tactgattccgtgaaaccatcagat

SEQ ID NO: 1948066 - DNA, 25 bp, Homo sapien
atactgattccgtgaaaccatcaga

SEQ ID NO: 1948067 - DNA, 25 bp, Homo sapien
ctgattccgtgaaaccatcagatga

SEQ ID NO: 1948068 - DNA, 25 bp, Homo sapien
tgattccgtgaaaccatcagatgaa

SEQ ID NO: 1948069 - DNA, 25 bp, Homo sapien
gtacctgctccctcttctaacaagt

SEQ ID NO: 1948070 - DNA, 25 bp, Homo sapien
tggttgacccggaagcaagtcaggc

SEQ ID NO: 1948071 - DNA, 25 bp, Homo sapien
gctgaaggcagacacaggtccctgc

SEQ ID NO: 1948072 - DNA, 25 bp, Homo sapien
gactcacattagctatgtggagaga

SEQ ID NO: 1948073 - DNA, 25 bp, Homo sapien
tgcactgaggtgcgtggaagttggc

SEQ ID NO: 1948074 - DNA, 25 bp, Homo sapien
cttgcactgaggtgcgtggaagttg

SEQ ID NO: 1948075 - DNA, 25 bp, Homo sapien
ttgcactgaggtgcgtggaagttgg

SEQ ID NO: 1948076 - DNA, 25 bp, Homo sapien
aggacctcagcagcagtcaacacca

SEQ ID NO: 1948077 - DNA, 25 bp, Homo sapien
aagcagatgaactggcaccgttgac

SEQ ID NO: 1948078 - DNA, 25 bp, Homo sapien
caccctgggtttagcgcgatggctg

SEQ ID NO: 1948079 - DNA, 25 bp, Homo sapien
actggcaccgttgacaccatacttc

SEQ ID NO: 1948080 - DNA, 25 bp, Homo sapien
ccatcagagcagtgcacgcatggaa

SEQ ID NO: 1948081 - DNA, 25 bp, Homo sapien
taaagtccatcagagcagtgcacgc

SEQ ID NO: 1948082 - DNA, 25 bp, Homo sapien
tgtgtggataaagtccatcagagca

SEQ ID NO: 1948083 - DNA, 25 bp, Homo sapien
gatggtgtgtggataaagtccatca

SEQ ID NO: 1948084 - DNA, 25 bp, Homo sapien
caataacatgagctttgagttggct

SEQ ID NO: 1948085 - DNA, 25 bp, Homo sapien
ttcaataacatgagctttgagttgg

SEQ ID NO: 1948086 - DNA, 25 bp, Homo sapien
tcaataacatgagctttgagttggc

SEQ ID NO: 1948087 - DNA, 25 bp, Homo sapien
aataacatgagctttgagttggctg

SEQ ID NO: 1948088 - DNA, 25 bp, Homo sapien
gctttctgctctcttcgctgctcat

SEQ ID NO: 1948089 - DNA, 25 bp, Homo sapien
ctccgaagccttcacatctgctgtg

SEQ ID NO: 1948090 - DNA, 25 bp, Homo sapien
ccgaagccttcacatctgctgtgct

SEQ ID NO: 1948091 - DNA, 25 bp, Homo sapien
gtgctttctgctctcttcgctgctc

SEQ ID NO: 1948092 - DNA, 25 bp, Homo sapien
aattgtccttgcatcccacacagct

SEQ ID NO: 1948093 - DNA, 25 bp, Homo sapien
ttgcatcccacacagctttgccctc

SEQ ID NO: 1948094 - DNA, 25 bp, Homo sapien
tcagccaattgtccttgcatcccac

SEQ ID NO: 1948095 - DNA, 25 bp, Homo sapien
ttgtccttgcatcccacacagcttt

SEQ ID NO: 1948096 - DNA, 25 bp, Homo sapien
ctcttgtgttgtcttccagaagttg

SEQ ID NO: 1948097 - DNA, 25 bp, Homo sapien
tgttgtcttccagaagttgggtgta

SEQ ID NO: 1948098 - DNA, 25 bp, Homo sapien
cttgtgttgtcttccagaagttggg

SEQ ID NO: 1948099 - DNA, 25 bp, Homo sapien
tgtgttgtcttccagaagttgggtg

SEQ ID NO: 1948100 - DNA, 25 bp, Homo sapien
tggactattagtaaggagtatagct

SEQ ID NO: 1948101 - DNA, 25 bp, Homo sapien
gccaacggaatggtgtttggactat

SEQ ID NO: 1948102 - DNA, 25 bp, Homo sapien
gactattagtaaggagtatagcttt

SEQ ID NO: 1948103 - DNA, 25 bp, Homo sapien
gaatggtgtttggactattagtaag

SEQ ID NO: 1948104 - DNA, 25 bp, Homo sapien
cccgaactttccagtagaatacctg

SEQ ID NO: 1948105 - DNA, 25 bp, Homo sapien
cacaaaactcgatgaacttgcaaca

SEQ ID NO: 1948106 - DNA, 25 bp, Homo sapien
tgtgagtgtacacaaaactcgatga

SEQ ID NO: 1948107 - DNA, 25 bp, Homo sapien
cagactccggatcttgcttggtggg

SEQ ID NO: 1948108 - DNA, 25 bp, Homo sapien
caactgatgaatgtgctgtgatcaa

SEQ ID NO: 1948109 - DNA, 25 bp, Homo sapien
taggggactctggacccaactgatg

SEQ ID NO: 1948110 - DNA, 25 bp, Homo sapien
gactctggacccaactgatgaatgt

SEQ ID NO: 1948111 - DNA, 25 bp, Homo sapien
actgatgaatgtgctgtgatcaatg

SEQ ID NO: 1948112 - DNA, 25 bp, Homo sapien
tgcacagttataggacaaggactct

SEQ ID NO: 1948113 - DNA, 25 bp, Homo sapien
ggttccagctgattattccaactgc

SEQ ID NO: 1948114 - DNA, 25 bp, Homo sapien
ccttcaaagataggagcagctgtcg

SEQ ID NO: 1948115 - DNA, 25 bp, Homo sapien
aatacccttcccaagatggttccag

SEQ ID NO: 1948116 - DNA, 25 bp, Homo sapien
gtgggtgggctttctgatgaaagcc

SEQ ID NO: 1948117 - DNA, 25 bp, Homo sapien
cagtgggtgggctttctgatgaaag

SEQ ID NO: 1948118 - DNA, 25 bp, Homo sapien
tcagcactcagcagtgggtgggctt

SEQ ID NO: 1948119 - DNA, 25 bp, Homo sapien
agcactcagcagtgggtgggctttc

SEQ ID NO: 1948120 - DNA, 25 bp, Homo sapien
ctcatgcacggaaagcgccgagcca

SEQ ID NO: 1948121 - DNA, 25 bp, Homo sapien
cggccgagcgtgaaccggagtcggg

SEQ ID NO: 1948122 - DNA, 25 bp, Homo sapien
gcctgagggagcctccgggcaggag

SEQ ID NO: 1948123 - DNA, 25 bp, Homo sapien
gtactcagggtactcggccaagggc

SEQ ID NO: 1948124 - DNA, 25 bp, Homo sapien
ctggggcggccacgcagggttgcgg

SEQ ID NO: 1948125 - DNA, 25 bp, Homo sapien
tgggccgcggatcgcttcccctggg

SEQ ID NO: 1948126 - DNA, 25 bp, Homo sapien
tgtgggccgcggatcgcttcccctg

SEQ ID NO: 1948127 - DNA, 25 bp, Homo sapien
ggggcggccacgcagggttgcgggc

SEQ ID NO: 1948128 - DNA, 25 bp, Homo sapien
caaaatttacatctgcagcttaggt

SEQ ID NO: 1948129 - DNA, 25 bp, Homo sapien
tgtctttaacctacaagttgtcaga

SEQ ID NO: 1948130 - DNA, 25 bp, Homo sapien
tgtgatcagggagcctaattaaaat

SEQ ID NO: 1948131 - DNA, 25 bp, Homo sapien
ggaacaagcttcatatttctgagac

SEQ ID NO: 1948132 - DNA, 25 bp, Homo sapien
ggctaactttattcccagcatacag

SEQ ID NO: 1948133 - DNA, 25 bp, Homo sapien
gctaactttattcccagcatacagt

SEQ ID NO: 1948134 - DNA, 25 bp, Homo sapien
cagcatacagtcagcttttatgttt

SEQ ID NO: 1948135 - DNA, 25 bp, Homo sapien
catacagtcagcttttatgtttcac

SEQ ID NO: 1948136 - DNA, 25 bp, Homo sapien
tatgtctcttaggtatgaaaattac

SEQ ID NO: 1948137 - DNA, 25 bp, Homo sapien
tgagaaggtatgttgttggtaaatc

SEQ ID NO: 1948138 - DNA, 25 bp, Homo sapien
aatttccattgagaaggtatgttgt

SEQ ID NO: 1948139 - DNA, 25 bp, Homo sapien
gttggtaaatctcttatatgtctct

SEQ ID NO: 1948140 - DNA, 25 bp, Homo sapien
tgtccgtggtgtgactcctcactgg

SEQ ID NO: 1948141 - DNA, 25 bp, Homo sapien
gctgggaagccagttagctaattat

SEQ ID NO: 1948142 - DNA, 25 bp, Homo sapien
tacaatgaaggtattcttcctttgt

SEQ ID NO: 1948143 - DNA, 25 bp, Homo sapien
gttttctactggctttgacatttgc

SEQ ID NO: 1948144 - DNA, 25 bp, Homo sapien
tttaaggatgctattcagtctgact

SEQ ID NO: 1948145 - DNA, 25 bp, Homo sapien
aatgcagtgtttaaggatgctattc

SEQ ID NO: 1948146 - DNA, 25 bp, Homo sapien
gagtcatatggtattattacccaca

SEQ ID NO: 1948147 - DNA, 25 bp, Homo sapien
gtgattgttcattaagtcagacact

SEQ ID NO: 1948148 - DNA, 25 bp, Homo sapien
caaaaatacttccatagtacagctc

SEQ ID NO: 1948149 - DNA, 25 bp, Homo sapien
aatacttccatagtacagctccaca

SEQ ID NO: 1948150 - DNA, 25 bp, Homo sapien
tttgtgccacttggatgctgggaat

SEQ ID NO: 1948151 - DNA, 25 bp, Homo sapien
tactctatcacttcagttgcttcaa

SEQ ID NO: 1948152 - DNA, 25 bp, Homo sapien
gtggcatgataataactcactgcag

SEQ ID NO: 1948153 - DNA, 25 bp, Homo sapien
gacggggtctcagtctgttcctcag

SEQ ID NO: 1948154 - DNA, 25 bp, Homo sapien
tggagtgcagtggcatgataataac

SEQ ID NO: 1948155 - DNA, 25 bp, Homo sapien
ccttgaactcctgggcttaagtgat

SEQ ID NO: 1948156 - DNA, 25 bp, Homo sapien
ggtaataagcttccatctgagagag

SEQ ID NO: 1948157 - DNA, 25 bp, Homo sapien
tctatacagaaagatatggcaatgg

SEQ ID NO: 1948158 - DNA, 25 bp, Homo sapien
gaaacatcttgtgcacgttctggag

SEQ ID NO: 1948159 - DNA, 25 bp, Homo sapien
aattaatggtagagctgtggtactc

SEQ ID NO: 1948160 - DNA, 25 bp, Homo sapien
ggcaactgaactgcactgttcagtt

SEQ ID NO: 1948161 - DNA, 25 bp, Homo sapien
gcatatgctgtaccattaattatgg

SEQ ID NO: 1948162 - DNA, 25 bp, Homo sapien
gcagatcgtgaagccgtcgttggca

SEQ ID NO: 1948163 - DNA, 25 bp, Homo sapien
tgggttccgtgaacagcatatgctg

SEQ ID NO: 1948164 - DNA, 25 bp, Homo sapien
cgttatgctgttcactcgactggtg

SEQ ID NO: 1948165 - DNA, 25 bp, Homo sapien
tgttcactcgactggtggccacata

SEQ ID NO: 1948166 - DNA, 25 bp, Homo sapien
actggtggccacatagacataagca

SEQ ID NO: 1948167 - DNA, 25 bp, Homo sapien
tgctggatttctgactgatgaaacc

SEQ ID NO: 1948168 - DNA, 25 bp, Homo sapien
aatgggttcactttgcctgccaatt

SEQ ID NO: 1948169 - DNA, 25 bp, Homo sapien
tactcaaatcagtctacccatagag

SEQ ID NO: 1948170 - DNA, 25 bp, Homo sapien
tttcttagagccgatttctcaggac

SEQ ID NO: 1948171 - DNA, 25 bp, Homo sapien
catgcagtgcaggagaccggagttt

SEQ ID NO: 1948172 - DNA, 25 bp, Homo sapien
tatctgccgcagaccagtacacaga

SEQ ID NO: 1948173 - DNA, 25 bp, Homo sapien
gattctgttgaccagcgaggtggca

SEQ ID NO: 1948174 - DNA, 25 bp, Homo sapien
gcaacccacattaattcgtatagcg

SEQ ID NO: 1948175 - DNA, 25 bp, Homo sapien
tcgtatagcgacttgggtgccagaa

SEQ ID NO: 1948176 - DNA, 25 bp, Homo sapien
tttccctcagaaacgtgtgcccatg

SEQ ID NO: 1948177 - DNA, 25 bp, Homo sapien
gacccctcagagaatccgatgcaat

SEQ ID NO: 1948178 - DNA, 25 bp, Homo sapien
gatgcaatctctaggctttccctca

SEQ ID NO: 1948179 - DNA, 25 bp, Homo sapien
tcactccgtaggtcttatgttgaag

SEQ ID NO: 1948180 - DNA, 25 bp, Homo sapien
gccctgagaccacaatggaatcaca

SEQ ID NO: 1948181 - DNA, 25 bp, Homo sapien
catgtttgaaagaaatcatacagtg

SEQ ID NO: 1948182 - DNA, 25 bp, Homo sapien
gtgtctgccctgagaccacaatgga

SEQ ID NO: 1948183 - DNA, 25 bp, Homo sapien
catacagtgtctgccctgagaccac

SEQ ID NO: 1948184 - DNA, 25 bp, Homo sapien
cagtggctgaccaagccttccttga

SEQ ID NO: 1948185 - DNA, 25 bp, Homo sapien
gacaattcttgcttgccctcgaaga

SEQ ID NO: 1948186 - DNA, 25 bp, Homo sapien
gactccctgaagtgaccgtaatcta

SEQ ID NO: 1948187 - DNA, 25 bp, Homo sapien
ggctgccagcaacaatcaccaggta

SEQ ID NO: 1948188 - DNA, 25 bp, Homo sapien
cttgaactgggaggcggccactgca

SEQ ID NO: 1948189 - DNA, 25 bp, Homo sapien
aactgggaggcggccactgcagtaa

SEQ ID NO: 1948190 - DNA, 25 bp, Homo sapien
gaggcggccactgcagtaagccgag

SEQ ID NO: 1948191 - DNA, 25 bp, Homo sapien
aatccaagctgctcggggggctgaa

SEQ ID NO: 1948192 - DNA, 25 bp, Homo sapien
tctgggcaagaacgtttcctacggc

SEQ ID NO: 1948193 - DNA, 25 bp, Homo sapien
caggcaatgtcatacaaagcgaggg

SEQ ID NO: 1948194 - DNA, 25 bp, Homo sapien
tgaactataggcagccacgcagtgg

SEQ ID NO: 1948195 - DNA, 25 bp, Homo sapien
cttatgacggatacaggctaattcc

SEQ ID NO: 1948196 - DNA, 25 bp, Homo sapien
gaattaggtcatgtcctttgagcca

SEQ ID NO: 1948197 - DNA, 25 bp, Homo sapien
tggtaattcccaatcagtaatgttg

SEQ ID NO: 1948198 - DNA, 25 bp, Homo sapien
caagttttatgttccaccagtggtt

SEQ ID NO: 1948199 - DNA, 25 bp, Homo sapien
ccagtggttttctaacgtcagtaca

SEQ ID NO: 1948200 - DNA, 25 bp, Homo sapien
gaaaatccttcctggccagtttgct

SEQ ID NO: 1948201 - DNA, 25 bp, Homo sapien
tcctgttctagctcacagtcctgtg

SEQ ID NO: 1948202 - DNA, 25 bp, Homo sapien
tctggaaggccccagcgaacattca

SEQ ID NO: 1948203 - DNA, 25 bp, Homo sapien
gatgtacctcacttagcttctggca

SEQ ID NO: 1948204 - DNA, 25 bp, Homo sapien
caggcgcccaccactacacctgact

SEQ ID NO: 1948205 - DNA, 25 bp, Homo sapien
gcgcccaccactacacctgactaat

SEQ ID NO: 1948206 - DNA, 25 bp, Homo sapien
agagtctctctgtgtcgcccagtct

SEQ ID NO: 1948207 - DNA, 25 bp, Homo sapien
acagagtctctctgtgtcgcccagt

SEQ ID NO: 1948208 - DNA, 25 bp, Homo sapien
agagaaagaacagaccagcgccctt

SEQ ID NO: 1948209 - DNA, 25 bp, Homo sapien
gtcagctcgaactcaacactggcag

SEQ ID NO: 1948210 - DNA, 25 bp, Homo sapien
gcacttccagcgcttcacttaacgg

SEQ ID NO: 1948211 - DNA, 25 bp, Homo sapien
gcaaaacaggaccttggcacaccgt

SEQ ID NO: 1948212 - DNA, 25 bp, Homo sapien
ttccgtaggtcagtgttgcggtccg

SEQ ID NO: 1948213 - DNA, 25 bp, Homo sapien
cacgggctcctcagagcgtggtagc

SEQ ID NO: 1948214 - DNA, 25 bp, Homo sapien
cagtgtctgactctcggatatttgg

SEQ ID NO: 1948215 - DNA, 25 bp, Homo sapien
gaagcgtatcataaccacctgggag

SEQ ID NO: 1948216 - DNA, 25 bp, Homo sapien
tgagcacgtagctgcggcggtcaca

SEQ ID NO: 1948217 - DNA, 25 bp, Homo sapien
gagattgcactgctgagcacgtagc

SEQ ID NO: 1948218 - DNA, 25 bp, Homo sapien
ctgtccaagcaataagcgcagagtc

SEQ ID NO: 1948219 - DNA, 25 bp, Homo sapien
agcaataagcgcagagtctctggca

SEQ ID NO: 1948220 - DNA, 25 bp, Homo sapien
ctccactcggaagccctcctttctt

SEQ ID NO: 1948221 - DNA, 25 bp, Homo sapien
ctgggccacctccactcggaagccc

SEQ ID NO: 1948222 - DNA, 25 bp, Homo sapien
ggccacctccactcggaagccctcc

SEQ ID NO: 1948223 - DNA, 25 bp, Homo sapien
cacctccactcggaagccctccttt

SEQ ID NO: 1948224 - DNA, 25 bp, Homo sapien
atgaacgcgggaagtctgaggacac

SEQ ID NO: 1948225 - DNA, 25 bp, Homo sapien
tggcaacgcctggttcccactttcg

SEQ ID NO: 1948226 - DNA, 25 bp, Homo sapien
ttcccactttcgaacctcaggattg

SEQ ID NO: 1948227 - DNA, 25 bp, Homo sapien
tgcccttaactgtgactgtccgagc

SEQ ID NO: 1948228 - DNA, 25 bp, Homo sapien
gatgccctgtattaagatatcttca

SEQ ID NO: 1948229 - DNA, 25 bp, Homo sapien
gagcagtctctttgggtagaactaa

SEQ ID NO: 1948230 - DNA, 25 bp, Homo sapien
aaattttatagagtgggatcagagc

SEQ ID NO: 1948231 - DNA, 25 bp, Homo sapien
tctttgcgtgcctggtagtttttgg

SEQ ID NO: 1948232 - DNA, 25 bp, Homo sapien
ctggccgacaggctggcacacctgt

SEQ ID NO: 1948233 - DNA, 25 bp, Homo sapien
cttggtctcggccacggaggtgaat

SEQ ID NO: 1948234 - DNA, 25 bp, Homo sapien
cacggaggtgaataaagctccccgg

SEQ ID NO: 1948235 - DNA, 25 bp, Homo sapien
ccgacaggctggcacacctgtgtgg

SEQ ID NO: 1948236 - DNA, 25 bp, Homo sapien
agcatgaggaccacggcgagcctgg

SEQ ID NO: 1948237 - DNA, 25 bp, Homo sapien
cttgggaggatggcgcctcctcctc

SEQ ID NO: 1948238 - DNA, 25 bp, Homo sapien
tcttgggaggatggcgcctcctcct

SEQ ID NO: 1948239 - DNA, 25 bp, Homo sapien
gggtgttgacttagccggcctgacc

SEQ ID NO: 1948240 - DNA, 25 bp, Homo sapien
cgcgccgccagaggatatggttgct

SEQ ID NO: 1948241 - DNA, 25 bp, Homo sapien
actcgagagagcactctggctgggc

SEQ ID NO: 1948242 - DNA, 25 bp, Homo sapien
tttgcgtattcatgaggatcccggg

SEQ ID NO: 1948243 - DNA, 25 bp, Homo sapien
caattgcctcccagtacaatcaggt

SEQ ID NO: 1948244 - DNA, 25 bp, Homo sapien
tgggctggtaattgatcacactgac

SEQ ID NO: 1948245 - DNA, 25 bp, Homo sapien
cagcgtggctggcacataaggcaga

SEQ ID NO: 1948246 - DNA, 25 bp, Homo sapien
ttctgggcttgatcgcctgaacccc

SEQ ID NO: 1948247 - DNA, 25 bp, Homo sapien
caggcagtgtcactagaaacagggc

SEQ ID NO: 1948248 - DNA, 25 bp, Homo sapien
gctgatttaagggttgtccacttgg

SEQ ID NO: 1948249 - DNA, 25 bp, Homo sapien
tgatttaagggttgtccacttggca

SEQ ID NO: 1948250 - DNA, 25 bp, Homo sapien
tgtcactagaaacagggctgattta

SEQ ID NO: 1948251 - DNA, 25 bp, Homo sapien
tcatatatgtgtttcggaagctggc

SEQ ID NO: 1948252 - DNA, 25 bp, Homo sapien
tttggaagagggacatgtgtttttg

SEQ ID NO: 1948253 - DNA, 25 bp, Homo sapien
ttttcaagcagaggagcgctgtggc

SEQ ID NO: 1948254 - DNA, 25 bp, Homo sapien
atgtgactgtgcgacctcagacggg

SEQ ID NO: 1948255 - DNA, 25 bp, Homo sapien
ctatgacagtaacccgtaggcaggg

SEQ ID NO: 1948256 - DNA, 25 bp, Homo sapien
ccatatctgaggagggctgtttgca

SEQ ID NO: 1948257 - DNA, 25 bp, Homo sapien
gaagaagcccgtatgatgccgacct

SEQ ID NO: 1948258 - DNA, 25 bp, Homo sapien
caaaacaagagggaagggtcatgct

SEQ ID NO: 1948259 - DNA, 25 bp, Homo sapien
ggagggatgtgctcttcccataaga

SEQ ID NO: 1948260 - DNA, 25 bp, Homo sapien
gaagaaactaatagcgcaacacggg

SEQ ID NO: 1948261 - DNA, 25 bp, Homo sapien
caacacgggacacgtgggtggcttt

SEQ ID NO: 1948262 - DNA, 25 bp, Homo sapien
cttctgcccgggagttgaagtggct

SEQ ID NO: 1948263 - DNA, 25 bp, Homo sapien
agaggtcgttgtgaccattagtagc

SEQ ID NO: 1948264 - DNA, 25 bp, Homo sapien
tgtgaccattagtagctgtcctggc

SEQ ID NO: 1948265 - DNA, 25 bp, Homo sapien
ggttgatgtataaagtaaggattag

SEQ ID NO: 1948266 - DNA, 25 bp, Homo sapien
taaggattagagaaagaggtcgttg

SEQ ID NO: 1948267 - DNA, 25 bp, Homo sapien
tactataatcctgagccatggtgtg

SEQ ID NO: 1948268 - DNA, 25 bp, Homo sapien
catgtgcgttaaccttgatgatgcg

SEQ ID NO: 1948269 - DNA, 25 bp, Homo sapien
ggagccggtggcatacaccgttagc

SEQ ID NO: 1948270 - DNA, 25 bp, Homo sapien
atgatgcgtgaatcccgagggagcc

SEQ ID NO: 1948271 - DNA, 25 bp, Homo sapien
gcctgttgtatctgggagcctcgta

SEQ ID NO: 1948272 - DNA, 25 bp, Homo sapien
tagtgaaatcttactgtaccgcctg

SEQ ID NO: 1948273 - DNA, 25 bp, Homo sapien
ccgtgacccacagagctagacagat

SEQ ID NO: 1948274 - DNA, 25 bp, Homo sapien
agttgaccagtcataaaaggcggtg

SEQ ID NO: 1948275 - DNA, 25 bp, Homo sapien
attgcccaaaaagtagagtttccat

SEQ ID NO: 1948276 - DNA, 25 bp, Homo sapien
tgactacattggtacatcatcctcc

SEQ ID NO: 1948277 - DNA, 25 bp, Homo sapien
cattgtctggacgtaccagtttatc

SEQ ID NO: 1948278 - DNA, 25 bp, Homo sapien
taatgacatggatccaccattgcat

SEQ ID NO: 1948279 - DNA, 25 bp, Homo sapien
cactaatattccatcttatgttgca

SEQ ID NO: 1948280 - DNA, 25 bp, Homo sapien
tgcaataacttgaccagtgagcaca

SEQ ID NO: 1948281 - DNA, 25 bp, Homo sapien
agcacagtggctatgatttggattt

SEQ ID NO: 1948282 - DNA, 25 bp, Homo sapien
catcttatgttgcaataacttgacc

SEQ ID NO: 1948283 - DNA, 25 bp, Homo sapien
gttgatatcgagtttattgatgagc

SEQ ID NO: 1948284 - DNA, 25 bp, Homo sapien
tgatatcgagtttattgatgagcca

SEQ ID NO: 1948285 - DNA, 25 bp, Homo sapien
ttgatatcgagtttattgatgagcc

SEQ ID NO: 1948286 - DNA, 25 bp, Homo sapien
aacatagacttaccatttgaccagc

SEQ ID NO: 1948287 - DNA, 25 bp, Homo sapien
gcttcgactatctcattctacaaaa

SEQ ID NO: 1948288 - DNA, 25 bp, Homo sapien
tcatacaatggagtaatttcggcca

SEQ ID NO: 1948289 - DNA, 25 bp, Homo sapien
gaacagaacctagatgtccatcagc

SEQ ID NO: 1948290 - DNA, 25 bp, Homo sapien
cagattagtgtttaccgcaggcttg

SEQ ID NO: 1948291 - DNA, 25 bp, Homo sapien
tactactcacatgctatagaggtca

SEQ ID NO: 1948292 - DNA, 25 bp, Homo sapien
tagaggtcaattaataccacttgca

SEQ ID NO: 1948293 - DNA, 25 bp, Homo sapien
ggtcatcgacatgattatctactac

SEQ ID NO: 1948294 - DNA, 25 bp, Homo sapien
tgagttacctcagaacctgccgtgc

SEQ ID NO: 1948295 - DNA, 25 bp, Homo sapien
ggatgcaccaggaaagtcacagatg

SEQ ID NO: 1948296 - DNA, 25 bp, Homo sapien
acttccgggttggtgctttacagcg

SEQ ID NO: 1948297 - DNA, 25 bp, Homo sapien
tgcgaaccataaagcagcacacagg

SEQ ID NO: 1948298 - DNA, 25 bp, Homo sapien
cgaatgaattgtaaagtacgctggt

SEQ ID NO: 1948299 - DNA, 25 bp, Homo sapien
aggtctttggctaaagcttcacgaa

SEQ ID NO: 1948300 - DNA, 25 bp, Homo sapien
taacatccacaggaattagatctcc

SEQ ID NO: 1948301 - DNA, 25 bp, Homo sapien
gtacgctggtacaaaaaagcatcct

SEQ ID NO: 1948302 - DNA, 25 bp, Homo sapien
tgtctttagcaaactccagaaagtc

SEQ ID NO: 1948303 - DNA, 25 bp, Homo sapien
cttgtagtgttttaagtgcaggaga

SEQ ID NO: 1948304 - DNA, 25 bp, Homo sapien
acaggtaccacatggagcttaatca

SEQ ID NO: 1948305 - DNA, 25 bp, Homo sapien
caatgtaggttggtagtgtttccac

SEQ ID NO: 1948306 - DNA, 25 bp, Homo sapien
aaaattattacaatgcttgagtaaa

SEQ ID NO: 1948307 - DNA, 25 bp, Homo sapien
aatttccatgaatagtctaaacaca

SEQ ID NO: 1948308 - DNA, 25 bp, Homo sapien
atcaagcccaacccaaaatttccat

SEQ ID NO: 1948309 - DNA, 25 bp, Homo sapien
aataatggcttaagaacaaaatgag

SEQ ID NO: 1948310 - DNA, 25 bp, Homo sapien
tataaccccaatttcctttatgaca

SEQ ID NO: 1948311 - DNA, 25 bp, Homo sapien
ccatgatgagggacactataaaaaa

SEQ ID NO: 1948312 - DNA, 25 bp, Homo sapien
gagaagatagcgaatattaacagag

SEQ ID NO: 1948313 - DNA, 25 bp, Homo sapien
tcagccaaacgtgatccatgatgag

SEQ ID NO: 1948314 - DNA, 25 bp, Homo sapien
tgagttctttgacttccaacgaggg

SEQ ID NO: 1948315 - DNA, 25 bp, Homo sapien
tttctggcttcgtagaggcttccaa

SEQ ID NO: 1948316 - DNA, 25 bp, Homo sapien
tcatttctggcttcgtagaggcttc

SEQ ID NO: 1948317 - DNA, 25 bp, Homo sapien
tctggcttcgtagaggcttccaaca

SEQ ID NO: 1948318 - DNA, 25 bp, Homo sapien
gcttcgtagaggcttccaacagcat

SEQ ID NO: 1948319 - DNA, 25 bp, Homo sapien
gaagttcgttgcttctgaatgcaat

SEQ ID NO: 1948320 - DNA, 25 bp, Homo sapien
tcccatgctatgtgatatccaaacc

SEQ ID NO: 1948321 - DNA, 25 bp, Homo sapien
gagcttcctaagaagttcgttgctt

SEQ ID NO: 1948322 - DNA, 25 bp, Homo sapien
tatgtgatatccaaaccactggcct

SEQ ID NO: 1948323 - DNA, 25 bp, Homo sapien
taggatccggctactctcagtccag

SEQ ID NO: 1948324 - DNA, 25 bp, Homo sapien
cattgttggagcacctgtgtcaggc

SEQ ID NO: 1948325 - DNA, 25 bp, Homo sapien
tgacacccttcttgggcacctacgg

SEQ ID NO: 1948326 - DNA, 25 bp, Homo sapien
gcaggcatgacacaaggctatcgat

SEQ ID NO: 1948327 - DNA, 25 bp, Homo sapien
cactgcttattgacagcaaactcct

SEQ ID NO: 1948328 - DNA, 25 bp, Homo sapien
aagccttctactattccactgctta

SEQ ID NO: 1948329 - DNA, 25 bp, Homo sapien
cttctactattccactgcttattga

SEQ ID NO: 1948330 - DNA, 25 bp, Homo sapien
actgcttattgacagcaaactcctt

SEQ ID NO: 1948331 - DNA, 25 bp, Homo sapien
tcctggtctaaagtcgcctctgtta

SEQ ID NO: 1948332 - DNA, 25 bp, Homo sapien
gaaaatcctgtctgtggcatcaaaa

SEQ ID NO: 1948333 - DNA, 25 bp, Homo sapien
aaacttgcggcctgaattcttccct

SEQ ID NO: 1948334 - DNA, 25 bp, Homo sapien
tcacttcccatccaagaggacctaa

SEQ ID NO: 1948335 - DNA, 25 bp, Homo sapien
cacagatataattcggagagcagga

SEQ ID NO: 1948336 - DNA, 25 bp, Homo sapien
ccacagatataattcggagagcagg

SEQ ID NO: 1948337 - DNA, 25 bp, Homo sapien
ctccacagatataattcggagagca

SEQ ID NO: 1948338 - DNA, 25 bp, Homo sapien
cagatataattcggagagcaggaca

SEQ ID NO: 1948339 - DNA, 25 bp, Homo sapien
cttgggccagcacgtcgtatatctg

SEQ ID NO: 1948340 - DNA, 25 bp, Homo sapien
gttttgaatgctgctcccataaggc

SEQ ID NO: 1948341 - DNA, 25 bp, Homo sapien
tcctgctggcgccatgttttgaatg

SEQ ID NO: 1948342 - DNA, 25 bp, Homo sapien
taaggccatgaataaaaaggacatc

SEQ ID NO: 1948343 - DNA, 25 bp, Homo sapien
ctcggtctagatttgccaggattct

SEQ ID NO: 1948344 - DNA, 25 bp, Homo sapien
acagtttctcggtctagatttgcca

SEQ ID NO: 1948345 - DNA, 25 bp, Homo sapien
tggcagcgtgtgaggactccataat

SEQ ID NO: 1948346 - DNA, 25 bp, Homo sapien
gcagcacatatacgccatcctgata

SEQ ID NO: 1948347 - DNA, 25 bp, Homo sapien
cagtccttgtgaagtcggtacagcc

SEQ ID NO: 1948348 - DNA, 25 bp, Homo sapien
tgcaggcctccatttgcttcgattt

SEQ ID NO: 1948349 - DNA, 25 bp, Homo sapien
ctctgtactttagggcagtccttgt

SEQ ID NO: 1948350 - DNA, 25 bp, Homo sapien
gcttcgattttatcacaatgtgtgg

SEQ ID NO: 1948351 - DNA, 25 bp, Homo sapien
aacatttccactgttgctgaaggaa

SEQ ID NO: 1948352 - DNA, 25 bp, Homo sapien
tttccactgttgctgaaggaacttc

SEQ ID NO: 1948353 - DNA, 25 bp, Homo sapien
actgttgctgaaggaacttctccaa

SEQ ID NO: 1948354 - DNA, 25 bp, Homo sapien
gttgctgaaggaacttctccaaaac

SEQ ID NO: 1948355 - DNA, 25 bp, Homo sapien
cagtgtgatgtagagtgcagttccc

SEQ ID NO: 1948356 - DNA, 25 bp, Homo sapien
tgtcttggccatttccgcagtgtga

SEQ ID NO: 1948357 - DNA, 25 bp, Homo sapien
catttcattctcacttttggcgaag

SEQ ID NO: 1948358 - DNA, 25 bp, Homo sapien
tctactctaaattccccaaggacag

SEQ ID NO: 1948359 - DNA, 25 bp, Homo sapien
ctgagcagctagactctgactgctt

SEQ ID NO: 1948360 - DNA, 25 bp, Homo sapien
cttctgagcagctagactctgactg

SEQ ID NO: 1948361 - DNA, 25 bp, Homo sapien
tctgagcagctagactctgactgct

SEQ ID NO: 1948362 - DNA, 25 bp, Homo sapien
ttctgagcagctagactctgactgc

SEQ ID NO: 1948363 - DNA, 25 bp, Homo sapien
aaggaagccagcaactgtctgagct

SEQ ID NO: 1948364 - DNA, 25 bp, Homo sapien
ctgtttgaggtaaggaagccagcaa

SEQ ID NO: 1948365 - DNA, 25 bp, Homo sapien
aagccagcaactgtctgagctcttc

SEQ ID NO: 1948366 - DNA, 25 bp, Homo sapien
ggaagccagcaactgtctgagctct

SEQ ID NO: 1948367 - DNA, 25 bp, Homo sapien
gatcactctcttcgcttcgtgccaa

SEQ ID NO: 1948368 - DNA, 25 bp, Homo sapien
ggcttgagcaattatcctatactgg

SEQ ID NO: 1948369 - DNA, 25 bp, Homo sapien
agaaaaaagcgaagatcactctctt

SEQ ID NO: 1948370 - DNA, 25 bp, Homo sapien
caaaccaataagagttttcggatca

SEQ ID NO: 1948371 - DNA, 25 bp, Homo sapien
aaactagctgacagatgtcataaag

SEQ ID NO: 1948372 - DNA, 25 bp, Homo sapien
aaaactagctgacagatgtcataaa

SEQ ID NO: 1948373 - DNA, 25 bp, Homo sapien
aactagctgacagatgtcataaaga

SEQ ID NO: 1948374 - DNA, 25 bp, Homo sapien
caaaactagctgacagatgtcataa

SEQ ID NO: 1948375 - DNA, 25 bp, Homo sapien
tgagtacttctggatcaagtgggga

SEQ ID NO: 1948376 - DNA, 25 bp, Homo sapien
tgatacaataagtctggaatggagc

SEQ ID NO: 1948377 - DNA, 25 bp, Homo sapien
tccaaaatctgtgggccagggcact

SEQ ID NO: 1948378 - DNA, 25 bp, Homo sapien
atttctctgatacaataagtctgga

SEQ ID NO: 1948379 - DNA, 25 bp, Homo sapien
cataattgtatggtgtagcaagcaa

SEQ ID NO: 1948380 - DNA, 25 bp, Homo sapien
gaaggcatgccacctgttcaggtag

SEQ ID NO: 1948381 - DNA, 25 bp, Homo sapien
tgactaccagttcagcaggctttct

SEQ ID NO: 1948382 - DNA, 25 bp, Homo sapien
tttatgtcagcaatcaagagccagc

SEQ ID NO: 1948383 - DNA, 25 bp, Homo sapien
cgagtcgcgtggttttgtcatctga

SEQ ID NO: 1948384 - DNA, 25 bp, Homo sapien
agccacacagcacactcatgatctt

SEQ ID NO: 1948385 - DNA, 25 bp, Homo sapien
catgccagtgatgggtctccgacat

SEQ ID NO: 1948386 - DNA, 25 bp, Homo sapien
gctcttccgtaggagcagccacaca

SEQ ID NO: 1948387 - DNA, 25 bp, Homo sapien
gatgttgccaatacttttcttactg

SEQ ID NO: 1948388 - DNA, 25 bp, Homo sapien
atggattccgcagtatcttggctga

SEQ ID NO: 1948389 - DNA, 25 bp, Homo sapien
ttccgcagtatcttggctgatgttg

SEQ ID NO: 1948390 - DNA, 25 bp, Homo sapien
tttcttactgctttgtgaagttctt

SEQ ID NO: 1948391 - DNA, 25 bp, Homo sapien
tctaccacttgagtatctaatgtca

SEQ ID NO: 1948392 - DNA, 25 bp, Homo sapien
gagtatctaatgtcacagccttctt

SEQ ID NO: 1948393 - DNA, 25 bp, Homo sapien
ctttgtctaaagaaactgtgtgcac

SEQ ID NO: 1948394 - DNA, 25 bp, Homo sapien
attttttctcgttctaccacttgag

SEQ ID NO: 1948395 - DNA, 25 bp, Homo sapien
aaataagtgatccagtaaactttat

SEQ ID NO: 1948396 - DNA, 25 bp, Homo sapien
ttctgcaacagatgacgcaataagc

SEQ ID NO: 1948397 - DNA, 25 bp, Homo sapien
tgacgcaataagcagccagggacat

SEQ ID NO: 1948398 - DNA, 25 bp, Homo sapien
cctattcttctgcaacagatgacgc

SEQ ID NO: 1948399 - DNA, 25 bp, Homo sapien
cagatgacgcaataagcagccaggg

SEQ ID NO: 1948400 - DNA, 25 bp, Homo sapien
gagaagctctatgtggacggtacac

SEQ ID NO: 1948401 - DNA, 25 bp, Homo sapien
tctatcaaaggagagctgtcatcca

SEQ ID NO: 1948402 - DNA, 25 bp, Homo sapien
tggatgacccacagagttagctttt

SEQ ID NO: 1948403 - DNA, 25 bp, Homo sapien
tagttctttcaggatagtacccacg

SEQ ID NO: 1948404 - DNA, 25 bp, Homo sapien
tatgccatcaggtgcacacaaatga

SEQ ID NO: 1948405 - DNA, 25 bp, Homo sapien
tgcatgatctaccagtacgagaggg

SEQ ID NO: 1948406 - DNA, 25 bp, Homo sapien
tgagtccctaggaacgaagaactgt

SEQ ID NO: 1948407 - DNA, 25 bp, Homo sapien
tagtgcaaaacaccccaatctgtgg

SEQ ID NO: 1948408 - DNA, 25 bp, Homo sapien
caaatgagaatattagaatgcttta

SEQ ID NO: 1948409 - DNA, 25 bp, Homo sapien
ctctttgaatagatgaatttaatcc

SEQ ID NO: 1948410 - DNA, 25 bp, Homo sapien
tcgcatgttggatagatcaggattt

SEQ ID NO: 1948411 - DNA, 25 bp, Homo sapien
cgatcctctcctatcttgtctagta

SEQ ID NO: 1948412 - DNA, 25 bp, Homo sapien
caaacaacctgcctgtgagcatgct

SEQ ID NO: 1948413 - DNA, 25 bp, Homo sapien
catcttaggaccttaaggacccagg

SEQ ID NO: 1948414 - DNA, 25 bp, Homo sapien
aaaatagttgtgtttgggccaggcg

SEQ ID NO: 1948415 - DNA, 25 bp, Homo sapien
tactaggcagctagagaccacctct

SEQ ID NO: 1948416 - DNA, 25 bp, Homo sapien
gcagctgtgccattcacatttaggt

SEQ ID NO: 1948417 - DNA, 25 bp, Homo sapien
tgcagctgtgccattcacatttagg

SEQ ID NO: 1948418 - DNA, 25 bp, Homo sapien
cttgcagctgtgccattcacattta

SEQ ID NO: 1948419 - DNA, 25 bp, Homo sapien
gctgtgccattcacatttaggtctt

SEQ ID NO: 1948420 - DNA, 25 bp, Homo sapien
cggactcagcccgtgcccaactgct

SEQ ID NO: 1948421 - DNA, 25 bp, Homo sapien
gtctggggagccctactctttccgc

SEQ ID NO: 1948422 - DNA, 25 bp, Homo sapien
ggcggctggcggctcgtgaccccgc

SEQ ID NO: 1948423 - DNA, 25 bp, Homo sapien
ctgctcgtcggaccccgttgtctgg

SEQ ID NO: 1948424 - DNA, 25 bp, Homo sapien
aatagcgtccctagcgcgatggcgt

SEQ ID NO: 1948425 - DNA, 25 bp, Homo sapien
gcactctgccggcaacgccgaggcg

SEQ ID NO: 1948426 - DNA, 25 bp, Homo sapien
tgccggcaacgccgaggcgcttctg

SEQ ID NO: 1948427 - DNA, 25 bp, Homo sapien
tggcgtatcggcgcaggcgcactct

SEQ ID NO: 1948428 - DNA, 25 bp, Homo sapien
cacatcgctttcaggactctttggg

SEQ ID NO: 1948429 - DNA, 25 bp, Homo sapien
ctcggtggtcacttcttactcagct

SEQ ID NO: 1948430 - DNA, 25 bp, Homo sapien
tcctgagtagcctttgttcacatcg

SEQ ID NO: 1948431 - DNA, 25 bp, Homo sapien
ctttgacagaattgatcactcccac

SEQ ID NO: 1948432 - DNA, 25 bp, Homo sapien
tcaattgaaggcaaaaacagtaaca

SEQ ID NO: 1948433 - DNA, 25 bp, Homo sapien
ttgcttcccttcctgaagatcatgt

SEQ ID NO: 1948434 - DNA, 25 bp, Homo sapien
cagtaacactgagaggggctttgct

SEQ ID NO: 1948435 - DNA, 25 bp, Homo sapien
ccttcctgaagatcatgtcattggg

SEQ ID NO: 1948436 - DNA, 25 bp, Homo sapien
caccagcggtctgatgctttcattg

SEQ ID NO: 1948437 - DNA, 25 bp, Homo sapien
ccaccagcggtctgatgctttcatt

SEQ ID NO: 1948438 - DNA, 25 bp, Homo sapien
gtccaccagcggtctgatgctttca

SEQ ID NO: 1948439 - DNA, 25 bp, Homo sapien
ctagtccaccagcggtctgatgctt

SEQ ID NO: 1948440 - DNA, 25 bp, Homo sapien
gttcttcttctagttggccatcatt

SEQ ID NO: 1948441 - DNA, 25 bp, Homo sapien
cttcttctagttggccatcattctt

SEQ ID NO: 1948442 - DNA, 25 bp, Homo sapien
agctgttcttcttctagttggccat

SEQ ID NO: 1948443 - DNA, 25 bp, Homo sapien
ccagctgttcttcttctagttggcc

SEQ ID NO: 1948444 - DNA, 25 bp, Homo sapien
tttcatagtcgcccttgaaaagcat

SEQ ID NO: 1948445 - DNA, 25 bp, Homo sapien
catgctggcatcccgagcttttaca

SEQ ID NO: 1948446 - DNA, 25 bp, Homo sapien
ctggcatcccgagcttttacatgtt

SEQ ID NO: 1948447 - DNA, 25 bp, Homo sapien
atttcatagtcgcccttgaaaagca

SEQ ID NO: 1948448 - DNA, 25 bp, Homo sapien
cagtgtcttcatttggaaaatagtg

SEQ ID NO: 1948449 - DNA, 25 bp, Homo sapien
tgtcttcatttggaaaatagtgtca

SEQ ID NO: 1948450 - DNA, 25 bp, Homo sapien
tcttcatttggaaaatagtgtcatc

SEQ ID NO: 1948451 - DNA, 25 bp, Homo sapien
gtgtcttcatttggaaaatagtgtc

SEQ ID NO: 1948452 - DNA, 25 bp, Homo sapien
gagttatgtcgcagccaagaaggag

SEQ ID NO: 1948453 - DNA, 25 bp, Homo sapien
cctggtgccggacgctgggtttcca

SEQ ID NO: 1948454 - DNA, 25 bp, Homo sapien
gctgaagggcttgagacagcagaaa

SEQ ID NO: 1948455 - DNA, 25 bp, Homo sapien
gtttccctatccctgtgctgagtgt

SEQ ID NO: 1948456 - DNA, 25 bp, Homo sapien
tcctttctccatggacaactgaaga

SEQ ID NO: 1948457 - DNA, 25 bp, Homo sapien
caactgaagaagagatcctctggga

SEQ ID NO: 1948458 - DNA, 25 bp, Homo sapien
aagaagagatcctctgggatgttac

SEQ ID NO: 1948459 - DNA, 25 bp, Homo sapien
ctatccggtcctttctccatggaca

SEQ ID NO: 1948460 - DNA, 25 bp, Homo sapien
atcgcggccactcgggtgaccgttt

SEQ ID NO: 1948461 - DNA, 25 bp, Homo sapien
tcggtggtgacagcgcttctgtgct

SEQ ID NO: 1948462 - DNA, 25 bp, Homo sapien
agctgcgcgggtcggtggtgacagc

SEQ ID NO: 1948463 - DNA, 25 bp, Homo sapien
agcgcttctgtgctcccggcggctt

SEQ ID NO: 1948464 - DNA, 25 bp, Homo sapien
caaacgaagttcagacggcgcgcaa

SEQ ID NO: 1948465 - DNA, 25 bp, Homo sapien
cataatgggactgggacgtccactt

SEQ ID NO: 1948466 - DNA, 25 bp, Homo sapien
acataatgggactgggacgtccact

SEQ ID NO: 1948467 - DNA, 25 bp, Homo sapien
acgaagttcagacggcgcgcaagcc

SEQ ID NO: 1948468 - DNA, 25 bp, Homo sapien
agccgggtgactgcagagcgggccg

SEQ ID NO: 1948469 - DNA, 25 bp, Homo sapien
ggtgactgcagagcgggccgggtca

SEQ ID NO: 1948470 - DNA, 25 bp, Homo sapien
cgggtgactgcagagcgggccgggt

SEQ ID NO: 1948471 - DNA, 25 bp, Homo sapien
gagccgggtgactgcagagcgggcc

SEQ ID NO: 1948472 - DNA, 25 bp, Homo sapien
gctgcatggaaatcccggcgcttct

SEQ ID NO: 1948473 - DNA, 25 bp, Homo sapien
ggagattctgttccgagcaccaacc

SEQ ID NO: 1948474 - DNA, 25 bp, Homo sapien
cgattccgaagtttgacccgcttgg

SEQ ID NO: 1948475 - DNA, 25 bp, Homo sapien
caattagctgggaggtgtctacttc

SEQ ID NO: 1948476 - DNA, 25 bp, Homo sapien
gtggcgacaccgcttcagggatggg

SEQ ID NO: 1948477 - DNA, 25 bp, Homo sapien
gacaccgcttcagggatgggaaggt

SEQ ID NO: 1948478 - DNA, 25 bp, Homo sapien
ctgtggcgacaccgcttcagggatg

SEQ ID NO: 1948479 - DNA, 25 bp, Homo sapien
ggcgacaccgcttcagggatgggaa

SEQ ID NO: 1948480 - DNA, 25 bp, Homo sapien
ccatttgaaacacaaggaattattt

SEQ ID NO: 1948481 - DNA, 25 bp, Homo sapien
catttgaaacacaaggaattattta

SEQ ID NO: 1948482 - DNA, 25 bp, Homo sapien
tattcctaatgttaccgagactagt

SEQ ID NO: 1948483 - DNA, 25 bp, Homo sapien
tatattcctaatgttaccgagacta

SEQ ID NO: 1948484 - DNA, 25 bp, Homo sapien
attatattcctaatgttaccgagac

SEQ ID NO: 1948485 - DNA, 25 bp, Homo sapien
attcctaatgttaccgagactagtt

SEQ ID NO: 1948486 - DNA, 25 bp, Homo sapien
gaggcagatagtgtcgctgcactgc

SEQ ID NO: 1948487 - DNA, 25 bp, Homo sapien
agaggcagatagtgtcgctgcactg

SEQ ID NO: 1948488 - DNA, 25 bp, Homo sapien
tagtgtcgctgcactgccaggtctt

SEQ ID NO: 1948489 - DNA, 25 bp, Homo sapien
cagatagtgtcgctgcactgccagg

SEQ ID NO: 1948490 - DNA, 25 bp, Homo sapien
cttccctggtagaaagaacattctt

SEQ ID NO: 1948491 - DNA, 25 bp, Homo sapien
tcttccctggtagaaagaacattct

SEQ ID NO: 1948492 - DNA, 25 bp, Homo sapien
ttcttccctggtagaaagaacattc

SEQ ID NO: 1948493 - DNA, 25 bp, Homo sapien
atgtttactaagagctgtgcctttc

SEQ ID NO: 1948494 - DNA, 25 bp, Homo sapien
gcaaatgtttactaagagctgtgcc

SEQ ID NO: 1948495 - DNA, 25 bp, Homo sapien
caaatgtttactaagagctgtgcct

SEQ ID NO: 1948496 - DNA, 25 bp, Homo sapien
tggcaaatgtttactaagagctgtg

SEQ ID NO: 1948497 - DNA, 25 bp, Homo sapien
ctcctcccgcccatatttgagcttg

SEQ ID NO: 1948498 - DNA, 25 bp, Homo sapien
cctcctcccgcccatatttgagctt

SEQ ID NO: 1948499 - DNA, 25 bp, Homo sapien
tcctcccgcccatatttgagcttga

SEQ ID NO: 1948500 - DNA, 25 bp, Homo sapien
aagacatcagtggtactattaaatc

SEQ ID NO: 1948501 - DNA, 25 bp, Homo sapien
gaagacatcagtggtactattaaat

SEQ ID NO: 1948502 - DNA, 25 bp, Homo sapien
ttttgaggcattgttcggcctggtt

SEQ ID NO: 1948503 - DNA, 25 bp, Homo sapien
accttgggttaacataggtgagaga

SEQ ID NO: 1948504 - DNA, 25 bp, Homo sapien
tgaggcattgttcggcctggtttgt

SEQ ID NO: 1948505 - DNA, 25 bp, Homo sapien
ccttgggttaacataggtgagagat

SEQ ID NO: 1948506 - DNA, 25 bp, Homo sapien
tccgcattggttaatttcactttct

SEQ ID NO: 1948507 - DNA, 25 bp, Homo sapien
ttccgcattggttaatttcactttc

SEQ ID NO: 1948508 - DNA, 25 bp, Homo sapien
atctagtaaccctacatccgttggt

SEQ ID NO: 1948509 - DNA, 25 bp, Homo sapien
ctacatccgttggttttagtagtag

SEQ ID NO: 1948510 - DNA, 25 bp, Homo sapien
gataatgaatggtggcaaagacctt

SEQ ID NO: 1948511 - DNA, 25 bp, Homo sapien
ataatgaatggtggcaaagaccttc

SEQ ID NO: 1948512 - DNA, 25 bp, Homo sapien
tcggacgagatctctttatgccact

SEQ ID NO: 1948513 - DNA, 25 bp, Homo sapien
cgagatctctttatgccactaagca

SEQ ID NO: 1948514 - DNA, 25 bp, Homo sapien
tctttatgccactaagcattcatca

SEQ ID NO: 1948515 - DNA, 25 bp, Homo sapien
gacgagatctctttatgccactaag

SEQ ID NO: 1948516 - DNA, 25 bp, Homo sapien
cagtttgtctgtctgccggttggta

SEQ ID NO: 1948517 - DNA, 25 bp, Homo sapien
tccataaagctccttcagtttgtct

SEQ ID NO: 1948518 - DNA, 25 bp, Homo sapien
ttatccataaagctccttcagtttg

SEQ ID NO: 1948519 - DNA, 25 bp, Homo sapien
agtttgtctgtctgccggttggtac

SEQ ID NO: 1948520 - DNA, 25 bp, Homo sapien
agttattggctaacagtttggtgca

SEQ ID NO: 1948521 - DNA, 25 bp, Homo sapien
ttacatcatctttgtggatctgcag

SEQ ID NO: 1948522 - DNA, 25 bp, Homo sapien
cagtttggtgcaagtattgatgaca

SEQ ID NO: 1948523 - DNA, 25 bp, Homo sapien
ggccagttacatcatctttgtggat

SEQ ID NO: 1948524 - DNA, 25 bp, Homo sapien
agttgctgttctggccgtaccggtt

SEQ ID NO: 1948525 - DNA, 25 bp, Homo sapien
ggaagttgctgttctggccgtaccg

SEQ ID NO: 1948526 - DNA, 25 bp, Homo sapien
tgctgttctggccgtaccggttcac

SEQ ID NO: 1948527 - DNA, 25 bp, Homo sapien
gaagttgctgttctggccgtaccgg

SEQ ID NO: 1948528 - DNA, 25 bp, Homo sapien
cacacagcacaggcactgaaactcc

SEQ ID NO: 1948529 - DNA, 25 bp, Homo sapien
acagcacaggcactgaaactccacc

SEQ ID NO: 1948530 - DNA, 25 bp, Homo sapien
agcacaggcactgaaactccaccct

SEQ ID NO: 1948531 - DNA, 25 bp, Homo sapien
acacagcacaggcactgaaactcca

SEQ ID NO: 1948532 - DNA, 25 bp, Homo sapien
ataaatggaatctccttggctgtcc

SEQ ID NO: 1948533 - DNA, 25 bp, Homo sapien
tataaatggaatctccttggctgtc

SEQ ID NO: 1948534 - DNA, 25 bp, Homo sapien
gctgactgatggtcatataaatgga

SEQ ID NO: 1948535 - DNA, 25 bp, Homo sapien
tccttggctgactgatggtcatata

SEQ ID NO: 1948536 - DNA, 25 bp, Homo sapien
gtggctgggactaaacgtgcgcacc

SEQ ID NO: 1948537 - DNA, 25 bp, Homo sapien
taattgaacactagacttctttcag

SEQ ID NO: 1948538 - DNA, 25 bp, Homo sapien
tctgtgtagtcaaacctatcgatct

SEQ ID NO: 1948539 - DNA, 25 bp, Homo sapien
cccagccagcatcttacataactag

SEQ ID NO: 1948540 - DNA, 25 bp, Homo sapien
tagtattgaagttggtttattttgc

SEQ ID NO: 1948541 - DNA, 25 bp, Homo sapien
attgaagttggtttattttgcccat

SEQ ID NO: 1948542 - DNA, 25 bp, Homo sapien
tattgaagttggtttattttgccca

SEQ ID NO: 1948543 - DNA, 25 bp, Homo sapien
cttgtagtattgaagttggtttatt

SEQ ID NO: 1948544 - DNA, 25 bp, Homo sapien
tgtctggagcccacgcgctacaagt

SEQ ID NO: 1948545 - DNA, 25 bp, Homo sapien
gctttcctcttagtcctgcccatct

SEQ ID NO: 1948546 - DNA, 25 bp, Homo sapien
tgtcccgcacagttgcagctgcttt

SEQ ID NO: 1948547 - DNA, 25 bp, Homo sapien
acgcgctacaagtgtcccgcacagt

SEQ ID NO: 1948548 - DNA, 25 bp, Homo sapien
aggctgctgctgtcgaaactgtggt

SEQ ID NO: 1948549 - DNA, 25 bp, Homo sapien
gctgtcgaaactgtggtgattctga

SEQ ID NO: 1948550 - DNA, 25 bp, Homo sapien
ggtgtttgaacttcatgaggctgct

SEQ ID NO: 1948551 - DNA, 25 bp, Homo sapien
gccacggtgtttgaacttcatgagg

SEQ ID NO: 1948552 - DNA, 25 bp, Homo sapien
ggaagaaaactggccagggacatac

SEQ ID NO: 1948553 - DNA, 25 bp, Homo sapien
gaaaactggccagggacatacaggg

SEQ ID NO: 1948554 - DNA, 25 bp, Homo sapien
ctgagcctgagagggtttggccata

SEQ ID NO: 1948555 - DNA, 25 bp, Homo sapien
aactggccagggacatacagggaga

SEQ ID NO: 1948556 - DNA, 25 bp, Homo sapien
aactacactaatggcaagttctttc

SEQ ID NO: 1948557 - DNA, 25 bp, Homo sapien
cttgatgtacataactacactaatg

SEQ ID NO: 1948558 - DNA, 25 bp, Homo sapien
cataactacactaatggcaagttct

SEQ ID NO: 1948559 - DNA, 25 bp, Homo sapien
tgtacataactacactaatggcaag

SEQ ID NO: 1948560 - DNA, 25 bp, Homo sapien
ctggcagcagtaacctttgtggtct

SEQ ID NO: 1948561 - DNA, 25 bp, Homo sapien
tggcagcagtaacctttgtggtctt

SEQ ID NO: 1948562 - DNA, 25 bp, Homo sapien
tctggcagcagtaacctttgtggtc

SEQ ID NO: 1948563 - DNA, 25 bp, Homo sapien
gcagcagtaacctttgtggtctttc

SEQ ID NO: 1948564 - DNA, 25 bp, Homo sapien
ctgtgtaaagcaggcatctggatct

SEQ ID NO: 1948565 - DNA, 25 bp, Homo sapien
aagcaggcatctggatcttccagga

SEQ ID NO: 1948566 - DNA, 25 bp, Homo sapien
ctggatcttccaggaccacagatgc

SEQ ID NO: 1948567 - DNA, 25 bp, Homo sapien
cagatgctttcttgatgaaccccat

SEQ ID NO: 1948568 - DNA, 25 bp, Homo sapien
gatttatggaatcggtgatgtcgaa

SEQ ID NO: 1948569 - DNA, 25 bp, Homo sapien
tatggaatcggtgatgtcgaagctg

SEQ ID NO: 1948570 - DNA, 25 bp, Homo sapien
aaggatttatggaatcggtgatgtc

SEQ ID NO: 1948571 - DNA, 25 bp, Homo sapien
ggaatcggtgatgtcgaagctgcat

SEQ ID NO: 1948572 - DNA, 25 bp, Homo sapien
tgaatatttgtaggttctggaaaat

SEQ ID NO: 1948573 - DNA, 25 bp, Homo sapien
cagtgaatatttgtaggttctggaa

SEQ ID NO: 1948574 - DNA, 25 bp, Homo sapien
agtgaatatttgtaggttctggaaa

SEQ ID NO: 1948575 - DNA, 25 bp, Homo sapien
tcagtgaatatttgtaggttctgga

SEQ ID NO: 1948576 - DNA, 25 bp, Homo sapien
agagtgtatctcagtccttttctca

SEQ ID NO: 1948577 - DNA, 25 bp, Homo sapien
cagggaaaagattacatgctttaag

SEQ ID NO: 1948578 - DNA, 25 bp, Homo sapien
gggtctgtgttcagcagtgcacgta

SEQ ID NO: 1948579 - DNA, 25 bp, Homo sapien
ctgaaatttaccagggctggtgttt

SEQ ID NO: 1948580 - DNA, 25 bp, Homo sapien
tattttgactgggagcactgtaaga

SEQ ID NO: 1948581 - DNA, 25 bp, Homo sapien
gacccagtatctagtaggcccttaa

SEQ ID NO: 1948582 - DNA, 25 bp, Homo sapien
gactcaccagccagagtggaaacag

SEQ ID NO: 1948583 - DNA, 25 bp, Homo sapien
tttcattgtagggaggcatagcagt

SEQ ID NO: 1948584 - DNA, 25 bp, Homo sapien
gaactggatcgtatggaagctagag

SEQ ID NO: 1948585 - DNA, 25 bp, Homo sapien
tatggaagctagagtgggaagcatc

SEQ ID NO: 1948586 - DNA, 25 bp, Homo sapien
gggctccttctttgccattagaact

SEQ ID NO: 1948587 - DNA, 25 bp, Homo sapien
ggaagcatcttatgtgtttcattac

SEQ ID NO: 1948588 - DNA, 25 bp, Homo sapien
gggaagacaggctcattcttgtgca

SEQ ID NO: 1948589 - DNA, 25 bp, Homo sapien
ggcctcccagccgtgaataatctga

SEQ ID NO: 1948590 - DNA, 25 bp, Homo sapien
ttcgtatggcagttgaagagtgtgt

SEQ ID NO: 1948591 - DNA, 25 bp, Homo sapien
gaagcagacgcttcgtatggcagtt

SEQ ID NO: 1948592 - DNA, 25 bp, Homo sapien
taagaatcagatggagcaacttgac

SEQ ID NO: 1948593 - DNA, 25 bp, Homo sapien
gatggagcaacttgacaccagtggg

SEQ ID NO: 1948594 - DNA, 25 bp, Homo sapien
gaatcagatggagcaacttgacacc

SEQ ID NO: 1948595 - DNA, 25 bp, Homo sapien
aatttaagaatcagatggagcaact

SEQ ID NO: 1948596 - DNA, 25 bp, Homo sapien
tccatatggtctgcacgggtaaaga

SEQ ID NO: 1948597 - DNA, 25 bp, Homo sapien
tatggtctgcacgggtaaagaaagt

SEQ ID NO: 1948598 - DNA, 25 bp, Homo sapien
catatggtctgcacgggtaaagaaa

SEQ ID NO: 1948599 - DNA, 25 bp, Homo sapien
ttccatatggtctgcacgggtaaag

SEQ ID NO: 1948600 - DNA, 25 bp, Homo sapien
gagcagtccgatggagccctgcgtt

SEQ ID NO: 1948601 - DNA, 25 bp, Homo sapien
gggccttctttctagcctctatggc

SEQ ID NO: 1948602 - DNA, 25 bp, Homo sapien
ctttctagcctctatggcactgagg

SEQ ID NO: 1948603 - DNA, 25 bp, Homo sapien
tgtaagagcgctggaacattctgcc

SEQ ID NO: 1948604 - DNA, 25 bp, Homo sapien
tcacctctagtcactgtcgcaggga

SEQ ID NO: 1948605 - DNA, 25 bp, Homo sapien
gtcgcagggacaggagtactccaca

SEQ ID NO: 1948606 - DNA, 25 bp, Homo sapien
cctgtgtgcaggagacgctactatg

SEQ ID NO: 1948607 - DNA, 25 bp, Homo sapien
gggcctgtgctttgcagcgattcca

SEQ ID NO: 1948608 - DNA, 25 bp, Homo sapien
gacttctctggttgcgctgatcatg

SEQ ID NO: 1948609 - DNA, 25 bp, Homo sapien
tccgatatgctttctctgaccctgc

SEQ ID NO: 1948610 - DNA, 25 bp, Homo sapien
gattgggtacatcttctccgatatg

SEQ ID NO: 1948611 - DNA, 25 bp, Homo sapien
tattggaagatcaatgtaccctgtc

SEQ ID NO: 1948612 - DNA, 25 bp, Homo sapien
gatattatccctctggaggaaaggg

SEQ ID NO: 1948613 - DNA, 25 bp, Homo sapien
cagagttgaccgtactgctcccaaa

SEQ ID NO: 1948614 - DNA, 25 bp, Homo sapien
tcctcaagatgcaccttctctcttt

SEQ ID NO: 1948615 - DNA, 25 bp, Homo sapien
gggtggttccacagagttgaccgta

SEQ ID NO: 1948616 - DNA, 25 bp, Homo sapien
tcgacaaagcgccctgaccacttgg

SEQ ID NO: 1948617 - DNA, 25 bp, Homo sapien
ccctgaccacttggacccagtgatt

SEQ ID NO: 1948618 - DNA, 25 bp, Homo sapien
cccagtgattccagagagtccttcg

SEQ ID NO: 1948619 - DNA, 25 bp, Homo sapien
cagagagtccttcgcaggccctcat

SEQ ID NO: 1948620 - DNA, 25 bp, Homo sapien
cttgcatctctagtttaacaacggt

SEQ ID NO: 1948621 - DNA, 25 bp, Homo sapien
aacaacggttgcttgagttagagcc

SEQ ID NO: 1948622 - DNA, 25 bp, Homo sapien
cacttgctgggcatataacttactg

SEQ ID NO: 1948623 - DNA, 25 bp, Homo sapien
gttagagcctttgtgggattgctga

SEQ ID NO: 1948624 - DNA, 25 bp, Homo sapien
gatgtaattgcatagcctacctggt

SEQ ID NO: 1948625 - DNA, 25 bp, Homo sapien
ttagatctaaatgccgagaactagg

SEQ ID NO: 1948626 - DNA, 25 bp, Homo sapien
ttttgtttatatagcctcggttgtc

SEQ ID NO: 1948627 - DNA, 25 bp, Homo sapien
aaatagttccacgtgcctgatccat

SEQ ID NO: 1948628 - DNA, 25 bp, Homo sapien
agaacatttcttggtacagaacaaa

SEQ ID NO: 1948629 - DNA, 25 bp, Homo sapien
gaacatttcttggtacagaacaaaa

SEQ ID NO: 1948630 - DNA, 25 bp, Homo sapien
aaggcagaagaacatttcttggtac

SEQ ID NO: 1948631 - DNA, 25 bp, Homo sapien
gcagaagaacatttcttggtacaga

SEQ ID NO: 1948632 - DNA, 25 bp, Homo sapien
ttaacacggtatcagctttttcttg

SEQ ID NO: 1948633 - DNA, 25 bp, Homo sapien
cacatttgtcgactggtgtcaccaa

SEQ ID NO: 1948634 - DNA, 25 bp, Homo sapien
gaatatttgtaataggcatacttaa

SEQ ID NO: 1948635 - DNA, 25 bp, Homo sapien
ccattatgttaccacatttgtcgac

SEQ ID NO: 1948636 - DNA, 25 bp, Homo sapien
ttgggtgtgacgctcattcttctgg

SEQ ID NO: 1948637 - DNA, 25 bp, Homo sapien
ttacatacttagtaaggaggtgagg

SEQ ID NO: 1948638 - DNA, 25 bp, Homo sapien
tgaggttgggtgtgacgctcattct

SEQ ID NO: 1948639 - DNA, 25 bp, Homo sapien
aggttgggtgtgacgctcattcttc

SEQ ID NO: 1948640 - DNA, 25 bp, Homo sapien
gcagttagcccttgagggtgaagta

SEQ ID NO: 1948641 - DNA, 25 bp, Homo sapien
atttatgccttgtttggggcagtta

SEQ ID NO: 1948642 - DNA, 25 bp, Homo sapien
ggggcagttagcccttgagggtgaa

SEQ ID NO: 1948643 - DNA, 25 bp, Homo sapien
ttggggcagttagcccttgagggtg

SEQ ID NO: 1948644 - DNA, 25 bp, Homo sapien
gctgcgtcatactcggagccatttg

SEQ ID NO: 1948645 - DNA, 25 bp, Homo sapien
catactcggagccatttgcctctgc

SEQ ID NO: 1948646 - DNA, 25 bp, Homo sapien
gtttcgtgctgcgtcatactcggag

SEQ ID NO: 1948647 - DNA, 25 bp, Homo sapien
ctttccacagtggtttcgtgctgcg

SEQ ID NO: 1948648 - DNA, 25 bp, Homo sapien
agctaggcggttcttacactctcag

SEQ ID NO: 1948649 - DNA, 25 bp, Homo sapien
aatagccctgacctcttgaaggaag

SEQ ID NO: 1948650 - DNA, 25 bp, Homo sapien
gaatgtcagaggcagctaggccaca

SEQ ID NO: 1948651 - DNA, 25 bp, Homo sapien
cagcattccgttggccaaagtcaca

SEQ ID NO: 1948652 - DNA, 25 bp, Homo sapien
tcctccaagtggataatgagctgtg

SEQ ID NO: 1948653 - DNA, 25 bp, Homo sapien
tggtaccctgtgacgttaggaagac

SEQ ID NO: 1948654 - DNA, 25 bp, Homo sapien
tccttgagaagtagagggcaaggaa

SEQ ID NO: 1948655 - DNA, 25 bp, Homo sapien
gcttcataattgagcgggaaaacaa

SEQ ID NO: 1948656 - DNA, 25 bp, Homo sapien
caaccagagggaatccatgggaaat

SEQ ID NO: 1948657 - DNA, 25 bp, Homo sapien
tgagcaaccagagggaatccatggg

SEQ ID NO: 1948658 - DNA, 25 bp, Homo sapien
agagggaatccatgggaaatggccc

SEQ ID NO: 1948659 - DNA, 25 bp, Homo sapien
accaggtagtgagcaaccagaggga

SEQ ID NO: 1948660 - DNA, 25 bp, Homo sapien
tgatgtagcttctgtagattggcaa

SEQ ID NO: 1948661 - DNA, 25 bp, Homo sapien
ctggtatgagttacaggtgagctgg

SEQ ID NO: 1948662 - DNA, 25 bp, Homo sapien
tagcttctgtagattggcaatctta

SEQ ID NO: 1948663 - DNA, 25 bp, Homo sapien
ggtatgagttacaggtgagctgggc

SEQ ID NO: 1948664 - DNA, 25 bp, Homo sapien
tggggttttgaaggcctccacctca

SEQ ID NO: 1948665 - DNA, 25 bp, Homo sapien
aggcctccacctcacgatgaagtca

SEQ ID NO: 1948666 - DNA, 25 bp, Homo sapien
cacctcacgatgaagtcagaggatg

SEQ ID NO: 1948667 - DNA, 25 bp, Homo sapien
gcctccacctcacgatgaagtcaga

SEQ ID NO: 1948668 - DNA, 25 bp, Homo sapien
ccatactgcctgagagcatatttca

SEQ ID NO: 1948669 - DNA, 25 bp, Homo sapien
ctgagagcatatttcaagtccagct

SEQ ID NO: 1948670 - DNA, 25 bp, Homo sapien
tggtggtaaatgctggcctcagacc

SEQ ID NO: 1948671 - DNA, 25 bp, Homo sapien
tgctggcctcagaccatactgcctg

SEQ ID NO: 1948672 - DNA, 25 bp, Homo sapien
gcgtgttaggcaaacttgataatta

SEQ ID NO: 1948673 - DNA, 25 bp, Homo sapien
ttgataattactacgctatggaaac

SEQ ID NO: 1948674 - DNA, 25 bp, Homo sapien
cttgataattactacgctatggaaa

SEQ ID NO: 1948675 - DNA, 25 bp, Homo sapien
gcacaactatcttgctcaggtcacg

SEQ ID NO: 1948676 - DNA, 25 bp, Homo sapien
ttcttttcttcctaccgcagcacaa

SEQ ID NO: 1948677 - DNA, 25 bp, Homo sapien
atttaagattgtgggcttggctgct

SEQ ID NO: 1948678 - DNA, 25 bp, Homo sapien
tgccaaccaacctcggtgcaggtaa

SEQ ID NO: 1948679 - DNA, 25 bp, Homo sapien
taaagaagctttgtgctacctgtct

SEQ ID NO: 1948680 - DNA, 25 bp, Homo sapien
ggagagactattgaacacaaaagca

SEQ ID NO: 1948681 - DNA, 25 bp, Homo sapien
tgaccgccatggagctagaataaag

SEQ ID NO: 1948682 - DNA, 25 bp, Homo sapien
tttagttgcaatctaggccttctcc

SEQ ID NO: 1948683 - DNA, 25 bp, Homo sapien
ttgctttcacacagtttcttggttg

SEQ ID NO: 1948684 - DNA, 25 bp, Homo sapien
catctcaacattgctttcacacagt

SEQ ID NO: 1948685 - DNA, 25 bp, Homo sapien
gctttcacacagtttcttggttgcc

SEQ ID NO: 1948686 - DNA, 25 bp, Homo sapien
ctacatgaaaccatgccacccccat

SEQ ID NO: 1948687 - DNA, 25 bp, Homo sapien
caactaagtgggctctggaagtctc

SEQ ID NO: 1948688 - DNA, 25 bp, Homo sapien
tgagctagaggaacccagacatgga

SEQ ID NO: 1948689 - DNA, 25 bp, Homo sapien
tgcagtggacatagagggccaccca

SEQ ID NO: 1948690 - DNA, 25 bp, Homo sapien
gacatggaccgtgacttctccagta

SEQ ID NO: 1948691 - DNA, 25 bp, Homo sapien
ctcaccaggtagaaatgcgatttgc

SEQ ID NO: 1948692 - DNA, 25 bp, Homo sapien
tagcagcagtacgagggctacactc

SEQ ID NO: 1948693 - DNA, 25 bp, Homo sapien
ggacaacgcttgatttgaaaccact

SEQ ID NO: 1948694 - DNA, 25 bp, Homo sapien
gactcagcgtgtgacttgtagcagc

SEQ ID NO: 1948695 - DNA, 25 bp, Homo sapien
tgtgttattgattatatacaaagga

SEQ ID NO: 1948696 - DNA, 25 bp, Homo sapien
cccatagaaggttttttgctggata

SEQ ID NO: 1948697 - DNA, 25 bp, Homo sapien
ttttttgagataacactcaaatagt

SEQ ID NO: 1948698 - DNA, 25 bp, Homo sapien
gataacactcaaatagtattctctt

SEQ ID NO: 1948699 - DNA, 25 bp, Homo sapien
tttaaccgtaagtgcacgatgcagg

SEQ ID NO: 1948700 - DNA, 25 bp, Homo sapien
gatctgttgcgactcccaaatgcgt

SEQ ID NO: 1948701 - DNA, 25 bp, Homo sapien
gaccaaactagaccaccagcatgtt

SEQ ID NO: 1948702 - DNA, 25 bp, Homo sapien
tgttcatgtccagacctcggcagtg

SEQ ID NO: 1948703 - DNA, 25 bp, Homo sapien
tggattgttcacactcacggataac

SEQ ID NO: 1948704 - DNA, 25 bp, Homo sapien
cgcatctgcacgttctcagcgggaa

SEQ ID NO: 1948705 - DNA, 25 bp, Homo sapien
gataagaactgtatccgccttgcct

SEQ ID NO: 1948706 - DNA, 25 bp, Homo sapien
tgaccccgtgcatagtcaccgagtg

SEQ ID NO: 1948707 - DNA, 25 bp, Homo sapien
taaagctccgtttacaaaacatgat

SEQ ID NO: 1948708 - DNA, 25 bp, Homo sapien
taacagggcgaagcaaagaacacag

SEQ ID NO: 1948709 - DNA, 25 bp, Homo sapien
cagctgctaaagctccgtttacaaa

SEQ ID NO: 1948710 - DNA, 25 bp, Homo sapien
cagttttctcataacagggcgaagc

SEQ ID NO: 1948711 - DNA, 25 bp, Homo sapien
gctggctggctttctatggctgtct

SEQ ID NO: 1948712 - DNA, 25 bp, Homo sapien
gatgtaagcatatcagagggcctca

SEQ ID NO: 1948713 - DNA, 25 bp, Homo sapien
taaggccaacgttatttcctgacgc

SEQ ID NO: 1948714 - DNA, 25 bp, Homo sapien
ttggctcatgttccgtttccacgcc

SEQ ID NO: 1948715 - DNA, 25 bp, Homo sapien
cattcaggtttaaaggtctgggagc

SEQ ID NO: 1948716 - DNA, 25 bp, Homo sapien
ctgtttggggtctcgtggacgccat

SEQ ID NO: 1948717 - DNA, 25 bp, Homo sapien
ttgcttttgacccagcagtcgccta

SEQ ID NO: 1948718 - DNA, 25 bp, Homo sapien
tggacgccatccctaaagcttgctt

SEQ ID NO: 1948719 - DNA, 25 bp, Homo sapien
agtcgcctaggtgtccccctgggcg

SEQ ID NO: 1948720 - DNA, 25 bp, Homo sapien
acatgctcctgcgtgtgagtcactg

SEQ ID NO: 1948721 - DNA, 25 bp, Homo sapien
caacatgctcctgcgtgtgagtcac

SEQ ID NO: 1948722 - DNA, 25 bp, Homo sapien
ccaacatgctcctgcgtgtgagtca

SEQ ID NO: 1948723 - DNA, 25 bp, Homo sapien
gaccaacatgctcctgcgtgtgagt

SEQ ID NO: 1948724 - DNA, 25 bp, Homo sapien
gcctgtcttacagggaagctcccag

SEQ ID NO: 1948725 - DNA, 25 bp, Homo sapien
gaaatgggccgatgtgcctgtctta

SEQ ID NO: 1948726 - DNA, 25 bp, Homo sapien
cccattagctggtaggttacttgaa

SEQ ID NO: 1948727 - DNA, 25 bp, Homo sapien
tgcgcctggcttgtacttaactctt

SEQ ID NO: 1948728 - DNA, 25 bp, Homo sapien
gaaggtgtctctcacaccccttggg

SEQ ID NO: 1948729 - DNA, 25 bp, Homo sapien
ccgcctaccgtcgtggtggtttgcg

SEQ ID NO: 1948730 - DNA, 25 bp, Homo sapien
ggtggtttgcggagaccgagatgaa

SEQ ID NO: 1948731 - DNA, 25 bp, Homo sapien
ttgcggagaccgagatgaaggtgtc

SEQ ID NO: 1948732 - DNA, 25 bp, Homo sapien
ggattataggcgtgatctgcccgcc

SEQ ID NO: 1948733 - DNA, 25 bp, Homo sapien
tgcccgccttggccttgtgatctgc

SEQ ID NO: 1948734 - DNA, 25 bp, Homo sapien
cccgccttggccttgtgatctgccc

SEQ ID NO: 1948735 - DNA, 25 bp, Homo sapien
cacgcctggctgctaatttttgtat

SEQ ID NO: 1948736 - DNA, 25 bp, Homo sapien
gtgggagactagatctttgactctg

SEQ ID NO: 1948737 - DNA, 25 bp, Homo sapien
ccagggtgtgggagactagatcttt

SEQ ID NO: 1948738 - DNA, 25 bp, Homo sapien
ggtgttctcacgcaaagtggccagg

SEQ ID NO: 1948739 - DNA, 25 bp, Homo sapien
tctccaggactgtatgcaaggccag

SEQ ID NO: 1948740 - DNA, 25 bp, Homo sapien
cagatcctcgtcagcttgctggcag

SEQ ID NO: 1948741 - DNA, 25 bp, Homo sapien
gaggagtacgtcaggactgccatga

SEQ ID NO: 1948742 - DNA, 25 bp, Homo sapien
tctcatggtgtccagcagatcctcg

SEQ ID NO: 1948743 - DNA, 25 bp, Homo sapien
tgctggcagaggatcaccaaagctt

SEQ ID NO: 1948744 - DNA, 25 bp, Homo sapien
cacagtcgtggggtgccttaaggct

SEQ ID NO: 1948745 - DNA, 25 bp, Homo sapien
tagagacgcagccagctcaagctgt

SEQ ID NO: 1948746 - DNA, 25 bp, Homo sapien
taggagtaattgaagcctgtttctc

SEQ ID NO: 1948747 - DNA, 25 bp, Homo sapien
catggtgcacttgtaggagtaattg

SEQ ID NO: 1948748 - DNA, 25 bp, Homo sapien
gctccccccgtaggcaatttgtcag

SEQ ID NO: 1948749 - DNA, 25 bp, Homo sapien
tacagcatatccaaatgacagtggg

SEQ ID NO: 1948750 - DNA, 25 bp, Homo sapien
tcctcccgagcttctggagaagtga

SEQ ID NO: 1948751 - DNA, 25 bp, Homo sapien
tccctttgaaagacaacttggaata

SEQ ID NO: 1948752 - DNA, 25 bp, Homo sapien
cacagacaggtagccggcaggcttg

SEQ ID NO: 1948753 - DNA, 25 bp, Homo sapien
tcccagcctgtgctgcgtcattgct

SEQ ID NO: 1948754 - DNA, 25 bp, Homo sapien
ggctgctggtgcactagctgacata

SEQ ID NO: 1948755 - DNA, 25 bp, Homo sapien
gggggaagaatcactcaggcactcg

SEQ ID NO: 1948756 - DNA, 25 bp, Homo sapien
gatctccagatcagaccagttgctt

SEQ ID NO: 1948757 - DNA, 25 bp, Homo sapien
aactgggacactctgctatgcttgg

SEQ ID NO: 1948758 - DNA, 25 bp, Homo sapien
gggattgactatccttctcagcagg

SEQ ID NO: 1948759 - DNA, 25 bp, Homo sapien
gaaaggactccctgagtgctctgaa

SEQ ID NO: 1948760 - DNA, 25 bp, Homo sapien
ccaggataacctcggcgaagcaagc

SEQ ID NO: 1948761 - DNA, 25 bp, Homo sapien
ccgtcctgaacccaacacagagctc

SEQ ID NO: 1948762 - DNA, 25 bp, Homo sapien
gcttggggctaccagcccgtcctga

SEQ ID NO: 1948763 - DNA, 25 bp, Homo sapien
tctggtggtacctgaccttgtgcca

SEQ ID NO: 1948764 - DNA, 25 bp, Homo sapien
tcagggtacttctagcccagtagac

SEQ ID NO: 1948765 - DNA, 25 bp, Homo sapien
gccgaggactggagcacgttcactt

SEQ ID NO: 1948766 - DNA, 25 bp, Homo sapien
cagtagactcatgaggttagagggc

SEQ ID NO: 1948767 - DNA, 25 bp, Homo sapien
catgtttttgttgtaagcggccgag

SEQ ID NO: 1948768 - DNA, 25 bp, Homo sapien
gctgcagacgaaacaaggagatgtg

SEQ ID NO: 1948769 - DNA, 25 bp, Homo sapien
ccccaagttgggagctactgtctac

SEQ ID NO: 1948770 - DNA, 25 bp, Homo sapien
gtctcggaagttgccctgccatgtg

SEQ ID NO: 1948771 - DNA, 25 bp, Homo sapien
tactgtctacttctggtggcctccg

SEQ ID NO: 1948772 - DNA, 25 bp, Homo sapien
tgactgatgtgtccagatgccgcgt

SEQ ID NO: 1948773 - DNA, 25 bp, Homo sapien
cattttattagtgtcagtccccagc

SEQ ID NO: 1948774 - DNA, 25 bp, Homo sapien
gaagaatgccctctatggtaagcca

SEQ ID NO: 1948775 - DNA, 25 bp, Homo sapien
tcgaagagtgcttgtgacccctggc

SEQ ID NO: 1948776 - DNA, 25 bp, Homo sapien
gcagagcttcacgttatcatccacg

SEQ ID NO: 1948777 - DNA, 25 bp, Homo sapien
cgttaagtagtgctaggtaggacct

SEQ ID NO: 1948778 - DNA, 25 bp, Homo sapien
ggcatttagccatacacacactaga

SEQ ID NO: 1948779 - DNA, 25 bp, Homo sapien
tgtttaagacaacttactgcaaggg

SEQ ID NO: 1948780 - DNA, 25 bp, Homo sapien
gatacagatcttttcccctggccaa

SEQ ID NO: 1948781 - DNA, 25 bp, Homo sapien
gacaaatgtcaccagcctcaagtat

SEQ ID NO: 1948782 - DNA, 25 bp, Homo sapien
tttccctagggagagcttcgttatc

SEQ ID NO: 1948783 - DNA, 25 bp, Homo sapien
tactggtccagtctaggagaacctg

SEQ ID NO: 1948784 - DNA, 25 bp, Homo sapien
gacttcggtgccattcacatcacag

SEQ ID NO: 1948785 - DNA, 25 bp, Homo sapien
cacagtgcggtcatttggttttttc

SEQ ID NO: 1948786 - DNA, 25 bp, Homo sapien
agagttcactgaattcatggctggt

SEQ ID NO: 1948787 - DNA, 25 bp, Homo sapien
ctgacttcggtgccattcacatcac

SEQ ID NO: 1948788 - DNA, 25 bp, Homo sapien
acagtccgaaggcactgacgatgca

SEQ ID NO: 1948789 - DNA, 25 bp, Homo sapien
gacagtccgaaggcactgacgatgc

SEQ ID NO: 1948790 - DNA, 25 bp, Homo sapien
agacagtccgaaggcactgacgatg

SEQ ID NO: 1948791 - DNA, 25 bp, Homo sapien
taaggccaacattcaagtacccatc

SEQ ID NO: 1948792 - DNA, 25 bp, Homo sapien
agggaagagagcagcatttacggca

SEQ ID NO: 1948793 - DNA, 25 bp, Homo sapien
gctgggggacgacgttttactcaca

SEQ ID NO: 1948794 - DNA, 25 bp, Homo sapien
cagcatttacggcagggaaagctgg

SEQ ID NO: 1948795 - DNA, 25 bp, Homo sapien
gaaccttggcaagtctattattaaa

SEQ ID NO: 1948796 - DNA, 25 bp, Homo sapien
gcattcaaagataggaaacttccag

SEQ ID NO: 1948797 - DNA, 25 bp, Homo sapien
aacttccagtcatatatttcacaca

SEQ ID NO: 1948798 - DNA, 25 bp, Homo sapien
aaggtgataaacatgcattgcattc

SEQ ID NO: 1948799 - DNA, 25 bp, Homo sapien
aacttgctgtgtgtaatccagctcc

SEQ ID NO: 1948800 - DNA, 25 bp, Homo sapien
tcagtagagctgtcccagaagcagg

SEQ ID NO: 1948801 - DNA, 25 bp, Homo sapien
caggaacttgctgtgtgtaatccag

SEQ ID NO: 1948802 - DNA, 25 bp, Homo sapien
ggaacttgctgtgtgtaatccagct

SEQ ID NO: 1948803 - DNA, 25 bp, Homo sapien
aattctaagttgagccactgtcagc

SEQ ID NO: 1948804 - DNA, 25 bp, Homo sapien
taaaagcatctgatgggacctcctg

SEQ ID NO: 1948805 - DNA, 25 bp, Homo sapien
gccaaatggtcaagcgtacgctaac

SEQ ID NO: 1948806 - DNA, 25 bp, Homo sapien
catacgatctgcaattgtaccagca

SEQ ID NO: 1948807 - DNA, 25 bp, Homo sapien
tgcccctctgatcagtgttaaaaaa

SEQ ID NO: 1948808 - DNA, 25 bp, Homo sapien
tggatgcccctctgatcagtgttaa

SEQ ID NO: 1948809 - DNA, 25 bp, Homo sapien
ggatgcccctctgatcagtgttaaa

SEQ ID NO: 1948810 - DNA, 25 bp, Homo sapien
gatgcccctctgatcagtgttaaaa

SEQ ID NO: 1948811 - DNA, 25 bp, Homo sapien
taagcgttaccaccaattgcgcttt

SEQ ID NO: 1948812 - DNA, 25 bp, Homo sapien
gataagcgttaccaccaattgcgct

SEQ ID NO: 1948813 - DNA, 25 bp, Homo sapien
ttgataagcgttaccaccaattgcg

SEQ ID NO: 1948814 - DNA, 25 bp, Homo sapien
tgttgataagcgttaccaccaattg

SEQ ID NO: 1948815 - DNA, 25 bp, Homo sapien
tcccctttcacatggatgccagtgt

SEQ ID NO: 1948816 - DNA, 25 bp, Homo sapien
tcttgctaagcttatcattatgata

SEQ ID NO: 1948817 - DNA, 25 bp, Homo sapien
ctttatctatgctgtattctttggg

SEQ ID NO: 1948818 - DNA, 25 bp, Homo sapien
tattgccattgtatgattttctgag

SEQ ID NO: 1948819 - DNA, 25 bp, Homo sapien
ccctaacttgctgtgctggaaacca

SEQ ID NO: 1948820 - DNA, 25 bp, Homo sapien
taacttgctgtgctggaaaccagga

SEQ ID NO: 1948821 - DNA, 25 bp, Homo sapien
gctggaaaccaggaacctgagtttc

SEQ ID NO: 1948822 - DNA, 25 bp, Homo sapien
aaccaggaacctgagtttctatgac

SEQ ID NO: 1948823 - DNA, 25 bp, Homo sapien
tacaatgttgctcacttcatcaaca

SEQ ID NO: 1948824 - DNA, 25 bp, Homo sapien
tttacaatgttgctcacttcatcaa

SEQ ID NO: 1948825 - DNA, 25 bp, Homo sapien
ttttacaatgttgctcacttcatca

SEQ ID NO: 1948826 - DNA, 25 bp, Homo sapien
tcttttacaatgttgctcacttcat

SEQ ID NO: 1948827 - DNA, 25 bp, Homo sapien
ggcccaggcatctacacgaagttag

SEQ ID NO: 1948828 - DNA, 25 bp, Homo sapien
aaaggtacgtagctctggacacgcc

SEQ ID NO: 1948829 - DNA, 25 bp, Homo sapien
taagacatgcctactacaagacagc

SEQ ID NO: 1948830 - DNA, 25 bp, Homo sapien
tgctgtactcagaagtcggacttgg

SEQ ID NO: 1948831 - DNA, 25 bp, Homo sapien
tgcgcccagccactaaatttcataa

SEQ ID NO: 1948832 - DNA, 25 bp, Homo sapien
caggctgcataataaatccataggg

SEQ ID NO: 1948833 - DNA, 25 bp, Homo sapien
tgttgtatctcagctgcgcccatca

SEQ ID NO: 1948834 - DNA, 25 bp, Homo sapien
catagggctctatctgaatttcaac

SEQ ID NO: 1948835 - DNA, 25 bp, Homo sapien
tgcgggaaggtttctcggcaccgct

SEQ ID NO: 1948836 - DNA, 25 bp, Homo sapien
aacggcggcaatgtccgggcagaat

SEQ ID NO: 1948837 - DNA, 25 bp, Homo sapien
ccgagactggcctagctgaaggagg

SEQ ID NO: 1948838 - DNA, 25 bp, Homo sapien
gcgcgggaagaagctcaatcccctt

SEQ ID NO: 1948839 - DNA, 25 bp, Homo sapien
ctcctccgcagcctggtagtcttcc

SEQ ID NO: 1948840 - DNA, 25 bp, Homo sapien
tcctccgcagcctggtagtcttcca

SEQ ID NO: 1948841 - DNA, 25 bp, Homo sapien
cctccgcagcctggtagtcttccat

SEQ ID NO: 1948842 - DNA, 25 bp, Homo sapien
ctgagtggcgcggactgcgcaggcg

SEQ ID NO: 1948843 - DNA, 25 bp, Homo sapien
tccggctccctgagtggcgcggact

SEQ ID NO: 1948844 - DNA, 25 bp, Homo sapien
ctccctgagtggcgcggactgcgca

SEQ ID NO: 1948845 - DNA, 25 bp, Homo sapien
tgagtggcgcggactgcgcaggcgc

SEQ ID NO: 1948846 - DNA, 25 bp, Homo sapien
aattttacattatcaccgcgagcag

SEQ ID NO: 1948847 - DNA, 25 bp, Homo sapien
tttaaatacgtaggcttcaccagac

SEQ ID NO: 1948848 - DNA, 25 bp, Homo sapien
cctgtaggcccatgaacttggagaa

SEQ ID NO: 1948849 - DNA, 25 bp, Homo sapien
actgagcaatcttggcctgtaggcc

SEQ ID NO: 1948850 - DNA, 25 bp, Homo sapien
gacaaacgcagaacttcttgaggct

SEQ ID NO: 1948851 - DNA, 25 bp, Homo sapien
ccagtgaaataggagagggagctct

SEQ ID NO: 1948852 - DNA, 25 bp, Homo sapien
tagcacgaggctctgcgagccgtaa

SEQ ID NO: 1948853 - DNA, 25 bp, Homo sapien
gagctctttaaacaaggctggctgc

SEQ ID NO: 1948854 - DNA, 25 bp, Homo sapien
gagaccaggcggttcaaaacacaga

SEQ ID NO: 1948855 - DNA, 25 bp, Homo sapien
tacctcatttttgacggtgccggga

SEQ ID NO: 1948856 - DNA, 25 bp, Homo sapien
taactaaacgtagaggacgctcagg

SEQ ID NO: 1948857 - DNA, 25 bp, Homo sapien
tcaaggagttagaacgcgaggccat

SEQ ID NO: 1948858 - DNA, 25 bp, Homo sapien
cacaaagagaagtgctgtgcgcgct

SEQ ID NO: 1948859 - DNA, 25 bp, Homo sapien
tgtgtgcccagtgccgagtgttcct

SEQ ID NO: 1948860 - DNA, 25 bp, Homo sapien
aacacggactgggagcacaaagaga

SEQ ID NO: 1948861 - DNA, 25 bp, Homo sapien
tggaaaggagcgaagaacacggact

SEQ ID NO: 1948862 - DNA, 25 bp, Homo sapien
ctctgaggttggccctattcctttt

SEQ ID NO: 1948863 - DNA, 25 bp, Homo sapien
tgctgatgctctcactgtaattcac

SEQ ID NO: 1948864 - DNA, 25 bp, Homo sapien
cctctgctgcatttctacctctgag

SEQ ID NO: 1948865 - DNA, 25 bp, Homo sapien
tgtaattcacgctgctcattccctc

SEQ ID NO: 1948866 - DNA, 25 bp, Homo sapien
gctctgtagctttctataatgcagc

SEQ ID NO: 1948867 - DNA, 25 bp, Homo sapien
taatgcagcattctgcaactcgcgt

SEQ ID NO: 1948868 - DNA, 25 bp, Homo sapien
taaagttgcgttatcctcaggcctg

SEQ ID NO: 1948869 - DNA, 25 bp, Homo sapien
caactcgcgtaaacagatagggcag

SEQ ID NO: 1948870 - DNA, 25 bp, Homo sapien
cttacaggatcaatgtagtgaaaca

SEQ ID NO: 1948871 - DNA, 25 bp, Homo sapien
tatcaaaaattgaatagtcagttga

SEQ ID NO: 1948872 - DNA, 25 bp, Homo sapien
agctgaatatccctacaccatctgt

SEQ ID NO: 1948873 - DNA, 25 bp, Homo sapien
tgccttcatagcacaagctataaaa

SEQ ID NO: 1948874 - DNA, 25 bp, Homo sapien
cattgttatccccatgacacaggcg

SEQ ID NO: 1948875 - DNA, 25 bp, Homo sapien
tcattgttatccccatgacacaggc

SEQ ID NO: 1948876 - DNA, 25 bp, Homo sapien
attgttatccccatgacacaggcgt

SEQ ID NO: 1948877 - DNA, 25 bp, Homo sapien
tacggttaagtctgtgtctcgtcca

SEQ ID NO: 1948878 - DNA, 25 bp, Homo sapien
gctccagctcgttactatttttgtg

SEQ ID NO: 1948879 - DNA, 25 bp, Homo sapien
tctgtgtctcgtccatctgcaagtc

SEQ ID NO: 1948880 - DNA, 25 bp, Homo sapien
ggcagcatgttcttttacggttaag

SEQ ID NO: 1948881 - DNA, 25 bp, Homo sapien
aggatagtctagatctgctgacctc

SEQ ID NO: 1948882 - DNA, 25 bp, Homo sapien
ggatagtctagatctgctgacctcc

SEQ ID NO: 1948883 - DNA, 25 bp, Homo sapien
tgattgacatcttggccgtccagcc

SEQ ID NO: 1948884 - DNA, 25 bp, Homo sapien
cccttggacgtgcagcggtagtgat

SEQ ID NO: 1948885 - DNA, 25 bp, Homo sapien
gaaaaggcagcatctcggtactcgt

SEQ ID NO: 1948886 - DNA, 25 bp, Homo sapien
tcaggttccccatgacttcgtagcc

SEQ ID NO: 1948887 - DNA, 25 bp, Homo sapien
ggatagaatcaagtcctgtgttgct

SEQ ID NO: 1948888 - DNA, 25 bp, Homo sapien
tgttgcttacacagggacttatgcc

SEQ ID NO: 1948889 - DNA, 25 bp, Homo sapien
tgaagtgaaaggcagctccggatgt

SEQ ID NO: 1948890 - DNA, 25 bp, Homo sapien
aaggagagtcaagcaggtcagtagg

SEQ ID NO: 1948891 - DNA, 25 bp, Homo sapien
tagcctgaagctgagtcccatgaca

SEQ ID NO: 1948892 - DNA, 25 bp, Homo sapien
taacaccatttagtctgacatagcc

SEQ ID NO: 1948893 - DNA, 25 bp, Homo sapien
cctggtggtcttggcagctctacaa

SEQ ID NO: 1948894 - DNA, 25 bp, Homo sapien
gcagaaaagtgtgtgtaacaccatt

SEQ ID NO: 1948895 - DNA, 25 bp, Homo sapien
tggccgatttcgagtattttcacaa

SEQ ID NO: 1948896 - DNA, 25 bp, Homo sapien
tgatcctccaacttcgggcgtcgag

SEQ ID NO: 1948897 - DNA, 25 bp, Homo sapien
gcttatggaatcctccctgagccag

SEQ ID NO: 1948898 - DNA, 25 bp, Homo sapien
cttgctttgccgtctaggctggaat

SEQ ID NO: 1948899 - DNA, 25 bp, Homo sapien
cagggaaagcgcaagactggagtcc

SEQ ID NO: 1948900 - DNA, 25 bp, Homo sapien
caccgtggacccgacctttcaggag

SEQ ID NO: 1948901 - DNA, 25 bp, Homo sapien
gacctttcaggagaccttgaaggta

SEQ ID NO: 1948902 - DNA, 25 bp, Homo sapien
cctcccagggaaagcgcaagactgg

SEQ ID NO: 1948903 - DNA, 25 bp, Homo sapien
tgtctgcggcatggaatccacctgc

SEQ ID NO: 1948904 - DNA, 25 bp, Homo sapien
cggcatggaatccacctgcacatgg

SEQ ID NO: 1948905 - DNA, 25 bp, Homo sapien
ccacctgcacatggcatcttagctg

SEQ ID NO: 1948906 - DNA, 25 bp, Homo sapien
atttcatgtctgcggcatggaatcc

SEQ ID NO: 1948907 - DNA, 25 bp, Homo sapien
aatgagtgggcggaaccaacggcct

SEQ ID NO: 1948908 - DNA, 25 bp, Homo sapien
gaaagcagtgcacgagaaggaatga

SEQ ID NO: 1948909 - DNA, 25 bp, Homo sapien
aatcctgtttacacgtgactgcagc

SEQ ID NO: 1948910 - DNA, 25 bp, Homo sapien
tggagtctgaaagctcatagtggca

SEQ ID NO: 1948911 - DNA, 25 bp, Homo sapien
tgccacatcacatcaagtgccatgg

SEQ ID NO: 1948912 - DNA, 25 bp, Homo sapien
ttatcacttgtatataaatagtata

SEQ ID NO: 1948913 - DNA, 25 bp, Homo sapien
attatcacttgtatataaatagtat

SEQ ID NO: 1948914 - DNA, 25 bp, Homo sapien
tacaatgtattctaaaactgttaag

SEQ ID NO: 1948915 - DNA, 25 bp, Homo sapien
acaatgtattctaaaactgttaagc

SEQ ID NO: 1948916 - DNA, 25 bp, Homo sapien
cacccctctaagcatgtaaatatac

SEQ ID NO: 1948917 - DNA, 25 bp, Homo sapien
cactgtgtgtgcgagagtgcttcag

SEQ ID NO: 1948918 - DNA, 25 bp, Homo sapien
aaaatcaatttgagctcatttcgaa

SEQ ID NO: 1948919 - DNA, 25 bp, Homo sapien
atatacaaagatggatccttcatag

SEQ ID NO: 1948920 - DNA, 25 bp, Homo sapien
cagcacaacacaggaggtgattcga

SEQ ID NO: 1948921 - DNA, 25 bp, Homo sapien
gaataatcgcgagaatcaggcctgc

SEQ ID NO: 1948922 - DNA, 25 bp, Homo sapien
tggagcactaaagacacaagcgtgg

SEQ ID NO: 1948923 - DNA, 25 bp, Homo sapien
gagggagttcctagacttggagcac

SEQ ID NO: 1948924 - DNA, 25 bp, Homo sapien
gccttgcctcatgttctcgttgtgg

SEQ ID NO: 1948925 - DNA, 25 bp, Homo sapien
gggcctcgaactcgtcgatgcgctg

SEQ ID NO: 1948926 - DNA, 25 bp, Homo sapien
ttacagggcctcgaactcgtcgatg

SEQ ID NO: 1948927 - DNA, 25 bp, Homo sapien
ccggccttgcctcatgttctcgttg

SEQ ID NO: 1948928 - DNA, 25 bp, Homo sapien
gcagcattggtctagtcccttcctc

SEQ ID NO: 1948929 - DNA, 25 bp, Homo sapien
ctgtaacattaagcagcattggtct

SEQ ID NO: 1948930 - DNA, 25 bp, Homo sapien
tcctccccatatggcccggcccgtc

SEQ ID NO: 1948931 - DNA, 25 bp, Homo sapien
cattaagcagcattggtctagtccc

SEQ ID NO: 1948932 - DNA, 25 bp, Homo sapien
gggctggctcacatcactgccctcc

SEQ ID NO: 1948933 - DNA, 25 bp, Homo sapien
tctgctccaaaagcgaggcaggctc

SEQ ID NO: 1948934 - DNA, 25 bp, Homo sapien
aagcctgtctgctccaaaagcgagg

SEQ ID NO: 1948935 - DNA, 25 bp, Homo sapien
ctccaaaagcgaggcaggctccctg

SEQ ID NO: 1948936 - DNA, 25 bp, Homo sapien
tgcgcttctcctcattgcggtcatc

SEQ ID NO: 1948937 - DNA, 25 bp, Homo sapien
ctcagtgatgcgcttctcctcattg

SEQ ID NO: 1948938 - DNA, 25 bp, Homo sapien
gatgcgcttctcctcattgcggtca

SEQ ID NO: 1948939 - DNA, 25 bp, Homo sapien
cagtgatgcgcttctcctcattgcg

SEQ ID NO: 1948940 - DNA, 25 bp, Homo sapien
tcaccaggtcatcctgggcttcttt

SEQ ID NO: 1948941 - DNA, 25 bp, Homo sapien
gctgtcatcaccaggtgcagctcct

SEQ ID NO: 1948942 - DNA, 25 bp, Homo sapien
gggcgggggtgctgtcatcaccagg

SEQ ID NO: 1948943 - DNA, 25 bp, Homo sapien
ccttggtcttcaccaggtcatcctg

SEQ ID NO: 1948944 - DNA, 25 bp, Homo sapien
ttgaagaagtgatgctactagcccc

SEQ ID NO: 1948945 - DNA, 25 bp, Homo sapien
cctaatacagatcggcagcgggaat

SEQ ID NO: 1948946 - DNA, 25 bp, Homo sapien
tgtgtgcgtcccacaatgagagcta

SEQ ID NO: 1948947 - DNA, 25 bp, Homo sapien
gatcccagacggagcgacaagctct

SEQ ID NO: 1948948 - DNA, 25 bp, Homo sapien
gggcaatcttggcagtgtattctgc

SEQ ID NO: 1948949 - DNA, 25 bp, Homo sapien
ggtcagcctctaggcgctcggcctc

SEQ ID NO: 1948950 - DNA, 25 bp, Homo sapien
ccgcagtgcagccatacggtcagcc

SEQ ID NO: 1948951 - DNA, 25 bp, Homo sapien
cccgcagtgcagccatacggtcagc

SEQ ID NO: 1948952 - DNA, 25 bp, Homo sapien
tacggtcagcctctaggcgctcggc

SEQ ID NO: 1948953 - DNA, 25 bp, Homo sapien
agggccctctgaatctgctccgaga

SEQ ID NO: 1948954 - DNA, 25 bp, Homo sapien
tgcagggccctctgaatctgctccg

SEQ ID NO: 1948955 - DNA, 25 bp, Homo sapien
gcagggccctctgaatctgctccga

SEQ ID NO: 1948956 - DNA, 25 bp, Homo sapien
gccctctgaatctgctccgagagct

SEQ ID NO: 1948957 - DNA, 25 bp, Homo sapien
ccattcaaaccctcagcccagggac

SEQ ID NO: 1948958 - DNA, 25 bp, Homo sapien
gccattcaaaccctcagcccaggga

SEQ ID NO: 1948959 - DNA, 25 bp, Homo sapien
ctttgtcttctcctcatagtcctgc

SEQ ID NO: 1948960 - DNA, 25 bp, Homo sapien
tttgtcttctcctcatagtcctgca

SEQ ID NO: 1948961 - DNA, 25 bp, Homo sapien
tccttctcgcgcatcatctgctctt

SEQ ID NO: 1948962 - DNA, 25 bp, Homo sapien
ccttctcgcgcatcatctgctcttt

SEQ ID NO: 1948963 - DNA, 25 bp, Homo sapien
gcaggatccgcttgttgattctcag

SEQ ID NO: 1948964 - DNA, 25 bp, Homo sapien
cctcgatggtgtcaggcttcctgcg

SEQ ID NO: 1948965 - DNA, 25 bp, Homo sapien
tcctgcggcgcatatacaactcatg

SEQ ID NO: 1948966 - DNA, 25 bp, Homo sapien
tacaactcatggttgcccatgcaga

SEQ ID NO: 1948967 - DNA, 25 bp, Homo sapien
tgcccaaagtttacagactgaggtg

SEQ ID NO: 1948968 - DNA, 25 bp, Homo sapien
tcacgtaaatgtaggctcaccaggg

SEQ ID NO: 1948969 - DNA, 25 bp, Homo sapien
tcaccagggtaggagctttgccttg

SEQ ID NO: 1948970 - DNA, 25 bp, Homo sapien
tgagttcacagcagaaaccgcctgg

SEQ ID NO: 1948971 - DNA, 25 bp, Homo sapien
gaaaagttaagtggtctcccctgca

SEQ ID NO: 1948972 - DNA, 25 bp, Homo sapien
tactacccaagtgacatgaagacgc

SEQ ID NO: 1948973 - DNA, 25 bp, Homo sapien
aaatctggcccttgagactcgcagg

SEQ ID NO: 1948974 - DNA, 25 bp, Homo sapien
tacccacagagtagcagccaagagt

SEQ ID NO: 1948975 - DNA, 25 bp, Homo sapien
cttcttgtcgatgggtttaatgaca

SEQ ID NO: 1948976 - DNA, 25 bp, Homo sapien
cttgtcgatgggtttaatgacaaac

SEQ ID NO: 1948977 - DNA, 25 bp, Homo sapien
tgtcgatgggtttaatgacaaactt

SEQ ID NO: 1948978 - DNA, 25 bp, Homo sapien
tcttgtcgatgggtttaatgacaaa

SEQ ID NO: 1948979 - DNA, 25 bp, Homo sapien
gaaacggacagaggccttgctatgc

SEQ ID NO: 1948980 - DNA, 25 bp, Homo sapien
cctgtcctaggttaagccaagtggt

SEQ ID NO: 1948981 - DNA, 25 bp, Homo sapien
gctggtgatctcgaggtcaactgaa

SEQ ID NO: 1948982 - DNA, 25 bp, Homo sapien
aatatgaagctaacccaagaggcac

SEQ ID NO: 1948983 - DNA, 25 bp, Homo sapien
gactggaactatcccacatcgaagg

SEQ ID NO: 1948984 - DNA, 25 bp, Homo sapien
taagatataccgaccacatgtgcca

SEQ ID NO: 1948985 - DNA, 25 bp, Homo sapien
tgtgccaccttgaaagaggtcctgg

SEQ ID NO: 1948986 - DNA, 25 bp, Homo sapien
catcaatggtagctagaactaggac

SEQ ID NO: 1948987 - DNA, 25 bp, Homo sapien
tctttatactcccacctattccaag

SEQ ID NO: 1948988 - DNA, 25 bp, Homo sapien
tgtttttgccctctttatactccca

SEQ ID NO: 1948989 - DNA, 25 bp, Homo sapien
tgccctctttatactcccacctatt

SEQ ID NO: 1948990 - DNA, 25 bp, Homo sapien
tttgccctctttatactcccaccta

SEQ ID NO: 1948991 - DNA, 25 bp, Homo sapien
gggcagttacaagctgacatcagca

SEQ ID NO: 1948992 - DNA, 25 bp, Homo sapien
ggctggggcagttacaagctgacat

SEQ ID NO: 1948993 - DNA, 25 bp, Homo sapien
cagttacaagctgacatcagcaagt

SEQ ID NO: 1948994 - DNA, 25 bp, Homo sapien
tcagcaagttcctgcccatggctgt

SEQ ID NO: 1948995 - DNA, 25 bp, Homo sapien
tattcagtccaagggcatcaactcc

SEQ ID NO: 1948996 - DNA, 25 bp, Homo sapien
tttttatctcgaaatagttgattcc

SEQ ID NO: 1948997 - DNA, 25 bp, Homo sapien
agggcatcaactccaagccaaaggt

SEQ ID NO: 1948998 - DNA, 25 bp, Homo sapien
cttgttttttatctcgaaatagttg

SEQ ID NO: 1948999 - DNA, 25 bp, Homo sapien
gacacagagccctttaaagcactaa

SEQ ID NO: 1949000 - DNA, 25 bp, Homo sapien
ggttccctcaaggtcttcacaaggc

SEQ ID NO: 1949001 - DNA, 25 bp, Homo sapien
aaaagacatgctggagcgcacggag

SEQ ID NO: 1949002 - DNA, 25 bp, Homo sapien
agatggcaagatcccaacagcaggg

SEQ ID NO: 1949003 - DNA, 25 bp, Homo sapien
ttgagcatcccacggtgttccgcat

SEQ ID NO: 1949004 - DNA, 25 bp, Homo sapien
ccctggtaagtttgtgctggtccat

SEQ ID NO: 1949005 - DNA, 25 bp, Homo sapien
cttggcccggaacttgaactggagg

SEQ ID NO: 1949006 - DNA, 25 bp, Homo sapien
tttgagggatcagccgctcagagct

SEQ ID NO: 1949007 - DNA, 25 bp, Homo sapien
tgaggtacccagacttgtgcacttc

SEQ ID NO: 1949008 - DNA, 25 bp, Homo sapien
gggcagtagatctcatcgctaagga

SEQ ID NO: 1949009 - DNA, 25 bp, Homo sapien
cacaaatccggaagacgaaggccca

SEQ ID NO: 1949010 - DNA, 25 bp, Homo sapien
tctccacacaaatccggaagacgaa

SEQ ID NO: 1949011 - DNA, 25 bp, Homo sapien
tgcacgaaacaagccacactctcca

SEQ ID NO: 1949012 - DNA, 25 bp, Homo sapien
acactctccacacaaatccggaaga

SEQ ID NO: 1949013 - DNA, 25 bp, Homo sapien
ccaacacaggcttctaaccaagact

SEQ ID NO: 1949014 - DNA, 25 bp, Homo sapien
aggcttctaaccaagactcaatggg

SEQ ID NO: 1949015 - DNA, 25 bp, Homo sapien
aacacaggcttctaaccaagactca

SEQ ID NO: 1949016 - DNA, 25 bp, Homo sapien
cacaggcttctaaccaagactcaat

SEQ ID NO: 1949017 - DNA, 25 bp, Homo sapien
gatgatgctatcaatcctggagaac

SEQ ID NO: 1949018 - DNA, 25 bp, Homo sapien
ggccacatgccaatcgggccctgga

SEQ ID NO: 1949019 - DNA, 25 bp, Homo sapien
cttgttgctgtgacttgggaggaca

SEQ ID NO: 1949020 - DNA, 25 bp, Homo sapien
tggaaatcaaagctactgcctcact

SEQ ID NO: 1949021 - DNA, 25 bp, Homo sapien
ttatcgatgaagcagaccaacaccc

SEQ ID NO: 1949022 - DNA, 25 bp, Homo sapien
cttacaagatggtggatgattcaca

SEQ ID NO: 1949023 - DNA, 25 bp, Homo sapien
tggaaacctgcaacctttttgtctg

SEQ ID NO: 1949024 - DNA, 25 bp, Homo sapien
tgagtgagcactatggagaaatgcc

SEQ ID NO: 1949025 - DNA, 25 bp, Homo sapien
ttcagccaggtaggaaatcctttat

SEQ ID NO: 1949026 - DNA, 25 bp, Homo sapien
gcttcagccaggtaggaaatccttt

SEQ ID NO: 1949027 - DNA, 25 bp, Homo sapien
cagcttcagccaggtaggaaatcct

SEQ ID NO: 1949028 - DNA, 25 bp, Homo sapien
cttcagccaggtaggaaatccttta

SEQ ID NO: 1949029 - DNA, 25 bp, Homo sapien
tcccggaggccgatagtctttacca

SEQ ID NO: 1949030 - DNA, 25 bp, Homo sapien
ctcaacactcatgagaaactcactc

SEQ ID NO: 1949031 - DNA, 25 bp, Homo sapien
caacactcatgagaaactcactcaa

SEQ ID NO: 1949032 - DNA, 25 bp, Homo sapien
aacactcatgagaaactcactcaaa

SEQ ID NO: 1949033 - DNA, 25 bp, Homo sapien
tcaacactcatgagaaactcactca

SEQ ID NO: 1949034 - DNA, 25 bp, Homo sapien
gatgggggaaggctgcaagctgagc

SEQ ID NO: 1949035 - DNA, 25 bp, Homo sapien
atgggggaaggctgcaagctgagcg

SEQ ID NO: 1949036 - DNA, 25 bp, Homo sapien
taaaagatccttctcatctattacc

SEQ ID NO: 1949037 - DNA, 25 bp, Homo sapien
tgtgtgctttcatacacctcacttc

SEQ ID NO: 1949038 - DNA, 25 bp, Homo sapien
tcctaggcatgatatacttgtctgt

SEQ ID NO: 1949039 - DNA, 25 bp, Homo sapien
acaaggtaatatgcttcgcaaacaa

SEQ ID NO: 1949040 - DNA, 25 bp, Homo sapien
ttgtatttggctggattgcaaactc

SEQ ID NO: 1949041 - DNA, 25 bp, Homo sapien
agttgtatttggctggattgcaaac

SEQ ID NO: 1949042 - DNA, 25 bp, Homo sapien
ctgatcaaaaagctgttttccagtt

SEQ ID NO: 1949043 - DNA, 25 bp, Homo sapien
tccagttgtatttggctggattgca

SEQ ID NO: 1949044 - DNA, 25 bp, Homo sapien
tgagccttacgacagccaagggagg

SEQ ID NO: 1949045 - DNA, 25 bp, Homo sapien
gatcacagctcactagtcatgatct

SEQ ID NO: 1949046 - DNA, 25 bp, Homo sapien
tctcatatgagccttacgacagcca

SEQ ID NO: 1949047 - DNA, 25 bp, Homo sapien
aggctcacacgaacgcctcccacct

SEQ ID NO: 1949048 - DNA, 25 bp, Homo sapien
tgttccatggccacagactacagga

SEQ ID NO: 1949049 - DNA, 25 bp, Homo sapien
gctagtgggcacctaacatgttcat

SEQ ID NO: 1949050 - DNA, 25 bp, Homo sapien
gttattacaggttagctcagctcga

SEQ ID NO: 1949051 - DNA, 25 bp, Homo sapien
gctcgaacttactatactacaggat

SEQ ID NO: 1949052 - DNA, 25 bp, Homo sapien
tatggccagctgtaccttatatgca

SEQ ID NO: 1949053 - DNA, 25 bp, Homo sapien
gatacaccagggaataaggcaggac

SEQ ID NO: 1949054 - DNA, 25 bp, Homo sapien
taattcggtcaaggcaggcaaagca

SEQ ID NO: 1949055 - DNA, 25 bp, Homo sapien
tataaatacatgacgctaggctggg

SEQ ID NO: 1949056 - DNA, 25 bp, Homo sapien
tgacgcacaaaagtcactggccagg

SEQ ID NO: 1949057 - DNA, 25 bp, Homo sapien
aggtggcagagttccgagtacagac

SEQ ID NO: 1949058 - DNA, 25 bp, Homo sapien
ccaggaacatgacgcacaaaagtca

SEQ ID NO: 1949059 - DNA, 25 bp, Homo sapien
ggaacatgacgcacaaaagtcactg

SEQ ID NO: 1949060 - DNA, 25 bp, Homo sapien
tgtgcgttgcgacagctgttgttcc

SEQ ID NO: 1949061 - DNA, 25 bp, Homo sapien
tgttagctgctgtgggacgtcctgg

SEQ ID NO: 1949062 - DNA, 25 bp, Homo sapien
gacactgtgcgttgcgacagctgtt

SEQ ID NO: 1949063 - DNA, 25 bp, Homo sapien
cagacactgtgcgttgcgacagctg

SEQ ID NO: 1949064 - DNA, 25 bp, Homo sapien
gaatgacttagttgcctgtaggcag

SEQ ID NO: 1949065 - DNA, 25 bp, Homo sapien
tcttgccaggtgtaaagggcattca

SEQ ID NO: 1949066 - DNA, 25 bp, Homo sapien
aaaaggctttcggtacagtcactgt

SEQ ID NO: 1949067 - DNA, 25 bp, Homo sapien
tggaaaaccaagtagctgtagctag

SEQ ID NO: 1949068 - DNA, 25 bp, Homo sapien
ccagtagatgccccttattttgttc

SEQ ID NO: 1949069 - DNA, 25 bp, Homo sapien
cagtagatgccccttattttgttca

SEQ ID NO: 1949070 - DNA, 25 bp, Homo sapien
tctcacccaaacagcaatggattat

SEQ ID NO: 1949071 - DNA, 25 bp, Homo sapien
tttaactgaggcaatgaaacacacc

SEQ ID NO: 1949072 - DNA, 25 bp, Homo sapien
ttgccttgttcagccacgttctaaa

SEQ ID NO: 1949073 - DNA, 25 bp, Homo sapien
taaatccatttaagagtctcaccca

SEQ ID NO: 1949074 - DNA, 25 bp, Homo sapien
taaaatactatcaaaacaatcattt

SEQ ID NO: 1949075 - DNA, 25 bp, Homo sapien
gaagtaatggtgcaataggtaaaat

SEQ ID NO: 1949076 - DNA, 25 bp, Homo sapien
aaatactatcaaaacaatcatttcc

SEQ ID NO: 1949077 - DNA, 25 bp, Homo sapien
cagatgaagtaatggtgcaataggt

SEQ ID NO: 1949078 - DNA, 25 bp, Homo sapien
gggcacgcaggatcttgtttacaga

SEQ ID NO: 1949079 - DNA, 25 bp, Homo sapien
cactaggaggcaggtatgtttacct

SEQ ID NO: 1949080 - DNA, 25 bp, Homo sapien
aggtacaagtggaaccgcacagccc

SEQ ID NO: 1949081 - DNA, 25 bp, Homo sapien
ttgcccaagattacccactaggagg

SEQ ID NO: 1949082 - DNA, 25 bp, Homo sapien
caaaattaggttgcagaagtgactt

SEQ ID NO: 1949083 - DNA, 25 bp, Homo sapien
gaaatgacaactgtccacacaggca

SEQ ID NO: 1949084 - DNA, 25 bp, Homo sapien
cagactcggccctaagatgatagtt

SEQ ID NO: 1949085 - DNA, 25 bp, Homo sapien
tgactactagagtttgatcctcagg

SEQ ID NO: 1949086 - DNA, 25 bp, Homo sapien
tctaagtcacattatagcacaaggg

SEQ ID NO: 1949087 - DNA, 25 bp, Homo sapien
taactcccattttacggctgacgaa

SEQ ID NO: 1949088 - DNA, 25 bp, Homo sapien
caggcatggatggtaaatacatcag

SEQ ID NO: 1949089 - DNA, 25 bp, Homo sapien
gacgaaatttaggttcacagatgct

SEQ ID NO: 1949090 - DNA, 25 bp, Homo sapien
caatgatctgagcaccaactcctac

SEQ ID NO: 1949091 - DNA, 25 bp, Homo sapien
gcagagaggatgcttccgggaccaa

SEQ ID NO: 1949092 - DNA, 25 bp, Homo sapien
ttccgggaccaatgatctgagcacc

SEQ ID NO: 1949093 - DNA, 25 bp, Homo sapien
gatgcttccgggaccaatgatctga

SEQ ID NO: 1949094 - DNA, 25 bp, Homo sapien
ggtgagtatcctcgatccccgaaaa

SEQ ID NO: 1949095 - DNA, 25 bp, Homo sapien
agcagcagcgaagacgctgtcccaa

SEQ ID NO: 1949096 - DNA, 25 bp, Homo sapien
cgaaaacacgactatccagcagcag

SEQ ID NO: 1949097 - DNA, 25 bp, Homo sapien
tttcggtttctggtgagtatcctcg

SEQ ID NO: 1949098 - DNA, 25 bp, Homo sapien
tggagtcagagcagaacccttagag

SEQ ID NO: 1949099 - DNA, 25 bp, Homo sapien
agagcagaacccttagagcgcccgc

SEQ ID NO: 1949100 - DNA, 25 bp, Homo sapien
gtcagagcagaacccttagagcgcc

SEQ ID NO: 1949101 - DNA, 25 bp, Homo sapien
tcgtcctcctgccgcgcccgacact

SEQ ID NO: 1949102 - DNA, 25 bp, Homo sapien
cccgccgcccttgcgtccgccgagt

SEQ ID NO: 1949103 - DNA, 25 bp, Homo sapien
gctccgtgtgctccccgccgccctt

SEQ ID NO: 1949104 - DNA, 25 bp, Homo sapien
tcgctgcccgcgctcccaaaagccc

SEQ ID NO: 1949105 - DNA, 25 bp, Homo sapien
ttgcgtccgccgagtgcgctcgctg

SEQ ID NO: 1949106 - DNA, 25 bp, Homo sapien
cagcttactttcaaaggcacggcca

SEQ ID NO: 1949107 - DNA, 25 bp, Homo sapien
tctgccccattgttgtggctgtgag

SEQ ID NO: 1949108 - DNA, 25 bp, Homo sapien
agtgagcacctctgacggctccaca

SEQ ID NO: 1949109 - DNA, 25 bp, Homo sapien
cagggttggtggaatgaccaccaca

SEQ ID NO: 1949110 - DNA, 25 bp, Homo sapien
caagaacccttgtttccactccaag

SEQ ID NO: 1949111 - DNA, 25 bp, Homo sapien
gagtaaccgggcagcatagccttgc

SEQ ID NO: 1949112 - DNA, 25 bp, Homo sapien
ccactcagggagtcatacaagaacc

SEQ ID NO: 1949113 - DNA, 25 bp, Homo sapien
cgatggcccagcttgcctgtcgtgt

SEQ ID NO: 1949114 - DNA, 25 bp, Homo sapien
cttcaacgacatagctcaggacagg

SEQ ID NO: 1949115 - DNA, 25 bp, Homo sapien
ggcagtcagggagaagctaggacct

SEQ ID NO: 1949116 - DNA, 25 bp, Homo sapien
agctaggacctggaaccacgcccat

SEQ ID NO: 1949117 - DNA, 25 bp, Homo sapien
aacgacatagctcaggacagggcct

SEQ ID NO: 1949118 - DNA, 25 bp, Homo sapien
acactctagttaaaggcaaagcacc

SEQ ID NO: 1949119 - DNA, 25 bp, Homo sapien
tgaaaaagctcaataggacacaaac

SEQ ID NO: 1949120 - DNA, 25 bp, Homo sapien
gctcaataggacacaaacgaatcca

SEQ ID NO: 1949121 - DNA, 25 bp, Homo sapien
ttggtgcattccatcggtccaggaa

SEQ ID NO: 1949122 - DNA, 25 bp, Homo sapien
catcggtccaggaatatgaaaccta

SEQ ID NO: 1949123 - DNA, 25 bp, Homo sapien
accaccatcagagcatacacaatca

SEQ ID NO: 1949124 - DNA, 25 bp, Homo sapien
taatacattgttcatttactctgta

SEQ ID NO: 1949125 - DNA, 25 bp, Homo sapien
tcatagagccaatgcttggaggttc

SEQ ID NO: 1949126 - DNA, 25 bp, Homo sapien
cataaattattcctccagtgacgag

SEQ ID NO: 1949127 - DNA, 25 bp, Homo sapien
cgacagcacttgcagccagggcggc

SEQ ID NO: 1949128 - DNA, 25 bp, Homo sapien
cttcagcttcaggttgggacattcg

SEQ ID NO: 1949129 - DNA, 25 bp, Homo sapien
ttcagcttcaggttgggacattcga

SEQ ID NO: 1949130 - DNA, 25 bp, Homo sapien
ggccgacagcacttgcagccagggc

SEQ ID NO: 1949131 - DNA, 25 bp, Homo sapien
gaatgggacacggtacaaagtctcc

SEQ ID NO: 1949132 - DNA, 25 bp, Homo sapien
atgggacacggtacaaagtctccat

SEQ ID NO: 1949133 - DNA, 25 bp, Homo sapien
aagaatgggacacggtacaaagtct

SEQ ID NO: 1949134 - DNA, 25 bp, Homo sapien
ctaagaatgggacacggtacaaagt

SEQ ID NO: 1949135 - DNA, 25 bp, Homo sapien
catacttcagaacagaaggcccctg

SEQ ID NO: 1949136 - DNA, 25 bp, Homo sapien
atacttcagaacagaaggcccctgg

SEQ ID NO: 1949137 - DNA, 25 bp, Homo sapien
agtctcagctacctgaaggacagag

SEQ ID NO: 1949138 - DNA, 25 bp, Homo sapien
tctcagctacctgaaggacagaggt

SEQ ID NO: 1949139 - DNA, 25 bp, Homo sapien
gtctcagctacctgaaggacagagg

SEQ ID NO: 1949140 - DNA, 25 bp, Homo sapien
tcaaagagaactccctggaggctcc

SEQ ID NO: 1949141 - DNA, 25 bp, Homo sapien
ctcaaagagaactccctggaggctc

SEQ ID NO: 1949142 - DNA, 25 bp, Homo sapien
agtggcctccggctgaccaaagtgt

SEQ ID NO: 1949143 - DNA, 25 bp, Homo sapien
ttggtgttgcctacaatctccatag

SEQ ID NO: 1949144 - DNA, 25 bp, Homo sapien
ggtgttgcctacaatctccatagcc

SEQ ID NO: 1949145 - DNA, 25 bp, Homo sapien
gttgcctacaatctccatagccttc

SEQ ID NO: 1949146 - DNA, 25 bp, Homo sapien
ttatcccccgacactcccagatcgt

SEQ ID NO: 1949147 - DNA, 25 bp, Homo sapien
agcgcagtccgcagcgtcgtccgag

SEQ ID NO: 1949148 - DNA, 25 bp, Homo sapien
tacaggaacgcgcatctgcttagca

SEQ ID NO: 1949149 - DNA, 25 bp, Homo sapien
tccctcttcggaaggaagcgcagtc

SEQ ID NO: 1949150 - DNA, 25 bp, Homo sapien
gcttagcaggcgctgagcccttgag

SEQ ID NO: 1949151 - DNA, 25 bp, Homo sapien
ttctcttcatttctttttttctcca

SEQ ID NO: 1949152 - DNA, 25 bp, Homo sapien
tctcttcatttctttttttctccat

SEQ ID NO: 1949153 - DNA, 25 bp, Homo sapien
aggcacagtccttctagcccgttgg

SEQ ID NO: 1949154 - DNA, 25 bp, Homo sapien
acagtccttctagcccgttggagag

SEQ ID NO: 1949155 - DNA, 25 bp, Homo sapien
tctagcccgttggagagaggcctgt

SEQ ID NO: 1949156 - DNA, 25 bp, Homo sapien
tccttctagcccgttggagagaggc

SEQ ID NO: 1949157 - DNA, 25 bp, Homo sapien
catgtcccatggaacgctgtcggtc

SEQ ID NO: 1949158 - DNA, 25 bp, Homo sapien
gaagttattaggaccgccagtggga

SEQ ID NO: 1949159 - DNA, 25 bp, Homo sapien
caggagttcctacatgagcccaagg

SEQ ID NO: 1949160 - DNA, 25 bp, Homo sapien
cagttggacttctgtggactgcaca

SEQ ID NO: 1949161 - DNA, 25 bp, Homo sapien
attgcacaacacgagttttgtttcc

SEQ ID NO: 1949162 - DNA, 25 bp, Homo sapien
ttgcacaacacgagttttgtttccg

SEQ ID NO: 1949163 - DNA, 25 bp, Homo sapien
gaaggctttagactgtgttcccagc

SEQ ID NO: 1949164 - DNA, 25 bp, Homo sapien
tggttcggcctgcacgttagtcaca

SEQ ID NO: 1949165 - DNA, 25 bp, Homo sapien
gacatcgtcgtacctggctttgagc

SEQ ID NO: 1949166 - DNA, 25 bp, Homo sapien
tccggacatagacgtgccacatata

SEQ ID NO: 1949167 - DNA, 25 bp, Homo sapien
tagtcacagggtcagcgtctcgtgg

SEQ ID NO: 1949168 - DNA, 25 bp, Homo sapien
tcatccagggcaacttccgttcctg

SEQ ID NO: 1949169 - DNA, 25 bp, Homo sapien
tgttacacatttagcatagcctacg

SEQ ID NO: 1949170 - DNA, 25 bp, Homo sapien
caacttccgttcctgtaagcctcgt

SEQ ID NO: 1949171 - DNA, 25 bp, Homo sapien
tacaatgtttatcaagtccacagca

SEQ ID NO: 1949172 - DNA, 25 bp, Homo sapien
ggcttccggggcagtgaagtcccag

SEQ ID NO: 1949173 - DNA, 25 bp, Homo sapien
gcaggcttccggggcagtgaagtcc

SEQ ID NO: 1949174 - DNA, 25 bp, Homo sapien
ctcctgcaggcttccggggcagtga

SEQ ID NO: 1949175 - DNA, 25 bp, Homo sapien
ctgcaggcttccggggcagtgaagt

SEQ ID NO: 1949176 - DNA, 25 bp, Homo sapien
atctgtgttcccttggatgcatctg

SEQ ID NO: 1949177 - DNA, 25 bp, Homo sapien
gcggtgtggcaatctgtgttccctt

SEQ ID NO: 1949178 - DNA, 25 bp, Homo sapien
atggcccactgtcccgagccctctg

SEQ ID NO: 1949179 - DNA, 25 bp, Homo sapien
ttctctggcggtgtggcaatctgtg

SEQ ID NO: 1949180 - DNA, 25 bp, Homo sapien
tgcctgggaaactcttgcgggctgt

SEQ ID NO: 1949181 - DNA, 25 bp, Homo sapien
cggggctcgacagtcccctctgcct

SEQ ID NO: 1949182 - DNA, 25 bp, Homo sapien
cctgggaaactcttgcgggctgtct

SEQ ID NO: 1949183 - DNA, 25 bp, Homo sapien
tgggaaactcttgcgggctgtctgc

SEQ ID NO: 1949184 - DNA, 25 bp, Homo sapien
tattcttagatccttgggttattta

SEQ ID NO: 1949185 - DNA, 25 bp, Homo sapien
gagaatacccataaacccttcatct

SEQ ID NO: 1949186 - DNA, 25 bp, Homo sapien
aactgttatttcatttgcactgact

SEQ ID NO: 1949187 - DNA, 25 bp, Homo sapien
tgcactgacttagcttatatacttt

SEQ ID NO: 1949188 - DNA, 25 bp, Homo sapien
attccaaacagattagagaggcaca

SEQ ID NO: 1949189 - DNA, 25 bp, Homo sapien
taaaagtaccatattctgtattgag

SEQ ID NO: 1949190 - DNA, 25 bp, Homo sapien
tctgtattgagtattacttggcact

SEQ ID NO: 1949191 - DNA, 25 bp, Homo sapien
taatttggaaacaggcggagaatag

SEQ ID NO: 1949192 - DNA, 25 bp, Homo sapien
ttaaaaccgtgatgcctggactccg

SEQ ID NO: 1949193 - DNA, 25 bp, Homo sapien
cattttcaagagacgcggaagtcgg

SEQ ID NO: 1949194 - DNA, 25 bp, Homo sapien
gagaatcacacgagctagtccctag

SEQ ID NO: 1949195 - DNA, 25 bp, Homo sapien
tggctgcactttccgctaacttggg

SEQ ID NO: 1949196 - DNA, 25 bp, Homo sapien
gatagcctttactctaggttccaag

SEQ ID NO: 1949197 - DNA, 25 bp, Homo sapien
catttgagaccttgtcagaatggcc

SEQ ID NO: 1949198 - DNA, 25 bp, Homo sapien
taagcctttaccagaatgaattgaa

SEQ ID NO: 1949199 - DNA, 25 bp, Homo sapien
tagtcgtcttgtcgtctaagccttt

SEQ ID NO: 1949200 - DNA, 25 bp, Homo sapien
ttaacagccatagatcccaaaagtg

SEQ ID NO: 1949201 - DNA, 25 bp, Homo sapien
tatgccataatttctagtaacttcc

SEQ ID NO: 1949202 - DNA, 25 bp, Homo sapien
caaacaatgagggaggtatggacaa

SEQ ID NO: 1949203 - DNA, 25 bp, Homo sapien
aacttttcctagttatcaggaatca

SEQ ID NO: 1949204 - DNA, 25 bp, Homo sapien
caatgggattagatggattctcaag

SEQ ID NO: 1949205 - DNA, 25 bp, Homo sapien
tttagccaccttaatgggtatgaag

SEQ ID NO: 1949206 - DNA, 25 bp, Homo sapien
cttcaactcatttttaggacctgga

SEQ ID NO: 1949207 - DNA, 25 bp, Homo sapien
ccagtgtcatgtcataaatcattaa

SEQ ID NO: 1949208 - DNA, 25 bp, Homo sapien
aaaccctcattctggcaatctttgc

SEQ ID NO: 1949209 - DNA, 25 bp, Homo sapien
ctgataagctaggattttaatttac

SEQ ID NO: 1949210 - DNA, 25 bp, Homo sapien
tttattcctccattattgctctctt

SEQ ID NO: 1949211 - DNA, 25 bp, Homo sapien
ccattattgctctcttttgcattaa

SEQ ID NO: 1949212 - DNA, 25 bp, Homo sapien
tcagaagtgagtgattcaggccttc

SEQ ID NO: 1949213 - DNA, 25 bp, Homo sapien
gatttccttaagtgccctgaaccag

SEQ ID NO: 1949214 - DNA, 25 bp, Homo sapien
tggttgtgcagatccttaaggtcag

SEQ ID NO: 1949215 - DNA, 25 bp, Homo sapien
gctctataagtgttgggcatgcctt

SEQ ID NO: 1949216 - DNA, 25 bp, Homo sapien
gcgtgagaaacgtgcccagccaaat

SEQ ID NO: 1949217 - DNA, 25 bp, Homo sapien
ccactatgccttgccagtttattta

SEQ ID NO: 1949218 - DNA, 25 bp, Homo sapien
gttattggctaagcatctaccatag

SEQ ID NO: 1949219 - DNA, 25 bp, Homo sapien
taagcaaaggttataacaggcaggt

SEQ ID NO: 1949220 - DNA, 25 bp, Homo sapien
tgagaactgtccaacaatgttattg

SEQ ID NO: 1949221 - DNA, 25 bp, Homo sapien
tttgtctccctctaccataatcatg

SEQ ID NO: 1949222 - DNA, 25 bp, Homo sapien
tttttgaactgtgctcaccaaggtc

SEQ ID NO: 1949223 - DNA, 25 bp, Homo sapien
gcagcaagtcaaccttaccttaggg

SEQ ID NO: 1949224 - DNA, 25 bp, Homo sapien
caccaaggtcttttatggtcacgaa

SEQ ID NO: 1949225 - DNA, 25 bp, Homo sapien
gggtttcactgacacctagtggtta

SEQ ID NO: 1949226 - DNA, 25 bp, Homo sapien
cagccatggctattgaactacagaa

SEQ ID NO: 1949227 - DNA, 25 bp, Homo sapien
tgtgaggactcaagcccagtggtct

SEQ ID NO: 1949228 - DNA, 25 bp, Homo sapien
taggcctaggcattacggttaagaa

SEQ ID NO: 1949229 - DNA, 25 bp, Homo sapien
taggtaccaattcaacaccattagc

SEQ ID NO: 1949230 - DNA, 25 bp, Homo sapien
tatttagcttctgttaactcagtgt

SEQ ID NO: 1949231 - DNA, 25 bp, Homo sapien
ttagcttctgttaactcagtgttag

SEQ ID NO: 1949232 - DNA, 25 bp, Homo sapien
ttatttagcttctgttaactcagtg

SEQ ID NO: 1949233 - DNA, 25 bp, Homo sapien
caggaatgacaatttcaatatattt

SEQ ID NO: 1949234 - DNA, 25 bp, Homo sapien
tcagaaggttgccatgaggcctaag

SEQ ID NO: 1949235 - DNA, 25 bp, Homo sapien
gctccactgctaggctgtaaaaaac

SEQ ID NO: 1949236 - DNA, 25 bp, Homo sapien
taagctttctcacagcgacaatgcc

SEQ ID NO: 1949237 - DNA, 25 bp, Homo sapien
agctaatgtttgctggctgaccgaa

SEQ ID NO: 1949238 - DNA, 25 bp, Homo sapien
caaaaaaggcctagatagctcatac

SEQ ID NO: 1949239 - DNA, 25 bp, Homo sapien
tttgacaagataagagattgatgcc

SEQ ID NO: 1949240 - DNA, 25 bp, Homo sapien
taaccttgaaagatctaagacattc

SEQ ID NO: 1949241 - DNA, 25 bp, Homo sapien
aattccctatgctacagcacagtca

SEQ ID NO: 1949242 - DNA, 25 bp, Homo sapien
tggcccagtccattacacaaaaaga

SEQ ID NO: 1949243 - DNA, 25 bp, Homo sapien
ctttcagtagcacaacgtttaggca

SEQ ID NO: 1949244 - DNA, 25 bp, Homo sapien
gaaaagctatatggctgacagcact

SEQ ID NO: 1949245 - DNA, 25 bp, Homo sapien
taacagtgatctacctttgaggagg

SEQ ID NO: 1949246 - DNA, 25 bp, Homo sapien
cccctaaggacttcctcattgctgt

SEQ ID NO: 1949247 - DNA, 25 bp, Homo sapien
ctcccctaaggacttcctcattgct

SEQ ID NO: 1949248 - DNA, 25 bp, Homo sapien
tcctcccctaaggacttcctcattg

SEQ ID NO: 1949249 - DNA, 25 bp, Homo sapien
cttcctcccctaaggacttcctcat

SEQ ID NO: 1949250 - DNA, 25 bp, Homo sapien
gagactgatgtgtgtcttccccatg

SEQ ID NO: 1949251 - DNA, 25 bp, Homo sapien
tgttgttctttgtaggtagcctcca

SEQ ID NO: 1949252 - DNA, 25 bp, Homo sapien
tccagtgactctgtcattgctccag

SEQ ID NO: 1949253 - DNA, 25 bp, Homo sapien
caggctcatcctcgggttctggaga

SEQ ID NO: 1949254 - DNA, 25 bp, Homo sapien
gccatggaagaaatcctatctcaat

SEQ ID NO: 1949255 - DNA, 25 bp, Homo sapien
aagcactgttcttcccaccatgcta

SEQ ID NO: 1949256 - DNA, 25 bp, Homo sapien
tcaacttcattcattagccatggaa

SEQ ID NO: 1949257 - DNA, 25 bp, Homo sapien
gctatattccatggttttttcaact

SEQ ID NO: 1949258 - DNA, 25 bp, Homo sapien
ggtcagccaggtaacgctgtgcaaa

SEQ ID NO: 1949259 - DNA, 25 bp, Homo sapien
tgaggctgccaaaaacagacgggag

SEQ ID NO: 1949260 - DNA, 25 bp, Homo sapien
ctgtgcaaatgctcgggcggcgatt

SEQ ID NO: 1949261 - DNA, 25 bp, Homo sapien
aaagtagccactatccctgaggctg

SEQ ID NO: 1949262 - DNA, 25 bp, Homo sapien
gcctggtcaccgagaaaaagaatca

SEQ ID NO: 1949263 - DNA, 25 bp, Homo sapien
tcacagcatagtaagttaggcccct

SEQ ID NO: 1949264 - DNA, 25 bp, Homo sapien
cccaaataggtctggtgtgtcacca

SEQ ID NO: 1949265 - DNA, 25 bp, Homo sapien
gataggtattgagtaggatttccca

SEQ ID NO: 1949266 - DNA, 25 bp, Homo sapien
tttgaacataatatgctaactagcc

SEQ ID NO: 1949267 - DNA, 25 bp, Homo sapien
tgaacataatatgctaactagccaa

SEQ ID NO: 1949268 - DNA, 25 bp, Homo sapien
taatatgctaactagccaaaagact

SEQ ID NO: 1949269 - DNA, 25 bp, Homo sapien
gctaactagccaaaagactgcctaa

SEQ ID NO: 1949270 - DNA, 25 bp, Homo sapien
ggcccgcaggttagccagctcttct

SEQ ID NO: 1949271 - DNA, 25 bp, Homo sapien
ccagaagagactgctcaattgtctt

SEQ ID NO: 1949272 - DNA, 25 bp, Homo sapien
agttcttcatactcacgctgactgg

SEQ ID NO: 1949273 - DNA, 25 bp, Homo sapien
cttcaagtcgttgaacttcagcacg

SEQ ID NO: 1949274 - DNA, 25 bp, Homo sapien
ccttctagtatttgggtggccacat

SEQ ID NO: 1949275 - DNA, 25 bp, Homo sapien
ttctattatgcgatcagcaatttct

SEQ ID NO: 1949276 - DNA, 25 bp, Homo sapien
taaagagtggtgttggtggtctgtc

SEQ ID NO: 1949277 - DNA, 25 bp, Homo sapien
catatcaacttctattatgcgatca

SEQ ID NO: 1949278 - DNA, 25 bp, Homo sapien
catcttggaagggtacaaagtgaac

SEQ ID NO: 1949279 - DNA, 25 bp, Homo sapien
agtgacagtggtccaaggaaaacac

SEQ ID NO: 1949280 - DNA, 25 bp, Homo sapien
ctgaagtagtgacagtggtccaagg

SEQ ID NO: 1949281 - DNA, 25 bp, Homo sapien
tgaagtagtgacagtggtccaagga

SEQ ID NO: 1949282 - DNA, 25 bp, Homo sapien
caagcactgtctgatgaccaagatt

SEQ ID NO: 1949283 - DNA, 25 bp, Homo sapien
ctgtctcaggggtgcctgtgtggcc

SEQ ID NO: 1949284 - DNA, 25 bp, Homo sapien
tttctggcaagagccctcttcctag

SEQ ID NO: 1949285 - DNA, 25 bp, Homo sapien
ctagcctcccgttgtctctggagct

SEQ ID NO: 1949286 - DNA, 25 bp, Homo sapien
tcttcctagcctcccgttgtctctg

SEQ ID NO: 1949287 - DNA, 25 bp, Homo sapien
gggcttgttttctggcaagagccct

SEQ ID NO: 1949288 - DNA, 25 bp, Homo sapien
tccttctaggattccaacaacatga

SEQ ID NO: 1949289 - DNA, 25 bp, Homo sapien
tgttttaggtaagaaatccactgcc

SEQ ID NO: 1949290 - DNA, 25 bp, Homo sapien
tcttggatctgtaggccttttgcca

SEQ ID NO: 1949291 - DNA, 25 bp, Homo sapien
tctctgttcagctggataacttccg

SEQ ID NO: 1949292 - DNA, 25 bp, Homo sapien
acattctctctaacgtggatttgaa

SEQ ID NO: 1949293 - DNA, 25 bp, Homo sapien
cgtggatttgaatgctattattcat

SEQ ID NO: 1949294 - DNA, 25 bp, Homo sapien
ttctctctaacgtggatttgaatgc

SEQ ID NO: 1949295 - DNA, 25 bp, Homo sapien
tctaacgtggatttgaatgctatta

SEQ ID NO: 1949296 - DNA, 25 bp, Homo sapien
ctgtcaccatcctctatctccggaa

SEQ ID NO: 1949297 - DNA, 25 bp, Homo sapien
catcctctatctccggaactctttt

SEQ ID NO: 1949298 - DNA, 25 bp, Homo sapien
gtcaccatcctctatctccggaact

SEQ ID NO: 1949299 - DNA, 25 bp, Homo sapien
caccatcctctatctccggaactct

SEQ ID NO: 1949300 - DNA, 25 bp, Homo sapien
cagtggccctgtctggagtgcataa

SEQ ID NO: 1949301 - DNA, 25 bp, Homo sapien
tggccctgtctggagtgcataagtg

SEQ ID NO: 1949302 - DNA, 25 bp, Homo sapien
ccctgtctggagtgcataagtgtta

SEQ ID NO: 1949303 - DNA, 25 bp, Homo sapien
cctgtctggagtgcataagtgttac

SEQ ID NO: 1949304 - DNA, 25 bp, Homo sapien
ctcgaattacccttctgtcatacat

SEQ ID NO: 1949305 - DNA, 25 bp, Homo sapien
tatgtttccataatgcataggttct

SEQ ID NO: 1949306 - DNA, 25 bp, Homo sapien
ttccataatgcataggttcttcatc

SEQ ID NO: 1949307 - DNA, 25 bp, Homo sapien
tccataatgcataggttcttcatct

SEQ ID NO: 1949308 - DNA, 25 bp, Homo sapien
gtttccataatgcataggttcttca

SEQ ID NO: 1949309 - DNA, 25 bp, Homo sapien
tcttgattcacattagacttgtgtt

SEQ ID NO: 1949310 - DNA, 25 bp, Homo sapien
gaagactagtattcaaatgttctct

SEQ ID NO: 1949311 - DNA, 25 bp, Homo sapien
ccatttctgtatttgtgtaactgac

SEQ ID NO: 1949312 - DNA, 25 bp, Homo sapien
tatgatcacccaactaccaagaaat

SEQ ID NO: 1949313 - DNA, 25 bp, Homo sapien
tcacaggactagttccagagacagc

SEQ ID NO: 1949314 - DNA, 25 bp, Homo sapien
aatggcttggcaccagttctcgcag

SEQ ID NO: 1949315 - DNA, 25 bp, Homo sapien
tgtttggccacttcccacggatctg

SEQ ID NO: 1949316 - DNA, 25 bp, Homo sapien
tctcgcagtagtgagggaactctta

SEQ ID NO: 1949317 - DNA, 25 bp, Homo sapien
gttcaatcatcagtttgacaattcg

SEQ ID NO: 1949318 - DNA, 25 bp, Homo sapien
tgtactaggtgaacaaaagatgcaa

SEQ ID NO: 1949319 - DNA, 25 bp, Homo sapien
tacagtgatagacatctcttataga

SEQ ID NO: 1949320 - DNA, 25 bp, Homo sapien
ttagaaagagcgtttgaaataagca

SEQ ID NO: 1949321 - DNA, 25 bp, Homo sapien
acagcataagcagcttttttgccag

SEQ ID NO: 1949322 - DNA, 25 bp, Homo sapien
ggatggggtgcaagtatggaccaca

SEQ ID NO: 1949323 - DNA, 25 bp, Homo sapien
gcagaacttttatttcggcagagtg

SEQ ID NO: 1949324 - DNA, 25 bp, Homo sapien
ttttatttcggcagagtgcagccaa

SEQ ID NO: 1949325 - DNA, 25 bp, Homo sapien
cccgagaggtgcgatcagtcagcgc

SEQ ID NO: 1949326 - DNA, 25 bp, Homo sapien
tgcgtcaggctgtcccggtaacggc

SEQ ID NO: 1949327 - DNA, 25 bp, Homo sapien
taacggctgcgctggcagggcagtg

SEQ ID NO: 1949328 - DNA, 25 bp, Homo sapien
tgcgatcagtcagcgctgaggccat

SEQ ID NO: 1949329 - DNA, 25 bp, Homo sapien
ctgcctcgctttcggtggagcttgg

SEQ ID NO: 1949330 - DNA, 25 bp, Homo sapien
gactgcctcgctttcggtggagctt

SEQ ID NO: 1949331 - DNA, 25 bp, Homo sapien
gtccgggggctgactgcctcgcttt

SEQ ID NO: 1949332 - DNA, 25 bp, Homo sapien
ggctgactgcctcgctttcggtgga

SEQ ID NO: 1949333 - DNA, 25 bp, Homo sapien
caagggcaaggattccgcgacgcga

SEQ ID NO: 1949334 - DNA, 25 bp, Homo sapien
cgcgacgcgaggagaggcgacaaca

SEQ ID NO: 1949335 - DNA, 25 bp, Homo sapien
agaggcgacaacaagggaggcgggc

SEQ ID NO: 1949336 - DNA, 25 bp, Homo sapien
ggacccggagagatgtaagtagtgc

SEQ ID NO: 1949337 - DNA, 25 bp, Homo sapien
tgcgctttgcgaggttcctggctag

SEQ ID NO: 1949338 - DNA, 25 bp, Homo sapien
ggttgcccagcaacccagggttctg

SEQ ID NO: 1949339 - DNA, 25 bp, Homo sapien
acccaggtaggtgcgcctgcgcttt

SEQ ID NO: 1949340 - DNA, 25 bp, Homo sapien
gaaggactgcggcacaagggacttc

SEQ ID NO: 1949341 - DNA, 25 bp, Homo sapien
tggtgttggcgccattctcgcaggc

SEQ ID NO: 1949342 - DNA, 25 bp, Homo sapien
tccagggtgtcctcggctgtttctc

SEQ ID NO: 1949343 - DNA, 25 bp, Homo sapien
cccggctttggaatgtggctttgca

SEQ ID NO: 1949344 - DNA, 25 bp, Homo sapien
tccttggcccggctttggaatgtgg

SEQ ID NO: 1949345 - DNA, 25 bp, Homo sapien
ctgccgcggcgcagcagcgctccca

SEQ ID NO: 1949346 - DNA, 25 bp, Homo sapien
gccgcggcgcagcagcgctcccagg

SEQ ID NO: 1949347 - DNA, 25 bp, Homo sapien
tgccgcggcgcagcagcgctcccag

SEQ ID NO: 1949348 - DNA, 25 bp, Homo sapien
tgcccccgcgataacacgcccctgg

SEQ ID NO: 1949349 - DNA, 25 bp, Homo sapien
cccgcgataacacgcccctggcagc

SEQ ID NO: 1949350 - DNA, 25 bp, Homo sapien
ctgcccccgcgataacacgcccctg

SEQ ID NO: 1949351 - DNA, 25 bp, Homo sapien
cccccgcgataacacgcccctggca

SEQ ID NO: 1949352 - DNA, 25 bp, Homo sapien
atcggaggacccttggcacacggag

SEQ ID NO: 1949353 - DNA, 25 bp, Homo sapien
gctagcaatcggaggacccttggca

SEQ ID NO: 1949354 - DNA, 25 bp, Homo sapien
cgctgtgtgctagcaatcggaggac

SEQ ID NO: 1949355 - DNA, 25 bp, Homo sapien
acccttggcacacggagcgacaggg

SEQ ID NO: 1949356 - DNA, 25 bp, Homo sapien
gggtggttcctgtgccttcagggat

SEQ ID NO: 1949357 - DNA, 25 bp, Homo sapien
gtgccttcagggatggcagcattgt

SEQ ID NO: 1949358 - DNA, 25 bp, Homo sapien
ggttcctgtgccttcagggatggca

SEQ ID NO: 1949359 - DNA, 25 bp, Homo sapien
ttatggggtggttcctgtgccttca

SEQ ID NO: 1949360 - DNA, 25 bp, Homo sapien
gatattgtgattgtagggcacctgc

SEQ ID NO: 1949361 - DNA, 25 bp, Homo sapien
ttttgatattgtgattgtagggcac

SEQ ID NO: 1949362 - DNA, 25 bp, Homo sapien
tattgtgattgtagggcacctgcat

SEQ ID NO: 1949363 - DNA, 25 bp, Homo sapien
tgatattgtgattgtagggcacctg

SEQ ID NO: 1949364 - DNA, 25 bp, Homo sapien
attcttgagctgaggtgtctgcatg

SEQ ID NO: 1949365 - DNA, 25 bp, Homo sapien
tgtctgcatggctgcgaaggtccgg

SEQ ID NO: 1949366 - DNA, 25 bp, Homo sapien
tcagaggtaattcttgagctgaggt

SEQ ID NO: 1949367 - DNA, 25 bp, Homo sapien
gcgaaggtccggtggcagggtgtgt

SEQ ID NO: 1949368 - DNA, 25 bp, Homo sapien
tacatgcccaaatttacagactgtt

SEQ ID NO: 1949369 - DNA, 25 bp, Homo sapien
tagcaacaccaggttagcagtttga

SEQ ID NO: 1949370 - DNA, 25 bp, Homo sapien
gactgttttgctacttgaatctgcc

SEQ ID NO: 1949371 - DNA, 25 bp, Homo sapien
gatcttttttgggtctacatgccca

SEQ ID NO: 1949372 - DNA, 25 bp, Homo sapien
cacttctctgataccaatttcctat

SEQ ID NO: 1949373 - DNA, 25 bp, Homo sapien
cctcatctccctctaagacctcctt

SEQ ID NO: 1949374 - DNA, 25 bp, Homo sapien
caaaccacctcttcggaaatgcata

SEQ ID NO: 1949375 - DNA, 25 bp, Homo sapien
tatcaaaccacctcttcggaaatgc

SEQ ID NO: 1949376 - DNA, 25 bp, Homo sapien
tttaattgactcacaattctgcagg

SEQ ID NO: 1949377 - DNA, 25 bp, Homo sapien
aattgactcacaattctgcaggctg

SEQ ID NO: 1949378 - DNA, 25 bp, Homo sapien
taattgactcacaattctgcaggct

SEQ ID NO: 1949379 - DNA, 25 bp, Homo sapien
ttaattgactcacaattctgcaggc

SEQ ID NO: 1949380 - DNA, 25 bp, Homo sapien
cccaaaagtgttgagtgtcgcttaa

SEQ ID NO: 1949381 - DNA, 25 bp, Homo sapien
gaaatgccagctttacataccaaag

SEQ ID NO: 1949382 - DNA, 25 bp, Homo sapien
ttgaatcgtctatagtccccactga

SEQ ID NO: 1949383 - DNA, 25 bp, Homo sapien
ggtaggtctattcaagctccagttc

SEQ ID NO: 1949384 - DNA, 25 bp, Homo sapien
tgcttgttgagtgaaccaatatgtg

SEQ ID NO: 1949385 - DNA, 25 bp, Homo sapien
gatccccggtcttgctattagtcta

SEQ ID NO: 1949386 - DNA, 25 bp, Homo sapien
tcttaataatcgaacagtaaagctc

SEQ ID NO: 1949387 - DNA, 25 bp, Homo sapien
attgagggaaaggagttaacatgtc

SEQ ID NO: 1949388 - DNA, 25 bp, Homo sapien
tcatgatttttgctacggccccagc

SEQ ID NO: 1949389 - DNA, 25 bp, Homo sapien
tagcacaagctatggcatggcgtat

SEQ ID NO: 1949390 - DNA, 25 bp, Homo sapien
gagactatctgatgcgccatggcca

SEQ ID NO: 1949391 - DNA, 25 bp, Homo sapien
taatgcctttgatgactccagacac

SEQ ID NO: 1949392 - DNA, 25 bp, Homo sapien
gctacatcgtcgcacgagacagtcc

SEQ ID NO: 1949393 - DNA, 25 bp, Homo sapien
tcaaagaccggctggctacatcgtc

SEQ ID NO: 1949394 - DNA, 25 bp, Homo sapien
ctaaatatacgattctttggcatat

SEQ ID NO: 1949395 - DNA, 25 bp, Homo sapien
ctttggcatattggaattggtcagc

SEQ ID NO: 1949396 - DNA, 25 bp, Homo sapien
cccagaagcatggacagttctgctc

SEQ ID NO: 1949397 - DNA, 25 bp, Homo sapien
tgctctgtttccatcgctcaggcag

SEQ ID NO: 1949398 - DNA, 25 bp, Homo sapien
tgcacggactcggagacggtcctca

SEQ ID NO: 1949399 - DNA, 25 bp, Homo sapien
tcttgagtcctctacgtggtgagca

SEQ ID NO: 1949400 - DNA, 25 bp, Homo sapien
gccctgcatggcctcttcataagag

SEQ ID NO: 1949401 - DNA, 25 bp, Homo sapien
gaagccgcgggctgtttggttgtgg

SEQ ID NO: 1949402 - DNA, 25 bp, Homo sapien
acatcatccaccgagagggcgtggg

SEQ ID NO: 1949403 - DNA, 25 bp, Homo sapien
ggctgtttggttgtgggtttcacac

SEQ ID NO: 1949404 - DNA, 25 bp, Homo sapien
caaaggtgaaagacatggagtgctt

SEQ ID NO: 1949405 - DNA, 25 bp, Homo sapien
cagagcccgcgctgaggtttttggt

SEQ ID NO: 1949406 - DNA, 25 bp, Homo sapien
ccattttcctgcacgattcggccgg

SEQ ID NO: 1949407 - DNA, 25 bp, Homo sapien
taaagtcttgcgatttcccagagcc

SEQ ID NO: 1949408 - DNA, 25 bp, Homo sapien
acgcgtccagcgagctgctggagaa

SEQ ID NO: 1949409 - DNA, 25 bp, Homo sapien
ctgtcagaggacgcgtccagcgagc

SEQ ID NO: 1949410 - DNA, 25 bp, Homo sapien
ttgagaaccagtgcccgcgggagca

SEQ ID NO: 1949411 - DNA, 25 bp, Homo sapien
tttgagaaccagtgcccgcgggagc

SEQ ID NO: 1949412 - DNA, 25 bp, Homo sapien
tgttggattccacatcagggtcgtt

SEQ ID NO: 1949413 - DNA, 25 bp, Homo sapien
tttggtttgtcacccggctctcgag

SEQ ID NO: 1949414 - DNA, 25 bp, Homo sapien
cacggtgctcacaatgggctctggg

SEQ ID NO: 1949415 - DNA, 25 bp, Homo sapien
tgggctctgagtatctcctatcggg

SEQ ID NO: 1949416 - DNA, 25 bp, Homo sapien
tcataccaatcagggcactaggtga

SEQ ID NO: 1949417 - DNA, 25 bp, Homo sapien
gcagaactacttaggggcttgatat

SEQ ID NO: 1949418 - DNA, 25 bp, Homo sapien
gaaatgaactttgctacagttcgcc

SEQ ID NO: 1949419 - DNA, 25 bp, Homo sapien
gatatgacaagaaatgtaccacatg

SEQ ID NO: 1949420 - DNA, 25 bp, Homo sapien
ttcattgtgatggagtcatatccca

SEQ ID NO: 1949421 - DNA, 25 bp, Homo sapien
tcatatcccatgaagtggaaacaaa

SEQ ID NO: 1949422 - DNA, 25 bp, Homo sapien
tcagcagtgatttgcgatgtacact

SEQ ID NO: 1949423 - DNA, 25 bp, Homo sapien
aaactgctccttttactggacccat

SEQ ID NO: 1949424 - DNA, 25 bp, Homo sapien
catcagaagtgatactggaatgcac

SEQ ID NO: 1949425 - DNA, 25 bp, Homo sapien
gagtcatcagaagtgatactggaat

SEQ ID NO: 1949426 - DNA, 25 bp, Homo sapien
gtgtgctccagggagtcatcagaag

SEQ ID NO: 1949427 - DNA, 25 bp, Homo sapien
tgtgctccagggagtcatcagaagt

SEQ ID NO: 1949428 - DNA, 25 bp, Homo sapien
gcttttttatatcgggagagagtga

SEQ ID NO: 1949429 - DNA, 25 bp, Homo sapien
catttaagtaagtagtgtcccagat

SEQ ID NO: 1949430 - DNA, 25 bp, Homo sapien
tgtcccagattgatagactgataga

SEQ ID NO: 1949431 - DNA, 25 bp, Homo sapien
gactgatagactgtggtgtacaaaa

SEQ ID NO: 1949432 - DNA, 25 bp, Homo sapien
tatctgagagagtggaactatgaca

SEQ ID NO: 1949433 - DNA, 25 bp, Homo sapien
gagtggaactatgacaaaagcattt

SEQ ID NO: 1949434 - DNA, 25 bp, Homo sapien
tcagtttcattagatacatgtatct

SEQ ID NO: 1949435 - DNA, 25 bp, Homo sapien
acagatggtgagatcataagttggg

SEQ ID NO: 1949436 - DNA, 25 bp, Homo sapien
ccaagtgcttgagtagcaggaggtt

SEQ ID NO: 1949437 - DNA, 25 bp, Homo sapien
catgttgggtccaatgcagatggcc

SEQ ID NO: 1949438 - DNA, 25 bp, Homo sapien
tgaggtgcagcacatagaccaagtg

SEQ ID NO: 1949439 - DNA, 25 bp, Homo sapien
gatggccagattgctggagtccatc

SEQ ID NO: 1949440 - DNA, 25 bp, Homo sapien
tgttgccttgcatgacaccagtcag

SEQ ID NO: 1949441 - DNA, 25 bp, Homo sapien
taagggcatgttcatataaggcggc

SEQ ID NO: 1949442 - DNA, 25 bp, Homo sapien
cacaattctcatggaacagggatca

SEQ ID NO: 1949443 - DNA, 25 bp, Homo sapien
tgtggcctggcaatgaccgatgact

SEQ ID NO: 1949444 - DNA, 25 bp, Homo sapien
tgtttcagggcctcgattctgtcct

SEQ ID NO: 1949445 - DNA, 25 bp, Homo sapien
ttcagggcctcgattctgtcctcct

SEQ ID NO: 1949446 - DNA, 25 bp, Homo sapien
agggcctcgattctgtcctcctcgt

SEQ ID NO: 1949447 - DNA, 25 bp, Homo sapien
tttcagggcctcgattctgtcctcc

SEQ ID NO: 1949448 - DNA, 25 bp, Homo sapien
tcctcaaagaggtcgcttgaaagta

SEQ ID NO: 1949449 - DNA, 25 bp, Homo sapien
aggtcgcttgaaagtagcttccggg

SEQ ID NO: 1949450 - DNA, 25 bp, Homo sapien
tcaaagaggtcgcttgaaagtagct

SEQ ID NO: 1949451 - DNA, 25 bp, Homo sapien
ccactcctcaaagaggtcgcttgaa

SEQ ID NO: 1949452 - DNA, 25 bp, Homo sapien
tgcatttgatgaatccagggaaccc

SEQ ID NO: 1949453 - DNA, 25 bp, Homo sapien
cgcagggtgctctatgcttagccca

SEQ ID NO: 1949454 - DNA, 25 bp, Homo sapien
ccggttttcgttccatcgcagggtg

SEQ ID NO: 1949455 - DNA, 25 bp, Homo sapien
tctgccacggaacaatcaaattgcc

SEQ ID NO: 1949456 - DNA, 25 bp, Homo sapien
gctctcctgaatatcccttccgttg

SEQ ID NO: 1949457 - DNA, 25 bp, Homo sapien
gatccaccgcatccccagagttgag

SEQ ID NO: 1949458 - DNA, 25 bp, Homo sapien
ttcagctccttacgggctttctcgt

SEQ ID NO: 1949459 - DNA, 25 bp, Homo sapien
cttaaagaccacagcgaggaggtgc

SEQ ID NO: 1949460 - DNA, 25 bp, Homo sapien
ctttaaggcatagaatagtgagaat

SEQ ID NO: 1949461 - DNA, 25 bp, Homo sapien
ttaaggcatagaatagtgagaatgt

SEQ ID NO: 1949462 - DNA, 25 bp, Homo sapien
taaggcatagaatagtgagaatgtc

SEQ ID NO: 1949463 - DNA, 25 bp, Homo sapien
tttaaggcatagaatagtgagaatg

SEQ ID NO: 1949464 - DNA, 25 bp, Homo sapien
tcaccgcagataattgacaagggct

SEQ ID NO: 1949465 - DNA, 25 bp, Homo sapien
gggagtgtgtcactgtcaccgcaga

SEQ ID NO: 1949466 - DNA, 25 bp, Homo sapien
tcaaatagcgatgctttcaagtctg

SEQ ID NO: 1949467 - DNA, 25 bp, Homo sapien
gggctgatcaaatagcgatgctttc

SEQ ID NO: 1949468 - DNA, 25 bp, Homo sapien
aggggagagccttctcatgagaaag

SEQ ID NO: 1949469 - DNA, 25 bp, Homo sapien
ttgcagccacgcaggcactaaacag

SEQ ID NO: 1949470 - DNA, 25 bp, Homo sapien
ttgatttcctcctttaactggcgaa

SEQ ID NO: 1949471 - DNA, 25 bp, Homo sapien
ttcgaaggcacatagcagggctggc

SEQ ID NO: 1949472 - DNA, 25 bp, Homo sapien
gccactagagggagctaacaccatt

SEQ ID NO: 1949473 - DNA, 25 bp, Homo sapien
cttacataaaagatcggtatgtttt

SEQ ID NO: 1949474 - DNA, 25 bp, Homo sapien
tagcacttacataaaagatcggtat

SEQ ID NO: 1949475 - DNA, 25 bp, Homo sapien
cacttacataaaagatcggtatgtt

SEQ ID NO: 1949476 - DNA, 25 bp, Homo sapien
agcacttacataaaagatcggtatg

SEQ ID NO: 1949477 - DNA, 25 bp, Homo sapien
acaggggatgttccttgatatcacc

SEQ ID NO: 1949478 - DNA, 25 bp, Homo sapien
tcactctcacatgatgccaacaggg

SEQ ID NO: 1949479 - DNA, 25 bp, Homo sapien
caatgagctggcaaatactgtcttc

SEQ ID NO: 1949480 - DNA, 25 bp, Homo sapien
gtcttcactctcacatgatgccaac

SEQ ID NO: 1949481 - DNA, 25 bp, Homo sapien
caccttctcacagtacagataaaaa

SEQ ID NO: 1949482 - DNA, 25 bp, Homo sapien
gcttctagaagcaatattaaggtct

SEQ ID NO: 1949483 - DNA, 25 bp, Homo sapien
tagtgactgaagaaacctatcgagt

SEQ ID NO: 1949484 - DNA, 25 bp, Homo sapien
ctatcgagtctttccccacaaaaca

SEQ ID NO: 1949485 - DNA, 25 bp, Homo sapien
gattagtgtctccatattattggcg

SEQ ID NO: 1949486 - DNA, 25 bp, Homo sapien
gtctccatattattggcgtttagtg

SEQ ID NO: 1949487 - DNA, 25 bp, Homo sapien
attcgattagtgtctccatattatt

SEQ ID NO: 1949488 - DNA, 25 bp, Homo sapien
tattattggcgtttagtgtttttga

SEQ ID NO: 1949489 - DNA, 25 bp, Homo sapien
agcattgtggctgcttctcagcttc

SEQ ID NO: 1949490 - DNA, 25 bp, Homo sapien
gcattgtggctgcttctcagcttca

SEQ ID NO: 1949491 - DNA, 25 bp, Homo sapien
cattgtggctgcttctcagcttcat

SEQ ID NO: 1949492 - DNA, 25 bp, Homo sapien
tgtccaggggtggatttcactcccg

SEQ ID NO: 1949493 - DNA, 25 bp, Homo sapien
tccaggggtggatttcactcccgtg

SEQ ID NO: 1949494 - DNA, 25 bp, Homo sapien
ccaggggtggatttcactcccgtgt

SEQ ID NO: 1949495 - DNA, 25 bp, Homo sapien
aggggtggatttcactcccgtgtgg

SEQ ID NO: 1949496 - DNA, 25 bp, Homo sapien
ggtctctagccagagttcttttaca

SEQ ID NO: 1949497 - DNA, 25 bp, Homo sapien
ccttggagggtctctagccagagtt

SEQ ID NO: 1949498 - DNA, 25 bp, Homo sapien
ggagggtctctagccagagttcttt

SEQ ID NO: 1949499 - DNA, 25 bp, Homo sapien
ttggagggtctctagccagagttct

SEQ ID NO: 1949500 - DNA, 25 bp, Homo sapien
ggagaaacagcataactctctgctc

SEQ ID NO: 1949501 - DNA, 25 bp, Homo sapien
agaaacagcataactctctgctcct

SEQ ID NO: 1949502 - DNA, 25 bp, Homo sapien
gagaaacagcataactctctgctcc

SEQ ID NO: 1949503 - DNA, 25 bp, Homo sapien
catgctctgcattataagcgaaggg

SEQ ID NO: 1949504 - DNA, 25 bp, Homo sapien
atcatgggctgtcacacggacggag

SEQ ID NO: 1949505 - DNA, 25 bp, Homo sapien
cagacactggagagctctcgcttcc

SEQ ID NO: 1949506 - DNA, 25 bp, Homo sapien
gagaccggaaagaacatcatgggct

SEQ ID NO: 1949507 - DNA, 25 bp, Homo sapien
tgattagcacccctggatgtgggac

SEQ ID NO: 1949508 - DNA, 25 bp, Homo sapien
gaacaatcaccgtccaaagccaggt

SEQ ID NO: 1949509 - DNA, 25 bp, Homo sapien
gacattcagcccataggtgaaggct

SEQ ID NO: 1949510 - DNA, 25 bp, Homo sapien
gagcagctgtcgttctgacacggaa

SEQ ID NO: 1949511 - DNA, 25 bp, Homo sapien
atcactgctatgggacccaggcagg

SEQ ID NO: 1949512 - DNA, 25 bp, Homo sapien
cttagctgcgttatcactgctatgg

SEQ ID NO: 1949513 - DNA, 25 bp, Homo sapien
gttatcactgctatgggacccaggc

SEQ ID NO: 1949514 - DNA, 25 bp, Homo sapien
agctgcgttatcactgctatgggac

SEQ ID NO: 1949515 - DNA, 25 bp, Homo sapien
tactcactactcatgtccgaggagc

SEQ ID NO: 1949516 - DNA, 25 bp, Homo sapien
gataactacggcatctgagaatagg

SEQ ID NO: 1949517 - DNA, 25 bp, Homo sapien
tatgggagaagcttttgaagccagc

SEQ ID NO: 1949518 - DNA, 25 bp, Homo sapien
aaaaagccaggttatcagatagaca

SEQ ID NO: 1949519 - DNA, 25 bp, Homo sapien
tgcttaactcagtgtcggtcatggc

SEQ ID NO: 1949520 - DNA, 25 bp, Homo sapien
caacttttctgttgcgttgcttaac

SEQ ID NO: 1949521 - DNA, 25 bp, Homo sapien
gaggttgggcattccttgttcaact

SEQ ID NO: 1949522 - DNA, 25 bp, Homo sapien
ggagaggttgggcattccttgttca

SEQ ID NO: 1949523 - DNA, 25 bp, Homo sapien
ttctaacttggaggaagccattctg

SEQ ID NO: 1949524 - DNA, 25 bp, Homo sapien
cagtcacaggattgcatgatatccc

SEQ ID NO: 1949525 - DNA, 25 bp, Homo sapien
gaaaatccatttgtgacgcccagtt

SEQ ID NO: 1949526 - DNA, 25 bp, Homo sapien
gactacaacgggagggacagttcaa

SEQ ID NO: 1949527 - DNA, 25 bp, Homo sapien
gaagtgggtgacttattgtatatca

SEQ ID NO: 1949528 - DNA, 25 bp, Homo sapien
gggtgacttattgtatatcaagtgc

SEQ ID NO: 1949529 - DNA, 25 bp, Homo sapien
agtgggtgacttattgtatatcaag

SEQ ID NO: 1949530 - DNA, 25 bp, Homo sapien
gtgacttattgtatatcaagtgctc

SEQ ID NO: 1949531 - DNA, 25 bp, Homo sapien
caatcatcttggctgtgaagaccat

SEQ ID NO: 1949532 - DNA, 25 bp, Homo sapien
atcaatcatcttggctgtgaagacc

SEQ ID NO: 1949533 - DNA, 25 bp, Homo sapien
cttatcaatcatcttggctgtgaag

SEQ ID NO: 1949534 - DNA, 25 bp, Homo sapien
tatcaatcatcttggctgtgaagac

SEQ ID NO: 1949535 - DNA, 25 bp, Homo sapien
ctttgtaaacctgtaattgaaactg

SEQ ID NO: 1949536 - DNA, 25 bp, Homo sapien
taaacctgtaattgaaactgctggc

SEQ ID NO: 1949537 - DNA, 25 bp, Homo sapien
gtaaacctgtaattgaaactgctgg

SEQ ID NO: 1949538 - DNA, 25 bp, Homo sapien
ttgtaaacctgtaattgaaactgct

SEQ ID NO: 1949539 - DNA, 25 bp, Homo sapien
tctgttcgactctgtagctcttgga

SEQ ID NO: 1949540 - DNA, 25 bp, Homo sapien
gaaactcggcgacacaagggtcaga

SEQ ID NO: 1949541 - DNA, 25 bp, Homo sapien
tcctaaactgatagtgagatcctgg

SEQ ID NO: 1949542 - DNA, 25 bp, Homo sapien
tgacagcctgcacgccagatagatg

SEQ ID NO: 1949543 - DNA, 25 bp, Homo sapien
tgacaaagcgttccctggcacacat

SEQ ID NO: 1949544 - DNA, 25 bp, Homo sapien
ccttggtgtgacaaagcgttccctg

SEQ ID NO: 1949545 - DNA, 25 bp, Homo sapien
gtgtgaggcgcttgtgaaggaacca

SEQ ID NO: 1949546 - DNA, 25 bp, Homo sapien
tggtgtgacaaagcgttccctggca

SEQ ID NO: 1949547 - DNA, 25 bp, Homo sapien
tacagagctgactcaatacgatgtg

SEQ ID NO: 1949548 - DNA, 25 bp, Homo sapien
caatacgatgtgtgggatcttccat

SEQ ID NO: 1949549 - DNA, 25 bp, Homo sapien
gactcaatacgatacagagctgact

SEQ ID NO: 1949550 - DNA, 25 bp, Homo sapien
tgcagagctgactcaatacgataca

SEQ ID NO: 1949551 - DNA, 25 bp, Homo sapien
gggaaacgctttggtctgcagttga

SEQ ID NO: 1949552 - DNA, 25 bp, Homo sapien
cctcagtgctgcgagcgaggcggcc

SEQ ID NO: 1949553 - DNA, 25 bp, Homo sapien
gtgagtaatagcagcgcagcccact

SEQ ID NO: 1949554 - DNA, 25 bp, Homo sapien
tgttaatcgaggctcttctggaacc

SEQ ID NO: 1949555 - DNA, 25 bp, Homo sapien
tggagtggacttccatgacatggtg

SEQ ID NO: 1949556 - DNA, 25 bp, Homo sapien
tggacttccatgacatggtgacatt

SEQ ID NO: 1949557 - DNA, 25 bp, Homo sapien
gacttccatgacatggtgacattga

SEQ ID NO: 1949558 - DNA, 25 bp, Homo sapien
agtggacttccatgacatggtgaca

SEQ ID NO: 1949559 - DNA, 25 bp, Homo sapien
cctgcctcctgactgctggtgagca

SEQ ID NO: 1949560 - DNA, 25 bp, Homo sapien
tgagcatgctgagtctgtttagagg

SEQ ID NO: 1949561 - DNA, 25 bp, Homo sapien
ctgagtctgtttagaggggcgactc

SEQ ID NO: 1949562 - DNA, 25 bp, Homo sapien
cctcctgactgctggtgagcatgct

SEQ ID NO: 1949563 - DNA, 25 bp, Homo sapien
accagcccgcggcccagagcctggc

SEQ ID NO: 1949564 - DNA, 25 bp, Homo sapien
tgagtgccctgggtaccagcccgcg

SEQ ID NO: 1949565 - DNA, 25 bp, Homo sapien
taccagcccgcggcccagagcctgg

SEQ ID NO: 1949566 - DNA, 25 bp, Homo sapien
ctgtgagtgccctgggtaccagccc

SEQ ID NO: 1949567 - DNA, 25 bp, Homo sapien
cgctcgcggagactgtgacaagtgt

SEQ ID NO: 1949568 - DNA, 25 bp, Homo sapien
tctgagccgtggcaggatttcccca

SEQ ID NO: 1949569 - DNA, 25 bp, Homo sapien
cggagactgtgacaagtgtgcgttc

SEQ ID NO: 1949570 - DNA, 25 bp, Homo sapien
caagtgtgcgttctgagccgtggca

SEQ ID NO: 1949571 - DNA, 25 bp, Homo sapien
gatgccagatgggttttgaattctt

SEQ ID NO: 1949572 - DNA, 25 bp, Homo sapien
aaaacaacatatcccgggctgggat

SEQ ID NO: 1949573 - DNA, 25 bp, Homo sapien
ctgaaaacaacatatcccgggctgg

SEQ ID NO: 1949574 - DNA, 25 bp, Homo sapien
tgccagatgggttttgaattctttg

SEQ ID NO: 1949575 - DNA, 25 bp, Homo sapien
aatgaccagccagtccctgaagagg

SEQ ID NO: 1949576 - DNA, 25 bp, Homo sapien
ctgtgaaggacaggctcagcgtgct

SEQ ID NO: 1949577 - DNA, 25 bp, Homo sapien
agggtcactgcggatgccaggctct

SEQ ID NO: 1949578 - DNA, 25 bp, Homo sapien
aagaggtgcctcctggtggtctcag

SEQ ID NO: 1949579 - DNA, 25 bp, Homo sapien
catggcttaggaagctctgacgtat

SEQ ID NO: 1949580 - DNA, 25 bp, Homo sapien
gacgtattcctttgattagcagaag

SEQ ID NO: 1949581 - DNA, 25 bp, Homo sapien
gccgcggctttggtgtaactcattt

SEQ ID NO: 1949582 - DNA, 25 bp, Homo sapien
cacacagaacggagagggtcaatgc

SEQ ID NO: 1949583 - DNA, 25 bp, Homo sapien
ctcctgttgcccttgaaacatgttc

SEQ ID NO: 1949584 - DNA, 25 bp, Homo sapien
tgtctggggccgatggtgaatttag

SEQ ID NO: 1949585 - DNA, 25 bp, Homo sapien
cacagcagtactagctctcgcaggc

SEQ ID NO: 1949586 - DNA, 25 bp, Homo sapien
tgctttaccgccactcctttccatt

SEQ ID NO: 1949587 - DNA, 25 bp, Homo sapien
aatttaggccatgaggggtctgtcc

SEQ ID NO: 1949588 - DNA, 25 bp, Homo sapien
atttgaataaagatgagttgggata

SEQ ID NO: 1949589 - DNA, 25 bp, Homo sapien
ttgaataaagatgagttgggatacg

SEQ ID NO: 1949590 - DNA, 25 bp, Homo sapien
tgaataaagatgagttgggatacgt

SEQ ID NO: 1949591 - DNA, 25 bp, Homo sapien
aataaagatgagttgggatacgttt

SEQ ID NO: 1949592 - DNA, 25 bp, Homo sapien
gaaataggaaacaagtgacgtggcg

SEQ ID NO: 1949593 - DNA, 25 bp, Homo sapien
tgacgtggcgaatacctggtgaacg

SEQ ID NO: 1949594 - DNA, 25 bp, Homo sapien
tggtgaacggaaacaactgtgccct

SEQ ID NO: 1949595 - DNA, 25 bp, Homo sapien
ctgctggtggcttcgcacagcgaaa

SEQ ID NO: 1949596 - DNA, 25 bp, Homo sapien
tacttagaccttcagccaagtctct

SEQ ID NO: 1949597 - DNA, 25 bp, Homo sapien
cattacttagaccttcagccaagtc

SEQ ID NO: 1949598 - DNA, 25 bp, Homo sapien
ggcattacttagaccttcagccaag

SEQ ID NO: 1949599 - DNA, 25 bp, Homo sapien
aggcattacttagaccttcagccaa

SEQ ID NO: 1949600 - DNA, 25 bp, Homo sapien
tccagcgccagtcggtgaccctcct

SEQ ID NO: 1949601 - DNA, 25 bp, Homo sapien
agcccgtggttctgccgcagcagcg

SEQ ID NO: 1949602 - DNA, 25 bp, Homo sapien
cagtcggtgaccctcctgcccatgc

SEQ ID NO: 1949603 - DNA, 25 bp, Homo sapien
tgcagggagcccgtggttctgccgc

SEQ ID NO: 1949604 - DNA, 25 bp, Homo sapien
ggtgattcgtgaacaacctgatgtt

SEQ ID NO: 1949605 - DNA, 25 bp, Homo sapien
tgggctgccacgtgtctgaggacaa

SEQ ID NO: 1949606 - DNA, 25 bp, Homo sapien
tgcatagttcctccgggcagcaggc

SEQ ID NO: 1949607 - DNA, 25 bp, Homo sapien
gggtgctgcttacacctgcatagtt

SEQ ID NO: 1949608 - DNA, 25 bp, Homo sapien
cgtgccttgcctaaaatcttgtcca

SEQ ID NO: 1949609 - DNA, 25 bp, Homo sapien
gtgccttgcctaaaatcttgtccag

SEQ ID NO: 1949610 - DNA, 25 bp, Homo sapien
gtgtacacacggctgtgtcggccat

SEQ ID NO: 1949611 - DNA, 25 bp, Homo sapien
tggtgtacacacggctgtgtcggcc

SEQ ID NO: 1949612 - DNA, 25 bp, Homo sapien
ggtgtacacacggctgtgtcggcca

SEQ ID NO: 1949613 - DNA, 25 bp, Homo sapien
ttccatgcagaaccctttgcagact

SEQ ID NO: 1949614 - DNA, 25 bp, Homo sapien
ttctgcagtcaacatcgcccagatt

SEQ ID NO: 1949615 - DNA, 25 bp, Homo sapien
tgcagtcaacatcgcccagattcca

SEQ ID NO: 1949616 - DNA, 25 bp, Homo sapien
caacatcgcccagattccatgcaga

SEQ ID NO: 1949617 - DNA, 25 bp, Homo sapien
tccacggggtcatccccagggggca

SEQ ID NO: 1949618 - DNA, 25 bp, Homo sapien
ccacggggtcatccccagggggcat

SEQ ID NO: 1949619 - DNA, 25 bp, Homo sapien
tgtttggctgttttgagctgtctgc

SEQ ID NO: 1949620 - DNA, 25 bp, Homo sapien
aagtaattcatcatagactcttctt

SEQ ID NO: 1949621 - DNA, 25 bp, Homo sapien
ctctgctaagtcacaaagtaattca

SEQ ID NO: 1949622 - DNA, 25 bp, Homo sapien
tcctctgctaagtcacaaagtaatt

SEQ ID NO: 1949623 - DNA, 25 bp, Homo sapien
tgagctgtcatttggcaacagttcc

SEQ ID NO: 1949624 - DNA, 25 bp, Homo sapien
catttggcaacagttccccatggag

SEQ ID NO: 1949625 - DNA, 25 bp, Homo sapien
gctgtcatttggcaacagttcccca

SEQ ID NO: 1949626 - DNA, 25 bp, Homo sapien
tcctgagctgtcatttggcaacagt

SEQ ID NO: 1949627 - DNA, 25 bp, Homo sapien
acgtccactggacgccctcggtgac

SEQ ID NO: 1949628 - DNA, 25 bp, Homo sapien
tgactgctgggcacatacgggggtc

SEQ ID NO: 1949629 - DNA, 25 bp, Homo sapien
aatcgtccgaccacgtccactggac

SEQ ID NO: 1949630 - DNA, 25 bp, Homo sapien
actggacgccctcggtgactgctgg

SEQ ID NO: 1949631 - DNA, 25 bp, Homo sapien
tttgtatcccagcagtaacctttct

SEQ ID NO: 1949632 - DNA, 25 bp, Homo sapien
tgtatcccagcagtaacctttctga

SEQ ID NO: 1949633 - DNA, 25 bp, Homo sapien
ttctttgtatcccagcagtaacctt

SEQ ID NO: 1949634 - DNA, 25 bp, Homo sapien
cccagcagtaacctttctgaaagtc

SEQ ID NO: 1949635 - DNA, 25 bp, Homo sapien
tgccaccagcgctgacgatttgcct

SEQ ID NO: 1949636 - DNA, 25 bp, Homo sapien
ctgacgatttgccttggcttggaaa

SEQ ID NO: 1949637 - DNA, 25 bp, Homo sapien
cccgtcaccaatggggctgcacgtg

SEQ ID NO: 1949638 - DNA, 25 bp, Homo sapien
tgccttggcttggaaagcagcaagc

SEQ ID NO: 1949639 - DNA, 25 bp, Homo sapien
tgtgcatccacactggaggcgaggc

SEQ ID NO: 1949640 - DNA, 25 bp, Homo sapien
tgcatccacactggaggcgaggcca

SEQ ID NO: 1949641 - DNA, 25 bp, Homo sapien
atatgtgcatccacactggaggcga

SEQ ID NO: 1949642 - DNA, 25 bp, Homo sapien
tatgtgcatccacactggaggcgag

SEQ ID NO: 1949643 - DNA, 25 bp, Homo sapien
ggcagtgagtgatacttcatctggg

SEQ ID NO: 1949644 - DNA, 25 bp, Homo sapien
aggcagtgagtgatacttcatctgg

SEQ ID NO: 1949645 - DNA, 25 bp, Homo sapien
tgcaagttgggagtggggtattcct

SEQ ID NO: 1949646 - DNA, 25 bp, Homo sapien
tgggagtggggtattcctgagtcat

SEQ ID NO: 1949647 - DNA, 25 bp, Homo sapien
agtaggcatttgtgcacctgcctaa

SEQ ID NO: 1949648 - DNA, 25 bp, Homo sapien
tgtgcacctgcctaagttgcgctca

SEQ ID NO: 1949649 - DNA, 25 bp, Homo sapien
cctgcctaagttgcgctcacagatc

SEQ ID NO: 1949650 - DNA, 25 bp, Homo sapien
catttgtgcacctgcctaagttgcg

SEQ ID NO: 1949651 - DNA, 25 bp, Homo sapien
tgagagggctgtgcaagtgtgtacc

SEQ ID NO: 1949652 - DNA, 25 bp, Homo sapien
agggctgtgcaagtgtgtaccttcc

SEQ ID NO: 1949653 - DNA, 25 bp, Homo sapien
gctgtgcaagtgtgtaccttcccca

SEQ ID NO: 1949654 - DNA, 25 bp, Homo sapien
tgcaagtgtgtaccttccccagcag

SEQ ID NO: 1949655 - DNA, 25 bp, Homo sapien
gagggattggtcactatctggatga

SEQ ID NO: 1949656 - DNA, 25 bp, Homo sapien
agttgtttgctaagagggattggtc

SEQ ID NO: 1949657 - DNA, 25 bp, Homo sapien
taagaacatgagtgatataacattg

SEQ ID NO: 1949658 - DNA, 25 bp, Homo sapien
taacattgaggtctcatgtagttgt

SEQ ID NO: 1949659 - DNA, 25 bp, Homo sapien
ttccctctgttcatagaatcctggg

SEQ ID NO: 1949660 - DNA, 25 bp, Homo sapien
ctgtgtccgatttattgagctcccc

SEQ ID NO: 1949661 - DNA, 25 bp, Homo sapien
ttctcccaggtcaaggcgaaactga

SEQ ID NO: 1949662 - DNA, 25 bp, Homo sapien
gagatggcagtgtcgacttgcctgc

SEQ ID NO: 1949663 - DNA, 25 bp, Homo sapien
gcggcgatcacaatatgcagatata

SEQ ID NO: 1949664 - DNA, 25 bp, Homo sapien
ggcgatcacaatatgcagatatatt

SEQ ID NO: 1949665 - DNA, 25 bp, Homo sapien
tatgcagatatattcaaatgtggtg

SEQ ID NO: 1949666 - DNA, 25 bp, Homo sapien
ctgcggcgatcacaatatgcagata

SEQ ID NO: 1949667 - DNA, 25 bp, Homo sapien
ggaagaaaacttccgtgtgctcata

SEQ ID NO: 1949668 - DNA, 25 bp, Homo sapien
gattttaatgactggccatccatcc

SEQ ID NO: 1949669 - DNA, 25 bp, Homo sapien
aacagatgactgactccgagttcca

SEQ ID NO: 1949670 - DNA, 25 bp, Homo sapien
atatttttgagatgaccacgttgag

SEQ ID NO: 1949671 - DNA, 25 bp, Homo sapien
tggccgctctccatgcgtggcttcc

SEQ ID NO: 1949672 - DNA, 25 bp, Homo sapien
ctggccgctctccatgcgtggcttc

SEQ ID NO: 1949673 - DNA, 25 bp, Homo sapien
gctctccatgcgtggcttccttctc

SEQ ID NO: 1949674 - DNA, 25 bp, Homo sapien
gccgctctccatgcgtggcttcctt

SEQ ID NO: 1949675 - DNA, 25 bp, Homo sapien
tggctactgcactggtgttcggtgg

SEQ ID NO: 1949676 - DNA, 25 bp, Homo sapien
ctactgcactggtgttcggtggccg

SEQ ID NO: 1949677 - DNA, 25 bp, Homo sapien
cctggctactgcactggtgttcggt

SEQ ID NO: 1949678 - DNA, 25 bp, Homo sapien
gctactgcactggtgttcggtggcc

SEQ ID NO: 1949679 - DNA, 25 bp, Homo sapien
tcctagagcttaggtcactgtagcc

SEQ ID NO: 1949680 - DNA, 25 bp, Homo sapien
agaactgacatagcgctgggcggtg

SEQ ID NO: 1949681 - DNA, 25 bp, Homo sapien
tgcagaacacaaatccggtcaagtt

SEQ ID NO: 1949682 - DNA, 25 bp, Homo sapien
gttatctctgcgaggacaccggtcg

SEQ ID NO: 1949683 - DNA, 25 bp, Homo sapien
ctgtgcgtcctcgtcactcgcgggt

SEQ ID NO: 1949684 - DNA, 25 bp, Homo sapien
agtgtcccgggagattcaggcacag

SEQ ID NO: 1949685 - DNA, 25 bp, Homo sapien
cccgccttggagtcgggaggctcca

SEQ ID NO: 1949686 - DNA, 25 bp, Homo sapien
cagcgcgctggcgtttaactttgcc

SEQ ID NO: 1949687 - DNA, 25 bp, Homo sapien
ttcacatcatacttaagttctaaag

SEQ ID NO: 1949688 - DNA, 25 bp, Homo sapien
atcatacttaagttctaaaggcccg

SEQ ID NO: 1949689 - DNA, 25 bp, Homo sapien
atatactctaccaagaccattcaca

SEQ ID NO: 1949690 - DNA, 25 bp, Homo sapien
gcatgatgaatatactctaccaaga

SEQ ID NO: 1949691 - DNA, 25 bp, Homo sapien
gggtgccgctggtgcctctgcaggc

SEQ ID NO: 1949692 - DNA, 25 bp, Homo sapien
tggctgcgtgttagcaaattcaaat

SEQ ID NO: 1949693 - DNA, 25 bp, Homo sapien
aattaagagtcgaaatggctgcgtg

SEQ ID NO: 1949694 - DNA, 25 bp, Homo sapien
aaaggacagatcactaattaagagt

SEQ ID NO: 1949695 - DNA, 25 bp, Homo sapien
ctgaggaaggacatctctggtcgag

SEQ ID NO: 1949696 - DNA, 25 bp, Homo sapien
aggaacagaccctgctgcacacgtg

SEQ ID NO: 1949697 - DNA, 25 bp, Homo sapien
tggttcgtgctaagtgctgctctgg

SEQ ID NO: 1949698 - DNA, 25 bp, Homo sapien
caggaatattcgaggtggttcgtgc

SEQ ID NO: 1949699 - DNA, 25 bp, Homo sapien
tccatagtgttggtggccaccgagg

SEQ ID NO: 1949700 - DNA, 25 bp, Homo sapien
gatccatagtgttggtggccaccga

SEQ ID NO: 1949701 - DNA, 25 bp, Homo sapien
tggccaccgagggagtgccataagg

SEQ ID NO: 1949702 - DNA, 25 bp, Homo sapien
cttgatccatagtgttggtggccac

SEQ ID NO: 1949703 - DNA, 25 bp, Homo sapien
gaggtcaggtagcagccaatcccag

SEQ ID NO: 1949704 - DNA, 25 bp, Homo sapien
aggtcaggtagcagccaatcccagt

SEQ ID NO: 1949705 - DNA, 25 bp, Homo sapien
agcagccaatcccagtactgcatga

SEQ ID NO: 1949706 - DNA, 25 bp, Homo sapien
caatcccagtactgcatgaggctct

SEQ ID NO: 1949707 - DNA, 25 bp, Homo sapien
cagctttttcagagccttccggtct

SEQ ID NO: 1949708 - DNA, 25 bp, Homo sapien
tacttcttggagcccaggacagctt

SEQ ID NO: 1949709 - DNA, 25 bp, Homo sapien
ctacttcttggagcccaggacagct

SEQ ID NO: 1949710 - DNA, 25 bp, Homo sapien
ccaggacagctttttcagagccttc

SEQ ID NO: 1949711 - DNA, 25 bp, Homo sapien
tcaggcttagttctgggctcagcat

SEQ ID NO: 1949712 - DNA, 25 bp, Homo sapien
gactcaggcttagttctgggctcag

SEQ ID NO: 1949713 - DNA, 25 bp, Homo sapien
tatgtgactatagagcaagccaatt

SEQ ID NO: 1949714 - DNA, 25 bp, Homo sapien
gaaataggcatgacagtttttagtt

SEQ ID NO: 1949715 - DNA, 25 bp, Homo sapien
ttgatgttttgtaaatcttgggttc

SEQ ID NO: 1949716 - DNA, 25 bp, Homo sapien
agatggaaacattagctatcacata

SEQ ID NO: 1949717 - DNA, 25 bp, Homo sapien
agaggatgatgcatgccagattccg

SEQ ID NO: 1949718 - DNA, 25 bp, Homo sapien
cccgatgctgtccttgcgccagagg

SEQ ID NO: 1949719 - DNA, 25 bp, Homo sapien
tgatgcatgccagattccgtaaccc

SEQ ID NO: 1949720 - DNA, 25 bp, Homo sapien
tgtccttgcgccagaggatgatgca

SEQ ID NO: 1949721 - DNA, 25 bp, Homo sapien
aggcgtccaacaaccacagtccgaa

SEQ ID NO: 1949722 - DNA, 25 bp, Homo sapien
cgcacgaccaccaggcgtccaacaa

SEQ ID NO: 1949723 - DNA, 25 bp, Homo sapien
atgcagcccaccactactacgacgc

SEQ ID NO: 1949724 - DNA, 25 bp, Homo sapien
ctgcctaccactacaaccccgaggc

SEQ ID NO: 1949725 - DNA, 25 bp, Homo sapien
gctgccagccggcttagtgtgccca

SEQ ID NO: 1949726 - DNA, 25 bp, Homo sapien
ctgccagccggcttagtgtgcccat

SEQ ID NO: 1949727 - DNA, 25 bp, Homo sapien
tcatccaagaaaatattttaagtac

SEQ ID NO: 1949728 - DNA, 25 bp, Homo sapien
catccaagaaaatattttaagtaca

SEQ ID NO: 1949729 - DNA, 25 bp, Homo sapien
taaggcccagttggcaaagcacagg

SEQ ID NO: 1949730 - DNA, 25 bp, Homo sapien
ttaaggcccagttggcaaagcacag

SEQ ID NO: 1949731 - DNA, 25 bp, Homo sapien
ttcatggagtccttcatcatgcttg

SEQ ID NO: 1949732 - DNA, 25 bp, Homo sapien
tcattcatggagtccttcatcatgc

SEQ ID NO: 1949733 - DNA, 25 bp, Homo sapien
ctgtcagggcaacagggcatttctg

SEQ ID NO: 1949734 - DNA, 25 bp, Homo sapien
gggatctctgcactactgtcagggc

SEQ ID NO: 1949735 - DNA, 25 bp, Homo sapien
ccagggatctctgcactactgtcag

SEQ ID NO: 1949736 - DNA, 25 bp, Homo sapien
gggcaacagggcatttctgtatcct

SEQ ID NO: 1949737 - DNA, 25 bp, Homo sapien
aagcacctccgctgtgttctccaga

SEQ ID NO: 1949738 - DNA, 25 bp, Homo sapien
accctcctgctgaacaagcacctcc

SEQ ID NO: 1949739 - DNA, 25 bp, Homo sapien
gggcatccactctctacctgtcttc

SEQ ID NO: 1949740 - DNA, 25 bp, Homo sapien
ggctccagtcgttttgtttggggca

SEQ ID NO: 1949741 - DNA, 25 bp, Homo sapien
tcatcatgaccatgggtgtcctggt

SEQ ID NO: 1949742 - DNA, 25 bp, Homo sapien
tcagggttgccgtctttgagcacaa

SEQ ID NO: 1949743 - DNA, 25 bp, Homo sapien
tgctggcggcaagctgatgcttcct

SEQ ID NO: 1949744 - DNA, 25 bp, Homo sapien
tatatgagggaagcatggtaggccc

SEQ ID NO: 1949745 - DNA, 25 bp, Homo sapien
tctagttcctgagctaaagtacagt

SEQ ID NO: 1949746 - DNA, 25 bp, Homo sapien
tccatcagggccaatcttcttatcc

SEQ ID NO: 1949747 - DNA, 25 bp, Homo sapien
aaatggtcctctagtgaaggcagac

SEQ ID NO: 1949748 - DNA, 25 bp, Homo sapien
caattcactttccatcagggccaat

SEQ ID NO: 1949749 - DNA, 25 bp, Homo sapien
taaggccacactcacagaaactggg

SEQ ID NO: 1949750 - DNA, 25 bp, Homo sapien
ggacacctaattcacgatgaccttg

SEQ ID NO: 1949751 - DNA, 25 bp, Homo sapien
ctcctctgtgcaggcataggagatg

SEQ ID NO: 1949752 - DNA, 25 bp, Homo sapien
agccttcttccctccgtttgtgtct

SEQ ID NO: 1949753 - DNA, 25 bp, Homo sapien
gccccctatttcagctatagcaaca

SEQ ID NO: 1949754 - DNA, 25 bp, Homo sapien
gaattgtgccccctatttcagctat

SEQ ID NO: 1949755 - DNA, 25 bp, Homo sapien
gcaacaagtatcttaaccccatgct

SEQ ID NO: 1949756 - DNA, 25 bp, Homo sapien
caacaagtatcttaaccccatgctc

SEQ ID NO: 1949757 - DNA, 25 bp, Homo sapien
ttctatactctcttaagcaagggca

SEQ ID NO: 1949758 - DNA, 25 bp, Homo sapien
caaaggcgtggagttggcacagtct

SEQ ID NO: 1949759 - DNA, 25 bp, Homo sapien
tgagcaccatatcatgtccttcccg

SEQ ID NO: 1949760 - DNA, 25 bp, Homo sapien
gaacagttccctcggtcttggagcc

SEQ ID NO: 1949761 - DNA, 25 bp, Homo sapien
gtcccatctgagtcttcctggctct

SEQ ID NO: 1949762 - DNA, 25 bp, Homo sapien
ctgtcccatctgagtcttcctggct

SEQ ID NO: 1949763 - DNA, 25 bp, Homo sapien
ggcacagcctctgtcccatctgagt

SEQ ID NO: 1949764 - DNA, 25 bp, Homo sapien
cctctgtcccatctgagtcttcctg

SEQ ID NO: 1949765 - DNA, 25 bp, Homo sapien
gagccatcattacttcacaaacaca

SEQ ID NO: 1949766 - DNA, 25 bp, Homo sapien
cttctgcctttccagaagagggcaa

SEQ ID NO: 1949767 - DNA, 25 bp, Homo sapien
ttcctcccatccttgctgtgtgagc

SEQ ID NO: 1949768 - DNA, 25 bp, Homo sapien
ttcacaaacacatctggcttcctct

SEQ ID NO: 1949769 - DNA, 25 bp, Homo sapien
ccacatgcacagtcaggtcagagat

SEQ ID NO: 1949770 - DNA, 25 bp, Homo sapien
agaaccagccacatgcacagtcagg

SEQ ID NO: 1949771 - DNA, 25 bp, Homo sapien
atgcacagtcaggtcagagatgggc

SEQ ID NO: 1949772 - DNA, 25 bp, Homo sapien
cacacagccagaaccagccacatgc

SEQ ID NO: 1949773 - DNA, 25 bp, Homo sapien
aatacatagaactgatgaggccacc

SEQ ID NO: 1949774 - DNA, 25 bp, Homo sapien
tgctccgcagttcccttgtggagcc

SEQ ID NO: 1949775 - DNA, 25 bp, Homo sapien
aactgatgaggccacccctggtggg

SEQ ID NO: 1949776 - DNA, 25 bp, Homo sapien
ctcccatgccgctgctccgcagttc

SEQ ID NO: 1949777 - DNA, 25 bp, Homo sapien
aatatccatgtcttgctggcaaaag

SEQ ID NO: 1949778 - DNA, 25 bp, Homo sapien
catctgtgacacctatagtcgagcc

SEQ ID NO: 1949779 - DNA, 25 bp, Homo sapien
tgtgacacctatagtcgagccaaca

SEQ ID NO: 1949780 - DNA, 25 bp, Homo sapien
acctatagtcgagccaacacttctg

SEQ ID NO: 1949781 - DNA, 25 bp, Homo sapien
gaactgtctggaatccaaagatggg

SEQ ID NO: 1949782 - DNA, 25 bp, Homo sapien
aagatgggccactgcccagaggaag

SEQ ID NO: 1949783 - DNA, 25 bp, Homo sapien
aaagatgggccactgcccagaggaa

SEQ ID NO: 1949784 - DNA, 25 bp, Homo sapien
gtctggaatccaaagatgggccact

SEQ ID NO: 1949785 - DNA, 25 bp, Homo sapien
acgcggactggaagcagagcttctc

SEQ ID NO: 1949786 - DNA, 25 bp, Homo sapien
agagcttctccttctttgtatttct

SEQ ID NO: 1949787 - DNA, 25 bp, Homo sapien
ctgcacgcggactggaagcagagct

SEQ ID NO: 1949788 - DNA, 25 bp, Homo sapien
tgcacgcggactggaagcagagctt

SEQ ID NO: 1949789 - DNA, 25 bp, Homo sapien
ctgatttaacccttgtctaggagca

SEQ ID NO: 1949790 - DNA, 25 bp, Homo sapien
tgatttaacccttgtctaggagcat

SEQ ID NO: 1949791 - DNA, 25 bp, Homo sapien
aaacccagacctggacatgggtgga

SEQ ID NO: 1949792 - DNA, 25 bp, Homo sapien
gaacagatgcatacaccatgtctaa

SEQ ID NO: 1949793 - DNA, 25 bp, Homo sapien
tcctctggacacatgagggctccaa

SEQ ID NO: 1949794 - DNA, 25 bp, Homo sapien
ggatatgatatctccaaacccagac

SEQ ID NO: 1949795 - DNA, 25 bp, Homo sapien
gaagcagccagtgggagtcaacatg

SEQ ID NO: 1949796 - DNA, 25 bp, Homo sapien
cagccagtgggagtcaacatgccct

SEQ ID NO: 1949797 - DNA, 25 bp, Homo sapien
cagtgggagtcaacatgccctgcat

SEQ ID NO: 1949798 - DNA, 25 bp, Homo sapien
tgggagtcaacatgccctgcataag

SEQ ID NO: 1949799 - DNA, 25 bp, Homo sapien
tgcaagacgctctggaatcacccgt

SEQ ID NO: 1949800 - DNA, 25 bp, Homo sapien
tcctccaaacgcgacgatgcaagac

SEQ ID NO: 1949801 - DNA, 25 bp, Homo sapien
cccagtcctacggttcaccgaggat

SEQ ID NO: 1949802 - DNA, 25 bp, Homo sapien
tcctacggttcaccgaggatgtcat

SEQ ID NO: 1949803 - DNA, 25 bp, Homo sapien
aaataatgcgaagtcacatcaggcg

SEQ ID NO: 1949804 - DNA, 25 bp, Homo sapien
cctctttagggcttaaaatgtctgc

SEQ ID NO: 1949805 - DNA, 25 bp, Homo sapien
ggcctggttctgttgtcctgttgaa

SEQ ID NO: 1949806 - DNA, 25 bp, Homo sapien
gccctgcaacatgcttaggttccct

SEQ ID NO: 1949807 - DNA, 25 bp, Homo sapien
caaggtcaatgcaccgtatcgccat

SEQ ID NO: 1949808 - DNA, 25 bp, Homo sapien
cactttggaaatttgtgacatcaca

SEQ ID NO: 1949809 - DNA, 25 bp, Homo sapien
tggctcctgcgtgtcagctgggact

SEQ ID NO: 1949810 - DNA, 25 bp, Homo sapien
gcagtggagctgtgcgcacagccca

SEQ ID NO: 1949811 - DNA, 25 bp, Homo sapien
cctctcgctggccacatgacagtga

SEQ ID NO: 1949812 - DNA, 25 bp, Homo sapien
agtgatgagcactctcatagtcacc

SEQ ID NO: 1949813 - DNA, 25 bp, Homo sapien
aaaaatggtgcatagactcagttgc

SEQ ID NO: 1949814 - DNA, 25 bp, Homo sapien
aaaaaatggtgcatagactcagttg

SEQ ID NO: 1949815 - DNA, 25 bp, Homo sapien
gccagtggacaggcaggtccaacat

SEQ ID NO: 1949816 - DNA, 25 bp, Homo sapien
aggccagtggacaggcaggtccaac

SEQ ID NO: 1949817 - DNA, 25 bp, Homo sapien
gcagaggccagtggacaggcaggtc

SEQ ID NO: 1949818 - DNA, 25 bp, Homo sapien
agaggccagtggacaggcaggtcca

SEQ ID NO: 1949819 - DNA, 25 bp, Homo sapien
ggtggaggatttctcggttctccag

SEQ ID NO: 1949820 - DNA, 25 bp, Homo sapien
cacacgcagtcttatctctgaatga

SEQ ID NO: 1949821 - DNA, 25 bp, Homo sapien
cataaccttctcgtaacctctgtag

SEQ ID NO: 1949822 - DNA, 25 bp, Homo sapien
aaaagaggagccgacatgacagtgg

SEQ ID NO: 1949823 - DNA, 25 bp, Homo sapien
gaatccatacgacatcctgggatcc

SEQ ID NO: 1949824 - DNA, 25 bp, Homo sapien
cttgaatccatacgacatcctggga

SEQ ID NO: 1949825 - DNA, 25 bp, Homo sapien
ttgaatccatacgacatcctgggat

SEQ ID NO: 1949826 - DNA, 25 bp, Homo sapien
aatccatacgacatcctgggatcca

SEQ ID NO: 1949827 - DNA, 25 bp, Homo sapien
ccacccttcgatggcctgctcagag

SEQ ID NO: 1949828 - DNA, 25 bp, Homo sapien
tcttttcttctcagcggcttcctgc

SEQ ID NO: 1949829 - DNA, 25 bp, Homo sapien
tgccacccttcgatggcctgctcag

SEQ ID NO: 1949830 - DNA, 25 bp, Homo sapien
ttcctgccacccttcgatggcctgc

SEQ ID NO: 1949831 - DNA, 25 bp, Homo sapien
ccgctcccaaatagtttcctctgta

SEQ ID NO: 1949832 - DNA, 25 bp, Homo sapien
gggctctctttgagcccatccaaga

SEQ ID NO: 1949833 - DNA, 25 bp, Homo sapien
agtgccacaggccagacagggctct

SEQ ID NO: 1949834 - DNA, 25 bp, Homo sapien
tctgtacgtttctctgtgtgggttt

SEQ ID NO: 1949835 - DNA, 25 bp, Homo sapien
gcctggcagcaaaactgggcacact

SEQ ID NO: 1949836 - DNA, 25 bp, Homo sapien
tggcagcaaaactgggcacactcat

SEQ ID NO: 1949837 - DNA, 25 bp, Homo sapien
cttcagttcttgcctggcagcaaaa

SEQ ID NO: 1949838 - DNA, 25 bp, Homo sapien
tcagttcttgcctggcagcaaaact

SEQ ID NO: 1949839 - DNA, 25 bp, Homo sapien
caccagcttgttcattggaatgcag

SEQ ID NO: 1949840 - DNA, 25 bp, Homo sapien
tagctgtcttcttacactctgtcag

SEQ ID NO: 1949841 - DNA, 25 bp, Homo sapien
taccagtccaggtggcaccagcttg

SEQ ID NO: 1949842 - DNA, 25 bp, Homo sapien
caggactagccaagtggcaaatggg

SEQ ID NO: 1949843 - DNA, 25 bp, Homo sapien
agagatgattcacctcacctggaga

SEQ ID NO: 1949844 - DNA, 25 bp, Homo sapien
gagatgattcacctcacctggagag

SEQ ID NO: 1949845 - DNA, 25 bp, Homo sapien
agatgattcacctcacctggagaga

SEQ ID NO: 1949846 - DNA, 25 bp, Homo sapien
tcctctgccgtgcaggagaaacagc

SEQ ID NO: 1949847 - DNA, 25 bp, Homo sapien
tctgccgtgcaggagaaacagcaat

SEQ ID NO: 1949848 - DNA, 25 bp, Homo sapien
ctctgccgtgcaggagaaacagcaa

SEQ ID NO: 1949849 - DNA, 25 bp, Homo sapien
gctcctctgccgtgcaggagaaaca

SEQ ID NO: 1949850 - DNA, 25 bp, Homo sapien
ttcgctgcggagcacccgaatcagt

SEQ ID NO: 1949851 - DNA, 25 bp, Homo sapien
caaaaggggcttcgctgcggagcac

SEQ ID NO: 1949852 - DNA, 25 bp, Homo sapien
ggagcacccgaatcagtgcagggca

SEQ ID NO: 1949853 - DNA, 25 bp, Homo sapien
ccgaatcagtgcagggcatcttgga

SEQ ID NO: 1949854 - DNA, 25 bp, Homo sapien
aggcatcaggttaatgttatcaaac

SEQ ID NO: 1949855 - DNA, 25 bp, Homo sapien
tagatttccccaacaccagtgggca

SEQ ID NO: 1949856 - DNA, 25 bp, Homo sapien
agtgcaggggtacattcatggcaga

SEQ ID NO: 1949857 - DNA, 25 bp, Homo sapien
tggtttcttctgagaccctaggcat

SEQ ID NO: 1949858 - DNA, 25 bp, Homo sapien
gtctgaaccttgtgctcagaggatg

SEQ ID NO: 1949859 - DNA, 25 bp, Homo sapien
caagtgctccttgttgcatataaac

SEQ ID NO: 1949860 - DNA, 25 bp, Homo sapien
atgaggacaggggtccttccactac

SEQ ID NO: 1949861 - DNA, 25 bp, Homo sapien
ctgcccatagccaagtgctccttgt

SEQ ID NO: 1949862 - DNA, 25 bp, Homo sapien
aacaaatgagggttctgtttgagga

SEQ ID NO: 1949863 - DNA, 25 bp, Homo sapien
tggagtctgaccaccttgcctctgg

SEQ ID NO: 1949864 - DNA, 25 bp, Homo sapien
tcacctggaacacaatgtgacatgt

SEQ ID NO: 1949865 - DNA, 25 bp, Homo sapien
gggagttgcagtccacggcagcaaa

SEQ ID NO: 1949866 - DNA, 25 bp, Homo sapien
tctggtaattgacacagagattgca

SEQ ID NO: 1949867 - DNA, 25 bp, Homo sapien
ggtctcttgaagcaaaatccacact

SEQ ID NO: 1949868 - DNA, 25 bp, Homo sapien
gatggccctggtgctctcacttggc

SEQ ID NO: 1949869 - DNA, 25 bp, Homo sapien
gatgactacactggaagagttcact

SEQ ID NO: 1949870 - DNA, 25 bp, Homo sapien
aaggcataatttccctttctggtct

SEQ ID NO: 1949871 - DNA, 25 bp, Homo sapien
ctggctggtccatcttagcttaggt

SEQ ID NO: 1949872 - DNA, 25 bp, Homo sapien
atcttagcttaggtcttatctctgc

SEQ ID NO: 1949873 - DNA, 25 bp, Homo sapien
ggtccatcttagcttaggtcttatc

SEQ ID NO: 1949874 - DNA, 25 bp, Homo sapien
tctgtgatgtactggctggtccatc

SEQ ID NO: 1949875 - DNA, 25 bp, Homo sapien
agaagcacgccggatgtgggcagtg

SEQ ID NO: 1949876 - DNA, 25 bp, Homo sapien
tgcacatgaagcagagtccactggg

SEQ ID NO: 1949877 - DNA, 25 bp, Homo sapien
tagaagagagaagcacgccggatgt

SEQ ID NO: 1949878 - DNA, 25 bp, Homo sapien
gagagaagcacgccggatgtgggca

SEQ ID NO: 1949879 - DNA, 25 bp, Homo sapien
atacacaggctacggagaagtcggc

SEQ ID NO: 1949880 - DNA, 25 bp, Homo sapien
gatatgaaagcctgagagtgccccg

SEQ ID NO: 1949881 - DNA, 25 bp, Homo sapien
gaagtcggccccttgcagatattgg

SEQ ID NO: 1949882 - DNA, 25 bp, Homo sapien
tcacaatttccaagtcattgggaag

SEQ ID NO: 1949883 - DNA, 25 bp, Homo sapien
gaaggcttgcattctttggcagagc

SEQ ID NO: 1949884 - DNA, 25 bp, Homo sapien
tgaaggcttgcattctttggcagag

SEQ ID NO: 1949885 - DNA, 25 bp, Homo sapien
gtgaaggcttgcattctttggcaga

SEQ ID NO: 1949886 - DNA, 25 bp, Homo sapien
gcttttcatggatgactattttcca

SEQ ID NO: 1949887 - DNA, 25 bp, Homo sapien
tgactattttccatgacctgcccct

SEQ ID NO: 1949888 - DNA, 25 bp, Homo sapien
catggttcctatgatgctgattcag

SEQ ID NO: 1949889 - DNA, 25 bp, Homo sapien
tccaggcttttcatggatgactatt

SEQ ID NO: 1949890 - DNA, 25 bp, Homo sapien
cagtaagtcctattctctccaaatg

SEQ ID NO: 1949891 - DNA, 25 bp, Homo sapien
ttctctccaaatgcaaatgcagctg

SEQ ID NO: 1949892 - DNA, 25 bp, Homo sapien
tctgcaagaagcaccgagggcagct

SEQ ID NO: 1949893 - DNA, 25 bp, Homo sapien
cctgggcttgagctgaagcatatgg

SEQ ID NO: 1949894 - DNA, 25 bp, Homo sapien
cacgatgatggcctcaatggttacc

SEQ ID NO: 1949895 - DNA, 25 bp, Homo sapien
caaaagagtctagccatggtcgtgg

SEQ ID NO: 1949896 - DNA, 25 bp, Homo sapien
gcaagactggcgtccccaaaagagt

SEQ ID NO: 1949897 - DNA, 25 bp, Homo sapien
tcatgaagctgtgtacttaggacag

SEQ ID NO: 1949898 - DNA, 25 bp, Homo sapien
gccttaatggcctcttgcccacaaa

SEQ ID NO: 1949899 - DNA, 25 bp, Homo sapien
cttcagggaaagtgttcacctgtag

SEQ ID NO: 1949900 - DNA, 25 bp, Homo sapien
tcctacattgtcttggggtctccat

SEQ ID NO: 1949901 - DNA, 25 bp, Homo sapien
agtgttcacctgtagccttaatggc

SEQ ID NO: 1949902 - DNA, 25 bp, Homo sapien
cccagtttgaccaagttgagccaga

SEQ ID NO: 1949903 - DNA, 25 bp, Homo sapien
gagcaaggcttgaagaacccaggaa

SEQ ID NO: 1949904 - DNA, 25 bp, Homo sapien
aaggagatgcagctttaactgggcc

SEQ ID NO: 1949905 - DNA, 25 bp, Homo sapien
gaacaatctcgcactttgacccaga

SEQ ID NO: 1949906 - DNA, 25 bp, Homo sapien
tgtatcctcggagactgtttggcat

SEQ ID NO: 1949907 - DNA, 25 bp, Homo sapien
gtttctgtgtatcctcggagactgt

SEQ ID NO: 1949908 - DNA, 25 bp, Homo sapien
agcaacaggtttgtccaacagccaa

SEQ ID NO: 1949909 - DNA, 25 bp, Homo sapien
gccaaagctttgcacgcccatttgt

SEQ ID NO: 1949910 - DNA, 25 bp, Homo sapien
ttatagatgttggaaatcagacctt

SEQ ID NO: 1949911 - DNA, 25 bp, Homo sapien
cttatagatgttggaaatcagacct

SEQ ID NO: 1949912 - DNA, 25 bp, Homo sapien
tcttatagatgttggaaatcagacc

SEQ ID NO: 1949913 - DNA, 25 bp, Homo sapien
actgtattccccgacattttgttct

SEQ ID NO: 1949914 - DNA, 25 bp, Homo sapien
tggtaggattagcattggatctgta

SEQ ID NO: 1949915 - DNA, 25 bp, Homo sapien
tagtttggtaggattagcattggat

SEQ ID NO: 1949916 - DNA, 25 bp, Homo sapien
gtagagaatcacctccctgattaac

SEQ ID NO: 1949917 - DNA, 25 bp, Homo sapien
tcaggctccttcccattggttctca

SEQ ID NO: 1949918 - DNA, 25 bp, Homo sapien
ttatgccatgaattaatagggaata

SEQ ID NO: 1949919 - DNA, 25 bp, Homo sapien
gttccagcagctcaggctccttccc

SEQ ID NO: 1949920 - DNA, 25 bp, Homo sapien
tatgccatgaattaatagggaatag

SEQ ID NO: 1949921 - DNA, 25 bp, Homo sapien
gcgctttagctgaacccaggtacct

SEQ ID NO: 1949922 - DNA, 25 bp, Homo sapien
gctggcgctttagctgaacccaggt

SEQ ID NO: 1949923 - DNA, 25 bp, Homo sapien
agcaggctggcgctttagctgaacc

SEQ ID NO: 1949924 - DNA, 25 bp, Homo sapien
gcaggctggcgctttagctgaaccc

SEQ ID NO: 1949925 - DNA, 25 bp, Homo sapien
ctggggaacatcgtagactcccagt

SEQ ID NO: 1949926 - DNA, 25 bp, Homo sapien
aacatcgtagactcccagttttgcc

SEQ ID NO: 1949927 - DNA, 25 bp, Homo sapien
ggaacatcgtagactcccagttttg

SEQ ID NO: 1949928 - DNA, 25 bp, Homo sapien
atggtgacacttgtggggcattcct

SEQ ID NO: 1949929 - DNA, 25 bp, Homo sapien
gtgttcgtcattttggcgaattacc

SEQ ID NO: 1949930 - DNA, 25 bp, Homo sapien
gcctagagaacatatgtcaggtgcc

SEQ ID NO: 1949931 - DNA, 25 bp, Homo sapien
cgtcattttggcgaattaccggaag

SEQ ID NO: 1949932 - DNA, 25 bp, Homo sapien
ttcgtcattttggcgaattaccgga

SEQ ID NO: 1949933 - DNA, 25 bp, Homo sapien
gccatagatggactcacaggatgtt

SEQ ID NO: 1949934 - DNA, 25 bp, Homo sapien
ctagccatagatggactcacaggat

SEQ ID NO: 1949935 - DNA, 25 bp, Homo sapien
catagatggactcacaggatgtttt

SEQ ID NO: 1949936 - DNA, 25 bp, Homo sapien
tagccatagatggactcacaggatg

SEQ ID NO: 1949937 - DNA, 25 bp, Homo sapien
catgcaccaggagggtatgtgacat

SEQ ID NO: 1949938 - DNA, 25 bp, Homo sapien
tagcatgcaccaggagggtatgtga

SEQ ID NO: 1949939 - DNA, 25 bp, Homo sapien
cagtagcatgcaccaggagggtatg

SEQ ID NO: 1949940 - DNA, 25 bp, Homo sapien
agacagtagcatgcaccaggagggt

SEQ ID NO: 1949941 - DNA, 25 bp, Homo sapien
gggctggctgataaccatatacttc

SEQ ID NO: 1949942 - DNA, 25 bp, Homo sapien
caaagagagctcatcatcctccagg

SEQ ID NO: 1949943 - DNA, 25 bp, Homo sapien
ggttctgctccttgcacttttgaaa

SEQ ID NO: 1949944 - DNA, 25 bp, Homo sapien
ctgagatgctggtggcgggtttcac

SEQ ID NO: 1949945 - DNA, 25 bp, Homo sapien
tgcccctggaggcgaagttccagca

SEQ ID NO: 1949946 - DNA, 25 bp, Homo sapien
tgtaggtctgaggatatgcgttcct

SEQ ID NO: 1949947 - DNA, 25 bp, Homo sapien
ctcttggtgtcagaacgccccaggg

SEQ ID NO: 1949948 - DNA, 25 bp, Homo sapien
aggatatgcgttcctcttggtgtca

SEQ ID NO: 1949949 - DNA, 25 bp, Homo sapien
ttatgaagctttacgcgagcctatc

SEQ ID NO: 1949950 - DNA, 25 bp, Homo sapien
cacatgtccacgctgtgttcctgag

SEQ ID NO: 1949951 - DNA, 25 bp, Homo sapien
gtgttcctgagcctatctcttcatc

SEQ ID NO: 1949952 - DNA, 25 bp, Homo sapien
tttacgcgagcctatcacatgtcca

SEQ ID NO: 1949953 - DNA, 25 bp, Homo sapien
cttgagggcatcctgatctgaattc

SEQ ID NO: 1949954 - DNA, 25 bp, Homo sapien
tgagggcatcctgatctgaattcat

SEQ ID NO: 1949955 - DNA, 25 bp, Homo sapien
ttgagggcatcctgatctgaattca

SEQ ID NO: 1949956 - DNA, 25 bp, Homo sapien
acactgcccatccaagataaggcat

SEQ ID NO: 1949957 - DNA, 25 bp, Homo sapien
acacactgcccatccaagataaggc

SEQ ID NO: 1949958 - DNA, 25 bp, Homo sapien
ttcacacactgcccatccaagataa

SEQ ID NO: 1949959 - DNA, 25 bp, Homo sapien
tcacacactgcccatccaagataag

SEQ ID NO: 1949960 - DNA, 25 bp, Homo sapien
ggtctctggcctcaggcctccttgg

SEQ ID NO: 1949961 - DNA, 25 bp, Homo sapien
acgaggtctctggcctcaggcctcc

SEQ ID NO: 1949962 - DNA, 25 bp, Homo sapien
gaggtctctggcctcaggcctcctt

SEQ ID NO: 1949963 - DNA, 25 bp, Homo sapien
tctctggcctcaggcctccttgggt

SEQ ID NO: 1949964 - DNA, 25 bp, Homo sapien
cagtgtatggtgaaacctggtgcct

SEQ ID NO: 1949965 - DNA, 25 bp, Homo sapien
gcaatgtccagtgtatggtgaaacc

SEQ ID NO: 1949966 - DNA, 25 bp, Homo sapien
tccatgttcgtctcttctaaagtgt

SEQ ID NO: 1949967 - DNA, 25 bp, Homo sapien
tcctctccatgttcgtctcttctaa

SEQ ID NO: 1949968 - DNA, 25 bp, Homo sapien
tcccaaacgctgacacttggggcat

SEQ ID NO: 1949969 - DNA, 25 bp, Homo sapien
gcttcccaaacgctgacacttgggg

SEQ ID NO: 1949970 - DNA, 25 bp, Homo sapien
cttcccaaacgctgacacttggggc

SEQ ID NO: 1949971 - DNA, 25 bp, Homo sapien
ttcccaaacgctgacacttggggca

SEQ ID NO: 1949972 - DNA, 25 bp, Homo sapien
aaaacacgaagtctggcaggccctg

SEQ ID NO: 1949973 - DNA, 25 bp, Homo sapien
gccgtgacattccttgagctatgga

SEQ ID NO: 1949974 - DNA, 25 bp, Homo sapien
tgcagcaagacacagtagggactcg

SEQ ID NO: 1949975 - DNA, 25 bp, Homo sapien
gaaaggtgtcaaggcgacctgacca

SEQ ID NO: 1949976 - DNA, 25 bp, Homo sapien
ctgttgtattgctgtgccttgtggc

SEQ ID NO: 1949977 - DNA, 25 bp, Homo sapien
aacgtgtcttagaaataaaccagtg

SEQ ID NO: 1949978 - DNA, 25 bp, Homo sapien
taaaccagtgccagtccaagtttct

SEQ ID NO: 1949979 - DNA, 25 bp, Homo sapien
gaaataaaccagtgccagtccaagt

SEQ ID NO: 1949980 - DNA, 25 bp, Homo sapien
ccacacaacttagttccagtctcaa

SEQ ID NO: 1949981 - DNA, 25 bp, Homo sapien
tcctttgccgaactgcacttcccca

SEQ ID NO: 1949982 - DNA, 25 bp, Homo sapien
acttagttccagtctcaaagttggc

SEQ ID NO: 1949983 - DNA, 25 bp, Homo sapien
tagttccagtctcaaagttggcagc

SEQ ID NO: 1949984 - DNA, 25 bp, Homo sapien
accctgtctgtccaaagtgttacca

SEQ ID NO: 1949985 - DNA, 25 bp, Homo sapien
gaccctgtctgtccaaagtgttacc

SEQ ID NO: 1949986 - DNA, 25 bp, Homo sapien
ccctgtctgtccaaagtgttaccat

SEQ ID NO: 1949987 - DNA, 25 bp, Homo sapien
gagaaaggcccctccaagaggctgt

SEQ ID NO: 1949988 - DNA, 25 bp, Homo sapien
caagtcaaggttttaggatccatcc

SEQ ID NO: 1949989 - DNA, 25 bp, Homo sapien
cagcagtagcctcccttagaagaag

SEQ ID NO: 1949990 - DNA, 25 bp, Homo sapien
ttccaaccaaagtccaagcaggagc

SEQ ID NO: 1949991 - DNA, 25 bp, Homo sapien
ccagaaagcccgattcatgaatata

SEQ ID NO: 1949992 - DNA, 25 bp, Homo sapien
gagatggtatactccatgaagtcac

SEQ ID NO: 1949993 - DNA, 25 bp, Homo sapien
tacatgatcttacctagctgcaggg

SEQ ID NO: 1949994 - DNA, 25 bp, Homo sapien
tcaagagtcgatatgtagtcagcag

SEQ ID NO: 1949995 - DNA, 25 bp, Homo sapien
tgacccaagatgcaaaaacgatagc

SEQ ID NO: 1949996 - DNA, 25 bp, Homo sapien
gagcggccagctttctcagtcaagt

SEQ ID NO: 1949997 - DNA, 25 bp, Homo sapien
caaatgtagcagtagtccgagcggc

SEQ ID NO: 1949998 - DNA, 25 bp, Homo sapien
ccagtgggtccacaaacaagaacca

SEQ ID NO: 1949999 - DNA, 25 bp, Homo sapien
ctgaactccagggtatgcgtttaga

SEQ ID NO: 1950000 - DNA, 25 bp, Homo sapien
gggtgtcctaatccacgtccctgaa

SEQ ID NO: 1950001 - DNA, 25 bp, Homo sapien
tccagtagggtgtcctaatccacgt

SEQ ID NO: 1950002 - DNA, 25 bp, Homo sapien
cagggtatgcgtttagattttatcc

SEQ ID NO: 1950003 - DNA, 25 bp, Homo sapien
caccggtggcgcatatgctgtgctc

SEQ ID NO: 1950004 - DNA, 25 bp, Homo sapien
tctggatctgggagcgaaggtggcc

SEQ ID NO: 1950005 - DNA, 25 bp, Homo sapien
tcaccacgggagtcagtccctggtg

SEQ ID NO: 1950006 - DNA, 25 bp, Homo sapien
atggtttaccagcaccaccggtggc

SEQ ID NO: 1950007 - DNA, 25 bp, Homo sapien
gcctcagatgtcagcgaaggctcag

SEQ ID NO: 1950008 - DNA, 25 bp, Homo sapien
cagcgaaggctcaggcagtttattc

SEQ ID NO: 1950009 - DNA, 25 bp, Homo sapien
ggcagcatcttacgagtcaaggcct

SEQ ID NO: 1950010 - DNA, 25 bp, Homo sapien
tattcttgcacaaaccacagtcagc

SEQ ID NO: 1950011 - DNA, 25 bp, Homo sapien
tagccaccgctacaaaagccatcgg

SEQ ID NO: 1950012 - DNA, 25 bp, Homo sapien
gagtgagagggccaaaatgacaccc

SEQ ID NO: 1950013 - DNA, 25 bp, Homo sapien
caaaatctactttgcaagcgaagtg

SEQ ID NO: 1950014 - DNA, 25 bp, Homo sapien
gaaaggattatgaagccttggccag

SEQ ID NO: 1950015 - DNA, 25 bp, Homo sapien
tgactatgcacctgtttcgtacttg

SEQ ID NO: 1950016 - DNA, 25 bp, Homo sapien
cgtacttgttagcaggaaatgtgca

SEQ ID NO: 1950017 - DNA, 25 bp, Homo sapien
gaagtcctcggagaatcagtaacct

SEQ ID NO: 1950018 - DNA, 25 bp, Homo sapien
ttctttcctctaaaccactcagagt

SEQ ID NO: 1950019 - DNA, 25 bp, Homo sapien
ggcaacgtggacaaaacccatggag

SEQ ID NO: 1950020 - DNA, 25 bp, Homo sapien
tggcagatgtaagggcaacgtggac

SEQ ID NO: 1950021 - DNA, 25 bp, Homo sapien
aacgcacagccaggaaagaggggtc

SEQ ID NO: 1950022 - DNA, 25 bp, Homo sapien
catggaggtcgcaaaagacacaaga

SEQ ID NO: 1950023 - DNA, 25 bp, Homo sapien
gtccatctgaacaagatgccaacct

SEQ ID NO: 1950024 - DNA, 25 bp, Homo sapien
agtaaagtaagatcccccactgagt

SEQ ID NO: 1950025 - DNA, 25 bp, Homo sapien
agcgctgggtgccagtctccactct

SEQ ID NO: 1950026 - DNA, 25 bp, Homo sapien
tcataccccagaagtaaagtaagat

SEQ ID NO: 1950027 - DNA, 25 bp, Homo sapien
ggagcgctgggtgccagtctccact

SEQ ID NO: 1950028 - DNA, 25 bp, Homo sapien
tcagctcctggcgataacttataca

SEQ ID NO: 1950029 - DNA, 25 bp, Homo sapien
aggccgctgggaaataactcaatcc

SEQ ID NO: 1950030 - DNA, 25 bp, Homo sapien
cttcccgcagttgggaatcgctgcc

SEQ ID NO: 1950031 - DNA, 25 bp, Homo sapien
cagggtttctccacgggaactgcca

SEQ ID NO: 1950032 - DNA, 25 bp, Homo sapien
tggacctgcagctgactgaagccca

SEQ ID NO: 1950033 - DNA, 25 bp, Homo sapien
cgctccgtttttaaagcatgagaga

SEQ ID NO: 1950034 - DNA, 25 bp, Homo sapien
agcccacaaaatgcgcaccaggaaa

SEQ ID NO: 1950035 - DNA, 25 bp, Homo sapien
gaactgaaaagtaaagtcagaatgc

SEQ ID NO: 1950036 - DNA, 25 bp, Homo sapien
aagaacaaggggcacgaagtccagg

SEQ ID NO: 1950037 - DNA, 25 bp, Homo sapien
acagcaacgcggcatgggcaggcac

SEQ ID NO: 1950038 - DNA, 25 bp, Homo sapien
gctcagcgctgagtttccatgaggc

SEQ ID NO: 1950039 - DNA, 25 bp, Homo sapien
cgcccgctccacgtaaaaagcaaga

SEQ ID NO: 1950040 - DNA, 25 bp, Homo sapien
tctccagctgttattctgactgcct

SEQ ID NO: 1950041 - DNA, 25 bp, Homo sapien
taggcccctcctacataaaattctg

SEQ ID NO: 1950042 - DNA, 25 bp, Homo sapien
tagcttggttgccatccttaggccc

SEQ ID NO: 1950043 - DNA, 25 bp, Homo sapien
taaatttgtaggcacgcatctccag

SEQ ID NO: 1950044 - DNA, 25 bp, Homo sapien
ggtaggcaggaaagcaatcacctcc

SEQ ID NO: 1950045 - DNA, 25 bp, Homo sapien
cagagtgggcaggttggaggaaatc

SEQ ID NO: 1950046 - DNA, 25 bp, Homo sapien
ttacagagtgggcaggttggaggaa

SEQ ID NO: 1950047 - DNA, 25 bp, Homo sapien
aggttggaggaaatctccagctggc

SEQ ID NO: 1950048 - DNA, 25 bp, Homo sapien
ggcaggttggaggaaatctccagct

SEQ ID NO: 1950049 - DNA, 25 bp, Homo sapien
atatttagaaacttggtataggaga

SEQ ID NO: 1950050 - DNA, 25 bp, Homo sapien
tatttagaaacttggtataggagaa

SEQ ID NO: 1950051 - DNA, 25 bp, Homo sapien
tatatttagaaacttggtataggag

SEQ ID NO: 1950052 - DNA, 25 bp, Homo sapien
gtatatttagaaacttggtatagga

SEQ ID NO: 1950053 - DNA, 25 bp, Homo sapien
tatcacttgatactcgtggctggcc

SEQ ID NO: 1950054 - DNA, 25 bp, Homo sapien
tccccaggccaatgcagagtgaatg

SEQ ID NO: 1950055 - DNA, 25 bp, Homo sapien
agagcctcttgagcaccggcaggtg

SEQ ID NO: 1950056 - DNA, 25 bp, Homo sapien
tgattcccaggaaataggacagaga

SEQ ID NO: 1950057 - DNA, 25 bp, Homo sapien
tctgtcactggaggaatccactcac

SEQ ID NO: 1950058 - DNA, 25 bp, Homo sapien
ttagctgtggagcctgtcctctgtc

SEQ ID NO: 1950059 - DNA, 25 bp, Homo sapien
tagctgtggagcctgtcctctgtca

SEQ ID NO: 1950060 - DNA, 25 bp, Homo sapien
ctgtggagcctgtcctctgtcactg

SEQ ID NO: 1950061 - DNA, 25 bp, Homo sapien
ggcacccagtaacggtcctctggta

SEQ ID NO: 1950062 - DNA, 25 bp, Homo sapien
taagacaactagctggtacgctcca

SEQ ID NO: 1950063 - DNA, 25 bp, Homo sapien
gctggtacgctccaagaccaggcac

SEQ ID NO: 1950064 - DNA, 25 bp, Homo sapien
cacactgatggcactaagacaacta

SEQ ID NO: 1950065 - DNA, 25 bp, Homo sapien
ggttgataccagctccatggatgga

SEQ ID NO: 1950066 - DNA, 25 bp, Homo sapien
tgcatcctcctcaatagggaaagaa

SEQ ID NO: 1950067 - DNA, 25 bp, Homo sapien
catcttcagaccagaatggaggagc

SEQ ID NO: 1950068 - DNA, 25 bp, Homo sapien
gccagaatgagcacatgagcttcca

SEQ ID NO: 1950069 - DNA, 25 bp, Homo sapien
aagagcggagcctgccaaagaccac

SEQ ID NO: 1950070 - DNA, 25 bp, Homo sapien
aggtaaatttccttgcagaccacag

SEQ ID NO: 1950071 - DNA, 25 bp, Homo sapien
gaattgcatcgcctcaagagcggag

SEQ ID NO: 1950072 - DNA, 25 bp, Homo sapien
agagttagcagaattgcatcgcctc

SEQ ID NO: 1950073 - DNA, 25 bp, Homo sapien
aactgtggtaactgctccaaggcca

SEQ ID NO: 1950074 - DNA, 25 bp, Homo sapien
agttatacagacaaccaagtcaggc

SEQ ID NO: 1950075 - DNA, 25 bp, Homo sapien
tagactagctttctggctgacaaca

SEQ ID NO: 1950076 - DNA, 25 bp, Homo sapien
caaggccacctagtactttgagaaa

SEQ ID NO: 1950077 - DNA, 25 bp, Homo sapien
taaactacaatgtgccattcactcc

SEQ ID NO: 1950078 - DNA, 25 bp, Homo sapien
tcgtgaaccaatagggttgaggcag

SEQ ID NO: 1950079 - DNA, 25 bp, Homo sapien
cctcctcgtgaaccaatagggttga

SEQ ID NO: 1950080 - DNA, 25 bp, Homo sapien
aaccaatagggttgaggcagggtct

SEQ ID NO: 1950081 - DNA, 25 bp, Homo sapien
gcacaatttgattgtggaaccaacc

SEQ ID NO: 1950082 - DNA, 25 bp, Homo sapien
tttgcattgcaaaattgtggaacca

SEQ ID NO: 1950083 - DNA, 25 bp, Homo sapien
atacctagcccaaacacacgcatgt

SEQ ID NO: 1950084 - DNA, 25 bp, Homo sapien
cccggcccaagcacacgcatgttta

SEQ ID NO: 1950085 - DNA, 25 bp, Homo sapien
gaaacctaagcctttggtggacagc

SEQ ID NO: 1950086 - DNA, 25 bp, Homo sapien
cctaagcctttggtggacagcagcc

SEQ ID NO: 1950087 - DNA, 25 bp, Homo sapien
aacctaagcctttggtggacagcag

SEQ ID NO: 1950088 - DNA, 25 bp, Homo sapien
cacaatgggagggaaacctaagcct

SEQ ID NO: 1950089 - DNA, 25 bp, Homo sapien
tccagcagtcctgcacaggacgcag

SEQ ID NO: 1950090 - DNA, 25 bp, Homo sapien
ggcttactccgtgcttttctgggct

SEQ ID NO: 1950091 - DNA, 25 bp, Homo sapien
gacaaggagcagatgtccatctcta

SEQ ID NO: 1950092 - DNA, 25 bp, Homo sapien
tgcacaggacgcagagtgatcagcc

SEQ ID NO: 1950093 - DNA, 25 bp, Homo sapien
tcggaattatcatgcactgtggtgg

SEQ ID NO: 1950094 - DNA, 25 bp, Homo sapien
taggcagcatacagtcgagtcatga

SEQ ID NO: 1950095 - DNA, 25 bp, Homo sapien
taatgataatatcctcaggcctggc

SEQ ID NO: 1950096 - DNA, 25 bp, Homo sapien
caaataaaaggcgttctgtcggaat

SEQ ID NO: 1950097 - DNA, 25 bp, Homo sapien
ccctccaaaggaacatagctccttg

SEQ ID NO: 1950098 - DNA, 25 bp, Homo sapien
agaataaccagcatagagaagtcct

SEQ ID NO: 1950099 - DNA, 25 bp, Homo sapien
gttcgaacccatcacaaagaaccta

SEQ ID NO: 1950100 - DNA, 25 bp, Homo sapien
aagaggaagttcgaacccatcacaa

SEQ ID NO: 1950101 - DNA, 25 bp, Homo sapien
agtttttgacatgcaagcataatgc

SEQ ID NO: 1950102 - DNA, 25 bp, Homo sapien
ttgacatgcaagcataatgcagacc

SEQ ID NO: 1950103 - DNA, 25 bp, Homo sapien
aaagtttttgacatgcaagcataat

SEQ ID NO: 1950104 - DNA, 25 bp, Homo sapien
tttttgacatgcaagcataatgcag

SEQ ID NO: 1950105 - DNA, 25 bp, Homo sapien
gtaccaggcttgatgcacatcttag

SEQ ID NO: 1950106 - DNA, 25 bp, Homo sapien
taccaggcttgatgcacatcttaga

SEQ ID NO: 1950107 - DNA, 25 bp, Homo sapien
tgtaccaggcttgatgcacatctta

SEQ ID NO: 1950108 - DNA, 25 bp, Homo sapien
accaggcttgatgcacatcttagaa

SEQ ID NO: 1950109 - DNA, 25 bp, Homo sapien
tatcttgctgggatcattagggtat

SEQ ID NO: 1950110 - DNA, 25 bp, Homo sapien
cattatcttgctgggatcattaggg

SEQ ID NO: 1950111 - DNA, 25 bp, Homo sapien
gacaggacattatcttgctgggatc

SEQ ID NO: 1950112 - DNA, 25 bp, Homo sapien
tcttgctgggatcattagggtatga

SEQ ID NO: 1950113 - DNA, 25 bp, Homo sapien
caagttgcaatgaagtgtacaataa

SEQ ID NO: 1950114 - DNA, 25 bp, Homo sapien
aagaccatgaatttcaagttgcaat

SEQ ID NO: 1950115 - DNA, 25 bp, Homo sapien
gactcaatatacatagattttaact

SEQ ID NO: 1950116 - DNA, 25 bp, Homo sapien
taaaggcgctcaatagaaattcaaa

SEQ ID NO: 1950117 - DNA, 25 bp, Homo sapien
aacagtcacgaccttccttagagag

SEQ ID NO: 1950118 - DNA, 25 bp, Homo sapien
tacaaaccatgatctagcagacaac

SEQ ID NO: 1950119 - DNA, 25 bp, Homo sapien
agtttttccaatccacaagcatgca

SEQ ID NO: 1950120 - DNA, 25 bp, Homo sapien
gaagcacagctatgactagggcagg

SEQ ID NO: 1950121 - DNA, 25 bp, Homo sapien
ctgagccagacggatcacttgaggt

SEQ ID NO: 1950122 - DNA, 25 bp, Homo sapien
gggaggctgagccagacggatcact

SEQ ID NO: 1950123 - DNA, 25 bp, Homo sapien
ggctgagccagacggatcacttgag

SEQ ID NO: 1950124 - DNA, 25 bp, Homo sapien
caggagttcgagaccaccctggcca

SEQ ID NO: 1950125 - DNA, 25 bp, Homo sapien
tagaataggactagaaaggcatccc

SEQ ID NO: 1950126 - DNA, 25 bp, Homo sapien
aatgttcctttctgcggaccccaag

SEQ ID NO: 1950127 - DNA, 25 bp, Homo sapien
tagagacatccttaacacgtgcccc

SEQ ID NO: 1950128 - DNA, 25 bp, Homo sapien
caaaaagatccctgtgagacggagc

SEQ ID NO: 1950129 - DNA, 25 bp, Homo sapien
cattctcccagttgattacattcca

SEQ ID NO: 1950130 - DNA, 25 bp, Homo sapien
gcaagccatgtatctttcagttaca

SEQ ID NO: 1950131 - DNA, 25 bp, Homo sapien
caaatagcttttagataatcaggcc

SEQ ID NO: 1950132 - DNA, 25 bp, Homo sapien
tactgaaggtagtaagcgtgctccc

SEQ ID NO: 1950133 - DNA, 25 bp, Homo sapien
caaaccaaccatcagtttcagtcta

SEQ ID NO: 1950134 - DNA, 25 bp, Homo sapien
cagtctaaaacattgcatcttctca

SEQ ID NO: 1950135 - DNA, 25 bp, Homo sapien
aaccaaccatcagtttcagtctaaa

SEQ ID NO: 1950136 - DNA, 25 bp, Homo sapien
ttcagtctaaaacattgcatcttct

SEQ ID NO: 1950137 - DNA, 25 bp, Homo sapien
acagatgcagccgtcagcttctcct

SEQ ID NO: 1950138 - DNA, 25 bp, Homo sapien
aaagtcacgtttgatggcttccagc

SEQ ID NO: 1950139 - DNA, 25 bp, Homo sapien
cctgatttggacaagcagcaatttg

SEQ ID NO: 1950140 - DNA, 25 bp, Homo sapien
cttgtcaaaggaaccaaagtcacgt

SEQ ID NO: 1950141 - DNA, 25 bp, Homo sapien
aaagtattaaccgatagtctagaag

SEQ ID NO: 1950142 - DNA, 25 bp, Homo sapien
tatatctgatattctggtaactgac

SEQ ID NO: 1950143 - DNA, 25 bp, Homo sapien
tgatattctggtaactgacaaaact

SEQ ID NO: 1950144 - DNA, 25 bp, Homo sapien
aatggcagcataccaaaaccactgg

SEQ ID NO: 1950145 - DNA, 25 bp, Homo sapien
aaatgctatgattgatatgaccacc

SEQ ID NO: 1950146 - DNA, 25 bp, Homo sapien
caccgttagggctgaggtttgtcca

SEQ ID NO: 1950147 - DNA, 25 bp, Homo sapien
gaagagctatctgggctgtaacatc

SEQ ID NO: 1950148 - DNA, 25 bp, Homo sapien
accaccattgaacttcagtgcaggc

SEQ ID NO: 1950149 - DNA, 25 bp, Homo sapien
ttagtcagttaaatgtgatgagatt

SEQ ID NO: 1950150 - DNA, 25 bp, Homo sapien
tattagtcagttaaatgtgatgaga

SEQ ID NO: 1950151 - DNA, 25 bp, Homo sapien
attagtcagttaaatgtgatgagat

SEQ ID NO: 1950152 - DNA, 25 bp, Homo sapien
tagtcagttaaatgtgatgagatta

SEQ ID NO: 1950153 - DNA, 25 bp, Homo sapien
aaggttcctggtgtcagatgttgcc

SEQ ID NO: 1950154 - DNA, 25 bp, Homo sapien
gaaagctctgcaggtactcaatcac

SEQ ID NO: 1950155 - DNA, 25 bp, Homo sapien
taagtaaggctctgattccacaagt

SEQ ID NO: 1950156 - DNA, 25 bp, Homo sapien
tcccgtaattcaaggttcgtctgtc

SEQ ID NO: 1950157 - DNA, 25 bp, Homo sapien
tgtgacctggcagtaagacaccact

SEQ ID NO: 1950158 - DNA, 25 bp, Homo sapien
cgaccccgtttgctctcaggaagat

SEQ ID NO: 1950159 - DNA, 25 bp, Homo sapien
tttggtaacgcacaccacaacggtg

SEQ ID NO: 1950160 - DNA, 25 bp, Homo sapien
tagatgcctccagtcaacaagatgt

SEQ ID NO: 1950161 - DNA, 25 bp, Homo sapien
caatgaggtagaccatgtgtttaaa

SEQ ID NO: 1950162 - DNA, 25 bp, Homo sapien
tcgaggcactccttctacaatgagg

SEQ ID NO: 1950163 - DNA, 25 bp, Homo sapien
gactatcgtgcctggaaaactcgga

SEQ ID NO: 1950164 - DNA, 25 bp, Homo sapien
ccggtacaaatacgaagcgagttct

SEQ ID NO: 1950165 - DNA, 25 bp, Homo sapien
tcctggtacttctcctcggtgacgt

SEQ ID NO: 1950166 - DNA, 25 bp, Homo sapien
tctgcgcgttgatgtgaggttccag

SEQ ID NO: 1950167 - DNA, 25 bp, Homo sapien
ttcaggttgttcacgtaggccgcgt

SEQ ID NO: 1950168 - DNA, 25 bp, Homo sapien
agataccccaaaaccggagccagct

SEQ ID NO: 1950169 - DNA, 25 bp, Homo sapien
actcccgggagaaccgcctgcaggt

SEQ ID NO: 1950170 - DNA, 25 bp, Homo sapien
gcactcccgggagaaccgcctgcag

SEQ ID NO: 1950171 - DNA, 25 bp, Homo sapien
gggcactcccgggagaaccgcctgc

SEQ ID NO: 1950172 - DNA, 25 bp, Homo sapien
ctcccgggagaaccgcctgcaggtg

SEQ ID NO: 1950173 - DNA, 25 bp, Homo sapien
accacagccacgagtgccgctcctg

SEQ ID NO: 1950174 - DNA, 25 bp, Homo sapien
tgctgaagccgctgccgaagccacc

SEQ ID NO: 1950175 - DNA, 25 bp, Homo sapien
cgcccgcgggccttaagaaagcgcg

SEQ ID NO: 1950176 - DNA, 25 bp, Homo sapien
tggtgctaccgctgatgccgccgat

SEQ ID NO: 1950177 - DNA, 25 bp, Homo sapien
ttcactttgaatcgcatacacagcc

SEQ ID NO: 1950178 - DNA, 25 bp, Homo sapien
aaaaattaggagaggcggatccaag

SEQ ID NO: 1950179 - DNA, 25 bp, Homo sapien
tacacagcccctatatttgatgagc

SEQ ID NO: 1950180 - DNA, 25 bp, Homo sapien
cagtaagcatgtgacacaagcctgt

SEQ ID NO: 1950181 - DNA, 25 bp, Homo sapien
tatagcatttaaaaaggtctccctg

SEQ ID NO: 1950182 - DNA, 25 bp, Homo sapien
tgcccctgctgtagattcaagaaaa

SEQ ID NO: 1950183 - DNA, 25 bp, Homo sapien
tacataggtgtgttcataaaccccc

SEQ ID NO: 1950184 - DNA, 25 bp, Homo sapien
gctgtagattcaagaaaagttctac

SEQ ID NO: 1950185 - DNA, 25 bp, Homo sapien
tagctgccactgcatcttcgtgagc

SEQ ID NO: 1950186 - DNA, 25 bp, Homo sapien
atcttcgtgagcagcaaactcaaca

SEQ ID NO: 1950187 - DNA, 25 bp, Homo sapien
ccactgcatcttcgtgagcagcaaa

SEQ ID NO: 1950188 - DNA, 25 bp, Homo sapien
gcatcttcgtgagcagcaaactcaa

SEQ ID NO: 1950189 - DNA, 25 bp, Homo sapien
atgaggttaagaggtgaatagaaat

SEQ ID NO: 1950190 - DNA, 25 bp, Homo sapien
tgaggttaagaggtgaatagaaatt

SEQ ID NO: 1950191 - DNA, 25 bp, Homo sapien
aggttaagaggtgaatagaaattat

SEQ ID NO: 1950192 - DNA, 25 bp, Homo sapien
attataacattcttagtggctctgt

SEQ ID NO: 1950193 - DNA, 25 bp, Homo sapien
cagtaattgcggtcttttccaaatc

SEQ ID NO: 1950194 - DNA, 25 bp, Homo sapien
gccacgatagtcatcatagcctcta

SEQ ID NO: 1950195 - DNA, 25 bp, Homo sapien
gggaccctgcctcatcttttcaaac

SEQ ID NO: 1950196 - DNA, 25 bp, Homo sapien
tctatcagacctaaagccatatcca

SEQ ID NO: 1950197 - DNA, 25 bp, Homo sapien
ccaatgctattacacctcagccagc

SEQ ID NO: 1950198 - DNA, 25 bp, Homo sapien
aatgctattacacctcagccagccc

SEQ ID NO: 1950199 - DNA, 25 bp, Homo sapien
tgccaatgctattacacctcagcca

SEQ ID NO: 1950200 - DNA, 25 bp, Homo sapien
ctgccaatgctattacacctcagcc

SEQ ID NO: 1950201 - DNA, 25 bp, Homo sapien
gtaggtatgaacttcagcttggcta

SEQ ID NO: 1950202 - DNA, 25 bp, Homo sapien
tcagcttggctattctagaagattt

SEQ ID NO: 1950203 - DNA, 25 bp, Homo sapien
tctgagagggatcatagtaggtatg

SEQ ID NO: 1950204 - DNA, 25 bp, Homo sapien
tgagcttctgagagggatcatagta

SEQ ID NO: 1950205 - DNA, 25 bp, Homo sapien
tgtttcttcaatgccgtctcagcta

SEQ ID NO: 1950206 - DNA, 25 bp, Homo sapien
cctgtgtttcttcaatgccgtctca

SEQ ID NO: 1950207 - DNA, 25 bp, Homo sapien
ttcaatgccgtctcagctatctcct

SEQ ID NO: 1950208 - DNA, 25 bp, Homo sapien
ttcttcaatgccgtctcagctatct

SEQ ID NO: 1950209 - DNA, 25 bp, Homo sapien
tgaaagtccactcacagtgttatcc

SEQ ID NO: 1950210 - DNA, 25 bp, Homo sapien
tctaagccagacgaagccatcgttg

SEQ ID NO: 1950211 - DNA, 25 bp, Homo sapien
ccatcgttggcagtatcaggactat

SEQ ID NO: 1950212 - DNA, 25 bp, Homo sapien
tctcttccttggacagccaaatgga

SEQ ID NO: 1950213 - DNA, 25 bp, Homo sapien
ttttgcaatcagagaagtgcatcac

SEQ ID NO: 1950214 - DNA, 25 bp, Homo sapien
ttgtattttgcaatcagagaagtgc

SEQ ID NO: 1950215 - DNA, 25 bp, Homo sapien
aagccaatttcgcttcatctgcaga

SEQ ID NO: 1950216 - DNA, 25 bp, Homo sapien
ctgtgtgcttcgatacccaatccat

SEQ ID NO: 1950217 - DNA, 25 bp, Homo sapien
ttttgctcgtttcatcgccaggcgg

SEQ ID NO: 1950218 - DNA, 25 bp, Homo sapien
gataagcctaccctggtgtcctgcc

SEQ ID NO: 1950219 - DNA, 25 bp, Homo sapien
tccaagggaagataagcctagcttc

SEQ ID NO: 1950220 - DNA, 25 bp, Homo sapien
tgtgtgcccagattatgataagcct

SEQ ID NO: 1950221 - DNA, 25 bp, Homo sapien
tccagtagctggacaagcctgtttc

SEQ ID NO: 1950222 - DNA, 25 bp, Homo sapien
cagggaaattacatgcaaaaggtgc

SEQ ID NO: 1950223 - DNA, 25 bp, Homo sapien
ttacccaatggtgctgtagaacact

SEQ ID NO: 1950224 - DNA, 25 bp, Homo sapien
catacatgggaacgcagatatctca

SEQ ID NO: 1950225 - DNA, 25 bp, Homo sapien
aactgtgaataggagataacctggc

SEQ ID NO: 1950226 - DNA, 25 bp, Homo sapien
tagtcacaccagacgtgagctcttg

SEQ ID NO: 1950227 - DNA, 25 bp, Homo sapien
gctcttgagagcgtcgtggattaac

SEQ ID NO: 1950228 - DNA, 25 bp, Homo sapien
tagattgaatgtttgcgtccaccca

SEQ ID NO: 1950229 - DNA, 25 bp, Homo sapien
gccctcactaggtacccattggaca

SEQ ID NO: 1950230 - DNA, 25 bp, Homo sapien
actaggtacccattggacagtagtg

SEQ ID NO: 1950231 - DNA, 25 bp, Homo sapien
gtactgccctcactaggtacccatt

SEQ ID NO: 1950232 - DNA, 25 bp, Homo sapien
atttcggtgtgttgtgcaggagtta

SEQ ID NO: 1950233 - DNA, 25 bp, Homo sapien
ggccaggacttgattaaaacttgac

SEQ ID NO: 1950234 - DNA, 25 bp, Homo sapien
ctttaaccaagaccataggatgcca

SEQ ID NO: 1950235 - DNA, 25 bp, Homo sapien
cataagtgtactctcagcctgaaag

SEQ ID NO: 1950236 - DNA, 25 bp, Homo sapien
tatctctggtagcaatccaggaagc

SEQ ID NO: 1950237 - DNA, 25 bp, Homo sapien
agctgtagtgcactggtgagatcac

SEQ ID NO: 1950238 - DNA, 25 bp, Homo sapien
cacagaactaggacttttttttgca

SEQ ID NO: 1950239 - DNA, 25 bp, Homo sapien
tttttgatagggtctgttgcccaag

SEQ ID NO: 1950240 - DNA, 25 bp, Homo sapien
ctcctgggctcatttgggcctctcg

SEQ ID NO: 1950241 - DNA, 25 bp, Homo sapien
cttaatacaacctgagactcattcc

SEQ ID NO: 1950242 - DNA, 25 bp, Homo sapien
ccactctttataggcaactaaaaat

SEQ ID NO: 1950243 - DNA, 25 bp, Homo sapien
gactcattccaaagcaacacacgat

SEQ ID NO: 1950244 - DNA, 25 bp, Homo sapien
aattcctccccgaaaataagcatat

SEQ ID NO: 1950245 - DNA, 25 bp, Homo sapien
tctactgtatggatgcaccattccc

SEQ ID NO: 1950246 - DNA, 25 bp, Homo sapien
ccattgtaagtgaggtggagcgact

SEQ ID NO: 1950247 - DNA, 25 bp, Homo sapien
tgtactccgtggaacttgaaccatt

SEQ ID NO: 1950248 - DNA, 25 bp, Homo sapien
gagctcttgtgatacgagttgcaaa

SEQ ID NO: 1950249 - DNA, 25 bp, Homo sapien
gatgaacaggtttgataaagccggc

SEQ ID NO: 1950250 - DNA, 25 bp, Homo sapien
cagatggcagtcttacttcagggag

SEQ ID NO: 1950251 - DNA, 25 bp, Homo sapien
gggagtctactccacttgcaggacc

SEQ ID NO: 1950252 - DNA, 25 bp, Homo sapien
taaagccggctaaggacagaccaat

SEQ ID NO: 1950253 - DNA, 25 bp, Homo sapien
gagactgcgcctcacgactgatgag

SEQ ID NO: 1950254 - DNA, 25 bp, Homo sapien
aatagctcctcgatgcgtctccaga

SEQ ID NO: 1950255 - DNA, 25 bp, Homo sapien
gagatgtcaaggaggaacgaaccca

SEQ ID NO: 1950256 - DNA, 25 bp, Homo sapien
ttctgctaagagtaaacgcccgcgg

SEQ ID NO: 1950257 - DNA, 25 bp, Homo sapien
cccctcggccgcttcccttactgag

SEQ ID NO: 1950258 - DNA, 25 bp, Homo sapien
ttcccttactgagcttgctgagctc

SEQ ID NO: 1950259 - DNA, 25 bp, Homo sapien
caggtggccccggcgagtacttcca

SEQ ID NO: 1950260 - DNA, 25 bp, Homo sapien
cttactgagcttgctgagctccggg

SEQ ID NO: 1950261 - DNA, 25 bp, Homo sapien
tcgggctaggccgacggcctccctc

SEQ ID NO: 1950262 - DNA, 25 bp, Homo sapien
cccgatcgggctaggccgacggcct

SEQ ID NO: 1950263 - DNA, 25 bp, Homo sapien
cagctgctccattgtgcctcgaggc

SEQ ID NO: 1950264 - DNA, 25 bp, Homo sapien
tgcctcgaggccccgatcgggctag

SEQ ID NO: 1950265 - DNA, 25 bp, Homo sapien
tgtgagtgggccagaaggcgaacat

SEQ ID NO: 1950266 - DNA, 25 bp, Homo sapien
tgcggccacgcctgaaaggcgactc

SEQ ID NO: 1950267 - DNA, 25 bp, Homo sapien
agtgactgcggccacgcctgaaagg

SEQ ID NO: 1950268 - DNA, 25 bp, Homo sapien
cgggcgagtgactgcggccacgcct

SEQ ID NO: 1950269 - DNA, 25 bp, Homo sapien
gaacataagccaatgtcaggagttg

SEQ ID NO: 1950270 - DNA, 25 bp, Homo sapien
agaacataagccaatgtcaggagtt

SEQ ID NO: 1950271 - DNA, 25 bp, Homo sapien
acataagccaatgtcaggagttgga

SEQ ID NO: 1950272 - DNA, 25 bp, Homo sapien
aacataagccaatgtcaggagttgg

SEQ ID NO: 1950273 - DNA, 25 bp, Homo sapien
catactcaggtttcgcatcccgtga

SEQ ID NO: 1950274 - DNA, 25 bp, Homo sapien
caagtaaacctagggaaagtatcag

SEQ ID NO: 1950275 - DNA, 25 bp, Homo sapien
tcctggcataggaatttgaaccctg

SEQ ID NO: 1950276 - DNA, 25 bp, Homo sapien
tagaaccacataccgatgatccttg

SEQ ID NO: 1950277 - DNA, 25 bp, Homo sapien
ttctaagactttgcagcctaatgca

SEQ ID NO: 1950278 - DNA, 25 bp, Homo sapien
taaaatgactgccaccaggttaagg

SEQ ID NO: 1950279 - DNA, 25 bp, Homo sapien
caggttaaggtagttacaaagcagc

SEQ ID NO: 1950280 - DNA, 25 bp, Homo sapien
aagcagctttctgtaatggcagcag

SEQ ID NO: 1950281 - DNA, 25 bp, Homo sapien
tgcccgggctcggttcaaactccta

SEQ ID NO: 1950282 - DNA, 25 bp, Homo sapien
caccagcctcaagtagctttcgaga

SEQ ID NO: 1950283 - DNA, 25 bp, Homo sapien
tacgtagtataaaacatgctgttgg

SEQ ID NO: 1950284 - DNA, 25 bp, Homo sapien
gattatctccttttgaggaatctca

SEQ ID NO: 1950285 - DNA, 25 bp, Homo sapien
gatggcgtcggactattccgaagaa

SEQ ID NO: 1950286 - DNA, 25 bp, Homo sapien
attccgaagaagtggccacctccga

SEQ ID NO: 1950287 - DNA, 25 bp, Homo sapien
cttcagaggcctgatggcgtcggac

SEQ ID NO: 1950288 - DNA, 25 bp, Homo sapien
cggactattccgaagaagtggccac

SEQ ID NO: 1950289 - DNA, 25 bp, Homo sapien
ccccgttccattcaacaggcacatg

SEQ ID NO: 1950290 - DNA, 25 bp, Homo sapien
tgttccttcattgtatttgggcctt

SEQ ID NO: 1950291 - DNA, 25 bp, Homo sapien
agagctttgtcgttggtgttaatgg

SEQ ID NO: 1950292 - DNA, 25 bp, Homo sapien
ggccttttgtattgcactcttgata

SEQ ID NO: 1950293 - DNA, 25 bp, Homo sapien
tcactcccggatgtgaccttgacat

SEQ ID NO: 1950294 - DNA, 25 bp, Homo sapien
gattcccagaaataacctgtccagt

SEQ ID NO: 1950295 - DNA, 25 bp, Homo sapien
taaacacagatgagttgcaccttgt

SEQ ID NO: 1950296 - DNA, 25 bp, Homo sapien
aatggctcaggcaatcccgtctgga

SEQ ID NO: 1950297 - DNA, 25 bp, Homo sapien
gctcctctgagcagtagtaacccag

SEQ ID NO: 1950298 - DNA, 25 bp, Homo sapien
gctacagtagcagtgaacaagaaca

SEQ ID NO: 1950299 - DNA, 25 bp, Homo sapien
taacgcctgagagtgctgatgggaa

SEQ ID NO: 1950300 - DNA, 25 bp, Homo sapien
gatgttcagtggaggctaacgcctg

SEQ ID NO: 1950301 - DNA, 25 bp, Homo sapien
gggacgtcaaggctccagtgagctg

SEQ ID NO: 1950302 - DNA, 25 bp, Homo sapien
ggacgtcaaggctccagtgagctga

SEQ ID NO: 1950303 - DNA, 25 bp, Homo sapien
tatgtgcacataggttcagtagtat

SEQ ID NO: 1950304 - DNA, 25 bp, Homo sapien
gtttgaattgtgatacgtgaccact

SEQ ID NO: 1950305 - DNA, 25 bp, Homo sapien
ccttttattgctgaggctaaagaaa

SEQ ID NO: 1950306 - DNA, 25 bp, Homo sapien
taatctgtggaaagtgtgacactcc

SEQ ID NO: 1950307 - DNA, 25 bp, Homo sapien
gatgtgtcccagaaaagaagatggt

SEQ ID NO: 1950308 - DNA, 25 bp, Homo sapien
ctgtcccagggacgtattgcacaac

SEQ ID NO: 1950309 - DNA, 25 bp, Homo sapien
gaagtgtcgaatgcttatccaggag

SEQ ID NO: 1950310 - DNA, 25 bp, Homo sapien
gaaaaagttaatggcgaagtgtcga

SEQ ID NO: 1950311 - DNA, 25 bp, Homo sapien
ggagggcaacacaaccgaagatgac

SEQ ID NO: 1950312 - DNA, 25 bp, Homo sapien
caagtaccagcaggactacagcttc

SEQ ID NO: 1950313 - DNA, 25 bp, Homo sapien
gactgcagtcgtctgacaaacggac

SEQ ID NO: 1950314 - DNA, 25 bp, Homo sapien
ggtaataagtcctccaacagctcag

SEQ ID NO: 1950315 - DNA, 25 bp, Homo sapien
tgggtttatgactgccaagtttgcc

SEQ ID NO: 1950316 - DNA, 25 bp, Homo sapien
tatgcaccattcagacttgttagag

SEQ ID NO: 1950317 - DNA, 25 bp, Homo sapien
tgtaagggcattcgtactcatgctg

SEQ ID NO: 1950318 - DNA, 25 bp, Homo sapien
ttagaatctgtgctgtgtaagggca

SEQ ID NO: 1950319 - DNA, 25 bp, Homo sapien
aagcagcgttggttttttgtgacct

SEQ ID NO: 1950320 - DNA, 25 bp, Homo sapien
tctggtaatattatatgagtaaggg

SEQ ID NO: 1950321 - DNA, 25 bp, Homo sapien
gagttttaattgaaaagcagcgttg

SEQ ID NO: 1950322 - DNA, 25 bp, Homo sapien
caaaacggagctggagtttagggct

SEQ ID NO: 1950323 - DNA, 25 bp, Homo sapien
gattgatgccgtaggaatgactggt

SEQ ID NO: 1950324 - DNA, 25 bp, Homo sapien
tcagtcagcttaggagacgaggtta

SEQ ID NO: 1950325 - DNA, 25 bp, Homo sapien
gtaagcccacaaagactcagaagtg

SEQ ID NO: 1950326 - DNA, 25 bp, Homo sapien
gaatagagcaaaagccacgggaggc

SEQ ID NO: 1950327 - DNA, 25 bp, Homo sapien
ggaacttttgtgacgctaagacgct

SEQ ID NO: 1950328 - DNA, 25 bp, Homo sapien
caacaagttgctgtaacggtggccc

SEQ ID NO: 1950329 - DNA, 25 bp, Homo sapien
taagcttgcctggaaaccctagaaa

SEQ ID NO: 1950330 - DNA, 25 bp, Homo sapien
tgaactttgcccagtaagaggctgg

SEQ ID NO: 1950331 - DNA, 25 bp, Homo sapien
gggtttcaggcgctctgtaaatgcg

SEQ ID NO: 1950332 - DNA, 25 bp, Homo sapien
caagacgtcaagtcggggaactcca

SEQ ID NO: 1950333 - DNA, 25 bp, Homo sapien
tctgtaaatgcgtccgaggtccgcg

SEQ ID NO: 1950334 - DNA, 25 bp, Homo sapien
acgagagataagtctttgtcacccc

SEQ ID NO: 1950335 - DNA, 25 bp, Homo sapien
ggcgccatcggtaatgcctgcggca

SEQ ID NO: 1950336 - DNA, 25 bp, Homo sapien
gaggaggagctttgcctagcttgca

SEQ ID NO: 1950337 - DNA, 25 bp, Homo sapien
cgcggaccatcataggtgagtggcc

SEQ ID NO: 1950338 - DNA, 25 bp, Homo sapien
gcaggctcagatcctgtggtcatcg

SEQ ID NO: 1950339 - DNA, 25 bp, Homo sapien
catctggctgtcgaattcttgtgac

SEQ ID NO: 1950340 - DNA, 25 bp, Homo sapien
ggaccaaagtacagatggaaaccat

SEQ ID NO: 1950341 - DNA, 25 bp, Homo sapien
gggccaccctcttggagcatctggc

SEQ ID NO: 1950342 - DNA, 25 bp, Homo sapien
ccccgttaggtcaatattgaaggag

SEQ ID NO: 1950343 - DNA, 25 bp, Homo sapien
caactcaaggtacaagacaattgca

SEQ ID NO: 1950344 - DNA, 25 bp, Homo sapien
taatactcaactcaaggtacaagac

SEQ ID NO: 1950345 - DNA, 25 bp, Homo sapien
ttaatgtgtaatactcaactcaagg

SEQ ID NO: 1950346 - DNA, 25 bp, Homo sapien
tgtgtaatactcaactcaaggtaca

SEQ ID NO: 1950347 - DNA, 25 bp, Homo sapien
cgaagaatggtgattgcagcttctg

SEQ ID NO: 1950348 - DNA, 25 bp, Homo sapien
catcttcataacttccatgtttatc

SEQ ID NO: 1950349 - DNA, 25 bp, Homo sapien
gggctccagagtgaacagcatcttc

SEQ ID NO: 1950350 - DNA, 25 bp, Homo sapien
gatcatcaattcgaagaatggtgat

SEQ ID NO: 1950351 - DNA, 25 bp, Homo sapien
tgttgtctcgaggtttaccattgct

SEQ ID NO: 1950352 - DNA, 25 bp, Homo sapien
tctcgaggtttaccattgctcaaat

SEQ ID NO: 1950353 - DNA, 25 bp, Homo sapien
ttgttgtctcgaggtttaccattgc

SEQ ID NO: 1950354 - DNA, 25 bp, Homo sapien
tgtctcgaggtttaccattgctcaa

SEQ ID NO: 1950355 - DNA, 25 bp, Homo sapien
ctgcagaggttaacaaagagcggga

SEQ ID NO: 1950356 - DNA, 25 bp, Homo sapien
tacagtgactgaacaacaaatgctt

SEQ ID NO: 1950357 - DNA, 25 bp, Homo sapien
cagttaacgaagacacaccagtgct

SEQ ID NO: 1950358 - DNA, 25 bp, Homo sapien
aacggccgcttacaatttcattagg

SEQ ID NO: 1950359 - DNA, 25 bp, Homo sapien
gcaatcgcaagctgttcccgagacc

SEQ ID NO: 1950360 - DNA, 25 bp, Homo sapien
caatcgcaagctgttcccgagaccc

SEQ ID NO: 1950361 - DNA, 25 bp, Homo sapien
tgaagtccacagctactgctctcag

SEQ ID NO: 1950362 - DNA, 25 bp, Homo sapien
aagtccacagctactgctctcaggc

SEQ ID NO: 1950363 - DNA, 25 bp, Homo sapien
gaagtccacagctactgctctcagg

SEQ ID NO: 1950364 - DNA, 25 bp, Homo sapien
agtccacagctactgctctcaggcc

SEQ ID NO: 1950365 - DNA, 25 bp, Homo sapien
cgatgcagacgtacgagccttagta

SEQ ID NO: 1950366 - DNA, 25 bp, Homo sapien
caaaagtacaattcttgtaatagca

SEQ ID NO: 1950367 - DNA, 25 bp, Homo sapien
taagtcctgcctacacaggatattt

SEQ ID NO: 1950368 - DNA, 25 bp, Homo sapien
ctacataaagttcccttaagtcctg

SEQ ID NO: 1950369 - DNA, 25 bp, Homo sapien
tgccaagaccatcaatttctcaaaa

SEQ ID NO: 1950370 - DNA, 25 bp, Homo sapien
gcgtataactgctcgtatcactgtg

SEQ ID NO: 1950371 - DNA, 25 bp, Homo sapien
taactgctcgtatcactgtgagact

SEQ ID NO: 1950372 - DNA, 25 bp, Homo sapien
ccatgcgtataactgctcgtatcac

SEQ ID NO: 1950373 - DNA, 25 bp, Homo sapien
gtatcactgtgagactacaagcagc

SEQ ID NO: 1950374 - DNA, 25 bp, Homo sapien
tacaattttagaaagtggctcttac

SEQ ID NO: 1950375 - DNA, 25 bp, Homo sapien
ttacaattttagaaagtggctctta

SEQ ID NO: 1950376 - DNA, 25 bp, Homo sapien
ctttacaattttagaaagtggctct

SEQ ID NO: 1950377 - DNA, 25 bp, Homo sapien
aagatcagctcatcatcacaaattc

SEQ ID NO: 1950378 - DNA, 25 bp, Homo sapien
tccttggactcagtagcatttgtgg

SEQ ID NO: 1950379 - DNA, 25 bp, Homo sapien
aaagtattttatgtgacagccagca

SEQ ID NO: 1950380 - DNA, 25 bp, Homo sapien
tagaatttagttaggcagcacacgg

SEQ ID NO: 1950381 - DNA, 25 bp, Homo sapien
ctccagttacatgaaaaatggctct

SEQ ID NO: 1950382 - DNA, 25 bp, Homo sapien
catcaattccaccagtggttagaat

SEQ ID NO: 1950383 - DNA, 25 bp, Homo sapien
tttgtaacctgagttaccttctgtg

SEQ ID NO: 1950384 - DNA, 25 bp, Homo sapien
ttgttatctctgaccagaatttaaa

SEQ ID NO: 1950385 - DNA, 25 bp, Homo sapien
gaatttaaattagtccaattcatgg

SEQ ID NO: 1950386 - DNA, 25 bp, Homo sapien
aatcatagatcaaattgtattatcc

SEQ ID NO: 1950387 - DNA, 25 bp, Homo sapien
ttccgaatttcacgctagagacctt

SEQ ID NO: 1950388 - DNA, 25 bp, Homo sapien
tcctggagagtattatgacatggtc

SEQ ID NO: 1950389 - DNA, 25 bp, Homo sapien
gaaggactccccatcactaaaatgg

SEQ ID NO: 1950390 - DNA, 25 bp, Homo sapien
ctaaaggtcaagtaagaggaaggct

SEQ ID NO: 1950391 - DNA, 25 bp, Homo sapien
gctgagttctgtactgctttgagga

SEQ ID NO: 1950392 - DNA, 25 bp, Homo sapien
tctggcatgccaaccactaatatca

SEQ ID NO: 1950393 - DNA, 25 bp, Homo sapien
ctgtcaggcagtcaaatctatagca

SEQ ID NO: 1950394 - DNA, 25 bp, Homo sapien
tccaccattagctcttctggcatgc

SEQ ID NO: 1950395 - DNA, 25 bp, Homo sapien
aaggccaaaaataatctctcaacat

SEQ ID NO: 1950396 - DNA, 25 bp, Homo sapien
ggccaaaaataatctctcaacatac

SEQ ID NO: 1950397 - DNA, 25 bp, Homo sapien
agacactcacacttaaaaggccaaa

SEQ ID NO: 1950398 - DNA, 25 bp, Homo sapien
cactcacacttaaaaggccaaaaat

SEQ ID NO: 1950399 - DNA, 25 bp, Homo sapien
aagtcaaggcaagcaatttttgcat

SEQ ID NO: 1950400 - DNA, 25 bp, Homo sapien
agtcaaggcaagcaatttttgcatt

SEQ ID NO: 1950401 - DNA, 25 bp, Homo sapien
gaaaagctagttttaatctgtagca

SEQ ID NO: 1950402 - DNA, 25 bp, Homo sapien
agaaaagctagttttaatctgtagc

SEQ ID NO: 1950403 - DNA, 25 bp, Homo sapien
aagaaaagctagttttaatctgtag

SEQ ID NO: 1950404 - DNA, 25 bp, Homo sapien
agcatactctccatttgacttctcc

SEQ ID NO: 1950405 - DNA, 25 bp, Homo sapien
tctccatttgacttctcccatgggc

SEQ ID NO: 1950406 - DNA, 25 bp, Homo sapien
tactctccatttgacttctcccatg

SEQ ID NO: 1950407 - DNA, 25 bp, Homo sapien
atactctccatttgacttctcccat

SEQ ID NO: 1950408 - DNA, 25 bp, Homo sapien
cagtaacaggtttggaatggacaaa

SEQ ID NO: 1950409 - DNA, 25 bp, Homo sapien
taaggacagtaacaggtttggaatg

SEQ ID NO: 1950410 - DNA, 25 bp, Homo sapien
gtttggaatggacaaagggtacaca

SEQ ID NO: 1950411 - DNA, 25 bp, Homo sapien
ggaatggacaaagggtacacacgtg

SEQ ID NO: 1950412 - DNA, 25 bp, Homo sapien
acaaaattgatactgctgctactac

SEQ ID NO: 1950413 - DNA, 25 bp, Homo sapien
cattggactggcactcctgggttca

SEQ ID NO: 1950414 - DNA, 25 bp, Homo sapien
taatctaatctattaaagcagcaag

SEQ ID NO: 1950415 - DNA, 25 bp, Homo sapien
tacagcattactcctctctattgat

SEQ ID NO: 1950416 - DNA, 25 bp, Homo sapien
ggatgtcttagcagcattaatcagg

SEQ ID NO: 1950417 - DNA, 25 bp, Homo sapien
ttcattgatataacgcactgcttcc

SEQ ID NO: 1950418 - DNA, 25 bp, Homo sapien
gaagacatggatgtcttagcagcat

SEQ ID NO: 1950419 - DNA, 25 bp, Homo sapien
cagttcatctgtgttaacaattagg

SEQ ID NO: 1950420 - DNA, 25 bp, Homo sapien
gagaaaaacgcttataaagtcacta

SEQ ID NO: 1950421 - DNA, 25 bp, Homo sapien
acacagagccaaaatgtcgtaagta

SEQ ID NO: 1950422 - DNA, 25 bp, Homo sapien
taaagtcactactcaaactctttgc

SEQ ID NO: 1950423 - DNA, 25 bp, Homo sapien
tgcattcatcatgcttaacacagag

SEQ ID NO: 1950424 - DNA, 25 bp, Homo sapien
gacatgaaaaaaccctccctcttca

SEQ ID NO: 1950425 - DNA, 25 bp, Homo sapien
ggcaagtttaatctatcccataagc

SEQ ID NO: 1950426 - DNA, 25 bp, Homo sapien
cataagcatagccactaaaatctat

SEQ ID NO: 1950427 - DNA, 25 bp, Homo sapien
cgttcagccatttcatataggagga

SEQ ID NO: 1950428 - DNA, 25 bp, Homo sapien
cagtttacaactattacatcaaaaa

SEQ ID NO: 1950429 - DNA, 25 bp, Homo sapien
atattactacttaaatgctaaaaca

SEQ ID NO: 1950430 - DNA, 25 bp, Homo sapien
cgttaagacaacacagtttacaact

SEQ ID NO: 1950431 - DNA, 25 bp, Homo sapien
ttaatcaaaacgttaagacaacaca

SEQ ID NO: 1950432 - DNA, 25 bp, Homo sapien
ttaggagttctgctgcaataataac

SEQ ID NO: 1950433 - DNA, 25 bp, Homo sapien
gggagaagaacgctacaaaacactc

SEQ ID NO: 1950434 - DNA, 25 bp, Homo sapien
tacaaccgtaaaagacaacacatct

SEQ ID NO: 1950435 - DNA, 25 bp, Homo sapien
caaatggccaaaactgggtaggagc

SEQ ID NO: 1950436 - DNA, 25 bp, Homo sapien
tgctcaacagaagctaaaccgagtg

SEQ ID NO: 1950437 - DNA, 25 bp, Homo sapien
gcaggatgttctacctccagtaact

SEQ ID NO: 1950438 - DNA, 25 bp, Homo sapien
gatggttgcaccatcgttagtaatg

SEQ ID NO: 1950439 - DNA, 25 bp, Homo sapien
taacttcaggatggttgcaccatcg

SEQ ID NO: 1950440 - DNA, 25 bp, Homo sapien
caggatggttgcaccatcgttagta

SEQ ID NO: 1950441 - DNA, 25 bp, Homo sapien
aagaaattcgcaggaaaaaatatga

SEQ ID NO: 1950442 - DNA, 25 bp, Homo sapien
aattcgcaggaaaaaatatgaacca

SEQ ID NO: 1950443 - DNA, 25 bp, Homo sapien
gaaattcgcaggaaaaaatatgaac

SEQ ID NO: 1950444 - DNA, 25 bp, Homo sapien
ctaagaaattcgcaggaaaaaatat

SEQ ID NO: 1950445 - DNA, 25 bp, Homo sapien
cattttatccaagccaactggacca

SEQ ID NO: 1950446 - DNA, 25 bp, Homo sapien
tattggcaatcgaagctgcagccat

SEQ ID NO: 1950447 - DNA, 25 bp, Homo sapien
tttttacaatattggcaatcgaagc

SEQ ID NO: 1950448 - DNA, 25 bp, Homo sapien
tatccaagccaactggaccaagaga

SEQ ID NO: 1950449 - DNA, 25 bp, Homo sapien
gaaatgaggataagccacaactctg

SEQ ID NO: 1950450 - DNA, 25 bp, Homo sapien
gacagtaatttcagcctaaaggtaa

SEQ ID NO: 1950451 - DNA, 25 bp, Homo sapien
accacctactaagagtgtaaatggg

SEQ ID NO: 1950452 - DNA, 25 bp, Homo sapien
cccaaatctacaaatctgtgttaat

SEQ ID NO: 1950453 - DNA, 25 bp, Homo sapien
cacttcgtacagctataccagcctt

SEQ ID NO: 1950454 - DNA, 25 bp, Homo sapien
cgtacagctataccagccttttcct

SEQ ID NO: 1950455 - DNA, 25 bp, Homo sapien
tctgccacttcgtacagctatacca

SEQ ID NO: 1950456 - DNA, 25 bp, Homo sapien
tgccacttcgtacagctataccagc

SEQ ID NO: 1950457 - DNA, 25 bp, Homo sapien
ggcgcgcggatggacctactctttt

SEQ ID NO: 1950458 - DNA, 25 bp, Homo sapien
aagaagctgtcaacccggatacggc

SEQ ID NO: 1950459 - DNA, 25 bp, Homo sapien
tggcgtttaacatggacactcaggg

SEQ ID NO: 1950460 - DNA, 25 bp, Homo sapien
cactcgagtggcgtttcctgggcta

SEQ ID NO: 1950461 - DNA, 25 bp, Homo sapien
ggagcggatcgtttccccagtgctg

SEQ ID NO: 1950462 - DNA, 25 bp, Homo sapien
gggagcggatcgtttccccagtgct

SEQ ID NO: 1950463 - DNA, 25 bp, Homo sapien
ttgggagcggatcgtttccccagtg

SEQ ID NO: 1950464 - DNA, 25 bp, Homo sapien
agcggatcgtttccccagtgctgcg

SEQ ID NO: 1950465 - DNA, 25 bp, Homo sapien
cttgacggcagcgatacacgtcgaa

SEQ ID NO: 1950466 - DNA, 25 bp, Homo sapien
ccaggagctactgggtaacacacca

SEQ ID NO: 1950467 - DNA, 25 bp, Homo sapien
cagtggctgcgacggcgtggagcgt

SEQ ID NO: 1950468 - DNA, 25 bp, Homo sapien
tggagcgtacccgagcgatgtccca

SEQ ID NO: 1950469 - DNA, 25 bp, Homo sapien
ttttaaataatctggatcttaaggc

SEQ ID NO: 1950470 - DNA, 25 bp, Homo sapien
gggataatgatgtgttacagttgct

SEQ ID NO: 1950471 - DNA, 25 bp, Homo sapien
tagatgttatccctgtcatcaaaag

SEQ ID NO: 1950472 - DNA, 25 bp, Homo sapien
gcattgcgttagaggcaggagttac

SEQ ID NO: 1950473 - DNA, 25 bp, Homo sapien
ttaaccatgcagcaaattttgtcca

SEQ ID NO: 1950474 - DNA, 25 bp, Homo sapien
cttttttatgccatatgaggggctg

SEQ ID NO: 1950475 - DNA, 25 bp, Homo sapien
catgcagcaaattttgtccatcatt

SEQ ID NO: 1950476 - DNA, 25 bp, Homo sapien
gattacaagcttgagtcacatgccc

SEQ ID NO: 1950477 - DNA, 25 bp, Homo sapien
tttctaccatgggaagcacattctg

SEQ ID NO: 1950478 - DNA, 25 bp, Homo sapien
aaatttgcctcactgcttgttctag

SEQ ID NO: 1950479 - DNA, 25 bp, Homo sapien
tccagcggttagtcagagtccaagc

SEQ ID NO: 1950480 - DNA, 25 bp, Homo sapien
tctagtggccagtctgagaacctcc

SEQ ID NO: 1950481 - DNA, 25 bp, Homo sapien
gaggcctggaggcacctatcttcat

SEQ ID NO: 1950482 - DNA, 25 bp, Homo sapien
taaactggttcccatcgttattgcg

SEQ ID NO: 1950483 - DNA, 25 bp, Homo sapien
tcgttattgcgaggcctggaggcac

SEQ ID NO: 1950484 - DNA, 25 bp, Homo sapien
attctcactccttccctgcccaatg

SEQ ID NO: 1950485 - DNA, 25 bp, Homo sapien
agacgggccccagagcttagtaaca

SEQ ID NO: 1950486 - DNA, 25 bp, Homo sapien
aagtgtcctgcgactttctatcagg

SEQ ID NO: 1950487 - DNA, 25 bp, Homo sapien
ggatgcgctgtttcagttctacaga

SEQ ID NO: 1950488 - DNA, 25 bp, Homo sapien
tctacagacgatggaagagccaaaa

SEQ ID NO: 1950489 - DNA, 25 bp, Homo sapien
gatctcagggtctccgctcggagga

SEQ ID NO: 1950490 - DNA, 25 bp, Homo sapien
gcagccctctccgagaacagccagt

SEQ ID NO: 1950491 - DNA, 25 bp, Homo sapien
agggacctgaggagtacccacacag

SEQ ID NO: 1950492 - DNA, 25 bp, Homo sapien
gaaccttctcgatctcaggactcca

SEQ ID NO: 1950493 - DNA, 25 bp, Homo sapien
tcagctagccctctgtgggcccacg

SEQ ID NO: 1950494 - DNA, 25 bp, Homo sapien
cctctgtgggcccacgtcccttcca

SEQ ID NO: 1950495 - DNA, 25 bp, Homo sapien
tctgtgggcccacgtcccttccatt

SEQ ID NO: 1950496 - DNA, 25 bp, Homo sapien
tgtgggcccacgtcccttccattac

SEQ ID NO: 1950497 - DNA, 25 bp, Homo sapien
tttgtgttgaggattccatgggttc

SEQ ID NO: 1950498 - DNA, 25 bp, Homo sapien
gctttttgtgttgaggattccatgg

SEQ ID NO: 1950499 - DNA, 25 bp, Homo sapien
ctttttgtgttgaggattccatggg

SEQ ID NO: 1950500 - DNA, 25 bp, Homo sapien
gtgttgaggattccatgggttcttt

SEQ ID NO: 1950501 - DNA, 25 bp, Homo sapien
gctcagggacgccttgtggcctctt

SEQ ID NO: 1950502 - DNA, 25 bp, Homo sapien
gcgttcagccgcctctgtgtaagcg

SEQ ID NO: 1950503 - DNA, 25 bp, Homo sapien
tgtgtaagcgccctgaggaccaggt

SEQ ID NO: 1950504 - DNA, 25 bp, Homo sapien
ggctctctgggtcctgcgcgttcag

SEQ ID NO: 1950505 - DNA, 25 bp, Homo sapien
gtgtgcaactaatttcaggaacaaa

SEQ ID NO: 1950506 - DNA, 25 bp, Homo sapien
tgcaactaatttcaggaacaaaaca

SEQ ID NO: 1950507 - DNA, 25 bp, Homo sapien
actaatttcaggaacaaaacacagg

SEQ ID NO: 1950508 - DNA, 25 bp, Homo sapien
caactaatttcaggaacaaaacaca

SEQ ID NO: 1950509 - DNA, 25 bp, Homo sapien
gctcagactggatcaagccgtggcc

SEQ ID NO: 1950510 - DNA, 25 bp, Homo sapien
ctggatcaagccgtggccggctgcc

SEQ ID NO: 1950511 - DNA, 25 bp, Homo sapien
acagctcagactggatcaagccgtg

SEQ ID NO: 1950512 - DNA, 25 bp, Homo sapien
gacagagtgttgctaggaaccaggg

SEQ ID NO: 1950513 - DNA, 25 bp, Homo sapien
tggcctctggtaaagcagctgccag

SEQ ID NO: 1950514 - DNA, 25 bp, Homo sapien
gaacctcaaggttggcctctggtaa

SEQ ID NO: 1950515 - DNA, 25 bp, Homo sapien
ctcccccgggaagcagagagtgtgc

SEQ ID NO: 1950516 - DNA, 25 bp, Homo sapien
aaggcagtcagtcggtccttctggc

SEQ ID NO: 1950517 - DNA, 25 bp, Homo sapien
agcagagcacggtggagaacacaga

SEQ ID NO: 1950518 - DNA, 25 bp, Homo sapien
gagaacacagaaaatcccttagtct

SEQ ID NO: 1950519 - DNA, 25 bp, Homo sapien
ttagtctcattttggccaatcgtac

SEQ ID NO: 1950520 - DNA, 25 bp, Homo sapien
cccttagtctcattttggccaatcg

SEQ ID NO: 1950521 - DNA, 25 bp, Homo sapien
gcacattctcataagaacgcgagta

SEQ ID NO: 1950522 - DNA, 25 bp, Homo sapien
tctagcacattctcataagaacgcg

SEQ ID NO: 1950523 - DNA, 25 bp, Homo sapien
taagaacgcgagtatgatgagcttg

SEQ ID NO: 1950524 - DNA, 25 bp, Homo sapien
ttctcataagaacgcgagtatgatg

SEQ ID NO: 1950525 - DNA, 25 bp, Homo sapien
gagccctgaaatgctagctgatgaa

SEQ ID NO: 1950526 - DNA, 25 bp, Homo sapien
gataattgagatggtacagttccat

SEQ ID NO: 1950527 - DNA, 25 bp, Homo sapien
aatgctagctgatgaatatctccaa

SEQ ID NO: 1950528 - DNA, 25 bp, Homo sapien
catgaagggccaagtatgcagggct

SEQ ID NO: 1950529 - DNA, 25 bp, Homo sapien
gtcggatcgagcgagtcatccacga

SEQ ID NO: 1950530 - DNA, 25 bp, Homo sapien
agtgctcgtacattttcacctgtga

SEQ ID NO: 1950531 - DNA, 25 bp, Homo sapien
gatcgagcgagtcatccacgaagtg

SEQ ID NO: 1950532 - DNA, 25 bp, Homo sapien
gactcaatgcgaactttctctaggg

SEQ ID NO: 1950533 - DNA, 25 bp, Homo sapien
tgagcaagatcatccgtcctgagca

SEQ ID NO: 1950534 - DNA, 25 bp, Homo sapien
gcaagatcatccgtcctgagcaaag

SEQ ID NO: 1950535 - DNA, 25 bp, Homo sapien
agatcatccgtcctgagcaaagggc

SEQ ID NO: 1950536 - DNA, 25 bp, Homo sapien
ctgtgagcaagatcatccgtcctga

SEQ ID NO: 1950537 - DNA, 25 bp, Homo sapien
acttgtgccagatgagaagtctcct

SEQ ID NO: 1950538 - DNA, 25 bp, Homo sapien
ctccgcaaaggcacttgtgccagat

SEQ ID NO: 1950539 - DNA, 25 bp, Homo sapien
tgctccgcaaaggcacttgtgccag

SEQ ID NO: 1950540 - DNA, 25 bp, Homo sapien
cttgtgccagatgagaagtctcctt

SEQ ID NO: 1950541 - DNA, 25 bp, Homo sapien
aaagagggatgttgtttctctaggg

SEQ ID NO: 1950542 - DNA, 25 bp, Homo sapien
gcgtggccgtgggtaaataagcttc

SEQ ID NO: 1950543 - DNA, 25 bp, Homo sapien
caggcccccttcattatggttctct

SEQ ID NO: 1950544 - DNA, 25 bp, Homo sapien
cacttatgggtctgctgcgtggccg

SEQ ID NO: 1950545 - DNA, 25 bp, Homo sapien
cctggcttcctggcggcttgctctt

SEQ ID NO: 1950546 - DNA, 25 bp, Homo sapien
cttcctggcggcttgctcttcattc

SEQ ID NO: 1950547 - DNA, 25 bp, Homo sapien
gcttcctggcggcttgctcttcatt

SEQ ID NO: 1950548 - DNA, 25 bp, Homo sapien
tggcttcctggcggcttgctcttca

SEQ ID NO: 1950549 - DNA, 25 bp, Homo sapien
gcttgttgtcctctgcccgtgtgga

SEQ ID NO: 1950550 - DNA, 25 bp, Homo sapien
agcttgttgtcctctgcccgtgtgg

SEQ ID NO: 1950551 - DNA, 25 bp, Homo sapien
ccattatcaatttccaaattgggca

SEQ ID NO: 1950552 - DNA, 25 bp, Homo sapien
tgccttgcagtctgctttagatggt

SEQ ID NO: 1950553 - DNA, 25 bp, Homo sapien
tgcagtctgctttagatggtgcctg

SEQ ID NO: 1950554 - DNA, 25 bp, Homo sapien
ttcttttctgccttgcagtctgctt

SEQ ID NO: 1950555 - DNA, 25 bp, Homo sapien
tgctttagatggtgcctgtttcctt

SEQ ID NO: 1950556 - DNA, 25 bp, Homo sapien
aacttcaagaccgagttcacctggt

SEQ ID NO: 1950557 - DNA, 25 bp, Homo sapien
ttcacctggtctgttgatttgctgc

SEQ ID NO: 1950558 - DNA, 25 bp, Homo sapien
gctctgccctgggactatggtcttc

SEQ ID NO: 1950559 - DNA, 25 bp, Homo sapien
ccacaagagtagtttggctctgccc

SEQ ID NO: 1950560 - DNA, 25 bp, Homo sapien
tgcttacgaaaacagtcggagggga

SEQ ID NO: 1950561 - DNA, 25 bp, Homo sapien
ctgcttacgaaaacagtcggagggg

SEQ ID NO: 1950562 - DNA, 25 bp, Homo sapien
accccgctctggattggcgtgaaga

SEQ ID NO: 1950563 - DNA, 25 bp, Homo sapien
gattccttcagagatgagaggctgc

SEQ ID NO: 1950564 - DNA, 25 bp, Homo sapien
gcttctgctgataagcgtgggacca

SEQ ID NO: 1950565 - DNA, 25 bp, Homo sapien
ccttcgagatgttgggaccggagac

SEQ ID NO: 1950566 - DNA, 25 bp, Homo sapien
tggagcaatgacatttagaatgatc

SEQ ID NO: 1950567 - DNA, 25 bp, Homo sapien
agaaatgatgtggggcagcttcgct

SEQ ID NO: 1950568 - DNA, 25 bp, Homo sapien
agccaagcttggatgcaggaggctt

SEQ ID NO: 1950569 - DNA, 25 bp, Homo sapien
ggagtctgtcccctcgagcaaggac

SEQ ID NO: 1950570 - DNA, 25 bp, Homo sapien
gacctccctgtggattgtgccagcc

SEQ ID NO: 1950571 - DNA, 25 bp, Homo sapien
tgggtgtcccatgaagatgaccaga

SEQ ID NO: 1950572 - DNA, 25 bp, Homo sapien
tctgagtgacactatgccagctggg

SEQ ID NO: 1950573 - DNA, 25 bp, Homo sapien
tcagagctcagagtgcaccagtaca

SEQ ID NO: 1950574 - DNA, 25 bp, Homo sapien
agcagtctgattgaggtcttcagca

SEQ ID NO: 1950575 - DNA, 25 bp, Homo sapien
cagagcagtctgattgaggtcttca

SEQ ID NO: 1950576 - DNA, 25 bp, Homo sapien
atctttgcaaggtgccctggttgag

SEQ ID NO: 1950577 - DNA, 25 bp, Homo sapien
tgaggttattgttccgcaggcactc

SEQ ID NO: 1950578 - DNA, 25 bp, Homo sapien
gacgttatgtaaagtgatataagcc

SEQ ID NO: 1950579 - DNA, 25 bp, Homo sapien
tccactcatatgaggggcttagagt

SEQ ID NO: 1950580 - DNA, 25 bp, Homo sapien
tttcttgaggacgttatgtaaagtg

SEQ ID NO: 1950581 - DNA, 25 bp, Homo sapien
tcatatgaggggcttagagttgtca

SEQ ID NO: 1950582 - DNA, 25 bp, Homo sapien
aggatcccgtggtcctgtgccctga

SEQ ID NO: 1950583 - DNA, 25 bp, Homo sapien
actgaaaaaggatcccgtggtcctg

SEQ ID NO: 1950584 - DNA, 25 bp, Homo sapien
ctggtggttgttcctactgaaaaag

SEQ ID NO: 1950585 - DNA, 25 bp, Homo sapien
aaaggatcccgtggtcctgtgccct

SEQ ID NO: 1950586 - DNA, 25 bp, Homo sapien
ttcctgtgtaccacattcagatttt

SEQ ID NO: 1950587 - DNA, 25 bp, Homo sapien
ctgtgtaccacattcagattttgct

SEQ ID NO: 1950588 - DNA, 25 bp, Homo sapien
gaaaattccatcaaggcagctatga

SEQ ID NO: 1950589 - DNA, 25 bp, Homo sapien
tttgaaaattccatcaaggcagcta

SEQ ID NO: 1950590 - DNA, 25 bp, Homo sapien
tagcagccagtttagtgcacccact

SEQ ID NO: 1950591 - DNA, 25 bp, Homo sapien
atagctgaatcctctcggccaccat

SEQ ID NO: 1950592 - DNA, 25 bp, Homo sapien
catccccgttctggattttccctgg

SEQ ID NO: 1950593 - DNA, 25 bp, Homo sapien
acgtgctttccctggctagcagcca

SEQ ID NO: 1950594 - DNA, 25 bp, Homo sapien
tgccccatcagtgttcacactccta

SEQ ID NO: 1950595 - DNA, 25 bp, Homo sapien
gtgttcacactcctacacatcaaag

SEQ ID NO: 1950596 - DNA, 25 bp, Homo sapien
ggcccactggtagccaatgctgcag

SEQ ID NO: 1950597 - DNA, 25 bp, Homo sapien
tgcagttgctactggggcccaggcc

SEQ ID NO: 1950598 - DNA, 25 bp, Homo sapien
aatgagctaaatcacagtgtccgaa

SEQ ID NO: 1950599 - DNA, 25 bp, Homo sapien
agtgtccgaacacttcagtacttcg

SEQ ID NO: 1950600 - DNA, 25 bp, Homo sapien
tagcacggtggttatgtcacaggcc

SEQ ID NO: 1950601 - DNA, 25 bp, Homo sapien
gcaaaacggatgcaataaaggcacc

SEQ ID NO: 1950602 - DNA, 25 bp, Homo sapien
tttgttgagtggcacttgcttgaca

SEQ ID NO: 1950603 - DNA, 25 bp, Homo sapien
ggccatccacgtagtgaattaataa

SEQ ID NO: 1950604 - DNA, 25 bp, Homo sapien
tcattgtggctagctcatggccatc

SEQ ID NO: 1950605 - DNA, 25 bp, Homo sapien
tgacagcgacacttttgtccactct

SEQ ID NO: 1950606 - DNA, 25 bp, Homo sapien
ggaaataacattcccacagaaggtc

SEQ ID NO: 1950607 - DNA, 25 bp, Homo sapien
gctctgacgggccaaggttgtaaac

SEQ ID NO: 1950608 - DNA, 25 bp, Homo sapien
ttgggaaataacattcccacagaag

SEQ ID NO: 1950609 - DNA, 25 bp, Homo sapien
tctgagaggctctgacgggccaagg

SEQ ID NO: 1950610 - DNA, 25 bp, Homo sapien
cccagtcgagccgcgctcacctcgg

SEQ ID NO: 1950611 - DNA, 25 bp, Homo sapien
ctgtcgctgtcgccgagcccagtcg

SEQ ID NO: 1950612 - DNA, 25 bp, Homo sapien
cgagcccagtcgagccgcgctcacc

SEQ ID NO: 1950613 - DNA, 25 bp, Homo sapien
agcccagtcgagccgcgctcacctc

SEQ ID NO: 1950614 - DNA, 25 bp, Homo sapien
tgtttgtggtttcatttgctgattg

SEQ ID NO: 1950615 - DNA, 25 bp, Homo sapien
aatggtcctggagttgagtgtttgt

SEQ ID NO: 1950616 - DNA, 25 bp, Homo sapien
cgttggagcccgcaggaatggtcct

SEQ ID NO: 1950617 - DNA, 25 bp, Homo sapien
gctgattgatttccccccgtgggct

SEQ ID NO: 1950618 - DNA, 25 bp, Homo sapien
ggatcttgctctgggaaccatgatt

SEQ ID NO: 1950619 - DNA, 25 bp, Homo sapien
tataacccatcagtcccatcgaggg

SEQ ID NO: 1950620 - DNA, 25 bp, Homo sapien
ggcggattattctagtggatcttgc

SEQ ID NO: 1950621 - DNA, 25 bp, Homo sapien
gttcacctcgcgcaactgctagcag

SEQ ID NO: 1950622 - DNA, 25 bp, Homo sapien
cacgacaaaggctcatttcccaaag

SEQ ID NO: 1950623 - DNA, 25 bp, Homo sapien
cctctgagttgtgcattgaacagca

SEQ ID NO: 1950624 - DNA, 25 bp, Homo sapien
caaagtgtatctggcttgaagcagc

SEQ ID NO: 1950625 - DNA, 25 bp, Homo sapien
ttaactgtgtccgtgcacgtggagg

SEQ ID NO: 1950626 - DNA, 25 bp, Homo sapien
tggtggaagtactggcccgagctct

SEQ ID NO: 1950627 - DNA, 25 bp, Homo sapien
ctaggagtgtcgtccttcactggga

SEQ ID NO: 1950628 - DNA, 25 bp, Homo sapien
tcgtccttcactgggagaggtgtag

SEQ ID NO: 1950629 - DNA, 25 bp, Homo sapien
atggtggaagtactggcccgagctc

SEQ ID NO: 1950630 - DNA, 25 bp, Homo sapien
gctgacagcccgcaggttttctaga

SEQ ID NO: 1950631 - DNA, 25 bp, Homo sapien
ctgattggcctttgtgaggaaccac

SEQ ID NO: 1950632 - DNA, 25 bp, Homo sapien
tgacagcccgcaggttttctagaaa

SEQ ID NO: 1950633 - DNA, 25 bp, Homo sapien
ttggcctttgtgaggaaccaccacc

SEQ ID NO: 1950634 - DNA, 25 bp, Homo sapien
cccttgtagtttgcacactccagga

SEQ ID NO: 1950635 - DNA, 25 bp, Homo sapien
gagagtagggggctgaacattaagg

SEQ ID NO: 1950636 - DNA, 25 bp, Homo sapien
aaggtctgaattctgcgctgggggc

SEQ ID NO: 1950637 - DNA, 25 bp, Homo sapien
tcccttgtagtttgcacactccagg

SEQ ID NO: 1950638 - DNA, 25 bp, Homo sapien
catggaaaccagttgggtatgggaa

SEQ ID NO: 1950639 - DNA, 25 bp, Homo sapien
tgtttggcaattcacactgtgcaga

SEQ ID NO: 1950640 - DNA, 25 bp, Homo sapien
agctttttcatagaggctgtcctca

SEQ ID NO: 1950641 - DNA, 25 bp, Homo sapien
actggactgggagtatagagtagca

SEQ ID NO: 1950642 - DNA, 25 bp, Homo sapien
cactgctgcattttttgactgagcg

SEQ ID NO: 1950643 - DNA, 25 bp, Homo sapien
gaatacgtgaatgggtcggcctgca

SEQ ID NO: 1950644 - DNA, 25 bp, Homo sapien
cagaccacatataccacgaggatcc

SEQ ID NO: 1950645 - DNA, 25 bp, Homo sapien
gaggatccatctcgtctgctccagg

SEQ ID NO: 1950646 - DNA, 25 bp, Homo sapien
tcttttgctgcggagtttgaggctc

SEQ ID NO: 1950647 - DNA, 25 bp, Homo sapien
gaggctctggtgacatacactgttt

SEQ ID NO: 1950648 - DNA, 25 bp, Homo sapien
cttcatggctgcgatttctgaagtg

SEQ ID NO: 1950649 - DNA, 25 bp, Homo sapien
tgcgatttctgaagtgtaagcctca

SEQ ID NO: 1950650 - DNA, 25 bp, Homo sapien
tctctgcgggaggtgttctacccag

SEQ ID NO: 1950651 - DNA, 25 bp, Homo sapien
gagatgcctaggttgcccagttcag

SEQ ID NO: 1950652 - DNA, 25 bp, Homo sapien
tacacactctccttgggttcacctg

SEQ ID NO: 1950653 - DNA, 25 bp, Homo sapien
tctcggtgatcagggaatgaatgac

SEQ ID NO: 1950654 - DNA, 25 bp, Homo sapien
cactgagccagcctattttttgtat

SEQ ID NO: 1950655 - DNA, 25 bp, Homo sapien
tgctgactgcaggtcatcctccgtc

SEQ ID NO: 1950656 - DNA, 25 bp, Homo sapien
gccactgagccagcctattttttgt

SEQ ID NO: 1950657 - DNA, 25 bp, Homo sapien
gcaggtcatcctccgtctgccttgg

SEQ ID NO: 1950658 - DNA, 25 bp, Homo sapien
gctgccgatcatgtcctctgggagg

SEQ ID NO: 1950659 - DNA, 25 bp, Homo sapien
gccctggtgcggctgagaaggagcg

SEQ ID NO: 1950660 - DNA, 25 bp, Homo sapien
tgctctgatgtcaaagagctgccga

SEQ ID NO: 1950661 - DNA, 25 bp, Homo sapien
gtgctgagtgcatctccacgacggc

SEQ ID NO: 1950662 - DNA, 25 bp, Homo sapien
ctgatggagggaagctgggtcagca

SEQ ID NO: 1950663 - DNA, 25 bp, Homo sapien
tgatggagggaagctgggtcagcat

SEQ ID NO: 1950664 - DNA, 25 bp, Homo sapien
ctttcagagtgcttgtgcatgcgca

SEQ ID NO: 1950665 - DNA, 25 bp, Homo sapien
cttctcatagcagggtgacaccgct

SEQ ID NO: 1950666 - DNA, 25 bp, Homo sapien
tagcagacctttgaggatccccagc

SEQ ID NO: 1950667 - DNA, 25 bp, Homo sapien
cacaagtggtatgtctagcagacct

SEQ ID NO: 1950668 - DNA, 25 bp, Homo sapien
gagtgtcatcttgctccctaagcgc

SEQ ID NO: 1950669 - DNA, 25 bp, Homo sapien
tcagttctttgagcagccggcatct

SEQ ID NO: 1950670 - DNA, 25 bp, Homo sapien
gttcgatgtcatggaaacgcactgc

SEQ ID NO: 1950671 - DNA, 25 bp, Homo sapien
cctaagcgcaaagggaagtctccgt

SEQ ID NO: 1950672 - DNA, 25 bp, Homo sapien
cccgagtgcctaggttttggagagt

SEQ ID NO: 1950673 - DNA, 25 bp, Homo sapien
tgggcgtacagagcacatttgtcag

SEQ ID NO: 1950674 - DNA, 25 bp, Homo sapien
tatttttgccggctggtgaattcaa

SEQ ID NO: 1950675 - DNA, 25 bp, Homo sapien
tttgcatgatatcttcaagcctggg

SEQ ID NO: 1950676 - DNA, 25 bp, Homo sapien
tgcacagtgtgtgacttacagaaac

SEQ ID NO: 1950677 - DNA, 25 bp, Homo sapien
agcctcggccctagcattgcacttg

SEQ ID NO: 1950678 - DNA, 25 bp, Homo sapien
ttgctgagaagcaaaccgccctgca

SEQ ID NO: 1950679 - DNA, 25 bp, Homo sapien
ggcgctgctggtgttcttattctgg

SEQ ID NO: 1950680 - DNA, 25 bp, Homo sapien
gagtctcctggtcgtaggtgttaac

SEQ ID NO: 1950681 - DNA, 25 bp, Homo sapien
tctccaggccaacctcggggtgtgg

SEQ ID NO: 1950682 - DNA, 25 bp, Homo sapien
cagagtctcctggtcgtaggtgtta

SEQ ID NO: 1950683 - DNA, 25 bp, Homo sapien
aggtgttaactttgggtccaatctg

SEQ ID NO: 1950684 - DNA, 25 bp, Homo sapien
gctaaagatggaataggcaaacccc

SEQ ID NO: 1950685 - DNA, 25 bp, Homo sapien
cactggctgcctgctaatgtcgctg

SEQ ID NO: 1950686 - DNA, 25 bp, Homo sapien
ggaaaacatcccgtgacagcaaatc

SEQ ID NO: 1950687 - DNA, 25 bp, Homo sapien
gactcttagaaacccaagcctctga

SEQ ID NO: 1950688 - DNA, 25 bp, Homo sapien
cattgttctgtgagaatggggtcaa

SEQ ID NO: 1950689 - DNA, 25 bp, Homo sapien
caggtgagcttgtgtgcaaggcggc

SEQ ID NO: 1950690 - DNA, 25 bp, Homo sapien
ggcaagatagccacattgagttggg

SEQ ID NO: 1950691 - DNA, 25 bp, Homo sapien
tcaacgggcagtcgtggtgcaggtg

SEQ ID NO: 1950692 - DNA, 25 bp, Homo sapien
agcaattcctagacatttgcctgtg

SEQ ID NO: 1950693 - DNA, 25 bp, Homo sapien
cgaggttctgttgttttccagaggc

SEQ ID NO: 1950694 - DNA, 25 bp, Homo sapien
tccaggtaggcagcaattcctagac

SEQ ID NO: 1950695 - DNA, 25 bp, Homo sapien
cccttctgtggcgaggttctgttgt

SEQ ID NO: 1950696 - DNA, 25 bp, Homo sapien
acaaggtgcaggcaatgggcctgct

SEQ ID NO: 1950697 - DNA, 25 bp, Homo sapien
taggagctcgggtaggttctggaga

SEQ ID NO: 1950698 - DNA, 25 bp, Homo sapien
gagcacagccatctgggtcattgac

SEQ ID NO: 1950699 - DNA, 25 bp, Homo sapien
agctcgggtaggttctggagagcac

SEQ ID NO: 1950700 - DNA, 25 bp, Homo sapien
aggcactttttggatggtaggactg

SEQ ID NO: 1950701 - DNA, 25 bp, Homo sapien
cactttttggatggtaggactggtt

SEQ ID NO: 1950702 - DNA, 25 bp, Homo sapien
cttgtaaggcactttttggatggta

SEQ ID NO: 1950703 - DNA, 25 bp, Homo sapien
taaggcactttttggatggtaggac

SEQ ID NO: 1950704 - DNA, 25 bp, Homo sapien
ccagggatctccaaccatctgacat

SEQ ID NO: 1950705 - DNA, 25 bp, Homo sapien
gcaactggctttacgatgctgaaga

SEQ ID NO: 1950706 - DNA, 25 bp, Homo sapien
gatgacaagttaggcagcccacctt

SEQ ID NO: 1950707 - DNA, 25 bp, Homo sapien
tctccaaggcatcctccaacaatgg

SEQ ID NO: 1950708 - DNA, 25 bp, Homo sapien
ttatgaaaatgtagtaggagaaaac

SEQ ID NO: 1950709 - DNA, 25 bp, Homo sapien
gcccagggataccgagtttgatgaa

SEQ ID NO: 1950710 - DNA, 25 bp, Homo sapien
agggataccgagtttgatgaactgc

SEQ ID NO: 1950711 - DNA, 25 bp, Homo sapien
gatggaagggtgtagtcctgactca

SEQ ID NO: 1950712 - DNA, 25 bp, Homo sapien
ccagggataccgagtttgatgaact

SEQ ID NO: 1950713 - DNA, 25 bp, Homo sapien
cctcctcttgccgtggtatgactgg

SEQ ID NO: 1950714 - DNA, 25 bp, Homo sapien
tcttgtttggctctctcggtgttgg

SEQ ID NO: 1950715 - DNA, 25 bp, Homo sapien
tcagtcctgtttgaatgcgggcttc

SEQ ID NO: 1950716 - DNA, 25 bp, Homo sapien
cctggtgtgtgctgactcctggaag

SEQ ID NO: 1950717 - DNA, 25 bp, Homo sapien
tggggctgagcatccctggttagaa

SEQ ID NO: 1950718 - DNA, 25 bp, Homo sapien
ggctgagcatccctggttagaagac

SEQ ID NO: 1950719 - DNA, 25 bp, Homo sapien
catccctggttagaagacgtgggtt

SEQ ID NO: 1950720 - DNA, 25 bp, Homo sapien
tgagcatccctggttagaagacgtg

SEQ ID NO: 1950721 - DNA, 25 bp, Homo sapien
atggccttctcgcccaactacatgt

SEQ ID NO: 1950722 - DNA, 25 bp, Homo sapien
gaactgtgctggtcaacgcggtgtc

SEQ ID NO: 1950723 - DNA, 25 bp, Homo sapien
gtgtcgggcgtgctcatggccttct

SEQ ID NO: 1950724 - DNA, 25 bp, Homo sapien
tctctgaaggtttggccgtaagctg

SEQ ID NO: 1950725 - DNA, 25 bp, Homo sapien
gcttctcgaggaaggcgttggggag

SEQ ID NO: 1950726 - DNA, 25 bp, Homo sapien
tggagcttctcgaggaaggcgttgg

SEQ ID NO: 1950727 - DNA, 25 bp, Homo sapien
ggagcttctcgaggaaggcgttggg

SEQ ID NO: 1950728 - DNA, 25 bp, Homo sapien
ctggggtcctgacaaatattccagc

SEQ ID NO: 1950729 - DNA, 25 bp, Homo sapien
taaaggagcagacgcggaaagcgac

SEQ ID NO: 1950730 - DNA, 25 bp, Homo sapien
agccaagcagcctggtggatctccg

SEQ ID NO: 1950731 - DNA, 25 bp, Homo sapien
tgagcgcggctgtggtttgcgggaa

SEQ ID NO: 1950732 - DNA, 25 bp, Homo sapien
gaaagcgacggtcagggaaaagcca

SEQ ID NO: 1950733 - DNA, 25 bp, Homo sapien
cgggctggcctacgccctgcctcac

SEQ ID NO: 1950734 - DNA, 25 bp, Homo sapien
ggctggcctacgccctgcctcactg

SEQ ID NO: 1950735 - DNA, 25 bp, Homo sapien
cttcctgctctactactggtgaggc

SEQ ID NO: 1950736 - DNA, 25 bp, Homo sapien
cctgctctactactggtgaggccct

SEQ ID NO: 1950737 - DNA, 25 bp, Homo sapien
tctcgagggaccagtctcttggagt

SEQ ID NO: 1950738 - DNA, 25 bp, Homo sapien
tacaggccgtcttccaaaggccatg

SEQ ID NO: 1950739 - DNA, 25 bp, Homo sapien
tggtgtccacatgcataacgcatgg

SEQ ID NO: 1950740 - DNA, 25 bp, Homo sapien
acccctctggctgcgctttctgtcc

SEQ ID NO: 1950741 - DNA, 25 bp, Homo sapien
agcagagcccggggtttcccacatg

SEQ ID NO: 1950742 - DNA, 25 bp, Homo sapien
gagcagagcccggggtttcccacat

SEQ ID NO: 1950743 - DNA, 25 bp, Homo sapien
cccggggtttcccacacgcatgatg

SEQ ID NO: 1950744 - DNA, 25 bp, Homo sapien
ggggtttcccacacgcatgatgcat

SEQ ID NO: 1950745 - DNA, 25 bp, Homo sapien
agggatgagcagagcccggggtttc

SEQ ID NO: 1950746 - DNA, 25 bp, Homo sapien
gatgagcagagcccggggtttccca

SEQ ID NO: 1950747 - DNA, 25 bp, Homo sapien
gcggcccaggttacatgtggagctt

SEQ ID NO: 1950748 - DNA, 25 bp, Homo sapien
aggttgttctgttattaccaggcgg

SEQ ID NO: 1950749 - DNA, 25 bp, Homo sapien
gggtttcccacacgcatatcgcatg

SEQ ID NO: 1950750 - DNA, 25 bp, Homo sapien
cttcccaccgcttgtactgttcagg

SEQ ID NO: 1950751 - DNA, 25 bp, Homo sapien
tcctttgaagcggtgttgggcctgc

SEQ ID NO: 1950752 - DNA, 25 bp, Homo sapien
atgaaggacgccgagaaccttggga

SEQ ID NO: 1950753 - DNA, 25 bp, Homo sapien
gggagtgacgctacttcttccagag

SEQ ID NO: 1950754 - DNA, 25 bp, Homo sapien
gggtcgctttgccagagaccatgaa

SEQ ID NO: 1950755 - DNA, 25 bp, Homo sapien
ttaagatgttctgtttaatcccttc

SEQ ID NO: 1950756 - DNA, 25 bp, Homo sapien
tgttctgtttaatcccttcactctc

SEQ ID NO: 1950757 - DNA, 25 bp, Homo sapien
atcctaatcattcccgccctgccag

SEQ ID NO: 1950758 - DNA, 25 bp, Homo sapien
tctgtttaatcccttcactctctca

SEQ ID NO: 1950759 - DNA, 25 bp, Homo sapien
gccagtcttcagagtatatcaggaa

SEQ ID NO: 1950760 - DNA, 25 bp, Homo sapien
catagcccttcatttcagtgttgga

SEQ ID NO: 1950761 - DNA, 25 bp, Homo sapien
cagtgatggccacaaggacttgaga

SEQ ID NO: 1950762 - DNA, 25 bp, Homo sapien
tgtattatagacacttctggcctga

SEQ ID NO: 1950763 - DNA, 25 bp, Homo sapien
cttagaatcctcttggcaaaacttc

SEQ ID NO: 1950764 - DNA, 25 bp, Homo sapien
ctaatctttcttagaatcctcttgg

SEQ ID NO: 1950765 - DNA, 25 bp, Homo sapien
ctttcttagaatcctcttggcaaaa

SEQ ID NO: 1950766 - DNA, 25 bp, Homo sapien
tcttggcaaaacttctgaggaaggc

SEQ ID NO: 1950767 - DNA, 25 bp, Homo sapien
taaggtttgtctgaccagtcaggaa

SEQ ID NO: 1950768 - DNA, 25 bp, Homo sapien
cacacagcggcattggtgcgggtca

SEQ ID NO: 1950769 - DNA, 25 bp, Homo sapien
tcacagtaaggtttgtctgaccagt

SEQ ID NO: 1950770 - DNA, 25 bp, Homo sapien
cattggtgcgggtcacagtaaggtt

SEQ ID NO: 1950771 - DNA, 25 bp, Homo sapien
gactatctccgccattgtcaggaat

SEQ ID NO: 1950772 - DNA, 25 bp, Homo sapien
caggagcttcattggctaagcctgc

SEQ ID NO: 1950773 - DNA, 25 bp, Homo sapien
taagcctgcagcactcagggtgacc

SEQ ID NO: 1950774 - DNA, 25 bp, Homo sapien
tgcaaacagtcccagattgaggatc

SEQ ID NO: 1950775 - DNA, 25 bp, Homo sapien
gaggcagctcagagattccttgtgc

SEQ ID NO: 1950776 - DNA, 25 bp, Homo sapien
gagcagcatgatgtgacttagggct

SEQ ID NO: 1950777 - DNA, 25 bp, Homo sapien
gctcagagattccttgtgccatggg

SEQ ID NO: 1950778 - DNA, 25 bp, Homo sapien
gggaccctgagcaggtggacctgag

SEQ ID NO: 1950779 - DNA, 25 bp, Homo sapien
tgaattgcgaagattacgttttcca

SEQ ID NO: 1950780 - DNA, 25 bp, Homo sapien
ttgaattgcgaagattacgttttcc

SEQ ID NO: 1950781 - DNA, 25 bp, Homo sapien
gaattgcgaagattacgttttccac

SEQ ID NO: 1950782 - DNA, 25 bp, Homo sapien
tttgaattgcgaagattacgttttc

SEQ ID NO: 1950783 - DNA, 25 bp, Homo sapien
catttgatggatactgaagacagga

SEQ ID NO: 1950784 - DNA, 25 bp, Homo sapien
ccaggacttgttgagtttgagcaaa

SEQ ID NO: 1950785 - DNA, 25 bp, Homo sapien
gagttcagcagttccagttggcaaa

SEQ ID NO: 1950786 - DNA, 25 bp, Homo sapien
tgagcaaagatgtccaatgggtggt

SEQ ID NO: 1950787 - DNA, 25 bp, Homo sapien
actctacacgtgctatgactttgaa

SEQ ID NO: 1950788 - DNA, 25 bp, Homo sapien
cctggtcccctcagtggctcgggct

SEQ ID NO: 1950789 - DNA, 25 bp, Homo sapien
gctgcctctgatacggggccgctgt

SEQ ID NO: 1950790 - DNA, 25 bp, Homo sapien
tcaaatggggaactctacacgtgct

SEQ ID NO: 1950791 - DNA, 25 bp, Homo sapien
aacggtaattacagtcaactcttca

SEQ ID NO: 1950792 - DNA, 25 bp, Homo sapien
cttagctgtcatactcctaacggta

SEQ ID NO: 1950793 - DNA, 25 bp, Homo sapien
ttaaattccaggctagaactgtaag

SEQ ID NO: 1950794 - DNA, 25 bp, Homo sapien
tcatactcctaacggtaattacagt

SEQ ID NO: 1950795 - DNA, 25 bp, Homo sapien
tttcattaattgatgcatccatcat

SEQ ID NO: 1950796 - DNA, 25 bp, Homo sapien
aattgatgcatccatcatccaacca

SEQ ID NO: 1950797 - DNA, 25 bp, Homo sapien
ctgttttcattaattgatgcatcca

SEQ ID NO: 1950798 - DNA, 25 bp, Homo sapien
taattgatgcatccatcatccaacc

SEQ ID NO: 1950799 - DNA, 25 bp, Homo sapien
taatccaatcatgaagggtttgccc

SEQ ID NO: 1950800 - DNA, 25 bp, Homo sapien
ggtctcccttgaatatccaggcaca

SEQ ID NO: 1950801 - DNA, 25 bp, Homo sapien
gagcaaagaggaaccgacaggcttc

SEQ ID NO: 1950802 - DNA, 25 bp, Homo sapien
tgaaagcaccgtagctggtctccct

SEQ ID NO: 1950803 - DNA, 25 bp, Homo sapien
caagaggagtcctggcatgtaaagg

SEQ ID NO: 1950804 - DNA, 25 bp, Homo sapien
agaaagcaagaggagtcctggcatg

SEQ ID NO: 1950805 - DNA, 25 bp, Homo sapien
agcacgtattacatgacagaaagca

SEQ ID NO: 1950806 - DNA, 25 bp, Homo sapien
ggagcaaaagcacgtattacatgac

SEQ ID NO: 1950807 - DNA, 25 bp, Homo sapien
gagattcactttaagtctaacctag

SEQ ID NO: 1950808 - DNA, 25 bp, Homo sapien
cttacccaatctaaatatggaagga

SEQ ID NO: 1950809 - DNA, 25 bp, Homo sapien
aaaattcttgacatacattctggac

SEQ ID NO: 1950810 - DNA, 25 bp, Homo sapien
ggaaggacctcatgatcacttaagt

SEQ ID NO: 1950811 - DNA, 25 bp, Homo sapien
caatgtccaatgtcctaggaatgct

SEQ ID NO: 1950812 - DNA, 25 bp, Homo sapien
tctattttgtttgcctagcccacag

SEQ ID NO: 1950813 - DNA, 25 bp, Homo sapien
ccactggctgtagacctaggttgat

SEQ ID NO: 1950814 - DNA, 25 bp, Homo sapien
caaagctaggtcatgacagcagcaa

SEQ ID NO: 1950815 - DNA, 25 bp, Homo sapien
aatgtctagtttctgaacttggagg

SEQ ID NO: 1950816 - DNA, 25 bp, Homo sapien
gaatgtctagtttctgaacttggag

SEQ ID NO: 1950817 - DNA, 25 bp, Homo sapien
tctgaacttggaggtaaatcatctt

SEQ ID NO: 1950818 - DNA, 25 bp, Homo sapien
catttgttcaaattgcaagttttct

SEQ ID NO: 1950819 - DNA, 25 bp, Homo sapien
acatttgttcaaattgcaagttttc

SEQ ID NO: 1950820 - DNA, 25 bp, Homo sapien
aaacatttgttcaaattgcaagttt

SEQ ID NO: 1950821 - DNA, 25 bp, Homo sapien
aacatttgttcaaattgcaagtttt

SEQ ID NO: 1950822 - DNA, 25 bp, Homo sapien
tcatcttgtcttcgtgaatgccagg

SEQ ID NO: 1950823 - DNA, 25 bp, Homo sapien
cgtgaatgccaggacattgctgata

SEQ ID NO: 1950824 - DNA, 25 bp, Homo sapien
gaatgccaggacattgctgatattc

SEQ ID NO: 1950825 - DNA, 25 bp, Homo sapien
gtcttcgtgaatgccaggacattgc

SEQ ID NO: 1950826 - DNA, 25 bp, Homo sapien
tcaccctatggttttggaattctct

SEQ ID NO: 1950827 - DNA, 25 bp, Homo sapien
cctcgatggtctcaggcaaagcttt

SEQ ID NO: 1950828 - DNA, 25 bp, Homo sapien
ctggaagcaacagcaccagacctcc

SEQ ID NO: 1950829 - DNA, 25 bp, Homo sapien
ctttgcatattttcggcttcctcga

SEQ ID NO: 1950830 - DNA, 25 bp, Homo sapien
ttgcatattttcggcttcctcgatg

SEQ ID NO: 1950831 - DNA, 25 bp, Homo sapien
gaacaacggaaaccagccaatgctg

SEQ ID NO: 1950832 - DNA, 25 bp, Homo sapien
caagctcagaattggctgctctaaa

SEQ ID NO: 1950833 - DNA, 25 bp, Homo sapien
gctcaatagctaaggcttcaccatt

SEQ ID NO: 1950834 - DNA, 25 bp, Homo sapien
tggtttccaccatccaacagatagg

SEQ ID NO: 1950835 - DNA, 25 bp, Homo sapien
taaagacatctgtgaagatttctta

SEQ ID NO: 1950836 - DNA, 25 bp, Homo sapien
aaagacatctgtgaagatttcttac

SEQ ID NO: 1950837 - DNA, 25 bp, Homo sapien
gttttcacttaaagacatctgtgaa

SEQ ID NO: 1950838 - DNA, 25 bp, Homo sapien
ttcacttaaagacatctgtgaagat

SEQ ID NO: 1950839 - DNA, 25 bp, Homo sapien
ttagtgagccggtagaccaggaatg

SEQ ID NO: 1950840 - DNA, 25 bp, Homo sapien
gagctcaagccagatgttagtgagc

SEQ ID NO: 1950841 - DNA, 25 bp, Homo sapien
tgtcacacattgaggaacagatgtg

SEQ ID NO: 1950842 - DNA, 25 bp, Homo sapien
accaggaatggcgtgatgatgccac

SEQ ID NO: 1950843 - DNA, 25 bp, Homo sapien
cataggccattgtgatccccattct

SEQ ID NO: 1950844 - DNA, 25 bp, Homo sapien
gcagactatctcataggccattgtg

SEQ ID NO: 1950845 - DNA, 25 bp, Homo sapien
tgatccccattcttcccaagcatga

SEQ ID NO: 1950846 - DNA, 25 bp, Homo sapien
agctcagcattgaccaggcagacta

SEQ ID NO: 1950847 - DNA, 25 bp, Homo sapien
gagtgggactgtaaggacaaattcc

SEQ ID NO: 1950848 - DNA, 25 bp, Homo sapien
gatgaaccttcagtggcaacgataa

SEQ ID NO: 1950849 - DNA, 25 bp, Homo sapien
taatcaccccaaatctatagctggc

SEQ ID NO: 1950850 - DNA, 25 bp, Homo sapien
gctgggccaactttagtctatagaa

SEQ ID NO: 1950851 - DNA, 25 bp, Homo sapien
tcacatcaaggaaaaattgggtaca

SEQ ID NO: 1950852 - DNA, 25 bp, Homo sapien
cacatcaaggaaaaattgggtacaa

SEQ ID NO: 1950853 - DNA, 25 bp, Homo sapien
acatcaaggaaaaattgggtacaat

SEQ ID NO: 1950854 - DNA, 25 bp, Homo sapien
catcaaggaaaaattgggtacaatt

SEQ ID NO: 1950855 - DNA, 25 bp, Homo sapien
ggttttcctatcaatgggccgtgac

SEQ ID NO: 1950856 - DNA, 25 bp, Homo sapien
tggccatatgaatttgctcagaagg

SEQ ID NO: 1950857 - DNA, 25 bp, Homo sapien
tcagaagggtcccagatactgccct

SEQ ID NO: 1950858 - DNA, 25 bp, Homo sapien
tccagggtcttggagataagactcc

SEQ ID NO: 1950859 - DNA, 25 bp, Homo sapien
aggctgcccctgcaaccatatttga

SEQ ID NO: 1950860 - DNA, 25 bp, Homo sapien
gggaattcaaccagggcagagtaga

SEQ ID NO: 1950861 - DNA, 25 bp, Homo sapien
gcaaggcccatgtgcatgatgaggc

SEQ ID NO: 1950862 - DNA, 25 bp, Homo sapien
tttgatgcagcccaagggtaacggc

SEQ ID NO: 1950863 - DNA, 25 bp, Homo sapien
ctggtagagcacagagctcgtgaac

SEQ ID NO: 1950864 - DNA, 25 bp, Homo sapien
ttccaatgtgaagccgaggttgcca

SEQ ID NO: 1950865 - DNA, 25 bp, Homo sapien
gaaaagatgcattccccactagaga

SEQ ID NO: 1950866 - DNA, 25 bp, Homo sapien
tgcaattgggatcgaaagaactgac

SEQ ID NO: 1950867 - DNA, 25 bp, Homo sapien
ccagaagaccaagtgagtacggcct

SEQ ID NO: 1950868 - DNA, 25 bp, Homo sapien
cagacacaacccacattgctgccca

SEQ ID NO: 1950869 - DNA, 25 bp, Homo sapien
ttgctgcccaccgtcagcgctaata

SEQ ID NO: 1950870 - DNA, 25 bp, Homo sapien
ttcttcccttccttactatggatga

SEQ ID NO: 1950871 - DNA, 25 bp, Homo sapien
aataccgggatgaggtcatgttttc

SEQ ID NO: 1950872 - DNA, 25 bp, Homo sapien
acaatttggaggcatttcaaagtga

SEQ ID NO: 1950873 - DNA, 25 bp, Homo sapien
gattaaaacaatttggaggcatttc

SEQ ID NO: 1950874 - DNA, 25 bp, Homo sapien
ctgtgattaaaacaatttggaggca

SEQ ID NO: 1950875 - DNA, 25 bp, Homo sapien
aaacaatttggaggcatttcaaagt

SEQ ID NO: 1950876 - DNA, 25 bp, Homo sapien
caatatcatagtatgtttccttatc

SEQ ID NO: 1950877 - DNA, 25 bp, Homo sapien
tacatcaatatcatagtatgtttcc

SEQ ID NO: 1950878 - DNA, 25 bp, Homo sapien
ttgtacatcaatatcatagtatgtt

SEQ ID NO: 1950879 - DNA, 25 bp, Homo sapien
tatcatagtatgtttccttatctga

SEQ ID NO: 1950880 - DNA, 25 bp, Homo sapien
aaatgaagggttcaatttcttgcca

SEQ ID NO: 1950881 - DNA, 25 bp, Homo sapien
agaaatgaagggttcaatttcttgc

SEQ ID NO: 1950882 - DNA, 25 bp, Homo sapien
tgaagggttcaatttcttgccagtt

SEQ ID NO: 1950883 - DNA, 25 bp, Homo sapien
aatgaagggttcaatttcttgccag

SEQ ID NO: 1950884 - DNA, 25 bp, Homo sapien
ttcttattctgggagatcagccacc

SEQ ID NO: 1950885 - DNA, 25 bp, Homo sapien
gcttcagcattcttattctgggaga

SEQ ID NO: 1950886 - DNA, 25 bp, Homo sapien
agggaggcgggtagagattttccat

SEQ ID NO: 1950887 - DNA, 25 bp, Homo sapien
cgatgtgcttaatgattctcatggc

SEQ ID NO: 1950888 - DNA, 25 bp, Homo sapien
caagaagaagaagttgggcagagaa

SEQ ID NO: 1950889 - DNA, 25 bp, Homo sapien
agcaagaagaagaagttgggcagag

SEQ ID NO: 1950890 - DNA, 25 bp, Homo sapien
cagtaatagagcaagaagaagaagt

SEQ ID NO: 1950891 - DNA, 25 bp, Homo sapien
agaagaagaagttgggcagagaaac

SEQ ID NO: 1950892 - DNA, 25 bp, Homo sapien
cccaactgtataggcaacttggtaa

SEQ ID NO: 1950893 - DNA, 25 bp, Homo sapien
gcaccaggagcccaactgtataggc

SEQ ID NO: 1950894 - DNA, 25 bp, Homo sapien
aaatccccactgttctccgatatct

SEQ ID NO: 1950895 - DNA, 25 bp, Homo sapien
cagtgaggaagtgcgtaagccaccc

SEQ ID NO: 1950896 - DNA, 25 bp, Homo sapien
tattcctcgtcctaaaaatggctgg

SEQ ID NO: 1950897 - DNA, 25 bp, Homo sapien
cttggtaacttagcagagggctgga

SEQ ID NO: 1950898 - DNA, 25 bp, Homo sapien
tatggaacttaactgtaactctggc

SEQ ID NO: 1950899 - DNA, 25 bp, Homo sapien
tacaataatgagttggctgtccagc

SEQ ID NO: 1950900 - DNA, 25 bp, Homo sapien
ggcagcgaggttgctttgttctcac

SEQ ID NO: 1950901 - DNA, 25 bp, Homo sapien
ttttggcagcgaggttgctttgttc

SEQ ID NO: 1950902 - DNA, 25 bp, Homo sapien
ttggcagcgaggttgctttgttctc

SEQ ID NO: 1950903 - DNA, 25 bp, Homo sapien
tattttggcagcgaggttgctttgt

SEQ ID NO: 1950904 - DNA, 25 bp, Homo sapien
ttatgaggactgtagttaggaggca

SEQ ID NO: 1950905 - DNA, 25 bp, Homo sapien
cgaaaaattaacatccacgtatagg

SEQ ID NO: 1950906 - DNA, 25 bp, Homo sapien
gtagcctattaaccagcctgctttg

SEQ ID NO: 1950907 - DNA, 25 bp, Homo sapien
aactccagctgcagcatttatgagg

SEQ ID NO: 1950908 - DNA, 25 bp, Homo sapien
tgtctgctatgtagccgatactcat

SEQ ID NO: 1950909 - DNA, 25 bp, Homo sapien
gaataggtccaacatccaggagttg

SEQ ID NO: 1950910 - DNA, 25 bp, Homo sapien
caggagttggcacataccaggttaa

SEQ ID NO: 1950911 - DNA, 25 bp, Homo sapien
gccgatactcatagagccaataaag

SEQ ID NO: 1950912 - DNA, 25 bp, Homo sapien
taatagtgccatagcatgatctcca

SEQ ID NO: 1950913 - DNA, 25 bp, Homo sapien
ttccacgggctttcaggtgtgtgtg

SEQ ID NO: 1950914 - DNA, 25 bp, Homo sapien
tatcacacagtcaggcacagttcag

SEQ ID NO: 1950915 - DNA, 25 bp, Homo sapien
taggtatcgagagaaaagcacatcc

SEQ ID NO: 1950916 - DNA, 25 bp, Homo sapien
ctcgtagcgcctacactgtcttggg

SEQ ID NO: 1950917 - DNA, 25 bp, Homo sapien
tgacgatggacgagccaggcgtctc

SEQ ID NO: 1950918 - DNA, 25 bp, Homo sapien
ggcccggcaccgtgtagttcagttc

SEQ ID NO: 1950919 - DNA, 25 bp, Homo sapien
gggtccacgcagtcgaaggtgctct

SEQ ID NO: 1950920 - DNA, 25 bp, Homo sapien
gctccggcagcggtggtcaggggtg

SEQ ID NO: 1950921 - DNA, 25 bp, Homo sapien
gtagatgggcgcgaaggtagccgag

SEQ ID NO: 1950922 - DNA, 25 bp, Homo sapien
ggcgcgaaggtagccgagagcagag

SEQ ID NO: 1950923 - DNA, 25 bp, Homo sapien
cccacgtagatgggcgcgaaggtag

SEQ ID NO: 1950924 - DNA, 25 bp, Homo sapien
tccaggacatcgtccacggtggtgg

SEQ ID NO: 1950925 - DNA, 25 bp, Homo sapien
gctccaggacatcgtccacggtggt

SEQ ID NO: 1950926 - DNA, 25 bp, Homo sapien
tgctccaggacatcgtccacggtgg

SEQ ID NO: 1950927 - DNA, 25 bp, Homo sapien
catgctccaggacatcgtccacggt

SEQ ID NO: 1950928 - DNA, 25 bp, Homo sapien
gaggctgcccgacgtgcccggagcg

SEQ ID NO: 1950929 - DNA, 25 bp, Homo sapien
gctgcccgacgtgcccggagcgagg

SEQ ID NO: 1950930 - DNA, 25 bp, Homo sapien
aggctgcccgacgtgcccggagcga

SEQ ID NO: 1950931 - DNA, 25 bp, Homo sapien
cccgaggctgcccgacgtgcccgga

SEQ ID NO: 1950932 - DNA, 25 bp, Homo sapien
gagtttacctctgcaagtgaccagc

SEQ ID NO: 1950933 - DNA, 25 bp, Homo sapien
tcactcccaggatgcctgtcgtgtt

SEQ ID NO: 1950934 - DNA, 25 bp, Homo sapien
gccagaagtcaaagaggggagttta

SEQ ID NO: 1950935 - DNA, 25 bp, Homo sapien
gcatgtccttctgcacttcccaaat

SEQ ID NO: 1950936 - DNA, 25 bp, Homo sapien
tgtttacgtcgcagacaggtcaagt

SEQ ID NO: 1950937 - DNA, 25 bp, Homo sapien
cagtgggccgtaaagaaatccagac

SEQ ID NO: 1950938 - DNA, 25 bp, Homo sapien
tagcgtagtctaaaaggagcgaccc

SEQ ID NO: 1950939 - DNA, 25 bp, Homo sapien
gctcagaaatccatgccccaaggtg

SEQ ID NO: 1950940 - DNA, 25 bp, Homo sapien
ggcgccggcaaggacatccattgac

SEQ ID NO: 1950941 - DNA, 25 bp, Homo sapien
agggcgccggcaaggacatccattg

SEQ ID NO: 1950942 - DNA, 25 bp, Homo sapien
gcagggcgccggcaaggacatccat

SEQ ID NO: 1950943 - DNA, 25 bp, Homo sapien
caaaaagcagggcgccggcaaggac

SEQ ID NO: 1950944 - DNA, 25 bp, Homo sapien
gcactctgcttcgtggtgccctggg

SEQ ID NO: 1950945 - DNA, 25 bp, Homo sapien
tgtttagggacttcccattcgcagc

SEQ ID NO: 1950946 - DNA, 25 bp, Homo sapien
gcatgagccggaagccaaggctgct

SEQ ID NO: 1950947 - DNA, 25 bp, Homo sapien
cattcgcagccagcatcgtgagtgc

SEQ ID NO: 1950948 - DNA, 25 bp, Homo sapien
aggaaattggaattcgcctggtgat

SEQ ID NO: 1950949 - DNA, 25 bp, Homo sapien
aaaatgttagctctgtgccgatatc

SEQ ID NO: 1950950 - DNA, 25 bp, Homo sapien
gaaattggaattcgcctggtgatga

SEQ ID NO: 1950951 - DNA, 25 bp, Homo sapien
gtgccgatatcctttgaggcaggaa

SEQ ID NO: 1950952 - DNA, 25 bp, Homo sapien
acaacttgattctccctcagggctg

SEQ ID NO: 1950953 - DNA, 25 bp, Homo sapien
tccctcagggctgccgagtgtctga

SEQ ID NO: 1950954 - DNA, 25 bp, Homo sapien
gtgtctgacgggacaaatccttcca

SEQ ID NO: 1950955 - DNA, 25 bp, Homo sapien
cagtatgccagtgacgaaattcaca

SEQ ID NO: 1950956 - DNA, 25 bp, Homo sapien
tgctggctttgtgcgaaaccgagaa

SEQ ID NO: 1950957 - DNA, 25 bp, Homo sapien
aaaccgagaaatacccagcgtccag

SEQ ID NO: 1950958 - DNA, 25 bp, Homo sapien
gctttgtgcgaaaccgagaaatacc

SEQ ID NO: 1950959 - DNA, 25 bp, Homo sapien
agcaaaagcaaaccccgcagctgcc

SEQ ID NO: 1950960 - DNA, 25 bp, Homo sapien
ctgagggcccgggtggcaacaaaat

SEQ ID NO: 1950961 - DNA, 25 bp, Homo sapien
gagggcccgggtggcaacaaaatca

SEQ ID NO: 1950962 - DNA, 25 bp, Homo sapien
tgagggcccgggtggcaacaaaatc

SEQ ID NO: 1950963 - DNA, 25 bp, Homo sapien
tctctgacagtctgggattctccct

SEQ ID NO: 1950964 - DNA, 25 bp, Homo sapien
tgtgaccataaggacaagaggcctg

SEQ ID NO: 1950965 - DNA, 25 bp, Homo sapien
ccatcctaatgatgaagctcaggtg

SEQ ID NO: 1950966 - DNA, 25 bp, Homo sapien
tggccccaattctgagaatgtgacc

SEQ ID NO: 1950967 - DNA, 25 bp, Homo sapien
cttgatgccccaggtaggaatcttg

SEQ ID NO: 1950968 - DNA, 25 bp, Homo sapien
tgatcgtcaaggattcacccctgcc

SEQ ID NO: 1950969 - DNA, 25 bp, Homo sapien
gaagcaaactgcattctcgtcctta

SEQ ID NO: 1950970 - DNA, 25 bp, Homo sapien
cgtccttactccgtgatcgtcaagg

SEQ ID NO: 1950971 - DNA, 25 bp, Homo sapien
actgttcagcagtttgcctaaccga

SEQ ID NO: 1950972 - DNA, 25 bp, Homo sapien
ttgcctaaccgagaatccacagctt

SEQ ID NO: 1950973 - DNA, 25 bp, Homo sapien
tctggctccctgtctcggaagcaat

SEQ ID NO: 1950974 - DNA, 25 bp, Homo sapien
gaagcaatgttctcgcgtcttcctc

SEQ ID NO: 1950975 - DNA, 25 bp, Homo sapien
tgggaagtgatcctgctcccctgag

SEQ ID NO: 1950976 - DNA, 25 bp, Homo sapien
gagtcgttaactccaccttgtggtg

SEQ ID NO: 1950977 - DNA, 25 bp, Homo sapien
tcaacagggagattgatctggtctc

SEQ ID NO: 1950978 - DNA, 25 bp, Homo sapien
aaaagccaggatccaaaagccagct

SEQ ID NO: 1950979 - DNA, 25 bp, Homo sapien
catagagctgggttcccaggatccc

SEQ ID NO: 1950980 - DNA, 25 bp, Homo sapien
ctccagagcacggtccctagaaagg

SEQ ID NO: 1950981 - DNA, 25 bp, Homo sapien
ccctagaaaggatgggctgcctacc

SEQ ID NO: 1950982 - DNA, 25 bp, Homo sapien
tcagtgaggcccgaagaaactctct

SEQ ID NO: 1950983 - DNA, 25 bp, Homo sapien
ggcacccagtgaatgaacagtggcg

SEQ ID NO: 1950984 - DNA, 25 bp, Homo sapien
aacgtgtgtgttcatacttctggca

SEQ ID NO: 1950985 - DNA, 25 bp, Homo sapien
caccacggtggctaagctttcagaa

SEQ ID NO: 1950986 - DNA, 25 bp, Homo sapien
tctggcagttggtttgaggaatacc

SEQ ID NO: 1950987 - DNA, 25 bp, Homo sapien
ccatgccgggcatggtgctgggccc

SEQ ID NO: 1950988 - DNA, 25 bp, Homo sapien
ccgggcatggtgctgggccccgggg

SEQ ID NO: 1950989 - DNA, 25 bp, Homo sapien
tccatgccgggcatggtgctgggcc

SEQ ID NO: 1950990 - DNA, 25 bp, Homo sapien
ggcatggtgctgggccccggggcac

SEQ ID NO: 1950991 - DNA, 25 bp, Homo sapien
ggcacctccgagacggaggaaagca

SEQ ID NO: 1950992 - DNA, 25 bp, Homo sapien
gatctgaaggcgctcatcgcctgca

SEQ ID NO: 1950993 - DNA, 25 bp, Homo sapien
ctgaaggcgctcatcgcctgcaggg

SEQ ID NO: 1950994 - DNA, 25 bp, Homo sapien
caagggcttggggagatccaaacag

SEQ ID NO: 1950995 - DNA, 25 bp, Homo sapien
ctatgaagagttttaggctcgttag

SEQ ID NO: 1950996 - DNA, 25 bp, Homo sapien
tttgccgtgcacaccatcggggctc

SEQ ID NO: 1950997 - DNA, 25 bp, Homo sapien
ttagggccttgtcttttgcactcac

SEQ ID NO: 1950998 - DNA, 25 bp, Homo sapien
gctcgttagggccttgtcttttgca

SEQ ID NO: 1950999 - DNA, 25 bp, Homo sapien
ccttcttgggctattgctggtctct

SEQ ID NO: 1951000 - DNA, 25 bp, Homo sapien
gcccttcttgggctattgctggtct

SEQ ID NO: 1951001 - DNA, 25 bp, Homo sapien
aaagcccttcttgggctattgctgg

SEQ ID NO: 1951002 - DNA, 25 bp, Homo sapien
ttcttgggctattgctggtctcttt

SEQ ID NO: 1951003 - DNA, 25 bp, Homo sapien
ccacaggtcaggctcacttcggagg

SEQ ID NO: 1951004 - DNA, 25 bp, Homo sapien
agctgcagggccgatggggacactc

SEQ ID NO: 1951005 - DNA, 25 bp, Homo sapien
ggaccacaggtcaggctcacttcgg

SEQ ID NO: 1951006 - DNA, 25 bp, Homo sapien
acaggtcaggctcacttcggagggt

SEQ ID NO: 1951007 - DNA, 25 bp, Homo sapien
tatagcctgggaagagtgcgagttg

SEQ ID NO: 1951008 - DNA, 25 bp, Homo sapien
gacagtggctgctagcttaagtggg

SEQ ID NO: 1951009 - DNA, 25 bp, Homo sapien
taacccgtgggaatgaagtatagcc

SEQ ID NO: 1951010 - DNA, 25 bp, Homo sapien
aagagtgcgagttgaacgatgcaga

SEQ ID NO: 1951011 - DNA, 25 bp, Homo sapien
ggctctgaattgcagaaagccagaa

SEQ ID NO: 1951012 - DNA, 25 bp, Homo sapien
actgaggaatgtgagtgggctttct

SEQ ID NO: 1951013 - DNA, 25 bp, Homo sapien
aggcactctcggtctcaacgggctc

SEQ ID NO: 1951014 - DNA, 25 bp, Homo sapien
agaaatgcacaaaccagagctctct

SEQ ID NO: 1951015 - DNA, 25 bp, Homo sapien
cactccaccatcgtcagcgaggtaa

SEQ ID NO: 1951016 - DNA, 25 bp, Homo sapien
acaagccgcgtgtgagacgctggcc

SEQ ID NO: 1951017 - DNA, 25 bp, Homo sapien
tccccttgtgccgtgccgcggcggc

SEQ ID NO: 1951018 - DNA, 25 bp, Homo sapien
tcccaggcggacaagccgcgtgtga

SEQ ID NO: 1951019 - DNA, 25 bp, Homo sapien
tacgccatgtgctggtgtgttcgca

SEQ ID NO: 1951020 - DNA, 25 bp, Homo sapien
cagtggatggctctatgctaagtgc

SEQ ID NO: 1951021 - DNA, 25 bp, Homo sapien
tatctcgctgcagttgggagtgtcg

SEQ ID NO: 1951022 - DNA, 25 bp, Homo sapien
ggatctttctgtaacgccgtgtgct

SEQ ID NO: 1951023 - DNA, 25 bp, Homo sapien
tcagggtgtttctataatgccacat

SEQ ID NO: 1951024 - DNA, 25 bp, Homo sapien
gtgtgttcagggtgtttctataatg

SEQ ID NO: 1951025 - DNA, 25 bp, Homo sapien
gacagccaggcaatgtgtatgtgtg

SEQ ID NO: 1951026 - DNA, 25 bp, Homo sapien
tgtatgtgtgttcagggtgtttcta

SEQ ID NO: 1951027 - DNA, 25 bp, Homo sapien
gtcatcaatcgagcctgctccaggg

SEQ ID NO: 1951028 - DNA, 25 bp, Homo sapien
caccacacagtagtctgtgtcatca

SEQ ID NO: 1951029 - DNA, 25 bp, Homo sapien
tccattgtgcagaagagacttttcc

SEQ ID NO: 1951030 - DNA, 25 bp, Homo sapien
ctgggcacaggtgcaaggcccggtg

SEQ ID NO: 1951031 - DNA, 25 bp, Homo sapien
gctgcagggcttgaactccatcgca

SEQ ID NO: 1951032 - DNA, 25 bp, Homo sapien
attgcagtctgagcagagggacgct

SEQ ID NO: 1951033 - DNA, 25 bp, Homo sapien
ctttccaattgcagtctgagcagag

SEQ ID NO: 1951034 - DNA, 25 bp, Homo sapien
caattgcagtctgagcagagggacg

SEQ ID NO: 1951035 - DNA, 25 bp, Homo sapien
tcctttgggccgacagagttgtctc

SEQ ID NO: 1951036 - DNA, 25 bp, Homo sapien
gggactcgggcagctatttcaggca

SEQ ID NO: 1951037 - DNA, 25 bp, Homo sapien
cctaagccaggtggaaggtccgaga

SEQ ID NO: 1951038 - DNA, 25 bp, Homo sapien
tgtctctaattgagtgcaggcagcc

SEQ ID NO: 1951039 - DNA, 25 bp, Homo sapien
ttgaaggtaactgaaacttcctctg

SEQ ID NO: 1951040 - DNA, 25 bp, Homo sapien
cagtgtcttccgctgctgtctccaa

SEQ ID NO: 1951041 - DNA, 25 bp, Homo sapien
tctccaagtggtgttcttgtcatcc

SEQ ID NO: 1951042 - DNA, 25 bp, Homo sapien
tctgccctgacaggccatgctgctg

SEQ ID NO: 1951043 - DNA, 25 bp, Homo sapien
tggctgcagacgtcttacaaagtgg

SEQ ID NO: 1951044 - DNA, 25 bp, Homo sapien
ttgggatgacccaatggccagggca

SEQ ID NO: 1951045 - DNA, 25 bp, Homo sapien
cagttccaggagagtcacaagccct

SEQ ID NO: 1951046 - DNA, 25 bp, Homo sapien
gagagtcatgaatgccgaacaggca

SEQ ID NO: 1951047 - DNA, 25 bp, Homo sapien
ttccctgcatatgtgggtatccacg

SEQ ID NO: 1951048 - DNA, 25 bp, Homo sapien
ccagtccaaacatgtgtgggcactt

SEQ ID NO: 1951049 - DNA, 25 bp, Homo sapien
tgaatgtctcttcattgcttctcca

SEQ ID NO: 1951050 - DNA, 25 bp, Homo sapien
aactcttgtagtttgtctccagtcc

SEQ ID NO: 1951051 - DNA, 25 bp, Homo sapien
taaggcaagtgcagtgccagaggct

SEQ ID NO: 1951052 - DNA, 25 bp, Homo sapien
ctgtccaactcgcatagaaggctga

SEQ ID NO: 1951053 - DNA, 25 bp, Homo sapien
gagacagagcaagagcacgtgcaga

SEQ ID NO: 1951054 - DNA, 25 bp, Homo sapien
gcacgtgcagactgtgctgtccaac

SEQ ID NO: 1951055 - DNA, 25 bp, Homo sapien
ggaaagtgaagttggcaaggcagaa

SEQ ID NO: 1951056 - DNA, 25 bp, Homo sapien
gggaaagtgaagttggcaaggcaga

SEQ ID NO: 1951057 - DNA, 25 bp, Homo sapien
ggggaaagtgaagttggcaaggcag

SEQ ID NO: 1951058 - DNA, 25 bp, Homo sapien
tggggaaagtgaagttggcaaggca

SEQ ID NO: 1951059 - DNA, 25 bp, Homo sapien
aaaccttggtagcagcatgtctttc

SEQ ID NO: 1951060 - DNA, 25 bp, Homo sapien
agatctggaaatttgatggctttgc

SEQ ID NO: 1951061 - DNA, 25 bp, Homo sapien
caagccagatctggaaatttgatgg

SEQ ID NO: 1951062 - DNA, 25 bp, Homo sapien
aaaaccttggtagcagcatgtcttt

SEQ ID NO: 1951063 - DNA, 25 bp, Homo sapien
tgtgggcctcattgtgactccgctc

SEQ ID NO: 1951064 - DNA, 25 bp, Homo sapien
tcctctgtggcttatgctctcaggt

SEQ ID NO: 1951065 - DNA, 25 bp, Homo sapien
gtgtgcctcatcatgtctccactca

SEQ ID NO: 1951066 - DNA, 25 bp, Homo sapien
acatgatggactttatctgtgtgcc

SEQ ID NO: 1951067 - DNA, 25 bp, Homo sapien
tgcacccaggaccaagcttcctcgg

SEQ ID NO: 1951068 - DNA, 25 bp, Homo sapien
gcagctggacccatgggctcctgca

SEQ ID NO: 1951069 - DNA, 25 bp, Homo sapien
ctcggccctactgtgcgcagctgga

SEQ ID NO: 1951070 - DNA, 25 bp, Homo sapien
tgggctcctgcacaactggacccca

SEQ ID NO: 1951071 - DNA, 25 bp, Homo sapien
ggactgtcagtggtgtggctttttc

SEQ ID NO: 1951072 - DNA, 25 bp, Homo sapien
ttttgttattgtgcatagcagtgtc

SEQ ID NO: 1951073 - DNA, 25 bp, Homo sapien
gtgtctctcaactgtttgaatccag

SEQ ID NO: 1951074 - DNA, 25 bp, Homo sapien
tgtgcatagcagtgtctctcaactg

SEQ ID NO: 1951075 - DNA, 25 bp, Homo sapien
gcaccttgagcacgggcaccttctg

SEQ ID NO: 1951076 - DNA, 25 bp, Homo sapien
tcatgcgcatggcatcaaggcagcc

SEQ ID NO: 1951077 - DNA, 25 bp, Homo sapien
gtgactcatgcgcatggcatcaagg

SEQ ID NO: 1951078 - DNA, 25 bp, Homo sapien
agctgctgtgactcatgcgcatggc

SEQ ID NO: 1951079 - DNA, 25 bp, Homo sapien
tcctccagcagggtacaacctggca

SEQ ID NO: 1951080 - DNA, 25 bp, Homo sapien
gccccatcaggctttggatctcgta

SEQ ID NO: 1951081 - DNA, 25 bp, Homo sapien
aaatgctgccctagacttttctgac

SEQ ID NO: 1951082 - DNA, 25 bp, Homo sapien
aatgctgtcagtattttccaaggta

SEQ ID NO: 1951083 - DNA, 25 bp, Homo sapien
ggatctcgtatcttcagaaatgctg

SEQ ID NO: 1951084 - DNA, 25 bp, Homo sapien
ctgattgtggttctttattagagag

SEQ ID NO: 1951085 - DNA, 25 bp, Homo sapien
gattgtggttctttattagagagta

SEQ ID NO: 1951086 - DNA, 25 bp, Homo sapien
tggttctttattagagagtaaagga

SEQ ID NO: 1951087 - DNA, 25 bp, Homo sapien
gagtaaaggaacagagaaagaatta

SEQ ID NO: 1951088 - DNA, 25 bp, Homo sapien
gggctcccaaagaggtgaatgtatt

SEQ ID NO: 1951089 - DNA, 25 bp, Homo sapien
gctgctaagtcatggcctgcttggg

SEQ ID NO: 1951090 - DNA, 25 bp, Homo sapien
gctgcattgtgcatcagctgctaag

SEQ ID NO: 1951091 - DNA, 25 bp, Homo sapien
cctgcttgggcaggtacgagaccag

SEQ ID NO: 1951092 - DNA, 25 bp, Homo sapien
tccagaacactcacggtcagatgac

SEQ ID NO: 1951093 - DNA, 25 bp, Homo sapien
cagaacactcacggtcagatgacat

SEQ ID NO: 1951094 - DNA, 25 bp, Homo sapien
ccagaacactcacggtcagatgaca

SEQ ID NO: 1951095 - DNA, 25 bp, Homo sapien
tttccagaacactcacggtcagatg

SEQ ID NO: 1951096 - DNA, 25 bp, Homo sapien
tgtttaaccagagcctaatcttctg

SEQ ID NO: 1951097 - DNA, 25 bp, Homo sapien
tgccctcaggagaagatgtttaacc

SEQ ID NO: 1951098 - DNA, 25 bp, Homo sapien
aagctctacaaggttccaaaggtga

SEQ ID NO: 1951099 - DNA, 25 bp, Homo sapien
ggaaaatccctcatgctctggcagc

SEQ ID NO: 1951100 - DNA, 25 bp, Homo sapien
aaggttgagggcaacgcagagaccc

SEQ ID NO: 1951101 - DNA, 25 bp, Homo sapien
ccaagaaaacgtgcaggaaatgagg

SEQ ID NO: 1951102 - DNA, 25 bp, Homo sapien
ccactgccgacttgccaagaaaacg

SEQ ID NO: 1951103 - DNA, 25 bp, Homo sapien
ttgagggcaacgcagagaccccact

SEQ ID NO: 1951104 - DNA, 25 bp, Homo sapien
aatgagctcattatccactgggcag

SEQ ID NO: 1951105 - DNA, 25 bp, Homo sapien
tactcctggctattctgggctggtc

SEQ ID NO: 1951106 - DNA, 25 bp, Homo sapien
gatggaaggacatgagcacctcagc

SEQ ID NO: 1951107 - DNA, 25 bp, Homo sapien
ggtcctcgtctgactaatgagctca

SEQ ID NO: 1951108 - DNA, 25 bp, Homo sapien
tcacaaggctagacaagcagctact

SEQ ID NO: 1951109 - DNA, 25 bp, Homo sapien
ccatggtaaaccctgctggcaaatg

SEQ ID NO: 1951110 - DNA, 25 bp, Homo sapien
tacggcaactgatgaagaagtctcc

SEQ ID NO: 1951111 - DNA, 25 bp, Homo sapien
gaataaccagacgaaatcacaaggc

SEQ ID NO: 1951112 - DNA, 25 bp, Homo sapien
aggtatgacaaaacgggacgccaag

SEQ ID NO: 1951113 - DNA, 25 bp, Homo sapien
ttttcccatgaatagagagtgtcga

SEQ ID NO: 1951114 - DNA, 25 bp, Homo sapien
ggatcatggaaagggtccgtaccac

SEQ ID NO: 1951115 - DNA, 25 bp, Homo sapien
gagtgtcgatactaggcaacaagcc

SEQ ID NO: 1951116 - DNA, 25 bp, Homo sapien
cacactcatagctagtggatagaag

SEQ ID NO: 1951117 - DNA, 25 bp, Homo sapien
tctgggatgttggaactggaaactt

SEQ ID NO: 1951118 - DNA, 25 bp, Homo sapien
tgaaatatgtgatgtaggatttccc

SEQ ID NO: 1951119 - DNA, 25 bp, Homo sapien
aaatatgtgatgtaggatttccctt

SEQ ID NO: 1951120 - DNA, 25 bp, Homo sapien
ctgggaggaggagggcttcacatcc

SEQ ID NO: 1951121 - DNA, 25 bp, Homo sapien
catcccaggggatgtgtgaagtaga

SEQ ID NO: 1951122 - DNA, 25 bp, Homo sapien
gatgtgtgaagtagagcaagttcat

SEQ ID NO: 1951123 - DNA, 25 bp, Homo sapien
gagggcttcacatcccaggggatgt

SEQ ID NO: 1951124 - DNA, 25 bp, Homo sapien
gtaaacatcttagaagccagctggg

SEQ ID NO: 1951125 - DNA, 25 bp, Homo sapien
agctgggcaagatgggatcactgat

SEQ ID NO: 1951126 - DNA, 25 bp, Homo sapien
tcatcatcaggagatcacagtggct

SEQ ID NO: 1951127 - DNA, 25 bp, Homo sapien
tctaataaagggatggcaatgggaa

SEQ ID NO: 1951128 - DNA, 25 bp, Homo sapien
cagactctcccagtgcgactgttta

SEQ ID NO: 1951129 - DNA, 25 bp, Homo sapien
acaaacatcacaagacaaagagcaa

SEQ ID NO: 1951130 - DNA, 25 bp, Homo sapien
gaatgactgaaaagggtctatgttc

SEQ ID NO: 1951131 - DNA, 25 bp, Homo sapien
cccagtgcgactgtttatagacctc

SEQ ID NO: 1951132 - DNA, 25 bp, Homo sapien
ctgggccaaagggtgtgagcattca

SEQ ID NO: 1951133 - DNA, 25 bp, Homo sapien
tgggccaaagggtgtgagcattcat

SEQ ID NO: 1951134 - DNA, 25 bp, Homo sapien
ggttccaggcatggtttaggccctg

SEQ ID NO: 1951135 - DNA, 25 bp, Homo sapien
tggtttccgcacaccttcgcaatgt

SEQ ID NO: 1951136 - DNA, 25 bp, Homo sapien
gcaataagaaccaatctgctgtaca

SEQ ID NO: 1951137 - DNA, 25 bp, Homo sapien
gcaatgtgaacaggtcaggagtccc

SEQ ID NO: 1951138 - DNA, 25 bp, Homo sapien
tgtggttctgagattatttgggaca

SEQ ID NO: 1951139 - DNA, 25 bp, Homo sapien
gaaacattaaccatgaggaagagca

SEQ ID NO: 1951140 - DNA, 25 bp, Homo sapien
caggtgacaatatacacatgtgcgc

SEQ ID NO: 1951141 - DNA, 25 bp, Homo sapien
tgtgacacgtgtactgcagagtgtt

SEQ ID NO: 1951142 - DNA, 25 bp, Homo sapien
catgtgcgctaatcgtaaaatgagc

SEQ ID NO: 1951143 - DNA, 25 bp, Homo sapien
gacaacttcctaggacttctcggct

SEQ ID NO: 1951144 - DNA, 25 bp, Homo sapien
acttcctaggacttctcggctctgc

SEQ ID NO: 1951145 - DNA, 25 bp, Homo sapien
ggacaacttcctaggacttctcggc

SEQ ID NO: 1951146 - DNA, 25 bp, Homo sapien
caacttcctaggacttctcggctct

SEQ ID NO: 1951147 - DNA, 25 bp, Homo sapien
caaaaaatgccgaggtttggcgtag

SEQ ID NO: 1951148 - DNA, 25 bp, Homo sapien
agtcagtgcgtcactctgtctcccg

SEQ ID NO: 1951149 - DNA, 25 bp, Homo sapien
gattactgccagttatttccagcat

SEQ ID NO: 1951150 - DNA, 25 bp, Homo sapien
gacagtgtcttcgtttgattactgc

SEQ ID NO: 1951151 - DNA, 25 bp, Homo sapien
ccaagaccccaagaagtgactcctt

SEQ ID NO: 1951152 - DNA, 25 bp, Homo sapien
agtgactccttgtaaaatgtatttg

SEQ ID NO: 1951153 - DNA, 25 bp, Homo sapien
tagacaccaggcttattggggcgtg

SEQ ID NO: 1951154 - DNA, 25 bp, Homo sapien
caccaggcttattggggcgtgcaca

SEQ ID NO: 1951155 - DNA, 25 bp, Homo sapien
agcacagagctcagtggatttgatt

SEQ ID NO: 1951156 - DNA, 25 bp, Homo sapien
cacagagctcagtggatttgattct

SEQ ID NO: 1951157 - DNA, 25 bp, Homo sapien
gcacagagctcagtggatttgattc

SEQ ID NO: 1951158 - DNA, 25 bp, Homo sapien
cttgagaaggccagccccaaaggta

SEQ ID NO: 1951159 - DNA, 25 bp, Homo sapien
ttgagaaggccagccccaaaggtac

SEQ ID NO: 1951160 - DNA, 25 bp, Homo sapien
ggtttaacgatctgggctttgtcat

SEQ ID NO: 1951161 - DNA, 25 bp, Homo sapien
tctgggtttaacgatctgggctttg

SEQ ID NO: 1951162 - DNA, 25 bp, Homo sapien
gagatctgggtttaacgatctgggc

SEQ ID NO: 1951163 - DNA, 25 bp, Homo sapien
ttcctgagatctgggtttaacgatc

SEQ ID NO: 1951164 - DNA, 25 bp, Homo sapien
catggaacagctgatgcaggtcaga

SEQ ID NO: 1951165 - DNA, 25 bp, Homo sapien
cttcagcatggaacagctgatgcag

SEQ ID NO: 1951166 - DNA, 25 bp, Homo sapien
agagccaatcagtgacgggctcagg

SEQ ID NO: 1951167 - DNA, 25 bp, Homo sapien
caggtcagagccaatcagtgacggg

SEQ ID NO: 1951168 - DNA, 25 bp, Homo sapien
ctgaaattatgattaagagactcag

SEQ ID NO: 1951169 - DNA, 25 bp, Homo sapien
gattaagagactcagtgacctctac

SEQ ID NO: 1951170 - DNA, 25 bp, Homo sapien
gtgacctctactggctttttgcttg

SEQ ID NO: 1951171 - DNA, 25 bp, Homo sapien
aattatgattaagagactcagtgac

SEQ ID NO: 1951172 - DNA, 25 bp, Homo sapien
gtaagggaaacatacgatcatttaa

SEQ ID NO: 1951173 - DNA, 25 bp, Homo sapien
taagggaaacatacgatcatttaaa

SEQ ID NO: 1951174 - DNA, 25 bp, Homo sapien
gtgtaagggaaacatacgatcattt

SEQ ID NO: 1951175 - DNA, 25 bp, Homo sapien
tgtaagggaaacatacgatcattta

SEQ ID NO: 1951176 - DNA, 25 bp, Homo sapien
cataacattcaatccaggcggtgac

SEQ ID NO: 1951177 - DNA, 25 bp, Homo sapien
caggcggtgaccacgtaatttgggg

SEQ ID NO: 1951178 - DNA, 25 bp, Homo sapien
atccaggcggtgaccacgtaatttg

SEQ ID NO: 1951179 - DNA, 25 bp, Homo sapien
gcggtgaccacgtaatttggggatg

SEQ ID NO: 1951180 - DNA, 25 bp, Homo sapien
ggcactgccttgcttcaatgacaca

SEQ ID NO: 1951181 - DNA, 25 bp, Homo sapien
caatgacacagagcaacgtagaaca

SEQ ID NO: 1951182 - DNA, 25 bp, Homo sapien
tagaacacagcgtttcaccctcaca

SEQ ID NO: 1951183 - DNA, 25 bp, Homo sapien
gcgtttcaccctcacatttgcctgt

SEQ ID NO: 1951184 - DNA, 25 bp, Homo sapien
cagatgtaaggtttcatttgaaagg

SEQ ID NO: 1951185 - DNA, 25 bp, Homo sapien
ttgaaaggcatgagttgcatgcaag

SEQ ID NO: 1951186 - DNA, 25 bp, Homo sapien
ccttcacctttgaaagtagggatga

SEQ ID NO: 1951187 - DNA, 25 bp, Homo sapien
tggccttcacctttgaaagtaggga

SEQ ID NO: 1951188 - DNA, 25 bp, Homo sapien
tgcacgactgggatctcatgccaag

SEQ ID NO: 1951189 - DNA, 25 bp, Homo sapien
tctgtgcacgactgggatctcatgc

SEQ ID NO: 1951190 - DNA, 25 bp, Homo sapien
gtatattctgtgcacgactgggatc

SEQ ID NO: 1951191 - DNA, 25 bp, Homo sapien
ctgggatctcatgccaagtgtgtcc

SEQ ID NO: 1951192 - DNA, 25 bp, Homo sapien
cttgttgtaagactgacttgccagg

SEQ ID NO: 1951193 - DNA, 25 bp, Homo sapien
aggaatgtgggtgggccacacaacc

SEQ ID NO: 1951194 - DNA, 25 bp, Homo sapien
ccaggaatgtgggtgggccacacaa

SEQ ID NO: 1951195 - DNA, 25 bp, Homo sapien
tgttgtaagactgacttgccagggc

SEQ ID NO: 1951196 - DNA, 25 bp, Homo sapien
cttcccacaatcaaatgaagaggat

SEQ ID NO: 1951197 - DNA, 25 bp, Homo sapien
gaggcttcccacaatcaaatgaaga

SEQ ID NO: 1951198 - DNA, 25 bp, Homo sapien
ggcttcccacaatcaaatgaagagg

SEQ ID NO: 1951199 - DNA, 25 bp, Homo sapien
ttggctccacttgaggcttcccaca

SEQ ID NO: 1951200 - DNA, 25 bp, Homo sapien
gacccaaccacaagcaaccaaatta

SEQ ID NO: 1951201 - DNA, 25 bp, Homo sapien
gaagctgggcagtgtggctcccata

SEQ ID NO: 1951202 - DNA, 25 bp, Homo sapien
caggaaatcttggaatggtggtctt

SEQ ID NO: 1951203 - DNA, 25 bp, Homo sapien
tgtcccaaatgcgaagctgggcagt

SEQ ID NO: 1951204 - DNA, 25 bp, Homo sapien
agcagtttccttaccaaaacagaag

SEQ ID NO: 1951205 - DNA, 25 bp, Homo sapien
gcaccagggaccattgatgtcacca

SEQ ID NO: 1951206 - DNA, 25 bp, Homo sapien
tagcaccagggaccattgatgtcac

SEQ ID NO: 1951207 - DNA, 25 bp, Homo sapien
agcaccagggaccattgatgtcacc

SEQ ID NO: 1951208 - DNA, 25 bp, Homo sapien
caccagggaccattgatgtcaccat

SEQ ID NO: 1951209 - DNA, 25 bp, Homo sapien
tgctctaaagccatcagtcatgtgt

SEQ ID NO: 1951210 - DNA, 25 bp, Homo sapien
tcttctccagaaacccgacccagtg

SEQ ID NO: 1951211 - DNA, 25 bp, Homo sapien
tatgaggccacaccctgaccaaagg

SEQ ID NO: 1951212 - DNA, 25 bp, Homo sapien
gctccagctcacgtggggcaagaga

SEQ ID NO: 1951213 - DNA, 25 bp, Homo sapien
tcttccgtctagctgttcaccagga

SEQ ID NO: 1951214 - DNA, 25 bp, Homo sapien
cctggaacttgggattggcatctgc

SEQ ID NO: 1951215 - DNA, 25 bp, Homo sapien
cagaatttgtccagtacaggtcaca

SEQ ID NO: 1951216 - DNA, 25 bp, Homo sapien
tgtgggactgaaccttaacttgtgg

SEQ ID NO: 1951217 - DNA, 25 bp, Homo sapien
tccatgtccctacatttttttccag

SEQ ID NO: 1951218 - DNA, 25 bp, Homo sapien
catgtccctacatttttttccagac

SEQ ID NO: 1951219 - DNA, 25 bp, Homo sapien
ccatgtccctacatttttttccaga

SEQ ID NO: 1951220 - DNA, 25 bp, Homo sapien
atccatgtccctacatttttttcca

SEQ ID NO: 1951221 - DNA, 25 bp, Homo sapien
ccctggagtgaacctgctgtgtcta

SEQ ID NO: 1951222 - DNA, 25 bp, Homo sapien
gacttgtccctggagtgaacctgct

SEQ ID NO: 1951223 - DNA, 25 bp, Homo sapien
tgcccgtggacttgtccctggagtg

SEQ ID NO: 1951224 - DNA, 25 bp, Homo sapien
tgtccctggagtgaacctgctgtgt

SEQ ID NO: 1951225 - DNA, 25 bp, Homo sapien
agtggttgccttcttgccccggtat

SEQ ID NO: 1951226 - DNA, 25 bp, Homo sapien
tggttgccttcttgccccggtatcc

SEQ ID NO: 1951227 - DNA, 25 bp, Homo sapien
cagtggttgccttcttgccccggta

SEQ ID NO: 1951228 - DNA, 25 bp, Homo sapien
acagtggttgccttcttgccccggt

SEQ ID NO: 1951229 - DNA, 25 bp, Homo sapien
acctattttagaacaaggtgagtgg

SEQ ID NO: 1951230 - DNA, 25 bp, Homo sapien
aataggaatttgactgggacactga

SEQ ID NO: 1951231 - DNA, 25 bp, Homo sapien
tggaaagaatcacatagttgacagc

SEQ ID NO: 1951232 - DNA, 25 bp, Homo sapien
tggaaatgtttattggcttggaaag

SEQ ID NO: 1951233 - DNA, 25 bp, Homo sapien
taaagtcactacactcgcaagttgt

SEQ ID NO: 1951234 - DNA, 25 bp, Homo sapien
aagttgagcaccctggaggttttgc

SEQ ID NO: 1951235 - DNA, 25 bp, Homo sapien
ggttttgcgccagtcctaaagtcac

SEQ ID NO: 1951236 - DNA, 25 bp, Homo sapien
tcccgtgcagcactaaaggcttctg

SEQ ID NO: 1951237 - DNA, 25 bp, Homo sapien
tcatcccgttgtccaagcacataga

SEQ ID NO: 1951238 - DNA, 25 bp, Homo sapien
cttttcatcccgttgtccaagcaca

SEQ ID NO: 1951239 - DNA, 25 bp, Homo sapien
tttcatcccgttgtccaagcacata

SEQ ID NO: 1951240 - DNA, 25 bp, Homo sapien
catcccgttgtccaagcacatagat

SEQ ID NO: 1951241 - DNA, 25 bp, Homo sapien
cggaaggagcctctaggcttggaac

SEQ ID NO: 1951242 - DNA, 25 bp, Homo sapien
ttgttcggaaggagcctctaggctt

SEQ ID NO: 1951243 - DNA, 25 bp, Homo sapien
tgttcggaaggagcctctaggcttg

SEQ ID NO: 1951244 - DNA, 25 bp, Homo sapien
ttcggaaggagcctctaggcttgga

SEQ ID NO: 1951245 - DNA, 25 bp, Homo sapien
gagcatcgcgtcaggttgcagtact

SEQ ID NO: 1951246 - DNA, 25 bp, Homo sapien
tgtctgagcatcgcgtcaggttgca

SEQ ID NO: 1951247 - DNA, 25 bp, Homo sapien
gtcggaggagcgaccacagtccctt

SEQ ID NO: 1951248 - DNA, 25 bp, Homo sapien
acagtcggaggagcgaccacagtcc

SEQ ID NO: 1951249 - DNA, 25 bp, Homo sapien
gcctgtatcggcatctggattcctg

SEQ ID NO: 1951250 - DNA, 25 bp, Homo sapien
aacaccaagggcctgtatcggcatc

SEQ ID NO: 1951251 - DNA, 25 bp, Homo sapien
caagggcctgtatcggcatctggat

SEQ ID NO: 1951252 - DNA, 25 bp, Homo sapien
cctgtatcggcatctggattcctgc

SEQ ID NO: 1951253 - DNA, 25 bp, Homo sapien
aaccctatcaatgctccatataaaa

SEQ ID NO: 1951254 - DNA, 25 bp, Homo sapien
caaaccctatcaatgctccatataa

SEQ ID NO: 1951255 - DNA, 25 bp, Homo sapien
gccaaaccctatcaatgctccatat

SEQ ID NO: 1951256 - DNA, 25 bp, Homo sapien
catggggattatcaggattatagag

SEQ ID NO: 1951257 - DNA, 25 bp, Homo sapien
cctctcttgctctcagtccatcctc

SEQ ID NO: 1951258 - DNA, 25 bp, Homo sapien
ctcttgctctcagtccatcctctgc

SEQ ID NO: 1951259 - DNA, 25 bp, Homo sapien
ttgctctcagtccatcctctgctgg

SEQ ID NO: 1951260 - DNA, 25 bp, Homo sapien
tcctctcttgctctcagtccatcct

SEQ ID NO: 1951261 - DNA, 25 bp, Homo sapien
ggaacttaagttggctgttgctcct

SEQ ID NO: 1951262 - DNA, 25 bp, Homo sapien
ctcttctaggaggaacttaagttgg

SEQ ID NO: 1951263 - DNA, 25 bp, Homo sapien
ctaacaagttagcttgaagcaaggc

SEQ ID NO: 1951264 - DNA, 25 bp, Homo sapien
gaagcaaggctcttctaggaggaac

SEQ ID NO: 1951265 - DNA, 25 bp, Homo sapien
tgggtagttttctggggtcctctga

SEQ ID NO: 1951266 - DNA, 25 bp, Homo sapien
ttctggggtcctctgatgccggtgt

SEQ ID NO: 1951267 - DNA, 25 bp, Homo sapien
gttttctggggtcctctgatgccgg

SEQ ID NO: 1951268 - DNA, 25 bp, Homo sapien
tagttttctggggtcctctgatgcc

SEQ ID NO: 1951269 - DNA, 25 bp, Homo sapien
ctgccggaccacaggggtttgctca

SEQ ID NO: 1951270 - DNA, 25 bp, Homo sapien
tcatggatgaccaagattgacatgt

SEQ ID NO: 1951271 - DNA, 25 bp, Homo sapien
tgaccaagattgacatgtccttcct

SEQ ID NO: 1951272 - DNA, 25 bp, Homo sapien
atgtgccttgataactctgtccatt

SEQ ID NO: 1951273 - DNA, 25 bp, Homo sapien
aaatagtcaaaatcaagctcagtaa

SEQ ID NO: 1951274 - DNA, 25 bp, Homo sapien
gaaaatagtcaaaatcaagctcagt

SEQ ID NO: 1951275 - DNA, 25 bp, Homo sapien
tagtcaaaatcaagctcagtaatta

SEQ ID NO: 1951276 - DNA, 25 bp, Homo sapien
ctgaaaatagtcaaaatcaagctca

SEQ ID NO: 1951277 - DNA, 25 bp, Homo sapien
tggaacaacagtgggagtctctagg

SEQ ID NO: 1951278 - DNA, 25 bp, Homo sapien
tggaactggaacaacagtgggagtc

SEQ ID NO: 1951279 - DNA, 25 bp, Homo sapien
aactggaacaacagtgggagtctct

SEQ ID NO: 1951280 - DNA, 25 bp, Homo sapien
acaacagtgggagtctctaggacac

SEQ ID NO: 1951281 - DNA, 25 bp, Homo sapien
ccacctcacacacggatcagttgtg

SEQ ID NO: 1951282 - DNA, 25 bp, Homo sapien
cacctcacacacggatcagttgtgt

SEQ ID NO: 1951283 - DNA, 25 bp, Homo sapien
ttttaagtgtgcatcttagatttta

SEQ ID NO: 1951284 - DNA, 25 bp, Homo sapien
ttctttaggactctacagtaacatg

SEQ ID NO: 1951285 - DNA, 25 bp, Homo sapien
gcattcctccagaaaactgatgtgg

SEQ ID NO: 1951286 - DNA, 25 bp, Homo sapien
aaatggcatccaacatgacaccatt

SEQ ID NO: 1951287 - DNA, 25 bp, Homo sapien
ggtgtatcttggagcatttgctccc

SEQ ID NO: 1951288 - DNA, 25 bp, Homo sapien
gcaaaggtggtgagtaacccgcgat

SEQ ID NO: 1951289 - DNA, 25 bp, Homo sapien
ctatgtattcgcagaggagtcagaa

SEQ ID NO: 1951290 - DNA, 25 bp, Homo sapien
tcagtattctcgcattcatgacctg

SEQ ID NO: 1951291 - DNA, 25 bp, Homo sapien
tcgataccgcatagctgagccactt

SEQ ID NO: 1951292 - DNA, 25 bp, Homo sapien
tagttgctcagtagatgtccttggc

SEQ ID NO: 1951293 - DNA, 25 bp, Homo sapien
tgggttcttcaatacgtgggatgca

SEQ ID NO: 1951294 - DNA, 25 bp, Homo sapien
tcctggtcgtgggtcataaccaacg

SEQ ID NO: 1951295 - DNA, 25 bp, Homo sapien
gcctctttgttgactctcatctgcc

SEQ ID NO: 1951296 - DNA, 25 bp, Homo sapien
ggcaacctgtatcttgtcagagcac

SEQ ID NO: 1951297 - DNA, 25 bp, Homo sapien
gcatctgcctctttgttgactctca

SEQ ID NO: 1951298 - DNA, 25 bp, Homo sapien
ttgtcagagcactggtgctcaggac

SEQ ID NO: 1951299 - DNA, 25 bp, Homo sapien
ttttttctcttgaaccaagacagaa

SEQ ID NO: 1951300 - DNA, 25 bp, Homo sapien
gacatttgcctctccatagatatgc

SEQ ID NO: 1951301 - DNA, 25 bp, Homo sapien
ggaattggaggttagaatgatagta

SEQ ID NO: 1951302 - DNA, 25 bp, Homo sapien
gatagtattccaaggtggaaaggct

SEQ ID NO: 1951303 - DNA, 25 bp, Homo sapien
tactctaagtgtttggtcgtttgtg

SEQ ID NO: 1951304 - DNA, 25 bp, Homo sapien
tttccttaatgtgatctcctcgcct

SEQ ID NO: 1951305 - DNA, 25 bp, Homo sapien
tgtttggtcgtttgtggtcctgact

SEQ ID NO: 1951306 - DNA, 25 bp, Homo sapien
cagtgggtggtgtggaaaggtactc

SEQ ID NO: 1951307 - DNA, 25 bp, Homo sapien
tgcatctgacacaagttgagtcttg

SEQ ID NO: 1951308 - DNA, 25 bp, Homo sapien
ttcctgagacattttgctatgccct

SEQ ID NO: 1951309 - DNA, 25 bp, Homo sapien
cgaaacatgactcttctaatagaaa

SEQ ID NO: 1951310 - DNA, 25 bp, Homo sapien
tgagtcttgagcagtcagctcgaaa

SEQ ID NO: 1951311 - DNA, 25 bp, Homo sapien
tgtgctgatgtggcgtcatagatga

SEQ ID NO: 1951312 - DNA, 25 bp, Homo sapien
gcttggcaggttcttcctgtgacag

SEQ ID NO: 1951313 - DNA, 25 bp, Homo sapien
aactctgtccattaccgtggtagca

SEQ ID NO: 1951314 - DNA, 25 bp, Homo sapien
gtatgtgcctcgataactctgtcca

SEQ ID NO: 1951315 - DNA, 25 bp, Homo sapien
cctgtgacagtggtgaagtatgtgc

SEQ ID NO: 1951316 - DNA, 25 bp, Homo sapien
ctcccaaggccttggctctgttggt

SEQ ID NO: 1951317 - DNA, 25 bp, Homo sapien
tcccaaggccttggctctgttggtg

SEQ ID NO: 1951318 - DNA, 25 bp, Homo sapien
tactgaatgttcacgggaaccatgg

SEQ ID NO: 1951319 - DNA, 25 bp, Homo sapien
cctaaagtgttgatcacgggagcca

SEQ ID NO: 1951320 - DNA, 25 bp, Homo sapien
gcaagctggtctttagggatctcta

SEQ ID NO: 1951321 - DNA, 25 bp, Homo sapien
tgggcaatcgggcagaaaacagttc

SEQ ID NO: 1951322 - DNA, 25 bp, Homo sapien
ttgcaccaaaaatcactcgtctggc

SEQ ID NO: 1951323 - DNA, 25 bp, Homo sapien
gccctgaggattcttccaacatgac

SEQ ID NO: 1951324 - DNA, 25 bp, Homo sapien
gctcccccccagagtgccctgagga

SEQ ID NO: 1951325 - DNA, 25 bp, Homo sapien
gcaccaaaaatcactcgtctggctc

SEQ ID NO: 1951326 - DNA, 25 bp, Homo sapien
tacccagtgtccaagtgtggagatg

SEQ ID NO: 1951327 - DNA, 25 bp, Homo sapien
cacgtgcgtagcactgaaggcttct

SEQ ID NO: 1951328 - DNA, 25 bp, Homo sapien
ttcaaaggcttttctacccagtgtc

SEQ ID NO: 1951329 - DNA, 25 bp, Homo sapien
caaccaacatgtgagcacgtgcgta

SEQ ID NO: 1951330 - DNA, 25 bp, Homo sapien
cgggataacagtcagaggcacgact

SEQ ID NO: 1951331 - DNA, 25 bp, Homo sapien
cagtcagaggcacgactgcagtccc

SEQ ID NO: 1951332 - DNA, 25 bp, Homo sapien
gactttgggatccatcgtgtaacac

SEQ ID NO: 1951333 - DNA, 25 bp, Homo sapien
gtgtaacaccaagggccttccacag

SEQ ID NO: 1951334 - DNA, 25 bp, Homo sapien
gatatacgtcacaagaggtgggaca

SEQ ID NO: 1951335 - DNA, 25 bp, Homo sapien
tccaaaaggatatacgtcacaagag

SEQ ID NO: 1951336 - DNA, 25 bp, Homo sapien
tgggacaatatgcaggggcacccag

SEQ ID NO: 1951337 - DNA, 25 bp, Homo sapien
cacaagaggtgggacaatatgcagg

SEQ ID NO: 1951338 - DNA, 25 bp, Homo sapien
tcatagatgaccaagcttggcaagt

SEQ ID NO: 1951339 - DNA, 25 bp, Homo sapien
gtatgtgcctcgataactctgtcca

SEQ ID NO: 1951340 - DNA, 25 bp, Homo sapien
tgaagtatgtgcctcgataactctg

SEQ ID NO: 1951341 - DNA, 25 bp, Homo sapien
tgcctcgataactctgtccatttcc

SEQ ID NO: 1951342 - DNA, 25 bp, Homo sapien
gtggtgaagtatgtgcctcgataac

SEQ ID NO: 1951343 - DNA, 25 bp, Homo sapien
cattgaaggccttggatcaatcagt

SEQ ID NO: 1951344 - DNA, 25 bp, Homo sapien
attgaaggccttggatcaatcagtg

SEQ ID NO: 1951345 - DNA, 25 bp, Homo sapien
tcaagcactcgtgtagcatggaagg

SEQ ID NO: 1951346 - DNA, 25 bp, Homo sapien
tgctgcaccaaaaattactcctctg

SEQ ID NO: 1951347 - DNA, 25 bp, Homo sapien
cgaagtgtgctgatgtctggccaca

SEQ ID NO: 1951348 - DNA, 25 bp, Homo sapien
gacacggcactgaggattcctttaa

SEQ ID NO: 1951349 - DNA, 25 bp, Homo sapien
gcggccacagccctattcttgtctg

SEQ ID NO: 1951350 - DNA, 25 bp, Homo sapien
ataatagtcagaggcgcggccacag

SEQ ID NO: 1951351 - DNA, 25 bp, Homo sapien
tggaagtatcctctcgtcttggaac

SEQ ID NO: 1951352 - DNA, 25 bp, Homo sapien
tctcgtcttggaaccgggataatag

SEQ ID NO: 1951353 - DNA, 25 bp, Homo sapien
aagggcctgccgaacaatccggatt

SEQ ID NO: 1951354 - DNA, 25 bp, Homo sapien
caagggcctgccgaacaatccggat

SEQ ID NO: 1951355 - DNA, 25 bp, Homo sapien
gtataacaccaagggcctgccgaac

SEQ ID NO: 1951356 - DNA, 25 bp, Homo sapien
agggcctgccgaacaatccggattc

SEQ ID NO: 1951357 - DNA, 25 bp, Homo sapien
tcacaaaacaatacacgttaacaag

SEQ ID NO: 1951358 - DNA, 25 bp, Homo sapien
caagaggtgggacaatatgcaagaa

SEQ ID NO: 1951359 - DNA, 25 bp, Homo sapien
tatgcaagaatatccggcaccctct

SEQ ID NO: 1951360 - DNA, 25 bp, Homo sapien
tgggacaatatgcaagaatatccgg

SEQ ID NO: 1951361 - DNA, 25 bp, Homo sapien
tcgccttcagatagcctcctgatgc

SEQ ID NO: 1951362 - DNA, 25 bp, Homo sapien
tgttgtagaaaacactcttaagtgt

SEQ ID NO: 1951363 - DNA, 25 bp, Homo sapien
cagttttcgtaatgtgatcacctcg

SEQ ID NO: 1951364 - DNA, 25 bp, Homo sapien
tatttgtggtcctgacagttttcgt

SEQ ID NO: 1951365 - DNA, 25 bp, Homo sapien
actgtgctggtgtggtgtcatagat

SEQ ID NO: 1951366 - DNA, 25 bp, Homo sapien
tgtgctggtgtggtgtcatagatga

SEQ ID NO: 1951367 - DNA, 25 bp, Homo sapien
tgttccggggtcctactgtgctggt

SEQ ID NO: 1951368 - DNA, 25 bp, Homo sapien
ctactgtgctggtgtggtgtcatag

SEQ ID NO: 1951369 - DNA, 25 bp, Homo sapien
tatgtgcctcgataactctgtccat

SEQ ID NO: 1951370 - DNA, 25 bp, Homo sapien
gcttggcaggttcttcctgtgacag

SEQ ID NO: 1951371 - DNA, 25 bp, Homo sapien
tgtgcctcgataactctgtccattt

SEQ ID NO: 1951372 - DNA, 25 bp, Homo sapien
tgcctcgataactctgtccatttcc

SEQ ID NO: 1951373 - DNA, 25 bp, Homo sapien
acagaaggccttggctctgtcggtg

SEQ ID NO: 1951374 - DNA, 25 bp, Homo sapien
tgaacagaaggccttggctctgtcg

SEQ ID NO: 1951375 - DNA, 25 bp, Homo sapien
gaacagaaggccttggctctgtcgg

SEQ ID NO: 1951376 - DNA, 25 bp, Homo sapien
ctgaacagaaggccttggctctgtc

SEQ ID NO: 1951377 - DNA, 25 bp, Homo sapien
aactgctctctagtgatctctactg

SEQ ID NO: 1951378 - DNA, 25 bp, Homo sapien
cttatggaaaactgcgctcacgtgc

SEQ ID NO: 1951379 - DNA, 25 bp, Homo sapien
taaagggctacgcatttggcagtgc

SEQ ID NO: 1951380 - DNA, 25 bp, Homo sapien
gcagtaagttcttcccaatatttca

SEQ ID NO: 1951381 - DNA, 25 bp, Homo sapien
gaagaaaacggttgtgcgtctagga

SEQ ID NO: 1951382 - DNA, 25 bp, Homo sapien
accattgatcacgagagccaaggcc

SEQ ID NO: 1951383 - DNA, 25 bp, Homo sapien
gccaaggccttcagcttctggcttc

SEQ ID NO: 1951384 - DNA, 25 bp, Homo sapien
tcgcacgtttccctagaccattgat

SEQ ID NO: 1951385 - DNA, 25 bp, Homo sapien
gaatgaatcctctaggcttggaact

SEQ ID NO: 1951386 - DNA, 25 bp, Homo sapien
aatgaatcctctaggcttggaactg

SEQ ID NO: 1951387 - DNA, 25 bp, Homo sapien
acgaacacagtcccttcatcgtctg

SEQ ID NO: 1951388 - DNA, 25 bp, Homo sapien
cacagtcccttcatcgtctgagcac

SEQ ID NO: 1951389 - DNA, 25 bp, Homo sapien
aagggcctgccgaacaatccggatt

SEQ ID NO: 1951390 - DNA, 25 bp, Homo sapien
gcctgccgaacaatccggattcctg

SEQ ID NO: 1951391 - DNA, 25 bp, Homo sapien
gtataacaccaagggcctgccgaac

SEQ ID NO: 1951392 - DNA, 25 bp, Homo sapien
cgaacaatccggattcctgcagtag

SEQ ID NO: 1951393 - DNA, 25 bp, Homo sapien
atatgcaggaacatccagcaccctc

SEQ ID NO: 1951394 - DNA, 25 bp, Homo sapien
caatatgcaggaacatccagcaccc

SEQ ID NO: 1951395 - DNA, 25 bp, Homo sapien
atcacaaaacaatacacgttacaag

SEQ ID NO: 1951396 - DNA, 25 bp, Homo sapien
cacaaaacaatacacgttacaagag

SEQ ID NO: 1951397 - DNA, 25 bp, Homo sapien
ctccagatatgctcctgctctatca

SEQ ID NO: 1951398 - DNA, 25 bp, Homo sapien
tccagatatgctcctgctctatcaa

SEQ ID NO: 1951399 - DNA, 25 bp, Homo sapien
ccagatatgctcctgctctatcaag

SEQ ID NO: 1951400 - DNA, 25 bp, Homo sapien
agcttgaagcatgactcttctaaca

SEQ ID NO: 1951401 - DNA, 25 bp, Homo sapien
tgcatctgacacaagttgagtcctg

SEQ ID NO: 1951402 - DNA, 25 bp, Homo sapien
ctgacacaagttgagtcctgagcag

SEQ ID NO: 1951403 - DNA, 25 bp, Homo sapien
gcttgaagcatgactcttctaacag

SEQ ID NO: 1951404 - DNA, 25 bp, Homo sapien
ttctggggttctactgtgctggtgt

SEQ ID NO: 1951405 - DNA, 25 bp, Homo sapien
gttctactgtgctggtgtggcgtca

SEQ ID NO: 1951406 - DNA, 25 bp, Homo sapien
actgtgctggtgtggcgtcatagat

SEQ ID NO: 1951407 - DNA, 25 bp, Homo sapien
cttttctggggttctactgtgctgg

SEQ ID NO: 1951408 - DNA, 25 bp, Homo sapien
cagtggtgaagtatgtgcctcgata

SEQ ID NO: 1951409 - DNA, 25 bp, Homo sapien
cctgtgacagtggtgaagtatgtgc

SEQ ID NO: 1951410 - DNA, 25 bp, Homo sapien
gtatgtgcctcgataactctgtcca

SEQ ID NO: 1951411 - DNA, 25 bp, Homo sapien
gcttggcaggttcttcctgtgacag

SEQ ID NO: 1951412 - DNA, 25 bp, Homo sapien
caaaacagaaaaaattaagctgagt

SEQ ID NO: 1951413 - DNA, 25 bp, Homo sapien
aatcaaaacagaaaaaattaagctg

SEQ ID NO: 1951414 - DNA, 25 bp, Homo sapien
aaacagaaaaaattaagctgagtat

SEQ ID NO: 1951415 - DNA, 25 bp, Homo sapien
cagaaaaaattaagctgagtatttc

SEQ ID NO: 1951416 - DNA, 25 bp, Homo sapien
tagaagaaccacttccttatgttcc

SEQ ID NO: 1951417 - DNA, 25 bp, Homo sapien
gtagaagaaccacttccttatgttc

SEQ ID NO: 1951418 - DNA, 25 bp, Homo sapien
agaagtagaagaaccacttccttat

SEQ ID NO: 1951419 - DNA, 25 bp, Homo sapien
gaagtagaagaaccacttccttatg

SEQ ID NO: 1951420 - DNA, 25 bp, Homo sapien
ttgacttacatgagagtaaacgcat

SEQ ID NO: 1951421 - DNA, 25 bp, Homo sapien
tcaaattaagttaatgattctctca

SEQ ID NO: 1951422 - DNA, 25 bp, Homo sapien
tccacaaaccagatagtcaaattaa

SEQ ID NO: 1951423 - DNA, 25 bp, Homo sapien
gacttacatgagagtaaacgcatcc

SEQ ID NO: 1951424 - DNA, 25 bp, Homo sapien
ggttgctgtattcggtctctgagta

SEQ ID NO: 1951425 - DNA, 25 bp, Homo sapien
caataatgaataactatgggagctt

SEQ ID NO: 1951426 - DNA, 25 bp, Homo sapien
ttccctgtccacaaccagtgacgga

SEQ ID NO: 1951427 - DNA, 25 bp, Homo sapien
gacggattattccaaacgttgttca

SEQ ID NO: 1951428 - DNA, 25 bp, Homo sapien
cttccacaagctccacctggaacat

SEQ ID NO: 1951429 - DNA, 25 bp, Homo sapien
ttccacaagctccacctggaacatt

SEQ ID NO: 1951430 - DNA, 25 bp, Homo sapien
tccacaagctccacctggaacattg

SEQ ID NO: 1951431 - DNA, 25 bp, Homo sapien
ccttgatcagggtgtcttatatctg

SEQ ID NO: 1951432 - DNA, 25 bp, Homo sapien
agccctggagtcctttcttatcatc

SEQ ID NO: 1951433 - DNA, 25 bp, Homo sapien
gaaagtatgagaccttgcagaggcc

SEQ ID NO: 1951434 - DNA, 25 bp, Homo sapien
ttctcttctcagaccatgcagtgcc

SEQ ID NO: 1951435 - DNA, 25 bp, Homo sapien
gctatgacaccttaatacagaattt

SEQ ID NO: 1951436 - DNA, 25 bp, Homo sapien
atgacaccttaatacagaatttgtc

SEQ ID NO: 1951437 - DNA, 25 bp, Homo sapien
agctatgacaccttaatacagaatt

SEQ ID NO: 1951438 - DNA, 25 bp, Homo sapien
tcaaatcaaaataagtgcagagttt

SEQ ID NO: 1951439 - DNA, 25 bp, Homo sapien
tacccacgtttcagcttctaagtag

SEQ ID NO: 1951440 - DNA, 25 bp, Homo sapien
ctaagtaggttgatgcttcactctg

SEQ ID NO: 1951441 - DNA, 25 bp, Homo sapien
tgtcttcgtttgattgctgtctatt

SEQ ID NO: 1951442 - DNA, 25 bp, Homo sapien
gtttgattgctgtctattatttcca

SEQ ID NO: 1951443 - DNA, 25 bp, Homo sapien
tctcatcattccctcaatccaagta

SEQ ID NO: 1951444 - DNA, 25 bp, Homo sapien
tttctcatcattccctcaatccaag

SEQ ID NO: 1951445 - DNA, 25 bp, Homo sapien
ttatttctcatcattccctcaatcc

SEQ ID NO: 1951446 - DNA, 25 bp, Homo sapien
catcattccctcaatccaagtaaca

SEQ ID NO: 1951447 - DNA, 25 bp, Homo sapien
ccaagaccccaagaagtgactcctt

SEQ ID NO: 1951448 - DNA, 25 bp, Homo sapien
caccaggcttattggggcgtgcaca

SEQ ID NO: 1951449 - DNA, 25 bp, Homo sapien
agtgactccttgtaaaatgtatttg

SEQ ID NO: 1951450 - DNA, 25 bp, Homo sapien
tagacaccaggcttattggggcgtg

SEQ ID NO: 1951451 - DNA, 25 bp, Homo sapien
gatgatctgaatatgcattcaggga

SEQ ID NO: 1951452 - DNA, 25 bp, Homo sapien
atctggaactcaagccccaagacgt

SEQ ID NO: 1951453 - DNA, 25 bp, Homo sapien
gatctggggagtttctgagcaacac

SEQ ID NO: 1951454 - DNA, 25 bp, Homo sapien
caagacgtctccttagatgatctga

SEQ ID NO: 1951455 - DNA, 25 bp, Homo sapien
gacaaaaccttcctgaatttgccac

SEQ ID NO: 1951456 - DNA, 25 bp, Homo sapien
ctgacaaaaccttcctgaatttgcc

SEQ ID NO: 1951457 - DNA, 25 bp, Homo sapien
cactttgggactgacgtctaaggga

SEQ ID NO: 1951458 - DNA, 25 bp, Homo sapien
cctgaatttgccactttgggactga

SEQ ID NO: 1951459 - DNA, 25 bp, Homo sapien
ctcagcacaaatatacttatagtga

SEQ ID NO: 1951460 - DNA, 25 bp, Homo sapien
gctcagcacaaatatacttatagtg

SEQ ID NO: 1951461 - DNA, 25 bp, Homo sapien
ttcattctcaataacaaggagctgg

SEQ ID NO: 1951462 - DNA, 25 bp, Homo sapien
gctgggcttccttgagaaggccagt

SEQ ID NO: 1951463 - DNA, 25 bp, Homo sapien
ttgagaaggccagtcccaaaggtac

SEQ ID NO: 1951464 - DNA, 25 bp, Homo sapien
cattctcaataacaaggagctgggc

SEQ ID NO: 1951465 - DNA, 25 bp, Homo sapien
tttgttgtaagggaaacatacaatc

SEQ ID NO: 1951466 - DNA, 25 bp, Homo sapien
ctgaaattatgattaagagactcaa

SEQ ID NO: 1951467 - DNA, 25 bp, Homo sapien
taagggaaacatacaatcattacaa

SEQ ID NO: 1951468 - DNA, 25 bp, Homo sapien
caaagacctctactggtgtttgttt

SEQ ID NO: 1951469 - DNA, 25 bp, Homo sapien
gtgaccatgtagtctggggatggca

SEQ ID NO: 1951470 - DNA, 25 bp, Homo sapien
gatgtaacattcagtcctggcggtg

SEQ ID NO: 1951471 - DNA, 25 bp, Homo sapien
gaccatgtagtctggggatggcaga

SEQ ID NO: 1951472 - DNA, 25 bp, Homo sapien
cagtcctggcggtgaccatgtagtc

SEQ ID NO: 1951473 - DNA, 25 bp, Homo sapien
gtgaagaccacaggtgagcgagtac

SEQ ID NO: 1951474 - DNA, 25 bp, Homo sapien
catgcagtggccatggcccataaaa

SEQ ID NO: 1951475 - DNA, 25 bp, Homo sapien
ctttcatgtgatagacagttcctcc

SEQ ID NO: 1951476 - DNA, 25 bp, Homo sapien
gcaaatatcttcaccagcgtggggt

SEQ ID NO: 1951477 - DNA, 25 bp, Homo sapien
gagattcgaggttcacttcttggtg

SEQ ID NO: 1951478 - DNA, 25 bp, Homo sapien
aatatctgcttgtgtgggctccaag

SEQ ID NO: 1951479 - DNA, 25 bp, Homo sapien
ttcctgaacatgagattcgaggttc

SEQ ID NO: 1951480 - DNA, 25 bp, Homo sapien
gaacatgagattcgaggttcacttc

SEQ ID NO: 1951481 - DNA, 25 bp, Homo sapien
acccactctggggatattaaggtgc

SEQ ID NO: 1951482 - DNA, 25 bp, Homo sapien
tctggggatattaaggtgcctccac

SEQ ID NO: 1951483 - DNA, 25 bp, Homo sapien
atattaaggtgcctccacagaagtg

SEQ ID NO: 1951484 - DNA, 25 bp, Homo sapien
gggatattaaggtgcctccacagaa

SEQ ID NO: 1951485 - DNA, 25 bp, Homo sapien
ccaggaatgtgggtgggccacacac

SEQ ID NO: 1951486 - DNA, 25 bp, Homo sapien
tgagactgacttgccagggccagga

SEQ ID NO: 1951487 - DNA, 25 bp, Homo sapien
cttgttctgagactgacttgccagg

SEQ ID NO: 1951488 - DNA, 25 bp, Homo sapien
tctgagactgacttgccagggccag

SEQ ID NO: 1951489 - DNA, 25 bp, Homo sapien
caggacatttcttcggctccacttg

SEQ ID NO: 1951490 - DNA, 25 bp, Homo sapien
ccaggacatttcttcggctccactt

SEQ ID NO: 1951491 - DNA, 25 bp, Homo sapien
tccaggacatttcttcggctccact

SEQ ID NO: 1951492 - DNA, 25 bp, Homo sapien
cacaaggtctctggaggtagggaaa

SEQ ID NO: 1951493 - DNA, 25 bp, Homo sapien
catcaatgcctacaacagtgcaggg

SEQ ID NO: 1951494 - DNA, 25 bp, Homo sapien
gcagcaagcccacaaggtctctgga

SEQ ID NO: 1951495 - DNA, 25 bp, Homo sapien
gctacagagggtgttcaaaaatgct

SEQ ID NO: 1951496 - DNA, 25 bp, Homo sapien
ccaggcactactgtgggtgtttgag

SEQ ID NO: 1951497 - DNA, 25 bp, Homo sapien
atgagtcccaggcactactgtgggt

SEQ ID NO: 1951498 - DNA, 25 bp, Homo sapien
gtcagactgggcttaaattcaaggc

SEQ ID NO: 1951499 - DNA, 25 bp, Homo sapien
cagactgggcttaaattcaaggcag

SEQ ID NO: 1951500 - DNA, 25 bp, Homo sapien
gcaccagggaccattgatgtcacca

SEQ ID NO: 1951501 - DNA, 25 bp, Homo sapien
caccagggaccattgatgtcaccat

SEQ ID NO: 1951502 - DNA, 25 bp, Homo sapien
agcaccagggaccattgatgtcacc

SEQ ID NO: 1951503 - DNA, 25 bp, Homo sapien
tagcaccagggaccattgatgtcac

SEQ ID NO: 1951504 - DNA, 25 bp, Homo sapien
tttgtccctggaatgaacgtgctgt

SEQ ID NO: 1951505 - DNA, 25 bp, Homo sapien
ctgcccatttatttgtccctggaat

SEQ ID NO: 1951506 - DNA, 25 bp, Homo sapien
cctgcccatttatttgtccctggaa

SEQ ID NO: 1951507 - DNA, 25 bp, Homo sapien
gacctgcccatttatttgtccctgg

SEQ ID NO: 1951508 - DNA, 25 bp, Homo sapien
tgtctgagcatcgcgtcaggttgca

SEQ ID NO: 1951509 - DNA, 25 bp, Homo sapien
gagcatcgcgtcaggttgcagtact

SEQ ID NO: 1951510 - DNA, 25 bp, Homo sapien
gtcggaggagcgaccacagtccctt

SEQ ID NO: 1951511 - DNA, 25 bp, Homo sapien
acagtcggaggagcgaccacagtcc

SEQ ID NO: 1951512 - DNA, 25 bp, Homo sapien
tgtgacccagtctcaagcccagatt

SEQ ID NO: 1951513 - DNA, 25 bp, Homo sapien
tcttggagaatgtgctccccttcgt

SEQ ID NO: 1951514 - DNA, 25 bp, Homo sapien
taccgtgggaatgcaacattgtctc

SEQ ID NO: 1951515 - DNA, 25 bp, Homo sapien
tagagactctatacatgtgacccag

SEQ ID NO: 1951516 - DNA, 25 bp, Homo sapien
ctcttctaggaggaacttaagttgg

SEQ ID NO: 1951517 - DNA, 25 bp, Homo sapien
ggaacttaagttggctgttgctcct

SEQ ID NO: 1951518 - DNA, 25 bp, Homo sapien
ctaacaagttagcttgaagcaaggc

SEQ ID NO: 1951519 - DNA, 25 bp, Homo sapien
gaagcaaggctcttctaggaggaac

SEQ ID NO: 1951520 - DNA, 25 bp, Homo sapien
tgaccaagattgacatgtccttcct

SEQ ID NO: 1951521 - DNA, 25 bp, Homo sapien
tggatgaccaagattgacatgtcct

SEQ ID NO: 1951522 - DNA, 25 bp, Homo sapien
tgtcatggatgaccaagattgacat

SEQ ID NO: 1951523 - DNA, 25 bp, Homo sapien
ctgccggaccacaggggtttgctca

SEQ ID NO: 1951524 - DNA, 25 bp, Homo sapien
tggaactggaacaacagtgggagtc

SEQ ID NO: 1951525 - DNA, 25 bp, Homo sapien
aactggaacaacagtgggagtctct

SEQ ID NO: 1951526 - DNA, 25 bp, Homo sapien
tggaacaacagtgggagtctctagg

SEQ ID NO: 1951527 - DNA, 25 bp, Homo sapien
acaacagtgggagtctctaggacac

SEQ ID NO: 1951528 - DNA, 25 bp, Homo sapien
cacctcacacacggatcggttgtgt

SEQ ID NO: 1951529 - DNA, 25 bp, Homo sapien
ccacctcacacacggatcggttgtg

SEQ ID NO: 1951530 - DNA, 25 bp, Homo sapien
gaggatatgcctcgataactccgtc

SEQ ID NO: 1951531 - DNA, 25 bp, Homo sapien
ggatatgcctcgataactccgtcca

SEQ ID NO: 1951532 - DNA, 25 bp, Homo sapien
gatatgcctcgataactccgtccat

SEQ ID NO: 1951533 - DNA, 25 bp, Homo sapien
tggaggatatgcctcgataactccg

SEQ ID NO: 1951534 - DNA, 25 bp, Homo sapien
ggaccacagggcttttctcaggtgg

SEQ ID NO: 1951535 - DNA, 25 bp, Homo sapien
tggaccacagggcttttctcaggtg

SEQ ID NO: 1951536 - DNA, 25 bp, Homo sapien
ctggaccacagggcttttctcaggt

SEQ ID NO: 1951537 - DNA, 25 bp, Homo sapien
accacagggcttttctcaggtggtg

SEQ ID NO: 1951538 - DNA, 25 bp, Homo sapien
gtgcttggaaccggggccactgtgg

SEQ ID NO: 1951539 - DNA, 25 bp, Homo sapien
ggccactgtgggagttgtgaggaca

SEQ ID NO: 1951540 - DNA, 25 bp, Homo sapien
cctctgtgcttggaaccggggccac

SEQ ID NO: 1951541 - DNA, 25 bp, Homo sapien
attctgtcactggacatcgtgtcag

SEQ ID NO: 1951542 - DNA, 25 bp, Homo sapien
ttggatagtataatgggatcctccg

SEQ ID NO: 1951543 - DNA, 25 bp, Homo sapien
cgatgccaatgtggtgtcatagacg

SEQ ID NO: 1951544 - DNA, 25 bp, Homo sapien
tttggatagtataatgggatcctcc

SEQ ID NO: 1951545 - DNA, 25 bp, Homo sapien
atgggatcctccgatgccaatgtgg

SEQ ID NO: 1951546 - DNA, 25 bp, Homo sapien
ttcttcctgtgatagtggtggagag

SEQ ID NO: 1951547 - DNA, 25 bp, Homo sapien
gagtgtgcctcgataactctgtcca

SEQ ID NO: 1951548 - DNA, 25 bp, Homo sapien
gatagtggtggagagtgtgcctcga

SEQ ID NO: 1951549 - DNA, 25 bp, Homo sapien
ataactctgtccatcacctcggtag

SEQ ID NO: 1951550 - DNA, 25 bp, Homo sapien
ggaccccagtgctgttttcagttgg

SEQ ID NO: 1951551 - DNA, 25 bp, Homo sapien
accccagtgctgttttcagttggtg

SEQ ID NO: 1951552 - DNA, 25 bp, Homo sapien
ctggaccccagtgctgttttcagtt

SEQ ID NO: 1951553 - DNA, 25 bp, Homo sapien
tggaccccagtgctgttttcagttg

SEQ ID NO: 1951554 - DNA, 25 bp, Homo sapien
actgggaccaccgtgggagttgtga

SEQ ID NO: 1951555 - DNA, 25 bp, Homo sapien
ggagagttgattccatcactggaca

SEQ ID NO: 1951556 - DNA, 25 bp, Homo sapien
gagttgtgaggagagttgattccat

SEQ ID NO: 1951557 - DNA, 25 bp, Homo sapien
gttgattccatcactggacattgcg

SEQ ID NO: 1951558 - DNA, 25 bp, Homo sapien
gtggttctctgatgccagtgtggtg

SEQ ID NO: 1951559 - DNA, 25 bp, Homo sapien
tttgggtagtattctgtggttctct

SEQ ID NO: 1951560 - DNA, 25 bp, Homo sapien
atttgggtagtattctgtggttctc

SEQ ID NO: 1951561 - DNA, 25 bp, Homo sapien
gatgccagtgtggtgtcatagagga

SEQ ID NO: 1951562 - DNA, 25 bp, Homo sapien
tgagcctcgataactctgtccatca

SEQ ID NO: 1951563 - DNA, 25 bp, Homo sapien
gagcctcgataactctgtccatcac

SEQ ID NO: 1951564 - DNA, 25 bp, Homo sapien
gaatgagcctcgataactctgtcca

SEQ ID NO: 1951565 - DNA, 25 bp, Homo sapien
gagaatgagcctcgataactctgtc

SEQ ID NO: 1951566 - DNA, 25 bp, Homo sapien
cttgttcagaaacagccgtggacgt

SEQ ID NO: 1951567 - DNA, 25 bp, Homo sapien
ttcagaaacagccgtggacgtcgca

SEQ ID NO: 1951568 - DNA, 25 bp, Homo sapien
cagaaacagccgtggacgtcgcaag

SEQ ID NO: 1951569 - DNA, 25 bp, Homo sapien
tgttcagaaacagccgtggacgtcg

SEQ ID NO: 1951570 - DNA, 25 bp, Homo sapien
tgggatccatggtataacaccaagg

SEQ ID NO: 1951571 - DNA, 25 bp, Homo sapien
taagaagttagttggaagcatggcc

SEQ ID NO: 1951572 - DNA, 25 bp, Homo sapien
gaagcatggcccttccaagagaaat

SEQ ID NO: 1951573 - DNA, 25 bp, Homo sapien
tgagacattctacccaacattccag

SEQ ID NO: 1951574 - DNA, 25 bp, Homo sapien
actgtgcctgaagaaagaagcctga

SEQ ID NO: 1951575 - DNA, 25 bp, Homo sapien
taatattctgttgtcctctgatgcc

SEQ ID NO: 1951576 - DNA, 25 bp, Homo sapien
catttggataatattctgttgtcct

SEQ ID NO: 1951577 - DNA, 25 bp, Homo sapien
tctgttgtcctctgatgccagtgtg

SEQ ID NO: 1951578 - DNA, 25 bp, Homo sapien
tttggataatattctgttgtcctct

SEQ ID NO: 1951579 - DNA, 25 bp, Homo sapien
gagcctcgataactctgtccatcac

SEQ ID NO: 1951580 - DNA, 25 bp, Homo sapien
tgagcctcgataactctgtccatca

SEQ ID NO: 1951581 - DNA, 25 bp, Homo sapien
gaatgagcctcgataactctgtcca

SEQ ID NO: 1951582 - DNA, 25 bp, Homo sapien
gagaatgagcctcgataactctgtc

SEQ ID NO: 1951583 - DNA, 25 bp, Homo sapien
gatctgggaccaccgtgagagttgc

SEQ ID NO: 1951584 - DNA, 25 bp, Homo sapien
tctgggaccaccgtgagagttgcaa

SEQ ID NO: 1951585 - DNA, 25 bp, Homo sapien
tgggaccaccgtgagagttgcaagg

SEQ ID NO: 1951586 - DNA, 25 bp, Homo sapien
ctgggaccaccgtgagagttgcaag

SEQ ID NO: 1951587 - DNA, 25 bp, Homo sapien
cactgtggatattgcatagctcagc

SEQ ID NO: 1951588 - DNA, 25 bp, Homo sapien
taacacttgaggagacttctatgcc

SEQ ID NO: 1951589 - DNA, 25 bp, Homo sapien
tagggtaaaacacattgagcattgc

SEQ ID NO: 1951590 - DNA, 25 bp, Homo sapien
caactaacctgattgggagaccatc

SEQ ID NO: 1951591 - DNA, 25 bp, Homo sapien
tcggtaactctgtccataatggtag

SEQ ID NO: 1951592 - DNA, 25 bp, Homo sapien
tttctggggtccgactatgctggtg

SEQ ID NO: 1951593 - DNA, 25 bp, Homo sapien
cataatggtagtagcagtcctgtac

SEQ ID NO: 1951594 - DNA, 25 bp, Homo sapien
gtgcctcggtaactctgtccataat

SEQ ID NO: 1951595 - DNA, 25 bp, Homo sapien
ccattctgcatctgagcatcgtgtc

SEQ ID NO: 1951596 - DNA, 25 bp, Homo sapien
cattcggagggacgaaggcagtcca

SEQ ID NO: 1951597 - DNA, 25 bp, Homo sapien
cactgggatctgttgtataacacca

SEQ ID NO: 1951598 - DNA, 25 bp, Homo sapien
ggcttggagccagaataacattcgg

SEQ ID NO: 1951599 - DNA, 25 bp, Homo sapien
atgtgccttgataactctgtccatt

SEQ ID NO: 1951600 - DNA, 25 bp, Homo sapien
gggtccgactatgcgagtgtggtgt

SEQ ID NO: 1951601 - DNA, 25 bp, Homo sapien
ccgactatgcgagtgtggtgtcata

SEQ ID NO: 1951602 - DNA, 25 bp, Homo sapien
gcttggcaggttcttcctgtgacag

SEQ ID NO: 1951603 - DNA, 25 bp, Homo sapien
accccaggcctttgctcagttggtg

SEQ ID NO: 1951604 - DNA, 25 bp, Homo sapien
tgcaccccaggcctttgctcagttg

SEQ ID NO: 1951605 - DNA, 25 bp, Homo sapien
gcaccccaggcctttgctcagttgg

SEQ ID NO: 1951606 - DNA, 25 bp, Homo sapien
ctgcaccccaggcctttgctcagtt

SEQ ID NO: 1951607 - DNA, 25 bp, Homo sapien
gcagtcccttctgcgtctgagcatt

SEQ ID NO: 1951608 - DNA, 25 bp, Homo sapien
cagaaacttcagttggccctttatt

SEQ ID NO: 1951609 - DNA, 25 bp, Homo sapien
cagttggccctttattctcttatgg

SEQ ID NO: 1951610 - DNA, 25 bp, Homo sapien
cttcagttggccctttattctctta

SEQ ID NO: 1951611 - DNA, 25 bp, Homo sapien
cacagaaacttcagttggcccttta

SEQ ID NO: 1951612 - DNA, 25 bp, Homo sapien
aactctgtccattaccgtggtagca

SEQ ID NO: 1951613 - DNA, 25 bp, Homo sapien
ccgactatgcgagtgtggtgtcata

SEQ ID NO: 1951614 - DNA, 25 bp, Homo sapien
cagtggtggagtatgtgcctcgata

SEQ ID NO: 1951615 - DNA, 25 bp, Homo sapien
tagtattctggggtccgactatgcg

SEQ ID NO: 1951616 - DNA, 25 bp, Homo sapien
accccaggcctctgctcagtcggtg

SEQ ID NO: 1951617 - DNA, 25 bp, Homo sapien
caccccaggcctctgctcagtcggt

SEQ ID NO: 1951618 - DNA, 25 bp, Homo sapien
ctgcaccccaggcctctgctcagtc

SEQ ID NO: 1951619 - DNA, 25 bp, Homo sapien
tgcaccccaggcctctgctcagtcg

SEQ ID NO: 1951620 - DNA, 25 bp, Homo sapien
agatgtctggccacagactccttac

SEQ ID NO: 1951621 - DNA, 25 bp, Homo sapien
caccgggatccctcgtataacaata

SEQ ID NO: 1951622 - DNA, 25 bp, Homo sapien
gagcattgcgtcaggttgcagtact

SEQ ID NO: 1951623 - DNA, 25 bp, Homo sapien
cttgttcggaaggagcctctaggct

SEQ ID NO: 1951624 - DNA, 25 bp, Homo sapien
tataacaataaggagctgccacagc

SEQ ID NO: 1951625 - DNA, 25 bp, Homo sapien
caaaacgatacacgtcacaagaggt

SEQ ID NO: 1951626 - DNA, 25 bp, Homo sapien
tgtgctgcaacaaggtcattaccgg

SEQ ID NO: 1951627 - DNA, 25 bp, Homo sapien
aaagtaccatatgattgccaccagc

SEQ ID NO: 1951628 - DNA, 25 bp, Homo sapien
cacaagaggtgggacaacatgcagg

SEQ ID NO: 1951629 - DNA, 25 bp, Homo sapien
tgggtagtattctggggtccgacta

SEQ ID NO: 1951630 - DNA, 25 bp, Homo sapien
ttctggggtccgactatgcgagtgt

SEQ ID NO: 1951631 - DNA, 25 bp, Homo sapien
gtccgactatgcgagtgtggtgtca

SEQ ID NO: 1951632 - DNA, 25 bp, Homo sapien
ccgactatgcgagtgtggtgtcata

SEQ ID NO: 1951633 - DNA, 25 bp, Homo sapien
tggtggagtatgtgcctcgataact

SEQ ID NO: 1951634 - DNA, 25 bp, Homo sapien
gtatgtgcctcgataactctgtcca

SEQ ID NO: 1951635 - DNA, 25 bp, Homo sapien
acagtggtggagtatgtgcctcgat

SEQ ID NO: 1951636 - DNA, 25 bp, Homo sapien
gcttggcaggttcttcctgtgacag

SEQ ID NO: 1951637 - DNA, 25 bp, Homo sapien
caccccaggcctttgctcagtcggt

SEQ ID NO: 1951638 - DNA, 25 bp, Homo sapien
accccaggcctttgctcagtcggtg

SEQ ID NO: 1951639 - DNA, 25 bp, Homo sapien
tgcaccccaggcctttgctcagtcg

SEQ ID NO: 1951640 - DNA, 25 bp, Homo sapien
ctgcaccccaggcctttgctcagtc

SEQ ID NO: 1951641 - DNA, 25 bp, Homo sapien
agatgtctggccacagactccttac

SEQ ID NO: 1951642 - DNA, 25 bp, Homo sapien
caccgggatccctcgtataacaata

SEQ ID NO: 1951643 - DNA, 25 bp, Homo sapien
gagcattgcgtcaggttgcagtact

SEQ ID NO: 1951644 - DNA, 25 bp, Homo sapien
cttgttcggaaggagcctctaggct

SEQ ID NO: 1951645 - DNA, 25 bp, Homo sapien
tataacaataaggagctgccacagc

SEQ ID NO: 1951646 - DNA, 25 bp, Homo sapien
aaagtaccatatgattgccaccagc

SEQ ID NO: 1951647 - DNA, 25 bp, Homo sapien
tgtgctgcaacaaggtcattaccgg

SEQ ID NO: 1951648 - DNA, 25 bp, Homo sapien
cacaagaggtgggacaacatgcagg

SEQ ID NO: 1951649 - DNA, 25 bp, Homo sapien
caaaacgatacacgtcacaagaggt

SEQ ID NO: 1951650 - DNA, 25 bp, Homo sapien
gggtctccactgaattggcaatgtg

SEQ ID NO: 1951651 - DNA, 25 bp, Homo sapien
tggtctagctgggaagaactccagt

SEQ ID NO: 1951652 - DNA, 25 bp, Homo sapien
gcagcgtcatgtcaggccaacgact

SEQ ID NO: 1951653 - DNA, 25 bp, Homo sapien
gctccgtgaggactctctggtctag

SEQ ID NO: 1951654 - DNA, 25 bp, Homo sapien
ttctggggtccgactatgcgagtgt

SEQ ID NO: 1951655 - DNA, 25 bp, Homo sapien
gtccgactatgcgagtgtggtgtca

SEQ ID NO: 1951656 - DNA, 25 bp, Homo sapien
tgggtagtattctggggtccgacta

SEQ ID NO: 1951657 - DNA, 25 bp, Homo sapien
ccgactatgcgagtgtggtgtcata

SEQ ID NO: 1951658 - DNA, 25 bp, Homo sapien
tggtggagtatgtgcctcgataact

SEQ ID NO: 1951659 - DNA, 25 bp, Homo sapien
acagtggtggagtatgtgcctcgat

SEQ ID NO: 1951660 - DNA, 25 bp, Homo sapien
gtatgtgcctcgataactctgtcca

SEQ ID NO: 1951661 - DNA, 25 bp, Homo sapien
gcttggcaggttcttcctgtgacag

SEQ ID NO: 1951662 - DNA, 25 bp, Homo sapien
accccaggcctttgctcagtcggtg

SEQ ID NO: 1951663 - DNA, 25 bp, Homo sapien
caccccaggcctttgctcagtcggt

SEQ ID NO: 1951664 - DNA, 25 bp, Homo sapien
tgcaccccaggcctttgctcagtcg

SEQ ID NO: 1951665 - DNA, 25 bp, Homo sapien
ctgcaccccaggcctttgctcagtc

SEQ ID NO: 1951666 - DNA, 25 bp, Homo sapien
agatgtctggccacagactccttac

SEQ ID NO: 1951667 - DNA, 25 bp, Homo sapien
caccgggatccctcgtataacaata

SEQ ID NO: 1951668 - DNA, 25 bp, Homo sapien
gagcattgcgtcaggttgcagtact

SEQ ID NO: 1951669 - DNA, 25 bp, Homo sapien
cttgttcggaaggagcctctaggct

SEQ ID NO: 1951670 - DNA, 25 bp, Homo sapien
tataacaataaggagctgccacagc

SEQ ID NO: 1951671 - DNA, 25 bp, Homo sapien
caaaacgatacacgtcacaagaggt

SEQ ID NO: 1951672 - DNA, 25 bp, Homo sapien
cacaagaggtgggacaacatgcagg

SEQ ID NO: 1951673 - DNA, 25 bp, Homo sapien
aaagtaccatatgattgccaccagc

SEQ ID NO: 1951674 - DNA, 25 bp, Homo sapien
tgtgctgcaacaaggtcattaccgg

SEQ ID NO: 1951675 - DNA, 25 bp, Homo sapien
cattacgtgggctgcagaaagttcc

SEQ ID NO: 1951676 - DNA, 25 bp, Homo sapien
tccgacatggatgatcttcaaggca

SEQ ID NO: 1951677 - DNA, 25 bp, Homo sapien
taattccttcgggtcacctctcttg

SEQ ID NO: 1951678 - DNA, 25 bp, Homo sapien
aattgctggattcttcattacgtgg

SEQ ID NO: 1951679 - DNA, 25 bp, Homo sapien
tggtctagctgggaagaactccagt

SEQ ID NO: 1951680 - DNA, 25 bp, Homo sapien
gcagcgtcatgtcaggccaacgact

SEQ ID NO: 1951681 - DNA, 25 bp, Homo sapien
gggtctccactgaattggcaatgtg

SEQ ID NO: 1951682 - DNA, 25 bp, Homo sapien
gctccgtgaggactctctggtctag

SEQ ID NO: 1951683 - DNA, 25 bp, Homo sapien
gtatgtgcctcgataactctgtcca

SEQ ID NO: 1951684 - DNA, 25 bp, Homo sapien
gcttggcaggttcttcctgtgacag

SEQ ID NO: 1951685 - DNA, 25 bp, Homo sapien
ccgactatgcgagtgtggtgtcata

SEQ ID NO: 1951686 - DNA, 25 bp, Homo sapien
tagtattctggggtccgactatgcg

SEQ ID NO: 1951687 - DNA, 25 bp, Homo sapien
accccaggcctttgctcagtcggtg

SEQ ID NO: 1951688 - DNA, 25 bp, Homo sapien
caccccaggcctttgctcagtcggt

SEQ ID NO: 1951689 - DNA, 25 bp, Homo sapien
ctgcaccccaggcctttgctcagtc

SEQ ID NO: 1951690 - DNA, 25 bp, Homo sapien
tgcaccccaggcctttgctcagtcg

SEQ ID NO: 1951691 - DNA, 25 bp, Homo sapien
agatgtctggccacagactccttac

SEQ ID NO: 1951692 - DNA, 25 bp, Homo sapien
caccgggatccctcgtataacaata

SEQ ID NO: 1951693 - DNA, 25 bp, Homo sapien
cttgttcggaaggagcctctaggct

SEQ ID NO: 1951694 - DNA, 25 bp, Homo sapien
tataacaataaggagctgccacagc

SEQ ID NO: 1951695 - DNA, 25 bp, Homo sapien
gagcattgcgtcaggttgcagtact

SEQ ID NO: 1951696 - DNA, 25 bp, Homo sapien
caaaacgatacacgtcacaagaggt

SEQ ID NO: 1951697 - DNA, 25 bp, Homo sapien
cacaagaggtgggacaacatgcagg

SEQ ID NO: 1951698 - DNA, 25 bp, Homo sapien
aaagtaccatatgattgccaccagc

SEQ ID NO: 1951699 - DNA, 25 bp, Homo sapien
tgtgctgcaacaaggtcattaccgg

SEQ ID NO: 1951700 - DNA, 25 bp, Homo sapien
aactctgtccattaccgtggtagca

SEQ ID NO: 1951701 - DNA, 25 bp, Homo sapien
tagtattctggggtccgactatgcg

SEQ ID NO: 1951702 - DNA, 25 bp, Homo sapien
ccgactatgcgagtgtggtgtcata

SEQ ID NO: 1951703 - DNA, 25 bp, Homo sapien
cagtggtggagtatgtgcctcgata

SEQ ID NO: 1951704 - DNA, 25 bp, Homo sapien
accccaggcctctgctcagtcggtg

SEQ ID NO: 1951705 - DNA, 25 bp, Homo sapien
caccccaggcctctgctcagtcggt

SEQ ID NO: 1951706 - DNA, 25 bp, Homo sapien
tgcaccccaggcctctgctcagtcg

SEQ ID NO: 1951707 - DNA, 25 bp, Homo sapien
ctgcaccccaggcctctgctcagtc

SEQ ID NO: 1951708 - DNA, 25 bp, Homo sapien
agatgtctggccacagactccttac

SEQ ID NO: 1951709 - DNA, 25 bp, Homo sapien
cttgttcggaaggagcctctaggct

SEQ ID NO: 1951710 - DNA, 25 bp, Homo sapien
gagcattgcgtcaggttgcagtact

SEQ ID NO: 1951711 - DNA, 25 bp, Homo sapien
caccgggatccctcgtataacaata

SEQ ID NO: 1951712 - DNA, 25 bp, Homo sapien
tataacaataaggagctgccacagc

SEQ ID NO: 1951713 - DNA, 25 bp, Homo sapien
aaagtaccatatgattgccaccagc

SEQ ID NO: 1951714 - DNA, 25 bp, Homo sapien
caaaacgatacacgtcacaagaggt

SEQ ID NO: 1951715 - DNA, 25 bp, Homo sapien
cacaagaggtgggacaacatgcagg

SEQ ID NO: 1951716 - DNA, 25 bp, Homo sapien
tgtgctgcaacaaggtcattaccgg

SEQ ID NO: 1951717 - DNA, 25 bp, Homo sapien
cattacgtgggctgcagaaagttcc

SEQ ID NO: 1951718 - DNA, 25 bp, Homo sapien
tccgacatggatgatcttcaaggca

SEQ ID NO: 1951719 - DNA, 25 bp, Homo sapien
taattccttcgggtcacctctcttg

SEQ ID NO: 1951720 - DNA, 25 bp, Homo sapien
aattgctggattcttcattacgtgg

SEQ ID NO: 1951721 - DNA, 25 bp, Homo sapien
tggtctagctgggaagaactccagt

SEQ ID NO: 1951722 - DNA, 25 bp, Homo sapien
gcagcgtcatgtcaggccaacgact

SEQ ID NO: 1951723 - DNA, 25 bp, Homo sapien
gggtctccactgaattggcaatgtg

SEQ ID NO: 1951724 - DNA, 25 bp, Homo sapien
gctccgtgaggactctctggtctag

SEQ ID NO: 1951725 - DNA, 25 bp, Homo sapien
gcttggcaggttcttcctgtgacag

SEQ ID NO: 1951726 - DNA, 25 bp, Homo sapien
gtatgtgcctcgataactctgtcca

SEQ ID NO: 1951727 - DNA, 25 bp, Homo sapien
ccgactatgcgagtgtggtgtcata

SEQ ID NO: 1951728 - DNA, 25 bp, Homo sapien
tagtattctggggtccgactatgcg

SEQ ID NO: 1951729 - DNA, 25 bp, Homo sapien
caccccaggcctttgctcagtcggt

SEQ ID NO: 1951730 - DNA, 25 bp, Homo sapien
accccaggcctttgctcagtcggtg

SEQ ID NO: 1951731 - DNA, 25 bp, Homo sapien
ctgcaccccaggcctttgctcagtc

SEQ ID NO: 1951732 - DNA, 25 bp, Homo sapien
tgcaccccaggcctttgctcagtcg

SEQ ID NO: 1951733 - DNA, 25 bp, Homo sapien
agatgtctggccacagactccttac

SEQ ID NO: 1951734 - DNA, 25 bp, Homo sapien
caccgggatccctcgtataacaata

SEQ ID NO: 1951735 - DNA, 25 bp, Homo sapien
gagcattgcgtcaggttgcagtact

SEQ ID NO: 1951736 - DNA, 25 bp, Homo sapien
tataacaataaggagctgccacagc

SEQ ID NO: 1951737 - DNA, 25 bp, Homo sapien
cttgttcggaaggagcctctaggct

SEQ ID NO: 1951738 - DNA, 25 bp, Homo sapien
cacaagaggtgggacaacatgcagg

SEQ ID NO: 1951739 - DNA, 25 bp, Homo sapien
caaaacgatacacgtcacaagaggt

SEQ ID NO: 1951740 - DNA, 25 bp, Homo sapien
aaagtaccatatgattgccaccagc

SEQ ID NO: 1951741 - DNA, 25 bp, Homo sapien
tgtgctgcaacaaggtcattaccgg

SEQ ID NO: 1951742 - DNA, 25 bp, Homo sapien
gctccgtgaggactctctggtctag

SEQ ID NO: 1951743 - DNA, 25 bp, Homo sapien
gggtctccactgaattggcaatgtg

SEQ ID NO: 1951744 - DNA, 25 bp, Homo sapien
gcagcgtcatgtcaggccaacgact

SEQ ID NO: 1951745 - DNA, 25 bp, Homo sapien
tggtctagctgggaagaactccagt

SEQ ID NO: 1951746 - DNA, 25 bp, Homo sapien
gagacattttgctacgccatctgca

SEQ ID NO: 1951747 - DNA, 25 bp, Homo sapien
ttagctccaaggcaatcatcctgag

SEQ ID NO: 1951748 - DNA, 25 bp, Homo sapien
gttcggagaactcagcttgagacac

SEQ ID NO: 1951749 - DNA, 25 bp, Homo sapien
tgcatctgtcacaagttgagttcgg

SEQ ID NO: 1951750 - DNA, 25 bp, Homo sapien
ccgactatgcgagtgtggtgtcata

SEQ ID NO: 1951751 - DNA, 25 bp, Homo sapien
gcttggcaggttcttcctgtgacag

SEQ ID NO: 1951752 - DNA, 25 bp, Homo sapien
gtatgtgcctcgataactctgtcca

SEQ ID NO: 1951753 - DNA, 25 bp, Homo sapien
tagtattctggggtccgactatgcg

SEQ ID NO: 1951754 - DNA, 25 bp, Homo sapien
caccccaggcctttgctcagtcggt

SEQ ID NO: 1951755 - DNA, 25 bp, Homo sapien
accccaggcctttgctcagtcggtg

SEQ ID NO: 1951756 - DNA, 25 bp, Homo sapien
ctgcaccccaggcctttgctcagtc

SEQ ID NO: 1951757 - DNA, 25 bp, Homo sapien
tgcaccccaggcctttgctcagtcg

SEQ ID NO: 1951758 - DNA, 25 bp, Homo sapien
agatgtctggccacagactccttac

SEQ ID NO: 1951759 - DNA, 25 bp, Homo sapien
gagcattgcgtcaggttgcagtact

SEQ ID NO: 1951760 - DNA, 25 bp, Homo sapien
cttgttcggaaggagcctctaggct

SEQ ID NO: 1951761 - DNA, 25 bp, Homo sapien
caccgggatccctcgtataacaata

SEQ ID NO: 1951762 - DNA, 25 bp, Homo sapien
tataacaataaggagctgccacagc

SEQ ID NO: 1951763 - DNA, 25 bp, Homo sapien
cacaagaggtgggacaacatgcagg

SEQ ID NO: 1951764 - DNA, 25 bp, Homo sapien
aaagtaccatatgattgccaccagc

SEQ ID NO: 1951765 - DNA, 25 bp, Homo sapien
caaaacgatacacgtcacaagaggt

SEQ ID NO: 1951766 - DNA, 25 bp, Homo sapien
tgtgctgcaacaaggtcattaccgg

SEQ ID NO: 1951767 - DNA, 25 bp, Homo sapien
aaacgatcagagtattctccttctg

SEQ ID NO: 1951768 - DNA, 25 bp, Homo sapien
aacgatcagagtattctccttctgc

SEQ ID NO: 1951769 - DNA, 25 bp, Homo sapien
taagagatctgaagaggtcggacag

SEQ ID NO: 1951770 - DNA, 25 bp, Homo sapien
aactgggggatgagttgaaagaaca

SEQ ID NO: 1951771 - DNA, 25 bp, Homo sapien
aaggaagatggcaggaagactaaga

SEQ ID NO: 1951772 - DNA, 25 bp, Homo sapien
cagccactccagaactgggggatga

SEQ ID NO: 1951773 - DNA, 25 bp, Homo sapien
tttgcttactgtaagattaatgaca

SEQ ID NO: 1951774 - DNA, 25 bp, Homo sapien
gttttgcttactgtaagattaatga

SEQ ID NO: 1951775 - DNA, 25 bp, Homo sapien
ttttgcttactgtaagattaatgac

SEQ ID NO: 1951776 - DNA, 25 bp, Homo sapien
tctgtggtcctattatgttgatgtg

SEQ ID NO: 1951777 - DNA, 25 bp, Homo sapien
gttttctgtggtcctattatgttga

SEQ ID NO: 1951778 - DNA, 25 bp, Homo sapien
gtggtcctattatgttgatgtggtg

SEQ ID NO: 1951779 - DNA, 25 bp, Homo sapien
ggtagttttctgtggtcctattatg

SEQ ID NO: 1951780 - DNA, 25 bp, Homo sapien
tacgtgcctcgataactctgtccat

SEQ ID NO: 1951781 - DNA, 25 bp, Homo sapien
catagatgaccaagcttggcaggtc

SEQ ID NO: 1951782 - DNA, 25 bp, Homo sapien
acagtggtggagtacgtgcctcgat

SEQ ID NO: 1951783 - DNA, 25 bp, Homo sapien
gaccaagcttggcaggtccttcctg

SEQ ID NO: 1951784 - DNA, 25 bp, Homo sapien
ctggaccacatggctttgctcaggt

SEQ ID NO: 1951785 - DNA, 25 bp, Homo sapien
gaccacatggctttgctcaggtgct

SEQ ID NO: 1951786 - DNA, 25 bp, Homo sapien
accacatggctttgctcaggtgctg

SEQ ID NO: 1951787 - DNA, 25 bp, Homo sapien
tggaccacatggctttgctcaggtg

SEQ ID NO: 1951788 - DNA, 25 bp, Homo sapien
gaagtagaagaaccacttccttatg

SEQ ID NO: 1951789 - DNA, 25 bp, Homo sapien
tagaagaaccacttccttatgttcc

SEQ ID NO: 1951790 - DNA, 25 bp, Homo sapien
agaagtagaagaaccacttccttat

SEQ ID NO: 1951791 - DNA, 25 bp, Homo sapien
gtagaagaaccacttccttatgttc

SEQ ID NO: 1951792 - DNA, 25 bp, Homo sapien
agtgcccagaaagtgtgtcccaatc

SEQ ID NO: 1951793 - DNA, 25 bp, Homo sapien
gcccagaaagtgtgtcccaatccca

SEQ ID NO: 1951794 - DNA, 25 bp, Homo sapien
agcagtgcccagaaagtgtgtccca

SEQ ID NO: 1951795 - DNA, 25 bp, Homo sapien
cagcagtgcccagaaagtgtgtccc

SEQ ID NO: 1951796 - DNA, 25 bp, Homo sapien
ttatggcacttatggctcccttgct

SEQ ID NO: 1951797 - DNA, 25 bp, Homo sapien
tctgaggtagttatggcacttatgg

SEQ ID NO: 1951798 - DNA, 25 bp, Homo sapien
ctggccaccgggacaccccaggagg

SEQ ID NO: 1951799 - DNA, 25 bp, Homo sapien
tctggaactcaagccccaagaagtc

SEQ ID NO: 1951800 - DNA, 25 bp, Homo sapien
ttgcaactgtcaatgcctccagcca

SEQ ID NO: 1951801 - DNA, 25 bp, Homo sapien
gaaactcatagcgattgcacacttc

SEQ ID NO: 1951802 - DNA, 25 bp, Homo sapien
ggagctgggcttccttgagaaagcc

SEQ ID NO: 1951803 - DNA, 25 bp, Homo sapien
cacagagctcagtggatttgactct

SEQ ID NO: 1951804 - DNA, 25 bp, Homo sapien
ggtaactacgtccacaacatgttca

SEQ ID NO: 1951805 - DNA, 25 bp, Homo sapien
agatgaaagaaatggtaactacgtc

SEQ ID NO: 1951806 - DNA, 25 bp, Homo sapien
gaaatggtaactacgtccacaacat

SEQ ID NO: 1951807 - DNA, 25 bp, Homo sapien
acatgttcacaaggaaactccagaa

SEQ ID NO: 1951808 - DNA, 25 bp, Homo sapien
ccaggaaagttgatgtggtctgcga

SEQ ID NO: 1951809 - DNA, 25 bp, Homo sapien
ctgccatccagtggccgacatagag

SEQ ID NO: 1951810 - DNA, 25 bp, Homo sapien
tgtggtctgcgagtaggtgctgcca

SEQ ID NO: 1951811 - DNA, 25 bp, Homo sapien
cagtggccgacatagagatgtcatc

SEQ ID NO: 1951812 - DNA, 25 bp, Homo sapien
cacaggtgacaagaggattgaagcc

SEQ ID NO: 1951813 - DNA, 25 bp, Homo sapien
aggtgacaagaggattgaagccctc

SEQ ID NO: 1951814 - DNA, 25 bp, Homo sapien
caggtgacaagaggattgaagccct

SEQ ID NO: 1951815 - DNA, 25 bp, Homo sapien
gccacaggtgacaagaggattgaag

SEQ ID NO: 1951816 - DNA, 25 bp, Homo sapien
gcaggatcagtccattgattgtgga

SEQ ID NO: 1951817 - DNA, 25 bp, Homo sapien
agtccagcggcaggatcagtccatt

SEQ ID NO: 1951818 - DNA, 25 bp, Homo sapien
cattgattgtggatgacgactgacc

SEQ ID NO: 1951819 - DNA, 25 bp, Homo sapien
atccccttggcctcaacacctccaa

SEQ ID NO: 1951820 - DNA, 25 bp, Homo sapien
gtcaagggggtaagtctgatagata

SEQ ID NO: 1951821 - DNA, 25 bp, Homo sapien
tcttagtgttccagtggtcaagggg

SEQ ID NO: 1951822 - DNA, 25 bp, Homo sapien
tcaggcagagatcccaaaacagtct

SEQ ID NO: 1951823 - DNA, 25 bp, Homo sapien
gggtaagtctgatagatataattat

SEQ ID NO: 1951824 - DNA, 25 bp, Homo sapien
agtctggtcggcgaccacataattt

SEQ ID NO: 1951825 - DNA, 25 bp, Homo sapien
aacattcagtctggtcggcgaccac

SEQ ID NO: 1951826 - DNA, 25 bp, Homo sapien
tgtaacattcagtctggtcggcgac

SEQ ID NO: 1951827 - DNA, 25 bp, Homo sapien
gatgtaacattcagtctggtcggcg

SEQ ID NO: 1951828 - DNA, 25 bp, Homo sapien
cgtctggacagagcggggtcgcgcc

SEQ ID NO: 1951829 - DNA, 25 bp, Homo sapien
ctgaggatcagtccgggagccagcg

SEQ ID NO: 1951830 - DNA, 25 bp, Homo sapien
agcgtctggacagagcggggtcgcg

SEQ ID NO: 1951831 - DNA, 25 bp, Homo sapien
tgaggatcagtccgggagccagcgt

SEQ ID NO: 1951832 - DNA, 25 bp, Homo sapien
tgccttggtccggtcccgccttgga

SEQ ID NO: 1951833 - DNA, 25 bp, Homo sapien
tccgcggagcgcaggctgccttggt

SEQ ID NO: 1951834 - DNA, 25 bp, Homo sapien
cctcgccttcgctccagaagaatca

SEQ ID NO: 1951835 - DNA, 25 bp, Homo sapien
gccttggaccctcgccttcgctcca

SEQ ID NO: 1951836 - DNA, 25 bp, Homo sapien
ctctgtgcaaaaccttgactccctg

SEQ ID NO: 1951837 - DNA, 25 bp, Homo sapien
ttgtacttccaggaggcaaaagagc

SEQ ID NO: 1951838 - DNA, 25 bp, Homo sapien
accacgacgaacgacgacacgagca

SEQ ID NO: 1951839 - DNA, 25 bp, Homo sapien
acgacacgagcaaaccaggccgcag

SEQ ID NO: 1951840 - DNA, 25 bp, Homo sapien
gcgctgggaactttgtgacatcccc

SEQ ID NO: 1951841 - DNA, 25 bp, Homo sapien
cccaacaagcgctgggaactttgtg

SEQ ID NO: 1951842 - DNA, 25 bp, Homo sapien
aacaagcgctgggaactttgtgaca

SEQ ID NO: 1951843 - DNA, 25 bp, Homo sapien
caagcgctgggaactttgtgacatc

SEQ ID NO: 1951844 - DNA, 25 bp, Homo sapien
aagggaacaggtgaaaactatcgcg

SEQ ID NO: 1951845 - DNA, 25 bp, Homo sapien
acctgtcagcactggagtgcacaga

SEQ ID NO: 1951846 - DNA, 25 bp, Homo sapien
ctatcgcgggaatgtggctgttacc

SEQ ID NO: 1951847 - DNA, 25 bp, Homo sapien
atcttctggtcccacctaccagtgt

SEQ ID NO: 1951848 - DNA, 25 bp, Homo sapien
atgaaaactactgccgcaatcctga

SEQ ID NO: 1951849 - DNA, 25 bp, Homo sapien
gatgaaaactactgccgcaatcctg

SEQ ID NO: 1951850 - DNA, 25 bp, Homo sapien
tttggatgaaaactactgccgcaat

SEQ ID NO: 1951851 - DNA, 25 bp, Homo sapien
tggatgaaaactactgccgcaatcc

SEQ ID NO: 1951852 - DNA, 25 bp, Homo sapien
gataccgtcctgtgactcctcccca

SEQ ID NO: 1951853 - DNA, 25 bp, Homo sapien
accgtcctgtgactcctccccagta

SEQ ID NO: 1951854 - DNA, 25 bp, Homo sapien
ataccgtcctgtgactcctccccag

SEQ ID NO: 1951855 - DNA, 25 bp, Homo sapien
cgtcctgtgactcctccccagtatc

SEQ ID NO: 1951856 - DNA, 25 bp, Homo sapien
cccaggctcaggctgaactacacaa

SEQ ID NO: 1951857 - DNA, 25 bp, Homo sapien
gggccaacacgcatggggaggaagc

SEQ ID NO: 1951858 - DNA, 25 bp, Homo sapien
tacacaacctccttacgcctcagtt

SEQ ID NO: 1951859 - DNA, 25 bp, Homo sapien
gggaggaagcatttgggcagtgact

SEQ ID NO: 1951860 - DNA, 25 bp, Homo sapien
ttttggaaggtaccactgagtggca

SEQ ID NO: 1951861 - DNA, 25 bp, Homo sapien
tataagcttgtgtctggaaaggtta

SEQ ID NO: 1951862 - DNA, 25 bp, Homo sapien
tgtctggaaaggttaattcttggta

SEQ ID NO: 1951863 - DNA, 25 bp, Homo sapien
attttggaaggtaccactgagtggc

SEQ ID NO: 1951864 - DNA, 25 bp, Homo sapien
gtcttggctgtgcacgccccaataa

SEQ ID NO: 1951865 - DNA, 25 bp, Homo sapien
taattaattggacgggagacagagt

SEQ ID NO: 1951866 - DNA, 25 bp, Homo sapien
gagacagagtgacgcactgactcac

SEQ ID NO: 1951867 - DNA, 25 bp, Homo sapien
taactggcagtaatcaaacgaagac

SEQ ID NO: 1951868 - DNA, 25 bp, Homo sapien
cagatggggggatttagctgctttt

SEQ ID NO: 1951869 - DNA, 25 bp, Homo sapien
tgctctttgttcaccccaccaattt

SEQ ID NO: 1951870 - DNA, 25 bp, Homo sapien
cagctgcacaaaggactgagcaggc

SEQ ID NO: 1951871 - DNA, 25 bp, Homo sapien
tgcttttgataaggaacagctgcac

SEQ ID NO: 1951872 - DNA, 25 bp, Homo sapien
gcattgaattttggacaatgcctgc

SEQ ID NO: 1951873 - DNA, 25 bp, Homo sapien
tgtttctggcaaggcaatacccgtg

SEQ ID NO: 1951874 - DNA, 25 bp, Homo sapien
aaggcaatacccgtgatttcaggca

SEQ ID NO: 1951875 - DNA, 25 bp, Homo sapien
catcacgaggccaccacagatggat

SEQ ID NO: 1951876 - DNA, 25 bp, Homo sapien
gatttcaggcaaaagcatcacgagg

SEQ ID NO: 1951877 - DNA, 25 bp, Homo sapien
tcttgtaggaaagacaacagcgaca

SEQ ID NO: 1951878 - DNA, 25 bp, Homo sapien
aacagcgacaacctcaagccagtaa

SEQ ID NO: 1951879 - DNA, 25 bp, Homo sapien
cttgttttctactcttgtaggaaag

SEQ ID NO: 1951880 - DNA, 25 bp, Homo sapien
aatccaattttgtgcgcttgttttc

SEQ ID NO: 1951881 - DNA, 25 bp, Homo sapien
ggtggacggagcgagatcgcgccct

SEQ ID NO: 1951882 - DNA, 25 bp, Homo sapien
cccagagccggcgggtggacggagc

SEQ ID NO: 1951883 - DNA, 25 bp, Homo sapien
acggagcgagatcgcgccctggaac

SEQ ID NO: 1951884 - DNA, 25 bp, Homo sapien
tggacggagcgagatcgcgccctgg

SEQ ID NO: 1951885 - DNA, 25 bp, Homo sapien
ggtgctcgataaatgcttattctgg

SEQ ID NO: 1951886 - DNA, 25 bp, Homo sapien
tgaaggtcaaatgacctttgaaaag

SEQ ID NO: 1951887 - DNA, 25 bp, Homo sapien
gaaccagaggaccaacgcttttgtg

SEQ ID NO: 1951888 - DNA, 25 bp, Homo sapien
acactaagaaccagaggaccaacgc

SEQ ID NO: 1951889 - DNA, 25 bp, Homo sapien
aggaccaacgcttttgtgaaggtca

SEQ ID NO: 1951890 - DNA, 25 bp, Homo sapien
agcaaatactcagtgcttgggttag

SEQ ID NO: 1951891 - DNA, 25 bp, Homo sapien
atactcagtgcttgggttaggcccc

SEQ ID NO: 1951892 - DNA, 25 bp, Homo sapien
gacgttgcagatactgactcagcaa

SEQ ID NO: 1951893 - DNA, 25 bp, Homo sapien
ccatttgccagatgacgttgcagat

SEQ ID NO: 1951894 - DNA, 25 bp, Homo sapien
tgaccatttgattaactgagcattt

SEQ ID NO: 1951895 - DNA, 25 bp, Homo sapien
tcaaggagagcctctggatgactat

SEQ ID NO: 1951896 - DNA, 25 bp, Homo sapien
tggatgactatgtgaatacccaggg

SEQ ID NO: 1951897 - DNA, 25 bp, Homo sapien
tcagtgtcactaagaaggagctggg

SEQ ID NO: 1951898 - DNA, 25 bp, Homo sapien
tgcaggtatttccattgtcgttgca

SEQ ID NO: 1951899 - DNA, 25 bp, Homo sapien
gcaggtatttccattgtcgttgcac

SEQ ID NO: 1951900 - DNA, 25 bp, Homo sapien
gatcagacaagatcgggcgtgttca

SEQ ID NO: 1951901 - DNA, 25 bp, Homo sapien
atccaagcactaaccaggccaaccc

SEQ ID NO: 1951902 - DNA, 25 bp, Homo sapien
ccaagcactaaccaggccaaccctg

SEQ ID NO: 1951903 - DNA, 25 bp, Homo sapien
cgagatcagacaagatcgggcgtgt

SEQ ID NO: 1951904 - DNA, 25 bp, Homo sapien
taccacggagtatccacagaaaagt

SEQ ID NO: 1951905 - DNA, 25 bp, Homo sapien
cggagtatccacagaaaagtttatt

SEQ ID NO: 1951906 - DNA, 25 bp, Homo sapien
cacggagtatccacagaaaagttta

SEQ ID NO: 1951907 - DNA, 25 bp, Homo sapien
gggtaccacggagtatccacagaaa

SEQ ID NO: 1951908 - DNA, 25 bp, Homo sapien
taaaccagatacacggatacttatg

SEQ ID NO: 1951909 - DNA, 25 bp, Homo sapien
tgtcattcattttacaggtaggcaa

SEQ ID NO: 1951910 - DNA, 25 bp, Homo sapien
tattactttcaactacccgaagcga

SEQ ID NO: 1951911 - DNA, 25 bp, Homo sapien
tttcagctcatgatgttaaaccaga

SEQ ID NO: 1951912 - DNA, 25 bp, Homo sapien
cacagtatctatgcttttttaagag

SEQ ID NO: 1951913 - DNA, 25 bp, Homo sapien
aatatttgtgtcaagctagcttctc

SEQ ID NO: 1951914 - DNA, 25 bp, Homo sapien
ccttactgcttttaatggagattat

SEQ ID NO: 1951915 - DNA, 25 bp, Homo sapien
cctctctagcagatctcataaagaa

SEQ ID NO: 1951916 - DNA, 25 bp, Homo sapien
gtgaattaatttgtataagcagaaa

SEQ ID NO: 1951917 - DNA, 25 bp, Homo sapien
ttctgcagcaactattaaaatctta

SEQ ID NO: 1951918 - DNA, 25 bp, Homo sapien
atgttaatcgtcttgccatttctgc

SEQ ID NO: 1951919 - DNA, 25 bp, Homo sapien
gttgcaaatttttatgggccacact

SEQ ID NO: 1951920 - DNA, 25 bp, Homo sapien
tagggatgaattctcctagagacag

SEQ ID NO: 1951921 - DNA, 25 bp, Homo sapien
ttctcctagagacagatcagcttca

SEQ ID NO: 1951922 - DNA, 25 bp, Homo sapien
gatgaattctcctagagacagatca

SEQ ID NO: 1951923 - DNA, 25 bp, Homo sapien
ctagagacagatcagcttcatggtg

SEQ ID NO: 1951924 - DNA, 25 bp, Homo sapien
ggttctgaccgtgacatccctttgc

SEQ ID NO: 1951925 - DNA, 25 bp, Homo sapien
cgttgccttctaggcggttctgacc

SEQ ID NO: 1951926 - DNA, 25 bp, Homo sapien
cttctgcttcccgttgccttctagg

SEQ ID NO: 1951927 - DNA, 25 bp, Homo sapien
tgctcctccgcttgtgcccttgaat

SEQ ID NO: 1951928 - DNA, 25 bp, Homo sapien
tgccgttgtgccgctcactctgcat

SEQ ID NO: 1951929 - DNA, 25 bp, Homo sapien
ctttgccgttgtgccgctcactctg

SEQ ID NO: 1951930 - DNA, 25 bp, Homo sapien
ttgccgttgtgccgctcactctgca

SEQ ID NO: 1951931 - DNA, 25 bp, Homo sapien
ctctttgccgttgtgccgctcactc

SEQ ID NO: 1951932 - DNA, 25 bp, Homo sapien
cttttctctgggttcgccgtcgttg

SEQ ID NO: 1951933 - DNA, 25 bp, Homo sapien
tgaattcgctgtcgccttttctctg

SEQ ID NO: 1951934 - DNA, 25 bp, Homo sapien
tgttctctgggttcaccattgtcga

SEQ ID NO: 1951935 - DNA, 25 bp, Homo sapien
cattgtcgattctctgggtcccttt

SEQ ID NO: 1951936 - DNA, 25 bp, Homo sapien
tttctgaattcgctgtcgccttttc

SEQ ID NO: 1951937 - DNA, 25 bp, Homo sapien
gcatcgtctggctgcactatcatct

SEQ ID NO: 1951938 - DNA, 25 bp, Homo sapien
cgtctggctgcactatcatcttttc

SEQ ID NO: 1951939 - DNA, 25 bp, Homo sapien
cgtcttctctctcacgatagtgcat

SEQ ID NO: 1951940 - DNA, 25 bp, Homo sapien
cacgatagtgcatcgtctggctgca

SEQ ID NO: 1951941 - DNA, 25 bp, Homo sapien
tcgtcttttctttggattccctgtc

SEQ ID NO: 1951942 - DNA, 25 bp, Homo sapien
tgtactttctcttgattcactgtca

SEQ ID NO: 1951943 - DNA, 25 bp, Homo sapien
tctgggttcactgtgtactttctct

SEQ ID NO: 1951944 - DNA, 25 bp, Homo sapien
gtcatttcttctgagttcactgtca

SEQ ID NO: 1951945 - DNA, 25 bp, Homo sapien
tcgtatttgttctggattgactgtc

SEQ ID NO: 1951946 - DNA, 25 bp, Homo sapien
gttctggattgactgtcgtcttttc

SEQ ID NO: 1951947 - DNA, 25 bp, Homo sapien
tatttgttctggattgactgtcgtc

SEQ ID NO: 1951948 - DNA, 25 bp, Homo sapien
actttcgtatttgttctggattgac

SEQ ID NO: 1951949 - DNA, 25 bp, Homo sapien
tggtgcaccgtcatattttctctga

SEQ ID NO: 1951950 - DNA, 25 bp, Homo sapien
tctctgagtaactgtcctcttttct

SEQ ID NO: 1951951 - DNA, 25 bp, Homo sapien
atcttttctctgcgttcgctgttgt

SEQ ID NO: 1951952 - DNA, 25 bp, Homo sapien
tttcctcttggtgcactgttgtatt

SEQ ID NO: 1951953 - DNA, 25 bp, Homo sapien
catcttttctctgcgttcgctgttg

SEQ ID NO: 1951954 - DNA, 25 bp, Homo sapien
tcatcttttctctgcgttcgctgtt

SEQ ID NO: 1951955 - DNA, 25 bp, Homo sapien
cactgtcacctttatctaggttcac

SEQ ID NO: 1951956 - DNA, 25 bp, Homo sapien
actgtcacctttatctaggttcacg

SEQ ID NO: 1951957 - DNA, 25 bp, Homo sapien
gtcacctttatctaggttcacgttc

SEQ ID NO: 1951958 - DNA, 25 bp, Homo sapien
tgtcacctttatctaggttcacgtt

SEQ ID NO: 1951959 - DNA, 25 bp, Homo sapien
gaaagcgaacttgtgcaggaacagg

SEQ ID NO: 1951960 - DNA, 25 bp, Homo sapien
gctctccctcatggtcgtttttggt

SEQ ID NO: 1951961 - DNA, 25 bp, Homo sapien
tgagtagctcttggaaagcgaactt

SEQ ID NO: 1951962 - DNA, 25 bp, Homo sapien
tggctgagccttcatcccaaacgct

SEQ ID NO: 1951963 - DNA, 25 bp, Homo sapien
tttgggaaatgtccattggctgcct

SEQ ID NO: 1951964 - DNA, 25 bp, Homo sapien
gatttgggaaatgtccattggctgc

SEQ ID NO: 1951965 - DNA, 25 bp, Homo sapien
gaaatgtccattggctgccttgtca

SEQ ID NO: 1951966 - DNA, 25 bp, Homo sapien
tgggaaatgtccattggctgccttg

SEQ ID NO: 1951967 - DNA, 25 bp, Homo sapien
ggccctgaaggcatccagcggcctt

SEQ ID NO: 1951968 - DNA, 25 bp, Homo sapien
cagcggccttcccatgaggcgctgg

SEQ ID NO: 1951969 - DNA, 25 bp, Homo sapien
gccttcccatgaggcgctggttctg

SEQ ID NO: 1951970 - DNA, 25 bp, Homo sapien
ctaggccctgaaggcatccagcggc

SEQ ID NO: 1951971 - DNA, 25 bp, Homo sapien
tgagagcaggtccttaacgaggttg

SEQ ID NO: 1951972 - DNA, 25 bp, Homo sapien
agagggttgggccctttgaactgca

SEQ ID NO: 1951973 - DNA, 25 bp, Homo sapien
agcccgtgggtggagttctgagagc

SEQ ID NO: 1951974 - DNA, 25 bp, Homo sapien
cctgtgtttcaggtgcagcccgtgg

SEQ ID NO: 1951975 - DNA, 25 bp, Homo sapien
actgcgggaatcctgatctctagat

SEQ ID NO: 1951976 - DNA, 25 bp, Homo sapien
acaatgtattccgtcactgcgggaa

SEQ ID NO: 1951977 - DNA, 25 bp, Homo sapien
gcaaaaacaatgtattccgtcactg

SEQ ID NO: 1951978 - DNA, 25 bp, Homo sapien
gaatcctgatctctagatcagggcc

SEQ ID NO: 1951979 - DNA, 25 bp, Homo sapien
aggagcgcaggtcccaccttctcat

SEQ ID NO: 1951980 - DNA, 25 bp, Homo sapien
gaggagcgcaggtcccaccttctca

SEQ ID NO: 1951981 - DNA, 25 bp, Homo sapien
cagctgcagctgaattgcgcggagg

SEQ ID NO: 1951982 - DNA, 25 bp, Homo sapien
aaatactgtttagactttgagagca

SEQ ID NO: 1951983 - DNA, 25 bp, Homo sapien
taaacttgctatgcatccgcttcct

SEQ ID NO: 1951984 - DNA, 25 bp, Homo sapien
gccagtctttgaatttgagctcctt

SEQ ID NO: 1951985 - DNA, 25 bp, Homo sapien
tagaaactattcgttgacctacaaa

SEQ ID NO: 1951986 - DNA, 25 bp, Homo sapien
cctcaggaaatgtagaatcatggtg

SEQ ID NO: 1951987 - DNA, 25 bp, Homo sapien
caggaaatgtagaatcatggtggaa

SEQ ID NO: 1951988 - DNA, 25 bp, Homo sapien
ggaggcctcaggaaatgtagaatca

SEQ ID NO: 1951989 - DNA, 25 bp, Homo sapien
tggaaggtgaaggggaaacaagcac

SEQ ID NO: 1951990 - DNA, 25 bp, Homo sapien
ctgcaaactcaaaccagacaaccta

SEQ ID NO: 1951991 - DNA, 25 bp, Homo sapien
tcaaaccagacaacctaaacttcag

SEQ ID NO: 1951992 - DNA, 25 bp, Homo sapien
ctcaaaccagacaacctaaacttca

SEQ ID NO: 1951993 - DNA, 25 bp, Homo sapien
tgcaaactcaaaccagacaacctaa

SEQ ID NO: 1951994 - DNA, 25 bp, Homo sapien
cctcacactcagctgaacatttcca

SEQ ID NO: 1951995 - DNA, 25 bp, Homo sapien
tcctagaggcgactgaaagtccatc

SEQ ID NO: 1951996 - DNA, 25 bp, Homo sapien
gaaagtccatctgcgactgccactg

SEQ ID NO: 1951997 - DNA, 25 bp, Homo sapien
ggagctcctagaggcgactgaaagt

SEQ ID NO: 1951998 - DNA, 25 bp, Homo sapien
cagtgtcaggtgggagtactgcagc

SEQ ID NO: 1951999 - DNA, 25 bp, Homo sapien
cccagtgtcaggtgggagtactgca

SEQ ID NO: 1952000 - DNA, 25 bp, Homo sapien
gtcccagtgtcaggtgggagtactg

SEQ ID NO: 1952001 - DNA, 25 bp, Homo sapien
catgggtcccagtgtcaggtgggag

SEQ ID NO: 1952002 - DNA, 25 bp, Homo sapien
taatccatcagcatcgtgaaagcac

SEQ ID NO: 1952003 - DNA, 25 bp, Homo sapien
cttcataatccatcagcatcgtgaa

SEQ ID NO: 1952004 - DNA, 25 bp, Homo sapien
tccatcagcatcgtgaaagcacaga

SEQ ID NO: 1952005 - DNA, 25 bp, Homo sapien
catcagcatcgtgaaagcacagagg

SEQ ID NO: 1952006 - DNA, 25 bp, Homo sapien
gaggtgaggtggagttcacccttct

SEQ ID NO: 1952007 - DNA, 25 bp, Homo sapien
ggtggagttcacccttctgtcgcac

SEQ ID NO: 1952008 - DNA, 25 bp, Homo sapien
aacttcctaggtgacgcacgtccgt

SEQ ID NO: 1952009 - DNA, 25 bp, Homo sapien
acgcacgtccgtgcaggctggactg

SEQ ID NO: 1952010 - DNA, 25 bp, Homo sapien
acacccacgttccaccttcctcaag

SEQ ID NO: 1952011 - DNA, 25 bp, Homo sapien
aggccagctcgtttcatcaccatga

SEQ ID NO: 1952012 - DNA, 25 bp, Homo sapien
ccccgggagtgcagacggcatttca

SEQ ID NO: 1952013 - DNA, 25 bp, Homo sapien
tgtgtcttcacacagcgggacagtg

SEQ ID NO: 1952014 - DNA, 25 bp, Homo sapien
ttaagtttgtaccatgtcaggcagg

SEQ ID NO: 1952015 - DNA, 25 bp, Homo sapien
agaaatgtgtctgcgatgaagtcaa

SEQ ID NO: 1952016 - DNA, 25 bp, Homo sapien
ggctgtcactcgaggaaaggtagtc

SEQ ID NO: 1952017 - DNA, 25 bp, Homo sapien
ggcctcctggctcatcatcctgccg

SEQ ID NO: 1952018 - DNA, 25 bp, Homo sapien
tggctcatcatcctgccggaagcat

SEQ ID NO: 1952019 - DNA, 25 bp, Homo sapien
gctcatcatcctgccggaagcatct

SEQ ID NO: 1952020 - DNA, 25 bp, Homo sapien
tcctggctcatcatcctgccggaag

SEQ ID NO: 1952021 - DNA, 25 bp, Homo sapien
gttcagaccctctggcaatccctag

SEQ ID NO: 1952022 - DNA, 25 bp, Homo sapien
tgatgtcggcaaccagggttccacc

SEQ ID NO: 1952023 - DNA, 25 bp, Homo sapien
gaaggtgtcactgagttcagaccct

SEQ ID NO: 1952024 - DNA, 25 bp, Homo sapien
ctaagcggaaggactgatgtcggca

SEQ ID NO: 1952025 - DNA, 25 bp, Homo sapien
cttgcgctccgcagaggcgcaggca

SEQ ID NO: 1952026 - DNA, 25 bp, Homo sapien
agaggaacaaggccgcttgcgctcc

SEQ ID NO: 1952027 - DNA, 25 bp, Homo sapien
tgggaaaggcaggacgctcgcccat

SEQ ID NO: 1952028 - DNA, 25 bp, Homo sapien
atgcttctggagctcgcgaagggtc

SEQ ID NO: 1952029 - DNA, 25 bp, Homo sapien
tggctccggggctgaaccccaggta

SEQ ID NO: 1952030 - DNA, 25 bp, Homo sapien
gagggcgtttctgcttccaagcgca

SEQ ID NO: 1952031 - DNA, 25 bp, Homo sapien
gggcttgagggcgtttctgcttcca

SEQ ID NO: 1952032 - DNA, 25 bp, Homo sapien
gcttccaagcgcaagcacggggagc

SEQ ID NO: 1952033 - DNA, 25 bp, Homo sapien
agccctccggtatctgcactcagct

SEQ ID NO: 1952034 - DNA, 25 bp, Homo sapien
actgcgcagcgcccagagcttcagg

SEQ ID NO: 1952035 - DNA, 25 bp, Homo sapien
gactgcgcagcgcccagagcttcag

SEQ ID NO: 1952036 - DNA, 25 bp, Homo sapien
ctggatgacagccctccggtatctg

SEQ ID NO: 1952037 - DNA, 25 bp, Homo sapien
ctgaaagcgtgagaccttggagagg

SEQ ID NO: 1952038 - DNA, 25 bp, Homo sapien
aaagcgtgagaccttggagaggccc

SEQ ID NO: 1952039 - DNA, 25 bp, Homo sapien
gaaagcgtgagaccttggagaggcc

SEQ ID NO: 1952040 - DNA, 25 bp, Homo sapien
tgaaagcgtgagaccttggagaggc

SEQ ID NO: 1952041 - DNA, 25 bp, Homo sapien
ttggcctttgccatttaaataagga

SEQ ID NO: 1952042 - DNA, 25 bp, Homo sapien
ggagaaatcctagtaatgaataaaa

SEQ ID NO: 1952043 - DNA, 25 bp, Homo sapien
ttaattaaagagatgagagccaggc

SEQ ID NO: 1952044 - DNA, 25 bp, Homo sapien
aggtataattgacaataagttggcc

SEQ ID NO: 1952045 - DNA, 25 bp, Homo sapien
ttctgtagacttggtgcggcttgca

SEQ ID NO: 1952046 - DNA, 25 bp, Homo sapien
tagtgaggacatcaaagctatgcac

SEQ ID NO: 1952047 - DNA, 25 bp, Homo sapien
gataaggcagctacagatactctca

SEQ ID NO: 1952048 - DNA, 25 bp, Homo sapien
cctggcccaggataaagcaactgct

SEQ ID NO: 1952049 - DNA, 25 bp, Homo sapien
agcagggagcttcattgttcctaca

SEQ ID NO: 1952050 - DNA, 25 bp, Homo sapien
gggccagactttttcgcagatgttt

SEQ ID NO: 1952051 - DNA, 25 bp, Homo sapien
ccagcagggagcttcattgttccta

SEQ ID NO: 1952052 - DNA, 25 bp, Homo sapien
gccagaggagtctgtaagggccaga

SEQ ID NO: 1952053 - DNA, 25 bp, Homo sapien
taacctctgttaggagagcgcgctg

SEQ ID NO: 1952054 - DNA, 25 bp, Homo sapien
cagctgaaaggatgtctgtcgggaa

SEQ ID NO: 1952055 - DNA, 25 bp, Homo sapien
tcgggaatgagagtttgggccatgc

SEQ ID NO: 1952056 - DNA, 25 bp, Homo sapien
aaccgtaacctctgttaggagagcg

SEQ ID NO: 1952057 - DNA, 25 bp, Homo sapien
tggcaaggaggggccgagccttcat

SEQ ID NO: 1952058 - DNA, 25 bp, Homo sapien
tcataagtcttgtgggctgagtcct

SEQ ID NO: 1952059 - DNA, 25 bp, Homo sapien
agccattgccattgactccttcaag

SEQ ID NO: 1952060 - DNA, 25 bp, Homo sapien
tgagtcctgggctttattatttgac

SEQ ID NO: 1952061 - DNA, 25 bp, Homo sapien
tgactatttagtgagccttttccag

SEQ ID NO: 1952062 - DNA, 25 bp, Homo sapien
cagagccatgcatacagtaggagaa

SEQ ID NO: 1952063 - DNA, 25 bp, Homo sapien
ccagctggattgcacactccttggg

SEQ ID NO: 1952064 - DNA, 25 bp, Homo sapien
tactgaaatgtcatgcgtgcttgtc

SEQ ID NO: 1952065 - DNA, 25 bp, Homo sapien
tttcccttggtaatccgcacagagc

SEQ ID NO: 1952066 - DNA, 25 bp, Homo sapien
cataaacaagccatggtgatgacct

SEQ ID NO: 1952067 - DNA, 25 bp, Homo sapien
gcctgaaatattctgacgtgtccca

SEQ ID NO: 1952068 - DNA, 25 bp, Homo sapien
ataacagacgcgtcctgacctggca

SEQ ID NO: 1952069 - DNA, 25 bp, Homo sapien
ggacgtgaagaagcttggcctgaaa

SEQ ID NO: 1952070 - DNA, 25 bp, Homo sapien
ttttaagggatctgaaaataataca

SEQ ID NO: 1952071 - DNA, 25 bp, Homo sapien
gaaaataatacaggaactgcagctt

SEQ ID NO: 1952072 - DNA, 25 bp, Homo sapien
agagtgagctccctcaggaatttcc

SEQ ID NO: 1952073 - DNA, 25 bp, Homo sapien
tggtctctagatgttttggtgggaa

SEQ ID NO: 1952074 - DNA, 25 bp, Homo sapien
aaggatgagaatcaggcatggtctc

SEQ ID NO: 1952075 - DNA, 25 bp, Homo sapien
tcttggctcacaagaagagtgagct

SEQ ID NO: 1952076 - DNA, 25 bp, Homo sapien
tggaaggctgcgctgtcaagagacc

SEQ ID NO: 1952077 - DNA, 25 bp, Homo sapien
tgtgaagccccagcgctaagagtaa

SEQ ID NO: 1952078 - DNA, 25 bp, Homo sapien
tcaagagaccggagttgcgagcgtc

SEQ ID NO: 1952079 - DNA, 25 bp, Homo sapien
caagtttctgggagatcgctatcga

SEQ ID NO: 1952080 - DNA, 25 bp, Homo sapien
cgctagcttcggaagagtggcctca

SEQ ID NO: 1952081 - DNA, 25 bp, Homo sapien
tgcacggatgagagaagccgctgcc

SEQ ID NO: 1952082 - DNA, 25 bp, Homo sapien
tcattactgaacgaaagtggtccct

SEQ ID NO: 1952083 - DNA, 25 bp, Homo sapien
ttcggaaatcgagtgcgtactggct

SEQ ID NO: 1952084 - DNA, 25 bp, Homo sapien
atcagtaggctactggtagtggttt

SEQ ID NO: 1952085 - DNA, 25 bp, Homo sapien
gaccaggtagtatgtatgctgtttg

SEQ ID NO: 1952086 - DNA, 25 bp, Homo sapien
actcatagcattctattgtctcagc

SEQ ID NO: 1952087 - DNA, 25 bp, Homo sapien
actctttaacgttgcctatcagtag

SEQ ID NO: 1952088 - DNA, 25 bp, Homo sapien
ttttcctatgacagacaatggcaaa

SEQ ID NO: 1952089 - DNA, 25 bp, Homo sapien
caatggcaaactgtattcctctaga

SEQ ID NO: 1952090 - DNA, 25 bp, Homo sapien
gattccacttacaattagtgacttg

SEQ ID NO: 1952091 - DNA, 25 bp, Homo sapien
acatgatataacatatggtttgtga

SEQ ID NO: 1952092 - DNA, 25 bp, Homo sapien
agaagcgtgtgatccttagagcacc

SEQ ID NO: 1952093 - DNA, 25 bp, Homo sapien
cccatgagagggaagtctaatgaag

SEQ ID NO: 1952094 - DNA, 25 bp, Homo sapien
cattgtcctaataggcccatgagag

SEQ ID NO: 1952095 - DNA, 25 bp, Homo sapien
ttagagcaccgtaaggcagtcactg

SEQ ID NO: 1952096 - DNA, 25 bp, Homo sapien
gccccagcagtgaatgaaattggta

SEQ ID NO: 1952097 - DNA, 25 bp, Homo sapien
gaaattggtacggtctctgcctagt

SEQ ID NO: 1952098 - DNA, 25 bp, Homo sapien
tactaaaaagggagagcagttagcc

SEQ ID NO: 1952099 - DNA, 25 bp, Homo sapien
taagtgctggctgtgtatcaggcag

SEQ ID NO: 1952100 - DNA, 25 bp, Homo sapien
gccagccagtcggtctaatttgaaa

SEQ ID NO: 1952101 - DNA, 25 bp, Homo sapien
gggaggccagccagtcggtctaatt

SEQ ID NO: 1952102 - DNA, 25 bp, Homo sapien
gaggccagccagtcggtctaatttg

SEQ ID NO: 1952103 - DNA, 25 bp, Homo sapien
gccagtcggtctaatttgaaaggtg

SEQ ID NO: 1952104 - DNA, 25 bp, Homo sapien
tccatatattgagctttgatggctg

SEQ ID NO: 1952105 - DNA, 25 bp, Homo sapien
tagtggcatcttcactttgcattcc

SEQ ID NO: 1952106 - DNA, 25 bp, Homo sapien
tcttcctgttgacctcacactcatt

SEQ ID NO: 1952107 - DNA, 25 bp, Homo sapien
tcagctattactgcatgagatgcgg

SEQ ID NO: 1952108 - DNA, 25 bp, Homo sapien
aggtgaagcagccatgtccagagtg

SEQ ID NO: 1952109 - DNA, 25 bp, Homo sapien
cagccatgtccagagtgtgagtagg

SEQ ID NO: 1952110 - DNA, 25 bp, Homo sapien
tgaagcagccatgtccagagtgtga

SEQ ID NO: 1952111 - DNA, 25 bp, Homo sapien
gaggagaaggtgaagcagccatgtc

SEQ ID NO: 1952112 - DNA, 25 bp, Homo sapien
gatggttccttgcaaagggcacgta

SEQ ID NO: 1952113 - DNA, 25 bp, Homo sapien
cagtcgcgggactgcatatccaaga

SEQ ID NO: 1952114 - DNA, 25 bp, Homo sapien
tagcattggtaaagaacgatcgtcc

SEQ ID NO: 1952115 - DNA, 25 bp, Homo sapien
taccggaaatcagacagcccataga

SEQ ID NO: 1952116 - DNA, 25 bp, Homo sapien
tgcagttgtcaaggacaccaccttc

SEQ ID NO: 1952117 - DNA, 25 bp, Homo sapien
tagttctctgccgagtccttctgaa

SEQ ID NO: 1952118 - DNA, 25 bp, Homo sapien
ggccatggatttaccttcattcgaa

SEQ ID NO: 1952119 - DNA, 25 bp, Homo sapien
gaaccatctctcttgagtattaagc

SEQ ID NO: 1952120 - DNA, 25 bp, Homo sapien
gacgcttttgaagaggatctacata

SEQ ID NO: 1952121 - DNA, 25 bp, Homo sapien
gaagcagtactaccagttcatgctg

SEQ ID NO: 1952122 - DNA, 25 bp, Homo sapien
gagaagcccgactgcaacattgacg

SEQ ID NO: 1952123 - DNA, 25 bp, Homo sapien
gaggacttggagaagcccgactgca

SEQ ID NO: 1952124 - DNA, 25 bp, Homo sapien
tgaaggccgattagaagtccatagg

SEQ ID NO: 1952125 - DNA, 25 bp, Homo sapien
cgcatgatgctaagccacggcaggg

SEQ ID NO: 1952126 - DNA, 25 bp, Homo sapien
gatccaaggtggaaccccatcaaaa

SEQ ID NO: 1952127 - DNA, 25 bp, Homo sapien
tccataggtgacagtctgaagaggg

SEQ ID NO: 1952128 - DNA, 25 bp, Homo sapien
aaaaatctgttagaagaagaatgga

SEQ ID NO: 1952129 - DNA, 25 bp, Homo sapien
tattttgattacatgagaagctgga

SEQ ID NO: 1952130 - DNA, 25 bp, Homo sapien
gaagctggatccaaatgctacagca

SEQ ID NO: 1952131 - DNA, 25 bp, Homo sapien
gcaattacctcaagcatcgcatagt

SEQ ID NO: 1952132 - DNA, 25 bp, Homo sapien
tgctgctgaaatctacaggaagttt

SEQ ID NO: 1952133 - DNA, 25 bp, Homo sapien
gactagtgcggatgacagcagtgct

SEQ ID NO: 1952134 - DNA, 25 bp, Homo sapien
gacagcagtgcttccgacgaaatca

SEQ ID NO: 1952135 - DNA, 25 bp, Homo sapien
gctgaattttggactagtgcggatg

SEQ ID NO: 1952136 - DNA, 25 bp, Homo sapien
gagatcagtcgagccctgaaggagc

SEQ ID NO: 1952137 - DNA, 25 bp, Homo sapien
tctgttatagagatcagtcgagccc

SEQ ID NO: 1952138 - DNA, 25 bp, Homo sapien
tatagagatcagtcgagccctgaag

SEQ ID NO: 1952139 - DNA, 25 bp, Homo sapien
gaggtctgttatagagatcagtcga

SEQ ID NO: 1952140 - DNA, 25 bp, Homo sapien
cagccccagttagagacctcctgga

SEQ ID NO: 1952141 - DNA, 25 bp, Homo sapien
cccagttagagacctcctggatgtt

SEQ ID NO: 1952142 - DNA, 25 bp, Homo sapien
acctcctggatgttctgaaatcaaa

SEQ ID NO: 1952143 - DNA, 25 bp, Homo sapien
ctcctggatgttctgaaatcaaaac

SEQ ID NO: 1952144 - DNA, 25 bp, Homo sapien
tcgagcccgtgattcagaggacagc

SEQ ID NO: 1952145 - DNA, 25 bp, Homo sapien
tgacgtactcatcgatgcctatctg

SEQ ID NO: 1952146 - DNA, 25 bp, Homo sapien
tgtcaaagtcgtgcctcaggtggag

SEQ ID NO: 1952147 - DNA, 25 bp, Homo sapien
gaccaagcacggtgatcgagcccgt

SEQ ID NO: 1952148 - DNA, 25 bp, Homo sapien
aggagcagacatccagtcagccggt

SEQ ID NO: 1952149 - DNA, 25 bp, Homo sapien
taatcttttactagttgtcatgcag

SEQ ID NO: 1952150 - DNA, 25 bp, Homo sapien
tccattgagggacttatgactctgt

SEQ ID NO: 1952151 - DNA, 25 bp, Homo sapien
tgcagtctgcgcatctcacaattca

SEQ ID NO: 1952152 - DNA, 25 bp, Homo sapien
tactaccgagaagcaatgattcagg

SEQ ID NO: 1952153 - DNA, 25 bp, Homo sapien
agcaatgccattgaccgcgtggacc

SEQ ID NO: 1952154 - DNA, 25 bp, Homo sapien
attggagctatgcaacaggataagc

SEQ ID NO: 1952155 - DNA, 25 bp, Homo sapien
gtcaccttgcaacagtactaccgag

SEQ ID NO: 1952156 - DNA, 25 bp, Homo sapien
agagtggtagaggtacaagacccag

SEQ ID NO: 1952157 - DNA, 25 bp, Homo sapien
aatatataagctttgcccggaagtg

SEQ ID NO: 1952158 - DNA, 25 bp, Homo sapien
agaagttgttcgtttgatgtctggg

SEQ ID NO: 1952159 - DNA, 25 bp, Homo sapien
gaattatgtcctgactaaatgtgag

SEQ ID NO: 1952160 - DNA, 25 bp, Homo sapien
gtgggcgactcaaggatttgatttt

SEQ ID NO: 1952161 - DNA, 25 bp, Homo sapien
attggccatgtcataggaaaaccac

SEQ ID NO: 1952162 - DNA, 25 bp, Homo sapien
ttacaagccttgatgaatgaatgca

SEQ ID NO: 1952163 - DNA, 25 bp, Homo sapien
gtcataggaaaaccacacagtcctg

SEQ ID NO: 1952164 - DNA, 25 bp, Homo sapien
taggaaaaccacacagtcctgttac

SEQ ID NO: 1952165 - DNA, 25 bp, Homo sapien
gaacagcccccgtcctatgaaggta

SEQ ID NO: 1952166 - DNA, 25 bp, Homo sapien
ccccgtcctatgaaggtacctcgat

SEQ ID NO: 1952167 - DNA, 25 bp, Homo sapien
gtacctcgatgccatagtgaccctc

SEQ ID NO: 1952168 - DNA, 25 bp, Homo sapien
tgaaggtacctcgatgccatagtga

SEQ ID NO: 1952169 - DNA, 25 bp, Homo sapien
tgatcgattggcttccatagctgct

SEQ ID NO: 1952170 - DNA, 25 bp, Homo sapien
gctgaattgcagtttaggtccctga

SEQ ID NO: 1952171 - DNA, 25 bp, Homo sapien
tccagcgttcctgaaaatgatcgat

SEQ ID NO: 1952172 - DNA, 25 bp, Homo sapien
tcaagccccacggaggagcgagatg

SEQ ID NO: 1952173 - DNA, 25 bp, Homo sapien
gaacttcggacactaatcagccaga

SEQ ID NO: 1952174 - DNA, 25 bp, Homo sapien
aaccagcatatccaagaggagattc

SEQ ID NO: 1952175 - DNA, 25 bp, Homo sapien
agttgggaacttcggacactaatca

SEQ ID NO: 1952176 - DNA, 25 bp, Homo sapien
caagtgggtccacaagaagaagttg

SEQ ID NO: 1952177 - DNA, 25 bp, Homo sapien
tcattggtcaagtttgtgatacgcc

SEQ ID NO: 1952178 - DNA, 25 bp, Homo sapien
gaagtcagtccgattgtttgaagaa

SEQ ID NO: 1952179 - DNA, 25 bp, Homo sapien
gatacgcctaagtcctatgataatg

SEQ ID NO: 1952180 - DNA, 25 bp, Homo sapien
taaactaggacccatagaagctatc

SEQ ID NO: 1952181 - DNA, 25 bp, Homo sapien
tgtacacctgcatcagcgtcgacac

SEQ ID NO: 1952182 - DNA, 25 bp, Homo sapien
agaaggccagtatgggaaggtgtac

SEQ ID NO: 1952183 - DNA, 25 bp, Homo sapien
aggtgtacacctgcatcagcgtcga

SEQ ID NO: 1952184 - DNA, 25 bp, Homo sapien
tcagcgtcgacaccggggagctgat

SEQ ID NO: 1952185 - DNA, 25 bp, Homo sapien
caccccaatctggttcggtattttg

SEQ ID NO: 1952186 - DNA, 25 bp, Homo sapien
cggtattttggtgtggagctccata

SEQ ID NO: 1952187 - DNA, 25 bp, Homo sapien
gactatcaaggaaactgcagacgaa

SEQ ID NO: 1952188 - DNA, 25 bp, Homo sapien
gaaaatattcgaaggcatcaaacac

SEQ ID NO: 1952189 - DNA, 25 bp, Homo sapien
cattgcgatcaacgtcctccatgag

SEQ ID NO: 1952190 - DNA, 25 bp, Homo sapien
aagaggtgtcaaggctgggacttca

SEQ ID NO: 1952191 - DNA, 25 bp, Homo sapien
tattcaaagcagatcaccattgcga

SEQ ID NO: 1952192 - DNA, 25 bp, Homo sapien
tgagcatggcatagtccaccgtgac

SEQ ID NO: 1952193 - DNA, 25 bp, Homo sapien
tggatgttcagtaaagctcaaaaac

SEQ ID NO: 1952194 - DNA, 25 bp, Homo sapien
tatcttccttacctcatctggatta

SEQ ID NO: 1952195 - DNA, 25 bp, Homo sapien
aatgcccagaccatgcctggtgaag

SEQ ID NO: 1952196 - DNA, 25 bp, Homo sapien
ctcatctggattaatcaaactggga

SEQ ID NO: 1952197 - DNA, 25 bp, Homo sapien
ggaggagcacaatcacgtgtgctaa

SEQ ID NO: 1952198 - DNA, 25 bp, Homo sapien
taacacttatgagccaacgcagtat

SEQ ID NO: 1952199 - DNA, 25 bp, Homo sapien
cgcagtatgatacagaagtctgtca

SEQ ID NO: 1952200 - DNA, 25 bp, Homo sapien
taaagatggtcactgggttcggcgt

SEQ ID NO: 1952201 - DNA, 25 bp, Homo sapien
gaagtctttcagtctgttaacacag

SEQ ID NO: 1952202 - DNA, 25 bp, Homo sapien
catttatgtaggtatttcttcagca

SEQ ID NO: 1952203 - DNA, 25 bp, Homo sapien
ggattggattgcaaagaatctgtag

SEQ ID NO: 1952204 - DNA, 25 bp, Homo sapien
gatttttgtcgtatacctcttggac

SEQ ID NO: 1952205 - DNA, 25 bp, Homo sapien
cccacccccagcgttttctctcatc

SEQ ID NO: 1952206 - DNA, 25 bp, Homo sapien
ccccacccccagcgttttctctcat

SEQ ID NO: 1952207 - DNA, 25 bp, Homo sapien
gccccacccccagcgttttctctca

SEQ ID NO: 1952208 - DNA, 25 bp, Homo sapien
attacatccagtccagtaagctgtg

SEQ ID NO: 1952209 - DNA, 25 bp, Homo sapien
tacatccagtccagtaagctgtgct

SEQ ID NO: 1952210 - DNA, 25 bp, Homo sapien
ttacatccagtccagtaagctgtgc

SEQ ID NO: 1952211 - DNA, 25 bp, Homo sapien
acatccagtccagtaagctgtgctg

SEQ ID NO: 1952212 - DNA, 25 bp, Homo sapien
cctcagatgcgagtaaggaagctcc

SEQ ID NO: 1952213 - DNA, 25 bp, Homo sapien
gaacatctgttgactgtgggcggcc

SEQ ID NO: 1952214 - DNA, 25 bp, Homo sapien
tcagcctaagaagtccatcgagtcc

SEQ ID NO: 1952215 - DNA, 25 bp, Homo sapien
cattgctacccggaagctggctctg

SEQ ID NO: 1952216 - DNA, 25 bp, Homo sapien
tagaaacgccttctcggctgaatgg

SEQ ID NO: 1952217 - DNA, 25 bp, Homo sapien
caaggcgtgactaggaccagaagaa

SEQ ID NO: 1952218 - DNA, 25 bp, Homo sapien
tgtcagcatagctcggccgcttctg

SEQ ID NO: 1952219 - DNA, 25 bp, Homo sapien
gaaagcatggtggagtccgaaagca

SEQ ID NO: 1952220 - DNA, 25 bp, Homo sapien
ggatctgaaacaccaaagccacggg

SEQ ID NO: 1952221 - DNA, 25 bp, Homo sapien
cagttaaggcatcgtgagacacagg

SEQ ID NO: 1952222 - DNA, 25 bp, Homo sapien
ttctataagctgcaggagtcgccta

SEQ ID NO: 1952223 - DNA, 25 bp, Homo sapien
gaatggcgtaactcagcatcacgga

SEQ ID NO: 1952224 - DNA, 25 bp, Homo sapien
accaaagcccactaaagcacatggg

SEQ ID NO: 1952225 - DNA, 25 bp, Homo sapien
cagaaaactcagcaccaaaggatga

SEQ ID NO: 1952226 - DNA, 25 bp, Homo sapien
tgcagcctaaaataccctttctatg

SEQ ID NO: 1952227 - DNA, 25 bp, Homo sapien
cctggctggagaggtcgtgacttcc

SEQ ID NO: 1952228 - DNA, 25 bp, Homo sapien
ttgtcaccgtgtcccactaaggagg

SEQ ID NO: 1952229 - DNA, 25 bp, Homo sapien
ggttcccttcggatggtgacacctc

SEQ ID NO: 1952230 - DNA, 25 bp, Homo sapien
gaggatatgcagaggccaccagttc

SEQ ID NO: 1952231 - DNA, 25 bp, Homo sapien
actaaggaggatatgcagaggccac

SEQ ID NO: 1952232 - DNA, 25 bp, Homo sapien
ggcagagcccttgtcaatttccgtc

SEQ ID NO: 1952233 - DNA, 25 bp, Homo sapien
tgtcaatttccgtcacaccaatcat

SEQ ID NO: 1952234 - DNA, 25 bp, Homo sapien
aatcatccatcgaactcccacggag

SEQ ID NO: 1952235 - DNA, 25 bp, Homo sapien
atcatccatcgaactcccacggagg

SEQ ID NO: 1952236 - DNA, 25 bp, Homo sapien
ttcagggaagaatgcagtcaggcgc

SEQ ID NO: 1952237 - DNA, 25 bp, Homo sapien
aatttcaactacaccctctggagcg

SEQ ID NO: 1952238 - DNA, 25 bp, Homo sapien
taacgattatctgggaagtgggctc

SEQ ID NO: 1952239 - DNA, 25 bp, Homo sapien
gatttgcctacaccagagaatgggc

SEQ ID NO: 1952240 - DNA, 25 bp, Homo sapien
ggaagacccgctcctgatcatgctg

SEQ ID NO: 1952241 - DNA, 25 bp, Homo sapien
acgaggatgaagctggccagcgtca

SEQ ID NO: 1952242 - DNA, 25 bp, Homo sapien
ctggaagaaagggtagagcaccagc

SEQ ID NO: 1952243 - DNA, 25 bp, Homo sapien
cacaaagaagacgaggatgaagctg

SEQ ID NO: 1952244 - DNA, 25 bp, Homo sapien
gcccaaaacagccagttcacgaggg

SEQ ID NO: 1952245 - DNA, 25 bp, Homo sapien
cagttcacgagggtccagggccgcc

SEQ ID NO: 1952246 - DNA, 25 bp, Homo sapien
agccagttcacgagggtccagggcc

SEQ ID NO: 1952247 - DNA, 25 bp, Homo sapien
aaacagccagttcacgagggtccag

SEQ ID NO: 1952248 - DNA, 25 bp, Homo sapien
tattgtaaaagctgcacgtggccga

SEQ ID NO: 1952249 - DNA, 25 bp, Homo sapien
cattaacaagcctggtccgaagcgt

SEQ ID NO: 1952250 - DNA, 25 bp, Homo sapien
taaatgcactgcgaaagaacgcggt

SEQ ID NO: 1952251 - DNA, 25 bp, Homo sapien
gaatcgcagagatacacaggtgcca

SEQ ID NO: 1952252 - DNA, 25 bp, Homo sapien
gactgcaaggttgatcattaaaatg

SEQ ID NO: 1952253 - DNA, 25 bp, Homo sapien
agctttagatctaggctcctagcaa

SEQ ID NO: 1952254 - DNA, 25 bp, Homo sapien
gcaaaataggctgatacagaaagga

SEQ ID NO: 1952255 - DNA, 25 bp, Homo sapien
ttgacaaactgggtcgggcacccag

SEQ ID NO: 1952256 - DNA, 25 bp, Homo sapien
gatcttctcggaagggcaaagggcc

SEQ ID NO: 1952257 - DNA, 25 bp, Homo sapien
gagaaaccatgcaccacttccactt

SEQ ID NO: 1952258 - DNA, 25 bp, Homo sapien
tactgcttagagaactcggtgtcgc

SEQ ID NO: 1952259 - DNA, 25 bp, Homo sapien
caccactctgcttggagaaaccatg

SEQ ID NO: 1952260 - DNA, 25 bp, Homo sapien
gattgacaaccaaattgttgatcca

SEQ ID NO: 1952261 - DNA, 25 bp, Homo sapien
caagaccaaggtggatccttgtagg

SEQ ID NO: 1952262 - DNA, 25 bp, Homo sapien
tattctggagatgctttgagatcag

SEQ ID NO: 1952263 - DNA, 25 bp, Homo sapien
caagaccatgtccattgctgcggag

SEQ ID NO: 1952264 - DNA, 25 bp, Homo sapien
aaaggcctgctaccacacaacacag

SEQ ID NO: 1952265 - DNA, 25 bp, Homo sapien
tcgcccaccggagaaaggcctgcta

SEQ ID NO: 1952266 - DNA, 25 bp, Homo sapien
actggctctgtgagatctcgcccac

SEQ ID NO: 1952267 - DNA, 25 bp, Homo sapien
tgagatctcgcccaccggagaaagg

SEQ ID NO: 1952268 - DNA, 25 bp, Homo sapien
ctgcaacgtgaagggacccctggca

SEQ ID NO: 1952269 - DNA, 25 bp, Homo sapien
gctgcaacgtgaagggacccctggc

SEQ ID NO: 1952270 - DNA, 25 bp, Homo sapien
gcaacgtgaagggacccctggcacc

SEQ ID NO: 1952271 - DNA, 25 bp, Homo sapien
acgtgaagggacccctggcacccag

SEQ ID NO: 1952272 - DNA, 25 bp, Homo sapien
gagcactcgtcatcgtcttcaggga

SEQ ID NO: 1952273 - DNA, 25 bp, Homo sapien
ggccgagcactcgtcatcgtcttca

SEQ ID NO: 1952274 - DNA, 25 bp, Homo sapien
agccaggccgagcactcgtcatcgt

SEQ ID NO: 1952275 - DNA, 25 bp, Homo sapien
tgcagccaggccgagcactcgtcat

SEQ ID NO: 1952276 - DNA, 25 bp, Homo sapien
aagggcttgccactcgatcatttgc

SEQ ID NO: 1952277 - DNA, 25 bp, Homo sapien
gatcatttgcaaagagcccatactg

SEQ ID NO: 1952278 - DNA, 25 bp, Homo sapien
tcctatttgttctcaggttgatggc

SEQ ID NO: 1952279 - DNA, 25 bp, Homo sapien
gcccatactgaacacagggagaagt

SEQ ID NO: 1952280 - DNA, 25 bp, Homo sapien
taagctcctccggaaatattctttc

SEQ ID NO: 1952281 - DNA, 25 bp, Homo sapien
gctcctccggaaatattctttcacc

SEQ ID NO: 1952282 - DNA, 25 bp, Homo sapien
cataagctcctccggaaatattctt

SEQ ID NO: 1952283 - DNA, 25 bp, Homo sapien
aagctcctccggaaatattctttca

SEQ ID NO: 1952284 - DNA, 25 bp, Homo sapien
aggtctaaaggtctccttcgggcag

SEQ ID NO: 1952285 - DNA, 25 bp, Homo sapien
cctgcaccatcagacaagaagtcag

SEQ ID NO: 1952286 - DNA, 25 bp, Homo sapien
ctaaaggtctccttcgggcaggtgg

SEQ ID NO: 1952287 - DNA, 25 bp, Homo sapien
ggcagactgttgcctgcaccatcag

SEQ ID NO: 1952288 - DNA, 25 bp, Homo sapien
tgattttggtgacattctggaggtg

SEQ ID NO: 1952289 - DNA, 25 bp, Homo sapien
gacattctggaggtgttcagcccat

SEQ ID NO: 1952290 - DNA, 25 bp, Homo sapien
gtgacattctggaggtgttcagccc

SEQ ID NO: 1952291 - DNA, 25 bp, Homo sapien
tttggtgacattctggaggtgttca

SEQ ID NO: 1952292 - DNA, 25 bp, Homo sapien
gaactagtttgactaatatgttctg

SEQ ID NO: 1952293 - DNA, 25 bp, Homo sapien
tagtttgactaatatgttctggaag

SEQ ID NO: 1952294 - DNA, 25 bp, Homo sapien
gagaactagtttgactaatatgttc

SEQ ID NO: 1952295 - DNA, 25 bp, Homo sapien
actagtttgactaatatgttctgga

SEQ ID NO: 1952296 - DNA, 25 bp, Homo sapien
ctgcatggtatttctttccgtttag

SEQ ID NO: 1952297 - DNA, 25 bp, Homo sapien
gcatggtatttctttccgtttagga

SEQ ID NO: 1952298 - DNA, 25 bp, Homo sapien
tctgcatggtatttctttccgttta

SEQ ID NO: 1952299 - DNA, 25 bp, Homo sapien
tgcatggtatttctttccgtttagg

SEQ ID NO: 1952300 - DNA, 25 bp, Homo sapien
tgagtgtacagtcatatacagctga

SEQ ID NO: 1952301 - DNA, 25 bp, Homo sapien
attgagtgtacagtcatatacagct

SEQ ID NO: 1952302 - DNA, 25 bp, Homo sapien
ttgagtgtacagtcatatacagctg

SEQ ID NO: 1952303 - DNA, 25 bp, Homo sapien
tttgtaactttctaatgtgcccagc

SEQ ID NO: 1952304 - DNA, 25 bp, Homo sapien
tataggaaggaacgagtgaaggaac

SEQ ID NO: 1952305 - DNA, 25 bp, Homo sapien
ccaaaggaaagtaaggatgtgtctc

SEQ ID NO: 1952306 - DNA, 25 bp, Homo sapien
caaagtcaggtctagaggtactacg

SEQ ID NO: 1952307 - DNA, 25 bp, Homo sapien
ttgctgaagtgtaagagcaccagac

SEQ ID NO: 1952308 - DNA, 25 bp, Homo sapien
ctgaagtgtaagagcaccagacggt

SEQ ID NO: 1952309 - DNA, 25 bp, Homo sapien
agtgtaagagcaccagacggtagga

SEQ ID NO: 1952310 - DNA, 25 bp, Homo sapien
gaagtgtaagagcaccagacggtag

SEQ ID NO: 1952311 - DNA, 25 bp, Homo sapien
agatgatggaggtcaggcacttact

SEQ ID NO: 1952312 - DNA, 25 bp, Homo sapien
gcacttactgcagggaccagcacat

SEQ ID NO: 1952313 - DNA, 25 bp, Homo sapien
cacttcactgggagctttacatatg

SEQ ID NO: 1952314 - DNA, 25 bp, Homo sapien
ggaatatgtggaaccaagattcaaa

SEQ ID NO: 1952315 - DNA, 25 bp, Homo sapien
tgctgcctgaccaccatgcggggtc

SEQ ID NO: 1952316 - DNA, 25 bp, Homo sapien
tgattctaactgcaaggcgcatcag

SEQ ID NO: 1952317 - DNA, 25 bp, Homo sapien
cacagagctcacgtagttcagcggt

SEQ ID NO: 1952318 - DNA, 25 bp, Homo sapien
aagtgtcttgaatggagagccagcc

SEQ ID NO: 1952319 - DNA, 25 bp, Homo sapien
caaagctcagttagggagccgcgct

SEQ ID NO: 1952320 - DNA, 25 bp, Homo sapien
tgacactgtgtggagtacatggcat

SEQ ID NO: 1952321 - DNA, 25 bp, Homo sapien
cctcggttctgcaggcccaagtgag

SEQ ID NO: 1952322 - DNA, 25 bp, Homo sapien
tacatggcattgtgccaatagaggt

SEQ ID NO: 1952323 - DNA, 25 bp, Homo sapien
tctccgggagtaagagctgcctgcc

SEQ ID NO: 1952324 - DNA, 25 bp, Homo sapien
tgatgccaacaggtgggcaagaaat

SEQ ID NO: 1952325 - DNA, 25 bp, Homo sapien
atgcccctcaaacccaactgtgctg

SEQ ID NO: 1952326 - DNA, 25 bp, Homo sapien
aaacccaactgtgctgtcttgggcc

SEQ ID NO: 1952327 - DNA, 25 bp, Homo sapien
acaggtgggcaagaaatgcccctca

SEQ ID NO: 1952328 - DNA, 25 bp, Homo sapien
gccagccaggggtgcaaatgccatt

SEQ ID NO: 1952329 - DNA, 25 bp, Homo sapien
agtgccagccaggggtgcaaatgcc

SEQ ID NO: 1952330 - DNA, 25 bp, Homo sapien
cagccaggggtgcaaatgccatttg

SEQ ID NO: 1952331 - DNA, 25 bp, Homo sapien
ctgagtgccagccaggggtgcaaat

SEQ ID NO: 1952332 - DNA, 25 bp, Homo sapien
ccatccggagctggggcttgtcttc

SEQ ID NO: 1952333 - DNA, 25 bp, Homo sapien
tcctagcctcaagtcagctgggaag

SEQ ID NO: 1952334 - DNA, 25 bp, Homo sapien
ggcccagggccacgcactcttcctt

SEQ ID NO: 1952335 - DNA, 25 bp, Homo sapien
gactggacttgagcagccactctga

SEQ ID NO: 1952336 - DNA, 25 bp, Homo sapien
gcgaagcccttggttcgtggcaaca

SEQ ID NO: 1952337 - DNA, 25 bp, Homo sapien
cgtgaaccgtgtgccctcacagtga

SEQ ID NO: 1952338 - DNA, 25 bp, Homo sapien
tcaagctcctcacggtgatggcgaa

SEQ ID NO: 1952339 - DNA, 25 bp, Homo sapien
atgcttgaggcgaggcagccccttg

SEQ ID NO: 1952340 - DNA, 25 bp, Homo sapien
aaggaaggaggcaggagtcgcacgc

SEQ ID NO: 1952341 - DNA, 25 bp, Homo sapien
aggaaggaggcaggagtcgcacgca

SEQ ID NO: 1952342 - DNA, 25 bp, Homo sapien
gaaggaggcaggagtcgcacgcagc

SEQ ID NO: 1952343 - DNA, 25 bp, Homo sapien
ggaaggaaggaggcaggagtcgcac

SEQ ID NO: 1952344 - DNA, 25 bp, Homo sapien
agccctggggtcatgcatggccctg

SEQ ID NO: 1952345 - DNA, 25 bp, Homo sapien
gggtcatgcatggccctggggtcac

SEQ ID NO: 1952346 - DNA, 25 bp, Homo sapien
catgcatggccctggggtcacacac

SEQ ID NO: 1952347 - DNA, 25 bp, Homo sapien
tcatgcatggccctggggtcacaca

SEQ ID NO: 1952348 - DNA, 25 bp, Homo sapien
cacacagccctggtgtcatgcctgg

SEQ ID NO: 1952349 - DNA, 25 bp, Homo sapien
acacagccctggtgtcatgcctggc

SEQ ID NO: 1952350 - DNA, 25 bp, Homo sapien
gtcacacacagccctggtgtcatgc

SEQ ID NO: 1952351 - DNA, 25 bp, Homo sapien
cacacacagccctggtgtcatgcct

SEQ ID NO: 1952352 - DNA, 25 bp, Homo sapien
tacgtggccccacggtcacacacgg

SEQ ID NO: 1952353 - DNA, 25 bp, Homo sapien
cggccccatggtcatacacggcccc

SEQ ID NO: 1952354 - DNA, 25 bp, Homo sapien
acagtcatacgtggccccacggtca

SEQ ID NO: 1952355 - DNA, 25 bp, Homo sapien
tacacggccccacagtcatacgtgg

SEQ ID NO: 1952356 - DNA, 25 bp, Homo sapien
gggggtcccacggtcacagtcctgc

SEQ ID NO: 1952357 - DNA, 25 bp, Homo sapien
atgggggtcccacggtcacagtcct

SEQ ID NO: 1952358 - DNA, 25 bp, Homo sapien
tcccacggtcacagtcctgcaggag

SEQ ID NO: 1952359 - DNA, 25 bp, Homo sapien
gggtcccacggtcacagtcctgcag

SEQ ID NO: 1952360 - DNA, 25 bp, Homo sapien
tgctgcaaactggtggcaaccgtct

SEQ ID NO: 1952361 - DNA, 25 bp, Homo sapien
gtggcaaccgtcttgcgatcctgct

SEQ ID NO: 1952362 - DNA, 25 bp, Homo sapien
cccggaggtgctgcaaactggtggc

SEQ ID NO: 1952363 - DNA, 25 bp, Homo sapien
aactggtggcaaccgtcttgcgatc

SEQ ID NO: 1952364 - DNA, 25 bp, Homo sapien
tctcggtgaagtaccacatccagcc

SEQ ID NO: 1952365 - DNA, 25 bp, Homo sapien
ccagccgataattgggacataggcc

SEQ ID NO: 1952366 - DNA, 25 bp, Homo sapien
cagaagaccatctcggtgaagtacc

SEQ ID NO: 1952367 - DNA, 25 bp, Homo sapien
cacatccagccgataattgggacat

SEQ ID NO: 1952368 - DNA, 25 bp, Homo sapien
acagaagaaggagcccaggtgccca

SEQ ID NO: 1952369 - DNA, 25 bp, Homo sapien
gaagaaggagcccaggtgcccatga

SEQ ID NO: 1952370 - DNA, 25 bp, Homo sapien
ccaggtgcccatgaaggagacgtca

SEQ ID NO: 1952371 - DNA, 25 bp, Homo sapien
tgcccatgaaggagacgtcagagcc

SEQ ID NO: 1952372 - DNA, 25 bp, Homo sapien
tgagctctgcagttgaggcaaacag

SEQ ID NO: 1952373 - DNA, 25 bp, Homo sapien
cagaccaggagatgtgctcggtgcc

SEQ ID NO: 1952374 - DNA, 25 bp, Homo sapien
cagctggtccaagctgggagtaaaa

SEQ ID NO: 1952375 - DNA, 25 bp, Homo sapien
ttgaggcaaacaggagtctccgctc

SEQ ID NO: 1952376 - DNA, 25 bp, Homo sapien
tatcttgcaagatcctagtgggtcc

SEQ ID NO: 1952377 - DNA, 25 bp, Homo sapien
gatatcccacggtagacatgtcacg

SEQ ID NO: 1952378 - DNA, 25 bp, Homo sapien
tgacctgctgctaaatggaaacgac

SEQ ID NO: 1952379 - DNA, 25 bp, Homo sapien
taagtgacgtcctgtggccacacag

SEQ ID NO: 1952380 - DNA, 25 bp, Homo sapien
ggatactgatcactactggctctgc

SEQ ID NO: 1952381 - DNA, 25 bp, Homo sapien
taataggagcgattggcctcgccca

SEQ ID NO: 1952382 - DNA, 25 bp, Homo sapien
cagcccttgtgggatggcgttagcc

SEQ ID NO: 1952383 - DNA, 25 bp, Homo sapien
ttatccacgtgggacagagtacgcg

SEQ ID NO: 1952384 - DNA, 25 bp, Homo sapien
cgtgggaccggacttttacagatga

SEQ ID NO: 1952385 - DNA, 25 bp, Homo sapien
caacaaccctggctttatgagcggt

SEQ ID NO: 1952386 - DNA, 25 bp, Homo sapien
tagtcggtatgaacccgcggtgcag

SEQ ID NO: 1952387 - DNA, 25 bp, Homo sapien
taccaagtcggtgtacagcagacag

SEQ ID NO: 1952388 - DNA, 25 bp, Homo sapien
ctctgcctaggagggataatgccac

SEQ ID NO: 1952389 - DNA, 25 bp, Homo sapien
ggtgcaagaccaccctacagagctg

SEQ ID NO: 1952390 - DNA, 25 bp, Homo sapien
agagctgacaaaaccatggcggtgg

SEQ ID NO: 1952391 - DNA, 25 bp, Homo sapien
gttgcatgaacacggtctcctagag

SEQ ID NO: 1952392 - DNA, 25 bp, Homo sapien
tagaaaggatgggaggtctctcccg

SEQ ID NO: 1952393 - DNA, 25 bp, Homo sapien
gcacgggcggtgcttactgatccac

SEQ ID NO: 1952394 - DNA, 25 bp, Homo sapien
cgggtcccggttacagaagcttcat

SEQ ID NO: 1952395 - DNA, 25 bp, Homo sapien
tactaagagggcaagggaaggtctc

SEQ ID NO: 1952396 - DNA, 25 bp, Homo sapien
gaatataaggcaatgccgttcttta

SEQ ID NO: 1952397 - DNA, 25 bp, Homo sapien
atgaatataaggcaatgccgttctt

SEQ ID NO: 1952398 - DNA, 25 bp, Homo sapien
aatataaggcaatgccgttctttac

SEQ ID NO: 1952399 - DNA, 25 bp, Homo sapien
gatgttgctgaacaatgaatataag

SEQ ID NO: 1952400 - DNA, 25 bp, Homo sapien
acccaccgtcatgggccacagctct

SEQ ID NO: 1952401 - DNA, 25 bp, Homo sapien
agccatctcacccaccgtcatgggc

SEQ ID NO: 1952402 - DNA, 25 bp, Homo sapien
atctcacccaccgtcatgggccaca

SEQ ID NO: 1952403 - DNA, 25 bp, Homo sapien
accgtcatgggccacagctctccag

SEQ ID NO: 1952404 - DNA, 25 bp, Homo sapien
ggaagcactttagcaagaatccaga

SEQ ID NO: 1952405 - DNA, 25 bp, Homo sapien
taagcacagtctccaccatcagtgg

SEQ ID NO: 1952406 - DNA, 25 bp, Homo sapien
tgttgacttgctttcccgccatcag

SEQ ID NO: 1952407 - DNA, 25 bp, Homo sapien
tgtgcataacaatggcactggctgt

SEQ ID NO: 1952408 - DNA, 25 bp, Homo sapien
gctcaaccgctacacgctgcagtgt

SEQ ID NO: 1952409 - DNA, 25 bp, Homo sapien
tgcagtgtgttgaagacgacaaaag

SEQ ID NO: 1952410 - DNA, 25 bp, Homo sapien
gactctgattcagctatgtgacaca

SEQ ID NO: 1952411 - DNA, 25 bp, Homo sapien
ctgagtaccgcagatgactctgatt

SEQ ID NO: 1952412 - DNA, 25 bp, Homo sapien
aaaggcatgcaagctacgtgcaaga

SEQ ID NO: 1952413 - DNA, 25 bp, Homo sapien
tgcaagctacgtgcaagaggtcaaa

SEQ ID NO: 1952414 - DNA, 25 bp, Homo sapien
agagacccagttccaaaggcatgca

SEQ ID NO: 1952415 - DNA, 25 bp, Homo sapien
tcaactgaagagacccagttccaaa

SEQ ID NO: 1952416 - DNA, 25 bp, Homo sapien
gttgagtacctcttatgattgccca

SEQ ID NO: 1952417 - DNA, 25 bp, Homo sapien
gatgtctgcctgttagccaaggagg

SEQ ID NO: 1952418 - DNA, 25 bp, Homo sapien
tgaatcatatgtaaaatggccggca

SEQ ID NO: 1952419 - DNA, 25 bp, Homo sapien
taagccttcaacgatcaaaatgcag

SEQ ID NO: 1952420 - DNA, 25 bp, Homo sapien
gaatgaccaggagcaaaaagacaag

SEQ ID NO: 1952421 - DNA, 25 bp, Homo sapien
ttaggaccatttcatcaagtagaaa

SEQ ID NO: 1952422 - DNA, 25 bp, Homo sapien
tctgaatgaccaggagcaaaaagac

SEQ ID NO: 1952423 - DNA, 25 bp, Homo sapien
gtagaaactctgttgattcttctgc

SEQ ID NO: 1952424 - DNA, 25 bp, Homo sapien
cacgatggcattttccttcccatac

SEQ ID NO: 1952425 - DNA, 25 bp, Homo sapien
ctaacagcccaaagcgttcggacag

SEQ ID NO: 1952426 - DNA, 25 bp, Homo sapien
tgaagatggtgcattccgtgcccga

SEQ ID NO: 1952427 - DNA, 25 bp, Homo sapien
caatttcaaacttgtggttgagaac

SEQ ID NO: 1952428 - DNA, 25 bp, Homo sapien
cagccagcggctggtacaataaggc

SEQ ID NO: 1952429 - DNA, 25 bp, Homo sapien
gctcctggagccttccaaagagggt

SEQ ID NO: 1952430 - DNA, 25 bp, Homo sapien
caataaggcctgagaggcgggcact

SEQ ID NO: 1952431 - DNA, 25 bp, Homo sapien
gctggtacaataaggcctgagaggc

SEQ ID NO: 1952432 - DNA, 25 bp, Homo sapien
tgcttttgggagagagtcctgacat

SEQ ID NO: 1952433 - DNA, 25 bp, Homo sapien
ctgcttttgggagagagtcctgaca

SEQ ID NO: 1952434 - DNA, 25 bp, Homo sapien
tcctacacctagtggcacgtctcct

SEQ ID NO: 1952435 - DNA, 25 bp, Homo sapien
gtggcacgtctcctcacagcccatg

SEQ ID NO: 1952436 - DNA, 25 bp, Homo sapien
ttcctctcctacacctagtggcacg

SEQ ID NO: 1952437 - DNA, 25 bp, Homo sapien
cagtcagtcatcagggacagtttac

SEQ ID NO: 1952438 - DNA, 25 bp, Homo sapien
gaatcagactctggaacgaggcaca

SEQ ID NO: 1952439 - DNA, 25 bp, Homo sapien
tagagcaactcgtgttcctgtgcac

SEQ ID NO: 1952440 - DNA, 25 bp, Homo sapien
ggctcgctgccgtcactggttctgt

SEQ ID NO: 1952441 - DNA, 25 bp, Homo sapien
gatggctaacctggaacactcatgc

SEQ ID NO: 1952442 - DNA, 25 bp, Homo sapien
tcagctgattttcattatccaaatt

SEQ ID NO: 1952443 - DNA, 25 bp, Homo sapien
tgaaatgtaattcagctgattttca

SEQ ID NO: 1952444 - DNA, 25 bp, Homo sapien
agctgattttcattatccaaattca

SEQ ID NO: 1952445 - DNA, 25 bp, Homo sapien
cccttattgaaatgtaattcagctg

SEQ ID NO: 1952446 - DNA, 25 bp, Homo sapien
cattctgaaagctggctcagaccaa

SEQ ID NO: 1952447 - DNA, 25 bp, Homo sapien
tctgaaagtgggtgaaactagagcc

SEQ ID NO: 1952448 - DNA, 25 bp, Homo sapien
tcagttggagagacgtcattctgaa

SEQ ID NO: 1952449 - DNA, 25 bp, Homo sapien
tgctgtgctgcaaattaggaataag

SEQ ID NO: 1952450 - DNA, 25 bp, Homo sapien
tgtccttctaatttaactccacaag

SEQ ID NO: 1952451 - DNA, 25 bp, Homo sapien
tatccttcctagtgccttttatgtt

SEQ ID NO: 1952452 - DNA, 25 bp, Homo sapien
aatatctcaatttatccttcctagt

SEQ ID NO: 1952453 - DNA, 25 bp, Homo sapien
tttatgttattctggcctaatattc

SEQ ID NO: 1952454 - DNA, 25 bp, Homo sapien
tggattagtattatttgtcagttct

SEQ ID NO: 1952455 - DNA, 25 bp, Homo sapien
ctttggaaggtggtctgtcactctt

SEQ ID NO: 1952456 - DNA, 25 bp, Homo sapien
gactttagggtgtcgctctttggaa

SEQ ID NO: 1952457 - DNA, 25 bp, Homo sapien
tatgatgcatctacgtgtgactgga

SEQ ID NO: 1952458 - DNA, 25 bp, Homo sapien
cccatgatgcctgtagtataaaagc

SEQ ID NO: 1952459 - DNA, 25 bp, Homo sapien
catgtaacagttcactcagcaagcc

SEQ ID NO: 1952460 - DNA, 25 bp, Homo sapien
taaaagctcaaagcgcttcctagcg

SEQ ID NO: 1952461 - DNA, 25 bp, Homo sapien
tcctagcgcacacttcatgtaacag

SEQ ID NO: 1952462 - DNA, 25 bp, Homo sapien
ggtgtggttcgccatcttaagagca

SEQ ID NO: 1952463 - DNA, 25 bp, Homo sapien
tctttctagaatggtgtggttcgcc

SEQ ID NO: 1952464 - DNA, 25 bp, Homo sapien
gttcgccatcttaagagcactgtct

SEQ ID NO: 1952465 - DNA, 25 bp, Homo sapien
tctagaatggtgtggttcgccatct

SEQ ID NO: 1952466 - DNA, 25 bp, Homo sapien
ttattcaaagagcacttgaggttaa

SEQ ID NO: 1952467 - DNA, 25 bp, Homo sapien
tattcaaagagcacttgaggttaaa

SEQ ID NO: 1952468 - DNA, 25 bp, Homo sapien
tttattcaaagagcacttgaggtta

SEQ ID NO: 1952469 - DNA, 25 bp, Homo sapien
agtaggatgccagtaagaaagatgc

SEQ ID NO: 1952470 - DNA, 25 bp, Homo sapien
ttactaaaggccactataagccatt

SEQ ID NO: 1952471 - DNA, 25 bp, Homo sapien
tagatgtgtgaactttgatatgcca

SEQ ID NO: 1952472 - DNA, 25 bp, Homo sapien
ttgacaaccattcacccgtaattct

SEQ ID NO: 1952473 - DNA, 25 bp, Homo sapien
tctttgtctggaatttatgagaccc

SEQ ID NO: 1952474 - DNA, 25 bp, Homo sapien
gttgagctatcaccatctacctgtc

SEQ ID NO: 1952475 - DNA, 25 bp, Homo sapien
cctgtccaggtcagtattatatgcc

SEQ ID NO: 1952476 - DNA, 25 bp, Homo sapien
cagggactctttatgatgctacaca

SEQ ID NO: 1952477 - DNA, 25 bp, Homo sapien
gagagagatgacagtaaaccaccgc

SEQ ID NO: 1952478 - DNA, 25 bp, Homo sapien
gagagcaagattcagtgacccagtg

SEQ ID NO: 1952479 - DNA, 25 bp, Homo sapien
caaggcttagcaagacggatgcaga

SEQ ID NO: 1952480 - DNA, 25 bp, Homo sapien
tgaagcttgagtaggagcccaaggc

SEQ ID NO: 1952481 - DNA, 25 bp, Homo sapien
gctgtgacactgtatgagccatgga

SEQ ID NO: 1952482 - DNA, 25 bp, Homo sapien
cagaaagccacaatgaggaatccca

SEQ ID NO: 1952483 - DNA, 25 bp, Homo sapien
gaattaatccatgggcacctatcaa

SEQ ID NO: 1952484 - DNA, 25 bp, Homo sapien
gaatcccaaaggcttgcttggaggt

SEQ ID NO: 1952485 - DNA, 25 bp, Homo sapien
gaaagccttgccaagctgctagaaa

SEQ ID NO: 1952486 - DNA, 25 bp, Homo sapien
cgttgattgttctaacaaagccaga

SEQ ID NO: 1952487 - DNA, 25 bp, Homo sapien
atttagctgtaaaatacgttgattg

SEQ ID NO: 1952488 - DNA, 25 bp, Homo sapien
tccctttgttgctgatcctgatact

SEQ ID NO: 1952489 - DNA, 25 bp, Homo sapien
gacatatttgtgctgaatctcaagg

SEQ ID NO: 1952490 - DNA, 25 bp, Homo sapien
ttacacatcccagcggacatatttg

SEQ ID NO: 1952491 - DNA, 25 bp, Homo sapien
gcaaacacagactgacagtgactca

SEQ ID NO: 1952492 - DNA, 25 bp, Homo sapien
ggtttttgaggccatggctcattcc

SEQ ID NO: 1952493 - DNA, 25 bp, Homo sapien
taatcaggttcagatatcctggtcc

SEQ ID NO: 1952494 - DNA, 25 bp, Homo sapien
tctcatgctcggtaatcaggttcag

SEQ ID NO: 1952495 - DNA, 25 bp, Homo sapien
tatcctggtccttcagcatgagtgt

SEQ ID NO: 1952496 - DNA, 25 bp, Homo sapien
cctgatctcatgctcggtaatcagg

SEQ ID NO: 1952497 - DNA, 25 bp, Homo sapien
ttccctcctgccttgacaaggcttc

SEQ ID NO: 1952498 - DNA, 25 bp, Homo sapien
cctcctgccttgacaaggcttcttc

SEQ ID NO: 1952499 - DNA, 25 bp, Homo sapien
aggctgccaagagcacttttccctc

SEQ ID NO: 1952500 - DNA, 25 bp, Homo sapien
tcagctaaagccagatttgtgaggc

SEQ ID NO: 1952501 - DNA, 25 bp, Homo sapien
gatgtctctgaaagggttctgaacc

SEQ ID NO: 1952502 - DNA, 25 bp, Homo sapien
tgtctctgaaagggttctgaaccca

SEQ ID NO: 1952503 - DNA, 25 bp, Homo sapien
ttggagatgtctctgaaagggttct

SEQ ID NO: 1952504 - DNA, 25 bp, Homo sapien
agatgtctctgaaagggttctgaac

SEQ ID NO: 1952505 - DNA, 25 bp, Homo sapien
tcttctgtcctcaagcaaacgtctg

SEQ ID NO: 1952506 - DNA, 25 bp, Homo sapien
caacaagtgcgtctcttgtccagga

SEQ ID NO: 1952507 - DNA, 25 bp, Homo sapien
tcaggacagtgaaacgcttccgggc

SEQ ID NO: 1952508 - DNA, 25 bp, Homo sapien
tttcagggctctcagagtaaagcca

SEQ ID NO: 1952509 - DNA, 25 bp, Homo sapien
gttgaaggacaaggtctcttcctca

SEQ ID NO: 1952510 - DNA, 25 bp, Homo sapien
catcactagactgtgactgggttga

SEQ ID NO: 1952511 - DNA, 25 bp, Homo sapien
tgactgggttgaaggacaaggtctc

SEQ ID NO: 1952512 - DNA, 25 bp, Homo sapien
ggataacatgcagaactcaccatca

SEQ ID NO: 1952513 - DNA, 25 bp, Homo sapien
tagcgtagagcatgttctatgtgat

SEQ ID NO: 1952514 - DNA, 25 bp, Homo sapien
tgtagcgtagagcatgttctatgtg

SEQ ID NO: 1952515 - DNA, 25 bp, Homo sapien
cttgtagcgtagagcatgttctatg

SEQ ID NO: 1952516 - DNA, 25 bp, Homo sapien
gcgtagagcatgttctatgtgatgc

SEQ ID NO: 1952517 - DNA, 25 bp, Homo sapien
tgacacaaacgctggatgaacatgg

SEQ ID NO: 1952518 - DNA, 25 bp, Homo sapien
catggcaaccactggctagatctga

SEQ ID NO: 1952519 - DNA, 25 bp, Homo sapien
cgtgtgaggctttccctccggtcag

SEQ ID NO: 1952520 - DNA, 25 bp, Homo sapien
ccagatgaggttcctacacagttta

SEQ ID NO: 1952521 - DNA, 25 bp, Homo sapien
caagttgctgctaggcgctactgta

SEQ ID NO: 1952522 - DNA, 25 bp, Homo sapien
cattcatttgcacggtggcctcacg

SEQ ID NO: 1952523 - DNA, 25 bp, Homo sapien
aatcttgaagtaaaccgatggtcac

SEQ ID NO: 1952524 - DNA, 25 bp, Homo sapien
aataaacccatttagccacttggtg

SEQ ID NO: 1952525 - DNA, 25 bp, Homo sapien
ctgcttcacggggacgtcgctgcgc

SEQ ID NO: 1952526 - DNA, 25 bp, Homo sapien
tgcttcacggggacgtcgctgcgcc

SEQ ID NO: 1952527 - DNA, 25 bp, Homo sapien
ttccctgcactccctgtgtacctcc

SEQ ID NO: 1952528 - DNA, 25 bp, Homo sapien
ttcacggggacgtcgctgcgccctg

SEQ ID NO: 1952529 - DNA, 25 bp, Homo sapien
catgctgggtctatgagccttctcc

SEQ ID NO: 1952530 - DNA, 25 bp, Homo sapien
tctgcagcgaattagcatgcacagg

SEQ ID NO: 1952531 - DNA, 25 bp, Homo sapien
caactcactgctctaccatgctggg

SEQ ID NO: 1952532 - DNA, 25 bp, Homo sapien
catgcacaggtttgatcctagcaga

SEQ ID NO: 1952533 - DNA, 25 bp, Homo sapien
ttccatccgacttgactcgccaaag

SEQ ID NO: 1952534 - DNA, 25 bp, Homo sapien
cttgactcgccaaagccactgttgt

SEQ ID NO: 1952535 - DNA, 25 bp, Homo sapien
gacttgactcgccaaagccactgtt

SEQ ID NO: 1952536 - DNA, 25 bp, Homo sapien
aattcctttccatccgacttgactc

SEQ ID NO: 1952537 - DNA, 25 bp, Homo sapien
ccagcccagcaatgacagcaaaatg

SEQ ID NO: 1952538 - DNA, 25 bp, Homo sapien
gtgctgccgggcaggagggtctgca

SEQ ID NO: 1952539 - DNA, 25 bp, Homo sapien
catagaggaggctcctgagaggcca

SEQ ID NO: 1952540 - DNA, 25 bp, Homo sapien
ggtctgcaggcagaaggagtttccc

SEQ ID NO: 1952541 - DNA, 25 bp, Homo sapien
aaaaatgcttccactatcgcttggc

SEQ ID NO: 1952542 - DNA, 25 bp, Homo sapien
ccgcttcggattgtttaaaaatgct

SEQ ID NO: 1952543 - DNA, 25 bp, Homo sapien
tctttttccagtagccaggactcct

SEQ ID NO: 1952544 - DNA, 25 bp, Homo sapien
gggacataggcaaaggtcattgctg

SEQ ID NO: 1952545 - DNA, 25 bp, Homo sapien
ccaatgttgagtgaagtctatgaca

SEQ ID NO: 1952546 - DNA, 25 bp, Homo sapien
tctataccaccgtagaagggtacat

SEQ ID NO: 1952547 - DNA, 25 bp, Homo sapien
cctactgtctctgccctgtttggac

SEQ ID NO: 1952548 - DNA, 25 bp, Homo sapien
caaacagctacagttcctgtccaaa

SEQ ID NO: 1952549 - DNA, 25 bp, Homo sapien
ggtgttgatgattagccctgaggca

SEQ ID NO: 1952550 - DNA, 25 bp, Homo sapien
cagtctgcagttgatcttccggaag

SEQ ID NO: 1952551 - DNA, 25 bp, Homo sapien
tgagacttcagcagtcccgcgaggt

SEQ ID NO: 1952552 - DNA, 25 bp, Homo sapien
taaagacgtagcagaagaccaggtg

SEQ ID NO: 1952553 - DNA, 25 bp, Homo sapien
atgcgtggacgctcttattcagaaa

SEQ ID NO: 1952554 - DNA, 25 bp, Homo sapien
tcagaaataaataactacccacagt

SEQ ID NO: 1952555 - DNA, 25 bp, Homo sapien
gatgcgtggacgctcttattcagaa

SEQ ID NO: 1952556 - DNA, 25 bp, Homo sapien
taactacccacagtcaaagatttcc

SEQ ID NO: 1952557 - DNA, 25 bp, Homo sapien
tattcttagttatggtcacaatgcc

SEQ ID NO: 1952558 - DNA, 25 bp, Homo sapien
cacccggtcttttgcagggcggtct

SEQ ID NO: 1952559 - DNA, 25 bp, Homo sapien
taatatgaccttggctgtccgcagc

SEQ ID NO: 1952560 - DNA, 25 bp, Homo sapien
tgtccgcagcgcgtatgctttgagt

SEQ ID NO: 1952561 - DNA, 25 bp, Homo sapien
ggaggaaacttccattcacctggcg

SEQ ID NO: 1952562 - DNA, 25 bp, Homo sapien
tcacctggcgctatacgtgtttggg

SEQ ID NO: 1952563 - DNA, 25 bp, Homo sapien
catccaggagttgcactggaggaaa

SEQ ID NO: 1952564 - DNA, 25 bp, Homo sapien
gagtctctggaagtgaactgcgtgc

SEQ ID NO: 1952565 - DNA, 25 bp, Homo sapien
gcgtgggaacccctcgctgaggctt

SEQ ID NO: 1952566 - DNA, 25 bp, Homo sapien
cgggctccctaagaaacgctgaaag

SEQ ID NO: 1952567 - DNA, 25 bp, Homo sapien
aaggcacttgcagggtcggctccct

SEQ ID NO: 1952568 - DNA, 25 bp, Homo sapien
gaccccacttctgttgacctttgag

SEQ ID NO: 1952569 - DNA, 25 bp, Homo sapien
tttgttcttgagatatgttaatctg

SEQ ID NO: 1952570 - DNA, 25 bp, Homo sapien
tgggagcaggtttgtgagtgcctct

SEQ ID NO: 1952571 - DNA, 25 bp, Homo sapien
gcaggtttgtgagtgcctctctcaa

SEQ ID NO: 1952572 - DNA, 25 bp, Homo sapien
ttgagatatgttaatctgttcactc

SEQ ID NO: 1952573 - DNA, 25 bp, Homo sapien
tctcgtcttggaggatcccacacag

SEQ ID NO: 1952574 - DNA, 25 bp, Homo sapien
gtgtctggcttcaaactaacataaa

SEQ ID NO: 1952575 - DNA, 25 bp, Homo sapien
cacagaaatgaccatgaagtagtta

SEQ ID NO: 1952576 - DNA, 25 bp, Homo sapien
tcaaaatgcacctctcgtcttggag

SEQ ID NO: 1952577 - DNA, 25 bp, Homo sapien
ttccagaggtcctaaggaaatccag

SEQ ID NO: 1952578 - DNA, 25 bp, Homo sapien
cagccacacccagcggggaaggtgc

SEQ ID NO: 1952579 - DNA, 25 bp, Homo sapien
ccagaggtcctaaggaaatccagcc

SEQ ID NO: 1952580 - DNA, 25 bp, Homo sapien
atgcaaacatcagccacacccagcg

SEQ ID NO: 1952581 - DNA, 25 bp, Homo sapien
tataagagctgtaagtcagccaaca

SEQ ID NO: 1952582 - DNA, 25 bp, Homo sapien
agctgagatggagccggctgggttc

SEQ ID NO: 1952583 - DNA, 25 bp, Homo sapien
agagctgtaagtcagccaacactgg

SEQ ID NO: 1952584 - DNA, 25 bp, Homo sapien
agaaattgccactagtttataagag

SEQ ID NO: 1952585 - DNA, 25 bp, Homo sapien
tcctcggtccgctgtgctggaagga

SEQ ID NO: 1952586 - DNA, 25 bp, Homo sapien
tgctggaaggagattgcgttgcact

SEQ ID NO: 1952587 - DNA, 25 bp, Homo sapien
attgcgttgcactcagaagagtcca

SEQ ID NO: 1952588 - DNA, 25 bp, Homo sapien
ctcctcggtccgctgtgctggaagg

SEQ ID NO: 1952589 - DNA, 25 bp, Homo sapien
ggtatctcagtgttgacggccgtca

SEQ ID NO: 1952590 - DNA, 25 bp, Homo sapien
tgtcaaagcccacggatgtgccagt

SEQ ID NO: 1952591 - DNA, 25 bp, Homo sapien
tgaagggggaacacaaagctgtctt

SEQ ID NO: 1952592 - DNA, 25 bp, Homo sapien
gacggccgtcatgtgcagaagagca

SEQ ID NO: 1952593 - DNA, 25 bp, Homo sapien
agtgactgacgccaccacctttgcc

SEQ ID NO: 1952594 - DNA, 25 bp, Homo sapien
cagtgactgacgccaccacctttgc

SEQ ID NO: 1952595 - DNA, 25 bp, Homo sapien
tgccggtgcgggacataaaggccgg

SEQ ID NO: 1952596 - DNA, 25 bp, Homo sapien
ctgccggtgcgggacataaaggccg

SEQ ID NO: 1952597 - DNA, 25 bp, Homo sapien
cggtgcgggacataaaggccgggtg

SEQ ID NO: 1952598 - DNA, 25 bp, Homo sapien
cataggatatgtcctgatgaaagcc

SEQ ID NO: 1952599 - DNA, 25 bp, Homo sapien
ccacatctgagaagatcagttgctg

SEQ ID NO: 1952600 - DNA, 25 bp, Homo sapien
tctgagaagatcagttgctgtgcac

SEQ ID NO: 1952601 - DNA, 25 bp, Homo sapien
catctgagaagatcagttgctgtgc

SEQ ID NO: 1952602 - DNA, 25 bp, Homo sapien
gagaagatcagttgctgtgcacagc

SEQ ID NO: 1952603 - DNA, 25 bp, Homo sapien
ggtccctagcagcttgacaactgct

SEQ ID NO: 1952604 - DNA, 25 bp, Homo sapien
caaatcggtccctagcagcttgaca

SEQ ID NO: 1952605 - DNA, 25 bp, Homo sapien
gaacaaatcggtccctagcagcttg

SEQ ID NO: 1952606 - DNA, 25 bp, Homo sapien
ctaggaacaaatcggtccctagcag

SEQ ID NO: 1952607 - DNA, 25 bp, Homo sapien
tccagtgacgccacctgtttgcttt

SEQ ID NO: 1952608 - DNA, 25 bp, Homo sapien
caatgtcttccagtgacgccacctg

SEQ ID NO: 1952609 - DNA, 25 bp, Homo sapien
aatgtcttccagtgacgccacctgt

SEQ ID NO: 1952610 - DNA, 25 bp, Homo sapien
gtcttccagtgacgccacctgtttg

SEQ ID NO: 1952611 - DNA, 25 bp, Homo sapien
agcactctcactgctggcccaggaa

SEQ ID NO: 1952612 - DNA, 25 bp, Homo sapien
ggaaggaccaccctgctgccccagt

SEQ ID NO: 1952613 - DNA, 25 bp, Homo sapien
tgtagtgatgatggctggacaggtg

SEQ ID NO: 1952614 - DNA, 25 bp, Homo sapien
cccaggaaggaccaccctgctgccc

SEQ ID NO: 1952615 - DNA, 25 bp, Homo sapien
tctgtttccagacacatctgccact

SEQ ID NO: 1952616 - DNA, 25 bp, Homo sapien
ctgtctggtccaaacactctttcac

SEQ ID NO: 1952617 - DNA, 25 bp, Homo sapien
cactactgtctggtccaaacactct

SEQ ID NO: 1952618 - DNA, 25 bp, Homo sapien
cccacttctgcagtgctgagtgaca

SEQ ID NO: 1952619 - DNA, 25 bp, Homo sapien
ccactcattcatttgtgaagatgtg

SEQ ID NO: 1952620 - DNA, 25 bp, Homo sapien
cactcattcatttgtgaagatgtgt

SEQ ID NO: 1952621 - DNA, 25 bp, Homo sapien
tccactcattcatttgtgaagatgt

SEQ ID NO: 1952622 - DNA, 25 bp, Homo sapien
atccactcattcatttgtgaagatg

SEQ ID NO: 1952623 - DNA, 25 bp, Homo sapien
tttgcatagttatcctcgagactgg

SEQ ID NO: 1952624 - DNA, 25 bp, Homo sapien
gattgacttgctgattgtctttcct

SEQ ID NO: 1952625 - DNA, 25 bp, Homo sapien
tgtcagtaagatgcaattgattgac

SEQ ID NO: 1952626 - DNA, 25 bp, Homo sapien
tcatgtgagcgtcttttccatgttc

SEQ ID NO: 1952627 - DNA, 25 bp, Homo sapien
actatggtccccgaagccttgttgg

SEQ ID NO: 1952628 - DNA, 25 bp, Homo sapien
attcctgtcagggtgcagctgcagc

SEQ ID NO: 1952629 - DNA, 25 bp, Homo sapien
ctatggtccccgaagccttgttggg

SEQ ID NO: 1952630 - DNA, 25 bp, Homo sapien
gggacggacacagtattcctgtcag

SEQ ID NO: 1952631 - DNA, 25 bp, Homo sapien
gtagcagcccctccacctggagcat

SEQ ID NO: 1952632 - DNA, 25 bp, Homo sapien
ttctccagtagcagcccctccacct

SEQ ID NO: 1952633 - DNA, 25 bp, Homo sapien
cagtagcagcccctccacctggagc

SEQ ID NO: 1952634 - DNA, 25 bp, Homo sapien
ccttctccagtagcagcccctccac

SEQ ID NO: 1952635 - DNA, 25 bp, Homo sapien
gaagtaagtgcgcaccaagagcgtt

SEQ ID NO: 1952636 - DNA, 25 bp, Homo sapien
taaagtgttgcacgttcaatgctac

SEQ ID NO: 1952637 - DNA, 25 bp, Homo sapien
tagcaaagatttgcgggacaaattc

SEQ ID NO: 1952638 - DNA, 25 bp, Homo sapien
aatgtagaccaggagtttagcaaag

SEQ ID NO: 1952639 - DNA, 25 bp, Homo sapien
ccatgtctaatgctgtcttctgcat

SEQ ID NO: 1952640 - DNA, 25 bp, Homo sapien
tgcataagcatttcgcatttgtgct

SEQ ID NO: 1952641 - DNA, 25 bp, Homo sapien
tctaatgctgtcttctgcataagca

SEQ ID NO: 1952642 - DNA, 25 bp, Homo sapien
tgtcttctgcataagcatttcgcat

SEQ ID NO: 1952643 - DNA, 25 bp, Homo sapien
tttataggaacacttctggggctgt

SEQ ID NO: 1952644 - DNA, 25 bp, Homo sapien
ctttataggaacacttctggggctg

SEQ ID NO: 1952645 - DNA, 25 bp, Homo sapien
tttctctgcccccttttgctctatc

SEQ ID NO: 1952646 - DNA, 25 bp, Homo sapien
tttgctctatcatcacctgggccac

SEQ ID NO: 1952647 - DNA, 25 bp, Homo sapien
cccttttgctctatcatcacctggg

SEQ ID NO: 1952648 - DNA, 25 bp, Homo sapien
tctctgcccccttttgctctatcat

SEQ ID NO: 1952649 - DNA, 25 bp, Homo sapien
tatttgtgtcatccggaggctgaga

SEQ ID NO: 1952650 - DNA, 25 bp, Homo sapien
gagcaaaccttgttcaggcaccgca

SEQ ID NO: 1952651 - DNA, 25 bp, Homo sapien
tacagtctctaaatccaaaagggcc

SEQ ID NO: 1952652 - DNA, 25 bp, Homo sapien
gaagggagccacctgatttgtcgca

SEQ ID NO: 1952653 - DNA, 25 bp, Homo sapien
gccacagttccagcaccactcgagc

SEQ ID NO: 1952654 - DNA, 25 bp, Homo sapien
ggtcccccatgcagacgcggttcca

SEQ ID NO: 1952655 - DNA, 25 bp, Homo sapien
atgcagacgcggttccactcgcagc

SEQ ID NO: 1952656 - DNA, 25 bp, Homo sapien
cacagttccagcaccactcgagcct

SEQ ID NO: 1952657 - DNA, 25 bp, Homo sapien
ttgagaaagggctctcggaccactg

SEQ ID NO: 1952658 - DNA, 25 bp, Homo sapien
cacgtacaagtgcatcacattgaga

SEQ ID NO: 1952659 - DNA, 25 bp, Homo sapien
tttgccctgagtggcatgtccagga

SEQ ID NO: 1952660 - DNA, 25 bp, Homo sapien
actggttgtgatggctttgccctga

SEQ ID NO: 1952661 - DNA, 25 bp, Homo sapien
tgaataatgttgcaaagctggggaa

SEQ ID NO: 1952662 - DNA, 25 bp, Homo sapien
gaataatgttgcaaagctggggaag

SEQ ID NO: 1952663 - DNA, 25 bp, Homo sapien
ttgaataatgttgcaaagctgggga

SEQ ID NO: 1952664 - DNA, 25 bp, Homo sapien
tttgaataatgttgcaaagctgggg

SEQ ID NO: 1952665 - DNA, 25 bp, Homo sapien
ggctgcttcccaacgagcctgctcg

SEQ ID NO: 1952666 - DNA, 25 bp, Homo sapien
ttttttccactggtacatggcagcg

SEQ ID NO: 1952667 - DNA, 25 bp, Homo sapien
ttttccactggtacatggcagcggg

SEQ ID NO: 1952668 - DNA, 25 bp, Homo sapien
gcggctctttcatcgactctgtagg

SEQ ID NO: 1952669 - DNA, 25 bp, Homo sapien
acttgcctgcttcccctggcaccag

SEQ ID NO: 1952670 - DNA, 25 bp, Homo sapien
cacttgcctgcttcccctggcacca

SEQ ID NO: 1952671 - DNA, 25 bp, Homo sapien
cctgcttcccctggcaccagcactg

SEQ ID NO: 1952672 - DNA, 25 bp, Homo sapien
ttcccctggcaccagcactgcaact

SEQ ID NO: 1952673 - DNA, 25 bp, Homo sapien
cacggctgccaaagctcatgccctt

SEQ ID NO: 1952674 - DNA, 25 bp, Homo sapien
cactgcacctaacatgtgggaaagg

SEQ ID NO: 1952675 - DNA, 25 bp, Homo sapien
cccaacctgccgaaagtgctttcaa

SEQ ID NO: 1952676 - DNA, 25 bp, Homo sapien
tgcttcctatcctcacccagcggat

SEQ ID NO: 1952677 - DNA, 25 bp, Homo sapien
ggagaagcagctctatgacaccccg

SEQ ID NO: 1952678 - DNA, 25 bp, Homo sapien
gagcacatctttgctttgcatcctt

SEQ ID NO: 1952679 - DNA, 25 bp, Homo sapien
ccaggccactggtttagacctttga

SEQ ID NO: 1952680 - DNA, 25 bp, Homo sapien
agacctttgactgccacttccgaga

SEQ ID NO: 1952681 - DNA, 25 bp, Homo sapien
gaagctgcaccccagggaagtgcgt

SEQ ID NO: 1952682 - DNA, 25 bp, Homo sapien
ccttggtgctctgccgtgctggagt

SEQ ID NO: 1952683 - DNA, 25 bp, Homo sapien
aagtgcgttgcagagccttggtgct

SEQ ID NO: 1952684 - DNA, 25 bp, Homo sapien
ggaggacgcccctggccggaagctg

SEQ ID NO: 1952685 - DNA, 25 bp, Homo sapien
atgaaaccgggcctttgacgacctg

SEQ ID NO: 1952686 - DNA, 25 bp, Homo sapien
tgtgagcctttgagcaacttgcctg

SEQ ID NO: 1952687 - DNA, 25 bp, Homo sapien
tcagcttttcacagcgcaaggccga

SEQ ID NO: 1952688 - DNA, 25 bp, Homo sapien
gcaaaccttcgcacacaagctgagt

SEQ ID NO: 1952689 - DNA, 25 bp, Homo sapien
tcaggcggcatgcaagcgccctgtc

SEQ ID NO: 1952690 - DNA, 25 bp, Homo sapien
caggcggcatgcaagcgccctgtct

SEQ ID NO: 1952691 - DNA, 25 bp, Homo sapien
ggcggcatgcaagcgccctgtctct

SEQ ID NO: 1952692 - DNA, 25 bp, Homo sapien
ggcatgcaagcgccctgtctctgcg

SEQ ID NO: 1952693 - DNA, 25 bp, Homo sapien
catgacctccaggaaacggctccag

SEQ ID NO: 1952694 - DNA, 25 bp, Homo sapien
actgtatccggagccctgcttggag

SEQ ID NO: 1952695 - DNA, 25 bp, Homo sapien
tttttagaatggaactctccatgac

SEQ ID NO: 1952696 - DNA, 25 bp, Homo sapien
gcttttttagaatggaactctccat

SEQ ID NO: 1952697 - DNA, 25 bp, Homo sapien
tcctgaggcttcaaatacggcactg

SEQ ID NO: 1952698 - DNA, 25 bp, Homo sapien
gttcctgaggcttcaaatacggcac

SEQ ID NO: 1952699 - DNA, 25 bp, Homo sapien
gcactccccttcatggtacgcttct

SEQ ID NO: 1952700 - DNA, 25 bp, Homo sapien
gaggcttcaaatacggcactgcact

SEQ ID NO: 1952701 - DNA, 25 bp, Homo sapien
ctttaataagttgtaggcaacatct

SEQ ID NO: 1952702 - DNA, 25 bp, Homo sapien
tttaataagttgtaggcaacatctc

SEQ ID NO: 1952703 - DNA, 25 bp, Homo sapien
taataagttgtaggcaacatctccc

SEQ ID NO: 1952704 - DNA, 25 bp, Homo sapien
ttaataagttgtaggcaacatctcc

SEQ ID NO: 1952705 - DNA, 25 bp, Homo sapien
ttggctctcagtgacgcttgccagg

SEQ ID NO: 1952706 - DNA, 25 bp, Homo sapien
ggctgtgtcgtgagcctcagctttg

SEQ ID NO: 1952707 - DNA, 25 bp, Homo sapien
tgccaggtgacctgactgcagcagt

SEQ ID NO: 1952708 - DNA, 25 bp, Homo sapien
agtgacgcttgccaggtgacctgac

SEQ ID NO: 1952709 - DNA, 25 bp, Homo sapien
ttaactggtccctaatcctcgtgac

SEQ ID NO: 1952710 - DNA, 25 bp, Homo sapien
gagcccaatttgtcccatgtgcctg

SEQ ID NO: 1952711 - DNA, 25 bp, Homo sapien
tagaaatgattacgctacgccagta

SEQ ID NO: 1952712 - DNA, 25 bp, Homo sapien
tgtgcctgtgggtatccttatgctc

SEQ ID NO: 1952713 - DNA, 25 bp, Homo sapien
ggttccatgggagcacagtgttgaa

SEQ ID NO: 1952714 - DNA, 25 bp, Homo sapien
tcttcatggcctcacagagttcaca

SEQ ID NO: 1952715 - DNA, 25 bp, Homo sapien
tgtgtgaatggtaaggcactggcca

SEQ ID NO: 1952716 - DNA, 25 bp, Homo sapien
cacagtcagctgtgtcctgatcata

SEQ ID NO: 1952717 - DNA, 25 bp, Homo sapien
gtttttgcatgtaaagtatcaggct

SEQ ID NO: 1952718 - DNA, 25 bp, Homo sapien
ttgcatgtaaagtatcaggctggaa

SEQ ID NO: 1952719 - DNA, 25 bp, Homo sapien
aagtatcaggctggaaggcttggtc

SEQ ID NO: 1952720 - DNA, 25 bp, Homo sapien
catgtaaagtatcaggctggaaggc

SEQ ID NO: 1952721 - DNA, 25 bp, Homo sapien
tctctttcctgccttctgaagagga

SEQ ID NO: 1952722 - DNA, 25 bp, Homo sapien
tttctctttcctgccttctgaagag

SEQ ID NO: 1952723 - DNA, 25 bp, Homo sapien
tctttcctgccttctgaagaggaga

SEQ ID NO: 1952724 - DNA, 25 bp, Homo sapien
ccagctgctgttcctttctctttcc

SEQ ID NO: 1952725 - DNA, 25 bp, Homo sapien
caggcagcggccagtctctgtgttc

SEQ ID NO: 1952726 - DNA, 25 bp, Homo sapien
tcaggtcctggtatttattcccaga

SEQ ID NO: 1952727 - DNA, 25 bp, Homo sapien
agggtgttcagcgttgtttgtcaca

SEQ ID NO: 1952728 - DNA, 25 bp, Homo sapien
gtgcacccttctccggaaggctgga

SEQ ID NO: 1952729 - DNA, 25 bp, Homo sapien
ttcaccgtgagtgtggagtccacag

SEQ ID NO: 1952730 - DNA, 25 bp, Homo sapien
ccattctgcggagcgtcacctggtt

SEQ ID NO: 1952731 - DNA, 25 bp, Homo sapien
gttcttacccacgacttcaccgtga

SEQ ID NO: 1952732 - DNA, 25 bp, Homo sapien
tggcctgactgcagggcagtctgct

SEQ ID NO: 1952733 - DNA, 25 bp, Homo sapien
aagtttactctgaagttcaacctgc

SEQ ID NO: 1952734 - DNA, 25 bp, Homo sapien
ctgaagttcaacctgctcttcccat

SEQ ID NO: 1952735 - DNA, 25 bp, Homo sapien
gctttgcttccacggcgcctatgga

SEQ ID NO: 1952736 - DNA, 25 bp, Homo sapien
ggcgcagcagatccgccttaactgg

SEQ ID NO: 1952737 - DNA, 25 bp, Homo sapien
tcccccatctagacgtccagcagat

SEQ ID NO: 1952738 - DNA, 25 bp, Homo sapien
ttgaagactcccccatctagacgtc

SEQ ID NO: 1952739 - DNA, 25 bp, Homo sapien
aagactcccccatctagacgtccag

SEQ ID NO: 1952740 - DNA, 25 bp, Homo sapien
caggggccttggcgttttgaagact

SEQ ID NO: 1952741 - DNA, 25 bp, Homo sapien
gtggcccacccaggggcatgagtaa

SEQ ID NO: 1952742 - DNA, 25 bp, Homo sapien
aaacctagacgcagactcagtggcc

SEQ ID NO: 1952743 - DNA, 25 bp, Homo sapien
ggcatgagtaatgctgggagctgca

SEQ ID NO: 1952744 - DNA, 25 bp, Homo sapien
tttccactccaaacctagacgcaga

SEQ ID NO: 1952745 - DNA, 25 bp, Homo sapien
ggccctaaactagtgctttatgcga

SEQ ID NO: 1952746 - DNA, 25 bp, Homo sapien
caggtagaactgacccaaggatttt

SEQ ID NO: 1952747 - DNA, 25 bp, Homo sapien
gcccaccagctcgtaaaagacacag

SEQ ID NO: 1952748 - DNA, 25 bp, Homo sapien
tttactctggtccaccatgtgggag

SEQ ID NO: 1952749 - DNA, 25 bp, Homo sapien
tcagggcaacatagggcaacttctt

SEQ ID NO: 1952750 - DNA, 25 bp, Homo sapien
gcatggttgcagaaggaagctcgct

SEQ ID NO: 1952751 - DNA, 25 bp, Homo sapien
ggacacagctcacacgcatgagtga

SEQ ID NO: 1952752 - DNA, 25 bp, Homo sapien
cagtctgagtgtgtctccgtggagc

SEQ ID NO: 1952753 - DNA, 25 bp, Homo sapien
acctgatattgaggaaggtataagg

SEQ ID NO: 1952754 - DNA, 25 bp, Homo sapien
gaaggtataaggtgtcagattcctg

SEQ ID NO: 1952755 - DNA, 25 bp, Homo sapien
ccttccattgactgctacctgatat

SEQ ID NO: 1952756 - DNA, 25 bp, Homo sapien
tcaaaagactccagcatttttcctt

SEQ ID NO: 1952757 - DNA, 25 bp, Homo sapien
gacaggcggctgctccgtccatctt

SEQ ID NO: 1952758 - DNA, 25 bp, Homo sapien
ggcggctgctccgtccatcttcgaa

SEQ ID NO: 1952759 - DNA, 25 bp, Homo sapien
aggcggctgctccgtccatcttcga

SEQ ID NO: 1952760 - DNA, 25 bp, Homo sapien
tcatggagagacaggcggctgctcc

SEQ ID NO: 1952761 - DNA, 25 bp, Homo sapien
tgtttggcggtttgctgtgttctct

SEQ ID NO: 1952762 - DNA, 25 bp, Homo sapien
tgtggctgcctttgattgtttggcg

SEQ ID NO: 1952763 - DNA, 25 bp, Homo sapien
cacacatctgaagggcgattctttg

SEQ ID NO: 1952764 - DNA, 25 bp, Homo sapien
ctctaagtgtgtggcattgtggctg

SEQ ID NO: 1952765 - DNA, 25 bp, Homo sapien
ttcttcctgatggccaggcatacat

SEQ ID NO: 1952766 - DNA, 25 bp, Homo sapien
accttcttcctgatggccaggcata

SEQ ID NO: 1952767 - DNA, 25 bp, Homo sapien
ctatggctaggggtccctggtttct

SEQ ID NO: 1952768 - DNA, 25 bp, Homo sapien
tatggctaggggtccctggtttctc

SEQ ID NO: 1952769 - DNA, 25 bp, Homo sapien
agaagagcgtctggcggctggcaaa

SEQ ID NO: 1952770 - DNA, 25 bp, Homo sapien
tctctgagaagagcgtctggcggct

SEQ ID NO: 1952771 - DNA, 25 bp, Homo sapien
tgagaagagcgtctggcggctggca

SEQ ID NO: 1952772 - DNA, 25 bp, Homo sapien
tgagtctctgagaagagcgtctggc

SEQ ID NO: 1952773 - DNA, 25 bp, Homo sapien
cactgaatagcgtgccgttccgcac

SEQ ID NO: 1952774 - DNA, 25 bp, Homo sapien
tgggcgagtacaagaaggcactgaa

SEQ ID NO: 1952775 - DNA, 25 bp, Homo sapien
ttagtgggcgagtacaagaaggcac

SEQ ID NO: 1952776 - DNA, 25 bp, Homo sapien
tacaagaaggcactgaatagcgtgc

SEQ ID NO: 1952777 - DNA, 25 bp, Homo sapien
atctaaggtggcgacctggaccaag

SEQ ID NO: 1952778 - DNA, 25 bp, Homo sapien
gcttacacaccaacacccatgaatg

SEQ ID NO: 1952779 - DNA, 25 bp, Homo sapien
gggcagcactgcttgtatctaaggt

SEQ ID NO: 1952780 - DNA, 25 bp, Homo sapien
tggccttcgctgtcttggactggac

SEQ ID NO: 1952781 - DNA, 25 bp, Homo sapien
gtggagacgaacagcttaccgagag

SEQ ID NO: 1952782 - DNA, 25 bp, Homo sapien
tagaatgcagccgtggagacgaaca

SEQ ID NO: 1952783 - DNA, 25 bp, Homo sapien
gaagcaaaagagaggttctcttccc

SEQ ID NO: 1952784 - DNA, 25 bp, Homo sapien
acagcttaccgagagcctctgccag

SEQ ID NO: 1952785 - DNA, 25 bp, Homo sapien
ttgatggtaccacgaagcgccacag

SEQ ID NO: 1952786 - DNA, 25 bp, Homo sapien
cattgcctaaatcaagcgcaggagt

SEQ ID NO: 1952787 - DNA, 25 bp, Homo sapien
cctgagaggtactcacgcaatgccc

SEQ ID NO: 1952788 - DNA, 25 bp, Homo sapien
caatgcccgctggaagataagttca

SEQ ID NO: 1952789 - DNA, 25 bp, Homo sapien
tgacggccacttagaggctgcctga

SEQ ID NO: 1952790 - DNA, 25 bp, Homo sapien
gggctcaactttctgacggccactt

SEQ ID NO: 1952791 - DNA, 25 bp, Homo sapien
catagaccgcatgtgacctgctggt

SEQ ID NO: 1952792 - DNA, 25 bp, Homo sapien
tgctggtgctcggcactgacccagg

SEQ ID NO: 1952793 - DNA, 25 bp, Homo sapien
gcagcgtagattgatcagaggagct

SEQ ID NO: 1952794 - DNA, 25 bp, Homo sapien
tagattgatcagaggagctgagagc

SEQ ID NO: 1952795 - DNA, 25 bp, Homo sapien
accgagtcaagcagcgtagattgat

SEQ ID NO: 1952796 - DNA, 25 bp, Homo sapien
caagcagcgtagattgatcagagga

SEQ ID NO: 1952797 - DNA, 25 bp, Homo sapien
acctctgagtggaataagggaagac

SEQ ID NO: 1952798 - DNA, 25 bp, Homo sapien
gcttgaaggaagatgactgtgactc

SEQ ID NO: 1952799 - DNA, 25 bp, Homo sapien
acacctctgagtggaataagggaag

SEQ ID NO: 1952800 - DNA, 25 bp, Homo sapien
actgtcctttctccaagcttgaagg

SEQ ID NO: 1952801 - DNA, 25 bp, Homo sapien
tcacagggcagagtgcatggtctcc

SEQ ID NO: 1952802 - DNA, 25 bp, Homo sapien
cagctgaatgggatcggtgcagcat

SEQ ID NO: 1952803 - DNA, 25 bp, Homo sapien
tcatccacccgtgctgcagctgaat

SEQ ID NO: 1952804 - DNA, 25 bp, Homo sapien
atgatagaggccagctgccccgcac

SEQ ID NO: 1952805 - DNA, 25 bp, Homo sapien
tagcatctatgctgacgttcccgta

SEQ ID NO: 1952806 - DNA, 25 bp, Homo sapien
tatctgcttcctcctaatttgtggg

SEQ ID NO: 1952807 - DNA, 25 bp, Homo sapien
gaggctagacatctctggctggaaa

SEQ ID NO: 1952808 - DNA, 25 bp, Homo sapien
gcatttttgctacacattacgtgca

SEQ ID NO: 1952809 - DNA, 25 bp, Homo sapien
tatgaatgagaccatcagggctcgg

SEQ ID NO: 1952810 - DNA, 25 bp, Homo sapien
cattgtctgggataaatggtttgtg

SEQ ID NO: 1952811 - DNA, 25 bp, Homo sapien
gctcgggtaagaacattgtctggga

SEQ ID NO: 1952812 - DNA, 25 bp, Homo sapien
aggtgttatgaatgagaccatcagg

SEQ ID NO: 1952813 - DNA, 25 bp, Homo sapien
ctgcctctttgctgatccattactc

SEQ ID NO: 1952814 - DNA, 25 bp, Homo sapien
ccacgagactttagctgttccagag

SEQ ID NO: 1952815 - DNA, 25 bp, Homo sapien
ctgttccagagccaacggtgcctgc

SEQ ID NO: 1952816 - DNA, 25 bp, Homo sapien
cagagccaacggtgcctgcctcttt

SEQ ID NO: 1952817 - DNA, 25 bp, Homo sapien
tgtatggccaaaggaggacttgccc

SEQ ID NO: 1952818 - DNA, 25 bp, Homo sapien
ggacttgccctgattgccactggca

SEQ ID NO: 1952819 - DNA, 25 bp, Homo sapien
ctgagccttagggaccatccagagg

SEQ ID NO: 1952820 - DNA, 25 bp, Homo sapien
ccactggcaaagacgctgagcctta

SEQ ID NO: 1952821 - DNA, 25 bp, Homo sapien
attttggcgatgtccccttgggtca

SEQ ID NO: 1952822 - DNA, 25 bp, Homo sapien
cttgggtcacagaacggcagcatgg

SEQ ID NO: 1952823 - DNA, 25 bp, Homo sapien
ggtggcattagcactgacggcacat

SEQ ID NO: 1952824 - DNA, 25 bp, Homo sapien
taacaatgtacacaactcgctaggg

SEQ ID NO: 1952825 - DNA, 25 bp, Homo sapien
ggtacatgcacatgacccttcctct

SEQ ID NO: 1952826 - DNA, 25 bp, Homo sapien
cttccacccacatgcccagagagct

SEQ ID NO: 1952827 - DNA, 25 bp, Homo sapien
aagagatggtctcattgctcaggga

SEQ ID NO: 1952828 - DNA, 25 bp, Homo sapien
aaagggtctggggtacatgcacatg

SEQ ID NO: 1952829 - DNA, 25 bp, Homo sapien
caaatatccactgagcgtcttcgct

SEQ ID NO: 1952830 - DNA, 25 bp, Homo sapien
caaggctgaatagtccaacttcctc

SEQ ID NO: 1952831 - DNA, 25 bp, Homo sapien
gagttctccactcggtacacccagt

SEQ ID NO: 1952832 - DNA, 25 bp, Homo sapien
aaggctctcttccagaccgcttggt

SEQ ID NO: 1952833 - DNA, 25 bp, Homo sapien
tgttagtggcccagtagccaaaaga

SEQ ID NO: 1952834 - DNA, 25 bp, Homo sapien
actttcagaagtggtacttagcacc

SEQ ID NO: 1952835 - DNA, 25 bp, Homo sapien
gaaaaccatgatagtatccaggagg

SEQ ID NO: 1952836 - DNA, 25 bp, Homo sapien
agtggaaacctgatcgaacttgaca

SEQ ID NO: 1952837 - DNA, 25 bp, Homo sapien
gagtgcctttgaccaagatcttgaa

SEQ ID NO: 1952838 - DNA, 25 bp, Homo sapien
cgtgagcatgacttccagggatgtc

SEQ ID NO: 1952839 - DNA, 25 bp, Homo sapien
gacacaacttcatcgccgtgagcat

SEQ ID NO: 1952840 - DNA, 25 bp, Homo sapien
tccctctggatagtctcaggcccaa

SEQ ID NO: 1952841 - DNA, 25 bp, Homo sapien
gaaaagcgcttcacagccacgaaga

SEQ ID NO: 1952842 - DNA, 25 bp, Homo sapien
ggcaaggagaaaagcgcttcacagc

SEQ ID NO: 1952843 - DNA, 25 bp, Homo sapien
tctccatggtaaccgggcaaggaga

SEQ ID NO: 1952844 - DNA, 25 bp, Homo sapien
gctttctccatggtaaccgggcaag

SEQ ID NO: 1952845 - DNA, 25 bp, Homo sapien
cacatccctaaaggtgacatctaca

SEQ ID NO: 1952846 - DNA, 25 bp, Homo sapien
tccctaaaggtgacatctacattaa

SEQ ID NO: 1952847 - DNA, 25 bp, Homo sapien
tgtcacatccctaaaggtgacatct

SEQ ID NO: 1952848 - DNA, 25 bp, Homo sapien
ctcacatgtcacatccctaaaggtg

SEQ ID NO: 1952849 - DNA, 25 bp, Homo sapien
tgcctttgctgccgccggcttcccc

SEQ ID NO: 1952850 - DNA, 25 bp, Homo sapien
gaaggaagaaggatcgtactcattc

SEQ ID NO: 1952851 - DNA, 25 bp, Homo sapien
aaacttcgtatggacagttgggtag

SEQ ID NO: 1952852 - DNA, 25 bp, Homo sapien
ttagaaaacttcgtatggacagttg

SEQ ID NO: 1952853 - DNA, 25 bp, Homo sapien
gaaggatcgtactcattcatttccc

SEQ ID NO: 1952854 - DNA, 25 bp, Homo sapien
tggcatgcccgttcctcctggctac

SEQ ID NO: 1952855 - DNA, 25 bp, Homo sapien
gctggcatgcccgttcctcctggct

SEQ ID NO: 1952856 - DNA, 25 bp, Homo sapien
tcctggctacgactccacagcctgt

SEQ ID NO: 1952857 - DNA, 25 bp, Homo sapien
ccaggcggcattgctggctagtggc

SEQ ID NO: 1952858 - DNA, 25 bp, Homo sapien
ttcccaggtaagggcgagtggagga

SEQ ID NO: 1952859 - DNA, 25 bp, Homo sapien
acaacttcccaggtaagggcgagtg

SEQ ID NO: 1952860 - DNA, 25 bp, Homo sapien
acttcccaggtaagggcgagtggag

SEQ ID NO: 1952861 - DNA, 25 bp, Homo sapien
caacttcccaggtaagggcgagtgg

SEQ ID NO: 1952862 - DNA, 25 bp, Homo sapien
cacctggatccaagttagctgagtt

SEQ ID NO: 1952863 - DNA, 25 bp, Homo sapien
actatcagtgttccccacaagagtg

SEQ ID NO: 1952864 - DNA, 25 bp, Homo sapien
catttcagacctactggattcgagg

SEQ ID NO: 1952865 - DNA, 25 bp, Homo sapien
catttacagattgggagatcaacgt

SEQ ID NO: 1952866 - DNA, 25 bp, Homo sapien
tccactgtgaggaaaagcctgcttc

SEQ ID NO: 1952867 - DNA, 25 bp, Homo sapien
ggcttctattctgataatgatgatt

SEQ ID NO: 1952868 - DNA, 25 bp, Homo sapien
ccccaggaatccacaggcttctatt

SEQ ID NO: 1952869 - DNA, 25 bp, Homo sapien
agggtggccgtgacacaaagtcaga

SEQ ID NO: 1952870 - DNA, 25 bp, Homo sapien
ccatcacaggatgtgcggtatcatg

SEQ ID NO: 1952871 - DNA, 25 bp, Homo sapien
gctttgtaataactcaaccatcaca

SEQ ID NO: 1952872 - DNA, 25 bp, Homo sapien
atcatgaagcgtgattgtccctgag

SEQ ID NO: 1952873 - DNA, 25 bp, Homo sapien
cttgatgctttgtaataactcaacc

SEQ ID NO: 1952874 - DNA, 25 bp, Homo sapien
ttagcggagacagctcccgcagttc

SEQ ID NO: 1952875 - DNA, 25 bp, Homo sapien
agacagctcccgcagttccattcat

SEQ ID NO: 1952876 - DNA, 25 bp, Homo sapien
gcggagacagctcccgcagttccat

SEQ ID NO: 1952877 - DNA, 25 bp, Homo sapien
tttagcggagacagctcccgcagtt

SEQ ID NO: 1952878 - DNA, 25 bp, Homo sapien
tacgatccgcgggaaggctagactt

SEQ ID NO: 1952879 - DNA, 25 bp, Homo sapien
acgatccgcgggaaggctagacttg

SEQ ID NO: 1952880 - DNA, 25 bp, Homo sapien
cattgttgtcactgtatgcagaatc

SEQ ID NO: 1952881 - DNA, 25 bp, Homo sapien
ctacattgttgtcactgtatgcaga

SEQ ID NO: 1952882 - DNA, 25 bp, Homo sapien
tacattgttgtcactgtatgcagaa

SEQ ID NO: 1952883 - DNA, 25 bp, Homo sapien
ttgttgtcactgtatgcagaatctc

SEQ ID NO: 1952884 - DNA, 25 bp, Homo sapien
tgtaagacatctcatgagaaggcgg

SEQ ID NO: 1952885 - DNA, 25 bp, Homo sapien
taattgagacaaccaacgtgccagc

SEQ ID NO: 1952886 - DNA, 25 bp, Homo sapien
acctgagcatgctgtacgggccttg

SEQ ID NO: 1952887 - DNA, 25 bp, Homo sapien
tactttacaacgagcatgggaggtg

SEQ ID NO: 1952888 - DNA, 25 bp, Homo sapien
catagtaccaacgagaaatcagcat

SEQ ID NO: 1952889 - DNA, 25 bp, Homo sapien
tcctccaactgcatctactgaacat

SEQ ID NO: 1952890 - DNA, 25 bp, Homo sapien
caactgcatctactgaacatctatt

SEQ ID NO: 1952891 - DNA, 25 bp, Homo sapien
atatgcatagtaccaacgagaaatc

SEQ ID NO: 1952892 - DNA, 25 bp, Homo sapien
ggcctgcataaagggcccatttccc

SEQ ID NO: 1952893 - DNA, 25 bp, Homo sapien
tttaaatacctctggcaggcctgca

SEQ ID NO: 1952894 - DNA, 25 bp, Homo sapien
tcccttcctcatctagtcgaaaata

SEQ ID NO: 1952895 - DNA, 25 bp, Homo sapien
tcatctagtcgaaaataccagcagg

SEQ ID NO: 1952896 - DNA, 25 bp, Homo sapien
tgctgatgagtaggcttgacttatg

SEQ ID NO: 1952897 - DNA, 25 bp, Homo sapien
tgttcttccaaatcaaaatgtagtg

SEQ ID NO: 1952898 - DNA, 25 bp, Homo sapien
gacacaagaaactccgcatagtcat

SEQ ID NO: 1952899 - DNA, 25 bp, Homo sapien
actccgcatagtcatctttgtatca

SEQ ID NO: 1952900 - DNA, 25 bp, Homo sapien
taacgtggcaagctctgaaggtcag

SEQ ID NO: 1952901 - DNA, 25 bp, Homo sapien
cagaacggatgtggacggcgaatat

SEQ ID NO: 1952902 - DNA, 25 bp, Homo sapien
gccataaacagctttcccgtgagag

SEQ ID NO: 1952903 - DNA, 25 bp, Homo sapien
gctcattaggcctcttccagacaag

SEQ ID NO: 1952904 - DNA, 25 bp, Homo sapien
ggcaatttaatatgagcaacactgt

SEQ ID NO: 1952905 - DNA, 25 bp, Homo sapien
ggtttcttagaccagctgcttctct

SEQ ID NO: 1952906 - DNA, 25 bp, Homo sapien
ggcgggacatttggacactcctgca

SEQ ID NO: 1952907 - DNA, 25 bp, Homo sapien
gcattaatagatatggatcccagca

SEQ ID NO: 1952908 - DNA, 25 bp, Homo sapien
ttatctttctctgttcctcctcttc

SEQ ID NO: 1952909 - DNA, 25 bp, Homo sapien
ttcctcctcttctccctcctgttac

SEQ ID NO: 1952910 - DNA, 25 bp, Homo sapien
tctgttcctcctcttctccctcctg

SEQ ID NO: 1952911 - DNA, 25 bp, Homo sapien
tgttcctcctcttctccctcctgtt

SEQ ID NO: 1952912 - DNA, 25 bp, Homo sapien
ctgagaaacccatcaagcatggata

SEQ ID NO: 1952913 - DNA, 25 bp, Homo sapien
gaaacccatcaagcatggatagcac

SEQ ID NO: 1952914 - DNA, 25 bp, Homo sapien
tgagaaacccatcaagcatggatag

SEQ ID NO: 1952915 - DNA, 25 bp, Homo sapien
gagaaacccatcaagcatggatagc

SEQ ID NO: 1952916 - DNA, 25 bp, Homo sapien
ccagtgagtaggctgctctgatctc

SEQ ID NO: 1952917 - DNA, 25 bp, Homo sapien
tggagcctagcctgccagtgagtag

SEQ ID NO: 1952918 - DNA, 25 bp, Homo sapien
tagcctgccagtgagtaggctgctc

SEQ ID NO: 1952919 - DNA, 25 bp, Homo sapien
ctcctggagcctagcctgccagtga

SEQ ID NO: 1952920 - DNA, 25 bp, Homo sapien
tgctttcagctttgccctctaaata

SEQ ID NO: 1952921 - DNA, 25 bp, Homo sapien
cttgctttcagctttgccctctaaa

SEQ ID NO: 1952922 - DNA, 25 bp, Homo sapien
ttgctttcagctttgccctctaaat

SEQ ID NO: 1952923 - DNA, 25 bp, Homo sapien
cttgcacttccttttactactagaa

SEQ ID NO: 1952924 - DNA, 25 bp, Homo sapien
gaggcaaagaggacacgcactgcat

SEQ ID NO: 1952925 - DNA, 25 bp, Homo sapien
ggaggcaaagaggacacgcactgca

SEQ ID NO: 1952926 - DNA, 25 bp, Homo sapien
tactactagaatgagagtttcctct

SEQ ID NO: 1952927 - DNA, 25 bp, Homo sapien
tgattgctggaagtggatgccttag

SEQ ID NO: 1952928 - DNA, 25 bp, Homo sapien
tgacacctggttgtggctgacggct

SEQ ID NO: 1952929 - DNA, 25 bp, Homo sapien
tgaaatttagggtattgaaaggcaa

SEQ ID NO: 1952930 - DNA, 25 bp, Homo sapien
agagtctcatcttcgaatatctgat

SEQ ID NO: 1952931 - DNA, 25 bp, Homo sapien
tcctttctcactgcatcattcatga

SEQ ID NO: 1952932 - DNA, 25 bp, Homo sapien
gcttaatgaagctccccattcttga

SEQ ID NO: 1952933 - DNA, 25 bp, Homo sapien
tcaaatttctccatccctcagtgcg

SEQ ID NO: 1952934 - DNA, 25 bp, Homo sapien
gattgatacaacgatgagtgtgctg

SEQ ID NO: 1952935 - DNA, 25 bp, Homo sapien
ggaattgggaaaaaatcgcttggca

SEQ ID NO: 1952936 - DNA, 25 bp, Homo sapien
gactgtccctgaactctggtcaata

SEQ ID NO: 1952937 - DNA, 25 bp, Homo sapien
gcatcaaattcccagactgtccctg

SEQ ID NO: 1952938 - DNA, 25 bp, Homo sapien
taaccaacacggctttgtgaagaaa

SEQ ID NO: 1952939 - DNA, 25 bp, Homo sapien
ttcctgtttcgtgtgaagagtgagg

SEQ ID NO: 1952940 - DNA, 25 bp, Homo sapien
cttggtgttcctgtttcgtgtgaag

SEQ ID NO: 1952941 - DNA, 25 bp, Homo sapien
gagtgagggcgtgctgcttcttcat

SEQ ID NO: 1952942 - DNA, 25 bp, Homo sapien
aagagtgagggcgtgctgcttcttc

SEQ ID NO: 1952943 - DNA, 25 bp, Homo sapien
aggtccacctattgaaaaaagagct

SEQ ID NO: 1952944 - DNA, 25 bp, Homo sapien
caaggtccacctattgaaaaaagag

SEQ ID NO: 1952945 - DNA, 25 bp, Homo sapien
tcattgactcctttcctacgttaaa

SEQ ID NO: 1952946 - DNA, 25 bp, Homo sapien
ctacgttaaaggctgaaaatgaggt

SEQ ID NO: 1952947 - DNA, 25 bp, Homo sapien
atatacacgtttctttgcacgaagt

SEQ ID NO: 1952948 - DNA, 25 bp, Homo sapien
taatgctgttgtgataagtcgttca

SEQ ID NO: 1952949 - DNA, 25 bp, Homo sapien
gcacgaagtaggtcatatcctgtat

SEQ ID NO: 1952950 - DNA, 25 bp, Homo sapien
cctccaacagtattttaatgctgtt

SEQ ID NO: 1952951 - DNA, 25 bp, Homo sapien
ttgagggaggctttacaacttcatt

SEQ ID NO: 1952952 - DNA, 25 bp, Homo sapien
acatttgagggaggctttacaactt

SEQ ID NO: 1952953 - DNA, 25 bp, Homo sapien
atttgagggaggctttacaacttca

SEQ ID NO: 1952954 - DNA, 25 bp, Homo sapien
aaccacatttgagggaggctttaca

SEQ ID NO: 1952955 - DNA, 25 bp, Homo sapien
cacgtcagcattttgcatcggagtc

SEQ ID NO: 1952956 - DNA, 25 bp, Homo sapien
ttttccagcactaaacacgtcagca

SEQ ID NO: 1952957 - DNA, 25 bp, Homo sapien
ctctgctgcgttctatctatgtaaa

SEQ ID NO: 1952958 - DNA, 25 bp, Homo sapien
gaggctagactagtatttggtacca

SEQ ID NO: 1952959 - DNA, 25 bp, Homo sapien
taagcacgggtgaattcacaggcat

SEQ ID NO: 1952960 - DNA, 25 bp, Homo sapien
gaggcactcacttctccctgaggca

SEQ ID NO: 1952961 - DNA, 25 bp, Homo sapien
taatgacgtctagggctttttccac

SEQ ID NO: 1952962 - DNA, 25 bp, Homo sapien
tgaaccacatcctgataatcactgg

SEQ ID NO: 1952963 - DNA, 25 bp, Homo sapien
gctccaggggtgtgggcagtactca

SEQ ID NO: 1952964 - DNA, 25 bp, Homo sapien
cgctccaggggtgtgggcagtactc

SEQ ID NO: 1952965 - DNA, 25 bp, Homo sapien
ctccaggggtgtgggcagtactcac

SEQ ID NO: 1952966 - DNA, 25 bp, Homo sapien
gactttcctctggtcaggctccggc

SEQ ID NO: 1952967 - DNA, 25 bp, Homo sapien
tgcaccatactgctggtaccggttg

SEQ ID NO: 1952968 - DNA, 25 bp, Homo sapien
cattgcccccttcgcaggtgacttt

SEQ ID NO: 1952969 - DNA, 25 bp, Homo sapien
gcaggacacactcctctgcaccata

SEQ ID NO: 1952970 - DNA, 25 bp, Homo sapien
tattttaacatatgcgcctgggaat

SEQ ID NO: 1952971 - DNA, 25 bp, Homo sapien
gaaaaacactgacctggaacaaaga

SEQ ID NO: 1952972 - DNA, 25 bp, Homo sapien
gaagttaatgtatggacaacgtcca

SEQ ID NO: 1952973 - DNA, 25 bp, Homo sapien
tagcttttatctcggaagaagttaa

SEQ ID NO: 1952974 - DNA, 25 bp, Homo sapien
cagttttcatagatccttttaacca

SEQ ID NO: 1952975 - DNA, 25 bp, Homo sapien
tgaaagcgcattaatggagatttgt

SEQ ID NO: 1952976 - DNA, 25 bp, Homo sapien
ttactggcacgaagttgaaagcgca

SEQ ID NO: 1952977 - DNA, 25 bp, Homo sapien
actagcactaatacagaatactgta

SEQ ID NO: 1952978 - DNA, 25 bp, Homo sapien
gaaacagggtggtgaagcgtctcct

SEQ ID NO: 1952979 - DNA, 25 bp, Homo sapien
gataaatgagcgttgcctctgcctt

SEQ ID NO: 1952980 - DNA, 25 bp, Homo sapien
gagccttgcccctcagataaatgag

SEQ ID NO: 1952981 - DNA, 25 bp, Homo sapien
caagagttcctacagctgatgtgac

SEQ ID NO: 1952982 - DNA, 25 bp, Homo sapien
caactgcgatggtttctaggtgatt

SEQ ID NO: 1952983 - DNA, 25 bp, Homo sapien
gcaactgcgatggtttctaggtgat

SEQ ID NO: 1952984 - DNA, 25 bp, Homo sapien
agcaactgcgatggtttctaggtga

SEQ ID NO: 1952985 - DNA, 25 bp, Homo sapien
ggtgacatgtcattgtctggaagtt

SEQ ID NO: 1952986 - DNA, 25 bp, Homo sapien
gggtgacatgtcattgtctggaagt

SEQ ID NO: 1952987 - DNA, 25 bp, Homo sapien
agggtgacatgtcattgtctggaag

SEQ ID NO: 1952988 - DNA, 25 bp, Homo sapien
gtgacatgtcattgtctggaagttt

SEQ ID NO: 1952989 - DNA, 25 bp, Homo sapien
atggacaagcctctaacactgagga

SEQ ID NO: 1952990 - DNA, 25 bp, Homo sapien
tagaacttggatgaaccaaaatatt

SEQ ID NO: 1952991 - DNA, 25 bp, Homo sapien
gggcagtgaaatgggttagctccac

SEQ ID NO: 1952992 - DNA, 25 bp, Homo sapien
catgtggattgtattagatggcttc

SEQ ID NO: 1952993 - DNA, 25 bp, Homo sapien
ttccctaactgaaacaggcgtgtcc

SEQ ID NO: 1952994 - DNA, 25 bp, Homo sapien
tgaggacactacttcgcctgcagca

SEQ ID NO: 1952995 - DNA, 25 bp, Homo sapien
tcacgacagtcaccaaagaatgcct

SEQ ID NO: 1952996 - DNA, 25 bp, Homo sapien
gataacagttgcctcaagcatccag

SEQ ID NO: 1952997 - DNA, 25 bp, Homo sapien
gctctttaatcaaggagttgggaca

SEQ ID NO: 1952998 - DNA, 25 bp, Homo sapien
tggagctctttaatcaaggagttgg

SEQ ID NO: 1952999 - DNA, 25 bp, Homo sapien
agtgatggagctctttaatcaagga

SEQ ID NO: 1953000 - DNA, 25 bp, Homo sapien
tctttaatcaaggagttgggacagc

SEQ ID NO: 1953001 - DNA, 25 bp, Homo sapien
gctcagctggcggttagtaccttgc

SEQ ID NO: 1953002 - DNA, 25 bp, Homo sapien
ggtagctacacatccattctttggg

SEQ ID NO: 1953003 - DNA, 25 bp, Homo sapien
aaggtcgggtagctacacatccatt

SEQ ID NO: 1953004 - DNA, 25 bp, Homo sapien
gagaggtaagagcaaaggtcgggta

SEQ ID NO: 1953005 - DNA, 25 bp, Homo sapien
attccattgagaagcattaaaaacc

SEQ ID NO: 1953006 - DNA, 25 bp, Homo sapien
ttcagaaagctttcggtgaatttcc

SEQ ID NO: 1953007 - DNA, 25 bp, Homo sapien
agtcttcgatcactatttttccttt

SEQ ID NO: 1953008 - DNA, 25 bp, Homo sapien
ttaaaaaccacatgagtcttcgatc

SEQ ID NO: 1953009 - DNA, 25 bp, Homo sapien
tcagctggtgactcatagagcagtc

SEQ ID NO: 1953010 - DNA, 25 bp, Homo sapien
aggtggcaaccctgcaggcaacata

SEQ ID NO: 1953011 - DNA, 25 bp, Homo sapien
gagatgaagcttggcatcactccac

SEQ ID NO: 1953012 - DNA, 25 bp, Homo sapien
cccagtttcccagagtattagagac

SEQ ID NO: 1953013 - DNA, 25 bp, Homo sapien
gggcatcttggacatgtcatttgaa

SEQ ID NO: 1953014 - DNA, 25 bp, Homo sapien
gaaggcattggacttccctttatac

SEQ ID NO: 1953015 - DNA, 25 bp, Homo sapien
tcagcttgaattgttctagctgtgt

SEQ ID NO: 1953016 - DNA, 25 bp, Homo sapien
tgtgctcccatcagcttgaattgtt

SEQ ID NO: 1953017 - DNA, 25 bp, Homo sapien
taagagggcaccatctatgaggaag

SEQ ID NO: 1953018 - DNA, 25 bp, Homo sapien
cagagactttgtcttggactgccaa

SEQ ID NO: 1953019 - DNA, 25 bp, Homo sapien
tatttccataagctctgggaatgcc

SEQ ID NO: 1953020 - DNA, 25 bp, Homo sapien
aacagccccttctactatgtgagga

SEQ ID NO: 1953021 - DNA, 25 bp, Homo sapien
tacaatagccacaagcaccggcaaa

SEQ ID NO: 1953022 - DNA, 25 bp, Homo sapien
taaactaccaatgcatccaactatg

SEQ ID NO: 1953023 - DNA, 25 bp, Homo sapien
ttcctgaatgaccactaaactacca

SEQ ID NO: 1953024 - DNA, 25 bp, Homo sapien
agcaacgtgggctgccaggaccctt

SEQ ID NO: 1953025 - DNA, 25 bp, Homo sapien
tcctgcatgcaatggggagctgatg

SEQ ID NO: 1953026 - DNA, 25 bp, Homo sapien
gaatctgcagtgagttcctaaggaa

SEQ ID NO: 1953027 - DNA, 25 bp, Homo sapien
gggtcatgtgatacaaccgtggcaa

SEQ ID NO: 1953028 - DNA, 25 bp, Homo sapien
tacaaccgtggcaatgccacagggc

SEQ ID NO: 1953029 - DNA, 25 bp, Homo sapien
ttgttaatcacaaaaaggctgaaga

SEQ ID NO: 1953030 - DNA, 25 bp, Homo sapien
gtagcagcagttttcggcagagggc

SEQ ID NO: 1953031 - DNA, 25 bp, Homo sapien
tctggtgaagcagaagtgatagaaa

SEQ ID NO: 1953032 - DNA, 25 bp, Homo sapien
aagtggttctgaatccgccgggtct

SEQ ID NO: 1953033 - DNA, 25 bp, Homo sapien
tttatgttcggtgcttcaagggctc

SEQ ID NO: 1953034 - DNA, 25 bp, Homo sapien
gtcatgtgccactctattagtcagg

SEQ ID NO: 1953035 - DNA, 25 bp, Homo sapien
gctggtcacccataaatgagaaagg

SEQ ID NO: 1953036 - DNA, 25 bp, Homo sapien
gatgcttaccatcaatgcccctgac

SEQ ID NO: 1953037 - DNA, 25 bp, Homo sapien
tttccaaggtggtgactgggtcctc

SEQ ID NO: 1953038 - DNA, 25 bp, Homo sapien
tcctttccaaggtggtgactgggtc

SEQ ID NO: 1953039 - DNA, 25 bp, Homo sapien
tccaaggtggtgactgggtcctcat

SEQ ID NO: 1953040 - DNA, 25 bp, Homo sapien
ctcctttccaaggtggtgactgggt

SEQ ID NO: 1953041 - DNA, 25 bp, Homo sapien
gacaatagcgccaggtctgagtctc

SEQ ID NO: 1953042 - DNA, 25 bp, Homo sapien
gataaaagctttgttgacaagccct

SEQ ID NO: 1953043 - DNA, 25 bp, Homo sapien
aagctttggtgcaccctgagttgag

SEQ ID NO: 1953044 - DNA, 25 bp, Homo sapien
cactctgtgacaatagcgccaggtc

SEQ ID NO: 1953045 - DNA, 25 bp, Homo sapien
cacaaggtctggatgagctgaataa

SEQ ID NO: 1953046 - DNA, 25 bp, Homo sapien
gcaaggcagtgttgtcagagacaga

SEQ ID NO: 1953047 - DNA, 25 bp, Homo sapien
gaatagtagacacccctggtgagcg

SEQ ID NO: 1953048 - DNA, 25 bp, Homo sapien
tcagaacggagaaacggatgcctgt

SEQ ID NO: 1953049 - DNA, 25 bp, Homo sapien
cttcccaggagagaagagccgtgga

SEQ ID NO: 1953050 - DNA, 25 bp, Homo sapien
agttgaggtgggctcgccatccttt

SEQ ID NO: 1953051 - DNA, 25 bp, Homo sapien
ttgaggtgggctcgccatcctttgg

SEQ ID NO: 1953052 - DNA, 25 bp, Homo sapien
gaagttgaggtgggctcgccatcct

SEQ ID NO: 1953053 - DNA, 25 bp, Homo sapien
tgtcttgggcctcaccaatttcgaa

SEQ ID NO: 1953054 - DNA, 25 bp, Homo sapien
atgctctgtcttgggcctcaccaat

SEQ ID NO: 1953055 - DNA, 25 bp, Homo sapien
ttgggcctcaccaatttcgaatttg

SEQ ID NO: 1953056 - DNA, 25 bp, Homo sapien
gcctcaccaatttcgaatttgttca

SEQ ID NO: 1953057 - DNA, 25 bp, Homo sapien
tcccagccctgatttgtgggcagga

SEQ ID NO: 1953058 - DNA, 25 bp, Homo sapien
tgtccattccggagacactgggccg

SEQ ID NO: 1953059 - DNA, 25 bp, Homo sapien
tgggccggacctctgtggatataat

SEQ ID NO: 1953060 - DNA, 25 bp, Homo sapien
gatataatcccctgtctttcaggct

SEQ ID NO: 1953061 - DNA, 25 bp, Homo sapien
ctcgcaagggggctgtccattccgg

SEQ ID NO: 1953062 - DNA, 25 bp, Homo sapien
gagaactgcctgagcgctcaggtct

SEQ ID NO: 1953063 - DNA, 25 bp, Homo sapien
tcatatggctgccatacattttatt

SEQ ID NO: 1953064 - DNA, 25 bp, Homo sapien
aatgtcatatggctgccatacattt

SEQ ID NO: 1953065 - DNA, 25 bp, Homo sapien
catatggctgccatacattttattg

SEQ ID NO: 1953066 - DNA, 25 bp, Homo sapien
tgtcatatggctgccatacatttta

SEQ ID NO: 1953067 - DNA, 25 bp, Homo sapien
gaggtggcgtgtcagtgagagtggt

SEQ ID NO: 1953068 - DNA, 25 bp, Homo sapien
aggaggtggcgtgtcagtgagagtg

SEQ ID NO: 1953069 - DNA, 25 bp, Homo sapien
ggtggcgtgtcagtgagagtggtga

SEQ ID NO: 1953070 - DNA, 25 bp, Homo sapien
gtggcgtgtcagtgagagtggtgac

SEQ ID NO: 1953071 - DNA, 25 bp, Homo sapien
aatacggccaatgaggaatttcggc

SEQ ID NO: 1953072 - DNA, 25 bp, Homo sapien
caattttgtaatacggccaatgagg

SEQ ID NO: 1953073 - DNA, 25 bp, Homo sapien
gaatttcggcaaatctcatatctag

SEQ ID NO: 1953074 - DNA, 25 bp, Homo sapien
gagacctaggagcttgtgaagtcct

SEQ ID NO: 1953075 - DNA, 25 bp, Homo sapien
tggtttatgcttacccgtgtggcta

SEQ ID NO: 1953076 - DNA, 25 bp, Homo sapien
tttggtttatgcttacccgtgtggc

SEQ ID NO: 1953077 - DNA, 25 bp, Homo sapien
catttggtttatgcttacccgtgtg

SEQ ID NO: 1953078 - DNA, 25 bp, Homo sapien
catcatttggtttatgcttacccgt

SEQ ID NO: 1953079 - DNA, 25 bp, Homo sapien
cacatgctgtctttaccggtacaaa

SEQ ID NO: 1953080 - DNA, 25 bp, Homo sapien
taatagggctttgagtagttcctcc

SEQ ID NO: 1953081 - DNA, 25 bp, Homo sapien
caataacagcgggagagtgtacttt

SEQ ID NO: 1953082 - DNA, 25 bp, Homo sapien
gaattcataagtgcctctgcaacag

SEQ ID NO: 1953083 - DNA, 25 bp, Homo sapien
gcagaggacgtctgcaatgccaaga

SEQ ID NO: 1953084 - DNA, 25 bp, Homo sapien
gagccctttgtacctgtgcagagga

SEQ ID NO: 1953085 - DNA, 25 bp, Homo sapien
tcctgggttctgtgaaagccgcagt

SEQ ID NO: 1953086 - DNA, 25 bp, Homo sapien
tcttcatgccaaagggcatagagcc

SEQ ID NO: 1953087 - DNA, 25 bp, Homo sapien
ctgagaggaaagagagagtcaggga

SEQ ID NO: 1953088 - DNA, 25 bp, Homo sapien
agaggaaagagagagtcagggacga

SEQ ID NO: 1953089 - DNA, 25 bp, Homo sapien
gaggaaagagagagtcagggacgag

SEQ ID NO: 1953090 - DNA, 25 bp, Homo sapien
gaaagagagagtcagggacgagtgg

SEQ ID NO: 1953091 - DNA, 25 bp, Homo sapien
ggattccatagaggcctccctgagg

SEQ ID NO: 1953092 - DNA, 25 bp, Homo sapien
aacatccagagatttttcggattcc

SEQ ID NO: 1953093 - DNA, 25 bp, Homo sapien
tgatgccggggaggaaaagagagcc

SEQ ID NO: 1953094 - DNA, 25 bp, Homo sapien
tccagagatttttcggattccatag

SEQ ID NO: 1953095 - DNA, 25 bp, Homo sapien
cagaaatggttagggtgcattgtga

SEQ ID NO: 1953096 - DNA, 25 bp, Homo sapien
gtacagaaatggttagggtgcattg

SEQ ID NO: 1953097 - DNA, 25 bp, Homo sapien
aatggttagggtgcattgtgaggac

SEQ ID NO: 1953098 - DNA, 25 bp, Homo sapien
aaatggttagggtgcattgtgagga

SEQ ID NO: 1953099 - DNA, 25 bp, Homo sapien
cagctcacggaaaggacaactgtaa

SEQ ID NO: 1953100 - DNA, 25 bp, Homo sapien
tcacggaaaggacaactgtaagata

SEQ ID NO: 1953101 - DNA, 25 bp, Homo sapien
gagactgcactgtctcccggcaagg

SEQ ID NO: 1953102 - DNA, 25 bp, Homo sapien
ggcagctcacggaaaggacaactgt

SEQ ID NO: 1953103 - DNA, 25 bp, Homo sapien
cttgttccagtttcccagacgcgtc

SEQ ID NO: 1953104 - DNA, 25 bp, Homo sapien
ccagtttcccagacgcgtctgggtc

SEQ ID NO: 1953105 - DNA, 25 bp, Homo sapien
gttccagtttcccagacgcgtctgg

SEQ ID NO: 1953106 - DNA, 25 bp, Homo sapien
gagaagggtcgggatgctgacagca

SEQ ID NO: 1953107 - DNA, 25 bp, Homo sapien
gaaaacatactctaaggactcctga

SEQ ID NO: 1953108 - DNA, 25 bp, Homo sapien
gagtgaatctgtccttgggtacatg

SEQ ID NO: 1953109 - DNA, 25 bp, Homo sapien
tcagacctgacaggagcacctgtgc

SEQ ID NO: 1953110 - DNA, 25 bp, Homo sapien
tagcgcttgacagggcagcacctga

SEQ ID NO: 1953111 - DNA, 25 bp, Homo sapien
catgggaaagtcgtccttttggctg

SEQ ID NO: 1953112 - DNA, 25 bp, Homo sapien
gaccatcatgggaaagtcgtccttt

SEQ ID NO: 1953113 - DNA, 25 bp, Homo sapien
ccaggaccatcatgggaaagtcgtc

SEQ ID NO: 1953114 - DNA, 25 bp, Homo sapien
gaatggctaggtcattttcaccccc

SEQ ID NO: 1953115 - DNA, 25 bp, Homo sapien
cagtgattacactgtaaggtggatc

SEQ ID NO: 1953116 - DNA, 25 bp, Homo sapien
ggtggatcctaaaacatgaggtcat

SEQ ID NO: 1953117 - DNA, 25 bp, Homo sapien
tgacctcaagggatacacgcccgcc

SEQ ID NO: 1953118 - DNA, 25 bp, Homo sapien
cattatagggagacaccactctgtg

SEQ ID NO: 1953119 - DNA, 25 bp, Homo sapien
acaagtaggcagtaatttaaagtct

SEQ ID NO: 1953120 - DNA, 25 bp, Homo sapien
agacaacaagtaggcagtaatttaa

SEQ ID NO: 1953121 - DNA, 25 bp, Homo sapien
caacaagtaggcagtaatttaaagt

SEQ ID NO: 1953122 - DNA, 25 bp, Homo sapien
acaacaagtaggcagtaatttaaag

SEQ ID NO: 1953123 - DNA, 25 bp, Homo sapien
gagccttaactccacaaaatgaaga

SEQ ID NO: 1953124 - DNA, 25 bp, Homo sapien
caaaagtgttgcattttgagcctta

SEQ ID NO: 1953125 - DNA, 25 bp, Homo sapien
ctgagatctttccatagaagcggct

SEQ ID NO: 1953126 - DNA, 25 bp, Homo sapien
tgagatctttccatagaagcggctg

SEQ ID NO: 1953127 - DNA, 25 bp, Homo sapien
tctttgtaaaccttgcttctttgtc

SEQ ID NO: 1953128 - DNA, 25 bp, Homo sapien
taaggatgccatatttgaacggtat

SEQ ID NO: 1953129 - DNA, 25 bp, Homo sapien
cattttcaggattggaatatcccca

SEQ ID NO: 1953130 - DNA, 25 bp, Homo sapien
tccagatgcctgcacatctttcaaa

SEQ ID NO: 1953131 - DNA, 25 bp, Homo sapien
tttcaaatacggcatcttaaggatg

SEQ ID NO: 1953132 - DNA, 25 bp, Homo sapien
gaatccccccagagctcctctaagc

SEQ ID NO: 1953133 - DNA, 25 bp, Homo sapien
cagagctcctctaagcaccactgtg

SEQ ID NO: 1953134 - DNA, 25 bp, Homo sapien
gagctcctctaagcaccactgtgtc

SEQ ID NO: 1953135 - DNA, 25 bp, Homo sapien
tctaagcaccactgtgtctccagtt

SEQ ID NO: 1953136 - DNA, 25 bp, Homo sapien
tagcaactacccaacaacacctttg

SEQ ID NO: 1953137 - DNA, 25 bp, Homo sapien
agtttcagaagactaccttgccagg

SEQ ID NO: 1953138 - DNA, 25 bp, Homo sapien
tctagtgtagggtgggcaaatgttt

SEQ ID NO: 1953139 - DNA, 25 bp, Homo sapien
ctgctttcagatatgtgactagggc

SEQ ID NO: 1953140 - DNA, 25 bp, Homo sapien
gcagctctgagttttgtcccttcaa

SEQ ID NO: 1953141 - DNA, 25 bp, Homo sapien
tcagagcaggaggttaactacagca

SEQ ID NO: 1953142 - DNA, 25 bp, Homo sapien
cagcacattcaatgaccattatacc

SEQ ID NO: 1953143 - DNA, 25 bp, Homo sapien
caggagaaggcagtgtcgtatgcag

SEQ ID NO: 1953144 - DNA, 25 bp, Homo sapien
cgctgttatcctgaggactgtttct

SEQ ID NO: 1953145 - DNA, 25 bp, Homo sapien
cagggcaaatgcattagttcccgct

SEQ ID NO: 1953146 - DNA, 25 bp, Homo sapien
cattagttcccgctgttatcctgag

SEQ ID NO: 1953147 - DNA, 25 bp, Homo sapien
ccaaccaacccctgcagggcaaatg

SEQ ID NO: 1953148 - DNA, 25 bp, Homo sapien
tttctcttgctgttggaacgtgaat

SEQ ID NO: 1953149 - DNA, 25 bp, Homo sapien
ttgtaggcagtttgtatactctcca

SEQ ID NO: 1953150 - DNA, 25 bp, Homo sapien
ctggggtcaggatgcatgctttctc

SEQ ID NO: 1953151 - DNA, 25 bp, Homo sapien
tgcgaccaggggcaccaagcaacct

SEQ ID NO: 1953152 - DNA, 25 bp, Homo sapien
gacggttgtaatataaggtgttagc

SEQ ID NO: 1953153 - DNA, 25 bp, Homo sapien
aaagctctggagttctaattacttg

SEQ ID NO: 1953154 - DNA, 25 bp, Homo sapien
gaagtcccacaaggttactgcaaaa

SEQ ID NO: 1953155 - DNA, 25 bp, Homo sapien
caaaacatggtaattagacggttgt

SEQ ID NO: 1953156 - DNA, 25 bp, Homo sapien
gcatccagggaagtgcacgggccat

SEQ ID NO: 1953157 - DNA, 25 bp, Homo sapien
ttccggagaagttcctgcagcaaaa

SEQ ID NO: 1953158 - DNA, 25 bp, Homo sapien
cagcaaaaacacgcggggcatccag

SEQ ID NO: 1953159 - DNA, 25 bp, Homo sapien
ctggttccggagaagttcctgcagc

SEQ ID NO: 1953160 - DNA, 25 bp, Homo sapien
tggcgggagttgcactggaaaacca

SEQ ID NO: 1953161 - DNA, 25 bp, Homo sapien
tagccaagttgagggtcgtgaacaa

SEQ ID NO: 1953162 - DNA, 25 bp, Homo sapien
cagtctaagcaaatcacgtggcggg

SEQ ID NO: 1953163 - DNA, 25 bp, Homo sapien
gccgatcattgagtcttgtcacaca

SEQ ID NO: 1953164 - DNA, 25 bp, Homo sapien
gcagagagaaaggaagatgtttcct

SEQ ID NO: 1953165 - DNA, 25 bp, Homo sapien
gaaaggaagatgtttcctctagtac

SEQ ID NO: 1953166 - DNA, 25 bp, Homo sapien
gagaaaggaagatgtttcctctagt

SEQ ID NO: 1953167 - DNA, 25 bp, Homo sapien
gagagaaaggaagatgtttcctcta

SEQ ID NO: 1953168 - DNA, 25 bp, Homo sapien
cacgtgctttagaccaatttctgta

SEQ ID NO: 1953169 - DNA, 25 bp, Homo sapien
aatttctgtaatcctggagggttgt

SEQ ID NO: 1953170 - DNA, 25 bp, Homo sapien
aaaggcagcacgtgctttagaccaa

SEQ ID NO: 1953171 - DNA, 25 bp, Homo sapien
taatcctggagggttgtgtagactg

SEQ ID NO: 1953172 - DNA, 25 bp, Homo sapien
acagctgcagatgcggtgggtccag

SEQ ID NO: 1953173 - DNA, 25 bp, Homo sapien
actggcagtgaagcatagacagctg

SEQ ID NO: 1953174 - DNA, 25 bp, Homo sapien
tgggtccagagttttggttcccaca

SEQ ID NO: 1953175 - DNA, 25 bp, Homo sapien
cagtgaagcatagacagctgcagat

SEQ ID NO: 1953176 - DNA, 25 bp, Homo sapien
cactctctggcaaaatctgtctgtt

SEQ ID NO: 1953177 - DNA, 25 bp, Homo sapien
cacactctctggcaaaatctgtctg

SEQ ID NO: 1953178 - DNA, 25 bp, Homo sapien
tctggcaaaatctgtctgtttctct

SEQ ID NO: 1953179 - DNA, 25 bp, Homo sapien
gattctttcccatgtgtacatcttc

SEQ ID NO: 1953180 - DNA, 25 bp, Homo sapien
tggccaagacctacatcagcaccga

SEQ ID NO: 1953181 - DNA, 25 bp, Homo sapien
caagacctacatcagcaccgaggct

SEQ ID NO: 1953182 - DNA, 25 bp, Homo sapien
gtctggccaagacctacatcagcac

SEQ ID NO: 1953183 - DNA, 25 bp, Homo sapien
acctacatcagcaccgaggctgtct

SEQ ID NO: 1953184 - DNA, 25 bp, Homo sapien
cagatcttgtttggataagaacccc

SEQ ID NO: 1953185 - DNA, 25 bp, Homo sapien
acagctagaagcagataatgcccag

SEQ ID NO: 1953186 - DNA, 25 bp, Homo sapien
tgttctgatgtatccccaaacctca

SEQ ID NO: 1953187 - DNA, 25 bp, Homo sapien
taatgcccagatccactgcaaaagc

SEQ ID NO: 1953188 - DNA, 25 bp, Homo sapien
accatagctgatatcttcaacaggg

SEQ ID NO: 1953189 - DNA, 25 bp, Homo sapien
gcagtgtctggcctatgaagccccg

SEQ ID NO: 1953190 - DNA, 25 bp, Homo sapien
tctggcctatgaagccccgtgaggc

SEQ ID NO: 1953191 - DNA, 25 bp, Homo sapien
ctgttgggggaccatagctgatatc

SEQ ID NO: 1953192 - DNA, 25 bp, Homo sapien
ccaggtttcgggtgaacaatgggat

SEQ ID NO: 1953193 - DNA, 25 bp, Homo sapien
tgggatgtaatgaagggacccctct

SEQ ID NO: 1953194 - DNA, 25 bp, Homo sapien
tgtgcaactgcgtgtgtccaggact

SEQ ID NO: 1953195 - DNA, 25 bp, Homo sapien
cagctgcttcagatgtgaggcgcag

SEQ ID NO: 1953196 - DNA, 25 bp, Homo sapien
taagcatctgaggatgccatcgagg

SEQ ID NO: 1953197 - DNA, 25 bp, Homo sapien
tatcgtgtcacagaagcagtgcctt

SEQ ID NO: 1953198 - DNA, 25 bp, Homo sapien
tataccctcatcacatctggaagcg

SEQ ID NO: 1953199 - DNA, 25 bp, Homo sapien
tctggaagcgttcttctggataagc

SEQ ID NO: 1953200 - DNA, 25 bp, Homo sapien
cggctcctctgtgtgcattggtttg

SEQ ID NO: 1953201 - DNA, 25 bp, Homo sapien
gcaggccctccgatggccatcacta

SEQ ID NO: 1953202 - DNA, 25 bp, Homo sapien
tctgtgtgcattggtttgcacactc

SEQ ID NO: 1953203 - DNA, 25 bp, Homo sapien
ctgttgctctagtgagtctcttcca

SEQ ID NO: 1953204 - DNA, 25 bp, Homo sapien
gatgtttggactcgaaagcacccgc

SEQ ID NO: 1953205 - DNA, 25 bp, Homo sapien
tgtggcttcccgaacacaggacaga

SEQ ID NO: 1953206 - DNA, 25 bp, Homo sapien
gaaagcacccgcatcatttctcctt

SEQ ID NO: 1953207 - DNA, 25 bp, Homo sapien
cagcgcatgatgtttggactcgaaa

SEQ ID NO: 1953208 - DNA, 25 bp, Homo sapien
gaactctgcatggacaggttccctc

SEQ ID NO: 1953209 - DNA, 25 bp, Homo sapien
ctgaactctgcatggacaggttccc

SEQ ID NO: 1953210 - DNA, 25 bp, Homo sapien
tgaactctgcatggacaggttccct

SEQ ID NO: 1953211 - DNA, 25 bp, Homo sapien
actgaactctgcatggacaggttcc

SEQ ID NO: 1953212 - DNA, 25 bp, Homo sapien
ctccaccgagctctgattctggagg

SEQ ID NO: 1953213 - DNA, 25 bp, Homo sapien
ccaccgagctctgattctggaggag

SEQ ID NO: 1953214 - DNA, 25 bp, Homo sapien
tccaccgagctctgattctggagga

SEQ ID NO: 1953215 - DNA, 25 bp, Homo sapien
taggacggaacactccaatgcagga

SEQ ID NO: 1953216 - DNA, 25 bp, Homo sapien
ggaacactccaatgcaggatgcaag

SEQ ID NO: 1953217 - DNA, 25 bp, Homo sapien
caatgcaggatgcaagacaagattc

SEQ ID NO: 1953218 - DNA, 25 bp, Homo sapien
ctgtaggacggaacactccaatgca

SEQ ID NO: 1953219 - DNA, 25 bp, Homo sapien
tgctgatggagctggcagtttctgg

SEQ ID NO: 1953220 - DNA, 25 bp, Homo sapien
tggggtgctgatggagctggcagtt

SEQ ID NO: 1953221 - DNA, 25 bp, Homo sapien
tttctgggttcctcactaccactgc

SEQ ID NO: 1953222 - DNA, 25 bp, Homo sapien
gcagtttctgggttcctcactacca

SEQ ID NO: 1953223 - DNA, 25 bp, Homo sapien
atgtcccaaatggcaacagggtcac

SEQ ID NO: 1953224 - DNA, 25 bp, Homo sapien
tcagatgtcccaaatggcaacaggg

SEQ ID NO: 1953225 - DNA, 25 bp, Homo sapien
tcccaaatggcaacagggtcactca

SEQ ID NO: 1953226 - DNA, 25 bp, Homo sapien
cagatgtcccaaatggcaacagggt

SEQ ID NO: 1953227 - DNA, 25 bp, Homo sapien
tcagtatatgccttgattcctgtcc

SEQ ID NO: 1953228 - DNA, 25 bp, Homo sapien
ctgtcctccaaaacggtacccatag

SEQ ID NO: 1953229 - DNA, 25 bp, Homo sapien
ttcagtatatgccttgattcctgtc

SEQ ID NO: 1953230 - DNA, 25 bp, Homo sapien
aggagacccccgaagagcctgaaga

SEQ ID NO: 1953231 - DNA, 25 bp, Homo sapien
taattccttggatagtctactggcg

SEQ ID NO: 1953232 - DNA, 25 bp, Homo sapien
gaagctctgataaggtaactaataa

SEQ ID NO: 1953233 - DNA, 25 bp, Homo sapien
tactggcgtaggagccatggaaaca

SEQ ID NO: 1953234 - DNA, 25 bp, Homo sapien
aaggcctccgcagaaagctttgtgg

SEQ ID NO: 1953235 - DNA, 25 bp, Homo sapien
gatgccccggagagcaaagaaagca

SEQ ID NO: 1953236 - DNA, 25 bp, Homo sapien
ctgaaggcaccagagcttcgggaac

SEQ ID NO: 1953237 - DNA, 25 bp, Homo sapien
tttgtggacagacgcccctgcagga

SEQ ID NO: 1953238 - DNA, 25 bp, Homo sapien
tgtgtatgaggaccccaagtcttta

SEQ ID NO: 1953239 - DNA, 25 bp, Homo sapien
tgtatgaggaccccaagtctttaac

SEQ ID NO: 1953240 - DNA, 25 bp, Homo sapien
gtgtatgaggaccccaagtctttaa

SEQ ID NO: 1953241 - DNA, 25 bp, Homo sapien
ctgtgtatgaggaccccaagtcttt

SEQ ID NO: 1953242 - DNA, 25 bp, Homo sapien
tgtccccatgtggaagtttctccca

SEQ ID NO: 1953243 - DNA, 25 bp, Homo sapien
gcagagaaggcttccaatagcagca

SEQ ID NO: 1953244 - DNA, 25 bp, Homo sapien
tccaggatccagcaactgtctggct

SEQ ID NO: 1953245 - DNA, 25 bp, Homo sapien
cagcagccactttgggccatgccaa

SEQ ID NO: 1953246 - DNA, 25 bp, Homo sapien
gtaggattggatacatttaccaact

SEQ ID NO: 1953247 - DNA, 25 bp, Homo sapien
ggatacatttaccaactggacacat

SEQ ID NO: 1953248 - DNA, 25 bp, Homo sapien
ttggatacatttaccaactggacac

SEQ ID NO: 1953249 - DNA, 25 bp, Homo sapien
ggattggatacatttaccaactgga

SEQ ID NO: 1953250 - DNA, 25 bp, Homo sapien
gcctgcagcggagctaaaccaaaat

SEQ ID NO: 1953251 - DNA, 25 bp, Homo sapien
cactggcagcggcaaaatgcttttc

SEQ ID NO: 1953252 - DNA, 25 bp, Homo sapien
cgacagtgatgtaaggcccgagaca

SEQ ID NO: 1953253 - DNA, 25 bp, Homo sapien
ttacatctgatgttacagcctgcag

SEQ ID NO: 1953254 - DNA, 25 bp, Homo sapien
ggagtgcggcctttttacagccagc

SEQ ID NO: 1953255 - DNA, 25 bp, Homo sapien
cagaggttctgcgatgccagtggtc

SEQ ID NO: 1953256 - DNA, 25 bp, Homo sapien
tttgtagcagctaactcggagtgcg

SEQ ID NO: 1953257 - DNA, 25 bp, Homo sapien
ttaaaatttccacacagggtcctga

SEQ ID NO: 1953258 - DNA, 25 bp, Homo sapien
agttcttgggccttcactgctcccg

SEQ ID NO: 1953259 - DNA, 25 bp, Homo sapien
gagcacaagccgtaaaatgacggga

SEQ ID NO: 1953260 - DNA, 25 bp, Homo sapien
ctactaaagcatcccctgaaccggg

SEQ ID NO: 1953261 - DNA, 25 bp, Homo sapien
catatccaggtgcaaactagaagcc

SEQ ID NO: 1953262 - DNA, 25 bp, Homo sapien
tgagaagaaaaggtctgcatgtgtc

SEQ ID NO: 1953263 - DNA, 25 bp, Homo sapien
catgtgtctccttagccttaacccc

SEQ ID NO: 1953264 - DNA, 25 bp, Homo sapien
gaagaaaaggtctgcatgtgtctcc

SEQ ID NO: 1953265 - DNA, 25 bp, Homo sapien
ctcaagtcatgagaagaaaaggtct

SEQ ID NO: 1953266 - DNA, 25 bp, Homo sapien
aggagacacaagcatgcggccctgg

SEQ ID NO: 1953267 - DNA, 25 bp, Homo sapien
gtgccacatactgcagggaggagac

SEQ ID NO: 1953268 - DNA, 25 bp, Homo sapien
gcacaaacacggctcttgcagcttt

SEQ ID NO: 1953269 - DNA, 25 bp, Homo sapien
cactagcagcgccattgcaggaact

SEQ ID NO: 1953270 - DNA, 25 bp, Homo sapien
tgggcatggacaagacccaggagcc

SEQ ID NO: 1953271 - DNA, 25 bp, Homo sapien
caggttgccagtctacagaaatgaa

SEQ ID NO: 1953272 - DNA, 25 bp, Homo sapien
ccagatgaggtgctagacttaattc

SEQ ID NO: 1953273 - DNA, 25 bp, Homo sapien
tgttagccctcgaggcagttccaga

SEQ ID NO: 1953274 - DNA, 25 bp, Homo sapien
ccaagggcacctcctagtctgcgtg

SEQ ID NO: 1953275 - DNA, 25 bp, Homo sapien
agggcacctcctagtctgcgtgacg

SEQ ID NO: 1953276 - DNA, 25 bp, Homo sapien
aaacccaagggcacctcctagtctg

SEQ ID NO: 1953277 - DNA, 25 bp, Homo sapien
gcacctcctagtctgcgtgacggac

SEQ ID NO: 1953278 - DNA, 25 bp, Homo sapien
taaaaactcttcagtcgtctgctgt

SEQ ID NO: 1953279 - DNA, 25 bp, Homo sapien
catagggtcacagaccatgcactga

SEQ ID NO: 1953280 - DNA, 25 bp, Homo sapien
cactgatttacctgcctttaggagc

SEQ ID NO: 1953281 - DNA, 25 bp, Homo sapien
tttgtaatgaatgtcctcgccatga

SEQ ID NO: 1953282 - DNA, 25 bp, Homo sapien
ggctctgggaaaggcctcagtttgt

SEQ ID NO: 1953283 - DNA, 25 bp, Homo sapien
acctggactgggatcactgctggcc

SEQ ID NO: 1953284 - DNA, 25 bp, Homo sapien
tagcatgtgaggtccatatattccc

SEQ ID NO: 1953285 - DNA, 25 bp, Homo sapien
taatttaaatagagtcccacctgga

SEQ ID NO: 1953286 - DNA, 25 bp, Homo sapien
cagggccgaccttgcttagcttcca

SEQ ID NO: 1953287 - DNA, 25 bp, Homo sapien
gggccgaccttgcttagcttccaag

SEQ ID NO: 1953288 - DNA, 25 bp, Homo sapien
caagatcagaggagatcaggcacgt

SEQ ID NO: 1953289 - DNA, 25 bp, Homo sapien
tccaagatcagaggagatcaggcac

SEQ ID NO: 1953290 - DNA, 25 bp, Homo sapien
caaaaggacggtgattttgtccagg

SEQ ID NO: 1953291 - DNA, 25 bp, Homo sapien
gatttatgcatttgaacagagagag

SEQ ID NO: 1953292 - DNA, 25 bp, Homo sapien
caatggagcgggtctgatttaaaca

SEQ ID NO: 1953293 - DNA, 25 bp, Homo sapien
ttcatcgtggctgcaggaaagactc

SEQ ID NO: 1953294 - DNA, 25 bp, Homo sapien
tcagcttgggctgcgaggtgcaagt

SEQ ID NO: 1953295 - DNA, 25 bp, Homo sapien
agcttgggctgcgaggtgcaagttc

SEQ ID NO: 1953296 - DNA, 25 bp, Homo sapien
ttcagcttgggctgcgaggtgcaag

SEQ ID NO: 1953297 - DNA, 25 bp, Homo sapien
cttgggctgcgaggtgcaagttccc

SEQ ID NO: 1953298 - DNA, 25 bp, Homo sapien
ctggagagagtgggatgccgagtca

SEQ ID NO: 1953299 - DNA, 25 bp, Homo sapien
tggagagagtgggatgccgagtcat

SEQ ID NO: 1953300 - DNA, 25 bp, Homo sapien
gccagattgccagttactttgaggg

SEQ ID NO: 1953301 - DNA, 25 bp, Homo sapien
ttgtttatacaagcccaggtctctc

SEQ ID NO: 1953302 - DNA, 25 bp, Homo sapien
tacatggacgatacctagagaggtc

SEQ ID NO: 1953303 - DNA, 25 bp, Homo sapien
gaatcttccggatggaaacagggca

SEQ ID NO: 1953304 - DNA, 25 bp, Homo sapien
atggatatagcgtgttggttggtac

SEQ ID NO: 1953305 - DNA, 25 bp, Homo sapien
cacatcccctgaactggcaagcgat

SEQ ID NO: 1953306 - DNA, 25 bp, Homo sapien
ggatgtttccctggtctcaccagca

SEQ ID NO: 1953307 - DNA, 25 bp, Homo sapien
gatactcatgaccatcagcagccac

SEQ ID NO: 1953308 - DNA, 25 bp, Homo sapien
gccacaggctccattaacaagcagg

SEQ ID NO: 1953309 - DNA, 25 bp, Homo sapien
tcacttaacgagatatacgactggg

SEQ ID NO: 1953310 - DNA, 25 bp, Homo sapien
taagcacacgactgttagagccagc

SEQ ID NO: 1953311 - DNA, 25 bp, Homo sapien
gaaagtgcagatccacacgaagagt

SEQ ID NO: 1953312 - DNA, 25 bp, Homo sapien
tgcagccacttgaaaacattcgagc

SEQ ID NO: 1953313 - DNA, 25 bp, Homo sapien
caaaccagtgaagtcttagcaagtg

SEQ ID NO: 1953314 - DNA, 25 bp, Homo sapien
cccaaaccagtgaagtcttagcaag

SEQ ID NO: 1953315 - DNA, 25 bp, Homo sapien
tcccaaaccagtgaagtcttagcaa

SEQ ID NO: 1953316 - DNA, 25 bp, Homo sapien
ccaaaccagtgaagtcttagcaagt

SEQ ID NO: 1953317 - DNA, 25 bp, Homo sapien
tcacccgtaaaggaaaatcatcatc

SEQ ID NO: 1953318 - DNA, 25 bp, Homo sapien
tgtagcctgtagctataggatggtg

SEQ ID NO: 1953319 - DNA, 25 bp, Homo sapien
tggtagaacgtcatcctctgagcca

SEQ ID NO: 1953320 - DNA, 25 bp, Homo sapien
tggtgaagttcactaacttgccagc

SEQ ID NO: 1953321 - DNA, 25 bp, Homo sapien
cttagtgggaacacaagtagcacag

SEQ ID NO: 1953322 - DNA, 25 bp, Homo sapien
ggaacacaagtagcacaggataggc

SEQ ID NO: 1953323 - DNA, 25 bp, Homo sapien
tgggaacacaagtagcacaggatag

SEQ ID NO: 1953324 - DNA, 25 bp, Homo sapien
caagtagcacaggataggctgacaa

SEQ ID NO: 1953325 - DNA, 25 bp, Homo sapien
agtctgattcagaggttccattgtt

SEQ ID NO: 1953326 - DNA, 25 bp, Homo sapien
tcagaggttccattgttttgccctg

SEQ ID NO: 1953327 - DNA, 25 bp, Homo sapien
tgttttgccctggtatgcaaaatgg

SEQ ID NO: 1953328 - DNA, 25 bp, Homo sapien
tgccctggtatgcaaaatggatgtc

SEQ ID NO: 1953329 - DNA, 25 bp, Homo sapien
taggtagtagcaatataatcacagg

SEQ ID NO: 1953330 - DNA, 25 bp, Homo sapien
cactgaatcattgtggtaggcagaa

SEQ ID NO: 1953331 - DNA, 25 bp, Homo sapien
ggctcccaatgatgtctatgtccaa

SEQ ID NO: 1953332 - DNA, 25 bp, Homo sapien
tgctgaataatcctgacactgaatc

SEQ ID NO: 1953333 - DNA, 25 bp, Homo sapien
ttgggaacttgccccagaatttcca

SEQ ID NO: 1953334 - DNA, 25 bp, Homo sapien
tagtataaaaagtcgcaggaagctt

SEQ ID NO: 1953335 - DNA, 25 bp, Homo sapien
gaacttgccccagaatttccacaaa

SEQ ID NO: 1953336 - DNA, 25 bp, Homo sapien
tgtagtataaaaagtcgcaggaagc

SEQ ID NO: 1953337 - DNA, 25 bp, Homo sapien
gacggataagataaactcacaccaa

SEQ ID NO: 1953338 - DNA, 25 bp, Homo sapien
ttgcaggcctcggttccgacggata

SEQ ID NO: 1953339 - DNA, 25 bp, Homo sapien
cctggcagccgcaccgagaggctga

SEQ ID NO: 1953340 - DNA, 25 bp, Homo sapien
ggatctagcggttttccctttgcag

SEQ ID NO: 1953341 - DNA, 25 bp, Homo sapien
tatatgatcctaaactccagggctt

SEQ ID NO: 1953342 - DNA, 25 bp, Homo sapien
cttctgcaaagtagaatgtgctccc

SEQ ID NO: 1953343 - DNA, 25 bp, Homo sapien
tgcaaagtagaatgtgctccctggg

SEQ ID NO: 1953344 - DNA, 25 bp, Homo sapien
gggtatatgatcctaaactccaggg

SEQ ID NO: 1953345 - DNA, 25 bp, Homo sapien
gctagagagtgtccccgtcgacggc

SEQ ID NO: 1953346 - DNA, 25 bp, Homo sapien
gagagtgtccccgtcgacggctttc

SEQ ID NO: 1953347 - DNA, 25 bp, Homo sapien
cacctgctagagagtgtccccgtcg

SEQ ID NO: 1953348 - DNA, 25 bp, Homo sapien
ctgctagagagtgtccccgtcgacg

SEQ ID NO: 1953349 - DNA, 25 bp, Homo sapien
taatagaatgctggtatatctgtgt

SEQ ID NO: 1953350 - DNA, 25 bp, Homo sapien
gtgtagcccagtgcctctcagtgtt

SEQ ID NO: 1953351 - DNA, 25 bp, Homo sapien
gaaaatccacatcgagatctagaaa

SEQ ID NO: 1953352 - DNA, 25 bp, Homo sapien
aatgcctgcatgagactgcgttgcc

SEQ ID NO: 1953353 - DNA, 25 bp, Homo sapien
cagaaggctccgtcatcaaggtcta

SEQ ID NO: 1953354 - DNA, 25 bp, Homo sapien
ctaaaatctggccatgagtcacaca

SEQ ID NO: 1953355 - DNA, 25 bp, Homo sapien
ttagtactgacaaccgaaatgagtg

SEQ ID NO: 1953356 - DNA, 25 bp, Homo sapien
ggtaggcgcatcattgcagacttca

SEQ ID NO: 1953357 - DNA, 25 bp, Homo sapien
ttgcgatcaggtgcaaagctactga

SEQ ID NO: 1953358 - DNA, 25 bp, Homo sapien
ctgacgtctgtgcacgtaatgcaag

SEQ ID NO: 1953359 - DNA, 25 bp, Homo sapien
ccgactatttgttgcgatcaggtgc

SEQ ID NO: 1953360 - DNA, 25 bp, Homo sapien
tgcaagtgatgttccgactatttgt

SEQ ID NO: 1953361 - DNA, 25 bp, Homo sapien
catgcccctcgatgataataagtga

SEQ ID NO: 1953362 - DNA, 25 bp, Homo sapien
gctggagaaatacgctgtgaccttc

SEQ ID NO: 1953363 - DNA, 25 bp, Homo sapien
tttgctctttaagcgagggagctgg

SEQ ID NO: 1953364 - DNA, 25 bp, Homo sapien
gtgccaaagtggtcaacaattctgt

SEQ ID NO: 1953365 - DNA, 25 bp, Homo sapien
ccaaggcgtttggccagcaattgct

SEQ ID NO: 1953366 - DNA, 25 bp, Homo sapien
accaaggcgtttggccagcaattgc

SEQ ID NO: 1953367 - DNA, 25 bp, Homo sapien
caccaaggcgtttggccagcaattg

SEQ ID NO: 1953368 - DNA, 25 bp, Homo sapien
acaccaaggcgtttggccagcaatt

SEQ ID NO: 1953369 - DNA, 25 bp, Homo sapien
atctgtgaagctaaattttttgcta

SEQ ID NO: 1953370 - DNA, 25 bp, Homo sapien
ctaacatctgtgaagctaaattttt

SEQ ID NO: 1953371 - DNA, 25 bp, Homo sapien
gatactaacatctgtgaagctaaat

SEQ ID NO: 1953372 - DNA, 25 bp, Homo sapien
acatctgtgaagctaaattttttgc

SEQ ID NO: 1953373 - DNA, 25 bp, Homo sapien
tgtgcatatgatcttgctgttagca

SEQ ID NO: 1953374 - DNA, 25 bp, Homo sapien
gtccctgactccaaacgctttagaa

SEQ ID NO: 1953375 - DNA, 25 bp, Homo sapien
tagaactatgggacagttgtcaaag

SEQ ID NO: 1953376 - DNA, 25 bp, Homo sapien
cagttgtcaaagttccacgctgcac

SEQ ID NO: 1953377 - DNA, 25 bp, Homo sapien
ggtttgagctcagcaggatctgtct

SEQ ID NO: 1953378 - DNA, 25 bp, Homo sapien
ggcctgccatggagaccctttgagg

SEQ ID NO: 1953379 - DNA, 25 bp, Homo sapien
ctgccatggagaccctttgaggagg

SEQ ID NO: 1953380 - DNA, 25 bp, Homo sapien
tggccccttgcttgtggtttgagct

SEQ ID NO: 1953381 - DNA, 25 bp, Homo sapien
tgtactggaagggttcatcactggt

SEQ ID NO: 1953382 - DNA, 25 bp, Homo sapien
tccagtctaggcagggaaagtgcaa

SEQ ID NO: 1953383 - DNA, 25 bp, Homo sapien
cctggaccaagtgagagcggaacag

SEQ ID NO: 1953384 - DNA, 25 bp, Homo sapien
cattgagaagtcaggtgcgacgaga

SEQ ID NO: 1953385 - DNA, 25 bp, Homo sapien
ttttgatagcaatacttcacaaaat

SEQ ID NO: 1953386 - DNA, 25 bp, Homo sapien
cttttgatagcaatacttcacaaaa

SEQ ID NO: 1953387 - DNA, 25 bp, Homo sapien
caaaatgataatataactggtttgt

SEQ ID NO: 1953388 - DNA, 25 bp, Homo sapien
cacaaaatgataatataactggttt

SEQ ID NO: 1953389 - DNA, 25 bp, Homo sapien
attttttagctgcaaacattccttt

SEQ ID NO: 1953390 - DNA, 25 bp, Homo sapien
tattttttagctgcaaacattcctt

SEQ ID NO: 1953391 - DNA, 25 bp, Homo sapien
aaatggccaaaagccctctcgtagt

SEQ ID NO: 1953392 - DNA, 25 bp, Homo sapien
caatgaatgtatcattacttggctg

SEQ ID NO: 1953393 - DNA, 25 bp, Homo sapien
tctcgtagttggctggacctgtgtc

SEQ ID NO: 1953394 - DNA, 25 bp, Homo sapien
ggttatatataagcccatctgtgca

SEQ ID NO: 1953395 - DNA, 25 bp, Homo sapien
acaatagagcataaactgacaagat

SEQ ID NO: 1953396 - DNA, 25 bp, Homo sapien
cagaacctttgtacaatagagcata

SEQ ID NO: 1953397 - DNA, 25 bp, Homo sapien
acgaaacagaacctttgtacaatag

SEQ ID NO: 1953398 - DNA, 25 bp, Homo sapien
aactgacaagataagtattcattct

SEQ ID NO: 1953399 - DNA, 25 bp, Homo sapien
agttgggccatgtctattgctagca

SEQ ID NO: 1953400 - DNA, 25 bp, Homo sapien
gtaacttgccttggaacccctgcag

SEQ ID NO: 1953401 - DNA, 25 bp, Homo sapien
gagaaggttcttatgatggacaaca

SEQ ID NO: 1953402 - DNA, 25 bp, Homo sapien
gaggtcctctgactgtcccttgcca

SEQ ID NO: 1953403 - DNA, 25 bp, Homo sapien
aagcagttgcaaaccactattgcag

SEQ ID NO: 1953404 - DNA, 25 bp, Homo sapien
cgcaggtcctgtcaaatgaaattac

SEQ ID NO: 1953405 - DNA, 25 bp, Homo sapien
gcagaacagacatgggctcgcaggt

SEQ ID NO: 1953406 - DNA, 25 bp, Homo sapien
tgcagtcaaggaaaggttaacaatc

SEQ ID NO: 1953407 - DNA, 25 bp, Homo sapien
ccattgatgacggagccctgggccg

SEQ ID NO: 1953408 - DNA, 25 bp, Homo sapien
tgcgtggaaacttccgggcacggaa

SEQ ID NO: 1953409 - DNA, 25 bp, Homo sapien
atctccattgatgacggagccctgg

SEQ ID NO: 1953410 - DNA, 25 bp, Homo sapien
gctcctgtggaggtgtgcgtggaaa

SEQ ID NO: 1953411 - DNA, 25 bp, Homo sapien
gctgcttcctttgagagactctgag

SEQ ID NO: 1953412 - DNA, 25 bp, Homo sapien
aagctgcttcctttgagagactctg

SEQ ID NO: 1953413 - DNA, 25 bp, Homo sapien
agctgcttcctttgagagactctga

SEQ ID NO: 1953414 - DNA, 25 bp, Homo sapien
caagccatgtggaaaccaaagagaa

SEQ ID NO: 1953415 - DNA, 25 bp, Homo sapien
cagggtgacagcaaacagtggacat

SEQ ID NO: 1953416 - DNA, 25 bp, Homo sapien
gctgtgaacgcacatttcctgagct

SEQ ID NO: 1953417 - DNA, 25 bp, Homo sapien
aaagccaagagggtggcgtttgact

SEQ ID NO: 1953418 - DNA, 25 bp, Homo sapien
cattggaaggtgttaacaactcctt

SEQ ID NO: 1953419 - DNA, 25 bp, Homo sapien
actttgtatttgcttaattgtcctg

SEQ ID NO: 1953420 - DNA, 25 bp, Homo sapien
cccactaaacgccataactttgtat

SEQ ID NO: 1953421 - DNA, 25 bp, Homo sapien
tttattctcaaccttgaccctgtcc

SEQ ID NO: 1953422 - DNA, 25 bp, Homo sapien
ccttcatggtttaaggcctttccag

SEQ ID NO: 1953423 - DNA, 25 bp, Homo sapien
ttcatggtttaaggcctttccagca

SEQ ID NO: 1953424 - DNA, 25 bp, Homo sapien
tctgctgtctcagaatttgggcaga

SEQ ID NO: 1953425 - DNA, 25 bp, Homo sapien
cagaggctctgagtctgagaatcat

SEQ ID NO: 1953426 - DNA, 25 bp, Homo sapien
tgtgataaagtgctttgttgtttct

SEQ ID NO: 1953427 - DNA, 25 bp, Homo sapien
atcaacacagcctcggactgacacg

SEQ ID NO: 1953428 - DNA, 25 bp, Homo sapien
gactgacacgtttggcttttgaatc

SEQ ID NO: 1953429 - DNA, 25 bp, Homo sapien
ctctttctgagtaattgtgataaag

SEQ ID NO: 1953430 - DNA, 25 bp, Homo sapien
tccctggaacccagggtgagttgtc

SEQ ID NO: 1953431 - DNA, 25 bp, Homo sapien
tggaacccagggtgagttgtcaccc

SEQ ID NO: 1953432 - DNA, 25 bp, Homo sapien
ggtgagttgtcacccccagggctga

SEQ ID NO: 1953433 - DNA, 25 bp, Homo sapien
cagggtgagttgtcacccccagggc

SEQ ID NO: 1953434 - DNA, 25 bp, Homo sapien
agggcagtgtggggattggcattca

SEQ ID NO: 1953435 - DNA, 25 bp, Homo sapien
aattaaaacatcatcccagcaagat

SEQ ID NO: 1953436 - DNA, 25 bp, Homo sapien
ttggaattaaaacatcatcccagca

SEQ ID NO: 1953437 - DNA, 25 bp, Homo sapien
ttaaaacatcatcccagcaagatgg

SEQ ID NO: 1953438 - DNA, 25 bp, Homo sapien
gtttggaattaaaacatcatcccag

SEQ ID NO: 1953439 - DNA, 25 bp, Homo sapien
gccgccctggcactttgtagcagat

SEQ ID NO: 1953440 - DNA, 25 bp, Homo sapien
taaatcggtcatcacaaggcccatc

SEQ ID NO: 1953441 - DNA, 25 bp, Homo sapien
ttgtaggagctaaatcggtcatcac

SEQ ID NO: 1953442 - DNA, 25 bp, Homo sapien
ttcaggaaccagtgtagagccgccc

SEQ ID NO: 1953443 - DNA, 25 bp, Homo sapien
cgacataggattggtgatcaaggca

SEQ ID NO: 1953444 - DNA, 25 bp, Homo sapien
gatcaaggcaatgttctcccaggca

SEQ ID NO: 1953445 - DNA, 25 bp, Homo sapien
cactgtgttcacgataatggaagca

SEQ ID NO: 1953446 - DNA, 25 bp, Homo sapien
gggcccaggacatgacgacatagga

SEQ ID NO: 1953447 - DNA, 25 bp, Homo sapien
tgctttagccatgcaacttctggaa

SEQ ID NO: 1953448 - DNA, 25 bp, Homo sapien
gaacactgtgtacgacgattaggca

SEQ ID NO: 1953449 - DNA, 25 bp, Homo sapien
aaatgtggctagaatgcagtctgct

SEQ ID NO: 1953450 - DNA, 25 bp, Homo sapien
gaggacctttcttactcctatacaa

SEQ ID NO: 1953451 - DNA, 25 bp, Homo sapien
gatggtaggtcatctcgcctccagg

SEQ ID NO: 1953452 - DNA, 25 bp, Homo sapien
catactgtggctggtggcaattccc

SEQ ID NO: 1953453 - DNA, 25 bp, Homo sapien
tgatgtaacctgactgacagctcta

SEQ ID NO: 1953454 - DNA, 25 bp, Homo sapien
aattgtcgggccttgtgatgtaacc

SEQ ID NO: 1953455 - DNA, 25 bp, Homo sapien
tttattgttgctcttaaaccctgag

SEQ ID NO: 1953456 - DNA, 25 bp, Homo sapien
ttattgttgctcttaaaccctgaga

SEQ ID NO: 1953457 - DNA, 25 bp, Homo sapien
tatttattgttgctcttaaaccctg

SEQ ID NO: 1953458 - DNA, 25 bp, Homo sapien
caagtatttattgttgctcttaaac

SEQ ID NO: 1953459 - DNA, 25 bp, Homo sapien
tctttccttcagaggccgatgtcgg

SEQ ID NO: 1953460 - DNA, 25 bp, Homo sapien
cagtgaaatccttgctaactgtatc

SEQ ID NO: 1953461 - DNA, 25 bp, Homo sapien
tgaaatccttgctaactgtatctct

SEQ ID NO: 1953462 - DNA, 25 bp, Homo sapien
gatgtcggacagatgtcaccgtcat

SEQ ID NO: 1953463 - DNA, 25 bp, Homo sapien
gacggtattcgacatttgcagttta

SEQ ID NO: 1953464 - DNA, 25 bp, Homo sapien
cttgagcactgccacccttaggaag

SEQ ID NO: 1953465 - DNA, 25 bp, Homo sapien
ttgagcactgccacccttaggaagg

SEQ ID NO: 1953466 - DNA, 25 bp, Homo sapien
tggcatttcactggacggtattcga

SEQ ID NO: 1953467 - DNA, 25 bp, Homo sapien
aaacagaacatctcagctggtcttg

SEQ ID NO: 1953468 - DNA, 25 bp, Homo sapien
gttggcctcagcgttaaccagagca

SEQ ID NO: 1953469 - DNA, 25 bp, Homo sapien
cagtactgccaagttaactcaatgg

SEQ ID NO: 1953470 - DNA, 25 bp, Homo sapien
caagtactacctctatagctttggg

SEQ ID NO: 1953471 - DNA, 25 bp, Homo sapien
tgtaaatgaacatcacaaggacagg

SEQ ID NO: 1953472 - DNA, 25 bp, Homo sapien
ctgcaggcaccgatcgtctggtttt

SEQ ID NO: 1953473 - DNA, 25 bp, Homo sapien
tgaacatcacaaggacaggtgaact

SEQ ID NO: 1953474 - DNA, 25 bp, Homo sapien
tctgcaggcaccgatcgtctggttt

SEQ ID NO: 1953475 - DNA, 25 bp, Homo sapien
tattactggtaatagaggcacactc

SEQ ID NO: 1953476 - DNA, 25 bp, Homo sapien
gaactctagcatcacgctcctcatg

SEQ ID NO: 1953477 - DNA, 25 bp, Homo sapien
aaattctcccgcactaacctgtctg

SEQ ID NO: 1953478 - DNA, 25 bp, Homo sapien
gaggcggcagttcctgcactttctt

SEQ ID NO: 1953479 - DNA, 25 bp, Homo sapien
agatgctcagtaaaatgcctctgcc

SEQ ID NO: 1953480 - DNA, 25 bp, Homo sapien
gcctctgccagctgcctcctcttcc

SEQ ID NO: 1953481 - DNA, 25 bp, Homo sapien
ggagatgctcagtaaaatgcctctg

SEQ ID NO: 1953482 - DNA, 25 bp, Homo sapien
ttaggagatgctcagtaaaatgcct

SEQ ID NO: 1953483 - DNA, 25 bp, Homo sapien
cctgggcactgttctcgaaagagca

SEQ ID NO: 1953484 - DNA, 25 bp, Homo sapien
tatacgatttaagctgggccaagag

SEQ ID NO: 1953485 - DNA, 25 bp, Homo sapien
taagatgctccgagagggtcggcct

SEQ ID NO: 1953486 - DNA, 25 bp, Homo sapien
gccaagagggcaagtggagtctcag

SEQ ID NO: 1953487 - DNA, 25 bp, Homo sapien
catttgctctttcaatacacatgag

SEQ ID NO: 1953488 - DNA, 25 bp, Homo sapien
gaggagctcggtgtcactcaaccta

SEQ ID NO: 1953489 - DNA, 25 bp, Homo sapien
tcactcaacctatccgtattcccca

SEQ ID NO: 1953490 - DNA, 25 bp, Homo sapien
caatacacatgaggagctcggtgtc

SEQ ID NO: 1953491 - DNA, 25 bp, Homo sapien
tctccactgcagcttgattcatcca

SEQ ID NO: 1953492 - DNA, 25 bp, Homo sapien
cttgagatggtgtcagaacctgttg

SEQ ID NO: 1953493 - DNA, 25 bp, Homo sapien
gttctgcacgaacaacagcctcaag

SEQ ID NO: 1953494 - DNA, 25 bp, Homo sapien
gattcatccacactaatgcagttct

SEQ ID NO: 1953495 - DNA, 25 bp, Homo sapien
taaagaaaccatgtggggtggccat

SEQ ID NO: 1953496 - DNA, 25 bp, Homo sapien
tgagagctggcctgctgcatctctg

SEQ ID NO: 1953497 - DNA, 25 bp, Homo sapien
tgaacataaagaaaccatgtggggt

SEQ ID NO: 1953498 - DNA, 25 bp, Homo sapien
ttctatgaacataaagaaaccatgt

SEQ ID NO: 1953499 - DNA, 25 bp, Homo sapien
tgtgacacgtagtcctcagttctga

SEQ ID NO: 1953500 - DNA, 25 bp, Homo sapien
atgcttcagaatccagccccggagc

SEQ ID NO: 1953501 - DNA, 25 bp, Homo sapien
catcgtgtagcacatccctaaatac

SEQ ID NO: 1953502 - DNA, 25 bp, Homo sapien
gaaaaacgctgccaacatcgtgtag

SEQ ID NO: 1953503 - DNA, 25 bp, Homo sapien
cgaagatcgtcagatctattagata

SEQ ID NO: 1953504 - DNA, 25 bp, Homo sapien
gatcgtcagatctattagatatgga

SEQ ID NO: 1953505 - DNA, 25 bp, Homo sapien
ctgctacgaagatcgtcagatctat

SEQ ID NO: 1953506 - DNA, 25 bp, Homo sapien
gctacgaagatcgtcagatctatta

SEQ ID NO: 1953507 - DNA, 25 bp, Homo sapien
gatgctgtcagaagatcagctggtg

SEQ ID NO: 1953508 - DNA, 25 bp, Homo sapien
gagctggcttccctacaatgtctgc

SEQ ID NO: 1953509 - DNA, 25 bp, Homo sapien
cagtaggtgcacacgaactgtagga

SEQ ID NO: 1953510 - DNA, 25 bp, Homo sapien
taggtttatggtgctccgagccttc

SEQ ID NO: 1953511 - DNA, 25 bp, Homo sapien
caccaatttttagcttggcatgagc

SEQ ID NO: 1953512 - DNA, 25 bp, Homo sapien
ttcggcacagtggaaagtctcacac

SEQ ID NO: 1953513 - DNA, 25 bp, Homo sapien
taaccctgactgtaaagcttcggca

SEQ ID NO: 1953514 - DNA, 25 bp, Homo sapien
ggtgagagaaccacatttgctcctt

SEQ ID NO: 1953515 - DNA, 25 bp, Homo sapien
tgaaaaacagtggtcaaagccagtg

SEQ ID NO: 1953516 - DNA, 25 bp, Homo sapien
agtgctgctgaagacacccgcatcg

SEQ ID NO: 1953517 - DNA, 25 bp, Homo sapien
tgatttcccctctgacatatgaccg

SEQ ID NO: 1953518 - DNA, 25 bp, Homo sapien
ccgcatcgcctctgcatttcctgtc

SEQ ID NO: 1953519 - DNA, 25 bp, Homo sapien
tactaagtgttctgttcatgcctca

SEQ ID NO: 1953520 - DNA, 25 bp, Homo sapien
gacaggatggcactttgcccttcca

SEQ ID NO: 1953521 - DNA, 25 bp, Homo sapien
cagatggcggactatattaatttca

SEQ ID NO: 1953522 - DNA, 25 bp, Homo sapien
gcaagaccagagcttagaaaatgct

SEQ ID NO: 1953523 - DNA, 25 bp, Homo sapien
ccttcccgtaagatgagaggtcatc

SEQ ID NO: 1953524 - DNA, 25 bp, Homo sapien
ttcccgtaagatgagaggtcatcag

SEQ ID NO: 1953525 - DNA, 25 bp, Homo sapien
cttcccgtaagatgagaggtcatca

SEQ ID NO: 1953526 - DNA, 25 bp, Homo sapien
cccgtaagatgagaggtcatcagga

SEQ ID NO: 1953527 - DNA, 25 bp, Homo sapien
cgaatttcttaggaacctgtgccaa

SEQ ID NO: 1953528 - DNA, 25 bp, Homo sapien
taccacacatgttctatttgagcct

SEQ ID NO: 1953529 - DNA, 25 bp, Homo sapien
tcagtcgtaattgcattttgaaaac

SEQ ID NO: 1953530 - DNA, 25 bp, Homo sapien
catgttctatttgagcctatatttc

SEQ ID NO: 1953531 - DNA, 25 bp, Homo sapien
tcagcccgaaccatgctgtgtccac

SEQ ID NO: 1953532 - DNA, 25 bp, Homo sapien
tggttttggaacctgcagtttgcac

SEQ ID NO: 1953533 - DNA, 25 bp, Homo sapien
gcatctctgtgccatggcagatgga

SEQ ID NO: 1953534 - DNA, 25 bp, Homo sapien
gttttggaacctgcagtttgcacca

SEQ ID NO: 1953535 - DNA, 25 bp, Homo sapien
catggcagatggactgccggggctc

SEQ ID NO: 1953536 - DNA, 25 bp, Homo sapien
ctctaaccccagtctgtggggcctt

SEQ ID NO: 1953537 - DNA, 25 bp, Homo sapien
agtctgtggggccttccccttcagc

SEQ ID NO: 1953538 - DNA, 25 bp, Homo sapien
tctaaccccagtctgtggggccttc

SEQ ID NO: 1953539 - DNA, 25 bp, Homo sapien
ttcctctaaccccagtctgtggggc

SEQ ID NO: 1953540 - DNA, 25 bp, Homo sapien
cagtcccaggtcagttcccgaagtt

SEQ ID NO: 1953541 - DNA, 25 bp, Homo sapien
tgacccagtcgggggtgacgttcca

SEQ ID NO: 1953542 - DNA, 25 bp, Homo sapien
cccaggtcagttcccgaagtttcat

SEQ ID NO: 1953543 - DNA, 25 bp, Homo sapien
ttccagtcccaggtcagttcccgaa

SEQ ID NO: 1953544 - DNA, 25 bp, Homo sapien
agcggcatccatggcctcaacaaag

SEQ ID NO: 1953545 - DNA, 25 bp, Homo sapien
ttaccaaaggatgtgtcagcggcat

SEQ ID NO: 1953546 - DNA, 25 bp, Homo sapien
agatggagccttcaaaacataaatc

SEQ ID NO: 1953547 - DNA, 25 bp, Homo sapien
accaaaggatgtgtcagcggcatcc

SEQ ID NO: 1953548 - DNA, 25 bp, Homo sapien
tactgctagctttaaattatggcca

SEQ ID NO: 1953549 - DNA, 25 bp, Homo sapien
tgagtgtacgcttattagcatggca

SEQ ID NO: 1953550 - DNA, 25 bp, Homo sapien
tctttgaaactagccgtgggagaac

SEQ ID NO: 1953551 - DNA, 25 bp, Homo sapien
ggagaacccgtagttcaatcatacc

SEQ ID NO: 1953552 - DNA, 25 bp, Homo sapien
gaagcaggttctcactataatagta

SEQ ID NO: 1953553 - DNA, 25 bp, Homo sapien
tggaagtaatgcaataagtaacatg

SEQ ID NO: 1953554 - DNA, 25 bp, Homo sapien
tagtagtcactccttatagtataca

SEQ ID NO: 1953555 - DNA, 25 bp, Homo sapien
gagaatttcaaactagcagcatggg

SEQ ID NO: 1953556 - DNA, 25 bp, Homo sapien
gtaagaagcgtccacaaggccaaga

SEQ ID NO: 1953557 - DNA, 25 bp, Homo sapien
tgtcgggacatccaaaacatgccct

SEQ ID NO: 1953558 - DNA, 25 bp, Homo sapien
catttgtgtgtggatgagagcccgt

SEQ ID NO: 1953559 - DNA, 25 bp, Homo sapien
gagagcccgtgataaggaccaagga

SEQ ID NO: 1953560 - DNA, 25 bp, Homo sapien
cagcaactggcagaagcgacttttc

SEQ ID NO: 1953561 - DNA, 25 bp, Homo sapien
gcaactggcagaagcgacttttcaa

SEQ ID NO: 1953562 - DNA, 25 bp, Homo sapien
ccagcaactggcagaagcgactttt

SEQ ID NO: 1953563 - DNA, 25 bp, Homo sapien
actggcagaagcgacttttcaacat

SEQ ID NO: 1953564 - DNA, 25 bp, Homo sapien
gggactggacacgctcggcctgcat

SEQ ID NO: 1953565 - DNA, 25 bp, Homo sapien
accgcggggactggacacgctcggc

SEQ ID NO: 1953566 - DNA, 25 bp, Homo sapien
ttgacacccccgtgtctgtgttctc

SEQ ID NO: 1953567 - DNA, 25 bp, Homo sapien
ctgtgtccttgacacccccgtgtct

SEQ ID NO: 1953568 - DNA, 25 bp, Homo sapien
tgcaggtgctgcactgtaccctgag

SEQ ID NO: 1953569 - DNA, 25 bp, Homo sapien
gtcaaggtgagcgttgcctgcctgc

SEQ ID NO: 1953570 - DNA, 25 bp, Homo sapien
ctgtaccctgagttttcccggctgc

SEQ ID NO: 1953571 - DNA, 25 bp, Homo sapien
ccggctgcactctttgacaggggcc

SEQ ID NO: 1953572 - DNA, 25 bp, Homo sapien
ggccattcagaggtccactggcttt

SEQ ID NO: 1953573 - DNA, 25 bp, Homo sapien
attccttagcctaagaagtccatct

SEQ ID NO: 1953574 - DNA, 25 bp, Homo sapien
ctttctaccattccttagcctaaga

SEQ ID NO: 1953575 - DNA, 25 bp, Homo sapien
cattcagaggtccactggctttcta

SEQ ID NO: 1953576 - DNA, 25 bp, Homo sapien
aatccatctaagacctcactcaggg

SEQ ID NO: 1953577 - DNA, 25 bp, Homo sapien
atgtctgtagcaggctgagctatcc

SEQ ID NO: 1953578 - DNA, 25 bp, Homo sapien
tccaggaatccatctaagacctcac

SEQ ID NO: 1953579 - DNA, 25 bp, Homo sapien
tgtagcaggctgagctatcccatct

SEQ ID NO: 1953580 - DNA, 25 bp, Homo sapien
gggaacagatcaaacaaataggcac

SEQ ID NO: 1953581 - DNA, 25 bp, Homo sapien
tcaaaggggaacagatcaaacaaat

SEQ ID NO: 1953582 - DNA, 25 bp, Homo sapien
agcatacacacacgaacaccaaggt

SEQ ID NO: 1953583 - DNA, 25 bp, Homo sapien
cacgaacaccaaggtgccaggagac

SEQ ID NO: 1953584 - DNA, 25 bp, Homo sapien
cgtgactcgttcactaggtgtggga

SEQ ID NO: 1953585 - DNA, 25 bp, Homo sapien
caagccctggagtcatgacatcagg

SEQ ID NO: 1953586 - DNA, 25 bp, Homo sapien
tcatgacatcaggaggctgtcgtga

SEQ ID NO: 1953587 - DNA, 25 bp, Homo sapien
ctcagcaggggtggagaactcctgt

SEQ ID NO: 1953588 - DNA, 25 bp, Homo sapien
cccagccactctagtattatacgcc

SEQ ID NO: 1953589 - DNA, 25 bp, Homo sapien
tgacccagccactctagtattatac

SEQ ID NO: 1953590 - DNA, 25 bp, Homo sapien
gacccagccactctagtattatacg

SEQ ID NO: 1953591 - DNA, 25 bp, Homo sapien
cctgacccagccactctagtattat

SEQ ID NO: 1953592 - DNA, 25 bp, Homo sapien
agacctggagaacctgagatctctg

SEQ ID NO: 1953593 - DNA, 25 bp, Homo sapien
catctccccaacactatgcaccttg

SEQ ID NO: 1953594 - DNA, 25 bp, Homo sapien
tgcacatctccccaacactatgcac

SEQ ID NO: 1953595 - DNA, 25 bp, Homo sapien
ccaacactatgcaccttggagctcc

SEQ ID NO: 1953596 - DNA, 25 bp, Homo sapien
ggtttagatgaatgatccagacact

SEQ ID NO: 1953597 - DNA, 25 bp, Homo sapien
tagatgaatgatccagacactctac

SEQ ID NO: 1953598 - DNA, 25 bp, Homo sapien
tttagatgaatgatccagacactct

SEQ ID NO: 1953599 - DNA, 25 bp, Homo sapien
gtttagatgaatgatccagacactc

SEQ ID NO: 1953600 - DNA, 25 bp, Homo sapien
agtgtgcagaatgacagccagcccc

SEQ ID NO: 1953601 - DNA, 25 bp, Homo sapien
ggggtcgtcgcctccagttgcattc

SEQ ID NO: 1953602 - DNA, 25 bp, Homo sapien
ctgctgtcagtgtgcagaatgacag

SEQ ID NO: 1953603 - DNA, 25 bp, Homo sapien
aggtccacccgagtcaagctctggg

SEQ ID NO: 1953604 - DNA, 25 bp, Homo sapien
caatgtgaacaatgctctgctgatc

SEQ ID NO: 1953605 - DNA, 25 bp, Homo sapien
aatgctctgctgatccaggtcacaa

SEQ ID NO: 1953606 - DNA, 25 bp, Homo sapien
tttctccacggtctctgcacaatgt

SEQ ID NO: 1953607 - DNA, 25 bp, Homo sapien
ccacggtctctgcacaatgtgaaca

SEQ ID NO: 1953608 - DNA, 25 bp, Homo sapien
caacttaggtgctcctttgcccaca

SEQ ID NO: 1953609 - DNA, 25 bp, Homo sapien
atcattacactggtggggaagcaag

SEQ ID NO: 1953610 - DNA, 25 bp, Homo sapien
gggcaccaacacacacatcattaca

SEQ ID NO: 1953611 - DNA, 25 bp, Homo sapien
acatggcccagacctgagtccaacc

SEQ ID NO: 1953612 - DNA, 25 bp, Homo sapien
ctgttcacacatggcccagacctga

SEQ ID NO: 1953613 - DNA, 25 bp, Homo sapien
cacacatggcccagacctgagtcca

SEQ ID NO: 1953614 - DNA, 25 bp, Homo sapien
atggcccagacctgagtccaaccca

SEQ ID NO: 1953615 - DNA, 25 bp, Homo sapien
actcacagcatgaagcagggacccg

SEQ ID NO: 1953616 - DNA, 25 bp, Homo sapien
ggtgaccaagtgcagccacactcac

SEQ ID NO: 1953617 - DNA, 25 bp, Homo sapien
acagcatgaagcagggacccgcagc

SEQ ID NO: 1953618 - DNA, 25 bp, Homo sapien
aggtgaccaagtgcagccacactca

SEQ ID NO: 1953619 - DNA, 25 bp, Homo sapien
ggaagactgcacttatcacgtcgta

SEQ ID NO: 1953620 - DNA, 25 bp, Homo sapien
tcacgtcgtattgtagtttctttgt

SEQ ID NO: 1953621 - DNA, 25 bp, Homo sapien
ctcgcagactccggatgctggtgct

SEQ ID NO: 1953622 - DNA, 25 bp, Homo sapien
tctgtacctctggagatcccgtcac

SEQ ID NO: 1953623 - DNA, 25 bp, Homo sapien
tgtaccactgtctatggtctgtaaa

SEQ ID NO: 1953624 - DNA, 25 bp, Homo sapien
tgtctatggtctgtaaagtaggtag

SEQ ID NO: 1953625 - DNA, 25 bp, Homo sapien
tcttcaatatcttcagtatcattca

SEQ ID NO: 1953626 - DNA, 25 bp, Homo sapien
agtaggtagggctgtcttcaatatc

SEQ ID NO: 1953627 - DNA, 25 bp, Homo sapien
tgaaaccagtatagtgcgtgcttgt

SEQ ID NO: 1953628 - DNA, 25 bp, Homo sapien
tgggtagtacctcctttatgacaga

SEQ ID NO: 1953629 - DNA, 25 bp, Homo sapien
tcttcgcaattacactgaaaccagt

SEQ ID NO: 1953630 - DNA, 25 bp, Homo sapien
tactcttgacataacatctgggcac

SEQ ID NO: 1953631 - DNA, 25 bp, Homo sapien
taccagtctacagaagagattgcct

SEQ ID NO: 1953632 - DNA, 25 bp, Homo sapien
cctggaacaagcctcttgatgttat

SEQ ID NO: 1953633 - DNA, 25 bp, Homo sapien
ggcatcgtctactgccaggcctcgt

SEQ ID NO: 1953634 - DNA, 25 bp, Homo sapien
cagctggtcataattaagcttcagg

SEQ ID NO: 1953635 - DNA, 25 bp, Homo sapien
cgctacgacaacaatctccaaagac

SEQ ID NO: 1953636 - DNA, 25 bp, Homo sapien
cgacaacaatctccaaagacgtttt

SEQ ID NO: 1953637 - DNA, 25 bp, Homo sapien
tacgacaacaatctccaaagacgtt

SEQ ID NO: 1953638 - DNA, 25 bp, Homo sapien
gctacgacaacaatctccaaagacg

SEQ ID NO: 1953639 - DNA, 25 bp, Homo sapien
aagcctacgcttgcccttggagttt

SEQ ID NO: 1953640 - DNA, 25 bp, Homo sapien
tgacttctgcataggtggctgccac

SEQ ID NO: 1953641 - DNA, 25 bp, Homo sapien
caggcagggacaccatctgatggca

SEQ ID NO: 1953642 - DNA, 25 bp, Homo sapien
tgtgggaacctcactggcaatcaga

SEQ ID NO: 1953643 - DNA, 25 bp, Homo sapien
cctgactgagggtgtcgggtaattt

SEQ ID NO: 1953644 - DNA, 25 bp, Homo sapien
gctggagagagtaccagacacccct

SEQ ID NO: 1953645 - DNA, 25 bp, Homo sapien
tttggtaatgctggttcacaagaaa

SEQ ID NO: 1953646 - DNA, 25 bp, Homo sapien
aagatgtacaatggtcagagatggc

SEQ ID NO: 1953647 - DNA, 25 bp, Homo sapien
cctatggccaacgaggcagagctaa

SEQ ID NO: 1953648 - DNA, 25 bp, Homo sapien
caacaaaaccagctagcgggatggt

SEQ ID NO: 1953649 - DNA, 25 bp, Homo sapien
cagctgatgctaccgatggacacga

SEQ ID NO: 1953650 - DNA, 25 bp, Homo sapien
actatgtgtccggtactacgccagg

SEQ ID NO: 1953651 - DNA, 25 bp, Homo sapien
tcttgattgacctatgctctcaggc

SEQ ID NO: 1953652 - DNA, 25 bp, Homo sapien
tacagttcagtagtgctaaggacca

SEQ ID NO: 1953653 - DNA, 25 bp, Homo sapien
gatgatatcacatatataccttaaa

SEQ ID NO: 1953654 - DNA, 25 bp, Homo sapien
atttgccatcttacccatctctaag

SEQ ID NO: 1953655 - DNA, 25 bp, Homo sapien
cttggccccatacgggctgtgagga

SEQ ID NO: 1953656 - DNA, 25 bp, Homo sapien
tatgcagcatttcccgtggagcctc

SEQ ID NO: 1953657 - DNA, 25 bp, Homo sapien
agcaggtctcgatccatcatcattc

SEQ ID NO: 1953658 - DNA, 25 bp, Homo sapien
gtggagcctctcagtctcgctggca

SEQ ID NO: 1953659 - DNA, 25 bp, Homo sapien
tatattaaggctaggttctagacgc

SEQ ID NO: 1953660 - DNA, 25 bp, Homo sapien
ttatattaaggctaggttctagacg

SEQ ID NO: 1953661 - DNA, 25 bp, Homo sapien
ctttatattaaggctaggttctaga

SEQ ID NO: 1953662 - DNA, 25 bp, Homo sapien
atattaaggctaggttctagacgca

SEQ ID NO: 1953663 - DNA, 25 bp, Homo sapien
gactgggtctgtggaataaagcctt

SEQ ID NO: 1953664 - DNA, 25 bp, Homo sapien
taaagccttagccatcccgtgtggt

SEQ ID NO: 1953665 - DNA, 25 bp, Homo sapien
cccgtgtggttgttgtttgctacta

SEQ ID NO: 1953666 - DNA, 25 bp, Homo sapien
tgtttgctactacagcagtagccat

SEQ ID NO: 1953667 - DNA, 25 bp, Homo sapien
caatcaggagtattgtaacctttgt

SEQ ID NO: 1953668 - DNA, 25 bp, Homo sapien
tttttacaatcaggagtattgtaac

SEQ ID NO: 1953669 - DNA, 25 bp, Homo sapien
tacaatcaggagtattgtaaccttt

SEQ ID NO: 1953670 - DNA, 25 bp, Homo sapien
tttacaatcaggagtattgtaacct

SEQ ID NO: 1953671 - DNA, 25 bp, Homo sapien
tccattattatacaagattgaaagg

SEQ ID NO: 1953672 - DNA, 25 bp, Homo sapien
tcttagatcttatatccaaatggga

SEQ ID NO: 1953673 - DNA, 25 bp, Homo sapien
gccaatttgacaggttataataatt

SEQ ID NO: 1953674 - DNA, 25 bp, Homo sapien
cttttgggattacagaatgtcattc

SEQ ID NO: 1953675 - DNA, 25 bp, Homo sapien
tgagtttagtcaaaagcaatagcct

SEQ ID NO: 1953676 - DNA, 25 bp, Homo sapien
tctggtcggttggagcctagtacat

SEQ ID NO: 1953677 - DNA, 25 bp, Homo sapien
gttgaagagggaccagttgacagtt

SEQ ID NO: 1953678 - DNA, 25 bp, Homo sapien
ggtcagagtctctatgaatcaatta

SEQ ID NO: 1953679 - DNA, 25 bp, Homo sapien
ctctgtgccacgtactgtgctcggg

SEQ ID NO: 1953680 - DNA, 25 bp, Homo sapien
ggacagatgtcttaacaacactgct

SEQ ID NO: 1953681 - DNA, 25 bp, Homo sapien
tgctcggggagggacatgaaccacc

SEQ ID NO: 1953682 - DNA, 25 bp, Homo sapien
tcggggagggacatgaaccacctca

SEQ ID NO: 1953683 - DNA, 25 bp, Homo sapien
tgcttgacgtggatttcgaaaatct

SEQ ID NO: 1953684 - DNA, 25 bp, Homo sapien
tgacgtggatttcgaaaatctgcaa

SEQ ID NO: 1953685 - DNA, 25 bp, Homo sapien
gcatgcttgacgtggatttcgaaaa

SEQ ID NO: 1953686 - DNA, 25 bp, Homo sapien
tgcgcatgcttgacgtggatttcga

SEQ ID NO: 1953687 - DNA, 25 bp, Homo sapien
tgcgcatgcttgacgtggatttcga

SEQ ID NO: 1953688 - DNA, 25 bp, Homo sapien
gacgtggatttcgaacatctgcaat

SEQ ID NO: 1953689 - DNA, 25 bp, Homo sapien
tgacgtggatttcgaaaatctgcaa

SEQ ID NO: 1953690 - DNA, 25 bp, Homo sapien
taattttcttactgcgcatgcttga

SEQ ID NO: 1953691 - DNA, 25 bp, Homo sapien
tgcgcatgcttgacgtggatttcga

SEQ ID NO: 1953692 - DNA, 25 bp, Homo sapien
taattttcttactgcgcatgcttga

SEQ ID NO: 1953693 - DNA, 25 bp, Homo sapien
gacgtggatttcgaacatctgcaat

SEQ ID NO: 1953694 - DNA, 25 bp, Homo sapien
tgacgtggatttcgaaaatctgcaa

SEQ ID NO: 1953695 - DNA, 25 bp, Homo sapien
catgctggctaggagttggtctcaa

SEQ ID NO: 1953696 - DNA, 25 bp, Homo sapien
tgctggctaggagttggtctcaaac

SEQ ID NO: 1953697 - DNA, 25 bp, Homo sapien
tcctttctcagtcccctgagtggct

SEQ ID NO: 1953698 - DNA, 25 bp, Homo sapien
tcaccatgctggctaggagttggtc

SEQ ID NO: 1953699 - DNA, 25 bp, Homo sapien
gaggatggcatatctagagcaaggc

SEQ ID NO: 1953700 - DNA, 25 bp, Homo sapien
gcaaggctcaatctagaaggtgtct

SEQ ID NO: 1953701 - DNA, 25 bp, Homo sapien
ttgtgtcatatcctaccgtgaggat

SEQ ID NO: 1953702 - DNA, 25 bp, Homo sapien
catatcctaccgtgaggatggcata

SEQ ID NO: 1953703 - DNA, 25 bp, Homo sapien
catgttttttgccttaaggagtaga

SEQ ID NO: 1953704 - DNA, 25 bp, Homo sapien
tttcatctagtccagaatcggcact

SEQ ID NO: 1953705 - DNA, 25 bp, Homo sapien
gtccagaatcggcacttggagcttc

SEQ ID NO: 1953706 - DNA, 25 bp, Homo sapien
catagacatcacctattttaatagt

SEQ ID NO: 1953707 - DNA, 25 bp, Homo sapien
ccctgcgtaatagacttagcgtagc

SEQ ID NO: 1953708 - DNA, 25 bp, Homo sapien
tgtttctgaaatcgaagatgcggca

SEQ ID NO: 1953709 - DNA, 25 bp, Homo sapien
tgcggcagaaccatcaattccaggt

SEQ ID NO: 1953710 - DNA, 25 bp, Homo sapien
ttagcgtagctacaattggttgtgc

SEQ ID NO: 1953711 - DNA, 25 bp, Homo sapien
catcctagtaaaaagtcgtgacttt

SEQ ID NO: 1953712 - DNA, 25 bp, Homo sapien
caaattctaaatcaaagccaggaca

SEQ ID NO: 1953713 - DNA, 25 bp, Homo sapien
catttatagcactcttgatgccacg

SEQ ID NO: 1953714 - DNA, 25 bp, Homo sapien
tgccacgcgttgactgtgagctagg

SEQ ID NO: 1953715 - DNA, 25 bp, Homo sapien
tcaaatggaataagtaaggtagaaa

SEQ ID NO: 1953716 - DNA, 25 bp, Homo sapien
gaatccttcttcgttaagattcaaa

SEQ ID NO: 1953717 - DNA, 25 bp, Homo sapien
gacacagaaattgtgccttgctgct

SEQ ID NO: 1953718 - DNA, 25 bp, Homo sapien
ttattcgaatccttcttcgttaaga

SEQ ID NO: 1953719 - DNA, 25 bp, Homo sapien
aatcacacgcaactggtcagccgga

SEQ ID NO: 1953720 - DNA, 25 bp, Homo sapien
gcaaccacctccttgagctggaaga

SEQ ID NO: 1953721 - DNA, 25 bp, Homo sapien
ggtgtcagaatcgacctccactggg

SEQ ID NO: 1953722 - DNA, 25 bp, Homo sapien
gaaaccatggctggagttgaacctg

SEQ ID NO: 1953723 - DNA, 25 bp, Homo sapien
tgtggtctcttacctagaagggtgc

SEQ ID NO: 1953724 - DNA, 25 bp, Homo sapien
tccggccagccaagtactgagcttg

SEQ ID NO: 1953725 - DNA, 25 bp, Homo sapien
gcagattggatggtagcccagctga

SEQ ID NO: 1953726 - DNA, 25 bp, Homo sapien
tttagtgcagatatgaggtcctacc

SEQ ID NO: 1953727 - DNA, 25 bp, Homo sapien
tctggcctagtatataacctccctg

SEQ ID NO: 1953728 - DNA, 25 bp, Homo sapien
tgttgtggctgaaactccgcttaaa

SEQ ID NO: 1953729 - DNA, 25 bp, Homo sapien
ggctgtaaacatcaaagacgtgatt

SEQ ID NO: 1953730 - DNA, 25 bp, Homo sapien
aggctgcggctcagagttcttcaaa

SEQ ID NO: 1953731 - DNA, 25 bp, Homo sapien
tcacgatattcgagtctgggtcctc

SEQ ID NO: 1953732 - DNA, 25 bp, Homo sapien
taatgtgaacccctatcccaaggat

SEQ ID NO: 1953733 - DNA, 25 bp, Homo sapien
ggcctgagggtatgcactgattcca

SEQ ID NO: 1953734 - DNA, 25 bp, Homo sapien
gcccaacttttgacggatgtgtaag

SEQ ID NO: 1953735 - DNA, 25 bp, Homo sapien
tcacagggctgtctatagaaggaag

SEQ ID NO: 1953736 - DNA, 25 bp, Homo sapien
tcaaattaaggaaacgcccctatgc

SEQ ID NO: 1953737 - DNA, 25 bp, Homo sapien
gcccctatgcctgatcctatttgga

SEQ ID NO: 1953738 - DNA, 25 bp, Homo sapien
gaatctccaggcatgcatgttttag

SEQ ID NO: 1953739 - DNA, 25 bp, Homo sapien
ccgacgcatagcaagggacaaatag

SEQ ID NO: 1953740 - DNA, 25 bp, Homo sapien
tggtgattgacactagcccctgcca

SEQ ID NO: 1953741 - DNA, 25 bp, Homo sapien
caggctcttgggcattaggaatcca

SEQ ID NO: 1953742 - DNA, 25 bp, Homo sapien
tctgtggagatccaggataagccac

SEQ ID NO: 1953743 - DNA, 25 bp, Homo sapien
ctagggagaaccagtcttttgggca

SEQ ID NO: 1953744 - DNA, 25 bp, Homo sapien
tagcttgttgaggtgaccagccgca

SEQ ID NO: 1953745 - DNA, 25 bp, Homo sapien
ggcccattcgtcacagctccttgga

SEQ ID NO: 1953746 - DNA, 25 bp, Homo sapien
gcagggtccacaccgggtagcttgt

SEQ ID NO: 1953747 - DNA, 25 bp, Homo sapien
atttctatcgccaacctgctgcagc

SEQ ID NO: 1953748 - DNA, 25 bp, Homo sapien
aaaatcaatggacatttctatcgcc

SEQ ID NO: 1953749 - DNA, 25 bp, Homo sapien
tcccttgttcggccagcaggataaa

SEQ ID NO: 1953750 - DNA, 25 bp, Homo sapien
ggacatttctatcgccaacctgctg

SEQ ID NO: 1953751 - DNA, 25 bp, Homo sapien
gaaattagattctaacatgttcaac

SEQ ID NO: 1953752 - DNA, 25 bp, Homo sapien
cctgttgtctctgggagtaagtcca

SEQ ID NO: 1953753 - DNA, 25 bp, Homo sapien
actgtcttgtttcacaccctccatg

SEQ ID NO: 1953754 - DNA, 25 bp, Homo sapien
gggatacgtaagttctttcctgatc

SEQ ID NO: 1953755 - DNA, 25 bp, Homo sapien
tattcaaatctagagcagctgttcc

SEQ ID NO: 1953756 - DNA, 25 bp, Homo sapien
caactctgtgccctggtaaatcttt

SEQ ID NO: 1953757 - DNA, 25 bp, Homo sapien
ctgaggcaactctgtgccctggtaa

SEQ ID NO: 1953758 - DNA, 25 bp, Homo sapien
tgttcctcctctaggtacccacagc

SEQ ID NO: 1953759 - DNA, 25 bp, Homo sapien
tgtcacacctcttcaaatctgtttc

SEQ ID NO: 1953760 - DNA, 25 bp, Homo sapien
tcttgtccactagactcttgcaggc

SEQ ID NO: 1953761 - DNA, 25 bp, Homo sapien
tagactcttgcaggccgtatgatac

SEQ ID NO: 1953762 - DNA, 25 bp, Homo sapien
gggctttcctttgtcatagcatttg

SEQ ID NO: 1953763 - DNA, 25 bp, Homo sapien
cccagtaagctgcttctttgcgcta

SEQ ID NO: 1953764 - DNA, 25 bp, Homo sapien
cagtcgccagttccgtctttgcact

SEQ ID NO: 1953765 - DNA, 25 bp, Homo sapien
tctttgcgctaatgcagcgattgct

SEQ ID NO: 1953766 - DNA, 25 bp, Homo sapien
ccttcacagctgatgactgaattca

SEQ ID NO: 1953767 - DNA, 25 bp, Homo sapien
gggaaaataacctgtgtgaggcttg

SEQ ID NO: 1953768 - DNA, 25 bp, Homo sapien
aaactgtgtagaccatcaagcacca

SEQ ID NO: 1953769 - DNA, 25 bp, Homo sapien
atgaaactgtgtagaccatcaagca

SEQ ID NO: 1953770 - DNA, 25 bp, Homo sapien
ccaggggaaaataacctgtgtgagg

SEQ ID NO: 1953771 - DNA, 25 bp, Homo sapien
cttaatcgaaggtaggaggagccag

SEQ ID NO: 1953772 - DNA, 25 bp, Homo sapien
tgcatatactaaggcttgttctctg

SEQ ID NO: 1953773 - DNA, 25 bp, Homo sapien
aactttgcttcagagggcagtttct

SEQ ID NO: 1953774 - DNA, 25 bp, Homo sapien
gggcagtttctagcaaggatgagca

SEQ ID NO: 1953775 - DNA, 25 bp, Homo sapien
aaccttctaacattctttacaacag

SEQ ID NO: 1953776 - DNA, 25 bp, Homo sapien
accttctaacattctttacaacagc

SEQ ID NO: 1953777 - DNA, 25 bp, Homo sapien
ctacttcttcaatgaccagtcttcc

SEQ ID NO: 1953778 - DNA, 25 bp, Homo sapien
atgaccagtcttccttccccagttc

SEQ ID NO: 1953779 - DNA, 25 bp, Homo sapien
gactaccaatcctaatgggttggga

SEQ ID NO: 1953780 - DNA, 25 bp, Homo sapien
cggagttggctgtgttcatgttccc

SEQ ID NO: 1953781 - DNA, 25 bp, Homo sapien
cccaagctatcacttgctcggtctt

SEQ ID NO: 1953782 - DNA, 25 bp, Homo sapien
gggatggctggactaccaatcctaa

SEQ ID NO: 1953783 - DNA, 25 bp, Homo sapien
actgtcttcccactttaggcccaca

SEQ ID NO: 1953784 - DNA, 25 bp, Homo sapien
tgtcttcccactttaggcccacagt

SEQ ID NO: 1953785 - DNA, 25 bp, Homo sapien
gaactgtcttcccactttaggccca

SEQ ID NO: 1953786 - DNA, 25 bp, Homo sapien
ctgtcttcccactttaggcccacag

SEQ ID NO: 1953787 - DNA, 25 bp, Homo sapien
tgtgatcgcatctttcccactgcca

SEQ ID NO: 1953788 - DNA, 25 bp, Homo sapien
gtgtgatcgcatctttcccactgcc

SEQ ID NO: 1953789 - DNA, 25 bp, Homo sapien
ctccaaggcaatctgccggcaggga

SEQ ID NO: 1953790 - DNA, 25 bp, Homo sapien
aatctgccggcagggatctccctgt

SEQ ID NO: 1953791 - DNA, 25 bp, Homo sapien
gtcattttttctcctctctattgca

SEQ ID NO: 1953792 - DNA, 25 bp, Homo sapien
tcattttttctcctctctattgcac

SEQ ID NO: 1953793 - DNA, 25 bp, Homo sapien
tcaaatgtccttgtcattttttctc

SEQ ID NO: 1953794 - DNA, 25 bp, Homo sapien
aatgtccttgtcattttttctcctc

SEQ ID NO: 1953795 - DNA, 25 bp, Homo sapien
ctacagcttctttgtctacaggaaa

SEQ ID NO: 1953796 - DNA, 25 bp, Homo sapien
agcttctttgtctacaggaaaaaat

SEQ ID NO: 1953797 - DNA, 25 bp, Homo sapien
acagcttctttgtctacaggaaaaa

SEQ ID NO: 1953798 - DNA, 25 bp, Homo sapien
tacagcttctttgtctacaggaaaa

SEQ ID NO: 1953799 - DNA, 25 bp, Homo sapien
cattcctttgttttacactcatatt

SEQ ID NO: 1953800 - DNA, 25 bp, Homo sapien
ctgaataccagggacacattccttt

SEQ ID NO: 1953801 - DNA, 25 bp, Homo sapien
tgaataccagggacacattcctttg

SEQ ID NO: 1953802 - DNA, 25 bp, Homo sapien
cctttgttttacactcatattccag

SEQ ID NO: 1953803 - DNA, 25 bp, Homo sapien
agccatcattttgcagccgtttagc

SEQ ID NO: 1953804 - DNA, 25 bp, Homo sapien
tttgcagccgtttagcgttaaacaa

SEQ ID NO: 1953805 - DNA, 25 bp, Homo sapien
catcattttgcagccgtttagcgtt

SEQ ID NO: 1953806 - DNA, 25 bp, Homo sapien
cattttgcagccgtttagcgttaaa

SEQ ID NO: 1953807 - DNA, 25 bp, Homo sapien
tatgggcgtcctatgactatcctgg

SEQ ID NO: 1953808 - DNA, 25 bp, Homo sapien
gatttgactaatgattcctgtgccc

SEQ ID NO: 1953809 - DNA, 25 bp, Homo sapien
ttttgtctagcaagagagtctggcc

SEQ ID NO: 1953810 - DNA, 25 bp, Homo sapien
tgtgcccttgggttgactaaaacgc

SEQ ID NO: 1953811 - DNA, 25 bp, Homo sapien
ttaggtggtgcaagtaagttgcttg

SEQ ID NO: 1953812 - DNA, 25 bp, Homo sapien
tggtgcaagtaagttgcttgccaga

SEQ ID NO: 1953813 - DNA, 25 bp, Homo sapien
ggtggtgcaagtaagttgcttgcca

SEQ ID NO: 1953814 - DNA, 25 bp, Homo sapien
gtaagttgcttgccagagcagccat

SEQ ID NO: 1953815 - DNA, 25 bp, Homo sapien
tataaggtgtccacctctatgggca

SEQ ID NO: 1953816 - DNA, 25 bp, Homo sapien
aaggtgtccacctctatgggcagca

SEQ ID NO: 1953817 - DNA, 25 bp, Homo sapien
ctataaggtgtccacctctatgggc

SEQ ID NO: 1953818 - DNA, 25 bp, Homo sapien
gtgtccacctctatgggcagcagca

SEQ ID NO: 1953819 - DNA, 25 bp, Homo sapien
tgtgcaacacagatgctcaaaaggt

SEQ ID NO: 1953820 - DNA, 25 bp, Homo sapien
tatgatcaatgttcctgtagtgtga

SEQ ID NO: 1953821 - DNA, 25 bp, Homo sapien
taatcatgtccattgagtgaaagga

SEQ ID NO: 1953822 - DNA, 25 bp, Homo sapien
actttaaaggtaggctgcaaatacg

SEQ ID NO: 1953823 - DNA, 25 bp, Homo sapien
tattctccaggataatttaacagac

SEQ ID NO: 1953824 - DNA, 25 bp, Homo sapien
ataaacagggctactaggcattttc

SEQ ID NO: 1953825 - DNA, 25 bp, Homo sapien
tgtacgaaagttaggcaatgcttcc

SEQ ID NO: 1953826 - DNA, 25 bp, Homo sapien
taggccaaacctggcaagtcgtcta

SEQ ID NO: 1953827 - DNA, 25 bp, Homo sapien
gaaacagtgtaagagctcttttagc

SEQ ID NO: 1953828 - DNA, 25 bp, Homo sapien
cccagggtatcaattccttggtata

SEQ ID NO: 1953829 - DNA, 25 bp, Homo sapien
tcattaagaaaccaattaccacagg

SEQ ID NO: 1953830 - DNA, 25 bp, Homo sapien
tattttaaccacagagtccaatagc

SEQ ID NO: 1953831 - DNA, 25 bp, Homo sapien
cccactgataagatgaggctgaata

SEQ ID NO: 1953832 - DNA, 25 bp, Homo sapien
gatttgccttaggatgcaaggaagc

SEQ ID NO: 1953833 - DNA, 25 bp, Homo sapien
ggagaagagttcatctgccaagact

SEQ ID NO: 1953834 - DNA, 25 bp, Homo sapien
gaagtgatgggatacaaagcaaagc

SEQ ID NO: 1953835 - DNA, 25 bp, Homo sapien
tagctagctagaactttgtaccctt

SEQ ID NO: 1953836 - DNA, 25 bp, Homo sapien
gatcagcatcccatgcaattattcc

SEQ ID NO: 1953837 - DNA, 25 bp, Homo sapien
gcatcccatgcaattattccttctg

SEQ ID NO: 1953838 - DNA, 25 bp, Homo sapien
actatgatcagcatcccatgcaatt

SEQ ID NO: 1953839 - DNA, 25 bp, Homo sapien
cacagcagacttgtacagcttgaag

SEQ ID NO: 1953840 - DNA, 25 bp, Homo sapien
cactttgagagctgcatgggaggtc

SEQ ID NO: 1953841 - DNA, 25 bp, Homo sapien
gaaatcacatcggaagctgaagcca

SEQ ID NO: 1953842 - DNA, 25 bp, Homo sapien
catggtttctaatatcggagttcaa

SEQ ID NO: 1953843 - DNA, 25 bp, Homo sapien
tagtttacatggcggcatggcagcc

SEQ ID NO: 1953844 - DNA, 25 bp, Homo sapien
tttacatggcggcatggcagccagt

SEQ ID NO: 1953845 - DNA, 25 bp, Homo sapien
ttagtttacatggcggcatggcagc

SEQ ID NO: 1953846 - DNA, 25 bp, Homo sapien
agtttacatggcggcatggcagcca

SEQ ID NO: 1953847 - DNA, 25 bp, Homo sapien
cattgtaagcatgatactgtcttac

SEQ ID NO: 1953848 - DNA, 25 bp, Homo sapien
caggttcccaagttgatgatgagca

SEQ ID NO: 1953849 - DNA, 25 bp, Homo sapien
ctttgcaaccagaattgctaacttg

SEQ ID NO: 1953850 - DNA, 25 bp, Homo sapien
acttgtaaagccaaaaatcaacagg

SEQ ID NO: 1953851 - DNA, 25 bp, Homo sapien
gactggtgtccccagaacagtctct

SEQ ID NO: 1953852 - DNA, 25 bp, Homo sapien
tctttccgtgggaccctgaatgtgc

SEQ ID NO: 1953853 - DNA, 25 bp, Homo sapien
gttttgtcccacttgctgaatgcag

SEQ ID NO: 1953854 - DNA, 25 bp, Homo sapien
aatgcagaggcccagtgcaccccat

SEQ ID NO: 1953855 - DNA, 25 bp, Homo sapien
gctgttctccagggttggaatgcat

SEQ ID NO: 1953856 - DNA, 25 bp, Homo sapien
tttggctgttctccagggttggaat

SEQ ID NO: 1953857 - DNA, 25 bp, Homo sapien
tggctgttctccagggttggaatgc

SEQ ID NO: 1953858 - DNA, 25 bp, Homo sapien
ctgggctttggctgttctccagggt

SEQ ID NO: 1953859 - DNA, 25 bp, Homo sapien
caatgtatatctttgtcaactaggt

SEQ ID NO: 1953860 - DNA, 25 bp, Homo sapien
ctgaaacctgaaacggggcaacctg

SEQ ID NO: 1953861 - DNA, 25 bp, Homo sapien
cattttgaagacatggtcataaatt

SEQ ID NO: 1953862 - DNA, 25 bp, Homo sapien
ttttgaagacatggtcataaattat

SEQ ID NO: 1953863 - DNA, 25 bp, Homo sapien
gggagcaccataagtggctgtgtat

SEQ ID NO: 1953864 - DNA, 25 bp, Homo sapien
gttcctaaagaactcaagcgttgac

SEQ ID NO: 1953865 - DNA, 25 bp, Homo sapien
catccacggtcagaccaacacagtg

SEQ ID NO: 1953866 - DNA, 25 bp, Homo sapien
taagagatgagacgatgaggacaga

SEQ ID NO: 1953867 - DNA, 25 bp, Homo sapien
cactcataggttcatcgtagcaccc

SEQ ID NO: 1953868 - DNA, 25 bp, Homo sapien
gacacaggcactcataggttcatcg

SEQ ID NO: 1953869 - DNA, 25 bp, Homo sapien
ttcatcgtagcacccttcacaatag

SEQ ID NO: 1953870 - DNA, 25 bp, Homo sapien
taggttcatcgtagcacccttcaca

SEQ ID NO: 1953871 - DNA, 25 bp, Homo sapien
ggaacctctgctttgcatgcaatag

SEQ ID NO: 1953872 - DNA, 25 bp, Homo sapien
agtctgcgtgtgtctctcttcgccc

SEQ ID NO: 1953873 - DNA, 25 bp, Homo sapien
tgcaatagagggtaagcaagcctgt

SEQ ID NO: 1953874 - DNA, 25 bp, Homo sapien
gcccatcattaacgtgtgcattcaa

SEQ ID NO: 1953875 - DNA, 25 bp, Homo sapien
ggcactccgtagatatatggcttta

SEQ ID NO: 1953876 - DNA, 25 bp, Homo sapien
ttttcaaagatcagctggcactccg

SEQ ID NO: 1953877 - DNA, 25 bp, Homo sapien
gctttcggcaggatggtcgttttaa

SEQ ID NO: 1953878 - DNA, 25 bp, Homo sapien
tgagaacatctcagaatacgcagag

SEQ ID NO: 1953879 - DNA, 25 bp, Homo sapien
ccatgaggatggcttaacaagggtg

SEQ ID NO: 1953880 - DNA, 25 bp, Homo sapien
catgaaggcaagactggcaatttac

SEQ ID NO: 1953881 - DNA, 25 bp, Homo sapien
agggtgttgccagcccacaaatgca

SEQ ID NO: 1953882 - DNA, 25 bp, Homo sapien
tatacaagccaaacctagcaggaat

SEQ ID NO: 1953883 - DNA, 25 bp, Homo sapien
tcatctgcagcacaagtcagtgtga

SEQ ID NO: 1953884 - DNA, 25 bp, Homo sapien
catctgcagcacaagtcagtgtgat

SEQ ID NO: 1953885 - DNA, 25 bp, Homo sapien
ctgtcatctgcagcacaagtcagtg

SEQ ID NO: 1953886 - DNA, 25 bp, Homo sapien
tgtcatctgcagcacaagtcagtgt

SEQ ID NO: 1953887 - DNA, 25 bp, Homo sapien
gggtaattgaggatatagatgaaaa

SEQ ID NO: 1953888 - DNA, 25 bp, Homo sapien
tggatgactggtataacagagttca

SEQ ID NO: 1953889 - DNA, 25 bp, Homo sapien
cctagccctgtagcctcaataaaca

SEQ ID NO: 1953890 - DNA, 25 bp, Homo sapien
tgaaactcagaccttcctagccctg

SEQ ID NO: 1953891 - DNA, 25 bp, Homo sapien
gttatcctgcaactaagctcttgtg

SEQ ID NO: 1953892 - DNA, 25 bp, Homo sapien
tgccctctgggcttattcaatgtgg

SEQ ID NO: 1953893 - DNA, 25 bp, Homo sapien
gcacggcctaatccctgaagtgtca

SEQ ID NO: 1953894 - DNA, 25 bp, Homo sapien
gtcagaagggcttttcatgttccag

SEQ ID NO: 1953895 - DNA, 25 bp, Homo sapien
aggggcactattaccaccacttcac

SEQ ID NO: 1953896 - DNA, 25 bp, Homo sapien
gaaggggcactattaccaccacttc

SEQ ID NO: 1953897 - DNA, 25 bp, Homo sapien
tcacttcagttccggttcctccaga

SEQ ID NO: 1953898 - DNA, 25 bp, Homo sapien
ttcctccagagtaaaacccctctga

SEQ ID NO: 1953899 - DNA, 25 bp, Homo sapien
tcctactgccttagagttcctagca

SEQ ID NO: 1953900 - DNA, 25 bp, Homo sapien
ggtcctgacaccctaatctatcatc

SEQ ID NO: 1953901 - DNA, 25 bp, Homo sapien
tcattactcagagcaaaacctgaat

SEQ ID NO: 1953902 - DNA, 25 bp, Homo sapien
ctagcattaagattgagcggttcct

SEQ ID NO: 1953903 - DNA, 25 bp, Homo sapien
tacaattaaaggctgcagaaacagc

SEQ ID NO: 1953904 - DNA, 25 bp, Homo sapien
tttcattgatcaaagaactaatagc

SEQ ID NO: 1953905 - DNA, 25 bp, Homo sapien
tatgaagcatttcgaagtaagaact

SEQ ID NO: 1953906 - DNA, 25 bp, Homo sapien
tgaataagcactgggctacaattaa

SEQ ID NO: 1953907 - DNA, 25 bp, Homo sapien
ctaggaatgcgcacgcgcggagggc

SEQ ID NO: 1953908 - DNA, 25 bp, Homo sapien
caggaacaggcccatgcgcgcagcg

SEQ ID NO: 1953909 - DNA, 25 bp, Homo sapien
tcctgggttaaatcctccaggcctc

SEQ ID NO: 1953910 - DNA, 25 bp, Homo sapien
tgggagtcgtagttctaacgcgtag

SEQ ID NO: 1953911 - DNA, 25 bp, Homo sapien
ttaataactaggatgactgctgatt

SEQ ID NO: 1953912 - DNA, 25 bp, Homo sapien
ctaggatgactgctgattttgtagt

SEQ ID NO: 1953913 - DNA, 25 bp, Homo sapien
aggatgactgctgattttgtagtac

SEQ ID NO: 1953914 - DNA, 25 bp, Homo sapien
aactaggatgactgctgattttgta

SEQ ID NO: 1953915 - DNA, 25 bp, Homo sapien
cccagagctaatgcagggaaagcca

SEQ ID NO: 1953916 - DNA, 25 bp, Homo sapien
aatcaaccagattgagcgagccagg

SEQ ID NO: 1953917 - DNA, 25 bp, Homo sapien
gggaaagccagaatcaaccaatcaa

SEQ ID NO: 1953918 - DNA, 25 bp, Homo sapien
tgagcgagccaggataggacttaag

SEQ ID NO: 1953919 - DNA, 25 bp, Homo sapien
tattctgttggaccagtatccagta

SEQ ID NO: 1953920 - DNA, 25 bp, Homo sapien
tctgttggaccagtatccagtaaca

SEQ ID NO: 1953921 - DNA, 25 bp, Homo sapien
gttggaccagtatccagtaacatca

SEQ ID NO: 1953922 - DNA, 25 bp, Homo sapien
gaccagtatccagtaacatcaagtt

SEQ ID NO: 1953923 - DNA, 25 bp, Homo sapien
tgccatgatgatccagaggatattg

SEQ ID NO: 1953924 - DNA, 25 bp, Homo sapien
tcatgcactggtaagaagaatgtct

SEQ ID NO: 1953925 - DNA, 25 bp, Homo sapien
cgtctatagggatagtattttctac

SEQ ID NO: 1953926 - DNA, 25 bp, Homo sapien
cttgatggtttttgtgcctcgtcta

SEQ ID NO: 1953927 - DNA, 25 bp, Homo sapien
accaactatttctctgggtgaatgt

SEQ ID NO: 1953928 - DNA, 25 bp, Homo sapien
aatgttctgtcgcacacttgcacaa

SEQ ID NO: 1953929 - DNA, 25 bp, Homo sapien
gggcctcttcaaaagttcagtatca

SEQ ID NO: 1953930 - DNA, 25 bp, Homo sapien
ttcaaaagttcagtatcagactcac

SEQ ID NO: 1953931 - DNA, 25 bp, Homo sapien
cagactgagtggcttggcatttggc

SEQ ID NO: 1953932 - DNA, 25 bp, Homo sapien
ccctcgtgccggctgtgtgacgttg

SEQ ID NO: 1953933 - DNA, 25 bp, Homo sapien
ttccctgtggcaccttcgcagactg

SEQ ID NO: 1953934 - DNA, 25 bp, Homo sapien
tctccacttcgggacatgcagttgg

SEQ ID NO: 1953935 - DNA, 25 bp, Homo sapien
tatcttaatttctcgatctcccttg

SEQ ID NO: 1953936 - DNA, 25 bp, Homo sapien
gatctcccttgtctgcgtggaaagg

SEQ ID NO: 1953937 - DNA, 25 bp, Homo sapien
aatttctcgatctcccttgtctgcg

SEQ ID NO: 1953938 - DNA, 25 bp, Homo sapien
cttgtctgcgtggaaaggactgtga

SEQ ID NO: 1953939 - DNA, 25 bp, Homo sapien
cttccctgattggaaattgaactca

SEQ ID NO: 1953940 - DNA, 25 bp, Homo sapien
cctgattggaaattgaactcaggcc

SEQ ID NO: 1953941 - DNA, 25 bp, Homo sapien
ttgaactcaggccacagccatgaaa

SEQ ID NO: 1953942 - DNA, 25 bp, Homo sapien
attggaaattgaactcaggccacag

SEQ ID NO: 1953943 - DNA, 25 bp, Homo sapien
tcgtagaggtcagccaggaacattt

SEQ ID NO: 1953944 - DNA, 25 bp, Homo sapien
gtcagccaggaacattttacaggag

SEQ ID NO: 1953945 - DNA, 25 bp, Homo sapien
tgtagaaggaatcgtagaggtcagc

SEQ ID NO: 1953946 - DNA, 25 bp, Homo sapien
gaatcgtagaggtcagccaggaaca

SEQ ID NO: 1953947 - DNA, 25 bp, Homo sapien
ctggcagttcctccacgtgcgctga

SEQ ID NO: 1953948 - DNA, 25 bp, Homo sapien
cacgtgcgctgagccgtcttctgaa

SEQ ID NO: 1953949 - DNA, 25 bp, Homo sapien
tgcgtcttcgtggacctccttaaat

SEQ ID NO: 1953950 - DNA, 25 bp, Homo sapien
ttctgaactgcctgcgtcttcgtgg

SEQ ID NO: 1953951 - DNA, 25 bp, Homo sapien
ttcaccaggttaggaaccattgtgt

SEQ ID NO: 1953952 - DNA, 25 bp, Homo sapien
tgttctggattagctgacctgatct

SEQ ID NO: 1953953 - DNA, 25 bp, Homo sapien
gacctgatcttcaccaggttaggaa

SEQ ID NO: 1953954 - DNA, 25 bp, Homo sapien
aatgtgctggtctggggatccctcc

SEQ ID NO: 1953955 - DNA, 25 bp, Homo sapien
agattgtctttagagagggcacacg

SEQ ID NO: 1953956 - DNA, 25 bp, Homo sapien
gagggcacacgaaagcaagccccaa

SEQ ID NO: 1953957 - DNA, 25 bp, Homo sapien
tagagagggcacacgaaagcaagcc

SEQ ID NO: 1953958 - DNA, 25 bp, Homo sapien
tgtctttagagagggcacacgaaag

SEQ ID NO: 1953959 - DNA, 25 bp, Homo sapien
agccatccttggcacccattctcat

SEQ ID NO: 1953960 - DNA, 25 bp, Homo sapien
cttggccaacttcccctcttcaggg

SEQ ID NO: 1953961 - DNA, 25 bp, Homo sapien
tcagggctgtgctccgatatatcaa

SEQ ID NO: 1953962 - DNA, 25 bp, Homo sapien
caggtctcccgctggccttcatcag

SEQ ID NO: 1953963 - DNA, 25 bp, Homo sapien
tgttgtctgtgctccgcacactgtc

SEQ ID NO: 1953964 - DNA, 25 bp, Homo sapien
agttcacattatgctccccactgtt

SEQ ID NO: 1953965 - DNA, 25 bp, Homo sapien
cccacactgtgatgctccccatgct

SEQ ID NO: 1953966 - DNA, 25 bp, Homo sapien
acactgccgtgctcctcacgctgac

SEQ ID NO: 1953967 - DNA, 25 bp, Homo sapien
ccccacactgtccactgtgctcccc

SEQ ID NO: 1953968 - DNA, 25 bp, Homo sapien
cacactgtccactgtgctccccaca

SEQ ID NO: 1953969 - DNA, 25 bp, Homo sapien
cacactgcccactgtgctccccaca

SEQ ID NO: 1953970 - DNA, 25 bp, Homo sapien
tgtgctccccacactgtccactgtg

SEQ ID NO: 1953971 - DNA, 25 bp, Homo sapien
caagtccgtgtgcaataagacgagc

SEQ ID NO: 1953972 - DNA, 25 bp, Homo sapien
tatcacacaagcagacaagtccgtg

SEQ ID NO: 1953973 - DNA, 25 bp, Homo sapien
cactgatgtgaagaatgcatgcccc

SEQ ID NO: 1953974 - DNA, 25 bp, Homo sapien
tgctgcagagccctaaatgataacc

SEQ ID NO: 1953975 - DNA, 25 bp, Homo sapien
tgtgaaaagccccacttcgctggtt

SEQ ID NO: 1953976 - DNA, 25 bp, Homo sapien
ggtagtccctttggaggtgcacaga

SEQ ID NO: 1953977 - DNA, 25 bp, Homo sapien
ggtgcacagagtccgaaaagcgttt

SEQ ID NO: 1953978 - DNA, 25 bp, Homo sapien
aaatgagcctgatgacacgtgtgaa

SEQ ID NO: 1953979 - DNA, 25 bp, Homo sapien
cgcgcctggcttggtcgctgctgaa

SEQ ID NO: 1953980 - DNA, 25 bp, Homo sapien
cgcctggcttggtcgctgctgaagt

SEQ ID NO: 1953981 - DNA, 25 bp, Homo sapien
gagcgcgcctggcttggtcgctgct

SEQ ID NO: 1953982 - DNA, 25 bp, Homo sapien
gcgagcgcgcctggcttggtcgctg

SEQ ID NO: 1953983 - DNA, 25 bp, Homo sapien
gttctgcccctcatttctcagacag

SEQ ID NO: 1953984 - DNA, 25 bp, Homo sapien
tcatttctcagacagcgtcccaggc

SEQ ID NO: 1953985 - DNA, 25 bp, Homo sapien
atttctcagacagcgtcccaggcca

SEQ ID NO: 1953986 - DNA, 25 bp, Homo sapien
ccctcatttctcagacagcgtccca

SEQ ID NO: 1953987 - DNA, 25 bp, Homo sapien
tgagctccggaatagcaaaggcccc

SEQ ID NO: 1953988 - DNA, 25 bp, Homo sapien
gcaagcaacagcctttgagctccgg

SEQ ID NO: 1953989 - DNA, 25 bp, Homo sapien
tgggccctcccgtgtcacttaagaa

SEQ ID NO: 1953990 - DNA, 25 bp, Homo sapien
tcacagagtatagcccagtccgagt

SEQ ID NO: 1953991 - DNA, 25 bp, Homo sapien
tgaattccaattcccccttgtacca

SEQ ID NO: 1953992 - DNA, 25 bp, Homo sapien
gaatgaattccaattcccccttgta

SEQ ID NO: 1953993 - DNA, 25 bp, Homo sapien
cgagactccggattataggggcgaa

SEQ ID NO: 1953994 - DNA, 25 bp, Homo sapien
attataggggcgaaggagaaagacg

SEQ ID NO: 1953995 - DNA, 25 bp, Homo sapien
ctttcacgagactccggattatagg

SEQ ID NO: 1953996 - DNA, 25 bp, Homo sapien
cacgagactccggattataggggcg

SEQ ID NO: 1953997 - DNA, 25 bp, Homo sapien
agtgctggctgaacctcttgggacc

SEQ ID NO: 1953998 - DNA, 25 bp, Homo sapien
tgctggctgaacctcttgggacccc

SEQ ID NO: 1953999 - DNA, 25 bp, Homo sapien
tgggaagtgagagggaagtgctggc

SEQ ID NO: 1954000 - DNA, 25 bp, Homo sapien
gaagtgctggctgaacctcttggga

SEQ ID NO: 1954001 - DNA, 25 bp, Homo sapien
ttgtttttattccaaactcttgctg

SEQ ID NO: 1954002 - DNA, 25 bp, Homo sapien
gtttttattccaaactcttgctgtg

SEQ ID NO: 1954003 - DNA, 25 bp, Homo sapien
ttattccaaactcttgctgtgggac

SEQ ID NO: 1954004 - DNA, 25 bp, Homo sapien
ttttattccaaactcttgctgtggg

SEQ ID NO: 1954005 - DNA, 25 bp, Homo sapien
tccctccacatctctggtaacagat

SEQ ID NO: 1954006 - DNA, 25 bp, Homo sapien
acatctctggtaacagatgtgagac

SEQ ID NO: 1954007 - DNA, 25 bp, Homo sapien
acagatgtgagacttcttggacatc

SEQ ID NO: 1954008 - DNA, 25 bp, Homo sapien
ccctaccttgaagccgcttcaggtt

SEQ ID NO: 1954009 - DNA, 25 bp, Homo sapien
gagggttgcttcaaaggattttcag

SEQ ID NO: 1954010 - DNA, 25 bp, Homo sapien
taaggagagggttgcttcaaaggat

SEQ ID NO: 1954011 - DNA, 25 bp, Homo sapien
tttcagacacctttgaacaggcagc

SEQ ID NO: 1954012 - DNA, 25 bp, Homo sapien
tgaataaggagagggttgcttcaaa

SEQ ID NO: 1954013 - DNA, 25 bp, Homo sapien
taggatacacggtgttcctagatcc

SEQ ID NO: 1954014 - DNA, 25 bp, Homo sapien
gactaggataggatacacggtgttc

SEQ ID NO: 1954015 - DNA, 25 bp, Homo sapien
tacacggtgttcctagatccagcct

SEQ ID NO: 1954016 - DNA, 25 bp, Homo sapien
ggccttggtgactaggataggatac

SEQ ID NO: 1954017 - DNA, 25 bp, Homo sapien
cagagcacagcctcctttccggctc

SEQ ID NO: 1954018 - DNA, 25 bp, Homo sapien
gagcacagcctcctttccggctcat

SEQ ID NO: 1954019 - DNA, 25 bp, Homo sapien
ccgagccgccagagcacagcctcct

SEQ ID NO: 1954020 - DNA, 25 bp, Homo sapien
gagccgccagagcacagcctccttt

SEQ ID NO: 1954021 - DNA, 25 bp, Homo sapien
gcgcacagggtctgccgcgggatgc

SEQ ID NO: 1954022 - DNA, 25 bp, Homo sapien
gtctgccgcgggatgccctgtcttt

SEQ ID NO: 1954023 - DNA, 25 bp, Homo sapien
gaatacgcaactccttcgccatgca

SEQ ID NO: 1954024 - DNA, 25 bp, Homo sapien
tgcttcctgcgggaggagaatacgc

SEQ ID NO: 1954025 - DNA, 25 bp, Homo sapien
cacaaaaatagctgcgttgatagct

SEQ ID NO: 1954026 - DNA, 25 bp, Homo sapien
aatagctgcgttgatagctctctcc

SEQ ID NO: 1954027 - DNA, 25 bp, Homo sapien
tgcgttgatagctctctcctgatct

SEQ ID NO: 1954028 - DNA, 25 bp, Homo sapien
tctcctgatctctaatctcttcctt

SEQ ID NO: 1954029 - DNA, 25 bp, Homo sapien
tctataagaaattgctcatttccag

SEQ ID NO: 1954030 - DNA, 25 bp, Homo sapien
ttttgtctataagaaattgctcatt

SEQ ID NO: 1954031 - DNA, 25 bp, Homo sapien
tcctactcaagccagccttttggct

SEQ ID NO: 1954032 - DNA, 25 bp, Homo sapien
ttttctttcctactcaagccagcct

SEQ ID NO: 1954033 - DNA, 25 bp, Homo sapien
ggatgatgttgccaggcccctcact

SEQ ID NO: 1954034 - DNA, 25 bp, Homo sapien
tcactggaatctacatgagagaatg

SEQ ID NO: 1954035 - DNA, 25 bp, Homo sapien
tatctgaggtagatggtggcatgca

SEQ ID NO: 1954036 - DNA, 25 bp, Homo sapien
tgagagaatgatcacttacgtggca

SEQ ID NO: 1954037 - DNA, 25 bp, Homo sapien
gctgcacgtgggcaaggctacattg

SEQ ID NO: 1954038 - DNA, 25 bp, Homo sapien
gagccacgctctgtctgtacattta

SEQ ID NO: 1954039 - DNA, 25 bp, Homo sapien
ttgtgtagcaaagcatgcgccaggg

SEQ ID NO: 1954040 - DNA, 25 bp, Homo sapien
gataccctaaaactacacatcgctt

SEQ ID NO: 1954041 - DNA, 25 bp, Homo sapien
gggaattcttcaccaagaccagaga

SEQ ID NO: 1954042 - DNA, 25 bp, Homo sapien
gggagcactcttcaccaaactggag

SEQ ID NO: 1954043 - DNA, 25 bp, Homo sapien
caccaagatcggagaccacagggtc

SEQ ID NO: 1954044 - DNA, 25 bp, Homo sapien
gggacactctccaacaataccagag

SEQ ID NO: 1954045 - DNA, 25 bp, Homo sapien
caagaacagagaccaaggggtgatc

SEQ ID NO: 1954046 - DNA, 25 bp, Homo sapien
taaggacagagaccctggggcactc

SEQ ID NO: 1954047 - DNA, 25 bp, Homo sapien
gacagagaccctggggcactctcca

SEQ ID NO: 1954048 - DNA, 25 bp, Homo sapien
ctccaccaagaacagagaccaaggg

SEQ ID NO: 1954049 - DNA, 25 bp, Homo sapien
ccgggggcgctctccaccaagacca

SEQ ID NO: 1954050 - DNA, 25 bp, Homo sapien
gggcaccgtccaccaagatcagtga

SEQ ID NO: 1954051 - DNA, 25 bp, Homo sapien
tttccaccaagaatacagatccagg

SEQ ID NO: 1954052 - DNA, 25 bp, Homo sapien
ttccaccaagaatacagatccaggg

SEQ ID NO: 1954053 - DNA, 25 bp, Homo sapien
agacccggaggcactgtccaccaat

SEQ ID NO: 1954054 - DNA, 25 bp, Homo sapien
tcttggatgtaagaattacaaaatg

SEQ ID NO: 1954055 - DNA, 25 bp, Homo sapien
ggcaagtctgtggtaaattcttgga

SEQ ID NO: 1954056 - DNA, 25 bp, Homo sapien
tggatgtaagaattacaaaatgcct

SEQ ID NO: 1954057 - DNA, 25 bp, Homo sapien
tcagtggcaagtctgtggtaaattc

SEQ ID NO: 1954058 - DNA, 25 bp, Homo sapien
agggccttgtccaggtcatttctat

SEQ ID NO: 1954059 - DNA, 25 bp, Homo sapien
ccttgtccaggtcatttctatgcat

SEQ ID NO: 1954060 - DNA, 25 bp, Homo sapien
gccttgtccaggtcatttctatgca

SEQ ID NO: 1954061 - DNA, 25 bp, Homo sapien
attctctgcatccagggccttgtcc

SEQ ID NO: 1954062 - DNA, 25 bp, Homo sapien
ccttttctgaccttcgtgaattatt

SEQ ID NO: 1954063 - DNA, 25 bp, Homo sapien
tatttccattgtgctcactcgcgtc

SEQ ID NO: 1954064 - DNA, 25 bp, Homo sapien
tgaccttcgtgaattatttccattg

SEQ ID NO: 1954065 - DNA, 25 bp, Homo sapien
cactcgcgtcttccccactttagca

SEQ ID NO: 1954066 - DNA, 25 bp, Homo sapien
cgtggtgccaacctaagacatgagg

SEQ ID NO: 1954067 - DNA, 25 bp, Homo sapien
caaaagtcgatttgggtccagcggc

SEQ ID NO: 1954068 - DNA, 25 bp, Homo sapien
gaaaaggcgatcagagcagagtccc

SEQ ID NO: 1954069 - DNA, 25 bp, Homo sapien
tcttgcatccgtaggatcgctgggc

SEQ ID NO: 1954070 - DNA, 25 bp, Homo sapien
gctgtgcccagtctgcaattttgtt

SEQ ID NO: 1954071 - DNA, 25 bp, Homo sapien
aagctgcgctgtgcccagtctgcaa

SEQ ID NO: 1954072 - DNA, 25 bp, Homo sapien
tgcccagtctgcaattttgttttct

SEQ ID NO: 1954073 - DNA, 25 bp, Homo sapien
cagcacaatgattccaaaaactgaa

SEQ ID NO: 1954074 - DNA, 25 bp, Homo sapien
cccatgtagtcttggccagagcgga

SEQ ID NO: 1954075 - DNA, 25 bp, Homo sapien
gatcttggcgcatagaaggtgttca

SEQ ID NO: 1954076 - DNA, 25 bp, Homo sapien
tggccagagcggactcttccagtct

SEQ ID NO: 1954077 - DNA, 25 bp, Homo sapien
cattccgcttgccaagcattgatct

SEQ ID NO: 1954078 - DNA, 25 bp, Homo sapien
gggcagtagggaaaatcctcttcat

SEQ ID NO: 1954079 - DNA, 25 bp, Homo sapien
aagaggcggccggatcctgcacaat

SEQ ID NO: 1954080 - DNA, 25 bp, Homo sapien
tcctgctagaagaccggggggagca

SEQ ID NO: 1954081 - DNA, 25 bp, Homo sapien
ggcagggcagtagggaaaatcctct

SEQ ID NO: 1954082 - DNA, 25 bp, Homo sapien
tcttggtttcctccggaggctgtct

SEQ ID NO: 1954083 - DNA, 25 bp, Homo sapien
atcttggtttcctccggaggctgtc

SEQ ID NO: 1954084 - DNA, 25 bp, Homo sapien
cagtccttcctttgcgtcttgtatc

SEQ ID NO: 1954085 - DNA, 25 bp, Homo sapien
cccaaagtactgcgagtgcaaggtc

SEQ ID NO: 1954086 - DNA, 25 bp, Homo sapien
tccctgttctgttggattctcagtc

SEQ ID NO: 1954087 - DNA, 25 bp, Homo sapien
acatgacgttcccttccacgtgtgc

SEQ ID NO: 1954088 - DNA, 25 bp, Homo sapien
gagtttctgggtgattttactgtca

SEQ ID NO: 1954089 - DNA, 25 bp, Homo sapien
gcaggaggagtttctgggtgatttt

SEQ ID NO: 1954090 - DNA, 25 bp, Homo sapien
gaggagtttctgggtgattttactg

SEQ ID NO: 1954091 - DNA, 25 bp, Homo sapien
cctggcaggaggagtttctgggtga

SEQ ID NO: 1954092 - DNA, 25 bp, Homo sapien
ggtgtccaagggcccaggtctggca

SEQ ID NO: 1954093 - DNA, 25 bp, Homo sapien
gttacagtcttggtgtccaagggcc

SEQ ID NO: 1954094 - DNA, 25 bp, Homo sapien
tcctttccgtactgcttccatttcc

SEQ ID NO: 1954095 - DNA, 25 bp, Homo sapien
ctccggggctggcaacagccttgta

SEQ ID NO: 1954096 - DNA, 25 bp, Homo sapien
aacagccttgtacgtgtacacatgc

SEQ ID NO: 1954097 - DNA, 25 bp, Homo sapien
gcaacagccttgtacgtgtacacat

SEQ ID NO: 1954098 - DNA, 25 bp, Homo sapien
agctgggctccattggcaggtggga

SEQ ID NO: 1954099 - DNA, 25 bp, Homo sapien
gacagctgggctccattggcaggtg

SEQ ID NO: 1954100 - DNA, 25 bp, Homo sapien
gggacagctgggctccattggcagg

SEQ ID NO: 1954101 - DNA, 25 bp, Homo sapien
gggctccattggcaggtgggagcag

SEQ ID NO: 1954102 - DNA, 25 bp, Homo sapien
tcctgtcctgaacacatttagcact

SEQ ID NO: 1954103 - DNA, 25 bp, Homo sapien
ctgaacacatttagcactcatggaa

SEQ ID NO: 1954104 - DNA, 25 bp, Homo sapien
tcctgaacacatttagcactcatgg

SEQ ID NO: 1954105 - DNA, 25 bp, Homo sapien
ctgtcctgaacacatttagcactca

SEQ ID NO: 1954106 - DNA, 25 bp, Homo sapien
tctgagtgcatgtagacaacgacgt

SEQ ID NO: 1954107 - DNA, 25 bp, Homo sapien
gcctaaggcagtatgtctaagacca

SEQ ID NO: 1954108 - DNA, 25 bp, Homo sapien
ccacaccttcttgggataaaggtag

SEQ ID NO: 1954109 - DNA, 25 bp, Homo sapien
caacgacgtccatggaagaggctgt

SEQ ID NO: 1954110 - DNA, 25 bp, Homo sapien
catgtgaaagctgctcataacctta

SEQ ID NO: 1954111 - DNA, 25 bp, Homo sapien
ccctgttactttcacagtttcaggg

SEQ ID NO: 1954112 - DNA, 25 bp, Homo sapien
attgtgtcatccctgttactttcac

SEQ ID NO: 1954113 - DNA, 25 bp, Homo sapien
gtttcaggggtttccatgaaaatgc

SEQ ID NO: 1954114 - DNA, 25 bp, Homo sapien
aatgctgactgttaagattgttaag

SEQ ID NO: 1954115 - DNA, 25 bp, Homo sapien
tcaccacctctgagtctaccacact

SEQ ID NO: 1954116 - DNA, 25 bp, Homo sapien
acatctgatcttctcatttcctcat

SEQ ID NO: 1954117 - DNA, 25 bp, Homo sapien
atcgatgagtcagtcctagtgtcca

SEQ ID NO: 1954118 - DNA, 25 bp, Homo sapien
tgcccagtcacttaggactggaatc

SEQ ID NO: 1954119 - DNA, 25 bp, Homo sapien
ctcgcagttttctcaggagacacct

SEQ ID NO: 1954120 - DNA, 25 bp, Homo sapien
tgtgtctcttcgtccactctgtcac

SEQ ID NO: 1954121 - DNA, 25 bp, Homo sapien
tcagcgtctgtttggcaccgcctgt

SEQ ID NO: 1954122 - DNA, 25 bp, Homo sapien
gtcaccacggcgctcgcagttttct

SEQ ID NO: 1954123 - DNA, 25 bp, Homo sapien
ttcacactgctgacttgaaagccag

SEQ ID NO: 1954124 - DNA, 25 bp, Homo sapien
gacgatgtgaaagtctgttgcaagt

SEQ ID NO: 1954125 - DNA, 25 bp, Homo sapien
tgttgcaagtgtaatgcgatctttc

SEQ ID NO: 1954126 - DNA, 25 bp, Homo sapien
tccatctaatgcgaggcctggctcc

SEQ ID NO: 1954127 - DNA, 25 bp, Homo sapien
ttagtggacaaagccctagatgtgg

SEQ ID NO: 1954128 - DNA, 25 bp, Homo sapien
tttccatcgacctggctgccaactg

SEQ ID NO: 1954129 - DNA, 25 bp, Homo sapien
ccctagatgtgggaatttccatcga

SEQ ID NO: 1954130 - DNA, 25 bp, Homo sapien
gatcactctttccttagtggacaaa

SEQ ID NO: 1954131 - DNA, 25 bp, Homo sapien
tgcactattccctactggacagaca

SEQ ID NO: 1954132 - DNA, 25 bp, Homo sapien
ctattccctactggacagacattca

SEQ ID NO: 1954133 - DNA, 25 bp, Homo sapien
cactattccctactggacagacatt

SEQ ID NO: 1954134 - DNA, 25 bp, Homo sapien
tattccctactggacagacattcat

SEQ ID NO: 1954135 - DNA, 25 bp, Homo sapien
tcaagttctgacctgggacctgaga

SEQ ID NO: 1954136 - DNA, 25 bp, Homo sapien
tgaattgggtaacgtgaaaggagct

SEQ ID NO: 1954137 - DNA, 25 bp, Homo sapien
gtaagaggactatgtattcctttcc

SEQ ID NO: 1954138 - DNA, 25 bp, Homo sapien
attcctttcccttcgtgaaggctct

SEQ ID NO: 1954139 - DNA, 25 bp, Homo sapien
tttcatcatgtagccagagtctgcc

SEQ ID NO: 1954140 - DNA, 25 bp, Homo sapien
tagccagagtctgccaaatgacacc

SEQ ID NO: 1954141 - DNA, 25 bp, Homo sapien
tctgccaaatgacaccttttcagtc

SEQ ID NO: 1954142 - DNA, 25 bp, Homo sapien
catgtagccagagtctgccaaatga

SEQ ID NO: 1954143 - DNA, 25 bp, Homo sapien
gtgaactggagcgtgcacaacctct

SEQ ID NO: 1954144 - DNA, 25 bp, Homo sapien
gacgttcccattctggaatcaggag

SEQ ID NO: 1954145 - DNA, 25 bp, Homo sapien
tatggcatctgttggtgacgttccc

SEQ ID NO: 1954146 - DNA, 25 bp, Homo sapien
tgggcagctccgctcgatttggatt

SEQ ID NO: 1954147 - DNA, 25 bp, Homo sapien
agtccttttggttgcaaacaaatag

SEQ ID NO: 1954148 - DNA, 25 bp, Homo sapien
gcaaacaaatagaaagggacccaga

SEQ ID NO: 1954149 - DNA, 25 bp, Homo sapien
gtccttttggttgcaaacaaataga

SEQ ID NO: 1954150 - DNA, 25 bp, Homo sapien
tggttgcaaacaaatagaaagggac

SEQ ID NO: 1954151 - DNA, 25 bp, Homo sapien
gtgagtattccacagagcggctgcc

SEQ ID NO: 1954152 - DNA, 25 bp, Homo sapien
tgagcggtgagtattccacagagcg

SEQ ID NO: 1954153 - DNA, 25 bp, Homo sapien
cggtttgagcggtgagtattccaca

SEQ ID NO: 1954154 - DNA, 25 bp, Homo sapien
gcggtgagtattccacagagcggct

SEQ ID NO: 1954155 - DNA, 25 bp, Homo sapien
tgtccctgtgcctgcccgtcctggg

SEQ ID NO: 1954156 - DNA, 25 bp, Homo sapien
catggcttcatgacacgatctcctc

SEQ ID NO: 1954157 - DNA, 25 bp, Homo sapien
catgacacgatctcctccttatctt

SEQ ID NO: 1954158 - DNA, 25 bp, Homo sapien
agtggatgggccttggacctcttct

SEQ ID NO: 1954159 - DNA, 25 bp, Homo sapien
gcctcatctctcgctgttgccccac

SEQ ID NO: 1954160 - DNA, 25 bp, Homo sapien
gcttcagctgtcccgaattctgcag

SEQ ID NO: 1954161 - DNA, 25 bp, Homo sapien
cttcagctgtcccgaattctgcagt

SEQ ID NO: 1954162 - DNA, 25 bp, Homo sapien
ttcagctgtcccgaattctgcagtt

SEQ ID NO: 1954163 - DNA, 25 bp, Homo sapien
tcagctgtcccgaattctgcagttc

SEQ ID NO: 1954164 - DNA, 25 bp, Homo sapien
tgcctcaagggaggcactgtcgttt

SEQ ID NO: 1954165 - DNA, 25 bp, Homo sapien
caagggaggcactgtcgtttcctca

SEQ ID NO: 1954166 - DNA, 25 bp, Homo sapien
ctcaagggaggcactgtcgtttcct

SEQ ID NO: 1954167 - DNA, 25 bp, Homo sapien
cctcaagggaggcactgtcgtttcc

SEQ ID NO: 1954168 - DNA, 25 bp, Homo sapien
ctcactaacaggagtgtcccaggaa

SEQ ID NO: 1954169 - DNA, 25 bp, Homo sapien
gattcaaccggaagagagcagcagc

SEQ ID NO: 1954170 - DNA, 25 bp, Homo sapien
aactggagttctgacgaggagcagc

SEQ ID NO: 1954171 - DNA, 25 bp, Homo sapien
cgaggagcagcttcgaggcatttgc

SEQ ID NO: 1954172 - DNA, 25 bp, Homo sapien
atgcgcccatgaaaatgggtgtttc

SEQ ID NO: 1954173 - DNA, 25 bp, Homo sapien
tcatgcgcccatgaaaatgggtgtt

SEQ ID NO: 1954174 - DNA, 25 bp, Homo sapien
ccaccaaccaccttcagcactggct

SEQ ID NO: 1954175 - DNA, 25 bp, Homo sapien
tgtttctgattggagagcatctctt

SEQ ID NO: 1954176 - DNA, 25 bp, Homo sapien
tttcactcaccttgtggatgagcat

SEQ ID NO: 1954177 - DNA, 25 bp, Homo sapien
ggaaggagactgtttcactcacctt

SEQ ID NO: 1954178 - DNA, 25 bp, Homo sapien
ctgggcaggaaggagactgtttcac

SEQ ID NO: 1954179 - DNA, 25 bp, Homo sapien
ggcaggaaggagactgtttcactca

SEQ ID NO: 1954180 - DNA, 25 bp, Homo sapien
tgatatggtatacaaggggtggact

SEQ ID NO: 1954181 - DNA, 25 bp, Homo sapien
gacagagtagccctgagggctgctt

SEQ ID NO: 1954182 - DNA, 25 bp, Homo sapien
gatatggtatacaaggggtggacta

SEQ ID NO: 1954183 - DNA, 25 bp, Homo sapien
gccctgagggctgcttgttgcccat

SEQ ID NO: 1954184 - DNA, 25 bp, Homo sapien
tcagcagacgcttagttggcttctg

SEQ ID NO: 1954185 - DNA, 25 bp, Homo sapien
agcagagtgtctgcaatctgcctca

SEQ ID NO: 1954186 - DNA, 25 bp, Homo sapien
tagttggcttctgatgcagagcaga

SEQ ID NO: 1954187 - DNA, 25 bp, Homo sapien
gcttagttggcttctgatgcagagc

SEQ ID NO: 1954188 - DNA, 25 bp, Homo sapien
accagtgctcctgagctgcatctgc

SEQ ID NO: 1954189 - DNA, 25 bp, Homo sapien
gaggttgccatggttagaacctgtc

SEQ ID NO: 1954190 - DNA, 25 bp, Homo sapien
tgacctgaaacttcttcggcccatg

SEQ ID NO: 1954191 - DNA, 25 bp, Homo sapien
caaatgttcggctgagctccaaggt

SEQ ID NO: 1954192 - DNA, 25 bp, Homo sapien
tattatgacttgagatgtttgtttc

SEQ ID NO: 1954193 - DNA, 25 bp, Homo sapien
aaaaggtctaaataacttgattgtg

SEQ ID NO: 1954194 - DNA, 25 bp, Homo sapien
aaattacaacccagtggactggctg

SEQ ID NO: 1954195 - DNA, 25 bp, Homo sapien
ggactggctgtacatttttctatgt

SEQ ID NO: 1954196 - DNA, 25 bp, Homo sapien
gatttattattatacgcaaacccaa

SEQ ID NO: 1954197 - DNA, 25 bp, Homo sapien
ctagatttattattatacgcaaacc

SEQ ID NO: 1954198 - DNA, 25 bp, Homo sapien
gtcactttctggaaacgtattctga

SEQ ID NO: 1954199 - DNA, 25 bp, Homo sapien
tcactttctggaaacgtattctgac

SEQ ID NO: 1954200 - DNA, 25 bp, Homo sapien
taacctgcgagctctctgggctgtg

SEQ ID NO: 1954201 - DNA, 25 bp, Homo sapien
gtgtgctgtgtccttcacgaatgac

SEQ ID NO: 1954202 - DNA, 25 bp, Homo sapien
tgctccatgtgcagttttaacctgc

SEQ ID NO: 1954203 - DNA, 25 bp, Homo sapien
cctgaatggctggcagacattgctc

SEQ ID NO: 1954204 - DNA, 25 bp, Homo sapien
tgagtcccactctttgtgagttcgc

SEQ ID NO: 1954205 - DNA, 25 bp, Homo sapien
tgtgctggcaaaccctcaggtcggt

SEQ ID NO: 1954206 - DNA, 25 bp, Homo sapien
tcacaaatactctagtcccgcgggc

SEQ ID NO: 1954207 - DNA, 25 bp, Homo sapien
tagtcccgcgggctacgagtgtgct

SEQ ID NO: 1954208 - DNA, 25 bp, Homo sapien
gagtgtcattgattcattctttcga

SEQ ID NO: 1954209 - DNA, 25 bp, Homo sapien
gctctccacgaagacagagtgtcat

SEQ ID NO: 1954210 - DNA, 25 bp, Homo sapien
tgaacccgggggtgcctgattccac

SEQ ID NO: 1954211 - DNA, 25 bp, Homo sapien
tcattctttcgacaagctgatcata

SEQ ID NO: 1954212 - DNA, 25 bp, Homo sapien
tcatcttccagctccgtgatccaga

SEQ ID NO: 1954213 - DNA, 25 bp, Homo sapien
cctgtgagtgactcgagggagcatc

SEQ ID NO: 1954214 - DNA, 25 bp, Homo sapien
aagtgtctagatctgcattttccct

SEQ ID NO: 1954215 - DNA, 25 bp, Homo sapien
ggactccctgcgatcttttccattg

SEQ ID NO: 1954216 - DNA, 25 bp, Homo sapien
gagtcccatgtacgagattatgcaa

SEQ ID NO: 1954217 - DNA, 25 bp, Homo sapien
tctcagaggaggtttgtcccaccga

SEQ ID NO: 1954218 - DNA, 25 bp, Homo sapien
gtcccaccgagagctttgtcaaaca

SEQ ID NO: 1954219 - DNA, 25 bp, Homo sapien
tgaggcagcccttcaagtgtcctgg

SEQ ID NO: 1954220 - DNA, 25 bp, Homo sapien
gcagttgatggatgaatccgtttca

SEQ ID NO: 1954221 - DNA, 25 bp, Homo sapien
gtctgtagcagttgatggatgaatc

SEQ ID NO: 1954222 - DNA, 25 bp, Homo sapien
tctgtagcagttgatggatgaatcc

SEQ ID NO: 1954223 - DNA, 25 bp, Homo sapien
gtagcagttgatggatgaatccgtt

SEQ ID NO: 1954224 - DNA, 25 bp, Homo sapien
ttaagaatctcatgtgctatattac

SEQ ID NO: 1954225 - DNA, 25 bp, Homo sapien
gaatctcatgtgctatattacatga

SEQ ID NO: 1954226 - DNA, 25 bp, Homo sapien
taagaatctcatgtgctatattaca

SEQ ID NO: 1954227 - DNA, 25 bp, Homo sapien
gcattaagaatctcatgtgctatat

SEQ ID NO: 1954228 - DNA, 25 bp, Homo sapien
aaattgagatgaaaggacttgccag

SEQ ID NO: 1954229 - DNA, 25 bp, Homo sapien
tgcagtggactgaatcgtgccccac

SEQ ID NO: 1954230 - DNA, 25 bp, Homo sapien
tcttctaggcaatgacaagctccct

SEQ ID NO: 1954231 - DNA, 25 bp, Homo sapien
gacaatagtaggacggcctcacaga

SEQ ID NO: 1954232 - DNA, 25 bp, Homo sapien
caattgaccaacaaggcagtacctc

SEQ ID NO: 1954233 - DNA, 25 bp, Homo sapien
tgctcccagtgcagatacagcttag

SEQ ID NO: 1954234 - DNA, 25 bp, Homo sapien
tatactggctaagagcatagcctgg

SEQ ID NO: 1954235 - DNA, 25 bp, Homo sapien
tagcctggaatcagactcaccaatt

SEQ ID NO: 1954236 - DNA, 25 bp, Homo sapien
tgtgcacggaagtcctcatcatcag

SEQ ID NO: 1954237 - DNA, 25 bp, Homo sapien
catcatcagcaggacttaacttgag

SEQ ID NO: 1954238 - DNA, 25 bp, Homo sapien
taatttgctgaccatttgtgcacgg

SEQ ID NO: 1954239 - DNA, 25 bp, Homo sapien
cactataggtatcctgaagcatgga

SEQ ID NO: 1954240 - DNA, 25 bp, Homo sapien
gccttttacgctagaacctgcccaa

SEQ ID NO: 1954241 - DNA, 25 bp, Homo sapien
tacgctagaacctgcccaagaacag

SEQ ID NO: 1954242 - DNA, 25 bp, Homo sapien
acccactttgtgcagagccttttac

SEQ ID NO: 1954243 - DNA, 25 bp, Homo sapien
tgtgcagagccttttacgctagaac

SEQ ID NO: 1954244 - DNA, 25 bp, Homo sapien
agaggctgcagttcggcaccagtgg

SEQ ID NO: 1954245 - DNA, 25 bp, Homo sapien
gccgtacagctggagggtgcacttt

SEQ ID NO: 1954246 - DNA, 25 bp, Homo sapien
tgctggcaccttcgagaggccgtac

SEQ ID NO: 1954247 - DNA, 25 bp, Homo sapien
gagcagtgccgtagagtcaaaggaa

SEQ ID NO: 1954248 - DNA, 25 bp, Homo sapien
cttatgattagaggtgacacagtac

SEQ ID NO: 1954249 - DNA, 25 bp, Homo sapien
gacacagtactctgtgtccagtggc

SEQ ID NO: 1954250 - DNA, 25 bp, Homo sapien
tttttgaggtaagcaaacactgtcc

SEQ ID NO: 1954251 - DNA, 25 bp, Homo sapien
aatgttgagcgtgttccttgttttc

SEQ ID NO: 1954252 - DNA, 25 bp, Homo sapien
cttgaaacaagagcagacgaatctg

SEQ ID NO: 1954253 - DNA, 25 bp, Homo sapien
gagagacgaatgagctgaaagctgc

SEQ ID NO: 1954254 - DNA, 25 bp, Homo sapien
gatggaggttaacggcatcatgatg

SEQ ID NO: 1954255 - DNA, 25 bp, Homo sapien
tcctataacagcatgagaggtcccg

SEQ ID NO: 1954256 - DNA, 25 bp, Homo sapien
ccatgtgtggctgagaaatcaacag

SEQ ID NO: 1954257 - DNA, 25 bp, Homo sapien
catgtgtggctgagaaatcaacagg

SEQ ID NO: 1954258 - DNA, 25 bp, Homo sapien
atgtgtggctgagaaatcaacaggc

SEQ ID NO: 1954259 - DNA, 25 bp, Homo sapien
gggcactgacgcctaccggagatgg

SEQ ID NO: 1954260 - DNA, 25 bp, Homo sapien
gtgtctagggggcactgacgcctac

SEQ ID NO: 1954261 - DNA, 25 bp, Homo sapien
cactgacgcctaccggagatgggag

SEQ ID NO: 1954262 - DNA, 25 bp, Homo sapien
gctttgggtgtgtctagggggcact

SEQ ID NO: 1954263 - DNA, 25 bp, Homo sapien
agaatatggaaaatcggtcccagtg

SEQ ID NO: 1954264 - DNA, 25 bp, Homo sapien
tgcacagtagctagctcctctccag

SEQ ID NO: 1954265 - DNA, 25 bp, Homo sapien
tccactgcaggataacactcagaat

SEQ ID NO: 1954266 - DNA, 25 bp, Homo sapien
aatatggaaaatcggtcccagtgac

SEQ ID NO: 1954267 - DNA, 25 bp, Homo sapien
tggagcatgcgagaacatacagcac

SEQ ID NO: 1954268 - DNA, 25 bp, Homo sapien
catgcgagaacatacagcacacaga

SEQ ID NO: 1954269 - DNA, 25 bp, Homo sapien
taagcagctcccaacactggaaata

SEQ ID NO: 1954270 - DNA, 25 bp, Homo sapien
tgcatgagatggagcatgcgagaac

SEQ ID NO: 1954271 - DNA, 25 bp, Homo sapien
gctgctgcacaactgaccggtgatc

SEQ ID NO: 1954272 - DNA, 25 bp, Homo sapien
ggtaccaacccataactggctgctg

SEQ ID NO: 1954273 - DNA, 25 bp, Homo sapien
caatgagagattccagcgccactgg

SEQ ID NO: 1954274 - DNA, 25 bp, Homo sapien
tgatccatgcacagtattctcgtgg

SEQ ID NO: 1954275 - DNA, 25 bp, Homo sapien
gaattatttgctccctctgtgctcc

SEQ ID NO: 1954276 - DNA, 25 bp, Homo sapien
acccgtggaattatttgctccctct

SEQ ID NO: 1954277 - DNA, 25 bp, Homo sapien
ctctgtgctcctacccgtacccggg

SEQ ID NO: 1954278 - DNA, 25 bp, Homo sapien
tccctctgtgctcctacccgtaccc

SEQ ID NO: 1954279 - DNA, 25 bp, Homo sapien
cagcccagcaattgtaacgatccat

SEQ ID NO: 1954280 - DNA, 25 bp, Homo sapien
tcagcccagcaattgtaacgatcca

SEQ ID NO: 1954281 - DNA, 25 bp, Homo sapien
tgtgatccttcattggccagtgcca

SEQ ID NO: 1954282 - DNA, 25 bp, Homo sapien
caaacagaaggatcgagaggcaaca

SEQ ID NO: 1954283 - DNA, 25 bp, Homo sapien
tccccagtattaagacagacaaaag

SEQ ID NO: 1954284 - DNA, 25 bp, Homo sapien
cagaggaatgctggcgtccccagta

SEQ ID NO: 1954285 - DNA, 25 bp, Homo sapien
gggtgtcgagtgttctctcggtcat

SEQ ID NO: 1954286 - DNA, 25 bp, Homo sapien
gctttgataagggtgtcgagtgttc

SEQ ID NO: 1954287 - DNA, 25 bp, Homo sapien
tgataagggtgtcgagtgttctctc

SEQ ID NO: 1954288 - DNA, 25 bp, Homo sapien
aagggtgtcgagtgttctctcggtc

SEQ ID NO: 1954289 - DNA, 25 bp, Homo sapien
tccagagatgacagtcctagggtgt

SEQ ID NO: 1954290 - DNA, 25 bp, Homo sapien
tcatgacactggtagacaccttccc

SEQ ID NO: 1954291 - DNA, 25 bp, Homo sapien
gacagtcctagggtgttcatgacac

SEQ ID NO: 1954292 - DNA, 25 bp, Homo sapien
tttacttcgaagaattccagagatg

SEQ ID NO: 1954293 - DNA, 25 bp, Homo sapien
ctgttctcatgcctaatcatgaagt

SEQ ID NO: 1954294 - DNA, 25 bp, Homo sapien
tgtcatgaatcaaagaacagccttt

SEQ ID NO: 1954295 - DNA, 25 bp, Homo sapien
tgaagttctacaaagttccacattt

SEQ ID NO: 1954296 - DNA, 25 bp, Homo sapien
gatattgcgatttgtttttaagctg

SEQ ID NO: 1954297 - DNA, 25 bp, Homo sapien
caaagtgtgaattttctcccaggtc

SEQ ID NO: 1954298 - DNA, 25 bp, Homo sapien
aagagaatatcctctacgttggcct

SEQ ID NO: 1954299 - DNA, 25 bp, Homo sapien
gcttccatttggtggctgccaatct

SEQ ID NO: 1954300 - DNA, 25 bp, Homo sapien
tggtggctgccaatctcttcctctt

SEQ ID NO: 1954301 - DNA, 25 bp, Homo sapien
cagtgtgagtgaggaaatccatgtc

SEQ ID NO: 1954302 - DNA, 25 bp, Homo sapien
tgagtgaggaaatccatgtctgatt

SEQ ID NO: 1954303 - DNA, 25 bp, Homo sapien
ccatgtctgattttccaaaggaagt

SEQ ID NO: 1954304 - DNA, 25 bp, Homo sapien
caaaggaagtcaagattcgggtcaa

SEQ ID NO: 1954305 - DNA, 25 bp, Homo sapien
tgcgggttgggaatagccatggagc

SEQ ID NO: 1954306 - DNA, 25 bp, Homo sapien
tggacgtgtggtactgaccagggat

SEQ ID NO: 1954307 - DNA, 25 bp, Homo sapien
gggaattgttgttgcgggtgtggaa

SEQ ID NO: 1954308 - DNA, 25 bp, Homo sapien
acggctgcgtgctgtgctcctacgg

SEQ ID NO: 1954309 - DNA, 25 bp, Homo sapien
cagtacgagtccgtgttacttcatt

SEQ ID NO: 1954310 - DNA, 25 bp, Homo sapien
gtccgtgttacttcatttgtagctc

SEQ ID NO: 1954311 - DNA, 25 bp, Homo sapien
tcctaatgtcagctcatcaaatgaa

SEQ ID NO: 1954312 - DNA, 25 bp, Homo sapien
tgtagctcctaatgtcagctcatca

SEQ ID NO: 1954313 - DNA, 25 bp, Homo sapien
tggccagctgggcagtgataaggta

SEQ ID NO: 1954314 - DNA, 25 bp, Homo sapien
taaggtagtagatgtatacagagga

SEQ ID NO: 1954315 - DNA, 25 bp, Homo sapien
agtgataaggtagtagatgtataca

SEQ ID NO: 1954316 - DNA, 25 bp, Homo sapien
ggccagctgggcagtgataaggtag

SEQ ID NO: 1954317 - DNA, 25 bp, Homo sapien
tgggaagaagaatgcagcgttcatt

SEQ ID NO: 1954318 - DNA, 25 bp, Homo sapien
tgcagcgttcattgattaacacaat

SEQ ID NO: 1954319 - DNA, 25 bp, Homo sapien
gaagaatgcagcgttcattgattaa

SEQ ID NO: 1954320 - DNA, 25 bp, Homo sapien
gcgttcattgattaacacaatttct

SEQ ID NO: 1954321 - DNA, 25 bp, Homo sapien
gctgctcctcacatgtgcgtcttat

SEQ ID NO: 1954322 - DNA, 25 bp, Homo sapien
catgtgcgtcttatcttggaggctg

SEQ ID NO: 1954323 - DNA, 25 bp, Homo sapien
gatgtccgctgctcctcacatgtgc

SEQ ID NO: 1954324 - DNA, 25 bp, Homo sapien
tcacactgatgtccgctgctcctca

SEQ ID NO: 1954325 - DNA, 25 bp, Homo sapien
gatacagacggccgcttggggacag

SEQ ID NO: 1954326 - DNA, 25 bp, Homo sapien
cctctgtgatacagacggccgcttg

SEQ ID NO: 1954327 - DNA, 25 bp, Homo sapien
tctgtgatacagacggccgcttggg

SEQ ID NO: 1954328 - DNA, 25 bp, Homo sapien
tacagacggccgcttggggacagca

SEQ ID NO: 1954329 - DNA, 25 bp, Homo sapien
ccagctcggaatggaaggcttccaa

SEQ ID NO: 1954330 - DNA, 25 bp, Homo sapien
gaggcgcgctctgtcaagttgctga

SEQ ID NO: 1954331 - DNA, 25 bp, Homo sapien
cacggtccggtggtgaaatcactgc

SEQ ID NO: 1954332 - DNA, 25 bp, Homo sapien
tcccttttggacgagatctgaaaca

SEQ ID NO: 1954333 - DNA, 25 bp, Homo sapien
gctaacaatttcgaggctttcctta

SEQ ID NO: 1954334 - DNA, 25 bp, Homo sapien
aaatcagttgatggatgaaagttac

SEQ ID NO: 1954335 - DNA, 25 bp, Homo sapien
aggcaagaatgatctttggaatgtt

SEQ ID NO: 1954336 - DNA, 25 bp, Homo sapien
gaaattgctaacaatttcgaggctt

SEQ ID NO: 1954337 - DNA, 25 bp, Homo sapien
gatgttaattcactcgttccgggcc

SEQ ID NO: 1954338 - DNA, 25 bp, Homo sapien
tttgctgagcaccaaaagatcggga

SEQ ID NO: 1954339 - DNA, 25 bp, Homo sapien
gagacccttggtgcttcatgtggta

SEQ ID NO: 1954340 - DNA, 25 bp, Homo sapien
gcagttaaggaagcgtcatgaaaca

SEQ ID NO: 1954341 - DNA, 25 bp, Homo sapien
tttatcctgaagacaagatcatggg

SEQ ID NO: 1954342 - DNA, 25 bp, Homo sapien
tcagtgggaagcagatttagaggcc

SEQ ID NO: 1954343 - DNA, 25 bp, Homo sapien
caaacattcccacgacgtgttcggg

SEQ ID NO: 1954344 - DNA, 25 bp, Homo sapien
gaaccgtgagtaggagccactggct

SEQ ID NO: 1954345 - DNA, 25 bp, Homo sapien
cagacaccctcagattactgaggga

SEQ ID NO: 1954346 - DNA, 25 bp, Homo sapien
tggaccccaacatagcctgctggct

SEQ ID NO: 1954347 - DNA, 25 bp, Homo sapien
tctcattgtctccactctcagacac

SEQ ID NO: 1954348 - DNA, 25 bp, Homo sapien
tactgagggaattctctcgtgtgcc

SEQ ID NO: 1954349 - DNA, 25 bp, Homo sapien
gggctctgcgccatcagcgcccttt

SEQ ID NO: 1954350 - DNA, 25 bp, Homo sapien
cttgacattttccccgggctctgcg

SEQ ID NO: 1954351 - DNA, 25 bp, Homo sapien
ttgacggttgtttgggggcatccac

SEQ ID NO: 1954352 - DNA, 25 bp, Homo sapien
caatttgacggttgtttgggggcat

SEQ ID NO: 1954353 - DNA, 25 bp, Homo sapien
tgtgagcccgctccaaagataaagt

SEQ ID NO: 1954354 - DNA, 25 bp, Homo sapien
tgaaaataatcgaaaggccctgcct

SEQ ID NO: 1954355 - DNA, 25 bp, Homo sapien
tagacacaagtagtcagtgaccccg

SEQ ID NO: 1954356 - DNA, 25 bp, Homo sapien
gaggtcggcgcacaatctagttagt

SEQ ID NO: 1954357 - DNA, 25 bp, Homo sapien
ccagtgcccgtgtgcagcatgcaga

SEQ ID NO: 1954358 - DNA, 25 bp, Homo sapien
tgcagcatgcagaccacttgtcacc

SEQ ID NO: 1954359 - DNA, 25 bp, Homo sapien
cagtgcccgtgtgcagcatgcagac

SEQ ID NO: 1954360 - DNA, 25 bp, Homo sapien
agaccacttgtcacccaatccattt

SEQ ID NO: 1954361 - DNA, 25 bp, Homo sapien
tccacccatccaccaaaatgccatc

SEQ ID NO: 1954362 - DNA, 25 bp, Homo sapien
tatctgtggaccacactccacgtgg

SEQ ID NO: 1954363 - DNA, 25 bp, Homo sapien
ctgcccccaggttgtccaggatcct

SEQ ID NO: 1954364 - DNA, 25 bp, Homo sapien
cactcagagccatgacgtccctctg

SEQ ID NO: 1954365 - DNA, 25 bp, Homo sapien
ctcaaaagcaacaggtccaagatcc

SEQ ID NO: 1954366 - DNA, 25 bp, Homo sapien
ttccgcgagaacgttccctgatcat

SEQ ID NO: 1954367 - DNA, 25 bp, Homo sapien
caaaagcaacaggtccaagatccca

SEQ ID NO: 1954368 - DNA, 25 bp, Homo sapien
agcatttctcgcacagcgtttccgc

SEQ ID NO: 1954369 - DNA, 25 bp, Homo sapien
tgggaagcaggggaagccgtcctgt

SEQ ID NO: 1954370 - DNA, 25 bp, Homo sapien
gcagaggaagcagtgcgagcaaacg

SEQ ID NO: 1954371 - DNA, 25 bp, Homo sapien
cctgagcaggcccgttggggcagca

SEQ ID NO: 1954372 - DNA, 25 bp, Homo sapien
gcgagcaaacgcggggacctgagca

SEQ ID NO: 1954373 - DNA, 25 bp, Homo sapien
tctgtgtgtttttatatgcatatgg

SEQ ID NO: 1954374 - DNA, 25 bp, Homo sapien
tttatatgcatatgggaaacactga

SEQ ID NO: 1954375 - DNA, 25 bp, Homo sapien
gtgtgtttttatatgcatatgggaa

SEQ ID NO: 1954376 - DNA, 25 bp, Homo sapien
ttatatgcatatgggaaacactgac

SEQ ID NO: 1954377 - DNA, 25 bp, Homo sapien
ccccaccaatcacaagtgggaccct

SEQ ID NO: 1954378 - DNA, 25 bp, Homo sapien
gaaacccggggctgtaatgcatgaa

SEQ ID NO: 1954379 - DNA, 25 bp, Homo sapien
tctacccccaccaatcacaagtggg

SEQ ID NO: 1954380 - DNA, 25 bp, Homo sapien
agagatgaaacacccatcccatctg

SEQ ID NO: 1954381 - DNA, 25 bp, Homo sapien
tcaaatccagatctggttgaattct

SEQ ID NO: 1954382 - DNA, 25 bp, Homo sapien
gtttccccagagaagctttgtcaca

SEQ ID NO: 1954383 - DNA, 25 bp, Homo sapien
ggaatggggagaacagtctcttaag

SEQ ID NO: 1954384 - DNA, 25 bp, Homo sapien
gagaagctttgtcacaagtaatctc

SEQ ID NO: 1954385 - DNA, 25 bp, Homo sapien
tatggaagtggcctgtttggggcca

SEQ ID NO: 1954386 - DNA, 25 bp, Homo sapien
catatggatgtcgctgagaaggagt

SEQ ID NO: 1954387 - DNA, 25 bp, Homo sapien
ctgccaggcgttggggagcatatgg

SEQ ID NO: 1954388 - DNA, 25 bp, Homo sapien
gggacttgggcagcaaagctgccag

SEQ ID NO: 1954389 - DNA, 25 bp, Homo sapien
agtatttatcaggaaacgtgatgag

SEQ ID NO: 1954390 - DNA, 25 bp, Homo sapien
gaaatagagcatcttaccatccaaa

SEQ ID NO: 1954391 - DNA, 25 bp, Homo sapien
tgatgagtggccctgaaatagagca

SEQ ID NO: 1954392 - DNA, 25 bp, Homo sapien
gcatcttaccatccaaatttctcag

SEQ ID NO: 1954393 - DNA, 25 bp, Homo sapien
tgaacatcaaaccacgcctgttggg

SEQ ID NO: 1954394 - DNA, 25 bp, Homo sapien
cattgtcacccgtcatgctcatgag

SEQ ID NO: 1954395 - DNA, 25 bp, Homo sapien
gcagtccgcctcagcatgaaagtgg

SEQ ID NO: 1954396 - DNA, 25 bp, Homo sapien
gacaggttatgctacagggattgcc

SEQ ID NO: 1954397 - DNA, 25 bp, Homo sapien
ggaggggtgtcagggcctaagaaga

SEQ ID NO: 1954398 - DNA, 25 bp, Homo sapien
cctaagaagagtgaggaagacatct

SEQ ID NO: 1954399 - DNA, 25 bp, Homo sapien
gaggaagacatctgtgtggttggga

SEQ ID NO: 1954400 - DNA, 25 bp, Homo sapien
tgaggaagacatctgtgtggttggg

SEQ ID NO: 1954401 - DNA, 25 bp, Homo sapien
gcatggttgtaactatgtgtatgtg

SEQ ID NO: 1954402 - DNA, 25 bp, Homo sapien
taaaggtagctgtggaaatgagcat

SEQ ID NO: 1954403 - DNA, 25 bp, Homo sapien
ggattagagttgagatactggcata

SEQ ID NO: 1954404 - DNA, 25 bp, Homo sapien
tgtgtatagctatgttcactgtgag

SEQ ID NO: 1954405 - DNA, 25 bp, Homo sapien
tgcacatcaccaaggaaaccaaggt

SEQ ID NO: 1954406 - DNA, 25 bp, Homo sapien
gccttgtcatgcactttgagggatc

SEQ ID NO: 1954407 - DNA, 25 bp, Homo sapien
gatgtgaaaggagggccataaagca

SEQ ID NO: 1954408 - DNA, 25 bp, Homo sapien
taatagagagctggccgttgtaaag

SEQ ID NO: 1954409 - DNA, 25 bp, Homo sapien
cccaacagagcaggtgataggcagg

SEQ ID NO: 1954410 - DNA, 25 bp, Homo sapien
caacagagcaggtgataggcaggtc

SEQ ID NO: 1954411 - DNA, 25 bp, Homo sapien
ggcaggtctaggcatacgccagtcc

SEQ ID NO: 1954412 - DNA, 25 bp, Homo sapien
ggcatacgccagtccctggacagga

SEQ ID NO: 1954413 - DNA, 25 bp, Homo sapien
ctcttggcagggcattctgagacaa

SEQ ID NO: 1954414 - DNA, 25 bp, Homo sapien
tctaatttatccaggggtgtgctcc

SEQ ID NO: 1954415 - DNA, 25 bp, Homo sapien
acagaaggactgactgctaagcggg

SEQ ID NO: 1954416 - DNA, 25 bp, Homo sapien
gatgtagatttgcacacgccctctc

SEQ ID NO: 1954417 - DNA, 25 bp, Homo sapien
cagttcagtgggcttgctgaggacc

SEQ ID NO: 1954418 - DNA, 25 bp, Homo sapien
gggaccttgcacagccagactgtta

SEQ ID NO: 1954419 - DNA, 25 bp, Homo sapien
atattttctaatccgcagctctggg

SEQ ID NO: 1954420 - DNA, 25 bp, Homo sapien
tgaggacccaaagctcaatgtcatt

SEQ ID NO: 1954421 - DNA, 25 bp, Homo sapien
ggtgcagtgcaggagacactgaatt

SEQ ID NO: 1954422 - DNA, 25 bp, Homo sapien
gcagtgcaggagacactgaattcag

SEQ ID NO: 1954423 - DNA, 25 bp, Homo sapien
gatattcaggtgcagtgcaggagac

SEQ ID NO: 1954424 - DNA, 25 bp, Homo sapien
ctggcgatattcaggtgcagtgcag

SEQ ID NO: 1954425 - DNA, 25 bp, Homo sapien
tcatacacgtttgcaagactggaca

SEQ ID NO: 1954426 - DNA, 25 bp, Homo sapien
gacaagataggtctgcctgttccat

SEQ ID NO: 1954427 - DNA, 25 bp, Homo sapien
tgttccattgagacgaactgccctc

SEQ ID NO: 1954428 - DNA, 25 bp, Homo sapien
gcagaaacagctttatactgatggg

SEQ ID NO: 1954429 - DNA, 25 bp, Homo sapien
gggctgcggctgggagcggcaccac

SEQ ID NO: 1954430 - DNA, 25 bp, Homo sapien
tcaagataggatggggctgcggctg

SEQ ID NO: 1954431 - DNA, 25 bp, Homo sapien
gatggggctgcggctgggagcggca

SEQ ID NO: 1954432 - DNA, 25 bp, Homo sapien
tggggctgcggctgggagcggcacc

SEQ ID NO: 1954433 - DNA, 25 bp, Homo sapien
gcttcctgcggcttttctatttctc

SEQ ID NO: 1954434 - DNA, 25 bp, Homo sapien
gcactggcgtcctccaaaattgctt

SEQ ID NO: 1954435 - DNA, 25 bp, Homo sapien
ttcttatgtcctgtgacccactcac

SEQ ID NO: 1954436 - DNA, 25 bp, Homo sapien
ggagccgtggcttgctggctggggt

SEQ ID NO: 1954437 - DNA, 25 bp, Homo sapien
taaggcacaccggggaaggtcaaca

SEQ ID NO: 1954438 - DNA, 25 bp, Homo sapien
ggtgttccgcttccctaaggcacac

SEQ ID NO: 1954439 - DNA, 25 bp, Homo sapien
tgagggtgttccgcttccctaaggc

SEQ ID NO: 1954440 - DNA, 25 bp, Homo sapien
cggggaaggtcaacaggttcctgtg

SEQ ID NO: 1954441 - DNA, 25 bp, Homo sapien
cagcaggcaataggaagagacaaaa

SEQ ID NO: 1954442 - DNA, 25 bp, Homo sapien
gcaggcaataggaagagacaaaagt

SEQ ID NO: 1954443 - DNA, 25 bp, Homo sapien
gaacagcaggcaataggaagagaca

SEQ ID NO: 1954444 - DNA, 25 bp, Homo sapien
aggaacagcaggcaataggaagaga

SEQ ID NO: 1954445 - DNA, 25 bp, Homo sapien
tgccagagcaggaagaacagtccag

SEQ ID NO: 1954446 - DNA, 25 bp, Homo sapien
ccagagcaggaagaacagtccaggc

SEQ ID NO: 1954447 - DNA, 25 bp, Homo sapien
aggtgccagagcaggaagaacagtc

SEQ ID NO: 1954448 - DNA, 25 bp, Homo sapien
ctgaggtgccagagcaggaagaaca

SEQ ID NO: 1954449 - DNA, 25 bp, Homo sapien
caaggactttcgtagtcttgattct

SEQ ID NO: 1954450 - DNA, 25 bp, Homo sapien
tctgaagaagtcgtttcatcccact

SEQ ID NO: 1954451 - DNA, 25 bp, Homo sapien
acaccaccatcaaggactttcgtag

SEQ ID NO: 1954452 - DNA, 25 bp, Homo sapien
gaaggaacacgttcaacaccaccat

SEQ ID NO: 1954453 - DNA, 25 bp, Homo sapien
taaccctaaactccttgttcatgga

SEQ ID NO: 1954454 - DNA, 25 bp, Homo sapien
cttggatttgggcacatacgcggtg

SEQ ID NO: 1954455 - DNA, 25 bp, Homo sapien
tgttcatggaatcaacagccgactg

SEQ ID NO: 1954456 - DNA, 25 bp, Homo sapien
gctcctaaacacctccttggatttg

SEQ ID NO: 1954457 - DNA, 25 bp, Homo sapien
actgtttttacacgatacatgcctg

SEQ ID NO: 1954458 - DNA, 25 bp, Homo sapien
gcactgtttttacacgatacatgcc

SEQ ID NO: 1954459 - DNA, 25 bp, Homo sapien
tgtttttacacgatacatgcctggg

SEQ ID NO: 1954460 - DNA, 25 bp, Homo sapien
gctccaggagccctcataccctgca

SEQ ID NO: 1954461 - DNA, 25 bp, Homo sapien
ggggagacgtgagggtgggctcaga

SEQ ID NO: 1954462 - DNA, 25 bp, Homo sapien
ggagacgtgagggtgggctcagact

SEQ ID NO: 1954463 - DNA, 25 bp, Homo sapien
agacgtgagggtgggctcagactca

SEQ ID NO: 1954464 - DNA, 25 bp, Homo sapien
ccatttgtgagtaaatctggcagaa

SEQ ID NO: 1954465 - DNA, 25 bp, Homo sapien
caaatatcacagggaattgtttctt

SEQ ID NO: 1954466 - DNA, 25 bp, Homo sapien
tccaggctgcaagcaaaaaatttat

SEQ ID NO: 1954467 - DNA, 25 bp, Homo sapien
aaatatcacagggaattgtttcttt

SEQ ID NO: 1954468 - DNA, 25 bp, Homo sapien
ccaggctgcaagcaaaaaatttatt

SEQ ID NO: 1954469 - DNA, 25 bp, Homo sapien
gagattgtgtcggatgccaggccac

SEQ ID NO: 1954470 - DNA, 25 bp, Homo sapien
ttagcaaccagcgaagtttctgtgg

SEQ ID NO: 1954471 - DNA, 25 bp, Homo sapien
caagttattagattccatgggacct

SEQ ID NO: 1954472 - DNA, 25 bp, Homo sapien
gccaggccacgaagacttagcaacc

SEQ ID NO: 1954473 - DNA, 25 bp, Homo sapien
ggtaactgctaggaagagaatccag

SEQ ID NO: 1954474 - DNA, 25 bp, Homo sapien
ggaggtgacgcttgaggtaggcgct

SEQ ID NO: 1954475 - DNA, 25 bp, Homo sapien
gaggtaggcgctgatgagagccccg

SEQ ID NO: 1954476 - DNA, 25 bp, Homo sapien
tcactgcacgggtgattctgggatg

SEQ ID NO: 1954477 - DNA, 25 bp, Homo sapien
ccactcttggataatcattcttggg

SEQ ID NO: 1954478 - DNA, 25 bp, Homo sapien
cattcttggggcacacatttccgag

SEQ ID NO: 1954479 - DNA, 25 bp, Homo sapien
aaaggacgtgctcccggccctgcag

SEQ ID NO: 1954480 - DNA, 25 bp, Homo sapien
acatttccgagttggcctgctcctc

SEQ ID NO: 1954481 - DNA, 25 bp, Homo sapien
gacggctgcagtggcaccccaagct

SEQ ID NO: 1954482 - DNA, 25 bp, Homo sapien
gtggcaccccaagctcactggaagc

SEQ ID NO: 1954483 - DNA, 25 bp, Homo sapien
ctgacggggagccagggtggacggc

SEQ ID NO: 1954484 - DNA, 25 bp, Homo sapien
gggtggacggctgcagtggcacccc

SEQ ID NO: 1954485 - DNA, 25 bp, Homo sapien
tgtgctgatgtttttaaagcgtggg

SEQ ID NO: 1954486 - DNA, 25 bp, Homo sapien
tctctcgtccaccccataggccagc

SEQ ID NO: 1954487 - DNA, 25 bp, Homo sapien
ccataggccagcaggatttgaagga

SEQ ID NO: 1954488 - DNA, 25 bp, Homo sapien
gaaaacagttacagctgcaccactg

SEQ ID NO: 1954489 - DNA, 25 bp, Homo sapien
aagggtactgcaaggatttccaggc

SEQ ID NO: 1954490 - DNA, 25 bp, Homo sapien
tgtttgcatagaggcaactggacac

SEQ ID NO: 1954491 - DNA, 25 bp, Homo sapien
gaatccaggtaccttcaatgtccag

SEQ ID NO: 1954492 - DNA, 25 bp, Homo sapien
gccaggcttggtgtcaaagggtact

SEQ ID NO: 1954493 - DNA, 25 bp, Homo sapien
cctggtgtccatacggaagacagct

SEQ ID NO: 1954494 - DNA, 25 bp, Homo sapien
gaaccatactgattctagcatctgg

SEQ ID NO: 1954495 - DNA, 25 bp, Homo sapien
gaagacagctccgaattcttccttg

SEQ ID NO: 1954496 - DNA, 25 bp, Homo sapien
catctctgtcatccgaggtgacctg

SEQ ID NO: 1954497 - DNA, 25 bp, Homo sapien
cctagctgaagcttcgggagttgcc

SEQ ID NO: 1954498 - DNA, 25 bp, Homo sapien
tcgggagttgccaatccgtgggctc

SEQ ID NO: 1954499 - DNA, 25 bp, Homo sapien
tgtgttatgcaaatgtcttctgagg

SEQ ID NO: 1954500 - DNA, 25 bp, Homo sapien
tattgtagaaaaccgtgcctagctg

SEQ ID NO: 1954501 - DNA, 25 bp, Homo sapien
ccagcagcaggggacactgtgtgca

SEQ ID NO: 1954502 - DNA, 25 bp, Homo sapien
gctgctggagacaaaagtgtgagca

SEQ ID NO: 1954503 - DNA, 25 bp, Homo sapien
tgtgctgctggagacaaaagtgtga

SEQ ID NO: 1954504 - DNA, 25 bp, Homo sapien
cacactgtgctgctggagacaaaag

SEQ ID NO: 1954505 - DNA, 25 bp, Homo sapien
gagcggtcacaggtgtggttgagaa

SEQ ID NO: 1954506 - DNA, 25 bp, Homo sapien
gaagagccgcccagaaacaagatct

SEQ ID NO: 1954507 - DNA, 25 bp, Homo sapien
gttcaagggcgacagagcggtcaca

SEQ ID NO: 1954508 - DNA, 25 bp, Homo sapien
gcaaacagtaggtgccagccgaagt

SEQ ID NO: 1954509 - DNA, 25 bp, Homo sapien
gctgcctctcagtcggtcctggtgt

SEQ ID NO: 1954510 - DNA, 25 bp, Homo sapien
cctctcagtcggtcctggtgtgggt

SEQ ID NO: 1954511 - DNA, 25 bp, Homo sapien
aagctgcctctcagtcggtcctggt

SEQ ID NO: 1954512 - DNA, 25 bp, Homo sapien
aggaagctgcctctcagtcggtcct

SEQ ID NO: 1954513 - DNA, 25 bp, Homo sapien
tccagtgcccgtcaggaatgcccgg

SEQ ID NO: 1954514 - DNA, 25 bp, Homo sapien
ccagtgcccgtcaggaatgcccggg

SEQ ID NO: 1954515 - DNA, 25 bp, Homo sapien
ggtccgcatccttttccctggatga

SEQ ID NO: 1954516 - DNA, 25 bp, Homo sapien
aggccccttctggtccgcatccttt

SEQ ID NO: 1954517 - DNA, 25 bp, Homo sapien
tatttgttttaatggaagaaatgtg

SEQ ID NO: 1954518 - DNA, 25 bp, Homo sapien
taatggaagaaatgtgggtaaatac

SEQ ID NO: 1954519 - DNA, 25 bp, Homo sapien
tggaagaaatgtgggtaaatacagt

SEQ ID NO: 1954520 - DNA, 25 bp, Homo sapien
tgttttaatggaagaaatgtgggta

SEQ ID NO: 1954521 - DNA, 25 bp, Homo sapien
ttcctgcccaaatgtatagtgagcc

SEQ ID NO: 1954522 - DNA, 25 bp, Homo sapien
tggcttaacttcaacatggaacacg

SEQ ID NO: 1954523 - DNA, 25 bp, Homo sapien
gaacacgtctgtcacacaggaagct

SEQ ID NO: 1954524 - DNA, 25 bp, Homo sapien
gcaccagttttatgagcacgttctt

SEQ ID NO: 1954525 - DNA, 25 bp, Homo sapien
gccagagaaccagggccaggggcat

SEQ ID NO: 1954526 - DNA, 25 bp, Homo sapien
tggccagagaaccagggccaggggc

SEQ ID NO: 1954527 - DNA, 25 bp, Homo sapien
ctggccagagaaccagggccagggg

SEQ ID NO: 1954528 - DNA, 25 bp, Homo sapien
ggccagagaaccagggccaggggca

SEQ ID NO: 1954529 - DNA, 25 bp, Homo sapien
tgcccatccagcacctggtaacaca

SEQ ID NO: 1954530 - DNA, 25 bp, Homo sapien
gcccatccagcacctggtaacacat

SEQ ID NO: 1954531 - DNA, 25 bp, Homo sapien
gttgttggttttgcccatccagcac

SEQ ID NO: 1954532 - DNA, 25 bp, Homo sapien
gttggttttgcccatccagcacctg

SEQ ID NO: 1954533 - DNA, 25 bp, Homo sapien
tggaagcttctgagtgagccctccc

SEQ ID NO: 1954534 - DNA, 25 bp, Homo sapien
tgcactgcgcatccttgttttggga

SEQ ID NO: 1954535 - DNA, 25 bp, Homo sapien
tgaggttcatcctttgcactggaag

SEQ ID NO: 1954536 - DNA, 25 bp, Homo sapien
ggcagagattgttttcgctcgggtc

SEQ ID NO: 1954537 - DNA, 25 bp, Homo sapien
gaaattgcaatgaaggaatcagtcc

SEQ ID NO: 1954538 - DNA, 25 bp, Homo sapien
gtctgagctttccagccatgaacac

SEQ ID NO: 1954539 - DNA, 25 bp, Homo sapien
aaagcgcttaactcgaagatgtgga

SEQ ID NO: 1954540 - DNA, 25 bp, Homo sapien
gaatcagtccttctaacttgtagcc

SEQ ID NO: 1954541 - DNA, 25 bp, Homo sapien
gattttcgcctcagtagagaagcgg

SEQ ID NO: 1954542 - DNA, 25 bp, Homo sapien
atcccaaagggcctaggaccatggc

SEQ ID NO: 1954543 - DNA, 25 bp, Homo sapien
gaggccaacgtagcaatctatgcag

SEQ ID NO: 1954544 - DNA, 25 bp, Homo sapien
aagcggagggagtctcctcgaagcc

SEQ ID NO: 1954545 - DNA, 25 bp, Homo sapien
tcctgttggcttatcagggctgcat

SEQ ID NO: 1954546 - DNA, 25 bp, Homo sapien
gggccacatccgctgcttcctgttg

SEQ ID NO: 1954547 - DNA, 25 bp, Homo sapien
caagtatcaggtgtgcatttgaaaa

SEQ ID NO: 1954548 - DNA, 25 bp, Homo sapien
ccactgcttcctctcgtgagtttag

SEQ ID NO: 1954549 - DNA, 25 bp, Homo sapien
atttcccctgtttcagtggagctgg

SEQ ID NO: 1954550 - DNA, 25 bp, Homo sapien
ggaagaggagagcatattcccatgg

SEQ ID NO: 1954551 - DNA, 25 bp, Homo sapien
gaagaggagagcatattcccatggg

SEQ ID NO: 1954552 - DNA, 25 bp, Homo sapien
aagaggagagcatattcccatgggg

SEQ ID NO: 1954553 - DNA, 25 bp, Homo sapien
tggccctcggtgacaagatatacgg

SEQ ID NO: 1954554 - DNA, 25 bp, Homo sapien
gatgctatcgctggacaagagacca

SEQ ID NO: 1954555 - DNA, 25 bp, Homo sapien
ttcagagttctcaagacgcagggct

SEQ ID NO: 1954556 - DNA, 25 bp, Homo sapien
tattgccccaaagcgtaagagtgag

SEQ ID NO: 1954557 - DNA, 25 bp, Homo sapien
ccttccaccatagataaggcaggac

SEQ ID NO: 1954558 - DNA, 25 bp, Homo sapien
aaggcaggacacactcatgacttgc

SEQ ID NO: 1954559 - DNA, 25 bp, Homo sapien
aggcaggacacactcatgacttgct

SEQ ID NO: 1954560 - DNA, 25 bp, Homo sapien
cttccaccatagataaggcaggaca

SEQ ID NO: 1954561 - DNA, 25 bp, Homo sapien
tcagctggcgtcagtgaaacaatca

SEQ ID NO: 1954562 - DNA, 25 bp, Homo sapien
caccaaagtccataaggttattagt

SEQ ID NO: 1954563 - DNA, 25 bp, Homo sapien
tattagttagaaggaccgtggcttg

SEQ ID NO: 1954564 - DNA, 25 bp, Homo sapien
gtgctggaatggctctgacccggct

SEQ ID NO: 1954565 - DNA, 25 bp, Homo sapien
tccatggcgggatacccgtgaggat

SEQ ID NO: 1954566 - DNA, 25 bp, Homo sapien
gtcgcacacatgcatgtttgtccag

SEQ ID NO: 1954567 - DNA, 25 bp, Homo sapien
agggctccccgaggtccatggcggg

SEQ ID NO: 1954568 - DNA, 25 bp, Homo sapien
caggtttgttacaagcgtcgcacac

SEQ ID NO: 1954569 - DNA, 25 bp, Homo sapien
aagttcccattcacaccacgtcgat

SEQ ID NO: 1954570 - DNA, 25 bp, Homo sapien
ccggaaggaccttggcggtcacaca

SEQ ID NO: 1954571 - DNA, 25 bp, Homo sapien
tgtgacacttccaagatataaggag

SEQ ID NO: 1954572 - DNA, 25 bp, Homo sapien
ccacgtcgattcatgttcaccaaac

SEQ ID NO: 1954573 - DNA, 25 bp, Homo sapien
taaaatgggcactctattatgatta

SEQ ID NO: 1954574 - DNA, 25 bp, Homo sapien
tcctagggaatctgagggagtctcc

SEQ ID NO: 1954575 - DNA, 25 bp, Homo sapien
agtctcctgtgtgcttggagggaaa

SEQ ID NO: 1954576 - DNA, 25 bp, Homo sapien
caaaaggaagtcatcctcctctctg

SEQ ID NO: 1954577 - DNA, 25 bp, Homo sapien
tgtggacgccacgtgacacactcac

SEQ ID NO: 1954578 - DNA, 25 bp, Homo sapien
tggtgtggacgccacgtgacacact

SEQ ID NO: 1954579 - DNA, 25 bp, Homo sapien
gggtctggtgtggacgccacgtgac

SEQ ID NO: 1954580 - DNA, 25 bp, Homo sapien
gtctggtgtggacgccacgtgacac

SEQ ID NO: 1954581 - DNA, 25 bp, Homo sapien
cctccggatttctcactgggttcct

SEQ ID NO: 1954582 - DNA, 25 bp, Homo sapien
tctcctccggatttctcactgggtt

SEQ ID NO: 1954583 - DNA, 25 bp, Homo sapien
tcctccggatttctcactgggttcc

SEQ ID NO: 1954584 - DNA, 25 bp, Homo sapien
cgtctcctccggatttctcactggg

SEQ ID NO: 1954585 - DNA, 25 bp, Homo sapien
tccattaggcaatagggctcttcgg

SEQ ID NO: 1954586 - DNA, 25 bp, Homo sapien
gcagttctcaaagtgggctcccggg

SEQ ID NO: 1954587 - DNA, 25 bp, Homo sapien
tgagaaccactgttccaaaccgagg

SEQ ID NO: 1954588 - DNA, 25 bp, Homo sapien
agaggagctcgtgttcttagggccc

SEQ ID NO: 1954589 - DNA, 25 bp, Homo sapien
tctccattgccgcaggtttctgtct

SEQ ID NO: 1954590 - DNA, 25 bp, Homo sapien
tctctgtgggttcgtgaaaacaacc

SEQ ID NO: 1954591 - DNA, 25 bp, Homo sapien
tagaaccagagctttaaatggcctt

SEQ ID NO: 1954592 - DNA, 25 bp, Homo sapien
gtttgccagacactgaagtaagatg

SEQ ID NO: 1954593 - DNA, 25 bp, Homo sapien
cagtttccagtgtcacgcagatgtc

SEQ ID NO: 1954594 - DNA, 25 bp, Homo sapien
tgtcacgcagatgtcacagccctga

SEQ ID NO: 1954595 - DNA, 25 bp, Homo sapien
gatgtcacagccctgaccaggttcc

SEQ ID NO: 1954596 - DNA, 25 bp, Homo sapien
tccagtgtcacgcagatgtcacagc

SEQ ID NO: 1954597 - DNA, 25 bp, Homo sapien
ctagaagtgaaccaatcagaattgg

SEQ ID NO: 1954598 - DNA, 25 bp, Homo sapien
atatcatgtaactagaagtgaacca

SEQ ID NO: 1954599 - DNA, 25 bp, Homo sapien
tgtaactagaagtgaaccaatcaga

SEQ ID NO: 1954600 - DNA, 25 bp, Homo sapien
tcatgtaactagaagtgaaccaatc

SEQ ID NO: 1954601 - DNA, 25 bp, Homo sapien
ggacagtgcttggtcagaggaaggc

SEQ ID NO: 1954602 - DNA, 25 bp, Homo sapien
agaggaaggcttaggtgctccccac

SEQ ID NO: 1954603 - DNA, 25 bp, Homo sapien
ttaggacagtgcttggtcagaggaa

SEQ ID NO: 1954604 - DNA, 25 bp, Homo sapien
gtcagaggaaggcttaggtgctccc

SEQ ID NO: 1954605 - DNA, 25 bp, Homo sapien
taggcatcattcgtgtaagagccat

SEQ ID NO: 1954606 - DNA, 25 bp, Homo sapien
ttcctccgccctcttgtcccattgt

SEQ ID NO: 1954607 - DNA, 25 bp, Homo sapien
cctcttgtcccattgtcagccttgg

SEQ ID NO: 1954608 - DNA, 25 bp, Homo sapien
tgtgtctgctctaggcatcattcgt

SEQ ID NO: 1954609 - DNA, 25 bp, Homo sapien
catccagctagggagagacatcaca

SEQ ID NO: 1954610 - DNA, 25 bp, Homo sapien
gcttcttaggagaaatcagcggcag

SEQ ID NO: 1954611 - DNA, 25 bp, Homo sapien
ggctgtggctgtgtaactggaaccc

SEQ ID NO: 1954612 - DNA, 25 bp, Homo sapien
tgactgaaaggatggacacgattcc

SEQ ID NO: 1954613 - DNA, 25 bp, Homo sapien
atgttaagacttaacattattctaa

SEQ ID NO: 1954614 - DNA, 25 bp, Homo sapien
ccatgtaatatgttatagaattagt

SEQ ID NO: 1954615 - DNA, 25 bp, Homo sapien
tctgtattaggggatgctaacctat

SEQ ID NO: 1954616 - DNA, 25 bp, Homo sapien
atcaccatgtaatatgttatagaat

SEQ ID NO: 1954617 - DNA, 25 bp, Homo sapien
ttcacaggagagaacgtagaggctc

SEQ ID NO: 1954618 - DNA, 25 bp, Homo sapien
tacaaggaagtactgtcatccccat

SEQ ID NO: 1954619 - DNA, 25 bp, Homo sapien
tatccgccactccttgttatgacca

SEQ ID NO: 1954620 - DNA, 25 bp, Homo sapien
cacaatgatgcctactgttaccata

SEQ ID NO: 1954621 - DNA, 25 bp, Homo sapien
aaatctaccccagcatgaggcaagg

SEQ ID NO: 1954622 - DNA, 25 bp, Homo sapien
tgccattcatgggaacgagacagcc

SEQ ID NO: 1954623 - DNA, 25 bp, Homo sapien
tcaaataccctgagacggtggctgg

SEQ ID NO: 1954624 - DNA, 25 bp, Homo sapien
gaaacactacttatgcagctgcagg

SEQ ID NO: 1954625 - DNA, 25 bp, Homo sapien
gaagtgactgatgcatccatcaggg

SEQ ID NO: 1954626 - DNA, 25 bp, Homo sapien
aaatcctccccagacagtgctcggg

SEQ ID NO: 1954627 - DNA, 25 bp, Homo sapien
tgccggcaccatggctgaagtgact

SEQ ID NO: 1954628 - DNA, 25 bp, Homo sapien
tttcacagaggaacacgccggggct

SEQ ID NO: 1954629 - DNA, 25 bp, Homo sapien
ccatctgtaatgcactcagggccca

SEQ ID NO: 1954630 - DNA, 25 bp, Homo sapien
cactctggtcagttagcgtttccaa

SEQ ID NO: 1954631 - DNA, 25 bp, Homo sapien
ccatcccaaggtcaggcctggagtt

SEQ ID NO: 1954632 - DNA, 25 bp, Homo sapien
gcctggagttccatagagaattcag

SEQ ID NO: 1954633 - DNA, 25 bp, Homo sapien
tgttctcacagatgccccgcaaaag

SEQ ID NO: 1954634 - DNA, 25 bp, Homo sapien
gccggcgctcggaatatttggattt

SEQ ID NO: 1954635 - DNA, 25 bp, Homo sapien
cagagaagcttccagtcggcaaagg

SEQ ID NO: 1954636 - DNA, 25 bp, Homo sapien
ggttcggcttggacataaccggagc

SEQ ID NO: 1954637 - DNA, 25 bp, Homo sapien
tctcggagagctcgttaatgtggtc

SEQ ID NO: 1954638 - DNA, 25 bp, Homo sapien
tgaatccgaatccttaactggagct

SEQ ID NO: 1954639 - DNA, 25 bp, Homo sapien
ccaagaggctatgagctcaaaagct

SEQ ID NO: 1954640 - DNA, 25 bp, Homo sapien
taggactgataagtgctccataggc

SEQ ID NO: 1954641 - DNA, 25 bp, Homo sapien
tggtggccgccacagaatgattctc

SEQ ID NO: 1954642 - DNA, 25 bp, Homo sapien
tctgcagtgttcacggcatggcacg

SEQ ID NO: 1954643 - DNA, 25 bp, Homo sapien
aaaccttggtgagatgtaaacctgc

SEQ ID NO: 1954644 - DNA, 25 bp, Homo sapien
tgtgtccccactcgatcctgaaatg

SEQ ID NO: 1954645 - DNA, 25 bp, Homo sapien
gggactaacgggctgagcttctgtt

SEQ ID NO: 1954646 - DNA, 25 bp, Homo sapien
agctgggactaacgggctgagcttc

SEQ ID NO: 1954647 - DNA, 25 bp, Homo sapien
ccatagagctgggactaacgggctg

SEQ ID NO: 1954648 - DNA, 25 bp, Homo sapien
actaacgggctgagcttctgttttc

SEQ ID NO: 1954649 - DNA, 25 bp, Homo sapien
gacataatggcacgcaactgtggtc

SEQ ID NO: 1954650 - DNA, 25 bp, Homo sapien
taactaattatacctgcagcagccc

SEQ ID NO: 1954651 - DNA, 25 bp, Homo sapien
ggttaggacaacatacgcatttggc

SEQ ID NO: 1954652 - DNA, 25 bp, Homo sapien
cagcagccctagatccccataaggt

SEQ ID NO: 1954653 - DNA, 25 bp, Homo sapien
tcaaaatcagccagcacgtcaagta

SEQ ID NO: 1954654 - DNA, 25 bp, Homo sapien
gaatgcaccaagagagttggaatcg

SEQ ID NO: 1954655 - DNA, 25 bp, Homo sapien
atacggaacccgctagagtgcctcc

SEQ ID NO: 1954656 - DNA, 25 bp, Homo sapien
tggccgtaacatggttgaatgcacc

SEQ ID NO: 1954657 - DNA, 25 bp, Homo sapien
gaaagcgatctattgccagggaatt

SEQ ID NO: 1954658 - DNA, 25 bp, Homo sapien
gagataacctgtccatcctagtgaa

SEQ ID NO: 1954659 - DNA, 25 bp, Homo sapien
cacctgacggtggacacaaaatgac

SEQ ID NO: 1954660 - DNA, 25 bp, Homo sapien
aaagcacaaacgattcacctgacgg

SEQ ID NO: 1954661 - DNA, 25 bp, Homo sapien
gtcaccagatgtcaagccctcaccc

SEQ ID NO: 1954662 - DNA, 25 bp, Homo sapien
tgtgacaccctgtgacccataacct

SEQ ID NO: 1954663 - DNA, 25 bp, Homo sapien
gggcactcgttctctctctaagctc

SEQ ID NO: 1954664 - DNA, 25 bp, Homo sapien
gctctgtggattccctttctatttc

SEQ ID NO: 1954665 - DNA, 25 bp, Homo sapien
caaattgcagcaaggcatcagtaac

SEQ ID NO: 1954666 - DNA, 25 bp, Homo sapien
tacaaaccatcctgcaatccttgga

SEQ ID NO: 1954667 - DNA, 25 bp, Homo sapien
ccttgcagtgataagaagtgacaca

SEQ ID NO: 1954668 - DNA, 25 bp, Homo sapien
cattcatctggcacactttggacat

SEQ ID NO: 1954669 - DNA, 25 bp, Homo sapien
tggccccgaggtcttccagtgcagg

SEQ ID NO: 1954670 - DNA, 25 bp, Homo sapien
aggagccaggcgtgcaggagcggca

SEQ ID NO: 1954671 - DNA, 25 bp, Homo sapien
gcgtctccgggactcagcgtggccc

SEQ ID NO: 1954672 - DNA, 25 bp, Homo sapien
ggagcggcaggtccgagggcacaca

SEQ ID NO: 1954673 - DNA, 25 bp, Homo sapien
tgtcctgtttctccttacacttccc

SEQ ID NO: 1954674 - DNA, 25 bp, Homo sapien
ctggaggccatcaggagtgaaggtt

SEQ ID NO: 1954675 - DNA, 25 bp, Homo sapien
ccatcaggagtgaaggttttgtcct

SEQ ID NO: 1954676 - DNA, 25 bp, Homo sapien
caggagtgaaggttttgtcctgttt

SEQ ID NO: 1954677 - DNA, 25 bp, Homo sapien
ctaaagacctgggtgcgaagagccc

SEQ ID NO: 1954678 - DNA, 25 bp, Homo sapien
tgggtgcctttgagatccacggtca

SEQ ID NO: 1954679 - DNA, 25 bp, Homo sapien
taagtctttctggtaggtggtcaca

SEQ ID NO: 1954680 - DNA, 25 bp, Homo sapien
tgagcagatgtgtgggttcctgtcc

SEQ ID NO: 1954681 - DNA, 25 bp, Homo sapien
cccgactggctcttagtggaaggaa

SEQ ID NO: 1954682 - DNA, 25 bp, Homo sapien
tcggaacagccctggatggatgagc

SEQ ID NO: 1954683 - DNA, 25 bp, Homo sapien
ggatgtgtgcactgccagttgcaga

SEQ ID NO: 1954684 - DNA, 25 bp, Homo sapien
tgtgtgcactgccagttgcagagct

SEQ ID NO: 1954685 - DNA, 25 bp, Homo sapien
tggaagtgttttgactacatactac

SEQ ID NO: 1954686 - DNA, 25 bp, Homo sapien
gatctgatgcctgcgggcttctccg

SEQ ID NO: 1954687 - DNA, 25 bp, Homo sapien
tacatactacctgcgacgccctgtt

SEQ ID NO: 1954688 - DNA, 25 bp, Homo sapien
cgtgctgtgtacatcatactggaag

SEQ ID NO: 1954689 - DNA, 25 bp, Homo sapien
acctaactcttgagaacgctgtcct

SEQ ID NO: 1954690 - DNA, 25 bp, Homo sapien
tctccagcttccaaatatgtccaaa

SEQ ID NO: 1954691 - DNA, 25 bp, Homo sapien
cccaggccttcgctgaagccctgtg

SEQ ID NO: 1954692 - DNA, 25 bp, Homo sapien
tagaccccagttggggtgacatctc

SEQ ID NO: 1954693 - DNA, 25 bp, Homo sapien
tgttggttcctgaagtggattgttc

SEQ ID NO: 1954694 - DNA, 25 bp, Homo sapien
aattctctgagctaccccattagtt

SEQ ID NO: 1954695 - DNA, 25 bp, Homo sapien
gtggattgttcagttctgctgtgaa

SEQ ID NO: 1954696 - DNA, 25 bp, Homo sapien
gctaccccattagtttcatatatcc

SEQ ID NO: 1954697 - DNA, 25 bp, Homo sapien
ggccaccttctcctgatgaacataa

SEQ ID NO: 1954698 - DNA, 25 bp, Homo sapien
agaggacaaaccctgccacgtggcc

SEQ ID NO: 1954699 - DNA, 25 bp, Homo sapien
tctggagttgcccagtgatgcccac

SEQ ID NO: 1954700 - DNA, 25 bp, Homo sapien
cacagattctttagttacaatgacc

SEQ ID NO: 1954701 - DNA, 25 bp, Homo sapien
tcagacgagcttgtacacgtacaca

SEQ ID NO: 1954702 - DNA, 25 bp, Homo sapien
tgaaactccatggtaatgacgctgt

SEQ ID NO: 1954703 - DNA, 25 bp, Homo sapien
gaaactccatggtaatgacgctgta

SEQ ID NO: 1954704 - DNA, 25 bp, Homo sapien
atgaaactccatggtaatgacgctg

SEQ ID NO: 1954705 - DNA, 25 bp, Homo sapien
gtcattcatcttgccccggtcgaca

SEQ ID NO: 1954706 - DNA, 25 bp, Homo sapien
gggtcattcatcttgccccggtcga

SEQ ID NO: 1954707 - DNA, 25 bp, Homo sapien
ggtcgacatcctcgcggcctggctt

SEQ ID NO: 1954708 - DNA, 25 bp, Homo sapien
ccggtcgacatcctcgcggcctggc

SEQ ID NO: 1954709 - DNA, 25 bp, Homo sapien
tgaaatcaggcatgggactgactga

SEQ ID NO: 1954710 - DNA, 25 bp, Homo sapien
ctgatgaagtgccagtgtgccttca

SEQ ID NO: 1954711 - DNA, 25 bp, Homo sapien
cttcatgaaatcaggcatgggactg

SEQ ID NO: 1954712 - DNA, 25 bp, Homo sapien
gtgtgccttcatgaaatcaggcatg

SEQ ID NO: 1954713 - DNA, 25 bp, Homo sapien
tcagccaaatgtgttgcctaaggga

SEQ ID NO: 1954714 - DNA, 25 bp, Homo sapien
aagtagactacttgtaaagcatttt

SEQ ID NO: 1954715 - DNA, 25 bp, Homo sapien
ggaatttttatgctctacttgtagt

SEQ ID NO: 1954716 - DNA, 25 bp, Homo sapien
atcaagagctctagatgaaattttt

SEQ ID NO: 1954717 - DNA, 25 bp, Homo sapien
ccttcgaatgactttggagatcact

SEQ ID NO: 1954718 - DNA, 25 bp, Homo sapien
tagttcaactcggattcagggttac

SEQ ID NO: 1954719 - DNA, 25 bp, Homo sapien
catctgcatacagggttatcctggg

SEQ ID NO: 1954720 - DNA, 25 bp, Homo sapien
cagggttacttatgcagtgctacac

SEQ ID NO: 1954721 - DNA, 25 bp, Homo sapien
tatggctctaaaacagatacggctg

SEQ ID NO: 1954722 - DNA, 25 bp, Homo sapien
gggattgcatcttttacactagcag

SEQ ID NO: 1954723 - DNA, 25 bp, Homo sapien
gataacagtctaacctaagcccaag

SEQ ID NO: 1954724 - DNA, 25 bp, Homo sapien
cattcagcatagtgcctaggagctt

SEQ ID NO: 1954725 - DNA, 25 bp, Homo sapien
ggctactggctactcagcgttcatt

SEQ ID NO: 1954726 - DNA, 25 bp, Homo sapien
gaattactctcacgatggccaactg

SEQ ID NO: 1954727 - DNA, 25 bp, Homo sapien
tgattaacaaaatctcagccgcgaa

SEQ ID NO: 1954728 - DNA, 25 bp, Homo sapien
tctgtgcttgttaaacgaaaaggcc

SEQ ID NO: 1954729 - DNA, 25 bp, Homo sapien
gacgtagatttagggactgccgact

SEQ ID NO: 1954730 - DNA, 25 bp, Homo sapien
gaagcatttcgagcacgactgacgc

SEQ ID NO: 1954731 - DNA, 25 bp, Homo sapien
taacgggaaggtgcaacaagatcgc

SEQ ID NO: 1954732 - DNA, 25 bp, Homo sapien
tattatttgctaagccgctgcgctc

SEQ ID NO: 1954733 - DNA, 25 bp, Homo sapien
tcagtttcccataagagcaaatggt

SEQ ID NO: 1954734 - DNA, 25 bp, Homo sapien
agtttcccataagagcaaatggttt

SEQ ID NO: 1954735 - DNA, 25 bp, Homo sapien
ttcccataagagcaaatggtttttg

SEQ ID NO: 1954736 - DNA, 25 bp, Homo sapien
cccataagagcaaatggtttttggt

SEQ ID NO: 1954737 - DNA, 25 bp, Homo sapien
tctcaaagatagggtatgtgcacat

SEQ ID NO: 1954738 - DNA, 25 bp, Homo sapien
tggccccgggattgaataagtagct

SEQ ID NO: 1954739 - DNA, 25 bp, Homo sapien
ttccagctgagaaaggttggccccg

SEQ ID NO: 1954740 - DNA, 25 bp, Homo sapien
tcctggtcagtagcaaatcattggg

SEQ ID NO: 1954741 - DNA, 25 bp, Homo sapien
taaaatttgaaaccgagcctggtga

SEQ ID NO: 1954742 - DNA, 25 bp, Homo sapien
gatgggtattcagaagagcctctca

SEQ ID NO: 1954743 - DNA, 25 bp, Homo sapien
tgtgcatatgctaatgagaccctgt

SEQ ID NO: 1954744 - DNA, 25 bp, Homo sapien
tcatgactccgcaattaactggttt

SEQ ID NO: 1954745 - DNA, 25 bp, Homo sapien
tgaaattatcaactgccctgccaac

SEQ ID NO: 1954746 - DNA, 25 bp, Homo sapien
caatcaagcatctaatgcacagtca

SEQ ID NO: 1954747 - DNA, 25 bp, Homo sapien
caaaggctctcctaggtagtgtcca

SEQ ID NO: 1954748 - DNA, 25 bp, Homo sapien
tccagcagggtgaatctaggtctag

SEQ ID NO: 1954749 - DNA, 25 bp, Homo sapien
cattagcattttccagcagggtgaa

SEQ ID NO: 1954750 - DNA, 25 bp, Homo sapien
agatcactccattgctttcaagcct

SEQ ID NO: 1954751 - DNA, 25 bp, Homo sapien
tgtgcctgtagcaggagaatctttt

SEQ ID NO: 1954752 - DNA, 25 bp, Homo sapien
tgtgtgcctgtagcaggagaatctt

SEQ ID NO: 1954753 - DNA, 25 bp, Homo sapien
actccattgctttcaagcctgggcg

SEQ ID NO: 1954754 - DNA, 25 bp, Homo sapien
tcaagattgtttatgccacagtctg

SEQ ID NO: 1954755 - DNA, 25 bp, Homo sapien
tatgtgcttaaatccacacccgaaa

SEQ ID NO: 1954756 - DNA, 25 bp, Homo sapien
tccacacccgaaatgtagccataat

SEQ ID NO: 1954757 - DNA, 25 bp, Homo sapien
gtagccataatttagttcaagattg

SEQ ID NO: 1954758 - DNA, 25 bp, Homo sapien
taaaattcatacctttatctaatta

SEQ ID NO: 1954759 - DNA, 25 bp, Homo sapien
tatgttggggataattcaagttctc

SEQ ID NO: 1954760 - DNA, 25 bp, Homo sapien
ctttatctaattatatgtttgtacc

SEQ ID NO: 1954761 - DNA, 25 bp, Homo sapien
tcactctaatctgctgttgaacagt

SEQ ID NO: 1954762 - DNA, 25 bp, Homo sapien
agcctcccttattggtaccatttga

SEQ ID NO: 1954763 - DNA, 25 bp, Homo sapien
tatattactgcctctccatcaaacc

SEQ ID NO: 1954764 - DNA, 25 bp, Homo sapien
tagtagaattcgctatgaaaacaga

SEQ ID NO: 1954765 - DNA, 25 bp, Homo sapien
taccatttgacgagatgattaggga

SEQ ID NO: 1954766 - DNA, 25 bp, Homo sapien
caagatgggccaattgccctgagct

SEQ ID NO: 1954767 - DNA, 25 bp, Homo sapien
ggtgatgcgcatttgtaatgccagc

SEQ ID NO: 1954768 - DNA, 25 bp, Homo sapien
cagaggctacaaatagaaaaacagt

SEQ ID NO: 1954769 - DNA, 25 bp, Homo sapien
tatattgttcaaagtccggaaggga

SEQ ID NO: 1954770 - DNA, 25 bp, Homo sapien
ttctcatctatgagattggaacatg

SEQ ID NO: 1954771 - DNA, 25 bp, Homo sapien
ccaagaagttgagctatatgatagc

SEQ ID NO: 1954772 - DNA, 25 bp, Homo sapien
gacagaatacatcatatttttgaga

SEQ ID NO: 1954773 - DNA, 25 bp, Homo sapien
ctaatgtggaaggatcgctgaggcc

SEQ ID NO: 1954774 - DNA, 25 bp, Homo sapien
tgtgcatgcactcaggtgccctttg

SEQ ID NO: 1954775 - DNA, 25 bp, Homo sapien
gttataacacgaccagtcaatgtgg

SEQ ID NO: 1954776 - DNA, 25 bp, Homo sapien
tacatgaacaaaaagtggtgtgctc

SEQ ID NO: 1954777 - DNA, 25 bp, Homo sapien
ggtgtgctcgaaaaagacattactg

SEQ ID NO: 1954778 - DNA, 25 bp, Homo sapien
tgtggtcccgtgcatgctccttttc

SEQ ID NO: 1954779 - DNA, 25 bp, Homo sapien
cctgattttgccacgtggaattgta

SEQ ID NO: 1954780 - DNA, 25 bp, Homo sapien
cacagcatctgttcccgaggagtta

SEQ ID NO: 1954781 - DNA, 25 bp, Homo sapien
gcactttcagcgcaagatctccctg

SEQ ID NO: 1954782 - DNA, 25 bp, Homo sapien
ccaagacttggcagaggatgtagtc

SEQ ID NO: 1954783 - DNA, 25 bp, Homo sapien
gtatggtcttgcatggtgacacacc

SEQ ID NO: 1954784 - DNA, 25 bp, Homo sapien
gaagcctattagagaccaactgacc

SEQ ID NO: 1954785 - DNA, 25 bp, Homo sapien
tatatataaatggtcactcacttcg

SEQ ID NO: 1954786 - DNA, 25 bp, Homo sapien
gatgttgcctacactgctagactac

SEQ ID NO: 1954787 - DNA, 25 bp, Homo sapien
tacttagagctttttgagtgtagaa

SEQ ID NO: 1954788 - DNA, 25 bp, Homo sapien
tttagtatcgctttgtatcatgagg

SEQ ID NO: 1954789 - DNA, 25 bp, Homo sapien
aaagtgttggctagtgcaaaaggcc

SEQ ID NO: 1954790 - DNA, 25 bp, Homo sapien
tcagttaactggtaatcgcctttgc

SEQ ID NO: 1954791 - DNA, 25 bp, Homo sapien
catgttgtcattaagccgtcactag

SEQ ID NO: 1954792 - DNA, 25 bp, Homo sapien
tgaggcacttgtccgttcgtcttac

SEQ ID NO: 1954793 - DNA, 25 bp, Homo sapien
gcttgcctgtcgtcagtgcagcgag

SEQ ID NO: 1954794 - DNA, 25 bp, Homo sapien
taagcgaacggtaagaaggcctctc

SEQ ID NO: 1954795 - DNA, 25 bp, Homo sapien
aataaggcccaattcatcccacagc

SEQ ID NO: 1954796 - DNA, 25 bp, Homo sapien
ttaactactcaatgacagaggcagt

SEQ ID NO: 1954797 - DNA, 25 bp, Homo sapien
gggagacagatggtccttaactact

SEQ ID NO: 1954798 - DNA, 25 bp, Homo sapien
tctcatagcgaagtcaaagctctct

SEQ ID NO: 1954799 - DNA, 25 bp, Homo sapien
gccatgcttgcctatttgctgtata

SEQ ID NO: 1954800 - DNA, 25 bp, Homo sapien
tactatacaagggtgctggtgcaga

SEQ ID NO: 1954801 - DNA, 25 bp, Homo sapien
gcatcatgcatgaaccttcggtcag

SEQ ID NO: 1954802 - DNA, 25 bp, Homo sapien
caagtgtctcataaagatcagctcc

SEQ ID NO: 1954803 - DNA, 25 bp, Homo sapien
tcatggtcattcagtcaagtgtctc

SEQ ID NO: 1954804 - DNA, 25 bp, Homo sapien
tgcatgttactcagtcgcccagtat

SEQ ID NO: 1954805 - DNA, 25 bp, Homo sapien
ggatttttgccacgttaccttgatg

SEQ ID NO: 1954806 - DNA, 25 bp, Homo sapien
catctcaactatgttatacctggac

SEQ ID NO: 1954807 - DNA, 25 bp, Homo sapien
aatttgcgacactcaaacacttgag

SEQ ID NO: 1954808 - DNA, 25 bp, Homo sapien
cacttgaggtgatagttgttaaaaa

SEQ ID NO: 1954809 - DNA, 25 bp, Homo sapien
tatagggaatgttggctctgaacaa

SEQ ID NO: 1954810 - DNA, 25 bp, Homo sapien
tgggagtgtcgcttgtatgttatcg

SEQ ID NO: 1954811 - DNA, 25 bp, Homo sapien
tatgtaccataaccaacctattgcc

SEQ ID NO: 1954812 - DNA, 25 bp, Homo sapien
cctattgcctatgagaaacatgtaa

SEQ ID NO: 1954813 - DNA, 25 bp, Homo sapien
tatgttatcgtacagctgacatgta

SEQ ID NO: 1954814 - DNA, 25 bp, Homo sapien
tgaaggcagcaagtcgctcacaggt

SEQ ID NO: 1954815 - DNA, 25 bp, Homo sapien
tcacaggttctaaagtgcaccagag

SEQ ID NO: 1954816 - DNA, 25 bp, Homo sapien
gcatgttatcaaggccgtgccagcg

SEQ ID NO: 1954817 - DNA, 25 bp, Homo sapien
tagccctgatattggtgtcgaagcc

SEQ ID NO: 1954818 - DNA, 25 bp, Homo sapien
aagtgaaactgtactccttactcat

SEQ ID NO: 1954819 - DNA, 25 bp, Homo sapien
caaaagtgaaactgtactccttact

SEQ ID NO: 1954820 - DNA, 25 bp, Homo sapien
ctgcaaaagtgaaactgtactcctt

SEQ ID NO: 1954821 - DNA, 25 bp, Homo sapien
gcaaaagtgaaactgtactccttac

SEQ ID NO: 1954822 - DNA, 25 bp, Homo sapien
ccattcatcttcatgctttccgcaa

SEQ ID NO: 1954823 - DNA, 25 bp, Homo sapien
catgctttccgcaaactcttgcaca

SEQ ID NO: 1954824 - DNA, 25 bp, Homo sapien
tcttcatgctttccgcaaactcttg

SEQ ID NO: 1954825 - DNA, 25 bp, Homo sapien
ccgcaaactcttgcacaactgacaa

SEQ ID NO: 1954826 - DNA, 25 bp, Homo sapien
aaataataagacgttcaggccaggc

SEQ ID NO: 1954827 - DNA, 25 bp, Homo sapien
taaataataagacgttcaggccagg

SEQ ID NO: 1954828 - DNA, 25 bp, Homo sapien
tttaaataataagacgttcaggcca

SEQ ID NO: 1954829 - DNA, 25 bp, Homo sapien
ttaaataataagacgttcaggccag

SEQ ID NO: 1954830 - DNA, 25 bp, Homo sapien
catggtgagtaagatattttacaca

SEQ ID NO: 1954831 - DNA, 25 bp, Homo sapien
agtcattgggaagtgagtcatttcc

SEQ ID NO: 1954832 - DNA, 25 bp, Homo sapien
tttataaataagctgtagttttcca

SEQ ID NO: 1954833 - DNA, 25 bp, Homo sapien
tttcctgtcctctttatagccttga

SEQ ID NO: 1954834 - DNA, 25 bp, Homo sapien
tatgtgatggtatgctcttctccaa

SEQ ID NO: 1954835 - DNA, 25 bp, Homo sapien
tcacctcgacatagcaaaagcactc

SEQ ID NO: 1954836 - DNA, 25 bp, Homo sapien
caaacgccccgcctttatgtgatgg

SEQ ID NO: 1954837 - DNA, 25 bp, Homo sapien
aagcggcgttcttccagatggtcct

SEQ ID NO: 1954838 - DNA, 25 bp, Homo sapien
tagcccagcacttttcgcttccact

SEQ ID NO: 1954839 - DNA, 25 bp, Homo sapien
cactcagtcggttctttactaacgc

SEQ ID NO: 1954840 - DNA, 25 bp, Homo sapien
ggttctttactaacgccagcaacga

SEQ ID NO: 1954841 - DNA, 25 bp, Homo sapien
gcacttttcgcttccactcagtcgg

SEQ ID NO: 1954842 - DNA, 25 bp, Homo sapien
tatgaacacttttgtctgattctta

SEQ ID NO: 1954843 - DNA, 25 bp, Homo sapien
tcatatgaacacttttgtctgattc

SEQ ID NO: 1954844 - DNA, 25 bp, Homo sapien
catatgaacacttttgtctgattct

SEQ ID NO: 1954845 - DNA, 25 bp, Homo sapien
atgaacacttttgtctgattcttac

SEQ ID NO: 1954846 - DNA, 25 bp, Homo sapien
gaggagctcgtactccaaagagaac

SEQ ID NO: 1954847 - DNA, 25 bp, Homo sapien
caaagagaacaatacccccagatac

SEQ ID NO: 1954848 - DNA, 25 bp, Homo sapien
ttattagttagaggcaccagaagag

SEQ ID NO: 1954849 - DNA, 25 bp, Homo sapien
atctccatttgaaccatcattgtga

SEQ ID NO: 1954850 - DNA, 25 bp, Homo sapien
tatagcctgtagcttcaggttgaga

SEQ ID NO: 1954851 - DNA, 25 bp, Homo sapien
tttatagcctgtagcttcaggttga

SEQ ID NO: 1954852 - DNA, 25 bp, Homo sapien
tttatttatagcctgtagcttcagg

SEQ ID NO: 1954853 - DNA, 25 bp, Homo sapien
tatttatagcctgtagcttcaggtt

SEQ ID NO: 1954854 - DNA, 25 bp, Homo sapien
gacgtggactttgcagagggcccac

SEQ ID NO: 1954855 - DNA, 25 bp, Homo sapien
cattccaggcagcatgggacgtgga

SEQ ID NO: 1954856 - DNA, 25 bp, Homo sapien
cagccagcttcaagggcctttccag

SEQ ID NO: 1954857 - DNA, 25 bp, Homo sapien
tctgctccagcgtcggtgatgggca

SEQ ID NO: 1954858 - DNA, 25 bp, Homo sapien
gaggaagttgtcatacagacgagct

SEQ ID NO: 1954859 - DNA, 25 bp, Homo sapien
tgtcatacagacgagctgacaatcc

SEQ ID NO: 1954860 - DNA, 25 bp, Homo sapien
catacagacgagctgacaatccaaa

SEQ ID NO: 1954861 - DNA, 25 bp, Homo sapien
gaagttgtcatacagacgagctgac

SEQ ID NO: 1954862 - DNA, 25 bp, Homo sapien
aacttgcagaaactcgaggccatct

SEQ ID NO: 1954863 - DNA, 25 bp, Homo sapien
tctgagttcttccaacttcgatgtt

SEQ ID NO: 1954864 - DNA, 25 bp, Homo sapien
gttcttccaacttcgatgttgttca

SEQ ID NO: 1954865 - DNA, 25 bp, Homo sapien
gaaactcgaggccatctgagttctt

SEQ ID NO: 1954866 - DNA, 25 bp, Homo sapien
tccatgtagaccatgaatcaaagcg

SEQ ID NO: 1954867 - DNA, 25 bp, Homo sapien
tgtggattgaatctcttgtgccttc

SEQ ID NO: 1954868 - DNA, 25 bp, Homo sapien
gaccatgaatcaaagcgttgaccgt

SEQ ID NO: 1954869 - DNA, 25 bp, Homo sapien
gaccgtctcttctgcacatgggctg

SEQ ID NO: 1954870 - DNA, 25 bp, Homo sapien
ttgctatcagtcctgtcagggcccc

SEQ ID NO: 1954871 - DNA, 25 bp, Homo sapien
tatctgattggattcagctttttcc

SEQ ID NO: 1954872 - DNA, 25 bp, Homo sapien
aagttgtggatacttggaaattatc

SEQ ID NO: 1954873 - DNA, 25 bp, Homo sapien
tccaccggagaaacaacttttgcta

SEQ ID NO: 1954874 - DNA, 25 bp, Homo sapien
gaggcttcccgttatcctgcaggca

SEQ ID NO: 1954875 - DNA, 25 bp, Homo sapien
ggccgaggcttcccgttatcctgca

SEQ ID NO: 1954876 - DNA, 25 bp, Homo sapien
gccgctgcgctagcggccgaggctt

SEQ ID NO: 1954877 - DNA, 25 bp, Homo sapien
ggcttcccgttatcctgcaggcagc

SEQ ID NO: 1954878 - DNA, 25 bp, Homo sapien
aagttgctgcggctctggcaggtcc

SEQ ID NO: 1954879 - DNA, 25 bp, Homo sapien
gagtcacccgcctctgtttgtgagg

SEQ ID NO: 1954880 - DNA, 25 bp, Homo sapien
tgtttgctccttggctatcacgtcc

SEQ ID NO: 1954881 - DNA, 25 bp, Homo sapien
cttgcacctgccgaaatgttctctg

SEQ ID NO: 1954882 - DNA, 25 bp, Homo sapien
ctgtgcaggaaaggtacgggtcttc

SEQ ID NO: 1954883 - DNA, 25 bp, Homo sapien
cgggtcttcataccctgggtcacag

SEQ ID NO: 1954884 - DNA, 25 bp, Homo sapien
gtcacagacgcctccctggcctgcg

SEQ ID NO: 1954885 - DNA, 25 bp, Homo sapien
gcaggaaaggtacgggtcttcatac

SEQ ID NO: 1954886 - DNA, 25 bp, Homo sapien
tccgggatcctaactgaagctggat

SEQ ID NO: 1954887 - DNA, 25 bp, Homo sapien
acaaaggacatcgaggagtccggga

SEQ ID NO: 1954888 - DNA, 25 bp, Homo sapien
agctggatgggaacggccgaggtaa

SEQ ID NO: 1954889 - DNA, 25 bp, Homo sapien
gacatcgaggagtccgggatcctaa

SEQ ID NO: 1954890 - DNA, 25 bp, Homo sapien
aaagatgtgcgggtggtctggcaga

SEQ ID NO: 1954891 - DNA, 25 bp, Homo sapien
gcagccgcttatccccagggatgag

SEQ ID NO: 1954892 - DNA, 25 bp, Homo sapien
tatgtgtagctatcaggcagccgct

SEQ ID NO: 1954893 - DNA, 25 bp, Homo sapien
tggagactgaacacgggaaagatgt

SEQ ID NO: 1954894 - DNA, 25 bp, Homo sapien
tggacagaagccccccggtcgttgc

SEQ ID NO: 1954895 - DNA, 25 bp, Homo sapien
cccggtcgttgcctccagggtactg

SEQ ID NO: 1954896 - DNA, 25 bp, Homo sapien
tccagtctcaggagcgctccaggaa

SEQ ID NO: 1954897 - DNA, 25 bp, Homo sapien
atggaccggccaatgccacgtgggt

SEQ ID NO: 1954898 - DNA, 25 bp, Homo sapien
acgtgggtgtgcaggtcgggtggcc

SEQ ID NO: 1954899 - DNA, 25 bp, Homo sapien
ggaaccgggagttgctggataaaca

SEQ ID NO: 1954900 - DNA, 25 bp, Homo sapien
ttcacggagatctatttcatgcagc

SEQ ID NO: 1954901 - DNA, 25 bp, Homo sapien
cccctcgtgagctgcatggtaggaa

SEQ ID NO: 1954902 - DNA, 25 bp, Homo sapien
aggaacttgtcctagaatcatctcc

SEQ ID NO: 1954903 - DNA, 25 bp, Homo sapien
agtgtagcaaggcttcccctcgtga

SEQ ID NO: 1954904 - DNA, 25 bp, Homo sapien
ccccactcccccgatcgtccatcat

SEQ ID NO: 1954905 - DNA, 25 bp, Homo sapien
tggttctctttgctgtccatccaac

SEQ ID NO: 1954906 - DNA, 25 bp, Homo sapien
ccctgcccttcgaggcctgaccaac

SEQ ID NO: 1954907 - DNA, 25 bp, Homo sapien
ttcgaggcctgaccaaccccactcc

SEQ ID NO: 1954908 - DNA, 25 bp, Homo sapien
tgaagaaacttcgtgacagcggcgg

SEQ ID NO: 1954909 - DNA, 25 bp, Homo sapien
ggccccgggccttggactcagacat

SEQ ID NO: 1954910 - DNA, 25 bp, Homo sapien
agaaacttcgtgacagcggcggaga

SEQ ID NO: 1954911 - DNA, 25 bp, Homo sapien
ggctgccgtgaagaaacttcgtgac

SEQ ID NO: 1954912 - DNA, 25 bp, Homo sapien
gagggagtgttccttgggcagtggg

SEQ ID NO: 1954913 - DNA, 25 bp, Homo sapien
ttttcacatgaggaattggcagcag

SEQ ID NO: 1954914 - DNA, 25 bp, Homo sapien
gggccgaggtagcagcagttttcac

SEQ ID NO: 1954915 - DNA, 25 bp, Homo sapien
cgggagcgagaatccttctcatgga

SEQ ID NO: 1954916 - DNA, 25 bp, Homo sapien
ggttggattgtagatgatgaataat

SEQ ID NO: 1954917 - DNA, 25 bp, Homo sapien
cttcacggattccaggttggattgt

SEQ ID NO: 1954918 - DNA, 25 bp, Homo sapien
caggttggattgtagatgatgaata

SEQ ID NO: 1954919 - DNA, 25 bp, Homo sapien
ttcacggattccaggttggattgta

SEQ ID NO: 1954920 - DNA, 25 bp, Homo sapien
tgcagaggtgccttagggccctcgc

SEQ ID NO: 1954921 - DNA, 25 bp, Homo sapien
cctcagggccataatgttgccgtgt

SEQ ID NO: 1954922 - DNA, 25 bp, Homo sapien
agcctgcagcgttctgcagaggtgc

SEQ ID NO: 1954923 - DNA, 25 bp, Homo sapien
gtttctgaacggagcctgcagcgtt

SEQ ID NO: 1954924 - DNA, 25 bp, Homo sapien
ggcagaatcctgagccccgcatgct

SEQ ID NO: 1954925 - DNA, 25 bp, Homo sapien
caggaacaccctgtaccgtctgatt

SEQ ID NO: 1954926 - DNA, 25 bp, Homo sapien
cagcactcggtgtccggcatcctgg

SEQ ID NO: 1954927 - DNA, 25 bp, Homo sapien
ctttggagcctttgaacaaactcct

SEQ ID NO: 1954928 - DNA, 25 bp, Homo sapien
tgttgacttccaacttcagtcctga

SEQ ID NO: 1954929 - DNA, 25 bp, Homo sapien
tctgctcccgtggaaagcctatggc

SEQ ID NO: 1954930 - DNA, 25 bp, Homo sapien
cagtcctgagcggtgggctttagaa

SEQ ID NO: 1954931 - DNA, 25 bp, Homo sapien
aacgcgtgtgacaaggacagaaacc

SEQ ID NO: 1954932 - DNA, 25 bp, Homo sapien
gagccaagttcatgtgccggagaga

SEQ ID NO: 1954933 - DNA, 25 bp, Homo sapien
ttcatgtgccggagagaagccgcca

SEQ ID NO: 1954934 - DNA, 25 bp, Homo sapien
tcctgagaatgaatcacgaaaggat

SEQ ID NO: 1954935 - DNA, 25 bp, Homo sapien
tcacgaaaggatgccatagcttctt

SEQ ID NO: 1954936 - DNA, 25 bp, Homo sapien
gggacatcaaaagcaagctcgaagc

SEQ ID NO: 1954937 - DNA, 25 bp, Homo sapien
caaaagcaagctcgaagcaagcaat

SEQ ID NO: 1954938 - DNA, 25 bp, Homo sapien
caaaagtgagggacatcaaaagcaa

SEQ ID NO: 1954939 - DNA, 25 bp, Homo sapien
ttttggacaaaagtgagggacatca

SEQ ID NO: 1954940 - DNA, 25 bp, Homo sapien
attgctggtttgagacagctccctc

SEQ ID NO: 1954941 - DNA, 25 bp, Homo sapien
tgtctggagaccccccattgctggt

SEQ ID NO: 1954942 - DNA, 25 bp, Homo sapien
tgctggtttgagacagctccctctt

SEQ ID NO: 1954943 - DNA, 25 bp, Homo sapien
ggagaccccccattgctggtttgag

SEQ ID NO: 1954944 - DNA, 25 bp, Homo sapien
gccatatttaatgtgacaccactct

SEQ ID NO: 1954945 - DNA, 25 bp, Homo sapien
ccatatttaatgtgacaccactctg

SEQ ID NO: 1954946 - DNA, 25 bp, Homo sapien
tgccatatttaatgtgacaccactc

SEQ ID NO: 1954947 - DNA, 25 bp, Homo sapien
catatttaatgtgacaccactctgt

SEQ ID NO: 1954948 - DNA, 25 bp, Homo sapien
cagaaggttctcttgaactccagag

SEQ ID NO: 1954949 - DNA, 25 bp, Homo sapien
gatttgggcctgatggagacagcac

SEQ ID NO: 1954950 - DNA, 25 bp, Homo sapien
cagatacaggcattctggagtgggc

SEQ ID NO: 1954951 - DNA, 25 bp, Homo sapien
gagaagcatcttgcccgcttgcaaa

SEQ ID NO: 1954952 - DNA, 25 bp, Homo sapien
agctgcttagcacgccccactgtgt

SEQ ID NO: 1954953 - DNA, 25 bp, Homo sapien
aatgagggtcctcgcttgagctcac

SEQ ID NO: 1954954 - DNA, 25 bp, Homo sapien
gagccagcaccgagttccattgctt

SEQ ID NO: 1954955 - DNA, 25 bp, Homo sapien
ttgcttccatttggcaccaagtgcc

SEQ ID NO: 1954956 - DNA, 25 bp, Homo sapien
aagggaaacggagcaaagccaagag

SEQ ID NO: 1954957 - DNA, 25 bp, Homo sapien
gaaatctggccttacgggcacggtg

SEQ ID NO: 1954958 - DNA, 25 bp, Homo sapien
gcggtcgcggtgaaatctggcctta

SEQ ID NO: 1954959 - DNA, 25 bp, Homo sapien
gggaaacggagcaaagccaagagac

SEQ ID NO: 1954960 - DNA, 25 bp, Homo sapien
taatgataaacgctaatgaggaaga

SEQ ID NO: 1954961 - DNA, 25 bp, Homo sapien
tcagttaatgataaacgctaatgag

SEQ ID NO: 1954962 - DNA, 25 bp, Homo sapien
tgataaacgctaatgaggaagatgt

SEQ ID NO: 1954963 - DNA, 25 bp, Homo sapien
taaacgctaatgaggaagatgtctc

SEQ ID NO: 1954964 - DNA, 25 bp, Homo sapien
gatttacacgcctgctcatcacgca

SEQ ID NO: 1954965 - DNA, 25 bp, Homo sapien
gcactgggatttacacgcctgctca

SEQ ID NO: 1954966 - DNA, 25 bp, Homo sapien
gctcatcacgcactgtcaggaggct

SEQ ID NO: 1954967 - DNA, 25 bp, Homo sapien
gcctgctcatcacgcactgtcagga

SEQ ID NO: 1954968 - DNA, 25 bp, Homo sapien
tgcgttcacagggaacggtgacccc

SEQ ID NO: 1954969 - DNA, 25 bp, Homo sapien
gactctcgctggattcgctgttccg

SEQ ID NO: 1954970 - DNA, 25 bp, Homo sapien
tgctgcagcgcaaaggcgccaggcc

SEQ ID NO: 1954971 - DNA, 25 bp, Homo sapien
aggcctggcgtggaacccgagcctg

SEQ ID NO: 1954972 - DNA, 25 bp, Homo sapien
gaaagttctcccttatagagcagcg

SEQ ID NO: 1954973 - DNA, 25 bp, Homo sapien
gctgtacaagtcatcaaggtctctc

SEQ ID NO: 1954974 - DNA, 25 bp, Homo sapien
gacagttcaaagataagagttccct

SEQ ID NO: 1954975 - DNA, 25 bp, Homo sapien
tagagcagcgggaatactttctcag

SEQ ID NO: 1954976 - DNA, 25 bp, Homo sapien
tggatgccttggcagtttctgccaa

SEQ ID NO: 1954977 - DNA, 25 bp, Homo sapien
gatcaaattggatgccttggcagtt

SEQ ID NO: 1954978 - DNA, 25 bp, Homo sapien
ctgctttggcttatagatcaaattg

SEQ ID NO: 1954979 - DNA, 25 bp, Homo sapien
atagatcaaattggatgccttggca

SEQ ID NO: 1954980 - DNA, 25 bp, Homo sapien
ttattcacgaaggctttgcaatctt

SEQ ID NO: 1954981 - DNA, 25 bp, Homo sapien
tattcacgaaggctttgcaatcttg

SEQ ID NO: 1954982 - DNA, 25 bp, Homo sapien
cgtagaacgtgactgaagctcggaa

SEQ ID NO: 1954983 - DNA, 25 bp, Homo sapien
ctcggaatggagcaggctgaaataa

SEQ ID NO: 1954984 - DNA, 25 bp, Homo sapien
acaaggttagtctggtgtccatcca

SEQ ID NO: 1954985 - DNA, 25 bp, Homo sapien
ttaggaagctccagatgaaaggcat

SEQ ID NO: 1954986 - DNA, 25 bp, Homo sapien
cagatctggccctgcttttgatgat

SEQ ID NO: 1954987 - DNA, 25 bp, Homo sapien
cacgtagcaggcatttaaataagca

SEQ ID NO: 1954988 - DNA, 25 bp, Homo sapien
gcatttaaataagcatggttgtcct

SEQ ID NO: 1954989 - DNA, 25 bp, Homo sapien
tcctccgtagtatgccacgtagcag

SEQ ID NO: 1954990 - DNA, 25 bp, Homo sapien
ctcttaagtgaagacgaaaccatgg

SEQ ID NO: 1954991 - DNA, 25 bp, Homo sapien
tgaagacgaaaccatggaccaagag

SEQ ID NO: 1954992 - DNA, 25 bp, Homo sapien
cgaaaccatggaccaagagaccctg

SEQ ID NO: 1954993 - DNA, 25 bp, Homo sapien
agagaccctggaagatcaagctcag

SEQ ID NO: 1954994 - DNA, 25 bp, Homo sapien
cattgtaggttgctggcttgctcca

SEQ ID NO: 1954995 - DNA, 25 bp, Homo sapien
ggtagctatgaaaacatattcctgc

SEQ ID NO: 1954996 - DNA, 25 bp, Homo sapien
tcagctctgctaacaataggcaccc

SEQ ID NO: 1954997 - DNA, 25 bp, Homo sapien
ccagaggccacgatgaagcagtcag

SEQ ID NO: 1954998 - DNA, 25 bp, Homo sapien
accaccaggtctccagtcctgagcc

SEQ ID NO: 1954999 - DNA, 25 bp, Homo sapien
ccaggtctccagtcctgagccacat

SEQ ID NO: 1955000 - DNA, 25 bp, Homo sapien
caccaggtctccagtcctgagccac

SEQ ID NO: 1955001 - DNA, 25 bp, Homo sapien
ctccaccaccaggtctccagtcctg

SEQ ID NO: 1955002 - DNA, 25 bp, Homo sapien
tgtggccacccgatgttggatactg

SEQ ID NO: 1955003 - DNA, 25 bp, Homo sapien
tgaaaacttatagagatcagagccc

SEQ ID NO: 1955004 - DNA, 25 bp, Homo sapien
agctctctgctgtgcttgtggccac

SEQ ID NO: 1955005 - DNA, 25 bp, Homo sapien
ttatttaacccctgcatccatgcct

SEQ ID NO: 1955006 - DNA, 25 bp, Homo sapien
tgtgagcgcgctagggaagtggagc

SEQ ID NO: 1955007 - DNA, 25 bp, Homo sapien
catgtgagcgcgctagggaagtgga

SEQ ID NO: 1955008 - DNA, 25 bp, Homo sapien
tagggaagtggagcgttgcaggcct

SEQ ID NO: 1955009 - DNA, 25 bp, Homo sapien
gggaagtggagcgttgcaggcctcc

SEQ ID NO: 1955010 - DNA, 25 bp, Homo sapien
ttgtggcatcacagcacggtgctcc

SEQ ID NO: 1955011 - DNA, 25 bp, Homo sapien
ggtgctccagcccatgtgttggcct

SEQ ID NO: 1955012 - DNA, 25 bp, Homo sapien
ttcagctgcgtacaaagataggccc

SEQ ID NO: 1955013 - DNA, 25 bp, Homo sapien
gctgagaagctacgctggcgctgaa

SEQ ID NO: 1955014 - DNA, 25 bp, Homo sapien
aggcacagtcaagcgcaagctccac

SEQ ID NO: 1955015 - DNA, 25 bp, Homo sapien
caggcacagtcaagcgcaagctcca

SEQ ID NO: 1955016 - DNA, 25 bp, Homo sapien
gccaggcacagtcaagcgcaagctc

SEQ ID NO: 1955017 - DNA, 25 bp, Homo sapien
gagccaggcacagtcaagcgcaagc

SEQ ID NO: 1955018 - DNA, 25 bp, Homo sapien
tgggctcctcccacgcaggagaggg

SEQ ID NO: 1955019 - DNA, 25 bp, Homo sapien
acttcagcaagtctccccgaagccc

SEQ ID NO: 1955020 - DNA, 25 bp, Homo sapien
tccccgaagccctgcgtgcctttcc

SEQ ID NO: 1955021 - DNA, 25 bp, Homo sapien
gctggctccagcgagtcctgacccc

SEQ ID NO: 1955022 - DNA, 25 bp, Homo sapien
ggccccaggagactcaggagagggc

SEQ ID NO: 1955023 - DNA, 25 bp, Homo sapien
ctgaacatgcccctgggccgcagtg

SEQ ID NO: 1955024 - DNA, 25 bp, Homo sapien
gccgcagtgactctggggccccagg

SEQ ID NO: 1955025 - DNA, 25 bp, Homo sapien
gcccctgggccgcagtgactctggg

SEQ ID NO: 1955026 - DNA, 25 bp, Homo sapien
gcagccccgacaggagcttgttcgt

SEQ ID NO: 1955027 - DNA, 25 bp, Homo sapien
ccaggacctcctgtcaagcttgttc

SEQ ID NO: 1955028 - DNA, 25 bp, Homo sapien
catgtgtgaaaaggctcattccctc

SEQ ID NO: 1955029 - DNA, 25 bp, Homo sapien
cacaagcccacgatgactgtggttc

SEQ ID NO: 1955030 - DNA, 25 bp, Homo sapien
tgttcagaagagtgttgggagcatc

SEQ ID NO: 1955031 - DNA, 25 bp, Homo sapien
cagaagagtgttgggagcatccagc

SEQ ID NO: 1955032 - DNA, 25 bp, Homo sapien
atttgttcagaagagtgttgggagc

SEQ ID NO: 1955033 - DNA, 25 bp, Homo sapien
aagagtgttgggagcatccagccga

SEQ ID NO: 1955034 - DNA, 25 bp, Homo sapien
gggaataagactgcctggtagaggt

SEQ ID NO: 1955035 - DNA, 25 bp, Homo sapien
ctgtgtgggaataagactgcctggt

SEQ ID NO: 1955036 - DNA, 25 bp, Homo sapien
tgtgggaataagactgcctggtaga

SEQ ID NO: 1955037 - DNA, 25 bp, Homo sapien
tgtgtgggaataagactgcctggta

SEQ ID NO: 1955038 - DNA, 25 bp, Homo sapien
agtgacaagcatgggcaagcttcct

SEQ ID NO: 1955039 - DNA, 25 bp, Homo sapien
gcttcctgtcgaccaaatggagcta

SEQ ID NO: 1955040 - DNA, 25 bp, Homo sapien
aaatggaacagggatctatggtgga

SEQ ID NO: 1955041 - DNA, 25 bp, Homo sapien
taaacagatcctgagtgctggcgga

SEQ ID NO: 1955042 - DNA, 25 bp, Homo sapien
tgcattttagccccgaatgaacgca

SEQ ID NO: 1955043 - DNA, 25 bp, Homo sapien
gcattttagccccgaatgaacgcac

SEQ ID NO: 1955044 - DNA, 25 bp, Homo sapien
cagcatgcattttagccccgaatga

SEQ ID NO: 1955045 - DNA, 25 bp, Homo sapien
agcagcatgcattttagccccgaat

SEQ ID NO: 1955046 - DNA, 25 bp, Homo sapien
aggtggattgaccacaaagacactg

SEQ ID NO: 1955047 - DNA, 25 bp, Homo sapien
gcccctgcacgcgtggctggtgctg

SEQ ID NO: 1955048 - DNA, 25 bp, Homo sapien
aagacactgaagaggcacctgtgtg

SEQ ID NO: 1955049 - DNA, 25 bp, Homo sapien
tgtgtgcccctgcacgcgtggctgg

SEQ ID NO: 1955050 - DNA, 25 bp, Homo sapien
gggagaatcgactgctttctctctg

SEQ ID NO: 1955051 - DNA, 25 bp, Homo sapien
ttctctctgccactgcgtctcctcc

SEQ ID NO: 1955052 - DNA, 25 bp, Homo sapien
tgatggccctgggagaatcgactgc

SEQ ID NO: 1955053 - DNA, 25 bp, Homo sapien
ttcaggccacatcatgtccacccag

SEQ ID NO: 1955054 - DNA, 25 bp, Homo sapien
ctgccttggctttcttctgttcttg

SEQ ID NO: 1955055 - DNA, 25 bp, Homo sapien
tttcttctgttcttggcaaaacaaa

SEQ ID NO: 1955056 - DNA, 25 bp, Homo sapien
tcttctgttcttggcaaaacaaata

SEQ ID NO: 1955057 - DNA, 25 bp, Homo sapien
gctttcttctgttcttggcaaaaca

SEQ ID NO: 1955058 - DNA, 25 bp, Homo sapien
gcaaggaaggagtaagactcactgg

SEQ ID NO: 1955059 - DNA, 25 bp, Homo sapien
tcactggcaagttggtgaacatggg

SEQ ID NO: 1955060 - DNA, 25 bp, Homo sapien
actcactggcaagttggtgaacatg

SEQ ID NO: 1955061 - DNA, 25 bp, Homo sapien
gaaggagtaagactcactggcaagt

SEQ ID NO: 1955062 - DNA, 25 bp, Homo sapien
gaatagtggctctcaggtcctgtga

SEQ ID NO: 1955063 - DNA, 25 bp, Homo sapien
cacgcttgtaatgtgagtggagccc

SEQ ID NO: 1955064 - DNA, 25 bp, Homo sapien
tcccaagaattggatggacataaag

SEQ ID NO: 1955065 - DNA, 25 bp, Homo sapien
agtggagccctggatagcacgtgtc

SEQ ID NO: 1955066 - DNA, 25 bp, Homo sapien
ctcggaagccctgagcctagccaca

SEQ ID NO: 1955067 - DNA, 25 bp, Homo sapien
cctcggaagccctgagcctagccac

SEQ ID NO: 1955068 - DNA, 25 bp, Homo sapien
tcggaagccctgagcctagccacag

SEQ ID NO: 1955069 - DNA, 25 bp, Homo sapien
aagagctcgaggcctcggaagccct

SEQ ID NO: 1955070 - DNA, 25 bp, Homo sapien
tcagaggtgctcgtgtcactgaccc

SEQ ID NO: 1955071 - DNA, 25 bp, Homo sapien
gaagctcttgtgactctgcgtcctc

SEQ ID NO: 1955072 - DNA, 25 bp, Homo sapien
aacgcagtgcctggtccacggtggt

SEQ ID NO: 1955073 - DNA, 25 bp, Homo sapien
tcctgctgcggctgtttttccctgt

SEQ ID NO: 1955074 - DNA, 25 bp, Homo sapien
tgtaggtgaccttggagtccctgga

SEQ ID NO: 1955075 - DNA, 25 bp, Homo sapien
gacttggccgagtcctgtaggtgac

SEQ ID NO: 1955076 - DNA, 25 bp, Homo sapien
gggacgtctccatagagtaggcaga

SEQ ID NO: 1955077 - DNA, 25 bp, Homo sapien
gggccacgaagggacagatgctcat

SEQ ID NO: 1955078 - DNA, 25 bp, Homo sapien
cacagttctttgtgaggttgcgcac

SEQ ID NO: 1955079 - DNA, 25 bp, Homo sapien
cgaggtccctgtgcctactcagtgg

SEQ ID NO: 1955080 - DNA, 25 bp, Homo sapien
ggagaggtcctgctgccataagaac

SEQ ID NO: 1955081 - DNA, 25 bp, Homo sapien
tactcagtggaggtccagtcctctc

SEQ ID NO: 1955082 - DNA, 25 bp, Homo sapien
gctgcattctgttttggctttaact

SEQ ID NO: 1955083 - DNA, 25 bp, Homo sapien
ggctgcattctgttttggctttaac

SEQ ID NO: 1955084 - DNA, 25 bp, Homo sapien
aggctgcattctgttttggctttaa

SEQ ID NO: 1955085 - DNA, 25 bp, Homo sapien
tcttcttcctgaggggacgagagaa

SEQ ID NO: 1955086 - DNA, 25 bp, Homo sapien
ctcttcttcctgaggggacgagaga

SEQ ID NO: 1955087 - DNA, 25 bp, Homo sapien
cttcttcctgaggggacgagagaat

SEQ ID NO: 1955088 - DNA, 25 bp, Homo sapien
ttcttcctgaggggacgagagaatt

SEQ ID NO: 1955089 - DNA, 25 bp, Homo sapien
gccagaaggtttgatctcagtactg

SEQ ID NO: 1955090 - DNA, 25 bp, Homo sapien
gagaggagtgcgtgccagcatccca

SEQ ID NO: 1955091 - DNA, 25 bp, Homo sapien
gaaaggagccagaaggtttgatctc

SEQ ID NO: 1955092 - DNA, 25 bp, Homo sapien
gatctcagtactgctcccctctggg

SEQ ID NO: 1955093 - DNA, 25 bp, Homo sapien
catctcaccacttggggctggctca

SEQ ID NO: 1955094 - DNA, 25 bp, Homo sapien
tggagtccacgcctgcctcttctgg

SEQ ID NO: 1955095 - DNA, 25 bp, Homo sapien
ggctttgcgctggtcactcttccca

SEQ ID NO: 1955096 - DNA, 25 bp, Homo sapien
agctgccttggagtccacgcctgcc

SEQ ID NO: 1955097 - DNA, 25 bp, Homo sapien
cctgagtccctgctgaaaggcccca

SEQ ID NO: 1955098 - DNA, 25 bp, Homo sapien
tccctgctgaaaggccccagggaca

SEQ ID NO: 1955099 - DNA, 25 bp, Homo sapien
tgagtccctgctgaaaggccccagg

SEQ ID NO: 1955100 - DNA, 25 bp, Homo sapien
acacattctgcccctgagtccctgc

SEQ ID NO: 1955101 - DNA, 25 bp, Homo sapien
cctagcctgcaaatcagggccatag

SEQ ID NO: 1955102 - DNA, 25 bp, Homo sapien
aatcagggccataggcaagttggag

SEQ ID NO: 1955103 - DNA, 25 bp, Homo sapien
gcaaatcagggccataggcaagttg

SEQ ID NO: 1955104 - DNA, 25 bp, Homo sapien
gcctgcaaatcagggccataggcaa

SEQ ID NO: 1955105 - DNA, 25 bp, Homo sapien
ctgcctcccccgcagactccaaatt

SEQ ID NO: 1955106 - DNA, 25 bp, Homo sapien
ccccgcagactccaaattcacccac

SEQ ID NO: 1955107 - DNA, 25 bp, Homo sapien
cttgtagcagtcctccttctctatg

SEQ ID NO: 1955108 - DNA, 25 bp, Homo sapien
tctctatgcatctgggccagtgctg

SEQ ID NO: 1955109 - DNA, 25 bp, Homo sapien
ttcctctcatccccttctcttgtct

SEQ ID NO: 1955110 - DNA, 25 bp, Homo sapien
cctctcatccccttctcttgtctcc

SEQ ID NO: 1955111 - DNA, 25 bp, Homo sapien
ccttcctctcatccccttctcttgt

SEQ ID NO: 1955112 - DNA, 25 bp, Homo sapien
tctcatccccttctcttgtctccat

SEQ ID NO: 1955113 - DNA, 25 bp, Homo sapien
tgtttctgagtatctctgcgcagaa

SEQ ID NO: 1955114 - DNA, 25 bp, Homo sapien
tggtgagaggaaagatgtattgatt

SEQ ID NO: 1955115 - DNA, 25 bp, Homo sapien
atttgacaccttttcccaacctctg

SEQ ID NO: 1955116 - DNA, 25 bp, Homo sapien
tctctgcgcagaacacatttgacac

SEQ ID NO: 1955117 - DNA, 25 bp, Homo sapien
cattgccaccaacaagcagaaagga

SEQ ID NO: 1955118 - DNA, 25 bp, Homo sapien
cgttcactgggatgctcttcctgtg

SEQ ID NO: 1955119 - DNA, 25 bp, Homo sapien
gagccacgatgaccacactgcatgg

SEQ ID NO: 1955120 - DNA, 25 bp, Homo sapien
tcctgtgccttagcttggagcgggt

SEQ ID NO: 1955121 - DNA, 25 bp, Homo sapien
caaggtagagatgaccacctgtctc

SEQ ID NO: 1955122 - DNA, 25 bp, Homo sapien
gaagcagcaacctacaccaaggtag

SEQ ID NO: 1955123 - DNA, 25 bp, Homo sapien
gaggagtgctgcttctattgaggat

SEQ ID NO: 1955124 - DNA, 25 bp, Homo sapien
gagttcagcactctccggtcatgtg

SEQ ID NO: 1955125 - DNA, 25 bp, Homo sapien
ttgataccatttgggctcggcctca

SEQ ID NO: 1955126 - DNA, 25 bp, Homo sapien
tggcctgtgcttcggtgtggaacaa

SEQ ID NO: 1955127 - DNA, 25 bp, Homo sapien
gacagctgcaagtaagttgatacca

SEQ ID NO: 1955128 - DNA, 25 bp, Homo sapien
gcctattgggcttctggtaaggaca

SEQ ID NO: 1955129 - DNA, 25 bp, Homo sapien
agctgtgagggccatttgtgagaaa

SEQ ID NO: 1955130 - DNA, 25 bp, Homo sapien
cagacaggacaaatgctttagggaa

SEQ ID NO: 1955131 - DNA, 25 bp, Homo sapien
agagtaaattgctggctccaggaca

SEQ ID NO: 1955132 - DNA, 25 bp, Homo sapien
gaacaactgctttgaaagaatagac

SEQ ID NO: 1955133 - DNA, 25 bp, Homo sapien
cctctgtagacgaagtgtcagcaca

SEQ ID NO: 1955134 - DNA, 25 bp, Homo sapien
gaagtgtcagcacacctgaacgatg

SEQ ID NO: 1955135 - DNA, 25 bp, Homo sapien
tgaacgatgcacacctgaaccgatt

SEQ ID NO: 1955136 - DNA, 25 bp, Homo sapien
cacctgaaccgattatttctttctg

SEQ ID NO: 1955137 - DNA, 25 bp, Homo sapien
tgaacccagaacggcgatggctctt

SEQ ID NO: 1955138 - DNA, 25 bp, Homo sapien
acccagaacggcgatggctcttgct

SEQ ID NO: 1955139 - DNA, 25 bp, Homo sapien
ttttccttctcgaggttggtgcggc

SEQ ID NO: 1955140 - DNA, 25 bp, Homo sapien
cagaacggcgatggctcttgctctt

SEQ ID NO: 1955141 - DNA, 25 bp, Homo sapien
tgaacttcaggaccaccgataccat

SEQ ID NO: 1955142 - DNA, 25 bp, Homo sapien
ctgaacttcaggaccaccgatacca

SEQ ID NO: 1955143 - DNA, 25 bp, Homo sapien
cctgaacttcaggaccaccgatacc

SEQ ID NO: 1955144 - DNA, 25 bp, Homo sapien
atacttacacatgcatattaatagc

SEQ ID NO: 1955145 - DNA, 25 bp, Homo sapien
tacacatgcatattaatagcaacac

SEQ ID NO: 1955146 - DNA, 25 bp, Homo sapien
tcagtcaatgagttgataaagaaaa

SEQ ID NO: 1955147 - DNA, 25 bp, Homo sapien
aagggaatggccgaaaagggatgtg

SEQ ID NO: 1955148 - DNA, 25 bp, Homo sapien
caaagactggtggttcccgcttggg

SEQ ID NO: 1955149 - DNA, 25 bp, Homo sapien
tgcaaagactggtggttcccgcttg

SEQ ID NO: 1955150 - DNA, 25 bp, Homo sapien
aaatgcaaagactggtggttcccgc

SEQ ID NO: 1955151 - DNA, 25 bp, Homo sapien
agaaatgcaaagactggtggttccc

SEQ ID NO: 1955152 - DNA, 25 bp, Homo sapien
actgagaaatggacagtgccagaaa

SEQ ID NO: 1955153 - DNA, 25 bp, Homo sapien
tggatagtagaactgagaaatggac

SEQ ID NO: 1955154 - DNA, 25 bp, Homo sapien
ttgcacaaggtggatagtagaactg

SEQ ID NO: 1955155 - DNA, 25 bp, Homo sapien
gccttgtcttggaggtttaataaca

SEQ ID NO: 1955156 - DNA, 25 bp, Homo sapien
tggcagtctgtgtcattcaccgctc

SEQ ID NO: 1955157 - DNA, 25 bp, Homo sapien
catctcctactggactgccgtgctc

SEQ ID NO: 1955158 - DNA, 25 bp, Homo sapien
tgatgcttggcgctctggcagtctg

SEQ ID NO: 1955159 - DNA, 25 bp, Homo sapien
tacctcccacggatgcgtttctggc

SEQ ID NO: 1955160 - DNA, 25 bp, Homo sapien
ttgtttcttccatggcaccgtgcat

SEQ ID NO: 1955161 - DNA, 25 bp, Homo sapien
gttgtttcttccatggcaccgtgca

SEQ ID NO: 1955162 - DNA, 25 bp, Homo sapien
cgttgtttcttccatggcaccgtgc

SEQ ID NO: 1955163 - DNA, 25 bp, Homo sapien
gctggtgatctatagacatttgcca

SEQ ID NO: 1955164 - DNA, 25 bp, Homo sapien
tagacatttgccacattgaacccat

SEQ ID NO: 1955165 - DNA, 25 bp, Homo sapien
acactgaggctggtgatctatagac

SEQ ID NO: 1955166 - DNA, 25 bp, Homo sapien
gatctatagacatttgccacattga

SEQ ID NO: 1955167 - DNA, 25 bp, Homo sapien
caccgttttcgaatttccactgctt

SEQ ID NO: 1955168 - DNA, 25 bp, Homo sapien
tcaccgttttcgaatttccactgct

SEQ ID NO: 1955169 - DNA, 25 bp, Homo sapien
tcagtaacatctagttcactccttt

SEQ ID NO: 1955170 - DNA, 25 bp, Homo sapien
tgcttcagtaacatctagttcactc

SEQ ID NO: 1955171 - DNA, 25 bp, Homo sapien
cagatagctggctctacccattaca

SEQ ID NO: 1955172 - DNA, 25 bp, Homo sapien
catgaggctccttagtttccagttc

SEQ ID NO: 1955173 - DNA, 25 bp, Homo sapien
taatggtacatttctctagagtaag

SEQ ID NO: 1955174 - DNA, 25 bp, Homo sapien
gccttatttgtgcagtaatggtaca

SEQ ID NO: 1955175 - DNA, 25 bp, Homo sapien
tgtggtgcgcctcaggggagcaggg

SEQ ID NO: 1955176 - DNA, 25 bp, Homo sapien
tcaggggagcagggtcccggacaac

SEQ ID NO: 1955177 - DNA, 25 bp, Homo sapien
cgcctcaggggagcagggtcccgga

SEQ ID NO: 1955178 - DNA, 25 bp, Homo sapien
cctcaggggagcagggtcccggaca

SEQ ID NO: 1955179 - DNA, 25 bp, Homo sapien
tgcttcctccaacagtgagggcaca

SEQ ID NO: 1955180 - DNA, 25 bp, Homo sapien
cttgcttcctccaacagtgagggca

SEQ ID NO: 1955181 - DNA, 25 bp, Homo sapien
gcttcctccaacagtgagggcacag

SEQ ID NO: 1955182 - DNA, 25 bp, Homo sapien
ttgcttcctccaacagtgagggcac

SEQ ID NO: 1955183 - DNA, 25 bp, Homo sapien
ccttgacttcttgtgctctagcgac

SEQ ID NO: 1955184 - DNA, 25 bp, Homo sapien
cttgacttcttgtgctctagcgact

SEQ ID NO: 1955185 - DNA, 25 bp, Homo sapien
gcttctgctgggtcttgcatccttg

SEQ ID NO: 1955186 - DNA, 25 bp, Homo sapien
cagcatttctattacaattgtcacc

SEQ ID NO: 1955187 - DNA, 25 bp, Homo sapien
ctttcacgctacagacagcatttct

SEQ ID NO: 1955188 - DNA, 25 bp, Homo sapien
cattgatatcattagggagaggctt

SEQ ID NO: 1955189 - DNA, 25 bp, Homo sapien
ggaaggagtcagctgctttcacgct

SEQ ID NO: 1955190 - DNA, 25 bp, Homo sapien
aggcggggcggtacgccaaggagag

SEQ ID NO: 1955191 - DNA, 25 bp, Homo sapien
gggcatctgaacccagtccccggga

SEQ ID NO: 1955192 - DNA, 25 bp, Homo sapien
ctccggccctgtgcgggctcgtgtg

SEQ ID NO: 1955193 - DNA, 25 bp, Homo sapien
tccacaggagccgtgcatgtggctg

SEQ ID NO: 1955194 - DNA, 25 bp, Homo sapien
atggcctcgcccgctgcttggaaca

SEQ ID NO: 1955195 - DNA, 25 bp, Homo sapien
gaacagcacagaagcgcaaccttcc

SEQ ID NO: 1955196 - DNA, 25 bp, Homo sapien
gagtctggcggataagccgtcacag

SEQ ID NO: 1955197 - DNA, 25 bp, Homo sapien
cctcctcgtcctggtaatactcgga

SEQ ID NO: 1955198 - DNA, 25 bp, Homo sapien
ttagcttagaggcaatgaatccatt

SEQ ID NO: 1955199 - DNA, 25 bp, Homo sapien
ttttccctaatgtgaatttttgcca

SEQ ID NO: 1955200 - DNA, 25 bp, Homo sapien
cattaagagggacatttctggtgaa

SEQ ID NO: 1955201 - DNA, 25 bp, Homo sapien
gaggcaatgaatccattaagaggga

SEQ ID NO: 1955202 - DNA, 25 bp, Homo sapien
acaaaaggagtttggtgatggacac

SEQ ID NO: 1955203 - DNA, 25 bp, Homo sapien
gtttccacggacatgctcttcagca

SEQ ID NO: 1955204 - DNA, 25 bp, Homo sapien
tatggatttgatgatgcgcagaagc

SEQ ID NO: 1955205 - DNA, 25 bp, Homo sapien
aagtctgacactcccaggatcttca

SEQ ID NO: 1955206 - DNA, 25 bp, Homo sapien
aggatcttcacacgtccactgcaca

SEQ ID NO: 1955207 - DNA, 25 bp, Homo sapien
tcgggtcaaaatgaatcaccggtgt

SEQ ID NO: 1955208 - DNA, 25 bp, Homo sapien
tgccagagctccgatgagggaatcc

SEQ ID NO: 1955209 - DNA, 25 bp, Homo sapien
caccggtgttaatgagcctccttgg

SEQ ID NO: 1955210 - DNA, 25 bp, Homo sapien
ccttggtgagtgaaagtcgggtcaa

SEQ ID NO: 1955211 - DNA, 25 bp, Homo sapien
tccccagtggctacgttcaacagcg

SEQ ID NO: 1955212 - DNA, 25 bp, Homo sapien
gctgattactagacagtaaccgtga

SEQ ID NO: 1955213 - DNA, 25 bp, Homo sapien
caacagcgtttgtggatatagctga

SEQ ID NO: 1955214 - DNA, 25 bp, Homo sapien
taaccgtgatgggacaccatcaggc

SEQ ID NO: 1955215 - DNA, 25 bp, Homo sapien
aaaccatcgccagcgttgcctgagg

SEQ ID NO: 1955216 - DNA, 25 bp, Homo sapien
tgtcggcacatgaggttggaaacca

SEQ ID NO: 1955217 - DNA, 25 bp, Homo sapien
gcctcagatgggagatgtcggcaca

SEQ ID NO: 1955218 - DNA, 25 bp, Homo sapien
aggaagagacttaaaccttgtgatc

SEQ ID NO: 1955219 - DNA, 25 bp, Homo sapien
ctgtcccgacgcatgccctgtgctg

SEQ ID NO: 1955220 - DNA, 25 bp, Homo sapien
ccgacgcatgccctgtgctgatgcc

SEQ ID NO: 1955221 - DNA, 25 bp, Homo sapien
tcccgacgcatgccctgtgctgatg

SEQ ID NO: 1955222 - DNA, 25 bp, Homo sapien
gtcccgacgcatgccctgtgctgat

SEQ ID NO: 1955223 - DNA, 25 bp, Homo sapien
gacgcatgccctgttccatttaatg

SEQ ID NO: 1955224 - DNA, 25 bp, Homo sapien
ccactggactggaggttggcaacta

SEQ ID NO: 1955225 - DNA, 25 bp, Homo sapien
caactagggtaagcttgctgaattt

SEQ ID NO: 1955226 - DNA, 25 bp, Homo sapien
aatttgctttgtgggtaagagtagc

SEQ ID NO: 1955227 - DNA, 25 bp, Homo sapien
tctggtaattcatcaaacagtttct

SEQ ID NO: 1955228 - DNA, 25 bp, Homo sapien
caaagcttttcgaggagcgtatatt

SEQ ID NO: 1955229 - DNA, 25 bp, Homo sapien
tgagggcaggagaattggacccatt

SEQ ID NO: 1955230 - DNA, 25 bp, Homo sapien
caagggaaaattcatcttgcaaagc

SEQ ID NO: 1955231 - DNA, 25 bp, Homo sapien
cttttgaattccgtaatggcgtcat

SEQ ID NO: 1955232 - DNA, 25 bp, Homo sapien
taatggcgtcatgtgctggctgtgc

SEQ ID NO: 1955233 - DNA, 25 bp, Homo sapien
ccaggaccttttgaattccgtaatg

SEQ ID NO: 1955234 - DNA, 25 bp, Homo sapien
gaattccgtaatggcgtcatgtgct

SEQ ID NO: 1955235 - DNA, 25 bp, Homo sapien
gggcaactccctgccatccacacca

SEQ ID NO: 1955236 - DNA, 25 bp, Homo sapien
gcaactccctgccatccacaccaac

SEQ ID NO: 1955237 - DNA, 25 bp, Homo sapien
ggcaactccctgccatccacaccaa

SEQ ID NO: 1955238 - DNA, 25 bp, Homo sapien
tcccctttcagaggggggcatctta

SEQ ID NO: 1955239 - DNA, 25 bp, Homo sapien
acgcgagtcttacggtctttcctgg

SEQ ID NO: 1955240 - DNA, 25 bp, Homo sapien
tggtcaagggtgaacgttcctgggc

SEQ ID NO: 1955241 - DNA, 25 bp, Homo sapien
ttcctgggttcccatgctcggcggc

SEQ ID NO: 1955242 - DNA, 25 bp, Homo sapien
gggaagctgcagtgctcagactcct

SEQ ID NO: 1955243 - DNA, 25 bp, Homo sapien
ggaagctgcagtgctcagactcctc

SEQ ID NO: 1955244 - DNA, 25 bp, Homo sapien
cttggggaagctgcagtgctcagac

SEQ ID NO: 1955245 - DNA, 25 bp, Homo sapien
tggggaagctgcagtgctcagactc

SEQ ID NO: 1955246 - DNA, 25 bp, Homo sapien
tgggtcccgattttctgtggtgcac

SEQ ID NO: 1955247 - DNA, 25 bp, Homo sapien
gaattccccattgctgtgggtcccg

SEQ ID NO: 1955248 - DNA, 25 bp, Homo sapien
agatggttcgtgaagctccagggaa

SEQ ID NO: 1955249 - DNA, 25 bp, Homo sapien
tctgggcccatccaatggtgtactg

SEQ ID NO: 1955250 - DNA, 25 bp, Homo sapien
taagctggcgcctgagtacagctgg

SEQ ID NO: 1955251 - DNA, 25 bp, Homo sapien
ccaggataagctggcgcctgagtac

SEQ ID NO: 1955252 - DNA, 25 bp, Homo sapien
gggtgaacatatcagctcttgcaag

SEQ ID NO: 1955253 - DNA, 25 bp, Homo sapien
tcagctcttgcaagccaggataagc

SEQ ID NO: 1955254 - DNA, 25 bp, Homo sapien
aaggaagagaaggtattagctggcg

SEQ ID NO: 1955255 - DNA, 25 bp, Homo sapien
tattagctggcgttggggttactgt

SEQ ID NO: 1955256 - DNA, 25 bp, Homo sapien
ggttactgtgtctttatccattccc

SEQ ID NO: 1955257 - DNA, 25 bp, Homo sapien
gcgttggggttactgtgtctttatc

SEQ ID NO: 1955258 - DNA, 25 bp, Homo sapien
gtagtcttcggaggcaaatattcca

SEQ ID NO: 1955259 - DNA, 25 bp, Homo sapien
ttgaggagaaagcaccgtagtcttc

SEQ ID NO: 1955260 - DNA, 25 bp, Homo sapien
gagaaagcaccgtagtcttcggagg

SEQ ID NO: 1955261 - DNA, 25 bp, Homo sapien
gcaccgtagtcttcggaggcaaata

SEQ ID NO: 1955262 - DNA, 25 bp, Homo sapien
ccaaagtccttgcttgttcttgagg

SEQ ID NO: 1955263 - DNA, 25 bp, Homo sapien
cttgcccaaagtccttgcttgttct

SEQ ID NO: 1955264 - DNA, 25 bp, Homo sapien
tccttgcttgttcttgaggactcac

SEQ ID NO: 1955265 - DNA, 25 bp, Homo sapien
gtccttgcttgttcttgaggactca

SEQ ID NO: 1955266 - DNA, 25 bp, Homo sapien
gatggcagtttaagcctctgtcttc

SEQ ID NO: 1955267 - DNA, 25 bp, Homo sapien
ggaggtttcttatgatggcagttta

SEQ ID NO: 1955268 - DNA, 25 bp, Homo sapien
tctgtcttctacgttcggtgagatt

SEQ ID NO: 1955269 - DNA, 25 bp, Homo sapien
agcctctgtcttctacgttcggtga

SEQ ID NO: 1955270 - DNA, 25 bp, Homo sapien
ctgttgctgaaccttgttccagtgc

SEQ ID NO: 1955271 - DNA, 25 bp, Homo sapien
tgttccagtgcacagcggcctctcg

SEQ ID NO: 1955272 - DNA, 25 bp, Homo sapien
gaaccttgttccagtgcacagcggc

SEQ ID NO: 1955273 - DNA, 25 bp, Homo sapien
tgctgaaccttgttccagtgcacag

SEQ ID NO: 1955274 - DNA, 25 bp, Homo sapien
taaagccaacgctgggctcttattc

SEQ ID NO: 1955275 - DNA, 25 bp, Homo sapien
tttttctcctcgataggccctagcg

SEQ ID NO: 1955276 - DNA, 25 bp, Homo sapien
ctatggacgatctacttaaggaaca

SEQ ID NO: 1955277 - DNA, 25 bp, Homo sapien
atcccgttggcacctggctcaagtg

SEQ ID NO: 1955278 - DNA, 25 bp, Homo sapien
gaagcagtttctgtaccgcgctggt

SEQ ID NO: 1955279 - DNA, 25 bp, Homo sapien
ttctgtaccgcgctggttctcagtg

SEQ ID NO: 1955280 - DNA, 25 bp, Homo sapien
ctgtaccgcgctggttctcagtgta

SEQ ID NO: 1955281 - DNA, 25 bp, Homo sapien
gcagtttctgtaccgcgctggttct

SEQ ID NO: 1955282 - DNA, 25 bp, Homo sapien
gagcaggcagtcacttcgattctct

SEQ ID NO: 1955283 - DNA, 25 bp, Homo sapien
cggccctgctggacttgttgcttaa

SEQ ID NO: 1955284 - DNA, 25 bp, Homo sapien
gaaattgtgcaaacccttggatgaa

SEQ ID NO: 1955285 - DNA, 25 bp, Homo sapien
tttcactgcaaggtgcacggccctg

SEQ ID NO: 1955286 - DNA, 25 bp, Homo sapien
agccctgggagactgaacgagcctc

SEQ ID NO: 1955287 - DNA, 25 bp, Homo sapien
aggtcatcagtgcttcacgtcgctg

SEQ ID NO: 1955288 - DNA, 25 bp, Homo sapien
ttgagctacaagaggctctcctcgg

SEQ ID NO: 1955289 - DNA, 25 bp, Homo sapien
cacgtcgctgggacattgagctaca

SEQ ID NO: 1955290 - DNA, 25 bp, Homo sapien
tggacgccatccagttttcaggcag

SEQ ID NO: 1955291 - DNA, 25 bp, Homo sapien
cccagctaattagaggcgagcaggt

SEQ ID NO: 1955292 - DNA, 25 bp, Homo sapien
gagcatcactgagacaacgtgccaa

SEQ ID NO: 1955293 - DNA, 25 bp, Homo sapien
tctcagtgtgggcaggaacaacctg

SEQ ID NO: 1955294 - DNA, 25 bp, Homo sapien
atcatcaccagcattgtctttctga

SEQ ID NO: 1955295 - DNA, 25 bp, Homo sapien
catcaccagcattgtctttctgagt

SEQ ID NO: 1955296 - DNA, 25 bp, Homo sapien
tcatcaccagcattgtctttctgag

SEQ ID NO: 1955297 - DNA, 25 bp, Homo sapien
cagatgaacaacagcaggacatgga

SEQ ID NO: 1955298 - DNA, 25 bp, Homo sapien
gtgccagaccaagcatgatattttt

SEQ ID NO: 1955299 - DNA, 25 bp, Homo sapien
catcatcttattagtgcagtgtgaa

SEQ ID NO: 1955300 - DNA, 25 bp, Homo sapien
acaatacttgcaacacaccaggtat

SEQ ID NO: 1955301 - DNA, 25 bp, Homo sapien
tgcaaatgagcctgtcaaaagttcg

SEQ ID NO: 1955302 - DNA, 25 bp, Homo sapien
gtgcaaatgagcctgtcaaaagttc

SEQ ID NO: 1955303 - DNA, 25 bp, Homo sapien
gcaaatgagcctgtcaaaagttcgt

SEQ ID NO: 1955304 - DNA, 25 bp, Homo sapien
caaatgagcctgtcaaaagttcgta

SEQ ID NO: 1955305 - DNA, 25 bp, Homo sapien
tgtctgcagttttgggcttgagctc

SEQ ID NO: 1955306 - DNA, 25 bp, Homo sapien
ttccatgcccccgttctgacatgag

SEQ ID NO: 1955307 - DNA, 25 bp, Homo sapien
cataatggcccatgtttgatgcctg

SEQ ID NO: 1955308 - DNA, 25 bp, Homo sapien
tacccagtacgtgaaaccattgtct

SEQ ID NO: 1955309 - DNA, 25 bp, Homo sapien
tgctcagactgttcactctttcttc

SEQ ID NO: 1955310 - DNA, 25 bp, Homo sapien
ccctgctcagactgttcactctttc

SEQ ID NO: 1955311 - DNA, 25 bp, Homo sapien
gctgatagtggggtggacccctgct

SEQ ID NO: 1955312 - DNA, 25 bp, Homo sapien
ggtggacccctgctcagactgttca

SEQ ID NO: 1955313 - DNA, 25 bp, Homo sapien
tgtggctgtttgctccccgcattac

SEQ ID NO: 1955314 - DNA, 25 bp, Homo sapien
agccatagtgaaccggcagagccct

SEQ ID NO: 1955315 - DNA, 25 bp, Homo sapien
tcctaggagggcaatgtaagccacg

SEQ ID NO: 1955316 - DNA, 25 bp, Homo sapien
agccagcagatctgaaggtggtcgt

SEQ ID NO: 1955317 - DNA, 25 bp, Homo sapien
tctgaccttcgcaccacttcagtgt

SEQ ID NO: 1955318 - DNA, 25 bp, Homo sapien
ccggctggcaggctcttcaaatgga

SEQ ID NO: 1955319 - DNA, 25 bp, Homo sapien
tcaaatggaacaggtttcggcagaa

SEQ ID NO: 1955320 - DNA, 25 bp, Homo sapien
caaggagttattttgctctacctgg

SEQ ID NO: 1955321 - DNA, 25 bp, Homo sapien
tgtgtgttcacagtattgccgaatc

SEQ ID NO: 1955322 - DNA, 25 bp, Homo sapien
tactgaggtgttctgttggcctcca

SEQ ID NO: 1955323 - DNA, 25 bp, Homo sapien
tgccgaatcttggacccacatcatc

SEQ ID NO: 1955324 - DNA, 25 bp, Homo sapien
tcctactgaggtgttctgttggcct

SEQ ID NO: 1955325 - DNA, 25 bp, Homo sapien
ttttggagcgtgacgtgagcctgca

SEQ ID NO: 1955326 - DNA, 25 bp, Homo sapien
cttgtaagtgctaatccagcgctga

SEQ ID NO: 1955327 - DNA, 25 bp, Homo sapien
tgagcctgcatagagacacatccat

SEQ ID NO: 1955328 - DNA, 25 bp, Homo sapien
tgccgtctgcatgtggttttggagc

SEQ ID NO: 1955329 - DNA, 25 bp, Homo sapien
gcctccgtgttttcgactgtagtga

SEQ ID NO: 1955330 - DNA, 25 bp, Homo sapien
tcctgggaggtatttccatgagtga

SEQ ID NO: 1955331 - DNA, 25 bp, Homo sapien
catccttaatcagagacgacatcct

SEQ ID NO: 1955332 - DNA, 25 bp, Homo sapien
tagtgaacatgctgaagccgtccgc

SEQ ID NO: 1955333 - DNA, 25 bp, Homo sapien
agtgtattgcgaatatgagggctca

SEQ ID NO: 1955334 - DNA, 25 bp, Homo sapien
tacggatgtgtctcagctgggcagg

SEQ ID NO: 1955335 - DNA, 25 bp, Homo sapien
cctgaagtgtattgcgaatatgagg

SEQ ID NO: 1955336 - DNA, 25 bp, Homo sapien
gagggctcatattcaagggtacgga

SEQ ID NO: 1955337 - DNA, 25 bp, Homo sapien
ccggctgcgcggcagcttctccttt

SEQ ID NO: 1955338 - DNA, 25 bp, Homo sapien
aacactgcctccaccgagagacgtc

SEQ ID NO: 1955339 - DNA, 25 bp, Homo sapien
caccagaggtacgtggggcctggcc

SEQ ID NO: 1955340 - DNA, 25 bp, Homo sapien
gcctccaccgagagacgtctttgac

SEQ ID NO: 1955341 - DNA, 25 bp, Homo sapien
taaagggcagcaacgccaacacctt

SEQ ID NO: 1955342 - DNA, 25 bp, Homo sapien
cctttttggcaggtgattgatctgc

SEQ ID NO: 1955343 - DNA, 25 bp, Homo sapien
caaagcacagcacgtctcctttttg

SEQ ID NO: 1955344 - DNA, 25 bp, Homo sapien
tttccagggtaaagggcagcaacgc

SEQ ID NO: 1955345 - DNA, 25 bp, Homo sapien
gaggctaagcccacgggaaccgagc

SEQ ID NO: 1955346 - DNA, 25 bp, Homo sapien
ttggacaccgagctctgtccacgca

SEQ ID NO: 1955347 - DNA, 25 bp, Homo sapien
acaccgagctctgtccacgcaggag

SEQ ID NO: 1955348 - DNA, 25 bp, Homo sapien
agcgtttcatcagggtcatgcgcca

SEQ ID NO: 1955349 - DNA, 25 bp, Homo sapien
agcatattgtcaggaagctgacagg

SEQ ID NO: 1955350 - DNA, 25 bp, Homo sapien
ctgggtaggaactagaacttgttcg

SEQ ID NO: 1955351 - DNA, 25 bp, Homo sapien
atctttgcagacacggcgagcctgg

SEQ ID NO: 1955352 - DNA, 25 bp, Homo sapien
tttcatctttgcagacacggcgagc

SEQ ID NO: 1955353 - DNA, 25 bp, Homo sapien
atgaagcaaatatcggtgaagtagc

SEQ ID NO: 1955354 - DNA, 25 bp, Homo sapien
ggtgaagtagctaaatcccagttca

SEQ ID NO: 1955355 - DNA, 25 bp, Homo sapien
cagatgttaacctttcgagaaagta

SEQ ID NO: 1955356 - DNA, 25 bp, Homo sapien
ttgcctgcatatttgatgaagcaaa

SEQ ID NO: 1955357 - DNA, 25 bp, Homo sapien
ttgtctccacaatagctctttgctg

SEQ ID NO: 1955358 - DNA, 25 bp, Homo sapien
cttgtctccacaatagctctttgct

SEQ ID NO: 1955359 - DNA, 25 bp, Homo sapien
gccttgctatgtccaaaacatggaa

SEQ ID NO: 1955360 - DNA, 25 bp, Homo sapien
aaaagttgtatactatctagtacca

SEQ ID NO: 1955361 - DNA, 25 bp, Homo sapien
agagacacaagtgtggttgccagga

SEQ ID NO: 1955362 - DNA, 25 bp, Homo sapien
ttattcataacagcctcaaatggga

SEQ ID NO: 1955363 - DNA, 25 bp, Homo sapien
gatacttccatatgagccacgggct

SEQ ID NO: 1955364 - DNA, 25 bp, Homo sapien
ccactgacggtctgttttccagagc

SEQ ID NO: 1955365 - DNA, 25 bp, Homo sapien
agagctcatcctgcgtttcttatgc

SEQ ID NO: 1955366 - DNA, 25 bp, Homo sapien
gcctttactgttgatgatggtcact

SEQ ID NO: 1955367 - DNA, 25 bp, Homo sapien
agcttgtggcttgtcatgcgacagc

SEQ ID NO: 1955368 - DNA, 25 bp, Homo sapien
ttcttaggcaacaccgttgttgctt

SEQ ID NO: 1955369 - DNA, 25 bp, Homo sapien
tcatgcgacagccaaggaagtcctc

SEQ ID NO: 1955370 - DNA, 25 bp, Homo sapien
ctttcctgtagagaggatggtgctt

SEQ ID NO: 1955371 - DNA, 25 bp, Homo sapien
cggtaggaggccgactttctcctgg

SEQ ID NO: 1955372 - DNA, 25 bp, Homo sapien
cctgcgttacggtaggaggccgact

SEQ ID NO: 1955373 - DNA, 25 bp, Homo sapien
gtaggaggccgactttctcctggca

SEQ ID NO: 1955374 - DNA, 25 bp, Homo sapien
ctccctgcctgcgttacggtaggag

SEQ ID NO: 1955375 - DNA, 25 bp, Homo sapien
catcagtcaggtgatgttgacccat

SEQ ID NO: 1955376 - DNA, 25 bp, Homo sapien
attagatcgcttctggggtgcctga

SEQ ID NO: 1955377 - DNA, 25 bp, Homo sapien
tgacattcagaatactccttacttt

SEQ ID NO: 1955378 - DNA, 25 bp, Homo sapien
gtgcctgacattcagaatactcctt

SEQ ID NO: 1955379 - DNA, 25 bp, Homo sapien
ttgcccgtttaccttggcacaggct

SEQ ID NO: 1955380 - DNA, 25 bp, Homo sapien
tcagcaccgtatgcgcatttgagca

SEQ ID NO: 1955381 - DNA, 25 bp, Homo sapien
gagactgaagatgcgtgacaactaa

SEQ ID NO: 1955382 - DNA, 25 bp, Homo sapien
taaaggacgttatcgggcaactgca

SEQ ID NO: 1955383 - DNA, 25 bp, Homo sapien
caaacccaaagtgaggacctgccta

SEQ ID NO: 1955384 - DNA, 25 bp, Homo sapien
gcaaatatcccagcgatggcgccta

SEQ ID NO: 1955385 - DNA, 25 bp, Homo sapien
aaagtgccgctgctaaaactgtaca

SEQ ID NO: 1955386 - DNA, 25 bp, Homo sapien
tgtgtgtaacacaggccttccatgg

SEQ ID NO: 1955387 - DNA, 25 bp, Homo sapien
taggccttggcctctcgctgaatgg

SEQ ID NO: 1955388 - DNA, 25 bp, Homo sapien
cattatcatttatgattgtggtctc

SEQ ID NO: 1955389 - DNA, 25 bp, Homo sapien
aagcctttcgtccttctctgcatta

SEQ ID NO: 1955390 - DNA, 25 bp, Homo sapien
gttcttcataacagcgatcacaatg

SEQ ID NO: 1955391 - DNA, 25 bp, Homo sapien
cagagagttttcgtgggtttgcaag

SEQ ID NO: 1955392 - DNA, 25 bp, Homo sapien
tgttcttcttaaacacacaagagtc

SEQ ID NO: 1955393 - DNA, 25 bp, Homo sapien
gcagcattgcatcagcgggagagtt

SEQ ID NO: 1955394 - DNA, 25 bp, Homo sapien
cacagaacccctcctgcatgtgtgt

SEQ ID NO: 1955395 - DNA, 25 bp, Homo sapien
cagaacccctcctgcatgtgtgtga

SEQ ID NO: 1955396 - DNA, 25 bp, Homo sapien
agaacccctcctgcatgtgtgtgag

SEQ ID NO: 1955397 - DNA, 25 bp, Homo sapien
gaacccctcctgcatgtgtgtgagg

SEQ ID NO: 1955398 - DNA, 25 bp, Homo sapien
agatgcctttgtgggaggatcctcc

SEQ ID NO: 1955399 - DNA, 25 bp, Homo sapien
gcctttgtgggaggatcctcctttg

SEQ ID NO: 1955400 - DNA, 25 bp, Homo sapien
tcagatgcctttgtgggaggatcct

SEQ ID NO: 1955401 - DNA, 25 bp, Homo sapien
tttgtgggaggatcctcctttggtg

SEQ ID NO: 1955402 - DNA, 25 bp, Homo sapien
agggctcatcctcgaggcctcatct

SEQ ID NO: 1955403 - DNA, 25 bp, Homo sapien
ggtaacacacttcaacccatcacag

SEQ ID NO: 1955404 - DNA, 25 bp, Homo sapien
gggttaggacacgaatgcatcttgt

SEQ ID NO: 1955405 - DNA, 25 bp, Homo sapien
tataaagaccctgttccgagtcaga

SEQ ID NO: 1955406 - DNA, 25 bp, Homo sapien
catatttctagctgcagttgtttgg

SEQ ID NO: 1955407 - DNA, 25 bp, Homo sapien
gggctgctgcatatttctagctgca

SEQ ID NO: 1955408 - DNA, 25 bp, Homo sapien
gggctgcctgactcccgtgtgcatt

SEQ ID NO: 1955409 - DNA, 25 bp, Homo sapien
tgtcccattgtggaaaagcagctct

SEQ ID NO: 1955410 - DNA, 25 bp, Homo sapien
aattctcacggctcgtccctggaca

SEQ ID NO: 1955411 - DNA, 25 bp, Homo sapien
cgagcagtacgcagcaacaagacag

SEQ ID NO: 1955412 - DNA, 25 bp, Homo sapien
ggctcgtccctggacacgagcagta

SEQ ID NO: 1955413 - DNA, 25 bp, Homo sapien
aagacggtggctccaattctcacgg

SEQ ID NO: 1955414 - DNA, 25 bp, Homo sapien
ttggtcaagaggagtgatgtgaggg

SEQ ID NO: 1955415 - DNA, 25 bp, Homo sapien
ctttcaccccttgctcgctccccaa

SEQ ID NO: 1955416 - DNA, 25 bp, Homo sapien
tgagggggtccatgcctgctttcac

SEQ ID NO: 1955417 - DNA, 25 bp, Homo sapien
ctgcggaggcgggaggtaggatctc

SEQ ID NO: 1955418 - DNA, 25 bp, Homo sapien
cctgaagcaggctgttccagagctc

SEQ ID NO: 1955419 - DNA, 25 bp, Homo sapien
agtgcacacactatgtccttgcagg

SEQ ID NO: 1955420 - DNA, 25 bp, Homo sapien
tcgctgggtaacgtgggatgtaaca

SEQ ID NO: 1955421 - DNA, 25 bp, Homo sapien
ggagggctctgattgagtgcacaca

SEQ ID NO: 1955422 - DNA, 25 bp, Homo sapien
ccctgtcagtgagacactcagtcag

SEQ ID NO: 1955423 - DNA, 25 bp, Homo sapien
ggccctgcacgtctttcatacgttg

SEQ ID NO: 1955424 - DNA, 25 bp, Homo sapien
gttggtgtcatcacaaaagcaaaga

SEQ ID NO: 1955425 - DNA, 25 bp, Homo sapien
aagacagttcctcaagtccctgtca

SEQ ID NO: 1955426 - DNA, 25 bp, Homo sapien
tggtgtggaggcctcttgagacacc

SEQ ID NO: 1955427 - DNA, 25 bp, Homo sapien
gagacaccctgtccaagaggaccac

SEQ ID NO: 1955428 - DNA, 25 bp, Homo sapien
ctcttggtcaagtgcagactgcaga

SEQ ID NO: 1955429 - DNA, 25 bp, Homo sapien
gggcatctcttggtcaagtgcagac

SEQ ID NO: 1955430 - DNA, 25 bp, Homo sapien
cacagctcatgtgtaggagaagcac

SEQ ID NO: 1955431 - DNA, 25 bp, Homo sapien
tgccccatccaaggactaggagtgg

SEQ ID NO: 1955432 - DNA, 25 bp, Homo sapien
gactggaaagtaatggcatctgccc

SEQ ID NO: 1955433 - DNA, 25 bp, Homo sapien
gatagtgtgccagtcagtgagtcca

SEQ ID NO: 1955434 - DNA, 25 bp, Homo sapien
tgtgcccatgaacaatctccagacc

SEQ ID NO: 1955435 - DNA, 25 bp, Homo sapien
tgaacaatctccagacccgcctcag

SEQ ID NO: 1955436 - DNA, 25 bp, Homo sapien
ctgtgcccatgaacaatctccagac

SEQ ID NO: 1955437 - DNA, 25 bp, Homo sapien
acaatctccagacccgcctcagagt

SEQ ID NO: 1955438 - DNA, 25 bp, Homo sapien
tgacaccttcgagtttccactgagg

SEQ ID NO: 1955439 - DNA, 25 bp, Homo sapien
cactgaggccgtttaacaataggga

SEQ ID NO: 1955440 - DNA, 25 bp, Homo sapien
gactatggctgataacacttttggg

SEQ ID NO: 1955441 - DNA, 25 bp, Homo sapien
gattagagggcagtaacccagggcc

SEQ ID NO: 1955442 - DNA, 25 bp, Homo sapien
gaccgtgaaggatcacaaatttgtt

SEQ ID NO: 1955443 - DNA, 25 bp, Homo sapien
ttgtttctcaaaggcccctccgctg

SEQ ID NO: 1955444 - DNA, 25 bp, Homo sapien
gagtcccgttccccgtgtgcttctg

SEQ ID NO: 1955445 - DNA, 25 bp, Homo sapien
agaagcgcagagctttttcggaagc

SEQ ID NO: 1955446 - DNA, 25 bp, Homo sapien
gcccggcgttgccatggcagtcatg

SEQ ID NO: 1955447 - DNA, 25 bp, Homo sapien
attgacttgggagaccgcccggcca

SEQ ID NO: 1955448 - DNA, 25 bp, Homo sapien
aatacattcgaggtgacatcactgc

SEQ ID NO: 1955449 - DNA, 25 bp, Homo sapien
gggccttcagtggatttgagctcta

SEQ ID NO: 1955450 - DNA, 25 bp, Homo sapien
tattgtcattacgtttaatggcgaa

SEQ ID NO: 1955451 - DNA, 25 bp, Homo sapien
ccacgcctgcctattgtcattacgt

SEQ ID NO: 1955452 - DNA, 25 bp, Homo sapien
gcctgcctattgtcattacgtttaa

SEQ ID NO: 1955453 - DNA, 25 bp, Homo sapien
cctattgtcattacgtttaatggcg

SEQ ID NO: 1955454 - DNA, 25 bp, Homo sapien
cacagtatcgtcagacccaaggtca

SEQ ID NO: 1955455 - DNA, 25 bp, Homo sapien
tggagcacttacctaacagagagat

SEQ ID NO: 1955456 - DNA, 25 bp, Homo sapien
tacatttggtgcaaggctacaactc

SEQ ID NO: 1955457 - DNA, 25 bp, Homo sapien
cagtgaataatgaccacaccaaggg

SEQ ID NO: 1955458 - DNA, 25 bp, Homo sapien
gaaacttatgatcatggtagaaggg

SEQ ID NO: 1955459 - DNA, 25 bp, Homo sapien
aacttatgatcatggtagaagggga

SEQ ID NO: 1955460 - DNA, 25 bp, Homo sapien
aggaaacttatgatcatggtagaag

SEQ ID NO: 1955461 - DNA, 25 bp, Homo sapien
agtttagcccagctgaggaagcctc

SEQ ID NO: 1955462 - DNA, 25 bp, Homo sapien
tgcaaatgagctgtcctcgcgttct

SEQ ID NO: 1955463 - DNA, 25 bp, Homo sapien
gcgttctttccgagtttctgcttcc

SEQ ID NO: 1955464 - DNA, 25 bp, Homo sapien
gctgtcctcgcgttctttccgagtt

SEQ ID NO: 1955465 - DNA, 25 bp, Homo sapien
caggaagcactgcaaatgagctgtc

SEQ ID NO: 1955466 - DNA, 25 bp, Homo sapien
taacagccagacataaaaagccaac

SEQ ID NO: 1955467 - DNA, 25 bp, Homo sapien
aaaagccaacttgaggctcatcggg

SEQ ID NO: 1955468 - DNA, 25 bp, Homo sapien
gtaatgacgaatggaagttctgcca

SEQ ID NO: 1955469 - DNA, 25 bp, Homo sapien
tttttaaagctctgaataacagcca

SEQ ID NO: 1955470 - DNA, 25 bp, Homo sapien
ctgtgtgaacgcagaggccgactct

SEQ ID NO: 1955471 - DNA, 25 bp, Homo sapien
tgtgaacgcagaggccgactctctg

SEQ ID NO: 1955472 - DNA, 25 bp, Homo sapien
tgtgtgaacgcagaggccgactctc

SEQ ID NO: 1955473 - DNA, 25 bp, Homo sapien
gaacgcagaggccgactctctgagt

SEQ ID NO: 1955474 - DNA, 25 bp, Homo sapien
aaaacagagccctccgcagacttac

SEQ ID NO: 1955475 - DNA, 25 bp, Homo sapien
tgacaaaacagagccctccgcagac

SEQ ID NO: 1955476 - DNA, 25 bp, Homo sapien
gacaaaacagagccctccgcagact

SEQ ID NO: 1955477 - DNA, 25 bp, Homo sapien
ccaggcctgcggactggactctctc

SEQ ID NO: 1955478 - DNA, 25 bp, Homo sapien
tcatcccaggcctgcggactggact

SEQ ID NO: 1955479 - DNA, 25 bp, Homo sapien
gctcatcccaggcctgcggactgga

SEQ ID NO: 1955480 - DNA, 25 bp, Homo sapien
atcccaggcctgcggactggactct

SEQ ID NO: 1955481 - DNA, 25 bp, Homo sapien
cctgcaccccaggtcactaccttgg

SEQ ID NO: 1955482 - DNA, 25 bp, Homo sapien
tgcaccccaggtcactaccttggtt

SEQ ID NO: 1955483 - DNA, 25 bp, Homo sapien
ctgcaccccaggtcactaccttggt

SEQ ID NO: 1955484 - DNA, 25 bp, Homo sapien
caggtcactaccttggtttccttgg

SEQ ID NO: 1955485 - DNA, 25 bp, Homo sapien
gtgatgtaaggcctacataaaaggc

SEQ ID NO: 1955486 - DNA, 25 bp, Homo sapien
ccaggactgctctaaagcatggctc

SEQ ID NO: 1955487 - DNA, 25 bp, Homo sapien
aaaggccgtattatctggagctttc

SEQ ID NO: 1955488 - DNA, 25 bp, Homo sapien
ctccaggactgctctaaagcatggc

SEQ ID NO: 1955489 - DNA, 25 bp, Homo sapien
tctttatgaagataccgagaaggag

SEQ ID NO: 1955490 - DNA, 25 bp, Homo sapien
tcttatcaggggctctagttctcgc

SEQ ID NO: 1955491 - DNA, 25 bp, Homo sapien
gttctcgctgttcctctggatcagg

SEQ ID NO: 1955492 - DNA, 25 bp, Homo sapien
gtccagaatagcatatgcagttctt

SEQ ID NO: 1955493 - DNA, 25 bp, Homo sapien
gagtctttctcatggttgccgggcg

SEQ ID NO: 1955494 - DNA, 25 bp, Homo sapien
tcagggatgcaaagcgttggagtct

SEQ ID NO: 1955495 - DNA, 25 bp, Homo sapien
gtctgtcatcggcaggcagaagtag

SEQ ID NO: 1955496 - DNA, 25 bp, Homo sapien
ccgtggtgagtcgatgctgtcgatt

SEQ ID NO: 1955497 - DNA, 25 bp, Homo sapien
caggaggagtcggtgcctccggaca

SEQ ID NO: 1955498 - DNA, 25 bp, Homo sapien
gacatgtccctctccgctgtgtctg

SEQ ID NO: 1955499 - DNA, 25 bp, Homo sapien
cttctttgagaacggccctggtggt

SEQ ID NO: 1955500 - DNA, 25 bp, Homo sapien
tccctgggtgctcggccacgtgtgg

SEQ ID NO: 1955501 - DNA, 25 bp, Homo sapien
gaacgtgcaaacgtgcgactacagc

SEQ ID NO: 1955502 - DNA, 25 bp, Homo sapien
aacgtgcgactacagctgttgtggg

SEQ ID NO: 1955503 - DNA, 25 bp, Homo sapien
ctgtgtgtgaacgtgcaaacgtgcg

SEQ ID NO: 1955504 - DNA, 25 bp, Homo sapien
tcctcagtccttcctcggatctggg

SEQ ID NO: 1955505 - DNA, 25 bp, Homo sapien
cagcgagcacatgtttcccgttgcc

SEQ ID NO: 1955506 - DNA, 25 bp, Homo sapien
tcccagggatcagagctgataagtc

SEQ ID NO: 1955507 - DNA, 25 bp, Homo sapien
tgtcctgaccctcgcttctgttggg

SEQ ID NO: 1955508 - DNA, 25 bp, Homo sapien
tgttgggacctatacctgctttatc

SEQ ID NO: 1955509 - DNA, 25 bp, Homo sapien
tacttctttcaactcccatcgctga

SEQ ID NO: 1955510 - DNA, 25 bp, Homo sapien
ggactaatccccaccatcaaaggct

SEQ ID NO: 1955511 - DNA, 25 bp, Homo sapien
ggtgaactccagaattttgggacta

SEQ ID NO: 1955512 - DNA, 25 bp, Homo sapien
ccatcgctgatgttgacatggacca

SEQ ID NO: 1955513 - DNA, 25 bp, Homo sapien
ggtgagttgcccaatagttgtggta

SEQ ID NO: 1955514 - DNA, 25 bp, Homo sapien
ctggaagaagcacttggaacacttt

SEQ ID NO: 1955515 - DNA, 25 bp, Homo sapien
tggtacgtctcagacactctgtcac

SEQ ID NO: 1955516 - DNA, 25 bp, Homo sapien
gaagaagcacttggaacactttctc

SEQ ID NO: 1955517 - DNA, 25 bp, Homo sapien
tccttcagttttgggttgccagggc

SEQ ID NO: 1955518 - DNA, 25 bp, Homo sapien
aagcccctcgctgagcagagcttgc

SEQ ID NO: 1955519 - DNA, 25 bp, Homo sapien
ggacggccgcttggcctgagtccat

SEQ ID NO: 1955520 - DNA, 25 bp, Homo sapien
gagtccatgcgctcccaaagttcct

SEQ ID NO: 1955521 - DNA, 25 bp, Homo sapien
cacgaggtcctcatcgtggcccttt

SEQ ID NO: 1955522 - DNA, 25 bp, Homo sapien
catcgtggccctttgtggaggcttc

SEQ ID NO: 1955523 - DNA, 25 bp, Homo sapien
aggcttccactttaatccctcgaag

SEQ ID NO: 1955524 - DNA, 25 bp, Homo sapien
taatccctcgaagtttgcaattcat

SEQ ID NO: 1955525 - DNA, 25 bp, Homo sapien
tgcctgtggatctgcaggagctccg

SEQ ID NO: 1955526 - DNA, 25 bp, Homo sapien
ggcgaaggtgcctgtggatctgcag

SEQ ID NO: 1955527 - DNA, 25 bp, Homo sapien
ggtgcctgtggatctgcaggagctc

SEQ ID NO: 1955528 - DNA, 25 bp, Homo sapien
gggagaaggcgaaggtgcctgtgga

SEQ ID NO: 1955529 - DNA, 25 bp, Homo sapien
ggttttcttggtgctgtgccagccc

SEQ ID NO: 1955530 - DNA, 25 bp, Homo sapien
gaagtgtctgtagggccactgggtc

SEQ ID NO: 1955531 - DNA, 25 bp, Homo sapien
aaaggcattggagccaaatctcggg

SEQ ID NO: 1955532 - DNA, 25 bp, Homo sapien
cagctgaaaggcattggagccaaat

SEQ ID NO: 1955533 - DNA, 25 bp, Homo sapien
acagggtctgagtccagcagctttg

SEQ ID NO: 1955534 - DNA, 25 bp, Homo sapien
tgacagagcctccaggcaaacaggg

SEQ ID NO: 1955535 - DNA, 25 bp, Homo sapien
gcaaacagggtctgagtccagcagc

SEQ ID NO: 1955536 - DNA, 25 bp, Homo sapien
ggtctgagtccagcagctttgacct

SEQ ID NO: 1955537 - DNA, 25 bp, Homo sapien
ctcctgtgggcctgagtgtcatctt

SEQ ID NO: 1955538 - DNA, 25 bp, Homo sapien
tcctgtgggcctgagtgtcatcttc

SEQ ID NO: 1955539 - DNA, 25 bp, Homo sapien
cctcctgtgggcctgagtgtcatct

SEQ ID NO: 1955540 - DNA, 25 bp, Homo sapien
atctctcttcacctgaggacactct

SEQ ID NO: 1955541 - DNA, 25 bp, Homo sapien
acacatgcacccttgacaagccgat

SEQ ID NO: 1955542 - DNA, 25 bp, Homo sapien
tggaagggaaatccgtagcactgac

SEQ ID NO: 1955543 - DNA, 25 bp, Homo sapien
tctcttggtgactccaaaggtggaa

SEQ ID NO: 1955544 - DNA, 25 bp, Homo sapien
tctgcagagtcactgaagcgggagc

SEQ ID NO: 1955545 - DNA, 25 bp, Homo sapien
caggtaaggacgttgcagctattgg

SEQ ID NO: 1955546 - DNA, 25 bp, Homo sapien
taagtgtggcttcgcctaggtcctg

SEQ ID NO: 1955547 - DNA, 25 bp, Homo sapien
gatgtgaaaattgacccaggcaggt

SEQ ID NO: 1955548 - DNA, 25 bp, Homo sapien
ggcatcacgatggtgttagggctct

SEQ ID NO: 1955549 - DNA, 25 bp, Homo sapien
atcacgatggtgttagggctctggt

SEQ ID NO: 1955550 - DNA, 25 bp, Homo sapien
ttaattgagactaccaagagcttcc

SEQ ID NO: 1955551 - DNA, 25 bp, Homo sapien
ttccaggggcatcacgatggtgtta

SEQ ID NO: 1955552 - DNA, 25 bp, Homo sapien
ccaggggagtttctgacacccgcat

SEQ ID NO: 1955553 - DNA, 25 bp, Homo sapien
cttctccatattgctccttccaggg

SEQ ID NO: 1955554 - DNA, 25 bp, Homo sapien
tccctgatgagcttctccatattgc

SEQ ID NO: 1955555 - DNA, 25 bp, Homo sapien
ttctctgcattcctccctgatgagc

SEQ ID NO: 1955556 - DNA, 25 bp, Homo sapien
ccccatggcacgaactttattcttg

SEQ ID NO: 1955557 - DNA, 25 bp, Homo sapien
tcaaccccatggcacgaactttatt

SEQ ID NO: 1955558 - DNA, 25 bp, Homo sapien
cacgaactttattcttgcttcggtc

SEQ ID NO: 1955559 - DNA, 25 bp, Homo sapien
ggcacgaactttattcttgcttcgg

SEQ ID NO: 1955560 - DNA, 25 bp, Homo sapien
tcatgtatacatcgaagccccttca

SEQ ID NO: 1955561 - DNA, 25 bp, Homo sapien
gcaatggcttcataaccatctcccg

SEQ ID NO: 1955562 - DNA, 25 bp, Homo sapien
catcctatcactccattgttcatgt

SEQ ID NO: 1955563 - DNA, 25 bp, Homo sapien
cattttgcacgctgaggctgattcc

SEQ ID NO: 1955564 - DNA, 25 bp, Homo sapien
aagtcaaggctagggtcattcatct

SEQ ID NO: 1955565 - DNA, 25 bp, Homo sapien
tgcaaaatcacgtcaaagtctgggt

SEQ ID NO: 1955566 - DNA, 25 bp, Homo sapien
tttcagctcacagtttatggacggg

SEQ ID NO: 1955567 - DNA, 25 bp, Homo sapien
tattcagaagccttaccgaagactg

SEQ ID NO: 1955568 - DNA, 25 bp, Homo sapien
atgtgatgacagtgaagactgcaag

SEQ ID NO: 1955569 - DNA, 25 bp, Homo sapien
attcccgcttccttcctttatgcag

SEQ ID NO: 1955570 - DNA, 25 bp, Homo sapien
cagtgaagactgcaaggctctggag

SEQ ID NO: 1955571 - DNA, 25 bp, Homo sapien
tgacagtgaagactgcaaggctctg

SEQ ID NO: 1955572 - DNA, 25 bp, Homo sapien
ccagaagttcagttcacttgcccct

SEQ ID NO: 1955573 - DNA, 25 bp, Homo sapien
gtcctgaacaccagggtgagtagtc

SEQ ID NO: 1955574 - DNA, 25 bp, Homo sapien
caccagggtgagtagtctttgtact

SEQ ID NO: 1955575 - DNA, 25 bp, Homo sapien
gtcccagaagttcagttcacttgcc

SEQ ID NO: 1955576 - DNA, 25 bp, Homo sapien
ctgtctggactctggactagaaact

SEQ ID NO: 1955577 - DNA, 25 bp, Homo sapien
tctgtctggactctggactagaaac

SEQ ID NO: 1955578 - DNA, 25 bp, Homo sapien
tctctgccaactctgtctggactct

SEQ ID NO: 1955579 - DNA, 25 bp, Homo sapien
aaggaaagcttcaccttggaattgg

SEQ ID NO: 1955580 - DNA, 25 bp, Homo sapien
aagcttcaccttggaattggcgcat

SEQ ID NO: 1955581 - DNA, 25 bp, Homo sapien
ggaaagcttcaccttggaattggcg

SEQ ID NO: 1955582 - DNA, 25 bp, Homo sapien
gggcaaggaaagcttcaccttggaa

SEQ ID NO: 1955583 - DNA, 25 bp, Homo sapien
gagtgtctgttttaatctgtgtgta

SEQ ID NO: 1955584 - DNA, 25 bp, Homo sapien
cctggtccactactggaatacatac

SEQ ID NO: 1955585 - DNA, 25 bp, Homo sapien
gactgttttccttgcgtgtgcatgt

SEQ ID NO: 1955586 - DNA, 25 bp, Homo sapien
cactactggaatacatacctatttg

SEQ ID NO: 1955587 - DNA, 25 bp, Homo sapien
cctgggctgtagaagcgcaaatcta

SEQ ID NO: 1955588 - DNA, 25 bp, Homo sapien
tgagcaacccctgacatcagagagg

SEQ ID NO: 1955589 - DNA, 25 bp, Homo sapien
ccacggagcagatgaaacctgggct

SEQ ID NO: 1955590 - DNA, 25 bp, Homo sapien
cgcaaatctaagctcctgtctgaag

SEQ ID NO: 1955591 - DNA, 25 bp, Homo sapien
ctgtgggttctcccaattaaccagt

SEQ ID NO: 1955592 - DNA, 25 bp, Homo sapien
ctcccaattaaccagttttctctct

SEQ ID NO: 1955593 - DNA, 25 bp, Homo sapien
catcatcctcactgccttcatttgt

SEQ ID NO: 1955594 - DNA, 25 bp, Homo sapien
cccatcatcctcactgccttcattt

SEQ ID NO: 1955595 - DNA, 25 bp, Homo sapien
catcctcactgccttcatttgtcat

SEQ ID NO: 1955596 - DNA, 25 bp, Homo sapien
atcatcctcactgccttcatttgtc

SEQ ID NO: 1955597 - DNA, 25 bp, Homo sapien
gcagcagtggcatgtggcctgaaat

SEQ ID NO: 1955598 - DNA, 25 bp, Homo sapien
cagcagtggcatgtggcctgaaata

SEQ ID NO: 1955599 - DNA, 25 bp, Homo sapien
agcagtggcatgtggcctgaaataa

SEQ ID NO: 1955600 - DNA, 25 bp, Homo sapien
cctctgaaatcataagggatcattc

SEQ ID NO: 1955601 - DNA, 25 bp, Homo sapien
catagtaacaatcatcactcatcat

SEQ ID NO: 1955602 - DNA, 25 bp, Homo sapien
tggcctcagtccagtcatagtaaca

SEQ ID NO: 1955603 - DNA, 25 bp, Homo sapien
cctgatattcggcaagcctctgaaa

SEQ ID NO: 1955604 - DNA, 25 bp, Homo sapien
cacatcctgaacctgccactggtga

SEQ ID NO: 1955605 - DNA, 25 bp, Homo sapien
cagctgggctctcgtgcattctcta

SEQ ID NO: 1955606 - DNA, 25 bp, Homo sapien
ggacaatcgctaacctgcagctggg

SEQ ID NO: 1955607 - DNA, 25 bp, Homo sapien
tcttagtgaatgactgccatccaag

SEQ ID NO: 1955608 - DNA, 25 bp, Homo sapien
cagggctcatgttgccggatgcagc

SEQ ID NO: 1955609 - DNA, 25 bp, Homo sapien
cttgccgtggagaggtgttcaatca

SEQ ID NO: 1955610 - DNA, 25 bp, Homo sapien
tcaatcaccacaatcactgttctgc

SEQ ID NO: 1955611 - DNA, 25 bp, Homo sapien
tcatgttgccggatgcagccacact

SEQ ID NO: 1955612 - DNA, 25 bp, Homo sapien
cacagtgcagtacaggattggaaga

SEQ ID NO: 1955613 - DNA, 25 bp, Homo sapien
tattatcaaacccacagtgcagtac

SEQ ID NO: 1955614 - DNA, 25 bp, Homo sapien
tgcggttattatcaaacccacagtg

SEQ ID NO: 1955615 - DNA, 25 bp, Homo sapien
tgcctccaatattctgcggttatta

SEQ ID NO: 1955616 - DNA, 25 bp, Homo sapien
gctgcaatttctgagttcccgaacc

SEQ ID NO: 1955617 - DNA, 25 bp, Homo sapien
cgttagactgggtgccacctatggc

SEQ ID NO: 1955618 - DNA, 25 bp, Homo sapien
gaacctcacgcccatgtaatcatac

SEQ ID NO: 1955619 - DNA, 25 bp, Homo sapien
gaacatcgggaacagaatggtcgtt

SEQ ID NO: 1955620 - DNA, 25 bp, Homo sapien
cacacagccaattggaacccagaca

SEQ ID NO: 1955621 - DNA, 25 bp, Homo sapien
tgctgtggtgttggaactacaggct

SEQ ID NO: 1955622 - DNA, 25 bp, Homo sapien
tggcccatttgctagttgcgcacac

SEQ ID NO: 1955623 - DNA, 25 bp, Homo sapien
tacaggcttcaagacagatggccca

SEQ ID NO: 1955624 - DNA, 25 bp, Homo sapien
aagtgccattgaagtgatttggaga

SEQ ID NO: 1955625 - DNA, 25 bp, Homo sapien
gctcttagtgtattcatgtgggtaa

SEQ ID NO: 1955626 - DNA, 25 bp, Homo sapien
tctttttagctcttagtgtattcat

SEQ ID NO: 1955627 - DNA, 25 bp, Homo sapien
ttaggggccaaaagtgccattgaag

SEQ ID NO: 1955628 - DNA, 25 bp, Homo sapien
agacccaataccagtgctgcctctt

SEQ ID NO: 1955629 - DNA, 25 bp, Homo sapien
atcagacccaataccagtgctgcct

SEQ ID NO: 1955630 - DNA, 25 bp, Homo sapien
aaccatcagacccaataccagtgct

SEQ ID NO: 1955631 - DNA, 25 bp, Homo sapien
catccaaccatcagacccaatacca

SEQ ID NO: 1955632 - DNA, 25 bp, Homo sapien
tcatcactgtaccctcctctgccca

SEQ ID NO: 1955633 - DNA, 25 bp, Homo sapien
ctcctctgcccaaaatgaaagcagc

SEQ ID NO: 1955634 - DNA, 25 bp, Homo sapien
ccctcctctgcccaaaatgaaagca

SEQ ID NO: 1955635 - DNA, 25 bp, Homo sapien
ttcatcactgtaccctcctctgccc

SEQ ID NO: 1955636 - DNA, 25 bp, Homo sapien
cacaaagtaaaggagagaggtctgg

SEQ ID NO: 1955637 - DNA, 25 bp, Homo sapien
ggacaaggcggccatccacaaagta

SEQ ID NO: 1955638 - DNA, 25 bp, Homo sapien
aggacacagggacaaggcggccatc

SEQ ID NO: 1955639 - DNA, 25 bp, Homo sapien
cacacgtacagagggaagattaggt

SEQ ID NO: 1955640 - DNA, 25 bp, Homo sapien
tgtatgcacgatgaaaacagtttcc

SEQ ID NO: 1955641 - DNA, 25 bp, Homo sapien
gatatctggcaggtagttgggtgtg

SEQ ID NO: 1955642 - DNA, 25 bp, Homo sapien
gacccatgatgtatgcacgatgaaa

SEQ ID NO: 1955643 - DNA, 25 bp, Homo sapien
ggtgtgatgacccatgatgtatgca

SEQ ID NO: 1955644 - DNA, 25 bp, Homo sapien
ctgcaggagatacacacgaatcccc

SEQ ID NO: 1955645 - DNA, 25 bp, Homo sapien
atacacacgaatccccgcagaggca

SEQ ID NO: 1955646 - DNA, 25 bp, Homo sapien
ctcttccatgacattgtgaaaacac

SEQ ID NO: 1955647 - DNA, 25 bp, Homo sapien
aggagatacacacgaatccccgcag

SEQ ID NO: 1955648 - DNA, 25 bp, Homo sapien
ccttcagataatctgtagcaggatt

SEQ ID NO: 1955649 - DNA, 25 bp, Homo sapien
ctcaggacattaggctgtggaatct

SEQ ID NO: 1955650 - DNA, 25 bp, Homo sapien
taaactcaggacattaggctgtgga

SEQ ID NO: 1955651 - DNA, 25 bp, Homo sapien
ggacattaggctgtggaatctgtgc

SEQ ID NO: 1955652 - DNA, 25 bp, Homo sapien
acattaggctgtggaatctgtgctc

SEQ ID NO: 1955653 - DNA, 25 bp, Homo sapien
taatgctctgttgtgtctatgtacc

SEQ ID NO: 1955654 - DNA, 25 bp, Homo sapien
aatgctctgttgtgtctatgtacca

SEQ ID NO: 1955655 - DNA, 25 bp, Homo sapien
atgctctgttgtgtctatgtaccac

SEQ ID NO: 1955656 - DNA, 25 bp, Homo sapien
ataatgctctgttgtgtctatgtac

SEQ ID NO: 1955657 - DNA, 25 bp, Homo sapien
tcaaagtggtgtccctaggccaact

SEQ ID NO: 1955658 - DNA, 25 bp, Homo sapien
gcagctactgtggtgaaatccatga

SEQ ID NO: 1955659 - DNA, 25 bp, Homo sapien
ctttccccaaagttgtacagacagg

SEQ ID NO: 1955660 - DNA, 25 bp, Homo sapien
agttctcttaaagcgcctggcagtg

SEQ ID NO: 1955661 - DNA, 25 bp, Homo sapien
agacaacgacgccacagtgcagaac

SEQ ID NO: 1955662 - DNA, 25 bp, Homo sapien
gaagatctcagccattccggctgca

SEQ ID NO: 1955663 - DNA, 25 bp, Homo sapien
atcctgttggaacggatgcctgccc

SEQ ID NO: 1955664 - DNA, 25 bp, Homo sapien
gcagattctggacggagactcagga

SEQ ID NO: 1955665 - DNA, 25 bp, Homo sapien
ctgtccccgcggctaccagggagtg

SEQ ID NO: 1955666 - DNA, 25 bp, Homo sapien
agtgcggcaccagaagcagcccaac

SEQ ID NO: 1955667 - DNA, 25 bp, Homo sapien
ttgtcctgggctaaccatgggcttc

SEQ ID NO: 1955668 - DNA, 25 bp, Homo sapien
tactggtttcgcaggcttgtcctgg

SEQ ID NO: 1955669 - DNA, 25 bp, Homo sapien
gccatccgcaccctttcatgagagg

SEQ ID NO: 1955670 - DNA, 25 bp, Homo sapien
cgccattacgagagacctcacccca

SEQ ID NO: 1955671 - DNA, 25 bp, Homo sapien
cactcaggagaagccgcgagccgct

SEQ ID NO: 1955672 - DNA, 25 bp, Homo sapien
gagaagccgcgagccgctcaccaga

SEQ ID NO: 1955673 - DNA, 25 bp, Homo sapien
ttcggcagtagggtctgcctctgct

SEQ ID NO: 1955674 - DNA, 25 bp, Homo sapien
ctcctccttcggcagtagggtctgc

SEQ ID NO: 1955675 - DNA, 25 bp, Homo sapien
ctgctccttcgggtcccctgctcat

SEQ ID NO: 1955676 - DNA, 25 bp, Homo sapien
caggagccccacatcgccgggggaa

SEQ ID NO: 1955677 - DNA, 25 bp, Homo sapien
tttttggctccttgtacatcagcat

SEQ ID NO: 1955678 - DNA, 25 bp, Homo sapien
ggcctttttggctccttgtacatca

SEQ ID NO: 1955679 - DNA, 25 bp, Homo sapien
cgcaggcctttttggctccttgtac

SEQ ID NO: 1955680 - DNA, 25 bp, Homo sapien
ccgcaggcctttttggctccttgta

SEQ ID NO: 1955681 - DNA, 25 bp, Homo sapien
gctaaggcgttggatgagtctacac

SEQ ID NO: 1955682 - DNA, 25 bp, Homo sapien
taaggcgttggatgagtctacacac

SEQ ID NO: 1955683 - DNA, 25 bp, Homo sapien
tctggctaaggcgttggatgagtct

SEQ ID NO: 1955684 - DNA, 25 bp, Homo sapien
aggttttctggctaaggcgttggat

SEQ ID NO: 1955685 - DNA, 25 bp, Homo sapien
tgaaatgtaaatggtactaccctca

SEQ ID NO: 1955686 - DNA, 25 bp, Homo sapien
tctgctctggccggttcagaagtct

SEQ ID NO: 1955687 - DNA, 25 bp, Homo sapien
ggttcagaagtctgcttcagagcgg

SEQ ID NO: 1955688 - DNA, 25 bp, Homo sapien
cagagcgggtttattgccaaacaga

SEQ ID NO: 1955689 - DNA, 25 bp, Homo sapien
cagattagaacacatatcctgacat

SEQ ID NO: 1955690 - DNA, 25 bp, Homo sapien
gctttattcagattagaacacatat

SEQ ID NO: 1955691 - DNA, 25 bp, Homo sapien
gggatgaggacatccttttcctctg

SEQ ID NO: 1955692 - DNA, 25 bp, Homo sapien
tagaacacatatcctgacatgaatt

SEQ ID NO: 1955693 - DNA, 25 bp, Homo sapien
gaattacatatggtgcagctacagg

SEQ ID NO: 1955694 - DNA, 25 bp, Homo sapien
tgttttgggtgcaaaccaattcagc

SEQ ID NO: 1955695 - DNA, 25 bp, Homo sapien
tagaggcctccaggttttctcatcc

SEQ ID NO: 1955696 - DNA, 25 bp, Homo sapien
gagaacattcagtatgggaggcatt

SEQ ID NO: 1955697 - DNA, 25 bp, Homo sapien
tcctcctagggactctgtgaactgc

SEQ ID NO: 1955698 - DNA, 25 bp, Homo sapien
gttcaaaggtgctcccataatccag

SEQ ID NO: 1955699 - DNA, 25 bp, Homo sapien
ggctggatggccataaacctgattt

SEQ ID NO: 1955700 - DNA, 25 bp, Homo sapien
gagtcaacggtacctccaaacatgg

SEQ ID NO: 1955701 - DNA, 25 bp, Homo sapien
actgtcatgtgccagtccacagagg

SEQ ID NO: 1955702 - DNA, 25 bp, Homo sapien
catcttgacctaaagatgctgacat

SEQ ID NO: 1955703 - DNA, 25 bp, Homo sapien
tcccagaggtaaatccatcttgacc

SEQ ID NO: 1955704 - DNA, 25 bp, Homo sapien
ccagtccacagaggcgaaactcagt

SEQ ID NO: 1955705 - DNA, 25 bp, Homo sapien
tctgtggtatactccgggctacgaa

SEQ ID NO: 1955706 - DNA, 25 bp, Homo sapien
acttgggctgtctgtggtatactcc

SEQ ID NO: 1955707 - DNA, 25 bp, Homo sapien
tttttatgggacttgggctgtctgt

SEQ ID NO: 1955708 - DNA, 25 bp, Homo sapien
tccgggctacgaatggccgtgcaga

SEQ ID NO: 1955709 - DNA, 25 bp, Homo sapien
ttcttttgaagtcaccttccatggc

SEQ ID NO: 1955710 - DNA, 25 bp, Homo sapien
gaagtcaccttccatggctacgcga

SEQ ID NO: 1955711 - DNA, 25 bp, Homo sapien
ccatggctacgcgatgcttctcaaa

SEQ ID NO: 1955712 - DNA, 25 bp, Homo sapien
caccttccatggctacgcgatgctt

SEQ ID NO: 1955713 - DNA, 25 bp, Homo sapien
caatatcactggaagatcttcttat

SEQ ID NO: 1955714 - DNA, 25 bp, Homo sapien
gaagatcttcttataggacactgaa

SEQ ID NO: 1955715 - DNA, 25 bp, Homo sapien
tcttcttataggacactgaaaatgc

SEQ ID NO: 1955716 - DNA, 25 bp, Homo sapien
tcactggaagatcttcttataggac

SEQ ID NO: 1955717 - DNA, 25 bp, Homo sapien
tctactctgttgtctgcagagccag

SEQ ID NO: 1955718 - DNA, 25 bp, Homo sapien
atagttgttgatgatgctagagccc

SEQ ID NO: 1955719 - DNA, 25 bp, Homo sapien
catccgtgctcctgatgacggcagg

SEQ ID NO: 1955720 - DNA, 25 bp, Homo sapien
tgacggcaggccctacactgagtgt

SEQ ID NO: 1955721 - DNA, 25 bp, Homo sapien
ctttggtagccgtatgcagtaaaga

SEQ ID NO: 1955722 - DNA, 25 bp, Homo sapien
ttggtagccgtatgcagtaaagagc

SEQ ID NO: 1955723 - DNA, 25 bp, Homo sapien
tagccgtatgcagtaaagagctgcc

SEQ ID NO: 1955724 - DNA, 25 bp, Homo sapien
ggtagccgtatgcagtaaagagctg

SEQ ID NO: 1955725 - DNA, 25 bp, Homo sapien
cagataccatttctattatcatggg

SEQ ID NO: 1955726 - DNA, 25 bp, Homo sapien
ctattccctatcgagaaagtgaatc

SEQ ID NO: 1955727 - DNA, 25 bp, Homo sapien
gaaggattgcttcatcgatgccatt

SEQ ID NO: 1955728 - DNA, 25 bp, Homo sapien
agtgaatcttataaccattctcaga

SEQ ID NO: 1955729 - DNA, 25 bp, Homo sapien
aatctcttgatggtctccaaatcca

SEQ ID NO: 1955730 - DNA, 25 bp, Homo sapien
caatctcttgatggtctccaaatcc

SEQ ID NO: 1955731 - DNA, 25 bp, Homo sapien
atctcttgatggtctccaaatccat

SEQ ID NO: 1955732 - DNA, 25 bp, Homo sapien
ggatcaaagtactggataatttttc

SEQ ID NO: 1955733 - DNA, 25 bp, Homo sapien
tggatcaaagtactggataattttt

SEQ ID NO: 1955734 - DNA, 25 bp, Homo sapien
gctttgcagtgatgcacttgagcat

SEQ ID NO: 1955735 - DNA, 25 bp, Homo sapien
aaaataggagggctgctttgcagtg

SEQ ID NO: 1955736 - DNA, 25 bp, Homo sapien
cacaaaataggagggctgctttgca

SEQ ID NO: 1955737 - DNA, 25 bp, Homo sapien
tgctttgcagtgatgcacttgagca

SEQ ID NO: 1955738 - DNA, 25 bp, Homo sapien
tcatacagcctttgccacgctgcct

SEQ ID NO: 1955739 - DNA, 25 bp, Homo sapien
cctttgccacgctgcctctgacacc

SEQ ID NO: 1955740 - DNA, 25 bp, Homo sapien
gcctttgccacgctgcctctgacac

SEQ ID NO: 1955741 - DNA, 25 bp, Homo sapien
ctttgccacgctgcctctgacacca

SEQ ID NO: 1955742 - DNA, 25 bp, Homo sapien
cagcacttgctgtagcctgtctctc

SEQ ID NO: 1955743 - DNA, 25 bp, Homo sapien
gcacttgctgtagcctgtctctcag

SEQ ID NO: 1955744 - DNA, 25 bp, Homo sapien
tggctccgcttggtggatgcagcac

SEQ ID NO: 1955745 - DNA, 25 bp, Homo sapien
tcacccatggctccgcttggtggat

SEQ ID NO: 1955746 - DNA, 25 bp, Homo sapien
ttagaagggaaccacagccagactg

SEQ ID NO: 1955747 - DNA, 25 bp, Homo sapien
ctatgttctgctcccttagaaggga

SEQ ID NO: 1955748 - DNA, 25 bp, Homo sapien
tgatctccctccactatgttctgct

SEQ ID NO: 1955749 - DNA, 25 bp, Homo sapien
cagcagcgccccttggatcaatgca

SEQ ID NO: 1955750 - DNA, 25 bp, Homo sapien
tctgtgtagtgtcaccaacaaggcc

SEQ ID NO: 1955751 - DNA, 25 bp, Homo sapien
cttctgtgtagtgtcaccaacaagg

SEQ ID NO: 1955752 - DNA, 25 bp, Homo sapien
ttctgtgtagtgtcaccaacaaggc

SEQ ID NO: 1955753 - DNA, 25 bp, Homo sapien
taaaatggatctgccggcacgttat

SEQ ID NO: 1955754 - DNA, 25 bp, Homo sapien
ggcatgtctgcagaacagttcccct

SEQ ID NO: 1955755 - DNA, 25 bp, Homo sapien
gacttaacattgtgcaaaatctccc

SEQ ID NO: 1955756 - DNA, 25 bp, Homo sapien
ggcacgttatgtcactcacagaaga

SEQ ID NO: 1955757 - DNA, 25 bp, Homo sapien
gggacggcagagtagccagcagtgc

SEQ ID NO: 1955758 - DNA, 25 bp, Homo sapien
gaccttacttacattcaggctctcc

SEQ ID NO: 1955759 - DNA, 25 bp, Homo sapien
cagcagtgccataggcctttgtatg

SEQ ID NO: 1955760 - DNA, 25 bp, Homo sapien
gtgtagctgttcacagttcatttcc

SEQ ID NO: 1955761 - DNA, 25 bp, Homo sapien
tggtggtaatcccagtagtagcttg

SEQ ID NO: 1955762 - DNA, 25 bp, Homo sapien
gacttgtgaactcatgcctctcacg

SEQ ID NO: 1955763 - DNA, 25 bp, Homo sapien
tgtttttccgtctgagagtgacatc

SEQ ID NO: 1955764 - DNA, 25 bp, Homo sapien
gtctgagagtgacatcctctgatgc

SEQ ID NO: 1955765 - DNA, 25 bp, Homo sapien
ttaaacagggcctctccggaatgga

SEQ ID NO: 1955766 - DNA, 25 bp, Homo sapien
gggcctctccggaatggatagatgt

SEQ ID NO: 1955767 - DNA, 25 bp, Homo sapien
ctccggaatggatagatgtcactaa

SEQ ID NO: 1955768 - DNA, 25 bp, Homo sapien
aacagggcctctccggaatggatag

SEQ ID NO: 1955769 - DNA, 25 bp, Homo sapien
gaggccatgattcccgagtaagaac

SEQ ID NO: 1955770 - DNA, 25 bp, Homo sapien
cattctacagcaatgcctgctctca

SEQ ID NO: 1955771 - DNA, 25 bp, Homo sapien
gagtaagaaccacattctacagcaa

SEQ ID NO: 1955772 - DNA, 25 bp, Homo sapien
gcctgctctcaactcatcgtgacaa

SEQ ID NO: 1955773 - DNA, 25 bp, Homo sapien
gattttttctgggagcatggagctt

SEQ ID NO: 1955774 - DNA, 25 bp, Homo sapien
catggagcttgagcatcaatcagat

SEQ ID NO: 1955775 - DNA, 25 bp, Homo sapien
gagcatggagcttgagcatcaatca

SEQ ID NO: 1955776 - DNA, 25 bp, Homo sapien
tctgggagcatggagcttgagcatc

SEQ ID NO: 1955777 - DNA, 25 bp, Homo sapien
tggctttctgggactgaacggagca

SEQ ID NO: 1955778 - DNA, 25 bp, Homo sapien
ctttctgggactgaacggagcagct

SEQ ID NO: 1955779 - DNA, 25 bp, Homo sapien
aagtggctttctgggactgaacgga

SEQ ID NO: 1955780 - DNA, 25 bp, Homo sapien
tctgggactgaacggagcagctgct

SEQ ID NO: 1955781 - DNA, 25 bp, Homo sapien
tggttcccaggtccaagttattgct

SEQ ID NO: 1955782 - DNA, 25 bp, Homo sapien
gagggacacagaggttggctccggg

SEQ ID NO: 1955783 - DNA, 25 bp, Homo sapien
cacagaggttggctccgggttgcca

SEQ ID NO: 1955784 - DNA, 25 bp, Homo sapien
gatttgcaaagcgaggagggacaca

SEQ ID NO: 1955785 - DNA, 25 bp, Homo sapien
gcttgtccttaccccttaggtctga

SEQ ID NO: 1955786 - DNA, 25 bp, Homo sapien
ccttaggtctgaagcaccattctct

SEQ ID NO: 1955787 - DNA, 25 bp, Homo sapien
tgtccttaccccttaggtctgaagc

SEQ ID NO: 1955788 - DNA, 25 bp, Homo sapien
taccccttaggtctgaagcaccatt

SEQ ID NO: 1955789 - DNA, 25 bp, Homo sapien
agatctgtctcctacatcgtgtcca

SEQ ID NO: 1955790 - DNA, 25 bp, Homo sapien
tgtctcctacatcgtgtccactttc

SEQ ID NO: 1955791 - DNA, 25 bp, Homo sapien
tcctacatcgtgtccactttcttca

SEQ ID NO: 1955792 - DNA, 25 bp, Homo sapien
tcagatctgtctcctacatcgtgtc

SEQ ID NO: 1955793 - DNA, 25 bp, Homo sapien
catgaggcagcatccatgcacattt

SEQ ID NO: 1955794 - DNA, 25 bp, Homo sapien
catggcatgcttcatctagcttaga

SEQ ID NO: 1955795 - DNA, 25 bp, Homo sapien
tctgaagtcacaggcgataagagca

SEQ ID NO: 1955796 - DNA, 25 bp, Homo sapien
tgctcctggcggagatccagcatga

SEQ ID NO: 1955797 - DNA, 25 bp, Homo sapien
ccataaagggttgcataattgtgaa

SEQ ID NO: 1955798 - DNA, 25 bp, Homo sapien
ggaacccagacaaccagggtgcctg

SEQ ID NO: 1955799 - DNA, 25 bp, Homo sapien
ggaagctcccataaagggttgcata

SEQ ID NO: 1955800 - DNA, 25 bp, Homo sapien
tcccataaagggttgcataattgtg

SEQ ID NO: 1955801 - DNA, 25 bp, Homo sapien
tttttctgtgtgattagcatatctt

SEQ ID NO: 1955802 - DNA, 25 bp, Homo sapien
tctgtgtgattagcatatcttctcc

SEQ ID NO: 1955803 - DNA, 25 bp, Homo sapien
cttctgagtcgagggccaaactttt

SEQ ID NO: 1955804 - DNA, 25 bp, Homo sapien
catcttctgagtcgagggccaaact

SEQ ID NO: 1955805 - DNA, 25 bp, Homo sapien
gcttttgcccttgaagccatggcca

SEQ ID NO: 1955806 - DNA, 25 bp, Homo sapien
caacttcatccccataacttgtgtt

SEQ ID NO: 1955807 - DNA, 25 bp, Homo sapien
catccccataacttgtgttctccaa

SEQ ID NO: 1955808 - DNA, 25 bp, Homo sapien
ctccaaggcttttgcccttgaagcc

SEQ ID NO: 1955809 - DNA, 25 bp, Homo sapien
tcaagtcaacatttgaacgacccct

SEQ ID NO: 1955810 - DNA, 25 bp, Homo sapien
tctgccacagttccaatgtcgggct

SEQ ID NO: 1955811 - DNA, 25 bp, Homo sapien
tggaatcagccgatctgggggtccc

SEQ ID NO: 1955812 - DNA, 25 bp, Homo sapien
cactggtggactgaggccattctgg

SEQ ID NO: 1955813 - DNA, 25 bp, Homo sapien
tcaggtttgtctttagagccttctc

SEQ ID NO: 1955814 - DNA, 25 bp, Homo sapien
aggtttgtctttagagccttctctc

SEQ ID NO: 1955815 - DNA, 25 bp, Homo sapien
caggtttgtctttagagccttctct

SEQ ID NO: 1955816 - DNA, 25 bp, Homo sapien
atcaggtttgtctttagagccttct

SEQ ID NO: 1955817 - DNA, 25 bp, Homo sapien
tgtggaagtgcaccccatgatgttc

SEQ ID NO: 1955818 - DNA, 25 bp, Homo sapien
gaaccaaaggtcaatccagctctag

SEQ ID NO: 1955819 - DNA, 25 bp, Homo sapien
gatgttccacggtgcattcctcaga

SEQ ID NO: 1955820 - DNA, 25 bp, Homo sapien
taacctaatgtctcccgtccagaag

SEQ ID NO: 1955821 - DNA, 25 bp, Homo sapien
ttcttgtggtcgtgtgcacaaactg

SEQ ID NO: 1955822 - DNA, 25 bp, Homo sapien
gctgttcttgtggtcgtgtgcacaa

SEQ ID NO: 1955823 - DNA, 25 bp, Homo sapien
tgttcttgtggtcgtgtgcacaaac

SEQ ID NO: 1955824 - DNA, 25 bp, Homo sapien
tcttgtggtcgtgtgcacaaactga

SEQ ID NO: 1955825 - DNA, 25 bp, Homo sapien
gaaatacatcattagcaactgtggg

SEQ ID NO: 1955826 - DNA, 25 bp, Homo sapien
tagcagtcagagtttatatggattc

SEQ ID NO: 1955827 - DNA, 25 bp, Homo sapien
gatctaatgagataatggttgtcaa

SEQ ID NO: 1955828 - DNA, 25 bp, Homo sapien
tgtaacctgccataatgcctatagc

SEQ ID NO: 1955829 - DNA, 25 bp, Homo sapien
agccccatcccggctaaggcaggtg

SEQ ID NO: 1955830 - DNA, 25 bp, Homo sapien
ctctgtgctttctccggctggttcc

SEQ ID NO: 1955831 - DNA, 25 bp, Homo sapien
tccggctggttcctggctagcgtct

SEQ ID NO: 1955832 - DNA, 25 bp, Homo sapien
ggttcctggctagcgtctacctcac

SEQ ID NO: 1955833 - DNA, 25 bp, Homo sapien
tctgggcagtactgagagcctcatc

SEQ ID NO: 1955834 - DNA, 25 bp, Homo sapien
catcatcatgacataggctattcac

SEQ ID NO: 1955835 - DNA, 25 bp, Homo sapien
ctcatcctgcctttgagcctgtggc

SEQ ID NO: 1955836 - DNA, 25 bp, Homo sapien
cagccatctgggcagtactgagagc

SEQ ID NO: 1955837 - DNA, 25 bp, Homo sapien
tggcggcactggcttcaccattaca

SEQ ID NO: 1955838 - DNA, 25 bp, Homo sapien
tgtgcgcaggcttacagacagggct

SEQ ID NO: 1955839 - DNA, 25 bp, Homo sapien
gctatacacaacaccgctgtgcgca

SEQ ID NO: 1955840 - DNA, 25 bp, Homo sapien
ggctgttacgtggactgtttgatat

SEQ ID NO: 1955841 - DNA, 25 bp, Homo sapien
ttcgccggcgaatttgactactgtg

SEQ ID NO: 1955842 - DNA, 25 bp, Homo sapien
tctctattagcgcattttcctccat

SEQ ID NO: 1955843 - DNA, 25 bp, Homo sapien
catccctatcattcgccggcgaatt

SEQ ID NO: 1955844 - DNA, 25 bp, Homo sapien
ttcctccatccctatcattcgccgg

SEQ ID NO: 1955845 - DNA, 25 bp, Homo sapien
gtttccactggactcgtcagatgca

SEQ ID NO: 1955846 - DNA, 25 bp, Homo sapien
taaaatgaggaccagtacccagctc

SEQ ID NO: 1955847 - DNA, 25 bp, Homo sapien
ccttgttgaaacagggcgtcacatc

SEQ ID NO: 1955848 - DNA, 25 bp, Homo sapien
gactcaggaagtcgcttggcactga

SEQ ID NO: 1955849 - DNA, 25 bp, Homo sapien
aagctcaaggactcctttctctata

SEQ ID NO: 1955850 - DNA, 25 bp, Homo sapien
gactcccaaagctcaaggactcctt

SEQ ID NO: 1955851 - DNA, 25 bp, Homo sapien
cagcacgttggccttatcctctgcg

SEQ ID NO: 1955852 - DNA, 25 bp, Homo sapien
gttggccttatcctctgcgtcacag

SEQ ID NO: 1955853 - DNA, 25 bp, Homo sapien
gcgtcacagtttgtaaatccacatt

SEQ ID NO: 1955854 - DNA, 25 bp, Homo sapien
tatcctctgcgtcacagtttgtaaa

SEQ ID NO: 1955855 - DNA, 25 bp, Homo sapien
gaagtgactagatgattcagttgaa

SEQ ID NO: 1955856 - DNA, 25 bp, Homo sapien
tctgcagtagctaagataatgtagg

SEQ ID NO: 1955857 - DNA, 25 bp, Homo sapien
tgatcagggatcttattcataacac

SEQ ID NO: 1955858 - DNA, 25 bp, Homo sapien
tccccaatggagcaacgagattatg

SEQ ID NO: 1955859 - DNA, 25 bp, Homo sapien
agacgggatctggcacccagtgaac

SEQ ID NO: 1955860 - DNA, 25 bp, Homo sapien
acagacgggatctggcacccagtga

SEQ ID NO: 1955861 - DNA, 25 bp, Homo sapien
acgggatctggcacccagtgaacac

SEQ ID NO: 1955862 - DNA, 25 bp, Homo sapien
ttacagacgggatctggcacccagt

SEQ ID NO: 1955863 - DNA, 25 bp, Homo sapien
gaagaatagtccatgaacggaaagg

SEQ ID NO: 1955864 - DNA, 25 bp, Homo sapien
ctgtgtgtgcgttttggaaggaagg

SEQ ID NO: 1955865 - DNA, 25 bp, Homo sapien
gaaggggaagaatagtccatgaacg

SEQ ID NO: 1955866 - DNA, 25 bp, Homo sapien
atagtccatgaacggaaaggtaaag

SEQ ID NO: 1955867 - DNA, 25 bp, Homo sapien
ggcacaatgtatccactttgttcgc

SEQ ID NO: 1955868 - DNA, 25 bp, Homo sapien
cgtacaacaggaggcacaatgtatc

SEQ ID NO: 1955869 - DNA, 25 bp, Homo sapien
caggaggcacaatgtatccactttg

SEQ ID NO: 1955870 - DNA, 25 bp, Homo sapien
caacaggaggcacaatgtatccact

SEQ ID NO: 1955871 - DNA, 25 bp, Homo sapien
tgtcaattagccctctccctgtatt

SEQ ID NO: 1955872 - DNA, 25 bp, Homo sapien
cttcggcatccatagacctgtcaat

SEQ ID NO: 1955873 - DNA, 25 bp, Homo sapien
catagacctgtcaattagccctctc

SEQ ID NO: 1955874 - DNA, 25 bp, Homo sapien
gccctctccctgtattctgattcat

SEQ ID NO: 1955875 - DNA, 25 bp, Homo sapien
gctgttctttgcagacagtgggctg

SEQ ID NO: 1955876 - DNA, 25 bp, Homo sapien
cctgtgctgcgtttaggctgctgtg

SEQ ID NO: 1955877 - DNA, 25 bp, Homo sapien
tgctgtccctggagaacgtgagacg

SEQ ID NO: 1955878 - DNA, 25 bp, Homo sapien
taacactgagaggaaagctctgttt

SEQ ID NO: 1955879 - DNA, 25 bp, Homo sapien
agtcatgttggcagatgagctctcc

SEQ ID NO: 1955880 - DNA, 25 bp, Homo sapien
tgttggcagatgagctctccaaaga

SEQ ID NO: 1955881 - DNA, 25 bp, Homo sapien
tcagtcatgttggcagatgagctct

SEQ ID NO: 1955882 - DNA, 25 bp, Homo sapien
ttggcagatgagctctccaaagaat

SEQ ID NO: 1955883 - DNA, 25 bp, Homo sapien
tttccgcaaactgcaccaggaggaa

SEQ ID NO: 1955884 - DNA, 25 bp, Homo sapien
cctttccgcaaactgcaccaggagg

SEQ ID NO: 1955885 - DNA, 25 bp, Homo sapien
attccctttccgcaaactgcaccag

SEQ ID NO: 1955886 - DNA, 25 bp, Homo sapien
tgttccccttgagtatttggagagg

SEQ ID NO: 1955887 - DNA, 25 bp, Homo sapien
tagcaactcattgagagcttctgtc

SEQ ID NO: 1955888 - DNA, 25 bp, Homo sapien
gctttagcaactcattgagagcttc

SEQ ID NO: 1955889 - DNA, 25 bp, Homo sapien
aactcattgagagcttctgtctgca

SEQ ID NO: 1955890 - DNA, 25 bp, Homo sapien
gcaactcattgagagcttctgtctg

SEQ ID NO: 1955891 - DNA, 25 bp, Homo sapien
ttcaaatctcaaaagcaagcacatg

SEQ ID NO: 1955892 - DNA, 25 bp, Homo sapien
ctattgacgataaaggcagagtcca

SEQ ID NO: 1955893 - DNA, 25 bp, Homo sapien
caaatctcaaaagcaagcacatgga

SEQ ID NO: 1955894 - DNA, 25 bp, Homo sapien
taaaaatgtggcctgctattgacga

SEQ ID NO: 1955895 - DNA, 25 bp, Homo sapien
tgtttcaatgggctttcggatatca

SEQ ID NO: 1955896 - DNA, 25 bp, Homo sapien
ttcaatgggctttcggatatcagta

SEQ ID NO: 1955897 - DNA, 25 bp, Homo sapien
aatgggctttcggatatcagtaata

SEQ ID NO: 1955898 - DNA, 25 bp, Homo sapien
tgggctttcggatatcagtaatatt

SEQ ID NO: 1955899 - DNA, 25 bp, Homo sapien
cacttgaagtccttttgcagaagca

SEQ ID NO: 1955900 - DNA, 25 bp, Homo sapien
tgatgcttctcagtcgcccagcaga

SEQ ID NO: 1955901 - DNA, 25 bp, Homo sapien
tgttgttgcataaccctggtcctcg

SEQ ID NO: 1955902 - DNA, 25 bp, Homo sapien
gatcttccttgtcgacacctgatgg

SEQ ID NO: 1955903 - DNA, 25 bp, Homo sapien
tatgggaattcctctcgcatccaca

SEQ ID NO: 1955904 - DNA, 25 bp, Homo sapien
ccatttctatgggaattcctctcgc

SEQ ID NO: 1955905 - DNA, 25 bp, Homo sapien
acatgagccatctgccgaaccttca

SEQ ID NO: 1955906 - DNA, 25 bp, Homo sapien
gaattcctctcgcatccacatgagc

SEQ ID NO: 1955907 - DNA, 25 bp, Homo sapien
catatgtttagggaaactcttacgt

SEQ ID NO: 1955908 - DNA, 25 bp, Homo sapien
tatcctggacactcaatagctttct

SEQ ID NO: 1955909 - DNA, 25 bp, Homo sapien
taaaagaacgtattatcctggacac

SEQ ID NO: 1955910 - DNA, 25 bp, Homo sapien
tctccctatcaagtatcttcttagc

SEQ ID NO: 1955911 - DNA, 25 bp, Homo sapien
gaggagatggcctaactgctatata

SEQ ID NO: 1955912 - DNA, 25 bp, Homo sapien
ggtaagtgagcaaacatcccaactc

SEQ ID NO: 1955913 - DNA, 25 bp, Homo sapien
gactccctggaagtaagacatacct

SEQ ID NO: 1955914 - DNA, 25 bp, Homo sapien
tgctgtggaccaggagtgcacttgt

SEQ ID NO: 1955915 - DNA, 25 bp, Homo sapien
tactgactgggtaggacattgggtt

SEQ ID NO: 1955916 - DNA, 25 bp, Homo sapien
tcatcaaccagaggtcttagacctt

SEQ ID NO: 1955917 - DNA, 25 bp, Homo sapien
gacaacttgtctaccgggatattga

SEQ ID NO: 1955918 - DNA, 25 bp, Homo sapien
tggatggaaggcacggacaacttgt

SEQ ID NO: 1955919 - DNA, 25 bp, Homo sapien
tcaaagcctctcgaaagaaacttct

SEQ ID NO: 1955920 - DNA, 25 bp, Homo sapien
agttctcataagcagaagggccaga

SEQ ID NO: 1955921 - DNA, 25 bp, Homo sapien
gccctctgagttctcataagcagaa

SEQ ID NO: 1955922 - DNA, 25 bp, Homo sapien
cagagtcagggcaagggttcccttt

SEQ ID NO: 1955923 - DNA, 25 bp, Homo sapien
atgtgcagccatggcggatcatgcc

SEQ ID NO: 1955924 - DNA, 25 bp, Homo sapien
catggcggatcatgcctgtggttct

SEQ ID NO: 1955925 - DNA, 25 bp, Homo sapien
atgatgtgcagccatggcggatcat

SEQ ID NO: 1955926 - DNA, 25 bp, Homo sapien
gcagccatggcggatcatgcctgtg

SEQ ID NO: 1955927 - DNA, 25 bp, Homo sapien
gagtgaagagccgtgacacttctga

SEQ ID NO: 1955928 - DNA, 25 bp, Homo sapien
tcacagacggctacccacttttggt

SEQ ID NO: 1955929 - DNA, 25 bp, Homo sapien
gatcttgtccgggatctgcagaagg

SEQ ID NO: 1955930 - DNA, 25 bp, Homo sapien
cacaggatccaagtgggtgtgagct

SEQ ID NO: 1955931 - DNA, 25 bp, Homo sapien
caatgtaagagtgttgctgcaaacc

SEQ ID NO: 1955932 - DNA, 25 bp, Homo sapien
ctaggacaactgaaggtatctggcc

SEQ ID NO: 1955933 - DNA, 25 bp, Homo sapien
tgagaatgccatggctgctacccct

SEQ ID NO: 1955934 - DNA, 25 bp, Homo sapien
tggtgctatccaaaggctctcagac

SEQ ID NO: 1955935 - DNA, 25 bp, Homo sapien
tgaacaagtatggatttgtggccag

SEQ ID NO: 1955936 - DNA, 25 bp, Homo sapien
tctgcagtcctaagacctttctcca

SEQ ID NO: 1955937 - DNA, 25 bp, Homo sapien
ttctctgcagtcctaagacctttct

SEQ ID NO: 1955938 - DNA, 25 bp, Homo sapien
caagtatggatttgtggccagaggc

SEQ ID NO: 1955939 - DNA, 25 bp, Homo sapien
atgcctttgtacagtgggaaaggcc

SEQ ID NO: 1955940 - DNA, 25 bp, Homo sapien
tttgtacagtgggaaaggccaccac

SEQ ID NO: 1955941 - DNA, 25 bp, Homo sapien
actcagtggcggagaaggtctgagc

SEQ ID NO: 1955942 - DNA, 25 bp, Homo sapien
cctgtgtgactttcccctgttgtga

SEQ ID NO: 1955943 - DNA, 25 bp, Homo sapien
tatgtacagaggcagctttacgcca

SEQ ID NO: 1955944 - DNA, 25 bp, Homo sapien
taactactcataaattgggcagcac

SEQ ID NO: 1955945 - DNA, 25 bp, Homo sapien
taaccaagcagaggtccagatagct

SEQ ID NO: 1955946 - DNA, 25 bp, Homo sapien
taaaagtgtgtagtgcctcttcacc

SEQ ID NO: 1955947 - DNA, 25 bp, Homo sapien
ttgctcctgacatacagggtgttcc

SEQ ID NO: 1955948 - DNA, 25 bp, Homo sapien
tgctccagagtgtgcaaaccataag

SEQ ID NO: 1955949 - DNA, 25 bp, Homo sapien
ccttggctaactggagcccaggtac

SEQ ID NO: 1955950 - DNA, 25 bp, Homo sapien
ttcagccttggctaactggagccca

SEQ ID NO: 1955951 - DNA, 25 bp, Homo sapien
tgcatgcactaagtgtacattcaca

SEQ ID NO: 1955952 - DNA, 25 bp, Homo sapien
tcctttgcagtgcatgcactaagtg

SEQ ID NO: 1955953 - DNA, 25 bp, Homo sapien
taagtgtacattcacagtccctcca

SEQ ID NO: 1955954 - DNA, 25 bp, Homo sapien
gaatttacactcaccaattttccca

SEQ ID NO: 1955955 - DNA, 25 bp, Homo sapien
ggttcacagatccttactgccttga

SEQ ID NO: 1955956 - DNA, 25 bp, Homo sapien
tttttcccatgccaacccatcaaat

SEQ ID NO: 1955957 - DNA, 25 bp, Homo sapien
catcatgccgttgtttggttcacag

SEQ ID NO: 1955958 - DNA, 25 bp, Homo sapien
tgagcccgccactctacgtaaaggg

SEQ ID NO: 1955959 - DNA, 25 bp, Homo sapien
taccagtgaagaatgggcaactcat

SEQ ID NO: 1955960 - DNA, 25 bp, Homo sapien
ttttccagattccttgacctgactc

SEQ ID NO: 1955961 - DNA, 25 bp, Homo sapien
ttgacctgactcttcttaccagtga

SEQ ID NO: 1955962 - DNA, 25 bp, Homo sapien
tcttcttaccagtgaagaatgggca

SEQ ID NO: 1955963 - DNA, 25 bp, Homo sapien
tcagacccagcaggttagtgcaggt

SEQ ID NO: 1955964 - DNA, 25 bp, Homo sapien
gaatcaaggagcaatttagccaggg

SEQ ID NO: 1955965 - DNA, 25 bp, Homo sapien
tgactggtgctccaagatcagcttc

SEQ ID NO: 1955966 - DNA, 25 bp, Homo sapien
gcagaggcatcggtttctcaccaag

SEQ ID NO: 1955967 - DNA, 25 bp, Homo sapien
gacccatgcaccctcgatgaatcgt

SEQ ID NO: 1955968 - DNA, 25 bp, Homo sapien
tgaatcgtgcatctggagccctcag

SEQ ID NO: 1955969 - DNA, 25 bp, Homo sapien
tagtctctctacaataggaggctcc

SEQ ID NO: 1955970 - DNA, 25 bp, Homo sapien
gctggaatcactgcacagacccatg

SEQ ID NO: 1955971 - DNA, 25 bp, Homo sapien
ggcttgcaatggtgatagacgctcc

SEQ ID NO: 1955972 - DNA, 25 bp, Homo sapien
gaagactcaactatcctgttctcca

SEQ ID NO: 1955973 - DNA, 25 bp, Homo sapien
tctttgtctttacgtaattgaaatg

SEQ ID NO: 1955974 - DNA, 25 bp, Homo sapien
gttctccaaagctaatggcttgcaa

SEQ ID NO: 1955975 - DNA, 25 bp, Homo sapien
ggtgttccagtccaagcctcaagct

SEQ ID NO: 1955976 - DNA, 25 bp, Homo sapien
caagcttagaggaacatatccactg

SEQ ID NO: 1955977 - DNA, 25 bp, Homo sapien
cactgaatgtgtacaggtgttccag

SEQ ID NO: 1955978 - DNA, 25 bp, Homo sapien
ttgggccaaggcatgactaggattc

SEQ ID NO: 1955979 - DNA, 25 bp, Homo sapien
caaagagacacaagtttacagaagt

SEQ ID NO: 1955980 - DNA, 25 bp, Homo sapien
gacaaagagacacaagtttacagaa

SEQ ID NO: 1955981 - DNA, 25 bp, Homo sapien
ctataagggccatagacaaagagac

SEQ ID NO: 1955982 - DNA, 25 bp, Homo sapien
taagggccatagacaaagagacaca

SEQ ID NO: 1955983 - DNA, 25 bp, Homo sapien
ttcaaaatcaaagcaaacatggaac

SEQ ID NO: 1955984 - DNA, 25 bp, Homo sapien
attcaaaatcaaagcaaacatggaa

SEQ ID NO: 1955985 - DNA, 25 bp, Homo sapien
tcattcaaaatcaaagcaaacatgg

SEQ ID NO: 1955986 - DNA, 25 bp, Homo sapien
cattcaaaatcaaagcaaacatgga

SEQ ID NO: 1955987 - DNA, 25 bp, Homo sapien
gaaatcatcattgcacaaggtaacc

SEQ ID NO: 1955988 - DNA, 25 bp, Homo sapien
tagtgatcgtgaaatacacctgcca

SEQ ID NO: 1955989 - DNA, 25 bp, Homo sapien
tgccagatgccgataaggaacttgt

SEQ ID NO: 1955990 - DNA, 25 bp, Homo sapien
ctcagaggtcttttgtgatgccaga

SEQ ID NO: 1955991 - DNA, 25 bp, Homo sapien
ccagaattttcatgattccccaccc

SEQ ID NO: 1955992 - DNA, 25 bp, Homo sapien
cagaattttcatgattccccacccc

SEQ ID NO: 1955993 - DNA, 25 bp, Homo sapien
ggttgagagtcacagatattcctcc

SEQ ID NO: 1955994 - DNA, 25 bp, Homo sapien
cataaaaatgaggttgagagtcaca

SEQ ID NO: 1955995 - DNA, 25 bp, Homo sapien
aattttaccagtgttcccatcaggg

SEQ ID NO: 1955996 - DNA, 25 bp, Homo sapien
agtccactgggacctataaccacca

SEQ ID NO: 1955997 - DNA, 25 bp, Homo sapien
atgatcacaccaccgggaagagtcg

SEQ ID NO: 1955998 - DNA, 25 bp, Homo sapien
ttcaaaatgatcacaccaccgggaa

SEQ ID NO: 1955999 - DNA, 25 bp, Homo sapien
aaaatgatcacaccaccgggaagag

SEQ ID NO: 1956000 - DNA, 25 bp, Homo sapien
tcaaaatgatcacaccaccgggaag

SEQ ID NO: 1956001 - DNA, 25 bp, Homo sapien
cttctcagacggcagcaaagcagac

SEQ ID NO: 1956002 - DNA, 25 bp, Homo sapien
tcaggatgaccgagagcaagctctt

SEQ ID NO: 1956003 - DNA, 25 bp, Homo sapien
cacatgtctatttaatgctgaatga

SEQ ID NO: 1956004 - DNA, 25 bp, Homo sapien
tgccttcgacagaagtgagtgtgac

SEQ ID NO: 1956005 - DNA, 25 bp, Homo sapien
cactaggccccagtgtggcagagaa

SEQ ID NO: 1956006 - DNA, 25 bp, Homo sapien
gcagagaaaggacttcaccccacat

SEQ ID NO: 1956007 - DNA, 25 bp, Homo sapien
ggcagagaaaggacttcaccccaca

SEQ ID NO: 1956008 - DNA, 25 bp, Homo sapien
cctctgcggtcatcactaggcccca

SEQ ID NO: 1956009 - DNA, 25 bp, Homo sapien
ttagttttgctatcacagtttgtca

SEQ ID NO: 1956010 - DNA, 25 bp, Homo sapien
tgccaaactctttaccaacgtgact

SEQ ID NO: 1956011 - DNA, 25 bp, Homo sapien
gcatattcatctgatacagtttggc

SEQ ID NO: 1956012 - DNA, 25 bp, Homo sapien
ggcactgctaaaaacataccccaaa

SEQ ID NO: 1956013 - DNA, 25 bp, Homo sapien
ctggaactcgcagtaaaaattcatg

SEQ ID NO: 1956014 - DNA, 25 bp, Homo sapien
tggaccagtgcataagggtatttaa

SEQ ID NO: 1956015 - DNA, 25 bp, Homo sapien
taaaatctacagtacaagaggagac

SEQ ID NO: 1956016 - DNA, 25 bp, Homo sapien
tgaggcatcaggaaaatagacgatt

SEQ ID NO: 1956017 - DNA, 25 bp, Homo sapien
gctgcttacagcttgcttgtggtga

SEQ ID NO: 1956018 - DNA, 25 bp, Homo sapien
tgcttctgagaaccctccatatagg

SEQ ID NO: 1956019 - DNA, 25 bp, Homo sapien
cacacagatgcagaaagtcaagctt

SEQ ID NO: 1956020 - DNA, 25 bp, Homo sapien
gctgaaccaggcaggagtcagcgtc

SEQ ID NO: 1956021 - DNA, 25 bp, Homo sapien
accctccatatagggtgacagaagg

SEQ ID NO: 1956022 - DNA, 25 bp, Homo sapien
ttggttggataattgtcttgacttc

SEQ ID NO: 1956023 - DNA, 25 bp, Homo sapien
gaagacaggcattggttggataatt

SEQ ID NO: 1956024 - DNA, 25 bp, Homo sapien
agtggaagacaggcattggttggat

SEQ ID NO: 1956025 - DNA, 25 bp, Homo sapien
tggaagacaggcattggttggataa

SEQ ID NO: 1956026 - DNA, 25 bp, Homo sapien
gagaggcaccttagctcaaaagtca

SEQ ID NO: 1956027 - DNA, 25 bp, Homo sapien
gaaggtcacatgtatccgcttttgc

SEQ ID NO: 1956028 - DNA, 25 bp, Homo sapien
gagttgtctttaccatcgtttccag

SEQ ID NO: 1956029 - DNA, 25 bp, Homo sapien
aggcaaagtctcacgcggctcagtt

SEQ ID NO: 1956030 - DNA, 25 bp, Homo sapien
ctctgtctgcgggtagtgcttttcc

SEQ ID NO: 1956031 - DNA, 25 bp, Homo sapien
taacagcaagggttgtcattccctc

SEQ ID NO: 1956032 - DNA, 25 bp, Homo sapien
tggagagcagatctacgagggtttc

SEQ ID NO: 1956033 - DNA, 25 bp, Homo sapien
caaataagggacagaccctgagatc

SEQ ID NO: 1956034 - DNA, 25 bp, Homo sapien
tggctgggccaaaacgttctctgta

SEQ ID NO: 1956035 - DNA, 25 bp, Homo sapien
aaagacctctcgtttgcatcactgg

SEQ ID NO: 1956036 - DNA, 25 bp, Homo sapien
ccatggaggtgtcccttcagcgaag

SEQ ID NO: 1956037 - DNA, 25 bp, Homo sapien
tcagcgaaggacaagtgaaaagacc

SEQ ID NO: 1956038 - DNA, 25 bp, Homo sapien
agccagatgcatccaagaggttcta

SEQ ID NO: 1956039 - DNA, 25 bp, Homo sapien
agatgcatccaagaggttctaaaag

SEQ ID NO: 1956040 - DNA, 25 bp, Homo sapien
gccagatgcatccaagaggttctaa

SEQ ID NO: 1956041 - DNA, 25 bp, Homo sapien
ccagatgcatccaagaggttctaaa

SEQ ID NO: 1956042 - DNA, 25 bp, Homo sapien
ctttaggttttgaacagtaatgagc

SEQ ID NO: 1956043 - DNA, 25 bp, Homo sapien
tcctcatggaaggtcggggaccaag

SEQ ID NO: 1956044 - DNA, 25 bp, Homo sapien
aggattgctttaggttttgaacagt

SEQ ID NO: 1956045 - DNA, 25 bp, Homo sapien
ggttttgaacagtaatgagcttttc

SEQ ID NO: 1956046 - DNA, 25 bp, Homo sapien
cgaaaactcagtagccttccagtct

SEQ ID NO: 1956047 - DNA, 25 bp, Homo sapien
tgatttcctcggcagtagaactcct

SEQ ID NO: 1956048 - DNA, 25 bp, Homo sapien
ggcagtagaactcctgcgaaaactc

SEQ ID NO: 1956049 - DNA, 25 bp, Homo sapien
ccagtctctttgctctctgtcagtt

SEQ ID NO: 1956050 - DNA, 25 bp, Homo sapien
gcagcgctgaattccttattcttag

SEQ ID NO: 1956051 - DNA, 25 bp, Homo sapien
tttgagctgtattcaagcagcgctg

SEQ ID NO: 1956052 - DNA, 25 bp, Homo sapien
tcctgagtaggatacatataccaca

SEQ ID NO: 1956053 - DNA, 25 bp, Homo sapien
tgtatgcaacagaaactaatcatgt

SEQ ID NO: 1956054 - DNA, 25 bp, Homo sapien
tacaaattccttgataaatttccaa

SEQ ID NO: 1956055 - DNA, 25 bp, Homo sapien
tgtttcctctgattttacaaattcc

SEQ ID NO: 1956056 - DNA, 25 bp, Homo sapien
cttctgtttcctctgattttacaaa

SEQ ID NO: 1956057 - DNA, 25 bp, Homo sapien
ttacaaattccttgataaatttcca

SEQ ID NO: 1956058 - DNA, 25 bp, Homo sapien
cctatgatctgcttcacatggtttt

SEQ ID NO: 1956059 - DNA, 25 bp, Homo sapien
ctatgatctgcttcacatggttttc

SEQ ID NO: 1956060 - DNA, 25 bp, Homo sapien
tcctatgatctgcttcacatggttt

SEQ ID NO: 1956061 - DNA, 25 bp, Homo sapien
tttcctatgatctgcttcacatggt

SEQ ID NO: 1956062 - DNA, 25 bp, Homo sapien
tctgtttccaattgtatagcttcat

SEQ ID NO: 1956063 - DNA, 25 bp, Homo sapien
ctgtttccaattgtatagcttcatg

SEQ ID NO: 1956064 - DNA, 25 bp, Homo sapien
gatagaatttgttaagggggctgga

SEQ ID NO: 1956065 - DNA, 25 bp, Homo sapien
cacaatatacttggttaaaaatatt

SEQ ID NO: 1956066 - DNA, 25 bp, Homo sapien
tctatttaacaagattatgtgaatg

SEQ ID NO: 1956067 - DNA, 25 bp, Homo sapien
tattataatttcaagagtactcaat

SEQ ID NO: 1956068 - DNA, 25 bp, Homo sapien
cctattctcagtgatatctgaaatt

SEQ ID NO: 1956069 - DNA, 25 bp, Homo sapien
gtatctcatcccacttactgagtat

SEQ ID NO: 1956070 - DNA, 25 bp, Homo sapien
tactgagtatttcacacctcttctt

SEQ ID NO: 1956071 - DNA, 25 bp, Homo sapien
tttcaaccttctcagtaagagtaag

SEQ ID NO: 1956072 - DNA, 25 bp, Homo sapien
cagcaaatgtgtatgattggaggag

SEQ ID NO: 1956073 - DNA, 25 bp, Homo sapien
gcaaatgtgtatgattggaggagca

SEQ ID NO: 1956074 - DNA, 25 bp, Homo sapien
acagcaaatgtgtatgattggagga

SEQ ID NO: 1956075 - DNA, 25 bp, Homo sapien
caaatgtgtatgattggaggagcag

SEQ ID NO: 1956076 - DNA, 25 bp, Homo sapien
ctatttcacgtctgtgagaggaact

SEQ ID NO: 1956077 - DNA, 25 bp, Homo sapien
ttgcagactgcagcaatgccacctc

SEQ ID NO: 1956078 - DNA, 25 bp, Homo sapien
tcttccctggcgagatccatgtccg

SEQ ID NO: 1956079 - DNA, 25 bp, Homo sapien
gcgagatccatgtccgccgtcttca

SEQ ID NO: 1956080 - DNA, 25 bp, Homo sapien
gcttttgtggctgtcacgagcatcc

SEQ ID NO: 1956081 - DNA, 25 bp, Homo sapien
gcgccttgagttgagccagaagagc

SEQ ID NO: 1956082 - DNA, 25 bp, Homo sapien
ttcaggctctttgtgatcgatcgtc

SEQ ID NO: 1956083 - DNA, 25 bp, Homo sapien
caggctctttgtgatcgatcgtcac

SEQ ID NO: 1956084 - DNA, 25 bp, Homo sapien
ctattcaggctctttgtgatcgatc

SEQ ID NO: 1956085 - DNA, 25 bp, Homo sapien
tattcaggctctttgtgatcgatcg

SEQ ID NO: 1956086 - DNA, 25 bp, Homo sapien
tgggactccaggagcgttgccatgt

SEQ ID NO: 1956087 - DNA, 25 bp, Homo sapien
gcgttgccatgtagagttcatattc

SEQ ID NO: 1956088 - DNA, 25 bp, Homo sapien
ttgccatgtagagttcatattcatc

SEQ ID NO: 1956089 - DNA, 25 bp, Homo sapien
gggactccaggagcgttgccatgta

SEQ ID NO: 1956090 - DNA, 25 bp, Homo sapien
gacttttccaaagacgtgcagtctg

SEQ ID NO: 1956091 - DNA, 25 bp, Homo sapien
ttccaaagacgtgcagtctgttgaa

SEQ ID NO: 1956092 - DNA, 25 bp, Homo sapien
ttttcaagagatcaccaaatatcaa

SEQ ID NO: 1956093 - DNA, 25 bp, Homo sapien
tatcaaagaactgttacaaatatct

SEQ ID NO: 1956094 - DNA, 25 bp, Homo sapien
cacctggtacagtgctgcatcctgc

SEQ ID NO: 1956095 - DNA, 25 bp, Homo sapien
tgaaggtgctaatgctctcggcacc

SEQ ID NO: 1956096 - DNA, 25 bp, Homo sapien
tctcggcacctggtacagtgctgca

SEQ ID NO: 1956097 - DNA, 25 bp, Homo sapien
ctgtccccattgaaggtgctaatgc

SEQ ID NO: 1956098 - DNA, 25 bp, Homo sapien
ggtagcacagcaccttcaagtcggg

SEQ ID NO: 1956099 - DNA, 25 bp, Homo sapien
aacatcctgtacctgtctgcgctgg

SEQ ID NO: 1956100 - DNA, 25 bp, Homo sapien
gcttggcgagcacttccttctggaa

SEQ ID NO: 1956101 - DNA, 25 bp, Homo sapien
gagctgacatagtggtgccggtccc

SEQ ID NO: 1956102 - DNA, 25 bp, Homo sapien
tcaggtacctgaacagcggggtgtc

SEQ ID NO: 1956103 - DNA, 25 bp, Homo sapien
gggcggctctcccacctcagaggcg

SEQ ID NO: 1956104 - DNA, 25 bp, Homo sapien
actggaaggaaatcctcctctgaag

SEQ ID NO: 1956105 - DNA, 25 bp, Homo sapien
ggaaatcctcctctgaagtgtggga

SEQ ID NO: 1956106 - DNA, 25 bp, Homo sapien
tccagagatgtagaggtagacgtcc

SEQ ID NO: 1956107 - DNA, 25 bp, Homo sapien
gcgtctcgcagtgcttcagattaca

SEQ ID NO: 1956108 - DNA, 25 bp, Homo sapien
cgtcctcccggtggtctttctgaag

SEQ ID NO: 1956109 - DNA, 25 bp, Homo sapien
ccagtgctgtaagatcgtctccgga

SEQ ID NO: 1956110 - DNA, 25 bp, Homo sapien
cacagactcccatgcgtaaaatcac

SEQ ID NO: 1956111 - DNA, 25 bp, Homo sapien
cacattaatagcaccagccttcagg

SEQ ID NO: 1956112 - DNA, 25 bp, Homo sapien
tcatttataggagcgcggaaaggca

SEQ ID NO: 1956113 - DNA, 25 bp, Homo sapien
gacttgatgaatgtggacgcgctga

SEQ ID NO: 1956114 - DNA, 25 bp, Homo sapien
attcaggctcccgctcctccgccat

SEQ ID NO: 1956115 - DNA, 25 bp, Homo sapien
ttttggaagccgaatgtcatcgact

SEQ ID NO: 1956116 - DNA, 25 bp, Homo sapien
gagatgagtgcgataaaaattccca

SEQ ID NO: 1956117 - DNA, 25 bp, Homo sapien
aacgcttggaacaaacctgagagtc

SEQ ID NO: 1956118 - DNA, 25 bp, Homo sapien
gaaagagaacaccagcgtggacggt

SEQ ID NO: 1956119 - DNA, 25 bp, Homo sapien
gctgctttaaccatgtaagtaaaac

SEQ ID NO: 1956120 - DNA, 25 bp, Homo sapien
atcaacaaaagaattcttgctgctt

SEQ ID NO: 1956121 - DNA, 25 bp, Homo sapien
gcaatataacactcatatatgcata

SEQ ID NO: 1956122 - DNA, 25 bp, Homo sapien
ttcacaccaaaggatatccattaaa

SEQ ID NO: 1956123 - DNA, 25 bp, Homo sapien
tatcagagatacagcataggactgg

SEQ ID NO: 1956124 - DNA, 25 bp, Homo sapien
cctacttagtaagccctggattcag

SEQ ID NO: 1956125 - DNA, 25 bp, Homo sapien
gacaaaggctgtaacgcccaagata

SEQ ID NO: 1956126 - DNA, 25 bp, Homo sapien
tgacattatcctttgcctcacaggg

SEQ ID NO: 1956127 - DNA, 25 bp, Homo sapien
tgtacggctttgcaagccctgctct

SEQ ID NO: 1956128 - DNA, 25 bp, Homo sapien
gtaggctctgtacggctttgcaagc

SEQ ID NO: 1956129 - DNA, 25 bp, Homo sapien
aaagagcacgtaggctctgtacggc

SEQ ID NO: 1956130 - DNA, 25 bp, Homo sapien
cccacttgcaggaaagagcacgtag

SEQ ID NO: 1956131 - DNA, 25 bp, Homo sapien
tagaagaaaccatcgaaacccacag

SEQ ID NO: 1956132 - DNA, 25 bp, Homo sapien
ttaaaatgcgccagaagtgactgct

SEQ ID NO: 1956133 - DNA, 25 bp, Homo sapien
taaagctgtgtttggtagactccag

SEQ ID NO: 1956134 - DNA, 25 bp, Homo sapien
gaaagctcatgaaatacgaccgtgc

SEQ ID NO: 1956135 - DNA, 25 bp, Homo sapien
aagatgaggatctgtaggtgggaca

SEQ ID NO: 1956136 - DNA, 25 bp, Homo sapien
tgtcaaagaagcaagatgaggatct

SEQ ID NO: 1956137 - DNA, 25 bp, Homo sapien
tttgcaccccagttaccaggtgcag

SEQ ID NO: 1956138 - DNA, 25 bp, Homo sapien
gacagcgtgtcagggtgaccagtgc

SEQ ID NO: 1956139 - DNA, 25 bp, Homo sapien
agctgccttctgagccacggatggg

SEQ ID NO: 1956140 - DNA, 25 bp, Homo sapien
agatgcagctgccttctgagccacg

SEQ ID NO: 1956141 - DNA, 25 bp, Homo sapien
cagctgccttctgagccacggatgg

SEQ ID NO: 1956142 - DNA, 25 bp, Homo sapien
atgcagctgccttctgagccacgga

SEQ ID NO: 1956143 - DNA, 25 bp, Homo sapien
cccctcgaatcaccttctcccactg

SEQ ID NO: 1956144 - DNA, 25 bp, Homo sapien
tcctcccctcgaatcaccttctccc

SEQ ID NO: 1956145 - DNA, 25 bp, Homo sapien
ctcccctcgaatcaccttctcccac

SEQ ID NO: 1956146 - DNA, 25 bp, Homo sapien
tcccctcgaatcaccttctcccact

SEQ ID NO: 1956147 - DNA, 25 bp, Homo sapien
tggggccctccgacatggttaccag

SEQ ID NO: 1956148 - DNA, 25 bp, Homo sapien
aaacagtcctgtggcacagctctgc

SEQ ID NO: 1956149 - DNA, 25 bp, Homo sapien
accagcacgacgtggccaggcaggt

SEQ ID NO: 1956150 - DNA, 25 bp, Homo sapien
tgcacaacggcattgtgtggggccc

SEQ ID NO: 1956151 - DNA, 25 bp, Homo sapien
ttggtccatccgctctggaccgcga

SEQ ID NO: 1956152 - DNA, 25 bp, Homo sapien
atccgctctggaccgcgaaagcagc

SEQ ID NO: 1956153 - DNA, 25 bp, Homo sapien
gctctggaccgcgaaagcagcagaa

SEQ ID NO: 1956154 - DNA, 25 bp, Homo sapien
ctggaccgcgaaagcagcagaaatg

SEQ ID NO: 1956155 - DNA, 25 bp, Homo sapien
atggccacggcattgtagaacccaa

SEQ ID NO: 1956156 - DNA, 25 bp, Homo sapien
gaatggccacggcattgtagaaccc

SEQ ID NO: 1956157 - DNA, 25 bp, Homo sapien
aagggttgtatagcagggaatggcc

SEQ ID NO: 1956158 - DNA, 25 bp, Homo sapien
ggaatggccacggcattgtagaacc

SEQ ID NO: 1956159 - DNA, 25 bp, Homo sapien
gccttgggggacttcatccttcttg

SEQ ID NO: 1956160 - DNA, 25 bp, Homo sapien
gtccatcataggaataggctgtatt

SEQ ID NO: 1956161 - DNA, 25 bp, Homo sapien
ctggccttgggggacttcatccttc

SEQ ID NO: 1956162 - DNA, 25 bp, Homo sapien
gaataggctgtattcccaatttctt

SEQ ID NO: 1956163 - DNA, 25 bp, Homo sapien
cagagacaattagcatcacagagca

SEQ ID NO: 1956164 - DNA, 25 bp, Homo sapien
tctagggaacgtatcaagcaactca

SEQ ID NO: 1956165 - DNA, 25 bp, Homo sapien
ttatgttaacatggcggcaaccaca

SEQ ID NO: 1956166 - DNA, 25 bp, Homo sapien
tatgcaagaaccacgagagatcact

SEQ ID NO: 1956167 - DNA, 25 bp, Homo sapien
caaaggcctaggtatccgtgactca

SEQ ID NO: 1956168 - DNA, 25 bp, Homo sapien
tatgggaccctctgagtactttgtc

SEQ ID NO: 1956169 - DNA, 25 bp, Homo sapien
ccgtgactcatttggatgggagaat

SEQ ID NO: 1956170 - DNA, 25 bp, Homo sapien
gagctcagagaattagacacacatg

SEQ ID NO: 1956171 - DNA, 25 bp, Homo sapien
cgtcaattttgtaacgggccacagt

SEQ ID NO: 1956172 - DNA, 25 bp, Homo sapien
cagtcatcatcaaaccaattacacg

SEQ ID NO: 1956173 - DNA, 25 bp, Homo sapien
catcatcaaaccaattacacggtct

SEQ ID NO: 1956174 - DNA, 25 bp, Homo sapien
tatatatcatttgccgtcaattttg

SEQ ID NO: 1956175 - DNA, 25 bp, Homo sapien
gccctagctcccgagcctgtcttga

SEQ ID NO: 1956176 - DNA, 25 bp, Homo sapien
ctcttctaggtccacattctccaac

SEQ ID NO: 1956177 - DNA, 25 bp, Homo sapien
ctgtcttgacccaggcagacagcac

SEQ ID NO: 1956178 - DNA, 25 bp, Homo sapien
cacagtcctgccctagctcccgagc

SEQ ID NO: 1956179 - DNA, 25 bp, Homo sapien
tacttaaagtgcatacgtcatagac

SEQ ID NO: 1956180 - DNA, 25 bp, Homo sapien
cgtcatagacaacatggaactcggt

SEQ ID NO: 1956181 - DNA, 25 bp, Homo sapien
taggttcaaatgtaccatcttggga

SEQ ID NO: 1956182 - DNA, 25 bp, Homo sapien
ggaactcggtcttgctatttagctg

SEQ ID NO: 1956183 - DNA, 25 bp, Homo sapien
tctccgtgggatgcttaactctgca

SEQ ID NO: 1956184 - DNA, 25 bp, Homo sapien
tgtgtgatccctacaatctccgtgg

SEQ ID NO: 1956185 - DNA, 25 bp, Homo sapien
tactctatcctgtggtgtggacaag

SEQ ID NO: 1956186 - DNA, 25 bp, Homo sapien
caactgctctgctagggcctgtgaa

SEQ ID NO: 1956187 - DNA, 25 bp, Homo sapien
aaactcatgtctattaaagtcatgc

SEQ ID NO: 1956188 - DNA, 25 bp, Homo sapien
taagctaatattgtgttgtaaattc

SEQ ID NO: 1956189 - DNA, 25 bp, Homo sapien
catggaacatggatacagataaacc

SEQ ID NO: 1956190 - DNA, 25 bp, Homo sapien
tatcaagatacatcaaatactacct

SEQ ID NO: 1956191 - DNA, 25 bp, Homo sapien
aaccttgggtacagcaatatcggca

SEQ ID NO: 1956192 - DNA, 25 bp, Homo sapien
gaattacacccatatatgatggtga

SEQ ID NO: 1956193 - DNA, 25 bp, Homo sapien
caagtgcttactttgattctctgtg

SEQ ID NO: 1956194 - DNA, 25 bp, Homo sapien
ttgtaactatttgtgggtgccatga

SEQ ID NO: 1956195 - DNA, 25 bp, Homo sapien
aagtatcaatttattccagataaca

SEQ ID NO: 1956196 - DNA, 25 bp, Homo sapien
aatttattccagataacactttctg

SEQ ID NO: 1956197 - DNA, 25 bp, Homo sapien
tcaatttattccagataacactttc

SEQ ID NO: 1956198 - DNA, 25 bp, Homo sapien
gtatcaatttattccagataacact

SEQ ID NO: 1956199 - DNA, 25 bp, Homo sapien
ttccaaagtataaagcaaggtctgt

SEQ ID NO: 1956200 - DNA, 25 bp, Homo sapien
gatccggtctggtacatctcttcca

SEQ ID NO: 1956201 - DNA, 25 bp, Homo sapien
ttgcggatgatctcaagcacctgct

SEQ ID NO: 1956202 - DNA, 25 bp, Homo sapien
agcacctgctcatattcactggagc

SEQ ID NO: 1956203 - DNA, 25 bp, Homo sapien
tagtgcagacgaattggaagaactc

SEQ ID NO: 1956204 - DNA, 25 bp, Homo sapien
agtagtaagaagtcacgggatccca

SEQ ID NO: 1956205 - DNA, 25 bp, Homo sapien
ggatgtgactgtccacacaaaacag

SEQ ID NO: 1956206 - DNA, 25 bp, Homo sapien
caaagctcacctacgttcttggatg

SEQ ID NO: 1956207 - DNA, 25 bp, Homo sapien
tctgggcgtagctcaaattgaaggg

SEQ ID NO: 1956208 - DNA, 25 bp, Homo sapien
tcagggaccagttagatgaatccaa

SEQ ID NO: 1956209 - DNA, 25 bp, Homo sapien
ggttgtctgtttatggccccaatat

SEQ ID NO: 1956210 - DNA, 25 bp, Homo sapien
cagccaagtgtacagaaattttccg

SEQ ID NO: 1956211 - DNA, 25 bp, Homo sapien
gacacgcaatcagcagtcctttgcg

SEQ ID NO: 1956212 - DNA, 25 bp, Homo sapien
gacacagacacgcaatcagcagtcc

SEQ ID NO: 1956213 - DNA, 25 bp, Homo sapien
ccaggtcatgacacagacacgcaat

SEQ ID NO: 1956214 - DNA, 25 bp, Homo sapien
gccagagggtggtcgaacttctgca

SEQ ID NO: 1956215 - DNA, 25 bp, Homo sapien
gaggttggaggagggtcaaggtcta

SEQ ID NO: 1956216 - DNA, 25 bp, Homo sapien
gggtcaaggtctaagctctcaagta

SEQ ID NO: 1956217 - DNA, 25 bp, Homo sapien
gaggagggtcaaggtctaagctctc

SEQ ID NO: 1956218 - DNA, 25 bp, Homo sapien
ggtctaagctctcaagtactcccaa

SEQ ID NO: 1956219 - DNA, 25 bp, Homo sapien
tccatgttatatgctgctgtgtcat

SEQ ID NO: 1956220 - DNA, 25 bp, Homo sapien
gaattaattatgttgttagtatcat

SEQ ID NO: 1956221 - DNA, 25 bp, Homo sapien
gggtggtttccatgttatatgctgc

SEQ ID NO: 1956222 - DNA, 25 bp, Homo sapien
ctggcattcttaagataactgaatt

SEQ ID NO: 1956223 - DNA, 25 bp, Homo sapien
tacatgcagtgtgctacagtgaccg

SEQ ID NO: 1956224 - DNA, 25 bp, Homo sapien
ccagttgtgataaggaacccgccga

SEQ ID NO: 1956225 - DNA, 25 bp, Homo sapien
agtgaccgcatgcttccagttgtga

SEQ ID NO: 1956226 - DNA, 25 bp, Homo sapien
caaggtctgtgaaaagcgtgtgatt

SEQ ID NO: 1956227 - DNA, 25 bp, Homo sapien
tgtcccacaggaccgatgaaccatg

SEQ ID NO: 1956228 - DNA, 25 bp, Homo sapien
caaaaggaccaatgtcaaagtggaa

SEQ ID NO: 1956229 - DNA, 25 bp, Homo sapien
catgtagacaaaaattccaggccac

SEQ ID NO: 1956230 - DNA, 25 bp, Homo sapien
tgttttcaaaaggaccaatgtcaaa

SEQ ID NO: 1956231 - DNA, 25 bp, Homo sapien
tacccggtaaatgcactctgagtgg

SEQ ID NO: 1956232 - DNA, 25 bp, Homo sapien
tacaaatgctatggtaggacagctt

SEQ ID NO: 1956233 - DNA, 25 bp, Homo sapien
aatttctttgcagagacgcacggga

SEQ ID NO: 1956234 - DNA, 25 bp, Homo sapien
tctgagtggcgaattctatgataca

SEQ ID NO: 1956235 - DNA, 25 bp, Homo sapien
tctgttttagagaaggcactgccac

SEQ ID NO: 1956236 - DNA, 25 bp, Homo sapien
taaggctaaagcacaaaagacggca

SEQ ID NO: 1956237 - DNA, 25 bp, Homo sapien
gcctcggctgacgatgggcatgcac

SEQ ID NO: 1956238 - DNA, 25 bp, Homo sapien
gcatgcacaggatgttccgcgtggt

SEQ ID NO: 1956239 - DNA, 25 bp, Homo sapien
tttagcttctacattcagggacagt

SEQ ID NO: 1956240 - DNA, 25 bp, Homo sapien
gatagtctctaagaggctttcagct

SEQ ID NO: 1956241 - DNA, 25 bp, Homo sapien
ttgtctccaagtgagttttctagga

SEQ ID NO: 1956242 - DNA, 25 bp, Homo sapien
ttctattgcatatgactaatggcac

SEQ ID NO: 1956243 - DNA, 25 bp, Homo sapien
taaagcgtgggtctgcataggcatc

SEQ ID NO: 1956244 - DNA, 25 bp, Homo sapien
tgctacttggccagcaattcctttc

SEQ ID NO: 1956245 - DNA, 25 bp, Homo sapien
aggacttcccctgttcttgctactt

SEQ ID NO: 1956246 - DNA, 25 bp, Homo sapien
tgttcaggacttcccctgttcttgc

SEQ ID NO: 1956247 - DNA, 25 bp, Homo sapien
tgcctgcaatgtcattcccagaagt

SEQ ID NO: 1956248 - DNA, 25 bp, Homo sapien
taggcgcggtttctcgggcactgcc

SEQ ID NO: 1956249 - DNA, 25 bp, Homo sapien
gagtgacgctaaggcttcctaggcg

SEQ ID NO: 1956250 - DNA, 25 bp, Homo sapien
ctgggagcactagaaagtttttcca

SEQ ID NO: 1956251 - DNA, 25 bp, Homo sapien
tggaaaagcgcacaacgatcggcat

SEQ ID NO: 1956252 - DNA, 25 bp, Homo sapien
aaggtctgaatataactccttgttc

SEQ ID NO: 1956253 - DNA, 25 bp, Homo sapien
taactccttgttcttatggtccacc

SEQ ID NO: 1956254 - DNA, 25 bp, Homo sapien
acgatcggcattcaccaggtttttt

SEQ ID NO: 1956255 - DNA, 25 bp, Homo sapien
tctgttttagttggtaagcagctgc

SEQ ID NO: 1956256 - DNA, 25 bp, Homo sapien
gcagctgctggcctaacttcccagt

SEQ ID NO: 1956257 - DNA, 25 bp, Homo sapien
ggaagcatatcagtcgtgtattctg

SEQ ID NO: 1956258 - DNA, 25 bp, Homo sapien
gagcctctgtcagcactacgaccac

SEQ ID NO: 1956259 - DNA, 25 bp, Homo sapien
gtagagaatctattgcaactatgtt

SEQ ID NO: 1956260 - DNA, 25 bp, Homo sapien
tgtgttcaagtagagaatctattgc

SEQ ID NO: 1956261 - DNA, 25 bp, Homo sapien
aatctattgcaactatgttatcaaa

SEQ ID NO: 1956262 - DNA, 25 bp, Homo sapien
cattatgtgttcaagtagagaatct

SEQ ID NO: 1956263 - DNA, 25 bp, Homo sapien
gatacgtcgagtaggaagtcattca

SEQ ID NO: 1956264 - DNA, 25 bp, Homo sapien
gtcattcaattctgtctgtttggca

SEQ ID NO: 1956265 - DNA, 25 bp, Homo sapien
cgtcgagtaggaagtcattcaattc

SEQ ID NO: 1956266 - DNA, 25 bp, Homo sapien
taggaagtcattcaattctgtctgt

SEQ ID NO: 1956267 - DNA, 25 bp, Homo sapien
ctgcacctgatgtattgctactgaa

SEQ ID NO: 1956268 - DNA, 25 bp, Homo sapien
aagcccaggcaagatttgctgttgc

SEQ ID NO: 1956269 - DNA, 25 bp, Homo sapien
atgtattgctactgaagcccaggca

SEQ ID NO: 1956270 - DNA, 25 bp, Homo sapien
cacctgatgtattgctactgaagcc

SEQ ID NO: 1956271 - DNA, 25 bp, Homo sapien
gacaattggtaagcaaagaacagac

SEQ ID NO: 1956272 - DNA, 25 bp, Homo sapien
gatacgagtccctgattccagtcca

SEQ ID NO: 1956273 - DNA, 25 bp, Homo sapien
ccagtgccgatacagctcgagaata

SEQ ID NO: 1956274 - DNA, 25 bp, Homo sapien
cagtacctcttggaaatcgttcatc

SEQ ID NO: 1956275 - DNA, 25 bp, Homo sapien
gacggtggtgccctgagtgatgggc

SEQ ID NO: 1956276 - DNA, 25 bp, Homo sapien
ccaaggatgtcttctactagcagtg

SEQ ID NO: 1956277 - DNA, 25 bp, Homo sapien
caggtggcgtgaatatacacaggct

SEQ ID NO: 1956278 - DNA, 25 bp, Homo sapien
cttcctttatcccaggtggcgtgaa

SEQ ID NO: 1956279 - DNA, 25 bp, Homo sapien
gcaaaagctcctttttaatatccat

SEQ ID NO: 1956280 - DNA, 25 bp, Homo sapien
tgcaaaagctcctttttaatatcca

SEQ ID NO: 1956281 - DNA, 25 bp, Homo sapien
ctgcaaaagctcctttttaatatcc

SEQ ID NO: 1956282 - DNA, 25 bp, Homo sapien
cagaaggagtaatgtgacgtggacc

SEQ ID NO: 1956283 - DNA, 25 bp, Homo sapien
tctgaactagagacccgaggataag

SEQ ID NO: 1956284 - DNA, 25 bp, Homo sapien
caggtgaacggctagaattgctgag

SEQ ID NO: 1956285 - DNA, 25 bp, Homo sapien
ggcagcctcaacttcaggattgtta

SEQ ID NO: 1956286 - DNA, 25 bp, Homo sapien
agtgcaaatccatcggcttttgtgg

SEQ ID NO: 1956287 - DNA, 25 bp, Homo sapien
gaaatacagtgcaaatccatcggct

SEQ ID NO: 1956288 - DNA, 25 bp, Homo sapien
tacagtgcaaatccatcggcttttg

SEQ ID NO: 1956289 - DNA, 25 bp, Homo sapien
ctccaaggaaatacagtgcaaatcc

SEQ ID NO: 1956290 - DNA, 25 bp, Homo sapien
tcatagaggagtagctggttgtctc

SEQ ID NO: 1956291 - DNA, 25 bp, Homo sapien
taatgatgctgctcagttcatagag

SEQ ID NO: 1956292 - DNA, 25 bp, Homo sapien
tttagttcatatacaactccctgca

SEQ ID NO: 1956293 - DNA, 25 bp, Homo sapien
gtccaaccgttgttctatatagctg

SEQ ID NO: 1956294 - DNA, 25 bp, Homo sapien
tatgcatagctactccattactgga

SEQ ID NO: 1956295 - DNA, 25 bp, Homo sapien
tatgggcctaaaacagctcctctgt

SEQ ID NO: 1956296 - DNA, 25 bp, Homo sapien
ttgaatttatggactgggaccaccc

SEQ ID NO: 1956297 - DNA, 25 bp, Homo sapien
tagcatagacttgtggctgccaaga

SEQ ID NO: 1956298 - DNA, 25 bp, Homo sapien
tttggtggaattactcagcaaaagc

SEQ ID NO: 1956299 - DNA, 25 bp, Homo sapien
tgggcctcaggtcattttaggtggt

SEQ ID NO: 1956300 - DNA, 25 bp, Homo sapien
tattttcctagcacacttcatataa

SEQ ID NO: 1956301 - DNA, 25 bp, Homo sapien
taatactcccttttgagatgagtta

SEQ ID NO: 1956302 - DNA, 25 bp, Homo sapien
gctgacttccttaggagctgattca

SEQ ID NO: 1956303 - DNA, 25 bp, Homo sapien
tgctgacttccttaggagctgattc

SEQ ID NO: 1956304 - DNA, 25 bp, Homo sapien
ctgacttccttaggagctgattcat

SEQ ID NO: 1956305 - DNA, 25 bp, Homo sapien
cctgctgacttccttaggagctgat

SEQ ID NO: 1956306 - DNA, 25 bp, Homo sapien
caaccaaccttaagattcaccgtca

SEQ ID NO: 1956307 - DNA, 25 bp, Homo sapien
catgacacaaccacgtatatacgac

SEQ ID NO: 1956308 - DNA, 25 bp, Homo sapien
gcccaggagcaaatgcaaccaacct

SEQ ID NO: 1956309 - DNA, 25 bp, Homo sapien
gaatctagatgctatcaggcccagg

SEQ ID NO: 1956310 - DNA, 25 bp, Homo sapien
ctgttactgtgtctacgcagaaaga

SEQ ID NO: 1956311 - DNA, 25 bp, Homo sapien
gatggcattgtgcagaaaagagaga

SEQ ID NO: 1956312 - DNA, 25 bp, Homo sapien
agatggcattgtgcagaaaagagag

SEQ ID NO: 1956313 - DNA, 25 bp, Homo sapien
gtgtctacgcagaaagaagtagaca

SEQ ID NO: 1956314 - DNA, 25 bp, Homo sapien
atgtttctttctaccttccattgtt

SEQ ID NO: 1956315 - DNA, 25 bp, Homo sapien
ctaatatgtttctttctaccttcca

SEQ ID NO: 1956316 - DNA, 25 bp, Homo sapien
ctttctaccttccattgttttctat

SEQ ID NO: 1956317 - DNA, 25 bp, Homo sapien
tctttctaccttccattgttttcta

SEQ ID NO: 1956318 - DNA, 25 bp, Homo sapien
tactgtatttgcttattagctctac

SEQ ID NO: 1956319 - DNA, 25 bp, Homo sapien
tattgctttggacaacatgctcatt

SEQ ID NO: 1956320 - DNA, 25 bp, Homo sapien
tgtttgtatcctctatccttttcaa

SEQ ID NO: 1956321 - DNA, 25 bp, Homo sapien
tgtaccctgcaactatactgtattt

SEQ ID NO: 1956322 - DNA, 25 bp, Homo sapien
gaatttatctcatcctgccttaggc

SEQ ID NO: 1956323 - DNA, 25 bp, Homo sapien
ggaagagagcaatctactccaaagg

SEQ ID NO: 1956324 - DNA, 25 bp, Homo sapien
tcacctggtcaaggccatagctcca

SEQ ID NO: 1956325 - DNA, 25 bp, Homo sapien
tccaaaggaactcggtgaaactgta

SEQ ID NO: 1956326 - DNA, 25 bp, Homo sapien
cctatgatcgcaggagacgtgtatg

SEQ ID NO: 1956327 - DNA, 25 bp, Homo sapien
catatcggcattgaagtattgttca

SEQ ID NO: 1956328 - DNA, 25 bp, Homo sapien
gtctttatttgaacattgcctatga

SEQ ID NO: 1956329 - DNA, 25 bp, Homo sapien
agattggtgcatctcctgttgtacg

SEQ ID NO: 1956330 - DNA, 25 bp, Homo sapien
gccctctgcaaggtcaaataaaaaa

SEQ ID NO: 1956331 - DNA, 25 bp, Homo sapien
tgtccctagccctctgcaaggtcaa

SEQ ID NO: 1956332 - DNA, 25 bp, Homo sapien
tttccactgtccctagccctctgca

SEQ ID NO: 1956333 - DNA, 25 bp, Homo sapien
cctagccctctgcaaggtcaaataa

SEQ ID NO: 1956334 - DNA, 25 bp, Homo sapien
taaatgcttagtcttttgccgtaag

SEQ ID NO: 1956335 - DNA, 25 bp, Homo sapien
ttgccgtaagatagaaaaagctggt

SEQ ID NO: 1956336 - DNA, 25 bp, Homo sapien
atggaataactctgatagaattaca

SEQ ID NO: 1956337 - DNA, 25 bp, Homo sapien
aaatgagatccacaagagaccttac

SEQ ID NO: 1956338 - DNA, 25 bp, Homo sapien
tactgtctctgcactaacactttca

SEQ ID NO: 1956339 - DNA, 25 bp, Homo sapien
tctgcactaacactttcagatacaa

SEQ ID NO: 1956340 - DNA, 25 bp, Homo sapien
tgcactaacactttcagatacaaat

SEQ ID NO: 1956341 - DNA, 25 bp, Homo sapien
ctctgcactaacactttcagataca

SEQ ID NO: 1956342 - DNA, 25 bp, Homo sapien
aagagaaagatatgccttcactttt

SEQ ID NO: 1956343 - DNA, 25 bp, Homo sapien
catctactatgtggttgtccggtgg

SEQ ID NO: 1956344 - DNA, 25 bp, Homo sapien
gatgcagtaacattctcccatgggt

SEQ ID NO: 1956345 - DNA, 25 bp, Homo sapien
cattagtcctcaaggcctgaagaga

SEQ ID NO: 1956346 - DNA, 25 bp, Homo sapien
ccggtgggacagttcatgtagatca

SEQ ID NO: 1956347 - DNA, 25 bp, Homo sapien
ctttcacagcgtgagatggtttcat

SEQ ID NO: 1956348 - DNA, 25 bp, Homo sapien
ctgagcaaaggacccctccactcat

SEQ ID NO: 1956349 - DNA, 25 bp, Homo sapien
tagacacgatggtctagatctgctg

SEQ ID NO: 1956350 - DNA, 25 bp, Homo sapien
ttctaaattgtgcactgctctgagt

SEQ ID NO: 1956351 - DNA, 25 bp, Homo sapien
tgcagtttcagttaatcacacagtc

SEQ ID NO: 1956352 - DNA, 25 bp, Homo sapien
taaaatctcacatggtacagctcag

SEQ ID NO: 1956353 - DNA, 25 bp, Homo sapien
tgttccctgtgtaggcactatcaat

SEQ ID NO: 1956354 - DNA, 25 bp, Homo sapien
tccctgtgtaggcactatcaataaa

SEQ ID NO: 1956355 - DNA, 25 bp, Homo sapien
ttccctgtgtaggcactatcaataa

SEQ ID NO: 1956356 - DNA, 25 bp, Homo sapien
gttccctgtgtaggcactatcaata

SEQ ID NO: 1956357 - DNA, 25 bp, Homo sapien
cacagaagaattgtgtccgcttatc

SEQ ID NO: 1956358 - DNA, 25 bp, Homo sapien
tattattctggtctctacggcagca

SEQ ID NO: 1956359 - DNA, 25 bp, Homo sapien
tatcgaagacgactaccaaggtact

SEQ ID NO: 1956360 - DNA, 25 bp, Homo sapien
taacatgaacttactgcacagagca

SEQ ID NO: 1956361 - DNA, 25 bp, Homo sapien
aacattaaatagtcactcggctggg

SEQ ID NO: 1956362 - DNA, 25 bp, Homo sapien
tgtactgcgcagacttttcactatg

SEQ ID NO: 1956363 - DNA, 25 bp, Homo sapien
caatttggccgtagagcatgttctg

SEQ ID NO: 1956364 - DNA, 25 bp, Homo sapien
tctttaggacttcataaggagccat

SEQ ID NO: 1956365 - DNA, 25 bp, Homo sapien
aaatgttgggatttcctctcttcta

SEQ ID NO: 1956366 - DNA, 25 bp, Homo sapien
ctgttaaatgttgggatttcctctc

SEQ ID NO: 1956367 - DNA, 25 bp, Homo sapien
tgggatttcctctcttctatcctca

SEQ ID NO: 1956368 - DNA, 25 bp, Homo sapien
gggatttcctctcttctatcctcat

SEQ ID NO: 1956369 - DNA, 25 bp, Homo sapien
gatgacttctatatctataccatta

SEQ ID NO: 1956370 - DNA, 25 bp, Homo sapien
acttctatatctataccattagctt

SEQ ID NO: 1956371 - DNA, 25 bp, Homo sapien
tgacttctatatctataccattagc

SEQ ID NO: 1956372 - DNA, 25 bp, Homo sapien
gacttctatatctataccattagct

SEQ ID NO: 1956373 - DNA, 25 bp, Homo sapien
cataggcataagctaagacttcatg

SEQ ID NO: 1956374 - DNA, 25 bp, Homo sapien
tcatcggagttaagaggcaacctac

SEQ ID NO: 1956375 - DNA, 25 bp, Homo sapien
gcccagcatcactcgtcattagaga

SEQ ID NO: 1956376 - DNA, 25 bp, Homo sapien
aagaaactatcatcggagttaagag

SEQ ID NO: 1956377 - DNA, 25 bp, Homo sapien
cattgcccaactctcaggcctagga

SEQ ID NO: 1956378 - DNA, 25 bp, Homo sapien
gagcaggagtgcgtctctgaccaac

SEQ ID NO: 1956379 - DNA, 25 bp, Homo sapien
taggaacgcagtcttgcacacatcc

SEQ ID NO: 1956380 - DNA, 25 bp, Homo sapien
gttacacagactcgcctaggaacgc

SEQ ID NO: 1956381 - DNA, 25 bp, Homo sapien
gatctaacctcatgttctgattggg

SEQ ID NO: 1956382 - DNA, 25 bp, Homo sapien
tctgattgggtttgcagcattgcag

SEQ ID NO: 1956383 - DNA, 25 bp, Homo sapien
tgcaggggaatgcatgaatccacac

SEQ ID NO: 1956384 - DNA, 25 bp, Homo sapien
attcgcatgtcttttcacactcccg

SEQ ID NO: 1956385 - DNA, 25 bp, Homo sapien
taaacgtgagcagtagctcccggtg

SEQ ID NO: 1956386 - DNA, 25 bp, Homo sapien
tattcgcatgacacagggtgcaagg

SEQ ID NO: 1956387 - DNA, 25 bp, Homo sapien
cagaaggcattttccgagtcggttg

SEQ ID NO: 1956388 - DNA, 25 bp, Homo sapien
ggtgtatctcctttcgtacccagaa

SEQ ID NO: 1956389 - DNA, 25 bp, Homo sapien
cagaaaggggtgatttgtacagctt

SEQ ID NO: 1956390 - DNA, 25 bp, Homo sapien
caccatccaggagcgggacttaaca

SEQ ID NO: 1956391 - DNA, 25 bp, Homo sapien
taacacagccctttaccatatgcag

SEQ ID NO: 1956392 - DNA, 25 bp, Homo sapien
tgacatgcaatgaagtcagctctgt

SEQ ID NO: 1956393 - DNA, 25 bp, Homo sapien
ttataatggctacatgatcgggcag

SEQ ID NO: 1956394 - DNA, 25 bp, Homo sapien
tttataatggctacatgatcgggca

SEQ ID NO: 1956395 - DNA, 25 bp, Homo sapien
gctgccatttataatggctacatga

SEQ ID NO: 1956396 - DNA, 25 bp, Homo sapien
ccatttataatggctacatgatcgg

SEQ ID NO: 1956397 - DNA, 25 bp, Homo sapien
ggtggcaaggatcatggaagagccc

SEQ ID NO: 1956398 - DNA, 25 bp, Homo sapien
actcttctggactctacctttggtt

SEQ ID NO: 1956399 - DNA, 25 bp, Homo sapien
tggaagagcccagaactcttctgga

SEQ ID NO: 1956400 - DNA, 25 bp, Homo sapien
gtggcaaggatcatggaagagccca

SEQ ID NO: 1956401 - DNA, 25 bp, Homo sapien
ctgtctgttccaataactctgaaag

SEQ ID NO: 1956402 - DNA, 25 bp, Homo sapien
agtggctgcatgcttctctggttgc

SEQ ID NO: 1956403 - DNA, 25 bp, Homo sapien
aaagtcctcctttctagcctggctt

SEQ ID NO: 1956404 - DNA, 25 bp, Homo sapien
tcctcagtggctgcatgcttctctg

SEQ ID NO: 1956405 - DNA, 25 bp, Homo sapien
taccattcaggattaagagagaagg

SEQ ID NO: 1956406 - DNA, 25 bp, Homo sapien
cattaacacctccactgtagaaaac

SEQ ID NO: 1956407 - DNA, 25 bp, Homo sapien
gatttccattcgctgagtatgttca

SEQ ID NO: 1956408 - DNA, 25 bp, Homo sapien
gcttacctaaaataccacggctgaa

SEQ ID NO: 1956409 - DNA, 25 bp, Homo sapien
gaatcacctcgcgatgactgacaag

SEQ ID NO: 1956410 - DNA, 25 bp, Homo sapien
tccaaagtgtgtaatctcctgagtg

SEQ ID NO: 1956411 - DNA, 25 bp, Homo sapien
cgatcagcggatctgcagggtttgt

SEQ ID NO: 1956412 - DNA, 25 bp, Homo sapien
gagaatcaatgcctccgatcagcgg

SEQ ID NO: 1956413 - DNA, 25 bp, Homo sapien
gaccatcgctctatgttgcctggga

SEQ ID NO: 1956414 - DNA, 25 bp, Homo sapien
gaagtggttggactactactcctcc

SEQ ID NO: 1956415 - DNA, 25 bp, Homo sapien
ggtacgtgcctaacatagagattgg

SEQ ID NO: 1956416 - DNA, 25 bp, Homo sapien
taggtaggcgcagtattctccgtgg

SEQ ID NO: 1956417 - DNA, 25 bp, Homo sapien
gttcctagatgccctagatgttcct

SEQ ID NO: 1956418 - DNA, 25 bp, Homo sapien
gtctgttcctagatgccctagatgt

SEQ ID NO: 1956419 - DNA, 25 bp, Homo sapien
ctgttcctagatgccctagatgttc

SEQ ID NO: 1956420 - DNA, 25 bp, Homo sapien
tctgttcctagatgccctagatgtt

SEQ ID NO: 1956421 - DNA, 25 bp, Homo sapien
gctccctgaggtcatggacgtccat

SEQ ID NO: 1956422 - DNA, 25 bp, Homo sapien
gatgtccctagatgccccggatgaa

SEQ ID NO: 1956423 - DNA, 25 bp, Homo sapien
gcttcccgtgcatatgtgtctagca

SEQ ID NO: 1956424 - DNA, 25 bp, Homo sapien
gatacgtttgttcaggtcggccttg

SEQ ID NO: 1956425 - DNA, 25 bp, Homo sapien
gcaccaccctatcgacacataggag

SEQ ID NO: 1956426 - DNA, 25 bp, Homo sapien
ccaccctatcgacacataggaggca

SEQ ID NO: 1956427 - DNA, 25 bp, Homo sapien
ccctatcgacacataggaggcactc

SEQ ID NO: 1956428 - DNA, 25 bp, Homo sapien
tgtgcaccaccctatcgacacatag

SEQ ID NO: 1956429 - DNA, 25 bp, Homo sapien
gaattgcttgcggactccagccatt

SEQ ID NO: 1956430 - DNA, 25 bp, Homo sapien
gactgaagcccctttggacgtcact

SEQ ID NO: 1956431 - DNA, 25 bp, Homo sapien
gaaacaatggctacgtgtctcagca

SEQ ID NO: 1956432 - DNA, 25 bp, Homo sapien
cagccaaatggatgctctcagcagc

SEQ ID NO: 1956433 - DNA, 25 bp, Homo sapien
tcaggaaagggttctcataaaatcc

SEQ ID NO: 1956434 - DNA, 25 bp, Homo sapien
tcacgaggagcttgcagctccaagg

SEQ ID NO: 1956435 - DNA, 25 bp, Homo sapien
ctgaagagatctcacgaggagcttg

SEQ ID NO: 1956436 - DNA, 25 bp, Homo sapien
ggagcttgcagctccaaggagaagc

SEQ ID NO: 1956437 - DNA, 25 bp, Homo sapien
gccaaattgccttcctcggtagcta

SEQ ID NO: 1956438 - DNA, 25 bp, Homo sapien
tgcctcctcgtggacttgccaacag

SEQ ID NO: 1956439 - DNA, 25 bp, Homo sapien
tctcttaccatgaataaggctgagc

SEQ ID NO: 1956440 - DNA, 25 bp, Homo sapien
agagccatttacttcccttccgttg

SEQ ID NO: 1956441 - DNA, 25 bp, Homo sapien
acacgtgtctctaccagcggctctc

SEQ ID NO: 1956442 - DNA, 25 bp, Homo sapien
tccagaacgcccctcatcaggtctg

SEQ ID NO: 1956443 - DNA, 25 bp, Homo sapien
agcgcagagggacctccgtctccat

SEQ ID NO: 1956444 - DNA, 25 bp, Homo sapien
ctgagagctccacaggagcgcagag

SEQ ID NO: 1956445 - DNA, 25 bp, Homo sapien
ctctctggagcatctggcttcttcc

SEQ ID NO: 1956446 - DNA, 25 bp, Homo sapien
ttctgaactccaggccgtgctacct

SEQ ID NO: 1956447 - DNA, 25 bp, Homo sapien
aactccaggccgtgctaccttccat

SEQ ID NO: 1956448 - DNA, 25 bp, Homo sapien
ttgaggctccgcttctgaactccag

SEQ ID NO: 1956449 - DNA, 25 bp, Homo sapien
agtgagcgaaccagccggtcagtgt

SEQ ID NO: 1956450 - DNA, 25 bp, Homo sapien
cggtcagtgtgaagagccaaaacgc

SEQ ID NO: 1956451 - DNA, 25 bp, Homo sapien
gggtcctggcggtagctcttactaa

SEQ ID NO: 1956452 - DNA, 25 bp, Homo sapien
tcccacagcagcttcgtagcttcta

SEQ ID NO: 1956453 - DNA, 25 bp, Homo sapien
taccaccttcaatgcatggccaaag

SEQ ID NO: 1956454 - DNA, 25 bp, Homo sapien
cctagaccaggcctataggctgatg

SEQ ID NO: 1956455 - DNA, 25 bp, Homo sapien
catctctggccaacagagaaggcca

SEQ ID NO: 1956456 - DNA, 25 bp, Homo sapien
aagaattcacaagcccaccagatag

SEQ ID NO: 1956457 - DNA, 25 bp, Homo sapien
tcaagcgcaagcagcgactcgctag

SEQ ID NO: 1956458 - DNA, 25 bp, Homo sapien
gccaatcaagcgcaagcagcgactc

SEQ ID NO: 1956459 - DNA, 25 bp, Homo sapien
ctagccaatcaagcgcaagcagcga

SEQ ID NO: 1956460 - DNA, 25 bp, Homo sapien
gcaagcagcgactcgctagccggag

SEQ ID NO: 1956461 - DNA, 25 bp, Homo sapien
acaaaggctcgggtgcacacgcggt

SEQ ID NO: 1956462 - DNA, 25 bp, Homo sapien
gctcctgagcgaggcgcagacaaag

SEQ ID NO: 1956463 - DNA, 25 bp, Homo sapien
ccaaagcctgggaatgagccgcagt

SEQ ID NO: 1956464 - DNA, 25 bp, Homo sapien
aatcctggaagagcgtcggcccaga

SEQ ID NO: 1956465 - DNA, 25 bp, Homo sapien
gcacccggaggtgctcctacccggc

SEQ ID NO: 1956466 - DNA, 25 bp, Homo sapien
ctgcacccggaggtgctcctacccg

SEQ ID NO: 1956467 - DNA, 25 bp, Homo sapien
ctcctgcacccggaggtgctcctac

SEQ ID NO: 1956468 - DNA, 25 bp, Homo sapien
tcctgcacccggaggtgctcctacc

SEQ ID NO: 1956469 - DNA, 25 bp, Homo sapien
cactccgagtcctggagaacggcgg

SEQ ID NO: 1956470 - DNA, 25 bp, Homo sapien
cagtccatgctctggatgccggtca

SEQ ID NO: 1956471 - DNA, 25 bp, Homo sapien
tctagcgaacccctgccttgacttt

SEQ ID NO: 1956472 - DNA, 25 bp, Homo sapien
acggcggtgccatcacagttggaag

SEQ ID NO: 1956473 - DNA, 25 bp, Homo sapien
cccaggggatgaggagccgccccac

SEQ ID NO: 1956474 - DNA, 25 bp, Homo sapien
aggggatgaggagccgccccacctc

SEQ ID NO: 1956475 - DNA, 25 bp, Homo sapien
caggggatgaggagccgccccacct

SEQ ID NO: 1956476 - DNA, 25 bp, Homo sapien
ggatgaggagccgccccacctccgg

SEQ ID NO: 1956477 - DNA, 25 bp, Homo sapien
gaagcactcggtcagccttcggaag

SEQ ID NO: 1956478 - DNA, 25 bp, Homo sapien
tcgcattattagaaggtccatcttc

SEQ ID NO: 1956479 - DNA, 25 bp, Homo sapien
gccttcggaagcagctcgcattatt

SEQ ID NO: 1956480 - DNA, 25 bp, Homo sapien
aggaagcactcggtcagccttcgga

SEQ ID NO: 1956481 - DNA, 25 bp, Homo sapien
gtcggagccgaagagcagcgcggcc

SEQ ID NO: 1956482 - DNA, 25 bp, Homo sapien
ctggtggggacgctcaagggagctg

SEQ ID NO: 1956483 - DNA, 25 bp, Homo sapien
gtggggacgctcaagggagctgcct

SEQ ID NO: 1956484 - DNA, 25 bp, Homo sapien
cgccgcggtgactactgctggtggg

SEQ ID NO: 1956485 - DNA, 25 bp, Homo sapien
ctggggacgccgcggagtttggccg

SEQ ID NO: 1956486 - DNA, 25 bp, Homo sapien
acgagaaggcgagcgccaagggagc

SEQ ID NO: 1956487 - DNA, 25 bp, Homo sapien
ggacccgggacgagaaggcgagcgc

SEQ ID NO: 1956488 - DNA, 25 bp, Homo sapien
aggcgagcgccaagggagcgcgggc

SEQ ID NO: 1956489 - DNA, 25 bp, Homo sapien
cctgggagacgcacggggaggtgaa

SEQ ID NO: 1956490 - DNA, 25 bp, Homo sapien
cccaatgggcgctcagaactaggag

SEQ ID NO: 1956491 - DNA, 25 bp, Homo sapien
cagatgcacaggtgtccgcgttcgg

SEQ ID NO: 1956492 - DNA, 25 bp, Homo sapien
tgccactgaagggaaatgagccgcc

SEQ ID NO: 1956493 - DNA, 25 bp, Homo sapien
aagactgtgcgatcattgccccaaa

SEQ ID NO: 1956494 - DNA, 25 bp, Homo sapien
tctgcccatttactgcccagaactg

SEQ ID NO: 1956495 - DNA, 25 bp, Homo sapien
taggattgaggtccacccaggaaga

SEQ ID NO: 1956496 - DNA, 25 bp, Homo sapien
agggccacttaggattgaggtccac

SEQ ID NO: 1956497 - DNA, 25 bp, Homo sapien
cagaactgaacatgagcccattcac

SEQ ID NO: 1956498 - DNA, 25 bp, Homo sapien
ccgttggctgctgtgtatatctctc

SEQ ID NO: 1956499 - DNA, 25 bp, Homo sapien
tgctgtgtatatctctccatgactg

SEQ ID NO: 1956500 - DNA, 25 bp, Homo sapien
catgctgccaccttcccgttggctg

SEQ ID NO: 1956501 - DNA, 25 bp, Homo sapien
caccttcccgttggctgctgtgtat

SEQ ID NO: 1956502 - DNA, 25 bp, Homo sapien
gaagcccttagaggcagctttaata

SEQ ID NO: 1956503 - DNA, 25 bp, Homo sapien
ggacccaattaattcacttccatca

SEQ ID NO: 1956504 - DNA, 25 bp, Homo sapien
acttccatcactactcgtagaagcc

SEQ ID NO: 1956505 - DNA, 25 bp, Homo sapien
gactgcactcaaaggacccaattaa

SEQ ID NO: 1956506 - DNA, 25 bp, Homo sapien
cagttcttaaagctggaagtttttg

SEQ ID NO: 1956507 - DNA, 25 bp, Homo sapien
agttttcctgctttatggttcatcc

SEQ ID NO: 1956508 - DNA, 25 bp, Homo sapien
gagtgcctctttctcgttcactctt

SEQ ID NO: 1956509 - DNA, 25 bp, Homo sapien
tctttctcgttcactcttagactcc

SEQ ID NO: 1956510 - DNA, 25 bp, Homo sapien
tcccaaaagtctggctacatttaca

SEQ ID NO: 1956511 - DNA, 25 bp, Homo sapien
ttctcctgggagaaagcctcaacgt

SEQ ID NO: 1956512 - DNA, 25 bp, Homo sapien
agttttgtctatgcctatgcctgtc

SEQ ID NO: 1956513 - DNA, 25 bp, Homo sapien
caagcttgagttttcagagtaagtc

SEQ ID NO: 1956514 - DNA, 25 bp, Homo sapien
gtttggaactcatcccatggtctcc

SEQ ID NO: 1956515 - DNA, 25 bp, Homo sapien
tctgcggggactgttattaatttcc

SEQ ID NO: 1956516 - DNA, 25 bp, Homo sapien
cactccagtcctctccatggttttc

SEQ ID NO: 1956517 - DNA, 25 bp, Homo sapien
tcagtcaactctgcggggactgtta

SEQ ID NO: 1956518 - DNA, 25 bp, Homo sapien
ggaacaacacgcagtctggtcctgg

SEQ ID NO: 1956519 - DNA, 25 bp, Homo sapien
cactccggtgatacggaggagatga

SEQ ID NO: 1956520 - DNA, 25 bp, Homo sapien
ggcagaggaacactccggtgatacg

SEQ ID NO: 1956521 - DNA, 25 bp, Homo sapien
gaacactccggtgatacggaggaga

SEQ ID NO: 1956522 - DNA, 25 bp, Homo sapien
gagctccagtgacccagatgtggtt

SEQ ID NO: 1956523 - DNA, 25 bp, Homo sapien
ctgttcttccacttgcccgtgcaat

SEQ ID NO: 1956524 - DNA, 25 bp, Homo sapien
ccacttgcccgtgcaattccatttt

SEQ ID NO: 1956525 - DNA, 25 bp, Homo sapien
cattttcataaacacgattcggcat

SEQ ID NO: 1956526 - DNA, 25 bp, Homo sapien
tctcaggccctgcaatcgtagcttt

SEQ ID NO: 1956527 - DNA, 25 bp, Homo sapien
tcttgagaaggaccatctcaggccc

SEQ ID NO: 1956528 - DNA, 25 bp, Homo sapien
ctgcaatcgtagctttagattctgc

SEQ ID NO: 1956529 - DNA, 25 bp, Homo sapien
gttcccttcttgagaaggaccatct

SEQ ID NO: 1956530 - DNA, 25 bp, Homo sapien
ccttgaacaatacccacagccagat

SEQ ID NO: 1956531 - DNA, 25 bp, Homo sapien
gtgttgttggctgcggtccttgaac

SEQ ID NO: 1956532 - DNA, 25 bp, Homo sapien
gtttgggaactggctcaagttctca

SEQ ID NO: 1956533 - DNA, 25 bp, Homo sapien
gctccgggccagcaaaaactgtggg

SEQ ID NO: 1956534 - DNA, 25 bp, Homo sapien
ccatagcacctagctcggtgcctga

SEQ ID NO: 1956535 - DNA, 25 bp, Homo sapien
agctccccatagcacctagctcggt

SEQ ID NO: 1956536 - DNA, 25 bp, Homo sapien
atacagcctttaaagctaacgttag

SEQ ID NO: 1956537 - DNA, 25 bp, Homo sapien
cagcctttaaagctaacgttagtgg

SEQ ID NO: 1956538 - DNA, 25 bp, Homo sapien
tctcagtatcaggacacaggtttcc

SEQ ID NO: 1956539 - DNA, 25 bp, Homo sapien
gacagaaacattcgggttgctagaa

SEQ ID NO: 1956540 - DNA, 25 bp, Homo sapien
gccattgtaagtcaatccatttgtg

SEQ ID NO: 1956541 - DNA, 25 bp, Homo sapien
taagccagcttctgatgatgacggt

SEQ ID NO: 1956542 - DNA, 25 bp, Homo sapien
gagcctgctcagactctagttcggg

SEQ ID NO: 1956543 - DNA, 25 bp, Homo sapien
tggtccttgagccagagtccagctg

SEQ ID NO: 1956544 - DNA, 25 bp, Homo sapien
cctctgctcagaaccacgggctgag

SEQ ID NO: 1956545 - DNA, 25 bp, Homo sapien
gatgggtggcgggcagcttggtcct

SEQ ID NO: 1956546 - DNA, 25 bp, Homo sapien
cctccaggaggacccgttcatgcat

SEQ ID NO: 1956547 - DNA, 25 bp, Homo sapien
gaggacccgttcatgcatcttccca

SEQ ID NO: 1956548 - DNA, 25 bp, Homo sapien
gctgccctcccaaggtgatctcctc

SEQ ID NO: 1956549 - DNA, 25 bp, Homo sapien
tcccaaggtgatctcctccaggagg

SEQ ID NO: 1956550 - DNA, 25 bp, Homo sapien
accctctaccccatgctcccgtgct

SEQ ID NO: 1956551 - DNA, 25 bp, Homo sapien
cacactttccgcctccatgctccca

SEQ ID NO: 1956552 - DNA, 25 bp, Homo sapien
accgccatgcttccgcgctcttcct

SEQ ID NO: 1956553 - DNA, 25 bp, Homo sapien
cactccaccgctatgctgtggtgct

SEQ ID NO: 1956554 - DNA, 25 bp, Homo sapien
taatcataggcaattttctcaactg

SEQ ID NO: 1956555 - DNA, 25 bp, Homo sapien
gctttgcccatgaggtcccggctaa

SEQ ID NO: 1956556 - DNA, 25 bp, Homo sapien
taagagccgtaagagaatgccagga

SEQ ID NO: 1956557 - DNA, 25 bp, Homo sapien
cagaccatccccgtgggaggcggaa

SEQ ID NO: 1956558 - DNA, 25 bp, Homo sapien
ctcaaagccaacaaagcgggtcctt

SEQ ID NO: 1956559 - DNA, 25 bp, Homo sapien
ccttctgctgggtcatcgctcatct

SEQ ID NO: 1956560 - DNA, 25 bp, Homo sapien
gggtctgtcccgctcctcaaagcca

SEQ ID NO: 1956561 - DNA, 25 bp, Homo sapien
gggtcatcgctcatctgcgcccggg

SEQ ID NO: 1956562 - DNA, 25 bp, Homo sapien
ctttaagcatgaaggggaggcggct

SEQ ID NO: 1956563 - DNA, 25 bp, Homo sapien
ttaagcatgaaggggaggcggctgg

SEQ ID NO: 1956564 - DNA, 25 bp, Homo sapien
tttaagcatgaaggggaggcggctg

SEQ ID NO: 1956565 - DNA, 25 bp, Homo sapien
ggtggcgtgccgtagccactcctgc

SEQ ID NO: 1956566 - DNA, 25 bp, Homo sapien
tttgtgaacctccaggccgccagtc

SEQ ID NO: 1956567 - DNA, 25 bp, Homo sapien
cctgcagagggggtggcgtgccgta

SEQ ID NO: 1956568 - DNA, 25 bp, Homo sapien
cttgacccgatgggagcctgcagag

SEQ ID NO: 1956569 - DNA, 25 bp, Homo sapien
tgtcacatttccgtacatcagaatg

SEQ ID NO: 1956570 - DNA, 25 bp, Homo sapien
ctctgtcacatttccgtacatcaga

SEQ ID NO: 1956571 - DNA, 25 bp, Homo sapien
tccgtacatcagaatgatttctgaa

SEQ ID NO: 1956572 - DNA, 25 bp, Homo sapien
catttccgtacatcagaatgatttc

SEQ ID NO: 1956573 - DNA, 25 bp, Homo sapien
tgcagggacctggttaatctctgtg

SEQ ID NO: 1956574 - DNA, 25 bp, Homo sapien
gtaaatgtgctgctagagcgagcac

SEQ ID NO: 1956575 - DNA, 25 bp, Homo sapien
acctggttaatctctgtgtagttcc

SEQ ID NO: 1956576 - DNA, 25 bp, Homo sapien
ttttagtaaatgtgctgctagagcg

SEQ ID NO: 1956577 - DNA, 25 bp, Homo sapien
gaccgtgaggccataagtggttcca

SEQ ID NO: 1956578 - DNA, 25 bp, Homo sapien
gtgaggccataagtggttccagatt

SEQ ID NO: 1956579 - DNA, 25 bp, Homo sapien
agaccgtgaggccataagtggttcc

SEQ ID NO: 1956580 - DNA, 25 bp, Homo sapien
ccgtgaggccataagtggttccaga

SEQ ID NO: 1956581 - DNA, 25 bp, Homo sapien
tcttactgagaaccgtggtcacagc

SEQ ID NO: 1956582 - DNA, 25 bp, Homo sapien
tcatcttactgagaaccgtggtcac

SEQ ID NO: 1956583 - DNA, 25 bp, Homo sapien
ctgagaaccgtggtcacagccacac

SEQ ID NO: 1956584 - DNA, 25 bp, Homo sapien
gggagtctcccagacaggcaaagcc

SEQ ID NO: 1956585 - DNA, 25 bp, Homo sapien
ggtaaacatcgggactctaactcat

SEQ ID NO: 1956586 - DNA, 25 bp, Homo sapien
atgctggagtgagggcacacatttc

SEQ ID NO: 1956587 - DNA, 25 bp, Homo sapien
ccagagcaggtagggcccctagtca

SEQ ID NO: 1956588 - DNA, 25 bp, Homo sapien
cctagtcatgctgcccttgggtaaa

SEQ ID NO: 1956589 - DNA, 25 bp, Homo sapien
ctgcagaaacttgtccttcgatgct

SEQ ID NO: 1956590 - DNA, 25 bp, Homo sapien
agaaacttgtccttcgatgcttttc

SEQ ID NO: 1956591 - DNA, 25 bp, Homo sapien
gcagaaacttgtccttcgatgcttt

SEQ ID NO: 1956592 - DNA, 25 bp, Homo sapien
cttgtccttcgatgcttttcttttc

SEQ ID NO: 1956593 - DNA, 25 bp, Homo sapien
cttgtttacttattggggaaatgca

SEQ ID NO: 1956594 - DNA, 25 bp, Homo sapien
acttattggggaaatgcatgttgac

SEQ ID NO: 1956595 - DNA, 25 bp, Homo sapien
tatgagtcctcttagatgtttccac

SEQ ID NO: 1956596 - DNA, 25 bp, Homo sapien
tgcatgttgacattatgagtcctct

SEQ ID NO: 1956597 - DNA, 25 bp, Homo sapien
gaagaccttcgaaaggcaagcaact

SEQ ID NO: 1956598 - DNA, 25 bp, Homo sapien
gaagagaaccatcaggacgatccca

SEQ ID NO: 1956599 - DNA, 25 bp, Homo sapien
ctgtgaaacgctgttggcctgggca

SEQ ID NO: 1956600 - DNA, 25 bp, Homo sapien
gaaacaatctgctccgtccaagtgc

SEQ ID NO: 1956601 - DNA, 25 bp, Homo sapien
aatcatccgctattttggcagcagg

SEQ ID NO: 1956602 - DNA, 25 bp, Homo sapien
ggtcatcagctggaaacaagcctgc

SEQ ID NO: 1956603 - DNA, 25 bp, Homo sapien
taatcagcttcaacattgccagagt

SEQ ID NO: 1956604 - DNA, 25 bp, Homo sapien
aaagtcgtagtgttactgacccatg

SEQ ID NO: 1956605 - DNA, 25 bp, Homo sapien
ccacatgtggtgagtgccgggtaca

SEQ ID NO: 1956606 - DNA, 25 bp, Homo sapien
gatacctcgaggttagcccagtgag

SEQ ID NO: 1956607 - DNA, 25 bp, Homo sapien
tccatccagggatttacaggtagag

SEQ ID NO: 1956608 - DNA, 25 bp, Homo sapien
taaaatatcacagccatgcagacga

SEQ ID NO: 1956609 - DNA, 25 bp, Homo sapien
ccatccagcagacaagcccttgcag

SEQ ID NO: 1956610 - DNA, 25 bp, Homo sapien
cagcagacaagcccttgcagatgca

SEQ ID NO: 1956611 - DNA, 25 bp, Homo sapien
ccagcagacaagcccttgcagatgc

SEQ ID NO: 1956612 - DNA, 25 bp, Homo sapien
tccagcagacaagcccttgcagatg

SEQ ID NO: 1956613 - DNA, 25 bp, Homo sapien
tgttaactctcagttcttttattac

SEQ ID NO: 1956614 - DNA, 25 bp, Homo sapien
gaaggcacgctctgaagatatgcaa

SEQ ID NO: 1956615 - DNA, 25 bp, Homo sapien
catgtttgtggataagaaagagacg

SEQ ID NO: 1956616 - DNA, 25 bp, Homo sapien
tatgcaaactaatttccagggtcgc

SEQ ID NO: 1956617 - DNA, 25 bp, Homo sapien
caaactgtataatctactggcaaag

SEQ ID NO: 1956618 - DNA, 25 bp, Homo sapien
gctcattctgacactggacggttta

SEQ ID NO: 1956619 - DNA, 25 bp, Homo sapien
tgactactacatggaatatgccctg

SEQ ID NO: 1956620 - DNA, 25 bp, Homo sapien
tcctaatgggctgtgttgagacccc

SEQ ID NO: 1956621 - DNA, 25 bp, Homo sapien
taagttgcccagagacatggctcat

SEQ ID NO: 1956622 - DNA, 25 bp, Homo sapien
cagaaggccattgctaacgatgtcc

SEQ ID NO: 1956623 - DNA, 25 bp, Homo sapien
ctaagatgagtcaccgtcgagcaga

SEQ ID NO: 1956624 - DNA, 25 bp, Homo sapien
tcaccgtcgagcagaaggccattgc

SEQ ID NO: 1956625 - DNA, 25 bp, Homo sapien
ctaacgatgtcctctggatggagca

SEQ ID NO: 1956626 - DNA, 25 bp, Homo sapien
actcacagcagagcaagcgattggg

SEQ ID NO: 1956627 - DNA, 25 bp, Homo sapien
taatgcaagctcttattagcagaag

SEQ ID NO: 1956628 - DNA, 25 bp, Homo sapien
tgtgaccttatggagtgccttggcc

SEQ ID NO: 1956629 - DNA, 25 bp, Homo sapien
cacaaagcctgtcgctgtgacctta

SEQ ID NO: 1956630 - DNA, 25 bp, Homo sapien
ctcttcccggcaatggctcctgtca

SEQ ID NO: 1956631 - DNA, 25 bp, Homo sapien
ccactcttcccggcaatggctcctg

SEQ ID NO: 1956632 - DNA, 25 bp, Homo sapien
cactcttcccggcaatggctcctgt

SEQ ID NO: 1956633 - DNA, 25 bp, Homo sapien
tcttcccggcaatggctcctgtcat

SEQ ID NO: 1956634 - DNA, 25 bp, Homo sapien
gagaagagccaaccctatctggaaa

SEQ ID NO: 1956635 - DNA, 25 bp, Homo sapien
tagtcaaatgaacaacagcccagcc

SEQ ID NO: 1956636 - DNA, 25 bp, Homo sapien
gataagcaaacctccaaaacgattc

SEQ ID NO: 1956637 - DNA, 25 bp, Homo sapien
agcccagcctaccacaaagagaaag

SEQ ID NO: 1956638 - DNA, 25 bp, Homo sapien
tctgtaacagaatcgtttattgtca

SEQ ID NO: 1956639 - DNA, 25 bp, Homo sapien
tgcattcttctggataccgcctggg

SEQ ID NO: 1956640 - DNA, 25 bp, Homo sapien
tgtatgtaggagtaccctctaacaa

SEQ ID NO: 1956641 - DNA, 25 bp, Homo sapien
gacaatgacatgcatggagcggtca

SEQ ID NO: 1956642 - DNA, 25 bp, Homo sapien
cctgtgcatgccccagggcgtagca

SEQ ID NO: 1956643 - DNA, 25 bp, Homo sapien
tgtgcatgccccagggcgtagcagg

SEQ ID NO: 1956644 - DNA, 25 bp, Homo sapien
ctgtgcatgccccagggcgtagcag

SEQ ID NO: 1956645 - DNA, 25 bp, Homo sapien
gcagcaattcttctcgagatgttct

SEQ ID NO: 1956646 - DNA, 25 bp, Homo sapien
tcttctcgagatgttcttgtcccat

SEQ ID NO: 1956647 - DNA, 25 bp, Homo sapien
aattcttctcgagatgttcttgtcc

SEQ ID NO: 1956648 - DNA, 25 bp, Homo sapien
gggcagcaattcttctcgagatgtt

SEQ ID NO: 1956649 - DNA, 25 bp, Homo sapien
cagccctgggaaggttctgacttcc

SEQ ID NO: 1956650 - DNA, 25 bp, Homo sapien
gaccagccctgggaaggttctgact

SEQ ID NO: 1956651 - DNA, 25 bp, Homo sapien
tggattggcaatggcaggaaagacc

SEQ ID NO: 1956652 - DNA, 25 bp, Homo sapien
aaagaccagccctgggaaggttctg

SEQ ID NO: 1956653 - DNA, 25 bp, Homo sapien
tgctggtctaagctcgtggacgccc

SEQ ID NO: 1956654 - DNA, 25 bp, Homo sapien
cctttatacggatgggctttggcag

SEQ ID NO: 1956655 - DNA, 25 bp, Homo sapien
tcctgaggccaaggcgaggacagca

SEQ ID NO: 1956656 - DNA, 25 bp, Homo sapien
ccagggaagcctccttgtaggattg

SEQ ID NO: 1956657 - DNA, 25 bp, Homo sapien
gagaccggagctcccgccaatgcac

SEQ ID NO: 1956658 - DNA, 25 bp, Homo sapien
ctgcagggctgagagaccggagctc

SEQ ID NO: 1956659 - DNA, 25 bp, Homo sapien
tgcagggctgagagaccggagctcc

SEQ ID NO: 1956660 - DNA, 25 bp, Homo sapien
ggcacagccagcagcgtacaggagg

SEQ ID NO: 1956661 - DNA, 25 bp, Homo sapien
ctccagctcagaacggccttggcac

SEQ ID NO: 1956662 - DNA, 25 bp, Homo sapien
tccagctcagaacggccttggcaca

SEQ ID NO: 1956663 - DNA, 25 bp, Homo sapien
cagccagcagcgtacaggaggaggg

SEQ ID NO: 1956664 - DNA, 25 bp, Homo sapien
ttgttggaataggagattacaactg

SEQ ID NO: 1956665 - DNA, 25 bp, Homo sapien
ggttgttggaataggagattacaac

SEQ ID NO: 1956666 - DNA, 25 bp, Homo sapien
tgttggaataggagattacaactga

SEQ ID NO: 1956667 - DNA, 25 bp, Homo sapien
ggggttgttggaataggagattaca

SEQ ID NO: 1956668 - DNA, 25 bp, Homo sapien
gagtaaggaaatcatctcaggcctg

SEQ ID NO: 1956669 - DNA, 25 bp, Homo sapien
aatctgtgatgccttcattgaagcc

SEQ ID NO: 1956670 - DNA, 25 bp, Homo sapien
cattgaagcccaaagtgaacatttt

SEQ ID NO: 1956671 - DNA, 25 bp, Homo sapien
agaaatggacctttctggcatgatc

SEQ ID NO: 1956672 - DNA, 25 bp, Homo sapien
tgctagtggacgcccgatgatcata

SEQ ID NO: 1956673 - DNA, 25 bp, Homo sapien
gctagtggacgcccgatgatcatac

SEQ ID NO: 1956674 - DNA, 25 bp, Homo sapien
ctgctagtggacgcccgatgatcat

SEQ ID NO: 1956675 - DNA, 25 bp, Homo sapien
gaggcaggtgacgaagatttcttcc

SEQ ID NO: 1956676 - DNA, 25 bp, Homo sapien
caggtgacgaagatttcttccagtc

SEQ ID NO: 1956677 - DNA, 25 bp, Homo sapien
acacaacagaggcaggtgacgaaga

SEQ ID NO: 1956678 - DNA, 25 bp, Homo sapien
caacagaggcaggtgacgaagattt

SEQ ID NO: 1956679 - DNA, 25 bp, Homo sapien
gcatcttctctgaacacggtatctg

SEQ ID NO: 1956680 - DNA, 25 bp, Homo sapien
tgaacacggtatctgctgtcgaccc

SEQ ID NO: 1956681 - DNA, 25 bp, Homo sapien
gacccggagtctgcgtttatcaact

SEQ ID NO: 1956682 - DNA, 25 bp, Homo sapien
ggtatctgctgtcgacccggagtct

SEQ ID NO: 1956683 - DNA, 25 bp, Homo sapien
ctgtcctccgaaactgtgcaagcac

SEQ ID NO: 1956684 - DNA, 25 bp, Homo sapien
gtgcaagcacccaaccgccgagaag

SEQ ID NO: 1956685 - DNA, 25 bp, Homo sapien
agaaggcaaccaggcactgctcctg

SEQ ID NO: 1956686 - DNA, 25 bp, Homo sapien
caaccgccgagaaggcaaccaggca

SEQ ID NO: 1956687 - DNA, 25 bp, Homo sapien
cctttgcctggacgtcagggtggag

SEQ ID NO: 1956688 - DNA, 25 bp, Homo sapien
cggcggacggtgatgaacccggaga

SEQ ID NO: 1956689 - DNA, 25 bp, Homo sapien
cggtgatgaacccggagacccggca

SEQ ID NO: 1956690 - DNA, 25 bp, Homo sapien
cgtcagggtggagcccgggaatcgc

SEQ ID NO: 1956691 - DNA, 25 bp, Homo sapien
ctgcgccgggtgacggaggagaaag

SEQ ID NO: 1956692 - DNA, 25 bp, Homo sapien
caggagggagcgcctggcacaggga

SEQ ID NO: 1956693 - DNA, 25 bp, Homo sapien
gctctggcctcgccgtcttgtcttg

SEQ ID NO: 1956694 - DNA, 25 bp, Homo sapien
ccgggcggctctcgcggccagacaa

SEQ ID NO: 1956695 - DNA, 25 bp, Homo sapien
gggcggcctcaaggagcgcccaggc

SEQ ID NO: 1956696 - DNA, 25 bp, Homo sapien
ggctctcgcggccagacaaggagcc

SEQ ID NO: 1956697 - DNA, 25 bp, Homo sapien
cgcccatggtcaggccgcggactgt

SEQ ID NO: 1956698 - DNA, 25 bp, Homo sapien
ccgcccatggtcaggccgcggactg

SEQ ID NO: 1956699 - DNA, 25 bp, Homo sapien
tatgggaaaatagctgtgaaggtca

SEQ ID NO: 1956700 - DNA, 25 bp, Homo sapien
ggtgcttctaggactgttaacaaca

SEQ ID NO: 1956701 - DNA, 25 bp, Homo sapien
gataacatgaggcaggtctatgcat

SEQ ID NO: 1956702 - DNA, 25 bp, Homo sapien
tatgatgcgactgatccatgccaag

SEQ ID NO: 1956703 - DNA, 25 bp, Homo sapien
tgaagaaggagcctacaatcccacc

SEQ ID NO: 1956704 - DNA, 25 bp, Homo sapien
tcatcactgggttcttatctccata

SEQ ID NO: 1956705 - DNA, 25 bp, Homo sapien
aatgagttaaacagcaggttagaca

SEQ ID NO: 1956706 - DNA, 25 bp, Homo sapien
tacctgccttgaatctatctggaca

SEQ ID NO: 1956707 - DNA, 25 bp, Homo sapien
gaatgtaacttctaccaaggctggg

SEQ ID NO: 1956708 - DNA, 25 bp, Homo sapien
gctcaggcagtcaatcagaagtcct

SEQ ID NO: 1956709 - DNA, 25 bp, Homo sapien
cttgaacagtgtccggctcagagca

SEQ ID NO: 1956710 - DNA, 25 bp, Homo sapien
gcctattgccttctgcgggaatgta

SEQ ID NO: 1956711 - DNA, 25 bp, Homo sapien
tggcctaaggaacacagtctgagct

SEQ ID NO: 1956712 - DNA, 25 bp, Homo sapien
gagccttgatatggtagagacccag

SEQ ID NO: 1956713 - DNA, 25 bp, Homo sapien
aagaggtcctcattagccagagcag

SEQ ID NO: 1956714 - DNA, 25 bp, Homo sapien
gatgatgaattgtccaccagagcca

SEQ ID NO: 1956715 - DNA, 25 bp, Homo sapien
tctgtagcaacttctaggacaccag

SEQ ID NO: 1956716 - DNA, 25 bp, Homo sapien
tagattctgtagcaacttctaggac

SEQ ID NO: 1956717 - DNA, 25 bp, Homo sapien
tgtagcaacttctaggacaccagag

SEQ ID NO: 1956718 - DNA, 25 bp, Homo sapien
agaaggtggctgcagtagattctgt

SEQ ID NO: 1956719 - DNA, 25 bp, Homo sapien
caaagcacgaaacctggagattggg

SEQ ID NO: 1956720 - DNA, 25 bp, Homo sapien
taggtctcgaagtccatattggaac

SEQ ID NO: 1956721 - DNA, 25 bp, Homo sapien
catattggaactccaagatgaacag

SEQ ID NO: 1956722 - DNA, 25 bp, Homo sapien
ccgtgctgtgatcccaccatcaaaa

SEQ ID NO: 1956723 - DNA, 25 bp, Homo sapien
cccgtgacccgaagctgtgtgcgct

SEQ ID NO: 1956724 - DNA, 25 bp, Homo sapien
ggcacccgtgacccgaagctgtgtg

SEQ ID NO: 1956725 - DNA, 25 bp, Homo sapien
tgtgtgcgctggccgggctgtacca

SEQ ID NO: 1956726 - DNA, 25 bp, Homo sapien
cacccgtgacccgaagctgtgtgcg

SEQ ID NO: 1956727 - DNA, 25 bp, Homo sapien
aggccatgaggccacgggaggcaag

SEQ ID NO: 1956728 - DNA, 25 bp, Homo sapien
ggactcccacaggttcgctggtgcc

SEQ ID NO: 1956729 - DNA, 25 bp, Homo sapien
gccacgggaggcaagcaggactccc

SEQ ID NO: 1956730 - DNA, 25 bp, Homo sapien
gcaagcaggactcccacaggttcgc

SEQ ID NO: 1956731 - DNA, 25 bp, Homo sapien
gaagttctaggaggtggctacccac

SEQ ID NO: 1956732 - DNA, 25 bp, Homo sapien
catgacatgcataggtggtgcaccc

SEQ ID NO: 1956733 - DNA, 25 bp, Homo sapien
tcctgggtacgtgaaggaaagctgc

SEQ ID NO: 1956734 - DNA, 25 bp, Homo sapien
gcaaaaatgagcaagcggcaagccg

SEQ ID NO: 1956735 - DNA, 25 bp, Homo sapien
tctagcctaagtttacatacatgca

SEQ ID NO: 1956736 - DNA, 25 bp, Homo sapien
tatgtctgcaaagtctacatagagg

SEQ ID NO: 1956737 - DNA, 25 bp, Homo sapien
gcaattaaaagcaattcgaccctta

SEQ ID NO: 1956738 - DNA, 25 bp, Homo sapien
aaaaatctcgatcttttatatgtat

SEQ ID NO: 1956739 - DNA, 25 bp, Homo sapien
cctccaaagaatgagagtgactatt

SEQ ID NO: 1956740 - DNA, 25 bp, Homo sapien
caatagcatggttatacttgtaagg

SEQ ID NO: 1956741 - DNA, 25 bp, Homo sapien
ttcccagatgtcaggtttaaaaaca

SEQ ID NO: 1956742 - DNA, 25 bp, Homo sapien
tggaaagactgcatgcaacagtgac

SEQ ID NO: 1956743 - DNA, 25 bp, Homo sapien
cagtgatgggcctccctgcagcagt

SEQ ID NO: 1956744 - DNA, 25 bp, Homo sapien
cctccctgcagcagtggggaaagga

SEQ ID NO: 1956745 - DNA, 25 bp, Homo sapien
ctccctgcagcagtggggaaaggac

SEQ ID NO: 1956746 - DNA, 25 bp, Homo sapien
gggcctccctgcagcagtggggaaa

SEQ ID NO: 1956747 - DNA, 25 bp, Homo sapien
atggatgagggctgaggccgcgccc

SEQ ID NO: 1956748 - DNA, 25 bp, Homo sapien
agagcagcatggatgagggctgagg

SEQ ID NO: 1956749 - DNA, 25 bp, Homo sapien
aggccgcgcccagagcagcatgggt

SEQ ID NO: 1956750 - DNA, 25 bp, Homo sapien
gccgcgcccagagcagcatgggtga

SEQ ID NO: 1956751 - DNA, 25 bp, Homo sapien
cattgtgggttgatccagtggacac

SEQ ID NO: 1956752 - DNA, 25 bp, Homo sapien
caatgaagatctggagaaaggtgct

SEQ ID NO: 1956753 - DNA, 25 bp, Homo sapien
tgcagcctgttaactgaaggacacg

SEQ ID NO: 1956754 - DNA, 25 bp, Homo sapien
ggcaccctagaacagctgagccaga

SEQ ID NO: 1956755 - DNA, 25 bp, Homo sapien
catggagcaatcatatctgggtgca

SEQ ID NO: 1956756 - DNA, 25 bp, Homo sapien
caggactcaagagagcgctaaggct

SEQ ID NO: 1956757 - DNA, 25 bp, Homo sapien
gccgaccagtgttaagcaggactca

SEQ ID NO: 1956758 - DNA, 25 bp, Homo sapien
aactccctccctgacgaacagatgg

SEQ ID NO: 1956759 - DNA, 25 bp, Homo sapien
cagccattccaagccatggtttcgg

SEQ ID NO: 1956760 - DNA, 25 bp, Homo sapien
caatgcggatcctgatatgcaccgt

SEQ ID NO: 1956761 - DNA, 25 bp, Homo sapien
gaatcgcagctcagcttcatcgcag

SEQ ID NO: 1956762 - DNA, 25 bp, Homo sapien
tatgcaccgtcagagatacgatggg

SEQ ID NO: 1956763 - DNA, 25 bp, Homo sapien
tgggagctaagctggacaaggttgg

SEQ ID NO: 1956764 - DNA, 25 bp, Homo sapien
gggagctaagctggacaaggttggg

SEQ ID NO: 1956765 - DNA, 25 bp, Homo sapien
catgggagctaagctggacaaggtt

SEQ ID NO: 1956766 - DNA, 25 bp, Homo sapien
atgggagctaagctggacaaggttg

SEQ ID NO: 1956767 - DNA, 25 bp, Homo sapien
cctgcaggcccagcttaggcgccat

SEQ ID NO: 1956768 - DNA, 25 bp, Homo sapien
ctcatcctgcaggcccagcttaggc

SEQ ID NO: 1956769 - DNA, 25 bp, Homo sapien
atcctgcaggcccagcttaggcgcc

SEQ ID NO: 1956770 - DNA, 25 bp, Homo sapien
tcatcctgcaggcccagcttaggcg

SEQ ID NO: 1956771 - DNA, 25 bp, Homo sapien
ccaaagcagcgtgggattacgaatt

SEQ ID NO: 1956772 - DNA, 25 bp, Homo sapien
ggtcactaggtttcagctgccggta

SEQ ID NO: 1956773 - DNA, 25 bp, Homo sapien
taactgggagttcaaagccagggtc

SEQ ID NO: 1956774 - DNA, 25 bp, Homo sapien
gaatgacccgcctactgactttcag

SEQ ID NO: 1956775 - DNA, 25 bp, Homo sapien
ggatatcagggaacaaaaatgacaa

SEQ ID NO: 1956776 - DNA, 25 bp, Homo sapien
gagtaaagccagataataaacaatg

SEQ ID NO: 1956777 - DNA, 25 bp, Homo sapien
ggaggtggtggtttatttattcagc

SEQ ID NO: 1956778 - DNA, 25 bp, Homo sapien
ctttctagaggctgagagtaaagcc

SEQ ID NO: 1956779 - DNA, 25 bp, Homo sapien
taaacaatgcgaagacaggctgggc

SEQ ID NO: 1956780 - DNA, 25 bp, Homo sapien
gatacgtgtaccattgacagcaccg

SEQ ID NO: 1956781 - DNA, 25 bp, Homo sapien
tgttcagagcagtgaccacatcgtg

SEQ ID NO: 1956782 - DNA, 25 bp, Homo sapien
caccaatattttgggacagggccct

SEQ ID NO: 1956783 - DNA, 25 bp, Homo sapien
agagaatactagtggtgggccagca

SEQ ID NO: 1956784 - DNA, 25 bp, Homo sapien
tccatgtggatagaagatctctctc

SEQ ID NO: 1956785 - DNA, 25 bp, Homo sapien
tagaagatctcccaaagcacaacga

SEQ ID NO: 1956786 - DNA, 25 bp, Homo sapien
acaattcgcagtttcctagtgggac

SEQ ID NO: 1956787 - DNA, 25 bp, Homo sapien
aacaagcaattgctcagccccgact

SEQ ID NO: 1956788 - DNA, 25 bp, Homo sapien
tgcaatcttttctcaacaagcaatt

SEQ ID NO: 1956789 - DNA, 25 bp, Homo sapien
agccccgactccactgtgtgtcccc

SEQ ID NO: 1956790 - DNA, 25 bp, Homo sapien
ggagctcagagaagaatgcaatctt

SEQ ID NO: 1956791 - DNA, 25 bp, Homo sapien
tttagctgcaccaaaatggcaaata

SEQ ID NO: 1956792 - DNA, 25 bp, Homo sapien
atagtcattgccttgagtttgaatc

SEQ ID NO: 1956793 - DNA, 25 bp, Homo sapien
gaagatttgtcatcactttactccc

SEQ ID NO: 1956794 - DNA, 25 bp, Homo sapien
actccccagagatctttagctgcac

SEQ ID NO: 1956795 - DNA, 25 bp, Homo sapien
tgtcaactgtcaactgtaaggtcgg

SEQ ID NO: 1956796 - DNA, 25 bp, Homo sapien
gatgggctcccaatgtggtttacac

SEQ ID NO: 1956797 - DNA, 25 bp, Homo sapien
taaggtcggcaggaatggcactatc

SEQ ID NO: 1956798 - DNA, 25 bp, Homo sapien
tggtttacaccacattggatgacac

SEQ ID NO: 1956799 - DNA, 25 bp, Homo sapien
catgtgtgcaagtccacgtggatgt

SEQ ID NO: 1956800 - DNA, 25 bp, Homo sapien
gctattgattaagccaagatacagg

SEQ ID NO: 1956801 - DNA, 25 bp, Homo sapien
gaatataccagttgactcagtaaga

SEQ ID NO: 1956802 - DNA, 25 bp, Homo sapien
cacatacaggttaacgagtatccct

SEQ ID NO: 1956803 - DNA, 25 bp, Homo sapien
tttcatcgtgatgcatctcccggcg

SEQ ID NO: 1956804 - DNA, 25 bp, Homo sapien
cagaaaacccgtcagaaggaggagc

SEQ ID NO: 1956805 - DNA, 25 bp, Homo sapien
tggaaactaatcaagggcgcgtaca

SEQ ID NO: 1956806 - DNA, 25 bp, Homo sapien
catattagaaggtggaaccgcctgg

SEQ ID NO: 1956807 - DNA, 25 bp, Homo sapien
gagtatacagatctattgagcacaa

SEQ ID NO: 1956808 - DNA, 25 bp, Homo sapien
tgggaagccactggcgtaagtacag

SEQ ID NO: 1956809 - DNA, 25 bp, Homo sapien
gctaatatcttctggaaacgtcctc

SEQ ID NO: 1956810 - DNA, 25 bp, Homo sapien
tcagtgagtcaggtgatgcctgcca

SEQ ID NO: 1956811 - DNA, 25 bp, Homo sapien
gaggcccatcaagaaaccatcgagg

SEQ ID NO: 1956812 - DNA, 25 bp, Homo sapien
tcccagtgagagaagctgtgccacc

SEQ ID NO: 1956813 - DNA, 25 bp, Homo sapien
tcaaaggagaaatggcagtgcggcc

SEQ ID NO: 1956814 - DNA, 25 bp, Homo sapien
cacgtgaggtcaggtacatgcaaca

SEQ ID NO: 1956815 - DNA, 25 bp, Homo sapien
tgcagaccttatgaagtgccacaga

SEQ ID NO: 1956816 - DNA, 25 bp, Homo sapien
tcttgagtcttagtgcacgggctgg

SEQ ID NO: 1956817 - DNA, 25 bp, Homo sapien
gatcttatgaagtgccatctcccgc

SEQ ID NO: 1956818 - DNA, 25 bp, Homo sapien
tacacagtacgatgcaattcagaat

SEQ ID NO: 1956819 - DNA, 25 bp, Homo sapien
catctgtagttatcgcatgagtttc

SEQ ID NO: 1956820 - DNA, 25 bp, Homo sapien
tatgagctgcaggttacataatgag

SEQ ID NO: 1956821 - DNA, 25 bp, Homo sapien
cgtggtttatcatcagtgtccagaa

SEQ ID NO: 1956822 - DNA, 25 bp, Homo sapien
tgaaaataaaaacgtaggagatctc

SEQ ID NO: 1956823 - DNA, 25 bp, Homo sapien
catgtgtttagtccagcctcttgtt

SEQ ID NO: 1956824 - DNA, 25 bp, Homo sapien
gtcctgattaagctgactgctttat

SEQ ID NO: 1956825 - DNA, 25 bp, Homo sapien
ttttgctttgtcctgattaagctga

SEQ ID NO: 1956826 - DNA, 25 bp, Homo sapien
tttgcatgtgtttagtccagcctct

SEQ ID NO: 1956827 - DNA, 25 bp, Homo sapien
tagtccaactgctagaggtacacag

SEQ ID NO: 1956828 - DNA, 25 bp, Homo sapien
tcactatgactagcaaggctatgcc

SEQ ID NO: 1956829 - DNA, 25 bp, Homo sapien
gggacacaggataaccctcatggat

SEQ ID NO: 1956830 - DNA, 25 bp, Homo sapien
acttagcttagtggatacttggcac

SEQ ID NO: 1956831 - DNA, 25 bp, Homo sapien
taatcaaagtcacagaaattggacc

SEQ ID NO: 1956832 - DNA, 25 bp, Homo sapien
tcccaaaatcataatcaaagtcaca

SEQ ID NO: 1956833 - DNA, 25 bp, Homo sapien
cagaaattggaccaccaaggccatc

SEQ ID NO: 1956834 - DNA, 25 bp, Homo sapien
aagtcacagaaattggaccaccaag

SEQ ID NO: 1956835 - DNA, 25 bp, Homo sapien
ttcaggaggaggcacagggccctgc

SEQ ID NO: 1956836 - DNA, 25 bp, Homo sapien
ctccaacttcaggaggaggcacagg

SEQ ID NO: 1956837 - DNA, 25 bp, Homo sapien
caacttcaggaggaggcacagggcc

SEQ ID NO: 1956838 - DNA, 25 bp, Homo sapien
cttcaggaggaggcacagggccctg

SEQ ID NO: 1956839 - DNA, 25 bp, Homo sapien
tgtccccaaaccaggcagtgggttc

SEQ ID NO: 1956840 - DNA, 25 bp, Homo sapien
gctgctgtccccaaaccaggcagtg

SEQ ID NO: 1956841 - DNA, 25 bp, Homo sapien
ctccaccctcgagggctttgcgttt

SEQ ID NO: 1956842 - DNA, 25 bp, Homo sapien
tcctcgctgctgtccccaaaccagg

SEQ ID NO: 1956843 - DNA, 25 bp, Homo sapien
tccggtccatcaatgtagccctacg

SEQ ID NO: 1956844 - DNA, 25 bp, Homo sapien
gcagaaatcctacaatccggtccat

SEQ ID NO: 1956845 - DNA, 25 bp, Homo sapien
tacaatccggtccatcaatgtagcc

SEQ ID NO: 1956846 - DNA, 25 bp, Homo sapien
tgtagccctacgtctaggagactgt

SEQ ID NO: 1956847 - DNA, 25 bp, Homo sapien
cgctcagcaggcagattccaaaggc

SEQ ID NO: 1956848 - DNA, 25 bp, Homo sapien
tccatggagaactgcgcaaagcaag

SEQ ID NO: 1956849 - DNA, 25 bp, Homo sapien
gcttgtgctctcaggaacgactctc

SEQ ID NO: 1956850 - DNA, 25 bp, Homo sapien
caagttgccaagaaagcccgctggc

SEQ ID NO: 1956851 - DNA, 25 bp, Homo sapien
ctagtcctcagcttcgtagtagcca

SEQ ID NO: 1956852 - DNA, 25 bp, Homo sapien
tagtcctcagcttcgtagtagccat

SEQ ID NO: 1956853 - DNA, 25 bp, Homo sapien
tttgcctggatatcagaagcagcat

SEQ ID NO: 1956854 - DNA, 25 bp, Homo sapien
tcattctgttctgagaccgtgagaa

SEQ ID NO: 1956855 - DNA, 25 bp, Homo sapien
agcagcatttgtgcgtgggtccagc

SEQ ID NO: 1956856 - DNA, 25 bp, Homo sapien
caggtgttccatgccgtccttggct

SEQ ID NO: 1956857 - DNA, 25 bp, Homo sapien
agagacgcgagggagccatgcagac

SEQ ID NO: 1956858 - DNA, 25 bp, Homo sapien
acgcgagggagccatgcagacaggg

SEQ ID NO: 1956859 - DNA, 25 bp, Homo sapien
agccggactcggagacgtccacctg

SEQ ID NO: 1956860 - DNA, 25 bp, Homo sapien
ctcggagacgtccacctggtggaga

SEQ ID NO: 1956861 - DNA, 25 bp, Homo sapien
gggccagagtttccacaccgtctag

SEQ ID NO: 1956862 - DNA, 25 bp, Homo sapien
gcattagcaggtcggcattagcagc

SEQ ID NO: 1956863 - DNA, 25 bp, Homo sapien
tacagtgttccgtggctgatggcat

SEQ ID NO: 1956864 - DNA, 25 bp, Homo sapien
gggtggctctcaggccgccaagaaa

SEQ ID NO: 1956865 - DNA, 25 bp, Homo sapien
ctcgacttgcagtagtgcacacggt

SEQ ID NO: 1956866 - DNA, 25 bp, Homo sapien
ccctcgacttgcagtagtgcacacg

SEQ ID NO: 1956867 - DNA, 25 bp, Homo sapien
tgccagactccctcgacttgcagta

SEQ ID NO: 1956868 - DNA, 25 bp, Homo sapien
gactccctcgacttgcagtagtgca

SEQ ID NO: 1956869 - DNA, 25 bp, Homo sapien
gtccctactagctgccccaccgtgt

SEQ ID NO: 1956870 - DNA, 25 bp, Homo sapien
cccggatttccacgagctttccaag

SEQ ID NO: 1956871 - DNA, 25 bp, Homo sapien
tccacgagctttccaagggcgtcct

SEQ ID NO: 1956872 - DNA, 25 bp, Homo sapien
cccaccgtgtcagtctcctcactgc

SEQ ID NO: 1956873 - DNA, 25 bp, Homo sapien
ggacaatgtagccttgtgaaggaca

SEQ ID NO: 1956874 - DNA, 25 bp, Homo sapien
ccaggacaatgtagccttgtgaagg

SEQ ID NO: 1956875 - DNA, 25 bp, Homo sapien
tccaggacaatgtagccttgtgaag

SEQ ID NO: 1956876 - DNA, 25 bp, Homo sapien
caggacaatgtagccttgtgaagga

SEQ ID NO: 1956877 - DNA, 25 bp, Homo sapien
cagagacgtcctcatcctgttggaa

SEQ ID NO: 1956878 - DNA, 25 bp, Homo sapien
gaattgaccccttgcagggaatgag

SEQ ID NO: 1956879 - DNA, 25 bp, Homo sapien
ctcccataggcctggtggtcagaga

SEQ ID NO: 1956880 - DNA, 25 bp, Homo sapien
gagaggctggatcaagaatctccac

SEQ ID NO: 1956881 - DNA, 25 bp, Homo sapien
ctccatagagttgttaatagaagaa

SEQ ID NO: 1956882 - DNA, 25 bp, Homo sapien
ccagctccatagagttgttaataga

SEQ ID NO: 1956883 - DNA, 25 bp, Homo sapien
ctttcaccagctccatagagttgtt

SEQ ID NO: 1956884 - DNA, 25 bp, Homo sapien
caccagctccatagagttgttaata

SEQ ID NO: 1956885 - DNA, 25 bp, Homo sapien
catccaggtctatcttgttcctttg

SEQ ID NO: 1956886 - DNA, 25 bp, Homo sapien
atcatccaggtctatcttgttcctt

SEQ ID NO: 1956887 - DNA, 25 bp, Homo sapien
gcacaagttaacgaagagcaggccc

SEQ ID NO: 1956888 - DNA, 25 bp, Homo sapien
gccgcatgcacaagttaacgaagag

SEQ ID NO: 1956889 - DNA, 25 bp, Homo sapien
ccatcggtaaactctgaattttgct

SEQ ID NO: 1956890 - DNA, 25 bp, Homo sapien
atcggtaaactctgaattttgcttg

SEQ ID NO: 1956891 - DNA, 25 bp, Homo sapien
ctgaattttgcttgcctcgaagaat

SEQ ID NO: 1956892 - DNA, 25 bp, Homo sapien
ggtaaactctgaattttgcttgcct

SEQ ID NO: 1956893 - DNA, 25 bp, Homo sapien
cctggttctcgatgctgatactgaa

SEQ ID NO: 1956894 - DNA, 25 bp, Homo sapien
atggggaccggtggtgggccaagca

SEQ ID NO: 1956895 - DNA, 25 bp, Homo sapien
tagtgtccagccagcttctaggaac

SEQ ID NO: 1956896 - DNA, 25 bp, Homo sapien
ctgatactgaacatgcagtaaaacc

SEQ ID NO: 1956897 - DNA, 25 bp, Homo sapien
tgagctcagcacatccagtgctttg

SEQ ID NO: 1956898 - DNA, 25 bp, Homo sapien
cagtgctttgctcaaggcagcaggc

SEQ ID NO: 1956899 - DNA, 25 bp, Homo sapien
tgtccctgagctcagcacatccagt

SEQ ID NO: 1956900 - DNA, 25 bp, Homo sapien
ctgtgttgtccctgagctcagcaca

SEQ ID NO: 1956901 - DNA, 25 bp, Homo sapien
ggcaatggacctgcccttctgcagc

SEQ ID NO: 1956902 - DNA, 25 bp, Homo sapien
cagggcaatggacctgcccttctgc

SEQ ID NO: 1956903 - DNA, 25 bp, Homo sapien
tggatcagggcaatggacctgccct

SEQ ID NO: 1956904 - DNA, 25 bp, Homo sapien
gatcagggcaatggacctgcccttc

SEQ ID NO: 1956905 - DNA, 25 bp, Homo sapien
gacatcagtatgttctaggttctgt

SEQ ID NO: 1956906 - DNA, 25 bp, Homo sapien
gaatagggtggacagcccatattca

SEQ ID NO: 1956907 - DNA, 25 bp, Homo sapien
gttgctgtggcaattagcactaagt

SEQ ID NO: 1956908 - DNA, 25 bp, Homo sapien
gggcttcactaataactggacgaat

SEQ ID NO: 1956909 - DNA, 25 bp, Homo sapien
gcatctttcgggacctgggccttgc

SEQ ID NO: 1956910 - DNA, 25 bp, Homo sapien
tgtgccaaagttgccaatacactgt

SEQ ID NO: 1956911 - DNA, 25 bp, Homo sapien
ggcaaacattttttcaccgtcagtg

SEQ ID NO: 1956912 - DNA, 25 bp, Homo sapien
tggctgccacgacaaaaagtcactg

SEQ ID NO: 1956913 - DNA, 25 bp, Homo sapien
gctgtccacgatgtctgtggccgcg

SEQ ID NO: 1956914 - DNA, 25 bp, Homo sapien
gctgcggcgtcgtactggctgtcca

SEQ ID NO: 1956915 - DNA, 25 bp, Homo sapien
catgaggctatgaggcggccttggg

SEQ ID NO: 1956916 - DNA, 25 bp, Homo sapien
tcacatggaaggtggcgacacaggt

SEQ ID NO: 1956917 - DNA, 25 bp, Homo sapien
tcggagtgactgtgtaatatgacag

SEQ ID NO: 1956918 - DNA, 25 bp, Homo sapien
caccagaaatcccattcggagtgac

SEQ ID NO: 1956919 - DNA, 25 bp, Homo sapien
caggccagctaaggatggaaaaaca

SEQ ID NO: 1956920 - DNA, 25 bp, Homo sapien
ctgcaggccagctaaggatggaaaa

SEQ ID NO: 1956921 - DNA, 25 bp, Homo sapien
ggtaggtgggctggcattgtggctc

SEQ ID NO: 1956922 - DNA, 25 bp, Homo sapien
ggattgcagcatggataaacatgca

SEQ ID NO: 1956923 - DNA, 25 bp, Homo sapien
ggataaacatgcaggtgagttgtca

SEQ ID NO: 1956924 - DNA, 25 bp, Homo sapien
gctggaccaattgtcatgggattgc

SEQ ID NO: 1956925 - DNA, 25 bp, Homo sapien
gagaattgttccgatgagcataggg

SEQ ID NO: 1956926 - DNA, 25 bp, Homo sapien
aggaccggtggctcctcagggttgg

SEQ ID NO: 1956927 - DNA, 25 bp, Homo sapien
ttggagaattgttccgatgagcata

SEQ ID NO: 1956928 - DNA, 25 bp, Homo sapien
ggtgaggaccggtggctcctcaggg

SEQ ID NO: 1956929 - DNA, 25 bp, Homo sapien
ggcacctccaaactgaggatgagga

SEQ ID NO: 1956930 - DNA, 25 bp, Homo sapien
gatttgcaggtggacacagggtgct

SEQ ID NO: 1956931 - DNA, 25 bp, Homo sapien
actgaggatgaggatttgcaggtgg

SEQ ID NO: 1956932 - DNA, 25 bp, Homo sapien
gagggagagggcacctccaaactga

SEQ ID NO: 1956933 - DNA, 25 bp, Homo sapien
gttgctggctgtctccgggttcctc

SEQ ID NO: 1956934 - DNA, 25 bp, Homo sapien
ttgcaaatggattgtacttaatttt

SEQ ID NO: 1956935 - DNA, 25 bp, Homo sapien
cttttgcaaatggattgtacttaat

SEQ ID NO: 1956936 - DNA, 25 bp, Homo sapien
gcttttgcaaatggattgtacttaa

SEQ ID NO: 1956937 - DNA, 25 bp, Homo sapien
aagcttttgcaaatggattgtactt

SEQ ID NO: 1956938 - DNA, 25 bp, Homo sapien
gctggtgatcatgcgctgtggaccc

SEQ ID NO: 1956939 - DNA, 25 bp, Homo sapien
tacttatgcaaggagttcagcatga

SEQ ID NO: 1956940 - DNA, 25 bp, Homo sapien
caactctcactatgtggattcgagg

SEQ ID NO: 1956941 - DNA, 25 bp, Homo sapien
aagcagtggctggtgatcatgcgct

SEQ ID NO: 1956942 - DNA, 25 bp, Homo sapien
ggtccaggccagacacgttcacctt

SEQ ID NO: 1956943 - DNA, 25 bp, Homo sapien
ttccagcggtggttgtccgccgcca

SEQ ID NO: 1956944 - DNA, 25 bp, Homo sapien
tggatgtagacgcagctgggcgcct

SEQ ID NO: 1956945 - DNA, 25 bp, Homo sapien
ccctccgttgagcttgttggtgagc

SEQ ID NO: 1956946 - DNA, 25 bp, Homo sapien
aggaccccgacactgaccaggtagg

SEQ ID NO: 1956947 - DNA, 25 bp, Homo sapien
acactgaccaggtaggccggaggca

SEQ ID NO: 1956948 - DNA, 25 bp, Homo sapien
caggaggaccccgacactgaccagg

SEQ ID NO: 1956949 - DNA, 25 bp, Homo sapien
cccgacactgaccaggtaggccgga

SEQ ID NO: 1956950 - DNA, 25 bp, Homo sapien
agcaggtggtccactcggtactgca

SEQ ID NO: 1956951 - DNA, 25 bp, Homo sapien
tgcagctcattctccacggcgctca

SEQ ID NO: 1956952 - DNA, 25 bp, Homo sapien
ggtactgcaggctctttcccgcgct

SEQ ID NO: 1956953 - DNA, 25 bp, Homo sapien
ttgaagcgcagccacagctcgctct

SEQ ID NO: 1956954 - DNA, 25 bp, Homo sapien
cagactcgctacctgagatccacct

SEQ ID NO: 1956955 - DNA, 25 bp, Homo sapien
gaagcccagactcgctacctgagat

SEQ ID NO: 1956956 - DNA, 25 bp, Homo sapien
ccgaagcccagactcgctacctgag

SEQ ID NO: 1956957 - DNA, 25 bp, Homo sapien
ccccgaagcccagactcgctacctg

SEQ ID NO: 1956958 - DNA, 25 bp, Homo sapien
gccccttggaccgagacctgcgacg

SEQ ID NO: 1956959 - DNA, 25 bp, Homo sapien
cttggaccgagacctgcgacggctc

SEQ ID NO: 1956960 - DNA, 25 bp, Homo sapien
cccttggaccgagacctgcgacggc

SEQ ID NO: 1956961 - DNA, 25 bp, Homo sapien
gggccccttggaccgagacctgcga

SEQ ID NO: 1956962 - DNA, 25 bp, Homo sapien
ggctctactagtgtaggtctctggg

SEQ ID NO: 1956963 - DNA, 25 bp, Homo sapien
tggggagaagttattccacttgaac

SEQ ID NO: 1956964 - DNA, 25 bp, Homo sapien
tctctggggaccgaaattcagtgcc

SEQ ID NO: 1956965 - DNA, 25 bp, Homo sapien
ttgaactccccaaggctctactagt

SEQ ID NO: 1956966 - DNA, 25 bp, Homo sapien
tcccagggacgagcgcatttggccg

SEQ ID NO: 1956967 - DNA, 25 bp, Homo sapien
cagtagtagtgctgttctcgcgcct

SEQ ID NO: 1956968 - DNA, 25 bp, Homo sapien
tacgcacacccaggatcgtggatca

SEQ ID NO: 1956969 - DNA, 25 bp, Homo sapien
tccagtctggcagtttccggtgcac

SEQ ID NO: 1956970 - DNA, 25 bp, Homo sapien
gaaaaggaaggtccgcgcgcagaga

SEQ ID NO: 1956971 - DNA, 25 bp, Homo sapien
ggaaaaggaaggtccgcgcgcagag

SEQ ID NO: 1956972 - DNA, 25 bp, Homo sapien
aaatggacggaaataagcaaaagca

SEQ ID NO: 1956973 - DNA, 25 bp, Homo sapien
gagagggaaatggacggaaataagc

SEQ ID NO: 1956974 - DNA, 25 bp, Homo sapien
gcagtgcatgacagtttacagccaa

SEQ ID NO: 1956975 - DNA, 25 bp, Homo sapien
gaagcattgaagagtacgacccagg

SEQ ID NO: 1956976 - DNA, 25 bp, Homo sapien
gaagtcaccgactttggccagcact

SEQ ID NO: 1956977 - DNA, 25 bp, Homo sapien
aattgaaccacccaagtcggaggag

SEQ ID NO: 1956978 - DNA, 25 bp, Homo sapien
tcttggcgatagtttcagtgggaat

SEQ ID NO: 1956979 - DNA, 25 bp, Homo sapien
tcctcggtagagaagggtagcttga

SEQ ID NO: 1956980 - DNA, 25 bp, Homo sapien
ttaaaactctagtgcttcagctcct

SEQ ID NO: 1956981 - DNA, 25 bp, Homo sapien
ccttgtggatgataagtttcttggc

SEQ ID NO: 1956982 - DNA, 25 bp, Homo sapien
tggtaatccttatttcctccacgtc

SEQ ID NO: 1956983 - DNA, 25 bp, Homo sapien
ctgcttcttagaggccacagttctc

SEQ ID NO: 1956984 - DNA, 25 bp, Homo sapien
ccttgtcgtcttattccatggcctt

SEQ ID NO: 1956985 - DNA, 25 bp, Homo sapien
tttgctccttaatgtcctgtttctg

SEQ ID NO: 1956986 - DNA, 25 bp, Homo sapien
tcatcaccaggtaatagcactggag

SEQ ID NO: 1956987 - DNA, 25 bp, Homo sapien
tagagccttcactggtcatcaccag

SEQ ID NO: 1956988 - DNA, 25 bp, Homo sapien
taaggagcataaacctgggagccag

SEQ ID NO: 1956989 - DNA, 25 bp, Homo sapien
taaaccagcgggatgtaactcagat

SEQ ID NO: 1956990 - DNA, 25 bp, Homo sapien
tcatgtgagctctatggctatgagc

SEQ ID NO: 1956991 - DNA, 25 bp, Homo sapien
ctgagttgaattcatgtgagctcta

SEQ ID NO: 1956992 - DNA, 25 bp, Homo sapien
ggcccttattactgtaataagccat

SEQ ID NO: 1956993 - DNA, 25 bp, Homo sapien
gctatgagctctatggcccttatta

SEQ ID NO: 1956994 - DNA, 25 bp, Homo sapien
tactgcttaaagtacttgtgtttgc

SEQ ID NO: 1956995 - DNA, 25 bp, Homo sapien
tcaatgcccaggaattgtgcactac

SEQ ID NO: 1956996 - DNA, 25 bp, Homo sapien
tatcttcaggtgcagtcaatgccca

SEQ ID NO: 1956997 - DNA, 25 bp, Homo sapien
tcgttgtaagaatggttttttgcgc

SEQ ID NO: 1956998 - DNA, 25 bp, Homo sapien
ctaggatccccagcatcccctgcat

SEQ ID NO: 1956999 - DNA, 25 bp, Homo sapien
ctggcacaagaatcggcattccatt

SEQ ID NO: 1957000 - DNA, 25 bp, Homo sapien
caagaatcggcattccattgggagg

SEQ ID NO: 1957001 - DNA, 25 bp, Homo sapien
caccccatgctaggatccccagcat

SEQ ID NO: 1957002 - DNA, 25 bp, Homo sapien
agtgttccgaggaggtgcgtctttc

SEQ ID NO: 1957003 - DNA, 25 bp, Homo sapien
gaggaggtgcgtctttccttgtaaa

SEQ ID NO: 1957004 - DNA, 25 bp, Homo sapien
tctttccttgtaaagctggcccata

SEQ ID NO: 1957005 - DNA, 25 bp, Homo sapien
ccttgtaaagctggcccatagctgc

SEQ ID NO: 1957006 - DNA, 25 bp, Homo sapien
gagatctgacttgacggcatccctc

SEQ ID NO: 1957007 - DNA, 25 bp, Homo sapien
gctgaagccctgcatgagatctgac

SEQ ID NO: 1957008 - DNA, 25 bp, Homo sapien
gctgggcttcgagccactccaggaa

SEQ ID NO: 1957009 - DNA, 25 bp, Homo sapien
cagctgaactccctctcagcaagag

SEQ ID NO: 1957010 - DNA, 25 bp, Homo sapien
agaataaaactgtgccgggatccag

SEQ ID NO: 1957011 - DNA, 25 bp, Homo sapien
aagaataaaactgtgccgggatcca

SEQ ID NO: 1957012 - DNA, 25 bp, Homo sapien
gaataaaactgtgccgggatccagg

SEQ ID NO: 1957013 - DNA, 25 bp, Homo sapien
caaccaagctcgcatccctctccca

SEQ ID NO: 1957014 - DNA, 25 bp, Homo sapien
cacgttctcacaaatacgcctgtag

SEQ ID NO: 1957015 - DNA, 25 bp, Homo sapien
ctactttgggcatgagctgtgctca

SEQ ID NO: 1957016 - DNA, 25 bp, Homo sapien
acgcctgtagatggtgctgtactga

SEQ ID NO: 1957017 - DNA, 25 bp, Homo sapien
gaccacagtcagaaaacttgtcctg

SEQ ID NO: 1957018 - DNA, 25 bp, Homo sapien
cacaaagggacttagcaagtttgtt

SEQ ID NO: 1957019 - DNA, 25 bp, Homo sapien
ataaggaaatcgtgttccttcctcg

SEQ ID NO: 1957020 - DNA, 25 bp, Homo sapien
tccttcctcgtcacaaagggactta

SEQ ID NO: 1957021 - DNA, 25 bp, Homo sapien
cacaataaggaaatcgtgttccttc

SEQ ID NO: 1957022 - DNA, 25 bp, Homo sapien
tttgaagatattccagtcagtagag

SEQ ID NO: 1957023 - DNA, 25 bp, Homo sapien
aaaggaatagaatttctgggtctga

SEQ ID NO: 1957024 - DNA, 25 bp, Homo sapien
ctgggtctgaaaggatttgtatttg

SEQ ID NO: 1957025 - DNA, 25 bp, Homo sapien
gtatttgaagatattccagtcagta

SEQ ID NO: 1957026 - DNA, 25 bp, Homo sapien
gttgagcattctgcagacaattgtt

SEQ ID NO: 1957027 - DNA, 25 bp, Homo sapien
tctgcagacaattgtttaaagtctg

SEQ ID NO: 1957028 - DNA, 25 bp, Homo sapien
acaattgtttaaagtctgcagctgc

SEQ ID NO: 1957029 - DNA, 25 bp, Homo sapien
atgttgagcattctgcagacaattg

SEQ ID NO: 1957030 - DNA, 25 bp, Homo sapien
tttaacacggttgagttcagcctcc

SEQ ID NO: 1957031 - DNA, 25 bp, Homo sapien
cggttgagttcagcctccagcctga

SEQ ID NO: 1957032 - DNA, 25 bp, Homo sapien
acacggttgagttcagcctccagcc

SEQ ID NO: 1957033 - DNA, 25 bp, Homo sapien
taacacggttgagttcagcctccag

SEQ ID NO: 1957034 - DNA, 25 bp, Homo sapien
ggtccataagaggtgctcctgagca

SEQ ID NO: 1957035 - DNA, 25 bp, Homo sapien
tccataagaggtgctcctgagcagt

SEQ ID NO: 1957036 - DNA, 25 bp, Homo sapien
gggtccataagaggtgctcctgagc

SEQ ID NO: 1957037 - DNA, 25 bp, Homo sapien
actgggtccataagaggtgctcctg

SEQ ID NO: 1957038 - DNA, 25 bp, Homo sapien
gcttagatttggtgctgaggtagcc

SEQ ID NO: 1957039 - DNA, 25 bp, Homo sapien
ttagatttggtgctgaggtagccag

SEQ ID NO: 1957040 - DNA, 25 bp, Homo sapien
ggtgctgaggtagccagggtcagcc

SEQ ID NO: 1957041 - DNA, 25 bp, Homo sapien
cacaggcttagatttggtgctgagg

SEQ ID NO: 1957042 - DNA, 25 bp, Homo sapien
gcggctgaagtcacattaacttcaa

SEQ ID NO: 1957043 - DNA, 25 bp, Homo sapien
cagcggctgaagtcacattaacttc

SEQ ID NO: 1957044 - DNA, 25 bp, Homo sapien
ggctgaagtcacattaacttcaatc

SEQ ID NO: 1957045 - DNA, 25 bp, Homo sapien
acagcggctgaagtcacattaactt

SEQ ID NO: 1957046 - DNA, 25 bp, Homo sapien
agggttcgctgtttgtaaccatctt

SEQ ID NO: 1957047 - DNA, 25 bp, Homo sapien
tagggttcgctgtttgtaaccatct

SEQ ID NO: 1957048 - DNA, 25 bp, Homo sapien
ctagggttcgctgtttgtaaccatc

SEQ ID NO: 1957049 - DNA, 25 bp, Homo sapien
ggctactgtgaatgcgtagctcaga

SEQ ID NO: 1957050 - DNA, 25 bp, Homo sapien
tccctgacccgatggtgtttcctgg

SEQ ID NO: 1957051 - DNA, 25 bp, Homo sapien
caacgtaggaggtagagtcttcctc

SEQ ID NO: 1957052 - DNA, 25 bp, Homo sapien
ggcaacgtaggaggtagagtcttcc

SEQ ID NO: 1957053 - DNA, 25 bp, Homo sapien
taagtggatgaacgaggccctttgt

SEQ ID NO: 1957054 - DNA, 25 bp, Homo sapien
gaagcgggcgctcgttgtcctttaa

SEQ ID NO: 1957055 - DNA, 25 bp, Homo sapien
tgacgacaccgcagatgaggagagc

SEQ ID NO: 1957056 - DNA, 25 bp, Homo sapien
gccacaaagggcagcgagtgtctcg

SEQ ID NO: 1957057 - DNA, 25 bp, Homo sapien
gacgagatgtgacggtgacagacga

SEQ ID NO: 1957058 - DNA, 25 bp, Homo sapien
cagggctgcaccaagggacgagatg

SEQ ID NO: 1957059 - DNA, 25 bp, Homo sapien
gagatgtgacggtgacagacgatgg

SEQ ID NO: 1957060 - DNA, 25 bp, Homo sapien
ctgcaccaagggacgagatgtgacg

SEQ ID NO: 1957061 - DNA, 25 bp, Homo sapien
atgaagcggccccacggcggtccct

SEQ ID NO: 1957062 - DNA, 25 bp, Homo sapien
agatgaagcggccccacggcggtcc

SEQ ID NO: 1957063 - DNA, 25 bp, Homo sapien
ggcctcggcacctgctgtgctctgt

SEQ ID NO: 1957064 - DNA, 25 bp, Homo sapien
cgagtgccaggcacgggcctcggca

SEQ ID NO: 1957065 - DNA, 25 bp, Homo sapien
aattaggctctcgtttgcaaaaggg

SEQ ID NO: 1957066 - DNA, 25 bp, Homo sapien
acaaagcagttgtgtccagtcagtg

SEQ ID NO: 1957067 - DNA, 25 bp, Homo sapien
gctgtgggaagctgatctcttgcac

SEQ ID NO: 1957068 - DNA, 25 bp, Homo sapien
cagtgatgaatgtgagacctcggaa

SEQ ID NO: 1957069 - DNA, 25 bp, Homo sapien
ccagttccagcaaggatgtcgctga

SEQ ID NO: 1957070 - DNA, 25 bp, Homo sapien
ggatggtccagttccagcaaggatg

SEQ ID NO: 1957071 - DNA, 25 bp, Homo sapien
tccacaccacctccataaggtggga

SEQ ID NO: 1957072 - DNA, 25 bp, Homo sapien
caaggatgtcgctgataatgacccc

SEQ ID NO: 1957073 - DNA, 25 bp, Homo sapien
caaaatgaagcagctgacagggacg

SEQ ID NO: 1957074 - DNA, 25 bp, Homo sapien
cagaaagtcggtccctctaggatgc

SEQ ID NO: 1957075 - DNA, 25 bp, Homo sapien
gcactaagtgcaagacgagaccaag

SEQ ID NO: 1957076 - DNA, 25 bp, Homo sapien
gctgacctagctcccaatgaattaa

SEQ ID NO: 1957077 - DNA, 25 bp, Homo sapien
gaaaggatatggttacgaaacagcg

SEQ ID NO: 1957078 - DNA, 25 bp, Homo sapien
gaaatatgtagaaatcagcctccag

SEQ ID NO: 1957079 - DNA, 25 bp, Homo sapien
gaaacagcggaggagctttactctc

SEQ ID NO: 1957080 - DNA, 25 bp, Homo sapien
aaaatgtaatcagccgagcggtttc

SEQ ID NO: 1957081 - DNA, 25 bp, Homo sapien
atgtctaataccctcaacatttttc

SEQ ID NO: 1957082 - DNA, 25 bp, Homo sapien
gtctaataccctcaacatttttctg

SEQ ID NO: 1957083 - DNA, 25 bp, Homo sapien
ccttccgctttggagactggaaatt

SEQ ID NO: 1957084 - DNA, 25 bp, Homo sapien
tggaaattcggttaactgagtttca

SEQ ID NO: 1957085 - DNA, 25 bp, Homo sapien
gagaaaacaaaatcacgaatgtagg

SEQ ID NO: 1957086 - DNA, 25 bp, Homo sapien
atcacgaatgtaggaccgggtccca

SEQ ID NO: 1957087 - DNA, 25 bp, Homo sapien
caaaatcacgaatgtaggaccgggt

SEQ ID NO: 1957088 - DNA, 25 bp, Homo sapien
aaacaaaatcacgaatgtaggaccg

SEQ ID NO: 1957089 - DNA, 25 bp, Homo sapien
catcgcccaccgcactgtccagggt

SEQ ID NO: 1957090 - DNA, 25 bp, Homo sapien
acaccacggggcgtgcagatgtagc

SEQ ID NO: 1957091 - DNA, 25 bp, Homo sapien
tgacaccacggggcgtgcagatgta

SEQ ID NO: 1957092 - DNA, 25 bp, Homo sapien
gacaccacggggcgtgcagatgtag

SEQ ID NO: 1957093 - DNA, 25 bp, Homo sapien
gtgacaccacggggcgtgcagatgt

SEQ ID NO: 1957094 - DNA, 25 bp, Homo sapien
caccggtgtgaacgagaaaggcccg

SEQ ID NO: 1957095 - DNA, 25 bp, Homo sapien
cactggtgtcccgaaagtgggcgct

SEQ ID NO: 1957096 - DNA, 25 bp, Homo sapien
tgcatggatgctcggcgatgccaag

SEQ ID NO: 1957097 - DNA, 25 bp, Homo sapien
taattccccacgaactgcatggatg

SEQ ID NO: 1957098 - DNA, 25 bp, Homo sapien
gagtggcgcgtgcaggaagtgaggt

SEQ ID NO: 1957099 - DNA, 25 bp, Homo sapien
cggagtggcgcgtgcaggaagtgag

SEQ ID NO: 1957100 - DNA, 25 bp, Homo sapien
aggcggagtggcgcgtgcaggaagt

SEQ ID NO: 1957101 - DNA, 25 bp, Homo sapien
ctaggcggagtggcgcgtgcaggaa

SEQ ID NO: 1957102 - DNA, 25 bp, Homo sapien
tgctcaggtgccgccgtgagtccag

SEQ ID NO: 1957103 - DNA, 25 bp, Homo sapien
acagcgtgctcaggtgccgccgtga

SEQ ID NO: 1957104 - DNA, 25 bp, Homo sapien
tcacagcgtgctcaggtgccgccgt

SEQ ID NO: 1957105 - DNA, 25 bp, Homo sapien
aggtgccgccgtgagtccagggccc

SEQ ID NO: 1957106 - DNA, 25 bp, Homo sapien
cacgccgcgcagccactccgtgcac

SEQ ID NO: 1957107 - DNA, 25 bp, Homo sapien
ccacgccgcgcagccactccgtgca

SEQ ID NO: 1957108 - DNA, 25 bp, Homo sapien
tccacgccgcgcagccactccgtgc

SEQ ID NO: 1957109 - DNA, 25 bp, Homo sapien
ccgctcgttgagcagcgacaccttg

SEQ ID NO: 1957110 - DNA, 25 bp, Homo sapien
gtactccacgtcgtcgtacctgtgc

SEQ ID NO: 1957111 - DNA, 25 bp, Homo sapien
gtacctgtgccgctcgttgagcagc

SEQ ID NO: 1957112 - DNA, 25 bp, Homo sapien
tcgtactccacgtcgtcgtacctgt

SEQ ID NO: 1957113 - DNA, 25 bp, Homo sapien
cccgggccgcgggctgagctgggga

SEQ ID NO: 1957114 - DNA, 25 bp, Homo sapien
gcagggccccgggccgcgggctgag

SEQ ID NO: 1957115 - DNA, 25 bp, Homo sapien
agggccccgggccgcgggctgagct

SEQ ID NO: 1957116 - DNA, 25 bp, Homo sapien
gccccgggccgcgggctgagctggg

SEQ ID NO: 1957117 - DNA, 25 bp, Homo sapien
cgccgtgcagcagctgggcgccggg

SEQ ID NO: 1957118 - DNA, 25 bp, Homo sapien
tgcttctccagatgacgcttctgga

SEQ ID NO: 1957119 - DNA, 25 bp, Homo sapien
cccgcggccctagccgggagacacg

SEQ ID NO: 1957120 - DNA, 25 bp, Homo sapien
gagtaggcgcctgggttcggccgag

SEQ ID NO: 1957121 - DNA, 25 bp, Homo sapien
tcgccgcataggtggtcctcgctgg

SEQ ID NO: 1957122 - DNA, 25 bp, Homo sapien
tccccgccgaggtcgccgcataggt

SEQ ID NO: 1957123 - DNA, 25 bp, Homo sapien
agcgcgcagcggagtctggacaagg

SEQ ID NO: 1957124 - DNA, 25 bp, Homo sapien
agattcaggcagaagcgcgcagcgg

SEQ ID NO: 1957125 - DNA, 25 bp, Homo sapien
cctcttgagcgtggcggagggccag

SEQ ID NO: 1957126 - DNA, 25 bp, Homo sapien
cggcggcctcttgagcgtggcggag

SEQ ID NO: 1957127 - DNA, 25 bp, Homo sapien
ggcggctgcgtcctgtccaggccgg

SEQ ID NO: 1957128 - DNA, 25 bp, Homo sapien
cgggccggcggcctcttgagcgtgg

SEQ ID NO: 1957129 - DNA, 25 bp, Homo sapien
gtaactggcgcgcggcttgggcccc

SEQ ID NO: 1957130 - DNA, 25 bp, Homo sapien
cagggcctccggggtaactggcgcg

SEQ ID NO: 1957131 - DNA, 25 bp, Homo sapien
tccggggtaactggcgcgcggcttg

SEQ ID NO: 1957132 - DNA, 25 bp, Homo sapien
gcggcggcatgggcgggaagggcat

SEQ ID NO: 1957133 - DNA, 25 bp, Homo sapien
tgcagccgagccgccggatcctcag

SEQ ID NO: 1957134 - DNA, 25 bp, Homo sapien
actgtgcgcggagcgggtccccgca

SEQ ID NO: 1957135 - DNA, 25 bp, Homo sapien
ctcagccactgtgcgcggagcgggt

SEQ ID NO: 1957136 - DNA, 25 bp, Homo sapien
gagaggcgggcgctcagccactgtg

SEQ ID NO: 1957137 - DNA, 25 bp, Homo sapien
gggcgctcagccactgtgcgcggag

SEQ ID NO: 1957138 - DNA, 25 bp, Homo sapien
ggactggaccctgcaggaaccgcct

SEQ ID NO: 1957139 - DNA, 25 bp, Homo sapien
tcacatcccagcgaccaaacccggg

SEQ ID NO: 1957140 - DNA, 25 bp, Homo sapien
tcccgccgtccgactgtgggcgagt

SEQ ID NO: 1957141 - DNA, 25 bp, Homo sapien
gggactcaaagagaggcgctcccac

SEQ ID NO: 1957142 - DNA, 25 bp, Homo sapien
gggtgacaggtttgggccctgtcat

SEQ ID NO: 1957143 - DNA, 25 bp, Homo sapien
ggggtgacaggtttgggccctgtca

SEQ ID NO: 1957144 - DNA, 25 bp, Homo sapien
cctgcagagtacagtgcgaattgaa

SEQ ID NO: 1957145 - DNA, 25 bp, Homo sapien
tttcctggacactcgtgcggccttc

SEQ ID NO: 1957146 - DNA, 25 bp, Homo sapien
gccagttgaatctgaatgcgaagaa

SEQ ID NO: 1957147 - DNA, 25 bp, Homo sapien
tctgaagatctatcacgagccatgg

SEQ ID NO: 1957148 - DNA, 25 bp, Homo sapien
caaggatgggtttatttcaaaattg

SEQ ID NO: 1957149 - DNA, 25 bp, Homo sapien
tagcttaaaataagtttcacattta

SEQ ID NO: 1957150 - DNA, 25 bp, Homo sapien
tacatataataagcaatttttagct

SEQ ID NO: 1957151 - DNA, 25 bp, Homo sapien
aaaaatcttaaaaatgcagacattt

SEQ ID NO: 1957152 - DNA, 25 bp, Homo sapien
agtttaattatcttgcagcacaggt

SEQ ID NO: 1957153 - DNA, 25 bp, Homo sapien
taattatcttgcagcacaggtctac

SEQ ID NO: 1957154 - DNA, 25 bp, Homo sapien
ttaattatcttgcagcacaggtcta

SEQ ID NO: 1957155 - DNA, 25 bp, Homo sapien
gtttaattatcttgcagcacaggtc

SEQ ID NO: 1957156 - DNA, 25 bp, Homo sapien
catagagtaccaacattcaagtgct

SEQ ID NO: 1957157 - DNA, 25 bp, Homo sapien
caactgtcacgtcagttgttcctgg

SEQ ID NO: 1957158 - DNA, 25 bp, Homo sapien
caagcatttaatggtttaatcaagc

SEQ ID NO: 1957159 - DNA, 25 bp, Homo sapien
gagacttagtacaaaacggtcttca

SEQ ID NO: 1957160 - DNA, 25 bp, Homo sapien
acttaggagagaagaacagcattta

SEQ ID NO: 1957161 - DNA, 25 bp, Homo sapien
aggagagaagaacagcatttaataa

SEQ ID NO: 1957162 - DNA, 25 bp, Homo sapien
tcaacttaggagagaagaacagcat

SEQ ID NO: 1957163 - DNA, 25 bp, Homo sapien
cttaggagagaagaacagcatttaa

SEQ ID NO: 1957164 - DNA, 25 bp, Homo sapien
gcaaagttgcgcaaaatgttcctgc

SEQ ID NO: 1957165 - DNA, 25 bp, Homo sapien
tttaacagaactcaatggatgctcc

SEQ ID NO: 1957166 - DNA, 25 bp, Homo sapien
gaaatttttactggcatatacactg

SEQ ID NO: 1957167 - DNA, 25 bp, Homo sapien
cagtatcatttaagattaagagcta

SEQ ID NO: 1957168 - DNA, 25 bp, Homo sapien
aaaagaactaatgaactgagtttca

SEQ ID NO: 1957169 - DNA, 25 bp, Homo sapien
aagaactaatgaactgagtttcaaa

SEQ ID NO: 1957170 - DNA, 25 bp, Homo sapien
aaagaactaatgaactgagtttcaa

SEQ ID NO: 1957171 - DNA, 25 bp, Homo sapien
tgcatatgggatgtacgacaggcta

SEQ ID NO: 1957172 - DNA, 25 bp, Homo sapien
atatgggatgtacgacaggctatac

SEQ ID NO: 1957173 - DNA, 25 bp, Homo sapien
cttgcatatgggatgtacgacaggc

SEQ ID NO: 1957174 - DNA, 25 bp, Homo sapien
catatgggatgtacgacaggctata

SEQ ID NO: 1957175 - DNA, 25 bp, Homo sapien
gacatctccagatatcacagggcca

SEQ ID NO: 1957176 - DNA, 25 bp, Homo sapien
gaaggccgaaagaaaggtgatccca

SEQ ID NO: 1957177 - DNA, 25 bp, Homo sapien
tcactaacacagaagagcgcaggag

SEQ ID NO: 1957178 - DNA, 25 bp, Homo sapien
tcatctgtcagtagaaagaaggccg

SEQ ID NO: 1957179 - DNA, 25 bp, Homo sapien
gcaatatgcagaataacacagccag

SEQ ID NO: 1957180 - DNA, 25 bp, Homo sapien
tatgcagaataacacagccagtccc

SEQ ID NO: 1957181 - DNA, 25 bp, Homo sapien
actgcaatatgcagaataacacagc

SEQ ID NO: 1957182 - DNA, 25 bp, Homo sapien
aatatgcagaataacacagccagtc

SEQ ID NO: 1957183 - DNA, 25 bp, Homo sapien
cccactgagatctgtatgccccatg

SEQ ID NO: 1957184 - DNA, 25 bp, Homo sapien
gaatcgacatgtaaaatcccactga

SEQ ID NO: 1957185 - DNA, 25 bp, Homo sapien
tgtcagatttgccaaccaggcccac

SEQ ID NO: 1957186 - DNA, 25 bp, Homo sapien
ggttttacaccttgctactcggcag

SEQ ID NO: 1957187 - DNA, 25 bp, Homo sapien
taatggtgtgatgacacgtcagctg

SEQ ID NO: 1957188 - DNA, 25 bp, Homo sapien
tgcagacagtagaatctatggcaca

SEQ ID NO: 1957189 - DNA, 25 bp, Homo sapien
cagttaactgaaagccagtagggct

SEQ ID NO: 1957190 - DNA, 25 bp, Homo sapien
gcatttttagcaactagctggatgg

SEQ ID NO: 1957191 - DNA, 25 bp, Homo sapien
agcacacagggtaaatatgaaacac

SEQ ID NO: 1957192 - DNA, 25 bp, Homo sapien
gcagcacacagggtaaatatgaaac

SEQ ID NO: 1957193 - DNA, 25 bp, Homo sapien
gagcagcacacagggtaaatatgaa

SEQ ID NO: 1957194 - DNA, 25 bp, Homo sapien
aagagcagcacacagggtaaatatg

SEQ ID NO: 1957195 - DNA, 25 bp, Homo sapien
tcagtggactcgtctaaacctgttg

SEQ ID NO: 1957196 - DNA, 25 bp, Homo sapien
tccttggcaaattggaagcatctaa

SEQ ID NO: 1957197 - DNA, 25 bp, Homo sapien
tgttggaaagacctaaagagatccc

SEQ ID NO: 1957198 - DNA, 25 bp, Homo sapien
cagctctgacgcctgctatctgagg

SEQ ID NO: 1957199 - DNA, 25 bp, Homo sapien
tacaccatgccatatacgcagcaga

SEQ ID NO: 1957200 - DNA, 25 bp, Homo sapien
gggtacaaactaacaatccctcatg

SEQ ID NO: 1957201 - DNA, 25 bp, Homo sapien
gtgtctatgcccaccctctaaaggg

SEQ ID NO: 1957202 - DNA, 25 bp, Homo sapien
aatgatgctaaatctcaccctcagc

SEQ ID NO: 1957203 - DNA, 25 bp, Homo sapien
ataacaggcaattattcgtaaaata

SEQ ID NO: 1957204 - DNA, 25 bp, Homo sapien
gcaattattcgtaaaataacagtgc

SEQ ID NO: 1957205 - DNA, 25 bp, Homo sapien
tacataacaggcaattattcgtaaa

SEQ ID NO: 1957206 - DNA, 25 bp, Homo sapien
tattcaacacaagaagtatacatac

SEQ ID NO: 1957207 - DNA, 25 bp, Homo sapien
tgcaagcaatcttgttgcttcaaac

SEQ ID NO: 1957208 - DNA, 25 bp, Homo sapien
gcataacaattgttgcaagcaatct

SEQ ID NO: 1957209 - DNA, 25 bp, Homo sapien
tcttcagttgcttcacaggtcccat

SEQ ID NO: 1957210 - DNA, 25 bp, Homo sapien
tcacaggtcccattaaaaagcatgt

SEQ ID NO: 1957211 - DNA, 25 bp, Homo sapien
catctatcagcaggatggatgtgcc

SEQ ID NO: 1957212 - DNA, 25 bp, Homo sapien
ggaggacacagggatcttccccttg

SEQ ID NO: 1957213 - DNA, 25 bp, Homo sapien
ggctgtgagaactcctccctttgaa

SEQ ID NO: 1957214 - DNA, 25 bp, Homo sapien
tatgaagaccggactaggctgtgag

SEQ ID NO: 1957215 - DNA, 25 bp, Homo sapien
cacaaaggctggctattcctagcac

SEQ ID NO: 1957216 - DNA, 25 bp, Homo sapien
gaactacataaacatcctactggga

SEQ ID NO: 1957217 - DNA, 25 bp, Homo sapien
cactaataccgtctgttatgggaga

SEQ ID NO: 1957218 - DNA, 25 bp, Homo sapien
tgggagacggcatacagcagcagtc

SEQ ID NO: 1957219 - DNA, 25 bp, Homo sapien
taacgcagcaagattgccgagggta

SEQ ID NO: 1957220 - DNA, 25 bp, Homo sapien
ctggctaacgcagcaagattgccga

SEQ ID NO: 1957221 - DNA, 25 bp, Homo sapien
aaagctttatgccgcccggaagcca

SEQ ID NO: 1957222 - DNA, 25 bp, Homo sapien
caagattgccgagggtataaaacac

SEQ ID NO: 1957223 - DNA, 25 bp, Homo sapien
gatggcaaaccatttcaatctggtg

SEQ ID NO: 1957224 - DNA, 25 bp, Homo sapien
caatctggtgttgaaactaagggat

SEQ ID NO: 1957225 - DNA, 25 bp, Homo sapien
aactaagggatgaggcatccaggac

SEQ ID NO: 1957226 - DNA, 25 bp, Homo sapien
aacgccacatacgaagcagatggca

SEQ ID NO: 1957227 - DNA, 25 bp, Homo sapien
aaacactgaaactgcagaggctggg

SEQ ID NO: 1957228 - DNA, 25 bp, Homo sapien
ggacgaattcctcaggctcctagat

SEQ ID NO: 1957229 - DNA, 25 bp, Homo sapien
gggacagccgatatacactgatatg

SEQ ID NO: 1957230 - DNA, 25 bp, Homo sapien
gatgcaacaggccaggcaaaacact

SEQ ID NO: 1957231 - DNA, 25 bp, Homo sapien
tctaatttatactaccacatccact

SEQ ID NO: 1957232 - DNA, 25 bp, Homo sapien
tactttgtacagtatgataacccag

SEQ ID NO: 1957233 - DNA, 25 bp, Homo sapien
aactagaaatatacagcaaggattt

SEQ ID NO: 1957234 - DNA, 25 bp, Homo sapien
cccagcacacagtagtggtgaaata

SEQ ID NO: 1957235 - DNA, 25 bp, Homo sapien
catgaaaagcagataaaaataacta

SEQ ID NO: 1957236 - DNA, 25 bp, Homo sapien
tgaaaagcagataaaaataactaag

SEQ ID NO: 1957237 - DNA, 25 bp, Homo sapien
aagcagataaaaataactaagtatt

SEQ ID NO: 1957238 - DNA, 25 bp, Homo sapien
cttatgtagcatgaaaagcagataa

SEQ ID NO: 1957239 - DNA, 25 bp, Homo sapien
cattgttcacaagttcaatcgctgc

SEQ ID NO: 1957240 - DNA, 25 bp, Homo sapien
tttctaaaggttcgtgtgagtccac

SEQ ID NO: 1957241 - DNA, 25 bp, Homo sapien
cctattgccatcttccgtgtattga

SEQ ID NO: 1957242 - DNA, 25 bp, Homo sapien
tcagcaaggaaacagcacggctatt

SEQ ID NO: 1957243 - DNA, 25 bp, Homo sapien
tccagtgtaagtcagagtctcccaa

SEQ ID NO: 1957244 - DNA, 25 bp, Homo sapien
tctcaaagacgaggtgcccaactgt

SEQ ID NO: 1957245 - DNA, 25 bp, Homo sapien
gaaggctgaatgagtggctcccaca

SEQ ID NO: 1957246 - DNA, 25 bp, Homo sapien
ggtaaaatcccaccggagtgcagct

SEQ ID NO: 1957247 - DNA, 25 bp, Homo sapien
ccatggcactggcagaagattttaa

SEQ ID NO: 1957248 - DNA, 25 bp, Homo sapien
catggcactggcagaagattttaat

SEQ ID NO: 1957249 - DNA, 25 bp, Homo sapien
gtagcagcagtagccatggcactgg

SEQ ID NO: 1957250 - DNA, 25 bp, Homo sapien
ctagtagcagcagtagccatggcac

SEQ ID NO: 1957251 - DNA, 25 bp, Homo sapien
gtgtatgagcaaaaaactccaggac

SEQ ID NO: 1957252 - DNA, 25 bp, Homo sapien
tgtatgagcaaaaaactccaggact

SEQ ID NO: 1957253 - DNA, 25 bp, Homo sapien
gtatttgtgactaattttattaaca

SEQ ID NO: 1957254 - DNA, 25 bp, Homo sapien
tgtgactaattttattaacaggtta

SEQ ID NO: 1957255 - DNA, 25 bp, Homo sapien
tgccaggttctacttggaacttatt

SEQ ID NO: 1957256 - DNA, 25 bp, Homo sapien
acacgatggaaagggcaatggatcc

SEQ ID NO: 1957257 - DNA, 25 bp, Homo sapien
aaaaaacactgtagactgggtagct

SEQ ID NO: 1957258 - DNA, 25 bp, Homo sapien
tgagtcctcacacgatggaaagggc

SEQ ID NO: 1957259 - DNA, 25 bp, Homo sapien
caccttctgagtcctcacacgatgg

SEQ ID NO: 1957260 - DNA, 25 bp, Homo sapien
tctacagtttgttctccacagagct

SEQ ID NO: 1957261 - DNA, 25 bp, Homo sapien
tcactgatttgagccacagtcatct

SEQ ID NO: 1957262 - DNA, 25 bp, Homo sapien
acaactgtacttgtctccagcccag

SEQ ID NO: 1957263 - DNA, 25 bp, Homo sapien
ttaaaatccaagtcggtcacaccac

SEQ ID NO: 1957264 - DNA, 25 bp, Homo sapien
tggaggaagtaacccttatcaagtc

SEQ ID NO: 1957265 - DNA, 25 bp, Homo sapien
gaggaagtaacccttatcaagtctc

SEQ ID NO: 1957266 - DNA, 25 bp, Homo sapien
aggaagtaacccttatcaagtctcg

SEQ ID NO: 1957267 - DNA, 25 bp, Homo sapien
gctggaggaagtaacccttatcaag

SEQ ID NO: 1957268 - DNA, 25 bp, Homo sapien
cccgctcggccggtcctcagtgcgg

SEQ ID NO: 1957269 - DNA, 25 bp, Homo sapien
ctggacgagggcgcaagttcgctac

SEQ ID NO: 1957270 - DNA, 25 bp, Homo sapien
tcggccggtcctcagtgcggccggg

SEQ ID NO: 1957271 - DNA, 25 bp, Homo sapien
ccgggactggacgagggcgcaagtt

SEQ ID NO: 1957272 - DNA, 25 bp, Homo sapien
ccgctcaggactcgccgcagcttct

SEQ ID NO: 1957273 - DNA, 25 bp, Homo sapien
gccgctcaggactcgccgcagcttc

SEQ ID NO: 1957274 - DNA, 25 bp, Homo sapien
cagcctttctctcggacccggtagt

SEQ ID NO: 1957275 - DNA, 25 bp, Homo sapien
actgtccgcgaggtgcgccgtggta

SEQ ID NO: 1957276 - DNA, 25 bp, Homo sapien
cgccgtagcaatgcgcgcatgctca

SEQ ID NO: 1957277 - DNA, 25 bp, Homo sapien
tggtccgtgaagtccgcggagtggg

SEQ ID NO: 1957278 - DNA, 25 bp, Homo sapien
ggccttgctgggcgggtccgcggca

SEQ ID NO: 1957279 - DNA, 25 bp, Homo sapien
agaagtcgaggccccgaatgcgcct

SEQ ID NO: 1957280 - DNA, 25 bp, Homo sapien
aaccctgcacttggcgtcctccggg

SEQ ID NO: 1957281 - DNA, 25 bp, Homo sapien
actggggcacgaccactgaaccctg

SEQ ID NO: 1957282 - DNA, 25 bp, Homo sapien
gaggccgaagtggtcccattaaggc

SEQ ID NO: 1957283 - DNA, 25 bp, Homo sapien
gagggccaaagtgcagtaatgtctg

SEQ ID NO: 1957284 - DNA, 25 bp, Homo sapien
tgagtgtcgaaaccctcatgcccag

SEQ ID NO: 1957285 - DNA, 25 bp, Homo sapien
ccattaaggcgaaagtggaccagtc

SEQ ID NO: 1957286 - DNA, 25 bp, Homo sapien
tcagatggatgactcattcagagag

SEQ ID NO: 1957287 - DNA, 25 bp, Homo sapien
tccactgaaccaaactgttgccttg

SEQ ID NO: 1957288 - DNA, 25 bp, Homo sapien
ggcctgttcctgctcgaatcacctg

SEQ ID NO: 1957289 - DNA, 25 bp, Homo sapien
tctctcctcgggagtaccagaaaag

SEQ ID NO: 1957290 - DNA, 25 bp, Homo sapien
gaatcacctgcagtatctgctcctg

SEQ ID NO: 1957291 - DNA, 25 bp, Homo sapien
ccttgcttcttacccagcagtaaag

SEQ ID NO: 1957292 - DNA, 25 bp, Homo sapien
ctccttgcttcttacccagcagtaa

SEQ ID NO: 1957293 - DNA, 25 bp, Homo sapien
tccttgcttcttacccagcagtaaa

SEQ ID NO: 1957294 - DNA, 25 bp, Homo sapien
cttgcttcttacccagcagtaaagg

SEQ ID NO: 1957295 - DNA, 25 bp, Homo sapien
aatgctgtcccttcaagaccttgtt

SEQ ID NO: 1957296 - DNA, 25 bp, Homo sapien
gaatcaggagtacttaagtgctagt

SEQ ID NO: 1957297 - DNA, 25 bp, Homo sapien
cagctgttggttgtcttgtggtcat

SEQ ID NO: 1957298 - DNA, 25 bp, Homo sapien
ttttaagtacgtggccagctgttgg

SEQ ID NO: 1957299 - DNA, 25 bp, Homo sapien
ttatgcagatgccgttttagtcatc

SEQ ID NO: 1957300 - DNA, 25 bp, Homo sapien
ttgttgcgtggcatgcaaacagaag

SEQ ID NO: 1957301 - DNA, 25 bp, Homo sapien
tcgtgtttgataagccgccctccct

SEQ ID NO: 1957302 - DNA, 25 bp, Homo sapien
cagaagccagttccgaggctgtacc

SEQ ID NO: 1957303 - DNA, 25 bp, Homo sapien
gaatgtcaaagaatagcaacagagg

SEQ ID NO: 1957304 - DNA, 25 bp, Homo sapien
acctcttctgcgaaagcctttgaca

SEQ ID NO: 1957305 - DNA, 25 bp, Homo sapien
aaactgagagggttgataggaccac

SEQ ID NO: 1957306 - DNA, 25 bp, Homo sapien
aacatatttccgagcaagagtaggc

SEQ ID NO: 1957307 - DNA, 25 bp, Homo sapien
aatgcctgtatcaataggaagctca

SEQ ID NO: 1957308 - DNA, 25 bp, Homo sapien
tcatccgcccactgataatctctgg

SEQ ID NO: 1957309 - DNA, 25 bp, Homo sapien
cgcccactgataatctctggagact

SEQ ID NO: 1957310 - DNA, 25 bp, Homo sapien
caaatgtcatccgcccactgataat

SEQ ID NO: 1957311 - DNA, 25 bp, Homo sapien
atgtcatccgcccactgataatctc

SEQ ID NO: 1957312 - DNA, 25 bp, Homo sapien
cagcaatgggaagaccccagttggc

SEQ ID NO: 1957313 - DNA, 25 bp, Homo sapien
gcaatgggaagaccccagttggcta

SEQ ID NO: 1957314 - DNA, 25 bp, Homo sapien
agcaatgggaagaccccagttggct

SEQ ID NO: 1957315 - DNA, 25 bp, Homo sapien
tcctgtaggaatcagcagttcttac

SEQ ID NO: 1957316 - DNA, 25 bp, Homo sapien
aaatcttcgtttccatcttgcaggt

SEQ ID NO: 1957317 - DNA, 25 bp, Homo sapien
ccagagctagaaagggtttggcagc

SEQ ID NO: 1957318 - DNA, 25 bp, Homo sapien
gaaactcgtgagaacaaatcttcgt

SEQ ID NO: 1957319 - DNA, 25 bp, Homo sapien
ccacactacaaccaagtcatctctg

SEQ ID NO: 1957320 - DNA, 25 bp, Homo sapien
tttccacactacaaccaagtcatct

SEQ ID NO: 1957321 - DNA, 25 bp, Homo sapien
tacaaccaagtcatctctgattgtc

SEQ ID NO: 1957322 - DNA, 25 bp, Homo sapien
tggtttccacactacaaccaagtca

SEQ ID NO: 1957323 - DNA, 25 bp, Homo sapien
gttgctataattcaaaccctgttag

SEQ ID NO: 1957324 - DNA, 25 bp, Homo sapien
aacttggaaatcaatgcccaggacc

SEQ ID NO: 1957325 - DNA, 25 bp, Homo sapien
ccaggaccccagacactaagaaatt

SEQ ID NO: 1957326 - DNA, 25 bp, Homo sapien
aatgcagaccctaaattgggtactt

SEQ ID NO: 1957327 - DNA, 25 bp, Homo sapien
ccaaggataccaaagtgaagtcgtc

SEQ ID NO: 1957328 - DNA, 25 bp, Homo sapien
tagccatcaccataagtatttcagg

SEQ ID NO: 1957329 - DNA, 25 bp, Homo sapien
gaagtcgtctgtgtttgacagcagc

SEQ ID NO: 1957330 - DNA, 25 bp, Homo sapien
gactttgcttctactattgacgagg

SEQ ID NO: 1957331 - DNA, 25 bp, Homo sapien
ccagacttttgtaagggagagtatc

SEQ ID NO: 1957332 - DNA, 25 bp, Homo sapien
gagagaagtacactcctgcagaatt

SEQ ID NO: 1957333 - DNA, 25 bp, Homo sapien
ctgcagaattctattaacaatgacc

SEQ ID NO: 1957334 - DNA, 25 bp, Homo sapien
catttagatgcaatatggccagttt

SEQ ID NO: 1957335 - DNA, 25 bp, Homo sapien
cgtcctgttattgggtgtcacttca

SEQ ID NO: 1957336 - DNA, 25 bp, Homo sapien
tgccactcctctgcactgtatggtg

SEQ ID NO: 1957337 - DNA, 25 bp, Homo sapien
gaacccagggctataaacagagcct

SEQ ID NO: 1957338 - DNA, 25 bp, Homo sapien
tactttatcatgcatgaacccaggg

SEQ ID NO: 1957339 - DNA, 25 bp, Homo sapien
taggttataggaaacagttctgcaa

SEQ ID NO: 1957340 - DNA, 25 bp, Homo sapien
taaagtagccttgggagattcctgg

SEQ ID NO: 1957341 - DNA, 25 bp, Homo sapien
taccactggttgtgaatgtgtcttc

SEQ ID NO: 1957342 - DNA, 25 bp, Homo sapien
gattcctggctaagtgatgttatta

SEQ ID NO: 1957343 - DNA, 25 bp, Homo sapien
acttatgactgtaagtgttgagcta

SEQ ID NO: 1957344 - DNA, 25 bp, Homo sapien
agtgttgagctatactgaaaatatg

SEQ ID NO: 1957345 - DNA, 25 bp, Homo sapien
ctgtaagtgttgagctatactgaaa

SEQ ID NO: 1957346 - DNA, 25 bp, Homo sapien
tatgactgtaagtgttgagctatac

SEQ ID NO: 1957347 - DNA, 25 bp, Homo sapien
ccactgtgactgttatcaatgaagt

SEQ ID NO: 1957348 - DNA, 25 bp, Homo sapien
gtcagatattcagcagtcaattttg

SEQ ID NO: 1957349 - DNA, 25 bp, Homo sapien
catcggttgctaggctccactgtga

SEQ ID NO: 1957350 - DNA, 25 bp, Homo sapien
tacaacaccatctcctgtgtgaaaa

SEQ ID NO: 1957351 - DNA, 25 bp, Homo sapien
ccatggcggctagaaaggctctcat

SEQ ID NO: 1957352 - DNA, 25 bp, Homo sapien
ggctgtcacagagctcgtgtctagg

SEQ ID NO: 1957353 - DNA, 25 bp, Homo sapien
ggatgctaagcctgttacccctaac

SEQ ID NO: 1957354 - DNA, 25 bp, Homo sapien
ctaaaaacaggagtagggagcagcc

SEQ ID NO: 1957355 - DNA, 25 bp, Homo sapien
ggactacaacgttaacagtgtacat

SEQ ID NO: 1957356 - DNA, 25 bp, Homo sapien
tttcagtaacaggactacaacgtta

SEQ ID NO: 1957357 - DNA, 25 bp, Homo sapien
ggttactgcaacctcacacctgtat

SEQ ID NO: 1957358 - DNA, 25 bp, Homo sapien
gaagagtcaccgaagttcagacagg

SEQ ID NO: 1957359 - DNA, 25 bp, Homo sapien
tggtaagttggagagatgcatactg

SEQ ID NO: 1957360 - DNA, 25 bp, Homo sapien
tttgtgcctccagaggattgtttga

SEQ ID NO: 1957361 - DNA, 25 bp, Homo sapien
ggacagcacagctttcgaggaaata

SEQ ID NO: 1957362 - DNA, 25 bp, Homo sapien
ccacctgtggctagtggctctcaaa

SEQ ID NO: 1957363 - DNA, 25 bp, Homo sapien
ttttggaccacaaatggccctgagt

SEQ ID NO: 1957364 - DNA, 25 bp, Homo sapien
ggccctgagtgactgaatccataga

SEQ ID NO: 1957365 - DNA, 25 bp, Homo sapien
tggtgctaataatacagtagtcccc

SEQ ID NO: 1957366 - DNA, 25 bp, Homo sapien
gggatgcattctaagacctccagtg

SEQ ID NO: 1957367 - DNA, 25 bp, Homo sapien
caattgcatgcccagttgtcgcagc

SEQ ID NO: 1957368 - DNA, 25 bp, Homo sapien
acttctgggcgtctacttccgggca

SEQ ID NO: 1957369 - DNA, 25 bp, Homo sapien
ttagatgaacatacgatgccacgcg

SEQ ID NO: 1957370 - DNA, 25 bp, Homo sapien
gaggtatctgcttaagtcttcggcc

SEQ ID NO: 1957371 - DNA, 25 bp, Homo sapien
ggttaaggtgtgttctattcgccag

SEQ ID NO: 1957372 - DNA, 25 bp, Homo sapien
tacctgtattaaggctctccagaga

SEQ ID NO: 1957373 - DNA, 25 bp, Homo sapien
taactcagtccgaggctaaaggccc

SEQ ID NO: 1957374 - DNA, 25 bp, Homo sapien
taatgatgcccacttacacgggtga

SEQ ID NO: 1957375 - DNA, 25 bp, Homo sapien
ttcctggcatatcagttataattac

SEQ ID NO: 1957376 - DNA, 25 bp, Homo sapien
ggcatatcagttataattactatta

SEQ ID NO: 1957377 - DNA, 25 bp, Homo sapien
tcctggcatatcagttataattact

SEQ ID NO: 1957378 - DNA, 25 bp, Homo sapien
ctggcatatcagttataattactat

SEQ ID NO: 1957379 - DNA, 25 bp, Homo sapien
gccaccctggaagctggtgctgctg

SEQ ID NO: 1957380 - DNA, 25 bp, Homo sapien
catgccggcacccaggccaccctgg

SEQ ID NO: 1957381 - DNA, 25 bp, Homo sapien
ccatgccggcacccaggccaccctg

SEQ ID NO: 1957382 - DNA, 25 bp, Homo sapien
ggaagctggtgctgctgctgcccac

SEQ ID NO: 1957383 - DNA, 25 bp, Homo sapien
cgggagacaatcaaggagctgatgt

SEQ ID NO: 1957384 - DNA, 25 bp, Homo sapien
ggcctgctcatgtaggaggagctgc

SEQ ID NO: 1957385 - DNA, 25 bp, Homo sapien
tgggcctgctcatgtaggaggagct

SEQ ID NO: 1957386 - DNA, 25 bp, Homo sapien
cctgctcatgtaggaggagctgctg

SEQ ID NO: 1957387 - DNA, 25 bp, Homo sapien
tggaggcagaagtggaggcaggcag

SEQ ID NO: 1957388 - DNA, 25 bp, Homo sapien
gtggaggcagaagtggaggcaggca

SEQ ID NO: 1957389 - DNA, 25 bp, Homo sapien
ggtggaggcagaagtggaggcaggc

SEQ ID NO: 1957390 - DNA, 25 bp, Homo sapien
ggaggcagaagtggaggcaggcagg

SEQ ID NO: 1957391 - DNA, 25 bp, Homo sapien
caaggaccgggtgtgaaaagcagtt

SEQ ID NO: 1957392 - DNA, 25 bp, Homo sapien
aagagattcttatggccagtcctgc

SEQ ID NO: 1957393 - DNA, 25 bp, Homo sapien
tatatttagcgagccaaaagtcagc

SEQ ID NO: 1957394 - DNA, 25 bp, Homo sapien
tactaaaaggatccaactgacagcc

SEQ ID NO: 1957395 - DNA, 25 bp, Homo sapien
ctgggtagtaagtataaattctgaa

SEQ ID NO: 1957396 - DNA, 25 bp, Homo sapien
aattaatttagaatacctgatcaac

SEQ ID NO: 1957397 - DNA, 25 bp, Homo sapien
taagtataaattctgaaagctttcc

SEQ ID NO: 1957398 - DNA, 25 bp, Homo sapien
gatcaacttgagaatattcaatgca

SEQ ID NO: 1957399 - DNA, 25 bp, Homo sapien
tagaataaagctgcacagaccttga

SEQ ID NO: 1957400 - DNA, 25 bp, Homo sapien
gaagaggaataagtcgctagaataa

SEQ ID NO: 1957401 - DNA, 25 bp, Homo sapien
aagcactctatgatctaggttcttc

SEQ ID NO: 1957402 - DNA, 25 bp, Homo sapien
cagaccttgattgagttaatcatta

SEQ ID NO: 1957403 - DNA, 25 bp, Homo sapien
taaacagctacgaaagcacaaaagc

SEQ ID NO: 1957404 - DNA, 25 bp, Homo sapien
taggtgtcctaagtgagagcctgtt

SEQ ID NO: 1957405 - DNA, 25 bp, Homo sapien
taagtgttccgttatcccagtaatg

SEQ ID NO: 1957406 - DNA, 25 bp, Homo sapien
cattatctttggttcttaggtgtcc

SEQ ID NO: 1957407 - DNA, 25 bp, Homo sapien
ctttccgcaccaacgcgcccgccat

SEQ ID NO: 1957408 - DNA, 25 bp, Homo sapien
aaatccttgcttcggacatagtccg

SEQ ID NO: 1957409 - DNA, 25 bp, Homo sapien
tgaggtagtcccggaaatccttgct

SEQ ID NO: 1957410 - DNA, 25 bp, Homo sapien
ttcggacatagtccgccgctttccg

SEQ ID NO: 1957411 - DNA, 25 bp, Homo sapien
ctgccgcttcccagagccaatgaca

SEQ ID NO: 1957412 - DNA, 25 bp, Homo sapien
agccgacggcgagccagcccgaagg

SEQ ID NO: 1957413 - DNA, 25 bp, Homo sapien
gagccaatgacaccccggccaaccc

SEQ ID NO: 1957414 - DNA, 25 bp, Homo sapien
cagaccccgagtggtccctgcctct

SEQ ID NO: 1957415 - DNA, 25 bp, Homo sapien
tggacagatttctggtcagtttgga

SEQ ID NO: 1957416 - DNA, 25 bp, Homo sapien
tcaaagttcagaaacgacaatcaga

SEQ ID NO: 1957417 - DNA, 25 bp, Homo sapien
tggcgcttccctgtagacacaggat

SEQ ID NO: 1957418 - DNA, 25 bp, Homo sapien
gacaatcagaataggccgcacttgg

SEQ ID NO: 1957419 - DNA, 25 bp, Homo sapien
ctgcatgactggttccggccgactt

SEQ ID NO: 1957420 - DNA, 25 bp, Homo sapien
tgtgcaggcagtccacatacactgt

SEQ ID NO: 1957421 - DNA, 25 bp, Homo sapien
tgtgtatgcgatgacagtgcgtctg

SEQ ID NO: 1957422 - DNA, 25 bp, Homo sapien
cacagcctgtccacaaagggaatct

SEQ ID NO: 1957423 - DNA, 25 bp, Homo sapien
gctgattgtctctaaactgattacc

SEQ ID NO: 1957424 - DNA, 25 bp, Homo sapien
gatcttacagtgtccatcagcttcc

SEQ ID NO: 1957425 - DNA, 25 bp, Homo sapien
cagcttcctatgattgaagaaaagc

SEQ ID NO: 1957426 - DNA, 25 bp, Homo sapien
tgtgttaccttttcacgaggcccac

SEQ ID NO: 1957427 - DNA, 25 bp, Homo sapien
aaatagcccgtttgtctttcctgca

SEQ ID NO: 1957428 - DNA, 25 bp, Homo sapien
caataagctaacaaactcgggccct

SEQ ID NO: 1957429 - DNA, 25 bp, Homo sapien
caggtttgttacgatggtgaaggca

SEQ ID NO: 1957430 - DNA, 25 bp, Homo sapien
ccccagggcttggtacatgctgtta

SEQ ID NO: 1957431 - DNA, 25 bp, Homo sapien
aggcagaagtggataggtgatatcc

SEQ ID NO: 1957432 - DNA, 25 bp, Homo sapien
ggcggaagtggataggtgatatcca

SEQ ID NO: 1957433 - DNA, 25 bp, Homo sapien
ggcagaagtggataggtgatatcca

SEQ ID NO: 1957434 - DNA, 25 bp, Homo sapien
aggaggcggaagtggataggtgata

SEQ ID NO: 1957435 - DNA, 25 bp, Homo sapien
ggcggaagtggataggtgatatcca

SEQ ID NO: 1957436 - DNA, 25 bp, Homo sapien
ggaggcggaagtggataggtgatat

SEQ ID NO: 1957437 - DNA, 25 bp, Homo sapien
aggaggcggaagtggataggtgata

SEQ ID NO: 1957438 - DNA, 25 bp, Homo sapien
gaggcggaagtggataggtgatatc

SEQ ID NO: 1957439 - DNA, 25 bp, Homo sapien
ggaggcggaagtggataggtgatat

SEQ ID NO: 1957440 - DNA, 25 bp, Homo sapien
ggcggaagtggataggtgatatcca

SEQ ID NO: 1957441 - DNA, 25 bp, Homo sapien
aggaggcggaagtggataggtgata

SEQ ID NO: 1957442 - DNA, 25 bp, Homo sapien
gaggcggaagtggataggtgatatc

SEQ ID NO: 1957443 - DNA, 25 bp, Homo sapien
ggcggaagtggataggtgatatcca

SEQ ID NO: 1957444 - DNA, 25 bp, Homo sapien
aggaggcggaagtggataggtgata

SEQ ID NO: 1957445 - DNA, 25 bp, Homo sapien
gaggcggaagtggataggtgatatc

SEQ ID NO: 1957446 - DNA, 25 bp, Homo sapien
ggaggcggaagtggataggtgatat

SEQ ID NO: 1957447 - DNA, 25 bp, Homo sapien
gggctctggccatcgcagtgcacgg

SEQ ID NO: 1957448 - DNA, 25 bp, Homo sapien
tggccatcgcagtgcacgggtcctg

SEQ ID NO: 1957449 - DNA, 25 bp, Homo sapien
tctggccatcgcagtgcacgggtcc

SEQ ID NO: 1957450 - DNA, 25 bp, Homo sapien
catcgcagtgcacgggtcctgagag

SEQ ID NO: 1957451 - DNA, 25 bp, Homo sapien
tgcaggtctagctgtacaagcactg

SEQ ID NO: 1957452 - DNA, 25 bp, Homo sapien
ggcctgcaggtctagctgtacaagc

SEQ ID NO: 1957453 - DNA, 25 bp, Homo sapien
caggtctagctgtacaagcactgcc

SEQ ID NO: 1957454 - DNA, 25 bp, Homo sapien
ggtctagctgtacaagcactgccct

SEQ ID NO: 1957455 - DNA, 25 bp, Homo sapien
cagtctcttcctcgatccggtatga

SEQ ID NO: 1957456 - DNA, 25 bp, Homo sapien
ctcgatccggtatgaggctgtataa

SEQ ID NO: 1957457 - DNA, 25 bp, Homo sapien
ccggtatgaggctgtataaagggca

SEQ ID NO: 1957458 - DNA, 25 bp, Homo sapien
tataaagggcagtccggattgtatg

SEQ ID NO: 1957459 - DNA, 25 bp, Homo sapien
gctttccggaatgcagatgctggca

SEQ ID NO: 1957460 - DNA, 25 bp, Homo sapien
gcaggctttccggaatgcagatgct

SEQ ID NO: 1957461 - DNA, 25 bp, Homo sapien
atccagcaggctttccggaatgcag

SEQ ID NO: 1957462 - DNA, 25 bp, Homo sapien
ttcctttgtcgcctcatccagcagg

SEQ ID NO: 1957463 - DNA, 25 bp, Homo sapien
cctggcttgtctttgacaccggtgc

SEQ ID NO: 1957464 - DNA, 25 bp, Homo sapien
ttgtctttgacaccggtgcttttgg

SEQ ID NO: 1957465 - DNA, 25 bp, Homo sapien
agggacccctggcttgtctttgaca

SEQ ID NO: 1957466 - DNA, 25 bp, Homo sapien
tctttgacaccggtgcttttgggcc

SEQ ID NO: 1957467 - DNA, 25 bp, Homo sapien
cccgttatttgcaagcaggtgctca

SEQ ID NO: 1957468 - DNA, 25 bp, Homo sapien
ggtgctcaggttccagcagtgaccg

SEQ ID NO: 1957469 - DNA, 25 bp, Homo sapien
ctggtgttttctgcaaggcagcatg

SEQ ID NO: 1957470 - DNA, 25 bp, Homo sapien
tgacatccccagacaaatgtgtgcc

SEQ ID NO: 1957471 - DNA, 25 bp, Homo sapien
tgtgtaaacataactgctgagccag

SEQ ID NO: 1957472 - DNA, 25 bp, Homo sapien
tcagtagaacgacacagatgctgca

SEQ ID NO: 1957473 - DNA, 25 bp, Homo sapien
gaacaaagtgctgagtcaggagcga

SEQ ID NO: 1957474 - DNA, 25 bp, Homo sapien
taaatatctgtacagtggccaccca

SEQ ID NO: 1957475 - DNA, 25 bp, Homo sapien
gcagcgtccttctccattctcgaat

SEQ ID NO: 1957476 - DNA, 25 bp, Homo sapien
gtccttctccattctcgaatttgca

SEQ ID NO: 1957477 - DNA, 25 bp, Homo sapien
ctcagggaccggcagcgtccttctc

SEQ ID NO: 1957478 - DNA, 25 bp, Homo sapien
tccacaccgctcagggaccggcagc

SEQ ID NO: 1957479 - DNA, 25 bp, Homo sapien
aatgaacggagtgcaaatcaaactt

SEQ ID NO: 1957480 - DNA, 25 bp, Homo sapien
aaaacgtgtcagaaatgaacggagt

SEQ ID NO: 1957481 - DNA, 25 bp, Homo sapien
aaggtaggaggcagcaaaacgtgtc

SEQ ID NO: 1957482 - DNA, 25 bp, Homo sapien
ccatgtgcttgagagaatcagtaaa

SEQ ID NO: 1957483 - DNA, 25 bp, Homo sapien
caatcttccaaacatcaatacatac

SEQ ID NO: 1957484 - DNA, 25 bp, Homo sapien
aatcacagacaaatcggacttgagg

SEQ ID NO: 1957485 - DNA, 25 bp, Homo sapien
caatacatacacagttagtttaaaa

SEQ ID NO: 1957486 - DNA, 25 bp, Homo sapien
tgaacaatactggataacattaagt

SEQ ID NO: 1957487 - DNA, 25 bp, Homo sapien
gctgagctggcaaaatgcgaattct

SEQ ID NO: 1957488 - DNA, 25 bp, Homo sapien
catttcattcgttgtggaggtgcgc

SEQ ID NO: 1957489 - DNA, 25 bp, Homo sapien
catgtaaggacagagctcgctgtga

SEQ ID NO: 1957490 - DNA, 25 bp, Homo sapien
tacatgtcgactgctgcttgaaagc

SEQ ID NO: 1957491 - DNA, 25 bp, Homo sapien
gcacacaaggagggaaaaccgtggc

SEQ ID NO: 1957492 - DNA, 25 bp, Homo sapien
aaaccgtggccgctttctcacggat

SEQ ID NO: 1957493 - DNA, 25 bp, Homo sapien
tggccgctttctcacggatgctttc

SEQ ID NO: 1957494 - DNA, 25 bp, Homo sapien
gctttctcacggatgctttcccttt

SEQ ID NO: 1957495 - DNA, 25 bp, Homo sapien
agcagaaaaggtgatgacttttgtt

SEQ ID NO: 1957496 - DNA, 25 bp, Homo sapien
tctgggaggacagattgtgtgacct

SEQ ID NO: 1957497 - DNA, 25 bp, Homo sapien
ttgttcatttctgggaggacagatt

SEQ ID NO: 1957498 - DNA, 25 bp, Homo sapien
tgtgtgacctcaggattatccactt

SEQ ID NO: 1957499 - DNA, 25 bp, Homo sapien
catcatggtggaagtcgttctagcc

SEQ ID NO: 1957500 - DNA, 25 bp, Homo sapien
cgttctagccttgggaaaaagcatc

SEQ ID NO: 1957501 - DNA, 25 bp, Homo sapien
gaaacaggtattcagtccgacttgc

SEQ ID NO: 1957502 - DNA, 25 bp, Homo sapien
aaatgtgaggaataccctgtgggca

SEQ ID NO: 1957503 - DNA, 25 bp, Homo sapien
catcctggtgacacggagctctcaa

SEQ ID NO: 1957504 - DNA, 25 bp, Homo sapien
cacagctttaggtgagcacacagga

SEQ ID NO: 1957505 - DNA, 25 bp, Homo sapien
agaggcgccgctcttcagtgatgca

SEQ ID NO: 1957506 - DNA, 25 bp, Homo sapien
tacaggacaatgaaggacccgtgtg

SEQ ID NO: 1957507 - DNA, 25 bp, Homo sapien
cgtggacgtgagtctcttcatgcct

SEQ ID NO: 1957508 - DNA, 25 bp, Homo sapien
tacagccgcgtggacgtgagtctct

SEQ ID NO: 1957509 - DNA, 25 bp, Homo sapien
agagcaaagtaggtggcggccatcg

SEQ ID NO: 1957510 - DNA, 25 bp, Homo sapien
atgcctctgcgctgagccaggttgg

SEQ ID NO: 1957511 - DNA, 25 bp, Homo sapien
actctgtcctcactgtcgcctgccg

SEQ ID NO: 1957512 - DNA, 25 bp, Homo sapien
tgtcctcactgtcgcctgccggtac

SEQ ID NO: 1957513 - DNA, 25 bp, Homo sapien
cactctgtcctcactgtcgcctgcc

SEQ ID NO: 1957514 - DNA, 25 bp, Homo sapien
tctgtcctcactgtcgcctgccggt

SEQ ID NO: 1957515 - DNA, 25 bp, Homo sapien
tcaccaggtgcacgtcctgtcggct

SEQ ID NO: 1957516 - DNA, 25 bp, Homo sapien
tttgagcacttgcatcgccgtcagg

SEQ ID NO: 1957517 - DNA, 25 bp, Homo sapien
gacaggtactctctgttgaccaccc

SEQ ID NO: 1957518 - DNA, 25 bp, Homo sapien
ccgtcaggcgctgatgagggtccac

SEQ ID NO: 1957519 - DNA, 25 bp, Homo sapien
tcagatatcgagtcccagtttcccc

SEQ ID NO: 1957520 - DNA, 25 bp, Homo sapien
gccgatccgcgccagaatctcctca

SEQ ID NO: 1957521 - DNA, 25 bp, Homo sapien
tttagctgcgtcagatatcgagtcc

SEQ ID NO: 1957522 - DNA, 25 bp, Homo sapien
tatcgtctggcccatttgcaaaagg

SEQ ID NO: 1957523 - DNA, 25 bp, Homo sapien
gcatggtgtacaacaggatccccaa

SEQ ID NO: 1957524 - DNA, 25 bp, Homo sapien
ccagcatggtgtacaacaggatccc

SEQ ID NO: 1957525 - DNA, 25 bp, Homo sapien
cccaaactccagatgtcacacgccg

SEQ ID NO: 1957526 - DNA, 25 bp, Homo sapien
acgccgcatcatagccttgacgctt

SEQ ID NO: 1957527 - DNA, 25 bp, Homo sapien
gactcggatggattctgggctcccc

SEQ ID NO: 1957528 - DNA, 25 bp, Homo sapien
cttggcaaagccgaagtcgcagact

SEQ ID NO: 1957529 - DNA, 25 bp, Homo sapien
tagcagggtgtcatgagcagcccgt

SEQ ID NO: 1957530 - DNA, 25 bp, Homo sapien
tgttactcggcttcaggtctcgatg

SEQ ID NO: 1957531 - DNA, 25 bp, Homo sapien
cagaaggcacagtgcctacttgggg

SEQ ID NO: 1957532 - DNA, 25 bp, Homo sapien
gacagaaggcacagtgcctacttgg

SEQ ID NO: 1957533 - DNA, 25 bp, Homo sapien
aagacagaaggcacagtgcctactt

SEQ ID NO: 1957534 - DNA, 25 bp, Homo sapien
aaggcacagtgcctacttgggggct

SEQ ID NO: 1957535 - DNA, 25 bp, Homo sapien
ctcccctcattaaatacaagcagat

SEQ ID NO: 1957536 - DNA, 25 bp, Homo sapien
tatctctgccggaggatgcggtcca

SEQ ID NO: 1957537 - DNA, 25 bp, Homo sapien
ttcgcgctccgagaagtatctctgc

SEQ ID NO: 1957538 - DNA, 25 bp, Homo sapien
tcttggtgatggtgcacaggacgtc

SEQ ID NO: 1957539 - DNA, 25 bp, Homo sapien
cattaccaggtacacaaacttgcca

SEQ ID NO: 1957540 - DNA, 25 bp, Homo sapien
tgctgctaccgcatggacagcactg

SEQ ID NO: 1957541 - DNA, 25 bp, Homo sapien
caaactgtaacgtgcatccaatcca

SEQ ID NO: 1957542 - DNA, 25 bp, Homo sapien
aaaatgcatgttctggtcctgcaga

SEQ ID NO: 1957543 - DNA, 25 bp, Homo sapien
gaagttacatatcagagccgtgctg

SEQ ID NO: 1957544 - DNA, 25 bp, Homo sapien
ctggccgtaccgcaggaggatctca

SEQ ID NO: 1957545 - DNA, 25 bp, Homo sapien
ggtgatgatgttcgggtgctggccg

SEQ ID NO: 1957546 - DNA, 25 bp, Homo sapien
ggaggatctcaatctcttccgaggg

SEQ ID NO: 1957547 - DNA, 25 bp, Homo sapien
cgtaccgcaggaggatctcaatctc

SEQ ID NO: 1957548 - DNA, 25 bp, Homo sapien
gaagtcacgtttgctgtctcaggcg

SEQ ID NO: 1957549 - DNA, 25 bp, Homo sapien
ggccatgtcacttgctggtacttga

SEQ ID NO: 1957550 - DNA, 25 bp, Homo sapien
tctcaggcgacaacactgctgtggg

SEQ ID NO: 1957551 - DNA, 25 bp, Homo sapien
tagagccagcggtctttcagcaaac

SEQ ID NO: 1957552 - DNA, 25 bp, Homo sapien
ccagaggccttaattaaaggatcgt

SEQ ID NO: 1957553 - DNA, 25 bp, Homo sapien
gggcagtcctggctctcaatgccaa

SEQ ID NO: 1957554 - DNA, 25 bp, Homo sapien
atcgtttgcaaaggagtagagtggc

SEQ ID NO: 1957555 - DNA, 25 bp, Homo sapien
aaagagctgcgcagggtcagtcaca

SEQ ID NO: 1957556 - DNA, 25 bp, Homo sapien
catggagggtgagctatttgagcaa

SEQ ID NO: 1957557 - DNA, 25 bp, Homo sapien
gacacactgtttaggagcaccaggg

SEQ ID NO: 1957558 - DNA, 25 bp, Homo sapien
tgccagcgcacttcttctctatggg

SEQ ID NO: 1957559 - DNA, 25 bp, Homo sapien
tcctggagtacatgacctggatctg

SEQ ID NO: 1957560 - DNA, 25 bp, Homo sapien
aactacgcgggcagtggcatgagct

SEQ ID NO: 1957561 - DNA, 25 bp, Homo sapien
tctctctccatcagtggagacaccg

SEQ ID NO: 1957562 - DNA, 25 bp, Homo sapien
tggctttgaggcagtaactacgcgg

SEQ ID NO: 1957563 - DNA, 25 bp, Homo sapien
gcttgcagaacactcccactaggca

SEQ ID NO: 1957564 - DNA, 25 bp, Homo sapien
ggtcacgccgcgtcactacagttaa

SEQ ID NO: 1957565 - DNA, 25 bp, Homo sapien
ggttggcaaattacacacacagtgt

SEQ ID NO: 1957566 - DNA, 25 bp, Homo sapien
cagctgggtgacacatattcttgca

SEQ ID NO: 1957567 - DNA, 25 bp, Homo sapien
tcacgtgagtacagactggagcctc

SEQ ID NO: 1957568 - DNA, 25 bp, Homo sapien
tggcctcccgagctatgtattgtag

SEQ ID NO: 1957569 - DNA, 25 bp, Homo sapien
gaatttatagttcagcttcctgggc

SEQ ID NO: 1957570 - DNA, 25 bp, Homo sapien
cacagacagtgaacaacccatgcag

SEQ ID NO: 1957571 - DNA, 25 bp, Homo sapien
gctgaaattgagtgagctcctgcca

SEQ ID NO: 1957572 - DNA, 25 bp, Homo sapien
ctgaccgtcatagaggtgaagagct

SEQ ID NO: 1957573 - DNA, 25 bp, Homo sapien
gaggtgaagagctggccccactctc

SEQ ID NO: 1957574 - DNA, 25 bp, Homo sapien
gtcatagaggtgaagagctggcccc

SEQ ID NO: 1957575 - DNA, 25 bp, Homo sapien
accgtcatagaggtgaagagctggc

SEQ ID NO: 1957576 - DNA, 25 bp, Homo sapien
gcagataattgaacttgttgtcacc

SEQ ID NO: 1957577 - DNA, 25 bp, Homo sapien
cacaggagccttctggaccacgagc

SEQ ID NO: 1957578 - DNA, 25 bp, Homo sapien
gctgaaacgtgcttctgaagtggct

SEQ ID NO: 1957579 - DNA, 25 bp, Homo sapien
ttgttgtcaccgctcccttgaccgg

SEQ ID NO: 1957580 - DNA, 25 bp, Homo sapien
ggccatgcttgaggatctacccttt

SEQ ID NO: 1957581 - DNA, 25 bp, Homo sapien
cagcaaagcgttttcccagtgcaag

SEQ ID NO: 1957582 - DNA, 25 bp, Homo sapien
gaaacacggtagacgttcccagtga

SEQ ID NO: 1957583 - DNA, 25 bp, Homo sapien
ggcgtcttctatgacagcaaagcgt

SEQ ID NO: 1957584 - DNA, 25 bp, Homo sapien
tcacggcatactcggtgtctgtggc

SEQ ID NO: 1957585 - DNA, 25 bp, Homo sapien
acatcgcttgcacactgagtaggag

SEQ ID NO: 1957586 - DNA, 25 bp, Homo sapien
aagtggatgttgttcccgtgtaact

SEQ ID NO: 1957587 - DNA, 25 bp, Homo sapien
gatctcgtagccatcggtgaagtgg

SEQ ID NO: 1957588 - DNA, 25 bp, Homo sapien
caacccactgcaggcaaacacagtt

SEQ ID NO: 1957589 - DNA, 25 bp, Homo sapien
ccccaacccactgcaggcaaacaca

SEQ ID NO: 1957590 - DNA, 25 bp, Homo sapien
ccaacccactgcaggcaaacacagt

SEQ ID NO: 1957591 - DNA, 25 bp, Homo sapien
acccactgcaggcaaacacagttac

SEQ ID NO: 1957592 - DNA, 25 bp, Homo sapien
cctggatcaggcttgaggccacaaa

SEQ ID NO: 1957593 - DNA, 25 bp, Homo sapien
ctgcacgattgggtgaactgggact

SEQ ID NO: 1957594 - DNA, 25 bp, Homo sapien
caaagctgaatcctctaaacaggtg

SEQ ID NO: 1957595 - DNA, 25 bp, Homo sapien
aaacaggtgatgagcgtttgcactc

SEQ ID NO: 1957596 - DNA, 25 bp, Homo sapien
tgggcgtccgcgctgtgaactcggg

SEQ ID NO: 1957597 - DNA, 25 bp, Homo sapien
ctgtgggcgtccgcgctgtgaactc

SEQ ID NO: 1957598 - DNA, 25 bp, Homo sapien
cccactgctggtttgaacggtggct

SEQ ID NO: 1957599 - DNA, 25 bp, Homo sapien
caggcctgcccactgctggtttgaa

SEQ ID NO: 1957600 - DNA, 25 bp, Homo sapien
ggcgtagtcctcaggcgggtgatgc

SEQ ID NO: 1957601 - DNA, 25 bp, Homo sapien
aacctggcgtagtcctcaggcgggt

SEQ ID NO: 1957602 - DNA, 25 bp, Homo sapien
tggaacctggcgtagtcctcaggcg

SEQ ID NO: 1957603 - DNA, 25 bp, Homo sapien
ctggcgtagtcctcaggcgggtgat

SEQ ID NO: 1957604 - DNA, 25 bp, Homo sapien
tagatggagggagccgggggagccc

SEQ ID NO: 1957605 - DNA, 25 bp, Homo sapien
cttagatggagggagccgggggagc

SEQ ID NO: 1957606 - DNA, 25 bp, Homo sapien
tggagggagccgggggagcccagtg

SEQ ID NO: 1957607 - DNA, 25 bp, Homo sapien
gatggagggagccgggggagcccag

SEQ ID NO: 1957608 - DNA, 25 bp, Homo sapien
tgtgtgtgaccatctagagctcagt

SEQ ID NO: 1957609 - DNA, 25 bp, Homo sapien
tgagcatggggtttccttaatcctg

SEQ ID NO: 1957610 - DNA, 25 bp, Homo sapien
agttctggactcagggaccctcatg

SEQ ID NO: 1957611 - DNA, 25 bp, Homo sapien
tgttcgcagaaaacatccagcctgg

SEQ ID NO: 1957612 - DNA, 25 bp, Homo sapien
aaactggttgtcacgtattcattcc

SEQ ID NO: 1957613 - DNA, 25 bp, Homo sapien
aatacaaaactggttgtcacgtatt

SEQ ID NO: 1957614 - DNA, 25 bp, Homo sapien
gttgtcacgtattcattccagtgtg

SEQ ID NO: 1957615 - DNA, 25 bp, Homo sapien
tacttttattatgaggaggaattta

SEQ ID NO: 1957616 - DNA, 25 bp, Homo sapien
ctccggaaagcaggggcccacatgg

SEQ ID NO: 1957617 - DNA, 25 bp, Homo sapien
tcctctcctccgtgccagctcttcc

SEQ ID NO: 1957618 - DNA, 25 bp, Homo sapien
ctagctcctctcctccgtgccagct

SEQ ID NO: 1957619 - DNA, 25 bp, Homo sapien
cccacatggcccctctagctcctct

SEQ ID NO: 1957620 - DNA, 25 bp, Homo sapien
gactggatgttgaggcgactggcca

SEQ ID NO: 1957621 - DNA, 25 bp, Homo sapien
ccaccacacagcatcgcgcaggtgc

SEQ ID NO: 1957622 - DNA, 25 bp, Homo sapien
tgcttcttcatagaggggttttgcc

SEQ ID NO: 1957623 - DNA, 25 bp, Homo sapien
ctcaaaagtgcaacgtcaaccagct

SEQ ID NO: 1957624 - DNA, 25 bp, Homo sapien
tgtgagagtggacggagcgcttgct

SEQ ID NO: 1957625 - DNA, 25 bp, Homo sapien
acatgggtccgtgtgccaaccgcag

SEQ ID NO: 1957626 - DNA, 25 bp, Homo sapien
caaccgcagctatgaacacagcctg

SEQ ID NO: 1957627 - DNA, 25 bp, Homo sapien
caactggccaccccgtaacatgggt

SEQ ID NO: 1957628 - DNA, 25 bp, Homo sapien
gaggctgctgcgttctcactctggt

SEQ ID NO: 1957629 - DNA, 25 bp, Homo sapien
gcagtgaggttctgtgcgggccgcc

SEQ ID NO: 1957630 - DNA, 25 bp, Homo sapien
gtggccaactggagccggtcactct

SEQ ID NO: 1957631 - DNA, 25 bp, Homo sapien
tcgaggcttgctgcaatcttaaagg

SEQ ID NO: 1957632 - DNA, 25 bp, Homo sapien
taaaccactgtaggcagggttgtgt

SEQ ID NO: 1957633 - DNA, 25 bp, Homo sapien
gggagaagtcatccggcctcttgct

SEQ ID NO: 1957634 - DNA, 25 bp, Homo sapien
ctcttgctttgtatgtaaaccactg

SEQ ID NO: 1957635 - DNA, 25 bp, Homo sapien
atttggaaggtgctaatatgtgtta

SEQ ID NO: 1957636 - DNA, 25 bp, Homo sapien
gtcccaggatgtcagaatgacacag

SEQ ID NO: 1957637 - DNA, 25 bp, Homo sapien
cagtctcatgatcaaattcgccagg

SEQ ID NO: 1957638 - DNA, 25 bp, Homo sapien
tgagcttaacgagacagacactggc

SEQ ID NO: 1957639 - DNA, 25 bp, Homo sapien
gggacaattcatgccgaaaccgacg

SEQ ID NO: 1957640 - DNA, 25 bp, Homo sapien
ctttctgaagaatgggttgatggct

SEQ ID NO: 1957641 - DNA, 25 bp, Homo sapien
gctttctgaagaatgggttgatggc

SEQ ID NO: 1957642 - DNA, 25 bp, Homo sapien
ttctgaagaatgggttgatggcttg

SEQ ID NO: 1957643 - DNA, 25 bp, Homo sapien
tgctttctgaagaatgggttgatgg

SEQ ID NO: 1957644 - DNA, 25 bp, Homo sapien
gcttggtgaaaagtgagatacgaga

SEQ ID NO: 1957645 - DNA, 25 bp, Homo sapien
cttggcagaaataggcaattgacac

SEQ ID NO: 1957646 - DNA, 25 bp, Homo sapien
tcaccattcggagttggcgtcttgg

SEQ ID NO: 1957647 - DNA, 25 bp, Homo sapien
caattgacacttgtagcttggtgaa

SEQ ID NO: 1957648 - DNA, 25 bp, Homo sapien
tagccctagcactaaagggtcctgg

SEQ ID NO: 1957649 - DNA, 25 bp, Homo sapien
tctgggcctgcccatagccctagca

SEQ ID NO: 1957650 - DNA, 25 bp, Homo sapien
cctagcactaaagggtcctggttga

SEQ ID NO: 1957651 - DNA, 25 bp, Homo sapien
ctgcccatagccctagcactaaagg

SEQ ID NO: 1957652 - DNA, 25 bp, Homo sapien
atttcctccactccgtcaatgccag

SEQ ID NO: 1957653 - DNA, 25 bp, Homo sapien
tcacaaagaagggatggcgcttaat

SEQ ID NO: 1957654 - DNA, 25 bp, Homo sapien
aagggatggcgcttaatttcctcca

SEQ ID NO: 1957655 - DNA, 25 bp, Homo sapien
ttccagtctatggtcacaaagaagg

SEQ ID NO: 1957656 - DNA, 25 bp, Homo sapien
actcagccccgagggcttgtgaggc

SEQ ID NO: 1957657 - DNA, 25 bp, Homo sapien
ccagctcagaaagccacgactcagc

SEQ ID NO: 1957658 - DNA, 25 bp, Homo sapien
agctcagaaagccacgactcagccc

SEQ ID NO: 1957659 - DNA, 25 bp, Homo sapien
agaaagccacgactcagccccgagg

SEQ ID NO: 1957660 - DNA, 25 bp, Homo sapien
tatttcacattttgtacccactgta

SEQ ID NO: 1957661 - DNA, 25 bp, Homo sapien
aggtgtggcaacttgttggctgtac

SEQ ID NO: 1957662 - DNA, 25 bp, Homo sapien
ggctgtacttctttggaggatctat

SEQ ID NO: 1957663 - DNA, 25 bp, Homo sapien
tcacattttgtacccactgtatttc

SEQ ID NO: 1957664 - DNA, 25 bp, Homo sapien
cagagtcacacgtgcccccaggtgt

SEQ ID NO: 1957665 - DNA, 25 bp, Homo sapien
tgcagagtcacacgtgcccccaggt

SEQ ID NO: 1957666 - DNA, 25 bp, Homo sapien
attgcagagtcacacgtgcccccag

SEQ ID NO: 1957667 - DNA, 25 bp, Homo sapien
agagtcacacgtgcccccaggtgtg

SEQ ID NO: 1957668 - DNA, 25 bp, Homo sapien
cattttatcttcaggggatgtggag

SEQ ID NO: 1957669 - DNA, 25 bp, Homo sapien
ctaggagcctggagcaactcacacg

SEQ ID NO: 1957670 - DNA, 25 bp, Homo sapien
agcctaggagcctggagcaactcac

SEQ ID NO: 1957671 - DNA, 25 bp, Homo sapien
agaagcctaggagcctggagcaact

SEQ ID NO: 1957672 - DNA, 25 bp, Homo sapien
aggagcctggagcaactcacacggg

SEQ ID NO: 1957673 - DNA, 25 bp, Homo sapien
gcttcttcatgttgagcctgggcat

SEQ ID NO: 1957674 - DNA, 25 bp, Homo sapien
aatccagcgccctccctggataaag

SEQ ID NO: 1957675 - DNA, 25 bp, Homo sapien
gctgggcaattaattctgactgtag

SEQ ID NO: 1957676 - DNA, 25 bp, Homo sapien
cagctccgcaggcaactaaatccag

SEQ ID NO: 1957677 - DNA, 25 bp, Homo sapien
acacggtttgaagggcgatcttggc

SEQ ID NO: 1957678 - DNA, 25 bp, Homo sapien
cgatcttggcccgaggtgagccatt

SEQ ID NO: 1957679 - DNA, 25 bp, Homo sapien
ttttaaccaatactcatctctacac

SEQ ID NO: 1957680 - DNA, 25 bp, Homo sapien
ttagacacggtttgaagggcgatct

SEQ ID NO: 1957681 - DNA, 25 bp, Homo sapien
gatccattttgtgcctcatctgctt

SEQ ID NO: 1957682 - DNA, 25 bp, Homo sapien
tgtcagagagcccacgagcatgagg

SEQ ID NO: 1957683 - DNA, 25 bp, Homo sapien
ctgcaggcatttgtgcgcgtctggg

SEQ ID NO: 1957684 - DNA, 25 bp, Homo sapien
actttggcttcacgggtccccagag

SEQ ID NO: 1957685 - DNA, 25 bp, Homo sapien
gcgtgactcgccagctgcccgaaga

SEQ ID NO: 1957686 - DNA, 25 bp, Homo sapien
agtgagatggcagcgtgactcgcca

SEQ ID NO: 1957687 - DNA, 25 bp, Homo sapien
tggacgaaagcacccagtgtctgcc

SEQ ID NO: 1957688 - DNA, 25 bp, Homo sapien
ccacggcgaggtggcagtgtggtcc

SEQ ID NO: 1957689 - DNA, 25 bp, Homo sapien
gtgagtggcagcatggtcctgctaa

SEQ ID NO: 1957690 - DNA, 25 bp, Homo sapien
atggtcctgctaactgccaggtgag

SEQ ID NO: 1957691 - DNA, 25 bp, Homo sapien
gcagcatggtcctgctaactgccag

SEQ ID NO: 1957692 - DNA, 25 bp, Homo sapien
gtggcagcatggtcctgctaactgc

SEQ ID NO: 1957693 - DNA, 25 bp, Homo sapien
taagagaatgcaggactgtgcaagt

SEQ ID NO: 1957694 - DNA, 25 bp, Homo sapien
ctgtgcaagtcactagcagaaaaac

SEQ ID NO: 1957695 - DNA, 25 bp, Homo sapien
tctgggtaagcgcacagaaacagca

SEQ ID NO: 1957696 - DNA, 25 bp, Homo sapien
cagaaaaacactttgtgaacaagaa

SEQ ID NO: 1957697 - DNA, 25 bp, Homo sapien
ccccagacgcacggtgatgaacggg

SEQ ID NO: 1957698 - DNA, 25 bp, Homo sapien
ccagacgcacggtgatgaacggggg

SEQ ID NO: 1957699 - DNA, 25 bp, Homo sapien
ctccccagacgcacggtgatgaacg

SEQ ID NO: 1957700 - DNA, 25 bp, Homo sapien
agacgcacggtgatgaacggggggg

SEQ ID NO: 1957701 - DNA, 25 bp, Homo sapien
caaggtgcagacagctttaggagct

SEQ ID NO: 1957702 - DNA, 25 bp, Homo sapien
tgagcccttgctgcgtttcctgagc

SEQ ID NO: 1957703 - DNA, 25 bp, Homo sapien
cactgtgtaaccgtgggtgtgcacc

SEQ ID NO: 1957704 - DNA, 25 bp, Homo sapien
tgaggtcttgcccatgacaggccct

SEQ ID NO: 1957705 - DNA, 25 bp, Homo sapien
tcggtgacaaggaggaattgcttta

SEQ ID NO: 1957706 - DNA, 25 bp, Homo sapien
tgcagaggtgctcggtgacaaggag

SEQ ID NO: 1957707 - DNA, 25 bp, Homo sapien
tctcctggtagccacgctcggcatg

SEQ ID NO: 1957708 - DNA, 25 bp, Homo sapien
cacgctcggcatgcagaggtgctcg

SEQ ID NO: 1957709 - DNA, 25 bp, Homo sapien
gcagcaactatgtgttttagaagct

SEQ ID NO: 1957710 - DNA, 25 bp, Homo sapien
gggaagtcagattggttgaaggata

SEQ ID NO: 1957711 - DNA, 25 bp, Homo sapien
gctcagatggcactggtactatttc

SEQ ID NO: 1957712 - DNA, 25 bp, Homo sapien
ctcagatggcactggtactatttca

SEQ ID NO: 1957713 - DNA, 25 bp, Homo sapien
agcgccctgcacgttcccgtggtgg

SEQ ID NO: 1957714 - DNA, 25 bp, Homo sapien
ttggttggcattgggccggagcagg

SEQ ID NO: 1957715 - DNA, 25 bp, Homo sapien
tctccactgtagcttgcggggcagc

SEQ ID NO: 1957716 - DNA, 25 bp, Homo sapien
ttttcagtgaccttggttggcattg

SEQ ID NO: 1957717 - DNA, 25 bp, Homo sapien
ttccgtttgaagagagctcgcagca

SEQ ID NO: 1957718 - DNA, 25 bp, Homo sapien
gggttccgtttgaagagagctcgca

SEQ ID NO: 1957719 - DNA, 25 bp, Homo sapien
cgtttgaagagagctcgcagcaaac

SEQ ID NO: 1957720 - DNA, 25 bp, Homo sapien
caggggttccgtttgaagagagctc

SEQ ID NO: 1957721 - DNA, 25 bp, Homo sapien
tcttcctggctcataggagacagct

SEQ ID NO: 1957722 - DNA, 25 bp, Homo sapien
gaatcactgcaaaggtcctgacttg

SEQ ID NO: 1957723 - DNA, 25 bp, Homo sapien
cacacccgtgacttgctgtcaggga

SEQ ID NO: 1957724 - DNA, 25 bp, Homo sapien
aacctgcgagaggaggacctgcaaa

SEQ ID NO: 1957725 - DNA, 25 bp, Homo sapien
gaacggcagggaccccgtgagcatc

SEQ ID NO: 1957726 - DNA, 25 bp, Homo sapien
tggaacggcagggaccccgtgagca

SEQ ID NO: 1957727 - DNA, 25 bp, Homo sapien
cggcagggaccccgtgagcatctca

SEQ ID NO: 1957728 - DNA, 25 bp, Homo sapien
cctggaacggcagggaccccgtgag

SEQ ID NO: 1957729 - DNA, 25 bp, Homo sapien
cagggcagcctgctaccgtgtccat

SEQ ID NO: 1957730 - DNA, 25 bp, Homo sapien
agcacagtgagttcattcatccaga

SEQ ID NO: 1957731 - DNA, 25 bp, Homo sapien
ttcacggcagagtaccccagcaggg

SEQ ID NO: 1957732 - DNA, 25 bp, Homo sapien
tcattcatccagatggacccggctt

SEQ ID NO: 1957733 - DNA, 25 bp, Homo sapien
cacgcggtttaggaacctgtcctgc

SEQ ID NO: 1957734 - DNA, 25 bp, Homo sapien
tggacgaacacatcttacacgcggt

SEQ ID NO: 1957735 - DNA, 25 bp, Homo sapien
ggccccgagtacgacagagaaaaga

SEQ ID NO: 1957736 - DNA, 25 bp, Homo sapien
gtagccactggcctacgtgcttggg

SEQ ID NO: 1957737 - DNA, 25 bp, Homo sapien
tctgctattgtaagtactactgaaa

SEQ ID NO: 1957738 - DNA, 25 bp, Homo sapien
tattcttatgataggctgctaggag

SEQ ID NO: 1957739 - DNA, 25 bp, Homo sapien
aagaaatggaaactcttccaccagt

SEQ ID NO: 1957740 - DNA, 25 bp, Homo sapien
cacttaacaaacatggatatgacaa

SEQ ID NO: 1957741 - DNA, 25 bp, Homo sapien
tccatccatatggtaggaggtcccc

SEQ ID NO: 1957742 - DNA, 25 bp, Homo sapien
tttttagcttttgaagatgattccc

SEQ ID NO: 1957743 - DNA, 25 bp, Homo sapien
gattcccttgtgatcagggtccact

SEQ ID NO: 1957744 - DNA, 25 bp, Homo sapien
tccatatggtaggaggtccccaacc

SEQ ID NO: 1957745 - DNA, 25 bp, Homo sapien
ctggggcggaggtgtggactttgca

SEQ ID NO: 1957746 - DNA, 25 bp, Homo sapien
gcacccatgaatattcaacaactgc

SEQ ID NO: 1957747 - DNA, 25 bp, Homo sapien
cccatgaatattcaacaactgcttc

SEQ ID NO: 1957748 - DNA, 25 bp, Homo sapien
cagcacccatgaatattcaacaact

SEQ ID NO: 1957749 - DNA, 25 bp, Homo sapien
aattggacagacataacgcagtgct

SEQ ID NO: 1957750 - DNA, 25 bp, Homo sapien
ggattctttcccaatcggcaccgag

SEQ ID NO: 1957751 - DNA, 25 bp, Homo sapien
agatgtagccaaagctccaccgggt

SEQ ID NO: 1957752 - DNA, 25 bp, Homo sapien
gagcagcactgagacttgccaaggc

SEQ ID NO: 1957753 - DNA, 25 bp, Homo sapien
tgggtaagatacgacttcaaaggtc

SEQ ID NO: 1957754 - DNA, 25 bp, Homo sapien
ggcttgggtaagatacgacttcaaa

SEQ ID NO: 1957755 - DNA, 25 bp, Homo sapien
taagatacgacttcaaaggtcaccc

SEQ ID NO: 1957756 - DNA, 25 bp, Homo sapien
tacgacttcaaaggtcacccgaggc

SEQ ID NO: 1957757 - DNA, 25 bp, Homo sapien
tacgctctcttgtcgtggtcaatgg

SEQ ID NO: 1957758 - DNA, 25 bp, Homo sapien
ggttcaccacctcgggcgccatgta

SEQ ID NO: 1957759 - DNA, 25 bp, Homo sapien
tgtactcgatcgtcccgcagaagga

SEQ ID NO: 1957760 - DNA, 25 bp, Homo sapien
caccagtcggcactctgcgtgtgtc

SEQ ID NO: 1957761 - DNA, 25 bp, Homo sapien
gggggtccacactcaggcgggcatc

SEQ ID NO: 1957762 - DNA, 25 bp, Homo sapien
catcagcgtccttctgtgggctctg

SEQ ID NO: 1957763 - DNA, 25 bp, Homo sapien
tcagcgtccttctgtgggctctgcc

SEQ ID NO: 1957764 - DNA, 25 bp, Homo sapien
tctctgggtgtgttcgggggtccac

SEQ ID NO: 1957765 - DNA, 25 bp, Homo sapien
gtgtgcccaacaccattgcaagggt

SEQ ID NO: 1957766 - DNA, 25 bp, Homo sapien
caagggagtctcctctagaggcccc

SEQ ID NO: 1957767 - DNA, 25 bp, Homo sapien
gcagatgccattgaggatctggaga

SEQ ID NO: 1957768 - DNA, 25 bp, Homo sapien
ggactgcgggcagcttctactagct

SEQ ID NO: 1957769 - DNA, 25 bp, Homo sapien
tgtgatcttaatgtgcccctcttca

SEQ ID NO: 1957770 - DNA, 25 bp, Homo sapien
ctgtgatcttaatgtgcccctcttc

SEQ ID NO: 1957771 - DNA, 25 bp, Homo sapien
gtgcccctcttcatccaggaggatg

SEQ ID NO: 1957772 - DNA, 25 bp, Homo sapien
aatgtgcccctcttcatccaggagg

SEQ ID NO: 1957773 - DNA, 25 bp, Homo sapien
catcgaggagcttcgggcttcagca

SEQ ID NO: 1957774 - DNA, 25 bp, Homo sapien
gcttcagcaggtacatcttgtgatg

SEQ ID NO: 1957775 - DNA, 25 bp, Homo sapien
gatgagacctgctcccggcttggca

SEQ ID NO: 1957776 - DNA, 25 bp, Homo sapien
catgtgccggacgtgacagttgcct

SEQ ID NO: 1957777 - DNA, 25 bp, Homo sapien
ctgtggcgttccacggactggtggt

SEQ ID NO: 1957778 - DNA, 25 bp, Homo sapien
tggcgttccacggactggtggtgaa

SEQ ID NO: 1957779 - DNA, 25 bp, Homo sapien
gtggtgaagtcagatcatcaagcac

SEQ ID NO: 1957780 - DNA, 25 bp, Homo sapien
gactggtggtgaagtcagatcatca

SEQ ID NO: 1957781 - DNA, 25 bp, Homo sapien
agatggtctaaagccaaggccagct

SEQ ID NO: 1957782 - DNA, 25 bp, Homo sapien
ctgtagatgatccccaggctgtgga

SEQ ID NO: 1957783 - DNA, 25 bp, Homo sapien
tggagatggtctaaagccaaggcca

SEQ ID NO: 1957784 - DNA, 25 bp, Homo sapien
tgtggagatggtctaaagccaaggc

SEQ ID NO: 1957785 - DNA, 25 bp, Homo sapien
agagttggctatgggtgccccaagc

SEQ ID NO: 1957786 - DNA, 25 bp, Homo sapien
acattccgggatcccacgtagctgg

SEQ ID NO: 1957787 - DNA, 25 bp, Homo sapien
gtacagagttggctatgggtgcccc

SEQ ID NO: 1957788 - DNA, 25 bp, Homo sapien
tggcagccacattccgggatcccac

SEQ ID NO: 1957789 - DNA, 25 bp, Homo sapien
ctggaccccgtacttgctaaatgac

SEQ ID NO: 1957790 - DNA, 25 bp, Homo sapien
tgctaaatgacgacccaaggtgagt

SEQ ID NO: 1957791 - DNA, 25 bp, Homo sapien
gtgagttctgcaggttcgccggcac

SEQ ID NO: 1957792 - DNA, 25 bp, Homo sapien
accggcacagcgatggtccccgtaa

SEQ ID NO: 1957793 - DNA, 25 bp, Homo sapien
tgtggtgcccgccctggacaacttc

SEQ ID NO: 1957794 - DNA, 25 bp, Homo sapien
aagactttccgcaggttcccagcaa

SEQ ID NO: 1957795 - DNA, 25 bp, Homo sapien
tcccagcaactccacgaatctgtgg

SEQ ID NO: 1957796 - DNA, 25 bp, Homo sapien
tcctactccgaaatgaaggccctcg

SEQ ID NO: 1957797 - DNA, 25 bp, Homo sapien
tggacaaaactggaccccaaatgga

SEQ ID NO: 1957798 - DNA, 25 bp, Homo sapien
aactggaccccaaatggactgactc

SEQ ID NO: 1957799 - DNA, 25 bp, Homo sapien
gggcccaaccacaggcgtgtcatag

SEQ ID NO: 1957800 - DNA, 25 bp, Homo sapien
tcatagcagctgctggacaaaactg

SEQ ID NO: 1957801 - DNA, 25 bp, Homo sapien
tggtctctgggaccctttgcgcccg

SEQ ID NO: 1957802 - DNA, 25 bp, Homo sapien
ttgcgcccgattcaggagcagctct

SEQ ID NO: 1957803 - DNA, 25 bp, Homo sapien
actgctggacgcagagggacagggc

SEQ ID NO: 1957804 - DNA, 25 bp, Homo sapien
gctctgccttggtttactgttcatt

SEQ ID NO: 1957805 - DNA, 25 bp, Homo sapien
tcctgcccgccctcctgtgtgatgt

SEQ ID NO: 1957806 - DNA, 25 bp, Homo sapien
agtccaggatcaggtagagctttcc

SEQ ID NO: 1957807 - DNA, 25 bp, Homo sapien
ctctttggagagccgggtgaagagg

SEQ ID NO: 1957808 - DNA, 25 bp, Homo sapien
tcccctccccgcaggaagtccagga

SEQ ID NO: 1957809 - DNA, 25 bp, Homo sapien
ttggagagccgggtgaagaggtccc

SEQ ID NO: 1957810 - DNA, 25 bp, Homo sapien
tctctccatcttcgatctcactcgg

SEQ ID NO: 1957811 - DNA, 25 bp, Homo sapien
atcttcgatctcactcggtcccgaa

SEQ ID NO: 1957812 - DNA, 25 bp, Homo sapien
ccatcttcgatctcactcggtcccg

SEQ ID NO: 1957813 - DNA, 25 bp, Homo sapien
aggggtgattcacttctgccaagat

SEQ ID NO: 1957814 - DNA, 25 bp, Homo sapien
cagccagcatgtgagcactgtcctc

SEQ ID NO: 1957815 - DNA, 25 bp, Homo sapien
ccagccagcatgtgagcactgtcct

SEQ ID NO: 1957816 - DNA, 25 bp, Homo sapien
cccagccagcatgtgagcactgtcc

SEQ ID NO: 1957817 - DNA, 25 bp, Homo sapien
gccagcatgtgagcactgtcctcac

SEQ ID NO: 1957818 - DNA, 25 bp, Homo sapien
catggactgtggcacagaagacaaa

SEQ ID NO: 1957819 - DNA, 25 bp, Homo sapien
agcatggactgtggcacagaagaca

SEQ ID NO: 1957820 - DNA, 25 bp, Homo sapien
acaggggcagcatggactgtggcac

SEQ ID NO: 1957821 - DNA, 25 bp, Homo sapien
ggcagcatggactgtggcacagaag

SEQ ID NO: 1957822 - DNA, 25 bp, Homo sapien
tacaggccaagggatggccctgtag

SEQ ID NO: 1957823 - DNA, 25 bp, Homo sapien
ggtaccctcagggatgccagtgggc

SEQ ID NO: 1957824 - DNA, 25 bp, Homo sapien
gatgccagtgggctggcgcacagag

SEQ ID NO: 1957825 - DNA, 25 bp, Homo sapien
ggatacaggccaagggatggccctg

SEQ ID NO: 1957826 - DNA, 25 bp, Homo sapien
catgatgtggtccacagtgggaaga

SEQ ID NO: 1957827 - DNA, 25 bp, Homo sapien
atgatgtggtccacagtgggaagac

SEQ ID NO: 1957828 - DNA, 25 bp, Homo sapien
atgttctgtatggttgactccccag

SEQ ID NO: 1957829 - DNA, 25 bp, Homo sapien
gacagtgaatgcaacatattccaga

SEQ ID NO: 1957830 - DNA, 25 bp, Homo sapien
cagattaaacccatcagtgcaggga

SEQ ID NO: 1957831 - DNA, 25 bp, Homo sapien
tacaaattggccattcaaaaagatt

SEQ ID NO: 1957832 - DNA, 25 bp, Homo sapien
tgtgttggggacgtagtggatgccg

SEQ ID NO: 1957833 - DNA, 25 bp, Homo sapien
cactgtgttggggacgtagtggatg

SEQ ID NO: 1957834 - DNA, 25 bp, Homo sapien
ttggggacgtagtggatgccgcact

SEQ ID NO: 1957835 - DNA, 25 bp, Homo sapien
gggacgtagtggatgccgcactgac

SEQ ID NO: 1957836 - DNA, 25 bp, Homo sapien
ggcagtcagaggctcgatgatgctt

SEQ ID NO: 1957837 - DNA, 25 bp, Homo sapien
agcatacgcagacggccttggtgac

SEQ ID NO: 1957838 - DNA, 25 bp, Homo sapien
cgatgatgctttgtggttgatgcag

SEQ ID NO: 1957839 - DNA, 25 bp, Homo sapien
ttggtgacctgaaggcctggcagtc

SEQ ID NO: 1957840 - DNA, 25 bp, Homo sapien
ttagctactcaagcacattgttcca

SEQ ID NO: 1957841 - DNA, 25 bp, Homo sapien
taattttagctactcaagcacattg

SEQ ID NO: 1957842 - DNA, 25 bp, Homo sapien
tcttaacatgttgcctaagtctcga

SEQ ID NO: 1957843 - DNA, 25 bp, Homo sapien
ctcaagcacattgttccaaaatatt

SEQ ID NO: 1957844 - DNA, 25 bp, Homo sapien
tgcctctcctggacggtcatatgag

SEQ ID NO: 1957845 - DNA, 25 bp, Homo sapien
tggctactgtgaattggctggtgct

SEQ ID NO: 1957846 - DNA, 25 bp, Homo sapien
agtagaatcttaacccgtgcggctt

SEQ ID NO: 1957847 - DNA, 25 bp, Homo sapien
tgcctggctgttcccgctaagtaca

SEQ ID NO: 1957848 - DNA, 25 bp, Homo sapien
ttcatggcgtagagctgcccagcgt

SEQ ID NO: 1957849 - DNA, 25 bp, Homo sapien
ttcttaaggaccttcatggcgtaga

SEQ ID NO: 1957850 - DNA, 25 bp, Homo sapien
cttcatggcgtagagctgcccagcg

SEQ ID NO: 1957851 - DNA, 25 bp, Homo sapien
tttcttaaggaccttcatggcgtag

SEQ ID NO: 1957852 - DNA, 25 bp, Homo sapien
cggaacatcagaaacccgtaagact

SEQ ID NO: 1957853 - DNA, 25 bp, Homo sapien
cttagcaagagaaaacggaacatca

SEQ ID NO: 1957854 - DNA, 25 bp, Homo sapien
cgtaagacttcaaactcgctttcca

SEQ ID NO: 1957855 - DNA, 25 bp, Homo sapien
catcagaaacccgtaagacttcaaa

SEQ ID NO: 1957856 - DNA, 25 bp, Homo sapien
aacaagtacactggtgagaatttaa

SEQ ID NO: 1957857 - DNA, 25 bp, Homo sapien
caaggaagtttagagcattttcaat

SEQ ID NO: 1957858 - DNA, 25 bp, Homo sapien
tcaaggctgccggaaaatgctctaa

SEQ ID NO: 1957859 - DNA, 25 bp, Homo sapien
aaaattttctccaacgtcaaggctg

SEQ ID NO: 1957860 - DNA, 25 bp, Homo sapien
aagagcagcggcttcggagagccta

SEQ ID NO: 1957861 - DNA, 25 bp, Homo sapien
caagtcactcggatggctcctggtg

SEQ ID NO: 1957862 - DNA, 25 bp, Homo sapien
gctcacacaggcaggcaatgggaca

SEQ ID NO: 1957863 - DNA, 25 bp, Homo sapien
cttattccggctgaccaggtgaaga

SEQ ID NO: 1957864 - DNA, 25 bp, Homo sapien
agaccccggttctgaactgtccagg

SEQ ID NO: 1957865 - DNA, 25 bp, Homo sapien
cggttctgaactgtccaggttcccg

SEQ ID NO: 1957866 - DNA, 25 bp, Homo sapien
cctgtgccactggaattctggctgt

SEQ ID NO: 1957867 - DNA, 25 bp, Homo sapien
aaagtgagaccccggttctgaactg

SEQ ID NO: 1957868 - DNA, 25 bp, Homo sapien
atgatggctgatgtctatctccttc

SEQ ID NO: 1957869 - DNA, 25 bp, Homo sapien
gccctccttcacatgatggctgatg

SEQ ID NO: 1957870 - DNA, 25 bp, Homo sapien
tccttgtcctaaaaccttcagcagc

SEQ ID NO: 1957871 - DNA, 25 bp, Homo sapien
aagccctccttcacatgatggctga

SEQ ID NO: 1957872 - DNA, 25 bp, Homo sapien
tccacgcggctgctggaggtggctt

SEQ ID NO: 1957873 - DNA, 25 bp, Homo sapien
cttccacgcggctgctggaggtggc

SEQ ID NO: 1957874 - DNA, 25 bp, Homo sapien
ttccacgcggctgctggaggtggct

SEQ ID NO: 1957875 - DNA, 25 bp, Homo sapien
ccacgcggctgctggaggtggcttc

SEQ ID NO: 1957876 - DNA, 25 bp, Homo sapien
aactggaccttgtacgttgctggtg

SEQ ID NO: 1957877 - DNA, 25 bp, Homo sapien
tgtgatgcaaaaactcgaacagccc

SEQ ID NO: 1957878 - DNA, 25 bp, Homo sapien
ccagcaaacgtattccagggcattt

SEQ ID NO: 1957879 - DNA, 25 bp, Homo sapien
catcaaacatcggtgaggatgcaga

SEQ ID NO: 1957880 - DNA, 25 bp, Homo sapien
catagctctagacactgaccacctg

SEQ ID NO: 1957881 - DNA, 25 bp, Homo sapien
agttctaagcagcattcatcaggcc

SEQ ID NO: 1957882 - DNA, 25 bp, Homo sapien
gctctccgaccttggagccataaag

SEQ ID NO: 1957883 - DNA, 25 bp, Homo sapien
cccacttccttgttgtgaaaagtca

SEQ ID NO: 1957884 - DNA, 25 bp, Homo sapien
caaaaaacaatccatgatgagccac

SEQ ID NO: 1957885 - DNA, 25 bp, Homo sapien
aaagcaccctttaatcggccatgag

SEQ ID NO: 1957886 - DNA, 25 bp, Homo sapien
tgagtcacatccatggtggcaaatc

SEQ ID NO: 1957887 - DNA, 25 bp, Homo sapien
ccactgaggtaacccaggaagacat

SEQ ID NO: 1957888 - DNA, 25 bp, Homo sapien
ttcttctgagcgacctctccacagg

SEQ ID NO: 1957889 - DNA, 25 bp, Homo sapien
ctctaagttaatgggtacagacaca

SEQ ID NO: 1957890 - DNA, 25 bp, Homo sapien
gccctggccgctttccaagtgatgt

SEQ ID NO: 1957891 - DNA, 25 bp, Homo sapien
cgtcacgtgaggttagcgctgttcc

SEQ ID NO: 1957892 - DNA, 25 bp, Homo sapien
cacggaccacagacaaggtcacctt

SEQ ID NO: 1957893 - DNA, 25 bp, Homo sapien
ggaccacagacaaggtcaccttggg

SEQ ID NO: 1957894 - DNA, 25 bp, Homo sapien
ctgctgcacggaccacagacaaggt

SEQ ID NO: 1957895 - DNA, 25 bp, Homo sapien
gctgctgcacggaccacagacaagg

SEQ ID NO: 1957896 - DNA, 25 bp, Homo sapien
ctccacgctccactggtcatatggc

SEQ ID NO: 1957897 - DNA, 25 bp, Homo sapien
aaggacagaagacccagcgcacgtg

SEQ ID NO: 1957898 - DNA, 25 bp, Homo sapien
gacagaagacccagcgcacgtgttc

SEQ ID NO: 1957899 - DNA, 25 bp, Homo sapien
tatctttttctacgtaaaggacaga

SEQ ID NO: 1957900 - DNA, 25 bp, Homo sapien
cgtgttctgatgcaggaagacgtac

SEQ ID NO: 1957901 - DNA, 25 bp, Homo sapien
tgccagggtcgtgaccgtaaacacc

SEQ ID NO: 1957902 - DNA, 25 bp, Homo sapien
taaacaccgaggttctcttccagag

SEQ ID NO: 1957903 - DNA, 25 bp, Homo sapien
cccattgactgccagggtcgtgacc

SEQ ID NO: 1957904 - DNA, 25 bp, Homo sapien
tggcataagcttgcagcctcgagtc

SEQ ID NO: 1957905 - DNA, 25 bp, Homo sapien
gggttctgaaaccacctagattgca

SEQ ID NO: 1957906 - DNA, 25 bp, Homo sapien
ggttctgaaaccacctagattgcag

SEQ ID NO: 1957907 - DNA, 25 bp, Homo sapien
gagactcaagtgtggagctgactca

SEQ ID NO: 1957908 - DNA, 25 bp, Homo sapien
agagactcaagtgtggagctgactc

SEQ ID NO: 1957909 - DNA, 25 bp, Homo sapien
agactcaagtgtggagctgactcat

SEQ ID NO: 1957910 - DNA, 25 bp, Homo sapien
aagagactcaagtgtggagctgact

SEQ ID NO: 1957911 - DNA, 25 bp, Homo sapien
tggatactctcttaccttacaaagt

SEQ ID NO: 1957912 - DNA, 25 bp, Homo sapien
tatagattaaggaatcacaaagtac

SEQ ID NO: 1957913 - DNA, 25 bp, Homo sapien
ggaatcacaaagtaccatagtcact

SEQ ID NO: 1957914 - DNA, 25 bp, Homo sapien
gaaacgagcacatctaagcatatgg

SEQ ID NO: 1957915 - DNA, 25 bp, Homo sapien
actatgaccaacagaagacacccaa

SEQ ID NO: 1957916 - DNA, 25 bp, Homo sapien
tattcccagcaaccatcgcatttcg

SEQ ID NO: 1957917 - DNA, 25 bp, Homo sapien
gaagtcaagcaatataatccacagt

SEQ ID NO: 1957918 - DNA, 25 bp, Homo sapien
cgcatttcgcaagtaagatctattt

SEQ ID NO: 1957919 - DNA, 25 bp, Homo sapien
accccaggatcgtccatgccactga

SEQ ID NO: 1957920 - DNA, 25 bp, Homo sapien
ggaggccgctggttgtaaccataat

SEQ ID NO: 1957921 - DNA, 25 bp, Homo sapien
taaccataatgtccatattgctggg

SEQ ID NO: 1957922 - DNA, 25 bp, Homo sapien
tgtaaccataatgtccatattgctg

SEQ ID NO: 1957923 - DNA, 25 bp, Homo sapien
cacacatcagttatacacaaagtca

SEQ ID NO: 1957924 - DNA, 25 bp, Homo sapien
aggcccatgaactagtccatatata

SEQ ID NO: 1957925 - DNA, 25 bp, Homo sapien
aacaagtcttttaataaggcccatg

SEQ ID NO: 1957926 - DNA, 25 bp, Homo sapien
gaagacatgacaaaggtaacacaca

SEQ ID NO: 1957927 - DNA, 25 bp, Homo sapien
actttccgggactgtgcgctctctg

SEQ ID NO: 1957928 - DNA, 25 bp, Homo sapien
ggactttccgggactgtgcgctctc

SEQ ID NO: 1957929 - DNA, 25 bp, Homo sapien
cacagtgggtagagtctgacttcct

SEQ ID NO: 1957930 - DNA, 25 bp, Homo sapien
caggactttccgggactgtgcgctc

SEQ ID NO: 1957931 - DNA, 25 bp, Homo sapien
ggtcttaggggactcctcttgggca

SEQ ID NO: 1957932 - DNA, 25 bp, Homo sapien
ctcttgggcacacgacatccctttg

SEQ ID NO: 1957933 - DNA, 25 bp, Homo sapien
tgggaacttgcagcacgtcgctgag

SEQ ID NO: 1957934 - DNA, 25 bp, Homo sapien
tccacagggaccctgcgctgggaac

SEQ ID NO: 1957935 - DNA, 25 bp, Homo sapien
aatttgtagccttgcatgtacataa

SEQ ID NO: 1957936 - DNA, 25 bp, Homo sapien
atctaatttgtagccttgcatgtac

SEQ ID NO: 1957937 - DNA, 25 bp, Homo sapien
ctctcgctctggctgattttgccat

SEQ ID NO: 1957938 - DNA, 25 bp, Homo sapien
ctcgctctggctgattttgccatct

SEQ ID NO: 1957939 - DNA, 25 bp, Homo sapien
gagacttgggatcttaccgggagac

SEQ ID NO: 1957940 - DNA, 25 bp, Homo sapien
ctggaattggcaagcatcatcggga

SEQ ID NO: 1957941 - DNA, 25 bp, Homo sapien
taagaatcagtcattagggtctggc

SEQ ID NO: 1957942 - DNA, 25 bp, Homo sapien
tagaaatgggcgcacatcacctgtg

SEQ ID NO: 1957943 - DNA, 25 bp, Homo sapien
gaggacttcaggtcgttgcactgta

SEQ ID NO: 1957944 - DNA, 25 bp, Homo sapien
tgaaagcacgtctatgttaatgggc

SEQ ID NO: 1957945 - DNA, 25 bp, Homo sapien
cacacgcacgtgcataactgaaagc

SEQ ID NO: 1957946 - DNA, 25 bp, Homo sapien
gggtgagaaccatgccatcagcctg

SEQ ID NO: 1957947 - DNA, 25 bp, Homo sapien
tgcaattttgtaccctaaagctcta

SEQ ID NO: 1957948 - DNA, 25 bp, Homo sapien
ccaaaacgaataaactttgaatgca

SEQ ID NO: 1957949 - DNA, 25 bp, Homo sapien
cctaaagctctatgatgctatttca

SEQ ID NO: 1957950 - DNA, 25 bp, Homo sapien
cagccaaaacgaataaactttgaat

SEQ ID NO: 1957951 - DNA, 25 bp, Homo sapien
gggcacctaggaacccattctgctt

SEQ ID NO: 1957952 - DNA, 25 bp, Homo sapien
tctgcggtctctgcgtgacacaagt

SEQ ID NO: 1957953 - DNA, 25 bp, Homo sapien
gatctgggcgggatatcaagaacca

SEQ ID NO: 1957954 - DNA, 25 bp, Homo sapien
gagcttagtctaaaagggatctggg

SEQ ID NO: 1957955 - DNA, 25 bp, Homo sapien
tccaaccagattctggcgggagatg

SEQ ID NO: 1957956 - DNA, 25 bp, Homo sapien
tggcactcttcactgggaatatccc

SEQ ID NO: 1957957 - DNA, 25 bp, Homo sapien
agattctggcgggagatgatgcaac

SEQ ID NO: 1957958 - DNA, 25 bp, Homo sapien
ttcactgcgaccacgtggcactctt

SEQ ID NO: 1957959 - DNA, 25 bp, Homo sapien
tagacaagttttagtgtcaagtata

SEQ ID NO: 1957960 - DNA, 25 bp, Homo sapien
ttattaatctgtaattactcgaaaa

SEQ ID NO: 1957961 - DNA, 25 bp, Homo sapien
ctgtaattactcgaaaatgggaaat

SEQ ID NO: 1957962 - DNA, 25 bp, Homo sapien
tatttagacaagttttagtgtcaag

SEQ ID NO: 1957963 - DNA, 25 bp, Homo sapien
tgtgaaacattagggctttccacgg

SEQ ID NO: 1957964 - DNA, 25 bp, Homo sapien
cttatgtgaaacattagggctttcc

SEQ ID NO: 1957965 - DNA, 25 bp, Homo sapien
tgaaacattagggctttccacggcc

SEQ ID NO: 1957966 - DNA, 25 bp, Homo sapien
tatgtgaaacattagggctttccac

SEQ ID NO: 1957967 - DNA, 25 bp, Homo sapien
ggctttccacggccttcaggacaca

SEQ ID NO: 1957968 - DNA, 25 bp, Homo sapien
gctcaggaaccaggcttgagccaca

SEQ ID NO: 1957969 - DNA, 25 bp, Homo sapien
cccaagagctttgggctctcacagc

SEQ ID NO: 1957970 - DNA, 25 bp, Homo sapien
tttctggggacactgacttctggca

SEQ ID NO: 1957971 - DNA, 25 bp, Homo sapien
gacactgacttctggcaggtgccag

SEQ ID NO: 1957972 - DNA, 25 bp, Homo sapien
tacatgacggtacagttgcggacag

SEQ ID NO: 1957973 - DNA, 25 bp, Homo sapien
ttgcggacagctccggtaggtgcat

SEQ ID NO: 1957974 - DNA, 25 bp, Homo sapien
tcgctcctgtccagcaacacgtgtt

SEQ ID NO: 1957975 - DNA, 25 bp, Homo sapien
ctgcctgaggccatgtcaaccgagt

SEQ ID NO: 1957976 - DNA, 25 bp, Homo sapien
tccattggcgtcaggtaagcaccac

SEQ ID NO: 1957977 - DNA, 25 bp, Homo sapien
cctcctccattggcgtcaggtaagc

SEQ ID NO: 1957978 - DNA, 25 bp, Homo sapien
ctccattggcgtcaggtaagcacca

SEQ ID NO: 1957979 - DNA, 25 bp, Homo sapien
tcctccattggcgtcaggtaagcac

SEQ ID NO: 1957980 - DNA, 25 bp, Homo sapien
gttaccaactccacgtcatacaaag

SEQ ID NO: 1957981 - DNA, 25 bp, Homo sapien
catacaaagtaaactcatcctggtc

SEQ ID NO: 1957982 - DNA, 25 bp, Homo sapien
atcaaaggagcactctcctggcagc

SEQ ID NO: 1957983 - DNA, 25 bp, Homo sapien
caaggccgcacacatctctggttga

SEQ ID NO: 1957984 - DNA, 25 bp, Homo sapien
tgccccacatgtgagaaacagaatg

SEQ ID NO: 1957985 - DNA, 25 bp, Homo sapien
gacagtcagcacgtgggtttacgga

SEQ ID NO: 1957986 - DNA, 25 bp, Homo sapien
ccaggtaaatggtaagtcagaggat

SEQ ID NO: 1957987 - DNA, 25 bp, Homo sapien
aaaatagtctgaacagtctttgctg

SEQ ID NO: 1957988 - DNA, 25 bp, Homo sapien
catgactggagccaatattgttcct

SEQ ID NO: 1957989 - DNA, 25 bp, Homo sapien
gaagaagagctcacctatcatgccc

SEQ ID NO: 1957990 - DNA, 25 bp, Homo sapien
gaaaccacccaagatctagaagaag

SEQ ID NO: 1957991 - DNA, 25 bp, Homo sapien
gatgcttgctaagagtcccttcaca

SEQ ID NO: 1957992 - DNA, 25 bp, Homo sapien
ctcaggtctctcaatggttacagaa

SEQ ID NO: 1957993 - DNA, 25 bp, Homo sapien
aacacgtttcactgttttgtcatct

SEQ ID NO: 1957994 - DNA, 25 bp, Homo sapien
ctgcgcgccccgagggcggccgcat

SEQ ID NO: 1957995 - DNA, 25 bp, Homo sapien
gcgcgccccgagggcggccgcatta

SEQ ID NO: 1957996 - DNA, 25 bp, Homo sapien
cgcgccccgagggcggccgcattac

SEQ ID NO: 1957997 - DNA, 25 bp, Homo sapien
tgcgcgccccgagggcggccgcatt

SEQ ID NO: 1957998 - DNA, 25 bp, Homo sapien
ctgcgcaggtacacagagaagaacc

SEQ ID NO: 1957999 - DNA, 25 bp, Homo sapien
cgacttcctgcgcaggtacacagag

SEQ ID NO: 1958000 - DNA, 25 bp, Homo sapien
tcgagccggctcaggctggagctct

SEQ ID NO: 1958001 - DNA, 25 bp, Homo sapien
tggagctcttggagcgcgacttcct

SEQ ID NO: 1958002 - DNA, 25 bp, Homo sapien
ggcgtggggcgcgagctgcggtcac

SEQ ID NO: 1958003 - DNA, 25 bp, Homo sapien
gcggccggggccacaatcgctccct

SEQ ID NO: 1958004 - DNA, 25 bp, Homo sapien
tgcggtcacaaagggcaggccgcgc

SEQ ID NO: 1958005 - DNA, 25 bp, Homo sapien
gcatccccggcatcccaggcgcggg

SEQ ID NO: 1958006 - DNA, 25 bp, Homo sapien
tcagcggcacatgaattccaggtag

SEQ ID NO: 1958007 - DNA, 25 bp, Homo sapien
gagccacacgaggaaaaggagaact

SEQ ID NO: 1958008 - DNA, 25 bp, Homo sapien
cacacgaggaaaaggagaacttcat

SEQ ID NO: 1958009 - DNA, 25 bp, Homo sapien
caggagccacacgaggaaaaggaga

SEQ ID NO: 1958010 - DNA, 25 bp, Homo sapien
gccacacgaggaaaaggagaacttc

SEQ ID NO: 1958011 - DNA, 25 bp, Homo sapien
caatctgacagcgagctgccgtggg

SEQ ID NO: 1958012 - DNA, 25 bp, Homo sapien
agcaatctgacagcgagctgccgtg

SEQ ID NO: 1958013 - DNA, 25 bp, Homo sapien
tgacagcgagctgccgtgggtaatt

SEQ ID NO: 1958014 - DNA, 25 bp, Homo sapien
gagctgccgtgggtaatttgtcaac

SEQ ID NO: 1958015 - DNA, 25 bp, Homo sapien
ggttcagattcgcaggaggacagca

SEQ ID NO: 1958016 - DNA, 25 bp, Homo sapien
gaggttcagattcgcaggaggacag

SEQ ID NO: 1958017 - DNA, 25 bp, Homo sapien
gttcagattcgcaggaggacagcag

SEQ ID NO: 1958018 - DNA, 25 bp, Homo sapien
cgaggttcagattcgcaggaggaca

SEQ ID NO: 1958019 - DNA, 25 bp, Homo sapien
gcttgccagcaagcggagggcactc

SEQ ID NO: 1958020 - DNA, 25 bp, Homo sapien
tgagctgcagtgcaccaaacgaatc

SEQ ID NO: 1958021 - DNA, 25 bp, Homo sapien
gggctttctgcatagggatcctctg

SEQ ID NO: 1958022 - DNA, 25 bp, Homo sapien
cagacacataaagagtgagctgcag

SEQ ID NO: 1958023 - DNA, 25 bp, Homo sapien
gaaagtcactgctccgtgtctggct

SEQ ID NO: 1958024 - DNA, 25 bp, Homo sapien
tacttcatcggagcctagaatgccc

SEQ ID NO: 1958025 - DNA, 25 bp, Homo sapien
tagctgtcgaataagtggaatccca

SEQ ID NO: 1958026 - DNA, 25 bp, Homo sapien
gagggactccataattagctgtcga

SEQ ID NO: 1958027 - DNA, 25 bp, Homo sapien
ttgccctcggtgaagcccagcctga

SEQ ID NO: 1958028 - DNA, 25 bp, Homo sapien
gccgcttgccctcggtgaagcccag

SEQ ID NO: 1958029 - DNA, 25 bp, Homo sapien
cgcttgccctcggtgaagcccagcc

SEQ ID NO: 1958030 - DNA, 25 bp, Homo sapien
gcttgccctcggtgaagcccagcct

SEQ ID NO: 1958031 - DNA, 25 bp, Homo sapien
tacgctggtagctgaatctcgtccg

SEQ ID NO: 1958032 - DNA, 25 bp, Homo sapien
ggtagctgaatctcgtccgaccaca

SEQ ID NO: 1958033 - DNA, 25 bp, Homo sapien
tccaccgctgatacgctggtagctg

SEQ ID NO: 1958034 - DNA, 25 bp, Homo sapien
tctcgtccgaccacatggtgggtga

SEQ ID NO: 1958035 - DNA, 25 bp, Homo sapien
gatgccgttggatgtatccacagtg

SEQ ID NO: 1958036 - DNA, 25 bp, Homo sapien
ccaggaatccggcagatgccgttgg

SEQ ID NO: 1958037 - DNA, 25 bp, Homo sapien
cggcagatgccgttggatgtatcca

SEQ ID NO: 1958038 - DNA, 25 bp, Homo sapien
ggtgcagtcatcctcaagccttcac

SEQ ID NO: 1958039 - DNA, 25 bp, Homo sapien
tcacacagccaggtacttggtgccc

SEQ ID NO: 1958040 - DNA, 25 bp, Homo sapien
caggtacttggtgccctttctccca

SEQ ID NO: 1958041 - DNA, 25 bp, Homo sapien
cacagccaggtacttggtgcccttt

SEQ ID NO: 1958042 - DNA, 25 bp, Homo sapien
cagccaggtacttggtgccctttct

SEQ ID NO: 1958043 - DNA, 25 bp, Homo sapien
ggtctgtgcctctatctccatggta

SEQ ID NO: 1958044 - DNA, 25 bp, Homo sapien
tgctccccggctaagctgggtctgt

SEQ ID NO: 1958045 - DNA, 25 bp, Homo sapien
caccatggtgatggacgatgggccc

SEQ ID NO: 1958046 - DNA, 25 bp, Homo sapien
tgatcccgcagacaatgcaccatgg

SEQ ID NO: 1958047 - DNA, 25 bp, Homo sapien
actgagcatggccagttccgatttt

SEQ ID NO: 1958048 - DNA, 25 bp, Homo sapien
cagttccgatttttagaacctccag

SEQ ID NO: 1958049 - DNA, 25 bp, Homo sapien
cactggattcgtaggtgttgggctc

SEQ ID NO: 1958050 - DNA, 25 bp, Homo sapien
tctccccactggattcgtaggtgtt

SEQ ID NO: 1958051 - DNA, 25 bp, Homo sapien
cactgcgttccctccccaaggaggt

SEQ ID NO: 1958052 - DNA, 25 bp, Homo sapien
agagctgcacggtcccgcaatccca

SEQ ID NO: 1958053 - DNA, 25 bp, Homo sapien
ggccaaggagtccacactgcgttcc

SEQ ID NO: 1958054 - DNA, 25 bp, Homo sapien
caccgcatggctccggtctagggat

SEQ ID NO: 1958055 - DNA, 25 bp, Homo sapien
aagaactccctctatgagctcgaag

SEQ ID NO: 1958056 - DNA, 25 bp, Homo sapien
cagttctcgggattcttcaaaggga

SEQ ID NO: 1958057 - DNA, 25 bp, Homo sapien
gagctcgaagacacgcgtcggaact

SEQ ID NO: 1958058 - DNA, 25 bp, Homo sapien
gcgtggctagaattatgtctcaagg

SEQ ID NO: 1958059 - DNA, 25 bp, Homo sapien
tagagaaggcttggcggaggagaga

SEQ ID NO: 1958060 - DNA, 25 bp, Homo sapien
cttagagaaggcttggcggaggaga

SEQ ID NO: 1958061 - DNA, 25 bp, Homo sapien
gaacttagagaaggcttggcggagg

SEQ ID NO: 1958062 - DNA, 25 bp, Homo sapien
tagaacttagagaaggcttggcgga

SEQ ID NO: 1958063 - DNA, 25 bp, Homo sapien
cattcaggctaattgtcactcggga

SEQ ID NO: 1958064 - DNA, 25 bp, Homo sapien
cctccacgggagtatgtaaacattc

SEQ ID NO: 1958065 - DNA, 25 bp, Homo sapien
ttgcagcaaggatatgacaatgtca

SEQ ID NO: 1958066 - DNA, 25 bp, Homo sapien
tcatccgaaactcaggagagggcaa

SEQ ID NO: 1958067 - DNA, 25 bp, Homo sapien
ttctcccttaacgatagttctcgcc

SEQ ID NO: 1958068 - DNA, 25 bp, Homo sapien
ctttctcccttaacgatagttctcg

SEQ ID NO: 1958069 - DNA, 25 bp, Homo sapien
tcccttaacgatagttctcgccatt

SEQ ID NO: 1958070 - DNA, 25 bp, Homo sapien
ctcttccttagacatccctctgtcc

SEQ ID NO: 1958071 - DNA, 25 bp, Homo sapien
tgggaacatcccatattgtttagaa

SEQ ID NO: 1958072 - DNA, 25 bp, Homo sapien
tcctttaggtgaacttgctgggaac

SEQ ID NO: 1958073 - DNA, 25 bp, Homo sapien
tctcctcctttaggtgaacttgctg

SEQ ID NO: 1958074 - DNA, 25 bp, Homo sapien
tattgtttagaagactctgtagtct

SEQ ID NO: 1958075 - DNA, 25 bp, Homo sapien
ggtggtccactttgcagagccttct

SEQ ID NO: 1958076 - DNA, 25 bp, Homo sapien
tgaggtggtccactttgcagagcct

SEQ ID NO: 1958077 - DNA, 25 bp, Homo sapien
gactgaggtggtccactttgcagag

SEQ ID NO: 1958078 - DNA, 25 bp, Homo sapien
gtggtccactttgcagagccttctg

SEQ ID NO: 1958079 - DNA, 25 bp, Homo sapien
caagggacaacaacttctgcacttg

SEQ ID NO: 1958080 - DNA, 25 bp, Homo sapien
tcaggtgtctggtcacaagggacaa

SEQ ID NO: 1958081 - DNA, 25 bp, Homo sapien
gaagttcattcaccgttttgcctcc

SEQ ID NO: 1958082 - DNA, 25 bp, Homo sapien
tggtcacaagggacaacaacttctg

SEQ ID NO: 1958083 - DNA, 25 bp, Homo sapien
accgagcctctggtgatccagcgat

SEQ ID NO: 1958084 - DNA, 25 bp, Homo sapien
aaccgagcctctggtgatccagcga

SEQ ID NO: 1958085 - DNA, 25 bp, Homo sapien
gaaccgagcctctggtgatccagcg

SEQ ID NO: 1958086 - DNA, 25 bp, Homo sapien
cgagcctctggtgatccagcgatca

SEQ ID NO: 1958087 - DNA, 25 bp, Homo sapien
ggtgcttccactggagcaatcttac

SEQ ID NO: 1958088 - DNA, 25 bp, Homo sapien
tggtgcttccactggagcaatctta

SEQ ID NO: 1958089 - DNA, 25 bp, Homo sapien
cggattctgattgctcagactgcgg

SEQ ID NO: 1958090 - DNA, 25 bp, Homo sapien
atgagggctctgactgatagagccg

SEQ ID NO: 1958091 - DNA, 25 bp, Homo sapien
cagtctcggattctgattgctcaga

SEQ ID NO: 1958092 - DNA, 25 bp, Homo sapien
gctctgactgatagagccgggataa

SEQ ID NO: 1958093 - DNA, 25 bp, Homo sapien
cagacccaaggcgttcagatttaat

SEQ ID NO: 1958094 - DNA, 25 bp, Homo sapien
ggtgggaacagacccaaggcgttca

SEQ ID NO: 1958095 - DNA, 25 bp, Homo sapien
caaggcgttcagatttaatccagga

SEQ ID NO: 1958096 - DNA, 25 bp, Homo sapien
ggcgttcagatttaatccaggaatt

SEQ ID NO: 1958097 - DNA, 25 bp, Homo sapien
gaagtgatatcattttcctaacgct

SEQ ID NO: 1958098 - DNA, 25 bp, Homo sapien
tcattttcctaacgctccctgattt

SEQ ID NO: 1958099 - DNA, 25 bp, Homo sapien
cttgaaatcatagaagtgatatcat

SEQ ID NO: 1958100 - DNA, 25 bp, Homo sapien
tcatagaagtgatatcattttccta

SEQ ID NO: 1958101 - DNA, 25 bp, Homo sapien
gttctggattatactgcatcagttc

SEQ ID NO: 1958102 - DNA, 25 bp, Homo sapien
atggtgtgttctggattatactgca

SEQ ID NO: 1958103 - DNA, 25 bp, Homo sapien
ctggattatactgcatcagttcctg

SEQ ID NO: 1958104 - DNA, 25 bp, Homo sapien
tgtgttctggattatactgcatcag

SEQ ID NO: 1958105 - DNA, 25 bp, Homo sapien
tgaattttacatcttgagtttcctt

SEQ ID NO: 1958106 - DNA, 25 bp, Homo sapien
acatcttgagtttccttacgcataa

SEQ ID NO: 1958107 - DNA, 25 bp, Homo sapien
tacatcttgagtttccttacgcata

SEQ ID NO: 1958108 - DNA, 25 bp, Homo sapien
catcttgagtttccttacgcataat

SEQ ID NO: 1958109 - DNA, 25 bp, Homo sapien
gccttcaggagtagagaggatagta

SEQ ID NO: 1958110 - DNA, 25 bp, Homo sapien
gatagtaatcgacttctcagcagcc

SEQ ID NO: 1958111 - DNA, 25 bp, Homo sapien
attttctttacggtggacatcgatt

SEQ ID NO: 1958112 - DNA, 25 bp, Homo sapien
tgatgttccgaatggtggcaccttc

SEQ ID NO: 1958113 - DNA, 25 bp, Homo sapien
cagaggcaaatcacatggtttctgc

SEQ ID NO: 1958114 - DNA, 25 bp, Homo sapien
ggctactttcaaggtgaaattctct

SEQ ID NO: 1958115 - DNA, 25 bp, Homo sapien
ggttttgctgggtggccatttcatc

SEQ ID NO: 1958116 - DNA, 25 bp, Homo sapien
ttcatcagggatataggctactttc

SEQ ID NO: 1958117 - DNA, 25 bp, Homo sapien
gctgggtggccatttcatcagggat

SEQ ID NO: 1958118 - DNA, 25 bp, Homo sapien
agtgcttgtctagcgcttgtctagc

SEQ ID NO: 1958119 - DNA, 25 bp, Homo sapien
tagtgcttgtctagcgcttgtctag

SEQ ID NO: 1958120 - DNA, 25 bp, Homo sapien
gatatttcgtatctgaagtttccga

SEQ ID NO: 1958121 - DNA, 25 bp, Homo sapien
atttcgtatctgaagtttccgaatc

SEQ ID NO: 1958122 - DNA, 25 bp, Homo sapien
gggatatttcgtatctgaagtttcc

SEQ ID NO: 1958123 - DNA, 25 bp, Homo sapien
atatttcgtatctgaagtttccgaa

SEQ ID NO: 1958124 - DNA, 25 bp, Homo sapien
atgggtttcccgtgcagttctattt

SEQ ID NO: 1958125 - DNA, 25 bp, Homo sapien
tctatgggtttcccgtgcagttcta

SEQ ID NO: 1958126 - DNA, 25 bp, Homo sapien
cttctatgggtttcccgtgcagttc

SEQ ID NO: 1958127 - DNA, 25 bp, Homo sapien
tatgggtttcccgtgcagttctatt

SEQ ID NO: 1958128 - DNA, 25 bp, Homo sapien
caatcttcaccaggaagggtcccga

SEQ ID NO: 1958129 - DNA, 25 bp, Homo sapien
atctcgtctgggcagtccacgaacg

SEQ ID NO: 1958130 - DNA, 25 bp, Homo sapien
gcggcgttctcgctgaggtttctga

SEQ ID NO: 1958131 - DNA, 25 bp, Homo sapien
tccacgaacgcgtagccaatcttca

SEQ ID NO: 1958132 - DNA, 25 bp, Homo sapien
ttaaaggaccagtgcgtagatatct

SEQ ID NO: 1958133 - DNA, 25 bp, Homo sapien
agtgcgtagatatctgggtcacagc

SEQ ID NO: 1958134 - DNA, 25 bp, Homo sapien
gaccagtgcgtagatatctgggtca

SEQ ID NO: 1958135 - DNA, 25 bp, Homo sapien
aaggaccagtgcgtagatatctggg

SEQ ID NO: 1958136 - DNA, 25 bp, Homo sapien
agagaacaaggaccttgctcatggc

SEQ ID NO: 1958137 - DNA, 25 bp, Homo sapien
ctgtgtaggaggatccggagccaga

SEQ ID NO: 1958138 - DNA, 25 bp, Homo sapien
agaacaaggaccttgctcatggctg

SEQ ID NO: 1958139 - DNA, 25 bp, Homo sapien
tcaggacacaggctgcgagtggagg

SEQ ID NO: 1958140 - DNA, 25 bp, Homo sapien
gggtgcctctcacaattaactgtac

SEQ ID NO: 1958141 - DNA, 25 bp, Homo sapien
gatttttcgccgatgattgttttat

SEQ ID NO: 1958142 - DNA, 25 bp, Homo sapien
ttatagatttttcgccgatgattgt

SEQ ID NO: 1958143 - DNA, 25 bp, Homo sapien
gaggcaagcccatttgttatagatt

SEQ ID NO: 1958144 - DNA, 25 bp, Homo sapien
ccaactggaaatgcgcgtatgtcac

SEQ ID NO: 1958145 - DNA, 25 bp, Homo sapien
gtaatgcaggcgctcatccaaaggg

SEQ ID NO: 1958146 - DNA, 25 bp, Homo sapien
gggtaattggcagtaccaactggaa

SEQ ID NO: 1958147 - DNA, 25 bp, Homo sapien
gcagcaacgttcaacagcccagatg

SEQ ID NO: 1958148 - DNA, 25 bp, Homo sapien
gaggcaaaggcaccggcctcggcca

SEQ ID NO: 1958149 - DNA, 25 bp, Homo sapien
agggtccctggctctccaactggga

SEQ ID NO: 1958150 - DNA, 25 bp, Homo sapien
tgtgcaggggttccccgtgcctctg

SEQ ID NO: 1958151 - DNA, 25 bp, Homo sapien
cagccagccctgtggatgcagtggc

SEQ ID NO: 1958152 - DNA, 25 bp, Homo sapien
atcttctcgggcccccatttcctca

SEQ ID NO: 1958153 - DNA, 25 bp, Homo sapien
cccccatcttctcgggcccccatct

SEQ ID NO: 1958154 - DNA, 25 bp, Homo sapien
cctcaggcccccatcttctcgggcc

SEQ ID NO: 1958155 - DNA, 25 bp, Homo sapien
tctcgggcccccatcttctcgggcc

SEQ ID NO: 1958156 - DNA, 25 bp, Homo sapien
gtcctttcgacacgcaccatggctg

SEQ ID NO: 1958157 - DNA, 25 bp, Homo sapien
caagatgtaacggactcagggctga

SEQ ID NO: 1958158 - DNA, 25 bp, Homo sapien
aacgcacttatggattagcttagcc

SEQ ID NO: 1958159 - DNA, 25 bp, Homo sapien
tgacatctttcggacgtaagacggg

SEQ ID NO: 1958160 - DNA, 25 bp, Homo sapien
cagcttcttgtgtggcagcctgatc

SEQ ID NO: 1958161 - DNA, 25 bp, Homo sapien
gcttcttgtgtggcagcctgatcat

SEQ ID NO: 1958162 - DNA, 25 bp, Homo sapien
agcttcttgtgtggcagcctgatca

SEQ ID NO: 1958163 - DNA, 25 bp, Homo sapien
acctttgtcttgcaggcagctgagt

SEQ ID NO: 1958164 - DNA, 25 bp, Homo sapien
tacctttgtcttgcaggcagctgag

SEQ ID NO: 1958165 - DNA, 25 bp, Homo sapien
agagacaacggctacccttactgcg

SEQ ID NO: 1958166 - DNA, 25 bp, Homo sapien
ttaaacccggaagcgcgtgtgtcta

SEQ ID NO: 1958167 - DNA, 25 bp, Homo sapien
cagcaacgtggttttaggactgctg

SEQ ID NO: 1958168 - DNA, 25 bp, Homo sapien
tactgcggcacgttcagtgatgcag

SEQ ID NO: 1958169 - DNA, 25 bp, Homo sapien
tctttcagacgcttgctggcttcag

SEQ ID NO: 1958170 - DNA, 25 bp, Homo sapien
gaaaccgtctctttcagacgcttgc

SEQ ID NO: 1958171 - DNA, 25 bp, Homo sapien
tgtcagttctgaagtatcagctacc

SEQ ID NO: 1958172 - DNA, 25 bp, Homo sapien
tgcagcatcagccaagaaaccgtct

SEQ ID NO: 1958173 - DNA, 25 bp, Homo sapien
ggcagaagaggaactggatggctga

SEQ ID NO: 1958174 - DNA, 25 bp, Homo sapien
aggcagaagaggaactggatggctg

SEQ ID NO: 1958175 - DNA, 25 bp, Homo sapien
caggcagaagaggaactggatggct

SEQ ID NO: 1958176 - DNA, 25 bp, Homo sapien
gaggatgatgtggagacaatccctg

SEQ ID NO: 1958177 - DNA, 25 bp, Homo sapien
tggcttgtcggtctgagcacagctg

SEQ ID NO: 1958178 - DNA, 25 bp, Homo sapien
cacagcactggcttgtcggtctgag

SEQ ID NO: 1958179 - DNA, 25 bp, Homo sapien
gatgatgtggagacaatccctgggt

SEQ ID NO: 1958180 - DNA, 25 bp, Homo sapien
cagtgactcattgaagtcccagatg

SEQ ID NO: 1958181 - DNA, 25 bp, Homo sapien
tgactcattgaagtcccagatgaca

SEQ ID NO: 1958182 - DNA, 25 bp, Homo sapien
cctctggggcaattaggccaacgta

SEQ ID NO: 1958183 - DNA, 25 bp, Homo sapien
aagccagtgactcattgaagtccca

SEQ ID NO: 1958184 - DNA, 25 bp, Homo sapien
gtggctctgacacgttgccactgtg

SEQ ID NO: 1958185 - DNA, 25 bp, Homo sapien
caggaggccggcaaagaggcttcca

SEQ ID NO: 1958186 - DNA, 25 bp, Homo sapien
cttccagtggctctgacacgttgcc

SEQ ID NO: 1958187 - DNA, 25 bp, Homo sapien
ctctgacacgttgccactgtgtctg

SEQ ID NO: 1958188 - DNA, 25 bp, Homo sapien
aattgacgactgtaagtttcattgt

SEQ ID NO: 1958189 - DNA, 25 bp, Homo sapien
aatgtatgcaaaaattgacgactgt

SEQ ID NO: 1958190 - DNA, 25 bp, Homo sapien
caaaaattgacgactgtaagtttca

SEQ ID NO: 1958191 - DNA, 25 bp, Homo sapien
tgtatgcaaaaattgacgactgtaa

SEQ ID NO: 1958192 - DNA, 25 bp, Homo sapien
gggctctgagttgaggggtgctgga

SEQ ID NO: 1958193 - DNA, 25 bp, Homo sapien
ggctctgagttgaggggtgctggat

SEQ ID NO: 1958194 - DNA, 25 bp, Homo sapien
cgggctccccacaaatgggggctct

SEQ ID NO: 1958195 - DNA, 25 bp, Homo sapien
atttcaaagccagagcagagcgggc

SEQ ID NO: 1958196 - DNA, 25 bp, Homo sapien
aacaaagcagagtgtaataaaacgt

SEQ ID NO: 1958197 - DNA, 25 bp, Homo sapien
gtgtatgtatagagacacatatgtc

SEQ ID NO: 1958198 - DNA, 25 bp, Homo sapien
gcagagtgtaataaaacgtgtatag

SEQ ID NO: 1958199 - DNA, 25 bp, Homo sapien
gagacacatatgtcactaaaataac

SEQ ID NO: 1958200 - DNA, 25 bp, Homo sapien
cacatccaggttgagatcctcctct

SEQ ID NO: 1958201 - DNA, 25 bp, Homo sapien
ccacatccaggttgagatcctcctc

SEQ ID NO: 1958202 - DNA, 25 bp, Homo sapien
gggagagctccacggaagaacacca

SEQ ID NO: 1958203 - DNA, 25 bp, Homo sapien
acgggagagctccacggaagaacac

SEQ ID NO: 1958204 - DNA, 25 bp, Homo sapien
gagagctccacggaagaacaccagc

SEQ ID NO: 1958205 - DNA, 25 bp, Homo sapien
agagctccacggaagaacaccagcc

SEQ ID NO: 1958206 - DNA, 25 bp, Homo sapien
ctgattatagtaaatgagcaatgca

SEQ ID NO: 1958207 - DNA, 25 bp, Homo sapien
attggctgcagagttcggattcttg

SEQ ID NO: 1958208 - DNA, 25 bp, Homo sapien
tgctgtgaaaagtgcgttctctcct

SEQ ID NO: 1958209 - DNA, 25 bp, Homo sapien
tcacctaatggacatgaactgatta

SEQ ID NO: 1958210 - DNA, 25 bp, Homo sapien
cataggctccacctcgatctttttc

SEQ ID NO: 1958211 - DNA, 25 bp, Homo sapien
tccataggctccacctcgatctttt

SEQ ID NO: 1958212 - DNA, 25 bp, Homo sapien
ttccataggctccacctcgatcttt

SEQ ID NO: 1958213 - DNA, 25 bp, Homo sapien
ataggctccacctcgatctttttcc

SEQ ID NO: 1958214 - DNA, 25 bp, Homo sapien
gatggagaggacagatccggctccc

SEQ ID NO: 1958215 - DNA, 25 bp, Homo sapien
ggccagacgggatgtcggaagccaa

SEQ ID NO: 1958216 - DNA, 25 bp, Homo sapien
gaaataaacagaggctcggaccggc

SEQ ID NO: 1958217 - DNA, 25 bp, Homo sapien
ccttttctgctggtcgagtattgat

SEQ ID NO: 1958218 - DNA, 25 bp, Homo sapien
gcaatatggctgctcgggcgccgtc

SEQ ID NO: 1958219 - DNA, 25 bp, Homo sapien
gagggacccggggggctgcaatatg

SEQ ID NO: 1958220 - DNA, 25 bp, Homo sapien
ctgcaatatggctgctcgggcgccg

SEQ ID NO: 1958221 - DNA, 25 bp, Homo sapien
aatatggctgctcgggcgccgtccc

SEQ ID NO: 1958222 - DNA, 25 bp, Homo sapien
acggcgctgcggcttcggaatctgt

SEQ ID NO: 1958223 - DNA, 25 bp, Homo sapien
gcgctgcggcttcggaatctgtact

SEQ ID NO: 1958224 - DNA, 25 bp, Homo sapien
ggggacggcgctgcggcttcggaat

SEQ ID NO: 1958225 - DNA, 25 bp, Homo sapien
gctgcggcttcggaatctgtactgc

SEQ ID NO: 1958226 - DNA, 25 bp, Homo sapien
tggctctaaacgagggtgaaagttg

SEQ ID NO: 1958227 - DNA, 25 bp, Homo sapien
taaacgagggtgaaagttgagtctg

SEQ ID NO: 1958228 - DNA, 25 bp, Homo sapien
cttaattggctctaaacgagggtga

SEQ ID NO: 1958229 - DNA, 25 bp, Homo sapien
tctgaggatgccgctgccatagaaa

SEQ ID NO: 1958230 - DNA, 25 bp, Homo sapien
ggacgaagagggacgacagacaaat

SEQ ID NO: 1958231 - DNA, 25 bp, Homo sapien
ctctggaagcgctgcggactgagct

SEQ ID NO: 1958232 - DNA, 25 bp, Homo sapien
aagcgctgcggactgagctgcccgc

SEQ ID NO: 1958233 - DNA, 25 bp, Homo sapien
ccgggacagcacctcaggagaagag

SEQ ID NO: 1958234 - DNA, 25 bp, Homo sapien
tctaagaagaactgttgaagcagcc

SEQ ID NO: 1958235 - DNA, 25 bp, Homo sapien
gctatttctgagatattcacctcca

SEQ ID NO: 1958236 - DNA, 25 bp, Homo sapien
tgaaaatgggtccttaatgaaccaa

SEQ ID NO: 1958237 - DNA, 25 bp, Homo sapien
ccttgctgaaaatgggtccttaatg

SEQ ID NO: 1958238 - DNA, 25 bp, Homo sapien
gcatcatatataccactggaattca

SEQ ID NO: 1958239 - DNA, 25 bp, Homo sapien
gatcttggcatcatatataccactg

SEQ ID NO: 1958240 - DNA, 25 bp, Homo sapien
ctgaaagatcttggcatcatatata

SEQ ID NO: 1958241 - DNA, 25 bp, Homo sapien
catatataccactggaattcatgtg

SEQ ID NO: 1958242 - DNA, 25 bp, Homo sapien
tattgtgagccgaatatgactcatc

SEQ ID NO: 1958243 - DNA, 25 bp, Homo sapien
ggttgcataccttttatggagacat

SEQ ID NO: 1958244 - DNA, 25 bp, Homo sapien
gactcatcaatattctgtgacccag

SEQ ID NO: 1958245 - DNA, 25 bp, Homo sapien
aatattctgtgacccaggagatgct

SEQ ID NO: 1958246 - DNA, 25 bp, Homo sapien
tggcgcatccagagggaacatggaa

SEQ ID NO: 1958247 - DNA, 25 bp, Homo sapien
taagataatgagatgcctggtagct

SEQ ID NO: 1958248 - DNA, 25 bp, Homo sapien
tgccctaggttcctcacaaaaagct

SEQ ID NO: 1958249 - DNA, 25 bp, Homo sapien
gactgtgcgaatcaccattggctga

SEQ ID NO: 1958250 - DNA, 25 bp, Homo sapien
cccttcaggacaggacagtagatgg

SEQ ID NO: 1958251 - DNA, 25 bp, Homo sapien
agttgtgggccgacctgagtcagcc

SEQ ID NO: 1958252 - DNA, 25 bp, Homo sapien
tagcatcatcctaaccagcatggag

SEQ ID NO: 1958253 - DNA, 25 bp, Homo sapien
ccaggagaccttttgcaggctgcaa

SEQ ID NO: 1958254 - DNA, 25 bp, Homo sapien
ctgtgaacgggagcctagagctgca

SEQ ID NO: 1958255 - DNA, 25 bp, Homo sapien
caataagactatggtgggagtcggc

SEQ ID NO: 1958256 - DNA, 25 bp, Homo sapien
ggagttggttcctcatatgagatct

SEQ ID NO: 1958257 - DNA, 25 bp, Homo sapien
tatgagatctcaataagactatggt

SEQ ID NO: 1958258 - DNA, 25 bp, Homo sapien
cccagtgctttgattcagcccctca

SEQ ID NO: 1958259 - DNA, 25 bp, Homo sapien
tgaatgtcagagccatgcggccgct

SEQ ID NO: 1958260 - DNA, 25 bp, Homo sapien
aaaagttgtgttgcttgcggtttct

SEQ ID NO: 1958261 - DNA, 25 bp, Homo sapien
catgcggccgctgccaactaattcc

SEQ ID NO: 1958262 - DNA, 25 bp, Homo sapien
agttgtgttgcttgcggtttcttcc

SEQ ID NO: 1958263 - DNA, 25 bp, Homo sapien
ttgtgaagccttgcatggaatccac

SEQ ID NO: 1958264 - DNA, 25 bp, Homo sapien
cctcctgagattctttggggcggca

SEQ ID NO: 1958265 - DNA, 25 bp, Homo sapien
ttctgctgctggacacgcacataaa

SEQ ID NO: 1958266 - DNA, 25 bp, Homo sapien
cacataaaagcatgtttgtgaagcc

SEQ ID NO: 1958267 - DNA, 25 bp, Homo sapien
tgaaaggggccctgttcgtgcttct

SEQ ID NO: 1958268 - DNA, 25 bp, Homo sapien
gggccctgttcgtgcttctcttgat

SEQ ID NO: 1958269 - DNA, 25 bp, Homo sapien
aattcctcctgccagcttagctccc

SEQ ID NO: 1958270 - DNA, 25 bp, Homo sapien
ctggcttccacgcagtggtgaattc

SEQ ID NO: 1958271 - DNA, 25 bp, Homo sapien
tccatcttcaattcgtccaggtcag

SEQ ID NO: 1958272 - DNA, 25 bp, Homo sapien
ctccatcttcaattcgtccaggtca

SEQ ID NO: 1958273 - DNA, 25 bp, Homo sapien
tcttcaattcgtccaggtcagccct

SEQ ID NO: 1958274 - DNA, 25 bp, Homo sapien
catcttcaattcgtccaggtcagcc

SEQ ID NO: 1958275 - DNA, 25 bp, Homo sapien
ttgagcccattgaatgctctgcttc

SEQ ID NO: 1958276 - DNA, 25 bp, Homo sapien
ctgcttccagggctcactttctctg

SEQ ID NO: 1958277 - DNA, 25 bp, Homo sapien
gagcccattgaatgctctgcttcca

SEQ ID NO: 1958278 - DNA, 25 bp, Homo sapien
tgctctgcttccagggctcactttc

SEQ ID NO: 1958279 - DNA, 25 bp, Homo sapien
aggcacccctcatgcgtccatttat

SEQ ID NO: 1958280 - DNA, 25 bp, Homo sapien
caggacgtgaagaaattctcagaag

SEQ ID NO: 1958281 - DNA, 25 bp, Homo sapien
ggacaggcacccctcatgcgtccat

SEQ ID NO: 1958282 - DNA, 25 bp, Homo sapien
aaacaggacgtgaagaaattctcag

SEQ ID NO: 1958283 - DNA, 25 bp, Homo sapien
ttttgattagtgaggtaccaagccc

SEQ ID NO: 1958284 - DNA, 25 bp, Homo sapien
tcactgacacactcaaaaagcgcgg

SEQ ID NO: 1958285 - DNA, 25 bp, Homo sapien
tattgggagcatcttggtgactggc

SEQ ID NO: 1958286 - DNA, 25 bp, Homo sapien
tctcagggtgcagtccaagacatat

SEQ ID NO: 1958287 - DNA, 25 bp, Homo sapien
caaagtccgggcctttgtagtgtga

SEQ ID NO: 1958288 - DNA, 25 bp, Homo sapien
catggagcacagaagcgagttggac

SEQ ID NO: 1958289 - DNA, 25 bp, Homo sapien
tccctggccgccttcataactctga

SEQ ID NO: 1958290 - DNA, 25 bp, Homo sapien
gacgtggccattagggcccacagat

SEQ ID NO: 1958291 - DNA, 25 bp, Homo sapien
agcagctggctaaggaacgatgtcc

SEQ ID NO: 1958292 - DNA, 25 bp, Homo sapien
ctaaatagataccagtgcagggacc

SEQ ID NO: 1958293 - DNA, 25 bp, Homo sapien
gagcaagagagtcccctgaatcggt

SEQ ID NO: 1958294 - DNA, 25 bp, Homo sapien
tcttcgtcttgacagggtccctgcg

SEQ ID NO: 1958295 - DNA, 25 bp, Homo sapien
gcttagtgaggcacagttctatctg

SEQ ID NO: 1958296 - DNA, 25 bp, Homo sapien
cttgcttagtgaggcacagttctat

SEQ ID NO: 1958297 - DNA, 25 bp, Homo sapien
tcttgcttagtgaggcacagttcta

SEQ ID NO: 1958298 - DNA, 25 bp, Homo sapien
tgcttagtgaggcacagttctatct

SEQ ID NO: 1958299 - DNA, 25 bp, Homo sapien
ttgggtatcactccatatactctgg

SEQ ID NO: 1958300 - DNA, 25 bp, Homo sapien
tggactatcctgagcgcaacagtgg

SEQ ID NO: 1958301 - DNA, 25 bp, Homo sapien
tttctgatgcccaaacaagcgccgt

SEQ ID NO: 1958302 - DNA, 25 bp, Homo sapien
gaaatgtctgggtcggcagctctcc

SEQ ID NO: 1958303 - DNA, 25 bp, Homo sapien
caattcgaactgtccatgcagggtc

SEQ ID NO: 1958304 - DNA, 25 bp, Homo sapien
ctgcaagcgatcatcttacggcttc

SEQ ID NO: 1958305 - DNA, 25 bp, Homo sapien
catctattcgcacatgagtccaggt

SEQ ID NO: 1958306 - DNA, 25 bp, Homo sapien
acggtgagggccctgcaagcgatca

SEQ ID NO: 1958307 - DNA, 25 bp, Homo sapien
agttccctgaacaccgagctctggg

SEQ ID NO: 1958308 - DNA, 25 bp, Homo sapien
gtctggaaagggctggtagactcct

SEQ ID NO: 1958309 - DNA, 25 bp, Homo sapien
gggctggtagactccttcctcaagt

SEQ ID NO: 1958310 - DNA, 25 bp, Homo sapien
gtagactccttcctcaagtccactg

SEQ ID NO: 1958311 - DNA, 25 bp, Homo sapien
tggaaagggctggtagactccttcc

SEQ ID NO: 1958312 - DNA, 25 bp, Homo sapien
tactgcagctacaccatgggagcac

SEQ ID NO: 1958313 - DNA, 25 bp, Homo sapien
gagcacacacttctcacaaagggag

SEQ ID NO: 1958314 - DNA, 25 bp, Homo sapien
gatgacacatcggtccctactgcag

SEQ ID NO: 1958315 - DNA, 25 bp, Homo sapien
taaagagacgtgatctggctgtcgc

SEQ ID NO: 1958316 - DNA, 25 bp, Homo sapien
gctgaaacggccctactggaggtcc

SEQ ID NO: 1958317 - DNA, 25 bp, Homo sapien
tttacagcccattgactcagaggct

SEQ ID NO: 1958318 - DNA, 25 bp, Homo sapien
gagacacacgagaaaagaagcaaaa

SEQ ID NO: 1958319 - DNA, 25 bp, Homo sapien
cacatgataacatttaagtaggaag

SEQ ID NO: 1958320 - DNA, 25 bp, Homo sapien
tgatggatggttttatccccaattt

SEQ ID NO: 1958321 - DNA, 25 bp, Homo sapien
ttgatggatggttttatccccaatt

SEQ ID NO: 1958322 - DNA, 25 bp, Homo sapien
atgtgtcaacatggactgcaaatac

SEQ ID NO: 1958323 - DNA, 25 bp, Homo sapien
tggactgcaaatacatggttcccag

SEQ ID NO: 1958324 - DNA, 25 bp, Homo sapien
ctgtataatgaaggtccactttgct

SEQ ID NO: 1958325 - DNA, 25 bp, Homo sapien
gcaaatacatggttcccagtccccg

SEQ ID NO: 1958326 - DNA, 25 bp, Homo sapien
actccttcggagcatgggagcgctg

SEQ ID NO: 1958327 - DNA, 25 bp, Homo sapien
tttccagttcctgactccttcggag

SEQ ID NO: 1958328 - DNA, 25 bp, Homo sapien
gggccaccaccgagtggagctggca

SEQ ID NO: 1958329 - DNA, 25 bp, Homo sapien
agtggagctggcacacacatcacca

SEQ ID NO: 1958330 - DNA, 25 bp, Homo sapien
gctaagtaagtgcactccaagatgt

SEQ ID NO: 1958331 - DNA, 25 bp, Homo sapien
tacgacattcagtcagtgaaggcct

SEQ ID NO: 1958332 - DNA, 25 bp, Homo sapien
catatgtgtgtcgtgggctgtatca

SEQ ID NO: 1958333 - DNA, 25 bp, Homo sapien
taaccgtatggtaagtccctacagc

SEQ ID NO: 1958334 - DNA, 25 bp, Homo sapien
cagagtggacacaaagacttagaca

SEQ ID NO: 1958335 - DNA, 25 bp, Homo sapien
gacatcctctgtgggcaataactta

SEQ ID NO: 1958336 - DNA, 25 bp, Homo sapien
caaagacttagacatcctctgtggg

SEQ ID NO: 1958337 - DNA, 25 bp, Homo sapien
cttattgtcagactgtcttggccac

SEQ ID NO: 1958338 - DNA, 25 bp, Homo sapien
tcaactggctcaagtgggacaacgt

SEQ ID NO: 1958339 - DNA, 25 bp, Homo sapien
tcccgacggagaggtaagggcacac

SEQ ID NO: 1958340 - DNA, 25 bp, Homo sapien
ttccaggagttctgcggcaaagacc

SEQ ID NO: 1958341 - DNA, 25 bp, Homo sapien
tagcaaccagattcggacagtgagt

SEQ ID NO: 1958342 - DNA, 25 bp, Homo sapien
catgctggttggagtcctcgttttc

SEQ ID NO: 1958343 - DNA, 25 bp, Homo sapien
ggcacatgctggttggagtcctcgt

SEQ ID NO: 1958344 - DNA, 25 bp, Homo sapien
cacatgctggttggagtcctcgttt

SEQ ID NO: 1958345 - DNA, 25 bp, Homo sapien
atgctggttggagtcctcgttttcc

SEQ ID NO: 1958346 - DNA, 25 bp, Homo sapien
gaaaggcttggtaggctcagaacat

SEQ ID NO: 1958347 - DNA, 25 bp, Homo sapien
gatgggcatcccaatactctgcacc

SEQ ID NO: 1958348 - DNA, 25 bp, Homo sapien
ccactctgtgtgatcgtgatgtaga

SEQ ID NO: 1958349 - DNA, 25 bp, Homo sapien
tatggccgactctgatgatgagatg

SEQ ID NO: 1958350 - DNA, 25 bp, Homo sapien
caggaatgatcccagtagccgaata

SEQ ID NO: 1958351 - DNA, 25 bp, Homo sapien
aatgatcccagtagccgaatagtgc

SEQ ID NO: 1958352 - DNA, 25 bp, Homo sapien
aatagtgcacatgcagaagctgctg

SEQ ID NO: 1958353 - DNA, 25 bp, Homo sapien
cagtagccgaatagtgcacatgcag

SEQ ID NO: 1958354 - DNA, 25 bp, Homo sapien
caggcttctgccaaagtacttcttc

SEQ ID NO: 1958355 - DNA, 25 bp, Homo sapien
ttgagcgcatccacctgggcggcgc

SEQ ID NO: 1958356 - DNA, 25 bp, Homo sapien
agttgagcgcatccacctgggcggc

SEQ ID NO: 1958357 - DNA, 25 bp, Homo sapien
gggagttgagcgcatccacctgggc

SEQ ID NO: 1958358 - DNA, 25 bp, Homo sapien
taagcaaccagccatggaaaggcag

SEQ ID NO: 1958359 - DNA, 25 bp, Homo sapien
cagggaatttcgcagagtggcacaa

SEQ ID NO: 1958360 - DNA, 25 bp, Homo sapien
agaaaaaagaacatgctgctgcccc

SEQ ID NO: 1958361 - DNA, 25 bp, Homo sapien
ggcaggacagctaattaccaggaaa

SEQ ID NO: 1958362 - DNA, 25 bp, Homo sapien
caactgctgacgagattgacagcca

SEQ ID NO: 1958363 - DNA, 25 bp, Homo sapien
gggctgtcatccaatcaactgctga

SEQ ID NO: 1958364 - DNA, 25 bp, Homo sapien
gacagccaccttcagaatgactggc

SEQ ID NO: 1958365 - DNA, 25 bp, Homo sapien
catctagaagcctttccagagcaaa

SEQ ID NO: 1958366 - DNA, 25 bp, Homo sapien
cccactgtcacccagcccgctcggc

SEQ ID NO: 1958367 - DNA, 25 bp, Homo sapien
cagtcctcggggctggttatgccca

SEQ ID NO: 1958368 - DNA, 25 bp, Homo sapien
gggctggttatgcccaaagacacat

SEQ ID NO: 1958369 - DNA, 25 bp, Homo sapien
gcagccagtcctcggggctggttat

SEQ ID NO: 1958370 - DNA, 25 bp, Homo sapien
cattcaccacccgaattttcaaggg

SEQ ID NO: 1958371 - DNA, 25 bp, Homo sapien
tcaacgcacagactgagggtccatg

SEQ ID NO: 1958372 - DNA, 25 bp, Homo sapien
tgccacaccgatgaaccagaaaggg

SEQ ID NO: 1958373 - DNA, 25 bp, Homo sapien
tcaacatggcgtttatgccctaggc

SEQ ID NO: 1958374 - DNA, 25 bp, Homo sapien
ttacgtcaggccagtatgccctcat

SEQ ID NO: 1958375 - DNA, 25 bp, Homo sapien
cagaagcggctgcgattgggaaacg

SEQ ID NO: 1958376 - DNA, 25 bp, Homo sapien
tgaattacgtcaggccagtatgccc

SEQ ID NO: 1958377 - DNA, 25 bp, Homo sapien
agaagcggctgcgattgggaaacga

SEQ ID NO: 1958378 - DNA, 25 bp, Homo sapien
caaaaaccaatgagccgtcgagtca

SEQ ID NO: 1958379 - DNA, 25 bp, Homo sapien
tccaaagccgcacaacacaggagta

SEQ ID NO: 1958380 - DNA, 25 bp, Homo sapien
cacactgggtgggacttgctctcct

SEQ ID NO: 1958381 - DNA, 25 bp, Homo sapien
gacactggaggaactgcaaacatac

SEQ ID NO: 1958382 - DNA, 25 bp, Homo sapien
tgtaacaaatgtaacacactataga

SEQ ID NO: 1958383 - DNA, 25 bp, Homo sapien
acactatagaagatgttaatgattg

SEQ ID NO: 1958384 - DNA, 25 bp, Homo sapien
tatagaagatgttaatgattgggag

SEQ ID NO: 1958385 - DNA, 25 bp, Homo sapien
cactatagaagatgttaatgattgg

SEQ ID NO: 1958386 - DNA, 25 bp, Homo sapien
tgtctgtaatctccatccaattttt

SEQ ID NO: 1958387 - DNA, 25 bp, Homo sapien
ataactgttctaaaaacattggccg

SEQ ID NO: 1958388 - DNA, 25 bp, Homo sapien
tgttttccagcaccctatatgaggg

SEQ ID NO: 1958389 - DNA, 25 bp, Homo sapien
caagctcttgtactggaaaggccca

SEQ ID NO: 1958390 - DNA, 25 bp, Homo sapien
tccgagatgtcctagggcacgatat

SEQ ID NO: 1958391 - DNA, 25 bp, Homo sapien
tacgggtatctcaaaggaacgcctc

SEQ ID NO: 1958392 - DNA, 25 bp, Homo sapien
ctgtctggagatgcctggcgatatg

SEQ ID NO: 1958393 - DNA, 25 bp, Homo sapien
agctgtctggagatgcctggcgata

SEQ ID NO: 1958394 - DNA, 25 bp, Homo sapien
tcagctgtctggagatgcctggcga

SEQ ID NO: 1958395 - DNA, 25 bp, Homo sapien
ctggagatgcctggcgatatggcac

SEQ ID NO: 1958396 - DNA, 25 bp, Homo sapien
gaccagattcccacgtcggtcatct

SEQ ID NO: 1958397 - DNA, 25 bp, Homo sapien
ggtcatctgacccagaagtcctggg

SEQ ID NO: 1958398 - DNA, 25 bp, Homo sapien
agattcccacgtcggtcatctgacc

SEQ ID NO: 1958399 - DNA, 25 bp, Homo sapien
ccacgtcggtcatctgacccagaag

SEQ ID NO: 1958400 - DNA, 25 bp, Homo sapien
gctggcgggcgagcgtcaggatctg

SEQ ID NO: 1958401 - DNA, 25 bp, Homo sapien
ctcgctcaggcccctcatgcagtgg

SEQ ID NO: 1958402 - DNA, 25 bp, Homo sapien
ggcttgctccggtcggagcccctcg

SEQ ID NO: 1958403 - DNA, 25 bp, Homo sapien
gcgtcaggatctgcacaggtctggc

SEQ ID NO: 1958404 - DNA, 25 bp, Homo sapien
gaaaagagttaatctaggtcaacac

SEQ ID NO: 1958405 - DNA, 25 bp, Homo sapien
gcaagggctcaatcctggtgaatac

SEQ ID NO: 1958406 - DNA, 25 bp, Homo sapien
tacttactaaaacagcagcaagggc

SEQ ID NO: 1958407 - DNA, 25 bp, Homo sapien
gatgactttgaaggtacgcttgtga

SEQ ID NO: 1958408 - DNA, 25 bp, Homo sapien
gaagggccacgatctattacatcct

SEQ ID NO: 1958409 - DNA, 25 bp, Homo sapien
aaattgaagggccacgatctattac

SEQ ID NO: 1958410 - DNA, 25 bp, Homo sapien
ttgaagggccacgatctattacatc

SEQ ID NO: 1958411 - DNA, 25 bp, Homo sapien
cttctaaattgaagggccacgatct

SEQ ID NO: 1958412 - DNA, 25 bp, Homo sapien
tattgtccagtaatccggagggtct

SEQ ID NO: 1958413 - DNA, 25 bp, Homo sapien
ccatgtattgtccagtaatccggag

SEQ ID NO: 1958414 - DNA, 25 bp, Homo sapien
tgtattgtccagtaatccggagggt

SEQ ID NO: 1958415 - DNA, 25 bp, Homo sapien
ttgtccagtaatccggagggtctct

SEQ ID NO: 1958416 - DNA, 25 bp, Homo sapien
cagggtcagcttgacacaccgagca

SEQ ID NO: 1958417 - DNA, 25 bp, Homo sapien
tgacacaccgagcagggtacgccct

SEQ ID NO: 1958418 - DNA, 25 bp, Homo sapien
ctgggtgctccaatgagaagggcct

SEQ ID NO: 1958419 - DNA, 25 bp, Homo sapien
cagcttgacacaccgagcagggtac

SEQ ID NO: 1958420 - DNA, 25 bp, Homo sapien
gaacatgaccctacatggacacagg

SEQ ID NO: 1958421 - DNA, 25 bp, Homo sapien
gacaaactgaggcttgctgtgggtt

SEQ ID NO: 1958422 - DNA, 25 bp, Homo sapien
cacgggtccttactagaagctagca

SEQ ID NO: 1958423 - DNA, 25 bp, Homo sapien
gagaacacaccgtgaaggagaaggc

SEQ ID NO: 1958424 - DNA, 25 bp, Homo sapien
ctcccgcaccagcagcgtgggtgcc

SEQ ID NO: 1958425 - DNA, 25 bp, Homo sapien
cccagggcccgtcaaggcagaaaca

SEQ ID NO: 1958426 - DNA, 25 bp, Homo sapien
cgtgcacacaaacccctcttcacag

SEQ ID NO: 1958427 - DNA, 25 bp, Homo sapien
ctggacgggcacgtgcacacaaacc

SEQ ID NO: 1958428 - DNA, 25 bp, Homo sapien
aggccccagggcccgtcaaggcaga

SEQ ID NO: 1958429 - DNA, 25 bp, Homo sapien
gtgctgaaccataattagttttttc

SEQ ID NO: 1958430 - DNA, 25 bp, Homo sapien
cagtgctgaaccataattagttttt

SEQ ID NO: 1958431 - DNA, 25 bp, Homo sapien
gctgaaccataattagttttttcca

SEQ ID NO: 1958432 - DNA, 25 bp, Homo sapien
ccagtgctgaaccataattagtttt

SEQ ID NO: 1958433 - DNA, 25 bp, Homo sapien
tgcattcgtgaaacccataaaagcc

SEQ ID NO: 1958434 - DNA, 25 bp, Homo sapien
tattcatggcagtaggcctctagcc

SEQ ID NO: 1958435 - DNA, 25 bp, Homo sapien
tattcacgacatggtatgcacacag

SEQ ID NO: 1958436 - DNA, 25 bp, Homo sapien
gggccacactggatcacaaacctga

SEQ ID NO: 1958437 - DNA, 25 bp, Homo sapien
tgaaattaagtgtcccctccacgac

SEQ ID NO: 1958438 - DNA, 25 bp, Homo sapien
tgctttgtcgcgtcctaggctggga

SEQ ID NO: 1958439 - DNA, 25 bp, Homo sapien
tgagagaacttcgagtgcaggaaca

SEQ ID NO: 1958440 - DNA, 25 bp, Homo sapien
cacccgccgcagtgaaagctgaaat

SEQ ID NO: 1958441 - DNA, 25 bp, Homo sapien
gtccgcaccgcccaggcaaagcaac

SEQ ID NO: 1958442 - DNA, 25 bp, Homo sapien
ccaggcaaagcaacgccaggcagag

SEQ ID NO: 1958443 - DNA, 25 bp, Homo sapien
ccccgcgcagggctgcagggcgcat

SEQ ID NO: 1958444 - DNA, 25 bp, Homo sapien
ggcgcttgtccgcaccgcccaggca

SEQ ID NO: 1958445 - DNA, 25 bp, Homo sapien
tcggagctccccttcaggatcgtgc

SEQ ID NO: 1958446 - DNA, 25 bp, Homo sapien
aggatcgtgcaccaagcgcgcacgt

SEQ ID NO: 1958447 - DNA, 25 bp, Homo sapien
gaagacttccgggagaaacgctgtc

SEQ ID NO: 1958448 - DNA, 25 bp, Homo sapien
cacgaccacggtcagtcgcgttgct

SEQ ID NO: 1958449 - DNA, 25 bp, Homo sapien
cagatggtgcttggccgcccaggct

SEQ ID NO: 1958450 - DNA, 25 bp, Homo sapien
gcgccctgcaagctgcccgggagct

SEQ ID NO: 1958451 - DNA, 25 bp, Homo sapien
acgcagcacccgctttcaaaaactg

SEQ ID NO: 1958452 - DNA, 25 bp, Homo sapien
ccgagggacggctccagaattagga

SEQ ID NO: 1958453 - DNA, 25 bp, Homo sapien
cctctccagtctcccggtgctaggt

SEQ ID NO: 1958454 - DNA, 25 bp, Homo sapien
ctccagtctcccggtgctaggtgct

SEQ ID NO: 1958455 - DNA, 25 bp, Homo sapien
tctccagtctcccggtgctaggtgc

SEQ ID NO: 1958456 - DNA, 25 bp, Homo sapien
ctctccagtctcccggtgctaggtg

SEQ ID NO: 1958457 - DNA, 25 bp, Homo sapien
tgtttattttcgacacagttctccc

SEQ ID NO: 1958458 - DNA, 25 bp, Homo sapien
cccacatcggaagctaatgaggagc

SEQ ID NO: 1958459 - DNA, 25 bp, Homo sapien
agcgtcctacccagcctgaagaagc

SEQ ID NO: 1958460 - DNA, 25 bp, Homo sapien
ttcttaaagaaggacatccaaatgg

SEQ ID NO: 1958461 - DNA, 25 bp, Homo sapien
tatacacgtggatattaggctgctt

SEQ ID NO: 1958462 - DNA, 25 bp, Homo sapien
gctgcttacttgagctgtcttacaa

SEQ ID NO: 1958463 - DNA, 25 bp, Homo sapien
tttactttagataagcccttctgca

SEQ ID NO: 1958464 - DNA, 25 bp, Homo sapien
gattttactacataactgagctgct

SEQ ID NO: 1958465 - DNA, 25 bp, Homo sapien
gacctcctgtactcaagtaattatc

SEQ ID NO: 1958466 - DNA, 25 bp, Homo sapien
ttgacctcctgtactcaagtaatta

SEQ ID NO: 1958467 - DNA, 25 bp, Homo sapien
agtgtaatgtcgtgaacattgctca

SEQ ID NO: 1958468 - DNA, 25 bp, Homo sapien
ggctgcagtgtaatgtcgtgaacat

SEQ ID NO: 1958469 - DNA, 25 bp, Homo sapien
gactacgttaaataggagaggtgac

SEQ ID NO: 1958470 - DNA, 25 bp, Homo sapien
ggttctcaggcggaatgcttctggc

SEQ ID NO: 1958471 - DNA, 25 bp, Homo sapien
ggctagcccttccaagactacgtta

SEQ ID NO: 1958472 - DNA, 25 bp, Homo sapien
cccatttggtatgttggctatcagt

SEQ ID NO: 1958473 - DNA, 25 bp, Homo sapien
tcagcactcggataggtcttgtttt

SEQ ID NO: 1958474 - DNA, 25 bp, Homo sapien
cattatgtatgagatgagtcttttg

SEQ ID NO: 1958475 - DNA, 25 bp, Homo sapien
atttatccaatcctttactttgagc

SEQ ID NO: 1958476 - DNA, 25 bp, Homo sapien
gttttttcaatccaacttgcactct

SEQ ID NO: 1958477 - DNA, 25 bp, Homo sapien
tcttgaaacttggcacaatctaagc

SEQ ID NO: 1958478 - DNA, 25 bp, Homo sapien
taagctgatccggatcagctacttc

SEQ ID NO: 1958479 - DNA, 25 bp, Homo sapien
aatctaagctgatccggatcagcta

SEQ ID NO: 1958480 - DNA, 25 bp, Homo sapien
ctgatccggatcagctacttcaaaa

SEQ ID NO: 1958481 - DNA, 25 bp, Homo sapien
taaacagtattgcaaaccggagaga

SEQ ID NO: 1958482 - DNA, 25 bp, Homo sapien
gcatgtcacatgttaaccaggcccc

SEQ ID NO: 1958483 - DNA, 25 bp, Homo sapien
tatgagcttgataaggatagccctg

SEQ ID NO: 1958484 - DNA, 25 bp, Homo sapien
gatagccctgaactgtaatgataca

SEQ ID NO: 1958485 - DNA, 25 bp, Homo sapien
aaacaagtgtgagttaccaccacca

SEQ ID NO: 1958486 - DNA, 25 bp, Homo sapien
ccaccaccaccgtagggatcaggga

SEQ ID NO: 1958487 - DNA, 25 bp, Homo sapien
tgagttaccaccaccaccgtaggga

SEQ ID NO: 1958488 - DNA, 25 bp, Homo sapien
aagtgtgagttaccaccaccaccgt

SEQ ID NO: 1958489 - DNA, 25 bp, Homo sapien
tgctatgtgggctctagaccagctg

SEQ ID NO: 1958490 - DNA, 25 bp, Homo sapien
cttgtgtgctggaaatcaaaaggcc

SEQ ID NO: 1958491 - DNA, 25 bp, Homo sapien
caaaaggcctgagtacctgtccata

SEQ ID NO: 1958492 - DNA, 25 bp, Homo sapien
tatcaactaaccaagcaaggccact

SEQ ID NO: 1958493 - DNA, 25 bp, Homo sapien
taatgctttgatatctggcaattcc

SEQ ID NO: 1958494 - DNA, 25 bp, Homo sapien
gcctggcttagagtaggaaacgaat

SEQ ID NO: 1958495 - DNA, 25 bp, Homo sapien
ttaatgctttgatatctggcaattc

SEQ ID NO: 1958496 - DNA, 25 bp, Homo sapien
cttagagtaggaaacgaatttgttg

SEQ ID NO: 1958497 - DNA, 25 bp, Homo sapien
gtatctgcctactgtgaataccgac

SEQ ID NO: 1958498 - DNA, 25 bp, Homo sapien
gagttgactctatcatacagctaga

SEQ ID NO: 1958499 - DNA, 25 bp, Homo sapien
aagaatgtttgttttgtgccacgcg

SEQ ID NO: 1958500 - DNA, 25 bp, Homo sapien
gataaaaacgcaagaatatgtcctg

SEQ ID NO: 1958501 - DNA, 25 bp, Homo sapien
agtgccctcctcatatgtcttcaga

SEQ ID NO: 1958502 - DNA, 25 bp, Homo sapien
ccattggtgagctatcaaggtgaca

SEQ ID NO: 1958503 - DNA, 25 bp, Homo sapien
catcattaaatgtggagttcgggaa

SEQ ID NO: 1958504 - DNA, 25 bp, Homo sapien
gaaaagatgtgcagaagctgaccct

SEQ ID NO: 1958505 - DNA, 25 bp, Homo sapien
tcataagcttgtccaaattgcctcc

SEQ ID NO: 1958506 - DNA, 25 bp, Homo sapien
tgtctttacgtcaatgtctctgcag

SEQ ID NO: 1958507 - DNA, 25 bp, Homo sapien
tccttaggaatagcttatggtaact

SEQ ID NO: 1958508 - DNA, 25 bp, Homo sapien
cagcaaacagctggccatatctaca

SEQ ID NO: 1958509 - DNA, 25 bp, Homo sapien
tctgacataaggcattgctgttgaa

SEQ ID NO: 1958510 - DNA, 25 bp, Homo sapien
tggcctgaatatgtaactccatttt

SEQ ID NO: 1958511 - DNA, 25 bp, Homo sapien
ctgacataaggcattgctgttgaaa

SEQ ID NO: 1958512 - DNA, 25 bp, Homo sapien
ggcctgaatatgtaactccattttg

SEQ ID NO: 1958513 - DNA, 25 bp, Homo sapien
gacccatgcaattaggctggactca

SEQ ID NO: 1958514 - DNA, 25 bp, Homo sapien
gactctccactgttaaggacccatg

SEQ ID NO: 1958515 - DNA, 25 bp, Homo sapien
tcactttgccatgtcaggtgacaca

SEQ ID NO: 1958516 - DNA, 25 bp, Homo sapien
tagaggtagtacacatcccttggct

SEQ ID NO: 1958517 - DNA, 25 bp, Homo sapien
tcaagtaatgctagttttcctgact

SEQ ID NO: 1958518 - DNA, 25 bp, Homo sapien
gctgattcagtatcttatctggatg

SEQ ID NO: 1958519 - DNA, 25 bp, Homo sapien
tcaataacaattcaataagttggcc

SEQ ID NO: 1958520 - DNA, 25 bp, Homo sapien
gttggcccttgataagctgattcag

SEQ ID NO: 1958521 - DNA, 25 bp, Homo sapien
gattgccctatcagatgtcaaaaca

SEQ ID NO: 1958522 - DNA, 25 bp, Homo sapien
cactgttattagtgtagttatggaa

SEQ ID NO: 1958523 - DNA, 25 bp, Homo sapien
agaataaatgaaagattgccctatc

SEQ ID NO: 1958524 - DNA, 25 bp, Homo sapien
aaatgaaagattgccctatcagatg

SEQ ID NO: 1958525 - DNA, 25 bp, Homo sapien
tcactccatacgctaaattccaggg

SEQ ID NO: 1958526 - DNA, 25 bp, Homo sapien
aatagagatacgtggaaaaatggct

SEQ ID NO: 1958527 - DNA, 25 bp, Homo sapien
gacacaggagtcaaaaggacaccag

SEQ ID NO: 1958528 - DNA, 25 bp, Homo sapien
ccagggctgggacaatctgagcagc

SEQ ID NO: 1958529 - DNA, 25 bp, Homo sapien
taataggacaaaccgacatcacggg

SEQ ID NO: 1958530 - DNA, 25 bp, Homo sapien
gatatccgcgtagtctcaaagtgtc

SEQ ID NO: 1958531 - DNA, 25 bp, Homo sapien
tacgtaagccattcctatgcagtgt

SEQ ID NO: 1958532 - DNA, 25 bp, Homo sapien
ccattttggagggtggcaaccagat

SEQ ID NO: 1958533 - DNA, 25 bp, Homo sapien
tatcagttgcaaatctgggccttgg

SEQ ID NO: 1958534 - DNA, 25 bp, Homo sapien
caccaagaggcagacacaagccagg

SEQ ID NO: 1958535 - DNA, 25 bp, Homo sapien
gactcctgtgaccatatgtgtggga

SEQ ID NO: 1958536 - DNA, 25 bp, Homo sapien
cactatctatctggaggtagcatca

SEQ ID NO: 1958537 - DNA, 25 bp, Homo sapien
gcccagaatgacctttgctatctct

SEQ ID NO: 1958538 - DNA, 25 bp, Homo sapien
accaaatagacttgggtggttcatc

SEQ ID NO: 1958539 - DNA, 25 bp, Homo sapien
acttgggtggttcatctcagctgct

SEQ ID NO: 1958540 - DNA, 25 bp, Homo sapien
cccagcccagaatgacctttgctat

SEQ ID NO: 1958541 - DNA, 25 bp, Homo sapien
taactagtaagtggatttgaaccca

SEQ ID NO: 1958542 - DNA, 25 bp, Homo sapien
gagacattagctaacttcctgtggt

SEQ ID NO: 1958543 - DNA, 25 bp, Homo sapien
tgtactgtaccaaaagaaatgtgga

SEQ ID NO: 1958544 - DNA, 25 bp, Homo sapien
cccatgtaatgtggctgtaaagtcc

SEQ ID NO: 1958545 - DNA, 25 bp, Homo sapien
tagcctctggtcaggaactatgcca

SEQ ID NO: 1958546 - DNA, 25 bp, Homo sapien
cctccctgagtaagaaagaatctct

SEQ ID NO: 1958547 - DNA, 25 bp, Homo sapien
ggatttcaagcctgctagcctctgg

SEQ ID NO: 1958548 - DNA, 25 bp, Homo sapien
catagagtgcccagatacttgctga

SEQ ID NO: 1958549 - DNA, 25 bp, Homo sapien
ccagtgtgggtctacttatatgcaa

SEQ ID NO: 1958550 - DNA, 25 bp, Homo sapien
gttccacaactgaaaccaagaatag

SEQ ID NO: 1958551 - DNA, 25 bp, Homo sapien
gaaagatatagagctgaccctgaac

SEQ ID NO: 1958552 - DNA, 25 bp, Homo sapien
tagccctaatatcatactgttgttg

SEQ ID NO: 1958553 - DNA, 25 bp, Homo sapien
agtaagaatgtaccaattcctcacc

SEQ ID NO: 1958554 - DNA, 25 bp, Homo sapien
tcacctctcctagtagggagccaat

SEQ ID NO: 1958555 - DNA, 25 bp, Homo sapien
tagggagccaatatacagtgtgtaa

SEQ ID NO: 1958556 - DNA, 25 bp, Homo sapien
gaatgcaaattcttgacagactaaa

SEQ ID NO: 1958557 - DNA, 25 bp, Homo sapien
cataggatccaaattacagagaggg

SEQ ID NO: 1958558 - DNA, 25 bp, Homo sapien
ctaaaagataataggcataggatcc

SEQ ID NO: 1958559 - DNA, 25 bp, Homo sapien
cagttgggtctaggatatggtaaca

SEQ ID NO: 1958560 - DNA, 25 bp, Homo sapien
tctatacggtatgcatgaacatcaa

SEQ ID NO: 1958561 - DNA, 25 bp, Homo sapien
cccagaatagggcattttcgtttgc

SEQ ID NO: 1958562 - DNA, 25 bp, Homo sapien
taggcgcatgtagaccatttcaatg

SEQ ID NO: 1958563 - DNA, 25 bp, Homo sapien
cagaaaaagagttgctgctcagcca

SEQ ID NO: 1958564 - DNA, 25 bp, Homo sapien
gtcctgatcatacatctggctgcat

SEQ ID NO: 1958565 - DNA, 25 bp, Homo sapien
taacctctgcctcctgggttcaagc

SEQ ID NO: 1958566 - DNA, 25 bp, Homo sapien
tgagagagtctcattctgtctccca

SEQ ID NO: 1958567 - DNA, 25 bp, Homo sapien
gattctcatgccttagcctcctcag

SEQ ID NO: 1958568 - DNA, 25 bp, Homo sapien
gtggtgcaatctcactgtaacctct

SEQ ID NO: 1958569 - DNA, 25 bp, Homo sapien
catataagtgtactcacgcagttca

SEQ ID NO: 1958570 - DNA, 25 bp, Homo sapien
catgagtgacaatctcagggagatg

SEQ ID NO: 1958571 - DNA, 25 bp, Homo sapien
cctgtggaccacgtttattagaaga

SEQ ID NO: 1958572 - DNA, 25 bp, Homo sapien
tatctcaacttataacctgtggacc

SEQ ID NO: 1958573 - DNA, 25 bp, Homo sapien
ccgcagttgactcggccaaaggaaa

SEQ ID NO: 1958574 - DNA, 25 bp, Homo sapien
ggaaaatacaactcggcaccgcagt

SEQ ID NO: 1958575 - DNA, 25 bp, Homo sapien
ggacatcctgtggtctgcgcgtaca

SEQ ID NO: 1958576 - DNA, 25 bp, Homo sapien
ggttctcggacacacctctgaaagg

SEQ ID NO: 1958577 - DNA, 25 bp, Homo sapien
tatgactccggcgatcttgtgcggc

SEQ ID NO: 1958578 - DNA, 25 bp, Homo sapien
ccgcccggctttaggctagtgggct

SEQ ID NO: 1958579 - DNA, 25 bp, Homo sapien
ggagtccaggcggagtccgctctcc

SEQ ID NO: 1958580 - DNA, 25 bp, Homo sapien
gctagtgggctttaactacgtcgat

SEQ ID NO: 1958581 - DNA, 25 bp, Homo sapien
ctcttcctcaggctcgggcatgatc

SEQ ID NO: 1958582 - DNA, 25 bp, Homo sapien
gctcgttcgttcgtgtggtcccgga

SEQ ID NO: 1958583 - DNA, 25 bp, Homo sapien
cttgcgtggacagcgggcgtcacaa

SEQ ID NO: 1958584 - DNA, 25 bp, Homo sapien
acggagctgcgggacctgctggtgc

SEQ ID NO: 1958585 - DNA, 25 bp, Homo sapien
ggtaccacagtaactctgatactaa

SEQ ID NO: 1958586 - DNA, 25 bp, Homo sapien
tacattactattgagagagagccaa

SEQ ID NO: 1958587 - DNA, 25 bp, Homo sapien
gctagggataattttgaactgttaa

SEQ ID NO: 1958588 - DNA, 25 bp, Homo sapien
tatagtaacatatagctagggataa

SEQ ID NO: 1958589 - DNA, 25 bp, Homo sapien
gcagaaggctggtgacaaggtaaca

SEQ ID NO: 1958590 - DNA, 25 bp, Homo sapien
ctcatgctcagataccaaggtataa

SEQ ID NO: 1958591 - DNA, 25 bp, Homo sapien
cagtaggtatctttgtttggtaatg

SEQ ID NO: 1958592 - DNA, 25 bp, Homo sapien
cttatgaaatgtcacttgaggctgg

SEQ ID NO: 1958593 - DNA, 25 bp, Homo sapien
tatattttagggtttgtggatggca

SEQ ID NO: 1958594 - DNA, 25 bp, Homo sapien
tagttcacaggctgaacaaaagcag

SEQ ID NO: 1958595 - DNA, 25 bp, Homo sapien
tgtactgtctctcacatagtctttg

SEQ ID NO: 1958596 - DNA, 25 bp, Homo sapien
aatgaaagtaaggaaagcagaaggc

SEQ ID NO: 1958597 - DNA, 25 bp, Homo sapien
gccagtactacatccattttattga

SEQ ID NO: 1958598 - DNA, 25 bp, Homo sapien
tgacaggttttgcatgtgatgagtg

SEQ ID NO: 1958599 - DNA, 25 bp, Homo sapien
tttgattaggtattatcaacttatg

SEQ ID NO: 1958600 - DNA, 25 bp, Homo sapien
ttttcacatgtactttttgattagg

SEQ ID NO: 1958601 - DNA, 25 bp, Homo sapien
aaggccgtcctgtgaatttgcccca

SEQ ID NO: 1958602 - DNA, 25 bp, Homo sapien
ccctaggttcaagtctgcaggaagg

SEQ ID NO: 1958603 - DNA, 25 bp, Homo sapien
tcaaagacgcttccagacctaaggg

SEQ ID NO: 1958604 - DNA, 25 bp, Homo sapien
tggaacaatctacaaaatctgaggg

SEQ ID NO: 1958605 - DNA, 25 bp, Homo sapien
tagtggataccctgagcttatttcc

SEQ ID NO: 1958606 - DNA, 25 bp, Homo sapien
tgcttgatggctcacaatctccttc

SEQ ID NO: 1958607 - DNA, 25 bp, Homo sapien
taaattcccagtgacaactctttgg

SEQ ID NO: 1958608 - DNA, 25 bp, Homo sapien
tgttacaagcccaagaatactattc

SEQ ID NO: 1958609 - DNA, 25 bp, Homo sapien
gaagaacagattgcaatgatcccag

SEQ ID NO: 1958610 - DNA, 25 bp, Homo sapien
taacatctaggaagtgaaatcccac

SEQ ID NO: 1958611 - DNA, 25 bp, Homo sapien
cgaggtgccggcagattcgatgtct

SEQ ID NO: 1958612 - DNA, 25 bp, Homo sapien
gttagccagaattatgaatgcagcc

SEQ ID NO: 1958613 - DNA, 25 bp, Homo sapien
gagggccgtatcctgcttccagagg

SEQ ID NO: 1958614 - DNA, 25 bp, Homo sapien
ctcccgtgttcccaggaatcccagg

SEQ ID NO: 1958615 - DNA, 25 bp, Homo sapien
gaatcccaggagcccgcctcgaggg

SEQ ID NO: 1958616 - DNA, 25 bp, Homo sapien
aggagcccgcctcgagggccgtatc

SEQ ID NO: 1958617 - DNA, 25 bp, Homo sapien
caagggtgcctttccgccttctcgg

SEQ ID NO: 1958618 - DNA, 25 bp, Homo sapien
tgtttcctgatgtcgagtcatggcc

SEQ ID NO: 1958619 - DNA, 25 bp, Homo sapien
ggtgttcattagacagcgtggcctg

SEQ ID NO: 1958620 - DNA, 25 bp, Homo sapien
ccggcgctccgacacagggagatgt

SEQ ID NO: 1958621 - DNA, 25 bp, Homo sapien
aggcagcactctgtcgtcatccaca

SEQ ID NO: 1958622 - DNA, 25 bp, Homo sapien
ggcagcactctgtcgtcatccacat

SEQ ID NO: 1958623 - DNA, 25 bp, Homo sapien
gggacaaggagtcacaaatgagcag

SEQ ID NO: 1958624 - DNA, 25 bp, Homo sapien
ctgagggggacaaggagtcacaaat

SEQ ID NO: 1958625 - DNA, 25 bp, Homo sapien
gagggggacaaggagtcacaaatga

SEQ ID NO: 1958626 - DNA, 25 bp, Homo sapien
gggggacaaggagtcacaaatgagc

SEQ ID NO: 1958627 - DNA, 25 bp, Homo sapien
gttccagggtgggggctgcagccat

SEQ ID NO: 1958628 - DNA, 25 bp, Homo sapien
ctagagggttggaggtggtgggagg

SEQ ID NO: 1958629 - DNA, 25 bp, Homo sapien
gagagggttccagggtgggggctgc

SEQ ID NO: 1958630 - DNA, 25 bp, Homo sapien
gggttccagggtgggggctgcagcc

SEQ ID NO: 1958631 - DNA, 25 bp, Homo sapien
ggacaatgacatcccgtcctgacat

SEQ ID NO: 1958632 - DNA, 25 bp, Homo sapien
tagttgacaccaaggacaatgacat

SEQ ID NO: 1958633 - DNA, 25 bp, Homo sapien
aaggacaatgacatcccgtcctgac

SEQ ID NO: 1958634 - DNA, 25 bp, Homo sapien
gtagttgacaccaaggacaatgaca

SEQ ID NO: 1958635 - DNA, 25 bp, Homo sapien
tgaagtgtgtgctgaggaataaaac

SEQ ID NO: 1958636 - DNA, 25 bp, Homo sapien
gacctagttacatcaacccatcttc

SEQ ID NO: 1958637 - DNA, 25 bp, Homo sapien
tgatctgaagtgtgtgctgaggaat

SEQ ID NO: 1958638 - DNA, 25 bp, Homo sapien
ctgaaattgaaattaccaagtgacc

SEQ ID NO: 1958639 - DNA, 25 bp, Homo sapien
gtcgcttttgactagcactcgagaa

SEQ ID NO: 1958640 - DNA, 25 bp, Homo sapien
taattctgaagacaatcctggcagg

SEQ ID NO: 1958641 - DNA, 25 bp, Homo sapien
gagttagggcggtaaagtcacacag

SEQ ID NO: 1958642 - DNA, 25 bp, Homo sapien
cattggaaacgctctaatagaccac

SEQ ID NO: 1958643 - DNA, 25 bp, Homo sapien
ccgtggctgccgccaggagggagca

SEQ ID NO: 1958644 - DNA, 25 bp, Homo sapien
cgtggctgccgccaggagggagcac

SEQ ID NO: 1958645 - DNA, 25 bp, Homo sapien
gcaggcgtggatgggcgttattgtt

SEQ ID NO: 1958646 - DNA, 25 bp, Homo sapien
tggatgggcgttattgttgtgtctt

SEQ ID NO: 1958647 - DNA, 25 bp, Homo sapien
tcacgagagagaatgcggaactcct

SEQ ID NO: 1958648 - DNA, 25 bp, Homo sapien
agagaatgcggaactcctggctctg

SEQ ID NO: 1958649 - DNA, 25 bp, Homo sapien
aagagatcacgagagagaatgcgga

SEQ ID NO: 1958650 - DNA, 25 bp, Homo sapien
gcaagaagagatcacgagagagaat

SEQ ID NO: 1958651 - DNA, 25 bp, Homo sapien
ctcctatgggcagcccttctacagg

SEQ ID NO: 1958652 - DNA, 25 bp, Homo sapien
tcaggggcgatggtagaaatgagga

SEQ ID NO: 1958653 - DNA, 25 bp, Homo sapien
tgggcagcccttctacaggaagcag

SEQ ID NO: 1958654 - DNA, 25 bp, Homo sapien
tcttcctcctatgggcagcccttct

SEQ ID NO: 1958655 - DNA, 25 bp, Homo sapien
tactcaggggatgagacatgatgag

SEQ ID NO: 1958656 - DNA, 25 bp, Homo sapien
atgccatagtgtgcccgccctacag

SEQ ID NO: 1958657 - DNA, 25 bp, Homo sapien
gatgagtctctcatttggtgtcatg

SEQ ID NO: 1958658 - DNA, 25 bp, Homo sapien
ttcctggtgaaggagatactcaggg

SEQ ID NO: 1958659 - DNA, 25 bp, Homo sapien
gttgggcatcgagtgcacggcgtgc

SEQ ID NO: 1958660 - DNA, 25 bp, Homo sapien
gggcccgttgggcatcgagtgcacg

SEQ ID NO: 1958661 - DNA, 25 bp, Homo sapien
gagtgcacggcgtgccgggccgtcc

SEQ ID NO: 1958662 - DNA, 25 bp, Homo sapien
aaatgggggcccgttgggcatcgag

SEQ ID NO: 1958663 - DNA, 25 bp, Homo sapien
gatggagtagctgcccgacttttca

SEQ ID NO: 1958664 - DNA, 25 bp, Homo sapien
taaaggctagcatgtacgacagtac

SEQ ID NO: 1958665 - DNA, 25 bp, Homo sapien
gaaccagggcactttctgatgtcgg

SEQ ID NO: 1958666 - DNA, 25 bp, Homo sapien
tagttccataaacacgggcgttgag

SEQ ID NO: 1958667 - DNA, 25 bp, Homo sapien
tctgccctggagtagaaactgtggc

SEQ ID NO: 1958668 - DNA, 25 bp, Homo sapien
gcattgcagaacacgatgaggccaa

SEQ ID NO: 1958669 - DNA, 25 bp, Homo sapien
cgtgacatccgaggtatgagccact

SEQ ID NO: 1958670 - DNA, 25 bp, Homo sapien
cagcaggttgaccttaagccgaggg

SEQ ID NO: 1958671 - DNA, 25 bp, Homo sapien
tcttaggcagtatttgaaggatacc

SEQ ID NO: 1958672 - DNA, 25 bp, Homo sapien
tctcaatagggaatgtcttaggcag

SEQ ID NO: 1958673 - DNA, 25 bp, Homo sapien
ttgaatagctcctccatgcaagcac

SEQ ID NO: 1958674 - DNA, 25 bp, Homo sapien
tacctatgggtatagagaacatact

SEQ ID NO: 1958675 - DNA, 25 bp, Homo sapien
tatcaaggccttcgacctctaagac

SEQ ID NO: 1958676 - DNA, 25 bp, Homo sapien
tagacggaggatacattcaggaact

SEQ ID NO: 1958677 - DNA, 25 bp, Homo sapien
actagaaacagtgcaaggtcaggaa

SEQ ID NO: 1958678 - DNA, 25 bp, Homo sapien
tagaccttagcatgccaggagaagt

SEQ ID NO: 1958679 - DNA, 25 bp, Homo sapien
tgaagtctcccatgaagacaagcag

SEQ ID NO: 1958680 - DNA, 25 bp, Homo sapien
cacaaattagtactcacagctgaga

SEQ ID NO: 1958681 - DNA, 25 bp, Homo sapien
gcaatgacgtgccatgagcctctgt

SEQ ID NO: 1958682 - DNA, 25 bp, Homo sapien
tgactggtgacttgtgaaattctag

SEQ ID NO: 1958683 - DNA, 25 bp, Homo sapien
ctcaggacccacaatccatggttag

SEQ ID NO: 1958684 - DNA, 25 bp, Homo sapien
gacccacaatccatggttagaatga

SEQ ID NO: 1958685 - DNA, 25 bp, Homo sapien
caggacccacaatccatggttagaa

SEQ ID NO: 1958686 - DNA, 25 bp, Homo sapien
ggacccacaatccatggttagaatg

SEQ ID NO: 1958687 - DNA, 25 bp, Homo sapien
caccctgggacgctgatgctaaact

SEQ ID NO: 1958688 - DNA, 25 bp, Homo sapien
tgtcattggacttccctcgccagac

SEQ ID NO: 1958689 - DNA, 25 bp, Homo sapien
ggatagagttagtcccaccaggcgg

SEQ ID NO: 1958690 - DNA, 25 bp, Homo sapien
tcgccagacccctgtaggaatgcgc

SEQ ID NO: 1958691 - DNA, 25 bp, Homo sapien
ttccaaagcggtctggtcgaacgcc

SEQ ID NO: 1958692 - DNA, 25 bp, Homo sapien
cttccaaagcggtctggtcgaacgc

SEQ ID NO: 1958693 - DNA, 25 bp, Homo sapien
tccaaagcggtctggtcgaacgcct

SEQ ID NO: 1958694 - DNA, 25 bp, Homo sapien
gtaggatggaggctttgtagtcacc

SEQ ID NO: 1958695 - DNA, 25 bp, Homo sapien
agagtgggacatttgcaacgtgggt

SEQ ID NO: 1958696 - DNA, 25 bp, Homo sapien
acatttgcaacgtgggtaggatgga

SEQ ID NO: 1958697 - DNA, 25 bp, Homo sapien
aggatggaggctttgtagtcaccag

SEQ ID NO: 1958698 - DNA, 25 bp, Homo sapien
cttgaggccacggtacagcccctgt

SEQ ID NO: 1958699 - DNA, 25 bp, Homo sapien
tgcccatgcacgttccttgaggcca

SEQ ID NO: 1958700 - DNA, 25 bp, Homo sapien
ttctctgcccatgcacgttccttga

SEQ ID NO: 1958701 - DNA, 25 bp, Homo sapien
caccagggcaccacgtctccggccg

SEQ ID NO: 1958702 - DNA, 25 bp, Homo sapien
cagtgctttggagctctcctgcggg

SEQ ID NO: 1958703 - DNA, 25 bp, Homo sapien
agctatctcggcatcacggctttca

SEQ ID NO: 1958704 - DNA, 25 bp, Homo sapien
gctctcctgcgggttagctatctcg

SEQ ID NO: 1958705 - DNA, 25 bp, Homo sapien
tgcgggttagctatctcggcatcac

SEQ ID NO: 1958706 - DNA, 25 bp, Homo sapien
tcatcaaaactgactattttataat

SEQ ID NO: 1958707 - DNA, 25 bp, Homo sapien
gctcagggctaatcttagaatgcaa

SEQ ID NO: 1958708 - DNA, 25 bp, Homo sapien
ctcagggctaatcttagaatgcaat

SEQ ID NO: 1958709 - DNA, 25 bp, Homo sapien
catcaaaactgactattttataatt

SEQ ID NO: 1958710 - DNA, 25 bp, Homo sapien
cagggcacttgggcgcagccacaaa

SEQ ID NO: 1958711 - DNA, 25 bp, Homo sapien
aatcagaaaagtccccaatgccacc

SEQ ID NO: 1958712 - DNA, 25 bp, Homo sapien
cttgggcgcagccacaaatgcttca

SEQ ID NO: 1958713 - DNA, 25 bp, Homo sapien
gaaatcagaaaagtccccaatgcca

SEQ ID NO: 1958714 - DNA, 25 bp, Homo sapien
actgtcccagccagggggtaagatt

SEQ ID NO: 1958715 - DNA, 25 bp, Homo sapien
ccagccagggggtaagattgtgctc

SEQ ID NO: 1958716 - DNA, 25 bp, Homo sapien
ctctcttgatagctcagatggagga

SEQ ID NO: 1958717 - DNA, 25 bp, Homo sapien
tttagcaaaatccctctcttgatag

SEQ ID NO: 1958718 - DNA, 25 bp, Homo sapien
gcagaccccacacgtttcaggaatc

SEQ ID NO: 1958719 - DNA, 25 bp, Homo sapien
tacagcaataaaactagggtgagtc

SEQ ID NO: 1958720 - DNA, 25 bp, Homo sapien
aattggctgattgtacgttagacct

SEQ ID NO: 1958721 - DNA, 25 bp, Homo sapien
gaggagccgctctatgtcctgaggc

SEQ ID NO: 1958722 - DNA, 25 bp, Homo sapien
ttctcaaacagaacgccgtagagag

SEQ ID NO: 1958723 - DNA, 25 bp, Homo sapien
tctgatcgggttcttggactccacg

SEQ ID NO: 1958724 - DNA, 25 bp, Homo sapien
tgtacccgaaggcaatgacgaagcc

SEQ ID NO: 1958725 - DNA, 25 bp, Homo sapien
cagaatgtagagcttgacgtgcacg

SEQ ID NO: 1958726 - DNA, 25 bp, Homo sapien
ccattgtcggagtctggttccaaaa

SEQ ID NO: 1958727 - DNA, 25 bp, Homo sapien
ccttgatcccgacgagccagagtgt

SEQ ID NO: 1958728 - DNA, 25 bp, Homo sapien
ggccttgatcccgacgagccagagt

SEQ ID NO: 1958729 - DNA, 25 bp, Homo sapien
tgatcccgacgagccagagtgtggc

SEQ ID NO: 1958730 - DNA, 25 bp, Homo sapien
tgtggcgctgggccaagtacacaca

SEQ ID NO: 1958731 - DNA, 25 bp, Homo sapien
aaggactgtgaaacacggctcctta

SEQ ID NO: 1958732 - DNA, 25 bp, Homo sapien
caacagtgtgggtttgttcaaaggt

SEQ ID NO: 1958733 - DNA, 25 bp, Homo sapien
gaaacacggctccttaaatccaaca

SEQ ID NO: 1958734 - DNA, 25 bp, Homo sapien
gcattactggggcagcagaaaggac

SEQ ID NO: 1958735 - DNA, 25 bp, Homo sapien
ccacgatctatgaggtcacgtgtgc

SEQ ID NO: 1958736 - DNA, 25 bp, Homo sapien
tgtggatacgcaacccaccaggaag

SEQ ID NO: 1958737 - DNA, 25 bp, Homo sapien
ggagtgttcagtccacgatctatga

SEQ ID NO: 1958738 - DNA, 25 bp, Homo sapien
gaagtgcctggagtgttcagtccac

SEQ ID NO: 1958739 - DNA, 25 bp, Homo sapien
ctgtagttcgtttgtgggtttgctt

SEQ ID NO: 1958740 - DNA, 25 bp, Homo sapien
gcctgtagttcgtttgtgggtttgc

SEQ ID NO: 1958741 - DNA, 25 bp, Homo sapien
cattggcctgtagttcgtttgtggg

SEQ ID NO: 1958742 - DNA, 25 bp, Homo sapien
attggcctgtagttcgtttgtgggt

SEQ ID NO: 1958743 - DNA, 25 bp, Homo sapien
ccattcttgtggttgagctgcttcc

SEQ ID NO: 1958744 - DNA, 25 bp, Homo sapien
aaccggagcgctcaggcaccagaca

SEQ ID NO: 1958745 - DNA, 25 bp, Homo sapien
cagaactcccaccgcggtggttgta

SEQ ID NO: 1958746 - DNA, 25 bp, Homo sapien
aagaaactgtgaaccggagcgctca

SEQ ID NO: 1958747 - DNA, 25 bp, Homo sapien
cttttctcctgaccggtttatgatg

SEQ ID NO: 1958748 - DNA, 25 bp, Homo sapien
tttctcctgaccggtttatgatgag

SEQ ID NO: 1958749 - DNA, 25 bp, Homo sapien
ccttttctcctgaccggtttatgat

SEQ ID NO: 1958750 - DNA, 25 bp, Homo sapien
ttttctcctgaccggtttatgatga

SEQ ID NO: 1958751 - DNA, 25 bp, Homo sapien
tcagaggccaccaacattgccacaa

SEQ ID NO: 1958752 - DNA, 25 bp, Homo sapien
gtgctcagaggccaccaacattgcc

SEQ ID NO: 1958753 - DNA, 25 bp, Homo sapien
aggccaccaacattgccacaaggtc

SEQ ID NO: 1958754 - DNA, 25 bp, Homo sapien
ctggcgtaggaggtgctcagaggcc

SEQ ID NO: 1958755 - DNA, 25 bp, Homo sapien
gacttcacctggagttaggagtcag

SEQ ID NO: 1958756 - DNA, 25 bp, Homo sapien
tgctggctgcccactgactattccg

SEQ ID NO: 1958757 - DNA, 25 bp, Homo sapien
tacagagcacccaaaggtgtgctgg

SEQ ID NO: 1958758 - DNA, 25 bp, Homo sapien
actattccggtcgacagagccaggt

SEQ ID NO: 1958759 - DNA, 25 bp, Homo sapien
agataagcagtctccgtgagatggg

SEQ ID NO: 1958760 - DNA, 25 bp, Homo sapien
ctgaaaagataagcagtctccgtga

SEQ ID NO: 1958761 - DNA, 25 bp, Homo sapien
agtctccgtgagatggggcctgacc

SEQ ID NO: 1958762 - DNA, 25 bp, Homo sapien
tctccgtgagatggggcctgaccca

SEQ ID NO: 1958763 - DNA, 25 bp, Homo sapien
tggtaggagtcctcccgtgcgtccg

SEQ ID NO: 1958764 - DNA, 25 bp, Homo sapien
tgcggactctgtccctggtaggagt

SEQ ID NO: 1958765 - DNA, 25 bp, Homo sapien
tagcttgtctctgaccgaacgccca

SEQ ID NO: 1958766 - DNA, 25 bp, Homo sapien
catagcttgtctctgaccgaacgcc

SEQ ID NO: 1958767 - DNA, 25 bp, Homo sapien
agaggagctcttagagtgtgactgc

SEQ ID NO: 1958768 - DNA, 25 bp, Homo sapien
gagagagacttcatcctccttatga

SEQ ID NO: 1958769 - DNA, 25 bp, Homo sapien
gctcttagagtgtgactgcagtcca

SEQ ID NO: 1958770 - DNA, 25 bp, Homo sapien
tgtagaaagaggagctcttagagtg

SEQ ID NO: 1958771 - DNA, 25 bp, Homo sapien
ctgtcattaggtggaggcttgatcg

SEQ ID NO: 1958772 - DNA, 25 bp, Homo sapien
tggaggcttgatcgataggctcagc

SEQ ID NO: 1958773 - DNA, 25 bp, Homo sapien
gccgccctggtgttctgactcttgt

SEQ ID NO: 1958774 - DNA, 25 bp, Homo sapien
ttgatcgataggctcagccgccctg

SEQ ID NO: 1958775 - DNA, 25 bp, Homo sapien
caaaagaatgatcgtggcaggaggc

SEQ ID NO: 1958776 - DNA, 25 bp, Homo sapien
tagagcaatgtcaggtcacggtgcg

SEQ ID NO: 1958777 - DNA, 25 bp, Homo sapien
tgaaatgaagctggcggaatattgc

SEQ ID NO: 1958778 - DNA, 25 bp, Homo sapien
tgtaatgatctttgtctcacagaaa

SEQ ID NO: 1958779 - DNA, 25 bp, Homo sapien
gggccaagaagcgaagtccaacctc

SEQ ID NO: 1958780 - DNA, 25 bp, Homo sapien
agcctacagtccgacccgggccaag

SEQ ID NO: 1958781 - DNA, 25 bp, Homo sapien
cagtccgacccgggccaagaagcga

SEQ ID NO: 1958782 - DNA, 25 bp, Homo sapien
agcagcagcctacagtccgacccgg

SEQ ID NO: 1958783 - DNA, 25 bp, Homo sapien
agaacacgtctccttcacaggatta

SEQ ID NO: 1958784 - DNA, 25 bp, Homo sapien
caggattactaggagaatgagcaga

SEQ ID NO: 1958785 - DNA, 25 bp, Homo sapien
ttctggacacttagttatggacagg

SEQ ID NO: 1958786 - DNA, 25 bp, Homo sapien
gaggagacttctggacacttagtta

SEQ ID NO: 1958787 - DNA, 25 bp, Homo sapien
gggagtgtcggcgtgcgttcctttg

SEQ ID NO: 1958788 - DNA, 25 bp, Homo sapien
tcatgtgggagtgtcggcgtgcgtt

SEQ ID NO: 1958789 - DNA, 25 bp, Homo sapien
gtgtcggcgtgcgttcctttgtcaa

SEQ ID NO: 1958790 - DNA, 25 bp, Homo sapien
catgtgggagtgtcggcgtgcgttc

SEQ ID NO: 1958791 - DNA, 25 bp, Homo sapien
tcgtcctaatagatccgcgggagct

SEQ ID NO: 1958792 - DNA, 25 bp, Homo sapien
tggtggctcctcttccaaagcccca

SEQ ID NO: 1958793 - DNA, 25 bp, Homo sapien
cagactttcatgtggatcacctttc

SEQ ID NO: 1958794 - DNA, 25 bp, Homo sapien
gccaaactttcctgcgggatcgtcc

SEQ ID NO: 1958795 - DNA, 25 bp, Homo sapien
ctgacagcctcagttccgtgtctga

SEQ ID NO: 1958796 - DNA, 25 bp, Homo sapien
tgtctgaagaccgtgtgccaccctc

SEQ ID NO: 1958797 - DNA, 25 bp, Homo sapien
aagtctgacctggtcgccaagccac

SEQ ID NO: 1958798 - DNA, 25 bp, Homo sapien
tcagttccgtgtctgaagaccgtgt

SEQ ID NO: 1958799 - DNA, 25 bp, Homo sapien
ggagccatcgctgacgttcttgcct

SEQ ID NO: 1958800 - DNA, 25 bp, Homo sapien
ttctttcttgcaggacgttgacaaa

SEQ ID NO: 1958801 - DNA, 25 bp, Homo sapien
tacgggagagctaccggcttctagg

SEQ ID NO: 1958802 - DNA, 25 bp, Homo sapien
tgcttcccagcgtcctacgggagag

SEQ ID NO: 1958803 - DNA, 25 bp, Homo sapien
gggccccaatgtgtgactgagagag

SEQ ID NO: 1958804 - DNA, 25 bp, Homo sapien
gccccaatgtgtgactgagagagga

SEQ ID NO: 1958805 - DNA, 25 bp, Homo sapien
cccaatgtgtgactgagagaggaat

SEQ ID NO: 1958806 - DNA, 25 bp, Homo sapien
tggaggggccccaatgtgtgactga

SEQ ID NO: 1958807 - DNA, 25 bp, Homo sapien
gtgtggttctaagatggactgagtt

SEQ ID NO: 1958808 - DNA, 25 bp, Homo sapien
cttttccaatggcagcaacaccacg

SEQ ID NO: 1958809 - DNA, 25 bp, Homo sapien
gctgaccgtggcatctgtgttttca

SEQ ID NO: 1958810 - DNA, 25 bp, Homo sapien
ccaatggcagcaacaccacgtggaa

SEQ ID NO: 1958811 - DNA, 25 bp, Homo sapien
taacttcctgatgtgcctgcacaga

SEQ ID NO: 1958812 - DNA, 25 bp, Homo sapien
tcttggtcatgagagtggtaacttc

SEQ ID NO: 1958813 - DNA, 25 bp, Homo sapien
agcggggggatcttccaggaactct

SEQ ID NO: 1958814 - DNA, 25 bp, Homo sapien
cgtgtgttcattggcagcatcctca

SEQ ID NO: 1958815 - DNA, 25 bp, Homo sapien
ctgtgcagcatcaggcaggcctggc

SEQ ID NO: 1958816 - DNA, 25 bp, Homo sapien
tgtgcagcatcaggcaggcctggct

SEQ ID NO: 1958817 - DNA, 25 bp, Homo sapien
gtttctgctttgacctttggtacca

SEQ ID NO: 1958818 - DNA, 25 bp, Homo sapien
tggtttctgctttgacctttggtac

SEQ ID NO: 1958819 - DNA, 25 bp, Homo sapien
ctgttctgtgcccaggtgagatgcg

SEQ ID NO: 1958820 - DNA, 25 bp, Homo sapien
tgcagcccacgctggctgtctttgc

SEQ ID NO: 1958821 - DNA, 25 bp, Homo sapien
gctgtctttgctgttctgtgcccag

SEQ ID NO: 1958822 - DNA, 25 bp, Homo sapien
ttgctgttctgtgcccaggtgagat

SEQ ID NO: 1958823 - DNA, 25 bp, Homo sapien
gggtcagagcgctttcttcttgaag

SEQ ID NO: 1958824 - DNA, 25 bp, Homo sapien
ggtcagagcgctttcttcttgaagc

SEQ ID NO: 1958825 - DNA, 25 bp, Homo sapien
tgggtcagagcgctttcttcttgaa

SEQ ID NO: 1958826 - DNA, 25 bp, Homo sapien
ctgggtcagagcgctttcttcttga

SEQ ID NO: 1958827 - DNA, 25 bp, Homo sapien
cagttacagaatcatctacacggat

SEQ ID NO: 1958828 - DNA, 25 bp, Homo sapien
atcatctacacggatgtcaccctga

SEQ ID NO: 1958829 - DNA, 25 bp, Homo sapien
tacagaatcatctacacggatgtca

SEQ ID NO: 1958830 - DNA, 25 bp, Homo sapien
taacagttacagaatcatctacacg

SEQ ID NO: 1958831 - DNA, 25 bp, Homo sapien
agatggtgccttcaaatcctttgta

SEQ ID NO: 1958832 - DNA, 25 bp, Homo sapien
gatggtgccttcaaatcctttgtag

SEQ ID NO: 1958833 - DNA, 25 bp, Homo sapien
ggtgccttcaaatcctttgtagagg

SEQ ID NO: 1958834 - DNA, 25 bp, Homo sapien
tcagatggtgccttcaaatcctttg

SEQ ID NO: 1958835 - DNA, 25 bp, Homo sapien
tagatactgatcatggctttcgggc

SEQ ID NO: 1958836 - DNA, 25 bp, Homo sapien
tgagtagatactgatcatggctttc

SEQ ID NO: 1958837 - DNA, 25 bp, Homo sapien
tactgatcatggctttcgggccact

SEQ ID NO: 1958838 - DNA, 25 bp, Homo sapien
gatcatggctttcgggccactggaa

SEQ ID NO: 1958839 - DNA, 25 bp, Homo sapien
agagttggcctctgtcgcaagcaca

SEQ ID NO: 1958840 - DNA, 25 bp, Homo sapien
tgcagtgcccacatgtgcctcgatg

SEQ ID NO: 1958841 - DNA, 25 bp, Homo sapien
ctggagtcgtggaagcggcttccct

SEQ ID NO: 1958842 - DNA, 25 bp, Homo sapien
tcgatggtggcctgactcgcccgtg

SEQ ID NO: 1958843 - DNA, 25 bp, Homo sapien
cgaagggactgcaaataggtcacgt

SEQ ID NO: 1958844 - DNA, 25 bp, Homo sapien
ggcacagtggcttctcaagggacca

SEQ ID NO: 1958845 - DNA, 25 bp, Homo sapien
ccactgaaaagaggcggtcattgca

SEQ ID NO: 1958846 - DNA, 25 bp, Homo sapien
tgagattttagaagccacgcgctgc

SEQ ID NO: 1958847 - DNA, 25 bp, Homo sapien
tttggcctttggcaggtcagccctg

SEQ ID NO: 1958848 - DNA, 25 bp, Homo sapien
ctttggcctttggcaggtcagccct

SEQ ID NO: 1958849 - DNA, 25 bp, Homo sapien
tctttggcctttggcaggtcagccc

SEQ ID NO: 1958850 - DNA, 25 bp, Homo sapien
ccagaggccaatgcaagtgtggacg

SEQ ID NO: 1958851 - DNA, 25 bp, Homo sapien
cttgaggacgcagtgggactcttgc

SEQ ID NO: 1958852 - DNA, 25 bp, Homo sapien
gactcttgcatagtgtccagtgggc

SEQ ID NO: 1958853 - DNA, 25 bp, Homo sapien
tggacgtggaggcatcttccaacat

SEQ ID NO: 1958854 - DNA, 25 bp, Homo sapien
cctgcagggttacccccagtgtgct

SEQ ID NO: 1958855 - DNA, 25 bp, Homo sapien
gctgtcctccgcaggtggctgttgt

SEQ ID NO: 1958856 - DNA, 25 bp, Homo sapien
catctcggttcacggaatcccgcag

SEQ ID NO: 1958857 - DNA, 25 bp, Homo sapien
acagccccatctcggttcacggaat

SEQ ID NO: 1958858 - DNA, 25 bp, Homo sapien
caggaacgctcagctgccgggcaca

SEQ ID NO: 1958859 - DNA, 25 bp, Homo sapien
ctcccagtttcaggaacgctcagct

SEQ ID NO: 1958860 - DNA, 25 bp, Homo sapien
gtttcaggaacgctcagctgccggg

SEQ ID NO: 1958861 - DNA, 25 bp, Homo sapien
tcccagtttcaggaacgctcagctg

SEQ ID NO: 1958862 - DNA, 25 bp, Homo sapien
tccacttcttgtctcaagggagaac

SEQ ID NO: 1958863 - DNA, 25 bp, Homo sapien
caagggagaacgtcttgcttgatcc

SEQ ID NO: 1958864 - DNA, 25 bp, Homo sapien
gtcttgcttgatccgtgtcttcctg

SEQ ID NO: 1958865 - DNA, 25 bp, Homo sapien
gaaggagccggaacaagtggatggg

SEQ ID NO: 1958866 - DNA, 25 bp, Homo sapien
tttattctaataaagggagcagaga

SEQ ID NO: 1958867 - DNA, 25 bp, Homo sapien
tatggtcttgaccactctcctaacc

SEQ ID NO: 1958868 - DNA, 25 bp, Homo sapien
aaatctactaggttatggtcttgac

SEQ ID NO: 1958869 - DNA, 25 bp, Homo sapien
gcaccgggtgcacggtttcctcaga

SEQ ID NO: 1958870 - DNA, 25 bp, Homo sapien
ggaccatgtaggtggacctgcctgc

SEQ ID NO: 1958871 - DNA, 25 bp, Homo sapien
aggcactgctgtgcgtgacttctcc

SEQ ID NO: 1958872 - DNA, 25 bp, Homo sapien
aggtggacctgcctgctgaggcact

SEQ ID NO: 1958873 - DNA, 25 bp, Homo sapien
tgaggcactgctgtgcgtgacttct

SEQ ID NO: 1958874 - DNA, 25 bp, Homo sapien
gaagtaggagaataaactcaaccca

SEQ ID NO: 1958875 - DNA, 25 bp, Homo sapien
ataaactcaacccaaagtcagaaga

SEQ ID NO: 1958876 - DNA, 25 bp, Homo sapien
gaataaactcaacccaaagtcagaa

SEQ ID NO: 1958877 - DNA, 25 bp, Homo sapien
aataaactcaacccaaagtcagaag

SEQ ID NO: 1958878 - DNA, 25 bp, Homo sapien
gaagccttcattggagtgcagagta

SEQ ID NO: 1958879 - DNA, 25 bp, Homo sapien
ggctgaggcgatgcagctctcccag

SEQ ID NO: 1958880 - DNA, 25 bp, Homo sapien
tggtcggccaagtggaaacccatgt

SEQ ID NO: 1958881 - DNA, 25 bp, Homo sapien
gaactaagttctatgaagccgtggt

SEQ ID NO: 1958882 - DNA, 25 bp, Homo sapien
caaaagatgacggtgcacccagaga

SEQ ID NO: 1958883 - DNA, 25 bp, Homo sapien
gatactgagtgtgacaagactgcaa

SEQ ID NO: 1958884 - DNA, 25 bp, Homo sapien
taatgtgctcgaacaaccaaaggat

SEQ ID NO: 1958885 - DNA, 25 bp, Homo sapien
tccttgaaggaaggcactttgatac

SEQ ID NO: 1958886 - DNA, 25 bp, Homo sapien
tgaaccacagttagtgacatttctg

SEQ ID NO: 1958887 - DNA, 25 bp, Homo sapien
tcattcgatctatgatttatgcaaa

SEQ ID NO: 1958888 - DNA, 25 bp, Homo sapien
cttgttcattcgatctatgatttat

SEQ ID NO: 1958889 - DNA, 25 bp, Homo sapien
aatccatccagcgatcagatgaacc

SEQ ID NO: 1958890 - DNA, 25 bp, Homo sapien
cagttcatgaccaatccgagcaagt

SEQ ID NO: 1958891 - DNA, 25 bp, Homo sapien
tcaatgaccgaggatgacatgagga

SEQ ID NO: 1958892 - DNA, 25 bp, Homo sapien
cgtggtgacccacaaaaccttgtca

SEQ ID NO: 1958893 - DNA, 25 bp, Homo sapien
ttcatttgctgctacatccacacag

SEQ ID NO: 1958894 - DNA, 25 bp, Homo sapien
gaattaaggcgctacacggtggtca

SEQ ID NO: 1958895 - DNA, 25 bp, Homo sapien
aaactgggtgctcacaaggacgcgg

SEQ ID NO: 1958896 - DNA, 25 bp, Homo sapien
ttttagggcaagaatggcctcgggc

SEQ ID NO: 1958897 - DNA, 25 bp, Homo sapien
tctctcctagggtgaaacgtgcgca

SEQ ID NO: 1958898 - DNA, 25 bp, Homo sapien
ccgtctgtctggaccacgtgtgcac

SEQ ID NO: 1958899 - DNA, 25 bp, Homo sapien
acgattcctccgcacaccagctaca

SEQ ID NO: 1958900 - DNA, 25 bp, Homo sapien
ggccgtctgtctggaccacgtgtgc

SEQ ID NO: 1958901 - DNA, 25 bp, Homo sapien
ccagctacaggcaccgcagcgctgg

SEQ ID NO: 1958902 - DNA, 25 bp, Homo sapien
acttccgcggttttcagtgacccag

SEQ ID NO: 1958903 - DNA, 25 bp, Homo sapien
cttccgcggttttcagtgacccagt

SEQ ID NO: 1958904 - DNA, 25 bp, Homo sapien
ccgcggttttcagtgacccagtttg

SEQ ID NO: 1958905 - DNA, 25 bp, Homo sapien
cgcggttttcagtgacccagtttgt

SEQ ID NO: 1958906 - DNA, 25 bp, Homo sapien
ccagcgccggaacgggctttttcat

SEQ ID NO: 1958907 - DNA, 25 bp, Homo sapien
cagcccagcgccggaacgggctttt

SEQ ID NO: 1958908 - DNA, 25 bp, Homo sapien
cagaaatggcccctgtgatgatcaa

SEQ ID NO: 1958909 - DNA, 25 bp, Homo sapien
gataactgcactattggagccctga

SEQ ID NO: 1958910 - DNA, 25 bp, Homo sapien
ttgtgaatcagctggtccaacggca

SEQ ID NO: 1958911 - DNA, 25 bp, Homo sapien
tctcgagtttcaagaggcgacgtgc

SEQ ID NO: 1958912 - DNA, 25 bp, Homo sapien
tgacagccgctgcaatacacagtct

SEQ ID NO: 1958913 - DNA, 25 bp, Homo sapien
tcttgaaccgggctgtgtggatttc

SEQ ID NO: 1958914 - DNA, 25 bp, Homo sapien
tcgtccaggacgacatttccagctt

SEQ ID NO: 1958915 - DNA, 25 bp, Homo sapien
cagtcttgacggtgccatccgggta

SEQ ID NO: 1958916 - DNA, 25 bp, Homo sapien
atccttgagatgttccaccgtcccg

SEQ ID NO: 1958917 - DNA, 25 bp, Homo sapien
tccatccttgagatgttccaccgtc

SEQ ID NO: 1958918 - DNA, 25 bp, Homo sapien
ctgtccatccttgagatgttccacc

SEQ ID NO: 1958919 - DNA, 25 bp, Homo sapien
ttgagatgttccaccgtcccgtcgg

SEQ ID NO: 1958920 - DNA, 25 bp, Homo sapien
ctgcagaatgcagtttttcagtata

SEQ ID NO: 1958921 - DNA, 25 bp, Homo sapien
gaatgcagtttttcagtatatgtta

SEQ ID NO: 1958922 - DNA, 25 bp, Homo sapien
agtttttcagtatatgttacattga

SEQ ID NO: 1958923 - DNA, 25 bp, Homo sapien
gcagtttttcagtatatgttacatt

SEQ ID NO: 1958924 - DNA, 25 bp, Homo sapien
aaccgtcagggtaggtcgtgcgcat

SEQ ID NO: 1958925 - DNA, 25 bp, Homo sapien
tctgcttgttaggaaactgcacaac

SEQ ID NO: 1958926 - DNA, 25 bp, Homo sapien
tccaaaccgtcagggtaggtcgtgc

SEQ ID NO: 1958927 - DNA, 25 bp, Homo sapien
gcacaacttccaaaccgtcagggta

SEQ ID NO: 1958928 - DNA, 25 bp, Homo sapien
tttgcgtgatagtaaatctgtaagc

SEQ ID NO: 1958929 - DNA, 25 bp, Homo sapien
agcatttgcgtgatagtaaatctgt

SEQ ID NO: 1958930 - DNA, 25 bp, Homo sapien
tgatagtaaatctgtaagctccaga

SEQ ID NO: 1958931 - DNA, 25 bp, Homo sapien
cgtgatagtaaatctgtaagctcca

SEQ ID NO: 1958932 - DNA, 25 bp, Homo sapien
atcaagtccaagctcaggctcctcg

SEQ ID NO: 1958933 - DNA, 25 bp, Homo sapien
tcccaataatcatcaagtccaagct

SEQ ID NO: 1958934 - DNA, 25 bp, Homo sapien
tcatcccaataatcatcaagtccaa

SEQ ID NO: 1958935 - DNA, 25 bp, Homo sapien
taatcatcaagtccaagctcaggct

SEQ ID NO: 1958936 - DNA, 25 bp, Homo sapien
gcacaaccttcgctcagtgcctgtt

SEQ ID NO: 1958937 - DNA, 25 bp, Homo sapien
tggtcgccttcttatccatgctcgg

SEQ ID NO: 1958938 - DNA, 25 bp, Homo sapien
gatgatggtcgccttcttatccatg

SEQ ID NO: 1958939 - DNA, 25 bp, Homo sapien
gaaggtggtgatggcacaaccttcg

SEQ ID NO: 1958940 - DNA, 25 bp, Homo sapien
tcagcaaagctagcctgaggccgac

SEQ ID NO: 1958941 - DNA, 25 bp, Homo sapien
gaggccgactcccagtttctaacag

SEQ ID NO: 1958942 - DNA, 25 bp, Homo sapien
gctttacccgcttgcaagacatgaa

SEQ ID NO: 1958943 - DNA, 25 bp, Homo sapien
tatgtctcatggacctgcctacggg

SEQ ID NO: 1958944 - DNA, 25 bp, Homo sapien
gcagcgatgatgtgctgccccaggc

SEQ ID NO: 1958945 - DNA, 25 bp, Homo sapien
agaagcagcgatgatgtgctgcccc

SEQ ID NO: 1958946 - DNA, 25 bp, Homo sapien
aagcagcgatgatgtgctgccccag

SEQ ID NO: 1958947 - DNA, 25 bp, Homo sapien
gaagcagcgatgatgtgctgcccca

SEQ ID NO: 1958948 - DNA, 25 bp, Homo sapien
tgagtcaatgccgaccaccgccacc

SEQ ID NO: 1958949 - DNA, 25 bp, Homo sapien
accaccgccaccttgacgcgtcctt

SEQ ID NO: 1958950 - DNA, 25 bp, Homo sapien
accttgacgcgtccttccggaactg

SEQ ID NO: 1958951 - DNA, 25 bp, Homo sapien
tgacgcgtccttccggaactgagct

SEQ ID NO: 1958952 - DNA, 25 bp, Homo sapien
tcctcctgaaaagcgtattgcttta

SEQ ID NO: 1958953 - DNA, 25 bp, Homo sapien
ctggcagtcaacaatgctagaaacg

SEQ ID NO: 1958954 - DNA, 25 bp, Homo sapien
aacaatgctagaaacgcctggcctc

SEQ ID NO: 1958955 - DNA, 25 bp, Homo sapien
cttcctcctgaaaagcgtattgctt

SEQ ID NO: 1958956 - DNA, 25 bp, Homo sapien
cccatgtcctgtctggagggagcgg

SEQ ID NO: 1958957 - DNA, 25 bp, Homo sapien
ccatgtcctgtctggagggagcggc

SEQ ID NO: 1958958 - DNA, 25 bp, Homo sapien
tttttcatcttagtgtccatggcct

SEQ ID NO: 1958959 - DNA, 25 bp, Homo sapien
ttttcatcttagtgtccatggcctg

SEQ ID NO: 1958960 - DNA, 25 bp, Homo sapien
cctttttcatcttagtgtccatggc

SEQ ID NO: 1958961 - DNA, 25 bp, Homo sapien
tttcatcttagtgtccatggcctgt

SEQ ID NO: 1958962 - DNA, 25 bp, Homo sapien
taatcctaatctcccgtggtctcca

SEQ ID NO: 1958963 - DNA, 25 bp, Homo sapien
cataatcctaatctcccgtggtctc

SEQ ID NO: 1958964 - DNA, 25 bp, Homo sapien
ctgcagaaagagcataatcctaatc

SEQ ID NO: 1958965 - DNA, 25 bp, Homo sapien
ctaatctcccgtggtctccatgaac

SEQ ID NO: 1958966 - DNA, 25 bp, Homo sapien
gcagtatgaggtgggagaaatgcac

SEQ ID NO: 1958967 - DNA, 25 bp, Homo sapien
ctgcagtatgaggtgggagaaatgc

SEQ ID NO: 1958968 - DNA, 25 bp, Homo sapien
tgcagtatgaggtgggagaaatgca

SEQ ID NO: 1958969 - DNA, 25 bp, Homo sapien
gccacaatgacaactgccacattta

SEQ ID NO: 1958970 - DNA, 25 bp, Homo sapien
ggccacaatgacaactgccacattt

SEQ ID NO: 1958971 - DNA, 25 bp, Homo sapien
tgaaactctgactaggggaactctt

SEQ ID NO: 1958972 - DNA, 25 bp, Homo sapien
gactaggggaactcttaagtcataa

SEQ ID NO: 1958973 - DNA, 25 bp, Homo sapien
acattaatcttgtttgtgctaaatg

SEQ ID NO: 1958974 - DNA, 25 bp, Homo sapien
gctaaatgcaaccaacttaaatcta

SEQ ID NO: 1958975 - DNA, 25 bp, Homo sapien
cttgaacgcggctgagaaatccgcc

SEQ ID NO: 1958976 - DNA, 25 bp, Homo sapien
caacaagtgatcctgtaagaacatt

SEQ ID NO: 1958977 - DNA, 25 bp, Homo sapien
tactgcgattgctaaatccaattga

SEQ ID NO: 1958978 - DNA, 25 bp, Homo sapien
tgaagtgaatggatgcacagcttcc

SEQ ID NO: 1958979 - DNA, 25 bp, Homo sapien
ttaaagggacagagcatatacattg

SEQ ID NO: 1958980 - DNA, 25 bp, Homo sapien
tccccaccccgtagaggagcgcaga

SEQ ID NO: 1958981 - DNA, 25 bp, Homo sapien
ccccaccccgtagaggagcgcagag

SEQ ID NO: 1958982 - DNA, 25 bp, Homo sapien
ttccccaccccgtagaggagcgcag

SEQ ID NO: 1958983 - DNA, 25 bp, Homo sapien
cccaccccgtagaggagcgcagagg

SEQ ID NO: 1958984 - DNA, 25 bp, Homo sapien
acaaaagtggtcagaaattaggcag

SEQ ID NO: 1958985 - DNA, 25 bp, Homo sapien
ccaaccagggaatcggacaaaagtg

SEQ ID NO: 1958986 - DNA, 25 bp, Homo sapien
gcatggaaacagttaggagccctcg

SEQ ID NO: 1958987 - DNA, 25 bp, Homo sapien
tgtcggcaagactcccaggtgagga

SEQ ID NO: 1958988 - DNA, 25 bp, Homo sapien
tgccaccggagttttgcggacttcg

SEQ ID NO: 1958989 - DNA, 25 bp, Homo sapien
ctgccgtctgctcctgcagcgtggt

SEQ ID NO: 1958990 - DNA, 25 bp, Homo sapien
gtgattttctgccaccggagttttg

SEQ ID NO: 1958991 - DNA, 25 bp, Homo sapien
cggacttcgggaagatggatgcata

SEQ ID NO: 1958992 - DNA, 25 bp, Homo sapien
aaagacagtcagaggccccccttgt

SEQ ID NO: 1958993 - DNA, 25 bp, Homo sapien
aaggctgggagcacgaagccatctt

SEQ ID NO: 1958994 - DNA, 25 bp, Homo sapien
ctgcagccggcaatgcctcgagccc

SEQ ID NO: 1958995 - DNA, 25 bp, Homo sapien
tcagaggccccccttgtcacaaggt

SEQ ID NO: 1958996 - DNA, 25 bp, Homo sapien
gagtgacccaggtttccgaggtcac

SEQ ID NO: 1958997 - DNA, 25 bp, Homo sapien
agagtgacccaggtttccgaggtca

SEQ ID NO: 1958998 - DNA, 25 bp, Homo sapien
tagagtgacccaggtttccgaggtc

SEQ ID NO: 1958999 - DNA, 25 bp, Homo sapien
gggagtcggccttccagtgggtgct

SEQ ID NO: 1959000 - DNA, 25 bp, Homo sapien
cccgtctttctgcaccgggagtcgg

SEQ ID NO: 1959001 - DNA, 25 bp, Homo sapien
tgtcttgacgtctcccgggaggact

SEQ ID NO: 1959002 - DNA, 25 bp, Homo sapien
tttctgcaccgggagtcggccttcc

SEQ ID NO: 1959003 - DNA, 25 bp, Homo sapien
cgtacattgtccagcacgcgtgtga

SEQ ID NO: 1959004 - DNA, 25 bp, Homo sapien
taactcaggtcaatgcagaagcgtg

SEQ ID NO: 1959005 - DNA, 25 bp, Homo sapien
cacgagatttgcctcccgagtgtga

SEQ ID NO: 1959006 - DNA, 25 bp, Homo sapien
gaagtccgtgtctcacaggaggctg

SEQ ID NO: 1959007 - DNA, 25 bp, Homo sapien
ttacagacgataagcacgaagggtc

SEQ ID NO: 1959008 - DNA, 25 bp, Homo sapien
tacagacgataagcacgaagggtca

SEQ ID NO: 1959009 - DNA, 25 bp, Homo sapien
acagacgataagcacgaagggtcac

SEQ ID NO: 1959010 - DNA, 25 bp, Homo sapien
aggagctaagtggttagatgaccat

SEQ ID NO: 1959011 - DNA, 25 bp, Homo sapien
gctaagtggttagatgaccatcttt

SEQ ID NO: 1959012 - DNA, 25 bp, Homo sapien
agtggttagatgaccatctttgtcc

SEQ ID NO: 1959013 - DNA, 25 bp, Homo sapien
gtggttagatgaccatctttgtccc

SEQ ID NO: 1959014 - DNA, 25 bp, Homo sapien
tgagaggataaacccgctttctttc

SEQ ID NO: 1959015 - DNA, 25 bp, Homo sapien
ataaacccgctttctttctgaggca

SEQ ID NO: 1959016 - DNA, 25 bp, Homo sapien
gacggaggaacagcctgcccggctt

SEQ ID NO: 1959017 - DNA, 25 bp, Homo sapien
ctctgacggaggaacagcctgcccg

SEQ ID NO: 1959018 - DNA, 25 bp, Homo sapien
ctgggagaaccgaccacagagcagg

SEQ ID NO: 1959019 - DNA, 25 bp, Homo sapien
cacagagcaggctcctctggaatgt

SEQ ID NO: 1959020 - DNA, 25 bp, Homo sapien
tgggagaaccgaccacagagcaggc

SEQ ID NO: 1959021 - DNA, 25 bp, Homo sapien
agagcaggctcctctggaatgtatt

SEQ ID NO: 1959022 - DNA, 25 bp, Homo sapien
gaaatggagctgatggaaagatagc

SEQ ID NO: 1959023 - DNA, 25 bp, Homo sapien
tacacgacgcaaatgatacaaaaac

SEQ ID NO: 1959024 - DNA, 25 bp, Homo sapien
ccacctggaacgtgagagataccac

SEQ ID NO: 1959025 - DNA, 25 bp, Homo sapien
ggtgagatgcctgatgtatccagtt

SEQ ID NO: 1959026 - DNA, 25 bp, Homo sapien
gttttctgtgaatatcagcccacag

SEQ ID NO: 1959027 - DNA, 25 bp, Homo sapien
tccatatgactctggagttttctgt

SEQ ID NO: 1959028 - DNA, 25 bp, Homo sapien
cacagcgactgctgtctcccgagct

SEQ ID NO: 1959029 - DNA, 25 bp, Homo sapien
ctgtgaatatcagcccacagcgact

SEQ ID NO: 1959030 - DNA, 25 bp, Homo sapien
gcatctccccggcattgctgtcctc

SEQ ID NO: 1959031 - DNA, 25 bp, Homo sapien
cggcatctccccggcattgctgtcc

SEQ ID NO: 1959032 - DNA, 25 bp, Homo sapien
atctccccggcattgctgtcctccc

SEQ ID NO: 1959033 - DNA, 25 bp, Homo sapien
tctccccggcattgctgtcctccct

SEQ ID NO: 1959034 - DNA, 25 bp, Homo sapien
ccggcctcgagctgaccctccagca

SEQ ID NO: 1959035 - DNA, 25 bp, Homo sapien
acccggcctcgagctgaccctccag

SEQ ID NO: 1959036 - DNA, 25 bp, Homo sapien
ctacccggcctcgagctgaccctcc

SEQ ID NO: 1959037 - DNA, 25 bp, Homo sapien
cggcctcgagctgaccctccagcat

SEQ ID NO: 1959038 - DNA, 25 bp, Homo sapien
cagtaaccggatccctggctgttcc

SEQ ID NO: 1959039 - DNA, 25 bp, Homo sapien
agtgggcaagggtccgcggtcctca

SEQ ID NO: 1959040 - DNA, 25 bp, Homo sapien
ggcaagggtccgcggtcctcacagc

SEQ ID NO: 1959041 - DNA, 25 bp, Homo sapien
tctttcccgctcctccgaggggata

SEQ ID NO: 1959042 - DNA, 25 bp, Homo sapien
ccaaacttgtgaccccctcagtctg

SEQ ID NO: 1959043 - DNA, 25 bp, Homo sapien
agcagccgacggttccaacggactt

SEQ ID NO: 1959044 - DNA, 25 bp, Homo sapien
ctggtccccgccagtcacttctgct

SEQ ID NO: 1959045 - DNA, 25 bp, Homo sapien
gaccagagagcagccgacggttcca

SEQ ID NO: 1959046 - DNA, 25 bp, Homo sapien
gagagcagccgacggttccaacgga

SEQ ID NO: 1959047 - DNA, 25 bp, Homo sapien
gatctgactcttgtcatcttgggag

SEQ ID NO: 1959048 - DNA, 25 bp, Homo sapien
tctgactgctcgtcttcacgggaga

SEQ ID NO: 1959049 - DNA, 25 bp, Homo sapien
atcttgggagacgtcaggatctgac

SEQ ID NO: 1959050 - DNA, 25 bp, Homo sapien
aagtcaccagtcatggatttcagga

SEQ ID NO: 1959051 - DNA, 25 bp, Homo sapien
gcgcagtgagttgctgccagtccat

SEQ ID NO: 1959052 - DNA, 25 bp, Homo sapien
tctgcgcagtgagttgctgccagtc

SEQ ID NO: 1959053 - DNA, 25 bp, Homo sapien
ccccagtagggaaaatgcccatggg

SEQ ID NO: 1959054 - DNA, 25 bp, Homo sapien
agcccaagcctgtggcccggacatt

SEQ ID NO: 1959055 - DNA, 25 bp, Homo sapien
gacgcccacattcgatgaatcctgc

SEQ ID NO: 1959056 - DNA, 25 bp, Homo sapien
tcaggcatcgactgtcacaggggcc

SEQ ID NO: 1959057 - DNA, 25 bp, Homo sapien
tgaatcctgcatcacggtgttggac

SEQ ID NO: 1959058 - DNA, 25 bp, Homo sapien
agaggtggcagggacgcccacattc

SEQ ID NO: 1959059 - DNA, 25 bp, Homo sapien
ggcagaccgcggctgtttttcaggc

SEQ ID NO: 1959060 - DNA, 25 bp, Homo sapien
ctggttggagatgtgcacaggcaga

SEQ ID NO: 1959061 - DNA, 25 bp, Homo sapien
tcaggagacatgctccggaggctcc

SEQ ID NO: 1959062 - DNA, 25 bp, Homo sapien
gatgctgcaccagggtagctgtttt

SEQ ID NO: 1959063 - DNA, 25 bp, Homo sapien
atgagcgtttgtcatgggaacttcc

SEQ ID NO: 1959064 - DNA, 25 bp, Homo sapien
agcgtttgtcatgggaacttcccag

SEQ ID NO: 1959065 - DNA, 25 bp, Homo sapien
gagcgtttgtcatgggaacttccca

SEQ ID NO: 1959066 - DNA, 25 bp, Homo sapien
gtttgtcatgggaacttcccagtcc

SEQ ID NO: 1959067 - DNA, 25 bp, Homo sapien
ttcagggtggatggagtgctctcct

SEQ ID NO: 1959068 - DNA, 25 bp, Homo sapien
gggacatcggcaggctccataggtc

SEQ ID NO: 1959069 - DNA, 25 bp, Homo sapien
acagttcagggtggatggagtgctc

SEQ ID NO: 1959070 - DNA, 25 bp, Homo sapien
ggcaggctccataggtcttggtcat

SEQ ID NO: 1959071 - DNA, 25 bp, Homo sapien
tggtccacggggagcaggaagtcag

SEQ ID NO: 1959072 - DNA, 25 bp, Homo sapien
gtcaggagcggtgtcaggcaggagg

SEQ ID NO: 1959073 - DNA, 25 bp, Homo sapien
aaccctgtcttagggtgtggccttg

SEQ ID NO: 1959074 - DNA, 25 bp, Homo sapien
tggccttggtccacggggagcagga

SEQ ID NO: 1959075 - DNA, 25 bp, Homo sapien
gcaggtgcgtggaccggccggaggg

SEQ ID NO: 1959076 - DNA, 25 bp, Homo sapien
ctgcagccttcgaaccaggagaggc

SEQ ID NO: 1959077 - DNA, 25 bp, Homo sapien
gccttcgaaccaggagaggctccgt

SEQ ID NO: 1959078 - DNA, 25 bp, Homo sapien
gaactgatgccttgaatgaatccag

SEQ ID NO: 1959079 - DNA, 25 bp, Homo sapien
cttcagaaagggcgggccacttccg

SEQ ID NO: 1959080 - DNA, 25 bp, Homo sapien
ccgggccgccccgtggagagccagc

SEQ ID NO: 1959081 - DNA, 25 bp, Homo sapien
cacttccgtgtgggttgggaaggtg

SEQ ID NO: 1959082 - DNA, 25 bp, Homo sapien
gggccgccccgtggagagccagctt

SEQ ID NO: 1959083 - DNA, 25 bp, Homo sapien
tcggtctcgaggatgctcagggtct

SEQ ID NO: 1959084 - DNA, 25 bp, Homo sapien
ttctcctgctcggtctcgaggatgc

SEQ ID NO: 1959085 - DNA, 25 bp, Homo sapien
caacaggagtaggtgcaaagggaca

SEQ ID NO: 1959086 - DNA, 25 bp, Homo sapien
aggaggccgggcagaacagcaacag

SEQ ID NO: 1959087 - DNA, 25 bp, Homo sapien
cagttggcagtaggcggtcagggac

SEQ ID NO: 1959088 - DNA, 25 bp, Homo sapien
caggtgctcagttggcagtaggcgg

SEQ ID NO: 1959089 - DNA, 25 bp, Homo sapien
cagcaggtgctcagttggcagtagg

SEQ ID NO: 1959090 - DNA, 25 bp, Homo sapien
gctcagttggcagtaggcggtcagg

SEQ ID NO: 1959091 - DNA, 25 bp, Homo sapien
gggcagcaggtgctcagggacagca

SEQ ID NO: 1959092 - DNA, 25 bp, Homo sapien
ctcagggggcagcaggtgctcaggg

SEQ ID NO: 1959093 - DNA, 25 bp, Homo sapien
agcaggtgctcagggacagcaggtg

SEQ ID NO: 1959094 - DNA, 25 bp, Homo sapien
gcagcaggtgctcagggacagcagg

SEQ ID NO: 1959095 - DNA, 25 bp, Homo sapien
agactttagctccaagataggccat

SEQ ID NO: 1959096 - DNA, 25 bp, Homo sapien
gtcagataagactttagctccaaga

SEQ ID NO: 1959097 - DNA, 25 bp, Homo sapien
gataagactttagctccaagatagg

SEQ ID NO: 1959098 - DNA, 25 bp, Homo sapien
ggttgttgtgagtgtcagataagac

SEQ ID NO: 1959099 - DNA, 25 bp, Homo sapien
tctgatcccaaaagcactaactctg

SEQ ID NO: 1959100 - DNA, 25 bp, Homo sapien
gtaccatagactctgatcccaaaag

SEQ ID NO: 1959101 - DNA, 25 bp, Homo sapien
ccttggactccggtaccatagactc

SEQ ID NO: 1959102 - DNA, 25 bp, Homo sapien
gatcccaaaagcactaactctgagg

SEQ ID NO: 1959103 - DNA, 25 bp, Homo sapien
gggctccaggcgtattctaaacttg

SEQ ID NO: 1959104 - DNA, 25 bp, Homo sapien
ttaaaataactgcacgtgggctcca

SEQ ID NO: 1959105 - DNA, 25 bp, Homo sapien
tcaaaaggtaaactgtggccacctg

SEQ ID NO: 1959106 - DNA, 25 bp, Homo sapien
gcccagacagggtgtttacaaagaa

SEQ ID NO: 1959107 - DNA, 25 bp, Homo sapien
ccagagtgcgcgttttcaggacagc

SEQ ID NO: 1959108 - DNA, 25 bp, Homo sapien
tagacagcgggtgcgtaagtcagcc

SEQ ID NO: 1959109 - DNA, 25 bp, Homo sapien
tgatatgtcccaaaacggcctctcg

SEQ ID NO: 1959110 - DNA, 25 bp, Homo sapien
caaaggccccagtgttacgtgaagc

SEQ ID NO: 1959111 - DNA, 25 bp, Homo sapien
ctcatccgccacctgttttgttatt

SEQ ID NO: 1959112 - DNA, 25 bp, Homo sapien
tcatccgccacctgttttgttattt

SEQ ID NO: 1959113 - DNA, 25 bp, Homo sapien
tgtcgaaacgcacagcaacatggcg

SEQ ID NO: 1959114 - DNA, 25 bp, Homo sapien
caagaataactgcagcgtagggacc

SEQ ID NO: 1959115 - DNA, 25 bp, Homo sapien
aatcttatcaggaatgcgtgtgccc

SEQ ID NO: 1959116 - DNA, 25 bp, Homo sapien
tgttgtcccataagaagagcccctc

SEQ ID NO: 1959117 - DNA, 25 bp, Homo sapien
tagatttctatcagccagacgtgtg

SEQ ID NO: 1959118 - DNA, 25 bp, Homo sapien
gcacagcacaaaccatagccacccc

SEQ ID NO: 1959119 - DNA, 25 bp, Homo sapien
agacatagatttctatcagccagac

SEQ ID NO: 1959120 - DNA, 25 bp, Homo sapien
tctatcagccagacgtgtgcacagc

SEQ ID NO: 1959121 - DNA, 25 bp, Homo sapien
aatccagggctccttagcatatgaa

SEQ ID NO: 1959122 - DNA, 25 bp, Homo sapien
tgtctgggatccacaccagtcggaa

SEQ ID NO: 1959123 - DNA, 25 bp, Homo sapien
gggtcccgggtcagtgttcacagag

SEQ ID NO: 1959124 - DNA, 25 bp, Homo sapien
tgaattgaggcgcatcggagccctc

SEQ ID NO: 1959125 - DNA, 25 bp, Homo sapien
tatcttccccttgcgaggcataaag

SEQ ID NO: 1959126 - DNA, 25 bp, Homo sapien
tgcagactggccaagtattccaata

SEQ ID NO: 1959127 - DNA, 25 bp, Homo sapien
ccattaagtgaggattagaaagccc

SEQ ID NO: 1959128 - DNA, 25 bp, Homo sapien
cgctgacctgagcagacctggtgaa

SEQ ID NO: 1959129 - DNA, 25 bp, Homo sapien
ttttccagcataccgttcgctcagc

SEQ ID NO: 1959130 - DNA, 25 bp, Homo sapien
tccagcataccgttcgctcagctca

SEQ ID NO: 1959131 - DNA, 25 bp, Homo sapien
tcattttccagcataccgttcgctc

SEQ ID NO: 1959132 - DNA, 25 bp, Homo sapien
attttccagcataccgttcgctcag

SEQ ID NO: 1959133 - DNA, 25 bp, Homo sapien
gagaaaagccgcagttcaacgcctg

SEQ ID NO: 1959134 - DNA, 25 bp, Homo sapien
tattagctgccaagctcggtagcca

SEQ ID NO: 1959135 - DNA, 25 bp, Homo sapien
tggacatcacagcacatgagcgggt

SEQ ID NO: 1959136 - DNA, 25 bp, Homo sapien
gaaactgctctgtcgagaactcagg

SEQ ID NO: 1959137 - DNA, 25 bp, Homo sapien
agccgtccttggtcccgtctcagca

SEQ ID NO: 1959138 - DNA, 25 bp, Homo sapien
tcagcaggcattcccaacagagacc

SEQ ID NO: 1959139 - DNA, 25 bp, Homo sapien
tgcagccgtccttggtcccgtctca

SEQ ID NO: 1959140 - DNA, 25 bp, Homo sapien
cgtctcagcaggcattcccaacaga

SEQ ID NO: 1959141 - DNA, 25 bp, Homo sapien
aagggccaagtccaaaggattcctg

SEQ ID NO: 1959142 - DNA, 25 bp, Homo sapien
tgataaagggccaagtccaaaggat

SEQ ID NO: 1959143 - DNA, 25 bp, Homo sapien
gccaagtccaaaggattcctgcctt

SEQ ID NO: 1959144 - DNA, 25 bp, Homo sapien
tccactgataaagggccaagtccaa

SEQ ID NO: 1959145 - DNA, 25 bp, Homo sapien
caccggtgaggagacatttgtcccc

SEQ ID NO: 1959146 - DNA, 25 bp, Homo sapien
caattgggatgtgttcgcacagccg

SEQ ID NO: 1959147 - DNA, 25 bp, Homo sapien
cattccggcctgagaacaagagcac

SEQ ID NO: 1959148 - DNA, 25 bp, Homo sapien
gaaacgctctgtgtgagtcagcatc

SEQ ID NO: 1959149 - DNA, 25 bp, Homo sapien
tcggtgttgaacatccacactgcgc

SEQ ID NO: 1959150 - DNA, 25 bp, Homo sapien
gcacgatgcatagttcaggattctg

SEQ ID NO: 1959151 - DNA, 25 bp, Homo sapien
cacactgcgctggaatgtggtcagc

SEQ ID NO: 1959152 - DNA, 25 bp, Homo sapien
tttcatggcagctaaagcacgatgc

SEQ ID NO: 1959153 - DNA, 25 bp, Homo sapien
caggggagggatcgcctgagcacac

SEQ ID NO: 1959154 - DNA, 25 bp, Homo sapien
tgccaggggagggatcgcctgagca

SEQ ID NO: 1959155 - DNA, 25 bp, Homo sapien
gggagggatcgcctgagcacacctg

SEQ ID NO: 1959156 - DNA, 25 bp, Homo sapien
agggatcgcctgagcacacctgctc

SEQ ID NO: 1959157 - DNA, 25 bp, Homo sapien
gctctgtatcttgtgtctaaaatgg

SEQ ID NO: 1959158 - DNA, 25 bp, Homo sapien
atagactgcccgcacgcagcagtgc

SEQ ID NO: 1959159 - DNA, 25 bp, Homo sapien
acttgtcagttagccatagactgcc

SEQ ID NO: 1959160 - DNA, 25 bp, Homo sapien
tcctctctgtggtgacttgtcagtt

SEQ ID NO: 1959161 - DNA, 25 bp, Homo sapien
tgtgtgtgatggtgcccggcacatc

SEQ ID NO: 1959162 - DNA, 25 bp, Homo sapien
ggcagtggccacatctcggatgtct

SEQ ID NO: 1959163 - DNA, 25 bp, Homo sapien
gctcactggtctggcaaataaataa

SEQ ID NO: 1959164 - DNA, 25 bp, Homo sapien
gattttgacagtggaagttagggca

SEQ ID NO: 1959165 - DNA, 25 bp, Homo sapien
aagtgtgaagcagatttctctcctc

SEQ ID NO: 1959166 - DNA, 25 bp, Homo sapien
acagtgaaagatgccccgaggtgct

SEQ ID NO: 1959167 - DNA, 25 bp, Homo sapien
gtgctgcagagttaactcggatcca

SEQ ID NO: 1959168 - DNA, 25 bp, Homo sapien
cagatgtcctgcctcgttgttggca

SEQ ID NO: 1959169 - DNA, 25 bp, Homo sapien
tcctagagaaagagacggaccatgt

SEQ ID NO: 1959170 - DNA, 25 bp, Homo sapien
taacacggttgtttcctgcgcagtg

SEQ ID NO: 1959171 - DNA, 25 bp, Homo sapien
cacctgtgatctgcgttaacgggcc

SEQ ID NO: 1959172 - DNA, 25 bp, Homo sapien
catgttctcaaaactgtgcctcgag

SEQ ID NO: 1959173 - DNA, 25 bp, Homo sapien
gctggaatcaccagctttgtgcctg

SEQ ID NO: 1959174 - DNA, 25 bp, Homo sapien
tgcagcacgttctggttacacctgc

SEQ ID NO: 1959175 - DNA, 25 bp, Homo sapien
tcttctctcccgcagagagggcggg

SEQ ID NO: 1959176 - DNA, 25 bp, Homo sapien
cacgttctggttacacctgccccag

SEQ ID NO: 1959177 - DNA, 25 bp, Homo sapien
cttctcgctcgcacattcctgcacc

SEQ ID NO: 1959178 - DNA, 25 bp, Homo sapien
ttctcgctcgcacattcctgcacct

SEQ ID NO: 1959179 - DNA, 25 bp, Homo sapien
tcttctcgctcgcacattcctgcac

SEQ ID NO: 1959180 - DNA, 25 bp, Homo sapien
cttcttctcgctcgcacattcctgc

SEQ ID NO: 1959181 - DNA, 25 bp, Homo sapien
gaaatgacaactgtggaagagtttc

SEQ ID NO: 1959182 - DNA, 25 bp, Homo sapien
cttgtggagcgctgctgaaatgaca

SEQ ID NO: 1959183 - DNA, 25 bp, Homo sapien
gctgaaatgacaactgtggaagagt

SEQ ID NO: 1959184 - DNA, 25 bp, Homo sapien
cacttgtggagcgctgctgaaatga

SEQ ID NO: 1959185 - DNA, 25 bp, Homo sapien
tcatcacagattcggcagtggcaga

SEQ ID NO: 1959186 - DNA, 25 bp, Homo sapien
tgagaccgccgtggtctcctgttgc

SEQ ID NO: 1959187 - DNA, 25 bp, Homo sapien
tctgactgggaaccagcgaaatcat

SEQ ID NO: 1959188 - DNA, 25 bp, Homo sapien
gaggcaccgtctgtcaggagctttc

SEQ ID NO: 1959189 - DNA, 25 bp, Homo sapien
tcagacggtctaaagaccatgcttt

SEQ ID NO: 1959190 - DNA, 25 bp, Homo sapien
ggtttctcactcagacggtctaaag

SEQ ID NO: 1959191 - DNA, 25 bp, Homo sapien
gacggtctaaagaccatgctttgag

SEQ ID NO: 1959192 - DNA, 25 bp, Homo sapien
tcactcagacggtctaaagaccatg

SEQ ID NO: 1959193 - DNA, 25 bp, Homo sapien
ccccctcccagtagtgtggccccat

SEQ ID NO: 1959194 - DNA, 25 bp, Homo sapien
gtgtggccccattagtctcagtggg

SEQ ID NO: 1959195 - DNA, 25 bp, Homo sapien
cagtgggcctgttgggagtaaaagc

SEQ ID NO: 1959196 - DNA, 25 bp, Homo sapien
tcagtgggcctgttgggagtaaaag

SEQ ID NO: 1959197 - DNA, 25 bp, Homo sapien
gtgtcttcgggaacagagcgccagt

SEQ ID NO: 1959198 - DNA, 25 bp, Homo sapien
ctgtgtcttcgggaacagagcgcca

SEQ ID NO: 1959199 - DNA, 25 bp, Homo sapien
gagcctgtgtcttcgggaacagagc

SEQ ID NO: 1959200 - DNA, 25 bp, Homo sapien
cttcgggaacagagcgccagtcagg

SEQ ID NO: 1959201 - DNA, 25 bp, Homo sapien
ctctgcgcgtctcaggcagccagga

SEQ ID NO: 1959202 - DNA, 25 bp, Homo sapien
aggcgccagccgcagagaacacgca

SEQ ID NO: 1959203 - DNA, 25 bp, Homo sapien
cgtgcatttccttaaagaacggagg

SEQ ID NO: 1959204 - DNA, 25 bp, Homo sapien
aagcctgacggctggagcagcacca

SEQ ID NO: 1959205 - DNA, 25 bp, Homo sapien
tcgagagaggctgcgatggtcccac

SEQ ID NO: 1959206 - DNA, 25 bp, Homo sapien
ggctgcgatggtcccaccgtcacat

SEQ ID NO: 1959207 - DNA, 25 bp, Homo sapien
agagaggctgcgatggtcccaccgt

SEQ ID NO: 1959208 - DNA, 25 bp, Homo sapien
ctgggtcgagagaggctgcgatggt

SEQ ID NO: 1959209 - DNA, 25 bp, Homo sapien
gacggcatgatgagcgaactctggt

SEQ ID NO: 1959210 - DNA, 25 bp, Homo sapien
tggtctatccgaggcctgggaagct

SEQ ID NO: 1959211 - DNA, 25 bp, Homo sapien
ctgggaagctggctcagaagcagca

SEQ ID NO: 1959212 - DNA, 25 bp, Homo sapien
gaattcccgcgtaatcagtcactga

SEQ ID NO: 1959213 - DNA, 25 bp, Homo sapien
caggaatagattaagcacgagagcg

SEQ ID NO: 1959214 - DNA, 25 bp, Homo sapien
cacgagagcgtgtggcacctgctca

SEQ ID NO: 1959215 - DNA, 25 bp, Homo sapien
ctgttgaatttcgttttgatgattc

SEQ ID NO: 1959216 - DNA, 25 bp, Homo sapien
ttcttggcgtgtttctgtagcccag

SEQ ID NO: 1959217 - DNA, 25 bp, Homo sapien
gccctccaagccgtcccaaggcagt

SEQ ID NO: 1959218 - DNA, 25 bp, Homo sapien
agtggaggccctccaagccgtccca

SEQ ID NO: 1959219 - DNA, 25 bp, Homo sapien
ccagtggaggccctccaagccgtcc

SEQ ID NO: 1959220 - DNA, 25 bp, Homo sapien
gaggccctccaagccgtcccaaggc

SEQ ID NO: 1959221 - DNA, 25 bp, Homo sapien
tgcccgacacagagctaagtcctcg

SEQ ID NO: 1959222 - DNA, 25 bp, Homo sapien
tccccattcatgtggagagatggct

SEQ ID NO: 1959223 - DNA, 25 bp, Homo sapien
cagcacaactcagacgccagggttg

SEQ ID NO: 1959224 - DNA, 25 bp, Homo sapien
gccccggctcctgaaaagtgtccat

SEQ ID NO: 1959225 - DNA, 25 bp, Homo sapien
cacattgccaccatcattcaggctg

SEQ ID NO: 1959226 - DNA, 25 bp, Homo sapien
catcattcaggctggtagcatcccc

SEQ ID NO: 1959227 - DNA, 25 bp, Homo sapien
caggcacattgccaccatcattcag

SEQ ID NO: 1959228 - DNA, 25 bp, Homo sapien
tcattcaggctggtagcatccccac

SEQ ID NO: 1959229 - DNA, 25 bp, Homo sapien
gcagagatgtgcttccaggaggacc

SEQ ID NO: 1959230 - DNA, 25 bp, Homo sapien
agagatgtgcttccaggaggaccct

SEQ ID NO: 1959231 - DNA, 25 bp, Homo sapien
cgaggaaccccagagatgagcagga

SEQ ID NO: 1959232 - DNA, 25 bp, Homo sapien
ggaaccccagagatgagcaggagga

SEQ ID NO: 1959233 - DNA, 25 bp, Homo sapien
tccgaggaaccccagagatgagcag

SEQ ID NO: 1959234 - DNA, 25 bp, Homo sapien
ctccgaggaaccccagagatgagca

SEQ ID NO: 1959235 - DNA, 25 bp, Homo sapien
aacgcacgcggcactgaaccttcat

SEQ ID NO: 1959236 - DNA, 25 bp, Homo sapien
ggcaacgcacgcggcactgaacctt

SEQ ID NO: 1959237 - DNA, 25 bp, Homo sapien
ctgcatagaacaggcaacgcacgcg

SEQ ID NO: 1959238 - DNA, 25 bp, Homo sapien
caacgcacgcggcactgaaccttca

SEQ ID NO: 1959239 - DNA, 25 bp, Homo sapien
ctgaaggcagcagttggatttgtct

SEQ ID NO: 1959240 - DNA, 25 bp, Homo sapien
aaggcagcagttggatttgtctcgt

SEQ ID NO: 1959241 - DNA, 25 bp, Homo sapien
cccgtcgctgaaggcagcagttgga

SEQ ID NO: 1959242 - DNA, 25 bp, Homo sapien
cgtcgctgaaggcagcagttggatt

SEQ ID NO: 1959243 - DNA, 25 bp, Homo sapien
gatgagctgagagtttcgagttcca

SEQ ID NO: 1959244 - DNA, 25 bp, Homo sapien
tttcgagttccacggaggcctgact

SEQ ID NO: 1959245 - DNA, 25 bp, Homo sapien
acggaggcctgactgccgtctggcc

SEQ ID NO: 1959246 - DNA, 25 bp, Homo sapien
tgagagtttcgagttccacggaggc

SEQ ID NO: 1959247 - DNA, 25 bp, Homo sapien
gggatgcacgccgcgtggaaccagc

SEQ ID NO: 1959248 - DNA, 25 bp, Homo sapien
gatgcacgccgcgtggaaccagctg

SEQ ID NO: 1959249 - DNA, 25 bp, Homo sapien
atgcacgccgcgtggaaccagctgg

SEQ ID NO: 1959250 - DNA, 25 bp, Homo sapien
ctggggatgcacgccgcgtggaacc

SEQ ID NO: 1959251 - DNA, 25 bp, Homo sapien
tacatggatgggattttgtccttca

SEQ ID NO: 1959252 - DNA, 25 bp, Homo sapien
cacagagctgcttcgtgggttttac

SEQ ID NO: 1959253 - DNA, 25 bp, Homo sapien
tcagttgtcaggcaaggatggcgca

SEQ ID NO: 1959254 - DNA, 25 bp, Homo sapien
tctttcgacagtaagaggcccggtc

SEQ ID NO: 1959255 - DNA, 25 bp, Homo sapien
ttttgtccagccagcgaggtatccc

SEQ ID NO: 1959256 - DNA, 25 bp, Homo sapien
cgtggcccagcagtccgcgtggttt

SEQ ID NO: 1959257 - DNA, 25 bp, Homo sapien
gcgaggtatcccttgcactgtgtcc

SEQ ID NO: 1959258 - DNA, 25 bp, Homo sapien
cagtccgcgtggttttgtccagcca

SEQ ID NO: 1959259 - DNA, 25 bp, Homo sapien
aaggaccgtcgctcctgggtcttct

SEQ ID NO: 1959260 - DNA, 25 bp, Homo sapien
gatggcagggcattgctgcgttggt

SEQ ID NO: 1959261 - DNA, 25 bp, Homo sapien
gggtttcctgcactcccagctgaag

SEQ ID NO: 1959262 - DNA, 25 bp, Homo sapien
agggctccatgagcgccagcccgaa

SEQ ID NO: 1959263 - DNA, 25 bp, Homo sapien
gagagaaccggacccagttgctttc

SEQ ID NO: 1959264 - DNA, 25 bp, Homo sapien
gagttgggcggctgggagagaaccg

SEQ ID NO: 1959265 - DNA, 25 bp, Homo sapien
acttgggaagttcttgtcatgctca

SEQ ID NO: 1959266 - DNA, 25 bp, Homo sapien
tgctcaatatgacctgaagactggg

SEQ ID NO: 1959267 - DNA, 25 bp, Homo sapien
ctcctcctggatcacacgctcagct

SEQ ID NO: 1959268 - DNA, 25 bp, Homo sapien
gctcctcctggatcacacgctcagc

SEQ ID NO: 1959269 - DNA, 25 bp, Homo sapien
caggggagggctccaattgctcctc

SEQ ID NO: 1959270 - DNA, 25 bp, Homo sapien
tgctcctcctggatcacacgctcag

SEQ ID NO: 1959271 - DNA, 25 bp, Homo sapien
gccgtagccagatgaagccggccat

SEQ ID NO: 1959272 - DNA, 25 bp, Homo sapien
actcgccgtagccagatgaagccgg

SEQ ID NO: 1959273 - DNA, 25 bp, Homo sapien
agcggactcgccgtagccagatgaa

SEQ ID NO: 1959274 - DNA, 25 bp, Homo sapien
ggactcgccgtagccagatgaagcc

SEQ ID NO: 1959275 - DNA, 25 bp, Homo sapien
cccttcagtagggtctgtaatttga

SEQ ID NO: 1959276 - DNA, 25 bp, Homo sapien
cagtagggtctgtaatttgaagatc

SEQ ID NO: 1959277 - DNA, 25 bp, Homo sapien
ccttcagtagggtctgtaatttgaa

SEQ ID NO: 1959278 - DNA, 25 bp, Homo sapien
gggtctgtaatttgaagatccattt

SEQ ID NO: 1959279 - DNA, 25 bp, Homo sapien
tccagcaggtgtggataatgaccag

SEQ ID NO: 1959280 - DNA, 25 bp, Homo sapien
caggaacaggtcctcgacgatgctt

SEQ ID NO: 1959281 - DNA, 25 bp, Homo sapien
tcatgacagcccttttggtccggtg

SEQ ID NO: 1959282 - DNA, 25 bp, Homo sapien
ttacctcaccagcacggaagatttg

SEQ ID NO: 1959283 - DNA, 25 bp, Homo sapien
taaacatccctgttattgaagccac

SEQ ID NO: 1959284 - DNA, 25 bp, Homo sapien
tcaatagcgttggactcaggcggtc

SEQ ID NO: 1959285 - DNA, 25 bp, Homo sapien
ggctcaacttggacagaagcaccgt

SEQ ID NO: 1959286 - DNA, 25 bp, Homo sapien
gaagcaccgtctccagcaggaagta

SEQ ID NO: 1959287 - DNA, 25 bp, Homo sapien
cccagggataccatccatacttgtt

SEQ ID NO: 1959288 - DNA, 25 bp, Homo sapien
catacttgttctgttgacaggggct

SEQ ID NO: 1959289 - DNA, 25 bp, Homo sapien
agtcggtgatggctgccgttggtga

SEQ ID NO: 1959290 - DNA, 25 bp, Homo sapien
gggtgattggtatcccccagggata

SEQ ID NO: 1959291 - DNA, 25 bp, Homo sapien
gaatccttggggagccgttgctgcc

SEQ ID NO: 1959292 - DNA, 25 bp, Homo sapien
atggaatccttggggagccgttgct

SEQ ID NO: 1959293 - DNA, 25 bp, Homo sapien
ttggggagccgttgctgccagatgg

SEQ ID NO: 1959294 - DNA, 25 bp, Homo sapien
tggggagccgttgctgccagatggg

SEQ ID NO: 1959295 - DNA, 25 bp, Homo sapien
caagttgatgtacaatgatgctgtc

SEQ ID NO: 1959296 - DNA, 25 bp, Homo sapien
cctgcaagttgatgtacaatgatgc

SEQ ID NO: 1959297 - DNA, 25 bp, Homo sapien
aatgatgctgtcatgtttgtgtaca

SEQ ID NO: 1959298 - DNA, 25 bp, Homo sapien
gtacaatgatgctgtcatgtttgtg

SEQ ID NO: 1959299 - DNA, 25 bp, Homo sapien
gggtagcactgcttggactcttgcc

SEQ ID NO: 1959300 - DNA, 25 bp, Homo sapien
aaaccactggccacgatgttgctgg

SEQ ID NO: 1959301 - DNA, 25 bp, Homo sapien
gaccaagccttgatgttgccttgac

SEQ ID NO: 1959302 - DNA, 25 bp, Homo sapien
tcttgccccggctgcattgaccaag

SEQ ID NO: 1959303 - DNA, 25 bp, Homo sapien
ttcacgtgtagcctcgtccaagagc

SEQ ID NO: 1959304 - DNA, 25 bp, Homo sapien
taagggagcacgagaaagacccagt

SEQ ID NO: 1959305 - DNA, 25 bp, Homo sapien
ctaagggagcacgagaaagacccag

SEQ ID NO: 1959306 - DNA, 25 bp, Homo sapien
ttcttcacgtgtagcctcgtccaag

SEQ ID NO: 1959307 - DNA, 25 bp, Homo sapien
aacggatgacaggagcgctccagct

SEQ ID NO: 1959308 - DNA, 25 bp, Homo sapien
atgacaggagcgctccagctgcaat

SEQ ID NO: 1959309 - DNA, 25 bp, Homo sapien
agtccccagcttcgtctctctcctt

SEQ ID NO: 1959310 - DNA, 25 bp, Homo sapien
aggcaccaacggatgacaggagcgc

SEQ ID NO: 1959311 - DNA, 25 bp, Homo sapien
cagagcgtcagagaatctttgttgc

SEQ ID NO: 1959312 - DNA, 25 bp, Homo sapien
tttggcatcccgcagagcgtcagag

SEQ ID NO: 1959313 - DNA, 25 bp, Homo sapien
tgagaagtgcgtctcctgaaatgcc

SEQ ID NO: 1959314 - DNA, 25 bp, Homo sapien
gccataggtgagaagtgcgtctcct

SEQ ID NO: 1959315 - DNA, 25 bp, Homo sapien
gatcgctgcactacaggtggtgaca

SEQ ID NO: 1959316 - DNA, 25 bp, Homo sapien
tgacacactccatagagggatcgct

SEQ ID NO: 1959317 - DNA, 25 bp, Homo sapien
tgaagcacgggagctctttgcggat

SEQ ID NO: 1959318 - DNA, 25 bp, Homo sapien
tccgcatcctcggatccaggctgag

SEQ ID NO: 1959319 - DNA, 25 bp, Homo sapien
gtcaacaatacactcctcatgccgt

SEQ ID NO: 1959320 - DNA, 25 bp, Homo sapien
catgccgtatgttccttccacaagg

SEQ ID NO: 1959321 - DNA, 25 bp, Homo sapien
cttcaggaaggtcaacaatacactc

SEQ ID NO: 1959322 - DNA, 25 bp, Homo sapien
ttcttccggggccttcgcatccgag

SEQ ID NO: 1959323 - DNA, 25 bp, Homo sapien
cctgccatcgtatctggcaattcga

SEQ ID NO: 1959324 - DNA, 25 bp, Homo sapien
cctgcctgccatcgtatctggcaat

SEQ ID NO: 1959325 - DNA, 25 bp, Homo sapien
cgtatctggcaattcgagtggttgc

SEQ ID NO: 1959326 - DNA, 25 bp, Homo sapien
caattcgagtggttgcttctggcag

SEQ ID NO: 1959327 - DNA, 25 bp, Homo sapien
agaactagtgatgcagggctcagtt

SEQ ID NO: 1959328 - DNA, 25 bp, Homo sapien
tagaactagtgatgcagggctcagt

SEQ ID NO: 1959329 - DNA, 25 bp, Homo sapien
ctagaactagtgatgcagggctcag

SEQ ID NO: 1959330 - DNA, 25 bp, Homo sapien
gaactagtgatgcagggctcagttc

SEQ ID NO: 1959331 - DNA, 25 bp, Homo sapien
actgaatttgctgcagatctcatgc

SEQ ID NO: 1959332 - DNA, 25 bp, Homo sapien
aacccagaactgcactacaggcctc

SEQ ID NO: 1959333 - DNA, 25 bp, Homo sapien
gctgcagatctcatgccacatgcca

SEQ ID NO: 1959334 - DNA, 25 bp, Homo sapien
gaatttgctgcagatctcatgccac

SEQ ID NO: 1959335 - DNA, 25 bp, Homo sapien
gcttgttgacatgatccagtgttcg

SEQ ID NO: 1959336 - DNA, 25 bp, Homo sapien
ttccccggaacttgccggctgcttg

SEQ ID NO: 1959337 - DNA, 25 bp, Homo sapien
ccaagatagctgtagggacccacgt

SEQ ID NO: 1959338 - DNA, 25 bp, Homo sapien
cggtgcaggtccaagatagctgtag

SEQ ID NO: 1959339 - DNA, 25 bp, Homo sapien
tgggtacgccagacccctagtatgt

SEQ ID NO: 1959340 - DNA, 25 bp, Homo sapien
caaagattttcaaagaaggcgggtg

SEQ ID NO: 1959341 - DNA, 25 bp, Homo sapien
tatgtaggtgagcacagcacccagg

SEQ ID NO: 1959342 - DNA, 25 bp, Homo sapien
gacgtgtatttctcctagagcttca

SEQ ID NO: 1959343 - DNA, 25 bp, Homo sapien
ggcaacagagggaagctacatctca

SEQ ID NO: 1959344 - DNA, 25 bp, Homo sapien
tggaagcgatgtcaatcatgcaact

SEQ ID NO: 1959345 - DNA, 25 bp, Homo sapien
gcccatttttggtgagggtctgaca

SEQ ID NO: 1959346 - DNA, 25 bp, Homo sapien
agatttcaaacacttcggccgggcg

SEQ ID NO: 1959347 - DNA, 25 bp, Homo sapien
gattttaaacgtgctcagctctcgt

SEQ ID NO: 1959348 - DNA, 25 bp, Homo sapien
cagcatgtgactgagatgtctaacc

SEQ ID NO: 1959349 - DNA, 25 bp, Homo sapien
tgagatctcagggtgcaaggtcaca

SEQ ID NO: 1959350 - DNA, 25 bp, Homo sapien
taaccttaaccgacactatgagcta

SEQ ID NO: 1959351 - DNA, 25 bp, Homo sapien
tcatttaaacttgggtagaaatgtg

SEQ ID NO: 1959352 - DNA, 25 bp, Homo sapien
ctgtgggcatagcaggtcatttaaa

SEQ ID NO: 1959353 - DNA, 25 bp, Homo sapien
tcctctgtgcaatgtgcatgaagcc

SEQ ID NO: 1959354 - DNA, 25 bp, Homo sapien
ttcgataaccttcccgctgtgccta

SEQ ID NO: 1959355 - DNA, 25 bp, Homo sapien
agtaggaatggagccttcccagtgt

SEQ ID NO: 1959356 - DNA, 25 bp, Homo sapien
ttcccagtgttgaaataaacctgtg

SEQ ID NO: 1959357 - DNA, 25 bp, Homo sapien
ttaagtaggaatggagccttcccag

SEQ ID NO: 1959358 - DNA, 25 bp, Homo sapien
tcccagtgttgaaataaacctgtgt

SEQ ID NO: 1959359 - DNA, 25 bp, Homo sapien
ctggcgaggatacaggctcaaaggc

SEQ ID NO: 1959360 - DNA, 25 bp, Homo sapien
agctctagggctctcggatgccccg

SEQ ID NO: 1959361 - DNA, 25 bp, Homo sapien
tgttaggctgaggtcgcccagtcac

SEQ ID NO: 1959362 - DNA, 25 bp, Homo sapien
gagcgagagctccttaacgccagtt

SEQ ID NO: 1959363 - DNA, 25 bp, Homo sapien
gaagtctgaagtgagcagtcgagct

SEQ ID NO: 1959364 - DNA, 25 bp, Homo sapien
tccataagggaagtctgaagtgagc

SEQ ID NO: 1959365 - DNA, 25 bp, Homo sapien
tggcaactccttccataagggaagt

SEQ ID NO: 1959366 - DNA, 25 bp, Homo sapien
attttacttgctctatctggcaact

SEQ ID NO: 1959367 - DNA, 25 bp, Homo sapien
gatgaacaacctgaacacacagcag

SEQ ID NO: 1959368 - DNA, 25 bp, Homo sapien
tattttgtcttacatcttaattgca

SEQ ID NO: 1959369 - DNA, 25 bp, Homo sapien
cactcccaggcaccaagctctggca

SEQ ID NO: 1959370 - DNA, 25 bp, Homo sapien
gcctgtgtttttgcactttatacga

SEQ ID NO: 1959371 - DNA, 25 bp, Homo sapien
cctgtcacatgaggtgatatggttt

SEQ ID NO: 1959372 - DNA, 25 bp, Homo sapien
ctttcagtcggcgtgcacggttccc

SEQ ID NO: 1959373 - DNA, 25 bp, Homo sapien
gcacggacggactcaacggcgacca

SEQ ID NO: 1959374 - DNA, 25 bp, Homo sapien
gggactcctcgcaggtcagctgagc

SEQ ID NO: 1959375 - DNA, 25 bp, Homo sapien
cggttgcgtttccacgtgtcctgcc

SEQ ID NO: 1959376 - DNA, 25 bp, Homo sapien
cagtaatagggactgaggagccagc

SEQ ID NO: 1959377 - DNA, 25 bp, Homo sapien
aggaggcaatgggagcattcagact

SEQ ID NO: 1959378 - DNA, 25 bp, Homo sapien
tgggagcattcagactgagcagtaa

SEQ ID NO: 1959379 - DNA, 25 bp, Homo sapien
cagactgagcagtaatagggactga

SEQ ID NO: 1959380 - DNA, 25 bp, Homo sapien
caagatccccgtgaaatcctgtctc

SEQ ID NO: 1959381 - DNA, 25 bp, Homo sapien
tcctcacactggggcaactggggtg

SEQ ID NO: 1959382 - DNA, 25 bp, Homo sapien
caccttctcaagatccccgtgaaat

SEQ ID NO: 1959383 - DNA, 25 bp, Homo sapien
ctcaagatccccgtgaaatcctgtc

SEQ ID NO: 1959384 - DNA, 25 bp, Homo sapien
tgccatctgcgtcataacgggggtc

SEQ ID NO: 1959385 - DNA, 25 bp, Homo sapien
ccatctgcgtcataacgggggtcct

SEQ ID NO: 1959386 - DNA, 25 bp, Homo sapien
catctgcgtcataacgggggtcctc

SEQ ID NO: 1959387 - DNA, 25 bp, Homo sapien
tctgcgtcataacgggggtcctctt

SEQ ID NO: 1959388 - DNA, 25 bp, Homo sapien
caggacatagcttctgaccgctgac

SEQ ID NO: 1959389 - DNA, 25 bp, Homo sapien
ctcccggcaggacatagcttctgac

SEQ ID NO: 1959390 - DNA, 25 bp, Homo sapien
ggcaggacatagcttctgaccgctg

SEQ ID NO: 1959391 - DNA, 25 bp, Homo sapien
ccggcaggacatagcttctgaccgc

SEQ ID NO: 1959392 - DNA, 25 bp, Homo sapien
tcagagctttgtcccaaccgtttgc

SEQ ID NO: 1959393 - DNA, 25 bp, Homo sapien
cccagaaccagtcgcctcttgttgg

SEQ ID NO: 1959394 - DNA, 25 bp, Homo sapien
atcttcagagctttgtcccaaccgt

SEQ ID NO: 1959395 - DNA, 25 bp, Homo sapien
tttaggctggtagcaagaatcttca

SEQ ID NO: 1959396 - DNA, 25 bp, Homo sapien
gcggtagcttctccacgaagggccc

SEQ ID NO: 1959397 - DNA, 25 bp, Homo sapien
ttctctcaggctcttgccgtgcaca

SEQ ID NO: 1959398 - DNA, 25 bp, Homo sapien
tcttgccgtgcacagtgtccacgca

SEQ ID NO: 1959399 - DNA, 25 bp, Homo sapien
tagaatgaggatgctgggccttgca

SEQ ID NO: 1959400 - DNA, 25 bp, Homo sapien
ggccctcgtccaggaacaagctgtg

SEQ ID NO: 1959401 - DNA, 25 bp, Homo sapien
tgtgttgccgtggttgaaggcatca

SEQ ID NO: 1959402 - DNA, 25 bp, Homo sapien
ggcatcagatgcagttacttgctgc

SEQ ID NO: 1959403 - DNA, 25 bp, Homo sapien
gggccacatgcacgttttctcttcc

SEQ ID NO: 1959404 - DNA, 25 bp, Homo sapien
ttaaacaacaagatttagtgagaac

SEQ ID NO: 1959405 - DNA, 25 bp, Homo sapien
aacaagatttagtgagaactccatc

SEQ ID NO: 1959406 - DNA, 25 bp, Homo sapien
ggaagcagacatgtcttacctggct

SEQ ID NO: 1959407 - DNA, 25 bp, Homo sapien
gtgtatttcagatttagctttttcc

SEQ ID NO: 1959408 - DNA, 25 bp, Homo sapien
tcctggagtcttgaccgatgacagc

SEQ ID NO: 1959409 - DNA, 25 bp, Homo sapien
tatggctcagaatatcatcctggag

SEQ ID NO: 1959410 - DNA, 25 bp, Homo sapien
tccagtggtgcaatgagaatagaag

SEQ ID NO: 1959411 - DNA, 25 bp, Homo sapien
ttttagatgtaccagaatccagtgg

SEQ ID NO: 1959412 - DNA, 25 bp, Homo sapien
ctaatgttggttgggacctacaata

SEQ ID NO: 1959413 - DNA, 25 bp, Homo sapien
ggctgctcttaaacatttgtcaata

SEQ ID NO: 1959414 - DNA, 25 bp, Homo sapien
aggtattctatgaatttttggctgc

SEQ ID NO: 1959415 - DNA, 25 bp, Homo sapien
taccagttatgggagtgttcatgat

SEQ ID NO: 1959416 - DNA, 25 bp, Homo sapien
aatttcgagccttctatgtgtcctg

SEQ ID NO: 1959417 - DNA, 25 bp, Homo sapien
tgacagtcagaaaaacgagaatgat

SEQ ID NO: 1959418 - DNA, 25 bp, Homo sapien
tgtgtcctgcatcacccagtaggta

SEQ ID NO: 1959419 - DNA, 25 bp, Homo sapien
tacaaaaataacactgcagagagcc

SEQ ID NO: 1959420 - DNA, 25 bp, Homo sapien
caagtcattcttggtaacagcgtcc

SEQ ID NO: 1959421 - DNA, 25 bp, Homo sapien
tctaactgccggctttgcaaactca

SEQ ID NO: 1959422 - DNA, 25 bp, Homo sapien
taacagcgtcctcaggaatgaagct

SEQ ID NO: 1959423 - DNA, 25 bp, Homo sapien
agcaatctaactgccggctttgcaa

SEQ ID NO: 1959424 - DNA, 25 bp, Homo sapien
tatgtagctgtactggacaagtgcg

SEQ ID NO: 1959425 - DNA, 25 bp, Homo sapien
gatgacatttagacacagatgcttt

SEQ ID NO: 1959426 - DNA, 25 bp, Homo sapien
ctctgctgagaagcctccttatgta

SEQ ID NO: 1959427 - DNA, 25 bp, Homo sapien
gaaaggagactagcgatctattgaa

SEQ ID NO: 1959428 - DNA, 25 bp, Homo sapien
gaggaaatccagttggtggagagaa

SEQ ID NO: 1959429 - DNA, 25 bp, Homo sapien
aggaaatccagttggtggagagaaa

SEQ ID NO: 1959430 - DNA, 25 bp, Homo sapien
ggaaatccagttggtggagagaaaa

SEQ ID NO: 1959431 - DNA, 25 bp, Homo sapien
gaaatccagttggtggagagaaaaa

SEQ ID NO: 1959432 - DNA, 25 bp, Homo sapien
gataaacgctttttgttacaacaca

SEQ ID NO: 1959433 - DNA, 25 bp, Homo sapien
cttcgcctgactgaacccggcgtgg

SEQ ID NO: 1959434 - DNA, 25 bp, Homo sapien
caacacatcacagataacgcaactt

SEQ ID NO: 1959435 - DNA, 25 bp, Homo sapien
cacagataacgcaacttcgcctgac

SEQ ID NO: 1959436 - DNA, 25 bp, Homo sapien
tacaattcacaaagcttgctactga

SEQ ID NO: 1959437 - DNA, 25 bp, Homo sapien
tcactctgtgagaggaacaccgcac

SEQ ID NO: 1959438 - DNA, 25 bp, Homo sapien
cggcagagcgcggttcagaaaacat

SEQ ID NO: 1959439 - DNA, 25 bp, Homo sapien
tgacgatcacgtggcatctctcagg

SEQ ID NO: 1959440 - DNA, 25 bp, Homo sapien
cagtccgttctctacgtctgcgaag

SEQ ID NO: 1959441 - DNA, 25 bp, Homo sapien
cagcgcccatttggatactgcaccg

SEQ ID NO: 1959442 - DNA, 25 bp, Homo sapien
tgtcctccgcggaagaaaacagctt

SEQ ID NO: 1959443 - DNA, 25 bp, Homo sapien
gacccagcggaaaggaatcaccctg

SEQ ID NO: 1959444 - DNA, 25 bp, Homo sapien
aaaggtcggctttgaagtgacccag

SEQ ID NO: 1959445 - DNA, 25 bp, Homo sapien
cgtccacagatccatcaccacccat

SEQ ID NO: 1959446 - DNA, 25 bp, Homo sapien
ccgtccacagatccatcaccaccca

SEQ ID NO: 1959447 - DNA, 25 bp, Homo sapien
gtccacagatccatcaccacccatt

SEQ ID NO: 1959448 - DNA, 25 bp, Homo sapien
accgaacgcagcaccgcccatcgga

SEQ ID NO: 1959449 - DNA, 25 bp, Homo sapien
ccggaccgaacgcagcaccgcccat

SEQ ID NO: 1959450 - DNA, 25 bp, Homo sapien
gcccatcggacccagcagcgcccat

SEQ ID NO: 1959451 - DNA, 25 bp, Homo sapien
ccgcccgtccggaccgaacgcagca

SEQ ID NO: 1959452 - DNA, 25 bp, Homo sapien
aacctagcaccgctggtcgggaagg

SEQ ID NO: 1959453 - DNA, 25 bp, Homo sapien
catttagatccagcagcgcgcgtcc

SEQ ID NO: 1959454 - DNA, 25 bp, Homo sapien
tccggactctgcaccgcgcgtccgg

SEQ ID NO: 1959455 - DNA, 25 bp, Homo sapien
ttgggacccaccaccgccagtccag

SEQ ID NO: 1959456 - DNA, 25 bp, Homo sapien
agcggcggaagctggccgacatcat

SEQ ID NO: 1959457 - DNA, 25 bp, Homo sapien
ggctggacctgttcgagatcagcca

SEQ ID NO: 1959458 - DNA, 25 bp, Homo sapien
atccaccactggaacgccaaccggc

SEQ ID NO: 1959459 - DNA, 25 bp, Homo sapien
aggagcggcggaagctggccgacat

SEQ ID NO: 1959460 - DNA, 25 bp, Homo sapien
gctgtgtaaagacgtctttttctcc

SEQ ID NO: 1959461 - DNA, 25 bp, Homo sapien
ccatcggctgtgtaaagacgtcttt

SEQ ID NO: 1959462 - DNA, 25 bp, Homo sapien
ttagccaaccatcggctgtgtaaag

SEQ ID NO: 1959463 - DNA, 25 bp, Homo sapien
ctttttctcctactatgtttagttg

SEQ ID NO: 1959464 - DNA, 25 bp, Homo sapien
tgtggagatcgttgtgcctgctcat

SEQ ID NO: 1959465 - DNA, 25 bp, Homo sapien
tgcgcttgtggagatcgttgtgcct

SEQ ID NO: 1959466 - DNA, 25 bp, Homo sapien
gatgcctttttgacagcattggctg

SEQ ID NO: 1959467 - DNA, 25 bp, Homo sapien
cattggctgtgacgctgcgcttgtg

SEQ ID NO: 1959468 - DNA, 25 bp, Homo sapien
gatatgcgaatgctgtcctctccca

SEQ ID NO: 1959469 - DNA, 25 bp, Homo sapien
caagatgtaatcgaaacgctcgcgg

SEQ ID NO: 1959470 - DNA, 25 bp, Homo sapien
catgtcagcggaggtcagtgtatac

SEQ ID NO: 1959471 - DNA, 25 bp, Homo sapien
tgtattcgggtctctagtactgcca

SEQ ID NO: 1959472 - DNA, 25 bp, Homo sapien
caaacgattgtgacagattctggct

SEQ ID NO: 1959473 - DNA, 25 bp, Homo sapien
gattctggctagataactcacatac

SEQ ID NO: 1959474 - DNA, 25 bp, Homo sapien
aatcctactgatggttataaacgag

SEQ ID NO: 1959475 - DNA, 25 bp, Homo sapien
ggcctcccggtgatacactgactca

SEQ ID NO: 1959476 - DNA, 25 bp, Homo sapien
gggctcctgtttcatacgtcattgc

SEQ ID NO: 1959477 - DNA, 25 bp, Homo sapien
aaaatgcctgctgtgtagaagactc

SEQ ID NO: 1959478 - DNA, 25 bp, Homo sapien
tataaatctgtcttatgggccggat

SEQ ID NO: 1959479 - DNA, 25 bp, Homo sapien
tagtattgccatccattgaccagca

SEQ ID NO: 1959480 - DNA, 25 bp, Homo sapien
acaagtaccttctaggtagattcac

SEQ ID NO: 1959481 - DNA, 25 bp, Homo sapien
gattcactcattcctcgtcttttta

SEQ ID NO: 1959482 - DNA, 25 bp, Homo sapien
tattgactttactaactgctgtctg

SEQ ID NO: 1959483 - DNA, 25 bp, Homo sapien
tgtctgttaagtcccaaataacagc

SEQ ID NO: 1959484 - DNA, 25 bp, Homo sapien
tacaaagcgaatagcagtcagcgtg

SEQ ID NO: 1959485 - DNA, 25 bp, Homo sapien
tcatgaagttgttgtggtcccggaa

SEQ ID NO: 1959486 - DNA, 25 bp, Homo sapien
gatcccggtcttgaaaaaccagctg

SEQ ID NO: 1959487 - DNA, 25 bp, Homo sapien
cagcgcagaatgtggtgatcccggt

SEQ ID NO: 1959488 - DNA, 25 bp, Homo sapien
tgtggggtagcccagaggttcacac

SEQ ID NO: 1959489 - DNA, 25 bp, Homo sapien
ctggatgtagaatattggctgtggg

SEQ ID NO: 1959490 - DNA, 25 bp, Homo sapien
tggctgtggggtagcccagaggttc

SEQ ID NO: 1959491 - DNA, 25 bp, Homo sapien
ggtagcccagaggttcacactgccc

SEQ ID NO: 1959492 - DNA, 25 bp, Homo sapien
tgtttgaagcctaggctccgcctga

SEQ ID NO: 1959493 - DNA, 25 bp, Homo sapien
tatgctgtttatcacgttgtactcc

SEQ ID NO: 1959494 - DNA, 25 bp, Homo sapien
gggagactacctacacttctataag

SEQ ID NO: 1959495 - DNA, 25 bp, Homo sapien
tctcatcggatgtacaaagcaactt

SEQ ID NO: 1959496 - DNA, 25 bp, Homo sapien
aagatcagtcatgaggagagcttcc

SEQ ID NO: 1959497 - DNA, 25 bp, Homo sapien
gctgtgaatttttacagcagctggc

SEQ ID NO: 1959498 - DNA, 25 bp, Homo sapien
cagctggcagttacaagagtctggt

SEQ ID NO: 1959499 - DNA, 25 bp, Homo sapien
tagggagtgcagtcaaaatatcagt

SEQ ID NO: 1959500 - DNA, 25 bp, Homo sapien
gctgctcagaacgatgacgctgggc

SEQ ID NO: 1959501 - DNA, 25 bp, Homo sapien
cccgaccaaagagtgaaggctttga

SEQ ID NO: 1959502 - DNA, 25 bp, Homo sapien
gacgctgggcgattaaaagttcaga

SEQ ID NO: 1959503 - DNA, 25 bp, Homo sapien
agatcgtcgtggctcaggtaaaccc

SEQ ID NO: 1959504 - DNA, 25 bp, Homo sapien
agcgtgttacacgttcccaagaaga

SEQ ID NO: 1959505 - DNA, 25 bp, Homo sapien
cattagccaatgagccttgtagggc

SEQ ID NO: 1959506 - DNA, 25 bp, Homo sapien
tagaggcagctatggaccgaaagtc

SEQ ID NO: 1959507 - DNA, 25 bp, Homo sapien
acttgagcggcatcgaatagaggca

SEQ ID NO: 1959508 - DNA, 25 bp, Homo sapien
gaaacagtcattcgggagctgcagc

SEQ ID NO: 1959509 - DNA, 25 bp, Homo sapien
cacgatcgagcgcagagacttgcag

SEQ ID NO: 1959510 - DNA, 25 bp, Homo sapien
tccaggagtcgaagcagaaggacga

SEQ ID NO: 1959511 - DNA, 25 bp, Homo sapien
aagttgggccagatgcgcactcagt

SEQ ID NO: 1959512 - DNA, 25 bp, Homo sapien
ccatgattaatggaggaataactgg

SEQ ID NO: 1959513 - DNA, 25 bp, Homo sapien
tgcattttatgtcttgtgctggtgg

SEQ ID NO: 1959514 - DNA, 25 bp, Homo sapien
aatgtgtgcattttatgtcttgtgc

SEQ ID NO: 1959515 - DNA, 25 bp, Homo sapien
gataaattccatcttatagccatga

SEQ ID NO: 1959516 - DNA, 25 bp, Homo sapien
tgcagagcgcattccgaccttgtgt

SEQ ID NO: 1959517 - DNA, 25 bp, Homo sapien
catgaagtacctcacaggaccaggt

SEQ ID NO: 1959518 - DNA, 25 bp, Homo sapien
tgtacagagccgtctgcaccgtgtg

SEQ ID NO: 1959519 - DNA, 25 bp, Homo sapien
ggaccaggtcatagccgacatctga

SEQ ID NO: 1959520 - DNA, 25 bp, Homo sapien
tctacccgggaaggaacatatgacg

SEQ ID NO: 1959521 - DNA, 25 bp, Homo sapien
gatgacgcacgtccgagactgttcc

SEQ ID NO: 1959522 - DNA, 25 bp, Homo sapien
tcatcatcgaccgaggagcacaaag

SEQ ID NO: 1959523 - DNA, 25 bp, Homo sapien
taatacttcgctccaaggcgtctgt

SEQ ID NO: 1959524 - DNA, 25 bp, Homo sapien
gcagccttatggtgactaaatccac

SEQ ID NO: 1959525 - DNA, 25 bp, Homo sapien
gaaacccatacacaagtggatttgg

SEQ ID NO: 1959526 - DNA, 25 bp, Homo sapien
tagaaaaatacacaggagaacatgc

SEQ ID NO: 1959527 - DNA, 25 bp, Homo sapien
cacactttcaaagagaggtataggg

SEQ ID NO: 1959528 - DNA, 25 bp, Homo sapien
caagacgcaagcaccttccggaggg

SEQ ID NO: 1959529 - DNA, 25 bp, Homo sapien
catgggccgccctgaatattctttg

SEQ ID NO: 1959530 - DNA, 25 bp, Homo sapien
ttcagaagaggagcaagacgcaagc

SEQ ID NO: 1959531 - DNA, 25 bp, Homo sapien
ggaatttgtctcagcctcatattct

SEQ ID NO: 1959532 - DNA, 25 bp, Homo sapien
tgctagtgctggaccgtgagtgacc

SEQ ID NO: 1959533 - DNA, 25 bp, Homo sapien
taaaatgcattcagattctctacat

SEQ ID NO: 1959534 - DNA, 25 bp, Homo sapien
tgcagcgccttcaaaatccaggccg

SEQ ID NO: 1959535 - DNA, 25 bp, Homo sapien
gcatttccccgactgctgcgtgcta

SEQ ID NO: 1959536 - DNA, 25 bp, Homo sapien
cagtgtgttgggaggagaagacagt

SEQ ID NO: 1959537 - DNA, 25 bp, Homo sapien
acagtgggggtcattccccctgcag

SEQ ID NO: 1959538 - DNA, 25 bp, Homo sapien
cagtgggggtcattccccctgcagt

SEQ ID NO: 1959539 - DNA, 25 bp, Homo sapien
agtgtgttgggaggagaagacagtg

SEQ ID NO: 1959540 - DNA, 25 bp, Homo sapien
caggactgtgctcgcccctcccctt

SEQ ID NO: 1959541 - DNA, 25 bp, Homo sapien
ggcaggactgtgctcgcccctcccc

SEQ ID NO: 1959542 - DNA, 25 bp, Homo sapien
gaggcaggactgtgctcgcccctcc

SEQ ID NO: 1959543 - DNA, 25 bp, Homo sapien
aggcaggactgtgctcgcccctccc

SEQ ID NO: 1959544 - DNA, 25 bp, Homo sapien
tgcgggagaacctggcgggtccgtg

SEQ ID NO: 1959545 - DNA, 25 bp, Homo sapien
caagttgcgggagaacctggcgggt

SEQ ID NO: 1959546 - DNA, 25 bp, Homo sapien
caggagctccgcaagttgcgggaga

SEQ ID NO: 1959547 - DNA, 25 bp, Homo sapien
gatgaaacgttcctcgacgcttgaa

SEQ ID NO: 1959548 - DNA, 25 bp, Homo sapien
attcagaagggatgaaacgttcctc

SEQ ID NO: 1959549 - DNA, 25 bp, Homo sapien
gaagggatgaaacgttcctcgacgc

SEQ ID NO: 1959550 - DNA, 25 bp, Homo sapien
aacgttcctcgacgcttgaacaccg

SEQ ID NO: 1959551 - DNA, 25 bp, Homo sapien
gtgtttataattcagccgtcgccta

SEQ ID NO: 1959552 - DNA, 25 bp, Homo sapien
tgtttataattcagccgtcgcctaa

SEQ ID NO: 1959553 - DNA, 25 bp, Homo sapien
gtttataattcagccgtcgcctaac

SEQ ID NO: 1959554 - DNA, 25 bp, Homo sapien
ccgtgtttataattcagccgtcgcc

SEQ ID NO: 1959555 - DNA, 25 bp, Homo sapien
gggagtccttctccggctggaggct

SEQ ID NO: 1959556 - DNA, 25 bp, Homo sapien
gagggcaggagctctcggtgagagg

SEQ ID NO: 1959557 - DNA, 25 bp, Homo sapien
gcgcgtgcccgctgagctgagctct

SEQ ID NO: 1959558 - DNA, 25 bp, Homo sapien
aaggatttctgcgtcgtgcgcgtgc

SEQ ID NO: 1959559 - DNA, 25 bp, Homo sapien
cacggagccaccgtcggagggcctg

SEQ ID NO: 1959560 - DNA, 25 bp, Homo sapien
gagggcacggagccaccgtcggagg

SEQ ID NO: 1959561 - DNA, 25 bp, Homo sapien
agggcacggagccaccgtcggaggg

SEQ ID NO: 1959562 - DNA, 25 bp, Homo sapien
ggcacggagccaccgtcggagggcc

SEQ ID NO: 1959563 - DNA, 25 bp, Homo sapien
gacgcagttccgtaaaaagaggcaa

SEQ ID NO: 1959564 - DNA, 25 bp, Homo sapien
caggagggacagatgccagcatttc

SEQ ID NO: 1959565 - DNA, 25 bp, Homo sapien
agccagtccctactcatcggatggg

SEQ ID NO: 1959566 - DNA, 25 bp, Homo sapien
taaattcctggtgagcatgacggac

SEQ ID NO: 1959567 - DNA, 25 bp, Homo sapien
aacttctgtaagtgagccgaggcac

SEQ ID NO: 1959568 - DNA, 25 bp, Homo sapien
acaatagacggaaacacggctcgcg

SEQ ID NO: 1959569 - DNA, 25 bp, Homo sapien
gaagaggactttccacgcaggacat

SEQ ID NO: 1959570 - DNA, 25 bp, Homo sapien
tgaaaacagtcctggcgggcatcga

SEQ ID NO: 1959571 - DNA, 25 bp, Homo sapien
ttctcgggcgctcttaagagattat

SEQ ID NO: 1959572 - DNA, 25 bp, Homo sapien
gatatacaggcgtttcattcttctt

SEQ ID NO: 1959573 - DNA, 25 bp, Homo sapien
ttaaccaggatatacaggcgtttca

SEQ ID NO: 1959574 - DNA, 25 bp, Homo sapien
tctcgggcgctcttaagagattatc

SEQ ID NO: 1959575 - DNA, 25 bp, Homo sapien
tagtgaccgcggtgcaaagaacaca

SEQ ID NO: 1959576 - DNA, 25 bp, Homo sapien
ccacgttgggcgttctgtgtcagag

SEQ ID NO: 1959577 - DNA, 25 bp, Homo sapien
gggccagtccacactcgagagaaat

SEQ ID NO: 1959578 - DNA, 25 bp, Homo sapien
gtaggagggcacctttcaccgaagc

SEQ ID NO: 1959579 - DNA, 25 bp, Homo sapien
tcatttctaagaatgccacagcatt

SEQ ID NO: 1959580 - DNA, 25 bp, Homo sapien
tcgtccaaattgcactagccggcca

SEQ ID NO: 1959581 - DNA, 25 bp, Homo sapien
ctttggttctgcagttttaaactca

SEQ ID NO: 1959582 - DNA, 25 bp, Homo sapien
ttcagctactgtgcttgaagcctgt

SEQ ID NO: 1959583 - DNA, 25 bp, Homo sapien
ggccggacacactcaaggctcagat

SEQ ID NO: 1959584 - DNA, 25 bp, Homo sapien
ggctcagatgaccaagtgactggga

SEQ ID NO: 1959585 - DNA, 25 bp, Homo sapien
cattcagtctggacccggtaacggg

SEQ ID NO: 1959586 - DNA, 25 bp, Homo sapien
cagccgtgctgacaagagggatagt

SEQ ID NO: 1959587 - DNA, 25 bp, Homo sapien
gggtccctggctatcatgacgcgta

SEQ ID NO: 1959588 - DNA, 25 bp, Homo sapien
gtacagccgcgaggcgtcctctgca

SEQ ID NO: 1959589 - DNA, 25 bp, Homo sapien
ctttggctaagtgacatgtggaggg

SEQ ID NO: 1959590 - DNA, 25 bp, Homo sapien
gcctcatgagagctgcatctgcgct

SEQ ID NO: 1959591 - DNA, 25 bp, Homo sapien
ttggggtgtccacgctcgtccaagg

SEQ ID NO: 1959592 - DNA, 25 bp, Homo sapien
ccactcatcgccacatcacctggca

SEQ ID NO: 1959593 - DNA, 25 bp, Homo sapien
cacgcgatgcccactcatcgccaca

SEQ ID NO: 1959594 - DNA, 25 bp, Homo sapien
ggattggggtgtccacgctcgtcca

SEQ ID NO: 1959595 - DNA, 25 bp, Homo sapien
caagggctcccaggtgctttaggag

SEQ ID NO: 1959596 - DNA, 25 bp, Homo sapien
ggctcccaggtgctttaggagcaga

SEQ ID NO: 1959597 - DNA, 25 bp, Homo sapien
gctcccaggtgctttaggagcagag

SEQ ID NO: 1959598 - DNA, 25 bp, Homo sapien
agggctcccaggtgctttaggagca

SEQ ID NO: 1959599 - DNA, 25 bp, Homo sapien
gcattcacgggctgatggcatttga

SEQ ID NO: 1959600 - DNA, 25 bp, Homo sapien
gatggagcagcattcacgggctgat

SEQ ID NO: 1959601 - DNA, 25 bp, Homo sapien
cagacgatggagcagcattcacggg

SEQ ID NO: 1959602 - DNA, 25 bp, Homo sapien
agcattcacgggctgatggcatttg

SEQ ID NO: 1959603 - DNA, 25 bp, Homo sapien
tgggtccaaagcagtgaggagcaca

SEQ ID NO: 1959604 - DNA, 25 bp, Homo sapien
acagcgcagcctgggtccaaagcag

SEQ ID NO: 1959605 - DNA, 25 bp, Homo sapien
tggtcgtggtggagacagcgcagcc

SEQ ID NO: 1959606 - DNA, 25 bp, Homo sapien
gctctgtgagtccttggtcgtggtg

SEQ ID NO: 1959607 - DNA, 25 bp, Homo sapien
tgggccccatggatgtcctctccgg

SEQ ID NO: 1959608 - DNA, 25 bp, Homo sapien
tgtcctctccggtaaaatgcctccg

SEQ ID NO: 1959609 - DNA, 25 bp, Homo sapien
ctttgtcctttcagcatgccagtca

SEQ ID NO: 1959610 - DNA, 25 bp, Homo sapien
agaaaggaatttgacctgctgggcc

SEQ ID NO: 1959611 - DNA, 25 bp, Homo sapien
gccttgcaggacgtcagtgcgcgtc

SEQ ID NO: 1959612 - DNA, 25 bp, Homo sapien
gcaggacgtcagtgcgcgtcaccag

SEQ ID NO: 1959613 - DNA, 25 bp, Homo sapien
agcgggccttgcaggacgtcagtgc

SEQ ID NO: 1959614 - DNA, 25 bp, Homo sapien
ctggagcgggccttgcaggacgtca

SEQ ID NO: 1959615 - DNA, 25 bp, Homo sapien
aggaaggtcccgcacaacagcctgg

SEQ ID NO: 1959616 - DNA, 25 bp, Homo sapien
cagagaaggaaggtcccgcacaaca

SEQ ID NO: 1959617 - DNA, 25 bp, Homo sapien
gaaggtcccgcacaacagcctggtg

SEQ ID NO: 1959618 - DNA, 25 bp, Homo sapien
gagaaggaaggtcccgcacaacagc

SEQ ID NO: 1959619 - DNA, 25 bp, Homo sapien
ctcctcgccggagggacagcgggag

SEQ ID NO: 1959620 - DNA, 25 bp, Homo sapien
gaggcccacgcagaacgtgcagaag

SEQ ID NO: 1959621 - DNA, 25 bp, Homo sapien
agaagcctcctcgccggagggacag

SEQ ID NO: 1959622 - DNA, 25 bp, Homo sapien
cacgcagaacgtgcagaagcctcct

SEQ ID NO: 1959623 - DNA, 25 bp, Homo sapien
tcactctggctgctcggtcgggagg

SEQ ID NO: 1959624 - DNA, 25 bp, Homo sapien
ctcttcacccaggaggcgatggcag

SEQ ID NO: 1959625 - DNA, 25 bp, Homo sapien
ggcgccgcaggctgatttaggcttt

SEQ ID NO: 1959626 - DNA, 25 bp, Homo sapien
ggtggcctgggccacattggtggcg

SEQ ID NO: 1959627 - DNA, 25 bp, Homo sapien
tgcccgaggcccacgaagccagtgt

SEQ ID NO: 1959628 - DNA, 25 bp, Homo sapien
ctgcccgaggcccacgaagccagtg

SEQ ID NO: 1959629 - DNA, 25 bp, Homo sapien
agccagtgttcctgcgaagcttctc

SEQ ID NO: 1959630 - DNA, 25 bp, Homo sapien
cagcaggcactcgctgtcctcatca

SEQ ID NO: 1959631 - DNA, 25 bp, Homo sapien
acagcaggcactcgctgtcctcatc

SEQ ID NO: 1959632 - DNA, 25 bp, Homo sapien
tagaataccagctttctcccggcag

SEQ ID NO: 1959633 - DNA, 25 bp, Homo sapien
cctacaggtagagacgacatgactg

SEQ ID NO: 1959634 - DNA, 25 bp, Homo sapien
tcccaggttgggagtacatgtccgc

SEQ ID NO: 1959635 - DNA, 25 bp, Homo sapien
ccagcagaccgagccaagtgtgtgt

SEQ ID NO: 1959636 - DNA, 25 bp, Homo sapien
tggacctgccagcttgaccgctgac

SEQ ID NO: 1959637 - DNA, 25 bp, Homo sapien
agcagcaatgcaggttccggggccc

SEQ ID NO: 1959638 - DNA, 25 bp, Homo sapien
cccagccgggctcatgcgaggctgt

SEQ ID NO: 1959639 - DNA, 25 bp, Homo sapien
aagctctctgggtcgttcttgcgag

SEQ ID NO: 1959640 - DNA, 25 bp, Homo sapien
gattagagtctttggagcagcccta

SEQ ID NO: 1959641 - DNA, 25 bp, Homo sapien
cctcttgggcaagtctcagggcagc

SEQ ID NO: 1959642 - DNA, 25 bp, Homo sapien
tacccggtagttaacaggcatctgg

SEQ ID NO: 1959643 - DNA, 25 bp, Homo sapien
ggcagcgggcctctaattgtcctct

SEQ ID NO: 1959644 - DNA, 25 bp, Homo sapien
accagccccccaggcaggctggtcc

SEQ ID NO: 1959645 - DNA, 25 bp, Homo sapien
cagccccccaggcaggctggtcctg

SEQ ID NO: 1959646 - DNA, 25 bp, Homo sapien
cccaggcaggctggtcctggttcaa

SEQ ID NO: 1959647 - DNA, 25 bp, Homo sapien
cccccaggcaggctggtcctggttc

SEQ ID NO: 1959648 - DNA, 25 bp, Homo sapien
ggcccagcgcttgcaaacaggagtt

SEQ ID NO: 1959649 - DNA, 25 bp, Homo sapien
gatgactgtgaactccggcttggga

SEQ ID NO: 1959650 - DNA, 25 bp, Homo sapien
ggaagggaaagcacagccattgact

SEQ ID NO: 1959651 - DNA, 25 bp, Homo sapien
aagagctcccgggtgtatggcagac

SEQ ID NO: 1959652 - DNA, 25 bp, Homo sapien
tggtgcagctgcatgtcgtccaggc

SEQ ID NO: 1959653 - DNA, 25 bp, Homo sapien
actcctgtggtggagcctctccgaa

SEQ ID NO: 1959654 - DNA, 25 bp, Homo sapien
actgaccccggctgtcatttcctgg

SEQ ID NO: 1959655 - DNA, 25 bp, Homo sapien
agacagttgctggacctcttgctgg

SEQ ID NO: 1959656 - DNA, 25 bp, Homo sapien
ggccatgggatgaggcctgctgccc

SEQ ID NO: 1959657 - DNA, 25 bp, Homo sapien
gaggccatgggatgaggcctgctgc

SEQ ID NO: 1959658 - DNA, 25 bp, Homo sapien
aggccatgggatgaggcctgctgcc

SEQ ID NO: 1959659 - DNA, 25 bp, Homo sapien
gaagcacctcagtggtcaagaacgg

SEQ ID NO: 1959660 - DNA, 25 bp, Homo sapien
tgtgggccttgaacactagctctgg

SEQ ID NO: 1959661 - DNA, 25 bp, Homo sapien
caagaacggcctcctattttatacg

SEQ ID NO: 1959662 - DNA, 25 bp, Homo sapien
aactcagtggacctggactcttagc

SEQ ID NO: 1959663 - DNA, 25 bp, Homo sapien
ctgacttgcccgctgcgtctctggg

SEQ ID NO: 1959664 - DNA, 25 bp, Homo sapien
ggatgtcagtcgagggaccctctga

SEQ ID NO: 1959665 - DNA, 25 bp, Homo sapien
tctgataggcctaggaaggtcccca

SEQ ID NO: 1959666 - DNA, 25 bp, Homo sapien
tcgagggaccctctgataggcctag

SEQ ID NO: 1959667 - DNA, 25 bp, Homo sapien
ctggtgcacggcctcggcgctctgg

SEQ ID NO: 1959668 - DNA, 25 bp, Homo sapien
tgggtgcagggctcctgacgagtgg

SEQ ID NO: 1959669 - DNA, 25 bp, Homo sapien
gacctgggtgcagggctcctgacga

SEQ ID NO: 1959670 - DNA, 25 bp, Homo sapien
tggcctctggtcctgacctgggtgc

SEQ ID NO: 1959671 - DNA, 25 bp, Homo sapien
ttcagggcctcatacacagggactg

SEQ ID NO: 1959672 - DNA, 25 bp, Homo sapien
tgggctggacgcatccctcaggaca

SEQ ID NO: 1959673 - DNA, 25 bp, Homo sapien
agggactgggctggacgcatccctc

SEQ ID NO: 1959674 - DNA, 25 bp, Homo sapien
agcagagctcacgtcccctttctgg

SEQ ID NO: 1959675 - DNA, 25 bp, Homo sapien
cagggctttgctgcctcggtgtcca

SEQ ID NO: 1959676 - DNA, 25 bp, Homo sapien
gtccagggtcagccaagctggggct

SEQ ID NO: 1959677 - DNA, 25 bp, Homo sapien
tgtccctgaggcctgggcatctccc

SEQ ID NO: 1959678 - DNA, 25 bp, Homo sapien
gcctgggcatctccctcgggcccac

SEQ ID NO: 1959679 - DNA, 25 bp, Homo sapien
aggcctgggcatctccctcgggccc

SEQ ID NO: 1959680 - DNA, 25 bp, Homo sapien
tgaggcctgggcatctccctcgggc

SEQ ID NO: 1959681 - DNA, 25 bp, Homo sapien
aagggcacgtccacagacatctctc

SEQ ID NO: 1959682 - DNA, 25 bp, Homo sapien
gatgcctgacgtgtaggaactgccg

SEQ ID NO: 1959683 - DNA, 25 bp, Homo sapien
tggaggacggctccttctcatggag

SEQ ID NO: 1959684 - DNA, 25 bp, Homo sapien
tcatcgctgatataggactcccggt

SEQ ID NO: 1959685 - DNA, 25 bp, Homo sapien
ccgtgtagtaaaccagcttctgtgc

SEQ ID NO: 1959686 - DNA, 25 bp, Homo sapien
ccgctgccgcagctgttgcagagtg

SEQ ID NO: 1959687 - DNA, 25 bp, Homo sapien
caggtgcctggaccgccaggtgcac

SEQ ID NO: 1959688 - DNA, 25 bp, Homo sapien
gggccgcacgcggaggtggagctgg

SEQ ID NO: 1959689 - DNA, 25 bp, Homo sapien
gaagacctcggtctggctgtccaga

SEQ ID NO: 1959690 - DNA, 25 bp, Homo sapien
tggctagaaagtgcccgcagcagtg

SEQ ID NO: 1959691 - DNA, 25 bp, Homo sapien
tccgcccttgcttgagaggacacag

SEQ ID NO: 1959692 - DNA, 25 bp, Homo sapien
cagaggccacacaggtgcgtttcta

SEQ ID NO: 1959693 - DNA, 25 bp, Homo sapien
agaaaatgccccgaggatgaagctg

SEQ ID NO: 1959694 - DNA, 25 bp, Homo sapien
tcttcgggtgcagaattgtccagaa

SEQ ID NO: 1959695 - DNA, 25 bp, Homo sapien
tgccccgaggatgaagctgcatctg

SEQ ID NO: 1959696 - DNA, 25 bp, Homo sapien
ctcttcgggtgcagaattgtccaga

SEQ ID NO: 1959697 - DNA, 25 bp, Homo sapien
atgccagcttcccaacgtggggcca

SEQ ID NO: 1959698 - DNA, 25 bp, Homo sapien
agcagctgcggagcacggtccacct

SEQ ID NO: 1959699 - DNA, 25 bp, Homo sapien
ccagcttcccaacgtggggccaggg

SEQ ID NO: 1959700 - DNA, 25 bp, Homo sapien
gggccaggggaggtcgtacagcagc

SEQ ID NO: 1959701 - DNA, 25 bp, Homo sapien
gcagaggcagggcgcgtccaggcag

SEQ ID NO: 1959702 - DNA, 25 bp, Homo sapien
cagcgcccatgaccgctgcagggat

SEQ ID NO: 1959703 - DNA, 25 bp, Homo sapien
gaggcagggcgcgtccaggcagggc

SEQ ID NO: 1959704 - DNA, 25 bp, Homo sapien
cagccagcgcccatgaccgctgcag

SEQ ID NO: 1959705 - DNA, 25 bp, Homo sapien
gccagtcccaggatcacggtgggac

SEQ ID NO: 1959706 - DNA, 25 bp, Homo sapien
ctggtagatgtgcactcccctgagg

SEQ ID NO: 1959707 - DNA, 25 bp, Homo sapien
tagatgtgcactcccctgagggcca

SEQ ID NO: 1959708 - DNA, 25 bp, Homo sapien
atcacggtgggacgaccttccttct

SEQ ID NO: 1959709 - DNA, 25 bp, Homo sapien
ctagaggacacaggtcagaggtcaa

SEQ ID NO: 1959710 - DNA, 25 bp, Homo sapien
tgaagaagtgcacgggcacgtcctc

SEQ ID NO: 1959711 - DNA, 25 bp, Homo sapien
ctccagccggcaggcctcctggatg

SEQ ID NO: 1959712 - DNA, 25 bp, Homo sapien
cttgtgcagcctgaagaagtgcacg

SEQ ID NO: 1959713 - DNA, 25 bp, Homo sapien
tgcagcctgaagaagtgcacgggca

SEQ ID NO: 1959714 - DNA, 25 bp, Homo sapien
gaggatgtagtcaatccccctcttg

SEQ ID NO: 1959715 - DNA, 25 bp, Homo sapien
gccggaggatgtagtcaatccccct

SEQ ID NO: 1959716 - DNA, 25 bp, Homo sapien
cggaggatgtagtcaatccccctct

SEQ ID NO: 1959717 - DNA, 25 bp, Homo sapien
gtgccggaggatgtagtcaatcccc

SEQ ID NO: 1959718 - DNA, 25 bp, Homo sapien
actgtgggaagtaggagtgtggctc

SEQ ID NO: 1959719 - DNA, 25 bp, Homo sapien
tgtgggaagtaggagtgtggctcga

SEQ ID NO: 1959720 - DNA, 25 bp, Homo sapien
tgggaagtaggagtgtggctcgaag

SEQ ID NO: 1959721 - DNA, 25 bp, Homo sapien
gaagtaggagtgtggctcgaagtac

SEQ ID NO: 1959722 - DNA, 25 bp, Homo sapien
gtgagcgcactgtgacctcagcacg

SEQ ID NO: 1959723 - DNA, 25 bp, Homo sapien
caggtcagcctgcagcgcgcaggca

SEQ ID NO: 1959724 - DNA, 25 bp, Homo sapien
cttcaagtggcagtagtacaggtgc

SEQ ID NO: 1959725 - DNA, 25 bp, Homo sapien
agcacgcgctccttcaagtggcagt

SEQ ID NO: 1959726 - DNA, 25 bp, Homo sapien
tgagcccctggtacctagttcctgt

SEQ ID NO: 1959727 - DNA, 25 bp, Homo sapien
ggtattcattaatcacaggccaggt

SEQ ID NO: 1959728 - DNA, 25 bp, Homo sapien
gaactggccccatagcaccaggtag

SEQ ID NO: 1959729 - DNA, 25 bp, Homo sapien
aggctcgcccaagatgcaggtgcaa

SEQ ID NO: 1959730 - DNA, 25 bp, Homo sapien
agtaagtctcaggatcctcctgagg

SEQ ID NO: 1959731 - DNA, 25 bp, Homo sapien
tgagggacgtctttgttaccctaga

SEQ ID NO: 1959732 - DNA, 25 bp, Homo sapien
ttgttaccctagaagctctaaggca

SEQ ID NO: 1959733 - DNA, 25 bp, Homo sapien
caggatcctcctgagggacgtcttt

SEQ ID NO: 1959734 - DNA, 25 bp, Homo sapien
gggaaagcttcccactagacacctg

SEQ ID NO: 1959735 - DNA, 25 bp, Homo sapien
ggatggtatacccaccctagagagt

SEQ ID NO: 1959736 - DNA, 25 bp, Homo sapien
ccccgttggtttagagtgcagccca

SEQ ID NO: 1959737 - DNA, 25 bp, Homo sapien
cctagagagtacgagtcctggcatt

SEQ ID NO: 1959738 - DNA, 25 bp, Homo sapien
ttgagaccagcttgaccaacacaga

SEQ ID NO: 1959739 - DNA, 25 bp, Homo sapien
tgagaccagcttgaccaacacagag

SEQ ID NO: 1959740 - DNA, 25 bp, Homo sapien
gcttgaccaacacagagaaaccccg

SEQ ID NO: 1959741 - DNA, 25 bp, Homo sapien
agtttgagaccagcttgaccaacac

SEQ ID NO: 1959742 - DNA, 25 bp, Homo sapien
ggaaacaccccttacagtccgcatg

SEQ ID NO: 1959743 - DNA, 25 bp, Homo sapien
gacacagtctgtatacctttcgatt

SEQ ID NO: 1959744 - DNA, 25 bp, Homo sapien
gggacttccacgtcatgcggcagat

SEQ ID NO: 1959745 - DNA, 25 bp, Homo sapien
caaatgtaatgtgtggccttcaggg

SEQ ID NO: 1959746 - DNA, 25 bp, Homo sapien
ttccgttttccacgtagtgctgcac

SEQ ID NO: 1959747 - DNA, 25 bp, Homo sapien
cccttccgttttccacgtagtgctg

SEQ ID NO: 1959748 - DNA, 25 bp, Homo sapien
cacgtagtgctgcactcggaggaag

SEQ ID NO: 1959749 - DNA, 25 bp, Homo sapien
ttccacgtagtgctgcactcggagg

SEQ ID NO: 1959750 - DNA, 25 bp, Homo sapien
tctacccggagaaccctgagtggga

SEQ ID NO: 1959751 - DNA, 25 bp, Homo sapien
gacgtggtctacagcgttcaagaac

SEQ ID NO: 1959752 - DNA, 25 bp, Homo sapien
tcaagaacatctgcaaaggcgggct

SEQ ID NO: 1959753 - DNA, 25 bp, Homo sapien
tcagcttaaagtcgaagctcaggtg

SEQ ID NO: 1959754 - DNA, 25 bp, Homo sapien
tcttttgagaagtacttgctgagct

SEQ ID NO: 1959755 - DNA, 25 bp, Homo sapien
tgagaagtacttgctgagcttttgc

SEQ ID NO: 1959756 - DNA, 25 bp, Homo sapien
tttcttccaatcttttgagaagtac

SEQ ID NO: 1959757 - DNA, 25 bp, Homo sapien
tgagcttttgctccaaatccataaa

SEQ ID NO: 1959758 - DNA, 25 bp, Homo sapien
cagaggccaaagaactgcgcgtctc

SEQ ID NO: 1959759 - DNA, 25 bp, Homo sapien
acacttgctggaaaagctcgcggcc

SEQ ID NO: 1959760 - DNA, 25 bp, Homo sapien
aaagctcgcggccagtagccttcac

SEQ ID NO: 1959761 - DNA, 25 bp, Homo sapien
tctgatgctcgccacgttgcacact

SEQ ID NO: 1959762 - DNA, 25 bp, Homo sapien
gaatgcttggttccccatgagcgcg

SEQ ID NO: 1959763 - DNA, 25 bp, Homo sapien
tcctcgcacggcacaaatgaatgct

SEQ ID NO: 1959764 - DNA, 25 bp, Homo sapien
gatttcccgagaccagtcagggaca

SEQ ID NO: 1959765 - DNA, 25 bp, Homo sapien
catgagcgcgagcatcggtgtctca

SEQ ID NO: 1959766 - DNA, 25 bp, Homo sapien
tgcgagtgatcccaacagtgttcct

SEQ ID NO: 1959767 - DNA, 25 bp, Homo sapien
taaacacccagcgtctggtgcgtgt

SEQ ID NO: 1959768 - DNA, 25 bp, Homo sapien
tgttcctacagctgagcctctcacg

SEQ ID NO: 1959769 - DNA, 25 bp, Homo sapien
tcatccatcgcccaactgatgcgag

SEQ ID NO: 1959770 - DNA, 25 bp, Homo sapien
ggccagccgcagttgctcccggctg

SEQ ID NO: 1959771 - DNA, 25 bp, Homo sapien
ggacatccctgtgttccgaggccat

SEQ ID NO: 1959772 - DNA, 25 bp, Homo sapien
cagcacgaggacatccctgtgttcc

SEQ ID NO: 1959773 - DNA, 25 bp, Homo sapien
acgaggacatccctgtgttccgagg

SEQ ID NO: 1959774 - DNA, 25 bp, Homo sapien
tcaggactgggttccatacatcgcg

SEQ ID NO: 1959775 - DNA, 25 bp, Homo sapien
tccattcccagggtcggctcctgct

SEQ ID NO: 1959776 - DNA, 25 bp, Homo sapien
tctcaggactgggttccatacatcg

SEQ ID NO: 1959777 - DNA, 25 bp, Homo sapien
ggactgggttccatacatcgcgccc

SEQ ID NO: 1959778 - DNA, 25 bp, Homo sapien
ccctccctctcgggggcaccgccat

SEQ ID NO: 1959779 - DNA, 25 bp, Homo sapien
tgtccgggcggggtctatgcccctc

SEQ ID NO: 1959780 - DNA, 25 bp, Homo sapien
cgccatgggtcgcaggtgggtgctc

SEQ ID NO: 1959781 - DNA, 25 bp, Homo sapien
ccccgccatgggtcgcaggtgggtg

SEQ ID NO: 1959782 - DNA, 25 bp, Homo sapien
atgggtcgcaggtgggtgctcagca

SEQ ID NO: 1959783 - DNA, 25 bp, Homo sapien
ccatgggtcgcaggtgggtgctcag

SEQ ID NO: 1959784 - DNA, 25 bp, Homo sapien
aagaggagaccaccgcccagatctc

SEQ ID NO: 1959785 - DNA, 25 bp, Homo sapien
gaatgtcttgtcttctcgactggcc

SEQ ID NO: 1959786 - DNA, 25 bp, Homo sapien
tgccacgttcgtgatgtcagggccg

SEQ ID NO: 1959787 - DNA, 25 bp, Homo sapien
cgactggcctgttcgtgatggaaga

SEQ ID NO: 1959788 - DNA, 25 bp, Homo sapien
tcagggaccagccttgagaaggcgc

SEQ ID NO: 1959789 - DNA, 25 bp, Homo sapien
aaggcgcctggggtctggtcggctg

SEQ ID NO: 1959790 - DNA, 25 bp, Homo sapien
ctggtcggctgtcctctcccatggg

SEQ ID NO: 1959791 - DNA, 25 bp, Homo sapien
agggaccagccttgagaaggcgcct

SEQ ID NO: 1959792 - DNA, 25 bp, Homo sapien
gtgcacagataatcgaccatcagca

SEQ ID NO: 1959793 - DNA, 25 bp, Homo sapien
actgtttaccgtcactgtgcacaga

SEQ ID NO: 1959794 - DNA, 25 bp, Homo sapien
ggcagctgtgtttatcacgcacact

SEQ ID NO: 1959795 - DNA, 25 bp, Homo sapien
acagataatcgaccatcagcagctt

SEQ ID NO: 1959796 - DNA, 25 bp, Homo sapien
ctggcctgtcagcaagtaccaccga

SEQ ID NO: 1959797 - DNA, 25 bp, Homo sapien
gacggctgtgagctgaccggcccca

SEQ ID NO: 1959798 - DNA, 25 bp, Homo sapien
aaggtcacggtcatcattcatcaaa

SEQ ID NO: 1959799 - DNA, 25 bp, Homo sapien
caagtaccaccgacggctgtgagct

SEQ ID NO: 1959800 - DNA, 25 bp, Homo sapien
agagcaagctctgggcccaaggatg

SEQ ID NO: 1959801 - DNA, 25 bp, Homo sapien
ccagggcaggtccagtgtccccagg

SEQ ID NO: 1959802 - DNA, 25 bp, Homo sapien
ggccagagcaagctctgggcccaag

SEQ ID NO: 1959803 - DNA, 25 bp, Homo sapien
ccaggggccagagcaagctctgggc

SEQ ID NO: 1959804 - DNA, 25 bp, Homo sapien
aaagaggcatcttccgccgacgggc

SEQ ID NO: 1959805 - DNA, 25 bp, Homo sapien
ggcacaacggaccatagtgctccct

SEQ ID NO: 1959806 - DNA, 25 bp, Homo sapien
gatgttggggacagcacttgcctgt

SEQ ID NO: 1959807 - DNA, 25 bp, Homo sapien
gcagtttccgatgcccaaaagaggc

SEQ ID NO: 1959808 - DNA, 25 bp, Homo sapien
ctctaagcaggaccggttgatcaga

SEQ ID NO: 1959809 - DNA, 25 bp, Homo sapien
actcgggaagcctgggccgcctgca

SEQ ID NO: 1959810 - DNA, 25 bp, Homo sapien
agccagtcccctggcaagaccttgg

SEQ ID NO: 1959811 - DNA, 25 bp, Homo sapien
tgaacaagccagtcccctggcaaga

SEQ ID NO: 1959812 - DNA, 25 bp, Homo sapien
ccctgacagggggtccgggacagtg

SEQ ID NO: 1959813 - DNA, 25 bp, Homo sapien
gcccacattcagatgcctgggtcgt

SEQ ID NO: 1959814 - DNA, 25 bp, Homo sapien
ggacagtgtgctgcccacattcaga

SEQ ID NO: 1959815 - DNA, 25 bp, Homo sapien
atgcctgggtcgttgggtcattgct

SEQ ID NO: 1959816 - DNA, 25 bp, Homo sapien
aacaaaattgtgcattgactctggg

SEQ ID NO: 1959817 - DNA, 25 bp, Homo sapien
caaaattgtgcattgactctggggc

SEQ ID NO: 1959818 - DNA, 25 bp, Homo sapien
aaacaaaattgtgcattgactctgg

SEQ ID NO: 1959819 - DNA, 25 bp, Homo sapien
aattgtgcattgactctggggcaca

SEQ ID NO: 1959820 - DNA, 25 bp, Homo sapien
atgatgcaccaatggatggccgtgg

SEQ ID NO: 1959821 - DNA, 25 bp, Homo sapien
gcaccaatggatggccgtgggtcat

SEQ ID NO: 1959822 - DNA, 25 bp, Homo sapien
tccatgatgcaccaatggatggccg

SEQ ID NO: 1959823 - DNA, 25 bp, Homo sapien
cacctccatgatgcaccaatggatg

SEQ ID NO: 1959824 - DNA, 25 bp, Homo sapien
caaatggttccacatgcttcccaga

SEQ ID NO: 1959825 - DNA, 25 bp, Homo sapien
gcaaatggttccacatgcttcccag

SEQ ID NO: 1959826 - DNA, 25 bp, Homo sapien
aaatggttccacatgcttcccagag

SEQ ID NO: 1959827 - DNA, 25 bp, Homo sapien
actcatgcccgcgataatctgctgc

SEQ ID NO: 1959828 - DNA, 25 bp, Homo sapien
cgtgtcactcatgcccgcgataatc

SEQ ID NO: 1959829 - DNA, 25 bp, Homo sapien
ggcgccggtgccgtgtcactcatgc

SEQ ID NO: 1959830 - DNA, 25 bp, Homo sapien
ggtgccgtgtcactcatgcccgcga

SEQ ID NO: 1959831 - DNA, 25 bp, Homo sapien
caccgacaggactcctgatgtttga

SEQ ID NO: 1959832 - DNA, 25 bp, Homo sapien
caggcgacaccgacaggactcctga

SEQ ID NO: 1959833 - DNA, 25 bp, Homo sapien
cgacaggactcctgatgtttgatgg

SEQ ID NO: 1959834 - DNA, 25 bp, Homo sapien
gctgaactcatgggtgttcccagcc

SEQ ID NO: 1959835 - DNA, 25 bp, Homo sapien
ggcggtacctcatctcgggtgccag

SEQ ID NO: 1959836 - DNA, 25 bp, Homo sapien
gcactggcggtacctcatctcgggt

SEQ ID NO: 1959837 - DNA, 25 bp, Homo sapien
tgctccgagcactggcggtacctca

SEQ ID NO: 1959838 - DNA, 25 bp, Homo sapien
catctcgggtgccagccttttggct

SEQ ID NO: 1959839 - DNA, 25 bp, Homo sapien
tcgtcgtccggctcaaggctccggg

SEQ ID NO: 1959840 - DNA, 25 bp, Homo sapien
tagaagcggccgccgctcttgtgcc

SEQ ID NO: 1959841 - DNA, 25 bp, Homo sapien
gtcccgccggcggtgtagaagcggc

SEQ ID NO: 1959842 - DNA, 25 bp, Homo sapien
gaggtccggctcgtcgtccggctca

SEQ ID NO: 1959843 - DNA, 25 bp, Homo sapien
agggtcgctccatccccgggtcaca

SEQ ID NO: 1959844 - DNA, 25 bp, Homo sapien
cagccttgcagaggcgatcgcgcca

SEQ ID NO: 1959845 - DNA, 25 bp, Homo sapien
agcgcgggccgtgcagggtctcggg

SEQ ID NO: 1959846 - DNA, 25 bp, Homo sapien
ggaggtcacacggccccagagttgc

SEQ ID NO: 1959847 - DNA, 25 bp, Homo sapien
gaacggcggcatgcatttgaagcca

SEQ ID NO: 1959848 - DNA, 25 bp, Homo sapien
gcctggacagcacactcggaacggc

SEQ ID NO: 1959849 - DNA, 25 bp, Homo sapien
atcgctgcctgcgttgtcggtggat

SEQ ID NO: 1959850 - DNA, 25 bp, Homo sapien
ttgcaggctgctggcgaccccgctg

SEQ ID NO: 1959851 - DNA, 25 bp, Homo sapien
ttcaagggggatactggtggtgtcc

SEQ ID NO: 1959852 - DNA, 25 bp, Homo sapien
aagcccgtggcttcaacgtctgcct

SEQ ID NO: 1959853 - DNA, 25 bp, Homo sapien
ggtcctgacactggtcctatcttca

SEQ ID NO: 1959854 - DNA, 25 bp, Homo sapien
caagcccgtggcttcaacgtctgcc

SEQ ID NO: 1959855 - DNA, 25 bp, Homo sapien
ccggcagcaccaccgtccggagctg

SEQ ID NO: 1959856 - DNA, 25 bp, Homo sapien
agcagctgagtcaggaaagcgcagc

SEQ ID NO: 1959857 - DNA, 25 bp, Homo sapien
atccggcgcggctcacagactgcag

SEQ ID NO: 1959858 - DNA, 25 bp, Homo sapien
agggccgtcaatccggcgcggctca

SEQ ID NO: 1959859 - DNA, 25 bp, Homo sapien
tcaattgtactgtggaagttctcac

SEQ ID NO: 1959860 - DNA, 25 bp, Homo sapien
gagactcgggctgaacattttgaca

SEQ ID NO: 1959861 - DNA, 25 bp, Homo sapien
gaggctctgtgtcaacctattgtcc

SEQ ID NO: 1959862 - DNA, 25 bp, Homo sapien
cctatgttgggtgggcccactctta

SEQ ID NO: 1959863 - DNA, 25 bp, Homo sapien
tgtgggcatgcacaaggcagaagga

SEQ ID NO: 1959864 - DNA, 25 bp, Homo sapien
catggccggccagtgcatggtcact

SEQ ID NO: 1959865 - DNA, 25 bp, Homo sapien
catgtcgggccagtgcgatggtaac

SEQ ID NO: 1959866 - DNA, 25 bp, Homo sapien
tcatagcaggccagtttgatggtaa

SEQ ID NO: 1959867 - DNA, 25 bp, Homo sapien
ggccagtgcaatggtaactggggga

SEQ ID NO: 1959868 - DNA, 25 bp, Homo sapien
gggtttgcatggtgggccagtgcaa

SEQ ID NO: 1959869 - DNA, 25 bp, Homo sapien
gtttgcatggtgggccagtgcaatg

SEQ ID NO: 1959870 - DNA, 25 bp, Homo sapien
ggtttgcatggtgggccagtgcaat

SEQ ID NO: 1959871 - DNA, 25 bp, Homo sapien
gcccctgacaacagtcatgggtggc

SEQ ID NO: 1959872 - DNA, 25 bp, Homo sapien
gggattttctgtagcgcaccacctt

SEQ ID NO: 1959873 - DNA, 25 bp, Homo sapien
gtccaggcccctgacaacagtcatg

SEQ ID NO: 1959874 - DNA, 25 bp, Homo sapien
ggtggcggggcctccagtttcagtg

SEQ ID NO: 1959875 - DNA, 25 bp, Homo sapien
tggcgagaccgatctctggactctg

SEQ ID NO: 1959876 - DNA, 25 bp, Homo sapien
catgtggcgagaccgatctctggac

SEQ ID NO: 1959877 - DNA, 25 bp, Homo sapien
tcatgtggcgagaccgatctctgga

SEQ ID NO: 1959878 - DNA, 25 bp, Homo sapien
tgtggcgagaccgatctctggactc

SEQ ID NO: 1959879 - DNA, 25 bp, Homo sapien
cacgctgtgttgctgcatctcccaa

SEQ ID NO: 1959880 - DNA, 25 bp, Homo sapien
tcccaacccccggtgcacacgctgt

SEQ ID NO: 1959881 - DNA, 25 bp, Homo sapien
cacacgctgtgttgctgcatctcac

SEQ ID NO: 1959882 - DNA, 25 bp, Homo sapien
cccatccccccggtgcacacgctgt

SEQ ID NO: 1959883 - DNA, 25 bp, Homo sapien
cggtgcacacgctgcgttgctgcat

SEQ ID NO: 1959884 - DNA, 25 bp, Homo sapien
agttcttgcctcgtaggagccgtcc

SEQ ID NO: 1959885 - DNA, 25 bp, Homo sapien
tggtgcacacgctgtgttgcagttc

SEQ ID NO: 1959886 - DNA, 25 bp, Homo sapien
gttgcagttcttgcctcgtaggagc

SEQ ID NO: 1959887 - DNA, 25 bp, Homo sapien
ctgctgggccgcacaaaccagctga

SEQ ID NO: 1959888 - DNA, 25 bp, Homo sapien
tgtggcagtgccctcggcgggaggc

SEQ ID NO: 1959889 - DNA, 25 bp, Homo sapien
ggttcttctggcacgcatttgctgt

SEQ ID NO: 1959890 - DNA, 25 bp, Homo sapien
tggagattccccagataaaggcttg

SEQ ID NO: 1959891 - DNA, 25 bp, Homo sapien
caggtcgatgtagccttttgtagct

SEQ ID NO: 1959892 - DNA, 25 bp, Homo sapien
ggtcgatgtagccttttgtagcttg

SEQ ID NO: 1959893 - DNA, 25 bp, Homo sapien
gtccacattactcctgtggttacaa

SEQ ID NO: 1959894 - DNA, 25 bp, Homo sapien
ggctctcaggacaccggtccacatt

SEQ ID NO: 1959895 - DNA, 25 bp, Homo sapien
agacagagccaccgcctggatccgg

SEQ ID NO: 1959896 - DNA, 25 bp, Homo sapien
gggatctgaggatgaaatctctgag

SEQ ID NO: 1959897 - DNA, 25 bp, Homo sapien
agagccaccgcctggatccggggat

SEQ ID NO: 1959898 - DNA, 25 bp, Homo sapien
ttgtctctcaacctccatggcgagg

SEQ ID NO: 1959899 - DNA, 25 bp, Homo sapien
ctggaggacaggtgaatccggatgg

SEQ ID NO: 1959900 - DNA, 25 bp, Homo sapien
ggtgaatccggatgggcagcacccc

SEQ ID NO: 1959901 - DNA, 25 bp, Homo sapien
cccctcaggcccattgtgagtggga

SEQ ID NO: 1959902 - DNA, 25 bp, Homo sapien
agtgggatcgcgttggcttccccca

SEQ ID NO: 1959903 - DNA, 25 bp, Homo sapien
gctgagctgcctcgttgacttccca

SEQ ID NO: 1959904 - DNA, 25 bp, Homo sapien
acggagccacgccagccggttcttt

SEQ ID NO: 1959905 - DNA, 25 bp, Homo sapien
aaatgcctgaagagccccgacggag

SEQ ID NO: 1959906 - DNA, 25 bp, Homo sapien
agtccaaatgcctgaagagccccga

SEQ ID NO: 1959907 - DNA, 25 bp, Homo sapien
aagcaatttcccaacatttctgacg

SEQ ID NO: 1959908 - DNA, 25 bp, Homo sapien
cataagcaatttcccaacatttctg

SEQ ID NO: 1959909 - DNA, 25 bp, Homo sapien
atcacttcataagcaatttcccaac

SEQ ID NO: 1959910 - DNA, 25 bp, Homo sapien
cttcataagcaatttcccaacattt

SEQ ID NO: 1959911 - DNA, 25 bp, Homo sapien
gcttaaccacatccgtactcagcat

SEQ ID NO: 1959912 - DNA, 25 bp, Homo sapien
gccgcttaaccacatccgtactcag

SEQ ID NO: 1959913 - DNA, 25 bp, Homo sapien
cttccccagccgcttaaccacatcc

SEQ ID NO: 1959914 - DNA, 25 bp, Homo sapien
cagccgcttaaccacatccgtactc

SEQ ID NO: 1959915 - DNA, 25 bp, Homo sapien
gctacatctgacaccgtagggccct

SEQ ID NO: 1959916 - DNA, 25 bp, Homo sapien
tgcccgtatcggagaaggtacagcc

SEQ ID NO: 1959917 - DNA, 25 bp, Homo sapien
tttcggtatcttccaaacggctcat

SEQ ID NO: 1959918 - DNA, 25 bp, Homo sapien
atcacgaacaggaagcccactggac

SEQ ID NO: 1959919 - DNA, 25 bp, Homo sapien
ttcctcctgttagggacgggcctga

SEQ ID NO: 1959920 - DNA, 25 bp, Homo sapien
gaaggcgacatggagagatttcctc

SEQ ID NO: 1959921 - DNA, 25 bp, Homo sapien
agaatccacggcgaagacgtgcctt

SEQ ID NO: 1959922 - DNA, 25 bp, Homo sapien
cgggcctgacatcgcgcatctcagg

SEQ ID NO: 1959923 - DNA, 25 bp, Homo sapien
gctttgtgagggtgaccgccagggc

SEQ ID NO: 1959924 - DNA, 25 bp, Homo sapien
taaataacccacacaaggaataagc

SEQ ID NO: 1959925 - DNA, 25 bp, Homo sapien
aaggaataagcagggaccagtgcag

SEQ ID NO: 1959926 - DNA, 25 bp, Homo sapien
ccagggcctcatcgaggtaggcaga

SEQ ID NO: 1959927 - DNA, 25 bp, Homo sapien
taataaattgctcagaagttatggc

SEQ ID NO: 1959928 - DNA, 25 bp, Homo sapien
ggctatgcagcctttagctgtaaaa

SEQ ID NO: 1959929 - DNA, 25 bp, Homo sapien
ggtgactactgcaacccaacagaga

SEQ ID NO: 1959930 - DNA, 25 bp, Homo sapien
cagtttatgagcatcgcggtgacta

SEQ ID NO: 1959931 - DNA, 25 bp, Homo sapien
gggagatggtgcaggcgatggagca

SEQ ID NO: 1959932 - DNA, 25 bp, Homo sapien
gctttgctgagacagttttccagac

SEQ ID NO: 1959933 - DNA, 25 bp, Homo sapien
tttacaggcataggaaagtaagaaa

SEQ ID NO: 1959934 - DNA, 25 bp, Homo sapien
caaaccatttacaggcataggaaag

SEQ ID NO: 1959935 - DNA, 25 bp, Homo sapien
atagaagttaaaaccacagccaagc

SEQ ID NO: 1959936 - DNA, 25 bp, Homo sapien
tcataattttattcgtttgttggga

SEQ ID NO: 1959937 - DNA, 25 bp, Homo sapien
taaggcatatagaagttaaaaccac

SEQ ID NO: 1959938 - DNA, 25 bp, Homo sapien
ggaaatttaaggcatatagaagtta

SEQ ID NO: 1959939 - DNA, 25 bp, Homo sapien
gcacgtgctctgcttccggacggcg

SEQ ID NO: 1959940 - DNA, 25 bp, Homo sapien
tacgaagcacgtgctctgcttccgg

SEQ ID NO: 1959941 - DNA, 25 bp, Homo sapien
tttacgaagcacgtgctctgcttcc

SEQ ID NO: 1959942 - DNA, 25 bp, Homo sapien
aagcacgtgctctgcttccggacgg

SEQ ID NO: 1959943 - DNA, 25 bp, Homo sapien
gcgccggcagttgcggttgtcacat

SEQ ID NO: 1959944 - DNA, 25 bp, Homo sapien
aagtcggctgtgtgcccgggcgccg

SEQ ID NO: 1959945 - DNA, 25 bp, Homo sapien
ctaagtcggctgtgtgcccgggcgc

SEQ ID NO: 1959946 - DNA, 25 bp, Homo sapien
cccgggcgccggcagttgcggttgt

SEQ ID NO: 1959947 - DNA, 25 bp, Homo sapien
aatttcggtctgttccgggcacctg

SEQ ID NO: 1959948 - DNA, 25 bp, Homo sapien
cctggatcaaagtcagaggccctcc

SEQ ID NO: 1959949 - DNA, 25 bp, Homo sapien
cactagggtcctatcttgggcagga

SEQ ID NO: 1959950 - DNA, 25 bp, Homo sapien
gagggcaagtcaaggaaccacactg

SEQ ID NO: 1959951 - DNA, 25 bp, Homo sapien
gggccctccagagactccggtgtca

SEQ ID NO: 1959952 - DNA, 25 bp, Homo sapien
ccagagactccggtgtcagcgagct

SEQ ID NO: 1959953 - DNA, 25 bp, Homo sapien
cctccagagactccggtgtcagcga

SEQ ID NO: 1959954 - DNA, 25 bp, Homo sapien
gagactccggtgtcagcgagctcat

SEQ ID NO: 1959955 - DNA, 25 bp, Homo sapien
gctacgaatttcctcgcggctccat

SEQ ID NO: 1959956 - DNA, 25 bp, Homo sapien
ttcaggtggcaaccgcacggtgcca

SEQ ID NO: 1959957 - DNA, 25 bp, Homo sapien
gcagtgacaatcctcgctacgaatt

SEQ ID NO: 1959958 - DNA, 25 bp, Homo sapien
acaccggctgcgtctgtcatgggct

SEQ ID NO: 1959959 - DNA, 25 bp, Homo sapien
agctttcagcatggcaactagggga

SEQ ID NO: 1959960 - DNA, 25 bp, Homo sapien
acatgctcccatgcgagggcctctg

SEQ ID NO: 1959961 - DNA, 25 bp, Homo sapien
gctcccatgcgagggcctctgctgg

SEQ ID NO: 1959962 - DNA, 25 bp, Homo sapien
agttcctcctctttcgcactgagaa

SEQ ID NO: 1959963 - DNA, 25 bp, Homo sapien
caatgtggaaccatttccatgcttg

SEQ ID NO: 1959964 - DNA, 25 bp, Homo sapien
tgctttcataaagtccgtaggctga

SEQ ID NO: 1959965 - DNA, 25 bp, Homo sapien
tttccatgcttgaaggactgaatca

SEQ ID NO: 1959966 - DNA, 25 bp, Homo sapien
tccgtaggctgaattaggctttaaa

SEQ ID NO: 1959967 - DNA, 25 bp, Homo sapien
gctgtgaagtctgggccgacttgaa

SEQ ID NO: 1959968 - DNA, 25 bp, Homo sapien
gacttgaaagggtcagcgtgggctc

SEQ ID NO: 1959969 - DNA, 25 bp, Homo sapien
caggctgtgaagtctgggccgactt

SEQ ID NO: 1959970 - DNA, 25 bp, Homo sapien
gccgacttgaaagggtcagcgtggg

SEQ ID NO: 1959971 - DNA, 25 bp, Homo sapien
tctgtgtggctgacgaactggaaac

SEQ ID NO: 1959972 - DNA, 25 bp, Homo sapien
ttcccgtagcgtctggagtcgggca

SEQ ID NO: 1959973 - DNA, 25 bp, Homo sapien
gagaagcttcccgtagcgtctggag

SEQ ID NO: 1959974 - DNA, 25 bp, Homo sapien
caccttcctccggagtctgtgtggc

SEQ ID NO: 1959975 - DNA, 25 bp, Homo sapien
cctcgtcgttcctcttcaaccccag

SEQ ID NO: 1959976 - DNA, 25 bp, Homo sapien
caagccctcgtcgttcctcttcaac

SEQ ID NO: 1959977 - DNA, 25 bp, Homo sapien
ggatggtcccatctattccgaacgt

SEQ ID NO: 1959978 - DNA, 25 bp, Homo sapien
tgggatggtcccatctattccgaac

SEQ ID NO: 1959979 - DNA, 25 bp, Homo sapien
tgcttccattactgggatggtccca

SEQ ID NO: 1959980 - DNA, 25 bp, Homo sapien
atggtcccatctattccgaacgtac

SEQ ID NO: 1959981 - DNA, 25 bp, Homo sapien
tgagcttcactttgggcaaaagctg

SEQ ID NO: 1959982 - DNA, 25 bp, Homo sapien
tgggatggcctgtctattccaacca

SEQ ID NO: 1959983 - DNA, 25 bp, Homo sapien
caaacgcttccattactgggatggc

SEQ ID NO: 1959984 - DNA, 25 bp, Homo sapien
cgcttccattactgggatggtcctg

SEQ ID NO: 1959985 - DNA, 25 bp, Homo sapien
tctgcgcagattctcgaggagactg

SEQ ID NO: 1959986 - DNA, 25 bp, Homo sapien
attttcccgcgtagctctgcgcaga

SEQ ID NO: 1959987 - DNA, 25 bp, Homo sapien
acgctgcagaggctctcgcggacag

SEQ ID NO: 1959988 - DNA, 25 bp, Homo sapien
aggagactgcttccggctcagggac

SEQ ID NO: 1959989 - DNA, 25 bp, Homo sapien
aaccctcgctgctggcttcggcttc

SEQ ID NO: 1959990 - DNA, 25 bp, Homo sapien
tcaaccctcgctgctggcttcggct

SEQ ID NO: 1959991 - DNA, 25 bp, Homo sapien
caaccctcgctgctggcttcggctt

SEQ ID NO: 1959992 - DNA, 25 bp, Homo sapien
accctcgctgctggcttcggcttcc

SEQ ID NO: 1959993 - DNA, 25 bp, Homo sapien
ggtctgatgccgaagagccctatgc

SEQ ID NO: 1959994 - DNA, 25 bp, Homo sapien
tgttcttactgacaccatctggagg

SEQ ID NO: 1959995 - DNA, 25 bp, Homo sapien
ccaaaggccgttgattggaactggc

SEQ ID NO: 1959996 - DNA, 25 bp, Homo sapien
ccttgaggtgggctttgacccgctg

SEQ ID NO: 1959997 - DNA, 25 bp, Homo sapien
caggaatttttccagaccaaacaca

SEQ ID NO: 1959998 - DNA, 25 bp, Homo sapien
tgcagggagcttcatgcagctcagg

SEQ ID NO: 1959999 - DNA, 25 bp, Homo sapien
tcatgcagctcaggaatttttccag

SEQ ID NO: 1960000 - DNA, 25 bp, Homo sapien
aggctgcagggagcttcatgcagct

SEQ ID NO: 1960001 - DNA, 25 bp, Homo sapien
tttacaatagtttcatcatccagtt

SEQ ID NO: 1960002 - DNA, 25 bp, Homo sapien
acaatagtttcatcatccagttcct

SEQ ID NO: 1960003 - DNA, 25 bp, Homo sapien
gttcctcatttgtaagtatgcgcat

SEQ ID NO: 1960004 - DNA, 25 bp, Homo sapien
tacaatagtttcatcatccagttcc

SEQ ID NO: 1960005 - DNA, 25 bp, Homo sapien
tcaatgtaaagagggtgtgttggct

SEQ ID NO: 1960006 - DNA, 25 bp, Homo sapien
tgttggcttcggctggttgaccttc

SEQ ID NO: 1960007 - DNA, 25 bp, Homo sapien
gaagcatgttccactcaagcggact

SEQ ID NO: 1960008 - DNA, 25 bp, Homo sapien
ttggcctgcgctgtgagtcaatgta

SEQ ID NO: 1960009 - DNA, 25 bp, Homo sapien
atgtagacacctgagcagcaagccg

SEQ ID NO: 1960010 - DNA, 25 bp, Homo sapien
cagggtgctgcatgctcacccgagg

SEQ ID NO: 1960011 - DNA, 25 bp, Homo sapien
tcggccatcccatatcccgatggtg

SEQ ID NO: 1960012 - DNA, 25 bp, Homo sapien
cacggaaggtaggagcgtgtgccgg

SEQ ID NO: 1960013 - DNA, 25 bp, Homo sapien
gcacaattccgaggcttcctggatg

SEQ ID NO: 1960014 - DNA, 25 bp, Homo sapien
aggcacaattccgaggcttcctgga

SEQ ID NO: 1960015 - DNA, 25 bp, Homo sapien
ttgaggcacaattccgaggcttcct

SEQ ID NO: 1960016 - DNA, 25 bp, Homo sapien
tgaggcacaattccgaggcttcctg

SEQ ID NO: 1960017 - DNA, 25 bp, Homo sapien
gctgtggttctgatgttccgtagca

SEQ ID NO: 1960018 - DNA, 25 bp, Homo sapien
ttcaaccctcagaatgtgggggcgg

SEQ ID NO: 1960019 - DNA, 25 bp, Homo sapien
caaccctcagaatgtgggggcgggg

SEQ ID NO: 1960020 - DNA, 25 bp, Homo sapien
acttcaaccctcagaatgtgggggc

SEQ ID NO: 1960021 - DNA, 25 bp, Homo sapien
agtggacccttccacagagttggag

SEQ ID NO: 1960022 - DNA, 25 bp, Homo sapien
tggacccttccacagagttggagga

SEQ ID NO: 1960023 - DNA, 25 bp, Homo sapien
gagtggacccttccacagagttgga

SEQ ID NO: 1960024 - DNA, 25 bp, Homo sapien
ccttccacagagttggaggatagag

SEQ ID NO: 1960025 - DNA, 25 bp, Homo sapien
tagtggcatggctgctcatttagtc

SEQ ID NO: 1960026 - DNA, 25 bp, Homo sapien
tatataattcagtcattactttaag

SEQ ID NO: 1960027 - DNA, 25 bp, Homo sapien
aatgtgtgttttctaactgcaaaga

SEQ ID NO: 1960028 - DNA, 25 bp, Homo sapien
cagataactgaatataaatttggtt

SEQ ID NO: 1960029 - DNA, 25 bp, Homo sapien
cggctattttcctctactattaatt

SEQ ID NO: 1960030 - DNA, 25 bp, Homo sapien
tttaacttagcggcaggaatcagct

SEQ ID NO: 1960031 - DNA, 25 bp, Homo sapien
ttaacttagcggcaggaatcagctt

SEQ ID NO: 1960032 - DNA, 25 bp, Homo sapien
atttaacttagcggcaggaatcagc

SEQ ID NO: 1960033 - DNA, 25 bp, Homo sapien
gggattttgacgcatcttccagcaa

SEQ ID NO: 1960034 - DNA, 25 bp, Homo sapien
gttatcttcagttgttctccgttca

SEQ ID NO: 1960035 - DNA, 25 bp, Homo sapien
tatctgctatcagttcatctctttc

SEQ ID NO: 1960036 - DNA, 25 bp, Homo sapien
aaacgttcggtcagagtctcgatgc

SEQ ID NO: 1960037 - DNA, 25 bp, Homo sapien
cccagccacaacaagtcgtggacaa

SEQ ID NO: 1960038 - DNA, 25 bp, Homo sapien
gatcagccccaagcacggctgaggg

SEQ ID NO: 1960039 - DNA, 25 bp, Homo sapien
acaacaagtcgtggacaacacgcag

SEQ ID NO: 1960040 - DNA, 25 bp, Homo sapien
gagaatccggtctcataccgtcagg

SEQ ID NO: 1960041 - DNA, 25 bp, Homo sapien
ggcaagcggagcgaaccactgcgga

SEQ ID NO: 1960042 - DNA, 25 bp, Homo sapien
caagcggagcgaaccactgcggagc

SEQ ID NO: 1960043 - DNA, 25 bp, Homo sapien
agcggagcgaaccactgcggagcca

SEQ ID NO: 1960044 - DNA, 25 bp, Homo sapien
cgggcaagcggagcgaaccactgcg

SEQ ID NO: 1960045 - DNA, 25 bp, Homo sapien
aaggaaattccactgaccagcagtc

SEQ ID NO: 1960046 - DNA, 25 bp, Homo sapien
ccagatccatttggcgagggcatga

SEQ ID NO: 1960047 - DNA, 25 bp, Homo sapien
tgtacatgcaatgacctagcgtagc

SEQ ID NO: 1960048 - DNA, 25 bp, Homo sapien
taggcaaacttagcagacatccgtc

SEQ ID NO: 1960049 - DNA, 25 bp, Homo sapien
tgctaacgccaaaattcagctggga

SEQ ID NO: 1960050 - DNA, 25 bp, Homo sapien
catacgtgagttctgtgctcacagc

SEQ ID NO: 1960051 - DNA, 25 bp, Homo sapien
ttcagcgaactcagcgaaccgagtc

SEQ ID NO: 1960052 - DNA, 25 bp, Homo sapien
agccacagctggacaaaacaaggca

SEQ ID NO: 1960053 - DNA, 25 bp, Homo sapien
caggccgctcatgcaaaacacggat

SEQ ID NO: 1960054 - DNA, 25 bp, Homo sapien
tgctagacagcatgcgggaaatgac

SEQ ID NO: 1960055 - DNA, 25 bp, Homo sapien
tcatcgatttgctgttctgtcccgg

SEQ ID NO: 1960056 - DNA, 25 bp, Homo sapien
cacccaggatggaagatgcatttgc

SEQ ID NO: 1960057 - DNA, 25 bp, Homo sapien
cttgtggctgcttcatcgtcatgga

SEQ ID NO: 1960058 - DNA, 25 bp, Homo sapien
ttacagaggttcactgctttccgtc

SEQ ID NO: 1960059 - DNA, 25 bp, Homo sapien
tacagaggttcactgctttccgtct

SEQ ID NO: 1960060 - DNA, 25 bp, Homo sapien
ttttacagaggttcactgctttccg

SEQ ID NO: 1960061 - DNA, 25 bp, Homo sapien
tttacagaggttcactgctttccgt

SEQ ID NO: 1960062 - DNA, 25 bp, Homo sapien
cagtaactgtacagaacctcggatt

SEQ ID NO: 1960063 - DNA, 25 bp, Homo sapien
tgacccgtaaggtgggacggcatta

SEQ ID NO: 1960064 - DNA, 25 bp, Homo sapien
taaatccattccagatgcgctcccg

SEQ ID NO: 1960065 - DNA, 25 bp, Homo sapien
tgcgctcccgttttccatcaggctt

SEQ ID NO: 1960066 - DNA, 25 bp, Homo sapien
ttccccgcccaaagctggcacgtgc

SEQ ID NO: 1960067 - DNA, 25 bp, Homo sapien
ttataagatgccttccccgcccaaa

SEQ ID NO: 1960068 - DNA, 25 bp, Homo sapien
ccagagtttagtctctactcactta

SEQ ID NO: 1960069 - DNA, 25 bp, Homo sapien
tagtctctactcacttataagatgc

SEQ ID NO: 1960070 - DNA, 25 bp, Homo sapien
cagagctccgcatggaagtctttgc

SEQ ID NO: 1960071 - DNA, 25 bp, Homo sapien
tatgctgacagcttaacgtggagtt

SEQ ID NO: 1960072 - DNA, 25 bp, Homo sapien
catggaaacaaggtgcatgccggga

SEQ ID NO: 1960073 - DNA, 25 bp, Homo sapien
catcctgggcagaccttgaaaagag

SEQ ID NO: 1960074 - DNA, 25 bp, Homo sapien
gataaagcgacttggcaagacgaca

SEQ ID NO: 1960075 - DNA, 25 bp, Homo sapien
cagaacccatctgcggggactcctg

SEQ ID NO: 1960076 - DNA, 25 bp, Homo sapien
cctcggaagataaagcgacttggca

SEQ ID NO: 1960077 - DNA, 25 bp, Homo sapien
ctgttaaacggtggcctcggaagat

SEQ ID NO: 1960078 - DNA, 25 bp, Homo sapien
ggcttctcttgacgcagtcactgca

SEQ ID NO: 1960079 - DNA, 25 bp, Homo sapien
gaaacccagacatgcacaggacact

SEQ ID NO: 1960080 - DNA, 25 bp, Homo sapien
gcagcaggcttctcttgacgcagtc

SEQ ID NO: 1960081 - DNA, 25 bp, Homo sapien
tgaaacccagacatgcacaggacac

SEQ ID NO: 1960082 - DNA, 25 bp, Homo sapien
ttaatacggcacagcttgggcacgg

SEQ ID NO: 1960083 - DNA, 25 bp, Homo sapien
tctccgggatgactgacgggaaccg

SEQ ID NO: 1960084 - DNA, 25 bp, Homo sapien
tcggctggaacctgcggatcttctt

SEQ ID NO: 1960085 - DNA, 25 bp, Homo sapien
gctgctggactcacggtctccgaat

SEQ ID NO: 1960086 - DNA, 25 bp, Homo sapien
gatctccacggtggactgccagcgg

SEQ ID NO: 1960087 - DNA, 25 bp, Homo sapien
gccactgaggtgagcagtgacgcct

SEQ ID NO: 1960088 - DNA, 25 bp, Homo sapien
ctggcggaccagtgagggacggccc

SEQ ID NO: 1960089 - DNA, 25 bp, Homo sapien
tgccagcggcgatgcttcctcctgg

SEQ ID NO: 1960090 - DNA, 25 bp, Homo sapien
ccaaggggacgaggacaggcatggg

SEQ ID NO: 1960091 - DNA, 25 bp, Homo sapien
tggactcagaacaggagcgcccggg

SEQ ID NO: 1960092 - DNA, 25 bp, Homo sapien
ctcagaacaggagcgcccgggtgcc

SEQ ID NO: 1960093 - DNA, 25 bp, Homo sapien
gagggtggactcagaacaggagcgc

SEQ ID NO: 1960094 - DNA, 25 bp, Homo sapien
gggatatgatgttgcctcgtccata

SEQ ID NO: 1960095 - DNA, 25 bp, Homo sapien
agcggctgccttgcaaacctcagca

SEQ ID NO: 1960096 - DNA, 25 bp, Homo sapien
tcaggcctgtccagtagaagcagcg

SEQ ID NO: 1960097 - DNA, 25 bp, Homo sapien
ctcgtccatagtcctgagctgaggg

SEQ ID NO: 1960098 - DNA, 25 bp, Homo sapien
accggcccagtctggatggtgttca

SEQ ID NO: 1960099 - DNA, 25 bp, Homo sapien
gggacgctgcatgccttagaggtcc

SEQ ID NO: 1960100 - DNA, 25 bp, Homo sapien
gttctccctcgctaccctttgctgg

SEQ ID NO: 1960101 - DNA, 25 bp, Homo sapien
gatgcagcaacctgtcgatataagc

SEQ ID NO: 1960102 - DNA, 25 bp, Homo sapien
cttagtcaggacaaacagggggctc

SEQ ID NO: 1960103 - DNA, 25 bp, Homo sapien
tccttagtcaggacaaacagggggc

SEQ ID NO: 1960104 - DNA, 25 bp, Homo sapien
tagggaacgaggggccacctctctg

SEQ ID NO: 1960105 - DNA, 25 bp, Homo sapien
gctctccctagggaacgaggggcca

SEQ ID NO: 1960106 - DNA, 25 bp, Homo sapien
tgcagggggctggggtacgggtaca

SEQ ID NO: 1960107 - DNA, 25 bp, Homo sapien
tccggcacgtgcagcgggatatcca

SEQ ID NO: 1960108 - DNA, 25 bp, Homo sapien
acaccaggtcctgccgatacttggg

SEQ ID NO: 1960109 - DNA, 25 bp, Homo sapien
tcggcgtccgcgctggctttctgga

SEQ ID NO: 1960110 - DNA, 25 bp, Homo sapien
gccggcagggctctgtcaagatcac

SEQ ID NO: 1960111 - DNA, 25 bp, Homo sapien
acagtagtctcatcaaccgaccggg

SEQ ID NO: 1960112 - DNA, 25 bp, Homo sapien
aaactgcccagcgagggagagatgt

SEQ ID NO: 1960113 - DNA, 25 bp, Homo sapien
ggtctccacgctggcacagtagtct

SEQ ID NO: 1960114 - DNA, 25 bp, Homo sapien
tccaccgtcgctcatctcgtaaaag

SEQ ID NO: 1960115 - DNA, 25 bp, Homo sapien
aggtgggtcttcaggccgatgtcct

SEQ ID NO: 1960116 - DNA, 25 bp, Homo sapien
cagcttgctaatctgcaggtccagc

SEQ ID NO: 1960117 - DNA, 25 bp, Homo sapien
tcaggccgatgtcctgttgtctcag

SEQ ID NO: 1960118 - DNA, 25 bp, Homo sapien
cagctgcagcttgctaatctgcagg

SEQ ID NO: 1960119 - DNA, 25 bp, Homo sapien
tacagcaactacgaaaacgcttgtg

SEQ ID NO: 1960120 - DNA, 25 bp, Homo sapien
gaggacacgcctctccttacaggtc

SEQ ID NO: 1960121 - DNA, 25 bp, Homo sapien
gaagaggcctttgtcagttacatgc

SEQ ID NO: 1960122 - DNA, 25 bp, Homo sapien
aatactttattacagtgacgcgacc

SEQ ID NO: 1960123 - DNA, 25 bp, Homo sapien
gccgtggaggccgtgggggccgcag

SEQ ID NO: 1960124 - DNA, 25 bp, Homo sapien
ggccgtggaggccgtgggggccgca

SEQ ID NO: 1960125 - DNA, 25 bp, Homo sapien
gaacgccgcgcgcaacctcgcgccc

SEQ ID NO: 1960126 - DNA, 25 bp, Homo sapien
cgctcctgctgcgtggctcgcagcc

SEQ ID NO: 1960127 - DNA, 25 bp, Homo sapien
ctcctgctgcgtggctcgcagcccc

SEQ ID NO: 1960128 - DNA, 25 bp, Homo sapien
gcgcccaacctacggcggtcccagc

SEQ ID NO: 1960129 - DNA, 25 bp, Homo sapien
tgagcgcctccgtgacttcagcggg

SEQ ID NO: 1960130 - DNA, 25 bp, Homo sapien
ggcaaagaggcgcaagtggaacaaa

SEQ ID NO: 1960131 - DNA, 25 bp, Homo sapien
aactattgggacattatcacattgc

SEQ ID NO: 1960132 - DNA, 25 bp, Homo sapien
gatcccgagctgtgtcgcgggtcct

SEQ ID NO: 1960133 - DNA, 25 bp, Homo sapien
tggctccatcttcgtttggttcccg

SEQ ID NO: 1960134 - DNA, 25 bp, Homo sapien
tcccgggcatggagttctgttgcat

SEQ ID NO: 1960135 - DNA, 25 bp, Homo sapien
gttgagaacaatgggagttgcctcc

SEQ ID NO: 1960136 - DNA, 25 bp, Homo sapien
tctgttgcatgcagctgttggttga

SEQ ID NO: 1960137 - DNA, 25 bp, Homo sapien
catggagataaaaacgagcgttgat

SEQ ID NO: 1960138 - DNA, 25 bp, Homo sapien
aacgagcgttgatgcttaggccagg

SEQ ID NO: 1960139 - DNA, 25 bp, Homo sapien
tcatggagataaaaacgagcgttga

SEQ ID NO: 1960140 - DNA, 25 bp, Homo sapien
taaaaacgagcgttgatgcttaggc

SEQ ID NO: 1960141 - DNA, 25 bp, Homo sapien
tgttcctcatcgtctgtaactgttc

SEQ ID NO: 1960142 - DNA, 25 bp, Homo sapien
ttcttaggcgcgcatcctcgctgtg

SEQ ID NO: 1960143 - DNA, 25 bp, Homo sapien
aaccaccaccgttcttaggcgcgca

SEQ ID NO: 1960144 - DNA, 25 bp, Homo sapien
tctgtggccttacatggcttctgca

SEQ ID NO: 1960145 - DNA, 25 bp, Homo sapien
ttgtcggcgaagcttccccgagagc

SEQ ID NO: 1960146 - DNA, 25 bp, Homo sapien
acacagggttgtcggcgaagcttcc

SEQ ID NO: 1960147 - DNA, 25 bp, Homo sapien
ggttgtcggcgaagcttccccgaga

SEQ ID NO: 1960148 - DNA, 25 bp, Homo sapien
tcagaacacagggttgtcggcgaag

SEQ ID NO: 1960149 - DNA, 25 bp, Homo sapien
tcaggaaccactggggcagtccctg

SEQ ID NO: 1960150 - DNA, 25 bp, Homo sapien
tcgtcctgtccatggaacattctgg

SEQ ID NO: 1960151 - DNA, 25 bp, Homo sapien
gcgtcctaagcaggacgtccagcga

SEQ ID NO: 1960152 - DNA, 25 bp, Homo sapien
ttggcgaggagagacccatgccagc

SEQ ID NO: 1960153 - DNA, 25 bp, Homo sapien
catgccagcgacgtggcgtcctaag

SEQ ID NO: 1960154 - DNA, 25 bp, Homo sapien
cttgcctggctgttcgttgacctgg

SEQ ID NO: 1960155 - DNA, 25 bp, Homo sapien
ttcgttgacctggtggatactgcca

SEQ ID NO: 1960156 - DNA, 25 bp, Homo sapien
gacctggtggatactgccacgtcca

SEQ ID NO: 1960157 - DNA, 25 bp, Homo sapien
tactgccacgtccaggtgcctggga

SEQ ID NO: 1960158 - DNA, 25 bp, Homo sapien
caggtgctcagtaacacttgaattc

SEQ ID NO: 1960159 - DNA, 25 bp, Homo sapien
tagagtgccgtattccgtgatcccg

SEQ ID NO: 1960160 - DNA, 25 bp, Homo sapien
catgcttacacgtgtctcctggcgc

SEQ ID NO: 1960161 - DNA, 25 bp, Homo sapien
gagagcagttggtccacgtgttcac

SEQ ID NO: 1960162 - DNA, 25 bp, Homo sapien
tcagtgccgtgtttcgggtccgtgc

SEQ ID NO: 1960163 - DNA, 25 bp, Homo sapien
ctcgctggttaagctgagtgttgcc

SEQ ID NO: 1960164 - DNA, 25 bp, Homo sapien
gcaagcacgcgttccactcgctggt

SEQ ID NO: 1960165 - DNA, 25 bp, Homo sapien
ttccactcgctggttaagctgagtg

SEQ ID NO: 1960166 - DNA, 25 bp, Homo sapien
tgcaagcacgcgttccactcgctgg

SEQ ID NO: 1960167 - DNA, 25 bp, Homo sapien
cctggtcagtgcaggtgcatccgtg

SEQ ID NO: 1960168 - DNA, 25 bp, Homo sapien
caggtgcatccgtgtggcagagcat

SEQ ID NO: 1960169 - DNA, 25 bp, Homo sapien
accaggatctctgcccagatctagg

SEQ ID NO: 1960170 - DNA, 25 bp, Homo sapien
tccaaaaccaggatctctgcccaga

SEQ ID NO: 1960171 - DNA, 25 bp, Homo sapien
caggagggaccaacacaaaattcgt

SEQ ID NO: 1960172 - DNA, 25 bp, Homo sapien
cacgctgggaacgttggtcacgaca

SEQ ID NO: 1960173 - DNA, 25 bp, Homo sapien
tcttctgaatacgagggcttgcagg

SEQ ID NO: 1960174 - DNA, 25 bp, Homo sapien
cacgacacggagtctctgggaggtt

SEQ ID NO: 1960175 - DNA, 25 bp, Homo sapien
catccacgtgacgtttacatttcat

SEQ ID NO: 1960176 - DNA, 25 bp, Homo sapien
cgtttacatttcatgctgtacctga

SEQ ID NO: 1960177 - DNA, 25 bp, Homo sapien
agcaggtcatccacgtgacgtttac

SEQ ID NO: 1960178 - DNA, 25 bp, Homo sapien
ttcatgctgtacctgacgctgcgtc

SEQ ID NO: 1960179 - DNA, 25 bp, Homo sapien
tgggaccctcctccttgtccgcgcc

SEQ ID NO: 1960180 - DNA, 25 bp, Homo sapien
tgtgcccgggctggaaccctcctct

SEQ ID NO: 1960181 - DNA, 25 bp, Homo sapien
ctgggaccctcctccttgtccgcgc

SEQ ID NO: 1960182 - DNA, 25 bp, Homo sapien
ctcctccttgtccgcgcccgggctg

SEQ ID NO: 1960183 - DNA, 25 bp, Homo sapien
aactgatcccgggacctgcacttct

SEQ ID NO: 1960184 - DNA, 25 bp, Homo sapien
ggacgtggtgctgttcccatgctct

SEQ ID NO: 1960185 - DNA, 25 bp, Homo sapien
acgccgtggcctggtgatcctggcc

SEQ ID NO: 1960186 - DNA, 25 bp, Homo sapien
tgattctgaaaagacccgcccagga

SEQ ID NO: 1960187 - DNA, 25 bp, Homo sapien
tcaggtccagcccagcggccatcca

SEQ ID NO: 1960188 - DNA, 25 bp, Homo sapien
tggctgcacgtagcctcccgggggg

SEQ ID NO: 1960189 - DNA, 25 bp, Homo sapien
ccatccacacagccggcgggtacag

SEQ ID NO: 1960190 - DNA, 25 bp, Homo sapien
cagccggcgggtacagctcctcgga

SEQ ID NO: 1960191 - DNA, 25 bp, Homo sapien
ggtcgcaagtgcgaagtggactcct

SEQ ID NO: 1960192 - DNA, 25 bp, Homo sapien
cccgcgaggcacctgggtcgcaagt

SEQ ID NO: 1960193 - DNA, 25 bp, Homo sapien
agcccgcgaggcacctgggtcgcaa

SEQ ID NO: 1960194 - DNA, 25 bp, Homo sapien
agtgcgaagtggactccttttccct

SEQ ID NO: 1960195 - DNA, 25 bp, Homo sapien
agcaccgcccggagtgacactggca

SEQ ID NO: 1960196 - DNA, 25 bp, Homo sapien
gcgttccctttaagggagctgctgg

SEQ ID NO: 1960197 - DNA, 25 bp, Homo sapien
tcttgcgttccctttaagggagctg

SEQ ID NO: 1960198 - DNA, 25 bp, Homo sapien
gcccggagtgacactggcagccttt

SEQ ID NO: 1960199 - DNA, 25 bp, Homo sapien
cagagtgtgccgtctgctcaatgcc

SEQ ID NO: 1960200 - DNA, 25 bp, Homo sapien
cccacgcagcccaagtcccacgtag

SEQ ID NO: 1960201 - DNA, 25 bp, Homo sapien
cgtccacacagcctgaatcccacac

SEQ ID NO: 1960202 - DNA, 25 bp, Homo sapien
tcccacgtagcccaagtccacacag

SEQ ID NO: 1960203 - DNA, 25 bp, Homo sapien
agcccgagtccacacagcccaggtc

SEQ ID NO: 1960204 - DNA, 25 bp, Homo sapien
tttccgttcggagcctcatgggctt

SEQ ID NO: 1960205 - DNA, 25 bp, Homo sapien
cagggctgctggactccacgagagt

SEQ ID NO: 1960206 - DNA, 25 bp, Homo sapien
actccacgagagtgcgtgaatgaca

SEQ ID NO: 1960207 - DNA, 25 bp, Homo sapien
catgggctttcagccggtgaccgcc

SEQ ID NO: 1960208 - DNA, 25 bp, Homo sapien
ctgtggacacatagacaggttttct

SEQ ID NO: 1960209 - DNA, 25 bp, Homo sapien
gacacatagacaggttttctgccca

SEQ ID NO: 1960210 - DNA, 25 bp, Homo sapien
tggacacatagacaggttttctgcc

SEQ ID NO: 1960211 - DNA, 25 bp, Homo sapien
tgtggacacatagacaggttttctg

SEQ ID NO: 1960212 - DNA, 25 bp, Homo sapien
tctctcctggatctgaagcttgccg

SEQ ID NO: 1960213 - DNA, 25 bp, Homo sapien
aggaagccctgttgtttcagtgggt

SEQ ID NO: 1960214 - DNA, 25 bp, Homo sapien
gaagggcaagttctcctaacgtgaa

SEQ ID NO: 1960215 - DNA, 25 bp, Homo sapien
tctttgtgaacagcccttacctggt

SEQ ID NO: 1960216 - DNA, 25 bp, Homo sapien
taatatcgtgaagttgtcctgtccc

SEQ ID NO: 1960217 - DNA, 25 bp, Homo sapien
tggatcgcccaagtgccagttctgc

SEQ ID NO: 1960218 - DNA, 25 bp, Homo sapien
catagcaactgagtgtcccagcgca

SEQ ID NO: 1960219 - DNA, 25 bp, Homo sapien
caaaccaaggaggtctgcattttca

SEQ ID NO: 1960220 - DNA, 25 bp, Homo sapien
tttaggttttcgatgatggctgtgt

SEQ ID NO: 1960221 - DNA, 25 bp, Homo sapien
taggttttcgatgatggctgtgtac

SEQ ID NO: 1960222 - DNA, 25 bp, Homo sapien
gttttcgatgatggctgtgtactta

SEQ ID NO: 1960223 - DNA, 25 bp, Homo sapien
ggttttcgatgatggctgtgtactt

SEQ ID NO: 1960224 - DNA, 25 bp, Homo sapien
caggatgtccatacggagggtcgcc

SEQ ID NO: 1960225 - DNA, 25 bp, Homo sapien
gctgctttgctccattgtcgttcag

SEQ ID NO: 1960226 - DNA, 25 bp, Homo sapien
ttcagctcggcatcgtcaatcgtcg

SEQ ID NO: 1960227 - DNA, 25 bp, Homo sapien
caatcgtcgctctgttctcgtgaca

SEQ ID NO: 1960228 - DNA, 25 bp, Homo sapien
ttcaacatcgcctccgtcaactgtg

SEQ ID NO: 1960229 - DNA, 25 bp, Homo sapien
tcgggctgtgcattcaacatcgcct

SEQ ID NO: 1960230 - DNA, 25 bp, Homo sapien
cacactcgggctgtgcattcaacat

SEQ ID NO: 1960231 - DNA, 25 bp, Homo sapien
ggagccggccgaccacacactcggg

SEQ ID NO: 1960232 - DNA, 25 bp, Homo sapien
tctcagcaattacactggagatctc

SEQ ID NO: 1960233 - DNA, 25 bp, Homo sapien
tgttctgtaatttacgaaacccatc

SEQ ID NO: 1960234 - DNA, 25 bp, Homo sapien
tatatcccacacgaatcttgttctg

SEQ ID NO: 1960235 - DNA, 25 bp, Homo sapien
tcccctcttgtgagggcagttttga

SEQ ID NO: 1960236 - DNA, 25 bp, Homo sapien
aaaggcagcggtgcagcagcatgcc

SEQ ID NO: 1960237 - DNA, 25 bp, Homo sapien
aaggcagcggtgcagcagcatgccc

SEQ ID NO: 1960238 - DNA, 25 bp, Homo sapien
caaaggcagcggtgcagcagcatgc

SEQ ID NO: 1960239 - DNA, 25 bp, Homo sapien
aggaccaggtcgcaccttcagggtt

SEQ ID NO: 1960240 - DNA, 25 bp, Homo sapien
tcacactgtgttgggcgctgggcac

SEQ ID NO: 1960241 - DNA, 25 bp, Homo sapien
catcacactgtgttgggcgctgggc

SEQ ID NO: 1960242 - DNA, 25 bp, Homo sapien
atgaggaccaggtcgcaccttcagg

SEQ ID NO: 1960243 - DNA, 25 bp, Homo sapien
ccagaagctgaatggtgggcgccat

SEQ ID NO: 1960244 - DNA, 25 bp, Homo sapien
aactactcatcgtttgggccaccca

SEQ ID NO: 1960245 - DNA, 25 bp, Homo sapien
gacacccagggtcgtgtggacatct

SEQ ID NO: 1960246 - DNA, 25 bp, Homo sapien
gctgtgagggatcttcgtaactact

SEQ ID NO: 1960247 - DNA, 25 bp, Homo sapien
tcaccagtaacaacggcctctacgt

SEQ ID NO: 1960248 - DNA, 25 bp, Homo sapien
ggtcaccagtaacaacggcctctac

SEQ ID NO: 1960249 - DNA, 25 bp, Homo sapien
ctggtcaccagtaacaacggcctct

SEQ ID NO: 1960250 - DNA, 25 bp, Homo sapien
tggtcaccagtaacaacggcctcta

SEQ ID NO: 1960251 - DNA, 25 bp, Homo sapien
ctggactctcaatgtctccctcggg

SEQ ID NO: 1960252 - DNA, 25 bp, Homo sapien
ctgaccggcctcctttaatctaacg

SEQ ID NO: 1960253 - DNA, 25 bp, Homo sapien
cgtccaataactggactctcaatgt

SEQ ID NO: 1960254 - DNA, 25 bp, Homo sapien
tttaatctaacgtccaataactgga

SEQ ID NO: 1960255 - DNA, 25 bp, Homo sapien
gccagtaagttccaccagtaggtcc

SEQ ID NO: 1960256 - DNA, 25 bp, Homo sapien
tagaagaccttccatcgtgctgaac

SEQ ID NO: 1960257 - DNA, 25 bp, Homo sapien
ggcgtggaatccaaacaccagacgt

SEQ ID NO: 1960258 - DNA, 25 bp, Homo sapien
tacttagcagagcttgtcccgtcgc

SEQ ID NO: 1960259 - DNA, 25 bp, Homo sapien
agttgacgtcctcctcacagaacac

SEQ ID NO: 1960260 - DNA, 25 bp, Homo sapien
aggaagttgacgtcctcctcacaga

SEQ ID NO: 1960261 - DNA, 25 bp, Homo sapien
aggcagtcggctccagggaaaggca

SEQ ID NO: 1960262 - DNA, 25 bp, Homo sapien
acgggtggccaaggcagtcggctcc

SEQ ID NO: 1960263 - DNA, 25 bp, Homo sapien
gggaaaggtgccatcataatctctg

SEQ ID NO: 1960264 - DNA, 25 bp, Homo sapien
atcataatctctgtgtagagaagaa

SEQ ID NO: 1960265 - DNA, 25 bp, Homo sapien
ggaaaggtgccatcataatctctgt

SEQ ID NO: 1960266 - DNA, 25 bp, Homo sapien
atgggaaaggtgccatcataatctc

SEQ ID NO: 1960267 - DNA, 25 bp, Homo sapien
gtggagggacattcttggcacccag

SEQ ID NO: 1960268 - DNA, 25 bp, Homo sapien
tagtggagggacattcttggcaccc

SEQ ID NO: 1960269 - DNA, 25 bp, Homo sapien
tgtagtggagggacattcttggcac

SEQ ID NO: 1960270 - DNA, 25 bp, Homo sapien
ctgtagtggagggacattcttggca

SEQ ID NO: 1960271 - DNA, 25 bp, Homo sapien
actgtggcgtcgtgcaggtgaccca

SEQ ID NO: 1960272 - DNA, 25 bp, Homo sapien
gcaccgtggcgtccgtgcacgtgac

SEQ ID NO: 1960273 - DNA, 25 bp, Homo sapien
gaggggcaccgtggcgtccgtgcac

SEQ ID NO: 1960274 - DNA, 25 bp, Homo sapien
tggattaggacagcgaggggcactg

SEQ ID NO: 1960275 - DNA, 25 bp, Homo sapien
gaagagctccgaatcctctgcctgg

SEQ ID NO: 1960276 - DNA, 25 bp, Homo sapien
tctgccggagcgtgtacaccaatgt

SEQ ID NO: 1960277 - DNA, 25 bp, Homo sapien
gggaataattcaccgccaggctctg

SEQ ID NO: 1960278 - DNA, 25 bp, Homo sapien
gaaatgtccctgctttgacctcggc

SEQ ID NO: 1960279 - DNA, 25 bp, Homo sapien
gggagcgtgtacgtgagcgcggcgg

SEQ ID NO: 1960280 - DNA, 25 bp, Homo sapien
ggccctgcgggagcgtgtacgtgag

SEQ ID NO: 1960281 - DNA, 25 bp, Homo sapien
cgggccctgcgggagcgtgtacgtg

SEQ ID NO: 1960282 - DNA, 25 bp, Homo sapien
gggccctgcgggagcgtgtacgtga

SEQ ID NO: 1960283 - DNA, 25 bp, Homo sapien
cgggagcgtgtacgtgagcggggcg

SEQ ID NO: 1960284 - DNA, 25 bp, Homo sapien
gcgggagcgtgtacgtgagcggggc

SEQ ID NO: 1960285 - DNA, 25 bp, Homo sapien
gagcgtgtacgtgagcggggcgggc

SEQ ID NO: 1960286 - DNA, 25 bp, Homo sapien
gggagcgtgtacgtgagcggggcgg

SEQ ID NO: 1960287 - DNA, 25 bp, Homo sapien
cagctcggccatgagcgccggtggg

SEQ ID NO: 1960288 - DNA, 25 bp, Homo sapien
gaactgcttgaggtggacccgctct

SEQ ID NO: 1960289 - DNA, 25 bp, Homo sapien
gcttgaggtggacccgctctccagg

SEQ ID NO: 1960290 - DNA, 25 bp, Homo sapien
ccatgagcgccggtgggtgcagtgg

SEQ ID NO: 1960291 - DNA, 25 bp, Homo sapien
ccgggtgtggagaattgcgctctgc

SEQ ID NO: 1960292 - DNA, 25 bp, Homo sapien
ctgagccgggtgtggagaattgcgc

SEQ ID NO: 1960293 - DNA, 25 bp, Homo sapien
gggtgtggagaattgcgctctgctt

SEQ ID NO: 1960294 - DNA, 25 bp, Homo sapien
agccgggtgtggagaattgcgctct

SEQ ID NO: 1960295 - DNA, 25 bp, Homo sapien
gcacccccagacaccctgttcacac

SEQ ID NO: 1960296 - DNA, 25 bp, Homo sapien
agagcacccccagacaccctgttca

SEQ ID NO: 1960297 - DNA, 25 bp, Homo sapien
cgacagagcacccccagacaccctg

SEQ ID NO: 1960298 - DNA, 25 bp, Homo sapien
gacagagcacccccagacaccctgt

SEQ ID NO: 1960299 - DNA, 25 bp, Homo sapien
gccacatgcgtcctgctctggaatt

SEQ ID NO: 1960300 - DNA, 25 bp, Homo sapien
aggcagcgatgccacatgcgtcctg

SEQ ID NO: 1960301 - DNA, 25 bp, Homo sapien
catgcgtcctgctctggaattccat

SEQ ID NO: 1960302 - DNA, 25 bp, Homo sapien
agcgatgccacatgcgtcctgctct

SEQ ID NO: 1960303 - DNA, 25 bp, Homo sapien
gccacctgcggcgtttgcgcagagc

SEQ ID NO: 1960304 - DNA, 25 bp, Homo sapien
cccttggtgggtccgcagtggatca

SEQ ID NO: 1960305 - DNA, 25 bp, Homo sapien
gagattcagaagaacgggcggacgg

SEQ ID NO: 1960306 - DNA, 25 bp, Homo sapien
gacacggctgcacctgagattcaga

SEQ ID NO: 1960307 - DNA, 25 bp, Homo sapien
gctgcaaagtcagattcgggccttt

SEQ ID NO: 1960308 - DNA, 25 bp, Homo sapien
tgatgatgatcgaaagagaaaaaat

SEQ ID NO: 1960309 - DNA, 25 bp, Homo sapien
gggtaaacatcaaatggcataccag

SEQ ID NO: 1960310 - DNA, 25 bp, Homo sapien
tcttaacgcgtatgcaacattgatg

SEQ ID NO: 1960311 - DNA, 25 bp, Homo sapien
gtgaagcacagtcaggatggccaca

SEQ ID NO: 1960312 - DNA, 25 bp, Homo sapien
ccgtcagtgacaagttgtgaagcac

SEQ ID NO: 1960313 - DNA, 25 bp, Homo sapien
tcctctaaggaaagcgccgtcagtg

SEQ ID NO: 1960314 - DNA, 25 bp, Homo sapien
gttgtgaagcacagtcaggatggcc

SEQ ID NO: 1960315 - DNA, 25 bp, Homo sapien
tacagacttctcatggggtccactg

SEQ ID NO: 1960316 - DNA, 25 bp, Homo sapien
atggggtccactgtgtcttttgcta

SEQ ID NO: 1960317 - DNA, 25 bp, Homo sapien
agagtacagacttctcatggggtcc

SEQ ID NO: 1960318 - DNA, 25 bp, Homo sapien
ggtccactgtgtcttttgctaccat

SEQ ID NO: 1960319 - DNA, 25 bp, Homo sapien
tctggatgaagcgaggtgctgctct

SEQ ID NO: 1960320 - DNA, 25 bp, Homo sapien
gctctggatgaagcgacgtgctgct

SEQ ID NO: 1960321 - DNA, 25 bp, Homo sapien
gatgaagcgacgtgctgctctgaga

SEQ ID NO: 1960322 - DNA, 25 bp, Homo sapien
tctggatgaagcgacgtgctgctct

SEQ ID NO: 1960323 - DNA, 25 bp, Homo sapien
agctggagtcctgctctcgtgccct

SEQ ID NO: 1960324 - DNA, 25 bp, Homo sapien
ctgaatgagttgaagcactgctttg

SEQ ID NO: 1960325 - DNA, 25 bp, Homo sapien
ggctctgaatgagttgaagcactgc

SEQ ID NO: 1960326 - DNA, 25 bp, Homo sapien
aactggggtgctctggatgccgctc

SEQ ID NO: 1960327 - DNA, 25 bp, Homo sapien
tttctaatgggtcagacccagctgt

SEQ ID NO: 1960328 - DNA, 25 bp, Homo sapien
cttggctgatggatccaatggtgtt

SEQ ID NO: 1960329 - DNA, 25 bp, Homo sapien
tcttgtttctaatgggtcagaccca

SEQ ID NO: 1960330 - DNA, 25 bp, Homo sapien
tccaatggtgtttctctcacagtca

SEQ ID NO: 1960331 - DNA, 25 bp, Homo sapien
gggaaggctccgattcatacaaacc

SEQ ID NO: 1960332 - DNA, 25 bp, Homo sapien
tccatcagaatcattgctgatggat

SEQ ID NO: 1960333 - DNA, 25 bp, Homo sapien
gcgtctgtgatgctacagcaccggg

SEQ ID NO: 1960334 - DNA, 25 bp, Homo sapien
gattcatacaaaccctcttccactg

SEQ ID NO: 1960335 - DNA, 25 bp, Homo sapien
caccgctggggtcgcttccagagct

SEQ ID NO: 1960336 - DNA, 25 bp, Homo sapien
cccaccgctggggtcgcttccagag

SEQ ID NO: 1960337 - DNA, 25 bp, Homo sapien
cgctggggtcgcttccagagctcca

SEQ ID NO: 1960338 - DNA, 25 bp, Homo sapien
ccgctggggtcgcttccagagctcc

SEQ ID NO: 1960339 - DNA, 25 bp, Homo sapien
gctggatcccggaatttgcactctc

SEQ ID NO: 1960340 - DNA, 25 bp, Homo sapien
tgagtgctggatcccggaatttgca

SEQ ID NO: 1960341 - DNA, 25 bp, Homo sapien
gagtgctggatcccggaatttgcac

SEQ ID NO: 1960342 - DNA, 25 bp, Homo sapien
gtgctggatcccggaatttgcactc

SEQ ID NO: 1960343 - DNA, 25 bp, Homo sapien
tcccaggccttctcaagccgcctca

SEQ ID NO: 1960344 - DNA, 25 bp, Homo sapien
ttcccaggccttctcaagccgcctc

SEQ ID NO: 1960345 - DNA, 25 bp, Homo sapien
cccaggccttctcaagccgcctcac

SEQ ID NO: 1960346 - DNA, 25 bp, Homo sapien
cttcacgtctgatgtgggtcgaggt

SEQ ID NO: 1960347 - DNA, 25 bp, Homo sapien
ccaggcggcttcacgtctgatgtgg

SEQ ID NO: 1960348 - DNA, 25 bp, Homo sapien
cggcttcacgtctgatgtgggtcga

SEQ ID NO: 1960349 - DNA, 25 bp, Homo sapien
ctgatgtgggtcgaggtgcagctcc

SEQ ID NO: 1960350 - DNA, 25 bp, Homo sapien
cagcagcgacagctctcgggctctg

SEQ ID NO: 1960351 - DNA, 25 bp, Homo sapien
agcagcgacagctctcgggctctga

SEQ ID NO: 1960352 - DNA, 25 bp, Homo sapien
tcagcagcgacagctctcgggctct

SEQ ID NO: 1960353 - DNA, 25 bp, Homo sapien
gaagccggagccacgggtgtctcac

SEQ ID NO: 1960354 - DNA, 25 bp, Homo sapien
taagaagccggagccacgggtgtct

SEQ ID NO: 1960355 - DNA, 25 bp, Homo sapien
ctaagaagccggagccacgggtgtc

SEQ ID NO: 1960356 - DNA, 25 bp, Homo sapien
agaagccggagccacgggtgtctca

SEQ ID NO: 1960357 - DNA, 25 bp, Homo sapien
cctgcggctcgcagcttcttctcag

SEQ ID NO: 1960358 - DNA, 25 bp, Homo sapien
gagcacggcaatggcccctgcggct

SEQ ID NO: 1960359 - DNA, 25 bp, Homo sapien
ttttcctgagagcacggcaatggcc

SEQ ID NO: 1960360 - DNA, 25 bp, Homo sapien
gttgcagttttcctgagagcacggc

SEQ ID NO: 1960361 - DNA, 25 bp, Homo sapien
ccgttcctcggaattccacagcctc

SEQ ID NO: 1960362 - DNA, 25 bp, Homo sapien
ctgcccgttcctcggaattccacag

SEQ ID NO: 1960363 - DNA, 25 bp, Homo sapien
gcccgttcctcggaattccacagcc

SEQ ID NO: 1960364 - DNA, 25 bp, Homo sapien
gttcctcggaattccacagcctcgc

SEQ ID NO: 1960365 - DNA, 25 bp, Homo sapien
tggaggaagcgggagtcgcgacgtc

SEQ ID NO: 1960366 - DNA, 25 bp, Homo sapien
ccggggccggagtgtcgcctggctc

SEQ ID NO: 1960367 - DNA, 25 bp, Homo sapien
agcgggagtcgcgacgtccccatga

SEQ ID NO: 1960368 - DNA, 25 bp, Homo sapien
gagtcgcgacgtccccatgaggctc

SEQ ID NO: 1960369 - DNA, 25 bp, Homo sapien
tgatcagaaacacagccggacgttc

SEQ ID NO: 1960370 - DNA, 25 bp, Homo sapien
gacataacaggagattcagggcctt

SEQ ID NO: 1960371 - DNA, 25 bp, Homo sapien
cacgtctgatgtttgggagcgccct

SEQ ID NO: 1960372 - DNA, 25 bp, Homo sapien
tcagggccttcggtctcgtgtgcag

SEQ ID NO: 1960373 - DNA, 25 bp, Homo sapien
tgtctcccttagctctgaaatggtg

SEQ ID NO: 1960374 - DNA, 25 bp, Homo sapien
tggacggatgcgctagtctgctgct

SEQ ID NO: 1960375 - DNA, 25 bp, Homo sapien
gaaatggtgtcgttctggtcatggt

SEQ ID NO: 1960376 - DNA, 25 bp, Homo sapien
catggttgagggaaggttggacgga

SEQ ID NO: 1960377 - DNA, 25 bp, Homo sapien
ctctgcctattgcagtaggaagctg

SEQ ID NO: 1960378 - DNA, 25 bp, Homo sapien
cagtaggaagctgagtggcatcaaa

SEQ ID NO: 1960379 - DNA, 25 bp, Homo sapien
tggcatcaaagtcttgagacaccat

SEQ ID NO: 1960380 - DNA, 25 bp, Homo sapien
aaagttctctgcctattgcagtagg

SEQ ID NO: 1960381 - DNA, 25 bp, Homo sapien
aggcaggaaaaggtgcctaggatct

SEQ ID NO: 1960382 - DNA, 25 bp, Homo sapien
cctaggatcttcagtcccagggaac

SEQ ID NO: 1960383 - DNA, 25 bp, Homo sapien
agtcacaattaaagtcaccgtgcaa

SEQ ID NO: 1960384 - DNA, 25 bp, Homo sapien
gcaggaaaaggtgcctaggatcttc

SEQ ID NO: 1960385 - DNA, 25 bp, Homo sapien
cagaggtggcaaaccatgaagacca

SEQ ID NO: 1960386 - DNA, 25 bp, Homo sapien
gaatgggaccagatgcttaggagct

SEQ ID NO: 1960387 - DNA, 25 bp, Homo sapien
gctaatgtcctcctgagtccacgga

SEQ ID NO: 1960388 - DNA, 25 bp, Homo sapien
tcagtggtgccgtgcgctaatgtcc

SEQ ID NO: 1960389 - DNA, 25 bp, Homo sapien
tataacgggcatgatggcagtccca

SEQ ID NO: 1960390 - DNA, 25 bp, Homo sapien
tggcagtcccacctcgcagggctgg

SEQ ID NO: 1960391 - DNA, 25 bp, Homo sapien
ccttgtctgtataacgggcatgatg

SEQ ID NO: 1960392 - DNA, 25 bp, Homo sapien
gcagggctggcatctacattaaatg

SEQ ID NO: 1960393 - DNA, 25 bp, Homo sapien
tccatcagcataacaccgttccctc

SEQ ID NO: 1960394 - DNA, 25 bp, Homo sapien
aaggagcttatgcaaaccactgcct

SEQ ID NO: 1960395 - DNA, 25 bp, Homo sapien
ctgggaagggcgtctggaaggagct

SEQ ID NO: 1960396 - DNA, 25 bp, Homo sapien
gcataacaccgttccctccactggg

SEQ ID NO: 1960397 - DNA, 25 bp, Homo sapien
gaacaggttaaaagtcggcagaaca

SEQ ID NO: 1960398 - DNA, 25 bp, Homo sapien
ctgaacaggttaaaagtcggcagaa

SEQ ID NO: 1960399 - DNA, 25 bp, Homo sapien
tgaacaggttaaaagtcggcagaac

SEQ ID NO: 1960400 - DNA, 25 bp, Homo sapien
gttaagtgtattgtacagttgaccc

SEQ ID NO: 1960401 - DNA, 25 bp, Homo sapien
ctgatgtcactttgtaaggagtgat

SEQ ID NO: 1960402 - DNA, 25 bp, Homo sapien
gcagacctggcacaaacatctgagg

SEQ ID NO: 1960403 - DNA, 25 bp, Homo sapien
catctgaggataactttcaactccc

SEQ ID NO: 1960404 - DNA, 25 bp, Homo sapien
gtgcccaattcctgatggagccatg

SEQ ID NO: 1960405 - DNA, 25 bp, Homo sapien
aatttggtgttcgtggcccactggc

SEQ ID NO: 1960406 - DNA, 25 bp, Homo sapien
tgcacaggccgttctgggactgcgt

SEQ ID NO: 1960407 - DNA, 25 bp, Homo sapien
ggttgctttccttaacaccgtgtgc

SEQ ID NO: 1960408 - DNA, 25 bp, Homo sapien
ctcgggcacgagttctctctggcat

SEQ ID NO: 1960409 - DNA, 25 bp, Homo sapien
cgtgtgctccctcgggcacgagttc

SEQ ID NO: 1960410 - DNA, 25 bp, Homo sapien
tccctcgggcacgagttctctctgg

SEQ ID NO: 1960411 - DNA, 25 bp, Homo sapien
agggcgtgtgctccctcgggcacga

SEQ ID NO: 1960412 - DNA, 25 bp, Homo sapien
tcttcactgttgaggggaccccctc

SEQ ID NO: 1960413 - DNA, 25 bp, Homo sapien
gggtctcagcccgaggcgtcgtctt

SEQ ID NO: 1960414 - DNA, 25 bp, Homo sapien
tctgagcgacaccatcctcgccgtg

SEQ ID NO: 1960415 - DNA, 25 bp, Homo sapien
gggcactgcgtggacgaggtggacg

SEQ ID NO: 1960416 - DNA, 25 bp, Homo sapien
cggcccgcagattgacaggcacact

SEQ ID NO: 1960417 - DNA, 25 bp, Homo sapien
tcctgcggcccgcagattgacaggc

SEQ ID NO: 1960418 - DNA, 25 bp, Homo sapien
tgcggcccgcagattgacaggcaca

SEQ ID NO: 1960419 - DNA, 25 bp, Homo sapien
gcccgcagattgacaggcacactca

SEQ ID NO: 1960420 - DNA, 25 bp, Homo sapien
ccctgaacgcgatgttcatttcctg

SEQ ID NO: 1960421 - DNA, 25 bp, Homo sapien
gctgcgtggtccctgaacgcgatgt

SEQ ID NO: 1960422 - DNA, 25 bp, Homo sapien
gcgatgttcatttcctgcccgcatc

SEQ ID NO: 1960423 - DNA, 25 bp, Homo sapien
ctgcccgcatctccgggtgctggga

SEQ ID NO: 1960424 - DNA, 25 bp, Homo sapien
cgcagaggctggagtagcctctgcc

SEQ ID NO: 1960425 - DNA, 25 bp, Homo sapien
gaggctggagtagcctctgcccaca

SEQ ID NO: 1960426 - DNA, 25 bp, Homo sapien
tggagtagcctctgcccacacacgt

SEQ ID NO: 1960427 - DNA, 25 bp, Homo sapien
ggagtagcctctgcccacacacgtg

SEQ ID NO: 1960428 - DNA, 25 bp, Homo sapien
gcctgtctgcatgggaaatgcttta

SEQ ID NO: 1960429 - DNA, 25 bp, Homo sapien
gccttgctaagatcgccagtggctg

SEQ ID NO: 1960430 - DNA, 25 bp, Homo sapien
aatagcggaatctctccacatggcc

SEQ ID NO: 1960431 - DNA, 25 bp, Homo sapien
atacacatgtcccagccttgctaag

SEQ ID NO: 1960432 - DNA, 25 bp, Homo sapien
actggctctatctggtcccgcagca

SEQ ID NO: 1960433 - DNA, 25 bp, Homo sapien
ctggactggctctatctggtcccgc

SEQ ID NO: 1960434 - DNA, 25 bp, Homo sapien
ctggctctatctggtcccgcagcat

SEQ ID NO: 1960435 - DNA, 25 bp, Homo sapien
ggactggctctatctggtcccgcag

SEQ ID NO: 1960436 - DNA, 25 bp, Homo sapien
tttgtccagtgagaacaactggtcc

SEQ ID NO: 1960437 - DNA, 25 bp, Homo sapien
ttgtccagtgagaacaactggtcct

SEQ ID NO: 1960438 - DNA, 25 bp, Homo sapien
tgtccagtgagaacaactggtcctt

SEQ ID NO: 1960439 - DNA, 25 bp, Homo sapien
atttgtccagtgagaacaactggtc

SEQ ID NO: 1960440 - DNA, 25 bp, Homo sapien
ggcacgtcagaaaccatgctcctct

SEQ ID NO: 1960441 - DNA, 25 bp, Homo sapien
cagaggtgccatttggagatacagc

SEQ ID NO: 1960442 - DNA, 25 bp, Homo sapien
ttctctgagtgtcagaggtgccatt

SEQ ID NO: 1960443 - DNA, 25 bp, Homo sapien
tcccacactgtgaggatgggcacgt

SEQ ID NO: 1960444 - DNA, 25 bp, Homo sapien
cctgatgtggctcccgtgtctgagc

SEQ ID NO: 1960445 - DNA, 25 bp, Homo sapien
tgagccttgctggaattcttccctc

SEQ ID NO: 1960446 - DNA, 25 bp, Homo sapien
caggccctgatgtggctcccgtgtc

SEQ ID NO: 1960447 - DNA, 25 bp, Homo sapien
ccttgctggaattcttccctctgct

SEQ ID NO: 1960448 - DNA, 25 bp, Homo sapien
caggcggccggccactcacatgcac

SEQ ID NO: 1960449 - DNA, 25 bp, Homo sapien
tcacatgcacctgtccagcttgttc

SEQ ID NO: 1960450 - DNA, 25 bp, Homo sapien
ccacacatccttcaggacggcttcc

SEQ ID NO: 1960451 - DNA, 25 bp, Homo sapien
ccactcacatgcacctgtccagctt

SEQ ID NO: 1960452 - DNA, 25 bp, Homo sapien
agcagtgctgggttcgtgatctcca

SEQ ID NO: 1960453 - DNA, 25 bp, Homo sapien
gcagtgctgggttcgtgatctccat

SEQ ID NO: 1960454 - DNA, 25 bp, Homo sapien
gccgagacgacgggcctccgtcggc

SEQ ID NO: 1960455 - DNA, 25 bp, Homo sapien
gccgacggaggcccgtcgtctcggc

SEQ ID NO: 1960456 - DNA, 25 bp, Homo sapien
agcagtgctgggttcgtgatctcca

SEQ ID NO: 1960457 - DNA, 25 bp, Homo sapien
gcagtgctgggttcgtgatctccat

SEQ ID NO: 1960458 - DNA, 25 bp, Homo sapien
ggacacaggtgaagtgagcgtttca

SEQ ID NO: 1960459 - DNA, 25 bp, Homo sapien
caagaaccggtgtctgtggagcatc

SEQ ID NO: 1960460 - DNA, 25 bp, Homo sapien
ggagcatcccgagatgccgctgcac

SEQ ID NO: 1960461 - DNA, 25 bp, Homo sapien
gagcgtttcactcagcgcttgcctt

SEQ ID NO: 1960462 - DNA, 25 bp, Homo sapien
gggactatgggctctcgacgcagca

SEQ ID NO: 1960463 - DNA, 25 bp, Homo sapien
gtgacatcgtctcctgcagggacta

SEQ ID NO: 1960464 - DNA, 25 bp, Homo sapien
atgggctctcgacgcagcaggcaca

SEQ ID NO: 1960465 - DNA, 25 bp, Homo sapien
tcctgcagggactatgggctctcga

SEQ ID NO: 1960466 - DNA, 25 bp, Homo sapien
tggtactcctgaaagcgcccttctt

SEQ ID NO: 1960467 - DNA, 25 bp, Homo sapien
aaccaccgtggtactcctgaaagcg

SEQ ID NO: 1960468 - DNA, 25 bp, Homo sapien
tcccgtttgccgctgactcaggcag

SEQ ID NO: 1960469 - DNA, 25 bp, Homo sapien
ctgactcaggcaggaaaccaccgtg

SEQ ID NO: 1960470 - DNA, 25 bp, Homo sapien
tctgcctggagtcggaaggtctcca

SEQ ID NO: 1960471 - DNA, 25 bp, Homo sapien
cagtgaggccagtccggacagaggg

SEQ ID NO: 1960472 - DNA, 25 bp, Homo sapien
cctggagtcggaaggtctccacagc

SEQ ID NO: 1960473 - DNA, 25 bp, Homo sapien
cagctgtcccttgtgtagccagtgc

SEQ ID NO: 1960474 - DNA, 25 bp, Homo sapien
cagtcatggtcactgtgctccggca

SEQ ID NO: 1960475 - DNA, 25 bp, Homo sapien
gctctcaaggttccggacacacggg

SEQ ID NO: 1960476 - DNA, 25 bp, Homo sapien
gttccggacacacgggctctgtgct

SEQ ID NO: 1960477 - DNA, 25 bp, Homo sapien
aggccgttgtccagctcgctctcaa

SEQ ID NO: 1960478 - DNA, 25 bp, Homo sapien
agtcactgccttcaggtcttcagat

SEQ ID NO: 1960479 - DNA, 25 bp, Homo sapien
gcagtcactgccttcaggtcttcag

SEQ ID NO: 1960480 - DNA, 25 bp, Homo sapien
tcactgccttcaggtcttcagatcc

SEQ ID NO: 1960481 - DNA, 25 bp, Homo sapien
ctgaggttggcagtcactgccttca

SEQ ID NO: 1960482 - DNA, 25 bp, Homo sapien
ccctttgagtcagggaaccgcagac

SEQ ID NO: 1960483 - DNA, 25 bp, Homo sapien
accctttgagtcagggaaccgcaga

SEQ ID NO: 1960484 - DNA, 25 bp, Homo sapien
caccctttgagtcagggaaccgcag

SEQ ID NO: 1960485 - DNA, 25 bp, Homo sapien
gctcacccgagtggctgcacggatg

SEQ ID NO: 1960486 - DNA, 25 bp, Homo sapien
cgagtggctgcacggatgcacagaa

SEQ ID NO: 1960487 - DNA, 25 bp, Homo sapien
gctgcacggatgcacagaagcccct

SEQ ID NO: 1960488 - DNA, 25 bp, Homo sapien
gggcatcgccgcagaggaggctcct

SEQ ID NO: 1960489 - DNA, 25 bp, Homo sapien
ctgctgcgtgagaactgcttgctgc

SEQ ID NO: 1960490 - DNA, 25 bp, Homo sapien
tgctgcgtgagaactgcttgctgct

SEQ ID NO: 1960491 - DNA, 25 bp, Homo sapien
ctggaagtgagttgtggcgtccaca

SEQ ID NO: 1960492 - DNA, 25 bp, Homo sapien
tgtgccagggtggccgcggccttct

SEQ ID NO: 1960493 - DNA, 25 bp, Homo sapien
gtggccgcggccttcttgggagcag

SEQ ID NO: 1960494 - DNA, 25 bp, Homo sapien
ggcgtccacaggacagctgaagtcc

SEQ ID NO: 1960495 - DNA, 25 bp, Homo sapien
tgctttcagcgagagggtgggcaga

SEQ ID NO: 1960496 - DNA, 25 bp, Homo sapien
gcacacagggctcccgctcagagag

SEQ ID NO: 1960497 - DNA, 25 bp, Homo sapien
gggaatgctttcagcgagagggtgg

SEQ ID NO: 1960498 - DNA, 25 bp, Homo sapien
ggctcccgctcagagaggagctcag

SEQ ID NO: 1960499 - DNA, 25 bp, Homo sapien
tgggatgtcagcataggaaagcgtt

SEQ ID NO: 1960500 - DNA, 25 bp, Homo sapien
ggaaagcgtttctcagactcgctgc

SEQ ID NO: 1960501 - DNA, 25 bp, Homo sapien
aagcgtttctcagactcgctgctac

SEQ ID NO: 1960502 - DNA, 25 bp, Homo sapien
cataggaaagcgtttctcagactcg

SEQ ID NO: 1960503 - DNA, 25 bp, Homo sapien
caggaggcatcctgcataagcaggt

SEQ ID NO: 1960504 - DNA, 25 bp, Homo sapien
gctttcggctcctgctgtgtgttca

SEQ ID NO: 1960505 - DNA, 25 bp, Homo sapien
aagccacaacccatcgcaagtcaag

SEQ ID NO: 1960506 - DNA, 25 bp, Homo sapien
ccagcaagacaagtgttgggctcca

SEQ ID NO: 1960507 - DNA, 25 bp, Homo sapien
tgttaagaagttaccagtgtccaaa

SEQ ID NO: 1960508 - DNA, 25 bp, Homo sapien
gaaggcagttcctagacacatggga

SEQ ID NO: 1960509 - DNA, 25 bp, Homo sapien
gggaaatttccctcaccaaagagca

SEQ ID NO: 1960510 - DNA, 25 bp, Homo sapien
gatgagcgacacacacctctgaata

SEQ ID NO: 1960511 - DNA, 25 bp, Homo sapien
aaggtacagccggatacgtggtgcc

SEQ ID NO: 1960512 - DNA, 25 bp, Homo sapien
gaaattcatccgagtggcactggca

SEQ ID NO: 1960513 - DNA, 25 bp, Homo sapien
aaatcccctgagacatgccttgtag

SEQ ID NO: 1960514 - DNA, 25 bp, Homo sapien
cttgtggagcatcgcgtaaggcttc

SEQ ID NO: 1960515 - DNA, 25 bp, Homo sapien
caaatgcggaatgaatgctcactga

SEQ ID NO: 1960516 - DNA, 25 bp, Homo sapien
gctcttccaaaatcgtcacgtcctg

SEQ ID NO: 1960517 - DNA, 25 bp, Homo sapien
gcaaaacctgaagcacggcttgaat

SEQ ID NO: 1960518 - DNA, 25 bp, Homo sapien
ggttagcgtcaatcttgcatgcaaa

SEQ ID NO: 1960519 - DNA, 25 bp, Homo sapien
gcttccaggacacctttgtgaccct

SEQ ID NO: 1960520 - DNA, 25 bp, Homo sapien
ccttggccgccctgagatgaactcc

SEQ ID NO: 1960521 - DNA, 25 bp, Homo sapien
gcagcttccaggacacctttgtgac

SEQ ID NO: 1960522 - DNA, 25 bp, Homo sapien
ctttgtgacccttggccgccctgag

SEQ ID NO: 1960523 - DNA, 25 bp, Homo sapien
gtcaatggcagtctcatataaaact

SEQ ID NO: 1960524 - DNA, 25 bp, Homo sapien
caatggcagtctcatataaaactgt

SEQ ID NO: 1960525 - DNA, 25 bp, Homo sapien
taaaactgtttcatagcttacaaaa

SEQ ID NO: 1960526 - DNA, 25 bp, Homo sapien
tcagtcaatggcagtctcatataaa

SEQ ID NO: 1960527 - DNA, 25 bp, Homo sapien
acaaacctcaatggcttgcattgtc

SEQ ID NO: 1960528 - DNA, 25 bp, Homo sapien
gacaaacctcaatggcttgcattgt

SEQ ID NO: 1960529 - DNA, 25 bp, Homo sapien
ctgttgatgacagacaaacctcaat

SEQ ID NO: 1960530 - DNA, 25 bp, Homo sapien
gctttagtgttgccataggagctgg

SEQ ID NO: 1960531 - DNA, 25 bp, Homo sapien
cagctttagtgttgccataggagct

SEQ ID NO: 1960532 - DNA, 25 bp, Homo sapien
ctttagtgttgccataggagctggc

SEQ ID NO: 1960533 - DNA, 25 bp, Homo sapien
agctttagtgttgccataggagctg

SEQ ID NO: 1960534 - DNA, 25 bp, Homo sapien
cttctccccagcatagccgatgtgg

SEQ ID NO: 1960535 - DNA, 25 bp, Homo sapien
tggccctgctcaacggcctcgtgtc

SEQ ID NO: 1960536 - DNA, 25 bp, Homo sapien
atcaggagggcgcgctcacttggat

SEQ ID NO: 1960537 - DNA, 25 bp, Homo sapien
tagccgatgtggcatggcttccgtg

SEQ ID NO: 1960538 - DNA, 25 bp, Homo sapien
tttggagcccaccatacagtgactc

SEQ ID NO: 1960539 - DNA, 25 bp, Homo sapien
caaagcttgaggagaactcggtccg

SEQ ID NO: 1960540 - DNA, 25 bp, Homo sapien
cacagactgttgctggtgccagaga

SEQ ID NO: 1960541 - DNA, 25 bp, Homo sapien
cagctgcgctgcgatgatccgcttc

SEQ ID NO: 1960542 - DNA, 25 bp, Homo sapien
ttggagaccagaagtggcccgaacc

SEQ ID NO: 1960543 - DNA, 25 bp, Homo sapien
cattatgcatttggagaccagaagt

SEQ ID NO: 1960544 - DNA, 25 bp, Homo sapien
ggagctcccatgtcaacctggaatc

SEQ ID NO: 1960545 - DNA, 25 bp, Homo sapien
gaagtggcccgaaccccacagggca

SEQ ID NO: 1960546 - DNA, 25 bp, Homo sapien
gggcagatacggagtcctctagcaa

SEQ ID NO: 1960547 - DNA, 25 bp, Homo sapien
atacggagtcctctagcaagcagca

SEQ ID NO: 1960548 - DNA, 25 bp, Homo sapien
agcgccccagggcagatacggagtc

SEQ ID NO: 1960549 - DNA, 25 bp, Homo sapien
cccagggcagatacggagtcctcta

SEQ ID NO: 1960550 - DNA, 25 bp, Homo sapien
cgggcacggagtcctctggtatgaa

SEQ ID NO: 1960551 - DNA, 25 bp, Homo sapien
gcacagagtcctccagtacgcagag

SEQ ID NO: 1960552 - DNA, 25 bp, Homo sapien
gcacggagtcctctctagcacgcag

SEQ ID NO: 1960553 - DNA, 25 bp, Homo sapien
tggtatgaaacacacgctctgagct

SEQ ID NO: 1960554 - DNA, 25 bp, Homo sapien
ttagtcattgagttgaggatattta

SEQ ID NO: 1960555 - DNA, 25 bp, Homo sapien
gagccaccggcgttttgctgtcccg

SEQ ID NO: 1960556 - DNA, 25 bp, Homo sapien
tcgggagatgctgcccgttgactcc

SEQ ID NO: 1960557 - DNA, 25 bp, Homo sapien
tcctgcgtgttcttggttgctctgg

SEQ ID NO: 1960558 - DNA, 25 bp, Homo sapien
tcctcaacagatgaggagccaccgg

SEQ ID NO: 1960559 - DNA, 25 bp, Homo sapien
gaaggtacttgttagagcttcctct

SEQ ID NO: 1960560 - DNA, 25 bp, Homo sapien
agatctgtcatctcgcaaggcccct

SEQ ID NO: 1960561 - DNA, 25 bp, Homo sapien
tctgtcatctcgcaaggcccctgtc

SEQ ID NO: 1960562 - DNA, 25 bp, Homo sapien
tgtcatctcgcaaggcccctgtcac

SEQ ID NO: 1960563 - DNA, 25 bp, Homo sapien
gatctgtcatctcgcaaggcccctg

SEQ ID NO: 1960564 - DNA, 25 bp, Homo sapien
gaggtttgtggcctttgcacctgga

SEQ ID NO: 1960565 - DNA, 25 bp, Homo sapien
agacagcctcggaagtctggaggtc

SEQ ID NO: 1960566 - DNA, 25 bp, Homo sapien
agatgagctgacacagcatgccagg

SEQ ID NO: 1960567 - DNA, 25 bp, Homo sapien
ctctgagatgagctgacacagcatg

SEQ ID NO: 1960568 - DNA, 25 bp, Homo sapien
ggctggcatctcctgtgtctgccat

SEQ ID NO: 1960569 - DNA, 25 bp, Homo sapien
gctgctgtctgaaggcgcagggctg

SEQ ID NO: 1960570 - DNA, 25 bp, Homo sapien
ttccaggtcccgtcgagctgggctg

SEQ ID NO: 1960571 - DNA, 25 bp, Homo sapien
tgctcttccaggtcccgtcgagctg

SEQ ID NO: 1960572 - DNA, 25 bp, Homo sapien
gaatgccagatgtctcggaggccag

SEQ ID NO: 1960573 - DNA, 25 bp, Homo sapien
cctgtgaccgttgctccgaaggaga

SEQ ID NO: 1960574 - DNA, 25 bp, Homo sapien
tggcgggcagttcacaatcagcaca

SEQ ID NO: 1960575 - DNA, 25 bp, Homo sapien
taagagctcacaacagaatcacgtg

SEQ ID NO: 1960576 - DNA, 25 bp, Homo sapien
tttgtcatgtgttgaaagttataga

SEQ ID NO: 1960577 - DNA, 25 bp, Homo sapien
gtgaagccggtgtttggtatcctga

SEQ ID NO: 1960578 - DNA, 25 bp, Homo sapien
atagtcatagttatccaattttgtc

SEQ ID NO: 1960579 - DNA, 25 bp, Homo sapien
ctgattatcctgattatagtcatag

SEQ ID NO: 1960580 - DNA, 25 bp, Homo sapien
tctatcagagacaccaacgcagagg

SEQ ID NO: 1960581 - DNA, 25 bp, Homo sapien
ccaagggagagacgtgatgctgccc

SEQ ID NO: 1960582 - DNA, 25 bp, Homo sapien
ggtcaccacacagagcgccgtctgt

SEQ ID NO: 1960583 - DNA, 25 bp, Homo sapien
tactctgccctgactatcgtttctg

SEQ ID NO: 1960584 - DNA, 25 bp, Homo sapien
acagatccccgcgagggcctgggaa

SEQ ID NO: 1960585 - DNA, 25 bp, Homo sapien
gaacctgctgtagggatctggaagc

SEQ ID NO: 1960586 - DNA, 25 bp, Homo sapien
gaacgtgtccaccagggcggcagcc

SEQ ID NO: 1960587 - DNA, 25 bp, Homo sapien
gaagcagtttctgggcccctgctga

SEQ ID NO: 1960588 - DNA, 25 bp, Homo sapien
gccggataaacactgctctgaaaca

SEQ ID NO: 1960589 - DNA, 25 bp, Homo sapien
ggccggataaacactgctctgaaac

SEQ ID NO: 1960590 - DNA, 25 bp, Homo sapien
cggataaacactgctctgaaacact

SEQ ID NO: 1960591 - DNA, 25 bp, Homo sapien
ccggataaacactgctctgaaacac

SEQ ID NO: 1960592 - DNA, 25 bp, Homo sapien
tgttttcaggcacgcgagtcacggt

SEQ ID NO: 1960593 - DNA, 25 bp, Homo sapien
gctcacagatgggacgtttgcttcc

SEQ ID NO: 1960594 - DNA, 25 bp, Homo sapien
agggtcattgccaggctgccactgc

SEQ ID NO: 1960595 - DNA, 25 bp, Homo sapien
ctctccagtgcacgccttcggtgtt

SEQ ID NO: 1960596 - DNA, 25 bp, Homo sapien
tatgcaacgaggtacgaagccacga

SEQ ID NO: 1960597 - DNA, 25 bp, Homo sapien
tgaagaacgcgtgccccaaagccag

SEQ ID NO: 1960598 - DNA, 25 bp, Homo sapien
aggtacgaagccacgaaggtgaaga

SEQ ID NO: 1960599 - DNA, 25 bp, Homo sapien
cacgaaggtgaagaacgcgtgcccc

SEQ ID NO: 1960600 - DNA, 25 bp, Homo sapien
ctcgaaggcctttgtgtcgtttggg

SEQ ID NO: 1960601 - DNA, 25 bp, Homo sapien
acacggacggctggatccgctcctg

SEQ ID NO: 1960602 - DNA, 25 bp, Homo sapien
ggacacggacggctggatccgctcc

SEQ ID NO: 1960603 - DNA, 25 bp, Homo sapien
tgcagggacacggacggctggatcc

SEQ ID NO: 1960604 - DNA, 25 bp, Homo sapien
ctcatcacatagaagagccaaatcc

SEQ ID NO: 1960605 - DNA, 25 bp, Homo sapien
tcatcacatagaagagccaaatcca

SEQ ID NO: 1960606 - DNA, 25 bp, Homo sapien
catcacatagaagagccaaatccat

SEQ ID NO: 1960607 - DNA, 25 bp, Homo sapien
ttttctgacccagatatcacagctc

SEQ ID NO: 1960608 - DNA, 25 bp, Homo sapien
ccggttatgaccacagggaacaggc

SEQ ID NO: 1960609 - DNA, 25 bp, Homo sapien
ttagatggccggttatgaccacagg

SEQ ID NO: 1960610 - DNA, 25 bp, Homo sapien
cacagctcttagatggccggttatg

SEQ ID NO: 1960611 - DNA, 25 bp, Homo sapien
atgtcaccaaattccatgctgggag

SEQ ID NO: 1960612 - DNA, 25 bp, Homo sapien
tcaagccctcagagtgatgtcacca

SEQ ID NO: 1960613 - DNA, 25 bp, Homo sapien
caagccctcagagtgatgtcaccaa

SEQ ID NO: 1960614 - DNA, 25 bp, Homo sapien
ccaaattccatgctgggaggaaacg

SEQ ID NO: 1960615 - DNA, 25 bp, Homo sapien
gaatggtgaagtcttgctgcagcag

SEQ ID NO: 1960616 - DNA, 25 bp, Homo sapien
cagggaaaaatcgaacactgcatat

SEQ ID NO: 1960617 - DNA, 25 bp, Homo sapien
tatcgattaagtgtagcagggaaaa

SEQ ID NO: 1960618 - DNA, 25 bp, Homo sapien
gtatcctctccgttttcccaagtga

SEQ ID NO: 1960619 - DNA, 25 bp, Homo sapien
ttattcacgtgcaccggcggaagcg

SEQ ID NO: 1960620 - DNA, 25 bp, Homo sapien
aagctctgccactcaaggtgtttgg

SEQ ID NO: 1960621 - DNA, 25 bp, Homo sapien
cagacgaggccgtcatgaaacggct

SEQ ID NO: 1960622 - DNA, 25 bp, Homo sapien
aaacggctgcgcagatgttcagctg

SEQ ID NO: 1960623 - DNA, 25 bp, Homo sapien
ctctctagatggacagctggcaatt

SEQ ID NO: 1960624 - DNA, 25 bp, Homo sapien
gaagtcgggtcagggcgttctgctc

SEQ ID NO: 1960625 - DNA, 25 bp, Homo sapien
ggcgtggacgtcacgttgagtccat

SEQ ID NO: 1960626 - DNA, 25 bp, Homo sapien
ttgagtccattgagacgcaggcctg

SEQ ID NO: 1960627 - DNA, 25 bp, Homo sapien
gggcctctaagtcccgtatcgagtg

SEQ ID NO: 1960628 - DNA, 25 bp, Homo sapien
taagtcccgtatcgagtggccggcg

SEQ ID NO: 1960629 - DNA, 25 bp, Homo sapien
cctctaagtcccgtatcgagtggcc

SEQ ID NO: 1960630 - DNA, 25 bp, Homo sapien
cccgtatcgagtggccggcgccatg

SEQ ID NO: 1960631 - DNA, 25 bp, Homo sapien
gcccatagaagaagcttgtctccct

SEQ ID NO: 1960632 - DNA, 25 bp, Homo sapien
gggtgggtaactgtccagaaacatg

SEQ ID NO: 1960633 - DNA, 25 bp, Homo sapien
aactgtccagaaacatgtgcacatg

SEQ ID NO: 1960634 - DNA, 25 bp, Homo sapien
tcagcccatagaagaagcttgtctc

SEQ ID NO: 1960635 - DNA, 25 bp, Homo sapien
ctttgtgggcagaggtggcacgggc

SEQ ID NO: 1960636 - DNA, 25 bp, Homo sapien
ggaaattttggttgaagataagcgc

SEQ ID NO: 1960637 - DNA, 25 bp, Homo sapien
ctggaaattttggttgaagataagc

SEQ ID NO: 1960638 - DNA, 25 bp, Homo sapien
aaattttggttgaagataagcgcct

SEQ ID NO: 1960639 - DNA, 25 bp, Homo sapien
ttttggttgaagataagcgccttgt

SEQ ID NO: 1960640 - DNA, 25 bp, Homo sapien
tttgaggaatgctccctgcgaccag

SEQ ID NO: 1960641 - DNA, 25 bp, Homo sapien
gatgctgaatcccattcgccccggt

SEQ ID NO: 1960642 - DNA, 25 bp, Homo sapien
cggtcatttccggagcgtcttccag

SEQ ID NO: 1960643 - DNA, 25 bp, Homo sapien
tccgccggccacgtttgcagggagc

SEQ ID NO: 1960644 - DNA, 25 bp, Homo sapien
aacaatggtgatggagcgtgttagg

SEQ ID NO: 1960645 - DNA, 25 bp, Homo sapien
tgacggagcgtgttaggaggtgctg

SEQ ID NO: 1960646 - DNA, 25 bp, Homo sapien
acaatggtgatggagcgtgttagga

SEQ ID NO: 1960647 - DNA, 25 bp, Homo sapien
tgaacaatggtgatggagcgtgtta

SEQ ID NO: 1960648 - DNA, 25 bp, Homo sapien
tctctcttcacacgtgtggattgta

SEQ ID NO: 1960649 - DNA, 25 bp, Homo sapien
caattaccgaggaaaggtttgctgc

SEQ ID NO: 1960650 - DNA, 25 bp, Homo sapien
accatggtccgtgttggaattctca

SEQ ID NO: 1960651 - DNA, 25 bp, Homo sapien
tctcacagggaacaaacgaaccgtc

SEQ ID NO: 1960652 - DNA, 25 bp, Homo sapien
tacacgcgtgtgctcgcggaactcg

SEQ ID NO: 1960653 - DNA, 25 bp, Homo sapien
cccgtggtgcggtgtgtgtgcgaca

SEQ ID NO: 1960654 - DNA, 25 bp, Homo sapien
ggttgtaactggacctgtagctccc

SEQ ID NO: 1960655 - DNA, 25 bp, Homo sapien
gcggaactcgggacacaagctccat

SEQ ID NO: 1960656 - DNA, 25 bp, Homo sapien
cctcttgctggacgtggaggggctt

SEQ ID NO: 1960657 - DNA, 25 bp, Homo sapien
cttgctggacgtggaggggcttggc

SEQ ID NO: 1960658 - DNA, 25 bp, Homo sapien
ctcttgctggacgtggaggggcttg

SEQ ID NO: 1960659 - DNA, 25 bp, Homo sapien
gctggacgtggaggggcttggcttt

SEQ ID NO: 1960660 - DNA, 25 bp, Homo sapien
gtcgtgggcactgggaagtctctgc

SEQ ID NO: 1960661 - DNA, 25 bp, Homo sapien
tgcgggggtcgtgggcactgggaag

SEQ ID NO: 1960662 - DNA, 25 bp, Homo sapien
ggtcgtgggcactgggaagtctctg

SEQ ID NO: 1960663 - DNA, 25 bp, Homo sapien
cataaaccataactgctaagggctc

SEQ ID NO: 1960664 - DNA, 25 bp, Homo sapien
gaaagcaacggtcccataaaccata

SEQ ID NO: 1960665 - DNA, 25 bp, Homo sapien
gttctgtggaaagcaacggtcccat

SEQ ID NO: 1960666 - DNA, 25 bp, Homo sapien
ataagacatgggctgaatgtgcagt

SEQ ID NO: 1960667 - DNA, 25 bp, Homo sapien
cgtgcgtccgttttatgccgtaatt

SEQ ID NO: 1960668 - DNA, 25 bp, Homo sapien
cgtccgcgtttaaagcgcgccagcg

SEQ ID NO: 1960669 - DNA, 25 bp, Homo sapien
tatgccgtaattatgtgcacaaata

SEQ ID NO: 1960670 - DNA, 25 bp, Homo sapien
caaataattgcatggccggcgtcgc

SEQ ID NO: 1960671 - DNA, 25 bp, Homo sapien
tgagaaccgcagacctgcaggactg

SEQ ID NO: 1960672 - DNA, 25 bp, Homo sapien
ctgctggaccgtgcatggctcatca

SEQ ID NO: 1960673 - DNA, 25 bp, Homo sapien
aggggtttgagaaccgcagacctgc

SEQ ID NO: 1960674 - DNA, 25 bp, Homo sapien
cattaggccgggtctgtccaggggg

SEQ ID NO: 1960675 - DNA, 25 bp, Homo sapien
tggtcggattacctgggaagaagct

SEQ ID NO: 1960676 - DNA, 25 bp, Homo sapien
ggaagaagctgggaagccaaatgta

SEQ ID NO: 1960677 - DNA, 25 bp, Homo sapien
tcagataggggccacggagagccca

SEQ ID NO: 1960678 - DNA, 25 bp, Homo sapien
taaagccaatggtcggattacctgg

SEQ ID NO: 1960679 - DNA, 25 bp, Homo sapien
gccatcccagcctcgtctggcggtg

SEQ ID NO: 1960680 - DNA, 25 bp, Homo sapien
tcccagcctcgtctggcggtgtgaa

SEQ ID NO: 1960681 - DNA, 25 bp, Homo sapien
catcccagcctcgtctggcggtgtg

SEQ ID NO: 1960682 - DNA, 25 bp, Homo sapien
agtggatctgaattccaaagatctg

SEQ ID NO: 1960683 - DNA, 25 bp, Homo sapien
caacgacgccgttgagttcgctgct

SEQ ID NO: 1960684 - DNA, 25 bp, Homo sapien
ctagtattgcgggaacaacgacgcc

SEQ ID NO: 1960685 - DNA, 25 bp, Homo sapien
cgttgagttcgctgctagatttatc

SEQ ID NO: 1960686 - DNA, 25 bp, Homo sapien
tattgcgggaacaacgacgccgttg

SEQ ID NO: 1960687 - DNA, 25 bp, Homo sapien
tttccagtaactgggcgctgtcact

SEQ ID NO: 1960688 - DNA, 25 bp, Homo sapien
aggaaccgaccccaagacatagcca

SEQ ID NO: 1960689 - DNA, 25 bp, Homo sapien
gacatagccacgcagtttccagtaa

SEQ ID NO: 1960690 - DNA, 25 bp, Homo sapien
aagcccttatttatgagctgctcag

SEQ ID NO: 1960691 - DNA, 25 bp, Homo sapien
tcaacatgatggacatcgttctgct

SEQ ID NO: 1960692 - DNA, 25 bp, Homo sapien
ccatggattggagtttgtggcccag

SEQ ID NO: 1960693 - DNA, 25 bp, Homo sapien
tggacatcgttctgctctccagctg

SEQ ID NO: 1960694 - DNA, 25 bp, Homo sapien
gcctctttcaacatgatggacatcg

SEQ ID NO: 1960695 - DNA, 25 bp, Homo sapien
aaagagcaggagatacgctggggtg

SEQ ID NO: 1960696 - DNA, 25 bp, Homo sapien
tggggagtatggagagaaagagcag

SEQ ID NO: 1960697 - DNA, 25 bp, Homo sapien
ctgtggggagtatggagagaaagag

SEQ ID NO: 1960698 - DNA, 25 bp, Homo sapien
gggagtatggagagaaagagcagga

SEQ ID NO: 1960699 - DNA, 25 bp, Homo sapien
ctgcccagacccagcagaaccccat

SEQ ID NO: 1960700 - DNA, 25 bp, Homo sapien
atcactgcccagacccagcagaacc

SEQ ID NO: 1960701 - DNA, 25 bp, Homo sapien
tcactgcccagacccagcagaaccc

SEQ ID NO: 1960702 - DNA, 25 bp, Homo sapien
ctgcgcggccatcactgcccagacc

SEQ ID NO: 1960703 - DNA, 25 bp, Homo sapien
cttaggcttagctgcacgagagccc

SEQ ID NO: 1960704 - DNA, 25 bp, Homo sapien
ggcttagctgcacgagagccctgga

SEQ ID NO: 1960705 - DNA, 25 bp, Homo sapien
taggcttagctgcacgagagccctg

SEQ ID NO: 1960706 - DNA, 25 bp, Homo sapien
ttagctgcacgagagccctggagca

SEQ ID NO: 1960707 - DNA, 25 bp, Homo sapien
cacagctcaatgtccaggaggtggg

SEQ ID NO: 1960708 - DNA, 25 bp, Homo sapien
gcagcccaagactcaggctcaggtt

SEQ ID NO: 1960709 - DNA, 25 bp, Homo sapien
cacctggaccttggaaagagacatc

SEQ ID NO: 1960710 - DNA, 25 bp, Homo sapien
gcagcccgagactcaggctcaggtt

SEQ ID NO: 1960711 - DNA, 25 bp, Homo sapien
ctcccagcaagtcacactggcttac

SEQ ID NO: 1960712 - DNA, 25 bp, Homo sapien
ttctcccagcaagtcacactggctt

SEQ ID NO: 1960713 - DNA, 25 bp, Homo sapien
tctcccagcaagtcacactggctta

SEQ ID NO: 1960714 - DNA, 25 bp, Homo sapien
cattgatcttatgttttagtctcat

SEQ ID NO: 1960715 - DNA, 25 bp, Homo sapien
ttggtcattgatcttatgttttagt

SEQ ID NO: 1960716 - DNA, 25 bp, Homo sapien
ggtcattgatcttatgttttagtct

SEQ ID NO: 1960717 - DNA, 25 bp, Homo sapien
tcattgatcttatgttttagtctca

SEQ ID NO: 1960718 - DNA, 25 bp, Homo sapien
gtgtgttggagaccttctcagagat

SEQ ID NO: 1960719 - DNA, 25 bp, Homo sapien
ctgcggttgccttgtgtgtgttgga

SEQ ID NO: 1960720 - DNA, 25 bp, Homo sapien
cttgtgtgtgttggagaccttctca

SEQ ID NO: 1960721 - DNA, 25 bp, Homo sapien
gccttgtgtgtgttggagaccttct

SEQ ID NO: 1960722 - DNA, 25 bp, Homo sapien
tgggtgcgttcctgcttagcgcctt

SEQ ID NO: 1960723 - DNA, 25 bp, Homo sapien
tgcttagcgccttatcccagctgct

SEQ ID NO: 1960724 - DNA, 25 bp, Homo sapien
tgcgttcctgcttagcgccttatcc

SEQ ID NO: 1960725 - DNA, 25 bp, Homo sapien
cttcccatcattgggtgcgttcctg

SEQ ID NO: 1960726 - DNA, 25 bp, Homo sapien
tgcttctatccagtgctgacacttg

SEQ ID NO: 1960727 - DNA, 25 bp, Homo sapien
tattggcacctgagcatgacttctg

SEQ ID NO: 1960728 - DNA, 25 bp, Homo sapien
aaaccccggtggcatagaagccttg

SEQ ID NO: 1960729 - DNA, 25 bp, Homo sapien
gctgacacttgtggcaaaccccggt

SEQ ID NO: 1960730 - DNA, 25 bp, Homo sapien
atcagttcatccatttcttcaaacc

SEQ ID NO: 1960731 - DNA, 25 bp, Homo sapien
agttcatccatttcttcaaaccatg

SEQ ID NO: 1960732 - DNA, 25 bp, Homo sapien
gttcatccatttcttcaaaccatga

SEQ ID NO: 1960733 - DNA, 25 bp, Homo sapien
tcagatcagttcatccatttcttca

SEQ ID NO: 1960734 - DNA, 25 bp, Homo sapien
cctgttggtggcaagacagctgctg

SEQ ID NO: 1960735 - DNA, 25 bp, Homo sapien
gagcaccaggcgtcaagtccttctg

SEQ ID NO: 1960736 - DNA, 25 bp, Homo sapien
tggagcaccaggcgtcaagtccttc

SEQ ID NO: 1960737 - DNA, 25 bp, Homo sapien
gctggagcaccaggcgtcaagtcct

SEQ ID NO: 1960738 - DNA, 25 bp, Homo sapien
catttccgaaggcaagttccttagg

SEQ ID NO: 1960739 - DNA, 25 bp, Homo sapien
caagttccttaggtaggaaccatct

SEQ ID NO: 1960740 - DNA, 25 bp, Homo sapien
ctgtaacctccctcgtgtcttccat

SEQ ID NO: 1960741 - DNA, 25 bp, Homo sapien
tgtaacctccctcgtgtcttccatt

SEQ ID NO: 1960742 - DNA, 25 bp, Homo sapien
aacttccaagttctcctgaaagcct

SEQ ID NO: 1960743 - DNA, 25 bp, Homo sapien
acttccaagttctcctgaaagccta

SEQ ID NO: 1960744 - DNA, 25 bp, Homo sapien
cggcggagataagcttcttccagtc

SEQ ID NO: 1960745 - DNA, 25 bp, Homo sapien
aacccagactggtgataatgacaag

SEQ ID NO: 1960746 - DNA, 25 bp, Homo sapien
gacaagttggcagtgtggctttcat

SEQ ID NO: 1960747 - DNA, 25 bp, Homo sapien
catcggaaaggaacccagactggtg

SEQ ID NO: 1960748 - DNA, 25 bp, Homo sapien
ccgaggctcgcagaatgctataaac

SEQ ID NO: 1960749 - DNA, 25 bp, Homo sapien
gctcgcagaatgctataaacttggg

SEQ ID NO: 1960750 - DNA, 25 bp, Homo sapien
ggctcgcagaatgctataaacttgg

SEQ ID NO: 1960751 - DNA, 25 bp, Homo sapien
gaggctcgcagaatgctataaactt

SEQ ID NO: 1960752 - DNA, 25 bp, Homo sapien
cagcccggagacaagaaacagactc

SEQ ID NO: 1960753 - DNA, 25 bp, Homo sapien
gactcgccaatcaaatgctgtgcct

SEQ ID NO: 1960754 - DNA, 25 bp, Homo sapien
tgccttttccctcggtcccaggatg

SEQ ID NO: 1960755 - DNA, 25 bp, Homo sapien
gattctggtgtagtccctgtcatcc

SEQ ID NO: 1960756 - DNA, 25 bp, Homo sapien
caacttttccgggtgttcatgttca

SEQ ID NO: 1960757 - DNA, 25 bp, Homo sapien
agttgctgccaacttttccgggtgt

SEQ ID NO: 1960758 - DNA, 25 bp, Homo sapien
ccgggtgttcatgttcagaaggaga

SEQ ID NO: 1960759 - DNA, 25 bp, Homo sapien
tgctgccaacttttccgggtgttca

SEQ ID NO: 1960760 - DNA, 25 bp, Homo sapien
ttccaacaccaaagtaaaatctgca

SEQ ID NO: 1960761 - DNA, 25 bp, Homo sapien
tttggaggtcttggacaggttcctg

SEQ ID NO: 1960762 - DNA, 25 bp, Homo sapien
cagggccaatgcttagctgccttct

SEQ ID NO: 1960763 - DNA, 25 bp, Homo sapien
taaaaagtgtgtgatcctgtaatga

SEQ ID NO: 1960764 - DNA, 25 bp, Homo sapien
gctggcaacatctgtgactgaccct

SEQ ID NO: 1960765 - DNA, 25 bp, Homo sapien
tgactgaccctagggatccttgcct

SEQ ID NO: 1960766 - DNA, 25 bp, Homo sapien
catctgtgactgaccctagggatcc

SEQ ID NO: 1960767 - DNA, 25 bp, Homo sapien
caacatctgtgactgaccctaggga

SEQ ID NO: 1960768 - DNA, 25 bp, Homo sapien
ctgaggatgaagcacccagcggtgg

SEQ ID NO: 1960769 - DNA, 25 bp, Homo sapien
tctcatccatggtcaagagaccgtg

SEQ ID NO: 1960770 - DNA, 25 bp, Homo sapien
tgccattggtgacacgtcctgccct

SEQ ID NO: 1960771 - DNA, 25 bp, Homo sapien
ctccactggataacatcatgctggg

SEQ ID NO: 1960772 - DNA, 25 bp, Homo sapien
tctgggcagatcctactgggcataa

SEQ ID NO: 1960773 - DNA, 25 bp, Homo sapien
agcagagcgggttggctttgtcccc

SEQ ID NO: 1960774 - DNA, 25 bp, Homo sapien
taatgcgttctcctgcactggaggg

SEQ ID NO: 1960775 - DNA, 25 bp, Homo sapien
actacttgaagtggatcccagaggc

SEQ ID NO: 1960776 - DNA, 25 bp, Homo sapien
ggtaaatgcttagcccagggctggc

SEQ ID NO: 1960777 - DNA, 25 bp, Homo sapien
gcgttccaataatggaacactaggc

SEQ ID NO: 1960778 - DNA, 25 bp, Homo sapien
caataatggaacactaggcataaat

SEQ ID NO: 1960779 - DNA, 25 bp, Homo sapien
actcccacaagcttagcgttccaat

SEQ ID NO: 1960780 - DNA, 25 bp, Homo sapien
ataactcccacaagcttagcgttcc

SEQ ID NO: 1960781 - DNA, 25 bp, Homo sapien
ttctgaagcttggtcctcgggcagg

SEQ ID NO: 1960782 - DNA, 25 bp, Homo sapien
agagggcccttttttagctagcgtg

SEQ ID NO: 1960783 - DNA, 25 bp, Homo sapien
ggagggtgaattcccactcttcctc

SEQ ID NO: 1960784 - DNA, 25 bp, Homo sapien
cataaattaagggtagagaaagcac

SEQ ID NO: 1960785 - DNA, 25 bp, Homo sapien
tcatcattccaacccagagggccag

SEQ ID NO: 1960786 - DNA, 25 bp, Homo sapien
cagtgtacatctagggtcggcttcc

SEQ ID NO: 1960787 - DNA, 25 bp, Homo sapien
gaaaggtcccggcaagacagtgtac

SEQ ID NO: 1960788 - DNA, 25 bp, Homo sapien
ctgtgggttccgacttagagcctaa

SEQ ID NO: 1960789 - DNA, 25 bp, Homo sapien
taattcctgagttgcacctctgcat

SEQ ID NO: 1960790 - DNA, 25 bp, Homo sapien
tttgggcaccagagcctttcctgac

SEQ ID NO: 1960791 - DNA, 25 bp, Homo sapien
cacgcagtctgacatggaagcctga

SEQ ID NO: 1960792 - DNA, 25 bp, Homo sapien
gtttccccagcgaggaggaagccag

SEQ ID NO: 1960793 - DNA, 25 bp, Homo sapien
gcaccctgaggtccgcagaagcttt

SEQ ID NO: 1960794 - DNA, 25 bp, Homo sapien
ggctttccacacgaataacatttgt

SEQ ID NO: 1960795 - DNA, 25 bp, Homo sapien
cgctcggatgctgtcccatgccagg

SEQ ID NO: 1960796 - DNA, 25 bp, Homo sapien
taatcctggctttccacacgaataa

SEQ ID NO: 1960797 - DNA, 25 bp, Homo sapien
gatggctgcagactcagttgtccaa

SEQ ID NO: 1960798 - DNA, 25 bp, Homo sapien
tgacctgaaccctaagaacgctcga

SEQ ID NO: 1960799 - DNA, 25 bp, Homo sapien
ccatagggatgaggactaaggcaga

SEQ ID NO: 1960800 - DNA, 25 bp, Homo sapien
tgccaaatcctgtcaccgtgtgcct

SEQ ID NO: 1960801 - DNA, 25 bp, Homo sapien
tatccgctttgcatagacagtgtcc

SEQ ID NO: 1960802 - DNA, 25 bp, Homo sapien
tcacatacgttttggagggacacac

SEQ ID NO: 1960803 - DNA, 25 bp, Homo sapien
tcctcatgcgatgtcagaaggctga

SEQ ID NO: 1960804 - DNA, 25 bp, Homo sapien
taatagccaagggttgagccatctg

SEQ ID NO: 1960805 - DNA, 25 bp, Homo sapien
tcatagggtagcatcacatgaaggc

SEQ ID NO: 1960806 - DNA, 25 bp, Homo sapien
cactgtgttcgagacacgagttcca

SEQ ID NO: 1960807 - DNA, 25 bp, Homo sapien
ttcatttcccgggagcccttgctgg

SEQ ID NO: 1960808 - DNA, 25 bp, Homo sapien
acgagttccacgtggttgctgcctc

SEQ ID NO: 1960809 - DNA, 25 bp, Homo sapien
gatttctttttatcaggtggtctct

SEQ ID NO: 1960810 - DNA, 25 bp, Homo sapien
ctgtgatggatttctttttatcagg

SEQ ID NO: 1960811 - DNA, 25 bp, Homo sapien
ggatttctttttatcaggtggtctc

SEQ ID NO: 1960812 - DNA, 25 bp, Homo sapien
ttctttttatcaggtggtctcttgt

SEQ ID NO: 1960813 - DNA, 25 bp, Homo sapien
tgaatctgggtagcgtcgactctgc

SEQ ID NO: 1960814 - DNA, 25 bp, Homo sapien
caaagtgaatctgggtagcgtcgac

SEQ ID NO: 1960815 - DNA, 25 bp, Homo sapien
gggtagcgtcgactctgctgttgaa

SEQ ID NO: 1960816 - DNA, 25 bp, Homo sapien
tctgggtagcgtcgactctgctgtt

SEQ ID NO: 1960817 - DNA, 25 bp, Homo sapien
ctgtgggcttggactgcgttgccac

SEQ ID NO: 1960818 - DNA, 25 bp, Homo sapien
gcttggactgcgttgccacaccctg

SEQ ID NO: 1960819 - DNA, 25 bp, Homo sapien
ggactgcgttgccacaccctgtgtt

SEQ ID NO: 1960820 - DNA, 25 bp, Homo sapien
tgggcttggactgcgttgccacacc

SEQ ID NO: 1960821 - DNA, 25 bp, Homo sapien
tggacacggattccgcatgagggac

SEQ ID NO: 1960822 - DNA, 25 bp, Homo sapien
gatggtcgcctggacacggattccg

SEQ ID NO: 1960823 - DNA, 25 bp, Homo sapien
cacggattccgcatgagggacgatg

SEQ ID NO: 1960824 - DNA, 25 bp, Homo sapien
tccgcatgagggacgatgatgagca

SEQ ID NO: 1960825 - DNA, 25 bp, Homo sapien
agaacgaggatccaggagacgctga

SEQ ID NO: 1960826 - DNA, 25 bp, Homo sapien
gagaacgaggatccaggagacgctg

SEQ ID NO: 1960827 - DNA, 25 bp, Homo sapien
gtgccgtgtgatggggaggacgccc

SEQ ID NO: 1960828 - DNA, 25 bp, Homo sapien
ttgtgccgtgtgatggggaggacgc

SEQ ID NO: 1960829 - DNA, 25 bp, Homo sapien
gcttgtgccgtgtgatggggaggac

SEQ ID NO: 1960830 - DNA, 25 bp, Homo sapien
ccatgggcttgtgccgtgtgatggg

SEQ ID NO: 1960831 - DNA, 25 bp, Homo sapien
tgagatccattgttaagtacataag

SEQ ID NO: 1960832 - DNA, 25 bp, Homo sapien
gatccattgttaagtacataagaac

SEQ ID NO: 1960833 - DNA, 25 bp, Homo sapien
tgagagcgagtgagatccattgtta

SEQ ID NO: 1960834 - DNA, 25 bp, Homo sapien
cgagtgagatccattgttaagtaca

SEQ ID NO: 1960835 - DNA, 25 bp, Homo sapien
gacccagccgcgctggcaaaggtgg

SEQ ID NO: 1960836 - DNA, 25 bp, Homo sapien
agccgcgctggcaaaggtggtcagc

SEQ ID NO: 1960837 - DNA, 25 bp, Homo sapien
cagccgcgctggcaaaggtggtcag

SEQ ID NO: 1960838 - DNA, 25 bp, Homo sapien
cccagccgcgctggcaaaggtggtc

SEQ ID NO: 1960839 - DNA, 25 bp, Homo sapien
catgggcctgggcagggctgtttgc

SEQ ID NO: 1960840 - DNA, 25 bp, Homo sapien
gggcctgggcagggctgtttgccat

SEQ ID NO: 1960841 - DNA, 25 bp, Homo sapien
gcatgggcctgggcagggctgtttg

SEQ ID NO: 1960842 - DNA, 25 bp, Homo sapien
cctgcagagcatgggcctgggcagg

SEQ ID NO: 1960843 - DNA, 25 bp, Homo sapien
gcgaattcgccgggacccgaagcga

SEQ ID NO: 1960844 - DNA, 25 bp, Homo sapien
tggaaaggcaagaaccccggcgcga

SEQ ID NO: 1960845 - DNA, 25 bp, Homo sapien
acccgaagcgaagttcctccctcat

SEQ ID NO: 1960846 - DNA, 25 bp, Homo sapien
catacagtgggctgagtctaactgg

SEQ ID NO: 1960847 - DNA, 25 bp, Homo sapien
taaccagtgttagcatgttaataca

SEQ ID NO: 1960848 - DNA, 25 bp, Homo sapien
tacagatacttactaaagcctaaaa

SEQ ID NO: 1960849 - DNA, 25 bp, Homo sapien
ccttacccacatcaggttacttctt

SEQ ID NO: 1960850 - DNA, 25 bp, Homo sapien
gcctaaaacataatcgcagaactta

SEQ ID NO: 1960851 - DNA, 25 bp, Homo sapien
ggcttcagcatcacgtctaggtcta

SEQ ID NO: 1960852 - DNA, 25 bp, Homo sapien
gccctcagtgccaaaagctgttggg

SEQ ID NO: 1960853 - DNA, 25 bp, Homo sapien
acatttgtgggcatggacagtggct

SEQ ID NO: 1960854 - DNA, 25 bp, Homo sapien
tgattgcctccaggaaagcaagccc

SEQ ID NO: 1960855 - DNA, 25 bp, Homo sapien
ctgtaaaggcaaaaatgtgagggcc

SEQ ID NO: 1960856 - DNA, 25 bp, Homo sapien
gaaaggtggacggatttaaatcagc

SEQ ID NO: 1960857 - DNA, 25 bp, Homo sapien
caagctactgtattgcacggagatg

SEQ ID NO: 1960858 - DNA, 25 bp, Homo sapien
cacggagatgtgagttttagagttt

SEQ ID NO: 1960859 - DNA, 25 bp, Homo sapien
cagcggtaagaatgtcttggagctc

SEQ ID NO: 1960860 - DNA, 25 bp, Homo sapien
tgtgcctctgatttgcgggtgtcgc

SEQ ID NO: 1960861 - DNA, 25 bp, Homo sapien
gcattgcgcgtttcccagctgggct

SEQ ID NO: 1960862 - DNA, 25 bp, Homo sapien
gacacacgccttgatgacgggaacg

SEQ ID NO: 1960863 - DNA, 25 bp, Homo sapien
atgtgaagaaggcagcgcattgcgc

SEQ ID NO: 1960864 - DNA, 25 bp, Homo sapien
atgtccatctgcgtcagcgtcacct

SEQ ID NO: 1960865 - DNA, 25 bp, Homo sapien
cgtcaccttgacaacaagagcaggg

SEQ ID NO: 1960866 - DNA, 25 bp, Homo sapien
caatgtccatctgcgtcagcgtcac

SEQ ID NO: 1960867 - DNA, 25 bp, Homo sapien
agcgtcaccttgacaacaagagcag

SEQ ID NO: 1960868 - DNA, 25 bp, Homo sapien
tgagattttgcggtatccatggtgg

SEQ ID NO: 1960869 - DNA, 25 bp, Homo sapien
ccagttgaccaagcacacacttcat

SEQ ID NO: 1960870 - DNA, 25 bp, Homo sapien
gttgaccaagcacacacttcatcct

SEQ ID NO: 1960871 - DNA, 25 bp, Homo sapien
gctgttgagattttgcggtatccat

SEQ ID NO: 1960872 - DNA, 25 bp, Homo sapien
tcagtgtgaaacgtcagtggctcac

SEQ ID NO: 1960873 - DNA, 25 bp, Homo sapien
ttctcagtgtgaaacgtcagtggct

SEQ ID NO: 1960874 - DNA, 25 bp, Homo sapien
tctcagtgtgaaacgtcagtggctc

SEQ ID NO: 1960875 - DNA, 25 bp, Homo sapien
atttctcagtgtgaaacgtcagtgg

SEQ ID NO: 1960876 - DNA, 25 bp, Homo sapien
ttccagtgatgactgtggttccatg

SEQ ID NO: 1960877 - DNA, 25 bp, Homo sapien
tactgtgctgtttatgcactcgttc

SEQ ID NO: 1960878 - DNA, 25 bp, Homo sapien
taataggcctgggttttactgtgct

SEQ ID NO: 1960879 - DNA, 25 bp, Homo sapien
agcttcttcccgcttcacctctgag

SEQ ID NO: 1960880 - DNA, 25 bp, Homo sapien
gttacatgcctactgtgctgcagga

SEQ ID NO: 1960881 - DNA, 25 bp, Homo sapien
ggacatcataatttgtgttcacgca

SEQ ID NO: 1960882 - DNA, 25 bp, Homo sapien
taccctttgctgttgaagatacctg

SEQ ID NO: 1960883 - DNA, 25 bp, Homo sapien
tgttcacgcatgaagtctgtgttgt

SEQ ID NO: 1960884 - DNA, 25 bp, Homo sapien
cttctggggctgtcagccacgatca

SEQ ID NO: 1960885 - DNA, 25 bp, Homo sapien
caagagaagggctttgcatcctcca

SEQ ID NO: 1960886 - DNA, 25 bp, Homo sapien
tagccgtggaaattggctgtgcagt

SEQ ID NO: 1960887 - DNA, 25 bp, Homo sapien
tgtcagccacgatcacctgcgtatg

SEQ ID NO: 1960888 - DNA, 25 bp, Homo sapien
ctctgctgctccgtggaaaggcctc

SEQ ID NO: 1960889 - DNA, 25 bp, Homo sapien
ttcgctgggtcagcctctctccgtg

SEQ ID NO: 1960890 - DNA, 25 bp, Homo sapien
gtcccccacaagtgaggccgaggag

SEQ ID NO: 1960891 - DNA, 25 bp, Homo sapien
gtggtgaatccagcacccttcgctg

SEQ ID NO: 1960892 - DNA, 25 bp, Homo sapien
gtgccacggaaagcgtgccagcctt

SEQ ID NO: 1960893 - DNA, 25 bp, Homo sapien
ggactcctgtgccacggaaagcgtg

SEQ ID NO: 1960894 - DNA, 25 bp, Homo sapien
ggacaccatcccgtcggactcctgt

SEQ ID NO: 1960895 - DNA, 25 bp, Homo sapien
aagcgtgccagccttccatggcgtc

SEQ ID NO: 1960896 - DNA, 25 bp, Homo sapien
gatggtcctctgtgtaattcgcaaa

SEQ ID NO: 1960897 - DNA, 25 bp, Homo sapien
taattcgcaaagacactccaacagg

SEQ ID NO: 1960898 - DNA, 25 bp, Homo sapien
atctgctcttgggatcggctgttga

SEQ ID NO: 1960899 - DNA, 25 bp, Homo sapien
tccaacaggatgagcaaagtcacag

SEQ ID NO: 1960900 - DNA, 25 bp, Homo sapien
catgatagacgcaagttgttcctga

SEQ ID NO: 1960901 - DNA, 25 bp, Homo sapien
ttgttcctgacaagcagagcctccc

SEQ ID NO: 1960902 - DNA, 25 bp, Homo sapien
tcagaagttggtccaaactcaagag

SEQ ID NO: 1960903 - DNA, 25 bp, Homo sapien
cctgcttcaggacaggattgtttac

SEQ ID NO: 1960904 - DNA, 25 bp, Homo sapien
ctgcttctcagagtccttgaggagg

SEQ ID NO: 1960905 - DNA, 25 bp, Homo sapien
tctcagagtccttgaggagggccac

SEQ ID NO: 1960906 - DNA, 25 bp, Homo sapien
tcagagtccttgaggagggccacct

SEQ ID NO: 1960907 - DNA, 25 bp, Homo sapien
cttctcagagtccttgaggagggcc

SEQ ID NO: 1960908 - DNA, 25 bp, Homo sapien
gatgagtgttgatcccagcagagat

SEQ ID NO: 1960909 - DNA, 25 bp, Homo sapien
ccaggatgagtgttgatcccagcag

SEQ ID NO: 1960910 - DNA, 25 bp, Homo sapien
gctgaagcctaaaccaggatgagtg

SEQ ID NO: 1960911 - DNA, 25 bp, Homo sapien
ggaagctgaagcctaaaccaggatg

SEQ ID NO: 1960912 - DNA, 25 bp, Homo sapien
ctccgggagtgtcgccagcagacag

SEQ ID NO: 1960913 - DNA, 25 bp, Homo sapien
aatgtgctagtgtgctgtctgctca

SEQ ID NO: 1960914 - DNA, 25 bp, Homo sapien
cctggaaatcattctggagtcaaat

SEQ ID NO: 1960915 - DNA, 25 bp, Homo sapien
taagttctcatactgtaattcctgg

SEQ ID NO: 1960916 - DNA, 25 bp, Homo sapien
tcagacagtggaggcccctcgctga

SEQ ID NO: 1960917 - DNA, 25 bp, Homo sapien
ccgggcctctgagtgcagagagcag

SEQ ID NO: 1960918 - DNA, 25 bp, Homo sapien
gagagcaggcgttgccaggagcgga

SEQ ID NO: 1960919 - DNA, 25 bp, Homo sapien
agcggactcagacagtggaggcccc

SEQ ID NO: 1960920 - DNA, 25 bp, Homo sapien
tctttaaaatgaaagtccagcagga

SEQ ID NO: 1960921 - DNA, 25 bp, Homo sapien
gcttggaagctgctagaagttaaca

SEQ ID NO: 1960922 - DNA, 25 bp, Homo sapien
cagagcttggaagctgctagaagtt

SEQ ID NO: 1960923 - DNA, 25 bp, Homo sapien
gctgctagaagttaacattaatttt

SEQ ID NO: 1960924 - DNA, 25 bp, Homo sapien
agcaggccctgccgcatctctgggc

SEQ ID NO: 1960925 - DNA, 25 bp, Homo sapien
cctgactgtcagcagatgaggccat

SEQ ID NO: 1960926 - DNA, 25 bp, Homo sapien
agccctgactgtcagcagatgaggc

SEQ ID NO: 1960927 - DNA, 25 bp, Homo sapien
cccagcggttctgtgccgccagcag

SEQ ID NO: 1960928 - DNA, 25 bp, Homo sapien
acggagacgcctgccggctcagcag

SEQ ID NO: 1960929 - DNA, 25 bp, Homo sapien
agctgcccgtcatgggacagcaacg

SEQ ID NO: 1960930 - DNA, 25 bp, Homo sapien
caacgtggcaagaattccccacggg

SEQ ID NO: 1960931 - DNA, 25 bp, Homo sapien
gagtgacctggtggaacggagacgc

SEQ ID NO: 1960932 - DNA, 25 bp, Homo sapien
cttcaaacccaggtcatctgaacag

SEQ ID NO: 1960933 - DNA, 25 bp, Homo sapien
tcccaggttgggagtgagtaattca

SEQ ID NO: 1960934 - DNA, 25 bp, Homo sapien
tcgtacggctttgaggacatccctt

SEQ ID NO: 1960935 - DNA, 25 bp, Homo sapien
cacccaggtcgtacggctttgagga

SEQ ID NO: 1960936 - DNA, 25 bp, Homo sapien
ggcggatgcaattgagttcgtagca

SEQ ID NO: 1960937 - DNA, 25 bp, Homo sapien
tccatcatgtgctgaaggtccttct

SEQ ID NO: 1960938 - DNA, 25 bp, Homo sapien
ccaaatgcagtcaacgtggggatta

SEQ ID NO: 1960939 - DNA, 25 bp, Homo sapien
tagcagacgttatcttcgggatccc

SEQ ID NO: 1960940 - DNA, 25 bp, Homo sapien
ctttggactgcactttctgccagcc

SEQ ID NO: 1960941 - DNA, 25 bp, Homo sapien
aaaacagagtactttggactgcact

SEQ ID NO: 1960942 - DNA, 25 bp, Homo sapien
cagagtactttggactgcactttct

SEQ ID NO: 1960943 - DNA, 25 bp, Homo sapien
aacaaaacagagtactttggactgc

SEQ ID NO: 1960944 - DNA, 25 bp, Homo sapien
tcgtacaatgtcagctttgcaaggg

SEQ ID NO: 1960945 - DNA, 25 bp, Homo sapien
tcaattgatcaatgccgaggatggg

SEQ ID NO: 1960946 - DNA, 25 bp, Homo sapien
ggcctgcgacaagcacttctcatct

SEQ ID NO: 1960947 - DNA, 25 bp, Homo sapien
caccacgtggacgtgggtgttgtct

SEQ ID NO: 1960948 - DNA, 25 bp, Homo sapien
acatcggtgtgtggcgtctcagtgc

SEQ ID NO: 1960949 - DNA, 25 bp, Homo sapien
ctcagtgcagcgccggcacacacag

SEQ ID NO: 1960950 - DNA, 25 bp, Homo sapien
ggatgaagcgacatcggtgtgtggc

SEQ ID NO: 1960951 - DNA, 25 bp, Homo sapien
aagcgacatcggtgtgtggcgtctc

SEQ ID NO: 1960952 - DNA, 25 bp, Homo sapien
ggaggcgacaactcacaaatatgac

SEQ ID NO: 1960953 - DNA, 25 bp, Homo sapien
aatatgacggccactcacaggccag

SEQ ID NO: 1960954 - DNA, 25 bp, Homo sapien
tgcaaacgacagatgactccaggag

SEQ ID NO: 1960955 - DNA, 25 bp, Homo sapien
caacagagcgtgcaatgcagcagca

SEQ ID NO: 1960956 - DNA, 25 bp, Homo sapien
ggagatctgtctacatcaacgcctg

SEQ ID NO: 1960957 - DNA, 25 bp, Homo sapien
tggtgtgatccagccacgaatgaga

SEQ ID NO: 1960958 - DNA, 25 bp, Homo sapien
tttcagtgttggacggccccaagga

SEQ ID NO: 1960959 - DNA, 25 bp, Homo sapien
acagcagcggtcaggcggtttcagt

SEQ ID NO: 1960960 - DNA, 25 bp, Homo sapien
ccttgccacgcaggaggatgagtaa

SEQ ID NO: 1960961 - DNA, 25 bp, Homo sapien
gagatacttcggagcaacctcgtga

SEQ ID NO: 1960962 - DNA, 25 bp, Homo sapien
tttaagttcagtgtggcatgcatcc

SEQ ID NO: 1960963 - DNA, 25 bp, Homo sapien
gcatgcatcctagcggtgggaagcc

SEQ ID NO: 1960964 - DNA, 25 bp, Homo sapien
aaagatgtttaattggacttaacag

SEQ ID NO: 1960965 - DNA, 25 bp, Homo sapien
tctcataatcatggcacgaggtgaa

SEQ ID NO: 1960966 - DNA, 25 bp, Homo sapien
gggaagtctcataatcatggcacga

SEQ ID NO: 1960967 - DNA, 25 bp, Homo sapien
ctgggactaagaagaaaaagatgtt

SEQ ID NO: 1960968 - DNA, 25 bp, Homo sapien
caacgccccactctgctggttccaa

SEQ ID NO: 1960969 - DNA, 25 bp, Homo sapien
agcaacgccccactctgctggttcc

SEQ ID NO: 1960970 - DNA, 25 bp, Homo sapien
acgccccactctgctggttccaatt

SEQ ID NO: 1960971 - DNA, 25 bp, Homo sapien
tcagcaacgccccactctgctggtt

SEQ ID NO: 1960972 - DNA, 25 bp, Homo sapien
aggccacagaatcatgatgagaggt

SEQ ID NO: 1960973 - DNA, 25 bp, Homo sapien
gccacagaatcatgatgagaggtga

SEQ ID NO: 1960974 - DNA, 25 bp, Homo sapien
ggaggccacagaatcatgatgagag

SEQ ID NO: 1960975 - DNA, 25 bp, Homo sapien
cacagaatcatgatgagaggtgaaa

SEQ ID NO: 1960976 - DNA, 25 bp, Homo sapien
gggcttctgtactcgcagggaccct

SEQ ID NO: 1960977 - DNA, 25 bp, Homo sapien
cccactcgtggggtcagtgctgtta

SEQ ID NO: 1960978 - DNA, 25 bp, Homo sapien
tatgtccacccctgtggtccgagag

SEQ ID NO: 1960979 - DNA, 25 bp, Homo sapien
ggctgtaccggactggctgtccatg

SEQ ID NO: 1960980 - DNA, 25 bp, Homo sapien
gagactgtttcaatgcgctggaaac

SEQ ID NO: 1960981 - DNA, 25 bp, Homo sapien
tgtcagagactgtttcaatgcgctg

SEQ ID NO: 1960982 - DNA, 25 bp, Homo sapien
gtggtgtcagagactgtttcaatgc

SEQ ID NO: 1960983 - DNA, 25 bp, Homo sapien
cagagactgtttcaatgcgctggaa

SEQ ID NO: 1960984 - DNA, 25 bp, Homo sapien
gccttgccatgagctcaataaaatg

SEQ ID NO: 1960985 - DNA, 25 bp, Homo sapien
catgagctcaataaaatgagcagtc

SEQ ID NO: 1960986 - DNA, 25 bp, Homo sapien
tgagctcaataaaatgagcagtcac

SEQ ID NO: 1960987 - DNA, 25 bp, Homo sapien
ttgccatgagctcaataaaatgagc

SEQ ID NO: 1960988 - DNA, 25 bp, Homo sapien
agcagccgggactgagggcagcgct

SEQ ID NO: 1960989 - DNA, 25 bp, Homo sapien
cagcgcttcgcttcctcggaggagc

SEQ ID NO: 1960990 - DNA, 25 bp, Homo sapien
ggactgagggcagcgcttcgcttcc

SEQ ID NO: 1960991 - DNA, 25 bp, Homo sapien
actgtgccatcaacaaaccctgaag

SEQ ID NO: 1960992 - DNA, 25 bp, Homo sapien
tcagatgtggtctgcaaaaattttc

SEQ ID NO: 1960993 - DNA, 25 bp, Homo sapien
gacctttatcagatgtggtctgcaa

SEQ ID NO: 1960994 - DNA, 25 bp, Homo sapien
tgatagtttgttttgtcatgcagaa

SEQ ID NO: 1960995 - DNA, 25 bp, Homo sapien
aaatctttgccagggactttgtgca

SEQ ID NO: 1960996 - DNA, 25 bp, Homo sapien
aaatgtatgaggtcatgggtatccc

SEQ ID NO: 1960997 - DNA, 25 bp, Homo sapien
atataacccaagaatactacagata

SEQ ID NO: 1960998 - DNA, 25 bp, Homo sapien
cttccaaactatacacgagggtgtc

SEQ ID NO: 1960999 - DNA, 25 bp, Homo sapien
caattaccctaactttatcattaca

SEQ ID NO: 1961000 - DNA, 25 bp, Homo sapien
ttccgggttaccctgcagtgaagct

SEQ ID NO: 1961001 - DNA, 25 bp, Homo sapien
cagaatcggccttttgaaggttccg

SEQ ID NO: 1961002 - DNA, 25 bp, Homo sapien
cgctggaggccggaaagtcgaatat

SEQ ID NO: 1961003 - DNA, 25 bp, Homo sapien
tcgtacataaaacgaagcgcaatcg

SEQ ID NO: 1961004 - DNA, 25 bp, Homo sapien
cggagtcatcgaggtccagggacac

SEQ ID NO: 1961005 - DNA, 25 bp, Homo sapien
gtggaaggtgcggagctcccgtggt

SEQ ID NO: 1961006 - DNA, 25 bp, Homo sapien
gcaggtgctcgcacggagtcatcga

SEQ ID NO: 1961007 - DNA, 25 bp, Homo sapien
ctcccgtggtgtgctggcagcgatt

SEQ ID NO: 1961008 - DNA, 25 bp, Homo sapien
taaaaatgaggttctagctaagtgc

SEQ ID NO: 1961009 - DNA, 25 bp, Homo sapien
ggtgaaattttgaccatgtgaacac

SEQ ID NO: 1961010 - DNA, 25 bp, Homo sapien
cattgtacggttgaccccacaacac

SEQ ID NO: 1961011 - DNA, 25 bp, Homo sapien
ctaagtgcagggtttcagtggtgaa

SEQ ID NO: 1961012 - DNA, 25 bp, Homo sapien
tgtgcctggcaagactaaatgctga

SEQ ID NO: 1961013 - DNA, 25 bp, Homo sapien
cagcttctagcatgcttcatcgtga

SEQ ID NO: 1961014 - DNA, 25 bp, Homo sapien
gatgagtgactatttcctgcagaaa

SEQ ID NO: 1961015 - DNA, 25 bp, Homo sapien
cgttggtctcgggaatacagctcca

SEQ ID NO: 1961016 - DNA, 25 bp, Homo sapien
caggtaaaagcaacttgtccgcagt

SEQ ID NO: 1961017 - DNA, 25 bp, Homo sapien
tgtccgcagttaccaaagcctagat

SEQ ID NO: 1961018 - DNA, 25 bp, Homo sapien
tagatgcgccttttccggcctgtgc

SEQ ID NO: 1961019 - DNA, 25 bp, Homo sapien
cgcgtcacacccatttgcaaggatg

SEQ ID NO: 1961020 - DNA, 25 bp, Homo sapien
tagagcaactctaattcaagaatag

SEQ ID NO: 1961021 - DNA, 25 bp, Homo sapien
gaatagtgacaactttaagcaccaa

SEQ ID NO: 1961022 - DNA, 25 bp, Homo sapien
ggcttatgcacagtattcccttcaa

SEQ ID NO: 1961023 - DNA, 25 bp, Homo sapien
aaaaagcaatgtaatggcatgccca

SEQ ID NO: 1961024 - DNA, 25 bp, Homo sapien
gtgaagaaccatcagagttaaggtc

SEQ ID NO: 1961025 - DNA, 25 bp, Homo sapien
ccatcagagttaaggtcaagggaca

SEQ ID NO: 1961026 - DNA, 25 bp, Homo sapien
gaaccatcagagttaaggtcaaggg

SEQ ID NO: 1961027 - DNA, 25 bp, Homo sapien
tcagagttaaggtcaagggacagga

SEQ ID NO: 1961028 - DNA, 25 bp, Homo sapien
tgaactgaggtgtctagggaccatg

SEQ ID NO: 1961029 - DNA, 25 bp, Homo sapien
caatgaactgaggtgtctagggacc

SEQ ID NO: 1961030 - DNA, 25 bp, Homo sapien
ctgaggtgtctagggaccatggcat

SEQ ID NO: 1961031 - DNA, 25 bp, Homo sapien
ccacaatgaactgaggtgtctaggg

SEQ ID NO: 1961032 - DNA, 25 bp, Homo sapien
ccagccgcccgccagcgtaggtttg

SEQ ID NO: 1961033 - DNA, 25 bp, Homo sapien
ctgcattcgtacttgaggtctgaga

SEQ ID NO: 1961034 - DNA, 25 bp, Homo sapien
tggtcatagataggtcctgagtctg

SEQ ID NO: 1961035 - DNA, 25 bp, Homo sapien
ctctgcattcgtacttgaggtctga

SEQ ID NO: 1961036 - DNA, 25 bp, Homo sapien
ctggggtcgtgccataaggttcgca

SEQ ID NO: 1961037 - DNA, 25 bp, Homo sapien
gatgtagccagtcttgggcctgtga

SEQ ID NO: 1961038 - DNA, 25 bp, Homo sapien
ggccgtgtagtccttccagccaatg

SEQ ID NO: 1961039 - DNA, 25 bp, Homo sapien
ggcctgtgagtcaggtgccacctat

SEQ ID NO: 1961040 - DNA, 25 bp, Homo sapien
gaagcggctgcttgactggtaacca

SEQ ID NO: 1961041 - DNA, 25 bp, Homo sapien
tgtttacgtagaatgtgccactgaa

SEQ ID NO: 1961042 - DNA, 25 bp, Homo sapien
catagtcgtcgtcccggtcagtgtt

SEQ ID NO: 1961043 - DNA, 25 bp, Homo sapien
tggtaaccaaagacgaagccggcat

SEQ ID NO: 1961044 - DNA, 25 bp, Homo sapien
ggtccgagttggctgtctgaaccag

SEQ ID NO: 1961045 - DNA, 25 bp, Homo sapien
gatggcgaatgacccagttgggatc

SEQ ID NO: 1961046 - DNA, 25 bp, Homo sapien
tttacaaatatcaccccgtccatca

SEQ ID NO: 1961047 - DNA, 25 bp, Homo sapien
gaagttcctgaagtctgtctcactg

SEQ ID NO: 1961048 - DNA, 25 bp, Homo sapien
gaattagctatcacgtggcctgccg

SEQ ID NO: 1961049 - DNA, 25 bp, Homo sapien
tacggcgatgacgataacctgacag

SEQ ID NO: 1961050 - DNA, 25 bp, Homo sapien
aacacggagtccagatgaggcttgc

SEQ ID NO: 1961051 - DNA, 25 bp, Homo sapien
caggcacatagttggtatcagggca

SEQ ID NO: 1961052 - DNA, 25 bp, Homo sapien
cgtcatctatgtcctcgttgttgtc

SEQ ID NO: 1961053 - DNA, 25 bp, Homo sapien
caacaaggtcattgtccacgtcggt

SEQ ID NO: 1961054 - DNA, 25 bp, Homo sapien
tgtcctggttgttctggtggccgtc

SEQ ID NO: 1961055 - DNA, 25 bp, Homo sapien
ggttgaacacaagccggcagttgtc

SEQ ID NO: 1961056 - DNA, 25 bp, Homo sapien
cactaaaggaagatgtgcttcttcg

SEQ ID NO: 1961057 - DNA, 25 bp, Homo sapien
gccacctctccacagtaattcactt

SEQ ID NO: 1961058 - DNA, 25 bp, Homo sapien
acttcactaaaggaagatgtgcttc

SEQ ID NO: 1961059 - DNA, 25 bp, Homo sapien
aattcacttcactaaaggaagatgt

SEQ ID NO: 1961060 - DNA, 25 bp, Homo sapien
cctctgatgaggacctccaaccccg

SEQ ID NO: 1961061 - DNA, 25 bp, Homo sapien
ccgcgtccctctgatgaggacctcc

SEQ ID NO: 1961062 - DNA, 25 bp, Homo sapien
gtccccgcgtccctctgatgaggac

SEQ ID NO: 1961063 - DNA, 25 bp, Homo sapien
tgaggacctccaaccccgcctgtct

SEQ ID NO: 1961064 - DNA, 25 bp, Homo sapien
tcagtgttgtagacgtagggacaat

SEQ ID NO: 1961065 - DNA, 25 bp, Homo sapien
tgtagacgtagggacaattgtctcg

SEQ ID NO: 1961066 - DNA, 25 bp, Homo sapien
acaattgtctcgttcattgaagaca

SEQ ID NO: 1961067 - DNA, 25 bp, Homo sapien
ccatccgtgtccctctggtcagtgt

SEQ ID NO: 1961068 - DNA, 25 bp, Homo sapien
catagtcagcctggcggggattgaa

SEQ ID NO: 1961069 - DNA, 25 bp, Homo sapien
tgcacgtaagggcagttgtcacagc

SEQ ID NO: 1961070 - DNA, 25 bp, Homo sapien
gagcaggcgtcaccctctccattgt

SEQ ID NO: 1961071 - DNA, 25 bp, Homo sapien
ccatcaatgtccacggagcaggcgt

SEQ ID NO: 1961072 - DNA, 25 bp, Homo sapien
tttggtataaagtggcctcctgtgg

SEQ ID NO: 1961073 - DNA, 25 bp, Homo sapien
cacaaacgcttgcaggacaatggca

SEQ ID NO: 1961074 - DNA, 25 bp, Homo sapien
caatggcagttacgttgacaagggc

SEQ ID NO: 1961075 - DNA, 25 bp, Homo sapien
tgggaactgcctatgcacaaacgct

SEQ ID NO: 1961076 - DNA, 25 bp, Homo sapien
cacaggcatcgccaatcccgtcctt

SEQ ID NO: 1961077 - DNA, 25 bp, Homo sapien
catcacaggcatcgccaatcccgtc

SEQ ID NO: 1961078 - DNA, 25 bp, Homo sapien
atcatcacaggcatcgccaatcccg

SEQ ID NO: 1961079 - DNA, 25 bp, Homo sapien
caggcatcgccaatcccgtccttgt

SEQ ID NO: 1961080 - DNA, 25 bp, Homo sapien
tgcccagaatttggcagatgggggc

SEQ ID NO: 1961081 - DNA, 25 bp, Homo sapien
aatttggcagatgggggcagttatc

SEQ ID NO: 1961082 - DNA, 25 bp, Homo sapien
ctgcccagaatttggcagatggggg

SEQ ID NO: 1961083 - DNA, 25 bp, Homo sapien
agaatttggcagatgggggcagtta

SEQ ID NO: 1961084 - DNA, 25 bp, Homo sapien
tcaaggacattgaacagtgaggctc

SEQ ID NO: 1961085 - DNA, 25 bp, Homo sapien
tggcagtccccacgatggatgtccg

SEQ ID NO: 1961086 - DNA, 25 bp, Homo sapien
gatgtccgcgtcctagtgtcttggc

SEQ ID NO: 1961087 - DNA, 25 bp, Homo sapien
taacaagtggaattaggtcaaggac

SEQ ID NO: 1961088 - DNA, 25 bp, Homo sapien
cactccgcgtgcttgtggcagttgt

SEQ ID NO: 1961089 - DNA, 25 bp, Homo sapien
cagattgaggttgggccagccgtcc

SEQ ID NO: 1961090 - DNA, 25 bp, Homo sapien
tctggcactcgcacttgtacatggg

SEQ ID NO: 1961091 - DNA, 25 bp, Homo sapien
gtccttgcatgggttttcgggctca

SEQ ID NO: 1961092 - DNA, 25 bp, Homo sapien
tagcgacaggcaggacgatggctcc

SEQ ID NO: 1961093 - DNA, 25 bp, Homo sapien
cgatggctccggaggcgtcgaggcg

SEQ ID NO: 1961094 - DNA, 25 bp, Homo sapien
cagcaggtccggtcccaagcggacc

SEQ ID NO: 1961095 - DNA, 25 bp, Homo sapien
aagggctgcggggttagcgacaggc

SEQ ID NO: 1961096 - DNA, 25 bp, Homo sapien
ggctttctggacacgcacttgaggt

SEQ ID NO: 1961097 - DNA, 25 bp, Homo sapien
tgaggctccgtttgtgactcagcca

SEQ ID NO: 1961098 - DNA, 25 bp, Homo sapien
tcagccatcgtttctgagcctcggc

SEQ ID NO: 1961099 - DNA, 25 bp, Homo sapien
gcacttgaggtgctgttcgttcctg

SEQ ID NO: 1961100 - DNA, 25 bp, Homo sapien
ctgcttccaggccgaccccgacggg

SEQ ID NO: 1961101 - DNA, 25 bp, Homo sapien
cacagcgaggcaccttgctggtgga

SEQ ID NO: 1961102 - DNA, 25 bp, Homo sapien
gttccctctgtatcggggcgggcag

SEQ ID NO: 1961103 - DNA, 25 bp, Homo sapien
ttgacacagcgaggcaccttgctgg

SEQ ID NO: 1961104 - DNA, 25 bp, Homo sapien
aagcaggggttggataaacagccat

SEQ ID NO: 1961105 - DNA, 25 bp, Homo sapien
caggagccgcatgaccaggacccat

SEQ ID NO: 1961106 - DNA, 25 bp, Homo sapien
agtgggtgccattgcccaagaagcc

SEQ ID NO: 1961107 - DNA, 25 bp, Homo sapien
gacccatcggggaagctgctgcact

SEQ ID NO: 1961108 - DNA, 25 bp, Homo sapien
gtgggagaaggcggagcagagttca

SEQ ID NO: 1961109 - DNA, 25 bp, Homo sapien
ctgggtgggagaaggcggagcagag

SEQ ID NO: 1961110 - DNA, 25 bp, Homo sapien
gagaaggcggagcagagttcaccac

SEQ ID NO: 1961111 - DNA, 25 bp, Homo sapien
tgggagaaggcggagcagagttcac

SEQ ID NO: 1961112 - DNA, 25 bp, Homo sapien
aggccacgccacctggcatcttttt

SEQ ID NO: 1961113 - DNA, 25 bp, Homo sapien
aagtagttatctttgcgtgtgcaac

SEQ ID NO: 1961114 - DNA, 25 bp, Homo sapien
catcagaatggaagcccgggtttca

SEQ ID NO: 1961115 - DNA, 25 bp, Homo sapien
gaaatacaggaggactgaaacacag

SEQ ID NO: 1961116 - DNA, 25 bp, Homo sapien
tcttgttgcacatctgacgctcctg

SEQ ID NO: 1961117 - DNA, 25 bp, Homo sapien
atcccaccggcacaggtgacagtgc

SEQ ID NO: 1961118 - DNA, 25 bp, Homo sapien
ttccctccgtactgaggctcagggc

SEQ ID NO: 1961119 - DNA, 25 bp, Homo sapien
acagtgcaggccgaccacggggacc

SEQ ID NO: 1961120 - DNA, 25 bp, Homo sapien
gatgcgtgtgatattgccaactcca

SEQ ID NO: 1961121 - DNA, 25 bp, Homo sapien
tattgccaactccacaggtcacaga

SEQ ID NO: 1961122 - DNA, 25 bp, Homo sapien
ttgcagagacggatgcgtgtgatat

SEQ ID NO: 1961123 - DNA, 25 bp, Homo sapien
tttgcaattcttgccccccatctgg

SEQ ID NO: 1961124 - DNA, 25 bp, Homo sapien
ccagtggctccagccgccgtcctgc

SEQ ID NO: 1961125 - DNA, 25 bp, Homo sapien
accagtggctccagccgccgtcctg

SEQ ID NO: 1961126 - DNA, 25 bp, Homo sapien
agtggctccagccgccgtcctgccg

SEQ ID NO: 1961127 - DNA, 25 bp, Homo sapien
tggctccagccgccgtcctgccgga

SEQ ID NO: 1961128 - DNA, 25 bp, Homo sapien
agatcaggctgtgccgcctagaggg

SEQ ID NO: 1961129 - DNA, 25 bp, Homo sapien
agagagatcaggctgtgccgcctag

SEQ ID NO: 1961130 - DNA, 25 bp, Homo sapien
agagatcaggctgtgccgcctagag

SEQ ID NO: 1961131 - DNA, 25 bp, Homo sapien
ggctgtgccgcctagaggggtattt

SEQ ID NO: 1961132 - DNA, 25 bp, Homo sapien
ggtgtcacacttgctcagactgcaa

SEQ ID NO: 1961133 - DNA, 25 bp, Homo sapien
caagcaggtgttgctggtgacgtca

SEQ ID NO: 1961134 - DNA, 25 bp, Homo sapien
cacacgtcacggagcactgggtcca

SEQ ID NO: 1961135 - DNA, 25 bp, Homo sapien
gggtcccagagccacacgtcacgga

SEQ ID NO: 1961136 - DNA, 25 bp, Homo sapien
gaaagagcaacctgacgccagaaat

SEQ ID NO: 1961137 - DNA, 25 bp, Homo sapien
gagaagcccagtgaatgcgccatga

SEQ ID NO: 1961138 - DNA, 25 bp, Homo sapien
taggtaatcacagccgctaaatggg

SEQ ID NO: 1961139 - DNA, 25 bp, Homo sapien
aatcattcccgtgaggagagaagcc

SEQ ID NO: 1961140 - DNA, 25 bp, Homo sapien
ctcagggggctgaacctcactcttc

SEQ ID NO: 1961141 - DNA, 25 bp, Homo sapien
actcagggggctgaacctcactctt

SEQ ID NO: 1961142 - DNA, 25 bp, Homo sapien
tcagggggctgaacctcactcttct

SEQ ID NO: 1961143 - DNA, 25 bp, Homo sapien
ggcaggaagggcagcattcgccttc

SEQ ID NO: 1961144 - DNA, 25 bp, Homo sapien
caggcgggcaggtgatttggtggca

SEQ ID NO: 1961145 - DNA, 25 bp, Homo sapien
caggtgatttggtggcaaatggttt

SEQ ID NO: 1961146 - DNA, 25 bp, Homo sapien
tccacaaaggatggactggcgcagg

SEQ ID NO: 1961147 - DNA, 25 bp, Homo sapien
tgagcagcaaggatgcaacagagag

SEQ ID NO: 1961148 - DNA, 25 bp, Homo sapien
actgagcagcaaggatgcaacagag

SEQ ID NO: 1961149 - DNA, 25 bp, Homo sapien
gagcagcaaggatgcaacagagagc

SEQ ID NO: 1961150 - DNA, 25 bp, Homo sapien
ctgagcagcaaggatgcaacagaga

SEQ ID NO: 1961151 - DNA, 25 bp, Homo sapien
cttgtcttaggagggccaccaatga

SEQ ID NO: 1961152 - DNA, 25 bp, Homo sapien
tcattttccgcaaagaaccggccat

SEQ ID NO: 1961153 - DNA, 25 bp, Homo sapien
tcctgccagcaagctgacatgttcc

SEQ ID NO: 1961154 - DNA, 25 bp, Homo sapien
tgcaggtacacgtggtgcagctgtc

SEQ ID NO: 1961155 - DNA, 25 bp, Homo sapien
gccttcctggagagcggaaatcgcg

SEQ ID NO: 1961156 - DNA, 25 bp, Homo sapien
tcatccctgggtggaagttccggaa

SEQ ID NO: 1961157 - DNA, 25 bp, Homo sapien
cataacgacaggcagggatacagcc

SEQ ID NO: 1961158 - DNA, 25 bp, Homo sapien
gatgaaaaacaaagttcctccttca

SEQ ID NO: 1961159 - DNA, 25 bp, Homo sapien
tattgagcaaggatcctgaggagcc

SEQ ID NO: 1961160 - DNA, 25 bp, Homo sapien
tttttacatcgagcatgaggcactg

SEQ ID NO: 1961161 - DNA, 25 bp, Homo sapien
aggcactgccaagccagggaatgtt

SEQ ID NO: 1961162 - DNA, 25 bp, Homo sapien
tgttgatacctgctgagatgggcca

SEQ ID NO: 1961163 - DNA, 25 bp, Homo sapien
ctggttcacgaggacgtggagcccc

SEQ ID NO: 1961164 - DNA, 25 bp, Homo sapien
cacgtactcggtggtgacatgcgga

SEQ ID NO: 1961165 - DNA, 25 bp, Homo sapien
tcttgaggttctcgctgagctggtt

SEQ ID NO: 1961166 - DNA, 25 bp, Homo sapien
cgagagctcctggaccatgtttccc

SEQ ID NO: 1961167 - DNA, 25 bp, Homo sapien
ctgagggcaagcgtagaagggccgt

SEQ ID NO: 1961168 - DNA, 25 bp, Homo sapien
gcaagcgtagaagggccgtgagcat

SEQ ID NO: 1961169 - DNA, 25 bp, Homo sapien
tagaagggccgtgagcatcacagag

SEQ ID NO: 1961170 - DNA, 25 bp, Homo sapien
agcgtagaagggccgtgagcatcac

SEQ ID NO: 1961171 - DNA, 25 bp, Homo sapien
atgacccgccctggctcccggagcg

SEQ ID NO: 1961172 - DNA, 25 bp, Homo sapien
aacagagggaggatgacccgccctg

SEQ ID NO: 1961173 - DNA, 25 bp, Homo sapien
tgggaacagagggaggatgacccgc

SEQ ID NO: 1961174 - DNA, 25 bp, Homo sapien
gaacagagggaggatgacccgccct

SEQ ID NO: 1961175 - DNA, 25 bp, Homo sapien
cctactagggtgtatgctggtaaca

SEQ ID NO: 1961176 - DNA, 25 bp, Homo sapien
catgtgattaggaacaccgcgaagg

SEQ ID NO: 1961177 - DNA, 25 bp, Homo sapien
gacaactgactcaacatgccatgga

SEQ ID NO: 1961178 - DNA, 25 bp, Homo sapien
tcaggtaacaggcacagtgagggtc

SEQ ID NO: 1961179 - DNA, 25 bp, Homo sapien
cgtgtggcagacgtgagctccgctt

SEQ ID NO: 1961180 - DNA, 25 bp, Homo sapien
gaacctgtcatagtgaccttcagaa

SEQ ID NO: 1961181 - DNA, 25 bp, Homo sapien
gatgatgtacggcatttaatgaacc

SEQ ID NO: 1961182 - DNA, 25 bp, Homo sapien
gaaagtgcccatctcacgtagtcat

SEQ ID NO: 1961183 - DNA, 25 bp, Homo sapien
caccatgtcacaatagaaatccatc

SEQ ID NO: 1961184 - DNA, 25 bp, Homo sapien
gaaatccatccaagccagtatataa

SEQ ID NO: 1961185 - DNA, 25 bp, Homo sapien
tacaagcatgaatgcacacacatac

SEQ ID NO: 1961186 - DNA, 25 bp, Homo sapien
ccaagccagtatataaaatgcattt

SEQ ID NO: 1961187 - DNA, 25 bp, Homo sapien
aaacactaggtggacgttctgaagc

SEQ ID NO: 1961188 - DNA, 25 bp, Homo sapien
tggccttgctggcaacccttcttgc

SEQ ID NO: 1961189 - DNA, 25 bp, Homo sapien
gctggcaacccttcttgcttagaat

SEQ ID NO: 1961190 - DNA, 25 bp, Homo sapien
ttccacagagttttcaaacactagg

SEQ ID NO: 1961191 - DNA, 25 bp, Homo sapien
tcaatccagtaggtgagatccagcg

SEQ ID NO: 1961192 - DNA, 25 bp, Homo sapien
ggatgtagtcaaagcgcacgaagcg

SEQ ID NO: 1961193 - DNA, 25 bp, Homo sapien
gacttgccgtcctgcttgagctggg

SEQ ID NO: 1961194 - DNA, 25 bp, Homo sapien
gagacgatctcgaactgcctctggg

SEQ ID NO: 1961195 - DNA, 25 bp, Homo sapien
ttgcgtgctgggccacacccacaga

SEQ ID NO: 1961196 - DNA, 25 bp, Homo sapien
gccagcaggaccagcctccagacca

SEQ ID NO: 1961197 - DNA, 25 bp, Homo sapien
cccacagagccagcaggaccagcct

SEQ ID NO: 1961198 - DNA, 25 bp, Homo sapien
cttgcgtgctgggccacacccacag

SEQ ID NO: 1961199 - DNA, 25 bp, Homo sapien
gtgatgagtccacagctgcaaccct

SEQ ID NO: 1961200 - DNA, 25 bp, Homo sapien
tgagcgagactggcccagtgactca

SEQ ID NO: 1961201 - DNA, 25 bp, Homo sapien
tacaggaaacccttgttagtgatga

SEQ ID NO: 1961202 - DNA, 25 bp, Homo sapien
ttagtgatgagtccacagctgcaac

SEQ ID NO: 1961203 - DNA, 25 bp, Homo sapien
taacagtttgcatataaaactcagc

SEQ ID NO: 1961204 - DNA, 25 bp, Homo sapien
atgaccattgaataacagtttgcat

SEQ ID NO: 1961205 - DNA, 25 bp, Homo sapien
cagcaccaactggatttgtggcaaa

SEQ ID NO: 1961206 - DNA, 25 bp, Homo sapien
ctcagcaccaactggatttgtggca

SEQ ID NO: 1961207 - DNA, 25 bp, Homo sapien
tcctcatccgtagaatgaaacgtag

SEQ ID NO: 1961208 - DNA, 25 bp, Homo sapien
gaaacgtagcgtcatgtaaaatgcc

SEQ ID NO: 1961209 - DNA, 25 bp, Homo sapien
ttcggcaaatgaaacttcaccaggg

SEQ ID NO: 1961210 - DNA, 25 bp, Homo sapien
tgcccacctcatcgggttgtcatga

SEQ ID NO: 1961211 - DNA, 25 bp, Homo sapien
tgccgggtacgtcgcagtcccctaa

SEQ ID NO: 1961212 - DNA, 25 bp, Homo sapien
ccacactgccgggtacgtcgcagtc

SEQ ID NO: 1961213 - DNA, 25 bp, Homo sapien
gtacgtcgcagtcccctaaggacag

SEQ ID NO: 1961214 - DNA, 25 bp, Homo sapien
tcagcccacactgccgggtacgtcg

SEQ ID NO: 1961215 - DNA, 25 bp, Homo sapien
gaaacaccacgtgaagaaacacttg

SEQ ID NO: 1961216 - DNA, 25 bp, Homo sapien
ttcaagcgggcagtagaaacaccac

SEQ ID NO: 1961217 - DNA, 25 bp, Homo sapien
taagttaagaatcgaaattgctcct

SEQ ID NO: 1961218 - DNA, 25 bp, Homo sapien
tacttttcagatattccgggagttg

SEQ ID NO: 1961219 - DNA, 25 bp, Homo sapien
ggtttcagtgttccggaccgagtca

SEQ ID NO: 1961220 - DNA, 25 bp, Homo sapien
ttatatgccgcttctcctgtgcagg

SEQ ID NO: 1961221 - DNA, 25 bp, Homo sapien
ttgccaaaaagatgcagtgatgact

SEQ ID NO: 1961222 - DNA, 25 bp, Homo sapien
accgagtcagaaaggcgcaggctct

SEQ ID NO: 1961223 - DNA, 25 bp, Homo sapien
gcccctctgtactggatgccgtctc

SEQ ID NO: 1961224 - DNA, 25 bp, Homo sapien
ccagcccctctgtactggatgccgt

SEQ ID NO: 1961225 - DNA, 25 bp, Homo sapien
aagtccagcccctctgtactggatg

SEQ ID NO: 1961226 - DNA, 25 bp, Homo sapien
ctgctgcaggggtccaagtccagcc

SEQ ID NO: 1961227 - DNA, 25 bp, Homo sapien
tccttctgtaaaatctggcagccca

SEQ ID NO: 1961228 - DNA, 25 bp, Homo sapien
gaaggtatgtattcatgactccacg

SEQ ID NO: 1961229 - DNA, 25 bp, Homo sapien
gagaagatgggcctccttctgtaaa

SEQ ID NO: 1961230 - DNA, 25 bp, Homo sapien
ccacgtgccgatgggcaggtacaga

SEQ ID NO: 1961231 - DNA, 25 bp, Homo sapien
ctgttcctttcacagtgacgcaggg

SEQ ID NO: 1961232 - DNA, 25 bp, Homo sapien
gttgtgcatggactgcgtcagaaac

SEQ ID NO: 1961233 - DNA, 25 bp, Homo sapien
ctgaaccgtggtttccgttgtcagg

SEQ ID NO: 1961234 - DNA, 25 bp, Homo sapien
tccgttgtcaggttgtgcatggact

SEQ ID NO: 1961235 - DNA, 25 bp, Homo sapien
cacattgaatgtgcagaggcctgag

SEQ ID NO: 1961236 - DNA, 25 bp, Homo sapien
tggacacattgaatgtgcagaggcc

SEQ ID NO: 1961237 - DNA, 25 bp, Homo sapien
ctggacacattgaatgtgcagaggc

SEQ ID NO: 1961238 - DNA, 25 bp, Homo sapien
gacacattgaatgtgcagaggcctg

SEQ ID NO: 1961239 - DNA, 25 bp, Homo sapien
gggctgcgttcatggcccaggcttc

SEQ ID NO: 1961240 - DNA, 25 bp, Homo sapien
cccttgtaaacccagcgtggacctg

SEQ ID NO: 1961241 - DNA, 25 bp, Homo sapien
tgcccagccatcactccccttgtaa

SEQ ID NO: 1961242 - DNA, 25 bp, Homo sapien
gccatcactccccttgtaaacccag

SEQ ID NO: 1961243 - DNA, 25 bp, Homo sapien
cagatgcgagtttgctggctgtccc

SEQ ID NO: 1961244 - DNA, 25 bp, Homo sapien
tctgcatgggccatttggatgacta

SEQ ID NO: 1961245 - DNA, 25 bp, Homo sapien
gactagcttgggctgccttttccac

SEQ ID NO: 1961246 - DNA, 25 bp, Homo sapien
tgccacagatgcgagtttgctggct

SEQ ID NO: 1961247 - DNA, 25 bp, Homo sapien
catccggcttcttgcccaccagcat

SEQ ID NO: 1961248 - DNA, 25 bp, Homo sapien
cacatccggcttcttgcccaccagc

SEQ ID NO: 1961249 - DNA, 25 bp, Homo sapien
cacgcacatccggcttcttgcccac

SEQ ID NO: 1961250 - DNA, 25 bp, Homo sapien
cgcacatccggcttcttgcccacca

SEQ ID NO: 1961251 - DNA, 25 bp, Homo sapien
cacactgattgatcagtgccagctc

SEQ ID NO: 1961252 - DNA, 25 bp, Homo sapien
gagtgtgaacagtggatgtgtcttc

SEQ ID NO: 1961253 - DNA, 25 bp, Homo sapien
agttcagccactggtcaaacattga

SEQ ID NO: 1961254 - DNA, 25 bp, Homo sapien
caaacattgaagatgagagtgtgaa

SEQ ID NO: 1961255 - DNA, 25 bp, Homo sapien
cattaaagagcaattacaagcacct

SEQ ID NO: 1961256 - DNA, 25 bp, Homo sapien
tgctccaagaacatgccggcattcc

SEQ ID NO: 1961257 - DNA, 25 bp, Homo sapien
ggctcctgtactccccggtgtgtgt

SEQ ID NO: 1961258 - DNA, 25 bp, Homo sapien
cagtgatacgccatgtgttgactca

SEQ ID NO: 1961259 - DNA, 25 bp, Homo sapien
tgcctgcaatgttgggtacgtggcc

SEQ ID NO: 1961260 - DNA, 25 bp, Homo sapien
tctctttgatcagatctagtacagg

SEQ ID NO: 1961261 - DNA, 25 bp, Homo sapien
gaatgcatcccagaagttgatattg

SEQ ID NO: 1961262 - DNA, 25 bp, Homo sapien
tcagatctagtacagggtgagtatc

SEQ ID NO: 1961263 - DNA, 25 bp, Homo sapien
gggcagaccgctttctttaagaatg

SEQ ID NO: 1961264 - DNA, 25 bp, Homo sapien
aatctatccacaagccagagccaag

SEQ ID NO: 1961265 - DNA, 25 bp, Homo sapien
cgtggaatctatccacaagccagag

SEQ ID NO: 1961266 - DNA, 25 bp, Homo sapien
gggaacaaatggctggagtgcttca

SEQ ID NO: 1961267 - DNA, 25 bp, Homo sapien
gctggagtgcttcaaagacagaaca

SEQ ID NO: 1961268 - DNA, 25 bp, Homo sapien
cttgtgtgaggccgggacagcagaa

SEQ ID NO: 1961269 - DNA, 25 bp, Homo sapien
gtgaggccgggacagcagaagccat

SEQ ID NO: 1961270 - DNA, 25 bp, Homo sapien
tgtgaggccgggacagcagaagcca

SEQ ID NO: 1961271 - DNA, 25 bp, Homo sapien
tagtgactgactacacgttctcagc

SEQ ID NO: 1961272 - DNA, 25 bp, Homo sapien
cgttctcagcaacacttcggccagt

SEQ ID NO: 1961273 - DNA, 25 bp, Homo sapien
cacgtttccgatagcagtgtgtggg

SEQ ID NO: 1961274 - DNA, 25 bp, Homo sapien
taagcactaagggtcagaaaaacca

SEQ ID NO: 1961275 - DNA, 25 bp, Homo sapien
gacaggaatccagtacacaaacaga

SEQ ID NO: 1961276 - DNA, 25 bp, Homo sapien
taggccaaagttgcacaggtctgtt

SEQ ID NO: 1961277 - DNA, 25 bp, Homo sapien
tgcccatgcatgcttcgacaggaat

SEQ ID NO: 1961278 - DNA, 25 bp, Homo sapien
taaacctgattgaggctgcccatgc

SEQ ID NO: 1961279 - DNA, 25 bp, Homo sapien
aacaggttttgcctcagaggtgtcc

SEQ ID NO: 1961280 - DNA, 25 bp, Homo sapien
cattctttaaacagtcgtgtctgct

SEQ ID NO: 1961281 - DNA, 25 bp, Homo sapien
caggttttgcctcagaggtgtcctc

SEQ ID NO: 1961282 - DNA, 25 bp, Homo sapien
acaggttttgcctcagaggtgtcct

SEQ ID NO: 1961283 - DNA, 25 bp, Homo sapien
gttccgttggctttggtgaatgccc

SEQ ID NO: 1961284 - DNA, 25 bp, Homo sapien
gactggaagtgttacaagacaggaa

SEQ ID NO: 1961285 - DNA, 25 bp, Homo sapien
tggaggagtcgaggccatagcattt

SEQ ID NO: 1961286 - DNA, 25 bp, Homo sapien
gaatgccctgcttgcgttttaggtg

SEQ ID NO: 1961287 - DNA, 25 bp, Homo sapien
cagcatagactggggtgggcatcat

SEQ ID NO: 1961288 - DNA, 25 bp, Homo sapien
catggattttggagcgggcagcata

SEQ ID NO: 1961289 - DNA, 25 bp, Homo sapien
gggcatcatctcctgtacagtgggc

SEQ ID NO: 1961290 - DNA, 25 bp, Homo sapien
gagtgggcaccatggattttggagc

SEQ ID NO: 1961291 - DNA, 25 bp, Homo sapien
aaaaatttacaagtgccggtatcat

SEQ ID NO: 1961292 - DNA, 25 bp, Homo sapien
gaataatgtacgttgcacccattgg

SEQ ID NO: 1961293 - DNA, 25 bp, Homo sapien
tcagtgcttggtctatcattagttc

SEQ ID NO: 1961294 - DNA, 25 bp, Homo sapien
gatagacacataggttcattccgta

SEQ ID NO: 1961295 - DNA, 25 bp, Homo sapien
ttctctccaatgcagggtctgcggg

SEQ ID NO: 1961296 - DNA, 25 bp, Homo sapien
actgcagggtcttcacaggagccca

SEQ ID NO: 1961297 - DNA, 25 bp, Homo sapien
ttctctccaatgcagggtctgtggg

SEQ ID NO: 1961298 - DNA, 25 bp, Homo sapien
gctccccggattcctggtgaaccag

SEQ ID NO: 1961299 - DNA, 25 bp, Homo sapien
tgggttcctggttctgactcatatg

SEQ ID NO: 1961300 - DNA, 25 bp, Homo sapien
tgttggaactctgtgccagcctgtt

SEQ ID NO: 1961301 - DNA, 25 bp, Homo sapien
ttctgactcatatgattttgggaag

SEQ ID NO: 1961302 - DNA, 25 bp, Homo sapien
agcttctattaaaactaggttctgg

SEQ ID NO: 1961303 - DNA, 25 bp, Homo sapien
aaggttccttgtggttcatattcat

SEQ ID NO: 1961304 - DNA, 25 bp, Homo sapien
gtagctgcgaacacagcctggaggc

SEQ ID NO: 1961305 - DNA, 25 bp, Homo sapien
tatccatcaggcagctgcgaggatg

SEQ ID NO: 1961306 - DNA, 25 bp, Homo sapien
ggcccaacatcccagcgggtggaaa

SEQ ID NO: 1961307 - DNA, 25 bp, Homo sapien
gcagctgcgaggatgtcaacgcgta

SEQ ID NO: 1961308 - DNA, 25 bp, Homo sapien
atcgacgccgataccaggctcagag

SEQ ID NO: 1961309 - DNA, 25 bp, Homo sapien
agcgggcagacacatccagtaggcg

SEQ ID NO: 1961310 - DNA, 25 bp, Homo sapien
gctcagaggacagaaccatattcca

SEQ ID NO: 1961311 - DNA, 25 bp, Homo sapien
gccagcagcgcatgtagacagcatc

SEQ ID NO: 1961312 - DNA, 25 bp, Homo sapien
cagtcaccttaattcagcggcggct

SEQ ID NO: 1961313 - DNA, 25 bp, Homo sapien
ctgatggaggtacagcgaccacact

SEQ ID NO: 1961314 - DNA, 25 bp, Homo sapien
ggtcagcgtcctgacaagtcccagg

SEQ ID NO: 1961315 - DNA, 25 bp, Homo sapien
cacacttggaagatcgctgccttga

SEQ ID NO: 1961316 - DNA, 25 bp, Homo sapien
tagccacagatgacgcatcctggcc

SEQ ID NO: 1961317 - DNA, 25 bp, Homo sapien
tgtccacccacaggaacccccagag

SEQ ID NO: 1961318 - DNA, 25 bp, Homo sapien
cacagatgacgcatcctggccgggc

SEQ ID NO: 1961319 - DNA, 25 bp, Homo sapien
ggtagccacagatgacgcatcctgg

SEQ ID NO: 1961320 - DNA, 25 bp, Homo sapien
atagagtcccttgctggaatctgcg

SEQ ID NO: 1961321 - DNA, 25 bp, Homo sapien
attgacaacgatgttctccacccaa

SEQ ID NO: 1961322 - DNA, 25 bp, Homo sapien
ggacactgagtctaggccacctgtt

SEQ ID NO: 1961323 - DNA, 25 bp, Homo sapien
cgatgttctccacccaaatagagtc

SEQ ID NO: 1961324 - DNA, 25 bp, Homo sapien
agggatgcacccggtgctccagcag

SEQ ID NO: 1961325 - DNA, 25 bp, Homo sapien
ctccagcagcgcattccagtgacag

SEQ ID NO: 1961326 - DNA, 25 bp, Homo sapien
ggttcccagggatgcacccggtgct

SEQ ID NO: 1961327 - DNA, 25 bp, Homo sapien
gctccagcagcgcattccagtgaca

SEQ ID NO: 1961328 - DNA, 25 bp, Homo sapien
cacctcgaaggtgactggtcccggt

SEQ ID NO: 1961329 - DNA, 25 bp, Homo sapien
gatgtatttggtgcacacctcgaag

SEQ ID NO: 1961330 - DNA, 25 bp, Homo sapien
agccagacacctgccgggcatctct

SEQ ID NO: 1961331 - DNA, 25 bp, Homo sapien
tcgcttgaggatgtatttggtgcac

SEQ ID NO: 1961332 - DNA, 25 bp, Homo sapien
gcagtccacacagctctgagaactg

SEQ ID NO: 1961333 - DNA, 25 bp, Homo sapien
tccacacagctctgagaactgagca

SEQ ID NO: 1961334 - DNA, 25 bp, Homo sapien
ccacacagctctgagaactgagcat

SEQ ID NO: 1961335 - DNA, 25 bp, Homo sapien
agtccacacagctctgagaactgag

SEQ ID NO: 1961336 - DNA, 25 bp, Homo sapien
tttaagtctatacctccgtctggag

SEQ ID NO: 1961337 - DNA, 25 bp, Homo sapien
caggatttcgggtcataggataggc

SEQ ID NO: 1961338 - DNA, 25 bp, Homo sapien
tgctgcgcggagtcatcactgtcat

SEQ ID NO: 1961339 - DNA, 25 bp, Homo sapien
gacacagtgagcttacccaagggca

SEQ ID NO: 1961340 - DNA, 25 bp, Homo sapien
ttgcatctgattccctggtttctag

SEQ ID NO: 1961341 - DNA, 25 bp, Homo sapien
gttgcatctgattccctggtttcta

SEQ ID NO: 1961342 - DNA, 25 bp, Homo sapien
gcatctgattccctggtttctagct

SEQ ID NO: 1961343 - DNA, 25 bp, Homo sapien
atctgattccctggtttctagctcc

SEQ ID NO: 1961344 - DNA, 25 bp, Homo sapien
acctctcctcgtaccatcagctgtg

SEQ ID NO: 1961345 - DNA, 25 bp, Homo sapien
ggtcaggcagatgtcacacctctcc

SEQ ID NO: 1961346 - DNA, 25 bp, Homo sapien
ggtaccattcctgtgatcctgatgg

SEQ ID NO: 1961347 - DNA, 25 bp, Homo sapien
ccaccacattgagtgagacacagac

SEQ ID NO: 1961348 - DNA, 25 bp, Homo sapien
tcacagggaccgaaaatgacctcac

SEQ ID NO: 1961349 - DNA, 25 bp, Homo sapien
tgcagacaaccaaagtcacagggac

SEQ ID NO: 1961350 - DNA, 25 bp, Homo sapien
tctgcaggtaaccaaagtcacaggg

SEQ ID NO: 1961351 - DNA, 25 bp, Homo sapien
tgcaggtaaccaaagtcacagggac

SEQ ID NO: 1961352 - DNA, 25 bp, Homo sapien
tgactgcatggccgctggaccacat

SEQ ID NO: 1961353 - DNA, 25 bp, Homo sapien
cacatctgctgagtcgtgcctgagg

SEQ ID NO: 1961354 - DNA, 25 bp, Homo sapien
tcactgactgcatggccgctggacc

SEQ ID NO: 1961355 - DNA, 25 bp, Homo sapien
actgactgcatggccgctggaccac

SEQ ID NO: 1961356 - DNA, 25 bp, Homo sapien
ttctctgctccagcatcgagaaggc

SEQ ID NO: 1961357 - DNA, 25 bp, Homo sapien
ccactctcctcaagtttttgccatg

SEQ ID NO: 1961358 - DNA, 25 bp, Homo sapien
cacatctcccctggcggctttaaag

SEQ ID NO: 1961359 - DNA, 25 bp, Homo sapien
cagcatcgagaaggccagcacatct

SEQ ID NO: 1961360 - DNA, 25 bp, Homo sapien
caaatactctctggtaggtgcatta

SEQ ID NO: 1961361 - DNA, 25 bp, Homo sapien
ggtaggtgcattaggtccaggtcta

SEQ ID NO: 1961362 - DNA, 25 bp, Homo sapien
cattaggtccaggtctatacatcca

SEQ ID NO: 1961363 - DNA, 25 bp, Homo sapien
acatccaaggtgcacgagcaatttg

SEQ ID NO: 1961364 - DNA, 25 bp, Homo sapien
tttaccaccccagcaaggaacatta

SEQ ID NO: 1961365 - DNA, 25 bp, Homo sapien
gacttagccactagtttccggatgt

SEQ ID NO: 1961366 - DNA, 25 bp, Homo sapien
tcagactgaggatgcttttaccacc

SEQ ID NO: 1961367 - DNA, 25 bp, Homo sapien
gtcccatggatagaggctggcactg

SEQ ID NO: 1961368 - DNA, 25 bp, Homo sapien
tgaagtccaataaagaaaataaatg

SEQ ID NO: 1961369 - DNA, 25 bp, Homo sapien
caataaagaaaataaatgcaggatt

SEQ ID NO: 1961370 - DNA, 25 bp, Homo sapien
ctgaagtccaataaagaaaataaat

SEQ ID NO: 1961371 - DNA, 25 bp, Homo sapien
gtccaataaagaaaataaatgcagg

SEQ ID NO: 1961372 - DNA, 25 bp, Homo sapien
gggttgccgggttactctccatcag

SEQ ID NO: 1961373 - DNA, 25 bp, Homo sapien
gggttactctccatcaggtgcacgg

SEQ ID NO: 1961374 - DNA, 25 bp, Homo sapien
ttactctccatcaggtgcacggagg

SEQ ID NO: 1961375 - DNA, 25 bp, Homo sapien
gccgggttactctccatcaggtgca

SEQ ID NO: 1961376 - DNA, 25 bp, Homo sapien
tagggtcctcaaaaacagctactgg

SEQ ID NO: 1961377 - DNA, 25 bp, Homo sapien
gaattccatccagtgcgtgtctagt

SEQ ID NO: 1961378 - DNA, 25 bp, Homo sapien
gaaacgaggtcattggcccataggg

SEQ ID NO: 1961379 - DNA, 25 bp, Homo sapien
catgggtacccatctgatctcggat

SEQ ID NO: 1961380 - DNA, 25 bp, Homo sapien
gtaacaatgagaaacggcttgtccc

SEQ ID NO: 1961381 - DNA, 25 bp, Homo sapien
taacaatgagaaacggcttgtccca

SEQ ID NO: 1961382 - DNA, 25 bp, Homo sapien
aacaatgagaaacggcttgtcccac

SEQ ID NO: 1961383 - DNA, 25 bp, Homo sapien
gcttcccagcggtgttcaggacaca

SEQ ID NO: 1961384 - DNA, 25 bp, Homo sapien
tgtgtccggtcatactctctggtca

SEQ ID NO: 1961385 - DNA, 25 bp, Homo sapien
tgcttggcctttagtgccccgatcg

SEQ ID NO: 1961386 - DNA, 25 bp, Homo sapien
cctgcggagcgtctgctgacggctt

SEQ ID NO: 1961387 - DNA, 25 bp, Homo sapien
caccaggtggctgtcacttatatct

SEQ ID NO: 1961388 - DNA, 25 bp, Homo sapien
accaccaggtggctgtcacttatat

SEQ ID NO: 1961389 - DNA, 25 bp, Homo sapien
ctgaccaccaggtggctgtcactta

SEQ ID NO: 1961390 - DNA, 25 bp, Homo sapien
ccaggtggctgtcacttatatctcc

SEQ ID NO: 1961391 - DNA, 25 bp, Homo sapien
tcaggtcctgggagcgatctttatc

SEQ ID NO: 1961392 - DNA, 25 bp, Homo sapien
ctgggagcgatctttatccttctgg

SEQ ID NO: 1961393 - DNA, 25 bp, Homo sapien
ggtcctgggagcgatctttatcctt

SEQ ID NO: 1961394 - DNA, 25 bp, Homo sapien
tcctgggagcgatctttatccttct

SEQ ID NO: 1961395 - DNA, 25 bp, Homo sapien
gagtctccgtggactttccaggctg

SEQ ID NO: 1961396 - DNA, 25 bp, Homo sapien
gaaaagaattcctcactagcaattg

SEQ ID NO: 1961397 - DNA, 25 bp, Homo sapien
aacacagagaacgcctttcagcatc

SEQ ID NO: 1961398 - DNA, 25 bp, Homo sapien
cagctcggctcactcagagcagagt

SEQ ID NO: 1961399 - DNA, 25 bp, Homo sapien
ttatgagaaacacgcatttctgtgc

SEQ ID NO: 1961400 - DNA, 25 bp, Homo sapien
ctcacgggaggttttgacgcagtga

SEQ ID NO: 1961401 - DNA, 25 bp, Homo sapien
tttgacgcagtgattagcatccagg

SEQ ID NO: 1961402 - DNA, 25 bp, Homo sapien
ttctgtggagaaagcggctcacggg

SEQ ID NO: 1961403 - DNA, 25 bp, Homo sapien
catagagcactcgaagggtgactcc

SEQ ID NO: 1961404 - DNA, 25 bp, Homo sapien
cagacttgggtcaaaaaggccgtgc

SEQ ID NO: 1961405 - DNA, 25 bp, Homo sapien
tgatgaccacattacgccgaggcac

SEQ ID NO: 1961406 - DNA, 25 bp, Homo sapien
tctagaagcgatgccacgggaggat

SEQ ID NO: 1961407 - DNA, 25 bp, Homo sapien
gaaagctgatgcctgaccttggcat

SEQ ID NO: 1961408 - DNA, 25 bp, Homo sapien
tccagctcaacaagtggaagtccag

SEQ ID NO: 1961409 - DNA, 25 bp, Homo sapien
agaatatcctccaggcgatccggct

SEQ ID NO: 1961410 - DNA, 25 bp, Homo sapien
tccttagattctccacgacacgtgg

SEQ ID NO: 1961411 - DNA, 25 bp, Homo sapien
gtgcgcaggaggaggctggcagcgc

SEQ ID NO: 1961412 - DNA, 25 bp, Homo sapien
ctgtgcgcaggaggaggctggcagc

SEQ ID NO: 1961413 - DNA, 25 bp, Homo sapien
tgtgcgcaggaggaggctggcagcg

SEQ ID NO: 1961414 - DNA, 25 bp, Homo sapien
ctgggaacgtgcagggaggcgcctg

SEQ ID NO: 1961415 - DNA, 25 bp, Homo sapien
ggaacgtgcagggaggcgcctggga

SEQ ID NO: 1961416 - DNA, 25 bp, Homo sapien
aacgtgcagggaggcgcctgggaat

SEQ ID NO: 1961417 - DNA, 25 bp, Homo sapien
tgggaacgtgcagggaggcgcctgg

SEQ ID NO: 1961418 - DNA, 25 bp, Homo sapien
gcagttcttccaggacgatggaaaa

SEQ ID NO: 1961419 - DNA, 25 bp, Homo sapien
cttccaggacgatggaaaaactact

SEQ ID NO: 1961420 - DNA, 25 bp, Homo sapien
tcttccaggacgatggaaaaactac

SEQ ID NO: 1961421 - DNA, 25 bp, Homo sapien
cagttcttccaggacgatggaaaaa

SEQ ID NO: 1961422 - DNA, 25 bp, Homo sapien
ccctctctttcctcacctttaaatg

SEQ ID NO: 1961423 - DNA, 25 bp, Homo sapien
cctcacctttaaatggccaaaatag

SEQ ID NO: 1961424 - DNA, 25 bp, Homo sapien
tctttcctcacctttaaatggccaa

SEQ ID NO: 1961425 - DNA, 25 bp, Homo sapien
tcctcacctttaaatggccaaaata

SEQ ID NO: 1961426 - DNA, 25 bp, Homo sapien
caaatttacagtaagatatagactt

SEQ ID NO: 1961427 - DNA, 25 bp, Homo sapien
tataaattatgtccatcagagctat

SEQ ID NO: 1961428 - DNA, 25 bp, Homo sapien
tgatatctgagctattaaaagaaaa

SEQ ID NO: 1961429 - DNA, 25 bp, Homo sapien
agagctataaaattgatatctgagc

SEQ ID NO: 1961430 - DNA, 25 bp, Homo sapien
cgtgccaattgagttctgcgagagc

SEQ ID NO: 1961431 - DNA, 25 bp, Homo sapien
aagctcgccgtgacacagccacagt

SEQ ID NO: 1961432 - DNA, 25 bp, Homo sapien
tgagttctgcgagagccactggaag

SEQ ID NO: 1961433 - DNA, 25 bp, Homo sapien
gagccactggaagctcgccgtgaca

SEQ ID NO: 1961434 - DNA, 25 bp, Homo sapien
cgctgagcataggacacagaggtgt

SEQ ID NO: 1961435 - DNA, 25 bp, Homo sapien
ctgggttccattggtgtcactgtgc

SEQ ID NO: 1961436 - DNA, 25 bp, Homo sapien
gggtggcggttgcataccatcctga

SEQ ID NO: 1961437 - DNA, 25 bp, Homo sapien
tcatccgtcccagacaagggtcgtg

SEQ ID NO: 1961438 - DNA, 25 bp, Homo sapien
ggctcaaaagggatgattcagtctc

SEQ ID NO: 1961439 - DNA, 25 bp, Homo sapien
gagtggttttagttatggaatctta

SEQ ID NO: 1961440 - DNA, 25 bp, Homo sapien
gccatttcagaaagtttagagtggt

SEQ ID NO: 1961441 - DNA, 25 bp, Homo sapien
gagagctagaagactgggccgtctc

SEQ ID NO: 1961442 - DNA, 25 bp, Homo sapien
tggaaaccagcgaattccatcctgg

SEQ ID NO: 1961443 - DNA, 25 bp, Homo sapien
cacttcaagacctcacattactgga

SEQ ID NO: 1961444 - DNA, 25 bp, Homo sapien
tttgtcgggcaccacagtcatctga

SEQ ID NO: 1961445 - DNA, 25 bp, Homo sapien
acccagcacacatgggagcaggcat

SEQ ID NO: 1961446 - DNA, 25 bp, Homo sapien
ttatgtcaagtagcccaatcctggg

SEQ ID NO: 1961447 - DNA, 25 bp, Homo sapien
gtgttcaaacaggtaaagagcttag

SEQ ID NO: 1961448 - DNA, 25 bp, Homo sapien
tctgcagaatgaggacaatactatc

SEQ ID NO: 1961449 - DNA, 25 bp, Homo sapien
ggcctctgtcattcccagggtctga

SEQ ID NO: 1961450 - DNA, 25 bp, Homo sapien
caaggaatccggcaatagccggtga

SEQ ID NO: 1961451 - DNA, 25 bp, Homo sapien
gcaatagccggtgacgcctggaccc

SEQ ID NO: 1961452 - DNA, 25 bp, Homo sapien
cggcaatagccggtgacgcctggac

SEQ ID NO: 1961453 - DNA, 25 bp, Homo sapien
aatccggcaatagccggtgacgcct

SEQ ID NO: 1961454 - DNA, 25 bp, Homo sapien
gagcactcggctcccttcagttcag

SEQ ID NO: 1961455 - DNA, 25 bp, Homo sapien
acgatctgagctccggcccggacgg

SEQ ID NO: 1961456 - DNA, 25 bp, Homo sapien
aggccaaagaactggttacttcttg

SEQ ID NO: 1961457 - DNA, 25 bp, Homo sapien
ttacttcttgtacgtgaggcaggac

SEQ ID NO: 1961458 - DNA, 25 bp, Homo sapien
gggaaatcatgacccacaggcttgt

SEQ ID NO: 1961459 - DNA, 25 bp, Homo sapien
gaaatcatgacccacaggcttgtct

SEQ ID NO: 1961460 - DNA, 25 bp, Homo sapien
gggagcgggaaatcatgacccacag

SEQ ID NO: 1961461 - DNA, 25 bp, Homo sapien
tcatgacccacaggcttgtcttcag

SEQ ID NO: 1961462 - DNA, 25 bp, Homo sapien
ggcacaccggggcaaaccacaggat

SEQ ID NO: 1961463 - DNA, 25 bp, Homo sapien
cacaccggggcaaaccacaggattt

SEQ ID NO: 1961464 - DNA, 25 bp, Homo sapien
acagaaaagtctgtggcacaccggg

SEQ ID NO: 1961465 - DNA, 25 bp, Homo sapien
caccggggcaaaccacaggatttgg

SEQ ID NO: 1961466 - DNA, 25 bp, Homo sapien
gccacaatacacagaagcccgaaat

SEQ ID NO: 1961467 - DNA, 25 bp, Homo sapien
gcactgctgctcctaatatacactt

SEQ ID NO: 1961468 - DNA, 25 bp, Homo sapien
ccgaaatagctgtcggaagccggtg

SEQ ID NO: 1961469 - DNA, 25 bp, Homo sapien
gccctttgccgagtgacttggctgt

SEQ ID NO: 1961470 - DNA, 25 bp, Homo sapien
atcccattcaccgacctgcacgtgg

SEQ ID NO: 1961471 - DNA, 25 bp, Homo sapien
cgacctgcacgtggccgtgtggcct

SEQ ID NO: 1961472 - DNA, 25 bp, Homo sapien
ggtgaacattccccttcatcccatt

SEQ ID NO: 1961473 - DNA, 25 bp, Homo sapien
acgtggccgtgtggcctactctgga

SEQ ID NO: 1961474 - DNA, 25 bp, Homo sapien
aggagcaaggtcctggggagcatgt

SEQ ID NO: 1961475 - DNA, 25 bp, Homo sapien
gaggagcaaggtcctggggagcatg

SEQ ID NO: 1961476 - DNA, 25 bp, Homo sapien
cagttttcaaatccggcaggaggag

SEQ ID NO: 1961477 - DNA, 25 bp, Homo sapien
caccaaagcgtatgtccataaccat

SEQ ID NO: 1961478 - DNA, 25 bp, Homo sapien
acagtcacaccaaagcgtatgtcca

SEQ ID NO: 1961479 - DNA, 25 bp, Homo sapien
ccgaatgcagggaacacagtcacac

SEQ ID NO: 1961480 - DNA, 25 bp, Homo sapien
catttccgaatgcagggaacacagt

SEQ ID NO: 1961481 - DNA, 25 bp, Homo sapien
gggcaccgctctgctctgcatgaag

SEQ ID NO: 1961482 - DNA, 25 bp, Homo sapien
ctacatcatcattacgaagactggg

SEQ ID NO: 1961483 - DNA, 25 bp, Homo sapien
ctgcatgaaggagtccgacagctgc

SEQ ID NO: 1961484 - DNA, 25 bp, Homo sapien
gagcaacagcgtcatgggcaccgct

SEQ ID NO: 1961485 - DNA, 25 bp, Homo sapien
gatcaagaaagctgtcctggggcat

SEQ ID NO: 1961486 - DNA, 25 bp, Homo sapien
cagcctgtgtccactcggttggtga

SEQ ID NO: 1961487 - DNA, 25 bp, Homo sapien
tgtgtccactcggttggtgaagcag

SEQ ID NO: 1961488 - DNA, 25 bp, Homo sapien
cctgtgtccactcggttggtgaagc

SEQ ID NO: 1961489 - DNA, 25 bp, Homo sapien
accacacagaacccatgtgcagagc

SEQ ID NO: 1961490 - DNA, 25 bp, Homo sapien
attttcactgcccaaaagaaattct

SEQ ID NO: 1961491 - DNA, 25 bp, Homo sapien
ttcactgcccaaaagaaattctctc

SEQ ID NO: 1961492 - DNA, 25 bp, Homo sapien
tgctttattttcactgcccaaaaga

SEQ ID NO: 1961493 - DNA, 25 bp, Homo sapien
gctttattttcactgcccaaaagaa

SEQ ID NO: 1961494 - DNA, 25 bp, Homo sapien
ccctgatggatgaaccactacttct

SEQ ID NO: 1961495 - DNA, 25 bp, Homo sapien
tctgtgcagaagtactggacgccat

SEQ ID NO: 1961496 - DNA, 25 bp, Homo sapien
gacataaaactctgacatggcacac

SEQ ID NO: 1961497 - DNA, 25 bp, Homo sapien
cccttttgaggagcagaaagacata

SEQ ID NO: 1961498 - DNA, 25 bp, Homo sapien
gtttaccatccaaggtagctgtggc

SEQ ID NO: 1961499 - DNA, 25 bp, Homo sapien
tttaccatccaaggtagctgtggca

SEQ ID NO: 1961500 - DNA, 25 bp, Homo sapien
taccatccaaggtagctgtggcaag

SEQ ID NO: 1961501 - DNA, 25 bp, Homo sapien
agtttaccatccaaggtagctgtgg

SEQ ID NO: 1961502 - DNA, 25 bp, Homo sapien
accatgtaattccaatcgcctttta

SEQ ID NO: 1961503 - DNA, 25 bp, Homo sapien
aaaataccatgtaattccaatcgcc

SEQ ID NO: 1961504 - DNA, 25 bp, Homo sapien
aataccatgtaattccaatcgcctt

SEQ ID NO: 1961505 - DNA, 25 bp, Homo sapien
tattaattgataactctataagaaa

SEQ ID NO: 1961506 - DNA, 25 bp, Homo sapien
tcaaaagtggtctccatagggcctg

SEQ ID NO: 1961507 - DNA, 25 bp, Homo sapien
tcttcttacagagggtgcaaatagg

SEQ ID NO: 1961508 - DNA, 25 bp, Homo sapien
gacctgttctctgatcagcgatgga

SEQ ID NO: 1961509 - DNA, 25 bp, Homo sapien
ccagggcattgaaggagtcagcgcc

SEQ ID NO: 1961510 - DNA, 25 bp, Homo sapien
cagacagcagtggaagggcacatga

SEQ ID NO: 1961511 - DNA, 25 bp, Homo sapien
tgcagatgcagagatgttccgttca

SEQ ID NO: 1961512 - DNA, 25 bp, Homo sapien
cacacaggctgtaagacgagactct

SEQ ID NO: 1961513 - DNA, 25 bp, Homo sapien
cgttcattcgtgcaaagtcaaggag

SEQ ID NO: 1961514 - DNA, 25 bp, Homo sapien
gtgcacagcagaaggctacacacgc

SEQ ID NO: 1961515 - DNA, 25 bp, Homo sapien
tgttgctaagcggaaacagacgctg

SEQ ID NO: 1961516 - DNA, 25 bp, Homo sapien
tcagcaggctgcacatctcaaaagc

SEQ ID NO: 1961517 - DNA, 25 bp, Homo sapien
ggtgaagtatgttctcccggagccc

SEQ ID NO: 1961518 - DNA, 25 bp, Homo sapien
ctgcagggatgtgtgaggcagggct

SEQ ID NO: 1961519 - DNA, 25 bp, Homo sapien
agggatgtgtgaggcagggctctga

SEQ ID NO: 1961520 - DNA, 25 bp, Homo sapien
tgcagggatgtgtgaggcagggctc

SEQ ID NO: 1961521 - DNA, 25 bp, Homo sapien
atgtgtgaggcagggctctgaatag

SEQ ID NO: 1961522 - DNA, 25 bp, Homo sapien
accgagaaggcatcacgcagagagg

SEQ ID NO: 1961523 - DNA, 25 bp, Homo sapien
tcccgctggtctacgaccgagaagg

SEQ ID NO: 1961524 - DNA, 25 bp, Homo sapien
aagtggcaggtagtgcgcgtgagtg

SEQ ID NO: 1961525 - DNA, 25 bp, Homo sapien
taagaaacctcccgctggtctacga

SEQ ID NO: 1961526 - DNA, 25 bp, Homo sapien
caccaaggctccagtacaggaacca

SEQ ID NO: 1961527 - DNA, 25 bp, Homo sapien
ttgccaccaaggctccagtacagga

SEQ ID NO: 1961528 - DNA, 25 bp, Homo sapien
ttttcgaactccttgccaccaaggc

SEQ ID NO: 1961529 - DNA, 25 bp, Homo sapien
ggctccagtacaggaaccagcagga

SEQ ID NO: 1961530 - DNA, 25 bp, Homo sapien
aatgccctgaacggagccgcacgca

SEQ ID NO: 1961531 - DNA, 25 bp, Homo sapien
ctaagtaggctgaacagcttcagac

SEQ ID NO: 1961532 - DNA, 25 bp, Homo sapien
tgcctggggcatccaatgccctgaa

SEQ ID NO: 1961533 - DNA, 25 bp, Homo sapien
actgggccggatcgctccagtgtga

SEQ ID NO: 1961534 - DNA, 25 bp, Homo sapien
ccccaggctagggcagccgccccgg

SEQ ID NO: 1961535 - DNA, 25 bp, Homo sapien
ggctgcgggatgctgggaagccatt

SEQ ID NO: 1961536 - DNA, 25 bp, Homo sapien
ggaagccattaatgagggagtagat

SEQ ID NO: 1961537 - DNA, 25 bp, Homo sapien
atgctgggaagccattaatgaggga

SEQ ID NO: 1961538 - DNA, 25 bp, Homo sapien
acgcctgacgctctggcgggacgac

SEQ ID NO: 1961539 - DNA, 25 bp, Homo sapien
gagaggaagccgcacgcctgacgct

SEQ ID NO: 1961540 - DNA, 25 bp, Homo sapien
gcacgcctgacgctctggcgggacg

SEQ ID NO: 1961541 - DNA, 25 bp, Homo sapien
gaggaagccgcacgcctgacgctct

SEQ ID NO: 1961542 - DNA, 25 bp, Homo sapien
agattcccccggaagctgaagggcg

SEQ ID NO: 1961543 - DNA, 25 bp, Homo sapien
ggatgtgcgtccctctgaaagattc

SEQ ID NO: 1961544 - DNA, 25 bp, Homo sapien
ctgaagggcgatgtggcgttccgta

SEQ ID NO: 1961545 - DNA, 25 bp, Homo sapien
gtacacggacggtccctgtcgcagg

SEQ ID NO: 1961546 - DNA, 25 bp, Homo sapien
tccaggtcagccgatcgcagcctca

SEQ ID NO: 1961547 - DNA, 25 bp, Homo sapien
atctccaggtcagccgatcgcagcc

SEQ ID NO: 1961548 - DNA, 25 bp, Homo sapien
aggtcagccgatcgcagcctcagtg

SEQ ID NO: 1961549 - DNA, 25 bp, Homo sapien
caggtcagccgatcgcagcctcagt

SEQ ID NO: 1961550 - DNA, 25 bp, Homo sapien
gctgggcacgctctgcttcatagat

SEQ ID NO: 1961551 - DNA, 25 bp, Homo sapien
acacggctgggcacgctctgcttca

SEQ ID NO: 1961552 - DNA, 25 bp, Homo sapien
acagtggttctgggcacacggctgg

SEQ ID NO: 1961553 - DNA, 25 bp, Homo sapien
cggctgggcacgctctgcttcatag

SEQ ID NO: 1961554 - DNA, 25 bp, Homo sapien
ttcatcctttcaactgagtgaagac

SEQ ID NO: 1961555 - DNA, 25 bp, Homo sapien
gacactactccatcttgacggggct

SEQ ID NO: 1961556 - DNA, 25 bp, Homo sapien
ttcaactgagtgaagacatattgta

SEQ ID NO: 1961557 - DNA, 25 bp, Homo sapien
cctggagcatatcagccagaagcat

SEQ ID NO: 1961558 - DNA, 25 bp, Homo sapien
tcacattcctgcgatgtgaccgcag

SEQ ID NO: 1961559 - DNA, 25 bp, Homo sapien
tataatacgaaccatcttccatggc

SEQ ID NO: 1961560 - DNA, 25 bp, Homo sapien
ggccagatactggatcaacaaccat

SEQ ID NO: 1961561 - DNA, 25 bp, Homo sapien
gaaagctctgccagaccatcaggaa

SEQ ID NO: 1961562 - DNA, 25 bp, Homo sapien
tagtcaggaagaatagcacatgcca

SEQ ID NO: 1961563 - DNA, 25 bp, Homo sapien
ccaatcattagagggatacagccac

SEQ ID NO: 1961564 - DNA, 25 bp, Homo sapien
gataagccgtgagctgacaactggg

SEQ ID NO: 1961565 - DNA, 25 bp, Homo sapien
taacagagacgcgtgtaggtcacct

SEQ ID NO: 1961566 - DNA, 25 bp, Homo sapien
tatctgctcaagtaaactctccagg

SEQ ID NO: 1961567 - DNA, 25 bp, Homo sapien
catagctgaggcctgagatttccct

SEQ ID NO: 1961568 - DNA, 25 bp, Homo sapien
ggagtgccttggacatgaacaccat

SEQ ID NO: 1961569 - DNA, 25 bp, Homo sapien
tccacctgcatgaacctggacctgg

SEQ ID NO: 1961570 - DNA, 25 bp, Homo sapien
aactactggcgagatctcacagggc

SEQ ID NO: 1961571 - DNA, 25 bp, Homo sapien
tggccgcagattctaaaccactgaa

SEQ ID NO: 1961572 - DNA, 25 bp, Homo sapien
gggcgctggcttacgtaaaactcaa

SEQ ID NO: 1961573 - DNA, 25 bp, Homo sapien
gtgtacagcagcgttcacggcagct

SEQ ID NO: 1961574 - DNA, 25 bp, Homo sapien
caaagctatataattcctagaagat

SEQ ID NO: 1961575 - DNA, 25 bp, Homo sapien
tgatcacaaacctaactgcaaaatg

SEQ ID NO: 1961576 - DNA, 25 bp, Homo sapien
cagtgctgtgttggaaaaagaagag

SEQ ID NO: 1961577 - DNA, 25 bp, Homo sapien
aagagccaactcagtattgaaagag

SEQ ID NO: 1961578 - DNA, 25 bp, Homo sapien
aaacgccagctccacgaggactttc

SEQ ID NO: 1961579 - DNA, 25 bp, Homo sapien
catgttattattgttcgtctccccc

SEQ ID NO: 1961580 - DNA, 25 bp, Homo sapien
aacacaaacacgctgaaacgccagc

SEQ ID NO: 1961581 - DNA, 25 bp, Homo sapien
ttaataagcacgtagatgaccactc

SEQ ID NO: 1961582 - DNA, 25 bp, Homo sapien
tatgatggctaagaactatgagagc

SEQ ID NO: 1961583 - DNA, 25 bp, Homo sapien
ctatgagagcataaatcaggtcact

SEQ ID NO: 1961584 - DNA, 25 bp, Homo sapien
taagagactgtcttcattgcccttt

SEQ ID NO: 1961585 - DNA, 25 bp, Homo sapien
atagcagcctaagtgtctataaagc

SEQ ID NO: 1961586 - DNA, 25 bp, Homo sapien
tgagttcgagaataagcaccaggct

SEQ ID NO: 1961587 - DNA, 25 bp, Homo sapien
gacaggcttggatcgtttacagtaa

SEQ ID NO: 1961588 - DNA, 25 bp, Homo sapien
tccagttcccgagtgtccatagtaa

SEQ ID NO: 1961589 - DNA, 25 bp, Homo sapien
gagaccctgcagctaagtcctgaga

SEQ ID NO: 1961590 - DNA, 25 bp, Homo sapien
ggtcagtcacgcacactttggcttt

SEQ ID NO: 1961591 - DNA, 25 bp, Homo sapien
acatctggcatcatgtaggtcagtc

SEQ ID NO: 1961592 - DNA, 25 bp, Homo sapien
tggctttgtccgtgataaacaccat

SEQ ID NO: 1961593 - DNA, 25 bp, Homo sapien
gacccgggatgccacacatctggca

SEQ ID NO: 1961594 - DNA, 25 bp, Homo sapien
tcacattgggcaccacggaatgcca

SEQ ID NO: 1961595 - DNA, 25 bp, Homo sapien
gggttaccattctagggcagctaga

SEQ ID NO: 1961596 - DNA, 25 bp, Homo sapien
ggcagctagaattgtttaacgacca

SEQ ID NO: 1961597 - DNA, 25 bp, Homo sapien
ttactggacttagccctcttgaggg

SEQ ID NO: 1961598 - DNA, 25 bp, Homo sapien
tagtgtatccacgtggactcggcag

SEQ ID NO: 1961599 - DNA, 25 bp, Homo sapien
tctcttgcgcttgatgctggtccca

SEQ ID NO: 1961600 - DNA, 25 bp, Homo sapien
tggtttagtcaacgagaaagacctg

SEQ ID NO: 1961601 - DNA, 25 bp, Homo sapien
tcatggccacaaggaaaccacaggt

SEQ ID NO: 1961602 - DNA, 25 bp, Homo sapien
cagtgtgtacgtgatgcttcactcc

SEQ ID NO: 1961603 - DNA, 25 bp, Homo sapien
gctatcttcaggaggacacgagacc

SEQ ID NO: 1961604 - DNA, 25 bp, Homo sapien
cactcccaggaatacttgcagtaaa

SEQ ID NO: 1961605 - DNA, 25 bp, Homo sapien
tgcaattctctttacggacataggt

SEQ ID NO: 1961606 - DNA, 25 bp, Homo sapien
cccatgtagaccgagggatgactgt

SEQ ID NO: 1961607 - DNA, 25 bp, Homo sapien
cccaggcaaatggagggcagactat

SEQ ID NO: 1961608 - DNA, 25 bp, Homo sapien
tatccgcgtgtgaagcagctttctc

SEQ ID NO: 1961609 - DNA, 25 bp, Homo sapien
caaactcggatcaaaaatacagccc

SEQ ID NO: 1961610 - DNA, 25 bp, Homo sapien
tctctaggccaacacatgcacttta

SEQ ID NO: 1961611 - DNA, 25 bp, Homo sapien
tgccctgtgtgagctaacatcctac

SEQ ID NO: 1961612 - DNA, 25 bp, Homo sapien
cctactgggaggttggtcttatcgc

SEQ ID NO: 1961613 - DNA, 25 bp, Homo sapien
tacatgttaatatgcctgggctgga

SEQ ID NO: 1961614 - DNA, 25 bp, Homo sapien
caggtctggtgggacttcaccagtc

SEQ ID NO: 1961615 - DNA, 25 bp, Homo sapien
tcaccagtcggccatgctccgagat

SEQ ID NO: 1961616 - DNA, 25 bp, Homo sapien
cagacagaattggatgaccttccat

SEQ ID NO: 1961617 - DNA, 25 bp, Homo sapien
ctccgagatgaaggggatgccagac

SEQ ID NO: 1961618 - DNA, 25 bp, Homo sapien
gccggctcagtccacaggtgatttt

SEQ ID NO: 1961619 - DNA, 25 bp, Homo sapien
aactcgccggctcagtccacaggtg

SEQ ID NO: 1961620 - DNA, 25 bp, Homo sapien
ctcgccggctcagtccacaggtgat

SEQ ID NO: 1961621 - DNA, 25 bp, Homo sapien
cgccggctcagtccacaggtgattt

SEQ ID NO: 1961622 - DNA, 25 bp, Homo sapien
tcacactccaggttccttatgtaag

SEQ ID NO: 1961623 - DNA, 25 bp, Homo sapien
tgaaggagtaagaagtgtgggagct

SEQ ID NO: 1961624 - DNA, 25 bp, Homo sapien
ttccttatgtaaggtctctcaccag

SEQ ID NO: 1961625 - DNA, 25 bp, Homo sapien
gagctgccgtagacgtcatcacact

SEQ ID NO: 1961626 - DNA, 25 bp, Homo sapien
tacaattgatttgcaacggttattt

SEQ ID NO: 1961627 - DNA, 25 bp, Homo sapien
ttcaaaatcccgttcttacttgctc

SEQ ID NO: 1961628 - DNA, 25 bp, Homo sapien
gatttgcaacggttattttcatgtt

SEQ ID NO: 1961629 - DNA, 25 bp, Homo sapien
tcccgttcttacttgctctgctgct

SEQ ID NO: 1961630 - DNA, 25 bp, Homo sapien
ccagccagccggtgagaaaacgtgc

SEQ ID NO: 1961631 - DNA, 25 bp, Homo sapien
tgggttgaaggccactccagtgaca

SEQ ID NO: 1961632 - DNA, 25 bp, Homo sapien
cgtgcttgagcccatttcatacacg

SEQ ID NO: 1961633 - DNA, 25 bp, Homo sapien
gcgctgatgggttgaaggccactcc

SEQ ID NO: 1961634 - DNA, 25 bp, Homo sapien
gagctgcccctttgcatctcataac

SEQ ID NO: 1961635 - DNA, 25 bp, Homo sapien
gataggcaccctagttagtttcacg

SEQ ID NO: 1961636 - DNA, 25 bp, Homo sapien
catcatagctagtgctgaacctgaa

SEQ ID NO: 1961637 - DNA, 25 bp, Homo sapien
cacacagcacaaggtgaaagggcct

SEQ ID NO: 1961638 - DNA, 25 bp, Homo sapien
ttcaaaagagcacagaggacaatac

SEQ ID NO: 1961639 - DNA, 25 bp, Homo sapien
cttttcaaaagagcacagaggacaa

SEQ ID NO: 1961640 - DNA, 25 bp, Homo sapien
aagcttttcaaaagagcacagagga

SEQ ID NO: 1961641 - DNA, 25 bp, Homo sapien
taaagcttttcaaaagagcacagag

SEQ ID NO: 1961642 - DNA, 25 bp, Homo sapien
atgcccttcaaagtggcgctcacac

SEQ ID NO: 1961643 - DNA, 25 bp, Homo sapien
acaagccgcgaatcgtccacaagga

SEQ ID NO: 1961644 - DNA, 25 bp, Homo sapien
tccacaaggactgaaagcgattcca

SEQ ID NO: 1961645 - DNA, 25 bp, Homo sapien
gattccacatggatagccgcgggtt

SEQ ID NO: 1961646 - DNA, 25 bp, Homo sapien
aataacctgaactgtagtgtactac

SEQ ID NO: 1961647 - DNA, 25 bp, Homo sapien
gaaaaatcatcaaagtactcataat

SEQ ID NO: 1961648 - DNA, 25 bp, Homo sapien
aatataggctgtagaaaataacctg

SEQ ID NO: 1961649 - DNA, 25 bp, Homo sapien
tgttgcaatggccaagataattctg

SEQ ID NO: 1961650 - DNA, 25 bp, Homo sapien
tcatcccatcgccaatggccgtggt

SEQ ID NO: 1961651 - DNA, 25 bp, Homo sapien
tcgccaatggccgtggtcaggaaaa

SEQ ID NO: 1961652 - DNA, 25 bp, Homo sapien
gttataagcctgaggctgttgggtt

SEQ ID NO: 1961653 - DNA, 25 bp, Homo sapien
gctgttgggttgtaaatgatgaacc

SEQ ID NO: 1961654 - DNA, 25 bp, Homo sapien
gctgtctcagggagccagcttgtcc

SEQ ID NO: 1961655 - DNA, 25 bp, Homo sapien
ggatgctgtctcagggagccagctt

SEQ ID NO: 1961656 - DNA, 25 bp, Homo sapien
tgcagggatgctgtctcagggagcc

SEQ ID NO: 1961657 - DNA, 25 bp, Homo sapien
tctcagggagccagcttgtccagat

SEQ ID NO: 1961658 - DNA, 25 bp, Homo sapien
gtcacagcctgcgtacccactcaca

SEQ ID NO: 1961659 - DNA, 25 bp, Homo sapien
tgcgtacccactcacatgcagagac

SEQ ID NO: 1961660 - DNA, 25 bp, Homo sapien
cagccagggtgcccaagagagccat

SEQ ID NO: 1961661 - DNA, 25 bp, Homo sapien
agcctgcgtacccactcacatgcag

SEQ ID NO: 1961662 - DNA, 25 bp, Homo sapien
tgagagtttgacaaccactgagaag

SEQ ID NO: 1961663 - DNA, 25 bp, Homo sapien
gagagtttgacaaccactgagaaga

SEQ ID NO: 1961664 - DNA, 25 bp, Homo sapien
cacaggttcccttgagtcagagcat

SEQ ID NO: 1961665 - DNA, 25 bp, Homo sapien
tgaccgtcaactagagcccttgctg

SEQ ID NO: 1961666 - DNA, 25 bp, Homo sapien
cctgttctaggcttcacttggcatc

SEQ ID NO: 1961667 - DNA, 25 bp, Homo sapien
aaccccatgggatgaaaaattcgag

SEQ ID NO: 1961668 - DNA, 25 bp, Homo sapien
tgcagcctcgggcttttatcctaaa

SEQ ID NO: 1961669 - DNA, 25 bp, Homo sapien
agtggtacagggtctgcatgcagcc

SEQ ID NO: 1961670 - DNA, 25 bp, Homo sapien
cacaggtccacagtgggtgatgata

SEQ ID NO: 1961671 - DNA, 25 bp, Homo sapien
tgatgataggcggagacaagcccgc

SEQ ID NO: 1961672 - DNA, 25 bp, Homo sapien
gccgaaatggtcacccttcacagca

SEQ ID NO: 1961673 - DNA, 25 bp, Homo sapien
acaacagagcacttccttgccgaaa

SEQ ID NO: 1961674 - DNA, 25 bp, Homo sapien
tgagtaagtagatgaggccattgtt

SEQ ID NO: 1961675 - DNA, 25 bp, Homo sapien
ccttcgagaggccatgcgttcatcc

SEQ ID NO: 1961676 - DNA, 25 bp, Homo sapien
ggagcgccattcaccatgcctgctg

SEQ ID NO: 1961677 - DNA, 25 bp, Homo sapien
tgtcctgaggctcccgaggcgagcc

SEQ ID NO: 1961678 - DNA, 25 bp, Homo sapien
ctgctgtcctgaggctcccgaggcg

SEQ ID NO: 1961679 - DNA, 25 bp, Homo sapien
tggagcgccattcaccatgcctgct

SEQ ID NO: 1961680 - DNA, 25 bp, Homo sapien
gttttacagatgatacatgttatcc

SEQ ID NO: 1961681 - DNA, 25 bp, Homo sapien
taacattgaatttggtagcaaacac

SEQ ID NO: 1961682 - DNA, 25 bp, Homo sapien
ggcatcatacatttgtatctgttaa

SEQ ID NO: 1961683 - DNA, 25 bp, Homo sapien
gcacatagttttacagatgatacat

SEQ ID NO: 1961684 - DNA, 25 bp, Homo sapien
acaggccgtgagtgggcttccgcta

SEQ ID NO: 1961685 - DNA, 25 bp, Homo sapien
actgcagccggcgttgaggtcaaac

SEQ ID NO: 1961686 - DNA, 25 bp, Homo sapien
ttggcagatttgatggacaggccgt

SEQ ID NO: 1961687 - DNA, 25 bp, Homo sapien
gtgggcttccgctatcaccgctgca

SEQ ID NO: 1961688 - DNA, 25 bp, Homo sapien
gggagctcttctcaacactcttacc

SEQ ID NO: 1961689 - DNA, 25 bp, Homo sapien
tctgaaatgccgcaggaaaagtcct

SEQ ID NO: 1961690 - DNA, 25 bp, Homo sapien
ggaatattagaagactcatgaatgg

SEQ ID NO: 1961691 - DNA, 25 bp, Homo sapien
ggatgactagttaagaatttctgaa

SEQ ID NO: 1961692 - DNA, 25 bp, Homo sapien
cacaacccagacagtgccatgtcgg

SEQ ID NO: 1961693 - DNA, 25 bp, Homo sapien
tgccatgtcggcaggtgaccgtgac

SEQ ID NO: 1961694 - DNA, 25 bp, Homo sapien
gaccgtgacgtgcttcataaacttg

SEQ ID NO: 1961695 - DNA, 25 bp, Homo sapien
cggcaggtgaccgtgacgtgcttca

SEQ ID NO: 1961696 - DNA, 25 bp, Homo sapien
caatgttgagatgaattattacacg

SEQ ID NO: 1961697 - DNA, 25 bp, Homo sapien
tattacacgtacaattaacacaagg

SEQ ID NO: 1961698 - DNA, 25 bp, Homo sapien
caattaacacaaggatggcgagctc

SEQ ID NO: 1961699 - DNA, 25 bp, Homo sapien
ctggatggcatgagctgtacggcac

SEQ ID NO: 1961700 - DNA, 25 bp, Homo sapien
tgactgccgataaactggtcatgtc

SEQ ID NO: 1961701 - DNA, 25 bp, Homo sapien
gggaataaaagtcgttgactgccga

SEQ ID NO: 1961702 - DNA, 25 bp, Homo sapien
tgcaaatcagcttggacttgctctt

SEQ ID NO: 1961703 - DNA, 25 bp, Homo sapien
tctactgcacccgtcgtggagagcc

SEQ ID NO: 1961704 - DNA, 25 bp, Homo sapien
tgcagactgtataggtttagaaaac

SEQ ID NO: 1961705 - DNA, 25 bp, Homo sapien
ggcatctatataatagaactgtgca

SEQ ID NO: 1961706 - DNA, 25 bp, Homo sapien
caatgtgatacctcagtagctgaaa

SEQ ID NO: 1961707 - DNA, 25 bp, Homo sapien
ctcatctttgcaagtgtcaatgtga

SEQ ID NO: 1961708 - DNA, 25 bp, Homo sapien
ctcatctcctgttaaggtaaaagaa

SEQ ID NO: 1961709 - DNA, 25 bp, Homo sapien
aaatgactgcccatggcagagatga

SEQ ID NO: 1961710 - DNA, 25 bp, Homo sapien
tcctcatctcctgttaaggtaaaag

SEQ ID NO: 1961711 - DNA, 25 bp, Homo sapien
tttggaaatgactgcccatggcaga

SEQ ID NO: 1961712 - DNA, 25 bp, Homo sapien
tggctccagcacacggcattcactg

SEQ ID NO: 1961713 - DNA, 25 bp, Homo sapien
agcagccacctccggtcctggctcc

SEQ ID NO: 1961714 - DNA, 25 bp, Homo sapien
cacattcgcagggtcccgtcccggg

SEQ ID NO: 1961715 - DNA, 25 bp, Homo sapien
ctctgccccacgagccgaccacatt

SEQ ID NO: 1961716 - DNA, 25 bp, Homo sapien
agatggttggccaacccacaggcca

SEQ ID NO: 1961717 - DNA, 25 bp, Homo sapien
caaaaacgagtaacagatggttggc

SEQ ID NO: 1961718 - DNA, 25 bp, Homo sapien
gtcaggctggcatcaaaaacgagta

SEQ ID NO: 1961719 - DNA, 25 bp, Homo sapien
acacagcaggtgtcccagtcaggct

SEQ ID NO: 1961720 - DNA, 25 bp, Homo sapien
cttgtaaggcgctgcctttgtcatc

SEQ ID NO: 1961721 - DNA, 25 bp, Homo sapien
tgtaaggcgctgcctttgtcatcct

SEQ ID NO: 1961722 - DNA, 25 bp, Homo sapien
ttgtaaggcgctgcctttgtcatcc

SEQ ID NO: 1961723 - DNA, 25 bp, Homo sapien
aatcaaagactcttacaatgaaatg

SEQ ID NO: 1961724 - DNA, 25 bp, Homo sapien
gcagaatcaaagactcttacaatga

SEQ ID NO: 1961725 - DNA, 25 bp, Homo sapien
tgggcagaatcaaagactcttacaa

SEQ ID NO: 1961726 - DNA, 25 bp, Homo sapien
gaatcaaagactcttacaatgaaat

SEQ ID NO: 1961727 - DNA, 25 bp, Homo sapien
acccagctcccgcaggacgtggcgc

SEQ ID NO: 1961728 - DNA, 25 bp, Homo sapien
ctacccagctcccgcaggacgtggc

SEQ ID NO: 1961729 - DNA, 25 bp, Homo sapien
ccagctcccgcaggacgtggcgcac

SEQ ID NO: 1961730 - DNA, 25 bp, Homo sapien
cccagctcccgcaggacgtggcgca

SEQ ID NO: 1961731 - DNA, 25 bp, Homo sapien
tggatgcagcatacacgtgtgcagg

SEQ ID NO: 1961732 - DNA, 25 bp, Homo sapien
gatgcagcatacacgtgtgcaggtg

SEQ ID NO: 1961733 - DNA, 25 bp, Homo sapien
gtactggatgcagcatacacgtgtg

SEQ ID NO: 1961734 - DNA, 25 bp, Homo sapien
ggccgggcttggtgggcacagcgca

SEQ ID NO: 1961735 - DNA, 25 bp, Homo sapien
taagcaagaaacgaagtgggcttcc

SEQ ID NO: 1961736 - DNA, 25 bp, Homo sapien
tagactcttatattcaaaatcagga

SEQ ID NO: 1961737 - DNA, 25 bp, Homo sapien
cacaggtaacggtgatcgggagaca

SEQ ID NO: 1961738 - DNA, 25 bp, Homo sapien
tataatcgtattccagtaaacttga

SEQ ID NO: 1961739 - DNA, 25 bp, Homo sapien
tcccctcactcttgatgttggtctt

SEQ ID NO: 1961740 - DNA, 25 bp, Homo sapien
ccctcactcttgatgttggtctttg

SEQ ID NO: 1961741 - DNA, 25 bp, Homo sapien
cctcactcttgatgttggtctttgg

SEQ ID NO: 1961742 - DNA, 25 bp, Homo sapien
cccctcactcttgatgttggtcttt

SEQ ID NO: 1961743 - DNA, 25 bp, Homo sapien
cagatgacctaactttactatggaa

SEQ ID NO: 1961744 - DNA, 25 bp, Homo sapien
tggtccttcatgacgttccgtgcag

SEQ ID NO: 1961745 - DNA, 25 bp, Homo sapien
gtggtgctgacgcataaccagatga

SEQ ID NO: 1961746 - DNA, 25 bp, Homo sapien
tactatggaaaaccaggcgttggtc

SEQ ID NO: 1961747 - DNA, 25 bp, Homo sapien
gaagctgtggatttgtgcacccaaa

SEQ ID NO: 1961748 - DNA, 25 bp, Homo sapien
tgatggtctgtactggtcccaggct

SEQ ID NO: 1961749 - DNA, 25 bp, Homo sapien
gtccctggccactatgcgagcttca

SEQ ID NO: 1961750 - DNA, 25 bp, Homo sapien
caggaagcctgtgccgtgatggtct

SEQ ID NO: 1961751 - DNA, 25 bp, Homo sapien
gaacagaggacacatcacgctggtg

SEQ ID NO: 1961752 - DNA, 25 bp, Homo sapien
ttttgctgcaaagcgaaagcacacg

SEQ ID NO: 1961753 - DNA, 25 bp, Homo sapien
tattcttgtctcacactgggtaagc

SEQ ID NO: 1961754 - DNA, 25 bp, Homo sapien
aaagcacacgcctaagtgagaagcc

SEQ ID NO: 1961755 - DNA, 25 bp, Homo sapien
gcagtgtcaaaaaccaattagggag

SEQ ID NO: 1961756 - DNA, 25 bp, Homo sapien
agaggttctcaatcccgtctgtgga

SEQ ID NO: 1961757 - DNA, 25 bp, Homo sapien
aaaggtacaactcaaagatgggcac

SEQ ID NO: 1961758 - DNA, 25 bp, Homo sapien
catgtggtttggctttcagacgtga

SEQ ID NO: 1961759 - DNA, 25 bp, Homo sapien
ctttcatggaaacagggcggaggaa

SEQ ID NO: 1961760 - DNA, 25 bp, Homo sapien
accgccatggcaggacgaacaagca

SEQ ID NO: 1961761 - DNA, 25 bp, Homo sapien
gacgaacaagcaaacagctccagcc

SEQ ID NO: 1961762 - DNA, 25 bp, Homo sapien
ccagcagcagggaccgccatggcag

SEQ ID NO: 1961763 - DNA, 25 bp, Homo sapien
taacgtcatggtggctaggtaaaaa

SEQ ID NO: 1961764 - DNA, 25 bp, Homo sapien
aggaacagcggtcagtcttgggcac

SEQ ID NO: 1961765 - DNA, 25 bp, Homo sapien
tgcaggagtacaatcacacgctcgg

SEQ ID NO: 1961766 - DNA, 25 bp, Homo sapien
caatcagtaattgctgaaggtccac

SEQ ID NO: 1961767 - DNA, 25 bp, Homo sapien
gcagcagccctaaccacaatgagaa

SEQ ID NO: 1961768 - DNA, 25 bp, Homo sapien
taagaattcgcaaagcaatgcagca

SEQ ID NO: 1961769 - DNA, 25 bp, Homo sapien
tggccaattcaggaggcgaagcacc

SEQ ID NO: 1961770 - DNA, 25 bp, Homo sapien
acagcggacatggaacacgcacgag

SEQ ID NO: 1961771 - DNA, 25 bp, Homo sapien
cacgtcgctgttcactagcagcctt

SEQ ID NO: 1961772 - DNA, 25 bp, Homo sapien
cccagatacagtggagaggtcggta

SEQ ID NO: 1961773 - DNA, 25 bp, Homo sapien
agcagccttggtactcttctccttg

SEQ ID NO: 1961774 - DNA, 25 bp, Homo sapien
ttcccagatacagtggagaggtcgg

SEQ ID NO: 1961775 - DNA, 25 bp, Homo sapien
ctgcagctgtggacataacagtatc

SEQ ID NO: 1961776 - DNA, 25 bp, Homo sapien
cgacgatacgatggaaatgcctcag

SEQ ID NO: 1961777 - DNA, 25 bp, Homo sapien
aactaggagcgcaaacgacgatacg

SEQ ID NO: 1961778 - DNA, 25 bp, Homo sapien
tcaacaagatagaagcaacagcacg

SEQ ID NO: 1961779 - DNA, 25 bp, Homo sapien
caatcttcccgccaaagagggaggc

SEQ ID NO: 1961780 - DNA, 25 bp, Homo sapien
tcttcccgccaaagagggaggccag

SEQ ID NO: 1961781 - DNA, 25 bp, Homo sapien
tgctgagccctgactagcgcggccg

SEQ ID NO: 1961782 - DNA, 25 bp, Homo sapien
ggttgatctccaacacggcaatctt

SEQ ID NO: 1961783 - DNA, 25 bp, Homo sapien
gcagggacgcggtttcaacatcgtt

SEQ ID NO: 1961784 - DNA, 25 bp, Homo sapien
gttagcgacaccacccagtaaaagc

SEQ ID NO: 1961785 - DNA, 25 bp, Homo sapien
acacgtatcctaacagctgcttcat

SEQ ID NO: 1961786 - DNA, 25 bp, Homo sapien
gacgaaacgtgcatccgcacacgta

SEQ ID NO: 1961787 - DNA, 25 bp, Homo sapien
cgcagtgcggttcctcagggcacac

SEQ ID NO: 1961788 - DNA, 25 bp, Homo sapien
ttgatccgcagtgcggttcctcagg

SEQ ID NO: 1961789 - DNA, 25 bp, Homo sapien
cttttgatccgcagtgcggttcctc

SEQ ID NO: 1961790 - DNA, 25 bp, Homo sapien
atccgcagtgcggttcctcagggca

SEQ ID NO: 1961791 - DNA, 25 bp, Homo sapien
atccggccagcaggatgctgaggct

SEQ ID NO: 1961792 - DNA, 25 bp, Homo sapien
gatccggccagcaggatgctgaggc

SEQ ID NO: 1961793 - DNA, 25 bp, Homo sapien
gggaggtagcacatacacacggagt

SEQ ID NO: 1961794 - DNA, 25 bp, Homo sapien
gagggaggtagcacatacacacgga

SEQ ID NO: 1961795 - DNA, 25 bp, Homo sapien
ggaggtagcacatacacacggagtc

SEQ ID NO: 1961796 - DNA, 25 bp, Homo sapien
gaggtagcacatacacacggagtca

SEQ ID NO: 1961797 - DNA, 25 bp, Homo sapien
cttgtaatacaaagcagcttccact

SEQ ID NO: 1961798 - DNA, 25 bp, Homo sapien
ttgtaatacaaagcagcttccactt

SEQ ID NO: 1961799 - DNA, 25 bp, Homo sapien
ccttgtaatacaaagcagcttccac

SEQ ID NO: 1961800 - DNA, 25 bp, Homo sapien
tgtaatacaaagcagcttccacttc

SEQ ID NO: 1961801 - DNA, 25 bp, Homo sapien
caggttaaatacgaataagcccact

SEQ ID NO: 1961802 - DNA, 25 bp, Homo sapien
acacatcgggtgttctcagaagaaa

SEQ ID NO: 1961803 - DNA, 25 bp, Homo sapien
ttgccaggttaaatacgaataagcc

SEQ ID NO: 1961804 - DNA, 25 bp, Homo sapien
gcttccgatccacacacatcgggtg

SEQ ID NO: 1961805 - DNA, 25 bp, Homo sapien
cgcatttgtggtgatcccctgggca

SEQ ID NO: 1961806 - DNA, 25 bp, Homo sapien
tccgagtgactagacttgaaggcca

SEQ ID NO: 1961807 - DNA, 25 bp, Homo sapien
tgcccacctctgtgaataaggaacc

SEQ ID NO: 1961808 - DNA, 25 bp, Homo sapien
tctgtgaagacgctcgctctgacct

SEQ ID NO: 1961809 - DNA, 25 bp, Homo sapien
atccaccagcaccagtccacggttc

SEQ ID NO: 1961810 - DNA, 25 bp, Homo sapien
cccaacgaccatcgtcaacagaatg

SEQ ID NO: 1961811 - DNA, 25 bp, Homo sapien
agtccacggttcacccaacgaccat

SEQ ID NO: 1961812 - DNA, 25 bp, Homo sapien
gaccatcgtcaacagaatgggtcat

SEQ ID NO: 1961813 - DNA, 25 bp, Homo sapien
gtggctctggcttagctctgagggc

SEQ ID NO: 1961814 - DNA, 25 bp, Homo sapien
tgctcgaggtaagccagggaagcct

SEQ ID NO: 1961815 - DNA, 25 bp, Homo sapien
gggctccctctgctcgaggtaagcc

SEQ ID NO: 1961816 - DNA, 25 bp, Homo sapien
agggaagcctcaaaatgcctcaggt

SEQ ID NO: 1961817 - DNA, 25 bp, Homo sapien
cgggagcaccgtgtccagcctccat

SEQ ID NO: 1961818 - DNA, 25 bp, Homo sapien
gcccaccctgcttactctctgtggt

SEQ ID NO: 1961819 - DNA, 25 bp, Homo sapien
gtggtttggaccaagcagggaatat

SEQ ID NO: 1961820 - DNA, 25 bp, Homo sapien
caagcagggaatattctgctccagg

SEQ ID NO: 1961821 - DNA, 25 bp, Homo sapien
ccaccctgcttactctctgtggttt

SEQ ID NO: 1961822 - DNA, 25 bp, Homo sapien
tagcacagcggtagatgggaaagtc

SEQ ID NO: 1961823 - DNA, 25 bp, Homo sapien
taaagacacttacgtatcattgccc

SEQ ID NO: 1961824 - DNA, 25 bp, Homo sapien
gaaagtctaggccattccaatcacc

SEQ ID NO: 1961825 - DNA, 25 bp, Homo sapien
aaagacaagcaacggccaaggccat

SEQ ID NO: 1961826 - DNA, 25 bp, Homo sapien
cagaatttgggatgagtgagagatc

SEQ ID NO: 1961827 - DNA, 25 bp, Homo sapien
gaaatgttacttcaacctgctctcc

SEQ ID NO: 1961828 - DNA, 25 bp, Homo sapien
agtgagagatcacagggtgcaagtc

SEQ ID NO: 1961829 - DNA, 25 bp, Homo sapien
caagtctcagtacaggaaatgttac

SEQ ID NO: 1961830 - DNA, 25 bp, Homo sapien
gagcattcagatcacgcgtcaagga

SEQ ID NO: 1961831 - DNA, 25 bp, Homo sapien
tgtatgcaccatggagtcactcaga

SEQ ID NO: 1961832 - DNA, 25 bp, Homo sapien
tgaatgtgcaccgtggagtcactcg

SEQ ID NO: 1961833 - DNA, 25 bp, Homo sapien
tgaggactgccacacagagatgctg

SEQ ID NO: 1961834 - DNA, 25 bp, Homo sapien
ctgaggagagctgtcgtcaacagga

SEQ ID NO: 1961835 - DNA, 25 bp, Homo sapien
ctgtcgtcaacaggaagcaactctg

SEQ ID NO: 1961836 - DNA, 25 bp, Homo sapien
gagctgtcgtcaacaggaagcaact

SEQ ID NO: 1961837 - DNA, 25 bp, Homo sapien
aggagagctgtcgtcaacaggaagc

SEQ ID NO: 1961838 - DNA, 25 bp, Homo sapien
ctgcaatgcgcaggagaccaggtga

SEQ ID NO: 1961839 - DNA, 25 bp, Homo sapien
aatgcgcaggagaccaggtgagtac

SEQ ID NO: 1961840 - DNA, 25 bp, Homo sapien
aggtgagtacgagggtgctgggcgg

SEQ ID NO: 1961841 - DNA, 25 bp, Homo sapien
agtacgagggtgctgggcgggtgca

SEQ ID NO: 1961842 - DNA, 25 bp, Homo sapien
cagacttaacccttcttgtggagaa

SEQ ID NO: 1961843 - DNA, 25 bp, Homo sapien
acacgacgataatggtgtccatcca

SEQ ID NO: 1961844 - DNA, 25 bp, Homo sapien
tcttcttccttaggtcaacccgtgc

SEQ ID NO: 1961845 - DNA, 25 bp, Homo sapien
cagcccagacttaacccttcttgtg

SEQ ID NO: 1961846 - DNA, 25 bp, Homo sapien
agggtcctgacgcagaagcagcaac

SEQ ID NO: 1961847 - DNA, 25 bp, Homo sapien
acatggcgctgcagcaagggtcctg

SEQ ID NO: 1961848 - DNA, 25 bp, Homo sapien
gagcactttcacacggctggcacat

SEQ ID NO: 1961849 - DNA, 25 bp, Homo sapien
acggcccacggtgtcagagcacttt

SEQ ID NO: 1961850 - DNA, 25 bp, Homo sapien
ccaggctttgtgaaatgaacttaaa

SEQ ID NO: 1961851 - DNA, 25 bp, Homo sapien
aagacaaggcaacagcggtcaactt

SEQ ID NO: 1961852 - DNA, 25 bp, Homo sapien
ctgggtgagaagacaaggcaacagc

SEQ ID NO: 1961853 - DNA, 25 bp, Homo sapien
gtgagaagacaaggcaacagcggtc

SEQ ID NO: 1961854 - DNA, 25 bp, Homo sapien
gacaggttttttcaaatcgcaggaa

SEQ ID NO: 1961855 - DNA, 25 bp, Homo sapien
tttgtgtacaagctcacgttcaggc

SEQ ID NO: 1961856 - DNA, 25 bp, Homo sapien
tattgaacccacagtgacgctgaga

SEQ ID NO: 1961857 - DNA, 25 bp, Homo sapien
tgagtggccctcacttttgctgcac

SEQ ID NO: 1961858 - DNA, 25 bp, Homo sapien
gccgtcagcacacccggtgaccagc

SEQ ID NO: 1961859 - DNA, 25 bp, Homo sapien
ggccgtcagcacacccggtgaccag

SEQ ID NO: 1961860 - DNA, 25 bp, Homo sapien
ttaatcgacgttgcacttggagcag

SEQ ID NO: 1961861 - DNA, 25 bp, Homo sapien
ttatagcctagagggagggcagcac

SEQ ID NO: 1961862 - DNA, 25 bp, Homo sapien
tagctttgtaagtgcctggtaccaa

SEQ ID NO: 1961863 - DNA, 25 bp, Homo sapien
tgcccggtgagtccaccacagatgg

SEQ ID NO: 1961864 - DNA, 25 bp, Homo sapien
ttaagtggcattttcatgtcactta

SEQ ID NO: 1961865 - DNA, 25 bp, Homo sapien
tctgtatatgctttaagtggcattt

SEQ ID NO: 1961866 - DNA, 25 bp, Homo sapien
gtatctgtatatgctttaagtggca

SEQ ID NO: 1961867 - DNA, 25 bp, Homo sapien
taagtggcattttcatgtcacttac

SEQ ID NO: 1961868 - DNA, 25 bp, Homo sapien
gaaaccagtgccctaagatgccagg

SEQ ID NO: 1961869 - DNA, 25 bp, Homo sapien
gcaaagcgaatgcaggaaaccagtg

SEQ ID NO: 1961870 - DNA, 25 bp, Homo sapien
cgcatggaagaacgctctcctttta

SEQ ID NO: 1961871 - DNA, 25 bp, Homo sapien
tctgggaagacagaacgtgcacaag

SEQ ID NO: 1961872 - DNA, 25 bp, Homo sapien
aaggaccctggcattcacgagctgc

SEQ ID NO: 1961873 - DNA, 25 bp, Homo sapien
ccaagctcacgctggatggacaggg

SEQ ID NO: 1961874 - DNA, 25 bp, Homo sapien
taccaacaccgctggttctgggatg

SEQ ID NO: 1961875 - DNA, 25 bp, Homo sapien
catctgagggaagaacgcaaggacc

SEQ ID NO: 1961876 - DNA, 25 bp, Homo sapien
tcttatgccctgtaatatgctctag

SEQ ID NO: 1961877 - DNA, 25 bp, Homo sapien
gattgcctcattcagatccactcga

SEQ ID NO: 1961878 - DNA, 25 bp, Homo sapien
gttaagtgaatcctctccctgtgtg

SEQ ID NO: 1961879 - DNA, 25 bp, Homo sapien
gggttacacacaacctatttacaga

SEQ ID NO: 1961880 - DNA, 25 bp, Homo sapien
actgtatattaatgatcctgtacaa

SEQ ID NO: 1961881 - DNA, 25 bp, Homo sapien
tattaatgatcctgtacaatggtcc

SEQ ID NO: 1961882 - DNA, 25 bp, Homo sapien
ttaatgatcctgtacaatggtccca

SEQ ID NO: 1961883 - DNA, 25 bp, Homo sapien
aatgatcctgtacaatggtcccaga

SEQ ID NO: 1961884 - DNA, 25 bp, Homo sapien
tcaacgctgccaagatagaggcacc

SEQ ID NO: 1961885 - DNA, 25 bp, Homo sapien
tgcaacaggtgaagctaacagtact

SEQ ID NO: 1961886 - DNA, 25 bp, Homo sapien
tcaggtctacactgtcaggcgcaca

SEQ ID NO: 1961887 - DNA, 25 bp, Homo sapien
tagaggcaccaagcggaaactgtag

SEQ ID NO: 1961888 - DNA, 25 bp, Homo sapien
tcctcagacgccgagatgagggtgc

SEQ ID NO: 1961889 - DNA, 25 bp, Homo sapien
tgcctgctcgccagggacagaactc

SEQ ID NO: 1961890 - DNA, 25 bp, Homo sapien
ggtgcctgctcgccagggacagaac

SEQ ID NO: 1961891 - DNA, 25 bp, Homo sapien
gcagctcggcccgaacagcctgagt

SEQ ID NO: 1961892 - DNA, 25 bp, Homo sapien
caggacgttctatgtatgtcacaga

SEQ ID NO: 1961893 - DNA, 25 bp, Homo sapien
caggaaggtcggtggtgggactttg

SEQ ID NO: 1961894 - DNA, 25 bp, Homo sapien
ctgagagaatgtgtgcaggaaggtc

SEQ ID NO: 1961895 - DNA, 25 bp, Homo sapien
gactttgtggcggttattaacatca

SEQ ID NO: 1961896 - DNA, 25 bp, Homo sapien
gggttcctaatggtcagtcatcgcc

SEQ ID NO: 1961897 - DNA, 25 bp, Homo sapien
ggaaatcaggcttgaacagcatgac

SEQ ID NO: 1961898 - DNA, 25 bp, Homo sapien
aactccaggcacgaagtgctgggca

SEQ ID NO: 1961899 - DNA, 25 bp, Homo sapien
tcatcgccctgagaatatccccagg

SEQ ID NO: 1961900 - DNA, 25 bp, Homo sapien
ggcaagactataacctgtgtaggaa

SEQ ID NO: 1961901 - DNA, 25 bp, Homo sapien
agtacattatgccagttaccatcag

SEQ ID NO: 1961902 - DNA, 25 bp, Homo sapien
gccttttaccaggaaatgctcagta

SEQ ID NO: 1961903 - DNA, 25 bp, Homo sapien
ctttagtaatacgacatatcgccat

SEQ ID NO: 1961904 - DNA, 25 bp, Homo sapien
aacatgatcatccaggctcaactgt

SEQ ID NO: 1961905 - DNA, 25 bp, Homo sapien
ttttgtttccagcacacacggcaac

SEQ ID NO: 1961906 - DNA, 25 bp, Homo sapien
catgacagtccctcgagggaccagc

SEQ ID NO: 1961907 - DNA, 25 bp, Homo sapien
ttcccaaaagcgagcccatgacagt

SEQ ID NO: 1961908 - DNA, 25 bp, Homo sapien
ctcagcatcgaaacacgaagatgcc

SEQ ID NO: 1961909 - DNA, 25 bp, Homo sapien
gagactctctcagcatcgaaacacg

SEQ ID NO: 1961910 - DNA, 25 bp, Homo sapien
cagcattacattaatctgagaaaag

SEQ ID NO: 1961911 - DNA, 25 bp, Homo sapien
agtactgagaatgtaaccctctatt

SEQ ID NO: 1961912 - DNA, 25 bp, Homo sapien
acaagcagccaggaggttcccaaga

SEQ ID NO: 1961913 - DNA, 25 bp, Homo sapien
ggacctatcaccagcaaaatgcaga

SEQ ID NO: 1961914 - DNA, 25 bp, Homo sapien
aaatggcaggcaaggtcatctggtc

SEQ ID NO: 1961915 - DNA, 25 bp, Homo sapien
ggcctccagggactaagcaatgaca

SEQ ID NO: 1961916 - DNA, 25 bp, Homo sapien
gatggtgtcctcgtaggattagaag

SEQ ID NO: 1961917 - DNA, 25 bp, Homo sapien
caaaagccatagcagtaattggctg

SEQ ID NO: 1961918 - DNA, 25 bp, Homo sapien
catagcagtaattggctgatggtgt

SEQ ID NO: 1961919 - DNA, 25 bp, Homo sapien
ggctgatggtgtcctcgtaggatta

SEQ ID NO: 1961920 - DNA, 25 bp, Homo sapien
cagtcctgcatgctgcaagcaagct

SEQ ID NO: 1961921 - DNA, 25 bp, Homo sapien
ttagtgttccatatacaaagttcag

SEQ ID NO: 1961922 - DNA, 25 bp, Homo sapien
gcaagcaagctgaacatgagacaca

SEQ ID NO: 1961923 - DNA, 25 bp, Homo sapien
tagacagccaccattacttgagaaa

SEQ ID NO: 1961924 - DNA, 25 bp, Homo sapien
ggctttccagttaagcaaaccttga

SEQ ID NO: 1961925 - DNA, 25 bp, Homo sapien
taggcttcctcgatcagcttccaca

SEQ ID NO: 1961926 - DNA, 25 bp, Homo sapien
aataccactattcccacttcacaga

SEQ ID NO: 1961927 - DNA, 25 bp, Homo sapien
gaaattgccgaaaactctggagctt

SEQ ID NO: 1961928 - DNA, 25 bp, Homo sapien
gggtcatgcacgctgtaggtattca

SEQ ID NO: 1961929 - DNA, 25 bp, Homo sapien
tcacactggtcacgtggattcagag

SEQ ID NO: 1961930 - DNA, 25 bp, Homo sapien
tgcacgctgtaggtattcaaaggcc

SEQ ID NO: 1961931 - DNA, 25 bp, Homo sapien
tgggcaagcacccaaatatccagtg

SEQ ID NO: 1961932 - DNA, 25 bp, Homo sapien
agcttcaccgacaccgtcaggacgg

SEQ ID NO: 1961933 - DNA, 25 bp, Homo sapien
taaacagttatagcacatgactggc

SEQ ID NO: 1961934 - DNA, 25 bp, Homo sapien
gcgctgcggaagaaagcatctcttt

SEQ ID NO: 1961935 - DNA, 25 bp, Homo sapien
cattgtctgttcctatgcagtggca

SEQ ID NO: 1961936 - DNA, 25 bp, Homo sapien
ctctttgccaggtggaccgaggtct

SEQ ID NO: 1961937 - DNA, 25 bp, Homo sapien
tttgccaggtggaccgaggtctagc

SEQ ID NO: 1961938 - DNA, 25 bp, Homo sapien
tctttgccaggtggaccgaggtcta

SEQ ID NO: 1961939 - DNA, 25 bp, Homo sapien
tcagttctcaaagcgccgatctcaa

SEQ ID NO: 1961940 - DNA, 25 bp, Homo sapien
tttcctagagacctcagcggagccg

SEQ ID NO: 1961941 - DNA, 25 bp, Homo sapien
cacgcgagccgctatggttactagc

SEQ ID NO: 1961942 - DNA, 25 bp, Homo sapien
gccgctatggttacttgccagccga

SEQ ID NO: 1961943 - DNA, 25 bp, Homo sapien
gcaaaaaaaatcttttattggcatg

SEQ ID NO: 1961944 - DNA, 25 bp, Homo sapien
caaaaaaaatcttttattggcatga

SEQ ID NO: 1961945 - DNA, 25 bp, Homo sapien
aaataatgttgtaaatggcaccaaa

SEQ ID NO: 1961946 - DNA, 25 bp, Homo sapien
gggcccgctgacaacagtcacaaat

SEQ ID NO: 1961947 - DNA, 25 bp, Homo sapien
ccgctgacaacagtcacaaatccag

SEQ ID NO: 1961948 - DNA, 25 bp, Homo sapien
ggggggcccgctgacaacagtcaca

SEQ ID NO: 1961949 - DNA, 25 bp, Homo sapien
tgacaacagtcacaaatccagcgac

SEQ ID NO: 1961950 - DNA, 25 bp, Homo sapien
gatagcgtttatgcagccttttgga

SEQ ID NO: 1961951 - DNA, 25 bp, Homo sapien
gatgaaaagctggtggacatgacct

SEQ ID NO: 1961952 - DNA, 25 bp, Homo sapien
tatttgcacataagagtccacaagc

SEQ ID NO: 1961953 - DNA, 25 bp, Homo sapien
tgcaatgccatacggtgatacggac

SEQ ID NO: 1961954 - DNA, 25 bp, Homo sapien
gttttacattccatacactgccatg

SEQ ID NO: 1961955 - DNA, 25 bp, Homo sapien
atggaatagcaccaaggcccacaca

SEQ ID NO: 1961956 - DNA, 25 bp, Homo sapien
ggtaggtcttaatcatagaaacaag

SEQ ID NO: 1961957 - DNA, 25 bp, Homo sapien
cacaaaaagtatgataacctctgtc

SEQ ID NO: 1961958 - DNA, 25 bp, Homo sapien
tacccttcagacaaattccacatat

SEQ ID NO: 1961959 - DNA, 25 bp, Homo sapien
gagcagtgtataagtgattcagcct

SEQ ID NO: 1961960 - DNA, 25 bp, Homo sapien
tgggagcagtgtataagtgattcag

SEQ ID NO: 1961961 - DNA, 25 bp, Homo sapien
ttggactccttacccttcagacaaa

SEQ ID NO: 1961962 - DNA, 25 bp, Homo sapien
ctccctacatgcacagtaagatttg

SEQ ID NO: 1961963 - DNA, 25 bp, Homo sapien
aagaaaatccaagtagcaaatgacc

SEQ ID NO: 1961964 - DNA, 25 bp, Homo sapien
cagcatgatctcgtaagattaaatg

SEQ ID NO: 1961965 - DNA, 25 bp, Homo sapien
gcttatcctcattggtatagtggta

SEQ ID NO: 1961966 - DNA, 25 bp, Homo sapien
taagtcttgcagtgtagttaccctc

SEQ ID NO: 1961967 - DNA, 25 bp, Homo sapien
gacactgtgctttgagcggccactt

SEQ ID NO: 1961968 - DNA, 25 bp, Homo sapien
gatgactagatactggttgttccca

SEQ ID NO: 1961969 - DNA, 25 bp, Homo sapien
ctattgcagccacccttggaagcca

SEQ ID NO: 1961970 - DNA, 25 bp, Homo sapien
catagaagaacagctagtgaggtac

SEQ ID NO: 1961971 - DNA, 25 bp, Homo sapien
aagaaagcagcggacaaagggcaca

SEQ ID NO: 1961972 - DNA, 25 bp, Homo sapien
gaatcatataggctctttaccaagg

SEQ ID NO: 1961973 - DNA, 25 bp, Homo sapien
gcaggcagaagctccacaatcgtga

SEQ ID NO: 1961974 - DNA, 25 bp, Homo sapien
cttcagatacattgccagaggagct

SEQ ID NO: 1961975 - DNA, 25 bp, Homo sapien
ggacagtacagaacgtttgggacca

SEQ ID NO: 1961976 - DNA, 25 bp, Homo sapien
aggaactgacttggacagtacagaa

SEQ ID NO: 1961977 - DNA, 25 bp, Homo sapien
ctgacttggacagtacagaacgttt

SEQ ID NO: 1961978 - DNA, 25 bp, Homo sapien
tagaagctgttggtgacaaggaaat

SEQ ID NO: 1961979 - DNA, 25 bp, Homo sapien
cattcaatggtagcacaatctcaca

SEQ ID NO: 1961980 - DNA, 25 bp, Homo sapien
ttgcatgccatagctccccttttag

SEQ ID NO: 1961981 - DNA, 25 bp, Homo sapien
ggaagtcagcttcatcaccctttgc

SEQ ID NO: 1961982 - DNA, 25 bp, Homo sapien
atccagagggggctcatacagggct

SEQ ID NO: 1961983 - DNA, 25 bp, Homo sapien
tctgaatcaccatcactgtctagag

SEQ ID NO: 1961984 - DNA, 25 bp, Homo sapien
tgtgtttaatggcagataccgcagc

SEQ ID NO: 1961985 - DNA, 25 bp, Homo sapien
cagataccgcagctcatctggtgag

SEQ ID NO: 1961986 - DNA, 25 bp, Homo sapien
taagtaacatttagggtccatattg

SEQ ID NO: 1961987 - DNA, 25 bp, Homo sapien
catttaatttgggaataggagataa

SEQ ID NO: 1961988 - DNA, 25 bp, Homo sapien
tctctgcagtaaaagtcagtgtttc

SEQ ID NO: 1961989 - DNA, 25 bp, Homo sapien
gggcacccagttgcccatgcctgcc

SEQ ID NO: 1961990 - DNA, 25 bp, Homo sapien
caatagccgataccaactgtaacta

SEQ ID NO: 1961991 - DNA, 25 bp, Homo sapien
atagccgataccaactgtaactaaa

SEQ ID NO: 1961992 - DNA, 25 bp, Homo sapien
aatagccgataccaactgtaactaa

SEQ ID NO: 1961993 - DNA, 25 bp, Homo sapien
tgttcgctctgttggcaaaactttg

SEQ ID NO: 1961994 - DNA, 25 bp, Homo sapien
tacttcccttgaggtacctggataa

SEQ ID NO: 1961995 - DNA, 25 bp, Homo sapien
tataatattcctggaactgtccggg

SEQ ID NO: 1961996 - DNA, 25 bp, Homo sapien
gtaagaactgacctttgttcgctct

SEQ ID NO: 1961997 - DNA, 25 bp, Homo sapien
tctgggtagcttatacgacctctct

SEQ ID NO: 1961998 - DNA, 25 bp, Homo sapien
caaggctttaggaagagtccccacg

SEQ ID NO: 1961999 - DNA, 25 bp, Homo sapien
tcaggagctataacctaagaggaca

SEQ ID NO: 1962000 - DNA, 25 bp, Homo sapien
ttaaaaactcttgggacgcacagca

SEQ ID NO: 1962001 - DNA, 25 bp, Homo sapien
aggcactttactggcttcaactttc

SEQ ID NO: 1962002 - DNA, 25 bp, Homo sapien
tcaggcactttactggcttcaactt

SEQ ID NO: 1962003 - DNA, 25 bp, Homo sapien
caggcactttactggcttcaacttt

SEQ ID NO: 1962004 - DNA, 25 bp, Homo sapien
ctcaggcactttactggcttcaact

SEQ ID NO: 1962005 - DNA, 25 bp, Homo sapien
aatactcagcatgtttggctggata

SEQ ID NO: 1962006 - DNA, 25 bp, Homo sapien
tttcttgtagaataacagaatactc

SEQ ID NO: 1962007 - DNA, 25 bp, Homo sapien
tactcagcatgtttggctggatatt

SEQ ID NO: 1962008 - DNA, 25 bp, Homo sapien
gaatactcagcatgtttggctggat

SEQ ID NO: 1962009 - DNA, 25 bp, Homo sapien
accatgcacttagcaaagaacctgc

SEQ ID NO: 1962010 - DNA, 25 bp, Homo sapien
cactacaaccccaaagtcctgtgtt

SEQ ID NO: 1962011 - DNA, 25 bp, Homo sapien
cacaccatggagacaattttcaaaa

SEQ ID NO: 1962012 - DNA, 25 bp, Homo sapien
taaagcacggacataattatacaga

SEQ ID NO: 1962013 - DNA, 25 bp, Homo sapien
tttaggaaataagatacttatctag

SEQ ID NO: 1962014 - DNA, 25 bp, Homo sapien
ggaaataagatacttatctagtatt

SEQ ID NO: 1962015 - DNA, 25 bp, Homo sapien
taggaaataagatacttatctagta

SEQ ID NO: 1962016 - DNA, 25 bp, Homo sapien
aataagatacttatctagtattatc

SEQ ID NO: 1962017 - DNA, 25 bp, Homo sapien
tctcaggtagagtttctccttgtga

SEQ ID NO: 1962018 - DNA, 25 bp, Homo sapien
aaggaggtcacacccaaatattcac

SEQ ID NO: 1962019 - DNA, 25 bp, Homo sapien
taaaggaggtcacacccaaatattc

SEQ ID NO: 1962020 - DNA, 25 bp, Homo sapien
gaggtcacacccaaatattcactga

SEQ ID NO: 1962021 - DNA, 25 bp, Homo sapien
tattcactgacttgttcttgaagca

SEQ ID NO: 1962022 - DNA, 25 bp, Homo sapien
gttttctgctggatagtaactaaaa

SEQ ID NO: 1962023 - DNA, 25 bp, Homo sapien
gccatttgtactctatcaagttttc

SEQ ID NO: 1962024 - DNA, 25 bp, Homo sapien
cctgtttcatcaggtggccatttgt

SEQ ID NO: 1962025 - DNA, 25 bp, Homo sapien
aagttttctgctggatagtaactaa

SEQ ID NO: 1962026 - DNA, 25 bp, Homo sapien
tagccagtatttcatccacccaaag

SEQ ID NO: 1962027 - DNA, 25 bp, Homo sapien
tacactgggaagaacgtagaatcac

SEQ ID NO: 1962028 - DNA, 25 bp, Homo sapien
taaaggacctatgagggcaaagcaa

SEQ ID NO: 1962029 - DNA, 25 bp, Homo sapien
gcctcctatgacttgacttcctgtg

SEQ ID NO: 1962030 - DNA, 25 bp, Homo sapien
tgacttgaagtttcacaactcctag

SEQ ID NO: 1962031 - DNA, 25 bp, Homo sapien
aactcctagaactatctcctgagcc

SEQ ID NO: 1962032 - DNA, 25 bp, Homo sapien
atggctgggtcccatcatttgaatt

SEQ ID NO: 1962033 - DNA, 25 bp, Homo sapien
gagcccattcgcctccttttggatg

SEQ ID NO: 1962034 - DNA, 25 bp, Homo sapien
ctctgtgagcatctccttatccgaa

SEQ ID NO: 1962035 - DNA, 25 bp, Homo sapien
tccattatgtggcaagaacatcaag

SEQ ID NO: 1962036 - DNA, 25 bp, Homo sapien
gccaaggcttaaagtctaaaaatca

SEQ ID NO: 1962037 - DNA, 25 bp, Homo sapien
tgtccctcactagctgagtaggtta

SEQ ID NO: 1962038 - DNA, 25 bp, Homo sapien
taaatcagagatgtgccttccagag

SEQ ID NO: 1962039 - DNA, 25 bp, Homo sapien
aatgcaaagtgctcaaaaaagctga

SEQ ID NO: 1962040 - DNA, 25 bp, Homo sapien
gaatttccgtgtaaccgcaatactg

SEQ ID NO: 1962041 - DNA, 25 bp, Homo sapien
tttcttgagggaggtagtaacagca

SEQ ID NO: 1962042 - DNA, 25 bp, Homo sapien
cgcacgaaggctggctggctctgca

SEQ ID NO: 1962043 - DNA, 25 bp, Homo sapien
cgaaggctggctggctctgcagcat

SEQ ID NO: 1962044 - DNA, 25 bp, Homo sapien
acgaaggctggctggctctgcagca

SEQ ID NO: 1962045 - DNA, 25 bp, Homo sapien
cacgaaggctggctggctctgcagc

SEQ ID NO: 1962046 - DNA, 25 bp, Homo sapien
cggggactgcgctccgggggtggct

SEQ ID NO: 1962047 - DNA, 25 bp, Homo sapien
ctgcgctccgggggtggctgggtcg

SEQ ID NO: 1962048 - DNA, 25 bp, Homo sapien
gactgcgctccgggggtggctgggt

SEQ ID NO: 1962049 - DNA, 25 bp, Homo sapien
cttcggggactgcgctccgggggtg

SEQ ID NO: 1962050 - DNA, 25 bp, Homo sapien
cgcacggccgcggggacagcgcagc

SEQ ID NO: 1962051 - DNA, 25 bp, Homo sapien
acggccgcggggacagcgcagcccc

SEQ ID NO: 1962052 - DNA, 25 bp, Homo sapien
gccgcggggacagcgcagccccggg

SEQ ID NO: 1962053 - DNA, 25 bp, Homo sapien
ggccgcggggacagcgcagccccgg

SEQ ID NO: 1962054 - DNA, 25 bp, Homo sapien
gccgtcgcctccgccttgtcccggc

SEQ ID NO: 1962055 - DNA, 25 bp, Homo sapien
cgtcgcctccgccttgtcccggccg

SEQ ID NO: 1962056 - DNA, 25 bp, Homo sapien
ctttgttctcgggtcgcccctctcg

SEQ ID NO: 1962057 - DNA, 25 bp, Homo sapien
cctctcgctggtggcgctccgagag

SEQ ID NO: 1962058 - DNA, 25 bp, Homo sapien
tggcgctccgagagagcagcggagc

SEQ ID NO: 1962059 - DNA, 25 bp, Homo sapien
ctcctctcccgcctttgttctcggg

SEQ ID NO: 1962060 - DNA, 25 bp, Homo sapien
gctgcaccagggcacttgtaggacc

SEQ ID NO: 1962061 - DNA, 25 bp, Homo sapien
gaagaagtcgctgagattcggccct

SEQ ID NO: 1962062 - DNA, 25 bp, Homo sapien
ttgcgtgcccgcgtggttgatgcct

SEQ ID NO: 1962063 - DNA, 25 bp, Homo sapien
ttattactgatctcgggctgcacca

SEQ ID NO: 1962064 - DNA, 25 bp, Homo sapien
cggcccgccgtacagctggcctcac

SEQ ID NO: 1962065 - DNA, 25 bp, Homo sapien
tccggggcggcccgccgtacagctg

SEQ ID NO: 1962066 - DNA, 25 bp, Homo sapien
ctaaaaacagcggaaagtgaggagc

SEQ ID NO: 1962067 - DNA, 25 bp, Homo sapien
aaaacagcggaaagtgaggagccaa

SEQ ID NO: 1962068 - DNA, 25 bp, Homo sapien
agagaatgttctcggatttaaagta

SEQ ID NO: 1962069 - DNA, 25 bp, Homo sapien
tgttctcggatttaaagtacaatcc

SEQ ID NO: 1962070 - DNA, 25 bp, Homo sapien
ctggagagtagagaatgttctcgga

SEQ ID NO: 1962071 - DNA, 25 bp, Homo sapien
tacaatccggtttcctttccattca

SEQ ID NO: 1962072 - DNA, 25 bp, Homo sapien
gaaagataaagggattattctagcg

SEQ ID NO: 1962073 - DNA, 25 bp, Homo sapien
accgacgttaacacgctcagtccag

SEQ ID NO: 1962074 - DNA, 25 bp, Homo sapien
ttgacaaacaccgacgttaacacgc

SEQ ID NO: 1962075 - DNA, 25 bp, Homo sapien
tattctagcgcgtcacattgacaaa

SEQ ID NO: 1962076 - DNA, 25 bp, Homo sapien
tctgtcccaccacgtgcaggtgtaa

SEQ ID NO: 1962077 - DNA, 25 bp, Homo sapien
gccgatcctaatccagcttggttct

SEQ ID NO: 1962078 - DNA, 25 bp, Homo sapien
agagaggtcaccactgacgacgccg

SEQ ID NO: 1962079 - DNA, 25 bp, Homo sapien
gcttccgccgcacttcttgtctgaa

SEQ ID NO: 1962080 - DNA, 25 bp, Homo sapien
agttctcactaataattgcctgata

SEQ ID NO: 1962081 - DNA, 25 bp, Homo sapien
ctgatataaagaattagcacaaaag

SEQ ID NO: 1962082 - DNA, 25 bp, Homo sapien
agaatggagtcagggaaagccgtga

SEQ ID NO: 1962083 - DNA, 25 bp, Homo sapien
aattagcacaaaagactgccaaaac

SEQ ID NO: 1962084 - DNA, 25 bp, Homo sapien
tgcacaaaggccacaaaactacaca

SEQ ID NO: 1962085 - DNA, 25 bp, Homo sapien
tacctccctgaatacacctatagtt

SEQ ID NO: 1962086 - DNA, 25 bp, Homo sapien
tcaaggacatttgcgcagcaactgc

SEQ ID NO: 1962087 - DNA, 25 bp, Homo sapien
aaccttggactggccatcccctttg

SEQ ID NO: 1962088 - DNA, 25 bp, Homo sapien
tcacagagcctaacagagcctaata

SEQ ID NO: 1962089 - DNA, 25 bp, Homo sapien
aaagatcctagaaggctcacagagc

SEQ ID NO: 1962090 - DNA, 25 bp, Homo sapien
gatccttgatcaaatccctgggaaa

SEQ ID NO: 1962091 - DNA, 25 bp, Homo sapien
cacgcttcagaaaaggtaggctcca

SEQ ID NO: 1962092 - DNA, 25 bp, Homo sapien
taaacaatccttagtacctgtaatg

SEQ ID NO: 1962093 - DNA, 25 bp, Homo sapien
aacaatccttagtacctgtaatgag

SEQ ID NO: 1962094 - DNA, 25 bp, Homo sapien
aaacaatccttagtacctgtaatga

SEQ ID NO: 1962095 - DNA, 25 bp, Homo sapien
ccagctgtcccatgcaatgtcccag

SEQ ID NO: 1962096 - DNA, 25 bp, Homo sapien
caatgtcccagatccatctgctggc

SEQ ID NO: 1962097 - DNA, 25 bp, Homo sapien
cagtgccacgtaggattctgcttcg

SEQ ID NO: 1962098 - DNA, 25 bp, Homo sapien
tgcttcgtgtttagctgcgacccag

SEQ ID NO: 1962099 - DNA, 25 bp, Homo sapien
tctttgactgctaacagtatgcggt

SEQ ID NO: 1962100 - DNA, 25 bp, Homo sapien
tatgcggtctgccaattcaagtgac

SEQ ID NO: 1962101 - DNA, 25 bp, Homo sapien
ggtggtacccaaattctttgactgc

SEQ ID NO: 1962102 - DNA, 25 bp, Homo sapien
atttattgcttggccagtcttttga

SEQ ID NO: 1962103 - DNA, 25 bp, Homo sapien
ggctccattctatatgaattagcaa

SEQ ID NO: 1962104 - DNA, 25 bp, Homo sapien
agcaaactttaattttgccagggca

SEQ ID NO: 1962105 - DNA, 25 bp, Homo sapien
attttgccagggcactcttccattc

SEQ ID NO: 1962106 - DNA, 25 bp, Homo sapien
tcttcaatggctccattctatatga

SEQ ID NO: 1962107 - DNA, 25 bp, Homo sapien
tatcagcaattgagtcatcaaaagg

SEQ ID NO: 1962108 - DNA, 25 bp, Homo sapien
gaacattgtgaattgactctctcag

SEQ ID NO: 1962109 - DNA, 25 bp, Homo sapien
caaaaggaggctccacatactgaac

SEQ ID NO: 1962110 - DNA, 25 bp, Homo sapien
catactgaacattgtgaattgactc

SEQ ID NO: 1962111 - DNA, 25 bp, Homo sapien
taggccaattggaccgagtactagc

SEQ ID NO: 1962112 - DNA, 25 bp, Homo sapien
cagagtactctcaggaaatccgcaa

SEQ ID NO: 1962113 - DNA, 25 bp, Homo sapien
taaacggtcggacatagccgtctcg

SEQ ID NO: 1962114 - DNA, 25 bp, Homo sapien
taagggaagtagctgacaatctcac

SEQ ID NO: 1962115 - DNA, 25 bp, Homo sapien
cttctcgaacatgctaggcctcctt

SEQ ID NO: 1962116 - DNA, 25 bp, Homo sapien
tccttctcgaacatgctaggcctcc

SEQ ID NO: 1962117 - DNA, 25 bp, Homo sapien
tgcctccttctcgaacatgctaggc

SEQ ID NO: 1962118 - DNA, 25 bp, Homo sapien
cctccttctcgaacatgctaggcct

SEQ ID NO: 1962119 - DNA, 25 bp, Homo sapien
tcgacttcacgcctcggcctcgctt

SEQ ID NO: 1962120 - DNA, 25 bp, Homo sapien
atggggctcgacttcacgcctcggc

SEQ ID NO: 1962121 - DNA, 25 bp, Homo sapien
gtctggatggggctcgacttcacgc

SEQ ID NO: 1962122 - DNA, 25 bp, Homo sapien
tggatggggctcgacttcacgcctc

SEQ ID NO: 1962123 - DNA, 25 bp, Homo sapien
ccggcggtcaaacgccctagccagt

SEQ ID NO: 1962124 - DNA, 25 bp, Homo sapien
ggaagtctcccacctgcgcctcgta

SEQ ID NO: 1962125 - DNA, 25 bp, Homo sapien
ccagtcccgcgagggcggaagtctc

SEQ ID NO: 1962126 - DNA, 25 bp, Homo sapien
cgcctcgtacggtaggaagtgcccg

SEQ ID NO: 1962127 - DNA, 25 bp, Homo sapien
gaagtagtttcagagtgtacatcct

SEQ ID NO: 1962128 - DNA, 25 bp, Homo sapien
aatatggcagttgaaatctctcgag

SEQ ID NO: 1962129 - DNA, 25 bp, Homo sapien
ttggaaagtctacaatctcctgcta

SEQ ID NO: 1962130 - DNA, 25 bp, Homo sapien
cgtgtctagaacgagccttgggtga

SEQ ID NO: 1962131 - DNA, 25 bp, Homo sapien
atgaaactattttacagttgtcctc

SEQ ID NO: 1962132 - DNA, 25 bp, Homo sapien
ctgaatgaacatgaaactattttac

SEQ ID NO: 1962133 - DNA, 25 bp, Homo sapien
tattttacagttgtcctcagttttc

SEQ ID NO: 1962134 - DNA, 25 bp, Homo sapien
tttacagttgtcctcagttttcttg

SEQ ID NO: 1962135 - DNA, 25 bp, Homo sapien
gtactgctactcagattcgttgatg

SEQ ID NO: 1962136 - DNA, 25 bp, Homo sapien
tcttgtactgctactcagattcgtt

SEQ ID NO: 1962137 - DNA, 25 bp, Homo sapien
ttgtactgctactcagattcgttga

SEQ ID NO: 1962138 - DNA, 25 bp, Homo sapien
tctcttgtactgctactcagattcg

SEQ ID NO: 1962139 - DNA, 25 bp, Homo sapien
atttttcccattggatcattagcct

SEQ ID NO: 1962140 - DNA, 25 bp, Homo sapien
tctctttggcttcacatttggagtc

SEQ ID NO: 1962141 - DNA, 25 bp, Homo sapien
ggcttcacatttggagtcattctga

SEQ ID NO: 1962142 - DNA, 25 bp, Homo sapien
tcattagccttgtttgtgtacatat

SEQ ID NO: 1962143 - DNA, 25 bp, Homo sapien
tgtccctcctgtgccaccacctggc

SEQ ID NO: 1962144 - DNA, 25 bp, Homo sapien
aaaaagaaatatgttccacatctgc

SEQ ID NO: 1962145 - DNA, 25 bp, Homo sapien
atctgctactccctgtccctcctgt

SEQ ID NO: 1962146 - DNA, 25 bp, Homo sapien
aagaaatatgttccacatctgctac

SEQ ID NO: 1962147 - DNA, 25 bp, Homo sapien
ggagggatccggccacattgaccat

SEQ ID NO: 1962148 - DNA, 25 bp, Homo sapien
ccggagggatccggccacattgacc

SEQ ID NO: 1962149 - DNA, 25 bp, Homo sapien
cttccggagggatccggccacattg

SEQ ID NO: 1962150 - DNA, 25 bp, Homo sapien
ttccggagggatccggccacattga

SEQ ID NO: 1962151 - DNA, 25 bp, Homo sapien
caagaacggatttctgctggctggt

SEQ ID NO: 1962152 - DNA, 25 bp, Homo sapien
gtaacaagaacggatttctgctggc

SEQ ID NO: 1962153 - DNA, 25 bp, Homo sapien
caggtgtaacaagaacggatttctg

SEQ ID NO: 1962154 - DNA, 25 bp, Homo sapien
ctagcaggggtcacaggtgtaacaa

SEQ ID NO: 1962155 - DNA, 25 bp, Homo sapien
ctcgggggacccaagaactcgatgg

SEQ ID NO: 1962156 - DNA, 25 bp, Homo sapien
caaagctgcttcaaattctcctgca

SEQ ID NO: 1962157 - DNA, 25 bp, Homo sapien
agaactcgatggcaaagctgcttca

SEQ ID NO: 1962158 - DNA, 25 bp, Homo sapien
tgcttcaaattctcctgcatgcttg

SEQ ID NO: 1962159 - DNA, 25 bp, Homo sapien
tctggcacgtagcatcgataaacac

SEQ ID NO: 1962160 - DNA, 25 bp, Homo sapien
tagacgttaggatacagtgaggcgc

SEQ ID NO: 1962161 - DNA, 25 bp, Homo sapien
gataaacaccagctcttaccggacc

SEQ ID NO: 1962162 - DNA, 25 bp, Homo sapien
gataacttcaggttcagctgaggcc

SEQ ID NO: 1962163 - DNA, 25 bp, Homo sapien
ttttcgtacggctgactaaagcgga

SEQ ID NO: 1962164 - DNA, 25 bp, Homo sapien
ttctcgaggccggtgcttgactgga

SEQ ID NO: 1962165 - DNA, 25 bp, Homo sapien
tttcaacgatttggcggagaagctc

SEQ ID NO: 1962166 - DNA, 25 bp, Homo sapien
ctaaagcggataccggtggcgactc

SEQ ID NO: 1962167 - DNA, 25 bp, Homo sapien
gggaacgcgccgcagggaagtgatc

SEQ ID NO: 1962168 - DNA, 25 bp, Homo sapien
ccgcagggaagtgatccctgagtga

SEQ ID NO: 1962169 - DNA, 25 bp, Homo sapien
cctccgtgagggaagcctgcgtctg

SEQ ID NO: 1962170 - DNA, 25 bp, Homo sapien
gaaatcttcccgcctccgtgaggga

SEQ ID NO: 1962171 - DNA, 25 bp, Homo sapien
aaagagcacttggtgcggacttgct

SEQ ID NO: 1962172 - DNA, 25 bp, Homo sapien
aacagctcatctttaggaggtgcag

SEQ ID NO: 1962173 - DNA, 25 bp, Homo sapien
cagctcatctttaggaggtgcaggc

SEQ ID NO: 1962174 - DNA, 25 bp, Homo sapien
ttgctgtggccatcgccctcaacag

SEQ ID NO: 1962175 - DNA, 25 bp, Homo sapien
gaagctcttcgcattggctacaggg

SEQ ID NO: 1962176 - DNA, 25 bp, Homo sapien
gcatcgatgtcagttaacttggcac

SEQ ID NO: 1962177 - DNA, 25 bp, Homo sapien
ttgcaggctccgagtgctacaggca

SEQ ID NO: 1962178 - DNA, 25 bp, Homo sapien
tagggactccagatacgatggcatc

SEQ ID NO: 1962179 - DNA, 25 bp, Homo sapien
ccaggaacacggctgtcctttcgct

SEQ ID NO: 1962180 - DNA, 25 bp, Homo sapien
cttctctttggtagagatccaggga

SEQ ID NO: 1962181 - DNA, 25 bp, Homo sapien
cggctgtcctttcgctgcatcttct

SEQ ID NO: 1962182 - DNA, 25 bp, Homo sapien
tctttggtagagatccagggacatc

SEQ ID NO: 1962183 - DNA, 25 bp, Homo sapien
tgcaggtgggtgcacgaaggcgtct

SEQ ID NO: 1962184 - DNA, 25 bp, Homo sapien
cagaaaccaagccaatggcgatggt

SEQ ID NO: 1962185 - DNA, 25 bp, Homo sapien
gttgagaagaaccaagccagcgtgt

SEQ ID NO: 1962186 - DNA, 25 bp, Homo sapien
gactcgaggaaaggaatgaccggaa

SEQ ID NO: 1962187 - DNA, 25 bp, Homo sapien
ctgttccttttcatcgacgaagagg

SEQ ID NO: 1962188 - DNA, 25 bp, Homo sapien
gagtgggaaacatagggcgaatttc

SEQ ID NO: 1962189 - DNA, 25 bp, Homo sapien
tgttccttttcatcgacgaagaggg

SEQ ID NO: 1962190 - DNA, 25 bp, Homo sapien
acatagggcgaatttcagagtctac

SEQ ID NO: 1962191 - DNA, 25 bp, Homo sapien
gctgggtgatctgggcaaagctagg

SEQ ID NO: 1962192 - DNA, 25 bp, Homo sapien
ctgggtgatctgggcaaagctaggg

SEQ ID NO: 1962193 - DNA, 25 bp, Homo sapien
tgggtgatctgggcaaagctagggg

SEQ ID NO: 1962194 - DNA, 25 bp, Homo sapien
tttacaggatattgatctcttggga

SEQ ID NO: 1962195 - DNA, 25 bp, Homo sapien
cacaaggagagcagtcgatgcgtct

SEQ ID NO: 1962196 - DNA, 25 bp, Homo sapien
ggatattgatctcttgggaatgtca

SEQ ID NO: 1962197 - DNA, 25 bp, Homo sapien
gaagcaatcttcaggcttttacagg

SEQ ID NO: 1962198 - DNA, 25 bp, Homo sapien
ggcaataaacacatctcccagaggc

SEQ ID NO: 1962199 - DNA, 25 bp, Homo sapien
tctgccgctacaaccagcaggtgat

SEQ ID NO: 1962200 - DNA, 25 bp, Homo sapien
gcagatgaaggtcagcactgtgttc

SEQ ID NO: 1962201 - DNA, 25 bp, Homo sapien
tggtggctacaaaacgcagatgaag

SEQ ID NO: 1962202 - DNA, 25 bp, Homo sapien
agacccccagcactcatacctccag

SEQ ID NO: 1962203 - DNA, 25 bp, Homo sapien
gagaacaacatagaacctctaggta

SEQ ID NO: 1962204 - DNA, 25 bp, Homo sapien
ctctgctctgagttcggtgtgtgga

SEQ ID NO: 1962205 - DNA, 25 bp, Homo sapien
ttgggtgacgtttggaaagacagca

SEQ ID NO: 1962206 - DNA, 25 bp, Homo sapien
cagcccctgctgtcaatacataaca

SEQ ID NO: 1962207 - DNA, 25 bp, Homo sapien
tgaagagggtgaaacgatggatgcc

SEQ ID NO: 1962208 - DNA, 25 bp, Homo sapien
gtgaaacgatggatgccggagcgca

SEQ ID NO: 1962209 - DNA, 25 bp, Homo sapien
ccgtgatcacagagctctgggcgga

SEQ ID NO: 1962210 - DNA, 25 bp, Homo sapien
aggagatggagacatccgtgatcac

SEQ ID NO: 1962211 - DNA, 25 bp, Homo sapien
ggtgtgctcaatctggaccttcgga

SEQ ID NO: 1962212 - DNA, 25 bp, Homo sapien
catcacctttcccaagcaaagaggt

SEQ ID NO: 1962213 - DNA, 25 bp, Homo sapien
tgcagtcacacctacatccggtcta

SEQ ID NO: 1962214 - DNA, 25 bp, Homo sapien
acatccggtctaagctgcacccaag

SEQ ID NO: 1962215 - DNA, 25 bp, Homo sapien
tctggcgccggtcatggaatttatt

SEQ ID NO: 1962216 - DNA, 25 bp, Homo sapien
tcagaagcagcgtggcgcctgcagc

SEQ ID NO: 1962217 - DNA, 25 bp, Homo sapien
tgcagcagtgccgtgttctggcgcc

SEQ ID NO: 1962218 - DNA, 25 bp, Homo sapien
ggttccacctctttcggggctggca

SEQ ID NO: 1962219 - DNA, 25 bp, Homo sapien
gcacagctgagctcgttcaaagacg

SEQ ID NO: 1962220 - DNA, 25 bp, Homo sapien
tcaaagacgtttgtcacggagccac

SEQ ID NO: 1962221 - DNA, 25 bp, Homo sapien
tgatcgtgggcctagaaaggcacag

SEQ ID NO: 1962222 - DNA, 25 bp, Homo sapien
caaacggctgcctattgatcgtggg

SEQ ID NO: 1962223 - DNA, 25 bp, Homo sapien
tcctccgactctcacttttgtttgc

SEQ ID NO: 1962224 - DNA, 25 bp, Homo sapien
aacctctggcaaaatgcagcgtcat

SEQ ID NO: 1962225 - DNA, 25 bp, Homo sapien
tcgtaacagtcatggtggccgttgt

SEQ ID NO: 1962226 - DNA, 25 bp, Homo sapien
aacagtcatggtggccgttgtgctc

SEQ ID NO: 1962227 - DNA, 25 bp, Homo sapien
taggtcgtaacagtcatggtggccg

SEQ ID NO: 1962228 - DNA, 25 bp, Homo sapien
tctttttaggtcgtaacagtcatgg

SEQ ID NO: 1962229 - DNA, 25 bp, Homo sapien
ccttgcagtagtgaggccaggacag

SEQ ID NO: 1962230 - DNA, 25 bp, Homo sapien
ttgccaccacccgaagtctgtaggc

SEQ ID NO: 1962231 - DNA, 25 bp, Homo sapien
gggcatccgcctcgccttgcagtag

SEQ ID NO: 1962232 - DNA, 25 bp, Homo sapien
ggctcagtgccctatgactcaggag

SEQ ID NO: 1962233 - DNA, 25 bp, Homo sapien
tagtccaggaccagaggaagggcca

SEQ ID NO: 1962234 - DNA, 25 bp, Homo sapien
tccaggaccagaggaagggccagac

SEQ ID NO: 1962235 - DNA, 25 bp, Homo sapien
ttagtccaggaccagaggaagggcc

SEQ ID NO: 1962236 - DNA, 25 bp, Homo sapien
agtccaggaccagaggaagggccag

SEQ ID NO: 1962237 - DNA, 25 bp, Homo sapien
gctgccccagctttcagggcccctc

SEQ ID NO: 1962238 - DNA, 25 bp, Homo sapien
gggcgggcaacaggaggccaaaggc

SEQ ID NO: 1962239 - DNA, 25 bp, Homo sapien
agggcccctcgccaaccctcggcat

SEQ ID NO: 1962240 - DNA, 25 bp, Homo sapien
tgtcttcaggcacagtggccgggaa

SEQ ID NO: 1962241 - DNA, 25 bp, Homo sapien
cttcctcatccatgtagacggaaag

SEQ ID NO: 1962242 - DNA, 25 bp, Homo sapien
tcaggttctttgcagcccagtgctg

SEQ ID NO: 1962243 - DNA, 25 bp, Homo sapien
cttctttgcccatccgagccgcctc

SEQ ID NO: 1962244 - DNA, 25 bp, Homo sapien
catgtagacggaaagagtaaccgtg

SEQ ID NO: 1962245 - DNA, 25 bp, Homo sapien
caccatcgctgtcatcatctgtggg

SEQ ID NO: 1962246 - DNA, 25 bp, Homo sapien
gcagccgtgactgcatcttctcctg

SEQ ID NO: 1962247 - DNA, 25 bp, Homo sapien
gtgcatacccccaccatcgctgtca

SEQ ID NO: 1962248 - DNA, 25 bp, Homo sapien
tgggcagccgtgactgcatcttctc

SEQ ID NO: 1962249 - DNA, 25 bp, Homo sapien
gactgagcttctgtcagtggcgagg

SEQ ID NO: 1962250 - DNA, 25 bp, Homo sapien
agactgagcttctgtcagtggcgag

SEQ ID NO: 1962251 - DNA, 25 bp, Homo sapien
cagactgagcttctgtcagtggcga

SEQ ID NO: 1962252 - DNA, 25 bp, Homo sapien
ccagactgagcttctgtcagtggcg

SEQ ID NO: 1962253 - DNA, 25 bp, Homo sapien
agttgtgcggcaggactcagatgcc

SEQ ID NO: 1962254 - DNA, 25 bp, Homo sapien
caatgacaaggctccggcgagttgt

SEQ ID NO: 1962255 - DNA, 25 bp, Homo sapien
ggacagtggtcaatgacaaggctcc

SEQ ID NO: 1962256 - DNA, 25 bp, Homo sapien
ctgctgggtctgagcacagatgcat

SEQ ID NO: 1962257 - DNA, 25 bp, Homo sapien
ctgtggtgatggcacgtgcacgggc

SEQ ID NO: 1962258 - DNA, 25 bp, Homo sapien
acgtcttgatctcgccggtggagtc

SEQ ID NO: 1962259 - DNA, 25 bp, Homo sapien
gttgcttcttgacgtcttgatctcg

SEQ ID NO: 1962260 - DNA, 25 bp, Homo sapien
cgtgcacgggccagttgcttcttga

SEQ ID NO: 1962261 - DNA, 25 bp, Homo sapien
gagcctctggacgtgcagttagggt

SEQ ID NO: 1962262 - DNA, 25 bp, Homo sapien
tgcagttagggttggctgtctgcca

SEQ ID NO: 1962263 - DNA, 25 bp, Homo sapien
agcctctggacgtgcagttagggtt

SEQ ID NO: 1962264 - DNA, 25 bp, Homo sapien
gttagggttggctgtctgccaaaag

SEQ ID NO: 1962265 - DNA, 25 bp, Homo sapien
ctctgcgtgcagctggtgttggact

SEQ ID NO: 1962266 - DNA, 25 bp, Homo sapien
agggtcagtctctgcgtgcagctgg

SEQ ID NO: 1962267 - DNA, 25 bp, Homo sapien
gtcagtctctgcgtgcagctggtgt

SEQ ID NO: 1962268 - DNA, 25 bp, Homo sapien
cagtctctgcgtgcagctggtgttg

SEQ ID NO: 1962269 - DNA, 25 bp, Homo sapien
ggtgctgtgctgggtacatgaagct

SEQ ID NO: 1962270 - DNA, 25 bp, Homo sapien
tcttccggtgctaggtgctgtgctg

SEQ ID NO: 1962271 - DNA, 25 bp, Homo sapien
tgctgtgctgggtacatgaagctac

SEQ ID NO: 1962272 - DNA, 25 bp, Homo sapien
cttcttccggtgctaggtgctgtgc

SEQ ID NO: 1962273 - DNA, 25 bp, Homo sapien
cttccggtgctaggtggtttgctga

SEQ ID NO: 1962274 - DNA, 25 bp, Homo sapien
gtggtttgctgagtaaatgtaggta

SEQ ID NO: 1962275 - DNA, 25 bp, Homo sapien
tgccttcttccggtgctaggtggtt

SEQ ID NO: 1962276 - DNA, 25 bp, Homo sapien
ggtttgctgagtaaatgtaggtacc

SEQ ID NO: 1962277 - DNA, 25 bp, Homo sapien
cagtggctactgggccatgctgagg

SEQ ID NO: 1962278 - DNA, 25 bp, Homo sapien
tgctgaggggcctttaggacatgga

SEQ ID NO: 1962279 - DNA, 25 bp, Homo sapien
gccatgctgaggggcctttaggaca

SEQ ID NO: 1962280 - DNA, 25 bp, Homo sapien
aggggcctttaggacatggagctgg

SEQ ID NO: 1962281 - DNA, 25 bp, Homo sapien
caccttgctagtgtggtgggccacg

SEQ ID NO: 1962282 - DNA, 25 bp, Homo sapien
tcctggaaggcggatttcagccgaa

SEQ ID NO: 1962283 - DNA, 25 bp, Homo sapien
tctggttggtcggtcagcacacagt

SEQ ID NO: 1962284 - DNA, 25 bp, Homo sapien
tcagccgaagtgctaatgtcgccag

SEQ ID NO: 1962285 - DNA, 25 bp, Homo sapien
tcccagaacagtgcaggccacgggg

SEQ ID NO: 1962286 - DNA, 25 bp, Homo sapien
cagtgcaggccacggggctttaatg

SEQ ID NO: 1962287 - DNA, 25 bp, Homo sapien
tgcaggccacggggctttaatgctg

SEQ ID NO: 1962288 - DNA, 25 bp, Homo sapien
ccacggggctttaatgctgctcctc

SEQ ID NO: 1962289 - DNA, 25 bp, Homo sapien
ttcccgcgcgggctgaggagagatg

SEQ ID NO: 1962290 - DNA, 25 bp, Homo sapien
gaggtctcgccagccgggcaatgct

SEQ ID NO: 1962291 - DNA, 25 bp, Homo sapien
gcgctgggaacccacgggcttctga

SEQ ID NO: 1962292 - DNA, 25 bp, Homo sapien
gagagatggcgcagaggcgctggga

SEQ ID NO: 1962293 - DNA, 25 bp, Homo sapien
acctgcaaccgaggtcctgcagcca

SEQ ID NO: 1962294 - DNA, 25 bp, Homo sapien
ttatcctcgtgtgaaccagacgcca

SEQ ID NO: 1962295 - DNA, 25 bp, Homo sapien
gggtatgggtgctcgagttatcctc

SEQ ID NO: 1962296 - DNA, 25 bp, Homo sapien
tcgtgtgaaccagacgccagtgagg

SEQ ID NO: 1962297 - DNA, 25 bp, Homo sapien
tgctcgagttatcctcgtgtgaacc

SEQ ID NO: 1962298 - DNA, 25 bp, Homo sapien
gcagagggctggtcctcgtggcctc

SEQ ID NO: 1962299 - DNA, 25 bp, Homo sapien
atagacgttacactcctgaaaataa

SEQ ID NO: 1962300 - DNA, 25 bp, Homo sapien
cgagctctcagatctgtgcgtggca

SEQ ID NO: 1962301 - DNA, 25 bp, Homo sapien
tctgactgtggacagtgcgagctct

SEQ ID NO: 1962302 - DNA, 25 bp, Homo sapien
gcgtgaatgcgattctcagcccagt

SEQ ID NO: 1962303 - DNA, 25 bp, Homo sapien
tatcgccggatgagagacggccact

SEQ ID NO: 1962304 - DNA, 25 bp, Homo sapien
cagtgtaagaccaggtatcgccgga

SEQ ID NO: 1962305 - DNA, 25 bp, Homo sapien
tggctaaaatagagcccagcggccg

SEQ ID NO: 1962306 - DNA, 25 bp, Homo sapien
tggaagaggcttttgtgtccctcgg

SEQ ID NO: 1962307 - DNA, 25 bp, Homo sapien
ctgtctggtacggatccactagact

SEQ ID NO: 1962308 - DNA, 25 bp, Homo sapien
gatccactagactaaaggctgaggt

SEQ ID NO: 1962309 - DNA, 25 bp, Homo sapien
tccctcggtgcaggacagacttgtc

SEQ ID NO: 1962310 - DNA, 25 bp, Homo sapien
cgaagctgtgtccacggagccccat

SEQ ID NO: 1962311 - DNA, 25 bp, Homo sapien
gcttcagggagccagcaaatgggag

SEQ ID NO: 1962312 - DNA, 25 bp, Homo sapien
tgtgttcatggcacctgcatccacg

SEQ ID NO: 1962313 - DNA, 25 bp, Homo sapien
gagccagcaaatgggaggcccacat

SEQ ID NO: 1962314 - DNA, 25 bp, Homo sapien
ccactgaggccccttaaggtgataa

SEQ ID NO: 1962315 - DNA, 25 bp, Homo sapien
cggattgcagtagccccactgaggc

SEQ ID NO: 1962316 - DNA, 25 bp, Homo sapien
acattggccatgagtacccacggat

SEQ ID NO: 1962317 - DNA, 25 bp, Homo sapien
agacgaattacaaccaaagactctg

SEQ ID NO: 1962318 - DNA, 25 bp, Homo sapien
ggtcgcgcttatcctcactcctcgt

SEQ ID NO: 1962319 - DNA, 25 bp, Homo sapien
cttgatttctagacccagatgcagg

SEQ ID NO: 1962320 - DNA, 25 bp, Homo sapien
tgggcaatggggtcgcgcttatcct

SEQ ID NO: 1962321 - DNA, 25 bp, Homo sapien
ctagacccagatgcaggttgaggtg

SEQ ID NO: 1962322 - DNA, 25 bp, Homo sapien
gagattcccacgagctccgtgctgc

SEQ ID NO: 1962323 - DNA, 25 bp, Homo sapien
agagattcccacgagctccgtgctg

SEQ ID NO: 1962324 - DNA, 25 bp, Homo sapien
tcagagattcccacgagctccgtgc

SEQ ID NO: 1962325 - DNA, 25 bp, Homo sapien
cagagattcccacgagctccgtgct

SEQ ID NO: 1962326 - DNA, 25 bp, Homo sapien
gggctccctgctgggacccgtggct

SEQ ID NO: 1962327 - DNA, 25 bp, Homo sapien
cctgctgggacccgtggctgctgca

SEQ ID NO: 1962328 - DNA, 25 bp, Homo sapien
tgctgggacccgtggctgctgcaca

SEQ ID NO: 1962329 - DNA, 25 bp, Homo sapien
tccctgctgggacccgtggctgctg

SEQ ID NO: 1962330 - DNA, 25 bp, Homo sapien
tcaatctccacgtcacccggcagag

SEQ ID NO: 1962331 - DNA, 25 bp, Homo sapien
gctcaatctccacgtcacccggcag

SEQ ID NO: 1962332 - DNA, 25 bp, Homo sapien
atctccacgtcacccggcagagtct

SEQ ID NO: 1962333 - DNA, 25 bp, Homo sapien
aatctccacgtcacccggcagagtc

SEQ ID NO: 1962334 - DNA, 25 bp, Homo sapien
ggatgagaggaactgcccggccacc

SEQ ID NO: 1962335 - DNA, 25 bp, Homo sapien
gatgagaggaactgcccggccacct

SEQ ID NO: 1962336 - DNA, 25 bp, Homo sapien
aggatgagaggaactgcccggccac

SEQ ID NO: 1962337 - DNA, 25 bp, Homo sapien
atgagaggaactgcccggccacctg

SEQ ID NO: 1962338 - DNA, 25 bp, Homo sapien
agatgtgctcacaaaccgcatggga

SEQ ID NO: 1962339 - DNA, 25 bp, Homo sapien
gcagggtaagcgcagggctgagcat

SEQ ID NO: 1962340 - DNA, 25 bp, Homo sapien
cagggctgagcattggcagtgatct

SEQ ID NO: 1962341 - DNA, 25 bp, Homo sapien
caaaccgcatgggagccacgtcggg

SEQ ID NO: 1962342 - DNA, 25 bp, Homo sapien
atcaccgtgtccttcatcaccgtgt

SEQ ID NO: 1962343 - DNA, 25 bp, Homo sapien
tcatcaccgtgtccttcatcaccat

SEQ ID NO: 1962344 - DNA, 25 bp, Homo sapien
cttcatcaccgtgtccttcatcacc

SEQ ID NO: 1962345 - DNA, 25 bp, Homo sapien
caccgtgtccttcatcaccgtgtcc

SEQ ID NO: 1962346 - DNA, 25 bp, Homo sapien
tgagaaagaggacgggcatcccatg

SEQ ID NO: 1962347 - DNA, 25 bp, Homo sapien
ctgagagagagtctgggtgagaaag

SEQ ID NO: 1962348 - DNA, 25 bp, Homo sapien
aaagaggacgggcatcccatggcca

SEQ ID NO: 1962349 - DNA, 25 bp, Homo sapien
ggtgagaaagaggacgggcatccca

SEQ ID NO: 1962350 - DNA, 25 bp, Homo sapien
ggtgctttactgctgaaggcgactc

SEQ ID NO: 1962351 - DNA, 25 bp, Homo sapien
gaggtgctttactgctgaaggcgac

SEQ ID NO: 1962352 - DNA, 25 bp, Homo sapien
atagacacagggaggtgctttactg

SEQ ID NO: 1962353 - DNA, 25 bp, Homo sapien
acagggaggtgctttactgctgaag

SEQ ID NO: 1962354 - DNA, 25 bp, Homo sapien
gaagggagctttatgatccacgccc

SEQ ID NO: 1962355 - DNA, 25 bp, Homo sapien
gagtgtccaccgcagaacgagtgct

SEQ ID NO: 1962356 - DNA, 25 bp, Homo sapien
aacgccacgtcgctggtacaaatgg

SEQ ID NO: 1962357 - DNA, 25 bp, Homo sapien
tccacgaggaaagacgaggaaatgc

SEQ ID NO: 1962358 - DNA, 25 bp, Homo sapien
gcaaaggtcccacttggtgcaggca

SEQ ID NO: 1962359 - DNA, 25 bp, Homo sapien
cgtgcctcgccctctttcacaggca

SEQ ID NO: 1962360 - DNA, 25 bp, Homo sapien
ccgggcggcagtgtaggctccccgg

SEQ ID NO: 1962361 - DNA, 25 bp, Homo sapien
cggccgcttcctcttgggcctggaa

SEQ ID NO: 1962362 - DNA, 25 bp, Homo sapien
gggagcagtgtatggaggctttgga

SEQ ID NO: 1962363 - DNA, 25 bp, Homo sapien
ctcagggagtcggagatagagcctc

SEQ ID NO: 1962364 - DNA, 25 bp, Homo sapien
ttcctgtccttccaaggggagcagt

SEQ ID NO: 1962365 - DNA, 25 bp, Homo sapien
gtgtgcaccgttccagctcccaggt

SEQ ID NO: 1962366 - DNA, 25 bp, Homo sapien
tggtgcctgagcgttcacagacgtt

SEQ ID NO: 1962367 - DNA, 25 bp, Homo sapien
ctgccctctttggaagcgtcctggg

SEQ ID NO: 1962368 - DNA, 25 bp, Homo sapien
cacagacgttgagtgaccctgagcg

SEQ ID NO: 1962369 - DNA, 25 bp, Homo sapien
gatttgccgtggtccttgtgcagcc

SEQ ID NO: 1962370 - DNA, 25 bp, Homo sapien
tctctgtccagcaggcgagcctggc

SEQ ID NO: 1962371 - DNA, 25 bp, Homo sapien
ctcccagaggggtctctgtccagca

SEQ ID NO: 1962372 - DNA, 25 bp, Homo sapien
tccagcaggcgagcctggccccagg

SEQ ID NO: 1962373 - DNA, 25 bp, Homo sapien
cttctcccagaggggtctctgtcca

SEQ ID NO: 1962374 - DNA, 25 bp, Homo sapien
gctgggtgaccctcagggaactgta

SEQ ID NO: 1962375 - DNA, 25 bp, Homo sapien
cacctcccacctggcgcggcgcctg

SEQ ID NO: 1962376 - DNA, 25 bp, Homo sapien
gggtgaccctcagggaactgtagct

SEQ ID NO: 1962377 - DNA, 25 bp, Homo sapien
ttcagcagcactgccgtgctaggct

SEQ ID NO: 1962378 - DNA, 25 bp, Homo sapien
cagcctgtgggcagtcggccaagcc

SEQ ID NO: 1962379 - DNA, 25 bp, Homo sapien
acagaggttggtccccctcagaacg

SEQ ID NO: 1962380 - DNA, 25 bp, Homo sapien
gcagtcggccaagccccttgggaaa

SEQ ID NO: 1962381 - DNA, 25 bp, Homo sapien
gcacagaggttggtccccctcagaa

SEQ ID NO: 1962382 - DNA, 25 bp, Homo sapien
gcacacacacccagcgagggcatca

SEQ ID NO: 1962383 - DNA, 25 bp, Homo sapien
ccggcagagtcaggacatgctcaca

SEQ ID NO: 1962384 - DNA, 25 bp, Homo sapien
ggacatgctcacaatgagcacacac

SEQ ID NO: 1962385 - DNA, 25 bp, Homo sapien
gagccatcggtgaccccggcagagt

SEQ ID NO: 1962386 - DNA, 25 bp, Homo sapien
gctcatgctcctcacgtccacactt

SEQ ID NO: 1962387 - DNA, 25 bp, Homo sapien
atgctcctcacgtccacacttccct

SEQ ID NO: 1962388 - DNA, 25 bp, Homo sapien
ctggcttctctaggcgctcatgctc

SEQ ID NO: 1962389 - DNA, 25 bp, Homo sapien
ctctaggcgctcatgctcctcacgt

SEQ ID NO: 1962390 - DNA, 25 bp, Homo sapien
ctacagagaagacgctcagggccag

SEQ ID NO: 1962391 - DNA, 25 bp, Homo sapien
cacaataacatgagcaagggtcggt

SEQ ID NO: 1962392 - DNA, 25 bp, Homo sapien
tcgtggaggcacagctgaggttctc

SEQ ID NO: 1962393 - DNA, 25 bp, Homo sapien
gaggttctccgcagtcaaggcttct

SEQ ID NO: 1962394 - DNA, 25 bp, Homo sapien
agtcaccacaaggagagcccagggc

SEQ ID NO: 1962395 - DNA, 25 bp, Homo sapien
gaccccacagtcaccacaaggagag

SEQ ID NO: 1962396 - DNA, 25 bp, Homo sapien
cacagtcaccacaaggagagcccag

SEQ ID NO: 1962397 - DNA, 25 bp, Homo sapien
gagcgaggaccccacagtcaccaca

SEQ ID NO: 1962398 - DNA, 25 bp, Homo sapien
aacacacgacagggctcgagggagc

SEQ ID NO: 1962399 - DNA, 25 bp, Homo sapien
ctgaacacacgacagggctcgaggg

SEQ ID NO: 1962400 - DNA, 25 bp, Homo sapien
cacacgacagggctcgagggagcat

SEQ ID NO: 1962401 - DNA, 25 bp, Homo sapien
tgaacacacgacagggctcgaggga

SEQ ID NO: 1962402 - DNA, 25 bp, Homo sapien
ggctcgggagagcatctgaacgcac

SEQ ID NO: 1962403 - DNA, 25 bp, Homo sapien
cagggctcgggagagcatctgaacg

SEQ ID NO: 1962404 - DNA, 25 bp, Homo sapien
gggctcgggagagcatctgaacgca

SEQ ID NO: 1962405 - DNA, 25 bp, Homo sapien
gacagggctcgggagagcatctgaa

SEQ ID NO: 1962406 - DNA, 25 bp, Homo sapien
aacgcacgacagggctcgggggagc

SEQ ID NO: 1962407 - DNA, 25 bp, Homo sapien
gaacgcacgacagggctcgggggag

SEQ ID NO: 1962408 - DNA, 25 bp, Homo sapien
ctgaacgcacgacagggctcggggg

SEQ ID NO: 1962409 - DNA, 25 bp, Homo sapien
cgcacgacagggctcgggggagcat

SEQ ID NO: 1962410 - DNA, 25 bp, Homo sapien
ccaagtgagttcatttacggccctg

SEQ ID NO: 1962411 - DNA, 25 bp, Homo sapien
tacttacctgctaggtttgttccga

SEQ ID NO: 1962412 - DNA, 25 bp, Homo sapien
ctgctgagggatcggcagtggtccc

SEQ ID NO: 1962413 - DNA, 25 bp, Homo sapien
tttgttccgagggtgaggagaaatc

SEQ ID NO: 1962414 - DNA, 25 bp, Homo sapien
caaacctgtgtgttacagtatccaa

SEQ ID NO: 1962415 - DNA, 25 bp, Homo sapien
gcagtacacgcacccttaagaaaga

SEQ ID NO: 1962416 - DNA, 25 bp, Homo sapien
taaccatcaaggtattcagtgctca

SEQ ID NO: 1962417 - DNA, 25 bp, Homo sapien
caaccacgtgcactaagaaatgcag

SEQ ID NO: 1962418 - DNA, 25 bp, Homo sapien
tttgaagtgtcattgtcgctcctgg

SEQ ID NO: 1962419 - DNA, 25 bp, Homo sapien
cccagcccaccctttgaagtgtcat

SEQ ID NO: 1962420 - DNA, 25 bp, Homo sapien
gtcattgtcgctcctggaaggcaac

SEQ ID NO: 1962421 - DNA, 25 bp, Homo sapien
aaccctgcgccagtgttcacgcacc

SEQ ID NO: 1962422 - DNA, 25 bp, Homo sapien
ctctaggagtcagaagggcatcccc

SEQ ID NO: 1962423 - DNA, 25 bp, Homo sapien
gccgggtaggtgacacatgcttggt

SEQ ID NO: 1962424 - DNA, 25 bp, Homo sapien
cagtccagtatgttgcccttggcgt

SEQ ID NO: 1962425 - DNA, 25 bp, Homo sapien
atgcttggtgacagtccggccctct

SEQ ID NO: 1962426 - DNA, 25 bp, Homo sapien
ccaagagctgattgagcaggaacca

SEQ ID NO: 1962427 - DNA, 25 bp, Homo sapien
agctgattgagcaggaaccaccctc

SEQ ID NO: 1962428 - DNA, 25 bp, Homo sapien
gtcctccctgaatgctcccacgacc

SEQ ID NO: 1962429 - DNA, 25 bp, Homo sapien
cacgaccctgtgtggggtactccag

SEQ ID NO: 1962430 - DNA, 25 bp, Homo sapien
ggctcttgagccacgctgtgccact

SEQ ID NO: 1962431 - DNA, 25 bp, Homo sapien
taaaggtgctcactcggctcttgag

SEQ ID NO: 1962432 - DNA, 25 bp, Homo sapien
tggctagagcgtttttctgataaag

SEQ ID NO: 1962433 - DNA, 25 bp, Homo sapien
gacactggttagcaatggctagagc

SEQ ID NO: 1962434 - DNA, 25 bp, Homo sapien
ttgcacaggccccaaacagacgtgc

SEQ ID NO: 1962435 - DNA, 25 bp, Homo sapien
caggccacatctgagaagtgtcacc

SEQ ID NO: 1962436 - DNA, 25 bp, Homo sapien
tgccagactcatggccattgcacag

SEQ ID NO: 1962437 - DNA, 25 bp, Homo sapien
ggtgaccctgatgctccaggccttg

SEQ ID NO: 1962438 - DNA, 25 bp, Homo sapien
catccggagacagccgcctgtccag

SEQ ID NO: 1962439 - DNA, 25 bp, Homo sapien
ctcgtaccagctggcatccggagac

SEQ ID NO: 1962440 - DNA, 25 bp, Homo sapien
tggcatccggagacagccgcctgtc

SEQ ID NO: 1962441 - DNA, 25 bp, Homo sapien
ctgctcgtaccagctggcatccgga

SEQ ID NO: 1962442 - DNA, 25 bp, Homo sapien
tttgcatggacaaccctgtccttgc

SEQ ID NO: 1962443 - DNA, 25 bp, Homo sapien
ctttgcatggacaaccctgtccttg

SEQ ID NO: 1962444 - DNA, 25 bp, Homo sapien
ccctgtccttgcaaaagggaggagg

SEQ ID NO: 1962445 - DNA, 25 bp, Homo sapien
gacaaccctgtccttgcaaaaggga

SEQ ID NO: 1962446 - DNA, 25 bp, Homo sapien
ggaagcctgattgcgctggagccca

SEQ ID NO: 1962447 - DNA, 25 bp, Homo sapien
tggaagcctgattgcgctggagccc

SEQ ID NO: 1962448 - DNA, 25 bp, Homo sapien
gctggaagcctgattgcgctggagc

SEQ ID NO: 1962449 - DNA, 25 bp, Homo sapien
agcctgattgcgctggagcccagcc

SEQ ID NO: 1962450 - DNA, 25 bp, Homo sapien
gatgataatggtgactctgcgggag

SEQ ID NO: 1962451 - DNA, 25 bp, Homo sapien
agaagacagcggataacagccccga

SEQ ID NO: 1962452 - DNA, 25 bp, Homo sapien
gtgtccccggacagctctgagttga

SEQ ID NO: 1962453 - DNA, 25 bp, Homo sapien
actctgcgggaggacagaagacagc

SEQ ID NO: 1962454 - DNA, 25 bp, Homo sapien
agaaagcgcaagtccttcccgtggt

SEQ ID NO: 1962455 - DNA, 25 bp, Homo sapien
gctcaggacgctgagaaagcgcaag

SEQ ID NO: 1962456 - DNA, 25 bp, Homo sapien
gccgggattccggtggctcaggacg

SEQ ID NO: 1962457 - DNA, 25 bp, Homo sapien
agtccttcccgtggtccaggcgtcg

SEQ ID NO: 1962458 - DNA, 25 bp, Homo sapien
aaggacctggggatcctggcgcgtg

SEQ ID NO: 1962459 - DNA, 25 bp, Homo sapien
cctggggatcctggcgcgtggttct

SEQ ID NO: 1962460 - DNA, 25 bp, Homo sapien
gggatcctggcgcgtggttctcggg

SEQ ID NO: 1962461 - DNA, 25 bp, Homo sapien
gcgcgtggttctcggggcgctccgg

SEQ ID NO: 1962462 - DNA, 25 bp, Homo sapien
tgctgagtttcgcaagtcctgggcg

SEQ ID NO: 1962463 - DNA, 25 bp, Homo sapien
tcccacgcggaacgatgctgagttt

SEQ ID NO: 1962464 - DNA, 25 bp, Homo sapien
tgctgaatcggatggcaaacgccca

SEQ ID NO: 1962465 - DNA, 25 bp, Homo sapien
tagaacacgctccttcatgtcggat

SEQ ID NO: 1962466 - DNA, 25 bp, Homo sapien
gaagaaggaccaacggtggctgtcc

SEQ ID NO: 1962467 - DNA, 25 bp, Homo sapien
gagaagaaggaccaacggtggctgt

SEQ ID NO: 1962468 - DNA, 25 bp, Homo sapien
agaagaaggaccaacggtggctgtc

SEQ ID NO: 1962469 - DNA, 25 bp, Homo sapien
gagagaagaaggaccaacggtggct

SEQ ID NO: 1962470 - DNA, 25 bp, Homo sapien
ccccaatccccttgagccacagaga

SEQ ID NO: 1962471 - DNA, 25 bp, Homo sapien
tcagtagagacagaacagtgactgc

SEQ ID NO: 1962472 - DNA, 25 bp, Homo sapien
caatccccttgagccacagagagcg

SEQ ID NO: 1962473 - DNA, 25 bp, Homo sapien
gtagagacagaacagtgactgcagc

SEQ ID NO: 1962474 - DNA, 25 bp, Homo sapien
cttgagtgtggagagcagcggtgac

SEQ ID NO: 1962475 - DNA, 25 bp, Homo sapien
cggtgaccttgaacgagtggagagc

SEQ ID NO: 1962476 - DNA, 25 bp, Homo sapien
ccgttaagccgtggagagctgcggt

SEQ ID NO: 1962477 - DNA, 25 bp, Homo sapien
ctgcacgtggagaccggtggtgccg

SEQ ID NO: 1962478 - DNA, 25 bp, Homo sapien
tggagaccggtggtgccgttaagcc

SEQ ID NO: 1962479 - DNA, 25 bp, Homo sapien
catggagaacggcagtgcccgtgag

SEQ ID NO: 1962480 - DNA, 25 bp, Homo sapien
ggagaacggcagtgcccgtgagcac

SEQ ID NO: 1962481 - DNA, 25 bp, Homo sapien
ttagtacatggagaacggcagtgcc

SEQ ID NO: 1962482 - DNA, 25 bp, Homo sapien
ctttagtacatggagaacggcagtg

SEQ ID NO: 1962483 - DNA, 25 bp, Homo sapien
cagtgcccttgagcactcggagaac

SEQ ID NO: 1962484 - DNA, 25 bp, Homo sapien
gcagtgcccttgagcactcggagaa

SEQ ID NO: 1962485 - DNA, 25 bp, Homo sapien
ggttcctattctgatgcttgatgcc

SEQ ID NO: 1962486 - DNA, 25 bp, Homo sapien
ttcctattctgatgcttgatgccca

SEQ ID NO: 1962487 - DNA, 25 bp, Homo sapien
gttcctattctgatgcttgatgccc

SEQ ID NO: 1962488 - DNA, 25 bp, Homo sapien
tggttcctattctgatgcttgatgc

SEQ ID NO: 1962489 - DNA, 25 bp, Homo sapien
ctgttctgatggttggttcctgttc

SEQ ID NO: 1962490 - DNA, 25 bp, Homo sapien
cctgttctgatggttggttcctgtt

SEQ ID NO: 1962491 - DNA, 25 bp, Homo sapien
tctgttctgatggttggttcctgtt

SEQ ID NO: 1962492 - DNA, 25 bp, Homo sapien
tgttctgatggttggtgcctgttct

SEQ ID NO: 1962493 - DNA, 25 bp, Homo sapien
tctgatgtttggttcccgttcttat

SEQ ID NO: 1962494 - DNA, 25 bp, Homo sapien
ttctgatgtttggttcccgttctta

SEQ ID NO: 1962495 - DNA, 25 bp, Homo sapien
tgatgtttggttcccgttcttatgt

SEQ ID NO: 1962496 - DNA, 25 bp, Homo sapien
tgttctgatgtttggttcccgttct

SEQ ID NO: 1962497 - DNA, 25 bp, Homo sapien
tggtgactttgggtttgcgagcaaa

SEQ ID NO: 1962498 - DNA, 25 bp, Homo sapien
caaagtgcagcacatttatcaggtt

SEQ ID NO: 1962499 - DNA, 25 bp, Homo sapien
tgtaacattgtctcccctgggcctt

SEQ ID NO: 1962500 - DNA, 25 bp, Homo sapien
ttttgtaacattgtctcccctgggc

SEQ ID NO: 1962501 - DNA, 25 bp, Homo sapien
ccagcgggcgctctgcagcccttcc

SEQ ID NO: 1962502 - DNA, 25 bp, Homo sapien
cccagcgggcgctctgcagcccttc

SEQ ID NO: 1962503 - DNA, 25 bp, Homo sapien
tctgccaagacagaggggtcgcgcc

SEQ ID NO: 1962504 - DNA, 25 bp, Homo sapien
gacaaacacgaagtgagagtcaccc

SEQ ID NO: 1962505 - DNA, 25 bp, Homo sapien
tgcccactccaaggaccagattctc

SEQ ID NO: 1962506 - DNA, 25 bp, Homo sapien
cagctgagggagagctcgacaccca

SEQ ID NO: 1962507 - DNA, 25 bp, Homo sapien
tggctgcagaatgttaaggtcccaa

SEQ ID NO: 1962508 - DNA, 25 bp, Homo sapien
gcacaggagggtaccgagctcggag

SEQ ID NO: 1962509 - DNA, 25 bp, Homo sapien
ttagtccaaaggttggctgcagaat

SEQ ID NO: 1962510 - DNA, 25 bp, Homo sapien
gggtaccgagctcggagcaaggcct

SEQ ID NO: 1962511 - DNA, 25 bp, Homo sapien
gatccggacagatgagggccaggca

SEQ ID NO: 1962512 - DNA, 25 bp, Homo sapien
gggccaggcagcagcatcctggcat

SEQ ID NO: 1962513 - DNA, 25 bp, Homo sapien
tgagggccaggcagcagcatcctgg

SEQ ID NO: 1962514 - DNA, 25 bp, Homo sapien
cgatccggacagatgagggccaggc

SEQ ID NO: 1962515 - DNA, 25 bp, Homo sapien
agcaggagggaggagccaacggtgc

SEQ ID NO: 1962516 - DNA, 25 bp, Homo sapien
ggagccaacggtgccacgtggttcc

SEQ ID NO: 1962517 - DNA, 25 bp, Homo sapien
caggagggaggagccaacggtgcca

SEQ ID NO: 1962518 - DNA, 25 bp, Homo sapien
agggaggagccaacggtgccacgtg

SEQ ID NO: 1962519 - DNA, 25 bp, Homo sapien
agccagcaggacagctctgccggaa

SEQ ID NO: 1962520 - DNA, 25 bp, Homo sapien
ctctgccggcgtctctccagccagc

SEQ ID NO: 1962521 - DNA, 25 bp, Homo sapien
gcgcttgctggctctgccggcgtct

SEQ ID NO: 1962522 - DNA, 25 bp, Homo sapien
ccttcagtgtttggctggcgcttgc

SEQ ID NO: 1962523 - DNA, 25 bp, Homo sapien
ggcgctcacaattcaacaacatgga

SEQ ID NO: 1962524 - DNA, 25 bp, Homo sapien
aattgtgtgacgtgaagcatgcaga

SEQ ID NO: 1962525 - DNA, 25 bp, Homo sapien
tgtgaagttagcaagagcctgaagg

SEQ ID NO: 1962526 - DNA, 25 bp, Homo sapien
tctgatagggctccagttgtgaagt

SEQ ID NO: 1962527 - DNA, 25 bp, Homo sapien
tgtcagaccggacaggaaaaccttg

SEQ ID NO: 1962528 - DNA, 25 bp, Homo sapien
gcaaatgttgatccacgggctccac

SEQ ID NO: 1962529 - DNA, 25 bp, Homo sapien
ggttaggaaacgctccatctgaggg

SEQ ID NO: 1962530 - DNA, 25 bp, Homo sapien
gctatttgggtcaggcaagcctgcc

SEQ ID NO: 1962531 - DNA, 25 bp, Homo sapien
aggtggacacggtgcagctgattcc

SEQ ID NO: 1962532 - DNA, 25 bp, Homo sapien
accgtgcaaccagtcgcaggtgctc

SEQ ID NO: 1962533 - DNA, 25 bp, Homo sapien
caggacgagccgtaccaagagggac

SEQ ID NO: 1962534 - DNA, 25 bp, Homo sapien
tgagctgaagcaacaccgtgcaacc

SEQ ID NO: 1962535 - DNA, 25 bp, Homo sapien
cctgcagaacttccagagcgagcca

SEQ ID NO: 1962536 - DNA, 25 bp, Homo sapien
caatgtccccattacagcatgagtc

SEQ ID NO: 1962537 - DNA, 25 bp, Homo sapien
tgctgagagtttggcggccagccca

SEQ ID NO: 1962538 - DNA, 25 bp, Homo sapien
ctatcacctcgtttgtggcaatggg

SEQ ID NO: 1962539 - DNA, 25 bp, Homo sapien
aggcaccgggcgcttcgactgcacc

SEQ ID NO: 1962540 - DNA, 25 bp, Homo sapien
gcaccgggcgcttcgactgcaccct

SEQ ID NO: 1962541 - DNA, 25 bp, Homo sapien
gggcgcttcgactgcaccctcatct

SEQ ID NO: 1962542 - DNA, 25 bp, Homo sapien
accgggcgcttcgactgcaccctca

SEQ ID NO: 1962543 - DNA, 25 bp, Homo sapien
ggactgacaagcccagtcagggtgc

SEQ ID NO: 1962544 - DNA, 25 bp, Homo sapien
cctttcccactagacaagccagtag

SEQ ID NO: 1962545 - DNA, 25 bp, Homo sapien
caaagggggactgacaagcccagtc

SEQ ID NO: 1962546 - DNA, 25 bp, Homo sapien
caggaggcacaaagggggactgaca

SEQ ID NO: 1962547 - DNA, 25 bp, Homo sapien
aataaattctctctccgcagccgac

SEQ ID NO: 1962548 - DNA, 25 bp, Homo sapien
gcctcctgagggtcgctgtggaaat

SEQ ID NO: 1962549 - DNA, 25 bp, Homo sapien
cgaccgaggccacgtccagtggcca

SEQ ID NO: 1962550 - DNA, 25 bp, Homo sapien
ttctaagaatgggtctggccaagac

SEQ ID NO: 1962551 - DNA, 25 bp, Homo sapien
aagccacaggcaagacgacagctca

SEQ ID NO: 1962552 - DNA, 25 bp, Homo sapien
tgttggtcagcacactccgtccctc

SEQ ID NO: 1962553 - DNA, 25 bp, Homo sapien
tcaaagctgcgcagagaaaatgcag

SEQ ID NO: 1962554 - DNA, 25 bp, Homo sapien
agaaaatgcagcgatcacagggccc

SEQ ID NO: 1962555 - DNA, 25 bp, Homo sapien
cccgggagccacgatgggctttatg

SEQ ID NO: 1962556 - DNA, 25 bp, Homo sapien
tttatgaccacacgtcctccgggag

SEQ ID NO: 1962557 - DNA, 25 bp, Homo sapien
tccgggagaagctgcccgttcccat

SEQ ID NO: 1962558 - DNA, 25 bp, Homo sapien
tcctgtgcagacaccataggcctga

SEQ ID NO: 1962559 - DNA, 25 bp, Homo sapien
gcatctcagggtttgcaggcaaaag

SEQ ID NO: 1962560 - DNA, 25 bp, Homo sapien
aggcaaaagtcagcagactcaccct

SEQ ID NO: 1962561 - DNA, 25 bp, Homo sapien
tgcgctgctgagagggaatggcgat

SEQ ID NO: 1962562 - DNA, 25 bp, Homo sapien
ggcgattttctcactttttatgtca

SEQ ID NO: 1962563 - DNA, 25 bp, Homo sapien
gaggcggcagaacgtagacagaacc

SEQ ID NO: 1962564 - DNA, 25 bp, Homo sapien
caacgtgtgttttcacgggcaccac

SEQ ID NO: 1962565 - DNA, 25 bp, Homo sapien
acagagtctgttttctatgggtggg

SEQ ID NO: 1962566 - DNA, 25 bp, Homo sapien
ggcagcggtgaacatatccctctta

SEQ ID NO: 1962567 - DNA, 25 bp, Homo sapien
aggccagcgtgattcttctgagtgc

SEQ ID NO: 1962568 - DNA, 25 bp, Homo sapien
catctcctaggccagcgtgattctt

SEQ ID NO: 1962569 - DNA, 25 bp, Homo sapien
gcacgccgccgtccatctcctaggc

SEQ ID NO: 1962570 - DNA, 25 bp, Homo sapien
cctaggccagcgtgattcttctgag

SEQ ID NO: 1962571 - DNA, 25 bp, Homo sapien
agcgtctgagggatccggaagcccc

SEQ ID NO: 1962572 - DNA, 25 bp, Homo sapien
gcgtctgagggatccggaagcccca

SEQ ID NO: 1962573 - DNA, 25 bp, Homo sapien
cagcgtctgagggatccggaagccc

SEQ ID NO: 1962574 - DNA, 25 bp, Homo sapien
gtctgagggatccggaagccccaga

SEQ ID NO: 1962575 - DNA, 25 bp, Homo sapien
ttgagatcaccagcgtcgtcatgcc

SEQ ID NO: 1962576 - DNA, 25 bp, Homo sapien
atcaccagcgtcgtcatgccggcgg

SEQ ID NO: 1962577 - DNA, 25 bp, Homo sapien
gcagcccttgagatcaccagcgtcg

SEQ ID NO: 1962578 - DNA, 25 bp, Homo sapien
cagcgtcgtcatgccggcggctcag

SEQ ID NO: 1962579 - DNA, 25 bp, Homo sapien
aatttcaaagaaaaccgctgccctg

SEQ ID NO: 1962580 - DNA, 25 bp, Homo sapien
gcttctcaaggtcgaaaggagcccc

SEQ ID NO: 1962581 - DNA, 25 bp, Homo sapien
tcactcgtaagtgtcggcagctgct

SEQ ID NO: 1962582 - DNA, 25 bp, Homo sapien
tcagcaggacaacggggcaaccttc

SEQ ID NO: 1962583 - DNA, 25 bp, Homo sapien
caggcgggaacacgcacaaatcaca

SEQ ID NO: 1962584 - DNA, 25 bp, Homo sapien
tcacacacaggaaacagcgagaatc

SEQ ID NO: 1962585 - DNA, 25 bp, Homo sapien
gaaacagcgagaatccacacgtaca

SEQ ID NO: 1962586 - DNA, 25 bp, Homo sapien
aggaaacagtgagaatccacacctg

SEQ ID NO: 1962587 - DNA, 25 bp, Homo sapien
ggaaatggcggcagttccatcagct

SEQ ID NO: 1962588 - DNA, 25 bp, Homo sapien
cctttactttgggaaatggcggcag

SEQ ID NO: 1962589 - DNA, 25 bp, Homo sapien
gggaaatggcggcagttccatcagc

SEQ ID NO: 1962590 - DNA, 25 bp, Homo sapien
tactttgggaaatggcggcagttcc

SEQ ID NO: 1962591 - DNA, 25 bp, Homo sapien
cccaacattgtccaggccaggtgct

SEQ ID NO: 1962592 - DNA, 25 bp, Homo sapien
ccagcctctcggtgtctgctttttc

SEQ ID NO: 1962593 - DNA, 25 bp, Homo sapien
atgacaggatcaggacacctggctg

SEQ ID NO: 1962594 - DNA, 25 bp, Homo sapien
aggtgctgacacagcggcgggaaca

SEQ ID NO: 1962595 - DNA, 25 bp, Homo sapien
agcgccgtcccgacatgaccagtgc

SEQ ID NO: 1962596 - DNA, 25 bp, Homo sapien
gcacggatgtcaccaatggctgggt

SEQ ID NO: 1962597 - DNA, 25 bp, Homo sapien
tgggcacggatgtcaccaatggctg

SEQ ID NO: 1962598 - DNA, 25 bp, Homo sapien
ctgctgggcacggatgtcaccaatg

SEQ ID NO: 1962599 - DNA, 25 bp, Homo sapien
cagctggcgaacagcagcttctctc

SEQ ID NO: 1962600 - DNA, 25 bp, Homo sapien
gcacagctggcgaacagcagcttct

SEQ ID NO: 1962601 - DNA, 25 bp, Homo sapien
agtgtggccgcaggcttcctaccca

SEQ ID NO: 1962602 - DNA, 25 bp, Homo sapien
ggaggaaaagctgcctccgaggcct

SEQ ID NO: 1962603 - DNA, 25 bp, Homo sapien
gactgtgctgtgctgatgtttggct

SEQ ID NO: 1962604 - DNA, 25 bp, Homo sapien
aaggccacagcctccgaggcctgga

SEQ ID NO: 1962605 - DNA, 25 bp, Homo sapien
ccctgcaggagtggcacagggacaa

SEQ ID NO: 1962606 - DNA, 25 bp, Homo sapien
agcctccgaggcctggactgtgctg

SEQ ID NO: 1962607 - DNA, 25 bp, Homo sapien
ggctgtgggtccctgcagagcgcag

SEQ ID NO: 1962608 - DNA, 25 bp, Homo sapien
ggtccctgcagagcgcagaggctgt

SEQ ID NO: 1962609 - DNA, 25 bp, Homo sapien
tgtgggtccctgcagagcgcagagg

SEQ ID NO: 1962610 - DNA, 25 bp, Homo sapien
cacagaggctgtgggtccctgcaga

SEQ ID NO: 1962611 - DNA, 25 bp, Homo sapien
ctctgtgagtgccatgcctggacgc

SEQ ID NO: 1962612 - DNA, 25 bp, Homo sapien
tgcaggagcggtataggactgtcca

SEQ ID NO: 1962613 - DNA, 25 bp, Homo sapien
tgtccacaaagaagagggcacctgg

SEQ ID NO: 1962614 - DNA, 25 bp, Homo sapien
caggagtcgtttcctcatcagaagg

SEQ ID NO: 1962615 - DNA, 25 bp, Homo sapien
agcacaagcgagtgctttgcagacc

SEQ ID NO: 1962616 - DNA, 25 bp, Homo sapien
tctccactctcagcggctgtcagga

SEQ ID NO: 1962617 - DNA, 25 bp, Homo sapien
ctgtcaggagagcacaagcgagtgc

SEQ ID NO: 1962618 - DNA, 25 bp, Homo sapien
cactctcagcggctgtcaggagagc

SEQ ID NO: 1962619 - DNA, 25 bp, Homo sapien
caggaggaggctcggtccaggtgcc

SEQ ID NO: 1962620 - DNA, 25 bp, Homo sapien
gatcttcctgcggaggaaacagcca

SEQ ID NO: 1962621 - DNA, 25 bp, Homo sapien
tggcattgcctcgactggctgcctg

SEQ ID NO: 1962622 - DNA, 25 bp, Homo sapien
tcttcccttgaaaggacaagggctc

SEQ ID NO: 1962623 - DNA, 25 bp, Homo sapien
tagtgcacacgtacaacggcaggtc

SEQ ID NO: 1962624 - DNA, 25 bp, Homo sapien
gacacagtcccattgaagtgggtca

SEQ ID NO: 1962625 - DNA, 25 bp, Homo sapien
gcaggtctgtcgcacacgtacgacg

SEQ ID NO: 1962626 - DNA, 25 bp, Homo sapien
caagtgtgttgtcgaacgtagtgca

SEQ ID NO: 1962627 - DNA, 25 bp, Homo sapien
cattccacagttgtacttttgtgca

SEQ ID NO: 1962628 - DNA, 25 bp, Homo sapien
tggcctcgtgttttctctcagggca

SEQ ID NO: 1962629 - DNA, 25 bp, Homo sapien
tctcagggcattccacagttgtact

SEQ ID NO: 1962630 - DNA, 25 bp, Homo sapien
aggaccggacccaggcccggatgct

SEQ ID NO: 1962631 - DNA, 25 bp, Homo sapien
tgaaactacgttcccacttgaccaa

SEQ ID NO: 1962632 - DNA, 25 bp, Homo sapien
ggctgttcctaacgctgaaactacg

SEQ ID NO: 1962633 - DNA, 25 bp, Homo sapien
cctgtctacagacttagggagttcc

SEQ ID NO: 1962634 - DNA, 25 bp, Homo sapien
acttagggagttggacctggtcact

SEQ ID NO: 1962635 - DNA, 25 bp, Homo sapien
ccagtcggaagagtggacaggtgtc

SEQ ID NO: 1962636 - DNA, 25 bp, Homo sapien
tccacagagaaccagtcggaagagt

SEQ ID NO: 1962637 - DNA, 25 bp, Homo sapien
ggcaggtgtccgcactgtccacaga

SEQ ID NO: 1962638 - DNA, 25 bp, Homo sapien
tcagagcttccgacagccaattgga

SEQ ID NO: 1962639 - DNA, 25 bp, Homo sapien
agccgcaccaggaacctggcgcctg

SEQ ID NO: 1962640 - DNA, 25 bp, Homo sapien
agagccgcaccaggaacctggcgcc

SEQ ID NO: 1962641 - DNA, 25 bp, Homo sapien
tttccagataaactgaactcagagc

SEQ ID NO: 1962642 - DNA, 25 bp, Homo sapien
taaactgaactcagagccgcaccag

SEQ ID NO: 1962643 - DNA, 25 bp, Homo sapien
catctccctcactgcgaaggacggt

SEQ ID NO: 1962644 - DNA, 25 bp, Homo sapien
tgctcttaaacgactgcatctccct

SEQ ID NO: 1962645 - DNA, 25 bp, Homo sapien
gaagtaactcctggcggagcctgtc

SEQ ID NO: 1962646 - DNA, 25 bp, Homo sapien
gaaggacggtgtcactggatcccac

SEQ ID NO: 1962647 - DNA, 25 bp, Homo sapien
tgctatctgagtcccggggctgacc

SEQ ID NO: 1962648 - DNA, 25 bp, Homo sapien
aaagccaaatccttgcgggggattg

SEQ ID NO: 1962649 - DNA, 25 bp, Homo sapien
gggtgaggccgtgctatctgagtcc

SEQ ID NO: 1962650 - DNA, 25 bp, Homo sapien
tgaggccgtgctatctgagtcccgg

SEQ ID NO: 1962651 - DNA, 25 bp, Homo sapien
atggagcgaaaagcccgatgtctgg

SEQ ID NO: 1962652 - DNA, 25 bp, Homo sapien
caccaacagcaatggagcgaaaagc

SEQ ID NO: 1962653 - DNA, 25 bp, Homo sapien
ctctccaccaacagcaatggagcga

SEQ ID NO: 1962654 - DNA, 25 bp, Homo sapien
cagcaatggagcgaaaagcccgatg

SEQ ID NO: 1962655 - DNA, 25 bp, Homo sapien
cacacggagacctcctactgggaat

SEQ ID NO: 1962656 - DNA, 25 bp, Homo sapien
gcttgagcccacacgggtgtcagtg

SEQ ID NO: 1962657 - DNA, 25 bp, Homo sapien
gggtgggtgacacacatctcttcaa

SEQ ID NO: 1962658 - DNA, 25 bp, Homo sapien
aaaagcagcatccttgttccctgca

SEQ ID NO: 1962659 - DNA, 25 bp, Homo sapien
catggcaagagtgcccaggcttgag

SEQ ID NO: 1962660 - DNA, 25 bp, Homo sapien
gccacgcaggagacgagcttgcaga

SEQ ID NO: 1962661 - DNA, 25 bp, Homo sapien
cctccgccgggtgtaccaggctcct

SEQ ID NO: 1962662 - DNA, 25 bp, Homo sapien
tggacaggagagaatgacgccacgc

SEQ ID NO: 1962663 - DNA, 25 bp, Homo sapien
gctcctggacaggagagaatgacgc

SEQ ID NO: 1962664 - DNA, 25 bp, Homo sapien
cacgacaggtgtgatcgaaggcact

SEQ ID NO: 1962665 - DNA, 25 bp, Homo sapien
ggagaagacctgattcacgcacacg

SEQ ID NO: 1962666 - DNA, 25 bp, Homo sapien
cattgaagttgtctgaggagtggcc

SEQ ID NO: 1962667 - DNA, 25 bp, Homo sapien
tccaacgcaggtggaatgcagctcc

SEQ ID NO: 1962668 - DNA, 25 bp, Homo sapien
gaccatggaaccgagcccctgtctc

SEQ ID NO: 1962669 - DNA, 25 bp, Homo sapien
tccgcgaccatggaaccgagcccct

SEQ ID NO: 1962670 - DNA, 25 bp, Homo sapien
agccgtgacccactccctcgtccac

SEQ ID NO: 1962671 - DNA, 25 bp, Homo sapien
tccacgaccatggagccagccgtga

SEQ ID NO: 1962672 - DNA, 25 bp, Homo sapien
ggtaacggcagagtcacgctgacca

SEQ ID NO: 1962673 - DNA, 25 bp, Homo sapien
aacggcagagtcacgctgaccagct

SEQ ID NO: 1962674 - DNA, 25 bp, Homo sapien
cttcggcccttctgctgctactggg

SEQ ID NO: 1962675 - DNA, 25 bp, Homo sapien
cgcagcccacagtttctatgtgacg

SEQ ID NO: 1962676 - DNA, 25 bp, Homo sapien
gagcctgaagcgtcgtttcctaaaa

SEQ ID NO: 1962677 - DNA, 25 bp, Homo sapien
aggagcatggacgggcctgagcctg

SEQ ID NO: 1962678 - DNA, 25 bp, Homo sapien
gcacgaggccctgccggagtctctg

SEQ ID NO: 1962679 - DNA, 25 bp, Homo sapien
gaggccctgccggagtctctgccag

SEQ ID NO: 1962680 - DNA, 25 bp, Homo sapien
ctgattgcagcgaaccctccagact

SEQ ID NO: 1962681 - DNA, 25 bp, Homo sapien
tctaaagctgtagcactgattgcag

SEQ ID NO: 1962682 - DNA, 25 bp, Homo sapien
cagcagccgctgagactgtgattct

SEQ ID NO: 1962683 - DNA, 25 bp, Homo sapien
cagactgggcatcacgcgtgcccgt

SEQ ID NO: 1962684 - DNA, 25 bp, Homo sapien
caccagcaaagacgtgagacaaggg

SEQ ID NO: 1962685 - DNA, 25 bp, Homo sapien
cagcaaagacgtgagacaagggatt

SEQ ID NO: 1962686 - DNA, 25 bp, Homo sapien
caaagacgtgagacaagggattcag

SEQ ID NO: 1962687 - DNA, 25 bp, Homo sapien
atccaccagcaaagacgtgagacaa

SEQ ID NO: 1962688 - DNA, 25 bp, Homo sapien
gtgattccccccttccgtgctgccc

SEQ ID NO: 1962689 - DNA, 25 bp, Homo sapien
taggtgattccccccttccgtgctg

SEQ ID NO: 1962690 - DNA, 25 bp, Homo sapien
gattccccccttccgtgctgcccag

SEQ ID NO: 1962691 - DNA, 25 bp, Homo sapien
ggtgattccccccttccgtgctgcc

SEQ ID NO: 1962692 - DNA, 25 bp, Homo sapien
ccgcttcctgggacggtaccctgcg

SEQ ID NO: 1962693 - DNA, 25 bp, Homo sapien
tccgcttcctgggacggtaccctgc

SEQ ID NO: 1962694 - DNA, 25 bp, Homo sapien
ctgtgttgtccgcttcctgggacgg

SEQ ID NO: 1962695 - DNA, 25 bp, Homo sapien
tgttgtccgcttcctgggacggtcc

SEQ ID NO: 1962696 - DNA, 25 bp, Homo sapien
gggacggtcccctgcgtccagcaca

SEQ ID NO: 1962697 - DNA, 25 bp, Homo sapien
ggtcccctgcgtccagcacactcac

SEQ ID NO: 1962698 - DNA, 25 bp, Homo sapien
ctgtgttgtccgcttcctgggacgg

SEQ ID NO: 1962699 - DNA, 25 bp, Homo sapien
agggccgcacgcaggcctgtgttgt

SEQ ID NO: 1962700 - DNA, 25 bp, Homo sapien
caggcctgtgttgtccgcttcctgg

SEQ ID NO: 1962701 - DNA, 25 bp, Homo sapien
tgttgtccgcttcctgggacggtcc

SEQ ID NO: 1962702 - DNA, 25 bp, Homo sapien
ctgtgttgtccgcttcctgggacgg

SEQ ID NO: 1962703 - DNA, 25 bp, Homo sapien
tgttgtccgcttcctgggacggtcc

SEQ ID NO: 1962704 - DNA, 25 bp, Homo sapien
caggcctgtgttgtccgcttcctgg

SEQ ID NO: 1962705 - DNA, 25 bp, Homo sapien
agggccgcacgcaggcctgtgttgt

SEQ ID NO: 1962706 - DNA, 25 bp, Homo sapien
aggcctgtgttgtccgcttcctggg

SEQ ID NO: 1962707 - DNA, 25 bp, Homo sapien
tgttgtccgcttcctgggacggtcc

SEQ ID NO: 1962708 - DNA, 25 bp, Homo sapien
cacacaggcctgtgttgtccgcttc

SEQ ID NO: 1962709 - DNA, 25 bp, Homo sapien
gccagggccgcacacaggcctgtgt

SEQ ID NO: 1962710 - DNA, 25 bp, Homo sapien
ctgtgttgtccgcttcctgggacgg

SEQ ID NO: 1962711 - DNA, 25 bp, Homo sapien
aggcctgtgttgtccgcttcctggg

SEQ ID NO: 1962712 - DNA, 25 bp, Homo sapien
tgttgtccgcttcctgggacggtcc

SEQ ID NO: 1962713 - DNA, 25 bp, Homo sapien
gcaggcctgtgttgtccgcttcctg

SEQ ID NO: 1962714 - DNA, 25 bp, Homo sapien
ctgtgttgtccgcttcctgggacgg

SEQ ID NO: 1962715 - DNA, 25 bp, Homo sapien
aggcctgtgttgtccgcttcctggg

SEQ ID NO: 1962716 - DNA, 25 bp, Homo sapien
gcaggcctgtgttgtccgcttcctg

SEQ ID NO: 1962717 - DNA, 25 bp, Homo sapien
tgttgtccgcttcctgggacggtcc

SEQ ID NO: 1962718 - DNA, 25 bp, Homo sapien
tgttgtccgcttcctgggacggtcc

SEQ ID NO: 1962719 - DNA, 25 bp, Homo sapien
gtgttgtccgcttcctgggacggtc

SEQ ID NO: 1962720 - DNA, 25 bp, Homo sapien
tgtgttgtccgcttcctgggacggt

SEQ ID NO: 1962721 - DNA, 25 bp, Homo sapien
ctgtgttgtccgcttcctgggacgg

SEQ ID NO: 1962722 - DNA, 25 bp, Homo sapien
agggccgcacgcaggcctgtgttgt

SEQ ID NO: 1962723 - DNA, 25 bp, Homo sapien
caggcctgtgttgtccgcttcctgg

SEQ ID NO: 1962724 - DNA, 25 bp, Homo sapien
ctgtgttgtccgcttcctgggacgg

SEQ ID NO: 1962725 - DNA, 25 bp, Homo sapien
tgttgtccgcttcctgggacggtcc

SEQ ID NO: 1962726 - DNA, 25 bp, Homo sapien
ctgtgttgtccgcttcctgggacgg

SEQ ID NO: 1962727 - DNA, 25 bp, Homo sapien
agggccgcacgcaggcctgtgttgt

SEQ ID NO: 1962728 - DNA, 25 bp, Homo sapien
tgttgtccgcttcctgggacggtcc

SEQ ID NO: 1962729 - DNA, 25 bp, Homo sapien
caggcctgtgttgtccgcttcctgg

SEQ ID NO: 1962730 - DNA, 25 bp, Homo sapien
ctgtgttgtccgcttcctgggacgg

SEQ ID NO: 1962731 - DNA, 25 bp, Homo sapien
tgttgtccgcttcctgggacggtcc

SEQ ID NO: 1962732 - DNA, 25 bp, Homo sapien
caggcctgtgttgtccgcttcctgg

SEQ ID NO: 1962733 - DNA, 25 bp, Homo sapien
agggccgcacgcaggcctgtgttgt

SEQ ID NO: 1962734 - DNA, 25 bp, Homo sapien
gtccagcacactcacggccagggcc

SEQ ID NO: 1962735 - DNA, 25 bp, Homo sapien
gcgtccagcacactcacggccaggg

SEQ ID NO: 1962736 - DNA, 25 bp, Homo sapien
ctgcgtccagcacactcacggccag

SEQ ID NO: 1962737 - DNA, 25 bp, Homo sapien
agggctgtgttgtccgcttcctggg

SEQ ID NO: 1962738 - DNA, 25 bp, Homo sapien
agggctgtgttgtccgcttcctggg

SEQ ID NO: 1962739 - DNA, 25 bp, Homo sapien
aacccggacagtcgttcctgtctct

SEQ ID NO: 1962740 - DNA, 25 bp, Homo sapien
ggacagtcgttcctgtctcttcagt

SEQ ID NO: 1962741 - DNA, 25 bp, Homo sapien
tcctgtctgggaaacccggacagtc

SEQ ID NO: 1962742 - DNA, 25 bp, Homo sapien
tcctgggacggtcctgtctgggaaa

SEQ ID NO: 1962743 - DNA, 25 bp, Homo sapien
tagtaaaaggctctgtagtgggctg

SEQ ID NO: 1962744 - DNA, 25 bp, Homo sapien
tatgacaccaatctcctacgttgag

SEQ ID NO: 1962745 - DNA, 25 bp, Homo sapien
gatctgtaatcacatggcgtctggt

SEQ ID NO: 1962746 - DNA, 25 bp, Homo sapien
ttataaggacacgagacacagaggc

SEQ ID NO: 1962747 - DNA, 25 bp, Homo sapien
ggctcccagaagacagggccctccc

SEQ ID NO: 1962748 - DNA, 25 bp, Homo sapien
taaacacctgcggagggagcgtggc

SEQ ID NO: 1962749 - DNA, 25 bp, Homo sapien
ggactctggggctcccagaagacag

SEQ ID NO: 1962750 - DNA, 25 bp, Homo sapien
cataaacacctgcggagggagcgtg

SEQ ID NO: 1962751 - DNA, 25 bp, Homo sapien
tcatgggaacttccagagccggtca

SEQ ID NO: 1962752 - DNA, 25 bp, Homo sapien
catttaaatgagtccgtgggatgca

SEQ ID NO: 1962753 - DNA, 25 bp, Homo sapien
gatccacgatcaggtgcatggcagg

SEQ ID NO: 1962754 - DNA, 25 bp, Homo sapien
cacagacgaagcactcagggaacat

SEQ ID NO: 1962755 - DNA, 25 bp, Homo sapien
tcacccgaaatagcagatcaaattg

SEQ ID NO: 1962756 - DNA, 25 bp, Homo sapien
gggactagatcacccgaaatagcag

SEQ ID NO: 1962757 - DNA, 25 bp, Homo sapien
tgtcaagaactaacagggactagat

SEQ ID NO: 1962758 - DNA, 25 bp, Homo sapien
caggcgcctcctggactgtcaagaa

SEQ ID NO: 1962759 - DNA, 25 bp, Homo sapien
caccagacagatggaagatcccact

SEQ ID NO: 1962760 - DNA, 25 bp, Homo sapien
ggtcacactggaagtcaccagacag

SEQ ID NO: 1962761 - DNA, 25 bp, Homo sapien
tggagccgagcggtaacagacccgt

SEQ ID NO: 1962762 - DNA, 25 bp, Homo sapien
tttcgtggcggaagaaggtcacact

SEQ ID NO: 1962763 - DNA, 25 bp, Homo sapien
ttgaactccacgctaagagcagccg

SEQ ID NO: 1962764 - DNA, 25 bp, Homo sapien
agccggaagccgttcgctggcgcca

SEQ ID NO: 1962765 - DNA, 25 bp, Homo sapien
gcgcagaaccgtgccctgaaaggca

SEQ ID NO: 1962766 - DNA, 25 bp, Homo sapien
cagctgagcacatgcgcagaaccgt

SEQ ID NO: 1962767 - DNA, 25 bp, Homo sapien
tttcaaggactcagcagagtgggca

SEQ ID NO: 1962768 - DNA, 25 bp, Homo sapien
gacgggaggaggtgctcccagcact

SEQ ID NO: 1962769 - DNA, 25 bp, Homo sapien
aggactcagcagagtgggcaatcac

SEQ ID NO: 1962770 - DNA, 25 bp, Homo sapien
ccctttcaaggactcagcagagtgg

SEQ ID NO: 1962771 - DNA, 25 bp, Homo sapien
ttttggccttgtaagatttctcatc

SEQ ID NO: 1962772 - DNA, 25 bp, Homo sapien
tccacccagtttaattggcttgctt

SEQ ID NO: 1962773 - DNA, 25 bp, Homo sapien
ctaccagcgtccttgaccggactcc

SEQ ID NO: 1962774 - DNA, 25 bp, Homo sapien
gatgtgcgtatgcaaccacagcaag

SEQ ID NO: 1962775 - DNA, 25 bp, Homo sapien
ggagcccgtgcggtcctgctgagcc

SEQ ID NO: 1962776 - DNA, 25 bp, Homo sapien
cgcgcttagagacggggctgcccac

SEQ ID NO: 1962777 - DNA, 25 bp, Homo sapien
tgctgagccagcaggcgggacgcgc

SEQ ID NO: 1962778 - DNA, 25 bp, Homo sapien
gggagcccgtgcggtcctgctgagc

SEQ ID NO: 1962779 - DNA, 25 bp, Homo sapien
ggccatgttggcgtcaaacggcgac

SEQ ID NO: 1962780 - DNA, 25 bp, Homo sapien
ggagcagcttccgtgactcccacgc

SEQ ID NO: 1962781 - DNA, 25 bp, Homo sapien
cgacgggaagcggaggagcagcttc

SEQ ID NO: 1962782 - DNA, 25 bp, Homo sapien
tcaaacggcgacaaaatcatgacag

SEQ ID NO: 1962783 - DNA, 25 bp, Homo sapien
gaaacgggagtcttgccatctcact

SEQ ID NO: 1962784 - DNA, 25 bp, Homo sapien
tgtccatagtgcaacggcgacgtca

SEQ ID NO: 1962785 - DNA, 25 bp, Homo sapien
tatagtcacatagacccgaagtgcc

SEQ ID NO: 1962786 - DNA, 25 bp, Homo sapien
agaacctgctcggtctgaactcggt

SEQ ID NO: 1962787 - DNA, 25 bp, Homo sapien
gaccgattcccgtgctccagcttca

SEQ ID NO: 1962788 - DNA, 25 bp, Homo sapien
ttagcctgagaccgattcccgtgct

SEQ ID NO: 1962789 - DNA, 25 bp, Homo sapien
aggtgctcccatgccgaggaggagg

SEQ ID NO: 1962790 - DNA, 25 bp, Homo sapien
cctgagaccgattcccgtgctccag

SEQ ID NO: 1962791 - DNA, 25 bp, Homo sapien
tcatccttctcctcggatatgacgt

SEQ ID NO: 1962792 - DNA, 25 bp, Homo sapien
tcagttgctatgacgcactcatcct

SEQ ID NO: 1962793 - DNA, 25 bp, Homo sapien
tacaccgactggtacttggtgtctt

SEQ ID NO: 1962794 - DNA, 25 bp, Homo sapien
tttgaagttgaacagcccgagtccg

SEQ ID NO: 1962795 - DNA, 25 bp, Homo sapien
cacttggtgtcacgcttgctgtgcg

SEQ ID NO: 1962796 - DNA, 25 bp, Homo sapien
gaagccattcttgtcggcgctgtgg

SEQ ID NO: 1962797 - DNA, 25 bp, Homo sapien
cacgaggttatagtccaccgctggg

SEQ ID NO: 1962798 - DNA, 25 bp, Homo sapien
ggtgttcttgatctgcgtggccccg

SEQ ID NO: 1962799 - DNA, 25 bp, Homo sapien
ctctagcttctcagtgaggtccacc

SEQ ID NO: 1962800 - DNA, 25 bp, Homo sapien
ctggccctctagcttctcagtgagg

SEQ ID NO: 1962801 - DNA, 25 bp, Homo sapien
ccctctagcttctcagtgaggtcca

SEQ ID NO: 1962802 - DNA, 25 bp, Homo sapien
ctagcttctcagtgaggtccaccac

SEQ ID NO: 1962803 - DNA, 25 bp, Homo sapien
cagtcgtccacgttgtcgtcacagt

SEQ ID NO: 1962804 - DNA, 25 bp, Homo sapien
caggtgcaggagaagtcgttcacgc

SEQ ID NO: 1962805 - DNA, 25 bp, Homo sapien
acacatagcggtggcccctctcgtg

SEQ ID NO: 1962806 - DNA, 25 bp, Homo sapien
cccattgtggcagggtgcgtgctcg

SEQ ID NO: 1962807 - DNA, 25 bp, Homo sapien
catcaccgaggtccacacacttggc

SEQ ID NO: 1962808 - DNA, 25 bp, Homo sapien
atcaccgaggtccacacacttggca

SEQ ID NO: 1962809 - DNA, 25 bp, Homo sapien
ttaatgccacctcagtattgaccgc

SEQ ID NO: 1962810 - DNA, 25 bp, Homo sapien
gctcgcccgagtctctgagcaatca

SEQ ID NO: 1962811 - DNA, 25 bp, Homo sapien
ccgagtctctgagcaatcaccagct

SEQ ID NO: 1962812 - DNA, 25 bp, Homo sapien
agtattgaccgctcgcccgagtctc

SEQ ID NO: 1962813 - DNA, 25 bp, Homo sapien
tcttctcacagttgaagccggagta

SEQ ID NO: 1962814 - DNA, 25 bp, Homo sapien
ttcacagattttgccgtagaagccg

SEQ ID NO: 1962815 - DNA, 25 bp, Homo sapien
ggccgtccgcacaggtcatggcact

SEQ ID NO: 1962816 - DNA, 25 bp, Homo sapien
caggtcatggcactcaattcacaga

SEQ ID NO: 1962817 - DNA, 25 bp, Homo sapien
ctacacgatggagaggtcagaaaag

SEQ ID NO: 1962818 - DNA, 25 bp, Homo sapien
cttatggtgtgtgcagtagttcagg

SEQ ID NO: 1962819 - DNA, 25 bp, Homo sapien
agctcccctggcccgtgttggtgca

SEQ ID NO: 1962820 - DNA, 25 bp, Homo sapien
acctgtgtacccaggccggcaagag

SEQ ID NO: 1962821 - DNA, 25 bp, Homo sapien
gctccctccgttcttacaagggctg

SEQ ID NO: 1962822 - DNA, 25 bp, Homo sapien
gggacaggaaaagtaggagatagga

SEQ ID NO: 1962823 - DNA, 25 bp, Homo sapien
gtggggacaggaaaagtaggagata

SEQ ID NO: 1962824 - DNA, 25 bp, Homo sapien
gacaggaaaagtaggagataggaag

SEQ ID NO: 1962825 - DNA, 25 bp, Homo sapien
ctgtgaagggtggggacaggaaaag

SEQ ID NO: 1962826 - DNA, 25 bp, Homo sapien
gcctggatagcggatacactcgtca

SEQ ID NO: 1962827 - DNA, 25 bp, Homo sapien
agccttcctggcagttgcactgcca

SEQ ID NO: 1962828 - DNA, 25 bp, Homo sapien
catggagacagcctggatagcggat

SEQ ID NO: 1962829 - DNA, 25 bp, Homo sapien
ggatagcggatacactcgtcacagt

SEQ ID NO: 1962830 - DNA, 25 bp, Homo sapien
gtttgtcacaaaatccatgctgctc

SEQ ID NO: 1962831 - DNA, 25 bp, Homo sapien
ttgcattcccctggtttgtcacaaa

SEQ ID NO: 1962832 - DNA, 25 bp, Homo sapien
tggtttgtcacaaaatccatgctgc

SEQ ID NO: 1962833 - DNA, 25 bp, Homo sapien
tgctgctcatcacatccaggcaggc

SEQ ID NO: 1962834 - DNA, 25 bp, Homo sapien
ccagcactgggaactcgggttgaaa

SEQ ID NO: 1962835 - DNA, 25 bp, Homo sapien
taaggagcaaggacatcaaggcact

SEQ ID NO: 1962836 - DNA, 25 bp, Homo sapien
tagagaaatccggtaccaatgggct

SEQ ID NO: 1962837 - DNA, 25 bp, Homo sapien
tcacagggagtatccggaaaggcgt

SEQ ID NO: 1962838 - DNA, 25 bp, Homo sapien
tttccagccagggttgcacactttc

SEQ ID NO: 1962839 - DNA, 25 bp, Homo sapien
cacaggtgaagtggccgaaggcatc

SEQ ID NO: 1962840 - DNA, 25 bp, Homo sapien
gctctgtgcagtagggccctttcca

SEQ ID NO: 1962841 - DNA, 25 bp, Homo sapien
cacacgaagcggtaggagtacttga

SEQ ID NO: 1962842 - DNA, 25 bp, Homo sapien
tcctggttggttctgaacgagaacc

SEQ ID NO: 1962843 - DNA, 25 bp, Homo sapien
cggggagaagatgctcctggttggt

SEQ ID NO: 1962844 - DNA, 25 bp, Homo sapien
gggagaagatgctcctggttggttc

SEQ ID NO: 1962845 - DNA, 25 bp, Homo sapien
ggggagaagatgctcctggttggtt

SEQ ID NO: 1962846 - DNA, 25 bp, Homo sapien
caaagtccaatgctattaactgggg

SEQ ID NO: 1962847 - DNA, 25 bp, Homo sapien
ggggtgggccgagacattcagcacg

SEQ ID NO: 1962848 - DNA, 25 bp, Homo sapien
tccaccctgaactttctggggcacg

SEQ ID NO: 1962849 - DNA, 25 bp, Homo sapien
aatgaaagctgtccgggtttggctg

SEQ ID NO: 1962850 - DNA, 25 bp, Homo sapien
gcttcaataatcagagagaaggtgc

SEQ ID NO: 1962851 - DNA, 25 bp, Homo sapien
agagcttcaataatcagagagaagg

SEQ ID NO: 1962852 - DNA, 25 bp, Homo sapien
gagcttcaataatcagagagaaggt

SEQ ID NO: 1962853 - DNA, 25 bp, Homo sapien
gagagcttcaataatcagagagaag

SEQ ID NO: 1962854 - DNA, 25 bp, Homo sapien
ggagaagacgttagacaacccagaa

SEQ ID NO: 1962855 - DNA, 25 bp, Homo sapien
cgcgtctaggagtcgggaaaccaga

SEQ ID NO: 1962856 - DNA, 25 bp, Homo sapien
ggcaaaaagcagtcattcctaacag

SEQ ID NO: 1962857 - DNA, 25 bp, Homo sapien
cacagaggccggatacggaaatctc

SEQ ID NO: 1962858 - DNA, 25 bp, Homo sapien
ccgccaccgagcgcccaaggcggga

SEQ ID NO: 1962859 - DNA, 25 bp, Homo sapien
gcccggcgcgcgcaggtgcggcact

SEQ ID NO: 1962860 - DNA, 25 bp, Homo sapien
ccgagcgcccaaggcgggatcccag

SEQ ID NO: 1962861 - DNA, 25 bp, Homo sapien
ccggcgcgcgcaggtgcggcactca

SEQ ID NO: 1962862 - DNA, 25 bp, Homo sapien
gccccttcttgttgacgaactcctg

SEQ ID NO: 1962863 - DNA, 25 bp, Homo sapien
gacacgctggcctggtagtgcttga

SEQ ID NO: 1962864 - DNA, 25 bp, Homo sapien
ggcagactgaaggagtcgacgccca

SEQ ID NO: 1962865 - DNA, 25 bp, Homo sapien
tagtgcttgaggcacacgcggaaga

SEQ ID NO: 1962866 - DNA, 25 bp, Homo sapien
cagcaaggccgagagcaccgccagg

SEQ ID NO: 1962867 - DNA, 25 bp, Homo sapien
agggccagcgcgcaccgactgccca

SEQ ID NO: 1962868 - DNA, 25 bp, Homo sapien
gggccagcgcgcaccgactgcccat

SEQ ID NO: 1962869 - DNA, 25 bp, Homo sapien
ctgacacagcaaggccgagagcacc

SEQ ID NO: 1962870 - DNA, 25 bp, Homo sapien
tgcttcgctccacgcgcgagcctgg

SEQ ID NO: 1962871 - DNA, 25 bp, Homo sapien
ttcgctccacgcgcgagcctggggg

SEQ ID NO: 1962872 - DNA, 25 bp, Homo sapien
tcgctccacgcgcgagcctgggggg

SEQ ID NO: 1962873 - DNA, 25 bp, Homo sapien
ctccacgcgcgagcctggggggccc

SEQ ID NO: 1962874 - DNA, 25 bp, Homo sapien
cttagaacagcggcggacgcgcggg

SEQ ID NO: 1962875 - DNA, 25 bp, Homo sapien
ggatcgatgggccacggggagcgtg

SEQ ID NO: 1962876 - DNA, 25 bp, Homo sapien
gggagcgtgggcagaaaagcgccct

SEQ ID NO: 1962877 - DNA, 25 bp, Homo sapien
aaaagcgcccttgcctcgccccaga

SEQ ID NO: 1962878 - DNA, 25 bp, Homo sapien
ttatatccgccctgcgaggtcccgc

SEQ ID NO: 1962879 - DNA, 25 bp, Homo sapien
tatatccgccctgcgaggtcccgcg

SEQ ID NO: 1962880 - DNA, 25 bp, Homo sapien
agaaagccgcggtctggaaatccca

SEQ ID NO: 1962881 - DNA, 25 bp, Homo sapien
gtccagagattgagcttaattccca

SEQ ID NO: 1962882 - DNA, 25 bp, Homo sapien
cttgagcttcttcgcaggagaggga

SEQ ID NO: 1962883 - DNA, 25 bp, Homo sapien
gagcttcctcccgagccgattagaa

SEQ ID NO: 1962884 - DNA, 25 bp, Homo sapien
gtctttccgatgaatccagccaatg

SEQ ID NO: 1962885 - DNA, 25 bp, Homo sapien
gtgtcacagcaaagatccgcgtctt

SEQ ID NO: 1962886 - DNA, 25 bp, Homo sapien
gtcgttccgggagcactccgggctc

SEQ ID NO: 1962887 - DNA, 25 bp, Homo sapien
aatgccatccagtacacacgcgcag

SEQ ID NO: 1962888 - DNA, 25 bp, Homo sapien
ccccaatctggcgagagctgtcaca

SEQ ID NO: 1962889 - DNA, 25 bp, Homo sapien
agccccccaatctggcgagagctgt

SEQ ID NO: 1962890 - DNA, 25 bp, Homo sapien
atgagatgcaaatcagcagcccccc

SEQ ID NO: 1962891 - DNA, 25 bp, Homo sapien
caatctggcgagagctgtcacaaag

SEQ ID NO: 1962892 - DNA, 25 bp, Homo sapien
ctgccagagcgaagcggcagtttcg

SEQ ID NO: 1962893 - DNA, 25 bp, Homo sapien
gacgaagttcgaggcccgagctctt

SEQ ID NO: 1962894 - DNA, 25 bp, Homo sapien
tcctgcaaaatgttcaccgcaagaa

SEQ ID NO: 1962895 - DNA, 25 bp, Homo sapien
gcaggcgcttcctaaggaggagtct

SEQ ID NO: 1962896 - DNA, 25 bp, Homo sapien
tcctactctggcacctagctttgca

SEQ ID NO: 1962897 - DNA, 25 bp, Homo sapien
aattgccctcctaggcacgatggag

SEQ ID NO: 1962898 - DNA, 25 bp, Homo sapien
ttcattagggttccaggtgagtgtt

SEQ ID NO: 1962899 - DNA, 25 bp, Homo sapien
gaacacacgtatgacacaatgaatt

SEQ ID NO: 1962900 - DNA, 25 bp, Homo sapien
tagtttaactcctgcgcaccagtag

SEQ ID NO: 1962901 - DNA, 25 bp, Homo sapien
ggagactgtttaacttcagcgtttc

SEQ ID NO: 1962902 - DNA, 25 bp, Homo sapien
taaaaagctgtgctaacggggagac

SEQ ID NO: 1962903 - DNA, 25 bp, Homo sapien
taacttcagcgtttctataggagcc

SEQ ID NO: 1962904 - DNA, 25 bp, Homo sapien
tcgttcgtcacagcctggaaaaggg

SEQ ID NO: 1962905 - DNA, 25 bp, Homo sapien
ccgcgtgcacacaaggcgcgcggcc

SEQ ID NO: 1962906 - DNA, 25 bp, Homo sapien
aagcccacgaagccatcgttcgtca

SEQ ID NO: 1962907 - DNA, 25 bp, Homo sapien
gaggctccaccagcgctggcgcagg

SEQ ID NO: 1962908 - DNA, 25 bp, Homo sapien
ctgcgcgaaggtgggcgacggtggg

SEQ ID NO: 1962909 - DNA, 25 bp, Homo sapien
gggcgaaggaatcagccccgcagcg

SEQ ID NO: 1962910 - DNA, 25 bp, Homo sapien
cacaagaacagcagccgggggcgaa

SEQ ID NO: 1962911 - DNA, 25 bp, Homo sapien
agcggctcctaagcctccccgctgg

SEQ ID NO: 1962912 - DNA, 25 bp, Homo sapien
cgaaccgcgccacgggcccgcgaga

SEQ ID NO: 1962913 - DNA, 25 bp, Homo sapien
ccgctgcgagcagcggaggcatgtg

SEQ ID NO: 1962914 - DNA, 25 bp, Homo sapien
cacctctcgcgtgcgtggagcccgg

SEQ ID NO: 1962915 - DNA, 25 bp, Homo sapien
ccgcgagacgcccacctctcgcgtg

SEQ ID NO: 1962916 - DNA, 25 bp, Homo sapien
tttgtcccgggatcagattaccgca

SEQ ID NO: 1962917 - DNA, 25 bp, Homo sapien
gggatcagattaccgcagcagctgc

SEQ ID NO: 1962918 - DNA, 25 bp, Homo sapien
ggagctgcccctccgaactttgtgc

SEQ ID NO: 1962919 - DNA, 25 bp, Homo sapien
cgggcacgcctttgtcccgggatca

SEQ ID NO: 1962920 - DNA, 25 bp, Homo sapien
ccaggcagcattacgaggggcacca

SEQ ID NO: 1962921 - DNA, 25 bp, Homo sapien
gcaaggcccaaagcgcgagggcaca

SEQ ID NO: 1962922 - DNA, 25 bp, Homo sapien
ggcaccagtgcaaggcccaaagcgc

SEQ ID NO: 1962923 - DNA, 25 bp, Homo sapien
gcggcgcggccgtgcggcgggtcat

SEQ ID NO: 1962924 - DNA, 25 bp, Homo sapien
ggaaatcgcagcctgtgactttgta

SEQ ID NO: 1962925 - DNA, 25 bp, Homo sapien
gtcgcggcacctgtcgctcctggtt

SEQ ID NO: 1962926 - DNA, 25 bp, Homo sapien
cagaggctcgcaaacaataaactca

SEQ ID NO: 1962927 - DNA, 25 bp, Homo sapien
taaactcagaaacgtggcgcgcacc

SEQ ID NO: 1962928 - DNA, 25 bp, Homo sapien
tataaataccggtcaataggccaca

SEQ ID NO: 1962929 - DNA, 25 bp, Homo sapien
tcacaatgcacatggacatcaggct

SEQ ID NO: 1962930 - DNA, 25 bp, Homo sapien
ttggctgctaggagaccggctttgc

SEQ ID NO: 1962931 - DNA, 25 bp, Homo sapien
cagcccaagtatccaagtatcagag

SEQ ID NO: 1962932 - DNA, 25 bp, Homo sapien
ctgctgggccctttcgatacgagaa

SEQ ID NO: 1962933 - DNA, 25 bp, Homo sapien
tcctaggtttgttgtgctgggcacc

SEQ ID NO: 1962934 - DNA, 25 bp, Homo sapien
ttctgaatgctgtggcgatgtgcct

SEQ ID NO: 1962935 - DNA, 25 bp, Homo sapien
tgtaaacacacgtaaggtcacctcc

SEQ ID NO: 1962936 - DNA, 25 bp, Homo sapien
gctctctggcctcgttatggcacta

SEQ ID NO: 1962937 - DNA, 25 bp, Homo sapien
gcatgaacctcctgcgcatgagagt

SEQ ID NO: 1962938 - DNA, 25 bp, Homo sapien
gctgaggtctcagatcaggcaccag

SEQ ID NO: 1962939 - DNA, 25 bp, Homo sapien
ccaaagaccatcacgctgggattaa

SEQ ID NO: 1962940 - DNA, 25 bp, Homo sapien
caagaagactccatgtgtacacacg

SEQ ID NO: 1962941 - DNA, 25 bp, Homo sapien
tacggacagaccctgaatctaggca

SEQ ID NO: 1962942 - DNA, 25 bp, Homo sapien
caggaagttcccatatgtacagatc

SEQ ID NO: 1962943 - DNA, 25 bp, Homo sapien
caagaaattatgtgtacaggccatg

SEQ ID NO: 1962944 - DNA, 25 bp, Homo sapien
gacacgaccgtatactgctgtaggc

SEQ ID NO: 1962945 - DNA, 25 bp, Homo sapien
gaaggccaggacatgaccatacact

SEQ ID NO: 1962946 - DNA, 25 bp, Homo sapien
gaaggccaggacatgaccgtgttgc

SEQ ID NO: 1962947 - DNA, 25 bp, Homo sapien
gctgctccggtgagtccatgagtga

SEQ ID NO: 1962948 - DNA, 25 bp, Homo sapien
tgtgattagcgaatctctgttgtct

SEQ ID NO: 1962949 - DNA, 25 bp, Homo sapien
tgtgctacattaaggggacatctct

SEQ ID NO: 1962950 - DNA, 25 bp, Homo sapien
attaaggggacatctctccacttca

SEQ ID NO: 1962951 - DNA, 25 bp, Homo sapien
ctttatcctgtgattagcgaatctc

SEQ ID NO: 1962952 - DNA, 25 bp, Homo sapien
cgatgaaatcgttcagtccatttgc

SEQ ID NO: 1962953 - DNA, 25 bp, Homo sapien
ctgaagactgagaaccgatgaaatc

SEQ ID NO: 1962954 - DNA, 25 bp, Homo sapien
gactgagaaccgatgaaatcgttca

SEQ ID NO: 1962955 - DNA, 25 bp, Homo sapien
aatcgttcagtccatttgctggcac

SEQ ID NO: 1962956 - DNA, 25 bp, Homo sapien
cggatgaaatcgttcagtccattca

SEQ ID NO: 1962957 - DNA, 25 bp, Homo sapien
ttgcctgcggtgctagcctctctct

SEQ ID NO: 1962958 - DNA, 25 bp, Homo sapien
gatgaaatcgttcagtccattcacc

SEQ ID NO: 1962959 - DNA, 25 bp, Homo sapien
tgcggtgctagcctctcactggttc

SEQ ID NO: 1962960 - DNA, 25 bp, Homo sapien
ttgcctgcggtgctagcctctctct

SEQ ID NO: 1962961 - DNA, 25 bp, Homo sapien
cggatgaaatcgttcagtccattca

SEQ ID NO: 1962962 - DNA, 25 bp, Homo sapien
gatgaaatcgttcagtccattcacc

SEQ ID NO: 1962963 - DNA, 25 bp, Homo sapien
tgcggtgctagcctctcactggttc

SEQ ID NO: 1962964 - DNA, 25 bp, Homo sapien
tctgcaactcagtgtgagtcgtcat

SEQ ID NO: 1962965 - DNA, 25 bp, Homo sapien
tggtgtcccggattgtctttttcca

SEQ ID NO: 1962966 - DNA, 25 bp, Homo sapien
atggctggtgtcccggattgtcttt

SEQ ID NO: 1962967 - DNA, 25 bp, Homo sapien
catggctggtgtcccggattgtctt

SEQ ID NO: 1962968 - DNA, 25 bp, Homo sapien
gtggacacgctttgcctggaggatt

SEQ ID NO: 1962969 - DNA, 25 bp, Homo sapien
ggaaaatccacctcgcagcttgtaa

SEQ ID NO: 1962970 - DNA, 25 bp, Homo sapien
cgtttattgcgcaggccttgtgcct

SEQ ID NO: 1962971 - DNA, 25 bp, Homo sapien
tctgtccttttcaggtggacacgct

SEQ ID NO: 1962972 - DNA, 25 bp, Homo sapien
tcaggcttctgtctgcagtcagtgg

SEQ ID NO: 1962973 - DNA, 25 bp, Homo sapien
gtttctgtggacattcaaggttatg

SEQ ID NO: 1962974 - DNA, 25 bp, Homo sapien
agtcagtgggcataccatgtactgt

SEQ ID NO: 1962975 - DNA, 25 bp, Homo sapien
gacattcaaggttatggatcactct

SEQ ID NO: 1962976 - DNA, 25 bp, Homo sapien
ccaccgtggcaatgatgattttata

SEQ ID NO: 1962977 - DNA, 25 bp, Homo sapien
tcagtttatctttgccgtgtcaggg

SEQ ID NO: 1962978 - DNA, 25 bp, Homo sapien
gcaggagccaccaccgtggcaatga

SEQ ID NO: 1962979 - DNA, 25 bp, Homo sapien
ccatcagtttatctttgccgtgtca

SEQ ID NO: 1962980 - DNA, 25 bp, Homo sapien
ggtgtctagacaaagccccatcttt

SEQ ID NO: 1962981 - DNA, 25 bp, Homo sapien
gagtctgtctggttcagcaaagtgt

SEQ ID NO: 1962982 - DNA, 25 bp, Homo sapien
tgccaagtcactatcccagagtcct

SEQ ID NO: 1962983 - DNA, 25 bp, Homo sapien
tcctagactaatgcccctttgagga

SEQ ID NO: 1962984 - DNA, 25 bp, Homo sapien
ctgctacagatcttgatacgtgttt

SEQ ID NO: 1962985 - DNA, 25 bp, Homo sapien
catagtcctcataattgtagtaggt

SEQ ID NO: 1962986 - DNA, 25 bp, Homo sapien
cataattgtagtaggtgtctcctgc

SEQ ID NO: 1962987 - DNA, 25 bp, Homo sapien
acagatcttgatacgtgtttgagaa

SEQ ID NO: 1962988 - DNA, 25 bp, Homo sapien
ctcctgctcccacatgtgctaagtg

SEQ ID NO: 1962989 - DNA, 25 bp, Homo sapien
gcccttgctgcccagacagtccatg

SEQ ID NO: 1962990 - DNA, 25 bp, Homo sapien
ccttgctgcccagacagtccatgca

SEQ ID NO: 1962991 - DNA, 25 bp, Homo sapien
tgctgcccagacagtccatgcagac

SEQ ID NO: 1962992 - DNA, 25 bp, Homo sapien
ttgctgcccagacagtccatgcaga

SEQ ID NO: 1962993 - DNA, 25 bp, Homo sapien
tcttttctgagacgcagctacgtcc

SEQ ID NO: 1962994 - DNA, 25 bp, Homo sapien
agtgatggtctgctctaagatgccc

SEQ ID NO: 1962995 - DNA, 25 bp, Homo sapien
gaagccagaactcggtaatattacc

SEQ ID NO: 1962996 - DNA, 25 bp, Homo sapien
tacgtccccgagctctttgtggaag

SEQ ID NO: 1962997 - DNA, 25 bp, Homo sapien
cacaccgtgggtttgatttgcttct

SEQ ID NO: 1962998 - DNA, 25 bp, Homo sapien
catgggtgcaggtatctcatcaaca

SEQ ID NO: 1962999 - DNA, 25 bp, Homo sapien
tagacgatagtcatcctaggacatg

SEQ ID NO: 1963000 - DNA, 25 bp, Homo sapien
tatagagtgctgcaggaaacatggg

SEQ ID NO: 1963001 - DNA, 25 bp, Homo sapien
gagccatgtccaaccatgagaggga

SEQ ID NO: 1963002 - DNA, 25 bp, Homo sapien
tgatggaataggagaactcagccca

SEQ ID NO: 1963003 - DNA, 25 bp, Homo sapien
gagaactacttggtgtcagccttgc

SEQ ID NO: 1963004 - DNA, 25 bp, Homo sapien
ggtgtcgtgcgtagcaccccatgaa

SEQ ID NO: 1963005 - DNA, 25 bp, Homo sapien
gcctgaactctctggtccacttcaa

SEQ ID NO: 1963006 - DNA, 25 bp, Homo sapien
gccaaaagttgtcaagtttctggag

SEQ ID NO: 1963007 - DNA, 25 bp, Homo sapien
aactctctggtccacttcaaaggcc

SEQ ID NO: 1963008 - DNA, 25 bp, Homo sapien
tttctggagcctgagtgtgtggaca

SEQ ID NO: 1963009 - DNA, 25 bp, Homo sapien
gagaacaaaggctgctcaagtgaga

SEQ ID NO: 1963010 - DNA, 25 bp, Homo sapien
cccgagaacaaaggctgctcaagtg

SEQ ID NO: 1963011 - DNA, 25 bp, Homo sapien
tgccccgagaacaaaggctgctcaa

SEQ ID NO: 1963012 - DNA, 25 bp, Homo sapien
ctgccccgagaacaaaggctgctca

SEQ ID NO: 1963013 - DNA, 25 bp, Homo sapien
tcaggcctggtttatgatgccacaa

SEQ ID NO: 1963014 - DNA, 25 bp, Homo sapien
ttaagccccagattgtactgagctg

SEQ ID NO: 1963015 - DNA, 25 bp, Homo sapien
cacaggaaatccacagagagcatgc

SEQ ID NO: 1963016 - DNA, 25 bp, Homo sapien
tactgagctgtacctgtgggaaaag

SEQ ID NO: 1963017 - DNA, 25 bp, Homo sapien
tgtgtgcctgcacttgacgaattac

SEQ ID NO: 1963018 - DNA, 25 bp, Homo sapien
ataagcccctgaacgtgcttgcagg

SEQ ID NO: 1963019 - DNA, 25 bp, Homo sapien
gcccctgaacgtgcttgcaggccag

SEQ ID NO: 1963020 - DNA, 25 bp, Homo sapien
gtttgtgtgcctgcacttgacgaat

SEQ ID NO: 1963021 - DNA, 25 bp, Homo sapien
cccttagactaagagagtgggtgtc

SEQ ID NO: 1963022 - DNA, 25 bp, Homo sapien
cgtgcaagtcttgtaggacccacat

SEQ ID NO: 1963023 - DNA, 25 bp, Homo sapien
gaggatttccctatgtcagtaaaca

SEQ ID NO: 1963024 - DNA, 25 bp, Homo sapien
tgtaagtaacactgcagtcaagtct

SEQ ID NO: 1963025 - DNA, 25 bp, Homo sapien
gcaagtggtgtcttcgccacagttt

SEQ ID NO: 1963026 - DNA, 25 bp, Homo sapien
gtgtcttcgccacagtttctgtccc

SEQ ID NO: 1963027 - DNA, 25 bp, Homo sapien
tggtgtcttcgccacagtttctgtc

SEQ ID NO: 1963028 - DNA, 25 bp, Homo sapien
aagtggtgtcttcgccacagtttct

SEQ ID NO: 1963029 - DNA, 25 bp, Homo sapien
tgttgttgccacaacccccagtagc

SEQ ID NO: 1963030 - DNA, 25 bp, Homo sapien
caacccatgagcttcacccaggaag

SEQ ID NO: 1963031 - DNA, 25 bp, Homo sapien
ccaggaagagggcttcacaccccat

SEQ ID NO: 1963032 - DNA, 25 bp, Homo sapien
gatggttgactggaacctccttctg

SEQ ID NO: 1963033 - DNA, 25 bp, Homo sapien
aaggctccttacacgcatcctcatt

SEQ ID NO: 1963034 - DNA, 25 bp, Homo sapien
gctttccaccgtgccaaggctcctt

SEQ ID NO: 1963035 - DNA, 25 bp, Homo sapien
cttacacgcatcctcatttttggct

SEQ ID NO: 1963036 - DNA, 25 bp, Homo sapien
tgccaaggctccttacacgcatcct

SEQ ID NO: 1963037 - DNA, 25 bp, Homo sapien
tgctcaaagggtgtggcccttcccg

SEQ ID NO: 1963038 - DNA, 25 bp, Homo sapien
tctgccactcagagtgcgtgccagg

SEQ ID NO: 1963039 - DNA, 25 bp, Homo sapien
ttcttagagccgtggcattggccac

SEQ ID NO: 1963040 - DNA, 25 bp, Homo sapien
gccacactctgggtgtgagactgca

SEQ ID NO: 1963041 - DNA, 25 bp, Homo sapien
gaagtccatgtcgatcggtgccgtg

SEQ ID NO: 1963042 - DNA, 25 bp, Homo sapien
tgaggattcacggatgcctggacca

SEQ ID NO: 1963043 - DNA, 25 bp, Homo sapien
gctctggagtcatgatctactggca

SEQ ID NO: 1963044 - DNA, 25 bp, Homo sapien
gactttgtccatgcaaccgttggtc

SEQ ID NO: 1963045 - DNA, 25 bp, Homo sapien
tgaagcggatctttgcggtgaagac

SEQ ID NO: 1963046 - DNA, 25 bp, Homo sapien
ggcaggtcccgagaaccagactccg

SEQ ID NO: 1963047 - DNA, 25 bp, Homo sapien
agcttggaacccaccgcagcgggca

SEQ ID NO: 1963048 - DNA, 25 bp, Homo sapien
ccggtcgtcattcctgcagcttgga

SEQ ID NO: 1963049 - DNA, 25 bp, Homo sapien
gtgaaccaggcagactcgtgtagag

SEQ ID NO: 1963050 - DNA, 25 bp, Homo sapien
tgagcagtgaatttgtgaggcctgg

SEQ ID NO: 1963051 - DNA, 25 bp, Homo sapien
gtgaatttgtgaggcctggtgaacc

SEQ ID NO: 1963052 - DNA, 25 bp, Homo sapien
caggcagactcgtgtagagcacaga

SEQ ID NO: 1963053 - DNA, 25 bp, Homo sapien
gagctgatgaagtgtcccggttacc

SEQ ID NO: 1963054 - DNA, 25 bp, Homo sapien
tccacaaacatttgctgctcaggtt

SEQ ID NO: 1963055 - DNA, 25 bp, Homo sapien
aagcccttgattggcggcggctcca

SEQ ID NO: 1963056 - DNA, 25 bp, Homo sapien
gttaccctggcaacgaagcccttga

SEQ ID NO: 1963057 - DNA, 25 bp, Homo sapien
gatgttgactaggtagtctcctgga

SEQ ID NO: 1963058 - DNA, 25 bp, Homo sapien
ctcctggaaaaactatgaagttggt

SEQ ID NO: 1963059 - DNA, 25 bp, Homo sapien
gaagttggttctatacttcaccaaa

SEQ ID NO: 1963060 - DNA, 25 bp, Homo sapien
gggaaacaggatattcatataatga

SEQ ID NO: 1963061 - DNA, 25 bp, Homo sapien
tgtgaaacctggtcgagcaattcta

SEQ ID NO: 1963062 - DNA, 25 bp, Homo sapien
gaaaatgctcaacctgctcacaaag

SEQ ID NO: 1963063 - DNA, 25 bp, Homo sapien
tataaggcactcttaaccgcatgaa

SEQ ID NO: 1963064 - DNA, 25 bp, Homo sapien
taaagcccatctcttcgaagaacag

SEQ ID NO: 1963065 - DNA, 25 bp, Homo sapien
gacaaaactgggcaggcaacctgtt

SEQ ID NO: 1963066 - DNA, 25 bp, Homo sapien
gacctgctagaagtatgggacacca

SEQ ID NO: 1963067 - DNA, 25 bp, Homo sapien
ccaagatagcgcagtccctgggaag

SEQ ID NO: 1963068 - DNA, 25 bp, Homo sapien
cagttgtctctttgctagaaggccc

SEQ ID NO: 1963069 - DNA, 25 bp, Homo sapien
tccacctcagaaacgagccactctt

SEQ ID NO: 1963070 - DNA, 25 bp, Homo sapien
tttttggtcctgaatcgggccttgc

SEQ ID NO: 1963071 - DNA, 25 bp, Homo sapien
tcagaaacgagccactcttccaagc

SEQ ID NO: 1963072 - DNA, 25 bp, Homo sapien
tgtacgtaccttggatccgagaggc

SEQ ID NO: 1963073 - DNA, 25 bp, Homo sapien
agagagaagagcacgctgatgagct

SEQ ID NO: 1963074 - DNA, 25 bp, Homo sapien
ctagagagaagagcacgctgatgag

SEQ ID NO: 1963075 - DNA, 25 bp, Homo sapien
agagaagagcacgctgatgagctgc

SEQ ID NO: 1963076 - DNA, 25 bp, Homo sapien
agaagagcacgctgatgagctgcag

SEQ ID NO: 1963077 - DNA, 25 bp, Homo sapien
tgctgtaccgttcattcagctccag

SEQ ID NO: 1963078 - DNA, 25 bp, Homo sapien
ccaggcagcgcctgtgctgtaccgt

SEQ ID NO: 1963079 - DNA, 25 bp, Homo sapien
agcccctctggacggcattcagggt

SEQ ID NO: 1963080 - DNA, 25 bp, Homo sapien
tcagctccagaggttcctgctgctt

SEQ ID NO: 1963081 - DNA, 25 bp, Homo sapien
ctgcactgcgctctgcgggaccctt

SEQ ID NO: 1963082 - DNA, 25 bp, Homo sapien
ctgcgctctgcgggacccttggtgc

SEQ ID NO: 1963083 - DNA, 25 bp, Homo sapien
gcactgcgctctgcgggacccttgg

SEQ ID NO: 1963084 - DNA, 25 bp, Homo sapien
gcgctctgcgggacccttggtgctt

SEQ ID NO: 1963085 - DNA, 25 bp, Homo sapien
ccagtgggtcgtgtaggctacattc

SEQ ID NO: 1963086 - DNA, 25 bp, Homo sapien
gctgccagtcaacattcttcccaca

SEQ ID NO: 1963087 - DNA, 25 bp, Homo sapien
ccacaacacaatccacatcagtagg

SEQ ID NO: 1963088 - DNA, 25 bp, Homo sapien
tagaaccagtgggtcgtgtaggcta

SEQ ID NO: 1963089 - DNA, 25 bp, Homo sapien
aaccgtccgacaccagaagctccag

SEQ ID NO: 1963090 - DNA, 25 bp, Homo sapien
cctcagtgcggctctgacccaggct

SEQ ID NO: 1963091 - DNA, 25 bp, Homo sapien
aaagccctcagtgcggctctgaccc

SEQ ID NO: 1963092 - DNA, 25 bp, Homo sapien
ccaggctgtcacaacttgccaacat

SEQ ID NO: 1963093 - DNA, 25 bp, Homo sapien
accttgaaggacaccactgcagcaa

SEQ ID NO: 1963094 - DNA, 25 bp, Homo sapien
gaaggacaccactgcagcaagcagc

SEQ ID NO: 1963095 - DNA, 25 bp, Homo sapien
ggtttgaccttgaaggacaccactg

SEQ ID NO: 1963096 - DNA, 25 bp, Homo sapien
tttgaccttgaaggacaccactgca

SEQ ID NO: 1963097 - DNA, 25 bp, Homo sapien
ttgaagcttccgttccatttgcctg

SEQ ID NO: 1963098 - DNA, 25 bp, Homo sapien
catttgcctgttcgctctctgatcg

SEQ ID NO: 1963099 - DNA, 25 bp, Homo sapien
tacgcactgggaaccgtgccagttg

SEQ ID NO: 1963100 - DNA, 25 bp, Homo sapien
gagtgtggcagctcttacgcactgg

SEQ ID NO: 1963101 - DNA, 25 bp, Homo sapien
gcgtgggcccggtatccctcaggcc

SEQ ID NO: 1963102 - DNA, 25 bp, Homo sapien
tgggcccggtatccctcaggcccat

SEQ ID NO: 1963103 - DNA, 25 bp, Homo sapien
ggcgtgggcccggtatccctcaggc

SEQ ID NO: 1963104 - DNA, 25 bp, Homo sapien
tgcaagggactgtgatgactgtggt

SEQ ID NO: 1963105 - DNA, 25 bp, Homo sapien
tccttaactcaaaggccattagagc

SEQ ID NO: 1963106 - DNA, 25 bp, Homo sapien
tctccttaatgcaaggaggcaatgt

SEQ ID NO: 1963107 - DNA, 25 bp, Homo sapien
gagcattctcgttttctccttaatg

SEQ ID NO: 1963108 - DNA, 25 bp, Homo sapien
aggaatcacatttgtcatccgccaa

SEQ ID NO: 1963109 - DNA, 25 bp, Homo sapien
tttgctgatgaaatggctgcccgct

SEQ ID NO: 1963110 - DNA, 25 bp, Homo sapien
cacgagaggaagtgcgagtccaaac

SEQ ID NO: 1963111 - DNA, 25 bp, Homo sapien
gctactgtgcgcagaagaacctgtt

SEQ ID NO: 1963112 - DNA, 25 bp, Homo sapien
ctgtcagtcacgcagccgagaggtg

SEQ ID NO: 1963113 - DNA, 25 bp, Homo sapien
gttcaatcccattggagaatccaga

SEQ ID NO: 1963114 - DNA, 25 bp, Homo sapien
taaatgaaattcgtgacaagcaggg

SEQ ID NO: 1963115 - DNA, 25 bp, Homo sapien
gactgcctagccaagttacatagaa

SEQ ID NO: 1963116 - DNA, 25 bp, Homo sapien
gtaagtactgaaccagatcgtggct

SEQ ID NO: 1963117 - DNA, 25 bp, Homo sapien
tcgctttacgatgctgagtgtccct

SEQ ID NO: 1963118 - DNA, 25 bp, Homo sapien
gagtgtccctgtggtcttgtggtgt

SEQ ID NO: 1963119 - DNA, 25 bp, Homo sapien
ctgttcctctttcgctttacgatgc

SEQ ID NO: 1963120 - DNA, 25 bp, Homo sapien
gtgtgtgacgcagagctcaggcctc

SEQ ID NO: 1963121 - DNA, 25 bp, Homo sapien
ctcaggggtgttgggtggacacagg

SEQ ID NO: 1963122 - DNA, 25 bp, Homo sapien
ccctccataggagggtcacgtgtcc

SEQ ID NO: 1963123 - DNA, 25 bp, Homo sapien
ctccataggagggtcacgtgtccac

SEQ ID NO: 1963124 - DNA, 25 bp, Homo sapien
tcctcaggggtgttgggtggacaca

SEQ ID NO: 1963125 - DNA, 25 bp, Homo sapien
ctgtttctccatcaggacgaacaga

SEQ ID NO: 1963126 - DNA, 25 bp, Homo sapien
ccttcacagcgtcgggaggaacagg

SEQ ID NO: 1963127 - DNA, 25 bp, Homo sapien
aggcccttcacagcgtcgggaggaa

SEQ ID NO: 1963128 - DNA, 25 bp, Homo sapien
gaggcccttcacagcgtcgggatga

SEQ ID NO: 1963129 - DNA, 25 bp, Homo sapien
tgaggcccttcacagcgtcgggatg

SEQ ID NO: 1963130 - DNA, 25 bp, Homo sapien
gactggagctgtacagacttcccca

SEQ ID NO: 1963131 - DNA, 25 bp, Homo sapien
gggatgactggagctgtacagactt

SEQ ID NO: 1963132 - DNA, 25 bp, Homo sapien
ccttcacagtattgggatgactgga

SEQ ID NO: 1963133 - DNA, 25 bp, Homo sapien
ggtgaggcccttcacagtattggga

SEQ ID NO: 1963134 - DNA, 25 bp, Homo sapien
ctctaagcaatcgccttcactgact

SEQ ID NO: 1963135 - DNA, 25 bp, Homo sapien
ggctctaagcaatcgccttcactga

SEQ ID NO: 1963136 - DNA, 25 bp, Homo sapien
ctggctctaagcaatcgccttcact

SEQ ID NO: 1963137 - DNA, 25 bp, Homo sapien
tggctctaagcaatcgccttcactg

SEQ ID NO: 1963138 - DNA, 25 bp, Homo sapien
acagcatttggcgagggtcgcgttg

SEQ ID NO: 1963139 - DNA, 25 bp, Homo sapien
caggcaacagcatttggcgagggtc

SEQ ID NO: 1963140 - DNA, 25 bp, Homo sapien
tttggcgagggtcgcgttgccgtgt

SEQ ID NO: 1963141 - DNA, 25 bp, Homo sapien
catttggcgagggtcgcgttgccgt

SEQ ID NO: 1963142 - DNA, 25 bp, Homo sapien
gatgacggcacagaatttcagttga

SEQ ID NO: 1963143 - DNA, 25 bp, Homo sapien
gaatacaaccattgtctgagcctgg

SEQ ID NO: 1963144 - DNA, 25 bp, Homo sapien
tctgctttcaagttgaatacaacca

SEQ ID NO: 1963145 - DNA, 25 bp, Homo sapien
tccaggaatttactgatgagggcag

SEQ ID NO: 1963146 - DNA, 25 bp, Homo sapien
ctaacatgcgtgaacagaatgaagg

SEQ ID NO: 1963147 - DNA, 25 bp, Homo sapien
ctagtctgaagaccctcttggacat

SEQ ID NO: 1963148 - DNA, 25 bp, Homo sapien
gcccacagctaacatgcgtgaacag

SEQ ID NO: 1963149 - DNA, 25 bp, Homo sapien
cacagctaacatgcgtgaacagaat

SEQ ID NO: 1963150 - DNA, 25 bp, Homo sapien
tctgccaccgccaggggatgaaaat

SEQ ID NO: 1963151 - DNA, 25 bp, Homo sapien
aggaaatgagcgacatgttctgcca

SEQ ID NO: 1963152 - DNA, 25 bp, Homo sapien
aatgagcgacatgttctgccaccgc

SEQ ID NO: 1963153 - DNA, 25 bp, Homo sapien
gcgacatgttctgccaccgccaggg

SEQ ID NO: 1963154 - DNA, 25 bp, Homo sapien
tactgcagctatctgggtaaaataa

SEQ ID NO: 1963155 - DNA, 25 bp, Homo sapien
aaatgaggggaatgtactgcagcta

SEQ ID NO: 1963156 - DNA, 25 bp, Homo sapien
ggatgaaaatgagggacacgttctg

SEQ ID NO: 1963157 - DNA, 25 bp, Homo sapien
gggatgaaaatgagggacacgttct

SEQ ID NO: 1963158 - DNA, 25 bp, Homo sapien
ccatcaggagaagggactgactggt

SEQ ID NO: 1963159 - DNA, 25 bp, Homo sapien
ccatcaggaaaagggaacgatgggc

SEQ ID NO: 1963160 - DNA, 25 bp, Homo sapien
tccacacccatcaggaaaagggaac

SEQ ID NO: 1963161 - DNA, 25 bp, Homo sapien
aacgatgggcccatcctgcagccat

SEQ ID NO: 1963162 - DNA, 25 bp, Homo sapien
aaacaagtatgctcattacttatag

SEQ ID NO: 1963163 - DNA, 25 bp, Homo sapien
tgctcattacttatagtagctgtgt

SEQ ID NO: 1963164 - DNA, 25 bp, Homo sapien
tagctgtgttttgtaaagtcactgc

SEQ ID NO: 1963165 - DNA, 25 bp, Homo sapien
ctcaactgttagtaaggggaaggca

SEQ ID NO: 1963166 - DNA, 25 bp, Homo sapien
gaatgccggttcgtcactgtgtcaa

SEQ ID NO: 1963167 - DNA, 25 bp, Homo sapien
tctgacaaaggattgcaccctgcag

SEQ ID NO: 1963168 - DNA, 25 bp, Homo sapien
tataacaaggcgtgtccaaactccc

SEQ ID NO: 1963169 - DNA, 25 bp, Homo sapien
tctgattgaccctcgcgtaaggaag

SEQ ID NO: 1963170 - DNA, 25 bp, Homo sapien
tacattttccatatcaggccaggca

SEQ ID NO: 1963171 - DNA, 25 bp, Homo sapien
gcagaggacatgattagagtctcat

SEQ ID NO: 1963172 - DNA, 25 bp, Homo sapien
catgtttatgtctctctgcgtctga

SEQ ID NO: 1963173 - DNA, 25 bp, Homo sapien
ggtaatttatcagctagcctggaaa

SEQ ID NO: 1963174 - DNA, 25 bp, Homo sapien
cagactgccggaaagtatttatgcc

SEQ ID NO: 1963175 - DNA, 25 bp, Homo sapien
cattccccttgggtaggcttgcaaa

SEQ ID NO: 1963176 - DNA, 25 bp, Homo sapien
tatggagacacgagtggtacctggc

SEQ ID NO: 1963177 - DNA, 25 bp, Homo sapien
gtacctggcagtcacgggctcagtt

SEQ ID NO: 1963178 - DNA, 25 bp, Homo sapien
cagagaaattcctacctcattagtg

SEQ ID NO: 1963179 - DNA, 25 bp, Homo sapien
ccttcaggcaagctggctgcgtaaa

SEQ ID NO: 1963180 - DNA, 25 bp, Homo sapien
gatggtttaaaggtcccttcaggca

SEQ ID NO: 1963181 - DNA, 25 bp, Homo sapien
agtaaatactctcccttctggatgg

SEQ ID NO: 1963182 - DNA, 25 bp, Homo sapien
tacaaaatcaaccaggtctgaactg

SEQ ID NO: 1963183 - DNA, 25 bp, Homo sapien
catccaaggtacagttccaaagtac

SEQ ID NO: 1963184 - DNA, 25 bp, Homo sapien
accaggtctgaactgattggtgata

SEQ ID NO: 1963185 - DNA, 25 bp, Homo sapien
accatccaaggtacagttccaaagt

SEQ ID NO: 1963186 - DNA, 25 bp, Homo sapien
ggagtgcgtccccagtgtacacatc

SEQ ID NO: 1963187 - DNA, 25 bp, Homo sapien
tcactatgcagatccggagtgcgtc

SEQ ID NO: 1963188 - DNA, 25 bp, Homo sapien
tgtccaaggacagcggaacatgctc

SEQ ID NO: 1963189 - DNA, 25 bp, Homo sapien
ctctctcagccgcagaaatgaagac

SEQ ID NO: 1963190 - DNA, 25 bp, Homo sapien
tctgacaacgattccctggcaaagc

SEQ ID NO: 1963191 - DNA, 25 bp, Homo sapien
gagagccccaacagatgtccactaa

SEQ ID NO: 1963192 - DNA, 25 bp, Homo sapien
actcttgagaagcacatgacccgga

SEQ ID NO: 1963193 - DNA, 25 bp, Homo sapien
tacaggcggcctttgaataacaccg

SEQ ID NO: 1963194 - DNA, 25 bp, Homo sapien
taagaccctactggatcaaagctgt

SEQ ID NO: 1963195 - DNA, 25 bp, Homo sapien
tcaaagctgtatacagccccctttc

SEQ ID NO: 1963196 - DNA, 25 bp, Homo sapien
tagcatggcacttgctgagcctcca

SEQ ID NO: 1963197 - DNA, 25 bp, Homo sapien
aaggagtctctctggtaagacccta

SEQ ID NO: 1963198 - DNA, 25 bp, Homo sapien
caagccatggtagtaggtaaggacc

SEQ ID NO: 1963199 - DNA, 25 bp, Homo sapien
gggacacatccgcaagacacagtaa

SEQ ID NO: 1963200 - DNA, 25 bp, Homo sapien
ctatagaactgcgtaaacttggcca

SEQ ID NO: 1963201 - DNA, 25 bp, Homo sapien
gagaacttgaaggaaagcacgactt

SEQ ID NO: 1963202 - DNA, 25 bp, Homo sapien
tatctctcatgaggatgacaggcca

SEQ ID NO: 1963203 - DNA, 25 bp, Homo sapien
ccaaagaaagggtgggctatgtcca

SEQ ID NO: 1963204 - DNA, 25 bp, Homo sapien
ggatggaaccaatctcagaaaacca

SEQ ID NO: 1963205 - DNA, 25 bp, Homo sapien
tacagctaagctttggatgggagaa

SEQ ID NO: 1963206 - DNA, 25 bp, Homo sapien
gaaaagggatccacctagtatgtga

SEQ ID NO: 1963207 - DNA, 25 bp, Homo sapien
tcagaaatcttttaggaggtaagcc

SEQ ID NO: 1963208 - DNA, 25 bp, Homo sapien
gacaaccagatgaattgtactcaga

SEQ ID NO: 1963209 - DNA, 25 bp, Homo sapien
tagtatgtgaggtctgacaaccaga

SEQ ID NO: 1963210 - DNA, 25 bp, Homo sapien
gcattgcagcaattgcccccgtagt

SEQ ID NO: 1963211 - DNA, 25 bp, Homo sapien
gaatacaggattgtagacagcattg

SEQ ID NO: 1963212 - DNA, 25 bp, Homo sapien
caagtccaccgatgatgttgtaaac

SEQ ID NO: 1963213 - DNA, 25 bp, Homo sapien
taaacatagtatggaaagaagcgcc

SEQ ID NO: 1963214 - DNA, 25 bp, Homo sapien
gccttattattggaatgcttataca

SEQ ID NO: 1963215 - DNA, 25 bp, Homo sapien
ggccttattattggaatgcttatac

SEQ ID NO: 1963216 - DNA, 25 bp, Homo sapien
gcgagccctacattacccactggta

SEQ ID NO: 1963217 - DNA, 25 bp, Homo sapien
gatcaaacctagatgtaagtccctc

SEQ ID NO: 1963218 - DNA, 25 bp, Homo sapien
taagggaaggaatgccaagtttgcc

SEQ ID NO: 1963219 - DNA, 25 bp, Homo sapien
cagcagtggtcgtgatccttaaaac

SEQ ID NO: 1963220 - DNA, 25 bp, Homo sapien
tgatgcaaaccaagctcctgtgtca

SEQ ID NO: 1963221 - DNA, 25 bp, Homo sapien
tgcatcctgccaactaagagcacag

SEQ ID NO: 1963222 - DNA, 25 bp, Homo sapien
tcaggtgacagacgttaatggtgca

SEQ ID NO: 1963223 - DNA, 25 bp, Homo sapien
gcaaaacagaatgtgatcacccctg

SEQ ID NO: 1963224 - DNA, 25 bp, Homo sapien
gtctccatgaaaaccgctgcatcca

SEQ ID NO: 1963225 - DNA, 25 bp, Homo sapien
tgtcagcgtaagacagtctccatga

SEQ ID NO: 1963226 - DNA, 25 bp, Homo sapien
gcatccaatgactgttttgtctgtt

SEQ ID NO: 1963227 - DNA, 25 bp, Homo sapien
tcaataatctttgtcagcgtaagac

SEQ ID NO: 1963228 - DNA, 25 bp, Homo sapien
cagaagcaacaattgcaaaatcttc

SEQ ID NO: 1963229 - DNA, 25 bp, Homo sapien
cactcaatcgagtatcagaagcaac

SEQ ID NO: 1963230 - DNA, 25 bp, Homo sapien
gcgtatgaattgaaaacccttcact

SEQ ID NO: 1963231 - DNA, 25 bp, Homo sapien
gggctatcccgcgtatgaattgaaa

SEQ ID NO: 1963232 - DNA, 25 bp, Homo sapien
cagtggtactacaacgcaagctcta

SEQ ID NO: 1963233 - DNA, 25 bp, Homo sapien
ttccaaaagcagaccgcctgggttc

SEQ ID NO: 1963234 - DNA, 25 bp, Homo sapien
cctggctacgagttgtctgggaaaa

SEQ ID NO: 1963235 - DNA, 25 bp, Homo sapien
cgggaagagaatgaacgcctggcta

SEQ ID NO: 1963236 - DNA, 25 bp, Homo sapien
caaagtgtcctttagtggcagaacc

SEQ ID NO: 1963237 - DNA, 25 bp, Homo sapien
taacgtctaatataaccctaggatg

SEQ ID NO: 1963238 - DNA, 25 bp, Homo sapien
aagcatccataaactcagtggtgaa

SEQ ID NO: 1963239 - DNA, 25 bp, Homo sapien
atagctatgaattaagtcctggctc

SEQ ID NO: 1963240 - DNA, 25 bp, Homo sapien
tggcgtgccaccacggaaaattata

SEQ ID NO: 1963241 - DNA, 25 bp, Homo sapien
tataaccctaaatctctggcgtgcc

SEQ ID NO: 1963242 - DNA, 25 bp, Homo sapien
tcgccggctggcataagaaacgtgt

SEQ ID NO: 1963243 - DNA, 25 bp, Homo sapien
gcggctacaattagacatctcggct

SEQ ID NO: 1963244 - DNA, 25 bp, Homo sapien
ccctaaaaaccaaggctgtatcgca

SEQ ID NO: 1963245 - DNA, 25 bp, Homo sapien
cacggagtggcggtccacataaaaa

SEQ ID NO: 1963246 - DNA, 25 bp, Homo sapien
agcagcaaggagcacggagtggcgg

SEQ ID NO: 1963247 - DNA, 25 bp, Homo sapien
gtatcgcaatcaccaagtaaacttg

SEQ ID NO: 1963248 - DNA, 25 bp, Homo sapien
acggcagggagaccggccttgtgcg

SEQ ID NO: 1963249 - DNA, 25 bp, Homo sapien
gccatcacggcggtgactcctaaat

SEQ ID NO: 1963250 - DNA, 25 bp, Homo sapien
tcctaaataggcttcagcagatggg

SEQ ID NO: 1963251 - DNA, 25 bp, Homo sapien
gggaagggcgaaagtgaaagccgca

SEQ ID NO: 1963252 - DNA, 25 bp, Homo sapien
ttgaaaacgtagggcgaaaatcgca

SEQ ID NO: 1963253 - DNA, 25 bp, Homo sapien
gcgaaaatcgcagctgcaaagggcc

SEQ ID NO: 1963254 - DNA, 25 bp, Homo sapien
ggcccgcggctctgtgcggttccat

SEQ ID NO: 1963255 - DNA, 25 bp, Homo sapien
ggctctgtgcggttccatccccaag

SEQ ID NO: 1963256 - DNA, 25 bp, Homo sapien
ctgtctcacggcgagatggctgcct

SEQ ID NO: 1963257 - DNA, 25 bp, Homo sapien
cttgctgtctcacggcgagatggct

SEQ ID NO: 1963258 - DNA, 25 bp, Homo sapien
gacacttgctgtctcacggcgagat

SEQ ID NO: 1963259 - DNA, 25 bp, Homo sapien
tgtctcacggcgagatggctgcctt

SEQ ID NO: 1963260 - DNA, 25 bp, Homo sapien
gaagtgacattatcaacgcgcgcca

SEQ ID NO: 1963261 - DNA, 25 bp, Homo sapien
tactcttttctgacggttcgggcga

SEQ ID NO: 1963262 - DNA, 25 bp, Homo sapien
gccctagtgggagcaactcgctgaa

SEQ ID NO: 1963263 - DNA, 25 bp, Homo sapien
ccatagtgatctttgcagtgaccca

SEQ ID NO: 1963264 - DNA, 25 bp, Homo sapien
gaagccaccgaaggtcctggataaa

SEQ ID NO: 1963265 - DNA, 25 bp, Homo sapien
ggtcctggataaatctctaatcata

SEQ ID NO: 1963266 - DNA, 25 bp, Homo sapien
gtggcctgaagccaccgaaggtcct

SEQ ID NO: 1963267 - DNA, 25 bp, Homo sapien
ctctaatcatacttataatggcttt

SEQ ID NO: 1963268 - DNA, 25 bp, Homo sapien
tcttgcctcaaccttagattcctga

SEQ ID NO: 1963269 - DNA, 25 bp, Homo sapien
aattcatctagtcttgccaaattag

SEQ ID NO: 1963270 - DNA, 25 bp, Homo sapien
tcatactgcacttccgaaattccat

SEQ ID NO: 1963271 - DNA, 25 bp, Homo sapien
ctgaaacgaaacttccgtcctccag

SEQ ID NO: 1963272 - DNA, 25 bp, Homo sapien
tctattaggctttgaataggcacaa

SEQ ID NO: 1963273 - DNA, 25 bp, Homo sapien
taaaaatttttcagcctgggtgcag

SEQ ID NO: 1963274 - DNA, 25 bp, Homo sapien
gagatggtatcaaaaggcaaggaag

SEQ ID NO: 1963275 - DNA, 25 bp, Homo sapien
ggcaaggaagggcatttaatgatct

SEQ ID NO: 1963276 - DNA, 25 bp, Homo sapien
ggtgatgcccttctgtaagtgccca

SEQ ID NO: 1963277 - DNA, 25 bp, Homo sapien
agaacaccgcgcagcgtgactgtga

SEQ ID NO: 1963278 - DNA, 25 bp, Homo sapien
cactgctgttgacaagttggtttga

SEQ ID NO: 1963279 - DNA, 25 bp, Homo sapien
tgtgagttgctcataccgtgctgct

SEQ ID NO: 1963280 - DNA, 25 bp, Homo sapien
catggactggcaccgtctgtggagc

SEQ ID NO: 1963281 - DNA, 25 bp, Homo sapien
ggcaaagctgaatatgctgctctct

SEQ ID NO: 1963282 - DNA, 25 bp, Homo sapien
ccatgattatgtaggtgagacttgc

SEQ ID NO: 1963283 - DNA, 25 bp, Homo sapien
gctgtggctggacagtatctgaacc

SEQ ID NO: 1963284 - DNA, 25 bp, Homo sapien
taagtagctgataacctccccatgg

SEQ ID NO: 1963285 - DNA, 25 bp, Homo sapien
cagcaatgtgtcttaagggcaggca

SEQ ID NO: 1963286 - DNA, 25 bp, Homo sapien
gacagcttgcctgggtatgccaaaa

SEQ ID NO: 1963287 - DNA, 25 bp, Homo sapien
gctgacacggaaagggaagaccatc

SEQ ID NO: 1963288 - DNA, 25 bp, Homo sapien
aatttatttaattccctgtcactgg

SEQ ID NO: 1963289 - DNA, 25 bp, Homo sapien
aaatttatttaattccctgtcactg

SEQ ID NO: 1963290 - DNA, 25 bp, Homo sapien
atttatttaattccctgtcactgga

SEQ ID NO: 1963291 - DNA, 25 bp, Homo sapien
tcactaataagtagacactgtgtaa

SEQ ID NO: 1963292 - DNA, 25 bp, Homo sapien
tccttaggataaaatcccagaaatg

SEQ ID NO: 1963293 - DNA, 25 bp, Homo sapien
catttttcaaggctttaagatgcct

SEQ ID NO: 1963294 - DNA, 25 bp, Homo sapien
gacactgtgtaagcaatctgtcaac

SEQ ID NO: 1963295 - DNA, 25 bp, Homo sapien
ttcttctgtatagccagtacccaag

SEQ ID NO: 1963296 - DNA, 25 bp, Homo sapien
acaaattcttctgtatagccagtac

SEQ ID NO: 1963297 - DNA, 25 bp, Homo sapien
tgtatagccagtacccaagctgcag

SEQ ID NO: 1963298 - DNA, 25 bp, Homo sapien
atagccagtacccaagctgcagctc

SEQ ID NO: 1963299 - DNA, 25 bp, Homo sapien
gaagtcagtcaatagaccgtgtctg

SEQ ID NO: 1963300 - DNA, 25 bp, Homo sapien
taacagaggcactaataataatgac

SEQ ID NO: 1963301 - DNA, 25 bp, Homo sapien
aataatgacataaccacactggagg

SEQ ID NO: 1963302 - DNA, 25 bp, Homo sapien
gtagatatcctcattgtcacagaag

SEQ ID NO: 1963303 - DNA, 25 bp, Homo sapien
tccagggaactagccccaaggtgag

SEQ ID NO: 1963304 - DNA, 25 bp, Homo sapien
tgtgcacaaattaccttggtgaagt

SEQ ID NO: 1963305 - DNA, 25 bp, Homo sapien
tgattttcattatagggtacccttc

SEQ ID NO: 1963306 - DNA, 25 bp, Homo sapien
catactgccatgttgacccatgtgc

SEQ ID NO: 1963307 - DNA, 25 bp, Homo sapien
ttccaatattctcttggcaccacag

SEQ ID NO: 1963308 - DNA, 25 bp, Homo sapien
tcttggcaccacaggggcaatctgg

SEQ ID NO: 1963309 - DNA, 25 bp, Homo sapien
caccagaaatccagatgggggcaat

SEQ ID NO: 1963310 - DNA, 25 bp, Homo sapien
agaaatccagatgggggcaatacct

SEQ ID NO: 1963311 - DNA, 25 bp, Homo sapien
tgatgtagcactgacccaaaaggca

SEQ ID NO: 1963312 - DNA, 25 bp, Homo sapien
taactattaaatggatcagcactgc

SEQ ID NO: 1963313 - DNA, 25 bp, Homo sapien
taagcttcctacagcaactgagtgg

SEQ ID NO: 1963314 - DNA, 25 bp, Homo sapien
ctgaagagaacacgatgaggagcta

SEQ ID NO: 1963315 - DNA, 25 bp, Homo sapien
catgttttgccatggaatccagttc

SEQ ID NO: 1963316 - DNA, 25 bp, Homo sapien
aattttatcttccctggattcatgt

SEQ ID NO: 1963317 - DNA, 25 bp, Homo sapien
ctggttcaagggctatctgagtttt

SEQ ID NO: 1963318 - DNA, 25 bp, Homo sapien
tcttccctggattcatgttttgcca

SEQ ID NO: 1963319 - DNA, 25 bp, Homo sapien
aacttgacaattcacacatggagag

SEQ ID NO: 1963320 - DNA, 25 bp, Homo sapien
gggacccacttttaatcagatagct

SEQ ID NO: 1963321 - DNA, 25 bp, Homo sapien
tattcactcattcaagttggaccat

SEQ ID NO: 1963322 - DNA, 25 bp, Homo sapien
tgaaaaacaggagtaatccccacaa

SEQ ID NO: 1963323 - DNA, 25 bp, Homo sapien
taagacacagctacctccaggaagc

SEQ ID NO: 1963324 - DNA, 25 bp, Homo sapien
catcaagtatacgtggaaagtttca

SEQ ID NO: 1963325 - DNA, 25 bp, Homo sapien
gcactgatggtgttcacttgcacca

SEQ ID NO: 1963326 - DNA, 25 bp, Homo sapien
taaccgttaggacactgtaaatgct

SEQ ID NO: 1963327 - DNA, 25 bp, Homo sapien
gagtctgttcccaagtatcctataa

SEQ ID NO: 1963328 - DNA, 25 bp, Homo sapien
ttaagttatgtacccctcgaaggca

SEQ ID NO: 1963329 - DNA, 25 bp, Homo sapien
gaacgtttcctgacctagttctgga

SEQ ID NO: 1963330 - DNA, 25 bp, Homo sapien
tctgatgcagttagcgtccttgtgg

SEQ ID NO: 1963331 - DNA, 25 bp, Homo sapien
tatgttttgaagtcacctggaagag

SEQ ID NO: 1963332 - DNA, 25 bp, Homo sapien
gaccactggagtgttgcttcccatt

SEQ ID NO: 1963333 - DNA, 25 bp, Homo sapien
tcgtataggcatgaacacacgcgcg

SEQ ID NO: 1963334 - DNA, 25 bp, Homo sapien
tgatgtcacgtgttcccatggcacc

SEQ ID NO: 1963335 - DNA, 25 bp, Homo sapien
aaattgtgtatctaaaactggccag

SEQ ID NO: 1963336 - DNA, 25 bp, Homo sapien
tgcgacccagaggaacttaccaagc

SEQ ID NO: 1963337 - DNA, 25 bp, Homo sapien
tacctctcttctaggcacatggagc

SEQ ID NO: 1963338 - DNA, 25 bp, Homo sapien
gcatcttgtgcagccctactcatgg

SEQ ID NO: 1963339 - DNA, 25 bp, Homo sapien
tgaatgaagtcctgaaactgcttac

SEQ ID NO: 1963340 - DNA, 25 bp, Homo sapien
taatgaatgaagtcctgaaactgct

SEQ ID NO: 1963341 - DNA, 25 bp, Homo sapien
ttaatgaatgaagtcctgaaactgc

SEQ ID NO: 1963342 - DNA, 25 bp, Homo sapien
aatgaatgaagtcctgaaactgctt

SEQ ID NO: 1963343 - DNA, 25 bp, Homo sapien
acaacctcaggcataatctcatctt

SEQ ID NO: 1963344 - DNA, 25 bp, Homo sapien
tccttttccacaacctcaggcataa

SEQ ID NO: 1963345 - DNA, 25 bp, Homo sapien
gctccctataatctctgagtaatct

SEQ ID NO: 1963346 - DNA, 25 bp, Homo sapien
ttccacaacctcaggcataatctca

SEQ ID NO: 1963347 - DNA, 25 bp, Homo sapien
ctattagtaatcatttagttttgaa

SEQ ID NO: 1963348 - DNA, 25 bp, Homo sapien
cagcactattagtaatcatttagtt

SEQ ID NO: 1963349 - DNA, 25 bp, Homo sapien
aaggacagcactattagtaatcatt

SEQ ID NO: 1963350 - DNA, 25 bp, Homo sapien
gacagcactattagtaatcatttag

SEQ ID NO: 1963351 - DNA, 25 bp, Homo sapien
aaatatctgggttgacaaaggcgat

SEQ ID NO: 1963352 - DNA, 25 bp, Homo sapien
tctgggttgacaaaggcgatgaaac

SEQ ID NO: 1963353 - DNA, 25 bp, Homo sapien
gcgatgaaactgaactgagacttaa

SEQ ID NO: 1963354 - DNA, 25 bp, Homo sapien
ttgacaaaggcgatgaaactgaact

SEQ ID NO: 1963355 - DNA, 25 bp, Homo sapien
atctccagtctagggtctgatgctc

SEQ ID NO: 1963356 - DNA, 25 bp, Homo sapien
cccaatctccagtctagggtctgat

SEQ ID NO: 1963357 - DNA, 25 bp, Homo sapien
gtcccaatctccagtctagggtctg

SEQ ID NO: 1963358 - DNA, 25 bp, Homo sapien
caatctccagtctagggtctgatgc

SEQ ID NO: 1963359 - DNA, 25 bp, Homo sapien
agctggagacacactgattctcctg

SEQ ID NO: 1963360 - DNA, 25 bp, Homo sapien
ttaagctggagacacactgattctc

SEQ ID NO: 1963361 - DNA, 25 bp, Homo sapien
taagctggagacacactgattctcc

SEQ ID NO: 1963362 - DNA, 25 bp, Homo sapien
ctggagacacactgattctcctgtt

SEQ ID NO: 1963363 - DNA, 25 bp, Homo sapien
aaggtggctcatatgagtaaaaatc

SEQ ID NO: 1963364 - DNA, 25 bp, Homo sapien
ctcagaaggtggctcatatgagtaa

SEQ ID NO: 1963365 - DNA, 25 bp, Homo sapien
ttctcagaaggtggctcatatgagt

SEQ ID NO: 1963366 - DNA, 25 bp, Homo sapien
cagaaggtggctcatatgagtaaaa

SEQ ID NO: 1963367 - DNA, 25 bp, Homo sapien
tacgaaaaagctactgggatccatc

SEQ ID NO: 1963368 - DNA, 25 bp, Homo sapien
tggtcgctcccggaattaacgccgc

SEQ ID NO: 1963369 - DNA, 25 bp, Homo sapien
taccaatgcgcgtgggcacagttag

SEQ ID NO: 1963370 - DNA, 25 bp, Homo sapien
gatttcgtccggtacacgcaactga

SEQ ID NO: 1963371 - DNA, 25 bp, Homo sapien
gcagcggtggaaggcgtccgggcgg

SEQ ID NO: 1963372 - DNA, 25 bp, Homo sapien
agatgcagcggtggaaggcgtccgg

SEQ ID NO: 1963373 - DNA, 25 bp, Homo sapien
aagatgcagcggtggaaggcgtccg

SEQ ID NO: 1963374 - DNA, 25 bp, Homo sapien
atgcagcggtggaaggcgtccgggc

SEQ ID NO: 1963375 - DNA, 25 bp, Homo sapien
agcaggaaggagagcgggcggccgc

SEQ ID NO: 1963376 - DNA, 25 bp, Homo sapien
aggagagcgggcggccgcacagctc

SEQ ID NO: 1963377 - DNA, 25 bp, Homo sapien
ctgcagcaggaaggagagcgggcgg

SEQ ID NO: 1963378 - DNA, 25 bp, Homo sapien
aggaaggagagcgggcggccgcaca

SEQ ID NO: 1963379 - DNA, 25 bp, Homo sapien
gccgcgcccagccatgccggccgcc

SEQ ID NO: 1963380 - DNA, 25 bp, Homo sapien
cggccgcgcccagccatgccggccg

SEQ ID NO: 1963381 - DNA, 25 bp, Homo sapien
gcgcccagccatgccggccgcccgc

SEQ ID NO: 1963382 - DNA, 25 bp, Homo sapien
cccggccgcgcccagccatgccggc

SEQ ID NO: 1963383 - DNA, 25 bp, Homo sapien
ggaactgctcgctgcgcagtcgcca

SEQ ID NO: 1963384 - DNA, 25 bp, Homo sapien
gcgccgactcggcgaagcccagctc

SEQ ID NO: 1963385 - DNA, 25 bp, Homo sapien
tgcgcagtcgccacgccggcgccga

SEQ ID NO: 1963386 - DNA, 25 bp, Homo sapien
gccgactcggcgaagcccagctcca

SEQ ID NO: 1963387 - DNA, 25 bp, Homo sapien
gggccggaaggcaagaggcgggcac

SEQ ID NO: 1963388 - DNA, 25 bp, Homo sapien
agctgggtcggaaggcggaaatcgg

SEQ ID NO: 1963389 - DNA, 25 bp, Homo sapien
ggcgcagcccacagctgggtcggaa

SEQ ID NO: 1963390 - DNA, 25 bp, Homo sapien
gcccacagctgggtcggaaggcgga

SEQ ID NO: 1963391 - DNA, 25 bp, Homo sapien
acatgtcttgctgtgggcctgcggg

SEQ ID NO: 1963392 - DNA, 25 bp, Homo sapien
acctcagggtgtgggaaacctgtgc

SEQ ID NO: 1963393 - DNA, 25 bp, Homo sapien
gagccctcccgcaaaccttccctgc

SEQ ID NO: 1963394 - DNA, 25 bp, Homo sapien
tccacctcagggtgtgggaaacctg

SEQ ID NO: 1963395 - DNA, 25 bp, Homo sapien
tctcagtctggcattctcggatctc

SEQ ID NO: 1963396 - DNA, 25 bp, Homo sapien
ggtaattccccaggccgtgtgatct

SEQ ID NO: 1963397 - DNA, 25 bp, Homo sapien
accaaaatgaccataggcggtaatt

SEQ ID NO: 1963398 - DNA, 25 bp, Homo sapien
ctggcattctcggatctccaaggca

SEQ ID NO: 1963399 - DNA, 25 bp, Homo sapien
tgcagtgatgccgtactggatctgg

SEQ ID NO: 1963400 - DNA, 25 bp, Homo sapien
tgatgccgtactggatctggttcat

SEQ ID NO: 1963401 - DNA, 25 bp, Homo sapien
gggctgtgattagcagctctcttcc

SEQ ID NO: 1963402 - DNA, 25 bp, Homo sapien
gtctgcagtgatgccgtactggatc

SEQ ID NO: 1963403 - DNA, 25 bp, Homo sapien
acactgagactgcccatagcagtgt

SEQ ID NO: 1963404 - DNA, 25 bp, Homo sapien
gcccatagcagtgtcctgttgtgtc

SEQ ID NO: 1963405 - DNA, 25 bp, Homo sapien
gtagtagttacaacactgagactgc

SEQ ID NO: 1963406 - DNA, 25 bp, Homo sapien
agactgcccatagcagtgtcctgtt

SEQ ID NO: 1963407 - DNA, 25 bp, Homo sapien
ggttcagccctggctgacacagggc

SEQ ID NO: 1963408 - DNA, 25 bp, Homo sapien
ttcagccctggctgacacagggctg

SEQ ID NO: 1963409 - DNA, 25 bp, Homo sapien
tgggggttcagccctggctgacaca

SEQ ID NO: 1963410 - DNA, 25 bp, Homo sapien
ctgtgggggttcagccctggctgac

SEQ ID NO: 1963411 - DNA, 25 bp, Homo sapien
ttacttttcgtcatgtcatatagtt

SEQ ID NO: 1963412 - DNA, 25 bp, Homo sapien
tacttttcgtcatgtcatatagttt

SEQ ID NO: 1963413 - DNA, 25 bp, Homo sapien
tataaaacctgaaagttttggcatg

SEQ ID NO: 1963414 - DNA, 25 bp, Homo sapien
gaaagttttggcatgagtttagtaa

SEQ ID NO: 1963415 - DNA, 25 bp, Homo sapien
tatagatacctttatctataaggta

SEQ ID NO: 1963416 - DNA, 25 bp, Homo sapien
tacctttatctataaggtatagatc

SEQ ID NO: 1963417 - DNA, 25 bp, Homo sapien
tgtcactattttccacatattctgg

SEQ ID NO: 1963418 - DNA, 25 bp, Homo sapien
tcctgccaccttggcatctcaaaat

SEQ ID NO: 1963419 - DNA, 25 bp, Homo sapien
cactattttccacatattctggaaa

SEQ ID NO: 1963420 - DNA, 25 bp, Homo sapien
tttttattgtcactattttccacat

SEQ ID NO: 1963421 - DNA, 25 bp, Homo sapien
ccctgattttgagtgtgaatgggta

SEQ ID NO: 1963422 - DNA, 25 bp, Homo sapien
attccccctgattttgagtgtgaat

SEQ ID NO: 1963423 - DNA, 25 bp, Homo sapien
cccctgattttgagtgtgaatgggt

SEQ ID NO: 1963424 - DNA, 25 bp, Homo sapien
tccccctgattttgagtgtgaatgg

SEQ ID NO: 1963425 - DNA, 25 bp, Homo sapien
agtcagtttggggactgatcctcca

SEQ ID NO: 1963426 - DNA, 25 bp, Homo sapien
tcacagtcagtttggggactgatcc

SEQ ID NO: 1963427 - DNA, 25 bp, Homo sapien
ttctcctttgtgactcccctgccat

SEQ ID NO: 1963428 - DNA, 25 bp, Homo sapien
tccctgtcacagtcagtttggggac

SEQ ID NO: 1963429 - DNA, 25 bp, Homo sapien
cacagcaatacatgttagcaacttt

SEQ ID NO: 1963430 - DNA, 25 bp, Homo sapien
cttttatatatactaaggtttcaca

SEQ ID NO: 1963431 - DNA, 25 bp, Homo sapien
ataagtcaatacagtagtaagagtc

SEQ ID NO: 1963432 - DNA, 25 bp, Homo sapien
agtcatggaaaagccagcggggacc

SEQ ID NO: 1963433 - DNA, 25 bp, Homo sapien
tgtgtgcacctagccctgtagctgt

SEQ ID NO: 1963434 - DNA, 25 bp, Homo sapien
ccccaggattgtggagtgagaacgt

SEQ ID NO: 1963435 - DNA, 25 bp, Homo sapien
actgaggtaactaacgacggcggca

SEQ ID NO: 1963436 - DNA, 25 bp, Homo sapien
cgctacggttactaattgtgtgcac

SEQ ID NO: 1963437 - DNA, 25 bp, Homo sapien
tcaccacagtgcaggccagtgtgca

SEQ ID NO: 1963438 - DNA, 25 bp, Homo sapien
gccaagcgagatcaccacagtgcag

SEQ ID NO: 1963439 - DNA, 25 bp, Homo sapien
cctctgctgtatgtcgggaatcagg

SEQ ID NO: 1963440 - DNA, 25 bp, Homo sapien
tctcgccaaaaacgtgcagcacaat

SEQ ID NO: 1963441 - DNA, 25 bp, Homo sapien
ccaatgcaaaaagcatactgccttc

SEQ ID NO: 1963442 - DNA, 25 bp, Homo sapien
aatgcaaaaagcatactgccttctc

SEQ ID NO: 1963443 - DNA, 25 bp, Homo sapien
ttccacccaatgcaaaaagcatact

SEQ ID NO: 1963444 - DNA, 25 bp, Homo sapien
cacccaatgcaaaaagcatactgcc

SEQ ID NO: 1963445 - DNA, 25 bp, Homo sapien
aggatttattttccgttctcacagg

SEQ ID NO: 1963446 - DNA, 25 bp, Homo sapien
tgggaattgtgatccaaagcttttc

SEQ ID NO: 1963447 - DNA, 25 bp, Homo sapien
cttcagcactgggaattgtgatcca

SEQ ID NO: 1963448 - DNA, 25 bp, Homo sapien
ttaaggacacacctgagaaaagaac

SEQ ID NO: 1963449 - DNA, 25 bp, Homo sapien
tgagcagacctgcatgtctgcggtc

SEQ ID NO: 1963450 - DNA, 25 bp, Homo sapien
gagcagacctgcatgtctgcggtca

SEQ ID NO: 1963451 - DNA, 25 bp, Homo sapien
agcccccgtgcacattctacagcct

SEQ ID NO: 1963452 - DNA, 25 bp, Homo sapien
gaccaagcccccgtgcacattctac

SEQ ID NO: 1963453 - DNA, 25 bp, Homo sapien
cccgtgcacattctacagcctctgt

SEQ ID NO: 1963454 - DNA, 25 bp, Homo sapien
cagctggtctctagggcagcaagag

SEQ ID NO: 1963455 - DNA, 25 bp, Homo sapien
catggctttggagcacctggtagtg

SEQ ID NO: 1963456 - DNA, 25 bp, Homo sapien
atggctttggagcacctggtagtgt

SEQ ID NO: 1963457 - DNA, 25 bp, Homo sapien
ggccaaggtcaccaccctgatttgt

SEQ ID NO: 1963458 - DNA, 25 bp, Homo sapien
gccaaggtcaccaccctgatttgtc

SEQ ID NO: 1963459 - DNA, 25 bp, Homo sapien
ctgagtcggccggaagaagatagaa

SEQ ID NO: 1963460 - DNA, 25 bp, Homo sapien
gctgaccactgagtcggccggaaga

SEQ ID NO: 1963461 - DNA, 25 bp, Homo sapien
tataaggttttcctatgagcattaa

SEQ ID NO: 1963462 - DNA, 25 bp, Homo sapien
tttgcattgctgattaccctctcca

SEQ ID NO: 1963463 - DNA, 25 bp, Homo sapien
ggttttcctatgagcattaattatt

SEQ ID NO: 1963464 - DNA, 25 bp, Homo sapien
caggtatgcatttatctaggtgagc

SEQ ID NO: 1963465 - DNA, 25 bp, Homo sapien
tgaaacccatgctggaccctggtct

SEQ ID NO: 1963466 - DNA, 25 bp, Homo sapien
gtgctgaaacccatgctggaccctg

SEQ ID NO: 1963467 - DNA, 25 bp, Homo sapien
ccccgccgtctgctgtgctgaaacc

SEQ ID NO: 1963468 - DNA, 25 bp, Homo sapien
gctgaaacccatgctggaccctggt

SEQ ID NO: 1963469 - DNA, 25 bp, Homo sapien
cagccctcacccactgtggagtgtt

SEQ ID NO: 1963470 - DNA, 25 bp, Homo sapien
agaacagccctcacccactgtggag

SEQ ID NO: 1963471 - DNA, 25 bp, Homo sapien
caccttcaggacgggaacaccagaa

SEQ ID NO: 1963472 - DNA, 25 bp, Homo sapien
actgtggagtgtttctccaccttca

SEQ ID NO: 1963473 - DNA, 25 bp, Homo sapien
cagccatgacgggaatcagcctcat

SEQ ID NO: 1963474 - DNA, 25 bp, Homo sapien
gattccacgtaaatcatcaatatgg

SEQ ID NO: 1963475 - DNA, 25 bp, Homo sapien
tcaagacaggagcatgagaacccag

SEQ ID NO: 1963476 - DNA, 25 bp, Homo sapien
ttctaaattgtagatctgacagcag

SEQ ID NO: 1963477 - DNA, 25 bp, Homo sapien
ggagccactcgtaaattcagcaatg

SEQ ID NO: 1963478 - DNA, 25 bp, Homo sapien
ttgaaatgtgagcacgctgtggaca

SEQ ID NO: 1963479 - DNA, 25 bp, Homo sapien
caaagtgcagttctacatgttcgtt

SEQ ID NO: 1963480 - DNA, 25 bp, Homo sapien
tgttcgttaaatcggccaccaagta

SEQ ID NO: 1963481 - DNA, 25 bp, Homo sapien
tctctgattcccaaatccaggccca

SEQ ID NO: 1963482 - DNA, 25 bp, Homo sapien
ctctgattcccaaatccaggcccat

SEQ ID NO: 1963483 - DNA, 25 bp, Homo sapien
ttctctgattcccaaatccaggccc

SEQ ID NO: 1963484 - DNA, 25 bp, Homo sapien
ctggcatgatgtgagttaactgaga

SEQ ID NO: 1963485 - DNA, 25 bp, Homo sapien
aaatgtgcaggcgaatccatggtgc

SEQ ID NO: 1963486 - DNA, 25 bp, Homo sapien
gcactgaaggatccacacggaagtc

SEQ ID NO: 1963487 - DNA, 25 bp, Homo sapien
tgagaaagacaaaatgtgcaggcga

SEQ ID NO: 1963488 - DNA, 25 bp, Homo sapien
tgggtacaaggcagagagcgtcctc

SEQ ID NO: 1963489 - DNA, 25 bp, Homo sapien
cagagagcgtcctctggatacaggc

SEQ ID NO: 1963490 - DNA, 25 bp, Homo sapien
tctcggccacgctgaacagctgcca

SEQ ID NO: 1963491 - DNA, 25 bp, Homo sapien
ctgccgtggcttcaaacggtgggta

SEQ ID NO: 1963492 - DNA, 25 bp, Homo sapien
ctattcatagcagttaaggtaaatg

SEQ ID NO: 1963493 - DNA, 25 bp, Homo sapien
tcatagcagttaaggtaaatgcatt

SEQ ID NO: 1963494 - DNA, 25 bp, Homo sapien
atagcagttaaggtaaatgcatttt

SEQ ID NO: 1963495 - DNA, 25 bp, Homo sapien
tattcatagcagttaaggtaaatgc

SEQ ID NO: 1963496 - DNA, 25 bp, Homo sapien
gagggaggttagtggtgggcacggc

SEQ ID NO: 1963497 - DNA, 25 bp, Homo sapien
aagagaggagggaggttagtggtgg

SEQ ID NO: 1963498 - DNA, 25 bp, Homo sapien
gagaggagggaggttagtggtgggc

SEQ ID NO: 1963499 - DNA, 25 bp, Homo sapien
ggaggttagtggtgggcacggccat

SEQ ID NO: 1963500 - DNA, 25 bp, Homo sapien
agcctgactccgtgcagggacgcca

SEQ ID NO: 1963501 - DNA, 25 bp, Homo sapien
ctgcaggtagaagtccccgggctgg

SEQ ID NO: 1963502 - DNA, 25 bp, Homo sapien
gcctgactccgtgcagggacgccag

SEQ ID NO: 1963503 - DNA, 25 bp, Homo sapien
ttctcatgggcgcacagcggccagc

SEQ ID NO: 1963504 - DNA, 25 bp, Homo sapien
ggacaggcatttcaagaccagtcta

SEQ ID NO: 1963505 - DNA, 25 bp, Homo sapien
atggcctcagggacggtgacttcct

SEQ ID NO: 1963506 - DNA, 25 bp, Homo sapien
tgtgcctcttcccagccgggacagg

SEQ ID NO: 1963507 - DNA, 25 bp, Homo sapien
agctgactgcttccccgccgacgtg

SEQ ID NO: 1963508 - DNA, 25 bp, Homo sapien
gactccctgaaccagcgtctaggct

SEQ ID NO: 1963509 - DNA, 25 bp, Homo sapien
ggttccgcaaggcttccatgtacga

SEQ ID NO: 1963510 - DNA, 25 bp, Homo sapien
tgctgctcgggatgcccaggtctgt

SEQ ID NO: 1963511 - DNA, 25 bp, Homo sapien
aagacagggtcagtgacgtcgctcc

SEQ ID NO: 1963512 - DNA, 25 bp, Homo sapien
cctgggaagagtccgccctgcagct

SEQ ID NO: 1963513 - DNA, 25 bp, Homo sapien
agccgggaccctctactgggacaca

SEQ ID NO: 1963514 - DNA, 25 bp, Homo sapien
gtgccctttcccaggaccgagatct

SEQ ID NO: 1963515 - DNA, 25 bp, Homo sapien
ggaccctctactgggacacagtttg

SEQ ID NO: 1963516 - DNA, 25 bp, Homo sapien
tctccgggacctgtcagaagttcca

SEQ ID NO: 1963517 - DNA, 25 bp, Homo sapien
ctttagctgaattgcagtgaggcga

SEQ ID NO: 1963518 - DNA, 25 bp, Homo sapien
ttttctgcccagtacaacagggaag

SEQ ID NO: 1963519 - DNA, 25 bp, Homo sapien
cctaactttgaaggcgaaaggctct

SEQ ID NO: 1963520 - DNA, 25 bp, Homo sapien
gtgacgaccccggactgcagcagct

SEQ ID NO: 1963521 - DNA, 25 bp, Homo sapien
gggcaggcacatcggaaggcccgct

SEQ ID NO: 1963522 - DNA, 25 bp, Homo sapien
gtggccacccttcttgctcggggtg

SEQ ID NO: 1963523 - DNA, 25 bp, Homo sapien
tgcagcagctcctgactgacgtcca

SEQ ID NO: 1963524 - DNA, 25 bp, Homo sapien
gacgagtgttccctggtccagagca

SEQ ID NO: 1963525 - DNA, 25 bp, Homo sapien
gcaggctcctggtgcggacctgcac

SEQ ID NO: 1963526 - DNA, 25 bp, Homo sapien
tgctctgccatgacggtctcgggtc

SEQ ID NO: 1963527 - DNA, 25 bp, Homo sapien
agctcagcacaggacgagtgttccc

SEQ ID NO: 1963528 - DNA, 25 bp, Homo sapien
gcagctggactcctgcgtgcatcca

SEQ ID NO: 1963529 - DNA, 25 bp, Homo sapien
cctgggagacggcaggggcagctgg

SEQ ID NO: 1963530 - DNA, 25 bp, Homo sapien
caccaggacaaccagccccaggtcc

SEQ ID NO: 1963531 - DNA, 25 bp, Homo sapien
cctgagagggcctgggagacggcag

SEQ ID NO: 1963532 - DNA, 25 bp, Homo sapien
aagcctgtggactggctactccaga

SEQ ID NO: 1963533 - DNA, 25 bp, Homo sapien
aagggatatgacaaccttgccgtac

SEQ ID NO: 1963534 - DNA, 25 bp, Homo sapien
tactccagaaccacgatgtgggcag

SEQ ID NO: 1963535 - DNA, 25 bp, Homo sapien
aagtccccagcggatgggccaagcc

SEQ ID NO: 1963536 - DNA, 25 bp, Homo sapien
cttgtccaattgctctagctagaac

SEQ ID NO: 1963537 - DNA, 25 bp, Homo sapien
tctagtatattgagtgctttcatca

SEQ ID NO: 1963538 - DNA, 25 bp, Homo sapien
caggaacaaactgtacttggtcagg

SEQ ID NO: 1963539 - DNA, 25 bp, Homo sapien
tcagttttcatgtgtcgaaccatcc

SEQ ID NO: 1963540 - DNA, 25 bp, Homo sapien
acagcaagatactatgaattatagg

SEQ ID NO: 1963541 - DNA, 25 bp, Homo sapien
ctgaattattgcatccttgtcaggc

SEQ ID NO: 1963542 - DNA, 25 bp, Homo sapien
ccttgtcaggcctaaatgcagattc

SEQ ID NO: 1963543 - DNA, 25 bp, Homo sapien
tgcagattctttatctaccaacagc

SEQ ID NO: 1963544 - DNA, 25 bp, Homo sapien
gaaaaggagaactcctctcaaacca

SEQ ID NO: 1963545 - DNA, 25 bp, Homo sapien
agtttttcatggcatactctgcagg

SEQ ID NO: 1963546 - DNA, 25 bp, Homo sapien
tgtgtttcatctcatctaggtgcct

SEQ ID NO: 1963547 - DNA, 25 bp, Homo sapien
caggactcctgcaagaacttacggg

SEQ ID NO: 1963548 - DNA, 25 bp, Homo sapien
ctgtagggaaaggagccgtcgaggt

SEQ ID NO: 1963549 - DNA, 25 bp, Homo sapien
ccttcagggagctcacgacctcaca

SEQ ID NO: 1963550 - DNA, 25 bp, Homo sapien
gagccgtcgaggtctgcggtcagct

SEQ ID NO: 1963551 - DNA, 25 bp, Homo sapien
gtcaacaaatttgtgcacggccttc

SEQ ID NO: 1963552 - DNA, 25 bp, Homo sapien
ttcacagtttgcagcgaagtgttcc

SEQ ID NO: 1963553 - DNA, 25 bp, Homo sapien
agtttgcagcgaagtgttccagcct

SEQ ID NO: 1963554 - DNA, 25 bp, Homo sapien
gggttctgtgggtgttcagggagca

SEQ ID NO: 1963555 - DNA, 25 bp, Homo sapien
acagtttgcagcgaagtgttccagc

SEQ ID NO: 1963556 - DNA, 25 bp, Homo sapien
cttctctcctcagccgcgccaggac

SEQ ID NO: 1963557 - DNA, 25 bp, Homo sapien
tcatgctggtcaattaactcggcga

SEQ ID NO: 1963558 - DNA, 25 bp, Homo sapien
gctggtcaattaactcggcgacttc

SEQ ID NO: 1963559 - DNA, 25 bp, Homo sapien
cctgagagacacaagcagtgggtct

SEQ ID NO: 1963560 - DNA, 25 bp, Homo sapien
acgattgttcgaggtgaggaccagc

SEQ ID NO: 1963561 - DNA, 25 bp, Homo sapien
gctgctggagacgattgttcgaggt

SEQ ID NO: 1963562 - DNA, 25 bp, Homo sapien
attcccttccaggagtgacgccagc

SEQ ID NO: 1963563 - DNA, 25 bp, Homo sapien
tcatccactcggtcgtacaggcttg

SEQ ID NO: 1963564 - DNA, 25 bp, Homo sapien
aggggatgctgaccgggccgccttc

SEQ ID NO: 1963565 - DNA, 25 bp, Homo sapien
gtgagagggttgccttggccagcct

SEQ ID NO: 1963566 - DNA, 25 bp, Homo sapien
aggtgagagggttgccttggccagc

SEQ ID NO: 1963567 - DNA, 25 bp, Homo sapien
agatcaaggccctaaagacacagtg

SEQ ID NO: 1963568 - DNA, 25 bp, Homo sapien
ctatcctgacataatttcattccaa

SEQ ID NO: 1963569 - DNA, 25 bp, Homo sapien
gacataatttcattccaaatggaaa

SEQ ID NO: 1963570 - DNA, 25 bp, Homo sapien
tgacataatttcattccaaatggaa

SEQ ID NO: 1963571 - DNA, 25 bp, Homo sapien
tcctgacataatttcattccaaatg

SEQ ID NO: 1963572 - DNA, 25 bp, Homo sapien
tatttctttttacacaagcagcaag

SEQ ID NO: 1963573 - DNA, 25 bp, Homo sapien
ttctttttacacaagcagcaaggca

SEQ ID NO: 1963574 - DNA, 25 bp, Homo sapien
tttttacacaagcagcaaggcatgc

SEQ ID NO: 1963575 - DNA, 25 bp, Homo sapien
tttatttctttttacacaagcagca

SEQ ID NO: 1963576 - DNA, 25 bp, Homo sapien
ctaggaatgtatccagagtcaacac

SEQ ID NO: 1963577 - DNA, 25 bp, Homo sapien
agccatccgagcctaggaatgtatc

SEQ ID NO: 1963578 - DNA, 25 bp, Homo sapien
gcagccatccgagcctaggaatgta

SEQ ID NO: 1963579 - DNA, 25 bp, Homo sapien
aggaatgtatccagagtcaacaccc

SEQ ID NO: 1963580 - DNA, 25 bp, Homo sapien
gaccatttcctctgtacgttgcggg

SEQ ID NO: 1963581 - DNA, 25 bp, Homo sapien
acaactcggacgagcgggtccacct

SEQ ID NO: 1963582 - DNA, 25 bp, Homo sapien
ccttcgccagctgtagtcctttctg

SEQ ID NO: 1963583 - DNA, 25 bp, Homo sapien
tctcgcacaactcggacgagcgggt

SEQ ID NO: 1963584 - DNA, 25 bp, Homo sapien
ttgctgtgatgcccacggtttcccc

SEQ ID NO: 1963585 - DNA, 25 bp, Homo sapien
gcctcctgggcacgctcatgctttg

SEQ ID NO: 1963586 - DNA, 25 bp, Homo sapien
ctcctcaaacactcagccacgggtg

SEQ ID NO: 1963587 - DNA, 25 bp, Homo sapien
cggacagtggttgcgcaggttccca

SEQ ID NO: 1963588 - DNA, 25 bp, Homo sapien
cactgtcgggctgaggtatctcgaa

SEQ ID NO: 1963589 - DNA, 25 bp, Homo sapien
cagactccggctctgagtgaccggg

SEQ ID NO: 1963590 - DNA, 25 bp, Homo sapien
cactagtatggtctggctggcagga

SEQ ID NO: 1963591 - DNA, 25 bp, Homo sapien
tgtggctacagtgctggttacctcc

SEQ ID NO: 1963592 - DNA, 25 bp, Homo sapien
gcagggtcacatgtggactggaggc

SEQ ID NO: 1963593 - DNA, 25 bp, Homo sapien
aacccggagggatgagcagggtcac

SEQ ID NO: 1963594 - DNA, 25 bp, Homo sapien
catgggcacatgtgggatgcacgat

SEQ ID NO: 1963595 - DNA, 25 bp, Homo sapien
aagacacagagatcccggggggcac

SEQ ID NO: 1963596 - DNA, 25 bp, Homo sapien
tgtcaatgacgtatcctaagcaccg

SEQ ID NO: 1963597 - DNA, 25 bp, Homo sapien
taacgtggtgcttccctcgaaggcc

SEQ ID NO: 1963598 - DNA, 25 bp, Homo sapien
taagcaccgaatgtactccctctct

SEQ ID NO: 1963599 - DNA, 25 bp, Homo sapien
ccaagttgccgaaaataacgtggtg

SEQ ID NO: 1963600 - DNA, 25 bp, Homo sapien
cactgggtctgtacattcaacgtgc

SEQ ID NO: 1963601 - DNA, 25 bp, Homo sapien
ggcctctccccggaaggtgattctg

SEQ ID NO: 1963602 - DNA, 25 bp, Homo sapien
tgaaagcctcacagggaattctcag

SEQ ID NO: 1963603 - DNA, 25 bp, Homo sapien
gaattctcagaacgggacaggctgg

SEQ ID NO: 1963604 - DNA, 25 bp, Homo sapien
tggaaaagcagaggcgactgcttgg

SEQ ID NO: 1963605 - DNA, 25 bp, Homo sapien
ccgactgcggcttgtttttgctgta

SEQ ID NO: 1963606 - DNA, 25 bp, Homo sapien
tttgctgtagatcacgtacatccca

SEQ ID NO: 1963607 - DNA, 25 bp, Homo sapien
ctgagcagggcatccgactgcggct

SEQ ID NO: 1963608 - DNA, 25 bp, Homo sapien
tgaagaaggcgttgccatggctgct

SEQ ID NO: 1963609 - DNA, 25 bp, Homo sapien
agggccgggtgagagggtcagctcc

SEQ ID NO: 1963610 - DNA, 25 bp, Homo sapien
ccgggtgagagggtcagctccggcc

SEQ ID NO: 1963611 - DNA, 25 bp, Homo sapien
tgcaagggccgggtgagagggtcag

SEQ ID NO: 1963612 - DNA, 25 bp, Homo sapien
ggtgagagggtcagctccggcctgg

SEQ ID NO: 1963613 - DNA, 25 bp, Homo sapien
agctggaagcagaccacgacctcgg

SEQ ID NO: 1963614 - DNA, 25 bp, Homo sapien
aggaggccaggtccattttgtcacc

SEQ ID NO: 1963615 - DNA, 25 bp, Homo sapien
ggtcattgccgtgacgcagctggaa

SEQ ID NO: 1963616 - DNA, 25 bp, Homo sapien
agtagcagcgcgtacttggccacac

SEQ ID NO: 1963617 - DNA, 25 bp, Homo sapien
caccttctgggtcttgctaaacagg

SEQ ID NO: 1963618 - DNA, 25 bp, Homo sapien
cgataaactcatcccggcatctcag

SEQ ID NO: 1963619 - DNA, 25 bp, Homo sapien
tcttcctcccgcagcaaacgataaa

SEQ ID NO: 1963620 - DNA, 25 bp, Homo sapien
tgtacaggtagacgtcgtggctgcc

SEQ ID NO: 1963621 - DNA, 25 bp, Homo sapien
tctttagtgcctgccgccacaggat

SEQ ID NO: 1963622 - DNA, 25 bp, Homo sapien
gccgcctgcgaaaccaaatctcaaa

SEQ ID NO: 1963623 - DNA, 25 bp, Homo sapien
cctctgccgagcttgcttggagaat

SEQ ID NO: 1963624 - DNA, 25 bp, Homo sapien
caggatcctccctatgacatcggtc

SEQ ID NO: 1963625 - DNA, 25 bp, Homo sapien
aggtctctctgcctggggggtgttc

SEQ ID NO: 1963626 - DNA, 25 bp, Homo sapien
attcatggcggtggctgcccaggtc

SEQ ID NO: 1963627 - DNA, 25 bp, Homo sapien
tcattcatggcggtggctgcccagg

SEQ ID NO: 1963628 - DNA, 25 bp, Homo sapien
tctctgcctggggggtgttccccgc

SEQ ID NO: 1963629 - DNA, 25 bp, Homo sapien
agaagtgatcaaatgttccagaact

SEQ ID NO: 1963630 - DNA, 25 bp, Homo sapien
cacgcttggccgtcagagcatagct

SEQ ID NO: 1963631 - DNA, 25 bp, Homo sapien
aatgttccagaactaaccccacgct

SEQ ID NO: 1963632 - DNA, 25 bp, Homo sapien
ccaggtggagtgcagagagtggagc

SEQ ID NO: 1963633 - DNA, 25 bp, Homo sapien
ttttcggcaccaaagagatctctcc

SEQ ID NO: 1963634 - DNA, 25 bp, Homo sapien
cacagcaggtcccaattagagcagg

SEQ ID NO: 1963635 - DNA, 25 bp, Homo sapien
gagcccgaggcagtaaccaagaaaa

SEQ ID NO: 1963636 - DNA, 25 bp, Homo sapien
tatgacagtttccaaagcaactcgg

SEQ ID NO: 1963637 - DNA, 25 bp, Homo sapien
ctgtgcccttgacgatgctgtcggg

SEQ ID NO: 1963638 - DNA, 25 bp, Homo sapien
tgcacatttgggagcccggtcgctt

SEQ ID NO: 1963639 - DNA, 25 bp, Homo sapien
gctggttgcctatacccatggatgc

SEQ ID NO: 1963640 - DNA, 25 bp, Homo sapien
gggactcggtcgctcatcactgcac

SEQ ID NO: 1963641 - DNA, 25 bp, Homo sapien
tgagggcgggaccgagccaccgtac

SEQ ID NO: 1963642 - DNA, 25 bp, Homo sapien
ggtgagtgagggcgggaccgagcca

SEQ ID NO: 1963643 - DNA, 25 bp, Homo sapien
gtgagggcgggaccgagccaccgta

SEQ ID NO: 1963644 - DNA, 25 bp, Homo sapien
gagtgagggcgggaccgagccaccg

SEQ ID NO: 1963645 - DNA, 25 bp, Homo sapien
cttgacgacaggcctggtgcactct

SEQ ID NO: 1963646 - DNA, 25 bp, Homo sapien
tgccaccgtacccatgcccttgatg

SEQ ID NO: 1963647 - DNA, 25 bp, Homo sapien
gaggccaccgtacccgtgtccttga

SEQ ID NO: 1963648 - DNA, 25 bp, Homo sapien
cctggtgcactctgtgggcgagtga

SEQ ID NO: 1963649 - DNA, 25 bp, Homo sapien
catgtcggccactggcccagtgccc

SEQ ID NO: 1963650 - DNA, 25 bp, Homo sapien
atgtcggccactggcccagtgccct

SEQ ID NO: 1963651 - DNA, 25 bp, Homo sapien
tctgaaaggccgaccaggctttgcc

SEQ ID NO: 1963652 - DNA, 25 bp, Homo sapien
gctttgccactgcagtcatgcccat

SEQ ID NO: 1963653 - DNA, 25 bp, Homo sapien
ggacagaaagcacgtcaggctggct

SEQ ID NO: 1963654 - DNA, 25 bp, Homo sapien
tggcttccgctccagaagtgcagcc

SEQ ID NO: 1963655 - DNA, 25 bp, Homo sapien
caggctctgatatcagatgaccagg

SEQ ID NO: 1963656 - DNA, 25 bp, Homo sapien
tggctcatcttcctcgacgcaggct

SEQ ID NO: 1963657 - DNA, 25 bp, Homo sapien
ctgggtgcccgtctctagttctggc

SEQ ID NO: 1963658 - DNA, 25 bp, Homo sapien
tcagaggaggacaccgctgtggacc

SEQ ID NO: 1963659 - DNA, 25 bp, Homo sapien
tgtgattctagcacagacgctggct

SEQ ID NO: 1963660 - DNA, 25 bp, Homo sapien
gaaaatcctggatggtgcacatgct

SEQ ID NO: 1963661 - DNA, 25 bp, Homo sapien
ttaactttctggacgcctgggctgc

SEQ ID NO: 1963662 - DNA, 25 bp, Homo sapien
tttggtaacccctagatcatctgga

SEQ ID NO: 1963663 - DNA, 25 bp, Homo sapien
tgcttcagctcacgggtccagaacc

SEQ ID NO: 1963664 - DNA, 25 bp, Homo sapien
ggtgagtgaccctgagggacccagt

SEQ ID NO: 1963665 - DNA, 25 bp, Homo sapien
acctgcttcagctcacgggtccaga

SEQ ID NO: 1963666 - DNA, 25 bp, Homo sapien
tgagggacccagtggccgcctctcc

SEQ ID NO: 1963667 - DNA, 25 bp, Homo sapien
gaggcactggtggtcgaggcgaggg

SEQ ID NO: 1963668 - DNA, 25 bp, Homo sapien
gaaggaggcactggtggtcgaggcg

SEQ ID NO: 1963669 - DNA, 25 bp, Homo sapien
aggaggcactggtggtcgaggcgag

SEQ ID NO: 1963670 - DNA, 25 bp, Homo sapien
tggtcgaggcgagggggccgctgtg

SEQ ID NO: 1963671 - DNA, 25 bp, Homo sapien
acaaaggaatgctcgagggaacccg

SEQ ID NO: 1963672 - DNA, 25 bp, Homo sapien
ctcctgggaagacgaccaccctggg

SEQ ID NO: 1963673 - DNA, 25 bp, Homo sapien
gggagctgctcctgacaaaggaatg

SEQ ID NO: 1963674 - DNA, 25 bp, Homo sapien
gccctctgggtgcacttggttacca

SEQ ID NO: 1963675 - DNA, 25 bp, Homo sapien
ccaggacctctggttggcagcagaa

SEQ ID NO: 1963676 - DNA, 25 bp, Homo sapien
gcagcagaatccgtcctctggcagt

SEQ ID NO: 1963677 - DNA, 25 bp, Homo sapien
cagaatccgtcctctggcagtggcc

SEQ ID NO: 1963678 - DNA, 25 bp, Homo sapien
ggttggcagcagaatccgtcctctg

SEQ ID NO: 1963679 - DNA, 25 bp, Homo sapien
gccttctctgaacgggaggctggag

SEQ ID NO: 1963680 - DNA, 25 bp, Homo sapien
ggaggctggagctttctccttatgg

SEQ ID NO: 1963681 - DNA, 25 bp, Homo sapien
cttgggagaggcgtgtccccaggat

SEQ ID NO: 1963682 - DNA, 25 bp, Homo sapien
ctttctccttatgggggctgctgaa

SEQ ID NO: 1963683 - DNA, 25 bp, Homo sapien
tgttactcacgtcgcacgggcctct

SEQ ID NO: 1963684 - DNA, 25 bp, Homo sapien
agaaaaactgctgttactcacgtcg

SEQ ID NO: 1963685 - DNA, 25 bp, Homo sapien
tcaaagctgtgacagcacagacgtg

SEQ ID NO: 1963686 - DNA, 25 bp, Homo sapien
acgggcctctccctaggacccgctg

SEQ ID NO: 1963687 - DNA, 25 bp, Homo sapien
gtaaacacttaacaacagtggcagg

SEQ ID NO: 1963688 - DNA, 25 bp, Homo sapien
ggcaggtaacgccatttcccagaca

SEQ ID NO: 1963689 - DNA, 25 bp, Homo sapien
tcctttacctactcgggctctgtgt

SEQ ID NO: 1963690 - DNA, 25 bp, Homo sapien
tcagtattgatacaaagtaaacact

SEQ ID NO: 1963691 - DNA, 25 bp, Homo sapien
ctgcagaaatgaagcggagtgacct

SEQ ID NO: 1963692 - DNA, 25 bp, Homo sapien
tgcagaaatgaagcggagtgacctc

SEQ ID NO: 1963693 - DNA, 25 bp, Homo sapien
gcagaaatgaagcggagtgacctca

SEQ ID NO: 1963694 - DNA, 25 bp, Homo sapien
cagaaatgaagcggagtgacctcat

SEQ ID NO: 1963695 - DNA, 25 bp, Homo sapien
cacatctcggatgcccgtgaggtca

SEQ ID NO: 1963696 - DNA, 25 bp, Homo sapien
agtgagctgcgccatcttgctgagc

SEQ ID NO: 1963697 - DNA, 25 bp, Homo sapien
ggatcttcccggtcagcgtggagaa

SEQ ID NO: 1963698 - DNA, 25 bp, Homo sapien
ccctcagtgacgaagaggtcggcga

SEQ ID NO: 1963699 - DNA, 25 bp, Homo sapien
gtctgccaagaaggccatgtccgtg

SEQ ID NO: 1963700 - DNA, 25 bp, Homo sapien
ccaggatcagcatgccaacgtggct

SEQ ID NO: 1963701 - DNA, 25 bp, Homo sapien
tacaggctgaccaggttgtgtccac

SEQ ID NO: 1963702 - DNA, 25 bp, Homo sapien
cttgggcaccgggaactcaatgcag

SEQ ID NO: 1963703 - DNA, 25 bp, Homo sapien
gaatagctcccgtcagtctaagcct

SEQ ID NO: 1963704 - DNA, 25 bp, Homo sapien
agaaccttgccgtgctgccactaaa

SEQ ID NO: 1963705 - DNA, 25 bp, Homo sapien
tccagacagcgggttgtgaccagca

SEQ ID NO: 1963706 - DNA, 25 bp, Homo sapien
tgtgtcttaggtggttgtcagctcc

SEQ ID NO: 1963707 - DNA, 25 bp, Homo sapien
cagtctgccccatcatgatgggtgt

SEQ ID NO: 1963708 - DNA, 25 bp, Homo sapien
tctgccccatcatgatgggtgtgtg

SEQ ID NO: 1963709 - DNA, 25 bp, Homo sapien
ccccatcatgatgggtgtgtggtgc

SEQ ID NO: 1963710 - DNA, 25 bp, Homo sapien
tcatgatgggtgtgtggtgctgtct

SEQ ID NO: 1963711 - DNA, 25 bp, Homo sapien
cataggagcgttaaccagcccctag

SEQ ID NO: 1963712 - DNA, 25 bp, Homo sapien
aggttctgttgcacataggagcgtt

SEQ ID NO: 1963713 - DNA, 25 bp, Homo sapien
gagcgttaaccagcccctagtgtag

SEQ ID NO: 1963714 - DNA, 25 bp, Homo sapien
ttgcacataggagcgttaaccagcc

SEQ ID NO: 1963715 - DNA, 25 bp, Homo sapien
gaatatccggcctaattccagggcg

SEQ ID NO: 1963716 - DNA, 25 bp, Homo sapien
tttcaggtgccctcataaggactgc

SEQ ID NO: 1963717 - DNA, 25 bp, Homo sapien
aaggccgtgactttgggacctgcca

SEQ ID NO: 1963718 - DNA, 25 bp, Homo sapien
tgcaaggattaagtcagccaaggcg

SEQ ID NO: 1963719 - DNA, 25 bp, Homo sapien
gggggataccgcgcctgcgcaccac

SEQ ID NO: 1963720 - DNA, 25 bp, Homo sapien
gggaggggggataccgcgcctgcgc

SEQ ID NO: 1963721 - DNA, 25 bp, Homo sapien
gcgcaccacgccggagtcgagcggg

SEQ ID NO: 1963722 - DNA, 25 bp, Homo sapien
ctgcgcaccacgccggagtcgagcg

SEQ ID NO: 1963723 - DNA, 25 bp, Homo sapien
agactgcgcctgcgcaccacaccgg

SEQ ID NO: 1963724 - DNA, 25 bp, Homo sapien
gtctgctgttgccgccgcgcagtcc

SEQ ID NO: 1963725 - DNA, 25 bp, Homo sapien
gcctgcgcaccacaccggggtcgag

SEQ ID NO: 1963726 - DNA, 25 bp, Homo sapien
cagtccctgcgcagactgcgcctgc

SEQ ID NO: 1963727 - DNA, 25 bp, Homo sapien
agcgccaggcgccgagcgctcagca

SEQ ID NO: 1963728 - DNA, 25 bp, Homo sapien
gagcgctcagcagccgcgacaggcc

SEQ ID NO: 1963729 - DNA, 25 bp, Homo sapien
gcgccgagcgctcagcagccgcgac

SEQ ID NO: 1963730 - DNA, 25 bp, Homo sapien
cgctcagcagccgcgacaggccccg

SEQ ID NO: 1963731 - DNA, 25 bp, Homo sapien
cacatttttggtggcataaggacca

SEQ ID NO: 1963732 - DNA, 25 bp, Homo sapien
tcgaagtggacatggacagatttgc

SEQ ID NO: 1963733 - DNA, 25 bp, Homo sapien
aactgcaagcctaagctcgggcgcg

SEQ ID NO: 1963734 - DNA, 25 bp, Homo sapien
acagatttgcgctttctggaaaggc

SEQ ID NO: 1963735 - DNA, 25 bp, Homo sapien
tagcagatgccctcttgttcccatc

SEQ ID NO: 1963736 - DNA, 25 bp, Homo sapien
agcagatgccctcttgttcccatca

SEQ ID NO: 1963737 - DNA, 25 bp, Homo sapien
gatgccctcttgttcccatcaacag

SEQ ID NO: 1963738 - DNA, 25 bp, Homo sapien
acatgctgtattaaaccctgcctca

SEQ ID NO: 1963739 - DNA, 25 bp, Homo sapien
gctgtattaaaccctgcctcagaaa

SEQ ID NO: 1963740 - DNA, 25 bp, Homo sapien
catgctgtattaaaccctgcctcag

SEQ ID NO: 1963741 - DNA, 25 bp, Homo sapien
tgctgtattaaaccctgcctcagaa

SEQ ID NO: 1963742 - DNA, 25 bp, Homo sapien
ggcaagatggtcagagaaaacccaa

SEQ ID NO: 1963743 - DNA, 25 bp, Homo sapien
gaaaacccaagtgtgactggagtct

SEQ ID NO: 1963744 - DNA, 25 bp, Homo sapien
tgagctgagtaaggcacagcaagag

SEQ ID NO: 1963745 - DNA, 25 bp, Homo sapien
taggagtgacaacaagtctcccgcc

SEQ ID NO: 1963746 - DNA, 25 bp, Homo sapien
gaaatgccacctccagttgtcctcc

SEQ ID NO: 1963747 - DNA, 25 bp, Homo sapien
gggcctgctccgtcatgtagtggat

SEQ ID NO: 1963748 - DNA, 25 bp, Homo sapien
ccgtcatgtagtggatggcatcctg

SEQ ID NO: 1963749 - DNA, 25 bp, Homo sapien
ctccgtcatgtagtggatggcatcc

SEQ ID NO: 1963750 - DNA, 25 bp, Homo sapien
cctgctccgtcatgtagtggatggc

SEQ ID NO: 1963751 - DNA, 25 bp, Homo sapien
gtgtgcaatagcgagtggccagtcc

SEQ ID NO: 1963752 - DNA, 25 bp, Homo sapien
atagcgagtggccagtccgatcagc

SEQ ID NO: 1963753 - DNA, 25 bp, Homo sapien
gcaatagcgagtggccagtccgatc

SEQ ID NO: 1963754 - DNA, 25 bp, Homo sapien
gtgcaatagcgagtggccagtccga

SEQ ID NO: 1963755 - DNA, 25 bp, Homo sapien
cacgccgagcagtacagacaaggca

SEQ ID NO: 1963756 - DNA, 25 bp, Homo sapien
ctggacctgccgttccctcagccag

SEQ ID NO: 1963757 - DNA, 25 bp, Homo sapien
aggtccgcagaccatgcagtcacag

SEQ ID NO: 1963758 - DNA, 25 bp, Homo sapien
gagtgaggtccgcagaccatgcagt

SEQ ID NO: 1963759 - DNA, 25 bp, Homo sapien
cccgtcctctatgcacagtgcgatg

SEQ ID NO: 1963760 - DNA, 25 bp, Homo sapien
tatgcgatggatggacccgtcctct

SEQ ID NO: 1963761 - DNA, 25 bp, Homo sapien
aatagctggtatcatatcgcagaga

SEQ ID NO: 1963762 - DNA, 25 bp, Homo sapien
cccattctccatcaggagatccaag

SEQ ID NO: 1963763 - DNA, 25 bp, Homo sapien
taaacaaaataaagtagaaatgaga

SEQ ID NO: 1963764 - DNA, 25 bp, Homo sapien
aaacaaaataaagtagaaatgagat

SEQ ID NO: 1963765 - DNA, 25 bp, Homo sapien
tataaacaaaataaagtagaaatga

SEQ ID NO: 1963766 - DNA, 25 bp, Homo sapien
acaaaataaagtagaaatgagattc

SEQ ID NO: 1963767 - DNA, 25 bp, Homo sapien
ccctcatctaaattgggagaggtaa

SEQ ID NO: 1963768 - DNA, 25 bp, Homo sapien
aaccactaccatctactgaggacca

SEQ ID NO: 1963769 - DNA, 25 bp, Homo sapien
aggacttacccacccgaggaatcag

SEQ ID NO: 1963770 - DNA, 25 bp, Homo sapien
ctggagcacatagtagtcctatgaa

SEQ ID NO: 1963771 - DNA, 25 bp, Homo sapien
acgtgcagctgaagtaggtgcgccc

SEQ ID NO: 1963772 - DNA, 25 bp, Homo sapien
tgcagctgaagtaggtgcgcccgta

SEQ ID NO: 1963773 - DNA, 25 bp, Homo sapien
gctgaagtaggtgcgcccgtagcct

SEQ ID NO: 1963774 - DNA, 25 bp, Homo sapien
ggcagacgtgcagctgaagtaggtg

SEQ ID NO: 1963775 - DNA, 25 bp, Homo sapien
ccctggtgatcatggccgtgccgtc

SEQ ID NO: 1963776 - DNA, 25 bp, Homo sapien
cctggtgatcatggccgtgccgtcg

SEQ ID NO: 1963777 - DNA, 25 bp, Homo sapien
gccctggtgatcatggccgtgccgt

SEQ ID NO: 1963778 - DNA, 25 bp, Homo sapien
cgtaatgagacaaccagcaccatat

SEQ ID NO: 1963779 - DNA, 25 bp, Homo sapien
gagacaccacatctctagacgccag

SEQ ID NO: 1963780 - DNA, 25 bp, Homo sapien
tccacgacatccttccgtaatgaga

SEQ ID NO: 1963781 - DNA, 25 bp, Homo sapien
ctccataaacctttcgccttgactg

SEQ ID NO: 1963782 - DNA, 25 bp, Homo sapien
gggaggacagggatcggctccttcg

SEQ ID NO: 1963783 - DNA, 25 bp, Homo sapien
ctgcaggtagacgtgatctttctca

SEQ ID NO: 1963784 - DNA, 25 bp, Homo sapien
gggatcggctccttcgtgacgtcca

SEQ ID NO: 1963785 - DNA, 25 bp, Homo sapien
tagacgtgatctttctcagggccac

SEQ ID NO: 1963786 - DNA, 25 bp, Homo sapien
tagaaaacaatacagtactttcttg

SEQ ID NO: 1963787 - DNA, 25 bp, Homo sapien
acagtactttcttgaaggaaacatc

SEQ ID NO: 1963788 - DNA, 25 bp, Homo sapien
ttttcctgtaagatctaaagagaca

SEQ ID NO: 1963789 - DNA, 25 bp, Homo sapien
ctaaagagacaactgcgaggtgggc

SEQ ID NO: 1963790 - DNA, 25 bp, Homo sapien
ggaaaggaagatttcaggtgaaatg

SEQ ID NO: 1963791 - DNA, 25 bp, Homo sapien
ttcaggtgaaatgtcaaggtgccca

SEQ ID NO: 1963792 - DNA, 25 bp, Homo sapien
gaaatgtcaaggtgcccatgcctcc

SEQ ID NO: 1963793 - DNA, 25 bp, Homo sapien
gtcaaggtgcccatgcctccaccag

SEQ ID NO: 1963794 - DNA, 25 bp, Homo sapien
cgaggcggttggcaccatgtaccga

SEQ ID NO: 1963795 - DNA, 25 bp, Homo sapien
cggttggcaccatgtaccgaggcac

SEQ ID NO: 1963796 - DNA, 25 bp, Homo sapien
gggcacatgcccgaccaaagacaac

SEQ ID NO: 1963797 - DNA, 25 bp, Homo sapien
atgcccgaccaaagacaaccaggtc

SEQ ID NO: 1963798 - DNA, 25 bp, Homo sapien
gcttccatcagcaaatctcaatttg

SEQ ID NO: 1963799 - DNA, 25 bp, Homo sapien
ttctgcatgctgagtcgcagttccg

SEQ ID NO: 1963800 - DNA, 25 bp, Homo sapien
cagttccgatgttcttatgcttcca

SEQ ID NO: 1963801 - DNA, 25 bp, Homo sapien
aagattcatgacagattcttcccca

SEQ ID NO: 1963802 - DNA, 25 bp, Homo sapien
caccatgtttggtgggaatgcttct

SEQ ID NO: 1963803 - DNA, 25 bp, Homo sapien
ggaacgcatttccacgagcagagga

SEQ ID NO: 1963804 - DNA, 25 bp, Homo sapien
tttaaactatctcatggatttgcca

SEQ ID NO: 1963805 - DNA, 25 bp, Homo sapien
agcatctcgtggagcctgggataca

SEQ ID NO: 1963806 - DNA, 25 bp, Homo sapien
tgattgatagcgtgtttaaactcct

SEQ ID NO: 1963807 - DNA, 25 bp, Homo sapien
tcactttcagtcctgccatagcttg

SEQ ID NO: 1963808 - DNA, 25 bp, Homo sapien
taggagtaatcctatcgtccctgct

SEQ ID NO: 1963809 - DNA, 25 bp, Homo sapien
tagcttgtgccaacaaagtcgcttt

SEQ ID NO: 1963810 - DNA, 25 bp, Homo sapien
gaaaatatcaagaatacccacaaag

SEQ ID NO: 1963811 - DNA, 25 bp, Homo sapien
tttgagctgaagcatagggtgtcta

SEQ ID NO: 1963812 - DNA, 25 bp, Homo sapien
gcatagggtgtctagaaaactttac

SEQ ID NO: 1963813 - DNA, 25 bp, Homo sapien
gagggacaattttttcaggatcata

SEQ ID NO: 1963814 - DNA, 25 bp, Homo sapien
atcttagacccacacacatcctttc

SEQ ID NO: 1963815 - DNA, 25 bp, Homo sapien
cggaacacggcagcatgattttgca

SEQ ID NO: 1963816 - DNA, 25 bp, Homo sapien
aacacggcagcatgattttgcattg

SEQ ID NO: 1963817 - DNA, 25 bp, Homo sapien
acgcttcccacacggaacacggcag

SEQ ID NO: 1963818 - DNA, 25 bp, Homo sapien
tgcaacacgcttcccacacggaaca

SEQ ID NO: 1963819 - DNA, 25 bp, Homo sapien
ggtcgaacgtcttcaggtgctttag

SEQ ID NO: 1963820 - DNA, 25 bp, Homo sapien
gtcgaacgtcttcaggtgctttagg

SEQ ID NO: 1963821 - DNA, 25 bp, Homo sapien
cggtcgaacgtcttcaggtgcttta

SEQ ID NO: 1963822 - DNA, 25 bp, Homo sapien
ccggtcgaacgtcttcaggtgcttt

SEQ ID NO: 1963823 - DNA, 25 bp, Homo sapien
tccgtagatggtctgcagcgcacac

SEQ ID NO: 1963824 - DNA, 25 bp, Homo sapien
agatggtctgcagcgcacacagcat

SEQ ID NO: 1963825 - DNA, 25 bp, Homo sapien
gcctctgctccgtagatggtctgca

SEQ ID NO: 1963826 - DNA, 25 bp, Homo sapien
tctgctccgtagatggtctgcagcg

SEQ ID NO: 1963827 - DNA, 25 bp, Homo sapien
acttctaaccttggccttctaacag

SEQ ID NO: 1963828 - DNA, 25 bp, Homo sapien
ctgctggcatcagtggatgccgacc

SEQ ID NO: 1963829 - DNA, 25 bp, Homo sapien
aacagcaaagcacattggcttggag

SEQ ID NO: 1963830 - DNA, 25 bp, Homo sapien
agtggatgccgacccaaagcaagga

SEQ ID NO: 1963831 - DNA, 25 bp, Homo sapien
tcgttaataaactggcatttcctcc

SEQ ID NO: 1963832 - DNA, 25 bp, Homo sapien
aataaactggcatttcctccacagg

SEQ ID NO: 1963833 - DNA, 25 bp, Homo sapien
aactggcatttcctccacagggcag

SEQ ID NO: 1963834 - DNA, 25 bp, Homo sapien
taaactggcatttcctccacagggc

SEQ ID NO: 1963835 - DNA, 25 bp, Homo sapien
aaacaccatcacgtttcttattact

SEQ ID NO: 1963836 - DNA, 25 bp, Homo sapien
ggccagaaacaccatcacgtttctt

SEQ ID NO: 1963837 - DNA, 25 bp, Homo sapien
tgaggccagaaacaccatcacgttt

SEQ ID NO: 1963838 - DNA, 25 bp, Homo sapien
cagaaacaccatcacgtttcttatt

SEQ ID NO: 1963839 - DNA, 25 bp, Homo sapien
ttgcccctggatgggcttggagtaa

SEQ ID NO: 1963840 - DNA, 25 bp, Homo sapien
agtaatcgtactcatcaatccgcac

SEQ ID NO: 1963841 - DNA, 25 bp, Homo sapien
ttggagtaatcgtactcatcaatcc

SEQ ID NO: 1963842 - DNA, 25 bp, Homo sapien
ttcccagtgccaacgtccacatagg

SEQ ID NO: 1963843 - DNA, 25 bp, Homo sapien
gctgtggtgagaacgagctccacac

SEQ ID NO: 1963844 - DNA, 25 bp, Homo sapien
tggtgagaacgagctccacactgac

SEQ ID NO: 1963845 - DNA, 25 bp, Homo sapien
tgtggtgagaacgagctccacactg

SEQ ID NO: 1963846 - DNA, 25 bp, Homo sapien
gtggtgagaacgagctccacactga

SEQ ID NO: 1963847 - DNA, 25 bp, Homo sapien
gagcaacccttccttaaggctcctc

SEQ ID NO: 1963848 - DNA, 25 bp, Homo sapien
gcaacccttccttaaggctcctctg

SEQ ID NO: 1963849 - DNA, 25 bp, Homo sapien
cttccttaaggctcctctgaaccac

SEQ ID NO: 1963850 - DNA, 25 bp, Homo sapien
cacggagcaacccttccttaaggct

SEQ ID NO: 1963851 - DNA, 25 bp, Homo sapien
acacaggaaaaggtaggcacatata

SEQ ID NO: 1963852 - DNA, 25 bp, Homo sapien
ttagtgagctcttatttcaatctct

SEQ ID NO: 1963853 - DNA, 25 bp, Homo sapien
cacaggaaaaggtaggcacatatac

SEQ ID NO: 1963854 - DNA, 25 bp, Homo sapien
tggttagtgagctcttatttcaatc

SEQ ID NO: 1963855 - DNA, 25 bp, Homo sapien
cgatcacgggtctatattccagagt

SEQ ID NO: 1963856 - DNA, 25 bp, Homo sapien
gatcacgggtctatattccagagtg

SEQ ID NO: 1963857 - DNA, 25 bp, Homo sapien
gtcgatcacgggtctatattccaga

SEQ ID NO: 1963858 - DNA, 25 bp, Homo sapien
tcacgggtctatattccagagtgac

SEQ ID NO: 1963859 - DNA, 25 bp, Homo sapien
gacacatgcatgagctattatacat

SEQ ID NO: 1963860 - DNA, 25 bp, Homo sapien
cacatgcatgagctattatacataa

SEQ ID NO: 1963861 - DNA, 25 bp, Homo sapien
catgcatgagctattatacataatt

SEQ ID NO: 1963862 - DNA, 25 bp, Homo sapien
tgcatgagctattatacataattac

SEQ ID NO: 1963863 - DNA, 25 bp, Homo sapien
actactgcaccgatcctgtctcaaa

SEQ ID NO: 1963864 - DNA, 25 bp, Homo sapien
attgtactactgcaccgatcctgtc

SEQ ID NO: 1963865 - DNA, 25 bp, Homo sapien
aagtcacaacagtaaaatatttcaa

SEQ ID NO: 1963866 - DNA, 25 bp, Homo sapien
taaagtcacaacagtaaaatatttc

SEQ ID NO: 1963867 - DNA, 25 bp, Homo sapien
aaagcatgatgtcaaacctgcacat

SEQ ID NO: 1963868 - DNA, 25 bp, Homo sapien
agcatgatgtcaaacctgcacattt

SEQ ID NO: 1963869 - DNA, 25 bp, Homo sapien
aagcatgatgtcaaacctgcacatt

SEQ ID NO: 1963870 - DNA, 25 bp, Homo sapien
gaagtgctgcgttctggcgatgctc

SEQ ID NO: 1963871 - DNA, 25 bp, Homo sapien
ggttgcaaacatatttaggcgtgaa

SEQ ID NO: 1963872 - DNA, 25 bp, Homo sapien
tgaagaacttggttgcaaacatatt

SEQ ID NO: 1963873 - DNA, 25 bp, Homo sapien
ggcgatgctctgatgacacacgaag

SEQ ID NO: 1963874 - DNA, 25 bp, Homo sapien
ggtgatcctgttacacaggttagag

SEQ ID NO: 1963875 - DNA, 25 bp, Homo sapien
cagcattggggtggcaatttgacaa

SEQ ID NO: 1963876 - DNA, 25 bp, Homo sapien
ggtccctccaggtgatcctgttaca

SEQ ID NO: 1963877 - DNA, 25 bp, Homo sapien
caggttagagaaccacagcattggg

SEQ ID NO: 1963878 - DNA, 25 bp, Homo sapien
ggacggcgagggtctgaatatctta

SEQ ID NO: 1963879 - DNA, 25 bp, Homo sapien
ggacggcgagggtctgaatatctca

SEQ ID NO: 1963880 - DNA, 25 bp, Homo sapien
tactgcacgggactgaatattttag

SEQ ID NO: 1963881 - DNA, 25 bp, Homo sapien
gtggacaatctatcagctaggtgct

SEQ ID NO: 1963882 - DNA, 25 bp, Homo sapien
aaatgcgtggtctccgggatggtca

SEQ ID NO: 1963883 - DNA, 25 bp, Homo sapien
gcctggcattatcaccacttccggg

SEQ ID NO: 1963884 - DNA, 25 bp, Homo sapien
gctaagttgccaggcaacgccctgg

SEQ ID NO: 1963885 - DNA, 25 bp, Homo sapien
agccaatcccctcgcagctaagttg

SEQ ID NO: 1963886 - DNA, 25 bp, Homo sapien
gccaaggcacgcggctgggctgagg

SEQ ID NO: 1963887 - DNA, 25 bp, Homo sapien
gggccaaggcacgcggctgggctga

SEQ ID NO: 1963888 - DNA, 25 bp, Homo sapien
aaggcacgcggctgggctgaggcgc

SEQ ID NO: 1963889 - DNA, 25 bp, Homo sapien
caaggcacgcggctgggctgaggcg

SEQ ID NO: 1963890 - DNA, 25 bp, Homo sapien
ctgcagcaggcccagggccggcccc

SEQ ID NO: 1963891 - DNA, 25 bp, Homo sapien
cagcaggcccagggccggccccagg

SEQ ID NO: 1963892 - DNA, 25 bp, Homo sapien
cggggcggtaagagtaggcggccat

SEQ ID NO: 1963893 - DNA, 25 bp, Homo sapien
gcaggcccagggccggccccagggc

SEQ ID NO: 1963894 - DNA, 25 bp, Homo sapien
ctctggaaaacgttccacaggaagc

SEQ ID NO: 1963895 - DNA, 25 bp, Homo sapien
gaaaacgttccacaggaagctctgg

SEQ ID NO: 1963896 - DNA, 25 bp, Homo sapien
cgttccacaggaagctctggtccgg

SEQ ID NO: 1963897 - DNA, 25 bp, Homo sapien
acaggaagctctggtccggcagcgc

SEQ ID NO: 1963898 - DNA, 25 bp, Homo sapien
cggaggaggccgcagtagaaccggc

SEQ ID NO: 1963899 - DNA, 25 bp, Homo sapien
gaggaggccgcagtagaaccggcag

SEQ ID NO: 1963900 - DNA, 25 bp, Homo sapien
ggaggccgcagtagaaccggcaggg

SEQ ID NO: 1963901 - DNA, 25 bp, Homo sapien
ggtgcccgggcggtgccaggccgca

SEQ ID NO: 1963902 - DNA, 25 bp, Homo sapien
tatcactccactcctgtctttatcg

SEQ ID NO: 1963903 - DNA, 25 bp, Homo sapien
tgaagctcggtgtctgatatcactc

SEQ ID NO: 1963904 - DNA, 25 bp, Homo sapien
agcttgctgaagctcggtgtctgat

SEQ ID NO: 1963905 - DNA, 25 bp, Homo sapien
tgctgaagctcggtgtctgatatca

SEQ ID NO: 1963906 - DNA, 25 bp, Homo sapien
gaacgtaattccagggagctcacaa

SEQ ID NO: 1963907 - DNA, 25 bp, Homo sapien
taaatggcacggatctggaaaagca

SEQ ID NO: 1963908 - DNA, 25 bp, Homo sapien
tcccactaataacaagaagcctttc

SEQ ID NO: 1963909 - DNA, 25 bp, Homo sapien
taaaatgtgtccaatgatagcggag

SEQ ID NO: 1963910 - DNA, 25 bp, Homo sapien
tggatttgggttaagtgcctagccc

SEQ ID NO: 1963911 - DNA, 25 bp, Homo sapien
tttaacaggtgatgcacagagccat

SEQ ID NO: 1963912 - DNA, 25 bp, Homo sapien
tgggcaggctaccatactaatgcgg

SEQ ID NO: 1963913 - DNA, 25 bp, Homo sapien
gcctagcccagcgtgtgagtgttga

SEQ ID NO: 1963914 - DNA, 25 bp, Homo sapien
tggggcaggactaactccctctggt

SEQ ID NO: 1963915 - DNA, 25 bp, Homo sapien
ggccctgcactcacattagagaaga

SEQ ID NO: 1963916 - DNA, 25 bp, Homo sapien
cattagagaagagggctttgcatcc

SEQ ID NO: 1963917 - DNA, 25 bp, Homo sapien
ggagcaccgacagcaatgcccactg

SEQ ID NO: 1963918 - DNA, 25 bp, Homo sapien
aaagggagcaccgacagcaatgccc

SEQ ID NO: 1963919 - DNA, 25 bp, Homo sapien
cggaaagggagcaccgacagcaatg

SEQ ID NO: 1963920 - DNA, 25 bp, Homo sapien
cccggaaagggagcaccgacagcaa

SEQ ID NO: 1963921 - DNA, 25 bp, Homo sapien
gaaggaatcagtgtatgggccacaa

SEQ ID NO: 1963922 - DNA, 25 bp, Homo sapien
agagggaactatgaaaacgtgagcc

SEQ ID NO: 1963923 - DNA, 25 bp, Homo sapien
cacagacctccctgagagcagtaat

SEQ ID NO: 1963924 - DNA, 25 bp, Homo sapien
cacaacctagtagtgagagggaact

SEQ ID NO: 1963925 - DNA, 25 bp, Homo sapien
tggcacatgaatggtgtgttctaaa

SEQ ID NO: 1963926 - DNA, 25 bp, Homo sapien
gcacatgaatggtgtgttctaaata

SEQ ID NO: 1963927 - DNA, 25 bp, Homo sapien
gaacaggagcttaatgtgggcaggt

SEQ ID NO: 1963928 - DNA, 25 bp, Homo sapien
caggagcttaatgtgggcaggtatt

SEQ ID NO: 1963929 - DNA, 25 bp, Homo sapien
ttggcgcgaaacaaccgcaagccac

SEQ ID NO: 1963930 - DNA, 25 bp, Homo sapien
aggaaagcttgcatccctagcccct

SEQ ID NO: 1963931 - DNA, 25 bp, Homo sapien
gaactcaggaaagcttgcatcccta

SEQ ID NO: 1963932 - DNA, 25 bp, Homo sapien
aggtggcccacaccccgtgagacag

SEQ ID NO: 1963933 - DNA, 25 bp, Homo sapien
cacccatggcaagaaatgtcagtct

SEQ ID NO: 1963934 - DNA, 25 bp, Homo sapien
cccctttgaaagtcactgtcatgga

SEQ ID NO: 1963935 - DNA, 25 bp, Homo sapien
gatgcggctgcgtcatactcttagg

SEQ ID NO: 1963936 - DNA, 25 bp, Homo sapien
caccagcgggtttgcctgagctgac

SEQ ID NO: 1963937 - DNA, 25 bp, Homo sapien
gtcgcccctcaggtggatgaacaca

SEQ ID NO: 1963938 - DNA, 25 bp, Homo sapien
cctgctggtcgcccctcaggtggat

SEQ ID NO: 1963939 - DNA, 25 bp, Homo sapien
tgcatcctcctctcaacccgctgag

SEQ ID NO: 1963940 - DNA, 25 bp, Homo sapien
gctggtcgcccctcaggtggatgaa

SEQ ID NO: 1963941 - DNA, 25 bp, Homo sapien
tgtccggctacgtacaatggaactt

SEQ ID NO: 1963942 - DNA, 25 bp, Homo sapien
cggctacgtacaatggaactttaag

SEQ ID NO: 1963943 - DNA, 25 bp, Homo sapien
tttattgtccggctacgtacaatgg

SEQ ID NO: 1963944 - DNA, 25 bp, Homo sapien
ccagattttattgtccggctacgta

SEQ ID NO: 1963945 - DNA, 25 bp, Homo sapien
catctctgacagtatcgcgggcgtt

SEQ ID NO: 1963946 - DNA, 25 bp, Homo sapien
gacattatcgcaggcgtttgcagct

SEQ ID NO: 1963947 - DNA, 25 bp, Homo sapien
tccatctctgacagtatcgtgggtg

SEQ ID NO: 1963948 - DNA, 25 bp, Homo sapien
gttcccgtcttcttgatcaggtctt

SEQ ID NO: 1963949 - DNA, 25 bp, Homo sapien
tactctgccggttatctggagaaat

SEQ ID NO: 1963950 - DNA, 25 bp, Homo sapien
tttactctgccggttatctggagaa

SEQ ID NO: 1963951 - DNA, 25 bp, Homo sapien
tgctttaatttactctgccggttat

SEQ ID NO: 1963952 - DNA, 25 bp, Homo sapien
ttaatttactctgccggttatctgg

SEQ ID NO: 1963953 - DNA, 25 bp, Homo sapien
taaccacatggtagatccacagtga

SEQ ID NO: 1963954 - DNA, 25 bp, Homo sapien
cgagcatctgttaagctgaatagag

SEQ ID NO: 1963955 - DNA, 25 bp, Homo sapien
gtgataatctgcaggattacctttc

SEQ ID NO: 1963956 - DNA, 25 bp, Homo sapien
acagcagcactcgacgagcatctgt

SEQ ID NO: 1963957 - DNA, 25 bp, Homo sapien
taagctgaatagagtgataatctgc

SEQ ID NO: 1963958 - DNA, 25 bp, Homo sapien
cagtcactggattaaagggagtcca

SEQ ID NO: 1963959 - DNA, 25 bp, Homo sapien
tgacagtcactggattaaagggagt

SEQ ID NO: 1963960 - DNA, 25 bp, Homo sapien
cctgacagtcactggattaaaggga

SEQ ID NO: 1963961 - DNA, 25 bp, Homo sapien
cactggattaaagggagtccacgtg

SEQ ID NO: 1963962 - DNA, 25 bp, Homo sapien
ggtcggatacaaagcagcccaggtt

SEQ ID NO: 1963963 - DNA, 25 bp, Homo sapien
aagggccgacgctcatctaagtgga

SEQ ID NO: 1963964 - DNA, 25 bp, Homo sapien
gaatagagcaaacatacacggagag

SEQ ID NO: 1963965 - DNA, 25 bp, Homo sapien
tgatacggacccacagacaaaggaa

SEQ ID NO: 1963966 - DNA, 25 bp, Homo sapien
tagcaacatatgcacgaccagcagg

SEQ ID NO: 1963967 - DNA, 25 bp, Homo sapien
taaccagggactgggcaatgcatgc

SEQ ID NO: 1963968 - DNA, 25 bp, Homo sapien
tctgggaaacctcgagacacaatgc

SEQ ID NO: 1963969 - DNA, 25 bp, Homo sapien
gacgatgctgttgcgtgcaggaccc

SEQ ID NO: 1963970 - DNA, 25 bp, Homo sapien
tgccagtccgtgatgtacttccaca

SEQ ID NO: 1963971 - DNA, 25 bp, Homo sapien
tgtcccggtcgtacgtgcggaagac

SEQ ID NO: 1963972 - DNA, 25 bp, Homo sapien
cgccggccttgttctcacggtcaaa

SEQ ID NO: 1963973 - DNA, 25 bp, Homo sapien
gctcgttcttatcgatcatcccgga

SEQ ID NO: 1963974 - DNA, 25 bp, Homo sapien
caacggctccaaggttccaaaatga

SEQ ID NO: 1963975 - DNA, 25 bp, Homo sapien
cgctacacaagccagagtgagtgag

SEQ ID NO: 1963976 - DNA, 25 bp, Homo sapien
tcaacggctccaaggttccaaaatg

SEQ ID NO: 1963977 - DNA, 25 bp, Homo sapien
caaaatgaaacacgctacacaagcc

SEQ ID NO: 1963978 - DNA, 25 bp, Homo sapien
gaccgatggtcactggcatggacaa

SEQ ID NO: 1963979 - DNA, 25 bp, Homo sapien
tgaaatgctgtgaacgagccaagcg

SEQ ID NO: 1963980 - DNA, 25 bp, Homo sapien
taaacggcacgtgctgagtcagctg

SEQ ID NO: 1963981 - DNA, 25 bp, Homo sapien
gagatcaagaaccaaacgcaggagg

SEQ ID NO: 1963982 - DNA, 25 bp, Homo sapien
gaatgattcgctgccctgggttgcc

SEQ ID NO: 1963983 - DNA, 25 bp, Homo sapien
cagtgcatggagtgaccccttgaga

SEQ ID NO: 1963984 - DNA, 25 bp, Homo sapien
tgtaatgagctgacatccccagtgc

SEQ ID NO: 1963985 - DNA, 25 bp, Homo sapien
tgcaagctgaaaagacaggacctcc

SEQ ID NO: 1963986 - DNA, 25 bp, Homo sapien
cccgtccctgcctgtcaaactttcg

SEQ ID NO: 1963987 - DNA, 25 bp, Homo sapien
aatgaggatgtcgtggaactggtca

SEQ ID NO: 1963988 - DNA, 25 bp, Homo sapien
tgaagtcgtcgaaggcaatctgccc

SEQ ID NO: 1963989 - DNA, 25 bp, Homo sapien
gacgatgcagccctggatgaagtcg

SEQ ID NO: 1963990 - DNA, 25 bp, Homo sapien
ccttgaggaacctgggtagagacct

SEQ ID NO: 1963991 - DNA, 25 bp, Homo sapien
tcaggtgcatcacgctggcaagcaa

SEQ ID NO: 1963992 - DNA, 25 bp, Homo sapien
tagcgtttagggtcactctccaagg

SEQ ID NO: 1963993 - DNA, 25 bp, Homo sapien
gacacagaacgagattttacacggc

SEQ ID NO: 1963994 - DNA, 25 bp, Homo sapien
cctgaagattcaggccagcatggtg

SEQ ID NO: 1963995 - DNA, 25 bp, Homo sapien
gattcaggccagcatggtgactctc

SEQ ID NO: 1963996 - DNA, 25 bp, Homo sapien
tcaggccagcatggtgactctcgcc

SEQ ID NO: 1963997 - DNA, 25 bp, Homo sapien
ggggtccgaggcgtgaggatcgctt

SEQ ID NO: 1963998 - DNA, 25 bp, Homo sapien
tgcgaagaacgaagaacacagggct

SEQ ID NO: 1963999 - DNA, 25 bp, Homo sapien
aaggagcaaggtgcactgggacaaa

SEQ ID NO: 1964000 - DNA, 25 bp, Homo sapien
aatctcgatagtaaatggaaggagc

SEQ ID NO: 1964001 - DNA, 25 bp, Homo sapien
ggagctgttcacacggacggtggga

SEQ ID NO: 1964002 - DNA, 25 bp, Homo sapien
ttcgtacgacacctgaatccagccg

SEQ ID NO: 1964003 - DNA, 25 bp, Homo sapien
catggacaggtactgttcgtacgac

SEQ ID NO: 1964004 - DNA, 25 bp, Homo sapien
aatccagccgtcctgatccgtgtcg

SEQ ID NO: 1964005 - DNA, 25 bp, Homo sapien
cgtaacgtctgaatatatccgtcaa

SEQ ID NO: 1964006 - DNA, 25 bp, Homo sapien
tccatgttgtgctgctcttcacgag

SEQ ID NO: 1964007 - DNA, 25 bp, Homo sapien
tgtctgcattagaacgatacagcta

SEQ ID NO: 1964008 - DNA, 25 bp, Homo sapien
gatacagctactattacagttgcaa

SEQ ID NO: 1964009 - DNA, 25 bp, Homo sapien
tccccacgtgacaaaatctaaagga

SEQ ID NO: 1964010 - DNA, 25 bp, Homo sapien
catttgcactatagaaccagagaca

SEQ ID NO: 1964011 - DNA, 25 bp, Homo sapien
tcagcggcttttgttcttgtgagtc

SEQ ID NO: 1964012 - DNA, 25 bp, Homo sapien
ccacgtgcagagtacctgagggtac

SEQ ID NO: 1964013 - DNA, 25 bp, Homo sapien
tctggaattttcagcggcttttgtt

SEQ ID NO: 1964014 - DNA, 25 bp, Homo sapien
cagccacgtgcagagtacctgaggg

SEQ ID NO: 1964015 - DNA, 25 bp, Homo sapien
cactgactgcagatgtcggtaggga

SEQ ID NO: 1964016 - DNA, 25 bp, Homo sapien
ctttaaaaacctatgggatatagca

SEQ ID NO: 1964017 - DNA, 25 bp, Homo sapien
tatgctcctgggtcaacaaagagat

SEQ ID NO: 1964018 - DNA, 25 bp, Homo sapien
tgtttggcctggttcctagcgagcc

SEQ ID NO: 1964019 - DNA, 25 bp, Homo sapien
gagcccctaccctcataggtgatta

SEQ ID NO: 1964020 - DNA, 25 bp, Homo sapien
gctgtgaacataattgcgtccaccc

SEQ ID NO: 1964021 - DNA, 25 bp, Homo sapien
aaggctggagccctaatcctgtaga

SEQ ID NO: 1964022 - DNA, 25 bp, Homo sapien
gactgtattggagatagagccccta

SEQ ID NO: 1964023 - DNA, 25 bp, Homo sapien
tcttctcacagaatcttgattttcc

SEQ ID NO: 1964024 - DNA, 25 bp, Homo sapien
tgtgtgcagtaaccatcccgtgcca

SEQ ID NO: 1964025 - DNA, 25 bp, Homo sapien
tgagccctcacaaacgttctgcaga

SEQ ID NO: 1964026 - DNA, 25 bp, Homo sapien
agaatcttgattttccttgcaatgg

SEQ ID NO: 1964027 - DNA, 25 bp, Homo sapien
cgggagaccggcgtcctgaggagga

SEQ ID NO: 1964028 - DNA, 25 bp, Homo sapien
gcgccgtggcgggagaccggcgtcc

SEQ ID NO: 1964029 - DNA, 25 bp, Homo sapien
agaccggcgtcctgaggaggaagcc

SEQ ID NO: 1964030 - DNA, 25 bp, Homo sapien
ctcggtgtcaggcgggtcccggcct

SEQ ID NO: 1964031 - DNA, 25 bp, Homo sapien
ttccggcccgcgtacgtgcactccc

SEQ ID NO: 1964032 - DNA, 25 bp, Homo sapien
cctccgcttccggcccgcgtacgtg

SEQ ID NO: 1964033 - DNA, 25 bp, Homo sapien
cgcttccggcccgcgtacgtgcact

SEQ ID NO: 1964034 - DNA, 25 bp, Homo sapien
cgtacgtgcactcccccggcgggat

SEQ ID NO: 1964035 - DNA, 25 bp, Homo sapien
gacaaagggcttactactcacggca

SEQ ID NO: 1964036 - DNA, 25 bp, Homo sapien
tgagcaaaaggcgtaaacacggttc

SEQ ID NO: 1964037 - DNA, 25 bp, Homo sapien
tattgaaattacaaacgcccgtgct

SEQ ID NO: 1964038 - DNA, 25 bp, Homo sapien
gacagagctttatacagggtgaggc

SEQ ID NO: 1964039 - DNA, 25 bp, Homo sapien
gacaaaatttagggcacacacagac

SEQ ID NO: 1964040 - DNA, 25 bp, Homo sapien
tggcatgctccacagcctttaccag

SEQ ID NO: 1964041 - DNA, 25 bp, Homo sapien
aatttagggcacacacagacccatc

SEQ ID NO: 1964042 - DNA, 25 bp, Homo sapien
ccagccaccccttccagacaaaatt

SEQ ID NO: 1964043 - DNA, 25 bp, Homo sapien
ccaagatgtaaataggcgggagaat

SEQ ID NO: 1964044 - DNA, 25 bp, Homo sapien
cctgtcagtgaaggacacccaagac

SEQ ID NO: 1964045 - DNA, 25 bp, Homo sapien
ggataccaggcccttattgagtaca

SEQ ID NO: 1964046 - DNA, 25 bp, Homo sapien
tactgaagctgctagccaagatgta

SEQ ID NO: 1964047 - DNA, 25 bp, Homo sapien
gcgggacaggcacatttctccacct

SEQ ID NO: 1964048 - DNA, 25 bp, Homo sapien
ttctccacctctccactacggatcc

SEQ ID NO: 1964049 - DNA, 25 bp, Homo sapien
acggcccccagctgcgggacaggca

SEQ ID NO: 1964050 - DNA, 25 bp, Homo sapien
ctgcgggacaggcacatttctccac

SEQ ID NO: 1964051 - DNA, 25 bp, Homo sapien
ccggaggtaactgacactgaggcgc

SEQ ID NO: 1964052 - DNA, 25 bp, Homo sapien
cactgaggcgcaggacagaaagctt

SEQ ID NO: 1964053 - DNA, 25 bp, Homo sapien
cagaaagcttgtccagcttggagat

SEQ ID NO: 1964054 - DNA, 25 bp, Homo sapien
atgtcaggcgggaacggcagcaggc

SEQ ID NO: 1964055 - DNA, 25 bp, Homo sapien
caagtgaacaggtgggagcaggtga

SEQ ID NO: 1964056 - DNA, 25 bp, Homo sapien
cctgcacaggatggccatccagtgc

SEQ ID NO: 1964057 - DNA, 25 bp, Homo sapien
atccagtgccattgccccggcttgg

SEQ ID NO: 1964058 - DNA, 25 bp, Homo sapien
actcgctggcagtttaagaagagcc

SEQ ID NO: 1964059 - DNA, 25 bp, Homo sapien
aggatgggaagctcactcgctggca

SEQ ID NO: 1964060 - DNA, 25 bp, Homo sapien
tgactgcccgggtggactccgtgtc

SEQ ID NO: 1964061 - DNA, 25 bp, Homo sapien
ctgactgcccgggtggactccgtgt

SEQ ID NO: 1964062 - DNA, 25 bp, Homo sapien
tgtatctctctcctctgacgtttca

SEQ ID NO: 1964063 - DNA, 25 bp, Homo sapien
tggcaattccttccatgtatctctc

SEQ ID NO: 1964064 - DNA, 25 bp, Homo sapien
cttttcttttggcaattccttccat

SEQ ID NO: 1964065 - DNA, 25 bp, Homo sapien
caattccttccatgtatctctctcc

SEQ ID NO: 1964066 - DNA, 25 bp, Homo sapien
taatagctcctctttatattcctaa

SEQ ID NO: 1964067 - DNA, 25 bp, Homo sapien
taatggtcctacgacattcaggttt

SEQ ID NO: 1964068 - DNA, 25 bp, Homo sapien
cctagattttctctgtgtgaagatg

SEQ ID NO: 1964069 - DNA, 25 bp, Homo sapien
gtgagtgtacacacattttacgtac

SEQ ID NO: 1964070 - DNA, 25 bp, Homo sapien
tgacgggtgaagacaagagacccag

SEQ ID NO: 1964071 - DNA, 25 bp, Homo sapien
aaggcctcctgacgggtgaagacaa

SEQ ID NO: 1964072 - DNA, 25 bp, Homo sapien
tacaggtgtgctgagcctcggatgc

SEQ ID NO: 1964073 - DNA, 25 bp, Homo sapien
tggccttcaaaagctacaggtgtgc

SEQ ID NO: 1964074 - DNA, 25 bp, Homo sapien
ctgggcatacaacagagaaggaggg

SEQ ID NO: 1964075 - DNA, 25 bp, Homo sapien
aacccagcaacacacgagttaagca

SEQ ID NO: 1964076 - DNA, 25 bp, Homo sapien
gaacccagcaacacacgagttaagc

SEQ ID NO: 1964077 - DNA, 25 bp, Homo sapien
agaacccagcaacacacgagttaag

SEQ ID NO: 1964078 - DNA, 25 bp, Homo sapien
cactacaggcggtcagtggctatca

SEQ ID NO: 1964079 - DNA, 25 bp, Homo sapien
tcaacagatgcagaccgaactgagt

SEQ ID NO: 1964080 - DNA, 25 bp, Homo sapien
gcctcctgaacgacatgggccttcg

SEQ ID NO: 1964081 - DNA, 25 bp, Homo sapien
gaactgagtacgtctcagggcctgg

SEQ ID NO: 1964082 - DNA, 25 bp, Homo sapien
aggtttagaggaagcactcgggaca

SEQ ID NO: 1964083 - DNA, 25 bp, Homo sapien
ccagagcgtgggacaagcacagctc

SEQ ID NO: 1964084 - DNA, 25 bp, Homo sapien
tctgaacaggtgtgttctgcaccag

SEQ ID NO: 1964085 - DNA, 25 bp, Homo sapien
tctgcaccaggatgcacagaatttg

SEQ ID NO: 1964086 - DNA, 25 bp, Homo sapien
ccggccgcaggctgccgtgagctct

SEQ ID NO: 1964087 - DNA, 25 bp, Homo sapien
aggctgccgtgagctctgctcctgc

SEQ ID NO: 1964088 - DNA, 25 bp, Homo sapien
ctgcaagaggacagctgtctccggg

SEQ ID NO: 1964089 - DNA, 25 bp, Homo sapien
caagaggacagctgtctccgggcga

SEQ ID NO: 1964090 - DNA, 25 bp, Homo sapien
gcagccttccctccagcacggcaga

SEQ ID NO: 1964091 - DNA, 25 bp, Homo sapien
agccttccctccagcacggcagacc

SEQ ID NO: 1964092 - DNA, 25 bp, Homo sapien
cagcagccttccctccagcacggca

SEQ ID NO: 1964093 - DNA, 25 bp, Homo sapien
ctccaacagcagccttccctccagc

SEQ ID NO: 1964094 - DNA, 25 bp, Homo sapien
tgggccccagtgaaagacggcgctt

SEQ ID NO: 1964095 - DNA, 25 bp, Homo sapien
tcgcggtaaggcctgatgaaatgac

SEQ ID NO: 1964096 - DNA, 25 bp, Homo sapien
aagaggcacctacaccgagaaggaa

SEQ ID NO: 1964097 - DNA, 25 bp, Homo sapien
gaagagtcgacgtgaaatgagccag

SEQ ID NO: 1964098 - DNA, 25 bp, Homo sapien
acccaggcctggcggcagaaggccc

SEQ ID NO: 1964099 - DNA, 25 bp, Homo sapien
tccggagcccgcaggacccaggcct

SEQ ID NO: 1964100 - DNA, 25 bp, Homo sapien
gcctggcggcagaaggccctgccag

SEQ ID NO: 1964101 - DNA, 25 bp, Homo sapien
ggcctccggagcccgcaggacccag

SEQ ID NO: 1964102 - DNA, 25 bp, Homo sapien
gcaggcttgactctcttccacggag

SEQ ID NO: 1964103 - DNA, 25 bp, Homo sapien
ttatagatcccacaaacagtaaacg

SEQ ID NO: 1964104 - DNA, 25 bp, Homo sapien
gagcagctccgacatttgaaaacag

SEQ ID NO: 1964105 - DNA, 25 bp, Homo sapien
gggagctgaataactggctgtttat

SEQ ID NO: 1964106 - DNA, 25 bp, Homo sapien
tacggtttggcatcagtaaagaagc

SEQ ID NO: 1964107 - DNA, 25 bp, Homo sapien
cataggctgctccacggtgacaaaa

SEQ ID NO: 1964108 - DNA, 25 bp, Homo sapien
caaaataggccaatgctttatacgg

SEQ ID NO: 1964109 - DNA, 25 bp, Homo sapien
gctgctccacggtgacaaaataggc

SEQ ID NO: 1964110 - DNA, 25 bp, Homo sapien
gtgtgccgcccacttggttctggat

SEQ ID NO: 1964111 - DNA, 25 bp, Homo sapien
tgcaggcgccaggtgatgacttcac

SEQ ID NO: 1964112 - DNA, 25 bp, Homo sapien
cacttggttctggatacagaggtgc

SEQ ID NO: 1964113 - DNA, 25 bp, Homo sapien
caggcgccaggtgatgacttcacag

SEQ ID NO: 1964114 - DNA, 25 bp, Homo sapien
gaaatgcagacaagaggcggctcac

SEQ ID NO: 1964115 - DNA, 25 bp, Homo sapien
tatgttcagagtagctagctcacac

SEQ ID NO: 1964116 - DNA, 25 bp, Homo sapien
tacctttttcgggtggctgtagagc

SEQ ID NO: 1964117 - DNA, 25 bp, Homo sapien
cccacatggagtgatttggcctatg

SEQ ID NO: 1964118 - DNA, 25 bp, Homo sapien
acagacattcggagactttaactcc

SEQ ID NO: 1964119 - DNA, 25 bp, Homo sapien
aacacagacattcggagactttaac

SEQ ID NO: 1964120 - DNA, 25 bp, Homo sapien
cagacattcggagactttaactccc

SEQ ID NO: 1964121 - DNA, 25 bp, Homo sapien
cacagacattcggagactttaactc

SEQ ID NO: 1964122 - DNA, 25 bp, Homo sapien
gcacaggctaccaggtggaatatct

SEQ ID NO: 1964123 - DNA, 25 bp, Homo sapien
gcctctgagtcgcaggatctgtcca

SEQ ID NO: 1964124 - DNA, 25 bp, Homo sapien
tctcacatcccacacgaggtagaag

SEQ ID NO: 1964125 - DNA, 25 bp, Homo sapien
ccatcaccggtgaggatgcgcgaaa

SEQ ID NO: 1964126 - DNA, 25 bp, Homo sapien
cccagatagtccacgatcgttgctg

SEQ ID NO: 1964127 - DNA, 25 bp, Homo sapien
ccacgatcgttgctgatgcataaaa

SEQ ID NO: 1964128 - DNA, 25 bp, Homo sapien
aaatatcgtcccttctgcactcacg

SEQ ID NO: 1964129 - DNA, 25 bp, Homo sapien
cgaccagagcaaagccattaagaga

SEQ ID NO: 1964130 - DNA, 25 bp, Homo sapien
tccactactctccacacgtgtaaag

SEQ ID NO: 1964131 - DNA, 25 bp, Homo sapien
cagctccatgggatctgagcacaga

SEQ ID NO: 1964132 - DNA, 25 bp, Homo sapien
gtaaaggaagcatcccacggcagct

SEQ ID NO: 1964133 - DNA, 25 bp, Homo sapien
gtggccacccagacgctgatgccat

SEQ ID NO: 1964134 - DNA, 25 bp, Homo sapien
tctgggtgcatctggagaactcagg

SEQ ID NO: 1964135 - DNA, 25 bp, Homo sapien
tctgacctggaatcaaagctgctct

SEQ ID NO: 1964136 - DNA, 25 bp, Homo sapien
gaactcagggcagctcaagatgcag

SEQ ID NO: 1964137 - DNA, 25 bp, Homo sapien
ggtgagaccatcgagccatggctaa

SEQ ID NO: 1964138 - DNA, 25 bp, Homo sapien
tcctgaaccataagaagaaccatcg

SEQ ID NO: 1964139 - DNA, 25 bp, Homo sapien
ttcagcggtgccagcgtatgtgcgc

SEQ ID NO: 1964140 - DNA, 25 bp, Homo sapien
tcttccagttaaggcgcgaacgctc

SEQ ID NO: 1964141 - DNA, 25 bp, Homo sapien
ttagtcgctgcggtggataggccac

SEQ ID NO: 1964142 - DNA, 25 bp, Homo sapien
gtgggcgttgccgacgaggaggccg

SEQ ID NO: 1964143 - DNA, 25 bp, Homo sapien
gaggccgctgggtccgcaagggcct

SEQ ID NO: 1964144 - DNA, 25 bp, Homo sapien
catcgcgaccgtgggggcacctgca

SEQ ID NO: 1964145 - DNA, 25 bp, Homo sapien
acacggcatccgctccgtggctgaa

SEQ ID NO: 1964146 - DNA, 25 bp, Homo sapien
aggccacagggcatcgccggcaccc

SEQ ID NO: 1964147 - DNA, 25 bp, Homo sapien
gccggcacccgcgaggctgcttctg

SEQ ID NO: 1964148 - DNA, 25 bp, Homo sapien
gctggtactgtgcgcggactccacg

SEQ ID NO: 1964149 - DNA, 25 bp, Homo sapien
actccacgtggagggatgataccca

SEQ ID NO: 1964150 - DNA, 25 bp, Homo sapien
cacgtggatgtagtcataaatgttc

SEQ ID NO: 1964151 - DNA, 25 bp, Homo sapien
tggagctgccggcagaagtcctggc

SEQ ID NO: 1964152 - DNA, 25 bp, Homo sapien
taaatgttctggtgcattacatccg

SEQ ID NO: 1964153 - DNA, 25 bp, Homo sapien
agtcctggcggtcgtccacgtggat

SEQ ID NO: 1964154 - DNA, 25 bp, Homo sapien
tctccaagggcgggggctgcccaaa

SEQ ID NO: 1964155 - DNA, 25 bp, Homo sapien
ctgtctccaagggcgggggctgccc

SEQ ID NO: 1964156 - DNA, 25 bp, Homo sapien
tccaagggcgggggctgcccaaaca

SEQ ID NO: 1964157 - DNA, 25 bp, Homo sapien
tgtctccaagggcgggggctgccca

SEQ ID NO: 1964158 - DNA, 25 bp, Homo sapien
cagcctccccaggatagcatcatct

SEQ ID NO: 1964159 - DNA, 25 bp, Homo sapien
gcagcctccccaggatagcatcatc

SEQ ID NO: 1964160 - DNA, 25 bp, Homo sapien
agcagcctccccaggatagcatcat

SEQ ID NO: 1964161 - DNA, 25 bp, Homo sapien
agcctccccaggatagcatcatctc

SEQ ID NO: 1964162 - DNA, 25 bp, Homo sapien
acacggcagatgaagcagcgggtca

SEQ ID NO: 1964163 - DNA, 25 bp, Homo sapien
gtccagcaggcagcgcacacggcag

SEQ ID NO: 1964164 - DNA, 25 bp, Homo sapien
gcgggtcaggaaggccgagtactcg

SEQ ID NO: 1964165 - DNA, 25 bp, Homo sapien
cgagtactcggtgggcgtgcctgtg

SEQ ID NO: 1964166 - DNA, 25 bp, Homo sapien
ccgatggggaggagttctctgattc

SEQ ID NO: 1964167 - DNA, 25 bp, Homo sapien
gatggggaggagttctctgattcaa

SEQ ID NO: 1964168 - DNA, 25 bp, Homo sapien
gggaggagttctctgattcaatgag

SEQ ID NO: 1964169 - DNA, 25 bp, Homo sapien
tgtccgatggggaggagttctctga

SEQ ID NO: 1964170 - DNA, 25 bp, Homo sapien
gtggcattgaattgcagccaggaga

SEQ ID NO: 1964171 - DNA, 25 bp, Homo sapien
gccgcagctgccaagcctgtgaccc

SEQ ID NO: 1964172 - DNA, 25 bp, Homo sapien
agccgcagctgccaagcctgtgacc

SEQ ID NO: 1964173 - DNA, 25 bp, Homo sapien
gctgccaagcctgtgacccccgggc

SEQ ID NO: 1964174 - DNA, 25 bp, Homo sapien
tgccgcaatgcagaacagcgacagc

SEQ ID NO: 1964175 - DNA, 25 bp, Homo sapien
gcatggctcctgacggcgccttctt

SEQ ID NO: 1964176 - DNA, 25 bp, Homo sapien
ggaggagaacgggtgccgcaatgca

SEQ ID NO: 1964177 - DNA, 25 bp, Homo sapien
atgcagaacagcgacagccgcggcg

SEQ ID NO: 1964178 - DNA, 25 bp, Homo sapien
catccgcggtggctgcggtgtctgc

SEQ ID NO: 1964179 - DNA, 25 bp, Homo sapien
gttttgccctcaggagcgcgctcct

SEQ ID NO: 1964180 - DNA, 25 bp, Homo sapien
aggagcgcgctcctcattttcatct

SEQ ID NO: 1964181 - DNA, 25 bp, Homo sapien
tttgcatccgcggtggctgcggtgt

SEQ ID NO: 1964182 - DNA, 25 bp, Homo sapien
cacagtcaaccctggacactgagca

SEQ ID NO: 1964183 - DNA, 25 bp, Homo sapien
tcacagtcaaccctggacactgagc

SEQ ID NO: 1964184 - DNA, 25 bp, Homo sapien
cacaacagagaccaccgtgagtgcc

SEQ ID NO: 1964185 - DNA, 25 bp, Homo sapien
agaccaccgtgagtgccggcaaggt

SEQ ID NO: 1964186 - DNA, 25 bp, Homo sapien
tattgctgtcacacctgagcagtga

SEQ ID NO: 1964187 - DNA, 25 bp, Homo sapien
gagaccaactcacacgggacatgtg

SEQ ID NO: 1964188 - DNA, 25 bp, Homo sapien
tgtcacgtcacttttcaggccaatg

SEQ ID NO: 1964189 - DNA, 25 bp, Homo sapien
tgactccaggtagttatgttccagg

SEQ ID NO: 1964190 - DNA, 25 bp, Homo sapien
gttttccatgcagttccgattcgca

SEQ ID NO: 1964191 - DNA, 25 bp, Homo sapien
gttccgattcgcacagactggtggt

SEQ ID NO: 1964192 - DNA, 25 bp, Homo sapien
tgagtaattgggttttccatgcagt

SEQ ID NO: 1964193 - DNA, 25 bp, Homo sapien
tgctgagtaattgggttttccatgc

SEQ ID NO: 1964194 - DNA, 25 bp, Homo sapien
cctggaagacggttgcttgttctca

SEQ ID NO: 1964195 - DNA, 25 bp, Homo sapien
gacccatcggctcctcagaaatgca

SEQ ID NO: 1964196 - DNA, 25 bp, Homo sapien
ggcttttccatggaatacgccaaca

SEQ ID NO: 1964197 - DNA, 25 bp, Homo sapien
accagagcccaggaacggcacttgt

SEQ ID NO: 1964198 - DNA, 25 bp, Homo sapien
ctgagcaccaaaacgccgctctctc

SEQ ID NO: 1964199 - DNA, 25 bp, Homo sapien
gagcaccaaaacgccgctctctctg

SEQ ID NO: 1964200 - DNA, 25 bp, Homo sapien
caccaaaacgccgctctctctgctg

SEQ ID NO: 1964201 - DNA, 25 bp, Homo sapien
gcaccaaaacgccgctctctctgct

SEQ ID NO: 1964202 - DNA, 25 bp, Homo sapien
cccttggggtcaaggacaaggtcag

SEQ ID NO: 1964203 - DNA, 25 bp, Homo sapien
ggccctggcgggaacctgtgcccat

SEQ ID NO: 1964204 - DNA, 25 bp, Homo sapien
gcccatcggccagcgtcagtctgtt

SEQ ID NO: 1964205 - DNA, 25 bp, Homo sapien
aggtcagggccaccccggaggcaca

SEQ ID NO: 1964206 - DNA, 25 bp, Homo sapien
tcactgtgctttcccgctgtccagg

SEQ ID NO: 1964207 - DNA, 25 bp, Homo sapien
cggaggcatcggtacaccttgcagc

SEQ ID NO: 1964208 - DNA, 25 bp, Homo sapien
gtcctccatgggatagcccctcgtg

SEQ ID NO: 1964209 - DNA, 25 bp, Homo sapien
agatgggcgagttcctgaaagtgcc

SEQ ID NO: 1964210 - DNA, 25 bp, Homo sapien
cctcgtggcaaaacgctgagctcca

SEQ ID NO: 1964211 - DNA, 25 bp, Homo sapien
gcacttttgggcaacatcccgggca

SEQ ID NO: 1964212 - DNA, 25 bp, Homo sapien
tgcaggtgcaggactgttcacctcg

SEQ ID NO: 1964213 - DNA, 25 bp, Homo sapien
tgtacacctgttgccgagagtctgg

SEQ ID NO: 1964214 - DNA, 25 bp, Homo sapien
caggaatgtgcaccccgaagcttgg

SEQ ID NO: 1964215 - DNA, 25 bp, Homo sapien
gacacacagatctgagcttggatgg

SEQ ID NO: 1964216 - DNA, 25 bp, Homo sapien
taggctcctgcgtatgctgcacaca

SEQ ID NO: 1964217 - DNA, 25 bp, Homo sapien
caaagcgtgtgtcttaggacgggct

SEQ ID NO: 1964218 - DNA, 25 bp, Homo sapien
tcatgcttgaatagacttaaggcca

SEQ ID NO: 1964219 - DNA, 25 bp, Homo sapien
ggcagattaggaagaaccgtccgca

SEQ ID NO: 1964220 - DNA, 25 bp, Homo sapien
tcctaggatggcaatgggaaccctc

SEQ ID NO: 1964221 - DNA, 25 bp, Homo sapien
gagactttttcagggatacagcaga

SEQ ID NO: 1964222 - DNA, 25 bp, Homo sapien
aagggcctggctacaatcgcaaaca

SEQ ID NO: 1964223 - DNA, 25 bp, Homo sapien
ggacgggtttgctgatgggctgcag

SEQ ID NO: 1964224 - DNA, 25 bp, Homo sapien
gctgcagggtgcgaaggaggcctgg

SEQ ID NO: 1964225 - DNA, 25 bp, Homo sapien
gaccaggacgggtttgctgatgggc

SEQ ID NO: 1964226 - DNA, 25 bp, Homo sapien
acgagtgaccaggacgggtttgctg

SEQ ID NO: 1964227 - DNA, 25 bp, Homo sapien
gccccctccgccttcgctgcctccg

SEQ ID NO: 1964228 - DNA, 25 bp, Homo sapien
ccccctccgccttcgctgcctccgc

SEQ ID NO: 1964229 - DNA, 25 bp, Homo sapien
ctctacggctacgccgccgccgccg

SEQ ID NO: 1964230 - DNA, 25 bp, Homo sapien
tctacggctacgccgccgccgccgc

SEQ ID NO: 1964231 - DNA, 25 bp, Homo sapien
cctctacggctacgccgccgccgcc

SEQ ID NO: 1964232 - DNA, 25 bp, Homo sapien
gctggtggaatcctcacactgttca

SEQ ID NO: 1964233 - DNA, 25 bp, Homo sapien
ggtggaatcctcacactgttcatgc

SEQ ID NO: 1964234 - DNA, 25 bp, Homo sapien
ggtgaaaaagctggtggaatcctca

SEQ ID NO: 1964235 - DNA, 25 bp, Homo sapien
aaaagctggtggaatcctcacactg

SEQ ID NO: 1964236 - DNA, 25 bp, Homo sapien
ccttgtccagctggtccgggcgctg

SEQ ID NO: 1964237 - DNA, 25 bp, Homo sapien
tccgcgcttctctcctgcgatactg

SEQ ID NO: 1964238 - DNA, 25 bp, Homo sapien
tcaatctggcctccacggaggcctt

SEQ ID NO: 1964239 - DNA, 25 bp, Homo sapien
cagcaaccctttgcactgctgtcgc

SEQ ID NO: 1964240 - DNA, 25 bp, Homo sapien
acaggacagaatcggcacctgagct

SEQ ID NO: 1964241 - DNA, 25 bp, Homo sapien
cacacttggccccaggacggctgac

SEQ ID NO: 1964242 - DNA, 25 bp, Homo sapien
gcacctgagcttcagatccgctctc

SEQ ID NO: 1964243 - DNA, 25 bp, Homo sapien
gcttcagatccgctctctgtcaaat

SEQ ID NO: 1964244 - DNA, 25 bp, Homo sapien
tctttgacgtcattcagggcgttgt

SEQ ID NO: 1964245 - DNA, 25 bp, Homo sapien
agtccttgctgacgtctgccagcga

SEQ ID NO: 1964246 - DNA, 25 bp, Homo sapien
gcgtctttgacgtccttgaggctct

SEQ ID NO: 1964247 - DNA, 25 bp, Homo sapien
tggctgtgctgcaccacggcgtctt

SEQ ID NO: 1964248 - DNA, 25 bp, Homo sapien
tgacaactgagaccagcaaggtggg

SEQ ID NO: 1964249 - DNA, 25 bp, Homo sapien
tgctttttccggtcaagtatgcgcc

SEQ ID NO: 1964250 - DNA, 25 bp, Homo sapien
tataatttccaggtggcggacaagc

SEQ ID NO: 1964251 - DNA, 25 bp, Homo sapien
gagggtcatgtcacgcgtgttccca

SEQ ID NO: 1964252 - DNA, 25 bp, Homo sapien
ccagggaggtgatgtagtggtctcc

SEQ ID NO: 1964253 - DNA, 25 bp, Homo sapien
agagaaaccaaacccgggatgctgg

SEQ ID NO: 1964254 - DNA, 25 bp, Homo sapien
aggtgatgtagtggtctcctcccca

SEQ ID NO: 1964255 - DNA, 25 bp, Homo sapien
ggaggtgatgtagtggtctcctccc

SEQ ID NO: 1964256 - DNA, 25 bp, Homo sapien
cagctccacgttcctcatcatctca

SEQ ID NO: 1964257 - DNA, 25 bp, Homo sapien
agtgagcgtggacatgtacgtgtca

SEQ ID NO: 1964258 - DNA, 25 bp, Homo sapien
gaccacgtgtggagaaagcaatggc

SEQ ID NO: 1964259 - DNA, 25 bp, Homo sapien
catgtacgtgtcaagcagctcagag

SEQ ID NO: 1964260 - DNA, 25 bp, Homo sapien
tggctccagggtgccgacatccact

SEQ ID NO: 1964261 - DNA, 25 bp, Homo sapien
tttccgcagccaggcgatgatgttt

SEQ ID NO: 1964262 - DNA, 25 bp, Homo sapien
tgtctgtctccagcgctttccgcag

SEQ ID NO: 1964263 - DNA, 25 bp, Homo sapien
ctggtagtacccgtcctggtcggct

SEQ ID NO: 1964264 - DNA, 25 bp, Homo sapien
tctggctctgtctctttgacccagt

SEQ ID NO: 1964265 - DNA, 25 bp, Homo sapien
aatcttcacttatctgagcagcaac

SEQ ID NO: 1964266 - DNA, 25 bp, Homo sapien
aaatcttcacttatctgagcagcaa

SEQ ID NO: 1964267 - DNA, 25 bp, Homo sapien
gaccggatgagcctctaaaaataaa

SEQ ID NO: 1964268 - DNA, 25 bp, Homo sapien
tttcacatcactaacatctgaccgg

SEQ ID NO: 1964269 - DNA, 25 bp, Homo sapien
gatccagactaatggaaggacagag

SEQ ID NO: 1964270 - DNA, 25 bp, Homo sapien
aacttcacctcaggctttaaaatat

SEQ ID NO: 1964271 - DNA, 25 bp, Homo sapien
ggacagacaggcttcggtcagacag

SEQ ID NO: 1964272 - DNA, 25 bp, Homo sapien
acagacaggcttcggtcagacagca

SEQ ID NO: 1964273 - DNA, 25 bp, Homo sapien
aggacagacaggcttcggtcagaca

SEQ ID NO: 1964274 - DNA, 25 bp, Homo sapien
gacagacaggcttcggtcagacagc

SEQ ID NO: 1964275 - DNA, 25 bp, Homo sapien
tgaaggtctggcagttgttgatgat

SEQ ID NO: 1964276 - DNA, 25 bp, Homo sapien
tatacagctgcgcttcatctttata

SEQ ID NO: 1964277 - DNA, 25 bp, Homo sapien
tgatgatggcgatcatgtactgaac

SEQ ID NO: 1964278 - DNA, 25 bp, Homo sapien
tagcagtgagggtgctgccgattcc

SEQ ID NO: 1964279 - DNA, 25 bp, Homo sapien
ggctggctcggagacacaccctctt

SEQ ID NO: 1964280 - DNA, 25 bp, Homo sapien
ggcgtctaaaatcccgtccatgctg

SEQ ID NO: 1964281 - DNA, 25 bp, Homo sapien
taaaatcccgtccatgctgggctgg

SEQ ID NO: 1964282 - DNA, 25 bp, Homo sapien
cttcgcgatggcgtctaaaatcccg

SEQ ID NO: 1964283 - DNA, 25 bp, Homo sapien
tgcatcatacgaagcagcgtcaccg

SEQ ID NO: 1964284 - DNA, 25 bp, Homo sapien
gatctgaccggaatgcaagtgcaca

SEQ ID NO: 1964285 - DNA, 25 bp, Homo sapien
ggcatccgcacggtacagttcacag

SEQ ID NO: 1964286 - DNA, 25 bp, Homo sapien
gaattgtgcgtaagaaggaccctgc

SEQ ID NO: 1964287 - DNA, 25 bp, Homo sapien
ttaatgtgaggtggccgttcatgtc

SEQ ID NO: 1964288 - DNA, 25 bp, Homo sapien
caggcccacacagaatacaaacagc

SEQ ID NO: 1964289 - DNA, 25 bp, Homo sapien
tagtttcacgatgaggacactggtg

SEQ ID NO: 1964290 - DNA, 25 bp, Homo sapien
cattgcttcgaggataagatcgggc

SEQ ID NO: 1964291 - DNA, 25 bp, Homo sapien
gaaatagtcttccacggtgacacag

SEQ ID NO: 1964292 - DNA, 25 bp, Homo sapien
ttggcaaaatcgttgaaatagtctt

SEQ ID NO: 1964293 - DNA, 25 bp, Homo sapien
taatagccacttcttcgtcatcaat

SEQ ID NO: 1964294 - DNA, 25 bp, Homo sapien
tacagcgtttgaccctaatagccac

SEQ ID NO: 1964295 - DNA, 25 bp, Homo sapien
gatgagggaactaggtcccaccttc

SEQ ID NO: 1964296 - DNA, 25 bp, Homo sapien
ggtgagaggtgagccctagcgtcaa

SEQ ID NO: 1964297 - DNA, 25 bp, Homo sapien
tcaaggtgatgagggaactaggtcc

SEQ ID NO: 1964298 - DNA, 25 bp, Homo sapien
cctagcgtcaaggtgatgagggaac

SEQ ID NO: 1964299 - DNA, 25 bp, Homo sapien
ggagggactcgctggatgctgaatt

SEQ ID NO: 1964300 - DNA, 25 bp, Homo sapien
tggcgtccgcagagcctattgcctc

SEQ ID NO: 1964301 - DNA, 25 bp, Homo sapien
tgggctgataggacaacaagtgaac

SEQ ID NO: 1964302 - DNA, 25 bp, Homo sapien
ggtctgaagcggaaagaaatccctg

SEQ ID NO: 1964303 - DNA, 25 bp, Homo sapien
ggccattctcaccagagccccgtcc

SEQ ID NO: 1964304 - DNA, 25 bp, Homo sapien
gcagtgccgcgcatgagcactcggt

SEQ ID NO: 1964305 - DNA, 25 bp, Homo sapien
cagcatctggaaaacgcggcaggca

SEQ ID NO: 1964306 - DNA, 25 bp, Homo sapien
ctttgataacgaccgcagcatctgg

SEQ ID NO: 1964307 - DNA, 25 bp, Homo sapien
acagacgcgggcgaggcagtgccgc

SEQ ID NO: 1964308 - DNA, 25 bp, Homo sapien
ggagcaccctcattgaaacccaggc

SEQ ID NO: 1964309 - DNA, 25 bp, Homo sapien
gtcagcggcaggctccacggctctg

SEQ ID NO: 1964310 - DNA, 25 bp, Homo sapien
ctctggcatctcaccgcagaggagg

SEQ ID NO: 1964311 - DNA, 25 bp, Homo sapien
ggaacagtgacggtgacctggaccc

SEQ ID NO: 1964312 - DNA, 25 bp, Homo sapien
ctccgggctccggaaggaaatgcgc

SEQ ID NO: 1964313 - DNA, 25 bp, Homo sapien
taaccatcttctcggcaccctcctt

SEQ ID NO: 1964314 - DNA, 25 bp, Homo sapien
ggaaatgcgcttctgcatgaccgcc

SEQ ID NO: 1964315 - DNA, 25 bp, Homo sapien
gcttctgcatgaccgcccgcaggta

SEQ ID NO: 1964316 - DNA, 25 bp, Homo sapien
gtcagcttgatcacttcggccacag

SEQ ID NO: 1964317 - DNA, 25 bp, Homo sapien
ttgctgaccagagtggagacctcca

SEQ ID NO: 1964318 - DNA, 25 bp, Homo sapien
ctccaggtagagcagagaagggtct

SEQ ID NO: 1964319 - DNA, 25 bp, Homo sapien
gatggtgtcgcagtatccgtccacg

SEQ ID NO: 1964320 - DNA, 25 bp, Homo sapien
attctaaggcaggattctaagacgt

SEQ ID NO: 1964321 - DNA, 25 bp, Homo sapien
taaggcaggattctaagacgtgcat

SEQ ID NO: 1964322 - DNA, 25 bp, Homo sapien
ccaggattctaaggcaggattctaa

SEQ ID NO: 1964323 - DNA, 25 bp, Homo sapien
ggattctaagacgtgcatcccttac

SEQ ID NO: 1964324 - DNA, 25 bp, Homo sapien
gccagcagcgcaccgatgtggtcat

SEQ ID NO: 1964325 - DNA, 25 bp, Homo sapien
ttcaggctgggcaccacaatgtcct

SEQ ID NO: 1964326 - DNA, 25 bp, Homo sapien
tgcttcatgtcacggctggcgtccc

SEQ ID NO: 1964327 - DNA, 25 bp, Homo sapien
tgtccttgaagaggggcacgtagct

SEQ ID NO: 1964328 - DNA, 25 bp, Homo sapien
ggagagcaatcagctgtcccgcgtt

SEQ ID NO: 1964329 - DNA, 25 bp, Homo sapien
ggtgcatcacactggcacctaaaga

SEQ ID NO: 1964330 - DNA, 25 bp, Homo sapien
taaagacaggccgtgcagctaaaag

SEQ ID NO: 1964331 - DNA, 25 bp, Homo sapien
cagctaaaaggagcacgtgtggcca

SEQ ID NO: 1964332 - DNA, 25 bp, Homo sapien
gggttccgagcacttaagcagatgg

SEQ ID NO: 1964333 - DNA, 25 bp, Homo sapien
caggcctttgacagcacagtgaggg

SEQ ID NO: 1964334 - DNA, 25 bp, Homo sapien
caaacaagcacccaagagaggctgt

SEQ ID NO: 1964335 - DNA, 25 bp, Homo sapien
acacactttcaaccactgcaacaaa

SEQ ID NO: 1964336 - DNA, 25 bp, Homo sapien
tgggcaatcctagatcagtagtcag

SEQ ID NO: 1964337 - DNA, 25 bp, Homo sapien
acagttcctgggcaatcctagatca

SEQ ID NO: 1964338 - DNA, 25 bp, Homo sapien
ttactctgtgattgacaacagttcc

SEQ ID NO: 1964339 - DNA, 25 bp, Homo sapien
tagatcagtagtcagaaaaccttaa

SEQ ID NO: 1964340 - DNA, 25 bp, Homo sapien
ggggatgtcagacaggaggggacca

SEQ ID NO: 1964341 - DNA, 25 bp, Homo sapien
ggctgaggggatgtcagacaggagg

SEQ ID NO: 1964342 - DNA, 25 bp, Homo sapien
ctctaggctgaggggatgtcagaca

SEQ ID NO: 1964343 - DNA, 25 bp, Homo sapien
gggatgtcagacaggaggggaccag

SEQ ID NO: 1964344 - DNA, 25 bp, Homo sapien
taggctgaggggatgtcagacagga

SEQ ID NO: 1964345 - DNA, 25 bp, Homo sapien
ggctgaggggatgtcagacaggagg

SEQ ID NO: 1964346 - DNA, 25 bp, Homo sapien
aggggatgtcagacaggaggggacc

SEQ ID NO: 1964347 - DNA, 25 bp, Homo sapien
gggatgtcagacaggaggggaccag

SEQ ID NO: 1964348 - DNA, 25 bp, Homo sapien
cgccatccaggctgaggggatgtca

SEQ ID NO: 1964349 - DNA, 25 bp, Homo sapien
ggggaccaggagggcgccatccagg

SEQ ID NO: 1964350 - DNA, 25 bp, Homo sapien
gggaccaggagggcgccatccaggc

SEQ ID NO: 1964351 - DNA, 25 bp, Homo sapien
ggatcaggagggcaccctctaggct

SEQ ID NO: 1964352 - DNA, 25 bp, Homo sapien
ccctctaggctgaggggatgtcaga

SEQ ID NO: 1964353 - DNA, 25 bp, Homo sapien
atcaggagggcaccctctaggctga

SEQ ID NO: 1964354 - DNA, 25 bp, Homo sapien
gggatgtcagacaggaggggaccag

SEQ ID NO: 1964355 - DNA, 25 bp, Homo sapien
gggaccaggagggcgccatccaggc

SEQ ID NO: 1964356 - DNA, 25 bp, Homo sapien
ggggaccaggagggcgccatccagg

SEQ ID NO: 1964357 - DNA, 25 bp, Homo sapien
cgccatccaggctgaggggatgtca

SEQ ID NO: 1964358 - DNA, 25 bp, Homo sapien
ccaggctgaggggatgtcagacagg

SEQ ID NO: 1964359 - DNA, 25 bp, Homo sapien
tccaggctgaggggatgtcagatac

SEQ ID NO: 1964360 - DNA, 25 bp, Homo sapien
gggatgtcagacaggaggggaccag

SEQ ID NO: 1964361 - DNA, 25 bp, Homo sapien
tgtcagatacgaggggaccaggagg

SEQ ID NO: 1964362 - DNA, 25 bp, Homo sapien
tctcatctctcaaaggacccaagga

SEQ ID NO: 1964363 - DNA, 25 bp, Homo sapien
gacccaaggagtaactctggggatg

SEQ ID NO: 1964364 - DNA, 25 bp, Homo sapien
gtctcatctctcaaaggacccaagg

SEQ ID NO: 1964365 - DNA, 25 bp, Homo sapien
aactctggggatgtcaaacaggagg

SEQ ID NO: 1964366 - DNA, 25 bp, Homo sapien
cctgccattgctcgtctaccaggta

SEQ ID NO: 1964367 - DNA, 25 bp, Homo sapien
ccattgctcgtctaccaggtatggc

SEQ ID NO: 1964368 - DNA, 25 bp, Homo sapien
ttggctggcaacacccggtgccaga

SEQ ID NO: 1964369 - DNA, 25 bp, Homo sapien
acacccggtgccagaggtctgctca

SEQ ID NO: 1964370 - DNA, 25 bp, Homo sapien
aaaatgatgctaccattgaaggcag

SEQ ID NO: 1964371 - DNA, 25 bp, Homo sapien
taaagattaacgtgcaaaatgatgc

SEQ ID NO: 1964372 - DNA, 25 bp, Homo sapien
gatgctaccattgaaggcagatgct

SEQ ID NO: 1964373 - DNA, 25 bp, Homo sapien
aattaaagattaacgtgcaaaatga

SEQ ID NO: 1964374 - DNA, 25 bp, Homo sapien
tgcgcccggcctccggggtaatgcc

SEQ ID NO: 1964375 - DNA, 25 bp, Homo sapien
ctgcgcccggcctccggggtaatgc

SEQ ID NO: 1964376 - DNA, 25 bp, Homo sapien
gcctccggggtaatgccttgattag

SEQ ID NO: 1964377 - DNA, 25 bp, Homo sapien
ccggcctccggggtaatgccttgat

SEQ ID NO: 1964378 - DNA, 25 bp, Homo sapien
tcttgagagcaaagcgtgtcctcag

SEQ ID NO: 1964379 - DNA, 25 bp, Homo sapien
tgagagcaaagcgtgtcctcaggct

SEQ ID NO: 1964380 - DNA, 25 bp, Homo sapien
gagagcaaagcgtgtcctcaggctg

SEQ ID NO: 1964381 - DNA, 25 bp, Homo sapien
cttgagagcaaagcgtgtcctcagg

SEQ ID NO: 1964382 - DNA, 25 bp, Homo sapien
caagacctgctgctaagtgggaagc

SEQ ID NO: 1964383 - DNA, 25 bp, Homo sapien
acatggaacagctcgcccgctggat

SEQ ID NO: 1964384 - DNA, 25 bp, Homo sapien
tgagcccctgatgcttgttaagagc

SEQ ID NO: 1964385 - DNA, 25 bp, Homo sapien
tgtatgccaggtgcactcaagacct

SEQ ID NO: 1964386 - DNA, 25 bp, Homo sapien
taatgactgtgaacactacgaattc

SEQ ID NO: 1964387 - DNA, 25 bp, Homo sapien
ccagaagtaacaagaattccctctc

SEQ ID NO: 1964388 - DNA, 25 bp, Homo sapien
cactacgaattctaattcatatgca

SEQ ID NO: 1964389 - DNA, 25 bp, Homo sapien
tcttataagggacactctaatgact

SEQ ID NO: 1964390 - DNA, 25 bp, Homo sapien
aaaatgacgtgccttaagtgcccct

SEQ ID NO: 1964391 - DNA, 25 bp, Homo sapien
tgtcaaacagaaggtaaacagtctt

SEQ ID NO: 1964392 - DNA, 25 bp, Homo sapien
tgagtgctagggactcgtcatgagt

SEQ ID NO: 1964393 - DNA, 25 bp, Homo sapien
aggctgctccctaccaggtgacgga

SEQ ID NO: 1964394 - DNA, 25 bp, Homo sapien
ttggatcagatcaagcgcagtgact

SEQ ID NO: 1964395 - DNA, 25 bp, Homo sapien
tattgcacattgagtccccattgag

SEQ ID NO: 1964396 - DNA, 25 bp, Homo sapien
caatgcatggcgattccaggcgctg

SEQ ID NO: 1964397 - DNA, 25 bp, Homo sapien
tgcatgaccgctgcttcggagaagc

SEQ ID NO: 1964398 - DNA, 25 bp, Homo sapien
agagaaaccccagatccccgcgcgg

SEQ ID NO: 1964399 - DNA, 25 bp, Homo sapien
aggtgacaccggctccgacacgccg

SEQ ID NO: 1964400 - DNA, 25 bp, Homo sapien
gacacgccgctaaccggccgctcgt

SEQ ID NO: 1964401 - DNA, 25 bp, Homo sapien
cgcgcggctacagcgaccgcgagcc

SEQ ID NO: 1964402 - DNA, 25 bp, Homo sapien
aactttccaaggcacccagcaggtg

SEQ ID NO: 1964403 - DNA, 25 bp, Homo sapien
tgaaaggcacgtgaccctaaccttc

SEQ ID NO: 1964404 - DNA, 25 bp, Homo sapien
gggctctccgaaggctgactagccg

SEQ ID NO: 1964405 - DNA, 25 bp, Homo sapien
ggcccgcaacctgaaaggcacgtga

SEQ ID NO: 1964406 - DNA, 25 bp, Homo sapien
cctgatcccgcagtacaagcatctg

SEQ ID NO: 1964407 - DNA, 25 bp, Homo sapien
gagtccttcaagtcgaccaagctgg

SEQ ID NO: 1964408 - DNA, 25 bp, Homo sapien
caagcatctgtacagccgacacgag

SEQ ID NO: 1964409 - DNA, 25 bp, Homo sapien
ttccacaggaccatgcggaagcgcc

SEQ ID NO: 1964410 - DNA, 25 bp, Homo sapien
cagactcccttagtgctggatggaa

SEQ ID NO: 1964411 - DNA, 25 bp, Homo sapien
gttctcataggaggtccactctgcc

SEQ ID NO: 1964412 - DNA, 25 bp, Homo sapien
tatattaggccgtggccagactccc

SEQ ID NO: 1964413 - DNA, 25 bp, Homo sapien
cccgagtcttacagccagggctttg

SEQ ID NO: 1964414 - DNA, 25 bp, Homo sapien
tcacagacagggctgtggtggctcc

SEQ ID NO: 1964415 - DNA, 25 bp, Homo sapien
tggccatggtcatgcagcttccctg

SEQ ID NO: 1964416 - DNA, 25 bp, Homo sapien
cccagcctcgggagctgagagtcac

SEQ ID NO: 1964417 - DNA, 25 bp, Homo sapien
cctgtatgtggccatggtcatgcag

SEQ ID NO: 1964418 - DNA, 25 bp, Homo sapien
ccagcaccgacaacgtggtcaacgt

SEQ ID NO: 1964419 - DNA, 25 bp, Homo sapien
tcgtccaccgtggaggcctctgtct

SEQ ID NO: 1964420 - DNA, 25 bp, Homo sapien
agcgccgcgggtccctggccttcat

SEQ ID NO: 1964421 - DNA, 25 bp, Homo sapien
ggtcaacgtggacttcacgccacga

SEQ ID NO: 1964422 - DNA, 25 bp, Homo sapien
tgaggccaatggagttttagggtct

SEQ ID NO: 1964423 - DNA, 25 bp, Homo sapien
gacatgaggccaatggagttttagg

SEQ ID NO: 1964424 - DNA, 25 bp, Homo sapien
agttctggacatgaggccaatggag

SEQ ID NO: 1964425 - DNA, 25 bp, Homo sapien
ttctggacatgaggccaatggagtt

SEQ ID NO: 1964426 - DNA, 25 bp, Homo sapien
cagagtggcagttagcaccgtggct

SEQ ID NO: 1964427 - DNA, 25 bp, Homo sapien
ctctcgccggagagaaagacctgtc

SEQ ID NO: 1964428 - DNA, 25 bp, Homo sapien
cccggcaagcgagagaaagctcaga

SEQ ID NO: 1964429 - DNA, 25 bp, Homo sapien
tatgagcaggcctctcagcgtctgc

SEQ ID NO: 1964430 - DNA, 25 bp, Homo sapien
ggctgaggtagcagagccgcttgct

SEQ ID NO: 1964431 - DNA, 25 bp, Homo sapien
catcagctacgtggctgaggtagca

SEQ ID NO: 1964432 - DNA, 25 bp, Homo sapien
aggatgccatcagctacgtggctga

SEQ ID NO: 1964433 - DNA, 25 bp, Homo sapien
cagagccgcttgctctgccgggtcg

SEQ ID NO: 1964434 - DNA, 25 bp, Homo sapien
tctagggcgcctgtcacctgaggct

SEQ ID NO: 1964435 - DNA, 25 bp, Homo sapien
tttaaacgcgcctacagggtcacta

SEQ ID NO: 1964436 - DNA, 25 bp, Homo sapien
gcagtttcatatgcgtctaacggcc

SEQ ID NO: 1964437 - DNA, 25 bp, Homo sapien
gaagtctcgagaccggatcctgaat

SEQ ID NO: 1964438 - DNA, 25 bp, Homo sapien
ttcctcctgtgcacctgaaggtgcc

SEQ ID NO: 1964439 - DNA, 25 bp, Homo sapien
ctcccacaagtctaagggctcaggg

SEQ ID NO: 1964440 - DNA, 25 bp, Homo sapien
ggctcagggtgtctgtccgcccctg

SEQ ID NO: 1964441 - DNA, 25 bp, Homo sapien
taagggctcagggtgtctgtccgcc

SEQ ID NO: 1964442 - DNA, 25 bp, Homo sapien
ggccacgtggcttcataaagctcag

SEQ ID NO: 1964443 - DNA, 25 bp, Homo sapien
taaagctcagctgcggttctccgtg

SEQ ID NO: 1964444 - DNA, 25 bp, Homo sapien
gaaggcacagcctcggttagctttg

SEQ ID NO: 1964445 - DNA, 25 bp, Homo sapien
gagtttcctctaagtccggccaggc

SEQ ID NO: 1964446 - DNA, 25 bp, Homo sapien
ccccttgtgtggaagccacacgggc

SEQ ID NO: 1964447 - DNA, 25 bp, Homo sapien
acgggctgtggcaggcggactcagg

SEQ ID NO: 1964448 - DNA, 25 bp, Homo sapien
ggccctgtccacaccggcccgtgtc

SEQ ID NO: 1964449 - DNA, 25 bp, Homo sapien
agcctcgtccacaccgaccccatgt

SEQ ID NO: 1964450 - DNA, 25 bp, Homo sapien
catttaccgtgattcctcgccggtg

SEQ ID NO: 1964451 - DNA, 25 bp, Homo sapien
ggcttgacggccgacacatttaccg

SEQ ID NO: 1964452 - DNA, 25 bp, Homo sapien
tcagagtgtgctggcgagctctgct

SEQ ID NO: 1964453 - DNA, 25 bp, Homo sapien
ccccacaggcgggtaaagtgatact

SEQ ID NO: 1964454 - DNA, 25 bp, Homo sapien
gctgggtctgcggtagctgaagctt

SEQ ID NO: 1964455 - DNA, 25 bp, Homo sapien
cttgccggggactgtgctccgctgc

SEQ ID NO: 1964456 - DNA, 25 bp, Homo sapien
tctgcggtagctgaagcttgttgct

SEQ ID NO: 1964457 - DNA, 25 bp, Homo sapien
aggacgttgcgaccggtgtcttgcc

SEQ ID NO: 1964458 - DNA, 25 bp, Homo sapien
acaaagtcctggcttcgcgggcagg

SEQ ID NO: 1964459 - DNA, 25 bp, Homo sapien
gctgcgtccgggcaaagctcgtgac

SEQ ID NO: 1964460 - DNA, 25 bp, Homo sapien
gacccagagctccttgatagtggcg

SEQ ID NO: 1964461 - DNA, 25 bp, Homo sapien
tctctgggtggcatcaatatcaaga

SEQ ID NO: 1964462 - DNA, 25 bp, Homo sapien
aagccgaatgggaactggagccaca

SEQ ID NO: 1964463 - DNA, 25 bp, Homo sapien
tatgggctgcgtctctctgcggcat

SEQ ID NO: 1964464 - DNA, 25 bp, Homo sapien
tctgggctgcttgtgattccatagc

SEQ ID NO: 1964465 - DNA, 25 bp, Homo sapien
aggactgcgtctgcctgcggctact

SEQ ID NO: 1964466 - DNA, 25 bp, Homo sapien
tacaggcgcagcgttcccattggcg

SEQ ID NO: 1964467 - DNA, 25 bp, Homo sapien
ccggcgccaatgaaccagtaatgtg

SEQ ID NO: 1964468 - DNA, 25 bp, Homo sapien
aagaaaagcggtgctacccgcatga

SEQ ID NO: 1964469 - DNA, 25 bp, Homo sapien
ttttagagaaacgtccttggagtga

SEQ ID NO: 1964470 - DNA, 25 bp, Homo sapien
tggccggtccggctgtggaatgcag

SEQ ID NO: 1964471 - DNA, 25 bp, Homo sapien
ctgggcgcccccgagttctggtaag

SEQ ID NO: 1964472 - DNA, 25 bp, Homo sapien
gccccaggccctgcgtttatgaagg

SEQ ID NO: 1964473 - DNA, 25 bp, Homo sapien
ttcctgctgaagacaatagcgaggg

SEQ ID NO: 1964474 - DNA, 25 bp, Homo sapien
gcatcatggaacacactggtctggt

SEQ ID NO: 1964475 - DNA, 25 bp, Homo sapien
gagaaaggttgtcggctcttaggac

SEQ ID NO: 1964476 - DNA, 25 bp, Homo sapien
tgtcggctcttaggacaggctggtt

SEQ ID NO: 1964477 - DNA, 25 bp, Homo sapien
tggccggaggtccagtgggcatcat

SEQ ID NO: 1964478 - DNA, 25 bp, Homo sapien
ggtctgactccaacccgggctggtg

SEQ ID NO: 1964479 - DNA, 25 bp, Homo sapien
ggagctgccgcttcagacacaggcc

SEQ ID NO: 1964480 - DNA, 25 bp, Homo sapien
acacggacaggacggaccagagcgc

SEQ ID NO: 1964481 - DNA, 25 bp, Homo sapien
gagtctccgcgggtgaggagacccc

SEQ ID NO: 1964482 - DNA, 25 bp, Homo sapien
aacaatgatttggaacgcggccgcg

SEQ ID NO: 1964483 - DNA, 25 bp, Homo sapien
gatgagagggagaaaccttgctgcc

SEQ ID NO: 1964484 - DNA, 25 bp, Homo sapien
gtgtgagagactcaaggacacccgc

SEQ ID NO: 1964485 - DNA, 25 bp, Homo sapien
tgcctcatgcagaaactaacaccgc

SEQ ID NO: 1964486 - DNA, 25 bp, Homo sapien
cctccagctagtggcgagggctgtc

SEQ ID NO: 1964487 - DNA, 25 bp, Homo sapien
gctgtgtctccaggcagtgaacgag

SEQ ID NO: 1964488 - DNA, 25 bp, Homo sapien
tccaggcagtgaacgagcctctgga

SEQ ID NO: 1964489 - DNA, 25 bp, Homo sapien
tccacctgacttcccggtgtttcta

SEQ ID NO: 1964490 - DNA, 25 bp, Homo sapien
agatggcggctgttttcaggccgaa

SEQ ID NO: 1964491 - DNA, 25 bp, Homo sapien
ctgagatggcggctgttttcaggcc

SEQ ID NO: 1964492 - DNA, 25 bp, Homo sapien
agctccagaggcttctcgtcagact

SEQ ID NO: 1964493 - DNA, 25 bp, Homo sapien
tctcgtcagactgccctgtgagctg

SEQ ID NO: 1964494 - DNA, 25 bp, Homo sapien
tctctgtgggaactttccactctca

SEQ ID NO: 1964495 - DNA, 25 bp, Homo sapien
ccagcactgtctccaggtttaggca

SEQ ID NO: 1964496 - DNA, 25 bp, Homo sapien
ctctctgtgggaactttccactctc

SEQ ID NO: 1964497 - DNA, 25 bp, Homo sapien
tctgtgggaactttccactctcagc

SEQ ID NO: 1964498 - DNA, 25 bp, Homo sapien
agacacccacgggaccgagcgccgg

SEQ ID NO: 1964499 - DNA, 25 bp, Homo sapien
tgcacacggcagactgagcactgct

SEQ ID NO: 1964500 - DNA, 25 bp, Homo sapien
gccagcggcccgcaatgatgtccga

SEQ ID NO: 1964501 - DNA, 25 bp, Homo sapien
ctgccagggtcacgttgcccacagg

SEQ ID NO: 1964502 - DNA, 25 bp, Homo sapien
caagaacgtggctgatgatgcgctg

SEQ ID NO: 1964503 - DNA, 25 bp, Homo sapien
tgcttctgccgtcggtgactccagg

SEQ ID NO: 1964504 - DNA, 25 bp, Homo sapien
aggtgccctttcagccctgcttctg

SEQ ID NO: 1964505 - DNA, 25 bp, Homo sapien
cgcaggagcggcacgccaagaacgt

SEQ ID NO: 1964506 - DNA, 25 bp, Homo sapien
gatccatgcaacgacttctccaaag

SEQ ID NO: 1964507 - DNA, 25 bp, Homo sapien
accaggggtgcgagtctgccttcca

SEQ ID NO: 1964508 - DNA, 25 bp, Homo sapien
cagcccatctgagaggccagatgcg

SEQ ID NO: 1964509 - DNA, 25 bp, Homo sapien
ccttccagggtgcagaggatttcat

SEQ ID NO: 1964510 - DNA, 25 bp, Homo sapien
ccaccccatttgaggaggagctttg

SEQ ID NO: 1964511 - DNA, 25 bp, Homo sapien
tttggctgccgcctcagtgacagct

SEQ ID NO: 1964512 - DNA, 25 bp, Homo sapien
tctattgatgtttggcgcagagtcc

SEQ ID NO: 1964513 - DNA, 25 bp, Homo sapien
gtcacgttactgtcgccgttttcta

SEQ ID NO: 1964514 - DNA, 25 bp, Homo sapien
ctgcagcagcgtcaccaaagccttc

SEQ ID NO: 1964515 - DNA, 25 bp, Homo sapien
aagccttcctcttgatacagctgct

SEQ ID NO: 1964516 - DNA, 25 bp, Homo sapien
tctgccatacggagcagtccttgtc

SEQ ID NO: 1964517 - DNA, 25 bp, Homo sapien
gatactctgacctgaggtctcccag

SEQ ID NO: 1964518 - DNA, 25 bp, Homo sapien
ctggctgatgaggacgtggtaaacc

SEQ ID NO: 1964519 - DNA, 25 bp, Homo sapien
atgaggacgtggtaaaccacacggg

SEQ ID NO: 1964520 - DNA, 25 bp, Homo sapien
ggctgatgaggacgtggtaaaccac

SEQ ID NO: 1964521 - DNA, 25 bp, Homo sapien
tgatgaggacgtggtaaaccacacg

SEQ ID NO: 1964522 - DNA, 25 bp, Homo sapien
tgaggtggccgtgtctcaaacacaa

SEQ ID NO: 1964523 - DNA, 25 bp, Homo sapien
ggtgagaggccctcacaggtcccct

SEQ ID NO: 1964524 - DNA, 25 bp, Homo sapien
agcacggagacacgctgaggtggcc

SEQ ID NO: 1964525 - DNA, 25 bp, Homo sapien
cagggctcagggcagtgggaatcag

SEQ ID NO: 1964526 - DNA, 25 bp, Homo sapien
gagggaagagcataatcgaccattt

SEQ ID NO: 1964527 - DNA, 25 bp, Homo sapien
catttcagccagtagagtttcaggt

SEQ ID NO: 1964528 - DNA, 25 bp, Homo sapien
tcaggtagatcggtaccggaacgtg

SEQ ID NO: 1964529 - DNA, 25 bp, Homo sapien
tcaggtagatcggtaccagaacgtg

SEQ ID NO: 1964530 - DNA, 25 bp, Homo sapien
cctttgaagagcagataggtgtgta

SEQ ID NO: 1964531 - DNA, 25 bp, Homo sapien
tttgtatttatagtcgccttgctgt

SEQ ID NO: 1964532 - DNA, 25 bp, Homo sapien
tatgttgagcgtaattttacaatct

SEQ ID NO: 1964533 - DNA, 25 bp, Homo sapien
tgaagagcagataggtgtgtacacc

SEQ ID NO: 1964534 - DNA, 25 bp, Homo sapien
agcggcgacgggcactctggagccc

SEQ ID NO: 1964535 - DNA, 25 bp, Homo sapien
gcagcggcgacgggcactctggagc

SEQ ID NO: 1964536 - DNA, 25 bp, Homo sapien
atcacccccttggtgtcgaggccca

SEQ ID NO: 1964537 - DNA, 25 bp, Homo sapien
tctggagcccatcacccccttggtg

SEQ ID NO: 1964538 - DNA, 25 bp, Homo sapien
tggttcgggcagtgtgaatgctcca

SEQ ID NO: 1964539 - DNA, 25 bp, Homo sapien
gctgccctgtatctcggtgacgtga

SEQ ID NO: 1964540 - DNA, 25 bp, Homo sapien
tgggtgttgtccagaaacccgccgc

SEQ ID NO: 1964541 - DNA, 25 bp, Homo sapien
tctgcgtagggtgttggtcccagta

SEQ ID NO: 1964542 - DNA, 25 bp, Homo sapien
tcctccgtgaggaccaccagaaaag

SEQ ID NO: 1964543 - DNA, 25 bp, Homo sapien
cctccgtgaggaccaccagaaaagg

SEQ ID NO: 1964544 - DNA, 25 bp, Homo sapien
ggcggcccatcctccgtgaggacca

SEQ ID NO: 1964545 - DNA, 25 bp, Homo sapien
agcgccccgggcggcggcccatcct

SEQ ID NO: 1964546 - DNA, 25 bp, Homo sapien
acacagacctcgagtttccaccaca

SEQ ID NO: 1964547 - DNA, 25 bp, Homo sapien
gccgctccacacagacctcgagttt

SEQ ID NO: 1964548 - DNA, 25 bp, Homo sapien
aagacacgtcgccatttgcccgggc

SEQ ID NO: 1964549 - DNA, 25 bp, Homo sapien
cccagggtttatggaagacacgtcg

SEQ ID NO: 1964550 - DNA, 25 bp, Homo sapien
tgttgtcgccgtcccctgagctgaa

SEQ ID NO: 1964551 - DNA, 25 bp, Homo sapien
gggcctgtgttgtcgccgttccctg

SEQ ID NO: 1964552 - DNA, 25 bp, Homo sapien
ggcctgtgttgtcgccgttccctga

SEQ ID NO: 1964553 - DNA, 25 bp, Homo sapien
gtgttgtcgccgtcccctgagctga

SEQ ID NO: 1964554 - DNA, 25 bp, Homo sapien
tgtgtcgtcgccgtcccctgagctg

SEQ ID NO: 1964555 - DNA, 25 bp, Homo sapien
gtgtcgtcgccgtcccctgagctga

SEQ ID NO: 1964556 - DNA, 25 bp, Homo sapien
ggcctgtgttgtcgccgttccctga

SEQ ID NO: 1964557 - DNA, 25 bp, Homo sapien
ctgtgtcggcgctgtcccctgagct

SEQ ID NO: 1964558 - DNA, 25 bp, Homo sapien
tgtgtcggcgccgtcccctgagctg

SEQ ID NO: 1964559 - DNA, 25 bp, Homo sapien
gtgtcgtcgccgtcccctgagctga

SEQ ID NO: 1964560 - DNA, 25 bp, Homo sapien
tgtgtcgtcgccgtcccctgagctg

SEQ ID NO: 1964561 - DNA, 25 bp, Homo sapien
tgtgtcggcgccgtcccgtcagctg

SEQ ID NO: 1964562 - DNA, 25 bp, Homo sapien
tgtgtcgtcgccgtcccctgagctg

SEQ ID NO: 1964563 - DNA, 25 bp, Homo sapien
tgtcggcgccgtcccgtcagctgaa

SEQ ID NO: 1964564 - DNA, 25 bp, Homo sapien
ggcctgtgtcgtcgccgtcccgtca

SEQ ID NO: 1964565 - DNA, 25 bp, Homo sapien
gggcctgtgtcgtcgccgtcccgtc

SEQ ID NO: 1964566 - DNA, 25 bp, Homo sapien
tcctcccctggagactacgtgggtg

SEQ ID NO: 1964567 - DNA, 25 bp, Homo sapien
tcgccttgttgcctaagggctcctg

SEQ ID NO: 1964568 - DNA, 25 bp, Homo sapien
ggcaaatgccttctagtcaagatct

SEQ ID NO: 1964569 - DNA, 25 bp, Homo sapien
gctcagtgtcttgttatcagggaca

SEQ ID NO: 1964570 - DNA, 25 bp, Homo sapien
cagcagcgggtttccagtggtcagc

SEQ ID NO: 1964571 - DNA, 25 bp, Homo sapien
tgcacactcgttggccggggcccag

SEQ ID NO: 1964572 - DNA, 25 bp, Homo sapien
ccgttgcccggaacagcagcgggtt

SEQ ID NO: 1964573 - DNA, 25 bp, Homo sapien
agtggtcagcctgcggtggctaccc

SEQ ID NO: 1964574 - DNA, 25 bp, Homo sapien
acagcgccttgtcggcggcacgtgc

SEQ ID NO: 1964575 - DNA, 25 bp, Homo sapien
caggtccacgaagtcgagaagagcc

SEQ ID NO: 1964576 - DNA, 25 bp, Homo sapien
gccccaggggtctggactctgtgcc

SEQ ID NO: 1964577 - DNA, 25 bp, Homo sapien
gcccggcggatacacagcgccttgt

SEQ ID NO: 1964578 - DNA, 25 bp, Homo sapien
ccgcctgtcgctggacgatttccat

SEQ ID NO: 1964579 - DNA, 25 bp, Homo sapien
ccccgcctgtcgctggacgatttcc

SEQ ID NO: 1964580 - DNA, 25 bp, Homo sapien
cccgcctgtcgctggacgatttcca

SEQ ID NO: 1964581 - DNA, 25 bp, Homo sapien
tggaatgacgctttcactgacagtc

SEQ ID NO: 1964582 - DNA, 25 bp, Homo sapien
acgctggaatgacgctttcactgac

SEQ ID NO: 1964583 - DNA, 25 bp, Homo sapien
cacgctggaatgacgctttcactga

SEQ ID NO: 1964584 - DNA, 25 bp, Homo sapien
gctggaatgacgctttcactgacag

SEQ ID NO: 1964585 - DNA, 25 bp, Homo sapien
agagacacctgtgccgatggcagag

SEQ ID NO: 1964586 - DNA, 25 bp, Homo sapien
atggcagagcgatccccagtcacag

SEQ ID NO: 1964587 - DNA, 25 bp, Homo sapien
ttgccgaccccaaacaggcgggctg

SEQ ID NO: 1964588 - DNA, 25 bp, Homo sapien
cagtcacaggtgcttcttgggtaaa

SEQ ID NO: 1964589 - DNA, 25 bp, Homo sapien
acaaatgccatccaccaggagggcc

SEQ ID NO: 1964590 - DNA, 25 bp, Homo sapien
gagccaaagcgttcagcagcttgtg

SEQ ID NO: 1964591 - DNA, 25 bp, Homo sapien
tgttgggcaccactcggccaatgag

SEQ ID NO: 1964592 - DNA, 25 bp, Homo sapien
tctttggcaaagagacgctgtcaaa

SEQ ID NO: 1964593 - DNA, 25 bp, Homo sapien
ttcgtttccaaagggtgttctcgca

SEQ ID NO: 1964594 - DNA, 25 bp, Homo sapien
tttctgaagggtgttctcgcatcga

SEQ ID NO: 1964595 - DNA, 25 bp, Homo sapien
cgcatcgatttttccttcgtttcca

SEQ ID NO: 1964596 - DNA, 25 bp, Homo sapien
ccaaagggtgttctcgcattgattt

SEQ ID NO: 1964597 - DNA, 25 bp, Homo sapien
gagcccggccgataggcacctgaat

SEQ ID NO: 1964598 - DNA, 25 bp, Homo sapien
ttcagaaacgggctcgcactcggcc

SEQ ID NO: 1964599 - DNA, 25 bp, Homo sapien
caacttcacagggtgttcagaaacg

SEQ ID NO: 1964600 - DNA, 25 bp, Homo sapien
ggacctttgaagtcacagtgaggcg

SEQ ID NO: 1964601 - DNA, 25 bp, Homo sapien
tccacgtccacggagggactcattc

SEQ ID NO: 1964602 - DNA, 25 bp, Homo sapien
atctcggccgagaaccaccaggcgt

SEQ ID NO: 1964603 - DNA, 25 bp, Homo sapien
gcaggtgccacgagggtgcgatctc

SEQ ID NO: 1964604 - DNA, 25 bp, Homo sapien
ggagggactcattctccgtgcccat

SEQ ID NO: 1964605 - DNA, 25 bp, Homo sapien
tgcgctgaacaaagttgtgatgtct

SEQ ID NO: 1964606 - DNA, 25 bp, Homo sapien
ttctcctttgcgctgaacaaagttg

SEQ ID NO: 1964607 - DNA, 25 bp, Homo sapien
cccttctcctttgcgctgaacaaag

SEQ ID NO: 1964608 - DNA, 25 bp, Homo sapien
tcctttgcgctgaacaaagttgtga

SEQ ID NO: 1964609 - DNA, 25 bp, Homo sapien
tgcacctgcacatggcacccgtgaa

SEQ ID NO: 1964610 - DNA, 25 bp, Homo sapien
agctgcacctgcacatggcacccgt

SEQ ID NO: 1964611 - DNA, 25 bp, Homo sapien
acatggcacccgtgaactccggcat

SEQ ID NO: 1964612 - DNA, 25 bp, Homo sapien
tggcacccgtgaactccggcatctt

SEQ ID NO: 1964613 - DNA, 25 bp, Homo sapien
ttgtccgagtaacaggccacgtgtg

SEQ ID NO: 1964614 - DNA, 25 bp, Homo sapien
gcggtttagttcacaccgtggagga

SEQ ID NO: 1964615 - DNA, 25 bp, Homo sapien
aacaccgtccatcggcatctctggg

SEQ ID NO: 1964616 - DNA, 25 bp, Homo sapien
ctgtccgatttaggttgaaacaccg

SEQ ID NO: 1964617 - DNA, 25 bp, Homo sapien
gcatcctgcatcgttctttctccat

SEQ ID NO: 1964618 - DNA, 25 bp, Homo sapien
cacctggctcgcagcatccaagcca

SEQ ID NO: 1964619 - DNA, 25 bp, Homo sapien
cagagatgcatcctgcatcgttctt

SEQ ID NO: 1964620 - DNA, 25 bp, Homo sapien
gccagggctacgcagagcagctgct

SEQ ID NO: 1964621 - DNA, 25 bp, Homo sapien
actctggttggccaaatcatgaaga

SEQ ID NO: 1964622 - DNA, 25 bp, Homo sapien
gccaaatcatgaagatccatggagg

SEQ ID NO: 1964623 - DNA, 25 bp, Homo sapien
ggttggccaaatcatgaagatccat

SEQ ID NO: 1964624 - DNA, 25 bp, Homo sapien
ggtgctcactctggttggccaaatc

SEQ ID NO: 1964625 - DNA, 25 bp, Homo sapien
caaacccaactttattatcctgtct

SEQ ID NO: 1964626 - DNA, 25 bp, Homo sapien
ttcaaacggagccctcggacggcgc

SEQ ID NO: 1964627 - DNA, 25 bp, Homo sapien
aaacggagccctcggacggcgcctg

SEQ ID NO: 1964628 - DNA, 25 bp, Homo sapien
gcgaggctacgagaggggcgggacc

SEQ ID NO: 1964629 - DNA, 25 bp, Homo sapien
cgggcggggcgaggctacgagaggg

SEQ ID NO: 1964630 - DNA, 25 bp, Homo sapien
ccaggtcgcggtgaggccctaagcc

SEQ ID NO: 1964631 - DNA, 25 bp, Homo sapien
taagccgctcttcgcccgaaccgcc

SEQ ID NO: 1964632 - DNA, 25 bp, Homo sapien
gccctaagccgctcttcgcccgaac

SEQ ID NO: 1964633 - DNA, 25 bp, Homo sapien
tcttcgcccgaaccgcctcctcgct

SEQ ID NO: 1964634 - DNA, 25 bp, Homo sapien
gcgagagatccaaagatttcagacc

SEQ ID NO: 1964635 - DNA, 25 bp, Homo sapien
cagagaatgtcccaggtgggtgatc

SEQ ID NO: 1964636 - DNA, 25 bp, Homo sapien
taaccaaggagttgcgcgagagatc

SEQ ID NO: 1964637 - DNA, 25 bp, Homo sapien
gtgatcttctcttggtaagttccag

SEQ ID NO: 1964638 - DNA, 25 bp, Homo sapien
cacatccacgagctcggttaaggcg

SEQ ID NO: 1964639 - DNA, 25 bp, Homo sapien
gattgagactctccaatgcagtcag

SEQ ID NO: 1964640 - DNA, 25 bp, Homo sapien
cgaaacacttctgccaacgaggaga

SEQ ID NO: 1964641 - DNA, 25 bp, Homo sapien
caaaaaggcggtagtcaggctcaac

SEQ ID NO: 1964642 - DNA, 25 bp, Homo sapien
ggccaccaggctcccacccaagaac

SEQ ID NO: 1964643 - DNA, 25 bp, Homo sapien
agaactcctggagcttcctcatgta

SEQ ID NO: 1964644 - DNA, 25 bp, Homo sapien
aggctcccacccaagaactcctgga

SEQ ID NO: 1964645 - DNA, 25 bp, Homo sapien
tcctggagcttcctcatgtaaatcc

SEQ ID NO: 1964646 - DNA, 25 bp, Homo sapien
tctctttggagtcgagtgagtcctc

SEQ ID NO: 1964647 - DNA, 25 bp, Homo sapien
tcgggaagccttccgctcgcttgct

SEQ ID NO: 1964648 - DNA, 25 bp, Homo sapien
tgatgcaaaatgcagtcgggaagcc

SEQ ID NO: 1964649 - DNA, 25 bp, Homo sapien
tttcaaagaagctgggacgctctct

SEQ ID NO: 1964650 - DNA, 25 bp, Homo sapien
tgggtgtccgtagcacttccgttca

SEQ ID NO: 1964651 - DNA, 25 bp, Homo sapien
ggtgtccgtagcacttccgttcata

SEQ ID NO: 1964652 - DNA, 25 bp, Homo sapien
tctgggtgtccgtagcacttccgtt

SEQ ID NO: 1964653 - DNA, 25 bp, Homo sapien
cactctgggtgtccgtagcacttcc

SEQ ID NO: 1964654 - DNA, 25 bp, Homo sapien
tctgagggaagaggcgatcccaggg

SEQ ID NO: 1964655 - DNA, 25 bp, Homo sapien
gggatgcagagccatttcggagaca

SEQ ID NO: 1964656 - DNA, 25 bp, Homo sapien
tgtccacgcagcaagtagtctggtt

SEQ ID NO: 1964657 - DNA, 25 bp, Homo sapien
cagcaagtagtctggtttgaaatgg

SEQ ID NO: 1964658 - DNA, 25 bp, Homo sapien
agcaggaaagtgcatccacacgttg

SEQ ID NO: 1964659 - DNA, 25 bp, Homo sapien
ttgtgacttttacaccaaccaaaca

SEQ ID NO: 1964660 - DNA, 25 bp, Homo sapien
cacacgttgccgctggtcacggtca

SEQ ID NO: 1964661 - DNA, 25 bp, Homo sapien
tcacggtcagcagcgtgaatggcgg

SEQ ID NO: 1964662 - DNA, 25 bp, Homo sapien
agtgacgctccgtgcccgcgcgcac

SEQ ID NO: 1964663 - DNA, 25 bp, Homo sapien
gagtgacgctccgtgcccgcgcgca

SEQ ID NO: 1964664 - DNA, 25 bp, Homo sapien
gtgacgctccgtgcccgcgcgcacc

SEQ ID NO: 1964665 - DNA, 25 bp, Homo sapien
cgagtgacgctccgtgcccgcgcgc

SEQ ID NO: 1964666 - DNA, 25 bp, Homo sapien
tgcagtggcgctccatgtctgcacg

SEQ ID NO: 1964667 - DNA, 25 bp, Homo sapien
cagtggcgctccatgtctgcacgca

SEQ ID NO: 1964668 - DNA, 25 bp, Homo sapien
agtggcgctccatgtctgcacgcac

SEQ ID NO: 1964669 - DNA, 25 bp, Homo sapien
gcagtggcgctccatgtctgcacgc

SEQ ID NO: 1964670 - DNA, 25 bp, Homo sapien
ttggccaaggcctcggtgcacttgg

SEQ ID NO: 1964671 - DNA, 25 bp, Homo sapien
aaggcctcggtgcacttggctctgg

SEQ ID NO: 1964672 - DNA, 25 bp, Homo sapien
caaggcctcggtgcacttggctctg

SEQ ID NO: 1964673 - DNA, 25 bp, Homo sapien
gccaaggcctcggtgcacttggctc

SEQ ID NO: 1964674 - DNA, 25 bp, Homo sapien
gttcaggactgcctcgtcatccgca

SEQ ID NO: 1964675 - DNA, 25 bp, Homo sapien
ggtcccactcgcactctgcaatgag

SEQ ID NO: 1964676 - DNA, 25 bp, Homo sapien
ggcctcacgccccttctggctgaag

SEQ ID NO: 1964677 - DNA, 25 bp, Homo sapien
ttgggaaccacgagagtcggcctca

SEQ ID NO: 1964678 - DNA, 25 bp, Homo sapien
tacagtggcggaagctctccacaga

SEQ ID NO: 1964679 - DNA, 25 bp, Homo sapien
tactgtaccaactgcgggctcaaca

SEQ ID NO: 1964680 - DNA, 25 bp, Homo sapien
tctggctccgctccgtacagtggcg

SEQ ID NO: 1964681 - DNA, 25 bp, Homo sapien
ccaactgcgggctcaacagatgtct

SEQ ID NO: 1964682 - DNA, 25 bp, Homo sapien
tcaacaacgcgttccaaacaacgtc

SEQ ID NO: 1964683 - DNA, 25 bp, Homo sapien
agcttcgcgtgttcaccccgtgatg

SEQ ID NO: 1964684 - DNA, 25 bp, Homo sapien
aaacaacgtctaagcacacgcccat

SEQ ID NO: 1964685 - DNA, 25 bp, Homo sapien
gatgaccgacgtgcagtacgcttca

SEQ ID NO: 1964686 - DNA, 25 bp, Homo sapien
ctcagtctccgaggcctcaggctga

SEQ ID NO: 1964687 - DNA, 25 bp, Homo sapien
tcctggtccgaaaacgtctggaatc

SEQ ID NO: 1964688 - DNA, 25 bp, Homo sapien
ccaacttctgagaagaggccgagtc

SEQ ID NO: 1964689 - DNA, 25 bp, Homo sapien
gaatcttccaacaggcattcttcgc

SEQ ID NO: 1964690 - DNA, 25 bp, Homo sapien
gagccgagtgtgacccgggagacgg

SEQ ID NO: 1964691 - DNA, 25 bp, Homo sapien
tcttcttcccgggtagagccgagtg

SEQ ID NO: 1964692 - DNA, 25 bp, Homo sapien
ctgcagggccgtcttcttcccgggt

SEQ ID NO: 1964693 - DNA, 25 bp, Homo sapien
ttcccgggtagagccgagtgtgacc

SEQ ID NO: 1964694 - DNA, 25 bp, Homo sapien
agctcctgtccaccaggtccaagag

SEQ ID NO: 1964695 - DNA, 25 bp, Homo sapien
cccagctcctgtccaccaggtccaa

SEQ ID NO: 1964696 - DNA, 25 bp, Homo sapien
aggtccaagagcgtctccaggagcg

SEQ ID NO: 1964697 - DNA, 25 bp, Homo sapien
caccaggtccaagagcgtctccagg

SEQ ID NO: 1964698 - DNA, 25 bp, Homo sapien
aggaatgcctcgttgctgtgcaggg

SEQ ID NO: 1964699 - DNA, 25 bp, Homo sapien
ggaatgcctcgttgctgtgcaggga

SEQ ID NO: 1964700 - DNA, 25 bp, Homo sapien
gaatgcctcgttgctgtgcagggac

SEQ ID NO: 1964701 - DNA, 25 bp, Homo sapien
aaggaatgcctcgttgctgtgcagg

SEQ ID NO: 1964702 - DNA, 25 bp, Homo sapien
tcctgagctgctgtgaattcttcaa

SEQ ID NO: 1964703 - DNA, 25 bp, Homo sapien
accatcgcagagctgtcctgagctg

SEQ ID NO: 1964704 - DNA, 25 bp, Homo sapien
cttcacccaccatcgcagagctgtc

SEQ ID NO: 1964705 - DNA, 25 bp, Homo sapien
caacagatgacaagatgtgtcttgc

SEQ ID NO: 1964706 - DNA, 25 bp, Homo sapien
gctgctcagcaaggcggctttgcag

SEQ ID NO: 1964707 - DNA, 25 bp, Homo sapien
gctttgcagggacttactctccaga

SEQ ID NO: 1964708 - DNA, 25 bp, Homo sapien
tgtgtgtggtgcagctccgccgtca

SEQ ID NO: 1964709 - DNA, 25 bp, Homo sapien
gtcacctcgctcatctcccgggcgt

SEQ ID NO: 1964710 - DNA, 25 bp, Homo sapien
aggcctcagatgagacggtggcccc

SEQ ID NO: 1964711 - DNA, 25 bp, Homo sapien
aggcctcagatgagacggcggcccc

SEQ ID NO: 1964712 - DNA, 25 bp, Homo sapien
agcctgggaggatcctgtcccgtga

SEQ ID NO: 1964713 - DNA, 25 bp, Homo sapien
ctgtgctaaggatgccagcagcccg

SEQ ID NO: 1964714 - DNA, 25 bp, Homo sapien
tggttcccatgaaacggacagtatg

SEQ ID NO: 1964715 - DNA, 25 bp, Homo sapien
cgggccgacttcactcgcaatttaa

SEQ ID NO: 1964716 - DNA, 25 bp, Homo sapien
gaggcccacatgtgtttaaatacag

SEQ ID NO: 1964717 - DNA, 25 bp, Homo sapien
tcagaggcagttttcgaagccgtcc

SEQ ID NO: 1964718 - DNA, 25 bp, Homo sapien
cgtgtgcttaaatgcagaggcttct

SEQ ID NO: 1964719 - DNA, 25 bp, Homo sapien
acgggggaccacgtgtgcttaaatg

SEQ ID NO: 1964720 - DNA, 25 bp, Homo sapien
gggaccacgtgtgcttaaatgcaga

SEQ ID NO: 1964721 - DNA, 25 bp, Homo sapien
ccacgtgtgcttaaatgcagaggct

SEQ ID NO: 1964722 - DNA, 25 bp, Homo sapien
ccacgttggtttaaaagcagaggct

SEQ ID NO: 1964723 - DNA, 25 bp, Homo sapien
cacgttggtttaaaagcagaggctt

SEQ ID NO: 1964724 - DNA, 25 bp, Homo sapien
gccacgttggtttaaaagcagaggc

SEQ ID NO: 1964725 - DNA, 25 bp, Homo sapien
aaagacatcatcagtgacggcgccc

SEQ ID NO: 1964726 - DNA, 25 bp, Homo sapien
tcatgtgaccgagggatgagcgtcc

SEQ ID NO: 1964727 - DNA, 25 bp, Homo sapien
cagagggcaaaaaagcaggcgtcca

SEQ ID NO: 1964728 - DNA, 25 bp, Homo sapien
taaacttgggtgcttctggagtgac

SEQ ID NO: 1964729 - DNA, 25 bp, Homo sapien
tcccagctctttttcatttgtttct

SEQ ID NO: 1964730 - DNA, 25 bp, Homo sapien
ctttttcatttgtttctttgaggca

SEQ ID NO: 1964731 - DNA, 25 bp, Homo sapien
ttttcatttgtttctttgaggcaaa

SEQ ID NO: 1964732 - DNA, 25 bp, Homo sapien
ctctttttcatttgtttctttgagg

SEQ ID NO: 1964733 - DNA, 25 bp, Homo sapien
gctcagtgagcccacccgccgacag

SEQ ID NO: 1964734 - DNA, 25 bp, Homo sapien
ctcgtgctgggggtatcgccgcttc

SEQ ID NO: 1964735 - DNA, 25 bp, Homo sapien
ggtatcgccgcttcatccttctccg

SEQ ID NO: 1964736 - DNA, 25 bp, Homo sapien
cttctccgctcagtgagcccacccg

SEQ ID NO: 1964737 - DNA, 25 bp, Homo sapien
cacaggacgagctgtcatcgaggag

SEQ ID NO: 1964738 - DNA, 25 bp, Homo sapien
ggccacgcctgcagctacacggcag

SEQ ID NO: 1964739 - DNA, 25 bp, Homo sapien
ggagcacaggacgagctgtcatcga

SEQ ID NO: 1964740 - DNA, 25 bp, Homo sapien
gcacaggacgagctgtcatcgagga

SEQ ID NO: 1964741 - DNA, 25 bp, Homo sapien
gctcctttcatatcctcaaagtatg

SEQ ID NO: 1964742 - DNA, 25 bp, Homo sapien
gccctcacggacactgcgagcccca

SEQ ID NO: 1964743 - DNA, 25 bp, Homo sapien
ctttcatatcctcaaagtatggaga

SEQ ID NO: 1964744 - DNA, 25 bp, Homo sapien
cagtgtgaggcaccggtggccctgc

SEQ ID NO: 1964745 - DNA, 25 bp, Homo sapien
ttcatactcaacaaaagcgatttta

SEQ ID NO: 1964746 - DNA, 25 bp, Homo sapien
cagcgatctgcaaatttaacgtggc

SEQ ID NO: 1964747 - DNA, 25 bp, Homo sapien
aatttaacgtggctgcagtgtctgc

SEQ ID NO: 1964748 - DNA, 25 bp, Homo sapien
caacaaaagcgattttaacctactg

SEQ ID NO: 1964749 - DNA, 25 bp, Homo sapien
ctgctcacttccctcagtgaagaat

SEQ ID NO: 1964750 - DNA, 25 bp, Homo sapien
gctcacttccctcagtgaagaattt

SEQ ID NO: 1964751 - DNA, 25 bp, Homo sapien
tgctcacttccctcagtgaagaatt

SEQ ID NO: 1964752 - DNA, 25 bp, Homo sapien
gctgctcacttccctcagtgaagaa

SEQ ID NO: 1964753 - DNA, 25 bp, Homo sapien
gggaggacgccagacaggagcagca

SEQ ID NO: 1964754 - DNA, 25 bp, Homo sapien
caaattcgatggcagcataaccatg

SEQ ID NO: 1964755 - DNA, 25 bp, Homo sapien
gcagcataaccatgggaggacgcca

SEQ ID NO: 1964756 - DNA, 25 bp, Homo sapien
cgatggcagcataaccatgggagga

SEQ ID NO: 1964757 - DNA, 25 bp, Homo sapien
ggcacagcttcaggaccttccagtc

SEQ ID NO: 1964758 - DNA, 25 bp, Homo sapien
gccgcgtgaagtctatgtcgatgga

SEQ ID NO: 1964759 - DNA, 25 bp, Homo sapien
cagtgtgaaggccacgccgcgtgaa

SEQ ID NO: 1964760 - DNA, 25 bp, Homo sapien
tcgatggacatgttcacgtagggca

SEQ ID NO: 1964761 - DNA, 25 bp, Homo sapien
agcctcttcacacttgtttgaagtc

SEQ ID NO: 1964762 - DNA, 25 bp, Homo sapien
atcttgtcgtagtgctccaggtgct

SEQ ID NO: 1964763 - DNA, 25 bp, Homo sapien
gttccacaatctcgccacacagcct

SEQ ID NO: 1964764 - DNA, 25 bp, Homo sapien
cctggatcttgtcgtagtgctccag

SEQ ID NO: 1964765 - DNA, 25 bp, Homo sapien
ccacccaagtctcacgggcaggcac

SEQ ID NO: 1964766 - DNA, 25 bp, Homo sapien
gggcccacccaagtctcacgggcag

SEQ ID NO: 1964767 - DNA, 25 bp, Homo sapien
ctcgggggcccacccaagtctcacg

SEQ ID NO: 1964768 - DNA, 25 bp, Homo sapien
gcccacccaagtctcacgggcaggc

SEQ ID NO: 1964769 - DNA, 25 bp, Homo sapien
tcacagtcccatctcacagtccatg

SEQ ID NO: 1964770 - DNA, 25 bp, Homo sapien
ctcacagtcccatctcacagtccat

SEQ ID NO: 1964771 - DNA, 25 bp, Homo sapien
cacagtcccatctcacagtccatgc

SEQ ID NO: 1964772 - DNA, 25 bp, Homo sapien
tcacactcagggttgatacctcaca

SEQ ID NO: 1964773 - DNA, 25 bp, Homo sapien
acagtcacacctcacactcagggtt

SEQ ID NO: 1964774 - DNA, 25 bp, Homo sapien
tcagggttgatacctcacagcccac

SEQ ID NO: 1964775 - DNA, 25 bp, Homo sapien
cacctcacactcagggttgatacct

SEQ ID NO: 1964776 - DNA, 25 bp, Homo sapien
acgcctcacagtcacgcctcacagt

SEQ ID NO: 1964777 - DNA, 25 bp, Homo sapien
tcacgcctcacagtcacgcctcaca

SEQ ID NO: 1964778 - DNA, 25 bp, Homo sapien
agtcacgcctcacagtcacgcctca

SEQ ID NO: 1964779 - DNA, 25 bp, Homo sapien
cacagtcacgcctcacagtcacgcc

SEQ ID NO: 1964780 - DNA, 25 bp, Homo sapien
cacagtcacacctcacagtcacacc

SEQ ID NO: 1964781 - DNA, 25 bp, Homo sapien
aacccaggtaagtgtggcagcctca

SEQ ID NO: 1964782 - DNA, 25 bp, Homo sapien
acttacacctgtgatgggccccatg

SEQ ID NO: 1964783 - DNA, 25 bp, Homo sapien
ccagactgtggtcgaacccaggtaa

SEQ ID NO: 1964784 - DNA, 25 bp, Homo sapien
ggcagagcctggctacgcctatgac

SEQ ID NO: 1964785 - DNA, 25 bp, Homo sapien
gggcagaagcccaatgccaccatgt

SEQ ID NO: 1964786 - DNA, 25 bp, Homo sapien
gcagaagcccaatgccaccatgttt

SEQ ID NO: 1964787 - DNA, 25 bp, Homo sapien
gagaatgacccccaactgtaccttg

SEQ ID NO: 1964788 - DNA, 25 bp, Homo sapien
caccatgtttgggagctgtgcaccc

SEQ ID NO: 1964789 - DNA, 25 bp, Homo sapien
gctgaacaggctaatgagtgactga

SEQ ID NO: 1964790 - DNA, 25 bp, Homo sapien
cttggctattccagctacgcatggt

SEQ ID NO: 1964791 - DNA, 25 bp, Homo sapien
gagtgactgaatggcgccttggcta

SEQ ID NO: 1964792 - DNA, 25 bp, Homo sapien
tcatggctagcaaaacaatgttcta

SEQ ID NO: 1964793 - DNA, 25 bp, Homo sapien
ggagcagccttggaggtgcggctca

SEQ ID NO: 1964794 - DNA, 25 bp, Homo sapien
ctccttcccaaccactgtcctgacc

SEQ ID NO: 1964795 - DNA, 25 bp, Homo sapien
gcagccttggaggtgcggctcagca

SEQ ID NO: 1964796 - DNA, 25 bp, Homo sapien
tgggagcagccttggaggtgcggct

SEQ ID NO: 1964797 - DNA, 25 bp, Homo sapien
tccctgcatgggcacgaaggtgccc

SEQ ID NO: 1964798 - DNA, 25 bp, Homo sapien
ggcacttccgtcctctccagcggtg

SEQ ID NO: 1964799 - DNA, 25 bp, Homo sapien
tccagcggtgtggccctcacctgct

SEQ ID NO: 1964800 - DNA, 25 bp, Homo sapien
agggaagcggctgcttggcacttcc

SEQ ID NO: 1964801 - DNA, 25 bp, Homo sapien
ggtagctccagtgcatctgctccac

SEQ ID NO: 1964802 - DNA, 25 bp, Homo sapien
acctcggctctgtgctgcgcccgca

SEQ ID NO: 1964803 - DNA, 25 bp, Homo sapien
tgagctcctggtagctccagtgcat

SEQ ID NO: 1964804 - DNA, 25 bp, Homo sapien
tggctggcgctgctgtgtggaaaca

SEQ ID NO: 1964805 - DNA, 25 bp, Homo sapien
caggaagcttaaggggtggcccagc

SEQ ID NO: 1964806 - DNA, 25 bp, Homo sapien
taaggggtggcccagcttctcggca

SEQ ID NO: 1964807 - DNA, 25 bp, Homo sapien
aaggggtggcccagcttctcggcag

SEQ ID NO: 1964808 - DNA, 25 bp, Homo sapien
gggtggcccagcttctcggcaggag

SEQ ID NO: 1964809 - DNA, 25 bp, Homo sapien
cagagggcttggagtaatcatatca

SEQ ID NO: 1964810 - DNA, 25 bp, Homo sapien
gctacaggtcctgaatacattccaa

SEQ ID NO: 1964811 - DNA, 25 bp, Homo sapien
tgctttagaaaaccaagctacaggt

SEQ ID NO: 1964812 - DNA, 25 bp, Homo sapien
gaactcttgccagccagtacactca

SEQ ID NO: 1964813 - DNA, 25 bp, Homo sapien
ttgtttattaaataaagattgcttg

SEQ ID NO: 1964814 - DNA, 25 bp, Homo sapien
cagaacaatgtatttgtttattaaa

SEQ ID NO: 1964815 - DNA, 25 bp, Homo sapien
tttcagaacaatgtatttgtttatt

SEQ ID NO: 1964816 - DNA, 25 bp, Homo sapien
tgtttattaaataaagattgcttgt

SEQ ID NO: 1964817 - DNA, 25 bp, Homo sapien
actcagttataatttgtatacagcc

SEQ ID NO: 1964818 - DNA, 25 bp, Homo sapien
gaacttaattattcccactcaccta

SEQ ID NO: 1964819 - DNA, 25 bp, Homo sapien
tcacctatcatggtgcacagcttgt

SEQ ID NO: 1964820 - DNA, 25 bp, Homo sapien
catggtgcacagcttgttctataaa

SEQ ID NO: 1964821 - DNA, 25 bp, Homo sapien
tacacaactagcagtcgggcctgcg

SEQ ID NO: 1964822 - DNA, 25 bp, Homo sapien
cggcagacgtggtcatacacaacta

SEQ ID NO: 1964823 - DNA, 25 bp, Homo sapien
ggtgctaacacttcaggcaatgggt

SEQ ID NO: 1964824 - DNA, 25 bp, Homo sapien
gcaatgggtgctgaaaacatggacc

SEQ ID NO: 1964825 - DNA, 25 bp, Homo sapien
gcaaattatggtcgttaaacacatc

SEQ ID NO: 1964826 - DNA, 25 bp, Homo sapien
aagcaaattatggtcgttaaacaca

SEQ ID NO: 1964827 - DNA, 25 bp, Homo sapien
aagtcatccattcttgaggcgaatt

SEQ ID NO: 1964828 - DNA, 25 bp, Homo sapien
tcttgaggcgaattattgatagaag

SEQ ID NO: 1964829 - DNA, 25 bp, Homo sapien
tgagcctggcttgcaaacctgtagt

SEQ ID NO: 1964830 - DNA, 25 bp, Homo sapien
gatgtccacgtcatggctgttctga

SEQ ID NO: 1964831 - DNA, 25 bp, Homo sapien
ctgtggctcctgctgtacaagtgga

SEQ ID NO: 1964832 - DNA, 25 bp, Homo sapien
ctgtgggcaatcacgcgtgcactgg

SEQ ID NO: 1964833 - DNA, 25 bp, Homo sapien
gcagaagccccagggcggagctccc

SEQ ID NO: 1964834 - DNA, 25 bp, Homo sapien
cccagccagcatggtccgctgaggg

SEQ ID NO: 1964835 - DNA, 25 bp, Homo sapien
agaagccccagggcggagctcccag

SEQ ID NO: 1964836 - DNA, 25 bp, Homo sapien
cagccagcatggtccgctgagggct

SEQ ID NO: 1964837 - DNA, 25 bp, Homo sapien
ttcacgggctcccacaaggagcgct

SEQ ID NO: 1964838 - DNA, 25 bp, Homo sapien
aggagcgcttcgacccctctggcaa

SEQ ID NO: 1964839 - DNA, 25 bp, Homo sapien
acggacaccaccaagttcacgggct

SEQ ID NO: 1964840 - DNA, 25 bp, Homo sapien
catctcgtcgcccacagtgtcgagg

SEQ ID NO: 1964841 - DNA, 25 bp, Homo sapien
gggcaaggcgcccatcatctcaggg

SEQ ID NO: 1964842 - DNA, 25 bp, Homo sapien
gattcaaagacaagagcagcgagga

SEQ ID NO: 1964843 - DNA, 25 bp, Homo sapien
tgcacaggctcatcgagggcaaggc

SEQ ID NO: 1964844 - DNA, 25 bp, Homo sapien
gaggagctcgccaagaagcgattca

SEQ ID NO: 1964845 - DNA, 25 bp, Homo sapien
tgccctcggaatgcttggcctgctg

SEQ ID NO: 1964846 - DNA, 25 bp, Homo sapien
ccactttgggttagttgtggtagat

SEQ ID NO: 1964847 - DNA, 25 bp, Homo sapien
gcctcatccacaggatctcttgttt

SEQ ID NO: 1964848 - DNA, 25 bp, Homo sapien
tttctcgcgctgtccagaggcttcc

SEQ ID NO: 1964849 - DNA, 25 bp, Homo sapien
cttaacggtgtcttctgagagcaga

SEQ ID NO: 1964850 - DNA, 25 bp, Homo sapien
tctcaggcatgtctcctagtctgtg

SEQ ID NO: 1964851 - DNA, 25 bp, Homo sapien
cactataggccatgttttgttgcca

SEQ ID NO: 1964852 - DNA, 25 bp, Homo sapien
tgcatgcacgtgtcttctctggtgg

SEQ ID NO: 1964853 - DNA, 25 bp, Homo sapien
tccgtgtgcttgtcggtacttccct

SEQ ID NO: 1964854 - DNA, 25 bp, Homo sapien
tgtgcttgtcggtacttccctgacg

SEQ ID NO: 1964855 - DNA, 25 bp, Homo sapien
gtgtgcttgtcggtacttccctgac

SEQ ID NO: 1964856 - DNA, 25 bp, Homo sapien
ctccgtgtgcttgtcggtacttccc

SEQ ID NO: 1964857 - DNA, 25 bp, Homo sapien
tgctcagctcgaggtgccggcagtt

SEQ ID NO: 1964858 - DNA, 25 bp, Homo sapien
acccaggaacgggactgctgggcca

SEQ ID NO: 1964859 - DNA, 25 bp, Homo sapien
catttctcttgagcaaggacccagg

SEQ ID NO: 1964860 - DNA, 25 bp, Homo sapien
ctttggctgtgatgagaagctgtcc

SEQ ID NO: 1964861 - DNA, 25 bp, Homo sapien
tgagcttcctgttgtgtacggcgca

SEQ ID NO: 1964862 - DNA, 25 bp, Homo sapien
tgttcctagactgcgtgtcctgctg

SEQ ID NO: 1964863 - DNA, 25 bp, Homo sapien
tctcctgggtcgtgcatgttcctag

SEQ ID NO: 1964864 - DNA, 25 bp, Homo sapien
tgctccgtggcgatgtcacatgtgt

SEQ ID NO: 1964865 - DNA, 25 bp, Homo sapien
cagcctggtcacttcccaaggaatg

SEQ ID NO: 1964866 - DNA, 25 bp, Homo sapien
ccagtcggctgccatcagagtgtct

SEQ ID NO: 1964867 - DNA, 25 bp, Homo sapien
tgtggcgtgcgtgcctgatgctccc

SEQ ID NO: 1964868 - DNA, 25 bp, Homo sapien
ggaatgcttgccctcgggttctggt

SEQ ID NO: 1964869 - DNA, 25 bp, Homo sapien
agcttgcaacacagcgtgcccttca

SEQ ID NO: 1964870 - DNA, 25 bp, Homo sapien
agctgagagatgcctgaatactgct

SEQ ID NO: 1964871 - DNA, 25 bp, Homo sapien
tgaatactgctgagcgcctcggccc

SEQ ID NO: 1964872 - DNA, 25 bp, Homo sapien
aatcagcttgcaacacagcgtgccc

SEQ ID NO: 1964873 - DNA, 25 bp, Homo sapien
cacgagagggtcctgttccggcagt

SEQ ID NO: 1964874 - DNA, 25 bp, Homo sapien
gccatctgcaggcacgagagggtcc

SEQ ID NO: 1964875 - DNA, 25 bp, Homo sapien
cttcggcgtcaaggtggaaactgtg

SEQ ID NO: 1964876 - DNA, 25 bp, Homo sapien
ggacattggagggtccatcaggccc

SEQ ID NO: 1964877 - DNA, 25 bp, Homo sapien
tgcccgctgtccctgagaccaccat

SEQ ID NO: 1964878 - DNA, 25 bp, Homo sapien
gatgcccgctgtccctgagaccacc

SEQ ID NO: 1964879 - DNA, 25 bp, Homo sapien
gccccaggtgctcgtgctcagcgcc

SEQ ID NO: 1964880 - DNA, 25 bp, Homo sapien
caggtgctcgtgctcagcgccgccc

SEQ ID NO: 1964881 - DNA, 25 bp, Homo sapien
gtccgttttcccgtcgaagctgcaa

SEQ ID NO: 1964882 - DNA, 25 bp, Homo sapien
ttgttcctgccaccttcgtcagtgc

SEQ ID NO: 1964883 - DNA, 25 bp, Homo sapien
tctcttcgtgttccgggagtgggat

SEQ ID NO: 1964884 - DNA, 25 bp, Homo sapien
tgcagttctagtgccagccgttctg

SEQ ID NO: 1964885 - DNA, 25 bp, Homo sapien
gggtgttgcgttccctctcagtgtc

SEQ ID NO: 1964886 - DNA, 25 bp, Homo sapien
gtgttgcgttccctctcagtgtcac

SEQ ID NO: 1964887 - DNA, 25 bp, Homo sapien
tcagtgtcaccgctgatccacctgg

SEQ ID NO: 1964888 - DNA, 25 bp, Homo sapien
ccacctggcatgtttattggctctt

SEQ ID NO: 1964889 - DNA, 25 bp, Homo sapien
tccgcgggacgagaaggcagccgag

SEQ ID NO: 1964890 - DNA, 25 bp, Homo sapien
gaatttctcaggagaactagacaga

SEQ ID NO: 1964891 - DNA, 25 bp, Homo sapien
agaactagacagaagcccatctctg

SEQ ID NO: 1964892 - DNA, 25 bp, Homo sapien
ccagctgcgagtgtggaatttctca

SEQ ID NO: 1964893 - DNA, 25 bp, Homo sapien
ggattctgagtttttcagtctagcc

SEQ ID NO: 1964894 - DNA, 25 bp, Homo sapien
gattctgagtttttcagtctagccc

SEQ ID NO: 1964895 - DNA, 25 bp, Homo sapien
actgggagataggagtatacagcac

SEQ ID NO: 1964896 - DNA, 25 bp, Homo sapien
tgggaaatgggagcaaacagcactg

SEQ ID NO: 1964897 - DNA, 25 bp, Homo sapien
taggagtatacagcactgggaaatg

SEQ ID NO: 1964898 - DNA, 25 bp, Homo sapien
aaatgggagcaaacagcactgggag

SEQ ID NO: 1964899 - DNA, 25 bp, Homo sapien
gcacagtactgggaaatggtagcac

SEQ ID NO: 1964900 - DNA, 25 bp, Homo sapien
cacagtaatgggaaatgggagcaca

SEQ ID NO: 1964901 - DNA, 25 bp, Homo sapien
ctaggaaatgggatcacagtgctgg

SEQ ID NO: 1964902 - DNA, 25 bp, Homo sapien
aatgggagcacagtactgagaaatg

SEQ ID NO: 1964903 - DNA, 25 bp, Homo sapien
cttgctgcttaagagctgatgggcc

SEQ ID NO: 1964904 - DNA, 25 bp, Homo sapien
gatgtccttcgaaggaaccaggacc

SEQ ID NO: 1964905 - DNA, 25 bp, Homo sapien
ggatgcagccacctgcttaactgtg

SEQ ID NO: 1964906 - DNA, 25 bp, Homo sapien
caggagggtttacatctccaggaag

SEQ ID NO: 1964907 - DNA, 25 bp, Homo sapien
cctgtacattaatgggcagatagtg

SEQ ID NO: 1964908 - DNA, 25 bp, Homo sapien
ggtaactgaaagtgcagaaaacaca

SEQ ID NO: 1964909 - DNA, 25 bp, Homo sapien
taaatagagtagtctcctgctcccc

SEQ ID NO: 1964910 - DNA, 25 bp, Homo sapien
ggaatacgttccaagactctcagta

SEQ ID NO: 1964911 - DNA, 25 bp, Homo sapien
cctgccttcaaaattctctcgttgt

SEQ ID NO: 1964912 - DNA, 25 bp, Homo sapien
tatagcctgcttggaattcgttgag

SEQ ID NO: 1964913 - DNA, 25 bp, Homo sapien
tctatgccttgacaatctaactgta

SEQ ID NO: 1964914 - DNA, 25 bp, Homo sapien
taactgtaatgtgtcttagcgtaga

SEQ ID NO: 1964915 - DNA, 25 bp, Homo sapien
tctggaaggatagatttgtcccata

SEQ ID NO: 1964916 - DNA, 25 bp, Homo sapien
catatagaactcttggttgccaggt

SEQ ID NO: 1964917 - DNA, 25 bp, Homo sapien
cagggcatttaaatatgtcacccca

SEQ ID NO: 1964918 - DNA, 25 bp, Homo sapien
gagcctccttagtttctaatgagaa

SEQ ID NO: 1964919 - DNA, 25 bp, Homo sapien
cctcggcggccgataggtttactgt

SEQ ID NO: 1964920 - DNA, 25 bp, Homo sapien
tgatgtgatccgtcctcaggtctcc

SEQ ID NO: 1964921 - DNA, 25 bp, Homo sapien
tggtccctgatttgtgcactgcccc

SEQ ID NO: 1964922 - DNA, 25 bp, Homo sapien
tgccccttcccctagagatggagct

SEQ ID NO: 1964923 - DNA, 25 bp, Homo sapien
gataatgaattcagtttctttgata

SEQ ID NO: 1964924 - DNA, 25 bp, Homo sapien
ttgataatgaattcagtttctttga

SEQ ID NO: 1964925 - DNA, 25 bp, Homo sapien
tgataatgaattcagtttctttgat

SEQ ID NO: 1964926 - DNA, 25 bp, Homo sapien
tcctgaaacttgttcctgtggcgtc

SEQ ID NO: 1964927 - DNA, 25 bp, Homo sapien
gagagtacagtcaagcggacccgca

SEQ ID NO: 1964928 - DNA, 25 bp, Homo sapien
catcccgggcaagtctctggtaaat

SEQ ID NO: 1964929 - DNA, 25 bp, Homo sapien
tgggcaaggccatgtctctctttcc

SEQ ID NO: 1964930 - DNA, 25 bp, Homo sapien
ctgcctttgcggattccagggcctg

SEQ ID NO: 1964931 - DNA, 25 bp, Homo sapien
tactgggaaaggggagttcacagta

SEQ ID NO: 1964932 - DNA, 25 bp, Homo sapien
cacagtactgggaaaggggagttca

SEQ ID NO: 1964933 - DNA, 25 bp, Homo sapien
agtactgggaaaggggagttcacag

SEQ ID NO: 1964934 - DNA, 25 bp, Homo sapien
cagtactgggaaaggggagttcaca

SEQ ID NO: 1964935 - DNA, 25 bp, Homo sapien
gagaaatgggagtacactactgaga

SEQ ID NO: 1964936 - DNA, 25 bp, Homo sapien
ctgagaaatgggagtacactactga

SEQ ID NO: 1964937 - DNA, 25 bp, Homo sapien
gcacagtactgggaaatgggcatac

SEQ ID NO: 1964938 - DNA, 25 bp, Homo sapien
tgggaaatgggcatacagtactgag

SEQ ID NO: 1964939 - DNA, 25 bp, Homo sapien
caggagggtttacatctccaggaag

SEQ ID NO: 1964940 - DNA, 25 bp, Homo sapien
gatgtccttcgaaggaaccaggacc

SEQ ID NO: 1964941 - DNA, 25 bp, Homo sapien
cttgctgcttaagagctgatgggcc

SEQ ID NO: 1964942 - DNA, 25 bp, Homo sapien
ggatgcagccacctgcttaactgtg

SEQ ID NO: 1964943 - DNA, 25 bp, Homo sapien
tgtccgtgtccatgtgagtgcgagt

SEQ ID NO: 1964944 - DNA, 25 bp, Homo sapien
tgccctgagggcatttgtgaaacct

SEQ ID NO: 1964945 - DNA, 25 bp, Homo sapien
cacttacaaggatcggacaatgctc

SEQ ID NO: 1964946 - DNA, 25 bp, Homo sapien
cgtggaatacagaccgatggcataa

SEQ ID NO: 1964947 - DNA, 25 bp, Homo sapien
gcttcagggtgtatctgccatcaaa

SEQ ID NO: 1964948 - DNA, 25 bp, Homo sapien
gaaaaattcagccatagacttggtg

SEQ ID NO: 1964949 - DNA, 25 bp, Homo sapien
agactggagggcagctcccaaatag

SEQ ID NO: 1964950 - DNA, 25 bp, Homo sapien
tagcatcagaatccactcctgtagg

SEQ ID NO: 1964951 - DNA, 25 bp, Homo sapien
cctcggcggccgataggtttactgt

SEQ ID NO: 1964952 - DNA, 25 bp, Homo sapien
tggtccctgatttgtgcactgcccc

SEQ ID NO: 1964953 - DNA, 25 bp, Homo sapien
tgccccttcccctagagatggagct

SEQ ID NO: 1964954 - DNA, 25 bp, Homo sapien
tgatgtgatccgtcctcaggtctcc

SEQ ID NO: 1964955 - DNA, 25 bp, Homo sapien
aagacatcggctctcacggtgttgg

SEQ ID NO: 1964956 - DNA, 25 bp, Homo sapien
aaagaagcatggagagtttggcccc

SEQ ID NO: 1964957 - DNA, 25 bp, Homo sapien
cctccatggaagctcgtggctgaaa

SEQ ID NO: 1964958 - DNA, 25 bp, Homo sapien
tcagcacgctcaggagtgtgtggtc

SEQ ID NO: 1964959 - DNA, 25 bp, Homo sapien
cctcaggtgataggcacgcctcggc

SEQ ID NO: 1964960 - DNA, 25 bp, Homo sapien
tcaggtgataggcacgcctcggctt

SEQ ID NO: 1964961 - DNA, 25 bp, Homo sapien
aggtgataggcacgcctcggcttcc

SEQ ID NO: 1964962 - DNA, 25 bp, Homo sapien
gacctcaggtgataggcacgcctcg

SEQ ID NO: 1964963 - DNA, 25 bp, Homo sapien
tgcccgactcgctgtcctcggtggg

SEQ ID NO: 1964964 - DNA, 25 bp, Homo sapien
tgctgtcctccgtggggtctcttcc

SEQ ID NO: 1964965 - DNA, 25 bp, Homo sapien
cgtggggtctgtccccgctgctaat

SEQ ID NO: 1964966 - DNA, 25 bp, Homo sapien
tcggtggggtctatccctgctgctc

SEQ ID NO: 1964967 - DNA, 25 bp, Homo sapien
gctgcgtgccgtttgtgtccgagca

SEQ ID NO: 1964968 - DNA, 25 bp, Homo sapien
tcccctttggcatgcgggaagcagc

SEQ ID NO: 1964969 - DNA, 25 bp, Homo sapien
gagtcatacgcgaaggccatatggc

SEQ ID NO: 1964970 - DNA, 25 bp, Homo sapien
tgtccgagcatcacgtgtggctcca

SEQ ID NO: 1964971 - DNA, 25 bp, Homo sapien
cctagcttcgaatctgccgcgcgag

SEQ ID NO: 1964972 - DNA, 25 bp, Homo sapien
aggtccgaccgggtgccagctgttc

SEQ ID NO: 1964973 - DNA, 25 bp, Homo sapien
agcgagctcggcaacctcggcgcag

SEQ ID NO: 1964974 - DNA, 25 bp, Homo sapien
gccaaggtccgaccgggtgccagct

SEQ ID NO: 1964975 - DNA, 25 bp, Homo sapien
ctgctgccgcgctgatgcacctcca

SEQ ID NO: 1964976 - DNA, 25 bp, Homo sapien
ctgatgcacctccacgtggaccgtt

SEQ ID NO: 1964977 - DNA, 25 bp, Homo sapien
gaccgttggcgactcggccacacag

SEQ ID NO: 1964978 - DNA, 25 bp, Homo sapien
gaagcgcctgcttcaggtcgcccac

SEQ ID NO: 1964979 - DNA, 25 bp, Homo sapien
ttatgtctgttgagtagctttctaa

SEQ ID NO: 1964980 - DNA, 25 bp, Homo sapien
gtaatcaccaaacacaatattatgt

SEQ ID NO: 1964981 - DNA, 25 bp, Homo sapien
atattatgtctgttgagtagctttc

SEQ ID NO: 1964982 - DNA, 25 bp, Homo sapien
tcaccaaacacaatattatgtctgt

SEQ ID NO: 1964983 - DNA, 25 bp, Homo sapien
gaaaatgtgaagtgcaacagtgcat

SEQ ID NO: 1964984 - DNA, 25 bp, Homo sapien
acagtgcatgcactcaaatcgatgg

SEQ ID NO: 1964985 - DNA, 25 bp, Homo sapien
tgatttgctgcaattatgttttctg

SEQ ID NO: 1964986 - DNA, 25 bp, Homo sapien
aacccagtgatttgctgcaattatg

SEQ ID NO: 1964987 - DNA, 25 bp, Homo sapien
tggcctgctagagcccatccaaatc

SEQ ID NO: 1964988 - DNA, 25 bp, Homo sapien
tgggcttggcctgctagagcccatc

SEQ ID NO: 1964989 - DNA, 25 bp, Homo sapien
ttggcctgctagagcccatccaaat

SEQ ID NO: 1964990 - DNA, 25 bp, Homo sapien
gcttggcctgctagagcccatccaa

SEQ ID NO: 1964991 - DNA, 25 bp, Homo sapien
actgactgaatgaagccctgggctt

SEQ ID NO: 1964992 - DNA, 25 bp, Homo sapien
aatccacctgtttccccacacactg

SEQ ID NO: 1964993 - DNA, 25 bp, Homo sapien
ccacacactgaatgaagccctgggc

SEQ ID NO: 1964994 - DNA, 25 bp, Homo sapien
ttggcctgccagagcccatccaaat

SEQ ID NO: 1964995 - DNA, 25 bp, Homo sapien
cacatcgtataccaagctgtcccaa

SEQ ID NO: 1964996 - DNA, 25 bp, Homo sapien
tgggatttgacttccacatcgtata

SEQ ID NO: 1964997 - DNA, 25 bp, Homo sapien
tataccaagctgtcccaaagcccat

SEQ ID NO: 1964998 - DNA, 25 bp, Homo sapien
gacttccacatcgtataccaagctg

SEQ ID NO: 1964999 - DNA, 25 bp, Homo sapien
gtgatgaggttgctgttgacgttct

SEQ ID NO: 1965000 - DNA, 25 bp, Homo sapien
aagttgtcatcacataatcgaggag

SEQ ID NO: 1965001 - DNA, 25 bp, Homo sapien
agtaaagttgtcatcacataatcga

SEQ ID NO: 1965002 - DNA, 25 bp, Homo sapien
tgatgaggttgctgttgacgttctt

SEQ ID NO: 1965003 - DNA, 25 bp, Homo sapien
cgtggagcagcaccacccggttcca

SEQ ID NO: 1965004 - DNA, 25 bp, Homo sapien
gtggagcagcaccacccggttccag

SEQ ID NO: 1965005 - DNA, 25 bp, Homo sapien
tttctgggctaacgctttacacagg

SEQ ID NO: 1965006 - DNA, 25 bp, Homo sapien
gctaacgctttacacagggatgttt

SEQ ID NO: 1965007 - DNA, 25 bp, Homo sapien
caatttctgggctaacgctttacac

SEQ ID NO: 1965008 - DNA, 25 bp, Homo sapien
tgggctaacgctttacacagggatg

SEQ ID NO: 1965009 - DNA, 25 bp, Homo sapien
tgtttatttcaattaattggccata

SEQ ID NO: 1965010 - DNA, 25 bp, Homo sapien
tttcaattaattggccatatcggta

SEQ ID NO: 1965011 - DNA, 25 bp, Homo sapien
aaaaccacttagaaaagaggctgtg

SEQ ID NO: 1965012 - DNA, 25 bp, Homo sapien
cgaaaaccacttagaaaagaggctg

SEQ ID NO: 1965013 - DNA, 25 bp, Homo sapien
tgagggtgacctgtacctctgcttt

SEQ ID NO: 1965014 - DNA, 25 bp, Homo sapien
gtgagggtgacctgtacctctgctt

SEQ ID NO: 1965015 - DNA, 25 bp, Homo sapien
ccttttagtgtcaacgtgcagggac

SEQ ID NO: 1965016 - DNA, 25 bp, Homo sapien
caaacacccttttagtgtcaacgtg

SEQ ID NO: 1965017 - DNA, 25 bp, Homo sapien
ttagtgtcaacgtgcagggaccaca

SEQ ID NO: 1965018 - DNA, 25 bp, Homo sapien
cacccttttagtgtcaacgtgcagg

SEQ ID NO: 1965019 - DNA, 25 bp, Homo sapien
ctcatcaatcagcacgaacaccagg

SEQ ID NO: 1965020 - DNA, 25 bp, Homo sapien
cttctgaaacatcttggttaccagc

SEQ ID NO: 1965021 - DNA, 25 bp, Homo sapien
cagggcgtctttatcatcaatcaaa

SEQ ID NO: 1965022 - DNA, 25 bp, Homo sapien
gaaacatcttggttaccagcttgcc

SEQ ID NO: 1965023 - DNA, 25 bp, Homo sapien
cacgcggatggcatctgatggctcg

SEQ ID NO: 1965024 - DNA, 25 bp, Homo sapien
gtcaagacagcattgaccacgcgga

SEQ ID NO: 1965025 - DNA, 25 bp, Homo sapien
acagcattgaccacgcggatggcat

SEQ ID NO: 1965026 - DNA, 25 bp, Homo sapien
ccctgcaggcatttcgggcggctgt

SEQ ID NO: 1965027 - DNA, 25 bp, Homo sapien
gaagtggtcagaatcacaacattgg

SEQ ID NO: 1965028 - DNA, 25 bp, Homo sapien
gaaggccacgtcgatcttctcggtg

SEQ ID NO: 1965029 - DNA, 25 bp, Homo sapien
gagggtggcccaatgtactgcttga

SEQ ID NO: 1965030 - DNA, 25 bp, Homo sapien
ttcttccaaacaagagaggtagatt

SEQ ID NO: 1965031 - DNA, 25 bp, Homo sapien
acgctccccgcacgcgtcgctctgc

SEQ ID NO: 1965032 - DNA, 25 bp, Homo sapien
tcactgtgcccgtggcgacggccct

SEQ ID NO: 1965033 - DNA, 25 bp, Homo sapien
cctcctgactcacacacgctccccg

SEQ ID NO: 1965034 - DNA, 25 bp, Homo sapien
ccgcacgcgtcgctctgcccgtggc

SEQ ID NO: 1965035 - DNA, 25 bp, Homo sapien
cttgaaatgtcattcaaaagaaggc

SEQ ID NO: 1965036 - DNA, 25 bp, Homo sapien
aagaaggctcaattttgacacgttg

SEQ ID NO: 1965037 - DNA, 25 bp, Homo sapien
gaaggctcaattttgacacgttgtt

SEQ ID NO: 1965038 - DNA, 25 bp, Homo sapien
aaggctcaattttgacacgttgttt

SEQ ID NO: 1965039 - DNA, 25 bp, Homo sapien
ctggacatacagcgcatgagccaga

SEQ ID NO: 1965040 - DNA, 25 bp, Homo sapien
gttttctcaggacccggccgctgag

SEQ ID NO: 1965041 - DNA, 25 bp, Homo sapien
gacccggccgctgaggccctcgctc

SEQ ID NO: 1965042 - DNA, 25 bp, Homo sapien
tacagcgcatgagccagaaagggga

SEQ ID NO: 1965043 - DNA, 25 bp, Homo sapien
cagggcctggaggaacccctctatg

SEQ ID NO: 1965044 - DNA, 25 bp, Homo sapien
tcagatgtaagctgcaagcttcttt

SEQ ID NO: 1965045 - DNA, 25 bp, Homo sapien
tctcttcaaactgcttgtccactgc

SEQ ID NO: 1965046 - DNA, 25 bp, Homo sapien
ttctctcttcaaactgcttgtccac

SEQ ID NO: 1965047 - DNA, 25 bp, Homo sapien
gttctccatgggaaaagcaccagat

SEQ ID NO: 1965048 - DNA, 25 bp, Homo sapien
tgtgttctccatgggaaaagcacca

SEQ ID NO: 1965049 - DNA, 25 bp, Homo sapien
tggttgtgtgttctccatgggaaaa

SEQ ID NO: 1965050 - DNA, 25 bp, Homo sapien
tgtgtgttctccatgggaaaagcac

SEQ ID NO: 1965051 - DNA, 25 bp, Homo sapien
gaagggattccctgggagacggctg

SEQ ID NO: 1965052 - DNA, 25 bp, Homo sapien
ccttggtggctttctagcttgcagt

SEQ ID NO: 1965053 - DNA, 25 bp, Homo sapien
tctaagtaacgtttggtttgcagaa

SEQ ID NO: 1965054 - DNA, 25 bp, Homo sapien
tgtttgtctctcagtatgcatttta

SEQ ID NO: 1965055 - DNA, 25 bp, Homo sapien
ttctggcttctataacacctgcatt

SEQ ID NO: 1965056 - DNA, 25 bp, Homo sapien
ggcttctataacacctgcattaatc

SEQ ID NO: 1965057 - DNA, 25 bp, Homo sapien
aaacaggtttcgatggttcttcaca

SEQ ID NO: 1965058 - DNA, 25 bp, Homo sapien
gctggcattatgcatcccatccact

SEQ ID NO: 1965059 - DNA, 25 bp, Homo sapien
tcagaaagcaattgccaccttccac

SEQ ID NO: 1965060 - DNA, 25 bp, Homo sapien
tttgcactaaatcaaacgagctgat

SEQ ID NO: 1965061 - DNA, 25 bp, Homo sapien
gagctgatatcagaaagcaattgcc

SEQ ID NO: 1965062 - DNA, 25 bp, Homo sapien
atgaaagaacactttaccgaccatt

SEQ ID NO: 1965063 - DNA, 25 bp, Homo sapien
tagaaatgtgataacgttattgcac

SEQ ID NO: 1965064 - DNA, 25 bp, Homo sapien
cgcccataccgggttacaagggatg

SEQ ID NO: 1965065 - DNA, 25 bp, Homo sapien
acaagggatgtccagcatgtgtttc

SEQ ID NO: 1965066 - DNA, 25 bp, Homo sapien
cctggaacactcagagtctgcactt

SEQ ID NO: 1965067 - DNA, 25 bp, Homo sapien
caaaacataacattcggagaaagag

SEQ ID NO: 1965068 - DNA, 25 bp, Homo sapien
attttactgtgagataaaagcaaaa

SEQ ID NO: 1965069 - DNA, 25 bp, Homo sapien
tattttactgtgagataaaagcaaa

SEQ ID NO: 1965070 - DNA, 25 bp, Homo sapien
agcaaaacataacattcggagaaag

SEQ ID NO: 1965071 - DNA, 25 bp, Homo sapien
ctttcaaaagtgaatttcacatgca

SEQ ID NO: 1965072 - DNA, 25 bp, Homo sapien
aaggtaacatgttctttcaaaagtg

SEQ ID NO: 1965073 - DNA, 25 bp, Homo sapien
tgttctttcaaaagtgaatttcaca

SEQ ID NO: 1965074 - DNA, 25 bp, Homo sapien
aggtaacatgttctttcaaaagtga

SEQ ID NO: 1965075 - DNA, 25 bp, Homo sapien
cttggaagagatacttagaatcaaa

SEQ ID NO: 1965076 - DNA, 25 bp, Homo sapien
cacttggaagagatacttagaatca

SEQ ID NO: 1965077 - DNA, 25 bp, Homo sapien
ggaagagatacttagaatcaaaaca

SEQ ID NO: 1965078 - DNA, 25 bp, Homo sapien
gcacttggaagagatacttagaatc

SEQ ID NO: 1965079 - DNA, 25 bp, Homo sapien
tcagatggcctgagctgtttggacc

SEQ ID NO: 1965080 - DNA, 25 bp, Homo sapien
ggctgacctccatgaccttggtgtc

SEQ ID NO: 1965081 - DNA, 25 bp, Homo sapien
ggtgtcctgtcaagacttgcccagt

SEQ ID NO: 1965082 - DNA, 25 bp, Homo sapien
catctgagtgcagcatgggctccac

SEQ ID NO: 1965083 - DNA, 25 bp, Homo sapien
tccaagccagaggtgctgcctcggt

SEQ ID NO: 1965084 - DNA, 25 bp, Homo sapien
cagaggtgctgcctcggttcttcac

SEQ ID NO: 1965085 - DNA, 25 bp, Homo sapien
ctgcctcggttcttcacttccagcc

SEQ ID NO: 1965086 - DNA, 25 bp, Homo sapien
ggttcttcacttccagccaggccat

SEQ ID NO: 1965087 - DNA, 25 bp, Homo sapien
gagcaacttgaaatcgcccatctgt

SEQ ID NO: 1965088 - DNA, 25 bp, Homo sapien
cgcgcagctgcggtcttcatgtggt

SEQ ID NO: 1965089 - DNA, 25 bp, Homo sapien
gggtaagaaactacagcccgcgcag

SEQ ID NO: 1965090 - DNA, 25 bp, Homo sapien
catctgttggagagccgtgcgtgct

SEQ ID NO: 1965091 - DNA, 25 bp, Homo sapien
cacttcgctgctgctagttgtttcc

SEQ ID NO: 1965092 - DNA, 25 bp, Homo sapien
tttccaggatgccacaaacacttcg

SEQ ID NO: 1965093 - DNA, 25 bp, Homo sapien
tctggctcagggatggctacgcttc

SEQ ID NO: 1965094 - DNA, 25 bp, Homo sapien
tctaatccgctgtgaagcctgtctg

SEQ ID NO: 1965095 - DNA, 25 bp, Homo sapien
ttagatcccacttgcaaacttttgc

SEQ ID NO: 1965096 - DNA, 25 bp, Homo sapien
gcctgtttttggatcggtaccatgc

SEQ ID NO: 1965097 - DNA, 25 bp, Homo sapien
gaatagcgaatcttttccccgatgc

SEQ ID NO: 1965098 - DNA, 25 bp, Homo sapien
tctttgtcgggtgcaaagtttgcaa

SEQ ID NO: 1965099 - DNA, 25 bp, Homo sapien
caccagatgagggttcgtggacacc

SEQ ID NO: 1965100 - DNA, 25 bp, Homo sapien
tgaaggccgccgtgtcactgggctt

SEQ ID NO: 1965101 - DNA, 25 bp, Homo sapien
gcctggagcccacattgcggattgt

SEQ ID NO: 1965102 - DNA, 25 bp, Homo sapien
gcagaacccaaaaagatgtcgttgt

SEQ ID NO: 1965103 - DNA, 25 bp, Homo sapien
tttgctgttatttcacagccagccc

SEQ ID NO: 1965104 - DNA, 25 bp, Homo sapien
catttgctgttatttcacagccagc

SEQ ID NO: 1965105 - DNA, 25 bp, Homo sapien
ctatccatttgctgttatttcacag

SEQ ID NO: 1965106 - DNA, 25 bp, Homo sapien
tgctgttatttcacagccagcccac

SEQ ID NO: 1965107 - DNA, 25 bp, Homo sapien
tgcagacttatggtcatggagacag

SEQ ID NO: 1965108 - DNA, 25 bp, Homo sapien
tgtcaggaagatcacacaacccatc

SEQ ID NO: 1965109 - DNA, 25 bp, Homo sapien
ccatcacacaattgtgtggctgcag

SEQ ID NO: 1965110 - DNA, 25 bp, Homo sapien
tcagcatccttcaactggttccttg

SEQ ID NO: 1965111 - DNA, 25 bp, Homo sapien
caaagtcccgccaaaaccagcagaa

SEQ ID NO: 1965112 - DNA, 25 bp, Homo sapien
aaaactctgtcatatggagacgctt

SEQ ID NO: 1965113 - DNA, 25 bp, Homo sapien
gctcagaggtgaagcgctgcagatg

SEQ ID NO: 1965114 - DNA, 25 bp, Homo sapien
cagcagaacctcatcaaagcaaaag

SEQ ID NO: 1965115 - DNA, 25 bp, Homo sapien
tcacctcgcgtgtcctcagggcatt

SEQ ID NO: 1965116 - DNA, 25 bp, Homo sapien
tatgaccatctctcctgggtagggc

SEQ ID NO: 1965117 - DNA, 25 bp, Homo sapien
gagagtgagagcagccgattcaccc

SEQ ID NO: 1965118 - DNA, 25 bp, Homo sapien
tgtcagctcaaagggcaaccctaag

SEQ ID NO: 1965119 - DNA, 25 bp, Homo sapien
gcgcagggcgcggggacagcggcgg

SEQ ID NO: 1965120 - DNA, 25 bp, Homo sapien
cgggcgcagggcgcggggacagcgg

SEQ ID NO: 1965121 - DNA, 25 bp, Homo sapien
caccgggcgcagggcgcggggacag

SEQ ID NO: 1965122 - DNA, 25 bp, Homo sapien
accgggcgcagggcgcggggacagc

SEQ ID NO: 1965123 - DNA, 25 bp, Homo sapien
tgagttctgaagccggggccgggag

SEQ ID NO: 1965124 - DNA, 25 bp, Homo sapien
gctgagttctgaagccggggccggg

SEQ ID NO: 1965125 - DNA, 25 bp, Homo sapien
cagggctgagttctgaagccggggc

SEQ ID NO: 1965126 - DNA, 25 bp, Homo sapien
agggctgagttctgaagccggggcc

SEQ ID NO: 1965127 - DNA, 25 bp, Homo sapien
cgtgcttcgactgcagtttccccat

SEQ ID NO: 1965128 - DNA, 25 bp, Homo sapien
gctctctctccgcttgcgggcggcg

SEQ ID NO: 1965129 - DNA, 25 bp, Homo sapien
cccgcgggcgctgcgccttcgctgt

SEQ ID NO: 1965130 - DNA, 25 bp, Homo sapien
cgggcgctgcgccttcgctgtgtcc

SEQ ID NO: 1965131 - DNA, 25 bp, Homo sapien
aaagagacgcgccgtgagccccgcg

SEQ ID NO: 1965132 - DNA, 25 bp, Homo sapien
cgcgcgggaaacccgcaccgaggag

SEQ ID NO: 1965133 - DNA, 25 bp, Homo sapien
cttcctccgcgcctttgcggccgct

SEQ ID NO: 1965134 - DNA, 25 bp, Homo sapien
tcgcgtacgcggacgccacgaagct

SEQ ID NO: 1965135 - DNA, 25 bp, Homo sapien
gtacgcggacgccacgaagctgtcc

SEQ ID NO: 1965136 - DNA, 25 bp, Homo sapien
ctttgcggccgctcgcgtacgcgga

SEQ ID NO: 1965137 - DNA, 25 bp, Homo sapien
tgcgactctcctggacgtcagtagg

SEQ ID NO: 1965138 - DNA, 25 bp, Homo sapien
tggacgtcagtaggatctgtcgcag

SEQ ID NO: 1965139 - DNA, 25 bp, Homo sapien
gacacttcgctgtggtggcctgcga

SEQ ID NO: 1965140 - DNA, 25 bp, Homo sapien
ctgggaggacaaggacgatgggcga

SEQ ID NO: 1965141 - DNA, 25 bp, Homo sapien
acagacgacggctcagaaggtggca

SEQ ID NO: 1965142 - DNA, 25 bp, Homo sapien
tccagggacagctgacggtcatgat

SEQ ID NO: 1965143 - DNA, 25 bp, Homo sapien
gctgacggtcatgatctgtgacaga

SEQ ID NO: 1965144 - DNA, 25 bp, Homo sapien
caggaaggcaagtccaacaggagag

SEQ ID NO: 1965145 - DNA, 25 bp, Homo sapien
actggagcctgacacgaggactcca

SEQ ID NO: 1965146 - DNA, 25 bp, Homo sapien
taaatgcaagaggagacacactgcc

SEQ ID NO: 1965147 - DNA, 25 bp, Homo sapien
gagcctgacacgaggactccagccg

SEQ ID NO: 1965148 - DNA, 25 bp, Homo sapien
cctaaatgcaagaggagacacactg

SEQ ID NO: 1965149 - DNA, 25 bp, Homo sapien
ccttggggtccccattgggcagctc

SEQ ID NO: 1965150 - DNA, 25 bp, Homo sapien
ccgtcatctgcgctgaggagttgtc

SEQ ID NO: 1965151 - DNA, 25 bp, Homo sapien
gtcaatgttgaggcgctgcccgccc

SEQ ID NO: 1965152 - DNA, 25 bp, Homo sapien
catctgcgctgaggagttgtcccgg

SEQ ID NO: 1965153 - DNA, 25 bp, Homo sapien
ctctctccgtcatctgcgctgagga

SEQ ID NO: 1965154 - DNA, 25 bp, Homo sapien
ctacccacgccaacacgcccaactc

SEQ ID NO: 1965155 - DNA, 25 bp, Homo sapien
gggacctcgcctcctacccacgcca

SEQ ID NO: 1965156 - DNA, 25 bp, Homo sapien
ctccacagggggaaggatcttctgg

SEQ ID NO: 1965157 - DNA, 25 bp, Homo sapien
cgccaacacgcccaactccacaggg

SEQ ID NO: 1965158 - DNA, 25 bp, Homo sapien
ccaccgagacatcgcactggagtgc

SEQ ID NO: 1965159 - DNA, 25 bp, Homo sapien
agcgtgaacgtccactcctggcggt

SEQ ID NO: 1965160 - DNA, 25 bp, Homo sapien
gcagttgtcaaagtcatagagcgtg

SEQ ID NO: 1965161 - DNA, 25 bp, Homo sapien
tccctggtgaccttcccgcagttgt

SEQ ID NO: 1965162 - DNA, 25 bp, Homo sapien
ctggggcccggcatcagtttcactg

SEQ ID NO: 1965163 - DNA, 25 bp, Homo sapien
tcagggctgacggttagcttcacac

SEQ ID NO: 1965164 - DNA, 25 bp, Homo sapien
ggcatccacgacctcatagatggtg

SEQ ID NO: 1965165 - DNA, 25 bp, Homo sapien
gacggttagcttcacacggagggtc

SEQ ID NO: 1965166 - DNA, 25 bp, Homo sapien
ctgcccgaggagtggttgaccgagg

SEQ ID NO: 1965167 - DNA, 25 bp, Homo sapien
ctcgttcactcattaactcactcat

SEQ ID NO: 1965168 - DNA, 25 bp, Homo sapien
tcgttcactcattaactcactcatt

SEQ ID NO: 1965169 - DNA, 25 bp, Homo sapien
ctccatcctgcaacgggtgggctcc

SEQ ID NO: 1965170 - DNA, 25 bp, Homo sapien
ccctccatcctgcaacgggtgggct

SEQ ID NO: 1965171 - DNA, 25 bp, Homo sapien
atcctgcaacgggtgggctcccggt

SEQ ID NO: 1965172 - DNA, 25 bp, Homo sapien
caccctccatcctgcaacgggtggg

SEQ ID NO: 1965173 - DNA, 25 bp, Homo sapien
acaacctcctgtcagccacccttgg

SEQ ID NO: 1965174 - DNA, 25 bp, Homo sapien
tgtgcagacaacctcctgtcagcca

SEQ ID NO: 1965175 - DNA, 25 bp, Homo sapien
cgtgtgcagacaacctcctgtcagc

SEQ ID NO: 1965176 - DNA, 25 bp, Homo sapien
agacaacctcctgtcagccaccctt

SEQ ID NO: 1965177 - DNA, 25 bp, Homo sapien
agactgagggtgtcaaggccgctgt

SEQ ID NO: 1965178 - DNA, 25 bp, Homo sapien
tgagggtgtcaaggccgctgtggct

SEQ ID NO: 1965179 - DNA, 25 bp, Homo sapien
aggtctgacctagaggatggtgtgt

SEQ ID NO: 1965180 - DNA, 25 bp, Homo sapien
ctgagggtgtcaaggccgctgtggc

SEQ ID NO: 1965181 - DNA, 25 bp, Homo sapien
gcagagcaggaaggagagtggacgc

SEQ ID NO: 1965182 - DNA, 25 bp, Homo sapien
cgcagagcaggaaggagagtggacg

SEQ ID NO: 1965183 - DNA, 25 bp, Homo sapien
ccacctcctcgcagagcaggaagga

SEQ ID NO: 1965184 - DNA, 25 bp, Homo sapien
cagcacccacctcctcgcagagcag

SEQ ID NO: 1965185 - DNA, 25 bp, Homo sapien
gcacagactgggtggcgcacccctg

SEQ ID NO: 1965186 - DNA, 25 bp, Homo sapien
agaagggcctgacccccgcacagac

SEQ ID NO: 1965187 - DNA, 25 bp, Homo sapien
actgggtggcgcacccctgatgacg

SEQ ID NO: 1965188 - DNA, 25 bp, Homo sapien
tgacccccgcacagactgggtggcg

SEQ ID NO: 1965189 - DNA, 25 bp, Homo sapien
cagggccgaatctggacgtgtagtt

SEQ ID NO: 1965190 - DNA, 25 bp, Homo sapien
gtccaggtagtggtttctgcgctcc

SEQ ID NO: 1965191 - DNA, 25 bp, Homo sapien
gtgttctcgtccacgcagtagggcc

SEQ ID NO: 1965192 - DNA, 25 bp, Homo sapien
tgtagttctcaatcccggcgaggtc

SEQ ID NO: 1965193 - DNA, 25 bp, Homo sapien
gcctgggctttggtacaagaatctc

SEQ ID NO: 1965194 - DNA, 25 bp, Homo sapien
gttatgagagagacttggccccagc

SEQ ID NO: 1965195 - DNA, 25 bp, Homo sapien
gaaataaacgtgtgctgggcaggct

SEQ ID NO: 1965196 - DNA, 25 bp, Homo sapien
agaatctccatgcaggccacatagg

SEQ ID NO: 1965197 - DNA, 25 bp, Homo sapien
tgcaaaggccgactcctctagcctt

SEQ ID NO: 1965198 - DNA, 25 bp, Homo sapien
tgtgtcctgggagcggagcttctct

SEQ ID NO: 1965199 - DNA, 25 bp, Homo sapien
agacggccaccagccctgaagggaa

SEQ ID NO: 1965200 - DNA, 25 bp, Homo sapien
agccttgtccccactgtgtgtcctg

SEQ ID NO: 1965201 - DNA, 25 bp, Homo sapien
ctgaggccagtctgttagccaagtc

SEQ ID NO: 1965202 - DNA, 25 bp, Homo sapien
tccgaggctggcacgacgtgttcca

SEQ ID NO: 1965203 - DNA, 25 bp, Homo sapien
tgtacggcatgtgtatctggctcct

SEQ ID NO: 1965204 - DNA, 25 bp, Homo sapien
cttttggcggtaccgcttgtggccg

SEQ ID NO: 1965205 - DNA, 25 bp, Homo sapien
gctttcccggacttgctgctggctg

SEQ ID NO: 1965206 - DNA, 25 bp, Homo sapien
cgcgtagccctctcctgctggcgtg

SEQ ID NO: 1965207 - DNA, 25 bp, Homo sapien
tgctggcgtgggcggcaggtcccgc

SEQ ID NO: 1965208 - DNA, 25 bp, Homo sapien
tagccctctcctgctggcgtgggcg

SEQ ID NO: 1965209 - DNA, 25 bp, Homo sapien
cgtagccctctcctgctggcgtggg

SEQ ID NO: 1965210 - DNA, 25 bp, Homo sapien
tggtggtggtgctcgtgccgctgga

SEQ ID NO: 1965211 - DNA, 25 bp, Homo sapien
tggtggtgctcgtgccgctggatca

SEQ ID NO: 1965212 - DNA, 25 bp, Homo sapien
gctcgtgccgctggatcactggcac

SEQ ID NO: 1965213 - DNA, 25 bp, Homo sapien
tggtgctcgtgccgctggatcactg

SEQ ID NO: 1965214 - DNA, 25 bp, Homo sapien
ctgccctgaggtcgcgggctgtggt

SEQ ID NO: 1965215 - DNA, 25 bp, Homo sapien
tgtgctgggagcgaggtgtgcttgg

SEQ ID NO: 1965216 - DNA, 25 bp, Homo sapien
tgaggtcgcgggctgtggtgtgctg

SEQ ID NO: 1965217 - DNA, 25 bp, Homo sapien
cctgaggtcgcgggctgtggtgtgc

SEQ ID NO: 1965218 - DNA, 25 bp, Homo sapien
ttacacagacgagccttagagccag

SEQ ID NO: 1965219 - DNA, 25 bp, Homo sapien
caaagcaggttttatgggttacaca

SEQ ID NO: 1965220 - DNA, 25 bp, Homo sapien
ttgtccacgtgtccaaggtgcacca

SEQ ID NO: 1965221 - DNA, 25 bp, Homo sapien
cagatgtgttcaccgccatgtggca

SEQ ID NO: 1965222 - DNA, 25 bp, Homo sapien
ggcacttctctttctagcactgctg

SEQ ID NO: 1965223 - DNA, 25 bp, Homo sapien
ctggcacttctctttctagcactgc

SEQ ID NO: 1965224 - DNA, 25 bp, Homo sapien
ctactctggcacttctctttctagc

SEQ ID NO: 1965225 - DNA, 25 bp, Homo sapien
ctctttctagcactgctgccttctg

SEQ ID NO: 1965226 - DNA, 25 bp, Homo sapien
gggccgctcagttctgcacacgaaa

SEQ ID NO: 1965227 - DNA, 25 bp, Homo sapien
tctatatactagaggccccagatgg

SEQ ID NO: 1965228 - DNA, 25 bp, Homo sapien
catgagttaagcagcaaaacgctcc

SEQ ID NO: 1965229 - DNA, 25 bp, Homo sapien
ttgctgtagagtgacggctgctgcc

SEQ ID NO: 1965230 - DNA, 25 bp, Homo sapien
tgtacctcaaggcactgaagctgga

SEQ ID NO: 1965231 - DNA, 25 bp, Homo sapien
aacacgttcagttcatcagggccta

SEQ ID NO: 1965232 - DNA, 25 bp, Homo sapien
tggacgtggccagatcttctcgcag

SEQ ID NO: 1965233 - DNA, 25 bp, Homo sapien
ggctcggcaggtccacatttcatga

SEQ ID NO: 1965234 - DNA, 25 bp, Homo sapien
ccagaatggacaacgcgtgggcttt

SEQ ID NO: 1965235 - DNA, 25 bp, Homo sapien
tccccgggagcacacttaacggatg

SEQ ID NO: 1965236 - DNA, 25 bp, Homo sapien
gatggcattgactctcttggcccag

SEQ ID NO: 1965237 - DNA, 25 bp, Homo sapien
tgggagaagccctccgaagatctgg

SEQ ID NO: 1965238 - DNA, 25 bp, Homo sapien
tggcggatgcggcaggtacggcggg

SEQ ID NO: 1965239 - DNA, 25 bp, Homo sapien
cggcgggtgcggtgggtgagacgca

SEQ ID NO: 1965240 - DNA, 25 bp, Homo sapien
tcagggatcccgcacggcgggtgcg

SEQ ID NO: 1965241 - DNA, 25 bp, Homo sapien
ggatgcggcaggtacggcgggtgcg

SEQ ID NO: 1965242 - DNA, 25 bp, Homo sapien
tactggtgcttaacaggcacagctg

SEQ ID NO: 1965243 - DNA, 25 bp, Homo sapien
tttaaatactggtgcttaacaggca

SEQ ID NO: 1965244 - DNA, 25 bp, Homo sapien
gatctggtgtgctgttttaaatact

SEQ ID NO: 1965245 - DNA, 25 bp, Homo sapien
ccaccgcacctgatctggtgtgctg

SEQ ID NO: 1965246 - DNA, 25 bp, Homo sapien
ccgtggcgggcgaagagtggtctca

SEQ ID NO: 1965247 - DNA, 25 bp, Homo sapien
cctggggtgcgtcatcagggtcccc

SEQ ID NO: 1965248 - DNA, 25 bp, Homo sapien
cgtcatcagggtccccgtggcgggc

SEQ ID NO: 1965249 - DNA, 25 bp, Homo sapien
cccgtggcgggcgaagagtggtctc

SEQ ID NO: 1965250 - DNA, 25 bp, Homo sapien
acagagaagaccaccctcggagctg

SEQ ID NO: 1965251 - DNA, 25 bp, Homo sapien
accaccctcggagctgccacaggac

SEQ ID NO: 1965252 - DNA, 25 bp, Homo sapien
agaccaccctcggagctgccacagg

SEQ ID NO: 1965253 - DNA, 25 bp, Homo sapien
gagaagaccaccctcggagctgcca

SEQ ID NO: 1965254 - DNA, 25 bp, Homo sapien
tgtcgggaaccaattcaccgttgtg

SEQ ID NO: 1965255 - DNA, 25 bp, Homo sapien
tcctgtgggcaccattatccagatg

SEQ ID NO: 1965256 - DNA, 25 bp, Homo sapien
tatccagatggccagacggacaaga

SEQ ID NO: 1965257 - DNA, 25 bp, Homo sapien
acttccaggagacgcagaggcctgc

SEQ ID NO: 1965258 - DNA, 25 bp, Homo sapien
cgcccaaccaggaccacagcaccat

SEQ ID NO: 1965259 - DNA, 25 bp, Homo sapien
ggcacactgccgacggcgcgcgtcc

SEQ ID NO: 1965260 - DNA, 25 bp, Homo sapien
gcacactgccgacggcgcgcgtccc

SEQ ID NO: 1965261 - DNA, 25 bp, Homo sapien
actgccgacggcgcgcgtcccccgg

SEQ ID NO: 1965262 - DNA, 25 bp, Homo sapien
acactgccgacggcgcgcgtccccc

SEQ ID NO: 1965263 - DNA, 25 bp, Homo sapien
tcatccctggcgtgtgtggtagaca

SEQ ID NO: 1965264 - DNA, 25 bp, Homo sapien
atcttaaatctttgccgggtgagct

SEQ ID NO: 1965265 - DNA, 25 bp, Homo sapien
ccaggagcccttcgcgtcgaagcgt

SEQ ID NO: 1965266 - DNA, 25 bp, Homo sapien
cttcacgtagacagcatcatgccga

SEQ ID NO: 1965267 - DNA, 25 bp, Homo sapien
tctcagcagcattccaccggagagg

SEQ ID NO: 1965268 - DNA, 25 bp, Homo sapien
tgacgatcctgcttgggactcggct

SEQ ID NO: 1965269 - DNA, 25 bp, Homo sapien
caagtccatgagctttcccgtgggc

SEQ ID NO: 1965270 - DNA, 25 bp, Homo sapien
ggaactccacgtgtaaagtccaggc

SEQ ID NO: 1965271 - DNA, 25 bp, Homo sapien
actcttcagcacgtgggtttctcca

SEQ ID NO: 1965272 - DNA, 25 bp, Homo sapien
ggcgaggtgtcttgaaatctctagc

SEQ ID NO: 1965273 - DNA, 25 bp, Homo sapien
cctggagtagtgtctgtttctcctc

SEQ ID NO: 1965274 - DNA, 25 bp, Homo sapien
tccacatagctgaccattaattagg

SEQ ID NO: 1965275 - DNA, 25 bp, Homo sapien
tgtggcgacttcaaccctgggacca

SEQ ID NO: 1965276 - DNA, 25 bp, Homo sapien
tgcgtgtggcatcactttgcacatg

SEQ ID NO: 1965277 - DNA, 25 bp, Homo sapien
taagcaccgccctagacttgttttg

SEQ ID NO: 1965278 - DNA, 25 bp, Homo sapien
agctgtctttgtacccctgtggcga

SEQ ID NO: 1965279 - DNA, 25 bp, Homo sapien
cagaccaagggttctgatgacgcac

SEQ ID NO: 1965280 - DNA, 25 bp, Homo sapien
agcgctggcgccgacatccatgatt

SEQ ID NO: 1965281 - DNA, 25 bp, Homo sapien
cagatccaggcgcttgtgctgtctt

SEQ ID NO: 1965282 - DNA, 25 bp, Homo sapien
ccccttagggtgtcttccacagcgc

SEQ ID NO: 1965283 - DNA, 25 bp, Homo sapien
tgcagattggcggtcaggattcacc

SEQ ID NO: 1965284 - DNA, 25 bp, Homo sapien
acagaaccgagggagatggagacgc

SEQ ID NO: 1965285 - DNA, 25 bp, Homo sapien
gggatcacatgcctcatcgcctggg

SEQ ID NO: 1965286 - DNA, 25 bp, Homo sapien
gccagcgatgggaaacagcgtttct

SEQ ID NO: 1965287 - DNA, 25 bp, Homo sapien
tgtcgggaagctccggtcttgggaa

SEQ ID NO: 1965288 - DNA, 25 bp, Homo sapien
agcgctgcgggaggtggcgggatgt

SEQ ID NO: 1965289 - DNA, 25 bp, Homo sapien
gaaatgccaccttccgcaggtgatc

SEQ ID NO: 1965290 - DNA, 25 bp, Homo sapien
cttatccgacaggactggcaccagc

SEQ ID NO: 1965291 - DNA, 25 bp, Homo sapien
cttcctcggatgcagtaaacttcac

SEQ ID NO: 1965292 - DNA, 25 bp, Homo sapien
gagttctcggccaggttccctttga

SEQ ID NO: 1965293 - DNA, 25 bp, Homo sapien
taaacttcacgttttgcctcaggac

SEQ ID NO: 1965294 - DNA, 25 bp, Homo sapien
cacccaagtgtgagggccgagttct

SEQ ID NO: 1965295 - DNA, 25 bp, Homo sapien
ggctgcttctgcgtgccctcctggg

SEQ ID NO: 1965296 - DNA, 25 bp, Homo sapien
tcctgggccactcagaaacgtggtg

SEQ ID NO: 1965297 - DNA, 25 bp, Homo sapien
tcggccgtcgtgttcatccatgagc

SEQ ID NO: 1965298 - DNA, 25 bp, Homo sapien
aatatttcatggagctcggccgtcg

SEQ ID NO: 1965299 - DNA, 25 bp, Homo sapien
ttctacactcagttggtggccggcc

SEQ ID NO: 1965300 - DNA, 25 bp, Homo sapien
gatccagctatcaggacatggcagg

SEQ ID NO: 1965301 - DNA, 25 bp, Homo sapien
gaaggtccagctcggcattgatagg

SEQ ID NO: 1965302 - DNA, 25 bp, Homo sapien
ccagtgaagggatgccgatgacagc

SEQ ID NO: 1965303 - DNA, 25 bp, Homo sapien
cagggtgcacgttcctcttgatttt

SEQ ID NO: 1965304 - DNA, 25 bp, Homo sapien
agggtgcacgttcctcttgattttc

SEQ ID NO: 1965305 - DNA, 25 bp, Homo sapien
ctcttccgtgacttctgcatctata

SEQ ID NO: 1965306 - DNA, 25 bp, Homo sapien
gaagcggcacatccgcggaacaaac

SEQ ID NO: 1965307 - DNA, 25 bp, Homo sapien
ggtggacgagctgcacctgcgtctt

SEQ ID NO: 1965308 - DNA, 25 bp, Homo sapien
tatggaaattcacggcagccttggc

SEQ ID NO: 1965309 - DNA, 25 bp, Homo sapien
tctccaggtggatgaactttcagga

SEQ ID NO: 1965310 - DNA, 25 bp, Homo sapien
gggagccgggcactttatagagaac

SEQ ID NO: 1965311 - DNA, 25 bp, Homo sapien
gtggtcgctggacggctccgcacac

SEQ ID NO: 1965312 - DNA, 25 bp, Homo sapien
ccgggagccgggcactttatagaga

SEQ ID NO: 1965313 - DNA, 25 bp, Homo sapien
gagccgggcactttatagagaacct

SEQ ID NO: 1965314 - DNA, 25 bp, Homo sapien
tgttgtcccacttcggccgggagct

SEQ ID NO: 1965315 - DNA, 25 bp, Homo sapien
cttgttgtcccacttcggccgggag

SEQ ID NO: 1965316 - DNA, 25 bp, Homo sapien
gcgccttgttgtcccacttcggccg

SEQ ID NO: 1965317 - DNA, 25 bp, Homo sapien
gtcccacttcggccgggagctggcc

SEQ ID NO: 1965318 - DNA, 25 bp, Homo sapien
ctgcccgatggcgaactccaggtac

SEQ ID NO: 1965319 - DNA, 25 bp, Homo sapien
atgaggaacgggatcatgaaggctc

SEQ ID NO: 1965320 - DNA, 25 bp, Homo sapien
cccgatggcgaactccaggtacagc

SEQ ID NO: 1965321 - DNA, 25 bp, Homo sapien
caggatgaggaacgggatcatgaag

SEQ ID NO: 1965322 - DNA, 25 bp, Homo sapien
gccgggtggatggagctccacacac

SEQ ID NO: 1965323 - DNA, 25 bp, Homo sapien
cagggccgggtggatggagctccac

SEQ ID NO: 1965324 - DNA, 25 bp, Homo sapien
ggccgggtggatggagctccacaca

SEQ ID NO: 1965325 - DNA, 25 bp, Homo sapien
agggccgggtggatggagctccaca

SEQ ID NO: 1965326 - DNA, 25 bp, Homo sapien
ggcttggggccgaggcacaccctcc

SEQ ID NO: 1965327 - DNA, 25 bp, Homo sapien
gcttggggccgaggcacaccctcca

SEQ ID NO: 1965328 - DNA, 25 bp, Homo sapien
tacagtcccaccatgaaggacgtga

SEQ ID NO: 1965329 - DNA, 25 bp, Homo sapien
ccaccatgaaggacgtgagcatgga

SEQ ID NO: 1965330 - DNA, 25 bp, Homo sapien
gatggtgttgtaatacagtcccacc

SEQ ID NO: 1965331 - DNA, 25 bp, Homo sapien
gttgtaatacagtcccaccatgaag

SEQ ID NO: 1965332 - DNA, 25 bp, Homo sapien
tgtctggttctcgttgagcgggcag

SEQ ID NO: 1965333 - DNA, 25 bp, Homo sapien
tctggttctcgttgagcgggcagtc

SEQ ID NO: 1965334 - DNA, 25 bp, Homo sapien
ctgtctggttctcgttgagcgggca

SEQ ID NO: 1965335 - DNA, 25 bp, Homo sapien
tggttctcgttgagcgggcagtcgc

SEQ ID NO: 1965336 - DNA, 25 bp, Homo sapien
cacagcagcatccaccactggatgg

SEQ ID NO: 1965337 - DNA, 25 bp, Homo sapien
tgttgagcgtctctcggtaccagaa

SEQ ID NO: 1965338 - DNA, 25 bp, Homo sapien
atgtacaggacgctccatgcgcagg

SEQ ID NO: 1965339 - DNA, 25 bp, Homo sapien
gatgccgcggatggtgcacatgtac

SEQ ID NO: 1965340 - DNA, 25 bp, Homo sapien
tcaggcctcggatgaggaagatggt

SEQ ID NO: 1965341 - DNA, 25 bp, Homo sapien
aagatggtcaggacgacatagggca

SEQ ID NO: 1965342 - DNA, 25 bp, Homo sapien
cgacatagggcagcgtggaggtgat

SEQ ID NO: 1965343 - DNA, 25 bp, Homo sapien
gatgccattggtggcgcccttcagc

SEQ ID NO: 1965344 - DNA, 25 bp, Homo sapien
tcaggcctgggactggtcgagcagc

SEQ ID NO: 1965345 - DNA, 25 bp, Homo sapien
cctggggtggcagctatgccttccc

SEQ ID NO: 1965346 - DNA, 25 bp, Homo sapien
caggctgcctgtccccgtgggtgag

SEQ ID NO: 1965347 - DNA, 25 bp, Homo sapien
tcgctggccccgtggacctcctcag

SEQ ID NO: 1965348 - DNA, 25 bp, Homo sapien
gaaggagaagaagacctgtgcgccc

SEQ ID NO: 1965349 - DNA, 25 bp, Homo sapien
aggagaagaagacctgtgcgcccgc

SEQ ID NO: 1965350 - DNA, 25 bp, Homo sapien
gagaagaagacctgtgcgcccgcgt

SEQ ID NO: 1965351 - DNA, 25 bp, Homo sapien
aagaagacctgtgcgcccgcgtcca

SEQ ID NO: 1965352 - DNA, 25 bp, Homo sapien
gggcagcatccgcatcccgcccaga

SEQ ID NO: 1965353 - DNA, 25 bp, Homo sapien
ctgcagacgagaccagtgtcatggc

SEQ ID NO: 1965354 - DNA, 25 bp, Homo sapien
gtcatggcggctggcgatgaggtcc

SEQ ID NO: 1965355 - DNA, 25 bp, Homo sapien
tggcgatgaggtcccaggtcaggac

SEQ ID NO: 1965356 - DNA, 25 bp, Homo sapien
tacaccgatgtgaagccgttgatga

SEQ ID NO: 1965357 - DNA, 25 bp, Homo sapien
tgctgaagcagtcgtcgtagcgctg

SEQ ID NO: 1965358 - DNA, 25 bp, Homo sapien
aatgacggagtagaccacgatggcc

SEQ ID NO: 1965359 - DNA, 25 bp, Homo sapien
gatgatggacacaatcaccgagtcc

SEQ ID NO: 1965360 - DNA, 25 bp, Homo sapien
tcagattgaggctgacggccacctg

SEQ ID NO: 1965361 - DNA, 25 bp, Homo sapien
ggtcagattgaggctgacggccacc

SEQ ID NO: 1965362 - DNA, 25 bp, Homo sapien
ctgcgggtcagattgaggctgacgg

SEQ ID NO: 1965363 - DNA, 25 bp, Homo sapien
cgggtcagattgaggctgacggcca

SEQ ID NO: 1965364 - DNA, 25 bp, Homo sapien
gttctcctgggtcacgttgccttca

SEQ ID NO: 1965365 - DNA, 25 bp, Homo sapien
ttgccttcaggcaggtcgaacccgt

SEQ ID NO: 1965366 - DNA, 25 bp, Homo sapien
tgcaccgctgctgcatgtccacaaa

SEQ ID NO: 1965367 - DNA, 25 bp, Homo sapien
gatgtcgcaggtctggaacaccagc

SEQ ID NO: 1965368 - DNA, 25 bp, Homo sapien
cggatgacacacagtcaccagggcc

SEQ ID NO: 1965369 - DNA, 25 bp, Homo sapien
ggatgacacacagtcaccagggcct

SEQ ID NO: 1965370 - DNA, 25 bp, Homo sapien
cacggatgacacacagtcaccaggg

SEQ ID NO: 1965371 - DNA, 25 bp, Homo sapien
ctgcacggatgacacacagtcacca

SEQ ID NO: 1965372 - DNA, 25 bp, Homo sapien
ggggcacaacgacgccctccatgtt

SEQ ID NO: 1965373 - DNA, 25 bp, Homo sapien
cttcggggggatgactctgaggtcc

SEQ ID NO: 1965374 - DNA, 25 bp, Homo sapien
acagaccacagtggggacaacggca

SEQ ID NO: 1965375 - DNA, 25 bp, Homo sapien
tcccaaacatagatgacagccccag

SEQ ID NO: 1965376 - DNA, 25 bp, Homo sapien
tacacgtagaccacagagaacatct

SEQ ID NO: 1965377 - DNA, 25 bp, Homo sapien
gagagccagtactggccggagttca

SEQ ID NO: 1965378 - DNA, 25 bp, Homo sapien
ggagttcagcgtgaagatgaagcca

SEQ ID NO: 1965379 - DNA, 25 bp, Homo sapien
gaagccaatgaggaatgtccccagg

SEQ ID NO: 1965380 - DNA, 25 bp, Homo sapien
cagatgctgtaggtcagctcctgac

SEQ ID NO: 1965381 - DNA, 25 bp, Homo sapien
tgtggccgatcatgaactcgatgtc

SEQ ID NO: 1965382 - DNA, 25 bp, Homo sapien
gcgccacgtgacttgccagaagatg

SEQ ID NO: 1965383 - DNA, 25 bp, Homo sapien
tcctgactgacctctaccacgaaga

SEQ ID NO: 1965384 - DNA, 25 bp, Homo sapien
gcttgtagatggcatagccagggat

SEQ ID NO: 1965385 - DNA, 25 bp, Homo sapien
cagtggttcctgatgagcttgtaga

SEQ ID NO: 1965386 - DNA, 25 bp, Homo sapien
tctggcagtggttcctgatgagctt

SEQ ID NO: 1965387 - DNA, 25 bp, Homo sapien
cacatacacccagttcgggtaggag

SEQ ID NO: 1965388 - DNA, 25 bp, Homo sapien
tcagtacttcaggtccccgttcatg

SEQ ID NO: 1965389 - DNA, 25 bp, Homo sapien
tgacaccagtgtatggcacgccgtg

SEQ ID NO: 1965390 - DNA, 25 bp, Homo sapien
tggacacccattgtacgagcacatg

SEQ ID NO: 1965391 - DNA, 25 bp, Homo sapien
ccatatgcgtgtccatgcgtgtcca

SEQ ID NO: 1965392 - DNA, 25 bp, Homo sapien
ggcatgtgtcccagcgacgtgtacg

SEQ ID NO: 1965393 - DNA, 25 bp, Homo sapien
tgtagatgagatgggagctcccgcc

SEQ ID NO: 1965394 - DNA, 25 bp, Homo sapien
tacaccaatggatgccagggcacat

SEQ ID NO: 1965395 - DNA, 25 bp, Homo sapien
tgttgaagccatcagcaggcgagcc

SEQ ID NO: 1965396 - DNA, 25 bp, Homo sapien
tttctcgatccagggccaaagagca

SEQ ID NO: 1965397 - DNA, 25 bp, Homo sapien
cgtccccaccatcccgtctgaggtc

SEQ ID NO: 1965398 - DNA, 25 bp, Homo sapien
cctctacgtctggacaacagtaact

SEQ ID NO: 1965399 - DNA, 25 bp, Homo sapien
tggctcactcatccctctacgtctg

SEQ ID NO: 1965400 - DNA, 25 bp, Homo sapien
ctgggccatggcctcttcggagcaa

SEQ ID NO: 1965401 - DNA, 25 bp, Homo sapien
gattcccgcagggatcctctcagct

SEQ ID NO: 1965402 - DNA, 25 bp, Homo sapien
tccaaatccatgagtcccagggcag

SEQ ID NO: 1965403 - DNA, 25 bp, Homo sapien
agatcagatcgcatgcacccgaagc

SEQ ID NO: 1965404 - DNA, 25 bp, Homo sapien
gacgccgggtgagttcagctctaag

SEQ ID NO: 1965405 - DNA, 25 bp, Homo sapien
actagagagccgtctccagcctctg

SEQ ID NO: 1965406 - DNA, 25 bp, Homo sapien
gcctctgccgacgtttggaaaccac

SEQ ID NO: 1965407 - DNA, 25 bp, Homo sapien
ccagcctctgccgacgtttggaaac

SEQ ID NO: 1965408 - DNA, 25 bp, Homo sapien
gccgacgtttggaaaccacaagcag

SEQ ID NO: 1965409 - DNA, 25 bp, Homo sapien
ctgggccttgttgtcccacttgggc

SEQ ID NO: 1965410 - DNA, 25 bp, Homo sapien
tgttgtcccacttgggcctctcatc

SEQ ID NO: 1965411 - DNA, 25 bp, Homo sapien
ggccgggtccggttctggggcatga

SEQ ID NO: 1965412 - DNA, 25 bp, Homo sapien
ctctcatccccgaggtcgcaggcgg

SEQ ID NO: 1965413 - DNA, 25 bp, Homo sapien
cctccataggtctggcacaggtatg

SEQ ID NO: 1965414 - DNA, 25 bp, Homo sapien
tatgggaaccgccaaatgttcccca

SEQ ID NO: 1965415 - DNA, 25 bp, Homo sapien
taggtctggcacaggtatgggaacc

SEQ ID NO: 1965416 - DNA, 25 bp, Homo sapien
gcacaggtatgggaaccgccaaatg

SEQ ID NO: 1965417 - DNA, 25 bp, Homo sapien
gattcatgcctgtccctacatcctg

SEQ ID NO: 1965418 - DNA, 25 bp, Homo sapien
ttgtacgtcggctccctgagagcag

SEQ ID NO: 1965419 - DNA, 25 bp, Homo sapien
ctgggtgtccatgcgtgatgttgta

SEQ ID NO: 1965420 - DNA, 25 bp, Homo sapien
ctgtgtcgccacatggagagcagag

SEQ ID NO: 1965421 - DNA, 25 bp, Homo sapien
ccagtacactgcaggcgcttagcaa

SEQ ID NO: 1965422 - DNA, 25 bp, Homo sapien
caaggcattggcgaacaaggcgttg

SEQ ID NO: 1965423 - DNA, 25 bp, Homo sapien
gcttagcaatggtaactgggtttcg

SEQ ID NO: 1965424 - DNA, 25 bp, Homo sapien
cgttgggcaaggcatcagcaggaaa

SEQ ID NO: 1965425 - DNA, 25 bp, Homo sapien
tggctgctgttacaatcgatccacg

SEQ ID NO: 1965426 - DNA, 25 bp, Homo sapien
cgatccacgcaggatcgagagaaac

SEQ ID NO: 1965427 - DNA, 25 bp, Homo sapien
aaaggtggctgtgaacggctggctg

SEQ ID NO: 1965428 - DNA, 25 bp, Homo sapien
tcataagcatggaggacgcagtggt

SEQ ID NO: 1965429 - DNA, 25 bp, Homo sapien
gccttgctctgggtttgtgtcacca

SEQ ID NO: 1965430 - DNA, 25 bp, Homo sapien
cactttgccaggcagggtccggctt

SEQ ID NO: 1965431 - DNA, 25 bp, Homo sapien
atgagaatgttctgcgactgccacg

SEQ ID NO: 1965432 - DNA, 25 bp, Homo sapien
tctagaagctcgtttccaggtcatc

SEQ ID NO: 1965433 - DNA, 25 bp, Homo sapien
cacttcctggagctagtggaagcac

SEQ ID NO: 1965434 - DNA, 25 bp, Homo sapien
ggaagcacccagtagagatgaatgg

SEQ ID NO: 1965435 - DNA, 25 bp, Homo sapien
agagatgaatggccgtgccttctgc

SEQ ID NO: 1965436 - DNA, 25 bp, Homo sapien
ccatgatgggggtgcccataggcat

SEQ ID NO: 1965437 - DNA, 25 bp, Homo sapien
cctcgaagaccagcgcgatgacgta

SEQ ID NO: 1965438 - DNA, 25 bp, Homo sapien
cgatggcgagctcgacgtggaaaat

SEQ ID NO: 1965439 - DNA, 25 bp, Homo sapien
tactccactgaggtacggggagatg

SEQ ID NO: 1965440 - DNA, 25 bp, Homo sapien
ggagatggccgtccacacgccgacg

SEQ ID NO: 1965441 - DNA, 25 bp, Homo sapien
gagttgaggaggtaccacagcaccc

SEQ ID NO: 1965442 - DNA, 25 bp, Homo sapien
ctgttctgttgaggtccggtgggca

SEQ ID NO: 1965443 - DNA, 25 bp, Homo sapien
ccacgatggtgttgtagtacaggct

SEQ ID NO: 1965444 - DNA, 25 bp, Homo sapien
atcaggaaggacagcgtgacacagc

SEQ ID NO: 1965445 - DNA, 25 bp, Homo sapien
gtctcaatgcccctgatgacacaca

SEQ ID NO: 1965446 - DNA, 25 bp, Homo sapien
tgacacacatgtacacgactgccca

SEQ ID NO: 1965447 - DNA, 25 bp, Homo sapien
gatgttcagtgtctgccggtaccag

SEQ ID NO: 1965448 - DNA, 25 bp, Homo sapien
cattgatgtcggctgtgatgttcag

SEQ ID NO: 1965449 - DNA, 25 bp, Homo sapien
tggtcaggaccaggtaagggaacaa

SEQ ID NO: 1965450 - DNA, 25 bp, Homo sapien
gagtccttttgttgcccctggcagg

SEQ ID NO: 1965451 - DNA, 25 bp, Homo sapien
cagccctctgatgagaaagatggtc

SEQ ID NO: 1965452 - DNA, 25 bp, Homo sapien
ggaacaaagctgtgaagtaaatcac

SEQ ID NO: 1965453 - DNA, 25 bp, Homo sapien
agaatatctgggtggctgcgtccag

SEQ ID NO: 1965454 - DNA, 25 bp, Homo sapien
tatctgggtggctgcgtccagccac

SEQ ID NO: 1965455 - DNA, 25 bp, Homo sapien
gtaacttgcaaaagcgatgtgtcct

SEQ ID NO: 1965456 - DNA, 25 bp, Homo sapien
ttgcaaaagcgatgtgtcctccgaa

SEQ ID NO: 1965457 - DNA, 25 bp, Homo sapien
agggcgatgaccaccgcatccttct

SEQ ID NO: 1965458 - DNA, 25 bp, Homo sapien
tggacgcgtacagggaggtcatcct

SEQ ID NO: 1965459 - DNA, 25 bp, Homo sapien
gatgaccaccgcatccttctggcag

SEQ ID NO: 1965460 - DNA, 25 bp, Homo sapien
acagagaagacagcgatggacgcgt

SEQ ID NO: 1965461 - DNA, 25 bp, Homo sapien
ctcgtagtcattagttgctttgaac

SEQ ID NO: 1965462 - DNA, 25 bp, Homo sapien
tgtccaggcagtgctcgtagtcatt

SEQ ID NO: 1965463 - DNA, 25 bp, Homo sapien
caggcagtgctcgtagtcattagtt

SEQ ID NO: 1965464 - DNA, 25 bp, Homo sapien
cagtgctcgtagtcattagttgctt

SEQ ID NO: 1965465 - DNA, 25 bp, Homo sapien
tgtgggctcatggccctggttccca

SEQ ID NO: 1965466 - DNA, 25 bp, Homo sapien
agaggactgtgggctcatggccctg

SEQ ID NO: 1965467 - DNA, 25 bp, Homo sapien
actgtgggctcatggccctggttcc

SEQ ID NO: 1965468 - DNA, 25 bp, Homo sapien
ggctcatggccctggttcccaaaca

SEQ ID NO: 1965469 - DNA, 25 bp, Homo sapien
acggctgggtagtcgtccctggaga

SEQ ID NO: 1965470 - DNA, 25 bp, Homo sapien
aggtgcatgaggacggctgggtagt

SEQ ID NO: 1965471 - DNA, 25 bp, Homo sapien
tcaaagtcgttgatgaggctgagga

SEQ ID NO: 1965472 - DNA, 25 bp, Homo sapien
aagtcaaagtcgttgatgaggctga

SEQ ID NO: 1965473 - DNA, 25 bp, Homo sapien
gtctgtgggaattgtttgcagcctt

SEQ ID NO: 1965474 - DNA, 25 bp, Homo sapien
ggtctgtgggaattgtttgcagcct

SEQ ID NO: 1965475 - DNA, 25 bp, Homo sapien
tggtgctcctgtggacggccctgcc

SEQ ID NO: 1965476 - DNA, 25 bp, Homo sapien
ctggtgctcctgtggacggccctgc

SEQ ID NO: 1965477 - DNA, 25 bp, Homo sapien
tctccgtgaagacgacgaaggccag

SEQ ID NO: 1965478 - DNA, 25 bp, Homo sapien
ggtgtgatgaccgcctccacggtcc

SEQ ID NO: 1965479 - DNA, 25 bp, Homo sapien
ggtcgatagccccaaggtgaacagc

SEQ ID NO: 1965480 - DNA, 25 bp, Homo sapien
tccacggtcccgaacatggtcgata

SEQ ID NO: 1965481 - DNA, 25 bp, Homo sapien
ccttggggacccatctaggcaggac

SEQ ID NO: 1965482 - DNA, 25 bp, Homo sapien
ggacccatctaggcaggacccccac

SEQ ID NO: 1965483 - DNA, 25 bp, Homo sapien
cttggggacccatctaggcaggacc

SEQ ID NO: 1965484 - DNA, 25 bp, Homo sapien
tggggacccatctaggcaggacccc

SEQ ID NO: 1965485 - DNA, 25 bp, Homo sapien
caaggagtagcctggctcagccttt

SEQ ID NO: 1965486 - DNA, 25 bp, Homo sapien
aggcttggccccttgcgctctccat

SEQ ID NO: 1965487 - DNA, 25 bp, Homo sapien
cgttgatggctgtcagcaaggagta

SEQ ID NO: 1965488 - DNA, 25 bp, Homo sapien
tcagcaaggagtagcctggctcagc

SEQ ID NO: 1965489 - DNA, 25 bp, Homo sapien
gagaggaagcagaccaggcagacca

SEQ ID NO: 1965490 - DNA, 25 bp, Homo sapien
cgtgaagcaggtggcggagaggaag

SEQ ID NO: 1965491 - DNA, 25 bp, Homo sapien
gcagcgtgaagcaggtggcggagag

SEQ ID NO: 1965492 - DNA, 25 bp, Homo sapien
cagcgtgaagcaggtggcggagagg

SEQ ID NO: 1965493 - DNA, 25 bp, Homo sapien
cacaacctcgagaaaggccaacatg

SEQ ID NO: 1965494 - DNA, 25 bp, Homo sapien
aaatctccagccagtagttcccaga

SEQ ID NO: 1965495 - DNA, 25 bp, Homo sapien
tccataaacataaacgacacccaca

SEQ ID NO: 1965496 - DNA, 25 bp, Homo sapien
ggaagcggcaaaattgtcgaaaatc

SEQ ID NO: 1965497 - DNA, 25 bp, Homo sapien
gcagctgcgggttgaacctgtgccc

SEQ ID NO: 1965498 - DNA, 25 bp, Homo sapien
agccgaggatcggaccctaactggg

SEQ ID NO: 1965499 - DNA, 25 bp, Homo sapien
gcagaacattctcggcggtctgggc

SEQ ID NO: 1965500 - DNA, 25 bp, Homo sapien
tgggctcaggcttcacatggtctgt

SEQ ID NO: 1965501 - DNA, 25 bp, Homo sapien
cgcctcccggtcatccacgcaatgt

SEQ ID NO: 1965502 - DNA, 25 bp, Homo sapien
catccacgcaatgtcatcgcagaac

SEQ ID NO: 1965503 - DNA, 25 bp, Homo sapien
ggtcatccacgcaatgtcatcgcag

SEQ ID NO: 1965504 - DNA, 25 bp, Homo sapien
tcccggtcatccacgcaatgtcatc

SEQ ID NO: 1965505 - DNA, 25 bp, Homo sapien
gaacaggaggatgatgtaagccaca

SEQ ID NO: 1965506 - DNA, 25 bp, Homo sapien
cacgtgaatgtgcaccgcatgggtc

SEQ ID NO: 1965507 - DNA, 25 bp, Homo sapien
gcttttgtgtggaaacggcctccag

SEQ ID NO: 1965508 - DNA, 25 bp, Homo sapien
ggcactctgatctctcctcgggagg

SEQ ID NO: 1965509 - DNA, 25 bp, Homo sapien
tacggagggactttccaagacacat

SEQ ID NO: 1965510 - DNA, 25 bp, Homo sapien
cagcagcacacaggcggcgcgcgcc

SEQ ID NO: 1965511 - DNA, 25 bp, Homo sapien
tagagcttctcctgacgcgagggga

SEQ ID NO: 1965512 - DNA, 25 bp, Homo sapien
cgcccagcccgggtagagcttctcc

SEQ ID NO: 1965513 - DNA, 25 bp, Homo sapien
ttctcctgacgcgaggggaacagct

SEQ ID NO: 1965514 - DNA, 25 bp, Homo sapien
ggcgcatgtccgtgtctgggcgcgt

SEQ ID NO: 1965515 - DNA, 25 bp, Homo sapien
catgtccgtgtctgggcgcgcgtcc

SEQ ID NO: 1965516 - DNA, 25 bp, Homo sapien
agcagctgagcaagcgcggccaccg

SEQ ID NO: 1965517 - DNA, 25 bp, Homo sapien
cctccgccgggtgagcagctgagca

SEQ ID NO: 1965518 - DNA, 25 bp, Homo sapien
aaggttgagtcgctggtgtattggg

SEQ ID NO: 1965519 - DNA, 25 bp, Homo sapien
accatcaggccaagcccccccacag

SEQ ID NO: 1965520 - DNA, 25 bp, Homo sapien
gtgtattggggtcggccctgtgggc

SEQ ID NO: 1965521 - DNA, 25 bp, Homo sapien
cacagacccgcccatgcaggccccg

SEQ ID NO: 1965522 - DNA, 25 bp, Homo sapien
agtggagctggacatacgtccttcc

SEQ ID NO: 1965523 - DNA, 25 bp, Homo sapien
ggaactggaaggattgcagagaaca

SEQ ID NO: 1965524 - DNA, 25 bp, Homo sapien
gcggctcagagggacgcagtcttgg

SEQ ID NO: 1965525 - DNA, 25 bp, Homo sapien
cagtcttggggtgaagaaacagccc

SEQ ID NO: 1965526 - DNA, 25 bp, Homo sapien
ctgcggtcctgagcttaacagcttc

SEQ ID NO: 1965527 - DNA, 25 bp, Homo sapien
cggtcctgagcttaacagcttctac

SEQ ID NO: 1965528 - DNA, 25 bp, Homo sapien
caggtttcacgcatgtgtgctgcag

SEQ ID NO: 1965529 - DNA, 25 bp, Homo sapien
tcagcaagtttggaagaaccccaca

SEQ ID NO: 1965530 - DNA, 25 bp, Homo sapien
tttttcctgcgcgtcatctctgaca

SEQ ID NO: 1965531 - DNA, 25 bp, Homo sapien
catcctctcaggtttcacgcatgtg

SEQ ID NO: 1965532 - DNA, 25 bp, Homo sapien
gagatgagatgatgggtcctcacac

SEQ ID NO: 1965533 - DNA, 25 bp, Homo sapien
catcaaggttgtctgacgaagggca

SEQ ID NO: 1965534 - DNA, 25 bp, Homo sapien
caagtcggtgtctcggtgtcagtga

SEQ ID NO: 1965535 - DNA, 25 bp, Homo sapien
ggatgcgcaggacgttgatatacga

SEQ ID NO: 1965536 - DNA, 25 bp, Homo sapien
gcgatcggtcacaggggtctgatgt

SEQ ID NO: 1965537 - DNA, 25 bp, Homo sapien
ctgtggatggcgatcggtcacaggg

SEQ ID NO: 1965538 - DNA, 25 bp, Homo sapien
actgtggatggcgatcggtcacagg

SEQ ID NO: 1965539 - DNA, 25 bp, Homo sapien
ggatggcgatcggtcacaggggtct

SEQ ID NO: 1965540 - DNA, 25 bp, Homo sapien
agccttgggctaccccagtggctgt

SEQ ID NO: 1965541 - DNA, 25 bp, Homo sapien
tgggcgtccccagggttgactatag

SEQ ID NO: 1965542 - DNA, 25 bp, Homo sapien
tgtaccagagggacaggcatcctgt

SEQ ID NO: 1965543 - DNA, 25 bp, Homo sapien
ggcatgggttcacgtggccccagat

SEQ ID NO: 1965544 - DNA, 25 bp, Homo sapien
tttctaccggaagagtgtctggagc

SEQ ID NO: 1965545 - DNA, 25 bp, Homo sapien
ctgatgagtgtgtacgtcgtcgagc

SEQ ID NO: 1965546 - DNA, 25 bp, Homo sapien
tttatgtcacggagaccacgtttca

SEQ ID NO: 1965547 - DNA, 25 bp, Homo sapien
gatcctggccaagttcctgcactgg

SEQ ID NO: 1965548 - DNA, 25 bp, Homo sapien
ccctcggtgatctggatgtggcatg

SEQ ID NO: 1965549 - DNA, 25 bp, Homo sapien
ggttggctgtgttccggccgcagag

SEQ ID NO: 1965550 - DNA, 25 bp, Homo sapien
tgcggtgtccccgtgtccgaatggt

SEQ ID NO: 1965551 - DNA, 25 bp, Homo sapien
gtggcatgtccttctcgtttaaggg

SEQ ID NO: 1965552 - DNA, 25 bp, Homo sapien
gatgtgctgtatccggatggtgcag

SEQ ID NO: 1965553 - DNA, 25 bp, Homo sapien
ccctgcggttagctggatatgcggt

SEQ ID NO: 1965554 - DNA, 25 bp, Homo sapien
tgagctggatgtgctgtatccggat

SEQ ID NO: 1965555 - DNA, 25 bp, Homo sapien
tcaccaggccctgcggttagctgga

SEQ ID NO: 1965556 - DNA, 25 bp, Homo sapien
tgcggtgtccccgtgtccggatggt

SEQ ID NO: 1965557 - DNA, 25 bp, Homo sapien
gctggttgtgcagtgtccggttgct

SEQ ID NO: 1965558 - DNA, 25 bp, Homo sapien
tagccaaggccttcggtgagctgga

SEQ ID NO: 1965559 - DNA, 25 bp, Homo sapien
ctggggtgaggtcgccaggcctttg

SEQ ID NO: 1965560 - DNA, 25 bp, Homo sapien
gatgtgcggtgtctggatggtgcag

SEQ ID NO: 1965561 - DNA, 25 bp, Homo sapien
tcgccaggccctcggtgagctggat

SEQ ID NO: 1965562 - DNA, 25 bp, Homo sapien
ggatgtgtggtgtctggatggtgca

SEQ ID NO: 1965563 - DNA, 25 bp, Homo sapien
gatatgcggtgtccggatggtgcag

SEQ ID NO: 1965564 - DNA, 25 bp, Homo sapien
gccatggctgttgtaccagatggtg

SEQ ID NO: 1965565 - DNA, 25 bp, Homo sapien
ccgggatgaggtcgccaggccctca

SEQ ID NO: 1965566 - DNA, 25 bp, Homo sapien
catggctgttgtaccagatggtgca

SEQ ID NO: 1965567 - DNA, 25 bp, Homo sapien
tggccatggctgttgtaccagatgg

SEQ ID NO: 1965568 - DNA, 25 bp, Homo sapien
atgaagatgtggagactcacgagga

SEQ ID NO: 1965569 - DNA, 25 bp, Homo sapien
ccagtgagtgacagcaacgtccgct

SEQ ID NO: 1965570 - DNA, 25 bp, Homo sapien
tcatcttggcccgtgagtgtctgga

SEQ ID NO: 1965571 - DNA, 25 bp, Homo sapien
tggccagcgttccttagccagtgag

SEQ ID NO: 1965572 - DNA, 25 bp, Homo sapien
ttggtcacctctccgttccattttg

SEQ ID NO: 1965573 - DNA, 25 bp, Homo sapien
gccggttgcccattgcctgggtaga

SEQ ID NO: 1965574 - DNA, 25 bp, Homo sapien
tctgatgctcggctcttcttggtca

SEQ ID NO: 1965575 - DNA, 25 bp, Homo sapien
ccaggtgtccttggcgtttgctcac

SEQ ID NO: 1965576 - DNA, 25 bp, Homo sapien
caggtgtccctgtcacgtgtagggt

SEQ ID NO: 1965577 - DNA, 25 bp, Homo sapien
tccctgtcacgtgtagggtgagtga

SEQ ID NO: 1965578 - DNA, 25 bp, Homo sapien
gtccctgtcacgtgtagggtgagtg

SEQ ID NO: 1965579 - DNA, 25 bp, Homo sapien
ccaggtgtccctgtcacgtgtaggg

SEQ ID NO: 1965580 - DNA, 25 bp, Homo sapien
tgtccctgtcccgtgcagggtgagt

SEQ ID NO: 1965581 - DNA, 25 bp, Homo sapien
tccctgtcccgtgcagggtgagtga

SEQ ID NO: 1965582 - DNA, 25 bp, Homo sapien
tccctgtcacgtgtagggtgagtga

SEQ ID NO: 1965583 - DNA, 25 bp, Homo sapien
ccaggtgtccctgtcacgtgtaggg

SEQ ID NO: 1965584 - DNA, 25 bp, Homo sapien
gctccgtggatagctttgctgctct

SEQ ID NO: 1965585 - DNA, 25 bp, Homo sapien
tgatttttgtcatagcacctgctct

SEQ ID NO: 1965586 - DNA, 25 bp, Homo sapien
agatgtccaccgtgcactgcgtctg

SEQ ID NO: 1965587 - DNA, 25 bp, Homo sapien
gacagcagagtcagcttaacctgag

SEQ ID NO: 1965588 - DNA, 25 bp, Homo sapien
cagatttggagctggtagcgcttac

SEQ ID NO: 1965589 - DNA, 25 bp, Homo sapien
tgctgccggtcaccttgagctgtgg

SEQ ID NO: 1965590 - DNA, 25 bp, Homo sapien
caagttcccatcacgtcagatttgg

SEQ ID NO: 1965591 - DNA, 25 bp, Homo sapien
tggactctgggatcaaaggctcttt

SEQ ID NO: 1965592 - DNA, 25 bp, Homo sapien
tgggtggaatgtccctgtcgaggag

SEQ ID NO: 1965593 - DNA, 25 bp, Homo sapien
ctggatgaaatgtgtctgtagagga

SEQ ID NO: 1965594 - DNA, 25 bp, Homo sapien
atgtgtctgtagaggaggagctgga

SEQ ID NO: 1965595 - DNA, 25 bp, Homo sapien
ggagctggatgaaatgtgtctgtag

SEQ ID NO: 1965596 - DNA, 25 bp, Homo sapien
gaaatgtgtctgtagaggaggagct

SEQ ID NO: 1965597 - DNA, 25 bp, Homo sapien
aatgtgtctgtagaggaggagctgg

SEQ ID NO: 1965598 - DNA, 25 bp, Homo sapien
aggaggagctggatgaaatgtccct

SEQ ID NO: 1965599 - DNA, 25 bp, Homo sapien
gatgaaatgtccctgtagaggagga

SEQ ID NO: 1965600 - DNA, 25 bp, Homo sapien
ctggatggaatgtgtctgtagagga

SEQ ID NO: 1965601 - DNA, 25 bp, Homo sapien
gcgccccgcgaacgccctccgcggc

SEQ ID NO: 1965602 - DNA, 25 bp, Homo sapien
cggcgccccgcgaacgccctccgcg

SEQ ID NO: 1965603 - DNA, 25 bp, Homo sapien
tgccaagaagcgagaacagactgag

SEQ ID NO: 1965604 - DNA, 25 bp, Homo sapien
catttgatcagggtaacaggagtca

SEQ ID NO: 1965605 - DNA, 25 bp, Homo sapien
ccactgcaatggtagccgaaaaccg

SEQ ID NO: 1965606 - DNA, 25 bp, Homo sapien
aaaccgcgccgtgagaagactctgt

SEQ ID NO: 1965607 - DNA, 25 bp, Homo sapien
cagggactttctttcaagtgctgtc

SEQ ID NO: 1965608 - DNA, 25 bp, Homo sapien
gtacgaatgcaagatgtgactcccc

SEQ ID NO: 1965609 - DNA, 25 bp, Homo sapien
taaccttggctctctacgggagtga

SEQ ID NO: 1965610 - DNA, 25 bp, Homo sapien
tgagggagttctgcaatgatccaca

SEQ ID NO: 1965611 - DNA, 25 bp, Homo sapien
cattacaaggagagtacacacgcca

SEQ ID NO: 1965612 - DNA, 25 bp, Homo sapien
gaaaagcgagcaggatcacagtggt

SEQ ID NO: 1965613 - DNA, 25 bp, Homo sapien
tcacagcatgtatttagagcagccg

SEQ ID NO: 1965614 - DNA, 25 bp, Homo sapien
gatgatgagccacttcccgataaga

SEQ ID NO: 1965615 - DNA, 25 bp, Homo sapien
tatagaaagtgaccaccaaggccag

SEQ ID NO: 1965616 - DNA, 25 bp, Homo sapien
tattgttcaaatgagcagggcccga

SEQ ID NO: 1965617 - DNA, 25 bp, Homo sapien
gcctttggtagctaacagtcactga

SEQ ID NO: 1965618 - DNA, 25 bp, Homo sapien
tcttcgtggcgacttagagttggcg

SEQ ID NO: 1965619 - DNA, 25 bp, Homo sapien
taattacgatcgtccacctggtggc

SEQ ID NO: 1965620 - DNA, 25 bp, Homo sapien
gacagccgttaggttcagcccattg

SEQ ID NO: 1965621 - DNA, 25 bp, Homo sapien
taaaatggagtcagggccggtagtc

SEQ ID NO: 1965622 - DNA, 25 bp, Homo sapien
aaacgtacagatgtggcccaggcct

SEQ ID NO: 1965623 - DNA, 25 bp, Homo sapien
gctcgtgcgcgatgttaaaacagaa

SEQ ID NO: 1965624 - DNA, 25 bp, Homo sapien
agcattggccggtgatgaggacccc

SEQ ID NO: 1965625 - DNA, 25 bp, Homo sapien
gaaggcctagacagaaaagctcact

SEQ ID NO: 1965626 - DNA, 25 bp, Homo sapien
aaatccgcccgtccttggagctgag

SEQ ID NO: 1965627 - DNA, 25 bp, Homo sapien
gctgtgccgtgaaccagggacctga

SEQ ID NO: 1965628 - DNA, 25 bp, Homo sapien
taaggaccagtcattgggtgatcca

SEQ ID NO: 1965629 - DNA, 25 bp, Homo sapien
ctctgtcctcggtgctcttcagggc

SEQ ID NO: 1965630 - DNA, 25 bp, Homo sapien
tcttgagatccttaacgagttacct

SEQ ID NO: 1965631 - DNA, 25 bp, Homo sapien
tgggttactgtgattttattccgca

SEQ ID NO: 1965632 - DNA, 25 bp, Homo sapien
tctcttagtgctggttatcacactt

SEQ ID NO: 1965633 - DNA, 25 bp, Homo sapien
tggaagcagtgttgtagcagagttg

SEQ ID NO: 1965634 - DNA, 25 bp, Homo sapien
ggttactgtgattttattccacact

SEQ ID NO: 1965635 - DNA, 25 bp, Homo sapien
gctataaaccctcacttatggctca

SEQ ID NO: 1965636 - DNA, 25 bp, Homo sapien
cttcagacaaagttcctcattagga

SEQ ID NO: 1965637 - DNA, 25 bp, Homo sapien
cacacagggtgaccatattgcttcc

SEQ ID NO: 1965638 - DNA, 25 bp, Homo sapien
tcagggtcctgtggtgacagccggc

SEQ ID NO: 1965639 - DNA, 25 bp, Homo sapien
ggaccttgtatttgcgggtagtgtg

SEQ ID NO: 1965640 - DNA, 25 bp, Homo sapien
gggcccctgtatctgcgggtagtgt

SEQ ID NO: 1965641 - DNA, 25 bp, Homo sapien
ttttgagggtttgggccaggatgtg

SEQ ID NO: 1965642 - DNA, 25 bp, Homo sapien
ttgtatttgcgggtagtgtggcgca

SEQ ID NO: 1965643 - DNA, 25 bp, Homo sapien
gagtgtccaagctaggcttccacga

SEQ ID NO: 1965644 - DNA, 25 bp, Homo sapien
gggactcgactaccacacttgctgg

SEQ ID NO: 1965645 - DNA, 25 bp, Homo sapien
tgagaaggcgccctgtgctgtactg

SEQ ID NO: 1965646 - DNA, 25 bp, Homo sapien
cgaggtcacctgtcttgctaagcca

SEQ ID NO: 1965647 - DNA, 25 bp, Homo sapien
tcctagaagcaagcactgtttcggg

SEQ ID NO: 1965648 - DNA, 25 bp, Homo sapien
ccggtttgtagggagcacgcttcca

SEQ ID NO: 1965649 - DNA, 25 bp, Homo sapien
gaacggtttgctgagatcctgcgat

SEQ ID NO: 1965650 - DNA, 25 bp, Homo sapien
tctgaaagaaccctgaagtgaaaag

SEQ ID NO: 1965651 - DNA, 25 bp, Homo sapien
gtctttgagttacccgtcagtggca

SEQ ID NO: 1965652 - DNA, 25 bp, Homo sapien
tggctgagcatctcctaatggccgg

SEQ ID NO: 1965653 - DNA, 25 bp, Homo sapien
tcttcagtctgtggatgccaatcct

SEQ ID NO: 1965654 - DNA, 25 bp, Homo sapien
tttctaacccgatattcagtggcac

SEQ ID NO: 1965655 - DNA, 25 bp, Homo sapien
aagtatcgtagcatctcacccctct

SEQ ID NO: 1965656 - DNA, 25 bp, Homo sapien
cacttgtgaagtatcgtagcatctc

SEQ ID NO: 1965657 - DNA, 25 bp, Homo sapien
acttaaagtcataattgaacacttg

SEQ ID NO: 1965658 - DNA, 25 bp, Homo sapien
taaagtcataattgaacacttgtga

SEQ ID NO: 1965659 - DNA, 25 bp, Homo sapien
aatgaaagcccgctctctccaggcg

SEQ ID NO: 1965660 - DNA, 25 bp, Homo sapien
tgttgcacgggatttccagggctgt

SEQ ID NO: 1965661 - DNA, 25 bp, Homo sapien
atctgtgagtccgtcgcggcaggcc

SEQ ID NO: 1965662 - DNA, 25 bp, Homo sapien
tgctcagagctcttctgggtggaac

SEQ ID NO: 1965663 - DNA, 25 bp, Homo sapien
cagcaaatattagctcagcaggtgg

SEQ ID NO: 1965664 - DNA, 25 bp, Homo sapien
gctcttgctcggataaacacttaag

SEQ ID NO: 1965665 - DNA, 25 bp, Homo sapien
ctggacacgggacatcaagggcact

SEQ ID NO: 1965666 - DNA, 25 bp, Homo sapien
taagcaacgttgtcaggaaggaatc

SEQ ID NO: 1965667 - DNA, 25 bp, Homo sapien
gctctttctgctggacgtggcatct

SEQ ID NO: 1965668 - DNA, 25 bp, Homo sapien
tgtggttcaccacaaggaatgccgt

SEQ ID NO: 1965669 - DNA, 25 bp, Homo sapien
acaaggaatgccgtacattgggcaa

SEQ ID NO: 1965670 - DNA, 25 bp, Homo sapien
tccgacatctaagaatcctgggcca

SEQ ID NO: 1965671 - DNA, 25 bp, Homo sapien
gcacagagtgtggtttaggaccgct

SEQ ID NO: 1965672 - DNA, 25 bp, Homo sapien
ccttaaagcgtggtgatggccgagc

SEQ ID NO: 1965673 - DNA, 25 bp, Homo sapien
tgcagcctgcgtgaccaatggcacg

SEQ ID NO: 1965674 - DNA, 25 bp, Homo sapien
aatggcacgatgcatcctgctacct

SEQ ID NO: 1965675 - DNA, 25 bp, Homo sapien
aaaccctgaggaccttggacctgag

SEQ ID NO: 1965676 - DNA, 25 bp, Homo sapien
ccttgtccacaggaggagactgctt

SEQ ID NO: 1965677 - DNA, 25 bp, Homo sapien
tgtgagtgccggtagccttgtccac

SEQ ID NO: 1965678 - DNA, 25 bp, Homo sapien
cgacgggccttagcaaaaccctgag

SEQ ID NO: 1965679 - DNA, 25 bp, Homo sapien
cctgggaaaggaaccgaatgggctg

SEQ ID NO: 1965680 - DNA, 25 bp, Homo sapien
gaaccgaatgggctgactcagtgtg

SEQ ID NO: 1965681 - DNA, 25 bp, Homo sapien
ggaaaggaaccgaatgggctgactc

SEQ ID NO: 1965682 - DNA, 25 bp, Homo sapien
cgaatgggctgactcagtgtggccc

SEQ ID NO: 1965683 - DNA, 25 bp, Homo sapien
tgtgcttaacttaccactgactctt

SEQ ID NO: 1965684 - DNA, 25 bp, Homo sapien
cctgggatatagacccgtaatcgac

SEQ ID NO: 1965685 - DNA, 25 bp, Homo sapien
aaactttgaacgaggctgactgtgc

SEQ ID NO: 1965686 - DNA, 25 bp, Homo sapien
taagttcacatgctgtaaatctact

SEQ ID NO: 1965687 - DNA, 25 bp, Homo sapien
cgtgtggcatttccgctgggcatta

SEQ ID NO: 1965688 - DNA, 25 bp, Homo sapien
caagcacagttcacccgtgtggcat

SEQ ID NO: 1965689 - DNA, 25 bp, Homo sapien
ggaagttacctttggactctcacta

SEQ ID NO: 1965690 - DNA, 25 bp, Homo sapien
gggtcgcagccttgttccacacaag

SEQ ID NO: 1965691 - DNA, 25 bp, Homo sapien
gacctgataacagaaagttgggaaa

SEQ ID NO: 1965692 - DNA, 25 bp, Homo sapien
taagcaattgaatcgcattattaac

SEQ ID NO: 1965693 - DNA, 25 bp, Homo sapien
taaaggccggatcttatcagcagct

SEQ ID NO: 1965694 - DNA, 25 bp, Homo sapien
tccaggactgaaccatcaagacacc

SEQ ID NO: 1965695 - DNA, 25 bp, Homo sapien
tcagggtaagctagcagaaaggcgt

SEQ ID NO: 1965696 - DNA, 25 bp, Homo sapien
agggtaagctagcagaaaggcgtat

SEQ ID NO: 1965697 - DNA, 25 bp, Homo sapien
cagggtaagctagcagaaaggcgta

SEQ ID NO: 1965698 - DNA, 25 bp, Homo sapien
atcagggtaagctagcagaaaggcg

SEQ ID NO: 1965699 - DNA, 25 bp, Homo sapien
tatgtcttggagcttaatactaagg

SEQ ID NO: 1965700 - DNA, 25 bp, Homo sapien
agagctctctgcttcgggctcagca

SEQ ID NO: 1965701 - DNA, 25 bp, Homo sapien
tactgagtacctacacgaagtttca

SEQ ID NO: 1965702 - DNA, 25 bp, Homo sapien
catgcaccctccatagctaggctgg

SEQ ID NO: 1965703 - DNA, 25 bp, Homo sapien
cagccaatcccagcattggaaccaa

SEQ ID NO: 1965704 - DNA, 25 bp, Homo sapien
gaaccaacagggcataattccacct

SEQ ID NO: 1965705 - DNA, 25 bp, Homo sapien
accatccgccctggaattaggccgg

SEQ ID NO: 1965706 - DNA, 25 bp, Homo sapien
attaggccggatattccaatttggg

SEQ ID NO: 1965707 - DNA, 25 bp, Homo sapien
gctggagggcgggtcatccagtgct

SEQ ID NO: 1965708 - DNA, 25 bp, Homo sapien
ctggagggtgggatcttcccaaggg

SEQ ID NO: 1965709 - DNA, 25 bp, Homo sapien
gtgtatgcctcgggttcaggtgcac

SEQ ID NO: 1965710 - DNA, 25 bp, Homo sapien
ctggagggcgggtcatcgagtgctg

SEQ ID NO: 1965711 - DNA, 25 bp, Homo sapien
attgagtccgttcacacagcctggg

SEQ ID NO: 1965712 - DNA, 25 bp, Homo sapien
cacactcccgcatgcaggccaagtg

SEQ ID NO: 1965713 - DNA, 25 bp, Homo sapien
ggtctcttggggaccagaatgcctt

SEQ ID NO: 1965714 - DNA, 25 bp, Homo sapien
gagaccaacagagcgagcatctccc

SEQ ID NO: 1965715 - DNA, 25 bp, Homo sapien
gtgagaccaacagagcgagcatctc

SEQ ID NO: 1965716 - DNA, 25 bp, Homo sapien
gttcctgtatagtttctccttggat

SEQ ID NO: 1965717 - DNA, 25 bp, Homo sapien
attcattcgatttaaactattggaa

SEQ ID NO: 1965718 - DNA, 25 bp, Homo sapien
ctgaagaaggataaacacagctaac

SEQ ID NO: 1965719 - DNA, 25 bp, Homo sapien
tctccttggatctgttaacaattca

SEQ ID NO: 1965720 - DNA, 25 bp, Homo sapien
tttctctgacttcgccttttttgtc

SEQ ID NO: 1965721 - DNA, 25 bp, Homo sapien
tgctgccgggtacaacggctttctt

SEQ ID NO: 1965722 - DNA, 25 bp, Homo sapien
tttttcagagggctcactgagcaaa

SEQ ID NO: 1965723 - DNA, 25 bp, Homo sapien
gaaatttcgctgcaagtcgcttgaa

SEQ ID NO: 1965724 - DNA, 25 bp, Homo sapien
ctcttcatcctcttcttcatcctct

SEQ ID NO: 1965725 - DNA, 25 bp, Homo sapien
tcctcttcttcatcctcttctgtac

SEQ ID NO: 1965726 - DNA, 25 bp, Homo sapien
cctcttcatcctcttcttcatcctc

SEQ ID NO: 1965727 - DNA, 25 bp, Homo sapien
tcatcctcttcttcatcctcttctg

SEQ ID NO: 1965728 - DNA, 25 bp, Homo sapien
tgtagttcaaatcacatcccctgaa

SEQ ID NO: 1965729 - DNA, 25 bp, Homo sapien
aatacctccacagttaagtttcatg

SEQ ID NO: 1965730 - DNA, 25 bp, Homo sapien
tctgatgttctgtagttcaaatcac

SEQ ID NO: 1965731 - DNA, 25 bp, Homo sapien
cagttaagtttcatgaattctgatg

SEQ ID NO: 1965732 - DNA, 25 bp, Homo sapien
ctctaaaaataagcaaatgttgttg

SEQ ID NO: 1965733 - DNA, 25 bp, Homo sapien
ctaaaaataagcaaatgttgttgta

SEQ ID NO: 1965734 - DNA, 25 bp, Homo sapien
tctaaaaataagcaaatgttgttgt

SEQ ID NO: 1965735 - DNA, 25 bp, Homo sapien
cttctgtttcacggcagtcagaaga

SEQ ID NO: 1965736 - DNA, 25 bp, Homo sapien
ttctgtttcacggcagtcagaagaa

SEQ ID NO: 1965737 - DNA, 25 bp, Homo sapien
tctgtttcacggcagtcagaagaac

SEQ ID NO: 1965738 - DNA, 25 bp, Homo sapien
aggagctgatgttctgatttgagaa

SEQ ID NO: 1965739 - DNA, 25 bp, Homo sapien
tgatttgagaatcttgcagctgcag

SEQ ID NO: 1965740 - DNA, 25 bp, Homo sapien
tgaggatcgtgcagctgaagtctcg

SEQ ID NO: 1965741 - DNA, 25 bp, Homo sapien
gagctgaggttctaattttggagtc

SEQ ID NO: 1965742 - DNA, 25 bp, Homo sapien
aggagctaatgttctgatttgagaa

SEQ ID NO: 1965743 - DNA, 25 bp, Homo sapien
tcaagcagctgaagactcgaggagg

SEQ ID NO: 1965744 - DNA, 25 bp, Homo sapien
tgatttgagaatcttgcagctgcag

SEQ ID NO: 1965745 - DNA, 25 bp, Homo sapien
gacccggagtggagctgatattcta

SEQ ID NO: 1965746 - DNA, 25 bp, Homo sapien
ttttcctgaactttcgatcgccagc

SEQ ID NO: 1965747 - DNA, 25 bp, Homo sapien
ttccagagtcggtgcagggttgaca

SEQ ID NO: 1965748 - DNA, 25 bp, Homo sapien
tttttctcgcctcaagagccgccag

SEQ ID NO: 1965749 - DNA, 25 bp, Homo sapien
tggtcgcttttccaccgaatgtccg

SEQ ID NO: 1965750 - DNA, 25 bp, Homo sapien
atcactgcctgtcccgggtcgcagc

SEQ ID NO: 1965751 - DNA, 25 bp, Homo sapien
gggacattgtctccaagcgccttcc

SEQ ID NO: 1965752 - DNA, 25 bp, Homo sapien
aggcggcctgtgcatcccggacaac

SEQ ID NO: 1965753 - DNA, 25 bp, Homo sapien
ttttcatacaagaactaaaaggcaa

SEQ ID NO: 1965754 - DNA, 25 bp, Homo sapien
agagtttccgactgttagcgtgaat

SEQ ID NO: 1965755 - DNA, 25 bp, Homo sapien
gactgttagcgtgaatcacattcac

SEQ ID NO: 1965756 - DNA, 25 bp, Homo sapien
ttccgactgttagcgtgaatcacat

SEQ ID NO: 1965757 - DNA, 25 bp, Homo sapien
cccacggagtagatgggcccacagg

SEQ ID NO: 1965758 - DNA, 25 bp, Homo sapien
acagacaacatcttggtaggcaact

SEQ ID NO: 1965759 - DNA, 25 bp, Homo sapien
catcccctgcagtagacacagacaa

SEQ ID NO: 1965760 - DNA, 25 bp, Homo sapien
tggtaggcaactgggtgaatattca

SEQ ID NO: 1965761 - DNA, 25 bp, Homo sapien
gcaactgggtgaatattcagagaca

SEQ ID NO: 1965762 - DNA, 25 bp, Homo sapien
tgggggaccggccatgggacactgt

SEQ ID NO: 1965763 - DNA, 25 bp, Homo sapien
ctcctggatgcgctgtgtgtttgct

SEQ ID NO: 1965764 - DNA, 25 bp, Homo sapien
cctggatgcgctgtgtgtttgctga

SEQ ID NO: 1965765 - DNA, 25 bp, Homo sapien
ggctcctggatgcgctgtgtgtttg

SEQ ID NO: 1965766 - DNA, 25 bp, Homo sapien
tgtttgggcgccatcataaggagcc

SEQ ID NO: 1965767 - DNA, 25 bp, Homo sapien
ctgcactgtttgggcgccatcataa

SEQ ID NO: 1965768 - DNA, 25 bp, Homo sapien
taaggagccgtgacggccttcacag

SEQ ID NO: 1965769 - DNA, 25 bp, Homo sapien
ggccttcacagagctccggggctca

SEQ ID NO: 1965770 - DNA, 25 bp, Homo sapien
actgtgttgaagaaccgcccggtca

SEQ ID NO: 1965771 - DNA, 25 bp, Homo sapien
agaaccgcccggtcagcacgctggg

SEQ ID NO: 1965772 - DNA, 25 bp, Homo sapien
tgtgttgaagaaccgcccggtcagc

SEQ ID NO: 1965773 - DNA, 25 bp, Homo sapien
gcacgctgggccctatacacataca

SEQ ID NO: 1965774 - DNA, 25 bp, Homo sapien
tgtcctgcggtttgcgtgggctctc

SEQ ID NO: 1965775 - DNA, 25 bp, Homo sapien
catgttgattcatccgtccctggaa

SEQ ID NO: 1965776 - DNA, 25 bp, Homo sapien
cagtttaatgtcacgcatgggttcc

SEQ ID NO: 1965777 - DNA, 25 bp, Homo sapien
tatctcaggcaggaattctcgcagg

SEQ ID NO: 1965778 - DNA, 25 bp, Homo sapien
aaaccgaatagcgtcagctcctggg

SEQ ID NO: 1965779 - DNA, 25 bp, Homo sapien
cgcaggacgtcctgagaagacgctt

SEQ ID NO: 1965780 - DNA, 25 bp, Homo sapien
tcctgctggcgagttggatgtctgc

SEQ ID NO: 1965781 - DNA, 25 bp, Homo sapien
tcagggccagcagcgcgtaagctgc

SEQ ID NO: 1965782 - DNA, 25 bp, Homo sapien
caacccccggataatgttgacttgt

SEQ ID NO: 1965783 - DNA, 25 bp, Homo sapien
cagatttcctatggtcagtcctttt

SEQ ID NO: 1965784 - DNA, 25 bp, Homo sapien
tggggccgactactttgttccctca

SEQ ID NO: 1965785 - DNA, 25 bp, Homo sapien
gttgacttgtgctgatgctgtcaga

SEQ ID NO: 1965786 - DNA, 25 bp, Homo sapien
tggagattcatgcttgagtgagtca

SEQ ID NO: 1965787 - DNA, 25 bp, Homo sapien
ttttcaggaatctctgtgatgttaa

SEQ ID NO: 1965788 - DNA, 25 bp, Homo sapien
gatgtggctggagattcatgcttga

SEQ ID NO: 1965789 - DNA, 25 bp, Homo sapien
ctgtgatgttaatgaggtagttgga

SEQ ID NO: 1965790 - DNA, 25 bp, Homo sapien
cagagaactacagagattgatacct

SEQ ID NO: 1965791 - DNA, 25 bp, Homo sapien
gagttctgtgtgttagacctttcca

SEQ ID NO: 1965792 - DNA, 25 bp, Homo sapien
cagagatttcagctgtttgccatta

SEQ ID NO: 1965793 - DNA, 25 bp, Homo sapien
gtggagacctcagcagatggaattt

SEQ ID NO: 1965794 - DNA, 25 bp, Homo sapien
tccaaaggctttgacagaccattag

SEQ ID NO: 1965795 - DNA, 25 bp, Homo sapien
gctttataaatgatccgctctccaa

SEQ ID NO: 1965796 - DNA, 25 bp, Homo sapien
tcccggcgtctgtgcgcgcctggag

SEQ ID NO: 1965797 - DNA, 25 bp, Homo sapien
tgccgtgtggccttgagctttataa

SEQ ID NO: 1965798 - DNA, 25 bp, Homo sapien
ctgaacacaccgtcaggaaggctcc

SEQ ID NO: 1965799 - DNA, 25 bp, Homo sapien
gaaggctccctaggcagtgtagcca

SEQ ID NO: 1965800 - DNA, 25 bp, Homo sapien
tgtttctgaacacaccgtcaggaag

SEQ ID NO: 1965801 - DNA, 25 bp, Homo sapien
gcctggcttgaagcgacggcccgat

SEQ ID NO: 1965802 - DNA, 25 bp, Homo sapien
gatcggcccacaatcccaggatcta

SEQ ID NO: 1965803 - DNA, 25 bp, Homo sapien
attgcaccttcacggggctggagcc

SEQ ID NO: 1965804 - DNA, 25 bp, Homo sapien
ggctggagccggatcggcccacaat

SEQ ID NO: 1965805 - DNA, 25 bp, Homo sapien
gggattggcggcaagcattgcacct

SEQ ID NO: 1965806 - DNA, 25 bp, Homo sapien
aaacagtccgtcaccatcgaaaggg

SEQ ID NO: 1965807 - DNA, 25 bp, Homo sapien
tagacaatttcttggcggtatcagg

SEQ ID NO: 1965808 - DNA, 25 bp, Homo sapien
tcgtcagcatcagagaaacagtccg

SEQ ID NO: 1965809 - DNA, 25 bp, Homo sapien
agtttcgaggagagattgagtgatc

SEQ ID NO: 1965810 - DNA, 25 bp, Homo sapien
cactctgaaaactcatcgcatggga

SEQ ID NO: 1965811 - DNA, 25 bp, Homo sapien
tgggccctcggagttagtacactgt

SEQ ID NO: 1965812 - DNA, 25 bp, Homo sapien
taagagggcacgtcttcacatcact

SEQ ID NO: 1965813 - DNA, 25 bp, Homo sapien
tgtcccgtagcagagcggtctcttg

SEQ ID NO: 1965814 - DNA, 25 bp, Homo sapien
gccctcagagaggaaaatcaacctg

SEQ ID NO: 1965815 - DNA, 25 bp, Homo sapien
gatgtttaacaacacagccggcgag

SEQ ID NO: 1965816 - DNA, 25 bp, Homo sapien
tctcaagatacagaggaaccgccca

SEQ ID NO: 1965817 - DNA, 25 bp, Homo sapien
tcccaactttagaggtggccttgcc

SEQ ID NO: 1965818 - DNA, 25 bp, Homo sapien
gccagaaggagcctaaacaccgaag

SEQ ID NO: 1965819 - DNA, 25 bp, Homo sapien
agatggaagccatgcccgggacgca

SEQ ID NO: 1965820 - DNA, 25 bp, Homo sapien
agggcttccgaccttgtgttctgtt

SEQ ID NO: 1965821 - DNA, 25 bp, Homo sapien
caagcttgggccaaagccagaagga

SEQ ID NO: 1965822 - DNA, 25 bp, Homo sapien
taagacaccagacctagcaaatcgg

SEQ ID NO: 1965823 - DNA, 25 bp, Homo sapien
caggcttttgtatgcaccgtagcag

SEQ ID NO: 1965824 - DNA, 25 bp, Homo sapien
aagttgtatggctgcgcgattcccc

SEQ ID NO: 1965825 - DNA, 25 bp, Homo sapien
tcaggcactaacagagtcagggtca

SEQ ID NO: 1965826 - DNA, 25 bp, Homo sapien
tcactcgaaaccaagatgggaggcg

SEQ ID NO: 1965827 - DNA, 25 bp, Homo sapien
gaagttaaacgatgactgcaccagt

SEQ ID NO: 1965828 - DNA, 25 bp, Homo sapien
tcaggccaaaatgttagacggtact

SEQ ID NO: 1965829 - DNA, 25 bp, Homo sapien
ggagtccgatcctcatgcacctgtg

SEQ ID NO: 1965830 - DNA, 25 bp, Homo sapien
ggccagcagggagatcccactggat

SEQ ID NO: 1965831 - DNA, 25 bp, Homo sapien
agatcccactggatcccaggacagc

SEQ ID NO: 1965832 - DNA, 25 bp, Homo sapien
cttagcctgctctgagcccaccctc

SEQ ID NO: 1965833 - DNA, 25 bp, Homo sapien
ctgggccagcagggagatcccactg

SEQ ID NO: 1965834 - DNA, 25 bp, Homo sapien
gggcggatatcgaggcaggggaagc

SEQ ID NO: 1965835 - DNA, 25 bp, Homo sapien
tcctgctgtgggcggatatcgaggc

SEQ ID NO: 1965836 - DNA, 25 bp, Homo sapien
gctgtgggcggatatcgaggcaggg

SEQ ID NO: 1965837 - DNA, 25 bp, Homo sapien
ctgctgtgggcggatatcgaggcag

SEQ ID NO: 1965838 - DNA, 25 bp, Homo sapien
gaaccacagggcgttgtggccagcc

SEQ ID NO: 1965839 - DNA, 25 bp, Homo sapien
gactgtatccctttcgggtgagggc

SEQ ID NO: 1965840 - DNA, 25 bp, Homo sapien
caaggactgtatccctttcgggtga

SEQ ID NO: 1965841 - DNA, 25 bp, Homo sapien
agccggccccagacaggtctcttgc

SEQ ID NO: 1965842 - DNA, 25 bp, Homo sapien
ccaggctccccatgttcagagtggc

SEQ ID NO: 1965843 - DNA, 25 bp, Homo sapien
cccatgttcagagtggcctctttat

SEQ ID NO: 1965844 - DNA, 25 bp, Homo sapien
cttggctgggcccacagtggatatg

SEQ ID NO: 1965845 - DNA, 25 bp, Homo sapien
cctggggttgccacggccaggctcc

SEQ ID NO: 1965846 - DNA, 25 bp, Homo sapien
ggagaagcaggtagagacacagctg

SEQ ID NO: 1965847 - DNA, 25 bp, Homo sapien
tggagaagcaggtagagacacagct

SEQ ID NO: 1965848 - DNA, 25 bp, Homo sapien
gacaatgtccgtgtgacgataaccg

SEQ ID NO: 1965849 - DNA, 25 bp, Homo sapien
gactgaagtcaaaacgctgtgctcc

SEQ ID NO: 1965850 - DNA, 25 bp, Homo sapien
cgtgtgacgacgaccatgtggcgat

SEQ ID NO: 1965851 - DNA, 25 bp, Homo sapien
tggaagaggctgtacaagccccagc

SEQ ID NO: 1965852 - DNA, 25 bp, Homo sapien
gaccttcgtgacagaccgggaaata

SEQ ID NO: 1965853 - DNA, 25 bp, Homo sapien
ggctctggccggcacttaaaggaaa

SEQ ID NO: 1965854 - DNA, 25 bp, Homo sapien
cacgggacagctaaacctatctggg

SEQ ID NO: 1965855 - DNA, 25 bp, Homo sapien
ggtggaaaagctctcgtcctaggaa

SEQ ID NO: 1965856 - DNA, 25 bp, Homo sapien
catcacttggtgcatagttaggctg

SEQ ID NO: 1965857 - DNA, 25 bp, Homo sapien
caggagtcatcagcgtggttttgcc

SEQ ID NO: 1965858 - DNA, 25 bp, Homo sapien
tgcccatagtagcatggaccccgga

SEQ ID NO: 1965859 - DNA, 25 bp, Homo sapien
acacagcgggatgtcgagggccctt

SEQ ID NO: 1965860 - DNA, 25 bp, Homo sapien
gggctgatccaagtatttggaggcc

SEQ ID NO: 1965861 - DNA, 25 bp, Homo sapien
ggtggggctgatccaagtatttgga

SEQ ID NO: 1965862 - DNA, 25 bp, Homo sapien
tgatccaagtatttggaggccctga

SEQ ID NO: 1965863 - DNA, 25 bp, Homo sapien
cccgttgcttctcatgtgtgccggg

SEQ ID NO: 1965864 - DNA, 25 bp, Homo sapien
tgacgttgggtatgctgttggactt

SEQ ID NO: 1965865 - DNA, 25 bp, Homo sapien
cgttgggtatgctgttggacttggg

SEQ ID NO: 1965866 - DNA, 25 bp, Homo sapien
gacgttgggtatgctgttggacttg

SEQ ID NO: 1965867 - DNA, 25 bp, Homo sapien
catgacgttgggtatgctgttggac

SEQ ID NO: 1965868 - DNA, 25 bp, Homo sapien
acggtggtgcggtccagcggtgcgg

SEQ ID NO: 1965869 - DNA, 25 bp, Homo sapien
cggtggtgcggtccagcggtgcggt

SEQ ID NO: 1965870 - DNA, 25 bp, Homo sapien
gacggtggtgcggtccagcggtgcg

SEQ ID NO: 1965871 - DNA, 25 bp, Homo sapien
ggtggtgcggtccagcggtgcggtc

SEQ ID NO: 1965872 - DNA, 25 bp, Homo sapien
gctgcccacaaggtagacaatgaac

SEQ ID NO: 1965873 - DNA, 25 bp, Homo sapien
cgactctgacttctgggtgaccaga

SEQ ID NO: 1965874 - DNA, 25 bp, Homo sapien
gcttcaatgcaggagggtcatctgc

SEQ ID NO: 1965875 - DNA, 25 bp, Homo sapien
agagccccggatgtcagctgactca

SEQ ID NO: 1965876 - DNA, 25 bp, Homo sapien
aatgcaatgatccatgaaggttacc

SEQ ID NO: 1965877 - DNA, 25 bp, Homo sapien
tgatccatgaaggttaccataacgc

SEQ ID NO: 1965878 - DNA, 25 bp, Homo sapien
tacataatgcaatgatccatgaagg

SEQ ID NO: 1965879 - DNA, 25 bp, Homo sapien
tgaaggttaccataacgccgaggga

SEQ ID NO: 1965880 - DNA, 25 bp, Homo sapien
acagaagggccacgcagcacgggct

SEQ ID NO: 1965881 - DNA, 25 bp, Homo sapien
tcaggagcatggatcaaatcaggcc

SEQ ID NO: 1965882 - DNA, 25 bp, Homo sapien
catcaaacccagaaacccgctgggt

SEQ ID NO: 1965883 - DNA, 25 bp, Homo sapien
ttactcccaatgttgagcagagcca

SEQ ID NO: 1965884 - DNA, 25 bp, Homo sapien
gtggaatccacgttctgcctcatta

SEQ ID NO: 1965885 - DNA, 25 bp, Homo sapien
tctgcctcattaccacgttggcgtg

SEQ ID NO: 1965886 - DNA, 25 bp, Homo sapien
tttaatcttaaaaggatggagtgga

SEQ ID NO: 1965887 - DNA, 25 bp, Homo sapien
ccacgttggcgtgtctgagcttcag

SEQ ID NO: 1965888 - DNA, 25 bp, Homo sapien
tccgcttactcagattgaccatgtg

SEQ ID NO: 1965889 - DNA, 25 bp, Homo sapien
cagccccatggagctcgtttccagg

SEQ ID NO: 1965890 - DNA, 25 bp, Homo sapien
gagatgattctcagccccatggagc

SEQ ID NO: 1965891 - DNA, 25 bp, Homo sapien
cattttttccgcttactcagattga

SEQ ID NO: 1965892 - DNA, 25 bp, Homo sapien
gactttgctgaacggtcctgcccaa

SEQ ID NO: 1965893 - DNA, 25 bp, Homo sapien
aaatggtaaccaagcagccctaggg

SEQ ID NO: 1965894 - DNA, 25 bp, Homo sapien
ctaagcacgtttttcgaagccaccg

SEQ ID NO: 1965895 - DNA, 25 bp, Homo sapien
cacagagccctgcaacaaatggtaa

SEQ ID NO: 1965896 - DNA, 25 bp, Homo sapien
cacagtcgtggcctcttgacaattg

SEQ ID NO: 1965897 - DNA, 25 bp, Homo sapien
gccatgcaaacgtgggcacacagtc

SEQ ID NO: 1965898 - DNA, 25 bp, Homo sapien
gggcacacagtcgtggcctcttgac

SEQ ID NO: 1965899 - DNA, 25 bp, Homo sapien
aaacgtgggcacacagtcgtggcct

SEQ ID NO: 1965900 - DNA, 25 bp, Homo sapien
gctccggtgccgcagtgtcctccgg

SEQ ID NO: 1965901 - DNA, 25 bp, Homo sapien
agaactggcggctcccgaacgcgac

SEQ ID NO: 1965902 - DNA, 25 bp, Homo sapien
ggcgggagaactggcggctcccgaa

SEQ ID NO: 1965903 - DNA, 25 bp, Homo sapien
gtgccgcagtgtcctccgggccctg

SEQ ID NO: 1965904 - DNA, 25 bp, Homo sapien
tgcggatatccattttcgttcctgg

SEQ ID NO: 1965905 - DNA, 25 bp, Homo sapien
tccaaacagcacgacgatcccggtg

SEQ ID NO: 1965906 - DNA, 25 bp, Homo sapien
tttttcccgagagcgctccaaacag

SEQ ID NO: 1965907 - DNA, 25 bp, Homo sapien
agtgatacgtcgcactccagcgcct

SEQ ID NO: 1965908 - DNA, 25 bp, Homo sapien
aggcccgttttgcttagagttgact

SEQ ID NO: 1965909 - DNA, 25 bp, Homo sapien
caaatacagcctctaaaaaggcccg

SEQ ID NO: 1965910 - DNA, 25 bp, Homo sapien
taaatcccagcttaagctccagcat

SEQ ID NO: 1965911 - DNA, 25 bp, Homo sapien
gaggaccacgtgactccaagaacaa

SEQ ID NO: 1965912 - DNA, 25 bp, Homo sapien
ctggcggcgccaaacacccggtatt

SEQ ID NO: 1965913 - DNA, 25 bp, Homo sapien
gctggcctttgacccggcgcaacgt

SEQ ID NO: 1965914 - DNA, 25 bp, Homo sapien
gcttagcgctaacgcatgcgcacgg

SEQ ID NO: 1965915 - DNA, 25 bp, Homo sapien
atgcgcacggcttctggcggcgcca

SEQ ID NO: 1965916 - DNA, 25 bp, Homo sapien
ctggccagtgtgcgtgaccttctcc

SEQ ID NO: 1965917 - DNA, 25 bp, Homo sapien
gtgtgcgtgaccttctccccggtcg

SEQ ID NO: 1965918 - DNA, 25 bp, Homo sapien
ctcgccacaccggttcagcagccgg

SEQ ID NO: 1965919 - DNA, 25 bp, Homo sapien
agccggcagaaggtcatcgccgccg

SEQ ID NO: 1965920 - DNA, 25 bp, Homo sapien
ctggaggaaggtgcatcctgtaccc

SEQ ID NO: 1965921 - DNA, 25 bp, Homo sapien
cggatgcccggcgagcccactgcca

SEQ ID NO: 1965922 - DNA, 25 bp, Homo sapien
cgaggtgcggctggaggaaggtgca

SEQ ID NO: 1965923 - DNA, 25 bp, Homo sapien
actgccaccagtcgcccgaggtgcg

SEQ ID NO: 1965924 - DNA, 25 bp, Homo sapien
aaacaaaaagaccatgtgtgacttt

SEQ ID NO: 1965925 - DNA, 25 bp, Homo sapien
gaccatgtgtgacttttacggccta

SEQ ID NO: 1965926 - DNA, 25 bp, Homo sapien
aaagaccatgtgtgacttttacggc

SEQ ID NO: 1965927 - DNA, 25 bp, Homo sapien
tgtgtgacttttacggcctaattct

SEQ ID NO: 1965928 - DNA, 25 bp, Homo sapien
ttctgacgacctacaaaccgaattc

SEQ ID NO: 1965929 - DNA, 25 bp, Homo sapien
tacaaaccgaattctcctgtagtct

SEQ ID NO: 1965930 - DNA, 25 bp, Homo sapien
aattctcctgtagtctttatcatca

SEQ ID NO: 1965931 - DNA, 25 bp, Homo sapien
gacctacaaaccgaattctcctgta

SEQ ID NO: 1965932 - DNA, 25 bp, Homo sapien
gaagaaccccatccagaactgttag

SEQ ID NO: 1965933 - DNA, 25 bp, Homo sapien
gaactgttagggtgcttgcaatatg

SEQ ID NO: 1965934 - DNA, 25 bp, Homo sapien
tatgcaaaccagaactacggctaca

SEQ ID NO: 1965935 - DNA, 25 bp, Homo sapien
gagtctcaggagaataagggacaag

SEQ ID NO: 1965936 - DNA, 25 bp, Homo sapien
cacaggcagcacactaatgagagat

SEQ ID NO: 1965937 - DNA, 25 bp, Homo sapien
aaggtgtgaggccaagacgtgccct

SEQ ID NO: 1965938 - DNA, 25 bp, Homo sapien
tgaactcggtacaacactgtcacag

SEQ ID NO: 1965939 - DNA, 25 bp, Homo sapien
ccacgttgcttgagctacaggcatg

SEQ ID NO: 1965940 - DNA, 25 bp, Homo sapien
ttatcgcaacaaaacagcacgccag

SEQ ID NO: 1965941 - DNA, 25 bp, Homo sapien
tgctactgaagaactgagggccagg

SEQ ID NO: 1965942 - DNA, 25 bp, Homo sapien
gcacgccaggtagacatttgcaccg

SEQ ID NO: 1965943 - DNA, 25 bp, Homo sapien
gtgcaactgctcctaatcctggtgg

SEQ ID NO: 1965944 - DNA, 25 bp, Homo sapien
cctcatcatcttcacgtagagcagg

SEQ ID NO: 1965945 - DNA, 25 bp, Homo sapien
tcatcatcttcacgtagagcaggct

SEQ ID NO: 1965946 - DNA, 25 bp, Homo sapien
gaggaagggagggttggtcctgctg

SEQ ID NO: 1965947 - DNA, 25 bp, Homo sapien
atcatcttcacgtagagcaggctga

SEQ ID NO: 1965948 - DNA, 25 bp, Homo sapien
ccttcagaggtactgaggtcatgag

SEQ ID NO: 1965949 - DNA, 25 bp, Homo sapien
gagaatcaacccattaaagactggt

SEQ ID NO: 1965950 - DNA, 25 bp, Homo sapien
gaaggagttcagtccccttcatgca

SEQ ID NO: 1965951 - DNA, 25 bp, Homo sapien
ggttctgcctcatgaaggattctgg

SEQ ID NO: 1965952 - DNA, 25 bp, Homo sapien
gaggacgcgagcacgatcgttagac

SEQ ID NO: 1965953 - DNA, 25 bp, Homo sapien
gacacaggactacgtggagatgcca

SEQ ID NO: 1965954 - DNA, 25 bp, Homo sapien
gagaggtcagctcactggttcagca

SEQ ID NO: 1965955 - DNA, 25 bp, Homo sapien
gcatgtgcgggaaagactctggtaa

SEQ ID NO: 1965956 - DNA, 25 bp, Homo sapien
tattgctcgggcctgtctgtcacag

SEQ ID NO: 1965957 - DNA, 25 bp, Homo sapien
gagaggcactgcaagaatcccagca

SEQ ID NO: 1965958 - DNA, 25 bp, Homo sapien
taaagttccaaacgcggagaggcac

SEQ ID NO: 1965959 - DNA, 25 bp, Homo sapien
caggctcccatgtgcgtttcataag

SEQ ID NO: 1965960 - DNA, 25 bp, Homo sapien
gccgccatcgcacgctatcacccga

SEQ ID NO: 1965961 - DNA, 25 bp, Homo sapien
ctcgctcacgggctgctctgctatc

SEQ ID NO: 1965962 - DNA, 25 bp, Homo sapien
gccatcgcacgctatcacccgagtc

SEQ ID NO: 1965963 - DNA, 25 bp, Homo sapien
tgctctgctatcaaatcaatggcaa

SEQ ID NO: 1965964 - DNA, 25 bp, Homo sapien
cagtaaccgcatgtgccggtttttg

SEQ ID NO: 1965965 - DNA, 25 bp, Homo sapien
accgcatgtgccggtttttgtttct

SEQ ID NO: 1965966 - DNA, 25 bp, Homo sapien
acagtaaccgcatgtgccggttttt

SEQ ID NO: 1965967 - DNA, 25 bp, Homo sapien
agtaaccgcatgtgccggtttttgt

SEQ ID NO: 1965968 - DNA, 25 bp, Homo sapien
aatgctcacaggatgctgcgggacc

SEQ ID NO: 1965969 - DNA, 25 bp, Homo sapien
gccttgacagcaacaccctttattc

SEQ ID NO: 1965970 - DNA, 25 bp, Homo sapien
tattcagcaccaggaatacccttcg

SEQ ID NO: 1965971 - DNA, 25 bp, Homo sapien
gaaccagcgagcttcacgtgctcag

SEQ ID NO: 1965972 - DNA, 25 bp, Homo sapien
tgccctgtgcatccaccttagagat

SEQ ID NO: 1965973 - DNA, 25 bp, Homo sapien
ccttagagattgcagccgggacata

SEQ ID NO: 1965974 - DNA, 25 bp, Homo sapien
gctgcagaaatccaatcagggtaat

SEQ ID NO: 1965975 - DNA, 25 bp, Homo sapien
ccgggacatatcgtttctgtgaaca

SEQ ID NO: 1965976 - DNA, 25 bp, Homo sapien
ttccatggccactctcagccggaga

SEQ ID NO: 1965977 - DNA, 25 bp, Homo sapien
tcacccctgagagttgggttgctgg

SEQ ID NO: 1965978 - DNA, 25 bp, Homo sapien
cagccggagaaatcgcctgccgggt

SEQ ID NO: 1965979 - DNA, 25 bp, Homo sapien
catgtggtgtgagtagcgtgcctca

SEQ ID NO: 1965980 - DNA, 25 bp, Homo sapien
tggaggacccttacaaaatgcattg

SEQ ID NO: 1965981 - DNA, 25 bp, Homo sapien
tgagcacccaggaacggagagtgca

SEQ ID NO: 1965982 - DNA, 25 bp, Homo sapien
cagaattcacaacgggcagtgtcgg

SEQ ID NO: 1965983 - DNA, 25 bp, Homo sapien
cagtgtcggtgcctcagtgtggctt

SEQ ID NO: 1965984 - DNA, 25 bp, Homo sapien
gcagtctctgtagcgtctggttcca

SEQ ID NO: 1965985 - DNA, 25 bp, Homo sapien
tgggcaatgtgcgttgatatttacc

SEQ ID NO: 1965986 - DNA, 25 bp, Homo sapien
agtgttttacacgttgcagtctctg

SEQ ID NO: 1965987 - DNA, 25 bp, Homo sapien
tgtcgctttggttggagtaggcaaa

SEQ ID NO: 1965988 - DNA, 25 bp, Homo sapien
catattagaaagagccgcagagatg

SEQ ID NO: 1965989 - DNA, 25 bp, Homo sapien
gctttcgttctgatgcgtccacgca

SEQ ID NO: 1965990 - DNA, 25 bp, Homo sapien
gctttaaatggtcagcgtgtctggc

SEQ ID NO: 1965991 - DNA, 25 bp, Homo sapien
tgggagcccagattccaagaaaaca

SEQ ID NO: 1965992 - DNA, 25 bp, Homo sapien
tttcactcacactaagtgacatctt

SEQ ID NO: 1965993 - DNA, 25 bp, Homo sapien
cactcacactaagtgacatcttttc

SEQ ID NO: 1965994 - DNA, 25 bp, Homo sapien
ctttctggaatgttcgcctgggcct

SEQ ID NO: 1965995 - DNA, 25 bp, Homo sapien
ttctggaatgttcgcctgggcctgg

SEQ ID NO: 1965996 - DNA, 25 bp, Homo sapien
caaaacgctcttaagtatcacccga

SEQ ID NO: 1965997 - DNA, 25 bp, Homo sapien
aagtatcacccgacacaggtgtcag

SEQ ID NO: 1965998 - DNA, 25 bp, Homo sapien
gctcttaagtatcacccgacacagg

SEQ ID NO: 1965999 - DNA, 25 bp, Homo sapien
ggcacaaaacgctcttaagtatcac

SEQ ID NO: 1966000 - DNA, 25 bp, Homo sapien
cagccttccatactctgcagcagaa

SEQ ID NO: 1966001 - DNA, 25 bp, Homo sapien
ttaataagtcgccttaaggctgtgt

SEQ ID NO: 1966002 - DNA, 25 bp, Homo sapien
cagacacgacaaaacgagagcccca

SEQ ID NO: 1966003 - DNA, 25 bp, Homo sapien
ttcactcttaaagccacttggagct

SEQ ID NO: 1966004 - DNA, 25 bp, Homo sapien
tgtggcatcggtcggcttcggtaca

SEQ ID NO: 1966005 - DNA, 25 bp, Homo sapien
aagtccctgctactttcctttgcgg

SEQ ID NO: 1966006 - DNA, 25 bp, Homo sapien
ccttggcgtcatgggagagttctcc

SEQ ID NO: 1966007 - DNA, 25 bp, Homo sapien
cagaggaaaagggactctccccagc

SEQ ID NO: 1966008 - DNA, 25 bp, Homo sapien
ccaccctcaggatggtccccggtgt

SEQ ID NO: 1966009 - DNA, 25 bp, Homo sapien
gccaccctcaggatggtccccggtg

SEQ ID NO: 1966010 - DNA, 25 bp, Homo sapien
caccctcaggatggtccccggtgtc

SEQ ID NO: 1966011 - DNA, 25 bp, Homo sapien
gattcccggtggcttcttcacgcga

SEQ ID NO: 1966012 - DNA, 25 bp, Homo sapien
aaaatacagcttgcgtgcaaagccg

SEQ ID NO: 1966013 - DNA, 25 bp, Homo sapien
ttgcagttgcttctcgcccgacgtc

SEQ ID NO: 1966014 - DNA, 25 bp, Homo sapien
tcagggaccctaaggacgtcgtcag

SEQ ID NO: 1966015 - DNA, 25 bp, Homo sapien
tccaggtgtcacgttaggaacaaac

SEQ ID NO: 1966016 - DNA, 25 bp, Homo sapien
tcattagctgtcacggctgcgaggt

SEQ ID NO: 1966017 - DNA, 25 bp, Homo sapien
ggacctaacatccttgccggagaca

SEQ ID NO: 1966018 - DNA, 25 bp, Homo sapien
tggcgtggcatccacagcgactctg

SEQ ID NO: 1966019 - DNA, 25 bp, Homo sapien
cgaggattgctcttgcgcttaaggg

SEQ ID NO: 1966020 - DNA, 25 bp, Homo sapien
gagattcaccgcttgtccctgtggc

SEQ ID NO: 1966021 - DNA, 25 bp, Homo sapien
caaagtttgctacccgtcgctaggc

SEQ ID NO: 1966022 - DNA, 25 bp, Homo sapien
tgggctccgccgcacaaactttgcg

SEQ ID NO: 1966023 - DNA, 25 bp, Homo sapien
gcgggctcggctgacgaccgcggcg

SEQ ID NO: 1966024 - DNA, 25 bp, Homo sapien
gtgcgggctcggctgacgaccgcgg

SEQ ID NO: 1966025 - DNA, 25 bp, Homo sapien
gctcgctcgcccacgtcacgccggt

SEQ ID NO: 1966026 - DNA, 25 bp, Homo sapien
acgtcacgccggtgcgggctcggct

SEQ ID NO: 1966027 - DNA, 25 bp, Homo sapien
ctccagcttcccttcggggcctgtc

SEQ ID NO: 1966028 - DNA, 25 bp, Homo sapien
ctgggcagccggtcacctgctgctc

SEQ ID NO: 1966029 - DNA, 25 bp, Homo sapien
agcttcccttcggggcctgtcttga

SEQ ID NO: 1966030 - DNA, 25 bp, Homo sapien
cggggcctgtcttgacctctgcaga

SEQ ID NO: 1966031 - DNA, 25 bp, Homo sapien
tttagattgcctgcaaagcagagtc

SEQ ID NO: 1966032 - DNA, 25 bp, Homo sapien
cgcgttctccttgtgacagaacgtc

SEQ ID NO: 1966033 - DNA, 25 bp, Homo sapien
attttagattgcctgcaaagcagag

SEQ ID NO: 1966034 - DNA, 25 bp, Homo sapien
tcttcaccaacttcatctctcgcgt

SEQ ID NO: 1966035 - DNA, 25 bp, Homo sapien
taatgggtccctagaaccctgtggc

SEQ ID NO: 1966036 - DNA, 25 bp, Homo sapien
taagagtcaaagtgatggtcccagg

SEQ ID NO: 1966037 - DNA, 25 bp, Homo sapien
tcaatgccgagatgatcctgtgggc

SEQ ID NO: 1966038 - DNA, 25 bp, Homo sapien
taagtgctgaaactggctgacgggt

SEQ ID NO: 1966039 - DNA, 25 bp, Homo sapien
aacacacgacacaccacacatgcca

SEQ ID NO: 1966040 - DNA, 25 bp, Homo sapien
atgcacaacacacatgccagagacc

SEQ ID NO: 1966041 - DNA, 25 bp, Homo sapien
tgccacacaacacacgacacaccac

SEQ ID NO: 1966042 - DNA, 25 bp, Homo sapien
aacacacatgccagagaccacacat

SEQ ID NO: 1966043 - DNA, 25 bp, Homo sapien
ggggcacagggcggacttcaagggc

SEQ ID NO: 1966044 - DNA, 25 bp, Homo sapien
gcacagggcggacttcaagggcgtc

SEQ ID NO: 1966045 - DNA, 25 bp, Homo sapien
ggcacagggcggacttcaagggcgt

SEQ ID NO: 1966046 - DNA, 25 bp, Homo sapien
cacagggcggacttcaagggcgtcc

SEQ ID NO: 1966047 - DNA, 25 bp, Homo sapien
ctgtcgccgcagagcatgaagaggc

SEQ ID NO: 1966048 - DNA, 25 bp, Homo sapien
ccgcagagcatgaagaggcctggct

SEQ ID NO: 1966049 - DNA, 25 bp, Homo sapien
ctggcccacgctcagacgaggggca

SEQ ID NO: 1966050 - DNA, 25 bp, Homo sapien
aggggcagcgcgacttccccgtagc

SEQ ID NO: 1966051 - DNA, 25 bp, Homo sapien
gtgtggacggacagaaacggccctc

SEQ ID NO: 1966052 - DNA, 25 bp, Homo sapien
agggagcggaccgtggtggaggcct

SEQ ID NO: 1966053 - DNA, 25 bp, Homo sapien
tctgagccgagcaggccacgcagac

SEQ ID NO: 1966054 - DNA, 25 bp, Homo sapien
acgcagacccgggaggcgctgaagc

SEQ ID NO: 1966055 - DNA, 25 bp, Homo sapien
taaggccaccgatactccacgtgat

SEQ ID NO: 1966056 - DNA, 25 bp, Homo sapien
tggcctcgctgggtgtcctcgggag

SEQ ID NO: 1966057 - DNA, 25 bp, Homo sapien
gctgggtgtcctcgggaggccactt

SEQ ID NO: 1966058 - DNA, 25 bp, Homo sapien
tcgccgggctgtggagttgttgttt

SEQ ID NO: 1966059 - DNA, 25 bp, Homo sapien
aatgttaaggatacactcgcctgag

SEQ ID NO: 1966060 - DNA, 25 bp, Homo sapien
aaagatatggccagtcgtcagcaca

SEQ ID NO: 1966061 - DNA, 25 bp, Homo sapien
tgaggcacacgttacagagtacggc

SEQ ID NO: 1966062 - DNA, 25 bp, Homo sapien
gatcagctatcagggacacaccaat

SEQ ID NO: 1966063 - DNA, 25 bp, Homo sapien
actgcctgagcgatggatgcacttg

SEQ ID NO: 1966064 - DNA, 25 bp, Homo sapien
tcaaagccgtctcaccgcactcaca

SEQ ID NO: 1966065 - DNA, 25 bp, Homo sapien
caccgcactcacaccatggtgactg

SEQ ID NO: 1966066 - DNA, 25 bp, Homo sapien
gactgcaggtaccaggagcatcaga

SEQ ID NO: 1966067 - DNA, 25 bp, Homo sapien
aggcaccacactgggcacaggacca

SEQ ID NO: 1966068 - DNA, 25 bp, Homo sapien
tcagaacttccaaggcaccacactg

SEQ ID NO: 1966069 - DNA, 25 bp, Homo sapien
ctgtgactttcagaacttccaaggc

SEQ ID NO: 1966070 - DNA, 25 bp, Homo sapien
caggaccagggccttaggactcagc

SEQ ID NO: 1966071 - DNA, 25 bp, Homo sapien
cccatcccagggtgtaggttcgcat

SEQ ID NO: 1966072 - DNA, 25 bp, Homo sapien
acagggtactgaggcccacggtcgc

SEQ ID NO: 1966073 - DNA, 25 bp, Homo sapien
gggccagaaactacgctacggtcca

SEQ ID NO: 1966074 - DNA, 25 bp, Homo sapien
gccagcgtcatggagtgggtgccct

SEQ ID NO: 1966075 - DNA, 25 bp, Homo sapien
tgcaggggtctttcctcacacactc

SEQ ID NO: 1966076 - DNA, 25 bp, Homo sapien
ggagagctgcccgaagcccgccgga

SEQ ID NO: 1966077 - DNA, 25 bp, Homo sapien
agagctgcccgaagcccgccggagg

SEQ ID NO: 1966078 - DNA, 25 bp, Homo sapien
cgccggaggccgtctgcaggggtct

SEQ ID NO: 1966079 - DNA, 25 bp, Homo sapien
ccacagctcttttcccggcattatg

SEQ ID NO: 1966080 - DNA, 25 bp, Homo sapien
tatgctaacaggtcagcttaagtag

SEQ ID NO: 1966081 - DNA, 25 bp, Homo sapien
tgttacatatgctaacaggtcagct

SEQ ID NO: 1966082 - DNA, 25 bp, Homo sapien
ggtcagcttaagtagcatttcttac

SEQ ID NO: 1966083 - DNA, 25 bp, Homo sapien
cacagacggtgaccatggaggacgc

SEQ ID NO: 1966084 - DNA, 25 bp, Homo sapien
caatgggtacacagacggtgaccat

SEQ ID NO: 1966085 - DNA, 25 bp, Homo sapien
cagcacaacccgcacaatgggtaca

SEQ ID NO: 1966086 - DNA, 25 bp, Homo sapien
cacaacccgcacaatgggtacacag

SEQ ID NO: 1966087 - DNA, 25 bp, Homo sapien
tttctctggacaccagcatgatggg

SEQ ID NO: 1966088 - DNA, 25 bp, Homo sapien
ttctctggacaccagcatgatgggg

SEQ ID NO: 1966089 - DNA, 25 bp, Homo sapien
ttttctctggacaccagcatgatgg

SEQ ID NO: 1966090 - DNA, 25 bp, Homo sapien
ctttttctctggacaccagcatgat

SEQ ID NO: 1966091 - DNA, 25 bp, Homo sapien
tatctccgggccatatccatcttct

SEQ ID NO: 1966092 - DNA, 25 bp, Homo sapien
ctgtccccacgagaggtgtgcatta

SEQ ID NO: 1966093 - DNA, 25 bp, Homo sapien
gcattatctccgggccatatccatc

SEQ ID NO: 1966094 - DNA, 25 bp, Homo sapien
tccccacgagaggtgtgcattatct

SEQ ID NO: 1966095 - DNA, 25 bp, Homo sapien
ggtcttcagtgcagccggaggggga

SEQ ID NO: 1966096 - DNA, 25 bp, Homo sapien
tgcaggtggaacctccgaggggtcc

SEQ ID NO: 1966097 - DNA, 25 bp, Homo sapien
gggtcctcgcgcatggatggcagcc

SEQ ID NO: 1966098 - DNA, 25 bp, Homo sapien
tcctcgcgcatggatggcagccatt

SEQ ID NO: 1966099 - DNA, 25 bp, Homo sapien
tacggctctaagaaaacggactctc

SEQ ID NO: 1966100 - DNA, 25 bp, Homo sapien
accttcattaggtgcacgtggcccc

SEQ ID NO: 1966101 - DNA, 25 bp, Homo sapien
caagtgccttcatcgcagggatcaa

SEQ ID NO: 1966102 - DNA, 25 bp, Homo sapien
ccaggttccctgttacgagttgaga

SEQ ID NO: 1966103 - DNA, 25 bp, Homo sapien
atgagccttaaaagctcacccttgg

SEQ ID NO: 1966104 - DNA, 25 bp, Homo sapien
tgagccttaaaagctcacccttggg

SEQ ID NO: 1966105 - DNA, 25 bp, Homo sapien
catgagccttaaaagctcacccttg

SEQ ID NO: 1966106 - DNA, 25 bp, Homo sapien
ccctgggtcaggacgcagaggtgca

SEQ ID NO: 1966107 - DNA, 25 bp, Homo sapien
gaaacagacggtgctgccttggatg

SEQ ID NO: 1966108 - DNA, 25 bp, Homo sapien
aaacatggaaacagacggtgctgcc

SEQ ID NO: 1966109 - DNA, 25 bp, Homo sapien
gggtcaggacgcagaggtgcagcag

SEQ ID NO: 1966110 - DNA, 25 bp, Homo sapien
tgtgtagacacccatactctcacca

SEQ ID NO: 1966111 - DNA, 25 bp, Homo sapien
tattttcaccgtggctttcccatgt

SEQ ID NO: 1966112 - DNA, 25 bp, Homo sapien
acagtcccctcctgcacagacctgt

SEQ ID NO: 1966113 - DNA, 25 bp, Homo sapien
ctctcaccactgtgtaacagctgcc

SEQ ID NO: 1966114 - DNA, 25 bp, Homo sapien
tagtttgaagagcatattcccagag

SEQ ID NO: 1966115 - DNA, 25 bp, Homo sapien
cagagtgaaaatgagaccttgggaa

SEQ ID NO: 1966116 - DNA, 25 bp, Homo sapien
ctatgggccaggagtgaagtcttga

SEQ ID NO: 1966117 - DNA, 25 bp, Homo sapien
gattgataacctgatagacttgctc

SEQ ID NO: 1966118 - DNA, 25 bp, Homo sapien
ccaaaaaatgagtcaactgcaacca

SEQ ID NO: 1966119 - DNA, 25 bp, Homo sapien
catgaggatcccaagtgtctaacag

SEQ ID NO: 1966120 - DNA, 25 bp, Homo sapien
tcatccaatccagagatgagttcat

SEQ ID NO: 1966121 - DNA, 25 bp, Homo sapien
aatgtgagtcttgtcactacccagc

SEQ ID NO: 1966122 - DNA, 25 bp, Homo sapien
agcttcgctgtccacatagacaggt

SEQ ID NO: 1966123 - DNA, 25 bp, Homo sapien
cgctgtccacatagacaggtctcat

SEQ ID NO: 1966124 - DNA, 25 bp, Homo sapien
gaggccaagaggcagtcgctgcagt

SEQ ID NO: 1966125 - DNA, 25 bp, Homo sapien
gccaagaggcagtcgctgcagtggc

SEQ ID NO: 1966126 - DNA, 25 bp, Homo sapien
atgcttggaaggtggtccatgactc

SEQ ID NO: 1966127 - DNA, 25 bp, Homo sapien
ctgatgcttggaaggtggtccatga

SEQ ID NO: 1966128 - DNA, 25 bp, Homo sapien
gcttggaaggtggtccatgactccc

SEQ ID NO: 1966129 - DNA, 25 bp, Homo sapien
aggtggtccatgactccctctgacc

SEQ ID NO: 1966130 - DNA, 25 bp, Homo sapien
aagagcaggaacaagtgaaggaccc

SEQ ID NO: 1966131 - DNA, 25 bp, Homo sapien
aagcaggtggcggagggagcacaag

SEQ ID NO: 1966132 - DNA, 25 bp, Homo sapien
gctggctaagactcagaaacgcagg

SEQ ID NO: 1966133 - DNA, 25 bp, Homo sapien
ctaagactcagaaacgcaggcaggg

SEQ ID NO: 1966134 - DNA, 25 bp, Homo sapien
ttcgggtccaggcatgtgttcccag

SEQ ID NO: 1966135 - DNA, 25 bp, Homo sapien
caggtatgtggcttcgggtccaggc

SEQ ID NO: 1966136 - DNA, 25 bp, Homo sapien
ccagcagtgccatgtggggctgctc

SEQ ID NO: 1966137 - DNA, 25 bp, Homo sapien
gacctccccattgctgcaagttctg

SEQ ID NO: 1966138 - DNA, 25 bp, Homo sapien
tagtcagactcgtttttctatgcat

SEQ ID NO: 1966139 - DNA, 25 bp, Homo sapien
gctgcaaacgccagctgctcttagt

SEQ ID NO: 1966140 - DNA, 25 bp, Homo sapien
agctgctcttagtcagactcgtttt

SEQ ID NO: 1966141 - DNA, 25 bp, Homo sapien
aactggggcagctgcaaacgccagc

SEQ ID NO: 1966142 - DNA, 25 bp, Homo sapien
tagctatcaccacatatccaattcc

SEQ ID NO: 1966143 - DNA, 25 bp, Homo sapien
tgtcataaacatcgatagctatcac

SEQ ID NO: 1966144 - DNA, 25 bp, Homo sapien
tcggtggacatctgctctaggacac

SEQ ID NO: 1966145 - DNA, 25 bp, Homo sapien
tgattcccaggcattgcaatgcctg

SEQ ID NO: 1966146 - DNA, 25 bp, Homo sapien
cttttccaagagcgccaatttatca

SEQ ID NO: 1966147 - DNA, 25 bp, Homo sapien
agactccaacttgacggtgcaccca

SEQ ID NO: 1966148 - DNA, 25 bp, Homo sapien
tcagactccaacttgacggtgcacc

SEQ ID NO: 1966149 - DNA, 25 bp, Homo sapien
gagcgccaatttatcaagttcagac

SEQ ID NO: 1966150 - DNA, 25 bp, Homo sapien
gactggacgggaggtgctacattcc

SEQ ID NO: 1966151 - DNA, 25 bp, Homo sapien
caggtgcgtcacacggcaaaagcaa

SEQ ID NO: 1966152 - DNA, 25 bp, Homo sapien
agcaagagcaagtgagagactggac

SEQ ID NO: 1966153 - DNA, 25 bp, Homo sapien
ggcagggacaggtatccaaactcta

SEQ ID NO: 1966154 - DNA, 25 bp, Homo sapien
agtgagggacagtaagtcaggtttt

SEQ ID NO: 1966155 - DNA, 25 bp, Homo sapien
gtgagggacagtaagtcaggttttc

SEQ ID NO: 1966156 - DNA, 25 bp, Homo sapien
atgttttatattgtggagatattac

SEQ ID NO: 1966157 - DNA, 25 bp, Homo sapien
gttttatattgtggagatattactt

SEQ ID NO: 1966158 - DNA, 25 bp, Homo sapien
agggagacgccagcaccgcggaaca

SEQ ID NO: 1966159 - DNA, 25 bp, Homo sapien
tgcagaggggttcggggcagcctcg

SEQ ID NO: 1966160 - DNA, 25 bp, Homo sapien
ctgcggggccgcctcgatcaagtgc

SEQ ID NO: 1966161 - DNA, 25 bp, Homo sapien
ttcggggcagcctcgccagggagag

SEQ ID NO: 1966162 - DNA, 25 bp, Homo sapien
ggcccgcactgcacgcgccgggagg

SEQ ID NO: 1966163 - DNA, 25 bp, Homo sapien
gctccgggcccgcactgcacgcgcc

SEQ ID NO: 1966164 - DNA, 25 bp, Homo sapien
ccgcactgcacgcgccgggaggtgg

SEQ ID NO: 1966165 - DNA, 25 bp, Homo sapien
gtgccacctgttggctccgggcccg

SEQ ID NO: 1966166 - DNA, 25 bp, Homo sapien
gtctccaggcagcacgtgcgctgct

SEQ ID NO: 1966167 - DNA, 25 bp, Homo sapien
gtgcaatctgatcttcgcttctgtc

SEQ ID NO: 1966168 - DNA, 25 bp, Homo sapien
caatctgatcttcgcttctgtctcc

SEQ ID NO: 1966169 - DNA, 25 bp, Homo sapien
caggcagcacgtgcgctgctcccca

SEQ ID NO: 1966170 - DNA, 25 bp, Homo sapien
aatctcatgtcctcaacatttgaaa

SEQ ID NO: 1966171 - DNA, 25 bp, Homo sapien
ctcatgtcctcaacatttgaaaacc

SEQ ID NO: 1966172 - DNA, 25 bp, Homo sapien
attcactattataggaatagcacag

SEQ ID NO: 1966173 - DNA, 25 bp, Homo sapien
actcattcactattataggaatagc

SEQ ID NO: 1966174 - DNA, 25 bp, Homo sapien
tctacattcatgagaattttaggtc

SEQ ID NO: 1966175 - DNA, 25 bp, Homo sapien
tttccatagaggttgagttgattga

SEQ ID NO: 1966176 - DNA, 25 bp, Homo sapien
cattacttacaatgtctttctccgg

SEQ ID NO: 1966177 - DNA, 25 bp, Homo sapien
tgtgtctgggtaatgctgacctcac

SEQ ID NO: 1966178 - DNA, 25 bp, Homo sapien
ggacgccagtgttcctgtggccggg

SEQ ID NO: 1966179 - DNA, 25 bp, Homo sapien
gtctcctctggtgatgagttgtgtt

SEQ ID NO: 1966180 - DNA, 25 bp, Homo sapien
cctccccgatcctgtctcctctggt

SEQ ID NO: 1966181 - DNA, 25 bp, Homo sapien
cctctggtgatgagttgtgttctct

SEQ ID NO: 1966182 - DNA, 25 bp, Homo sapien
cgtctggtgactgggccacggcgct

SEQ ID NO: 1966183 - DNA, 25 bp, Homo sapien
gctgggactcgagcgctcctagttc

SEQ ID NO: 1966184 - DNA, 25 bp, Homo sapien
tctgatggggaaaccagacagacgt

SEQ ID NO: 1966185 - DNA, 25 bp, Homo sapien
tcgagcgctcctagttcacaagcca

SEQ ID NO: 1966186 - DNA, 25 bp, Homo sapien
ggtgtcgtccgctggagatatgatc

SEQ ID NO: 1966187 - DNA, 25 bp, Homo sapien
attcttttggtgtcgtccgctggag

SEQ ID NO: 1966188 - DNA, 25 bp, Homo sapien
ccaggggacgaggtcacagacattc

SEQ ID NO: 1966189 - DNA, 25 bp, Homo sapien
tcgtccgctggagatatgatcacat

SEQ ID NO: 1966190 - DNA, 25 bp, Homo sapien
tctctggatatcctcgcactctgga

SEQ ID NO: 1966191 - DNA, 25 bp, Homo sapien
tggatatcctcgcactctggatccc

SEQ ID NO: 1966192 - DNA, 25 bp, Homo sapien
ctctctggatatcctcgcactctgg

SEQ ID NO: 1966193 - DNA, 25 bp, Homo sapien
tctggatatcctcgcactctggatc

SEQ ID NO: 1966194 - DNA, 25 bp, Homo sapien
caccaggggctgatcatggaccaaa

SEQ ID NO: 1966195 - DNA, 25 bp, Homo sapien
cattgaccagtgtttttactgtggt

SEQ ID NO: 1966196 - DNA, 25 bp, Homo sapien
tacattgaccagtgtttttactgtg

SEQ ID NO: 1966197 - DNA, 25 bp, Homo sapien
catacattgaccagtgtttttactg

SEQ ID NO: 1966198 - DNA, 25 bp, Homo sapien
tgaccagtgtttttactgtggtttc

SEQ ID NO: 1966199 - DNA, 25 bp, Homo sapien
tgaaagcattcccttgtatggacag

SEQ ID NO: 1966200 - DNA, 25 bp, Homo sapien
caattcttccggacatatatgccta

SEQ ID NO: 1966201 - DNA, 25 bp, Homo sapien
gacagaccacgttgggcttacccat

SEQ ID NO: 1966202 - DNA, 25 bp, Homo sapien
tgcagcgtgtatgaaaactccatcc

SEQ ID NO: 1966203 - DNA, 25 bp, Homo sapien
gctcaactccaggtgaagtgaatta

SEQ ID NO: 1966204 - DNA, 25 bp, Homo sapien
ctgttctcagaaggagtgctggctt

SEQ ID NO: 1966205 - DNA, 25 bp, Homo sapien
cgtccatccaaatcaaagtcctgtt

SEQ ID NO: 1966206 - DNA, 25 bp, Homo sapien
gaggaaccccgcctgaaactgttgc

SEQ ID NO: 1966207 - DNA, 25 bp, Homo sapien
cacagcatcaagatccactttgcag

SEQ ID NO: 1966208 - DNA, 25 bp, Homo sapien
acagcatcaagatccactttgcagg

SEQ ID NO: 1966209 - DNA, 25 bp, Homo sapien
gcatcaagatccactttgcaggact

SEQ ID NO: 1966210 - DNA, 25 bp, Homo sapien
cagcatcaagatccactttgcagga

SEQ ID NO: 1966211 - DNA, 25 bp, Homo sapien
agttgccaagtgttccacttcccag

SEQ ID NO: 1966212 - DNA, 25 bp, Homo sapien
tcagaaaacacagcgaggtgaccca

SEQ ID NO: 1966213 - DNA, 25 bp, Homo sapien
gcaggcccttacaggctcccctgta

SEQ ID NO: 1966214 - DNA, 25 bp, Homo sapien
ctgtatcggagcaccggctgcaggc

SEQ ID NO: 1966215 - DNA, 25 bp, Homo sapien
gtcacactttcgctgagcccagcat

SEQ ID NO: 1966216 - DNA, 25 bp, Homo sapien
tgaacacgccctgtgatgtaagcag

SEQ ID NO: 1966217 - DNA, 25 bp, Homo sapien
cagggccgctataggcagctgagta

SEQ ID NO: 1966218 - DNA, 25 bp, Homo sapien
tgagtaggttactcgcagtgcccgc

SEQ ID NO: 1966219 - DNA, 25 bp, Homo sapien
atgtaactgccagacgcagtgaaca

SEQ ID NO: 1966220 - DNA, 25 bp, Homo sapien
agtgaacaacaaggcggtggcttaa

SEQ ID NO: 1966221 - DNA, 25 bp, Homo sapien
gtaactgccagacgcagtgaacaac

SEQ ID NO: 1966222 - DNA, 25 bp, Homo sapien
ctgccagacgcagtgaacaacaagg

SEQ ID NO: 1966223 - DNA, 25 bp, Homo sapien
tccatggttgctaataagaggcagc

SEQ ID NO: 1966224 - DNA, 25 bp, Homo sapien
tttgtcccttatgttctgagcttcc

SEQ ID NO: 1966225 - DNA, 25 bp, Homo sapien
gatgttggtccactttcttttggcc

SEQ ID NO: 1966226 - DNA, 25 bp, Homo sapien
tgtcctaagccgtattttcgtcctc

SEQ ID NO: 1966227 - DNA, 25 bp, Homo sapien
tgccagtataattacaaagctaaca

SEQ ID NO: 1966228 - DNA, 25 bp, Homo sapien
catctgatagagtcagcatccaggg

SEQ ID NO: 1966229 - DNA, 25 bp, Homo sapien
ttctgccagtataattacaaagcta

SEQ ID NO: 1966230 - DNA, 25 bp, Homo sapien
tacaaagctaacatctgatagagtc

SEQ ID NO: 1966231 - DNA, 25 bp, Homo sapien
gcaaaagggataaccataatgatta

SEQ ID NO: 1966232 - DNA, 25 bp, Homo sapien
ggcaagctttatcgggtaacaggga

SEQ ID NO: 1966233 - DNA, 25 bp, Homo sapien
tgtttctacacaagtaacgtgggtc

SEQ ID NO: 1966234 - DNA, 25 bp, Homo sapien
taacgtgggtcaattgcaaaaggga

SEQ ID NO: 1966235 - DNA, 25 bp, Homo sapien
gcagacagcgtgcttccgggtgctc

SEQ ID NO: 1966236 - DNA, 25 bp, Homo sapien
cagtgatatgactggcagacagcgt

SEQ ID NO: 1966237 - DNA, 25 bp, Homo sapien
ggcagacagcgtgcttccgggtgct

SEQ ID NO: 1966238 - DNA, 25 bp, Homo sapien
aacacaggatctgtgtctggttggc

SEQ ID NO: 1966239 - DNA, 25 bp, Homo sapien
gaaggtgccattttcttttccgtgc

SEQ ID NO: 1966240 - DNA, 25 bp, Homo sapien
gtgccattttcttttccgtgcttgg

SEQ ID NO: 1966241 - DNA, 25 bp, Homo sapien
tctggttggcgaagaagaaggtgcc

SEQ ID NO: 1966242 - DNA, 25 bp, Homo sapien
tgcctgtccatagggatcttataat

SEQ ID NO: 1966243 - DNA, 25 bp, Homo sapien
gtagaaaattagttgcctgtccata

SEQ ID NO: 1966244 - DNA, 25 bp, Homo sapien
aaaagtacaattctgagagctttaa

SEQ ID NO: 1966245 - DNA, 25 bp, Homo sapien
aattagttgcctgtccatagggatc

SEQ ID NO: 1966246 - DNA, 25 bp, Homo sapien
cgctattggggcgaatctgtcaccc

SEQ ID NO: 1966247 - DNA, 25 bp, Homo sapien
tgcagcaggctccccgttcatggga

SEQ ID NO: 1966248 - DNA, 25 bp, Homo sapien
gcgaatctgtcacccgtggaaaggt

SEQ ID NO: 1966249 - DNA, 25 bp, Homo sapien
tattggggcgaatctgtcacccgtg

SEQ ID NO: 1966250 - DNA, 25 bp, Homo sapien
tagccctggcaaagtcggaggaacc

SEQ ID NO: 1966251 - DNA, 25 bp, Homo sapien
tcctgtccagagattaataaagttt

SEQ ID NO: 1966252 - DNA, 25 bp, Homo sapien
aattcaggacggtcccataggcatc

SEQ ID NO: 1966253 - DNA, 25 bp, Homo sapien
gcagggcccgaccatcgtaggacag

SEQ ID NO: 1966254 - DNA, 25 bp, Homo sapien
tttgtcccaaggcagggaaccgcca

SEQ ID NO: 1966255 - DNA, 25 bp, Homo sapien
tcggaagtccgtgtccgtccgcttc

SEQ ID NO: 1966256 - DNA, 25 bp, Homo sapien
cgtccgcttcgggaagcagagagag

SEQ ID NO: 1966257 - DNA, 25 bp, Homo sapien
ccagagcccgtttgtcccaaggcag

SEQ ID NO: 1966258 - DNA, 25 bp, Homo sapien
cacagacggcgtttctagagcctgc

SEQ ID NO: 1966259 - DNA, 25 bp, Homo sapien
tcatatcaacagagggagctcctgc

SEQ ID NO: 1966260 - DNA, 25 bp, Homo sapien
tcccacatagattgcagacagccct

SEQ ID NO: 1966261 - DNA, 25 bp, Homo sapien
caacctcgtgcaggatgactgtggc

SEQ ID NO: 1966262 - DNA, 25 bp, Homo sapien
gcctcttccttttgtgcgcagattt

SEQ ID NO: 1966263 - DNA, 25 bp, Homo sapien
aaatagcaccatttccctgcgcaaa

SEQ ID NO: 1966264 - DNA, 25 bp, Homo sapien
tggcatggagcagttttcacggtca

SEQ ID NO: 1966265 - DNA, 25 bp, Homo sapien
ccttttgtgcgcagatttaaaaata

SEQ ID NO: 1966266 - DNA, 25 bp, Homo sapien
tcctcagtctcttcgggagaaacag

SEQ ID NO: 1966267 - DNA, 25 bp, Homo sapien
gagaaacaggatgggtatgcgggag

SEQ ID NO: 1966268 - DNA, 25 bp, Homo sapien
cggaaggccttttgcaggacctttg

SEQ ID NO: 1966269 - DNA, 25 bp, Homo sapien
agtctcttcgggagaaacaggatgg

SEQ ID NO: 1966270 - DNA, 25 bp, Homo sapien
cagccaaggcggctgcagacagcaa

SEQ ID NO: 1966271 - DNA, 25 bp, Homo sapien
ctgcccagcctggcgtgaccatgga

SEQ ID NO: 1966272 - DNA, 25 bp, Homo sapien
ttagacacagacgagggtcctccgg

SEQ ID NO: 1966273 - DNA, 25 bp, Homo sapien
cagacagcaaagtctggcacgctgc

SEQ ID NO: 1966274 - DNA, 25 bp, Homo sapien
caggccggacgcagagcgcagctct

SEQ ID NO: 1966275 - DNA, 25 bp, Homo sapien
gggccacattatcggtcagtctgca

SEQ ID NO: 1966276 - DNA, 25 bp, Homo sapien
gctcaggccggacgcagagcgcagc

SEQ ID NO: 1966277 - DNA, 25 bp, Homo sapien
cacagtggggccacattatcggtca

SEQ ID NO: 1966278 - DNA, 25 bp, Homo sapien
tctccaaagccagaagcggtgagca

SEQ ID NO: 1966279 - DNA, 25 bp, Homo sapien
gcgaggacgggcagctccctcggga

SEQ ID NO: 1966280 - DNA, 25 bp, Homo sapien
agcgccgtcctcaccgttcctccgg

SEQ ID NO: 1966281 - DNA, 25 bp, Homo sapien
cctccggggactggcaaggagctgc

SEQ ID NO: 1966282 - DNA, 25 bp, Homo sapien
acgctgggtgttgggacaatccagc

SEQ ID NO: 1966283 - DNA, 25 bp, Homo sapien
gtccaggcaccacccatgctgggag

SEQ ID NO: 1966284 - DNA, 25 bp, Homo sapien
tgggacaatccagcggggctcctca

SEQ ID NO: 1966285 - DNA, 25 bp, Homo sapien
tcgcggtagcagaaagcatggccat

SEQ ID NO: 1966286 - DNA, 25 bp, Homo sapien
gtttacaagagacgcgcagccgctc

SEQ ID NO: 1966287 - DNA, 25 bp, Homo sapien
attatttcccgatgtctctccgtgg

SEQ ID NO: 1966288 - DNA, 25 bp, Homo sapien
tatttcccgatgtctctccgtggct

SEQ ID NO: 1966289 - DNA, 25 bp, Homo sapien
ctgtttacaagagacgcgcagccgc

SEQ ID NO: 1966290 - DNA, 25 bp, Homo sapien
tcgtgagtgataaccatggacaggc

SEQ ID NO: 1966291 - DNA, 25 bp, Homo sapien
ggtatgttcacgcttcctcctgggt

SEQ ID NO: 1966292 - DNA, 25 bp, Homo sapien
tctcctcccggagtgttgccgtgaa

SEQ ID NO: 1966293 - DNA, 25 bp, Homo sapien
caggtcccagacttcacggagaagg

SEQ ID NO: 1966294 - DNA, 25 bp, Homo sapien
ttctttcctgcgtttgctgcacgcg

SEQ ID NO: 1966295 - DNA, 25 bp, Homo sapien
aagatgccggagacgtacacaacca

SEQ ID NO: 1966296 - DNA, 25 bp, Homo sapien
cagaccctgggcgtgtagaagatgc

SEQ ID NO: 1966297 - DNA, 25 bp, Homo sapien
gtacacaaccagcaagcgcgcaggg

SEQ ID NO: 1966298 - DNA, 25 bp, Homo sapien
cccttcaactctccttgggaccctg

SEQ ID NO: 1966299 - DNA, 25 bp, Homo sapien
gcagcaaacttgtcttggatgtcag

SEQ ID NO: 1966300 - DNA, 25 bp, Homo sapien
cttcaactctccttgggaccctgca

SEQ ID NO: 1966301 - DNA, 25 bp, Homo sapien
cctgcagcaaacttgtcttggatgt

SEQ ID NO: 1966302 - DNA, 25 bp, Homo sapien
gatagcagccggctgagagaaccca

SEQ ID NO: 1966303 - DNA, 25 bp, Homo sapien
cggctgagagaacccatgacctccg

SEQ ID NO: 1966304 - DNA, 25 bp, Homo sapien
tagctgacggatagcagccggctga

SEQ ID NO: 1966305 - DNA, 25 bp, Homo sapien
gatctgtagctgacggatagcagcc

SEQ ID NO: 1966306 - DNA, 25 bp, Homo sapien
gagaagcgcggctcttcttgctcca

SEQ ID NO: 1966307 - DNA, 25 bp, Homo sapien
tctttggtgaacgtctccagggaga

SEQ ID NO: 1966308 - DNA, 25 bp, Homo sapien
tctatacaataaaccgagctcccgg

SEQ ID NO: 1966309 - DNA, 25 bp, Homo sapien
tctggagaggcgtctctttggtgaa

SEQ ID NO: 1966310 - DNA, 25 bp, Homo sapien
tttcatgatgtgagggtgttgatct

SEQ ID NO: 1966311 - DNA, 25 bp, Homo sapien
tcatgatgtgagggtgttgatcttg

SEQ ID NO: 1966312 - DNA, 25 bp, Homo sapien
ttttcatgatgtgagggtgttgatc

SEQ ID NO: 1966313 - DNA, 25 bp, Homo sapien
ttcatgatgtgagggtgttgatctt

SEQ ID NO: 1966314 - DNA, 25 bp, Homo sapien
cgtgtgcatattcatcactgcctgc

SEQ ID NO: 1966315 - DNA, 25 bp, Homo sapien
gattgccacaccacacgtcagagtt

SEQ ID NO: 1966316 - DNA, 25 bp, Homo sapien
ttgtacatgatcaattctgctggga

SEQ ID NO: 1966317 - DNA, 25 bp, Homo sapien
ctgcccgtgcaaccgtgtgcatatt

SEQ ID NO: 1966318 - DNA, 25 bp, Homo sapien
ttcccgtgcttgaccctgatctcag

SEQ ID NO: 1966319 - DNA, 25 bp, Homo sapien
gttgaccccggtcctgcttatcaaa

SEQ ID NO: 1966320 - DNA, 25 bp, Homo sapien
caaaggggaaggcacgctcccctgg

SEQ ID NO: 1966321 - DNA, 25 bp, Homo sapien
aatctgcttcccgtgcttgaccctg

SEQ ID NO: 1966322 - DNA, 25 bp, Homo sapien
gagtgcccaccctgacaagaacaca

SEQ ID NO: 1966323 - DNA, 25 bp, Homo sapien
agtgcccaccctgacaagaacacac

SEQ ID NO: 1966324 - DNA, 25 bp, Homo sapien
tcactccaaaggtgctctaagatct

SEQ ID NO: 1966325 - DNA, 25 bp, Homo sapien
cctgatgacacctcttcatcagaga

SEQ ID NO: 1966326 - DNA, 25 bp, Homo sapien
tctaagatctcctgatgacacctct

SEQ ID NO: 1966327 - DNA, 25 bp, Homo sapien
caaaggtgctctaagatctcctgat

SEQ ID NO: 1966328 - DNA, 25 bp, Homo sapien
tgaaggtgagctccttacacagcag

SEQ ID NO: 1966329 - DNA, 25 bp, Homo sapien
ggtgagctccttacacagcaggtgc

SEQ ID NO: 1966330 - DNA, 25 bp, Homo sapien
aaggtgagctccttacacagcaggt

SEQ ID NO: 1966331 - DNA, 25 bp, Homo sapien
gatgaaggtgagctccttacacagc

SEQ ID NO: 1966332 - DNA, 25 bp, Homo sapien
gcttctgcggtgagttgagggtttg

SEQ ID NO: 1966333 - DNA, 25 bp, Homo sapien
ctgggtcccgctagactcaggggct

SEQ ID NO: 1966334 - DNA, 25 bp, Homo sapien
aggtgaagacacttgagctggggca

SEQ ID NO: 1966335 - DNA, 25 bp, Homo sapien
gcggcacgaacacatctgggtcccg

SEQ ID NO: 1966336 - DNA, 25 bp, Homo sapien
ttttgctgacacagctgccagtccc

SEQ ID NO: 1966337 - DNA, 25 bp, Homo sapien
cgttgaagccccttaagctgcttct

SEQ ID NO: 1966338 - DNA, 25 bp, Homo sapien
ggttgaagttctcagtgctagtttt

SEQ ID NO: 1966339 - DNA, 25 bp, Homo sapien
gcgtccagtttcctacgttgaagcc

SEQ ID NO: 1966340 - DNA, 25 bp, Homo sapien
gagacagagacagttaattccttga

SEQ ID NO: 1966341 - DNA, 25 bp, Homo sapien
gattggacacagctatgagacagag

SEQ ID NO: 1966342 - DNA, 25 bp, Homo sapien
aacactggcgctgattcctgcgggc

SEQ ID NO: 1966343 - DNA, 25 bp, Homo sapien
tgtgatgagggcagataacagacat

SEQ ID NO: 1966344 - DNA, 25 bp, Homo sapien
ccccaggaaagagccgcatccatgt

SEQ ID NO: 1966345 - DNA, 25 bp, Homo sapien
catgtgtagcgacacatctggccca

SEQ ID NO: 1966346 - DNA, 25 bp, Homo sapien
cagacgccccaggaaagagccgcat

SEQ ID NO: 1966347 - DNA, 25 bp, Homo sapien
gagccgcatccatgtgtagcgacac

SEQ ID NO: 1966348 - DNA, 25 bp, Homo sapien
tcatcaaaaggggagctgcacggag

SEQ ID NO: 1966349 - DNA, 25 bp, Homo sapien
cataatgggcagactgcttggttta

SEQ ID NO: 1966350 - DNA, 25 bp, Homo sapien
taccagccatgcaaagcaagacctc

SEQ ID NO: 1966351 - DNA, 25 bp, Homo sapien
gctcaaaatctgctgggagtaaccc

SEQ ID NO: 1966352 - DNA, 25 bp, Homo sapien
tggtattcacatgaggccccaagct

SEQ ID NO: 1966353 - DNA, 25 bp, Homo sapien
tgttaattaggctgagcgtgacgca

SEQ ID NO: 1966354 - DNA, 25 bp, Homo sapien
catgagaacctcaaccggaatcggc

SEQ ID NO: 1966355 - DNA, 25 bp, Homo sapien
tcctacagatagtgaatgcatcccc

SEQ ID NO: 1966356 - DNA, 25 bp, Homo sapien
tagaacgcaggtggaaaactcggtc

SEQ ID NO: 1966357 - DNA, 25 bp, Homo sapien
gacaccacgtgatgctttcacggag

SEQ ID NO: 1966358 - DNA, 25 bp, Homo sapien
tccatttgagaggtgttgcccgtct

SEQ ID NO: 1966359 - DNA, 25 bp, Homo sapien
tctggtgcaacgtcaggtgtttcca

SEQ ID NO: 1966360 - DNA, 25 bp, Homo sapien
gacagtaaaggccttactggtggtg

SEQ ID NO: 1966361 - DNA, 25 bp, Homo sapien
agtaaaggccttactggtggtgctc

SEQ ID NO: 1966362 - DNA, 25 bp, Homo sapien
tggacgcggctctcgcactcctcca

SEQ ID NO: 1966363 - DNA, 25 bp, Homo sapien
gtcggtggggaaacagcaagggata

SEQ ID NO: 1966364 - DNA, 25 bp, Homo sapien
catcagattgtcgtgtccgagcccc

SEQ ID NO: 1966365 - DNA, 25 bp, Homo sapien
ttacagggagaccatcagattgtcg

SEQ ID NO: 1966366 - DNA, 25 bp, Homo sapien
gagaccatcagattgtcgtgtccga

SEQ ID NO: 1966367 - DNA, 25 bp, Homo sapien
cagggagaccatcagattgtcgtgt

SEQ ID NO: 1966368 - DNA, 25 bp, Homo sapien
ggatcccatggccgctgccttgatg

SEQ ID NO: 1966369 - DNA, 25 bp, Homo sapien
aggggatcccatggccgctgccttg

SEQ ID NO: 1966370 - DNA, 25 bp, Homo sapien
gatcccatggccgctgccttgatgt

SEQ ID NO: 1966371 - DNA, 25 bp, Homo sapien
gggatcccatggccgctgccttgat

SEQ ID NO: 1966372 - DNA, 25 bp, Homo sapien
taccagtggagaccgagtgtgctaa

SEQ ID NO: 1966373 - DNA, 25 bp, Homo sapien
aatgcacattgataccttggaccac

SEQ ID NO: 1966374 - DNA, 25 bp, Homo sapien
ggaagacacactgcgaaaatattgc

SEQ ID NO: 1966375 - DNA, 25 bp, Homo sapien
tagtggcgaccgcaggttcacaagt

SEQ ID NO: 1966376 - DNA, 25 bp, Homo sapien
agaatagcacccaagcagagaaggg

SEQ ID NO: 1966377 - DNA, 25 bp, Homo sapien
tggatggttttgtgggaccctcgac

SEQ ID NO: 1966378 - DNA, 25 bp, Homo sapien
cagagaagggcgtgaaacctttcaa

SEQ ID NO: 1966379 - DNA, 25 bp, Homo sapien
gaccctcgacggctttacgtaagca

SEQ ID NO: 1966380 - DNA, 25 bp, Homo sapien
ccttgagctacacatgtgagactga

SEQ ID NO: 1966381 - DNA, 25 bp, Homo sapien
tcttcaacaagtaaggacaggcggc

SEQ ID NO: 1966382 - DNA, 25 bp, Homo sapien
catcttctcttgtacacgacagtga

SEQ ID NO: 1966383 - DNA, 25 bp, Homo sapien
gaaacacctgatcattggcggtggg

SEQ ID NO: 1966384 - DNA, 25 bp, Homo sapien
aatgcaagccctgggtgcaaacacc

SEQ ID NO: 1966385 - DNA, 25 bp, Homo sapien
cagggcccgtttggtctctgaccac

SEQ ID NO: 1966386 - DNA, 25 bp, Homo sapien
aaacaccgccacgtcgtgtgtggct

SEQ ID NO: 1966387 - DNA, 25 bp, Homo sapien
gggaaactgatccagaccaggctgg

SEQ ID NO: 1966388 - DNA, 25 bp, Homo sapien
tcaaatcctggataatacccagaag

SEQ ID NO: 1966389 - DNA, 25 bp, Homo sapien
gcctcaaatcctggataatacccag

SEQ ID NO: 1966390 - DNA, 25 bp, Homo sapien
caaatcctggataatacccagaagg

SEQ ID NO: 1966391 - DNA, 25 bp, Homo sapien
aatcctggataatacccagaaggtg

SEQ ID NO: 1966392 - DNA, 25 bp, Homo sapien
tccagactatggctgctgttcgggg

SEQ ID NO: 1966393 - DNA, 25 bp, Homo sapien
ctgttagagcaacacatctagaaag

SEQ ID NO: 1966394 - DNA, 25 bp, Homo sapien
ctgttcggggcttgtgggtgaagat

SEQ ID NO: 1966395 - DNA, 25 bp, Homo sapien
tgttagagcaacacatctagaaagg

SEQ ID NO: 1966396 - DNA, 25 bp, Homo sapien
tgcttctctccagctgatccctctg

SEQ ID NO: 1966397 - DNA, 25 bp, Homo sapien
tggaaagatttctctcctgagcccc

SEQ ID NO: 1966398 - DNA, 25 bp, Homo sapien
ctgcttctctccagctgatccctct

SEQ ID NO: 1966399 - DNA, 25 bp, Homo sapien
tgcttctctccagctgatctctctg

SEQ ID NO: 1966400 - DNA, 25 bp, Homo sapien
gagcaaagatagccaggaccagctg

SEQ ID NO: 1966401 - DNA, 25 bp, Homo sapien
agagcaaagatagccaggaccagct

SEQ ID NO: 1966402 - DNA, 25 bp, Homo sapien
aagagcaaagatagccaggaccagc

SEQ ID NO: 1966403 - DNA, 25 bp, Homo sapien
tctcctcatctcaaactgcgaggag

SEQ ID NO: 1966404 - DNA, 25 bp, Homo sapien
gaggagtcggaaggcggactggcaa

SEQ ID NO: 1966405 - DNA, 25 bp, Homo sapien
gaggcgcacacaaccgccggaagtg

SEQ ID NO: 1966406 - DNA, 25 bp, Homo sapien
ctcatctcaaactgcgaggagtcgg

SEQ ID NO: 1966407 - DNA, 25 bp, Homo sapien
gggcagccagtctcagcgcccctgc

SEQ ID NO: 1966408 - DNA, 25 bp, Homo sapien
gcagccagtctcagcgcccctgcca

SEQ ID NO: 1966409 - DNA, 25 bp, Homo sapien
ctcgggcagccagtctcagcgcccc

SEQ ID NO: 1966410 - DNA, 25 bp, Homo sapien
cagtctcagcgcccctgccacccgc

SEQ ID NO: 1966411 - DNA, 25 bp, Homo sapien
gcgacgctgtgcagaaaaggaacct

SEQ ID NO: 1966412 - DNA, 25 bp, Homo sapien
tcgaggaacaggaaactcggcctcc

SEQ ID NO: 1966413 - DNA, 25 bp, Homo sapien
cacaggtggtctctgccgaggtgaa

SEQ ID NO: 1966414 - DNA, 25 bp, Homo sapien
tgcacatccaagctcgcggtggaga

SEQ ID NO: 1966415 - DNA, 25 bp, Homo sapien
taaagccattttgaacatcagcagc

SEQ ID NO: 1966416 - DNA, 25 bp, Homo sapien
gttctcagaatcattcgtgcccaca

SEQ ID NO: 1966417 - DNA, 25 bp, Homo sapien
tgatgtgggttgaggcctcctgtgc

SEQ ID NO: 1966418 - DNA, 25 bp, Homo sapien
gagggccggcgtagggccagagagt

SEQ ID NO: 1966419 - DNA, 25 bp, Homo sapien
tcctttccggggatgaggtggccgc

SEQ ID NO: 1966420 - DNA, 25 bp, Homo sapien
ttccggggatgaggtggccgccatc

SEQ ID NO: 1966421 - DNA, 25 bp, Homo sapien
ctttccggggatgaggtggccgcca

SEQ ID NO: 1966422 - DNA, 25 bp, Homo sapien
ccggggatgaggtggccgccatcat

SEQ ID NO: 1966423 - DNA, 25 bp, Homo sapien
gaccgcagcatccaagtcggcagtg

SEQ ID NO: 1966424 - DNA, 25 bp, Homo sapien
aagtcggcagtgctgttgtcctgaa

SEQ ID NO: 1966425 - DNA, 25 bp, Homo sapien
cccatggggtaaggaagaccgcagc

SEQ ID NO: 1966426 - DNA, 25 bp, Homo sapien
taaggaagaccgcagcatccaagtc

SEQ ID NO: 1966427 - DNA, 25 bp, Homo sapien
ctgtctatgatgctcaagtgcgcga

SEQ ID NO: 1966428 - DNA, 25 bp, Homo sapien
gatgggtctttgtcgttcaaagccc

SEQ ID NO: 1966429 - DNA, 25 bp, Homo sapien
tctctctctcgcgttgctcaggaag

SEQ ID NO: 1966430 - DNA, 25 bp, Homo sapien
ccagccgtgcattaggaacttcctt

SEQ ID NO: 1966431 - DNA, 25 bp, Homo sapien
gagatgatcccattcggctgctatg

SEQ ID NO: 1966432 - DNA, 25 bp, Homo sapien
ccttccaacacatcccagacccttg

SEQ ID NO: 1966433 - DNA, 25 bp, Homo sapien
gatcccattcggctgctatgaatcc

SEQ ID NO: 1966434 - DNA, 25 bp, Homo sapien
tccaacacatcccagacccttggga

SEQ ID NO: 1966435 - DNA, 25 bp, Homo sapien
aaatcgacttttgtagggcacacag

SEQ ID NO: 1966436 - DNA, 25 bp, Homo sapien
tttgtagcgcttgaactgtgatacc

SEQ ID NO: 1966437 - DNA, 25 bp, Homo sapien
tggatatcaggcaaaacttgaggcc

SEQ ID NO: 1966438 - DNA, 25 bp, Homo sapien
ggcaggaaccttggccaaatcgact

SEQ ID NO: 1966439 - DNA, 25 bp, Homo sapien
tcagcaggtcgtcctttcaaagacg

SEQ ID NO: 1966440 - DNA, 25 bp, Homo sapien
cagaaggctgctgaatgccgatggc

SEQ ID NO: 1966441 - DNA, 25 bp, Homo sapien
aggtcagaaggctgctgaatgccga

SEQ ID NO: 1966442 - DNA, 25 bp, Homo sapien
tttcaaagacgtcgggcaggtcaga

SEQ ID NO: 1966443 - DNA, 25 bp, Homo sapien
gccctgagccatgtgcttggtcctg

SEQ ID NO: 1966444 - DNA, 25 bp, Homo sapien
tgtggaaagcatctgggtcccgagt

SEQ ID NO: 1966445 - DNA, 25 bp, Homo sapien
tgcttggtcctgtggaaagcatctg

SEQ ID NO: 1966446 - DNA, 25 bp, Homo sapien
tcctgtggaaagcatctgggtcccg

SEQ ID NO: 1966447 - DNA, 25 bp, Homo sapien
ctgggtagccgaggcatccgaaacc

SEQ ID NO: 1966448 - DNA, 25 bp, Homo sapien
ttgggtttcatccacgtccgggagc

SEQ ID NO: 1966449 - DNA, 25 bp, Homo sapien
tgcgagtgagagcagactaaagcct

SEQ ID NO: 1966450 - DNA, 25 bp, Homo sapien
tcatgcctgtagctgcctgcgggca

SEQ ID NO: 1966451 - DNA, 25 bp, Homo sapien
gctgctgtcttcttctgcgagtgag

SEQ ID NO: 1966452 - DNA, 25 bp, Homo sapien
atgtgatgcagacgcccaagttctg

SEQ ID NO: 1966453 - DNA, 25 bp, Homo sapien
aaatgtgatgcagacgcccaagttc

SEQ ID NO: 1966454 - DNA, 25 bp, Homo sapien
taaaaatgtgatgcagacgcccaag

SEQ ID NO: 1966455 - DNA, 25 bp, Homo sapien
ggtaaaaatgtgatgcagacgccca

SEQ ID NO: 1966456 - DNA, 25 bp, Homo sapien
cttccaccttcttgtaatctttcat

SEQ ID NO: 1966457 - DNA, 25 bp, Homo sapien
aaagcccaagactgctcccttctga

SEQ ID NO: 1966458 - DNA, 25 bp, Homo sapien
tgagtgtgaaggcaggattaaattt

SEQ ID NO: 1966459 - DNA, 25 bp, Homo sapien
gattaaatttaatggcctcacggag

SEQ ID NO: 1966460 - DNA, 25 bp, Homo sapien
aatggcctcacggagtgtcaaagcc

SEQ ID NO: 1966461 - DNA, 25 bp, Homo sapien
gcaaagatggacaccttcatgtaca

SEQ ID NO: 1966462 - DNA, 25 bp, Homo sapien
tgaagacttcataaggcatcaagtc

SEQ ID NO: 1966463 - DNA, 25 bp, Homo sapien
ttatttccatctaggcaaagatgga

SEQ ID NO: 1966464 - DNA, 25 bp, Homo sapien
ccatctaggcaaagatggacacctt

SEQ ID NO: 1966465 - DNA, 25 bp, Homo sapien
cagcaaacaagcctgccaagctagt

SEQ ID NO: 1966466 - DNA, 25 bp, Homo sapien
cctgccacagcaaacaagcctgcca

SEQ ID NO: 1966467 - DNA, 25 bp, Homo sapien
cacagcaaacaagcctgccaagcta

SEQ ID NO: 1966468 - DNA, 25 bp, Homo sapien
gcaaacaagcctgccaagctagtca

SEQ ID NO: 1966469 - DNA, 25 bp, Homo sapien
tggcgagttcgaaagtaatggcatg

SEQ ID NO: 1966470 - DNA, 25 bp, Homo sapien
caataatccatgacacgcctatgaa

SEQ ID NO: 1966471 - DNA, 25 bp, Homo sapien
tattgtggacgctccgttggaaccc

SEQ ID NO: 1966472 - DNA, 25 bp, Homo sapien
gattgttcatagagcaagttgcctg

SEQ ID NO: 1966473 - DNA, 25 bp, Homo sapien
gtctgcctttactttcaacataagg

SEQ ID NO: 1966474 - DNA, 25 bp, Homo sapien
gagcaacttcatgctcgacagcctg

SEQ ID NO: 1966475 - DNA, 25 bp, Homo sapien
tgcctttactttcaacataaggagt

SEQ ID NO: 1966476 - DNA, 25 bp, Homo sapien
agctgtgagaggcaattgagcaact

SEQ ID NO: 1966477 - DNA, 25 bp, Homo sapien
tggaggaagacgtgcatcttcgtct

SEQ ID NO: 1966478 - DNA, 25 bp, Homo sapien
atcttcgtctgaagggccctgccca

SEQ ID NO: 1966479 - DNA, 25 bp, Homo sapien
cgtgacccattgatacgcagatgga

SEQ ID NO: 1966480 - DNA, 25 bp, Homo sapien
cttttgcccaatgccgtgacccatt

SEQ ID NO: 1966481 - DNA, 25 bp, Homo sapien
tattgtcaatatacaaccagaagct

SEQ ID NO: 1966482 - DNA, 25 bp, Homo sapien
tagcttgctgcaaacccagtatttc

SEQ ID NO: 1966483 - DNA, 25 bp, Homo sapien
ctgctctttgtgaggtacgggagta

SEQ ID NO: 1966484 - DNA, 25 bp, Homo sapien
atattctcaacaacccggccctgca

SEQ ID NO: 1966485 - DNA, 25 bp, Homo sapien
agcaggagctccaacctggaaagac

SEQ ID NO: 1966486 - DNA, 25 bp, Homo sapien
taagcaggagctccaacctggaaag

SEQ ID NO: 1966487 - DNA, 25 bp, Homo sapien
ctaagcaggagctccaacctggaaa

SEQ ID NO: 1966488 - DNA, 25 bp, Homo sapien
tctaagcaggagctccaacctggaa

SEQ ID NO: 1966489 - DNA, 25 bp, Homo sapien
gtgaatgcgttctccctcgtccacg

SEQ ID NO: 1966490 - DNA, 25 bp, Homo sapien
ctcgtccacgcggagggacgcagta

SEQ ID NO: 1966491 - DNA, 25 bp, Homo sapien
tccacgcggagggacgcagtatccc

SEQ ID NO: 1966492 - DNA, 25 bp, Homo sapien
gacagccggcaaagtgctgtgaaca

SEQ ID NO: 1966493 - DNA, 25 bp, Homo sapien
tgtgcggcaatccataatttatgag

SEQ ID NO: 1966494 - DNA, 25 bp, Homo sapien
aatttatgagtggacaaaataggag

SEQ ID NO: 1966495 - DNA, 25 bp, Homo sapien
gattagcaaatgcaatcgaaattgt

SEQ ID NO: 1966496 - DNA, 25 bp, Homo sapien
cgaaattgtagacttgatgttgtgc

SEQ ID NO: 1966497 - DNA, 25 bp, Homo sapien
gattctgcggcagccacacggccgt

SEQ ID NO: 1966498 - DNA, 25 bp, Homo sapien
gcggcagccacacggccgtcattag

SEQ ID NO: 1966499 - DNA, 25 bp, Homo sapien
tggctggattctgcggcagccacac

SEQ ID NO: 1966500 - DNA, 25 bp, Homo sapien
tgtggctggattctgcggcagccac

SEQ ID NO: 1966501 - DNA, 25 bp, Homo sapien
ctctcctggtcctcgtgccccgcag

SEQ ID NO: 1966502 - DNA, 25 bp, Homo sapien
aggccacgctgacgcaaactggagg

SEQ ID NO: 1966503 - DNA, 25 bp, Homo sapien
ccacgctgacgcaaactggaggaaa

SEQ ID NO: 1966504 - DNA, 25 bp, Homo sapien
cgcaggccacgctgacgcaaactgg

SEQ ID NO: 1966505 - DNA, 25 bp, Homo sapien
gatcgatttaacagtgggaaggtat

SEQ ID NO: 1966506 - DNA, 25 bp, Homo sapien
ggaaggtattaatgatattcagcgc

SEQ ID NO: 1966507 - DNA, 25 bp, Homo sapien
tcaccgtcatttgcatttcgattca

SEQ ID NO: 1966508 - DNA, 25 bp, Homo sapien
gatggctgaggcacttcaccgtcat

SEQ ID NO: 1966509 - DNA, 25 bp, Homo sapien
gaaaacacgagtttcagggagaatc

SEQ ID NO: 1966510 - DNA, 25 bp, Homo sapien
gaatcaattctaccacagtggccat

SEQ ID NO: 1966511 - DNA, 25 bp, Homo sapien
ggccataacactacttggtggtcca

SEQ ID NO: 1966512 - DNA, 25 bp, Homo sapien
cagtggccataacactacttggtgg

SEQ ID NO: 1966513 - DNA, 25 bp, Homo sapien
tagcacacagacggtcaggagtgga

SEQ ID NO: 1966514 - DNA, 25 bp, Homo sapien
ttagcacacagacggtcaggagtgg

SEQ ID NO: 1966515 - DNA, 25 bp, Homo sapien
cttagcacacagacggtcaggagtg

SEQ ID NO: 1966516 - DNA, 25 bp, Homo sapien
catctccagggtgttcgccatgaag

SEQ ID NO: 1966517 - DNA, 25 bp, Homo sapien
acctccaggctctttttggggatgt

SEQ ID NO: 1966518 - DNA, 25 bp, Homo sapien
tctccagggtgttcgccatgaagac

SEQ ID NO: 1966519 - DNA, 25 bp, Homo sapien
tccaggctctttttggggatgtcac

SEQ ID NO: 1966520 - DNA, 25 bp, Homo sapien
caagtaacatggtgcctgatatcac

SEQ ID NO: 1966521 - DNA, 25 bp, Homo sapien
tttcaagtaacatggtgcctgatat

SEQ ID NO: 1966522 - DNA, 25 bp, Homo sapien
gtaacatggtgcctgatatcaccct

SEQ ID NO: 1966523 - DNA, 25 bp, Homo sapien
acatggtgcctgatatcaccctcac

SEQ ID NO: 1966524 - DNA, 25 bp, Homo sapien
ttagtagcgcaggcgtgttgcatgt

SEQ ID NO: 1966525 - DNA, 25 bp, Homo sapien
tagtagcgcaggcgtgttgcatgta

SEQ ID NO: 1966526 - DNA, 25 bp, Homo sapien
agtagcgcaggcgtgttgcatgtac

SEQ ID NO: 1966527 - DNA, 25 bp, Homo sapien
ctcatgagatttatcctccatgatg

SEQ ID NO: 1966528 - DNA, 25 bp, Homo sapien
ccaatcagcggctcgaggatgacgg

SEQ ID NO: 1966529 - DNA, 25 bp, Homo sapien
gctcgaggatgacggcctttactca

SEQ ID NO: 1966530 - DNA, 25 bp, Homo sapien
cagcggctcgaggatgacggccttt

SEQ ID NO: 1966531 - DNA, 25 bp, Homo sapien
gatgacggcctttactcacactccg

SEQ ID NO: 1966532 - DNA, 25 bp, Homo sapien
tgagtggagtattggcaggaggagc

SEQ ID NO: 1966533 - DNA, 25 bp, Homo sapien
ctgagtggagtattggcaggaggag

SEQ ID NO: 1966534 - DNA, 25 bp, Homo sapien
ggagtattggcaggaggagctccat

SEQ ID NO: 1966535 - DNA, 25 bp, Homo sapien
agtggagtattggcaggaggagctc

SEQ ID NO: 1966536 - DNA, 25 bp, Homo sapien
taaagacacaacgacagcatctcct

SEQ ID NO: 1966537 - DNA, 25 bp, Homo sapien
gatatctcgtgattgcaagcctgca

SEQ ID NO: 1966538 - DNA, 25 bp, Homo sapien
tttgtagggctctcgtaaagacaca

SEQ ID NO: 1966539 - DNA, 25 bp, Homo sapien
gaagagcacgcaaccatttgtaggg

SEQ ID NO: 1966540 - DNA, 25 bp, Homo sapien
catggactatcttctcatagacagg

SEQ ID NO: 1966541 - DNA, 25 bp, Homo sapien
ctatcttctcatagacagggacaac

SEQ ID NO: 1966542 - DNA, 25 bp, Homo sapien
tttcatggactatcttctcatagac

SEQ ID NO: 1966543 - DNA, 25 bp, Homo sapien
gactatcttctcatagacagggaca

SEQ ID NO: 1966544 - DNA, 25 bp, Homo sapien
tgtgcgcaccaagcttcgtgctcac

SEQ ID NO: 1966545 - DNA, 25 bp, Homo sapien
cctgcattgcgcttggggagctgcc

SEQ ID NO: 1966546 - DNA, 25 bp, Homo sapien
gctgcctgcacatgtttggagagtg

SEQ ID NO: 1966547 - DNA, 25 bp, Homo sapien
ttggagagtggaccacattcttgtg

SEQ ID NO: 1966548 - DNA, 25 bp, Homo sapien
caccagttgtctctgcttcagggcc

SEQ ID NO: 1966549 - DNA, 25 bp, Homo sapien
ccctctggatccagtcctttgttga

SEQ ID NO: 1966550 - DNA, 25 bp, Homo sapien
tctggatccagtcctttgttgacat

SEQ ID NO: 1966551 - DNA, 25 bp, Homo sapien
cccaccagttgtctctgcttcaggg

SEQ ID NO: 1966552 - DNA, 25 bp, Homo sapien
caggcgaccagcagagcctgtaatc

SEQ ID NO: 1966553 - DNA, 25 bp, Homo sapien
acaggcgaccagcagagcctgtaat

SEQ ID NO: 1966554 - DNA, 25 bp, Homo sapien
cagggtgggaaattgccacttcttc

SEQ ID NO: 1966555 - DNA, 25 bp, Homo sapien
attgccacttcttcccttggtactt

SEQ ID NO: 1966556 - DNA, 25 bp, Homo sapien
cttggtacttttcctccacctgcag

SEQ ID NO: 1966557 - DNA, 25 bp, Homo sapien
ctgcagggtgggaaattgccacttc

SEQ ID NO: 1966558 - DNA, 25 bp, Homo sapien
cgttaccaccagccgccgtgctccc

SEQ ID NO: 1966559 - DNA, 25 bp, Homo sapien
gcgttaccaccagccgccgtgctcc

SEQ ID NO: 1966560 - DNA, 25 bp, Homo sapien
tgcgttaccaccagccgccgtgctc

SEQ ID NO: 1966561 - DNA, 25 bp, Homo sapien
ctgcgttaccaccagccgccgtgct

SEQ ID NO: 1966562 - DNA, 25 bp, Homo sapien
tagtgctccctgcgttacggccagc

SEQ ID NO: 1966563 - DNA, 25 bp, Homo sapien
gtagtgctccctgcgttacggccag

SEQ ID NO: 1966564 - DNA, 25 bp, Homo sapien
tgtagtgctccctgcgttacggcca

SEQ ID NO: 1966565 - DNA, 25 bp, Homo sapien
caggtgtcttcgtcgtggtgatgaa

SEQ ID NO: 1966566 - DNA, 25 bp, Homo sapien
tccagaagtttcacaggtgtcttcg

SEQ ID NO: 1966567 - DNA, 25 bp, Homo sapien
ggtttaacagatagcttccagaagt

SEQ ID NO: 1966568 - DNA, 25 bp, Homo sapien
ggatctggtttaacagatagcttcc

SEQ ID NO: 1966569 - DNA, 25 bp, Homo sapien
gaattcttgctggacgattatcgtc

SEQ ID NO: 1966570 - DNA, 25 bp, Homo sapien
tttccggccctcttagtgttaatga

SEQ ID NO: 1966571 - DNA, 25 bp, Homo sapien
cctttaataactgcttgccgggtgc

SEQ ID NO: 1966572 - DNA, 25 bp, Homo sapien
tatcgtctggcagtaattggcaatc

SEQ ID NO: 1966573 - DNA, 25 bp, Homo sapien
tccctgagactgttgtcaggcatct

SEQ ID NO: 1966574 - DNA, 25 bp, Homo sapien
acatccaagcccacagcgacagctt

SEQ ID NO: 1966575 - DNA, 25 bp, Homo sapien
agcccacagcgacagctttcagctt

SEQ ID NO: 1966576 - DNA, 25 bp, Homo sapien
caggcatctcaagcccttgagacat

SEQ ID NO: 1966577 - DNA, 25 bp, Homo sapien
tgcctgcagggctgtactgtcttgc

SEQ ID NO: 1966578 - DNA, 25 bp, Homo sapien
agggctgtactgtcttgcttcgtcc

SEQ ID NO: 1966579 - DNA, 25 bp, Homo sapien
tgtactgtcttgcttcgtcctgcat

SEQ ID NO: 1966580 - DNA, 25 bp, Homo sapien
tgcagggctgtactgtcttgcttcg

SEQ ID NO: 1966581 - DNA, 25 bp, Homo sapien
gacggcatcaggagtattcagccat

SEQ ID NO: 1966582 - DNA, 25 bp, Homo sapien
gagatgagaattgggcctcaaggca

SEQ ID NO: 1966583 - DNA, 25 bp, Homo sapien
gaccctagggacgtgaggatcacag

SEQ ID NO: 1966584 - DNA, 25 bp, Homo sapien
tcaaggcatagtcttcagaagggtc

SEQ ID NO: 1966585 - DNA, 25 bp, Homo sapien
tttcctctgtgtttctgactgcccg

SEQ ID NO: 1966586 - DNA, 25 bp, Homo sapien
catgtaggtgggtttggtgctacca

SEQ ID NO: 1966587 - DNA, 25 bp, Homo sapien
tggtgctaccagtaagacctccatc

SEQ ID NO: 1966588 - DNA, 25 bp, Homo sapien
ctagcatccgaagcataggaggtgc

SEQ ID NO: 1966589 - DNA, 25 bp, Homo sapien
gccttgggacactttgggcaacagt

SEQ ID NO: 1966590 - DNA, 25 bp, Homo sapien
ttgggacactttgggcaacagtcct

SEQ ID NO: 1966591 - DNA, 25 bp, Homo sapien
cttgggacactttgggcaacagtcc

SEQ ID NO: 1966592 - DNA, 25 bp, Homo sapien
ccttgggacactttgggcaacagtc

SEQ ID NO: 1966593 - DNA, 25 bp, Homo sapien
ttcatcctgggattccacagtagcc

SEQ ID NO: 1966594 - DNA, 25 bp, Homo sapien
ccatgttcatcctgggattccacag

SEQ ID NO: 1966595 - DNA, 25 bp, Homo sapien
cacagtagcctcatttctggtatcc

SEQ ID NO: 1966596 - DNA, 25 bp, Homo sapien
cactcattgctgctaccatgttcat

SEQ ID NO: 1966597 - DNA, 25 bp, Homo sapien
cctgtggccagagggcttgaggtcg

SEQ ID NO: 1966598 - DNA, 25 bp, Homo sapien
tgtggccagagggcttgaggtcgcc

SEQ ID NO: 1966599 - DNA, 25 bp, Homo sapien
gtggccagagggcttgaggtcgcca

SEQ ID NO: 1966600 - DNA, 25 bp, Homo sapien
tggccagagggcttgaggtcgccat

SEQ ID NO: 1966601 - DNA, 25 bp, Homo sapien
gcattgatgaagctggccgagccag

SEQ ID NO: 1966602 - DNA, 25 bp, Homo sapien
tcttagtggctagcttggcctctag

SEQ ID NO: 1966603 - DNA, 25 bp, Homo sapien
gagccagcccgtacttccacaaggg

SEQ ID NO: 1966604 - DNA, 25 bp, Homo sapien
tggcctctagagcatgaagcagcat

SEQ ID NO: 1966605 - DNA, 25 bp, Homo sapien
tgatccttggagattgcccacccaa

SEQ ID NO: 1966606 - DNA, 25 bp, Homo sapien
gctgatccttggagattgcccaccc

SEQ ID NO: 1966607 - DNA, 25 bp, Homo sapien
tccttggagattgcccacccaagac

SEQ ID NO: 1966608 - DNA, 25 bp, Homo sapien
gatccttggagattgcccacccaag

SEQ ID NO: 1966609 - DNA, 25 bp, Homo sapien
aaggcctgattgtcccaaacttcct

SEQ ID NO: 1966610 - DNA, 25 bp, Homo sapien
aggactggagttgggtttctgcttc

SEQ ID NO: 1966611 - DNA, 25 bp, Homo sapien
tcttcaccacatgagcggggaccac

SEQ ID NO: 1966612 - DNA, 25 bp, Homo sapien
tcaaggcctgattgtcccaaacttc

SEQ ID NO: 1966613 - DNA, 25 bp, Homo sapien
agtccaaggtctagggccatcgtac

SEQ ID NO: 1966614 - DNA, 25 bp, Homo sapien
gagtcagacagcgtctgcaccggac

SEQ ID NO: 1966615 - DNA, 25 bp, Homo sapien
gggacagttctgcaaattccagtgt

SEQ ID NO: 1966616 - DNA, 25 bp, Homo sapien
gtacccataaacaaactgcatcctg

SEQ ID NO: 1966617 - DNA, 25 bp, Homo sapien
cgatgagaaactccggaaatatttc

SEQ ID NO: 1966618 - DNA, 25 bp, Homo sapien
cattgagtcaggtttatcgatgaga

SEQ ID NO: 1966619 - DNA, 25 bp, Homo sapien
aggaagggtcaagccatcggcaaac

SEQ ID NO: 1966620 - DNA, 25 bp, Homo sapien
gccatcggcaaacattgagtcaggt

SEQ ID NO: 1966621 - DNA, 25 bp, Homo sapien
gatgggaaccgggaacagctgcact

SEQ ID NO: 1966622 - DNA, 25 bp, Homo sapien
aacttcggcaggctgcccttgctaa

SEQ ID NO: 1966623 - DNA, 25 bp, Homo sapien
tttgtcctgtaggaatggtgcagag

SEQ ID NO: 1966624 - DNA, 25 bp, Homo sapien
cagctgcactctggcgggcaacttt

SEQ ID NO: 1966625 - DNA, 25 bp, Homo sapien
ccagagtagtttgtgtgatgcagcg

SEQ ID NO: 1966626 - DNA, 25 bp, Homo sapien
gcacaaagcaattatccacagtggg

SEQ ID NO: 1966627 - DNA, 25 bp, Homo sapien
tctgtcccctggaaataaatcaggt

SEQ ID NO: 1966628 - DNA, 25 bp, Homo sapien
ggacagctcattccttctcgaagca

SEQ ID NO: 1966629 - DNA, 25 bp, Homo sapien
cttttcgggtgatttgaggagacga

SEQ ID NO: 1966630 - DNA, 25 bp, Homo sapien
aggagacgatgcaggagaatgatcc

SEQ ID NO: 1966631 - DNA, 25 bp, Homo sapien
ggtgatttgaggagacgatgcagga

SEQ ID NO: 1966632 - DNA, 25 bp, Homo sapien
atttgaggagacgatgcaggagaat

SEQ ID NO: 1966633 - DNA, 25 bp, Homo sapien
ctggatagaacagggcagtccttac

SEQ ID NO: 1966634 - DNA, 25 bp, Homo sapien
gcatctggctgggaccccaaacgtg

SEQ ID NO: 1966635 - DNA, 25 bp, Homo sapien
ccccaaacgtgcagatggttgtgaa

SEQ ID NO: 1966636 - DNA, 25 bp, Homo sapien
tgctgtccaaacatgtagggcagtg

SEQ ID NO: 1966637 - DNA, 25 bp, Homo sapien
ggcagaaaaatgtgctgtccaaaca

SEQ ID NO: 1966638 - DNA, 25 bp, Homo sapien
ctctccgagagaatcacagccagtt

SEQ ID NO: 1966639 - DNA, 25 bp, Homo sapien
tgagatcgcacctttggccacgccg

SEQ ID NO: 1966640 - DNA, 25 bp, Homo sapien
gacctgagatcgcacctttggccac

SEQ ID NO: 1966641 - DNA, 25 bp, Homo sapien
gccacgccgctctctccgagagaat

SEQ ID NO: 1966642 - DNA, 25 bp, Homo sapien
tgccctgggaacgtcgccggcatcc

SEQ ID NO: 1966643 - DNA, 25 bp, Homo sapien
ttgccctgggaacgtcgccggcatc

SEQ ID NO: 1966644 - DNA, 25 bp, Homo sapien
tcgccggcatccagggcggtggtga

SEQ ID NO: 1966645 - DNA, 25 bp, Homo sapien
ccctgggaacgtcgccggcatccag

SEQ ID NO: 1966646 - DNA, 25 bp, Homo sapien
gagctggacataagataccattttc

SEQ ID NO: 1966647 - DNA, 25 bp, Homo sapien
atgaagagctggacataagatacca

SEQ ID NO: 1966648 - DNA, 25 bp, Homo sapien
cataagataccattttcactagggt

SEQ ID NO: 1966649 - DNA, 25 bp, Homo sapien
gacataagataccattttcactagg

SEQ ID NO: 1966650 - DNA, 25 bp, Homo sapien
tctctgtagactcgtggaggaaagc

SEQ ID NO: 1966651 - DNA, 25 bp, Homo sapien
ggccaggtccctttgttcttgagcg

SEQ ID NO: 1966652 - DNA, 25 bp, Homo sapien
gaatcttcagtggtgtaaactgcga

SEQ ID NO: 1966653 - DNA, 25 bp, Homo sapien
taaactgcgagtcagaactggagat

SEQ ID NO: 1966654 - DNA, 25 bp, Homo sapien
tccttagacttgcagctttctcgaa

SEQ ID NO: 1966655 - DNA, 25 bp, Homo sapien
tagacttgcagctttctcgaacgtg

SEQ ID NO: 1966656 - DNA, 25 bp, Homo sapien
gctttctcgaacgtgtcctccgaca

SEQ ID NO: 1966657 - DNA, 25 bp, Homo sapien
tgatttcttccttagacttgcagct

SEQ ID NO: 1966658 - DNA, 25 bp, Homo sapien
tgggagccaccataggagggaccgc

SEQ ID NO: 1966659 - DNA, 25 bp, Homo sapien
ctgggagccaccataggagggaccg

SEQ ID NO: 1966660 - DNA, 25 bp, Homo sapien
caaggaggatgaagcacagaaacgc

SEQ ID NO: 1966661 - DNA, 25 bp, Homo sapien
acagaaacgccatcaggacggtcat

SEQ ID NO: 1966662 - DNA, 25 bp, Homo sapien
gatggagtggattctactggtgaca

SEQ ID NO: 1966663 - DNA, 25 bp, Homo sapien
tgaagcacagaaacgccatcaggac

SEQ ID NO: 1966664 - DNA, 25 bp, Homo sapien
cacggtccgagtgcacggccccagg

SEQ ID NO: 1966665 - DNA, 25 bp, Homo sapien
ccacggtccgagtgcacggccccag

SEQ ID NO: 1966666 - DNA, 25 bp, Homo sapien
gcagcacccggaagaatgaggaaag

SEQ ID NO: 1966667 - DNA, 25 bp, Homo sapien
ggccatggagtctgtacaggatttt

SEQ ID NO: 1966668 - DNA, 25 bp, Homo sapien
ggattgttcctgagtttttactgtg

SEQ ID NO: 1966669 - DNA, 25 bp, Homo sapien
tgcagacttggattgttcctgagtt

SEQ ID NO: 1966670 - DNA, 25 bp, Homo sapien
tgattggcttttcaaagtcgctgct

SEQ ID NO: 1966671 - DNA, 25 bp, Homo sapien
cacttggtccaccagagttgttcat

SEQ ID NO: 1966672 - DNA, 25 bp, Homo sapien
agtcgctgctgggacatcactagtt

SEQ ID NO: 1966673 - DNA, 25 bp, Homo sapien
tctttagtggtagagttgattggct

SEQ ID NO: 1966674 - DNA, 25 bp, Homo sapien
ggtcccgagtggaccgccgtccgca

SEQ ID NO: 1966675 - DNA, 25 bp, Homo sapien
gagtggaccgccgtccgcaggccat

SEQ ID NO: 1966676 - DNA, 25 bp, Homo sapien
ccacagatgtactgggtcccgagtg

SEQ ID NO: 1966677 - DNA, 25 bp, Homo sapien
gccgtccgcaggccatcgtgggttt

SEQ ID NO: 1966678 - DNA, 25 bp, Homo sapien
tagcgtcagttcaaacgccttgagg

SEQ ID NO: 1966679 - DNA, 25 bp, Homo sapien
cagttcaaacgccttgaggccacca

SEQ ID NO: 1966680 - DNA, 25 bp, Homo sapien
ccagtagcgtcagttcaaacgcctt

SEQ ID NO: 1966681 - DNA, 25 bp, Homo sapien
cgtcagttcaaacgccttgaggcca

SEQ ID NO: 1966682 - DNA, 25 bp, Homo sapien
tgacagtgagccgttcaggaaggcc

SEQ ID NO: 1966683 - DNA, 25 bp, Homo sapien
gccgttcaggaaggcctttaagagc

SEQ ID NO: 1966684 - DNA, 25 bp, Homo sapien
cagtgagccgttcaggaaggccttt

SEQ ID NO: 1966685 - DNA, 25 bp, Homo sapien
gagccgttcaggaaggcctttaaga

SEQ ID NO: 1966686 - DNA, 25 bp, Homo sapien
tgaaatgctgctgccggctttgttg

SEQ ID NO: 1966687 - DNA, 25 bp, Homo sapien
atcacccgcgtgaaatgctgctgcc

SEQ ID NO: 1966688 - DNA, 25 bp, Homo sapien
cgcgtgaaatgctgctgccggcttt

SEQ ID NO: 1966689 - DNA, 25 bp, Homo sapien
ctgggtgacatcacccgcgtgaaat

SEQ ID NO: 1966690 - DNA, 25 bp, Homo sapien
aattggctggcagtccgtacataat

SEQ ID NO: 1966691 - DNA, 25 bp, Homo sapien
cataatgaataatcgctccggggac

SEQ ID NO: 1966692 - DNA, 25 bp, Homo sapien
ttggctggcagtccgtacataatga

SEQ ID NO: 1966693 - DNA, 25 bp, Homo sapien
gctggcagtccgtacataatgaata

SEQ ID NO: 1966694 - DNA, 25 bp, Homo sapien
tcttcgtgtggacaaaagcctgctc

SEQ ID NO: 1966695 - DNA, 25 bp, Homo sapien
gagacgtgggcagcatcttcgtgtg

SEQ ID NO: 1966696 - DNA, 25 bp, Homo sapien
gtgactgcgcccacgtttcccaggg

SEQ ID NO: 1966697 - DNA, 25 bp, Homo sapien
gctttcctggagtcacacctccttg

SEQ ID NO: 1966698 - DNA, 25 bp, Homo sapien
tttatcaaacaaccaggttgcctga

SEQ ID NO: 1966699 - DNA, 25 bp, Homo sapien
ggaaactgttcccatgatcctgtca

SEQ ID NO: 1966700 - DNA, 25 bp, Homo sapien
catttatcaaacaaccaggttgcct

SEQ ID NO: 1966701 - DNA, 25 bp, Homo sapien
tgatcctgtcacctaccaggtccct

SEQ ID NO: 1966702 - DNA, 25 bp, Homo sapien
ggccgcacgcacatgctgcactggg

SEQ ID NO: 1966703 - DNA, 25 bp, Homo sapien
ctgctggccgcacgcacatgctgca

SEQ ID NO: 1966704 - DNA, 25 bp, Homo sapien
gctggccgcacgcacatgctgcact

SEQ ID NO: 1966705 - DNA, 25 bp, Homo sapien
tgcactgggccttccccgaacgccc

SEQ ID NO: 1966706 - DNA, 25 bp, Homo sapien
ttaaagctgtcagaccagaatgatt

SEQ ID NO: 1966707 - DNA, 25 bp, Homo sapien
gaatgattttcagtcactttgctct

SEQ ID NO: 1966708 - DNA, 25 bp, Homo sapien
ggtaaagtattaggctagcactgca

SEQ ID NO: 1966709 - DNA, 25 bp, Homo sapien
tgtccctaaggtggtagattaatag

SEQ ID NO: 1966710 - DNA, 25 bp, Homo sapien
cattttcaaactgaccatgctgcta

SEQ ID NO: 1966711 - DNA, 25 bp, Homo sapien
accagcggtccccatgtatatcagc

SEQ ID NO: 1966712 - DNA, 25 bp, Homo sapien
gcccctgctggtgcataaacatctg

SEQ ID NO: 1966713 - DNA, 25 bp, Homo sapien
gagaaccctgtatgtccaggaggag

SEQ ID NO: 1966714 - DNA, 25 bp, Homo sapien
taattccacatccacctgccgaggg

SEQ ID NO: 1966715 - DNA, 25 bp, Homo sapien
gctgcccactgcatgttagctgcag

SEQ ID NO: 1966716 - DNA, 25 bp, Homo sapien
cacagaagcgtgctgtgctgggcca

SEQ ID NO: 1966717 - DNA, 25 bp, Homo sapien
gcaggccttgggtgctaattccaca

SEQ ID NO: 1966718 - DNA, 25 bp, Homo sapien
caaacctgtgcacttgtacacccga

SEQ ID NO: 1966719 - DNA, 25 bp, Homo sapien
tgtacacccgagttcctggtgccag

SEQ ID NO: 1966720 - DNA, 25 bp, Homo sapien
tgtcaccatcatccctgtgcttgct

SEQ ID NO: 1966721 - DNA, 25 bp, Homo sapien
ggatgccgccaggagcaagacaaac

SEQ ID NO: 1966722 - DNA, 25 bp, Homo sapien
acattggccaatggcctggatgcgg

SEQ ID NO: 1966723 - DNA, 25 bp, Homo sapien
gaacgaggacattggccaatggcct

SEQ ID NO: 1966724 - DNA, 25 bp, Homo sapien
tctggcatttccgaacgaggacatt

SEQ ID NO: 1966725 - DNA, 25 bp, Homo sapien
tgaggagagcgcaggataggaaggt

SEQ ID NO: 1966726 - DNA, 25 bp, Homo sapien
actcgctgtctccaagggtgtggca

SEQ ID NO: 1966727 - DNA, 25 bp, Homo sapien
ccgatgtcaaggatggcagtgatcc

SEQ ID NO: 1966728 - DNA, 25 bp, Homo sapien
gctgcattgaggagaatcactgccc

SEQ ID NO: 1966729 - DNA, 25 bp, Homo sapien
agtggagacccgatggaccagagcc

SEQ ID NO: 1966730 - DNA, 25 bp, Homo sapien
cccctgatgtgcgctgggcttgatg

SEQ ID NO: 1966731 - DNA, 25 bp, Homo sapien
atgactcagggcgaggacaccacgg

SEQ ID NO: 1966732 - DNA, 25 bp, Homo sapien
ctgtgtgttgtggccatgactcagg

SEQ ID NO: 1966733 - DNA, 25 bp, Homo sapien
agagccagatatgcactgtctgacc

SEQ ID NO: 1966734 - DNA, 25 bp, Homo sapien
gtggagaaagacaagccgcccaatc

SEQ ID NO: 1966735 - DNA, 25 bp, Homo sapien
cgggaactctctgcggcgctcgacc

SEQ ID NO: 1966736 - DNA, 25 bp, Homo sapien
ggagaaagacaagccgcccaatccc

SEQ ID NO: 1966737 - DNA, 25 bp, Homo sapien
ggaactctctgcggcgctcgacccc

SEQ ID NO: 1966738 - DNA, 25 bp, Homo sapien
gtgggaagagcacggggcacccagc

SEQ ID NO: 1966739 - DNA, 25 bp, Homo sapien
atgtgggaagagcacggggcaccca

SEQ ID NO: 1966740 - DNA, 25 bp, Homo sapien
tgtgggaagagcacggggcacccag

SEQ ID NO: 1966741 - DNA, 25 bp, Homo sapien
gtgcaggaggcttgtatagacagtc

SEQ ID NO: 1966742 - DNA, 25 bp, Homo sapien
aggaggcttgtatagacagtcaggt

SEQ ID NO: 1966743 - DNA, 25 bp, Homo sapien
caggtgcaggaggcttgtatagaca

SEQ ID NO: 1966744 - DNA, 25 bp, Homo sapien
tgcaggaggcttgtatagacagtca

SEQ ID NO: 1966745 - DNA, 25 bp, Homo sapien
tgggcccctcgtagaaaaccatctg

SEQ ID NO: 1966746 - DNA, 25 bp, Homo sapien
gggctttgcgtagactactagctgc

SEQ ID NO: 1966747 - DNA, 25 bp, Homo sapien
gtagactactagctgcatgggcccc

SEQ ID NO: 1966748 - DNA, 25 bp, Homo sapien
gaggcttgtgtacacaggtgtaaga

SEQ ID NO: 1966749 - DNA, 25 bp, Homo sapien
gggattccagtgggtgcattgctat

SEQ ID NO: 1966750 - DNA, 25 bp, Homo sapien
ttacacagcctttgttcatccagaa

SEQ ID NO: 1966751 - DNA, 25 bp, Homo sapien
acatccgaacatcttttatggatgg

SEQ ID NO: 1966752 - DNA, 25 bp, Homo sapien
ccgaacatcttttatggatggagat

SEQ ID NO: 1966753 - DNA, 25 bp, Homo sapien
gatggagatgaagggttacacagcc

SEQ ID NO: 1966754 - DNA, 25 bp, Homo sapien
ttggactcggggtcactgtacagcc

SEQ ID NO: 1966755 - DNA, 25 bp, Homo sapien
ccccatcctttctgccattggactc

SEQ ID NO: 1966756 - DNA, 25 bp, Homo sapien
ggagggaggcccaagcgtgcggctg

SEQ ID NO: 1966757 - DNA, 25 bp, Homo sapien
gagggaggcccaagcgtgcggctgg

SEQ ID NO: 1966758 - DNA, 25 bp, Homo sapien
ggcgtccaggcccattggcttcacc

SEQ ID NO: 1966759 - DNA, 25 bp, Homo sapien
attggcttcaccctccgcgacctct

SEQ ID NO: 1966760 - DNA, 25 bp, Homo sapien
aggcccattggcttcaccctccgcg

SEQ ID NO: 1966761 - DNA, 25 bp, Homo sapien
tggcttcaccctccgcgacctctgg

SEQ ID NO: 1966762 - DNA, 25 bp, Homo sapien
aaagcgcgttgagtcccctcgaagc

SEQ ID NO: 1966763 - DNA, 25 bp, Homo sapien
ttcagggagcttatgcgacaagccg

SEQ ID NO: 1966764 - DNA, 25 bp, Homo sapien
tttcacaggccctacaaagcgcgtt

SEQ ID NO: 1966765 - DNA, 25 bp, Homo sapien
accagaacccgctggagggctgcct

SEQ ID NO: 1966766 - DNA, 25 bp, Homo sapien
cgctcggcggcagagctcgaaagcc

SEQ ID NO: 1966767 - DNA, 25 bp, Homo sapien
ggctgccttgcaggcgacacctcgg

SEQ ID NO: 1966768 - DNA, 25 bp, Homo sapien
ttttccaccgctctggcggcagcgt

SEQ ID NO: 1966769 - DNA, 25 bp, Homo sapien
tgagaacgacgtacgcggctgcctt

SEQ ID NO: 1966770 - DNA, 25 bp, Homo sapien
cgcagagcgccgggaaaccgaaagc

SEQ ID NO: 1966771 - DNA, 25 bp, Homo sapien
aggcccgcagctctggactctggga

SEQ ID NO: 1966772 - DNA, 25 bp, Homo sapien
cggcccgggttcaggacgatcgcgg

SEQ ID NO: 1966773 - DNA, 25 bp, Homo sapien
gtgaacaaagcagcgccgcagagcg

SEQ ID NO: 1966774 - DNA, 25 bp, Homo sapien
ctcgccttctgcggccccaaggtgg

SEQ ID NO: 1966775 - DNA, 25 bp, Homo sapien
cgccttctgcggccccaaggtggtg

SEQ ID NO: 1966776 - DNA, 25 bp, Homo sapien
cggtgtgaccgctcgccttctgcgg

SEQ ID NO: 1966777 - DNA, 25 bp, Homo sapien
ccggtgtgaccgctcgccttctgcg

SEQ ID NO: 1966778 - DNA, 25 bp, Homo sapien
cgctgcgtgttcgcccagagcgagt

SEQ ID NO: 1966779 - DNA, 25 bp, Homo sapien
ttcgcccagagcgagtgcgggtccc

SEQ ID NO: 1966780 - DNA, 25 bp, Homo sapien
actaatagcggcgttgcggtccggc

SEQ ID NO: 1966781 - DNA, 25 bp, Homo sapien
tgaggccgggaagggcgctgcgtgt

SEQ ID NO: 1966782 - DNA, 25 bp, Homo sapien
ctgggtgctggggcctagaggggca

SEQ ID NO: 1966783 - DNA, 25 bp, Homo sapien
gccgccgcggatctcattctggagt

SEQ ID NO: 1966784 - DNA, 25 bp, Homo sapien
gggccgccgcggatctcattctgga

SEQ ID NO: 1966785 - DNA, 25 bp, Homo sapien
ccgggccgccgcggatctcattctg

SEQ ID NO: 1966786 - DNA, 25 bp, Homo sapien
gcgctttaatctcaggtgggccccg

SEQ ID NO: 1966787 - DNA, 25 bp, Homo sapien
tcaaaaattacctagccctccaaga

SEQ ID NO: 1966788 - DNA, 25 bp, Homo sapien
gatagaagtttgctgttgttgactg

SEQ ID NO: 1966789 - DNA, 25 bp, Homo sapien
tagagctgatttatcggaattcgcg

SEQ ID NO: 1966790 - DNA, 25 bp, Homo sapien
catgctttgatgagcttgggctacc

SEQ ID NO: 1966791 - DNA, 25 bp, Homo sapien
gaattgatcacttcattgccacggt

SEQ ID NO: 1966792 - DNA, 25 bp, Homo sapien
ccttggtccacaggtaggtgtcaca

SEQ ID NO: 1966793 - DNA, 25 bp, Homo sapien
aagactgaagagacacgaggcgtac

SEQ ID NO: 1966794 - DNA, 25 bp, Homo sapien
gaaattcaaattacagcgtgtcgcc

SEQ ID NO: 1966795 - DNA, 25 bp, Homo sapien
gcgtgtcgccctaatgagcctgggt

SEQ ID NO: 1966796 - DNA, 25 bp, Homo sapien
tatcgtggctgtcttagtttcggca

SEQ ID NO: 1966797 - DNA, 25 bp, Homo sapien
tacgagcccaagaaaggtaggcggc

SEQ ID NO: 1966798 - DNA, 25 bp, Homo sapien
ctaattggacccggcctggcctgac

SEQ ID NO: 1966799 - DNA, 25 bp, Homo sapien
tgcgacttccggattggacacaggg

SEQ ID NO: 1966800 - DNA, 25 bp, Homo sapien
cacttccctgcgacttccggattgg

SEQ ID NO: 1966801 - DNA, 25 bp, Homo sapien
tccctgcgacttccggattggacac

SEQ ID NO: 1966802 - DNA, 25 bp, Homo sapien
aaggcgccccggatccaggtccatg

SEQ ID NO: 1966803 - DNA, 25 bp, Homo sapien
gcactgcccggaggaagacccgagc

SEQ ID NO: 1966804 - DNA, 25 bp, Homo sapien
ccatgctgggcggagtggaccgcga

SEQ ID NO: 1966805 - DNA, 25 bp, Homo sapien
ctcctggcaattcgcaaccaaggcg

SEQ ID NO: 1966806 - DNA, 25 bp, Homo sapien
gttctcgacgtgactgggaggcttc

SEQ ID NO: 1966807 - DNA, 25 bp, Homo sapien
tcctgcccgttctcgacgtgactgg

SEQ ID NO: 1966808 - DNA, 25 bp, Homo sapien
ggtttgtcaggtaacaatcatcccc

SEQ ID NO: 1966809 - DNA, 25 bp, Homo sapien
ctgccagaggcggtttgtcaggtaa

SEQ ID NO: 1966810 - DNA, 25 bp, Homo sapien
atgcccactgcaccggcggcgccaa

SEQ ID NO: 1966811 - DNA, 25 bp, Homo sapien
tgtaatgcccactgcaccggcggcg

SEQ ID NO: 1966812 - DNA, 25 bp, Homo sapien
ctgtaatgcccactgcaccggcggc

SEQ ID NO: 1966813 - DNA, 25 bp, Homo sapien
taatgcccactgcaccggcggcgcc

SEQ ID NO: 1966814 - DNA, 25 bp, Homo sapien
gaggagccatcctcaagcacagcac

SEQ ID NO: 1966815 - DNA, 25 bp, Homo sapien
cagtttgcaactggttcccttgcac

SEQ ID NO: 1966816 - DNA, 25 bp, Homo sapien
ggagcctgccggctcaggaggagcc

SEQ ID NO: 1966817 - DNA, 25 bp, Homo sapien
tgcagtttgcaactggttcccttgc

SEQ ID NO: 1966818 - DNA, 25 bp, Homo sapien
cgtttctggagatgcaccctgggtg

SEQ ID NO: 1966819 - DNA, 25 bp, Homo sapien
tgatctgatcgtaaaggaaccctaa

SEQ ID NO: 1966820 - DNA, 25 bp, Homo sapien
tccctcccaggaagcgcaaaaatgt

SEQ ID NO: 1966821 - DNA, 25 bp, Homo sapien
taacaggcagcagcggtatggaaca

SEQ ID NO: 1966822 - DNA, 25 bp, Homo sapien
aaaacggcatgtagtaagagtcgac

SEQ ID NO: 1966823 - DNA, 25 bp, Homo sapien
tcaataacaatgacgagtgttaagt

SEQ ID NO: 1966824 - DNA, 25 bp, Homo sapien
agtttttaatgtccctgcgtaggca

SEQ ID NO: 1966825 - DNA, 25 bp, Homo sapien
aatttgctacagtcactaccaataa

SEQ ID NO: 1966826 - DNA, 25 bp, Homo sapien
ccatcgcctgggttattgtgaccag

SEQ ID NO: 1966827 - DNA, 25 bp, Homo sapien
tgctcggacggcaactgaaaagcct

SEQ ID NO: 1966828 - DNA, 25 bp, Homo sapien
tcgcgtttgcaaagcagttactggg

SEQ ID NO: 1966829 - DNA, 25 bp, Homo sapien
ggttttccctgcgtgcctgctcatt

SEQ ID NO: 1966830 - DNA, 25 bp, Homo sapien
ctcgcgctcggcctcgcaggaaatc

SEQ ID NO: 1966831 - DNA, 25 bp, Homo sapien
caggagtcgcttaggttttattgaa

SEQ ID NO: 1966832 - DNA, 25 bp, Homo sapien
ggaaatccccgctcgctgaaacttg

SEQ ID NO: 1966833 - DNA, 25 bp, Homo sapien
tttattgaaatgcctcgatgccgtt

SEQ ID NO: 1966834 - DNA, 25 bp, Homo sapien
aaacatttaggcctcggaagcgtct

SEQ ID NO: 1966835 - DNA, 25 bp, Homo sapien
tctttgagagcctagaaatgccggt

SEQ ID NO: 1966836 - DNA, 25 bp, Homo sapien
ccggttgagcgtgaaatccagtcca

SEQ ID NO: 1966837 - DNA, 25 bp, Homo sapien
ttagccaaacttctcatgtccccgg

SEQ ID NO: 1966838 - DNA, 25 bp, Homo sapien
tttgcagagcgctaaaggatgccgg

SEQ ID NO: 1966839 - DNA, 25 bp, Homo sapien
gctggttagctgaatacgaggtccc

SEQ ID NO: 1966840 - DNA, 25 bp, Homo sapien
aaacttcaggaagcacgtcggaggc

SEQ ID NO: 1966841 - DNA, 25 bp, Homo sapien
gagaattcaggattgtgggcaccct

SEQ ID NO: 1966842 - DNA, 25 bp, Homo sapien
ctggccacgaggggctcccgacccg

SEQ ID NO: 1966843 - DNA, 25 bp, Homo sapien
tgttgaggaactaaggctgccaggt

SEQ ID NO: 1966844 - DNA, 25 bp, Homo sapien
cggcggcggagtttcaaacatttca

SEQ ID NO: 1966845 - DNA, 25 bp, Homo sapien
cctttaaggaactcggctctgtcca

SEQ ID NO: 1966846 - DNA, 25 bp, Homo sapien
gccgtttccacggtatgccgggtga

SEQ ID NO: 1966847 - DNA, 25 bp, Homo sapien
gctgaagactgtcttgtaaaacaca

SEQ ID NO: 1966848 - DNA, 25 bp, Homo sapien
cgaggtgcgctctggtgtttaaaca

SEQ ID NO: 1966849 - DNA, 25 bp, Homo sapien
ggttgagggagctaagttctgctga

SEQ ID NO: 1966850 - DNA, 25 bp, Homo sapien
agaagattgcagagccacggaggag

SEQ ID NO: 1966851 - DNA, 25 bp, Homo sapien
tctccagtgtttcttgcgagcgagg

SEQ ID NO: 1966852 - DNA, 25 bp, Homo sapien
tttcttgcgagcgaggagtcctatc

SEQ ID NO: 1966853 - DNA, 25 bp, Homo sapien
tatctgctttcgtcgggatggagct

SEQ ID NO: 1966854 - DNA, 25 bp, Homo sapien
ggatggagctgacccctgcactctt

SEQ ID NO: 1966855 - DNA, 25 bp, Homo sapien
gcctcaagacaaacgctctttagag

SEQ ID NO: 1966856 - DNA, 25 bp, Homo sapien
agggctagcagtttcgggcacacac

SEQ ID NO: 1966857 - DNA, 25 bp, Homo sapien
cgccgaatttacagttggcaaaggg

SEQ ID NO: 1966858 - DNA, 25 bp, Homo sapien
gggtattcaacacggcctcaagaca

SEQ ID NO: 1966859 - DNA, 25 bp, Homo sapien
tctttaaagattcctcgggcctgag

SEQ ID NO: 1966860 - DNA, 25 bp, Homo sapien
tagaaatttaagctgcaccgcaggg

SEQ ID NO: 1966861 - DNA, 25 bp, Homo sapien
ccatcgattggtgtgaagaggcatc

SEQ ID NO: 1966862 - DNA, 25 bp, Homo sapien
ttcagatgcggccaaatgtctcccg

SEQ ID NO: 1966863 - DNA, 25 bp, Homo sapien
ttgatcacatgaatctgctgcagtc

SEQ ID NO: 1966864 - DNA, 25 bp, Homo sapien
gaatgaatcccacaaagggactgag

SEQ ID NO: 1966865 - DNA, 25 bp, Homo sapien
gatcacatgaatctgctgcagtcaa

SEQ ID NO: 1966866 - DNA, 25 bp, Homo sapien
atttcagcagcagctacgggaatga

SEQ ID NO: 1966867 - DNA, 25 bp, Homo sapien
gctattctgagctcctgatttttcc

SEQ ID NO: 1966868 - DNA, 25 bp, Homo sapien
tggctattctgagctcctgattttt

SEQ ID NO: 1966869 - DNA, 25 bp, Homo sapien
tattctgagctcctgatttttccca

SEQ ID NO: 1966870 - DNA, 25 bp, Homo sapien
ttctgagctcctgatttttcccatt

SEQ ID NO: 1966871 - DNA, 25 bp, Homo sapien
gcattcacactgcattacgtgcaga

SEQ ID NO: 1966872 - DNA, 25 bp, Homo sapien
ccaattgtaaggcatagttcctcgt

SEQ ID NO: 1966873 - DNA, 25 bp, Homo sapien
cgttctcttcaggttgcagatcctt

SEQ ID NO: 1966874 - DNA, 25 bp, Homo sapien
cgtgcagaatactgtgaccgttctc

SEQ ID NO: 1966875 - DNA, 25 bp, Homo sapien
gatagggtcagataacaaaatgaac

SEQ ID NO: 1966876 - DNA, 25 bp, Homo sapien
gggtcagataacaaaatgaacagcc

SEQ ID NO: 1966877 - DNA, 25 bp, Homo sapien
ttatctggaccactccatcaaacac

SEQ ID NO: 1966878 - DNA, 25 bp, Homo sapien
ttctgttatctggaccactccatca

SEQ ID NO: 1966879 - DNA, 25 bp, Homo sapien
ctggctttgaaaggatcatgttcaa

SEQ ID NO: 1966880 - DNA, 25 bp, Homo sapien
ctttcctgggttatctggctttgaa

SEQ ID NO: 1966881 - DNA, 25 bp, Homo sapien
ctcggggacgaggatgagggggatc

SEQ ID NO: 1966882 - DNA, 25 bp, Homo sapien
gccagaagtccctctgaggcctttc

SEQ ID NO: 1966883 - DNA, 25 bp, Homo sapien
ccttgagttgggtgatttgcctgaa

SEQ ID NO: 1966884 - DNA, 25 bp, Homo sapien
caagcggcaagtgttccttgagttg

SEQ ID NO: 1966885 - DNA, 25 bp, Homo sapien
tatcagccgactttacagagcaagc

SEQ ID NO: 1966886 - DNA, 25 bp, Homo sapien
ccacccagagggcactgaaattcat

SEQ ID NO: 1966887 - DNA, 25 bp, Homo sapien
cactcgaggagtggaaacgcaggct

SEQ ID NO: 1966888 - DNA, 25 bp, Homo sapien
ttggattcactgcagtagtgacgct

SEQ ID NO: 1966889 - DNA, 25 bp, Homo sapien
agcagccgtgcggtgtgcatttccc

SEQ ID NO: 1966890 - DNA, 25 bp, Homo sapien
tagtgacgcttatcctggactggaa

SEQ ID NO: 1966891 - DNA, 25 bp, Homo sapien
agccccttgactttccccacacaat

SEQ ID NO: 1966892 - DNA, 25 bp, Homo sapien
tgatagatggcaagggcaatgtggg

SEQ ID NO: 1966893 - DNA, 25 bp, Homo sapien
tttccccacacaatcttccaccttg

SEQ ID NO: 1966894 - DNA, 25 bp, Homo sapien
tgcattgtgatagatggcaagggca

SEQ ID NO: 1966895 - DNA, 25 bp, Homo sapien
gggtaccgctatgctcctgacggtc

SEQ ID NO: 1966896 - DNA, 25 bp, Homo sapien
tgacggtcccactttcgtctaccaa

SEQ ID NO: 1966897 - DNA, 25 bp, Homo sapien
caatgcttgctcgtggcatatggtc

SEQ ID NO: 1966898 - DNA, 25 bp, Homo sapien
tctaccaatgggaaatagccaatgc

SEQ ID NO: 1966899 - DNA, 25 bp, Homo sapien
catcaccgctgactggatcaatagc

SEQ ID NO: 1966900 - DNA, 25 bp, Homo sapien
taatcgagattctctacagcagccc

SEQ ID NO: 1966901 - DNA, 25 bp, Homo sapien
gatcaatagctgtgttttggcccca

SEQ ID NO: 1966902 - DNA, 25 bp, Homo sapien
caaatgccagtatccatcaccgctg

SEQ ID NO: 1966903 - DNA, 25 bp, Homo sapien
ttcaaagggcatccgctgtaggctc

SEQ ID NO: 1966904 - DNA, 25 bp, Homo sapien
agggcatccgctgtaggctcagaga

SEQ ID NO: 1966905 - DNA, 25 bp, Homo sapien
gtgttcaaagggcatccgctgtagg

SEQ ID NO: 1966906 - DNA, 25 bp, Homo sapien
aaagggcatccgctgtaggctcaga

SEQ ID NO: 1966907 - DNA, 25 bp, Homo sapien
acaggggcagatgcaaccaagagct

SEQ ID NO: 1966908 - DNA, 25 bp, Homo sapien
caagagctcccaggggcaatgccgg

SEQ ID NO: 1966909 - DNA, 25 bp, Homo sapien
ccgggtgaaggcagaacaacatgcc

SEQ ID NO: 1966910 - DNA, 25 bp, Homo sapien
tcccaggggcaatgccgggtgaagg

SEQ ID NO: 1966911 - DNA, 25 bp, Homo sapien
agtcagagccttcagaacttccttc

SEQ ID NO: 1966912 - DNA, 25 bp, Homo sapien
cggaagtcagagccttcagaacttc

SEQ ID NO: 1966913 - DNA, 25 bp, Homo sapien
gaagtcagagccttcagaacttcct

SEQ ID NO: 1966914 - DNA, 25 bp, Homo sapien
gtcagagccttcagaacttccttca

SEQ ID NO: 1966915 - DNA, 25 bp, Homo sapien
ctggagtttgcccagtccagatgcc

SEQ ID NO: 1966916 - DNA, 25 bp, Homo sapien
gccggggtggttggctcattcctgt

SEQ ID NO: 1966917 - DNA, 25 bp, Homo sapien
ggacactggagtttgcccagtccag

SEQ ID NO: 1966918 - DNA, 25 bp, Homo sapien
gagggccggggtggttggctcattc

SEQ ID NO: 1966919 - DNA, 25 bp, Homo sapien
ttatatctgtttcccggacgaccga

SEQ ID NO: 1966920 - DNA, 25 bp, Homo sapien
accaggagggccgtccactctctca

SEQ ID NO: 1966921 - DNA, 25 bp, Homo sapien
ggacaccaggagggccgtccactct

SEQ ID NO: 1966922 - DNA, 25 bp, Homo sapien
tcccggacgaccgaggaggacacca

SEQ ID NO: 1966923 - DNA, 25 bp, Homo sapien
tccgttttgtgtttccaaagacagc

SEQ ID NO: 1966924 - DNA, 25 bp, Homo sapien
agacagcaggtgatgaacaagagga

SEQ ID NO: 1966925 - DNA, 25 bp, Homo sapien
tgccggagacgcctcctccgttttg

SEQ ID NO: 1966926 - DNA, 25 bp, Homo sapien
acagcaggtgatgaacaagaggaga

SEQ ID NO: 1966927 - DNA, 25 bp, Homo sapien
tcgatcatcatcagaggcggctcca

SEQ ID NO: 1966928 - DNA, 25 bp, Homo sapien
tggctgcttggctgataggatcacc

SEQ ID NO: 1966929 - DNA, 25 bp, Homo sapien
tgcctggtgtcaggcgggcgctgat

SEQ ID NO: 1966930 - DNA, 25 bp, Homo sapien
ggatcaccacagctcgatcatcatc

SEQ ID NO: 1966931 - DNA, 25 bp, Homo sapien
gatgaacgccgtgtgccctgaccca

SEQ ID NO: 1966932 - DNA, 25 bp, Homo sapien
ccaccctggccaatgcctggcactg

SEQ ID NO: 1966933 - DNA, 25 bp, Homo sapien
ttctgcggttggatgaacgccgtgt

SEQ ID NO: 1966934 - DNA, 25 bp, Homo sapien
cggtgcggttgccaaggagcgtctt

SEQ ID NO: 1966935 - DNA, 25 bp, Homo sapien
ccgctcttcctggttgatcccatca

SEQ ID NO: 1966936 - DNA, 25 bp, Homo sapien
ctcttcctggttgatcccatcaaag

SEQ ID NO: 1966937 - DNA, 25 bp, Homo sapien
gctcttcctggttgatcccatcaaa

SEQ ID NO: 1966938 - DNA, 25 bp, Homo sapien
tttccgctcttcctggttgatccca

SEQ ID NO: 1966939 - DNA, 25 bp, Homo sapien
tttaaggactcggaggttccacagc

SEQ ID NO: 1966940 - DNA, 25 bp, Homo sapien
tacacatccccttgggaaacacgga

SEQ ID NO: 1966941 - DNA, 25 bp, Homo sapien
taaggactcggaggttccacagctc

SEQ ID NO: 1966942 - DNA, 25 bp, Homo sapien
cacggattccgcattgggtgacagg

SEQ ID NO: 1966943 - DNA, 25 bp, Homo sapien
tgtaatgaaggagactgttcggcca

SEQ ID NO: 1966944 - DNA, 25 bp, Homo sapien
acatggaagtgctcagtgtgcgcct

SEQ ID NO: 1966945 - DNA, 25 bp, Homo sapien
ggatttagccctgaactcagcggga

SEQ ID NO: 1966946 - DNA, 25 bp, Homo sapien
caattctagctgtgccggtgctgct

SEQ ID NO: 1966947 - DNA, 25 bp, Homo sapien
tggtggcaaggccacatccaggagc

SEQ ID NO: 1966948 - DNA, 25 bp, Homo sapien
atccaggagcctctttttcttctca

SEQ ID NO: 1966949 - DNA, 25 bp, Homo sapien
ggagcctctttttcttctcacctgc

SEQ ID NO: 1966950 - DNA, 25 bp, Homo sapien
atggtggcaaggccacatccaggag

SEQ ID NO: 1966951 - DNA, 25 bp, Homo sapien
gctaggatttccagggaagaagagg

SEQ ID NO: 1966952 - DNA, 25 bp, Homo sapien
ccactgctaggatttccagggaaga

SEQ ID NO: 1966953 - DNA, 25 bp, Homo sapien
ttatgccactgctaggatttccagg

SEQ ID NO: 1966954 - DNA, 25 bp, Homo sapien
tgccactgctaggatttccagggaa

SEQ ID NO: 1966955 - DNA, 25 bp, Homo sapien
gactcgctgagcacctccgcaaggg

SEQ ID NO: 1966956 - DNA, 25 bp, Homo sapien
cacgctggctgcacgtgcagaccat

SEQ ID NO: 1966957 - DNA, 25 bp, Homo sapien
cctgcccacttctctttagctcctt

SEQ ID NO: 1966958 - DNA, 25 bp, Homo sapien
tgcagaccatggactcgctgagcac

SEQ ID NO: 1966959 - DNA, 25 bp, Homo sapien
agttttgccacctcgcattttgtcg

SEQ ID NO: 1966960 - DNA, 25 bp, Homo sapien
gtcggtagttgtgaaaaatgcagtc

SEQ ID NO: 1966961 - DNA, 25 bp, Homo sapien
ctgcagaaaggtgcagatgccctgg

SEQ ID NO: 1966962 - DNA, 25 bp, Homo sapien
gatggcgtgctgcttccgaatcctg

SEQ ID NO: 1966963 - DNA, 25 bp, Homo sapien
tgtaaaaagatgaacaggcccaaac

SEQ ID NO: 1966964 - DNA, 25 bp, Homo sapien
gatgaacaggcccaaacacaaggtg

SEQ ID NO: 1966965 - DNA, 25 bp, Homo sapien
gccttttaacacgatgccatctggg

SEQ ID NO: 1966966 - DNA, 25 bp, Homo sapien
gcccaaacacaaggtgtgcctttta

SEQ ID NO: 1966967 - DNA, 25 bp, Homo sapien
agcagggtcacccttcagtgccaaa

SEQ ID NO: 1966968 - DNA, 25 bp, Homo sapien
ggtcacccttcagtgccaaagagtg

SEQ ID NO: 1966969 - DNA, 25 bp, Homo sapien
agggtcacccttcagtgccaaagag

SEQ ID NO: 1966970 - DNA, 25 bp, Homo sapien
gcagggtcacccttcagtgccaaag

SEQ ID NO: 1966971 - DNA, 25 bp, Homo sapien
ggataaccggtatgggatctccagc

SEQ ID NO: 1966972 - DNA, 25 bp, Homo sapien
gaaacgtaccagtgctctggtgcca

SEQ ID NO: 1966973 - DNA, 25 bp, Homo sapien
gatctccagcatcgctgaaactggg

SEQ ID NO: 1966974 - DNA, 25 bp, Homo sapien
gacctgggagtgcagtacaagacga

SEQ ID NO: 1966975 - DNA, 25 bp, Homo sapien
tccaaatcatggactaaggcaggcc

SEQ ID NO: 1966976 - DNA, 25 bp, Homo sapien
aatcatggactaaggcaggccctgc

SEQ ID NO: 1966977 - DNA, 25 bp, Homo sapien
tgcgcggaggagaacggaatccaaa

SEQ ID NO: 1966978 - DNA, 25 bp, Homo sapien
gaggagaacggaatccaaatcatgg

SEQ ID NO: 1966979 - DNA, 25 bp, Homo sapien
gaaggtcggctttccacgacacagc

SEQ ID NO: 1966980 - DNA, 25 bp, Homo sapien
tcggcaggaccttgggagctcggga

SEQ ID NO: 1966981 - DNA, 25 bp, Homo sapien
acagcgaggccaagaacctggtcct

SEQ ID NO: 1966982 - DNA, 25 bp, Homo sapien
ctgcagggcggctggtcggcaggac

SEQ ID NO: 1966983 - DNA, 25 bp, Homo sapien
cctgactaaagaacttgaaaggagg

SEQ ID NO: 1966984 - DNA, 25 bp, Homo sapien
gcgtgtcctcatggttgactgtgaa

SEQ ID NO: 1966985 - DNA, 25 bp, Homo sapien
gaaaggaggcctagcgtgtcctcat

SEQ ID NO: 1966986 - DNA, 25 bp, Homo sapien
gactgtgaagggaattcctcgtaca

SEQ ID NO: 1966987 - DNA, 25 bp, Homo sapien
ttcccaagagggtggtcaccttctg

SEQ ID NO: 1966988 - DNA, 25 bp, Homo sapien
tgggatcagagtcttcctgggttcc

SEQ ID NO: 1966989 - DNA, 25 bp, Homo sapien
tcctgggttcccaagagggtggtca

SEQ ID NO: 1966990 - DNA, 25 bp, Homo sapien
cagagtcttcctgggttcccaagag

SEQ ID NO: 1966991 - DNA, 25 bp, Homo sapien
aggcatcctgcaagggctgctggac

SEQ ID NO: 1966992 - DNA, 25 bp, Homo sapien
cagccgggccgaccaggaccaacat

SEQ ID NO: 1966993 - DNA, 25 bp, Homo sapien
gaggggcccctttagtgccagcagc

SEQ ID NO: 1966994 - DNA, 25 bp, Homo sapien
ttcccagcatgaagcaggcatcctg

SEQ ID NO: 1966995 - DNA, 25 bp, Homo sapien
agcaagacagcgcttccgagtcaga

SEQ ID NO: 1966996 - DNA, 25 bp, Homo sapien
gacaggccaaccaagtcattaccct

SEQ ID NO: 1966997 - DNA, 25 bp, Homo sapien
ttccgagtcagacaggccaaccaag

SEQ ID NO: 1966998 - DNA, 25 bp, Homo sapien
agcgcttccgagtcagacaggccaa

SEQ ID NO: 1966999 - DNA, 25 bp, Homo sapien
gcagccgcagcaacaactaaattgg

SEQ ID NO: 1967000 - DNA, 25 bp, Homo sapien
cacaaagatgtcagctcagcagagt

SEQ ID NO: 1967001 - DNA, 25 bp, Homo sapien
ttcatggaccgaaaccaccagttct

SEQ ID NO: 1967002 - DNA, 25 bp, Homo sapien
caatgtcgtggccaggcattccaaa

SEQ ID NO: 1967003 - DNA, 25 bp, Homo sapien
gatttgttgacacccaactgcccag

SEQ ID NO: 1967004 - DNA, 25 bp, Homo sapien
aactaaggcctctctgtcttggtag

SEQ ID NO: 1967005 - DNA, 25 bp, Homo sapien
aaatgaccatattgctacctccaaa

SEQ ID NO: 1967006 - DNA, 25 bp, Homo sapien
gaaagccactgtacagctcaaaata

SEQ ID NO: 1967007 - DNA, 25 bp, Homo sapien
tcttggagtcctgagtcagaagagc

SEQ ID NO: 1967008 - DNA, 25 bp, Homo sapien
gcccaggaaagcacacacggtcaag

SEQ ID NO: 1967009 - DNA, 25 bp, Homo sapien
aagcacacacggtcaaggacttccg

SEQ ID NO: 1967010 - DNA, 25 bp, Homo sapien
aaacagcctctagtcgttgggtcaa

SEQ ID NO: 1967011 - DNA, 25 bp, Homo sapien
ctttcaatgtgagcggagtgtgccc

SEQ ID NO: 1967012 - DNA, 25 bp, Homo sapien
cttgagccgactctgcacaatacta

SEQ ID NO: 1967013 - DNA, 25 bp, Homo sapien
ttgagccgactctgcacaatactaa

SEQ ID NO: 1967014 - DNA, 25 bp, Homo sapien
tactaatgcagtctttcaatgtgag

SEQ ID NO: 1967015 - DNA, 25 bp, Homo sapien
tcaaaccaggttgaatgcaggtttc

SEQ ID NO: 1967016 - DNA, 25 bp, Homo sapien
gagagtcagtcaaaccaggttgaat

SEQ ID NO: 1967017 - DNA, 25 bp, Homo sapien
gccagagagtcagtcaaaccaggtt

SEQ ID NO: 1967018 - DNA, 25 bp, Homo sapien
cagtcaaaccaggttgaatgcaggt

SEQ ID NO: 1967019 - DNA, 25 bp, Homo sapien
ctcatgacctcgtgtacttttgcac

SEQ ID NO: 1967020 - DNA, 25 bp, Homo sapien
tcatgacctcgtgtacttttgcact

SEQ ID NO: 1967021 - DNA, 25 bp, Homo sapien
acttttgcactggagtcgctgaaga

SEQ ID NO: 1967022 - DNA, 25 bp, Homo sapien
ttgcactggagtcgctgaagagggc

SEQ ID NO: 1967023 - DNA, 25 bp, Homo sapien
gcactacaggcacgaggatgcagga

SEQ ID NO: 1967024 - DNA, 25 bp, Homo sapien
tctctccttgacacctagacattcg

SEQ ID NO: 1967025 - DNA, 25 bp, Homo sapien
cccagggtgccgtagacatggcttg

SEQ ID NO: 1967026 - DNA, 25 bp, Homo sapien
cctagacattcgaaggcccttggaa

SEQ ID NO: 1967027 - DNA, 25 bp, Homo sapien
cagccaatctgaagagccccaggtc

SEQ ID NO: 1967028 - DNA, 25 bp, Homo sapien
atctgaagagccccaggtctggatg

SEQ ID NO: 1967029 - DNA, 25 bp, Homo sapien
tctgaagagccccaggtctggatgg

SEQ ID NO: 1967030 - DNA, 25 bp, Homo sapien
gaagagccccaggtctggatgggac

SEQ ID NO: 1967031 - DNA, 25 bp, Homo sapien
tgtctatgccacaagagagagggtg

SEQ ID NO: 1967032 - DNA, 25 bp, Homo sapien
tgggagcatgccctcttcccgcttt

SEQ ID NO: 1967033 - DNA, 25 bp, Homo sapien
aggtgagaggataagagctctgtct

SEQ ID NO: 1967034 - DNA, 25 bp, Homo sapien
gagaggataagagctctgtctatgc

SEQ ID NO: 1967035 - DNA, 25 bp, Homo sapien
cttttggaatgtatggcaggagcaa

SEQ ID NO: 1967036 - DNA, 25 bp, Homo sapien
ttttggaatgtatggcaggagcaat

SEQ ID NO: 1967037 - DNA, 25 bp, Homo sapien
tttggaatgtatggcaggagcaatc

SEQ ID NO: 1967038 - DNA, 25 bp, Homo sapien
ttggaatgtatggcaggagcaatca

SEQ ID NO: 1967039 - DNA, 25 bp, Homo sapien
cattgcagatcgtcttggaggtgga

SEQ ID NO: 1967040 - DNA, 25 bp, Homo sapien
tccccattgcagatcgtcttggagg

SEQ ID NO: 1967041 - DNA, 25 bp, Homo sapien
cctccccattgcagatcgtcttgga

SEQ ID NO: 1967042 - DNA, 25 bp, Homo sapien
gaggtggaggcctgttgagccacag

SEQ ID NO: 1967043 - DNA, 25 bp, Homo sapien
tagatttggtgagttgtgtatgcac

SEQ ID NO: 1967044 - DNA, 25 bp, Homo sapien
caccaatgtagatttggtgagttgt

SEQ ID NO: 1967045 - DNA, 25 bp, Homo sapien
tgagttgtgtatgcacatagaaacc

SEQ ID NO: 1967046 - DNA, 25 bp, Homo sapien
gtgtatgcacatagaaacctttatc

SEQ ID NO: 1967047 - DNA, 25 bp, Homo sapien
ggctcatcagacttgtcattccctt

SEQ ID NO: 1967048 - DNA, 25 bp, Homo sapien
ggcactgcttggtatatgttgacga

SEQ ID NO: 1967049 - DNA, 25 bp, Homo sapien
tatatgttgacgattccagatcggg

SEQ ID NO: 1967050 - DNA, 25 bp, Homo sapien
gcacagtgatagctctggataaggc

SEQ ID NO: 1967051 - DNA, 25 bp, Homo sapien
gggcactagcctgatgcacagtgat

SEQ ID NO: 1967052 - DNA, 25 bp, Homo sapien
cttgtgtacagtgatggttccagat

SEQ ID NO: 1967053 - DNA, 25 bp, Homo sapien
ttgtgtacagtgatggttccagatg

SEQ ID NO: 1967054 - DNA, 25 bp, Homo sapien
agtgatggttccagatgaggtgctt

SEQ ID NO: 1967055 - DNA, 25 bp, Homo sapien
gatggttccagatgaggtgcttgcc

SEQ ID NO: 1967056 - DNA, 25 bp, Homo sapien
acggttccagatcaggcaccgactc

SEQ ID NO: 1967057 - DNA, 25 bp, Homo sapien
caggcaccgactcgtgtacagtgac

SEQ ID NO: 1967058 - DNA, 25 bp, Homo sapien
cgactcgtgtacagtgacggttcca

SEQ ID NO: 1967059 - DNA, 25 bp, Homo sapien
cggttccagatcaggcaccgactcg

SEQ ID NO: 1967060 - DNA, 25 bp, Homo sapien
tctatgctcatgtccgtaggtgcta

SEQ ID NO: 1967061 - DNA, 25 bp, Homo sapien
tgtacttctatgctcatgtccgtag

SEQ ID NO: 1967062 - DNA, 25 bp, Homo sapien
catgtccgtaggtgctagacttttc

SEQ ID NO: 1967063 - DNA, 25 bp, Homo sapien
actgtgtacttctatgctcatgtcc

SEQ ID NO: 1967064 - DNA, 25 bp, Homo sapien
acagagtcaggatcacacacgtcac

SEQ ID NO: 1967065 - DNA, 25 bp, Homo sapien
ggatcacacacgtcactgtctttcg

SEQ ID NO: 1967066 - DNA, 25 bp, Homo sapien
caagggtcaacgacaggcatggagc

SEQ ID NO: 1967067 - DNA, 25 bp, Homo sapien
ttgtccctctggaaggccgtcaagg

SEQ ID NO: 1967068 - DNA, 25 bp, Homo sapien
ttggataggtgttccctccgaggcc

SEQ ID NO: 1967069 - DNA, 25 bp, Homo sapien
cacaaagtgattcggcctggagtcc

SEQ ID NO: 1967070 - DNA, 25 bp, Homo sapien
caacggaaggaactgtgtgagcgca

SEQ ID NO: 1967071 - DNA, 25 bp, Homo sapien
caagtgggctctaatcaagtgtgac

SEQ ID NO: 1967072 - DNA, 25 bp, Homo sapien
aattgcgactgaattacaatcaaac

SEQ ID NO: 1967073 - DNA, 25 bp, Homo sapien
aaattgcgactgaattacaatcaaa

SEQ ID NO: 1967074 - DNA, 25 bp, Homo sapien
agaagccgcggggagggcctgccgg

SEQ ID NO: 1967075 - DNA, 25 bp, Homo sapien
gaagccgcggggagggcctgccggc

SEQ ID NO: 1967076 - DNA, 25 bp, Homo sapien
cagaagccgcggggagggcctgccg

SEQ ID NO: 1967077 - DNA, 25 bp, Homo sapien
cactgcacatccctcgaatgcgggt

SEQ ID NO: 1967078 - DNA, 25 bp, Homo sapien
cgctaggctgttagtcctttccctg

SEQ ID NO: 1967079 - DNA, 25 bp, Homo sapien
ttatcaatatgcgacgacgtcgcta

SEQ ID NO: 1967080 - DNA, 25 bp, Homo sapien
tgtggtgcccgctgttgtgacatcc

SEQ ID NO: 1967081 - DNA, 25 bp, Homo sapien
ctcctcgtttttctttggtctgttg

SEQ ID NO: 1967082 - DNA, 25 bp, Homo sapien
tggtcgggtttggaatagccgttca

SEQ ID NO: 1967083 - DNA, 25 bp, Homo sapien
ttggaatagccgttcatctgcaggt

SEQ ID NO: 1967084 - DNA, 25 bp, Homo sapien
tctgcaggttatcattcgtatttcc

SEQ ID NO: 1967085 - DNA, 25 bp, Homo sapien
gttcatctgcaggttatcattcgta

SEQ ID NO: 1967086 - DNA, 25 bp, Homo sapien
aagcccgcgggtgtctgagcgaggg

SEQ ID NO: 1967087 - DNA, 25 bp, Homo sapien
ccgcgggtgtctgagcgagggccct

SEQ ID NO: 1967088 - DNA, 25 bp, Homo sapien
tcacaggaagcccgcgggtgtctga

SEQ ID NO: 1967089 - DNA, 25 bp, Homo sapien
ggaagcccgcgggtgtctgagcgag

SEQ ID NO: 1967090 - DNA, 25 bp, Homo sapien
ctgatccccggggaaccatcctgaa

SEQ ID NO: 1967091 - DNA, 25 bp, Homo sapien
gatccacgggccgtttctgatcccc

SEQ ID NO: 1967092 - DNA, 25 bp, Homo sapien
tgaaggtctcctctactgctggcat

SEQ ID NO: 1967093 - DNA, 25 bp, Homo sapien
ggtgcctggatccacgggccgtttc

SEQ ID NO: 1967094 - DNA, 25 bp, Homo sapien
tggaatgcagattttgcgggtaatg

SEQ ID NO: 1967095 - DNA, 25 bp, Homo sapien
actcccataggtgaccaagacattg

SEQ ID NO: 1967096 - DNA, 25 bp, Homo sapien
cacaggagtggttaggtttgaagaa

SEQ ID NO: 1967097 - DNA, 25 bp, Homo sapien
cgggtaatggcaactcccataggtg

SEQ ID NO: 1967098 - DNA, 25 bp, Homo sapien
gctgttgctggatgcaaggtcaggg

SEQ ID NO: 1967099 - DNA, 25 bp, Homo sapien
tgtgggtgcatgtggaggcagccac

SEQ ID NO: 1967100 - DNA, 25 bp, Homo sapien
ccacagaattatgcagattgtccac

SEQ ID NO: 1967101 - DNA, 25 bp, Homo sapien
caaggtcagggttgctgagcatctg

SEQ ID NO: 1967102 - DNA, 25 bp, Homo sapien
agggttctcccgttcctctgcagca

SEQ ID NO: 1967103 - DNA, 25 bp, Homo sapien
ggttctcccgttcctctgcagcaat

SEQ ID NO: 1967104 - DNA, 25 bp, Homo sapien
caatgatccactcgttagggttttt

SEQ ID NO: 1967105 - DNA, 25 bp, Homo sapien
cctctgcagcaatgatccactcgtt

SEQ ID NO: 1967106 - DNA, 25 bp, Homo sapien
gggagcgaggctgggatgtcattgt

SEQ ID NO: 1967107 - DNA, 25 bp, Homo sapien
tcattgtgctctgcctggttactgc

SEQ ID NO: 1967108 - DNA, 25 bp, Homo sapien
cgaggctgggatgtcattgtgctct

SEQ ID NO: 1967109 - DNA, 25 bp, Homo sapien
tctgcctggttactgcacagccgac

SEQ ID NO: 1967110 - DNA, 25 bp, Homo sapien
atttgcacagttgaatgtagtaaag

SEQ ID NO: 1967111 - DNA, 25 bp, Homo sapien
ctatttgcacagttgaatgtagtaa

SEQ ID NO: 1967112 - DNA, 25 bp, Homo sapien
tatttgcacagttgaatgtagtaaa

SEQ ID NO: 1967113 - DNA, 25 bp, Homo sapien
tagtgtgatgttggcatctccagcc

SEQ ID NO: 1967114 - DNA, 25 bp, Homo sapien
acactatccctacactcagccacgg

SEQ ID NO: 1967115 - DNA, 25 bp, Homo sapien
actcagccacggcataggctcctgt

SEQ ID NO: 1967116 - DNA, 25 bp, Homo sapien
ggcataggctcctgttaacacagcc

SEQ ID NO: 1967117 - DNA, 25 bp, Homo sapien
ataaacaggcaattaggttcctctg

SEQ ID NO: 1967118 - DNA, 25 bp, Homo sapien
caggcaattaggttcctctgcattt

SEQ ID NO: 1967119 - DNA, 25 bp, Homo sapien
caattaggttcctctgcatttttgg

SEQ ID NO: 1967120 - DNA, 25 bp, Homo sapien
attaggttcctctgcatttttggtc

SEQ ID NO: 1967121 - DNA, 25 bp, Homo sapien
ttagctcaattgagatggctcctca

SEQ ID NO: 1967122 - DNA, 25 bp, Homo sapien
tagctcaattgagatggctcctcac

SEQ ID NO: 1967123 - DNA, 25 bp, Homo sapien
actctgcagttttgaggaagccgag

SEQ ID NO: 1967124 - DNA, 25 bp, Homo sapien
gaggaagccgagcataaaatgcact

SEQ ID NO: 1967125 - DNA, 25 bp, Homo sapien
cgagcataaaatgcactctcgcact

SEQ ID NO: 1967126 - DNA, 25 bp, Homo sapien
tctgcagttttgaggaagccgagca

SEQ ID NO: 1967127 - DNA, 25 bp, Homo sapien
atgtcaccaagaccattcttcaagg

SEQ ID NO: 1967128 - DNA, 25 bp, Homo sapien
cattcttcaaggcaccatagaaact

SEQ ID NO: 1967129 - DNA, 25 bp, Homo sapien
tccgtctccaccaacgcattttctg

SEQ ID NO: 1967130 - DNA, 25 bp, Homo sapien
tgagcatgtcaccaagaccattctt

SEQ ID NO: 1967131 - DNA, 25 bp, Homo sapien
tgcccgagaacagctggcgtttttg

SEQ ID NO: 1967132 - DNA, 25 bp, Homo sapien
ccgagaacagctggcgtttttgtgt

SEQ ID NO: 1967133 - DNA, 25 bp, Homo sapien
aacagctggcgtttttgtgtctgct

SEQ ID NO: 1967134 - DNA, 25 bp, Homo sapien
tgccactccccaaacgctcccactg

SEQ ID NO: 1967135 - DNA, 25 bp, Homo sapien
atgctgctcccagaacaccttcttg

SEQ ID NO: 1967136 - DNA, 25 bp, Homo sapien
ctttgtcagggcaaaaatgagactt

SEQ ID NO: 1967137 - DNA, 25 bp, Homo sapien
tgcatctttgcaatgtcatgctgct

SEQ ID NO: 1967138 - DNA, 25 bp, Homo sapien
tgccctttggagaacctccgtgaat

SEQ ID NO: 1967139 - DNA, 25 bp, Homo sapien
tgcttttgatatcccgttggatgag

SEQ ID NO: 1967140 - DNA, 25 bp, Homo sapien
gttggatgaggggacgtgttcggcg

SEQ ID NO: 1967141 - DNA, 25 bp, Homo sapien
tgaggggacgtgttcggcgttggga

SEQ ID NO: 1967142 - DNA, 25 bp, Homo sapien
ggctgcttttgatatcccgttggat

SEQ ID NO: 1967143 - DNA, 25 bp, Homo sapien
aatcttgtgacatgagagccaagaa

SEQ ID NO: 1967144 - DNA, 25 bp, Homo sapien
tcttgtgacatgagagccaagaaaa

SEQ ID NO: 1967145 - DNA, 25 bp, Homo sapien
gagacttgtgcagagtacaccgcac

SEQ ID NO: 1967146 - DNA, 25 bp, Homo sapien
agagccaagaaaacctcaacggagg

SEQ ID NO: 1967147 - DNA, 25 bp, Homo sapien
tgtgatgttccccaaccctcttgtg

SEQ ID NO: 1967148 - DNA, 25 bp, Homo sapien
ttgtgaacaagctcgtgccgccggt

SEQ ID NO: 1967149 - DNA, 25 bp, Homo sapien
aggatgctttgatgacgagaagcac

SEQ ID NO: 1967150 - DNA, 25 bp, Homo sapien
cgggatgcagaggaccctgaatgtg

SEQ ID NO: 1967151 - DNA, 25 bp, Homo sapien
cccagtgtcaagagcggctgagatg

SEQ ID NO: 1967152 - DNA, 25 bp, Homo sapien
ttttagcacaaggagactgactatg

SEQ ID NO: 1967153 - DNA, 25 bp, Homo sapien
ggttctcatcctaggcccatgttgc

SEQ ID NO: 1967154 - DNA, 25 bp, Homo sapien
gagagaggacagcaatggcaccaaa

SEQ ID NO: 1967155 - DNA, 25 bp, Homo sapien
cttggaagtcagaggagagctttct

SEQ ID NO: 1967156 - DNA, 25 bp, Homo sapien
ggcagtattgatgggaggcggccag

SEQ ID NO: 1967157 - DNA, 25 bp, Homo sapien
gacttggaagtcagaggagagcttt

SEQ ID NO: 1967158 - DNA, 25 bp, Homo sapien
gccaggtcctttctaatgtactgga

SEQ ID NO: 1967159 - DNA, 25 bp, Homo sapien
atagtaattttcttctaaaacatat

SEQ ID NO: 1967160 - DNA, 25 bp, Homo sapien
tatagtaattttcttctaaaacata

SEQ ID NO: 1967161 - DNA, 25 bp, Homo sapien
ttttcttctaaaacatattttatga

SEQ ID NO: 1967162 - DNA, 25 bp, Homo sapien
cttctaaaacatattttatgattca

SEQ ID NO: 1967163 - DNA, 25 bp, Homo sapien
gagtccatcccgaagattccttggg

SEQ ID NO: 1967164 - DNA, 25 bp, Homo sapien
taatgcgcagtgaggttaagaatgc

SEQ ID NO: 1967165 - DNA, 25 bp, Homo sapien
cattgagatgcatgttaatgcgcag

SEQ ID NO: 1967166 - DNA, 25 bp, Homo sapien
tccttgggtcaatatgcgtgttggc

SEQ ID NO: 1967167 - DNA, 25 bp, Homo sapien
acacaggtaactaaataggtctgca

SEQ ID NO: 1967168 - DNA, 25 bp, Homo sapien
taccgctaatgaccaacgctaatgt

SEQ ID NO: 1967169 - DNA, 25 bp, Homo sapien
aacactgtactgagatgtctaccgc

SEQ ID NO: 1967170 - DNA, 25 bp, Homo sapien
taggtctgcatataagtctgtatcc

SEQ ID NO: 1967171 - DNA, 25 bp, Homo sapien
caaggctggtgattgatgacactcc

SEQ ID NO: 1967172 - DNA, 25 bp, Homo sapien
tgttctcgtatgtaacaaatgaagg

SEQ ID NO: 1967173 - DNA, 25 bp, Homo sapien
gcaaaagccgtctgtcaaggctggt

SEQ ID NO: 1967174 - DNA, 25 bp, Homo sapien
tccgggagactttatctgatgggtc

SEQ ID NO: 1967175 - DNA, 25 bp, Homo sapien
gcttgccacgcttcaggagttttcg

SEQ ID NO: 1967176 - DNA, 25 bp, Homo sapien
gagttttcgtgaataaacagtggta

SEQ ID NO: 1967177 - DNA, 25 bp, Homo sapien
aacagtggtatcaatgggccgccag

SEQ ID NO: 1967178 - DNA, 25 bp, Homo sapien
caattcatgcactcttaatgagatg

SEQ ID NO: 1967179 - DNA, 25 bp, Homo sapien
ttgtcagtttggaagtgcaggccat

SEQ ID NO: 1967180 - DNA, 25 bp, Homo sapien
catgcaggaagcgttgtcagtttgg

SEQ ID NO: 1967181 - DNA, 25 bp, Homo sapien
aagcatgcaggaagcgttgtcagtt

SEQ ID NO: 1967182 - DNA, 25 bp, Homo sapien
gaagcgttgtcagtttggaagtgca

SEQ ID NO: 1967183 - DNA, 25 bp, Homo sapien
ctgaggagggcgcaggaagccacca

SEQ ID NO: 1967184 - DNA, 25 bp, Homo sapien
ggaggagcgctgaggagggcgcagg

SEQ ID NO: 1967185 - DNA, 25 bp, Homo sapien
tgaggagggcgcaggaagccaccaa

SEQ ID NO: 1967186 - DNA, 25 bp, Homo sapien
gagcgctgaggagggcgcaggaagc

SEQ ID NO: 1967187 - DNA, 25 bp, Homo sapien
aaagacttgctgcagagaagttcac

SEQ ID NO: 1967188 - DNA, 25 bp, Homo sapien
ccgggaacgtctcattaaagacttg

SEQ ID NO: 1967189 - DNA, 25 bp, Homo sapien
caagctgcgtctaaaaggacccggg

SEQ ID NO: 1967190 - DNA, 25 bp, Homo sapien
tcaacctctggatctacaagctgcg

SEQ ID NO: 1967191 - DNA, 25 bp, Homo sapien
cagcctcctgaaagcggcctggtgt

SEQ ID NO: 1967192 - DNA, 25 bp, Homo sapien
gagcagacagtgacggggagcttct

SEQ ID NO: 1967193 - DNA, 25 bp, Homo sapien
acagcctcctgaaagcggcctggtg

SEQ ID NO: 1967194 - DNA, 25 bp, Homo sapien
ccacagcctcctgaaagcggcctgg

SEQ ID NO: 1967195 - DNA, 25 bp, Homo sapien
cccctctgtcgggtggcagcaggta

SEQ ID NO: 1967196 - DNA, 25 bp, Homo sapien
gttgctccccctctgtcgggtggca

SEQ ID NO: 1967197 - DNA, 25 bp, Homo sapien
gtgcacctgtggagggttgctcccc

SEQ ID NO: 1967198 - DNA, 25 bp, Homo sapien
tctcagtgcacctgtggagggttgc

SEQ ID NO: 1967199 - DNA, 25 bp, Homo sapien
tcctcagcgatgagcgtgcgctgtc

SEQ ID NO: 1967200 - DNA, 25 bp, Homo sapien
tgctcctcagcgatgagcgtgcgct

SEQ ID NO: 1967201 - DNA, 25 bp, Homo sapien
tccacgtgctcctcagcgatgagcg

SEQ ID NO: 1967202 - DNA, 25 bp, Homo sapien
cacgtgctcctcagcgatgagcgtg

SEQ ID NO: 1967203 - DNA, 25 bp, Homo sapien
ctggggaaacctcctgcagcctcat

SEQ ID NO: 1967204 - DNA, 25 bp, Homo sapien
catattatttgggtagtcttgatat

SEQ ID NO: 1967205 - DNA, 25 bp, Homo sapien
ggaactgggcagtaggcacgatccc

SEQ ID NO: 1967206 - DNA, 25 bp, Homo sapien
gcagtaggcacgatcccgtgccaat

SEQ ID NO: 1967207 - DNA, 25 bp, Homo sapien
gatcccgtgccaattattcatatta

SEQ ID NO: 1967208 - DNA, 25 bp, Homo sapien
taattaatgcgcttcagccttggca

SEQ ID NO: 1967209 - DNA, 25 bp, Homo sapien
ccttggcaccagtaggcgaaaatta

SEQ ID NO: 1967210 - DNA, 25 bp, Homo sapien
tgctaatgaggatctgcaattccag

SEQ ID NO: 1967211 - DNA, 25 bp, Homo sapien
gcaattccagagtgggctcgcataa

SEQ ID NO: 1967212 - DNA, 25 bp, Homo sapien
tagtcacttgcggtacatgaggtcc

SEQ ID NO: 1967213 - DNA, 25 bp, Homo sapien
gtttgacagatgaagcaccgcctag

SEQ ID NO: 1967214 - DNA, 25 bp, Homo sapien
tcttggaaaacattgacgacggcac

SEQ ID NO: 1967215 - DNA, 25 bp, Homo sapien
gacacacggttctggataatgcctg

SEQ ID NO: 1967216 - DNA, 25 bp, Homo sapien
tgtactgtggttgcatcctgggaat

SEQ ID NO: 1967217 - DNA, 25 bp, Homo sapien
cagaacggcaggtataatgtattcc

SEQ ID NO: 1967218 - DNA, 25 bp, Homo sapien
catctcgtgttgtttcttggaagga

SEQ ID NO: 1967219 - DNA, 25 bp, Homo sapien
tcctgggaatgtccatgaccaaaac

SEQ ID NO: 1967220 - DNA, 25 bp, Homo sapien
tggtgtcagacccagacttcttgaa

SEQ ID NO: 1967221 - DNA, 25 bp, Homo sapien
accggcaggacttggtgtcagaccc

SEQ ID NO: 1967222 - DNA, 25 bp, Homo sapien
ctccatggcgaaccggcaggacttg

SEQ ID NO: 1967223 - DNA, 25 bp, Homo sapien
cgaaccggcaggacttggtgtcaga

SEQ ID NO: 1967224 - DNA, 25 bp, Homo sapien
tccatggcgaaccagcaggtaccta

SEQ ID NO: 1967225 - DNA, 25 bp, Homo sapien
ctccatggcgaaccagcaggtacct

SEQ ID NO: 1967226 - DNA, 25 bp, Homo sapien
ccatggcgaaccagcaggtacctac

SEQ ID NO: 1967227 - DNA, 25 bp, Homo sapien
aacacccgtcatcactaacttatta

SEQ ID NO: 1967228 - DNA, 25 bp, Homo sapien
cactggtgctcaacacccgtcatca

SEQ ID NO: 1967229 - DNA, 25 bp, Homo sapien
acttattagatcttgaggcaattag

SEQ ID NO: 1967230 - DNA, 25 bp, Homo sapien
tcactaacttattagatcttgaggc

SEQ ID NO: 1967231 - DNA, 25 bp, Homo sapien
caaatgcattgacacacttcccaca

SEQ ID NO: 1967232 - DNA, 25 bp, Homo sapien
gcaaatgcattgacacacttcccac

SEQ ID NO: 1967233 - DNA, 25 bp, Homo sapien
acagcaaatgcattgacacacttcc

SEQ ID NO: 1967234 - DNA, 25 bp, Homo sapien
cagcaaatgcattgacacacttccc

SEQ ID NO: 1967235 - DNA, 25 bp, Homo sapien
tgtgtgcccagagcgtgtgtctcca

SEQ ID NO: 1967236 - DNA, 25 bp, Homo sapien
gggcattttctttaagctgatggtg

SEQ ID NO: 1967237 - DNA, 25 bp, Homo sapien
cagccacggggcattttctttaagc

SEQ ID NO: 1967238 - DNA, 25 bp, Homo sapien
ttctttaagctgatggtgcatttga

SEQ ID NO: 1967239 - DNA, 25 bp, Homo sapien
caccagggtgtggaagctctgcttc

SEQ ID NO: 1967240 - DNA, 25 bp, Homo sapien
atcagggtcaagtccccatggccac

SEQ ID NO: 1967241 - DNA, 25 bp, Homo sapien
gtcatcagggtcaagtccccatggc

SEQ ID NO: 1967242 - DNA, 25 bp, Homo sapien
ctcggtcatcagggtcaagtcccca

SEQ ID NO: 1967243 - DNA, 25 bp, Homo sapien
atgtgggtctttccacacccctcaa

SEQ ID NO: 1967244 - DNA, 25 bp, Homo sapien
tgggtctttccacacccctcaagga

SEQ ID NO: 1967245 - DNA, 25 bp, Homo sapien
tctggggtacggagctggaatgtgg

SEQ ID NO: 1967246 - DNA, 25 bp, Homo sapien
cctctctggcaggtctggggtacgg

SEQ ID NO: 1967247 - DNA, 25 bp, Homo sapien
gaacaacaaagctcaggcaggctca

SEQ ID NO: 1967248 - DNA, 25 bp, Homo sapien
gcgtcctgaaacagcaacgccaggg

SEQ ID NO: 1967249 - DNA, 25 bp, Homo sapien
cagaagtttcaggtcctagagaaca

SEQ ID NO: 1967250 - DNA, 25 bp, Homo sapien
ctcctccagaataaaacgccgcgaa

SEQ ID NO: 1967251 - DNA, 25 bp, Homo sapien
ctgtctggtggggagaccgctgcat

SEQ ID NO: 1967252 - DNA, 25 bp, Homo sapien
tcactctcaacaggggcactgtctg

SEQ ID NO: 1967253 - DNA, 25 bp, Homo sapien
gtcttcactctcaacaggggcactg

SEQ ID NO: 1967254 - DNA, 25 bp, Homo sapien
gggacacagtcttcactctcaacag

SEQ ID NO: 1967255 - DNA, 25 bp, Homo sapien
gcagattcaacctggtcatcagccc

SEQ ID NO: 1967256 - DNA, 25 bp, Homo sapien
cctgcactcgctgcttccacggtaa

SEQ ID NO: 1967257 - DNA, 25 bp, Homo sapien
tccagccagcttaacgcagattcaa

SEQ ID NO: 1967258 - DNA, 25 bp, Homo sapien
cggtaaccaactctgcttggctcca

SEQ ID NO: 1967259 - DNA, 25 bp, Homo sapien
tgagaccctcgtgccttcaaattct

SEQ ID NO: 1967260 - DNA, 25 bp, Homo sapien
tagaccctgtttaccagggagtgct

SEQ ID NO: 1967261 - DNA, 25 bp, Homo sapien
cccctttctgagaccctcgtgcctt

SEQ ID NO: 1967262 - DNA, 25 bp, Homo sapien
aggcatgcagttggaggtagaccct

SEQ ID NO: 1967263 - DNA, 25 bp, Homo sapien
ggccggtggacagggggtctgagct

SEQ ID NO: 1967264 - DNA, 25 bp, Homo sapien
tctgggtgctggggcgcaaaggctg

SEQ ID NO: 1967265 - DNA, 25 bp, Homo sapien
ggtgctggggcgcaaaggctgtgga

SEQ ID NO: 1967266 - DNA, 25 bp, Homo sapien
ttatctggggtagtcctggccggtg

SEQ ID NO: 1967267 - DNA, 25 bp, Homo sapien
tcctttgccagtgcaccggggcgga

SEQ ID NO: 1967268 - DNA, 25 bp, Homo sapien
cagaggtcacaccccgataacgggt

SEQ ID NO: 1967269 - DNA, 25 bp, Homo sapien
gggcggaggatcgttgtcactgggt

SEQ ID NO: 1967270 - DNA, 25 bp, Homo sapien
gaggatcgttgtcactgggtctctg

SEQ ID NO: 1967271 - DNA, 25 bp, Homo sapien
taattggtgatcaagagggccataa

SEQ ID NO: 1967272 - DNA, 25 bp, Homo sapien
tcaaggcaaatttgaggcctggtca

SEQ ID NO: 1967273 - DNA, 25 bp, Homo sapien
tccattgttcctggttgtgtaattg

SEQ ID NO: 1967274 - DNA, 25 bp, Homo sapien
ggtcatttaagtggtagttccattg

SEQ ID NO: 1967275 - DNA, 25 bp, Homo sapien
tacagggaatgacaggctccaccct

SEQ ID NO: 1967276 - DNA, 25 bp, Homo sapien
agggaatgacaggctccaccctcat

SEQ ID NO: 1967277 - DNA, 25 bp, Homo sapien
catacagggaatgacaggctccacc

SEQ ID NO: 1967278 - DNA, 25 bp, Homo sapien
acagggaatgacaggctccaccctc

SEQ ID NO: 1967279 - DNA, 25 bp, Homo sapien
taattcaatcggctacagaagcaga

SEQ ID NO: 1967280 - DNA, 25 bp, Homo sapien
aagtctgaaggagtagtgggtatta

SEQ ID NO: 1967281 - DNA, 25 bp, Homo sapien
ctggagcctataattcaatcggcta

SEQ ID NO: 1967282 - DNA, 25 bp, Homo sapien
gagtagtgggtattaaggtccagga

SEQ ID NO: 1967283 - DNA, 25 bp, Homo sapien
ttggcaccttgactacctcgggacc

SEQ ID NO: 1967284 - DNA, 25 bp, Homo sapien
gaggaaaaagatagtgatttggcac

SEQ ID NO: 1967285 - DNA, 25 bp, Homo sapien
gtaagttgagtctcttctgttgaca

SEQ ID NO: 1967286 - DNA, 25 bp, Homo sapien
ggcgtttgcatgtaagttgagtctc

SEQ ID NO: 1967287 - DNA, 25 bp, Homo sapien
ctgggccgtggttggagaactgccg

SEQ ID NO: 1967288 - DNA, 25 bp, Homo sapien
tcctgaaggtcggtcttcaagtgtt

SEQ ID NO: 1967289 - DNA, 25 bp, Homo sapien
gtaactgccctgtgttcggcaggtg

SEQ ID NO: 1967290 - DNA, 25 bp, Homo sapien
tgccggagttcgtcagtaactgccc

SEQ ID NO: 1967291 - DNA, 25 bp, Homo sapien
tatttaacaatcacgctctcctggc

SEQ ID NO: 1967292 - DNA, 25 bp, Homo sapien
tccatgtagctggacatttgccaca

SEQ ID NO: 1967293 - DNA, 25 bp, Homo sapien
ggccgtgaacattgatccaatccga

SEQ ID NO: 1967294 - DNA, 25 bp, Homo sapien
ctaagtaaagctagtggccgtgaac

SEQ ID NO: 1967295 - DNA, 25 bp, Homo sapien
gattcgcatttaatgtactgattca

SEQ ID NO: 1967296 - DNA, 25 bp, Homo sapien
tgtactgattcagcttgtctgagcc

SEQ ID NO: 1967297 - DNA, 25 bp, Homo sapien
gggattcgcatttaatgtactgatt

SEQ ID NO: 1967298 - DNA, 25 bp, Homo sapien
gagggattcgcatttaatgtactga

SEQ ID NO: 1967299 - DNA, 25 bp, Homo sapien
agtgcccgtgatccatgcaattcca

SEQ ID NO: 1967300 - DNA, 25 bp, Homo sapien
agaacacagtcatcgtcctgctggg

SEQ ID NO: 1967301 - DNA, 25 bp, Homo sapien
ggacaatggaagacgctgccttcat

SEQ ID NO: 1967302 - DNA, 25 bp, Homo sapien
gagtgggcacagtgcccgtgatcca

SEQ ID NO: 1967303 - DNA, 25 bp, Homo sapien
cacggtccccaaggtgtgggagtct

SEQ ID NO: 1967304 - DNA, 25 bp, Homo sapien
tttcactgagggacgtatggaggat

SEQ ID NO: 1967305 - DNA, 25 bp, Homo sapien
agtctagaatagatgctggtgttgg

SEQ ID NO: 1967306 - DNA, 25 bp, Homo sapien
tggatttcactgagggacgtatgga

SEQ ID NO: 1967307 - DNA, 25 bp, Homo sapien
caccttacagccttttgggctccat

SEQ ID NO: 1967308 - DNA, 25 bp, Homo sapien
tccacgagcttgtctgccacagcaa

SEQ ID NO: 1967309 - DNA, 25 bp, Homo sapien
ctccacgagcttgtctgccacagca

SEQ ID NO: 1967310 - DNA, 25 bp, Homo sapien
cctgtagagtgtggtcctctccaag

SEQ ID NO: 1967311 - DNA, 25 bp, Homo sapien
ggaaaacccattctttgcttggaga

SEQ ID NO: 1967312 - DNA, 25 bp, Homo sapien
ctttgcaagcctgatgtttttcctg

SEQ ID NO: 1967313 - DNA, 25 bp, Homo sapien
tgggatgcgaccttctcagggaaaa

SEQ ID NO: 1967314 - DNA, 25 bp, Homo sapien
ttcttgggaaggacgggccccagca

SEQ ID NO: 1967315 - DNA, 25 bp, Homo sapien
tcttgggaaggacgggccccagcac

SEQ ID NO: 1967316 - DNA, 25 bp, Homo sapien
gctgcgttcttgggaaggacgggcc

SEQ ID NO: 1967317 - DNA, 25 bp, Homo sapien
tggcccgtcatgtggttctctccca

SEQ ID NO: 1967318 - DNA, 25 bp, Homo sapien
cgtcatgtggttctctcccacggga

SEQ ID NO: 1967319 - DNA, 25 bp, Homo sapien
gctggcccgtcatgtggttctctcc

SEQ ID NO: 1967320 - DNA, 25 bp, Homo sapien
atgtggttctctcccacgggatggg

SEQ ID NO: 1967321 - DNA, 25 bp, Homo sapien
cgtgtggtcactcggggccccaacg

SEQ ID NO: 1967322 - DNA, 25 bp, Homo sapien
ttccgtgtggtcactcggggcccca

SEQ ID NO: 1967323 - DNA, 25 bp, Homo sapien
ccccaacgcttaggctctggtggac

SEQ ID NO: 1967324 - DNA, 25 bp, Homo sapien
gggccccaacgcttaggctctggtg

SEQ ID NO: 1967325 - DNA, 25 bp, Homo sapien
ggcagcgccgtctccctctggtgag

SEQ ID NO: 1967326 - DNA, 25 bp, Homo sapien
tagatgaatctgctgtagtgaaaag

SEQ ID NO: 1967327 - DNA, 25 bp, Homo sapien
gagtagatgaatctgctgtagtgaa

SEQ ID NO: 1967328 - DNA, 25 bp, Homo sapien
tctgagtgtgaagcggctcgggcag

SEQ ID NO: 1967329 - DNA, 25 bp, Homo sapien
cacaggcgtcccgatagggtgcatg

SEQ ID NO: 1967330 - DNA, 25 bp, Homo sapien
ctcattaaattgagtcgcgtcagca

SEQ ID NO: 1967331 - DNA, 25 bp, Homo sapien
ttgagtcgcgtcagcaacttcacag

SEQ ID NO: 1967332 - DNA, 25 bp, Homo sapien
agcaacttcacaggcgtcccgatag

SEQ ID NO: 1967333 - DNA, 25 bp, Homo sapien
tgtcatatggaggtgctgcatctgc

SEQ ID NO: 1967334 - DNA, 25 bp, Homo sapien
ctacgatgtaggcatgtcatatgga

SEQ ID NO: 1967335 - DNA, 25 bp, Homo sapien
taggcatgtcatatggaggtgctgc

SEQ ID NO: 1967336 - DNA, 25 bp, Homo sapien
tcccaggccactggtgggacctgag

SEQ ID NO: 1967337 - DNA, 25 bp, Homo sapien
tattggggtacaagtgaagctggat

SEQ ID NO: 1967338 - DNA, 25 bp, Homo sapien
ccacataatattgagggcaaattta

SEQ ID NO: 1967339 - DNA, 25 bp, Homo sapien
taattggtggtgcattatgtaatgc

SEQ ID NO: 1967340 - DNA, 25 bp, Homo sapien
agcaatcaccttgccccacataata

SEQ ID NO: 1967341 - DNA, 25 bp, Homo sapien
ggacccatggttgatgcccttcagc

SEQ ID NO: 1967342 - DNA, 25 bp, Homo sapien
cagctccgtaggaccccgtggttgg

SEQ ID NO: 1967343 - DNA, 25 bp, Homo sapien
ccatctccataggacccgcagtggt

SEQ ID NO: 1967344 - DNA, 25 bp, Homo sapien
gaccgcatggttggtgctcttcagc

SEQ ID NO: 1967345 - DNA, 25 bp, Homo sapien
ttgattcaaatgctgccgagccctt

SEQ ID NO: 1967346 - DNA, 25 bp, Homo sapien
gattcaaatgctgccgagcccttca

SEQ ID NO: 1967347 - DNA, 25 bp, Homo sapien
tgattcaaatgctgccgagcccttc

SEQ ID NO: 1967348 - DNA, 25 bp, Homo sapien
attcaaatgctgccgagcccttcat

SEQ ID NO: 1967349 - DNA, 25 bp, Homo sapien
tgctcattacaagagagggctgtgc

SEQ ID NO: 1967350 - DNA, 25 bp, Homo sapien
tccaacgcgtctggagactctggag

SEQ ID NO: 1967351 - DNA, 25 bp, Homo sapien
tgatgtgcacgtggtcacggctgca

SEQ ID NO: 1967352 - DNA, 25 bp, Homo sapien
gaggagactccttccaatacagctg

SEQ ID NO: 1967353 - DNA, 25 bp, Homo sapien
gactgtggaacacgtagccttcgcc

SEQ ID NO: 1967354 - DNA, 25 bp, Homo sapien
cttcgccagagtcgatgctgaagag

SEQ ID NO: 1967355 - DNA, 25 bp, Homo sapien
gtggaacacgtagccttcgccagag

SEQ ID NO: 1967356 - DNA, 25 bp, Homo sapien
gccttcgccagagtcgatgctgaag

SEQ ID NO: 1967357 - DNA, 25 bp, Homo sapien
gccgctggctcctggcagttgagct

SEQ ID NO: 1967358 - DNA, 25 bp, Homo sapien
tggaaagctgacaaagtcccttctt

SEQ ID NO: 1967359 - DNA, 25 bp, Homo sapien
gttgagctcacctcattagagtgga

SEQ ID NO: 1967360 - DNA, 25 bp, Homo sapien
cctcattagagtggattaagtcatg

SEQ ID NO: 1967361 - DNA, 25 bp, Homo sapien
ggcaggtgcaggagcggtgcggtga

SEQ ID NO: 1967362 - DNA, 25 bp, Homo sapien
tgctgcagagccctacgatggggaa

SEQ ID NO: 1967363 - DNA, 25 bp, Homo sapien
gggaacatacgggattcaccaatta

SEQ ID NO: 1967364 - DNA, 25 bp, Homo sapien
ggtgacatctgatctccccgcacag

SEQ ID NO: 1967365 - DNA, 25 bp, Homo sapien
tcaccccaacaggagttacattcag

SEQ ID NO: 1967366 - DNA, 25 bp, Homo sapien
caacaggagttacattcagcagcct

SEQ ID NO: 1967367 - DNA, 25 bp, Homo sapien
ccccaacaggagttacattcagcag

SEQ ID NO: 1967368 - DNA, 25 bp, Homo sapien
ggagttacattcagcagccttcaca

SEQ ID NO: 1967369 - DNA, 25 bp, Homo sapien
ggctctccgctaataggtgctttac

SEQ ID NO: 1967370 - DNA, 25 bp, Homo sapien
tcttggtacgtaggcagtgaattca

SEQ ID NO: 1967371 - DNA, 25 bp, Homo sapien
gcagtgaattcatggcagcggtccc

SEQ ID NO: 1967372 - DNA, 25 bp, Homo sapien
ggtgctttactataatctgctcttg

SEQ ID NO: 1967373 - DNA, 25 bp, Homo sapien
cttggaacagagagggggcgagcag

SEQ ID NO: 1967374 - DNA, 25 bp, Homo sapien
cagagtccttcaacaggaacccttg

SEQ ID NO: 1967375 - DNA, 25 bp, Homo sapien
gagtccttcaacaggaacccttgga

SEQ ID NO: 1967376 - DNA, 25 bp, Homo sapien
cttcaacaggaacccttggaacaga

SEQ ID NO: 1967377 - DNA, 25 bp, Homo sapien
tcagaagccgcctctcagcttgtct

SEQ ID NO: 1967378 - DNA, 25 bp, Homo sapien
tgtctctggttggtgcagtaagtgc

SEQ ID NO: 1967379 - DNA, 25 bp, Homo sapien
ggttggtgcagtaagtgcaattccc

SEQ ID NO: 1967380 - DNA, 25 bp, Homo sapien
gcagtaagtgcaattcccttgtgct

SEQ ID NO: 1967381 - DNA, 25 bp, Homo sapien
tgcttgctaaattggagaatttctc

SEQ ID NO: 1967382 - DNA, 25 bp, Homo sapien
gcatggtcagaccacgaggaaatca

SEQ ID NO: 1967383 - DNA, 25 bp, Homo sapien
tcttcggatgggctggcaaacaggt

SEQ ID NO: 1967384 - DNA, 25 bp, Homo sapien
tctcgactggcatgagcatggtcag

SEQ ID NO: 1967385 - DNA, 25 bp, Homo sapien
ggctgggcatccataattatgcata

SEQ ID NO: 1967386 - DNA, 25 bp, Homo sapien
tgtctaggatgtagattttgaagac

SEQ ID NO: 1967387 - DNA, 25 bp, Homo sapien
caaatacatgtattaatgcagatac

SEQ ID NO: 1967388 - DNA, 25 bp, Homo sapien
tatttgcatagctctgaagctggct

SEQ ID NO: 1967389 - DNA, 25 bp, Homo sapien
tccaggaaaaagaccctccaacaca

SEQ ID NO: 1967390 - DNA, 25 bp, Homo sapien
tggacgcagactccctccaggaaaa

SEQ ID NO: 1967391 - DNA, 25 bp, Homo sapien
ggaaaaagaccctccaacacagcat

SEQ ID NO: 1967392 - DNA, 25 bp, Homo sapien
gacgcagactccctccaggaaaaag

SEQ ID NO: 1967393 - DNA, 25 bp, Homo sapien
tgtgcgttcctggaagctggttaag

SEQ ID NO: 1967394 - DNA, 25 bp, Homo sapien
gaagctggttaagtcagtggctgca

SEQ ID NO: 1967395 - DNA, 25 bp, Homo sapien
tagaaaccttgctttgcggctaagg

SEQ ID NO: 1967396 - DNA, 25 bp, Homo sapien
gctaagggctggaatgtgcgttcct

SEQ ID NO: 1967397 - DNA, 25 bp, Homo sapien
cctctcttccactgttgagtggggt

SEQ ID NO: 1967398 - DNA, 25 bp, Homo sapien
tggggtctgctccttgatagccaga

SEQ ID NO: 1967399 - DNA, 25 bp, Homo sapien
ctctcttccactgttgagtggggtc

SEQ ID NO: 1967400 - DNA, 25 bp, Homo sapien
ggtctgctccttgatagccagatct

SEQ ID NO: 1967401 - DNA, 25 bp, Homo sapien
ggctgtgcccccacgaatgtcagca

SEQ ID NO: 1967402 - DNA, 25 bp, Homo sapien
aatcactagagtacccacttcctgc

SEQ ID NO: 1967403 - DNA, 25 bp, Homo sapien
cctgtaatcagtcaatgatgcattt

SEQ ID NO: 1967404 - DNA, 25 bp, Homo sapien
cagtcaatgatgcatttccacagtg

SEQ ID NO: 1967405 - DNA, 25 bp, Homo sapien
acaatggctggtcttctgggtggga

SEQ ID NO: 1967406 - DNA, 25 bp, Homo sapien
atggctggtcttctgggtgggatgc

SEQ ID NO: 1967407 - DNA, 25 bp, Homo sapien
ctggacaatggctggtcttctgggt

SEQ ID NO: 1967408 - DNA, 25 bp, Homo sapien
gctggacaatggctggtcttctggg

SEQ ID NO: 1967409 - DNA, 25 bp, Homo sapien
ttgagggagggcattagcccagcct

SEQ ID NO: 1967410 - DNA, 25 bp, Homo sapien
ccaggtatccacctgaagccatcag

SEQ ID NO: 1967411 - DNA, 25 bp, Homo sapien
aggcctggagataaaatcgttgagg

SEQ ID NO: 1967412 - DNA, 25 bp, Homo sapien
tatccacctgaagccatcagcagtg

SEQ ID NO: 1967413 - DNA, 25 bp, Homo sapien
gctttgtacacaaagcaatcgccat

SEQ ID NO: 1967414 - DNA, 25 bp, Homo sapien
tgcattaggtaatgccaccgcccct

SEQ ID NO: 1967415 - DNA, 25 bp, Homo sapien
tgccaccgcccctaatggctttgta

SEQ ID NO: 1967416 - DNA, 25 bp, Homo sapien
gcccctaatggctttgtacacaaag

SEQ ID NO: 1967417 - DNA, 25 bp, Homo sapien
taagctgtggcatatctgtaagtgt

SEQ ID NO: 1967418 - DNA, 25 bp, Homo sapien
ttaagctgtggcatatctgtaagtg

SEQ ID NO: 1967419 - DNA, 25 bp, Homo sapien
aagctgtggcatatctgtaagtgtt

SEQ ID NO: 1967420 - DNA, 25 bp, Homo sapien
ggatctctgcattcttcgtcccctg

SEQ ID NO: 1967421 - DNA, 25 bp, Homo sapien
atgtcctcagcattgtgatccacat

SEQ ID NO: 1967422 - DNA, 25 bp, Homo sapien
ttgagggacggcgttgggatctctg

SEQ ID NO: 1967423 - DNA, 25 bp, Homo sapien
gacggcgttgggatctctgcattct

SEQ ID NO: 1967424 - DNA, 25 bp, Homo sapien
cagcttgggcaatggcttgtcacca

SEQ ID NO: 1967425 - DNA, 25 bp, Homo sapien
tggcttgtcaccaggcacagtaagc

SEQ ID NO: 1967426 - DNA, 25 bp, Homo sapien
gacagcttgggcaatggcttgtcac

SEQ ID NO: 1967427 - DNA, 25 bp, Homo sapien
caggcacagtaagcgcggattggtt

SEQ ID NO: 1967428 - DNA, 25 bp, Homo sapien
gggaaagattatttcagtggcctcc

SEQ ID NO: 1967429 - DNA, 25 bp, Homo sapien
cagtggcctccattagttgtgtcaa

SEQ ID NO: 1967430 - DNA, 25 bp, Homo sapien
ctccattagttgtgtcaaagcaagg

SEQ ID NO: 1967431 - DNA, 25 bp, Homo sapien
cttgtgacagccttcctagtgggaa

SEQ ID NO: 1967432 - DNA, 25 bp, Homo sapien
tcccattcaagatgatctctggaga

SEQ ID NO: 1967433 - DNA, 25 bp, Homo sapien
ccattcaagatgatctctggagaag

SEQ ID NO: 1967434 - DNA, 25 bp, Homo sapien
cccattcaagatgatctctggagaa

SEQ ID NO: 1967435 - DNA, 25 bp, Homo sapien
tcagtttagcacacatattggtgtg

SEQ ID NO: 1967436 - DNA, 25 bp, Homo sapien
gctgtctggacagcgcttcatcagg

SEQ ID NO: 1967437 - DNA, 25 bp, Homo sapien
tgtgctggtataggattacagagct

SEQ ID NO: 1967438 - DNA, 25 bp, Homo sapien
cacacatattggtgtgctggtatag

SEQ ID NO: 1967439 - DNA, 25 bp, Homo sapien
tttaaagaatagtcttccttacaca

SEQ ID NO: 1967440 - DNA, 25 bp, Homo sapien
ttaaagaatagtcttccttacacat

SEQ ID NO: 1967441 - DNA, 25 bp, Homo sapien
ctgttcaggaggcccaattcccttt

SEQ ID NO: 1967442 - DNA, 25 bp, Homo sapien
tgttcaggaggcccaattcccttta

SEQ ID NO: 1967443 - DNA, 25 bp, Homo sapien
gactgatgtttcctggacatggcaa

SEQ ID NO: 1967444 - DNA, 25 bp, Homo sapien
cggaagcagttcctgaagatctcaa

SEQ ID NO: 1967445 - DNA, 25 bp, Homo sapien
catggcaaagttgctggcagtcagg

SEQ ID NO: 1967446 - DNA, 25 bp, Homo sapien
aacctgcgtgttggtgctcggaagc

SEQ ID NO: 1967447 - DNA, 25 bp, Homo sapien
ctcatttgagctggctcctttgtgg

SEQ ID NO: 1967448 - DNA, 25 bp, Homo sapien
tcgcaggcctccagacggacaaagt

SEQ ID NO: 1967449 - DNA, 25 bp, Homo sapien
gggtttaaacccatcgcattctcat

SEQ ID NO: 1967450 - DNA, 25 bp, Homo sapien
tcctttgtggcatgtggaaggcccc

SEQ ID NO: 1967451 - DNA, 25 bp, Homo sapien
gggaaatacgatgtgttgagacagt

SEQ ID NO: 1967452 - DNA, 25 bp, Homo sapien
cattgacagtgttgacattggggac

SEQ ID NO: 1967453 - DNA, 25 bp, Homo sapien
ttatctccacatgttgtattgaggg

SEQ ID NO: 1967454 - DNA, 25 bp, Homo sapien
gagacagtgtccctagtgtcaaggc

SEQ ID NO: 1967455 - DNA, 25 bp, Homo sapien
tcatgcgtgtactgagcattgcttc

SEQ ID NO: 1967456 - DNA, 25 bp, Homo sapien
cttcatgcgtgtactgagcattgct

SEQ ID NO: 1967457 - DNA, 25 bp, Homo sapien
ttcatgcgtgtactgagcattgctt

SEQ ID NO: 1967458 - DNA, 25 bp, Homo sapien
agaatagagctcatgaggtagccac

SEQ ID NO: 1967459 - DNA, 25 bp, Homo sapien
aaaagaatagagctcatgaggtagc

SEQ ID NO: 1967460 - DNA, 25 bp, Homo sapien
catataaacttgaaggagtcaaaag

SEQ ID NO: 1967461 - DNA, 25 bp, Homo sapien
catgaggtagccacatataaacttg

SEQ ID NO: 1967462 - DNA, 25 bp, Homo sapien
cccaggattgggtcggaagagtcat

SEQ ID NO: 1967463 - DNA, 25 bp, Homo sapien
tttggcccaggattgggtcggaaga

SEQ ID NO: 1967464 - DNA, 25 bp, Homo sapien
gtataaatggtgaacaatacagagg

SEQ ID NO: 1967465 - DNA, 25 bp, Homo sapien
gagtataaatggtgaacaatacaga

SEQ ID NO: 1967466 - DNA, 25 bp, Homo sapien
tgtgtgttgaggacgtgggcatggg

SEQ ID NO: 1967467 - DNA, 25 bp, Homo sapien
ctgccttgtgatgctcttctaagag

SEQ ID NO: 1967468 - DNA, 25 bp, Homo sapien
ggcttgtgtcactaaaggcgaatgt

SEQ ID NO: 1967469 - DNA, 25 bp, Homo sapien
ttcatggcttgtgtcactaaaggcg

SEQ ID NO: 1967470 - DNA, 25 bp, Homo sapien
gaaggtgccatgttctggatgcctg

SEQ ID NO: 1967471 - DNA, 25 bp, Homo sapien
cactctgggtattgggtgggaaaca

SEQ ID NO: 1967472 - DNA, 25 bp, Homo sapien
aacaccctgagagtaggtctggcca

SEQ ID NO: 1967473 - DNA, 25 bp, Homo sapien
aacacagtgactctttgcagaaaca

SEQ ID NO: 1967474 - DNA, 25 bp, Homo sapien
aatgatagcatttggcaaagccagc

SEQ ID NO: 1967475 - DNA, 25 bp, Homo sapien
aatcgcggcgctcttgaccgggtaa

SEQ ID NO: 1967476 - DNA, 25 bp, Homo sapien
gcactctttccagggcggtgacaaa

SEQ ID NO: 1967477 - DNA, 25 bp, Homo sapien
ttgtatcactgtcgccggcatatgg

SEQ ID NO: 1967478 - DNA, 25 bp, Homo sapien
accctgtgacattgtcgggcaaacg

SEQ ID NO: 1967479 - DNA, 25 bp, Homo sapien
actcgagccggcgttcagatgaggt

SEQ ID NO: 1967480 - DNA, 25 bp, Homo sapien
cgggcaaacgttatctcggtaatct

SEQ ID NO: 1967481 - DNA, 25 bp, Homo sapien
tttgctgaaaagctgggccgggctc

SEQ ID NO: 1967482 - DNA, 25 bp, Homo sapien
ttattgcaatagatgtttatttctt

SEQ ID NO: 1967483 - DNA, 25 bp, Homo sapien
cttattgcaatagatgtttatttct

SEQ ID NO: 1967484 - DNA, 25 bp, Homo sapien
aggcgctggcccagtaccgaggatc

SEQ ID NO: 1967485 - DNA, 25 bp, Homo sapien
gctggcccagtaccgaggatccttt

SEQ ID NO: 1967486 - DNA, 25 bp, Homo sapien
tggcccagtaccgaggatcctttcc

SEQ ID NO: 1967487 - DNA, 25 bp, Homo sapien
gcgctggcccagtaccgaggatcct

SEQ ID NO: 1967488 - DNA, 25 bp, Homo sapien
ttggcaacgtctgttgggtcacagc

SEQ ID NO: 1967489 - DNA, 25 bp, Homo sapien
ggcaaaggtcttgtgagaaagcagg

SEQ ID NO: 1967490 - DNA, 25 bp, Homo sapien
gaaagcagggcacaacagtgccata

SEQ ID NO: 1967491 - DNA, 25 bp, Homo sapien
ccatagcaacaatgagggggtggcc

SEQ ID NO: 1967492 - DNA, 25 bp, Homo sapien
catgaaatgtttggagcgcagctca

SEQ ID NO: 1967493 - DNA, 25 bp, Homo sapien
caggtgaccctgctatgccagtgca

SEQ ID NO: 1967494 - DNA, 25 bp, Homo sapien
cagtaaaatgggcaggctaccctga

SEQ ID NO: 1967495 - DNA, 25 bp, Homo sapien
tgtagagagatttcagtccacgcca

SEQ ID NO: 1967496 - DNA, 25 bp, Homo sapien
agcagccctcaggatgtagtaaggg

SEQ ID NO: 1967497 - DNA, 25 bp, Homo sapien
ttgtagcagccctcaggatgtagta

SEQ ID NO: 1967498 - DNA, 25 bp, Homo sapien
tgtagcagccctcaggatgtagtaa

SEQ ID NO: 1967499 - DNA, 25 bp, Homo sapien
tagcagccctcaggatgtagtaagg

SEQ ID NO: 1967500 - DNA, 25 bp, Homo sapien
tcgaagccagccaatggcactgcca

SEQ ID NO: 1967501 - DNA, 25 bp, Homo sapien
gggcctattcccttgcaattgttgc

SEQ ID NO: 1967502 - DNA, 25 bp, Homo sapien
gggctcacggcacaggcttgccaag

SEQ ID NO: 1967503 - DNA, 25 bp, Homo sapien
cagcgagtgtgagtcgaagccagcc

SEQ ID NO: 1967504 - DNA, 25 bp, Homo sapien
tttcatagcctgacatcaagagtcg

SEQ ID NO: 1967505 - DNA, 25 bp, Homo sapien
tcaagagtcgagaaacatcaaggat

SEQ ID NO: 1967506 - DNA, 25 bp, Homo sapien
tccgcattgccaaggtaaccacagc

SEQ ID NO: 1967507 - DNA, 25 bp, Homo sapien
cgcaggccctggaattttgaagaga

SEQ ID NO: 1967508 - DNA, 25 bp, Homo sapien
tacaaactttgatacacttgcacgg

SEQ ID NO: 1967509 - DNA, 25 bp, Homo sapien
tggcattgatattaccttgatcgga

SEQ ID NO: 1967510 - DNA, 25 bp, Homo sapien
tgcctgtaggttttggtctccggag

SEQ ID NO: 1967511 - DNA, 25 bp, Homo sapien
gcttttatctgctaacactttgtga

SEQ ID NO: 1967512 - DNA, 25 bp, Homo sapien
acctcttgtagcagcacctctgttg

SEQ ID NO: 1967513 - DNA, 25 bp, Homo sapien
ttctctctttatagttgcctctgcc

SEQ ID NO: 1967514 - DNA, 25 bp, Homo sapien
ccacatgtagttattggatcttctg

SEQ ID NO: 1967515 - DNA, 25 bp, Homo sapien
gatgggctctgaatcacaagccttg

SEQ ID NO: 1967516 - DNA, 25 bp, Homo sapien
aggtacttctcatacctcggcactt

SEQ ID NO: 1967517 - DNA, 25 bp, Homo sapien
ctcatacctcggcactttatttctc

SEQ ID NO: 1967518 - DNA, 25 bp, Homo sapien
cttctcatacctcggcactttattt

SEQ ID NO: 1967519 - DNA, 25 bp, Homo sapien
tacttctcatacctcggcactttat

SEQ ID NO: 1967520 - DNA, 25 bp, Homo sapien
tcagtcgggcaccttctctccttca

SEQ ID NO: 1967521 - DNA, 25 bp, Homo sapien
gcaccttctctccttcaattatcca

SEQ ID NO: 1967522 - DNA, 25 bp, Homo sapien
cgggcaccttctctccttcaattat

SEQ ID NO: 1967523 - DNA, 25 bp, Homo sapien
cttctctccttcaattatccagcag

SEQ ID NO: 1967524 - DNA, 25 bp, Homo sapien
ttcatccaagtttctttgccgttgg

SEQ ID NO: 1967525 - DNA, 25 bp, Homo sapien
ccaagtttctttgccgttggcacat

SEQ ID NO: 1967526 - DNA, 25 bp, Homo sapien
catccaagtttctttgccgttggca

SEQ ID NO: 1967527 - DNA, 25 bp, Homo sapien
tccaagtttctttgccgttggcaca

SEQ ID NO: 1967528 - DNA, 25 bp, Homo sapien
atcctctgagcagggggagttatca

SEQ ID NO: 1967529 - DNA, 25 bp, Homo sapien
cagtcgcatatgaatgagtctgggc

SEQ ID NO: 1967530 - DNA, 25 bp, Homo sapien
ttaagggatttcagtcgcatatgaa

SEQ ID NO: 1967531 - DNA, 25 bp, Homo sapien
atatgaatgagtctgggctttatcc

SEQ ID NO: 1967532 - DNA, 25 bp, Homo sapien
ttcgagcccccttgtgttttatcag

SEQ ID NO: 1967533 - DNA, 25 bp, Homo sapien
gccagcagatacattgccactgtgg

SEQ ID NO: 1967534 - DNA, 25 bp, Homo sapien
cataaaaacacaacattcgagcccc

SEQ ID NO: 1967535 - DNA, 25 bp, Homo sapien
ctcactgccagcagatacattgcca

SEQ ID NO: 1967536 - DNA, 25 bp, Homo sapien
ccgcagtggctcccgccaggatccc

SEQ ID NO: 1967537 - DNA, 25 bp, Homo sapien
tgaaaccgcagtggctcccgccagg

SEQ ID NO: 1967538 - DNA, 25 bp, Homo sapien
cagtggctcccgccaggatccctgg

SEQ ID NO: 1967539 - DNA, 25 bp, Homo sapien
ctgaaaccgcagtggctcccgccag

SEQ ID NO: 1967540 - DNA, 25 bp, Homo sapien
gctggcctcagaatcgcctcccgct

SEQ ID NO: 1967541 - DNA, 25 bp, Homo sapien
tggcctcagaatcgcctcccgcttg

SEQ ID NO: 1967542 - DNA, 25 bp, Homo sapien
cccgcttggggcctatcggatgcag

SEQ ID NO: 1967543 - DNA, 25 bp, Homo sapien
ttgctcaggtcctctggtctttggg

SEQ ID NO: 1967544 - DNA, 25 bp, Homo sapien
ctgcgcacggcgtgaggaacaaagt

SEQ ID NO: 1967545 - DNA, 25 bp, Homo sapien
cgcacggcgtgaggaacaaagtgac

SEQ ID NO: 1967546 - DNA, 25 bp, Homo sapien
tgcgcacggcgtgaggaacaaagtg

SEQ ID NO: 1967547 - DNA, 25 bp, Homo sapien
gcacggcgtgaggaacaaagtgact

SEQ ID NO: 1967548 - DNA, 25 bp, Homo sapien
tggctgcggctcctaatgtcattag

SEQ ID NO: 1967549 - DNA, 25 bp, Homo sapien
gcggatcaaagccagcgggacttct

SEQ ID NO: 1967550 - DNA, 25 bp, Homo sapien
cgggtacaccggcaaacgcgtgtct

SEQ ID NO: 1967551 - DNA, 25 bp, Homo sapien
gactgtcagctctcggcagcggaga

SEQ ID NO: 1967552 - DNA, 25 bp, Homo sapien
tgtgtttgtatttcacccgtcccaa

SEQ ID NO: 1967553 - DNA, 25 bp, Homo sapien
taaattctctcagtacaggtgtagc

SEQ ID NO: 1967554 - DNA, 25 bp, Homo sapien
cgaagcaaggcgatgtaaattctct

SEQ ID NO: 1967555 - DNA, 25 bp, Homo sapien
aaatcaatgccatcccgaagcaagg

SEQ ID NO: 1967556 - DNA, 25 bp, Homo sapien
cattgaggcaatagtcagacagtcc

SEQ ID NO: 1967557 - DNA, 25 bp, Homo sapien
taaaaacgcactaggacttcgcacc

SEQ ID NO: 1967558 - DNA, 25 bp, Homo sapien
agaatagtctacaatgagcgccccg

SEQ ID NO: 1967559 - DNA, 25 bp, Homo sapien
tatttcccacaaacgcagggcagag

SEQ ID NO: 1967560 - DNA, 25 bp, Homo sapien
ccagagacaaagacgaggagcctga

SEQ ID NO: 1967561 - DNA, 25 bp, Homo sapien
gaatcggagctcctcctgcttagcg

SEQ ID NO: 1967562 - DNA, 25 bp, Homo sapien
ggacacccctgctgggaagctagga

SEQ ID NO: 1967563 - DNA, 25 bp, Homo sapien
gaagctaggaccttcagcgcgtcca

SEQ ID NO: 1967564 - DNA, 25 bp, Homo sapien
ggaatttcagcagcgcactctggcg

SEQ ID NO: 1967565 - DNA, 25 bp, Homo sapien
gagaagatgccaagtgcacgggcct

SEQ ID NO: 1967566 - DNA, 25 bp, Homo sapien
agcacaccggactccgcgggaattt

SEQ ID NO: 1967567 - DNA, 25 bp, Homo sapien
tttgcgaaccacctcctacgcagag

SEQ ID NO: 1967568 - DNA, 25 bp, Homo sapien
ggaaacttgtgtggaacgcgcgaac

SEQ ID NO: 1967569 - DNA, 25 bp, Homo sapien
aactttgagcgagggcaaatcccgc

SEQ ID NO: 1967570 - DNA, 25 bp, Homo sapien
ggtagtaaccgatcgtctgccaatg

SEQ ID NO: 1967571 - DNA, 25 bp, Homo sapien
gctctgcgggctctttcaattgtgc

SEQ ID NO: 1967572 - DNA, 25 bp, Homo sapien
gccgcagcgggcgagtattaaaggc

SEQ ID NO: 1967573 - DNA, 25 bp, Homo sapien
cgcagcgggcgagtattaaaggcgc

SEQ ID NO: 1967574 - DNA, 25 bp, Homo sapien
agcgggcgagtattaaaggcgcggg

SEQ ID NO: 1967575 - DNA, 25 bp, Homo sapien
cagcgggcgagtattaaaggcgcgg

SEQ ID NO: 1967576 - DNA, 25 bp, Homo sapien
cgcggcgctcaggtactgcgggtag

SEQ ID NO: 1967577 - DNA, 25 bp, Homo sapien
cggcgctcaggtactgcgggtagcc

SEQ ID NO: 1967578 - DNA, 25 bp, Homo sapien
cgctcaggtactgcgggtagcccag

SEQ ID NO: 1967579 - DNA, 25 bp, Homo sapien
cccgcggcgctcaggtactgcgggt

SEQ ID NO: 1967580 - DNA, 25 bp, Homo sapien
ggcgctgtagttgggcgcgcccgcg

SEQ ID NO: 1967581 - DNA, 25 bp, Homo sapien
caggaaggcgctgtagttgggcgcg

SEQ ID NO: 1967582 - DNA, 25 bp, Homo sapien
ggcaggaaggcgctgtagttgggcg

SEQ ID NO: 1967583 - DNA, 25 bp, Homo sapien
gaaggcgctgtagttgggcgcgccc

SEQ ID NO: 1967584 - DNA, 25 bp, Homo sapien
ttgcggtgctcgttgagccaggcct

SEQ ID NO: 1967585 - DNA, 25 bp, Homo sapien
gtcatcctcgttgctctggtcgcca

SEQ ID NO: 1967586 - DNA, 25 bp, Homo sapien
cgtgctcgtcgatcttgtcaatgtc

SEQ ID NO: 1967587 - DNA, 25 bp, Homo sapien
caatgtcgatgctttccaggtcgat

SEQ ID NO: 1967588 - DNA, 25 bp, Homo sapien
tcgctgccgaagagcgctccatctt

SEQ ID NO: 1967589 - DNA, 25 bp, Homo sapien
tgccagcggcgagccttggtcccgg

SEQ ID NO: 1967590 - DNA, 25 bp, Homo sapien
agcggcgagccttggtcccgggcaa

SEQ ID NO: 1967591 - DNA, 25 bp, Homo sapien
cgagccttggtcccgggcaagagca

SEQ ID NO: 1967592 - DNA, 25 bp, Homo sapien
tgctgccagcggcgagccttggtcc

SEQ ID NO: 1967593 - DNA, 25 bp, Homo sapien
gcccaagggcgagtcctggggcttg

SEQ ID NO: 1967594 - DNA, 25 bp, Homo sapien
caggcccaagggcgagtcctggggc

SEQ ID NO: 1967595 - DNA, 25 bp, Homo sapien
tttgccaggcccaagggcgagtcct

SEQ ID NO: 1967596 - DNA, 25 bp, Homo sapien
ttgccaggcccaagggcgagtcctg

SEQ ID NO: 1967597 - DNA, 25 bp, Homo sapien
ggggctcgtggctgtctccgccagc

SEQ ID NO: 1967598 - DNA, 25 bp, Homo sapien
ggctcgtggctgtctccgccagcga

SEQ ID NO: 1967599 - DNA, 25 bp, Homo sapien
cgtcggggctcgtggctgtctccgc

SEQ ID NO: 1967600 - DNA, 25 bp, Homo sapien
tcggggctcgtggctgtctccgcca

SEQ ID NO: 1967601 - DNA, 25 bp, Homo sapien
gcccgcgggtggtggtggcgaagcc

SEQ ID NO: 1967602 - DNA, 25 bp, Homo sapien
ggtggcccgcgggtggtggtggcga

SEQ ID NO: 1967603 - DNA, 25 bp, Homo sapien
tggcccgcgggtggtggtggcgaag

SEQ ID NO: 1967604 - DNA, 25 bp, Homo sapien
cgcgggtggtggtggcgaagccttg

SEQ ID NO: 1967605 - DNA, 25 bp, Homo sapien
ccgatgtggcaggtgtacagtccgt

SEQ ID NO: 1967606 - DNA, 25 bp, Homo sapien
aatgcgctgttggtccagttggaga

SEQ ID NO: 1967607 - DNA, 25 bp, Homo sapien
gaggccttgtctccattgagtgccc

SEQ ID NO: 1967608 - DNA, 25 bp, Homo sapien
agcgccaacgcccaggaaggagcgc

SEQ ID NO: 1967609 - DNA, 25 bp, Homo sapien
ggctggaagggcgactttaactgct

SEQ ID NO: 1967610 - DNA, 25 bp, Homo sapien
aagggcgactttaactgctgtgccg

SEQ ID NO: 1967611 - DNA, 25 bp, Homo sapien
gctgtgccggcgaatctggcctggg

SEQ ID NO: 1967612 - DNA, 25 bp, Homo sapien
gcgactttaactgctgtgccggcga

SEQ ID NO: 1967613 - DNA, 25 bp, Homo sapien
agggctgctaggatccgcggcgttc

SEQ ID NO: 1967614 - DNA, 25 bp, Homo sapien
gatccgcggcgttccctcctgcggg

SEQ ID NO: 1967615 - DNA, 25 bp, Homo sapien
aggatccgcggcgttccctcctgcg

SEQ ID NO: 1967616 - DNA, 25 bp, Homo sapien
ggctgctaggatccgcggcgttccc

SEQ ID NO: 1967617 - DNA, 25 bp, Homo sapien
aatatttgtcttaattcctcccaca

SEQ ID NO: 1967618 - DNA, 25 bp, Homo sapien
tgaaatatttgtcttaattcctccc

SEQ ID NO: 1967619 - DNA, 25 bp, Homo sapien
tttgtcttaattcctcccacattcc

SEQ ID NO: 1967620 - DNA, 25 bp, Homo sapien
tatttgtcttaattcctcccacatt

SEQ ID NO: 1967621 - DNA, 25 bp, Homo sapien
gcgagtccttgacgtcgttgtcata

SEQ ID NO: 1967622 - DNA, 25 bp, Homo sapien
gggaccgaagaagcccctttctgca

SEQ ID NO: 1967623 - DNA, 25 bp, Homo sapien
acctggacgcgagctcgggaccgaa

SEQ ID NO: 1967624 - DNA, 25 bp, Homo sapien
ctttctgcagaaagcgacggatgcg

SEQ ID NO: 1967625 - DNA, 25 bp, Homo sapien
tatttacaatctgaaaccactctat

SEQ ID NO: 1967626 - DNA, 25 bp, Homo sapien
tatatgatttagacaagttcgctga

SEQ ID NO: 1967627 - DNA, 25 bp, Homo sapien
gacacaagcacgtgggggcatttac

SEQ ID NO: 1967628 - DNA, 25 bp, Homo sapien
caagttcgctgacgcgctatttaca

SEQ ID NO: 1967629 - DNA, 25 bp, Homo sapien
agcgatgtccaggctcctaggcctt

SEQ ID NO: 1967630 - DNA, 25 bp, Homo sapien
tttcacgcattcaacgctgagtcgc

SEQ ID NO: 1967631 - DNA, 25 bp, Homo sapien
ccccgctgcgagtgtttcccaacat

SEQ ID NO: 1967632 - DNA, 25 bp, Homo sapien
actgatgctgatgtcccggatccgc

SEQ ID NO: 1967633 - DNA, 25 bp, Homo sapien
tcccaggtacccctgggtgctgtga

SEQ ID NO: 1967634 - DNA, 25 bp, Homo sapien
aagtcgaagtccacaaaccccatct

SEQ ID NO: 1967635 - DNA, 25 bp, Homo sapien
tgtgagaggaggcaccagcgaccca

SEQ ID NO: 1967636 - DNA, 25 bp, Homo sapien
tcccctctcaggcaagagattcaaa

SEQ ID NO: 1967637 - DNA, 25 bp, Homo sapien
gtgccacatgctgacttcggggcca

SEQ ID NO: 1967638 - DNA, 25 bp, Homo sapien
tggtgccacatgctgacttcggggc

SEQ ID NO: 1967639 - DNA, 25 bp, Homo sapien
ctggtgccacatgctgacttcgggg

SEQ ID NO: 1967640 - DNA, 25 bp, Homo sapien
gccacatgctgacttcggggccagt

SEQ ID NO: 1967641 - DNA, 25 bp, Homo sapien
aacacgcacgcagaaaccgagctgg

SEQ ID NO: 1967642 - DNA, 25 bp, Homo sapien
agcgccgcgctcacaggtagatcat

SEQ ID NO: 1967643 - DNA, 25 bp, Homo sapien
ctatcagggcgtccgcagcctgggt

SEQ ID NO: 1967644 - DNA, 25 bp, Homo sapien
ctgggtgaccttccagagcgccgcg

SEQ ID NO: 1967645 - DNA, 25 bp, Homo sapien
aactgaggaggaccggcttctttga

SEQ ID NO: 1967646 - DNA, 25 bp, Homo sapien
ggagagattcgccacagcagtgaaa

SEQ ID NO: 1967647 - DNA, 25 bp, Homo sapien
tattggttcacggagctcggagaga

SEQ ID NO: 1967648 - DNA, 25 bp, Homo sapien
cactcactaacacctggaagggaag

SEQ ID NO: 1967649 - DNA, 25 bp, Homo sapien
gtaatcacgttaaagaaggcaggcc

SEQ ID NO: 1967650 - DNA, 25 bp, Homo sapien
tactaaagtgcacgctgtaatcacg

SEQ ID NO: 1967651 - DNA, 25 bp, Homo sapien
taggaccgctacaggctatgacttg

SEQ ID NO: 1967652 - DNA, 25 bp, Homo sapien
tgacttgtaatgaggcatcccaaca

SEQ ID NO: 1967653 - DNA, 25 bp, Homo sapien
agaatctcgaacctgccctggacat

SEQ ID NO: 1967654 - DNA, 25 bp, Homo sapien
tgtatttctgtcttagcccagggag

SEQ ID NO: 1967655 - DNA, 25 bp, Homo sapien
caaagctggaggtgcaattcacaac

SEQ ID NO: 1967656 - DNA, 25 bp, Homo sapien
ggaaatatgtggcacacacacgcca

SEQ ID NO: 1967657 - DNA, 25 bp, Homo sapien
gaccctccgtctgaatgccatgtgg

SEQ ID NO: 1967658 - DNA, 25 bp, Homo sapien
gaacacacacttggacaactcttga

SEQ ID NO: 1967659 - DNA, 25 bp, Homo sapien
cctacctgtaggctctggcagctca

SEQ ID NO: 1967660 - DNA, 25 bp, Homo sapien
tcttgagcccacgatgctggaggac

SEQ ID NO: 1967661 - DNA, 25 bp, Homo sapien
catcagtccatgtaaattaggctgg

SEQ ID NO: 1967662 - DNA, 25 bp, Homo sapien
ctgatctcaaaaacgtccgcctcgg

SEQ ID NO: 1967663 - DNA, 25 bp, Homo sapien
gaagtattgcccaagataaaatgaa

SEQ ID NO: 1967664 - DNA, 25 bp, Homo sapien
tatttttctacgtgggtgacagagg

SEQ ID NO: 1967665 - DNA, 25 bp, Homo sapien
gagtgattgttaaagccccagagga

SEQ ID NO: 1967666 - DNA, 25 bp, Homo sapien
ggtgtacccaattgcacagtgtttg

SEQ ID NO: 1967667 - DNA, 25 bp, Homo sapien
tgacctgcactgatgagctctggac

SEQ ID NO: 1967668 - DNA, 25 bp, Homo sapien
aacttgcctgtatctgagcccttca

SEQ ID NO: 1967669 - DNA, 25 bp, Homo sapien
ggtggcaatacaggagtaaccagga

SEQ ID NO: 1967670 - DNA, 25 bp, Homo sapien
gatggaaccaactgcaagttctgag

SEQ ID NO: 1967671 - DNA, 25 bp, Homo sapien
gatcttcactgtcaatggaagggag

SEQ ID NO: 1967672 - DNA, 25 bp, Homo sapien
tacaggagtaaccaggatcttcact

SEQ ID NO: 1967673 - DNA, 25 bp, Homo sapien
agccctctgcatgccacggcagtgt

SEQ ID NO: 1967674 - DNA, 25 bp, Homo sapien
gaaatgtgtgcattggcagccctct

SEQ ID NO: 1967675 - DNA, 25 bp, Homo sapien
caggaaatgtgtgcattggcagccc

SEQ ID NO: 1967676 - DNA, 25 bp, Homo sapien
aatgtgtgcattggcagccctctgc

SEQ ID NO: 1967677 - DNA, 25 bp, Homo sapien
cacacaagcaattttgatgatgaag

SEQ ID NO: 1967678 - DNA, 25 bp, Homo sapien
cacacacacacaagcaattttgatg

SEQ ID NO: 1967679 - DNA, 25 bp, Homo sapien
cacacacacaagcaattttgatgat

SEQ ID NO: 1967680 - DNA, 25 bp, Homo sapien
cacacacaagcaattttgatgatga

SEQ ID NO: 1967681 - DNA, 25 bp, Homo sapien
cacaggcatgcagtatcaccagtaa

SEQ ID NO: 1967682 - DNA, 25 bp, Homo sapien
taagattcctacaaggtcctgcctg

SEQ ID NO: 1967683 - DNA, 25 bp, Homo sapien
catggatggcattaactagagggat

SEQ ID NO: 1967684 - DNA, 25 bp, Homo sapien
accacgggctcttggaaagtgacca

SEQ ID NO: 1967685 - DNA, 25 bp, Homo sapien
cagctgcgggtgactgaaggactgt

SEQ ID NO: 1967686 - DNA, 25 bp, Homo sapien
tgtcacaaggggagttggtcctcca

SEQ ID NO: 1967687 - DNA, 25 bp, Homo sapien
ccaccaactgtcacaaggggagttg

SEQ ID NO: 1967688 - DNA, 25 bp, Homo sapien
ggctgatgccagctgcgggtgactg

SEQ ID NO: 1967689 - DNA, 25 bp, Homo sapien
cctggtaggtgtaggtgaagtcttc

SEQ ID NO: 1967690 - DNA, 25 bp, Homo sapien
agtcttcctgtgcagctacctcctg

SEQ ID NO: 1967691 - DNA, 25 bp, Homo sapien
aggtgtaggtgaagtcttcctgtgc

SEQ ID NO: 1967692 - DNA, 25 bp, Homo sapien
ggtgaagtcttcctgtgcagctacc

SEQ ID NO: 1967693 - DNA, 25 bp, Homo sapien
tccttctagagttgcctgacagcca

SEQ ID NO: 1967694 - DNA, 25 bp, Homo sapien
gaaggattattagtcattctcacgc

SEQ ID NO: 1967695 - DNA, 25 bp, Homo sapien
caccctgttgtaagaggcaagaaat

SEQ ID NO: 1967696 - DNA, 25 bp, Homo sapien
tagttcactatgtttgggagacctc

SEQ ID NO: 1967697 - DNA, 25 bp, Homo sapien
catggaggacctatgggaactggca

SEQ ID NO: 1967698 - DNA, 25 bp, Homo sapien
tgtaaccaccaactgaaagcacgct

SEQ ID NO: 1967699 - DNA, 25 bp, Homo sapien
gtcaaattcgccatgagcagccagg

SEQ ID NO: 1967700 - DNA, 25 bp, Homo sapien
ggacacctggagcttagaatgcact

SEQ ID NO: 1967701 - DNA, 25 bp, Homo sapien
agccgccttgccaaaggagactgaa

SEQ ID NO: 1967702 - DNA, 25 bp, Homo sapien
aggtacacacgagcagggctttcag

SEQ ID NO: 1967703 - DNA, 25 bp, Homo sapien
ggacctgattgctcagccgccttgc

SEQ ID NO: 1967704 - DNA, 25 bp, Homo sapien
gataaggtacacacgagcagggctt

SEQ ID NO: 1967705 - DNA, 25 bp, Homo sapien
agccctgaataacagaaatgttgga

SEQ ID NO: 1967706 - DNA, 25 bp, Homo sapien
aacgcaattatttaggacacaggtg

SEQ ID NO: 1967707 - DNA, 25 bp, Homo sapien
tgaaggtccctgaagacatggcaac

SEQ ID NO: 1967708 - DNA, 25 bp, Homo sapien
gacacaggtgatgccaatcaaagga

SEQ ID NO: 1967709 - DNA, 25 bp, Homo sapien
aaggcctggaagtgccacggcagat

SEQ ID NO: 1967710 - DNA, 25 bp, Homo sapien
cctggaagtgccacggcagattcca

SEQ ID NO: 1967711 - DNA, 25 bp, Homo sapien
ccaaggcctggaagtgccacggcag

SEQ ID NO: 1967712 - DNA, 25 bp, Homo sapien
aagtgccacggcagattccagggtc

SEQ ID NO: 1967713 - DNA, 25 bp, Homo sapien
ccagggtggcttagagctgtgtccc

SEQ ID NO: 1967714 - DNA, 25 bp, Homo sapien
gagggtcacagaaaccaataagcct

SEQ ID NO: 1967715 - DNA, 25 bp, Homo sapien
tgctcataaccctgaactgggaggg

SEQ ID NO: 1967716 - DNA, 25 bp, Homo sapien
tgtctcgtcctgacacatggccaga

SEQ ID NO: 1967717 - DNA, 25 bp, Homo sapien
ttctccaaaaccacgtcactgaggg

SEQ ID NO: 1967718 - DNA, 25 bp, Homo sapien
agatgaccggaagggcgtgacacct

SEQ ID NO: 1967719 - DNA, 25 bp, Homo sapien
caaagatgcctaacacttggcttga

SEQ ID NO: 1967720 - DNA, 25 bp, Homo sapien
ccagaacaccagaggacgctatatt

SEQ ID NO: 1967721 - DNA, 25 bp, Homo sapien
tgccacagaagcgtctgcctctgag

SEQ ID NO: 1967722 - DNA, 25 bp, Homo sapien
gcttcatagggggtaatatggagca

SEQ ID NO: 1967723 - DNA, 25 bp, Homo sapien
cacagaagcgtctgcctctgagagg

SEQ ID NO: 1967724 - DNA, 25 bp, Homo sapien
tgtgcagtgcttcatagggggtaat

SEQ ID NO: 1967725 - DNA, 25 bp, Homo sapien
gacggatgttgatttcagcaggtga

SEQ ID NO: 1967726 - DNA, 25 bp, Homo sapien
ggacggatgttgatttcagcaggtg

SEQ ID NO: 1967727 - DNA, 25 bp, Homo sapien
acggatgttgatttcagcaggtgaa

SEQ ID NO: 1967728 - DNA, 25 bp, Homo sapien
aatcacaccctgatatcttctgagg

SEQ ID NO: 1967729 - DNA, 25 bp, Homo sapien
gcctcagtgcaaacgctggacctga

SEQ ID NO: 1967730 - DNA, 25 bp, Homo sapien
cgctctgtttggagcgtggccatgt

SEQ ID NO: 1967731 - DNA, 25 bp, Homo sapien
gccatgtgcgtgctcggcttgtgtt

SEQ ID NO: 1967732 - DNA, 25 bp, Homo sapien
cagtggtcggattcccaatgtgccc

SEQ ID NO: 1967733 - DNA, 25 bp, Homo sapien
agtgacccgtcacctgtctggacag

SEQ ID NO: 1967734 - DNA, 25 bp, Homo sapien
ctttcccttgcaggagaagttccgg

SEQ ID NO: 1967735 - DNA, 25 bp, Homo sapien
aagttccggtaggacaaggctgtgc

SEQ ID NO: 1967736 - DNA, 25 bp, Homo sapien
gctcagcagctatcctcaagaagtg

SEQ ID NO: 1967737 - DNA, 25 bp, Homo sapien
gacagcgaatgaagaaacgcccagg

SEQ ID NO: 1967738 - DNA, 25 bp, Homo sapien
taaacgtactatcaccaagagtcag

SEQ ID NO: 1967739 - DNA, 25 bp, Homo sapien
ccagggacacgtataggcaaaagca

SEQ ID NO: 1967740 - DNA, 25 bp, Homo sapien
tcccgtgggcagatgtagaggaggg

SEQ ID NO: 1967741 - DNA, 25 bp, Homo sapien
ggtcagaagatagaagccgccagct

SEQ ID NO: 1967742 - DNA, 25 bp, Homo sapien
tgaggaaagccggtaggcacgctgg

SEQ ID NO: 1967743 - DNA, 25 bp, Homo sapien
cgatgtgaaggtttgaccgagcagt

SEQ ID NO: 1967744 - DNA, 25 bp, Homo sapien
agggcaggctctctcagttctggac

SEQ ID NO: 1967745 - DNA, 25 bp, Homo sapien
tgagggacaagtctgagtggagggc

SEQ ID NO: 1967746 - DNA, 25 bp, Homo sapien
gctgatggatcaggcgactactgcc

SEQ ID NO: 1967747 - DNA, 25 bp, Homo sapien
cttctctttcgattttctgatattg

SEQ ID NO: 1967748 - DNA, 25 bp, Homo sapien
tttgacctattttcatagccctcca

SEQ ID NO: 1967749 - DNA, 25 bp, Homo sapien
ttgacctattttcatagccctccac

SEQ ID NO: 1967750 - DNA, 25 bp, Homo sapien
tctttgacctattttcatagccctc

SEQ ID NO: 1967751 - DNA, 25 bp, Homo sapien
gacctattttcatagccctccacct

SEQ ID NO: 1967752 - DNA, 25 bp, Homo sapien
ctattttaagtcgctcaaaaggatt

SEQ ID NO: 1967753 - DNA, 25 bp, Homo sapien
attttaagtcgctcaaaaggatttg

SEQ ID NO: 1967754 - DNA, 25 bp, Homo sapien
cctattttaagtcgctcaaaaggat

SEQ ID NO: 1967755 - DNA, 25 bp, Homo sapien
tggacattttcacaccagggtttgc

SEQ ID NO: 1967756 - DNA, 25 bp, Homo sapien
catatgtgatgtggcagatcagggc

SEQ ID NO: 1967757 - DNA, 25 bp, Homo sapien
ccatctgggctacctagaactattg

SEQ ID NO: 1967758 - DNA, 25 bp, Homo sapien
tgactgtcagtgagtcgcactcccc

SEQ ID NO: 1967759 - DNA, 25 bp, Homo sapien
ctgatgagaactgcagccgtggccc

SEQ ID NO: 1967760 - DNA, 25 bp, Homo sapien
gctgctccatgactgaagctcctga

SEQ ID NO: 1967761 - DNA, 25 bp, Homo sapien
tatttctttaaacccatggcggctg

SEQ ID NO: 1967762 - DNA, 25 bp, Homo sapien
caggactaggacatgcacggttgca

SEQ ID NO: 1967763 - DNA, 25 bp, Homo sapien
tgacatggagggactgcgtgtggag

SEQ ID NO: 1967764 - DNA, 25 bp, Homo sapien
catggagggactgcgtgtggaggga

SEQ ID NO: 1967765 - DNA, 25 bp, Homo sapien
gagggactgcgtgtggagggaggaa

SEQ ID NO: 1967766 - DNA, 25 bp, Homo sapien
ggagggactgcgtgtggagggagga

SEQ ID NO: 1967767 - DNA, 25 bp, Homo sapien
tcaaaaagaacaccttgtcggacat

SEQ ID NO: 1967768 - DNA, 25 bp, Homo sapien
ctgaagctccagatagctgtagtca

SEQ ID NO: 1967769 - DNA, 25 bp, Homo sapien
cctatgccgagctgataaagttctt

SEQ ID NO: 1967770 - DNA, 25 bp, Homo sapien
gttgcacagtgatctttaaatctca

SEQ ID NO: 1967771 - DNA, 25 bp, Homo sapien
tcatgattgctttggagacaaaacg

SEQ ID NO: 1967772 - DNA, 25 bp, Homo sapien
ttctgtagcagacacccggaagacg

SEQ ID NO: 1967773 - DNA, 25 bp, Homo sapien
gacaaaacgtctctggtaggcaatt

SEQ ID NO: 1967774 - DNA, 25 bp, Homo sapien
tcaagagagcaaggcttgatttaag

SEQ ID NO: 1967775 - DNA, 25 bp, Homo sapien
aacagcaatggagactgcgtgtggt

SEQ ID NO: 1967776 - DNA, 25 bp, Homo sapien
ggttaaaacagcaatggagactgcg

SEQ ID NO: 1967777 - DNA, 25 bp, Homo sapien
taaaacagcaatggagactgcgtgt

SEQ ID NO: 1967778 - DNA, 25 bp, Homo sapien
ttggttaaaacagcaatggagactg

SEQ ID NO: 1967779 - DNA, 25 bp, Homo sapien
tactgggtcccagtatgatacaagt

SEQ ID NO: 1967780 - DNA, 25 bp, Homo sapien
caatgctcaggaaatggctaatggg

SEQ ID NO: 1967781 - DNA, 25 bp, Homo sapien
gaatttttgtaccacctctcagggc

SEQ ID NO: 1967782 - DNA, 25 bp, Homo sapien
aagatgcgttggtgcttatcaggct

SEQ ID NO: 1967783 - DNA, 25 bp, Homo sapien
caatccattcgcatgggatggagac

SEQ ID NO: 1967784 - DNA, 25 bp, Homo sapien
atccattcgcatgggatggagactc

SEQ ID NO: 1967785 - DNA, 25 bp, Homo sapien
tcacaatccattcgcatgggatgga

SEQ ID NO: 1967786 - DNA, 25 bp, Homo sapien
ccctcacaatccattcgcatgggat

SEQ ID NO: 1967787 - DNA, 25 bp, Homo sapien
aagccacgtggaacccacagagcag

SEQ ID NO: 1967788 - DNA, 25 bp, Homo sapien
aactaaagccacgtggaacccacag

SEQ ID NO: 1967789 - DNA, 25 bp, Homo sapien
caaagtggagcaaactaaagccacg

SEQ ID NO: 1967790 - DNA, 25 bp, Homo sapien
ccctgcagatgagtcaaagtggagc

SEQ ID NO: 1967791 - DNA, 25 bp, Homo sapien
cagtaactgagagaaggcccgtgaa

SEQ ID NO: 1967792 - DNA, 25 bp, Homo sapien
aactggcccagatgcgagtgtcagg

SEQ ID NO: 1967793 - DNA, 25 bp, Homo sapien
gaaatgacaaccaggctgaatccca

SEQ ID NO: 1967794 - DNA, 25 bp, Homo sapien
gttaagttgccctagaatgactggg

SEQ ID NO: 1967795 - DNA, 25 bp, Homo sapien
gtggttttgcattctgatgggtcaa

SEQ ID NO: 1967796 - DNA, 25 bp, Homo sapien
gatgggtcaacattttgaagagaca

SEQ ID NO: 1967797 - DNA, 25 bp, Homo sapien
ggttttgcattctgatgggtcaaca

SEQ ID NO: 1967798 - DNA, 25 bp, Homo sapien
gcattctgatgggtcaacattttga

SEQ ID NO: 1967799 - DNA, 25 bp, Homo sapien
caggttctcgccgagattgcagacc

SEQ ID NO: 1967800 - DNA, 25 bp, Homo sapien
tgagctgtaagcctaagcctggccg

SEQ ID NO: 1967801 - DNA, 25 bp, Homo sapien
agcctggccggtcagcccatgcagg

SEQ ID NO: 1967802 - DNA, 25 bp, Homo sapien
cgccgagattgcagacctggtggca

SEQ ID NO: 1967803 - DNA, 25 bp, Homo sapien
cacctcgcctaaggcaacgggctgt

SEQ ID NO: 1967804 - DNA, 25 bp, Homo sapien
taaggcaacgggctgttcctgtccc

SEQ ID NO: 1967805 - DNA, 25 bp, Homo sapien
ggagcagaaggccttgcgcgaaccc

SEQ ID NO: 1967806 - DNA, 25 bp, Homo sapien
tcacccataaactgccgacatcgcc

SEQ ID NO: 1967807 - DNA, 25 bp, Homo sapien
tgcatggaaaaggtagcccatatcc

SEQ ID NO: 1967808 - DNA, 25 bp, Homo sapien
catggaaaaggtagcccatatccac

SEQ ID NO: 1967809 - DNA, 25 bp, Homo sapien
catatccaccctcagtgtctggcca

SEQ ID NO: 1967810 - DNA, 25 bp, Homo sapien
gctgcatggaaaaggtagcccatat

SEQ ID NO: 1967811 - DNA, 25 bp, Homo sapien
aaagatgactcccagtgtttggcat

SEQ ID NO: 1967812 - DNA, 25 bp, Homo sapien
tggataccgtgagcatcagggtctg

SEQ ID NO: 1967813 - DNA, 25 bp, Homo sapien
ccagaaatgcagggtcaggcacagg

SEQ ID NO: 1967814 - DNA, 25 bp, Homo sapien
gatcttggagatctagaactgggta

SEQ ID NO: 1967815 - DNA, 25 bp, Homo sapien
caccaaaacctaatcggatccgcat

SEQ ID NO: 1967816 - DNA, 25 bp, Homo sapien
aagcacaatgagagtagtaggatga

SEQ ID NO: 1967817 - DNA, 25 bp, Homo sapien
tgagagcttttaggataaacaccaa

SEQ ID NO: 1967818 - DNA, 25 bp, Homo sapien
acaccaaaacctaatcggatccgca

SEQ ID NO: 1967819 - DNA, 25 bp, Homo sapien
attgcctgccccgaagaatatctgc

SEQ ID NO: 1967820 - DNA, 25 bp, Homo sapien
gaggatgctgtgaaagagaacccca

SEQ ID NO: 1967821 - DNA, 25 bp, Homo sapien
gattgagaccggctcacaaatccag

SEQ ID NO: 1967822 - DNA, 25 bp, Homo sapien
gactctgcgggtctgaaatcaagcc

SEQ ID NO: 1967823 - DNA, 25 bp, Homo sapien
gacttttcttgcaaagctggcaatt

SEQ ID NO: 1967824 - DNA, 25 bp, Homo sapien
gaacgcatgagtctttcctcagagc

SEQ ID NO: 1967825 - DNA, 25 bp, Homo sapien
tctttgcaagggtatttcaccatat

SEQ ID NO: 1967826 - DNA, 25 bp, Homo sapien
ttttcttcccctagccataatgact

SEQ ID NO: 1967827 - DNA, 25 bp, Homo sapien
tttcagcagtgtaggtgttcgttct

SEQ ID NO: 1967828 - DNA, 25 bp, Homo sapien
tgttcgttctagctgcagcagtgtg

SEQ ID NO: 1967829 - DNA, 25 bp, Homo sapien
taagcccatgtacacgagtttcctg

SEQ ID NO: 1967830 - DNA, 25 bp, Homo sapien
acagcggtaggtttgcaaagtgtct

SEQ ID NO: 1967831 - DNA, 25 bp, Homo sapien
aggcagttggagaaacacagttcct

SEQ ID NO: 1967832 - DNA, 25 bp, Homo sapien
gatttggggaactgctcaccctctc

SEQ ID NO: 1967833 - DNA, 25 bp, Homo sapien
tgggatttggggaactgctcaccct

SEQ ID NO: 1967834 - DNA, 25 bp, Homo sapien
acacagttcctgatgaaggggttgg

SEQ ID NO: 1967835 - DNA, 25 bp, Homo sapien
ctctctgctgaacactgcggacatc

SEQ ID NO: 1967836 - DNA, 25 bp, Homo sapien
tctgctgaacactgcggacatcaca

SEQ ID NO: 1967837 - DNA, 25 bp, Homo sapien
cactgggggaatccggctattgact

SEQ ID NO: 1967838 - DNA, 25 bp, Homo sapien
gaacactgcggacatcacagattga

SEQ ID NO: 1967839 - DNA, 25 bp, Homo sapien
cccatgcctgtgcagcttcaggtga

SEQ ID NO: 1967840 - DNA, 25 bp, Homo sapien
gggatgtttgtgacttcattaaaac

SEQ ID NO: 1967841 - DNA, 25 bp, Homo sapien
tgggatggggatgtttgtgacttca

SEQ ID NO: 1967842 - DNA, 25 bp, Homo sapien
tcagacctggtcacctggcccccat

SEQ ID NO: 1967843 - DNA, 25 bp, Homo sapien
atctggaggagatccgtttcttttt

SEQ ID NO: 1967844 - DNA, 25 bp, Homo sapien
ctcacagagctggtatttaatcatt

SEQ ID NO: 1967845 - DNA, 25 bp, Homo sapien
tgctcacagagctggtatttaatca

SEQ ID NO: 1967846 - DNA, 25 bp, Homo sapien
gctcacagagctggtatttaatcat

SEQ ID NO: 1967847 - DNA, 25 bp, Homo sapien
tcacagagctggtatttaatcattt

SEQ ID NO: 1967848 - DNA, 25 bp, Homo sapien
tccaaaatgttgggcctgtttccaa

SEQ ID NO: 1967849 - DNA, 25 bp, Homo sapien
tagagcctgaagaggtttataaagt

SEQ ID NO: 1967850 - DNA, 25 bp, Homo sapien
ttataaagttggctgaatttggaat

SEQ ID NO: 1967851 - DNA, 25 bp, Homo sapien
aaatctgctttggtgcaattcccag

SEQ ID NO: 1967852 - DNA, 25 bp, Homo sapien
agtaagcacattgcaagttgcaggt

SEQ ID NO: 1967853 - DNA, 25 bp, Homo sapien
taagcacattgcaagttgcaggtga

SEQ ID NO: 1967854 - DNA, 25 bp, Homo sapien
ttagtaagcacattgcaagttgcag

SEQ ID NO: 1967855 - DNA, 25 bp, Homo sapien
aagcacattgcaagttgcaggtgaa

SEQ ID NO: 1967856 - DNA, 25 bp, Homo sapien
tgtgatgagtgaacatgaatcagca

SEQ ID NO: 1967857 - DNA, 25 bp, Homo sapien
gtgatgagtgaacatgaatcagcaa

SEQ ID NO: 1967858 - DNA, 25 bp, Homo sapien
catgggaactgcgatagagacttca

SEQ ID NO: 1967859 - DNA, 25 bp, Homo sapien
tagcgtaggtctagacacagctttg

SEQ ID NO: 1967860 - DNA, 25 bp, Homo sapien
cagttgctgtctaagagttggtctc

SEQ ID NO: 1967861 - DNA, 25 bp, Homo sapien
gccgtctgttgaggtgctgccaatt

SEQ ID NO: 1967862 - DNA, 25 bp, Homo sapien
gagagccacgctgtctagaagcaag

SEQ ID NO: 1967863 - DNA, 25 bp, Homo sapien
tctttggctccgtgctcagtgtctc

SEQ ID NO: 1967864 - DNA, 25 bp, Homo sapien
gcctgtaaccatctgaggagcctgc

SEQ ID NO: 1967865 - DNA, 25 bp, Homo sapien
tgtgcccctgagtgattccaaatct

SEQ ID NO: 1967866 - DNA, 25 bp, Homo sapien
tcacagtctttaggcaaaggcttgt

SEQ ID NO: 1967867 - DNA, 25 bp, Homo sapien
aaggcttgttgtgggtttcaggata

SEQ ID NO: 1967868 - DNA, 25 bp, Homo sapien
tagtcagttgccctccttcaggcct

SEQ ID NO: 1967869 - DNA, 25 bp, Homo sapien
cctgctgcacaggacttcacagtct

SEQ ID NO: 1967870 - DNA, 25 bp, Homo sapien
cagtccttacctaggacatggagtc

SEQ ID NO: 1967871 - DNA, 25 bp, Homo sapien
tgtccagcattactcattatccagt

SEQ ID NO: 1967872 - DNA, 25 bp, Homo sapien
gagtcctagtggagtctcattgaag

SEQ ID NO: 1967873 - DNA, 25 bp, Homo sapien
cattgaaggaaaccttgctgtcttc

SEQ ID NO: 1967874 - DNA, 25 bp, Homo sapien
tgcctctctgatatgtgtagcctga

SEQ ID NO: 1967875 - DNA, 25 bp, Homo sapien
tgaaggtggcccatagagcaggatt

SEQ ID NO: 1967876 - DNA, 25 bp, Homo sapien
ttttccccactgacgtatagagatg

SEQ ID NO: 1967877 - DNA, 25 bp, Homo sapien
tgtagcctgagctcttaccaacaga

SEQ ID NO: 1967878 - DNA, 25 bp, Homo sapien
gttccatgaaggaccaggcagaaag

SEQ ID NO: 1967879 - DNA, 25 bp, Homo sapien
aaaggagcatcacacatgggttcca

SEQ ID NO: 1967880 - DNA, 25 bp, Homo sapien
gaaaggagcatcacacatgggttcc

SEQ ID NO: 1967881 - DNA, 25 bp, Homo sapien
acacatgggttccatgaaggaccag

SEQ ID NO: 1967882 - DNA, 25 bp, Homo sapien
gcccttgcccacagaatctttcatt

SEQ ID NO: 1967883 - DNA, 25 bp, Homo sapien
tgagaagcacagattcaaaacacag

SEQ ID NO: 1967884 - DNA, 25 bp, Homo sapien
catgtcaaattccaggtgatactga

SEQ ID NO: 1967885 - DNA, 25 bp, Homo sapien
aacagatttgcttggggctgaataa

SEQ ID NO: 1967886 - DNA, 25 bp, Homo sapien
gggctgaataaacgtgcatgtcaaa

SEQ ID NO: 1967887 - DNA, 25 bp, Homo sapien
cagacactggactgagaccgggaga

SEQ ID NO: 1967888 - DNA, 25 bp, Homo sapien
tcgtagtacgaattcagcagcaaac

SEQ ID NO: 1967889 - DNA, 25 bp, Homo sapien
gaccgggagattccttcacacgtga

SEQ ID NO: 1967890 - DNA, 25 bp, Homo sapien
gatattgttcgcacatcctgccagc

SEQ ID NO: 1967891 - DNA, 25 bp, Homo sapien
gagagtcagtggtcaaaggatcttc

SEQ ID NO: 1967892 - DNA, 25 bp, Homo sapien
gcttcatttggaaatgagagtcagt

SEQ ID NO: 1967893 - DNA, 25 bp, Homo sapien
gcatcttcatttcagtcgttgccac

SEQ ID NO: 1967894 - DNA, 25 bp, Homo sapien
aattgagtgggtcaccagatggtgc

SEQ ID NO: 1967895 - DNA, 25 bp, Homo sapien
gtgttcactgctagggtgcccggcc

SEQ ID NO: 1967896 - DNA, 25 bp, Homo sapien
tgcacagcggagacacagggcacgt

SEQ ID NO: 1967897 - DNA, 25 bp, Homo sapien
cactgtggaaggtggtgttcactgc

SEQ ID NO: 1967898 - DNA, 25 bp, Homo sapien
tccagcaagcttgcctttgtgggcc

SEQ ID NO: 1967899 - DNA, 25 bp, Homo sapien
gacagttgtagtgaatggtgaaccc

SEQ ID NO: 1967900 - DNA, 25 bp, Homo sapien
ctgtcctggacctcggagggtcttt

SEQ ID NO: 1967901 - DNA, 25 bp, Homo sapien
cgacagttgtagtgaatggtgaacc

SEQ ID NO: 1967902 - DNA, 25 bp, Homo sapien
ctgcagggctgtcctggacctcgga

SEQ ID NO: 1967903 - DNA, 25 bp, Homo sapien
gatcacgggctgagttgcttgcagc

SEQ ID NO: 1967904 - DNA, 25 bp, Homo sapien
cactgccttgtataggctcatggct

SEQ ID NO: 1967905 - DNA, 25 bp, Homo sapien
ctgggcttgaggatcacgggctgag

SEQ ID NO: 1967906 - DNA, 25 bp, Homo sapien
cctgagactgagcactgccttgtat

SEQ ID NO: 1967907 - DNA, 25 bp, Homo sapien
cagccctggcactcttaactttgga

SEQ ID NO: 1967908 - DNA, 25 bp, Homo sapien
tcagcggagagctgttccacgggca

SEQ ID NO: 1967909 - DNA, 25 bp, Homo sapien
aaacatccccagatgccgccaaatg

SEQ ID NO: 1967910 - DNA, 25 bp, Homo sapien
tctttcaaggcagcattgctcagcc

SEQ ID NO: 1967911 - DNA, 25 bp, Homo sapien
tgtgaaggctgctgtttaaaagggc

SEQ ID NO: 1967912 - DNA, 25 bp, Homo sapien
ctgtgaaggctgctgtttaaaaggg

SEQ ID NO: 1967913 - DNA, 25 bp, Homo sapien
tgaaggctgctgtttaaaagggcct

SEQ ID NO: 1967914 - DNA, 25 bp, Homo sapien
aaggctgctgtttaaaagggcctgc

SEQ ID NO: 1967915 - DNA, 25 bp, Homo sapien
ctgagggaggacgtgactgttgcac

SEQ ID NO: 1967916 - DNA, 25 bp, Homo sapien
cttggcaggatatcctgcagaatcc

SEQ ID NO: 1967917 - DNA, 25 bp, Homo sapien
gacgtgactgttgcactgagtcgct

SEQ ID NO: 1967918 - DNA, 25 bp, Homo sapien
cactgagtcgcttggcaggatatcc

SEQ ID NO: 1967919 - DNA, 25 bp, Homo sapien
tccgccattcgctactctctgagaa

SEQ ID NO: 1967920 - DNA, 25 bp, Homo sapien
tggaaaggagctgatagcctccgcc

SEQ ID NO: 1967921 - DNA, 25 bp, Homo sapien
tctctgagaacggttttctcttccc

SEQ ID NO: 1967922 - DNA, 25 bp, Homo sapien
caactggaaaggagctgatagcctc

SEQ ID NO: 1967923 - DNA, 25 bp, Homo sapien
tctgaacactcatggattagaatgc

SEQ ID NO: 1967924 - DNA, 25 bp, Homo sapien
gaacactcatggattagaatgccat

SEQ ID NO: 1967925 - DNA, 25 bp, Homo sapien
tcatggattagaatgccattgagga

SEQ ID NO: 1967926 - DNA, 25 bp, Homo sapien
cactcatggattagaatgccattga

SEQ ID NO: 1967927 - DNA, 25 bp, Homo sapien
tacgtagtaagctgtgcggtcagca

SEQ ID NO: 1967928 - DNA, 25 bp, Homo sapien
cacgtgcaggcaagagtgtggcaca

SEQ ID NO: 1967929 - DNA, 25 bp, Homo sapien
tgtgcagtcagcattccacgtgcag

SEQ ID NO: 1967930 - DNA, 25 bp, Homo sapien
atgcacacaagagcgtcacacacag

SEQ ID NO: 1967931 - DNA, 25 bp, Homo sapien
tgtgaggaaggacaaaatgtcagtg

SEQ ID NO: 1967932 - DNA, 25 bp, Homo sapien
tggtgtgtaaagtccaccgttacaa

SEQ ID NO: 1967933 - DNA, 25 bp, Homo sapien
caagtaaatgccaggtcatgaagag

SEQ ID NO: 1967934 - DNA, 25 bp, Homo sapien
gaagagtgaggctggacgtaaactc

SEQ ID NO: 1967935 - DNA, 25 bp, Homo sapien
gccagatccaaagactaaatgaaga

SEQ ID NO: 1967936 - DNA, 25 bp, Homo sapien
gaggtgcacacctctcctctgatgt

SEQ ID NO: 1967937 - DNA, 25 bp, Homo sapien
ttgccagatccaaagactaaatgaa

SEQ ID NO: 1967938 - DNA, 25 bp, Homo sapien
gtgataccaagaggtgcacacctct

SEQ ID NO: 1967939 - DNA, 25 bp, Homo sapien
cccgactttgagtttggttggtgca

SEQ ID NO: 1967940 - DNA, 25 bp, Homo sapien
cgctgcaaataagctgcaaggcaga

SEQ ID NO: 1967941 - DNA, 25 bp, Homo sapien
ggtattccgcatgaaggcctttgag

SEQ ID NO: 1967942 - DNA, 25 bp, Homo sapien
tcaagctccaatggtgaccaacgct

SEQ ID NO: 1967943 - DNA, 25 bp, Homo sapien
tgcttcaatccccaacaggactcct

SEQ ID NO: 1967944 - DNA, 25 bp, Homo sapien
ctacctccccggctgtcctggtctt

SEQ ID NO: 1967945 - DNA, 25 bp, Homo sapien
cactgctccggtggctgaagcggac

SEQ ID NO: 1967946 - DNA, 25 bp, Homo sapien
caacaggactcctgacgcttcccta

SEQ ID NO: 1967947 - DNA, 25 bp, Homo sapien
tgttaacttgttgcctacacgcggc

SEQ ID NO: 1967948 - DNA, 25 bp, Homo sapien
gatcttggagtgcagaatcgcctca

SEQ ID NO: 1967949 - DNA, 25 bp, Homo sapien
tacacgcggcatctgttgacactgg

SEQ ID NO: 1967950 - DNA, 25 bp, Homo sapien
gctacaccgtggtcaggaaacacct

SEQ ID NO: 1967951 - DNA, 25 bp, Homo sapien
agcacacagggtgccgtgtcaggat

SEQ ID NO: 1967952 - DNA, 25 bp, Homo sapien
cacagggtgccgtgtcaggatccag

SEQ ID NO: 1967953 - DNA, 25 bp, Homo sapien
cacacagggtgccgtgtcaggatcc

SEQ ID NO: 1967954 - DNA, 25 bp, Homo sapien
acacagggtgccgtgtcaggatcca

SEQ ID NO: 1967955 - DNA, 25 bp, Homo sapien
tcaatgcttttccagagctacatgg

SEQ ID NO: 1967956 - DNA, 25 bp, Homo sapien
tgtgaaacaagaggcgcatctattg

SEQ ID NO: 1967957 - DNA, 25 bp, Homo sapien
ccagtggctctattagacacattca

SEQ ID NO: 1967958 - DNA, 25 bp, Homo sapien
gagggtctaatatccgatgtgaaac

SEQ ID NO: 1967959 - DNA, 25 bp, Homo sapien
tctagctgacaggtcattgcaggtt

SEQ ID NO: 1967960 - DNA, 25 bp, Homo sapien
cccttgtccccgctgatgagtttgc

SEQ ID NO: 1967961 - DNA, 25 bp, Homo sapien
ttccctgacatcacagcggcccttg

SEQ ID NO: 1967962 - DNA, 25 bp, Homo sapien
ctctagctgacaggtcattgcaggt

SEQ ID NO: 1967963 - DNA, 25 bp, Homo sapien
ttccaagaaagtcccagcgtggagt

SEQ ID NO: 1967964 - DNA, 25 bp, Homo sapien
tcatagagttgttccaagaaagtcc

SEQ ID NO: 1967965 - DNA, 25 bp, Homo sapien
ttccagctgtgaagacgagaaacac

SEQ ID NO: 1967966 - DNA, 25 bp, Homo sapien
ccagctgtgaagacgagaaacacat

SEQ ID NO: 1967967 - DNA, 25 bp, Homo sapien
tggccccacgcattcaaagagatgg

SEQ ID NO: 1967968 - DNA, 25 bp, Homo sapien
ctggatgcctcaagacccagaggaa

SEQ ID NO: 1967969 - DNA, 25 bp, Homo sapien
ttttcaacccacttgcaaacacagg

SEQ ID NO: 1967970 - DNA, 25 bp, Homo sapien
ttggctcggccctatacctggatgc

SEQ ID NO: 1967971 - DNA, 25 bp, Homo sapien
gagggccgctattggttcaagagca

SEQ ID NO: 1967972 - DNA, 25 bp, Homo sapien
ttcaagagcaatgccgccccaggga

SEQ ID NO: 1967973 - DNA, 25 bp, Homo sapien
cctcgcctgctttgaggagaggaga

SEQ ID NO: 1967974 - DNA, 25 bp, Homo sapien
cccctcgcctgctttgaggagagga

SEQ ID NO: 1967975 - DNA, 25 bp, Homo sapien
tgggaattgtagccttgagaaagga

SEQ ID NO: 1967976 - DNA, 25 bp, Homo sapien
tcttgtccactcaaggaacccaggt

SEQ ID NO: 1967977 - DNA, 25 bp, Homo sapien
tggctggtcctggtgtgtggccacc

SEQ ID NO: 1967978 - DNA, 25 bp, Homo sapien
cacagtcttgtccactcaaggaacc

SEQ ID NO: 1967979 - DNA, 25 bp, Homo sapien
tctgctgttccatgtgacccaactc

SEQ ID NO: 1967980 - DNA, 25 bp, Homo sapien
acataggcgattccttttggtcgtg

SEQ ID NO: 1967981 - DNA, 25 bp, Homo sapien
cagaagagataaagcagtgcaccga

SEQ ID NO: 1967982 - DNA, 25 bp, Homo sapien
tatctattgtacaaaatcccacagg

SEQ ID NO: 1967983 - DNA, 25 bp, Homo sapien
gaaccgggaggacatcaagtaggat

SEQ ID NO: 1967984 - DNA, 25 bp, Homo sapien
aaccgggaggacatcaagtaggatg

SEQ ID NO: 1967985 - DNA, 25 bp, Homo sapien
gagaggaaccgggaggacatcaagt

SEQ ID NO: 1967986 - DNA, 25 bp, Homo sapien
aggaaccgggaggacatcaagtagg

SEQ ID NO: 1967987 - DNA, 25 bp, Homo sapien
ggcctgcagcaattactgtgcccac

SEQ ID NO: 1967988 - DNA, 25 bp, Homo sapien
gtggggtctggcctgcagcaattac

SEQ ID NO: 1967989 - DNA, 25 bp, Homo sapien
tctggcctgcagcaattactgtgcc

SEQ ID NO: 1967990 - DNA, 25 bp, Homo sapien
gggtctggcctgcagcaattactgt

SEQ ID NO: 1967991 - DNA, 25 bp, Homo sapien
tgctgcttgagttttgtacaaatag

SEQ ID NO: 1967992 - DNA, 25 bp, Homo sapien
taggtgaataaatgacgccagtcat

SEQ ID NO: 1967993 - DNA, 25 bp, Homo sapien
tttcctggacttcagtgcatacttc

SEQ ID NO: 1967994 - DNA, 25 bp, Homo sapien
catacttccatgtttgctgcttgag

SEQ ID NO: 1967995 - DNA, 25 bp, Homo sapien
acactcatgcttatcaggcccatca

SEQ ID NO: 1967996 - DNA, 25 bp, Homo sapien
actcatgcttatcaggcccatcaga

SEQ ID NO: 1967997 - DNA, 25 bp, Homo sapien
catcagaggcatggacatgacgtcc

SEQ ID NO: 1967998 - DNA, 25 bp, Homo sapien
tccatacgcaccagacggaggtggg

SEQ ID NO: 1967999 - DNA, 25 bp, Homo sapien
tggtgcctatggcaggaaagtcact

SEQ ID NO: 1968000 - DNA, 25 bp, Homo sapien
atcaaccatgatagccaagcactgg

SEQ ID NO: 1968001 - DNA, 25 bp, Homo sapien
cagattttgtggttcgttgggtcgc

SEQ ID NO: 1968002 - DNA, 25 bp, Homo sapien
gcagtgatctatggtgcctatggca

SEQ ID NO: 1968003 - DNA, 25 bp, Homo sapien
gcatctctagggatggcaccctctg

SEQ ID NO: 1968004 - DNA, 25 bp, Homo sapien
gatgacccaatagggtgctggccat

SEQ ID NO: 1968005 - DNA, 25 bp, Homo sapien
caccgttgaccggatttaatagcat

SEQ ID NO: 1968006 - DNA, 25 bp, Homo sapien
atggagcaggctccacacacaccgt

SEQ ID NO: 1968007 - DNA, 25 bp, Homo sapien
tagaatcaataacagtcacaaaaaa

SEQ ID NO: 1968008 - DNA, 25 bp, Homo sapien
ctgtagaatcaataacagtcacaaa

SEQ ID NO: 1968009 - DNA, 25 bp, Homo sapien
atcaataacagtcacaaaaaatgag

SEQ ID NO: 1968010 - DNA, 25 bp, Homo sapien
caataacagtcacaaaaaatgagaa

SEQ ID NO: 1968011 - DNA, 25 bp, Homo sapien
ggaatctacttctactctagaaagg

SEQ ID NO: 1968012 - DNA, 25 bp, Homo sapien
tctgagatgggtcaagggagtcatg

SEQ ID NO: 1968013 - DNA, 25 bp, Homo sapien
cttagtgggaccaacttgcgaccac

SEQ ID NO: 1968014 - DNA, 25 bp, Homo sapien
tgcgaccaccaaggaagtttgaatt

SEQ ID NO: 1968015 - DNA, 25 bp, Homo sapien
tggaggtgtgcggtaagtgtatccc

SEQ ID NO: 1968016 - DNA, 25 bp, Homo sapien
gaggtgtgcggtaagtgtatcccat

SEQ ID NO: 1968017 - DNA, 25 bp, Homo sapien
cggtaagtgtatcccatgtaccagg

SEQ ID NO: 1968018 - DNA, 25 bp, Homo sapien
tgtgcggtaagtgtatcccatgtac

SEQ ID NO: 1968019 - DNA, 25 bp, Homo sapien
cattgtaccaagagagtgggccgca

SEQ ID NO: 1968020 - DNA, 25 bp, Homo sapien
tctaacggtgcaattcctggctgag

SEQ ID NO: 1968021 - DNA, 25 bp, Homo sapien
ccacgaatatctgcattgtaccaag

SEQ ID NO: 1968022 - DNA, 25 bp, Homo sapien
cactgaagtcaacgtgcatttctaa

SEQ ID NO: 1968023 - DNA, 25 bp, Homo sapien
gagctctcaagacgtggcccttgct

SEQ ID NO: 1968024 - DNA, 25 bp, Homo sapien
tcacgtggagccgtgccttctctct

SEQ ID NO: 1968025 - DNA, 25 bp, Homo sapien
cagagctctcaagacgtggcccttg

SEQ ID NO: 1968026 - DNA, 25 bp, Homo sapien
ctgtgtctgtcacgtggagccgtgc

SEQ ID NO: 1968027 - DNA, 25 bp, Homo sapien
ttatcataccctgacagcggttggg

SEQ ID NO: 1968028 - DNA, 25 bp, Homo sapien
taatgaacacaagtcaagcccatgg

SEQ ID NO: 1968029 - DNA, 25 bp, Homo sapien
tgtccaatcaatgaggccatggaga

SEQ ID NO: 1968030 - DNA, 25 bp, Homo sapien
gcagatataagcagaggctgaaggc

SEQ ID NO: 1968031 - DNA, 25 bp, Homo sapien
cactgatagtgtcaagctgtcctca

SEQ ID NO: 1968032 - DNA, 25 bp, Homo sapien
tccacagggagaaacggaagtactg

SEQ ID NO: 1968033 - DNA, 25 bp, Homo sapien
tttcagcatctccactgatagtgtc

SEQ ID NO: 1968034 - DNA, 25 bp, Homo sapien
gagaaacggaagtactgacgacatg

SEQ ID NO: 1968035 - DNA, 25 bp, Homo sapien
aaaatgtatctttcttcagatcttc

SEQ ID NO: 1968036 - DNA, 25 bp, Homo sapien
tactttttctgacgggtggatggta

SEQ ID NO: 1968037 - DNA, 25 bp, Homo sapien
tgctatactttttctgacgggtgga

SEQ ID NO: 1968038 - DNA, 25 bp, Homo sapien
tatactttttctgacgggtggatgg

SEQ ID NO: 1968039 - DNA, 25 bp, Homo sapien
ggcctgaatttggtgggcttcccag

SEQ ID NO: 1968040 - DNA, 25 bp, Homo sapien
cactgacttcatcctggcctgaatt

SEQ ID NO: 1968041 - DNA, 25 bp, Homo sapien
cctggcctgaatttggtgggcttcc

SEQ ID NO: 1968042 - DNA, 25 bp, Homo sapien
ttggtgggcttcccaggtacagctg

SEQ ID NO: 1968043 - DNA, 25 bp, Homo sapien
gggctctgatgcatcttcccgaagc

SEQ ID NO: 1968044 - DNA, 25 bp, Homo sapien
cagaagataaccgaaatgaaaaggg

SEQ ID NO: 1968045 - DNA, 25 bp, Homo sapien
tgcatcttcccgaagccgtttctgc

SEQ ID NO: 1968046 - DNA, 25 bp, Homo sapien
catggagcacgggccatttgtttca

SEQ ID NO: 1968047 - DNA, 25 bp, Homo sapien
gctttggaaggccttcgattgcctt

SEQ ID NO: 1968048 - DNA, 25 bp, Homo sapien
gattgccttgatgggtcaatgccag

SEQ ID NO: 1968049 - DNA, 25 bp, Homo sapien
cagtaacgtgatctggattcttctt

SEQ ID NO: 1968050 - DNA, 25 bp, Homo sapien
ttttatgggtagtgagaccagtaac

SEQ ID NO: 1968051 - DNA, 25 bp, Homo sapien
tccataatttctagtgtgccagctt

SEQ ID NO: 1968052 - DNA, 25 bp, Homo sapien
ctgtaggaaacagatagagactgag

SEQ ID NO: 1968053 - DNA, 25 bp, Homo sapien
tattccttcggctgcatcccttaac

SEQ ID NO: 1968054 - DNA, 25 bp, Homo sapien
gagctcttgtccaacagctgtctcc

SEQ ID NO: 1968055 - DNA, 25 bp, Homo sapien
gttcttccagcatatccagcacttc

SEQ ID NO: 1968056 - DNA, 25 bp, Homo sapien
cttgacttccaccttctagttcttc

SEQ ID NO: 1968057 - DNA, 25 bp, Homo sapien
tctagttcttccagcatatccagca

SEQ ID NO: 1968058 - DNA, 25 bp, Homo sapien
ttgacttccaccttctagttcttcc

SEQ ID NO: 1968059 - DNA, 25 bp, Homo sapien
tttgtaacagttgagaataagacgg

SEQ ID NO: 1968060 - DNA, 25 bp, Homo sapien
ataagacggctgtttgtcccatgga

SEQ ID NO: 1968061 - DNA, 25 bp, Homo sapien
agcaactcggattcttgttaaaccg

SEQ ID NO: 1968062 - DNA, 25 bp, Homo sapien
tgttaaaccggattcaagaaactga

SEQ ID NO: 1968063 - DNA, 25 bp, Homo sapien
tgtgcaggcttttcctagacccctt

SEQ ID NO: 1968064 - DNA, 25 bp, Homo sapien
ggcctgtgaggaacaccggcgtggt

SEQ ID NO: 1968065 - DNA, 25 bp, Homo sapien
gcgtggtctccacgccttgggacgt

SEQ ID NO: 1968066 - DNA, 25 bp, Homo sapien
ccttgggacgtctttctctcggtct

SEQ ID NO: 1968067 - DNA, 25 bp, Homo sapien
caggtgcacgtgaggtagagaaggc

SEQ ID NO: 1968068 - DNA, 25 bp, Homo sapien
ttcttcattccccaatggcggacag

SEQ ID NO: 1968069 - DNA, 25 bp, Homo sapien
tgtcttcgctgttgactttgcacgt

SEQ ID NO: 1968070 - DNA, 25 bp, Homo sapien
gtcttcgctgttgactttgcacgtg

SEQ ID NO: 1968071 - DNA, 25 bp, Homo sapien
tatacgggcttgaaggacttccacc

SEQ ID NO: 1968072 - DNA, 25 bp, Homo sapien
gggtccgctgtgtaactcttctaca

SEQ ID NO: 1968073 - DNA, 25 bp, Homo sapien
taattgttgataaggagacagcagg

SEQ ID NO: 1968074 - DNA, 25 bp, Homo sapien
caaggctctctggatcggcgtgtca

SEQ ID NO: 1968075 - DNA, 25 bp, Homo sapien
gactcatggtgagagatgactcccc

SEQ ID NO: 1968076 - DNA, 25 bp, Homo sapien
cacaagcgaggagaataggaatctg

SEQ ID NO: 1968077 - DNA, 25 bp, Homo sapien
gcattgacacggacatgggattcag

SEQ ID NO: 1968078 - DNA, 25 bp, Homo sapien
tctgaagcagcttcaccggcgtcct

SEQ ID NO: 1968079 - DNA, 25 bp, Homo sapien
tactttacaggcaatggtccatggc

SEQ ID NO: 1968080 - DNA, 25 bp, Homo sapien
tccacgagggtgagctcaagcaata

SEQ ID NO: 1968081 - DNA, 25 bp, Homo sapien
ccatggcactgatcctagaggaatg

SEQ ID NO: 1968082 - DNA, 25 bp, Homo sapien
gatgttccccgatagaatgtgatag

SEQ ID NO: 1968083 - DNA, 25 bp, Homo sapien
tcaatctattacttagacttgccat

SEQ ID NO: 1968084 - DNA, 25 bp, Homo sapien
ccaagcaaaggaattctgtaggtaa

SEQ ID NO: 1968085 - DNA, 25 bp, Homo sapien
agcaaaggaattctgtaggtaagca

SEQ ID NO: 1968086 - DNA, 25 bp, Homo sapien
tttcaatctattacttagacttgcc

SEQ ID NO: 1968087 - DNA, 25 bp, Homo sapien
gataacgtcatctaacagggtagtt

SEQ ID NO: 1968088 - DNA, 25 bp, Homo sapien
caatacaaaacccatttcagagata

SEQ ID NO: 1968089 - DNA, 25 bp, Homo sapien
ctaagggataacgtcatctaacagg

SEQ ID NO: 1968090 - DNA, 25 bp, Homo sapien
cgtcatctaacagggtagttacaaa

SEQ ID NO: 1968091 - DNA, 25 bp, Homo sapien
gactatgtttagtggtatcctacag

SEQ ID NO: 1968092 - DNA, 25 bp, Homo sapien
acaggatgctgaattgtgtagccac

SEQ ID NO: 1968093 - DNA, 25 bp, Homo sapien
tagttgtcagccaatgattagtcag

SEQ ID NO: 1968094 - DNA, 25 bp, Homo sapien
aaagccatcgaattttctgtcagat

SEQ ID NO: 1968095 - DNA, 25 bp, Homo sapien
ctgacagatttagcggatgcccttt

SEQ ID NO: 1968096 - DNA, 25 bp, Homo sapien
cctgctgacagatttagcggatgcc

SEQ ID NO: 1968097 - DNA, 25 bp, Homo sapien
tcttctcttgatgtacttaactttg

SEQ ID NO: 1968098 - DNA, 25 bp, Homo sapien
tgacgctcgtatttctctgagtgac

SEQ ID NO: 1968099 - DNA, 25 bp, Homo sapien
ggccctaaacaaaggcgtgctcgct

SEQ ID NO: 1968100 - DNA, 25 bp, Homo sapien
ttacacctgaactgatacaactggg

SEQ ID NO: 1968101 - DNA, 25 bp, Homo sapien
tctaatgagtgtggacaccacgccg

SEQ ID NO: 1968102 - DNA, 25 bp, Homo sapien
gaaacgatgccatgtgtctaatgag

SEQ ID NO: 1968103 - DNA, 25 bp, Homo sapien
gccagttgcagaccttatgagtcca

SEQ ID NO: 1968104 - DNA, 25 bp, Homo sapien
taatgtttgctttcaccgtggctcc

SEQ ID NO: 1968105 - DNA, 25 bp, Homo sapien
gatttccaagtcaagcagagtttac

SEQ ID NO: 1968106 - DNA, 25 bp, Homo sapien
agagtttacgtgtaagccctctggc

SEQ ID NO: 1968107 - DNA, 25 bp, Homo sapien
gttgtttgggcaccagctacaggcc

SEQ ID NO: 1968108 - DNA, 25 bp, Homo sapien
tctccatgggcttatagacaccagg

SEQ ID NO: 1968109 - DNA, 25 bp, Homo sapien
cagtcaccgtcagcaaaatcaaatg

SEQ ID NO: 1968110 - DNA, 25 bp, Homo sapien
ggacatatcaccctcctcacaaagg

SEQ ID NO: 1968111 - DNA, 25 bp, Homo sapien
cctcggcacagcgttgagtcaggga

SEQ ID NO: 1968112 - DNA, 25 bp, Homo sapien
gctgctccagaggtacccggagaca

SEQ ID NO: 1968113 - DNA, 25 bp, Homo sapien
tgtgtagcaagctgaagtgcgcaaa

SEQ ID NO: 1968114 - DNA, 25 bp, Homo sapien
ggaagactccagtgcccattaggca

SEQ ID NO: 1968115 - DNA, 25 bp, Homo sapien
tcttctcgtgcaaggcatcttctcc

SEQ ID NO: 1968116 - DNA, 25 bp, Homo sapien
cagtgttaccatcattactgagtgt

SEQ ID NO: 1968117 - DNA, 25 bp, Homo sapien
tatgatcgtatctttcttcagtgtt

SEQ ID NO: 1968118 - DNA, 25 bp, Homo sapien
agaaatcttctcgtgcaaggcatct

SEQ ID NO: 1968119 - DNA, 25 bp, Homo sapien
tcctggttcatatacagcaccttcc

SEQ ID NO: 1968120 - DNA, 25 bp, Homo sapien
gagctccctgggaccacttttatac

SEQ ID NO: 1968121 - DNA, 25 bp, Homo sapien
ggcgtctggtgaggaccaacttcct

SEQ ID NO: 1968122 - DNA, 25 bp, Homo sapien
ggatttcagcctatggacttcagga

SEQ ID NO: 1968123 - DNA, 25 bp, Homo sapien
ggagaacatctcttcagagctacat

SEQ ID NO: 1968124 - DNA, 25 bp, Homo sapien
tttacgcaaagaaatcctgagactg

SEQ ID NO: 1968125 - DNA, 25 bp, Homo sapien
agttgaacgccctgcaagactctgt

SEQ ID NO: 1968126 - DNA, 25 bp, Homo sapien
gaagatatagatgccacctggcctg

SEQ ID NO: 1968127 - DNA, 25 bp, Homo sapien
cacatcattcggagagaagcggagg

SEQ ID NO: 1968128 - DNA, 25 bp, Homo sapien
taagaagaatcgctccagagggcag

SEQ ID NO: 1968129 - DNA, 25 bp, Homo sapien
gcttcacatcattcggagagaagcg

SEQ ID NO: 1968130 - DNA, 25 bp, Homo sapien
gctgtcagcggctgtgacactcggg

SEQ ID NO: 1968131 - DNA, 25 bp, Homo sapien
actgattacttaaaagcccagcatt

SEQ ID NO: 1968132 - DNA, 25 bp, Homo sapien
tgttcgacagacaacaaacggcccc

SEQ ID NO: 1968133 - DNA, 25 bp, Homo sapien
caaaataggtggtgatgcgtgacag

SEQ ID NO: 1968134 - DNA, 25 bp, Homo sapien
aacggccccgtgcatgtcaaaatag

SEQ ID NO: 1968135 - DNA, 25 bp, Homo sapien
cagatatcggctggctatgacagca

SEQ ID NO: 1968136 - DNA, 25 bp, Homo sapien
cagggacgtcccatccagagtggag

SEQ ID NO: 1968137 - DNA, 25 bp, Homo sapien
cgggctgtcccgctacatccaggga

SEQ ID NO: 1968138 - DNA, 25 bp, Homo sapien
gctgtcccgctacatccagggacgt

SEQ ID NO: 1968139 - DNA, 25 bp, Homo sapien
tacatccagggacgtcccatccaga

SEQ ID NO: 1968140 - DNA, 25 bp, Homo sapien
ttttgatacaggagagcgggctgat

SEQ ID NO: 1968141 - DNA, 25 bp, Homo sapien
caggagagcgggctgatgagcaatc

SEQ ID NO: 1968142 - DNA, 25 bp, Homo sapien
ctggaaattttgatacaggagagcg

SEQ ID NO: 1968143 - DNA, 25 bp, Homo sapien
gaaattttgatacaggagagcgggc

SEQ ID NO: 1968144 - DNA, 25 bp, Homo sapien
tgtctgtcagaagtttggcactatt

SEQ ID NO: 1968145 - DNA, 25 bp, Homo sapien
tggagctcctggctggaacaaggaa

SEQ ID NO: 1968146 - DNA, 25 bp, Homo sapien
gtagagggagctgttggaccatcca

SEQ ID NO: 1968147 - DNA, 25 bp, Homo sapien
caaggaaacatgtggctttccccaa

SEQ ID NO: 1968148 - DNA, 25 bp, Homo sapien
gggtgaagctagacactatttttcc

SEQ ID NO: 1968149 - DNA, 25 bp, Homo sapien
gacaattgccaggaggagaatctct

SEQ ID NO: 1968150 - DNA, 25 bp, Homo sapien
ctgacaattgccaggaggagaatct

SEQ ID NO: 1968151 - DNA, 25 bp, Homo sapien
tggcaggggtgaagctagacactat

SEQ ID NO: 1968152 - DNA, 25 bp, Homo sapien
ccatgtcccggagaaagtggagcag

SEQ ID NO: 1968153 - DNA, 25 bp, Homo sapien
agttggtccacgttccactgctgag

SEQ ID NO: 1968154 - DNA, 25 bp, Homo sapien
gaagggttgcctcttagttggtcca

SEQ ID NO: 1968155 - DNA, 25 bp, Homo sapien
cggattttaattccacgcgcgcctc

SEQ ID NO: 1968156 - DNA, 25 bp, Homo sapien
ttgtggtcacaaagggtagaacagc

SEQ ID NO: 1968157 - DNA, 25 bp, Homo sapien
cagaaattgtggtcacaaagggtag

SEQ ID NO: 1968158 - DNA, 25 bp, Homo sapien
agttggaggctcagaaattgtggtc

SEQ ID NO: 1968159 - DNA, 25 bp, Homo sapien
tcacaaagggtagaacagctttcac

SEQ ID NO: 1968160 - DNA, 25 bp, Homo sapien
gatatgccgtaggacacattctcca

SEQ ID NO: 1968161 - DNA, 25 bp, Homo sapien
tcatcttcgcttggacataacctct

SEQ ID NO: 1968162 - DNA, 25 bp, Homo sapien
ccatagattttaactgggtcagcaa

SEQ ID NO: 1968163 - DNA, 25 bp, Homo sapien
aatttacttctactgggtccatgga

SEQ ID NO: 1968164 - DNA, 25 bp, Homo sapien
cgaaaggccaccttgtgctctgaaa

SEQ ID NO: 1968165 - DNA, 25 bp, Homo sapien
cccgattatcttctgcatggcagat

SEQ ID NO: 1968166 - DNA, 25 bp, Homo sapien
tctgaaactctcaccacccaactct

SEQ ID NO: 1968167 - DNA, 25 bp, Homo sapien
tttctttgcccgattatcttctgca

SEQ ID NO: 1968168 - DNA, 25 bp, Homo sapien
tgaaatggaatttcggtaccaatgt

SEQ ID NO: 1968169 - DNA, 25 bp, Homo sapien
tgcatgtgtagcttcaagatgaagg

SEQ ID NO: 1968170 - DNA, 25 bp, Homo sapien
catgtgtctgtgttgatagccctca

SEQ ID NO: 1968171 - DNA, 25 bp, Homo sapien
tgggatgattggatttttgcgtgca

SEQ ID NO: 1968172 - DNA, 25 bp, Homo sapien
acaatgtggctgacgtggaaacccc

SEQ ID NO: 1968173 - DNA, 25 bp, Homo sapien
taagagcctttcgaaacaggatccc

SEQ ID NO: 1968174 - DNA, 25 bp, Homo sapien
ccctaagcgtctgaggctgcgactg

SEQ ID NO: 1968175 - DNA, 25 bp, Homo sapien
tgcaatcacatcaatgggccaccgg

SEQ ID NO: 1968176 - DNA, 25 bp, Homo sapien
gcttcggaaagccaccagcgttcct

SEQ ID NO: 1968177 - DNA, 25 bp, Homo sapien
aagccaccagcgttcctaaacttct

SEQ ID NO: 1968178 - DNA, 25 bp, Homo sapien
caccagcgttcctaaacttcttgaa

SEQ ID NO: 1968179 - DNA, 25 bp, Homo sapien
agcaggcttcggaaagccaccagcg

SEQ ID NO: 1968180 - DNA, 25 bp, Homo sapien
agtgcagcagtaaacatacatgtgt

SEQ ID NO: 1968181 - DNA, 25 bp, Homo sapien
tagtgcagcagtaaacatacatgtg

SEQ ID NO: 1968182 - DNA, 25 bp, Homo sapien
atagtgcagcagtaaacatacatgt

SEQ ID NO: 1968183 - DNA, 25 bp, Homo sapien
gcatttactttgtgttaatgaagca

SEQ ID NO: 1968184 - DNA, 25 bp, Homo sapien
gccagttgaacaggccaattctaca

SEQ ID NO: 1968185 - DNA, 25 bp, Homo sapien
tttggttcttattgtgcaggtcatc

SEQ ID NO: 1968186 - DNA, 25 bp, Homo sapien
tctacactatctggcttggttttgg

SEQ ID NO: 1968187 - DNA, 25 bp, Homo sapien
tcagtctccaggtcggctttctttc

SEQ ID NO: 1968188 - DNA, 25 bp, Homo sapien
tgagctgaaagcgagcatttgggtc

SEQ ID NO: 1968189 - DNA, 25 bp, Homo sapien
catgaggcattcacaccacagctgc

SEQ ID NO: 1968190 - DNA, 25 bp, Homo sapien
gggaatatcacggtctcacaaatct

SEQ ID NO: 1968191 - DNA, 25 bp, Homo sapien
catatgtcgttgctgtgtgatggag

SEQ ID NO: 1968192 - DNA, 25 bp, Homo sapien
ggagcaggctgcaattcaaatatca

SEQ ID NO: 1968193 - DNA, 25 bp, Homo sapien
aatcatctggacatagtttagcacc

SEQ ID NO: 1968194 - DNA, 25 bp, Homo sapien
tcagcattatgcagtttgaagtgtt

SEQ ID NO: 1968195 - DNA, 25 bp, Homo sapien
agctctcggggaggctcggccacat

SEQ ID NO: 1968196 - DNA, 25 bp, Homo sapien
ccaggcgagaaatcgaatgcagcgc

SEQ ID NO: 1968197 - DNA, 25 bp, Homo sapien
gggaggctcggccacataggagccc

SEQ ID NO: 1968198 - DNA, 25 bp, Homo sapien
agtgcggcccgccaagtccacaccc

SEQ ID NO: 1968199 - DNA, 25 bp, Homo sapien
ccatgagggcgggaaccctcgtacg

SEQ ID NO: 1968200 - DNA, 25 bp, Homo sapien
catgagggcgggaccctggtacgcg

SEQ ID NO: 1968201 - DNA, 25 bp, Homo sapien
ggtcatgagggcctgaccctcgtac

SEQ ID NO: 1968202 - DNA, 25 bp, Homo sapien
ggcctgaccctcgtacgcggaaggc

SEQ ID NO: 1968203 - DNA, 25 bp, Homo sapien
tcgtgaacgccgcacacatggttgt

SEQ ID NO: 1968204 - DNA, 25 bp, Homo sapien
gaacccttgtaatccaattgcggga

SEQ ID NO: 1968205 - DNA, 25 bp, Homo sapien
ggagtcccataagtacccaggtaca

SEQ ID NO: 1968206 - DNA, 25 bp, Homo sapien
cagctgagacttatacggaggattc

SEQ ID NO: 1968207 - DNA, 25 bp, Homo sapien
tgatagattgtactaagttaacagc

SEQ ID NO: 1968208 - DNA, 25 bp, Homo sapien
aagttaacagcatcaagctcaaaag

SEQ ID NO: 1968209 - DNA, 25 bp, Homo sapien
tattgaggccctaatatgtgttaga

SEQ ID NO: 1968210 - DNA, 25 bp, Homo sapien
ctcttagggtccatttattgaggcc

SEQ ID NO: 1968211 - DNA, 25 bp, Homo sapien
tcccgccatctgaataaggtcttga

SEQ ID NO: 1968212 - DNA, 25 bp, Homo sapien
gagtcccattgttcaccggctggtg

SEQ ID NO: 1968213 - DNA, 25 bp, Homo sapien
ccaaattcagtgtatgggctacagt

SEQ ID NO: 1968214 - DNA, 25 bp, Homo sapien
gaaacagctagattggttgcaactt

SEQ ID NO: 1968215 - DNA, 25 bp, Homo sapien
gaaggctccttgatctacagacagc

SEQ ID NO: 1968216 - DNA, 25 bp, Homo sapien
cttgatctacagacagcccctgctt

SEQ ID NO: 1968217 - DNA, 25 bp, Homo sapien
acagacagcccctgcttttctggac

SEQ ID NO: 1968218 - DNA, 25 bp, Homo sapien
gatctacagacagcccctgcttttc

SEQ ID NO: 1968219 - DNA, 25 bp, Homo sapien
aagtcacactgacaggaccggaggg

SEQ ID NO: 1968220 - DNA, 25 bp, Homo sapien
cctagtagagttgccgtcaggagca

SEQ ID NO: 1968221 - DNA, 25 bp, Homo sapien
tattaatgacgtgctcacagagccc

SEQ ID NO: 1968222 - DNA, 25 bp, Homo sapien
tttcccaggatgtcgcaagaacagg

SEQ ID NO: 1968223 - DNA, 25 bp, Homo sapien
ggtctacagtcctcctgttatcagg

SEQ ID NO: 1968224 - DNA, 25 bp, Homo sapien
catctgctcgcccagttggctgtgt

SEQ ID NO: 1968225 - DNA, 25 bp, Homo sapien
gaacaaggtaccaggaatgaagcca

SEQ ID NO: 1968226 - DNA, 25 bp, Homo sapien
aaggttgggtggacgtttcattgca

SEQ ID NO: 1968227 - DNA, 25 bp, Homo sapien
ccttgctgactttggggacactctt

SEQ ID NO: 1968228 - DNA, 25 bp, Homo sapien
ttgtaaagacgctcctcattcgccc

SEQ ID NO: 1968229 - DNA, 25 bp, Homo sapien
gactcatgtccagttttgaaattgc

SEQ ID NO: 1968230 - DNA, 25 bp, Homo sapien
caggcactgggacggtcaggttttt

SEQ ID NO: 1968231 - DNA, 25 bp, Homo sapien
agtgcttggcactgagattcccaca

SEQ ID NO: 1968232 - DNA, 25 bp, Homo sapien
cagctgagaggagtatcatcgaact

SEQ ID NO: 1968233 - DNA, 25 bp, Homo sapien
gaggagtatcatcgaactgagttga

SEQ ID NO: 1968234 - DNA, 25 bp, Homo sapien
catcgaactgagttgattgttttgg

SEQ ID NO: 1968235 - DNA, 25 bp, Homo sapien
tcgaactgagttgattgttttggaa

SEQ ID NO: 1968236 - DNA, 25 bp, Homo sapien
gaattacaggcccccaccatcacac

SEQ ID NO: 1968237 - DNA, 25 bp, Homo sapien
gctggaattacaggcccccaccatc

SEQ ID NO: 1968238 - DNA, 25 bp, Homo sapien
tggaattacaggcccccaccatcac

SEQ ID NO: 1968239 - DNA, 25 bp, Homo sapien
tgcacctggccaagaatctttttta

SEQ ID NO: 1968240 - DNA, 25 bp, Homo sapien
caactgctggctcgtaggcatggag

SEQ ID NO: 1968241 - DNA, 25 bp, Homo sapien
tgcagaggcatgtctctcggatctt

SEQ ID NO: 1968242 - DNA, 25 bp, Homo sapien
caaaagcctgcaattctgtggacca

SEQ ID NO: 1968243 - DNA, 25 bp, Homo sapien
tctccacgacaaatcacgaagatgc

SEQ ID NO: 1968244 - DNA, 25 bp, Homo sapien
caagggccgagggacgagaaatatc

SEQ ID NO: 1968245 - DNA, 25 bp, Homo sapien
cacagtgttcttgggcagagcatga

SEQ ID NO: 1968246 - DNA, 25 bp, Homo sapien
tgttcatccgaggacacaaaagctt

SEQ ID NO: 1968247 - DNA, 25 bp, Homo sapien
caaaggcacgtgctctgcactggca

SEQ ID NO: 1968248 - DNA, 25 bp, Homo sapien
gaatgatgaccagatatgtcgctag

SEQ ID NO: 1968249 - DNA, 25 bp, Homo sapien
cagccaggttgcttggaatgatgac

SEQ ID NO: 1968250 - DNA, 25 bp, Homo sapien
tctttcctctatttaggctctggct

SEQ ID NO: 1968251 - DNA, 25 bp, Homo sapien
gatgacatgagcttcaccttgcggg

SEQ ID NO: 1968252 - DNA, 25 bp, Homo sapien
acgtgggacccctggtcataggtca

SEQ ID NO: 1968253 - DNA, 25 bp, Homo sapien
ggagacaataataccctgaagatgg

SEQ ID NO: 1968254 - DNA, 25 bp, Homo sapien
gccagcactgggttcgagtcagaat

SEQ ID NO: 1968255 - DNA, 25 bp, Homo sapien
cagaattctgggtcccaacgtggga

SEQ ID NO: 1968256 - DNA, 25 bp, Homo sapien
gcatgagaaccaaggaatgttatta

SEQ ID NO: 1968257 - DNA, 25 bp, Homo sapien
tgcatgagaaccaaggaatgttatt

SEQ ID NO: 1968258 - DNA, 25 bp, Homo sapien
gagcctctccatttgcaggatccac

SEQ ID NO: 1968259 - DNA, 25 bp, Homo sapien
gctgccccgtgccttgacctttact

SEQ ID NO: 1968260 - DNA, 25 bp, Homo sapien
catttgcaggatccacacggacatc

SEQ ID NO: 1968261 - DNA, 25 bp, Homo sapien
aggatccacacggacatccagctgc

SEQ ID NO: 1968262 - DNA, 25 bp, Homo sapien
ctcctccaccaagtcccacgtcttc

SEQ ID NO: 1968263 - DNA, 25 bp, Homo sapien
tcctccaccaagtcccacgtcttca

SEQ ID NO: 1968264 - DNA, 25 bp, Homo sapien
cctccaccaagtcccacgtcttcat

SEQ ID NO: 1968265 - DNA, 25 bp, Homo sapien
gtttacattcggcagcatccagctg

SEQ ID NO: 1968266 - DNA, 25 bp, Homo sapien
tgagctgtaggtttacattcggcag

SEQ ID NO: 1968267 - DNA, 25 bp, Homo sapien
catctcccgagctgactttcctttt

SEQ ID NO: 1968268 - DNA, 25 bp, Homo sapien
tgtaggtttacattcggcagcatcc

SEQ ID NO: 1968269 - DNA, 25 bp, Homo sapien
tcgggcttcggtcttccaagtagct

SEQ ID NO: 1968270 - DNA, 25 bp, Homo sapien
caggcaggatcacagtactgatcag

SEQ ID NO: 1968271 - DNA, 25 bp, Homo sapien
gcaaccttatggtttctgctcctga

SEQ ID NO: 1968272 - DNA, 25 bp, Homo sapien
ttgacttgctctggttttgacatgg

SEQ ID NO: 1968273 - DNA, 25 bp, Homo sapien
tcttcacatgtcagccttgattcca

SEQ ID NO: 1968274 - DNA, 25 bp, Homo sapien
atcttcacatgtcagccttgattcc

SEQ ID NO: 1968275 - DNA, 25 bp, Homo sapien
cttcacatgtcagccttgattccat

SEQ ID NO: 1968276 - DNA, 25 bp, Homo sapien
cttgtgaatacatccaccagctctt

SEQ ID NO: 1968277 - DNA, 25 bp, Homo sapien
ctggagaaagtgttgagacttgtga

SEQ ID NO: 1968278 - DNA, 25 bp, Homo sapien
ctcctccatgacctagcttggactt

SEQ ID NO: 1968279 - DNA, 25 bp, Homo sapien
tccatgacctagcttggacttctcc

SEQ ID NO: 1968280 - DNA, 25 bp, Homo sapien
cctgcgataggagcccagcatgcat

SEQ ID NO: 1968281 - DNA, 25 bp, Homo sapien
gggacagggatagaagtatgtgtga

SEQ ID NO: 1968282 - DNA, 25 bp, Homo sapien
ttctccatgtgcctgcgataggagc

SEQ ID NO: 1968283 - DNA, 25 bp, Homo sapien
gaaggacagtcttggtatagctctc

SEQ ID NO: 1968284 - DNA, 25 bp, Homo sapien
tggctagcatggcaagagctcccac

SEQ ID NO: 1968285 - DNA, 25 bp, Homo sapien
tgtgtgtttggctagcatggcaaga

SEQ ID NO: 1968286 - DNA, 25 bp, Homo sapien
ttagaaggacataaccttctccttc

SEQ ID NO: 1968287 - DNA, 25 bp, Homo sapien
atggcaagagctcccacagaaaagg

SEQ ID NO: 1968288 - DNA, 25 bp, Homo sapien
tattgccaatagaactcgatgactt

SEQ ID NO: 1968289 - DNA, 25 bp, Homo sapien
tgaaattcaaaaagagacacattca

SEQ ID NO: 1968290 - DNA, 25 bp, Homo sapien
gcaaatctagctgcagtatttgaaa

SEQ ID NO: 1968291 - DNA, 25 bp, Homo sapien
cgatgactttgaaaaggtttgcaaa

SEQ ID NO: 1968292 - DNA, 25 bp, Homo sapien
gtcactctacatttaagccttctca

SEQ ID NO: 1968293 - DNA, 25 bp, Homo sapien
aggttcaatactgtgtacatgctac

SEQ ID NO: 1968294 - DNA, 25 bp, Homo sapien
tgctggtcactctacatttaagcct

SEQ ID NO: 1968295 - DNA, 25 bp, Homo sapien
aatactgtgtacatgctactgctgc

SEQ ID NO: 1968296 - DNA, 25 bp, Homo sapien
cttcccatgcaagatgtagagtgag

SEQ ID NO: 1968297 - DNA, 25 bp, Homo sapien
ccatgcaagatgtagagtgagcccc

SEQ ID NO: 1968298 - DNA, 25 bp, Homo sapien
acatgtgccgttagtagcccagaaa

SEQ ID NO: 1968299 - DNA, 25 bp, Homo sapien
tgaaaagtatacaaccgtacatgtg

SEQ ID NO: 1968300 - DNA, 25 bp, Homo sapien
taggatagctgagaagtccgtatca

SEQ ID NO: 1968301 - DNA, 25 bp, Homo sapien
gagaagtccgtatcattttcaatgc

SEQ ID NO: 1968302 - DNA, 25 bp, Homo sapien
tttcttccatatcatttaggatagc

SEQ ID NO: 1968303 - DNA, 25 bp, Homo sapien
tccatatcatttaggatagctgaga

SEQ ID NO: 1968304 - DNA, 25 bp, Homo sapien
tgattatgtgaaccaggaaattggc

SEQ ID NO: 1968305 - DNA, 25 bp, Homo sapien
cagcagatccccttgttcccacact

SEQ ID NO: 1968306 - DNA, 25 bp, Homo sapien
tgaaccaggaaattggctccttggt

SEQ ID NO: 1968307 - DNA, 25 bp, Homo sapien
gaaattggctccttggtgcatgttg

SEQ ID NO: 1968308 - DNA, 25 bp, Homo sapien
ctttgtgtactgaatacgtcttcct

SEQ ID NO: 1968309 - DNA, 25 bp, Homo sapien
tttgtgtactgaatacgtcttcctt

SEQ ID NO: 1968310 - DNA, 25 bp, Homo sapien
tctgcaagggatgctattttctgaa

SEQ ID NO: 1968311 - DNA, 25 bp, Homo sapien
ttctgcaagggatgctattttctga

SEQ ID NO: 1968312 - DNA, 25 bp, Homo sapien
attctgcaagggatgctattttctg

SEQ ID NO: 1968313 - DNA, 25 bp, Homo sapien
tgtaaggcttaaaggatacctggat

SEQ ID NO: 1968314 - DNA, 25 bp, Homo sapien
cctggattccaatagccagatttgc

SEQ ID NO: 1968315 - DNA, 25 bp, Homo sapien
ccaatagccagatttgctattttgc

SEQ ID NO: 1968316 - DNA, 25 bp, Homo sapien
tctcaaacctaatgatgtaaggctt

SEQ ID NO: 1968317 - DNA, 25 bp, Homo sapien
gacagttgttctcccacctgtggga

SEQ ID NO: 1968318 - DNA, 25 bp, Homo sapien
cacaagcagtcagttcaggaactgc

SEQ ID NO: 1968319 - DNA, 25 bp, Homo sapien
gacagcctcccacaagcagtcagtt

SEQ ID NO: 1968320 - DNA, 25 bp, Homo sapien
tgtgggaaaccccaaggacagcctc

SEQ ID NO: 1968321 - DNA, 25 bp, Homo sapien
ctgcccaagtggagaggagcacata

SEQ ID NO: 1968322 - DNA, 25 bp, Homo sapien
catctgcttggggaccgttaacgtg

SEQ ID NO: 1968323 - DNA, 25 bp, Homo sapien
tgcccaagtggagaggagcacataa

SEQ ID NO: 1968324 - DNA, 25 bp, Homo sapien
cttggggaccgttaacgtgcctctg

SEQ ID NO: 1968325 - DNA, 25 bp, Homo sapien
gatagtgaggattgctaagaagcac

SEQ ID NO: 1968326 - DNA, 25 bp, Homo sapien
agcagctgcggatgtatataggaga

SEQ ID NO: 1968327 - DNA, 25 bp, Homo sapien
gaagcacatctatgggaccaaagac

SEQ ID NO: 1968328 - DNA, 25 bp, Homo sapien
ctccccgctgaagggcagatgagca

SEQ ID NO: 1968329 - DNA, 25 bp, Homo sapien
tgaaggaatattcgggcccactggg

SEQ ID NO: 1968330 - DNA, 25 bp, Homo sapien
tggcagtttcgtggttctctcagac

SEQ ID NO: 1968331 - DNA, 25 bp, Homo sapien
gcccactgggtttggcagtttcgtg

SEQ ID NO: 1968332 - DNA, 25 bp, Homo sapien
ccgtggccgtcctcaaggtcggctt

SEQ ID NO: 1968333 - DNA, 25 bp, Homo sapien
tatctttgttgtcaccactaccctg

SEQ ID NO: 1968334 - DNA, 25 bp, Homo sapien
actaccctggaatgctctgttccca

SEQ ID NO: 1968335 - DNA, 25 bp, Homo sapien
gccactgaatgaacgaaaacccctg

SEQ ID NO: 1968336 - DNA, 25 bp, Homo sapien
ggccttgtttaccactcactgtatg

SEQ ID NO: 1968337 - DNA, 25 bp, Homo sapien
ctacttctaccctggcggcaaattc

SEQ ID NO: 1968338 - DNA, 25 bp, Homo sapien
aaattcactcctgcctagtcctggt

SEQ ID NO: 1968339 - DNA, 25 bp, Homo sapien
taccctggcggcaaattcactcctg

SEQ ID NO: 1968340 - DNA, 25 bp, Homo sapien
tggcggcaaattcactcctgcctag

SEQ ID NO: 1968341 - DNA, 25 bp, Homo sapien
tagaaccagcaatttaacatcaaaa

SEQ ID NO: 1968342 - DNA, 25 bp, Homo sapien
gaaccagcaatttaacatcaaaaca

SEQ ID NO: 1968343 - DNA, 25 bp, Homo sapien
cagattagaaccagcaatttaacat

SEQ ID NO: 1968344 - DNA, 25 bp, Homo sapien
gattagaaccagcaatttaacatca

SEQ ID NO: 1968345 - DNA, 25 bp, Homo sapien
ctttgtggttctcatggcttcaggt

SEQ ID NO: 1968346 - DNA, 25 bp, Homo sapien
cagcctttgtggttctcatggcttc

SEQ ID NO: 1968347 - DNA, 25 bp, Homo sapien
tgggtagcaggtgcaatcttcagcc

SEQ ID NO: 1968348 - DNA, 25 bp, Homo sapien
ctatggaatcagtgctatttgactg

SEQ ID NO: 1968349 - DNA, 25 bp, Homo sapien
atcatcagggatctttaggtggcag

SEQ ID NO: 1968350 - DNA, 25 bp, Homo sapien
tcatcagggatctttaggtggcagc

SEQ ID NO: 1968351 - DNA, 25 bp, Homo sapien
caggaatgccccagcattgagcaca

SEQ ID NO: 1968352 - DNA, 25 bp, Homo sapien
ttttccattcaatgactgcagccaa

SEQ ID NO: 1968353 - DNA, 25 bp, Homo sapien
gactctcctcaggaatgccccagca

SEQ ID NO: 1968354 - DNA, 25 bp, Homo sapien
ccattcaatgactgcagccaaatga

SEQ ID NO: 1968355 - DNA, 25 bp, Homo sapien
tccctccaatcgatgatcaaatctg

SEQ ID NO: 1968356 - DNA, 25 bp, Homo sapien
tgaattcacattgtagacaccctgg

SEQ ID NO: 1968357 - DNA, 25 bp, Homo sapien
tagatgccccgcgttgcagtaacgc

SEQ ID NO: 1968358 - DNA, 25 bp, Homo sapien
taaccattttgaccataacacggcc

SEQ ID NO: 1968359 - DNA, 25 bp, Homo sapien
tcacacggacaatgtgttttatctg

SEQ ID NO: 1968360 - DNA, 25 bp, Homo sapien
tgttttactcacacggacaatgtgt

SEQ ID NO: 1968361 - DNA, 25 bp, Homo sapien
ctaggaagaggcccacgtgaatgtt

SEQ ID NO: 1968362 - DNA, 25 bp, Homo sapien
ggcccacgtgaatgttttactcaca

SEQ ID NO: 1968363 - DNA, 25 bp, Homo sapien
agccgcgcatgtctcggcgccggcc

SEQ ID NO: 1968364 - DNA, 25 bp, Homo sapien
cgtcagccgcgcatgtctcggcgcc

SEQ ID NO: 1968365 - DNA, 25 bp, Homo sapien
gccgcgcatgtctcggcgccggccc

SEQ ID NO: 1968366 - DNA, 25 bp, Homo sapien
tcagccgcgcatgtctcggcgccgg

SEQ ID NO: 1968367 - DNA, 25 bp, Homo sapien
ctgggcgcgcgcgtacgagtggtag

SEQ ID NO: 1968368 - DNA, 25 bp, Homo sapien
gcgcgcagcgcgactcggcgttggg

SEQ ID NO: 1968369 - DNA, 25 bp, Homo sapien
cgcgcgtacgagtggtaggcggtca

SEQ ID NO: 1968370 - DNA, 25 bp, Homo sapien
tacgagtggtaggcggtcagcacca

SEQ ID NO: 1968371 - DNA, 25 bp, Homo sapien
gaaacaacatccagtgacggcggtc

SEQ ID NO: 1968372 - DNA, 25 bp, Homo sapien
tatcctcaaatcgtatcaagaatgc

SEQ ID NO: 1968373 - DNA, 25 bp, Homo sapien
tggtggagccttcgagcgtttccca

SEQ ID NO: 1968374 - DNA, 25 bp, Homo sapien
gcaactttggccgaaatgaggtata

SEQ ID NO: 1968375 - DNA, 25 bp, Homo sapien
catagagttgacattagcagtaatc

SEQ ID NO: 1968376 - DNA, 25 bp, Homo sapien
ggaaatataattgcattgacagcat

SEQ ID NO: 1968377 - DNA, 25 bp, Homo sapien
caattgaaaggttttaacatgtaga

SEQ ID NO: 1968378 - DNA, 25 bp, Homo sapien
atcaaataatgacaccaatgccttt

SEQ ID NO: 1968379 - DNA, 25 bp, Homo sapien
caaatggatgatcactgatagagta

SEQ ID NO: 1968380 - DNA, 25 bp, Homo sapien
gcatcaaatggatgatcactgatag

SEQ ID NO: 1968381 - DNA, 25 bp, Homo sapien
tcttgcatcaaatggatgatcactg

SEQ ID NO: 1968382 - DNA, 25 bp, Homo sapien
ggatgatcactgatagagtaattta

SEQ ID NO: 1968383 - DNA, 25 bp, Homo sapien
cagaagtaattatcgcacaactaaa

SEQ ID NO: 1968384 - DNA, 25 bp, Homo sapien
tgatgaaaacacaccactcaaactg

SEQ ID NO: 1968385 - DNA, 25 bp, Homo sapien
gaaaagcactcgtcagtggatcaga

SEQ ID NO: 1968386 - DNA, 25 bp, Homo sapien
gtggatcagatagtcacatttacac

SEQ ID NO: 1968387 - DNA, 25 bp, Homo sapien
aaataccctaaagacaaatgccagt

SEQ ID NO: 1968388 - DNA, 25 bp, Homo sapien
aaatgagatttcactcaacctgctg

SEQ ID NO: 1968389 - DNA, 25 bp, Homo sapien
ttagccaagcccaacatagatctct

SEQ ID NO: 1968390 - DNA, 25 bp, Homo sapien
gccagtttatatcttcgagcagcct

SEQ ID NO: 1968391 - DNA, 25 bp, Homo sapien
gacagctacactagaaccgtttaag

SEQ ID NO: 1968392 - DNA, 25 bp, Homo sapien
gaattatagacaggacagctacact

SEQ ID NO: 1968393 - DNA, 25 bp, Homo sapien
tggctggcgttctgagacagctgct

SEQ ID NO: 1968394 - DNA, 25 bp, Homo sapien
aatggacaaacttggcccatgcttt

SEQ ID NO: 1968395 - DNA, 25 bp, Homo sapien
aaaagtccacgctttctagggccat

SEQ ID NO: 1968396 - DNA, 25 bp, Homo sapien
cagaggaacaatggtaccaaggctc

SEQ ID NO: 1968397 - DNA, 25 bp, Homo sapien
tgaacctatgccaccaagagctaaa

SEQ ID NO: 1968398 - DNA, 25 bp, Homo sapien
gagtgcagggcagtcaccaaaaatg

SEQ ID NO: 1968399 - DNA, 25 bp, Homo sapien
tcagcttcagctagggatggcaggc

SEQ ID NO: 1968400 - DNA, 25 bp, Homo sapien
cctaacacgttgctggccatggagg

SEQ ID NO: 1968401 - DNA, 25 bp, Homo sapien
ggtgcttcctctgcgttagtcaata

SEQ ID NO: 1968402 - DNA, 25 bp, Homo sapien
cctaagcagcggaagtaaattgccc

SEQ ID NO: 1968403 - DNA, 25 bp, Homo sapien
taaaggccagtgcatttatgtgact

SEQ ID NO: 1968404 - DNA, 25 bp, Homo sapien
tactgtcaatatatcgcaacctaga

SEQ ID NO: 1968405 - DNA, 25 bp, Homo sapien
gcaagattggagctataaaactcag

SEQ ID NO: 1968406 - DNA, 25 bp, Homo sapien
gatccctttgattcttcggttgcaa

SEQ ID NO: 1968407 - DNA, 25 bp, Homo sapien
taaatttcgcagtggttggaatccc

SEQ ID NO: 1968408 - DNA, 25 bp, Homo sapien
ggactccctgccactgttaagcaca

SEQ ID NO: 1968409 - DNA, 25 bp, Homo sapien
cacagaaggtaattggtgttcctca

SEQ ID NO: 1968410 - DNA, 25 bp, Homo sapien
tgcactgtagacaccaactaggact

SEQ ID NO: 1968411 - DNA, 25 bp, Homo sapien
ggtaattccctgtaaggctctaggc

SEQ ID NO: 1968412 - DNA, 25 bp, Homo sapien
tacccagtcagggagccagttctcc

SEQ ID NO: 1968413 - DNA, 25 bp, Homo sapien
caggatcgacaggttggtaattccc

SEQ ID NO: 1968414 - DNA, 25 bp, Homo sapien
cattgtgggcctgagtgaacgctgt

SEQ ID NO: 1968415 - DNA, 25 bp, Homo sapien
gaaatgccattctcataatcgacac

SEQ ID NO: 1968416 - DNA, 25 bp, Homo sapien
aaatgccattctcataatcgacacc

SEQ ID NO: 1968417 - DNA, 25 bp, Homo sapien
aatgccattctcataatcgacacca

SEQ ID NO: 1968418 - DNA, 25 bp, Homo sapien
atgccattctcataatcgacaccac

SEQ ID NO: 1968419 - DNA, 25 bp, Homo sapien
tttcccggaataggtattgatgcag

SEQ ID NO: 1968420 - DNA, 25 bp, Homo sapien
ccactttcacagcaaacggtgcatt

SEQ ID NO: 1968421 - DNA, 25 bp, Homo sapien
tccaggaaggcagaaaatctctaac

SEQ ID NO: 1968422 - DNA, 25 bp, Homo sapien
gatgcagtaactggttcgttgaacc

SEQ ID NO: 1968423 - DNA, 25 bp, Homo sapien
ttgcttcaaccaggacaggacagtg

SEQ ID NO: 1968424 - DNA, 25 bp, Homo sapien
gcttcaaccaggacaggacagtgct

SEQ ID NO: 1968425 - DNA, 25 bp, Homo sapien
attgcttcaaccaggacaggacagt

SEQ ID NO: 1968426 - DNA, 25 bp, Homo sapien
tgcttcaaccaggacaggacagtgc

SEQ ID NO: 1968427 - DNA, 25 bp, Homo sapien
aaaaatttcagggatgatattcttg

SEQ ID NO: 1968428 - DNA, 25 bp, Homo sapien
tattcttgaggaagacccacaaaac

SEQ ID NO: 1968429 - DNA, 25 bp, Homo sapien
gggatgatattcttgaggaagaccc

SEQ ID NO: 1968430 - DNA, 25 bp, Homo sapien
tcagggatgatattcttgaggaaga

SEQ ID NO: 1968431 - DNA, 25 bp, Homo sapien
tgaacacatccagcgaatgtcacat

SEQ ID NO: 1968432 - DNA, 25 bp, Homo sapien
tggcctatcattgccctcggttttg

SEQ ID NO: 1968433 - DNA, 25 bp, Homo sapien
ccagcgaatgtcacatccgaagcat

SEQ ID NO: 1968434 - DNA, 25 bp, Homo sapien
cacatccgaagcatcacgtggccta

SEQ ID NO: 1968435 - DNA, 25 bp, Homo sapien
caggatatctgcagatcacttcaga

SEQ ID NO: 1968436 - DNA, 25 bp, Homo sapien
taagccacagagttagccagcgctc

SEQ ID NO: 1968437 - DNA, 25 bp, Homo sapien
cagagttagccagcgctctgcttac

SEQ ID NO: 1968438 - DNA, 25 bp, Homo sapien
tatctgcagatcacttcagatgttc

SEQ ID NO: 1968439 - DNA, 25 bp, Homo sapien
aggagttccctgcacagcctgaggg

SEQ ID NO: 1968440 - DNA, 25 bp, Homo sapien
aagaagaatgggcagagacagcagc

SEQ ID NO: 1968441 - DNA, 25 bp, Homo sapien
agaatgggcagagacagcagctccc

SEQ ID NO: 1968442 - DNA, 25 bp, Homo sapien
gggtcaggagttccctgcacagcct

SEQ ID NO: 1968443 - DNA, 25 bp, Homo sapien
cagcctcagagacacatcccatgtc

SEQ ID NO: 1968444 - DNA, 25 bp, Homo sapien
gaagcagcctcagagacacatccca

SEQ ID NO: 1968445 - DNA, 25 bp, Homo sapien
gcctcagagacacatcccatgtcac

SEQ ID NO: 1968446 - DNA, 25 bp, Homo sapien
taaggaagcagcctcagagacacat

SEQ ID NO: 1968447 - DNA, 25 bp, Homo sapien
cagtcaacgcatcaattcctgcaag

SEQ ID NO: 1968448 - DNA, 25 bp, Homo sapien
tgcaagtatgcacagatgccaatcc

SEQ ID NO: 1968449 - DNA, 25 bp, Homo sapien
catcaattcctgcaagtatgcacag

SEQ ID NO: 1968450 - DNA, 25 bp, Homo sapien
gcacagatgccaatccaagtcccag

SEQ ID NO: 1968451 - DNA, 25 bp, Homo sapien
tcactggtacaagtcatgaactgcg

SEQ ID NO: 1968452 - DNA, 25 bp, Homo sapien
caaatctaggtaggtagactcccca

SEQ ID NO: 1968453 - DNA, 25 bp, Homo sapien
gaaattcaagtcatctgcggcacca

SEQ ID NO: 1968454 - DNA, 25 bp, Homo sapien
gaaacaatttgaggcagggcacggt

SEQ ID NO: 1968455 - DNA, 25 bp, Homo sapien
ggttcctctgcaattcacaggactg

SEQ ID NO: 1968456 - DNA, 25 bp, Homo sapien
ttcctctgcaattcacaggactgtc

SEQ ID NO: 1968457 - DNA, 25 bp, Homo sapien
gtgaggatgggcagttccaaggttc

SEQ ID NO: 1968458 - DNA, 25 bp, Homo sapien
caaggttcctctgcaattcacagga

SEQ ID NO: 1968459 - DNA, 25 bp, Homo sapien
ttgacaacttcttttcagcgagtgc

SEQ ID NO: 1968460 - DNA, 25 bp, Homo sapien
tcaggctggttgtctaccgctaagg

SEQ ID NO: 1968461 - DNA, 25 bp, Homo sapien
cctgtttctcttggtacgttcctgg

SEQ ID NO: 1968462 - DNA, 25 bp, Homo sapien
ttcagcgagtgctcactggtacaga

SEQ ID NO: 1968463 - DNA, 25 bp, Homo sapien
cataccacttatcatcttgtagttc

SEQ ID NO: 1968464 - DNA, 25 bp, Homo sapien
tgatcctaccagatgaaaaggttct

SEQ ID NO: 1968465 - DNA, 25 bp, Homo sapien
tgaaaaggttctgccaacacatacc

SEQ ID NO: 1968466 - DNA, 25 bp, Homo sapien
cacttatcatcttgtagttcactgg

SEQ ID NO: 1968467 - DNA, 25 bp, Homo sapien
gatgctgtgatgtatttgctggaat

SEQ ID NO: 1968468 - DNA, 25 bp, Homo sapien
gtttcttctaaatctctggtctcca

SEQ ID NO: 1968469 - DNA, 25 bp, Homo sapien
gaatgcagccatttagcccctgttt

SEQ ID NO: 1968470 - DNA, 25 bp, Homo sapien
ttgactttctagctccctcctgcct

SEQ ID NO: 1968471 - DNA, 25 bp, Homo sapien
agaaataacaccagatgctgcctat

SEQ ID NO: 1968472 - DNA, 25 bp, Homo sapien
gagtgagatgagacaccctctgtat

SEQ ID NO: 1968473 - DNA, 25 bp, Homo sapien
cattcctaactgataatgggaagga

SEQ ID NO: 1968474 - DNA, 25 bp, Homo sapien
ccaagaaattgtagcaattggcctt

SEQ ID NO: 1968475 - DNA, 25 bp, Homo sapien
atggagggattcattggagagcatc

SEQ ID NO: 1968476 - DNA, 25 bp, Homo sapien
gcatcctgttaattcttcggcagcg

SEQ ID NO: 1968477 - DNA, 25 bp, Homo sapien
tcttcggcagcgaggaatggatttt

SEQ ID NO: 1968478 - DNA, 25 bp, Homo sapien
gagggattcattggagagcatcctg

SEQ ID NO: 1968479 - DNA, 25 bp, Homo sapien
ctacggaggcttctgagttggaacg

SEQ ID NO: 1968480 - DNA, 25 bp, Homo sapien
aggcgctgtctacggaggcttctga

SEQ ID NO: 1968481 - DNA, 25 bp, Homo sapien
tctatttcccgccagaaatcctcca

SEQ ID NO: 1968482 - DNA, 25 bp, Homo sapien
tgtctacggaggcttctgagttgga

SEQ ID NO: 1968483 - DNA, 25 bp, Homo sapien
ggtgtgacctcagctggcggtggct

SEQ ID NO: 1968484 - DNA, 25 bp, Homo sapien
gtgacctcagctggcggtggctctt

SEQ ID NO: 1968485 - DNA, 25 bp, Homo sapien
caggtgtgacctcagctggcggtgg

SEQ ID NO: 1968486 - DNA, 25 bp, Homo sapien
catccacaggtgtgacctcagctgg

SEQ ID NO: 1968487 - DNA, 25 bp, Homo sapien
atttctggacatgcttataccatac

SEQ ID NO: 1968488 - DNA, 25 bp, Homo sapien
gacatgcttataccatactctcctc

SEQ ID NO: 1968489 - DNA, 25 bp, Homo sapien
tggacatgcttataccatactctcc

SEQ ID NO: 1968490 - DNA, 25 bp, Homo sapien
tctggacatgcttataccatactct

SEQ ID NO: 1968491 - DNA, 25 bp, Homo sapien
tcgagtcaatgtggagagcaaggct

SEQ ID NO: 1968492 - DNA, 25 bp, Homo sapien
cggcagctgcttgggttcgagtcaa

SEQ ID NO: 1968493 - DNA, 25 bp, Homo sapien
tatggtatctcttttgcacggcagc

SEQ ID NO: 1968494 - DNA, 25 bp, Homo sapien
gttgataaacccacatcttgcagcc

SEQ ID NO: 1968495 - DNA, 25 bp, Homo sapien
cggatcctacccacaaagacttgtt

SEQ ID NO: 1968496 - DNA, 25 bp, Homo sapien
cccggatcctacccacaaagacttg

SEQ ID NO: 1968497 - DNA, 25 bp, Homo sapien
gatcctacccacaaagacttgttcc

SEQ ID NO: 1968498 - DNA, 25 bp, Homo sapien
ccggatcctacccacaaagacttgt

SEQ ID NO: 1968499 - DNA, 25 bp, Homo sapien
catggagggtagctcaagattttcc

SEQ ID NO: 1968500 - DNA, 25 bp, Homo sapien
gcagagcttaataccaatgtgatgg

SEQ ID NO: 1968501 - DNA, 25 bp, Homo sapien
gcagctattgccgtgggtgttgtta

SEQ ID NO: 1968502 - DNA, 25 bp, Homo sapien
catggcaatgtgcagttgtagtccc

SEQ ID NO: 1968503 - DNA, 25 bp, Homo sapien
cattgatcctcataaatgccatgta

SEQ ID NO: 1968504 - DNA, 25 bp, Homo sapien
aattacattgatcctcataaatgcc

SEQ ID NO: 1968505 - DNA, 25 bp, Homo sapien
taaatgccatgtactgtaacagaat

SEQ ID NO: 1968506 - DNA, 25 bp, Homo sapien
tgtaacagaattcgtctcagaagca

SEQ ID NO: 1968507 - DNA, 25 bp, Homo sapien
catggaaccacttgtcttgataact

SEQ ID NO: 1968508 - DNA, 25 bp, Homo sapien
gataactcttggaagctctctttct

SEQ ID NO: 1968509 - DNA, 25 bp, Homo sapien
tagtgtggttgccacaggtatcacg

SEQ ID NO: 1968510 - DNA, 25 bp, Homo sapien
tgtggttgccacaggtatcacgagg

SEQ ID NO: 1968511 - DNA, 25 bp, Homo sapien
cggagcctcctagccatcctgtaag

SEQ ID NO: 1968512 - DNA, 25 bp, Homo sapien
taagaataaggattaggtccacgtg

SEQ ID NO: 1968513 - DNA, 25 bp, Homo sapien
tagtgacactaacgggtatgaagaa

SEQ ID NO: 1968514 - DNA, 25 bp, Homo sapien
gtatgaagaaggtatcggagcctcc

SEQ ID NO: 1968515 - DNA, 25 bp, Homo sapien
tcgttgacaacatcctccacacagg

SEQ ID NO: 1968516 - DNA, 25 bp, Homo sapien
gacccagctttcgttgacaacatcc

SEQ ID NO: 1968517 - DNA, 25 bp, Homo sapien
catgaagacccagctttcgttgaca

SEQ ID NO: 1968518 - DNA, 25 bp, Homo sapien
aaatatttatacaggagtctgttat

SEQ ID NO: 1968519 - DNA, 25 bp, Homo sapien
tccacacgcgatgtttacatttcca

SEQ ID NO: 1968520 - DNA, 25 bp, Homo sapien
aaactaaacgtttatatctatgttg

SEQ ID NO: 1968521 - DNA, 25 bp, Homo sapien
cacattccaaaagctaacgcgttct

SEQ ID NO: 1968522 - DNA, 25 bp, Homo sapien
ttcactgtgcgcatcacagattgcc

SEQ ID NO: 1968523 - DNA, 25 bp, Homo sapien
cagttccctgaccacatggtactca

SEQ ID NO: 1968524 - DNA, 25 bp, Homo sapien
ggacaagatgaaacacctcagattg

SEQ ID NO: 1968525 - DNA, 25 bp, Homo sapien
gaaaacactcgctgccacccagcgg

SEQ ID NO: 1968526 - DNA, 25 bp, Homo sapien
ccctccactggaggcacaacctaaa

SEQ ID NO: 1968527 - DNA, 25 bp, Homo sapien
aaagattctgatagacgggactggg

SEQ ID NO: 1968528 - DNA, 25 bp, Homo sapien
tccttaggtgaaggcgtagggtgaa

SEQ ID NO: 1968529 - DNA, 25 bp, Homo sapien
ggcgtagggtgaatcctatcatcct

SEQ ID NO: 1968530 - DNA, 25 bp, Homo sapien
tgtaaaagattctgatagacgggac

SEQ ID NO: 1968531 - DNA, 25 bp, Homo sapien
tctgccttgcagaacacctttcaca

SEQ ID NO: 1968532 - DNA, 25 bp, Homo sapien
tgccttgcagaacacctttcacaca

SEQ ID NO: 1968533 - DNA, 25 bp, Homo sapien
ttctgccttgcagaacacctttcac

SEQ ID NO: 1968534 - DNA, 25 bp, Homo sapien
gccttgcagaacacctttcacacac

SEQ ID NO: 1968535 - DNA, 25 bp, Homo sapien
aaaactttagaggcccggtgagctg

SEQ ID NO: 1968536 - DNA, 25 bp, Homo sapien
gaggcccggtgagctgtaattcctt

SEQ ID NO: 1968537 - DNA, 25 bp, Homo sapien
tttagaggcccggtgagctgtaatt

SEQ ID NO: 1968538 - DNA, 25 bp, Homo sapien
tagaggcccggtgagctgtaattcc

SEQ ID NO: 1968539 - DNA, 25 bp, Homo sapien
agtcactcctgggaaccgcaaaact

SEQ ID NO: 1968540 - DNA, 25 bp, Homo sapien
acagggtagtactgttgagagaagc

SEQ ID NO: 1968541 - DNA, 25 bp, Homo sapien
gatgcgtcagacagggtagtactgt

SEQ ID NO: 1968542 - DNA, 25 bp, Homo sapien
gtcactcctgggaaccgcaaaactc

SEQ ID NO: 1968543 - DNA, 25 bp, Homo sapien
actgtgcaacaaaacaataccataa

SEQ ID NO: 1968544 - DNA, 25 bp, Homo sapien
aaaatgctgggggtgttaaagccag

SEQ ID NO: 1968545 - DNA, 25 bp, Homo sapien
tggtgtgtgcatggaaccacacgca

SEQ ID NO: 1968546 - DNA, 25 bp, Homo sapien
tctcctttggcaactcaatcataca

SEQ ID NO: 1968547 - DNA, 25 bp, Homo sapien
tgcatggaaccacacgcagtcctgt

SEQ ID NO: 1968548 - DNA, 25 bp, Homo sapien
tggaatgaactggtagaactggaat

SEQ ID NO: 1968549 - DNA, 25 bp, Homo sapien
gctccggtgatccattggaatgaac

SEQ ID NO: 1968550 - DNA, 25 bp, Homo sapien
gaactggaatggtctcaagtatagc

SEQ ID NO: 1968551 - DNA, 25 bp, Homo sapien
cacttatcgcattctgaactggctg

SEQ ID NO: 1968552 - DNA, 25 bp, Homo sapien
tttagagcctccgtaaccatttctg

SEQ ID NO: 1968553 - DNA, 25 bp, Homo sapien
tagagcctccgtaaccatttctgaa

SEQ ID NO: 1968554 - DNA, 25 bp, Homo sapien
cctccgtaaccatttctgaataaga

SEQ ID NO: 1968555 - DNA, 25 bp, Homo sapien
gagcctccgtaaccatttctgaata

SEQ ID NO: 1968556 - DNA, 25 bp, Homo sapien
agccaaatctggttttctgaacatt

SEQ ID NO: 1968557 - DNA, 25 bp, Homo sapien
ccaaatctggttttctgaacattaa

SEQ ID NO: 1968558 - DNA, 25 bp, Homo sapien
gccaaatctggttttctgaacatta

SEQ ID NO: 1968559 - DNA, 25 bp, Homo sapien
gagagagatggcggattttcttcat

SEQ ID NO: 1968560 - DNA, 25 bp, Homo sapien
ggcagtcaattcaatcagagagaga

SEQ ID NO: 1968561 - DNA, 25 bp, Homo sapien
tgtaagtggaactccaaaaatccca

SEQ ID NO: 1968562 - DNA, 25 bp, Homo sapien
aagtggaactccaaaaatcccattg

SEQ ID NO: 1968563 - DNA, 25 bp, Homo sapien
agtggaactccaaaaatcccattgt

SEQ ID NO: 1968564 - DNA, 25 bp, Homo sapien
ataccaggggaactttcactccagg

SEQ ID NO: 1968565 - DNA, 25 bp, Homo sapien
taataccaggggaactttcactcca

SEQ ID NO: 1968566 - DNA, 25 bp, Homo sapien
ctttctttcggtcaccgtccaggag

SEQ ID NO: 1968567 - DNA, 25 bp, Homo sapien
tctttctttcggtcaccgtccagga

SEQ ID NO: 1968568 - DNA, 25 bp, Homo sapien
tccagacctgattcctcaactttct

SEQ ID NO: 1968569 - DNA, 25 bp, Homo sapien
tgaaagtcgaaaaattccttcagat

SEQ ID NO: 1968570 - DNA, 25 bp, Homo sapien
cttgactttagcagtacatcctgaa

SEQ ID NO: 1968571 - DNA, 25 bp, Homo sapien
cagtacatcctgaaagtcgaaaaat

SEQ ID NO: 1968572 - DNA, 25 bp, Homo sapien
taggaagagacaaaatgttcggtac

SEQ ID NO: 1968573 - DNA, 25 bp, Homo sapien
ctaggaagagacaaaatgttcggta

SEQ ID NO: 1968574 - DNA, 25 bp, Homo sapien
gcggcgtgactgtttagggaataat

SEQ ID NO: 1968575 - DNA, 25 bp, Homo sapien
tcccacgcgtatgcggcgtgactgt

SEQ ID NO: 1968576 - DNA, 25 bp, Homo sapien
ctgcagtgtcattactatgggaatc

SEQ ID NO: 1968577 - DNA, 25 bp, Homo sapien
tactatgggaatcccacgcgtatgc

SEQ ID NO: 1968578 - DNA, 25 bp, Homo sapien
tgtggccgtcctaacctgtgagtag

SEQ ID NO: 1968579 - DNA, 25 bp, Homo sapien
aatcacaaatgtggccgtcctaacc

SEQ ID NO: 1968580 - DNA, 25 bp, Homo sapien
taacctgtgagtagttcccagtcac

SEQ ID NO: 1968581 - DNA, 25 bp, Homo sapien
cgtcctaacctgtgagtagttccca

SEQ ID NO: 1968582 - DNA, 25 bp, Homo sapien
tgctggcgcatctagggcaaggaac

SEQ ID NO: 1968583 - DNA, 25 bp, Homo sapien
agttcattcagccttgctggcgcat

SEQ ID NO: 1968584 - DNA, 25 bp, Homo sapien
tctaagcacgggaatggcaagggta

SEQ ID NO: 1968585 - DNA, 25 bp, Homo sapien
tcacgctgtaggcaatgaggcagcc

SEQ ID NO: 1968586 - DNA, 25 bp, Homo sapien
tggcatcaagttcttcacggtattg

SEQ ID NO: 1968587 - DNA, 25 bp, Homo sapien
aaacgctttcaacattactgcagct

SEQ ID NO: 1968588 - DNA, 25 bp, Homo sapien
aacttggcatcaagttcttcacggt

SEQ ID NO: 1968589 - DNA, 25 bp, Homo sapien
tgcagcttctctatggcacattttg

SEQ ID NO: 1968590 - DNA, 25 bp, Homo sapien
actttattgaccttatatcttagcg

SEQ ID NO: 1968591 - DNA, 25 bp, Homo sapien
ttcacatataacgtcttccacctac

SEQ ID NO: 1968592 - DNA, 25 bp, Homo sapien
ttctgctctcactttattgacctta

SEQ ID NO: 1968593 - DNA, 25 bp, Homo sapien
tcttagcgtattcacatataacgtc

SEQ ID NO: 1968594 - DNA, 25 bp, Homo sapien
gaggtgtaaggcttgaaactgtact

SEQ ID NO: 1968595 - DNA, 25 bp, Homo sapien
aactgtactttgacgtgaggccctc

SEQ ID NO: 1968596 - DNA, 25 bp, Homo sapien
atcaggcagcgccatgaccatgagg

SEQ ID NO: 1968597 - DNA, 25 bp, Homo sapien
gagctgcatctctgttggcatcagg

SEQ ID NO: 1968598 - DNA, 25 bp, Homo sapien
cattcggttttttgattcattggca

SEQ ID NO: 1968599 - DNA, 25 bp, Homo sapien
aaatgttccacagactcattcggtt

SEQ ID NO: 1968600 - DNA, 25 bp, Homo sapien
tctggtacttaagcattaggcggat

SEQ ID NO: 1968601 - DNA, 25 bp, Homo sapien
tgggccgcagtgtttgctaacagta

SEQ ID NO: 1968602 - DNA, 25 bp, Homo sapien
caatagcatcgtggcttcattcatt

SEQ ID NO: 1968603 - DNA, 25 bp, Homo sapien
gcttcttcaatagcatcgtggcttc

SEQ ID NO: 1968604 - DNA, 25 bp, Homo sapien
tacttgagtgattaagaaagatgga

SEQ ID NO: 1968605 - DNA, 25 bp, Homo sapien
tcccgctcgagggtcttcctcctga

SEQ ID NO: 1968606 - DNA, 25 bp, Homo sapien
attcgtcttgccgagggtgattttt

SEQ ID NO: 1968607 - DNA, 25 bp, Homo sapien
ttgccgagggtgatttttgcagtac

SEQ ID NO: 1968608 - DNA, 25 bp, Homo sapien
tcttgccgagggtgatttttgcagt

SEQ ID NO: 1968609 - DNA, 25 bp, Homo sapien
tcgtcttgccgagggtgatttttgc

SEQ ID NO: 1968610 - DNA, 25 bp, Homo sapien
tggacccgtatgactccttccggca

SEQ ID NO: 1968611 - DNA, 25 bp, Homo sapien
aatggccatggacaccttggagaga

SEQ ID NO: 1968612 - DNA, 25 bp, Homo sapien
gtatgactccttccggcacgtcaga

SEQ ID NO: 1968613 - DNA, 25 bp, Homo sapien
tttgccaatatgtctttggctttgg

SEQ ID NO: 1968614 - DNA, 25 bp, Homo sapien
tgaagaggaatacatgtttggggct

SEQ ID NO: 1968615 - DNA, 25 bp, Homo sapien
ggctcctgttggtctctgtcgactc

SEQ ID NO: 1968616 - DNA, 25 bp, Homo sapien
tggtctctgtcgactcttctctttc

SEQ ID NO: 1968617 - DNA, 25 bp, Homo sapien
tcctgttggtctctgtcgactcttc

SEQ ID NO: 1968618 - DNA, 25 bp, Homo sapien
ctacgaaaggtctacttgagagtac

SEQ ID NO: 1968619 - DNA, 25 bp, Homo sapien
taactaaaagtctactggataccca

SEQ ID NO: 1968620 - DNA, 25 bp, Homo sapien
atatttcaagtctctatatgactgc

SEQ ID NO: 1968621 - DNA, 25 bp, Homo sapien
cccaaatcccttgaatgatatttca

SEQ ID NO: 1968622 - DNA, 25 bp, Homo sapien
tgttagactcccgtaggtccctgag

SEQ ID NO: 1968623 - DNA, 25 bp, Homo sapien
caaatgttatgccacttccttccag

SEQ ID NO: 1968624 - DNA, 25 bp, Homo sapien
ccttttgggacgctgattgtatgat

SEQ ID NO: 1968625 - DNA, 25 bp, Homo sapien
tcatggcttccgaagagaaatctgc

SEQ ID NO: 1968626 - DNA, 25 bp, Homo sapien
agttactgttactgacacatcaagg

SEQ ID NO: 1968627 - DNA, 25 bp, Homo sapien
tccactacatagagcccattcaggc

SEQ ID NO: 1968628 - DNA, 25 bp, Homo sapien
ggttagttactgttactgacacatc

SEQ ID NO: 1968629 - DNA, 25 bp, Homo sapien
cagccgcagtgctccactacataga

SEQ ID NO: 1968630 - DNA, 25 bp, Homo sapien
tataacctttggttctgaatcttaa

SEQ ID NO: 1968631 - DNA, 25 bp, Homo sapien
ttcatataacctttggttctgaatc

SEQ ID NO: 1968632 - DNA, 25 bp, Homo sapien
taacctttggttctgaatcttaata

SEQ ID NO: 1968633 - DNA, 25 bp, Homo sapien
catataacctttggttctgaatctt

SEQ ID NO: 1968634 - DNA, 25 bp, Homo sapien
gaggatttatacgatatacatccaa

SEQ ID NO: 1968635 - DNA, 25 bp, Homo sapien
atacatccaatatataagcatctgg

SEQ ID NO: 1968636 - DNA, 25 bp, Homo sapien
tacgatatacatccaatatataagc

SEQ ID NO: 1968637 - DNA, 25 bp, Homo sapien
tgcttgaggatttatacgatataca

SEQ ID NO: 1968638 - DNA, 25 bp, Homo sapien
gcctcaggctaatccacaatgctcg

SEQ ID NO: 1968639 - DNA, 25 bp, Homo sapien
taagcttcactaggaggacctgtgc

SEQ ID NO: 1968640 - DNA, 25 bp, Homo sapien
tgcctggcacttggaaagatactga

SEQ ID NO: 1968641 - DNA, 25 bp, Homo sapien
tcagttgaattggtgaaccggcgcc

SEQ ID NO: 1968642 - DNA, 25 bp, Homo sapien
cagaaggcacgttttcttttaatgg

SEQ ID NO: 1968643 - DNA, 25 bp, Homo sapien
gatactagtattgacatggccttcc

SEQ ID NO: 1968644 - DNA, 25 bp, Homo sapien
tcattatgtaaagtcatgtgccacc

SEQ ID NO: 1968645 - DNA, 25 bp, Homo sapien
gaagttgaaagttgccacacatcct

SEQ ID NO: 1968646 - DNA, 25 bp, Homo sapien
gaagaatttcttccatacgtggtca

SEQ ID NO: 1968647 - DNA, 25 bp, Homo sapien
aacagttgaaatatgctcgctagga

SEQ ID NO: 1968648 - DNA, 25 bp, Homo sapien
tcttaaggatagcatgtagaagccc

SEQ ID NO: 1968649 - DNA, 25 bp, Homo sapien
caagtgaaatacgtggacagcagat

SEQ ID NO: 1968650 - DNA, 25 bp, Homo sapien
tccaagtgagctgcttaacaaaggg

SEQ ID NO: 1968651 - DNA, 25 bp, Homo sapien
gacataaaacattggcgttttctag

SEQ ID NO: 1968652 - DNA, 25 bp, Homo sapien
ctagtgtcatgatttgtcaaattag

SEQ ID NO: 1968653 - DNA, 25 bp, Homo sapien
ttaacaatgaaagctgatggaacag

SEQ ID NO: 1968654 - DNA, 25 bp, Homo sapien
caatattagcttttgagatgggcaa

SEQ ID NO: 1968655 - DNA, 25 bp, Homo sapien
gcacagaaagaccaccgagattaac

SEQ ID NO: 1968656 - DNA, 25 bp, Homo sapien
tgctgaggacaacaactgtgcttgg

SEQ ID NO: 1968657 - DNA, 25 bp, Homo sapien
tctggttctagctccggtaggcaca

SEQ ID NO: 1968658 - DNA, 25 bp, Homo sapien
gactcatccctctgtaaactgctga

SEQ ID NO: 1968659 - DNA, 25 bp, Homo sapien
tgactgagcgctgacgaagaccacg

SEQ ID NO: 1968660 - DNA, 25 bp, Homo sapien
actgagcgctgacgaagaccacggg

SEQ ID NO: 1968661 - DNA, 25 bp, Homo sapien
tgacgaagaccacggggccctctgc

SEQ ID NO: 1968662 - DNA, 25 bp, Homo sapien
cttgactgagcgctgacgaagacca

SEQ ID NO: 1968663 - DNA, 25 bp, Homo sapien
gcagcctttgtggtagagcagccca

SEQ ID NO: 1968664 - DNA, 25 bp, Homo sapien
taaaattgcaaggatcaagaggcat

SEQ ID NO: 1968665 - DNA, 25 bp, Homo sapien
taagatgccatctgtaaccaggctc

SEQ ID NO: 1968666 - DNA, 25 bp, Homo sapien
tgaagggctaacttgtacagtggga

SEQ ID NO: 1968667 - DNA, 25 bp, Homo sapien
tgaagcaggtgagtatggagtcccc

SEQ ID NO: 1968668 - DNA, 25 bp, Homo sapien
gcaggtgagtatggagtcccctgtt

SEQ ID NO: 1968669 - DNA, 25 bp, Homo sapien
ttctgaagcaggtgagtatggagtc

SEQ ID NO: 1968670 - DNA, 25 bp, Homo sapien
ggtgagtatggagtcccctgtttgt

SEQ ID NO: 1968671 - DNA, 25 bp, Homo sapien
ctaaggtgagagcgtctgccgggac

SEQ ID NO: 1968672 - DNA, 25 bp, Homo sapien
taaggtgagagcgtctgccgggaca

SEQ ID NO: 1968673 - DNA, 25 bp, Homo sapien
aaggtgagagcgtctgccgggacag

SEQ ID NO: 1968674 - DNA, 25 bp, Homo sapien
cctgtatcaggtgctaaggatccga

SEQ ID NO: 1968675 - DNA, 25 bp, Homo sapien
caggtgtgggtatagagcaccagcc

SEQ ID NO: 1968676 - DNA, 25 bp, Homo sapien
gacatctggtacacatggctgcagg

SEQ ID NO: 1968677 - DNA, 25 bp, Homo sapien
catgatgatcctgtgcagccggcag

SEQ ID NO: 1968678 - DNA, 25 bp, Homo sapien
cctgggacccttctgccaagggaag

SEQ ID NO: 1968679 - DNA, 25 bp, Homo sapien
gccctgcccgtcttgttgtcattgg

SEQ ID NO: 1968680 - DNA, 25 bp, Homo sapien
ggaagatctcaaggcctggagcttg

SEQ ID NO: 1968681 - DNA, 25 bp, Homo sapien
ggctcccggactccatgttgctcct

SEQ ID NO: 1968682 - DNA, 25 bp, Homo sapien
cactgtgcagcgcttgggaactaga

SEQ ID NO: 1968683 - DNA, 25 bp, Homo sapien
gaaacgtttctgtggagttcccagc

SEQ ID NO: 1968684 - DNA, 25 bp, Homo sapien
gacaaaaacgtgtccctgaggcagc

SEQ ID NO: 1968685 - DNA, 25 bp, Homo sapien
tcttcagggagataaagcgctggcg

SEQ ID NO: 1968686 - DNA, 25 bp, Homo sapien
cttgcttcaagtccacataggagga

SEQ ID NO: 1968687 - DNA, 25 bp, Homo sapien
gcttcaagtccacataggaggatgg

SEQ ID NO: 1968688 - DNA, 25 bp, Homo sapien
ttcaagtccacataggaggatggag

SEQ ID NO: 1968689 - DNA, 25 bp, Homo sapien
caagtccacataggaggatggagag

SEQ ID NO: 1968690 - DNA, 25 bp, Homo sapien
ttctgttaggaagccataaacattg

SEQ ID NO: 1968691 - DNA, 25 bp, Homo sapien
gttaggaagccataaacattgtgtt

SEQ ID NO: 1968692 - DNA, 25 bp, Homo sapien
gaagccataaacattgtgttcacct

SEQ ID NO: 1968693 - DNA, 25 bp, Homo sapien
gacttctgttaggaagccataaaca

SEQ ID NO: 1968694 - DNA, 25 bp, Homo sapien
gcaccaatgccacctgtggcgagaa

SEQ ID NO: 1968695 - DNA, 25 bp, Homo sapien
cacagtgccggatctgtgatggcaa

SEQ ID NO: 1968696 - DNA, 25 bp, Homo sapien
ggccggagatgttctgcaaacttgt

SEQ ID NO: 1968697 - DNA, 25 bp, Homo sapien
caaacttgtggagcatgtgccaggt

SEQ ID NO: 1968698 - DNA, 25 bp, Homo sapien
cctgagccaagatggcgtggagcat

SEQ ID NO: 1968699 - DNA, 25 bp, Homo sapien
ctccaggatcctctggcttcctgag

SEQ ID NO: 1968700 - DNA, 25 bp, Homo sapien
ttcctgagccaagatggcgtggagc

SEQ ID NO: 1968701 - DNA, 25 bp, Homo sapien
cctctggcttcctgagccaagatgg

SEQ ID NO: 1968702 - DNA, 25 bp, Homo sapien
tgccatgggcatcggctggaagcaa

SEQ ID NO: 1968703 - DNA, 25 bp, Homo sapien
catgggcatcggctggaagcaaagc

SEQ ID NO: 1968704 - DNA, 25 bp, Homo sapien
gggcatcggctggaagcaaagccat

SEQ ID NO: 1968705 - DNA, 25 bp, Homo sapien
gctggttgccatgggcatcggctgg

SEQ ID NO: 1968706 - DNA, 25 bp, Homo sapien
ttgggccttcgcctgagctcttggc

SEQ ID NO: 1968707 - DNA, 25 bp, Homo sapien
ggcccacgccaggtcattgggcctt

SEQ ID NO: 1968708 - DNA, 25 bp, Homo sapien
caatccatgtgggtgagaggtcatg

SEQ ID NO: 1968709 - DNA, 25 bp, Homo sapien
gtgagaggtcatgggcctcctggct

SEQ ID NO: 1968710 - DNA, 25 bp, Homo sapien
gatcggaggtactggtcactggaca

SEQ ID NO: 1968711 - DNA, 25 bp, Homo sapien
tgatgcatttgacatctcaagtgcc

SEQ ID NO: 1968712 - DNA, 25 bp, Homo sapien
gggtcttcgtgctggtgttctgtta

SEQ ID NO: 1968713 - DNA, 25 bp, Homo sapien
gccaaatgatttgatcggaggtact

SEQ ID NO: 1968714 - DNA, 25 bp, Homo sapien
aatgaggcccttaaacttgccagcc

SEQ ID NO: 1968715 - DNA, 25 bp, Homo sapien
tcagcacactgaagtaaaggagaat

SEQ ID NO: 1968716 - DNA, 25 bp, Homo sapien
tctccagtttgagtaattgtcagca

SEQ ID NO: 1968717 - DNA, 25 bp, Homo sapien
tgggctgcttgggcccatagcccca

SEQ ID NO: 1968718 - DNA, 25 bp, Homo sapien
catccctgttgaattgcttcaatgg

SEQ ID NO: 1968719 - DNA, 25 bp, Homo sapien
ccctgttgaattgcttcaatggcat

SEQ ID NO: 1968720 - DNA, 25 bp, Homo sapien
gccatccctgttgaattgcttcaat

SEQ ID NO: 1968721 - DNA, 25 bp, Homo sapien
tccctgttgaattgcttcaatggca

SEQ ID NO: 1968722 - DNA, 25 bp, Homo sapien
caaccgagcagagccagaacctggg

SEQ ID NO: 1968723 - DNA, 25 bp, Homo sapien
cacttggggaggtatcgcactgaac

SEQ ID NO: 1968724 - DNA, 25 bp, Homo sapien
tatcgcactgaacccaaccgagcag

SEQ ID NO: 1968725 - DNA, 25 bp, Homo sapien
cctgctacaggcacttggggaggta

SEQ ID NO: 1968726 - DNA, 25 bp, Homo sapien
aggtgcggggtcagcttctacatca

SEQ ID NO: 1968727 - DNA, 25 bp, Homo sapien
cagcttctacatcatatgccactgt

SEQ ID NO: 1968728 - DNA, 25 bp, Homo sapien
tctacatcatatgccactgttggtg

SEQ ID NO: 1968729 - DNA, 25 bp, Homo sapien
tcatatgccactgttggtgggtggt

SEQ ID NO: 1968730 - DNA, 25 bp, Homo sapien
ccaggacagcctcgatgtgatggcc

SEQ ID NO: 1968731 - DNA, 25 bp, Homo sapien
tgcagttagagtaaccccgccaaaa

SEQ ID NO: 1968732 - DNA, 25 bp, Homo sapien
gtgataaattggagttcccacccag

SEQ ID NO: 1968733 - DNA, 25 bp, Homo sapien
aggctgcaatataccaaccccagga

SEQ ID NO: 1968734 - DNA, 25 bp, Homo sapien
gcctctggcttttgcgggacttcgc

SEQ ID NO: 1968735 - DNA, 25 bp, Homo sapien
aggagcgccatctacgcgagcagtg

SEQ ID NO: 1968736 - DNA, 25 bp, Homo sapien
catcctgatccacctcggagtgggt

SEQ ID NO: 1968737 - DNA, 25 bp, Homo sapien
ggttgcttttagtgccccggctgcg

SEQ ID NO: 1968738 - DNA, 25 bp, Homo sapien
cacaaatggaatcttcaggctctac

SEQ ID NO: 1968739 - DNA, 25 bp, Homo sapien
tcaatcctaatatagatactcattt

SEQ ID NO: 1968740 - DNA, 25 bp, Homo sapien
gggcacaaatggaatcttcaggctc

SEQ ID NO: 1968741 - DNA, 25 bp, Homo sapien
caggctctacttcaatcctaatata

SEQ ID NO: 1968742 - DNA, 25 bp, Homo sapien
gattctgctgcatagcatctgtgac

SEQ ID NO: 1968743 - DNA, 25 bp, Homo sapien
ggattctgctgcatagcatctgtga

SEQ ID NO: 1968744 - DNA, 25 bp, Homo sapien
tggattctgctgcatagcatctgtg

SEQ ID NO: 1968745 - DNA, 25 bp, Homo sapien
catacagcctgcctatggatctgct

SEQ ID NO: 1968746 - DNA, 25 bp, Homo sapien
tcctgtccacctgtggaagacaggt

SEQ ID NO: 1968747 - DNA, 25 bp, Homo sapien
atttccagtgttgtctctatgcccc

SEQ ID NO: 1968748 - DNA, 25 bp, Homo sapien
ctgccaaagtgattccccacaactt

SEQ ID NO: 1968749 - DNA, 25 bp, Homo sapien
tcaatcatggatccccttttcaggg

SEQ ID NO: 1968750 - DNA, 25 bp, Homo sapien
ctcacgttcactgggtcaatcatgg

SEQ ID NO: 1968751 - DNA, 25 bp, Homo sapien
gcgtcctcatcatgaccattatttc

SEQ ID NO: 1968752 - DNA, 25 bp, Homo sapien
ttccccaaatgtccctactccagct

SEQ ID NO: 1968753 - DNA, 25 bp, Homo sapien
cagcagtcactaaatcaaacctttt

SEQ ID NO: 1968754 - DNA, 25 bp, Homo sapien
gcagtcactaaatcaaacctttttc

SEQ ID NO: 1968755 - DNA, 25 bp, Homo sapien
agcagtcactaaatcaaaccttttt

SEQ ID NO: 1968756 - DNA, 25 bp, Homo sapien
catcttagaatcatagttcctgccc

SEQ ID NO: 1968757 - DNA, 25 bp, Homo sapien
tccatcattattcttagcgacatca

SEQ ID NO: 1968758 - DNA, 25 bp, Homo sapien
tagcgacatcaacatccatgtttac

SEQ ID NO: 1968759 - DNA, 25 bp, Homo sapien
tagaatcatagttcctgcccacctt

SEQ ID NO: 1968760 - DNA, 25 bp, Homo sapien
gatttctacgtgttgaaggctgcac

SEQ ID NO: 1968761 - DNA, 25 bp, Homo sapien
tgggaaatgtgatttctacgtgttg

SEQ ID NO: 1968762 - DNA, 25 bp, Homo sapien
gaaatgtgatttctacgtgttgaag

SEQ ID NO: 1968763 - DNA, 25 bp, Homo sapien
tgtgatttctacgtgttgaaggctg

SEQ ID NO: 1968764 - DNA, 25 bp, Homo sapien
caccacgacacgggttgcaaactct

SEQ ID NO: 1968765 - DNA, 25 bp, Homo sapien
accacgacacgggttgcaaactctg

SEQ ID NO: 1968766 - DNA, 25 bp, Homo sapien
ctgccaccacgacacgggttgcaaa

SEQ ID NO: 1968767 - DNA, 25 bp, Homo sapien
gccaccacgacacgggttgcaaact

SEQ ID NO: 1968768 - DNA, 25 bp, Homo sapien
ggcagcaagcctcgataacgctctc

SEQ ID NO: 1968769 - DNA, 25 bp, Homo sapien
gcctcgataacgctctccaattcta

SEQ ID NO: 1968770 - DNA, 25 bp, Homo sapien
ctcgataacgctctccaattctatg

SEQ ID NO: 1968771 - DNA, 25 bp, Homo sapien
atgggcagcaagcctcgataacgct

SEQ ID NO: 1968772 - DNA, 25 bp, Homo sapien
gctgagactgtatgctagttttcac

SEQ ID NO: 1968773 - DNA, 25 bp, Homo sapien
cccactaggctgagactgtatgcta

SEQ ID NO: 1968774 - DNA, 25 bp, Homo sapien
taggctgagactgtatgctagtttt

SEQ ID NO: 1968775 - DNA, 25 bp, Homo sapien
tccccactaggctgagactgtatgc

SEQ ID NO: 1968776 - DNA, 25 bp, Homo sapien
caagagataagggaccggtggtaat

SEQ ID NO: 1968777 - DNA, 25 bp, Homo sapien
taagttgcactgattatgccccaag

SEQ ID NO: 1968778 - DNA, 25 bp, Homo sapien
cataagttgcactgattatgcccca

SEQ ID NO: 1968779 - DNA, 25 bp, Homo sapien
cggtggtaattcagatgggcacctc

SEQ ID NO: 1968780 - DNA, 25 bp, Homo sapien
tttgccatataactttaacaggaac

SEQ ID NO: 1968781 - DNA, 25 bp, Homo sapien
tgttttttgccatataactttaaca

SEQ ID NO: 1968782 - DNA, 25 bp, Homo sapien
tttttgccatataactttaacagga

SEQ ID NO: 1968783 - DNA, 25 bp, Homo sapien
atgtggatctagcttccctagcagc

SEQ ID NO: 1968784 - DNA, 25 bp, Homo sapien
cagcctctggcatgtggatctagct

SEQ ID NO: 1968785 - DNA, 25 bp, Homo sapien
tctggcatgtggatctagcttccct

SEQ ID NO: 1968786 - DNA, 25 bp, Homo sapien
tcatcttggcttcccttctgaaggc

SEQ ID NO: 1968787 - DNA, 25 bp, Homo sapien
acagccaaaggctcgtatggtgttt

SEQ ID NO: 1968788 - DNA, 25 bp, Homo sapien
cagccaaaggctcgtatggtgtttt

SEQ ID NO: 1968789 - DNA, 25 bp, Homo sapien
caaaggctcgtatggtgtttttaca

SEQ ID NO: 1968790 - DNA, 25 bp, Homo sapien
gccaaaggctcgtatggtgttttta

SEQ ID NO: 1968791 - DNA, 25 bp, Homo sapien
acccgacctggggtctcacttgcag

SEQ ID NO: 1968792 - DNA, 25 bp, Homo sapien
ccgacctggggtctcacttgcagct

SEQ ID NO: 1968793 - DNA, 25 bp, Homo sapien
acctggggtctcacttgcagctctc

SEQ ID NO: 1968794 - DNA, 25 bp, Homo sapien
ggcacccgacctggggtctcacttg

SEQ ID NO: 1968795 - DNA, 25 bp, Homo sapien
ctctctgttgctggggacagcgtcc

SEQ ID NO: 1968796 - DNA, 25 bp, Homo sapien
tctctgttgctggggacagcgtcca

SEQ ID NO: 1968797 - DNA, 25 bp, Homo sapien
tgttgctggggacagcgtccaccat

SEQ ID NO: 1968798 - DNA, 25 bp, Homo sapien
tctgttgctggggacagcgtccacc

SEQ ID NO: 1968799 - DNA, 25 bp, Homo sapien
tcccctccagcagttcaggtgccgc

SEQ ID NO: 1968800 - DNA, 25 bp, Homo sapien
tcggctccaccttggctcacaattt

SEQ ID NO: 1968801 - DNA, 25 bp, Homo sapien
ggcatctttgaagtcggctccacct

SEQ ID NO: 1968802 - DNA, 25 bp, Homo sapien
ttgaagtcggctccaccttggctca

SEQ ID NO: 1968803 - DNA, 25 bp, Homo sapien
ttccacgccacagagcccctgtctg

SEQ ID NO: 1968804 - DNA, 25 bp, Homo sapien
gcctctgtctgacttcctagggctg

SEQ ID NO: 1968805 - DNA, 25 bp, Homo sapien
ctgtctgacttcctagggctggccc

SEQ ID NO: 1968806 - DNA, 25 bp, Homo sapien
acgccacagagcccctgtctgttgg

SEQ ID NO: 1968807 - DNA, 25 bp, Homo sapien
ttctccagggcacggtgaagggtgg

SEQ ID NO: 1968808 - DNA, 25 bp, Homo sapien
ggcttcttgcgtgatgttgtggcca

SEQ ID NO: 1968809 - DNA, 25 bp, Homo sapien
tcttgtgggttcttcaggcacacac

SEQ ID NO: 1968810 - DNA, 25 bp, Homo sapien
caatggaaagcttccacgacgcagg

SEQ ID NO: 1968811 - DNA, 25 bp, Homo sapien
caggatttgacatcttcctgaacaa

SEQ ID NO: 1968812 - DNA, 25 bp, Homo sapien
gaacaacttggaaactgttgcagcc

SEQ ID NO: 1968813 - DNA, 25 bp, Homo sapien
tcttcctgaacaacttggaaactgt

SEQ ID NO: 1968814 - DNA, 25 bp, Homo sapien
acttggaaactgttgcagccaagct

SEQ ID NO: 1968815 - DNA, 25 bp, Homo sapien
caatggagctgggtaaccagtgaag

SEQ ID NO: 1968816 - DNA, 25 bp, Homo sapien
aggcttttatagtcctgttcgttca

SEQ ID NO: 1968817 - DNA, 25 bp, Homo sapien
ttgtcttcaatggagctgggtaacc

SEQ ID NO: 1968818 - DNA, 25 bp, Homo sapien
gtcctaatccatcaaagtacacttc

SEQ ID NO: 1968819 - DNA, 25 bp, Homo sapien
acttgatatcccagaagtactgagg

SEQ ID NO: 1968820 - DNA, 25 bp, Homo sapien
ctacttgatatcccagaagtactga

SEQ ID NO: 1968821 - DNA, 25 bp, Homo sapien
cttgatatcccagaagtactgaggt

SEQ ID NO: 1968822 - DNA, 25 bp, Homo sapien
gtactgaggtagcagctggctcccc

SEQ ID NO: 1968823 - DNA, 25 bp, Homo sapien
cacaggatccctggtttgacctcca

SEQ ID NO: 1968824 - DNA, 25 bp, Homo sapien
catacatcctgttcacggctgacca

SEQ ID NO: 1968825 - DNA, 25 bp, Homo sapien
tctgcatacatcctgttcacggctg

SEQ ID NO: 1968826 - DNA, 25 bp, Homo sapien
acatcctgttcacggctgaccacag

SEQ ID NO: 1968827 - DNA, 25 bp, Homo sapien
ggcttgtggcccgtggcaagggctg

SEQ ID NO: 1968828 - DNA, 25 bp, Homo sapien
tgtcactgggtcctagctgggtgct

SEQ ID NO: 1968829 - DNA, 25 bp, Homo sapien
gggagcctggaagtccgtccgcatc

SEQ ID NO: 1968830 - DNA, 25 bp, Homo sapien
gctaccaacccaagagttgtcactg

SEQ ID NO: 1968831 - DNA, 25 bp, Homo sapien
tgtcctctcagctgctaaaagccag

SEQ ID NO: 1968832 - DNA, 25 bp, Homo sapien
cttcccttctagtcactctcctctg

SEQ ID NO: 1968833 - DNA, 25 bp, Homo sapien
cccttctagtcactctcctctgcca

SEQ ID NO: 1968834 - DNA, 25 bp, Homo sapien
tgtaccttcccttctagtcactctc

SEQ ID NO: 1968835 - DNA, 25 bp, Homo sapien
gatgttgttgccctctgcgatgaag

SEQ ID NO: 1968836 - DNA, 25 bp, Homo sapien
gctctcagcgatgttttccaggcga

SEQ ID NO: 1968837 - DNA, 25 bp, Homo sapien
tcgagcccacgtgcaagaaaatcag

SEQ ID NO: 1968838 - DNA, 25 bp, Homo sapien
cagtctagagaggtcggcgaagcat

SEQ ID NO: 1968839 - DNA, 25 bp, Homo sapien
aagcactcatactgatctcgaccca

SEQ ID NO: 1968840 - DNA, 25 bp, Homo sapien
tatcaaagcactcatactgatctcg

SEQ ID NO: 1968841 - DNA, 25 bp, Homo sapien
tgctggaagggatatcaaagcactc

SEQ ID NO: 1968842 - DNA, 25 bp, Homo sapien
gaagggatatcaaagcactcatact

SEQ ID NO: 1968843 - DNA, 25 bp, Homo sapien
tggaaactgggtctgtttgttctgg

SEQ ID NO: 1968844 - DNA, 25 bp, Homo sapien
tccaggctttaatggacagataagc

SEQ ID NO: 1968845 - DNA, 25 bp, Homo sapien
gggaggctctcttccaggctttaat

SEQ ID NO: 1968846 - DNA, 25 bp, Homo sapien
ctggaaactgggtctgtttgttctg

SEQ ID NO: 1968847 - DNA, 25 bp, Homo sapien
ctttctgcttctatctggttccatt

SEQ ID NO: 1968848 - DNA, 25 bp, Homo sapien
ttccatttcccgtaagtgacatggg

SEQ ID NO: 1968849 - DNA, 25 bp, Homo sapien
tcccaggccacgtgagtggtgtagg

SEQ ID NO: 1968850 - DNA, 25 bp, Homo sapien
tctggttccatttcccgtaagtgac

SEQ ID NO: 1968851 - DNA, 25 bp, Homo sapien
tctgtgaagcaagggaatcgagttc

SEQ ID NO: 1968852 - DNA, 25 bp, Homo sapien
ctgccgttccagaggagctctttaa

SEQ ID NO: 1968853 - DNA, 25 bp, Homo sapien
agctgtttcgggcacttctgtgaag

SEQ ID NO: 1968854 - DNA, 25 bp, Homo sapien
agttcttggcagctccttgtccaga

SEQ ID NO: 1968855 - DNA, 25 bp, Homo sapien
aggcaggtggatagttcaccggcac

SEQ ID NO: 1968856 - DNA, 25 bp, Homo sapien
gaggcaggtggatagttcaccggca

SEQ ID NO: 1968857 - DNA, 25 bp, Homo sapien
ccatgtctgcactgttggagagtag

SEQ ID NO: 1968858 - DNA, 25 bp, Homo sapien
caaatgatgaggtctggctggcctg

SEQ ID NO: 1968859 - DNA, 25 bp, Homo sapien
gcttccctgtggtcccccatgtctg

SEQ ID NO: 1968860 - DNA, 25 bp, Homo sapien
ggacggtcaccccagctctttcatt

SEQ ID NO: 1968861 - DNA, 25 bp, Homo sapien
cctcggcgatatcctgcattatctg

SEQ ID NO: 1968862 - DNA, 25 bp, Homo sapien
tgggacttgcctcggcgatatcctg

SEQ ID NO: 1968863 - DNA, 25 bp, Homo sapien
acttgcctcggcgatatcctgcatt

SEQ ID NO: 1968864 - DNA, 25 bp, Homo sapien
ctgggacttgcctcggcgatatcct

SEQ ID NO: 1968865 - DNA, 25 bp, Homo sapien
actccgatccgagcgtcgcgggtat

SEQ ID NO: 1968866 - DNA, 25 bp, Homo sapien
ctgctgaccatcgtcagactccgat

SEQ ID NO: 1968867 - DNA, 25 bp, Homo sapien
gaccatcgtcagactccgatccgag

SEQ ID NO: 1968868 - DNA, 25 bp, Homo sapien
tcgcgggtatttcaaggcaggtgcc

SEQ ID NO: 1968869 - DNA, 25 bp, Homo sapien
gcaaatctcaaacgtaaataccctg

SEQ ID NO: 1968870 - DNA, 25 bp, Homo sapien
ggccagtcgagctctgcgtgtaaaa

SEQ ID NO: 1968871 - DNA, 25 bp, Homo sapien
agctcccaaactccggcaaatctca

SEQ ID NO: 1968872 - DNA, 25 bp, Homo sapien
gctctgcgtgtaaaacacagcgttt

SEQ ID NO: 1968873 - DNA, 25 bp, Homo sapien
gccagatgcgcccttgtgtctgcac

SEQ ID NO: 1968874 - DNA, 25 bp, Homo sapien
tctgggcaccccagggtaaacatag

SEQ ID NO: 1968875 - DNA, 25 bp, Homo sapien
agggtaaacatagccccggccagat

SEQ ID NO: 1968876 - DNA, 25 bp, Homo sapien
tctgcacgaggccacttggagctaa

SEQ ID NO: 1968877 - DNA, 25 bp, Homo sapien
cccttggactgtctagctgaattct

SEQ ID NO: 1968878 - DNA, 25 bp, Homo sapien
tcccttggactgtctagctgaattc

SEQ ID NO: 1968879 - DNA, 25 bp, Homo sapien
gtcccttggactgtctagctgaatt

SEQ ID NO: 1968880 - DNA, 25 bp, Homo sapien
tgtcccttggactgtctagctgaat

SEQ ID NO: 1968881 - DNA, 25 bp, Homo sapien
aagcacccaggatggaaccagaaat

SEQ ID NO: 1968882 - DNA, 25 bp, Homo sapien
accagaaattggaaagctgacagcc

SEQ ID NO: 1968883 - DNA, 25 bp, Homo sapien
aaccagaaattggaaagctgacagc

SEQ ID NO: 1968884 - DNA, 25 bp, Homo sapien
tgaagaaagaagctccagcacaaag

SEQ ID NO: 1968885 - DNA, 25 bp, Homo sapien
atccaggtcacctacaggcagcccc

SEQ ID NO: 1968886 - DNA, 25 bp, Homo sapien
cgagaagtgtctgagaaccagcaat

SEQ ID NO: 1968887 - DNA, 25 bp, Homo sapien
gagaaccagcaatgggtctctcccc

SEQ ID NO: 1968888 - DNA, 25 bp, Homo sapien
tagatgcgagaagtgtctgagaacc

SEQ ID NO: 1968889 - DNA, 25 bp, Homo sapien
gatcccagaccagagcggagggttt

SEQ ID NO: 1968890 - DNA, 25 bp, Homo sapien
ccagacaagcactagtgtgtgggat

SEQ ID NO: 1968891 - DNA, 25 bp, Homo sapien
gataatgcccattctggttgtctag

SEQ ID NO: 1968892 - DNA, 25 bp, Homo sapien
tgaaggaagtctgacgataatgccc

SEQ ID NO: 1968893 - DNA, 25 bp, Homo sapien
taagtgccagattcttcccagcagt

SEQ ID NO: 1968894 - DNA, 25 bp, Homo sapien
cagttctgctggtgttttctcattc

SEQ ID NO: 1968895 - DNA, 25 bp, Homo sapien
cccagcagtcagcatgaggcagtgg

SEQ ID NO: 1968896 - DNA, 25 bp, Homo sapien
gcatgaggcagtgggcccagttctg

SEQ ID NO: 1968897 - DNA, 25 bp, Homo sapien
gttccactcatcatcagctggcacg

SEQ ID NO: 1968898 - DNA, 25 bp, Homo sapien
tctcagtggatgagttcccctttgc

SEQ ID NO: 1968899 - DNA, 25 bp, Homo sapien
tttgacaagaacatccaaccaccag

SEQ ID NO: 1968900 - DNA, 25 bp, Homo sapien
ttaggccccgcatgtgaacacactg

SEQ ID NO: 1968901 - DNA, 25 bp, Homo sapien
gggcagatactttgaaagcaggtga

SEQ ID NO: 1968902 - DNA, 25 bp, Homo sapien
gactattatcttcacgaccctccat

SEQ ID NO: 1968903 - DNA, 25 bp, Homo sapien
ttgaaagcaggtgactattatcttc

SEQ ID NO: 1968904 - DNA, 25 bp, Homo sapien
gatactttgaaagcaggtgactatt

SEQ ID NO: 1968905 - DNA, 25 bp, Homo sapien
tcaattgtgagtgtttggcagcagg

SEQ ID NO: 1968906 - DNA, 25 bp, Homo sapien
cctgtgcccagaactcgactgaatc

SEQ ID NO: 1968907 - DNA, 25 bp, Homo sapien
cagaactcgactgaatcaattgtga

SEQ ID NO: 1968908 - DNA, 25 bp, Homo sapien
actgaatcaattgtgagtgtttggc

SEQ ID NO: 1968909 - DNA, 25 bp, Homo sapien
gcttctgattcgagtctcttcaggg

SEQ ID NO: 1968910 - DNA, 25 bp, Homo sapien
gaaaccacttgatctgcttctgatt

SEQ ID NO: 1968911 - DNA, 25 bp, Homo sapien
ggacaccaatagctcacagcccctg

SEQ ID NO: 1968912 - DNA, 25 bp, Homo sapien
tggaagcgtaatggccagggacacc

SEQ ID NO: 1968913 - DNA, 25 bp, Homo sapien
gccgtgagggatcctgggagcctgt

SEQ ID NO: 1968914 - DNA, 25 bp, Homo sapien
gtttaatatgctgttgtaatatgga

SEQ ID NO: 1968915 - DNA, 25 bp, Homo sapien
gaaataagaggccgtgagggatcct

SEQ ID NO: 1968916 - DNA, 25 bp, Homo sapien
tcagtgccccatccatatctttctc

SEQ ID NO: 1968917 - DNA, 25 bp, Homo sapien
attttgtttcatagagaaggacttt

SEQ ID NO: 1968918 - DNA, 25 bp, Homo sapien
ttgtttcatagagaaggactttaga

SEQ ID NO: 1968919 - DNA, 25 bp, Homo sapien
ttttgtttcatagagaaggacttta

SEQ ID NO: 1968920 - DNA, 25 bp, Homo sapien
tttgtttcatagagaaggactttag

SEQ ID NO: 1968921 - DNA, 25 bp, Homo sapien
ggttttaccatcgtgtgccttttga

SEQ ID NO: 1968922 - DNA, 25 bp, Homo sapien
gactctttctacaacattgaagttg

SEQ ID NO: 1968923 - DNA, 25 bp, Homo sapien
gctaagtctatggatggttttacca

SEQ ID NO: 1968924 - DNA, 25 bp, Homo sapien
aaagctttccatgaattcccaagga

SEQ ID NO: 1968925 - DNA, 25 bp, Homo sapien
ctttgggatactctgggaaggaatt

SEQ ID NO: 1968926 - DNA, 25 bp, Homo sapien
tgttcccaagatggtgtgagcagtt

SEQ ID NO: 1968927 - DNA, 25 bp, Homo sapien
cagtttaatcaggatcatacacctc

SEQ ID NO: 1968928 - DNA, 25 bp, Homo sapien
gatggtgtgagcagtttaatcagga

SEQ ID NO: 1968929 - DNA, 25 bp, Homo sapien
tcctgcttctgtggagacatctcag

SEQ ID NO: 1968930 - DNA, 25 bp, Homo sapien
tctgggacttcggggtcacttctgt

SEQ ID NO: 1968931 - DNA, 25 bp, Homo sapien
cagagaggatttcaaactgagttcc

SEQ ID NO: 1968932 - DNA, 25 bp, Homo sapien
catctcagggaggggttgtaaggtt

SEQ ID NO: 1968933 - DNA, 25 bp, Homo sapien
atctgacctattcctgcctatactc

SEQ ID NO: 1968934 - DNA, 25 bp, Homo sapien
tatactccagacaagtgtcacctcc

SEQ ID NO: 1968935 - DNA, 25 bp, Homo sapien
tattcctgcctatactccagacaag

SEQ ID NO: 1968936 - DNA, 25 bp, Homo sapien
cacactgccgcattctagtgtttcc

SEQ ID NO: 1968937 - DNA, 25 bp, Homo sapien
gagtaccaactgatgaaggggtttc

SEQ ID NO: 1968938 - DNA, 25 bp, Homo sapien
aggatggagtaccaactgatgaagg

SEQ ID NO: 1968939 - DNA, 25 bp, Homo sapien
ggaggatggagtaccaactgatgaa

SEQ ID NO: 1968940 - DNA, 25 bp, Homo sapien
ctggaggatggagtaccaactgatg

SEQ ID NO: 1968941 - DNA, 25 bp, Homo sapien
tcctcggcagcccattcgggaaaca

SEQ ID NO: 1968942 - DNA, 25 bp, Homo sapien
taagcgttgcctgcagcggctccag

SEQ ID NO: 1968943 - DNA, 25 bp, Homo sapien
cagtgctccactgagagagttccca

SEQ ID NO: 1968944 - DNA, 25 bp, Homo sapien
catctaagcgttgcctgcagcggct

SEQ ID NO: 1968945 - DNA, 25 bp, Homo sapien
tacttgctgtcatgaaagataaggc

SEQ ID NO: 1968946 - DNA, 25 bp, Homo sapien
cagtttcagcaaatgagcctcatgg

SEQ ID NO: 1968947 - DNA, 25 bp, Homo sapien
cctcatggaaggcactaatattatc

SEQ ID NO: 1968948 - DNA, 25 bp, Homo sapien
tcacttcagtgtagtaaagggagca

SEQ ID NO: 1968949 - DNA, 25 bp, Homo sapien
ctgtaaggttcctgtgaaacgggca

SEQ ID NO: 1968950 - DNA, 25 bp, Homo sapien
gaggcatttttcctgccatacagag

SEQ ID NO: 1968951 - DNA, 25 bp, Homo sapien
gttcctgtgaaacgggcagaggcat

SEQ ID NO: 1968952 - DNA, 25 bp, Homo sapien
ggcatttttcctgccatacagagac

SEQ ID NO: 1968953 - DNA, 25 bp, Homo sapien
gagaccatcggttcctttcagtgga

SEQ ID NO: 1968954 - DNA, 25 bp, Homo sapien
ctccatggctctgacaatacattca

SEQ ID NO: 1968955 - DNA, 25 bp, Homo sapien
aatgatggtgagaccatcggttcct

SEQ ID NO: 1968956 - DNA, 25 bp, Homo sapien
agagccctttttcaggacgaatgat

SEQ ID NO: 1968957 - DNA, 25 bp, Homo sapien
ggacttgccgtaggctccacctggt

SEQ ID NO: 1968958 - DNA, 25 bp, Homo sapien
catgtaaaccgaatgactgtggccc

SEQ ID NO: 1968959 - DNA, 25 bp, Homo sapien
tgtggccccagctctatcagcttga

SEQ ID NO: 1968960 - DNA, 25 bp, Homo sapien
tcagcttgattgctaggaattggtc

SEQ ID NO: 1968961 - DNA, 25 bp, Homo sapien
cattcattcgggctcctgatataaa

SEQ ID NO: 1968962 - DNA, 25 bp, Homo sapien
ccatttcattcattcgggctcctga

SEQ ID NO: 1968963 - DNA, 25 bp, Homo sapien
gatataaagcctctagtgccatttg

SEQ ID NO: 1968964 - DNA, 25 bp, Homo sapien
gggctcctgatataaagcctctagt

SEQ ID NO: 1968965 - DNA, 25 bp, Homo sapien
ggtatccactcccagtgcagggaag

SEQ ID NO: 1968966 - DNA, 25 bp, Homo sapien
gaagcatcacccagtatccagatct

SEQ ID NO: 1968967 - DNA, 25 bp, Homo sapien
gaagaacatttgtgatggtttgaag

SEQ ID NO: 1968968 - DNA, 25 bp, Homo sapien
agtgaaagagagaaacgcgatcctt

SEQ ID NO: 1968969 - DNA, 25 bp, Homo sapien
ctccctcctgagattagcccgtggg

SEQ ID NO: 1968970 - DNA, 25 bp, Homo sapien
agccccatggtgtcttgccctccct

SEQ ID NO: 1968971 - DNA, 25 bp, Homo sapien
gcccgtggggtgtcttgaagggaga

SEQ ID NO: 1968972 - DNA, 25 bp, Homo sapien
cacaaaagcaaaaagccccctgacg

SEQ ID NO: 1968973 - DNA, 25 bp, Homo sapien
aatggccagcgttgtcacataggaa

SEQ ID NO: 1968974 - DNA, 25 bp, Homo sapien
tggcgactcccaggcgtctaatctc

SEQ ID NO: 1968975 - DNA, 25 bp, Homo sapien
ctctcaggattccaaggtaggtggg

SEQ ID NO: 1968976 - DNA, 25 bp, Homo sapien
agctccccaaatggccagcgttgtc

SEQ ID NO: 1968977 - DNA, 25 bp, Homo sapien
gtaagacgggaacacttgggaagca

SEQ ID NO: 1968978 - DNA, 25 bp, Homo sapien
gagaccccccggcacgagttgctga

SEQ ID NO: 1968979 - DNA, 25 bp, Homo sapien
gggaagcacatctgttttgtcagag

SEQ ID NO: 1968980 - DNA, 25 bp, Homo sapien
ccccggcacgagttgctgaagagcc

SEQ ID NO: 1968981 - DNA, 25 bp, Homo sapien
tattgagagaatttgccgaagaaga

SEQ ID NO: 1968982 - DNA, 25 bp, Homo sapien
tgttttccggtaataacagctctat

SEQ ID NO: 1968983 - DNA, 25 bp, Homo sapien
acagctctatcagcagcaatgtaaa

SEQ ID NO: 1968984 - DNA, 25 bp, Homo sapien
gagaatttgccgaagaagatttcaa

SEQ ID NO: 1968985 - DNA, 25 bp, Homo sapien
caagtggttgagttgccagctccga

SEQ ID NO: 1968986 - DNA, 25 bp, Homo sapien
atggtactgacgtctcccccaggtc

SEQ ID NO: 1968987 - DNA, 25 bp, Homo sapien
atgagcagcacgcacgctccctgga

SEQ ID NO: 1968988 - DNA, 25 bp, Homo sapien
ccagctccgagagggttgatgagca

SEQ ID NO: 1968989 - DNA, 25 bp, Homo sapien
gccccacgggctgctggggcctggt

SEQ ID NO: 1968990 - DNA, 25 bp, Homo sapien
aaggccccacgggctgctggggcct

SEQ ID NO: 1968991 - DNA, 25 bp, Homo sapien
tcaaggccccacgggctgctggggc

SEQ ID NO: 1968992 - DNA, 25 bp, Homo sapien
ccacgggctgctggggcctggtcac

SEQ ID NO: 1968993 - DNA, 25 bp, Homo sapien
tcacagaatgtagcatctggctggc

SEQ ID NO: 1968994 - DNA, 25 bp, Homo sapien
cttcacagaatgtagcatctggctg

SEQ ID NO: 1968995 - DNA, 25 bp, Homo sapien
tctggctggccactgaagtgcccag

SEQ ID NO: 1968996 - DNA, 25 bp, Homo sapien
acagaatgtagcatctggctggcca

SEQ ID NO: 1968997 - DNA, 25 bp, Homo sapien
tgcccctgtcttctgcttattgctc

SEQ ID NO: 1968998 - DNA, 25 bp, Homo sapien
gcccctgtcttctgcttattgctct

SEQ ID NO: 1968999 - DNA, 25 bp, Homo sapien
cctgtcttctgcttattgctctgag

SEQ ID NO: 1969000 - DNA, 25 bp, Homo sapien
cccctgtcttctgcttattgctctg

SEQ ID NO: 1969001 - DNA, 25 bp, Homo sapien
gaggagccgtagagatgaactttcc

SEQ ID NO: 1969002 - DNA, 25 bp, Homo sapien
tctgataaaggaggagccgtagaga

SEQ ID NO: 1969003 - DNA, 25 bp, Homo sapien
gatgcccacgtgacaggaggatgac

SEQ ID NO: 1969004 - DNA, 25 bp, Homo sapien
acaaactggccccgctctgataaag

SEQ ID NO: 1969005 - DNA, 25 bp, Homo sapien
tctgtgaactggtgacaccgggtgc

SEQ ID NO: 1969006 - DNA, 25 bp, Homo sapien
gacaccgggtgctgcggttagccca

SEQ ID NO: 1969007 - DNA, 25 bp, Homo sapien
tgcctttggggtccggattctgtga

SEQ ID NO: 1969008 - DNA, 25 bp, Homo sapien
ggtgctgcggttagcccaggcactt

SEQ ID NO: 1969009 - DNA, 25 bp, Homo sapien
gtgtcctcggtgagtggggcaggcg

SEQ ID NO: 1969010 - DNA, 25 bp, Homo sapien
ggagtcccaagtgtcctcggtgagt

SEQ ID NO: 1969011 - DNA, 25 bp, Homo sapien
agtcccaagtgtcctcggtgagtgg

SEQ ID NO: 1969012 - DNA, 25 bp, Homo sapien
aagtgtcctcggtgagtggggcagg

SEQ ID NO: 1969013 - DNA, 25 bp, Homo sapien
ttcccctagatgtgatgatgactgt

SEQ ID NO: 1969014 - DNA, 25 bp, Homo sapien
taatcgtctagagagcagccttccc

SEQ ID NO: 1969015 - DNA, 25 bp, Homo sapien
tatagtaatcgtctagagagcagcc

SEQ ID NO: 1969016 - DNA, 25 bp, Homo sapien
tgtggtcgtcctttctctcgtgtac

SEQ ID NO: 1969017 - DNA, 25 bp, Homo sapien
cagctgccgctgggatagggatatc

SEQ ID NO: 1969018 - DNA, 25 bp, Homo sapien
gaggatggctttagctgcacgtggg

SEQ ID NO: 1969019 - DNA, 25 bp, Homo sapien
gctgccgctgggatagggatatcat

SEQ ID NO: 1969020 - DNA, 25 bp, Homo sapien
ggatggctttagctgcacgtgggac

SEQ ID NO: 1969021 - DNA, 25 bp, Homo sapien
tggtgacggggcagtcccagccact

SEQ ID NO: 1969022 - DNA, 25 bp, Homo sapien
aggaaagccagtggcactaggcagg

SEQ ID NO: 1969023 - DNA, 25 bp, Homo sapien
ggcactaggcaggtctgtggtgacg

SEQ ID NO: 1969024 - DNA, 25 bp, Homo sapien
gggctcaggaaacagaacctcaagc

SEQ ID NO: 1969025 - DNA, 25 bp, Homo sapien
cagtggtggctctggtgacaagttc

SEQ ID NO: 1969026 - DNA, 25 bp, Homo sapien
tcctttcgctgttctcaggcatgag

SEQ ID NO: 1969027 - DNA, 25 bp, Homo sapien
gggacccacattgccgatgagcaac

SEQ ID NO: 1969028 - DNA, 25 bp, Homo sapien
gacaagttcaggctcagtagtgtgt

SEQ ID NO: 1969029 - DNA, 25 bp, Homo sapien
tcagaagtctctgtactcatcttga

SEQ ID NO: 1969030 - DNA, 25 bp, Homo sapien
agtctctgtactcatcttgatggcc

SEQ ID NO: 1969031 - DNA, 25 bp, Homo sapien
tctgtactcatcttgatggccacat

SEQ ID NO: 1969032 - DNA, 25 bp, Homo sapien
tctctgtactcatcttgatggccac

SEQ ID NO: 1969033 - DNA, 25 bp, Homo sapien
tgctcacactctgtggagcttttgt

SEQ ID NO: 1969034 - DNA, 25 bp, Homo sapien
gctcacactctgtggagcttttgtt

SEQ ID NO: 1969035 - DNA, 25 bp, Homo sapien
tctttgagatatcatgccaggttgc

SEQ ID NO: 1969036 - DNA, 25 bp, Homo sapien
cacatctaaacggtccttttgtcca

SEQ ID NO: 1969037 - DNA, 25 bp, Homo sapien
aacaacaccaggcttcacatctaaa

SEQ ID NO: 1969038 - DNA, 25 bp, Homo sapien
cagctcttcatctcacgtctttgag

SEQ ID NO: 1969039 - DNA, 25 bp, Homo sapien
gattccacggtattgcctcagagga

SEQ ID NO: 1969040 - DNA, 25 bp, Homo sapien
tcagaggacccatttatggcaaagg

SEQ ID NO: 1969041 - DNA, 25 bp, Homo sapien
acagtggttctccttatacttccca

SEQ ID NO: 1969042 - DNA, 25 bp, Homo sapien
tataggcatcagattccagattcca

SEQ ID NO: 1969043 - DNA, 25 bp, Homo sapien
agaagttctcccattgacatgatca

SEQ ID NO: 1969044 - DNA, 25 bp, Homo sapien
gacatgatcatgtccagtgttcact

SEQ ID NO: 1969045 - DNA, 25 bp, Homo sapien
ttgacatgatcatgtccagtgttca

SEQ ID NO: 1969046 - DNA, 25 bp, Homo sapien
acatgatcatgtccagtgttcactc

SEQ ID NO: 1969047 - DNA, 25 bp, Homo sapien
aaattacccgtgctgtgttcagggc

SEQ ID NO: 1969048 - DNA, 25 bp, Homo sapien
gatcagccatgactctaaacaatag

SEQ ID NO: 1969049 - DNA, 25 bp, Homo sapien
agagcagcacgtgccaaattacccg

SEQ ID NO: 1969050 - DNA, 25 bp, Homo sapien
taaccactggactgatcagccatga

SEQ ID NO: 1969051 - DNA, 25 bp, Homo sapien
ctagtaaagggcacttggtgtggtc

SEQ ID NO: 1969052 - DNA, 25 bp, Homo sapien
tctccagcagacacgcaagtgggag

SEQ ID NO: 1969053 - DNA, 25 bp, Homo sapien
cccatgggcactaggcaaattgtct

SEQ ID NO: 1969054 - DNA, 25 bp, Homo sapien
ctgggttccctctcggagggccacg

SEQ ID NO: 1969055 - DNA, 25 bp, Homo sapien
gaacttttccactccgtcaacacca

SEQ ID NO: 1969056 - DNA, 25 bp, Homo sapien
tgggagacactttgtaggtccttgt

SEQ ID NO: 1969057 - DNA, 25 bp, Homo sapien
cacagactcctccttaggagaggtt

SEQ ID NO: 1969058 - DNA, 25 bp, Homo sapien
aggagaggttccctcacgatggctg

SEQ ID NO: 1969059 - DNA, 25 bp, Homo sapien
ctacacagactcctccttaggagag

SEQ ID NO: 1969060 - DNA, 25 bp, Homo sapien
cgcggagccaaaatcttccctcggt

SEQ ID NO: 1969061 - DNA, 25 bp, Homo sapien
ttgcagaagtccgaactccagcggc

SEQ ID NO: 1969062 - DNA, 25 bp, Homo sapien
tcggttccggttgctgagctcgccg

SEQ ID NO: 1969063 - DNA, 25 bp, Homo sapien
gtaaacagcagagcgctaagccaag

SEQ ID NO: 1969064 - DNA, 25 bp, Homo sapien
ctcgcccgccgcagttagcaaaagt

SEQ ID NO: 1969065 - DNA, 25 bp, Homo sapien
gtccggccaaagtcgccaggcaagt

SEQ ID NO: 1969066 - DNA, 25 bp, Homo sapien
aaagtcgccaggcaagtcccaagtc

SEQ ID NO: 1969067 - DNA, 25 bp, Homo sapien
cagttagcaaaagtccggccaaagt

SEQ ID NO: 1969068 - DNA, 25 bp, Homo sapien
agccgaacaccagcggcctgggccc

SEQ ID NO: 1969069 - DNA, 25 bp, Homo sapien
gcagccgaacaccagcggcctgggc

SEQ ID NO: 1969070 - DNA, 25 bp, Homo sapien
cagccgaacaccagcggcctgggcc

SEQ ID NO: 1969071 - DNA, 25 bp, Homo sapien
ccgaacaccagcggcctgggcccgg

SEQ ID NO: 1969072 - DNA, 25 bp, Homo sapien
gacctcccggggtcgccagccgcgc

SEQ ID NO: 1969073 - DNA, 25 bp, Homo sapien
cgccgccggagcggccgccagttcc

SEQ ID NO: 1969074 - DNA, 25 bp, Homo sapien
agacgctgcacgaccgcggggacct

SEQ ID NO: 1969075 - DNA, 25 bp, Homo sapien
cagggcaccgggagatcgccgccgc

SEQ ID NO: 1969076 - DNA, 25 bp, Homo sapien
agggggagcccagcggggcgcaggg

SEQ ID NO: 1969077 - DNA, 25 bp, Homo sapien
cagggcctggggacctgcccgcttc

SEQ ID NO: 1969078 - DNA, 25 bp, Homo sapien
ggagggggagcccagcggggcgcag

SEQ ID NO: 1969079 - DNA, 25 bp, Homo sapien
ggacctgcccgcttccctccgcggc

SEQ ID NO: 1969080 - DNA, 25 bp, Homo sapien
atgaacaagttgcagctggccgcgg

SEQ ID NO: 1969081 - DNA, 25 bp, Homo sapien
gcttgctcgcacaccgccagtgcct

SEQ ID NO: 1969082 - DNA, 25 bp, Homo sapien
ctggatgaacaagttgcagctggcc

SEQ ID NO: 1969083 - DNA, 25 bp, Homo sapien
ggatgaacaagttgcagctggccgc

SEQ ID NO: 1969084 - DNA, 25 bp, Homo sapien
ccctgtgacagcgtgccgggttcgc

SEQ ID NO: 1969085 - DNA, 25 bp, Homo sapien
tctgggcttagaacgcccccgcgcg

SEQ ID NO: 1969086 - DNA, 25 bp, Homo sapien
cccgactccgatccacagatcctct

SEQ ID NO: 1969087 - DNA, 25 bp, Homo sapien
tcctctccgtgaggggttcctctgg

SEQ ID NO: 1969088 - DNA, 25 bp, Homo sapien
tacacgttccactccttctctgagg

SEQ ID NO: 1969089 - DNA, 25 bp, Homo sapien
ctgaggccaactgtgatcaagggtc

SEQ ID NO: 1969090 - DNA, 25 bp, Homo sapien
tatttctgtattgaagttgatgctt

SEQ ID NO: 1969091 - DNA, 25 bp, Homo sapien
gaaaggatatttctgtattgaagtt

SEQ ID NO: 1969092 - DNA, 25 bp, Homo sapien
ttaaatcctctggagcacgtgcaat

SEQ ID NO: 1969093 - DNA, 25 bp, Homo sapien
aaatcctctggagcacgtgcaatta

SEQ ID NO: 1969094 - DNA, 25 bp, Homo sapien
attgtgttaaatcctctggagcacg

SEQ ID NO: 1969095 - DNA, 25 bp, Homo sapien
gtgttaaatcctctggagcacgtgc

SEQ ID NO: 1969096 - DNA, 25 bp, Homo sapien
tgtttctcagaaaggccggctacaa

SEQ ID NO: 1969097 - DNA, 25 bp, Homo sapien
gccggctacaaagcgctcaggatca

SEQ ID NO: 1969098 - DNA, 25 bp, Homo sapien
cagctgtttctcagaaaggccggct

SEQ ID NO: 1969099 - DNA, 25 bp, Homo sapien
agaaaggccggctacaaagcgctca

SEQ ID NO: 1969100 - DNA, 25 bp, Homo sapien
gatgcaggccagctttgactgaggt

SEQ ID NO: 1969101 - DNA, 25 bp, Homo sapien
caaggaagacttggaatcccgtgcc

SEQ ID NO: 1969102 - DNA, 25 bp, Homo sapien
cttggagccagagggatttagcctg

SEQ ID NO: 1969103 - DNA, 25 bp, Homo sapien
cactgtgtccacgagaagaatctga

SEQ ID NO: 1969104 - DNA, 25 bp, Homo sapien
gaatgagaatgccaccgattgaccc

SEQ ID NO: 1969105 - DNA, 25 bp, Homo sapien
ttcagatgacagtaagcagcagtgc

SEQ ID NO: 1969106 - DNA, 25 bp, Homo sapien
cagcagctattctggactgggcact

SEQ ID NO: 1969107 - DNA, 25 bp, Homo sapien
tattctgtagtcatagggctccaac

SEQ ID NO: 1969108 - DNA, 25 bp, Homo sapien
tcctggaataaggtgcgaattcagc

SEQ ID NO: 1969109 - DNA, 25 bp, Homo sapien
gctctcgcttctgctagggcctgaa

SEQ ID NO: 1969110 - DNA, 25 bp, Homo sapien
taataagataacaacacccacctgc

SEQ ID NO: 1969111 - DNA, 25 bp, Homo sapien
cggtagtgcgttacaaaagctttgc

SEQ ID NO: 1969112 - DNA, 25 bp, Homo sapien
caagtctgactgcttatgggtttga

SEQ ID NO: 1969113 - DNA, 25 bp, Homo sapien
caggcaggaataagcaacgggacac

SEQ ID NO: 1969114 - DNA, 25 bp, Homo sapien
tgggaacagaattatcagcaggcag

SEQ ID NO: 1969115 - DNA, 25 bp, Homo sapien
tactgggagttccattactgttgtg

SEQ ID NO: 1969116 - DNA, 25 bp, Homo sapien
cacagttaagtttctctatggtaca

SEQ ID NO: 1969117 - DNA, 25 bp, Homo sapien
tggtggatccctgacactgcagaca

SEQ ID NO: 1969118 - DNA, 25 bp, Homo sapien
cattttccgggtatggtagcatgtg

SEQ ID NO: 1969119 - DNA, 25 bp, Homo sapien
caaatcagataatgactccagtagg

SEQ ID NO: 1969120 - DNA, 25 bp, Homo sapien
tgggtatgaatcaccttaaattggc

SEQ ID NO: 1969121 - DNA, 25 bp, Homo sapien
taaactactcatgccacagaaggcc

SEQ ID NO: 1969122 - DNA, 25 bp, Homo sapien
ttaaattggctaccgcgccaaggga

SEQ ID NO: 1969123 - DNA, 25 bp, Homo sapien
gaactaaattctcaggccaaacagc

SEQ ID NO: 1969124 - DNA, 25 bp, Homo sapien
tatgactgacaacacagtaggtttg

SEQ ID NO: 1969125 - DNA, 25 bp, Homo sapien
cattgggcaataggaagttttcagc

SEQ ID NO: 1969126 - DNA, 25 bp, Homo sapien
caaaacaatgctatgtgacacatga

SEQ ID NO: 1969127 - DNA, 25 bp, Homo sapien
tggtccactgttgaccaaaacaatg

SEQ ID NO: 1969128 - DNA, 25 bp, Homo sapien
tactgtggtaactcatttggccttg

SEQ ID NO: 1969129 - DNA, 25 bp, Homo sapien
gacagccttccctatatcacaggca

SEQ ID NO: 1969130 - DNA, 25 bp, Homo sapien
tccagaagtactttaaagacagcct

SEQ ID NO: 1969131 - DNA, 25 bp, Homo sapien
ggcacgttgccctgtgtgtacttta

SEQ ID NO: 1969132 - DNA, 25 bp, Homo sapien
tgcaagaagctctaatcaccccaaa

SEQ ID NO: 1969133 - DNA, 25 bp, Homo sapien
tacttctaagcttgcaagaagctct

SEQ ID NO: 1969134 - DNA, 25 bp, Homo sapien
agaagctctaatcaccccaaacaca

SEQ ID NO: 1969135 - DNA, 25 bp, Homo sapien
cattagcttcctacttctaagcttg

SEQ ID NO: 1969136 - DNA, 25 bp, Homo sapien
gctttactgataataagatcatggg

SEQ ID NO: 1969137 - DNA, 25 bp, Homo sapien
tatagaaatgatgacagtgctttac

SEQ ID NO: 1969138 - DNA, 25 bp, Homo sapien
gcaaaactaagcatgatccttgaaa

SEQ ID NO: 1969139 - DNA, 25 bp, Homo sapien
cagagttaagcaacaaacgattttg

SEQ ID NO: 1969140 - DNA, 25 bp, Homo sapien
gctaaagaggctataaagcacccca

SEQ ID NO: 1969141 - DNA, 25 bp, Homo sapien
tgtttcatgcttgaaagcaactgtt

SEQ ID NO: 1969142 - DNA, 25 bp, Homo sapien
agacctctctattcaaactgctaag

SEQ ID NO: 1969143 - DNA, 25 bp, Homo sapien
gctaagtaaatcctccgagagcccg

SEQ ID NO: 1969144 - DNA, 25 bp, Homo sapien
gggacgtcattttctcctatgccca

SEQ ID NO: 1969145 - DNA, 25 bp, Homo sapien
cctagggttccacaggacagcatct

SEQ ID NO: 1969146 - DNA, 25 bp, Homo sapien
catgtacctgctgcctgatgctgaa

SEQ ID NO: 1969147 - DNA, 25 bp, Homo sapien
gcttgccattctgtaaccaccctga

SEQ ID NO: 1969148 - DNA, 25 bp, Homo sapien
tcagtgtgagtcatcccagaacctc

SEQ ID NO: 1969149 - DNA, 25 bp, Homo sapien
atttcagtgtgagtcatcccagaac

SEQ ID NO: 1969150 - DNA, 25 bp, Homo sapien
catcccagaacctcgagaagaggaa

SEQ ID NO: 1969151 - DNA, 25 bp, Homo sapien
tgtgagtcatcccagaacctcgaga

SEQ ID NO: 1969152 - DNA, 25 bp, Homo sapien
tatccccatgatctggtctaccatc

SEQ ID NO: 1969153 - DNA, 25 bp, Homo sapien
cttatccccatgatctggtctacca

SEQ ID NO: 1969154 - DNA, 25 bp, Homo sapien
gtctaccatccaggccagctgattt

SEQ ID NO: 1969155 - DNA, 25 bp, Homo sapien
ccagctgattttagctcccaaaaaa

SEQ ID NO: 1969156 - DNA, 25 bp, Homo sapien
tcatccacccctttggcttcaacca

SEQ ID NO: 1969157 - DNA, 25 bp, Homo sapien
tggtgacggccgaatcctggttttc

SEQ ID NO: 1969158 - DNA, 25 bp, Homo sapien
tctggagccctcttctaacactctt

SEQ ID NO: 1969159 - DNA, 25 bp, Homo sapien
tcctgctccctcgacaatttcatcc

SEQ ID NO: 1969160 - DNA, 25 bp, Homo sapien
cacagagtggttcaaaggtcaggtt

SEQ ID NO: 1969161 - DNA, 25 bp, Homo sapien
tgccatttacaaccagacagtgctc

SEQ ID NO: 1969162 - DNA, 25 bp, Homo sapien
gccacggaagcaggtagaacacaga

SEQ ID NO: 1969163 - DNA, 25 bp, Homo sapien
tatttgggacaaggtctgccacgga

SEQ ID NO: 1969164 - DNA, 25 bp, Homo sapien
tatttacaataaacgttagcgcgac

SEQ ID NO: 1969165 - DNA, 25 bp, Homo sapien
tacattcaggttgatgtggccacag

SEQ ID NO: 1969166 - DNA, 25 bp, Homo sapien
taagccagaagggtgaaaaatactc

SEQ ID NO: 1969167 - DNA, 25 bp, Homo sapien
acacataatgctgctcggaaaaggg

SEQ ID NO: 1969168 - DNA, 25 bp, Homo sapien
tatatgggcacggttcatggcatcc

SEQ ID NO: 1969169 - DNA, 25 bp, Homo sapien
gacagtcttatatgggcacggttca

SEQ ID NO: 1969170 - DNA, 25 bp, Homo sapien
tcaattaagttgacagtcttatatg

SEQ ID NO: 1969171 - DNA, 25 bp, Homo sapien
taagttgacagtcttatatgggcac

SEQ ID NO: 1969172 - DNA, 25 bp, Homo sapien
taagacttggaagtacaaattattc

SEQ ID NO: 1969173 - DNA, 25 bp, Homo sapien
cctgttaatattacactcctgctga

SEQ ID NO: 1969174 - DNA, 25 bp, Homo sapien
tcccgggtaactacaccatctgtag

SEQ ID NO: 1969175 - DNA, 25 bp, Homo sapien
ccttgatccgtagactacaaaatgg

SEQ ID NO: 1969176 - DNA, 25 bp, Homo sapien
gaagtcctgtagtacaccctgcaga

SEQ ID NO: 1969177 - DNA, 25 bp, Homo sapien
gatatgaaaacctacgaatgccgaa

SEQ ID NO: 1969178 - DNA, 25 bp, Homo sapien
tgtaccagtaatccgcacagatact

SEQ ID NO: 1969179 - DNA, 25 bp, Homo sapien
gatactgtgggtctgacaacctcaa

SEQ ID NO: 1969180 - DNA, 25 bp, Homo sapien
aggtggttcggtacagtctgcatca

SEQ ID NO: 1969181 - DNA, 25 bp, Homo sapien
gaaaggacccatgtgtgttttataa

SEQ ID NO: 1969182 - DNA, 25 bp, Homo sapien
tatagggttggtcacagatcagggt

SEQ ID NO: 1969183 - DNA, 25 bp, Homo sapien
tgatagtgcctataagagtcttcct

SEQ ID NO: 1969184 - DNA, 25 bp, Homo sapien
ctttctaggaaagatctaaggcttc

SEQ ID NO: 1969185 - DNA, 25 bp, Homo sapien
ggaaagatctaaggcttctgcacta

SEQ ID NO: 1969186 - DNA, 25 bp, Homo sapien
tcctttttgtaagcaagtgtagcac

SEQ ID NO: 1969187 - DNA, 25 bp, Homo sapien
gcaagtgtagcacgtccactttcac

SEQ ID NO: 1969188 - DNA, 25 bp, Homo sapien
cttcttgatccccctggatggtttt

SEQ ID NO: 1969189 - DNA, 25 bp, Homo sapien
tgggtcttcttgatccccctggatg

SEQ ID NO: 1969190 - DNA, 25 bp, Homo sapien
tcctggcccatgaccaatgtgctgc

SEQ ID NO: 1969191 - DNA, 25 bp, Homo sapien
catgaccaatgtgctgccacacaga

SEQ ID NO: 1969192 - DNA, 25 bp, Homo sapien
tcagagtccacgtcctggcccatga

SEQ ID NO: 1969193 - DNA, 25 bp, Homo sapien
cacgtcctggcccatgaccaatgtg

SEQ ID NO: 1969194 - DNA, 25 bp, Homo sapien
gacctttccttatgtccatggcctg

SEQ ID NO: 1969195 - DNA, 25 bp, Homo sapien
gctgctgactgccagtgtgcttagt

SEQ ID NO: 1969196 - DNA, 25 bp, Homo sapien
cagtgtgcttagtgagtgcgtgacc

SEQ ID NO: 1969197 - DNA, 25 bp, Homo sapien
taaaatactggcagtaaacagttgg

SEQ ID NO: 1969198 - DNA, 25 bp, Homo sapien
gaaagaagcccctcatgtcacaggc

SEQ ID NO: 1969199 - DNA, 25 bp, Homo sapien
ttcaagtccagcattaatctccagt

SEQ ID NO: 1969200 - DNA, 25 bp, Homo sapien
tagcagcattgatataggttagaaa

SEQ ID NO: 1969201 - DNA, 25 bp, Homo sapien
ggtcaagtcctgtaccctgggagta

SEQ ID NO: 1969202 - DNA, 25 bp, Homo sapien
ggcaccacaacacaattcccctcat

SEQ ID NO: 1969203 - DNA, 25 bp, Homo sapien
aggcaccacaacacaattcccctca

SEQ ID NO: 1969204 - DNA, 25 bp, Homo sapien
gaggcaccacaacacaattcccctc

SEQ ID NO: 1969205 - DNA, 25 bp, Homo sapien
tctctggcccatgtgcaattggaca

SEQ ID NO: 1969206 - DNA, 25 bp, Homo sapien
tacgtctacccgaaatgtcatccct

SEQ ID NO: 1969207 - DNA, 25 bp, Homo sapien
gaccgacatcctggtaaagcagcaa

SEQ ID NO: 1969208 - DNA, 25 bp, Homo sapien
ttttccagttttccctatccgagca

SEQ ID NO: 1969209 - DNA, 25 bp, Homo sapien
taaatacatgtgaaccaggataagg

SEQ ID NO: 1969210 - DNA, 25 bp, Homo sapien
tctagcctgcaggttaagaactggt

SEQ ID NO: 1969211 - DNA, 25 bp, Homo sapien
gaatctgaccaactgaactggaatc

SEQ ID NO: 1969212 - DNA, 25 bp, Homo sapien
gaaatggaatgcacagccacatgat

SEQ ID NO: 1969213 - DNA, 25 bp, Homo sapien
tgtcctcgaccttcgcaggaagaaa

SEQ ID NO: 1969214 - DNA, 25 bp, Homo sapien
tcagtcctccaacaattggccaaca

SEQ ID NO: 1969215 - DNA, 25 bp, Homo sapien
ggccaacaatactcatagacaaaag

SEQ ID NO: 1969216 - DNA, 25 bp, Homo sapien
agcagcttttctggaaggaccatct

SEQ ID NO: 1969217 - DNA, 25 bp, Homo sapien
cagaagccaacagagcagataattc

SEQ ID NO: 1969218 - DNA, 25 bp, Homo sapien
taccttaatatgcagcctggcacta

SEQ ID NO: 1969219 - DNA, 25 bp, Homo sapien
aagtggagaccacattttgacagga

SEQ ID NO: 1969220 - DNA, 25 bp, Homo sapien
gggccataccactcgaactacctta

SEQ ID NO: 1969221 - DNA, 25 bp, Homo sapien
ggccatcagttgtgggccataccac

SEQ ID NO: 1969222 - DNA, 25 bp, Homo sapien
tgtgccaagttttcaacaagactga

SEQ ID NO: 1969223 - DNA, 25 bp, Homo sapien
tagtttgacaaggatcacctcgctg

SEQ ID NO: 1969224 - DNA, 25 bp, Homo sapien
tagtgttctttcatcgccctactgg

SEQ ID NO: 1969225 - DNA, 25 bp, Homo sapien
acaagactgaacagtgggtcctcaa

SEQ ID NO: 1969226 - DNA, 25 bp, Homo sapien
gctaaccagccccataatgtgacaa

SEQ ID NO: 1969227 - DNA, 25 bp, Homo sapien
tatgcgcagttcacaaaagagttcg

SEQ ID NO: 1969228 - DNA, 25 bp, Homo sapien
ggcctgccactcacgtcctgatgtg

SEQ ID NO: 1969229 - DNA, 25 bp, Homo sapien
tgacaataccacataaccaccagaa

SEQ ID NO: 1969230 - DNA, 25 bp, Homo sapien
ggagtacaggtatacactaccatgt

SEQ ID NO: 1969231 - DNA, 25 bp, Homo sapien
accatgagctcatattcaccagaaa

SEQ ID NO: 1969232 - DNA, 25 bp, Homo sapien
ctgcatccgacctaaatttttacca

SEQ ID NO: 1969233 - DNA, 25 bp, Homo sapien
cagaaagtttcatcttccaggcgcc

SEQ ID NO: 1969234 - DNA, 25 bp, Homo sapien
gagcctatgcgtgtttttgcacata

SEQ ID NO: 1969235 - DNA, 25 bp, Homo sapien
ttcatgtttattggttgcatcaata

SEQ ID NO: 1969236 - DNA, 25 bp, Homo sapien
gaactggagtcaacaagcactggaa

SEQ ID NO: 1969237 - DNA, 25 bp, Homo sapien
gtgacagcgggatcaaactccactc

SEQ ID NO: 1969238 - DNA, 25 bp, Homo sapien
gaaagggctagccacttcagtgaca

SEQ ID NO: 1969239 - DNA, 25 bp, Homo sapien
caagcaaacaggtgcgggaactgga

SEQ ID NO: 1969240 - DNA, 25 bp, Homo sapien
tactgtaatgctagacacatgtcct

SEQ ID NO: 1969241 - DNA, 25 bp, Homo sapien
caaatgattatctaggtgttccaac

SEQ ID NO: 1969242 - DNA, 25 bp, Homo sapien
gattttatgatggtgtacggtgtac

SEQ ID NO: 1969243 - DNA, 25 bp, Homo sapien
tggttgccagagattagtgggacaa

SEQ ID NO: 1969244 - DNA, 25 bp, Homo sapien
tctatggccctaaaacgatacctct

SEQ ID NO: 1969245 - DNA, 25 bp, Homo sapien
cacgctgaatttccaggcagagtct

SEQ ID NO: 1969246 - DNA, 25 bp, Homo sapien
tatgatagatgagggatgttcacgc

SEQ ID NO: 1969247 - DNA, 25 bp, Homo sapien
tctttcagtgtgcaaaccctgtaag

SEQ ID NO: 1969248 - DNA, 25 bp, Homo sapien
gccagtccacaggtattttaacact

SEQ ID NO: 1969249 - DNA, 25 bp, Homo sapien
cagccagtccacaggtattttaaca

SEQ ID NO: 1969250 - DNA, 25 bp, Homo sapien
tttaacactttagtagccagatgca

SEQ ID NO: 1969251 - DNA, 25 bp, Homo sapien
tagtagccagatgcacactggttga

SEQ ID NO: 1969252 - DNA, 25 bp, Homo sapien
cctaacacctaagatgtggcctttg

SEQ ID NO: 1969253 - DNA, 25 bp, Homo sapien
acttcaatttagttgcctctcccag

SEQ ID NO: 1969254 - DNA, 25 bp, Homo sapien
ttcaatttagttgcctctcccagag

SEQ ID NO: 1969255 - DNA, 25 bp, Homo sapien
taaacttcaatttagttgcctctcc

SEQ ID NO: 1969256 - DNA, 25 bp, Homo sapien
ttcagagagcaagctggccacagaa

SEQ ID NO: 1969257 - DNA, 25 bp, Homo sapien
tcagagagcaagctggccacagaac

SEQ ID NO: 1969258 - DNA, 25 bp, Homo sapien
ctctccctggaaggtacacgtacac

SEQ ID NO: 1969259 - DNA, 25 bp, Homo sapien
aggtacacgtacacttgaagctggg

SEQ ID NO: 1969260 - DNA, 25 bp, Homo sapien
cctggaaggtacacgtacacttgaa

SEQ ID NO: 1969261 - DNA, 25 bp, Homo sapien
acacgtacacttgaagctgggtcac

SEQ ID NO: 1969262 - DNA, 25 bp, Homo sapien
acattggtagcactcaacacacttg

SEQ ID NO: 1969263 - DNA, 25 bp, Homo sapien
attggtagcactcaacacacttgtc

SEQ ID NO: 1969264 - DNA, 25 bp, Homo sapien
tcaaacttgcacttcacattggtag

SEQ ID NO: 1969265 - DNA, 25 bp, Homo sapien
cattggtagcactcaacacacttgt

SEQ ID NO: 1969266 - DNA, 25 bp, Homo sapien
tcttggtcccaagtattacaaagtg

SEQ ID NO: 1969267 - DNA, 25 bp, Homo sapien
tgtagggctacgtgtctctccacta

SEQ ID NO: 1969268 - DNA, 25 bp, Homo sapien
cagaagagagtttcaccgaagggtc

SEQ ID NO: 1969269 - DNA, 25 bp, Homo sapien
taagattagagaagcatgctccggc

SEQ ID NO: 1969270 - DNA, 25 bp, Homo sapien
aggtaaaggaccagtgcaaaataga

SEQ ID NO: 1969271 - DNA, 25 bp, Homo sapien
cagcaggtaaaggaccagtgcaaaa

SEQ ID NO: 1969272 - DNA, 25 bp, Homo sapien
gcaggtaaaggaccagtgcaaaata

SEQ ID NO: 1969273 - DNA, 25 bp, Homo sapien
agcagcaggtaaaggaccagtgcaa

SEQ ID NO: 1969274 - DNA, 25 bp, Homo sapien
ttttatctgactcatggcatctccc

SEQ ID NO: 1969275 - DNA, 25 bp, Homo sapien
tgccttttttatctgactcatggca

SEQ ID NO: 1969276 - DNA, 25 bp, Homo sapien
tcctaaggacttgtgtgccaggcat

SEQ ID NO: 1969277 - DNA, 25 bp, Homo sapien
ctcctaaggacttgtgtgccaggca

SEQ ID NO: 1969278 - DNA, 25 bp, Homo sapien
tatacggctcatcaaagaggcagcc

SEQ ID NO: 1969279 - DNA, 25 bp, Homo sapien
tcagaagtcggtttagtcaaggtgt

SEQ ID NO: 1969280 - DNA, 25 bp, Homo sapien
caccttcagattgactatatccaca

SEQ ID NO: 1969281 - DNA, 25 bp, Homo sapien
ggtgttcacttgctcccaattgaag

SEQ ID NO: 1969282 - DNA, 25 bp, Homo sapien
cacaaaaactagcagcgagctggat

SEQ ID NO: 1969283 - DNA, 25 bp, Homo sapien
tgaaaaccctggaaactaagaagca

SEQ ID NO: 1969284 - DNA, 25 bp, Homo sapien
gaatgtaactcctcactttggtcga

SEQ ID NO: 1969285 - DNA, 25 bp, Homo sapien
aacaacggtgctttgagaatgtaac

SEQ ID NO: 1969286 - DNA, 25 bp, Homo sapien
aaaaataggcactgctgcatctaaa

SEQ ID NO: 1969287 - DNA, 25 bp, Homo sapien
ggatcatttgtataccaagcctcag

SEQ ID NO: 1969288 - DNA, 25 bp, Homo sapien
caagcctcagcaacacgtaatttac

SEQ ID NO: 1969289 - DNA, 25 bp, Homo sapien
tggacacaaacatgggaacgaatga

SEQ ID NO: 1969290 - DNA, 25 bp, Homo sapien
tacataagctacctagagtggccaa

SEQ ID NO: 1969291 - DNA, 25 bp, Homo sapien
gaggaaaacaccaaatcagatgtgt

SEQ ID NO: 1969292 - DNA, 25 bp, Homo sapien
ttaacatgaaacgtaatcccagcct

SEQ ID NO: 1969293 - DNA, 25 bp, Homo sapien
ggttcacatagtaaatttgacgcta

SEQ ID NO: 1969294 - DNA, 25 bp, Homo sapien
taaacctctccagtaatgaccaatg

SEQ ID NO: 1969295 - DNA, 25 bp, Homo sapien
gaaaaactgtgttggcatgacacga

SEQ ID NO: 1969296 - DNA, 25 bp, Homo sapien
tgagacacccactgaggcataaaac

SEQ ID NO: 1969297 - DNA, 25 bp, Homo sapien
cacgaagtcggtgtacctcaattaa

SEQ ID NO: 1969298 - DNA, 25 bp, Homo sapien
tcacttgaatcagaagaccctttca

SEQ ID NO: 1969299 - DNA, 25 bp, Homo sapien
tcccaggtgattagtagaaatagca

SEQ ID NO: 1969300 - DNA, 25 bp, Homo sapien
tcccatgagctacctcggaaggtta

SEQ ID NO: 1969301 - DNA, 25 bp, Homo sapien
ttattaagagttagcaaccactccc

SEQ ID NO: 1969302 - DNA, 25 bp, Homo sapien
caaacgcctgagtgaagcccgtgaa

SEQ ID NO: 1969303 - DNA, 25 bp, Homo sapien
tcagaggcactcgatggagaacaac

SEQ ID NO: 1969304 - DNA, 25 bp, Homo sapien
ccaggctacggtcagagagaagata

SEQ ID NO: 1969305 - DNA, 25 bp, Homo sapien
tctgagacgctcctaaaaacagctg

SEQ ID NO: 1969306 - DNA, 25 bp, Homo sapien
gattggatactaccccctttctgaa

SEQ ID NO: 1969307 - DNA, 25 bp, Homo sapien
ttctggtggtctcagattggatact

SEQ ID NO: 1969308 - DNA, 25 bp, Homo sapien
gcattgtatgaccacccatgttagg

SEQ ID NO: 1969309 - DNA, 25 bp, Homo sapien
ttctgaagcattgtatgaccaccca

SEQ ID NO: 1969310 - DNA, 25 bp, Homo sapien
tgacatcttagctccacaagggaag

SEQ ID NO: 1969311 - DNA, 25 bp, Homo sapien
catgtgttgtccgtgaagagcctcc

SEQ ID NO: 1969312 - DNA, 25 bp, Homo sapien
tctggactctgctatacctaaggga

SEQ ID NO: 1969313 - DNA, 25 bp, Homo sapien
tatctcagatttcgggttaagctcc

SEQ ID NO: 1969314 - DNA, 25 bp, Homo sapien
atgaaaatttgacagaacatagaca

SEQ ID NO: 1969315 - DNA, 25 bp, Homo sapien
aatttgacagaacatagacatgtac

SEQ ID NO: 1969316 - DNA, 25 bp, Homo sapien
catagacatgtacatcttaagattt

SEQ ID NO: 1969317 - DNA, 25 bp, Homo sapien
cttaagatttcaaatccaggcccat

SEQ ID NO: 1969318 - DNA, 25 bp, Homo sapien
tatgtgcttaacgaggtacacccag

SEQ ID NO: 1969319 - DNA, 25 bp, Homo sapien
taattttaccctgagccctaagcca

SEQ ID NO: 1969320 - DNA, 25 bp, Homo sapien
caggccccagcaagtttgttgcagg

SEQ ID NO: 1969321 - DNA, 25 bp, Homo sapien
ccttttgtccgttcaggtgcccaca

SEQ ID NO: 1969322 - DNA, 25 bp, Homo sapien
taatattattattgcccggctagag

SEQ ID NO: 1969323 - DNA, 25 bp, Homo sapien
gaattaggtgatgcaggtttcccag

SEQ ID NO: 1969324 - DNA, 25 bp, Homo sapien
tgccgcacaggaggccaattactag

SEQ ID NO: 1969325 - DNA, 25 bp, Homo sapien
ctttattcgggtactgcggcagagg

SEQ ID NO: 1969326 - DNA, 25 bp, Homo sapien
caggcagctccaaggacaaagcttc

SEQ ID NO: 1969327 - DNA, 25 bp, Homo sapien
tgtagatgtacctgtggcaggcagc

SEQ ID NO: 1969328 - DNA, 25 bp, Homo sapien
acaaagcttcccactgccattgagt

SEQ ID NO: 1969329 - DNA, 25 bp, Homo sapien
cttcccactgccattgagtatggca

SEQ ID NO: 1969330 - DNA, 25 bp, Homo sapien
ttctctagattctaactggagaggg

SEQ ID NO: 1969331 - DNA, 25 bp, Homo sapien
ggacttggaacgtatctcttgtgga

SEQ ID NO: 1969332 - DNA, 25 bp, Homo sapien
gggctactttacataggcatctaga

SEQ ID NO: 1969333 - DNA, 25 bp, Homo sapien
taggattcggtacttgcctcggtgg

SEQ ID NO: 1969334 - DNA, 25 bp, Homo sapien
tagtctgtacttgtgaagtctccaa

SEQ ID NO: 1969335 - DNA, 25 bp, Homo sapien
ggcaatcctatctatccttatggaa

SEQ ID NO: 1969336 - DNA, 25 bp, Homo sapien
tatgtcccattcgatattattctag

SEQ ID NO: 1969337 - DNA, 25 bp, Homo sapien
tatggaaagcttctagaacaatgcc

SEQ ID NO: 1969338 - DNA, 25 bp, Homo sapien
cataagcttcaagacgtcaggaatt

SEQ ID NO: 1969339 - DNA, 25 bp, Homo sapien
cgctgctattgtacctgagctctcg

SEQ ID NO: 1969340 - DNA, 25 bp, Homo sapien
acagagaggttctgaacgctgctat

SEQ ID NO: 1969341 - DNA, 25 bp, Homo sapien
tgccatccaatgaggacaagcaaca

SEQ ID NO: 1969342 - DNA, 25 bp, Homo sapien
tgagctctcgaccaatatcaggttg

SEQ ID NO: 1969343 - DNA, 25 bp, Homo sapien
gatgaagatgtgctaggacagaagt

SEQ ID NO: 1969344 - DNA, 25 bp, Homo sapien
gttttcttagtcaatatgcagcgtg

SEQ ID NO: 1969345 - DNA, 25 bp, Homo sapien
tatgcagcgtgtagctttctgcgag

SEQ ID NO: 1969346 - DNA, 25 bp, Homo sapien
ttctgcgaggtaacacagagcaggc

SEQ ID NO: 1969347 - DNA, 25 bp, Homo sapien
tactcagcttgctgtacgggaagag

SEQ ID NO: 1969348 - DNA, 25 bp, Homo sapien
gagcaagccctagaaaggcatgtta

SEQ ID NO: 1969349 - DNA, 25 bp, Homo sapien
caatgcttgacatcccaggatagca

SEQ ID NO: 1969350 - DNA, 25 bp, Homo sapien
gatagcacaactaataagtcagcca

SEQ ID NO: 1969351 - DNA, 25 bp, Homo sapien
acactgctccagatgatgaaccgcc

SEQ ID NO: 1969352 - DNA, 25 bp, Homo sapien
cagatcatcatgtcagccactctca

SEQ ID NO: 1969353 - DNA, 25 bp, Homo sapien
tctctaaagcccctgaagtgtctgg

SEQ ID NO: 1969354 - DNA, 25 bp, Homo sapien
tggtcatgggcattatccagtgcct

SEQ ID NO: 1969355 - DNA, 25 bp, Homo sapien
accagaggttcatttagcctcatat

SEQ ID NO: 1969356 - DNA, 25 bp, Homo sapien
ccagaggttcatttagcctcatatt

SEQ ID NO: 1969357 - DNA, 25 bp, Homo sapien
ttcctatctttatgtgaaagtgggt

SEQ ID NO: 1969358 - DNA, 25 bp, Homo sapien
ttttcctatctttatgtgaaagtgg

SEQ ID NO: 1969359 - DNA, 25 bp, Homo sapien
caaatgcaagctcatgaaatgcaac

SEQ ID NO: 1969360 - DNA, 25 bp, Homo sapien
tgactgaacacacaagctaacttat

SEQ ID NO: 1969361 - DNA, 25 bp, Homo sapien
tgcggtcatgaaagagtgagatgct

SEQ ID NO: 1969362 - DNA, 25 bp, Homo sapien
tataaagcataagttgacgtggaca

SEQ ID NO: 1969363 - DNA, 25 bp, Homo sapien
acctgaaacattctgaatccccaat

SEQ ID NO: 1969364 - DNA, 25 bp, Homo sapien
cctgaaacattctgaatccccaatg

SEQ ID NO: 1969365 - DNA, 25 bp, Homo sapien
aacattctgaatccccaatgaaact

SEQ ID NO: 1969366 - DNA, 25 bp, Homo sapien
ctgaaacattctgaatccccaatga

SEQ ID NO: 1969367 - DNA, 25 bp, Homo sapien
ttttgcagctagcagaggcacaggc

SEQ ID NO: 1969368 - DNA, 25 bp, Homo sapien
tttgaggtcccaataaaagcttgag

SEQ ID NO: 1969369 - DNA, 25 bp, Homo sapien
aaatcttggctgttagactctggac

SEQ ID NO: 1969370 - DNA, 25 bp, Homo sapien
tattcctacagtgaaaccctttgag

SEQ ID NO: 1969371 - DNA, 25 bp, Homo sapien
tctgttcaaactgctatcatagttg

SEQ ID NO: 1969372 - DNA, 25 bp, Homo sapien
caaaagtagagacgggtgactaggt

SEQ ID NO: 1969373 - DNA, 25 bp, Homo sapien
tgcaatcaagacaggtaactatggt

SEQ ID NO: 1969374 - DNA, 25 bp, Homo sapien
tcaactggtctaatgtgggtatcaa

SEQ ID NO: 1969375 - DNA, 25 bp, Homo sapien
ccagcaaggatcagggtagaaatct

SEQ ID NO: 1969376 - DNA, 25 bp, Homo sapien
tgagctctgtgtctaaagaatgcag

SEQ ID NO: 1969377 - DNA, 25 bp, Homo sapien
taatgccagttcttgatcacaagtg

SEQ ID NO: 1969378 - DNA, 25 bp, Homo sapien
aaggctcatggaagccccaggtgcc

SEQ ID NO: 1969379 - DNA, 25 bp, Homo sapien
gtgacatctgctatgcaggccaggg

SEQ ID NO: 1969380 - DNA, 25 bp, Homo sapien
caggccagggttatgggaactccag

SEQ ID NO: 1969381 - DNA, 25 bp, Homo sapien
caatgtttgcaccacagggtaccga

SEQ ID NO: 1969382 - DNA, 25 bp, Homo sapien
gtttgcaccacagggtaccgactcc

SEQ ID NO: 1969383 - DNA, 25 bp, Homo sapien
tgatttaaccacaggaggaacagca

SEQ ID NO: 1969384 - DNA, 25 bp, Homo sapien
tgttgggaatcacattatggctttc

SEQ ID NO: 1969385 - DNA, 25 bp, Homo sapien
agcatgtccacagttattgttggga

SEQ ID NO: 1969386 - DNA, 25 bp, Homo sapien
tggctttctaggaaagcaactgggc

SEQ ID NO: 1969387 - DNA, 25 bp, Homo sapien
tgattccagtttatgctgacaactg

SEQ ID NO: 1969388 - DNA, 25 bp, Homo sapien
gtttatgctgacaactgaattttat

SEQ ID NO: 1969389 - DNA, 25 bp, Homo sapien
cagtttatgctgacaactgaatttt

SEQ ID NO: 1969390 - DNA, 25 bp, Homo sapien
tccagtttatgctgacaactgaatt

SEQ ID NO: 1969391 - DNA, 25 bp, Homo sapien
tttacactttcgacacctgctacga

SEQ ID NO: 1969392 - DNA, 25 bp, Homo sapien
cctgctacgacaaagaacatccaat

SEQ ID NO: 1969393 - DNA, 25 bp, Homo sapien
taataagctgacacattcctctgca

SEQ ID NO: 1969394 - DNA, 25 bp, Homo sapien
ttgacaactcttcaggccaataagg

SEQ ID NO: 1969395 - DNA, 25 bp, Homo sapien
cagggacagcagctgatgggatcat

SEQ ID NO: 1969396 - DNA, 25 bp, Homo sapien
cacatcctgtgaagcactcagaggg

SEQ ID NO: 1969397 - DNA, 25 bp, Homo sapien
gaaagcacggcaatatacacaggac

SEQ ID NO: 1969398 - DNA, 25 bp, Homo sapien
gaacaaaacctggagtatggccata

SEQ ID NO: 1969399 - DNA, 25 bp, Homo sapien
tatatccttactggtggagctgagg

SEQ ID NO: 1969400 - DNA, 25 bp, Homo sapien
caaaaacaaaatcaaggagagtcat

SEQ ID NO: 1969401 - DNA, 25 bp, Homo sapien
ctgcaaaaacaaaatcaaggagagt

SEQ ID NO: 1969402 - DNA, 25 bp, Homo sapien
tgcaaaaacaaaatcaaggagagtc

SEQ ID NO: 1969403 - DNA, 25 bp, Homo sapien
gcaaaaacaaaatcaaggagagtca

SEQ ID NO: 1969404 - DNA, 25 bp, Homo sapien
ctcaggtctcccagaggcattcacc

SEQ ID NO: 1969405 - DNA, 25 bp, Homo sapien
aggtctcccagaggcattcaccagc

SEQ ID NO: 1969406 - DNA, 25 bp, Homo sapien
gcccctcaggtctcccagaggcatt

SEQ ID NO: 1969407 - DNA, 25 bp, Homo sapien
gtctcccagaggcattcaccagcat

SEQ ID NO: 1969408 - DNA, 25 bp, Homo sapien
ggcccgttattgaccttcacgtaga

SEQ ID NO: 1969409 - DNA, 25 bp, Homo sapien
tattccagataggattccccagtgg

SEQ ID NO: 1969410 - DNA, 25 bp, Homo sapien
cgtagacattgagtaaccccggagg

SEQ ID NO: 1969411 - DNA, 25 bp, Homo sapien
tccatgtacgtgttgggtctccaga

SEQ ID NO: 1969412 - DNA, 25 bp, Homo sapien
gctctggaggctgtgatggtctcaa

SEQ ID NO: 1969413 - DNA, 25 bp, Homo sapien
tgcagctgactgaggtagggacata

SEQ ID NO: 1969414 - DNA, 25 bp, Homo sapien
agaaattccacgtctgactgcagcc

SEQ ID NO: 1969415 - DNA, 25 bp, Homo sapien
cacgctaaaccagcacactgtggct

SEQ ID NO: 1969416 - DNA, 25 bp, Homo sapien
agggcggccagtgttaacaatattt

SEQ ID NO: 1969417 - DNA, 25 bp, Homo sapien
tgagggcggccagtgttaacaatat

SEQ ID NO: 1969418 - DNA, 25 bp, Homo sapien
ctgcatgagggcggccagtgttaac

SEQ ID NO: 1969419 - DNA, 25 bp, Homo sapien
catgagggcggccagtgttaacaat

SEQ ID NO: 1969420 - DNA, 25 bp, Homo sapien
tgggttttcagtagatctatactct

SEQ ID NO: 1969421 - DNA, 25 bp, Homo sapien
tcatcaggagttggtagtagcccac

SEQ ID NO: 1969422 - DNA, 25 bp, Homo sapien
agttccaaggccgatgcttgctgga

SEQ ID NO: 1969423 - DNA, 25 bp, Homo sapien
ctttaaaagttccaaggccgatgct

SEQ ID NO: 1969424 - DNA, 25 bp, Homo sapien
tgtcctctgatgctgcccatgtgca

SEQ ID NO: 1969425 - DNA, 25 bp, Homo sapien
tagaatatatcctgcagcctacgta

SEQ ID NO: 1969426 - DNA, 25 bp, Homo sapien
taagcagggctgatattcaaatccc

SEQ ID NO: 1969427 - DNA, 25 bp, Homo sapien
taagaggctagcatatccccaatgt

SEQ ID NO: 1969428 - DNA, 25 bp, Homo sapien
gattcaaaaacactcctagcctccg

SEQ ID NO: 1969429 - DNA, 25 bp, Homo sapien
tcccggagattcaaaaacactccta

SEQ ID NO: 1969430 - DNA, 25 bp, Homo sapien
cggagattcaaaaacactcctagcc

SEQ ID NO: 1969431 - DNA, 25 bp, Homo sapien
aaaacactcctagcctccgaaatgg

SEQ ID NO: 1969432 - DNA, 25 bp, Homo sapien
cgatagcgagatagccttgatgtcc

SEQ ID NO: 1969433 - DNA, 25 bp, Homo sapien
taacaccttcacctcatcgatagcg

SEQ ID NO: 1969434 - DNA, 25 bp, Homo sapien
gccttgatgtccagaagttatcact

SEQ ID NO: 1969435 - DNA, 25 bp, Homo sapien
tcacctcatcgatagcgagatagcc

SEQ ID NO: 1969436 - DNA, 25 bp, Homo sapien
tctgcctgcgggaattttcaaggca

SEQ ID NO: 1969437 - DNA, 25 bp, Homo sapien
cctgggtctgcctgcgggaattttc

SEQ ID NO: 1969438 - DNA, 25 bp, Homo sapien
tttccttatctcttcatcccacttg

SEQ ID NO: 1969439 - DNA, 25 bp, Homo sapien
ggtctgcctgcgggaattttcaagg

SEQ ID NO: 1969440 - DNA, 25 bp, Homo sapien
atggcactgcactggaaggtagcaa

SEQ ID NO: 1969441 - DNA, 25 bp, Homo sapien
aaactggccagcattaacttccaca

SEQ ID NO: 1969442 - DNA, 25 bp, Homo sapien
aacttccacattctgaatccgcagg

SEQ ID NO: 1969443 - DNA, 25 bp, Homo sapien
ccacattctgaatccgcaggaagtg

SEQ ID NO: 1969444 - DNA, 25 bp, Homo sapien
cacaaccgcgtacacagaagggtta

SEQ ID NO: 1969445 - DNA, 25 bp, Homo sapien
ggagtctccaatcacaatcataatt

SEQ ID NO: 1969446 - DNA, 25 bp, Homo sapien
tacactgcgaggcatgacaggaggt

SEQ ID NO: 1969447 - DNA, 25 bp, Homo sapien
cgaaggacagttcaactcagtagca

SEQ ID NO: 1969448 - DNA, 25 bp, Homo sapien
tctgagaaactaaaagccctgtggc

SEQ ID NO: 1969449 - DNA, 25 bp, Homo sapien
gcagtccataaggtccagggtcgta

SEQ ID NO: 1969450 - DNA, 25 bp, Homo sapien
tgggttggccaaacgtaatcacaag

SEQ ID NO: 1969451 - DNA, 25 bp, Homo sapien
tgtgtcgtcagtcagcaacattgcc

SEQ ID NO: 1969452 - DNA, 25 bp, Homo sapien
gggctaggcatgctcagcccttcct

SEQ ID NO: 1969453 - DNA, 25 bp, Homo sapien
aggcagtcagctccccaaagaaggg

SEQ ID NO: 1969454 - DNA, 25 bp, Homo sapien
gctgggctaggcatgctcagccctt

SEQ ID NO: 1969455 - DNA, 25 bp, Homo sapien
ggggctgggctaggcatgctcagcc

SEQ ID NO: 1969456 - DNA, 25 bp, Homo sapien
ttaaagactgagcgatgcaaaatta

SEQ ID NO: 1969457 - DNA, 25 bp, Homo sapien
cttaaagactgagcgatgcaaaatt

SEQ ID NO: 1969458 - DNA, 25 bp, Homo sapien
taaagactgagcgatgcaaaattaa

SEQ ID NO: 1969459 - DNA, 25 bp, Homo sapien
aaagactgagcgatgcaaaattaag

SEQ ID NO: 1969460 - DNA, 25 bp, Homo sapien
gggaggacaaaaagaagcaatataa

SEQ ID NO: 1969461 - DNA, 25 bp, Homo sapien
gtggggaggacaaaaagaagcaata

SEQ ID NO: 1969462 - DNA, 25 bp, Homo sapien
ctgtatcaagtggggtggggaggac

SEQ ID NO: 1969463 - DNA, 25 bp, Homo sapien
gtatcaagtggggtggggaggacaa

SEQ ID NO: 1969464 - DNA, 25 bp, Homo sapien
ttccttcagaggagcatctcgcaca

SEQ ID NO: 1969465 - DNA, 25 bp, Homo sapien
cagcatctcgtttggtggtattcac

SEQ ID NO: 1969466 - DNA, 25 bp, Homo sapien
tccttcagtgcgaatcatgcagcgg

SEQ ID NO: 1969467 - DNA, 25 bp, Homo sapien
tgcagcggtactttccagcatctcg

SEQ ID NO: 1969468 - DNA, 25 bp, Homo sapien
ctttcagatgctttgtcttcagtct

SEQ ID NO: 1969469 - DNA, 25 bp, Homo sapien
taggtggctcctacagaggcgagct

SEQ ID NO: 1969470 - DNA, 25 bp, Homo sapien
caaggtgtccaattttatagctcgt

SEQ ID NO: 1969471 - DNA, 25 bp, Homo sapien
gagttggcgttgagctgtatccaca

SEQ ID NO: 1969472 - DNA, 25 bp, Homo sapien
tcgtggaatcgactggctgccggtc

SEQ ID NO: 1969473 - DNA, 25 bp, Homo sapien
ttaattgcagggttccttatactca

SEQ ID NO: 1969474 - DNA, 25 bp, Homo sapien
taattgcagggttccttatactcac

SEQ ID NO: 1969475 - DNA, 25 bp, Homo sapien
ggcccaagtaagagagtctgaccta

SEQ ID NO: 1969476 - DNA, 25 bp, Homo sapien
ggtccccaagttcacaagctgttag

SEQ ID NO: 1969477 - DNA, 25 bp, Homo sapien
tgactattcacaggctaagggcatt

SEQ ID NO: 1969478 - DNA, 25 bp, Homo sapien
gctgagaaataccaagcctggaggt

SEQ ID NO: 1969479 - DNA, 25 bp, Homo sapien
aaggctatctctaagatggaatctg

SEQ ID NO: 1969480 - DNA, 25 bp, Homo sapien
acacatctttaaggctatctctaag

SEQ ID NO: 1969481 - DNA, 25 bp, Homo sapien
tctttaaggctatctctaagatgga

SEQ ID NO: 1969482 - DNA, 25 bp, Homo sapien
tgaaaacacatctttaaggctatct

SEQ ID NO: 1969483 - DNA, 25 bp, Homo sapien
tgtactcaatagcatgtatccccag

SEQ ID NO: 1969484 - DNA, 25 bp, Homo sapien
aaagtacacagtctactaacccagg

SEQ ID NO: 1969485 - DNA, 25 bp, Homo sapien
taagttgcggaatgggtttagcaca

SEQ ID NO: 1969486 - DNA, 25 bp, Homo sapien
cagagtagccatacggaaacaacac

SEQ ID NO: 1969487 - DNA, 25 bp, Homo sapien
gcacaaaggtgccacgaggatacag

SEQ ID NO: 1969488 - DNA, 25 bp, Homo sapien
aaggtgccacgaggatacagatgtg

SEQ ID NO: 1969489 - DNA, 25 bp, Homo sapien
aggtcttattccagggaccagactg

SEQ ID NO: 1969490 - DNA, 25 bp, Homo sapien
cagcaggtcttattccagggaccag

SEQ ID NO: 1969491 - DNA, 25 bp, Homo sapien
ggatatatatacagcaatgtgtcaa

SEQ ID NO: 1969492 - DNA, 25 bp, Homo sapien
cacatgcattataatcagtggatat

SEQ ID NO: 1969493 - DNA, 25 bp, Homo sapien
taatcagtggatatatatacagcaa

SEQ ID NO: 1969494 - DNA, 25 bp, Homo sapien
gcaatgtgtcaatagctgagatgta

SEQ ID NO: 1969495 - DNA, 25 bp, Homo sapien
ttacacattatgcagcagcatcaaa

SEQ ID NO: 1969496 - DNA, 25 bp, Homo sapien
tacacattatgcagcagcatcaaaa

SEQ ID NO: 1969497 - DNA, 25 bp, Homo sapien
aaccagaccatgcatcacgaacagt

SEQ ID NO: 1969498 - DNA, 25 bp, Homo sapien
cacagtgtgggcctacaaatatcaa

SEQ ID NO: 1969499 - DNA, 25 bp, Homo sapien
ggaaagggcgcatcgtcattaggct

SEQ ID NO: 1969500 - DNA, 25 bp, Homo sapien
tgaggtttcatacattgaggcacag

SEQ ID NO: 1969501 - DNA, 25 bp, Homo sapien
gcagaatgcttctagtctctcccat

SEQ ID NO: 1969502 - DNA, 25 bp, Homo sapien
tataatttacagcacacgtttccct

SEQ ID NO: 1969503 - DNA, 25 bp, Homo sapien
tttgaaccatacaggaaggatttag

SEQ ID NO: 1969504 - DNA, 25 bp, Homo sapien
tagattcatcaaccatttgcccctg

SEQ ID NO: 1969505 - DNA, 25 bp, Homo sapien
gattttagatttcccagataagcaa

SEQ ID NO: 1969506 - DNA, 25 bp, Homo sapien
cagtagctcattaaggctcacaaca

SEQ ID NO: 1969507 - DNA, 25 bp, Homo sapien
tagttaactctgattgaccacatgc

SEQ ID NO: 1969508 - DNA, 25 bp, Homo sapien
taaaacattgggtaatgaggtagcc

SEQ ID NO: 1969509 - DNA, 25 bp, Homo sapien
cttctagaaagggtttcaatgctga

SEQ ID NO: 1969510 - DNA, 25 bp, Homo sapien
ccttctagaaagggtttcaatgctg

SEQ ID NO: 1969511 - DNA, 25 bp, Homo sapien
tccttctagaaagggtttcaatgct

SEQ ID NO: 1969512 - DNA, 25 bp, Homo sapien
cttacatagagatgttgaaggataa

SEQ ID NO: 1969513 - DNA, 25 bp, Homo sapien
cacaaaaggattaacgatgatgatt

SEQ ID NO: 1969514 - DNA, 25 bp, Homo sapien
gagcttacatagagatgttgaagga

SEQ ID NO: 1969515 - DNA, 25 bp, Homo sapien
atgagcttacatagagatgttgaag

SEQ ID NO: 1969516 - DNA, 25 bp, Homo sapien
tgtagacatctaccaagataaatta

SEQ ID NO: 1969517 - DNA, 25 bp, Homo sapien
tcactgactaaatactctaagtata

SEQ ID NO: 1969518 - DNA, 25 bp, Homo sapien
atatcttctaaaacaagactagaaa

SEQ ID NO: 1969519 - DNA, 25 bp, Homo sapien
catttagcaaacataattgcatatg

SEQ ID NO: 1969520 - DNA, 25 bp, Homo sapien
agccactgagcccagccaacagaga

SEQ ID NO: 1969521 - DNA, 25 bp, Homo sapien
tccctctgtctcccggctggaatgc

SEQ ID NO: 1969522 - DNA, 25 bp, Homo sapien
ccactgagcccagccaacagagata

SEQ ID NO: 1969523 - DNA, 25 bp, Homo sapien
tctccctctgtctcccggctggaat

SEQ ID NO: 1969524 - DNA, 25 bp, Homo sapien
aagcagcattgcagagaaacctccg

SEQ ID NO: 1969525 - DNA, 25 bp, Homo sapien
tgacgagggaacacttagcacaaca

SEQ ID NO: 1969526 - DNA, 25 bp, Homo sapien
caagggcaattcaggtttctggcca

SEQ ID NO: 1969527 - DNA, 25 bp, Homo sapien
tgaacatgggtgcaataaggagcca

SEQ ID NO: 1969528 - DNA, 25 bp, Homo sapien
tctggaggctggtcgatggtttaaa

SEQ ID NO: 1969529 - DNA, 25 bp, Homo sapien
cagggcacggtactgaggaaaatac

SEQ ID NO: 1969530 - DNA, 25 bp, Homo sapien
tgttccttaatggagtcacagattc

SEQ ID NO: 1969531 - DNA, 25 bp, Homo sapien
tatgggcctttataacattcactgc

SEQ ID NO: 1969532 - DNA, 25 bp, Homo sapien
ctcagactgcatgctctccgtctta

SEQ ID NO: 1969533 - DNA, 25 bp, Homo sapien
actcagactgcatgctctccgtctt

SEQ ID NO: 1969534 - DNA, 25 bp, Homo sapien
aagactatttttgagagccatgtga

SEQ ID NO: 1969535 - DNA, 25 bp, Homo sapien
gggaactaaacacagcagactaagc

SEQ ID NO: 1969536 - DNA, 25 bp, Homo sapien
gctatcaccctcatgtacaacaaaa

SEQ ID NO: 1969537 - DNA, 25 bp, Homo sapien
tcaacatgctttacctaccaagaaa

SEQ ID NO: 1969538 - DNA, 25 bp, Homo sapien
cgtacagctgcaggccatttgaatg

SEQ ID NO: 1969539 - DNA, 25 bp, Homo sapien
tagaggaacctctatattgccttcc

SEQ ID NO: 1969540 - DNA, 25 bp, Homo sapien
taactttctttggataatagccaca

SEQ ID NO: 1969541 - DNA, 25 bp, Homo sapien
gaaatgttcacttaggtcactggct

SEQ ID NO: 1969542 - DNA, 25 bp, Homo sapien
gagcctgctgcctttacaactggaa

SEQ ID NO: 1969543 - DNA, 25 bp, Homo sapien
ggctgaatacaacaaagagactggt

SEQ ID NO: 1969544 - DNA, 25 bp, Homo sapien
tgagcatctgtctatcttggaacct

SEQ ID NO: 1969545 - DNA, 25 bp, Homo sapien
gaccgcttctgaactgggacattgt

SEQ ID NO: 1969546 - DNA, 25 bp, Homo sapien
acagcaagaggtggtacagctgctg

SEQ ID NO: 1969547 - DNA, 25 bp, Homo sapien
cctcgccaatgctgtcagagacagc

SEQ ID NO: 1969548 - DNA, 25 bp, Homo sapien
ccctcgccaatgctgtcagagacag

SEQ ID NO: 1969549 - DNA, 25 bp, Homo sapien
gaggtggtacagctgctggacccat

SEQ ID NO: 1969550 - DNA, 25 bp, Homo sapien
acctttcgagccagatacacacaca

SEQ ID NO: 1969551 - DNA, 25 bp, Homo sapien
aaacctttagcctgagtggcagtcc

SEQ ID NO: 1969552 - DNA, 25 bp, Homo sapien
tccagttgtctagcaccagaaaacc

SEQ ID NO: 1969553 - DNA, 25 bp, Homo sapien
acccattcgcatgcaccaaatttca

SEQ ID NO: 1969554 - DNA, 25 bp, Homo sapien
cttttggacagagttgacaagtatc

SEQ ID NO: 1969555 - DNA, 25 bp, Homo sapien
cttcagtcgattttccattcttcac

SEQ ID NO: 1969556 - DNA, 25 bp, Homo sapien
caatagccaaagtgcaaacacttca

SEQ ID NO: 1969557 - DNA, 25 bp, Homo sapien
cttcacacaatagccaaagtgcaaa

SEQ ID NO: 1969558 - DNA, 25 bp, Homo sapien
caacccaatgccacttcagtcgatt

SEQ ID NO: 1969559 - DNA, 25 bp, Homo sapien
gagcgaggtcagtgtggatctctaa

SEQ ID NO: 1969560 - DNA, 25 bp, Homo sapien
tcctagtgtctgctgaataatgtct

SEQ ID NO: 1969561 - DNA, 25 bp, Homo sapien
tggatctctaagcacgtgcgtgttt

SEQ ID NO: 1969562 - DNA, 25 bp, Homo sapien
caccaaaatgatggcgtctggaggg

SEQ ID NO: 1969563 - DNA, 25 bp, Homo sapien
gaggccactgccaatcacccttgag

SEQ ID NO: 1969564 - DNA, 25 bp, Homo sapien
cagggttgggctagcaaatggcctt

SEQ ID NO: 1969565 - DNA, 25 bp, Homo sapien
acccttgagtagtccagctctttca

SEQ ID NO: 1969566 - DNA, 25 bp, Homo sapien
tgtttcccactagtctacattctgg

SEQ ID NO: 1969567 - DNA, 25 bp, Homo sapien
tcctcctccatcttcccctcccttc

SEQ ID NO: 1969568 - DNA, 25 bp, Homo sapien
ttcccctcccttcttgacaggagcc

SEQ ID NO: 1969569 - DNA, 25 bp, Homo sapien
ttaactgaagtcctcctccatcttc

SEQ ID NO: 1969570 - DNA, 25 bp, Homo sapien
cttcccctcccttcttgacaggagc

SEQ ID NO: 1969571 - DNA, 25 bp, Homo sapien
ttttatgctggtgaaactgaacctg

SEQ ID NO: 1969572 - DNA, 25 bp, Homo sapien
gaatagtgtttataccaagataggg

SEQ ID NO: 1969573 - DNA, 25 bp, Homo sapien
gctggtgaaactgaacctgtcctta

SEQ ID NO: 1969574 - DNA, 25 bp, Homo sapien
aaggtttttatgctggtgaaactga

SEQ ID NO: 1969575 - DNA, 25 bp, Homo sapien
agcagtaaacaactgaagcattatg

SEQ ID NO: 1969576 - DNA, 25 bp, Homo sapien
aggcaattatcctaaccgttctaat

SEQ ID NO: 1969577 - DNA, 25 bp, Homo sapien
tgttcacatatgtgagatacgcaca

SEQ ID NO: 1969578 - DNA, 25 bp, Homo sapien
ttcagacagaacacaatttcctttg

SEQ ID NO: 1969579 - DNA, 25 bp, Homo sapien
tgagtcaccagtaagttcactaagc

SEQ ID NO: 1969580 - DNA, 25 bp, Homo sapien
gatgccctttcttgctatgactgag

SEQ ID NO: 1969581 - DNA, 25 bp, Homo sapien
agaataagttctactggcgcagcca

SEQ ID NO: 1969582 - DNA, 25 bp, Homo sapien
ggaggctactcctgaaatttggtga

SEQ ID NO: 1969583 - DNA, 25 bp, Homo sapien
gaaatagagctaccccactcgtatg

SEQ ID NO: 1969584 - DNA, 25 bp, Homo sapien
tggttgtcaatcagcctttcaggga

SEQ ID NO: 1969585 - DNA, 25 bp, Homo sapien
cccaagtgttatccagagttagcaa

SEQ ID NO: 1969586 - DNA, 25 bp, Homo sapien
gaatgccgcatttctagtgaccaaa

SEQ ID NO: 1969587 - DNA, 25 bp, Homo sapien
ggatgggaaaattaacgtgagcaca

SEQ ID NO: 1969588 - DNA, 25 bp, Homo sapien
tgtgatacggcaaaacacacaaggc

SEQ ID NO: 1969589 - DNA, 25 bp, Homo sapien
taatccagggccctagtcactaaat

SEQ ID NO: 1969590 - DNA, 25 bp, Homo sapien
gcttggactggaagtcttgccacct

SEQ ID NO: 1969591 - DNA, 25 bp, Homo sapien
ccatactgacctgcgagtccacaaa

SEQ ID NO: 1969592 - DNA, 25 bp, Homo sapien
ctgacctgcgagtccacaaacactg

SEQ ID NO: 1969593 - DNA, 25 bp, Homo sapien
tactgacctgcgagtccacaaacac

SEQ ID NO: 1969594 - DNA, 25 bp, Homo sapien
tacccatactgacctgcgagtccac

SEQ ID NO: 1969595 - DNA, 25 bp, Homo sapien
cagaaacgacatgcaaaaatgggtg

SEQ ID NO: 1969596 - DNA, 25 bp, Homo sapien
gtgttgactgtgttgggtggctggc

SEQ ID NO: 1969597 - DNA, 25 bp, Homo sapien
tgtgttgggtggctggcacttcttt

SEQ ID NO: 1969598 - DNA, 25 bp, Homo sapien
cacgttcaggttctgtgcttgcctc

SEQ ID NO: 1969599 - DNA, 25 bp, Homo sapien
cactctgcacacgtatcctggaact

SEQ ID NO: 1969600 - DNA, 25 bp, Homo sapien
tgcaggactgtttgaagccgccatg

SEQ ID NO: 1969601 - DNA, 25 bp, Homo sapien
tatgcttaagcacaaatcacttggt

SEQ ID NO: 1969602 - DNA, 25 bp, Homo sapien
taggtaacatacttgcacactctgc

SEQ ID NO: 1969603 - DNA, 25 bp, Homo sapien
agatgttagaacaaaattaggccag

SEQ ID NO: 1969604 - DNA, 25 bp, Homo sapien
gtgctcataaaactgatagaattta

SEQ ID NO: 1969605 - DNA, 25 bp, Homo sapien
taaatgtatgtgctcataaaactga

SEQ ID NO: 1969606 - DNA, 25 bp, Homo sapien
tatctactgattagtctaaatttac

SEQ ID NO: 1969607 - DNA, 25 bp, Homo sapien
ccatggggcagtaagaatgacagcc

SEQ ID NO: 1969608 - DNA, 25 bp, Homo sapien
gtgaacaatcgatcaggccccaaga

SEQ ID NO: 1969609 - DNA, 25 bp, Homo sapien
ctgtgaacaatcgatcaggccccaa

SEQ ID NO: 1969610 - DNA, 25 bp, Homo sapien
acagccatggggcagtaagaatgac

SEQ ID NO: 1969611 - DNA, 25 bp, Homo sapien
tccatgatccacacctgagcaatac

SEQ ID NO: 1969612 - DNA, 25 bp, Homo sapien
tgagcaatactttaagctcttggct

SEQ ID NO: 1969613 - DNA, 25 bp, Homo sapien
gtaaaatggctttcacggcactatt

SEQ ID NO: 1969614 - DNA, 25 bp, Homo sapien
tcttggcttaggcttttaaggttgc

SEQ ID NO: 1969615 - DNA, 25 bp, Homo sapien
tctgtgaaaagcctttccaagtttc

SEQ ID NO: 1969616 - DNA, 25 bp, Homo sapien
tgtgactcacatctctgttgtgctt

SEQ ID NO: 1969617 - DNA, 25 bp, Homo sapien
tgaaaagcctttccaagtttctgtg

SEQ ID NO: 1969618 - DNA, 25 bp, Homo sapien
ccaagtttctgtgttgtgactcaca

SEQ ID NO: 1969619 - DNA, 25 bp, Homo sapien
ctgcaaccagccctaatgtgcgatt

SEQ ID NO: 1969620 - DNA, 25 bp, Homo sapien
cagccctaatgtgcgattatgagtt

SEQ ID NO: 1969621 - DNA, 25 bp, Homo sapien
aaccagccctaatgtgcgattatga

SEQ ID NO: 1969622 - DNA, 25 bp, Homo sapien
gcaaccagccctaatgtgcgattat

SEQ ID NO: 1969623 - DNA, 25 bp, Homo sapien
ctctcccactgatgcctgcagcatt

SEQ ID NO: 1969624 - DNA, 25 bp, Homo sapien
ccagtgggtccactgtgggcccact

SEQ ID NO: 1969625 - DNA, 25 bp, Homo sapien
gaaagggtatcatgacaggccccgt

SEQ ID NO: 1969626 - DNA, 25 bp, Homo sapien
tccctgaaagggtatcatgacaggc

SEQ ID NO: 1969627 - DNA, 25 bp, Homo sapien
tgcttccctgaaagggtatcatgac

SEQ ID NO: 1969628 - DNA, 25 bp, Homo sapien
tccaaacgcaaagttaagagggatg

SEQ ID NO: 1969629 - DNA, 25 bp, Homo sapien
gatttgccgagatttgacctccact

SEQ ID NO: 1969630 - DNA, 25 bp, Homo sapien
acttctagttttcttgggcctcgca

SEQ ID NO: 1969631 - DNA, 25 bp, Homo sapien
caaatggctcccagcggatagtgat

SEQ ID NO: 1969632 - DNA, 25 bp, Homo sapien
gggttcatgaggatcagtttcacac

SEQ ID NO: 1969633 - DNA, 25 bp, Homo sapien
tgattacaccatatgtttgagttgg

SEQ ID NO: 1969634 - DNA, 25 bp, Homo sapien
atatgtttgagttggttctctccac

SEQ ID NO: 1969635 - DNA, 25 bp, Homo sapien
taaagtgattacaccatatgtttga

SEQ ID NO: 1969636 - DNA, 25 bp, Homo sapien
caccatatgtttgagttggttctct

SEQ ID NO: 1969637 - DNA, 25 bp, Homo sapien
tttttaccagtattcaaatgtgact

SEQ ID NO: 1969638 - DNA, 25 bp, Homo sapien
gatttttaccagtattcaaatgtga

SEQ ID NO: 1969639 - DNA, 25 bp, Homo sapien
ttaccagtattcaaatgtgactcca

SEQ ID NO: 1969640 - DNA, 25 bp, Homo sapien
tttaccagtattcaaatgtgactcc

SEQ ID NO: 1969641 - DNA, 25 bp, Homo sapien
gactcttgaaatcctgaatccactg

SEQ ID NO: 1969642 - DNA, 25 bp, Homo sapien
taaacccttctgatgtatgcactgt

SEQ ID NO: 1969643 - DNA, 25 bp, Homo sapien
gataagctcctactcagactcttga

SEQ ID NO: 1969644 - DNA, 25 bp, Homo sapien
tctggagcagatggactcagattgc

SEQ ID NO: 1969645 - DNA, 25 bp, Homo sapien
tagctgtgctagctcggatggtaaa

SEQ ID NO: 1969646 - DNA, 25 bp, Homo sapien
tgtggtccccggatacagtccaaaa

SEQ ID NO: 1969647 - DNA, 25 bp, Homo sapien
tctgggtcaaaggaactgactgctt

SEQ ID NO: 1969648 - DNA, 25 bp, Homo sapien
ctgattggataaatctatttctggg

SEQ ID NO: 1969649 - DNA, 25 bp, Homo sapien
caagttcataagctggcatagaggg

SEQ ID NO: 1969650 - DNA, 25 bp, Homo sapien
tgggcaggtttcagcatgactgtca

SEQ ID NO: 1969651 - DNA, 25 bp, Homo sapien
gattcaaaggtgtctcaagttcata

SEQ ID NO: 1969652 - DNA, 25 bp, Homo sapien
cacggtattgtcagtttgattcaaa

SEQ ID NO: 1969653 - DNA, 25 bp, Homo sapien
ctatctagagccggcccaaccctct

SEQ ID NO: 1969654 - DNA, 25 bp, Homo sapien
ctagagccggcccaaccctctgttc

SEQ ID NO: 1969655 - DNA, 25 bp, Homo sapien
atctagagccggcccaaccctctgt

SEQ ID NO: 1969656 - DNA, 25 bp, Homo sapien
tctagagccggcccaaccctctgtt

SEQ ID NO: 1969657 - DNA, 25 bp, Homo sapien
tgggccgggaaagaagcttgaaggc

SEQ ID NO: 1969658 - DNA, 25 bp, Homo sapien
ctgagggtgggccgggaaagaagct

SEQ ID NO: 1969659 - DNA, 25 bp, Homo sapien
tcctaactttcgagttcctggagag

SEQ ID NO: 1969660 - DNA, 25 bp, Homo sapien
tatgctaggcatttctacaacaaaa

SEQ ID NO: 1969661 - DNA, 25 bp, Homo sapien
taagatatcagagggttaccaattg

SEQ ID NO: 1969662 - DNA, 25 bp, Homo sapien
aatctgcatttatatggaatagcac

SEQ ID NO: 1969663 - DNA, 25 bp, Homo sapien
caagagctgcccagtacaagaaccc

SEQ ID NO: 1969664 - DNA, 25 bp, Homo sapien
agaaaggcaccagaattcccaggaa

SEQ ID NO: 1969665 - DNA, 25 bp, Homo sapien
agagctgcccagtacaagaacccat

SEQ ID NO: 1969666 - DNA, 25 bp, Homo sapien
gtatcagaaaggcaccagaattccc

SEQ ID NO: 1969667 - DNA, 25 bp, Homo sapien
cattggctctactagcagcttggaa

SEQ ID NO: 1969668 - DNA, 25 bp, Homo sapien
caaagtagtactgtgagttcagcag

SEQ ID NO: 1969669 - DNA, 25 bp, Homo sapien
gggtagcactttaagatttctgtcg

SEQ ID NO: 1969670 - DNA, 25 bp, Homo sapien
gaagtgaattggcactgggtagcac

SEQ ID NO: 1969671 - DNA, 25 bp, Homo sapien
tacaccggcaaaagtcaagttgacc

SEQ ID NO: 1969672 - DNA, 25 bp, Homo sapien
ttgcccctgagcaaacagtattgga

SEQ ID NO: 1969673 - DNA, 25 bp, Homo sapien
gttgaccacgatacctagacctatg

SEQ ID NO: 1969674 - DNA, 25 bp, Homo sapien
cagtattggagaagcatgatgcatc

SEQ ID NO: 1969675 - DNA, 25 bp, Homo sapien
ctacacataaaatgtctctgcctgg

SEQ ID NO: 1969676 - DNA, 25 bp, Homo sapien
atgtctctgcctggtggccccggac

SEQ ID NO: 1969677 - DNA, 25 bp, Homo sapien
aatgtctctgcctggtggccccgga

SEQ ID NO: 1969678 - DNA, 25 bp, Homo sapien
cataaaatgtctctgcctggtggcc

SEQ ID NO: 1969679 - DNA, 25 bp, Homo sapien
cacttggacacagtctattttggtt

SEQ ID NO: 1969680 - DNA, 25 bp, Homo sapien
ccacttggacacagtctattttggt

SEQ ID NO: 1969681 - DNA, 25 bp, Homo sapien
gccacttggacacagtctattttgg

SEQ ID NO: 1969682 - DNA, 25 bp, Homo sapien
cttggacacagtctattttggtttc

SEQ ID NO: 1969683 - DNA, 25 bp, Homo sapien
ctaaaagagtcatgtaagttcacaa

SEQ ID NO: 1969684 - DNA, 25 bp, Homo sapien
tattcaaactatgttcacctgagag

SEQ ID NO: 1969685 - DNA, 25 bp, Homo sapien
tatagaactacaagcctatgaggac

SEQ ID NO: 1969686 - DNA, 25 bp, Homo sapien
gttgagctaacactgactaaaagag

SEQ ID NO: 1969687 - DNA, 25 bp, Homo sapien
gaggatttccaggtcagcatgcatg

SEQ ID NO: 1969688 - DNA, 25 bp, Homo sapien
tatgacacagttgcaaggtttggct

SEQ ID NO: 1969689 - DNA, 25 bp, Homo sapien
gactgagcagtgtttccaattgaaa

SEQ ID NO: 1969690 - DNA, 25 bp, Homo sapien
gccagactgaagctaggctagcaag

SEQ ID NO: 1969691 - DNA, 25 bp, Homo sapien
tgttgtaagctgagtcacgattatc

SEQ ID NO: 1969692 - DNA, 25 bp, Homo sapien
tgttagttggccgtcgcctgcagcg

SEQ ID NO: 1969693 - DNA, 25 bp, Homo sapien
gtaagctgagtcacgattatcgcag

SEQ ID NO: 1969694 - DNA, 25 bp, Homo sapien
ggcgatgcgaatgtaaggtgttgta

SEQ ID NO: 1969695 - DNA, 25 bp, Homo sapien
gaaaatatcatcagtgggagactca

SEQ ID NO: 1969696 - DNA, 25 bp, Homo sapien
cacaggtcttcacatgtgacagaat

SEQ ID NO: 1969697 - DNA, 25 bp, Homo sapien
agaataataatgtccctctcttgct

SEQ ID NO: 1969698 - DNA, 25 bp, Homo sapien
ttatcccaaagacaggtaaatggaa

SEQ ID NO: 1969699 - DNA, 25 bp, Homo sapien
ggtctgtctgtttctcgggttctgg

SEQ ID NO: 1969700 - DNA, 25 bp, Homo sapien
gatgcccgcgatgactccagcaatt

SEQ ID NO: 1969701 - DNA, 25 bp, Homo sapien
tcattaccaacacaactccaagaaa

SEQ ID NO: 1969702 - DNA, 25 bp, Homo sapien
taatcacgaacagcaagatgcccgc

SEQ ID NO: 1969703 - DNA, 25 bp, Homo sapien
aacacaggccccataaaatctgtca

SEQ ID NO: 1969704 - DNA, 25 bp, Homo sapien
gatgttgtgctgatgaccttcccta

SEQ ID NO: 1969705 - DNA, 25 bp, Homo sapien
gcacggtgcctacatataacacagg

SEQ ID NO: 1969706 - DNA, 25 bp, Homo sapien
gctgctcccgcgctgcatttttctg

SEQ ID NO: 1969707 - DNA, 25 bp, Homo sapien
tgaccaacagcacatatttgaggtg

SEQ ID NO: 1969708 - DNA, 25 bp, Homo sapien
tatttgaggtggacgactcagaatg

SEQ ID NO: 1969709 - DNA, 25 bp, Homo sapien
tgaatttgtttcacccacactgtct

SEQ ID NO: 1969710 - DNA, 25 bp, Homo sapien
caacagcacatatttgaggtggacg

SEQ ID NO: 1969711 - DNA, 25 bp, Homo sapien
tatagagggccaattcttcagaaga

SEQ ID NO: 1969712 - DNA, 25 bp, Homo sapien
gatgatattagtccaggtaaaggcc

SEQ ID NO: 1969713 - DNA, 25 bp, Homo sapien
tagctaataattgacaatgcctccc

SEQ ID NO: 1969714 - DNA, 25 bp, Homo sapien
ggaacacataatttgtgggacggaa

SEQ ID NO: 1969715 - DNA, 25 bp, Homo sapien
tatttgcatttaatgccaatgccat

SEQ ID NO: 1969716 - DNA, 25 bp, Homo sapien
acagatacatgacaaggcctttatg

SEQ ID NO: 1969717 - DNA, 25 bp, Homo sapien
ggtggcagaccacttggcaccttgc

SEQ ID NO: 1969718 - DNA, 25 bp, Homo sapien
tatgcacaccgaagacagtgatgct

SEQ ID NO: 1969719 - DNA, 25 bp, Homo sapien
ccacagggccttcgacctcctgcaa

SEQ ID NO: 1969720 - DNA, 25 bp, Homo sapien
gccacagggccttcgacctcctgca

SEQ ID NO: 1969721 - DNA, 25 bp, Homo sapien
ctgagatggctggtgagaattcagc

SEQ ID NO: 1969722 - DNA, 25 bp, Homo sapien
cctgagatggctggtgagaattcag

SEQ ID NO: 1969723 - DNA, 25 bp, Homo sapien
ccctgagatggctggtgagaattca

SEQ ID NO: 1969724 - DNA, 25 bp, Homo sapien
ctttctcaatcaacacagtggcgcc

SEQ ID NO: 1969725 - DNA, 25 bp, Homo sapien
gcaatgtgatttccaacagtggagg

SEQ ID NO: 1969726 - DNA, 25 bp, Homo sapien
cacactctgtaaggataccaggcaa

SEQ ID NO: 1969727 - DNA, 25 bp, Homo sapien
agtggcgcctctgtatccttcttaa

SEQ ID NO: 1969728 - DNA, 25 bp, Homo sapien
tcgggagggacacagtaagcaaagc

SEQ ID NO: 1969729 - DNA, 25 bp, Homo sapien
taaacaccggaatgaacactgggcc

SEQ ID NO: 1969730 - DNA, 25 bp, Homo sapien
gaattctggtactcaggcaggtgct

SEQ ID NO: 1969731 - DNA, 25 bp, Homo sapien
tgcaggagagcgtactgtcggcact

SEQ ID NO: 1969732 - DNA, 25 bp, Homo sapien
ggtagcacgaccaggaaatgatccg

SEQ ID NO: 1969733 - DNA, 25 bp, Homo sapien
tatcacgaagtaggatgcaggccag

SEQ ID NO: 1969734 - DNA, 25 bp, Homo sapien
gagtcaacagcaatcccagtgcaga

SEQ ID NO: 1969735 - DNA, 25 bp, Homo sapien
cacatgcgggtgactggatatctat

SEQ ID NO: 1969736 - DNA, 25 bp, Homo sapien
gtttccactcaaccaggatggccag

SEQ ID NO: 1969737 - DNA, 25 bp, Homo sapien
tttcggtcttttgacctagtgatcc

SEQ ID NO: 1969738 - DNA, 25 bp, Homo sapien
atggtttcggtcttttgacctagtg

SEQ ID NO: 1969739 - DNA, 25 bp, Homo sapien
gggtttccactcaaccaggatggcc

SEQ ID NO: 1969740 - DNA, 25 bp, Homo sapien
taatgctggaatactgccggtgaca

SEQ ID NO: 1969741 - DNA, 25 bp, Homo sapien
ggaatactgccggtgacatgcttca

SEQ ID NO: 1969742 - DNA, 25 bp, Homo sapien
tgctggaatactgccggtgacatgc

SEQ ID NO: 1969743 - DNA, 25 bp, Homo sapien
tactgccggtgacatgcttcaaatg

SEQ ID NO: 1969744 - DNA, 25 bp, Homo sapien
aggagaaaccacacagtaggcaagg

SEQ ID NO: 1969745 - DNA, 25 bp, Homo sapien
gagaaaccacacagtaggcaaggca

SEQ ID NO: 1969746 - DNA, 25 bp, Homo sapien
acacagtaggcaaggcaccaaggca

SEQ ID NO: 1969747 - DNA, 25 bp, Homo sapien
aaaccacacagtaggcaaggcacca

SEQ ID NO: 1969748 - DNA, 25 bp, Homo sapien
cgtaaagcgcataggttggagtccg

SEQ ID NO: 1969749 - DNA, 25 bp, Homo sapien
taatgacgtaaagcgcataggttgg

SEQ ID NO: 1969750 - DNA, 25 bp, Homo sapien
aaagcgcataggttggagtccgcca

SEQ ID NO: 1969751 - DNA, 25 bp, Homo sapien
tcagtaatgacgtaaagcgcatagg

SEQ ID NO: 1969752 - DNA, 25 bp, Homo sapien
aacatatatggtcctcacatgggga

SEQ ID NO: 1969753 - DNA, 25 bp, Homo sapien
tcttcaaggtgacttcaattacaga

SEQ ID NO: 1969754 - DNA, 25 bp, Homo sapien
gaagggctctgtaataggttcctta

SEQ ID NO: 1969755 - DNA, 25 bp, Homo sapien
ggttccttacagatgtcacacataa

SEQ ID NO: 1969756 - DNA, 25 bp, Homo sapien
taaggaaactatctcctaggagcgt

SEQ ID NO: 1969757 - DNA, 25 bp, Homo sapien
cataaactatctaccatggcatgga

SEQ ID NO: 1969758 - DNA, 25 bp, Homo sapien
tgagtctaggcagaacttacatgca

SEQ ID NO: 1969759 - DNA, 25 bp, Homo sapien
tgggtgagcaaaaactcgtcttcat

SEQ ID NO: 1969760 - DNA, 25 bp, Homo sapien
tcagagagtgtactcggcaacaggg

SEQ ID NO: 1969761 - DNA, 25 bp, Homo sapien
tgaaggagcaaggactgtaactgac

SEQ ID NO: 1969762 - DNA, 25 bp, Homo sapien
aaaagagcccacctagctgtaccag

SEQ ID NO: 1969763 - DNA, 25 bp, Homo sapien
tgtaactgactataactgtgcggcc

SEQ ID NO: 1969764 - DNA, 25 bp, Homo sapien
tcagtctcaggatggatagctcgtc

SEQ ID NO: 1969765 - DNA, 25 bp, Homo sapien
gaaaatgctattaactccggcagaa

SEQ ID NO: 1969766 - DNA, 25 bp, Homo sapien
tacagttgcccaagacagaaggctt

SEQ ID NO: 1969767 - DNA, 25 bp, Homo sapien
tgccagcaccgatgaaggaaaagtg

SEQ ID NO: 1969768 - DNA, 25 bp, Homo sapien
caaaatgtccaacaaataacaaata

SEQ ID NO: 1969769 - DNA, 25 bp, Homo sapien
cctggaatgagcttctaatgactgg

SEQ ID NO: 1969770 - DNA, 25 bp, Homo sapien
tccaatgagagtgtgtcggcagtca

SEQ ID NO: 1969771 - DNA, 25 bp, Homo sapien
taatgactggtgaagtcctgcatgg

SEQ ID NO: 1969772 - DNA, 25 bp, Homo sapien
cccttcgaggctgggattcctggaa

SEQ ID NO: 1969773 - DNA, 25 bp, Homo sapien
actgaatgcagtggaaaggcctcac

SEQ ID NO: 1969774 - DNA, 25 bp, Homo sapien
taaatgttagtgttgtcgccgctgg

SEQ ID NO: 1969775 - DNA, 25 bp, Homo sapien
cagcgatgggatcatagagaggccc

SEQ ID NO: 1969776 - DNA, 25 bp, Homo sapien
gaaagccgtcggttcgtcattaaga

SEQ ID NO: 1969777 - DNA, 25 bp, Homo sapien
ctcttttcgctcaactccaaagcaa

SEQ ID NO: 1969778 - DNA, 25 bp, Homo sapien
tctcttttcgctcaactccaaagca

SEQ ID NO: 1969779 - DNA, 25 bp, Homo sapien
ttcatagtaacctctcttttcgctc

SEQ ID NO: 1969780 - DNA, 25 bp, Homo sapien
tagtaacctctcttttcgctcaact

SEQ ID NO: 1969781 - DNA, 25 bp, Homo sapien
ccatttcttggtgcatcttcacatt

SEQ ID NO: 1969782 - DNA, 25 bp, Homo sapien
catttcttggtgcatcttcacattt

SEQ ID NO: 1969783 - DNA, 25 bp, Homo sapien
tctgcttctactactacaatagcca

SEQ ID NO: 1969784 - DNA, 25 bp, Homo sapien
ttctctctgcttctactactacaat

SEQ ID NO: 1969785 - DNA, 25 bp, Homo sapien
cactagtcatactgagggtgtttac

SEQ ID NO: 1969786 - DNA, 25 bp, Homo sapien
tactgtgggatttagataactcgcc

SEQ ID NO: 1969787 - DNA, 25 bp, Homo sapien
ctgtgcactagtcatactgagggtg

SEQ ID NO: 1969788 - DNA, 25 bp, Homo sapien
gcctgcactaaaatgaactgtgtac

SEQ ID NO: 1969789 - DNA, 25 bp, Homo sapien
aatccatctttgtagttgctcaagc

SEQ ID NO: 1969790 - DNA, 25 bp, Homo sapien
gcaaaccctgttggtcctaccttga

SEQ ID NO: 1969791 - DNA, 25 bp, Homo sapien
tgctcaagctgaaaacctcagagac

SEQ ID NO: 1969792 - DNA, 25 bp, Homo sapien
tagggtctaccctaattgcctcatt

SEQ ID NO: 1969793 - DNA, 25 bp, Homo sapien
tgtctgtccaaatttccgttcatgc

SEQ ID NO: 1969794 - DNA, 25 bp, Homo sapien
ggccacacctgtattgccgcctctg

SEQ ID NO: 1969795 - DNA, 25 bp, Homo sapien
gttcatgctttaagacttttcctct

SEQ ID NO: 1969796 - DNA, 25 bp, Homo sapien
gggtggcactggcacacaacattct

SEQ ID NO: 1969797 - DNA, 25 bp, Homo sapien
tcatccagtgaccacagtgagactt

SEQ ID NO: 1969798 - DNA, 25 bp, Homo sapien
catccagtgaccacagtgagacttt

SEQ ID NO: 1969799 - DNA, 25 bp, Homo sapien
atccagtgaccacagtgagactttc

SEQ ID NO: 1969800 - DNA, 25 bp, Homo sapien
taaaagcgtaattaatattccactc

SEQ ID NO: 1969801 - DNA, 25 bp, Homo sapien
ctctcatagttaaaagcgtaattaa

SEQ ID NO: 1969802 - DNA, 25 bp, Homo sapien
tattccactctgtaacaaagattag

SEQ ID NO: 1969803 - DNA, 25 bp, Homo sapien
ctctgtaacaaagattagagatttg

SEQ ID NO: 1969804 - DNA, 25 bp, Homo sapien
taaaagaggttgcttcaggtgcatg

SEQ ID NO: 1969805 - DNA, 25 bp, Homo sapien
tgaaggcatccacctactaatctcg

SEQ ID NO: 1969806 - DNA, 25 bp, Homo sapien
caagtgatcccttggatgtgcagaa

SEQ ID NO: 1969807 - DNA, 25 bp, Homo sapien
cactgggcagaatggtctcctgaag

SEQ ID NO: 1969808 - DNA, 25 bp, Homo sapien
ttaggataaagaattcaattatgta

SEQ ID NO: 1969809 - DNA, 25 bp, Homo sapien
taggataaagaattcaattatgtag

SEQ ID NO: 1969810 - DNA, 25 bp, Homo sapien
cttaggataaagaattcaattatgt

SEQ ID NO: 1969811 - DNA, 25 bp, Homo sapien
tctctttccgcttcttggccagttt

SEQ ID NO: 1969812 - DNA, 25 bp, Homo sapien
gtctctttccgcttcttggccagtt

SEQ ID NO: 1969813 - DNA, 25 bp, Homo sapien
ctctttccgcttcttggccagtttc

SEQ ID NO: 1969814 - DNA, 25 bp, Homo sapien
ggtctctttccgcttcttggccagt

SEQ ID NO: 1969815 - DNA, 25 bp, Homo sapien
gtcatctcctgtcgggtgctgctca

SEQ ID NO: 1969816 - DNA, 25 bp, Homo sapien
ccattcagattgtgcgtgtccatga

SEQ ID NO: 1969817 - DNA, 25 bp, Homo sapien
cattgagttcaccatcacagtcatc

SEQ ID NO: 1969818 - DNA, 25 bp, Homo sapien
tccatgaatgagaaagcctcgtcgc

SEQ ID NO: 1969819 - DNA, 25 bp, Homo sapien
ttgttttcattgtgaaggacgatgg

SEQ ID NO: 1969820 - DNA, 25 bp, Homo sapien
taggcaccgatgtgctcagtgtatt

SEQ ID NO: 1969821 - DNA, 25 bp, Homo sapien
tcattgtgaaggacgatggtgaaga

SEQ ID NO: 1969822 - DNA, 25 bp, Homo sapien
ctgggtaataggaattaggcaccga

SEQ ID NO: 1969823 - DNA, 25 bp, Homo sapien
acagtaagcccctcaagcaccaggg

SEQ ID NO: 1969824 - DNA, 25 bp, Homo sapien
gattctgactgctgaggagagagca

SEQ ID NO: 1969825 - DNA, 25 bp, Homo sapien
gatagcagagagagggcggagtgat

SEQ ID NO: 1969826 - DNA, 25 bp, Homo sapien
cagtaagcccctcaagcaccaggga

SEQ ID NO: 1969827 - DNA, 25 bp, Homo sapien
atacaccgtaagcaggtcaatgcag

SEQ ID NO: 1969828 - DNA, 25 bp, Homo sapien
aatgattgatgaatgcccaccccta

SEQ ID NO: 1969829 - DNA, 25 bp, Homo sapien
ttgatgaatgcccacccctattttc

SEQ ID NO: 1969830 - DNA, 25 bp, Homo sapien
gtaagcaggtcaatgcagagaaagt

SEQ ID NO: 1969831 - DNA, 25 bp, Homo sapien
taaaattgcagttggcacaaatggg

SEQ ID NO: 1969832 - DNA, 25 bp, Homo sapien
ctaaaattgcagttggcacaaatgg

SEQ ID NO: 1969833 - DNA, 25 bp, Homo sapien
aaaattgcagttggcacaaatgggt

SEQ ID NO: 1969834 - DNA, 25 bp, Homo sapien
agcaaacccctcttattaatggcga

SEQ ID NO: 1969835 - DNA, 25 bp, Homo sapien
gaacctgttggtatcatccccaaga

SEQ ID NO: 1969836 - DNA, 25 bp, Homo sapien
cacatgtcgtgcttataatcactgc

SEQ ID NO: 1969837 - DNA, 25 bp, Homo sapien
aattactcctgcaataaactgtggt

SEQ ID NO: 1969838 - DNA, 25 bp, Homo sapien
ttcacttttatgactatcacactag

SEQ ID NO: 1969839 - DNA, 25 bp, Homo sapien
cttttatgactatcacactagacag

SEQ ID NO: 1969840 - DNA, 25 bp, Homo sapien
cacttttatgactatcacactagac

SEQ ID NO: 1969841 - DNA, 25 bp, Homo sapien
acagaattcagctcttggaaagtac

SEQ ID NO: 1969842 - DNA, 25 bp, Homo sapien
gcatggtatgaaaggtggtacacaa

SEQ ID NO: 1969843 - DNA, 25 bp, Homo sapien
ctatctgcatcgcaaagcacctggg

SEQ ID NO: 1969844 - DNA, 25 bp, Homo sapien
tggcacctggatcactacaacgtgg

SEQ ID NO: 1969845 - DNA, 25 bp, Homo sapien
tgaagaaaatttagtccaagggtgc

SEQ ID NO: 1969846 - DNA, 25 bp, Homo sapien
tctgatagggcacgtcggccggctc

SEQ ID NO: 1969847 - DNA, 25 bp, Homo sapien
ggccggctctcgcttcttgtaagta

SEQ ID NO: 1969848 - DNA, 25 bp, Homo sapien
tatcgctggccattgtgtgggtttc

SEQ ID NO: 1969849 - DNA, 25 bp, Homo sapien
taagtatgggactgcaccaggctgc

SEQ ID NO: 1969850 - DNA, 25 bp, Homo sapien
tggcatggaatccaagaaggaatgg

SEQ ID NO: 1969851 - DNA, 25 bp, Homo sapien
aaggaatgggaaagccctggcacag

SEQ ID NO: 1969852 - DNA, 25 bp, Homo sapien
ctggcatggaatccaagaaggaatg

SEQ ID NO: 1969853 - DNA, 25 bp, Homo sapien
gccctggcacagagcttgtgctcac

SEQ ID NO: 1969854 - DNA, 25 bp, Homo sapien
ggctttctgattgagttgggagcac

SEQ ID NO: 1969855 - DNA, 25 bp, Homo sapien
gggacagcggagaagcagttctcct

SEQ ID NO: 1969856 - DNA, 25 bp, Homo sapien
gacagcggagaagcagttctcctct

SEQ ID NO: 1969857 - DNA, 25 bp, Homo sapien
ggacagcggagaagcagttctcctc

SEQ ID NO: 1969858 - DNA, 25 bp, Homo sapien
aggggacagcggagaagcagttctc

SEQ ID NO: 1969859 - DNA, 25 bp, Homo sapien
aaataaaaaacctgcactgagctct

SEQ ID NO: 1969860 - DNA, 25 bp, Homo sapien
gaattggttgaaacctgttcagcag

SEQ ID NO: 1969861 - DNA, 25 bp, Homo sapien
cacatggtatgctcttgttcggaca

SEQ ID NO: 1969862 - DNA, 25 bp, Homo sapien
taggccaattttgagacactgctgt

SEQ ID NO: 1969863 - DNA, 25 bp, Homo sapien
agctgcagtcatggcaaatgtccct

SEQ ID NO: 1969864 - DNA, 25 bp, Homo sapien
tcgcacaggatcaccacaacgttgg

SEQ ID NO: 1969865 - DNA, 25 bp, Homo sapien
acgtggtatcaagccacttacaagg

SEQ ID NO: 1969866 - DNA, 25 bp, Homo sapien
caacgttggacctgacgtggtatca

SEQ ID NO: 1969867 - DNA, 25 bp, Homo sapien
gggtgcaacacacccttgtctaggg

SEQ ID NO: 1969868 - DNA, 25 bp, Homo sapien
ggaagtagccttcaactgacatcct

SEQ ID NO: 1969869 - DNA, 25 bp, Homo sapien
tttctgcttggatccccaaagggac

SEQ ID NO: 1969870 - DNA, 25 bp, Homo sapien
taatcgagccatcaacaaggtcctt

SEQ ID NO: 1969871 - DNA, 25 bp, Homo sapien
tacgtttcagctctagtaattggaa

SEQ ID NO: 1969872 - DNA, 25 bp, Homo sapien
gacacacataaggtccgcagatgct

SEQ ID NO: 1969873 - DNA, 25 bp, Homo sapien
gcacgttcactatcctttctgggcc

SEQ ID NO: 1969874 - DNA, 25 bp, Homo sapien
ggaggaccagtaccagacacacata

SEQ ID NO: 1969875 - DNA, 25 bp, Homo sapien
cacttgtggctaatggcatctgaca

SEQ ID NO: 1969876 - DNA, 25 bp, Homo sapien
ggagtttcatacagaagtcatgtgc

SEQ ID NO: 1969877 - DNA, 25 bp, Homo sapien
ggcgagttacttaaattctgactca

SEQ ID NO: 1969878 - DNA, 25 bp, Homo sapien
tctggaaaatgggtttgatagtaat

SEQ ID NO: 1969879 - DNA, 25 bp, Homo sapien
cagcctgcctgcaactctagacagg

SEQ ID NO: 1969880 - DNA, 25 bp, Homo sapien
gagtgagattaatggacagcatctg

SEQ ID NO: 1969881 - DNA, 25 bp, Homo sapien
ctgagaccctgagtgagattaatgg

SEQ ID NO: 1969882 - DNA, 25 bp, Homo sapien
gagaccctgagtgagattaatggac

SEQ ID NO: 1969883 - DNA, 25 bp, Homo sapien
tgagtgagattaatggacagcatct

SEQ ID NO: 1969884 - DNA, 25 bp, Homo sapien
tctctaaggagaccgtactactgct

SEQ ID NO: 1969885 - DNA, 25 bp, Homo sapien
tacgcccatgaaactggaaatccag

SEQ ID NO: 1969886 - DNA, 25 bp, Homo sapien
tccaacagccagttagtgtcgccca

SEQ ID NO: 1969887 - DNA, 25 bp, Homo sapien
ggcacatcgggatagaaaccacctc

SEQ ID NO: 1969888 - DNA, 25 bp, Homo sapien
tgagacagggatgctttgattttta

SEQ ID NO: 1969889 - DNA, 25 bp, Homo sapien
cacctggtcccgttgaaacctacat

SEQ ID NO: 1969890 - DNA, 25 bp, Homo sapien
taacgatttcaaaatctagcactaa

SEQ ID NO: 1969891 - DNA, 25 bp, Homo sapien
taaatcaaatggacagaactgagac

SEQ ID NO: 1969892 - DNA, 25 bp, Homo sapien
aattagaccgtgttgcctgaagagg

SEQ ID NO: 1969893 - DNA, 25 bp, Homo sapien
tattgagcacttgcaacgaggctgg

SEQ ID NO: 1969894 - DNA, 25 bp, Homo sapien
taagggcagttctacgttggcagaa

SEQ ID NO: 1969895 - DNA, 25 bp, Homo sapien
tgatatgatggctgttagggctacc

SEQ ID NO: 1969896 - DNA, 25 bp, Homo sapien
aagctggtgtaaccattataactca

SEQ ID NO: 1969897 - DNA, 25 bp, Homo sapien
ggtgtaaccattataactcagctca

SEQ ID NO: 1969898 - DNA, 25 bp, Homo sapien
tttgcaaagctggtgtaaccattat

SEQ ID NO: 1969899 - DNA, 25 bp, Homo sapien
cattataactcagctcaaatctatc

SEQ ID NO: 1969900 - DNA, 25 bp, Homo sapien
taactgcggagtgttcacggctgct

SEQ ID NO: 1969901 - DNA, 25 bp, Homo sapien
cagctcccgctaatgaagtgacaca

SEQ ID NO: 1969902 - DNA, 25 bp, Homo sapien
gaagcactgtggtagtcagctcccg

SEQ ID NO: 1969903 - DNA, 25 bp, Homo sapien
cggctgctgaacattccttggacaa

SEQ ID NO: 1969904 - DNA, 25 bp, Homo sapien
caggcaagctccagtgaataccaat

SEQ ID NO: 1969905 - DNA, 25 bp, Homo sapien
gatgctgtactctccatgggcacag

SEQ ID NO: 1969906 - DNA, 25 bp, Homo sapien
gcaagctccagtgaataccaatgac

SEQ ID NO: 1969907 - DNA, 25 bp, Homo sapien
gaaggaaattgaacatcctgcatac

SEQ ID NO: 1969908 - DNA, 25 bp, Homo sapien
tctttcttagccgagtcccatggtg

SEQ ID NO: 1969909 - DNA, 25 bp, Homo sapien
tcatctttcttagccgagtcccatg

SEQ ID NO: 1969910 - DNA, 25 bp, Homo sapien
gttctcatctttcttagccgagtcc

SEQ ID NO: 1969911 - DNA, 25 bp, Homo sapien
ttcttagccgagtcccatggtgcag

SEQ ID NO: 1969912 - DNA, 25 bp, Homo sapien
taagaaatgagacacgaggagcgag

SEQ ID NO: 1969913 - DNA, 25 bp, Homo sapien
ttaattatgttaggcgactacagcg

SEQ ID NO: 1969914 - DNA, 25 bp, Homo sapien
ggtttcatcaatctagcgcgtgtct

SEQ ID NO: 1969915 - DNA, 25 bp, Homo sapien
tctgggacagcatagacacgaaaca

SEQ ID NO: 1969916 - DNA, 25 bp, Homo sapien
gtacggccatattccaagtacacag

SEQ ID NO: 1969917 - DNA, 25 bp, Homo sapien
cagtcgtacggccatattccaagta

SEQ ID NO: 1969918 - DNA, 25 bp, Homo sapien
ttctcagtcgtacggccatattcca

SEQ ID NO: 1969919 - DNA, 25 bp, Homo sapien
cagtttctcagtcgtacggccatat

SEQ ID NO: 1969920 - DNA, 25 bp, Homo sapien
gagaaggctcatgactcacccaagg

SEQ ID NO: 1969921 - DNA, 25 bp, Homo sapien
acagaagtaatgaagaagtgagatt

SEQ ID NO: 1969922 - DNA, 25 bp, Homo sapien
cacaacacgtgatcttgtcaggaaa

SEQ ID NO: 1969923 - DNA, 25 bp, Homo sapien
ttttttcaggtaacaacgatcaatg

SEQ ID NO: 1969924 - DNA, 25 bp, Homo sapien
ttccacccggttcccagctctgcca

SEQ ID NO: 1969925 - DNA, 25 bp, Homo sapien
gatgatggtggctccatatgaattt

SEQ ID NO: 1969926 - DNA, 25 bp, Homo sapien
caggaagtttgagttcgatgatggt

SEQ ID NO: 1969927 - DNA, 25 bp, Homo sapien
agtgcagtctccctgcttgtttcca

SEQ ID NO: 1969928 - DNA, 25 bp, Homo sapien
aagtgaaatgattggctcttccagc

SEQ ID NO: 1969929 - DNA, 25 bp, Homo sapien
gaaactgcagattcttacgcgtcct

SEQ ID NO: 1969930 - DNA, 25 bp, Homo sapien
taagaatgacttggcacagaaactg

SEQ ID NO: 1969931 - DNA, 25 bp, Homo sapien
gctctgctgcttggacgtctaagaa

SEQ ID NO: 1969932 - DNA, 25 bp, Homo sapien
gagatagtgtgtattcaggccagga

SEQ ID NO: 1969933 - DNA, 25 bp, Homo sapien
tctgaagagctagcaaacaattccc

SEQ ID NO: 1969934 - DNA, 25 bp, Homo sapien
gatgcccgctattgttgaggacgaa

SEQ ID NO: 1969935 - DNA, 25 bp, Homo sapien
tgggtcctgacctactctgaagagc

SEQ ID NO: 1969936 - DNA, 25 bp, Homo sapien
attagaaccttgcaatctaagcagg

SEQ ID NO: 1969937 - DNA, 25 bp, Homo sapien
ctgtctcgaagatctgttgtacccc

SEQ ID NO: 1969938 - DNA, 25 bp, Homo sapien
aagcaggcctgtctcgaagatctgt

SEQ ID NO: 1969939 - DNA, 25 bp, Homo sapien
tttcaaaaggcaggcaaccgaccga

SEQ ID NO: 1969940 - DNA, 25 bp, Homo sapien
ctgggctttcgtcagctcctctgaa

SEQ ID NO: 1969941 - DNA, 25 bp, Homo sapien
actgggctttcgtcagctcctctga

SEQ ID NO: 1969942 - DNA, 25 bp, Homo sapien
tgcagcctcactcgggaatgatcgt

SEQ ID NO: 1969943 - DNA, 25 bp, Homo sapien
gtttgtgtctccttctattgtctgc

SEQ ID NO: 1969944 - DNA, 25 bp, Homo sapien
cgatataattgccattgatatagtc

SEQ ID NO: 1969945 - DNA, 25 bp, Homo sapien
ttgatatagtctgagtttgtgtctc

SEQ ID NO: 1969946 - DNA, 25 bp, Homo sapien
tgggtagcaatgtaatgattgggtc

SEQ ID NO: 1969947 - DNA, 25 bp, Homo sapien
ggtagcaatgtaatgattgggtcga

SEQ ID NO: 1969948 - DNA, 25 bp, Homo sapien
agcaatgtaatgattgggtcgatga

SEQ ID NO: 1969949 - DNA, 25 bp, Homo sapien
cttgggtagcaatgtaatgattggg

SEQ ID NO: 1969950 - DNA, 25 bp, Homo sapien
gccgatggctagaaccgcaataaat

SEQ ID NO: 1969951 - DNA, 25 bp, Homo sapien
ctgccgatggctagaaccgcaataa

SEQ ID NO: 1969952 - DNA, 25 bp, Homo sapien
ggctagaaccgcaataaatgtgcaa

SEQ ID NO: 1969953 - DNA, 25 bp, Homo sapien
cgatggctagaaccgcaataaatgt

SEQ ID NO: 1969954 - DNA, 25 bp, Homo sapien
ttacatgaccagaatgtctgatggg

SEQ ID NO: 1969955 - DNA, 25 bp, Homo sapien
tacatgaccagaatgtctgatggga

SEQ ID NO: 1969956 - DNA, 25 bp, Homo sapien
tgaccagaatgtctgatgggaaggc

SEQ ID NO: 1969957 - DNA, 25 bp, Homo sapien
catgaccagaatgtctgatgggaag

SEQ ID NO: 1969958 - DNA, 25 bp, Homo sapien
tgatgttagtactgccagtttgaga

SEQ ID NO: 1969959 - DNA, 25 bp, Homo sapien
ttagtactgccagtttgagaagtcc

SEQ ID NO: 1969960 - DNA, 25 bp, Homo sapien
agcagtgatgttagtactgccagtt

SEQ ID NO: 1969961 - DNA, 25 bp, Homo sapien
tgttagtactgccagtttgagaagt

SEQ ID NO: 1969962 - DNA, 25 bp, Homo sapien
aagcatcctgctggcggaggtacag

SEQ ID NO: 1969963 - DNA, 25 bp, Homo sapien
tctccaaagagaacgctcagaaact

SEQ ID NO: 1969964 - DNA, 25 bp, Homo sapien
cattcatcagtgtcggtctccaaag

SEQ ID NO: 1969965 - DNA, 25 bp, Homo sapien
gagctaaaaagaggcgcaggagaaa

SEQ ID NO: 1969966 - DNA, 25 bp, Homo sapien
tgtcatctgactttaagtgtgcacc

SEQ ID NO: 1969967 - DNA, 25 bp, Homo sapien
tcaaggctgctcaatttcagcaaga

SEQ ID NO: 1969968 - DNA, 25 bp, Homo sapien
tggagctggcgctgctatcaaggct

SEQ ID NO: 1969969 - DNA, 25 bp, Homo sapien
catctgactttaagtgtgcaccagg

SEQ ID NO: 1969970 - DNA, 25 bp, Homo sapien
cgctgtatccacgattagccttttc

SEQ ID NO: 1969971 - DNA, 25 bp, Homo sapien
aggcatacactttccgctgtatcca

SEQ ID NO: 1969972 - DNA, 25 bp, Homo sapien
attgccttgcaggtgtgtactcttc

SEQ ID NO: 1969973 - DNA, 25 bp, Homo sapien
tggttggcgggtacttgctgtttgc

SEQ ID NO: 1969974 - DNA, 25 bp, Homo sapien
gaccacgaccatcatgagccaacat

SEQ ID NO: 1969975 - DNA, 25 bp, Homo sapien
acagggaggctcctcttagcaccca

SEQ ID NO: 1969976 - DNA, 25 bp, Homo sapien
tgagtgaccacgaccatcatgagcc

SEQ ID NO: 1969977 - DNA, 25 bp, Homo sapien
ccaaagatgtgagcctggtacacag

SEQ ID NO: 1969978 - DNA, 25 bp, Homo sapien
tcaccaagagctactccatttggat

SEQ ID NO: 1969979 - DNA, 25 bp, Homo sapien
ctgtcaccaagagctactccatttg

SEQ ID NO: 1969980 - DNA, 25 bp, Homo sapien
gtcaccaagagctactccatttgga

SEQ ID NO: 1969981 - DNA, 25 bp, Homo sapien
tgtcaccaagagctactccatttgg

SEQ ID NO: 1969982 - DNA, 25 bp, Homo sapien
ctttggggaagggaccatgcactct

SEQ ID NO: 1969983 - DNA, 25 bp, Homo sapien
tccctcttgaccaattagcaatcgg

SEQ ID NO: 1969984 - DNA, 25 bp, Homo sapien
tagcaatcggttcttgtgtaatgtt

SEQ ID NO: 1969985 - DNA, 25 bp, Homo sapien
gactacactgttaccctccccataa

SEQ ID NO: 1969986 - DNA, 25 bp, Homo sapien
cctggacactgaataatagtgacac

SEQ ID NO: 1969987 - DNA, 25 bp, Homo sapien
gcctggacactgaataatagtgaca

SEQ ID NO: 1969988 - DNA, 25 bp, Homo sapien
agcctggacactgaataatagtgac

SEQ ID NO: 1969989 - DNA, 25 bp, Homo sapien
cagcctggacactgaataatagtga

SEQ ID NO: 1969990 - DNA, 25 bp, Homo sapien
ctgcagcaaaacacaacagaaactt

SEQ ID NO: 1969991 - DNA, 25 bp, Homo sapien
gcagcaaaacacaacagaaactttt

SEQ ID NO: 1969992 - DNA, 25 bp, Homo sapien
agcaaaacacaacagaaactttttg

SEQ ID NO: 1969993 - DNA, 25 bp, Homo sapien
tgcagcaaaacacaacagaaacttt

SEQ ID NO: 1969994 - DNA, 25 bp, Homo sapien
tacttgcagtgttttcgtgccacac

SEQ ID NO: 1969995 - DNA, 25 bp, Homo sapien
gcagtgttttcgtgccacaccatcc

SEQ ID NO: 1969996 - DNA, 25 bp, Homo sapien
ccatgatgatacttgcagtgttttc

SEQ ID NO: 1969997 - DNA, 25 bp, Homo sapien
ttggtcaccatgatgatacttgcag

SEQ ID NO: 1969998 - DNA, 25 bp, Homo sapien
cacaaacggtgtaaatgggaatgcc

SEQ ID NO: 1969999 - DNA, 25 bp, Homo sapien
gacaggtcctgtcagatgtaccggg

SEQ ID NO: 1970000 - DNA, 25 bp, Homo sapien
caggtgctgcgacaggaaaggtctc

SEQ ID NO: 1970001 - DNA, 25 bp, Homo sapien
ggctccttgggtggaaaatatccaa

SEQ ID NO: 1970002 - DNA, 25 bp, Homo sapien
gccgaaatgggctcaagatctacag

SEQ ID NO: 1970003 - DNA, 25 bp, Homo sapien
cataggaacttagaggatttgcccc

SEQ ID NO: 1970004 - DNA, 25 bp, Homo sapien
catcaaaaggtcagctatgggacac

SEQ ID NO: 1970005 - DNA, 25 bp, Homo sapien
ttgtctaaaagaccaccaggatggc

SEQ ID NO: 1970006 - DNA, 25 bp, Homo sapien
gaccaattgcttctactgggcctac

SEQ ID NO: 1970007 - DNA, 25 bp, Homo sapien
tagggaaaggttcttgaccaattgc

SEQ ID NO: 1970008 - DNA, 25 bp, Homo sapien
ggccgtccctgtggccagatttagg

SEQ ID NO: 1970009 - DNA, 25 bp, Homo sapien
gagaggccgtccctgtggccagatt

SEQ ID NO: 1970010 - DNA, 25 bp, Homo sapien
gatctgggtctctttgttctcgccc

SEQ ID NO: 1970011 - DNA, 25 bp, Homo sapien
tgttgcagtggttatcactttgcat

SEQ ID NO: 1970012 - DNA, 25 bp, Homo sapien
ctccagtgttctgttgtgagtcctc

SEQ ID NO: 1970013 - DNA, 25 bp, Homo sapien
tcccaagaactctgttctgttgcag

SEQ ID NO: 1970014 - DNA, 25 bp, Homo sapien
tcgctatccccttcctgttgaaatg

SEQ ID NO: 1970015 - DNA, 25 bp, Homo sapien
ctatccccttcctgttgaaatgctg

SEQ ID NO: 1970016 - DNA, 25 bp, Homo sapien
gctatccccttcctgttgaaatgct

SEQ ID NO: 1970017 - DNA, 25 bp, Homo sapien
ggtcgctatccccttcctgttgaaa

SEQ ID NO: 1970018 - DNA, 25 bp, Homo sapien
gtcctgggattccacctacctgcat

SEQ ID NO: 1970019 - DNA, 25 bp, Homo sapien
gctattggctgtcctgggattccac

SEQ ID NO: 1970020 - DNA, 25 bp, Homo sapien
gctgtcctgggattccacctacctg

SEQ ID NO: 1970021 - DNA, 25 bp, Homo sapien
ggaggatttgggctattggctgtcc

SEQ ID NO: 1970022 - DNA, 25 bp, Homo sapien
ttcacggcagaggtgtgtccagacc

SEQ ID NO: 1970023 - DNA, 25 bp, Homo sapien
tttttgcatagatttcacggcagag

SEQ ID NO: 1970024 - DNA, 25 bp, Homo sapien
caccttctcactgctagaaacctgg

SEQ ID NO: 1970025 - DNA, 25 bp, Homo sapien
tatcttcttgtcgggtatgaagggt

SEQ ID NO: 1970026 - DNA, 25 bp, Homo sapien
tgtaattcaggcatagggaagcaac

SEQ ID NO: 1970027 - DNA, 25 bp, Homo sapien
cgttccttgtcctgagctctacaaa

SEQ ID NO: 1970028 - DNA, 25 bp, Homo sapien
cacgttccttgtcctgagctctaca

SEQ ID NO: 1970029 - DNA, 25 bp, Homo sapien
tgcacgttccttgtcctgagctcta

SEQ ID NO: 1970030 - DNA, 25 bp, Homo sapien
ccaaatgcacgttccttgtcctgag

SEQ ID NO: 1970031 - DNA, 25 bp, Homo sapien
cagttcatctctttgaggaaataaa

SEQ ID NO: 1970032 - DNA, 25 bp, Homo sapien
ctgtcccagttcatctctttgagga

SEQ ID NO: 1970033 - DNA, 25 bp, Homo sapien
tcatctctttgaggaaataaagggc

SEQ ID NO: 1970034 - DNA, 25 bp, Homo sapien
gttcatctctttgaggaaataaagg

SEQ ID NO: 1970035 - DNA, 25 bp, Homo sapien
cactgggtctcctgtgtctcccaag

SEQ ID NO: 1970036 - DNA, 25 bp, Homo sapien
cacactgcttgagaagagggcagca

SEQ ID NO: 1970037 - DNA, 25 bp, Homo sapien
cacatatcagggttcctagagctgg

SEQ ID NO: 1970038 - DNA, 25 bp, Homo sapien
tagtcaagacctgggaaagttcttg

SEQ ID NO: 1970039 - DNA, 25 bp, Homo sapien
tgtgtgagtaggtcggatatggcag

SEQ ID NO: 1970040 - DNA, 25 bp, Homo sapien
gttcctttgtgtaggtgtatgtaat

SEQ ID NO: 1970041 - DNA, 25 bp, Homo sapien
taattgcgacaagggatgtgtgagt

SEQ ID NO: 1970042 - DNA, 25 bp, Homo sapien
ggctgctaagtgcaaggtgcgaact

SEQ ID NO: 1970043 - DNA, 25 bp, Homo sapien
gacagccctgaaagcgcatgacaag

SEQ ID NO: 1970044 - DNA, 25 bp, Homo sapien
ctgaaagcgcatgacaagcagagcc

SEQ ID NO: 1970045 - DNA, 25 bp, Homo sapien
acagccctgaaagcgcatgacaagc

SEQ ID NO: 1970046 - DNA, 25 bp, Homo sapien
gccctgaaagcgcatgacaagcaga

SEQ ID NO: 1970047 - DNA, 25 bp, Homo sapien
tctagaatgcgtgctgggcaaggcc

SEQ ID NO: 1970048 - DNA, 25 bp, Homo sapien
ccagcgaagcgagggaacaatgaaa

SEQ ID NO: 1970049 - DNA, 25 bp, Homo sapien
gagctctggttccatccgaaatccg

SEQ ID NO: 1970050 - DNA, 25 bp, Homo sapien
gaaaacaccgtctgctctcaactgc

SEQ ID NO: 1970051 - DNA, 25 bp, Homo sapien
tgagggaaatcaaatgccccttgca

SEQ ID NO: 1970052 - DNA, 25 bp, Homo sapien
tgggattattgggagatgcgctccc

SEQ ID NO: 1970053 - DNA, 25 bp, Homo sapien
ccttgcatgcactgaaagctcggtt

SEQ ID NO: 1970054 - DNA, 25 bp, Homo sapien
tgaaagctcggtttctttgggatta

SEQ ID NO: 1970055 - DNA, 25 bp, Homo sapien
tttagttggcaagacgtaaaccaga

SEQ ID NO: 1970056 - DNA, 25 bp, Homo sapien
aaccagatatgctaggagttgcaga

SEQ ID NO: 1970057 - DNA, 25 bp, Homo sapien
tatcccagagtaagagagacctaca

SEQ ID NO: 1970058 - DNA, 25 bp, Homo sapien
taaagcaggagacaatgatggtccc

SEQ ID NO: 1970059 - DNA, 25 bp, Homo sapien
gaccctggtatgatgcccttcttgc

SEQ ID NO: 1970060 - DNA, 25 bp, Homo sapien
tttaaagtacatctcacacgctgca

SEQ ID NO: 1970061 - DNA, 25 bp, Homo sapien
tgatgaaacatgcttgttctgaccc

SEQ ID NO: 1970062 - DNA, 25 bp, Homo sapien
aagactcctccatagatgtgagctc

SEQ ID NO: 1970063 - DNA, 25 bp, Homo sapien
ccatgatccaaactcctactcgcac

SEQ ID NO: 1970064 - DNA, 25 bp, Homo sapien
cccatgatccaaactcctactcgca

SEQ ID NO: 1970065 - DNA, 25 bp, Homo sapien
tggcgtgatcgcagcccactataat

SEQ ID NO: 1970066 - DNA, 25 bp, Homo sapien
gcctccccaggattcctggcatttt

SEQ ID NO: 1970067 - DNA, 25 bp, Homo sapien
tattctgtaactctagccctgtttc

SEQ ID NO: 1970068 - DNA, 25 bp, Homo sapien
tccctgcccctccatggatgaattt

SEQ ID NO: 1970069 - DNA, 25 bp, Homo sapien
catattctgccagtagttctgtttc

SEQ ID NO: 1970070 - DNA, 25 bp, Homo sapien
cagtagttctgtttctattagggta

SEQ ID NO: 1970071 - DNA, 25 bp, Homo sapien
tgccagtagttctgtttctattagg

SEQ ID NO: 1970072 - DNA, 25 bp, Homo sapien
atcacatattctgccagtagttctg

SEQ ID NO: 1970073 - DNA, 25 bp, Homo sapien
ctagtgtctgaccatagcttttaaa

SEQ ID NO: 1970074 - DNA, 25 bp, Homo sapien
agtgtctgaccatagcttttaaaag

SEQ ID NO: 1970075 - DNA, 25 bp, Homo sapien
gtgtctgaccatagcttttaaaagc

SEQ ID NO: 1970076 - DNA, 25 bp, Homo sapien
cactagtgtctgaccatagctttta

SEQ ID NO: 1970077 - DNA, 25 bp, Homo sapien
tcatgcaagagtgtcccatgtctga

SEQ ID NO: 1970078 - DNA, 25 bp, Homo sapien
tgaatgaatgcgctggttcatgcaa

SEQ ID NO: 1970079 - DNA, 25 bp, Homo sapien
catccatgcacatgggatgaggcag

SEQ ID NO: 1970080 - DNA, 25 bp, Homo sapien
cagaaccaaagcagaacattcaccg

SEQ ID NO: 1970081 - DNA, 25 bp, Homo sapien
tgcagtttgcttcacctccggcccc

SEQ ID NO: 1970082 - DNA, 25 bp, Homo sapien
acttctctggatggactgcagtttg

SEQ ID NO: 1970083 - DNA, 25 bp, Homo sapien
ctgtgacacttctctggatggactg

SEQ ID NO: 1970084 - DNA, 25 bp, Homo sapien
cagtttgcttcacctccggcccctc

SEQ ID NO: 1970085 - DNA, 25 bp, Homo sapien
tccccaggtagcaagtctagggcca

SEQ ID NO: 1970086 - DNA, 25 bp, Homo sapien
ccaggtagcaagtctagggccagga

SEQ ID NO: 1970087 - DNA, 25 bp, Homo sapien
acagtccccaggtagcaagtctagg

SEQ ID NO: 1970088 - DNA, 25 bp, Homo sapien
cagtccccaggtagcaagtctaggg

SEQ ID NO: 1970089 - DNA, 25 bp, Homo sapien
ctgcagtagttggttagccagaaca

SEQ ID NO: 1970090 - DNA, 25 bp, Homo sapien
acaaaccacaaataagcagggatag

SEQ ID NO: 1970091 - DNA, 25 bp, Homo sapien
cagtagttggttagccagaacaagg

SEQ ID NO: 1970092 - DNA, 25 bp, Homo sapien
aacaaaccacaaataagcagggata

SEQ ID NO: 1970093 - DNA, 25 bp, Homo sapien
tcttggacttgacttgccgcacgaa

SEQ ID NO: 1970094 - DNA, 25 bp, Homo sapien
ccatgatccggccagccagtgaagt

SEQ ID NO: 1970095 - DNA, 25 bp, Homo sapien
gaagtgaaactgtctgatctctcgg

SEQ ID NO: 1970096 - DNA, 25 bp, Homo sapien
cgcacgaatcccagcaggccggtgg

SEQ ID NO: 1970097 - DNA, 25 bp, Homo sapien
gctccctgacgcagttgtagatgtc

SEQ ID NO: 1970098 - DNA, 25 bp, Homo sapien
tatcaatgacgatgaaacagccagt

SEQ ID NO: 1970099 - DNA, 25 bp, Homo sapien
tttcggccatgtccaacatgatatc

SEQ ID NO: 1970100 - DNA, 25 bp, Homo sapien
tgtagatgtctacgaccccttccct

SEQ ID NO: 1970101 - DNA, 25 bp, Homo sapien
gaacaaagtgcacagagataaccct

SEQ ID NO: 1970102 - DNA, 25 bp, Homo sapien
gaaacacggtccaagggctcaagtg

SEQ ID NO: 1970103 - DNA, 25 bp, Homo sapien
tatacagtacttcacaaaatgggca

SEQ ID NO: 1970104 - DNA, 25 bp, Homo sapien
ttttccaggtggtcggtgtgacgcc

SEQ ID NO: 1970105 - DNA, 25 bp, Homo sapien
caggcttccaggatcgcatcgtgga

SEQ ID NO: 1970106 - DNA, 25 bp, Homo sapien
ggatccagtttgttcatgtcataat

SEQ ID NO: 1970107 - DNA, 25 bp, Homo sapien
aggcacagaggtgtccccacaaaga

SEQ ID NO: 1970108 - DNA, 25 bp, Homo sapien
tcataatacagagacctaacttggg

SEQ ID NO: 1970109 - DNA, 25 bp, Homo sapien
tggctgactgcaagacggtcccttc

SEQ ID NO: 1970110 - DNA, 25 bp, Homo sapien
tctcacgtgcagttttcgaaagatg

SEQ ID NO: 1970111 - DNA, 25 bp, Homo sapien
gaggcagaggcgtaagggccactgt

SEQ ID NO: 1970112 - DNA, 25 bp, Homo sapien
tggatttcgtccactgacagtgccc

SEQ ID NO: 1970113 - DNA, 25 bp, Homo sapien
ctgcagtcctctactcgcagcgttg

SEQ ID NO: 1970114 - DNA, 25 bp, Homo sapien
gtccatgcaccggtttttctcatgg

SEQ ID NO: 1970115 - DNA, 25 bp, Homo sapien
tactcgcagcgttggtgtcaccatg

SEQ ID NO: 1970116 - DNA, 25 bp, Homo sapien
tcctctactcgcagcgttggtgtca

SEQ ID NO: 1970117 - DNA, 25 bp, Homo sapien
atgctccaaatatactcaggaaaat

SEQ ID NO: 1970118 - DNA, 25 bp, Homo sapien
ggaagagaagaagctaggttatttc

SEQ ID NO: 1970119 - DNA, 25 bp, Homo sapien
aagaatgctccaaatatactcagga

SEQ ID NO: 1970120 - DNA, 25 bp, Homo sapien
acaaacaagaatgctccaaatatac

SEQ ID NO: 1970121 - DNA, 25 bp, Homo sapien
gatgtgcagtgataatccaggacca

SEQ ID NO: 1970122 - DNA, 25 bp, Homo sapien
tccacatcatttagcataactacgg

SEQ ID NO: 1970123 - DNA, 25 bp, Homo sapien
gtctccaaaagtctttcactgtgtt

SEQ ID NO: 1970124 - DNA, 25 bp, Homo sapien
caaaggatgctgggtgactataaaa

SEQ ID NO: 1970125 - DNA, 25 bp, Homo sapien
tctgggctgggtcaaacgctatctt

SEQ ID NO: 1970126 - DNA, 25 bp, Homo sapien
tctgactgtaagaagtccgggtctc

SEQ ID NO: 1970127 - DNA, 25 bp, Homo sapien
cttgagatctggcactagggcctgc

SEQ ID NO: 1970128 - DNA, 25 bp, Homo sapien
tgcatgacgatctctacctgtaggc

SEQ ID NO: 1970129 - DNA, 25 bp, Homo sapien
gttcgctaaaagactgaatcccagg

SEQ ID NO: 1970130 - DNA, 25 bp, Homo sapien
gctctgcccaagtaaaccatgtaga

SEQ ID NO: 1970131 - DNA, 25 bp, Homo sapien
taaatggtgcataacacgtccgtga

SEQ ID NO: 1970132 - DNA, 25 bp, Homo sapien
tagttttcagttagcagtgggccaa

SEQ ID NO: 1970133 - DNA, 25 bp, Homo sapien
tatctttctgatttagctgagggac

SEQ ID NO: 1970134 - DNA, 25 bp, Homo sapien
ggacaggtggcctatggaaaggcaa

SEQ ID NO: 1970135 - DNA, 25 bp, Homo sapien
gagcagaggaagacaatcacctaat

SEQ ID NO: 1970136 - DNA, 25 bp, Homo sapien
ttttatgcagaatgatgtgtcagga

SEQ ID NO: 1970137 - DNA, 25 bp, Homo sapien
cagcagagacaaattccacctggat

SEQ ID NO: 1970138 - DNA, 25 bp, Homo sapien
gaatatcctgctgatgatgtcctct

SEQ ID NO: 1970139 - DNA, 25 bp, Homo sapien
tctggcggcattgtaaatgcggaat

SEQ ID NO: 1970140 - DNA, 25 bp, Homo sapien
ggccgtgtctgtgtactccgttttc

SEQ ID NO: 1970141 - DNA, 25 bp, Homo sapien
aaggagcgcttagacactggtgtgt

SEQ ID NO: 1970142 - DNA, 25 bp, Homo sapien
tgtccacctggcgaatgagcttcaa

SEQ ID NO: 1970143 - DNA, 25 bp, Homo sapien
tggtgtgtccctgtacatcggccag

SEQ ID NO: 1970144 - DNA, 25 bp, Homo sapien
gaattgctgcaccatccgatatcca

SEQ ID NO: 1970145 - DNA, 25 bp, Homo sapien
tacactgcatcttgcaaacacctgt

SEQ ID NO: 1970146 - DNA, 25 bp, Homo sapien
ctgtcgtgaaaaagatcagatgact

SEQ ID NO: 1970147 - DNA, 25 bp, Homo sapien
gactgcactcggtctgtctttacac

SEQ ID NO: 1970148 - DNA, 25 bp, Homo sapien
cagatgactgcactcggtctgtctt

SEQ ID NO: 1970149 - DNA, 25 bp, Homo sapien
acatccacggttctctggtgccgga

SEQ ID NO: 1970150 - DNA, 25 bp, Homo sapien
ttcacagcgtgaaagacatccacgg

SEQ ID NO: 1970151 - DNA, 25 bp, Homo sapien
tggtgccggagcatctcacatacga

SEQ ID NO: 1970152 - DNA, 25 bp, Homo sapien
tcacatacgatgctgatggcgcaga

SEQ ID NO: 1970153 - DNA, 25 bp, Homo sapien
tcccaaagctaaaaatttgcagaaa

SEQ ID NO: 1970154 - DNA, 25 bp, Homo sapien
gcctcctggcaatccactggctttt

SEQ ID NO: 1970155 - DNA, 25 bp, Homo sapien
aaatacatcttgagggctttctgga

SEQ ID NO: 1970156 - DNA, 25 bp, Homo sapien
gcttcaacacgaaccgacgaatctt

SEQ ID NO: 1970157 - DNA, 25 bp, Homo sapien
ggtgccagcactccttctgaatata

SEQ ID NO: 1970158 - DNA, 25 bp, Homo sapien
tcctgcagccggagtctcttcaaag

SEQ ID NO: 1970159 - DNA, 25 bp, Homo sapien
tgccagcgtgaagcagccgctttcc

SEQ ID NO: 1970160 - DNA, 25 bp, Homo sapien
tgaatataactaggcgagtcgtggg

SEQ ID NO: 1970161 - DNA, 25 bp, Homo sapien
ctccttgtagggtggttgaacatca

SEQ ID NO: 1970162 - DNA, 25 bp, Homo sapien
cacacatcatgaaccctgagagccc

SEQ ID NO: 1970163 - DNA, 25 bp, Homo sapien
gggctccttgtagggtggttgaaca

SEQ ID NO: 1970164 - DNA, 25 bp, Homo sapien
ttgtagggtggttgaacatcagcag

SEQ ID NO: 1970165 - DNA, 25 bp, Homo sapien
tttttctcccggtgcaagagcatgc

SEQ ID NO: 1970166 - DNA, 25 bp, Homo sapien
atttctcccagcaactcagtaacaa

SEQ ID NO: 1970167 - DNA, 25 bp, Homo sapien
gcatgcactgctttaccacccttta

SEQ ID NO: 1970168 - DNA, 25 bp, Homo sapien
tcagtaacaaatcaacccagcgaag

SEQ ID NO: 1970169 - DNA, 25 bp, Homo sapien
gcccagttccttattgaggccctgc

SEQ ID NO: 1970170 - DNA, 25 bp, Homo sapien
tgcaaaatccatgcccagttcctta

SEQ ID NO: 1970171 - DNA, 25 bp, Homo sapien
catgcccagttccttattgaggccc

SEQ ID NO: 1970172 - DNA, 25 bp, Homo sapien
aatccatgcccagttccttattgag

SEQ ID NO: 1970173 - DNA, 25 bp, Homo sapien
ctgtgccaaggagaccaataaattc

SEQ ID NO: 1970174 - DNA, 25 bp, Homo sapien
gtgccaaggagaccaataaattctc

SEQ ID NO: 1970175 - DNA, 25 bp, Homo sapien
tgtgccaaggagaccaataaattct

SEQ ID NO: 1970176 - DNA, 25 bp, Homo sapien
gccaaggagaccaataaattctcat

SEQ ID NO: 1970177 - DNA, 25 bp, Homo sapien
cagaagggcagcgtgggccctatta

SEQ ID NO: 1970178 - DNA, 25 bp, Homo sapien
tgggccctattaccgtggtgggatc

SEQ ID NO: 1970179 - DNA, 25 bp, Homo sapien
tggtgggatccctcagttcagtgtt

SEQ ID NO: 1970180 - DNA, 25 bp, Homo sapien
cctcagttcagtgttcccagccagg

SEQ ID NO: 1970181 - DNA, 25 bp, Homo sapien
caacggcctccaaaggttcaaagag

SEQ ID NO: 1970182 - DNA, 25 bp, Homo sapien
gaacggacagatccttcgggctgga

SEQ ID NO: 1970183 - DNA, 25 bp, Homo sapien
gattttggctagaccctgaacggac

SEQ ID NO: 1970184 - DNA, 25 bp, Homo sapien
tgtctaaggaactcaggctggcggc

SEQ ID NO: 1970185 - DNA, 25 bp, Homo sapien
ctgcaactgggtggactctgacata

SEQ ID NO: 1970186 - DNA, 25 bp, Homo sapien
gagcctgaggtcctattaaccatcc

SEQ ID NO: 1970187 - DNA, 25 bp, Homo sapien
tgaaggactcaggtggaactgcaac

SEQ ID NO: 1970188 - DNA, 25 bp, Homo sapien
gtggaactgcaactgggtggactct

SEQ ID NO: 1970189 - DNA, 25 bp, Homo sapien
ggcgtggagaaagcgaaccctcata

SEQ ID NO: 1970190 - DNA, 25 bp, Homo sapien
tgatccagaggcgaagacagagaac

SEQ ID NO: 1970191 - DNA, 25 bp, Homo sapien
tacacatgtactgctagagactggg

SEQ ID NO: 1970192 - DNA, 25 bp, Homo sapien
gagggaatgtcaaacggtgcagcca

SEQ ID NO: 1970193 - DNA, 25 bp, Homo sapien
gctgatagaaccaagcctgggagtg

SEQ ID NO: 1970194 - DNA, 25 bp, Homo sapien
tggacagagccttagcaactggaag

SEQ ID NO: 1970195 - DNA, 25 bp, Homo sapien
ttgagctcagctttcctggatcgtg

SEQ ID NO: 1970196 - DNA, 25 bp, Homo sapien
tggatcgtgtaccttggcccaagca

SEQ ID NO: 1970197 - DNA, 25 bp, Homo sapien
gacaacacatgaggtggaatggtcc

SEQ ID NO: 1970198 - DNA, 25 bp, Homo sapien
tgaggtggaatggtccctatgctca

SEQ ID NO: 1970199 - DNA, 25 bp, Homo sapien
ggaggatgagacaggtaacccaatg

SEQ ID NO: 1970200 - DNA, 25 bp, Homo sapien
tgagaagtccgtgatccagtgagga

SEQ ID NO: 1970201 - DNA, 25 bp, Homo sapien
gaattcaagtattccagggccacct

SEQ ID NO: 1970202 - DNA, 25 bp, Homo sapien
acctcgtagcagaacttgtactgat

SEQ ID NO: 1970203 - DNA, 25 bp, Homo sapien
cacctcgtagcagaacttgtactga

SEQ ID NO: 1970204 - DNA, 25 bp, Homo sapien
aattcaagtattccagggccacctc

SEQ ID NO: 1970205 - DNA, 25 bp, Homo sapien
aaaagctctgggtccgtgaatctga

SEQ ID NO: 1970206 - DNA, 25 bp, Homo sapien
taacaataacgagggtcacgggcca

SEQ ID NO: 1970207 - DNA, 25 bp, Homo sapien
catggaacgtcttggctttgtggta

SEQ ID NO: 1970208 - DNA, 25 bp, Homo sapien
tgtctacgctgctctaggaagccgg

SEQ ID NO: 1970209 - DNA, 25 bp, Homo sapien
cttttaatgaataaataatttgatg

SEQ ID NO: 1970210 - DNA, 25 bp, Homo sapien
aatgaataaataatttgatgaaatc

SEQ ID NO: 1970211 - DNA, 25 bp, Homo sapien
tgaataaataatttgatgaaatcaa

SEQ ID NO: 1970212 - DNA, 25 bp, Homo sapien
gaataaataatttgatgaaatcaaa

SEQ ID NO: 1970213 - DNA, 25 bp, Homo sapien
cacgggtcatcatttattgagatga

SEQ ID NO: 1970214 - DNA, 25 bp, Homo sapien
gagaattcacataaagtaacatcat

SEQ ID NO: 1970215 - DNA, 25 bp, Homo sapien
tccaggccttaagaaaaatgattgt

SEQ ID NO: 1970216 - DNA, 25 bp, Homo sapien
atacagaaaatcgtttccaggcctt

SEQ ID NO: 1970217 - DNA, 25 bp, Homo sapien
cccttgaagtctttggtcaccaaga

SEQ ID NO: 1970218 - DNA, 25 bp, Homo sapien
tgtctcggcactagcagactctgct

SEQ ID NO: 1970219 - DNA, 25 bp, Homo sapien
tcagtcctcttggagggcaacctct

SEQ ID NO: 1970220 - DNA, 25 bp, Homo sapien
aaaggtctaacacgcagatgtccag

SEQ ID NO: 1970221 - DNA, 25 bp, Homo sapien
ccatgctgacggactggagcccaga

SEQ ID NO: 1970222 - DNA, 25 bp, Homo sapien
cggactggagcccagagccacgccg

SEQ ID NO: 1970223 - DNA, 25 bp, Homo sapien
ctggagcccagagccacgccgccat

SEQ ID NO: 1970224 - DNA, 25 bp, Homo sapien
ggactggagcccagagccacgccgc

SEQ ID NO: 1970225 - DNA, 25 bp, Homo sapien
agacgataaggacaaggaggctaaa

SEQ ID NO: 1970226 - DNA, 25 bp, Homo sapien
gccccaaggctatccaagctggtgg

SEQ ID NO: 1970227 - DNA, 25 bp, Homo sapien
cgaagctgccacagcggcggcaatg

SEQ ID NO: 1970228 - DNA, 25 bp, Homo sapien
ggacagcagcactactgccgaagct

SEQ ID NO: 1970229 - DNA, 25 bp, Homo sapien
tcccagttgctctctcctatttctt

SEQ ID NO: 1970230 - DNA, 25 bp, Homo sapien
tgtataagattctgtagttgggctg

SEQ ID NO: 1970231 - DNA, 25 bp, Homo sapien
tgaggaattgtataagattctgtag

SEQ ID NO: 1970232 - DNA, 25 bp, Homo sapien
gaattgtataagattctgtagttgg

SEQ ID NO: 1970233 - DNA, 25 bp, Homo sapien
ctggatattggctatattctgtgga

SEQ ID NO: 1970234 - DNA, 25 bp, Homo sapien
ggatattggctatattctgtggaat

SEQ ID NO: 1970235 - DNA, 25 bp, Homo sapien
gatattggctatattctgtggaatc

SEQ ID NO: 1970236 - DNA, 25 bp, Homo sapien
atattggctatattctgtggaatcc

SEQ ID NO: 1970237 - DNA, 25 bp, Homo sapien
tttgtctaagaactgccactgaaac

SEQ ID NO: 1970238 - DNA, 25 bp, Homo sapien
ctttgtctaagaactgccactgaaa

SEQ ID NO: 1970239 - DNA, 25 bp, Homo sapien
gcatttctgaagttcatccaattgg

SEQ ID NO: 1970240 - DNA, 25 bp, Homo sapien
ttgcagttcaactgtcatctgagat

SEQ ID NO: 1970241 - DNA, 25 bp, Homo sapien
gaagttcatccaattggcttgcagt

SEQ ID NO: 1970242 - DNA, 25 bp, Homo sapien
actgtcatctgagatacgagacaac

SEQ ID NO: 1970243 - DNA, 25 bp, Homo sapien
cctggtcaaattcaataccagagac

SEQ ID NO: 1970244 - DNA, 25 bp, Homo sapien
ctggtcaaattcaataccagagact

SEQ ID NO: 1970245 - DNA, 25 bp, Homo sapien
catcctggatgactgtgccatattc

SEQ ID NO: 1970246 - DNA, 25 bp, Homo sapien
ggtaatgaatatccactgcatcctg

SEQ ID NO: 1970247 - DNA, 25 bp, Homo sapien
gatgactgtgccatattcatagact

SEQ ID NO: 1970248 - DNA, 25 bp, Homo sapien
cactgcatcctggatgactgtgcca

SEQ ID NO: 1970249 - DNA, 25 bp, Homo sapien
cagctgattttggaattgaggtcat

SEQ ID NO: 1970250 - DNA, 25 bp, Homo sapien
attttggaattgaggtcatttcatt

SEQ ID NO: 1970251 - DNA, 25 bp, Homo sapien
gctgattttggaattgaggtcattt

SEQ ID NO: 1970252 - DNA, 25 bp, Homo sapien
tgattttggaattgaggtcatttca

SEQ ID NO: 1970253 - DNA, 25 bp, Homo sapien
acgctcctgttagacctttgacctc

SEQ ID NO: 1970254 - DNA, 25 bp, Homo sapien
ctcacgctcctgttagacctttgac

SEQ ID NO: 1970255 - DNA, 25 bp, Homo sapien
tgaatccatcccataggataacaat

SEQ ID NO: 1970256 - DNA, 25 bp, Homo sapien
catcccataggataacaatgccttc

SEQ ID NO: 1970257 - DNA, 25 bp, Homo sapien
gcctcaatgcttgccactgagttgt

SEQ ID NO: 1970258 - DNA, 25 bp, Homo sapien
cacatcagcctttgcctcaatgctt

SEQ ID NO: 1970259 - DNA, 25 bp, Homo sapien
gaatttaacacagcacacatcagcc

SEQ ID NO: 1970260 - DNA, 25 bp, Homo sapien
tttgcctcaatgcttgccactgagt

SEQ ID NO: 1970261 - DNA, 25 bp, Homo sapien
gatccgcacagccaaaagccaaatg

SEQ ID NO: 1970262 - DNA, 25 bp, Homo sapien
tagtaatggacacaatgatccgcac

SEQ ID NO: 1970263 - DNA, 25 bp, Homo sapien
caagctatatactctccacgggaag

SEQ ID NO: 1970264 - DNA, 25 bp, Homo sapien
cacgggaagcaaggcctacaaagtt

SEQ ID NO: 1970265 - DNA, 25 bp, Homo sapien
gtgcccagggggcctcagagaccat

SEQ ID NO: 1970266 - DNA, 25 bp, Homo sapien
cttccgtgcccagggggcctcagag

SEQ ID NO: 1970267 - DNA, 25 bp, Homo sapien
cgtgcccagggggcctcagagacca

SEQ ID NO: 1970268 - DNA, 25 bp, Homo sapien
tccgtgcccagggggcctcagagac

SEQ ID NO: 1970269 - DNA, 25 bp, Homo sapien
gacggagatctaattttcctccagc

SEQ ID NO: 1970270 - DNA, 25 bp, Homo sapien
ttggagggtagggtagagtgaaagc

SEQ ID NO: 1970271 - DNA, 25 bp, Homo sapien
aagcctcaggaaagacggagatcta

SEQ ID NO: 1970272 - DNA, 25 bp, Homo sapien
gaatcagatataagttgactggaag

SEQ ID NO: 1970273 - DNA, 25 bp, Homo sapien
gtttccaggcaatcacaggcagagg

SEQ ID NO: 1970274 - DNA, 25 bp, Homo sapien
cagctccaggaaacagtggagcctg

SEQ ID NO: 1970275 - DNA, 25 bp, Homo sapien
aggtcccatgaccacacggactgga

SEQ ID NO: 1970276 - DNA, 25 bp, Homo sapien
ctgatgaacgctgactggacgctgg

SEQ ID NO: 1970277 - DNA, 25 bp, Homo sapien
gccaacaaccctccggttgagatcc

SEQ ID NO: 1970278 - DNA, 25 bp, Homo sapien
caacaaccctccggttgagatcctg

SEQ ID NO: 1970279 - DNA, 25 bp, Homo sapien
aacaaccctccggttgagatcctgc

SEQ ID NO: 1970280 - DNA, 25 bp, Homo sapien
cagccaacaaccctccggttgagat

SEQ ID NO: 1970281 - DNA, 25 bp, Homo sapien
tctgaacttggcttatgtcctccat

SEQ ID NO: 1970282 - DNA, 25 bp, Homo sapien
atctgaacttggcttatgtcctcca

SEQ ID NO: 1970283 - DNA, 25 bp, Homo sapien
gaaatccaaggcccagggattttca

SEQ ID NO: 1970284 - DNA, 25 bp, Homo sapien
ttttctccagagccggagggccctg

SEQ ID NO: 1970285 - DNA, 25 bp, Homo sapien
ttcagactgttttctccagagccgg

SEQ ID NO: 1970286 - DNA, 25 bp, Homo sapien
agaggaaatccaaggcccagggatt

SEQ ID NO: 1970287 - DNA, 25 bp, Homo sapien
tagagtgcgagtttagcatcatccg

SEQ ID NO: 1970288 - DNA, 25 bp, Homo sapien
tgagctggccgtgagaagtccagaa

SEQ ID NO: 1970289 - DNA, 25 bp, Homo sapien
aacgccaagtgcgagtttagagtgc

SEQ ID NO: 1970290 - DNA, 25 bp, Homo sapien
gtgggcaccctgtgcatgtcacata

SEQ ID NO: 1970291 - DNA, 25 bp, Homo sapien
tgagaggcctctgcacaggtgctgg

SEQ ID NO: 1970292 - DNA, 25 bp, Homo sapien
agggcggggctgctatcagcttccc

SEQ ID NO: 1970293 - DNA, 25 bp, Homo sapien
gcactccccacaaaaccctgcatct

SEQ ID NO: 1970294 - DNA, 25 bp, Homo sapien
ggcaaggcaggtgcagtgggcaggg

SEQ ID NO: 1970295 - DNA, 25 bp, Homo sapien
ggtgccattcagcaggggactgtca

SEQ ID NO: 1970296 - DNA, 25 bp, Homo sapien
aatacctgcgttgctagtcccgtag

SEQ ID NO: 1970297 - DNA, 25 bp, Homo sapien
tgtaggctgatttccaacattgcca

SEQ ID NO: 1970298 - DNA, 25 bp, Homo sapien
gtcccgtagtcctggtcccttgatg

SEQ ID NO: 1970299 - DNA, 25 bp, Homo sapien
gagtgacacttcttcaatacctgcg

SEQ ID NO: 1970300 - DNA, 25 bp, Homo sapien
ctgtaatgagccgtgagtggagggc

SEQ ID NO: 1970301 - DNA, 25 bp, Homo sapien
ctcagccaaacacccaaggagggct

SEQ ID NO: 1970302 - DNA, 25 bp, Homo sapien
tattgggggaacatccctcagccaa

SEQ ID NO: 1970303 - DNA, 25 bp, Homo sapien
tggtaaatttcgtgcctatattggg

SEQ ID NO: 1970304 - DNA, 25 bp, Homo sapien
gaaagacctcggtgacaccactgaa

SEQ ID NO: 1970305 - DNA, 25 bp, Homo sapien
ctgaacaattgaacccacacccaag

SEQ ID NO: 1970306 - DNA, 25 bp, Homo sapien
gaagtgggaaagacctcggtgacac

SEQ ID NO: 1970307 - DNA, 25 bp, Homo sapien
cctggcggctgcttgtaggaagtgg

SEQ ID NO: 1970308 - DNA, 25 bp, Homo sapien
aagcagctgccatatcatgactgtg

SEQ ID NO: 1970309 - DNA, 25 bp, Homo sapien
agagctgtcaccagcccacttcttg

SEQ ID NO: 1970310 - DNA, 25 bp, Homo sapien
gccatatcatgactgtgcaggtgtc

SEQ ID NO: 1970311 - DNA, 25 bp, Homo sapien
cagctgttgcttgtggcctcagagc

SEQ ID NO: 1970312 - DNA, 25 bp, Homo sapien
catgaccctgatggtgaccgtgata

SEQ ID NO: 1970313 - DNA, 25 bp, Homo sapien
atagggagaccgaggaagcagctca

SEQ ID NO: 1970314 - DNA, 25 bp, Homo sapien
tgagagcagaagtcgtcccctgtca

SEQ ID NO: 1970315 - DNA, 25 bp, Homo sapien
tgtcagcaggtaatcagccgcatga

SEQ ID NO: 1970316 - DNA, 25 bp, Homo sapien
ctttggagaatgacagattacacag

SEQ ID NO: 1970317 - DNA, 25 bp, Homo sapien
ggttggagagtattagctcaatgac

SEQ ID NO: 1970318 - DNA, 25 bp, Homo sapien
tgctctgaggttggagagtattagc

SEQ ID NO: 1970319 - DNA, 25 bp, Homo sapien
tattagctcaatgactgtgatggtg

SEQ ID NO: 1970320 - DNA, 25 bp, Homo sapien
ggagagtattagctcaatgactgtg

SEQ ID NO: 1970321 - DNA, 25 bp, Homo sapien
tggtctttgcttctagtatgtcacc

SEQ ID NO: 1970322 - DNA, 25 bp, Homo sapien
gtctttgcttctagtatgtcaccat

SEQ ID NO: 1970323 - DNA, 25 bp, Homo sapien
ctttgcttctagtatgtcaccatat

SEQ ID NO: 1970324 - DNA, 25 bp, Homo sapien
ctggttcactcctccgtaggtgacc

SEQ ID NO: 1970325 - DNA, 25 bp, Homo sapien
agacaaaaagcttcacgggtgcccg

SEQ ID NO: 1970326 - DNA, 25 bp, Homo sapien
gttgctctggacaattctccctgga

SEQ ID NO: 1970327 - DNA, 25 bp, Homo sapien
tagactgataccacgttgaggatgc

SEQ ID NO: 1970328 - DNA, 25 bp, Homo sapien
cagactccataagtggccttgccag

SEQ ID NO: 1970329 - DNA, 25 bp, Homo sapien
gtaagtggtttcctctagcacaaga

SEQ ID NO: 1970330 - DNA, 25 bp, Homo sapien
tagcacaagatgctgtgatctgcgg

SEQ ID NO: 1970331 - DNA, 25 bp, Homo sapien
catccccaggaaggcgaatagccct

SEQ ID NO: 1970332 - DNA, 25 bp, Homo sapien
tccttggccacacgtagtaagtggt

SEQ ID NO: 1970333 - DNA, 25 bp, Homo sapien
ttcactgaagacagggtgatgatga

SEQ ID NO: 1970334 - DNA, 25 bp, Homo sapien
ctgaagacagggtgatgatgatctg

SEQ ID NO: 1970335 - DNA, 25 bp, Homo sapien
cctggcagagggttcattcactgaa

SEQ ID NO: 1970336 - DNA, 25 bp, Homo sapien
tggcagagggttcattcactgaaga

SEQ ID NO: 1970337 - DNA, 25 bp, Homo sapien
agaagaataggaggacgttggacac

SEQ ID NO: 1970338 - DNA, 25 bp, Homo sapien
gggtgctgtccttctatggtggcac

SEQ ID NO: 1970339 - DNA, 25 bp, Homo sapien
aagttctgtggagccggagagcaac

SEQ ID NO: 1970340 - DNA, 25 bp, Homo sapien
tgtggagccggagagcaacgcacat

SEQ ID NO: 1970341 - DNA, 25 bp, Homo sapien
gctgtccttctatggtggcaccggt

SEQ ID NO: 1970342 - DNA, 25 bp, Homo sapien
gctgggggagtgatcgcattaggaa

SEQ ID NO: 1970343 - DNA, 25 bp, Homo sapien
ctgggggagtgatcgcattaggaaa

SEQ ID NO: 1970344 - DNA, 25 bp, Homo sapien
gccctgtcctccgactgtcagaaat

SEQ ID NO: 1970345 - DNA, 25 bp, Homo sapien
gactgtcagaaatctctggcctgac

SEQ ID NO: 1970346 - DNA, 25 bp, Homo sapien
tccgactgtcagaaatctctggcct

SEQ ID NO: 1970347 - DNA, 25 bp, Homo sapien
tgtcctccgactgtcagaaatctct

SEQ ID NO: 1970348 - DNA, 25 bp, Homo sapien
caacaggaacaaaatgtccaagtcc

SEQ ID NO: 1970349 - DNA, 25 bp, Homo sapien
caggaacaaaatgtccaagtccatc

SEQ ID NO: 1970350 - DNA, 25 bp, Homo sapien
acaacaggaacaaaatgtccaagtc

SEQ ID NO: 1970351 - DNA, 25 bp, Homo sapien
acaggaacaaaatgtccaagtccat

SEQ ID NO: 1970352 - DNA, 25 bp, Homo sapien
ccaagtagaccaaattggccacagt

SEQ ID NO: 1970353 - DNA, 25 bp, Homo sapien
ggccacagtttcaaacggaactgga

SEQ ID NO: 1970354 - DNA, 25 bp, Homo sapien
gggcaacttggaccaagtagaccaa

SEQ ID NO: 1970355 - DNA, 25 bp, Homo sapien
ttcaaacggaactggatctgcaatc

SEQ ID NO: 1970356 - DNA, 25 bp, Homo sapien
tgcgtcttaggagcctcttccctcg

SEQ ID NO: 1970357 - DNA, 25 bp, Homo sapien
tctttcccaggactttgcgtcttag

SEQ ID NO: 1970358 - DNA, 25 bp, Homo sapien
tcctttcttgagcactatgggtaac

SEQ ID NO: 1970359 - DNA, 25 bp, Homo sapien
tcaatgccaattgaagacaattttt

SEQ ID NO: 1970360 - DNA, 25 bp, Homo sapien
agcaaagttctctggaatcagggca

SEQ ID NO: 1970361 - DNA, 25 bp, Homo sapien
tagatggagtagagcaaaccatcct

SEQ ID NO: 1970362 - DNA, 25 bp, Homo sapien
tgcaagcaggttccacttcacatgc

SEQ ID NO: 1970363 - DNA, 25 bp, Homo sapien
gccatcaccgagaaatagggttaca

SEQ ID NO: 1970364 - DNA, 25 bp, Homo sapien
catatgtgatgaggaaatgctgcct

SEQ ID NO: 1970365 - DNA, 25 bp, Homo sapien
taatgggcagacttcctaggcctgt

SEQ ID NO: 1970366 - DNA, 25 bp, Homo sapien
agttaaaatacagacctctcccgag

SEQ ID NO: 1970367 - DNA, 25 bp, Homo sapien
aaggatggttaagagctgcctgcac

SEQ ID NO: 1970368 - DNA, 25 bp, Homo sapien
cgataatgttctggcacgttaggac

SEQ ID NO: 1970369 - DNA, 25 bp, Homo sapien
tggtcactctgacatggcacgggag

SEQ ID NO: 1970370 - DNA, 25 bp, Homo sapien
ccatggagggatccagactggtcac

SEQ ID NO: 1970371 - DNA, 25 bp, Homo sapien
gcatcatcaaccagttcccggaagt

SEQ ID NO: 1970372 - DNA, 25 bp, Homo sapien
tctgacaagctcaagtatacgtctt

SEQ ID NO: 1970373 - DNA, 25 bp, Homo sapien
ctacaaggcattgttcaatgatgac

SEQ ID NO: 1970374 - DNA, 25 bp, Homo sapien
aaagtctcatctgtggctacaaggc

SEQ ID NO: 1970375 - DNA, 25 bp, Homo sapien
tcaagtatacgtcttctgagaaatc

SEQ ID NO: 1970376 - DNA, 25 bp, Homo sapien
ggttggggaacaatcatataattac

SEQ ID NO: 1970377 - DNA, 25 bp, Homo sapien
ctggcatctctcatccatgagtgct

SEQ ID NO: 1970378 - DNA, 25 bp, Homo sapien
tctgtcatggacagccaagctgggc

SEQ ID NO: 1970379 - DNA, 25 bp, Homo sapien
ccatgagtgctcttcaactaccaac

SEQ ID NO: 1970380 - DNA, 25 bp, Homo sapien
ggaaaggtcttggtctccacatgga

SEQ ID NO: 1970381 - DNA, 25 bp, Homo sapien
cacaaggattgctgtaggctttccc

SEQ ID NO: 1970382 - DNA, 25 bp, Homo sapien
gagttgagtccttccacaacacaag

SEQ ID NO: 1970383 - DNA, 25 bp, Homo sapien
caactgggtccgtgccacagtgagt

SEQ ID NO: 1970384 - DNA, 25 bp, Homo sapien
tgcaaatggaatccaatgtgcaaat

SEQ ID NO: 1970385 - DNA, 25 bp, Homo sapien
ggaatccaatgtgcaaatgtgcttg

SEQ ID NO: 1970386 - DNA, 25 bp, Homo sapien
ggttattggttgccttttctgtgtg

SEQ ID NO: 1970387 - DNA, 25 bp, Homo sapien
ctgtgcaaatggaatccaatgtgca

SEQ ID NO: 1970388 - DNA, 25 bp, Homo sapien
tgcctgaaggacagatacaggatgc

SEQ ID NO: 1970389 - DNA, 25 bp, Homo sapien
gatgctctataacaagtgccaggaa

SEQ ID NO: 1970390 - DNA, 25 bp, Homo sapien
gaacttccttgggtgatgagtcgcc

SEQ ID NO: 1970391 - DNA, 25 bp, Homo sapien
attcagcctgctgttctcggaccag

SEQ ID NO: 1970392 - DNA, 25 bp, Homo sapien
aaatgatactgaacgccaggctttc

SEQ ID NO: 1970393 - DNA, 25 bp, Homo sapien
ctgctggcagggaacggagtccgct

SEQ ID NO: 1970394 - DNA, 25 bp, Homo sapien
gatactgaacgccaggctttcagca

SEQ ID NO: 1970395 - DNA, 25 bp, Homo sapien
gcttggaaatgatactgaacgccag

SEQ ID NO: 1970396 - DNA, 25 bp, Homo sapien
cttcttgccacttggctacccatgg

SEQ ID NO: 1970397 - DNA, 25 bp, Homo sapien
ttcttgccacttggctacccatggt

SEQ ID NO: 1970398 - DNA, 25 bp, Homo sapien
caggcagacccctactttgcttggg

SEQ ID NO: 1970399 - DNA, 25 bp, Homo sapien
aggttggtctgatccccgtgccagg

SEQ ID NO: 1970400 - DNA, 25 bp, Homo sapien
cctgatgctgttggaacgttattgt

SEQ ID NO: 1970401 - DNA, 25 bp, Homo sapien
cctacacaggttggtctgatccccg

SEQ ID NO: 1970402 - DNA, 25 bp, Homo sapien
ctgtcatggctgcgttgttttacag

SEQ ID NO: 1970403 - DNA, 25 bp, Homo sapien
tggctgcgttgttttacagacccct

SEQ ID NO: 1970404 - DNA, 25 bp, Homo sapien
gtcatggctgcgttgttttacagac

SEQ ID NO: 1970405 - DNA, 25 bp, Homo sapien
catggctgcgttgttttacagaccc

SEQ ID NO: 1970406 - DNA, 25 bp, Homo sapien
tccttgttctggtgcacgtggctgc

SEQ ID NO: 1970407 - DNA, 25 bp, Homo sapien
tgattgctaccttcacagcctcggc

SEQ ID NO: 1970408 - DNA, 25 bp, Homo sapien
aggtgcctagccctagcatgtccgt

SEQ ID NO: 1970409 - DNA, 25 bp, Homo sapien
tagccctagcatgtccgtcttggtg

SEQ ID NO: 1970410 - DNA, 25 bp, Homo sapien
ttcctgtggcatatgccccatggct

SEQ ID NO: 1970411 - DNA, 25 bp, Homo sapien
cctgtggcatatgccccatggcttg

SEQ ID NO: 1970412 - DNA, 25 bp, Homo sapien
tgtggcatatgccccatggcttgct

SEQ ID NO: 1970413 - DNA, 25 bp, Homo sapien
tcctgtggcatatgccccatggctt

SEQ ID NO: 1970414 - DNA, 25 bp, Homo sapien
actgagcacctttcggcaggatcct

SEQ ID NO: 1970415 - DNA, 25 bp, Homo sapien
cactgagcacctttcggcaggatcc

SEQ ID NO: 1970416 - DNA, 25 bp, Homo sapien
gccactgagcacctttcggcaggat

SEQ ID NO: 1970417 - DNA, 25 bp, Homo sapien
aggccactgagcacctttcggcagg

SEQ ID NO: 1970418 - DNA, 25 bp, Homo sapien
tccttcccaggatgacagcctgttg

SEQ ID NO: 1970419 - DNA, 25 bp, Homo sapien
ccttcccaggatgacagcctgttgg

SEQ ID NO: 1970420 - DNA, 25 bp, Homo sapien
ttgtttaaggtcctctcggcctgga

SEQ ID NO: 1970421 - DNA, 25 bp, Homo sapien
tcttgagttagggacctaccagtgg

SEQ ID NO: 1970422 - DNA, 25 bp, Homo sapien
gctgtaggcggtcactatgctgcct

SEQ ID NO: 1970423 - DNA, 25 bp, Homo sapien
taagttctcttgagttagggaccta

SEQ ID NO: 1970424 - DNA, 25 bp, Homo sapien
gctgccttggactggtagtactgga

SEQ ID NO: 1970425 - DNA, 25 bp, Homo sapien
gcaatcactttgatcctggggtctt

SEQ ID NO: 1970426 - DNA, 25 bp, Homo sapien
gctgcaatcactttgatcctggggt

SEQ ID NO: 1970427 - DNA, 25 bp, Homo sapien
tgcaatcactttgatcctggggtct

SEQ ID NO: 1970428 - DNA, 25 bp, Homo sapien
ggctgcaatcactttgatcctgggg

SEQ ID NO: 1970429 - DNA, 25 bp, Homo sapien
gttctcagcaatgcgatccagtgtc

SEQ ID NO: 1970430 - DNA, 25 bp, Homo sapien
tgcgatccagtgtcacagatgtggg

SEQ ID NO: 1970431 - DNA, 25 bp, Homo sapien
tcagcaatgcgatccagtgtcacag

SEQ ID NO: 1970432 - DNA, 25 bp, Homo sapien
cagatgtgggggtcaccaccaagtt

SEQ ID NO: 1970433 - DNA, 25 bp, Homo sapien
ggctttccctttcccgatgcattag

SEQ ID NO: 1970434 - DNA, 25 bp, Homo sapien
ctacatagtctttcctgagtgcact

SEQ ID NO: 1970435 - DNA, 25 bp, Homo sapien
acttcacgtgcctttctagatggtt

SEQ ID NO: 1970436 - DNA, 25 bp, Homo sapien
caatattgcacatttggcctccatt

SEQ ID NO: 1970437 - DNA, 25 bp, Homo sapien
tatagtccatgaacttaatgagagg

SEQ ID NO: 1970438 - DNA, 25 bp, Homo sapien
tgcatggccctgtcggtaattaccg

SEQ ID NO: 1970439 - DNA, 25 bp, Homo sapien
taatttctggcggttcacctcatta

SEQ ID NO: 1970440 - DNA, 25 bp, Homo sapien
tgaacttaatgagagggtccctttg

SEQ ID NO: 1970441 - DNA, 25 bp, Homo sapien
cgttcctccttcgtctgaggggcag

SEQ ID NO: 1970442 - DNA, 25 bp, Homo sapien
cttccccgttcctccttcgtctgag

SEQ ID NO: 1970443 - DNA, 25 bp, Homo sapien
tctgaggggcagatgaccacctaac

SEQ ID NO: 1970444 - DNA, 25 bp, Homo sapien
ggggcagatgaccacctaactcctc

SEQ ID NO: 1970445 - DNA, 25 bp, Homo sapien
tgctgaagttctgaactgtgagagc

SEQ ID NO: 1970446 - DNA, 25 bp, Homo sapien
accccattagtcagctggtgtgggg

SEQ ID NO: 1970447 - DNA, 25 bp, Homo sapien
aactgtgagagcctcttcccttgaa

SEQ ID NO: 1970448 - DNA, 25 bp, Homo sapien
ttcccttgaaatgaccccattagtc

SEQ ID NO: 1970449 - DNA, 25 bp, Homo sapien
ctctgcccggtggcttcttgtggca

SEQ ID NO: 1970450 - DNA, 25 bp, Homo sapien
catcagtagcctataaaagagcagc

SEQ ID NO: 1970451 - DNA, 25 bp, Homo sapien
gccatcaccggagcactgtggcaat

SEQ ID NO: 1970452 - DNA, 25 bp, Homo sapien
cagctgctgtccactaaacagtggg

SEQ ID NO: 1970453 - DNA, 25 bp, Homo sapien
ctgtggcaatgcgagtgtccctgga

SEQ ID NO: 1970454 - DNA, 25 bp, Homo sapien
atttggcattcagatcatcaggctt

SEQ ID NO: 1970455 - DNA, 25 bp, Homo sapien
tttggcattcagatcatcaggcttc

SEQ ID NO: 1970456 - DNA, 25 bp, Homo sapien
tggcattcagatcatcaggcttctg

SEQ ID NO: 1970457 - DNA, 25 bp, Homo sapien
cattcagatcatcaggcttctgatc

SEQ ID NO: 1970458 - DNA, 25 bp, Homo sapien
agaacagctccaggtattaggtccc

SEQ ID NO: 1970459 - DNA, 25 bp, Homo sapien
tcacttgcacatgaagcttccttgg

SEQ ID NO: 1970460 - DNA, 25 bp, Homo sapien
ccctggtgcatcacttgcacatgaa

SEQ ID NO: 1970461 - DNA, 25 bp, Homo sapien
gcttccttgggatctacttctgggg

SEQ ID NO: 1970462 - DNA, 25 bp, Homo sapien
gagcctgactttgggcaccctctga

SEQ ID NO: 1970463 - DNA, 25 bp, Homo sapien
tgggagctaaaggaatatagtcaac

SEQ ID NO: 1970464 - DNA, 25 bp, Homo sapien
tctacatcttgtccctgtggccttg

SEQ ID NO: 1970465 - DNA, 25 bp, Homo sapien
tagcgtctggctagctaggcccaca

SEQ ID NO: 1970466 - DNA, 25 bp, Homo sapien
catgagagaaggtctacatcttgtc

SEQ ID NO: 1970467 - DNA, 25 bp, Homo sapien
tggaggagctcaccgtggcttcttt

SEQ ID NO: 1970468 - DNA, 25 bp, Homo sapien
cctcctgcgagagcatctgtgttag

SEQ ID NO: 1970469 - DNA, 25 bp, Homo sapien
gatgcttccagaaagcgtcgaccat

SEQ ID NO: 1970470 - DNA, 25 bp, Homo sapien
gcatctgtgttagtggaggagctca

SEQ ID NO: 1970471 - DNA, 25 bp, Homo sapien
tctgtgcccaggtatactcaggctc

SEQ ID NO: 1970472 - DNA, 25 bp, Homo sapien
caggcttggaaggtacggtgaaatc

SEQ ID NO: 1970473 - DNA, 25 bp, Homo sapien
caggtatactcaggctcacctggct

SEQ ID NO: 1970474 - DNA, 25 bp, Homo sapien
gggacattctcgctgtctatcatgg

SEQ ID NO: 1970475 - DNA, 25 bp, Homo sapien
acttgcctggcgactgaagctctct

SEQ ID NO: 1970476 - DNA, 25 bp, Homo sapien
aggagacatcttagcacttgcctgg

SEQ ID NO: 1970477 - DNA, 25 bp, Homo sapien
tgcctggcgactgaagctctctgtt

SEQ ID NO: 1970478 - DNA, 25 bp, Homo sapien
cctctccaactttactagcgcagga

SEQ ID NO: 1970479 - DNA, 25 bp, Homo sapien
gctggccctcttggacaaaacctaa

SEQ ID NO: 1970480 - DNA, 25 bp, Homo sapien
tgacagacgttcagggccaatgcct

SEQ ID NO: 1970481 - DNA, 25 bp, Homo sapien
tgtggctcacggtggtttccccatg

SEQ ID NO: 1970482 - DNA, 25 bp, Homo sapien
catggccatgggaatccagcaacac

SEQ ID NO: 1970483 - DNA, 25 bp, Homo sapien
ctgtgggttgctggtttcataggga

SEQ ID NO: 1970484 - DNA, 25 bp, Homo sapien
tgtgggttgctggtttcatagggag

SEQ ID NO: 1970485 - DNA, 25 bp, Homo sapien
tctccccatccaacgttctccgcct

SEQ ID NO: 1970486 - DNA, 25 bp, Homo sapien
tccccatccaacgttctccgcctcc

SEQ ID NO: 1970487 - DNA, 25 bp, Homo sapien
cccatccaacgttctccgcctccca

SEQ ID NO: 1970488 - DNA, 25 bp, Homo sapien
ccatccaacgttctccgcctcccac

SEQ ID NO: 1970489 - DNA, 25 bp, Homo sapien
aacctgtagcagttggtagaggagc

SEQ ID NO: 1970490 - DNA, 25 bp, Homo sapien
gagagcatcacaccaactcagttgg

SEQ ID NO: 1970491 - DNA, 25 bp, Homo sapien
agaggagcgtcccaaggtagaaaca

SEQ ID NO: 1970492 - DNA, 25 bp, Homo sapien
actcagttgggtcaaatggacttcc

SEQ ID NO: 1970493 - DNA, 25 bp, Homo sapien
ccgtgggctccgcgctgcaactgcg

SEQ ID NO: 1970494 - DNA, 25 bp, Homo sapien
tgcgccgccggccggctctctgcgc

SEQ ID NO: 1970495 - DNA, 25 bp, Homo sapien
cggctctctgcgcccgggtcccctc

SEQ ID NO: 1970496 - DNA, 25 bp, Homo sapien
tgggctccgcgctgcaactgcgccg

SEQ ID NO: 1970497 - DNA, 25 bp, Homo sapien
gcggcgcccggatccatacacgcat

SEQ ID NO: 1970498 - DNA, 25 bp, Homo sapien
tccatacacgcatgcggctcccgct

SEQ ID NO: 1970499 - DNA, 25 bp, Homo sapien
cggatccatacacgcatgcggctcc

SEQ ID NO: 1970500 - DNA, 25 bp, Homo sapien
cgcccggatccatacacgcatgcgg

SEQ ID NO: 1970501 - DNA, 25 bp, Homo sapien
cggtgaagcgctccatcaggctggt

SEQ ID NO: 1970502 - DNA, 25 bp, Homo sapien
ggtggacttgcaggcctcgcagaag

SEQ ID NO: 1970503 - DNA, 25 bp, Homo sapien
cacgccgcgggagccgataatgatg

SEQ ID NO: 1970504 - DNA, 25 bp, Homo sapien
aggtgtcgtcggtgaagcgctccat

SEQ ID NO: 1970505 - DNA, 25 bp, Homo sapien
cgagaggcccatccccgaaagactc

SEQ ID NO: 1970506 - DNA, 25 bp, Homo sapien
ccgaaagactcccaggctcgatgag

SEQ ID NO: 1970507 - DNA, 25 bp, Homo sapien
ggctcgatgagactcgaagcccacg

SEQ ID NO: 1970508 - DNA, 25 bp, Homo sapien
gggcgaagggcacctgcccgggcgc

SEQ ID NO: 1970509 - DNA, 25 bp, Homo sapien
gcgctccactcgaacccagcttttt

SEQ ID NO: 1970510 - DNA, 25 bp, Homo sapien
gccgaagtttccgtggagagccgcc

SEQ ID NO: 1970511 - DNA, 25 bp, Homo sapien
tttttcttgggcgagtatgctaagg

SEQ ID NO: 1970512 - DNA, 25 bp, Homo sapien
cgagtatgctaagggccgaagtttc

SEQ ID NO: 1970513 - DNA, 25 bp, Homo sapien
tcactcctgtccctcaccgaaaaca

SEQ ID NO: 1970514 - DNA, 25 bp, Homo sapien
aaaacagcggtactggaggaatcaa

SEQ ID NO: 1970515 - DNA, 25 bp, Homo sapien
ctgtccctcaccgaaaacagcggta

SEQ ID NO: 1970516 - DNA, 25 bp, Homo sapien
tcaccgaaaacagcggtactggagg

SEQ ID NO: 1970517 - DNA, 25 bp, Homo sapien
gaaattcaaccacactcagagtagg

SEQ ID NO: 1970518 - DNA, 25 bp, Homo sapien
tcagagtagggagtatgtgctcggg

SEQ ID NO: 1970519 - DNA, 25 bp, Homo sapien
catgtttgttaagggacacagaaac

SEQ ID NO: 1970520 - DNA, 25 bp, Homo sapien
tgctcgggtaagtgcatgtttgtta

SEQ ID NO: 1970521 - DNA, 25 bp, Homo sapien
actccagtactctaagtattatagg

SEQ ID NO: 1970522 - DNA, 25 bp, Homo sapien
cccacagttagaagcacgcactgag

SEQ ID NO: 1970523 - DNA, 25 bp, Homo sapien
gccaggggccatgatcattctctga

SEQ ID NO: 1970524 - DNA, 25 bp, Homo sapien
cgcactgagtactaaagtactccag

SEQ ID NO: 1970525 - DNA, 25 bp, Homo sapien
cattccaatgacgaggaagccttct

SEQ ID NO: 1970526 - DNA, 25 bp, Homo sapien
caacaaacgatctgatgagtggagg

SEQ ID NO: 1970527 - DNA, 25 bp, Homo sapien
gactggaggcgctttcactgtgctc

SEQ ID NO: 1970528 - DNA, 25 bp, Homo sapien
gaagctccgatccacttctggacag

SEQ ID NO: 1970529 - DNA, 25 bp, Homo sapien
tgagacaattccattagacaatttc

SEQ ID NO: 1970530 - DNA, 25 bp, Homo sapien
gaccaatcagtaaatacaacctctg

SEQ ID NO: 1970531 - DNA, 25 bp, Homo sapien
ttataatcagactaattaaattcca

SEQ ID NO: 1970532 - DNA, 25 bp, Homo sapien
atcttttaaaccagtttctgatttg

SEQ ID NO: 1970533 - DNA, 25 bp, Homo sapien
ggaaagggctccatcatgtctgacc

SEQ ID NO: 1970534 - DNA, 25 bp, Homo sapien
ttggccctgaccacttgctgagcag

SEQ ID NO: 1970535 - DNA, 25 bp, Homo sapien
agaattcacttgcagcccttggccc

SEQ ID NO: 1970536 - DNA, 25 bp, Homo sapien
taaagaactggcaatcctatgctgg

SEQ ID NO: 1970537 - DNA, 25 bp, Homo sapien
tgagaaaaatgaagataaatttaaa

SEQ ID NO: 1970538 - DNA, 25 bp, Homo sapien
caatgagaaaaatgaagataaattt

SEQ ID NO: 1970539 - DNA, 25 bp, Homo sapien
cgcacaatgagaaaaatgaagataa

SEQ ID NO: 1970540 - DNA, 25 bp, Homo sapien
cacaatgagaaaaatgaagataaat

SEQ ID NO: 1970541 - DNA, 25 bp, Homo sapien
gggccaggctgtgaagtttagagca

SEQ ID NO: 1970542 - DNA, 25 bp, Homo sapien
ggggccaggctgtgaagtttagagc

SEQ ID NO: 1970543 - DNA, 25 bp, Homo sapien
aagggggccaggctgtgaagtttag

SEQ ID NO: 1970544 - DNA, 25 bp, Homo sapien
ctttaagggggccaggctgtgaagt

SEQ ID NO: 1970545 - DNA, 25 bp, Homo sapien
ccccatgtcaacacaggctagaggg

SEQ ID NO: 1970546 - DNA, 25 bp, Homo sapien
agagagcacacaggactgcggcctg

SEQ ID NO: 1970547 - DNA, 25 bp, Homo sapien
gtgggcatcctgagtgcacccccat

SEQ ID NO: 1970548 - DNA, 25 bp, Homo sapien
taaagggcttcaccgaagggctgcc

SEQ ID NO: 1970549 - DNA, 25 bp, Homo sapien
gcatttctgcaagggattcacactc

SEQ ID NO: 1970550 - DNA, 25 bp, Homo sapien
ggtccaaagaaacggagtcactcgc

SEQ ID NO: 1970551 - DNA, 25 bp, Homo sapien
gaccctggtggactgcatttgactt

SEQ ID NO: 1970552 - DNA, 25 bp, Homo sapien
tgtcatgccgcctaacattcaaggg

SEQ ID NO: 1970553 - DNA, 25 bp, Homo sapien
gtaaaccaggtgtgagctttgtgcc

SEQ ID NO: 1970554 - DNA, 25 bp, Homo sapien
aaacacgggcagatcggtcatggct

SEQ ID NO: 1970555 - DNA, 25 bp, Homo sapien
tggcagattccacagaccagaggga

SEQ ID NO: 1970556 - DNA, 25 bp, Homo sapien
tatttggaacaacgtatctggcacc

SEQ ID NO: 1970557 - DNA, 25 bp, Homo sapien
cgacaagtgtgttgaggtcctacca

SEQ ID NO: 1970558 - DNA, 25 bp, Homo sapien
ctgcaggtgtgtgattctttagcca

SEQ ID NO: 1970559 - DNA, 25 bp, Homo sapien
aacacaaagctcctcatttataggg

SEQ ID NO: 1970560 - DNA, 25 bp, Homo sapien
tattccttcgcccaagtgctgacgt

SEQ ID NO: 1970561 - DNA, 25 bp, Homo sapien
tacgtgcctgccctccgaggatgta

SEQ ID NO: 1970562 - DNA, 25 bp, Homo sapien
gcctccccgacaggctacgtgcctg

SEQ ID NO: 1970563 - DNA, 25 bp, Homo sapien
acccttgtctttatctatgttccag

SEQ ID NO: 1970564 - DNA, 25 bp, Homo sapien
gaactctcttctagcccatatcaca

SEQ ID NO: 1970565 - DNA, 25 bp, Homo sapien
gtttgtgagtggtatggtggctgca

SEQ ID NO: 1970566 - DNA, 25 bp, Homo sapien
gtgagtggtatggtggctgcagagg

SEQ ID NO: 1970567 - DNA, 25 bp, Homo sapien
ctgcagagggcaaggccctggccat

SEQ ID NO: 1970568 - DNA, 25 bp, Homo sapien
tggtatggtggctgcagagggcaag

SEQ ID NO: 1970569 - DNA, 25 bp, Homo sapien
gtgtagacgatcccagctccccggg

SEQ ID NO: 1970570 - DNA, 25 bp, Homo sapien
acgacttcctgacagcttccttggg

SEQ ID NO: 1970571 - DNA, 25 bp, Homo sapien
ggaacgacttcctgacagcttcctt

SEQ ID NO: 1970572 - DNA, 25 bp, Homo sapien
tgtagacgatcccagctccccgggc

SEQ ID NO: 1970573 - DNA, 25 bp, Homo sapien
tttctttcctcttagctctacagtt

SEQ ID NO: 1970574 - DNA, 25 bp, Homo sapien
cagtacagccggaaggagtatgccc

SEQ ID NO: 1970575 - DNA, 25 bp, Homo sapien
cattgtgccaccaagaagctctgga

SEQ ID NO: 1970576 - DNA, 25 bp, Homo sapien
cagaaagctcttagtgctgagtgca

SEQ ID NO: 1970577 - DNA, 25 bp, Homo sapien
catcccgtggaatcagcagtacagc

SEQ ID NO: 1970578 - DNA, 25 bp, Homo sapien
gaagatattacctcagacacctcca

SEQ ID NO: 1970579 - DNA, 25 bp, Homo sapien
aacaaaacggcattctcagagcacc

SEQ ID NO: 1970580 - DNA, 25 bp, Homo sapien
cattaggtgaccgatgatgccacag

SEQ ID NO: 1970581 - DNA, 25 bp, Homo sapien
gagttagtaagctgagtacaccgca

SEQ ID NO: 1970582 - DNA, 25 bp, Homo sapien
cagcttgtgtgccaaacactttgtt

SEQ ID NO: 1970583 - DNA, 25 bp, Homo sapien
cgtttaaaagctgggcagcaatgca

SEQ ID NO: 1970584 - DNA, 25 bp, Homo sapien
agcaatgcacaaaaagtctgcggga

SEQ ID NO: 1970585 - DNA, 25 bp, Homo sapien
gccaaacactttgttgccatttcca

SEQ ID NO: 1970586 - DNA, 25 bp, Homo sapien
tgatcaacaaaatggctggcctgta

SEQ ID NO: 1970587 - DNA, 25 bp, Homo sapien
cactcctaaagaagccacgcattac

SEQ ID NO: 1970588 - DNA, 25 bp, Homo sapien
gagtcactgttcaaaaccttcctgc

SEQ ID NO: 1970589 - DNA, 25 bp, Homo sapien
aatggtttctgagtgcccgctgctc

SEQ ID NO: 1970590 - DNA, 25 bp, Homo sapien
gagggaccgtttccagctacacagg

SEQ ID NO: 1970591 - DNA, 25 bp, Homo sapien
tattagcatagcacaatccactgcg

SEQ ID NO: 1970592 - DNA, 25 bp, Homo sapien
tctagaaaatcggagcagagctatc

SEQ ID NO: 1970593 - DNA, 25 bp, Homo sapien
gatcctcctatgaaaaccgaatggc

SEQ ID NO: 1970594 - DNA, 25 bp, Homo sapien
caggtcctgcagtacacgatcagta

SEQ ID NO: 1970595 - DNA, 25 bp, Homo sapien
gatggtttaccatcctcccaagtta

SEQ ID NO: 1970596 - DNA, 25 bp, Homo sapien
gatcagtagacatgcgctggtaaca

SEQ ID NO: 1970597 - DNA, 25 bp, Homo sapien
gaaagttgatgccacatcaggcaag

SEQ ID NO: 1970598 - DNA, 25 bp, Homo sapien
tggccacatccacatgaagaatgta

SEQ ID NO: 1970599 - DNA, 25 bp, Homo sapien
gaggagagataccagataggtttgc

SEQ ID NO: 1970600 - DNA, 25 bp, Homo sapien
ttcttaaccctagacagaataggtg

SEQ ID NO: 1970601 - DNA, 25 bp, Homo sapien
actctaccctccagcatgaacatga

SEQ ID NO: 1970602 - DNA, 25 bp, Homo sapien
ggatgacagccgtatctgagccgct

SEQ ID NO: 1970603 - DNA, 25 bp, Homo sapien
gaagctgtaacacctctatggtagg

SEQ ID NO: 1970604 - DNA, 25 bp, Homo sapien
atggcacccgggcactattcttggc

SEQ ID NO: 1970605 - DNA, 25 bp, Homo sapien
tattcttggccccatgacttggctt

SEQ ID NO: 1970606 - DNA, 25 bp, Homo sapien
cagttacaaccctagcaggcacagt

SEQ ID NO: 1970607 - DNA, 25 bp, Homo sapien
aaccctagcaggcacagtcaggcca

SEQ ID NO: 1970608 - DNA, 25 bp, Homo sapien
ttacaaccctagcaggcacagtcag

SEQ ID NO: 1970609 - DNA, 25 bp, Homo sapien
ccacagttacaaccctagcaggcac

SEQ ID NO: 1970610 - DNA, 25 bp, Homo sapien
tgtcatacccaagagcaacaatgcc

SEQ ID NO: 1970611 - DNA, 25 bp, Homo sapien
agagctcactaaccaccacctagag

SEQ ID NO: 1970612 - DNA, 25 bp, Homo sapien
tgacctgatgaccacacttaaagaa

SEQ ID NO: 1970613 - DNA, 25 bp, Homo sapien
cacacaataaatggtgggcatccta

SEQ ID NO: 1970614 - DNA, 25 bp, Homo sapien
catcttcatccatttcggcaaatca

SEQ ID NO: 1970615 - DNA, 25 bp, Homo sapien
ggtaatgctgttgaatctctcctga

SEQ ID NO: 1970616 - DNA, 25 bp, Homo sapien
tatactaatatgatccccttggcac

SEQ ID NO: 1970617 - DNA, 25 bp, Homo sapien
ctccttcttagtgatatcatatact

SEQ ID NO: 1970618 - DNA, 25 bp, Homo sapien
tatttccaactaagagaagctctgc

SEQ ID NO: 1970619 - DNA, 25 bp, Homo sapien
atttccaactaagagaagctctgca

SEQ ID NO: 1970620 - DNA, 25 bp, Homo sapien
tttccaactaagagaagctctgcat

SEQ ID NO: 1970621 - DNA, 25 bp, Homo sapien
ttatttccaactaagagaagctctg

SEQ ID NO: 1970622 - DNA, 25 bp, Homo sapien
tttccccctgctgcctggtgatttc

SEQ ID NO: 1970623 - DNA, 25 bp, Homo sapien
tgcctggtgatttctctgtccgttt

SEQ ID NO: 1970624 - DNA, 25 bp, Homo sapien
cctgctgcctggtgatttctctgtc

SEQ ID NO: 1970625 - DNA, 25 bp, Homo sapien
ctggtgatttctctgtccgtttcac

SEQ ID NO: 1970626 - DNA, 25 bp, Homo sapien
ccagcgtgcgagcatgaggtctctg

SEQ ID NO: 1970627 - DNA, 25 bp, Homo sapien
ggtagaaagtcccactgacgctcaa

SEQ ID NO: 1970628 - DNA, 25 bp, Homo sapien
cccactgacgctcaaagataaagtt

SEQ ID NO: 1970629 - DNA, 25 bp, Homo sapien
gcctcacagaccagcgtgcgagcat

SEQ ID NO: 1970630 - DNA, 25 bp, Homo sapien
gaagttatccttggcacttgcttca

SEQ ID NO: 1970631 - DNA, 25 bp, Homo sapien
tcgtccacattgaagttatccttgg

SEQ ID NO: 1970632 - DNA, 25 bp, Homo sapien
caaaaatatctcgtccacattgaag

SEQ ID NO: 1970633 - DNA, 25 bp, Homo sapien
cattgaagttatccttggcacttgc

SEQ ID NO: 1970634 - DNA, 25 bp, Homo sapien
aaaggtctctgtaaggaagtggctc

SEQ ID NO: 1970635 - DNA, 25 bp, Homo sapien
tatcttaaggcgaagcaagtatgcc

SEQ ID NO: 1970636 - DNA, 25 bp, Homo sapien
catacctggttcttgcgcctgagca

SEQ ID NO: 1970637 - DNA, 25 bp, Homo sapien
ccctgggtgggaaacggctacagca

SEQ ID NO: 1970638 - DNA, 25 bp, Homo sapien
tcaggctctggttgtaacgacagga

SEQ ID NO: 1970639 - DNA, 25 bp, Homo sapien
tattggacaactcattccttaaaat

SEQ ID NO: 1970640 - DNA, 25 bp, Homo sapien
tggaggcagttctggcggtatctca

SEQ ID NO: 1970641 - DNA, 25 bp, Homo sapien
tcaacagcatcggacatgtggtctt

SEQ ID NO: 1970642 - DNA, 25 bp, Homo sapien
tagaagtactaggtttcccagtgta

SEQ ID NO: 1970643 - DNA, 25 bp, Homo sapien
acttacccaggattgcatatatgca

SEQ ID NO: 1970644 - DNA, 25 bp, Homo sapien
aataaccttccatgacggccatgaa

SEQ ID NO: 1970645 - DNA, 25 bp, Homo sapien
gaatggagctttgcttcgtggcaga

SEQ ID NO: 1970646 - DNA, 25 bp, Homo sapien
gaacacagtctaggcttaatcagaa

SEQ ID NO: 1970647 - DNA, 25 bp, Homo sapien
accttgactaaacaaaacagtgcag

SEQ ID NO: 1970648 - DNA, 25 bp, Homo sapien
caggatttgtttaggacagcagcgt

SEQ ID NO: 1970649 - DNA, 25 bp, Homo sapien
cacttcattagtgtagaaagaccac

SEQ ID NO: 1970650 - DNA, 25 bp, Homo sapien
gcaggcagctaagctattgcatggg

SEQ ID NO: 1970651 - DNA, 25 bp, Homo sapien
aaggagcttcaagtgtatgtaggac

SEQ ID NO: 1970652 - DNA, 25 bp, Homo sapien
gcttcaagtgtatgtaggaccttac

SEQ ID NO: 1970653 - DNA, 25 bp, Homo sapien
gcctggcaggcagctaagctattgc

SEQ ID NO: 1970654 - DNA, 25 bp, Homo sapien
gacttggcaggttgctagttgccat

SEQ ID NO: 1970655 - DNA, 25 bp, Homo sapien
ctgacttggcaggttgctagttgcc

SEQ ID NO: 1970656 - DNA, 25 bp, Homo sapien
tgacttggcaggttgctagttgcca

SEQ ID NO: 1970657 - DNA, 25 bp, Homo sapien
tcggctgctggaccaatgcccaagg

SEQ ID NO: 1970658 - DNA, 25 bp, Homo sapien
gtcggctgctggaccaatgcccaag

SEQ ID NO: 1970659 - DNA, 25 bp, Homo sapien
ggtcggctgctggaccaatgcccaa

SEQ ID NO: 1970660 - DNA, 25 bp, Homo sapien
ctaggacgatgaaggcgctaccgaa

SEQ ID NO: 1970661 - DNA, 25 bp, Homo sapien
gatccttctaggacgatgaaggcgc

SEQ ID NO: 1970662 - DNA, 25 bp, Homo sapien
ccgaagggggtcgtttcatacagtg

SEQ ID NO: 1970663 - DNA, 25 bp, Homo sapien
ctggcaggatccttctaggacgatg

SEQ ID NO: 1970664 - DNA, 25 bp, Homo sapien
ttatctgagctggaacggacgcgcc

SEQ ID NO: 1970665 - DNA, 25 bp, Homo sapien
aatcttgaaagccaagggcctgctt

SEQ ID NO: 1970666 - DNA, 25 bp, Homo sapien
agggcttgtgctcccggcgaactct

SEQ ID NO: 1970667 - DNA, 25 bp, Homo sapien
gacgcgcctgcaagcttcggtggcc

SEQ ID NO: 1970668 - DNA, 25 bp, Homo sapien
tttctgtcctctggcgaggtcaccc

SEQ ID NO: 1970669 - DNA, 25 bp, Homo sapien
gtcctctggcgaggtcacccgaagc

SEQ ID NO: 1970670 - DNA, 25 bp, Homo sapien
ggaccgggcaccctcattcagcagc

SEQ ID NO: 1970671 - DNA, 25 bp, Homo sapien
accgggcaccctcattcagcagcag

SEQ ID NO: 1970672 - DNA, 25 bp, Homo sapien
gacaagttagcaaggccagttgcag

SEQ ID NO: 1970673 - DNA, 25 bp, Homo sapien
cattgagtgccctcttctgctgagc

SEQ ID NO: 1970674 - DNA, 25 bp, Homo sapien
agacagcgagtgaggacgccaggga

SEQ ID NO: 1970675 - DNA, 25 bp, Homo sapien
tgctctcaagggcattgagtgccct

SEQ ID NO: 1970676 - DNA, 25 bp, Homo sapien
gatcctgtggcaacatgtgcatccc

SEQ ID NO: 1970677 - DNA, 25 bp, Homo sapien
tcctgtggcaacatgtgcatcccct

SEQ ID NO: 1970678 - DNA, 25 bp, Homo sapien
ttgatcctgtggcaacatgtgcatc

SEQ ID NO: 1970679 - DNA, 25 bp, Homo sapien
gtggcaacatgtgcatcccctcagg

SEQ ID NO: 1970680 - DNA, 25 bp, Homo sapien
cacctagggaagtcacagccctcac

SEQ ID NO: 1970681 - DNA, 25 bp, Homo sapien
agcctcgggagcgttctctgagcac

SEQ ID NO: 1970682 - DNA, 25 bp, Homo sapien
ctcgggagcgttctctgagcaccta

SEQ ID NO: 1970683 - DNA, 25 bp, Homo sapien
tcagcctcgggagcgttctctgagc

SEQ ID NO: 1970684 - DNA, 25 bp, Homo sapien
gtttctgctcctgagccctgctggg

SEQ ID NO: 1970685 - DNA, 25 bp, Homo sapien
ctgggtgcatctggccggtttctgc

SEQ ID NO: 1970686 - DNA, 25 bp, Homo sapien
tctgcttgctgggtgcatctggccg

SEQ ID NO: 1970687 - DNA, 25 bp, Homo sapien
ccaggtctgcttgaggctgtcctcc

SEQ ID NO: 1970688 - DNA, 25 bp, Homo sapien
gcacccttgacttcactgtggcagg

SEQ ID NO: 1970689 - DNA, 25 bp, Homo sapien
tcagggcgcctgcaaagttcacgag

SEQ ID NO: 1970690 - DNA, 25 bp, Homo sapien
gagtctgcaataagacagtgtcaac

SEQ ID NO: 1970691 - DNA, 25 bp, Homo sapien
gcaaagttcacgagcacccttgact

SEQ ID NO: 1970692 - DNA, 25 bp, Homo sapien
tctgcatggacttgtggcccctcac

SEQ ID NO: 1970693 - DNA, 25 bp, Homo sapien
ttctgcatggacttgtggcccctca

SEQ ID NO: 1970694 - DNA, 25 bp, Homo sapien
cttctgcatggacttgtggcccctc

SEQ ID NO: 1970695 - DNA, 25 bp, Homo sapien
cattgtccccgagctaaacgtgtca

SEQ ID NO: 1970696 - DNA, 25 bp, Homo sapien
tggctaacaactgcaagcaaatctg

SEQ ID NO: 1970697 - DNA, 25 bp, Homo sapien
acttgctcgggcacgttcgctgtga

SEQ ID NO: 1970698 - DNA, 25 bp, Homo sapien
aaacgtgtcagcaggagatcagctt

SEQ ID NO: 1970699 - DNA, 25 bp, Homo sapien
gacctcagccgaaatctcaacaaac

SEQ ID NO: 1970700 - DNA, 25 bp, Homo sapien
cagccgaaatctcaacaaacctcat

SEQ ID NO: 1970701 - DNA, 25 bp, Homo sapien
agattgacctcagccgaaatctcaa

SEQ ID NO: 1970702 - DNA, 25 bp, Homo sapien
tcagccgaaatctcaacaaacctca

SEQ ID NO: 1970703 - DNA, 25 bp, Homo sapien
cgaaaaagtgtaggagaaagctgaa

SEQ ID NO: 1970704 - DNA, 25 bp, Homo sapien
aatacccagtgctcagttttgaaaa

SEQ ID NO: 1970705 - DNA, 25 bp, Homo sapien
taggcgaaaaagtgtaggagaaagc

SEQ ID NO: 1970706 - DNA, 25 bp, Homo sapien
taggagaaagctgaagaatgcacat

SEQ ID NO: 1970707 - DNA, 25 bp, Homo sapien
ctggcgtcaccgcacagcttgggag

SEQ ID NO: 1970708 - DNA, 25 bp, Homo sapien
tttcaggataagtctcacagcagca

SEQ ID NO: 1970709 - DNA, 25 bp, Homo sapien
gcctttgccgtaggaaccagcacat

SEQ ID NO: 1970710 - DNA, 25 bp, Homo sapien
cgtttctcctgcacgaataaccaca

SEQ ID NO: 1970711 - DNA, 25 bp, Homo sapien
ggccaggagcatgagcctgaaattc

SEQ ID NO: 1970712 - DNA, 25 bp, Homo sapien
tgttctgatcgagactctgatccaa

SEQ ID NO: 1970713 - DNA, 25 bp, Homo sapien
ctcccaggagctatgttctgatcga

SEQ ID NO: 1970714 - DNA, 25 bp, Homo sapien
ggagcatgagcctgaaattctaaca

SEQ ID NO: 1970715 - DNA, 25 bp, Homo sapien
caaaataagggtatgtttacatgga

SEQ ID NO: 1970716 - DNA, 25 bp, Homo sapien
tagaaccatggatttacagaaggtt

SEQ ID NO: 1970717 - DNA, 25 bp, Homo sapien
gttccatagcagcaaataacagtgc

SEQ ID NO: 1970718 - DNA, 25 bp, Homo sapien
aataagggtatgtttacatggaaag

SEQ ID NO: 1970719 - DNA, 25 bp, Homo sapien
tggaaggaagtctggctttccagcc

SEQ ID NO: 1970720 - DNA, 25 bp, Homo sapien
aaggaagtctggctttccagcccaa

SEQ ID NO: 1970721 - DNA, 25 bp, Homo sapien
ctgtctggaaggaagtctggctttc

SEQ ID NO: 1970722 - DNA, 25 bp, Homo sapien
ggaagtctggctttccagcccaact

SEQ ID NO: 1970723 - DNA, 25 bp, Homo sapien
cccctggcatctggcaacattatta

SEQ ID NO: 1970724 - DNA, 25 bp, Homo sapien
gcccgaacccctggcatctggcaac

SEQ ID NO: 1970725 - DNA, 25 bp, Homo sapien
aacccctggcatctggcaacattat

SEQ ID NO: 1970726 - DNA, 25 bp, Homo sapien
cgaacccctggcatctggcaacatt

SEQ ID NO: 1970727 - DNA, 25 bp, Homo sapien
tagagagtcccaacctaaggtgtgc

SEQ ID NO: 1970728 - DNA, 25 bp, Homo sapien
tggatatttgctcacttaaatctga

SEQ ID NO: 1970729 - DNA, 25 bp, Homo sapien
tctatgcatgtgagatgctgggtga

SEQ ID NO: 1970730 - DNA, 25 bp, Homo sapien
taaggtgtgctctagagtctgctgg

SEQ ID NO: 1970731 - DNA, 25 bp, Homo sapien
gggcactgagacctcgcctgctctg

SEQ ID NO: 1970732 - DNA, 25 bp, Homo sapien
ctgttgtggtctttgtgagtcgttt

SEQ ID NO: 1970733 - DNA, 25 bp, Homo sapien
gagccctgccccgaagtcgtcctgc

SEQ ID NO: 1970734 - DNA, 25 bp, Homo sapien
tgtgagtcgtttttctgggaatgcc

SEQ ID NO: 1970735 - DNA, 25 bp, Homo sapien
aggatcgctggtacccgacgcagct

SEQ ID NO: 1970736 - DNA, 25 bp, Homo sapien
tttaaggatcgctggtacccgacgc

SEQ ID NO: 1970737 - DNA, 25 bp, Homo sapien
tcctttaaggatcgctggtacccga

SEQ ID NO: 1970738 - DNA, 25 bp, Homo sapien
gagctcctttaaggatcgctggtac

SEQ ID NO: 1970739 - DNA, 25 bp, Homo sapien
ccttgctttttgaggccctagagac

SEQ ID NO: 1970740 - DNA, 25 bp, Homo sapien
tgaggccctagagacgctgccagga

SEQ ID NO: 1970741 - DNA, 25 bp, Homo sapien
tttgaggccctagagacgctgccag

SEQ ID NO: 1970742 - DNA, 25 bp, Homo sapien
ctttttgaggccctagagacgctgc

SEQ ID NO: 1970743 - DNA, 25 bp, Homo sapien
gcgcgccccacctccccgccgccca

SEQ ID NO: 1970744 - DNA, 25 bp, Homo sapien
cgccctcgcccaggcccgtgcgcat

SEQ ID NO: 1970745 - DNA, 25 bp, Homo sapien
agcgccctcgcccaggcccgtgcgc

SEQ ID NO: 1970746 - DNA, 25 bp, Homo sapien
gcccagcgccctcgcccaggcccgt

SEQ ID NO: 1970747 - DNA, 25 bp, Homo sapien
tgcagcttcgcgtccggggcacctc

SEQ ID NO: 1970748 - DNA, 25 bp, Homo sapien
ctccgcccgcggggccgttcagtgt

SEQ ID NO: 1970749 - DNA, 25 bp, Homo sapien
tcgcgtccggggcacctccgcccgc

SEQ ID NO: 1970750 - DNA, 25 bp, Homo sapien
ccgcggggccgttcagtgtctccat

SEQ ID NO: 1970751 - DNA, 25 bp, Homo sapien
cagccgccgcctttcggccaccggg

SEQ ID NO: 1970752 - DNA, 25 bp, Homo sapien
ttgcccgcgaggttgggcgagcgcg

SEQ ID NO: 1970753 - DNA, 25 bp, Homo sapien
tcaccgcgagggtcacggcagggat

SEQ ID NO: 1970754 - DNA, 25 bp, Homo sapien
tttgcggcccttggcagcggcagac

SEQ ID NO: 1970755 - DNA, 25 bp, Homo sapien
aggtccttgaggaagggtctggcgg

SEQ ID NO: 1970756 - DNA, 25 bp, Homo sapien
cgaaaccccgctcgggatgctccgg

SEQ ID NO: 1970757 - DNA, 25 bp, Homo sapien
gagaggtcggagctgctgtccgtgt

SEQ ID NO: 1970758 - DNA, 25 bp, Homo sapien
agcccgtgccggattcggcgtcgct

SEQ ID NO: 1970759 - DNA, 25 bp, Homo sapien
gggactggtcgctccggtggcgagc

SEQ ID NO: 1970760 - DNA, 25 bp, Homo sapien
cttgagatagtcgttctccgagcgc

SEQ ID NO: 1970761 - DNA, 25 bp, Homo sapien
tgagatagtcgttctccgagcgcag

SEQ ID NO: 1970762 - DNA, 25 bp, Homo sapien
gatagtcgttctccgagcgcagctc

SEQ ID NO: 1970763 - DNA, 25 bp, Homo sapien
gagatagtcgttctccgagcgcagc

SEQ ID NO: 1970764 - DNA, 25 bp, Homo sapien
ttcagcttgctcaccgaaaacggcg

SEQ ID NO: 1970765 - DNA, 25 bp, Homo sapien
gctccctggcgaaggatcacctgtt

SEQ ID NO: 1970766 - DNA, 25 bp, Homo sapien
tctacccgggatgtcggagcccagg

SEQ ID NO: 1970767 - DNA, 25 bp, Homo sapien
cagctctttccgtaattgcaggaga

SEQ ID NO: 1970768 - DNA, 25 bp, Homo sapien
gagtaaacggatgcaagtgacacct

SEQ ID NO: 1970769 - DNA, 25 bp, Homo sapien
tgcatacacgcaatcatctggtttg

SEQ ID NO: 1970770 - DNA, 25 bp, Homo sapien
ctcccctgctgtcggaggaacagtg

SEQ ID NO: 1970771 - DNA, 25 bp, Homo sapien
agtccccacaactgaaacactggca

SEQ ID NO: 1970772 - DNA, 25 bp, Homo sapien
cttctgagtggccaaatgagtacct

SEQ ID NO: 1970773 - DNA, 25 bp, Homo sapien
tctgggcccaattttgcacatgtgg

SEQ ID NO: 1970774 - DNA, 25 bp, Homo sapien
taggatccctgcgtttccttcccga

SEQ ID NO: 1970775 - DNA, 25 bp, Homo sapien
tgggcaggctccacgacctgtagaa

SEQ ID NO: 1970776 - DNA, 25 bp, Homo sapien
atatggcaactcatcccccaatcca

SEQ ID NO: 1970777 - DNA, 25 bp, Homo sapien
cagatatggcaactcatcccccaat

SEQ ID NO: 1970778 - DNA, 25 bp, Homo sapien
agatatggcaactcatcccccaatc

SEQ ID NO: 1970779 - DNA, 25 bp, Homo sapien
ctgcacacaatggtctactggaaag

SEQ ID NO: 1970780 - DNA, 25 bp, Homo sapien
ttgcagcccagtgatgaaagcttct

SEQ ID NO: 1970781 - DNA, 25 bp, Homo sapien
gactaacatcagacacaactgcacg

SEQ ID NO: 1970782 - DNA, 25 bp, Homo sapien
caccaagtcagaaaggcgactaaca

SEQ ID NO: 1970783 - DNA, 25 bp, Homo sapien
caactgcacgctcgctttgttccag

SEQ ID NO: 1970784 - DNA, 25 bp, Homo sapien
ttgcttcttcaggcctcaagacctc

SEQ ID NO: 1970785 - DNA, 25 bp, Homo sapien
ttcttcaggcctcaagacctcgcct

SEQ ID NO: 1970786 - DNA, 25 bp, Homo sapien
aggcctcaagacctcgcctgctatt

SEQ ID NO: 1970787 - DNA, 25 bp, Homo sapien
gacctcgcctgctattcccacttct

SEQ ID NO: 1970788 - DNA, 25 bp, Homo sapien
gcatctcagcattgactaagcgacg

SEQ ID NO: 1970789 - DNA, 25 bp, Homo sapien
attctgttccacaagacgcatctca

SEQ ID NO: 1970790 - DNA, 25 bp, Homo sapien
ttccacaagacgcatctcagcattg

SEQ ID NO: 1970791 - DNA, 25 bp, Homo sapien
aagacgcatctcagcattgactaag

SEQ ID NO: 1970792 - DNA, 25 bp, Homo sapien
ctcagcacggagttcatctaactca

SEQ ID NO: 1970793 - DNA, 25 bp, Homo sapien
tcagcacggagttcatctaactcat

SEQ ID NO: 1970794 - DNA, 25 bp, Homo sapien
cagcacggagttcatctaactcatc

SEQ ID NO: 1970795 - DNA, 25 bp, Homo sapien
tcctgctccaggcttcgaataagct

SEQ ID NO: 1970796 - DNA, 25 bp, Homo sapien
gaagacggtactgcaggattcggca

SEQ ID NO: 1970797 - DNA, 25 bp, Homo sapien
tcggcagtttttattagcgcggtcc

SEQ ID NO: 1970798 - DNA, 25 bp, Homo sapien
caggcttttctgctcggctttccga

SEQ ID NO: 1970799 - DNA, 25 bp, Homo sapien
gagggcctgtttggatatttccact

SEQ ID NO: 1970800 - DNA, 25 bp, Homo sapien
taagttcgtggtgcaatctgacaga

SEQ ID NO: 1970801 - DNA, 25 bp, Homo sapien
cacttcaatcatctgctgtcggaga

SEQ ID NO: 1970802 - DNA, 25 bp, Homo sapien
tcatcctcagctttagcgcgctttt

SEQ ID NO: 1970803 - DNA, 25 bp, Homo sapien
aattagaggacaaattcctcgagtc

SEQ ID NO: 1970804 - DNA, 25 bp, Homo sapien
gcttatcactaaccaaacaggccaa

SEQ ID NO: 1970805 - DNA, 25 bp, Homo sapien
tgggcgagactgcacaggaaataaa

SEQ ID NO: 1970806 - DNA, 25 bp, Homo sapien
agttgatgaacagaagcggcttcgc

SEQ ID NO: 1970807 - DNA, 25 bp, Homo sapien
aacaggccaatttcatgactcacag

SEQ ID NO: 1970808 - DNA, 25 bp, Homo sapien
tctctggggcttattctcaggtcag

SEQ ID NO: 1970809 - DNA, 25 bp, Homo sapien
cagaattcaagtgctgcctgattac

SEQ ID NO: 1970810 - DNA, 25 bp, Homo sapien
gggcttattctcaggtcagaattca

SEQ ID NO: 1970811 - DNA, 25 bp, Homo sapien
tcagaattcaagtgctgcctgatta

SEQ ID NO: 1970812 - DNA, 25 bp, Homo sapien
tgtgttctaccacccctagagcagc

SEQ ID NO: 1970813 - DNA, 25 bp, Homo sapien
gaaaatgtgttctaccacccctaga

SEQ ID NO: 1970814 - DNA, 25 bp, Homo sapien
ggaaggacaggtcagagaccaccca

SEQ ID NO: 1970815 - DNA, 25 bp, Homo sapien
cccacattccggcaagggttcctgt

SEQ ID NO: 1970816 - DNA, 25 bp, Homo sapien
ccactcttccttgcgaaaaacaagc

SEQ ID NO: 1970817 - DNA, 25 bp, Homo sapien
tcttccttgcgaaaaacaagctctt

SEQ ID NO: 1970818 - DNA, 25 bp, Homo sapien
actcttccttgcgaaaaacaagctc

SEQ ID NO: 1970819 - DNA, 25 bp, Homo sapien
gacccactcttccttgcgaaaaaca

SEQ ID NO: 1970820 - DNA, 25 bp, Homo sapien
tctccaaaaagctgaccatctctga

SEQ ID NO: 1970821 - DNA, 25 bp, Homo sapien
tccagaccacaagaggcatggtgtg

SEQ ID NO: 1970822 - DNA, 25 bp, Homo sapien
ggtgtccagaccacaagaggcatgg

SEQ ID NO: 1970823 - DNA, 25 bp, Homo sapien
gtggtgtccagaccacaagaggcat

SEQ ID NO: 1970824 - DNA, 25 bp, Homo sapien
acagagcttaggtgtgtgggtgaca

SEQ ID NO: 1970825 - DNA, 25 bp, Homo sapien
gtgaggtctgggcacctcagttcag

SEQ ID NO: 1970826 - DNA, 25 bp, Homo sapien
cagttcagtgcaggcagagagacta

SEQ ID NO: 1970827 - DNA, 25 bp, Homo sapien
gacggaagaccaggggcaccaacat

SEQ ID NO: 1970828 - DNA, 25 bp, Homo sapien
agtgaggcggccacaagcagttctg

SEQ ID NO: 1970829 - DNA, 25 bp, Homo sapien
cggcagcatcatgtgctagcagagt

SEQ ID NO: 1970830 - DNA, 25 bp, Homo sapien
tttgacggcagcatcatgtgctagc

SEQ ID NO: 1970831 - DNA, 25 bp, Homo sapien
gacggcagcatcatgtgctagcaga

SEQ ID NO: 1970832 - DNA, 25 bp, Homo sapien
gcagcatcatgtgctagcagagtga

SEQ ID NO: 1970833 - DNA, 25 bp, Homo sapien
taaaagtagagatgatgtgtgccat

SEQ ID NO: 1970834 - DNA, 25 bp, Homo sapien
ctaaaagtagagatgatgtgtgcca

SEQ ID NO: 1970835 - DNA, 25 bp, Homo sapien
agagtgcatcgaacaccctgagcca

SEQ ID NO: 1970836 - DNA, 25 bp, Homo sapien
aatgctgctggctgatcgaaggctc

SEQ ID NO: 1970837 - DNA, 25 bp, Homo sapien
tgagccaggaccctagatccatgtg

SEQ ID NO: 1970838 - DNA, 25 bp, Homo sapien
gatgctgcataagaagggatgtccc

SEQ ID NO: 1970839 - DNA, 25 bp, Homo sapien
tttcttctcacttaggccacggcca

SEQ ID NO: 1970840 - DNA, 25 bp, Homo sapien
tctgcccaagctcaggctctgcttt

SEQ ID NO: 1970841 - DNA, 25 bp, Homo sapien
tctctcgggcccaccattggatctg

SEQ ID NO: 1970842 - DNA, 25 bp, Homo sapien
cagcctctccactggctctgtcttc

SEQ ID NO: 1970843 - DNA, 25 bp, Homo sapien
tgttgacttgattggactatattct

SEQ ID NO: 1970844 - DNA, 25 bp, Homo sapien
gaacattctgttgacttgattggac

SEQ ID NO: 1970845 - DNA, 25 bp, Homo sapien
tgtgaacattctgttgacttgattg

SEQ ID NO: 1970846 - DNA, 25 bp, Homo sapien
gccccactccctgtgaacattctgt

SEQ ID NO: 1970847 - DNA, 25 bp, Homo sapien
ttcttttctccaacaagtttgcctc

SEQ ID NO: 1970848 - DNA, 25 bp, Homo sapien
acaagtttgcctctctccttcaaca

SEQ ID NO: 1970849 - DNA, 25 bp, Homo sapien
aacaagtttgcctctctccttcaac

SEQ ID NO: 1970850 - DNA, 25 bp, Homo sapien
tttctccaacaagtttgcctctctc

SEQ ID NO: 1970851 - DNA, 25 bp, Homo sapien
gttccacggtgctaatgctgctccc

SEQ ID NO: 1970852 - DNA, 25 bp, Homo sapien
gggactggggccttagacaacgaca

SEQ ID NO: 1970853 - DNA, 25 bp, Homo sapien
gctgctcccctcactcatcactagg

SEQ ID NO: 1970854 - DNA, 25 bp, Homo sapien
catcactagggtgtctgcagtgccc

SEQ ID NO: 1970855 - DNA, 25 bp, Homo sapien
accgctctcgcgttccagatggaca

SEQ ID NO: 1970856 - DNA, 25 bp, Homo sapien
tacagctggagtcgcttctgaccta

SEQ ID NO: 1970857 - DNA, 25 bp, Homo sapien
atgaggtgagcccatgttccagaag

SEQ ID NO: 1970858 - DNA, 25 bp, Homo sapien
tactttacagcatagccccgatgtg

SEQ ID NO: 1970859 - DNA, 25 bp, Homo sapien
caaagacaggcgagtactgccttta

SEQ ID NO: 1970860 - DNA, 25 bp, Homo sapien
gggcatcactgtgcaatctatgatt

SEQ ID NO: 1970861 - DNA, 25 bp, Homo sapien
aagaagcaaagacaggcgagtactg

SEQ ID NO: 1970862 - DNA, 25 bp, Homo sapien
caatctatgatttattgcaccttcc

SEQ ID NO: 1970863 - DNA, 25 bp, Homo sapien
ccacttccacggctgtccctttctt

SEQ ID NO: 1970864 - DNA, 25 bp, Homo sapien
tggtaactcctggtttcagttctgt

SEQ ID NO: 1970865 - DNA, 25 bp, Homo sapien
cctggtaactcctggtttcagttct

SEQ ID NO: 1970866 - DNA, 25 bp, Homo sapien
ctggtaactcctggtttcagttctg

SEQ ID NO: 1970867 - DNA, 25 bp, Homo sapien
cacaagttcaagctttgaggcagcc

SEQ ID NO: 1970868 - DNA, 25 bp, Homo sapien
agttcaagctttgaggcagccccat

SEQ ID NO: 1970869 - DNA, 25 bp, Homo sapien
gttcttcttgccacaagttcaagct

SEQ ID NO: 1970870 - DNA, 25 bp, Homo sapien
caagttcaagctttgaggcagcccc

SEQ ID NO: 1970871 - DNA, 25 bp, Homo sapien
ctccaccccgctcacaggctgcatc

SEQ ID NO: 1970872 - DNA, 25 bp, Homo sapien
catcaaccttcctagggcacacagg

SEQ ID NO: 1970873 - DNA, 25 bp, Homo sapien
ccaccccgctcacaggctgcatcaa

SEQ ID NO: 1970874 - DNA, 25 bp, Homo sapien
tccaccccgctcacaggctgcatca

SEQ ID NO: 1970875 - DNA, 25 bp, Homo sapien
tgagtgtgtctctggcatagttgcc

SEQ ID NO: 1970876 - DNA, 25 bp, Homo sapien
ggcagagcgtgagtgtgtctctggc

SEQ ID NO: 1970877 - DNA, 25 bp, Homo sapien
gagtgtgtctctggcatagttgccc

SEQ ID NO: 1970878 - DNA, 25 bp, Homo sapien
tgtctctggcatagttgccccagct

SEQ ID NO: 1970879 - DNA, 25 bp, Homo sapien
tgtgtgcattattcagacttgtggc

SEQ ID NO: 1970880 - DNA, 25 bp, Homo sapien
cctcctgtgggtacataagggtgaa

SEQ ID NO: 1970881 - DNA, 25 bp, Homo sapien
catttgtgcaatcaggctggactct

SEQ ID NO: 1970882 - DNA, 25 bp, Homo sapien
gcattgtgtcgggatggctcctcct

SEQ ID NO: 1970883 - DNA, 25 bp, Homo sapien
tcatgttttgtcttctaaatgacac

SEQ ID NO: 1970884 - DNA, 25 bp, Homo sapien
cttctaaatgacaccaatctatgac

SEQ ID NO: 1970885 - DNA, 25 bp, Homo sapien
catgttttgtcttctaaatgacacc

SEQ ID NO: 1970886 - DNA, 25 bp, Homo sapien
ttgtcttctaaatgacaccaatcta

SEQ ID NO: 1970887 - DNA, 25 bp, Homo sapien
accagggcacagagcctacacagtg

SEQ ID NO: 1970888 - DNA, 25 bp, Homo sapien
cactgcagcctttcaacagctaaag

SEQ ID NO: 1970889 - DNA, 25 bp, Homo sapien
cagacctccgacaactcatgcttca

SEQ ID NO: 1970890 - DNA, 25 bp, Homo sapien
agctaaagctatcgtctgcaagtcc

SEQ ID NO: 1970891 - DNA, 25 bp, Homo sapien
atgaacaagcttcccctaaaaggca

SEQ ID NO: 1970892 - DNA, 25 bp, Homo sapien
gaacaatacccagcccttggactaa

SEQ ID NO: 1970893 - DNA, 25 bp, Homo sapien
cattgcagacaatgttgaaaagcag

SEQ ID NO: 1970894 - DNA, 25 bp, Homo sapien
caaaacagccatggtttcatgtgat

SEQ ID NO: 1970895 - DNA, 25 bp, Homo sapien
caagagactcttccactagggaggc

SEQ ID NO: 1970896 - DNA, 25 bp, Homo sapien
caatggaattgacctagcgtaatgc

SEQ ID NO: 1970897 - DNA, 25 bp, Homo sapien
ctaggatccttgctatctggagcca

SEQ ID NO: 1970898 - DNA, 25 bp, Homo sapien
ggaggcctaataacaccctgtccga

SEQ ID NO: 1970899 - DNA, 25 bp, Homo sapien
ccttttagcctgatcaattgccagc

SEQ ID NO: 1970900 - DNA, 25 bp, Homo sapien
gggaacaggtaaatgcagactatta

SEQ ID NO: 1970901 - DNA, 25 bp, Homo sapien
aaagctgatgccttgctgagtactg

SEQ ID NO: 1970902 - DNA, 25 bp, Homo sapien
gagagccagtggagagtctcttcca

SEQ ID NO: 1970903 - DNA, 25 bp, Homo sapien
aagtgtccacgggtgcaggacaatt

SEQ ID NO: 1970904 - DNA, 25 bp, Homo sapien
tgccaccggactctgggtgaagtgt

SEQ ID NO: 1970905 - DNA, 25 bp, Homo sapien
ggacaatttgcgtgtacattagtca

SEQ ID NO: 1970906 - DNA, 25 bp, Homo sapien
cagggtctcgtccagtgtagcgtgc

SEQ ID NO: 1970907 - DNA, 25 bp, Homo sapien
caggcatatggtcccctggccaagt

SEQ ID NO: 1970908 - DNA, 25 bp, Homo sapien
tcagcttggtccttcgaatatagcc

SEQ ID NO: 1970909 - DNA, 25 bp, Homo sapien
gtcatgaggaacaatcactgtgcct

SEQ ID NO: 1970910 - DNA, 25 bp, Homo sapien
tggccaagtgccaagcagtcatgag

SEQ ID NO: 1970911 - DNA, 25 bp, Homo sapien
gtacatttcccgagtgcttcttctt

SEQ ID NO: 1970912 - DNA, 25 bp, Homo sapien
tacatttcccgagtgcttcttcttt

SEQ ID NO: 1970913 - DNA, 25 bp, Homo sapien
aacagaaactccttcctcaataatc

SEQ ID NO: 1970914 - DNA, 25 bp, Homo sapien
actccttcctcaataatcccaccgg

SEQ ID NO: 1970915 - DNA, 25 bp, Homo sapien
agaaactccttcctcaataatccca

SEQ ID NO: 1970916 - DNA, 25 bp, Homo sapien
ctgaacagaaactccttcctcaata

SEQ ID NO: 1970917 - DNA, 25 bp, Homo sapien
tgggttttggttgcgggcctgcagt

SEQ ID NO: 1970918 - DNA, 25 bp, Homo sapien
tttgggttttggttgcgggcctgca

SEQ ID NO: 1970919 - DNA, 25 bp, Homo sapien
ttgggttttggttgcgggcctgcag

SEQ ID NO: 1970920 - DNA, 25 bp, Homo sapien
ctgcagttcccagggcgctccattc

SEQ ID NO: 1970921 - DNA, 25 bp, Homo sapien
ataaaatgtccaaaacgtcttctcg

SEQ ID NO: 1970922 - DNA, 25 bp, Homo sapien
atgtccaaaacgtcttctcgttcct

SEQ ID NO: 1970923 - DNA, 25 bp, Homo sapien
tgaggattgataaaatgtccaaaac

SEQ ID NO: 1970924 - DNA, 25 bp, Homo sapien
ttgataaaatgtccaaaacgtcttc

SEQ ID NO: 1970925 - DNA, 25 bp, Homo sapien
gaacaattctcctccgtctccatga

SEQ ID NO: 1970926 - DNA, 25 bp, Homo sapien
cgctggaggttatacgtgcttatct

SEQ ID NO: 1970927 - DNA, 25 bp, Homo sapien
tctgaagggtcctgaaacacgctgg

SEQ ID NO: 1970928 - DNA, 25 bp, Homo sapien
gttaaagcagcaagatcctatgaca

SEQ ID NO: 1970929 - DNA, 25 bp, Homo sapien
ccaacacctacgaccaagtgtgcag

SEQ ID NO: 1970930 - DNA, 25 bp, Homo sapien
gccacagggaaagcttgccctggcg

SEQ ID NO: 1970931 - DNA, 25 bp, Homo sapien
gctatctgtgcgtcctcgggaggat

SEQ ID NO: 1970932 - DNA, 25 bp, Homo sapien
gggaggatgacacgcccactgtcat

SEQ ID NO: 1970933 - DNA, 25 bp, Homo sapien
gaagccagatgaactccccgttttg

SEQ ID NO: 1970934 - DNA, 25 bp, Homo sapien
gcttggctgaggtcaaaacggcact

SEQ ID NO: 1970935 - DNA, 25 bp, Homo sapien
ggtccagtggaaagtcaacgctgct

SEQ ID NO: 1970936 - DNA, 25 bp, Homo sapien
tgtcgccccttctgtggaacaagtc

SEQ ID NO: 1970937 - DNA, 25 bp, Homo sapien
gcactcaccacctccaacgtgcaga

SEQ ID NO: 1970938 - DNA, 25 bp, Homo sapien
gcaggacccctcaccaaggcctggt

SEQ ID NO: 1970939 - DNA, 25 bp, Homo sapien
aacgtgcagacctccctctttcaaa

SEQ ID NO: 1970940 - DNA, 25 bp, Homo sapien
caaagtggcccacaatccacaaggt

SEQ ID NO: 1970941 - DNA, 25 bp, Homo sapien
ccatagagggacttgtacttctgga

SEQ ID NO: 1970942 - DNA, 25 bp, Homo sapien
tcccttcctagcttggccatctttt

SEQ ID NO: 1970943 - DNA, 25 bp, Homo sapien
catctttttgcgcatcaggaaggct

SEQ ID NO: 1970944 - DNA, 25 bp, Homo sapien
ggagctggcacctcaaatcggcact

SEQ ID NO: 1970945 - DNA, 25 bp, Homo sapien
tagggtcactaggtactcagagtcc

SEQ ID NO: 1970946 - DNA, 25 bp, Homo sapien
gcagtttgagcaccttgccgctgag

SEQ ID NO: 1970947 - DNA, 25 bp, Homo sapien
tgttggacagcagcgcgtggttctc

SEQ ID NO: 1970948 - DNA, 25 bp, Homo sapien
ctcttctacaaactgcaggtggcgg

SEQ ID NO: 1970949 - DNA, 25 bp, Homo sapien
gtcgagccctatcgcttccactggg

SEQ ID NO: 1970950 - DNA, 25 bp, Homo sapien
gaaacaaggcaatacaagagaactt

SEQ ID NO: 1970951 - DNA, 25 bp, Homo sapien
gggagggcctctaaaccatgagccg

SEQ ID NO: 1970952 - DNA, 25 bp, Homo sapien
ggttgagataccaagagaggagcaa

SEQ ID NO: 1970953 - DNA, 25 bp, Homo sapien
cacccaggaagggacgtgctcgtta

SEQ ID NO: 1970954 - DNA, 25 bp, Homo sapien
tgtgtcccttgaaacacacccagga

SEQ ID NO: 1970955 - DNA, 25 bp, Homo sapien
acatgcgtttgtcttagcctcctca

SEQ ID NO: 1970956 - DNA, 25 bp, Homo sapien
taattatcctgactgtgacatgcgt

SEQ ID NO: 1970957 - DNA, 25 bp, Homo sapien
gcccgctttggctgatcctccagtg

SEQ ID NO: 1970958 - DNA, 25 bp, Homo sapien
ctttggctgatcctccagtgggagt

SEQ ID NO: 1970959 - DNA, 25 bp, Homo sapien
gctaggacagcagtcctcggagacc

SEQ ID NO: 1970960 - DNA, 25 bp, Homo sapien
caggcgaggctaggacagcagtcct

SEQ ID NO: 1970961 - DNA, 25 bp, Homo sapien
cgcaagcacgctacccgtgaaggaa

SEQ ID NO: 1970962 - DNA, 25 bp, Homo sapien
gcacgctacccgtgaaggaaacgga

SEQ ID NO: 1970963 - DNA, 25 bp, Homo sapien
catgcgatggcgatgcgtgaatcca

SEQ ID NO: 1970964 - DNA, 25 bp, Homo sapien
tgaatccagaactcaaccgcaagca

SEQ ID NO: 1970965 - DNA, 25 bp, Homo sapien
agaaagtgggggtgcaaaacactgg

SEQ ID NO: 1970966 - DNA, 25 bp, Homo sapien
gagaaagtgggggtgcaaaacactg

SEQ ID NO: 1970967 - DNA, 25 bp, Homo sapien
tgagcaaaggggcgggtggacacat

SEQ ID NO: 1970968 - DNA, 25 bp, Homo sapien
ggatgagcaaaggggcgggtggaca

SEQ ID NO: 1970969 - DNA, 25 bp, Homo sapien
caagatgaggatgagcaaaggggcg

SEQ ID NO: 1970970 - DNA, 25 bp, Homo sapien
ccaagatgaggatgagcaaaggggc

SEQ ID NO: 1970971 - DNA, 25 bp, Homo sapien
agaacagcacgaacagaaacacagg

SEQ ID NO: 1970972 - DNA, 25 bp, Homo sapien
tgagaaaacgaccaaagaacagcac

SEQ ID NO: 1970973 - DNA, 25 bp, Homo sapien
caggcttaaagacagtggtgtaaga

SEQ ID NO: 1970974 - DNA, 25 bp, Homo sapien
ctgttaggtgcacgggaggaatttg

SEQ ID NO: 1970975 - DNA, 25 bp, Homo sapien
cagcccgtggctcccggtgtccccg

SEQ ID NO: 1970976 - DNA, 25 bp, Homo sapien
gtggctcccggtgtccccgtctgcg

SEQ ID NO: 1970977 - DNA, 25 bp, Homo sapien
gtgtccccgtctgcgcggcggtgca

SEQ ID NO: 1970978 - DNA, 25 bp, Homo sapien
gaggcgcaggctctcccgctcgtcc

SEQ ID NO: 1970979 - DNA, 25 bp, Homo sapien
aatcagcctacttccaggtgctccc

SEQ ID NO: 1970980 - DNA, 25 bp, Homo sapien
caatcagcctacttccaggtgctcc

SEQ ID NO: 1970981 - DNA, 25 bp, Homo sapien
atcagcctacttccaggtgctcccg

SEQ ID NO: 1970982 - DNA, 25 bp, Homo sapien
cagcctacttccaggtgctcccggt

SEQ ID NO: 1970983 - DNA, 25 bp, Homo sapien
ttccaaccatggtctctgtggtggc

SEQ ID NO: 1970984 - DNA, 25 bp, Homo sapien
tcgggtgacccgcatctaagagctt

SEQ ID NO: 1970985 - DNA, 25 bp, Homo sapien
tggctgaagccttgtgtataccggg

SEQ ID NO: 1970986 - DNA, 25 bp, Homo sapien
ctaagagctttcactcttccaggct

SEQ ID NO: 1970987 - DNA, 25 bp, Homo sapien
gacgcacttcctgtaaaaccagcca

SEQ ID NO: 1970988 - DNA, 25 bp, Homo sapien
cctgtgtagccggagctgtggttcc

SEQ ID NO: 1970989 - DNA, 25 bp, Homo sapien
aacactcgggaagggagacgcactt

SEQ ID NO: 1970990 - DNA, 25 bp, Homo sapien
cttgaaggacggaacactcgggaag

SEQ ID NO: 1970991 - DNA, 25 bp, Homo sapien
tgtgtactgtttccattagagcctc

SEQ ID NO: 1970992 - DNA, 25 bp, Homo sapien
tcaagggaaatgtagaagggagcaa

SEQ ID NO: 1970993 - DNA, 25 bp, Homo sapien
tcaaagaccaaactaacaaggctgt

SEQ ID NO: 1970994 - DNA, 25 bp, Homo sapien
cactgtggagattcaaagtggctcc

SEQ ID NO: 1970995 - DNA, 25 bp, Homo sapien
attctgattatacatcaaattcatc

SEQ ID NO: 1970996 - DNA, 25 bp, Homo sapien
tatacatcaaattcatcttgatctc

SEQ ID NO: 1970997 - DNA, 25 bp, Homo sapien
tgattatacatcaaattcatcttga

SEQ ID NO: 1970998 - DNA, 25 bp, Homo sapien
tctgattatacatcaaattcatctt

SEQ ID NO: 1970999 - DNA, 25 bp, Homo sapien
gggatgccaacgtcactccaatgtt

SEQ ID NO: 1971000 - DNA, 25 bp, Homo sapien
gaattactctactgccacacaactg

SEQ ID NO: 1971001 - DNA, 25 bp, Homo sapien
tattaaaactcccacggacaactgc

SEQ ID NO: 1971002 - DNA, 25 bp, Homo sapien
gacaactgcccctagctgggatgcc

SEQ ID NO: 1971003 - DNA, 25 bp, Homo sapien
gctccagtgttgtctctggagactg

SEQ ID NO: 1971004 - DNA, 25 bp, Homo sapien
ctacgatggctccagtgttgtctct

SEQ ID NO: 1971005 - DNA, 25 bp, Homo sapien
cgatggctccagtgttgtctctgga

SEQ ID NO: 1971006 - DNA, 25 bp, Homo sapien
ccagtgttgtctctggagactgctg

SEQ ID NO: 1971007 - DNA, 25 bp, Homo sapien
taaaacgtgctcttctgtttgaacc

SEQ ID NO: 1971008 - DNA, 25 bp, Homo sapien
cattaggtgctagccaaaagcttta

SEQ ID NO: 1971009 - DNA, 25 bp, Homo sapien
cagtgtcattggatttaaaacgtgc

SEQ ID NO: 1971010 - DNA, 25 bp, Homo sapien
gtttgaaccacacctttgaagagtc

SEQ ID NO: 1971011 - DNA, 25 bp, Homo sapien
attgagcacctccagtgctaggcat

SEQ ID NO: 1971012 - DNA, 25 bp, Homo sapien
tgctaggcatcatctaaagcgtggg

SEQ ID NO: 1971013 - DNA, 25 bp, Homo sapien
ggtgttccgtgcaggactgtttcca

SEQ ID NO: 1971014 - DNA, 25 bp, Homo sapien
gcagtaaacacagcggccacatctg

SEQ ID NO: 1971015 - DNA, 25 bp, Homo sapien
gggccacagagaccactctggttct

SEQ ID NO: 1971016 - DNA, 25 bp, Homo sapien
atctccctaatccacccacccaagg

SEQ ID NO: 1971017 - DNA, 25 bp, Homo sapien
tttccctgcaatgttgggcccaggc

SEQ ID NO: 1971018 - DNA, 25 bp, Homo sapien
ctctggttctcagttctttgtttgc

SEQ ID NO: 1971019 - DNA, 25 bp, Homo sapien
caccataaccacaaaccagactgag

SEQ ID NO: 1971020 - DNA, 25 bp, Homo sapien
accaccataaccacaaaccagactg

SEQ ID NO: 1971021 - DNA, 25 bp, Homo sapien
caccaccataaccacaaaccagact

SEQ ID NO: 1971022 - DNA, 25 bp, Homo sapien
ccaccataaccacaaaccagactga

SEQ ID NO: 1971023 - DNA, 25 bp, Homo sapien
gtgacgacgcaggacagacatctgc

SEQ ID NO: 1971024 - DNA, 25 bp, Homo sapien
gacgacgcaggacagacatctgcac

SEQ ID NO: 1971025 - DNA, 25 bp, Homo sapien
aggtgacgacgcaggacagacatct

SEQ ID NO: 1971026 - DNA, 25 bp, Homo sapien
ctgaggtgacgacgcaggacagaca

SEQ ID NO: 1971027 - DNA, 25 bp, Homo sapien
ggtttagtggaaatgagaactctgc

SEQ ID NO: 1971028 - DNA, 25 bp, Homo sapien
gggtttagtggaaatgagaactctg

SEQ ID NO: 1971029 - DNA, 25 bp, Homo sapien
ctgatcggtgggataaaggaagggg

SEQ ID NO: 1971030 - DNA, 25 bp, Homo sapien
agtctggccgcctgcacgagctgac

SEQ ID NO: 1971031 - DNA, 25 bp, Homo sapien
gctgaccctgtagctcctctatgga

SEQ ID NO: 1971032 - DNA, 25 bp, Homo sapien
tgtctcctcttgatgcagtctggcc

SEQ ID NO: 1971033 - DNA, 25 bp, Homo sapien
tagctcctctatggatacactctgc

SEQ ID NO: 1971034 - DNA, 25 bp, Homo sapien
caagttgcggcagttttccgaaggc

SEQ ID NO: 1971035 - DNA, 25 bp, Homo sapien
caggttattcgagagtaacagaggt

SEQ ID NO: 1971036 - DNA, 25 bp, Homo sapien
gtaacagaggttaatgaggccacag

SEQ ID NO: 1971037 - DNA, 25 bp, Homo sapien
ttccgaaggcaatggtttagggtga

SEQ ID NO: 1971038 - DNA, 25 bp, Homo sapien
ctggaggacatctcctaccatccga

SEQ ID NO: 1971039 - DNA, 25 bp, Homo sapien
catccgaagcctcttccgcaatact

SEQ ID NO: 1971040 - DNA, 25 bp, Homo sapien
gaggacatctcctaccatccgaagc

SEQ ID NO: 1971041 - DNA, 25 bp, Homo sapien
gcctcttccgcaatactccttcatc

SEQ ID NO: 1971042 - DNA, 25 bp, Homo sapien
tgtgctaaaggccagtgaagagtca

SEQ ID NO: 1971043 - DNA, 25 bp, Homo sapien
tctagacaacgacttgcgtggccgc

SEQ ID NO: 1971044 - DNA, 25 bp, Homo sapien
gctctggaaaggtccataggtctag

SEQ ID NO: 1971045 - DNA, 25 bp, Homo sapien
gcgtggccgctcacctaatacctga

SEQ ID NO: 1971046 - DNA, 25 bp, Homo sapien
cttgaatccggtgtaagcagattcc

SEQ ID NO: 1971047 - DNA, 25 bp, Homo sapien
tgaatccggtgtaagcagattccac

SEQ ID NO: 1971048 - DNA, 25 bp, Homo sapien
tgacttgaatccggtgtaagcagat

SEQ ID NO: 1971049 - DNA, 25 bp, Homo sapien
gacttgaatccggtgtaagcagatt

SEQ ID NO: 1971050 - DNA, 25 bp, Homo sapien
tctgcttcaaggaccggagctcctg

SEQ ID NO: 1971051 - DNA, 25 bp, Homo sapien
gttctttccacctcaaggcatagag

SEQ ID NO: 1971052 - DNA, 25 bp, Homo sapien
ctcatggagggtgttttgcaaagcc

SEQ ID NO: 1971053 - DNA, 25 bp, Homo sapien
gccacctgagtttgacgtagaagag

SEQ ID NO: 1971054 - DNA, 25 bp, Homo sapien
tccttcctcctccatctgcttccct

SEQ ID NO: 1971055 - DNA, 25 bp, Homo sapien
ttcctcctccatctgcttcccttgc

SEQ ID NO: 1971056 - DNA, 25 bp, Homo sapien
ctcagtgaactcctctccttcctcc

SEQ ID NO: 1971057 - DNA, 25 bp, Homo sapien
cctcctccatctgcttcccttgccg

SEQ ID NO: 1971058 - DNA, 25 bp, Homo sapien
gatctccaatctgcacccgggagtg

SEQ ID NO: 1971059 - DNA, 25 bp, Homo sapien
gtcactgtcgtggtctgggccatcc

SEQ ID NO: 1971060 - DNA, 25 bp, Homo sapien
tgtccgcggtctgcagccgcaagct

SEQ ID NO: 1971061 - DNA, 25 bp, Homo sapien
cctcggtcactgtcgtggtctgggc

SEQ ID NO: 1971062 - DNA, 25 bp, Homo sapien
cgacccaaatgcagcttaggagcct

SEQ ID NO: 1971063 - DNA, 25 bp, Homo sapien
caaatgcagcttaggagcctcctct

SEQ ID NO: 1971064 - DNA, 25 bp, Homo sapien
tggaaacaaaacgacccaaatgcag

SEQ ID NO: 1971065 - DNA, 25 bp, Homo sapien
caaaacgacccaaatgcagcttagg

SEQ ID NO: 1971066 - DNA, 25 bp, Homo sapien
ccagcagcgacacgcagcattgatc

SEQ ID NO: 1971067 - DNA, 25 bp, Homo sapien
tgacaacaggtgaccgcagtcaggc

SEQ ID NO: 1971068 - DNA, 25 bp, Homo sapien
cagtcaggcggtggaattttctgct

SEQ ID NO: 1971069 - DNA, 25 bp, Homo sapien
tatgctgccaaacgaatgatgttgc

SEQ ID NO: 1971070 - DNA, 25 bp, Homo sapien
ctgaacgcaggcttcctagggcagg

SEQ ID NO: 1971071 - DNA, 25 bp, Homo sapien
tgagagcgagacagcgttaacacag

SEQ ID NO: 1971072 - DNA, 25 bp, Homo sapien
caggggcatccagctgtactccagg

SEQ ID NO: 1971073 - DNA, 25 bp, Homo sapien
atacataataaagttgggttagagg

SEQ ID NO: 1971074 - DNA, 25 bp, Homo sapien
ggaagctcacgggtccatctccact

SEQ ID NO: 1971075 - DNA, 25 bp, Homo sapien
ctccactttcgtgggtaatcgctaa

SEQ ID NO: 1971076 - DNA, 25 bp, Homo sapien
ctgggtctgagtgtctggaccccac

SEQ ID NO: 1971077 - DNA, 25 bp, Homo sapien
tctatcacacatggcccgcagtgga

SEQ ID NO: 1971078 - DNA, 25 bp, Homo sapien
tatgagccatcccaaggttgatcgg

SEQ ID NO: 1971079 - DNA, 25 bp, Homo sapien
tgtgagacacgtaccctggctcttg

SEQ ID NO: 1971080 - DNA, 25 bp, Homo sapien
aagattccctcttgcgtgtgcgcag

SEQ ID NO: 1971081 - DNA, 25 bp, Homo sapien
gaaacagggaatgtctgcggagcca

SEQ ID NO: 1971082 - DNA, 25 bp, Homo sapien
cattatcccctacagagaatgggcc

SEQ ID NO: 1971083 - DNA, 25 bp, Homo sapien
taaacacagttatcagcccaaaggc

SEQ ID NO: 1971084 - DNA, 25 bp, Homo sapien
caagaatgaatgtggatccgggaaa

SEQ ID NO: 1971085 - DNA, 25 bp, Homo sapien
caaaggcttaggaaaccagggcaag

SEQ ID NO: 1971086 - DNA, 25 bp, Homo sapien
ttcagacgccggaacctgggctggc

SEQ ID NO: 1971087 - DNA, 25 bp, Homo sapien
ctgtgttcagacgccggaacctggg

SEQ ID NO: 1971088 - DNA, 25 bp, Homo sapien
cagctgtgttcagacgccggaacct

SEQ ID NO: 1971089 - DNA, 25 bp, Homo sapien
tcagacgccggaacctgggctggca

SEQ ID NO: 1971090 - DNA, 25 bp, Homo sapien
tgcgggaacactgagtcaggctcca

SEQ ID NO: 1971091 - DNA, 25 bp, Homo sapien
ggaacactgagtcaggctccaccac

SEQ ID NO: 1971092 - DNA, 25 bp, Homo sapien
acactgagtcaggctccaccacctc

SEQ ID NO: 1971093 - DNA, 25 bp, Homo sapien
ctgcgggaacactgagtcaggctcc

SEQ ID NO: 1971094 - DNA, 25 bp, Homo sapien
tgcagccgtagtcgggcacgctcat

SEQ ID NO: 1971095 - DNA, 25 bp, Homo sapien
tgttccagacggcacttgagcacgg

SEQ ID NO: 1971096 - DNA, 25 bp, Homo sapien
gccttgaaggcgctgaacagctgct

SEQ ID NO: 1971097 - DNA, 25 bp, Homo sapien
ccaggccgccttgtcgctggcatat

SEQ ID NO: 1971098 - DNA, 25 bp, Homo sapien
agtcaggatcgagggagacctggga

SEQ ID NO: 1971099 - DNA, 25 bp, Homo sapien
gaatctctctgtgcccgctcccccg

SEQ ID NO: 1971100 - DNA, 25 bp, Homo sapien
gaagagacacaagcagccactcctc

SEQ ID NO: 1971101 - DNA, 25 bp, Homo sapien
caagaagcccatggttctgaatctc

SEQ ID NO: 1971102 - DNA, 25 bp, Homo sapien
cctggacaagaagcccatggttctg

SEQ ID NO: 1971103 - DNA, 25 bp, Homo sapien
cctatggctgtggtgtaagacttca

SEQ ID NO: 1971104 - DNA, 25 bp, Homo sapien
gctggaagaaacctcgagagacgct

SEQ ID NO: 1971105 - DNA, 25 bp, Homo sapien
cagaatgggagaatacatgctgctc

SEQ ID NO: 1971106 - DNA, 25 bp, Homo sapien
ggccgtcctctgatgcagctaaata

SEQ ID NO: 1971107 - DNA, 25 bp, Homo sapien
tgacagcctacgtgcaaaagccctg

SEQ ID NO: 1971108 - DNA, 25 bp, Homo sapien
tctgctgaaggaatcgtggacttgg

SEQ ID NO: 1971109 - DNA, 25 bp, Homo sapien
gatgttcaacatttagagcaaggtc

SEQ ID NO: 1971110 - DNA, 25 bp, Homo sapien
tgggcactttccacgctgttataaa

SEQ ID NO: 1971111 - DNA, 25 bp, Homo sapien
ctggcagcctggtgaagcctaaagt

SEQ ID NO: 1971112 - DNA, 25 bp, Homo sapien
ggcagcctggtgaagcctaaagtct

SEQ ID NO: 1971113 - DNA, 25 bp, Homo sapien
cctcaatgttaattctgggatatcc

SEQ ID NO: 1971114 - DNA, 25 bp, Homo sapien
aagtctcctcctcaatgttaattct

SEQ ID NO: 1971115 - DNA, 25 bp, Homo sapien
ggcacccgtactagaaacctgacag

SEQ ID NO: 1971116 - DNA, 25 bp, Homo sapien
aactggttgtctctctgcgttcctg

SEQ ID NO: 1971117 - DNA, 25 bp, Homo sapien
agcccttttcaagtcccagtgcctg

SEQ ID NO: 1971118 - DNA, 25 bp, Homo sapien
aacctgacagccgtgcgaggtgcct

SEQ ID NO: 1971119 - DNA, 25 bp, Homo sapien
tctgcccacaagctcctctgtgtcc

SEQ ID NO: 1971120 - DNA, 25 bp, Homo sapien
agacagtgaagggacactccttctg

SEQ ID NO: 1971121 - DNA, 25 bp, Homo sapien
gaagacagtgaagggacactccttc

SEQ ID NO: 1971122 - DNA, 25 bp, Homo sapien
tccttctgcccacaagctcctctgt

SEQ ID NO: 1971123 - DNA, 25 bp, Homo sapien
tgcttggagagaaagcagggaaagg

SEQ ID NO: 1971124 - DNA, 25 bp, Homo sapien
ctgcttggagagaaagcagggaaag

SEQ ID NO: 1971125 - DNA, 25 bp, Homo sapien
tgggagagagctaacatcgaatctc

SEQ ID NO: 1971126 - DNA, 25 bp, Homo sapien
gagagcacactgttttgtccctgaa

SEQ ID NO: 1971127 - DNA, 25 bp, Homo sapien
tgtccctgaatcttagtggaactca

SEQ ID NO: 1971128 - DNA, 25 bp, Homo sapien
tgtaataaaggcaaatgcttcatta

SEQ ID NO: 1971129 - DNA, 25 bp, Homo sapien
caggcggtcgagaagttccaccttc

SEQ ID NO: 1971130 - DNA, 25 bp, Homo sapien
ttcttctcgctgtgatggatctgcc

SEQ ID NO: 1971131 - DNA, 25 bp, Homo sapien
ctctcagcggaggagcctagttctc

SEQ ID NO: 1971132 - DNA, 25 bp, Homo sapien
tgccgatctctgtccaggcggtcga

SEQ ID NO: 1971133 - DNA, 25 bp, Homo sapien
ttgccgtctttttgatcacagagga

SEQ ID NO: 1971134 - DNA, 25 bp, Homo sapien
aactgccacctctccggggactgtt

SEQ ID NO: 1971135 - DNA, 25 bp, Homo sapien
gaacgttgccgtctttttgatcaca

SEQ ID NO: 1971136 - DNA, 25 bp, Homo sapien
gcgaacgttgccgtctttttgatca

SEQ ID NO: 1971137 - DNA, 25 bp, Homo sapien
ccgactccttcagcttggacagcgg

SEQ ID NO: 1971138 - DNA, 25 bp, Homo sapien
ccggtcttcaaacgggatggagtca

SEQ ID NO: 1971139 - DNA, 25 bp, Homo sapien
ttctggctcgtcatccagggacaag

SEQ ID NO: 1971140 - DNA, 25 bp, Homo sapien
caaggcatccaggtagagattctca

SEQ ID NO: 1971141 - DNA, 25 bp, Homo sapien
caattcggaggttgctgtatgcaaa

SEQ ID NO: 1971142 - DNA, 25 bp, Homo sapien
ctaggatggacaaaacctggctgac

SEQ ID NO: 1971143 - DNA, 25 bp, Homo sapien
tcttaggtttcatgacggctccctc

SEQ ID NO: 1971144 - DNA, 25 bp, Homo sapien
tgtatgcaaaagtgctagagcctgc

SEQ ID NO: 1971145 - DNA, 25 bp, Homo sapien
tccttttgtataggactctagtcca

SEQ ID NO: 1971146 - DNA, 25 bp, Homo sapien
gacagcagagcatgctaatttaggg

SEQ ID NO: 1971147 - DNA, 25 bp, Homo sapien
acacttatttgtgagaccttccttt

SEQ ID NO: 1971148 - DNA, 25 bp, Homo sapien
ctcttgtgtgttttatgggacacac

SEQ ID NO: 1971149 - DNA, 25 bp, Homo sapien
tcaacctggtacacattgctgagga

SEQ ID NO: 1971150 - DNA, 25 bp, Homo sapien
ggtacccttccccttaatgagcatg

SEQ ID NO: 1971151 - DNA, 25 bp, Homo sapien
tgtggcaatgtcctatcaacctggt

SEQ ID NO: 1971152 - DNA, 25 bp, Homo sapien
ggttttgaagcagcaagactctgac

SEQ ID NO: 1971153 - DNA, 25 bp, Homo sapien
ctttgaagatttcctttgtgatttt

SEQ ID NO: 1971154 - DNA, 25 bp, Homo sapien
ttgaagatttcctttgtgattttct

SEQ ID NO: 1971155 - DNA, 25 bp, Homo sapien
aagatttcctttgtgattttcttct

SEQ ID NO: 1971156 - DNA, 25 bp, Homo sapien
gaagatttcctttgtgattttcttc

SEQ ID NO: 1971157 - DNA, 25 bp, Homo sapien
ctcttagtggagcttttaaatacag

SEQ ID NO: 1971158 - DNA, 25 bp, Homo sapien
taaaactcatacacatgtgacacag

SEQ ID NO: 1971159 - DNA, 25 bp, Homo sapien
cagcatacaaaagagagttttccca

SEQ ID NO: 1971160 - DNA, 25 bp, Homo sapien
ggtaaaatagactgcattgacaaaa

SEQ ID NO: 1971161 - DNA, 25 bp, Homo sapien
cagcaccacggggtaaaacagcagg

SEQ ID NO: 1971162 - DNA, 25 bp, Homo sapien
tcagcaccacggggtaaaacagcag

SEQ ID NO: 1971163 - DNA, 25 bp, Homo sapien
gtggtcagcaccacggggtaaaaca

SEQ ID NO: 1971164 - DNA, 25 bp, Homo sapien
ggtcagcaccacggggtaaaacagc

SEQ ID NO: 1971165 - DNA, 25 bp, Homo sapien
ctgagcaagtccctgtaccgtgtgc

SEQ ID NO: 1971166 - DNA, 25 bp, Homo sapien
taccgtgtgcgctggtacacagaac

SEQ ID NO: 1971167 - DNA, 25 bp, Homo sapien
cactcctccataggacctattaatg

SEQ ID NO: 1971168 - DNA, 25 bp, Homo sapien
cctccataggacctattaatgatga

SEQ ID NO: 1971169 - DNA, 25 bp, Homo sapien
caatttgccatgagttcgctgaatg

SEQ ID NO: 1971170 - DNA, 25 bp, Homo sapien
tggattcttccatgtgttagcactt

SEQ ID NO: 1971171 - DNA, 25 bp, Homo sapien
tcgctgaatgcctctcacatgcctg

SEQ ID NO: 1971172 - DNA, 25 bp, Homo sapien
gacacagatttggtgtggattcttc

SEQ ID NO: 1971173 - DNA, 25 bp, Homo sapien
cattagacgctggaactcagacatg

SEQ ID NO: 1971174 - DNA, 25 bp, Homo sapien
agcatgggttctggagggcctccct

SEQ ID NO: 1971175 - DNA, 25 bp, Homo sapien
cgttctcagtgagcgtgtagccagg

SEQ ID NO: 1971176 - DNA, 25 bp, Homo sapien
tctgcttgtgggaaagggaccctca

SEQ ID NO: 1971177 - DNA, 25 bp, Homo sapien
cccagcgagtggctgtcactgtgga

SEQ ID NO: 1971178 - DNA, 25 bp, Homo sapien
tcccccagcgagtggctgtcactgt

SEQ ID NO: 1971179 - DNA, 25 bp, Homo sapien
ctccatgggccctggctcggctgtg

SEQ ID NO: 1971180 - DNA, 25 bp, Homo sapien
gtgtcccccagcgagtggctgtcac

SEQ ID NO: 1971181 - DNA, 25 bp, Homo sapien
gctcctgatgagaagtgctcgtgct

SEQ ID NO: 1971182 - DNA, 25 bp, Homo sapien
tgctcgtgctcatgtggtccagacc

SEQ ID NO: 1971183 - DNA, 25 bp, Homo sapien
caccacatgtggatgtgcatcagaa

SEQ ID NO: 1971184 - DNA, 25 bp, Homo sapien
ccaggaatcgagatcttgtggctcc

SEQ ID NO: 1971185 - DNA, 25 bp, Homo sapien
tggctcggagagtgctcatggggcc

SEQ ID NO: 1971186 - DNA, 25 bp, Homo sapien
ctggctcggagagtgctcatggggc

SEQ ID NO: 1971187 - DNA, 25 bp, Homo sapien
gcctggctcggagagtgctcatggg

SEQ ID NO: 1971188 - DNA, 25 bp, Homo sapien
cagcctggctcggagagtgctcatg

SEQ ID NO: 1971189 - DNA, 25 bp, Homo sapien
aaacgtgggccaggtgaaacaggca

SEQ ID NO: 1971190 - DNA, 25 bp, Homo sapien
tataaacagaccgttccacggcagg

SEQ ID NO: 1971191 - DNA, 25 bp, Homo sapien
taagccattggcagttccacaggtc

SEQ ID NO: 1971192 - DNA, 25 bp, Homo sapien
ggcagggcactcacatataaacaga

SEQ ID NO: 1971193 - DNA, 25 bp, Homo sapien
ggttaatgctttgtgacatagcccc

SEQ ID NO: 1971194 - DNA, 25 bp, Homo sapien
tccgagtcaccctttagcatttaac

SEQ ID NO: 1971195 - DNA, 25 bp, Homo sapien
tttaaagtcagcaagcccggaggta

SEQ ID NO: 1971196 - DNA, 25 bp, Homo sapien
tctagtttctatgcttccgagtcac

SEQ ID NO: 1971197 - DNA, 25 bp, Homo sapien
tgcgggctctcagatctagcacatt

SEQ ID NO: 1971198 - DNA, 25 bp, Homo sapien
gggggcagttagcaagacagtttgg

SEQ ID NO: 1971199 - DNA, 25 bp, Homo sapien
agggggcagttagcaagacagtttg

SEQ ID NO: 1971200 - DNA, 25 bp, Homo sapien
ggggcagttagcaagacagtttggt

SEQ ID NO: 1971201 - DNA, 25 bp, Homo sapien
cagggggcagttagcaagacagttt

SEQ ID NO: 1971202 - DNA, 25 bp, Homo sapien
cgacctctccagacagttgggaaac

SEQ ID NO: 1971203 - DNA, 25 bp, Homo sapien
actccctcaggtgatgagcgtcagg

SEQ ID NO: 1971204 - DNA, 25 bp, Homo sapien
tgagcgtcaggtgccaactgcgagt

SEQ ID NO: 1971205 - DNA, 25 bp, Homo sapien
gagttacacaacacgacctctccag

SEQ ID NO: 1971206 - DNA, 25 bp, Homo sapien
gggtcacacctcatttcagcacatg

SEQ ID NO: 1971207 - DNA, 25 bp, Homo sapien
catgccagtgcacgtataaccaaaa

SEQ ID NO: 1971208 - DNA, 25 bp, Homo sapien
cacggtgctcacttggaaggacaag

SEQ ID NO: 1971209 - DNA, 25 bp, Homo sapien
gcaattctgagggaaggtctcaaga

SEQ ID NO: 1971210 - DNA, 25 bp, Homo sapien
ccaagatgcagactaacccaaggtg

SEQ ID NO: 1971211 - DNA, 25 bp, Homo sapien
gaaaactgagttgcccagcatggag

SEQ ID NO: 1971212 - DNA, 25 bp, Homo sapien
ttcatacggccacagggagaagctt

SEQ ID NO: 1971213 - DNA, 25 bp, Homo sapien
cttgactgggacacacggtttggga

SEQ ID NO: 1971214 - DNA, 25 bp, Homo sapien
tatacagaaggcatgacacagtgac

SEQ ID NO: 1971215 - DNA, 25 bp, Homo sapien
acagggcctggatctactgggagcc

SEQ ID NO: 1971216 - DNA, 25 bp, Homo sapien
gagatgaagtatacaccacaggcaa

SEQ ID NO: 1971217 - DNA, 25 bp, Homo sapien
aagtgaactggtcctacagggcctg

SEQ ID NO: 1971218 - DNA, 25 bp, Homo sapien
tttgctggtctctcgggcctggaga

SEQ ID NO: 1971219 - DNA, 25 bp, Homo sapien
acggtttgctggtctctcgggcctg

SEQ ID NO: 1971220 - DNA, 25 bp, Homo sapien
ggcgacggtttgctggtctctcggg

SEQ ID NO: 1971221 - DNA, 25 bp, Homo sapien
catgctcctccaaggacgtcgggtc

SEQ ID NO: 1971222 - DNA, 25 bp, Homo sapien
atgcaagcttgcatctcggtgtggc

SEQ ID NO: 1971223 - DNA, 25 bp, Homo sapien
tgcaagcttgcatctcggtgtggct

SEQ ID NO: 1971224 - DNA, 25 bp, Homo sapien
aagcttgcatctcggtgtggctgct

SEQ ID NO: 1971225 - DNA, 25 bp, Homo sapien
caagcttgcatctcggtgtggctgc

SEQ ID NO: 1971226 - DNA, 25 bp, Homo sapien
tgacagcgagggtgttcagaatctc

SEQ ID NO: 1971227 - DNA, 25 bp, Homo sapien
tatatacatgcacccgaagacgtgc

SEQ ID NO: 1971228 - DNA, 25 bp, Homo sapien
gatcatcgatgcaagaagaccaaca

SEQ ID NO: 1971229 - DNA, 25 bp, Homo sapien
cacatttaggtgatggcgaggacac

SEQ ID NO: 1971230 - DNA, 25 bp, Homo sapien
tggctatgtttgaggaatcttctgc

SEQ ID NO: 1971231 - DNA, 25 bp, Homo sapien
caactggcacattcatggcagctca

SEQ ID NO: 1971232 - DNA, 25 bp, Homo sapien
tctttagggcataaaagcaactggc

SEQ ID NO: 1971233 - DNA, 25 bp, Homo sapien
tgctcccctttcacaccatgtgtga

SEQ ID NO: 1971234 - DNA, 25 bp, Homo sapien
tgcccaatttggctgcagttggaca

SEQ ID NO: 1971235 - DNA, 25 bp, Homo sapien
ctgcagttggacaagaaatgtctct

SEQ ID NO: 1971236 - DNA, 25 bp, Homo sapien
aaatgtggccactattgcccaattt

SEQ ID NO: 1971237 - DNA, 25 bp, Homo sapien
agaagagagggtgaaatgtggccac

SEQ ID NO: 1971238 - DNA, 25 bp, Homo sapien
gatttgacttttagggacacagtgt

SEQ ID NO: 1971239 - DNA, 25 bp, Homo sapien
gttcacgttcatggtggagccagca

SEQ ID NO: 1971240 - DNA, 25 bp, Homo sapien
ggtctagaagtggccttgttcacgt

SEQ ID NO: 1971241 - DNA, 25 bp, Homo sapien
agtgtttgcagccagtagggtctag

SEQ ID NO: 1971242 - DNA, 25 bp, Homo sapien
acacataggcccgtagaggcaactc

SEQ ID NO: 1971243 - DNA, 25 bp, Homo sapien
atcaatcacacataggcccgtagag

SEQ ID NO: 1971244 - DNA, 25 bp, Homo sapien
ataggcccgtagaggcaactctgac

SEQ ID NO: 1971245 - DNA, 25 bp, Homo sapien
caatcacacataggcccgtagaggc

SEQ ID NO: 1971246 - DNA, 25 bp, Homo sapien
tattgcttcgaatttcaggtctgca

SEQ ID NO: 1971247 - DNA, 25 bp, Homo sapien
tcaggtctgcaaatgggttgctctt

SEQ ID NO: 1971248 - DNA, 25 bp, Homo sapien
actggaaagctctcgttcttctgga

SEQ ID NO: 1971249 - DNA, 25 bp, Homo sapien
tagtttggtcctggttattgcttcg

SEQ ID NO: 1971250 - DNA, 25 bp, Homo sapien
cggggacaaaccatcccacccgcag

SEQ ID NO: 1971251 - DNA, 25 bp, Homo sapien
tcccacccgcagctcagctgacagg

SEQ ID NO: 1971252 - DNA, 25 bp, Homo sapien
atcccacccgcagctcagctgacag

SEQ ID NO: 1971253 - DNA, 25 bp, Homo sapien
gcaaagcggggacaaaccatcccac

SEQ ID NO: 1971254 - DNA, 25 bp, Homo sapien
tcttccacctctaatggaccagaca

SEQ ID NO: 1971255 - DNA, 25 bp, Homo sapien
ctgatggtgcagttcgctgcagact

SEQ ID NO: 1971256 - DNA, 25 bp, Homo sapien
ctgcagacttgcacaggctggaact

SEQ ID NO: 1971257 - DNA, 25 bp, Homo sapien
tgcacaggctggaactcttccacct

SEQ ID NO: 1971258 - DNA, 25 bp, Homo sapien
aagataattcgcagagtggctgcag

SEQ ID NO: 1971259 - DNA, 25 bp, Homo sapien
gaagataattcgcagagtggctgca

SEQ ID NO: 1971260 - DNA, 25 bp, Homo sapien
gtgaagataattcgcagagtggctg

SEQ ID NO: 1971261 - DNA, 25 bp, Homo sapien
ctgtgaagataattcgcagagtggc

SEQ ID NO: 1971262 - DNA, 25 bp, Homo sapien
catccttggagtggtccagcttaaa

SEQ ID NO: 1971263 - DNA, 25 bp, Homo sapien
ctcatccttggagtggtccagctta

SEQ ID NO: 1971264 - DNA, 25 bp, Homo sapien
ttggagtggtccagcttaaagtgct

SEQ ID NO: 1971265 - DNA, 25 bp, Homo sapien
tccttggagtggtccagcttaaagt

SEQ ID NO: 1971266 - DNA, 25 bp, Homo sapien
ctgggggttgataatctgcacatag

SEQ ID NO: 1971267 - DNA, 25 bp, Homo sapien
ctgcacataggctggacacagtcct

SEQ ID NO: 1971268 - DNA, 25 bp, Homo sapien
taatctgcacataggctggacacag

SEQ ID NO: 1971269 - DNA, 25 bp, Homo sapien
gacacagtcctgtgaaacagaatca

SEQ ID NO: 1971270 - DNA, 25 bp, Homo sapien
gctgttgtcaatgccgtctctctgg

SEQ ID NO: 1971271 - DNA, 25 bp, Homo sapien
aatattacatgctgttgtcaatgcc

SEQ ID NO: 1971272 - DNA, 25 bp, Homo sapien
tgaggaaactgtttaggacgtagct

SEQ ID NO: 1971273 - DNA, 25 bp, Homo sapien
gtcaatgccgtctctctggagtccc

SEQ ID NO: 1971274 - DNA, 25 bp, Homo sapien
gctccagtctgcctccacgtcccca

SEQ ID NO: 1971275 - DNA, 25 bp, Homo sapien
ctgctccagtctgcctccacgtccc

SEQ ID NO: 1971276 - DNA, 25 bp, Homo sapien
cctgctccagtctgcctccacgtcc

SEQ ID NO: 1971277 - DNA, 25 bp, Homo sapien
ctccagtctgcctccacgtccccat

SEQ ID NO: 1971278 - DNA, 25 bp, Homo sapien
taatgggccagacgcttagacacgt

SEQ ID NO: 1971279 - DNA, 25 bp, Homo sapien
tgctgctttgcatgataatgggcca

SEQ ID NO: 1971280 - DNA, 25 bp, Homo sapien
tattgcaggagcgttgatgtgtagt

SEQ ID NO: 1971281 - DNA, 25 bp, Homo sapien
gatgtgtagttttagcccgagtaac

SEQ ID NO: 1971282 - DNA, 25 bp, Homo sapien
tatcatcagagtacgagtatctcct

SEQ ID NO: 1971283 - DNA, 25 bp, Homo sapien
tggaatgtaggctgaccgaaagatg

SEQ ID NO: 1971284 - DNA, 25 bp, Homo sapien
gacctgggaaggatcatttttagct

SEQ ID NO: 1971285 - DNA, 25 bp, Homo sapien
ggaatttctcaaggaagctcttgtc

SEQ ID NO: 1971286 - DNA, 25 bp, Homo sapien
tctcctacgctcgacattcctatcc

SEQ ID NO: 1971287 - DNA, 25 bp, Homo sapien
tcctacgctcgacattcctatccat

SEQ ID NO: 1971288 - DNA, 25 bp, Homo sapien
ctacgctcgacattcctatccatat

SEQ ID NO: 1971289 - DNA, 25 bp, Homo sapien
ttctcctacgctcgacattcctatc

SEQ ID NO: 1971290 - DNA, 25 bp, Homo sapien
tattggtggctttccgtctggccat

SEQ ID NO: 1971291 - DNA, 25 bp, Homo sapien
gagcagggatgtagcttccagatcg

SEQ ID NO: 1971292 - DNA, 25 bp, Homo sapien
atgtagcttccagatcgatgactcc

SEQ ID NO: 1971293 - DNA, 25 bp, Homo sapien
gggatgtagcttccagatcgatgac

SEQ ID NO: 1971294 - DNA, 25 bp, Homo sapien
gctgtgcatcgcagcagggcaggaa

SEQ ID NO: 1971295 - DNA, 25 bp, Homo sapien
caactctaatagagttgggatgagt

SEQ ID NO: 1971296 - DNA, 25 bp, Homo sapien
ctaagtcaactctaatagagttggg

SEQ ID NO: 1971297 - DNA, 25 bp, Homo sapien
gcttctcactagacctattgcttct

SEQ ID NO: 1971298 - DNA, 25 bp, Homo sapien
gggatgagttgcttctcactagacc

SEQ ID NO: 1971299 - DNA, 25 bp, Homo sapien
ctagcagcgcttgatgggataaggg

SEQ ID NO: 1971300 - DNA, 25 bp, Homo sapien
gggataaggggttgttgacagatgc

SEQ ID NO: 1971301 - DNA, 25 bp, Homo sapien
gatgggataaggggttgttgacaga

SEQ ID NO: 1971302 - DNA, 25 bp, Homo sapien
tgggataaggggttgttgacagatg

SEQ ID NO: 1971303 - DNA, 25 bp, Homo sapien
gaaccaatggtatcaacccctctgt

SEQ ID NO: 1971304 - DNA, 25 bp, Homo sapien
tggcagccgttcatgcagtagattc

SEQ ID NO: 1971305 - DNA, 25 bp, Homo sapien
ctctgtttcggaggctcatgctggc

SEQ ID NO: 1971306 - DNA, 25 bp, Homo sapien
gccttaatcctcctgcaagggtata

SEQ ID NO: 1971307 - DNA, 25 bp, Homo sapien
gactttagactggttgtagcttcca

SEQ ID NO: 1971308 - DNA, 25 bp, Homo sapien
ccagttttcatctttgctagaacaa

SEQ ID NO: 1971309 - DNA, 25 bp, Homo sapien
ccacttgagactttagactggttgt

SEQ ID NO: 1971310 - DNA, 25 bp, Homo sapien
ttcatctttgctagaacaaccttct

SEQ ID NO: 1971311 - DNA, 25 bp, Homo sapien
agcaaagctgggaagttaaggtcag

SEQ ID NO: 1971312 - DNA, 25 bp, Homo sapien
cccagctgcccattggagaggctca

SEQ ID NO: 1971313 - DNA, 25 bp, Homo sapien
taaggtcaggaaagccatggctctc

SEQ ID NO: 1971314 - DNA, 25 bp, Homo sapien
ccagctgcccattggagaggctcac

SEQ ID NO: 1971315 - DNA, 25 bp, Homo sapien
ctgttagcagtacacgaggctctgt

SEQ ID NO: 1971316 - DNA, 25 bp, Homo sapien
gaaattcagagtgggtgtgatggct

SEQ ID NO: 1971317 - DNA, 25 bp, Homo sapien
tgtcgttatccactgtgtcttcaat

SEQ ID NO: 1971318 - DNA, 25 bp, Homo sapien
caattctattatgcctgtcaggaaa

SEQ ID NO: 1971319 - DNA, 25 bp, Homo sapien
ccattgggtagacgtggcctgttca

SEQ ID NO: 1971320 - DNA, 25 bp, Homo sapien
ttaatgagcacatctccggcagggc

SEQ ID NO: 1971321 - DNA, 25 bp, Homo sapien
tgttcaaacaaaccattaatgagca

SEQ ID NO: 1971322 - DNA, 25 bp, Homo sapien
tgtcctgttccttttagtctgggtc

SEQ ID NO: 1971323 - DNA, 25 bp, Homo sapien
tgaaatgctgccgttctgtccagca

SEQ ID NO: 1971324 - DNA, 25 bp, Homo sapien
gattgaaatgctgccgttctgtcca

SEQ ID NO: 1971325 - DNA, 25 bp, Homo sapien
aaatgctgccgttctgtccagcaga

SEQ ID NO: 1971326 - DNA, 25 bp, Homo sapien
attgaaatgctgccgttctgtccag

SEQ ID NO: 1971327 - DNA, 25 bp, Homo sapien
aatggaggggaatcttccagcccca

SEQ ID NO: 1971328 - DNA, 25 bp, Homo sapien
gaaacaagtgccaagggaaatgcca

SEQ ID NO: 1971329 - DNA, 25 bp, Homo sapien
aggcactgtcctctgaacgcggctc

SEQ ID NO: 1971330 - DNA, 25 bp, Homo sapien
gggctcatagaccactccctcctgc

SEQ ID NO: 1971331 - DNA, 25 bp, Homo sapien
gcaccccacatatccccaccgcctt

SEQ ID NO: 1971332 - DNA, 25 bp, Homo sapien
cagcaccccacatatccccaccgcc

SEQ ID NO: 1971333 - DNA, 25 bp, Homo sapien
atccccaccgccttcctctcctctc

SEQ ID NO: 1971334 - DNA, 25 bp, Homo sapien
ccccaccgccttcctctcctctcat

SEQ ID NO: 1971335 - DNA, 25 bp, Homo sapien
ctgtaagtgggcaaactacattcag

SEQ ID NO: 1971336 - DNA, 25 bp, Homo sapien
tacattcaggggaagtctggacaga

SEQ ID NO: 1971337 - DNA, 25 bp, Homo sapien
gtaagtgggcaaactacattcaggg

SEQ ID NO: 1971338 - DNA, 25 bp, Homo sapien
tcaggggaagtctggacagacttgc

SEQ ID NO: 1971339 - DNA, 25 bp, Homo sapien
aggacgatgcccctcgtagagttgc

SEQ ID NO: 1971340 - DNA, 25 bp, Homo sapien
aacacagcagaggacgatgcccctc

SEQ ID NO: 1971341 - DNA, 25 bp, Homo sapien
gacgatgcccctcgtagagttgcag

SEQ ID NO: 1971342 - DNA, 25 bp, Homo sapien
gcagaggacgatgcccctcgtagag

SEQ ID NO: 1971343 - DNA, 25 bp, Homo sapien
ctgaaggtggagaacccagggcagc

SEQ ID NO: 1971344 - DNA, 25 bp, Homo sapien
cacgtcctggcagcgacctgcgagt

SEQ ID NO: 1971345 - DNA, 25 bp, Homo sapien
gaacctcatgcaggatggtgctcat

SEQ ID NO: 1971346 - DNA, 25 bp, Homo sapien
agtcctgggcctcgctcttcacttt

SEQ ID NO: 1971347 - DNA, 25 bp, Homo sapien
cactgacgcgatggtcttgctttcc

SEQ ID NO: 1971348 - DNA, 25 bp, Homo sapien
accatagcgtatgtagatgttcaga

SEQ ID NO: 1971349 - DNA, 25 bp, Homo sapien
taccctactagaatggtacatttgc

SEQ ID NO: 1971350 - DNA, 25 bp, Homo sapien
tactttacactacgcttcactcttg

SEQ ID NO: 1971351 - DNA, 25 bp, Homo sapien
ccaccattacagtctcatagggaat

SEQ ID NO: 1971352 - DNA, 25 bp, Homo sapien
tcaaccctgaagaagcgtggatact

SEQ ID NO: 1971353 - DNA, 25 bp, Homo sapien
gagagttgctctcaccgttttttag

SEQ ID NO: 1971354 - DNA, 25 bp, Homo sapien
tcccatccatacctgagagagttgc

SEQ ID NO: 1971355 - DNA, 25 bp, Homo sapien
taccaggaagactaatgatagcaac

SEQ ID NO: 1971356 - DNA, 25 bp, Homo sapien
ccagctgtatgtgcgtgtttatgca

SEQ ID NO: 1971357 - DNA, 25 bp, Homo sapien
gggagttcctcacaggtagctaact

SEQ ID NO: 1971358 - DNA, 25 bp, Homo sapien
aatgtttcttgctcctgtgacaccc

SEQ ID NO: 1971359 - DNA, 25 bp, Homo sapien
ttatgcatttgtcacactcgatggg

SEQ ID NO: 1971360 - DNA, 25 bp, Homo sapien
cctgaggcatctgtgagtgatccca

SEQ ID NO: 1971361 - DNA, 25 bp, Homo sapien
ggcggcatctctttcgtctacggct

SEQ ID NO: 1971362 - DNA, 25 bp, Homo sapien
cgcaggaggcggcatctctttcgtc

SEQ ID NO: 1971363 - DNA, 25 bp, Homo sapien
gtctacggctcctccagactcattt

SEQ ID NO: 1971364 - DNA, 25 bp, Homo sapien
aacagattcatgattggcaggtggc

SEQ ID NO: 1971365 - DNA, 25 bp, Homo sapien
tgcgagctctcacatgcgtgcggtg

SEQ ID NO: 1971366 - DNA, 25 bp, Homo sapien
gggaaataaacagagcgccaactca

SEQ ID NO: 1971367 - DNA, 25 bp, Homo sapien
ttccaccgaggacaatgtgccaagg

SEQ ID NO: 1971368 - DNA, 25 bp, Homo sapien
aatccagcagggtaggttacattag

SEQ ID NO: 1971369 - DNA, 25 bp, Homo sapien
atccagcagggtaggttacattagt

SEQ ID NO: 1971370 - DNA, 25 bp, Homo sapien
gaatccagcagggtaggttacatta

SEQ ID NO: 1971371 - DNA, 25 bp, Homo sapien
attctctcccgtcttgtcagtgctc

SEQ ID NO: 1971372 - DNA, 25 bp, Homo sapien
cttggtgtcacagatcagatggaaa

SEQ ID NO: 1971373 - DNA, 25 bp, Homo sapien
gatggaaattctctcccgtcttgtc

SEQ ID NO: 1971374 - DNA, 25 bp, Homo sapien
gatcagatggaaattctctcccgtc

SEQ ID NO: 1971375 - DNA, 25 bp, Homo sapien
atacacaggttctcagtgttgaact

SEQ ID NO: 1971376 - DNA, 25 bp, Homo sapien
gagaaatccagggtttgttgatgtt

SEQ ID NO: 1971377 - DNA, 25 bp, Homo sapien
accatacacaggttctcagtgttga

SEQ ID NO: 1971378 - DNA, 25 bp, Homo sapien
aaatccagggtttgttgatgttgct

SEQ ID NO: 1971379 - DNA, 25 bp, Homo sapien
catccactggtctgtttggccacca

SEQ ID NO: 1971380 - DNA, 25 bp, Homo sapien
cttcagcaatggtgaggcgcattac

SEQ ID NO: 1971381 - DNA, 25 bp, Homo sapien
tcatccactggtctgtttggccacc

SEQ ID NO: 1971382 - DNA, 25 bp, Homo sapien
ttggccaccagtctcttgtctgtct

SEQ ID NO: 1971383 - DNA, 25 bp, Homo sapien
gatctaacatgtcacccagagacca

SEQ ID NO: 1971384 - DNA, 25 bp, Homo sapien
agatctaacatgtcacccagagacc

SEQ ID NO: 1971385 - DNA, 25 bp, Homo sapien
atctaacatgtcacccagagaccat

SEQ ID NO: 1971386 - DNA, 25 bp, Homo sapien
tctaacatgtcacccagagaccatt

SEQ ID NO: 1971387 - DNA, 25 bp, Homo sapien
tcccaaccctgagctaaagctagtg

SEQ ID NO: 1971388 - DNA, 25 bp, Homo sapien
ataatatggcattgttccatattcc

SEQ ID NO: 1971389 - DNA, 25 bp, Homo sapien
gctagtgaaggtggtagactttcaa

SEQ ID NO: 1971390 - DNA, 25 bp, Homo sapien
cagggaatgagcttctcaggtataa

SEQ ID NO: 1971391 - DNA, 25 bp, Homo sapien
agccctctggcttgccaagtctgtt

SEQ ID NO: 1971392 - DNA, 25 bp, Homo sapien
ttatcctgtggcccctctagcttct

SEQ ID NO: 1971393 - DNA, 25 bp, Homo sapien
tcttcagccctctggcttgccaagt

SEQ ID NO: 1971394 - DNA, 25 bp, Homo sapien
cctctagcttcttcagccctctggc

SEQ ID NO: 1971395 - DNA, 25 bp, Homo sapien
tataagtacctgttgatttgtctct

SEQ ID NO: 1971396 - DNA, 25 bp, Homo sapien
taagtacctgttgatttgtctctct

SEQ ID NO: 1971397 - DNA, 25 bp, Homo sapien
agtacctgttgatttgtctctctct

SEQ ID NO: 1971398 - DNA, 25 bp, Homo sapien
attataagtacctgttgatttgtct

SEQ ID NO: 1971399 - DNA, 25 bp, Homo sapien
caaataggaagtaacagttgggttg

SEQ ID NO: 1971400 - DNA, 25 bp, Homo sapien
agttgggttggaagatcccatgaaa

SEQ ID NO: 1971401 - DNA, 25 bp, Homo sapien
ggcacctgccatcgcggtcaccagg

SEQ ID NO: 1971402 - DNA, 25 bp, Homo sapien
caggccccactgagaacaggccagg

SEQ ID NO: 1971403 - DNA, 25 bp, Homo sapien
ggtgcaaaaggcattgatggtaaag

SEQ ID NO: 1971404 - DNA, 25 bp, Homo sapien
tgcaaaaggcattgatggtaaaggt

SEQ ID NO: 1971405 - DNA, 25 bp, Homo sapien
caaaaggcattgatggtaaaggtgt

SEQ ID NO: 1971406 - DNA, 25 bp, Homo sapien
aaaaggcattgatggtaaaggtgtg

SEQ ID NO: 1971407 - DNA, 25 bp, Homo sapien
agagcacacgggtccctggtaattt

SEQ ID NO: 1971408 - DNA, 25 bp, Homo sapien
tccttccttgtgtagagccttacat

SEQ ID NO: 1971409 - DNA, 25 bp, Homo sapien
tccttgtgtagagccttacatattt

SEQ ID NO: 1971410 - DNA, 25 bp, Homo sapien
cagagcacacgggtccctggtaatt

SEQ ID NO: 1971411 - DNA, 25 bp, Homo sapien
tttactgaagcgaatgtggcatttc

SEQ ID NO: 1971412 - DNA, 25 bp, Homo sapien
tgtctgtttactgaagcgaatgtgg

SEQ ID NO: 1971413 - DNA, 25 bp, Homo sapien
ctgtttactgaagcgaatgtggcat

SEQ ID NO: 1971414 - DNA, 25 bp, Homo sapien
gatgtctgtttactgaagcgaatgt

SEQ ID NO: 1971415 - DNA, 25 bp, Homo sapien
atgtgcagtgctctcctctttgaac

SEQ ID NO: 1971416 - DNA, 25 bp, Homo sapien
agtgctctcctctttgaactgctgt

SEQ ID NO: 1971417 - DNA, 25 bp, Homo sapien
tttgaactgctgttgagtgctttgc

SEQ ID NO: 1971418 - DNA, 25 bp, Homo sapien
tttcctttctcatgtgcagtgctct

SEQ ID NO: 1971419 - DNA, 25 bp, Homo sapien
gtgaaccatgaggcaccactatgcc

SEQ ID NO: 1971420 - DNA, 25 bp, Homo sapien
cagggtgagaccctgcctgtagaaa

SEQ ID NO: 1971421 - DNA, 25 bp, Homo sapien
gaccctgcctgtagaaagaaagaaa

SEQ ID NO: 1971422 - DNA, 25 bp, Homo sapien
cagattatgaggtcaagtaatcgag

SEQ ID NO: 1971423 - DNA, 25 bp, Homo sapien
tcacaatgctgaactcctggtaagg

SEQ ID NO: 1971424 - DNA, 25 bp, Homo sapien
tcgggtgctaacaagttaagacgga

SEQ ID NO: 1971425 - DNA, 25 bp, Homo sapien
gctggccagtatgccagtgttttca

SEQ ID NO: 1971426 - DNA, 25 bp, Homo sapien
taagacggatgctggccagtatgcc

SEQ ID NO: 1971427 - DNA, 25 bp, Homo sapien
gccaggcgagaatcccgagcgcgcc

SEQ ID NO: 1971428 - DNA, 25 bp, Homo sapien
cgcgccaggcgagaatcccgagcgc

SEQ ID NO: 1971429 - DNA, 25 bp, Homo sapien
ccagccgcgccaggcgagaatcccg

SEQ ID NO: 1971430 - DNA, 25 bp, Homo sapien
aggcgagaatcccgagcgcgcccag

SEQ ID NO: 1971431 - DNA, 25 bp, Homo sapien
ccgggcccggagcgccgcggagaag

SEQ ID NO: 1971432 - DNA, 25 bp, Homo sapien
cggagagcaagagaagggcggcggc

SEQ ID NO: 1971433 - DNA, 25 bp, Homo sapien
gccgggctcagcttgagcctcctta

SEQ ID NO: 1971434 - DNA, 25 bp, Homo sapien
gacacggagagcaagagaagggcgg

SEQ ID NO: 1971435 - DNA, 25 bp, Homo sapien
cggcagcgccgggctcagcttgagc

SEQ ID NO: 1971436 - DNA, 25 bp, Homo sapien
ctaaggccgcagtgtccttgccgcc

SEQ ID NO: 1971437 - DNA, 25 bp, Homo sapien
ttgccgccgcctgcaggcccgtgca

SEQ ID NO: 1971438 - DNA, 25 bp, Homo sapien
gccgcagtgtccttgccgccgcctg

SEQ ID NO: 1971439 - DNA, 25 bp, Homo sapien
ccgccgcctgcaggcccgtgcagag

SEQ ID NO: 1971440 - DNA, 25 bp, Homo sapien
cctcctcgaccaaactaggagtaca

SEQ ID NO: 1971441 - DNA, 25 bp, Homo sapien
agtacacttcccagtatggcaaccc

SEQ ID NO: 1971442 - DNA, 25 bp, Homo sapien
gtacacttcccagtatggcaaccct

SEQ ID NO: 1971443 - DNA, 25 bp, Homo sapien
gaccaaactaggagtacacttccca

SEQ ID NO: 1971444 - DNA, 25 bp, Homo sapien
ggccagagcaggcctagattctgcg

SEQ ID NO: 1971445 - DNA, 25 bp, Homo sapien
ctggccagagcaggcctagattctg

SEQ ID NO: 1971446 - DNA, 25 bp, Homo sapien
tggccagagcaggcctagattctgc

SEQ ID NO: 1971447 - DNA, 25 bp, Homo sapien
tcggagcgacggtcttcgaaactga

SEQ ID NO: 1971448 - DNA, 25 bp, Homo sapien
tgctgcaacctaaaagcatcgaggt

SEQ ID NO: 1971449 - DNA, 25 bp, Homo sapien
acgagaggtgcctccttcggagcga

SEQ ID NO: 1971450 - DNA, 25 bp, Homo sapien
gcatcgaggtcactaggcttgaaac

SEQ ID NO: 1971451 - DNA, 25 bp, Homo sapien
tgcggcgccgttctttcagagttag

SEQ ID NO: 1971452 - DNA, 25 bp, Homo sapien
aactgcagtaaatcaaacattggcc

SEQ ID NO: 1971453 - DNA, 25 bp, Homo sapien
aattgggtgctgttatttgcggcgc

SEQ ID NO: 1971454 - DNA, 25 bp, Homo sapien
tttccgatatgcaaagcacaactgc

SEQ ID NO: 1971455 - DNA, 25 bp, Homo sapien
acaggccctgttgttataatcgaca

SEQ ID NO: 1971456 - DNA, 25 bp, Homo sapien
acaaagtcatagagccacaaaaggc

SEQ ID NO: 1971457 - DNA, 25 bp, Homo sapien
tacactagctccctcttgctgagaa

SEQ ID NO: 1971458 - DNA, 25 bp, Homo sapien
cagcagtgcatgacgtacagtaaga

SEQ ID NO: 1971459 - DNA, 25 bp, Homo sapien
acctagaataccctcggaccccatg

SEQ ID NO: 1971460 - DNA, 25 bp, Homo sapien
tggcttctcatacataccgatcttt

SEQ ID NO: 1971461 - DNA, 25 bp, Homo sapien
ttcttgccaacaagactttaagttg

SEQ ID NO: 1971462 - DNA, 25 bp, Homo sapien
catgcccaatctgttagtattacct

SEQ ID NO: 1971463 - DNA, 25 bp, Homo sapien
tgtagaaacaaattgtctgtaaggt

SEQ ID NO: 1971464 - DNA, 25 bp, Homo sapien
ttgtagaaacaaattgtctgtaagg

SEQ ID NO: 1971465 - DNA, 25 bp, Homo sapien
ttttgtagaaacaaattgtctgtaa

SEQ ID NO: 1971466 - DNA, 25 bp, Homo sapien
tttgtagaaacaaattgtctgtaag

SEQ ID NO: 1971467 - DNA, 25 bp, Homo sapien
taccgcacaattagtgacagacctg

SEQ ID NO: 1971468 - DNA, 25 bp, Homo sapien
gaaactcaggctcaaagacagtaac

SEQ ID NO: 1971469 - DNA, 25 bp, Homo sapien
tgagcccaggctctttcaatctaag

SEQ ID NO: 1971470 - DNA, 25 bp, Homo sapien
taagaagctgtaagacaaaactgac

SEQ ID NO: 1971471 - DNA, 25 bp, Homo sapien
tgtctgtgcattactgtaagtcttc

SEQ ID NO: 1971472 - DNA, 25 bp, Homo sapien
agtcttctggctgatccctttttct

SEQ ID NO: 1971473 - DNA, 25 bp, Homo sapien
catgtctgtgcattactgtaagtct

SEQ ID NO: 1971474 - DNA, 25 bp, Homo sapien
tctgtgcattactgtaagtcttctg

SEQ ID NO: 1971475 - DNA, 25 bp, Homo sapien
catgaagttcatgctgcctactgac

SEQ ID NO: 1971476 - DNA, 25 bp, Homo sapien
aaagaaaccagtaacagctgctgtc

SEQ ID NO: 1971477 - DNA, 25 bp, Homo sapien
gatatgaatgtcaaagggaactgac

SEQ ID NO: 1971478 - DNA, 25 bp, Homo sapien
cctcccttaccgtgagatatgaatg

SEQ ID NO: 1971479 - DNA, 25 bp, Homo sapien
cactcacctaggctgttccatgtca

SEQ ID NO: 1971480 - DNA, 25 bp, Homo sapien
tgagtgagttttcttacagacaggg

SEQ ID NO: 1971481 - DNA, 25 bp, Homo sapien
ttagcagtgatgcacagcactcacc

SEQ ID NO: 1971482 - DNA, 25 bp, Homo sapien
caagctcaaggtcccttagcagtga

SEQ ID NO: 1971483 - DNA, 25 bp, Homo sapien
gtagggaaagtattcagtcttctcc

SEQ ID NO: 1971484 - DNA, 25 bp, Homo sapien
tttatccactccttgcaggctgtcc

SEQ ID NO: 1971485 - DNA, 25 bp, Homo sapien
gagaactcatccattaacttgacag

SEQ ID NO: 1971486 - DNA, 25 bp, Homo sapien
ttacacacatttgatgacaagaggc

SEQ ID NO: 1971487 - DNA, 25 bp, Homo sapien
gatctgctgacttgtgtaccttcct

SEQ ID NO: 1971488 - DNA, 25 bp, Homo sapien
gaaccaggacaacccagatctgctg

SEQ ID NO: 1971489 - DNA, 25 bp, Homo sapien
gaatcaacttggatgccagctttca

SEQ ID NO: 1971490 - DNA, 25 bp, Homo sapien
cacacgagtcaataggagaaccagg

SEQ ID NO: 1971491 - DNA, 25 bp, Homo sapien
tcttatgcaaattccttacatgtct

SEQ ID NO: 1971492 - DNA, 25 bp, Homo sapien
ttatgcaaattccttacatgtcttc

SEQ ID NO: 1971493 - DNA, 25 bp, Homo sapien
tgtcttatgcaaattccttacatgt

SEQ ID NO: 1971494 - DNA, 25 bp, Homo sapien
aactgtcttatgcaaattccttaca

SEQ ID NO: 1971495 - DNA, 25 bp, Homo sapien
aagctcctccagctccattttgcat

SEQ ID NO: 1971496 - DNA, 25 bp, Homo sapien
aataaagctcctccagctccatttt

SEQ ID NO: 1971497 - DNA, 25 bp, Homo sapien
taaagctcctccagctccattttgc

SEQ ID NO: 1971498 - DNA, 25 bp, Homo sapien
cacaaataaagctcctccagctcca

SEQ ID NO: 1971499 - DNA, 25 bp, Homo sapien
agctgtatgtaaattctcacgatga

SEQ ID NO: 1971500 - DNA, 25 bp, Homo sapien
gtaaattctcacgatgaccatcata

SEQ ID NO: 1971501 - DNA, 25 bp, Homo sapien
tcttttgaaatgtagtaaattcaat

SEQ ID NO: 1971502 - DNA, 25 bp, Homo sapien
tacaatggatttaccccaatttcca

SEQ ID NO: 1971503 - DNA, 25 bp, Homo sapien
tggagtatcagggttattctcagga

SEQ ID NO: 1971504 - DNA, 25 bp, Homo sapien
caaatggagtatcagggttattctc

SEQ ID NO: 1971505 - DNA, 25 bp, Homo sapien
ttttctggtgtgaaatcaaatggag

SEQ ID NO: 1971506 - DNA, 25 bp, Homo sapien
aatggagtatcagggttattctcag

SEQ ID NO: 1971507 - DNA, 25 bp, Homo sapien
ggcaaccacccattctgcctttggg

SEQ ID NO: 1971508 - DNA, 25 bp, Homo sapien
cctttgggctaaatccaggactgga

SEQ ID NO: 1971509 - DNA, 25 bp, Homo sapien
tcatagcagagatgggcaaccaccc

SEQ ID NO: 1971510 - DNA, 25 bp, Homo sapien
ctgctttatggccttctggatagtt

SEQ ID NO: 1971511 - DNA, 25 bp, Homo sapien
tctgtctacaactttctaggtgacc

SEQ ID NO: 1971512 - DNA, 25 bp, Homo sapien
tagtactttctaacccttcacgtca

SEQ ID NO: 1971513 - DNA, 25 bp, Homo sapien
tagggaaaacgaggatttctagctg

SEQ ID NO: 1971514 - DNA, 25 bp, Homo sapien
gaagagcgggcatttcagacaagta

SEQ ID NO: 1971515 - DNA, 25 bp, Homo sapien
gaggtacttgtaaaacttctgcaac

SEQ ID NO: 1971516 - DNA, 25 bp, Homo sapien
aactggctttcgattatacattgta

SEQ ID NO: 1971517 - DNA, 25 bp, Homo sapien
cattgtataaaaagttgctacttca

SEQ ID NO: 1971518 - DNA, 25 bp, Homo sapien
catgcagggtgtagtagtgcagacc

SEQ ID NO: 1971519 - DNA, 25 bp, Homo sapien
tcagctttaacactaagaactgagg

SEQ ID NO: 1971520 - DNA, 25 bp, Homo sapien
aagtacagatccaataagatggcag

SEQ ID NO: 1971521 - DNA, 25 bp, Homo sapien
tagaaatgtaccaaatctagagaga

SEQ ID NO: 1971522 - DNA, 25 bp, Homo sapien
taaagatgtggaaacacagtaacac

SEQ ID NO: 1971523 - DNA, 25 bp, Homo sapien
caggtggagtggctccgtcctataa

SEQ ID NO: 1971524 - DNA, 25 bp, Homo sapien
tgaaccattggtgcgttcacacagg

SEQ ID NO: 1971525 - DNA, 25 bp, Homo sapien
atttatttgaaccattggtgcgttc

SEQ ID NO: 1971526 - DNA, 25 bp, Homo sapien
accattggtgcgttcacacaggccc

SEQ ID NO: 1971527 - DNA, 25 bp, Homo sapien
gagtgaaaagtttgtcaggtgtagt

SEQ ID NO: 1971528 - DNA, 25 bp, Homo sapien
tattactctcagttaagtcctgata

SEQ ID NO: 1971529 - DNA, 25 bp, Homo sapien
tctcagttaagtcctgatagttggc

SEQ ID NO: 1971530 - DNA, 25 bp, Homo sapien
agttggctacactaggattattttc

SEQ ID NO: 1971531 - DNA, 25 bp, Homo sapien
aagtcctgatagttggctacactag

SEQ ID NO: 1971532 - DNA, 25 bp, Homo sapien
caggtatgaaccaccacgcatggca

SEQ ID NO: 1971533 - DNA, 25 bp, Homo sapien
tatgaaccaccacgcatggcacaaa

SEQ ID NO: 1971534 - DNA, 25 bp, Homo sapien
tgaaccaccacgcatggcacaaaat

SEQ ID NO: 1971535 - DNA, 25 bp, Homo sapien
ggtatgaaccaccacgcatggcaca

SEQ ID NO: 1971536 - DNA, 25 bp, Homo sapien
tgggattttgccagccttgagctca

SEQ ID NO: 1971537 - DNA, 25 bp, Homo sapien
ttttgggattttgccagccttgagc

SEQ ID NO: 1971538 - DNA, 25 bp, Homo sapien
ctggttttgggattttgccagcctt

SEQ ID NO: 1971539 - DNA, 25 bp, Homo sapien
cagccttgagctcatcaataatttc

SEQ ID NO: 1971540 - DNA, 25 bp, Homo sapien
tgggacgggagcaacctggataaat

SEQ ID NO: 1971541 - DNA, 25 bp, Homo sapien
ggaggcagtcccacaatgctctgtg

SEQ ID NO: 1971542 - DNA, 25 bp, Homo sapien
caaaataccatgattaggccgggca

SEQ ID NO: 1971543 - DNA, 25 bp, Homo sapien
taatgtaacacaggtatgggacggg

SEQ ID NO: 1971544 - DNA, 25 bp, Homo sapien
taagtaagggataggagcactagct

SEQ ID NO: 1971545 - DNA, 25 bp, Homo sapien
taaaacgggagtaagagcacatcac

SEQ ID NO: 1971546 - DNA, 25 bp, Homo sapien
tataggctcaggttgttaagaacag

SEQ ID NO: 1971547 - DNA, 25 bp, Homo sapien
aaaactccaaatgtgctgagggaag

SEQ ID NO: 1971548 - DNA, 25 bp, Homo sapien
cataccatggatgtcttaacaggca

SEQ ID NO: 1971549 - DNA, 25 bp, Homo sapien
tctaatctccacatagcaactatgg

SEQ ID NO: 1971550 - DNA, 25 bp, Homo sapien
gatgaatccccaatttgtgtttcca

SEQ ID NO: 1971551 - DNA, 25 bp, Homo sapien
tctacctatcagcatcataccatgg

SEQ ID NO: 1971552 - DNA, 25 bp, Homo sapien
tgttaaggccttcagacaactgcag

SEQ ID NO: 1971553 - DNA, 25 bp, Homo sapien
ctaacgcccatggtgttcaagagtc

SEQ ID NO: 1971554 - DNA, 25 bp, Homo sapien
tgagcaatcaatgtccctaacgccc

SEQ ID NO: 1971555 - DNA, 25 bp, Homo sapien
gcagtggtactcaggaatcagttac

SEQ ID NO: 1971556 - DNA, 25 bp, Homo sapien
gaattaatcgtaagtacttcctgag

SEQ ID NO: 1971557 - DNA, 25 bp, Homo sapien
tcccatggcattgtatagaaaaacg

SEQ ID NO: 1971558 - DNA, 25 bp, Homo sapien
tagaaaaacgggagtcccagtgatc

SEQ ID NO: 1971559 - DNA, 25 bp, Homo sapien
taatctggtctagagtttcctaaag

SEQ ID NO: 1971560 - DNA, 25 bp, Homo sapien
atcttccaaaattaatgagctcctt

SEQ ID NO: 1971561 - DNA, 25 bp, Homo sapien
attaatgagctccttaatatcgaca

SEQ ID NO: 1971562 - DNA, 25 bp, Homo sapien
ggatagatatggatcttccaaaatt

SEQ ID NO: 1971563 - DNA, 25 bp, Homo sapien
cagtttggatagatatggatcttcc

SEQ ID NO: 1971564 - DNA, 25 bp, Homo sapien
tgcctattgataggcaccactgctg

SEQ ID NO: 1971565 - DNA, 25 bp, Homo sapien
cctattgataggcaccactgctgct

SEQ ID NO: 1971566 - DNA, 25 bp, Homo sapien
ctattgataggcaccactgctgctc

SEQ ID NO: 1971567 - DNA, 25 bp, Homo sapien
gttgcctattgataggcaccactgc

SEQ ID NO: 1971568 - DNA, 25 bp, Homo sapien
gaatcaaagcaaagaactacggcaa

SEQ ID NO: 1971569 - DNA, 25 bp, Homo sapien
tccttacgatgccacaagacaagtg

SEQ ID NO: 1971570 - DNA, 25 bp, Homo sapien
gacaatgtcccttagaagcagcgaa

SEQ ID NO: 1971571 - DNA, 25 bp, Homo sapien
cagtcacagtgaatagagggaatac

SEQ ID NO: 1971572 - DNA, 25 bp, Homo sapien
ctccagctggctcacaagagaagcg

SEQ ID NO: 1971573 - DNA, 25 bp, Homo sapien
agctggctcacaagagaagcgtcca

SEQ ID NO: 1971574 - DNA, 25 bp, Homo sapien
tggctcacaagagaagcgtccactc

SEQ ID NO: 1971575 - DNA, 25 bp, Homo sapien
tccagctggctcacaagagaagcgt

SEQ ID NO: 1971576 - DNA, 25 bp, Homo sapien
tttatttctctagtgacatatttac

SEQ ID NO: 1971577 - DNA, 25 bp, Homo sapien
tatttctctagtgacatatttacag

SEQ ID NO: 1971578 - DNA, 25 bp, Homo sapien
ttctctagtgacatatttacagttc

SEQ ID NO: 1971579 - DNA, 25 bp, Homo sapien
tctagtgacatatttacagttcaat

SEQ ID NO: 1971580 - DNA, 25 bp, Homo sapien
agggcaggcgccggtgacgctgctg

SEQ ID NO: 1971581 - DNA, 25 bp, Homo sapien
atcaaaggctgggcgaagaggcagg

SEQ ID NO: 1971582 - DNA, 25 bp, Homo sapien
tatccgacaaaggagggggaatcaa

SEQ ID NO: 1971583 - DNA, 25 bp, Homo sapien
ctatccgacaaaggagggggaatca

SEQ ID NO: 1971584 - DNA, 25 bp, Homo sapien
aactccgcccttcgtgctggtcggt

SEQ ID NO: 1971585 - DNA, 25 bp, Homo sapien
ctccacgccccactcggactagtgt

SEQ ID NO: 1971586 - DNA, 25 bp, Homo sapien
actcggactagtgtcaccgcctccc

SEQ ID NO: 1971587 - DNA, 25 bp, Homo sapien
ggaactccgcccttcgtgctggtcg

SEQ ID NO: 1971588 - DNA, 25 bp, Homo sapien
gcacgtgacacccgcggacacgtga

SEQ ID NO: 1971589 - DNA, 25 bp, Homo sapien
agcacgtgacacccgcggacacgtg

SEQ ID NO: 1971590 - DNA, 25 bp, Homo sapien
tcggcgtagccgtcgctgtcgttgt

SEQ ID NO: 1971591 - DNA, 25 bp, Homo sapien
cccggaacgagtgcttcggcgtagc

SEQ ID NO: 1971592 - DNA, 25 bp, Homo sapien
gtcgttgtcttcgtcgccgctgcag

SEQ ID NO: 1971593 - DNA, 25 bp, Homo sapien
gcttgaaaacatctccggtctcggt

SEQ ID NO: 1971594 - DNA, 25 bp, Homo sapien
tcctcctttcctgtcgccacgcccc

SEQ ID NO: 1971595 - DNA, 25 bp, Homo sapien
gggaacgggagcagcgcagaactga

SEQ ID NO: 1971596 - DNA, 25 bp, Homo sapien
ggacaagctcgaaaccgcgcccctc

SEQ ID NO: 1971597 - DNA, 25 bp, Homo sapien
cctggcgccggggacaagctcgaaa

SEQ ID NO: 1971598 - DNA, 25 bp, Homo sapien
tcactgtcaggcgagctacggctcg

SEQ ID NO: 1971599 - DNA, 25 bp, Homo sapien
cactgtcaggcgagctacggctcgg

SEQ ID NO: 1971600 - DNA, 25 bp, Homo sapien
ggcctgtcactgtcaggcgagctac

SEQ ID NO: 1971601 - DNA, 25 bp, Homo sapien
ctgtcactgtcaggcgagctacggc

SEQ ID NO: 1971602 - DNA, 25 bp, Homo sapien
gcacgcacacgctcctccggccccg

SEQ ID NO: 1971603 - DNA, 25 bp, Homo sapien
actcgcacgcacacgctcctccggc

SEQ ID NO: 1971604 - DNA, 25 bp, Homo sapien
ctcgcacgcacacgctcctccggcc

SEQ ID NO: 1971605 - DNA, 25 bp, Homo sapien
gcacacgctcctccggccccgccat

SEQ ID NO: 1971606 - DNA, 25 bp, Homo sapien
gatctgtaaggatgcgtcactccac

SEQ ID NO: 1971607 - DNA, 25 bp, Homo sapien
tttccccggacactactaaagcagc

SEQ ID NO: 1971608 - DNA, 25 bp, Homo sapien
gatctaagaacctgacgtgctccag

SEQ ID NO: 1971609 - DNA, 25 bp, Homo sapien
tgaaaaacgatgacgggaactgcct

SEQ ID NO: 1971610 - DNA, 25 bp, Homo sapien
gtgtccagtggaaattacaatcccg

SEQ ID NO: 1971611 - DNA, 25 bp, Homo sapien
atcccggtgactacactgctttaaa

SEQ ID NO: 1971612 - DNA, 25 bp, Homo sapien
ttcgcagtttaaccacgggtgtcca

SEQ ID NO: 1971613 - DNA, 25 bp, Homo sapien
gcagtttaaccacgggtgtccagtg

SEQ ID NO: 1971614 - DNA, 25 bp, Homo sapien
tatcatcagattagctgacaatcct

SEQ ID NO: 1971615 - DNA, 25 bp, Homo sapien
atcatcagattagctgacaatcctt

SEQ ID NO: 1971616 - DNA, 25 bp, Homo sapien
gtatcatcagattagctgacaatcc

SEQ ID NO: 1971617 - DNA, 25 bp, Homo sapien
taagcccctcatcctagtaattgtg

SEQ ID NO: 1971618 - DNA, 25 bp, Homo sapien
ttaagttgcccataaacagagaatg

SEQ ID NO: 1971619 - DNA, 25 bp, Homo sapien
tatgctaaccatttacaacgtgatg

SEQ ID NO: 1971620 - DNA, 25 bp, Homo sapien
aaaggcaaatgtcactgatggtgca

SEQ ID NO: 1971621 - DNA, 25 bp, Homo sapien
tatttagatagtccaattgcctgaa

SEQ ID NO: 1971622 - DNA, 25 bp, Homo sapien
caaaggtaaacctacaggatagagt

SEQ ID NO: 1971623 - DNA, 25 bp, Homo sapien
caaccatcgctttccttaatataga

SEQ ID NO: 1971624 - DNA, 25 bp, Homo sapien
aaccggtatctactaatcctagcca

SEQ ID NO: 1971625 - DNA, 25 bp, Homo sapien
actgtcctcaacaatgtccttaaaa

SEQ ID NO: 1971626 - DNA, 25 bp, Homo sapien
aaagtacaggcatctacaatctttt

SEQ ID NO: 1971627 - DNA, 25 bp, Homo sapien
caataaactgtcctcaacaatgtcc

SEQ ID NO: 1971628 - DNA, 25 bp, Homo sapien
taaactgtcctcaacaatgtcctta

SEQ ID NO: 1971629 - DNA, 25 bp, Homo sapien
gctatttaagccattcaagtgagaa

SEQ ID NO: 1971630 - DNA, 25 bp, Homo sapien
ttcctacttaaaccgaacaagcagc

SEQ ID NO: 1971631 - DNA, 25 bp, Homo sapien
gcttctgagatattaactggacttc

SEQ ID NO: 1971632 - DNA, 25 bp, Homo sapien
tctataaaaagggaacatgctctct

SEQ ID NO: 1971633 - DNA, 25 bp, Homo sapien
agttaggaaagtgaccatcactttt

SEQ ID NO: 1971634 - DNA, 25 bp, Homo sapien
cagttaggaaagtgaccatcacttt

SEQ ID NO: 1971635 - DNA, 25 bp, Homo sapien
ttaggaaagtgaccatcacttttta

SEQ ID NO: 1971636 - DNA, 25 bp, Homo sapien
ggaaagtgaccatcactttttatgt

SEQ ID NO: 1971637 - DNA, 25 bp, Homo sapien
taggctagccacaaactcatggcct

SEQ ID NO: 1971638 - DNA, 25 bp, Homo sapien
taaacccaggctggtagatggcctg

SEQ ID NO: 1971639 - DNA, 25 bp, Homo sapien
gagctgcagccgctttcagggcaaa

SEQ ID NO: 1971640 - DNA, 25 bp, Homo sapien
tttgtccagaagtccctaaaacatg

SEQ ID NO: 1971641 - DNA, 25 bp, Homo sapien
tctgggattatcctacaggtgtact

SEQ ID NO: 1971642 - DNA, 25 bp, Homo sapien
ctgctgtgacagcaaatactaggtc

SEQ ID NO: 1971643 - DNA, 25 bp, Homo sapien
ctccttggagaggtatttggcagaa

SEQ ID NO: 1971644 - DNA, 25 bp, Homo sapien
ctagtatgcccaaaacactggaggg

SEQ ID NO: 1971645 - DNA, 25 bp, Homo sapien
gatataaagcttctctagccaaaga

SEQ ID NO: 1971646 - DNA, 25 bp, Homo sapien
tgagtggatattgggctgtttctac

SEQ ID NO: 1971647 - DNA, 25 bp, Homo sapien
tatctccatgaacctactctaggca

SEQ ID NO: 1971648 - DNA, 25 bp, Homo sapien
taggcacttcgtgcaagtgcaatca

SEQ ID NO: 1971649 - DNA, 25 bp, Homo sapien
aatcaataaatgtaagccagcatat

SEQ ID NO: 1971650 - DNA, 25 bp, Homo sapien
ttagaccaatatctttgatgaacac

SEQ ID NO: 1971651 - DNA, 25 bp, Homo sapien
gaccaatatctttgatgaacactga

SEQ ID NO: 1971652 - DNA, 25 bp, Homo sapien
tcctcgataaattactggcaaaccg

SEQ ID NO: 1971653 - DNA, 25 bp, Homo sapien
tgtaaatgggccaaatgctccaatt

SEQ ID NO: 1971654 - DNA, 25 bp, Homo sapien
aatgtaaatgggccaaatgctccaa

SEQ ID NO: 1971655 - DNA, 25 bp, Homo sapien
taaatgggccaaatgctccaattaa

SEQ ID NO: 1971656 - DNA, 25 bp, Homo sapien
tttaaatgtaaatgggccaaatgct

SEQ ID NO: 1971657 - DNA, 25 bp, Homo sapien
ttttatcagtcttctcatcctggat

SEQ ID NO: 1971658 - DNA, 25 bp, Homo sapien
tggttttgtgaacccagatttgggc

SEQ ID NO: 1971659 - DNA, 25 bp, Homo sapien
ctgaattggttttgtgaacccagat

SEQ ID NO: 1971660 - DNA, 25 bp, Homo sapien
gttttgtgaacccagatttgggcat

SEQ ID NO: 1971661 - DNA, 25 bp, Homo sapien
attggttttgtgaacccagatttgg

SEQ ID NO: 1971662 - DNA, 25 bp, Homo sapien
tggagttttgctgtaggatgcaatc

SEQ ID NO: 1971663 - DNA, 25 bp, Homo sapien
aggaagtttacgtttcatggatgat

SEQ ID NO: 1971664 - DNA, 25 bp, Homo sapien
tcttgatgggctaatagtaaaagga

SEQ ID NO: 1971665 - DNA, 25 bp, Homo sapien
cacatcacttcgttcaatttttgga

SEQ ID NO: 1971666 - DNA, 25 bp, Homo sapien
cttcacagtttcagctaatagttta

SEQ ID NO: 1971667 - DNA, 25 bp, Homo sapien
caaactataattgttctgaaccact

SEQ ID NO: 1971668 - DNA, 25 bp, Homo sapien
cacttagaagatctttaaatactac

SEQ ID NO: 1971669 - DNA, 25 bp, Homo sapien
taaccactgggtgattcagaccaaa

SEQ ID NO: 1971670 - DNA, 25 bp, Homo sapien
aaaactaaaggcattgcttctttat

SEQ ID NO: 1971671 - DNA, 25 bp, Homo sapien
taatcccttgctagagataagatga

SEQ ID NO: 1971672 - DNA, 25 bp, Homo sapien
ttttgttctgtacccaaaacacatc

SEQ ID NO: 1971673 - DNA, 25 bp, Homo sapien
taaaagacactgtctactataaaat

SEQ ID NO: 1971674 - DNA, 25 bp, Homo sapien
gggcatctgaatagtctataaagct

SEQ ID NO: 1971675 - DNA, 25 bp, Homo sapien
tctttggcttttactcaaacaggta

SEQ ID NO: 1971676 - DNA, 25 bp, Homo sapien
cctttggaagtaagcaaccactctg

SEQ ID NO: 1971677 - DNA, 25 bp, Homo sapien
taatgtagtttaccagtttatccaa

SEQ ID NO: 1971678 - DNA, 25 bp, Homo sapien
atggaattctggccgggcacagtgg

SEQ ID NO: 1971679 - DNA, 25 bp, Homo sapien
ctcacgcctgtaatcccagcacttc

SEQ ID NO: 1971680 - DNA, 25 bp, Homo sapien
cctgaggtcagaagttcaagaccag

SEQ ID NO: 1971681 - DNA, 25 bp, Homo sapien
tcgggaggccaaggtgggtggatta

SEQ ID NO: 1971682 - DNA, 25 bp, Homo sapien
taagaagatataagtctctcccccc

SEQ ID NO: 1971683 - DNA, 25 bp, Homo sapien
ccccaattttcacttgtatgtcctg

SEQ ID NO: 1971684 - DNA, 25 bp, Homo sapien
ctgagtatgtcctgtaagaagatat

SEQ ID NO: 1971685 - DNA, 25 bp, Homo sapien
gaagatataagtctctccccccaat

SEQ ID NO: 1971686 - DNA, 25 bp, Homo sapien
taaagactattcaaagcaaacagag

SEQ ID NO: 1971687 - DNA, 25 bp, Homo sapien
gagaaatggacttttcaacgctcca

SEQ ID NO: 1971688 - DNA, 25 bp, Homo sapien
gccctaataatagacaagaactttg

SEQ ID NO: 1971689 - DNA, 25 bp, Homo sapien
cattcagacagcctagggatttttt

SEQ ID NO: 1971690 - DNA, 25 bp, Homo sapien
tctgttttcgctcagagagtggata

SEQ ID NO: 1971691 - DNA, 25 bp, Homo sapien
ccaaaaagaatgctaactggtgtgg

SEQ ID NO: 1971692 - DNA, 25 bp, Homo sapien
catctgcataagaagtgccatctgt

SEQ ID NO: 1971693 - DNA, 25 bp, Homo sapien
tgctgtcatctgcataagaagtgcc

SEQ ID NO: 1971694 - DNA, 25 bp, Homo sapien
tgcctgaggaaaactagggatacac

SEQ ID NO: 1971695 - DNA, 25 bp, Homo sapien
tttttgtcctgctggtaagtcatca

SEQ ID NO: 1971696 - DNA, 25 bp, Homo sapien
tacacatggtgtaaagagccctact

SEQ ID NO: 1971697 - DNA, 25 bp, Homo sapien
taagacgagactacagttgcctgag

SEQ ID NO: 1971698 - DNA, 25 bp, Homo sapien
gaagacttctcatataccacagcgg

SEQ ID NO: 1971699 - DNA, 25 bp, Homo sapien
tagagagttgactaagaatcaccct

SEQ ID NO: 1971700 - DNA, 25 bp, Homo sapien
cttaaaaagaccaactgcagaacag

SEQ ID NO: 1971701 - DNA, 25 bp, Homo sapien
gaaaagggccttatctatcttactc

SEQ ID NO: 1971702 - DNA, 25 bp, Homo sapien
aatagcagccatgtgtaaaggagtt

SEQ ID NO: 1971703 - DNA, 25 bp, Homo sapien
ttcttttgggcaggcgttgtttgtg

SEQ ID NO: 1971704 - DNA, 25 bp, Homo sapien
tttcacatctcctcgaatagcagcc

SEQ ID NO: 1971705 - DNA, 25 bp, Homo sapien
ctttctgtcgagatgaagaactggg

SEQ ID NO: 1971706 - DNA, 25 bp, Homo sapien
tagcagaatcatggagtggagtgtc

SEQ ID NO: 1971707 - DNA, 25 bp, Homo sapien
aatatccaacattgcaagcttcatg

SEQ ID NO: 1971708 - DNA, 25 bp, Homo sapien
tctctgtgcccactactagcagaat

SEQ ID NO: 1971709 - DNA, 25 bp, Homo sapien
tcttagcaacatcgtaatatccaac

SEQ ID NO: 1971710 - DNA, 25 bp, Homo sapien
tatcaaagccagaaagtaagtcagt

SEQ ID NO: 1971711 - DNA, 25 bp, Homo sapien
tgtaagtacatgagctcaaaaggtc

SEQ ID NO: 1971712 - DNA, 25 bp, Homo sapien
ggtgactcctactatcctaggcatg

SEQ ID NO: 1971713 - DNA, 25 bp, Homo sapien
ctaggtgacaagcagttccagagta

SEQ ID NO: 1971714 - DNA, 25 bp, Homo sapien
aattatgacctacgggccaacctgg

SEQ ID NO: 1971715 - DNA, 25 bp, Homo sapien
tgtcaaaccctgttctacatcagta

SEQ ID NO: 1971716 - DNA, 25 bp, Homo sapien
agaggtgggcaaattatgacctacg

SEQ ID NO: 1971717 - DNA, 25 bp, Homo sapien
tgcccttgtgggtctatcctttgaa

SEQ ID NO: 1971718 - DNA, 25 bp, Homo sapien
tattaactgcatttaccatcaaagg

SEQ ID NO: 1971719 - DNA, 25 bp, Homo sapien
ggtgtgttctatcatacataagcct

SEQ ID NO: 1971720 - DNA, 25 bp, Homo sapien
gaaaacaacttactcatgataccaa

SEQ ID NO: 1971721 - DNA, 25 bp, Homo sapien
catctctgtatttcgaggacataac

SEQ ID NO: 1971722 - DNA, 25 bp, Homo sapien
tgaacaagaataacaagttccctgg

SEQ ID NO: 1971723 - DNA, 25 bp, Homo sapien
gacttagtcccttcacagattgtta

SEQ ID NO: 1971724 - DNA, 25 bp, Homo sapien
taggctaatatcactgtcaatgctc

SEQ ID NO: 1971725 - DNA, 25 bp, Homo sapien
gaattacgtaagcttcaagttccac

SEQ ID NO: 1971726 - DNA, 25 bp, Homo sapien
tagtagcaactccaactcctctgtt

SEQ ID NO: 1971727 - DNA, 25 bp, Homo sapien
tcatcagataaaggcacctctcttt

SEQ ID NO: 1971728 - DNA, 25 bp, Homo sapien
gaaatggatttccaccgtgacgaag

SEQ ID NO: 1971729 - DNA, 25 bp, Homo sapien
gctccccatgtttattagcttgaaa

SEQ ID NO: 1971730 - DNA, 25 bp, Homo sapien
gagatgactcgttaacaccaggaca

SEQ ID NO: 1971731 - DNA, 25 bp, Homo sapien
tgtcaaacgaacagatgaatgtaga

SEQ ID NO: 1971732 - DNA, 25 bp, Homo sapien
caccggaaaaagacatgaagtgttt

SEQ ID NO: 1971733 - DNA, 25 bp, Homo sapien
cattcacacagggtatatgtagcaa

SEQ ID NO: 1971734 - DNA, 25 bp, Homo sapien
taaaaaacaatattagccggcatgg

SEQ ID NO: 1971735 - DNA, 25 bp, Homo sapien
taacgtcaatactgaaattcttact

SEQ ID NO: 1971736 - DNA, 25 bp, Homo sapien
catgcactatttcctgacttcaatt

SEQ ID NO: 1971737 - DNA, 25 bp, Homo sapien
caattctttgtctaacgtcaatact

SEQ ID NO: 1971738 - DNA, 25 bp, Homo sapien
aaaggtttccacagcacattatagt

SEQ ID NO: 1971739 - DNA, 25 bp, Homo sapien
gaattactggtatccccaaaggtga

SEQ ID NO: 1971740 - DNA, 25 bp, Homo sapien
gatatatgggatactacaagcaacc

SEQ ID NO: 1971741 - DNA, 25 bp, Homo sapien
gagaaaagtatccagtcacctacag

SEQ ID NO: 1971742 - DNA, 25 bp, Homo sapien
gacatcaggtatgcatcattatgcc

SEQ ID NO: 1971743 - DNA, 25 bp, Homo sapien
gccttctaagtaactaagacatcag

SEQ ID NO: 1971744 - DNA, 25 bp, Homo sapien
taaagaattaaacaagatggcagac

SEQ ID NO: 1971745 - DNA, 25 bp, Homo sapien
tatagagatatcagacacccaccct

SEQ ID NO: 1971746 - DNA, 25 bp, Homo sapien
ctttgataaggccatagcaggagta

SEQ ID NO: 1971747 - DNA, 25 bp, Homo sapien
gcttagagatatattaactatggca

SEQ ID NO: 1971748 - DNA, 25 bp, Homo sapien
tatgtggtgttagcaactgttgata

SEQ ID NO: 1971749 - DNA, 25 bp, Homo sapien
tatattctttcatcaggtgtgcaag

SEQ ID NO: 1971750 - DNA, 25 bp, Homo sapien
tttcctgcaaattggtagctggatc

SEQ ID NO: 1971751 - DNA, 25 bp, Homo sapien
ttgctccgctgagcttggcatttcc

SEQ ID NO: 1971752 - DNA, 25 bp, Homo sapien
tccgctgagcttggcatttcctgca

SEQ ID NO: 1971753 - DNA, 25 bp, Homo sapien
caacttgctccgctgagcttggcat

SEQ ID NO: 1971754 - DNA, 25 bp, Homo sapien
tgctgattgcatacacttggtatag

SEQ ID NO: 1971755 - DNA, 25 bp, Homo sapien
tttgctgattgcatacacttggtat

SEQ ID NO: 1971756 - DNA, 25 bp, Homo sapien
accaaggctgtttggctttctcaca

SEQ ID NO: 1971757 - DNA, 25 bp, Homo sapien
gctgattgcatacacttggtatagt

SEQ ID NO: 1971758 - DNA, 25 bp, Homo sapien
cacttaggtgggttaacattctgtt

SEQ ID NO: 1971759 - DNA, 25 bp, Homo sapien
ccagtctaataattgaagtctccag

SEQ ID NO: 1971760 - DNA, 25 bp, Homo sapien
ctccagttgaataatttaagtctcc

SEQ ID NO: 1971761 - DNA, 25 bp, Homo sapien
ccccacttcatcaactgagttttaa

SEQ ID NO: 1971762 - DNA, 25 bp, Homo sapien
gaaacgcactcagtaaaccagtggg

SEQ ID NO: 1971763 - DNA, 25 bp, Homo sapien
tctatagaggaaggtaacatggact

SEQ ID NO: 1971764 - DNA, 25 bp, Homo sapien
cgcaccgtagcaagaagcaatcatt

SEQ ID NO: 1971765 - DNA, 25 bp, Homo sapien
gaatatgactgagttctcgcaccgt

SEQ ID NO: 1971766 - DNA, 25 bp, Homo sapien
tattttgacttatagacactgctaa

SEQ ID NO: 1971767 - DNA, 25 bp, Homo sapien
aagaaagatacttaatagtcttgtg

SEQ ID NO: 1971768 - DNA, 25 bp, Homo sapien
gatattttgacttatagacactgct

SEQ ID NO: 1971769 - DNA, 25 bp, Homo sapien
cattaatttgcagccatccagaaaa

SEQ ID NO: 1971770 - DNA, 25 bp, Homo sapien
tccccaaactgattgagcaaggtag

SEQ ID NO: 1971771 - DNA, 25 bp, Homo sapien
taaaatcaagtaccacatcactctg

SEQ ID NO: 1971772 - DNA, 25 bp, Homo sapien
catctgttcagaggtaagtatgcca

SEQ ID NO: 1971773 - DNA, 25 bp, Homo sapien
cactttgggaaacaagtctttacag

SEQ ID NO: 1971774 - DNA, 25 bp, Homo sapien
tctttcaacggtagaattattacta

SEQ ID NO: 1971775 - DNA, 25 bp, Homo sapien
aaaagtcctaagctatattttagtg

SEQ ID NO: 1971776 - DNA, 25 bp, Homo sapien
gggctaagtgcataaaaaagtccta

SEQ ID NO: 1971777 - DNA, 25 bp, Homo sapien
aaaactatctttacattgggaatgg

SEQ ID NO: 1971778 - DNA, 25 bp, Homo sapien
gaacagcaacaaagacacctgtaac

SEQ ID NO: 1971779 - DNA, 25 bp, Homo sapien
caactaacctggatattcctggact

SEQ ID NO: 1971780 - DNA, 25 bp, Homo sapien
tacatttcacatgcctaatgagatg

SEQ ID NO: 1971781 - DNA, 25 bp, Homo sapien
gaggtgttgacacatgacatctatt

SEQ ID NO: 1971782 - DNA, 25 bp, Homo sapien
cgtggcataccaaccaatccagcta

SEQ ID NO: 1971783 - DNA, 25 bp, Homo sapien
gtaacatttaaagcatggtgaaaat

SEQ ID NO: 1971784 - DNA, 25 bp, Homo sapien
ttgtatggtatccaaatggaacagc

SEQ ID NO: 1971785 - DNA, 25 bp, Homo sapien
tgttcccctgaaccatcaatgtcca

SEQ ID NO: 1971786 - DNA, 25 bp, Homo sapien
caaggcgacttcagatatttgcaac

SEQ ID NO: 1971787 - DNA, 25 bp, Homo sapien
agagagaatatttaactcgaataag

SEQ ID NO: 1971788 - DNA, 25 bp, Homo sapien
tgaactcatactcatcaagggcaga

SEQ ID NO: 1971789 - DNA, 25 bp, Homo sapien
tcagggatgacggaacatgaagtag

SEQ ID NO: 1971790 - DNA, 25 bp, Homo sapien
tgatttaggatagaaggctttctcc

SEQ ID NO: 1971791 - DNA, 25 bp, Homo sapien
cttgaatataagaccctagatggct

SEQ ID NO: 1971792 - DNA, 25 bp, Homo sapien
actttgcctttctgtttgtgttcac

SEQ ID NO: 1971793 - DNA, 25 bp, Homo sapien
aactttgcctttctgtttgtgttca

SEQ ID NO: 1971794 - DNA, 25 bp, Homo sapien
taactttgcctttctgtttgtgttc

SEQ ID NO: 1971795 - DNA, 25 bp, Homo sapien
ctgtcaagtttgttattcttgtatt

SEQ ID NO: 1971796 - DNA, 25 bp, Homo sapien
tgtcaagtttgttattcttgtattt

SEQ ID NO: 1971797 - DNA, 25 bp, Homo sapien
tcaagtttgttattcttgtattttc

SEQ ID NO: 1971798 - DNA, 25 bp, Homo sapien
caagtttgttattcttgtattttct

SEQ ID NO: 1971799 - DNA, 25 bp, Homo sapien
tgaagtatcatcttttgggctaaaa

SEQ ID NO: 1971800 - DNA, 25 bp, Homo sapien
ggagatttaccagtggaaatatgaa

SEQ ID NO: 1971801 - DNA, 25 bp, Homo sapien
tttagtggtgttgactgtttttcac

SEQ ID NO: 1971802 - DNA, 25 bp, Homo sapien
cacttaatccacaagaatgtttggg

SEQ ID NO: 1971803 - DNA, 25 bp, Homo sapien
tatcataccgaacaagatcaggctg

SEQ ID NO: 1971804 - DNA, 25 bp, Homo sapien
tgaagccctatagattcctcaatgg

SEQ ID NO: 1971805 - DNA, 25 bp, Homo sapien
gcagttctttggcactatccttagt

SEQ ID NO: 1971806 - DNA, 25 bp, Homo sapien
caatggcactcatacccaaagaagt

SEQ ID NO: 1971807 - DNA, 25 bp, Homo sapien
ctctctgtcgtcagtttttttaata

SEQ ID NO: 1971808 - DNA, 25 bp, Homo sapien
tgtattcactattatctgattgttt

SEQ ID NO: 1971809 - DNA, 25 bp, Homo sapien
ttctctctgtcgtcagtttttttaa

SEQ ID NO: 1971810 - DNA, 25 bp, Homo sapien
ttactgtattcactattatctgatt

SEQ ID NO: 1971811 - DNA, 25 bp, Homo sapien
tatgtgtttggagttagttatattt

SEQ ID NO: 1971812 - DNA, 25 bp, Homo sapien
gtatgtgtttggagttagttatatt

SEQ ID NO: 1971813 - DNA, 25 bp, Homo sapien
tgtatgtgtttggagttagttatat

SEQ ID NO: 1971814 - DNA, 25 bp, Homo sapien
ctgtatgtgtttggagttagttata

SEQ ID NO: 1971815 - DNA, 25 bp, Homo sapien
ctttatgtttgtctcgttctttgta

SEQ ID NO: 1971816 - DNA, 25 bp, Homo sapien
tctttatgtttgtctcgttctttgt

SEQ ID NO: 1971817 - DNA, 25 bp, Homo sapien
tttatgtttgtctcgttctttgtat

SEQ ID NO: 1971818 - DNA, 25 bp, Homo sapien
ttatgtttgtctcgttctttgtatc

SEQ ID NO: 1971819 - DNA, 25 bp, Homo sapien
tggtgatgacttaggtttaggctta

SEQ ID NO: 1971820 - DNA, 25 bp, Homo sapien
ggtgatgacttaggtttaggcttat

SEQ ID NO: 1971821 - DNA, 25 bp, Homo sapien
tctggagctgagacccggcttttca

SEQ ID NO: 1971822 - DNA, 25 bp, Homo sapien
taggtctcccctcgcttataattag

SEQ ID NO: 1971823 - DNA, 25 bp, Homo sapien
gagtcatactcaactggaggccttg

SEQ ID NO: 1971824 - DNA, 25 bp, Homo sapien
tcactgtagtatggcaggaatcttc

SEQ ID NO: 1971825 - DNA, 25 bp, Homo sapien
gcaaaactggaatgtatgttagata

SEQ ID NO: 1971826 - DNA, 25 bp, Homo sapien
atcagctgaaacatacttgctgttt

SEQ ID NO: 1971827 - DNA, 25 bp, Homo sapien
tgaaacatacttgctgtttgaagct

SEQ ID NO: 1971828 - DNA, 25 bp, Homo sapien
caaaactggaatgtatgttagatac

SEQ ID NO: 1971829 - DNA, 25 bp, Homo sapien
tctggcgcagggataaaaaatcagc

SEQ ID NO: 1971830 - DNA, 25 bp, Homo sapien
gatgccggatcctgagcacaagagt

SEQ ID NO: 1971831 - DNA, 25 bp, Homo sapien
caggctgaggtacacgtgacacttt

SEQ ID NO: 1971832 - DNA, 25 bp, Homo sapien
taaagagggactcacttgcacaggc

SEQ ID NO: 1971833 - DNA, 25 bp, Homo sapien
tatacttctattgggcagtgttaca

SEQ ID NO: 1971834 - DNA, 25 bp, Homo sapien
gaacgttactagctttatatctcga

SEQ ID NO: 1971835 - DNA, 25 bp, Homo sapien
tacctgtatttgaagcctatgtcac

SEQ ID NO: 1971836 - DNA, 25 bp, Homo sapien
tacaggtgtatagcaagtgatgatg

SEQ ID NO: 1971837 - DNA, 25 bp, Homo sapien
taattaagatcacacagtgggtctg

SEQ ID NO: 1971838 - DNA, 25 bp, Homo sapien
tatactatttcaacctgccttgagg

SEQ ID NO: 1971839 - DNA, 25 bp, Homo sapien
tatgacccttacagtgatttgcagc

SEQ ID NO: 1971840 - DNA, 25 bp, Homo sapien
ggtctgtagcaaaatccactctgca

SEQ ID NO: 1971841 - DNA, 25 bp, Homo sapien
taaaatggcaattagttggctggga

SEQ ID NO: 1971842 - DNA, 25 bp, Homo sapien
aggcctggcctccactttataattt

SEQ ID NO: 1971843 - DNA, 25 bp, Homo sapien
ctaatgggttctataattggattac

SEQ ID NO: 1971844 - DNA, 25 bp, Homo sapien
tacataaatgtgagggaagattact

SEQ ID NO: 1971845 - DNA, 25 bp, Homo sapien
ggaggtggaagttgcagtgagttga

SEQ ID NO: 1971846 - DNA, 25 bp, Homo sapien
tgtaatcctaacttctcaggaggct

SEQ ID NO: 1971847 - DNA, 25 bp, Homo sapien
gaggcaggaaaattgcttgaactca

SEQ ID NO: 1971848 - DNA, 25 bp, Homo sapien
tgagatcatgccactgcattccagc

SEQ ID NO: 1971849 - DNA, 25 bp, Homo sapien
tacaataagatacactggccgggca

SEQ ID NO: 1971850 - DNA, 25 bp, Homo sapien
aagagaggtgttttccggtagatgc

SEQ ID NO: 1971851 - DNA, 25 bp, Homo sapien
ggtataaacatgcaggaaacactag

SEQ ID NO: 1971852 - DNA, 25 bp, Homo sapien
tatctatatagtgaggtctgtctgc

SEQ ID NO: 1971853 - DNA, 25 bp, Homo sapien
aagctctttaagtggatctgacagt

SEQ ID NO: 1971854 - DNA, 25 bp, Homo sapien
tacaacttcctgttgtcgaaaaagc

SEQ ID NO: 1971855 - DNA, 25 bp, Homo sapien
ttcaatactgtgttgcaaacgtagt

SEQ ID NO: 1971856 - DNA, 25 bp, Homo sapien
gcaaacgtagtttcatccttacaac

SEQ ID NO: 1971857 - DNA, 25 bp, Homo sapien
taccttttcttccagctgatcaaat

SEQ ID NO: 1971858 - DNA, 25 bp, Homo sapien
tgaagcttgtgcattcgtcatgtag

SEQ ID NO: 1971859 - DNA, 25 bp, Homo sapien
ccttttcttccagctgatcaaatcg

SEQ ID NO: 1971860 - DNA, 25 bp, Homo sapien
gataccttttcttccagctgatcaa

SEQ ID NO: 1971861 - DNA, 25 bp, Homo sapien
aaagttctacaaattgcacaattca

SEQ ID NO: 1971862 - DNA, 25 bp, Homo sapien
tacaaattgcacaattcaagtaaga

SEQ ID NO: 1971863 - DNA, 25 bp, Homo sapien
caaattgcacaattcaagtaagaat

SEQ ID NO: 1971864 - DNA, 25 bp, Homo sapien
gttctacaaattgcacaattcaagt

SEQ ID NO: 1971865 - DNA, 25 bp, Homo sapien
gacaaacgatattcaaagaggtagg

SEQ ID NO: 1971866 - DNA, 25 bp, Homo sapien
taaaaagttggttgtagtcctgcag

SEQ ID NO: 1971867 - DNA, 25 bp, Homo sapien
taaaaatagccagatgcgtcttcct

SEQ ID NO: 1971868 - DNA, 25 bp, Homo sapien
agaggtaggcctaacacttttgatt

SEQ ID NO: 1971869 - DNA, 25 bp, Homo sapien
tattacagccattctactgggcgtg

SEQ ID NO: 1971870 - DNA, 25 bp, Homo sapien
taatatgacctaggcaatcttctgc

SEQ ID NO: 1971871 - DNA, 25 bp, Homo sapien
caaactgttccatagtagccgtatc

SEQ ID NO: 1971872 - DNA, 25 bp, Homo sapien
gctgctataaacgttcacactcaag

SEQ ID NO: 1971873 - DNA, 25 bp, Homo sapien
cttgaagggtggcagaaaacgctac

SEQ ID NO: 1971874 - DNA, 25 bp, Homo sapien
tatcaagatgttccaccatcaccag

SEQ ID NO: 1971875 - DNA, 25 bp, Homo sapien
acaagctaagtaacccaaatttcag

SEQ ID NO: 1971876 - DNA, 25 bp, Homo sapien
cacagtaggcttgagaaatttgaga

SEQ ID NO: 1971877 - DNA, 25 bp, Homo sapien
actaaatggcagtgtttgatttgcc

SEQ ID NO: 1971878 - DNA, 25 bp, Homo sapien
tcggcatccagcaaaacagtacaag

SEQ ID NO: 1971879 - DNA, 25 bp, Homo sapien
gagagtccaatggtacattgtatac

SEQ ID NO: 1971880 - DNA, 25 bp, Homo sapien
tctgtaatgaactcgcaaaacttct

SEQ ID NO: 1971881 - DNA, 25 bp, Homo sapien
tttttctgtgatataccctattatc

SEQ ID NO: 1971882 - DNA, 25 bp, Homo sapien
tcagtgccttaagtttgaaacctac

SEQ ID NO: 1971883 - DNA, 25 bp, Homo sapien
cctacctatctagttcaatcttgat

SEQ ID NO: 1971884 - DNA, 25 bp, Homo sapien
tcctttgtactactagcttatttcc

SEQ ID NO: 1971885 - DNA, 25 bp, Homo sapien
caagataccactgtttagtccagcc

SEQ ID NO: 1971886 - DNA, 25 bp, Homo sapien
tagtccagcctataagaacatggtt

SEQ ID NO: 1971887 - DNA, 25 bp, Homo sapien
cattgtagctcgattataaacctca

SEQ ID NO: 1971888 - DNA, 25 bp, Homo sapien
gttctagaaagtccctcagtggcct

SEQ ID NO: 1971889 - DNA, 25 bp, Homo sapien
caggtggtctggatcattaagaaaa

SEQ ID NO: 1971890 - DNA, 25 bp, Homo sapien
ctgttctaggaaaacgcatttattt

SEQ ID NO: 1971891 - DNA, 25 bp, Homo sapien
aactgaaaatttatactgttctagg

SEQ ID NO: 1971892 - DNA, 25 bp, Homo sapien
taatttaatctaaagtcaggtggtc

SEQ ID NO: 1971893 - DNA, 25 bp, Homo sapien
agaggcctgtctcacacagtgtgaa

SEQ ID NO: 1971894 - DNA, 25 bp, Homo sapien
gaggcctgtctcacacagtgtgaaa

SEQ ID NO: 1971895 - DNA, 25 bp, Homo sapien
agacaggtaatgtgtgcacaatgca

SEQ ID NO: 1971896 - DNA, 25 bp, Homo sapien
tgtgtgcacaatgcaacaaggtttg

SEQ ID NO: 1971897 - DNA, 25 bp, Homo sapien
caagagaatacacctcacattttgg

SEQ ID NO: 1971898 - DNA, 25 bp, Homo sapien
tatctcatcaagctgaatttcttcc

SEQ ID NO: 1971899 - DNA, 25 bp, Homo sapien
cctcacattttggtatctcatcaag

SEQ ID NO: 1971900 - DNA, 25 bp, Homo sapien
tctctctgtcaagagaatacacctc

SEQ ID NO: 1971901 - DNA, 25 bp, Homo sapien
ccagctctgtatcttactacgtgat

SEQ ID NO: 1971902 - DNA, 25 bp, Homo sapien
ggaccaatatctgcggtgctcatga

SEQ ID NO: 1971903 - DNA, 25 bp, Homo sapien
tacattaagtactgtgcccgtgaca

SEQ ID NO: 1971904 - DNA, 25 bp, Homo sapien
agagagctgcctttgaggccaaaat

SEQ ID NO: 1971905 - DNA, 25 bp, Homo sapien
gcattaaagcgatccctcacagaag

SEQ ID NO: 1971906 - DNA, 25 bp, Homo sapien
tcttgtaaccaagacatgaattgtc

SEQ ID NO: 1971907 - DNA, 25 bp, Homo sapien
tccctcacagaagttttactgtcat

SEQ ID NO: 1971908 - DNA, 25 bp, Homo sapien
catgaattgtcttgcattaaagcga

SEQ ID NO: 1971909 - DNA, 25 bp, Homo sapien
aagtcgtcgttaacatcaacaaggg

SEQ ID NO: 1971910 - DNA, 25 bp, Homo sapien
gtttgagctgccattctaacctctg

SEQ ID NO: 1971911 - DNA, 25 bp, Homo sapien
gatagatttataggtggcaggatca

SEQ ID NO: 1971912 - DNA, 25 bp, Homo sapien
tggacagcatttaaagccgcagctt

SEQ ID NO: 1971913 - DNA, 25 bp, Homo sapien
gcttgagcatcaccagtttaggaca

SEQ ID NO: 1971914 - DNA, 25 bp, Homo sapien
ccagcgctgttagcagattctcaac

SEQ ID NO: 1971915 - DNA, 25 bp, Homo sapien
gtaagtcacaggtctactagaggag

SEQ ID NO: 1971916 - DNA, 25 bp, Homo sapien
gaaaacaagctaactgaaacacctg

SEQ ID NO: 1971917 - DNA, 25 bp, Homo sapien
tcataggtgaatattaaaatagaca

SEQ ID NO: 1971918 - DNA, 25 bp, Homo sapien
tattcacagattctttcataggtga

SEQ ID NO: 1971919 - DNA, 25 bp, Homo sapien
cacagattctttcataggtgaatat

SEQ ID NO: 1971920 - DNA, 25 bp, Homo sapien
tacatatattcacagattctttcat

SEQ ID NO: 1971921 - DNA, 25 bp, Homo sapien
tgtttgggccaacagtgctatttcc

SEQ ID NO: 1971922 - DNA, 25 bp, Homo sapien
gaggctccagctttttgaggtacca

SEQ ID NO: 1971923 - DNA, 25 bp, Homo sapien
gaaccagtgcttcgaaatctaccct

SEQ ID NO: 1971924 - DNA, 25 bp, Homo sapien
tattgcgcatgccaagtacagtaag

SEQ ID NO: 1971925 - DNA, 25 bp, Homo sapien
ggtctggaacctaaagtacgtctga

SEQ ID NO: 1971926 - DNA, 25 bp, Homo sapien
ttaggtacaaagacggctcccaaga

SEQ ID NO: 1971927 - DNA, 25 bp, Homo sapien
gactatttcattgcgttttacagag

SEQ ID NO: 1971928 - DNA, 25 bp, Homo sapien
aaaaaattcctcctgactcgctttg

SEQ ID NO: 1971929 - DNA, 25 bp, Homo sapien
tactgttaggtgcaacatggatgaa

SEQ ID NO: 1971930 - DNA, 25 bp, Homo sapien
aactgcctagttaagatctgggtaa

SEQ ID NO: 1971931 - DNA, 25 bp, Homo sapien
agtgcataggtggtgccttttaaac

SEQ ID NO: 1971932 - DNA, 25 bp, Homo sapien
tatgaagttcaaggctaggtacaac

SEQ ID NO: 1971933 - DNA, 25 bp, Homo sapien
gatgattctgtaccttgcatgaatg

SEQ ID NO: 1971934 - DNA, 25 bp, Homo sapien
ttccatgaatgatgattctgtacct

SEQ ID NO: 1971935 - DNA, 25 bp, Homo sapien
catgaatgatgattctgtaccttgc

SEQ ID NO: 1971936 - DNA, 25 bp, Homo sapien
gaatgatgattctgtaccttgcatg

SEQ ID NO: 1971937 - DNA, 25 bp, Homo sapien
ggctcattcagctaggtggactcct

SEQ ID NO: 1971938 - DNA, 25 bp, Homo sapien
aatttaatgcacgagaatggcctga

SEQ ID NO: 1971939 - DNA, 25 bp, Homo sapien
gatctcatcctttgaacctcggcag

SEQ ID NO: 1971940 - DNA, 25 bp, Homo sapien
gagattgtttggtaggcctggccta

SEQ ID NO: 1971941 - DNA, 25 bp, Homo sapien
gaagaaactatcttagctgcctcat

SEQ ID NO: 1971942 - DNA, 25 bp, Homo sapien
ttatgagccgttcaatgaccacagg

SEQ ID NO: 1971943 - DNA, 25 bp, Homo sapien
taacatgggaacctagataattggt

SEQ ID NO: 1971944 - DNA, 25 bp, Homo sapien
tgaccacaggatttgcagtgatgtc

SEQ ID NO: 1971945 - DNA, 25 bp, Homo sapien
aaattcatttaacagggaagagaag

SEQ ID NO: 1971946 - DNA, 25 bp, Homo sapien
gaaggaatggctttgatgagattcc

SEQ ID NO: 1971947 - DNA, 25 bp, Homo sapien
caatccaaatgctggcgtttgccaa

SEQ ID NO: 1971948 - DNA, 25 bp, Homo sapien
ttttatcaccaagaaaagtgggcgc

SEQ ID NO: 1971949 - DNA, 25 bp, Homo sapien
atgcgccacggtcccgcgaagtcgc

SEQ ID NO: 1971950 - DNA, 25 bp, Homo sapien
ctagatccccgccgggtcggccgag

SEQ ID NO: 1971951 - DNA, 25 bp, Homo sapien
gcgaagtcgcccacccctagatccc

SEQ ID NO: 1971952 - DNA, 25 bp, Homo sapien
gctttgagtgcgaggccaggccgcg

SEQ ID NO: 1971953 - DNA, 25 bp, Homo sapien
aaccagtacatatttgcggaggcca

SEQ ID NO: 1971954 - DNA, 25 bp, Homo sapien
caagtaggatgatttctggagcaac

SEQ ID NO: 1971955 - DNA, 25 bp, Homo sapien
tatctaacgccgcataccaagtagg

SEQ ID NO: 1971956 - DNA, 25 bp, Homo sapien
gaaaaccctggtgatcgttactgag

SEQ ID NO: 1971957 - DNA, 25 bp, Homo sapien
cttcaaagaagatgatcagtaactc

SEQ ID NO: 1971958 - DNA, 25 bp, Homo sapien
agaagatgatcagtaactcccagga

SEQ ID NO: 1971959 - DNA, 25 bp, Homo sapien
tcttcaaagaagatgatcagtaact

SEQ ID NO: 1971960 - DNA, 25 bp, Homo sapien
caaagaagatgatcagtaactccca

SEQ ID NO: 1971961 - DNA, 25 bp, Homo sapien
gagtaagcacagcaacatagtgtaa

SEQ ID NO: 1971962 - DNA, 25 bp, Homo sapien
taagcacagcaacatagtgtaactt

SEQ ID NO: 1971963 - DNA, 25 bp, Homo sapien
ctagagtaagcacagcaacatagtg

SEQ ID NO: 1971964 - DNA, 25 bp, Homo sapien
gcacagcaacatagtgtaacttcat

SEQ ID NO: 1971965 - DNA, 25 bp, Homo sapien
ggcatttgctcacatcactagcaca

SEQ ID NO: 1971966 - DNA, 25 bp, Homo sapien
ttgttacagctcagtgattctggaa

SEQ ID NO: 1971967 - DNA, 25 bp, Homo sapien
tggaagccatgtcaggaacatcagg

SEQ ID NO: 1971968 - DNA, 25 bp, Homo sapien
tgaatgaggcatttgctcacatcac

SEQ ID NO: 1971969 - DNA, 25 bp, Homo sapien
aatgagcataggttctgggttgggc

SEQ ID NO: 1971970 - DNA, 25 bp, Homo sapien
tgtatctgacaagggtcttgagccc

SEQ ID NO: 1971971 - DNA, 25 bp, Homo sapien
agcataggttctgggttgggcatgg

SEQ ID NO: 1971972 - DNA, 25 bp, Homo sapien
tttaaaatgagcataggttctgggt

SEQ ID NO: 1971973 - DNA, 25 bp, Homo sapien
cagctgtggaccttttccccagaaa

SEQ ID NO: 1971974 - DNA, 25 bp, Homo sapien
tcctgaatataatccgggggatacc

SEQ ID NO: 1971975 - DNA, 25 bp, Homo sapien
ttcaggttcaccaactgctgtgaga

SEQ ID NO: 1971976 - DNA, 25 bp, Homo sapien
ggggatctcctgaatataatccggg

SEQ ID NO: 1971977 - DNA, 25 bp, Homo sapien
acattcatggtcacaaggagaagag

SEQ ID NO: 1971978 - DNA, 25 bp, Homo sapien
caagacacagcatgcactccttaca

SEQ ID NO: 1971979 - DNA, 25 bp, Homo sapien
ggagcaattgccttctcccggccgg

SEQ ID NO: 1971980 - DNA, 25 bp, Homo sapien
acagcatgcactccttacagcagga

SEQ ID NO: 1971981 - DNA, 25 bp, Homo sapien
acagtcacagcactcgtcccaaagg

SEQ ID NO: 1971982 - DNA, 25 bp, Homo sapien
caaagctagctgttagagataccaa

SEQ ID NO: 1971983 - DNA, 25 bp, Homo sapien
gctaaaggtacctgactgagcagtc

SEQ ID NO: 1971984 - DNA, 25 bp, Homo sapien
ggaaacactaactctatctgtggag

SEQ ID NO: 1971985 - DNA, 25 bp, Homo sapien
taccaagatgaatataagaggacag

SEQ ID NO: 1971986 - DNA, 25 bp, Homo sapien
cttccattcaccacagcgacatcta

SEQ ID NO: 1971987 - DNA, 25 bp, Homo sapien
ttcttccattcaccacagcgacatc

SEQ ID NO: 1971988 - DNA, 25 bp, Homo sapien
tcttccattcaccacagcgacatct

SEQ ID NO: 1971989 - DNA, 25 bp, Homo sapien
aggaaatcctatcagtagcccccag

SEQ ID NO: 1971990 - DNA, 25 bp, Homo sapien
cggtgacgctcgcttgcctggtgtt

SEQ ID NO: 1971991 - DNA, 25 bp, Homo sapien
agggttcgagctcctgtaagaatcc

SEQ ID NO: 1971992 - DNA, 25 bp, Homo sapien
tgtaagaatccaatactgccgctga

SEQ ID NO: 1971993 - DNA, 25 bp, Homo sapien
taaagtatagggtcaatctgtcatt

SEQ ID NO: 1971994 - DNA, 25 bp, Homo sapien
gcccaataggtatcacacaaaaggg

SEQ ID NO: 1971995 - DNA, 25 bp, Homo sapien
tactagtagaaaacatctatggctg

SEQ ID NO: 1971996 - DNA, 25 bp, Homo sapien
tcagagaaacaccttagagttaagt

SEQ ID NO: 1971997 - DNA, 25 bp, Homo sapien
ctgatacagttccttcattgtcaag

SEQ ID NO: 1971998 - DNA, 25 bp, Homo sapien
tgtgggctattctataggtcaactg

SEQ ID NO: 1971999 - DNA, 25 bp, Homo sapien
cagtcaaatccggaatgtgggctat

SEQ ID NO: 1972000 - DNA, 25 bp, Homo sapien
tcattgtcaagtggcatgacagaaa

SEQ ID NO: 1972001 - DNA, 25 bp, Homo sapien
gacagaacagtcagtatggtaggac

SEQ ID NO: 1972002 - DNA, 25 bp, Homo sapien
taatcctatgaaaattgtttatgac

SEQ ID NO: 1972003 - DNA, 25 bp, Homo sapien
tgacagaacagtcagtatggtagga

SEQ ID NO: 1972004 - DNA, 25 bp, Homo sapien
agaacagtcagtatggtaggacttc

SEQ ID NO: 1972005 - DNA, 25 bp, Homo sapien
tgttactctgaacacatggatgcta

SEQ ID NO: 1972006 - DNA, 25 bp, Homo sapien
aacagcctagttgggaatgcaaggg

SEQ ID NO: 1972007 - DNA, 25 bp, Homo sapien
caaacagcctagttgggaatgcaag

SEQ ID NO: 1972008 - DNA, 25 bp, Homo sapien
aaagtgttactctgaacacatggat

SEQ ID NO: 1972009 - DNA, 25 bp, Homo sapien
tgttatattgatattggcttcctga

SEQ ID NO: 1972010 - DNA, 25 bp, Homo sapien
gaactagagaacactagagaactca

SEQ ID NO: 1972011 - DNA, 25 bp, Homo sapien
ggctgtatgccaatttttaggagaa

SEQ ID NO: 1972012 - DNA, 25 bp, Homo sapien
tatagactggagtgtttagtggtaa

SEQ ID NO: 1972013 - DNA, 25 bp, Homo sapien
aggctgagggaaatcctgtataatc

SEQ ID NO: 1972014 - DNA, 25 bp, Homo sapien
agagaaagactaaaggactgcttca

SEQ ID NO: 1972015 - DNA, 25 bp, Homo sapien
gagaaagactaaaggactgcttcag

SEQ ID NO: 1972016 - DNA, 25 bp, Homo sapien
aatcaaggtctgtactctttaacac

SEQ ID NO: 1972017 - DNA, 25 bp, Homo sapien
gaaacgatgttccaattcaactgag

SEQ ID NO: 1972018 - DNA, 25 bp, Homo sapien
tcactggaataaggcgcgtgaacat

SEQ ID NO: 1972019 - DNA, 25 bp, Homo sapien
ggtgtggctggttcacagtttctaa

SEQ ID NO: 1972020 - DNA, 25 bp, Homo sapien
gaagggatcggttcatgcagctcct

SEQ ID NO: 1972021 - DNA, 25 bp, Homo sapien
tgcctctagatatgatgggatcagg

SEQ ID NO: 1972022 - DNA, 25 bp, Homo sapien
gctccaaaagatggtcttatatagg

SEQ ID NO: 1972023 - DNA, 25 bp, Homo sapien
gggatcagggttattgagtctagaa

SEQ ID NO: 1972024 - DNA, 25 bp, Homo sapien
ttatagattacatggacagaccaca

SEQ ID NO: 1972025 - DNA, 25 bp, Homo sapien
gaaaccagcgatatttggatgctcc

SEQ ID NO: 1972026 - DNA, 25 bp, Homo sapien
tcgcagcaggcattatgaaaccagc

SEQ ID NO: 1972027 - DNA, 25 bp, Homo sapien
ttctggaccaatgcactcgcagcag

SEQ ID NO: 1972028 - DNA, 25 bp, Homo sapien
tacactgatgtatggacatgcagtc

SEQ ID NO: 1972029 - DNA, 25 bp, Homo sapien
caagttcagtctcgcactggctcag

SEQ ID NO: 1972030 - DNA, 25 bp, Homo sapien
tttaagctggtacctgaagtcacag

SEQ ID NO: 1972031 - DNA, 25 bp, Homo sapien
gaagtcacagaaacgctttgcttgc

SEQ ID NO: 1972032 - DNA, 25 bp, Homo sapien
cctaccagggtacaagctgtttcct

SEQ ID NO: 1972033 - DNA, 25 bp, Homo sapien
ttttattactatgaagggcacatag

SEQ ID NO: 1972034 - DNA, 25 bp, Homo sapien
ttattactatgaagggcacatagta

SEQ ID NO: 1972035 - DNA, 25 bp, Homo sapien
tttattactatgaagggcacatagt

SEQ ID NO: 1972036 - DNA, 25 bp, Homo sapien
taaactcttgggaatgcagaataga

SEQ ID NO: 1972037 - DNA, 25 bp, Homo sapien
aaattaccatttgatttggcaccac

SEQ ID NO: 1972038 - DNA, 25 bp, Homo sapien
cagagttgaactgcagcaggagact

SEQ ID NO: 1972039 - DNA, 25 bp, Homo sapien
tgtagacgtataaagaggtattcct

SEQ ID NO: 1972040 - DNA, 25 bp, Homo sapien
tttcaagctggacatacaacgtcat

SEQ ID NO: 1972041 - DNA, 25 bp, Homo sapien
cactttcaagctggacatacaacgt

SEQ ID NO: 1972042 - DNA, 25 bp, Homo sapien
cactctgtctagaatcagtgctttt

SEQ ID NO: 1972043 - DNA, 25 bp, Homo sapien
tgccactctgtctagaatcagtgct

SEQ ID NO: 1972044 - DNA, 25 bp, Homo sapien
cataaaggtagctaatgagataaac

SEQ ID NO: 1972045 - DNA, 25 bp, Homo sapien
tccacatgaataagtaaagagcact

SEQ ID NO: 1972046 - DNA, 25 bp, Homo sapien
tgtaaccaaacctcccctatgagaa

SEQ ID NO: 1972047 - DNA, 25 bp, Homo sapien
taaaaggacactagatggtaacctg

SEQ ID NO: 1972048 - DNA, 25 bp, Homo sapien
tcctcatccgggagtgctggccctg

SEQ ID NO: 1972049 - DNA, 25 bp, Homo sapien
ccaagtcgggaatgtaatggaggcc

SEQ ID NO: 1972050 - DNA, 25 bp, Homo sapien
tagctggcaactgcaaggaaattcc

SEQ ID NO: 1972051 - DNA, 25 bp, Homo sapien
cctgccaaacctatcggactctgta

SEQ ID NO: 1972052 - DNA, 25 bp, Homo sapien
gacattctttcagtaaggctggcag

SEQ ID NO: 1972053 - DNA, 25 bp, Homo sapien
tgccggatgacattctttcagtaag

SEQ ID NO: 1972054 - DNA, 25 bp, Homo sapien
tggacctgaaggtttcatttgactc

SEQ ID NO: 1972055 - DNA, 25 bp, Homo sapien
tttgactctgcagcgggtttctgtg

SEQ ID NO: 1972056 - DNA, 25 bp, Homo sapien
ctccccagacaaaggcagttacaca

SEQ ID NO: 1972057 - DNA, 25 bp, Homo sapien
aggcttagaagggtacacgtccttg

SEQ ID NO: 1972058 - DNA, 25 bp, Homo sapien
ttgctaactcagaacggctcctgag

SEQ ID NO: 1972059 - DNA, 25 bp, Homo sapien
cagacaaaggcagttacacaaagaa

SEQ ID NO: 1972060 - DNA, 25 bp, Homo sapien
cctttcccctggatgagccattcca

SEQ ID NO: 1972061 - DNA, 25 bp, Homo sapien
tcaggactgggaaatcctgctctag

SEQ ID NO: 1972062 - DNA, 25 bp, Homo sapien
cctgctctagaattctcaggcttcc

SEQ ID NO: 1972063 - DNA, 25 bp, Homo sapien
ccattccactggatagctctatcac

SEQ ID NO: 1972064 - DNA, 25 bp, Homo sapien
tgtggcacttcgttgcccgtttaga

SEQ ID NO: 1972065 - DNA, 25 bp, Homo sapien
cccgtttagattggccgctgctatc

SEQ ID NO: 1972066 - DNA, 25 bp, Homo sapien
tgtcactcgcattcctacgtgcagc

SEQ ID NO: 1972067 - DNA, 25 bp, Homo sapien
tgcagcactctgtggcacttcgttg

SEQ ID NO: 1972068 - DNA, 25 bp, Homo sapien
gggcatctcctgcaacggccttgag

SEQ ID NO: 1972069 - DNA, 25 bp, Homo sapien
tgcgcctcagctcccgaagttgaga

SEQ ID NO: 1972070 - DNA, 25 bp, Homo sapien
gaagttgagagctttccttgcgcca

SEQ ID NO: 1972071 - DNA, 25 bp, Homo sapien
gccagcgtgctttagtcgttccaac

SEQ ID NO: 1972072 - DNA, 25 bp, Homo sapien
ccggcttcccggatcctcctctccg

SEQ ID NO: 1972073 - DNA, 25 bp, Homo sapien
cgcagccggcttcccggatcctcct

SEQ ID NO: 1972074 - DNA, 25 bp, Homo sapien
cagccggcttcccggatcctcctct

SEQ ID NO: 1972075 - DNA, 25 bp, Homo sapien
ccgcagccggcttcccggatcctcc

SEQ ID NO: 1972076 - DNA, 25 bp, Homo sapien
gtgcctgccgccgcgcgaccgtccg

SEQ ID NO: 1972077 - DNA, 25 bp, Homo sapien
gcctgccgccgcgcgaccgtccgcc

SEQ ID NO: 1972078 - DNA, 25 bp, Homo sapien
ctgtgcctgccgccgcgcgaccgtc

SEQ ID NO: 1972079 - DNA, 25 bp, Homo sapien
cgccgcgcgaccgtccgccccgccg

SEQ ID NO: 1972080 - DNA, 25 bp, Homo sapien
tagcacgcgaccgctccctgcgact

SEQ ID NO: 1972081 - DNA, 25 bp, Homo sapien
cctagcacgcgaccgctccctgcga

SEQ ID NO: 1972082 - DNA, 25 bp, Homo sapien
agcacgcgaccgctccctgcgactg

SEQ ID NO: 1972083 - DNA, 25 bp, Homo sapien
cacgcgaccgctccctgcgactgac

SEQ ID NO: 1972084 - DNA, 25 bp, Homo sapien
ttttcaacttcagatctgtctgtcc

SEQ ID NO: 1972085 - DNA, 25 bp, Homo sapien
aaacctgaaggaaggatcgcagcac

SEQ ID NO: 1972086 - DNA, 25 bp, Homo sapien
cattaagagcattctgacaacacac

SEQ ID NO: 1972087 - DNA, 25 bp, Homo sapien
gacaacacacatagttgaacatgag

SEQ ID NO: 1972088 - DNA, 25 bp, Homo sapien
gctactactgttggcagggcgcggt

SEQ ID NO: 1972089 - DNA, 25 bp, Homo sapien
tgggcctgagcacggccgggccatt

SEQ ID NO: 1972090 - DNA, 25 bp, Homo sapien
gggccattcccaaactcgggacgca

SEQ ID NO: 1972091 - DNA, 25 bp, Homo sapien
tcgggacgcaggagaggatctcgga

SEQ ID NO: 1972092 - DNA, 25 bp, Homo sapien
aagcacggcactactacaccgaggc

SEQ ID NO: 1972093 - DNA, 25 bp, Homo sapien
tccagaggaagactagcccagctac

SEQ ID NO: 1972094 - DNA, 25 bp, Homo sapien
ccagctaccgcgaagctgccaatcc

SEQ ID NO: 1972095 - DNA, 25 bp, Homo sapien
ttccagaggaagactagcccagcta

SEQ ID NO: 1972096 - DNA, 25 bp, Homo sapien
ctcaggcggacagcgccgactcttt

SEQ ID NO: 1972097 - DNA, 25 bp, Homo sapien
ctcggtaggaaacccgcgctcaggc

SEQ ID NO: 1972098 - DNA, 25 bp, Homo sapien
gcaaacccttctgcgcctgaggcag

SEQ ID NO: 1972099 - DNA, 25 bp, Homo sapien
caggctggcctctagctcggtagga

SEQ ID NO: 1972100 - DNA, 25 bp, Homo sapien
tggactgcctgagctcaaagtttaa

SEQ ID NO: 1972101 - DNA, 25 bp, Homo sapien
ggtggactgcctgagctcaaagttt

SEQ ID NO: 1972102 - DNA, 25 bp, Homo sapien
aggagggtggactgcctgagctcaa

SEQ ID NO: 1972103 - DNA, 25 bp, Homo sapien
actgcctgagctcaaagtttaagac

SEQ ID NO: 1972104 - DNA, 25 bp, Homo sapien
taccagcagcaaaatgccaggtggc

SEQ ID NO: 1972105 - DNA, 25 bp, Homo sapien
tccatactagactgataaagacaat

SEQ ID NO: 1972106 - DNA, 25 bp, Homo sapien
catgttgagttcagacctggtgtgg

SEQ ID NO: 1972107 - DNA, 25 bp, Homo sapien
taaaagataaggtgggctcagacac

SEQ ID NO: 1972108 - DNA, 25 bp, Homo sapien
caccttgctaatggtgagctccaaa

SEQ ID NO: 1972109 - DNA, 25 bp, Homo sapien
caaaatttaacactacctatggcac

SEQ ID NO: 1972110 - DNA, 25 bp, Homo sapien
taaattatacacttcgagtgagtgg

SEQ ID NO: 1972111 - DNA, 25 bp, Homo sapien
taacactaggcctacaattgggcat

SEQ ID NO: 1972112 - DNA, 25 bp, Homo sapien
agttctcagggttgaaagcactggg

SEQ ID NO: 1972113 - DNA, 25 bp, Homo sapien
gcactgggatcttcgagtattcaaa

SEQ ID NO: 1972114 - DNA, 25 bp, Homo sapien
tctcgagatatattccatgcatcac

SEQ ID NO: 1972115 - DNA, 25 bp, Homo sapien
agtgcttcattttgactgctcccca

SEQ ID NO: 1972116 - DNA, 25 bp, Homo sapien
gctgatgccctgactaggaagggac

SEQ ID NO: 1972117 - DNA, 25 bp, Homo sapien
taggaagggacgaggtcttctctgt

SEQ ID NO: 1972118 - DNA, 25 bp, Homo sapien
gactaggaagggacgaggtcttctc

SEQ ID NO: 1972119 - DNA, 25 bp, Homo sapien
gaagggacgaggtcttctctgttac

SEQ ID NO: 1972120 - DNA, 25 bp, Homo sapien
caatccaggaaacttagtagggctg

SEQ ID NO: 1972121 - DNA, 25 bp, Homo sapien
gtccgggtaagcccgctgccatgct

SEQ ID NO: 1972122 - DNA, 25 bp, Homo sapien
tgagggctcgccagtgcggtacaat

SEQ ID NO: 1972123 - DNA, 25 bp, Homo sapien
gccagtgcggtacaatccaggaaac

SEQ ID NO: 1972124 - DNA, 25 bp, Homo sapien
gatctttctcatcatcagacactac

SEQ ID NO: 1972125 - DNA, 25 bp, Homo sapien
cccatgatctttctcatcatcagac

SEQ ID NO: 1972126 - DNA, 25 bp, Homo sapien
tcttcccatgatctttctcatcatc

SEQ ID NO: 1972127 - DNA, 25 bp, Homo sapien
tttttcttcccatgatctttctcat

SEQ ID NO: 1972128 - DNA, 25 bp, Homo sapien
ttgtgagattaagatcccaaaatac

SEQ ID NO: 1972129 - DNA, 25 bp, Homo sapien
ttacttcaggaaatatccgctagaa

SEQ ID NO: 1972130 - DNA, 25 bp, Homo sapien
aatatccgctagaaaacttttccat

SEQ ID NO: 1972131 - DNA, 25 bp, Homo sapien
tgtgagattaagatcccaaaataca

SEQ ID NO: 1972132 - DNA, 25 bp, Homo sapien
agagctatcttcctgaaaggctgca

SEQ ID NO: 1972133 - DNA, 25 bp, Homo sapien
tcatctccagagctatcttcctgaa

SEQ ID NO: 1972134 - DNA, 25 bp, Homo sapien
tcctgaaaggctgcatagccttcag

SEQ ID NO: 1972135 - DNA, 25 bp, Homo sapien
ttctgcctcatctccagagctatct

SEQ ID NO: 1972136 - DNA, 25 bp, Homo sapien
ttcttgaaaacatggattcccttgg

SEQ ID NO: 1972137 - DNA, 25 bp, Homo sapien
ttggacctcttcattttagaaggac

SEQ ID NO: 1972138 - DNA, 25 bp, Homo sapien
gattcccttggacctcttcatttta

SEQ ID NO: 1972139 - DNA, 25 bp, Homo sapien
ctttttagaaaagctgggcttcttg

SEQ ID NO: 1972140 - DNA, 25 bp, Homo sapien
tccttccactgtttaacaacatcag

SEQ ID NO: 1972141 - DNA, 25 bp, Homo sapien
tccactgtttaacaacatcagctgc

SEQ ID NO: 1972142 - DNA, 25 bp, Homo sapien
agctgctgtcaagtcttttgacttc

SEQ ID NO: 1972143 - DNA, 25 bp, Homo sapien
acaacatcagctgctgtcaagtctt

SEQ ID NO: 1972144 - DNA, 25 bp, Homo sapien
aatgggtttgagatttggaacatca

SEQ ID NO: 1972145 - DNA, 25 bp, Homo sapien
cagccaaaggaattccaaaaatggg

SEQ ID NO: 1972146 - DNA, 25 bp, Homo sapien
ctgcatcagccaaaggaattccaaa

SEQ ID NO: 1972147 - DNA, 25 bp, Homo sapien
aacatcaatctgaggcacctctggc

SEQ ID NO: 1972148 - DNA, 25 bp, Homo sapien
tctctacgtaatctatacattcacg

SEQ ID NO: 1972149 - DNA, 25 bp, Homo sapien
cataaacgtgtctcttggccaagaa

SEQ ID NO: 1972150 - DNA, 25 bp, Homo sapien
tggaccactccatgtattgaccggg

SEQ ID NO: 1972151 - DNA, 25 bp, Homo sapien
tagctgaccaaagcattcacatgtg

SEQ ID NO: 1972152 - DNA, 25 bp, Homo sapien
acagatgctgctacaggtcagggct

SEQ ID NO: 1972153 - DNA, 25 bp, Homo sapien
tgacagtagcataagtcgggctgac

SEQ ID NO: 1972154 - DNA, 25 bp, Homo sapien
cattgccacaggttagagaataaac

SEQ ID NO: 1972155 - DNA, 25 bp, Homo sapien
gataagcaagaactaacacttccag

SEQ ID NO: 1972156 - DNA, 25 bp, Homo sapien
tcgggctgactacagcacattgcca

SEQ ID NO: 1972157 - DNA, 25 bp, Homo sapien
tctggcagttctttgagtaaacgct

SEQ ID NO: 1972158 - DNA, 25 bp, Homo sapien
ttctttgagtaaacgctggaattcc

SEQ ID NO: 1972159 - DNA, 25 bp, Homo sapien
gcagttctttgagtaaacgctggaa

SEQ ID NO: 1972160 - DNA, 25 bp, Homo sapien
ttgagtaaacgctggaattcctgca

SEQ ID NO: 1972161 - DNA, 25 bp, Homo sapien
gccatgttagaccatcgcagaggtt

SEQ ID NO: 1972162 - DNA, 25 bp, Homo sapien
catgttagaccatcgcagaggtttc

SEQ ID NO: 1972163 - DNA, 25 bp, Homo sapien
ccatgttagaccatcgcagaggttt

SEQ ID NO: 1972164 - DNA, 25 bp, Homo sapien
tagacaaatcctttatcccaccctg

SEQ ID NO: 1972165 - DNA, 25 bp, Homo sapien
tatcccaccctgcagatctcgatgt

SEQ ID NO: 1972166 - DNA, 25 bp, Homo sapien
gggctgtcaaaattctttgtacttc

SEQ ID NO: 1972167 - DNA, 25 bp, Homo sapien
gatctcgatgtaaacaattcaaaag

SEQ ID NO: 1972168 - DNA, 25 bp, Homo sapien
aagactggctatctcttgtgcaatc

SEQ ID NO: 1972169 - DNA, 25 bp, Homo sapien
cctcttttgaaagactggctatctc

SEQ ID NO: 1972170 - DNA, 25 bp, Homo sapien
gaaagactggctatctcttgtgcaa

SEQ ID NO: 1972171 - DNA, 25 bp, Homo sapien
ttttgaaagactggctatctcttgt

SEQ ID NO: 1972172 - DNA, 25 bp, Homo sapien
caatctcagctctgaggcgttcaat

SEQ ID NO: 1972173 - DNA, 25 bp, Homo sapien
tcagcaatctcagctctgaggcgtt

SEQ ID NO: 1972174 - DNA, 25 bp, Homo sapien
tctcagctctgaggcgttcaatctc

SEQ ID NO: 1972175 - DNA, 25 bp, Homo sapien
cagctctgaggcgttcaatctcttc

SEQ ID NO: 1972176 - DNA, 25 bp, Homo sapien
tctcggaggagtactcctcagtctc

SEQ ID NO: 1972177 - DNA, 25 bp, Homo sapien
gctctcggaggagtactcctcagtc

SEQ ID NO: 1972178 - DNA, 25 bp, Homo sapien
cgctctcggaggagtactcctcagt

SEQ ID NO: 1972179 - DNA, 25 bp, Homo sapien
tcgctctcggaggagtactcctcag

SEQ ID NO: 1972180 - DNA, 25 bp, Homo sapien
cacttaaggaagtcagaggacgatt

SEQ ID NO: 1972181 - DNA, 25 bp, Homo sapien
tgcttttggctcaaggacgccgtct

SEQ ID NO: 1972182 - DNA, 25 bp, Homo sapien
ggcgatggctttgccggctccttgc

SEQ ID NO: 1972183 - DNA, 25 bp, Homo sapien
ttggctcaaggacgccgtctctggg

SEQ ID NO: 1972184 - DNA, 25 bp, Homo sapien
ctgctgggcgatggctttgccggct

SEQ ID NO: 1972185 - DNA, 25 bp, Homo sapien
ggttacagtaagatgcacgggtcct

SEQ ID NO: 1972186 - DNA, 25 bp, Homo sapien
aacctgagcctgacgtgaaggagtc

SEQ ID NO: 1972187 - DNA, 25 bp, Homo sapien
tcagacgtgtgacagaggaagagtc

SEQ ID NO: 1972188 - DNA, 25 bp, Homo sapien
taagctgacactatctggaaaactc

SEQ ID NO: 1972189 - DNA, 25 bp, Homo sapien
agagtgacggtaccagagatcccag

SEQ ID NO: 1972190 - DNA, 25 bp, Homo sapien
ccatagggatctgcaccgagaaggt

SEQ ID NO: 1972191 - DNA, 25 bp, Homo sapien
ccagtcagagaacgtgaggcagctc

SEQ ID NO: 1972192 - DNA, 25 bp, Homo sapien
caggcgctgctctgaccagtcagag

SEQ ID NO: 1972193 - DNA, 25 bp, Homo sapien
agaaggagagaggagagtgggccag

SEQ ID NO: 1972194 - DNA, 25 bp, Homo sapien
agagaggagagtgggccagggaaca

SEQ ID NO: 1972195 - DNA, 25 bp, Homo sapien
aggagagaggagagtgggccaggga

SEQ ID NO: 1972196 - DNA, 25 bp, Homo sapien
aggagagtgggccagggaacaccca

SEQ ID NO: 1972197 - DNA, 25 bp, Homo sapien
cgggcttatagactgtggtttagaa

SEQ ID NO: 1972198 - DNA, 25 bp, Homo sapien
cagcccctgtctgtggccagacagg

SEQ ID NO: 1972199 - DNA, 25 bp, Homo sapien
gaactggcaggaacgggcagcctcc

SEQ ID NO: 1972200 - DNA, 25 bp, Homo sapien
acaggccgtcctggtgactcgggct

SEQ ID NO: 1972201 - DNA, 25 bp, Homo sapien
ggtttgaacaacatcctctgtggat

SEQ ID NO: 1972202 - DNA, 25 bp, Homo sapien
gagacgtgtacattctagcccaagc

SEQ ID NO: 1972203 - DNA, 25 bp, Homo sapien
caatcttgtcaattgggagtccacc

SEQ ID NO: 1972204 - DNA, 25 bp, Homo sapien
tctcatcggatggaccagaaacaag

SEQ ID NO: 1972205 - DNA, 25 bp, Homo sapien
cagctgcagagtactcaatctcctc

SEQ ID NO: 1972206 - DNA, 25 bp, Homo sapien
ggccttgaagaagtgcctcaaccaa

SEQ ID NO: 1972207 - DNA, 25 bp, Homo sapien
aagaagtgcctcaaccaactcctcg

SEQ ID NO: 1972208 - DNA, 25 bp, Homo sapien
tgcagagtactcaatctcctcacag

SEQ ID NO: 1972209 - DNA, 25 bp, Homo sapien
cagacccagcccagtccactgggtt

SEQ ID NO: 1972210 - DNA, 25 bp, Homo sapien
agacccagcccagtccactgggttt

SEQ ID NO: 1972211 - DNA, 25 bp, Homo sapien
gaagggaggcatgccgccgccagca

SEQ ID NO: 1972212 - DNA, 25 bp, Homo sapien
agggaggcatgccgccgccagcatg

SEQ ID NO: 1972213 - DNA, 25 bp, Homo sapien
ccagtggacttgtgtgcagttccca

SEQ ID NO: 1972214 - DNA, 25 bp, Homo sapien
caaatgtctgtcaattgcaatgcct

SEQ ID NO: 1972215 - DNA, 25 bp, Homo sapien
tctatcccagacatgctgattatgg

SEQ ID NO: 1972216 - DNA, 25 bp, Homo sapien
gctgagtcctcatttaccgtatgaa

SEQ ID NO: 1972217 - DNA, 25 bp, Homo sapien
gcatgtgacgggcagcagtactctt

SEQ ID NO: 1972218 - DNA, 25 bp, Homo sapien
gcatccatcactttgcaggttcgga

SEQ ID NO: 1972219 - DNA, 25 bp, Homo sapien
tttgcaggttcggaggacccggcat

SEQ ID NO: 1972220 - DNA, 25 bp, Homo sapien
atgtgacgggcagcagtactcttcc

SEQ ID NO: 1972221 - DNA, 25 bp, Homo sapien
acagcttgtggctgtagtggctgct

SEQ ID NO: 1972222 - DNA, 25 bp, Homo sapien
ggtcacggcttgtgggggtcacagc

SEQ ID NO: 1972223 - DNA, 25 bp, Homo sapien
tcatggcttgtggtggtcacggctt

SEQ ID NO: 1972224 - DNA, 25 bp, Homo sapien
tggctgctgcggcatcactgccacc

SEQ ID NO: 1972225 - DNA, 25 bp, Homo sapien
attagaggtgcacggtgccgcgcct

SEQ ID NO: 1972226 - DNA, 25 bp, Homo sapien
taggattagaggtgcacggtgccgc

SEQ ID NO: 1972227 - DNA, 25 bp, Homo sapien
ctaggattagaggtgcacggtgccg

SEQ ID NO: 1972228 - DNA, 25 bp, Homo sapien
ggattagaggtgcacggtgccgcgc

SEQ ID NO: 1972229 - DNA, 25 bp, Homo sapien
acaggagagcgcaagctggtcctcc

SEQ ID NO: 1972230 - DNA, 25 bp, Homo sapien
caccgtgaggaattcagcgtggaca

SEQ ID NO: 1972231 - DNA, 25 bp, Homo sapien
tgcgggcccacattgtcctgctgtt

SEQ ID NO: 1972232 - DNA, 25 bp, Homo sapien
gttggatacaagacagctactgagt

SEQ ID NO: 1972233 - DNA, 25 bp, Homo sapien
tacatacctgtgaccactcttggga

SEQ ID NO: 1972234 - DNA, 25 bp, Homo sapien
tgaagctcccgagacacagtcaagc

SEQ ID NO: 1972235 - DNA, 25 bp, Homo sapien
taaaggacctgatgccaacacaagt

SEQ ID NO: 1972236 - DNA, 25 bp, Homo sapien
aactcttaagcgcagcatattgctg

SEQ ID NO: 1972237 - DNA, 25 bp, Homo sapien
ttgacactcggaagacagaattggc

SEQ ID NO: 1972238 - DNA, 25 bp, Homo sapien
gtgcatatagcctccctggtgtggc

SEQ ID NO: 1972239 - DNA, 25 bp, Homo sapien
ccttctcgtgcacagacggttgaca

SEQ ID NO: 1972240 - DNA, 25 bp, Homo sapien
cggttgacactgaaattgctaagca

SEQ ID NO: 1972241 - DNA, 25 bp, Homo sapien
acatgttgcaaatcacgcagagcac

SEQ ID NO: 1972242 - DNA, 25 bp, Homo sapien
gcaaatcacgcagagcacctgttat

SEQ ID NO: 1972243 - DNA, 25 bp, Homo sapien
ttcattgttctcctagagttgcttt

SEQ ID NO: 1972244 - DNA, 25 bp, Homo sapien
tgtttttcgtatctcttagttatta

SEQ ID NO: 1972245 - DNA, 25 bp, Homo sapien
tgagcaacaatagcagttttagccc

SEQ ID NO: 1972246 - DNA, 25 bp, Homo sapien
ttcagacttgagcaacaatagcagt

SEQ ID NO: 1972247 - DNA, 25 bp, Homo sapien
tattcacagcgattcagacttgagc

SEQ ID NO: 1972248 - DNA, 25 bp, Homo sapien
tcactatattcacagcgattcagac

SEQ ID NO: 1972249 - DNA, 25 bp, Homo sapien
agatcgggacttgaggccatgttgc

SEQ ID NO: 1972250 - DNA, 25 bp, Homo sapien
cagtgacattatctggactctggag

SEQ ID NO: 1972251 - DNA, 25 bp, Homo sapien
gatcggaccatttcactgcagcaag

SEQ ID NO: 1972252 - DNA, 25 bp, Homo sapien
tctgagcagaagatcgggacttgag

SEQ ID NO: 1972253 - DNA, 25 bp, Homo sapien
agaaaatctagagccccacattgat

SEQ ID NO: 1972254 - DNA, 25 bp, Homo sapien
catagagcttgaacagaactctggg

SEQ ID NO: 1972255 - DNA, 25 bp, Homo sapien
ctatgttacgaccagaggttggcac

SEQ ID NO: 1972256 - DNA, 25 bp, Homo sapien
ggttggcaccacttcacaagattca

SEQ ID NO: 1972257 - DNA, 25 bp, Homo sapien
cccagaggatgtacaagtcaggcca

SEQ ID NO: 1972258 - DNA, 25 bp, Homo sapien
ggcatccgggaagcctctaggtgaa

SEQ ID NO: 1972259 - DNA, 25 bp, Homo sapien
tggaaaacacgatggaagaccatgc

SEQ ID NO: 1972260 - DNA, 25 bp, Homo sapien
agaccatgctgctgaggcatccggg

SEQ ID NO: 1972261 - DNA, 25 bp, Homo sapien
taacacaattagctagatgcctcgc

SEQ ID NO: 1972262 - DNA, 25 bp, Homo sapien
tatcttcctaggttcgccaagcagc

SEQ ID NO: 1972263 - DNA, 25 bp, Homo sapien
gaggtatgtcttaatgtccaggcaa

SEQ ID NO: 1972264 - DNA, 25 bp, Homo sapien
tgcagagaactgtataggacgagct

SEQ ID NO: 1972265 - DNA, 25 bp, Homo sapien
ttaacaggcacaatctgagtcacca

SEQ ID NO: 1972266 - DNA, 25 bp, Homo sapien
aagatgaaatgttgacgcccctggg

SEQ ID NO: 1972267 - DNA, 25 bp, Homo sapien
gattattataccttcagccctggac

SEQ ID NO: 1972268 - DNA, 25 bp, Homo sapien
gacaagtatgctgcaagtgagaaca

SEQ ID NO: 1972269 - DNA, 25 bp, Homo sapien
tgagctgagatcactttttaaaaaa

SEQ ID NO: 1972270 - DNA, 25 bp, Homo sapien
tgttgtggcgcctgcctgtaattcc

SEQ ID NO: 1972271 - DNA, 25 bp, Homo sapien
ctcctaacctctaagtgatctacct

SEQ ID NO: 1972272 - DNA, 25 bp, Homo sapien
ggtgttgtggcgcctgcctgtaatt

SEQ ID NO: 1972273 - DNA, 25 bp, Homo sapien
ccgtgctgcacgaggaagctggcta

SEQ ID NO: 1972274 - DNA, 25 bp, Homo sapien
gctaggcaggcatgactttgtcagt

SEQ ID NO: 1972275 - DNA, 25 bp, Homo sapien
gctttgttagcagccacttggcgag

SEQ ID NO: 1972276 - DNA, 25 bp, Homo sapien
tgcccgccttgtcagctcgagttgg

SEQ ID NO: 1972277 - DNA, 25 bp, Homo sapien
gatctgaccccgggcctgccaacgc

SEQ ID NO: 1972278 - DNA, 25 bp, Homo sapien
ggctgaatcaggatctgaccccggg

SEQ ID NO: 1972279 - DNA, 25 bp, Homo sapien
gaagacaaagcgaatcataggcacc

SEQ ID NO: 1972280 - DNA, 25 bp, Homo sapien
ccatggaggtagaatcgtgtcggaa

SEQ ID NO: 1972281 - DNA, 25 bp, Homo sapien
gagctaatcgcttaagtcacgtaaa

SEQ ID NO: 1972282 - DNA, 25 bp, Homo sapien
atttaatgccaataaccccacgagg

SEQ ID NO: 1972283 - DNA, 25 bp, Homo sapien
tagttggatgatgcttttaggaaaa

SEQ ID NO: 1972284 - DNA, 25 bp, Homo sapien
taacaattcagacttcctgtgtgtc

SEQ ID NO: 1972285 - DNA, 25 bp, Homo sapien
tgtctgaccacggacaacacacagc

SEQ ID NO: 1972286 - DNA, 25 bp, Homo sapien
tcagtggcagaacaggataacaatt

SEQ ID NO: 1972287 - DNA, 25 bp, Homo sapien
ctcagtttacagtagtgattccagc

SEQ ID NO: 1972288 - DNA, 25 bp, Homo sapien
tgctaagaaacttggagctgtggct

SEQ ID NO: 1972289 - DNA, 25 bp, Homo sapien
gattccagcaggatgcactattttg

SEQ ID NO: 1972290 - DNA, 25 bp, Homo sapien
gctgacgaccttgggacagagctga

SEQ ID NO: 1972291 - DNA, 25 bp, Homo sapien
tctgagtgcaggaattatgtgtggt

SEQ ID NO: 1972292 - DNA, 25 bp, Homo sapien
ttacaactgctaaaatggcacaggg

SEQ ID NO: 1972293 - DNA, 25 bp, Homo sapien
tataacaaacgtgagcatttcagga

SEQ ID NO: 1972294 - DNA, 25 bp, Homo sapien
tgttgctaccttgaacaaatggctc

SEQ ID NO: 1972295 - DNA, 25 bp, Homo sapien
agccttccaaggctgtgaaattaaa

SEQ ID NO: 1972296 - DNA, 25 bp, Homo sapien
gcagcagaatcccacatgctagaaa

SEQ ID NO: 1972297 - DNA, 25 bp, Homo sapien
agcacggggctgcttagccttccaa

SEQ ID NO: 1972298 - DNA, 25 bp, Homo sapien
tccaaggctgtgaaattaaagctga

SEQ ID NO: 1972299 - DNA, 25 bp, Homo sapien
cgcgtctgtagtcactcaagtgcac

SEQ ID NO: 1972300 - DNA, 25 bp, Homo sapien
cagctgtgaattcgcgtctgtagtc

SEQ ID NO: 1972301 - DNA, 25 bp, Homo sapien
ttgacattattgtgtaggaacaaaa

SEQ ID NO: 1972302 - DNA, 25 bp, Homo sapien
caaagctgtcagctgtgaattcgcg

SEQ ID NO: 1972303 - DNA, 25 bp, Homo sapien
ccagaaacggtgtctgagctgacct

SEQ ID NO: 1972304 - DNA, 25 bp, Homo sapien
agaaacggtgtctgagctgacctgg

SEQ ID NO: 1972305 - DNA, 25 bp, Homo sapien
tctccagaaacggtgtctgagctga

SEQ ID NO: 1972306 - DNA, 25 bp, Homo sapien
tgtctccagaaacggtgtctgagct

SEQ ID NO: 1972307 - DNA, 25 bp, Homo sapien
agaacagacctgcagacaaacacca

SEQ ID NO: 1972308 - DNA, 25 bp, Homo sapien
accaggtgtgccgtttcagcagact

SEQ ID NO: 1972309 - DNA, 25 bp, Homo sapien
tcagcagacttcacaatgaggtgtg

SEQ ID NO: 1972310 - DNA, 25 bp, Homo sapien
ttagttgcaagaacagacctgcaga

SEQ ID NO: 1972311 - DNA, 25 bp, Homo sapien
agtcagtgaggcacaagagatactc

SEQ ID NO: 1972312 - DNA, 25 bp, Homo sapien
tggaaaggagtcagtgaggcacaag

SEQ ID NO: 1972313 - DNA, 25 bp, Homo sapien
cacaagagatactcagcaacttcat

SEQ ID NO: 1972314 - DNA, 25 bp, Homo sapien
ggcacaagagatactcagcaacttc

SEQ ID NO: 1972315 - DNA, 25 bp, Homo sapien
ttcttgcagagaataggtgccctga

SEQ ID NO: 1972316 - DNA, 25 bp, Homo sapien
tgaactgcgggagacttagtactgg

SEQ ID NO: 1972317 - DNA, 25 bp, Homo sapien
gagttcaggtccttgcaaaagcagg

SEQ ID NO: 1972318 - DNA, 25 bp, Homo sapien
tgttcccacagacacagcgatgagt

SEQ ID NO: 1972319 - DNA, 25 bp, Homo sapien
ccactgcttcaaaatgatttctgaa

SEQ ID NO: 1972320 - DNA, 25 bp, Homo sapien
catattctgcagctgtaagtagaca

SEQ ID NO: 1972321 - DNA, 25 bp, Homo sapien
accactgcttcaaaatgatttctga

SEQ ID NO: 1972322 - DNA, 25 bp, Homo sapien
gcgcatgaaagctgctttagggagc

SEQ ID NO: 1972323 - DNA, 25 bp, Homo sapien
gcatgcgcatgaaagctgctttagg

SEQ ID NO: 1972324 - DNA, 25 bp, Homo sapien
tggcgcatgcgcatgaaagctgctt

SEQ ID NO: 1972325 - DNA, 25 bp, Homo sapien
tgagcgatggcgcatgcgcatgaaa

SEQ ID NO: 1972326 - DNA, 25 bp, Homo sapien
tgtacctttgccgaagtcccaaatc

SEQ ID NO: 1972327 - DNA, 25 bp, Homo sapien
ctctgtacctttgccgaagtcccaa

SEQ ID NO: 1972328 - DNA, 25 bp, Homo sapien
ctttgccgaagtcccaaatctctgg

SEQ ID NO: 1972329 - DNA, 25 bp, Homo sapien
tgccgaagtcccaaatctctggaca

SEQ ID NO: 1972330 - DNA, 25 bp, Homo sapien
gaagaagacccacgttgacgtcgag

SEQ ID NO: 1972331 - DNA, 25 bp, Homo sapien
atggcggaagaagacccacgttgac

SEQ ID NO: 1972332 - DNA, 25 bp, Homo sapien
tggaagaatgaccaatggcggaaga

SEQ ID NO: 1972333 - DNA, 25 bp, Homo sapien
gaagaatgaccaatggcggaagaag

SEQ ID NO: 1972334 - DNA, 25 bp, Homo sapien
ggcacctccacagtgaaacatgtcc

SEQ ID NO: 1972335 - DNA, 25 bp, Homo sapien
tggctttccagcttgattcccaaaa

SEQ ID NO: 1972336 - DNA, 25 bp, Homo sapien
ggaagcctccactgtgttctacatc

SEQ ID NO: 1972337 - DNA, 25 bp, Homo sapien
gttctacatcccgtgcagtgagtgg

SEQ ID NO: 1972338 - DNA, 25 bp, Homo sapien
tgctctcggccgaggccgtttgcgt

SEQ ID NO: 1972339 - DNA, 25 bp, Homo sapien
aagcgacattctgggtcccacgcag

SEQ ID NO: 1972340 - DNA, 25 bp, Homo sapien
cagaaaaagtcaggccactgaaggg

SEQ ID NO: 1972341 - DNA, 25 bp, Homo sapien
ttctcatctggaaagcgaatgctct

SEQ ID NO: 1972342 - DNA, 25 bp, Homo sapien
gctcctcccgggcgcgtcgggtcca

SEQ ID NO: 1972343 - DNA, 25 bp, Homo sapien
gcgtcgggtccagcctcgccggccc

SEQ ID NO: 1972344 - DNA, 25 bp, Homo sapien
cggtgggtcacgtggccgccggccg

SEQ ID NO: 1972345 - DNA, 25 bp, Homo sapien
gcggtgggtcacgtggccgccggcc

SEQ ID NO: 1972346 - DNA, 25 bp, Homo sapien
gccccgccggcgtctctcgcctctg

SEQ ID NO: 1972347 - DNA, 25 bp, Homo sapien
tcagcagcatcctccggggccgccg

SEQ ID NO: 1972348 - DNA, 25 bp, Homo sapien
gtgctcgcagccaggcagtgccggg

SEQ ID NO: 1972349 - DNA, 25 bp, Homo sapien
gtctctcgcctctgcccctcgctcg

SEQ ID NO: 1972350 - DNA, 25 bp, Homo sapien
acactttgagctcccgtatcgccat

SEQ ID NO: 1972351 - DNA, 25 bp, Homo sapien
agcttctttcacccgcagcagggaa

SEQ ID NO: 1972352 - DNA, 25 bp, Homo sapien
gatggtggggaggactttcccaggc

SEQ ID NO: 1972353 - DNA, 25 bp, Homo sapien
acaggtcactgcctcaccttccacc

SEQ ID NO: 1972354 - DNA, 25 bp, Homo sapien
cctcggctttcacccccttggctgg

SEQ ID NO: 1972355 - DNA, 25 bp, Homo sapien
ggaagcgaccctacgtttatctgaa

SEQ ID NO: 1972356 - DNA, 25 bp, Homo sapien
gctttgccaatgacacgggcgggta

SEQ ID NO: 1972357 - DNA, 25 bp, Homo sapien
cgggcgggtacaccagatgctaatg

SEQ ID NO: 1972358 - DNA, 25 bp, Homo sapien
gctttaaggcttcttcgggcggaga

SEQ ID NO: 1972359 - DNA, 25 bp, Homo sapien
tctctcagtcatgtgaagttacagc

SEQ ID NO: 1972360 - DNA, 25 bp, Homo sapien
cttaggttgtgagggtagagccttc

SEQ ID NO: 1972361 - DNA, 25 bp, Homo sapien
tgcaaaccagaaatcgagccctcac

SEQ ID NO: 1972362 - DNA, 25 bp, Homo sapien
gaagagaaagagaccgagcactctc

SEQ ID NO: 1972363 - DNA, 25 bp, Homo sapien
gaccactgtcctagcatcttaaaat

SEQ ID NO: 1972364 - DNA, 25 bp, Homo sapien
gggcggtactgacccatggcttgtt

SEQ ID NO: 1972365 - DNA, 25 bp, Homo sapien
ggaccactgtcctagcatcttaaaa

SEQ ID NO: 1972366 - DNA, 25 bp, Homo sapien
acccctggggcggtactgacccatg

SEQ ID NO: 1972367 - DNA, 25 bp, Homo sapien
gcatcactttatgttatggtctgaa

SEQ ID NO: 1972368 - DNA, 25 bp, Homo sapien
tgcctggccttcaaattgtaattag

SEQ ID NO: 1972369 - DNA, 25 bp, Homo sapien
aaagtgacaatactaggaggtagag

SEQ ID NO: 1972370 - DNA, 25 bp, Homo sapien
tgacaatactaggaggtagagcctt

SEQ ID NO: 1972371 - DNA, 25 bp, Homo sapien
tgccaatactgtgacacttcgtaag

SEQ ID NO: 1972372 - DNA, 25 bp, Homo sapien
gtaagggaacagatcggttccatca

SEQ ID NO: 1972373 - DNA, 25 bp, Homo sapien
cacttcgtaagggaacagatcggtt

SEQ ID NO: 1972374 - DNA, 25 bp, Homo sapien
tactgtgacacttcgtaagggaaca

SEQ ID NO: 1972375 - DNA, 25 bp, Homo sapien
tgcacacacccacttcgcttccact

SEQ ID NO: 1972376 - DNA, 25 bp, Homo sapien
cacacacccacttcgcttccacttt

SEQ ID NO: 1972377 - DNA, 25 bp, Homo sapien
gcacacacccacttcgcttccactt

SEQ ID NO: 1972378 - DNA, 25 bp, Homo sapien
gcttagggtccacttcccacatggc

SEQ ID NO: 1972379 - DNA, 25 bp, Homo sapien
tcacatggctaagcctctgtccttc

SEQ ID NO: 1972380 - DNA, 25 bp, Homo sapien
catttcacatggctaagcctctgtc

SEQ ID NO: 1972381 - DNA, 25 bp, Homo sapien
cactgcctggcttagggtccacttc

SEQ ID NO: 1972382 - DNA, 25 bp, Homo sapien
acttgtggcccaatggcagcacatt

SEQ ID NO: 1972383 - DNA, 25 bp, Homo sapien
cagccctttggtcctaagaacgtct

SEQ ID NO: 1972384 - DNA, 25 bp, Homo sapien
gtcctaagaacgtctattaatgcca

SEQ ID NO: 1972385 - DNA, 25 bp, Homo sapien
gtggcccaatggcagcacattctgc

SEQ ID NO: 1972386 - DNA, 25 bp, Homo sapien
tcacaaaagattgatatagttaact

SEQ ID NO: 1972387 - DNA, 25 bp, Homo sapien
gccatcgcgctaaatacttttataa

SEQ ID NO: 1972388 - DNA, 25 bp, Homo sapien
caaaagattgatatagttaactaaa

SEQ ID NO: 1972389 - DNA, 25 bp, Homo sapien
tgagccatcgcgctaaatactttta

SEQ ID NO: 1972390 - DNA, 25 bp, Homo sapien
ctggatttcgttgtatctgaatggc

SEQ ID NO: 1972391 - DNA, 25 bp, Homo sapien
agaggcttacggaaatgaatgcctg

SEQ ID NO: 1972392 - DNA, 25 bp, Homo sapien
gagaggcttacggaaatgaatgcct

SEQ ID NO: 1972393 - DNA, 25 bp, Homo sapien
aaagagagaggcttacggaaatgaa

SEQ ID NO: 1972394 - DNA, 25 bp, Homo sapien
gagagaggcttacggaaatgaatgc

SEQ ID NO: 1972395 - DNA, 25 bp, Homo sapien
gacgaagatggtctggtacctgcat

SEQ ID NO: 1972396 - DNA, 25 bp, Homo sapien
gctctgagggcattactagtgactg

SEQ ID NO: 1972397 - DNA, 25 bp, Homo sapien
gcctgcatgcgtgtgactccacgtc

SEQ ID NO: 1972398 - DNA, 25 bp, Homo sapien
catgctggatgaacccaagagctct

SEQ ID NO: 1972399 - DNA, 25 bp, Homo sapien
gcagacctagggctctgatgaaacc

SEQ ID NO: 1972400 - DNA, 25 bp, Homo sapien
cagacctagggctctgatgaaaccc

SEQ ID NO: 1972401 - DNA, 25 bp, Homo sapien
ctggagacagagcagacctagggct

SEQ ID NO: 1972402 - DNA, 25 bp, Homo sapien
ggagacagagcagacctagggctct

SEQ ID NO: 1972403 - DNA, 25 bp, Homo sapien
tgaggcgccagagactcgagtcctt

SEQ ID NO: 1972404 - DNA, 25 bp, Homo sapien
aggcgccagagactcgagtccttcc

SEQ ID NO: 1972405 - DNA, 25 bp, Homo sapien
gccagagactcgagtccttccccac

SEQ ID NO: 1972406 - DNA, 25 bp, Homo sapien
gctgaggcgccagagactcgagtcc

SEQ ID NO: 1972407 - DNA, 25 bp, Homo sapien
tcttttgtctgacatgccatccaga

SEQ ID NO: 1972408 - DNA, 25 bp, Homo sapien
tcaccgagtgcggaagcaccgtgga

SEQ ID NO: 1972409 - DNA, 25 bp, Homo sapien
ccatggccacatcaccgagtgcgga

SEQ ID NO: 1972410 - DNA, 25 bp, Homo sapien
gaggaagagccggaaacttcagggc

SEQ ID NO: 1972411 - DNA, 25 bp, Homo sapien
gagaggctcaacagccgaactgaag

SEQ ID NO: 1972412 - DNA, 25 bp, Homo sapien
cctggttacccagctaacgatgaca

SEQ ID NO: 1972413 - DNA, 25 bp, Homo sapien
gcagatcaaagctctagccaaggaa

SEQ ID NO: 1972414 - DNA, 25 bp, Homo sapien
gccaccaggaggactgaaaaagctg

SEQ ID NO: 1972415 - DNA, 25 bp, Homo sapien
atgcaaattaaatcaggctctgagc

SEQ ID NO: 1972416 - DNA, 25 bp, Homo sapien
tgtttcactggaagcgttaggtaag

SEQ ID NO: 1972417 - DNA, 25 bp, Homo sapien
tgtaaagaggtgtcatcctgatgca

SEQ ID NO: 1972418 - DNA, 25 bp, Homo sapien
agtagatgatttctatgattcatcc

SEQ ID NO: 1972419 - DNA, 25 bp, Homo sapien
cagcatcttacacaatagggtcttg

SEQ ID NO: 1972420 - DNA, 25 bp, Homo sapien
gaacccagaggccacttactacaag

SEQ ID NO: 1972421 - DNA, 25 bp, Homo sapien
gaaggcattgcagtgtgcgctgcta

SEQ ID NO: 1972422 - DNA, 25 bp, Homo sapien
ccatgctgggcctagagtggctgcc

SEQ ID NO: 1972423 - DNA, 25 bp, Homo sapien
tagaacgtccctagcgtggaaacag

SEQ ID NO: 1972424 - DNA, 25 bp, Homo sapien
gaaagaccgccttcaatcacagttg

SEQ ID NO: 1972425 - DNA, 25 bp, Homo sapien
gaagcagtagaagtttgcccctagg

SEQ ID NO: 1972426 - DNA, 25 bp, Homo sapien
ggaccatccgcccagacaaatggga

SEQ ID NO: 1972427 - DNA, 25 bp, Homo sapien
tttagtatgtcaaaccacccttgca

SEQ ID NO: 1972428 - DNA, 25 bp, Homo sapien
taaaccccatctggtcatggtgtat

SEQ ID NO: 1972429 - DNA, 25 bp, Homo sapien
gcatcaattgaaaggatcaggtggt

SEQ ID NO: 1972430 - DNA, 25 bp, Homo sapien
tagaatttaccagtagagcgatctg

SEQ ID NO: 1972431 - DNA, 25 bp, Homo sapien
ccattagaagttttacagacttagc

SEQ ID NO: 1972432 - DNA, 25 bp, Homo sapien
cagacttagctcctatatttaggtc

SEQ ID NO: 1972433 - DNA, 25 bp, Homo sapien
taaacatgtggatatctggttgtcc

SEQ ID NO: 1972434 - DNA, 25 bp, Homo sapien
cattgccaaaaacaaagtcatggag

SEQ ID NO: 1972435 - DNA, 25 bp, Homo sapien
gggatgtgcggaacaactgctttac

SEQ ID NO: 1972436 - DNA, 25 bp, Homo sapien
ggcccagggcttacgcaccacaggg

SEQ ID NO: 1972437 - DNA, 25 bp, Homo sapien
aatgggacgtatgaacaggagccgc

SEQ ID NO: 1972438 - DNA, 25 bp, Homo sapien
gacagtgtccgtgcttcagaaggga

SEQ ID NO: 1972439 - DNA, 25 bp, Homo sapien
ctgaagtggacacaatcctgataac

SEQ ID NO: 1972440 - DNA, 25 bp, Homo sapien
aacaggattgttcttccaccctgca

SEQ ID NO: 1972441 - DNA, 25 bp, Homo sapien
cattccacgcgtccttagcgggggc

SEQ ID NO: 1972442 - DNA, 25 bp, Homo sapien
ggaactgtgacaagacatgttaggc

SEQ ID NO: 1972443 - DNA, 25 bp, Homo sapien
catgttaggcgaaacaggattgttc

SEQ ID NO: 1972444 - DNA, 25 bp, Homo sapien
taaaacaacgaacatcactcctcaa

SEQ ID NO: 1972445 - DNA, 25 bp, Homo sapien
tcagttggctggaccaaagactgga

SEQ ID NO: 1972446 - DNA, 25 bp, Homo sapien
ggtccccaaagtgaagtattctatc

SEQ ID NO: 1972447 - DNA, 25 bp, Homo sapien
tcaaactaccagtgaactcccggga

SEQ ID NO: 1972448 - DNA, 25 bp, Homo sapien
gggcagatggagctcgcagatgcag

SEQ ID NO: 1972449 - DNA, 25 bp, Homo sapien
gctcgcagatgcagagatgaggtca

SEQ ID NO: 1972450 - DNA, 25 bp, Homo sapien
atggagctcgcagatgcagagatga

SEQ ID NO: 1972451 - DNA, 25 bp, Homo sapien
tgaggtcacgcaggaaggcgcctcc

SEQ ID NO: 1972452 - DNA, 25 bp, Homo sapien
cttctaaaacgtcttcagcatcttc

SEQ ID NO: 1972453 - DNA, 25 bp, Homo sapien
caaggagttaagttagggaattcag

SEQ ID NO: 1972454 - DNA, 25 bp, Homo sapien
gcttctaaaacgtcttcagcatctt

SEQ ID NO: 1972455 - DNA, 25 bp, Homo sapien
caggaggcctgtacagggcagcaga

SEQ ID NO: 1972456 - DNA, 25 bp, Homo sapien
agtggatgcagttcccgacctccag

SEQ ID NO: 1972457 - DNA, 25 bp, Homo sapien
ccgtggcttgggaccgctcaagtgg

SEQ ID NO: 1972458 - DNA, 25 bp, Homo sapien
caggggcgactgctgttcctcggct

SEQ ID NO: 1972459 - DNA, 25 bp, Homo sapien
ctccaggggcgactgctgttcctcg

SEQ ID NO: 1972460 - DNA, 25 bp, Homo sapien
ccaacaccgaccacgctcatttcta

SEQ ID NO: 1972461 - DNA, 25 bp, Homo sapien
tgaggccagctgattcctacaaact

SEQ ID NO: 1972462 - DNA, 25 bp, Homo sapien
gcagggtggggacctctccccaaca

SEQ ID NO: 1972463 - DNA, 25 bp, Homo sapien
gcaggcagcacactttcatgaggcc

SEQ ID NO: 1972464 - DNA, 25 bp, Homo sapien
gacccaaggctttatcaacaccgat

SEQ ID NO: 1972465 - DNA, 25 bp, Homo sapien
gctttatcaacaccgatcgccgttg

SEQ ID NO: 1972466 - DNA, 25 bp, Homo sapien
catgttcctactggaaggatcgtgg

SEQ ID NO: 1972467 - DNA, 25 bp, Homo sapien
gatcgccgttgccaacatgttccta

SEQ ID NO: 1972468 - DNA, 25 bp, Homo sapien
tgcatcggacggagctgggcttggg

SEQ ID NO: 1972469 - DNA, 25 bp, Homo sapien
ggaagcctgcatcggacggagctgg

SEQ ID NO: 1972470 - DNA, 25 bp, Homo sapien
gcctgcatcggacggagctgggctt

SEQ ID NO: 1972471 - DNA, 25 bp, Homo sapien
accagggtcagagctttactctcca

SEQ ID NO: 1972472 - DNA, 25 bp, Homo sapien
gtgatcctggacaaatcgacacacg

SEQ ID NO: 1972473 - DNA, 25 bp, Homo sapien
acgatgcttgatttcccaaccccag

SEQ ID NO: 1972474 - DNA, 25 bp, Homo sapien
tagtagggctgatgttgtggtcaaa

SEQ ID NO: 1972475 - DNA, 25 bp, Homo sapien
ccaatagtagggctgatgttgtggt

SEQ ID NO: 1972476 - DNA, 25 bp, Homo sapien
cagaggccacgttctaagaatgaaa

SEQ ID NO: 1972477 - DNA, 25 bp, Homo sapien
gaacagcagagccaaagcacacgcg

SEQ ID NO: 1972478 - DNA, 25 bp, Homo sapien
agccaaagcacacgcggccaaggag

SEQ ID NO: 1972479 - DNA, 25 bp, Homo sapien
aagcaggcacttcccgaacagcaga

SEQ ID NO: 1972480 - DNA, 25 bp, Homo sapien
tggatacctgcgaaattccccttgg

SEQ ID NO: 1972481 - DNA, 25 bp, Homo sapien
atgaaccagcccgtaaagccctttg

SEQ ID NO: 1972482 - DNA, 25 bp, Homo sapien
tctaggtgctgcgataaataataca

SEQ ID NO: 1972483 - DNA, 25 bp, Homo sapien
gggccaatacctactctgcattgaa

SEQ ID NO: 1972484 - DNA, 25 bp, Homo sapien
ccttgtgatctgcttccgagtttgc

SEQ ID NO: 1972485 - DNA, 25 bp, Homo sapien
gcttccgagtttgcaggacgctcta

SEQ ID NO: 1972486 - DNA, 25 bp, Homo sapien
tttgcaggacgctctattttaacat

SEQ ID NO: 1972487 - DNA, 25 bp, Homo sapien
ctgcagtgtgaccaccccttgtgat

SEQ ID NO: 1972488 - DNA, 25 bp, Homo sapien
caggcttcttcccaagtaacatcgg

SEQ ID NO: 1972489 - DNA, 25 bp, Homo sapien
tccctgtatagaggatgctgtgcag

SEQ ID NO: 1972490 - DNA, 25 bp, Homo sapien
ctgagtaagagctgttctcgactct

SEQ ID NO: 1972491 - DNA, 25 bp, Homo sapien
gtaacatcggtctttatgtcaatca

SEQ ID NO: 1972492 - DNA, 25 bp, Homo sapien
cttttggctttcttgctattttcac

SEQ ID NO: 1972493 - DNA, 25 bp, Homo sapien
tcttttggctttcttgctattttca

SEQ ID NO: 1972494 - DNA, 25 bp, Homo sapien
gcaagttgtgaattgtgaccgaaaa

SEQ ID NO: 1972495 - DNA, 25 bp, Homo sapien
ccagtatggaccacctgatggtaag

SEQ ID NO: 1972496 - DNA, 25 bp, Homo sapien
cagtatggaccacctgatggtaagt

SEQ ID NO: 1972497 - DNA, 25 bp, Homo sapien
gtgaccgaaaaccttgtcacattca

SEQ ID NO: 1972498 - DNA, 25 bp, Homo sapien
atgttgtgggagaagtgaattgtgc

SEQ ID NO: 1972499 - DNA, 25 bp, Homo sapien
gttgtgggagaagtgaattgtgcat

SEQ ID NO: 1972500 - DNA, 25 bp, Homo sapien
tgttgtgggagaagtgaattgtgca

SEQ ID NO: 1972501 - DNA, 25 bp, Homo sapien
ggagaagtgaattgtgcatgaagac

SEQ ID NO: 1972502 - DNA, 25 bp, Homo sapien
ccacaaggcacagttttggtcataa

SEQ ID NO: 1972503 - DNA, 25 bp, Homo sapien
caaggcacagttttggtcataaaag

SEQ ID NO: 1972504 - DNA, 25 bp, Homo sapien
acaaggcacagttttggtcataaaa

SEQ ID NO: 1972505 - DNA, 25 bp, Homo sapien
cacaaggcacagttttggtcataaa

SEQ ID NO: 1972506 - DNA, 25 bp, Homo sapien
cactgtgctagtattcgtcatttcc

SEQ ID NO: 1972507 - DNA, 25 bp, Homo sapien
tcagcaaatacagagaattaggagt

SEQ ID NO: 1972508 - DNA, 25 bp, Homo sapien
ttttttgaatctaaaggcatgacct

SEQ ID NO: 1972509 - DNA, 25 bp, Homo sapien
tccagtaagagacctcagattttcc

SEQ ID NO: 1972510 - DNA, 25 bp, Homo sapien
tctgtcggctatggaccgctctagg

SEQ ID NO: 1972511 - DNA, 25 bp, Homo sapien
tgtcggctatggaccgctctaggca

SEQ ID NO: 1972512 - DNA, 25 bp, Homo sapien
cttctgtcggctatggaccgctcta

SEQ ID NO: 1972513 - DNA, 25 bp, Homo sapien
gtcggctatggaccgctctaggcat

SEQ ID NO: 1972514 - DNA, 25 bp, Homo sapien
aaaaacgttctatcgtgggctggtg

SEQ ID NO: 1972515 - DNA, 25 bp, Homo sapien
aaaacgttctatcgtgggctggtgg

SEQ ID NO: 1972516 - DNA, 25 bp, Homo sapien
aaacgttctatcgtgggctggtggg

SEQ ID NO: 1972517 - DNA, 25 bp, Homo sapien
aacgttctatcgtgggctggtgggg

SEQ ID NO: 1972518 - DNA, 25 bp, Homo sapien
gcagtcactgtacctcccagagcag

SEQ ID NO: 1972519 - DNA, 25 bp, Homo sapien
gcagaagaagcctgtccacgcagct

SEQ ID NO: 1972520 - DNA, 25 bp, Homo sapien
agaagaagcctgtccacgcagctct

SEQ ID NO: 1972521 - DNA, 25 bp, Homo sapien
ctgggaaggtgttcatctagcgcag

SEQ ID NO: 1972522 - DNA, 25 bp, Homo sapien
gccttcagatatccagtgagctcca

SEQ ID NO: 1972523 - DNA, 25 bp, Homo sapien
gcaaagttcgtcttgccttgactgg

SEQ ID NO: 1972524 - DNA, 25 bp, Homo sapien
gtccgagcaaagttcgtcttgcctt

SEQ ID NO: 1972525 - DNA, 25 bp, Homo sapien
gtttccacaagagccttcagatatc

SEQ ID NO: 1972526 - DNA, 25 bp, Homo sapien
tgttgagtcgctcaggctcggcctg

SEQ ID NO: 1972527 - DNA, 25 bp, Homo sapien
cagaggacgctctgtccctgttgag

SEQ ID NO: 1972528 - DNA, 25 bp, Homo sapien
ccaccataagggagcgtcaagggca

SEQ ID NO: 1972529 - DNA, 25 bp, Homo sapien
tcaagggcagatgccaaaaagagcc

SEQ ID NO: 1972530 - DNA, 25 bp, Homo sapien
agctgagcctcgatagtacatggga

SEQ ID NO: 1972531 - DNA, 25 bp, Homo sapien
ctgcttggtaatatcatacacgata

SEQ ID NO: 1972532 - DNA, 25 bp, Homo sapien
tatcatacacgataacagctgcagc

SEQ ID NO: 1972533 - DNA, 25 bp, Homo sapien
tagtacatgggagccaatgaatgaa

SEQ ID NO: 1972534 - DNA, 25 bp, Homo sapien
tgagaggtcgcacttgtttccagcg

SEQ ID NO: 1972535 - DNA, 25 bp, Homo sapien
tgtttccagcgatggccattacaat

SEQ ID NO: 1972536 - DNA, 25 bp, Homo sapien
tatctgagaggtcgcacttgtttcc

SEQ ID NO: 1972537 - DNA, 25 bp, Homo sapien
tcgcacttgtttccagcgatggcca

SEQ ID NO: 1972538 - DNA, 25 bp, Homo sapien
gatggaggacagtatctacacaaaa

SEQ ID NO: 1972539 - DNA, 25 bp, Homo sapien
atggaggacagtatctacacaaaag

SEQ ID NO: 1972540 - DNA, 25 bp, Homo sapien
ctacacggatgacactcagggatgg

SEQ ID NO: 1972541 - DNA, 25 bp, Homo sapien
agcatctacacggatgacactcagg

SEQ ID NO: 1972542 - DNA, 25 bp, Homo sapien
tacacggatgacactcagggatgga

SEQ ID NO: 1972543 - DNA, 25 bp, Homo sapien
catctacacggatgacactcaggga

SEQ ID NO: 1972544 - DNA, 25 bp, Homo sapien
gtacactcagggatgacactcaggg

SEQ ID NO: 1972545 - DNA, 25 bp, Homo sapien
tagcccaaagatatgtagagtcagg

SEQ ID NO: 1972546 - DNA, 25 bp, Homo sapien
tagcaaaacagctagcttaccaggc

SEQ ID NO: 1972547 - DNA, 25 bp, Homo sapien
ctgagggcagacataacaaaggcat

SEQ ID NO: 1972548 - DNA, 25 bp, Homo sapien
gctggtaccccagatcctgtggatt

SEQ ID NO: 1972549 - DNA, 25 bp, Homo sapien
gacatgcagcgtcctgtagggctct

SEQ ID NO: 1972550 - DNA, 25 bp, Homo sapien
ttaaatgtccccaactgtgcaagcc

SEQ ID NO: 1972551 - DNA, 25 bp, Homo sapien
gaccttgaattagccccatgccatg

SEQ ID NO: 1972552 - DNA, 25 bp, Homo sapien
ccaagccaaaggcaaccaagcacag

SEQ ID NO: 1972553 - DNA, 25 bp, Homo sapien
caagccaaaggcaaccaagcacagg

SEQ ID NO: 1972554 - DNA, 25 bp, Homo sapien
gatgatcttcgtgctgtgaaccgtg

SEQ ID NO: 1972555 - DNA, 25 bp, Homo sapien
gtttggagcaatcgaggactgacct

SEQ ID NO: 1972556 - DNA, 25 bp, Homo sapien
tgtactttgcatcggtcattccagg

SEQ ID NO: 1972557 - DNA, 25 bp, Homo sapien
gctgtcattcagatcgtccacggtt

SEQ ID NO: 1972558 - DNA, 25 bp, Homo sapien
tgctcggaggggtgtgggccaggaa

SEQ ID NO: 1972559 - DNA, 25 bp, Homo sapien
tgtgggccaggaaggtctgcacttc

SEQ ID NO: 1972560 - DNA, 25 bp, Homo sapien
tgccctcgagcacatgctcggaggg

SEQ ID NO: 1972561 - DNA, 25 bp, Homo sapien
aggaaggtctgcacttcactccgac

SEQ ID NO: 1972562 - DNA, 25 bp, Homo sapien
atctccccctcaggatattcaaaag

SEQ ID NO: 1972563 - DNA, 25 bp, Homo sapien
cttcccaggattgcaagtctgcttt

SEQ ID NO: 1972564 - DNA, 25 bp, Homo sapien
cctcaggatattcaaaagacacacc

SEQ ID NO: 1972565 - DNA, 25 bp, Homo sapien
tcaaaagacacacctaagtcaccat

SEQ ID NO: 1972566 - DNA, 25 bp, Homo sapien
ccagctgtgccctcgtgccccgcag

SEQ ID NO: 1972567 - DNA, 25 bp, Homo sapien
tcctccgtggactcccgtgagaccc

SEQ ID NO: 1972568 - DNA, 25 bp, Homo sapien
cgtgagaccccatcacgggagttct

SEQ ID NO: 1972569 - DNA, 25 bp, Homo sapien
tgcagtgtaggcagcgggaaccctc

SEQ ID NO: 1972570 - DNA, 25 bp, Homo sapien
ccggagaagctggaacttggcctca

SEQ ID NO: 1972571 - DNA, 25 bp, Homo sapien
gctggagcgctgtctcagtggatac

SEQ ID NO: 1972572 - DNA, 25 bp, Homo sapien
gtgtcttttttcgattcctgggcca

SEQ ID NO: 1972573 - DNA, 25 bp, Homo sapien
gagccaaagcaccaccccggagaag

SEQ ID NO: 1972574 - DNA, 25 bp, Homo sapien
tcaggacctggttacagggaaaaca

SEQ ID NO: 1972575 - DNA, 25 bp, Homo sapien
caggacctggttacagggaaaacag

SEQ ID NO: 1972576 - DNA, 25 bp, Homo sapien
tcagagctggttaaattctttgtgg

SEQ ID NO: 1972577 - DNA, 25 bp, Homo sapien
ttctttgtggtcctccttcactgat

SEQ ID NO: 1972578 - DNA, 25 bp, Homo sapien
agagctggttaaattctttgtggtc

SEQ ID NO: 1972579 - DNA, 25 bp, Homo sapien
ctttgtggtcctccttcactgatgg

SEQ ID NO: 1972580 - DNA, 25 bp, Homo sapien
tgtattccagcgaggtgagccctga

SEQ ID NO: 1972581 - DNA, 25 bp, Homo sapien
gtgagtgctgagagtcaactggaaa

SEQ ID NO: 1972582 - DNA, 25 bp, Homo sapien
cccaagttgccttcagcagaaagga

SEQ ID NO: 1972583 - DNA, 25 bp, Homo sapien
gaaaagatccgggacaagaggctca

SEQ ID NO: 1972584 - DNA, 25 bp, Homo sapien
gcgaatctaccaagtattcctgtga

SEQ ID NO: 1972585 - DNA, 25 bp, Homo sapien
tcctgcaatccatgtgcccatggtg

SEQ ID NO: 1972586 - DNA, 25 bp, Homo sapien
ggacacccgcaattgcctttcctgg

SEQ ID NO: 1972587 - DNA, 25 bp, Homo sapien
tgtgaataggattctccaacatctt

SEQ ID NO: 1972588 - DNA, 25 bp, Homo sapien
tgctaggcgttgaaacaggtaaact

SEQ ID NO: 1972589 - DNA, 25 bp, Homo sapien
cgagttcacccaagccaaggtataa

SEQ ID NO: 1972590 - DNA, 25 bp, Homo sapien
agctgatcatagtctgcgtggccca

SEQ ID NO: 1972591 - DNA, 25 bp, Homo sapien
tgagaattactacgactgcaggaag

SEQ ID NO: 1972592 - DNA, 25 bp, Homo sapien
tctcattaaatcatcggcctgccga

SEQ ID NO: 1972593 - DNA, 25 bp, Homo sapien
cttccatggctagaggtgagtctca

SEQ ID NO: 1972594 - DNA, 25 bp, Homo sapien
gaagataagaaaagcacaccctcag

SEQ ID NO: 1972595 - DNA, 25 bp, Homo sapien
gcggcacaggttcactaggcttaca

SEQ ID NO: 1972596 - DNA, 25 bp, Homo sapien
tatggattcagcgtattccttagca

SEQ ID NO: 1972597 - DNA, 25 bp, Homo sapien
tgattccttgaaagagctcttcgat

SEQ ID NO: 1972598 - DNA, 25 bp, Homo sapien
acttgtctcaaccacgatggcacct

SEQ ID NO: 1972599 - DNA, 25 bp, Homo sapien
gaaagagctcttcgatattaatagc

SEQ ID NO: 1972600 - DNA, 25 bp, Homo sapien
tgtcactgcgccttgtcaccgtgct

SEQ ID NO: 1972601 - DNA, 25 bp, Homo sapien
ctgtccccagggtctagcatggcac

SEQ ID NO: 1972602 - DNA, 25 bp, Homo sapien
ttgtcaccgtgctgtccccagggtc

SEQ ID NO: 1972603 - DNA, 25 bp, Homo sapien
agacaccgatctgactgtgcccaca

SEQ ID NO: 1972604 - DNA, 25 bp, Homo sapien
gtccactccttcgccgcgcagcacc

SEQ ID NO: 1972605 - DNA, 25 bp, Homo sapien
agtccactccttcgccgcgcagcac

SEQ ID NO: 1972606 - DNA, 25 bp, Homo sapien
ccactccttcgccgcgcagcaccaa

SEQ ID NO: 1972607 - DNA, 25 bp, Homo sapien
acagtccactccttcgccgcgcagc

SEQ ID NO: 1972608 - DNA, 25 bp, Homo sapien
tatcctggctcggaactgggctgtc

SEQ ID NO: 1972609 - DNA, 25 bp, Homo sapien
gacctttagcctctagccatgtaga

SEQ ID NO: 1972610 - DNA, 25 bp, Homo sapien
gtggaccagccatttcctgcgcaag

SEQ ID NO: 1972611 - DNA, 25 bp, Homo sapien
ggaacatcgccctaataatgcagaa

SEQ ID NO: 1972612 - DNA, 25 bp, Homo sapien
acctccttcctctttgctgcttctc

SEQ ID NO: 1972613 - DNA, 25 bp, Homo sapien
ctccttcctctttgctgcttctcat

SEQ ID NO: 1972614 - DNA, 25 bp, Homo sapien
ccgctttccgccacctccttcctct

SEQ ID NO: 1972615 - DNA, 25 bp, Homo sapien
ctttccgccacctccttcctctttg

SEQ ID NO: 1972616 - DNA, 25 bp, Homo sapien
tgctttgggctgtgcacaaaataaa

SEQ ID NO: 1972617 - DNA, 25 bp, Homo sapien
cctttcctacagccaacactgcaca

SEQ ID NO: 1972618 - DNA, 25 bp, Homo sapien
ctttcctacagccaacactgcacac

SEQ ID NO: 1972619 - DNA, 25 bp, Homo sapien
tttcctacagccaacactgcacaca

SEQ ID NO: 1972620 - DNA, 25 bp, Homo sapien
tctcaactttgattgttccattgtt

SEQ ID NO: 1972621 - DNA, 25 bp, Homo sapien
ctcaactttgattgttccattgttt

SEQ ID NO: 1972622 - DNA, 25 bp, Homo sapien
ttctcaactttgattgttccattgt

SEQ ID NO: 1972623 - DNA, 25 bp, Homo sapien
ccattttcatgggggtccaagggtg

SEQ ID NO: 1972624 - DNA, 25 bp, Homo sapien
caagtaccgtggaccacggcccttg

SEQ ID NO: 1972625 - DNA, 25 bp, Homo sapien
catggcaaagaaggtaccagctggc

SEQ ID NO: 1972626 - DNA, 25 bp, Homo sapien
cagtaagctagatacccagtcggtc

SEQ ID NO: 1972627 - DNA, 25 bp, Homo sapien
tatgtgcaagaactgggtccagccc

SEQ ID NO: 1972628 - DNA, 25 bp, Homo sapien
gaatacatggcggaaaggtcctagc

SEQ ID NO: 1972629 - DNA, 25 bp, Homo sapien
aaggtgacccgtctccagttctcca

SEQ ID NO: 1972630 - DNA, 25 bp, Homo sapien
ctcctggaaggtgacccgtctccag

SEQ ID NO: 1972631 - DNA, 25 bp, Homo sapien
ggaaggtgacccgtctccagttctc

SEQ ID NO: 1972632 - DNA, 25 bp, Homo sapien
gaaggtgacccgtctccagttctcc

SEQ ID NO: 1972633 - DNA, 25 bp, Homo sapien
cctggaaggtgacccgtctccagtt

SEQ ID NO: 1972634 - DNA, 25 bp, Homo sapien
ctcctggaaggtgacccgtctccag

SEQ ID NO: 1972635 - DNA, 25 bp, Homo sapien
aaggtgacccgtctccagttctcca

SEQ ID NO: 1972636 - DNA, 25 bp, Homo sapien
ggaaggtgacccgtctccagttctc

SEQ ID NO: 1972637 - DNA, 25 bp, Homo sapien
cagtatgctcagaactaccctttac

SEQ ID NO: 1972638 - DNA, 25 bp, Homo sapien
ccccattgccagatgtgtagaaggt

SEQ ID NO: 1972639 - DNA, 25 bp, Homo sapien
tagaaggttagaccagaatgatccc

SEQ ID NO: 1972640 - DNA, 25 bp, Homo sapien
gaatgatcccacatcccagtatgct

SEQ ID NO: 1972641 - DNA, 25 bp, Homo sapien
ggacttcagtacacccattccgcag

SEQ ID NO: 1972642 - DNA, 25 bp, Homo sapien
gcagtcaggctagacaacagtgtag

SEQ ID NO: 1972643 - DNA, 25 bp, Homo sapien
cattccgcagctggaaatcaagctc

SEQ ID NO: 1972644 - DNA, 25 bp, Homo sapien
tctgagagaatgaatgcagcgcagg

SEQ ID NO: 1972645 - DNA, 25 bp, Homo sapien
gctgggactacgcattcactggcat

SEQ ID NO: 1972646 - DNA, 25 bp, Homo sapien
tgagagcttcaaggtggctcccctg

SEQ ID NO: 1972647 - DNA, 25 bp, Homo sapien
tgtgctggactgctcgccacaagtc

SEQ ID NO: 1972648 - DNA, 25 bp, Homo sapien
gctatgtagctcacttaaggtcaca

SEQ ID NO: 1972649 - DNA, 25 bp, Homo sapien
tcatagatgcctcatagtaaaggcc

SEQ ID NO: 1972650 - DNA, 25 bp, Homo sapien
gaggctccagctttaacactttcca

SEQ ID NO: 1972651 - DNA, 25 bp, Homo sapien
cactttccattcctagttccttgtc

SEQ ID NO: 1972652 - DNA, 25 bp, Homo sapien
actttttccaagctatccatcctaa

SEQ ID NO: 1972653 - DNA, 25 bp, Homo sapien
cgagatcacgaatgaagtctgatga

SEQ ID NO: 1972654 - DNA, 25 bp, Homo sapien
tattccaaggaagactgatgtcact

SEQ ID NO: 1972655 - DNA, 25 bp, Homo sapien
cgaatgaagtctgatgaatgatgta

SEQ ID NO: 1972656 - DNA, 25 bp, Homo sapien
tgatgtcactcttcgagatcacgaa

SEQ ID NO: 1972657 - DNA, 25 bp, Homo sapien
cacgttgctggacaggactagtaat

SEQ ID NO: 1972658 - DNA, 25 bp, Homo sapien
agaggcacgttgctggacaggacta

SEQ ID NO: 1972659 - DNA, 25 bp, Homo sapien
ctggacaggactagtaatgagcttt

SEQ ID NO: 1972660 - DNA, 25 bp, Homo sapien
ccaggagaggcacgttgctggacag

SEQ ID NO: 1972661 - DNA, 25 bp, Homo sapien
ttggcctgggctatttccaagaact

SEQ ID NO: 1972662 - DNA, 25 bp, Homo sapien
aggccttctctttggcctgggctat

SEQ ID NO: 1972663 - DNA, 25 bp, Homo sapien
ctctttggcctgggctatttccaag

SEQ ID NO: 1972664 - DNA, 25 bp, Homo sapien
cttctctttggcctgggctatttcc

SEQ ID NO: 1972665 - DNA, 25 bp, Homo sapien
tgggtaggtcatcgccctcctgtga

SEQ ID NO: 1972666 - DNA, 25 bp, Homo sapien
ctcctgtgaggcatcagactcctct

SEQ ID NO: 1972667 - DNA, 25 bp, Homo sapien
ttcttcaggctttaggatgtcaccc

SEQ ID NO: 1972668 - DNA, 25 bp, Homo sapien
cttgttttggagacttgggaatgtc

SEQ ID NO: 1972669 - DNA, 25 bp, Homo sapien
ggacacacatgatggcgcactctct

SEQ ID NO: 1972670 - DNA, 25 bp, Homo sapien
gcatggaagaatggtctgatggtcc

SEQ ID NO: 1972671 - DNA, 25 bp, Homo sapien
cttcagtgatgcctcaaagtcctcc

SEQ ID NO: 1972672 - DNA, 25 bp, Homo sapien
taaaactgaaaggttgggacacaca

SEQ ID NO: 1972673 - DNA, 25 bp, Homo sapien
taagggcgccgcaaagttcatccac

SEQ ID NO: 1972674 - DNA, 25 bp, Homo sapien
ccttaagggcgccgcaaagttcatc

SEQ ID NO: 1972675 - DNA, 25 bp, Homo sapien
tctgcaatgactgcttcaagttttt

SEQ ID NO: 1972676 - DNA, 25 bp, Homo sapien
ttccttaagggcgccgcaaagttca

SEQ ID NO: 1972677 - DNA, 25 bp, Homo sapien
gacttagcagtcttcaccatgggaa

SEQ ID NO: 1972678 - DNA, 25 bp, Homo sapien
gactttgggctcatagacatctggg

SEQ ID NO: 1972679 - DNA, 25 bp, Homo sapien
ccggcacaagaaggaggttagctaa

SEQ ID NO: 1972680 - DNA, 25 bp, Homo sapien
caattaccagggagacgaaccagga

SEQ ID NO: 1972681 - DNA, 25 bp, Homo sapien
ggactctggtagcacaatgtttggg

SEQ ID NO: 1972682 - DNA, 25 bp, Homo sapien
tgaaaaagtcagaagaaggtctctc

SEQ ID NO: 1972683 - DNA, 25 bp, Homo sapien
aatcctctcgttgaaaagccctttg

SEQ ID NO: 1972684 - DNA, 25 bp, Homo sapien
tatatgcactgtcactaaaagccca

SEQ ID NO: 1972685 - DNA, 25 bp, Homo sapien
cgacccacgtgacggcctctgcgtg

SEQ ID NO: 1972686 - DNA, 25 bp, Homo sapien
tgtgtcaccggttcggtgggccacc

SEQ ID NO: 1972687 - DNA, 25 bp, Homo sapien
tcggccgagctctaggacgaggcca

SEQ ID NO: 1972688 - DNA, 25 bp, Homo sapien
agctccgggtcccacaactgactca

SEQ ID NO: 1972689 - DNA, 25 bp, Homo sapien
aggaccaggatctgctcgtgcttcg

SEQ ID NO: 1972690 - DNA, 25 bp, Homo sapien
ccaggatctgctcgtgcttcgccat

SEQ ID NO: 1972691 - DNA, 25 bp, Homo sapien
ggtctgtgggcggatcgaggaccag

SEQ ID NO: 1972692 - DNA, 25 bp, Homo sapien
tgggcggatcgaggaccaggatctg

SEQ ID NO: 1972693 - DNA, 25 bp, Homo sapien
tattagatgttcacactctttcagt

SEQ ID NO: 1972694 - DNA, 25 bp, Homo sapien
tttctattagatgttcacactcttt

SEQ ID NO: 1972695 - DNA, 25 bp, Homo sapien
tctattagatgttcacactctttca

SEQ ID NO: 1972696 - DNA, 25 bp, Homo sapien
agatgttcacactctttcagtattc

SEQ ID NO: 1972697 - DNA, 25 bp, Homo sapien
caacaagtagctcacttacacttct

SEQ ID NO: 1972698 - DNA, 25 bp, Homo sapien
ccaacaagtagctcacttacacttc

SEQ ID NO: 1972699 - DNA, 25 bp, Homo sapien
tagtgagaggataaaagtaccgtgg

SEQ ID NO: 1972700 - DNA, 25 bp, Homo sapien
gggtgtagcaatacctgcagagagc

SEQ ID NO: 1972701 - DNA, 25 bp, Homo sapien
gagaaactgtcggtactgtcaagag

SEQ ID NO: 1972702 - DNA, 25 bp, Homo sapien
gctcttgactgacggtaaaatgtga

SEQ ID NO: 1972703 - DNA, 25 bp, Homo sapien
taaccagaccctgctagcttccgag

SEQ ID NO: 1972704 - DNA, 25 bp, Homo sapien
cagacgagatggggcgcgttcaggg

SEQ ID NO: 1972705 - DNA, 25 bp, Homo sapien
gtactaaccagaccctgctagcttc

SEQ ID NO: 1972706 - DNA, 25 bp, Homo sapien
atcagacgagatggggcgcgttcag

SEQ ID NO: 1972707 - DNA, 25 bp, Homo sapien
ctatcccagtctaacctgcttcatt

SEQ ID NO: 1972708 - DNA, 25 bp, Homo sapien
taatgtagtatgttcaatctgaggc

SEQ ID NO: 1972709 - DNA, 25 bp, Homo sapien
acctagctgatggaccttgggtaaa

SEQ ID NO: 1972710 - DNA, 25 bp, Homo sapien
ctttccattcttttggcagccttct

SEQ ID NO: 1972711 - DNA, 25 bp, Homo sapien
tttcatacagtgtagtattgttctg

SEQ ID NO: 1972712 - DNA, 25 bp, Homo sapien
tcatacagtgtagtattgttctggt

SEQ ID NO: 1972713 - DNA, 25 bp, Homo sapien
tctggtcgtataaatactcatccat

SEQ ID NO: 1972714 - DNA, 25 bp, Homo sapien
tattgttctggtcgtataaatactc

SEQ ID NO: 1972715 - DNA, 25 bp, Homo sapien
ctcacacagtaccggcgaggtgctg

SEQ ID NO: 1972716 - DNA, 25 bp, Homo sapien
cacagtaccggcgaggtgctgtagt

SEQ ID NO: 1972717 - DNA, 25 bp, Homo sapien
cagtaccggcgaggtgctgtagtct

SEQ ID NO: 1972718 - DNA, 25 bp, Homo sapien
gtaccggcgaggtgctgtagtcttc

SEQ ID NO: 1972719 - DNA, 25 bp, Homo sapien
taaaatgcctcagaatacagcttaa

SEQ ID NO: 1972720 - DNA, 25 bp, Homo sapien
tctgagaagtccattaactgctatc

SEQ ID NO: 1972721 - DNA, 25 bp, Homo sapien
ccatgtggttgtaagtcatgctaaa

SEQ ID NO: 1972722 - DNA, 25 bp, Homo sapien
cacagcagcaggaaatgtactggat

SEQ ID NO: 1972723 - DNA, 25 bp, Homo sapien
cattcggatcatagtcaaagggctg

SEQ ID NO: 1972724 - DNA, 25 bp, Homo sapien
ggatcatagtcaaagggctgtagca

SEQ ID NO: 1972725 - DNA, 25 bp, Homo sapien
tcttttcattcggatcatagtcaaa

SEQ ID NO: 1972726 - DNA, 25 bp, Homo sapien
ttcattcggatcatagtcaaagggc

SEQ ID NO: 1972727 - DNA, 25 bp, Homo sapien
gggtcttgtcatgtcgcctgagctg

SEQ ID NO: 1972728 - DNA, 25 bp, Homo sapien
gtccaacactatacccagctcattt

SEQ ID NO: 1972729 - DNA, 25 bp, Homo sapien
ttttctactgactgctaaacaacac

SEQ ID NO: 1972730 - DNA, 25 bp, Homo sapien
tgcaccaggccagtagcagcatttc

SEQ ID NO: 1972731 - DNA, 25 bp, Homo sapien
taagtaagtttcacctcacgggaca

SEQ ID NO: 1972732 - DNA, 25 bp, Homo sapien
gatcaccctgccattgttatcggct

SEQ ID NO: 1972733 - DNA, 25 bp, Homo sapien
taaaagatgagtgaagctgcctggc

SEQ ID NO: 1972734 - DNA, 25 bp, Homo sapien
tgatattactagcaaccataggact

SEQ ID NO: 1972735 - DNA, 25 bp, Homo sapien
tgggcatttcaaatacgcatctcaa

SEQ ID NO: 1972736 - DNA, 25 bp, Homo sapien
aaatacgcatctcaatttggaatcc

SEQ ID NO: 1972737 - DNA, 25 bp, Homo sapien
ggcatttcaaatacgcatctcaatt

SEQ ID NO: 1972738 - DNA, 25 bp, Homo sapien
tttcaaatacgcatctcaatttgga

SEQ ID NO: 1972739 - DNA, 25 bp, Homo sapien
tcaacttcgtctatagagaatattg

SEQ ID NO: 1972740 - DNA, 25 bp, Homo sapien
aacttcgtctatagagaatattgac

SEQ ID NO: 1972741 - DNA, 25 bp, Homo sapien
caacttcgtctatagagaatattga

SEQ ID NO: 1972742 - DNA, 25 bp, Homo sapien
cagttaaaagctgaactgattttgc

SEQ ID NO: 1972743 - DNA, 25 bp, Homo sapien
tttgttaaccttgcacatttagaaa

SEQ ID NO: 1972744 - DNA, 25 bp, Homo sapien
tcaaagaattctctatatcacaatc

SEQ ID NO: 1972745 - DNA, 25 bp, Homo sapien
taagttgttaccagcaacgcagtta

SEQ ID NO: 1972746 - DNA, 25 bp, Homo sapien
cagtcggagcattccctggtggagt

SEQ ID NO: 1972747 - DNA, 25 bp, Homo sapien
gacagtcggagcattccctggtgga

SEQ ID NO: 1972748 - DNA, 25 bp, Homo sapien
tgaagtgacagtcggagcattccct

SEQ ID NO: 1972749 - DNA, 25 bp, Homo sapien
ggagcattccctggtggagttatac

SEQ ID NO: 1972750 - DNA, 25 bp, Homo sapien
ccttcgtgtgataactggcaggtgt

SEQ ID NO: 1972751 - DNA, 25 bp, Homo sapien
gggtcatccttcgtgtgataactgg

SEQ ID NO: 1972752 - DNA, 25 bp, Homo sapien
gataactggcaggtgttgcaactgt

SEQ ID NO: 1972753 - DNA, 25 bp, Homo sapien
gcaggtgttgcaactgtgttgttga

SEQ ID NO: 1972754 - DNA, 25 bp, Homo sapien
gacttactctataaaggaggtggca

SEQ ID NO: 1972755 - DNA, 25 bp, Homo sapien
tgataatgaggttggcacactgact

SEQ ID NO: 1972756 - DNA, 25 bp, Homo sapien
tgaagcagggcaccatgtctgatgt

SEQ ID NO: 1972757 - DNA, 25 bp, Homo sapien
tatgtgacctgtcggcagactcttc

SEQ ID NO: 1972758 - DNA, 25 bp, Homo sapien
gattcaacatcacaggagcacttag

SEQ ID NO: 1972759 - DNA, 25 bp, Homo sapien
taaatcagtacatgtcagcagtcag

SEQ ID NO: 1972760 - DNA, 25 bp, Homo sapien
tagcatgctttgaagactatgagcc

SEQ ID NO: 1972761 - DNA, 25 bp, Homo sapien
tgaaccatttgaagctagtgaaggc

SEQ ID NO: 1972762 - DNA, 25 bp, Homo sapien
gaacagctttgctaggttccatatc

SEQ ID NO: 1972763 - DNA, 25 bp, Homo sapien
aacagctttgctaggttccatatca

SEQ ID NO: 1972764 - DNA, 25 bp, Homo sapien
tggaacagctttgctaggttccata

SEQ ID NO: 1972765 - DNA, 25 bp, Homo sapien
ggaacagctttgctaggttccatat

SEQ ID NO: 1972766 - DNA, 25 bp, Homo sapien
cttgcagcaatgagaaaccacggga

SEQ ID NO: 1972767 - DNA, 25 bp, Homo sapien
tttccgctacccagacaagtgcttg

SEQ ID NO: 1972768 - DNA, 25 bp, Homo sapien
taatggctatgatgtgggacaacac

SEQ ID NO: 1972769 - DNA, 25 bp, Homo sapien
tttcagtgctcaacagccctaggtg

SEQ ID NO: 1972770 - DNA, 25 bp, Homo sapien
ggcaaaaaattatggtgggcctgtg

SEQ ID NO: 1972771 - DNA, 25 bp, Homo sapien
tctgaaattctgtaagccagtgggt

SEQ ID NO: 1972772 - DNA, 25 bp, Homo sapien
tgggcctgtgtatagggtctgaaat

SEQ ID NO: 1972773 - DNA, 25 bp, Homo sapien
aattctgtaagccagtgggtcttca

SEQ ID NO: 1972774 - DNA, 25 bp, Homo sapien
tttaaaaacaagcatactaacgaga

SEQ ID NO: 1972775 - DNA, 25 bp, Homo sapien
gcatactaacgagactactggagct

SEQ ID NO: 1972776 - DNA, 25 bp, Homo sapien
tttccgggggtgatagacattctaa

SEQ ID NO: 1972777 - DNA, 25 bp, Homo sapien
ggggattaactgctaaccacataag

SEQ ID NO: 1972778 - DNA, 25 bp, Homo sapien
gcagttgaggttgatccaggtttat

SEQ ID NO: 1972779 - DNA, 25 bp, Homo sapien
tgaggttgatccaggtttatccgaa

SEQ ID NO: 1972780 - DNA, 25 bp, Homo sapien
gaggttgatccaggtttatccgaat

SEQ ID NO: 1972781 - DNA, 25 bp, Homo sapien
gttgaggttgatccaggtttatccg

SEQ ID NO: 1972782 - DNA, 25 bp, Homo sapien
ctacaagatgaatttccctagaaag

SEQ ID NO: 1972783 - DNA, 25 bp, Homo sapien
gaatttccctagaaagaatccaatg

SEQ ID NO: 1972784 - DNA, 25 bp, Homo sapien
ccctagaaagaatccaatgaaaatg

SEQ ID NO: 1972785 - DNA, 25 bp, Homo sapien
caagatgaatttccctagaaagaat

SEQ ID NO: 1972786 - DNA, 25 bp, Homo sapien
aagaaacagcactctgcatgcttca

SEQ ID NO: 1972787 - DNA, 25 bp, Homo sapien
aaaaaagaaacagcactctgcatgc

SEQ ID NO: 1972788 - DNA, 25 bp, Homo sapien
gaaacagcactctgcatgcttcact

SEQ ID NO: 1972789 - DNA, 25 bp, Homo sapien
aaagaaacagcactctgcatgcttc

SEQ ID NO: 1972790 - DNA, 25 bp, Homo sapien
tatacaacctgtccagtagccgaac

SEQ ID NO: 1972791 - DNA, 25 bp, Homo sapien
ataaaggactcaatgtgcaactgac

SEQ ID NO: 1972792 - DNA, 25 bp, Homo sapien
acctgtccagtagccgaacagtttg

SEQ ID NO: 1972793 - DNA, 25 bp, Homo sapien
cataaaggactcaatgtgcaactga

SEQ ID NO: 1972794 - DNA, 25 bp, Homo sapien
ctgaatgagtgggattagcaatcta

SEQ ID NO: 1972795 - DNA, 25 bp, Homo sapien
aactgcctcacaagggataagaaaa

SEQ ID NO: 1972796 - DNA, 25 bp, Homo sapien
tgaaaaactcagtcaacaactgcct

SEQ ID NO: 1972797 - DNA, 25 bp, Homo sapien
tatgttaaataccatgggacaggat

SEQ ID NO: 1972798 - DNA, 25 bp, Homo sapien
tattcaacagtaagccggtagtagt

SEQ ID NO: 1972799 - DNA, 25 bp, Homo sapien
gacctgggcctaaaatacttcactg

SEQ ID NO: 1972800 - DNA, 25 bp, Homo sapien
gaaagtatcaaaccctgtaacgcat

SEQ ID NO: 1972801 - DNA, 25 bp, Homo sapien
gacactgagctagagtcaacagacc

SEQ ID NO: 1972802 - DNA, 25 bp, Homo sapien
cgaagaagcgtggtggtagtctacc

SEQ ID NO: 1972803 - DNA, 25 bp, Homo sapien
cacacactgtgtcagaagggcaaga

SEQ ID NO: 1972804 - DNA, 25 bp, Homo sapien
agatgccactgcttacgcgaagaag

SEQ ID NO: 1972805 - DNA, 25 bp, Homo sapien
gaggccaggccaatcaaatgttaca

SEQ ID NO: 1972806 - DNA, 25 bp, Homo sapien
gaataggaattcttattgctcgaaa

SEQ ID NO: 1972807 - DNA, 25 bp, Homo sapien
ttggaacaatgtcagtaactcactc

SEQ ID NO: 1972808 - DNA, 25 bp, Homo sapien
tcttaagtgcctatagtacataaca

SEQ ID NO: 1972809 - DNA, 25 bp, Homo sapien
ttgctcgaaaatacaaaagattcca

SEQ ID NO: 1972810 - DNA, 25 bp, Homo sapien
tgagagaggacaggctttcttcttc

SEQ ID NO: 1972811 - DNA, 25 bp, Homo sapien
ggtgagagaggacaggctttcttct

SEQ ID NO: 1972812 - DNA, 25 bp, Homo sapien
ggggtgagagaggacaggctttctt

SEQ ID NO: 1972813 - DNA, 25 bp, Homo sapien
gctttcttcttcctctttcttgcat

SEQ ID NO: 1972814 - DNA, 25 bp, Homo sapien
aactttgtaatgcaagtccaatgca

SEQ ID NO: 1972815 - DNA, 25 bp, Homo sapien
aaagagcacactgtcaaccaactgt

SEQ ID NO: 1972816 - DNA, 25 bp, Homo sapien
aaccaactgtcttgagtctctttca

SEQ ID NO: 1972817 - DNA, 25 bp, Homo sapien
aatgcacattgaagtgctgcctcgg

SEQ ID NO: 1972818 - DNA, 25 bp, Homo sapien
tggacacttgctccccatctctgga

SEQ ID NO: 1972819 - DNA, 25 bp, Homo sapien
gctgcagtgggtctacatatggctc

SEQ ID NO: 1972820 - DNA, 25 bp, Homo sapien
tctttggatggtcccgggatggaca

SEQ ID NO: 1972821 - DNA, 25 bp, Homo sapien
catatggctctgctgtaaccaggaa

SEQ ID NO: 1972822 - DNA, 25 bp, Homo sapien
aagggctggccatctcctcgcccct

SEQ ID NO: 1972823 - DNA, 25 bp, Homo sapien
gaccatcatactgtgccccaatgct

SEQ ID NO: 1972824 - DNA, 25 bp, Homo sapien
cctggagcatcagtggaaggaggca

SEQ ID NO: 1972825 - DNA, 25 bp, Homo sapien
ttgggttgatgccagggaaagctgt

SEQ ID NO: 1972826 - DNA, 25 bp, Homo sapien
agtatgtgccaagctctccaggagg

SEQ ID NO: 1972827 - DNA, 25 bp, Homo sapien
cagaagcggcttccatcacaggtgg

SEQ ID NO: 1972828 - DNA, 25 bp, Homo sapien
taactcgctgaaaggcatcaaactg

SEQ ID NO: 1972829 - DNA, 25 bp, Homo sapien
tcttgacttaaatgctgccctgagg

SEQ ID NO: 1972830 - DNA, 25 bp, Homo sapien
caatcactgtgatgttttccactgg

SEQ ID NO: 1972831 - DNA, 25 bp, Homo sapien
tgcacactgggctgcacaaatcctt

SEQ ID NO: 1972832 - DNA, 25 bp, Homo sapien
cactgggctgcacaaatccttgatg

SEQ ID NO: 1972833 - DNA, 25 bp, Homo sapien
aatccttgatgccaggaaatttcca

SEQ ID NO: 1972834 - DNA, 25 bp, Homo sapien
ggctgcacaaatccttgatgccagg

SEQ ID NO: 1972835 - DNA, 25 bp, Homo sapien
aaagcctgccgaagataccagtccg

SEQ ID NO: 1972836 - DNA, 25 bp, Homo sapien
cataaaaccaaagcctgccgaagat

SEQ ID NO: 1972837 - DNA, 25 bp, Homo sapien
gaatgcggatgagtgggcagggcac

SEQ ID NO: 1972838 - DNA, 25 bp, Homo sapien
gataccagtccgaggagaatgcgga

SEQ ID NO: 1972839 - DNA, 25 bp, Homo sapien
ggcaccaatgttggctgtgcactca

SEQ ID NO: 1972840 - DNA, 25 bp, Homo sapien
tgtgcactcatcttgaaaacagcaa

SEQ ID NO: 1972841 - DNA, 25 bp, Homo sapien
aggagataggcccatcgaggcacca

SEQ ID NO: 1972842 - DNA, 25 bp, Homo sapien
ccatcgaggcaccaatgttggctgt

SEQ ID NO: 1972843 - DNA, 25 bp, Homo sapien
taggatgcaaccaaaggccctttga

SEQ ID NO: 1972844 - DNA, 25 bp, Homo sapien
tgactgtggctgctccccgatgtac

SEQ ID NO: 1972845 - DNA, 25 bp, Homo sapien
ccatgtgactgtggctgctccccga

SEQ ID NO: 1972846 - DNA, 25 bp, Homo sapien
cccgatgtactgtaggatgcaacca

SEQ ID NO: 1972847 - DNA, 25 bp, Homo sapien
aacagggcttagcttggccataggc

SEQ ID NO: 1972848 - DNA, 25 bp, Homo sapien
gatccaacagggcttagcttggcca

SEQ ID NO: 1972849 - DNA, 25 bp, Homo sapien
ccaacagggcttagcttggccatag

SEQ ID NO: 1972850 - DNA, 25 bp, Homo sapien
cagatccaacagggcttagcttggc

SEQ ID NO: 1972851 - DNA, 25 bp, Homo sapien
ccactgcctgctatcacagcggttt

SEQ ID NO: 1972852 - DNA, 25 bp, Homo sapien
cccagcactaagatcgggctgtaac

SEQ ID NO: 1972853 - DNA, 25 bp, Homo sapien
cagcactaagatcgggctgtaactt

SEQ ID NO: 1972854 - DNA, 25 bp, Homo sapien
actgcctgctatcacagcggtttcc

SEQ ID NO: 1972855 - DNA, 25 bp, Homo sapien
cagagcccgtgggtccaggctgctg

SEQ ID NO: 1972856 - DNA, 25 bp, Homo sapien
ctgcagagcccgtgggtccaggctg

SEQ ID NO: 1972857 - DNA, 25 bp, Homo sapien
gcagagcccgtgggtccaggctgct

SEQ ID NO: 1972858 - DNA, 25 bp, Homo sapien
tgcagagcccgtgggtccaggctgc

SEQ ID NO: 1972859 - DNA, 25 bp, Homo sapien
aaagggctctgggacgcccatagaa

SEQ ID NO: 1972860 - DNA, 25 bp, Homo sapien
aaaagggctctgggacgcccataga

SEQ ID NO: 1972861 - DNA, 25 bp, Homo sapien
gggctctgggacgcccatagaagat

SEQ ID NO: 1972862 - DNA, 25 bp, Homo sapien
aagggctctgggacgcccatagaag

SEQ ID NO: 1972863 - DNA, 25 bp, Homo sapien
aatgcccagataacgacagtccagc

SEQ ID NO: 1972864 - DNA, 25 bp, Homo sapien
cacacttacatgcagggaaccccat

SEQ ID NO: 1972865 - DNA, 25 bp, Homo sapien
caagtcatagggtagtctagtggcc

SEQ ID NO: 1972866 - DNA, 25 bp, Homo sapien
cattgtagagtaacacggacgaggt

SEQ ID NO: 1972867 - DNA, 25 bp, Homo sapien
cggtctgcgactgaacacaaagtgc

SEQ ID NO: 1972868 - DNA, 25 bp, Homo sapien
gtctgcgactgaacacaaagtgctc

SEQ ID NO: 1972869 - DNA, 25 bp, Homo sapien
ggtctgcgactgaacacaaagtgct

SEQ ID NO: 1972870 - DNA, 25 bp, Homo sapien
gctctgagttcagcacggacagcag

SEQ ID NO: 1972871 - DNA, 25 bp, Homo sapien
tgtgaaagatgctggcgcttagcca

SEQ ID NO: 1972872 - DNA, 25 bp, Homo sapien
agcaggtctcactgtgcccacaggg

SEQ ID NO: 1972873 - DNA, 25 bp, Homo sapien
aaggcctcctatcgtgggaactgac

SEQ ID NO: 1972874 - DNA, 25 bp, Homo sapien
ccatccgcgggcaccgtggtaagtg

SEQ ID NO: 1972875 - DNA, 25 bp, Homo sapien
agctaattctgagtctttgcgggcc

SEQ ID NO: 1972876 - DNA, 25 bp, Homo sapien
tggtaagtggagctaattctgagtc

SEQ ID NO: 1972877 - DNA, 25 bp, Homo sapien
ccttccgctggggtgttgatccgca

SEQ ID NO: 1972878 - DNA, 25 bp, Homo sapien
caaaacgctagaggctcgtctgggc

SEQ ID NO: 1972879 - DNA, 25 bp, Homo sapien
gtatcagcaggtccataaacaggca

SEQ ID NO: 1972880 - DNA, 25 bp, Homo sapien
gggtctgattttcccacatcgggca

SEQ ID NO: 1972881 - DNA, 25 bp, Homo sapien
ccgggcttcccgacattaaatgtat

SEQ ID NO: 1972882 - DNA, 25 bp, Homo sapien
tctaatcgcggaaggatgcaggcag

SEQ ID NO: 1972883 - DNA, 25 bp, Homo sapien
catggtctctctgacgactgctggg

SEQ ID NO: 1972884 - DNA, 25 bp, Homo sapien
gagtgaaggctaagatgccctcccg

SEQ ID NO: 1972885 - DNA, 25 bp, Homo sapien
caaagatcgttcatgaaaaggctca

SEQ ID NO: 1972886 - DNA, 25 bp, Homo sapien
ttatctgtgtgatatcctggtttac

SEQ ID NO: 1972887 - DNA, 25 bp, Homo sapien
ggaacctgagcttctcagtgtgagg

SEQ ID NO: 1972888 - DNA, 25 bp, Homo sapien
gaggaggtgccagtccagccgggaa

SEQ ID NO: 1972889 - DNA, 25 bp, Homo sapien
gaggtgccagtccagccgggaagcc

SEQ ID NO: 1972890 - DNA, 25 bp, Homo sapien
cagtgaggaacctgagcttctcagt

SEQ ID NO: 1972891 - DNA, 25 bp, Homo sapien
catggaccccacagacagtcactgc

SEQ ID NO: 1972892 - DNA, 25 bp, Homo sapien
aggcccccatggaccccacagacag

SEQ ID NO: 1972893 - DNA, 25 bp, Homo sapien
tggaccccacagacagtcactgctg

SEQ ID NO: 1972894 - DNA, 25 bp, Homo sapien
cccatggaccccacagacagtcact

SEQ ID NO: 1972895 - DNA, 25 bp, Homo sapien
cccacagagccagcgccggatgaat

SEQ ID NO: 1972896 - DNA, 25 bp, Homo sapien
ccagcgccggatgaatggaaggcag

SEQ ID NO: 1972897 - DNA, 25 bp, Homo sapien
gagccagcgccggatgaatggaagg

SEQ ID NO: 1972898 - DNA, 25 bp, Homo sapien
ccacagttcccacagagccagcgcc

SEQ ID NO: 1972899 - DNA, 25 bp, Homo sapien
acaagcatggccacggtgcgtccat

SEQ ID NO: 1972900 - DNA, 25 bp, Homo sapien
aagatgcccttaggccacaagcatg

SEQ ID NO: 1972901 - DNA, 25 bp, Homo sapien
atgctgacggttccctgatggccac

SEQ ID NO: 1972902 - DNA, 25 bp, Homo sapien
tgtggagccgctctcccaagatgcc

SEQ ID NO: 1972903 - DNA, 25 bp, Homo sapien
cacacttcaaagccgacttcccaat

SEQ ID NO: 1972904 - DNA, 25 bp, Homo sapien
acacttcaaagccgacttcccaatt

SEQ ID NO: 1972905 - DNA, 25 bp, Homo sapien
gacaatgtggcttcgtccttgcaag

SEQ ID NO: 1972906 - DNA, 25 bp, Homo sapien
tggctttaacagagacagcgaggct

SEQ ID NO: 1972907 - DNA, 25 bp, Homo sapien
ttagtatctcgagggaaacatctgg

SEQ ID NO: 1972908 - DNA, 25 bp, Homo sapien
ctacgtgcaagcctcagaagctcgc

SEQ ID NO: 1972909 - DNA, 25 bp, Homo sapien
gtctctgttgcctgaactctgctcc

SEQ ID NO: 1972910 - DNA, 25 bp, Homo sapien
cccttgatgagggtctttggataca

SEQ ID NO: 1972911 - DNA, 25 bp, Homo sapien
cctggagtgcccctcactgtgggaa

SEQ ID NO: 1972912 - DNA, 25 bp, Homo sapien
tacaaatctgtttgccccttcggga

SEQ ID NO: 1972913 - DNA, 25 bp, Homo sapien
ttccactaggacatctttcattaga

SEQ ID NO: 1972914 - DNA, 25 bp, Homo sapien
tttcattagacatccatgcagcctt

SEQ ID NO: 1972915 - DNA, 25 bp, Homo sapien
cactagaccctaagtctccgctttc

SEQ ID NO: 1972916 - DNA, 25 bp, Homo sapien
gtctccgctttccactaggacatct

SEQ ID NO: 1972917 - DNA, 25 bp, Homo sapien
tgagaggccaacggtagtcacactc

SEQ ID NO: 1972918 - DNA, 25 bp, Homo sapien
ctgagaggccaacggtagtcacact

SEQ ID NO: 1972919 - DNA, 25 bp, Homo sapien
tctgagaggccaacggtagtcacac

SEQ ID NO: 1972920 - DNA, 25 bp, Homo sapien
caaagagtctcttggcaaagctgag

SEQ ID NO: 1972921 - DNA, 25 bp, Homo sapien
gaggcttgtatgctctctgtgacca

SEQ ID NO: 1972922 - DNA, 25 bp, Homo sapien
taacccatgcggctaagactagtcc

SEQ ID NO: 1972923 - DNA, 25 bp, Homo sapien
tcataaatcgcactcaaggctgcaa

SEQ ID NO: 1972924 - DNA, 25 bp, Homo sapien
tttcttatgagacttctccaaccaa

SEQ ID NO: 1972925 - DNA, 25 bp, Homo sapien
ttgccacatggtcatgccccaggga

SEQ ID NO: 1972926 - DNA, 25 bp, Homo sapien
tcatggtccgtggtctcatccgtga

SEQ ID NO: 1972927 - DNA, 25 bp, Homo sapien
agggacgtgtcccacatgggccctg

SEQ ID NO: 1972928 - DNA, 25 bp, Homo sapien
ctgcctcctcgtaacctgggtctga

SEQ ID NO: 1972929 - DNA, 25 bp, Homo sapien
ttctgctgcctcctcgtaacctggg

SEQ ID NO: 1972930 - DNA, 25 bp, Homo sapien
tgctgcctcctcgtaacctgggtct

SEQ ID NO: 1972931 - DNA, 25 bp, Homo sapien
gcctcctcgtaacctgggtctgagt

SEQ ID NO: 1972932 - DNA, 25 bp, Homo sapien
ggcctcccagcgaagggtagagaaa

SEQ ID NO: 1972933 - DNA, 25 bp, Homo sapien
cagatttggattgagcagccagaga

SEQ ID NO: 1972934 - DNA, 25 bp, Homo sapien
gccctgcgtcagtgatgtctggaaa

SEQ ID NO: 1972935 - DNA, 25 bp, Homo sapien
tagagaaagagaatcctgtccgtgc

SEQ ID NO: 1972936 - DNA, 25 bp, Homo sapien
cagtggcttgctgggcgacctggcc

SEQ ID NO: 1972937 - DNA, 25 bp, Homo sapien
gttttggatctctggctggccaggc

SEQ ID NO: 1972938 - DNA, 25 bp, Homo sapien
gctgggcgacctggcctttgccact

SEQ ID NO: 1972939 - DNA, 25 bp, Homo sapien
gcttgctgggcgacctggcctttgc

SEQ ID NO: 1972940 - DNA, 25 bp, Homo sapien
gaagtgttgagtctgtaagaaatca

SEQ ID NO: 1972941 - DNA, 25 bp, Homo sapien
aaatcatcaggcagtacacatatta

SEQ ID NO: 1972942 - DNA, 25 bp, Homo sapien
ctgggagctggttacatggaagtgt

SEQ ID NO: 1972943 - DNA, 25 bp, Homo sapien
tcaggcagtacacatattatctgtg

SEQ ID NO: 1972944 - DNA, 25 bp, Homo sapien
ccttcctgggttaagagcttggtga

SEQ ID NO: 1972945 - DNA, 25 bp, Homo sapien
gacataatgacccatctgaggaagg

SEQ ID NO: 1972946 - DNA, 25 bp, Homo sapien
tggtgatcttcccacgaacaggcag

SEQ ID NO: 1972947 - DNA, 25 bp, Homo sapien
gcaggatgagtttgttaagaggcac

SEQ ID NO: 1972948 - DNA, 25 bp, Homo sapien
cctcagtgactttacagggaagtac

SEQ ID NO: 1972949 - DNA, 25 bp, Homo sapien
tgagttcagcagtaggagaaacctg

SEQ ID NO: 1972950 - DNA, 25 bp, Homo sapien
tcagacccactgagacaaagagaaa

SEQ ID NO: 1972951 - DNA, 25 bp, Homo sapien
tcacaagaagacaccataaatcact

SEQ ID NO: 1972952 - DNA, 25 bp, Homo sapien
acacaggcgggacagccctggttga

SEQ ID NO: 1972953 - DNA, 25 bp, Homo sapien
tctcagggcaatgagcacgggcctg

SEQ ID NO: 1972954 - DNA, 25 bp, Homo sapien
ggactccatgcttgcacgccaaact

SEQ ID NO: 1972955 - DNA, 25 bp, Homo sapien
gcacgcctgtggtggctcggtggaa

SEQ ID NO: 1972956 - DNA, 25 bp, Homo sapien
gaagcagtgcacacttccctgtgag

SEQ ID NO: 1972957 - DNA, 25 bp, Homo sapien
gctggtcaccatgtgcaaaggcaga

SEQ ID NO: 1972958 - DNA, 25 bp, Homo sapien
tccacggctgaagtggaaaatccac

SEQ ID NO: 1972959 - DNA, 25 bp, Homo sapien
ctccaaaagcatgccattgaggcca

SEQ ID NO: 1972960 - DNA, 25 bp, Homo sapien
ctgtcaccatttgtaattggattgg

SEQ ID NO: 1972961 - DNA, 25 bp, Homo sapien
taattggattggacaaagctgggaa

SEQ ID NO: 1972962 - DNA, 25 bp, Homo sapien
aattggattggacaaagctgggaaa

SEQ ID NO: 1972963 - DNA, 25 bp, Homo sapien
gtcaccatttgtaattggattggac

SEQ ID NO: 1972964 - DNA, 25 bp, Homo sapien
tgaaaagccctggtggtcccacttc

SEQ ID NO: 1972965 - DNA, 25 bp, Homo sapien
cacaagattgaaaagccctggtggt

SEQ ID NO: 1972966 - DNA, 25 bp, Homo sapien
tgtgtggtcaacatgtccggacaag

SEQ ID NO: 1972967 - DNA, 25 bp, Homo sapien
ctgtatgtacagaacagtgagttac

SEQ ID NO: 1972968 - DNA, 25 bp, Homo sapien
ggaaatgggacacccatcgtccacc

SEQ ID NO: 1972969 - DNA, 25 bp, Homo sapien
tctactaactcctcaagctctggct

SEQ ID NO: 1972970 - DNA, 25 bp, Homo sapien
acccttcttacatgaggcctgtcct

SEQ ID NO: 1972971 - DNA, 25 bp, Homo sapien
ccactgcccagtccattaaggaaat

SEQ ID NO: 1972972 - DNA, 25 bp, Homo sapien
gacatattccccagtaacagccttt

SEQ ID NO: 1972973 - DNA, 25 bp, Homo sapien
tccaagagcccaagacatattcccc

SEQ ID NO: 1972974 - DNA, 25 bp, Homo sapien
ccagtaacagcctttgcaagttctt

SEQ ID NO: 1972975 - DNA, 25 bp, Homo sapien
gagcccaagacatattccccagtaa

SEQ ID NO: 1972976 - DNA, 25 bp, Homo sapien
catggccagctacagggagtttccg

SEQ ID NO: 1972977 - DNA, 25 bp, Homo sapien
ccatccgtcccggactcctccaggg

SEQ ID NO: 1972978 - DNA, 25 bp, Homo sapien
actgaatgccatggccagctacagg

SEQ ID NO: 1972979 - DNA, 25 bp, Homo sapien
aatgccatggccagctacagggagt

SEQ ID NO: 1972980 - DNA, 25 bp, Homo sapien
gctccagcaacatgccaccatgagt

SEQ ID NO: 1972981 - DNA, 25 bp, Homo sapien
taatgtgagcttacagctccagcaa

SEQ ID NO: 1972982 - DNA, 25 bp, Homo sapien
cagagtttgggctgatacaccacac

SEQ ID NO: 1972983 - DNA, 25 bp, Homo sapien
ggtaactgcccagctgtgatttgct

SEQ ID NO: 1972984 - DNA, 25 bp, Homo sapien
tgtgatgctccccagatgttctgca

SEQ ID NO: 1972985 - DNA, 25 bp, Homo sapien
gcagaagcatccaggagaaccgagc

SEQ ID NO: 1972986 - DNA, 25 bp, Homo sapien
taaaagtgtcctgtgatgctcccca

SEQ ID NO: 1972987 - DNA, 25 bp, Homo sapien
cccatcccttaaaagtgtcctgtga

SEQ ID NO: 1972988 - DNA, 25 bp, Homo sapien
aggtgagcaggagcgcaagcggcca

SEQ ID NO: 1972989 - DNA, 25 bp, Homo sapien
ctgctggcggctgtgttcgcattct

SEQ ID NO: 1972990 - DNA, 25 bp, Homo sapien
gagtaaccacacaacagtcctcagc

SEQ ID NO: 1972991 - DNA, 25 bp, Homo sapien
ggctgtgttcgcattcttgctgtct

SEQ ID NO: 1972992 - DNA, 25 bp, Homo sapien
cagggcactgagcaccgcttccctg

SEQ ID NO: 1972993 - DNA, 25 bp, Homo sapien
agggcactgagcaccgcttccctgg

SEQ ID NO: 1972994 - DNA, 25 bp, Homo sapien
gacttgatttttagagtcacattgg

SEQ ID NO: 1972995 - DNA, 25 bp, Homo sapien
tgacttgatttttagagtcacattg

SEQ ID NO: 1972996 - DNA, 25 bp, Homo sapien
tgatttttagagtcacattggaagt

SEQ ID NO: 1972997 - DNA, 25 bp, Homo sapien
cttgatttttagagtcacattggaa

SEQ ID NO: 1972998 - DNA, 25 bp, Homo sapien
aggtcagcaatacccttatctgcca

SEQ ID NO: 1972999 - DNA, 25 bp, Homo sapien
acacaccccagaatacaagaacttt

SEQ ID NO: 1973000 - DNA, 25 bp, Homo sapien
tccagcccctgagtaagcaaggtca

SEQ ID NO: 1973001 - DNA, 25 bp, Homo sapien
gggcagaattttgcaaagtctcata

SEQ ID NO: 1973002 - DNA, 25 bp, Homo sapien
ggatttggcatatgagctaaggtaa

SEQ ID NO: 1973003 - DNA, 25 bp, Homo sapien
tttttatggcattatccagaatcgg

SEQ ID NO: 1973004 - DNA, 25 bp, Homo sapien
cagaatcggcttcctagtaaatgac

SEQ ID NO: 1973005 - DNA, 25 bp, Homo sapien
gcatatgagctaaggtaagcctttt

SEQ ID NO: 1973006 - DNA, 25 bp, Homo sapien
gaatcagctagtatttctttctctg

SEQ ID NO: 1973007 - DNA, 25 bp, Homo sapien
tatcaaatattttggcatagagttt

SEQ ID NO: 1973008 - DNA, 25 bp, Homo sapien
tctcaattgaatcagctagtatttc

SEQ ID NO: 1973009 - DNA, 25 bp, Homo sapien
ttaaattctcaattgaatcagctag

SEQ ID NO: 1973010 - DNA, 25 bp, Homo sapien
ttcctctcatcactgcagttgattc

SEQ ID NO: 1973011 - DNA, 25 bp, Homo sapien
tcatcactgcagttgattctaaaat

SEQ ID NO: 1973012 - DNA, 25 bp, Homo sapien
tctcatcactgcagttgattctaaa

SEQ ID NO: 1973013 - DNA, 25 bp, Homo sapien
cctctcatcactgcagttgattcta

SEQ ID NO: 1973014 - DNA, 25 bp, Homo sapien
gagcacaattcctcttgggtgagaa

SEQ ID NO: 1973015 - DNA, 25 bp, Homo sapien
agagagcacaattcctcttgggtga

SEQ ID NO: 1973016 - DNA, 25 bp, Homo sapien
gcacaattcctcttgggtgagaata

SEQ ID NO: 1973017 - DNA, 25 bp, Homo sapien
gaaagagagcacaattcctcttggg

SEQ ID NO: 1973018 - DNA, 25 bp, Homo sapien
tgttgagagtgaattgttcctcccc

SEQ ID NO: 1973019 - DNA, 25 bp, Homo sapien
cctccagtgcctttgcaaggttacc

SEQ ID NO: 1973020 - DNA, 25 bp, Homo sapien
cctctgttgagagtgaattgttcct

SEQ ID NO: 1973021 - DNA, 25 bp, Homo sapien
gaggttggggtgcactcccacttcc

SEQ ID NO: 1973022 - DNA, 25 bp, Homo sapien
agaaggccctttcacagcccgcagg

SEQ ID NO: 1973023 - DNA, 25 bp, Homo sapien
ttctgggctcgctctccttggagga

SEQ ID NO: 1973024 - DNA, 25 bp, Homo sapien
aatggtgctcctgcttatccccacg

SEQ ID NO: 1973025 - DNA, 25 bp, Homo sapien
gggatctgatagataaatggtgctc

SEQ ID NO: 1973026 - DNA, 25 bp, Homo sapien
atgccaaccacaacgactgattcac

SEQ ID NO: 1973027 - DNA, 25 bp, Homo sapien
gatgccaaccacaacgactgattca

SEQ ID NO: 1973028 - DNA, 25 bp, Homo sapien
cctgcatggtagatgtaatcttcct

SEQ ID NO: 1973029 - DNA, 25 bp, Homo sapien
tagatgtaatcttccttaaagacct

SEQ ID NO: 1973030 - DNA, 25 bp, Homo sapien
aagaccttcttttccgctgtagcat

SEQ ID NO: 1973031 - DNA, 25 bp, Homo sapien
tcttttccgctgtagcatgctccat

SEQ ID NO: 1973032 - DNA, 25 bp, Homo sapien
gctcgctggagtagcggtgactgca

SEQ ID NO: 1973033 - DNA, 25 bp, Homo sapien
tgttcagggaaagccatcagcgtgc

SEQ ID NO: 1973034 - DNA, 25 bp, Homo sapien
catcagcgtgctcgctggagtagcg

SEQ ID NO: 1973035 - DNA, 25 bp, Homo sapien
aaagccatcagcgtgctcgctggag

SEQ ID NO: 1973036 - DNA, 25 bp, Homo sapien
cagcgtctgcagacaaacgcctgct

SEQ ID NO: 1973037 - DNA, 25 bp, Homo sapien
gacaaacgcctgctgggcagtcaga

SEQ ID NO: 1973038 - DNA, 25 bp, Homo sapien
tctgtagcttctccctgctgaagca

SEQ ID NO: 1973039 - DNA, 25 bp, Homo sapien
tcacaccaggatcagtgtctcctgt

SEQ ID NO: 1973040 - DNA, 25 bp, Homo sapien
ctgggtgtcccatgctcgcaatctg

SEQ ID NO: 1973041 - DNA, 25 bp, Homo sapien
actgaagcacttggccactggacat

SEQ ID NO: 1973042 - DNA, 25 bp, Homo sapien
ccctgatatccaaggagggctgggt

SEQ ID NO: 1973043 - DNA, 25 bp, Homo sapien
ccagcactgaagcacttggccactg

SEQ ID NO: 1973044 - DNA, 25 bp, Homo sapien
cacgagggtctgctctcgagccttt

SEQ ID NO: 1973045 - DNA, 25 bp, Homo sapien
tcgagcctttctgcgagaacctggg

SEQ ID NO: 1973046 - DNA, 25 bp, Homo sapien
cagcagccccttgatggaaggtcca

SEQ ID NO: 1973047 - DNA, 25 bp, Homo sapien
catattaatggcatcatccccagct

SEQ ID NO: 1973048 - DNA, 25 bp, Homo sapien
tcctgacaaaaagtgctgagccctg

SEQ ID NO: 1973049 - DNA, 25 bp, Homo sapien
cgtctgcaggaacgccggctccagg

SEQ ID NO: 1973050 - DNA, 25 bp, Homo sapien
tctgtagcctctatagatcccggga

SEQ ID NO: 1973051 - DNA, 25 bp, Homo sapien
gatcccgggatctctctaaagtctc

SEQ ID NO: 1973052 - DNA, 25 bp, Homo sapien
ggctccggcattttgcacctactac

SEQ ID NO: 1973053 - DNA, 25 bp, Homo sapien
tctcagtgaggctccggcattttgc

SEQ ID NO: 1973054 - DNA, 25 bp, Homo sapien
ggcattttgcacctactaccaccat

SEQ ID NO: 1973055 - DNA, 25 bp, Homo sapien
gtgaggctccggcattttgcaccta

SEQ ID NO: 1973056 - DNA, 25 bp, Homo sapien
gattcagattgtgtgttgaagctgc

SEQ ID NO: 1973057 - DNA, 25 bp, Homo sapien
gaagattcagattgtgtgttgaagc

SEQ ID NO: 1973058 - DNA, 25 bp, Homo sapien
agattgtgtgttgaagctgccccac

SEQ ID NO: 1973059 - DNA, 25 bp, Homo sapien
ttcagattgtgtgttgaagctgccc

SEQ ID NO: 1973060 - DNA, 25 bp, Homo sapien
aggtgatcaagtgggaccaggtgtc

SEQ ID NO: 1973061 - DNA, 25 bp, Homo sapien
gccaaaggtgatcaagtgggaccag

SEQ ID NO: 1973062 - DNA, 25 bp, Homo sapien
gtccagaggcctcctagaacagctt

SEQ ID NO: 1973063 - DNA, 25 bp, Homo sapien
caaaggtgatcaagtgggaccaggt

SEQ ID NO: 1973064 - DNA, 25 bp, Homo sapien
gccgtcactggctagaacagaagga

SEQ ID NO: 1973065 - DNA, 25 bp, Homo sapien
gtgtggccctgagaggcaatggcac

SEQ ID NO: 1973066 - DNA, 25 bp, Homo sapien
cataagttctgattgctgctaagga

SEQ ID NO: 1973067 - DNA, 25 bp, Homo sapien
ctgctaaggaccagaggccgtcact

SEQ ID NO: 1973068 - DNA, 25 bp, Homo sapien
agtcctctttccttgggtatctgtg

SEQ ID NO: 1973069 - DNA, 25 bp, Homo sapien
gaacttgccactgggtggagagctc

SEQ ID NO: 1973070 - DNA, 25 bp, Homo sapien
ctgtggttctgcatgaatttcaaag

SEQ ID NO: 1973071 - DNA, 25 bp, Homo sapien
tgctggttttccctggaacttgcca

SEQ ID NO: 1973072 - DNA, 25 bp, Homo sapien
tcctggcgacagctgttgccaacag

SEQ ID NO: 1973073 - DNA, 25 bp, Homo sapien
gaaagccttcctccagtcctggcga

SEQ ID NO: 1973074 - DNA, 25 bp, Homo sapien
ctggcgacagctgttgccaacagca

SEQ ID NO: 1973075 - DNA, 25 bp, Homo sapien
cagtcctggcgacagctgttgccaa

SEQ ID NO: 1973076 - DNA, 25 bp, Homo sapien
cacggaggatgtctgaccctcacag

SEQ ID NO: 1973077 - DNA, 25 bp, Homo sapien
ccctcagtgcacacggaggatgtct

SEQ ID NO: 1973078 - DNA, 25 bp, Homo sapien
agaggccacctgcactggagcttgg

SEQ ID NO: 1973079 - DNA, 25 bp, Homo sapien
aacagtcagggagggccacctttag

SEQ ID NO: 1973080 - DNA, 25 bp, Homo sapien
gtgtgtagggagcagactgcacaca

SEQ ID NO: 1973081 - DNA, 25 bp, Homo sapien
ggtgtgtagggagcagactgcacac

SEQ ID NO: 1973082 - DNA, 25 bp, Homo sapien
tgtgtagggagcagactgcacacag

SEQ ID NO: 1973083 - DNA, 25 bp, Homo sapien
tagcgtgtactgaggttccaggctc

SEQ ID NO: 1973084 - DNA, 25 bp, Homo sapien
ttagcgtgtactgaggttccaggct

SEQ ID NO: 1973085 - DNA, 25 bp, Homo sapien
cttagcgtgtactgaggttccaggc

SEQ ID NO: 1973086 - DNA, 25 bp, Homo sapien
cagcaggtttcctgttatggttccg

SEQ ID NO: 1973087 - DNA, 25 bp, Homo sapien
tatggaggtcccagtgatactgttg

SEQ ID NO: 1973088 - DNA, 25 bp, Homo sapien
tatttttttgtgaagcccacaggaa

SEQ ID NO: 1973089 - DNA, 25 bp, Homo sapien
gattttgtctttggccaccagcagg

SEQ ID NO: 1973090 - DNA, 25 bp, Homo sapien
accccgacagcaggactgcgtttgt

SEQ ID NO: 1973091 - DNA, 25 bp, Homo sapien
tcatggagtaagcactgggaccccg

SEQ ID NO: 1973092 - DNA, 25 bp, Homo sapien
cgacagcaggactgcgtttgtggtt

SEQ ID NO: 1973093 - DNA, 25 bp, Homo sapien
taagcactgggaccccgacagcagg

SEQ ID NO: 1973094 - DNA, 25 bp, Homo sapien
attgctcagtcgctgccgtcacctc

SEQ ID NO: 1973095 - DNA, 25 bp, Homo sapien
ttgctcagtcgctgccgtcacctct

SEQ ID NO: 1973096 - DNA, 25 bp, Homo sapien
ctcagttcttgtgattggagttgtg

SEQ ID NO: 1973097 - DNA, 25 bp, Homo sapien
tgtgattggagttgtgtttcctcca

SEQ ID NO: 1973098 - DNA, 25 bp, Homo sapien
tttcctccagagtgacgagcatggt

SEQ ID NO: 1973099 - DNA, 25 bp, Homo sapien
agcatggtataagacgcctcgccct

SEQ ID NO: 1973100 - DNA, 25 bp, Homo sapien
gggtgttggcagctcccagagtgta

SEQ ID NO: 1973101 - DNA, 25 bp, Homo sapien
cctgggggtgttggcagctcccaga

SEQ ID NO: 1973102 - DNA, 25 bp, Homo sapien
ttggcagctcccagagtgtacagca

SEQ ID NO: 1973103 - DNA, 25 bp, Homo sapien
gtgttggcagctcccagagtgtaca

SEQ ID NO: 1973104 - DNA, 25 bp, Homo sapien
ttgagagaaacgtttcattctcagg

SEQ ID NO: 1973105 - DNA, 25 bp, Homo sapien
ctttgagagaaacgtttcattctca

SEQ ID NO: 1973106 - DNA, 25 bp, Homo sapien
tttgagagaaacgtttcattctcag

SEQ ID NO: 1973107 - DNA, 25 bp, Homo sapien
tctgcacatggccgaggtctcacca

SEQ ID NO: 1973108 - DNA, 25 bp, Homo sapien
cctttctgcacatggccgaggtctc

SEQ ID NO: 1973109 - DNA, 25 bp, Homo sapien
ctttctgcacatggccgaggtctca

SEQ ID NO: 1973110 - DNA, 25 bp, Homo sapien
tttctgcacatggccgaggtctcac

SEQ ID NO: 1973111 - DNA, 25 bp, Homo sapien
cctaggcacggccacgtggaggctt

SEQ ID NO: 1973112 - DNA, 25 bp, Homo sapien
gtgggtgaaaaactagtggctccgc

SEQ ID NO: 1973113 - DNA, 25 bp, Homo sapien
tagtggctccgccacagggctgcat

SEQ ID NO: 1973114 - DNA, 25 bp, Homo sapien
atggcattattcctaggcacggcca

SEQ ID NO: 1973115 - DNA, 25 bp, Homo sapien
caaaaactggttggttgctgttctg

SEQ ID NO: 1973116 - DNA, 25 bp, Homo sapien
acagtagccagcttcaaaaactggt

SEQ ID NO: 1973117 - DNA, 25 bp, Homo sapien
ggttgctgttctggcagtatttgct

SEQ ID NO: 1973118 - DNA, 25 bp, Homo sapien
cagtatttgctcccctttccgataa

SEQ ID NO: 1973119 - DNA, 25 bp, Homo sapien
ccttcatttcctactgtgggatcct

SEQ ID NO: 1973120 - DNA, 25 bp, Homo sapien
aggactgggcctgctagcctcacct

SEQ ID NO: 1973121 - DNA, 25 bp, Homo sapien
gagctcgtcctgagttcggaggact

SEQ ID NO: 1973122 - DNA, 25 bp, Homo sapien
tcccaggagagctcgtcctgagttc

SEQ ID NO: 1973123 - DNA, 25 bp, Homo sapien
cctcctctccgaggactgcccggtg

SEQ ID NO: 1973124 - DNA, 25 bp, Homo sapien
tttccagtacttgtagcagcaggta

SEQ ID NO: 1973125 - DNA, 25 bp, Homo sapien
gacccctcctctccgaggactgccc

SEQ ID NO: 1973126 - DNA, 25 bp, Homo sapien
cctctccgaggactgcccggtgtgg

SEQ ID NO: 1973127 - DNA, 25 bp, Homo sapien
gaagttggaaaaatccattatggtc

SEQ ID NO: 1973128 - DNA, 25 bp, Homo sapien
tctattgtacctatgaagaaaacag

SEQ ID NO: 1973129 - DNA, 25 bp, Homo sapien
gacaaatgttggcaattgaaactgc

SEQ ID NO: 1973130 - DNA, 25 bp, Homo sapien
tatggtctggcaatccgagtgacaa

SEQ ID NO: 1973131 - DNA, 25 bp, Homo sapien
cactcagcacgggtatgagcgtgca

SEQ ID NO: 1973132 - DNA, 25 bp, Homo sapien
aaagtgctgacactttatttgcagt

SEQ ID NO: 1973133 - DNA, 25 bp, Homo sapien
tagaatggtatttgatgcagcatcc

SEQ ID NO: 1973134 - DNA, 25 bp, Homo sapien
gggaattaactggattcactcagca

SEQ ID NO: 1973135 - DNA, 25 bp, Homo sapien
gacttcacaggactttacgtggatg

SEQ ID NO: 1973136 - DNA, 25 bp, Homo sapien
gggtctcctccgttgacactggtct

SEQ ID NO: 1973137 - DNA, 25 bp, Homo sapien
gagatgcacattttaggaatcccac

SEQ ID NO: 1973138 - DNA, 25 bp, Homo sapien
catcctcgctttggaagtggtgaag

SEQ ID NO: 1973139 - DNA, 25 bp, Homo sapien
tggcaccagataagaatagacaaac

SEQ ID NO: 1973140 - DNA, 25 bp, Homo sapien
tatctgtaaagcatcaggaattagc

SEQ ID NO: 1973141 - DNA, 25 bp, Homo sapien
cataaaaagtcgcagacaagatccc

SEQ ID NO: 1973142 - DNA, 25 bp, Homo sapien
tcaatggcgtagtggtaaaccagtc

SEQ ID NO: 1973143 - DNA, 25 bp, Homo sapien
ccacatggctctgactgccacattt

SEQ ID NO: 1973144 - DNA, 25 bp, Homo sapien
acattttgcgggaccgcagagagca

SEQ ID NO: 1973145 - DNA, 25 bp, Homo sapien
caaagataggactaccaccctccat

SEQ ID NO: 1973146 - DNA, 25 bp, Homo sapien
gctgctgcctggtagggaacagcag

SEQ ID NO: 1973147 - DNA, 25 bp, Homo sapien
tctggaggacccactgaaagctgac

SEQ ID NO: 1973148 - DNA, 25 bp, Homo sapien
gtcatctggaggacccactgaaagc

SEQ ID NO: 1973149 - DNA, 25 bp, Homo sapien
gctgtcatctggaggacccactgaa

SEQ ID NO: 1973150 - DNA, 25 bp, Homo sapien
tcatctggaggacccactgaaagct

SEQ ID NO: 1973151 - DNA, 25 bp, Homo sapien
gagacttagacattatctgagaggt

SEQ ID NO: 1973152 - DNA, 25 bp, Homo sapien
gattctccttctaggtgggtgagtc

SEQ ID NO: 1973153 - DNA, 25 bp, Homo sapien
ctttgggcattggagacttagacat

SEQ ID NO: 1973154 - DNA, 25 bp, Homo sapien
ctccttctaggtgggtgagtccttc

SEQ ID NO: 1973155 - DNA, 25 bp, Homo sapien
caatctggggcaataaactttctgt

SEQ ID NO: 1973156 - DNA, 25 bp, Homo sapien
actttctgttctaccgctggctcct

SEQ ID NO: 1973157 - DNA, 25 bp, Homo sapien
tgttctaccgctggctcctagggta

SEQ ID NO: 1973158 - DNA, 25 bp, Homo sapien
tggctcctagggtatacccttgtcc

SEQ ID NO: 1973159 - DNA, 25 bp, Homo sapien
tctcagatgcctcagcgcagctgca

SEQ ID NO: 1973160 - DNA, 25 bp, Homo sapien
ttccccatgtttcggtgtaaggatg

SEQ ID NO: 1973161 - DNA, 25 bp, Homo sapien
cacatacacttgacggcagagaagg

SEQ ID NO: 1973162 - DNA, 25 bp, Homo sapien
gaacgaaatgtaactacctttatgc

SEQ ID NO: 1973163 - DNA, 25 bp, Homo sapien
ctgcacatacacttgacggcagaga

SEQ ID NO: 1973164 - DNA, 25 bp, Homo sapien
cactgcatatggtaactttcttatg

SEQ ID NO: 1973165 - DNA, 25 bp, Homo sapien
tatttcactgcatatggtaactttc

SEQ ID NO: 1973166 - DNA, 25 bp, Homo sapien
ctggaagcaaaagacgtaaattcag

SEQ ID NO: 1973167 - DNA, 25 bp, Homo sapien
agcaaaagacgtaaattcagcattt

SEQ ID NO: 1973168 - DNA, 25 bp, Homo sapien
agaacatcgtagctcagtgtcagga

SEQ ID NO: 1973169 - DNA, 25 bp, Homo sapien
cttgagaacatcgtagctcagtgtc

SEQ ID NO: 1973170 - DNA, 25 bp, Homo sapien
gcaacatgcttgagaacatcgtagc

SEQ ID NO: 1973171 - DNA, 25 bp, Homo sapien
catgcttgagaacatcgtagctcag

SEQ ID NO: 1973172 - DNA, 25 bp, Homo sapien
gataaaaagtatgggtcattgtcat

SEQ ID NO: 1973173 - DNA, 25 bp, Homo sapien
tggagggattgaccttgggataaaa

SEQ ID NO: 1973174 - DNA, 25 bp, Homo sapien
catagatggagggattgaccttggg

SEQ ID NO: 1973175 - DNA, 25 bp, Homo sapien
ccttgggataaaaagtatgggtcat

SEQ ID NO: 1973176 - DNA, 25 bp, Homo sapien
gactgagttaggaaaagcaatccca

SEQ ID NO: 1973177 - DNA, 25 bp, Homo sapien
gagtgaccagcatggatagatttcc

SEQ ID NO: 1973178 - DNA, 25 bp, Homo sapien
gacagctgtaattggtaccctgact

SEQ ID NO: 1973179 - DNA, 25 bp, Homo sapien
tttcggctagggcagaccagtttac

SEQ ID NO: 1973180 - DNA, 25 bp, Homo sapien
caccggtgaaccactgacctgtgtt

SEQ ID NO: 1973181 - DNA, 25 bp, Homo sapien
gaaccactgacctgtgtttcagaga

SEQ ID NO: 1973182 - DNA, 25 bp, Homo sapien
ttaccaccggtgaaccactgacctg

SEQ ID NO: 1973183 - DNA, 25 bp, Homo sapien
gatgtgtcgctgtcacctttaccac

SEQ ID NO: 1973184 - DNA, 25 bp, Homo sapien
agaatctattcttgttgcagagcag

SEQ ID NO: 1973185 - DNA, 25 bp, Homo sapien
aatctattcttgttgcagagcaggc

SEQ ID NO: 1973186 - DNA, 25 bp, Homo sapien
gaagaatctattcttgttgcagagc

SEQ ID NO: 1973187 - DNA, 25 bp, Homo sapien
atctattcttgttgcagagcaggcc

SEQ ID NO: 1973188 - DNA, 25 bp, Homo sapien
ttgtgttgtgttggccttgctcgtc

SEQ ID NO: 1973189 - DNA, 25 bp, Homo sapien
ggccttgctcgtcatagctgtttcc

SEQ ID NO: 1973190 - DNA, 25 bp, Homo sapien
tttgtgcttccatgagggtgagcca

SEQ ID NO: 1973191 - DNA, 25 bp, Homo sapien
ttcctttgtgcccctctgtgggatg

SEQ ID NO: 1973192 - DNA, 25 bp, Homo sapien
tactcccaatccctgtattcttgga

SEQ ID NO: 1973193 - DNA, 25 bp, Homo sapien
agagcctctaagtctgcgtactcag

SEQ ID NO: 1973194 - DNA, 25 bp, Homo sapien
taagtctgcgtactcagcacacgtt

SEQ ID NO: 1973195 - DNA, 25 bp, Homo sapien
tcccaatccctgtattcttggagag

SEQ ID NO: 1973196 - DNA, 25 bp, Homo sapien
gctgcagcgtctcttcatatttcca

SEQ ID NO: 1973197 - DNA, 25 bp, Homo sapien
cgcagctgcagcgtctcttcatatt

SEQ ID NO: 1973198 - DNA, 25 bp, Homo sapien
gcagcgtctcttcatatttccagcg

SEQ ID NO: 1973199 - DNA, 25 bp, Homo sapien
tctcttcatatttccagcgcgccgc

SEQ ID NO: 1973200 - DNA, 25 bp, Homo sapien
gccgcccgccccgacttctccgcgc

SEQ ID NO: 1973201 - DNA, 25 bp, Homo sapien
gcgtgcgccgctctgagctgcagtg

SEQ ID NO: 1973202 - DNA, 25 bp, Homo sapien
ccgccgcgtgcgccgctctgagctg

SEQ ID NO: 1973203 - DNA, 25 bp, Homo sapien
ccgcgtgcgccgctctgagctgcag

SEQ ID NO: 1973204 - DNA, 25 bp, Homo sapien
ctctctgggcgccgtcgggcggctg

SEQ ID NO: 1973205 - DNA, 25 bp, Homo sapien
tgggcgccgtcgggcggctgtgggc

SEQ ID NO: 1973206 - DNA, 25 bp, Homo sapien
gggcgccgtcgggcggctgtgggcg

SEQ ID NO: 1973207 - DNA, 25 bp, Homo sapien
ctccgatttggtgcccgggcaactg

SEQ ID NO: 1973208 - DNA, 25 bp, Homo sapien
gctccgatttggtgcccgggcaact

SEQ ID NO: 1973209 - DNA, 25 bp, Homo sapien
cgcgctccgatttggtgcccgggca

SEQ ID NO: 1973210 - DNA, 25 bp, Homo sapien
ttggtgcccgggcaactgggcgcgc

SEQ ID NO: 1973211 - DNA, 25 bp, Homo sapien
cgtgaagcaggagggccgggaacag

SEQ ID NO: 1973212 - DNA, 25 bp, Homo sapien
ttggaacacatcaagagcctgctgc

SEQ ID NO: 1973213 - DNA, 25 bp, Homo sapien
cagagccggcgatttcatggcagtg

SEQ ID NO: 1973214 - DNA, 25 bp, Homo sapien
gaaagtttccctcggactggatgca

SEQ ID NO: 1973215 - DNA, 25 bp, Homo sapien
tccagcagagcggacgaaagtttcc

SEQ ID NO: 1973216 - DNA, 25 bp, Homo sapien
ttaaaactgctctgtaattctaagc

SEQ ID NO: 1973217 - DNA, 25 bp, Homo sapien
tcttcacagatattacaacaatttt

SEQ ID NO: 1973218 - DNA, 25 bp, Homo sapien
gatctgttcattggctctgatttgt

SEQ ID NO: 1973219 - DNA, 25 bp, Homo sapien
gtggcagctgctgtttgatctgttc

SEQ ID NO: 1973220 - DNA, 25 bp, Homo sapien
gagaatgctacctttcggccagtgg

SEQ ID NO: 1973221 - DNA, 25 bp, Homo sapien
catgttggatctgcagctgactagc

SEQ ID NO: 1973222 - DNA, 25 bp, Homo sapien
tgtgcacgcttgtgggattcccagc

SEQ ID NO: 1973223 - DNA, 25 bp, Homo sapien
actttatagtgccatagtcctcagg

SEQ ID NO: 1973224 - DNA, 25 bp, Homo sapien
aatgagcacagctcggaaacccagc

SEQ ID NO: 1973225 - DNA, 25 bp, Homo sapien
atttgacaatgagcacagctcggaa

SEQ ID NO: 1973226 - DNA, 25 bp, Homo sapien
gacaatgagcacagctcggaaaccc

SEQ ID NO: 1973227 - DNA, 25 bp, Homo sapien
agcacagctcggaaacccagcgagg

SEQ ID NO: 1973228 - DNA, 25 bp, Homo sapien
tatgagcactcctatcatgggcacc

SEQ ID NO: 1973229 - DNA, 25 bp, Homo sapien
gaggcaaggcatctccactagagtg

SEQ ID NO: 1973230 - DNA, 25 bp, Homo sapien
tagagtggtactcctgggcattccc

SEQ ID NO: 1973231 - DNA, 25 bp, Homo sapien
catgggcacccatctacactgtgtc

SEQ ID NO: 1973232 - DNA, 25 bp, Homo sapien
tctaaggacctaggatgagacctgc

SEQ ID NO: 1973233 - DNA, 25 bp, Homo sapien
gatggcactgtgactccttaaaagc

SEQ ID NO: 1973234 - DNA, 25 bp, Homo sapien
tgtgatccttgcaccattgtggaga

SEQ ID NO: 1973235 - DNA, 25 bp, Homo sapien
gacccagtggccctcgattgtaggt

SEQ ID NO: 1973236 - DNA, 25 bp, Homo sapien
ccataataaaattggtaggccttga

SEQ ID NO: 1973237 - DNA, 25 bp, Homo sapien
tgcagctggtagtcggcttccgtgc

SEQ ID NO: 1973238 - DNA, 25 bp, Homo sapien
tcttgccccggatgatgagagtata

SEQ ID NO: 1973239 - DNA, 25 bp, Homo sapien
tgtgcaccggttgctgccataataa

SEQ ID NO: 1973240 - DNA, 25 bp, Homo sapien
tcctctcgccagaggtcataggcca

SEQ ID NO: 1973241 - DNA, 25 bp, Homo sapien
cggttcacctgctggccgagcttct

SEQ ID NO: 1973242 - DNA, 25 bp, Homo sapien
aagcccgggcatgtgcggttcacct

SEQ ID NO: 1973243 - DNA, 25 bp, Homo sapien
aaagttcacggccttggtgcactca

SEQ ID NO: 1973244 - DNA, 25 bp, Homo sapien
gcttctccacccggatgagctgaag

SEQ ID NO: 1973245 - DNA, 25 bp, Homo sapien
actgcttctccacccggatgagctg

SEQ ID NO: 1973246 - DNA, 25 bp, Homo sapien
ggtactgcttctccacccggatgag

SEQ ID NO: 1973247 - DNA, 25 bp, Homo sapien
gttgtggtgaaggtactgcttctcc

SEQ ID NO: 1973248 - DNA, 25 bp, Homo sapien
gtaactggagggccggtagaacatc

SEQ ID NO: 1973249 - DNA, 25 bp, Homo sapien
ggctggtaactggagggccggtaga

SEQ ID NO: 1973250 - DNA, 25 bp, Homo sapien
agggccggtagaacatcctctgggt

SEQ ID NO: 1973251 - DNA, 25 bp, Homo sapien
ctggagggccggtagaacatcctct

SEQ ID NO: 1973252 - DNA, 25 bp, Homo sapien
ggatcacccactttactcaataaag

SEQ ID NO: 1973253 - DNA, 25 bp, Homo sapien
tcacccactttactcaataaagagg

SEQ ID NO: 1973254 - DNA, 25 bp, Homo sapien
aaggatcacccactttactcaataa

SEQ ID NO: 1973255 - DNA, 25 bp, Homo sapien
gaaggatcacccactttactcaata

SEQ ID NO: 1973256 - DNA, 25 bp, Homo sapien
tatcaccctatgagccgattctcct

SEQ ID NO: 1973257 - DNA, 25 bp, Homo sapien
ccattttcccaagacacccactcaa

SEQ ID NO: 1973258 - DNA, 25 bp, Homo sapien
tatgagccgattctccttctgatac

SEQ ID NO: 1973259 - DNA, 25 bp, Homo sapien
cccagtccaggtatcaccctatgag

SEQ ID NO: 1973260 - DNA, 25 bp, Homo sapien
gattggctaccgtttctgaagtcca

SEQ ID NO: 1973261 - DNA, 25 bp, Homo sapien
gataactaccaatgccacacggctg

SEQ ID NO: 1973262 - DNA, 25 bp, Homo sapien
cattgacgggaatgaagtgtcccct

SEQ ID NO: 1973263 - DNA, 25 bp, Homo sapien
cagaagggcgacttactctaggtta

SEQ ID NO: 1973264 - DNA, 25 bp, Homo sapien
cttaggtaatagaagatcacagcac

SEQ ID NO: 1973265 - DNA, 25 bp, Homo sapien
tgcaacaggtaccaaaagtgaagtc

SEQ ID NO: 1973266 - DNA, 25 bp, Homo sapien
gtgaagtctctgtccgacaatccca

SEQ ID NO: 1973267 - DNA, 25 bp, Homo sapien
tctcgtgtagtatctaaggtcctaa

SEQ ID NO: 1973268 - DNA, 25 bp, Homo sapien
tcctgggcaggcgtgtacggtcttt

SEQ ID NO: 1973269 - DNA, 25 bp, Homo sapien
agacagctcggacaacctgctgtgg

SEQ ID NO: 1973270 - DNA, 25 bp, Homo sapien
tggaaagacaccaatggctgagtcc

SEQ ID NO: 1973271 - DNA, 25 bp, Homo sapien
tctttgaagacgttctcccagcctt

SEQ ID NO: 1973272 - DNA, 25 bp, Homo sapien
gattatggctgctctgacgctaaac

SEQ ID NO: 1973273 - DNA, 25 bp, Homo sapien
tgcagctaggctgaaaagtccaggc

SEQ ID NO: 1973274 - DNA, 25 bp, Homo sapien
ggctctggcatctctaacgaccttg

SEQ ID NO: 1973275 - DNA, 25 bp, Homo sapien
gcctagcggctcctaaagaatttga

SEQ ID NO: 1973276 - DNA, 25 bp, Homo sapien
acatgctcaggagacgtccctccat

SEQ ID NO: 1973277 - DNA, 25 bp, Homo sapien
cacctggctccttctataccccaga

SEQ ID NO: 1973278 - DNA, 25 bp, Homo sapien
tccacaagcacctggctccttctat

SEQ ID NO: 1973279 - DNA, 25 bp, Homo sapien
agcacatgctcaggagacgtccctc

SEQ ID NO: 1973280 - DNA, 25 bp, Homo sapien
tcggcccagataaaaggtccacaaa

SEQ ID NO: 1973281 - DNA, 25 bp, Homo sapien
tagggacctcatgcgtactttttaa

SEQ ID NO: 1973282 - DNA, 25 bp, Homo sapien
tctatcagcagccttgtagcccagt

SEQ ID NO: 1973283 - DNA, 25 bp, Homo sapien
tatttaccacttgcattgtccctga

SEQ ID NO: 1973284 - DNA, 25 bp, Homo sapien
tggctttaggtacagactgcccagg

SEQ ID NO: 1973285 - DNA, 25 bp, Homo sapien
taaaagaggcctgagagttctccag

SEQ ID NO: 1973286 - DNA, 25 bp, Homo sapien
ctaacaggcaaacggagagaaagct

SEQ ID NO: 1973287 - DNA, 25 bp, Homo sapien
taggtccttaagagcaacattagcc

SEQ ID NO: 1973288 - DNA, 25 bp, Homo sapien
tgctgtagataaccctgcaggtaca

SEQ ID NO: 1973289 - DNA, 25 bp, Homo sapien
catgacatccaggagagagttgcac

SEQ ID NO: 1973290 - DNA, 25 bp, Homo sapien
tctgtattacgagtcctttgaggcc

SEQ ID NO: 1973291 - DNA, 25 bp, Homo sapien
tggccaatggcccacgttgaaaact

SEQ ID NO: 1973292 - DNA, 25 bp, Homo sapien
agaacagacgtttccccagcaagga

SEQ ID NO: 1973293 - DNA, 25 bp, Homo sapien
ttagactttacaacctcccaggaga

SEQ ID NO: 1973294 - DNA, 25 bp, Homo sapien
gaaaaggtcttctccggctgatgac

SEQ ID NO: 1973295 - DNA, 25 bp, Homo sapien
tggcctctgtggatactgtcaacga

SEQ ID NO: 1973296 - DNA, 25 bp, Homo sapien
cctggctcttgggtattggtcttgc

SEQ ID NO: 1973297 - DNA, 25 bp, Homo sapien
ttcacactgttgtgcggctacccct

SEQ ID NO: 1973298 - DNA, 25 bp, Homo sapien
tgccaaatccctaaactagatgctt

SEQ ID NO: 1973299 - DNA, 25 bp, Homo sapien
gactattctaggtgcctcatctgag

SEQ ID NO: 1973300 - DNA, 25 bp, Homo sapien
aactggaatcatgctccgggcacag

SEQ ID NO: 1973301 - DNA, 25 bp, Homo sapien
gagtgcacacgtttgcctgacagta

SEQ ID NO: 1973302 - DNA, 25 bp, Homo sapien
tacagacctatgcaaacatttcagg

SEQ ID NO: 1973303 - DNA, 25 bp, Homo sapien
tgtgatgtggacactttagaatcct

SEQ ID NO: 1973304 - DNA, 25 bp, Homo sapien
ggtggtgctcgtctgaccgatagat

SEQ ID NO: 1973305 - DNA, 25 bp, Homo sapien
tccgacaggcgatgcaggcatggtc

SEQ ID NO: 1973306 - DNA, 25 bp, Homo sapien
tttgaacacgaactcggtgcctccc

SEQ ID NO: 1973307 - DNA, 25 bp, Homo sapien
tagtagtggccctcccaggtgttgt

SEQ ID NO: 1973308 - DNA, 25 bp, Homo sapien
tgtggcatgcaagcaaacgcagtgt

SEQ ID NO: 1973309 - DNA, 25 bp, Homo sapien
cgtttagtgataaggacacagcctg

SEQ ID NO: 1973310 - DNA, 25 bp, Homo sapien
cacctctttattgctcactcaggaa

SEQ ID NO: 1973311 - DNA, 25 bp, Homo sapien
tctcaattacacgacaagctcaggg

SEQ ID NO: 1973312 - DNA, 25 bp, Homo sapien
tgttgatctgggtggcagtcacacc

SEQ ID NO: 1973313 - DNA, 25 bp, Homo sapien
ggtgtagaaacactgagcccagaat

SEQ ID NO: 1973314 - DNA, 25 bp, Homo sapien
ggtgtggccatgcaacacagaccat

SEQ ID NO: 1973315 - DNA, 25 bp, Homo sapien
tagtcatcaaagcactgtcaggcgg

SEQ ID NO: 1973316 - DNA, 25 bp, Homo sapien
catctggtaggacgtggctctcttc

SEQ ID NO: 1973317 - DNA, 25 bp, Homo sapien
tgaccgttgaacagcagatagcgcc

SEQ ID NO: 1973318 - DNA, 25 bp, Homo sapien
tgaggtagtttgatgcccagggcca

SEQ ID NO: 1973319 - DNA, 25 bp, Homo sapien
tccattttgaagatctcgtactccg

SEQ ID NO: 1973320 - DNA, 25 bp, Homo sapien
ccaatgcagcagagggacaaggcag

SEQ ID NO: 1973321 - DNA, 25 bp, Homo sapien
cagggaccaggtgtgcctcccaggg

SEQ ID NO: 1973322 - DNA, 25 bp, Homo sapien
acaaggcaggcaagtgcagccagca

SEQ ID NO: 1973323 - DNA, 25 bp, Homo sapien
ctatctgcggatgttccaatgcagc

SEQ ID NO: 1973324 - DNA, 25 bp, Homo sapien
aaacacgctcgtccagaactctagg

SEQ ID NO: 1973325 - DNA, 25 bp, Homo sapien
caggctggacggagttcaaagcaga

SEQ ID NO: 1973326 - DNA, 25 bp, Homo sapien
aaaggtgtcttgatcacagtcccaa

SEQ ID NO: 1973327 - DNA, 25 bp, Homo sapien
ggattccagcatataaaactcagag

SEQ ID NO: 1973328 - DNA, 25 bp, Homo sapien
gctggggttacggcgtgagccatca

SEQ ID NO: 1973329 - DNA, 25 bp, Homo sapien
atcacacctggccaaagttacttct

SEQ ID NO: 1973330 - DNA, 25 bp, Homo sapien
ctggggttacggcgtgagccatcac

SEQ ID NO: 1973331 - DNA, 25 bp, Homo sapien
gccatcacacctggccaaagttact

SEQ ID NO: 1973332 - DNA, 25 bp, Homo sapien
gctttggtatcccatcgctgtgttc

SEQ ID NO: 1973333 - DNA, 25 bp, Homo sapien
ctcataaatctagaaattggtggaa

SEQ ID NO: 1973334 - DNA, 25 bp, Homo sapien
gatgcagatatttccatgaaagatg

SEQ ID NO: 1973335 - DNA, 25 bp, Homo sapien
agctctctgcttgtgagtggaccca

SEQ ID NO: 1973336 - DNA, 25 bp, Homo sapien
gccaaactgcttacttctgacataa

SEQ ID NO: 1973337 - DNA, 25 bp, Homo sapien
cctgccaaactgcttacttctgaca

SEQ ID NO: 1973338 - DNA, 25 bp, Homo sapien
tgacataacggggtattccctcttc

SEQ ID NO: 1973339 - DNA, 25 bp, Homo sapien
cttctgacataacggggtattccct

SEQ ID NO: 1973340 - DNA, 25 bp, Homo sapien
tgcatatttgaagtgaccagaccat

SEQ ID NO: 1973341 - DNA, 25 bp, Homo sapien
agtacttcatcctcaaagtgtcggc

SEQ ID NO: 1973342 - DNA, 25 bp, Homo sapien
tgtcggcaagcctgcatatttgaag

SEQ ID NO: 1973343 - DNA, 25 bp, Homo sapien
tcagagcctattctgctgagcttgg

SEQ ID NO: 1973344 - DNA, 25 bp, Homo sapien
ccatgattaacttcagaggagagag

SEQ ID NO: 1973345 - DNA, 25 bp, Homo sapien
acatggagaccctctaagccctctg

SEQ ID NO: 1973346 - DNA, 25 bp, Homo sapien
cagccatgattaacttcagaggaga

SEQ ID NO: 1973347 - DNA, 25 bp, Homo sapien
cattgtgtgagagagctgtcatgaa

SEQ ID NO: 1973348 - DNA, 25 bp, Homo sapien
agtcattctttgagctgtggccttt

SEQ ID NO: 1973349 - DNA, 25 bp, Homo sapien
cattctttgagctgtggcctttacc

SEQ ID NO: 1973350 - DNA, 25 bp, Homo sapien
attctttgagctgtggcctttacca

SEQ ID NO: 1973351 - DNA, 25 bp, Homo sapien
tcattctttgagctgtggcctttac

SEQ ID NO: 1973352 - DNA, 25 bp, Homo sapien
tccaggaagagtttctaccttaaca

SEQ ID NO: 1973353 - DNA, 25 bp, Homo sapien
tgcagcatttgcaggcaattccagg

SEQ ID NO: 1973354 - DNA, 25 bp, Homo sapien
tctaccttaacaacgacttgcttta

SEQ ID NO: 1973355 - DNA, 25 bp, Homo sapien
catggaaccatgatgaggatgcagc

SEQ ID NO: 1973356 - DNA, 25 bp, Homo sapien
ctgccctcccttcggccttgttgcc

SEQ ID NO: 1973357 - DNA, 25 bp, Homo sapien
gaagtgcaggccctagcttgctgct

SEQ ID NO: 1973358 - DNA, 25 bp, Homo sapien
tcccttcggccttgttgcctttgga

SEQ ID NO: 1973359 - DNA, 25 bp, Homo sapien
tgaagtgcaggccctagcttgctgc

SEQ ID NO: 1973360 - DNA, 25 bp, Homo sapien
acagtgcagtgcgaattccagagca

SEQ ID NO: 1973361 - DNA, 25 bp, Homo sapien
gaactcagtcaattttggctgaaag

SEQ ID NO: 1973362 - DNA, 25 bp, Homo sapien
tgcgaattccagagcagaactcagt

SEQ ID NO: 1973363 - DNA, 25 bp, Homo sapien
tccagagcagaactcagtcaatttt

SEQ ID NO: 1973364 - DNA, 25 bp, Homo sapien
ggcgccaagaatccgcccaaatagg

SEQ ID NO: 1973365 - DNA, 25 bp, Homo sapien
cccaaataggcgtgggaacgccgag

SEQ ID NO: 1973366 - DNA, 25 bp, Homo sapien
tgcagcgcgacagtcgagcggctac

SEQ ID NO: 1973367 - DNA, 25 bp, Homo sapien
ggaagctggtgcagcgcgacagtcg

SEQ ID NO: 1973368 - DNA, 25 bp, Homo sapien
tttctctgctttggcgaggtgttcc

SEQ ID NO: 1973369 - DNA, 25 bp, Homo sapien
tgttccagcccctcgtttatcttct

SEQ ID NO: 1973370 - DNA, 25 bp, Homo sapien
cctcgtttatcttctgagccgccat

SEQ ID NO: 1973371 - DNA, 25 bp, Homo sapien
tgctttggcgaggtgttccagcccc

SEQ ID NO: 1973372 - DNA, 25 bp, Homo sapien
tgcccacagggacagtaaaatgcca

SEQ ID NO: 1973373 - DNA, 25 bp, Homo sapien
agcagagcgcccaagtagagaagcc

SEQ ID NO: 1973374 - DNA, 25 bp, Homo sapien
gatgctgctaacgagcctccgatgc

SEQ ID NO: 1973375 - DNA, 25 bp, Homo sapien
aatgccagatgacaaaggttcaccg

SEQ ID NO: 1973376 - DNA, 25 bp, Homo sapien
tttcaggcccgcgtataatacatac

SEQ ID NO: 1973377 - DNA, 25 bp, Homo sapien
aagcaaatctaaccgagtccactgg

SEQ ID NO: 1973378 - DNA, 25 bp, Homo sapien
cactggttggatgcctacaatagcc

SEQ ID NO: 1973379 - DNA, 25 bp, Homo sapien
tacatactacaggttgcgcacagaa

SEQ ID NO: 1973380 - DNA, 25 bp, Homo sapien
cacagtatcgacagcagagggattc

SEQ ID NO: 1973381 - DNA, 25 bp, Homo sapien
tgaagcacagtatcgacagcagagg

SEQ ID NO: 1973382 - DNA, 25 bp, Homo sapien
gcagagggattcatgaaactgacgc

SEQ ID NO: 1973383 - DNA, 25 bp, Homo sapien
atgaaactgacgcacagacaagagt

SEQ ID NO: 1973384 - DNA, 25 bp, Homo sapien
attcagaagcggcactgtcataatc

SEQ ID NO: 1973385 - DNA, 25 bp, Homo sapien
gcggcactgtcataatctggcttcc

SEQ ID NO: 1973386 - DNA, 25 bp, Homo sapien
gaagcggcactgtcataatctggct

SEQ ID NO: 1973387 - DNA, 25 bp, Homo sapien
tttccatattcagaagcggcactgt

SEQ ID NO: 1973388 - DNA, 25 bp, Homo sapien
gcaactggactatagtcaaaaatac

SEQ ID NO: 1973389 - DNA, 25 bp, Homo sapien
cagatgatctctatgctaggctaac

SEQ ID NO: 1973390 - DNA, 25 bp, Homo sapien
tgtttaaccaaaagcacttgcccca

SEQ ID NO: 1973391 - DNA, 25 bp, Homo sapien
gaagcctccttgcatgagtagtcca

SEQ ID NO: 1973392 - DNA, 25 bp, Homo sapien
taagggctatcgctgaaatacaact

SEQ ID NO: 1973393 - DNA, 25 bp, Homo sapien
tcattcgattaggtagaaactgagg

SEQ ID NO: 1973394 - DNA, 25 bp, Homo sapien
ataaaccttccttttggcacaatct

SEQ ID NO: 1973395 - DNA, 25 bp, Homo sapien
caaaacaggagtgcttataacatat

SEQ ID NO: 1973396 - DNA, 25 bp, Homo sapien
tactgtttactatctatgaaaaaga

SEQ ID NO: 1973397 - DNA, 25 bp, Homo sapien
ttattttcatgggcaacagcttccc

SEQ ID NO: 1973398 - DNA, 25 bp, Homo sapien
tattttcatgggcaacagcttccct

SEQ ID NO: 1973399 - DNA, 25 bp, Homo sapien
ttttcatgggcaacagcttccctca

SEQ ID NO: 1973400 - DNA, 25 bp, Homo sapien
ttcatgggcaacagcttccctcagg

SEQ ID NO: 1973401 - DNA, 25 bp, Homo sapien
cgtgttttcaatacctgtgctactt

SEQ ID NO: 1973402 - DNA, 25 bp, Homo sapien
gtttgcaaacacctcaagaaaatgt

SEQ ID NO: 1973403 - DNA, 25 bp, Homo sapien
gaaccagtgtggaccttataatcaa

SEQ ID NO: 1973404 - DNA, 25 bp, Homo sapien
taagtattgtagctctgcgaaccag

SEQ ID NO: 1973405 - DNA, 25 bp, Homo sapien
tcaacatcattccagcttgctcata

SEQ ID NO: 1973406 - DNA, 25 bp, Homo sapien
catcattccagcttgctcataagct

SEQ ID NO: 1973407 - DNA, 25 bp, Homo sapien
cttcaacatcattccagcttgctca

SEQ ID NO: 1973408 - DNA, 25 bp, Homo sapien
aacatcattccagcttgctcataag

SEQ ID NO: 1973409 - DNA, 25 bp, Homo sapien
gaggctgtgagtaagaggtccaacc

SEQ ID NO: 1973410 - DNA, 25 bp, Homo sapien
gcatatgtctacaaaatggcactcc

SEQ ID NO: 1973411 - DNA, 25 bp, Homo sapien
gaattgtggaccacgtagctcaggg

SEQ ID NO: 1973412 - DNA, 25 bp, Homo sapien
tgtgccagtggagcaaacaggatat

SEQ ID NO: 1973413 - DNA, 25 bp, Homo sapien
ttcatgtttcttggctgtatgtctt

SEQ ID NO: 1973414 - DNA, 25 bp, Homo sapien
ttttcatgtttcttggctgtatgtc

SEQ ID NO: 1973415 - DNA, 25 bp, Homo sapien
ctaatgatcaatgatgatgagctgt

SEQ ID NO: 1973416 - DNA, 25 bp, Homo sapien
gtatgtcttctttttctacaaggaa

SEQ ID NO: 1973417 - DNA, 25 bp, Homo sapien
ggatacagtagacaggtcagcaaat

SEQ ID NO: 1973418 - DNA, 25 bp, Homo sapien
taaacatacgtgtttactgtataaa

SEQ ID NO: 1973419 - DNA, 25 bp, Homo sapien
tacgtgtttactgtataaacatacg

SEQ ID NO: 1973420 - DNA, 25 bp, Homo sapien
catgtgtccttgtggttcaattccc

SEQ ID NO: 1973421 - DNA, 25 bp, Homo sapien
ttctagatacatcatgctggccttc

SEQ ID NO: 1973422 - DNA, 25 bp, Homo sapien
gctgaacggcctctggtagtttctg

SEQ ID NO: 1973423 - DNA, 25 bp, Homo sapien
tctggggtgccgttttctagataca

SEQ ID NO: 1973424 - DNA, 25 bp, Homo sapien
ctgaacggcctctggtagtttctgc

SEQ ID NO: 1973425 - DNA, 25 bp, Homo sapien
tataactgtacagccttctctggat

SEQ ID NO: 1973426 - DNA, 25 bp, Homo sapien
tgttgatataactgtacagccttct

SEQ ID NO: 1973427 - DNA, 25 bp, Homo sapien
tgtctgttgatataactgtacagcc

SEQ ID NO: 1973428 - DNA, 25 bp, Homo sapien
agctgtctgttgatataactgtaca

SEQ ID NO: 1973429 - DNA, 25 bp, Homo sapien
tcctcgtactagtagtctggaggct

SEQ ID NO: 1973430 - DNA, 25 bp, Homo sapien
tagtaattcaactgcctgtcgtaag

SEQ ID NO: 1973431 - DNA, 25 bp, Homo sapien
aactgcctgtcgtaagcgttcttca

SEQ ID NO: 1973432 - DNA, 25 bp, Homo sapien
cgtactagtagtctggaggcttttc

SEQ ID NO: 1973433 - DNA, 25 bp, Homo sapien
gaaactgttccctttcatgttgctg

SEQ ID NO: 1973434 - DNA, 25 bp, Homo sapien
gcacagtgcatgataaatttgggca

SEQ ID NO: 1973435 - DNA, 25 bp, Homo sapien
gggttcaaccaataaaagcacagtg

SEQ ID NO: 1973436 - DNA, 25 bp, Homo sapien
aattcagtgtgcctactgtctagta

SEQ ID NO: 1973437 - DNA, 25 bp, Homo sapien
ttgaaaccccacagaagttatgtgc

SEQ ID NO: 1973438 - DNA, 25 bp, Homo sapien
tggcaccatggacagaacagttatg

SEQ ID NO: 1973439 - DNA, 25 bp, Homo sapien
tatctcagttattgatggcaccatg

SEQ ID NO: 1973440 - DNA, 25 bp, Homo sapien
gagccaagcccttacatgagtttgt

SEQ ID NO: 1973441 - DNA, 25 bp, Homo sapien
cagtggccctagcaagctctgaggt

SEQ ID NO: 1973442 - DNA, 25 bp, Homo sapien
gactgtgtccctccatcacatactc

SEQ ID NO: 1973443 - DNA, 25 bp, Homo sapien
agacacccaaggcactcggtgcctt

SEQ ID NO: 1973444 - DNA, 25 bp, Homo sapien
agatttctttcctcccgactgaaag

SEQ ID NO: 1973445 - DNA, 25 bp, Homo sapien
gatacgtacttgagacgatcttcga

SEQ ID NO: 1973446 - DNA, 25 bp, Homo sapien
aggtattattagcagctgccccagg

SEQ ID NO: 1973447 - DNA, 25 bp, Homo sapien
catagattgtagagacaccaggagg

SEQ ID NO: 1973448 - DNA, 25 bp, Homo sapien
taaggactgtccaatagcgagtgtc

SEQ ID NO: 1973449 - DNA, 25 bp, Homo sapien
ctttctgaatagagagtgccgcctc

SEQ ID NO: 1973450 - DNA, 25 bp, Homo sapien
ttctttctgaatagagagtgccgcc

SEQ ID NO: 1973451 - DNA, 25 bp, Homo sapien
cttataacaagttggataattctca

SEQ ID NO: 1973452 - DNA, 25 bp, Homo sapien
tctttctgaatagagagtgccgcct

SEQ ID NO: 1973453 - DNA, 25 bp, Homo sapien
taaatgctatagtaacttccacggg

SEQ ID NO: 1973454 - DNA, 25 bp, Homo sapien
tgtttaataaagtcaataacctggc

SEQ ID NO: 1973455 - DNA, 25 bp, Homo sapien
gggaccgcactttgacacaagcctt

SEQ ID NO: 1973456 - DNA, 25 bp, Homo sapien
taacctggcagtattgaaaacacct

SEQ ID NO: 1973457 - DNA, 25 bp, Homo sapien
gatgaactaagacttgagcaattgt

SEQ ID NO: 1973458 - DNA, 25 bp, Homo sapien
ctgcagctacatagtcatttctgtg

SEQ ID NO: 1973459 - DNA, 25 bp, Homo sapien
tagctctcccggacacatctttctg

SEQ ID NO: 1973460 - DNA, 25 bp, Homo sapien
atttctgtgtagatgaactaagact

SEQ ID NO: 1973461 - DNA, 25 bp, Homo sapien
ggaacatgtgtcctagcagcaatct

SEQ ID NO: 1973462 - DNA, 25 bp, Homo sapien
ggtgtcgccactgcaagtcaagagg

SEQ ID NO: 1973463 - DNA, 25 bp, Homo sapien
tcaagagggcccagacaacgtctta

SEQ ID NO: 1973464 - DNA, 25 bp, Homo sapien
tggaggtcccctagagaaaaataca

SEQ ID NO: 1973465 - DNA, 25 bp, Homo sapien
gcagacatctgacacctgatcttgg

SEQ ID NO: 1973466 - DNA, 25 bp, Homo sapien
ggtcttgctggtcataaccttcaag

SEQ ID NO: 1973467 - DNA, 25 bp, Homo sapien
gaaaagcggtgagttgcagacatct

SEQ ID NO: 1973468 - DNA, 25 bp, Homo sapien
ccatgtacttgaaaagcggtgagtt

SEQ ID NO: 1973469 - DNA, 25 bp, Homo sapien
aaaggccactacagaatggacctct

SEQ ID NO: 1973470 - DNA, 25 bp, Homo sapien
tacaaaggccactacagaatggacc

SEQ ID NO: 1973471 - DNA, 25 bp, Homo sapien
aattacaaaggccactacagaatgg

SEQ ID NO: 1973472 - DNA, 25 bp, Homo sapien
ctactgaattacaaaggccactaca

SEQ ID NO: 1973473 - DNA, 25 bp, Homo sapien
ctggaaccaccaaactcaggcccag

SEQ ID NO: 1973474 - DNA, 25 bp, Homo sapien
cagcagccgtggcagtgacaccatc

SEQ ID NO: 1973475 - DNA, 25 bp, Homo sapien
gcctgtggtgttgcaggtgatttct

SEQ ID NO: 1973476 - DNA, 25 bp, Homo sapien
ctagcatagtcctcctgagtattca

SEQ ID NO: 1973477 - DNA, 25 bp, Homo sapien
tagtcctcctgagtattcatcttcc

SEQ ID NO: 1973478 - DNA, 25 bp, Homo sapien
ttcccttttcttttcagcaagcaaa

SEQ ID NO: 1973479 - DNA, 25 bp, Homo sapien
tgtttcccttttcttttcagcaagc

SEQ ID NO: 1973480 - DNA, 25 bp, Homo sapien
ccttttcttttcagcaagcaaaata

SEQ ID NO: 1973481 - DNA, 25 bp, Homo sapien
gtttcccttttcttttcagcaagca

SEQ ID NO: 1973482 - DNA, 25 bp, Homo sapien
taatgaagtacggatatccctaatc

SEQ ID NO: 1973483 - DNA, 25 bp, Homo sapien
taggatccaaaatcatgactgtaat

SEQ ID NO: 1973484 - DNA, 25 bp, Homo sapien
aaatcatgactgtaatgaagtacgg

SEQ ID NO: 1973485 - DNA, 25 bp, Homo sapien
ctaatctattcccaagtccttgaaa

SEQ ID NO: 1973486 - DNA, 25 bp, Homo sapien
gaaaaagatatgcttcacaggtaat

SEQ ID NO: 1973487 - DNA, 25 bp, Homo sapien
tgctggtgtcttagaaaagctctta

SEQ ID NO: 1973488 - DNA, 25 bp, Homo sapien
taatcaatgtattaaaacatgacag

SEQ ID NO: 1973489 - DNA, 25 bp, Homo sapien
caggtaatggatacaatgagtgatt

SEQ ID NO: 1973490 - DNA, 25 bp, Homo sapien
tgtacctgcagaacgcacactgctg

SEQ ID NO: 1973491 - DNA, 25 bp, Homo sapien
cagattacgagatgggtctaagcca

SEQ ID NO: 1973492 - DNA, 25 bp, Homo sapien
gaattactttggcagcgtgtacctg

SEQ ID NO: 1973493 - DNA, 25 bp, Homo sapien
gaaatacccacacttcagagaggac

SEQ ID NO: 1973494 - DNA, 25 bp, Homo sapien
tggtttaaagcatagctgcgctgct

SEQ ID NO: 1973495 - DNA, 25 bp, Homo sapien
ggttattcaatcctcaccgtgggca

SEQ ID NO: 1973496 - DNA, 25 bp, Homo sapien
gatctaaaggatacaagctgcaatg

SEQ ID NO: 1973497 - DNA, 25 bp, Homo sapien
taagactccagaagtttccgattgg

SEQ ID NO: 1973498 - DNA, 25 bp, Homo sapien
aagtcattattgagggtttcttgat

SEQ ID NO: 1973499 - DNA, 25 bp, Homo sapien
gagtcgaatgaaagcaacacgaggg

SEQ ID NO: 1973500 - DNA, 25 bp, Homo sapien
cagcaggtggactttgcttatcctt

SEQ ID NO: 1973501 - DNA, 25 bp, Homo sapien
gagggtttcttgatgagtcgaatga

SEQ ID NO: 1973502 - DNA, 25 bp, Homo sapien
tctgatgttccccacggtatggttt

SEQ ID NO: 1973503 - DNA, 25 bp, Homo sapien
gatgccgcttctgcaaggatgctcc

SEQ ID NO: 1973504 - DNA, 25 bp, Homo sapien
tactacttggatcagaattaagata

SEQ ID NO: 1973505 - DNA, 25 bp, Homo sapien
cgatgccgcttctgcaaggatgctc

SEQ ID NO: 1973506 - DNA, 25 bp, Homo sapien
tctaagatcctcacagcccatggca

SEQ ID NO: 1973507 - DNA, 25 bp, Homo sapien
ggatctaagatcctcacagcccatg

SEQ ID NO: 1973508 - DNA, 25 bp, Homo sapien
atctaagatcctcacagcccatggc

SEQ ID NO: 1973509 - DNA, 25 bp, Homo sapien
cttggatctaagatcctcacagccc

SEQ ID NO: 1973510 - DNA, 25 bp, Homo sapien
tccttcattccgtctgtaagcaggg

SEQ ID NO: 1973511 - DNA, 25 bp, Homo sapien
tgcttctccacagacttgcaatgtg

SEQ ID NO: 1973512 - DNA, 25 bp, Homo sapien
tactcatgtcgcaccccttgtggct

SEQ ID NO: 1973513 - DNA, 25 bp, Homo sapien
tctgttctgtgatctactcatgtcg

SEQ ID NO: 1973514 - DNA, 25 bp, Homo sapien
gggtgaccggtaagagctgcttcca

SEQ ID NO: 1973515 - DNA, 25 bp, Homo sapien
ttcagagcagacctccatcctacat

SEQ ID NO: 1973516 - DNA, 25 bp, Homo sapien
agagcagacctccatcctacatgac

SEQ ID NO: 1973517 - DNA, 25 bp, Homo sapien
gcagacaaatgaggggtgaccggta

SEQ ID NO: 1973518 - DNA, 25 bp, Homo sapien
gcccattagcgcaggctctgggagc

SEQ ID NO: 1973519 - DNA, 25 bp, Homo sapien
ccatcgagtgcccattagcgcaggc

SEQ ID NO: 1973520 - DNA, 25 bp, Homo sapien
cagaagagatgctggctgtattgta

SEQ ID NO: 1973521 - DNA, 25 bp, Homo sapien
gagatgctggctgtattgtacagca

SEQ ID NO: 1973522 - DNA, 25 bp, Homo sapien
catggacttctagttggaaaggcaa

SEQ ID NO: 1973523 - DNA, 25 bp, Homo sapien
ggcagtaactgtatcctctaactca

SEQ ID NO: 1973524 - DNA, 25 bp, Homo sapien
cgtgatggacaaaaagctaagcagc

SEQ ID NO: 1973525 - DNA, 25 bp, Homo sapien
gctaagcagccaattagataaggaa

SEQ ID NO: 1973526 - DNA, 25 bp, Homo sapien
ctcatgggagatgggccaccatagg

SEQ ID NO: 1973527 - DNA, 25 bp, Homo sapien
ctgctcatgggagatgggccaccat

SEQ ID NO: 1973528 - DNA, 25 bp, Homo sapien
tgggagatgggccaccataggacat

SEQ ID NO: 1973529 - DNA, 25 bp, Homo sapien
catgggagatgggccaccataggac

SEQ ID NO: 1973530 - DNA, 25 bp, Homo sapien
aacctcttgttcaggattctgggag

SEQ ID NO: 1973531 - DNA, 25 bp, Homo sapien
ccgagatagcggaatctaagtgcct

SEQ ID NO: 1973532 - DNA, 25 bp, Homo sapien
taacacgtctagcaggtcagaaagc

SEQ ID NO: 1973533 - DNA, 25 bp, Homo sapien
tctggttgcagagcagttagcgccc

SEQ ID NO: 1973534 - DNA, 25 bp, Homo sapien
agtatcaaggacgtggctggcagca

SEQ ID NO: 1973535 - DNA, 25 bp, Homo sapien
tgccaagtaatagcgagccaatgaa

SEQ ID NO: 1973536 - DNA, 25 bp, Homo sapien
tcccggagcacacgagaaacacaag

SEQ ID NO: 1973537 - DNA, 25 bp, Homo sapien
agcccacgctggcttgaggagccac

SEQ ID NO: 1973538 - DNA, 25 bp, Homo sapien
tctgtgcatttgctgacttcactca

SEQ ID NO: 1973539 - DNA, 25 bp, Homo sapien
cctcctcacgcctcttacatttggg

SEQ ID NO: 1973540 - DNA, 25 bp, Homo sapien
ccatttagttgctcgatccatagca

SEQ ID NO: 1973541 - DNA, 25 bp, Homo sapien
tttgtggggataccttgtcaactag

SEQ ID NO: 1973542 - DNA, 25 bp, Homo sapien
ttcctggcggaacctgatgctattt

SEQ ID NO: 1973543 - DNA, 25 bp, Homo sapien
gttcttgccacactttcctggcgga

SEQ ID NO: 1973544 - DNA, 25 bp, Homo sapien
tgcatggggcgaaatccttcctgtt

SEQ ID NO: 1973545 - DNA, 25 bp, Homo sapien
gccacactttcctggcggaacctga

SEQ ID NO: 1973546 - DNA, 25 bp, Homo sapien
tgtagagatgagattgctgggatta

SEQ ID NO: 1973547 - DNA, 25 bp, Homo sapien
tagagatgagattgctgggattata

SEQ ID NO: 1973548 - DNA, 25 bp, Homo sapien
cacctggccttcattgtttttctga

SEQ ID NO: 1973549 - DNA, 25 bp, Homo sapien
cattgtttttctgatgataactttg

SEQ ID NO: 1973550 - DNA, 25 bp, Homo sapien
cgctccccaaaccctactgctgcag

SEQ ID NO: 1973551 - DNA, 25 bp, Homo sapien
ggagggttgcttggtgctaggagtt

SEQ ID NO: 1973552 - DNA, 25 bp, Homo sapien
ggttgcttggtgctaggagtttgag

SEQ ID NO: 1973553 - DNA, 25 bp, Homo sapien
agggttgcttggtgctaggagtttg

SEQ ID NO: 1973554 - DNA, 25 bp, Homo sapien
caggagggttgcttggtgctaggag

SEQ ID NO: 1973555 - DNA, 25 bp, Homo sapien
tcttgttttggctcacgctgtgaac

SEQ ID NO: 1973556 - DNA, 25 bp, Homo sapien
ttttgctgttgaaaaggccccaagc

SEQ ID NO: 1973557 - DNA, 25 bp, Homo sapien
gctggctagtgttcctaagagcaag

SEQ ID NO: 1973558 - DNA, 25 bp, Homo sapien
gagttgctcaaatgcacgttcccag

SEQ ID NO: 1973559 - DNA, 25 bp, Homo sapien
cactttgtgtctctcacgacaggca

SEQ ID NO: 1973560 - DNA, 25 bp, Homo sapien
tttgtgtctctcacgacaggcagga

SEQ ID NO: 1973561 - DNA, 25 bp, Homo sapien
tgtgtctctcacgacaggcaggaaa

SEQ ID NO: 1973562 - DNA, 25 bp, Homo sapien
tgtctctcacgacaggcaggaaaca

SEQ ID NO: 1973563 - DNA, 25 bp, Homo sapien
gactccagcagtgacgatgatgacg

SEQ ID NO: 1973564 - DNA, 25 bp, Homo sapien
ggttggagccccacattgataaggc

SEQ ID NO: 1973565 - DNA, 25 bp, Homo sapien
tgactcagtgttcagcacccctagg

SEQ ID NO: 1973566 - DNA, 25 bp, Homo sapien
gatgacgctccaggtagatgggcac

SEQ ID NO: 1973567 - DNA, 25 bp, Homo sapien
gcagaggactttccctcagcagcag

SEQ ID NO: 1973568 - DNA, 25 bp, Homo sapien
ggggccttgtagatggcagcattcc

SEQ ID NO: 1973569 - DNA, 25 bp, Homo sapien
cagaggactttccctcagcagcagt

SEQ ID NO: 1973570 - DNA, 25 bp, Homo sapien
tggcagcattccctatccactgcaa

SEQ ID NO: 1973571 - DNA, 25 bp, Homo sapien
cagggcactgacccttactctgtgt

SEQ ID NO: 1973572 - DNA, 25 bp, Homo sapien
gggcactgacccttactctgtgttc

SEQ ID NO: 1973573 - DNA, 25 bp, Homo sapien
agggcactgacccttactctgtgtt

SEQ ID NO: 1973574 - DNA, 25 bp, Homo sapien
gcttcccactgtagagcgtgtctga

SEQ ID NO: 1973575 - DNA, 25 bp, Homo sapien
ctgtagagcgtgtctgagtcatgtc

SEQ ID NO: 1973576 - DNA, 25 bp, Homo sapien
agggtggcacaaaggatcctggatc

SEQ ID NO: 1973577 - DNA, 25 bp, Homo sapien
tggaaaccgcttcccactgtagagc

SEQ ID NO: 1973578 - DNA, 25 bp, Homo sapien
gggtcccatcaacgtccaaaaggca

SEQ ID NO: 1973579 - DNA, 25 bp, Homo sapien
catcaacgtccaaaaggcagagcac

SEQ ID NO: 1973580 - DNA, 25 bp, Homo sapien
ggtcagggtcccatcaacgtccaaa

SEQ ID NO: 1973581 - DNA, 25 bp, Homo sapien
tcccatcaacgtccaaaaggcagag

SEQ ID NO: 1973582 - DNA, 25 bp, Homo sapien
taccactccgattttgatcttctgc

SEQ ID NO: 1973583 - DNA, 25 bp, Homo sapien
gatcttctgcctcaatttttgtagg

SEQ ID NO: 1973584 - DNA, 25 bp, Homo sapien
tttttgtaggaagtcatccatttct

SEQ ID NO: 1973585 - DNA, 25 bp, Homo sapien
ctaccactccgattttgatcttctg

SEQ ID NO: 1973586 - DNA, 25 bp, Homo sapien
ttccatttacacgaggatttcccat

SEQ ID NO: 1973587 - DNA, 25 bp, Homo sapien
gttgattaaatcttggatttggacc

SEQ ID NO: 1973588 - DNA, 25 bp, Homo sapien
gattaaatcttggatttggacctca

SEQ ID NO: 1973589 - DNA, 25 bp, Homo sapien
ttgcagctcagacaatagttgatta

SEQ ID NO: 1973590 - DNA, 25 bp, Homo sapien
aatttttgcattgcagctcagacaa

SEQ ID NO: 1973591 - DNA, 25 bp, Homo sapien
gatctggcctcctgtgaaaaacatg

SEQ ID NO: 1973592 - DNA, 25 bp, Homo sapien
tgatctggcctcctgtgaaaaacat

SEQ ID NO: 1973593 - DNA, 25 bp, Homo sapien
ctggcctcctgtgaaaaacatgagg

SEQ ID NO: 1973594 - DNA, 25 bp, Homo sapien
tctggcctcctgtgaaaaacatgag

SEQ ID NO: 1973595 - DNA, 25 bp, Homo sapien
tcatggagtagcccacggttctgga

SEQ ID NO: 1973596 - DNA, 25 bp, Homo sapien
gtcgttgccacctggtatgattttg

SEQ ID NO: 1973597 - DNA, 25 bp, Homo sapien
cggttctggagtctgtgaaggtctc

SEQ ID NO: 1973598 - DNA, 25 bp, Homo sapien
tggtcgttgccacctggtatgattt

SEQ ID NO: 1973599 - DNA, 25 bp, Homo sapien
acagccaccacctgcatcgaggcaa

SEQ ID NO: 1973600 - DNA, 25 bp, Homo sapien
ctcacagccaccacctgcatcgagg

SEQ ID NO: 1973601 - DNA, 25 bp, Homo sapien
gggtgtcacactgcccctgctcaca

SEQ ID NO: 1973602 - DNA, 25 bp, Homo sapien
cagccaccacctgcatcgaggcaac

SEQ ID NO: 1973603 - DNA, 25 bp, Homo sapien
tgaggaactagagaggaacgcctct

SEQ ID NO: 1973604 - DNA, 25 bp, Homo sapien
ctgagtaggcgctgacaggagaaca

SEQ ID NO: 1973605 - DNA, 25 bp, Homo sapien
gacatcctacattagtttctctgga

SEQ ID NO: 1973606 - DNA, 25 bp, Homo sapien
caggttctcacacgtccctgaggaa

SEQ ID NO: 1973607 - DNA, 25 bp, Homo sapien
aaagcagtccttcactacagtggca

SEQ ID NO: 1973608 - DNA, 25 bp, Homo sapien
tgcccaaagcagtccttcactacag

SEQ ID NO: 1973609 - DNA, 25 bp, Homo sapien
ccaaagcagtccttcactacagtgg

SEQ ID NO: 1973610 - DNA, 25 bp, Homo sapien
gcccaaagcagtccttcactacagt

SEQ ID NO: 1973611 - DNA, 25 bp, Homo sapien
tcagtaagcactgattctccctctc

SEQ ID NO: 1973612 - DNA, 25 bp, Homo sapien
tcaccactccaaaaaggggtgctga

SEQ ID NO: 1973613 - DNA, 25 bp, Homo sapien
ctcaccactccaaaaaggggtgctg

SEQ ID NO: 1973614 - DNA, 25 bp, Homo sapien
atgctcagtaagcactgattctccc

SEQ ID NO: 1973615 - DNA, 25 bp, Homo sapien
tcctcatggctcaggccctgagact

SEQ ID NO: 1973616 - DNA, 25 bp, Homo sapien
caagaatcgatctctgtttagcctg

SEQ ID NO: 1973617 - DNA, 25 bp, Homo sapien
tctgatacagggacaaggtccaaga

SEQ ID NO: 1973618 - DNA, 25 bp, Homo sapien
gcctgtgcagatggttctgacatca

SEQ ID NO: 1973619 - DNA, 25 bp, Homo sapien
gccccaggttctaaataagtcatca

SEQ ID NO: 1973620 - DNA, 25 bp, Homo sapien
gagctctccctcgaaagtagcctga

SEQ ID NO: 1973621 - DNA, 25 bp, Homo sapien
tccaaaccatactcagagctggcct

SEQ ID NO: 1973622 - DNA, 25 bp, Homo sapien
gacgctgatgagtctaagggtcgca

SEQ ID NO: 1973623 - DNA, 25 bp, Homo sapien
cgatcaagcaatgtaatgcagccca

SEQ ID NO: 1973624 - DNA, 25 bp, Homo sapien
tagaagaacaattagttgacattat

SEQ ID NO: 1973625 - DNA, 25 bp, Homo sapien
taatgcagcccatagagaggctccc

SEQ ID NO: 1973626 - DNA, 25 bp, Homo sapien
gacattattgcatcacgatcaagca

SEQ ID NO: 1973627 - DNA, 25 bp, Homo sapien
tcccaggaaaggtcgaaagagctga

SEQ ID NO: 1973628 - DNA, 25 bp, Homo sapien
aaaggcgctgtagcacagcttggca

SEQ ID NO: 1973629 - DNA, 25 bp, Homo sapien
tggcaccgagcctcaagtcggcaaa

SEQ ID NO: 1973630 - DNA, 25 bp, Homo sapien
tgaggatgtgccttgagtcccagga

SEQ ID NO: 1973631 - DNA, 25 bp, Homo sapien
taatgtgcgtggcaggcaaggacac

SEQ ID NO: 1973632 - DNA, 25 bp, Homo sapien
atgtctccacgtctgcagcatgggc

SEQ ID NO: 1973633 - DNA, 25 bp, Homo sapien
ggcaatgcagtaacaccagcaaaat

SEQ ID NO: 1973634 - DNA, 25 bp, Homo sapien
ccgactgcgggatccgaaaggctaa

SEQ ID NO: 1973635 - DNA, 25 bp, Homo sapien
tatctgaacaatagtgtcatgattt

SEQ ID NO: 1973636 - DNA, 25 bp, Homo sapien
agtatctgaacaatagtgtcatgat

SEQ ID NO: 1973637 - DNA, 25 bp, Homo sapien
gtatctgaacaatagtgtcatgatt

SEQ ID NO: 1973638 - DNA, 25 bp, Homo sapien
gaaaccaccatgctatgtgagcgag

SEQ ID NO: 1973639 - DNA, 25 bp, Homo sapien
tactccttggatcagccagaaggca

SEQ ID NO: 1973640 - DNA, 25 bp, Homo sapien
tgtgcttcccggtagcaggaaacca

SEQ ID NO: 1973641 - DNA, 25 bp, Homo sapien
gagtcccaaagtccatctgctagtt

SEQ ID NO: 1973642 - DNA, 25 bp, Homo sapien
tcaccctccttggttcggccacttg

SEQ ID NO: 1973643 - DNA, 25 bp, Homo sapien
actcaccctccttggttcggccact

SEQ ID NO: 1973644 - DNA, 25 bp, Homo sapien
caccctccttggttcggccacttgg

SEQ ID NO: 1973645 - DNA, 25 bp, Homo sapien
agctcgtgcaatccactcaccctcc

SEQ ID NO: 1973646 - DNA, 25 bp, Homo sapien
gtacccacatgtgcttcaaagctgc

SEQ ID NO: 1973647 - DNA, 25 bp, Homo sapien
acccacatgtgcttcaaagctgcta

SEQ ID NO: 1973648 - DNA, 25 bp, Homo sapien
catgccatttgcactaacagtaccc

SEQ ID NO: 1973649 - DNA, 25 bp, Homo sapien
cagatgctccatgccatttgcacta

SEQ ID NO: 1973650 - DNA, 25 bp, Homo sapien
gggacatttgacactgacagctggt

SEQ ID NO: 1973651 - DNA, 25 bp, Homo sapien
gaatactgagagtaagaggcgtgcc

SEQ ID NO: 1973652 - DNA, 25 bp, Homo sapien
gacgaccctccaaggactgctagaa

SEQ ID NO: 1973653 - DNA, 25 bp, Homo sapien
gaggcgtgccaggtctaaagtgcca

SEQ ID NO: 1973654 - DNA, 25 bp, Homo sapien
agaggctcctgttgctgcctggcga

SEQ ID NO: 1973655 - DNA, 25 bp, Homo sapien
ggagagcacccccacttgtcaaatc

SEQ ID NO: 1973656 - DNA, 25 bp, Homo sapien
ctggcgagcactggccggagagcac

SEQ ID NO: 1973657 - DNA, 25 bp, Homo sapien
ttgtcaaatcgtgccccgcacctgg

SEQ ID NO: 1973658 - DNA, 25 bp, Homo sapien
tgccaaagatgtggtggagccagga

SEQ ID NO: 1973659 - DNA, 25 bp, Homo sapien
ttgccaaagatgtggtggagccagg

SEQ ID NO: 1973660 - DNA, 25 bp, Homo sapien
gccaaagatgtggtggagccaggac

SEQ ID NO: 1973661 - DNA, 25 bp, Homo sapien
ccagacccttactccatgtgcaggg

SEQ ID NO: 1973662 - DNA, 25 bp, Homo sapien
tcaggagctgagagactaataatat

SEQ ID NO: 1973663 - DNA, 25 bp, Homo sapien
tatttgctcttacgactatgtgtca

SEQ ID NO: 1973664 - DNA, 25 bp, Homo sapien
ggcaattacgctagcatcgcagacc

SEQ ID NO: 1973665 - DNA, 25 bp, Homo sapien
gaagcacggcaagtgtaggtatgaa

SEQ ID NO: 1973666 - DNA, 25 bp, Homo sapien
gccacagacgtccagaagcacggca

SEQ ID NO: 1973667 - DNA, 25 bp, Homo sapien
agtgtaggtatgaaagcaaaccaga

SEQ ID NO: 1973668 - DNA, 25 bp, Homo sapien
aagcaaaccagatggtgagaaaggg

SEQ ID NO: 1973669 - DNA, 25 bp, Homo sapien
tagaaccactagcacaagacagcgg

SEQ ID NO: 1973670 - DNA, 25 bp, Homo sapien
gctgcatgtgagaccatgtccagat

SEQ ID NO: 1973671 - DNA, 25 bp, Homo sapien
tcagaccttccgtcccaggatgttc

SEQ ID NO: 1973672 - DNA, 25 bp, Homo sapien
taaacctgcagtaagacctttggga

SEQ ID NO: 1973673 - DNA, 25 bp, Homo sapien
gaggcccctccgctgtggttttcac

SEQ ID NO: 1973674 - DNA, 25 bp, Homo sapien
tagcaactggtctgcgctgcataga

SEQ ID NO: 1973675 - DNA, 25 bp, Homo sapien
agcttcttctcagggccgatgtggc

SEQ ID NO: 1973676 - DNA, 25 bp, Homo sapien
tgttggattgatgcacagtccttcc

SEQ ID NO: 1973677 - DNA, 25 bp, Homo sapien
gcaagaaccgtatggcagtcagccc

SEQ ID NO: 1973678 - DNA, 25 bp, Homo sapien
gagcatctgtccttcggctcgcagg

SEQ ID NO: 1973679 - DNA, 25 bp, Homo sapien
caaggagtacgaggccactgggtac

SEQ ID NO: 1973680 - DNA, 25 bp, Homo sapien
gcaaggctgtgagcttcgagcatct

SEQ ID NO: 1973681 - DNA, 25 bp, Homo sapien
tcttactggccatgagacctggtgc

SEQ ID NO: 1973682 - DNA, 25 bp, Homo sapien
tctgaacacctgagcgggcatcaaa

SEQ ID NO: 1973683 - DNA, 25 bp, Homo sapien
caatgggtcaatggcatggccctcc

SEQ ID NO: 1973684 - DNA, 25 bp, Homo sapien
catttgacaaagtcctctggcgggc

SEQ ID NO: 1973685 - DNA, 25 bp, Homo sapien
tgtgtgggaactgaaactatgcgtg

SEQ ID NO: 1973686 - DNA, 25 bp, Homo sapien
tgatgacagagttcagcctaccacg

SEQ ID NO: 1973687 - DNA, 25 bp, Homo sapien
ttctgtagaggatctttgggctgtc

SEQ ID NO: 1973688 - DNA, 25 bp, Homo sapien
cccatgagcacacaagttggaagat

SEQ ID NO: 1973689 - DNA, 25 bp, Homo sapien
caaataaggtcccagagaatgaagc

SEQ ID NO: 1973690 - DNA, 25 bp, Homo sapien
cgaggcgtcatgtcttccagataga

SEQ ID NO: 1973691 - DNA, 25 bp, Homo sapien
gtaactaactcgatccttgcaacag

SEQ ID NO: 1973692 - DNA, 25 bp, Homo sapien
cagcactttcttggtacgaggcgtc

SEQ ID NO: 1973693 - DNA, 25 bp, Homo sapien
tgtactccgcattgcctttggtggg

SEQ ID NO: 1973694 - DNA, 25 bp, Homo sapien
ggctctgctaccaggggtctgattg

SEQ ID NO: 1973695 - DNA, 25 bp, Homo sapien
tccgcattgcctttggtgggcccag

SEQ ID NO: 1973696 - DNA, 25 bp, Homo sapien
ccctgtactccgcattgcctttggt

SEQ ID NO: 1973697 - DNA, 25 bp, Homo sapien
gggtgcgcccacctgggttccatcg

SEQ ID NO: 1973698 - DNA, 25 bp, Homo sapien
aatgcgactgaaagaacttgtctcc

SEQ ID NO: 1973699 - DNA, 25 bp, Homo sapien
ggacagcagactggtaggtgggctg

SEQ ID NO: 1973700 - DNA, 25 bp, Homo sapien
ttcagcctatgacgcagggacagca

SEQ ID NO: 1973701 - DNA, 25 bp, Homo sapien
gaactgtccagaggcctcgcagtac

SEQ ID NO: 1973702 - DNA, 25 bp, Homo sapien
tgaactgtccagaggcctcgcagta

SEQ ID NO: 1973703 - DNA, 25 bp, Homo sapien
atgaactgtccagaggcctcgcagt

SEQ ID NO: 1973704 - DNA, 25 bp, Homo sapien
ctccagaacagcctcaatgatgcca

SEQ ID NO: 1973705 - DNA, 25 bp, Homo sapien
tctccagaacagcctcaatgatgcc

SEQ ID NO: 1973706 - DNA, 25 bp, Homo sapien
tccagaacagcctcaatgatgccaa

SEQ ID NO: 1973707 - DNA, 25 bp, Homo sapien
gaccatatctggcacttggtgagca

SEQ ID NO: 1973708 - DNA, 25 bp, Homo sapien
ctgcaccacaacctcttcgacgcag

SEQ ID NO: 1973709 - DNA, 25 bp, Homo sapien
acctcttcgacgcagccctccttct

SEQ ID NO: 1973710 - DNA, 25 bp, Homo sapien
acaacctcttcgacgcagccctcct

SEQ ID NO: 1973711 - DNA, 25 bp, Homo sapien
accacaacctcttcgacgcagccct

SEQ ID NO: 1973712 - DNA, 25 bp, Homo sapien
atgccctccaaccagtactggcggg

SEQ ID NO: 1973713 - DNA, 25 bp, Homo sapien
cgccaatgtgggccggctgttctcc

SEQ ID NO: 1973714 - DNA, 25 bp, Homo sapien
tgggcaggcatgttctggcctacct

SEQ ID NO: 1973715 - DNA, 25 bp, Homo sapien
aatatacccgaaaggaccaagagat

SEQ ID NO: 1973716 - DNA, 25 bp, Homo sapien
atatacccgaaaggaccaagagatg

SEQ ID NO: 1973717 - DNA, 25 bp, Homo sapien
tatacccgaaaggaccaagagatga

SEQ ID NO: 1973718 - DNA, 25 bp, Homo sapien
ttaccgccccgcaggtagtgggtgc

SEQ ID NO: 1973719 - DNA, 25 bp, Homo sapien
cgttgttaccgccccgcaggtagtg

SEQ ID NO: 1973720 - DNA, 25 bp, Homo sapien
ccacggctggcgcgcgttgttaccg

SEQ ID NO: 1973721 - DNA, 25 bp, Homo sapien
tggcgcgcgttgttaccgccccgca

SEQ ID NO: 1973722 - DNA, 25 bp, Homo sapien
gcgcgccacaggaacggctgcttgc

SEQ ID NO: 1973723 - DNA, 25 bp, Homo sapien
agcgcgccacaggaacggctgcttg

SEQ ID NO: 1973724 - DNA, 25 bp, Homo sapien
gcagcgcgccacaggaacggctgct

SEQ ID NO: 1973725 - DNA, 25 bp, Homo sapien
cgcgccacaggaacggctgcttgcg

SEQ ID NO: 1973726 - DNA, 25 bp, Homo sapien
gtcggcgtcccgcacgtagcgcgcc

SEQ ID NO: 1973727 - DNA, 25 bp, Homo sapien
ggccgcgcttggcgcgcgcgcagta

SEQ ID NO: 1973728 - DNA, 25 bp, Homo sapien
ttggcagcgaggtgtctgtctggcc

SEQ ID NO: 1973729 - DNA, 25 bp, Homo sapien
cgaggtgtctgtctggccgcgcttg

SEQ ID NO: 1973730 - DNA, 25 bp, Homo sapien
gcagcgaggtgtctgtctggccgcg

SEQ ID NO: 1973731 - DNA, 25 bp, Homo sapien
tgtcccagaatgcacaggatgccgt

SEQ ID NO: 1973732 - DNA, 25 bp, Homo sapien
gatgtcccagaatgcacaggatgcc

SEQ ID NO: 1973733 - DNA, 25 bp, Homo sapien
ccagaatgcacaggatgccgttcag

SEQ ID NO: 1973734 - DNA, 25 bp, Homo sapien
ctggcgatgtcccagaatgcacagg

SEQ ID NO: 1973735 - DNA, 25 bp, Homo sapien
gggccgcaggtggtccacatcctca

SEQ ID NO: 1973736 - DNA, 25 bp, Homo sapien
cgcaggtggtccacatcctcatagg

SEQ ID NO: 1973737 - DNA, 25 bp, Homo sapien
ctgccggtagcgtgccaagtcctgc

SEQ ID NO: 1973738 - DNA, 25 bp, Homo sapien
cagctgctgccggtagcgtgccaag

SEQ ID NO: 1973739 - DNA, 25 bp, Homo sapien
tccatgtgagggacaagagtgtcca

SEQ ID NO: 1973740 - DNA, 25 bp, Homo sapien
cacagaacagattcgcaaaagtggg

SEQ ID NO: 1973741 - DNA, 25 bp, Homo sapien
gatttttgccacaatgaacagtgcc

SEQ ID NO: 1973742 - DNA, 25 bp, Homo sapien
taatggacataaggttgcttccgga

SEQ ID NO: 1973743 - DNA, 25 bp, Homo sapien
tccaaaccattaagcctgagaactt

SEQ ID NO: 1973744 - DNA, 25 bp, Homo sapien
cacagtctggacgtgtgtgatcatc

SEQ ID NO: 1973745 - DNA, 25 bp, Homo sapien
cgccgtctggcttcaagtgtctgca

SEQ ID NO: 1973746 - DNA, 25 bp, Homo sapien
ttgggcttttgctctgccgtacgcc

SEQ ID NO: 1973747 - DNA, 25 bp, Homo sapien
cagccttggagcagctctgggtgct

SEQ ID NO: 1973748 - DNA, 25 bp, Homo sapien
caactggcgggtaaacctgcccttg

SEQ ID NO: 1973749 - DNA, 25 bp, Homo sapien
tgtgccatcccatgatggcctcacg

SEQ ID NO: 1973750 - DNA, 25 bp, Homo sapien
aaagagactctgcaccctgtaacca

SEQ ID NO: 1973751 - DNA, 25 bp, Homo sapien
tctgttctttggtagaattagtgca

SEQ ID NO: 1973752 - DNA, 25 bp, Homo sapien
tggtagaattagtgcaaggcttgcc

SEQ ID NO: 1973753 - DNA, 25 bp, Homo sapien
ttgaacacataactgagagctcagc

SEQ ID NO: 1973754 - DNA, 25 bp, Homo sapien
caaaccctcccataaatgccaacat

SEQ ID NO: 1973755 - DNA, 25 bp, Homo sapien
tggctacacttgatgctaggaagct

SEQ ID NO: 1973756 - DNA, 25 bp, Homo sapien
tgccaaagtcaatggtcgcgtatat

SEQ ID NO: 1973757 - DNA, 25 bp, Homo sapien
ctaggaagcttaagggagtccactt

SEQ ID NO: 1973758 - DNA, 25 bp, Homo sapien
tgtgcttccgtctgccacctcgtag

SEQ ID NO: 1973759 - DNA, 25 bp, Homo sapien
tgttctgtagctatgcctaattcgt

SEQ ID NO: 1973760 - DNA, 25 bp, Homo sapien
ccatctgatgttagtatacccttag

SEQ ID NO: 1973761 - DNA, 25 bp, Homo sapien
ggcaacaaatggaagtagctccttt

SEQ ID NO: 1973762 - DNA, 25 bp, Homo sapien
ttgcagcttttatccatgacccagg

SEQ ID NO: 1973763 - DNA, 25 bp, Homo sapien
agtgctgcgatgagcaacccttcct

SEQ ID NO: 1973764 - DNA, 25 bp, Homo sapien
cctgatgtcgcgatgtcctctttca

SEQ ID NO: 1973765 - DNA, 25 bp, Homo sapien
tgcgatgagcaacccttcctgatgt

SEQ ID NO: 1973766 - DNA, 25 bp, Homo sapien
atgagcaacccttcctgatgtcgcg

SEQ ID NO: 1973767 - DNA, 25 bp, Homo sapien
gctataatgagtccatggaggcccc

SEQ ID NO: 1973768 - DNA, 25 bp, Homo sapien
gagagaaaagcgtgcaagtaagtgc

SEQ ID NO: 1973769 - DNA, 25 bp, Homo sapien
tgcaagtaagtgctccgtgaggagt

SEQ ID NO: 1973770 - DNA, 25 bp, Homo sapien
agtggagggacagctataatgagtc

SEQ ID NO: 1973771 - DNA, 25 bp, Homo sapien
ctccaaatgggagtttttattgcac

SEQ ID NO: 1973772 - DNA, 25 bp, Homo sapien
ccactgacgtgtgctgggtgcaatt

SEQ ID NO: 1973773 - DNA, 25 bp, Homo sapien
tacctgtgttgtgtttcccgcacct

SEQ ID NO: 1973774 - DNA, 25 bp, Homo sapien
tcataaccgtaatccggtacctgtg

SEQ ID NO: 1973775 - DNA, 25 bp, Homo sapien
tcacagtgggctccgaagtaccaga

SEQ ID NO: 1973776 - DNA, 25 bp, Homo sapien
taagtgaatcccagtgcgtcagaac

SEQ ID NO: 1973777 - DNA, 25 bp, Homo sapien
actgtgttccttgggtgttgctgcc

SEQ ID NO: 1973778 - DNA, 25 bp, Homo sapien
aagatccccacatgattccaacagg

SEQ ID NO: 1973779 - DNA, 25 bp, Homo sapien
gacgggttattctgaactccaacag

SEQ ID NO: 1973780 - DNA, 25 bp, Homo sapien
gggcacagacgggttattctgaact

SEQ ID NO: 1973781 - DNA, 25 bp, Homo sapien
cacagacgggttattctgaactcca

SEQ ID NO: 1973782 - DNA, 25 bp, Homo sapien
actgggggcacagacgggttattct

SEQ ID NO: 1973783 - DNA, 25 bp, Homo sapien
agcttgacaatcatcggcataaggg

SEQ ID NO: 1973784 - DNA, 25 bp, Homo sapien
gaccagagctagttgccaaaaacca

SEQ ID NO: 1973785 - DNA, 25 bp, Homo sapien
gacaatcatcggcataagggcttaa

SEQ ID NO: 1973786 - DNA, 25 bp, Homo sapien
cataagggcttaacagaccagagct

SEQ ID NO: 1973787 - DNA, 25 bp, Homo sapien
cacatgaagtggtctggcaaagtaa

SEQ ID NO: 1973788 - DNA, 25 bp, Homo sapien
agcacatgaagtggtctggcaaagt

SEQ ID NO: 1973789 - DNA, 25 bp, Homo sapien
tcctgctgctttactgccaagccag

SEQ ID NO: 1973790 - DNA, 25 bp, Homo sapien
tgactcctgctgctttactgccaag

SEQ ID NO: 1973791 - DNA, 25 bp, Homo sapien
cccatttccaacagttctagcctta

SEQ ID NO: 1973792 - DNA, 25 bp, Homo sapien
cagttctagccttatctcccatcat

SEQ ID NO: 1973793 - DNA, 25 bp, Homo sapien
ttccccatttccaacagttctagcc

SEQ ID NO: 1973794 - DNA, 25 bp, Homo sapien
ttccaacagttctagccttatctcc

SEQ ID NO: 1973795 - DNA, 25 bp, Homo sapien
gcagtcacctgccccggctgccgtc

SEQ ID NO: 1973796 - DNA, 25 bp, Homo sapien
agtcacctgccccggctgccgtcat

SEQ ID NO: 1973797 - DNA, 25 bp, Homo sapien
ctgcagtcacctgccccggctgccg

SEQ ID NO: 1973798 - DNA, 25 bp, Homo sapien
tgcagtcacctgccccggctgccgt

SEQ ID NO: 1973799 - DNA, 25 bp, Homo sapien
ctgcgttaacgatgcagatggtgcc

SEQ ID NO: 1973800 - DNA, 25 bp, Homo sapien
ggttcagggatccttgggcggcttc

SEQ ID NO: 1973801 - DNA, 25 bp, Homo sapien
cttgggcggcttctgtcctataggc

SEQ ID NO: 1973802 - DNA, 25 bp, Homo sapien
ttgggcggcttctgtcctataggca

SEQ ID NO: 1973803 - DNA, 25 bp, Homo sapien
tacggttcagggatccttgggcggc

SEQ ID NO: 1973804 - DNA, 25 bp, Homo sapien
gacggtgccagaattctctctgctg

SEQ ID NO: 1973805 - DNA, 25 bp, Homo sapien
ctgctgtgcctctggatggtaatgt

SEQ ID NO: 1973806 - DNA, 25 bp, Homo sapien
cctctggatggtaatgtagtgcttt

SEQ ID NO: 1973807 - DNA, 25 bp, Homo sapien
taggtgaagacggtgccagaattct

SEQ ID NO: 1973808 - DNA, 25 bp, Homo sapien
gcagatgctcttctcccgactcttg

SEQ ID NO: 1973809 - DNA, 25 bp, Homo sapien
gctttgccagggcacactgatatgt

SEQ ID NO: 1973810 - DNA, 25 bp, Homo sapien
tcttgagctctgctgtgtagttcac

SEQ ID NO: 1973811 - DNA, 25 bp, Homo sapien
tgtccttccgggattcgctcttcag

SEQ ID NO: 1973812 - DNA, 25 bp, Homo sapien
atcctgtcctctgataccaacacac

SEQ ID NO: 1973813 - DNA, 25 bp, Homo sapien
tcatcctgtcctctgataccaacac

SEQ ID NO: 1973814 - DNA, 25 bp, Homo sapien
catcctgtcctctgataccaacaca

SEQ ID NO: 1973815 - DNA, 25 bp, Homo sapien
agcagccacgtcactgtttctcctg

SEQ ID NO: 1973816 - DNA, 25 bp, Homo sapien
agccacgtcactgtttctcctgtgg

SEQ ID NO: 1973817 - DNA, 25 bp, Homo sapien
tgcactaccagcagccacgtcactg

SEQ ID NO: 1973818 - DNA, 25 bp, Homo sapien
taccagcagccacgtcactgtttct

SEQ ID NO: 1973819 - DNA, 25 bp, Homo sapien
ctgccatggtcacggaatcagccaa

SEQ ID NO: 1973820 - DNA, 25 bp, Homo sapien
tcagccaagtaaacacatggggagc

SEQ ID NO: 1973821 - DNA, 25 bp, Homo sapien
taaacacatggggagctctcggatg

SEQ ID NO: 1973822 - DNA, 25 bp, Homo sapien
ggccttctcctggcgatagtcctgc

SEQ ID NO: 1973823 - DNA, 25 bp, Homo sapien
cacacctgggtggacctgtgtctgt

SEQ ID NO: 1973824 - DNA, 25 bp, Homo sapien
acacctgggtggacctgtgtctgtc

SEQ ID NO: 1973825 - DNA, 25 bp, Homo sapien
tgcacacctgggtggacctgtgtct

SEQ ID NO: 1973826 - DNA, 25 bp, Homo sapien
ctgtgcacacctgggtggacctgtg

SEQ ID NO: 1973827 - DNA, 25 bp, Homo sapien
aacattgagatgagcatgaatgatg

SEQ ID NO: 1973828 - DNA, 25 bp, Homo sapien
caacattgagatgagcatgaatgat

SEQ ID NO: 1973829 - DNA, 25 bp, Homo sapien
acattgagatgagcatgaatgatga

SEQ ID NO: 1973830 - DNA, 25 bp, Homo sapien
ccaacattgagatgagcatgaatga

SEQ ID NO: 1973831 - DNA, 25 bp, Homo sapien
atacgtccggagtcttgcgcccctt

SEQ ID NO: 1973832 - DNA, 25 bp, Homo sapien
tgcgcagtgtcttcactggagttgt

SEQ ID NO: 1973833 - DNA, 25 bp, Homo sapien
gggttttatgcgttggcatacgtcc

SEQ ID NO: 1973834 - DNA, 25 bp, Homo sapien
tgcctgcccgcacttgggaagagag

SEQ ID NO: 1973835 - DNA, 25 bp, Homo sapien
gtttaagggccaacagtattctgca

SEQ ID NO: 1973836 - DNA, 25 bp, Homo sapien
tattctgcacatcacaacaagcgcc

SEQ ID NO: 1973837 - DNA, 25 bp, Homo sapien
caagcgccttcaaatacaggacaga

SEQ ID NO: 1973838 - DNA, 25 bp, Homo sapien
taactgttatactgaaaggaagacc

SEQ ID NO: 1973839 - DNA, 25 bp, Homo sapien
ctgttctctttagcgtcagatgctt

SEQ ID NO: 1973840 - DNA, 25 bp, Homo sapien
gaaatgagagaagaaggccttgcat

SEQ ID NO: 1973841 - DNA, 25 bp, Homo sapien
ttctcatgcgttgcttcaggtcctc

SEQ ID NO: 1973842 - DNA, 25 bp, Homo sapien
cagtcccaaaagtggactgcagtgg

SEQ ID NO: 1973843 - DNA, 25 bp, Homo sapien
ttatacttttctggggagatcaagg

SEQ ID NO: 1973844 - DNA, 25 bp, Homo sapien
tacttttctggggagatcaaggaaa

SEQ ID NO: 1973845 - DNA, 25 bp, Homo sapien
tcaatctcctgaagtttatactttt

SEQ ID NO: 1973846 - DNA, 25 bp, Homo sapien
tatacttttctggggagatcaagga

SEQ ID NO: 1973847 - DNA, 25 bp, Homo sapien
gatcaagtactctaacaagccttcc

SEQ ID NO: 1973848 - DNA, 25 bp, Homo sapien
gcaaaatttctagagttcctggcat

SEQ ID NO: 1973849 - DNA, 25 bp, Homo sapien
ttatctcatcccgtaatagggcaaa

SEQ ID NO: 1973850 - DNA, 25 bp, Homo sapien
tcctggcatggatcaagtactctaa

SEQ ID NO: 1973851 - DNA, 25 bp, Homo sapien
ccttgtctaagatggtttttatctg

SEQ ID NO: 1973852 - DNA, 25 bp, Homo sapien
accaaggtctccttgtctaagatgg

SEQ ID NO: 1973853 - DNA, 25 bp, Homo sapien
tccaagtgggtcctgtcacagcctt

SEQ ID NO: 1973854 - DNA, 25 bp, Homo sapien
ctccaagtgggtcctgtcacagcct

SEQ ID NO: 1973855 - DNA, 25 bp, Homo sapien
gccttccgaatattttatggccctc

SEQ ID NO: 1973856 - DNA, 25 bp, Homo sapien
gcctggcctggccttccgaatattt

SEQ ID NO: 1973857 - DNA, 25 bp, Homo sapien
ttctcattccggcacctacctgaaa

SEQ ID NO: 1973858 - DNA, 25 bp, Homo sapien
tccggcacctacctgaaagcttgtc

SEQ ID NO: 1973859 - DNA, 25 bp, Homo sapien
gattctggatggaagcattgctgaa

SEQ ID NO: 1973860 - DNA, 25 bp, Homo sapien
gcccaatatctgatggagtcaacgc

SEQ ID NO: 1973861 - DNA, 25 bp, Homo sapien
gacatatgccgacctagatggagac

SEQ ID NO: 1973862 - DNA, 25 bp, Homo sapien
tctccatagtgagcaaagacacatt

SEQ ID NO: 1973863 - DNA, 25 bp, Homo sapien
tcaaggtatcaagcgtcggcctacg

SEQ ID NO: 1973864 - DNA, 25 bp, Homo sapien
tgaaacttggtccagaagcccacca

SEQ ID NO: 1973865 - DNA, 25 bp, Homo sapien
gcttccttcaatggcagcattcctg

SEQ ID NO: 1973866 - DNA, 25 bp, Homo sapien
gatgggcctcagtaatgttttttcc

SEQ ID NO: 1973867 - DNA, 25 bp, Homo sapien
gaaaccattgcatgtctcagctgga

SEQ ID NO: 1973868 - DNA, 25 bp, Homo sapien
gatttacatcaagaggctggtctcc

SEQ ID NO: 1973869 - DNA, 25 bp, Homo sapien
tggagtctgagcacggatctgtctg

SEQ ID NO: 1973870 - DNA, 25 bp, Homo sapien
gccaaaccttgccacggagggctat

SEQ ID NO: 1973871 - DNA, 25 bp, Homo sapien
gcttgaggacaatcaatatccagat

SEQ ID NO: 1973872 - DNA, 25 bp, Homo sapien
gatcaagatgaccaaaatggctctg

SEQ ID NO: 1973873 - DNA, 25 bp, Homo sapien
caatatccagatcaagatgaccaaa

SEQ ID NO: 1973874 - DNA, 25 bp, Homo sapien
tctgcttgaggacaatcaatatcca

SEQ ID NO: 1973875 - DNA, 25 bp, Homo sapien
tgctgaggaaatcgtggccagatga

SEQ ID NO: 1973876 - DNA, 25 bp, Homo sapien
tagcaagatgtgctgacttttggcc

SEQ ID NO: 1973877 - DNA, 25 bp, Homo sapien
agctgctgaggaaatcgtggccaga

SEQ ID NO: 1973878 - DNA, 25 bp, Homo sapien
gatgtgctgacttttggccttctct

SEQ ID NO: 1973879 - DNA, 25 bp, Homo sapien
cagcagaaagaacttgcactctcac

SEQ ID NO: 1973880 - DNA, 25 bp, Homo sapien
gtttgcttcgaagttccctagagga

SEQ ID NO: 1973881 - DNA, 25 bp, Homo sapien
tctagcagggtcaaagaagagcgac

SEQ ID NO: 1973882 - DNA, 25 bp, Homo sapien
gcactctcactgtgcctcagggtga

SEQ ID NO: 1973883 - DNA, 25 bp, Homo sapien
tggaggataatcacagtcgtgattt

SEQ ID NO: 1973884 - DNA, 25 bp, Homo sapien
aacaaaatacagctacataggggac

SEQ ID NO: 1973885 - DNA, 25 bp, Homo sapien
aatcacagtcgtgattttcactgtc

SEQ ID NO: 1973886 - DNA, 25 bp, Homo sapien
caaaatacagctacataggggactg

SEQ ID NO: 1973887 - DNA, 25 bp, Homo sapien
cagtcctcaggggtgtcactactca

SEQ ID NO: 1973888 - DNA, 25 bp, Homo sapien
taacccatgtgcttctcatagatcc

SEQ ID NO: 1973889 - DNA, 25 bp, Homo sapien
ctgggaacgaacagggcatgggaca

SEQ ID NO: 1973890 - DNA, 25 bp, Homo sapien
tcactactcacacctctaacccatg

SEQ ID NO: 1973891 - DNA, 25 bp, Homo sapien
ttcttctcggtttcttcagccccat

SEQ ID NO: 1973892 - DNA, 25 bp, Homo sapien
tttcattcttctcggtttcttcagc

SEQ ID NO: 1973893 - DNA, 25 bp, Homo sapien
tcattcttctcggtttcttcagccc

SEQ ID NO: 1973894 - DNA, 25 bp, Homo sapien
cttttcattcttctcggtttcttca

SEQ ID NO: 1973895 - DNA, 25 bp, Homo sapien
agggccttggatcgctgtcccacca

SEQ ID NO: 1973896 - DNA, 25 bp, Homo sapien
ccttggatcgctgtcccaccagggt

SEQ ID NO: 1973897 - DNA, 25 bp, Homo sapien
acccagggtgacgtgcctaccactg

SEQ ID NO: 1973898 - DNA, 25 bp, Homo sapien
aatgagagggccttggatcgctgtc

SEQ ID NO: 1973899 - DNA, 25 bp, Homo sapien
tccggatcgctgtcccacgcagagt

SEQ ID NO: 1973900 - DNA, 25 bp, Homo sapien
gtcccacacagggtgaagtgcccac

SEQ ID NO: 1973901 - DNA, 25 bp, Homo sapien
gtcctgtccagggtgacgtgcccac

SEQ ID NO: 1973902 - DNA, 25 bp, Homo sapien
gcagagtgacgtgctccacactgag

SEQ ID NO: 1973903 - DNA, 25 bp, Homo sapien
atcgctgtcccgcccagggtgacat

SEQ ID NO: 1973904 - DNA, 25 bp, Homo sapien
gggggccctggattgctgtcccacc

SEQ ID NO: 1973905 - DNA, 25 bp, Homo sapien
aatgagggggtcatggatcgctgtc

SEQ ID NO: 1973906 - DNA, 25 bp, Homo sapien
cgctgtcccgcccagggtgacatct

SEQ ID NO: 1973907 - DNA, 25 bp, Homo sapien
tgagggggtcatggatcgctgtctc

SEQ ID NO: 1973908 - DNA, 25 bp, Homo sapien
atgagggggtcatggatcgctgtct

SEQ ID NO: 1973909 - DNA, 25 bp, Homo sapien
gccagccagggtggcatgccccata

SEQ ID NO: 1973910 - DNA, 25 bp, Homo sapien
gaagtgccccacattgaggaatgag

SEQ ID NO: 1973911 - DNA, 25 bp, Homo sapien
catgccccatactgaggagtgaggg

SEQ ID NO: 1973912 - DNA, 25 bp, Homo sapien
ccccggatctgggtgaagtgcccca

SEQ ID NO: 1973913 - DNA, 25 bp, Homo sapien
tgttttttcgctctgaccgtctcta

SEQ ID NO: 1973914 - DNA, 25 bp, Homo sapien
gatgttgccttgtgtccttgctctg

SEQ ID NO: 1973915 - DNA, 25 bp, Homo sapien
gtctctaccgccacattctgtgtct

SEQ ID NO: 1973916 - DNA, 25 bp, Homo sapien
tcttacatactctggccactcttgg

SEQ ID NO: 1973917 - DNA, 25 bp, Homo sapien
ttcaatgtggcatttcaaggacttt

SEQ ID NO: 1973918 - DNA, 25 bp, Homo sapien
gtagaaaacagttcaatgtggcatt

SEQ ID NO: 1973919 - DNA, 25 bp, Homo sapien
tagaaaacagttcaatgtggcattt

SEQ ID NO: 1973920 - DNA, 25 bp, Homo sapien
cagttcaatgtggcatttcaaggac

SEQ ID NO: 1973921 - DNA, 25 bp, Homo sapien
tgccttggactgtccgttttcagag

SEQ ID NO: 1973922 - DNA, 25 bp, Homo sapien
ttttcagaggatgccctaactttcc

SEQ ID NO: 1973923 - DNA, 25 bp, Homo sapien
tggactgtccgttttcagaggatgc

SEQ ID NO: 1973924 - DNA, 25 bp, Homo sapien
taactttccaggttgtgtgcctggt

SEQ ID NO: 1973925 - DNA, 25 bp, Homo sapien
atgaagtgcacatggccatccccag

SEQ ID NO: 1973926 - DNA, 25 bp, Homo sapien
ccacacaagggtcagagaggactgt

SEQ ID NO: 1973927 - DNA, 25 bp, Homo sapien
tgtgtatgaagtgcacatggccatc

SEQ ID NO: 1973928 - DNA, 25 bp, Homo sapien
gggatctgaccctgtgtgactgagc

SEQ ID NO: 1973929 - DNA, 25 bp, Homo sapien
gatccagtgacatctgagaccatct

SEQ ID NO: 1973930 - DNA, 25 bp, Homo sapien
aattatctgcttctcgtcatgctca

SEQ ID NO: 1973931 - DNA, 25 bp, Homo sapien
ttgacatatctattcaggaagtgac

SEQ ID NO: 1973932 - DNA, 25 bp, Homo sapien
catcttttgttatgcacccctggtt

SEQ ID NO: 1973933 - DNA, 25 bp, Homo sapien
ttttgttgttctgtcaacggtaaca

SEQ ID NO: 1973934 - DNA, 25 bp, Homo sapien
tccctgagaatccaccaagaaaggt

SEQ ID NO: 1973935 - DNA, 25 bp, Homo sapien
tgccagaggatgaaggtacagctcc

SEQ ID NO: 1973936 - DNA, 25 bp, Homo sapien
tgtcaacggtaacattgttgctgcc

SEQ ID NO: 1973937 - DNA, 25 bp, Homo sapien
cttagctaaagcaaataatcttttt

SEQ ID NO: 1973938 - DNA, 25 bp, Homo sapien
ttagctaaagcaaataatctttttc

SEQ ID NO: 1973939 - DNA, 25 bp, Homo sapien
tagctaaagcaaataatctttttcc

SEQ ID NO: 1973940 - DNA, 25 bp, Homo sapien
agctaaagcaaataatctttttcct

SEQ ID NO: 1973941 - DNA, 25 bp, Homo sapien
acaggcattttgttttctgcggaaa

SEQ ID NO: 1973942 - DNA, 25 bp, Homo sapien
taaatatgacatttttagctcctct

SEQ ID NO: 1973943 - DNA, 25 bp, Homo sapien
atgacaggcattttgttttctgcgg

SEQ ID NO: 1973944 - DNA, 25 bp, Homo sapien
aatcctgtttcctttaaatatgaca

SEQ ID NO: 1973945 - DNA, 25 bp, Homo sapien
ctggctaattcccatttggagtcca

SEQ ID NO: 1973946 - DNA, 25 bp, Homo sapien
tggctaattcccatttggagtccat

SEQ ID NO: 1973947 - DNA, 25 bp, Homo sapien
tcaacatcttgtgctaccagctgga

SEQ ID NO: 1973948 - DNA, 25 bp, Homo sapien
ctaagacagaatgtttgaggagatg

SEQ ID NO: 1973949 - DNA, 25 bp, Homo sapien
ccagctggatacattgtgtgctcaa

SEQ ID NO: 1973950 - DNA, 25 bp, Homo sapien
gacagaatgtttgaggagatggaca

SEQ ID NO: 1973951 - DNA, 25 bp, Homo sapien
tgaggacccctgcaaagcatttgtg

SEQ ID NO: 1973952 - DNA, 25 bp, Homo sapien
ctcagagactgcagatgtggcgtct

SEQ ID NO: 1973953 - DNA, 25 bp, Homo sapien
gactgcagatgtggcgtctcctttt

SEQ ID NO: 1973954 - DNA, 25 bp, Homo sapien
tcctgaggacccctgcaaagcattt

SEQ ID NO: 1973955 - DNA, 25 bp, Homo sapien
tgctggctggtcaatactgtgaagc

SEQ ID NO: 1973956 - DNA, 25 bp, Homo sapien
gaagcccactttagaatctctgatt

SEQ ID NO: 1973957 - DNA, 25 bp, Homo sapien
gaatctctgattacactcttatgct

SEQ ID NO: 1973958 - DNA, 25 bp, Homo sapien
ctggctggtcaatactgtgaagccc

SEQ ID NO: 1973959 - DNA, 25 bp, Homo sapien
tggcagccagcctatcaaaggtcag

SEQ ID NO: 1973960 - DNA, 25 bp, Homo sapien
aagaggaaccttgcgctgagctgag

SEQ ID NO: 1973961 - DNA, 25 bp, Homo sapien
agaatccagcatccgggttgtcagg

SEQ ID NO: 1973962 - DNA, 25 bp, Homo sapien
agaggcacagaaaccggcagaatcc

SEQ ID NO: 1973963 - DNA, 25 bp, Homo sapien
ctgtgttctaactgaggtctgactt

SEQ ID NO: 1973964 - DNA, 25 bp, Homo sapien
tgttctaactgaggtctgacttggg

SEQ ID NO: 1973965 - DNA, 25 bp, Homo sapien
ctcgcttcacgttgcaaatgaaagc

SEQ ID NO: 1973966 - DNA, 25 bp, Homo sapien
tgacttggggcaactcgcttcacgt

SEQ ID NO: 1973967 - DNA, 25 bp, Homo sapien
aatcagtctgcaattggaagggggc

SEQ ID NO: 1973968 - DNA, 25 bp, Homo sapien
ccagacgcaaaacaagctggcatga

SEQ ID NO: 1973969 - DNA, 25 bp, Homo sapien
ctctggagacagatcactgggggcc

SEQ ID NO: 1973970 - DNA, 25 bp, Homo sapien
gagacagatcactgggggcccaatg

SEQ ID NO: 1973971 - DNA, 25 bp, Homo sapien
tcagcttctcctccgttccgaagcc

SEQ ID NO: 1973972 - DNA, 25 bp, Homo sapien
ccggacgtccatttgcagctgcact

SEQ ID NO: 1973973 - DNA, 25 bp, Homo sapien
cgttccgaagccctgcagtggctct

SEQ ID NO: 1973974 - DNA, 25 bp, Homo sapien
gctgcactgaagtatctcagcttct

SEQ ID NO: 1973975 - DNA, 25 bp, Homo sapien
tctttacaaatatccgaatatctga

SEQ ID NO: 1973976 - DNA, 25 bp, Homo sapien
tgaaaagtcaccgttatctttacaa

SEQ ID NO: 1973977 - DNA, 25 bp, Homo sapien
cagaacttgaaaagtcaccgttatc

SEQ ID NO: 1973978 - DNA, 25 bp, Homo sapien
agaacttgaaaagtcaccgttatct

SEQ ID NO: 1973979 - DNA, 25 bp, Homo sapien
gaattctgcacagactggcttgctc

SEQ ID NO: 1973980 - DNA, 25 bp, Homo sapien
ttgaattctgcacagactggcttgc

SEQ ID NO: 1973981 - DNA, 25 bp, Homo sapien
tgaattctgcacagactggcttgct

SEQ ID NO: 1973982 - DNA, 25 bp, Homo sapien
aatagccctggcgtttgttttctct

SEQ ID NO: 1973983 - DNA, 25 bp, Homo sapien
tttctctgaagtcaaaggaactcat

SEQ ID NO: 1973984 - DNA, 25 bp, Homo sapien
tacagaatcatggagactgtgcaca

SEQ ID NO: 1973985 - DNA, 25 bp, Homo sapien
aatagcatgaacaagatgtgtgagc

SEQ ID NO: 1973986 - DNA, 25 bp, Homo sapien
tgagcatgtttagattcgaattggc

SEQ ID NO: 1973987 - DNA, 25 bp, Homo sapien
ctgctcctaatacagaatcatggag

SEQ ID NO: 1973988 - DNA, 25 bp, Homo sapien
gcaagctggtaatcttgaactgaag

SEQ ID NO: 1973989 - DNA, 25 bp, Homo sapien
gcaccacggaagtgaattagagaga

SEQ ID NO: 1973990 - DNA, 25 bp, Homo sapien
cagagttgggccgtccctgctcctg

SEQ ID NO: 1973991 - DNA, 25 bp, Homo sapien
aggaagaaggatgaagacccttagc

SEQ ID NO: 1973992 - DNA, 25 bp, Homo sapien
tccatctttaccctgtgtggtgcta

SEQ ID NO: 1973993 - DNA, 25 bp, Homo sapien
tctttaccctgtgtggtgctagatg

SEQ ID NO: 1973994 - DNA, 25 bp, Homo sapien
ccctgtgtggtgctagatgtgcctt

SEQ ID NO: 1973995 - DNA, 25 bp, Homo sapien
ttaccctgtgtggtgctagatgtgc

SEQ ID NO: 1973996 - DNA, 25 bp, Homo sapien
tcaagggcacgcttctaagttttgc

SEQ ID NO: 1973997 - DNA, 25 bp, Homo sapien
gcccttaagttttcatctcggtcca

SEQ ID NO: 1973998 - DNA, 25 bp, Homo sapien
catttgtgacgagactgtgggtgcc

SEQ ID NO: 1973999 - DNA, 25 bp, Homo sapien
gaacaagccgttcgtctgctcctta

SEQ ID NO: 1974000 - DNA, 25 bp, Homo sapien
gcctgagtccactttgatcctggac

SEQ ID NO: 1974001 - DNA, 25 bp, Homo sapien
tgtggtgcccgcacactgttcacct

SEQ ID NO: 1974002 - DNA, 25 bp, Homo sapien
gggcgacaagataataaccttggcc

SEQ ID NO: 1974003 - DNA, 25 bp, Homo sapien
accttggccaacatgcaaactgcgt

SEQ ID NO: 1974004 - DNA, 25 bp, Homo sapien
ggtcaggacagttgccgggagagtt

SEQ ID NO: 1974005 - DNA, 25 bp, Homo sapien
ctgtagcgtgattggtgagggtcag

SEQ ID NO: 1974006 - DNA, 25 bp, Homo sapien
tctgggaggcgtcttttcaacaaac

SEQ ID NO: 1974007 - DNA, 25 bp, Homo sapien
gacagttgccgggagagtttttgta

SEQ ID NO: 1974008 - DNA, 25 bp, Homo sapien
catcttgaccgaggttgatcacacc

SEQ ID NO: 1974009 - DNA, 25 bp, Homo sapien
ttctttgtgcaagcaatcgaatggg

SEQ ID NO: 1974010 - DNA, 25 bp, Homo sapien
gagcgcttttcaccaagtagtaact

SEQ ID NO: 1974011 - DNA, 25 bp, Homo sapien
aactgtatttacagagggcgtggcc

SEQ ID NO: 1974012 - DNA, 25 bp, Homo sapien
aattcctctcgtaagaatgccgggc

SEQ ID NO: 1974013 - DNA, 25 bp, Homo sapien
tgcgttctgggagtcggaccgtttc

SEQ ID NO: 1974014 - DNA, 25 bp, Homo sapien
gacgcccagacaagcgttgcaccgt

SEQ ID NO: 1974015 - DNA, 25 bp, Homo sapien
caggcagtgcctgtgacattgaatt

SEQ ID NO: 1974016 - DNA, 25 bp, Homo sapien
gacttcttaacaaagtgaagggctc

SEQ ID NO: 1974017 - DNA, 25 bp, Homo sapien
taacaaagtgaagggctctggtgct

SEQ ID NO: 1974018 - DNA, 25 bp, Homo sapien
tcttaacaaagtgaagggctctggt

SEQ ID NO: 1974019 - DNA, 25 bp, Homo sapien
cttcttaacaaagtgaagggctctg

SEQ ID NO: 1974020 - DNA, 25 bp, Homo sapien
gaccgacgcgatggcctcagaagtg

SEQ ID NO: 1974021 - DNA, 25 bp, Homo sapien
gagtctggtccgctttccgagggca

SEQ ID NO: 1974022 - DNA, 25 bp, Homo sapien
ctttccgagggcacttgaggaggac

SEQ ID NO: 1974023 - DNA, 25 bp, Homo sapien
gcagtaggtgagtctggtccgcttt

SEQ ID NO: 1974024 - DNA, 25 bp, Homo sapien
cattgaaggtggagaagcgcgcgcc

SEQ ID NO: 1974025 - DNA, 25 bp, Homo sapien
ctgggcgacgggacggcgctggttt

SEQ ID NO: 1974026 - DNA, 25 bp, Homo sapien
tgagggcttcgaaagtttcattgaa

SEQ ID NO: 1974027 - DNA, 25 bp, Homo sapien
acacgcccgtccccgagtgagggct

SEQ ID NO: 1974028 - DNA, 25 bp, Homo sapien
caactttgcactgcctgctgatgtt

SEQ ID NO: 1974029 - DNA, 25 bp, Homo sapien
tatggaatcacttcagatggcaatc

SEQ ID NO: 1974030 - DNA, 25 bp, Homo sapien
gacactcgaggttatttcaggactg

SEQ ID NO: 1974031 - DNA, 25 bp, Homo sapien
tatcacctgatggttctcttgagct

SEQ ID NO: 1974032 - DNA, 25 bp, Homo sapien
atcgacagctccagaatgaaactgg

SEQ ID NO: 1974033 - DNA, 25 bp, Homo sapien
tgtgagaggaatgggagttcgaaca

SEQ ID NO: 1974034 - DNA, 25 bp, Homo sapien
cagctccagaatgaaactggaaaga

SEQ ID NO: 1974035 - DNA, 25 bp, Homo sapien
tcgaacatgtaaacccaggacagtg

SEQ ID NO: 1974036 - DNA, 25 bp, Homo sapien
ggcccagataggtgttcttctctcc

SEQ ID NO: 1974037 - DNA, 25 bp, Homo sapien
agattaagctggcagccccctggaa

SEQ ID NO: 1974038 - DNA, 25 bp, Homo sapien
ggaaagcaggcctagtgaccgtcat

SEQ ID NO: 1974039 - DNA, 25 bp, Homo sapien
cagaaagtggcccagataggtgttc

SEQ ID NO: 1974040 - DNA, 25 bp, Homo sapien
actctgtactctcctgtgtacgtca

SEQ ID NO: 1974041 - DNA, 25 bp, Homo sapien
tggatcactctgtactctcctgtgt

SEQ ID NO: 1974042 - DNA, 25 bp, Homo sapien
tcactctgtactctcctgtgtacgt

SEQ ID NO: 1974043 - DNA, 25 bp, Homo sapien
cactctgtactctcctgtgtacgtc

SEQ ID NO: 1974044 - DNA, 25 bp, Homo sapien
gatgggtcttatggcttccatctcc

SEQ ID NO: 1974045 - DNA, 25 bp, Homo sapien
atctcctgtggttcgagcttgactt

SEQ ID NO: 1974046 - DNA, 25 bp, Homo sapien
tcctgtggttcgagcttgacttaca

SEQ ID NO: 1974047 - DNA, 25 bp, Homo sapien
tggttcgagcttgacttacattcag

SEQ ID NO: 1974048 - DNA, 25 bp, Homo sapien
tggccagccttttatccggcacaca

SEQ ID NO: 1974049 - DNA, 25 bp, Homo sapien
tcacgcttcaccgtaaaaccattgt

SEQ ID NO: 1974050 - DNA, 25 bp, Homo sapien
gcggaatgctttagtctgactgcca

SEQ ID NO: 1974051 - DNA, 25 bp, Homo sapien
tccagcagtggtatttggccagcct

SEQ ID NO: 1974052 - DNA, 25 bp, Homo sapien
taattctctttctgcttggccccat

SEQ ID NO: 1974053 - DNA, 25 bp, Homo sapien
tttaattctctttctgcttggcccc

SEQ ID NO: 1974054 - DNA, 25 bp, Homo sapien
attttaattctctttctgcttggcc

SEQ ID NO: 1974055 - DNA, 25 bp, Homo sapien
tattcatgtctttttcctgtatttt

SEQ ID NO: 1974056 - DNA, 25 bp, Homo sapien
ctttaaaggggatgatgctatgtgt

SEQ ID NO: 1974057 - DNA, 25 bp, Homo sapien
gttgtagatgtggaagcgatgtgaa

SEQ ID NO: 1974058 - DNA, 25 bp, Homo sapien
agatgtggaagcgatgtgaataaac

SEQ ID NO: 1974059 - DNA, 25 bp, Homo sapien
tgtagatgtggaagcgatgtgaata

SEQ ID NO: 1974060 - DNA, 25 bp, Homo sapien
tggatggaagtggacgtgagaggca

SEQ ID NO: 1974061 - DNA, 25 bp, Homo sapien
gatggaagtggacgtgagaggcagc

SEQ ID NO: 1974062 - DNA, 25 bp, Homo sapien
ggaagtggacgtgagaggcagcatg

SEQ ID NO: 1974063 - DNA, 25 bp, Homo sapien
ctggtggatggaagtggacgtgaga

SEQ ID NO: 1974064 - DNA, 25 bp, Homo sapien
cagtccctgactgcaaggcaggatg

SEQ ID NO: 1974065 - DNA, 25 bp, Homo sapien
catgtggccccgaggtgcagggcct

SEQ ID NO: 1974066 - DNA, 25 bp, Homo sapien
gctgtgggcagacaacatagtggcc

SEQ ID NO: 1974067 - DNA, 25 bp, Homo sapien
cttgggatcttgggagacactcatg

SEQ ID NO: 1974068 - DNA, 25 bp, Homo sapien
gctcggtgcagcgtgcttccggttc

SEQ ID NO: 1974069 - DNA, 25 bp, Homo sapien
agcgtgcttccggttcagcaggcat

SEQ ID NO: 1974070 - DNA, 25 bp, Homo sapien
ggtgcagcgtgcttccggttcagca

SEQ ID NO: 1974071 - DNA, 25 bp, Homo sapien
aaaaggctcggtgcagcgtgcttcc

SEQ ID NO: 1974072 - DNA, 25 bp, Homo sapien
cttgatatgtagatttgtagcacag

SEQ ID NO: 1974073 - DNA, 25 bp, Homo sapien
aattgcaagggttggttaaaatatg

SEQ ID NO: 1974074 - DNA, 25 bp, Homo sapien
tgcaagggttggttaaaatatgtac

SEQ ID NO: 1974075 - DNA, 25 bp, Homo sapien
tatgtactcttgatatgtagatttg

SEQ ID NO: 1974076 - DNA, 25 bp, Homo sapien
tcagccaaggaccactttagggtag

SEQ ID NO: 1974077 - DNA, 25 bp, Homo sapien
cagccaaggaccactttagggtaga

SEQ ID NO: 1974078 - DNA, 25 bp, Homo sapien
tcaggcagcgatgcctccttctgca

SEQ ID NO: 1974079 - DNA, 25 bp, Homo sapien
tagaagggagattatcaggcagcga

SEQ ID NO: 1974080 - DNA, 25 bp, Homo sapien
catgaataactgtggggtggccttg

SEQ ID NO: 1974081 - DNA, 25 bp, Homo sapien
catttgaaacatgaataactgtggg

SEQ ID NO: 1974082 - DNA, 25 bp, Homo sapien
ctctgagcatttgaaacatgaataa

SEQ ID NO: 1974083 - DNA, 25 bp, Homo sapien
tgagcatttgaaacatgaataactg

SEQ ID NO: 1974084 - DNA, 25 bp, Homo sapien
tatgcactgtggacatgctccagat

SEQ ID NO: 1974085 - DNA, 25 bp, Homo sapien
cagtggacaataccatctcttccca

SEQ ID NO: 1974086 - DNA, 25 bp, Homo sapien
tgctaggtctcccagaggtatatgc

SEQ ID NO: 1974087 - DNA, 25 bp, Homo sapien
gggcacataacagtggacaatacca

SEQ ID NO: 1974088 - DNA, 25 bp, Homo sapien
tgctctaggtcaatgataaataagt

SEQ ID NO: 1974089 - DNA, 25 bp, Homo sapien
tccaggccacgttcactgcaaccag

SEQ ID NO: 1974090 - DNA, 25 bp, Homo sapien
gctggagagctagtgctgcttgtaa

SEQ ID NO: 1974091 - DNA, 25 bp, Homo sapien
tttctaggttgctctaggtcaatga

SEQ ID NO: 1974092 - DNA, 25 bp, Homo sapien
catttccatgtagcacagaatcaca

SEQ ID NO: 1974093 - DNA, 25 bp, Homo sapien
tctggatgcttccttctgcgagcgt

SEQ ID NO: 1974094 - DNA, 25 bp, Homo sapien
cctgttggcctttcgctgggatgcg

SEQ ID NO: 1974095 - DNA, 25 bp, Homo sapien
gaacattggagcctgcaagcaaagc

SEQ ID NO: 1974096 - DNA, 25 bp, Homo sapien
tgtggtaatgggtccaatccatcct

SEQ ID NO: 1974097 - DNA, 25 bp, Homo sapien
ttgtggtaatgggtccaatccatcc

SEQ ID NO: 1974098 - DNA, 25 bp, Homo sapien
ctttgtggtaatgggtccaatccat

SEQ ID NO: 1974099 - DNA, 25 bp, Homo sapien
gtggtaatgggtccaatccatcctt

SEQ ID NO: 1974100 - DNA, 25 bp, Homo sapien
ctggctgcaggggaatacatctctg

SEQ ID NO: 1974101 - DNA, 25 bp, Homo sapien
ggctgcaggggaatacatctctgac

SEQ ID NO: 1974102 - DNA, 25 bp, Homo sapien
tggctgcaggggaatacatctctga

SEQ ID NO: 1974103 - DNA, 25 bp, Homo sapien
cattgtgcttctttactgttatcag

SEQ ID NO: 1974104 - DNA, 25 bp, Homo sapien
tgtgcttctttactgttatcagtaa

SEQ ID NO: 1974105 - DNA, 25 bp, Homo sapien
gcttctttactgttatcagtaacat

SEQ ID NO: 1974106 - DNA, 25 bp, Homo sapien
tctttactgttatcagtaacataac

SEQ ID NO: 1974107 - DNA, 25 bp, Homo sapien
ggtgaagataaatctcagcaaagac

SEQ ID NO: 1974108 - DNA, 25 bp, Homo sapien
tgccgaacatctccctaggtccttg

SEQ ID NO: 1974109 - DNA, 25 bp, Homo sapien
aaagacgtcgctgactggaacctgc

SEQ ID NO: 1974110 - DNA, 25 bp, Homo sapien
gaacctgcatcgttcgcagggctct

SEQ ID NO: 1974111 - DNA, 25 bp, Homo sapien
ggcccctgtgtgtcattaacttcca

SEQ ID NO: 1974112 - DNA, 25 bp, Homo sapien
aaattcgatgatgtgcacctcttgc

SEQ ID NO: 1974113 - DNA, 25 bp, Homo sapien
ccactgtgtggatgcaaattcgatg

SEQ ID NO: 1974114 - DNA, 25 bp, Homo sapien
ggcttttgcggaactcctccacagg

SEQ ID NO: 1974115 - DNA, 25 bp, Homo sapien
tctgtgttcctgaatcaccccctag

SEQ ID NO: 1974116 - DNA, 25 bp, Homo sapien
tagactccgatcgtttttttctgtg

SEQ ID NO: 1974117 - DNA, 25 bp, Homo sapien
gttcctgaatcaccccctaggcagt

SEQ ID NO: 1974118 - DNA, 25 bp, Homo sapien
ctgaatcaccccctaggcagtttct

SEQ ID NO: 1974119 - DNA, 25 bp, Homo sapien
gatgctttgcgtgttgctcttccgg

SEQ ID NO: 1974120 - DNA, 25 bp, Homo sapien
ctttgcccaactgtcgccgatgtgt

SEQ ID NO: 1974121 - DNA, 25 bp, Homo sapien
tcttccggtgaagcaggtcttcctt

SEQ ID NO: 1974122 - DNA, 25 bp, Homo sapien
gatgtgtcgatgctttgcgtgttgc

SEQ ID NO: 1974123 - DNA, 25 bp, Homo sapien
tctggaaggccactcctaagtcact

SEQ ID NO: 1974124 - DNA, 25 bp, Homo sapien
gaccgtctgcaaatccacctgaagg

SEQ ID NO: 1974125 - DNA, 25 bp, Homo sapien
tcctaagtcactcccacaagggaag

SEQ ID NO: 1974126 - DNA, 25 bp, Homo sapien
gactgggaatgtgctggtatcaagg

SEQ ID NO: 1974127 - DNA, 25 bp, Homo sapien
ctggtgtcgaagagaagtgagcaaa

SEQ ID NO: 1974128 - DNA, 25 bp, Homo sapien
gcagtcagaatatggacatgccaga

SEQ ID NO: 1974129 - DNA, 25 bp, Homo sapien
gtcagaatatggacatgccagaggt

SEQ ID NO: 1974130 - DNA, 25 bp, Homo sapien
ctgcagtcagaatatggacatgcca

SEQ ID NO: 1974131 - DNA, 25 bp, Homo sapien
cagtcagaatatggacatgccagag

SEQ ID NO: 1974132 - DNA, 25 bp, Homo sapien
tcagccagaaaacagaagcgttcct

SEQ ID NO: 1974133 - DNA, 25 bp, Homo sapien
gtccccttgttccattgcgagtgtg

SEQ ID NO: 1974134 - DNA, 25 bp, Homo sapien
tttattcccgtgtgagatttcagcc

SEQ ID NO: 1974135 - DNA, 25 bp, Homo sapien
ctttcacaatgtacttaagtaaaca

SEQ ID NO: 1974136 - DNA, 25 bp, Homo sapien
ccatcatgggcttggcaaaacttcc

SEQ ID NO: 1974137 - DNA, 25 bp, Homo sapien
catcatgggcttggcaaaacttcca

SEQ ID NO: 1974138 - DNA, 25 bp, Homo sapien
aacctagtgcgtggatgggactaac

SEQ ID NO: 1974139 - DNA, 25 bp, Homo sapien
gtcgttctgaaatgaaacacctgag

SEQ ID NO: 1974140 - DNA, 25 bp, Homo sapien
tgctctctcatatttaaacctagtg

SEQ ID NO: 1974141 - DNA, 25 bp, Homo sapien
ggatgggactaacttgtcgttctga

SEQ ID NO: 1974142 - DNA, 25 bp, Homo sapien
tcaatacgcacccttgtcttttcca

SEQ ID NO: 1974143 - DNA, 25 bp, Homo sapien
tgctcaatacgcacccttgtctttt

SEQ ID NO: 1974144 - DNA, 25 bp, Homo sapien
caatacgcacccttgtcttttccat

SEQ ID NO: 1974145 - DNA, 25 bp, Homo sapien
catctggactctgctcaatacgcac

SEQ ID NO: 1974146 - DNA, 25 bp, Homo sapien
tgtttgctgcttctcaggcttgtaa

SEQ ID NO: 1974147 - DNA, 25 bp, Homo sapien
gcttgtaaacatctccctcaagcct

SEQ ID NO: 1974148 - DNA, 25 bp, Homo sapien
ttcttgttaattgccccgagaagta

SEQ ID NO: 1974149 - DNA, 25 bp, Homo sapien
tccatggtcggcttattcagtctcc

SEQ ID NO: 1974150 - DNA, 25 bp, Homo sapien
tattctcttatcagaaggcttcttg

SEQ ID NO: 1974151 - DNA, 25 bp, Homo sapien
ccacagttggggatgtattctctta

SEQ ID NO: 1974152 - DNA, 25 bp, Homo sapien
tctcttatcagaaggcttcttgttc

SEQ ID NO: 1974153 - DNA, 25 bp, Homo sapien
agtatcttattggaaatgccacagt

SEQ ID NO: 1974154 - DNA, 25 bp, Homo sapien
gcagatgggagccatcgggatgctt

SEQ ID NO: 1974155 - DNA, 25 bp, Homo sapien
ggagccatcgggatgcttgctgttc

SEQ ID NO: 1974156 - DNA, 25 bp, Homo sapien
gccatcgggatgcttgctgttcttg

SEQ ID NO: 1974157 - DNA, 25 bp, Homo sapien
catcgggatgcttgctgttcttgaa

SEQ ID NO: 1974158 - DNA, 25 bp, Homo sapien
aatctgagggagtttccagttcctg

SEQ ID NO: 1974159 - DNA, 25 bp, Homo sapien
ttaatctgagggagtttccagttcc

SEQ ID NO: 1974160 - DNA, 25 bp, Homo sapien
taatctgagggagtttccagttcct

SEQ ID NO: 1974161 - DNA, 25 bp, Homo sapien
tgttaatctgagggagtttccagtt

SEQ ID NO: 1974162 - DNA, 25 bp, Homo sapien
catccttcccagtatggcatagtca

SEQ ID NO: 1974163 - DNA, 25 bp, Homo sapien
tcaacatcactaggagtaccttcat

SEQ ID NO: 1974164 - DNA, 25 bp, Homo sapien
gtaccttcatcttttaacatggcag

SEQ ID NO: 1974165 - DNA, 25 bp, Homo sapien
ccttcccagtatggcatagtcacca

SEQ ID NO: 1974166 - DNA, 25 bp, Homo sapien
tgcagtggttaaccttgatgccaat

SEQ ID NO: 1974167 - DNA, 25 bp, Homo sapien
ggagaacaagaagtgcagaaattaa

SEQ ID NO: 1974168 - DNA, 25 bp, Homo sapien
ttcatggagaacaagaagtgcagaa

SEQ ID NO: 1974169 - DNA, 25 bp, Homo sapien
catggagaacaagaagtgcagaaat

SEQ ID NO: 1974170 - DNA, 25 bp, Homo sapien
tccgaatggtgctgtaccacaatgg

SEQ ID NO: 1974171 - DNA, 25 bp, Homo sapien
ttgaagtaggtgacctgcctccgcc

SEQ ID NO: 1974172 - DNA, 25 bp, Homo sapien
catgtagcgggcaaaggtagatgca

SEQ ID NO: 1974173 - DNA, 25 bp, Homo sapien
gatgcaggttctgacacagatccct

SEQ ID NO: 1974174 - DNA, 25 bp, Homo sapien
atctgatgcttttatgtgcggaggc

SEQ ID NO: 1974175 - DNA, 25 bp, Homo sapien
tcttgtcggcagaaggccacctgaa

SEQ ID NO: 1974176 - DNA, 25 bp, Homo sapien
gacagagcacatctttgcccacacg

SEQ ID NO: 1974177 - DNA, 25 bp, Homo sapien
cctgaagccagctcagatctgatgc

SEQ ID NO: 1974178 - DNA, 25 bp, Homo sapien
ccatttggcatgtgacgttatggta

SEQ ID NO: 1974179 - DNA, 25 bp, Homo sapien
agggcctgaggagcggcctctcatc

SEQ ID NO: 1974180 - DNA, 25 bp, Homo sapien
tctgcagctacgagtgtgtccgagg

SEQ ID NO: 1974181 - DNA, 25 bp, Homo sapien
tgacgttatggtaaggttcttgtgg

SEQ ID NO: 1974182 - DNA, 25 bp, Homo sapien
gaagacaggatatatctagaaatag

SEQ ID NO: 1974183 - DNA, 25 bp, Homo sapien
aagacaggatatatctagaaatagc

SEQ ID NO: 1974184 - DNA, 25 bp, Homo sapien
ctgaagacaggatatatctagaaat

SEQ ID NO: 1974185 - DNA, 25 bp, Homo sapien
gacaggatatatctagaaatagctc

SEQ ID NO: 1974186 - DNA, 25 bp, Homo sapien
cagggttcgcctcagttagcgcgag

SEQ ID NO: 1974187 - DNA, 25 bp, Homo sapien
tttttggagaaatggtgctttcctg

SEQ ID NO: 1974188 - DNA, 25 bp, Homo sapien
tgcacatctaagaccgcagcgtcct

SEQ ID NO: 1974189 - DNA, 25 bp, Homo sapien
ctcagttagcgcgagatgggagcct

SEQ ID NO: 1974190 - DNA, 25 bp, Homo sapien
tcacatcaagaaatttagtttgtgg

SEQ ID NO: 1974191 - DNA, 25 bp, Homo sapien
ctgctttagcttgctcaagttgaaa

SEQ ID NO: 1974192 - DNA, 25 bp, Homo sapien
ttagcttgctcaagttgaaattcac

SEQ ID NO: 1974193 - DNA, 25 bp, Homo sapien
tgtggtgtttacatgcatatttttc

SEQ ID NO: 1974194 - DNA, 25 bp, Homo sapien
ccttttttgagatctgcatcgaata

SEQ ID NO: 1974195 - DNA, 25 bp, Homo sapien
ttcgagtgtctatgcttgttgttca

SEQ ID NO: 1974196 - DNA, 25 bp, Homo sapien
agatctgcatcgaatatttttcgag

SEQ ID NO: 1974197 - DNA, 25 bp, Homo sapien
aatatttttcgagtgtctatgcttg

SEQ ID NO: 1974198 - DNA, 25 bp, Homo sapien
ccatggaaagaggaacacatctgct

SEQ ID NO: 1974199 - DNA, 25 bp, Homo sapien
tcgctaagctagctgcgtggttggt

SEQ ID NO: 1974200 - DNA, 25 bp, Homo sapien
gagttgaattgctgctcttcgctaa

SEQ ID NO: 1974201 - DNA, 25 bp, Homo sapien
tgcctgcaagcctgcagcaccatct

SEQ ID NO: 1974202 - DNA, 25 bp, Homo sapien
gtttttccatagtgatactgaatta

SEQ ID NO: 1974203 - DNA, 25 bp, Homo sapien
tgtattttcgttttcagattccact

SEQ ID NO: 1974204 - DNA, 25 bp, Homo sapien
taattgcactctgctgtttttccat

SEQ ID NO: 1974205 - DNA, 25 bp, Homo sapien
tagtgatactgaattaagttacaaa

SEQ ID NO: 1974206 - DNA, 25 bp, Homo sapien
tcacatgttctgttaccacgtcaga

SEQ ID NO: 1974207 - DNA, 25 bp, Homo sapien
cagcaactacaagtgcaaatttcca

SEQ ID NO: 1974208 - DNA, 25 bp, Homo sapien
ctgttaccacgtcagaggatgttac

SEQ ID NO: 1974209 - DNA, 25 bp, Homo sapien
agtgcaaatttccacatctctccaa

SEQ ID NO: 1974210 - DNA, 25 bp, Homo sapien
gggatgatgctagatggatgcttca

SEQ ID NO: 1974211 - DNA, 25 bp, Homo sapien
ggatgatgctagatggatgcttcat

SEQ ID NO: 1974212 - DNA, 25 bp, Homo sapien
tgggatgatgctagatggatgcttc

SEQ ID NO: 1974213 - DNA, 25 bp, Homo sapien
tagataatttgctccgctgcacagc

SEQ ID NO: 1974214 - DNA, 25 bp, Homo sapien
aaattaccatcaggagcgtctcagg

SEQ ID NO: 1974215 - DNA, 25 bp, Homo sapien
cagacaagtcttcgtggaagccaaa

SEQ ID NO: 1974216 - DNA, 25 bp, Homo sapien
cagggagcaggcactcttagcaaga

SEQ ID NO: 1974217 - DNA, 25 bp, Homo sapien
cgtggtccttggcttttcaggatca

SEQ ID NO: 1974218 - DNA, 25 bp, Homo sapien
tcaggatcagaatgtgattgttcat

SEQ ID NO: 1974219 - DNA, 25 bp, Homo sapien
ggtccttggcttttcaggatcagaa

SEQ ID NO: 1974220 - DNA, 25 bp, Homo sapien
ttttcaggatcagaatgtgattgtt

SEQ ID NO: 1974221 - DNA, 25 bp, Homo sapien
cacctggtgaaggtctagcctggca

SEQ ID NO: 1974222 - DNA, 25 bp, Homo sapien
acctgcgtgtggtgtctcagctgga

SEQ ID NO: 1974223 - DNA, 25 bp, Homo sapien
gtttgggactcagacccagcggcag

SEQ ID NO: 1974224 - DNA, 25 bp, Homo sapien
tgaaagtagctgacttggataaggc

SEQ ID NO: 1974225 - DNA, 25 bp, Homo sapien
ccgactcctttgagtttaagcagga

SEQ ID NO: 1974226 - DNA, 25 bp, Homo sapien
ctggtataacacctgagtaatacac

SEQ ID NO: 1974227 - DNA, 25 bp, Homo sapien
acacctgagtaatacacctgtcccg

SEQ ID NO: 1974228 - DNA, 25 bp, Homo sapien
taagcaggattgtgaccccctcact

SEQ ID NO: 1974229 - DNA, 25 bp, Homo sapien
tgctcgtgccccaccagctgtcatg

SEQ ID NO: 1974230 - DNA, 25 bp, Homo sapien
ttggaacgtttgatgtggcccctct

SEQ ID NO: 1974231 - DNA, 25 bp, Homo sapien
cgttcctgatgggttgttggaacgt

SEQ ID NO: 1974232 - DNA, 25 bp, Homo sapien
ttctctcagtgctcgtgccccacca

SEQ ID NO: 1974233 - DNA, 25 bp, Homo sapien
gttcgtgcatgtgctcgtgtgtgta

SEQ ID NO: 1974234 - DNA, 25 bp, Homo sapien
gggagatgaagaccaatttgccatc

SEQ ID NO: 1974235 - DNA, 25 bp, Homo sapien
tatagtttgccatgagttccgctgt

SEQ ID NO: 1974236 - DNA, 25 bp, Homo sapien
gaatgtacccgcaaaggagagcagg

SEQ ID NO: 1974237 - DNA, 25 bp, Homo sapien
gcatgtatataggacaccagggagc

SEQ ID NO: 1974238 - DNA, 25 bp, Homo sapien
tcgcagatacgtctggaccctgtct

SEQ ID NO: 1974239 - DNA, 25 bp, Homo sapien
tcaggaaactggcagttagtttaga

SEQ ID NO: 1974240 - DNA, 25 bp, Homo sapien
agcacccagaatgcctcaagttcgc

SEQ ID NO: 1974241 - DNA, 25 bp, Homo sapien
aacaaagaatacttctgtgagaaca

SEQ ID NO: 1974242 - DNA, 25 bp, Homo sapien
agaatacttctgtgagaacagtggc

SEQ ID NO: 1974243 - DNA, 25 bp, Homo sapien
agtacgtaatgaaaatctggcctca

SEQ ID NO: 1974244 - DNA, 25 bp, Homo sapien
tctttgtcattttggctaaagtacg

SEQ ID NO: 1974245 - DNA, 25 bp, Homo sapien
tttgcctaaatcctgagttaagtat

SEQ ID NO: 1974246 - DNA, 25 bp, Homo sapien
ctaaatcctgagttaagtatatcac

SEQ ID NO: 1974247 - DNA, 25 bp, Homo sapien
tgcctaaatcctgagttaagtatat

SEQ ID NO: 1974248 - DNA, 25 bp, Homo sapien
gcctaaatcctgagttaagtatatc

SEQ ID NO: 1974249 - DNA, 25 bp, Homo sapien
catgcacggtccctttggagatctg

SEQ ID NO: 1974250 - DNA, 25 bp, Homo sapien
gacaaggactggcataacccatggc

SEQ ID NO: 1974251 - DNA, 25 bp, Homo sapien
ccatggcttcttcaggacaacggat

SEQ ID NO: 1974252 - DNA, 25 bp, Homo sapien
cagtactgagctaatggcattgcca

SEQ ID NO: 1974253 - DNA, 25 bp, Homo sapien
gactctgtcctccgggagaattttg

SEQ ID NO: 1974254 - DNA, 25 bp, Homo sapien
ccgggagaattttgcttggccattg

SEQ ID NO: 1974255 - DNA, 25 bp, Homo sapien
tctgtcctccgggagaattttgctt

SEQ ID NO: 1974256 - DNA, 25 bp, Homo sapien
tcctccgggagaattttgcttggcc

SEQ ID NO: 1974257 - DNA, 25 bp, Homo sapien
ctcctgcaggcctaggcatcttggg

SEQ ID NO: 1974258 - DNA, 25 bp, Homo sapien
tcctgcaggcctaggcatcttgggc

SEQ ID NO: 1974259 - DNA, 25 bp, Homo sapien
cctgcaggcctaggcatcttgggca

SEQ ID NO: 1974260 - DNA, 25 bp, Homo sapien
gagactcttcatggtttgctcagca

SEQ ID NO: 1974261 - DNA, 25 bp, Homo sapien
tatgagggaggaccctttcactggt

SEQ ID NO: 1974262 - DNA, 25 bp, Homo sapien
aaatcaatacagttcctctgtgatg

SEQ ID NO: 1974263 - DNA, 25 bp, Homo sapien
tatgacatgcgtcactatgagggag

SEQ ID NO: 1974264 - DNA, 25 bp, Homo sapien
tgcaggttgaacattcccgtcacac

SEQ ID NO: 1974265 - DNA, 25 bp, Homo sapien
tgaacattcccgtcacactgtgaag

SEQ ID NO: 1974266 - DNA, 25 bp, Homo sapien
gcctctcccagtaccctgaacgtgc

SEQ ID NO: 1974267 - DNA, 25 bp, Homo sapien
aacaggtgcaggttgaacattcccg

SEQ ID NO: 1974268 - DNA, 25 bp, Homo sapien
tcccggggagatactaccagacttc

SEQ ID NO: 1974269 - DNA, 25 bp, Homo sapien
gggagatactaccagacttcctcca

SEQ ID NO: 1974270 - DNA, 25 bp, Homo sapien
tactaccagacttcctccacggaag

SEQ ID NO: 1974271 - DNA, 25 bp, Homo sapien
cagtgtcccggggagatactaccag

SEQ ID NO: 1974272 - DNA, 25 bp, Homo sapien
aaagtgcctagctcccagcaggcgt

SEQ ID NO: 1974273 - DNA, 25 bp, Homo sapien
gcaggcgtccacaaatgcgaatttc

SEQ ID NO: 1974274 - DNA, 25 bp, Homo sapien
ggtgacaggaactattcgaaagtgc

SEQ ID NO: 1974275 - DNA, 25 bp, Homo sapien
tgagtgtttcccttccgattgcagt

SEQ ID NO: 1974276 - DNA, 25 bp, Homo sapien
tgattcaacctaagaaagcaccttc

SEQ ID NO: 1974277 - DNA, 25 bp, Homo sapien
cactggacgtcctcctgcagaggga

SEQ ID NO: 1974278 - DNA, 25 bp, Homo sapien
tgacattagtgtcagggagacctgg

SEQ ID NO: 1974279 - DNA, 25 bp, Homo sapien
tacatcatgttgctccagagaaaag

SEQ ID NO: 1974280 - DNA, 25 bp, Homo sapien
gaaaagagggtgttcagcctggacc

SEQ ID NO: 1974281 - DNA, 25 bp, Homo sapien
tatttgaatagtcttgggcctccag

SEQ ID NO: 1974282 - DNA, 25 bp, Homo sapien
gaaaactgtgtcatagctgggatca

SEQ ID NO: 1974283 - DNA, 25 bp, Homo sapien
tggaccccttctaacaagagagctg

SEQ ID NO: 1974284 - DNA, 25 bp, Homo sapien
gctgccacggagcatggaggcacct

SEQ ID NO: 1974285 - DNA, 25 bp, Homo sapien
tgtggggctgtaggcaacaatgcag

SEQ ID NO: 1974286 - DNA, 25 bp, Homo sapien
gccacggagcatggaggcaccttgt

SEQ ID NO: 1974287 - DNA, 25 bp, Homo sapien
cggctgccacggagcatggaggcac

SEQ ID NO: 1974288 - DNA, 25 bp, Homo sapien
caaggcaagggaagaagtagtattg

SEQ ID NO: 1974289 - DNA, 25 bp, Homo sapien
gaacagctggttttgacttgggacc

SEQ ID NO: 1974290 - DNA, 25 bp, Homo sapien
tgtcttctaaaataggaacagctgg

SEQ ID NO: 1974291 - DNA, 25 bp, Homo sapien
gagcctcagacaacctagaccactg

SEQ ID NO: 1974292 - DNA, 25 bp, Homo sapien
ccaatgttttcgatgtcaaatgggc

SEQ ID NO: 1974293 - DNA, 25 bp, Homo sapien
tcccaatgttttcgatgtcaaatgg

SEQ ID NO: 1974294 - DNA, 25 bp, Homo sapien
caatgttttcgatgtcaaatgggct

SEQ ID NO: 1974295 - DNA, 25 bp, Homo sapien
gtcccaatgttttcgatgtcaaatg

SEQ ID NO: 1974296 - DNA, 25 bp, Homo sapien
tgcagaaagcttgcccttcctcctt

SEQ ID NO: 1974297 - DNA, 25 bp, Homo sapien
ctgcagaaagcttgcccttcctcct

SEQ ID NO: 1974298 - DNA, 25 bp, Homo sapien
actgcagaaagcttgcccttcctcc

SEQ ID NO: 1974299 - DNA, 25 bp, Homo sapien
tctggagggtgaaatcttagtgtcc

SEQ ID NO: 1974300 - DNA, 25 bp, Homo sapien
tctagccatggcacaggaagatgct

SEQ ID NO: 1974301 - DNA, 25 bp, Homo sapien
tctgtgggtagctggtgatctagcc

SEQ ID NO: 1974302 - DNA, 25 bp, Homo sapien
ggcacatgtgcaggaagacaattgg

SEQ ID NO: 1974303 - DNA, 25 bp, Homo sapien
gaaattactgttagttcggctggaa

SEQ ID NO: 1974304 - DNA, 25 bp, Homo sapien
attactgttagttcggctggaaaat

SEQ ID NO: 1974305 - DNA, 25 bp, Homo sapien
ctgaaattactgttagttcggctgg

SEQ ID NO: 1974306 - DNA, 25 bp, Homo sapien
tgaaattactgttagttcggctgga

SEQ ID NO: 1974307 - DNA, 25 bp, Homo sapien
gtctgtcctcatgctcaaggcttcc

SEQ ID NO: 1974308 - DNA, 25 bp, Homo sapien
ccttctaaaggctcctctacatttg

SEQ ID NO: 1974309 - DNA, 25 bp, Homo sapien
tcaaggcttccttctaaaggctcct

SEQ ID NO: 1974310 - DNA, 25 bp, Homo sapien
tctgtcctcatgctcaaggcttcct

SEQ ID NO: 1974311 - DNA, 25 bp, Homo sapien
taggtttgaggtctgtatcataaca

SEQ ID NO: 1974312 - DNA, 25 bp, Homo sapien
tctgtatcataacattgtagggaga

SEQ ID NO: 1974313 - DNA, 25 bp, Homo sapien
tcctggactgtgtgtaacgtgtctt

SEQ ID NO: 1974314 - DNA, 25 bp, Homo sapien
tgtacagtgggtaagcagttaacct

SEQ ID NO: 1974315 - DNA, 25 bp, Homo sapien
tgcacactccatttccacatggtgg

SEQ ID NO: 1974316 - DNA, 25 bp, Homo sapien
ctgcacactccatttccacatggtg

SEQ ID NO: 1974317 - DNA, 25 bp, Homo sapien
ccatttccacatggtggcagctgca

SEQ ID NO: 1974318 - DNA, 25 bp, Homo sapien
tttccacatggtggcagctgcaacc

SEQ ID NO: 1974319 - DNA, 25 bp, Homo sapien
ccacttctaagacaatcatgacgaa

SEQ ID NO: 1974320 - DNA, 25 bp, Homo sapien
caatcatgacgaagaatttgctgtg

SEQ ID NO: 1974321 - DNA, 25 bp, Homo sapien
acagccccacttctaagacaatcat

SEQ ID NO: 1974322 - DNA, 25 bp, Homo sapien
taagacaatcatgacgaagaatttg

SEQ ID NO: 1974323 - DNA, 25 bp, Homo sapien
gagctttctgatcaatgttgattga

SEQ ID NO: 1974324 - DNA, 25 bp, Homo sapien
tctgatcaatgttgattgaccagtc

SEQ ID NO: 1974325 - DNA, 25 bp, Homo sapien
caatgttgattgaccagtctccaac

SEQ ID NO: 1974326 - DNA, 25 bp, Homo sapien
ttgattgaccagtctccaacatttc

SEQ ID NO: 1974327 - DNA, 25 bp, Homo sapien
ctgctttcgttctgagagggagcgc

SEQ ID NO: 1974328 - DNA, 25 bp, Homo sapien
catgatgacaatttggaattcttcc

SEQ ID NO: 1974329 - DNA, 25 bp, Homo sapien
ttctgagagggagcgcctcatccat

SEQ ID NO: 1974330 - DNA, 25 bp, Homo sapien
ttcgttctgagagggagcgcctcat

SEQ ID NO: 1974331 - DNA, 25 bp, Homo sapien
cagaagaattgggagttgtagtgtc

SEQ ID NO: 1974332 - DNA, 25 bp, Homo sapien
cttttaatacagaagaattgggagt

SEQ ID NO: 1974333 - DNA, 25 bp, Homo sapien
taatacagaagaattgggagttgta

SEQ ID NO: 1974334 - DNA, 25 bp, Homo sapien
aagaattgggagttgtagtgtcagt

SEQ ID NO: 1974335 - DNA, 25 bp, Homo sapien
gggacttgtatcttgctccagaaaa

SEQ ID NO: 1974336 - DNA, 25 bp, Homo sapien
taattaggggacttgtatcttgctc

SEQ ID NO: 1974337 - DNA, 25 bp, Homo sapien
taggggacttgtatcttgctccaga

SEQ ID NO: 1974338 - DNA, 25 bp, Homo sapien
cataattaattaggggacttgtatc

SEQ ID NO: 1974339 - DNA, 25 bp, Homo sapien
tggaggtcccgtcagctccatgcct

SEQ ID NO: 1974340 - DNA, 25 bp, Homo sapien
tggagatccccacacgtggaaggcg

SEQ ID NO: 1974341 - DNA, 25 bp, Homo sapien
aagagctccagacgcccgttggaga

SEQ ID NO: 1974342 - DNA, 25 bp, Homo sapien
tgtgcgacagccgtgatccttcctg

SEQ ID NO: 1974343 - DNA, 25 bp, Homo sapien
ggcttcgcatagcagagcccaaacc

SEQ ID NO: 1974344 - DNA, 25 bp, Homo sapien
gcacgcatccgccaacagaggtgca

SEQ ID NO: 1974345 - DNA, 25 bp, Homo sapien
aggtgcaagaacctgcccccaaggg

SEQ ID NO: 1974346 - DNA, 25 bp, Homo sapien
aatgcaaggacacccaaagccggct

SEQ ID NO: 1974347 - DNA, 25 bp, Homo sapien
ttctgaatgggatgtacaactcccc

SEQ ID NO: 1974348 - DNA, 25 bp, Homo sapien
ccccagtgttaaggacagaattggc

SEQ ID NO: 1974349 - DNA, 25 bp, Homo sapien
aacgcatagctttcatattctgaat

SEQ ID NO: 1974350 - DNA, 25 bp, Homo sapien
ttttcagcaaaactgtgtgtgcatt

SEQ ID NO: 1974351 - DNA, 25 bp, Homo sapien
gaatcaagaagggactgagttggga

SEQ ID NO: 1974352 - DNA, 25 bp, Homo sapien
tgagttgggagtgtggagcgtacgc

SEQ ID NO: 1974353 - DNA, 25 bp, Homo sapien
gcgtacgcgtgtgtgtggattggca

SEQ ID NO: 1974354 - DNA, 25 bp, Homo sapien
gagtgtggagcgtacgcgtgtgtgt

SEQ ID NO: 1974355 - DNA, 25 bp, Homo sapien
tctgtcagtctaaaaggtcggatgc

SEQ ID NO: 1974356 - DNA, 25 bp, Homo sapien
gagcgttggtccgatgcaataatgc

SEQ ID NO: 1974357 - DNA, 25 bp, Homo sapien
tcatgttgcgggtgaagcattcaca

SEQ ID NO: 1974358 - DNA, 25 bp, Homo sapien
caaaccctatgagagctgacagatg

SEQ ID NO: 1974359 - DNA, 25 bp, Homo sapien
cccgctggctgccttgcattgggag

SEQ ID NO: 1974360 - DNA, 25 bp, Homo sapien
tggctgccttgcattgggagcttgc

SEQ ID NO: 1974361 - DNA, 25 bp, Homo sapien
ctgccttgcattgggagcttgctaa

SEQ ID NO: 1974362 - DNA, 25 bp, Homo sapien
ttctgcattgacctgcaccctcccg

SEQ ID NO: 1974363 - DNA, 25 bp, Homo sapien
ataatcacctagaaagctgtctccg

SEQ ID NO: 1974364 - DNA, 25 bp, Homo sapien
tagaaagctgtctccgtcgggaagc

SEQ ID NO: 1974365 - DNA, 25 bp, Homo sapien
aagctgtctccgtcgggaagccttc

SEQ ID NO: 1974366 - DNA, 25 bp, Homo sapien
tcacctagaaagctgtctccgtcgg

SEQ ID NO: 1974367 - DNA, 25 bp, Homo sapien
gaaccttgctgggaatggtagtgcc

SEQ ID NO: 1974368 - DNA, 25 bp, Homo sapien
atggtagtgcctgccgttgcctcct

SEQ ID NO: 1974369 - DNA, 25 bp, Homo sapien
aaatgtccttcgcaggccacggcag

SEQ ID NO: 1974370 - DNA, 25 bp, Homo sapien
atgtccttcgcaggccacggcaggg

SEQ ID NO: 1974371 - DNA, 25 bp, Homo sapien
ccccatctgaaggttccagacatga

SEQ ID NO: 1974372 - DNA, 25 bp, Homo sapien
gtactcctggccccatctgaaggtt

SEQ ID NO: 1974373 - DNA, 25 bp, Homo sapien
cagtactcctggccccatctgaagg

SEQ ID NO: 1974374 - DNA, 25 bp, Homo sapien
ccatctgaaggttccagacatgatt

SEQ ID NO: 1974375 - DNA, 25 bp, Homo sapien
caggattcccgtggaaacgttgtgc

SEQ ID NO: 1974376 - DNA, 25 bp, Homo sapien
ccaggattcccgtggaaacgttgtg

SEQ ID NO: 1974377 - DNA, 25 bp, Homo sapien
ttgtgcacgcgtgccactggagcag

SEQ ID NO: 1974378 - DNA, 25 bp, Homo sapien
gtggaaacgttgtgcacgcgtgcca

SEQ ID NO: 1974379 - DNA, 25 bp, Homo sapien
tgtggtgtccgctactccgtgtcca

SEQ ID NO: 1974380 - DNA, 25 bp, Homo sapien
gctgtttccgatcctgatgcctcca

SEQ ID NO: 1974381 - DNA, 25 bp, Homo sapien
ccaagtgctgtttccgatcctgatg

SEQ ID NO: 1974382 - DNA, 25 bp, Homo sapien
gcatgctcaggggtcccagccggtc

SEQ ID NO: 1974383 - DNA, 25 bp, Homo sapien
gctccccagtccacaggaactgctg

SEQ ID NO: 1974384 - DNA, 25 bp, Homo sapien
gggactggaaacaccacattgcccg

SEQ ID NO: 1974385 - DNA, 25 bp, Homo sapien
actggaaacaccacattgcccggct

SEQ ID NO: 1974386 - DNA, 25 bp, Homo sapien
ctagagtggggactggaaacaccac

SEQ ID NO: 1974387 - DNA, 25 bp, Homo sapien
tccttgccctggctgttcctccact

SEQ ID NO: 1974388 - DNA, 25 bp, Homo sapien
gaggagggtgccctgcagagactgc

SEQ ID NO: 1974389 - DNA, 25 bp, Homo sapien
tggctgaagcgccagcaggaggagg

SEQ ID NO: 1974390 - DNA, 25 bp, Homo sapien
cagagactgcaggagaaggaggact

SEQ ID NO: 1974391 - DNA, 25 bp, Homo sapien
gaacttggtgaccaaatgggtgaca

SEQ ID NO: 1974392 - DNA, 25 bp, Homo sapien
acttggtgaccaaatgggtgacaaa

SEQ ID NO: 1974393 - DNA, 25 bp, Homo sapien
ccagaacttggtgaccaaatgggtg

SEQ ID NO: 1974394 - DNA, 25 bp, Homo sapien
ggagagtcagggaccccagtccagc

SEQ ID NO: 1974395 - DNA, 25 bp, Homo sapien
gggctccttgttctcagcattgatg

SEQ ID NO: 1974396 - DNA, 25 bp, Homo sapien
ccttgttctcagcattgatgtcagc

SEQ ID NO: 1974397 - DNA, 25 bp, Homo sapien
gttctcagcattgatgtcagcacca

SEQ ID NO: 1974398 - DNA, 25 bp, Homo sapien
tctcagcattgatgtcagcaccaac

SEQ ID NO: 1974399 - DNA, 25 bp, Homo sapien
gagcgggtgagagcagtgggcacac

SEQ ID NO: 1974400 - DNA, 25 bp, Homo sapien
ctatcagaggagcgggtgagagcag

SEQ ID NO: 1974401 - DNA, 25 bp, Homo sapien
cagaggagcgggtgagagcagtggg

SEQ ID NO: 1974402 - DNA, 25 bp, Homo sapien
tcagaggagcgggtgagagcagtgg

SEQ ID NO: 1974403 - DNA, 25 bp, Homo sapien
caagaggcgcgtggccctgcaagct

SEQ ID NO: 1974404 - DNA, 25 bp, Homo sapien
gaggtcaagaggcgcgtggccctgc

SEQ ID NO: 1974405 - DNA, 25 bp, Homo sapien
gtcaagaggcgcgtggccctgcaag

SEQ ID NO: 1974406 - DNA, 25 bp, Homo sapien
aggtcaagaggcgcgtggccctgca

SEQ ID NO: 1974407 - DNA, 25 bp, Homo sapien
tgccgagagcctgcagtggtagcac

SEQ ID NO: 1974408 - DNA, 25 bp, Homo sapien
cctgtcatcccagtgaacccgaatg

SEQ ID NO: 1974409 - DNA, 25 bp, Homo sapien
agtgaacccgaatgccgagagcctg

SEQ ID NO: 1974410 - DNA, 25 bp, Homo sapien
caggctagagcgtcattgctaaaac

SEQ ID NO: 1974411 - DNA, 25 bp, Homo sapien
ttggacttacaggattgaatttctc

SEQ ID NO: 1974412 - DNA, 25 bp, Homo sapien
gaccatcttagaacctccaattgga

SEQ ID NO: 1974413 - DNA, 25 bp, Homo sapien
tctctggcgagcttgatgctgatgt

SEQ ID NO: 1974414 - DNA, 25 bp, Homo sapien
caagatatttctcatgccgttattc

SEQ ID NO: 1974415 - DNA, 25 bp, Homo sapien
aatggcatcattgtgaggttggaga

SEQ ID NO: 1974416 - DNA, 25 bp, Homo sapien
tgcaccaatggcatcattgtgaggt

SEQ ID NO: 1974417 - DNA, 25 bp, Homo sapien
atctggctgcttggcacctccaggc

SEQ ID NO: 1974418 - DNA, 25 bp, Homo sapien
gttaatgcaccaatggcatcattgt

SEQ ID NO: 1974419 - DNA, 25 bp, Homo sapien
aagaggaagggctggcgacctacag

SEQ ID NO: 1974420 - DNA, 25 bp, Homo sapien
ccaggagggaagagctcatgatcac

SEQ ID NO: 1974421 - DNA, 25 bp, Homo sapien
gctggcgacctacagaaagcaattc

SEQ ID NO: 1974422 - DNA, 25 bp, Homo sapien
tcatgatcactggtggaagcttgga

SEQ ID NO: 1974423 - DNA, 25 bp, Homo sapien
cctgtgaggagagttaggtcccgtg

SEQ ID NO: 1974424 - DNA, 25 bp, Homo sapien
caaagagcagagagcccgcagctcc

SEQ ID NO: 1974425 - DNA, 25 bp, Homo sapien
gaggagagttaggtcccgtgtctgc

SEQ ID NO: 1974426 - DNA, 25 bp, Homo sapien
aaagagcagagagcccgcagctccc

SEQ ID NO: 1974427 - DNA, 25 bp, Homo sapien
gcaacacagaatggggagtttccgg

SEQ ID NO: 1974428 - DNA, 25 bp, Homo sapien
caggagagagctcaaggcaacacag

SEQ ID NO: 1974429 - DNA, 25 bp, Homo sapien
gggtgcaggagagagctcaaggcaa

SEQ ID NO: 1974430 - DNA, 25 bp, Homo sapien
gagagctcaaggcaacacagaatgg

SEQ ID NO: 1974431 - DNA, 25 bp, Homo sapien
tgccccttgtggaagactggtccag

SEQ ID NO: 1974432 - DNA, 25 bp, Homo sapien
tggagtggccagtactgactggctg

SEQ ID NO: 1974433 - DNA, 25 bp, Homo sapien
ccttgtggaagactggtccagaggc

SEQ ID NO: 1974434 - DNA, 25 bp, Homo sapien
tttgtgccccttgtggaagactggt

SEQ ID NO: 1974435 - DNA, 25 bp, Homo sapien
ctaaggacaacccagggaaatgagg

SEQ ID NO: 1974436 - DNA, 25 bp, Homo sapien
gaaatgaggcggaagtcagaaccga

SEQ ID NO: 1974437 - DNA, 25 bp, Homo sapien
gcggaagtcagaaccgaggaacaag

SEQ ID NO: 1974438 - DNA, 25 bp, Homo sapien
acccagggaaatgaggcggaagtca

SEQ ID NO: 1974439 - DNA, 25 bp, Homo sapien
gattcttgtctgtaatgcggtgaga

SEQ ID NO: 1974440 - DNA, 25 bp, Homo sapien
gctttcggcttgctggtggaccaca

SEQ ID NO: 1974441 - DNA, 25 bp, Homo sapien
acactgtggtgcctcgggaagttcc

SEQ ID NO: 1974442 - DNA, 25 bp, Homo sapien
tctaaaggaggagatcccgaggctg

SEQ ID NO: 1974443 - DNA, 25 bp, Homo sapien
cacttctgctggctggcctcggtgc

SEQ ID NO: 1974444 - DNA, 25 bp, Homo sapien
cttctgctggctggcctcggtgctc

SEQ ID NO: 1974445 - DNA, 25 bp, Homo sapien
tctggggcacttctgctggctggcc

SEQ ID NO: 1974446 - DNA, 25 bp, Homo sapien
tctgctggctggcctcggtgctcat

SEQ ID NO: 1974447 - DNA, 25 bp, Homo sapien
gtcagggactatgggcccctctgca

SEQ ID NO: 1974448 - DNA, 25 bp, Homo sapien
aggggccaagcctcctgtcagggac

SEQ ID NO: 1974449 - DNA, 25 bp, Homo sapien
ggcccctctgcactgttagggaact

SEQ ID NO: 1974450 - DNA, 25 bp, Homo sapien
tctgcactgttagggaactggcttt

SEQ ID NO: 1974451 - DNA, 25 bp, Homo sapien
ggcctagcccatggattaaagtcta

SEQ ID NO: 1974452 - DNA, 25 bp, Homo sapien
tagctttaaggtggttcagatggac

SEQ ID NO: 1974453 - DNA, 25 bp, Homo sapien
gggttacagcttttctgagctactc

SEQ ID NO: 1974454 - DNA, 25 bp, Homo sapien
agcttgcaggctacttgatgtgtct

SEQ ID NO: 1974455 - DNA, 25 bp, Homo sapien
caactcgtgtgtctccctataagtg

SEQ ID NO: 1974456 - DNA, 25 bp, Homo sapien
tttaggagttcatcaatctggtgac

SEQ ID NO: 1974457 - DNA, 25 bp, Homo sapien
tgctttagggagcatcccggtattt

SEQ ID NO: 1974458 - DNA, 25 bp, Homo sapien
gggcttccctctgatctatttccag

SEQ ID NO: 1974459 - DNA, 25 bp, Homo sapien
gaggtcatccagatggccatatggg

SEQ ID NO: 1974460 - DNA, 25 bp, Homo sapien
tctttatccaagttcatccaggtgg

SEQ ID NO: 1974461 - DNA, 25 bp, Homo sapien
cagatgctaggctctcctgtttggg

SEQ ID NO: 1974462 - DNA, 25 bp, Homo sapien
gcctcacacaagatggttggagaga

SEQ ID NO: 1974463 - DNA, 25 bp, Homo sapien
ccaagtctgcactgtaccatggtct

SEQ ID NO: 1974464 - DNA, 25 bp, Homo sapien
caagtctgcactgtaccatggtctt

SEQ ID NO: 1974465 - DNA, 25 bp, Homo sapien
tccaagtctgcactgtaccatggtc

SEQ ID NO: 1974466 - DNA, 25 bp, Homo sapien
ctgcatccagcctactggtgtgttt

SEQ ID NO: 1974467 - DNA, 25 bp, Homo sapien
aagagccatgagcttgcattattca

SEQ ID NO: 1974468 - DNA, 25 bp, Homo sapien
tcctgcatccagcctactggtgtgt

SEQ ID NO: 1974469 - DNA, 25 bp, Homo sapien
agagccatgagcttgcattattcac

SEQ ID NO: 1974470 - DNA, 25 bp, Homo sapien
cagggagcggcatctttatctttct

SEQ ID NO: 1974471 - DNA, 25 bp, Homo sapien
tgatttcagggccatagctgctagg

SEQ ID NO: 1974472 - DNA, 25 bp, Homo sapien
gtgtgcttacgtctactttcttgaa

SEQ ID NO: 1974473 - DNA, 25 bp, Homo sapien
cacagagtttcagtgtgcttacgtc

SEQ ID NO: 1974474 - DNA, 25 bp, Homo sapien
ctttctcctctcctcctggctcagg

SEQ ID NO: 1974475 - DNA, 25 bp, Homo sapien
ctcctctcctcctggctcagggagc

SEQ ID NO: 1974476 - DNA, 25 bp, Homo sapien
ttctcctctcctcctggctcaggga

SEQ ID NO: 1974477 - DNA, 25 bp, Homo sapien
ctttccttggactttctcctctcct

SEQ ID NO: 1974478 - DNA, 25 bp, Homo sapien
tggagtcaggcaggttgaagtaggg

SEQ ID NO: 1974479 - DNA, 25 bp, Homo sapien
tgggtggagtggagggcggcgatgg

SEQ ID NO: 1974480 - DNA, 25 bp, Homo sapien
tgaagtaggggtgactgccagccat

SEQ ID NO: 1974481 - DNA, 25 bp, Homo sapien
tggagggcggcgatgggtgtgtgga

SEQ ID NO: 1974482 - DNA, 25 bp, Homo sapien
cacgcagtttaagtagcagggcaat

SEQ ID NO: 1974483 - DNA, 25 bp, Homo sapien
agaaagggggcccacgaagccagca

SEQ ID NO: 1974484 - DNA, 25 bp, Homo sapien
cagtttaagtagcagggcaataggg

SEQ ID NO: 1974485 - DNA, 25 bp, Homo sapien
cgcagtttaagtagcagggcaatag

SEQ ID NO: 1974486 - DNA, 25 bp, Homo sapien
taaacaaatctctactaaccccatc

SEQ ID NO: 1974487 - DNA, 25 bp, Homo sapien
agggtttagcagagaccatggtgaa

SEQ ID NO: 1974488 - DNA, 25 bp, Homo sapien
tctaacttgggcaaaagcgagaccc

SEQ ID NO: 1974489 - DNA, 25 bp, Homo sapien
ttaactcgccaggatggcacatgcc

SEQ ID NO: 1974490 - DNA, 25 bp, Homo sapien
gaagacccccagggaggcacagcat

SEQ ID NO: 1974491 - DNA, 25 bp, Homo sapien
ctgaagacccccagggaggcacagc

SEQ ID NO: 1974492 - DNA, 25 bp, Homo sapien
ggtgactgaagacccccagggaggc

SEQ ID NO: 1974493 - DNA, 25 bp, Homo sapien
tgactgaagacccccagggaggcac

SEQ ID NO: 1974494 - DNA, 25 bp, Homo sapien
ctgcggatgtcacatgggcaggaca

SEQ ID NO: 1974495 - DNA, 25 bp, Homo sapien
tctgattgacgcactgccaggagta

SEQ ID NO: 1974496 - DNA, 25 bp, Homo sapien
aggacgctctgattgacgcactgcc

SEQ ID NO: 1974497 - DNA, 25 bp, Homo sapien
tgattgacgcactgccaggagtagc

SEQ ID NO: 1974498 - DNA, 25 bp, Homo sapien
cgctctgattgacgcactgccagga

SEQ ID NO: 1974499 - DNA, 25 bp, Homo sapien
tcaattctcccttcggttgtgagaa

SEQ ID NO: 1974500 - DNA, 25 bp, Homo sapien
caattctcccttcggttgtgagaat

SEQ ID NO: 1974501 - DNA, 25 bp, Homo sapien
tgtcaattctcccttcggttgtgag

SEQ ID NO: 1974502 - DNA, 25 bp, Homo sapien
ggtgtcaattctcccttcggttgtg

SEQ ID NO: 1974503 - DNA, 25 bp, Homo sapien
gcaatcctctgcttccgatggagtt

SEQ ID NO: 1974504 - DNA, 25 bp, Homo sapien
tgaactgcggggttaatgacaccat

SEQ ID NO: 1974505 - DNA, 25 bp, Homo sapien
cttccgatggagttagttgtgatga

SEQ ID NO: 1974506 - DNA, 25 bp, Homo sapien
aaggatctctctatggctgatggtc

SEQ ID NO: 1974507 - DNA, 25 bp, Homo sapien
ttatcttgctgcagaagagatggga

SEQ ID NO: 1974508 - DNA, 25 bp, Homo sapien
ttgttgcttaggatatgaatggctg

SEQ ID NO: 1974509 - DNA, 25 bp, Homo sapien
gttgcttaggatatgaatggctgag

SEQ ID NO: 1974510 - DNA, 25 bp, Homo sapien
cttaggatatgaatggctgagcgga

SEQ ID NO: 1974511 - DNA, 25 bp, Homo sapien
ttttgttgcttaggatatgaatggc

SEQ ID NO: 1974512 - DNA, 25 bp, Homo sapien
ctcccgggtccaagggattgtcctg

SEQ ID NO: 1974513 - DNA, 25 bp, Homo sapien
gagacagtctcattccattctgtca

SEQ ID NO: 1974514 - DNA, 25 bp, Homo sapien
agacagtctcattccattctgtcac

SEQ ID NO: 1974515 - DNA, 25 bp, Homo sapien
tttgagacagtctcattccattctg

SEQ ID NO: 1974516 - DNA, 25 bp, Homo sapien
gccaaccatacactactcttttttg

SEQ ID NO: 1974517 - DNA, 25 bp, Homo sapien
cattctacacagaatacgccaacca

SEQ ID NO: 1974518 - DNA, 25 bp, Homo sapien
gaaggccaatgagagtggatcagtt

SEQ ID NO: 1974519 - DNA, 25 bp, Homo sapien
tgtatttactgagccagttgtggtg

SEQ ID NO: 1974520 - DNA, 25 bp, Homo sapien
tcccctcctgtagtgtccagagtcc

SEQ ID NO: 1974521 - DNA, 25 bp, Homo sapien
ccagataggaaggccactgttggga

SEQ ID NO: 1974522 - DNA, 25 bp, Homo sapien
gcagccccaccaagccagataggaa

SEQ ID NO: 1974523 - DNA, 25 bp, Homo sapien
agcagccccaccaagccagatagga

SEQ ID NO: 1974524 - DNA, 25 bp, Homo sapien
catagaagcgatccttcaggactgt

SEQ ID NO: 1974525 - DNA, 25 bp, Homo sapien
tgtgtaggcattggaacagggaccc

SEQ ID NO: 1974526 - DNA, 25 bp, Homo sapien
gaattgctctagatacatacctagt

SEQ ID NO: 1974527 - DNA, 25 bp, Homo sapien
tcaggactgtgtgtaggatgttctt

SEQ ID NO: 1974528 - DNA, 25 bp, Homo sapien
cctttgcgttctttcccagatgttt

SEQ ID NO: 1974529 - DNA, 25 bp, Homo sapien
cttcctttgcgttctttcccagatg

SEQ ID NO: 1974530 - DNA, 25 bp, Homo sapien
ttgtcttcctttgcgttctttccca

SEQ ID NO: 1974531 - DNA, 25 bp, Homo sapien
tcccagatgtttttcggttttgctc

SEQ ID NO: 1974532 - DNA, 25 bp, Homo sapien
ctctccagttgggatgctaactccc

SEQ ID NO: 1974533 - DNA, 25 bp, Homo sapien
cagttgggatgctaactcccctacc

SEQ ID NO: 1974534 - DNA, 25 bp, Homo sapien
tgtggtgtcaaccagtgacctctcc

SEQ ID NO: 1974535 - DNA, 25 bp, Homo sapien
tcacctgtggtgtcaaccagtgacc

SEQ ID NO: 1974536 - DNA, 25 bp, Homo sapien
aagaaagggcgtgtccaatgtggac

SEQ ID NO: 1974537 - DNA, 25 bp, Homo sapien
caatgtggacattgaggtttcccgc

SEQ ID NO: 1974538 - DNA, 25 bp, Homo sapien
gacacaccgatttgaaaagtccacg

SEQ ID NO: 1974539 - DNA, 25 bp, Homo sapien
gctaggatcggagtagacacaccga

SEQ ID NO: 1974540 - DNA, 25 bp, Homo sapien
gtgtttaatcagatgattaaagtcc

SEQ ID NO: 1974541 - DNA, 25 bp, Homo sapien
tgtcacttttcggtgtttaatcaga

SEQ ID NO: 1974542 - DNA, 25 bp, Homo sapien
tttgtcacttttcggtgtttaatca

SEQ ID NO: 1974543 - DNA, 25 bp, Homo sapien
cacttttcggtgtttaatcagatga

SEQ ID NO: 1974544 - DNA, 25 bp, Homo sapien
taattcagaaataaagcgtatctgc

SEQ ID NO: 1974545 - DNA, 25 bp, Homo sapien
gaaataaagcgtatctgcccttctg

SEQ ID NO: 1974546 - DNA, 25 bp, Homo sapien
ctgaatcttgagctgtaattcagaa

SEQ ID NO: 1974547 - DNA, 25 bp, Homo sapien
gaatcttgagctgtaattcagaaat

SEQ ID NO: 1974548 - DNA, 25 bp, Homo sapien
ctgccagggtatgttacaacatcac

SEQ ID NO: 1974549 - DNA, 25 bp, Homo sapien
cagtcgtgatataactgcctatttt

SEQ ID NO: 1974550 - DNA, 25 bp, Homo sapien
ttatgtcagtcgtgatataactgcc

SEQ ID NO: 1974551 - DNA, 25 bp, Homo sapien
tacaacatcacacttccaagcaagg

SEQ ID NO: 1974552 - DNA, 25 bp, Homo sapien
gaagacggtgtctctagggagatcc

SEQ ID NO: 1974553 - DNA, 25 bp, Homo sapien
gccggctggcggagaaaaggagaag

SEQ ID NO: 1974554 - DNA, 25 bp, Homo sapien
atcccgggcctgagcggcagcgtct

SEQ ID NO: 1974555 - DNA, 25 bp, Homo sapien
tgagcggcagcgtctgtcaaatgtg

SEQ ID NO: 1974556 - DNA, 25 bp, Homo sapien
catttagggtgtggccaagcctcag

SEQ ID NO: 1974557 - DNA, 25 bp, Homo sapien
ctggcactctgcacatttagggtgt

SEQ ID NO: 1974558 - DNA, 25 bp, Homo sapien
tcccacatcaggctggcactctgca

SEQ ID NO: 1974559 - DNA, 25 bp, Homo sapien
caggcagagatagagtgcagggcat

SEQ ID NO: 1974560 - DNA, 25 bp, Homo sapien
gcttggatcgcagcaagaaccctga

SEQ ID NO: 1974561 - DNA, 25 bp, Homo sapien
cagagagcggcaaactgtcgaactc

SEQ ID NO: 1974562 - DNA, 25 bp, Homo sapien
gaaaccttgagagaaccagcgaggt

SEQ ID NO: 1974563 - DNA, 25 bp, Homo sapien
taaccagggaaggttagcgccagca

SEQ ID NO: 1974564 - DNA, 25 bp, Homo sapien
caaatgatatgttaaggaagttccc

SEQ ID NO: 1974565 - DNA, 25 bp, Homo sapien
aaatcggagagtaggtgacaccagc

SEQ ID NO: 1974566 - DNA, 25 bp, Homo sapien
cattatcatccctggtctgtgcaag

SEQ ID NO: 1974567 - DNA, 25 bp, Homo sapien
catagtctcagaaggttgcagaagc

SEQ ID NO: 1974568 - DNA, 25 bp, Homo sapien
atcacttgctaacgcccagagcgga

SEQ ID NO: 1974569 - DNA, 25 bp, Homo sapien
ttgctaacgcccagagcggaccgaa

SEQ ID NO: 1974570 - DNA, 25 bp, Homo sapien
gctggagatcacttgctaacgccca

SEQ ID NO: 1974571 - DNA, 25 bp, Homo sapien
ggagatcacttgctaacgcccagag

SEQ ID NO: 1974572 - DNA, 25 bp, Homo sapien
cctgttcggcgctgccggccgccag

SEQ ID NO: 1974573 - DNA, 25 bp, Homo sapien
cagctgcgggaagggggtgcggcag

SEQ ID NO: 1974574 - DNA, 25 bp, Homo sapien
tgcgggaagggggtgcggcaggccg

SEQ ID NO: 1974575 - DNA, 25 bp, Homo sapien
ccgccagctgcgggaagggggtgcg

SEQ ID NO: 1974576 - DNA, 25 bp, Homo sapien
gagggcggcctggttcccgcgccca

SEQ ID NO: 1974577 - DNA, 25 bp, Homo sapien
cccagttcaggccggcgcctcagcg

SEQ ID NO: 1974578 - DNA, 25 bp, Homo sapien
ggcggcgcgcgggactagggcaggc

SEQ ID NO: 1974579 - DNA, 25 bp, Homo sapien
ttcccgcgcccagttcaggccggcg

SEQ ID NO: 1974580 - DNA, 25 bp, Homo sapien
tgggcccccgaaaagcagcggccgc

SEQ ID NO: 1974581 - DNA, 25 bp, Homo sapien
gctccgaggccgcgcaggggtcgtc

SEQ ID NO: 1974582 - DNA, 25 bp, Homo sapien
ccccgaaaagcagcggccgcagact

SEQ ID NO: 1974583 - DNA, 25 bp, Homo sapien
aaagcagcggccgcagactgtagca

SEQ ID NO: 1974584 - DNA, 25 bp, Homo sapien
agcagggtccgggccgtgtcccttg

SEQ ID NO: 1974585 - DNA, 25 bp, Homo sapien
tccgggccgtgtcccttgcggccgc

SEQ ID NO: 1974586 - DNA, 25 bp, Homo sapien
gcagggtccgggccgtgtcccttgc

SEQ ID NO: 1974587 - DNA, 25 bp, Homo sapien
cagggtccgggccgtgtcccttgcg

SEQ ID NO: 1974588 - DNA, 25 bp, Homo sapien
ctttgggccgagcgcatgccgggct

SEQ ID NO: 1974589 - DNA, 25 bp, Homo sapien
ttgggccgagcgcatgccgggctcc

SEQ ID NO: 1974590 - DNA, 25 bp, Homo sapien
tttgggccgagcgcatgccgggctc

SEQ ID NO: 1974591 - DNA, 25 bp, Homo sapien
agctgctcggtgcgctgccgcttct

SEQ ID NO: 1974592 - DNA, 25 bp, Homo sapien
gagccggtgcgtctgctgcaggtcg

SEQ ID NO: 1974593 - DNA, 25 bp, Homo sapien
tgcaggtcgcgcttctggtcgcgca

SEQ ID NO: 1974594 - DNA, 25 bp, Homo sapien
agcatgcggtcgatgccccggctca

SEQ ID NO: 1974595 - DNA, 25 bp, Homo sapien
caggatcgaccccatgggggagaaa

SEQ ID NO: 1974596 - DNA, 25 bp, Homo sapien
tcaggatcgaccccatgggggagaa

SEQ ID NO: 1974597 - DNA, 25 bp, Homo sapien
gtcatcaggatcgaccccatggggg

SEQ ID NO: 1974598 - DNA, 25 bp, Homo sapien
catcaggatcgaccccatgggggag

SEQ ID NO: 1974599 - DNA, 25 bp, Homo sapien
cccagattcttgtgttgttgccaga

SEQ ID NO: 1974600 - DNA, 25 bp, Homo sapien
ctcatagtcacagtggctcccagat

SEQ ID NO: 1974601 - DNA, 25 bp, Homo sapien
tcttgtgttgttgccagaggattgt

SEQ ID NO: 1974602 - DNA, 25 bp, Homo sapien
ttaaaacgggagcatatctcctcat

SEQ ID NO: 1974603 - DNA, 25 bp, Homo sapien
agccacggcatgcttcaaccatgct

SEQ ID NO: 1974604 - DNA, 25 bp, Homo sapien
tgcttaaaatccagccacggcatgc

SEQ ID NO: 1974605 - DNA, 25 bp, Homo sapien
ttaaaatccagccacggcatgcttc

SEQ ID NO: 1974606 - DNA, 25 bp, Homo sapien
aaaatccagccacggcatgcttcaa

SEQ ID NO: 1974607 - DNA, 25 bp, Homo sapien
taaggaatagccagagtactgggat

SEQ ID NO: 1974608 - DNA, 25 bp, Homo sapien
ttgaaagccacggtgccacaggagg

SEQ ID NO: 1974609 - DNA, 25 bp, Homo sapien
tgcacgtcctccctaggtggcatgt

SEQ ID NO: 1974610 - DNA, 25 bp, Homo sapien
caacctggccagtgcactaatgact

SEQ ID NO: 1974611 - DNA, 25 bp, Homo sapien
ccttactcggagaatgtccttgcca

SEQ ID NO: 1974612 - DNA, 25 bp, Homo sapien
aacacatctagaccggagctcactg

SEQ ID NO: 1974613 - DNA, 25 bp, Homo sapien
ctaattcaaggacaaaatctttcac

SEQ ID NO: 1974614 - DNA, 25 bp, Homo sapien
attcaaggacaaaatctttcactga

SEQ ID NO: 1974615 - DNA, 25 bp, Homo sapien
ggacaaaatctttcactgacttctt

SEQ ID NO: 1974616 - DNA, 25 bp, Homo sapien
aaggacaaaatctttcactgacttc

SEQ ID NO: 1974617 - DNA, 25 bp, Homo sapien
tgctatggccactgtggtgtctgtc

SEQ ID NO: 1974618 - DNA, 25 bp, Homo sapien
gcttatggcccctaaacgggctcat

SEQ ID NO: 1974619 - DNA, 25 bp, Homo sapien
gaagaaccctcgacccttctgctat

SEQ ID NO: 1974620 - DNA, 25 bp, Homo sapien
tgggctttttaagagtagggccatc

SEQ ID NO: 1974621 - DNA, 25 bp, Homo sapien
cttgtggagcactttgatggctgga

SEQ ID NO: 1974622 - DNA, 25 bp, Homo sapien
tgctctgcagccaagtcaaaggttc

SEQ ID NO: 1974623 - DNA, 25 bp, Homo sapien
tcccgtttgataacactgcacactg

SEQ ID NO: 1974624 - DNA, 25 bp, Homo sapien
tattaggtaaacactccaggttgct

SEQ ID NO: 1974625 - DNA, 25 bp, Homo sapien
gattcctgtgtctggcctaattcca

SEQ ID NO: 1974626 - DNA, 25 bp, Homo sapien
tgctagcgagctttgtatctacaga

SEQ ID NO: 1974627 - DNA, 25 bp, Homo sapien
acgccctctagatgctcccgaagta

SEQ ID NO: 1974628 - DNA, 25 bp, Homo sapien
cctgggacgtggtagacgtgctact

SEQ ID NO: 1974629 - DNA, 25 bp, Homo sapien
tatagtagtgagacaccagaaggag

SEQ ID NO: 1974630 - DNA, 25 bp, Homo sapien
tgggaaaaggtgcaaaactcatgac

SEQ ID NO: 1974631 - DNA, 25 bp, Homo sapien
aattttatgcacgtcgggcctgccc

SEQ ID NO: 1974632 - DNA, 25 bp, Homo sapien
tatcttgcttcacccagcgtgctga

SEQ ID NO: 1974633 - DNA, 25 bp, Homo sapien
tctgcactgtccatggctgctgcag

SEQ ID NO: 1974634 - DNA, 25 bp, Homo sapien
cagcatggtgtgagcgcagctctgc

SEQ ID NO: 1974635 - DNA, 25 bp, Homo sapien
cgtccacggccgctgcagcatggtg

SEQ ID NO: 1974636 - DNA, 25 bp, Homo sapien
tgcagcatggtgtgagtgcagctct

SEQ ID NO: 1974637 - DNA, 25 bp, Homo sapien
ctataaatgtcttgatgttgccact

SEQ ID NO: 1974638 - DNA, 25 bp, Homo sapien
agcatggtgcgagcgcagctctgca

SEQ ID NO: 1974639 - DNA, 25 bp, Homo sapien
ctgcagcatggtgcgagcgcagctc

SEQ ID NO: 1974640 - DNA, 25 bp, Homo sapien
ccactgcagcatggtgcgagcgcag

SEQ ID NO: 1974641 - DNA, 25 bp, Homo sapien
ggtcttacctccgtgcctgtctgtg

SEQ ID NO: 1974642 - DNA, 25 bp, Homo sapien
tatatgattttgtgggaggcagccc

SEQ ID NO: 1974643 - DNA, 25 bp, Homo sapien
cctaacatttgggtgtgtgactccg

SEQ ID NO: 1974644 - DNA, 25 bp, Homo sapien
ttaaatccccaatctccaaatgcag

SEQ ID NO: 1974645 - DNA, 25 bp, Homo sapien
ccagttccatcgagaaaccaccgag

SEQ ID NO: 1974646 - DNA, 25 bp, Homo sapien
ttcatctgaactaagagctgtttca

SEQ ID NO: 1974647 - DNA, 25 bp, Homo sapien
catcgagaaaccaccgagcctctgg

SEQ ID NO: 1974648 - DNA, 25 bp, Homo sapien
catctgaactaagagctgtttcaaa

SEQ ID NO: 1974649 - DNA, 25 bp, Homo sapien
gagcctggacgctgggggttctgcc

SEQ ID NO: 1974650 - DNA, 25 bp, Homo sapien
agacagcctccactgggttccctgg

SEQ ID NO: 1974651 - DNA, 25 bp, Homo sapien
tgccttctgtgaagcagagcctgga

SEQ ID NO: 1974652 - DNA, 25 bp, Homo sapien
ttctgccggcctgcagacccaccct

SEQ ID NO: 1974653 - DNA, 25 bp, Homo sapien
tggaaggagtgcctcctcctttacc

SEQ ID NO: 1974654 - DNA, 25 bp, Homo sapien
aattttccaattctgcctggaagga

SEQ ID NO: 1974655 - DNA, 25 bp, Homo sapien
aggagtgcctcctcctttaccctgg

SEQ ID NO: 1974656 - DNA, 25 bp, Homo sapien
actacacaattttccaattctgcct

SEQ ID NO: 1974657 - DNA, 25 bp, Homo sapien
cctcacccgctctgcacggactcat

SEQ ID NO: 1974658 - DNA, 25 bp, Homo sapien
tcatcctcacccgctctgcacggac

SEQ ID NO: 1974659 - DNA, 25 bp, Homo sapien
atcctcacccgctctgcacggactc

SEQ ID NO: 1974660 - DNA, 25 bp, Homo sapien
agtcccccaggtcactgccgtcctg

SEQ ID NO: 1974661 - DNA, 25 bp, Homo sapien
taagatgttatgacgtcgggcggca

SEQ ID NO: 1974662 - DNA, 25 bp, Homo sapien
catcatggtgtttctgctcgtgtac

SEQ ID NO: 1974663 - DNA, 25 bp, Homo sapien
tgtacttcggtgatgcactgatcgc

SEQ ID NO: 1974664 - DNA, 25 bp, Homo sapien
agtgggcagcggacaccatcatggt

SEQ ID NO: 1974665 - DNA, 25 bp, Homo sapien
aagaagcagttggtgtgtccattgg

SEQ ID NO: 1974666 - DNA, 25 bp, Homo sapien
cgaaatgcgtgtgaacagaaaggca

SEQ ID NO: 1974667 - DNA, 25 bp, Homo sapien
ctcaaatcggctgcattccaaatag

SEQ ID NO: 1974668 - DNA, 25 bp, Homo sapien
tgtccattggcattctcaaaacgaa

SEQ ID NO: 1974669 - DNA, 25 bp, Homo sapien
ctgaagacacaaccaaaatccatct

SEQ ID NO: 1974670 - DNA, 25 bp, Homo sapien
gaagacacaaccaaaatccatcttc

SEQ ID NO: 1974671 - DNA, 25 bp, Homo sapien
aaccaaaatccatcttctgttacgg

SEQ ID NO: 1974672 - DNA, 25 bp, Homo sapien
agacacaaccaaaatccatcttctg

SEQ ID NO: 1974673 - DNA, 25 bp, Homo sapien
aacttcatagtgtcccagaacaaaa

SEQ ID NO: 1974674 - DNA, 25 bp, Homo sapien
tgctccaatggaacaagaacttcag

SEQ ID NO: 1974675 - DNA, 25 bp, Homo sapien
acttcatagtgtcccagaacaaaag

SEQ ID NO: 1974676 - DNA, 25 bp, Homo sapien
gagtcgtggagtgctccaatggaac

SEQ ID NO: 1974677 - DNA, 25 bp, Homo sapien
ccacattgttacagaaggcatgcag

SEQ ID NO: 1974678 - DNA, 25 bp, Homo sapien
cacattgttacagaaggcatgcaga

SEQ ID NO: 1974679 - DNA, 25 bp, Homo sapien
ccctgggagccaccggcagagggtc

SEQ ID NO: 1974680 - DNA, 25 bp, Homo sapien
caggctgactgcgccagagccagga

SEQ ID NO: 1974681 - DNA, 25 bp, Homo sapien
ctgggagccaccggcagagggtcca

SEQ ID NO: 1974682 - DNA, 25 bp, Homo sapien
tgccctgggagccaccggcagaggg

SEQ ID NO: 1974683 - DNA, 25 bp, Homo sapien
cagttaccgcatcccgttgggtccg

SEQ ID NO: 1974684 - DNA, 25 bp, Homo sapien
ttgccaaggattgagctcatgcccc

SEQ ID NO: 1974685 - DNA, 25 bp, Homo sapien
tgtctggaattcaccttgccaagga

SEQ ID NO: 1974686 - DNA, 25 bp, Homo sapien
aaccagaacggtgggagttatgcca

SEQ ID NO: 1974687 - DNA, 25 bp, Homo sapien
gcagcttggcgtttgcagtgttgta

SEQ ID NO: 1974688 - DNA, 25 bp, Homo sapien
ttactgagacccctccaatagggcc

SEQ ID NO: 1974689 - DNA, 25 bp, Homo sapien
ttgtagcagaggaacgaactagggc

SEQ ID NO: 1974690 - DNA, 25 bp, Homo sapien
gcagcacaacaactcttccagaagg

SEQ ID NO: 1974691 - DNA, 25 bp, Homo sapien
gtgttggctcggacgcgtccctgct

SEQ ID NO: 1974692 - DNA, 25 bp, Homo sapien
tcttgcaccccgagccgggaaagtg

SEQ ID NO: 1974693 - DNA, 25 bp, Homo sapien
cgaagactcgcggaggatcatgcat

SEQ ID NO: 1974694 - DNA, 25 bp, Homo sapien
ggaggaggatccctccgaggctcac

SEQ ID NO: 1974695 - DNA, 25 bp, Homo sapien
tgttttccgattcagagcaggcgtt

SEQ ID NO: 1974696 - DNA, 25 bp, Homo sapien
ggaagacgcgcggagtaaaatgcct

SEQ ID NO: 1974697 - DNA, 25 bp, Homo sapien
aatacagcacaatgaacggagacgg

SEQ ID NO: 1974698 - DNA, 25 bp, Homo sapien
tgctattcctcagccgtcggacgtg

SEQ ID NO: 1974699 - DNA, 25 bp, Homo sapien
tcgttctttttcatcgacgccctgg

SEQ ID NO: 1974700 - DNA, 25 bp, Homo sapien
taagccaggcgctctttctgcaact

SEQ ID NO: 1974701 - DNA, 25 bp, Homo sapien
ctttttgttggcctcgcgtcgttct

SEQ ID NO: 1974702 - DNA, 25 bp, Homo sapien
tcttccgtcgtcttgctgttgccgc

SEQ ID NO: 1974703 - DNA, 25 bp, Homo sapien
gacgatagtgcttttcccagactca

SEQ ID NO: 1974704 - DNA, 25 bp, Homo sapien
cgggattaaacccattgacgtgcag

SEQ ID NO: 1974705 - DNA, 25 bp, Homo sapien
catctgtttgacgatagtgcttttc

SEQ ID NO: 1974706 - DNA, 25 bp, Homo sapien
ggattaaacccattgacgtgcagga

SEQ ID NO: 1974707 - DNA, 25 bp, Homo sapien
ttttccggatgtccagaattttctg

SEQ ID NO: 1974708 - DNA, 25 bp, Homo sapien
tccggatgtccagaattttctgttt

SEQ ID NO: 1974709 - DNA, 25 bp, Homo sapien
cgatagcatctttaacatttttccg

SEQ ID NO: 1974710 - DNA, 25 bp, Homo sapien
acatttttccggatgtccagaattt

SEQ ID NO: 1974711 - DNA, 25 bp, Homo sapien
tgatcgaaattggttttcagggttg

SEQ ID NO: 1974712 - DNA, 25 bp, Homo sapien
gggctatgctcttgatgtagtctga

SEQ ID NO: 1974713 - DNA, 25 bp, Homo sapien
tcaaagtcagtgataggggctatgc

SEQ ID NO: 1974714 - DNA, 25 bp, Homo sapien
ttggccagcggaactggaggtatta

SEQ ID NO: 1974715 - DNA, 25 bp, Homo sapien
tacagagcccacaggacaatggtgc

SEQ ID NO: 1974716 - DNA, 25 bp, Homo sapien
caatacagagcccacaggacaatgg

SEQ ID NO: 1974717 - DNA, 25 bp, Homo sapien
atcccaatacagagcccacaggaca

SEQ ID NO: 1974718 - DNA, 25 bp, Homo sapien
tcccaatacagagcccacaggacaa

SEQ ID NO: 1974719 - DNA, 25 bp, Homo sapien
cacttggctctctatgcagggccca

SEQ ID NO: 1974720 - DNA, 25 bp, Homo sapien
gatattgtgcggaagaatctgaccg

SEQ ID NO: 1974721 - DNA, 25 bp, Homo sapien
ttctagcaggagatagacacaggct

SEQ ID NO: 1974722 - DNA, 25 bp, Homo sapien
gaccgcattctggagattctgcaca

SEQ ID NO: 1974723 - DNA, 25 bp, Homo sapien
aattaggtggttgctgttttgctgt

SEQ ID NO: 1974724 - DNA, 25 bp, Homo sapien
gtcccctgacttcttgtgcccacag

SEQ ID NO: 1974725 - DNA, 25 bp, Homo sapien
tggattcagaggattctatcataac

SEQ ID NO: 1974726 - DNA, 25 bp, Homo sapien
gtgcccacaggtccttactgaagtg

SEQ ID NO: 1974727 - DNA, 25 bp, Homo sapien
tgtcttcgcaggacagggatgtaag

SEQ ID NO: 1974728 - DNA, 25 bp, Homo sapien
atggcaatgctgtcttcgcaggaca

SEQ ID NO: 1974729 - DNA, 25 bp, Homo sapien
tgctgtcttcgcaggacagggatgt

SEQ ID NO: 1974730 - DNA, 25 bp, Homo sapien
caatgctgtcttcgcaggacaggga

SEQ ID NO: 1974731 - DNA, 25 bp, Homo sapien
aggcttgttcttcggccacaccaag

SEQ ID NO: 1974732 - DNA, 25 bp, Homo sapien
aaactgggccccgtgcgtggcttca

SEQ ID NO: 1974733 - DNA, 25 bp, Homo sapien
gtgccgagtcaaactgggccccgtg

SEQ ID NO: 1974734 - DNA, 25 bp, Homo sapien
acaccaagacgtgccgagtcaaact

SEQ ID NO: 1974735 - DNA, 25 bp, Homo sapien
taatgataccggtcctggaagaaag

SEQ ID NO: 1974736 - DNA, 25 bp, Homo sapien
cagtgtcgtctgacacatgagcagt

SEQ ID NO: 1974737 - DNA, 25 bp, Homo sapien
ctggaagaaagagatgtagcttcca

SEQ ID NO: 1974738 - DNA, 25 bp, Homo sapien
caatgatgtgctgaaaacttggcca

SEQ ID NO: 1974739 - DNA, 25 bp, Homo sapien
caatcccctttctcaagaacctatt

SEQ ID NO: 1974740 - DNA, 25 bp, Homo sapien
gctgtctctggctcttttcacagtt

SEQ ID NO: 1974741 - DNA, 25 bp, Homo sapien
tcttttcacagtttccacaatcccc

SEQ ID NO: 1974742 - DNA, 25 bp, Homo sapien
agaacctatttttatcagttcccat

SEQ ID NO: 1974743 - DNA, 25 bp, Homo sapien
agttggctgccgcaacacctgtggc

SEQ ID NO: 1974744 - DNA, 25 bp, Homo sapien
gagaacacagttggctgccgcaaca

SEQ ID NO: 1974745 - DNA, 25 bp, Homo sapien
gccacgtggttggtttcattcccca

SEQ ID NO: 1974746 - DNA, 25 bp, Homo sapien
caagggagacttagaagcagtcaga

SEQ ID NO: 1974747 - DNA, 25 bp, Homo sapien
cacggagcatcccatacttccatct

SEQ ID NO: 1974748 - DNA, 25 bp, Homo sapien
ctcgagctgcaggttatttttagca

SEQ ID NO: 1974749 - DNA, 25 bp, Homo sapien
ccaggccagttgtgatgactcacgc

SEQ ID NO: 1974750 - DNA, 25 bp, Homo sapien
gtcaggagctcgagctgcaggttat

SEQ ID NO: 1974751 - DNA, 25 bp, Homo sapien
ggagctcgagctgcaggttattttt

SEQ ID NO: 1974752 - DNA, 25 bp, Homo sapien
gccacagccactttctgagcttcct

SEQ ID NO: 1974753 - DNA, 25 bp, Homo sapien
tgctccagccacagccactttctga

SEQ ID NO: 1974754 - DNA, 25 bp, Homo sapien
cagccacagccactttctgagcttc

SEQ ID NO: 1974755 - DNA, 25 bp, Homo sapien
tccagccacagccactttctgagct

SEQ ID NO: 1974756 - DNA, 25 bp, Homo sapien
tggcaaggcccggatttcaatggtg

SEQ ID NO: 1974757 - DNA, 25 bp, Homo sapien
gcagtcaagagtgtggcgatcagcc

SEQ ID NO: 1974758 - DNA, 25 bp, Homo sapien
tggagagcaccacattaagtcctgg

SEQ ID NO: 1974759 - DNA, 25 bp, Homo sapien
tacagaacacctgcatgtggagagc

SEQ ID NO: 1974760 - DNA, 25 bp, Homo sapien
tccatggcctgtcccagcgactcct

SEQ ID NO: 1974761 - DNA, 25 bp, Homo sapien
ccatggcctgtcccagcgactcctc

SEQ ID NO: 1974762 - DNA, 25 bp, Homo sapien
cacagcagttatttgcctgcctttg

SEQ ID NO: 1974763 - DNA, 25 bp, Homo sapien
gcagttatttgcctgcctttgatct

SEQ ID NO: 1974764 - DNA, 25 bp, Homo sapien
tcgttggatctctcaaagcatgcct

SEQ ID NO: 1974765 - DNA, 25 bp, Homo sapien
tcagctggtattcgttggatctctc

SEQ ID NO: 1974766 - DNA, 25 bp, Homo sapien
catcgtcccaaagttttttcacatg

SEQ ID NO: 1974767 - DNA, 25 bp, Homo sapien
aaagcatgccttcacgccttcatcg

SEQ ID NO: 1974768 - DNA, 25 bp, Homo sapien
catgcccagcttctattgtgcctta

SEQ ID NO: 1974769 - DNA, 25 bp, Homo sapien
gactgcttaacgattgaagtattgc

SEQ ID NO: 1974770 - DNA, 25 bp, Homo sapien
agactgcattggagttcccctgaga

SEQ ID NO: 1974771 - DNA, 25 bp, Homo sapien
tgaagtattgcagaaagagtgagtg

SEQ ID NO: 1974772 - DNA, 25 bp, Homo sapien
aaggaggcctgaaggacaaggcagc

SEQ ID NO: 1974773 - DNA, 25 bp, Homo sapien
aggaggcctgaaggacaaggcagca

SEQ ID NO: 1974774 - DNA, 25 bp, Homo sapien
ggaggcctgaaggacaaggcagcat

SEQ ID NO: 1974775 - DNA, 25 bp, Homo sapien
caaggaggcctgaaggacaaggcag

SEQ ID NO: 1974776 - DNA, 25 bp, Homo sapien
catttgtggtaatcccactaaaaat

SEQ ID NO: 1974777 - DNA, 25 bp, Homo sapien
cacaaaaacatttgtggtaatccca

SEQ ID NO: 1974778 - DNA, 25 bp, Homo sapien
tccacccaagtaagtagattttctg

SEQ ID NO: 1974779 - DNA, 25 bp, Homo sapien
acccaagtaagtagattttctgaga

SEQ ID NO: 1974780 - DNA, 25 bp, Homo sapien
aatccagctctaaggcatcaaaaat

SEQ ID NO: 1974781 - DNA, 25 bp, Homo sapien
gaaatactgaaaaatccagctctaa

SEQ ID NO: 1974782 - DNA, 25 bp, Homo sapien
aaaatccagctctaaggcatcaaaa

SEQ ID NO: 1974783 - DNA, 25 bp, Homo sapien
ctaagaaatactgaaaaatccagct

SEQ ID NO: 1974784 - DNA, 25 bp, Homo sapien
gaagcgaatacaagggctccggctc

SEQ ID NO: 1974785 - DNA, 25 bp, Homo sapien
cagttccgtgtgacgaagcgttcca

SEQ ID NO: 1974786 - DNA, 25 bp, Homo sapien
gcaggcagaagcgaatacaagggct

SEQ ID NO: 1974787 - DNA, 25 bp, Homo sapien
ttgctagtggcattccatacagttc

SEQ ID NO: 1974788 - DNA, 25 bp, Homo sapien
ttgctttggcattggctataaattg

SEQ ID NO: 1974789 - DNA, 25 bp, Homo sapien
tttgctttggcattggctataaatt

SEQ ID NO: 1974790 - DNA, 25 bp, Homo sapien
atgaattttgaaaacgggcactagt

SEQ ID NO: 1974791 - DNA, 25 bp, Homo sapien
ctcacagagcaactgccatgttctc

SEQ ID NO: 1974792 - DNA, 25 bp, Homo sapien
tcacagagcaactgccatgttctca

SEQ ID NO: 1974793 - DNA, 25 bp, Homo sapien
cacagagcaactgccatgttctcac

SEQ ID NO: 1974794 - DNA, 25 bp, Homo sapien
ccacctctgaaggaatatggaagcc

SEQ ID NO: 1974795 - DNA, 25 bp, Homo sapien
taatacggtacaaatcccacctctg

SEQ ID NO: 1974796 - DNA, 25 bp, Homo sapien
tatggaagccagttgttcttacgta

SEQ ID NO: 1974797 - DNA, 25 bp, Homo sapien
caggattgcgtctggcgtaatacgg

SEQ ID NO: 1974798 - DNA, 25 bp, Homo sapien
tcttggagtttgcaaacaagtttct

SEQ ID NO: 1974799 - DNA, 25 bp, Homo sapien
cttggagtttgcaaacaagtttctt

SEQ ID NO: 1974800 - DNA, 25 bp, Homo sapien
ttggagtttgcaaacaagtttctta

SEQ ID NO: 1974801 - DNA, 25 bp, Homo sapien
tgtgggacgtaagacgccaggggct

SEQ ID NO: 1974802 - DNA, 25 bp, Homo sapien
ctgtgggacgtaagacgccaggggc

SEQ ID NO: 1974803 - DNA, 25 bp, Homo sapien
aggggctgcgcatgcagggggattc

SEQ ID NO: 1974804 - DNA, 25 bp, Homo sapien
ggctgcgcatgcagggggattctgg

SEQ ID NO: 1974805 - DNA, 25 bp, Homo sapien
ctcctttgggtcggcggcccggctg

SEQ ID NO: 1974806 - DNA, 25 bp, Homo sapien
aagcgcgccgaaggcagagaaggta

SEQ ID NO: 1974807 - DNA, 25 bp, Homo sapien
tgtgagcggcgcaggtggtgacgtc

SEQ ID NO: 1974808 - DNA, 25 bp, Homo sapien
aaaggcggagcctgcgggacggaag

SEQ ID NO: 1974809 - DNA, 25 bp, Homo sapien
cattctcaagaaattcaccgcctgg

SEQ ID NO: 1974810 - DNA, 25 bp, Homo sapien
catttgctgcgtctggacgtccaga

SEQ ID NO: 1974811 - DNA, 25 bp, Homo sapien
ggcattttcggcgtgtatcctcgca

SEQ ID NO: 1974812 - DNA, 25 bp, Homo sapien
tctttggccgcgaacttcaggttga

SEQ ID NO: 1974813 - DNA, 25 bp, Homo sapien
gaaatagcacagtccaccgaataca

SEQ ID NO: 1974814 - DNA, 25 bp, Homo sapien
aagggcatttcagcattctggcgtg

SEQ ID NO: 1974815 - DNA, 25 bp, Homo sapien
gccaggaaacctcagagcgggttct

SEQ ID NO: 1974816 - DNA, 25 bp, Homo sapien
catttcaaagggtggctatggccag

SEQ ID NO: 1974817 - DNA, 25 bp, Homo sapien
caattatcacgtgaaaaatttatag

SEQ ID NO: 1974818 - DNA, 25 bp, Homo sapien
gcagtaagagagtattatgcaaaaa

SEQ ID NO: 1974819 - DNA, 25 bp, Homo sapien
agagagtattatgcaaaaatatcct

SEQ ID NO: 1974820 - DNA, 25 bp, Homo sapien
ttcccagttacgcaaagacaattat

SEQ ID NO: 1974821 - DNA, 25 bp, Homo sapien
ttaagagtgtgtaacatgactgcca

SEQ ID NO: 1974822 - DNA, 25 bp, Homo sapien
ctgtcaaatgtcacactaagtcttt

SEQ ID NO: 1974823 - DNA, 25 bp, Homo sapien
ttagagaagttcgtttgaaagacac

SEQ ID NO: 1974824 - DNA, 25 bp, Homo sapien
aaacgaaatcaacagttctttggca

SEQ ID NO: 1974825 - DNA, 25 bp, Homo sapien
tacgcactgccattcctgagaagat

SEQ ID NO: 1974826 - DNA, 25 bp, Homo sapien
tgggctctagccttaaagactcaag

SEQ ID NO: 1974827 - DNA, 25 bp, Homo sapien
tgcacaaccatgtggaggacaggag

SEQ ID NO: 1974828 - DNA, 25 bp, Homo sapien
cttgagagatgctgggcagacaact

SEQ ID NO: 1974829 - DNA, 25 bp, Homo sapien
gtacattcataatagtatgacatgg

SEQ ID NO: 1974830 - DNA, 25 bp, Homo sapien
taagaaagttcaagcatatacaagc

SEQ ID NO: 1974831 - DNA, 25 bp, Homo sapien
tgaggaagtaattcatgggcctgta

SEQ ID NO: 1974832 - DNA, 25 bp, Homo sapien
cagtaatcaactgcaaaagtgagga

SEQ ID NO: 1974833 - DNA, 25 bp, Homo sapien
actatcaggagtgaccacccaggcc

SEQ ID NO: 1974834 - DNA, 25 bp, Homo sapien
tgctatgcagtgcaaggagcccact

SEQ ID NO: 1974835 - DNA, 25 bp, Homo sapien
gcccagagactgacactatgacaga

SEQ ID NO: 1974836 - DNA, 25 bp, Homo sapien
cagaaagctcgaggcactatcagga

SEQ ID NO: 1974837 - DNA, 25 bp, Homo sapien
agcatatcggcgtcactggcagacc

SEQ ID NO: 1974838 - DNA, 25 bp, Homo sapien
gaaccatgtcccaggtgatcagtga

SEQ ID NO: 1974839 - DNA, 25 bp, Homo sapien
taccaggcagttgtaatgcacagcc

SEQ ID NO: 1974840 - DNA, 25 bp, Homo sapien
tggtgactcgtcatccaagagcgtg

SEQ ID NO: 1974841 - DNA, 25 bp, Homo sapien
gtccctcggggaccaacaagcactg

SEQ ID NO: 1974842 - DNA, 25 bp, Homo sapien
ctgggaatgggttaaatggcaagca

SEQ ID NO: 1974843 - DNA, 25 bp, Homo sapien
agcactgggaatgggttaaatggca

SEQ ID NO: 1974844 - DNA, 25 bp, Homo sapien
caagcaggggacaattctggagaca

SEQ ID NO: 1974845 - DNA, 25 bp, Homo sapien
tgcaaagaaagccagcaagggttga

SEQ ID NO: 1974846 - DNA, 25 bp, Homo sapien
aagccagcaagggttgaggcctgtt

SEQ ID NO: 1974847 - DNA, 25 bp, Homo sapien
cagcaagggttgaggcctgttctct

SEQ ID NO: 1974848 - DNA, 25 bp, Homo sapien
agaaagccagcaagggttgaggcct

SEQ ID NO: 1974849 - DNA, 25 bp, Homo sapien
aagctgacgctgtcgattctttcca

SEQ ID NO: 1974850 - DNA, 25 bp, Homo sapien
tagtcaaccaagctgacgctgtcga

SEQ ID NO: 1974851 - DNA, 25 bp, Homo sapien
gacgctgtcgattctttccaggaag

SEQ ID NO: 1974852 - DNA, 25 bp, Homo sapien
gggtgtgtagtcaaccaagctgacg

SEQ ID NO: 1974853 - DNA, 25 bp, Homo sapien
taaagacttcgctttcctgaggaca

SEQ ID NO: 1974854 - DNA, 25 bp, Homo sapien
gaacggcatattccttatctgcaga

SEQ ID NO: 1974855 - DNA, 25 bp, Homo sapien
gataaactcatttgcatgctggcaa

SEQ ID NO: 1974856 - DNA, 25 bp, Homo sapien
ggcatagtttatgaagccaggaagt

SEQ ID NO: 1974857 - DNA, 25 bp, Homo sapien
ctgttggcttgggtgaaactcacga

SEQ ID NO: 1974858 - DNA, 25 bp, Homo sapien
ttggcttgggtgaaactcacgatgg

SEQ ID NO: 1974859 - DNA, 25 bp, Homo sapien
cacagtcagggcatcagcattccag

SEQ ID NO: 1974860 - DNA, 25 bp, Homo sapien
ccacagtcagggcatcagcattcca

SEQ ID NO: 1974861 - DNA, 25 bp, Homo sapien
tccacttggaatcgtgtctcaaaaa

SEQ ID NO: 1974862 - DNA, 25 bp, Homo sapien
aatcgtgtctcaaaaatcccagatg

SEQ ID NO: 1974863 - DNA, 25 bp, Homo sapien
cttggaatcgtgtctcaaaaatccc

SEQ ID NO: 1974864 - DNA, 25 bp, Homo sapien
tgtccacttggaatcgtgtctcaaa

SEQ ID NO: 1974865 - DNA, 25 bp, Homo sapien
cagcccttcggctctgggacatcat

SEQ ID NO: 1974866 - DNA, 25 bp, Homo sapien
cacagcccttcggctctgggacatc

SEQ ID NO: 1974867 - DNA, 25 bp, Homo sapien
acagcccttcggctctgggacatca

SEQ ID NO: 1974868 - DNA, 25 bp, Homo sapien
caagccagggctgtgccgagagagt

SEQ ID NO: 1974869 - DNA, 25 bp, Homo sapien
ctgaaatgggtaagccaggggacag

SEQ ID NO: 1974870 - DNA, 25 bp, Homo sapien
ggacaggagacaagccagggctgtg

SEQ ID NO: 1974871 - DNA, 25 bp, Homo sapien
tgaaatgggtaagccaggggacagg

SEQ ID NO: 1974872 - DNA, 25 bp, Homo sapien
ccaggccgtgccgtaggaagattca

SEQ ID NO: 1974873 - DNA, 25 bp, Homo sapien
gaggaacagcacgatccaggccgtg

SEQ ID NO: 1974874 - DNA, 25 bp, Homo sapien
cgtaggaagattcatttcgtggcac

SEQ ID NO: 1974875 - DNA, 25 bp, Homo sapien
ttcatttcgtggcactgagaagggc

SEQ ID NO: 1974876 - DNA, 25 bp, Homo sapien
ccctctggccaccaacatcaaacat

SEQ ID NO: 1974877 - DNA, 25 bp, Homo sapien
cgttaaagcactggatccattttct

SEQ ID NO: 1974878 - DNA, 25 bp, Homo sapien
actggatccattttctcctctcatc

SEQ ID NO: 1974879 - DNA, 25 bp, Homo sapien
ctctcatccctctggccaccaacat

SEQ ID NO: 1974880 - DNA, 25 bp, Homo sapien
gctactgcaggctgcgacgtaaatg

SEQ ID NO: 1974881 - DNA, 25 bp, Homo sapien
gcgacgtaaatgatagctgtgacat

SEQ ID NO: 1974882 - DNA, 25 bp, Homo sapien
gcaggctgcgacgtaaatgatagct

SEQ ID NO: 1974883 - DNA, 25 bp, Homo sapien
gttgtagctactgcaggctgcgacg

SEQ ID NO: 1974884 - DNA, 25 bp, Homo sapien
tgttgttatcttctcgaatcaccat

SEQ ID NO: 1974885 - DNA, 25 bp, Homo sapien
gtgttgttatcttctcgaatcacca

SEQ ID NO: 1974886 - DNA, 25 bp, Homo sapien
gatgatagaaatggtccgtaaccac

SEQ ID NO: 1974887 - DNA, 25 bp, Homo sapien
tcaagaacaagatgatagaaatggt

SEQ ID NO: 1974888 - DNA, 25 bp, Homo sapien
tgccagcatatcttgtttgttcaag

SEQ ID NO: 1974889 - DNA, 25 bp, Homo sapien
gcatatcttgtttgttcaagaacaa

SEQ ID NO: 1974890 - DNA, 25 bp, Homo sapien
gggtgactttggtagttcacagaat

SEQ ID NO: 1974891 - DNA, 25 bp, Homo sapien
agaagggtgactttggtagttcaca

SEQ ID NO: 1974892 - DNA, 25 bp, Homo sapien
aagggtgactttggtagttcacaga

SEQ ID NO: 1974893 - DNA, 25 bp, Homo sapien
gaagggtgactttggtagttcacag

SEQ ID NO: 1974894 - DNA, 25 bp, Homo sapien
agcccctggacggaagcccttcagc

SEQ ID NO: 1974895 - DNA, 25 bp, Homo sapien
gcccctggacggaagcccttcagca

SEQ ID NO: 1974896 - DNA, 25 bp, Homo sapien
agatggagatgacgcatgctgctgg

SEQ ID NO: 1974897 - DNA, 25 bp, Homo sapien
gcaccgaggcagcaagccagggtcc

SEQ ID NO: 1974898 - DNA, 25 bp, Homo sapien
tgagtttaacccatgccgtcacatg

SEQ ID NO: 1974899 - DNA, 25 bp, Homo sapien
ttaattgctaagtgagagttgacgt

SEQ ID NO: 1974900 - DNA, 25 bp, Homo sapien
gctacaccctgttaaatgacctgct

SEQ ID NO: 1974901 - DNA, 25 bp, Homo sapien
gttacagcagcgcaagcaagacagg

SEQ ID NO: 1974902 - DNA, 25 bp, Homo sapien
tgagacatctcacgtggccagggca

SEQ ID NO: 1974903 - DNA, 25 bp, Homo sapien
cacaaaagatttggttagggacaca

SEQ ID NO: 1974904 - DNA, 25 bp, Homo sapien
caggtcccggataaagaacttggct

SEQ ID NO: 1974905 - DNA, 25 bp, Homo sapien
ccggataaagaacttggctcttgta

SEQ ID NO: 1974906 - DNA, 25 bp, Homo sapien
gaacttggctcttgtaactttggga

SEQ ID NO: 1974907 - DNA, 25 bp, Homo sapien
ctcttgtaactttgggatcttctcc

SEQ ID NO: 1974908 - DNA, 25 bp, Homo sapien
tcttgtccacacgtgttaagtgcac

SEQ ID NO: 1974909 - DNA, 25 bp, Homo sapien
acagccgaggatcagccctactgct

SEQ ID NO: 1974910 - DNA, 25 bp, Homo sapien
tactgctacctggactaagatcttg

SEQ ID NO: 1974911 - DNA, 25 bp, Homo sapien
ctggagtgccggtccccgtggaaag

SEQ ID NO: 1974912 - DNA, 25 bp, Homo sapien
tactgcttgaggtgcatccgctgga

SEQ ID NO: 1974913 - DNA, 25 bp, Homo sapien
gaacaccctgcggatgttctctgtg

SEQ ID NO: 1974914 - DNA, 25 bp, Homo sapien
tccgctggatgatgtcgcggcagtc

SEQ ID NO: 1974915 - DNA, 25 bp, Homo sapien
taatgtttgccgtcaccggtggccg

SEQ ID NO: 1974916 - DNA, 25 bp, Homo sapien
ccagaggcttggtggtcgacacaga

SEQ ID NO: 1974917 - DNA, 25 bp, Homo sapien
ctccgtcgcagggtggcggcagcat

SEQ ID NO: 1974918 - DNA, 25 bp, Homo sapien
gtcgacacagaacgggacagacggc

SEQ ID NO: 1974919 - DNA, 25 bp, Homo sapien
acggcagcgagatggaactagagac

SEQ ID NO: 1974920 - DNA, 25 bp, Homo sapien
ccgtattcaatgacaacagaagcta

SEQ ID NO: 1974921 - DNA, 25 bp, Homo sapien
ttctgctgcagtgtcggcaatgaga

SEQ ID NO: 1974922 - DNA, 25 bp, Homo sapien
tgtcggcaatgagagtcggtggttt

SEQ ID NO: 1974923 - DNA, 25 bp, Homo sapien
gatgctgcgggaggccgtattcaat

SEQ ID NO: 1974924 - DNA, 25 bp, Homo sapien
ggttccctgaaaagattagattgca

SEQ ID NO: 1974925 - DNA, 25 bp, Homo sapien
gccagcagcgactctgaatgtgact

SEQ ID NO: 1974926 - DNA, 25 bp, Homo sapien
gaacgctcttgcagtcacggttgat

SEQ ID NO: 1974927 - DNA, 25 bp, Homo sapien
cataaagggagaatcagagacggcc

SEQ ID NO: 1974928 - DNA, 25 bp, Homo sapien
tgacgtagcctgtgtccaaagtttt

SEQ ID NO: 1974929 - DNA, 25 bp, Homo sapien
aatgatggacctgttcccacttggg

SEQ ID NO: 1974930 - DNA, 25 bp, Homo sapien
ttttgactaagggaatgatggacct

SEQ ID NO: 1974931 - DNA, 25 bp, Homo sapien
gcagactaatgaggaaacatattgt

SEQ ID NO: 1974932 - DNA, 25 bp, Homo sapien
aaaaactaccctcaactctgtggct

SEQ ID NO: 1974933 - DNA, 25 bp, Homo sapien
tatttatcttagttcagctgagggc

SEQ ID NO: 1974934 - DNA, 25 bp, Homo sapien
taggccagacacaaacattgacacg

SEQ ID NO: 1974935 - DNA, 25 bp, Homo sapien
tgtggctacagctagaatatgaagc

SEQ ID NO: 1974936 - DNA, 25 bp, Homo sapien
tatcaaagcccaagaaatggaactt

SEQ ID NO: 1974937 - DNA, 25 bp, Homo sapien
taaaagtggacaggtactctacaac

SEQ ID NO: 1974938 - DNA, 25 bp, Homo sapien
tcactcacatgcacgacagtccttg

SEQ ID NO: 1974939 - DNA, 25 bp, Homo sapien
gatgatgagaccaattacaggccgt

SEQ ID NO: 1974940 - DNA, 25 bp, Homo sapien
ttctggtttgaacttgctcggaaag

SEQ ID NO: 1974941 - DNA, 25 bp, Homo sapien
tgctcggaaagcgtaagacaagatg

SEQ ID NO: 1974942 - DNA, 25 bp, Homo sapien
cggaaagcgtaagacaagatgaaga

SEQ ID NO: 1974943 - DNA, 25 bp, Homo sapien
tgaacttgctcggaaagcgtaagac

SEQ ID NO: 1974944 - DNA, 25 bp, Homo sapien
aagactgcggtgttcaacgtgtgcc

SEQ ID NO: 1974945 - DNA, 25 bp, Homo sapien
tttccactcaggcacacttgggcct

SEQ ID NO: 1974946 - DNA, 25 bp, Homo sapien
tgctacctcccacgtgaggatgtgg

SEQ ID NO: 1974947 - DNA, 25 bp, Homo sapien
tgggccttacttgtctctcctgctg

SEQ ID NO: 1974948 - DNA, 25 bp, Homo sapien
ctcgctgaccgatgaccctggaact

SEQ ID NO: 1974949 - DNA, 25 bp, Homo sapien
cccactatatttgatgggaacccag

SEQ ID NO: 1974950 - DNA, 25 bp, Homo sapien
ttttgacaggtcagtgtcccagaca

SEQ ID NO: 1974951 - DNA, 25 bp, Homo sapien
ctctgaatctctgttatggatcccc

SEQ ID NO: 1974952 - DNA, 25 bp, Homo sapien
tatccttcagggagggccgtatcct

SEQ ID NO: 1974953 - DNA, 25 bp, Homo sapien
caaagaaaagcccatggagacgacc

SEQ ID NO: 1974954 - DNA, 25 bp, Homo sapien
tttgacctggcagagaacgctgcag

SEQ ID NO: 1974955 - DNA, 25 bp, Homo sapien
tgtttcacttaatgaccactgggcg

SEQ ID NO: 1974956 - DNA, 25 bp, Homo sapien
ggggccgagtccccgagctcagcgt

SEQ ID NO: 1974957 - DNA, 25 bp, Homo sapien
tgcgaggtgcaccacgggggccgag

SEQ ID NO: 1974958 - DNA, 25 bp, Homo sapien
tcagttggaggaacagaaacaaccc

SEQ ID NO: 1974959 - DNA, 25 bp, Homo sapien
cgagctcagcgtcccatctttcagt

SEQ ID NO: 1974960 - DNA, 25 bp, Homo sapien
tggtggctccagccgcgcctggttc

SEQ ID NO: 1974961 - DNA, 25 bp, Homo sapien
gaggatgagctaacagcctgctttg

SEQ ID NO: 1974962 - DNA, 25 bp, Homo sapien
tttaaggaaagaagcgatggccagc

SEQ ID NO: 1974963 - DNA, 25 bp, Homo sapien
aagcgatggccagcggccgtctgct

SEQ ID NO: 1974964 - DNA, 25 bp, Homo sapien
atataaaatctgggatgagaacaaa

SEQ ID NO: 1974965 - DNA, 25 bp, Homo sapien
agggctgaccttacctttgatttag

SEQ ID NO: 1974966 - DNA, 25 bp, Homo sapien
aatctgggatgagaacaaagggctg

SEQ ID NO: 1974967 - DNA, 25 bp, Homo sapien
caaagggctgaccttacctttgatt

SEQ ID NO: 1974968 - DNA, 25 bp, Homo sapien
tcctaccctcaagtcagtaatagtc

SEQ ID NO: 1974969 - DNA, 25 bp, Homo sapien
tctcagctattctttgtattcagag

SEQ ID NO: 1974970 - DNA, 25 bp, Homo sapien
ttctgtttcctaccctcaagtcagt

SEQ ID NO: 1974971 - DNA, 25 bp, Homo sapien
cctcaagtcagtaatagtctcagct

SEQ ID NO: 1974972 - DNA, 25 bp, Homo sapien
tcggagaagtgatgctaactgttct

SEQ ID NO: 1974973 - DNA, 25 bp, Homo sapien
gcattatcctctgtatcggagaagt

SEQ ID NO: 1974974 - DNA, 25 bp, Homo sapien
tgtggtttcacgatagccgcctgaa

SEQ ID NO: 1974975 - DNA, 25 bp, Homo sapien
ccatttaaggagaactatgacgtgc

SEQ ID NO: 1974976 - DNA, 25 bp, Homo sapien
ggagagcccaggttgcctggaagtg

SEQ ID NO: 1974977 - DNA, 25 bp, Homo sapien
tggaagtgcaaacccacaggctgtc

SEQ ID NO: 1974978 - DNA, 25 bp, Homo sapien
agagcccaggttgcctggaagtgca

SEQ ID NO: 1974979 - DNA, 25 bp, Homo sapien
gcctggaagtgcaaacccacaggct

SEQ ID NO: 1974980 - DNA, 25 bp, Homo sapien
ccggtttgtttgcagtaaggtcgct

SEQ ID NO: 1974981 - DNA, 25 bp, Homo sapien
tgtttgcagtaaggtcgcttatctg

SEQ ID NO: 1974982 - DNA, 25 bp, Homo sapien
cagtaaggtcgcttatctgcaagga

SEQ ID NO: 1974983 - DNA, 25 bp, Homo sapien
gtcgcttatctgcaaggagtaagag

SEQ ID NO: 1974984 - DNA, 25 bp, Homo sapien
ggtgtctgcagagctcccaggtgct

SEQ ID NO: 1974985 - DNA, 25 bp, Homo sapien
gctggtggtcagcaggtttccttca

SEQ ID NO: 1974986 - DNA, 25 bp, Homo sapien
gtctgcagagctcccaggtgctggt

SEQ ID NO: 1974987 - DNA, 25 bp, Homo sapien
agctcccaggtgctggtggtcagca

SEQ ID NO: 1974988 - DNA, 25 bp, Homo sapien
agagctctcacggtttcctctttcc

SEQ ID NO: 1974989 - DNA, 25 bp, Homo sapien
ttcctgacaaaaaggtagggctcac

SEQ ID NO: 1974990 - DNA, 25 bp, Homo sapien
gctctcacggtttcctctttcctga

SEQ ID NO: 1974991 - DNA, 25 bp, Homo sapien
tttcctgacaaaaaggtagggctca

SEQ ID NO: 1974992 - DNA, 25 bp, Homo sapien
tgcgcccgtgtgacaacatttaaac

SEQ ID NO: 1974993 - DNA, 25 bp, Homo sapien
ccttccgtgttaggattgcaagtta

SEQ ID NO: 1974994 - DNA, 25 bp, Homo sapien
tctgcctggcgttgtgcgcagagct

SEQ ID NO: 1974995 - DNA, 25 bp, Homo sapien
cgcgctaccgcggaaacaggaagtt

SEQ ID NO: 1974996 - DNA, 25 bp, Homo sapien
tattcatcacacacttcctaagcac

SEQ ID NO: 1974997 - DNA, 25 bp, Homo sapien
ctgtgctcagaagccggccctggcg

SEQ ID NO: 1974998 - DNA, 25 bp, Homo sapien
ctggagctcggacgcgggctctggg

SEQ ID NO: 1974999 - DNA, 25 bp, Homo sapien
tatagttatcctgattgtctccttt

SEQ ID NO: 1975000 - DNA, 25 bp, Homo sapien
cagttgtttggccagttggcccagg

SEQ ID NO: 1975001 - DNA, 25 bp, Homo sapien
agttgtttggccagttggcccagga

SEQ ID NO: 1975002 - DNA, 25 bp, Homo sapien
gcatggggcgaaatccttcctgttt

SEQ ID NO: 1975003 - DNA, 25 bp, Homo sapien
tactgcatggggcgaaatccttcct

SEQ ID NO: 1975004 - DNA, 25 bp, Homo sapien
tgcatggggcgaaatccttcctgtt

SEQ ID NO: 1975005 - DNA, 25 bp, Homo sapien
ctgcatggggcgaaatccttcctgt

SEQ ID NO: 1975006 - DNA, 25 bp, Homo sapien
cgctccccaaaccctactgctgcag

SEQ ID NO: 1975007 - DNA, 25 bp, Homo sapien
tgctcatggcttataaattccatcc

SEQ ID NO: 1975008 - DNA, 25 bp, Homo sapien
cttgggggaggatgtctccatctgt

SEQ ID NO: 1975009 - DNA, 25 bp, Homo sapien
ttccatccaccaatcactgataggc

SEQ ID NO: 1975010 - DNA, 25 bp, Homo sapien
aaatcacaggactgaatgcagcttg

SEQ ID NO: 1975011 - DNA, 25 bp, Homo sapien
cgccctcactgtgtggtagtctgga

SEQ ID NO: 1975012 - DNA, 25 bp, Homo sapien
tctgctgagccctgcattggcaccg

SEQ ID NO: 1975013 - DNA, 25 bp, Homo sapien
tctggactgttcgacttcttggcct

SEQ ID NO: 1975014 - DNA, 25 bp, Homo sapien
tcttggcctggtaatccctggcttt

SEQ ID NO: 1975015 - DNA, 25 bp, Homo sapien
ataatggcaactccgtaggcagagc

SEQ ID NO: 1975016 - DNA, 25 bp, Homo sapien
aaaataatggcaactccgtaggcag

SEQ ID NO: 1975017 - DNA, 25 bp, Homo sapien
aaataatggcaactccgtaggcaga

SEQ ID NO: 1975018 - DNA, 25 bp, Homo sapien
ataaaataatggcaactccgtaggc

SEQ ID NO: 1975019 - DNA, 25 bp, Homo sapien
gctcttggccgctagtgaggaaggc

SEQ ID NO: 1975020 - DNA, 25 bp, Homo sapien
aggctcgaggccgatcctggcccaa

SEQ ID NO: 1975021 - DNA, 25 bp, Homo sapien
gacgcaaggtttccggctcttggcc

SEQ ID NO: 1975022 - DNA, 25 bp, Homo sapien
gggaatctgagacgcaaggtttccg

SEQ ID NO: 1975023 - DNA, 25 bp, Homo sapien
ttgttgtcttcgagtttttggtaga

SEQ ID NO: 1975024 - DNA, 25 bp, Homo sapien
gcttgttgtcttcgagtttttggta

SEQ ID NO: 1975025 - DNA, 25 bp, Homo sapien
tagcttgttgtcttcgagtttttgg

SEQ ID NO: 1975026 - DNA, 25 bp, Homo sapien
cttgttgtcttcgagtttttggtag

SEQ ID NO: 1975027 - DNA, 25 bp, Homo sapien
cagtttgactgatagtgatgacgcc

SEQ ID NO: 1975028 - DNA, 25 bp, Homo sapien
cacagtgaaccgctggtgacagttt

SEQ ID NO: 1975029 - DNA, 25 bp, Homo sapien
gaaccgctggtgacagtttgactga

SEQ ID NO: 1975030 - DNA, 25 bp, Homo sapien
gacgccatgtgctgtagattactaa

SEQ ID NO: 1975031 - DNA, 25 bp, Homo sapien
gggatgagcctcttatccctgggag

SEQ ID NO: 1975032 - DNA, 25 bp, Homo sapien
tgagcctcttatccctgggaggatg

SEQ ID NO: 1975033 - DNA, 25 bp, Homo sapien
tcttatccctgggaggatgtagcat

SEQ ID NO: 1975034 - DNA, 25 bp, Homo sapien
gcctcttatccctgggaggatgtag

SEQ ID NO: 1975035 - DNA, 25 bp, Homo sapien
tgacacactggtccgcgatcgtgct

SEQ ID NO: 1975036 - DNA, 25 bp, Homo sapien
gctgggcctggacattctctcttcg

SEQ ID NO: 1975037 - DNA, 25 bp, Homo sapien
gactggacgttcctgttttggccca

SEQ ID NO: 1975038 - DNA, 25 bp, Homo sapien
tcgtgctagtctcttctgtccaggg

SEQ ID NO: 1975039 - DNA, 25 bp, Homo sapien
ctctttttcctcgcaggtccctgca

SEQ ID NO: 1975040 - DNA, 25 bp, Homo sapien
tctttttcctcgcaggtccctgcac

SEQ ID NO: 1975041 - DNA, 25 bp, Homo sapien
ctttttcctcgcaggtccctgcacc

SEQ ID NO: 1975042 - DNA, 25 bp, Homo sapien
cctctttttcctcgcaggtccctgc

SEQ ID NO: 1975043 - DNA, 25 bp, Homo sapien
ggttaatttcataagccgctctgcc

SEQ ID NO: 1975044 - DNA, 25 bp, Homo sapien
gatgctaacccacgtaaaattattc

SEQ ID NO: 1975045 - DNA, 25 bp, Homo sapien
cagatatgggtacaactttagggac

SEQ ID NO: 1975046 - DNA, 25 bp, Homo sapien
tgagtactttatgctgaaacacctt

SEQ ID NO: 1975047 - DNA, 25 bp, Homo sapien
attctcttgctggcccatgtaaaca

SEQ ID NO: 1975048 - DNA, 25 bp, Homo sapien
gctggcccatgtaaacataaatagg

SEQ ID NO: 1975049 - DNA, 25 bp, Homo sapien
ccatgtaaacataaataggaggcat

SEQ ID NO: 1975050 - DNA, 25 bp, Homo sapien
tggcccatgtaaacataaataggag

SEQ ID NO: 1975051 - DNA, 25 bp, Homo sapien
ggaactgtgattgcgatgagcctct

SEQ ID NO: 1975052 - DNA, 25 bp, Homo sapien
ggacagcggctggactttataaact

SEQ ID NO: 1975053 - DNA, 25 bp, Homo sapien
taaccccaaacactgcgaggacagc

SEQ ID NO: 1975054 - DNA, 25 bp, Homo sapien
tcacacccaaaactcgaatttggag

SEQ ID NO: 1975055 - DNA, 25 bp, Homo sapien
gccgagcgcacaaggccgcagtgtt

SEQ ID NO: 1975056 - DNA, 25 bp, Homo sapien
ttctcggcctcgcaggagctcagac

SEQ ID NO: 1975057 - DNA, 25 bp, Homo sapien
ccgctgggcgctaggcgtcgttctc

SEQ ID NO: 1975058 - DNA, 25 bp, Homo sapien
tcgctttttgttcgcggaggccgct

SEQ ID NO: 1975059 - DNA, 25 bp, Homo sapien
tcaccctccccgctcgaggcggacc

SEQ ID NO: 1975060 - DNA, 25 bp, Homo sapien
cccgctcgaggcggacccaaccctg

SEQ ID NO: 1975061 - DNA, 25 bp, Homo sapien
ccgctcgaggcggacccaaccctgc

SEQ ID NO: 1975062 - DNA, 25 bp, Homo sapien
gcatcaccctccccgctcgaggcgg

SEQ ID NO: 1975063 - DNA, 25 bp, Homo sapien
acacaaatcagtgccgagcctggtc

SEQ ID NO: 1975064 - DNA, 25 bp, Homo sapien
tgggctagccctgaacacaaatcag

SEQ ID NO: 1975065 - DNA, 25 bp, Homo sapien
tctgggctagccctgaacacaaatc

SEQ ID NO: 1975066 - DNA, 25 bp, Homo sapien
tgaacacaaatcagtgccgagcctg

SEQ ID NO: 1975067 - DNA, 25 bp, Homo sapien
gctcccgcagctctgtgcctagtcc

SEQ ID NO: 1975068 - DNA, 25 bp, Homo sapien
gcgggactccggctcccaccggatc

SEQ ID NO: 1975069 - DNA, 25 bp, Homo sapien
gctctgtgcctagtccgccgcccgt

SEQ ID NO: 1975070 - DNA, 25 bp, Homo sapien
agccgtgcgtcctgctttccgctcc

SEQ ID NO: 1975071 - DNA, 25 bp, Homo sapien
tgcacggccgcctggaagcactcct

SEQ ID NO: 1975072 - DNA, 25 bp, Homo sapien
ccgcctggaagcactcctcccaggg

SEQ ID NO: 1975073 - DNA, 25 bp, Homo sapien
ccgcctggtcctcgccgctcggctt

SEQ ID NO: 1975074 - DNA, 25 bp, Homo sapien
cgccagcgccgcctggtcctcgccg

SEQ ID NO: 1975075 - DNA, 25 bp, Homo sapien
cttccgggcagtgtaacaagttcct

SEQ ID NO: 1975076 - DNA, 25 bp, Homo sapien
tcctgaactctgagtccgtggccgt

SEQ ID NO: 1975077 - DNA, 25 bp, Homo sapien
ccactttcagggtgtgggtcagagt

SEQ ID NO: 1975078 - DNA, 25 bp, Homo sapien
ggctcggttttcatccttccgggca

SEQ ID NO: 1975079 - DNA, 25 bp, Homo sapien
gaaactcctaacttagctcgccagg

SEQ ID NO: 1975080 - DNA, 25 bp, Homo sapien
gcaatgtctgaatcctaagctggct

SEQ ID NO: 1975081 - DNA, 25 bp, Homo sapien
gagaacccgtgttccatgcacacag

SEQ ID NO: 1975082 - DNA, 25 bp, Homo sapien
ctttccaggaagaacgcttgcactg

SEQ ID NO: 1975083 - DNA, 25 bp, Homo sapien
agatgacaaccatccacatcagtga

SEQ ID NO: 1975084 - DNA, 25 bp, Homo sapien
tctggcccaacagaagctggttcag

SEQ ID NO: 1975085 - DNA, 25 bp, Homo sapien
tacaatacttctgttcacacatcac

SEQ ID NO: 1975086 - DNA, 25 bp, Homo sapien
atcagtgaatactgtcatctgtact

SEQ ID NO: 1975087 - DNA, 25 bp, Homo sapien
ggggcagggcgccagcctgcagaag

SEQ ID NO: 1975088 - DNA, 25 bp, Homo sapien
gggcagggcgccagcctgcagaagg

SEQ ID NO: 1975089 - DNA, 25 bp, Homo sapien
aggggcagggcgccagcctgcagaa

SEQ ID NO: 1975090 - DNA, 25 bp, Homo sapien
cctccgccctgacaaggcactggca

SEQ ID NO: 1975091 - DNA, 25 bp, Homo sapien
tctcgaatcctcaacgcctccttta

SEQ ID NO: 1975092 - DNA, 25 bp, Homo sapien
tcctttagtctcgtggctatttttc

SEQ ID NO: 1975093 - DNA, 25 bp, Homo sapien
ttcccctcaccttgatctctagtcg

SEQ ID NO: 1975094 - DNA, 25 bp, Homo sapien
aacagctgagggcccaaacagaatg

SEQ ID NO: 1975095 - DNA, 25 bp, Homo sapien
tcaggaaagtagatccctctccttc

SEQ ID NO: 1975096 - DNA, 25 bp, Homo sapien
ggactctgtccacatgaacaactct

SEQ ID NO: 1975097 - DNA, 25 bp, Homo sapien
ttctgggtgtttctgcgagggcatc

SEQ ID NO: 1975098 - DNA, 25 bp, Homo sapien
ggccttcggcacaaagcttgtctca

SEQ ID NO: 1975099 - DNA, 25 bp, Homo sapien
ggccacggtgattcctgatgtgtgt

SEQ ID NO: 1975100 - DNA, 25 bp, Homo sapien
gcttgtctcatgtatggccacggtg

SEQ ID NO: 1975101 - DNA, 25 bp, Homo sapien
ggccagacaggccttcggcacaaag

SEQ ID NO: 1975102 - DNA, 25 bp, Homo sapien
acaggctccgcagctgtgcaagctg

SEQ ID NO: 1975103 - DNA, 25 bp, Homo sapien
agttcatgcaaggatccacagggct

SEQ ID NO: 1975104 - DNA, 25 bp, Homo sapien
agctgtgcaagctgccaacacactg

SEQ ID NO: 1975105 - DNA, 25 bp, Homo sapien
gggctgagctccgacacaggctccg

SEQ ID NO: 1975106 - DNA, 25 bp, Homo sapien
tccacaaggtgatctgtttctgtca

SEQ ID NO: 1975107 - DNA, 25 bp, Homo sapien
tttctgtcacaagatctgcagctga

SEQ ID NO: 1975108 - DNA, 25 bp, Homo sapien
tgttgagacacgtttttcctcagta

SEQ ID NO: 1975109 - DNA, 25 bp, Homo sapien
ggaaacctctctcgcaactcagaaa

SEQ ID NO: 1975110 - DNA, 25 bp, Homo sapien
gctgctttcaccgtgtccacacatt

SEQ ID NO: 1975111 - DNA, 25 bp, Homo sapien
atgtcaatttttgaggcacactgag

SEQ ID NO: 1975112 - DNA, 25 bp, Homo sapien
gtcaatttttgaggcacactgagca

SEQ ID NO: 1975113 - DNA, 25 bp, Homo sapien
aaaaacaactgcatttgatgtcaat

SEQ ID NO: 1975114 - DNA, 25 bp, Homo sapien
aacactagacccttgagctgctgac

SEQ ID NO: 1975115 - DNA, 25 bp, Homo sapien
gggaagacagctaaaaacactagac

SEQ ID NO: 1975116 - DNA, 25 bp, Homo sapien
tctatcactatagctcagggatgct

SEQ ID NO: 1975117 - DNA, 25 bp, Homo sapien
gcttgactcacgcattcaacagaca

SEQ ID NO: 1975118 - DNA, 25 bp, Homo sapien
gaaccgtgctcggtctttggaggca

SEQ ID NO: 1975119 - DNA, 25 bp, Homo sapien
cagaggcgtgaaccgtgctcggtct

SEQ ID NO: 1975120 - DNA, 25 bp, Homo sapien
tgctcggtctttggaggcaccaaaa

SEQ ID NO: 1975121 - DNA, 25 bp, Homo sapien
tgcagcggtgtgaaggccagcagag

SEQ ID NO: 1975122 - DNA, 25 bp, Homo sapien
ttcctcatcacccaccttgtgtaca

SEQ ID NO: 1975123 - DNA, 25 bp, Homo sapien
accttgtgtacacctctgcccatga

SEQ ID NO: 1975124 - DNA, 25 bp, Homo sapien
atgagactgcctgcccgcctacaag

SEQ ID NO: 1975125 - DNA, 25 bp, Homo sapien
cgcctacaaggtggcacgagcatcc

SEQ ID NO: 1975126 - DNA, 25 bp, Homo sapien
cttctaggtcaggtgatgcacaggc

SEQ ID NO: 1975127 - DNA, 25 bp, Homo sapien
ccacatgcttctaggtcaggtgatg

SEQ ID NO: 1975128 - DNA, 25 bp, Homo sapien
catgcttctaggtcaggtgatgcac

SEQ ID NO: 1975129 - DNA, 25 bp, Homo sapien
tgcttctaggtcaggtgatgcacag

SEQ ID NO: 1975130 - DNA, 25 bp, Homo sapien
tcacatgtgtactagagaaaaagga

SEQ ID NO: 1975131 - DNA, 25 bp, Homo sapien
catgtgtactagagaaaaaggagac

SEQ ID NO: 1975132 - DNA, 25 bp, Homo sapien
acatgtgtactagagaaaaaggaga

SEQ ID NO: 1975133 - DNA, 25 bp, Homo sapien
tagatctaaagcattcagggcagtg

SEQ ID NO: 1975134 - DNA, 25 bp, Homo sapien
tcccaagttcactaagggtgaggcc

SEQ ID NO: 1975135 - DNA, 25 bp, Homo sapien
gcatgactatgtggccttgccgaga

SEQ ID NO: 1975136 - DNA, 25 bp, Homo sapien
ttgggcaggcgctaagcaaacatct

SEQ ID NO: 1975137 - DNA, 25 bp, Homo sapien
gggtcgatgatccacgtcgggctgt

SEQ ID NO: 1975138 - DNA, 25 bp, Homo sapien
ccacgtcgggctgtgggtgagcaca

SEQ ID NO: 1975139 - DNA, 25 bp, Homo sapien
caaaattgcaggtgccgtcgatggg

SEQ ID NO: 1975140 - DNA, 25 bp, Homo sapien
aagccgcggcctcttctgcaatgaa

SEQ ID NO: 1975141 - DNA, 25 bp, Homo sapien
gaaagcactggaaactatgtctctg

SEQ ID NO: 1975142 - DNA, 25 bp, Homo sapien
cactgaagaccctcgaatggacgtg

SEQ ID NO: 1975143 - DNA, 25 bp, Homo sapien
cgtgtggccttcaccatgtgacggg

SEQ ID NO: 1975144 - DNA, 25 bp, Homo sapien
tgtgacggggcttcacctgccatgt

SEQ ID NO: 1975145 - DNA, 25 bp, Homo sapien
agcaaatccaatgctaaccgccaca

SEQ ID NO: 1975146 - DNA, 25 bp, Homo sapien
atccaatgctaaccgccacagtcgg

SEQ ID NO: 1975147 - DNA, 25 bp, Homo sapien
aaatccaatgctaaccgccacagtc

SEQ ID NO: 1975148 - DNA, 25 bp, Homo sapien
aatgctaaccgccacagtcgggaat

SEQ ID NO: 1975149 - DNA, 25 bp, Homo sapien
ctgaagccagaaaggaaggatggcc

SEQ ID NO: 1975150 - DNA, 25 bp, Homo sapien
cctggggacctgggccacacccgca

SEQ ID NO: 1975151 - DNA, 25 bp, Homo sapien
ggaaggatggccagagggagcccag

SEQ ID NO: 1975152 - DNA, 25 bp, Homo sapien
ctggggacctgggccacacccgcac

SEQ ID NO: 1975153 - DNA, 25 bp, Homo sapien
aaacagcaaaccaggcgcacagagg

SEQ ID NO: 1975154 - DNA, 25 bp, Homo sapien
ttgccagtcatgattaaggcacagg

SEQ ID NO: 1975155 - DNA, 25 bp, Homo sapien
gggcaaacagcaaaccaggcgcaca

SEQ ID NO: 1975156 - DNA, 25 bp, Homo sapien
catgattaaggcacagggcaaacag

SEQ ID NO: 1975157 - DNA, 25 bp, Homo sapien
gacttgtttattttctcggatttga

SEQ ID NO: 1975158 - DNA, 25 bp, Homo sapien
gtctggacttgtttattttctcgga

SEQ ID NO: 1975159 - DNA, 25 bp, Homo sapien
ctggacttgtttattttctcggatt

SEQ ID NO: 1975160 - DNA, 25 bp, Homo sapien
ccagtctggacttgtttattttctc

SEQ ID NO: 1975161 - DNA, 25 bp, Homo sapien
tcacaaatagaccacggttgacacg

SEQ ID NO: 1975162 - DNA, 25 bp, Homo sapien
gtgtcacaaatagaccacggttgac

SEQ ID NO: 1975163 - DNA, 25 bp, Homo sapien
cagcagtgtcacaaatagaccacgg

SEQ ID NO: 1975164 - DNA, 25 bp, Homo sapien
atagaccacggttgacacgaggcca

SEQ ID NO: 1975165 - DNA, 25 bp, Homo sapien
gaatgttacttgtgactctaaccaa

SEQ ID NO: 1975166 - DNA, 25 bp, Homo sapien
taaagccagcggaatctcagaagcc

SEQ ID NO: 1975167 - DNA, 25 bp, Homo sapien
agtgcgctgaacagtggcccgactg

SEQ ID NO: 1975168 - DNA, 25 bp, Homo sapien
cacatcagggaacaaagcatcagac

SEQ ID NO: 1975169 - DNA, 25 bp, Homo sapien
gccgctcctctgtgcagtggtaaat

SEQ ID NO: 1975170 - DNA, 25 bp, Homo sapien
agccgctggccattgcagaaggcgc

SEQ ID NO: 1975171 - DNA, 25 bp, Homo sapien
agtggtaaatcactccgaattcaag

SEQ ID NO: 1975172 - DNA, 25 bp, Homo sapien
tggccattgcagaaggcgccccgac

SEQ ID NO: 1975173 - DNA, 25 bp, Homo sapien
aaaaacccagtataactcattatcg

SEQ ID NO: 1975174 - DNA, 25 bp, Homo sapien
aaacccagtataactcattatcgac

SEQ ID NO: 1975175 - DNA, 25 bp, Homo sapien
cagtataactcattatcgactctat

SEQ ID NO: 1975176 - DNA, 25 bp, Homo sapien
cccagtataactcattatcgactct

SEQ ID NO: 1975177 - DNA, 25 bp, Homo sapien
ccagctagtcggaaggctggctttg

SEQ ID NO: 1975178 - DNA, 25 bp, Homo sapien
ccaggctgggtgacggagtctcaaa

SEQ ID NO: 1975179 - DNA, 25 bp, Homo sapien
gcccaggagcagagggtgccgtgag

SEQ ID NO: 1975180 - DNA, 25 bp, Homo sapien
agttccagctagtcggaaggctggc

SEQ ID NO: 1975181 - DNA, 25 bp, Homo sapien
gcaaggctgaggtgcgccgatcgct

SEQ ID NO: 1975182 - DNA, 25 bp, Homo sapien
aggtgcgccgatcgctttgaggtca

SEQ ID NO: 1975183 - DNA, 25 bp, Homo sapien
gctgaggtgcgccgatcgctttgag

SEQ ID NO: 1975184 - DNA, 25 bp, Homo sapien
tgaggtgcgccgatcgctttgaggt

SEQ ID NO: 1975185 - DNA, 25 bp, Homo sapien
tggaaacccttgctctggttgagca

SEQ ID NO: 1975186 - DNA, 25 bp, Homo sapien
gaaactttacaactcaaataatgag

SEQ ID NO: 1975187 - DNA, 25 bp, Homo sapien
tggttgagcaatgctaagagtatgc

SEQ ID NO: 1975188 - DNA, 25 bp, Homo sapien
tagccagtgacttccgacagtttgg

SEQ ID NO: 1975189 - DNA, 25 bp, Homo sapien
ccaaacacagccaaacttcggtcat

SEQ ID NO: 1975190 - DNA, 25 bp, Homo sapien
tttggggccaatttctgtcagaacc

SEQ ID NO: 1975191 - DNA, 25 bp, Homo sapien
cttcagggtcgcagggtcacgtttg

SEQ ID NO: 1975192 - DNA, 25 bp, Homo sapien
gcagccgctccatgttactcaggaa

SEQ ID NO: 1975193 - DNA, 25 bp, Homo sapien
aacagcttcagggtcgcagggtcac

SEQ ID NO: 1975194 - DNA, 25 bp, Homo sapien
ttctgtggtgtgcaagccgacttca

SEQ ID NO: 1975195 - DNA, 25 bp, Homo sapien
cagtggtctcacatggctagggctc

SEQ ID NO: 1975196 - DNA, 25 bp, Homo sapien
tgtaagtatttgcaccattcgctgg

SEQ ID NO: 1975197 - DNA, 25 bp, Homo sapien
taggagtatctactgcaggcgggcc

SEQ ID NO: 1975198 - DNA, 25 bp, Homo sapien
caaactggtaataggcatccgcggc

SEQ ID NO: 1975199 - DNA, 25 bp, Homo sapien
gaagtgtctatcacgatgccgcctg

SEQ ID NO: 1975200 - DNA, 25 bp, Homo sapien
cccagcagtgcaggccaaactggta

SEQ ID NO: 1975201 - DNA, 25 bp, Homo sapien
tggcagagtgccaatgtggagcttc

SEQ ID NO: 1975202 - DNA, 25 bp, Homo sapien
aaggcctgagctatgagcatcgcca

SEQ ID NO: 1975203 - DNA, 25 bp, Homo sapien
catcatcccgcccatagttaatcgt

SEQ ID NO: 1975204 - DNA, 25 bp, Homo sapien
tagttaatcgtctgtaaggcctgag

SEQ ID NO: 1975205 - DNA, 25 bp, Homo sapien
gtgctggccgcaaccactctgcaag

SEQ ID NO: 1975206 - DNA, 25 bp, Homo sapien
gagaacgatccgctttatcagcagt

SEQ ID NO: 1975207 - DNA, 25 bp, Homo sapien
tcctggtgagagagacgtcgattta

SEQ ID NO: 1975208 - DNA, 25 bp, Homo sapien
tacgtgagattaaagagagaaacag

SEQ ID NO: 1975209 - DNA, 25 bp, Homo sapien
tggccctgacagaagaacacgtact

SEQ ID NO: 1975210 - DNA, 25 bp, Homo sapien
ttgcattctgaagtactccgggggg

SEQ ID NO: 1975211 - DNA, 25 bp, Homo sapien
tgcattctgaagtactccgggggga

SEQ ID NO: 1975212 - DNA, 25 bp, Homo sapien
gatgacgaatcaagctctctccaga

SEQ ID NO: 1975213 - DNA, 25 bp, Homo sapien
gacgctcatgcggaatacttgctaa

SEQ ID NO: 1975214 - DNA, 25 bp, Homo sapien
caagtatcctgaagcctatgagtgg

SEQ ID NO: 1975215 - DNA, 25 bp, Homo sapien
tgttgctggaaagacaagggcaccg

SEQ ID NO: 1975216 - DNA, 25 bp, Homo sapien
cagcccctcagtccagcccgggccc

SEQ ID NO: 1975217 - DNA, 25 bp, Homo sapien
ccccagcccctcagtccagcccggg

SEQ ID NO: 1975218 - DNA, 25 bp, Homo sapien
cagggcagacgggcgccccagcccc

SEQ ID NO: 1975219 - DNA, 25 bp, Homo sapien
gcccctcagtccagcccgggcccat

SEQ ID NO: 1975220 - DNA, 25 bp, Homo sapien
gagacaaccccaagtggtggctggt

SEQ ID NO: 1975221 - DNA, 25 bp, Homo sapien
tgcccttggcaaagaaagcctccgc

SEQ ID NO: 1975222 - DNA, 25 bp, Homo sapien
gctgcgcagttcttccgctcggaca

SEQ ID NO: 1975223 - DNA, 25 bp, Homo sapien
taacggcatgtgttccgtcacagtc

SEQ ID NO: 1975224 - DNA, 25 bp, Homo sapien
tatccttactttagccatggactga

SEQ ID NO: 1975225 - DNA, 25 bp, Homo sapien
tactttagccatggactgagttggt

SEQ ID NO: 1975226 - DNA, 25 bp, Homo sapien
tttattgcatatccttactttagcc

SEQ ID NO: 1975227 - DNA, 25 bp, Homo sapien
ttgcatatccttactttagccatgg

SEQ ID NO: 1975228 - DNA, 25 bp, Homo sapien
tgccattggcactagcggcggcagc

SEQ ID NO: 1975229 - DNA, 25 bp, Homo sapien
gggtgacagcagcagtcgtattgcc

SEQ ID NO: 1975230 - DNA, 25 bp, Homo sapien
agtcgtattgccattggcactagcg

SEQ ID NO: 1975231 - DNA, 25 bp, Homo sapien
gtgacagcagcagtcgtattgccat

SEQ ID NO: 1975232 - DNA, 25 bp, Homo sapien
aacgcaaggacctcagagacgttct

SEQ ID NO: 1975233 - DNA, 25 bp, Homo sapien
cgcaaggacctcagagacgttcttt

SEQ ID NO: 1975234 - DNA, 25 bp, Homo sapien
aaacgcaaggacctcagagacgttc

SEQ ID NO: 1975235 - DNA, 25 bp, Homo sapien
cagtactcgccagggatgaccatga

SEQ ID NO: 1975236 - DNA, 25 bp, Homo sapien
ctgccttccaggttcaagcgattct

SEQ ID NO: 1975237 - DNA, 25 bp, Homo sapien
agtgcggtggcacggtcccagctca

SEQ ID NO: 1975238 - DNA, 25 bp, Homo sapien
ctgcaacctctgccttccaggttca

SEQ ID NO: 1975239 - DNA, 25 bp, Homo sapien
catgacctcttgatctgcccacctc

SEQ ID NO: 1975240 - DNA, 25 bp, Homo sapien
gttctctgtcatcaaacctccttgc

SEQ ID NO: 1975241 - DNA, 25 bp, Homo sapien
tatagaagttctctgtcatcaaacc

SEQ ID NO: 1975242 - DNA, 25 bp, Homo sapien
tgaatgcctatagaagttctctgtc

SEQ ID NO: 1975243 - DNA, 25 bp, Homo sapien
aacctccttgcacacgaccttccat

SEQ ID NO: 1975244 - DNA, 25 bp, Homo sapien
gtccagaggtgtatgttgaactgtt

SEQ ID NO: 1975245 - DNA, 25 bp, Homo sapien
tcttaggtggaagcatcgtattgaa

SEQ ID NO: 1975246 - DNA, 25 bp, Homo sapien
tgactgcgttgacgggtttcttagg

SEQ ID NO: 1975247 - DNA, 25 bp, Homo sapien
ggtgtatgttgaactgtttgccagc

SEQ ID NO: 1975248 - DNA, 25 bp, Homo sapien
cttgtcagcgggataatatttcatt

SEQ ID NO: 1975249 - DNA, 25 bp, Homo sapien
tcacttgtcagcgggataatatttc

SEQ ID NO: 1975250 - DNA, 25 bp, Homo sapien
cttcaggggccatgattttctaata

SEQ ID NO: 1975251 - DNA, 25 bp, Homo sapien
gctcctgatacttgtgtctccaggg

SEQ ID NO: 1975252 - DNA, 25 bp, Homo sapien
tgcaagtgttcacatccctgatcta

SEQ ID NO: 1975253 - DNA, 25 bp, Homo sapien
ttgaatttgtgggtgcagaactcat

SEQ ID NO: 1975254 - DNA, 25 bp, Homo sapien
tatagcatgcagaatggatgtccag

SEQ ID NO: 1975255 - DNA, 25 bp, Homo sapien
tcagtatccacagggaattaattcc

SEQ ID NO: 1975256 - DNA, 25 bp, Homo sapien
ctttcaaagccgatctgccggaatg

SEQ ID NO: 1975257 - DNA, 25 bp, Homo sapien
caaagccgatctgccggaatgtctt

SEQ ID NO: 1975258 - DNA, 25 bp, Homo sapien
ccgatctgccggaatgtcttttccc

SEQ ID NO: 1975259 - DNA, 25 bp, Homo sapien
gccgatctgccggaatgtcttttcc

SEQ ID NO: 1975260 - DNA, 25 bp, Homo sapien
tatgctgagaatgaggagcccctgt

SEQ ID NO: 1975261 - DNA, 25 bp, Homo sapien
tctgataacgactgggactcagagg

SEQ ID NO: 1975262 - DNA, 25 bp, Homo sapien
atctatgctgagaatgaggagcccc

SEQ ID NO: 1975263 - DNA, 25 bp, Homo sapien
ctctgataacgactgggactcagag

SEQ ID NO: 1975264 - DNA, 25 bp, Homo sapien
cagctggactggagtccccaaccct

SEQ ID NO: 1975265 - DNA, 25 bp, Homo sapien
ctttgtgggaaacacacccctgcac

SEQ ID NO: 1975266 - DNA, 25 bp, Homo sapien
gcacctggcagctggactggagtcc

SEQ ID NO: 1975267 - DNA, 25 bp, Homo sapien
tttgtgggaaacacacccctgcacc

SEQ ID NO: 1975268 - DNA, 25 bp, Homo sapien
tggcatcgtcaacctcaccaaccac

SEQ ID NO: 1975269 - DNA, 25 bp, Homo sapien
tcccaggctgaggaacggctttaag

SEQ ID NO: 1975270 - DNA, 25 bp, Homo sapien
agcaccagcacgtaaccaggtccag

SEQ ID NO: 1975271 - DNA, 25 bp, Homo sapien
gaacggctttaagacacctcagctc

SEQ ID NO: 1975272 - DNA, 25 bp, Homo sapien
tctgcctctctggagcgcagcacca

SEQ ID NO: 1975273 - DNA, 25 bp, Homo sapien
atccttgtcacgattcttcctccag

SEQ ID NO: 1975274 - DNA, 25 bp, Homo sapien
ccatccttgtcacgattcttcctcc

SEQ ID NO: 1975275 - DNA, 25 bp, Homo sapien
catccttgtcacgattcttcctcca

SEQ ID NO: 1975276 - DNA, 25 bp, Homo sapien
gccatccttgtcacgattcttcctc

SEQ ID NO: 1975277 - DNA, 25 bp, Homo sapien
ttgttcacatcacctgcgatggcag

SEQ ID NO: 1975278 - DNA, 25 bp, Homo sapien
tcaccttgttcacatcacctgcgat

SEQ ID NO: 1975279 - DNA, 25 bp, Homo sapien
aagatgctctccatcaccttgttca

SEQ ID NO: 1975280 - DNA, 25 bp, Homo sapien
ctgtcgttcaagtcattcagcctga

SEQ ID NO: 1975281 - DNA, 25 bp, Homo sapien
ttttctggccaccaggtcagctacc

SEQ ID NO: 1975282 - DNA, 25 bp, Homo sapien
gacggccatgggcacacgccaaaag

SEQ ID NO: 1975283 - DNA, 25 bp, Homo sapien
ggacggccatgggcacacgccaaaa

SEQ ID NO: 1975284 - DNA, 25 bp, Homo sapien
aggtcagctaccactcctggacggc

SEQ ID NO: 1975285 - DNA, 25 bp, Homo sapien
gtgttgccatacatatctctaacat

SEQ ID NO: 1975286 - DNA, 25 bp, Homo sapien
ctctaacatttgggttggcgccatg

SEQ ID NO: 1975287 - DNA, 25 bp, Homo sapien
aacatttgggttggcgccatgttcc

SEQ ID NO: 1975288 - DNA, 25 bp, Homo sapien
agtgttgccatacatatctctaaca

SEQ ID NO: 1975289 - DNA, 25 bp, Homo sapien
ttcctatttacagcgagtaaaagtg

SEQ ID NO: 1975290 - DNA, 25 bp, Homo sapien
attatctattgcagttaaatctggt

SEQ ID NO: 1975291 - DNA, 25 bp, Homo sapien
aaattatctattgcagttaaatctg

SEQ ID NO: 1975292 - DNA, 25 bp, Homo sapien
tctattgcagttaaatctggttttt

SEQ ID NO: 1975293 - DNA, 25 bp, Homo sapien
aaacttagaagcaacagcgtagtct

SEQ ID NO: 1975294 - DNA, 25 bp, Homo sapien
gctggtagactacacttgttgatcc

SEQ ID NO: 1975295 - DNA, 25 bp, Homo sapien
cattacgagcagcaagtatcagggc

SEQ ID NO: 1975296 - DNA, 25 bp, Homo sapien
tcttggcaaaagacatcaatattgt

SEQ ID NO: 1975297 - DNA, 25 bp, Homo sapien
ctaagcatagaagtcttaagagact

SEQ ID NO: 1975298 - DNA, 25 bp, Homo sapien
tctagtcttatgcttgatttctggc

SEQ ID NO: 1975299 - DNA, 25 bp, Homo sapien
gaatcctacactcattgctacttct

SEQ ID NO: 1975300 - DNA, 25 bp, Homo sapien
acttgagttaaagaatcctacactc

SEQ ID NO: 1975301 - DNA, 25 bp, Homo sapien
ctttagcatatgtgccgcgaagcaa

SEQ ID NO: 1975302 - DNA, 25 bp, Homo sapien
ttcacagattagtgtgacatgctta

SEQ ID NO: 1975303 - DNA, 25 bp, Homo sapien
attagtgtgacatgcttatgcaggg

SEQ ID NO: 1975304 - DNA, 25 bp, Homo sapien
cagattagtgtgacatgcttatgca

SEQ ID NO: 1975305 - DNA, 25 bp, Homo sapien
tttatattcagaaatcattccacga

SEQ ID NO: 1975306 - DNA, 25 bp, Homo sapien
atattcagaaatcattccacgaatg

SEQ ID NO: 1975307 - DNA, 25 bp, Homo sapien
ctgaattgctattttgaagactttt

SEQ ID NO: 1975308 - DNA, 25 bp, Homo sapien
ctcttgtttgctttatattcagaaa

SEQ ID NO: 1975309 - DNA, 25 bp, Homo sapien
tgcagttaaggtttcaaaagcgagt

SEQ ID NO: 1975310 - DNA, 25 bp, Homo sapien
tcaacagctgtgtaaactcttctct

SEQ ID NO: 1975311 - DNA, 25 bp, Homo sapien
tataatacaggtttcataaaacatg

SEQ ID NO: 1975312 - DNA, 25 bp, Homo sapien
ataaaacatgcagttaaggtttcaa

SEQ ID NO: 1975313 - DNA, 25 bp, Homo sapien
tatgactgttactgcttataccttc

SEQ ID NO: 1975314 - DNA, 25 bp, Homo sapien
ttccaatatgactgttactgcttat

SEQ ID NO: 1975315 - DNA, 25 bp, Homo sapien
ccaatatgactgttactgcttatac

SEQ ID NO: 1975316 - DNA, 25 bp, Homo sapien
aatatgactgttactgcttatacct

SEQ ID NO: 1975317 - DNA, 25 bp, Homo sapien
tgtggctggctactttcacatcctt

SEQ ID NO: 1975318 - DNA, 25 bp, Homo sapien
gctggctactttcacatccttcaag

SEQ ID NO: 1975319 - DNA, 25 bp, Homo sapien
tggctggctactttcacatccttca

SEQ ID NO: 1975320 - DNA, 25 bp, Homo sapien
ctgtggctggctactttcacatcct

SEQ ID NO: 1975321 - DNA, 25 bp, Homo sapien
tctgcatttcttcattttttcttca

SEQ ID NO: 1975322 - DNA, 25 bp, Homo sapien
tttcttatttctgcatttcttcatt

SEQ ID NO: 1975323 - DNA, 25 bp, Homo sapien
tgcatttcttcattttttcttcaac

SEQ ID NO: 1975324 - DNA, 25 bp, Homo sapien
tttctgcatttcttcattttttctt

SEQ ID NO: 1975325 - DNA, 25 bp, Homo sapien
ctatcaaactcgccattctccttcc

SEQ ID NO: 1975326 - DNA, 25 bp, Homo sapien
tcatcattataattgtcactgtcat

SEQ ID NO: 1975327 - DNA, 25 bp, Homo sapien
gcatgtacgtttcttgacacttcca

SEQ ID NO: 1975328 - DNA, 25 bp, Homo sapien
ggagattgatgattatcaggttttc

SEQ ID NO: 1975329 - DNA, 25 bp, Homo sapien
tacctgtcagaagagagacctggtg

SEQ ID NO: 1975330 - DNA, 25 bp, Homo sapien
cattttatgattaccaggcaaggca

SEQ ID NO: 1975331 - DNA, 25 bp, Homo sapien
gacaaaatttgctagggccccactg

SEQ ID NO: 1975332 - DNA, 25 bp, Homo sapien
gagagtgaaaaacccatgccttggc

SEQ ID NO: 1975333 - DNA, 25 bp, Homo sapien
cttttcattagaggttttccttgca

SEQ ID NO: 1975334 - DNA, 25 bp, Homo sapien
ttcattagaggttttccttgcaagc

SEQ ID NO: 1975335 - DNA, 25 bp, Homo sapien
ttgctcttttcattagaggttttcc

SEQ ID NO: 1975336 - DNA, 25 bp, Homo sapien
cttgctcttttcattagaggttttc

SEQ ID NO: 1975337 - DNA, 25 bp, Homo sapien
tcagagtaaggcaactcatcatcct

SEQ ID NO: 1975338 - DNA, 25 bp, Homo sapien
gatgacccacttatgtcattaaggt

SEQ ID NO: 1975339 - DNA, 25 bp, Homo sapien
tctgaggttttttcagatgacccac

SEQ ID NO: 1975340 - DNA, 25 bp, Homo sapien
aggtcatccgtgaaatatatttggc

SEQ ID NO: 1975341 - DNA, 25 bp, Homo sapien
atacatgagtaggtttttaaatata

SEQ ID NO: 1975342 - DNA, 25 bp, Homo sapien
aatacatgagtaggtttttaaatat

SEQ ID NO: 1975343 - DNA, 25 bp, Homo sapien
cagctgttgcattcttgcttttcga

SEQ ID NO: 1975344 - DNA, 25 bp, Homo sapien
tgatcctctattgatcttccacatg

SEQ ID NO: 1975345 - DNA, 25 bp, Homo sapien
tgtagtacgctaatattatttttca

SEQ ID NO: 1975346 - DNA, 25 bp, Homo sapien
tactttaagtcgttcacagtaacat

SEQ ID NO: 1975347 - DNA, 25 bp, Homo sapien
tttttcccttgaagattctgatgct

SEQ ID NO: 1975348 - DNA, 25 bp, Homo sapien
tcccttgaagattctgatgctctga

SEQ ID NO: 1975349 - DNA, 25 bp, Homo sapien
ctgatgctctgactgtgatttggtt

SEQ ID NO: 1975350 - DNA, 25 bp, Homo sapien
ttctgatgctctgactgtgatttgg

SEQ ID NO: 1975351 - DNA, 25 bp, Homo sapien
aaacaaaacactcatatgctggttt

SEQ ID NO: 1975352 - DNA, 25 bp, Homo sapien
tcctaataaagtgcccatgttcttg

SEQ ID NO: 1975353 - DNA, 25 bp, Homo sapien
acactcatatgctggtttattatcc

SEQ ID NO: 1975354 - DNA, 25 bp, Homo sapien
ttctagtttgcatgttaatttctca

SEQ ID NO: 1975355 - DNA, 25 bp, Homo sapien
tgtagttaaatatacttatcttaaa

SEQ ID NO: 1975356 - DNA, 25 bp, Homo sapien
ctgtagttaaatatacttatcttaa

SEQ ID NO: 1975357 - DNA, 25 bp, Homo sapien
ttccaatgatttgagagtcagttta

SEQ ID NO: 1975358 - DNA, 25 bp, Homo sapien
gatttgagagtcagtttagattgtt

SEQ ID NO: 1975359 - DNA, 25 bp, Homo sapien
tcagtttgtgtcctatattgctctt

SEQ ID NO: 1975360 - DNA, 25 bp, Homo sapien
tctttttcatacaactcttcagcct

SEQ ID NO: 1975361 - DNA, 25 bp, Homo sapien
tgcttcctcattccgcttgagagtc

SEQ ID NO: 1975362 - DNA, 25 bp, Homo sapien
atgcttcctcattccgcttgagagt

SEQ ID NO: 1975363 - DNA, 25 bp, Homo sapien
cttcctcattccgcttgagagtctt

SEQ ID NO: 1975364 - DNA, 25 bp, Homo sapien
aatgcttcctcattccgcttgagag

SEQ ID NO: 1975365 - DNA, 25 bp, Homo sapien
tgtcctccaatcgacgctgtgttcg

SEQ ID NO: 1975366 - DNA, 25 bp, Homo sapien
tcaatgtcctccaatcgacgctgtg

SEQ ID NO: 1975367 - DNA, 25 bp, Homo sapien
tcctccaatcgacgctgtgttcggc

SEQ ID NO: 1975368 - DNA, 25 bp, Homo sapien
ccaatcgacgctgtgttcggcttag

SEQ ID NO: 1975369 - DNA, 25 bp, Homo sapien
ctctttttcatattggcattgtctt

SEQ ID NO: 1975370 - DNA, 25 bp, Homo sapien
ctttttcatattggcattgtctttc

SEQ ID NO: 1975371 - DNA, 25 bp, Homo sapien
ttctctttttcatattggcattgtc

SEQ ID NO: 1975372 - DNA, 25 bp, Homo sapien
ttcatattggcattgtctttctttt

SEQ ID NO: 1975373 - DNA, 25 bp, Homo sapien
tctctagcatagcttctaacagcaa

SEQ ID NO: 1975374 - DNA, 25 bp, Homo sapien
cagcaattgtttgttcagggcatca

SEQ ID NO: 1975375 - DNA, 25 bp, Homo sapien
tagcatagcttctaacagcaattgt

SEQ ID NO: 1975376 - DNA, 25 bp, Homo sapien
tccacttctcgttgaagctgtctcc

SEQ ID NO: 1975377 - DNA, 25 bp, Homo sapien
gaaagctctccactgaaactagtgt

SEQ ID NO: 1975378 - DNA, 25 bp, Homo sapien
tatttaaccagctacagagtaactg

SEQ ID NO: 1975379 - DNA, 25 bp, Homo sapien
cagggatgtccattgacatgccaaa

SEQ ID NO: 1975380 - DNA, 25 bp, Homo sapien
tggcttgtctccacgtggcaatgaa

SEQ ID NO: 1975381 - DNA, 25 bp, Homo sapien
gctcatgtcatcattaggagataat

SEQ ID NO: 1975382 - DNA, 25 bp, Homo sapien
gagataatttatttaaaagtgtcat

SEQ ID NO: 1975383 - DNA, 25 bp, Homo sapien
ctatcgagtggcagggctcatgtca

SEQ ID NO: 1975384 - DNA, 25 bp, Homo sapien
tcatgtcatcattaggagataattt

SEQ ID NO: 1975385 - DNA, 25 bp, Homo sapien
cctatgctctaggattaaaacacag

SEQ ID NO: 1975386 - DNA, 25 bp, Homo sapien
tttgtgctgtaactgtagtgttgag

SEQ ID NO: 1975387 - DNA, 25 bp, Homo sapien
aagtctcaaataatactacttggcc

SEQ ID NO: 1975388 - DNA, 25 bp, Homo sapien
ttccaaacaccactatatcaactat

SEQ ID NO: 1975389 - DNA, 25 bp, Homo sapien
gaatctctgtgcgttgattctgcat

SEQ ID NO: 1975390 - DNA, 25 bp, Homo sapien
tcagcacgtcttagaatctctgtgc

SEQ ID NO: 1975391 - DNA, 25 bp, Homo sapien
ggcaactcctcagcacgtcttagaa

SEQ ID NO: 1975392 - DNA, 25 bp, Homo sapien
ttgcatgtggtctggcaactcctca

SEQ ID NO: 1975393 - DNA, 25 bp, Homo sapien
ctcaagatattttgtatgttgcttt

SEQ ID NO: 1975394 - DNA, 25 bp, Homo sapien
caagatattttgtatgttgctttaa

SEQ ID NO: 1975395 - DNA, 25 bp, Homo sapien
tactcaagatattttgtatgttgct

SEQ ID NO: 1975396 - DNA, 25 bp, Homo sapien
actcaagatattttgtatgttgctt

SEQ ID NO: 1975397 - DNA, 25 bp, Homo sapien
actgtaaattagtttaactattgtg

SEQ ID NO: 1975398 - DNA, 25 bp, Homo sapien
ccatttgacctagccatcctattac

SEQ ID NO: 1975399 - DNA, 25 bp, Homo sapien
ttagtttaactattgtggaagtcag

SEQ ID NO: 1975400 - DNA, 25 bp, Homo sapien
tgtggcgattcctcagggatctgga

SEQ ID NO: 1975401 - DNA, 25 bp, Homo sapien
tgtgttactcaactccgtcaggcct

SEQ ID NO: 1975402 - DNA, 25 bp, Homo sapien
taacttcagtgcagactcagtacag

SEQ ID NO: 1975403 - DNA, 25 bp, Homo sapien
tcttcctgaatctcaacggtcctca

SEQ ID NO: 1975404 - DNA, 25 bp, Homo sapien
tccttaggaggacgtatggcactct

SEQ ID NO: 1975405 - DNA, 25 bp, Homo sapien
aagatgtctactgttagcctgatgg

SEQ ID NO: 1975406 - DNA, 25 bp, Homo sapien
gccacacggtgcctttttagtgaag

SEQ ID NO: 1975407 - DNA, 25 bp, Homo sapien
cgtgtgtaaaatcttgcaggagttc

SEQ ID NO: 1975408 - DNA, 25 bp, Homo sapien
tgttagacacgtttcttgaagacag

SEQ ID NO: 1975409 - DNA, 25 bp, Homo sapien
aatcaacccctggatttgttgaact

SEQ ID NO: 1975410 - DNA, 25 bp, Homo sapien
aatttacctatctcttctaagaagg

SEQ ID NO: 1975411 - DNA, 25 bp, Homo sapien
ttcagttaagctctgacgttggtta

SEQ ID NO: 1975412 - DNA, 25 bp, Homo sapien
tttgtgtgcatagaagcatttttag

SEQ ID NO: 1975413 - DNA, 25 bp, Homo sapien
agacatgttccttcaacatcagttc

SEQ ID NO: 1975414 - DNA, 25 bp, Homo sapien
gcccgtgtccacaggaacttcatgt

SEQ ID NO: 1975415 - DNA, 25 bp, Homo sapien
tcaacagtagtggcccatggggaca

SEQ ID NO: 1975416 - DNA, 25 bp, Homo sapien
cagtagtggcccatggggacaagga

SEQ ID NO: 1975417 - DNA, 25 bp, Homo sapien
gaagcccgtgtccacaggaacttca

SEQ ID NO: 1975418 - DNA, 25 bp, Homo sapien
ccttgctggtgtccactggtgtctc

SEQ ID NO: 1975419 - DNA, 25 bp, Homo sapien
caaagccgcggagctcagagctgct

SEQ ID NO: 1975420 - DNA, 25 bp, Homo sapien
ctgctccttgaggaatgtcttcccc

SEQ ID NO: 1975421 - DNA, 25 bp, Homo sapien
atcttaagctcttgtgactccatgg

SEQ ID NO: 1975422 - DNA, 25 bp, Homo sapien
tcatagctgccaccctctcctctca

SEQ ID NO: 1975423 - DNA, 25 bp, Homo sapien
catagctgccaccctctcctctcac

SEQ ID NO: 1975424 - DNA, 25 bp, Homo sapien
cagcaaagtcttggcgtgtcctaca

SEQ ID NO: 1975425 - DNA, 25 bp, Homo sapien
gaacaacccgccaaagtctaagagc

SEQ ID NO: 1975426 - DNA, 25 bp, Homo sapien
caaagatggccctacttatgggaaa

SEQ ID NO: 1975427 - DNA, 25 bp, Homo sapien
gaattttctccccatgtgcaggtaa

SEQ ID NO: 1975428 - DNA, 25 bp, Homo sapien
tatctgccactgtagtgaagggctg

SEQ ID NO: 1975429 - DNA, 25 bp, Homo sapien
tagtgaagggctgctttgggcagtg

SEQ ID NO: 1975430 - DNA, 25 bp, Homo sapien
ggcgaagatttgcaggtgtatctgc

SEQ ID NO: 1975431 - DNA, 25 bp, Homo sapien
ttaggcgaagatttgcaggtgtatc

SEQ ID NO: 1975432 - DNA, 25 bp, Homo sapien
gcaaagctggacattgaaccttccg

SEQ ID NO: 1975433 - DNA, 25 bp, Homo sapien
caaaagtcactgttgggctcgctaa

SEQ ID NO: 1975434 - DNA, 25 bp, Homo sapien
cctttctaagcagtgggcaagctca

SEQ ID NO: 1975435 - DNA, 25 bp, Homo sapien
cacaggtcagaggtgcagactgcaa

SEQ ID NO: 1975436 - DNA, 25 bp, Homo sapien
atccttgagttgtggtgggctgcac

SEQ ID NO: 1975437 - DNA, 25 bp, Homo sapien
tgccgtttcctaagcccgtcagaaa

SEQ ID NO: 1975438 - DNA, 25 bp, Homo sapien
gtgtgccgtttcctaagcccgtcag

SEQ ID NO: 1975439 - DNA, 25 bp, Homo sapien
catccttgagttgtggtgggctgca

SEQ ID NO: 1975440 - DNA, 25 bp, Homo sapien
atcagtggcggtgtctgcagaacag

SEQ ID NO: 1975441 - DNA, 25 bp, Homo sapien
cctgggtatcagtggcggtgtctgc

SEQ ID NO: 1975442 - DNA, 25 bp, Homo sapien
tagtccctatatttcttgaaggctt

SEQ ID NO: 1975443 - DNA, 25 bp, Homo sapien
ttgcctgggtatcagtggcggtgtc

SEQ ID NO: 1975444 - DNA, 25 bp, Homo sapien
cagagcttaaaggactggacgttgc

SEQ ID NO: 1975445 - DNA, 25 bp, Homo sapien
gctctgggcttcaaactgtacaaca

SEQ ID NO: 1975446 - DNA, 25 bp, Homo sapien
tatgatacagccaattgctctgggc

SEQ ID NO: 1975447 - DNA, 25 bp, Homo sapien
ggcactttaccatgaacagagctta

SEQ ID NO: 1975448 - DNA, 25 bp, Homo sapien
ttcgtaggaggccagatcagctttg

SEQ ID NO: 1975449 - DNA, 25 bp, Homo sapien
ttttcgtaggaggccagatcagctt

SEQ ID NO: 1975450 - DNA, 25 bp, Homo sapien
tttttcgtaggaggccagatcagct

SEQ ID NO: 1975451 - DNA, 25 bp, Homo sapien
gtttttcgtaggaggccagatcagc

SEQ ID NO: 1975452 - DNA, 25 bp, Homo sapien
aaggacacagagcaactgtcggtca

SEQ ID NO: 1975453 - DNA, 25 bp, Homo sapien
gctggaaactcctgcgaggctagaa

SEQ ID NO: 1975454 - DNA, 25 bp, Homo sapien
cctcacgtcgatcggcctctcttca

SEQ ID NO: 1975455 - DNA, 25 bp, Homo sapien
caactgtcggtcatagatgcttctg

SEQ ID NO: 1975456 - DNA, 25 bp, Homo sapien
ggagtcacacctcagaggggccgcc

SEQ ID NO: 1975457 - DNA, 25 bp, Homo sapien
tggagtcacacctcagaggggccgc

SEQ ID NO: 1975458 - DNA, 25 bp, Homo sapien
cacacctcagaggggccgcctgcac

SEQ ID NO: 1975459 - DNA, 25 bp, Homo sapien
acctcagaggggccgcctgcacaac

SEQ ID NO: 1975460 - DNA, 25 bp, Homo sapien
ttcaggagctcaaaagctggggcca

SEQ ID NO: 1975461 - DNA, 25 bp, Homo sapien
tcccattggcccttcagattctcca

SEQ ID NO: 1975462 - DNA, 25 bp, Homo sapien
tttgactttttcattcaggagctca

SEQ ID NO: 1975463 - DNA, 25 bp, Homo sapien
tttcattcaggagctcaaaagctgg

SEQ ID NO: 1975464 - DNA, 25 bp, Homo sapien
ttatttcacgtaggctaatggccag

SEQ ID NO: 1975465 - DNA, 25 bp, Homo sapien
gccaggcaggctacactagtcagtt

SEQ ID NO: 1975466 - DNA, 25 bp, Homo sapien
gaggcaacggaaaccacactgagtg

SEQ ID NO: 1975467 - DNA, 25 bp, Homo sapien
tgtataacagagttgccacgaggca

SEQ ID NO: 1975468 - DNA, 25 bp, Homo sapien
tcctaaggcatcatgaagcagcaca

SEQ ID NO: 1975469 - DNA, 25 bp, Homo sapien
gaggtagctgatcacagcatgcgcc

SEQ ID NO: 1975470 - DNA, 25 bp, Homo sapien
tgcacaccaaggttcaacagaaggg

SEQ ID NO: 1975471 - DNA, 25 bp, Homo sapien
agcatgcgccaacctgatgctgggc

SEQ ID NO: 1975472 - DNA, 25 bp, Homo sapien
gatgtctcctacagcaccctcagga

SEQ ID NO: 1975473 - DNA, 25 bp, Homo sapien
agatgtctcctacagcaccctcagg

SEQ ID NO: 1975474 - DNA, 25 bp, Homo sapien
aggcccgtaatgctccttcccaaag

SEQ ID NO: 1975475 - DNA, 25 bp, Homo sapien
agcaagtttgttcctcaggaagtga

SEQ ID NO: 1975476 - DNA, 25 bp, Homo sapien
ctagatccagcaagtttgttcctca

SEQ ID NO: 1975477 - DNA, 25 bp, Homo sapien
cactagatccagcaagtttgttcct

SEQ ID NO: 1975478 - DNA, 25 bp, Homo sapien
tcagttatgctctccagcacccaca

SEQ ID NO: 1975479 - DNA, 25 bp, Homo sapien
gctcttttactccagtgttggctcc

SEQ ID NO: 1975480 - DNA, 25 bp, Homo sapien
tgttggctccaggaccttgggtaga

SEQ ID NO: 1975481 - DNA, 25 bp, Homo sapien
ggtgctggtgatatgaggtggtcca

SEQ ID NO: 1975482 - DNA, 25 bp, Homo sapien
tcttgtgctcttttactccagtgtt

SEQ ID NO: 1975483 - DNA, 25 bp, Homo sapien
tattctgtcatcgataggcctcatc

SEQ ID NO: 1975484 - DNA, 25 bp, Homo sapien
actattctgtcatcgataggcctca

SEQ ID NO: 1975485 - DNA, 25 bp, Homo sapien
ttctgtcatcgataggcctcatcac

SEQ ID NO: 1975486 - DNA, 25 bp, Homo sapien
tactattctgtcatcgataggcctc

SEQ ID NO: 1975487 - DNA, 25 bp, Homo sapien
tgcttagctctcatgagatgcgcca

SEQ ID NO: 1975488 - DNA, 25 bp, Homo sapien
cagaatttatacttgaggtcttggc

SEQ ID NO: 1975489 - DNA, 25 bp, Homo sapien
gaagcccgcctgttgatatctgtca

SEQ ID NO: 1975490 - DNA, 25 bp, Homo sapien
aaaggtcttggactgttggctgaga

SEQ ID NO: 1975491 - DNA, 25 bp, Homo sapien
ggtgcactccacaggtcatctcgga

SEQ ID NO: 1975492 - DNA, 25 bp, Homo sapien
attccaaggatgacgggtatggatc

SEQ ID NO: 1975493 - DNA, 25 bp, Homo sapien
gtccaagtacaggcggtgcactcca

SEQ ID NO: 1975494 - DNA, 25 bp, Homo sapien
ggaaattccaaggatgacgggtatg

SEQ ID NO: 1975495 - DNA, 25 bp, Homo sapien
tcagtggctcagatatagttcaggc

SEQ ID NO: 1975496 - DNA, 25 bp, Homo sapien
aagattacagcagggatttccagat

SEQ ID NO: 1975497 - DNA, 25 bp, Homo sapien
gaataagtcataagccccgtgaaga

SEQ ID NO: 1975498 - DNA, 25 bp, Homo sapien
tccacagacagggacatctcactgg

SEQ ID NO: 1975499 - DNA, 25 bp, Homo sapien
taaatgtatgactatatggagataa

SEQ ID NO: 1975500 - DNA, 25 bp, Homo sapien
acacaaataggtaacagtacaatat

SEQ ID NO: 1975501 - DNA, 25 bp, Homo sapien
gccaacaaatggtcttcatgtctaa

SEQ ID NO: 1975502 - DNA, 25 bp, Homo sapien
acacatagatacaggtagggctgcc

SEQ ID NO: 1975503 - DNA, 25 bp, Homo sapien
tgcatgtttaactgtgtgtaggtga

SEQ ID NO: 1975504 - DNA, 25 bp, Homo sapien
gggatacgtttattctgtagaccta

SEQ ID NO: 1975505 - DNA, 25 bp, Homo sapien
gacctaagcactatgtgaattttta

SEQ ID NO: 1975506 - DNA, 25 bp, Homo sapien
aaacattaacatttgctgcagtatt

SEQ ID NO: 1975507 - DNA, 25 bp, Homo sapien
tcagggtgcccactggataggtttg

SEQ ID NO: 1975508 - DNA, 25 bp, Homo sapien
ggcttgcaacgctgacagcaaggac

SEQ ID NO: 1975509 - DNA, 25 bp, Homo sapien
cccatgaaggttttaggatctgtaa

SEQ ID NO: 1975510 - DNA, 25 bp, Homo sapien
ggacagacaggtaacagctcttatt

SEQ ID NO: 1975511 - DNA, 25 bp, Homo sapien
gggcgggcagactccctcttgtgct

SEQ ID NO: 1975512 - DNA, 25 bp, Homo sapien
gagatgggattgtgttgagtatcac

SEQ ID NO: 1975513 - DNA, 25 bp, Homo sapien
tcttgtgctggtggacagcttgcct

SEQ ID NO: 1975514 - DNA, 25 bp, Homo sapien
tcacagaagcccttgacgcggaagt

SEQ ID NO: 1975515 - DNA, 25 bp, Homo sapien
gtaaagcctgattggtgtccgcact

SEQ ID NO: 1975516 - DNA, 25 bp, Homo sapien
ggacactgcgttacttgcatttgca

SEQ ID NO: 1975517 - DNA, 25 bp, Homo sapien
tgtccgcactgcaggacactgcgtt

SEQ ID NO: 1975518 - DNA, 25 bp, Homo sapien
tgcgttacttgcatttgcaggtggt

SEQ ID NO: 1975519 - DNA, 25 bp, Homo sapien
cacccggctggctttgcgtcgttgt

SEQ ID NO: 1975520 - DNA, 25 bp, Homo sapien
tcagtcggcaggtctcgtgcagaaa

SEQ ID NO: 1975521 - DNA, 25 bp, Homo sapien
gttgttcctcatgcccgggttttgc

SEQ ID NO: 1975522 - DNA, 25 bp, Homo sapien
cctggtgtgtatttggtccactcag

SEQ ID NO: 1975523 - DNA, 25 bp, Homo sapien
tggcaatgtcaaagaacacggtggg

SEQ ID NO: 1975524 - DNA, 25 bp, Homo sapien
aatggcaatgtcaaagaacacggtg

SEQ ID NO: 1975525 - DNA, 25 bp, Homo sapien
tcaaagaacacggtggggttgacca

SEQ ID NO: 1975526 - DNA, 25 bp, Homo sapien
caaagaacacggtggggttgaccat

SEQ ID NO: 1975527 - DNA, 25 bp, Homo sapien
ctggcaacaagacctggaataattc

SEQ ID NO: 1975528 - DNA, 25 bp, Homo sapien
cctggcaacaagacctggaataatt

SEQ ID NO: 1975529 - DNA, 25 bp, Homo sapien
gcctggcaacaagacctggaataat

SEQ ID NO: 1975530 - DNA, 25 bp, Homo sapien
aaagaccacgtgcttgccacccact

SEQ ID NO: 1975531 - DNA, 25 bp, Homo sapien
ccaaagaccacgtgcttgccaccca

SEQ ID NO: 1975532 - DNA, 25 bp, Homo sapien
cgtgcttgccacccactcagtcctg

SEQ ID NO: 1975533 - DNA, 25 bp, Homo sapien
cacgtgcttgccacccactcagtcc

SEQ ID NO: 1975534 - DNA, 25 bp, Homo sapien
ggtgtacagcgcatcacagcgaaca

SEQ ID NO: 1975535 - DNA, 25 bp, Homo sapien
tattccacggaatgttcacagcttg

SEQ ID NO: 1975536 - DNA, 25 bp, Homo sapien
gggactgccccgctgttgtaactgc

SEQ ID NO: 1975537 - DNA, 25 bp, Homo sapien
tgcacagcggtatcatattccacgg

SEQ ID NO: 1975538 - DNA, 25 bp, Homo sapien
ctggaggtctgtctgcctgcacagc

SEQ ID NO: 1975539 - DNA, 25 bp, Homo sapien
ggcgcggatcccctagcgggcctgg

SEQ ID NO: 1975540 - DNA, 25 bp, Homo sapien
cccctagcgggcctggaggtctgtc

SEQ ID NO: 1975541 - DNA, 25 bp, Homo sapien
ggcctggaggtctgtctgcctgcac

SEQ ID NO: 1975542 - DNA, 25 bp, Homo sapien
gggctcctgcatagtcccgggcggc

SEQ ID NO: 1975543 - DNA, 25 bp, Homo sapien
gctcctgcatagtcccgggcggcct

SEQ ID NO: 1975544 - DNA, 25 bp, Homo sapien
atgagggctcctgcatagtcccggg

SEQ ID NO: 1975545 - DNA, 25 bp, Homo sapien
ctgatgagggctcctgcatagtccc

SEQ ID NO: 1975546 - DNA, 25 bp, Homo sapien
gcgcgggacgggattgggctctgcc

SEQ ID NO: 1975547 - DNA, 25 bp, Homo sapien
ggtacggtactagaggcgcacaggg

SEQ ID NO: 1975548 - DNA, 25 bp, Homo sapien
cgattggaagcgcacggcaatcagg

SEQ ID NO: 1975549 - DNA, 25 bp, Homo sapien
gccaccgaacgcaaggcgattggaa

SEQ ID NO: 1975550 - DNA, 25 bp, Homo sapien
ttctgcgcccgcgactgcagcagcg

SEQ ID NO: 1975551 - DNA, 25 bp, Homo sapien
atgcatgcagccactcgccagctgt

SEQ ID NO: 1975552 - DNA, 25 bp, Homo sapien
agcagcggccagagatgcatgcagc

SEQ ID NO: 1975553 - DNA, 25 bp, Homo sapien
ctgtcacctggtttgcagacgcccg

SEQ ID NO: 1975554 - DNA, 25 bp, Homo sapien
ctggagggctccgccggacggttgg

SEQ ID NO: 1975555 - DNA, 25 bp, Homo sapien
gctcccgttgtgatttccaggaccc

SEQ ID NO: 1975556 - DNA, 25 bp, Homo sapien
gaccagagcccgcgcttccaggagg

SEQ ID NO: 1975557 - DNA, 25 bp, Homo sapien
cccagctcccgttgtgatttccagg

SEQ ID NO: 1975558 - DNA, 25 bp, Homo sapien
aaaatagccaatgctgcctgttcga

SEQ ID NO: 1975559 - DNA, 25 bp, Homo sapien
aattggcttgggtctgttgggatat

SEQ ID NO: 1975560 - DNA, 25 bp, Homo sapien
ctgttcgaccacgagcgggtgcgaa

SEQ ID NO: 1975561 - DNA, 25 bp, Homo sapien
ccggaggcaaggaggagcgcttctc

SEQ ID NO: 1975562 - DNA, 25 bp, Homo sapien
aagataagagctggcaaccatttct

SEQ ID NO: 1975563 - DNA, 25 bp, Homo sapien
ataagagctggcaaccatttctggt

SEQ ID NO: 1975564 - DNA, 25 bp, Homo sapien
tgccttcacctgccctcaagattgc

SEQ ID NO: 1975565 - DNA, 25 bp, Homo sapien
cttcacctgccctcaagattgccat

SEQ ID NO: 1975566 - DNA, 25 bp, Homo sapien
ctagaccagggtctgaatccagctc

SEQ ID NO: 1975567 - DNA, 25 bp, Homo sapien
ctccggcttccacccagcggtgcgg

SEQ ID NO: 1975568 - DNA, 25 bp, Homo sapien
ggcgaatcgtcagggcagcaaaggc

SEQ ID NO: 1975569 - DNA, 25 bp, Homo sapien
aaagcaggaggcgaatcgtcagggc

SEQ ID NO: 1975570 - DNA, 25 bp, Homo sapien
tttcaggctttccataatcgtgagt

SEQ ID NO: 1975571 - DNA, 25 bp, Homo sapien
tcattggcaagaatttggtctggag

SEQ ID NO: 1975572 - DNA, 25 bp, Homo sapien
tccataatcgtgagtgtttgtgcct

SEQ ID NO: 1975573 - DNA, 25 bp, Homo sapien
ccaacaaagtgtcgttctagaacca

SEQ ID NO: 1975574 - DNA, 25 bp, Homo sapien
ctgcaggctgcttgccatcacccca

SEQ ID NO: 1975575 - DNA, 25 bp, Homo sapien
gggtgaacaggactcgcttagtctg

SEQ ID NO: 1975576 - DNA, 25 bp, Homo sapien
cctgtcatggttggagacccggaaa

SEQ ID NO: 1975577 - DNA, 25 bp, Homo sapien
aacaggactcgcttagtctgtgatc

SEQ ID NO: 1975578 - DNA, 25 bp, Homo sapien
tgcctgagtctgagttatgcttctc

SEQ ID NO: 1975579 - DNA, 25 bp, Homo sapien
tgttctagatcctggcctttacaac

SEQ ID NO: 1975580 - DNA, 25 bp, Homo sapien
tcgtgtgcgtagctgagtgtctctc

SEQ ID NO: 1975581 - DNA, 25 bp, Homo sapien
aagctcttgcatgtttgctgctgta

SEQ ID NO: 1975582 - DNA, 25 bp, Homo sapien
tttttccaagatcatgaaatgcgtg

SEQ ID NO: 1975583 - DNA, 25 bp, Homo sapien
cgtgttgtctcccaaggtctgaaag

SEQ ID NO: 1975584 - DNA, 25 bp, Homo sapien
ggtctgaaagaactcttctgtgtcc

SEQ ID NO: 1975585 - DNA, 25 bp, Homo sapien
tgaccagtccggtagcgatgacgag

SEQ ID NO: 1975586 - DNA, 25 bp, Homo sapien
taggaccccgttgctcagtggatag

SEQ ID NO: 1975587 - DNA, 25 bp, Homo sapien
tctgccttcagttccggactcaggg

SEQ ID NO: 1975588 - DNA, 25 bp, Homo sapien
cagtggatagatgtgccctgatgag

SEQ ID NO: 1975589 - DNA, 25 bp, Homo sapien
tgtccaattagccacgaggcgtctg

SEQ ID NO: 1975590 - DNA, 25 bp, Homo sapien
tgtcgtaggacacggagtacatctc

SEQ ID NO: 1975591 - DNA, 25 bp, Homo sapien
catctcatacatggtggccttcacg

SEQ ID NO: 1975592 - DNA, 25 bp, Homo sapien
ggttcagcctgtacaagtcgaaggt

SEQ ID NO: 1975593 - DNA, 25 bp, Homo sapien
gaaggtgactctcgctattcccgac

SEQ ID NO: 1975594 - DNA, 25 bp, Homo sapien
gcagcagctgcaaaacttttcgact

SEQ ID NO: 1975595 - DNA, 25 bp, Homo sapien
ctccacagaggttagttctttaagg

SEQ ID NO: 1975596 - DNA, 25 bp, Homo sapien
tttcgacttgaagacctttctactg

SEQ ID NO: 1975597 - DNA, 25 bp, Homo sapien
tcaacggtaaatttactggagtaga

SEQ ID NO: 1975598 - DNA, 25 bp, Homo sapien
cctcaaagagaaacgggcggccctg

SEQ ID NO: 1975599 - DNA, 25 bp, Homo sapien
tcaaagagaaacgggcggccctgcc

SEQ ID NO: 1975600 - DNA, 25 bp, Homo sapien
ctcaaagagaaacgggcggccctgc

SEQ ID NO: 1975601 - DNA, 25 bp, Homo sapien
aatcagagcagttgtcaaggccacg

SEQ ID NO: 1975602 - DNA, 25 bp, Homo sapien
acaaatcagagcagttgtcaaggcc

SEQ ID NO: 1975603 - DNA, 25 bp, Homo sapien
tcagcacaaatcagagcagttgtca

SEQ ID NO: 1975604 - DNA, 25 bp, Homo sapien
gcacaaatcagagcagttgtcaagg

SEQ ID NO: 1975605 - DNA, 25 bp, Homo sapien
cagatggccgcacccgcacaggtgt

SEQ ID NO: 1975606 - DNA, 25 bp, Homo sapien
tgtggagcagatggccgcacccgca

SEQ ID NO: 1975607 - DNA, 25 bp, Homo sapien
ctgtgtggagcagatggccgcaccc

SEQ ID NO: 1975608 - DNA, 25 bp, Homo sapien
ctaggggccctgctactgaaatccc

SEQ ID NO: 1975609 - DNA, 25 bp, Homo sapien
agtgcggcctgcttgttgagtggct

SEQ ID NO: 1975610 - DNA, 25 bp, Homo sapien
ctgaagtgcggcctgcttgttgagt

SEQ ID NO: 1975611 - DNA, 25 bp, Homo sapien
tgaagtgcggcctgcttgttgagtg

SEQ ID NO: 1975612 - DNA, 25 bp, Homo sapien
gaagtgcggcctgcttgttgagtgg

SEQ ID NO: 1975613 - DNA, 25 bp, Homo sapien
aagaccaccgcaagaagcacggctc

SEQ ID NO: 1975614 - DNA, 25 bp, Homo sapien
ccaggagcaggtctctgtgagctcc

SEQ ID NO: 1975615 - DNA, 25 bp, Homo sapien
tcccagggctggcacagatgcagct

SEQ ID NO: 1975616 - DNA, 25 bp, Homo sapien
aggtctctgtgagctccctgaggac

SEQ ID NO: 1975617 - DNA, 25 bp, Homo sapien
gctgccgtggcagtgggtctggcca

SEQ ID NO: 1975618 - DNA, 25 bp, Homo sapien
gtaggacaggaaccgcagcagactc

SEQ ID NO: 1975619 - DNA, 25 bp, Homo sapien
gagtaggacaggaaccgcagcagac

SEQ ID NO: 1975620 - DNA, 25 bp, Homo sapien
ctgggcggagtaggacaggaaccgc

SEQ ID NO: 1975621 - DNA, 25 bp, Homo sapien
gcggagtaggacaggaaccgcagca

SEQ ID NO: 1975622 - DNA, 25 bp, Homo sapien
gatagatgagaaactgtcccgtcac

SEQ ID NO: 1975623 - DNA, 25 bp, Homo sapien
cttggcttgtgaccggagggatggc

SEQ ID NO: 1975624 - DNA, 25 bp, Homo sapien
cagcacccggagcatgtatgtgccc

SEQ ID NO: 1975625 - DNA, 25 bp, Homo sapien
tgaccggagggatggccgctcttcc

SEQ ID NO: 1975626 - DNA, 25 bp, Homo sapien
aacacagtgtttggctcaagagccg

SEQ ID NO: 1975627 - DNA, 25 bp, Homo sapien
tgaccagcggcctccaagtgcatgt

SEQ ID NO: 1975628 - DNA, 25 bp, Homo sapien
tcaacattcgtcattgagccaaacg

SEQ ID NO: 1975629 - DNA, 25 bp, Homo sapien
gagatgatggaccaaatggctctga

SEQ ID NO: 1975630 - DNA, 25 bp, Homo sapien
tcctctagggttccgggacacactg

SEQ ID NO: 1975631 - DNA, 25 bp, Homo sapien
ctctagggttccgggacacactgtg

SEQ ID NO: 1975632 - DNA, 25 bp, Homo sapien
cctctagggttccgggacacactgt

SEQ ID NO: 1975633 - DNA, 25 bp, Homo sapien
tcttcctctagggttccgggacaca

SEQ ID NO: 1975634 - DNA, 25 bp, Homo sapien
tcaaaggggactgcaaactgtctgt

SEQ ID NO: 1975635 - DNA, 25 bp, Homo sapien
ctcaaaggggactgcaaactgtctg

SEQ ID NO: 1975636 - DNA, 25 bp, Homo sapien
tcagcgccggtcacggggcctctca

SEQ ID NO: 1975637 - DNA, 25 bp, Homo sapien
tcacggggcctctcaaaggggactg

SEQ ID NO: 1975638 - DNA, 25 bp, Homo sapien
ccaagaactggctcagacacagtga

SEQ ID NO: 1975639 - DNA, 25 bp, Homo sapien
tccaagaactggctcagacacagtg

SEQ ID NO: 1975640 - DNA, 25 bp, Homo sapien
actgcacaagttgaacgagctcctg

SEQ ID NO: 1975641 - DNA, 25 bp, Homo sapien
caagttgaacgagctcctgttgcaa

SEQ ID NO: 1975642 - DNA, 25 bp, Homo sapien
acgagctcctgttgcaagggctgcc

SEQ ID NO: 1975643 - DNA, 25 bp, Homo sapien
caaaactgcacaagttgaacgagct

SEQ ID NO: 1975644 - DNA, 25 bp, Homo sapien
tcaggaggccgtgccctccggaaac

SEQ ID NO: 1975645 - DNA, 25 bp, Homo sapien
gaagccctgcgggtcttgagctcac

SEQ ID NO: 1975646 - DNA, 25 bp, Homo sapien
ccctggtcgtccaagtgacagtctc

SEQ ID NO: 1975647 - DNA, 25 bp, Homo sapien
cctggcagccctggtcgtccaagtg

SEQ ID NO: 1975648 - DNA, 25 bp, Homo sapien
accgacgccgcatgagcgctctgcg

SEQ ID NO: 1975649 - DNA, 25 bp, Homo sapien
aaagaaagcctcgacggcttgccat

SEQ ID NO: 1975650 - DNA, 25 bp, Homo sapien
tccaaagaaagcctcgacggcttgc

SEQ ID NO: 1975651 - DNA, 25 bp, Homo sapien
atgagcgctctgcggccacctgcat

SEQ ID NO: 1975652 - DNA, 25 bp, Homo sapien
caggcagcagcaggccaaggaatgc

SEQ ID NO: 1975653 - DNA, 25 bp, Homo sapien
gagcgcctgcgcctgggtcagcctg

SEQ ID NO: 1975654 - DNA, 25 bp, Homo sapien
ctgagcgcctgcgcctgggtcagcc

SEQ ID NO: 1975655 - DNA, 25 bp, Homo sapien
ggcagcagcaggccaaggaatgccc

SEQ ID NO: 1975656 - DNA, 25 bp, Homo sapien
ggtcagaacctgattcaacgggagg

SEQ ID NO: 1975657 - DNA, 25 bp, Homo sapien
tcaacgggaggaaccacgttgtcca

SEQ ID NO: 1975658 - DNA, 25 bp, Homo sapien
gcagctgcagcggactcggtcagaa

SEQ ID NO: 1975659 - DNA, 25 bp, Homo sapien
agctccgctgggtatctgctcggca

SEQ ID NO: 1975660 - DNA, 25 bp, Homo sapien
tcaaccgcaaacttccagacgaaag

SEQ ID NO: 1975661 - DNA, 25 bp, Homo sapien
tcctaggcttggtcttgcgtgctcc

SEQ ID NO: 1975662 - DNA, 25 bp, Homo sapien
gaaccgagctttgtagcgagtccta

SEQ ID NO: 1975663 - DNA, 25 bp, Homo sapien
ggattccattcctagtcagtccccg

SEQ ID NO: 1975664 - DNA, 25 bp, Homo sapien
tacacattcctgaaggttaaagagg

SEQ ID NO: 1975665 - DNA, 25 bp, Homo sapien
cacctcctgcgtgttgtgcataaga

SEQ ID NO: 1975666 - DNA, 25 bp, Homo sapien
ggatcccgcctttcacattcagaag

SEQ ID NO: 1975667 - DNA, 25 bp, Homo sapien
gtgtgttactttctatgccaatgcc

SEQ ID NO: 1975668 - DNA, 25 bp, Homo sapien
tgggcaggatatcaccaggccagct

SEQ ID NO: 1975669 - DNA, 25 bp, Homo sapien
gaatcaacttaatctgcactgtctg

SEQ ID NO: 1975670 - DNA, 25 bp, Homo sapien
gctctgtgagagctgagcgaccgcc

SEQ ID NO: 1975671 - DNA, 25 bp, Homo sapien
caggctaggatgagccaatgtgctc

SEQ ID NO: 1975672 - DNA, 25 bp, Homo sapien
ggcaggggcagactttgtgcaacac

SEQ ID NO: 1975673 - DNA, 25 bp, Homo sapien
gaggggccctgatgcaaccctgcag

SEQ ID NO: 1975674 - DNA, 25 bp, Homo sapien
caggggcagactttgtgcaacacag

SEQ ID NO: 1975675 - DNA, 25 bp, Homo sapien
gcagaggggccctgatgcaaccctg

SEQ ID NO: 1975676 - DNA, 25 bp, Homo sapien
gcacttgccatgtcccagacactgt

SEQ ID NO: 1975677 - DNA, 25 bp, Homo sapien
tgtgctaggtgctgattgtaatcct

SEQ ID NO: 1975678 - DNA, 25 bp, Homo sapien
aaatattgagcacttgccatgtccc

SEQ ID NO: 1975679 - DNA, 25 bp, Homo sapien
tggtgtttaatgacgatttcttgat

SEQ ID NO: 1975680 - DNA, 25 bp, Homo sapien
ttctcgaccagaagcttcaggtcag

SEQ ID NO: 1975681 - DNA, 25 bp, Homo sapien
gagttcaagggccttctcgaccaga

SEQ ID NO: 1975682 - DNA, 25 bp, Homo sapien
tcacaagtgcgtggcgctgtttggt

SEQ ID NO: 1975683 - DNA, 25 bp, Homo sapien
cttcaggtcagggtcacaagtgcgt

SEQ ID NO: 1975684 - DNA, 25 bp, Homo sapien
ctgtgggtagcaccctgctcatctt

SEQ ID NO: 1975685 - DNA, 25 bp, Homo sapien
tgtgccctctgcactgcccaacctg

SEQ ID NO: 1975686 - DNA, 25 bp, Homo sapien
cctgtgggtagcaccctgctcatct

SEQ ID NO: 1975687 - DNA, 25 bp, Homo sapien
gtgggtagcaccctgctcatctttc

SEQ ID NO: 1975688 - DNA, 25 bp, Homo sapien
tcattcaccttttatttacaatcaa

SEQ ID NO: 1975689 - DNA, 25 bp, Homo sapien
agtatttaccaagatcatgtaacaa

SEQ ID NO: 1975690 - DNA, 25 bp, Homo sapien
cattcaccttttatttacaatcaaa

SEQ ID NO: 1975691 - DNA, 25 bp, Homo sapien
actcattcaccttttatttacaatc

SEQ ID NO: 1975692 - DNA, 25 bp, Homo sapien
tgtgtgctgtgtgtaagtctcgtcc

SEQ ID NO: 1975693 - DNA, 25 bp, Homo sapien
tctgaaactgttttgttgagggcca

SEQ ID NO: 1975694 - DNA, 25 bp, Homo sapien
tgcaccaatagtcctgaagctgtag

SEQ ID NO: 1975695 - DNA, 25 bp, Homo sapien
tgtttggcggcatgcacaccacata

SEQ ID NO: 1975696 - DNA, 25 bp, Homo sapien
taacttgggctctgccacacgggaa

SEQ ID NO: 1975697 - DNA, 25 bp, Homo sapien
ttaacttgggctctgccacacggga

SEQ ID NO: 1975698 - DNA, 25 bp, Homo sapien
aacttgggctctgccacacgggaac

SEQ ID NO: 1975699 - DNA, 25 bp, Homo sapien
ggtggctgggatgagcgcgtctcac

SEQ ID NO: 1975700 - DNA, 25 bp, Homo sapien
ccgtagtgtctagcccttgcggttg

SEQ ID NO: 1975701 - DNA, 25 bp, Homo sapien
ccttcaatgtgactccgtagtgtct

SEQ ID NO: 1975702 - DNA, 25 bp, Homo sapien
cagggactgtcttgacggtttcatt

SEQ ID NO: 1975703 - DNA, 25 bp, Homo sapien
agtattctccgtccccttcaatgtg

SEQ ID NO: 1975704 - DNA, 25 bp, Homo sapien
gtttgggtacatttggacggtggca

SEQ ID NO: 1975705 - DNA, 25 bp, Homo sapien
ttgggtacatttggacggtggcatt

SEQ ID NO: 1975706 - DNA, 25 bp, Homo sapien
acatttggacggtggcattggtctg

SEQ ID NO: 1975707 - DNA, 25 bp, Homo sapien
gtacatttggacggtggcattggtc

SEQ ID NO: 1975708 - DNA, 25 bp, Homo sapien
cgctgactactgtgggggtgacatc

SEQ ID NO: 1975709 - DNA, 25 bp, Homo sapien
tcgagtccatcgaggtctctgggag

SEQ ID NO: 1975710 - DNA, 25 bp, Homo sapien
tagagaggcagtggaccgctgacta

SEQ ID NO: 1975711 - DNA, 25 bp, Homo sapien
caagcctctctcgtgctgggtagag

SEQ ID NO: 1975712 - DNA, 25 bp, Homo sapien
gcacaacccctttgggctaattcca

SEQ ID NO: 1975713 - DNA, 25 bp, Homo sapien
agaagcaggagcttcaatttcacaa

SEQ ID NO: 1975714 - DNA, 25 bp, Homo sapien
gcaggagcttcaatttcacaaagac

SEQ ID NO: 1975715 - DNA, 25 bp, Homo sapien
aagcaggagcttcaatttcacaaag

SEQ ID NO: 1975716 - DNA, 25 bp, Homo sapien
ttaagaagcaggagcttcaatttca

SEQ ID NO: 1975717 - DNA, 25 bp, Homo sapien
aaaggacagcaatcacctctggttt

SEQ ID NO: 1975718 - DNA, 25 bp, Homo sapien
tcaaaggacagcaatcacctctggt

SEQ ID NO: 1975719 - DNA, 25 bp, Homo sapien
aggacagcaatcacctctggtttta

SEQ ID NO: 1975720 - DNA, 25 bp, Homo sapien
gacagcaatcacctctggttttact

SEQ ID NO: 1975721 - DNA, 25 bp, Homo sapien
ctggatgggttcctggctctaaatg

SEQ ID NO: 1975722 - DNA, 25 bp, Homo sapien
ggatgggttcctggctctaaatgat

SEQ ID NO: 1975723 - DNA, 25 bp, Homo sapien
tggatacctctggatgggttcctgg

SEQ ID NO: 1975724 - DNA, 25 bp, Homo sapien
ccagcccctggatacctctggatgg

SEQ ID NO: 1975725 - DNA, 25 bp, Homo sapien
gccttcagtgaagcgttgtcagaat

SEQ ID NO: 1975726 - DNA, 25 bp, Homo sapien
tctgcaggttctcccggaaagagca

SEQ ID NO: 1975727 - DNA, 25 bp, Homo sapien
tatcgatgggcggatgaatgtaacc

SEQ ID NO: 1975728 - DNA, 25 bp, Homo sapien
tctgagttaggctgagaataagctc

SEQ ID NO: 1975729 - DNA, 25 bp, Homo sapien
tcctgctccccactgcctcgctggg

SEQ ID NO: 1975730 - DNA, 25 bp, Homo sapien
tccccactgcctcgctggggaaggg

SEQ ID NO: 1975731 - DNA, 25 bp, Homo sapien
tgctccccactgcctcgctggggaa

SEQ ID NO: 1975732 - DNA, 25 bp, Homo sapien
ccactgcctcgctggggaagggaac

SEQ ID NO: 1975733 - DNA, 25 bp, Homo sapien
tcttgaactaggctggtaatggccg

SEQ ID NO: 1975734 - DNA, 25 bp, Homo sapien
gacatcagaccctggtgtttttatg

SEQ ID NO: 1975735 - DNA, 25 bp, Homo sapien
tttatgtgacgttcctcttggtaga

SEQ ID NO: 1975736 - DNA, 25 bp, Homo sapien
aaagaagtggatatttcacctgcca

SEQ ID NO: 1975737 - DNA, 25 bp, Homo sapien
aggagggtctcgtcctccccaaatg

SEQ ID NO: 1975738 - DNA, 25 bp, Homo sapien
aataagacaggagggtctcgtcctc

SEQ ID NO: 1975739 - DNA, 25 bp, Homo sapien
taagacaggagggtctcgtcctccc

SEQ ID NO: 1975740 - DNA, 25 bp, Homo sapien
agggtctcgtcctccccaaatgctg

SEQ ID NO: 1975741 - DNA, 25 bp, Homo sapien
tcagtgctcgaagagtgaggagacc

SEQ ID NO: 1975742 - DNA, 25 bp, Homo sapien
gatttgacaagggacaagccgacct

SEQ ID NO: 1975743 - DNA, 25 bp, Homo sapien
cggagtgcgctttgtctggagaaac

SEQ ID NO: 1975744 - DNA, 25 bp, Homo sapien
ccagaaagtaggtgtcagcgtggct

SEQ ID NO: 1975745 - DNA, 25 bp, Homo sapien
gccacacgcccagggagcagatgag

SEQ ID NO: 1975746 - DNA, 25 bp, Homo sapien
catgtttgtacgtttggaagggagt

SEQ ID NO: 1975747 - DNA, 25 bp, Homo sapien
agcccctgcgctcccatttcaaact

SEQ ID NO: 1975748 - DNA, 25 bp, Homo sapien
ttgggaaattcctaattgtgtgtgt

SEQ ID NO: 1975749 - DNA, 25 bp, Homo sapien
gggcgcggctctgcgctaggaactg

SEQ ID NO: 1975750 - DNA, 25 bp, Homo sapien
ctggctctgcggacgacagcggcaa

SEQ ID NO: 1975751 - DNA, 25 bp, Homo sapien
tctgcggacgacagcggcaactgcg

SEQ ID NO: 1975752 - DNA, 25 bp, Homo sapien
gcgggcgcggctctgcgctaggaac

SEQ ID NO: 1975753 - DNA, 25 bp, Homo sapien
ggttcccgcactggcccgcctggat

SEQ ID NO: 1975754 - DNA, 25 bp, Homo sapien
cgcactggcccgcctggatgtgcac

SEQ ID NO: 1975755 - DNA, 25 bp, Homo sapien
tcccgcactggcccgcctggatgtg

SEQ ID NO: 1975756 - DNA, 25 bp, Homo sapien
ctggttcccgcactggcccgcctgg

SEQ ID NO: 1975757 - DNA, 25 bp, Homo sapien
gagcgaagagtagaaggtccccggc

SEQ ID NO: 1975758 - DNA, 25 bp, Homo sapien
gggacagacgctcagaacccagagc

SEQ ID NO: 1975759 - DNA, 25 bp, Homo sapien
ggccgaattccaggcgcgcctgagc

SEQ ID NO: 1975760 - DNA, 25 bp, Homo sapien
ctcgcgggtccgcaccgggctccga

SEQ ID NO: 1975761 - DNA, 25 bp, Homo sapien
tccggccgggtcgatgccgtgctca

SEQ ID NO: 1975762 - DNA, 25 bp, Homo sapien
cacgtagcctccggccgggtcgatg

SEQ ID NO: 1975763 - DNA, 25 bp, Homo sapien
gatgccgtgctcatcgctgatcact

SEQ ID NO: 1975764 - DNA, 25 bp, Homo sapien
ctgcagcgccgagtctcccacgtag

SEQ ID NO: 1975765 - DNA, 25 bp, Homo sapien
gcggccctgggcacatatttctgag

SEQ ID NO: 1975766 - DNA, 25 bp, Homo sapien
aaagatgaagttgtcaggccggaaa

SEQ ID NO: 1975767 - DNA, 25 bp, Homo sapien
tggctctaagtccaccagggcggcc

SEQ ID NO: 1975768 - DNA, 25 bp, Homo sapien
aaaaggcccagaccgcacgctgtcc

SEQ ID NO: 1975769 - DNA, 25 bp, Homo sapien
taaacatacagctcacaggaaagga

SEQ ID NO: 1975770 - DNA, 25 bp, Homo sapien
tagcttaggtactggaaataatgct

SEQ ID NO: 1975771 - DNA, 25 bp, Homo sapien
ccaaacacctgagttgcactgctga

SEQ ID NO: 1975772 - DNA, 25 bp, Homo sapien
cacttcccacgggagctactggaga

SEQ ID NO: 1975773 - DNA, 25 bp, Homo sapien
aagcagtgaaaccaccaaggctgcc

SEQ ID NO: 1975774 - DNA, 25 bp, Homo sapien
tgacttttgtctacacacggctggt

SEQ ID NO: 1975775 - DNA, 25 bp, Homo sapien
cgtgggcaggtccatccctgatgct

SEQ ID NO: 1975776 - DNA, 25 bp, Homo sapien
cacggctggtggcaacaattcacag

SEQ ID NO: 1975777 - DNA, 25 bp, Homo sapien
actgccaaagaccagcctctctggt

SEQ ID NO: 1975778 - DNA, 25 bp, Homo sapien
taaccaagacttactaaatacactc

SEQ ID NO: 1975779 - DNA, 25 bp, Homo sapien
ttcactttaaggcaatttattccag

SEQ ID NO: 1975780 - DNA, 25 bp, Homo sapien
gggctgcagatttaactaattcaag

SEQ ID NO: 1975781 - DNA, 25 bp, Homo sapien
tattccagtatacttagagttggga

SEQ ID NO: 1975782 - DNA, 25 bp, Homo sapien
atgatgtgctgttagccaaagggag

SEQ ID NO: 1975783 - DNA, 25 bp, Homo sapien
taggcaagtcaaagtagctactggt

SEQ ID NO: 1975784 - DNA, 25 bp, Homo sapien
catgcttggtcaccgacaaggaggg

SEQ ID NO: 1975785 - DNA, 25 bp, Homo sapien
cagctgagcagatgcactggtacgt

SEQ ID NO: 1975786 - DNA, 25 bp, Homo sapien
tgcaacaaagagagtcccgtgccgt

SEQ ID NO: 1975787 - DNA, 25 bp, Homo sapien
caacaaagagagtcccgtgccgttt

SEQ ID NO: 1975788 - DNA, 25 bp, Homo sapien
agagagtcccgtgccgtttaaacag

SEQ ID NO: 1975789 - DNA, 25 bp, Homo sapien
ctgcaacaaagagagtcccgtgccg

SEQ ID NO: 1975790 - DNA, 25 bp, Homo sapien
cgcccagcgagtgcgtgagctggaa

SEQ ID NO: 1975791 - DNA, 25 bp, Homo sapien
gcaggcagtcgcagtgctcgcactc

SEQ ID NO: 1975792 - DNA, 25 bp, Homo sapien
tcaaaagcttcctccccgtcattgg

SEQ ID NO: 1975793 - DNA, 25 bp, Homo sapien
tccttcatggacatgggcccgcgga

SEQ ID NO: 1975794 - DNA, 25 bp, Homo sapien
tgactaattacatgacttggctgca

SEQ ID NO: 1975795 - DNA, 25 bp, Homo sapien
gggtagaacccgcaattctctgctg

SEQ ID NO: 1975796 - DNA, 25 bp, Homo sapien
caagtcctctagtagaaagtctcca

SEQ ID NO: 1975797 - DNA, 25 bp, Homo sapien
aattaaaccagtgcaccattcaggg

SEQ ID NO: 1975798 - DNA, 25 bp, Homo sapien
cgtcatttatgcacatggctagaga

SEQ ID NO: 1975799 - DNA, 25 bp, Homo sapien
gtcatttatgcacatggctagagag

SEQ ID NO: 1975800 - DNA, 25 bp, Homo sapien
tcatttatgcacatggctagagaga

SEQ ID NO: 1975801 - DNA, 25 bp, Homo sapien
cactggcagcttggatgaggacacc

SEQ ID NO: 1975802 - DNA, 25 bp, Homo sapien
gatcgttgcactggactcttggcgt

SEQ ID NO: 1975803 - DNA, 25 bp, Homo sapien
ttttgggccccagaccatttgcgga

SEQ ID NO: 1975804 - DNA, 25 bp, Homo sapien
agaatttgtggaaggcactggcagc

SEQ ID NO: 1975805 - DNA, 25 bp, Homo sapien
gaacagtttgggaatcgggcagccc

SEQ ID NO: 1975806 - DNA, 25 bp, Homo sapien
taggctgcatacctgctcgcatgtg

SEQ ID NO: 1975807 - DNA, 25 bp, Homo sapien
gactgcttgattggctactgctggg

SEQ ID NO: 1975808 - DNA, 25 bp, Homo sapien
gattttgtcgtcgtgcaggcatcag

SEQ ID NO: 1975809 - DNA, 25 bp, Homo sapien
atgtcaagatggaatactttcaatt

SEQ ID NO: 1975810 - DNA, 25 bp, Homo sapien
tcaagatggaatactttcaattgag

SEQ ID NO: 1975811 - DNA, 25 bp, Homo sapien
caagatggaatactttcaattgagt

SEQ ID NO: 1975812 - DNA, 25 bp, Homo sapien
tgtcaagatggaatactttcaattg

SEQ ID NO: 1975813 - DNA, 25 bp, Homo sapien
cctgaggagaagaagactgtggcat

SEQ ID NO: 1975814 - DNA, 25 bp, Homo sapien
tgtggcataccacgaagcaggccat

SEQ ID NO: 1975815 - DNA, 25 bp, Homo sapien
gatgctcgctgcagtcactcaagaa

SEQ ID NO: 1975816 - DNA, 25 bp, Homo sapien
ggagcacgcagacccgcttttaaag

SEQ ID NO: 1975817 - DNA, 25 bp, Homo sapien
taacgaggaccctatttagaagcat

SEQ ID NO: 1975818 - DNA, 25 bp, Homo sapien
aatcagtaacagttaccaggtaccg

SEQ ID NO: 1975819 - DNA, 25 bp, Homo sapien
ttcaggtgagtggaaaataacgagg

SEQ ID NO: 1975820 - DNA, 25 bp, Homo sapien
atcagtaacagttaccaggtaccgg

SEQ ID NO: 1975821 - DNA, 25 bp, Homo sapien
gaatgtgtgcttcggtgtctccaga

SEQ ID NO: 1975822 - DNA, 25 bp, Homo sapien
agggttcctagagcgcaggctgcac

SEQ ID NO: 1975823 - DNA, 25 bp, Homo sapien
gaagactcgacttgctctccgagaa

SEQ ID NO: 1975824 - DNA, 25 bp, Homo sapien
tccctgctgcttgtgaatcttcgca

SEQ ID NO: 1975825 - DNA, 25 bp, Homo sapien
tcacggtacaggaaacaatgtgtag

SEQ ID NO: 1975826 - DNA, 25 bp, Homo sapien
ggaaacaatgtgtagtttccactac

SEQ ID NO: 1975827 - DNA, 25 bp, Homo sapien
cggtacaggaaacaatgtgtagttt

SEQ ID NO: 1975828 - DNA, 25 bp, Homo sapien
tacaggaaacaatgtgtagtttcca

SEQ ID NO: 1975829 - DNA, 25 bp, Homo sapien
ggtggccacctgttggctggcggaa

SEQ ID NO: 1975830 - DNA, 25 bp, Homo sapien
cttgcggagaggtcgcagcagggcg

SEQ ID NO: 1975831 - DNA, 25 bp, Homo sapien
gtagaactggaaagatgccacccag

SEQ ID NO: 1975832 - DNA, 25 bp, Homo sapien
gacacacgggtctgactcagcgacg

SEQ ID NO: 1975833 - DNA, 25 bp, Homo sapien
tgctgcagtcggccctctctggtag

SEQ ID NO: 1975834 - DNA, 25 bp, Homo sapien
tgtccctccgtgctgcagtcggccc

SEQ ID NO: 1975835 - DNA, 25 bp, Homo sapien
gggctaatctgagctgctcccgcct

SEQ ID NO: 1975836 - DNA, 25 bp, Homo sapien
gtcctgcacctcatcagggctaatc

SEQ ID NO: 1975837 - DNA, 25 bp, Homo sapien
gaactggttcagtttcctccaccca

SEQ ID NO: 1975838 - DNA, 25 bp, Homo sapien
ctggttcagtttcctccacccagag

SEQ ID NO: 1975839 - DNA, 25 bp, Homo sapien
ccaggaactggttcagtttcctcca

SEQ ID NO: 1975840 - DNA, 25 bp, Homo sapien
ttcatcccaggaactggttcagttt

SEQ ID NO: 1975841 - DNA, 25 bp, Homo sapien
atggtgattcctgcacatgccctca

SEQ ID NO: 1975842 - DNA, 25 bp, Homo sapien
ctatggtgattcctgcacatgccct

SEQ ID NO: 1975843 - DNA, 25 bp, Homo sapien
tatggtgattcctgcacatgccctc

SEQ ID NO: 1975844 - DNA, 25 bp, Homo sapien
tggtgattcctgcacatgccctcac

SEQ ID NO: 1975845 - DNA, 25 bp, Homo sapien
gctcctcggaataaagacactattt

SEQ ID NO: 1975846 - DNA, 25 bp, Homo sapien
gactgagtcccaaatcaggtagctc

SEQ ID NO: 1975847 - DNA, 25 bp, Homo sapien
taaagacactatttagtggtggagc

SEQ ID NO: 1975848 - DNA, 25 bp, Homo sapien
caaatcaggtagctcctcggaataa

SEQ ID NO: 1975849 - DNA, 25 bp, Homo sapien
ctctgcgatccgggccgggtgcttc

SEQ ID NO: 1975850 - DNA, 25 bp, Homo sapien
gcgggctctgcgatccgggccgggt

SEQ ID NO: 1975851 - DNA, 25 bp, Homo sapien
cagggcgcgggctctgcgatccggg

SEQ ID NO: 1975852 - DNA, 25 bp, Homo sapien
gcagggcgcgggctctgcgatccgg

SEQ ID NO: 1975853 - DNA, 25 bp, Homo sapien
aacacgtgctccgagctccagatct

SEQ ID NO: 1975854 - DNA, 25 bp, Homo sapien
aaacacgtgctccgagctccagatc

SEQ ID NO: 1975855 - DNA, 25 bp, Homo sapien
ccaaacacgtgctccgagctccaga

SEQ ID NO: 1975856 - DNA, 25 bp, Homo sapien
caaacacgtgctccgagctccagat

SEQ ID NO: 1975857 - DNA, 25 bp, Homo sapien
tgaggtccggcctttcctggaccgc

SEQ ID NO: 1975858 - DNA, 25 bp, Homo sapien
gggatctccgcgaggcccgctgtga

SEQ ID NO: 1975859 - DNA, 25 bp, Homo sapien
aggcccgctgtgaggtccggccttt

SEQ ID NO: 1975860 - DNA, 25 bp, Homo sapien
atctccgcgaggcccgctgtgaggt

SEQ ID NO: 1975861 - DNA, 25 bp, Homo sapien
gggaagcgcgcgtgccctctccggg

SEQ ID NO: 1975862 - DNA, 25 bp, Homo sapien
ctctccgggacgccgaagttgcggt

SEQ ID NO: 1975863 - DNA, 25 bp, Homo sapien
cgcggtcccggggaagcgcgcgtgc

SEQ ID NO: 1975864 - DNA, 25 bp, Homo sapien
agagcctcgcccagaccgcggtccc

SEQ ID NO: 1975865 - DNA, 25 bp, Homo sapien
gtgccaccaaacctgaatgactttt

SEQ ID NO: 1975866 - DNA, 25 bp, Homo sapien
ctgcacgcctcggcacctggcagcc

SEQ ID NO: 1975867 - DNA, 25 bp, Homo sapien
agcctcctcttgccccacctccagt

SEQ ID NO: 1975868 - DNA, 25 bp, Homo sapien
cgacaaatctgaggagtcccgcgag

SEQ ID NO: 1975869 - DNA, 25 bp, Homo sapien
aggcctgggcaacgcgctagtctct

SEQ ID NO: 1975870 - DNA, 25 bp, Homo sapien
gcaacgcgctagtctcttcacttta

SEQ ID NO: 1975871 - DNA, 25 bp, Homo sapien
cactttaatgaaaggctggtccgac

SEQ ID NO: 1975872 - DNA, 25 bp, Homo sapien
ggtacttgcgcatggccgcctggat

SEQ ID NO: 1975873 - DNA, 25 bp, Homo sapien
gttcatcgggttcgggtacttgcgc

SEQ ID NO: 1975874 - DNA, 25 bp, Homo sapien
cctggatgaccgtgtcccacgggtg

SEQ ID NO: 1975875 - DNA, 25 bp, Homo sapien
gcccagcacgctcgggttcatcggg

SEQ ID NO: 1975876 - DNA, 25 bp, Homo sapien
gagcgtgcagcagcactatgctccc

SEQ ID NO: 1975877 - DNA, 25 bp, Homo sapien
gggacagagacaaaacccctgtgtc

SEQ ID NO: 1975878 - DNA, 25 bp, Homo sapien
gcaaaactagcatagtggaacgtta

SEQ ID NO: 1975879 - DNA, 25 bp, Homo sapien
aaatgatatcatgggatgcagcaag

SEQ ID NO: 1975880 - DNA, 25 bp, Homo sapien
gtcaatgtcctactggttcccaaaa

SEQ ID NO: 1975881 - DNA, 25 bp, Homo sapien
ttcttttccactggatccaccacag

SEQ ID NO: 1975882 - DNA, 25 bp, Homo sapien
tggatccaccacagaatgttctcgg

SEQ ID NO: 1975883 - DNA, 25 bp, Homo sapien
tgttctcggatgtatgtcaatgtcc

SEQ ID NO: 1975884 - DNA, 25 bp, Homo sapien
aggttgcagggtgctgagatccact

SEQ ID NO: 1975885 - DNA, 25 bp, Homo sapien
tgcagggtgctgagatccactgcac

SEQ ID NO: 1975886 - DNA, 25 bp, Homo sapien
gcagggtgctgagatccactgcact

SEQ ID NO: 1975887 - DNA, 25 bp, Homo sapien
gttgcagggtgctgagatccactgc

SEQ ID NO: 1975888 - DNA, 25 bp, Homo sapien
agctaggctctatcctgcaggtggc

SEQ ID NO: 1975889 - DNA, 25 bp, Homo sapien
gacaaggagccaataggaccaggga

SEQ ID NO: 1975890 - DNA, 25 bp, Homo sapien
tgtaaatagcatccccaagtcatcg

SEQ ID NO: 1975891 - DNA, 25 bp, Homo sapien
tgtgactttgtgcagcctgggacaa

SEQ ID NO: 1975892 - DNA, 25 bp, Homo sapien
ggtgtgtacaccaacctctcattaa

SEQ ID NO: 1975893 - DNA, 25 bp, Homo sapien
tggatgaggtgtgtacaccaacctc

SEQ ID NO: 1975894 - DNA, 25 bp, Homo sapien
tgtacaccaacctctcattaactga

SEQ ID NO: 1975895 - DNA, 25 bp, Homo sapien
caacctctcattaactgacaccaaa

SEQ ID NO: 1975896 - DNA, 25 bp, Homo sapien
acagtgatgatggcttcttgtgtga

SEQ ID NO: 1975897 - DNA, 25 bp, Homo sapien
accaaggctaatccccttcacagtg

SEQ ID NO: 1975898 - DNA, 25 bp, Homo sapien
gcattggatgatatcgtattggcca

SEQ ID NO: 1975899 - DNA, 25 bp, Homo sapien
tccaaataactaccaaggctaatcc

SEQ ID NO: 1975900 - DNA, 25 bp, Homo sapien
agcgctttcagagtgttcaattatc

SEQ ID NO: 1975901 - DNA, 25 bp, Homo sapien
aattatccactcgatagcagcccac

SEQ ID NO: 1975902 - DNA, 25 bp, Homo sapien
gagtgttcaattatccactcgatag

SEQ ID NO: 1975903 - DNA, 25 bp, Homo sapien
cgctttcagagtgttcaattatcca

SEQ ID NO: 1975904 - DNA, 25 bp, Homo sapien
atgacaagcacaggcacaggcctcc

SEQ ID NO: 1975905 - DNA, 25 bp, Homo sapien
tttatgacaagcacaggcacaggcc

SEQ ID NO: 1975906 - DNA, 25 bp, Homo sapien
catttatgacaagcacaggcacagg

SEQ ID NO: 1975907 - DNA, 25 bp, Homo sapien
ttatgacaagcacaggcacaggcct

SEQ ID NO: 1975908 - DNA, 25 bp, Homo sapien
cgtgaagctcaaggaaacgccagaa

SEQ ID NO: 1975909 - DNA, 25 bp, Homo sapien
cagggaatgttcgtgaagctcaagg

SEQ ID NO: 1975910 - DNA, 25 bp, Homo sapien
cagggccactagaagtccagctgct

SEQ ID NO: 1975911 - DNA, 25 bp, Homo sapien
tgatgccacaagaagccagggaatg

SEQ ID NO: 1975912 - DNA, 25 bp, Homo sapien
atcagcacgaagttcttaaggatcc

SEQ ID NO: 1975913 - DNA, 25 bp, Homo sapien
tcaggcaaaatcagcacgaagttct

SEQ ID NO: 1975914 - DNA, 25 bp, Homo sapien
gtgactcaggcaaaatcagcacgaa

SEQ ID NO: 1975915 - DNA, 25 bp, Homo sapien
aaggaggcgaggcccatggccaccc

SEQ ID NO: 1975916 - DNA, 25 bp, Homo sapien
acaccacactcaagacataaaccac

SEQ ID NO: 1975917 - DNA, 25 bp, Homo sapien
acacaccacactcaagacataaacc

SEQ ID NO: 1975918 - DNA, 25 bp, Homo sapien
cacacaccacactcaagacataaac

SEQ ID NO: 1975919 - DNA, 25 bp, Homo sapien
cacaccacactcaagacataaacca

SEQ ID NO: 1975920 - DNA, 25 bp, Homo sapien
gctccctgttgcacgctcatgaggg

SEQ ID NO: 1975921 - DNA, 25 bp, Homo sapien
gggtcacctgcgacccgcgatcagt

SEQ ID NO: 1975922 - DNA, 25 bp, Homo sapien
tccatccacgcagacggcggcggtg

SEQ ID NO: 1975923 - DNA, 25 bp, Homo sapien
agccagacgtgcttttccgtcccgt

SEQ ID NO: 1975924 - DNA, 25 bp, Homo sapien
cacccgccagcgtttgtggaggagc

SEQ ID NO: 1975925 - DNA, 25 bp, Homo sapien
gagggcggcacacccgccagcgttt

SEQ ID NO: 1975926 - DNA, 25 bp, Homo sapien
ccagcgtttgtggaggagcctaagt

SEQ ID NO: 1975927 - DNA, 25 bp, Homo sapien
gcaggcaggacgatgggcgccgccc

SEQ ID NO: 1975928 - DNA, 25 bp, Homo sapien
ccagcagcagatgtgaggcccggag

SEQ ID NO: 1975929 - DNA, 25 bp, Homo sapien
cagccgcgggcccaggagagctgct

SEQ ID NO: 1975930 - DNA, 25 bp, Homo sapien
agcagcagatgtgaggcccggagca

SEQ ID NO: 1975931 - DNA, 25 bp, Homo sapien
cagatgtgaggcccggagcagccgc

SEQ ID NO: 1975932 - DNA, 25 bp, Homo sapien
gtcaggagaggcttagccactccag

SEQ ID NO: 1975933 - DNA, 25 bp, Homo sapien
cctcgtcaggagaggcttagccact

SEQ ID NO: 1975934 - DNA, 25 bp, Homo sapien
ctcgtcaggagaggcttagccactc

SEQ ID NO: 1975935 - DNA, 25 bp, Homo sapien
cgtcaggagaggcttagccactcca

SEQ ID NO: 1975936 - DNA, 25 bp, Homo sapien
ctatgagggatccatggcctccagc

SEQ ID NO: 1975937 - DNA, 25 bp, Homo sapien
ggatgtcccccgggcacggcagtgg

SEQ ID NO: 1975938 - DNA, 25 bp, Homo sapien
ccagcctgggcgcaggatgtccccc

SEQ ID NO: 1975939 - DNA, 25 bp, Homo sapien
ggcacggcagtggcagactggaggg

SEQ ID NO: 1975940 - DNA, 25 bp, Homo sapien
tcaacggactccagactcctgtact

SEQ ID NO: 1975941 - DNA, 25 bp, Homo sapien
aaaaagagccgactggcagcttgcg

SEQ ID NO: 1975942 - DNA, 25 bp, Homo sapien
tctggaaggctttgcgaaaaagagc

SEQ ID NO: 1975943 - DNA, 25 bp, Homo sapien
aaggccacacatacgctttcataag

SEQ ID NO: 1975944 - DNA, 25 bp, Homo sapien
gccagtgtgcgaccttgtctctcca

SEQ ID NO: 1975945 - DNA, 25 bp, Homo sapien
tttccgtctagagcagaaccaccag

SEQ ID NO: 1975946 - DNA, 25 bp, Homo sapien
ccaccaggtgacaagttctggacca

SEQ ID NO: 1975947 - DNA, 25 bp, Homo sapien
cagatcccgcgtttgcttgtttccg

SEQ ID NO: 1975948 - DNA, 25 bp, Homo sapien
ctgccgttgggtcgcactggaaccg

SEQ ID NO: 1975949 - DNA, 25 bp, Homo sapien
cctctggctgccgttgggtcgcact

SEQ ID NO: 1975950 - DNA, 25 bp, Homo sapien
cccttctcaccactgcgcttgactc

SEQ ID NO: 1975951 - DNA, 25 bp, Homo sapien
gggtcgcactggaaccgcctgctct

SEQ ID NO: 1975952 - DNA, 25 bp, Homo sapien
acatgcacattccacggagagagct

SEQ ID NO: 1975953 - DNA, 25 bp, Homo sapien
aacgagctgcctgcggccttatcag

SEQ ID NO: 1975954 - DNA, 25 bp, Homo sapien
tttcttcccagtggcgggccggcca

SEQ ID NO: 1975955 - DNA, 25 bp, Homo sapien
tgaggccgagccctgcgcagttttc

SEQ ID NO: 1975956 - DNA, 25 bp, Homo sapien
cttcgatgggagcagtaggccgccc

SEQ ID NO: 1975957 - DNA, 25 bp, Homo sapien
cagctcattagaatagagaaggcca

SEQ ID NO: 1975958 - DNA, 25 bp, Homo sapien
taagtcaggagtacaattctaagtc

SEQ ID NO: 1975959 - DNA, 25 bp, Homo sapien
caaagggatttattagtacagagct

SEQ ID NO: 1975960 - DNA, 25 bp, Homo sapien
gaagaacagggatcctgaagacctg

SEQ ID NO: 1975961 - DNA, 25 bp, Homo sapien
aaagagaagccggtgactgtcaggt

SEQ ID NO: 1975962 - DNA, 25 bp, Homo sapien
gcttggtcaaggatagcgagcaccg

SEQ ID NO: 1975963 - DNA, 25 bp, Homo sapien
cacttggcgtgtgtggcaaccctag

SEQ ID NO: 1975964 - DNA, 25 bp, Homo sapien
gatcctggcagggagacttcacgct

SEQ ID NO: 1975965 - DNA, 25 bp, Homo sapien
tgttagtaccagtggctcatctctg

SEQ ID NO: 1975966 - DNA, 25 bp, Homo sapien
agaaagaccttatctgccttggcca

SEQ ID NO: 1975967 - DNA, 25 bp, Homo sapien
tgttggagagaaagaccttatctgc

SEQ ID NO: 1975968 - DNA, 25 bp, Homo sapien
atcagccgttgggtgttagtaccag

SEQ ID NO: 1975969 - DNA, 25 bp, Homo sapien
caatctcaaggttgctgcagaaggc

SEQ ID NO: 1975970 - DNA, 25 bp, Homo sapien
tgcacagaatatcggcttggaccag

SEQ ID NO: 1975971 - DNA, 25 bp, Homo sapien
caccgtggcaacaaaacagctacct

SEQ ID NO: 1975972 - DNA, 25 bp, Homo sapien
ttcgagtttaaagcaagagtgtgcc

SEQ ID NO: 1975973 - DNA, 25 bp, Homo sapien
tgacagcaagcgctccagaactgac

SEQ ID NO: 1975974 - DNA, 25 bp, Homo sapien
acagcgctccggaaatgtggggcat

SEQ ID NO: 1975975 - DNA, 25 bp, Homo sapien
tcggagcccgtttgatggaagcagt

SEQ ID NO: 1975976 - DNA, 25 bp, Homo sapien
tgtgctcccgatactggtggctgcc

SEQ ID NO: 1975977 - DNA, 25 bp, Homo sapien
cctctgaagttcctctgtgatatgt

SEQ ID NO: 1975978 - DNA, 25 bp, Homo sapien
tccagttgaggaaaagatgtacagt

SEQ ID NO: 1975979 - DNA, 25 bp, Homo sapien
tgactcgtgcttcctgtattgcaga

SEQ ID NO: 1975980 - DNA, 25 bp, Homo sapien
ccacatgtccagtgactaagtccaa

SEQ ID NO: 1975981 - DNA, 25 bp, Homo sapien
tggtttaccttctaaatatcttaca

SEQ ID NO: 1975982 - DNA, 25 bp, Homo sapien
cttaactaagaatgcatggtttacc

SEQ ID NO: 1975983 - DNA, 25 bp, Homo sapien
taagaatgcatggtttaccttctaa

SEQ ID NO: 1975984 - DNA, 25 bp, Homo sapien
tatcttaactaagaatgcatggttt

SEQ ID NO: 1975985 - DNA, 25 bp, Homo sapien
tttgtagaacgtgtccctcagcaga

SEQ ID NO: 1975986 - DNA, 25 bp, Homo sapien
caatgactaacaaagcctcggcaga

SEQ ID NO: 1975987 - DNA, 25 bp, Homo sapien
gaagagctgtacacccacaagggtg

SEQ ID NO: 1975988 - DNA, 25 bp, Homo sapien
tccacagggtaattcactaagagct

SEQ ID NO: 1975989 - DNA, 25 bp, Homo sapien
gctgtcagaaatcacctcaattggg

SEQ ID NO: 1975990 - DNA, 25 bp, Homo sapien
caagtgcattaaagaggtcacgtgg

SEQ ID NO: 1975991 - DNA, 25 bp, Homo sapien
agcattaacggagtttgccaagtgc

SEQ ID NO: 1975992 - DNA, 25 bp, Homo sapien
cgtggagggtacgttcatatgaaac

SEQ ID NO: 1975993 - DNA, 25 bp, Homo sapien
tcttcaacagcattaacggagtttg

SEQ ID NO: 1975994 - DNA, 25 bp, Homo sapien
tttgcatgtaaaagtgggccaccag

SEQ ID NO: 1975995 - DNA, 25 bp, Homo sapien
gacatgtctgtagtcagcaccacga

SEQ ID NO: 1975996 - DNA, 25 bp, Homo sapien
taatacctcaaaactgctccggtag

SEQ ID NO: 1975997 - DNA, 25 bp, Homo sapien
ctatactccagacagttaggtggga

SEQ ID NO: 1975998 - DNA, 25 bp, Homo sapien
gacatcttgccctttggtttcttgg

SEQ ID NO: 1975999 - DNA, 25 bp, Homo sapien
acatcttgccctttggtttcttggg

SEQ ID NO: 1976000 - DNA, 25 bp, Homo sapien
cacaaaaaggcataagcagacatct

SEQ ID NO: 1976001 - DNA, 25 bp, Homo sapien
ctgcacaaaaaggcataagcagaca

SEQ ID NO: 1976002 - DNA, 25 bp, Homo sapien
aattgacagagaccgctgggctctt

SEQ ID NO: 1976003 - DNA, 25 bp, Homo sapien
aaattgacagagaccgctgggctct

SEQ ID NO: 1976004 - DNA, 25 bp, Homo sapien
gacagagaccgctgggctcttcttc

SEQ ID NO: 1976005 - DNA, 25 bp, Homo sapien
ttgacagagaccgctgggctcttct

SEQ ID NO: 1976006 - DNA, 25 bp, Homo sapien
atttcccagtggtagtgtactttat

SEQ ID NO: 1976007 - DNA, 25 bp, Homo sapien
ttcccagtggtagtgtactttatcc

SEQ ID NO: 1976008 - DNA, 25 bp, Homo sapien
tttcccagtggtagtgtactttatc

SEQ ID NO: 1976009 - DNA, 25 bp, Homo sapien
tcatttcccagtggtagtgtacttt

SEQ ID NO: 1976010 - DNA, 25 bp, Homo sapien
tatgaatttgatcttggggtggaat

SEQ ID NO: 1976011 - DNA, 25 bp, Homo sapien
gccagggtttatgaatttgatcttg

SEQ ID NO: 1976012 - DNA, 25 bp, Homo sapien
ggtttatgaatttgatcttggggtg

SEQ ID NO: 1976013 - DNA, 25 bp, Homo sapien
gagatgccagggtttatgaatttga

SEQ ID NO: 1976014 - DNA, 25 bp, Homo sapien
tttcctttcaacttatagtcagaaa

SEQ ID NO: 1976015 - DNA, 25 bp, Homo sapien
tatagtcagaaacatccttctcata

SEQ ID NO: 1976016 - DNA, 25 bp, Homo sapien
atagtcagaaacatccttctcatac

SEQ ID NO: 1976017 - DNA, 25 bp, Homo sapien
cctttcaacttatagtcagaaacat

SEQ ID NO: 1976018 - DNA, 25 bp, Homo sapien
ccttcttccttttcatcttgttcat

SEQ ID NO: 1976019 - DNA, 25 bp, Homo sapien
cttccttttcatcttgttcatcttc

SEQ ID NO: 1976020 - DNA, 25 bp, Homo sapien
actttagcaggacccttttctccat

SEQ ID NO: 1976021 - DNA, 25 bp, Homo sapien
ttagcaggacccttttctccatcaa

SEQ ID NO: 1976022 - DNA, 25 bp, Homo sapien
tcctatcttttcattgggaccttct

SEQ ID NO: 1976023 - DNA, 25 bp, Homo sapien
atagatgcggctgccctccaaacca

SEQ ID NO: 1976024 - DNA, 25 bp, Homo sapien
tatcttttcattgggaccttctgct

SEQ ID NO: 1976025 - DNA, 25 bp, Homo sapien
tatttgggataatagatgcggctgc

SEQ ID NO: 1976026 - DNA, 25 bp, Homo sapien
aactctggccgaactggacagctct

SEQ ID NO: 1976027 - DNA, 25 bp, Homo sapien
tttttgtcgggcatgttagctcacg

SEQ ID NO: 1976028 - DNA, 25 bp, Homo sapien
cagcttgactcccaagatgagggtg

SEQ ID NO: 1976029 - DNA, 25 bp, Homo sapien
aacgggttaagtacctcacagcagg

SEQ ID NO: 1976030 - DNA, 25 bp, Homo sapien
cctcggttaaaaaagagtgctcatg

SEQ ID NO: 1976031 - DNA, 25 bp, Homo sapien
tatttgagataacagctatacccag

SEQ ID NO: 1976032 - DNA, 25 bp, Homo sapien
gaattattctactctagggtgtcat

SEQ ID NO: 1976033 - DNA, 25 bp, Homo sapien
gaaatcatcctcgacttcatcagat

SEQ ID NO: 1976034 - DNA, 25 bp, Homo sapien
atacttggcctacattagcatattt

SEQ ID NO: 1976035 - DNA, 25 bp, Homo sapien
cttggcctacattagcatattttaa

SEQ ID NO: 1976036 - DNA, 25 bp, Homo sapien
tttgggactccaagacgggcagacc

SEQ ID NO: 1976037 - DNA, 25 bp, Homo sapien
tccaagacgggcagaccactgagcc

SEQ ID NO: 1976038 - DNA, 25 bp, Homo sapien
gaagtatacataaggagtggtgaaa

SEQ ID NO: 1976039 - DNA, 25 bp, Homo sapien
aaccaactagatccataaaatcaac

SEQ ID NO: 1976040 - DNA, 25 bp, Homo sapien
ccagtaatgtaacatgtcatagcca

SEQ ID NO: 1976041 - DNA, 25 bp, Homo sapien
gaacacccacctaaccaactagatc

SEQ ID NO: 1976042 - DNA, 25 bp, Homo sapien
ctccagcctgcatatttaattgtgc

SEQ ID NO: 1976043 - DNA, 25 bp, Homo sapien
ggcatctgtgccatttgattccact

SEQ ID NO: 1976044 - DNA, 25 bp, Homo sapien
ctatgcagtcatgtgggcatctgtg

SEQ ID NO: 1976045 - DNA, 25 bp, Homo sapien
ttcctccagcctgcatatttaattg

SEQ ID NO: 1976046 - DNA, 25 bp, Homo sapien
caccttcgctgcagttttcctcagt

SEQ ID NO: 1976047 - DNA, 25 bp, Homo sapien
acaccttcgctgcagttttcctcag

SEQ ID NO: 1976048 - DNA, 25 bp, Homo sapien
ccacaccttcgctgcagttttcctc

SEQ ID NO: 1976049 - DNA, 25 bp, Homo sapien
cacaccttcgctgcagttttcctca

SEQ ID NO: 1976050 - DNA, 25 bp, Homo sapien
tagtcatgaatgactgtgtaactgt

SEQ ID NO: 1976051 - DNA, 25 bp, Homo sapien
catgaatgactgtgtaactgtctct

SEQ ID NO: 1976052 - DNA, 25 bp, Homo sapien
tattagtcatgaatgactgtgtaac

SEQ ID NO: 1976053 - DNA, 25 bp, Homo sapien
agctttcttattagtcatgaatgac

SEQ ID NO: 1976054 - DNA, 25 bp, Homo sapien
caaggtggtcgaagtacacctccca

SEQ ID NO: 1976055 - DNA, 25 bp, Homo sapien
tagggtagcagatcacaaaagaagt

SEQ ID NO: 1976056 - DNA, 25 bp, Homo sapien
cagagagatcagtattggcaggcct

SEQ ID NO: 1976057 - DNA, 25 bp, Homo sapien
gataacaaaccctcaggtgacggtg

SEQ ID NO: 1976058 - DNA, 25 bp, Homo sapien
tgacctaccgctccgagccaatttt

SEQ ID NO: 1976059 - DNA, 25 bp, Homo sapien
cctaccgctccgagccaattttttg

SEQ ID NO: 1976060 - DNA, 25 bp, Homo sapien
ctaccgctccgagccaattttttgt

SEQ ID NO: 1976061 - DNA, 25 bp, Homo sapien
ggcatgacctaccgctccgagccaa

SEQ ID NO: 1976062 - DNA, 25 bp, Homo sapien
taatagaggtcttggcagagggatc

SEQ ID NO: 1976063 - DNA, 25 bp, Homo sapien
gtctgtacatgagttgccgcttccg

SEQ ID NO: 1976064 - DNA, 25 bp, Homo sapien
aaatcagtttgtacgtcctcagagg

SEQ ID NO: 1976065 - DNA, 25 bp, Homo sapien
ttcccatggccgcaacacggtgtgg

SEQ ID NO: 1976066 - DNA, 25 bp, Homo sapien
gggagccgcggactgaggcagtggg

SEQ ID NO: 1976067 - DNA, 25 bp, Homo sapien
cctggaggagatcctgcggctgtac

SEQ ID NO: 1976068 - DNA, 25 bp, Homo sapien
cgcgacgacgatgctccggagctga

SEQ ID NO: 1976069 - DNA, 25 bp, Homo sapien
aaccagcccatcaacgaggagcagg

SEQ ID NO: 1976070 - DNA, 25 bp, Homo sapien
accggccggcggctgtctgaccggg

SEQ ID NO: 1976071 - DNA, 25 bp, Homo sapien
cagagcgtgcatcccccggcccgtg

SEQ ID NO: 1976072 - DNA, 25 bp, Homo sapien
ggcgccggacgccatcgcgtcgcta

SEQ ID NO: 1976073 - DNA, 25 bp, Homo sapien
ccatcgcgtcgctaccggccggcgg

SEQ ID NO: 1976074 - DNA, 25 bp, Homo sapien
ggcgtcaccgcctgcgactctgaga

SEQ ID NO: 1976075 - DNA, 25 bp, Homo sapien
ctgtgtgtcccttgcgaccgggccc

SEQ ID NO: 1976076 - DNA, 25 bp, Homo sapien
tctgagagccctgcgggctagagac

SEQ ID NO: 1976077 - DNA, 25 bp, Homo sapien
ggctagagaccgtgcggccatctcg

SEQ ID NO: 1976078 - DNA, 25 bp, Homo sapien
ttttcttaggcatccgctccaggcg

SEQ ID NO: 1976079 - DNA, 25 bp, Homo sapien
caagaaatcggaaaacgcgcagagc

SEQ ID NO: 1976080 - DNA, 25 bp, Homo sapien
gctccaggcgggttcaagttttcaa

SEQ ID NO: 1976081 - DNA, 25 bp, Homo sapien
tcacgggaaactgccggaggctttc

SEQ ID NO: 1976082 - DNA, 25 bp, Homo sapien
gcagcagtatcccataaggccagga

SEQ ID NO: 1976083 - DNA, 25 bp, Homo sapien
tgttacaaatgaatccggaaggacg

SEQ ID NO: 1976084 - DNA, 25 bp, Homo sapien
tagttgtccaagtgcaatgggcagc

SEQ ID NO: 1976085 - DNA, 25 bp, Homo sapien
tgggctttggcacacatagatactg

SEQ ID NO: 1976086 - DNA, 25 bp, Homo sapien
tccactgagaagatatcaatggctg

SEQ ID NO: 1976087 - DNA, 25 bp, Homo sapien
tagcctttgagtggtcagcagtcac

SEQ ID NO: 1976088 - DNA, 25 bp, Homo sapien
gggacagtgctgttattccacaggg

SEQ ID NO: 1976089 - DNA, 25 bp, Homo sapien
gatggatgacggtaaggcttatcaa

SEQ ID NO: 1976090 - DNA, 25 bp, Homo sapien
ggtcaaagtagaatgcataaagagc

SEQ ID NO: 1976091 - DNA, 25 bp, Homo sapien
gccaagagcagctctagacctctac

SEQ ID NO: 1976092 - DNA, 25 bp, Homo sapien
agtagaatgcataaagagccaagag

SEQ ID NO: 1976093 - DNA, 25 bp, Homo sapien
gaaatgaggttctcatagggtcaaa

SEQ ID NO: 1976094 - DNA, 25 bp, Homo sapien
gcgactggcagttcgtgtccgagta

SEQ ID NO: 1976095 - DNA, 25 bp, Homo sapien
tatcgctcggtattatagggccaat

SEQ ID NO: 1976096 - DNA, 25 bp, Homo sapien
tcacaatctggcttgaatggcatac

SEQ ID NO: 1976097 - DNA, 25 bp, Homo sapien
aaataatctgttgccgtggagacca

SEQ ID NO: 1976098 - DNA, 25 bp, Homo sapien
gacagagtttccttatgttggccag

SEQ ID NO: 1976099 - DNA, 25 bp, Homo sapien
tagagacagagtttccttatgttgg

SEQ ID NO: 1976100 - DNA, 25 bp, Homo sapien
gctgggactaatggtgtgtgctacc

SEQ ID NO: 1976101 - DNA, 25 bp, Homo sapien
ggactaatggtgtgtgctaccacac

SEQ ID NO: 1976102 - DNA, 25 bp, Homo sapien
taatgtccttggttatgaacgagcc

SEQ ID NO: 1976103 - DNA, 25 bp, Homo sapien
tacaaggtaagcactcgatcaatgg

SEQ ID NO: 1976104 - DNA, 25 bp, Homo sapien
ttaaaccacttcgagctggacggct

SEQ ID NO: 1976105 - DNA, 25 bp, Homo sapien
tgaacgagcccctgttattggagga

SEQ ID NO: 1976106 - DNA, 25 bp, Homo sapien
ttcacagtgccgtatcagtaaccat

SEQ ID NO: 1976107 - DNA, 25 bp, Homo sapien
cctgtggatctctaaatttgaggcc

SEQ ID NO: 1976108 - DNA, 25 bp, Homo sapien
tgttatatcagccaatcagaagagt

SEQ ID NO: 1976109 - DNA, 25 bp, Homo sapien
tgaatagtaagtggccctttcacag

SEQ ID NO: 1976110 - DNA, 25 bp, Homo sapien
cagctgagcaaggtgagagtcgcgg

SEQ ID NO: 1976111 - DNA, 25 bp, Homo sapien
gggccgcgcagttagggcatctgag

SEQ ID NO: 1976112 - DNA, 25 bp, Homo sapien
cagcatgtcgctgcctccggagaaa

SEQ ID NO: 1976113 - DNA, 25 bp, Homo sapien
tttgtgctccagtcgctcctaacgc

SEQ ID NO: 1976114 - DNA, 25 bp, Homo sapien
caagccctgtttgtccgccactgtt

SEQ ID NO: 1976115 - DNA, 25 bp, Homo sapien
aaacgatcaggcagcgtgcgggcca

SEQ ID NO: 1976116 - DNA, 25 bp, Homo sapien
ctggcaagaacgagggcagcaagaa

SEQ ID NO: 1976117 - DNA, 25 bp, Homo sapien
taactgccggttcagagggcggaaa

SEQ ID NO: 1976118 - DNA, 25 bp, Homo sapien
tggccagcagggactaaccgcggcc

SEQ ID NO: 1976119 - DNA, 25 bp, Homo sapien
aggagggtgaagccggcaaggtcgg

SEQ ID NO: 1976120 - DNA, 25 bp, Homo sapien
ccgactccccgcagggaacgaacat

SEQ ID NO: 1976121 - DNA, 25 bp, Homo sapien
gccgactccccgcagggaacgaaca

SEQ ID NO: 1976122 - DNA, 25 bp, Homo sapien
taggagggtgaagccggcaaggtcg

SEQ ID NO: 1976123 - DNA, 25 bp, Homo sapien
ttgctttattagtgcctctttaccc

SEQ ID NO: 1976124 - DNA, 25 bp, Homo sapien
tttgctttattagtgcctctttacc

SEQ ID NO: 1976125 - DNA, 25 bp, Homo sapien
atttgctttattagtgcctctttac

SEQ ID NO: 1976126 - DNA, 25 bp, Homo sapien
catttgctttattagtgcctcttta

SEQ ID NO: 1976127 - DNA, 25 bp, Homo sapien
ccattgcaagctggccaacatttcc

SEQ ID NO: 1976128 - DNA, 25 bp, Homo sapien
atccattgcaagctggccaacattt

SEQ ID NO: 1976129 - DNA, 25 bp, Homo sapien
tccattgcaagctggccaacatttc

SEQ ID NO: 1976130 - DNA, 25 bp, Homo sapien
gatccattgcaagctggccaacatt

SEQ ID NO: 1976131 - DNA, 25 bp, Homo sapien
tatagaagtaaccaatcttagacat

SEQ ID NO: 1976132 - DNA, 25 bp, Homo sapien
tccttctgtggtcgcatatggattg

SEQ ID NO: 1976133 - DNA, 25 bp, Homo sapien
tccaaccattggcacaagacaatcg

SEQ ID NO: 1976134 - DNA, 25 bp, Homo sapien
catttatgctaagttctgttgaatt

SEQ ID NO: 1976135 - DNA, 25 bp, Homo sapien
tgctgcattataaccagtgttccct

SEQ ID NO: 1976136 - DNA, 25 bp, Homo sapien
gtgctgcattataaccagtgttccc

SEQ ID NO: 1976137 - DNA, 25 bp, Homo sapien
aaatggatcttaactgtagagccac

SEQ ID NO: 1976138 - DNA, 25 bp, Homo sapien
cttaataaaaatggatcttaactgt

SEQ ID NO: 1976139 - DNA, 25 bp, Homo sapien
taataaaaatggatcttaactgtag

SEQ ID NO: 1976140 - DNA, 25 bp, Homo sapien
ataaaaatggatcttaactgtagag

SEQ ID NO: 1976141 - DNA, 25 bp, Homo sapien
cgcgcatagcgagagatcaagtagg

SEQ ID NO: 1976142 - DNA, 25 bp, Homo sapien
ggatactttcggaacagctgtggaa

SEQ ID NO: 1976143 - DNA, 25 bp, Homo sapien
gaaggaaactgtgtacgcgcatagc

SEQ ID NO: 1976144 - DNA, 25 bp, Homo sapien
ggcaggccagttttactctgaagga

SEQ ID NO: 1976145 - DNA, 25 bp, Homo sapien
tgactctggcacagccactgctttt

SEQ ID NO: 1976146 - DNA, 25 bp, Homo sapien
cttgaaagaacaatgactctggcac

SEQ ID NO: 1976147 - DNA, 25 bp, Homo sapien
tacgctgatatgaatgactgcttga

SEQ ID NO: 1976148 - DNA, 25 bp, Homo sapien
tacgaagctgcagatcattacgctg

SEQ ID NO: 1976149 - DNA, 25 bp, Homo sapien
tattttgaacacttttttgcatgga

SEQ ID NO: 1976150 - DNA, 25 bp, Homo sapien
ttttttgcatggaaggtgtaagtag

SEQ ID NO: 1976151 - DNA, 25 bp, Homo sapien
ttttgcatggaaggtgtaagtaggt

SEQ ID NO: 1976152 - DNA, 25 bp, Homo sapien
tgcatggaaggtgtaagtaggtacc

SEQ ID NO: 1976153 - DNA, 25 bp, Homo sapien
ttgtgatacctcctcccggaatgcg

SEQ ID NO: 1976154 - DNA, 25 bp, Homo sapien
gaatcatctatttcaggaatgcacc

SEQ ID NO: 1976155 - DNA, 25 bp, Homo sapien
gcggatacaaaactcggaatcatct

SEQ ID NO: 1976156 - DNA, 25 bp, Homo sapien
catctatttcaggaatgcaccggct

SEQ ID NO: 1976157 - DNA, 25 bp, Homo sapien
ccggcctagcaatatattctcaaag

SEQ ID NO: 1976158 - DNA, 25 bp, Homo sapien
gcccggcctagcaatatattctcaa

SEQ ID NO: 1976159 - DNA, 25 bp, Homo sapien
cctagcaatatattctcaaagtttc

SEQ ID NO: 1976160 - DNA, 25 bp, Homo sapien
ggcctagcaatatattctcaaagtt

SEQ ID NO: 1976161 - DNA, 25 bp, Homo sapien
ggagtgcagacgcaacttccttgtc

SEQ ID NO: 1976162 - DNA, 25 bp, Homo sapien
gggacaagagaggaacacggaacaa

SEQ ID NO: 1976163 - DNA, 25 bp, Homo sapien
gcaggagggcaagtctgatatcagt

SEQ ID NO: 1976164 - DNA, 25 bp, Homo sapien
cacgacatgtcaaatcccagggcat

SEQ ID NO: 1976165 - DNA, 25 bp, Homo sapien
tacttcttccgaaaacgctgagtgg

SEQ ID NO: 1976166 - DNA, 25 bp, Homo sapien
aagagattgaatacaggctgggcgc

SEQ ID NO: 1976167 - DNA, 25 bp, Homo sapien
tttcatagggtacaagagctgactc

SEQ ID NO: 1976168 - DNA, 25 bp, Homo sapien
tttctacttgtgagagcaggcccct

SEQ ID NO: 1976169 - DNA, 25 bp, Homo sapien
ggatgttgtccccttctgaaacaaa

SEQ ID NO: 1976170 - DNA, 25 bp, Homo sapien
tcaacaagacctaatgcatctggga

SEQ ID NO: 1976171 - DNA, 25 bp, Homo sapien
taagatactcaacaagacctaatgc

SEQ ID NO: 1976172 - DNA, 25 bp, Homo sapien
taatgcatctgggatgttgtcccct

SEQ ID NO: 1976173 - DNA, 25 bp, Homo sapien
tagtatataaagtgcgagttaatga

SEQ ID NO: 1976174 - DNA, 25 bp, Homo sapien
tggtctacttaggtagtatataaag

SEQ ID NO: 1976175 - DNA, 25 bp, Homo sapien
tgcgagttaatgaatacaaccagac

SEQ ID NO: 1976176 - DNA, 25 bp, Homo sapien
tacaaacgttcacttacttggtcta

SEQ ID NO: 1976177 - DNA, 25 bp, Homo sapien
gatatgccagaaaggctgtagatga

SEQ ID NO: 1976178 - DNA, 25 bp, Homo sapien
tagaaagcagccttatgctcagtgt

SEQ ID NO: 1976179 - DNA, 25 bp, Homo sapien
tttggttggcacttttatagccagg

SEQ ID NO: 1976180 - DNA, 25 bp, Homo sapien
aagctagttacccatcttagaaagc

SEQ ID NO: 1976181 - DNA, 25 bp, Homo sapien
tttccaccgtgaggcagatactgtg

SEQ ID NO: 1976182 - DNA, 25 bp, Homo sapien
accactgccaaagagtaatctccaa

SEQ ID NO: 1976183 - DNA, 25 bp, Homo sapien
tgccaaagagtaatctccaagaact

SEQ ID NO: 1976184 - DNA, 25 bp, Homo sapien
gcagggggaagaccactgccaaaga

SEQ ID NO: 1976185 - DNA, 25 bp, Homo sapien
agctgtgttggtagtaagtgttttg

SEQ ID NO: 1976186 - DNA, 25 bp, Homo sapien
aaagcatggcaaagagacccttaat

SEQ ID NO: 1976187 - DNA, 25 bp, Homo sapien
catttggtgcatatgatgaaaagca

SEQ ID NO: 1976188 - DNA, 25 bp, Homo sapien
taatttcctaataccagatcataca

SEQ ID NO: 1976189 - DNA, 25 bp, Homo sapien
ttggtggtctcaagagttgaggttg

SEQ ID NO: 1976190 - DNA, 25 bp, Homo sapien
ggtggtctcaagagttgaggttgtg

SEQ ID NO: 1976191 - DNA, 25 bp, Homo sapien
tggtggtctcaagagttgaggttgt

SEQ ID NO: 1976192 - DNA, 25 bp, Homo sapien
accgcatgggactctttccttgtcg

SEQ ID NO: 1976193 - DNA, 25 bp, Homo sapien
cgtgggaagcttggcggaggctcca

SEQ ID NO: 1976194 - DNA, 25 bp, Homo sapien
gaggctccaggaacgctgacgaagt

SEQ ID NO: 1976195 - DNA, 25 bp, Homo sapien
tccttgtcggagcttgtaaaaatca

SEQ ID NO: 1976196 - DNA, 25 bp, Homo sapien
aggcccttgggcggctggacaggtt

SEQ ID NO: 1976197 - DNA, 25 bp, Homo sapien
aggtttttgtgatgtgagggacaca

SEQ ID NO: 1976198 - DNA, 25 bp, Homo sapien
tgggcggctggacaggtttttgtga

SEQ ID NO: 1976199 - DNA, 25 bp, Homo sapien
ggtttttgtgatgtgagggacacac

SEQ ID NO: 1976200 - DNA, 25 bp, Homo sapien
cattgtgaatggagtccacctttct

SEQ ID NO: 1976201 - DNA, 25 bp, Homo sapien
ttcccaccacacacgtgaatgccgg

SEQ ID NO: 1976202 - DNA, 25 bp, Homo sapien
caccacacacgtgaatgccgggcat

SEQ ID NO: 1976203 - DNA, 25 bp, Homo sapien
ctctcagggatgtcatcattgtgaa

SEQ ID NO: 1976204 - DNA, 25 bp, Homo sapien
acaggccacggggtcacagatgccg

SEQ ID NO: 1976205 - DNA, 25 bp, Homo sapien
acagatgccggccgcttcctcggca

SEQ ID NO: 1976206 - DNA, 25 bp, Homo sapien
ggcgtgtgcctgttctagcagcaca

SEQ ID NO: 1976207 - DNA, 25 bp, Homo sapien
gcttcctcggcaggtccttttgcca

SEQ ID NO: 1976208 - DNA, 25 bp, Homo sapien
ggcaggcgaccgacaccagcgagtc

SEQ ID NO: 1976209 - DNA, 25 bp, Homo sapien
cgcccgaggtgagagtgattccaag

SEQ ID NO: 1976210 - DNA, 25 bp, Homo sapien
tgattccaagagtgcagaaacggga

SEQ ID NO: 1976211 - DNA, 25 bp, Homo sapien
cttgaagcggcatccgaggagatgt

SEQ ID NO: 1976212 - DNA, 25 bp, Homo sapien
tgagtagcgttcacaacagatggcc

SEQ ID NO: 1976213 - DNA, 25 bp, Homo sapien
tcagagcagtttcaagtgagtagcg

SEQ ID NO: 1976214 - DNA, 25 bp, Homo sapien
tttaaacagccttgtcggttggtgc

SEQ ID NO: 1976215 - DNA, 25 bp, Homo sapien
tatcggaatgatggcggcactgctc

SEQ ID NO: 1976216 - DNA, 25 bp, Homo sapien
gagttaactatctgtcagctttgag

SEQ ID NO: 1976217 - DNA, 25 bp, Homo sapien
ggctcagcttgtagcttttgaaaaa

SEQ ID NO: 1976218 - DNA, 25 bp, Homo sapien
gaggaaacctgcatgccaaggaaga

SEQ ID NO: 1976219 - DNA, 25 bp, Homo sapien
aaccttctacggaaaataagagcat

SEQ ID NO: 1976220 - DNA, 25 bp, Homo sapien
taactgattgtcatcaattaattgt

SEQ ID NO: 1976221 - DNA, 25 bp, Homo sapien
ctgtaactgattgtcatcaattaat

SEQ ID NO: 1976222 - DNA, 25 bp, Homo sapien
actgattgtcatcaattaattgtaa

SEQ ID NO: 1976223 - DNA, 25 bp, Homo sapien
gtaactgattgtcatcaattaattg

SEQ ID NO: 1976224 - DNA, 25 bp, Homo sapien
tctgatcctctgtagcaatgccctt

SEQ ID NO: 1976225 - DNA, 25 bp, Homo sapien
ggatcaggatccaagtgcagtccac

SEQ ID NO: 1976226 - DNA, 25 bp, Homo sapien
cattttctggaaatggcagctgagt

SEQ ID NO: 1976227 - DNA, 25 bp, Homo sapien
tgcattcacatctattaacgccggg

SEQ ID NO: 1976228 - DNA, 25 bp, Homo sapien
gatgcttccacatgaggccgcgtca

SEQ ID NO: 1976229 - DNA, 25 bp, Homo sapien
tgtgcatctatgttcgtctgtgtgt

SEQ ID NO: 1976230 - DNA, 25 bp, Homo sapien
tcgtttggaaatccagcaccccagc

SEQ ID NO: 1976231 - DNA, 25 bp, Homo sapien
ccctaagataacagtgcagcactta

SEQ ID NO: 1976232 - DNA, 25 bp, Homo sapien
ccaaagtattggtaagtctagcaca

SEQ ID NO: 1976233 - DNA, 25 bp, Homo sapien
tgtcggtatcacacagaggtcactt

SEQ ID NO: 1976234 - DNA, 25 bp, Homo sapien
aaagcatctgctaacaacctgtggt

SEQ ID NO: 1976235 - DNA, 25 bp, Homo sapien
tagcagtattacacagtggaggtcc

SEQ ID NO: 1976236 - DNA, 25 bp, Homo sapien
aatttggcttttcgtggcctcaggc

SEQ ID NO: 1976237 - DNA, 25 bp, Homo sapien
tcaggagcgggaacctaggtaagtc

SEQ ID NO: 1976238 - DNA, 25 bp, Homo sapien
gacacaggttgctcttgatacatca

SEQ ID NO: 1976239 - DNA, 25 bp, Homo sapien
tagcataaagtggtgtgtcagagcc

SEQ ID NO: 1976240 - DNA, 25 bp, Homo sapien
cctgcccctagaagtgcagatatac

SEQ ID NO: 1976241 - DNA, 25 bp, Homo sapien
tttactctggagttgacctgttcca

SEQ ID NO: 1976242 - DNA, 25 bp, Homo sapien
ggcctggcttggtaactcactcctg

SEQ ID NO: 1976243 - DNA, 25 bp, Homo sapien
cagctcagattgtgtggactcctca

SEQ ID NO: 1976244 - DNA, 25 bp, Homo sapien
tcaggttaaacgtcttggccaggaa

SEQ ID NO: 1976245 - DNA, 25 bp, Homo sapien
tttaatctggaactgttccctgcct

SEQ ID NO: 1976246 - DNA, 25 bp, Homo sapien
tagaatgccccatacaatgcatttc

SEQ ID NO: 1976247 - DNA, 25 bp, Homo sapien
gccaggaaaaaggtagtctcaatgt

SEQ ID NO: 1976248 - DNA, 25 bp, Homo sapien
tccttgaaccctgaccatgggcctg

SEQ ID NO: 1976249 - DNA, 25 bp, Homo sapien
tgatagacatacttcacagggttcc

SEQ ID NO: 1976250 - DNA, 25 bp, Homo sapien
cactgtagtgcaggcattgggcgct

SEQ ID NO: 1976251 - DNA, 25 bp, Homo sapien
gcaactgcctcttattcatgactgg

SEQ ID NO: 1976252 - DNA, 25 bp, Homo sapien
taagaagtcctgaaggtttctgcgc

SEQ ID NO: 1976253 - DNA, 25 bp, Homo sapien
tcctgaaggtttctgcgcttttcct

SEQ ID NO: 1976254 - DNA, 25 bp, Homo sapien
attagtttacgcttaagaaagtcag

SEQ ID NO: 1976255 - DNA, 25 bp, Homo sapien
tttctgccgaattagtttacgctta

SEQ ID NO: 1976256 - DNA, 25 bp, Homo sapien
atctgcgtcgcaaaattccaggtac

SEQ ID NO: 1976257 - DNA, 25 bp, Homo sapien
tgtttttcatctgcgtcgcaaaatt

SEQ ID NO: 1976258 - DNA, 25 bp, Homo sapien
tcatctgcgtcgcaaaattccaggt

SEQ ID NO: 1976259 - DNA, 25 bp, Homo sapien
tttcatctgcgtcgcaaaattccag

SEQ ID NO: 1976260 - DNA, 25 bp, Homo sapien
ggagtccaggacagtcagctgtact

SEQ ID NO: 1976261 - DNA, 25 bp, Homo sapien
cagtgggggagtgctggagtccagg

SEQ ID NO: 1976262 - DNA, 25 bp, Homo sapien
agtgctggagtccaggacagtcagc

SEQ ID NO: 1976263 - DNA, 25 bp, Homo sapien
acagtcagctgtactcgggattggg

SEQ ID NO: 1976264 - DNA, 25 bp, Homo sapien
caagaaggctgctactgggtgcctg

SEQ ID NO: 1976265 - DNA, 25 bp, Homo sapien
gatcagaatcttgccctaagaggcc

SEQ ID NO: 1976266 - DNA, 25 bp, Homo sapien
cctagagcacttacgctgggtggag

SEQ ID NO: 1976267 - DNA, 25 bp, Homo sapien
tgtggtgagtctgacagcgtccctg

SEQ ID NO: 1976268 - DNA, 25 bp, Homo sapien
aacactgggccagctggttttaccg

SEQ ID NO: 1976269 - DNA, 25 bp, Homo sapien
tctgaagagtccacttaaagacatt

SEQ ID NO: 1976270 - DNA, 25 bp, Homo sapien
gaacagattcctagaaaaacataat

SEQ ID NO: 1976271 - DNA, 25 bp, Homo sapien
tttcaggaatgtaagggtagctaac

SEQ ID NO: 1976272 - DNA, 25 bp, Homo sapien
gatggtgttgctgtaccttttccaa

SEQ ID NO: 1976273 - DNA, 25 bp, Homo sapien
gagtggtattctcatccagtggagg

SEQ ID NO: 1976274 - DNA, 25 bp, Homo sapien
tcaacaacctctttcccgtgagtgg

SEQ ID NO: 1976275 - DNA, 25 bp, Homo sapien
ttctgcaaataccagctcaacaacc

SEQ ID NO: 1976276 - DNA, 25 bp, Homo sapien
aagtattgtaatcctctcggccggc

SEQ ID NO: 1976277 - DNA, 25 bp, Homo sapien
ggctggtgccactgaggaattaagt

SEQ ID NO: 1976278 - DNA, 25 bp, Homo sapien
tactggacagcacggctaaaccttt

SEQ ID NO: 1976279 - DNA, 25 bp, Homo sapien
gattaaggacacttttctgccccaa

SEQ ID NO: 1976280 - DNA, 25 bp, Homo sapien
tgcctccagaggtaatcactattct

SEQ ID NO: 1976281 - DNA, 25 bp, Homo sapien
gaatatttccaggacccctgaagat

SEQ ID NO: 1976282 - DNA, 25 bp, Homo sapien
tatcttcacactaagaacacgctgt

SEQ ID NO: 1976283 - DNA, 25 bp, Homo sapien
gcctttccttgcgtcgataccacat

SEQ ID NO: 1976284 - DNA, 25 bp, Homo sapien
tcagggaaccgatgggaaagtctgt

SEQ ID NO: 1976285 - DNA, 25 bp, Homo sapien
ttcagggaaccgatgggaaagtctg

SEQ ID NO: 1976286 - DNA, 25 bp, Homo sapien
ctgggcatcaacagccggtcatgac

SEQ ID NO: 1976287 - DNA, 25 bp, Homo sapien
gcatcaacagccggtcatgacatcc

SEQ ID NO: 1976288 - DNA, 25 bp, Homo sapien
gggactgacgcagctccgggtgagc

SEQ ID NO: 1976289 - DNA, 25 bp, Homo sapien
cggcggcctcgatggctcaggcgtc

SEQ ID NO: 1976290 - DNA, 25 bp, Homo sapien
atgttatgctgccagtaaatgttct

SEQ ID NO: 1976291 - DNA, 25 bp, Homo sapien
cagtgcgggaattacttctgtgaca

SEQ ID NO: 1976292 - DNA, 25 bp, Homo sapien
aattaagcagcttggcagtgcggga

SEQ ID NO: 1976293 - DNA, 25 bp, Homo sapien
ttctgtgacatcatctatgttatgc

SEQ ID NO: 1976294 - DNA, 25 bp, Homo sapien
gggctgtagcacagctgagcgcagg

SEQ ID NO: 1976295 - DNA, 25 bp, Homo sapien
tgactcggggctgtagcacagctga

SEQ ID NO: 1976296 - DNA, 25 bp, Homo sapien
ctcctccgggtccactgccctaatg

SEQ ID NO: 1976297 - DNA, 25 bp, Homo sapien
agagcagcaagagcagcggtgactc

SEQ ID NO: 1976298 - DNA, 25 bp, Homo sapien
ctggctttgcgtcgccctgctctga

SEQ ID NO: 1976299 - DNA, 25 bp, Homo sapien
gggcccgagttctgcaagtcttgcg

SEQ ID NO: 1976300 - DNA, 25 bp, Homo sapien
gaccgtggcggttaggtctcctcca

SEQ ID NO: 1976301 - DNA, 25 bp, Homo sapien
tttcttggtgttgggagtgcagaca

SEQ ID NO: 1976302 - DNA, 25 bp, Homo sapien
tgcgtgtctgtgggctgccccgcca

SEQ ID NO: 1976303 - DNA, 25 bp, Homo sapien
ctgcgtgtctgtgggctgccccgcc

SEQ ID NO: 1976304 - DNA, 25 bp, Homo sapien
gcgtgtctgtgggctgccccgccac

SEQ ID NO: 1976305 - DNA, 25 bp, Homo sapien
tggctagtccgatgggcgtgatccc

SEQ ID NO: 1976306 - DNA, 25 bp, Homo sapien
gtaggccgctgctgacgacctcaga

SEQ ID NO: 1976307 - DNA, 25 bp, Homo sapien
ggtcggagtgcgaaggctcctcctt

SEQ ID NO: 1976308 - DNA, 25 bp, Homo sapien
cgcgcatgcggtgcaggtcggagtg

SEQ ID NO: 1976309 - DNA, 25 bp, Homo sapien
gtacagcttgctgcgtggactcggc

SEQ ID NO: 1976310 - DNA, 25 bp, Homo sapien
cgtgcagggccgtcctccagtacag

SEQ ID NO: 1976311 - DNA, 25 bp, Homo sapien
ccgcgctggcgatgtcgggatccta

SEQ ID NO: 1976312 - DNA, 25 bp, Homo sapien
aagaaaaggtgttggcggagcgcgc

SEQ ID NO: 1976313 - DNA, 25 bp, Homo sapien
gaggggattctgccgtgtgcagcac

SEQ ID NO: 1976314 - DNA, 25 bp, Homo sapien
cgaggggattctgccgtgtgcagca

SEQ ID NO: 1976315 - DNA, 25 bp, Homo sapien
gtcgaggggattctgccgtgtgcag

SEQ ID NO: 1976316 - DNA, 25 bp, Homo sapien
tcgaggggattctgccgtgtgcagc

SEQ ID NO: 1976317 - DNA, 25 bp, Homo sapien
tctctctgtccccggctctgcgggc

SEQ ID NO: 1976318 - DNA, 25 bp, Homo sapien
tctgtccccggctctgcgggcccac

SEQ ID NO: 1976319 - DNA, 25 bp, Homo sapien
tcagactctctctgtccccggctct

SEQ ID NO: 1976320 - DNA, 25 bp, Homo sapien
cagactctctctgtccccggctctg

SEQ ID NO: 1976321 - DNA, 25 bp, Homo sapien
aggagacgtggcctgtaggcccaac

SEQ ID NO: 1976322 - DNA, 25 bp, Homo sapien
cagagctgcccgatagttgctgtgc

SEQ ID NO: 1976323 - DNA, 25 bp, Homo sapien
gagatggtcgcagggacccgcatcc

SEQ ID NO: 1976324 - DNA, 25 bp, Homo sapien
tgctccttagtctgagcagccactg

SEQ ID NO: 1976325 - DNA, 25 bp, Homo sapien
gaggatccatcagacgtgatctgga

SEQ ID NO: 1976326 - DNA, 25 bp, Homo sapien
taatccgaggatccatcagacgtga

SEQ ID NO: 1976327 - DNA, 25 bp, Homo sapien
ctctgttataatccgaggatccatc

SEQ ID NO: 1976328 - DNA, 25 bp, Homo sapien
tccatcagacgtgatctggaaaacc

SEQ ID NO: 1976329 - DNA, 25 bp, Homo sapien
atcaaagttatcaacaatctcatcc

SEQ ID NO: 1976330 - DNA, 25 bp, Homo sapien
caaagttatcaacaatctcatccca

SEQ ID NO: 1976331 - DNA, 25 bp, Homo sapien
gttatcaacaatctcatcccagttg

SEQ ID NO: 1976332 - DNA, 25 bp, Homo sapien
aagttatcaacaatctcatcccagt

SEQ ID NO: 1976333 - DNA, 25 bp, Homo sapien
tagccctctgtcgaatagctgaagg

SEQ ID NO: 1976334 - DNA, 25 bp, Homo sapien
tagtctccaggtgccggaattactt

SEQ ID NO: 1976335 - DNA, 25 bp, Homo sapien
gatgcttcggcctgcagtttttgcg

SEQ ID NO: 1976336 - DNA, 25 bp, Homo sapien
cataagcatagatggcccgaagaag

SEQ ID NO: 1976337 - DNA, 25 bp, Homo sapien
aaggttttgatccattctggagaaa

SEQ ID NO: 1976338 - DNA, 25 bp, Homo sapien
acaaaggttttgatccattctggag

SEQ ID NO: 1976339 - DNA, 25 bp, Homo sapien
caaaggttttgatccattctggaga

SEQ ID NO: 1976340 - DNA, 25 bp, Homo sapien
aaaggttttgatccattctggagaa

SEQ ID NO: 1976341 - DNA, 25 bp, Homo sapien
ctggttggaattcccgcatgataac

SEQ ID NO: 1976342 - DNA, 25 bp, Homo sapien
agcagaaactgtgaggtccgcggca

SEQ ID NO: 1976343 - DNA, 25 bp, Homo sapien
tgaggtccgcggcatgcattttctc

SEQ ID NO: 1976344 - DNA, 25 bp, Homo sapien
tcagaacacggtttgaccctggttg

SEQ ID NO: 1976345 - DNA, 25 bp, Homo sapien
cactgaagctaacaggaagacgttc

SEQ ID NO: 1976346 - DNA, 25 bp, Homo sapien
gaagacgttctggtgctgatacaga

SEQ ID NO: 1976347 - DNA, 25 bp, Homo sapien
catccctgttcggtgtcctccttgt

SEQ ID NO: 1976348 - DNA, 25 bp, Homo sapien
cataaaaacgctctcagtgatgtgc

SEQ ID NO: 1976349 - DNA, 25 bp, Homo sapien
accaacctgtgcgtcttcctaattg

SEQ ID NO: 1976350 - DNA, 25 bp, Homo sapien
caacctgtgcgtcttcctaattgtc

SEQ ID NO: 1976351 - DNA, 25 bp, Homo sapien
accttgtgactgtctgggacatctc

SEQ ID NO: 1976352 - DNA, 25 bp, Homo sapien
gactgtctgggacatctctgtccat

SEQ ID NO: 1976353 - DNA, 25 bp, Homo sapien
ctcactgtcctggcccttacatatt

SEQ ID NO: 1976354 - DNA, 25 bp, Homo sapien
tgggaagtcccggttcagcttactg

SEQ ID NO: 1976355 - DNA, 25 bp, Homo sapien
gtcctggcccttacatattttgaat

SEQ ID NO: 1976356 - DNA, 25 bp, Homo sapien
actgtcctggcccttacatattttg

SEQ ID NO: 1976357 - DNA, 25 bp, Homo sapien
catgccccaggagcaaacatgcaaa

SEQ ID NO: 1976358 - DNA, 25 bp, Homo sapien
aaacagcagaccctttaactgccca

SEQ ID NO: 1976359 - DNA, 25 bp, Homo sapien
aacatgcaaaacagcagacccttta

SEQ ID NO: 1976360 - DNA, 25 bp, Homo sapien
cactgcctgtgagatgagttggacc

SEQ ID NO: 1976361 - DNA, 25 bp, Homo sapien
aaggctcatgtctgcaagcaactgt

SEQ ID NO: 1976362 - DNA, 25 bp, Homo sapien
ggctcatgtctgcaagcaactgtct

SEQ ID NO: 1976363 - DNA, 25 bp, Homo sapien
gattctctgagaatcaaggctcatg

SEQ ID NO: 1976364 - DNA, 25 bp, Homo sapien
catgtctgcaagcaactgtctaggc

SEQ ID NO: 1976365 - DNA, 25 bp, Homo sapien
ggggtccagcagcttcagcgtcctc

SEQ ID NO: 1976366 - DNA, 25 bp, Homo sapien
gtggcaatggcagcaaccttggggt

SEQ ID NO: 1976367 - DNA, 25 bp, Homo sapien
ggtccagcagcttcagcgtcctcca

SEQ ID NO: 1976368 - DNA, 25 bp, Homo sapien
ggcaatggcagcaaccttggggtcc

SEQ ID NO: 1976369 - DNA, 25 bp, Homo sapien
agacacggctgggcatcaggaagca

SEQ ID NO: 1976370 - DNA, 25 bp, Homo sapien
taggtgacgggtaagtaacagaaca

SEQ ID NO: 1976371 - DNA, 25 bp, Homo sapien
agcccttgggccagagaagttctca

SEQ ID NO: 1976372 - DNA, 25 bp, Homo sapien
caagaagaagtcgttgtagccaggc

SEQ ID NO: 1976373 - DNA, 25 bp, Homo sapien
gaagccccgagtgcatgttttcctt

SEQ ID NO: 1976374 - DNA, 25 bp, Homo sapien
aaccaaaagaagccccgagtgcatg

SEQ ID NO: 1976375 - DNA, 25 bp, Homo sapien
tcgaaggcgagagaaggctcttgca

SEQ ID NO: 1976376 - DNA, 25 bp, Homo sapien
tttctgactgaggtcgaaggcgaga

SEQ ID NO: 1976377 - DNA, 25 bp, Homo sapien
ccatggccttgagtggcattcccct

SEQ ID NO: 1976378 - DNA, 25 bp, Homo sapien
ctggaacttttgggcagtggtgttc

SEQ ID NO: 1976379 - DNA, 25 bp, Homo sapien
gaggctgccatctgcatagtaacgg

SEQ ID NO: 1976380 - DNA, 25 bp, Homo sapien
catctgcatagtaacgggctgcctg

SEQ ID NO: 1976381 - DNA, 25 bp, Homo sapien
ctaggctttctgaggattcacatca

SEQ ID NO: 1976382 - DNA, 25 bp, Homo sapien
tctgaggattcacatcagtcctctg

SEQ ID NO: 1976383 - DNA, 25 bp, Homo sapien
taggctttctgaggattcacatcag

SEQ ID NO: 1976384 - DNA, 25 bp, Homo sapien
ctttctgaggattcacatcagtcct

SEQ ID NO: 1976385 - DNA, 25 bp, Homo sapien
tcgcatatggaacttggaaacgtcc

SEQ ID NO: 1976386 - DNA, 25 bp, Homo sapien
gcaaattcctaggtgtcagccacag

SEQ ID NO: 1976387 - DNA, 25 bp, Homo sapien
tggaaacgtcctgtaactgcaaatt

SEQ ID NO: 1976388 - DNA, 25 bp, Homo sapien
cagcaggcggcactatgacatcgca

SEQ ID NO: 1976389 - DNA, 25 bp, Homo sapien
cccaccgtctgcatgtgtagcattc

SEQ ID NO: 1976390 - DNA, 25 bp, Homo sapien
ttcattcctactttcctcaggttca

SEQ ID NO: 1976391 - DNA, 25 bp, Homo sapien
ggttcatccgtgaactgtgtgtgag

SEQ ID NO: 1976392 - DNA, 25 bp, Homo sapien
gggtcagacccaccgtctgcatgtg

SEQ ID NO: 1976393 - DNA, 25 bp, Homo sapien
cattggcacctttaccaccagcagg

SEQ ID NO: 1976394 - DNA, 25 bp, Homo sapien
tggagcctctgctagtactgctgga

SEQ ID NO: 1976395 - DNA, 25 bp, Homo sapien
tgcaggcgtccaacagagtaacagc

SEQ ID NO: 1976396 - DNA, 25 bp, Homo sapien
aatactccagcttacactgcaggcg

SEQ ID NO: 1976397 - DNA, 25 bp, Homo sapien
gcccgggagcgcacggcttgtgctg

SEQ ID NO: 1976398 - DNA, 25 bp, Homo sapien
ccagacctcgcagcccgggagcgca

SEQ ID NO: 1976399 - DNA, 25 bp, Homo sapien
ctagccagacctcgcagcccgggag

SEQ ID NO: 1976400 - DNA, 25 bp, Homo sapien
ctcgcagcccgggagcgcacggctt

SEQ ID NO: 1976401 - DNA, 25 bp, Homo sapien
cctccgaagaggacagtggcggcgg

SEQ ID NO: 1976402 - DNA, 25 bp, Homo sapien
ggcccgcgcctccgaagaggacagt

SEQ ID NO: 1976403 - DNA, 25 bp, Homo sapien
ccgcgcctccgaagaggacagtggc

SEQ ID NO: 1976404 - DNA, 25 bp, Homo sapien
cgggcccgcgcctccgaagaggaca

SEQ ID NO: 1976405 - DNA, 25 bp, Homo sapien
ttaacgctctgatcgctggagcagg

SEQ ID NO: 1976406 - DNA, 25 bp, Homo sapien
tggtccgccgcgatgctgcgagcca

SEQ ID NO: 1976407 - DNA, 25 bp, Homo sapien
gaaagagacatcgtggatgagatcc

SEQ ID NO: 1976408 - DNA, 25 bp, Homo sapien
atccgccgcccgtggaagtcgaaag

SEQ ID NO: 1976409 - DNA, 25 bp, Homo sapien
tcttcctcggcgtaacaaagtgagc

SEQ ID NO: 1976410 - DNA, 25 bp, Homo sapien
caagcagggaaatcattggatgtaa

SEQ ID NO: 1976411 - DNA, 25 bp, Homo sapien
tcccactgcaggtcgtcgggtgaac

SEQ ID NO: 1976412 - DNA, 25 bp, Homo sapien
cggagaaaaccatgtgccctggtga

SEQ ID NO: 1976413 - DNA, 25 bp, Homo sapien
gcagtacaatgccaatcaccacttt

SEQ ID NO: 1976414 - DNA, 25 bp, Homo sapien
tacaatgccaatcaccactttcact

SEQ ID NO: 1976415 - DNA, 25 bp, Homo sapien
gctagcagtacaatgccaatcacca

SEQ ID NO: 1976416 - DNA, 25 bp, Homo sapien
tccagctagcagtacaatgccaatc

SEQ ID NO: 1976417 - DNA, 25 bp, Homo sapien
ctgcccaaattcaggatgggcccat

SEQ ID NO: 1976418 - DNA, 25 bp, Homo sapien
ggcccatgtcacacgccatacagat

SEQ ID NO: 1976419 - DNA, 25 bp, Homo sapien
ccaaaacctgcccaaattcaggatg

SEQ ID NO: 1976420 - DNA, 25 bp, Homo sapien
aggatgggcccatgtcacacgccat

SEQ ID NO: 1976421 - DNA, 25 bp, Homo sapien
tgtcttcccggtccccagaatacta

SEQ ID NO: 1976422 - DNA, 25 bp, Homo sapien
caattatctgaggtagccttcggat

SEQ ID NO: 1976423 - DNA, 25 bp, Homo sapien
tagccttcggatgaatgctccttgg

SEQ ID NO: 1976424 - DNA, 25 bp, Homo sapien
ccttggctgctcatgtcttcccggt

SEQ ID NO: 1976425 - DNA, 25 bp, Homo sapien
atgttctgctatccaccagagttgt

SEQ ID NO: 1976426 - DNA, 25 bp, Homo sapien
cttgggagcaaacttcacatcagta

SEQ ID NO: 1976427 - DNA, 25 bp, Homo sapien
tgttctgctatccaccagagttgtc

SEQ ID NO: 1976428 - DNA, 25 bp, Homo sapien
gggagcaaacttcacatcagtaaca

SEQ ID NO: 1976429 - DNA, 25 bp, Homo sapien
tgagatctcatgctgcaaagaccac

SEQ ID NO: 1976430 - DNA, 25 bp, Homo sapien
catctggtgcctcatagattcttac

SEQ ID NO: 1976431 - DNA, 25 bp, Homo sapien
aggttgctaacataagacccatgtg

SEQ ID NO: 1976432 - DNA, 25 bp, Homo sapien
taccatctgcggaacaggttgctaa

SEQ ID NO: 1976433 - DNA, 25 bp, Homo sapien
agttgtataaatgtgctctattcat

SEQ ID NO: 1976434 - DNA, 25 bp, Homo sapien
aagttgtataaatgtgctctattca

SEQ ID NO: 1976435 - DNA, 25 bp, Homo sapien
gaagttgtataaatgtgctctattc

SEQ ID NO: 1976436 - DNA, 25 bp, Homo sapien
gttgtataaatgtgctctattcatc

SEQ ID NO: 1976437 - DNA, 25 bp, Homo sapien
gattctgcacttgtaaactggccta

SEQ ID NO: 1976438 - DNA, 25 bp, Homo sapien
aagcaaagatcagcagacacccaag

SEQ ID NO: 1976439 - DNA, 25 bp, Homo sapien
tgctcttggctcacacatccttagg

SEQ ID NO: 1976440 - DNA, 25 bp, Homo sapien
cacaaaattcagtcagcctccctag

SEQ ID NO: 1976441 - DNA, 25 bp, Homo sapien
ggccattgcgttggggctactgtca

SEQ ID NO: 1976442 - DNA, 25 bp, Homo sapien
tgaaccttggccattgcgttggggc

SEQ ID NO: 1976443 - DNA, 25 bp, Homo sapien
tgcgttggggctactgtcatcactt

SEQ ID NO: 1976444 - DNA, 25 bp, Homo sapien
tgtcatcacttcctacggcgatcat

SEQ ID NO: 1976445 - DNA, 25 bp, Homo sapien
cctcagttcagttctcaaatccaat

SEQ ID NO: 1976446 - DNA, 25 bp, Homo sapien
acactctacccaaatctgccttgtt

SEQ ID NO: 1976447 - DNA, 25 bp, Homo sapien
cacactgaactcttaagccagaacc

SEQ ID NO: 1976448 - DNA, 25 bp, Homo sapien
cattgaaattacacactgaactctt

SEQ ID NO: 1976449 - DNA, 25 bp, Homo sapien
catggcaaggtggtgggacaacacc

SEQ ID NO: 1976450 - DNA, 25 bp, Homo sapien
ccaaaggccagaaataggacaggtg

SEQ ID NO: 1976451 - DNA, 25 bp, Homo sapien
tacaataaggtcttggctggccaca

SEQ ID NO: 1976452 - DNA, 25 bp, Homo sapien
cccgtactgtggcagagagattcta

SEQ ID NO: 1976453 - DNA, 25 bp, Homo sapien
tcttcccaaatttggagcgaatgca

SEQ ID NO: 1976454 - DNA, 25 bp, Homo sapien
tctcacatctttggtcgctattgct

SEQ ID NO: 1976455 - DNA, 25 bp, Homo sapien
cagtgactgtcataagagtttcagc

SEQ ID NO: 1976456 - DNA, 25 bp, Homo sapien
gagcgaatgcaatatcatgaacagg

SEQ ID NO: 1976457 - DNA, 25 bp, Homo sapien
gaattatgattatcgaactgagcca

SEQ ID NO: 1976458 - DNA, 25 bp, Homo sapien
tgttatattccaactcactcgccag

SEQ ID NO: 1976459 - DNA, 25 bp, Homo sapien
tctcctgaagatgctagcaccgttc

SEQ ID NO: 1976460 - DNA, 25 bp, Homo sapien
cactcgccagacctgagaattatga

SEQ ID NO: 1976461 - DNA, 25 bp, Homo sapien
cttaacttatgggagctgcagagaa

SEQ ID NO: 1976462 - DNA, 25 bp, Homo sapien
tcagtgtcaactgaccagaccttct

SEQ ID NO: 1976463 - DNA, 25 bp, Homo sapien
gcagaaccaagctacagagaccaca

SEQ ID NO: 1976464 - DNA, 25 bp, Homo sapien
ggagccactacagtcctagcctgag

SEQ ID NO: 1976465 - DNA, 25 bp, Homo sapien
cctgctgagaactcccattgactgg

SEQ ID NO: 1976466 - DNA, 25 bp, Homo sapien
ctgccagcagaagatccatttaatg

SEQ ID NO: 1976467 - DNA, 25 bp, Homo sapien
tggaatagttgaacctagggaagga

SEQ ID NO: 1976468 - DNA, 25 bp, Homo sapien
catttaatgaattctgaagacttgg

SEQ ID NO: 1976469 - DNA, 25 bp, Homo sapien
gcagtacaggcagtgaccaaaaacc

SEQ ID NO: 1976470 - DNA, 25 bp, Homo sapien
aaaatgcatcacagatctaacacag

SEQ ID NO: 1976471 - DNA, 25 bp, Homo sapien
aacacagatggttattggcacaata

SEQ ID NO: 1976472 - DNA, 25 bp, Homo sapien
tggcacaataagaatacagatcaaa

SEQ ID NO: 1976473 - DNA, 25 bp, Homo sapien
tgtgtgcatgcaacaagcagcaaaa

SEQ ID NO: 1976474 - DNA, 25 bp, Homo sapien
cttgggagaggtcaaacggcgctgg

SEQ ID NO: 1976475 - DNA, 25 bp, Homo sapien
aaaaggagctcgctttccattcctg

SEQ ID NO: 1976476 - DNA, 25 bp, Homo sapien
cagcaaagttactccagttagcttg

SEQ ID NO: 1976477 - DNA, 25 bp, Homo sapien
ttgcgtttagtagtaagcaggctgc

SEQ ID NO: 1976478 - DNA, 25 bp, Homo sapien
cgtttagtagtaagcaggctgctgg

SEQ ID NO: 1976479 - DNA, 25 bp, Homo sapien
tttggattgcgtttagtagtaagca

SEQ ID NO: 1976480 - DNA, 25 bp, Homo sapien
gattgcgtttagtagtaagcaggct

SEQ ID NO: 1976481 - DNA, 25 bp, Homo sapien
gaaagcctctccgtttatatttcaa

SEQ ID NO: 1976482 - DNA, 25 bp, Homo sapien
tcccaactactcagataagaatggt

SEQ ID NO: 1976483 - DNA, 25 bp, Homo sapien
tgacaatgtctcaacagaaagcctc

SEQ ID NO: 1976484 - DNA, 25 bp, Homo sapien
gtgtcaataaactgactagtacaaa

SEQ ID NO: 1976485 - DNA, 25 bp, Homo sapien
gcttctcttaatagtgtgtgtccaa

SEQ ID NO: 1976486 - DNA, 25 bp, Homo sapien
cacatagtatggctggctactgcaa

SEQ ID NO: 1976487 - DNA, 25 bp, Homo sapien
tgcgtacatgatactgggaatacac

SEQ ID NO: 1976488 - DNA, 25 bp, Homo sapien
tatcaaggtcagaactttacaggac

SEQ ID NO: 1976489 - DNA, 25 bp, Homo sapien
tcgcaagagtgctctaccagaggag

SEQ ID NO: 1976490 - DNA, 25 bp, Homo sapien
gaggttggcagtgtcagcatcgcaa

SEQ ID NO: 1976491 - DNA, 25 bp, Homo sapien
tctcaggtaagggattaagaggccg

SEQ ID NO: 1976492 - DNA, 25 bp, Homo sapien
gctgggcataactggaccatctcga

SEQ ID NO: 1976493 - DNA, 25 bp, Homo sapien
tatgctttcacattagccagtctga

SEQ ID NO: 1976494 - DNA, 25 bp, Homo sapien
aaatgttcctttgatgcagacgcac

SEQ ID NO: 1976495 - DNA, 25 bp, Homo sapien
tcatcaaaggttatcacccagtgaa

SEQ ID NO: 1976496 - DNA, 25 bp, Homo sapien
taaaatttacagaacaggcactttg

SEQ ID NO: 1976497 - DNA, 25 bp, Homo sapien
gtaattccaagtagtgaaaggcaat

SEQ ID NO: 1976498 - DNA, 25 bp, Homo sapien
attccaagtagtgaaaggcaatttc

SEQ ID NO: 1976499 - DNA, 25 bp, Homo sapien
taattccaagtagtgaaaggcaatt

SEQ ID NO: 1976500 - DNA, 25 bp, Homo sapien
aattccaagtagtgaaaggcaattt

SEQ ID NO: 1976501 - DNA, 25 bp, Homo sapien
gtttacgtctgttcgcggcaccagg

SEQ ID NO: 1976502 - DNA, 25 bp, Homo sapien
gggacagcgcgttcctggatttgaa

SEQ ID NO: 1976503 - DNA, 25 bp, Homo sapien
tttgattggacagcgggaagacatg

SEQ ID NO: 1976504 - DNA, 25 bp, Homo sapien
ttggcgccgccttcaaggtcttggc

SEQ ID NO: 1976505 - DNA, 25 bp, Homo sapien
cgcgtccccgacttcggagggcagt

SEQ ID NO: 1976506 - DNA, 25 bp, Homo sapien
gtccacggactgaagaggtgtccca

SEQ ID NO: 1976507 - DNA, 25 bp, Homo sapien
ccccgacttcggagggcagtgtgca

SEQ ID NO: 1976508 - DNA, 25 bp, Homo sapien
tgtgcagcgggaaagtccacggact

SEQ ID NO: 1976509 - DNA, 25 bp, Homo sapien
aacgccagtcgaatgacctcaaaat

SEQ ID NO: 1976510 - DNA, 25 bp, Homo sapien
aatagtaagagcaaatggaaatatg

SEQ ID NO: 1976511 - DNA, 25 bp, Homo sapien
cagtaaaaacgccagtcgaatgacc

SEQ ID NO: 1976512 - DNA, 25 bp, Homo sapien
tgattttggagcagtaaaaacgcca

SEQ ID NO: 1976513 - DNA, 25 bp, Homo sapien
cttgttcagggctcagactttttgg

SEQ ID NO: 1976514 - DNA, 25 bp, Homo sapien
ttgttcagggctcagacttgttcag

SEQ ID NO: 1976515 - DNA, 25 bp, Homo sapien
tcactagacagataaactcaagcca

SEQ ID NO: 1976516 - DNA, 25 bp, Homo sapien
aatgatataatgcatgtctcaatta

SEQ ID NO: 1976517 - DNA, 25 bp, Homo sapien
gattcttctgctatacctcgaaaat

SEQ ID NO: 1976518 - DNA, 25 bp, Homo sapien
cagtgctggatctatccctagcaag

SEQ ID NO: 1976519 - DNA, 25 bp, Homo sapien
tctgctatacctcgaaaatcttcca

SEQ ID NO: 1976520 - DNA, 25 bp, Homo sapien
gatctatccctagcaagtgtagaaa

SEQ ID NO: 1976521 - DNA, 25 bp, Homo sapien
cagttcagtagtctccttgtgtagc

SEQ ID NO: 1976522 - DNA, 25 bp, Homo sapien
gacacctaacctaagatggaccaga

SEQ ID NO: 1976523 - DNA, 25 bp, Homo sapien
ccaaaactctagtcacaggtgactg

SEQ ID NO: 1976524 - DNA, 25 bp, Homo sapien
tggaccagaaactcatgagatatca

SEQ ID NO: 1976525 - DNA, 25 bp, Homo sapien
cttctactaagtaagatgcctggat

SEQ ID NO: 1976526 - DNA, 25 bp, Homo sapien
tcactctggcttccgggagatgacc

SEQ ID NO: 1976527 - DNA, 25 bp, Homo sapien
gctaagctgtaacctctctcttggt

SEQ ID NO: 1976528 - DNA, 25 bp, Homo sapien
ggagatgacccggatggaactgaaa

SEQ ID NO: 1976529 - DNA, 25 bp, Homo sapien
aacagtcacgcccacggccctcaag

SEQ ID NO: 1976530 - DNA, 25 bp, Homo sapien
cacggccctcaagttgggcccttga

SEQ ID NO: 1976531 - DNA, 25 bp, Homo sapien
cagtcacgcccacggccctcaagtt

SEQ ID NO: 1976532 - DNA, 25 bp, Homo sapien
ggccctcaagttgggcccttgatgt

SEQ ID NO: 1976533 - DNA, 25 bp, Homo sapien
aaggtgcactcatgggtaggtacag

SEQ ID NO: 1976534 - DNA, 25 bp, Homo sapien
tgtagtacataaaaagtcactagct

SEQ ID NO: 1976535 - DNA, 25 bp, Homo sapien
aaatcccaacctttcatgcctgagg

SEQ ID NO: 1976536 - DNA, 25 bp, Homo sapien
tgaggcaactctccaaccctaacta

SEQ ID NO: 1976537 - DNA, 25 bp, Homo sapien
tgcttgttccagtggtgaagccctg

SEQ ID NO: 1976538 - DNA, 25 bp, Homo sapien
tggccctgcaaggattctgtagctc

SEQ ID NO: 1976539 - DNA, 25 bp, Homo sapien
tttgacaaacgttgactttccacat

SEQ ID NO: 1976540 - DNA, 25 bp, Homo sapien
tgtgcttgttccagtggtgaagccc

SEQ ID NO: 1976541 - DNA, 25 bp, Homo sapien
tatttgagtgataataccactcttt

SEQ ID NO: 1976542 - DNA, 25 bp, Homo sapien
tcaggcaagtccttttgagtactga

SEQ ID NO: 1976543 - DNA, 25 bp, Homo sapien
acatataatgtgtactcattcatca

SEQ ID NO: 1976544 - DNA, 25 bp, Homo sapien
tcttacaacatataatcaggcaagt

SEQ ID NO: 1976545 - DNA, 25 bp, Homo sapien
tattattcatccatgactgtaaatg

SEQ ID NO: 1976546 - DNA, 25 bp, Homo sapien
attattcatccatgactgtaaatga

SEQ ID NO: 1976547 - DNA, 25 bp, Homo sapien
ttattcatccatgactgtaaatgaa

SEQ ID NO: 1976548 - DNA, 25 bp, Homo sapien
tattcatccatgactgtaaatgaaa

SEQ ID NO: 1976549 - DNA, 25 bp, Homo sapien
tcttccaagcttgtcggtaagataa

SEQ ID NO: 1976550 - DNA, 25 bp, Homo sapien
gcttgtcggtaagataagtttctca

SEQ ID NO: 1976551 - DNA, 25 bp, Homo sapien
ttctaataagctagtgtggcttagg

SEQ ID NO: 1976552 - DNA, 25 bp, Homo sapien
gctagtgtggcttaggtcactcttt

SEQ ID NO: 1976553 - DNA, 25 bp, Homo sapien
tctaagaccatttgtaggtaactta

SEQ ID NO: 1976554 - DNA, 25 bp, Homo sapien
gttctggtccttctaggtcttcata

SEQ ID NO: 1976555 - DNA, 25 bp, Homo sapien
ctgtctaagaccatttgtaggtaac

SEQ ID NO: 1976556 - DNA, 25 bp, Homo sapien
ggttctggtccttctaggtcttcat

SEQ ID NO: 1976557 - DNA, 25 bp, Homo sapien
catttcatgtgaacatccaaggaga

SEQ ID NO: 1976558 - DNA, 25 bp, Homo sapien
agaccaatagtaattttctaatgtc

SEQ ID NO: 1976559 - DNA, 25 bp, Homo sapien
ccaatagtaattttctaatgtcaaa

SEQ ID NO: 1976560 - DNA, 25 bp, Homo sapien
tttcatgtgaacatccaaggagacc

SEQ ID NO: 1976561 - DNA, 25 bp, Homo sapien
tattatatcaaagttaggtaacaga

SEQ ID NO: 1976562 - DNA, 25 bp, Homo sapien
ttcgagtgaaatgtcatactctctg

SEQ ID NO: 1976563 - DNA, 25 bp, Homo sapien
tagcaattggttaactggaggaaga

SEQ ID NO: 1976564 - DNA, 25 bp, Homo sapien
tgcaaaggtggcaaactttagcaat

SEQ ID NO: 1976565 - DNA, 25 bp, Homo sapien
gaaagaatatcttagctgtattaat

SEQ ID NO: 1976566 - DNA, 25 bp, Homo sapien
tgaaagaatatcttagctgtattaa

SEQ ID NO: 1976567 - DNA, 25 bp, Homo sapien
cttgcagtttaagctaccgttttca

SEQ ID NO: 1976568 - DNA, 25 bp, Homo sapien
tcccaggtagacaaataacttggct

SEQ ID NO: 1976569 - DNA, 25 bp, Homo sapien
tagacaaataacttggctttcctca

SEQ ID NO: 1976570 - DNA, 25 bp, Homo sapien
gagtgtgagtcgagggaaatcagag

SEQ ID NO: 1976571 - DNA, 25 bp, Homo sapien
ctatctccagtacctatagaattac

SEQ ID NO: 1976572 - DNA, 25 bp, Homo sapien
catctgtgtaccttctactatctcc

SEQ ID NO: 1976573 - DNA, 25 bp, Homo sapien
tgtgtaccttctactatctccagta

SEQ ID NO: 1976574 - DNA, 25 bp, Homo sapien
cttctactatctccagtacctatag

SEQ ID NO: 1976575 - DNA, 25 bp, Homo sapien
taagatctggaacaatacccttcaa

SEQ ID NO: 1976576 - DNA, 25 bp, Homo sapien
caagtaccagaggaaaatggtaaca

SEQ ID NO: 1976577 - DNA, 25 bp, Homo sapien
gatctggaacaatacccttcaaatt

SEQ ID NO: 1976578 - DNA, 25 bp, Homo sapien
gttaagatctggaacaatacccttc

SEQ ID NO: 1976579 - DNA, 25 bp, Homo sapien
tgtttgagcaaggtaaaagatccgt

SEQ ID NO: 1976580 - DNA, 25 bp, Homo sapien
ggacactgggctaaagaactttcca

SEQ ID NO: 1976581 - DNA, 25 bp, Homo sapien
taatcagtactggacaagtgggtct

SEQ ID NO: 1976582 - DNA, 25 bp, Homo sapien
gaaatgactaccaagcttcaggcac

SEQ ID NO: 1976583 - DNA, 25 bp, Homo sapien
gcttctcctcagaaaccatgccaag

SEQ ID NO: 1976584 - DNA, 25 bp, Homo sapien
cagagaacaaagagcgacatttggc

SEQ ID NO: 1976585 - DNA, 25 bp, Homo sapien
aaagggaaataccttctcagacaag

SEQ ID NO: 1976586 - DNA, 25 bp, Homo sapien
actgcaatagggctgtacttggaaa

SEQ ID NO: 1976587 - DNA, 25 bp, Homo sapien
tctaagagccttaggagggagaatc

SEQ ID NO: 1976588 - DNA, 25 bp, Homo sapien
ctgaaacaaggtctttacggatgta

SEQ ID NO: 1976589 - DNA, 25 bp, Homo sapien
tctggcaacctaggaagctcataca

SEQ ID NO: 1976590 - DNA, 25 bp, Homo sapien
tagggaccctaatcacaatgaccaa

SEQ ID NO: 1976591 - DNA, 25 bp, Homo sapien
tattttggtgaggacactctgcccc

SEQ ID NO: 1976592 - DNA, 25 bp, Homo sapien
tcttgaatggacaccgtaggagtct

SEQ ID NO: 1976593 - DNA, 25 bp, Homo sapien
tagccctgagggtcttcaccagaac

SEQ ID NO: 1976594 - DNA, 25 bp, Homo sapien
cactgtcactaatgggcttcaaaga

SEQ ID NO: 1976595 - DNA, 25 bp, Homo sapien
ctaccctcttcattttgatagacca

SEQ ID NO: 1976596 - DNA, 25 bp, Homo sapien
accctcttcattttgatagaccaca

SEQ ID NO: 1976597 - DNA, 25 bp, Homo sapien
cctcttcattttgatagaccacact

SEQ ID NO: 1976598 - DNA, 25 bp, Homo sapien
taccctcttcattttgatagaccac

SEQ ID NO: 1976599 - DNA, 25 bp, Homo sapien
tcatcacttagagacacatttaaat

SEQ ID NO: 1976600 - DNA, 25 bp, Homo sapien
tgctattaaaagatgtgtaataggc

SEQ ID NO: 1976601 - DNA, 25 bp, Homo sapien
ttcatctcatcacttagagacacat

SEQ ID NO: 1976602 - DNA, 25 bp, Homo sapien
agatgtgtaataggcaaggtctgtg

SEQ ID NO: 1976603 - DNA, 25 bp, Homo sapien
ttccagtgcttttggtttgagtttc

SEQ ID NO: 1976604 - DNA, 25 bp, Homo sapien
ctcatgatgccgatgactgtgtact

SEQ ID NO: 1976605 - DNA, 25 bp, Homo sapien
aattccagtgcttttggtttgagtt

SEQ ID NO: 1976606 - DNA, 25 bp, Homo sapien
tccagtgcttttggtttgagtttct

SEQ ID NO: 1976607 - DNA, 25 bp, Homo sapien
gcaagttccacaagcaacgagtcct

SEQ ID NO: 1976608 - DNA, 25 bp, Homo sapien
aacgagtcctgacgctttccagaca

SEQ ID NO: 1976609 - DNA, 25 bp, Homo sapien
cccgcctcaggtaatggtatcgcca

SEQ ID NO: 1976610 - DNA, 25 bp, Homo sapien
ggtcaaaactcaatccactccctgg

SEQ ID NO: 1976611 - DNA, 25 bp, Homo sapien
gcattgcccagctgtatacaaatag

SEQ ID NO: 1976612 - DNA, 25 bp, Homo sapien
gtcagctttacgtcattccacatgt

SEQ ID NO: 1976613 - DNA, 25 bp, Homo sapien
gaggtgaagtgtacagctcaaggaa

SEQ ID NO: 1976614 - DNA, 25 bp, Homo sapien
tcacaatctgaacacatctgcatag

SEQ ID NO: 1976615 - DNA, 25 bp, Homo sapien
tacatgcgtaactttgctagatgct

SEQ ID NO: 1976616 - DNA, 25 bp, Homo sapien
gtaatgagcctgcacatacaccatg

SEQ ID NO: 1976617 - DNA, 25 bp, Homo sapien
cgttgttatcacagacaatgctgca

SEQ ID NO: 1976618 - DNA, 25 bp, Homo sapien
gaagcagaactgctcggttacagga

SEQ ID NO: 1976619 - DNA, 25 bp, Homo sapien
catttgagtaactaaagagctcctt

SEQ ID NO: 1976620 - DNA, 25 bp, Homo sapien
tatgacaccacaataaagagctttt

SEQ ID NO: 1976621 - DNA, 25 bp, Homo sapien
tgtatagccacagggtacctccttg

SEQ ID NO: 1976622 - DNA, 25 bp, Homo sapien
tacctccttgtatggatgcacctta

SEQ ID NO: 1976623 - DNA, 25 bp, Homo sapien
gaatgcttccgaggccaaacgtgga

SEQ ID NO: 1976624 - DNA, 25 bp, Homo sapien
tgtcgaactctcaggtcataagcgg

SEQ ID NO: 1976625 - DNA, 25 bp, Homo sapien
caaacgtggaagcagcccatttgtg

SEQ ID NO: 1976626 - DNA, 25 bp, Homo sapien
taaaacaacaatcctcttgtactga

SEQ ID NO: 1976627 - DNA, 25 bp, Homo sapien
ttttaaataattgaccgaacagctc

SEQ ID NO: 1976628 - DNA, 25 bp, Homo sapien
tcaaagaaacatctatattaacact

SEQ ID NO: 1976629 - DNA, 25 bp, Homo sapien
tctctgaactataagggattcatca

SEQ ID NO: 1976630 - DNA, 25 bp, Homo sapien
tactttgaggagttaaatatcacct

SEQ ID NO: 1976631 - DNA, 25 bp, Homo sapien
gagaaccatgaagccctcaaaatta

SEQ ID NO: 1976632 - DNA, 25 bp, Homo sapien
acacattcttaacctacagcacaga

SEQ ID NO: 1976633 - DNA, 25 bp, Homo sapien
gaatgagcatcaggagaaccatgaa

SEQ ID NO: 1976634 - DNA, 25 bp, Homo sapien
tcattgtggaatctatgactcaagc

SEQ ID NO: 1976635 - DNA, 25 bp, Homo sapien
catcttgtgcaatcaaatcaaatgc

SEQ ID NO: 1976636 - DNA, 25 bp, Homo sapien
ctgtataaattgatgctctttatta

SEQ ID NO: 1976637 - DNA, 25 bp, Homo sapien
cttcttcatcttgtgcaatcaaatc

SEQ ID NO: 1976638 - DNA, 25 bp, Homo sapien
gtataaattgatgctctttattaaa

SEQ ID NO: 1976639 - DNA, 25 bp, Homo sapien
aaagacagacgtaaataactggcat

SEQ ID NO: 1976640 - DNA, 25 bp, Homo sapien
cgtatcgcccagtgcaaccgaagta

SEQ ID NO: 1976641 - DNA, 25 bp, Homo sapien
gatgtgctacgtgatttcctcaaca

SEQ ID NO: 1976642 - DNA, 25 bp, Homo sapien
taattaattgtagctccccaggacg

SEQ ID NO: 1976643 - DNA, 25 bp, Homo sapien
ttttcacattgttaccaccaccaag

SEQ ID NO: 1976644 - DNA, 25 bp, Homo sapien
caagagcttcagatctttgagcaaa

SEQ ID NO: 1976645 - DNA, 25 bp, Homo sapien
ttaccaccaccaaggcaaccaagag

SEQ ID NO: 1976646 - DNA, 25 bp, Homo sapien
acattgttaccaccaccaaggcaac

SEQ ID NO: 1976647 - DNA, 25 bp, Homo sapien
ctcttctctggtgatctaataaaat

SEQ ID NO: 1976648 - DNA, 25 bp, Homo sapien
cttctctggtgatctaataaaatag

SEQ ID NO: 1976649 - DNA, 25 bp, Homo sapien
tcttctctggtgatctaataaaata

SEQ ID NO: 1976650 - DNA, 25 bp, Homo sapien
ttctctggtgatctaataaaatagc

SEQ ID NO: 1976651 - DNA, 25 bp, Homo sapien
tgaatatagatcatggttaagatga

SEQ ID NO: 1976652 - DNA, 25 bp, Homo sapien
ctgaatatagatcatggttaagatg

SEQ ID NO: 1976653 - DNA, 25 bp, Homo sapien
gtgtaattgatccttcacttagctg

SEQ ID NO: 1976654 - DNA, 25 bp, Homo sapien
tgttttgcctttatcagccgttaac

SEQ ID NO: 1976655 - DNA, 25 bp, Homo sapien
agccgttaacgtcacatcattttca

SEQ ID NO: 1976656 - DNA, 25 bp, Homo sapien
tcatccacttgtgaagtactctcta

SEQ ID NO: 1976657 - DNA, 25 bp, Homo sapien
tctgcaatggctgaagcaatggtgc

SEQ ID NO: 1976658 - DNA, 25 bp, Homo sapien
tagtagcacttaagtccaccggatg

SEQ ID NO: 1976659 - DNA, 25 bp, Homo sapien
caatggtgctgatcctaagcataga

SEQ ID NO: 1976660 - DNA, 25 bp, Homo sapien
gaaatgacgcacatgagaatagtcc

SEQ ID NO: 1976661 - DNA, 25 bp, Homo sapien
ccaccatgctcaggagaggtatttt

SEQ ID NO: 1976662 - DNA, 25 bp, Homo sapien
ctcatcctctgagccacgtccacca

SEQ ID NO: 1976663 - DNA, 25 bp, Homo sapien
cgtccaccatgctcaggagaggtat

SEQ ID NO: 1976664 - DNA, 25 bp, Homo sapien
gccacgtccaccatgctcaggagag

SEQ ID NO: 1976665 - DNA, 25 bp, Homo sapien
aagaatgactcagtggtgacgtgga

SEQ ID NO: 1976666 - DNA, 25 bp, Homo sapien
gagaagaatgactcagtggtgacgt

SEQ ID NO: 1976667 - DNA, 25 bp, Homo sapien
agaagaatgactcagtggtgacgtg

SEQ ID NO: 1976668 - DNA, 25 bp, Homo sapien
aggagaagaatgactcagtggtgac

SEQ ID NO: 1976669 - DNA, 25 bp, Homo sapien
cccagcaggcgagcacaccaaggga

SEQ ID NO: 1976670 - DNA, 25 bp, Homo sapien
tgaaccaaaggactctaacgcacac

SEQ ID NO: 1976671 - DNA, 25 bp, Homo sapien
cagcaggcgagcacaccaagggaga

SEQ ID NO: 1976672 - DNA, 25 bp, Homo sapien
tgagctgctgaaccaaaggactcta

SEQ ID NO: 1976673 - DNA, 25 bp, Homo sapien
ctgtggctgtggtaggataggagct

SEQ ID NO: 1976674 - DNA, 25 bp, Homo sapien
tccagggcatcatctgtggctgtgg

SEQ ID NO: 1976675 - DNA, 25 bp, Homo sapien
cttgcggtcctccagggcatcatct

SEQ ID NO: 1976676 - DNA, 25 bp, Homo sapien
tgcggtcctccagggcatcatctgt

SEQ ID NO: 1976677 - DNA, 25 bp, Homo sapien
caggttttacatattcaggcttgct

SEQ ID NO: 1976678 - DNA, 25 bp, Homo sapien
tactcaactcgctggtgatatcact

SEQ ID NO: 1976679 - DNA, 25 bp, Homo sapien
cgttcctccaatgcggctggactgc

SEQ ID NO: 1976680 - DNA, 25 bp, Homo sapien
gctggactgccttgaataattgtgg

SEQ ID NO: 1976681 - DNA, 25 bp, Homo sapien
tccaattcctcagggtttgatgtcc

SEQ ID NO: 1976682 - DNA, 25 bp, Homo sapien
tgatcgggtccaattcctcagggtt

SEQ ID NO: 1976683 - DNA, 25 bp, Homo sapien
aattcctcagggtttgatgtccaac

SEQ ID NO: 1976684 - DNA, 25 bp, Homo sapien
tcgggtccaattcctcagggtttga

SEQ ID NO: 1976685 - DNA, 25 bp, Homo sapien
tgaagggagtgttcccaaataccgc

SEQ ID NO: 1976686 - DNA, 25 bp, Homo sapien
gttacagagggaagaggtacccatc

SEQ ID NO: 1976687 - DNA, 25 bp, Homo sapien
tcaagagtgcgtgcacagcagcagg

SEQ ID NO: 1976688 - DNA, 25 bp, Homo sapien
agtttgtaccaacagacggcacagg

SEQ ID NO: 1976689 - DNA, 25 bp, Homo sapien
tacacggtgttctcagtttaggaag

SEQ ID NO: 1976690 - DNA, 25 bp, Homo sapien
gcctgtcacctgcataagtgtagcg

SEQ ID NO: 1976691 - DNA, 25 bp, Homo sapien
ggacgcttgcacagaaatacacggt

SEQ ID NO: 1976692 - DNA, 25 bp, Homo sapien
tcacaaaactggaatggcagagcaa

SEQ ID NO: 1976693 - DNA, 25 bp, Homo sapien
tacagcaaacccctgattataagcc

SEQ ID NO: 1976694 - DNA, 25 bp, Homo sapien
aatggcaatgagtttataagatggc

SEQ ID NO: 1976695 - DNA, 25 bp, Homo sapien
ttataagccaaatctgttaaatggc

SEQ ID NO: 1976696 - DNA, 25 bp, Homo sapien
tgggtgagaataaggcacagtcaaa

SEQ ID NO: 1976697 - DNA, 25 bp, Homo sapien
tgaggaagcttcaactcctcgggca

SEQ ID NO: 1976698 - DNA, 25 bp, Homo sapien
taacactaatgctgaggaccccaat

SEQ ID NO: 1976699 - DNA, 25 bp, Homo sapien
agttggattaagcacactgaggagg

SEQ ID NO: 1976700 - DNA, 25 bp, Homo sapien
gacttgcagccagcggtcagttgga

SEQ ID NO: 1976701 - DNA, 25 bp, Homo sapien
gaaatcaagcacctaatcacaatgc

SEQ ID NO: 1976702 - DNA, 25 bp, Homo sapien
gactgtgtgcattaataaaggcgtg

SEQ ID NO: 1976703 - DNA, 25 bp, Homo sapien
gaagggagaacctagcactagagat

SEQ ID NO: 1976704 - DNA, 25 bp, Homo sapien
ttgccaaatgaaggcataagctcca

SEQ ID NO: 1976705 - DNA, 25 bp, Homo sapien
ttcacaagtaacagtcgtaaaactg

SEQ ID NO: 1976706 - DNA, 25 bp, Homo sapien
gagggaagcatccaccaatactgat

SEQ ID NO: 1976707 - DNA, 25 bp, Homo sapien
agtaacagtcgtaaaactgggacat

SEQ ID NO: 1976708 - DNA, 25 bp, Homo sapien
tccactcaccaatgttcaaatggtc

SEQ ID NO: 1976709 - DNA, 25 bp, Homo sapien
tgactccgcctcgactgcagtgaca

SEQ ID NO: 1976710 - DNA, 25 bp, Homo sapien
catctaacctaaggactggaagtag

SEQ ID NO: 1976711 - DNA, 25 bp, Homo sapien
gggaagaagagtcaggctaaccgct

SEQ ID NO: 1976712 - DNA, 25 bp, Homo sapien
cacttccatagacaacactgcttca

SEQ ID NO: 1976713 - DNA, 25 bp, Homo sapien
ttaaaaaggacactgacaaaggtca

SEQ ID NO: 1976714 - DNA, 25 bp, Homo sapien
cactgacaaaggtcactctttcaca

SEQ ID NO: 1976715 - DNA, 25 bp, Homo sapien
cactctttcacagccctgtaagtct

SEQ ID NO: 1976716 - DNA, 25 bp, Homo sapien
aggtcactctttcacagccctgtaa

SEQ ID NO: 1976717 - DNA, 25 bp, Homo sapien
cctgagttgaatgttcttgctgcac

SEQ ID NO: 1976718 - DNA, 25 bp, Homo sapien
gcaagcacattgacccttacactca

SEQ ID NO: 1976719 - DNA, 25 bp, Homo sapien
taaagttcgttattaatggcttcac

SEQ ID NO: 1976720 - DNA, 25 bp, Homo sapien
tatggtctctgaagtacaacgagtc

SEQ ID NO: 1976721 - DNA, 25 bp, Homo sapien
aacaacgatatgttgaaagatccac

SEQ ID NO: 1976722 - DNA, 25 bp, Homo sapien
ggcatgaggtcttatgatggcttta

SEQ ID NO: 1976723 - DNA, 25 bp, Homo sapien
cccaggactggatggtataaaaagc

SEQ ID NO: 1976724 - DNA, 25 bp, Homo sapien
ctgtcgaacatggccaagaagcaac

SEQ ID NO: 1976725 - DNA, 25 bp, Homo sapien
agtgacggtgctggccaaagcttct

SEQ ID NO: 1976726 - DNA, 25 bp, Homo sapien
ttctgcctgtacgatggtctcagca

SEQ ID NO: 1976727 - DNA, 25 bp, Homo sapien
caatggcagtgagagtgacggtgct

SEQ ID NO: 1976728 - DNA, 25 bp, Homo sapien
caaagcttctgcctgtacgatggtc

SEQ ID NO: 1976729 - DNA, 25 bp, Homo sapien
acagtggcatgcgttcggtttatca

SEQ ID NO: 1976730 - DNA, 25 bp, Homo sapien
caattttagtgggagggctttccag

SEQ ID NO: 1976731 - DNA, 25 bp, Homo sapien
cagcctccataagtcaagtcaccaa

SEQ ID NO: 1976732 - DNA, 25 bp, Homo sapien
taatcagtctaattggcacagtggc

SEQ ID NO: 1976733 - DNA, 25 bp, Homo sapien
tccttggaaaacgtgaaacagcgcc

SEQ ID NO: 1976734 - DNA, 25 bp, Homo sapien
atcagcgcaaggagcaacttccaca

SEQ ID NO: 1976735 - DNA, 25 bp, Homo sapien
ttccacaggagctcggacggattcc

SEQ ID NO: 1976736 - DNA, 25 bp, Homo sapien
tccatcataactagcaggcatcatg

SEQ ID NO: 1976737 - DNA, 25 bp, Homo sapien
gaacccaaatcatcagaaattctgg

SEQ ID NO: 1976738 - DNA, 25 bp, Homo sapien
ctgtttctttggactatggaaaaga

SEQ ID NO: 1976739 - DNA, 25 bp, Homo sapien
tggaaaagaacccaaatcatcagaa

SEQ ID NO: 1976740 - DNA, 25 bp, Homo sapien
ctgaagagctgatctgtttctttgg

SEQ ID NO: 1976741 - DNA, 25 bp, Homo sapien
tgggctgtcaacttcgatatcaact

SEQ ID NO: 1976742 - DNA, 25 bp, Homo sapien
aagtccctgggagcatggatcctag

SEQ ID NO: 1976743 - DNA, 25 bp, Homo sapien
tcctgctcttgctcggagactcaca

SEQ ID NO: 1976744 - DNA, 25 bp, Homo sapien
ttgccgagaattcttctgctgagtc

SEQ ID NO: 1976745 - DNA, 25 bp, Homo sapien
tatccaaataaacttcaatgttccc

SEQ ID NO: 1976746 - DNA, 25 bp, Homo sapien
tcaaaggtaagtgctgctttcttga

SEQ ID NO: 1976747 - DNA, 25 bp, Homo sapien
gcatttttcaaaggtaagtgctgct

SEQ ID NO: 1976748 - DNA, 25 bp, Homo sapien
taaacttcaatgttcccagcatttt

SEQ ID NO: 1976749 - DNA, 25 bp, Homo sapien
caggtttaaggagtagattctttgg

SEQ ID NO: 1976750 - DNA, 25 bp, Homo sapien
ccaggtttaaggagtagattctttg

SEQ ID NO: 1976751 - DNA, 25 bp, Homo sapien
tgttctacctagagggactcctccc

SEQ ID NO: 1976752 - DNA, 25 bp, Homo sapien
caagccagaaattgtttgttggaca

SEQ ID NO: 1976753 - DNA, 25 bp, Homo sapien
tatctaagcaaggtccaggtgacag

SEQ ID NO: 1976754 - DNA, 25 bp, Homo sapien
tgttggacaaaatcgatggaatatc

SEQ ID NO: 1976755 - DNA, 25 bp, Homo sapien
caactttggctattgacatctccag

SEQ ID NO: 1976756 - DNA, 25 bp, Homo sapien
gagaaacgcagacaactttggctat

SEQ ID NO: 1976757 - DNA, 25 bp, Homo sapien
gctattgacatctccaggaaaagcc

SEQ ID NO: 1976758 - DNA, 25 bp, Homo sapien
agagaaacgcagacaactttggcta

SEQ ID NO: 1976759 - DNA, 25 bp, Homo sapien
tctccatggatattgctaccattat

SEQ ID NO: 1976760 - DNA, 25 bp, Homo sapien
aaaccaaccacaatgtctagagatg

SEQ ID NO: 1976761 - DNA, 25 bp, Homo sapien
caatgtctagagatggactaactat

SEQ ID NO: 1976762 - DNA, 25 bp, Homo sapien
tagagatggactaactatacaagcc

SEQ ID NO: 1976763 - DNA, 25 bp, Homo sapien
taagcagtcgtaaatgttgagttgt

SEQ ID NO: 1976764 - DNA, 25 bp, Homo sapien
tgaaagcagtcctgatcttgtcctc

SEQ ID NO: 1976765 - DNA, 25 bp, Homo sapien
gatcttgtcctctaataagcagtcg

SEQ ID NO: 1976766 - DNA, 25 bp, Homo sapien
atttcttaaagctagtttctgaagc

SEQ ID NO: 1976767 - DNA, 25 bp, Homo sapien
gctgttctgaaccaaaagtgttctg

SEQ ID NO: 1976768 - DNA, 25 bp, Homo sapien
tagccaacatgcaagataatcgagt

SEQ ID NO: 1976769 - DNA, 25 bp, Homo sapien
agttactggtcaatcgctgttctga

SEQ ID NO: 1976770 - DNA, 25 bp, Homo sapien
taatcgagtaggtgcaaataataca

SEQ ID NO: 1976771 - DNA, 25 bp, Homo sapien
agcccatttagtcctctccacaaac

SEQ ID NO: 1976772 - DNA, 25 bp, Homo sapien
gcccatttagtcctctccacaaacc

SEQ ID NO: 1976773 - DNA, 25 bp, Homo sapien
ccacaaaccaagcattatcctcaca

SEQ ID NO: 1976774 - DNA, 25 bp, Homo sapien
tacagcccatttagtcctctccaca

SEQ ID NO: 1976775 - DNA, 25 bp, Homo sapien
gaacaacctcaaaatcatggctagt

SEQ ID NO: 1976776 - DNA, 25 bp, Homo sapien
cttccttgagaacaacctcaaaatc

SEQ ID NO: 1976777 - DNA, 25 bp, Homo sapien
cttgagaacaacctcaaaatcatgg

SEQ ID NO: 1976778 - DNA, 25 bp, Homo sapien
agattcttccttgagaacaacctca

SEQ ID NO: 1976779 - DNA, 25 bp, Homo sapien
catctatatgggtaggaatcccacc

SEQ ID NO: 1976780 - DNA, 25 bp, Homo sapien
taagttgggacagcaagtagcttct

SEQ ID NO: 1976781 - DNA, 25 bp, Homo sapien
tgttaacagctcttccgccactctg

SEQ ID NO: 1976782 - DNA, 25 bp, Homo sapien
acttagtgattgagggtagtgccca

SEQ ID NO: 1976783 - DNA, 25 bp, Homo sapien
gttcctccatatccagacaaaggta

SEQ ID NO: 1976784 - DNA, 25 bp, Homo sapien
ggagccagtgttgcggacagaaaaa

SEQ ID NO: 1976785 - DNA, 25 bp, Homo sapien
tgccaggtactaagccattcactgt

SEQ ID NO: 1976786 - DNA, 25 bp, Homo sapien
tcaatactttaggatccagcaaaac

SEQ ID NO: 1976787 - DNA, 25 bp, Homo sapien
ttattattgattcctctgtctgatg

SEQ ID NO: 1976788 - DNA, 25 bp, Homo sapien
tgcagttttattattgattcctctg

SEQ ID NO: 1976789 - DNA, 25 bp, Homo sapien
attcctctgtctgatggattatata

SEQ ID NO: 1976790 - DNA, 25 bp, Homo sapien
gtctgatggattatatattaaagta

SEQ ID NO: 1976791 - DNA, 25 bp, Homo sapien
catctccaccaaataagtatacagt

SEQ ID NO: 1976792 - DNA, 25 bp, Homo sapien
tccaccaaataagtatacagttgat

SEQ ID NO: 1976793 - DNA, 25 bp, Homo sapien
ttcatctccaccaaataagtataca

SEQ ID NO: 1976794 - DNA, 25 bp, Homo sapien
caccaaataagtatacagttgatag

SEQ ID NO: 1976795 - DNA, 25 bp, Homo sapien
catcatgtagcaagtcgccattaaa

SEQ ID NO: 1976796 - DNA, 25 bp, Homo sapien
tatttggtctgttctaacatcatgt

SEQ ID NO: 1976797 - DNA, 25 bp, Homo sapien
ttcaaaggcaagctttgtatttggt

SEQ ID NO: 1976798 - DNA, 25 bp, Homo sapien
aacatcatgtagcaagtcgccatta

SEQ ID NO: 1976799 - DNA, 25 bp, Homo sapien
gcacactatgttctggaagtatctg

SEQ ID NO: 1976800 - DNA, 25 bp, Homo sapien
cttcagttactaatagctcatcttg

SEQ ID NO: 1976801 - DNA, 25 bp, Homo sapien
catctctggtttatgtaacagggcc

SEQ ID NO: 1976802 - DNA, 25 bp, Homo sapien
aattaatgttttgaagcacactatg

SEQ ID NO: 1976803 - DNA, 25 bp, Homo sapien
tctctgctagaaatgcaatctctga

SEQ ID NO: 1976804 - DNA, 25 bp, Homo sapien
tctgaattctccaattactgaaagt

SEQ ID NO: 1976805 - DNA, 25 bp, Homo sapien
aaggaattctctgctagaaatgcaa

SEQ ID NO: 1976806 - DNA, 25 bp, Homo sapien
cattaggtcgttggggaagatcata

SEQ ID NO: 1976807 - DNA, 25 bp, Homo sapien
gtaggacagtccacggctcttcgga

SEQ ID NO: 1976808 - DNA, 25 bp, Homo sapien
aagagacgttgccaccatgtttccc

SEQ ID NO: 1976809 - DNA, 25 bp, Homo sapien
ctcttcggaggccagctgatccaga

SEQ ID NO: 1976810 - DNA, 25 bp, Homo sapien
cagaatcaagtgctcgggtaggaca

SEQ ID NO: 1976811 - DNA, 25 bp, Homo sapien
gaggtgtcacagttgacatactcac

SEQ ID NO: 1976812 - DNA, 25 bp, Homo sapien
tgaggtgtcacagttgacatactca

SEQ ID NO: 1976813 - DNA, 25 bp, Homo sapien
tctgaggtgtcacagttgacatact

SEQ ID NO: 1976814 - DNA, 25 bp, Homo sapien
ctctgaggtgtcacagttgacatac

SEQ ID NO: 1976815 - DNA, 25 bp, Homo sapien
tctggaaacgtccagtttttgccat

SEQ ID NO: 1976816 - DNA, 25 bp, Homo sapien
cggcgtgactgtgaggcaatgcgct

SEQ ID NO: 1976817 - DNA, 25 bp, Homo sapien
gacacatccatgctgcggcgtgact

SEQ ID NO: 1976818 - DNA, 25 bp, Homo sapien
ctcacagagttattcacaatctgga

SEQ ID NO: 1976819 - DNA, 25 bp, Homo sapien
atctctgctccactagaccgcctac

SEQ ID NO: 1976820 - DNA, 25 bp, Homo sapien
ctgggtgacagcataaccagctgtg

SEQ ID NO: 1976821 - DNA, 25 bp, Homo sapien
tgggtgacagcataaccagctgtgt

SEQ ID NO: 1976822 - DNA, 25 bp, Homo sapien
cgcctaccacttgaactcacagctg

SEQ ID NO: 1976823 - DNA, 25 bp, Homo sapien
cttctgtccatcgtcacagtgtata

SEQ ID NO: 1976824 - DNA, 25 bp, Homo sapien
taaggaggaattaggactcacaaga

SEQ ID NO: 1976825 - DNA, 25 bp, Homo sapien
cattgactgttttgtggataaggag

SEQ ID NO: 1976826 - DNA, 25 bp, Homo sapien
tatatagatcaaaccactccacggg

SEQ ID NO: 1976827 - DNA, 25 bp, Homo sapien
aatgctctaactagttggcctcaga

SEQ ID NO: 1976828 - DNA, 25 bp, Homo sapien
gataatcatgcctcggtatccatgg

SEQ ID NO: 1976829 - DNA, 25 bp, Homo sapien
caaggtaaatctgtgactctatctc

SEQ ID NO: 1976830 - DNA, 25 bp, Homo sapien
cgaaaatcagtaatcacttctaggc

SEQ ID NO: 1976831 - DNA, 25 bp, Homo sapien
tcttctcgaatttgaactttcacaa

SEQ ID NO: 1976832 - DNA, 25 bp, Homo sapien
caaatggtttggaggtcaaacgagt

SEQ ID NO: 1976833 - DNA, 25 bp, Homo sapien
tctgttgtaggaaaagtaatactct

SEQ ID NO: 1976834 - DNA, 25 bp, Homo sapien
ccaaatgactaactgaaggctcaga

SEQ ID NO: 1976835 - DNA, 25 bp, Homo sapien
cgtctgtggtgccatgattctcgag

SEQ ID NO: 1976836 - DNA, 25 bp, Homo sapien
cataaggtggcgctaaagatgacag

SEQ ID NO: 1976837 - DNA, 25 bp, Homo sapien
gatgccatttcacgtctgtggtgcc

SEQ ID NO: 1976838 - DNA, 25 bp, Homo sapien
tgattctcgagttctagacagctct

SEQ ID NO: 1976839 - DNA, 25 bp, Homo sapien
cagcctgggcagtgtggtgaggctc

SEQ ID NO: 1976840 - DNA, 25 bp, Homo sapien
accagcctgggcagtgtggtgaggc

SEQ ID NO: 1976841 - DNA, 25 bp, Homo sapien
gcctgggcagtgtggtgaggctcca

SEQ ID NO: 1976842 - DNA, 25 bp, Homo sapien
agaccagcctgggcagtgtggtgag

SEQ ID NO: 1976843 - DNA, 25 bp, Homo sapien
taggagaacatctgaatgctgcata

SEQ ID NO: 1976844 - DNA, 25 bp, Homo sapien
gaaataggagaacatctgaatgctg

SEQ ID NO: 1976845 - DNA, 25 bp, Homo sapien
gctgcataggtagctctaaaaacat

SEQ ID NO: 1976846 - DNA, 25 bp, Homo sapien
catctgaatgctgcataggtagctc

SEQ ID NO: 1976847 - DNA, 25 bp, Homo sapien
taagcaacgtagtcaatcatacaat

SEQ ID NO: 1976848 - DNA, 25 bp, Homo sapien
ggtgtggttgtaattgaacattgtg

SEQ ID NO: 1976849 - DNA, 25 bp, Homo sapien
tacatcttgtcatatttaagcaacg

SEQ ID NO: 1976850 - DNA, 25 bp, Homo sapien
caatatgatccctaaaatttgtggg

SEQ ID NO: 1976851 - DNA, 25 bp, Homo sapien
cagtagactgtcagcccagagaggg

SEQ ID NO: 1976852 - DNA, 25 bp, Homo sapien
accttgggcatatgctgaagagaaa

SEQ ID NO: 1976853 - DNA, 25 bp, Homo sapien
cagagagggacatcaagtgctttcc

SEQ ID NO: 1976854 - DNA, 25 bp, Homo sapien
cattcagaatagcttcaggctgctc

SEQ ID NO: 1976855 - DNA, 25 bp, Homo sapien
catttaggataatcgccttcagctg

SEQ ID NO: 1976856 - DNA, 25 bp, Homo sapien
catgatttgattctacggctgcaca

SEQ ID NO: 1976857 - DNA, 25 bp, Homo sapien
gacacctgtatctttaccactatgg

SEQ ID NO: 1976858 - DNA, 25 bp, Homo sapien
gatatacatgtaccaatccaccatt

SEQ ID NO: 1976859 - DNA, 25 bp, Homo sapien
taaggtgtataaattctcaggacaa

SEQ ID NO: 1976860 - DNA, 25 bp, Homo sapien
tcaggacaacccataaagaccattt

SEQ ID NO: 1976861 - DNA, 25 bp, Homo sapien
gctagattctcacttgacaaatgct

SEQ ID NO: 1976862 - DNA, 25 bp, Homo sapien
caatcctattccatagttctgtgga

SEQ ID NO: 1976863 - DNA, 25 bp, Homo sapien
gaaaccaatgcttaacctaaggtca

SEQ ID NO: 1976864 - DNA, 25 bp, Homo sapien
tatggtctatggttgattttcggtg

SEQ ID NO: 1976865 - DNA, 25 bp, Homo sapien
tattcctatgttgtcttttagaggt

SEQ ID NO: 1976866 - DNA, 25 bp, Homo sapien
tatggtactaggtaagtgtgatggt

SEQ ID NO: 1976867 - DNA, 25 bp, Homo sapien
tctcaacgtgtgtttcatgtgaggc

SEQ ID NO: 1976868 - DNA, 25 bp, Homo sapien
acatcccaaaactgggcataatccc

SEQ ID NO: 1976869 - DNA, 25 bp, Homo sapien
cccctacctctgggcaaaaatgtga

SEQ ID NO: 1976870 - DNA, 25 bp, Homo sapien
taagagggtgacattcaacatccca

SEQ ID NO: 1976871 - DNA, 25 bp, Homo sapien
caggtatgcgagcagaagcctctga

SEQ ID NO: 1976872 - DNA, 25 bp, Homo sapien
ttaatgagggaatccgtggaaaggc

SEQ ID NO: 1976873 - DNA, 25 bp, Homo sapien
tcttcggggcttaactaaatgatct

SEQ ID NO: 1976874 - DNA, 25 bp, Homo sapien
gaaaggcatgcgttttcaggctcat

SEQ ID NO: 1976875 - DNA, 25 bp, Homo sapien
gattgtcctacacacgcatacctga

SEQ ID NO: 1976876 - DNA, 25 bp, Homo sapien
cttatcagtcataccacagctaggg

SEQ ID NO: 1976877 - DNA, 25 bp, Homo sapien
tatcatgtgacctcgcaattgtggg

SEQ ID NO: 1976878 - DNA, 25 bp, Homo sapien
tgaatggtatctgggagccgaccct

SEQ ID NO: 1976879 - DNA, 25 bp, Homo sapien
agttcatttcgcttggccccgtcac

SEQ ID NO: 1976880 - DNA, 25 bp, Homo sapien
gaaggtggccctttacctcagttca

SEQ ID NO: 1976881 - DNA, 25 bp, Homo sapien
gccagaagcccagtttgtatgaagg

SEQ ID NO: 1976882 - DNA, 25 bp, Homo sapien
taaagggtgctggataggcctcact

SEQ ID NO: 1976883 - DNA, 25 bp, Homo sapien
tgactttaagtgtccgtgattcccc

SEQ ID NO: 1976884 - DNA, 25 bp, Homo sapien
acactagtcggccggaacctgtaca

SEQ ID NO: 1976885 - DNA, 25 bp, Homo sapien
taaaagaattatttcgcagattgac

SEQ ID NO: 1976886 - DNA, 25 bp, Homo sapien
gggcataaactccacgagcagtcac

SEQ ID NO: 1976887 - DNA, 25 bp, Homo sapien
cattcttacaacttaaatatagtct

SEQ ID NO: 1976888 - DNA, 25 bp, Homo sapien
gtttgttatcagagttgaatgcatg

SEQ ID NO: 1976889 - DNA, 25 bp, Homo sapien
gaaaatgtttgttatcagagttgaa

SEQ ID NO: 1976890 - DNA, 25 bp, Homo sapien
tacaacttaaatatagtctacagaa

SEQ ID NO: 1976891 - DNA, 25 bp, Homo sapien
aaattacttcattatggccgggcgt

SEQ ID NO: 1976892 - DNA, 25 bp, Homo sapien
agcctaaagcgatcctctcagctca

SEQ ID NO: 1976893 - DNA, 25 bp, Homo sapien
gtaaaggttgtccagaaatatgtgt

SEQ ID NO: 1976894 - DNA, 25 bp, Homo sapien
gccacaaaattaggtagtacaataa

SEQ ID NO: 1976895 - DNA, 25 bp, Homo sapien
aatactaaggaatttctgggcggat

SEQ ID NO: 1976896 - DNA, 25 bp, Homo sapien
ttgacatagaatggctctctgggac

SEQ ID NO: 1976897 - DNA, 25 bp, Homo sapien
tgtttgacatagaatggctctctgg

SEQ ID NO: 1976898 - DNA, 25 bp, Homo sapien
gaatgtttgacatagaatggctctc

SEQ ID NO: 1976899 - DNA, 25 bp, Homo sapien
ttggaatgtttgacatagaatggct

SEQ ID NO: 1976900 - DNA, 25 bp, Homo sapien
ctgtggcaccgctgagtgcaccacg

SEQ ID NO: 1976901 - DNA, 25 bp, Homo sapien
gcaccgctgagtgcaccacggacgg

SEQ ID NO: 1976902 - DNA, 25 bp, Homo sapien
ctgagtgcaccacggacggtcagga

SEQ ID NO: 1976903 - DNA, 25 bp, Homo sapien
cgctgagtgcaccacggacggtcag

SEQ ID NO: 1976904 - DNA, 25 bp, Homo sapien
tttatgtggctgcaaatcctgggtg

SEQ ID NO: 1976905 - DNA, 25 bp, Homo sapien
ttatgtggctgcaaatcctgggtgg

SEQ ID NO: 1976906 - DNA, 25 bp, Homo sapien
tgtgagcttcaactgtacagcaccg

SEQ ID NO: 1976907 - DNA, 25 bp, Homo sapien
gagatccacagactactatgagagg

SEQ ID NO: 1976908 - DNA, 25 bp, Homo sapien
gaaggaacagtcctcaatcgagcca

SEQ ID NO: 1976909 - DNA, 25 bp, Homo sapien
gatgatgttaacacctgacgcttgc

SEQ ID NO: 1976910 - DNA, 25 bp, Homo sapien
ctctgttacaaaggagccagtgttt

SEQ ID NO: 1976911 - DNA, 25 bp, Homo sapien
cacacaatgccgtaagtccccatga

SEQ ID NO: 1976912 - DNA, 25 bp, Homo sapien
cagattttgttgcactgccaaggca

SEQ ID NO: 1976913 - DNA, 25 bp, Homo sapien
taaagtcacagtgtctcgtgtctgg

SEQ ID NO: 1976914 - DNA, 25 bp, Homo sapien
aaaagtgcatatttgtaagtaatca

SEQ ID NO: 1976915 - DNA, 25 bp, Homo sapien
tgctggagctttcggagagcagccc

SEQ ID NO: 1976916 - DNA, 25 bp, Homo sapien
agcctgtaaggagcagccactttcc

SEQ ID NO: 1976917 - DNA, 25 bp, Homo sapien
tccggtggccttggaaaaagtgcat

SEQ ID NO: 1976918 - DNA, 25 bp, Homo sapien
cactgtgcaaggacatgagggcaca

SEQ ID NO: 1976919 - DNA, 25 bp, Homo sapien
tcccaaatgacatgcagggtctgcc

SEQ ID NO: 1976920 - DNA, 25 bp, Homo sapien
gaggtggaacctattagctacaaca

SEQ ID NO: 1976921 - DNA, 25 bp, Homo sapien
gccagtacactagcacatacaaggt

SEQ ID NO: 1976922 - DNA, 25 bp, Homo sapien
gttggtggtcaatacttggataaat

SEQ ID NO: 1976923 - DNA, 25 bp, Homo sapien
tgcctatttaagaggctttataact

SEQ ID NO: 1976924 - DNA, 25 bp, Homo sapien
tatagtaccatttgcctatttaaga

SEQ ID NO: 1976925 - DNA, 25 bp, Homo sapien
tcaatacttggataaatatagtacc

SEQ ID NO: 1976926 - DNA, 25 bp, Homo sapien
ctggcccatggcattagctacaatt

SEQ ID NO: 1976927 - DNA, 25 bp, Homo sapien
tggcccatggcattagctacaattt

SEQ ID NO: 1976928 - DNA, 25 bp, Homo sapien
ctatatagagcaaaggtgtgtatgt

SEQ ID NO: 1976929 - DNA, 25 bp, Homo sapien
tatagagcaaaggtgtgtatgtgta

SEQ ID NO: 1976930 - DNA, 25 bp, Homo sapien
atatagagcaaaggtgtgtatgtgt

SEQ ID NO: 1976931 - DNA, 25 bp, Homo sapien
tatatagagcaaaggtgtgtatgtg

SEQ ID NO: 1976932 - DNA, 25 bp, Homo sapien
caaatagtgtatgttcttaaatata

SEQ ID NO: 1976933 - DNA, 25 bp, Homo sapien
gatataactgataacacaaatagtg

SEQ ID NO: 1976934 - DNA, 25 bp, Homo sapien
ctggatataactgataacacaaata

SEQ ID NO: 1976935 - DNA, 25 bp, Homo sapien
tataactgataacacaaatagtgta

SEQ ID NO: 1976936 - DNA, 25 bp, Homo sapien
caccgggcatgaggtttagaaaaca

SEQ ID NO: 1976937 - DNA, 25 bp, Homo sapien
ttgggtgcacaagagtacaccgggc

SEQ ID NO: 1976938 - DNA, 25 bp, Homo sapien
aaatcccagcagtgtcgctcttggg

SEQ ID NO: 1976939 - DNA, 25 bp, Homo sapien
cagcagtgtcgctcttgggtgcaca

SEQ ID NO: 1976940 - DNA, 25 bp, Homo sapien
tatatagaggcaggtaacaagtgcc

SEQ ID NO: 1976941 - DNA, 25 bp, Homo sapien
gatgtcatcaacgtctaggcttagg

SEQ ID NO: 1976942 - DNA, 25 bp, Homo sapien
tgcccggccggaaactttcatcaaa

SEQ ID NO: 1976943 - DNA, 25 bp, Homo sapien
gagctcacagggaaggtacttcacc

SEQ ID NO: 1976944 - DNA, 25 bp, Homo sapien
tgcaaaaactatctacctaagaaag

SEQ ID NO: 1976945 - DNA, 25 bp, Homo sapien
tacagctttgtatactgcctgcaaa

SEQ ID NO: 1976946 - DNA, 25 bp, Homo sapien
aaatgcccgttttactcagtccaga

SEQ ID NO: 1976947 - DNA, 25 bp, Homo sapien
tacgtatgtattcctggctatccag

SEQ ID NO: 1976948 - DNA, 25 bp, Homo sapien
gcatgtcatgacagcacccgtgacc

SEQ ID NO: 1976949 - DNA, 25 bp, Homo sapien
aagagctcggtcaagccacattcag

SEQ ID NO: 1976950 - DNA, 25 bp, Homo sapien
tgttgaggaaagagctcggtcaagc

SEQ ID NO: 1976951 - DNA, 25 bp, Homo sapien
cagcagcatgtcatgacagcacccg

SEQ ID NO: 1976952 - DNA, 25 bp, Homo sapien
ttcaaatttgcctgcggacttcggt

SEQ ID NO: 1976953 - DNA, 25 bp, Homo sapien
gcctgcggacttcggtttgaactgc

SEQ ID NO: 1976954 - DNA, 25 bp, Homo sapien
ttagtcgaatagcaatactcttgcc

SEQ ID NO: 1976955 - DNA, 25 bp, Homo sapien
cacgggcatgttgatgtaatgctgg

SEQ ID NO: 1976956 - DNA, 25 bp, Homo sapien
cataatatttcagtcgagtcttcag

SEQ ID NO: 1976957 - DNA, 25 bp, Homo sapien
tcttcagtattagcttgtaaaaaca

SEQ ID NO: 1976958 - DNA, 25 bp, Homo sapien
ataattgtagtgtagaaagataaag

SEQ ID NO: 1976959 - DNA, 25 bp, Homo sapien
aaagttaagtacaatactatgggct

SEQ ID NO: 1976960 - DNA, 25 bp, Homo sapien
ttgacaagagaagcatcctcactct

SEQ ID NO: 1976961 - DNA, 25 bp, Homo sapien
tcactcttgtggactccagtaatct

SEQ ID NO: 1976962 - DNA, 25 bp, Homo sapien
ctcttgtggactccagtaatctcag

SEQ ID NO: 1976963 - DNA, 25 bp, Homo sapien
ctgcttgacaagagaagcatcctca

SEQ ID NO: 1976964 - DNA, 25 bp, Homo sapien
gtgtctagcttaaagtttgtaaaca

SEQ ID NO: 1976965 - DNA, 25 bp, Homo sapien
caaaacggaccaatcagctttctgt

SEQ ID NO: 1976966 - DNA, 25 bp, Homo sapien
caatcagtgctctgtggggacttgg

SEQ ID NO: 1976967 - DNA, 25 bp, Homo sapien
ccaatcagctttctgtaaaacagac

SEQ ID NO: 1976968 - DNA, 25 bp, Homo sapien
taagattgctattaaactaacagaa

SEQ ID NO: 1976969 - DNA, 25 bp, Homo sapien
catttgtcgtgcaatacagtaacca

SEQ ID NO: 1976970 - DNA, 25 bp, Homo sapien
cctgagctaaaacctgagagatgac

SEQ ID NO: 1976971 - DNA, 25 bp, Homo sapien
ccgaaagtatccaagcaagagcggg

SEQ ID NO: 1976972 - DNA, 25 bp, Homo sapien
gaaggtgtagccgagagccgccagg

SEQ ID NO: 1976973 - DNA, 25 bp, Homo sapien
tctggctggtgacacggcggccaca

SEQ ID NO: 1976974 - DNA, 25 bp, Homo sapien
ttgcttttaactcgagggccctgcg

SEQ ID NO: 1976975 - DNA, 25 bp, Homo sapien
tgtggaatgagttccactgccgccc

SEQ ID NO: 1976976 - DNA, 25 bp, Homo sapien
caccaggtcagcaaaaggttgaggg

SEQ ID NO: 1976977 - DNA, 25 bp, Homo sapien
ggtcggagcccattgggtgagtgca

SEQ ID NO: 1976978 - DNA, 25 bp, Homo sapien
tcggagcccattgggtgagtgcaaa

SEQ ID NO: 1976979 - DNA, 25 bp, Homo sapien
ggagcccattgggtgagtgcaaaga

SEQ ID NO: 1976980 - DNA, 25 bp, Homo sapien
gagcccattgggtgagtgcaaagac

SEQ ID NO: 1976981 - DNA, 25 bp, Homo sapien
cagtcacagtagagccaacaatggt

SEQ ID NO: 1976982 - DNA, 25 bp, Homo sapien
attgaagcattaatacccagtgagg

SEQ ID NO: 1976983 - DNA, 25 bp, Homo sapien
gagtccgctgggtttacgcaggcct

SEQ ID NO: 1976984 - DNA, 25 bp, Homo sapien
tgagggccaagtcaggacagtcaca

SEQ ID NO: 1976985 - DNA, 25 bp, Homo sapien
cttcttggcatagatatatcgaaga

SEQ ID NO: 1976986 - DNA, 25 bp, Homo sapien
tcagctcttacagaacagccacgca

SEQ ID NO: 1976987 - DNA, 25 bp, Homo sapien
ctcagctcttacagaacagccacgc

SEQ ID NO: 1976988 - DNA, 25 bp, Homo sapien
cagctcttacagaacagccacgcat

SEQ ID NO: 1976989 - DNA, 25 bp, Homo sapien
ggagcccgtgctcacaaggcttcga

SEQ ID NO: 1976990 - DNA, 25 bp, Homo sapien
aaggagcccgtgctcacaaggcttc

SEQ ID NO: 1976991 - DNA, 25 bp, Homo sapien
gcccgtgctcacaaggcttcgaggt

SEQ ID NO: 1976992 - DNA, 25 bp, Homo sapien
gagcccgtgctcacaaggcttcgag

SEQ ID NO: 1976993 - DNA, 25 bp, Homo sapien
aaggaaaggctgacttcacgtcccg

SEQ ID NO: 1976994 - DNA, 25 bp, Homo sapien
aggctgacttcacgtcccgctgcat

SEQ ID NO: 1976995 - DNA, 25 bp, Homo sapien
gctccaaggaaaggctgacttcacg

SEQ ID NO: 1976996 - DNA, 25 bp, Homo sapien
gaaaggctgacttcacgtcccgctg

SEQ ID NO: 1976997 - DNA, 25 bp, Homo sapien
tcccactatgactggacagacagac

SEQ ID NO: 1976998 - DNA, 25 bp, Homo sapien
gttcccactatgactggacagacag

SEQ ID NO: 1976999 - DNA, 25 bp, Homo sapien
ggcaaagaaatatgatcgtgcattc

SEQ ID NO: 1977000 - DNA, 25 bp, Homo sapien
gactgagactacactaggagcaata

SEQ ID NO: 1977001 - DNA, 25 bp, Homo sapien
tcgtgcattcaatgggatgtgcttt

SEQ ID NO: 1977002 - DNA, 25 bp, Homo sapien
gcttttgttcaccaaggataaagag

SEQ ID NO: 1977003 - DNA, 25 bp, Homo sapien
aacagatgggtctctatccccacct

SEQ ID NO: 1977004 - DNA, 25 bp, Homo sapien
aaaatggcttgtgtgacaacagatg

SEQ ID NO: 1977005 - DNA, 25 bp, Homo sapien
aatggcttgtgtgacaacagatggg

SEQ ID NO: 1977006 - DNA, 25 bp, Homo sapien
gacaacagatgggtctctatcccca

SEQ ID NO: 1977007 - DNA, 25 bp, Homo sapien
tcactgtcagctctggcctgggtgt

SEQ ID NO: 1977008 - DNA, 25 bp, Homo sapien
ctgggctgaattgtgccttgacttc

SEQ ID NO: 1977009 - DNA, 25 bp, Homo sapien
ctgggccacacctgcgaccgagccc

SEQ ID NO: 1977010 - DNA, 25 bp, Homo sapien
cgctgggccggccaaggctttctct

SEQ ID NO: 1977011 - DNA, 25 bp, Homo sapien
tgctgtacgtgttgcaaggggtctt

SEQ ID NO: 1977012 - DNA, 25 bp, Homo sapien
gctgtacgtgttgcaaggggtcttc

SEQ ID NO: 1977013 - DNA, 25 bp, Homo sapien
ctgtacgtgttgcaaggggtcttct

SEQ ID NO: 1977014 - DNA, 25 bp, Homo sapien
tgccctggcaggatgtgtccctatt

SEQ ID NO: 1977015 - DNA, 25 bp, Homo sapien
gttctggttctggtttggccctatc

SEQ ID NO: 1977016 - DNA, 25 bp, Homo sapien
tatccaatgtgcaagtcctctcagc

SEQ ID NO: 1977017 - DNA, 25 bp, Homo sapien
tcagcaatgactgacagccaggttt

SEQ ID NO: 1977018 - DNA, 25 bp, Homo sapien
aaatggaccctcagaatccacgcgg

SEQ ID NO: 1977019 - DNA, 25 bp, Homo sapien
cacctggttcctccacgtgctgttc

SEQ ID NO: 1977020 - DNA, 25 bp, Homo sapien
ccacgcgggcttcagagagcaggat

SEQ ID NO: 1977021 - DNA, 25 bp, Homo sapien
cacggacaacgcagtctttgcatcc

SEQ ID NO: 1977022 - DNA, 25 bp, Homo sapien
tgtggctcttttccactgacagagg

SEQ ID NO: 1977023 - DNA, 25 bp, Homo sapien
ctgttggatgatggcctcatatccc

SEQ ID NO: 1977024 - DNA, 25 bp, Homo sapien
ttctgttggatgatggcctcatatc

SEQ ID NO: 1977025 - DNA, 25 bp, Homo sapien
gcttctgttggatgatggcctcata

SEQ ID NO: 1977026 - DNA, 25 bp, Homo sapien
tggctccttgccgcaagtccttcat

SEQ ID NO: 1977027 - DNA, 25 bp, Homo sapien
acatggctccttgccgcaagtcctt

SEQ ID NO: 1977028 - DNA, 25 bp, Homo sapien
ggccacatggctccttgccgcaagt

SEQ ID NO: 1977029 - DNA, 25 bp, Homo sapien
ccacatggctccttgccgcaagtcc

SEQ ID NO: 1977030 - DNA, 25 bp, Homo sapien
caggaagcgcaggcctgggtgcacc

SEQ ID NO: 1977031 - DNA, 25 bp, Homo sapien
aagcgcaggcctgggtgcaccttcc

SEQ ID NO: 1977032 - DNA, 25 bp, Homo sapien
ggaagcgcaggcctgggtgcacctt

SEQ ID NO: 1977033 - DNA, 25 bp, Homo sapien
tccaggaagcgcaggcctgggtgca

SEQ ID NO: 1977034 - DNA, 25 bp, Homo sapien
agcatggcacagagtccgggtgcct

SEQ ID NO: 1977035 - DNA, 25 bp, Homo sapien
catggcacagagtccgggtgcctaa

SEQ ID NO: 1977036 - DNA, 25 bp, Homo sapien
atggcacagagtccgggtgcctaac

SEQ ID NO: 1977037 - DNA, 25 bp, Homo sapien
gcatggcacagagtccgggtgccta

SEQ ID NO: 1977038 - DNA, 25 bp, Homo sapien
ttctctgctgtagcgaagcctttgg

SEQ ID NO: 1977039 - DNA, 25 bp, Homo sapien
cgtttgagtctcgaaggccctcttg

SEQ ID NO: 1977040 - DNA, 25 bp, Homo sapien
tcgccagtcggtagaagtgtcttct

SEQ ID NO: 1977041 - DNA, 25 bp, Homo sapien
gagaaggtaagggatccacgtttgc

SEQ ID NO: 1977042 - DNA, 25 bp, Homo sapien
cttgtgtcgtttggatgcagggcag

SEQ ID NO: 1977043 - DNA, 25 bp, Homo sapien
cccaggaggccttaccactgcttgt

SEQ ID NO: 1977044 - DNA, 25 bp, Homo sapien
gccttaccactgcttgtgtcgtttg

SEQ ID NO: 1977045 - DNA, 25 bp, Homo sapien
gaggccttaccactgcttgtgtcgt

SEQ ID NO: 1977046 - DNA, 25 bp, Homo sapien
cagccgagtgcacattcggccatgg

SEQ ID NO: 1977047 - DNA, 25 bp, Homo sapien
gtgcacattcggccatgggccagcg

SEQ ID NO: 1977048 - DNA, 25 bp, Homo sapien
ccgagtgcacattcggccatgggcc

SEQ ID NO: 1977049 - DNA, 25 bp, Homo sapien
cgagtgcacattcggccatgggcca

SEQ ID NO: 1977050 - DNA, 25 bp, Homo sapien
tttatgcgagggcagtctttgggat

SEQ ID NO: 1977051 - DNA, 25 bp, Homo sapien
tgctgaatgtgggagagtttatgcg

SEQ ID NO: 1977052 - DNA, 25 bp, Homo sapien
tgagaatgactgatctggcagcatc

SEQ ID NO: 1977053 - DNA, 25 bp, Homo sapien
ggcagcatcccctgggtgctgaatg

SEQ ID NO: 1977054 - DNA, 25 bp, Homo sapien
tcaggcatttgaaaagctccatcag

SEQ ID NO: 1977055 - DNA, 25 bp, Homo sapien
tgggagcaaggtgagcctttcaggc

SEQ ID NO: 1977056 - DNA, 25 bp, Homo sapien
aggtgagcctttcaggcatttgaaa

SEQ ID NO: 1977057 - DNA, 25 bp, Homo sapien
tgaaaagctccatcaggttttcggg

SEQ ID NO: 1977058 - DNA, 25 bp, Homo sapien
ctgagttacttggtatttgtacctg

SEQ ID NO: 1977059 - DNA, 25 bp, Homo sapien
tacttggtatttgtacctgtgtagc

SEQ ID NO: 1977060 - DNA, 25 bp, Homo sapien
tacctgtgtagctttagaatcgagt

SEQ ID NO: 1977061 - DNA, 25 bp, Homo sapien
acctgtgtagctttagaatcgagtc

SEQ ID NO: 1977062 - DNA, 25 bp, Homo sapien
gaggcaggattgtgtgcctctgcat

SEQ ID NO: 1977063 - DNA, 25 bp, Homo sapien
gacggaggcaggattgtgtgcctct

SEQ ID NO: 1977064 - DNA, 25 bp, Homo sapien
cggaggcaggattgtgtgcctctgc

SEQ ID NO: 1977065 - DNA, 25 bp, Homo sapien
ctgacggaggcaggattgtgtgcct

SEQ ID NO: 1977066 - DNA, 25 bp, Homo sapien
tcataaatccctggtcccaggctgc

SEQ ID NO: 1977067 - DNA, 25 bp, Homo sapien
agcggcccatcataaatccctggtc

SEQ ID NO: 1977068 - DNA, 25 bp, Homo sapien
gccacagcggcccatcataaatccc

SEQ ID NO: 1977069 - DNA, 25 bp, Homo sapien
tttcagaggctctgctttttcatca

SEQ ID NO: 1977070 - DNA, 25 bp, Homo sapien
cctcctcgtcctcaggtcaccagta

SEQ ID NO: 1977071 - DNA, 25 bp, Homo sapien
ggcaccctcctcgtcctcaggtcac

SEQ ID NO: 1977072 - DNA, 25 bp, Homo sapien
tcctcgtcctcaggtcaccagtatc

SEQ ID NO: 1977073 - DNA, 25 bp, Homo sapien
accctcctcgtcctcaggtcaccag

SEQ ID NO: 1977074 - DNA, 25 bp, Homo sapien
ccgaagcatccccagtcccgggtga

SEQ ID NO: 1977075 - DNA, 25 bp, Homo sapien
cccgaagcatccccagtcccgggtg

SEQ ID NO: 1977076 - DNA, 25 bp, Homo sapien
tcctgttgccaaggtggcccccaag

SEQ ID NO: 1977077 - DNA, 25 bp, Homo sapien
gtcctgttgccaaggtggcccccaa

SEQ ID NO: 1977078 - DNA, 25 bp, Homo sapien
gtacagccacagctctatctgtcct

SEQ ID NO: 1977079 - DNA, 25 bp, Homo sapien
tcaggttgaaaatcacacaggatgg

SEQ ID NO: 1977080 - DNA, 25 bp, Homo sapien
gggatcaggttgaaaatcacacagg

SEQ ID NO: 1977081 - DNA, 25 bp, Homo sapien
agagctctctccttgggcaaaagcc

SEQ ID NO: 1977082 - DNA, 25 bp, Homo sapien
gagctctctccttgggcaaaagcca

SEQ ID NO: 1977083 - DNA, 25 bp, Homo sapien
ctgcgtgtgcaccacgggccgcggg

SEQ ID NO: 1977084 - DNA, 25 bp, Homo sapien
gtctgtctccagccgtgactgcgcg

SEQ ID NO: 1977085 - DNA, 25 bp, Homo sapien
tgcgcgccgcggctgtgtctgtctc

SEQ ID NO: 1977086 - DNA, 25 bp, Homo sapien
tgtcccgcctccagtcgccggaggg

SEQ ID NO: 1977087 - DNA, 25 bp, Homo sapien
tccgcagcctcagcgcggggagaga

SEQ ID NO: 1977088 - DNA, 25 bp, Homo sapien
ggaggcggggactgcccgcagtgcg

SEQ ID NO: 1977089 - DNA, 25 bp, Homo sapien
gggactgcccgcagtgcggctccgc

SEQ ID NO: 1977090 - DNA, 25 bp, Homo sapien
gcggggactgcccgcagtgcggctc

SEQ ID NO: 1977091 - DNA, 25 bp, Homo sapien
gaggcggggactgcccgcagtgcgg

SEQ ID NO: 1977092 - DNA, 25 bp, Homo sapien
gccgggctgggtgcttgtcgcttcc

SEQ ID NO: 1977093 - DNA, 25 bp, Homo sapien
gaaattcaacacacgcctgcttcct

SEQ ID NO: 1977094 - DNA, 25 bp, Homo sapien
ggccgggctgggtgcttgtcgcttc

SEQ ID NO: 1977095 - DNA, 25 bp, Homo sapien
agagaaattcaacacacgcctgctt

SEQ ID NO: 1977096 - DNA, 25 bp, Homo sapien
tctgtgtcctcgttaagtggagtct

SEQ ID NO: 1977097 - DNA, 25 bp, Homo sapien
tcgcagctgccaatcaagggagaaa

SEQ ID NO: 1977098 - DNA, 25 bp, Homo sapien
gaggactttttgcataccctttaga

SEQ ID NO: 1977099 - DNA, 25 bp, Homo sapien
tttgtccgggaaagctcgcagctgc

SEQ ID NO: 1977100 - DNA, 25 bp, Homo sapien
ctatcgtagacaatttgttctcagt

SEQ ID NO: 1977101 - DNA, 25 bp, Homo sapien
atcgtagacaatttgttctcagtgt

SEQ ID NO: 1977102 - DNA, 25 bp, Homo sapien
tatcgtagacaatttgttctcagtg

SEQ ID NO: 1977103 - DNA, 25 bp, Homo sapien
atgatgcagtcaccccgtggcagct

SEQ ID NO: 1977104 - DNA, 25 bp, Homo sapien
ctcctcggtgggtccaatggggaca

SEQ ID NO: 1977105 - DNA, 25 bp, Homo sapien
ggctggcgctgcagcctggacgctg

SEQ ID NO: 1977106 - DNA, 25 bp, Homo sapien
gaatcgtcccaaggacaccacggat

SEQ ID NO: 1977107 - DNA, 25 bp, Homo sapien
catggaccagaaagaggagcctagg

SEQ ID NO: 1977108 - DNA, 25 bp, Homo sapien
gtcaggattcgccctggagggttca

SEQ ID NO: 1977109 - DNA, 25 bp, Homo sapien
tggagggttcagatagcatggacca

SEQ ID NO: 1977110 - DNA, 25 bp, Homo sapien
ctgtgtcaggattcgccctggaggg

SEQ ID NO: 1977111 - DNA, 25 bp, Homo sapien
gaactcgaagacgatgctgcccgtg

SEQ ID NO: 1977112 - DNA, 25 bp, Homo sapien
tcttctcaagcaaaaccggtccaga

SEQ ID NO: 1977113 - DNA, 25 bp, Homo sapien
catctatacgcctctgaactcgaag

SEQ ID NO: 1977114 - DNA, 25 bp, Homo sapien
gaaagaaccttcactcatccctgca

SEQ ID NO: 1977115 - DNA, 25 bp, Homo sapien
gatgagagcaggcccctgcggtggc

SEQ ID NO: 1977116 - DNA, 25 bp, Homo sapien
cagggaggagatgagagcaggcccc

SEQ ID NO: 1977117 - DNA, 25 bp, Homo sapien
tgcggtggccccagcctgcaccgta

SEQ ID NO: 1977118 - DNA, 25 bp, Homo sapien
gcctgcaccgtactcgcgccacact

SEQ ID NO: 1977119 - DNA, 25 bp, Homo sapien
gcttccacttggaacgcaagcaggg

SEQ ID NO: 1977120 - DNA, 25 bp, Homo sapien
gcagcacgaggtgacatagaggctt

SEQ ID NO: 1977121 - DNA, 25 bp, Homo sapien
tgaagtcaacttgcatccacagccg

SEQ ID NO: 1977122 - DNA, 25 bp, Homo sapien
cagccacagcggaagagtcagagct

SEQ ID NO: 1977123 - DNA, 25 bp, Homo sapien
tgctgccagcttcgggtccggagct

SEQ ID NO: 1977124 - DNA, 25 bp, Homo sapien
gttcggacgagcatcacagctggca

SEQ ID NO: 1977125 - DNA, 25 bp, Homo sapien
gccagcagacgtggcagccttctct

SEQ ID NO: 1977126 - DNA, 25 bp, Homo sapien
ccttggtcatgaggacgctggctcc

SEQ ID NO: 1977127 - DNA, 25 bp, Homo sapien
ccatcaccgaagtaggtctggagtc

SEQ ID NO: 1977128 - DNA, 25 bp, Homo sapien
ggtccccagaagtacccatggcaaa

SEQ ID NO: 1977129 - DNA, 25 bp, Homo sapien
gaacagggaccctacaactggcatg

SEQ ID NO: 1977130 - DNA, 25 bp, Homo sapien
caatgagtttctatgtccaaggcca

SEQ ID NO: 1977131 - DNA, 25 bp, Homo sapien
cattagaaaataacggtgcgcacgc

SEQ ID NO: 1977132 - DNA, 25 bp, Homo sapien
cactgagttcctggtccatgaggag

SEQ ID NO: 1977133 - DNA, 25 bp, Homo sapien
tgagctttcagcaagttgaccctgc

SEQ ID NO: 1977134 - DNA, 25 bp, Homo sapien
atgcacagggcagcacggacctcta

SEQ ID NO: 1977135 - DNA, 25 bp, Homo sapien
tccagcaggagtaattacggcgcag

SEQ ID NO: 1977136 - DNA, 25 bp, Homo sapien
aataccggctttcagcaggaggccc

SEQ ID NO: 1977137 - DNA, 25 bp, Homo sapien
tactatgtgctaggcgctctggagg

SEQ ID NO: 1977138 - DNA, 25 bp, Homo sapien
tgatgacgcgtgtgagaaacccgcc

SEQ ID NO: 1977139 - DNA, 25 bp, Homo sapien
ctgcccctcacctgcaggccaccag

SEQ ID NO: 1977140 - DNA, 25 bp, Homo sapien
agggccctgcccctcacctgcaggc

SEQ ID NO: 1977141 - DNA, 25 bp, Homo sapien
ccctcacctgcaggccaccagctgc

SEQ ID NO: 1977142 - DNA, 25 bp, Homo sapien
caggtggcagagctgcaagggccct

SEQ ID NO: 1977143 - DNA, 25 bp, Homo sapien
tgtgcgtgcgtggagggtgctgcca

SEQ ID NO: 1977144 - DNA, 25 bp, Homo sapien
gccaggcacaaactttgcagaccct

SEQ ID NO: 1977145 - DNA, 25 bp, Homo sapien
taagaccaccttcattcacacgaca

SEQ ID NO: 1977146 - DNA, 25 bp, Homo sapien
agggctgggcccctcactaagacca

SEQ ID NO: 1977147 - DNA, 25 bp, Homo sapien
ctgccagggcaaaggaggacactgg

SEQ ID NO: 1977148 - DNA, 25 bp, Homo sapien
agggcaaaggaggacactgggcatc

SEQ ID NO: 1977149 - DNA, 25 bp, Homo sapien
tgggcatccagaggtgacactggac

SEQ ID NO: 1977150 - DNA, 25 bp, Homo sapien
ggacactgggcatccagaggtgaca

SEQ ID NO: 1977151 - DNA, 25 bp, Homo sapien
catcttatggggtggtcgctgtgcc

SEQ ID NO: 1977152 - DNA, 25 bp, Homo sapien
tggggtggtcgctgtgcccacacca

SEQ ID NO: 1977153 - DNA, 25 bp, Homo sapien
cacaccagccaataacctgcacagg

SEQ ID NO: 1977154 - DNA, 25 bp, Homo sapien
caattgctacatcacatcttatggg

SEQ ID NO: 1977155 - DNA, 25 bp, Homo sapien
tgccagagatgctccgatacccaga

SEQ ID NO: 1977156 - DNA, 25 bp, Homo sapien
catctgagggccaaagggtgaatac

SEQ ID NO: 1977157 - DNA, 25 bp, Homo sapien
tcctgttcagtgacatctgagggcc

SEQ ID NO: 1977158 - DNA, 25 bp, Homo sapien
gggtgaatacaacctgtgccagaga

SEQ ID NO: 1977159 - DNA, 25 bp, Homo sapien
tgcggcctcggctctagggctgggc

SEQ ID NO: 1977160 - DNA, 25 bp, Homo sapien
caggtctgcattgactcatctgagt

SEQ ID NO: 1977161 - DNA, 25 bp, Homo sapien
cactgggcactcagtgagtaccagc

SEQ ID NO: 1977162 - DNA, 25 bp, Homo sapien
tggattcctgggatgccccgtatcg

SEQ ID NO: 1977163 - DNA, 25 bp, Homo sapien
tatcgatggagaaattcgggcacag

SEQ ID NO: 1977164 - DNA, 25 bp, Homo sapien
tgtgttagctgcaatcccgtgccct

SEQ ID NO: 1977165 - DNA, 25 bp, Homo sapien
gaagttcagttaccacccaatcatg

SEQ ID NO: 1977166 - DNA, 25 bp, Homo sapien
gctgtgtctcaagctcggaacatga

SEQ ID NO: 1977167 - DNA, 25 bp, Homo sapien
gaaacgctggcagtgacttaacaag

SEQ ID NO: 1977168 - DNA, 25 bp, Homo sapien
cattccaagggaacagctaaagggc

SEQ ID NO: 1977169 - DNA, 25 bp, Homo sapien
ttgcatgtgctgactccctaagaga

SEQ ID NO: 1977170 - DNA, 25 bp, Homo sapien
tggacactgccaaacaatggccttg

SEQ ID NO: 1977171 - DNA, 25 bp, Homo sapien
gagttctcggaaatggcccaacagg

SEQ ID NO: 1977172 - DNA, 25 bp, Homo sapien
agaaactgatgggagttctcggaaa

SEQ ID NO: 1977173 - DNA, 25 bp, Homo sapien
caacaggaggtttgatgtcacgaac

SEQ ID NO: 1977174 - DNA, 25 bp, Homo sapien
tgtcacgaacgtagagcttgaaccg

SEQ ID NO: 1977175 - DNA, 25 bp, Homo sapien
gagggcgagattggagacaggatct

SEQ ID NO: 1977176 - DNA, 25 bp, Homo sapien
tcaaatttctgtgctcaagcgatac

SEQ ID NO: 1977177 - DNA, 25 bp, Homo sapien
gaggggggtggagggcgagattgga

SEQ ID NO: 1977178 - DNA, 25 bp, Homo sapien
aaatttctgtgctcaagcgatactc

SEQ ID NO: 1977179 - DNA, 25 bp, Homo sapien
atgactcaccttgcagagtgacttc

SEQ ID NO: 1977180 - DNA, 25 bp, Homo sapien
tcaccttgcagagtgacttctgcat

SEQ ID NO: 1977181 - DNA, 25 bp, Homo sapien
cttgcagagtgaccacggtctgcgg

SEQ ID NO: 1977182 - DNA, 25 bp, Homo sapien
tggccccatgactcaccttgcagag

SEQ ID NO: 1977183 - DNA, 25 bp, Homo sapien
gtggggctgctaccgtggccccgtg

SEQ ID NO: 1977184 - DNA, 25 bp, Homo sapien
agagtgaccacggtctgtggggctg

SEQ ID NO: 1977185 - DNA, 25 bp, Homo sapien
tgtggggctgctaccgtggccccgt

SEQ ID NO: 1977186 - DNA, 25 bp, Homo sapien
ttgcagagtgaccacggtctgtggg

SEQ ID NO: 1977187 - DNA, 25 bp, Homo sapien
gacagtctatgagcacagcaaggtg

SEQ ID NO: 1977188 - DNA, 25 bp, Homo sapien
ctgaagcacccaagccagtgaatga

SEQ ID NO: 1977189 - DNA, 25 bp, Homo sapien
gaatgaggagagtaatctggcctgc

SEQ ID NO: 1977190 - DNA, 25 bp, Homo sapien
tgctgtttgccacgtgccactgaag

SEQ ID NO: 1977191 - DNA, 25 bp, Homo sapien
tgaactcgtggaatccgcatggcct

SEQ ID NO: 1977192 - DNA, 25 bp, Homo sapien
gcatggcctccgtcatcgtctcatt

SEQ ID NO: 1977193 - DNA, 25 bp, Homo sapien
tcctgggacgtggtgctcgagcccc

SEQ ID NO: 1977194 - DNA, 25 bp, Homo sapien
gttcacagcattcctgggacgtggt

SEQ ID NO: 1977195 - DNA, 25 bp, Homo sapien
gacctggtattaaagtgctcctctg

SEQ ID NO: 1977196 - DNA, 25 bp, Homo sapien
catgcaatgcggaaacacggagagg

SEQ ID NO: 1977197 - DNA, 25 bp, Homo sapien
cctatgtgatccctaaggttggaca

SEQ ID NO: 1977198 - DNA, 25 bp, Homo sapien
cagaagcctgtgagcctgactccta

SEQ ID NO: 1977199 - DNA, 25 bp, Homo sapien
gcagcagtgaagagccctctctaca

SEQ ID NO: 1977200 - DNA, 25 bp, Homo sapien
tgtgatgtaaaaagtctgcaaccgg

SEQ ID NO: 1977201 - DNA, 25 bp, Homo sapien
taggctgtcctaatatcaagtgtga

SEQ ID NO: 1977202 - DNA, 25 bp, Homo sapien
gctccaccgcctaggaaggctggga

SEQ ID NO: 1977203 - DNA, 25 bp, Homo sapien
tccgggtatctctaccgggacaggc

SEQ ID NO: 1977204 - DNA, 25 bp, Homo sapien
caccccgaaataagccaggagaagg

SEQ ID NO: 1977205 - DNA, 25 bp, Homo sapien
tgccttattgcaggcctcccttggg

SEQ ID NO: 1977206 - DNA, 25 bp, Homo sapien
tgctggcaccgggtgccttattgca

SEQ ID NO: 1977207 - DNA, 25 bp, Homo sapien
caggtgccacgggttcagcgctggg

SEQ ID NO: 1977208 - DNA, 25 bp, Homo sapien
gttcagcgctgggacgcgctgccgg

SEQ ID NO: 1977209 - DNA, 25 bp, Homo sapien
gccacgggttcagcgctgggacgcg

SEQ ID NO: 1977210 - DNA, 25 bp, Homo sapien
cgggttcagcgctgggacgcgctgc

SEQ ID NO: 1977211 - DNA, 25 bp, Homo sapien
agccccactccagcggccgctgagg

SEQ ID NO: 1977212 - DNA, 25 bp, Homo sapien
catagtgcggagacacacatgctcc

SEQ ID NO: 1977213 - DNA, 25 bp, Homo sapien
agcggccgctgagggcatagtgcgg

SEQ ID NO: 1977214 - DNA, 25 bp, Homo sapien
tcagctgcagggcacacacgagccc

SEQ ID NO: 1977215 - DNA, 25 bp, Homo sapien
gaaacgtggtcgttttgtgccacca

SEQ ID NO: 1977216 - DNA, 25 bp, Homo sapien
cgtgcaagttcagctgaagagatga

SEQ ID NO: 1977217 - DNA, 25 bp, Homo sapien
gacaaggtgagcttccgtctctgca

SEQ ID NO: 1977218 - DNA, 25 bp, Homo sapien
tgagcatgacagaaacgtggtcgtt

SEQ ID NO: 1977219 - DNA, 25 bp, Homo sapien
ggttctccttcacagcgttattatc

SEQ ID NO: 1977220 - DNA, 25 bp, Homo sapien
tgaccttctctctatcagggttctc

SEQ ID NO: 1977221 - DNA, 25 bp, Homo sapien
ttattatcctttccatagaacgccg

SEQ ID NO: 1977222 - DNA, 25 bp, Homo sapien
gtttcgggtttgatagctctcacag

SEQ ID NO: 1977223 - DNA, 25 bp, Homo sapien
tcatccggctcatgaattcccaagg

SEQ ID NO: 1977224 - DNA, 25 bp, Homo sapien
ggctcatgaattcccaaggccactt

SEQ ID NO: 1977225 - DNA, 25 bp, Homo sapien
catcatccggctcatgaattcccaa

SEQ ID NO: 1977226 - DNA, 25 bp, Homo sapien
tccggctcatgaattcccaaggcca

SEQ ID NO: 1977227 - DNA, 25 bp, Homo sapien
tcctgaagcattgttaagagactgc

SEQ ID NO: 1977228 - DNA, 25 bp, Homo sapien
tgcccgcacagctctattatctgtc

SEQ ID NO: 1977229 - DNA, 25 bp, Homo sapien
gagactgcgctatcgttccattgac

SEQ ID NO: 1977230 - DNA, 25 bp, Homo sapien
gttccattgacagtttgaagttcag

SEQ ID NO: 1977231 - DNA, 25 bp, Homo sapien
tcctgtggtcctttaagtatataca

SEQ ID NO: 1977232 - DNA, 25 bp, Homo sapien
tcctgaagttttgatgtgtgagcca

SEQ ID NO: 1977233 - DNA, 25 bp, Homo sapien
gccttagcatcctgaagttttgatg

SEQ ID NO: 1977234 - DNA, 25 bp, Homo sapien
gctcactacagtctggaacttctag

SEQ ID NO: 1977235 - DNA, 25 bp, Homo sapien
caattaaagtccagatgctgtgccc

SEQ ID NO: 1977236 - DNA, 25 bp, Homo sapien
cccacagagggagtcaagcagaaaa

SEQ ID NO: 1977237 - DNA, 25 bp, Homo sapien
atttcgaggccccatgtcccttggg

SEQ ID NO: 1977238 - DNA, 25 bp, Homo sapien
tctctttaaaagtgagcccatgtcc

SEQ ID NO: 1977239 - DNA, 25 bp, Homo sapien
ccatcttggagctatctacgggctg

SEQ ID NO: 1977240 - DNA, 25 bp, Homo sapien
caatcttctagtaatgccttggtct

SEQ ID NO: 1977241 - DNA, 25 bp, Homo sapien
tatatggtcataattgattacatca

SEQ ID NO: 1977242 - DNA, 25 bp, Homo sapien
gccacccatcagtcggtcattaaaa

SEQ ID NO: 1977243 - DNA, 25 bp, Homo sapien
tctggctgacaagctataaatcggg

SEQ ID NO: 1977244 - DNA, 25 bp, Homo sapien
gaagtcttctgagagcaaatgtggg

SEQ ID NO: 1977245 - DNA, 25 bp, Homo sapien
aagactaccctcaacttgtgacctg

SEQ ID NO: 1977246 - DNA, 25 bp, Homo sapien
tcacacaggttgttggctcagtccc

SEQ ID NO: 1977247 - DNA, 25 bp, Homo sapien
taaaacttaatgaggcaatcgcctt

SEQ ID NO: 1977248 - DNA, 25 bp, Homo sapien
gagcataagacagaataggtattgc

SEQ ID NO: 1977249 - DNA, 25 bp, Homo sapien
gacgaatactccctagaatgttgct

SEQ ID NO: 1977250 - DNA, 25 bp, Homo sapien
ggtagaatatgaactagaagagatc

SEQ ID NO: 1977251 - DNA, 25 bp, Homo sapien
ccctgaaagacacggctgtagtcca

SEQ ID NO: 1977252 - DNA, 25 bp, Homo sapien
acaccctgaaagacacggctgtagt

SEQ ID NO: 1977253 - DNA, 25 bp, Homo sapien
accatcagcaaaagcatgcttgaag

SEQ ID NO: 1977254 - DNA, 25 bp, Homo sapien
aagcatgcttgaaggtgaagaacac

SEQ ID NO: 1977255 - DNA, 25 bp, Homo sapien
caaaaatatgtggccactttgctca

SEQ ID NO: 1977256 - DNA, 25 bp, Homo sapien
tgcaatggaaagtagtccctaaaat

SEQ ID NO: 1977257 - DNA, 25 bp, Homo sapien
aaacaaccagtggaaagcatcattt

SEQ ID NO: 1977258 - DNA, 25 bp, Homo sapien
gctcccctggactcaccgttgtctt

SEQ ID NO: 1977259 - DNA, 25 bp, Homo sapien
gaatctgcccatcgatcctgtttat

SEQ ID NO: 1977260 - DNA, 25 bp, Homo sapien
ccaacaacttgaatctgcccatcga

SEQ ID NO: 1977261 - DNA, 25 bp, Homo sapien
cttgaatctgcccatcgatcctgtt

SEQ ID NO: 1977262 - DNA, 25 bp, Homo sapien
gcccatcgatcctgtttatgaccaa

SEQ ID NO: 1977263 - DNA, 25 bp, Homo sapien
tttctacctcctgacttgagtggtg

SEQ ID NO: 1977264 - DNA, 25 bp, Homo sapien
gagccaatgcgcctgacctaaaaga

SEQ ID NO: 1977265 - DNA, 25 bp, Homo sapien
gattaaactatagctcaaatttgga

SEQ ID NO: 1977266 - DNA, 25 bp, Homo sapien
tctacagtgctacatcttctaaatc

SEQ ID NO: 1977267 - DNA, 25 bp, Homo sapien
gtggcccacctacagctcacagtct

SEQ ID NO: 1977268 - DNA, 25 bp, Homo sapien
tctgtggcccacctacagctcacag

SEQ ID NO: 1977269 - DNA, 25 bp, Homo sapien
ctgtggcccacctacagctcacagt

SEQ ID NO: 1977270 - DNA, 25 bp, Homo sapien
tgtggcccacctacagctcacagtc

SEQ ID NO: 1977271 - DNA, 25 bp, Homo sapien
tcgctggctgcgctgtaataccaca

SEQ ID NO: 1977272 - DNA, 25 bp, Homo sapien
gcaaggccagcttggtggagattcc

SEQ ID NO: 1977273 - DNA, 25 bp, Homo sapien
tccaaagtggctccgagatgtgatg

SEQ ID NO: 1977274 - DNA, 25 bp, Homo sapien
agtttgactacaacctccctgaggg

SEQ ID NO: 1977275 - DNA, 25 bp, Homo sapien
tccagccctaacacctgcatgggtg

SEQ ID NO: 1977276 - DNA, 25 bp, Homo sapien
gatgtcatccagaacccctacaaga

SEQ ID NO: 1977277 - DNA, 25 bp, Homo sapien
tgttgcaactgtcccttctcagctg

SEQ ID NO: 1977278 - DNA, 25 bp, Homo sapien
ttctcagctgtcagcacggcctcac

SEQ ID NO: 1977279 - DNA, 25 bp, Homo sapien
cttgtactgcacaactcagcagcac

SEQ ID NO: 1977280 - DNA, 25 bp, Homo sapien
tgctttagttacttgtactgcacaa

SEQ ID NO: 1977281 - DNA, 25 bp, Homo sapien
tagttacttgtactgcacaactcag

SEQ ID NO: 1977282 - DNA, 25 bp, Homo sapien
cagctgctttagttacttgtactgc

SEQ ID NO: 1977283 - DNA, 25 bp, Homo sapien
cctccactggttgtaacggagtggg

SEQ ID NO: 1977284 - DNA, 25 bp, Homo sapien
ttccacctccactggttgtaacgga

SEQ ID NO: 1977285 - DNA, 25 bp, Homo sapien
ccacagcggttctgactctgtgtga

SEQ ID NO: 1977286 - DNA, 25 bp, Homo sapien
tgtgaaccaaaatcatctgaggagt

SEQ ID NO: 1977287 - DNA, 25 bp, Homo sapien
ggctcggctgtctcctctcggtata

SEQ ID NO: 1977288 - DNA, 25 bp, Homo sapien
tggagtgccccacgcagttcaatgc

SEQ ID NO: 1977289 - DNA, 25 bp, Homo sapien
tgagcatacagtgcacctccaaaac

SEQ ID NO: 1977290 - DNA, 25 bp, Homo sapien
tcggcacactccttgacagcagatg

SEQ ID NO: 1977291 - DNA, 25 bp, Homo sapien
gtgcacacctcacatgcccacagtg

SEQ ID NO: 1977292 - DNA, 25 bp, Homo sapien
gtaggcaaggctgtgcataactgca

SEQ ID NO: 1977293 - DNA, 25 bp, Homo sapien
tcagagttgctttcggtgggaaagc

SEQ ID NO: 1977294 - DNA, 25 bp, Homo sapien
ggaaagctgctttatgcctatgatt

SEQ ID NO: 1977295 - DNA, 25 bp, Homo sapien
acctgcacgcgggtgctccttgtcc

SEQ ID NO: 1977296 - DNA, 25 bp, Homo sapien
ggccctcaggccctcagaacacggg

SEQ ID NO: 1977297 - DNA, 25 bp, Homo sapien
agcatcctgcagggtcgcacctgca

SEQ ID NO: 1977298 - DNA, 25 bp, Homo sapien
gccctcagaacacgggcgcccctgg

SEQ ID NO: 1977299 - DNA, 25 bp, Homo sapien
agccgtccagccagggcgcggaggc

SEQ ID NO: 1977300 - DNA, 25 bp, Homo sapien
gccgtccagccagggcgcggaggcc

SEQ ID NO: 1977301 - DNA, 25 bp, Homo sapien
cgtccagccagggcgcggaggccat

SEQ ID NO: 1977302 - DNA, 25 bp, Homo sapien
tcagccgtccagccagggcgcggag

SEQ ID NO: 1977303 - DNA, 25 bp, Homo sapien
aagtccatcgctctgctgggccggc

SEQ ID NO: 1977304 - DNA, 25 bp, Homo sapien
cgggcggtacctgggtgtggcacct

SEQ ID NO: 1977305 - DNA, 25 bp, Homo sapien
tagcctgtccaagtccatcgctctg

SEQ ID NO: 1977306 - DNA, 25 bp, Homo sapien
ggcctctgggagcatccgcggccca

SEQ ID NO: 1977307 - DNA, 25 bp, Homo sapien
caactcttgcgctgtcccgtcgagg

SEQ ID NO: 1977308 - DNA, 25 bp, Homo sapien
ttgcgctgtcccgtcgaggaagccg

SEQ ID NO: 1977309 - DNA, 25 bp, Homo sapien
gggcgaggctcaggtcacttccatc

SEQ ID NO: 1977310 - DNA, 25 bp, Homo sapien
cccggacaagcctgtgctccaactc

SEQ ID NO: 1977311 - DNA, 25 bp, Homo sapien
agcatttgtggcctgaaaaccagct

SEQ ID NO: 1977312 - DNA, 25 bp, Homo sapien
ttgtggcctgaaaaccagcttccgg

SEQ ID NO: 1977313 - DNA, 25 bp, Homo sapien
tgaaagcatttgtggcctgaaaacc

SEQ ID NO: 1977314 - DNA, 25 bp, Homo sapien
tggcctgaaaaccagcttccggcat

SEQ ID NO: 1977315 - DNA, 25 bp, Homo sapien
gcttcccagactttaaagtgagcca

SEQ ID NO: 1977316 - DNA, 25 bp, Homo sapien
cacctaggatcttgtgaggatgaga

SEQ ID NO: 1977317 - DNA, 25 bp, Homo sapien
tagcaggtctaggtgatgccaagac

SEQ ID NO: 1977318 - DNA, 25 bp, Homo sapien
gaccaattaaacctcagtctctgag

SEQ ID NO: 1977319 - DNA, 25 bp, Homo sapien
tcaagatagcatccctccaaaaggg

SEQ ID NO: 1977320 - DNA, 25 bp, Homo sapien
caactcggttctgaaggaaacgcca

SEQ ID NO: 1977321 - DNA, 25 bp, Homo sapien
cacatatgcgaaagcacctgccgtg

SEQ ID NO: 1977322 - DNA, 25 bp, Homo sapien
gcagaatgacaaacgccagtgaggt

SEQ ID NO: 1977323 - DNA, 25 bp, Homo sapien
tgaaagtcaataaccgctaacgccg

SEQ ID NO: 1977324 - DNA, 25 bp, Homo sapien
tatgtgacatggatgagctgcccca

SEQ ID NO: 1977325 - DNA, 25 bp, Homo sapien
cagaacaattcatcatgcagggaca

SEQ ID NO: 1977326 - DNA, 25 bp, Homo sapien
cagtgcccagcgtaaaattcaatga

SEQ ID NO: 1977327 - DNA, 25 bp, Homo sapien
gccagtcccagccactctcaatcat

SEQ ID NO: 1977328 - DNA, 25 bp, Homo sapien
ccgccagtcccagccactctcaatc

SEQ ID NO: 1977329 - DNA, 25 bp, Homo sapien
cgtcccgccagtcccagccactctc

SEQ ID NO: 1977330 - DNA, 25 bp, Homo sapien
tcccgccagtcccagccactctcaa

SEQ ID NO: 1977331 - DNA, 25 bp, Homo sapien
gggacagggcgcatccagatggcct

SEQ ID NO: 1977332 - DNA, 25 bp, Homo sapien
ccccgggacagggcgcatccagatg

SEQ ID NO: 1977333 - DNA, 25 bp, Homo sapien
gcctccccgggacagggcgcatcca

SEQ ID NO: 1977334 - DNA, 25 bp, Homo sapien
cgggacagggcgcatccagatggcc

SEQ ID NO: 1977335 - DNA, 25 bp, Homo sapien
cagaagcggcagaatctgaaaatac

SEQ ID NO: 1977336 - DNA, 25 bp, Homo sapien
caacaacgctcaaggaagggttcca

SEQ ID NO: 1977337 - DNA, 25 bp, Homo sapien
gacacacctcaacaacgctcaagga

SEQ ID NO: 1977338 - DNA, 25 bp, Homo sapien
cagctctctgagacattcgtccaga

SEQ ID NO: 1977339 - DNA, 25 bp, Homo sapien
tccgagtgtcccgtgcacatctcca

SEQ ID NO: 1977340 - DNA, 25 bp, Homo sapien
tctgttgagcatccggcctccgagt

SEQ ID NO: 1977341 - DNA, 25 bp, Homo sapien
gagtgtcccgtgcacatctccacgc

SEQ ID NO: 1977342 - DNA, 25 bp, Homo sapien
cggcctccgagtgtcccgtgcacat

SEQ ID NO: 1977343 - DNA, 25 bp, Homo sapien
gcagctgcgtcgtgaaggcacagcc

SEQ ID NO: 1977344 - DNA, 25 bp, Homo sapien
gctgtgtccacgtgggacagcgtcc

SEQ ID NO: 1977345 - DNA, 25 bp, Homo sapien
agctcctctgattgcagctgcgtcg

SEQ ID NO: 1977346 - DNA, 25 bp, Homo sapien
acgacaataaaagtgcagcgcccag

SEQ ID NO: 1977347 - DNA, 25 bp, Homo sapien
tgcccggccgcatcttaatataaat

SEQ ID NO: 1977348 - DNA, 25 bp, Homo sapien
catgcccggccgcatcttaatataa

SEQ ID NO: 1977349 - DNA, 25 bp, Homo sapien
tgcagcctcaaacttgaagtcacaa

SEQ ID NO: 1977350 - DNA, 25 bp, Homo sapien
caaacttgaagtcacaagtgatcct

SEQ ID NO: 1977351 - DNA, 25 bp, Homo sapien
tgatcctcccacctcagcttcccaa

SEQ ID NO: 1977352 - DNA, 25 bp, Homo sapien
agcctcaaacttgaagtcacaagtg

SEQ ID NO: 1977353 - DNA, 25 bp, Homo sapien
cctccgtggataagtggtgtctacc

SEQ ID NO: 1977354 - DNA, 25 bp, Homo sapien
gaggagttcacttctggcacaacca

SEQ ID NO: 1977355 - DNA, 25 bp, Homo sapien
cagcactgtcagcaccttaaacgag

SEQ ID NO: 1977356 - DNA, 25 bp, Homo sapien
tgagaggctccctataaggatggcg

SEQ ID NO: 1977357 - DNA, 25 bp, Homo sapien
taggagactaggcacaggtctaagg

SEQ ID NO: 1977358 - DNA, 25 bp, Homo sapien
cacaggtctaaggagtcagtgactg

SEQ ID NO: 1977359 - DNA, 25 bp, Homo sapien
tcagtgactgcagcataggcacggc

SEQ ID NO: 1977360 - DNA, 25 bp, Homo sapien
tctgaagggcacgttttttcctgca

SEQ ID NO: 1977361 - DNA, 25 bp, Homo sapien
ggagagcatgtcaccaaggttgagc

SEQ ID NO: 1977362 - DNA, 25 bp, Homo sapien
ggattaacccagagcctgctagact

SEQ ID NO: 1977363 - DNA, 25 bp, Homo sapien
caatgcaggctaagttgtgcccagc

SEQ ID NO: 1977364 - DNA, 25 bp, Homo sapien
cagctttccgcctctgctagttgga

SEQ ID NO: 1977365 - DNA, 25 bp, Homo sapien
gccattaaatattacagctgtataa

SEQ ID NO: 1977366 - DNA, 25 bp, Homo sapien
aatattacagctgtataaatcacac

SEQ ID NO: 1977367 - DNA, 25 bp, Homo sapien
cagagggcccattagtcgtgtaaag

SEQ ID NO: 1977368 - DNA, 25 bp, Homo sapien
ccattagtcgtgtaaagccattaaa

SEQ ID NO: 1977369 - DNA, 25 bp, Homo sapien
ctcctgtcacagacgtccacacaga

SEQ ID NO: 1977370 - DNA, 25 bp, Homo sapien
ctgtcacagacgtccacacagacac

SEQ ID NO: 1977371 - DNA, 25 bp, Homo sapien
cctgtcacagacgtccacacagaca

SEQ ID NO: 1977372 - DNA, 25 bp, Homo sapien
tcctgtcacagacgtccacacagac

SEQ ID NO: 1977373 - DNA, 25 bp, Homo sapien
tagttgcttcaacttaaatggactc

SEQ ID NO: 1977374 - DNA, 25 bp, Homo sapien
gaagtgccccagtaggctgacagct

SEQ ID NO: 1977375 - DNA, 25 bp, Homo sapien
gctctcatctggagccccgacgtgt

SEQ ID NO: 1977376 - DNA, 25 bp, Homo sapien
ggagccccgacgtgtcatattcctc

SEQ ID NO: 1977377 - DNA, 25 bp, Homo sapien
tggagggaggaagtgccccagtagg

SEQ ID NO: 1977378 - DNA, 25 bp, Homo sapien
tttttcctctgaacaacttcagtgc

SEQ ID NO: 1977379 - DNA, 25 bp, Homo sapien
catttttcctctgaacaacttcagt

SEQ ID NO: 1977380 - DNA, 25 bp, Homo sapien
ctctgaacaacttcagtgctccctg

SEQ ID NO: 1977381 - DNA, 25 bp, Homo sapien
ttcctctgaacaacttcagtgctcc

SEQ ID NO: 1977382 - DNA, 25 bp, Homo sapien
aggtgttgacagcagaaacgtgggc

SEQ ID NO: 1977383 - DNA, 25 bp, Homo sapien
gtgttgacagcagaaacgtgggccc

SEQ ID NO: 1977384 - DNA, 25 bp, Homo sapien
cagcagaaacgtgggccccaaaatg

SEQ ID NO: 1977385 - DNA, 25 bp, Homo sapien
ttgacagcagaaacgtgggccccaa

SEQ ID NO: 1977386 - DNA, 25 bp, Homo sapien
aaagcagcatcaatcatgaagcgca

SEQ ID NO: 1977387 - DNA, 25 bp, Homo sapien
attggaggtctgtgggtgatgagga

SEQ ID NO: 1977388 - DNA, 25 bp, Homo sapien
gacagatgtgctttccatgtgtatt

SEQ ID NO: 1977389 - DNA, 25 bp, Homo sapien
atgaagcgcaacaggagctccacgt

SEQ ID NO: 1977390 - DNA, 25 bp, Homo sapien
tgacctcactcaaagacgggctgac

SEQ ID NO: 1977391 - DNA, 25 bp, Homo sapien
gacgggctgacattcccgttcataa

SEQ ID NO: 1977392 - DNA, 25 bp, Homo sapien
accggcctcactggtgacgctctga

SEQ ID NO: 1977393 - DNA, 25 bp, Homo sapien
cgctcagccaacctcggcgtaaagg

SEQ ID NO: 1977394 - DNA, 25 bp, Homo sapien
tatcaacgtgaatccctctgggaac

SEQ ID NO: 1977395 - DNA, 25 bp, Homo sapien
tgttgagtaggctgcgagactgcac

SEQ ID NO: 1977396 - DNA, 25 bp, Homo sapien
tgcaccggcgtgttatcaacgtgaa

SEQ ID NO: 1977397 - DNA, 25 bp, Homo sapien
ctgcagtgcaaggtgcacatgttga

SEQ ID NO: 1977398 - DNA, 25 bp, Homo sapien
aactgacagcatgggaatgccgtgg

SEQ ID NO: 1977399 - DNA, 25 bp, Homo sapien
atgatgcacgcactcactcccctgg

SEQ ID NO: 1977400 - DNA, 25 bp, Homo sapien
tgccgtggggatgatgcacgcactc

SEQ ID NO: 1977401 - DNA, 25 bp, Homo sapien
cagcttttgacagcatgggaactga

SEQ ID NO: 1977402 - DNA, 25 bp, Homo sapien
gagacagttctcttcgtcactgttg

SEQ ID NO: 1977403 - DNA, 25 bp, Homo sapien
tctgttggttacagaccagcgaacc

SEQ ID NO: 1977404 - DNA, 25 bp, Homo sapien
ccagcgaaccaagatacaagcattt

SEQ ID NO: 1977405 - DNA, 25 bp, Homo sapien
gcgggtgctcggtcaccaggagaca

SEQ ID NO: 1977406 - DNA, 25 bp, Homo sapien
gaattaaagtgctcgcattttaaaa

SEQ ID NO: 1977407 - DNA, 25 bp, Homo sapien
aatgagtggaaaagcgatctggaga

SEQ ID NO: 1977408 - DNA, 25 bp, Homo sapien
gttgaaaacaaggaagccctcggca

SEQ ID NO: 1977409 - DNA, 25 bp, Homo sapien
aagtaaaggaggagcccgcagacca

SEQ ID NO: 1977410 - DNA, 25 bp, Homo sapien
cacccgaggctctaaggcttgttca

SEQ ID NO: 1977411 - DNA, 25 bp, Homo sapien
ggatactctgattccgtccaggtgg

SEQ ID NO: 1977412 - DNA, 25 bp, Homo sapien
gagcagcacaccatgaaaggcaggc

SEQ ID NO: 1977413 - DNA, 25 bp, Homo sapien
tcatagacaagagttcgtgggatac

SEQ ID NO: 1977414 - DNA, 25 bp, Homo sapien
ggctgtccttccacaaaaagtcacg

SEQ ID NO: 1977415 - DNA, 25 bp, Homo sapien
ggagagaagctaactgcactggccc

SEQ ID NO: 1977416 - DNA, 25 bp, Homo sapien
tatgcaaatggaagagcgaactctc

SEQ ID NO: 1977417 - DNA, 25 bp, Homo sapien
tcacgtgaagtcaagacacgggctt

SEQ ID NO: 1977418 - DNA, 25 bp, Homo sapien
tctgttttcaaagggcaagataccg

SEQ ID NO: 1977419 - DNA, 25 bp, Homo sapien
gatgactgtccctgtgattcctgca

SEQ ID NO: 1977420 - DNA, 25 bp, Homo sapien
aattagtaaacacgcgacctggtgg

SEQ ID NO: 1977421 - DNA, 25 bp, Homo sapien
caggctgaggctggactcattgcca

SEQ ID NO: 1977422 - DNA, 25 bp, Homo sapien
aaagaagtcatgagaacacgtatga

SEQ ID NO: 1977423 - DNA, 25 bp, Homo sapien
aagaagtcatgagaacacgtatgaa

SEQ ID NO: 1977424 - DNA, 25 bp, Homo sapien
tgtttcaaaataggcgcagagttgc

SEQ ID NO: 1977425 - DNA, 25 bp, Homo sapien
cagagttgctcacatgaataaataa

SEQ ID NO: 1977426 - DNA, 25 bp, Homo sapien
aatttctgcaactcaaggtccttag

SEQ ID NO: 1977427 - DNA, 25 bp, Homo sapien
tccagggattaagaagtggacacct

SEQ ID NO: 1977428 - DNA, 25 bp, Homo sapien
tactttacagttctacaggttggga

SEQ ID NO: 1977429 - DNA, 25 bp, Homo sapien
tcactgggtgaaaatcaaggaggtg

SEQ ID NO: 1977430 - DNA, 25 bp, Homo sapien
catcatctggaaagccagcaatggc

SEQ ID NO: 1977431 - DNA, 25 bp, Homo sapien
tccttggcttgaggccccttcatca

SEQ ID NO: 1977432 - DNA, 25 bp, Homo sapien
gagtttatgcacctctaacgatgag

SEQ ID NO: 1977433 - DNA, 25 bp, Homo sapien
taacgatgagactaggctacgattc

SEQ ID NO: 1977434 - DNA, 25 bp, Homo sapien
gctacgattcatatacttgctgctg

SEQ ID NO: 1977435 - DNA, 25 bp, Homo sapien
gatgtaaatatcctgcacgtgctcc

SEQ ID NO: 1977436 - DNA, 25 bp, Homo sapien
ccagcacgcgtggacacattcatct

SEQ ID NO: 1977437 - DNA, 25 bp, Homo sapien
ggacacattcatctgcacgacagac

SEQ ID NO: 1977438 - DNA, 25 bp, Homo sapien
tcatctgcacgacagacatcatggg

SEQ ID NO: 1977439 - DNA, 25 bp, Homo sapien
cgatcttctgtactagcccagcacg

SEQ ID NO: 1977440 - DNA, 25 bp, Homo sapien
caccttccgcattgatatacgcctt

SEQ ID NO: 1977441 - DNA, 25 bp, Homo sapien
gacagccaccatgactgagcccaca

SEQ ID NO: 1977442 - DNA, 25 bp, Homo sapien
tgatatacgcctttcttgggcgctc

SEQ ID NO: 1977443 - DNA, 25 bp, Homo sapien
tggactcccaccttccgcattgata

SEQ ID NO: 1977444 - DNA, 25 bp, Homo sapien
gtggagattcttggtctcgggcccc

SEQ ID NO: 1977445 - DNA, 25 bp, Homo sapien
tgcttgccctgtaagccatccctgg

SEQ ID NO: 1977446 - DNA, 25 bp, Homo sapien
gggtcaccaattgtttcgtggagat

SEQ ID NO: 1977447 - DNA, 25 bp, Homo sapien
gaaacccggtgtggcatcttcaggg

SEQ ID NO: 1977448 - DNA, 25 bp, Homo sapien
tttccggtgggcagcacccctcttg

SEQ ID NO: 1977449 - DNA, 25 bp, Homo sapien
gccgtgaacagagcactccctggag

SEQ ID NO: 1977450 - DNA, 25 bp, Homo sapien
taacagcgatggagccgtgaacaga

SEQ ID NO: 1977451 - DNA, 25 bp, Homo sapien
ggcctcgcgccatcgtttccggtgg

SEQ ID NO: 1977452 - DNA, 25 bp, Homo sapien
ttaaattccgaaatcacaagatact

SEQ ID NO: 1977453 - DNA, 25 bp, Homo sapien
atttaaattccgaaatcacaagata

SEQ ID NO: 1977454 - DNA, 25 bp, Homo sapien
tttaaattccgaaatcacaagatac

SEQ ID NO: 1977455 - DNA, 25 bp, Homo sapien
tgttgtgagccaatgagggcatgcc

SEQ ID NO: 1977456 - DNA, 25 bp, Homo sapien
tgtgtcctccaccaacagatacaac

SEQ ID NO: 1977457 - DNA, 25 bp, Homo sapien
ccatttccttttggcgttgtgtcct

SEQ ID NO: 1977458 - DNA, 25 bp, Homo sapien
caatgagggcatgcccagggccaaa

SEQ ID NO: 1977459 - DNA, 25 bp, Homo sapien
gctgagattctagacaagagaggcc

SEQ ID NO: 1977460 - DNA, 25 bp, Homo sapien
gaaggcacagcctggactaaacagt

SEQ ID NO: 1977461 - DNA, 25 bp, Homo sapien
tgccctcctggagtaacactctgag

SEQ ID NO: 1977462 - DNA, 25 bp, Homo sapien
tttgcacccaggcattattttgagc

SEQ ID NO: 1977463 - DNA, 25 bp, Homo sapien
tttttggtgaaacaaggtctcactc

SEQ ID NO: 1977464 - DNA, 25 bp, Homo sapien
tagctgggaccaaagggacccgcca

SEQ ID NO: 1977465 - DNA, 25 bp, Homo sapien
gcctcaacctcttaggctcaggtga

SEQ ID NO: 1977466 - DNA, 25 bp, Homo sapien
cactctgtgacccaggctggagtgc

SEQ ID NO: 1977467 - DNA, 25 bp, Homo sapien
aatggacttggagcccttatcaaaa

SEQ ID NO: 1977468 - DNA, 25 bp, Homo sapien
tgatatgagatagggtccaactccc

SEQ ID NO: 1977469 - DNA, 25 bp, Homo sapien
ttttgatgcaggaacccagttgccc

SEQ ID NO: 1977470 - DNA, 25 bp, Homo sapien
cagccatagctgtgtggatgtccgg

SEQ ID NO: 1977471 - DNA, 25 bp, Homo sapien
tctcattggcggagaggacgcccaa

SEQ ID NO: 1977472 - DNA, 25 bp, Homo sapien
gaggccgccaggtggatttctcatt

SEQ ID NO: 1977473 - DNA, 25 bp, Homo sapien
catttgcaggcttcaatgagctcga

SEQ ID NO: 1977474 - DNA, 25 bp, Homo sapien
caacattaaggccaagtaggtgcaa

SEQ ID NO: 1977475 - DNA, 25 bp, Homo sapien
catatgtactcctgatgaggctgtg

SEQ ID NO: 1977476 - DNA, 25 bp, Homo sapien
tagagtcagaagcacagtcataccc

SEQ ID NO: 1977477 - DNA, 25 bp, Homo sapien
tgggagtccgtgtgcaccataagct

SEQ ID NO: 1977478 - DNA, 25 bp, Homo sapien
catgcacggctgcttattgtgagct

SEQ ID NO: 1977479 - DNA, 25 bp, Homo sapien
caggcaccaagcaggtcccacagtg

SEQ ID NO: 1977480 - DNA, 25 bp, Homo sapien
caggtcccacagtgagtgaagtggg

SEQ ID NO: 1977481 - DNA, 25 bp, Homo sapien
caccaagcaggtcccacagtgagtg

SEQ ID NO: 1977482 - DNA, 25 bp, Homo sapien
gcaccaagcaggtcccacagtgagt

SEQ ID NO: 1977483 - DNA, 25 bp, Homo sapien
tgcttgggacaacgggaaaatacca

SEQ ID NO: 1977484 - DNA, 25 bp, Homo sapien
tagaagatatgctacagcaggcctg

SEQ ID NO: 1977485 - DNA, 25 bp, Homo sapien
tagggcagcacaccaacacttggat

SEQ ID NO: 1977486 - DNA, 25 bp, Homo sapien
tcagacaaccccgagtcaagagggt

SEQ ID NO: 1977487 - DNA, 25 bp, Homo sapien
gagccagctgtttcagtaccatttg

SEQ ID NO: 1977488 - DNA, 25 bp, Homo sapien
gctgtctgctctgtcaactgatcca

SEQ ID NO: 1977489 - DNA, 25 bp, Homo sapien
cagtactgtgttggctactccaggc

SEQ ID NO: 1977490 - DNA, 25 bp, Homo sapien
gaaccggcatcttgactatattaag

SEQ ID NO: 1977491 - DNA, 25 bp, Homo sapien
cttcgtatagtttggtccattatca

SEQ ID NO: 1977492 - DNA, 25 bp, Homo sapien
tatagtttggtccattatcagattg

SEQ ID NO: 1977493 - DNA, 25 bp, Homo sapien
tagtttggtccattatcagattgtc

SEQ ID NO: 1977494 - DNA, 25 bp, Homo sapien
ttggtccattatcagattgtctctg

SEQ ID NO: 1977495 - DNA, 25 bp, Homo sapien
gagataacgtctaccctcacagaga

SEQ ID NO: 1977496 - DNA, 25 bp, Homo sapien
cagaccagggttaagctaagcaggg

SEQ ID NO: 1977497 - DNA, 25 bp, Homo sapien
tccaaaaatacgtgcctggcctgct

SEQ ID NO: 1977498 - DNA, 25 bp, Homo sapien
gaacatagacatctcacgggccaag

SEQ ID NO: 1977499 - DNA, 25 bp, Homo sapien
cctcaagcgcacttcttacaagcag

SEQ ID NO: 1977500 - DNA, 25 bp, Homo sapien
taaaatgcactctttcctcaagcgc

SEQ ID NO: 1977501 - DNA, 25 bp, Homo sapien
taaacagagaggaggtgtacgcact

SEQ ID NO: 1977502 - DNA, 25 bp, Homo sapien
ggtgctcaggttcattaaacatcaa

SEQ ID NO: 1977503 - DNA, 25 bp, Homo sapien
cagcaaggtccttgatgttttctga

SEQ ID NO: 1977504 - DNA, 25 bp, Homo sapien
gaggcagcaaggtccttgatgtttt

SEQ ID NO: 1977505 - DNA, 25 bp, Homo sapien
caggtgccttttgctacacttcctg

SEQ ID NO: 1977506 - DNA, 25 bp, Homo sapien
gtgccttttgctacacttcctggag

SEQ ID NO: 1977507 - DNA, 25 bp, Homo sapien
ccttcatgctcctttctgactgcat

SEQ ID NO: 1977508 - DNA, 25 bp, Homo sapien
agagagtccttcagcccaatgccca

SEQ ID NO: 1977509 - DNA, 25 bp, Homo sapien
atccccgacccaacagcaagggcca

SEQ ID NO: 1977510 - DNA, 25 bp, Homo sapien
cacctgtaagtgtagcacaccaggg

SEQ ID NO: 1977511 - DNA, 25 bp, Homo sapien
gttcttctttgagcagcccttcctg

SEQ ID NO: 1977512 - DNA, 25 bp, Homo sapien
cacagaaagaaatgacgccgatgcc

SEQ ID NO: 1977513 - DNA, 25 bp, Homo sapien
gaagttctcggccttggtagccaca

SEQ ID NO: 1977514 - DNA, 25 bp, Homo sapien
gaaggcctgcggctgtaagaaccct

SEQ ID NO: 1977515 - DNA, 25 bp, Homo sapien
ccatttgggtccgagagctttcacg

SEQ ID NO: 1977516 - DNA, 25 bp, Homo sapien
tgagatagcttgtatgccgccacct

SEQ ID NO: 1977517 - DNA, 25 bp, Homo sapien
tgcaattcaaattcctcgcccaggg

SEQ ID NO: 1977518 - DNA, 25 bp, Homo sapien
caatgactgtcgctggctggttaca

SEQ ID NO: 1977519 - DNA, 25 bp, Homo sapien
cctttcccatgagggtgggtctaga

SEQ ID NO: 1977520 - DNA, 25 bp, Homo sapien
aagaggagcagagacgacttggcca

SEQ ID NO: 1977521 - DNA, 25 bp, Homo sapien
ggccacccactgtgtccaactaaat

SEQ ID NO: 1977522 - DNA, 25 bp, Homo sapien
gagtaagggtctgcggcctttccca

SEQ ID NO: 1977523 - DNA, 25 bp, Homo sapien
gatgcactcggtgacaagcccatga

SEQ ID NO: 1977524 - DNA, 25 bp, Homo sapien
caaaaatctctgtcgttaagctgga

SEQ ID NO: 1977525 - DNA, 25 bp, Homo sapien
tgacagccgccatctgatagtggag

SEQ ID NO: 1977526 - DNA, 25 bp, Homo sapien
tggcccgagcatgacggatgcactc

SEQ ID NO: 1977527 - DNA, 25 bp, Homo sapien
caagagcgtggcctgtttctagcta

SEQ ID NO: 1977528 - DNA, 25 bp, Homo sapien
tagacttgcccgaatcggtcttgtc

SEQ ID NO: 1977529 - DNA, 25 bp, Homo sapien
ctgtggcaggccactcgcatccttc

SEQ ID NO: 1977530 - DNA, 25 bp, Homo sapien
gcctgtttctagctagacttgcccg

SEQ ID NO: 1977531 - DNA, 25 bp, Homo sapien
cccgcacacagatgggaggaagcag

SEQ ID NO: 1977532 - DNA, 25 bp, Homo sapien
tgggtggccccgcacacagatggga

SEQ ID NO: 1977533 - DNA, 25 bp, Homo sapien
tgagtgaggtcctggacaaggacca

SEQ ID NO: 1977534 - DNA, 25 bp, Homo sapien
agcagagggcccacgggctgagtga

SEQ ID NO: 1977535 - DNA, 25 bp, Homo sapien
gcttgaaggctccttgaagcgacct

SEQ ID NO: 1977536 - DNA, 25 bp, Homo sapien
taaatctgggacctagcagtgacaa

SEQ ID NO: 1977537 - DNA, 25 bp, Homo sapien
tcgtctctgtggttactgtcaacaa

SEQ ID NO: 1977538 - DNA, 25 bp, Homo sapien
ttatggcctcacaaactcccagctg

SEQ ID NO: 1977539 - DNA, 25 bp, Homo sapien
ttagcatggcaatcggctgtctgcc

SEQ ID NO: 1977540 - DNA, 25 bp, Homo sapien
caggacacatcgggtaaatatttct

SEQ ID NO: 1977541 - DNA, 25 bp, Homo sapien
tctaggtttaatgccaaaatctctc

SEQ ID NO: 1977542 - DNA, 25 bp, Homo sapien
tctctcactggcaggacacatcggg

SEQ ID NO: 1977543 - DNA, 25 bp, Homo sapien
tgaccagacgggtgaagttccccac

SEQ ID NO: 1977544 - DNA, 25 bp, Homo sapien
gccagccagactgcttcaggagtga

SEQ ID NO: 1977545 - DNA, 25 bp, Homo sapien
tcatgcagtcgaaacttggaattcc

SEQ ID NO: 1977546 - DNA, 25 bp, Homo sapien
cacaacatcggttgatggtggccat

SEQ ID NO: 1977547 - DNA, 25 bp, Homo sapien
tactaagggtggatattcccaaatc

SEQ ID NO: 1977548 - DNA, 25 bp, Homo sapien
gaatggcggcacagggttatcaacc

SEQ ID NO: 1977549 - DNA, 25 bp, Homo sapien
gattccaggtctccagactcaagcc

SEQ ID NO: 1977550 - DNA, 25 bp, Homo sapien
cctctagtgggaaggtgaagcttct

SEQ ID NO: 1977551 - DNA, 25 bp, Homo sapien
gtgagaaatttagcctgtcctttga

SEQ ID NO: 1977552 - DNA, 25 bp, Homo sapien
gagggttattccacctacactgaaa

SEQ ID NO: 1977553 - DNA, 25 bp, Homo sapien
tgcattagcccctagtgagaaattt

SEQ ID NO: 1977554 - DNA, 25 bp, Homo sapien
agcatgattctttaggaccctagga

SEQ ID NO: 1977555 - DNA, 25 bp, Homo sapien
gcgaggcccacctgactcggatatc

SEQ ID NO: 1977556 - DNA, 25 bp, Homo sapien
aggcccacctgactcggatatccat

SEQ ID NO: 1977557 - DNA, 25 bp, Homo sapien
gtcagcgaggcccacctgactcgga

SEQ ID NO: 1977558 - DNA, 25 bp, Homo sapien
agcgaggcccacctgactcggatat

SEQ ID NO: 1977559 - DNA, 25 bp, Homo sapien
gcattaagcctgtgatcctgggatt

SEQ ID NO: 1977560 - DNA, 25 bp, Homo sapien
gagagggctaccacggcctatgatg

SEQ ID NO: 1977561 - DNA, 25 bp, Homo sapien
cagtgttaacaagtagtccccagag

SEQ ID NO: 1977562 - DNA, 25 bp, Homo sapien
tttgagcagagacgttgaacctaca

SEQ ID NO: 1977563 - DNA, 25 bp, Homo sapien
gagatgttacagtccagggcttgaa

SEQ ID NO: 1977564 - DNA, 25 bp, Homo sapien
aaagcatggagagatgttacagtcc

SEQ ID NO: 1977565 - DNA, 25 bp, Homo sapien
gcctttcagtgaaagcatggagaga

SEQ ID NO: 1977566 - DNA, 25 bp, Homo sapien
tacagtccagggcttgaaagagcct

SEQ ID NO: 1977567 - DNA, 25 bp, Homo sapien
ggagacgaacagaacccaagcctat

SEQ ID NO: 1977568 - DNA, 25 bp, Homo sapien
ccaatgtaataacagaggcaggcag

SEQ ID NO: 1977569 - DNA, 25 bp, Homo sapien
caaggaaggcctattcgggagacga

SEQ ID NO: 1977570 - DNA, 25 bp, Homo sapien
tactgagattccttcaagaggctgg

SEQ ID NO: 1977571 - DNA, 25 bp, Homo sapien
gacttcataacccatgggcaaccag

SEQ ID NO: 1977572 - DNA, 25 bp, Homo sapien
tccaaaacggagctacctctggttc

SEQ ID NO: 1977573 - DNA, 25 bp, Homo sapien
caggaagctctttccaaaacggagc

SEQ ID NO: 1977574 - DNA, 25 bp, Homo sapien
ctctttccaaaacggagctacctct

SEQ ID NO: 1977575 - DNA, 25 bp, Homo sapien
gaagctgcctccaactaaacggtga

SEQ ID NO: 1977576 - DNA, 25 bp, Homo sapien
taacagcatagacttgaggcaacag

SEQ ID NO: 1977577 - DNA, 25 bp, Homo sapien
gatacgagatatgcagactagccct

SEQ ID NO: 1977578 - DNA, 25 bp, Homo sapien
gatcaagagtcggttgggtcagcct

SEQ ID NO: 1977579 - DNA, 25 bp, Homo sapien
ggcacagcgttcctgctcctgggca

SEQ ID NO: 1977580 - DNA, 25 bp, Homo sapien
tatctagaatgttgccgggggcaca

SEQ ID NO: 1977581 - DNA, 25 bp, Homo sapien
tccacgggcacaggctatctagaat

SEQ ID NO: 1977582 - DNA, 25 bp, Homo sapien
tctgggctaaaggacagagccggga

SEQ ID NO: 1977583 - DNA, 25 bp, Homo sapien
ctgtggcagacatcatccagatacc

SEQ ID NO: 1977584 - DNA, 25 bp, Homo sapien
gataccagggggagtggccagggag

SEQ ID NO: 1977585 - DNA, 25 bp, Homo sapien
atccagataccagggggagtggcca

SEQ ID NO: 1977586 - DNA, 25 bp, Homo sapien
tcatccagataccagggggagtggc

SEQ ID NO: 1977587 - DNA, 25 bp, Homo sapien
aatccttcccaaatggcccacctgg

SEQ ID NO: 1977588 - DNA, 25 bp, Homo sapien
aaaaggttcgtgtcaccagggagag

SEQ ID NO: 1977589 - DNA, 25 bp, Homo sapien
aaaggttcgtgtcaccagggagagc

SEQ ID NO: 1977590 - DNA, 25 bp, Homo sapien
aaggttcgtgtcaccagggagagcc

SEQ ID NO: 1977591 - DNA, 25 bp, Homo sapien
ccaggaatgctagagacccagagag

SEQ ID NO: 1977592 - DNA, 25 bp, Homo sapien
gtctcctgctgcaaagggtggggct

SEQ ID NO: 1977593 - DNA, 25 bp, Homo sapien
caggaatgctagagacccagagaga

SEQ ID NO: 1977594 - DNA, 25 bp, Homo sapien
ccagagagatgggctgtctcctgct

SEQ ID NO: 1977595 - DNA, 25 bp, Homo sapien
ccagggacagagtgaatggtccccc

SEQ ID NO: 1977596 - DNA, 25 bp, Homo sapien
ctgtgccgaggatcacgctaggacc

SEQ ID NO: 1977597 - DNA, 25 bp, Homo sapien
tgacagctaaagatgcctttgtgaa

SEQ ID NO: 1977598 - DNA, 25 bp, Homo sapien
ctggaagaccgaggtgctgacagct

SEQ ID NO: 1977599 - DNA, 25 bp, Homo sapien
cgaatgacgtttatgggaatgccca

SEQ ID NO: 1977600 - DNA, 25 bp, Homo sapien
gcagatcccgactggtagttctcca

SEQ ID NO: 1977601 - DNA, 25 bp, Homo sapien
gggaatgcccacgttttcctgcaga

SEQ ID NO: 1977602 - DNA, 25 bp, Homo sapien
ctgcaaaacgaatgacgtttatggg

SEQ ID NO: 1977603 - DNA, 25 bp, Homo sapien
gtgggtcaccccggcagatgccaag

SEQ ID NO: 1977604 - DNA, 25 bp, Homo sapien
ggcagatgccaagaccttcccagac

SEQ ID NO: 1977605 - DNA, 25 bp, Homo sapien
gggtcaccccggcagatgccaagac

SEQ ID NO: 1977606 - DNA, 25 bp, Homo sapien
ccggcagatgccaagaccttcccag

SEQ ID NO: 1977607 - DNA, 25 bp, Homo sapien
taaaattcccaaatcgcgactgagt

SEQ ID NO: 1977608 - DNA, 25 bp, Homo sapien
gagatgctgtccacctaacttgcga

SEQ ID NO: 1977609 - DNA, 25 bp, Homo sapien
cacatgcagtgcaaggagtcactcc

SEQ ID NO: 1977610 - DNA, 25 bp, Homo sapien
tatgacatgccccagcttatccggg

SEQ ID NO: 1977611 - DNA, 25 bp, Homo sapien
tcaccaccatttgtatcatcaaagg

SEQ ID NO: 1977612 - DNA, 25 bp, Homo sapien
ccaccatttgtatcatcaaaggcca

SEQ ID NO: 1977613 - DNA, 25 bp, Homo sapien
caccatttgtatcatcaaaggccat

SEQ ID NO: 1977614 - DNA, 25 bp, Homo sapien
catcaccaccatttgtatcatcaaa

SEQ ID NO: 1977615 - DNA, 25 bp, Homo sapien
tccttttaacaggcatcagtgttcc

SEQ ID NO: 1977616 - DNA, 25 bp, Homo sapien
ctccttttaacaggcatcagtgttc

SEQ ID NO: 1977617 - DNA, 25 bp, Homo sapien
tgactccacaaatcatccatcaagg

SEQ ID NO: 1977618 - DNA, 25 bp, Homo sapien
tctgcagctgtacactacatttcca

SEQ ID NO: 1977619 - DNA, 25 bp, Homo sapien
cagcaggtcggtgactccacaaatc

SEQ ID NO: 1977620 - DNA, 25 bp, Homo sapien
tttaaaagtctgcagctgtacacta

SEQ ID NO: 1977621 - DNA, 25 bp, Homo sapien
ttctgggggaggaagacgaacatgt

SEQ ID NO: 1977622 - DNA, 25 bp, Homo sapien
ggaggaagacgaacatgtgttcctt

SEQ ID NO: 1977623 - DNA, 25 bp, Homo sapien
ttcttctgggggaggaagacgaaca

SEQ ID NO: 1977624 - DNA, 25 bp, Homo sapien
tcttctgggggaggaagacgaacat

SEQ ID NO: 1977625 - DNA, 25 bp, Homo sapien
tcttgagttggaactggtgccaccc

SEQ ID NO: 1977626 - DNA, 25 bp, Homo sapien
gggttccagcccaaagagcagatct

SEQ ID NO: 1977627 - DNA, 25 bp, Homo sapien
ttctataatcacacagtgcgcacgg

SEQ ID NO: 1977628 - DNA, 25 bp, Homo sapien
taagccgtaagactgattccacaag

SEQ ID NO: 1977629 - DNA, 25 bp, Homo sapien
gagacgagactggttactgaggtca

SEQ ID NO: 1977630 - DNA, 25 bp, Homo sapien
gcaaactatttcacaagcgccactg

SEQ ID NO: 1977631 - DNA, 25 bp, Homo sapien
tgccaagtccgatgaaggtggattc

SEQ ID NO: 1977632 - DNA, 25 bp, Homo sapien
gcgccactgctattaaacctgatta

SEQ ID NO: 1977633 - DNA, 25 bp, Homo sapien
catttcccgagtgttgttttgcttc

SEQ ID NO: 1977634 - DNA, 25 bp, Homo sapien
gaaaacccgacattgctactccaag

SEQ ID NO: 1977635 - DNA, 25 bp, Homo sapien
tatttccagccaaacgaggctcatt

SEQ ID NO: 1977636 - DNA, 25 bp, Homo sapien
actatttccagccaaacgaggctca

SEQ ID NO: 1977637 - DNA, 25 bp, Homo sapien
gccaggcacactgaaaaatgttacg

SEQ ID NO: 1977638 - DNA, 25 bp, Homo sapien
taccaaacgtactcaggctgtgcag

SEQ ID NO: 1977639 - DNA, 25 bp, Homo sapien
tgagaaggatatggctggttccaac

SEQ ID NO: 1977640 - DNA, 25 bp, Homo sapien
cttttgtcaagtaggagagctgggc

SEQ ID NO: 1977641 - DNA, 25 bp, Homo sapien
ctgttgaatgtgcttaacccaggat

SEQ ID NO: 1977642 - DNA, 25 bp, Homo sapien
aatatcaatccttacattagtccca

SEQ ID NO: 1977643 - DNA, 25 bp, Homo sapien
acattagtcccattaatttcagatg

SEQ ID NO: 1977644 - DNA, 25 bp, Homo sapien
ggatgcaattgagcaaatatgaaaa

SEQ ID NO: 1977645 - DNA, 25 bp, Homo sapien
ctttcagaaactattatggatgtac

SEQ ID NO: 1977646 - DNA, 25 bp, Homo sapien
tgtccggaggcatctcagaggcagt

SEQ ID NO: 1977647 - DNA, 25 bp, Homo sapien
tgctaaactcctcacaccagggaag

SEQ ID NO: 1977648 - DNA, 25 bp, Homo sapien
gggaaggtccaaaggtcatccacac

SEQ ID NO: 1977649 - DNA, 25 bp, Homo sapien
tattagtagaaacgtgcagagtgca

SEQ ID NO: 1977650 - DNA, 25 bp, Homo sapien
cagggaggggacaatcatgagtcct

SEQ ID NO: 1977651 - DNA, 25 bp, Homo sapien
gaggggacaatcatgagtcctaggc

SEQ ID NO: 1977652 - DNA, 25 bp, Homo sapien
ggggacaatcatgagtcctaggcag

SEQ ID NO: 1977653 - DNA, 25 bp, Homo sapien
gacaatcatgagtcctaggcaggaa

SEQ ID NO: 1977654 - DNA, 25 bp, Homo sapien
gcaggcaaggtacctctgtccctcg

SEQ ID NO: 1977655 - DNA, 25 bp, Homo sapien
ggcaaggtacctctgtccctcggtg

SEQ ID NO: 1977656 - DNA, 25 bp, Homo sapien
aaggtacctctgtccctcggtgctg

SEQ ID NO: 1977657 - DNA, 25 bp, Homo sapien
acaagcaggcaaggtacctctgtcc

SEQ ID NO: 1977658 - DNA, 25 bp, Homo sapien
tttaccacgtttatccagagagttg

SEQ ID NO: 1977659 - DNA, 25 bp, Homo sapien
gagttgattctccttaataccagga

SEQ ID NO: 1977660 - DNA, 25 bp, Homo sapien
ttaataccaggaaactaggcaacag

SEQ ID NO: 1977661 - DNA, 25 bp, Homo sapien
aaaagatgggactatgggccatatt

SEQ ID NO: 1977662 - DNA, 25 bp, Homo sapien
cttccgaagagccatgcatgcgtcc

SEQ ID NO: 1977663 - DNA, 25 bp, Homo sapien
cgaagagccatgcatgcgtcctctg

SEQ ID NO: 1977664 - DNA, 25 bp, Homo sapien
tccgaagagccatgcatgcgtcctc

SEQ ID NO: 1977665 - DNA, 25 bp, Homo sapien
ttccgaagagccatgcatgcgtcct

SEQ ID NO: 1977666 - DNA, 25 bp, Homo sapien
tatccacaccagatggctttcaggg

SEQ ID NO: 1977667 - DNA, 25 bp, Homo sapien
gatttagatttaattggccggactg

SEQ ID NO: 1977668 - DNA, 25 bp, Homo sapien
agctgactgctcatttgtgggcttg

SEQ ID NO: 1977669 - DNA, 25 bp, Homo sapien
tttaattggccggactgaatcagaa

SEQ ID NO: 1977670 - DNA, 25 bp, Homo sapien
ttcaggatgacagtacccgggaggc

SEQ ID NO: 1977671 - DNA, 25 bp, Homo sapien
attgcagccttccatgtcccttgtc

SEQ ID NO: 1977672 - DNA, 25 bp, Homo sapien
actaaaggaagtgctggatggtctc

SEQ ID NO: 1977673 - DNA, 25 bp, Homo sapien
tctctccagttgagaaaggtattat

SEQ ID NO: 1977674 - DNA, 25 bp, Homo sapien
gcggcagctgaaacggttggaccta

SEQ ID NO: 1977675 - DNA, 25 bp, Homo sapien
tgaaacggttggacctagcctctcc

SEQ ID NO: 1977676 - DNA, 25 bp, Homo sapien
gcagctgaaacggttggacctagcc

SEQ ID NO: 1977677 - DNA, 25 bp, Homo sapien
gctgaaacggttggacctagcctct

SEQ ID NO: 1977678 - DNA, 25 bp, Homo sapien
ttccaggcgtctgccctgaacgtgc

SEQ ID NO: 1977679 - DNA, 25 bp, Homo sapien
atcttcccaggtactccatcagcag

SEQ ID NO: 1977680 - DNA, 25 bp, Homo sapien
ctgaacgtgcgcagctcaatgatgt

SEQ ID NO: 1977681 - DNA, 25 bp, Homo sapien
gggagcaagatcaaaaacacgcagc

SEQ ID NO: 1977682 - DNA, 25 bp, Homo sapien
caggcactgagtatgcttggtgtca

SEQ ID NO: 1977683 - DNA, 25 bp, Homo sapien
cctcagttcccgcagcttgtttgca

SEQ ID NO: 1977684 - DNA, 25 bp, Homo sapien
tgtttgcagctaagaaaccgcactg

SEQ ID NO: 1977685 - DNA, 25 bp, Homo sapien
tgcttggctccataacatctcctgt

SEQ ID NO: 1977686 - DNA, 25 bp, Homo sapien
gcagctccactatccagcgtgattc

SEQ ID NO: 1977687 - DNA, 25 bp, Homo sapien
aactgaacagaaccgtctggtcttc

SEQ ID NO: 1977688 - DNA, 25 bp, Homo sapien
tcatccttgcacaatctcactgttt

SEQ ID NO: 1977689 - DNA, 25 bp, Homo sapien
cagaagcacctgatggacatcccca

SEQ ID NO: 1977690 - DNA, 25 bp, Homo sapien
cgcccctagatctggatggccggag

SEQ ID NO: 1977691 - DNA, 25 bp, Homo sapien
tgccatttcctaaacccactgtgga

SEQ ID NO: 1977692 - DNA, 25 bp, Homo sapien
tgctcggcgggactcatcgtcttga

SEQ ID NO: 1977693 - DNA, 25 bp, Homo sapien
tcttcctcggcttacgttttggcag

SEQ ID NO: 1977694 - DNA, 25 bp, Homo sapien
cagctttatcacacgtgccctggga

SEQ ID NO: 1977695 - DNA, 25 bp, Homo sapien
aatcaagatgtctctacaaggtggc

SEQ ID NO: 1977696 - DNA, 25 bp, Homo sapien
cactattttgctcgtggccgttgga

SEQ ID NO: 1977697 - DNA, 25 bp, Homo sapien
catgggccaaatgagcctgtgcaca

SEQ ID NO: 1977698 - DNA, 25 bp, Homo sapien
ttctgaggctctgacggaccgcgtg

SEQ ID NO: 1977699 - DNA, 25 bp, Homo sapien
caggttcatcaatgtcccatcgaca

SEQ ID NO: 1977700 - DNA, 25 bp, Homo sapien
agagctcacatagcccccaggttca

SEQ ID NO: 1977701 - DNA, 25 bp, Homo sapien
gttgcatctaaaaaagtggaactca

SEQ ID NO: 1977702 - DNA, 25 bp, Homo sapien
gaaatggtttccagactcacggccc

SEQ ID NO: 1977703 - DNA, 25 bp, Homo sapien
acagggaaatcatcacgggagggct

SEQ ID NO: 1977704 - DNA, 25 bp, Homo sapien
ctggacttgaatgacccccgaccag

SEQ ID NO: 1977705 - DNA, 25 bp, Homo sapien
catgcctaaagagcaaggcacacct

SEQ ID NO: 1977706 - DNA, 25 bp, Homo sapien
tgtcaaggataaagacataaagcca

SEQ ID NO: 1977707 - DNA, 25 bp, Homo sapien
taatataaggcatactcttggctgg

SEQ ID NO: 1977708 - DNA, 25 bp, Homo sapien
gacactgagtccattgaatttctag

SEQ ID NO: 1977709 - DNA, 25 bp, Homo sapien
tactctaataccctttgggcagatg

SEQ ID NO: 1977710 - DNA, 25 bp, Homo sapien
ttaagagcctcaaacagcttgaggg

SEQ ID NO: 1977711 - DNA, 25 bp, Homo sapien
tcttctgcaaaagcgtaactcctgg

SEQ ID NO: 1977712 - DNA, 25 bp, Homo sapien
cagcaggcctcaggaactgaagccg

SEQ ID NO: 1977713 - DNA, 25 bp, Homo sapien
caacgtcacaattatgacctgtcag

SEQ ID NO: 1977714 - DNA, 25 bp, Homo sapien
gatattcccatcagaaaggctagtt

SEQ ID NO: 1977715 - DNA, 25 bp, Homo sapien
taagatggtcctgaaaataccctcc

SEQ ID NO: 1977716 - DNA, 25 bp, Homo sapien
tacagcttggaacatggtagaacca

SEQ ID NO: 1977717 - DNA, 25 bp, Homo sapien
aattgaggcatttcggagggccaac

SEQ ID NO: 1977718 - DNA, 25 bp, Homo sapien
ttactccgcaagaatggccttaatc

SEQ ID NO: 1977719 - DNA, 25 bp, Homo sapien
ctccgcaagaatggccttaatccaa

SEQ ID NO: 1977720 - DNA, 25 bp, Homo sapien
aaaaaggaacacgtttacacagctg

SEQ ID NO: 1977721 - DNA, 25 bp, Homo sapien
tggatgcggtgaaaaaggaacacgt

SEQ ID NO: 1977722 - DNA, 25 bp, Homo sapien
tgcgcccggctggaatccactttct

SEQ ID NO: 1977723 - DNA, 25 bp, Homo sapien
tgatgtttgtaataacttttatgag

SEQ ID NO: 1977724 - DNA, 25 bp, Homo sapien
tgagacaaaatatcctccccaaaga

SEQ ID NO: 1977725 - DNA, 25 bp, Homo sapien
caatcccatcaaaaactgggctgag

SEQ ID NO: 1977726 - DNA, 25 bp, Homo sapien
agcccatgaacagagagacaatcca

SEQ ID NO: 1977727 - DNA, 25 bp, Homo sapien
tcccacccaacaaatctgaaggttc

SEQ ID NO: 1977728 - DNA, 25 bp, Homo sapien
cccacccaacaaatctgaaggttct

SEQ ID NO: 1977729 - DNA, 25 bp, Homo sapien
gagcccatgaacagagagacaatcc

SEQ ID NO: 1977730 - DNA, 25 bp, Homo sapien
aggcacgtgccatcacgtctgacta

SEQ ID NO: 1977731 - DNA, 25 bp, Homo sapien
ggcacgtgccatcacgtctgactaa

SEQ ID NO: 1977732 - DNA, 25 bp, Homo sapien
caggcacgtgccatcacgtctgact

SEQ ID NO: 1977733 - DNA, 25 bp, Homo sapien
gcacgtgccatcacgtctgactaat

SEQ ID NO: 1977734 - DNA, 25 bp, Homo sapien
gtgaccacagctgtgcctagaccca

SEQ ID NO: 1977735 - DNA, 25 bp, Homo sapien
gagagcccagggagtgattcagaaa

SEQ ID NO: 1977736 - DNA, 25 bp, Homo sapien
ccaaggtggggtcacaagccaaggt

SEQ ID NO: 1977737 - DNA, 25 bp, Homo sapien
tgagatgacgaaaaggtcacaagcc

SEQ ID NO: 1977738 - DNA, 25 bp, Homo sapien
atggctgaggtgggacgttctcatt

SEQ ID NO: 1977739 - DNA, 25 bp, Homo sapien
gtcagcagtggccaccgtgccatcg

SEQ ID NO: 1977740 - DNA, 25 bp, Homo sapien
tcaaactgatcccaagaacatcctc

SEQ ID NO: 1977741 - DNA, 25 bp, Homo sapien
tcattgccattcaaactgatcccaa

SEQ ID NO: 1977742 - DNA, 25 bp, Homo sapien
cagcttgacagtttcataagccagg

SEQ ID NO: 1977743 - DNA, 25 bp, Homo sapien
tggctattaagaagtctggagccct

SEQ ID NO: 1977744 - DNA, 25 bp, Homo sapien
aaagggagccgtagttcaaagacag

SEQ ID NO: 1977745 - DNA, 25 bp, Homo sapien
tctggacaagggcacggccaagtca

SEQ ID NO: 1977746 - DNA, 25 bp, Homo sapien
cagacacgcatgaggctcattctta

SEQ ID NO: 1977747 - DNA, 25 bp, Homo sapien
agtgcatttgaccatcggcaatggg

SEQ ID NO: 1977748 - DNA, 25 bp, Homo sapien
tactcaggctgtctgggtgctatgg

SEQ ID NO: 1977749 - DNA, 25 bp, Homo sapien
ggtgctatggaaatcatgtcgagtg

SEQ ID NO: 1977750 - DNA, 25 bp, Homo sapien
tgttgccaaaattactaatcatcag

SEQ ID NO: 1977751 - DNA, 25 bp, Homo sapien
taagtgtggccacccttcacctgag

SEQ ID NO: 1977752 - DNA, 25 bp, Homo sapien
ggaagtctgtatgaaggcttaatca

SEQ ID NO: 1977753 - DNA, 25 bp, Homo sapien
ctgcttgctcattagtgcattaata

SEQ ID NO: 1977754 - DNA, 25 bp, Homo sapien
tacagtgtgatgttacaggggtgca

SEQ ID NO: 1977755 - DNA, 25 bp, Homo sapien
tacaggggtgcatacacatactgat

SEQ ID NO: 1977756 - DNA, 25 bp, Homo sapien
ttctttgcaagtagatacagtgtga

SEQ ID NO: 1977757 - DNA, 25 bp, Homo sapien
gactcccatgacttggaactcccaa

SEQ ID NO: 1977758 - DNA, 25 bp, Homo sapien
caaacactcctaggttcagactgaa

SEQ ID NO: 1977759 - DNA, 25 bp, Homo sapien
tgttcacatcctgataagccacagg

SEQ ID NO: 1977760 - DNA, 25 bp, Homo sapien
gacaggaagacaaatccatgcccag

SEQ ID NO: 1977761 - DNA, 25 bp, Homo sapien
taacactgtggaaagcatcgcgagg

SEQ ID NO: 1977762 - DNA, 25 bp, Homo sapien
ccaagaatggcaaagctagctggct

SEQ ID NO: 1977763 - DNA, 25 bp, Homo sapien
tcaagtgccaggagcagacttcttg

SEQ ID NO: 1977764 - DNA, 25 bp, Homo sapien
tctgcgctctggacaaactcaagtg

SEQ ID NO: 1977765 - DNA, 25 bp, Homo sapien
cagtgtcgttaaggtccccaagaat

SEQ ID NO: 1977766 - DNA, 25 bp, Homo sapien
ctgacttcaagcgacccaccagctt

SEQ ID NO: 1977767 - DNA, 25 bp, Homo sapien
cgaaatttctgattactgcaacctc

SEQ ID NO: 1977768 - DNA, 25 bp, Homo sapien
gtgcagtggcgaaatttctgattac

SEQ ID NO: 1977769 - DNA, 25 bp, Homo sapien
tggcgaaatttctgattactgcaac

SEQ ID NO: 1977770 - DNA, 25 bp, Homo sapien
agcactgccgggagcccagaatagc

SEQ ID NO: 1977771 - DNA, 25 bp, Homo sapien
ctgccgggagcccagaatagccttt

SEQ ID NO: 1977772 - DNA, 25 bp, Homo sapien
ccgggagcccagaatagcctttgtt

SEQ ID NO: 1977773 - DNA, 25 bp, Homo sapien
gcactgccgggagcccagaatagcc

SEQ ID NO: 1977774 - DNA, 25 bp, Homo sapien
tctgtactggcaaggcgtgaggtcc

SEQ ID NO: 1977775 - DNA, 25 bp, Homo sapien
caggatgctcaatgttcctaggcag

SEQ ID NO: 1977776 - DNA, 25 bp, Homo sapien
tgtaaaacatctcccgtgcattcgg

SEQ ID NO: 1977777 - DNA, 25 bp, Homo sapien
cgtgaggtcctaaccgcagcaggaa

SEQ ID NO: 1977778 - DNA, 25 bp, Homo sapien
caagtgggagtccaactgtgacgca

SEQ ID NO: 1977779 - DNA, 25 bp, Homo sapien
tcaacagaaaccaggagctctgcgg

SEQ ID NO: 1977780 - DNA, 25 bp, Homo sapien
tacagcaacgtctatcagtgagcag

SEQ ID NO: 1977781 - DNA, 25 bp, Homo sapien
gaccgcagactgtggctaccaatta

SEQ ID NO: 1977782 - DNA, 25 bp, Homo sapien
ttgttcaggtggtcactggacataa

SEQ ID NO: 1977783 - DNA, 25 bp, Homo sapien
tgttcaggtggtcactggacataat

SEQ ID NO: 1977784 - DNA, 25 bp, Homo sapien
tagggaatccctcgaatgcagactc

SEQ ID NO: 1977785 - DNA, 25 bp, Homo sapien
gatgactggacggactagggaatcc

SEQ ID NO: 1977786 - DNA, 25 bp, Homo sapien
gtgagccctgggtcaacgccttgtt

SEQ ID NO: 1977787 - DNA, 25 bp, Homo sapien
gagtcccacccggaaatgttctgag

SEQ ID NO: 1977788 - DNA, 25 bp, Homo sapien
ggaatccagaaaacgatccacgcag

SEQ ID NO: 1977789 - DNA, 25 bp, Homo sapien
tactagaggcatgagtgtctgcgct

SEQ ID NO: 1977790 - DNA, 25 bp, Homo sapien
ccagatgtgttatgtatgccctcaa

SEQ ID NO: 1977791 - DNA, 25 bp, Homo sapien
tacagcagtgacagtgacgacagtg

SEQ ID NO: 1977792 - DNA, 25 bp, Homo sapien
aaaactgcagtcaacaggttcttgg

SEQ ID NO: 1977793 - DNA, 25 bp, Homo sapien
gaaacgtgtgtgaggattcccagac

SEQ ID NO: 1977794 - DNA, 25 bp, Homo sapien
cctgagccctgcattgagatgccct

SEQ ID NO: 1977795 - DNA, 25 bp, Homo sapien
tcttggaaacgtgtgtgaggattcc

SEQ ID NO: 1977796 - DNA, 25 bp, Homo sapien
gactctgggcaaaacccatcagtgg

SEQ ID NO: 1977797 - DNA, 25 bp, Homo sapien
gtggccggtgggtgctcccgaagcc

SEQ ID NO: 1977798 - DNA, 25 bp, Homo sapien
agtggaaacagacctccttctcgtc

SEQ ID NO: 1977799 - DNA, 25 bp, Homo sapien
tctcgtctttaagtcacaggagcca

SEQ ID NO: 1977800 - DNA, 25 bp, Homo sapien
gcaacaaagacccagggatacctgg

SEQ ID NO: 1977801 - DNA, 25 bp, Homo sapien
ggcagcctgatgaggcctgagccat

SEQ ID NO: 1977802 - DNA, 25 bp, Homo sapien
tgggtcccagagaccaccatcctca

SEQ ID NO: 1977803 - DNA, 25 bp, Homo sapien
ctgagccatgaaggcactcagccct

SEQ ID NO: 1977804 - DNA, 25 bp, Homo sapien
gacgaggggttctctggatccccac

SEQ ID NO: 1977805 - DNA, 25 bp, Homo sapien
aggctggacgaggggttctctggat

SEQ ID NO: 1977806 - DNA, 25 bp, Homo sapien
ctggacgaggggttctctggatccc

SEQ ID NO: 1977807 - DNA, 25 bp, Homo sapien
ggacgaggggttctctggatcccca

SEQ ID NO: 1977808 - DNA, 25 bp, Homo sapien
caggcagagatcaggtggtgcctcc

SEQ ID NO: 1977809 - DNA, 25 bp, Homo sapien
cagagatcaggtggtgcctccccag

SEQ ID NO: 1977810 - DNA, 25 bp, Homo sapien
tccccagtggctacgactgtgtgcg

SEQ ID NO: 1977811 - DNA, 25 bp, Homo sapien
gtggctacgactgtgtgcgtctgct

SEQ ID NO: 1977812 - DNA, 25 bp, Homo sapien
ggcatatctgtcaagtgtatccgct

SEQ ID NO: 1977813 - DNA, 25 bp, Homo sapien
atctgtcaagtgtatccgctcatac

SEQ ID NO: 1977814 - DNA, 25 bp, Homo sapien
catatctgtcaagtgtatccgctca

SEQ ID NO: 1977815 - DNA, 25 bp, Homo sapien
tatctgtcaagtgtatccgctcata

SEQ ID NO: 1977816 - DNA, 25 bp, Homo sapien
catgcacacacatgcatgcacgtac

SEQ ID NO: 1977817 - DNA, 25 bp, Homo sapien
acatgcacacacatgcatgcacgta

SEQ ID NO: 1977818 - DNA, 25 bp, Homo sapien
cacagagtgacttccagtcacagca

SEQ ID NO: 1977819 - DNA, 25 bp, Homo sapien
agaggaagcaggtcgagggctcacg

SEQ ID NO: 1977820 - DNA, 25 bp, Homo sapien
tcacagcacattgggccggcagctg

SEQ ID NO: 1977821 - DNA, 25 bp, Homo sapien
ctgaccgtgcagtgatgtaaattca

SEQ ID NO: 1977822 - DNA, 25 bp, Homo sapien
ctgcggggagcgggaagcctctgcc

SEQ ID NO: 1977823 - DNA, 25 bp, Homo sapien
gcggggagcgggaagcctctgccat

SEQ ID NO: 1977824 - DNA, 25 bp, Homo sapien
gggaagcctctgccatcccccacca

SEQ ID NO: 1977825 - DNA, 25 bp, Homo sapien
gaagcctctgccatcccccaccaca

SEQ ID NO: 1977826 - DNA, 25 bp, Homo sapien
gacaccacggcacagtcgggaggct

SEQ ID NO: 1977827 - DNA, 25 bp, Homo sapien
ggaaggagacaccacggcacagtcg

SEQ ID NO: 1977828 - DNA, 25 bp, Homo sapien
aaggagacaccacggcacagtcggg

SEQ ID NO: 1977829 - DNA, 25 bp, Homo sapien
acagtcgggaggctgtgcaaaccag

SEQ ID NO: 1977830 - DNA, 25 bp, Homo sapien
tcacacacgtctgttcctcagaggc

SEQ ID NO: 1977831 - DNA, 25 bp, Homo sapien
ctcacacacgtctgttcctcagagg

SEQ ID NO: 1977832 - DNA, 25 bp, Homo sapien
ctctcacacacgtctgttcctcaga

SEQ ID NO: 1977833 - DNA, 25 bp, Homo sapien
tctcacacacgtctgttcctcagag

SEQ ID NO: 1977834 - DNA, 25 bp, Homo sapien
caccgtgaccaccacgacgatgatg

SEQ ID NO: 1977835 - DNA, 25 bp, Homo sapien
tgatgatttgggcgaactccagctc

SEQ ID NO: 1977836 - DNA, 25 bp, Homo sapien
tgatgatgatttgggcgaactccag

SEQ ID NO: 1977837 - DNA, 25 bp, Homo sapien
gatgatttgggcgaactccagctcc

SEQ ID NO: 1977838 - DNA, 25 bp, Homo sapien
tccggctctggttcgggcggttgat

SEQ ID NO: 1977839 - DNA, 25 bp, Homo sapien
cggttgatgaaggaccgcgtggaga

SEQ ID NO: 1977840 - DNA, 25 bp, Homo sapien
tgtagtggttcagcaggcagacgat

SEQ ID NO: 1977841 - DNA, 25 bp, Homo sapien
tgaaggaccgcgtggagactttgta

SEQ ID NO: 1977842 - DNA, 25 bp, Homo sapien
gctgacaagcccaccgccaacaacc

SEQ ID NO: 1977843 - DNA, 25 bp, Homo sapien
gccgacaagcccaccgctgacaagc

SEQ ID NO: 1977844 - DNA, 25 bp, Homo sapien
ccccaccgccgatccccaggaagct

SEQ ID NO: 1977845 - DNA, 25 bp, Homo sapien
aagctcccgaggccttaagctccag

SEQ ID NO: 1977846 - DNA, 25 bp, Homo sapien
tgaagagggatgctccgtaaggacc

SEQ ID NO: 1977847 - DNA, 25 bp, Homo sapien
tccacactgtggagactcggcctcg

SEQ ID NO: 1977848 - DNA, 25 bp, Homo sapien
cctggacaggctctgtaagtcaggg

SEQ ID NO: 1977849 - DNA, 25 bp, Homo sapien
ctgtgctcagcataccgcagggctc

SEQ ID NO: 1977850 - DNA, 25 bp, Homo sapien
ggtggcgttcacagcccgtaataca

SEQ ID NO: 1977851 - DNA, 25 bp, Homo sapien
cagaaaactccctgtgtgcctgcgc

SEQ ID NO: 1977852 - DNA, 25 bp, Homo sapien
gcaaagcagcgatgtctgagccttc

SEQ ID NO: 1977853 - DNA, 25 bp, Homo sapien
cagagaccccaagcgttctggagct

SEQ ID NO: 1977854 - DNA, 25 bp, Homo sapien
ggagagagaagccaacaccagggca

SEQ ID NO: 1977855 - DNA, 25 bp, Homo sapien
gagagaagccaacaccagggcaagt

SEQ ID NO: 1977856 - DNA, 25 bp, Homo sapien
gagagagaagccaacaccagggcaa

SEQ ID NO: 1977857 - DNA, 25 bp, Homo sapien
agagagaagccaacaccagggcaag

SEQ ID NO: 1977858 - DNA, 25 bp, Homo sapien
ctcttggttggtaagggtgtggcca

SEQ ID NO: 1977859 - DNA, 25 bp, Homo sapien
cagccagcgcttcccgggaaagggc

SEQ ID NO: 1977860 - DNA, 25 bp, Homo sapien
tctgccgccacatgacacagaagac

SEQ ID NO: 1977861 - DNA, 25 bp, Homo sapien
aagggcatcacacaaatctgccgcc

SEQ ID NO: 1977862 - DNA, 25 bp, Homo sapien
cctgataactggaaagaagccatga

SEQ ID NO: 1977863 - DNA, 25 bp, Homo sapien
cttgcaggggccctgataactggaa

SEQ ID NO: 1977864 - DNA, 25 bp, Homo sapien
agaagccatgaggatggcagcatct

SEQ ID NO: 1977865 - DNA, 25 bp, Homo sapien
taactggaaagaagccatgaggatg

SEQ ID NO: 1977866 - DNA, 25 bp, Homo sapien
ggctcctaatgaggctgcgctccac

SEQ ID NO: 1977867 - DNA, 25 bp, Homo sapien
aggaggctccccaacaatgcacagg

SEQ ID NO: 1977868 - DNA, 25 bp, Homo sapien
tgcacaggctcctaatgaggctgcg

SEQ ID NO: 1977869 - DNA, 25 bp, Homo sapien
cacaggctcctaatgaggctgcgct

SEQ ID NO: 1977870 - DNA, 25 bp, Homo sapien
ggctttgggacacccatcacgttca

SEQ ID NO: 1977871 - DNA, 25 bp, Homo sapien
ccgcatggcgacaaaggttgactgg

SEQ ID NO: 1977872 - DNA, 25 bp, Homo sapien
tgggacacacagtgtctaccgcatg

SEQ ID NO: 1977873 - DNA, 25 bp, Homo sapien
tgtctaccgcatggcgacaaaggtt

SEQ ID NO: 1977874 - DNA, 25 bp, Homo sapien
cacacctgagttgctagttttcatt

SEQ ID NO: 1977875 - DNA, 25 bp, Homo sapien
ttgctttgtctgtgatgtaattcac

SEQ ID NO: 1977876 - DNA, 25 bp, Homo sapien
tttcatccagaaatcactacttcca

SEQ ID NO: 1977877 - DNA, 25 bp, Homo sapien
tgctatgatgtaagcatttgctttg

SEQ ID NO: 1977878 - DNA, 25 bp, Homo sapien
tcagcaagaatgcacaaggatgcag

SEQ ID NO: 1977879 - DNA, 25 bp, Homo sapien
agcaagaatgcacaaggatgcagat

SEQ ID NO: 1977880 - DNA, 25 bp, Homo sapien
cagcaagaatgcacaaggatgcaga

SEQ ID NO: 1977881 - DNA, 25 bp, Homo sapien
ctcagcaagaatgcacaaggatgca

SEQ ID NO: 1977882 - DNA, 25 bp, Homo sapien
gttcaaatagctctccgggctgtgt

SEQ ID NO: 1977883 - DNA, 25 bp, Homo sapien
ggctgtgtctagaatattcatgccc

SEQ ID NO: 1977884 - DNA, 25 bp, Homo sapien
tcaaatagctctccgggctgtgtct

SEQ ID NO: 1977885 - DNA, 25 bp, Homo sapien
tagaatattcatgcccctttactgc

SEQ ID NO: 1977886 - DNA, 25 bp, Homo sapien
cacaatcgatttaatccctgtagga

SEQ ID NO: 1977887 - DNA, 25 bp, Homo sapien
tcaatctgggtaaaggtccctgtcc

SEQ ID NO: 1977888 - DNA, 25 bp, Homo sapien
ctgtttctataggtcaaaatggctg

SEQ ID NO: 1977889 - DNA, 25 bp, Homo sapien
ccctgtaggagttgataatgaagag

SEQ ID NO: 1977890 - DNA, 25 bp, Homo sapien
ggtggggcctggctgctcctcctgg

SEQ ID NO: 1977891 - DNA, 25 bp, Homo sapien
gctgggtggggcctggctgctcctc

SEQ ID NO: 1977892 - DNA, 25 bp, Homo sapien
ctggaggagcccagctgtgctgggt

SEQ ID NO: 1977893 - DNA, 25 bp, Homo sapien
gaggagcccagctgtgctgggtggg

SEQ ID NO: 1977894 - DNA, 25 bp, Homo sapien
ccatgtcagggcactgtggatctga

SEQ ID NO: 1977895 - DNA, 25 bp, Homo sapien
tgcatcaagagggctgacagccacc

SEQ ID NO: 1977896 - DNA, 25 bp, Homo sapien
tgtggatctgaggagcatgagtttc

SEQ ID NO: 1977897 - DNA, 25 bp, Homo sapien
aagtgcttgtcctcctccgcaacag

SEQ ID NO: 1977898 - DNA, 25 bp, Homo sapien
tgctctaggctaactctgtggcttc

SEQ ID NO: 1977899 - DNA, 25 bp, Homo sapien
gatcaacttaggttcgaacaccctg

SEQ ID NO: 1977900 - DNA, 25 bp, Homo sapien
gggcaaaccaggtacacagccatgc

SEQ ID NO: 1977901 - DNA, 25 bp, Homo sapien
tggcttctgcagagagggacttgtg

SEQ ID NO: 1977902 - DNA, 25 bp, Homo sapien
acagcactgttgacccagacacgtg

SEQ ID NO: 1977903 - DNA, 25 bp, Homo sapien
gtccccagcgagagacaggtgacag

SEQ ID NO: 1977904 - DNA, 25 bp, Homo sapien
tggccacgagtgaccatgtcaggct

SEQ ID NO: 1977905 - DNA, 25 bp, Homo sapien
cgtgcaaacccacagatggcaatgc

SEQ ID NO: 1977906 - DNA, 25 bp, Homo sapien
tgtgggtttctcaaacacccctgag

SEQ ID NO: 1977907 - DNA, 25 bp, Homo sapien
gcttttctaaacgtatgaggtgggc

SEQ ID NO: 1977908 - DNA, 25 bp, Homo sapien
aatgaacagtgtggcgctgaaaccc

SEQ ID NO: 1977909 - DNA, 25 bp, Homo sapien
tccagccgcagtgggaatgaacagt

SEQ ID NO: 1977910 - DNA, 25 bp, Homo sapien
tttgccaccgggaagagtggcctca

SEQ ID NO: 1977911 - DNA, 25 bp, Homo sapien
gaacccaaccgtgctggcactgtgg

SEQ ID NO: 1977912 - DNA, 25 bp, Homo sapien
tgttataagggtccaatgtcactct

SEQ ID NO: 1977913 - DNA, 25 bp, Homo sapien
tgttctagcagtcaaactaaggctg

SEQ ID NO: 1977914 - DNA, 25 bp, Homo sapien
gactctactgaatccagacttatta

SEQ ID NO: 1977915 - DNA, 25 bp, Homo sapien
ggctggctggtcaaatgactctact

SEQ ID NO: 1977916 - DNA, 25 bp, Homo sapien
gacttattattcctatatctatgga

SEQ ID NO: 1977917 - DNA, 25 bp, Homo sapien
gacgcagaacggttccaaatcttgc

SEQ ID NO: 1977918 - DNA, 25 bp, Homo sapien
tccatgggttcagcaggacagactg

SEQ ID NO: 1977919 - DNA, 25 bp, Homo sapien
tgacagcagtaaacacgccaaaggc

SEQ ID NO: 1977920 - DNA, 25 bp, Homo sapien
agtccctagccgatatccacagaag

SEQ ID NO: 1977921 - DNA, 25 bp, Homo sapien
tctgctgcgtacacttggaactcta

SEQ ID NO: 1977922 - DNA, 25 bp, Homo sapien
aggtgctacacagaccaatggcccg
